United States Patent Application Publication US 2005/0244851 A1 - sequence listing, part 112

SEQ ID NO: 4368283 - DNA, 25 bp, Homo sapien
gcactttgggaagcccagtggggag

SEQ ID NO: 4368284 - DNA, 25 bp, Homo sapien
ttgggaagcccagtggggaggatta

SEQ ID NO: 4368285 - DNA, 25 bp, Homo sapien
tacttgttactgtttctcggatcct

SEQ ID NO: 4368286 - DNA, 25 bp, Homo sapien
tgttactgtttctcggatcctatta

SEQ ID NO: 4368287 - DNA, 25 bp, Homo sapien
cttgttactgtttctcggatcctat

SEQ ID NO: 4368288 - DNA, 25 bp, Homo sapien
atacttgttactgtttctcggatcc

SEQ ID NO: 4368289 - DNA, 25 bp, Homo sapien
gttttggagcaaagaacaatgtcat

SEQ ID NO: 4368290 - DNA, 25 bp, Homo sapien
caagacttcgaaatgttggagtcca

SEQ ID NO: 4368291 - DNA, 25 bp, Homo sapien
ttggagtccaagttgttcatgaaca

SEQ ID NO: 4368292 - DNA, 25 bp, Homo sapien
gtatagcccttacatagtggattgt

SEQ ID NO: 4368293 - DNA, 25 bp, Homo sapien
tttccatgagtctcttctgcccaaa

SEQ ID NO: 4368294 - DNA, 25 bp, Homo sapien
gtttccatgagtctcttctgcccaa

SEQ ID NO: 4368295 - DNA, 25 bp, Homo sapien
ttccatgagtctcttctgcccaaag

SEQ ID NO: 4368296 - DNA, 25 bp, Homo sapien
gatcgttttggagctgcattgagga

SEQ ID NO: 4368297 - DNA, 25 bp, Homo sapien
tggtatgtaaggtttgatcgttttg

SEQ ID NO: 4368298 - DNA, 25 bp, Homo sapien
cagcatagaatttcctcacagccac

SEQ ID NO: 4368299 - DNA, 25 bp, Homo sapien
gcagctgagggccagcatagaattt

SEQ ID NO: 4368300 - DNA, 25 bp, Homo sapien
cttgtctctaaaggtctccactccc

SEQ ID NO: 4368301 - DNA, 25 bp, Homo sapien
ttgtctctaaaggtctccactccct

SEQ ID NO: 4368302 - DNA, 25 bp, Homo sapien
gtctctaaaggtctccactccctcc

SEQ ID NO: 4368303 - DNA, 25 bp, Homo sapien
tgtctctaaaggtctccactccctc

SEQ ID NO: 4368304 - DNA, 25 bp, Homo sapien
gatttatgtcagtgttagccttgtg

SEQ ID NO: 4368305 - DNA, 25 bp, Homo sapien
tacttacagctttggaggccaatcc

SEQ ID NO: 4368306 - DNA, 25 bp, Homo sapien
aaaggtgaagacatcggctatttcc

SEQ ID NO: 4368307 - DNA, 25 bp, Homo sapien
caaagtcatgacaaccagaggtagc

SEQ ID NO: 4368308 - DNA, 25 bp, Homo sapien
tccctgctccctgagaggtttataa

SEQ ID NO: 4368309 - DNA, 25 bp, Homo sapien
cactgatagatcacttgaaaaagcc

SEQ ID NO: 4368310 - DNA, 25 bp, Homo sapien
caaattatggcagttctgagctggc

SEQ ID NO: 4368311 - DNA, 25 bp, Homo sapien
tacctgtggaatcaagtcatctctt

SEQ ID NO: 4368312 - DNA, 25 bp, Homo sapien
tcatgtatgtcacccgacttcgcaa

SEQ ID NO: 4368313 - DNA, 25 bp, Homo sapien
gaatggtctagttaagttccacatg

SEQ ID NO: 4368314 - DNA, 25 bp, Homo sapien
caggtgactcataaccatgttgagg

SEQ ID NO: 4368315 - DNA, 25 bp, Homo sapien
cagtatattgagtggctaaaggaaa

SEQ ID NO: 4368316 - DNA, 25 bp, Homo sapien
gtgaaacctacagcacaccctctga

SEQ ID NO: 4368317 - DNA, 25 bp, Homo sapien
taattgtgccacgacttctggctga

SEQ ID NO: 4368318 - DNA, 25 bp, Homo sapien
cactgacttagagataaactgagct

SEQ ID NO: 4368319 - DNA, 25 bp, Homo sapien
gtactagccttgtgattttgccata

SEQ ID NO: 4368320 - DNA, 25 bp, Homo sapien
ccttgcagataaggcagggtacctc

SEQ ID NO: 4368321 - DNA, 25 bp, Homo sapien
catgttcgtgtcctctaatactagt

SEQ ID NO: 4368322 - DNA, 25 bp, Homo sapien
tactagtacagtttctgccaaagag

SEQ ID NO: 4368323 - DNA, 25 bp, Homo sapien
ggtacctccttaagtcatgttcgtg

SEQ ID NO: 4368324 - DNA, 25 bp, Homo sapien
tgaatccagccttgttcccgtgcag

SEQ ID NO: 4368325 - DNA, 25 bp, Homo sapien
caactgagagcattcggaggaaaca

SEQ ID NO: 4368326 - DNA, 25 bp, Homo sapien
taggcagtcaagaatcagagtcggt

SEQ ID NO: 4368327 - DNA, 25 bp, Homo sapien
gggaaacaaggctaccaggctacag

SEQ ID NO: 4368328 - DNA, 25 bp, Homo sapien
acttctgcaaacttggcaatccgta

SEQ ID NO: 4368329 - DNA, 25 bp, Homo sapien
tttataactgcctaataacaaactg

SEQ ID NO: 4368330 - DNA, 25 bp, Homo sapien
tatatatgtaccttgtaaacaagag

SEQ ID NO: 4368331 - DNA, 25 bp, Homo sapien
gactctttctaatagtgcagtgaaa

SEQ ID NO: 4368332 - DNA, 25 bp, Homo sapien
gtgaatgtcttacagaacaaactca

SEQ ID NO: 4368333 - DNA, 25 bp, Homo sapien
tgaataatgtgtggcagagattctg

SEQ ID NO: 4368334 - DNA, 25 bp, Homo sapien
tacataaacccatgtgccagctgcc

SEQ ID NO: 4368335 - DNA, 25 bp, Homo sapien
ctgtctcctagttccaaatatgggt

SEQ ID NO: 4368336 - DNA, 25 bp, Homo sapien
agtgtagcacaatggagcaaagcga

SEQ ID NO: 4368337 - DNA, 25 bp, Homo sapien
tggagcaaagcgattgttcaaaacg

SEQ ID NO: 4368338 - DNA, 25 bp, Homo sapien
gcaaagcgattgttcaaaacgttta

SEQ ID NO: 4368339 - DNA, 25 bp, Homo sapien
cacaatggagcaaagcgattgttca

SEQ ID NO: 4368340 - DNA, 25 bp, Homo sapien
ctgcattaactcttcaaggtcataa

SEQ ID NO: 4368341 - DNA, 25 bp, Homo sapien
gcattaactcttcaaggtcataact

SEQ ID NO: 4368342 - DNA, 25 bp, Homo sapien
ggtcataactaatgactttctcatg

SEQ ID NO: 4368343 - DNA, 25 bp, Homo sapien
gtgagtaatgacctgttgttgacat

SEQ ID NO: 4368344 - DNA, 25 bp, Homo sapien
gtagacagatagattgagctctctc

SEQ ID NO: 4368345 - DNA, 25 bp, Homo sapien
aatatgttcaacaggctacatggaa

SEQ ID NO: 4368346 - DNA, 25 bp, Homo sapien
gatgaagtgcaatcctgggtgctcc

SEQ ID NO: 4368347 - DNA, 25 bp, Homo sapien
gaggcatctaggtgaacatttcaaa

SEQ ID NO: 4368348 - DNA, 25 bp, Homo sapien
agagtagaaacttggtagggacatg

SEQ ID NO: 4368349 - DNA, 25 bp, Homo sapien
gacatggaccagaatgtgtgtgacc

SEQ ID NO: 4368350 - DNA, 25 bp, Homo sapien
cagccttgtgggaagaagagtagaa

SEQ ID NO: 4368351 - DNA, 25 bp, Homo sapien
gtcagaggcagccttgtgggaagaa

SEQ ID NO: 4368352 - DNA, 25 bp, Homo sapien
gattggtagcctttggataaaagcg

SEQ ID NO: 4368353 - DNA, 25 bp, Homo sapien
caatcagtcacagccaatgatgtgt

SEQ ID NO: 4368354 - DNA, 25 bp, Homo sapien
tcttttgcaaccagccagaggaact

SEQ ID NO: 4368355 - DNA, 25 bp, Homo sapien
aaagcgttacttgtccaatcagtca

SEQ ID NO: 4368356 - DNA, 25 bp, Homo sapien
gttagactctgaaaatgagcaggaa

SEQ ID NO: 4368357 - DNA, 25 bp, Homo sapien
tgagtagcaggaacacgaccaaaat

SEQ ID NO: 4368358 - DNA, 25 bp, Homo sapien
ggaaccacgaaaagctgagtagcag

SEQ ID NO: 4368359 - DNA, 25 bp, Homo sapien
cggaaaagctggaatgttagactct

SEQ ID NO: 4368360 - DNA, 25 bp, Homo sapien
gactttacttccaaatcagtgtcat

SEQ ID NO: 4368361 - DNA, 25 bp, Homo sapien
tccaaatcagtgtcatcctcatcag

SEQ ID NO: 4368362 - DNA, 25 bp, Homo sapien
tacttccaaatcagtgtcatcctca

SEQ ID NO: 4368363 - DNA, 25 bp, Homo sapien
cagagactttacttccaaatcagtg

SEQ ID NO: 4368364 - DNA, 25 bp, Homo sapien
caagaacatccacaactgtatctac

SEQ ID NO: 4368365 - DNA, 25 bp, Homo sapien
gcaagaacatccacaactgtatcta

SEQ ID NO: 4368366 - DNA, 25 bp, Homo sapien
ctttggatggttgtgagtcacgtga

SEQ ID NO: 4368367 - DNA, 25 bp, Homo sapien
cctttggcatatgagcgttctttgg

SEQ ID NO: 4368368 - DNA, 25 bp, Homo sapien
gggtatagggtagcccagtactgag

SEQ ID NO: 4368369 - DNA, 25 bp, Homo sapien
catatgagcgttctttggatggttg

SEQ ID NO: 4368370 - DNA, 25 bp, Homo sapien
cattaaatgcaaaggtctcttgatt

SEQ ID NO: 4368371 - DNA, 25 bp, Homo sapien
cttgtcattaaatgcaaaggtctct

SEQ ID NO: 4368372 - DNA, 25 bp, Homo sapien
tgtcattaaatgcaaaggtctcttg

SEQ ID NO: 4368373 - DNA, 25 bp, Homo sapien
aaatgcaaaggtctcttgatttttg

SEQ ID NO: 4368374 - DNA, 25 bp, Homo sapien
ggttcccatgaatcattcaatacct

SEQ ID NO: 4368375 - DNA, 25 bp, Homo sapien
tgtagtattctttagtttgttcttc

SEQ ID NO: 4368376 - DNA, 25 bp, Homo sapien
ttttggttcccatgaatcattcaat

SEQ ID NO: 4368377 - DNA, 25 bp, Homo sapien
tcctttttggttcccatgaatcatt

SEQ ID NO: 4368378 - DNA, 25 bp, Homo sapien
actctaaatcgcctacttctctggg

SEQ ID NO: 4368379 - DNA, 25 bp, Homo sapien
tttaagaagtgtgtagaagtgtgtg

SEQ ID NO: 4368380 - DNA, 25 bp, Homo sapien
gatgtgtgtaccatatcccagggtg

SEQ ID NO: 4368381 - DNA, 25 bp, Homo sapien
tcatagtcacacaaaacgtatctac

SEQ ID NO: 4368382 - DNA, 25 bp, Homo sapien
ataaaaaggaacaaaacaatggcat

SEQ ID NO: 4368383 - DNA, 25 bp, Homo sapien
cataaaaaggaacaaaacaatggca

SEQ ID NO: 4368384 - DNA, 25 bp, Homo sapien
gagaaagaactttagcgacattcaa

SEQ ID NO: 4368385 - DNA, 25 bp, Homo sapien
tatggtagaaccagaacagaaagtc

SEQ ID NO: 4368386 - DNA, 25 bp, Homo sapien
gaaggttcgtgatgccagagttgca

SEQ ID NO: 4368387 - DNA, 25 bp, Homo sapien
aaagacctcctggttttccatatgg

SEQ ID NO: 4368388 - DNA, 25 bp, Homo sapien
tctcttctaggctccagaagttcat

SEQ ID NO: 4368389 - DNA, 25 bp, Homo sapien
ttgtaagtttgagaactaaatctcc

SEQ ID NO: 4368390 - DNA, 25 bp, Homo sapien
gaactaaatctccatatctaatcag

SEQ ID NO: 4368391 - DNA, 25 bp, Homo sapien
tccatatctaatcaggatctcttct

SEQ ID NO: 4368392 - DNA, 25 bp, Homo sapien
gcaacaaaagaggtggcattatgaa

SEQ ID NO: 4368393 - DNA, 25 bp, Homo sapien
gatagaactaaatgtagcagcatga

SEQ ID NO: 4368394 - DNA, 25 bp, Homo sapien
catcattaagggaaaacaattacag

SEQ ID NO: 4368395 - DNA, 25 bp, Homo sapien
catttaatggagtagcatgcagcca

SEQ ID NO: 4368396 - DNA, 25 bp, Homo sapien
gttcctgcatattgtgtctagccat

SEQ ID NO: 4368397 - DNA, 25 bp, Homo sapien
tcctgttcctgcatattgtgtctag

SEQ ID NO: 4368398 - DNA, 25 bp, Homo sapien
tgttcctgcatattgtgtctagcca

SEQ ID NO: 4368399 - DNA, 25 bp, Homo sapien
tttcctgttcctgcatattgtgtct

SEQ ID NO: 4368400 - DNA, 25 bp, Homo sapien
gggcctcctctgcagtcaaagcgac

SEQ ID NO: 4368401 - DNA, 25 bp, Homo sapien
tcctctgcagtcaaagcgaccccac

SEQ ID NO: 4368402 - DNA, 25 bp, Homo sapien
gcagtcaaagcgaccccacttttat

SEQ ID NO: 4368403 - DNA, 25 bp, Homo sapien
tcaatactgccccagacactggagc

SEQ ID NO: 4368404 - DNA, 25 bp, Homo sapien
gctgcctgtcttcgtgctgctcagc

SEQ ID NO: 4368405 - DNA, 25 bp, Homo sapien
ctcagagtagggaaaaactctgcaa

SEQ ID NO: 4368406 - DNA, 25 bp, Homo sapien
cactcctgcttaggctgcctgtctt

SEQ ID NO: 4368407 - DNA, 25 bp, Homo sapien
tttcagtagactttgggaactcaga

SEQ ID NO: 4368408 - DNA, 25 bp, Homo sapien
ctgtggttatcaaagaggattggat

SEQ ID NO: 4368409 - DNA, 25 bp, Homo sapien
gaccataagaaaggatttgctctga

SEQ ID NO: 4368410 - DNA, 25 bp, Homo sapien
ttcatcactcagaccataagaaagg

SEQ ID NO: 4368411 - DNA, 25 bp, Homo sapien
tggaagacctgacatatacaatgag

SEQ ID NO: 4368412 - DNA, 25 bp, Homo sapien
taatacagtagtggtgaatgcaaga

SEQ ID NO: 4368413 - DNA, 25 bp, Homo sapien
taaacaaacttgacatactgtgcaa

SEQ ID NO: 4368414 - DNA, 25 bp, Homo sapien
tagggaataaggtgctgacccactt

SEQ ID NO: 4368415 - DNA, 25 bp, Homo sapien
aacataggcttaacacaaaatccag

SEQ ID NO: 4368416 - DNA, 25 bp, Homo sapien
tccaactgaaggagcacagactaag

SEQ ID NO: 4368417 - DNA, 25 bp, Homo sapien
cattcgatttatctggaaagcacca

SEQ ID NO: 4368418 - DNA, 25 bp, Homo sapien
tcatggaagtctgcctcattcgatt

SEQ ID NO: 4368419 - DNA, 25 bp, Homo sapien
gagcacagactaagtccttcaaggg

SEQ ID NO: 4368420 - DNA, 25 bp, Homo sapien
cttgaatttctgaacgggagagggc

SEQ ID NO: 4368421 - DNA, 25 bp, Homo sapien
ttgaatttctgaacgggagagggcc

SEQ ID NO: 4368422 - DNA, 25 bp, Homo sapien
agagttccaggtcaaatttgtttgg

SEQ ID NO: 4368423 - DNA, 25 bp, Homo sapien
cccagaaatcgtaacagatgttttg

SEQ ID NO: 4368424 - DNA, 25 bp, Homo sapien
ttccccagaaatcgtaacagatgtt

SEQ ID NO: 4368425 - DNA, 25 bp, Homo sapien
agatgttttgagtgaaaagagttcc

SEQ ID NO: 4368426 - DNA, 25 bp, Homo sapien
aatgtggttaatccgtcctaattga

SEQ ID NO: 4368427 - DNA, 25 bp, Homo sapien
acatataatgtggttaatccgtcct

SEQ ID NO: 4368428 - DNA, 25 bp, Homo sapien
ttctgcaaacttccgtagactcatc

SEQ ID NO: 4368429 - DNA, 25 bp, Homo sapien
caaacttccgtagactcatcagcat

SEQ ID NO: 4368430 - DNA, 25 bp, Homo sapien
tgatatctctcactcgtacttgcga

SEQ ID NO: 4368431 - DNA, 25 bp, Homo sapien
tcactcgtacttgcgatatgcgaca

SEQ ID NO: 4368432 - DNA, 25 bp, Homo sapien
gcgatatgcgacaggtggcaaataa

SEQ ID NO: 4368433 - DNA, 25 bp, Homo sapien
ccacattgatatctctcactcgtac

SEQ ID NO: 4368434 - DNA, 25 bp, Homo sapien
tcaccagaggacacttcagacacca

SEQ ID NO: 4368435 - DNA, 25 bp, Homo sapien
gacacttcagacaccactaggactg

SEQ ID NO: 4368436 - DNA, 25 bp, Homo sapien
gaggtgtggtcaaagtgtggtagag

SEQ ID NO: 4368437 - DNA, 25 bp, Homo sapien
taggactggtatggctttctcctct

SEQ ID NO: 4368438 - DNA, 25 bp, Homo sapien
tggcaaatgctctagtcttcatcca

SEQ ID NO: 4368439 - DNA, 25 bp, Homo sapien
aaatgctctagtcttcatccatgca

SEQ ID NO: 4368440 - DNA, 25 bp, Homo sapien
atatggcaaatgctctagtcttcat

SEQ ID NO: 4368441 - DNA, 25 bp, Homo sapien
tgctctagtcttcatccatgcacca

SEQ ID NO: 4368442 - DNA, 25 bp, Homo sapien
atatggcaaatgctctagtcttcat

SEQ ID NO: 4368443 - DNA, 25 bp, Homo sapien
tgctctagtcttcatccatgcacca

SEQ ID NO: 4368444 - DNA, 25 bp, Homo sapien
aaatgctctagtcttcatccatgca

SEQ ID NO: 4368445 - DNA, 25 bp, Homo sapien
tggcaaatgctctagtcttcatcca

SEQ ID NO: 4368446 - DNA, 25 bp, Homo sapien
gctctcatggcttcatggctcccag

SEQ ID NO: 4368447 - DNA, 25 bp, Homo sapien
cagtcccattggctctgaagggctc

SEQ ID NO: 4368448 - DNA, 25 bp, Homo sapien
ggctcccaggtcctcgtggctctga

SEQ ID NO: 4368449 - DNA, 25 bp, Homo sapien
tcgtggctctgaaggactgaggaat

SEQ ID NO: 4368450 - DNA, 25 bp, Homo sapien
cacctagttgaggatttgttaccga

SEQ ID NO: 4368451 - DNA, 25 bp, Homo sapien
ctagttgaggatttgttaccgaaag

SEQ ID NO: 4368452 - DNA, 25 bp, Homo sapien
tagttgaggatttgttaccgaaagc

SEQ ID NO: 4368453 - DNA, 25 bp, Homo sapien
tcacctagttgaggatttgttaccg

SEQ ID NO: 4368454 - DNA, 25 bp, Homo sapien
ctgcttgggagtccgtgaggagcaa

SEQ ID NO: 4368455 - DNA, 25 bp, Homo sapien
agctgcttgggagtccgtgaggagc

SEQ ID NO: 4368456 - DNA, 25 bp, Homo sapien
gggagtccgtgaggagcaaggcctt

SEQ ID NO: 4368457 - DNA, 25 bp, Homo sapien
cttgggagtccgtgaggagcaaggc

SEQ ID NO: 4368458 - DNA, 25 bp, Homo sapien
gaattctgggctaaataacaacaca

SEQ ID NO: 4368459 - DNA, 25 bp, Homo sapien
tatggaacagtgttactacgtagaa

SEQ ID NO: 4368460 - DNA, 25 bp, Homo sapien
gaaatgtttgggttacagtacataa

SEQ ID NO: 4368461 - DNA, 25 bp, Homo sapien
taaaacagtttcactacgacattta

SEQ ID NO: 4368462 - DNA, 25 bp, Homo sapien
gaggcttgtcctcttgttagctgca

SEQ ID NO: 4368463 - DNA, 25 bp, Homo sapien
gaaggtacgcatacatcccaggtag

SEQ ID NO: 4368464 - DNA, 25 bp, Homo sapien
agtttattgaaagaccacgattgca

SEQ ID NO: 4368465 - DNA, 25 bp, Homo sapien
caacagtccatagtagaaggtacgc

SEQ ID NO: 4368466 - DNA, 25 bp, Homo sapien
caagttatattgcagaggcagtgag

SEQ ID NO: 4368467 - DNA, 25 bp, Homo sapien
tattgattaggaagcacaggacatg

SEQ ID NO: 4368468 - DNA, 25 bp, Homo sapien
ttctacaaaagaaggtctcacctct

SEQ ID NO: 4368469 - DNA, 25 bp, Homo sapien
aaccctgttgtgaagtttaatgtga

SEQ ID NO: 4368470 - DNA, 25 bp, Homo sapien
ttattggtaaacaaggagctgacat

SEQ ID NO: 4368471 - DNA, 25 bp, Homo sapien
gaaaccataatgttctcctggcact

SEQ ID NO: 4368472 - DNA, 25 bp, Homo sapien
tttttatactcatggatatactcac

SEQ ID NO: 4368473 - DNA, 25 bp, Homo sapien
ggcactgagggaatatcaatggtat

SEQ ID NO: 4368474 - DNA, 25 bp, Homo sapien
cacttatgaacctgtagactataca

SEQ ID NO: 4368475 - DNA, 25 bp, Homo sapien
gatagtcaattaggccaaatcagtg

SEQ ID NO: 4368476 - DNA, 25 bp, Homo sapien
taacatgatctggtgtttgttacag

SEQ ID NO: 4368477 - DNA, 25 bp, Homo sapien
tgctactggcagttgaaagctgaca

SEQ ID NO: 4368478 - DNA, 25 bp, Homo sapien
gaaatgtggttaggatgctactggc

SEQ ID NO: 4368479 - DNA, 25 bp, Homo sapien
tagggcaccaacctgctagcagatg

SEQ ID NO: 4368480 - DNA, 25 bp, Homo sapien
tttaatatcacagacaatgggaggc

SEQ ID NO: 4368481 - DNA, 25 bp, Homo sapien
tagtggttcgcaggcattctaagca

SEQ ID NO: 4368482 - DNA, 25 bp, Homo sapien
ggcatggaagctagctagggcacca

SEQ ID NO: 4368483 - DNA, 25 bp, Homo sapien
agttacatcttatagcacccagtga

SEQ ID NO: 4368484 - DNA, 25 bp, Homo sapien
ttttaaggcggcagtctcaccagat

SEQ ID NO: 4368485 - DNA, 25 bp, Homo sapien
gcttacttgccgtggaatatcccgg

SEQ ID NO: 4368486 - DNA, 25 bp, Homo sapien
tgctctggcgacaatatggcttact

SEQ ID NO: 4368487 - DNA, 25 bp, Homo sapien
tgcaaagttgggaatacagtggcct

SEQ ID NO: 4368488 - DNA, 25 bp, Homo sapien
tgcaaagcccggtgcaagggcctct

SEQ ID NO: 4368489 - DNA, 25 bp, Homo sapien
cccgccgcgaggttacaatgctgaa

SEQ ID NO: 4368490 - DNA, 25 bp, Homo sapien
gtgcctagcagtcggtagaagaagc

SEQ ID NO: 4368491 - DNA, 25 bp, Homo sapien
gcctctttcaaaatgaacccactgg

SEQ ID NO: 4368492 - DNA, 25 bp, Homo sapien
tcttgcgggctctgtccggttgaca

SEQ ID NO: 4368493 - DNA, 25 bp, Homo sapien
ccgctcttgcgggctctgtccggtt

SEQ ID NO: 4368494 - DNA, 25 bp, Homo sapien
gctcttgcgggctctgtccggttga

SEQ ID NO: 4368495 - DNA, 25 bp, Homo sapien
ggctctgtccggttgacaggcgacc

SEQ ID NO: 4368496 - DNA, 25 bp, Homo sapien
ctcgccgccgcgtgcattaggagct

SEQ ID NO: 4368497 - DNA, 25 bp, Homo sapien
cgtgcattaggagctcgacgagtcc

SEQ ID NO: 4368498 - DNA, 25 bp, Homo sapien
gaaagttgaagagcgtttttctcgc

SEQ ID NO: 4368499 - DNA, 25 bp, Homo sapien
agctcgacgagtccgccctgggctt

SEQ ID NO: 4368500 - DNA, 25 bp, Homo sapien
ggcgggggaggggccgcgcagcagc

SEQ ID NO: 4368501 - DNA, 25 bp, Homo sapien
cgggggaggggccgcgcagcagcag

SEQ ID NO: 4368502 - DNA, 25 bp, Homo sapien
cgggcgggggaggggccgcgcagca

SEQ ID NO: 4368503 - DNA, 25 bp, Homo sapien
cgcgcagcagcagcggaagccagac

SEQ ID NO: 4368504 - DNA, 25 bp, Homo sapien
gctgcacagcgacatgcaacagtct

SEQ ID NO: 4368505 - DNA, 25 bp, Homo sapien
tggaatcatgactcccacaatgcct

SEQ ID NO: 4368506 - DNA, 25 bp, Homo sapien
tccattttccgtcgcgggcatcttg

SEQ ID NO: 4368507 - DNA, 25 bp, Homo sapien
tgaatgagttgtggcgcccacaatg

SEQ ID NO: 4368508 - DNA, 25 bp, Homo sapien
gaggaagtgcgaggaggtgctcgcc

SEQ ID NO: 4368509 - DNA, 25 bp, Homo sapien
attttcacagtttccccgcgccgct

SEQ ID NO: 4368510 - DNA, 25 bp, Homo sapien
ggtagttggtttcgcgtccctcagc

SEQ ID NO: 4368511 - DNA, 25 bp, Homo sapien
tcattgttcggactccggcgggtct

SEQ ID NO: 4368512 - DNA, 25 bp, Homo sapien
agcggcgcgcgggtcttcccggcgg

SEQ ID NO: 4368513 - DNA, 25 bp, Homo sapien
agtccctctgagtcgagcggcgcgc

SEQ ID NO: 4368514 - DNA, 25 bp, Homo sapien
gaaggtgtgagtccctctgagtcga

SEQ ID NO: 4368515 - DNA, 25 bp, Homo sapien
tgtgagtccctctgagtcgagcggc

SEQ ID NO: 4368516 - DNA, 25 bp, Homo sapien
gccaaatatgtgcacgcaaaggtta

SEQ ID NO: 4368517 - DNA, 25 bp, Homo sapien
tgcttgctacccataaattacgcat

SEQ ID NO: 4368518 - DNA, 25 bp, Homo sapien
tatgtgcacgcaaaggttaattctc

SEQ ID NO: 4368519 - DNA, 25 bp, Homo sapien
ctgcttgctacccataaattacgca

SEQ ID NO: 4368520 - DNA, 25 bp, Homo sapien
gaacagaaggttgggtgctttggat

SEQ ID NO: 4368521 - DNA, 25 bp, Homo sapien
tggtggcctgaaaatcttctaagaa

SEQ ID NO: 4368522 - DNA, 25 bp, Homo sapien
ggttgggtgctttggatggtggcct

SEQ ID NO: 4368523 - DNA, 25 bp, Homo sapien
agtctggactgctgttgggaggaac

SEQ ID NO: 4368524 - DNA, 25 bp, Homo sapien
gcagttcttcccatataatgtataa

SEQ ID NO: 4368525 - DNA, 25 bp, Homo sapien
cattaactcgttcagatggcagttc

SEQ ID NO: 4368526 - DNA, 25 bp, Homo sapien
tgaaggctgcattaactcgttcaga

SEQ ID NO: 4368527 - DNA, 25 bp, Homo sapien
gagttgaatagtgctgaaggctgca

SEQ ID NO: 4368528 - DNA, 25 bp, Homo sapien
aaacaatttaagttctagatgttcg

SEQ ID NO: 4368529 - DNA, 25 bp, Homo sapien
ctagatgttcgtgttttttaatgta

SEQ ID NO: 4368530 - DNA, 25 bp, Homo sapien
aaagttgtagtcgtactgtagtatt

SEQ ID NO: 4368531 - DNA, 25 bp, Homo sapien
gatccaccaagcttgattgattttt

SEQ ID NO: 4368532 - DNA, 25 bp, Homo sapien
tcagctgtgaggagattccctttca

SEQ ID NO: 4368533 - DNA, 25 bp, Homo sapien
aggctgataccaggccctactttta

SEQ ID NO: 4368534 - DNA, 25 bp, Homo sapien
aaattcggtgtcgaagggtctgcca

SEQ ID NO: 4368535 - DNA, 25 bp, Homo sapien
gggtctgccacgttttcatgcttgc

SEQ ID NO: 4368536 - DNA, 25 bp, Homo sapien
cacatccttcgaaaagctgccaagt

SEQ ID NO: 4368537 - DNA, 25 bp, Homo sapien
ctaaacatggctgttagtgtcacac

SEQ ID NO: 4368538 - DNA, 25 bp, Homo sapien
caattcgggacacaaaatggctaac

SEQ ID NO: 4368539 - DNA, 25 bp, Homo sapien
ttgctcacggccagacacggaatgt

SEQ ID NO: 4368540 - DNA, 25 bp, Homo sapien
taatcctacagacagttgatggtgc

SEQ ID NO: 4368541 - DNA, 25 bp, Homo sapien
ttagttgctgctcacttatggccac

SEQ ID NO: 4368542 - DNA, 25 bp, Homo sapien
gacctgcttctacaacatttggaaa

SEQ ID NO: 4368543 - DNA, 25 bp, Homo sapien
cagtccctttttgagtaaagcagca

SEQ ID NO: 4368544 - DNA, 25 bp, Homo sapien
catgctgtgagccagtgtagttttc

SEQ ID NO: 4368545 - DNA, 25 bp, Homo sapien
gaatcagcaggatctaaagacaggg

SEQ ID NO: 4368546 - DNA, 25 bp, Homo sapien
aggtgtcgtcaatatgtcttccaag

SEQ ID NO: 4368547 - DNA, 25 bp, Homo sapien
cctgaagctagtctttaatagggca

SEQ ID NO: 4368548 - DNA, 25 bp, Homo sapien
cattaggaggtgataaggattcaac

SEQ ID NO: 4368549 - DNA, 25 bp, Homo sapien
taacttatgtacttcctatgtcaaa

SEQ ID NO: 4368550 - DNA, 25 bp, Homo sapien
caagagaccggttgtaaaaactcag

SEQ ID NO: 4368551 - DNA, 25 bp, Homo sapien
cagtcctcaaggagccggttactaa

SEQ ID NO: 4368552 - DNA, 25 bp, Homo sapien
tgacttcctagtgacattgtgccaa

SEQ ID NO: 4368553 - DNA, 25 bp, Homo sapien
taagagcctaaaccgtggattcagc

SEQ ID NO: 4368554 - DNA, 25 bp, Homo sapien
tgcacattgcactacaggtctctgt

SEQ ID NO: 4368555 - DNA, 25 bp, Homo sapien
tactccatagatactaacggtagcc

SEQ ID NO: 4368556 - DNA, 25 bp, Homo sapien
gagagcatgtactttttccagcaag

SEQ ID NO: 4368557 - DNA, 25 bp, Homo sapien
ggagagcatgtactttttccagcaa

SEQ ID NO: 4368558 - DNA, 25 bp, Homo sapien
agagcatgtactttttccagcaagt

SEQ ID NO: 4368559 - DNA, 25 bp, Homo sapien
tctgggtatgagttatgtgtttaca

SEQ ID NO: 4368560 - DNA, 25 bp, Homo sapien
gttcttgttatagtctaattctggg

SEQ ID NO: 4368561 - DNA, 25 bp, Homo sapien
gtttgatttactgagccatgccact

SEQ ID NO: 4368562 - DNA, 25 bp, Homo sapien
tctgggtttttcttgacagcgtctg

SEQ ID NO: 4368563 - DNA, 25 bp, Homo sapien
gggttaacacctttagattgtcatg

SEQ ID NO: 4368564 - DNA, 25 bp, Homo sapien
ttgccaaaaatggtgccgtaaggct

SEQ ID NO: 4368565 - DNA, 25 bp, Homo sapien
tgttggtgcccacattttggaggaa

SEQ ID NO: 4368566 - DNA, 25 bp, Homo sapien
cagttggtatttggttagcagatgc

SEQ ID NO: 4368567 - DNA, 25 bp, Homo sapien
ataaagccagtattattttctttga

SEQ ID NO: 4368568 - DNA, 25 bp, Homo sapien
gataaagccagtattattttctttg

SEQ ID NO: 4368569 - DNA, 25 bp, Homo sapien
tcaacctgtggtcgcaattgacaga

SEQ ID NO: 4368570 - DNA, 25 bp, Homo sapien
ggctggacaacagactctccaaaaa

SEQ ID NO: 4368571 - DNA, 25 bp, Homo sapien
tctttgtgctcttactcctgggtcc

SEQ ID NO: 4368572 - DNA, 25 bp, Homo sapien
tgggtccctcattgtacagtgatca

SEQ ID NO: 4368573 - DNA, 25 bp, Homo sapien
atgacatgcagtttgaaagcacagg

SEQ ID NO: 4368574 - DNA, 25 bp, Homo sapien
ccttttatatgacatgcagtttgaa

SEQ ID NO: 4368575 - DNA, 25 bp, Homo sapien
tatatgacatgcagtttgaaagcac

SEQ ID NO: 4368576 - DNA, 25 bp, Homo sapien
tttgaaagcacagggtatgcaaaaa

SEQ ID NO: 4368577 - DNA, 25 bp, Homo sapien
tatccccgttttcggttgcagtatc

SEQ ID NO: 4368578 - DNA, 25 bp, Homo sapien
tttcaacttctctagttggaaataa

SEQ ID NO: 4368579 - DNA, 25 bp, Homo sapien
cttctctagttggaaataaatcctc

SEQ ID NO: 4368580 - DNA, 25 bp, Homo sapien
ttcggttgcagtatctgttgctgac

SEQ ID NO: 4368581 - DNA, 25 bp, Homo sapien
tgtcaactgtcattcatagaaaatg

SEQ ID NO: 4368582 - DNA, 25 bp, Homo sapien
cacagttcattaatcacatataaag

SEQ ID NO: 4368583 - DNA, 25 bp, Homo sapien
ccttgaggaatgtctatgaattact

SEQ ID NO: 4368584 - DNA, 25 bp, Homo sapien
gagaaatcgtttagcaggaaatcac

SEQ ID NO: 4368585 - DNA, 25 bp, Homo sapien
ggtacgtttttccagttagcatcta

SEQ ID NO: 4368586 - DNA, 25 bp, Homo sapien
ttttgtatgcatgtatccgtatgtg

SEQ ID NO: 4368587 - DNA, 25 bp, Homo sapien
tgtatcatttgatagccactttatg

SEQ ID NO: 4368588 - DNA, 25 bp, Homo sapien
tagcatgttaaaagaagtctcagac

SEQ ID NO: 4368589 - DNA, 25 bp, Homo sapien
tgttgaaaacggaaggctagtacca

SEQ ID NO: 4368590 - DNA, 25 bp, Homo sapien
gctttgctggagtaccttatcagga

SEQ ID NO: 4368591 - DNA, 25 bp, Homo sapien
gaggaaatagcttaatctgaacagc

SEQ ID NO: 4368592 - DNA, 25 bp, Homo sapien
tctgaacagcacgaaacttgacaaa

SEQ ID NO: 4368593 - DNA, 25 bp, Homo sapien
tagccactggttaagtcgaacgcca

SEQ ID NO: 4368594 - DNA, 25 bp, Homo sapien
attgtagccactggttaagtcgaac

SEQ ID NO: 4368595 - DNA, 25 bp, Homo sapien
ttgtccagccacattgtagccactg

SEQ ID NO: 4368596 - DNA, 25 bp, Homo sapien
tgtccagccacattgtagccactgg

SEQ ID NO: 4368597 - DNA, 25 bp, Homo sapien
tcttctcccagggtgttgtgctgcg

SEQ ID NO: 4368598 - DNA, 25 bp, Homo sapien
tgagctctgtgccaattgttcctct

SEQ ID NO: 4368599 - DNA, 25 bp, Homo sapien
cccagggtgttgtgctgcgtggtca

SEQ ID NO: 4368600 - DNA, 25 bp, Homo sapien
gctctgtgccaattgttcctcttct

SEQ ID NO: 4368601 - DNA, 25 bp, Homo sapien
tcagcaatttgggacgtcaagacca

SEQ ID NO: 4368602 - DNA, 25 bp, Homo sapien
tatacttgccacctctgtaagattg

SEQ ID NO: 4368603 - DNA, 25 bp, Homo sapien
taatctcttgtggtgtatacttgcc

SEQ ID NO: 4368604 - DNA, 25 bp, Homo sapien
ggaaaatgtttactcatagctgaac

SEQ ID NO: 4368605 - DNA, 25 bp, Homo sapien
tgagacatagctacaactgacagga

SEQ ID NO: 4368606 - DNA, 25 bp, Homo sapien
cctttggattccgtgatggctgaga

SEQ ID NO: 4368607 - DNA, 25 bp, Homo sapien
gaacctacttttgcataaccactga

SEQ ID NO: 4368608 - DNA, 25 bp, Homo sapien
tagcaagatcccagatgtaaacggg

SEQ ID NO: 4368609 - DNA, 25 bp, Homo sapien
gcaggcctgcacctataccactttc

SEQ ID NO: 4368610 - DNA, 25 bp, Homo sapien
aggcctgcacctataccactttcct

SEQ ID NO: 4368611 - DNA, 25 bp, Homo sapien
caggcctgcacctataccactttcc

SEQ ID NO: 4368612 - DNA, 25 bp, Homo sapien
ggcctgcacctataccactttcctg

SEQ ID NO: 4368613 - DNA, 25 bp, Homo sapien
ggaaataggactttgatatatgcat

SEQ ID NO: 4368614 - DNA, 25 bp, Homo sapien
taaaagtgacaacaccaagagggga

SEQ ID NO: 4368615 - DNA, 25 bp, Homo sapien
taaataaagtgagtagtgtttggta

SEQ ID NO: 4368616 - DNA, 25 bp, Homo sapien
ttcctatgtggaaataggactttga

SEQ ID NO: 4368617 - DNA, 25 bp, Homo sapien
ttagccggcagcagcaattgcagca

SEQ ID NO: 4368618 - DNA, 25 bp, Homo sapien
gcagcaatatccaaagtgtattgaa

SEQ ID NO: 4368619 - DNA, 25 bp, Homo sapien
cttgatatgatcatagaaggttttt

SEQ ID NO: 4368620 - DNA, 25 bp, Homo sapien
tatccaaagtgtattgaatgtcttt

SEQ ID NO: 4368621 - DNA, 25 bp, Homo sapien
agtataatcaagagtcaggcatcca

SEQ ID NO: 4368622 - DNA, 25 bp, Homo sapien
ttttaaaacatagtgcacatcagca

SEQ ID NO: 4368623 - DNA, 25 bp, Homo sapien
caggcatccaattgaggtctgaaca

SEQ ID NO: 4368624 - DNA, 25 bp, Homo sapien
gcctgtgctacatggattggtgaaa

SEQ ID NO: 4368625 - DNA, 25 bp, Homo sapien
ttctgcagaggataatgtgataccc

SEQ ID NO: 4368626 - DNA, 25 bp, Homo sapien
ttgccgagttctgcagaggataatg

SEQ ID NO: 4368627 - DNA, 25 bp, Homo sapien
agaggataatgtgataccctcagca

SEQ ID NO: 4368628 - DNA, 25 bp, Homo sapien
tgtgagtcatcttgccgagttctgc

SEQ ID NO: 4368629 - DNA, 25 bp, Homo sapien
aggttctctgtatttggaaagtctc

SEQ ID NO: 4368630 - DNA, 25 bp, Homo sapien
taggttctctgtatttggaaagtct

SEQ ID NO: 4368631 - DNA, 25 bp, Homo sapien
tgttaggttctctgtatttggaaag

SEQ ID NO: 4368632 - DNA, 25 bp, Homo sapien
ttaggttctctgtatttggaaagtc

SEQ ID NO: 4368633 - DNA, 25 bp, Homo sapien
ggtgccaccgcagtctttaacactg

SEQ ID NO: 4368634 - DNA, 25 bp, Homo sapien
tactcattcactaaacagggaattc

SEQ ID NO: 4368635 - DNA, 25 bp, Homo sapien
agaggcctgctcttgaaaaaaccaa

SEQ ID NO: 4368636 - DNA, 25 bp, Homo sapien
caacaggctctagccaacatgcagt

SEQ ID NO: 4368637 - DNA, 25 bp, Homo sapien
caccttcctgttgcaatgcatgatg

SEQ ID NO: 4368638 - DNA, 25 bp, Homo sapien
attacacgtgtgatgggatgtttta

SEQ ID NO: 4368639 - DNA, 25 bp, Homo sapien
cacgtgtgatgggatgttttaattc

SEQ ID NO: 4368640 - DNA, 25 bp, Homo sapien
gcaatgcatgatgggcaggctcaat

SEQ ID NO: 4368641 - DNA, 25 bp, Homo sapien
ttaccctgcataaatgttggagatt

SEQ ID NO: 4368642 - DNA, 25 bp, Homo sapien
caaatgaccactcttgtaaataagt

SEQ ID NO: 4368643 - DNA, 25 bp, Homo sapien
tacttaaatgtattacgtatgccac

SEQ ID NO: 4368644 - DNA, 25 bp, Homo sapien
aagtatggcaaattgacagtcattc

SEQ ID NO: 4368645 - DNA, 25 bp, Homo sapien
tatgtttcgacagccccatccttga

SEQ ID NO: 4368646 - DNA, 25 bp, Homo sapien
tgcatcgattggtgttgaaggtcct

SEQ ID NO: 4368647 - DNA, 25 bp, Homo sapien
gaagcttcattatgcttggagcaca

SEQ ID NO: 4368648 - DNA, 25 bp, Homo sapien
tgttgggtgcaacatcctgtcctgc

SEQ ID NO: 4368649 - DNA, 25 bp, Homo sapien
ggtgtgaggaattttatcagacatc

SEQ ID NO: 4368650 - DNA, 25 bp, Homo sapien
tgtgggccgtatcgtttctgttgca

SEQ ID NO: 4368651 - DNA, 25 bp, Homo sapien
taattagaaggtgtagatcaagggt

SEQ ID NO: 4368652 - DNA, 25 bp, Homo sapien
ggcaaactttcttatagggtcagac

SEQ ID NO: 4368653 - DNA, 25 bp, Homo sapien
taatagattgtaagacgtggtgagg

SEQ ID NO: 4368654 - DNA, 25 bp, Homo sapien
gctttaagtaccatgttgttaagga

SEQ ID NO: 4368655 - DNA, 25 bp, Homo sapien
ggattctcatgaagtgccatagact

SEQ ID NO: 4368656 - DNA, 25 bp, Homo sapien
tagatgagagcgtgcatgcacagtc

SEQ ID NO: 4368657 - DNA, 25 bp, Homo sapien
gcacaacacaaactctctcaataca

SEQ ID NO: 4368658 - DNA, 25 bp, Homo sapien
cagtaacaatagacagcacaacaca

SEQ ID NO: 4368659 - DNA, 25 bp, Homo sapien
tgccatttctgagacacagtaacaa

SEQ ID NO: 4368660 - DNA, 25 bp, Homo sapien
aacatgttattcaaaagggattgcc

SEQ ID NO: 4368661 - DNA, 25 bp, Homo sapien
tgcttaaatgcttcatcacagtcac

SEQ ID NO: 4368662 - DNA, 25 bp, Homo sapien
cacagtcacattcaaaatagtgact

SEQ ID NO: 4368663 - DNA, 25 bp, Homo sapien
gtttgcttaaatgcttcatcacagt

SEQ ID NO: 4368664 - DNA, 25 bp, Homo sapien
tcacagtcacattcaaaatagtgac

SEQ ID NO: 4368665 - DNA, 25 bp, Homo sapien
taactgcttatagccttagaaagcc

SEQ ID NO: 4368666 - DNA, 25 bp, Homo sapien
tagattattacattacgggttggaa

SEQ ID NO: 4368667 - DNA, 25 bp, Homo sapien
aagaagaaagcagcactgtcatcag

SEQ ID NO: 4368668 - DNA, 25 bp, Homo sapien
gatgttgcagctagtaaaggatatt

SEQ ID NO: 4368669 - DNA, 25 bp, Homo sapien
tatagcgtgtgtgcaaactcttgag

SEQ ID NO: 4368670 - DNA, 25 bp, Homo sapien
aactcttgagggttgattatgctgc

SEQ ID NO: 4368671 - DNA, 25 bp, Homo sapien
gttgctatcgcaacaatcctggcag

SEQ ID NO: 4368672 - DNA, 25 bp, Homo sapien
tagcatgttggaacgtctagggaga

SEQ ID NO: 4368673 - DNA, 25 bp, Homo sapien
gtggcacagagttagcactccatac

SEQ ID NO: 4368674 - DNA, 25 bp, Homo sapien
cagactgagcaaaattgcttgcaaa

SEQ ID NO: 4368675 - DNA, 25 bp, Homo sapien
tttgttaaggctaatacaatgacag

SEQ ID NO: 4368676 - DNA, 25 bp, Homo sapien
gaaacctgtataatagtaagatctt

SEQ ID NO: 4368677 - DNA, 25 bp, Homo sapien
aagaattagtgtatccagccttcac

SEQ ID NO: 4368678 - DNA, 25 bp, Homo sapien
tcagctggaaagatacgccatcctt

SEQ ID NO: 4368679 - DNA, 25 bp, Homo sapien
tcatctgctgaaaggacaaatgtgc

SEQ ID NO: 4368680 - DNA, 25 bp, Homo sapien
ggacagcttgtagtttgccaggatt

SEQ ID NO: 4368681 - DNA, 25 bp, Homo sapien
attattactgcagtagttgactttg

SEQ ID NO: 4368682 - DNA, 25 bp, Homo sapien
tcttgggctgcaatttgttttatgc

SEQ ID NO: 4368683 - DNA, 25 bp, Homo sapien
tatgtattttgtcttgggctgcaat

SEQ ID NO: 4368684 - DNA, 25 bp, Homo sapien
ctgcttgtagttgcttaaaattatg

SEQ ID NO: 4368685 - DNA, 25 bp, Homo sapien
gtatggaaaaataaagtgaaattgc

SEQ ID NO: 4368686 - DNA, 25 bp, Homo sapien
tatggaaaaataaagtgaaattgcc

SEQ ID NO: 4368687 - DNA, 25 bp, Homo sapien
tgtatggaaaaataaagtgaaattg

SEQ ID NO: 4368688 - DNA, 25 bp, Homo sapien
ctgtatggaaaaataaagtgaaatt

SEQ ID NO: 4368689 - DNA, 25 bp, Homo sapien
ctcggtggcatacactctccagcca

SEQ ID NO: 4368690 - DNA, 25 bp, Homo sapien
tcggtggcatacactctccagccat

SEQ ID NO: 4368691 - DNA, 25 bp, Homo sapien
gtcttctcaactctcgaaccattcc

SEQ ID NO: 4368692 - DNA, 25 bp, Homo sapien
ctcaactctcgaaccattcccaggg

SEQ ID NO: 4368693 - DNA, 25 bp, Homo sapien
gctgcaaagtccccctcagatgtat

SEQ ID NO: 4368694 - DNA, 25 bp, Homo sapien
tgctgcaaagtccccctcagatgta

SEQ ID NO: 4368695 - DNA, 25 bp, Homo sapien
gaggtaggcatctagagctataaac

SEQ ID NO: 4368696 - DNA, 25 bp, Homo sapien
cagtctgagagaatggttggcatga

SEQ ID NO: 4368697 - DNA, 25 bp, Homo sapien
cttggtttatggctgaacatgtagt

SEQ ID NO: 4368698 - DNA, 25 bp, Homo sapien
ctgcagtctgagagaatggttggca

SEQ ID NO: 4368699 - DNA, 25 bp, Homo sapien
ctgagaggctgatgagctgtttcta

SEQ ID NO: 4368700 - DNA, 25 bp, Homo sapien
gctgatgagctgtttctaaaaccat

SEQ ID NO: 4368701 - DNA, 25 bp, Homo sapien
gagaggctgatgagctgtttctaaa

SEQ ID NO: 4368702 - DNA, 25 bp, Homo sapien
gaggctgatgagctgtttctaaaac

SEQ ID NO: 4368703 - DNA, 25 bp, Homo sapien
gatatttcagctccgagctagagaa

SEQ ID NO: 4368704 - DNA, 25 bp, Homo sapien
tttcagctccgagctagagaaatga

SEQ ID NO: 4368705 - DNA, 25 bp, Homo sapien
agccagatatttcagctccgagcta

SEQ ID NO: 4368706 - DNA, 25 bp, Homo sapien
ccagatatttcagctccgagctaga

SEQ ID NO: 4368707 - DNA, 25 bp, Homo sapien
tccaggaattgtacacggcatcgaa

SEQ ID NO: 4368708 - DNA, 25 bp, Homo sapien
tactctttactcaagcacctagaaa

SEQ ID NO: 4368709 - DNA, 25 bp, Homo sapien
tctaacttcacctaattacttgctg

SEQ ID NO: 4368710 - DNA, 25 bp, Homo sapien
agctaaattttgcaccatctccagg

SEQ ID NO: 4368711 - DNA, 25 bp, Homo sapien
gatgatattctccattataagagcc

SEQ ID NO: 4368712 - DNA, 25 bp, Homo sapien
ctaactctctttgttctggctgcag

SEQ ID NO: 4368713 - DNA, 25 bp, Homo sapien
tgatagaacagttctcagtgtcgct

SEQ ID NO: 4368714 - DNA, 25 bp, Homo sapien
tgcagccttctgatagaacagttct

SEQ ID NO: 4368715 - DNA, 25 bp, Homo sapien
gagtttgatgttgatctgagcccaa

SEQ ID NO: 4368716 - DNA, 25 bp, Homo sapien
cattattgcagatgcttgtttcctg

SEQ ID NO: 4368717 - DNA, 25 bp, Homo sapien
gaatcttccactgtgccattattgc

SEQ ID NO: 4368718 - DNA, 25 bp, Homo sapien
gcccaagactgcagtttccagtaca

SEQ ID NO: 4368719 - DNA, 25 bp, Homo sapien
ttcctcaaggtgaagggcagtagaa

SEQ ID NO: 4368720 - DNA, 25 bp, Homo sapien
cctcaaggtgaagggcagtagaaat

SEQ ID NO: 4368721 - DNA, 25 bp, Homo sapien
gcatcttcctcaaggtgaagggcag

SEQ ID NO: 4368722 - DNA, 25 bp, Homo sapien
tcttcctcaaggtgaagggcagtag

SEQ ID NO: 4368723 - DNA, 25 bp, Homo sapien
tgttgtgtttctgggtcctgccgga

SEQ ID NO: 4368724 - DNA, 25 bp, Homo sapien
tttctgggtcctgccggaagtggag

SEQ ID NO: 4368725 - DNA, 25 bp, Homo sapien
gctgttgtgtttctgggtcctgccg

SEQ ID NO: 4368726 - DNA, 25 bp, Homo sapien
tgtgtttctgggtcctgccggaagt

SEQ ID NO: 4368727 - DNA, 25 bp, Homo sapien
tcagctacatatatcaccaggtggg

SEQ ID NO: 4368728 - DNA, 25 bp, Homo sapien
tgtgatcatcaatctccatgatccc

SEQ ID NO: 4368729 - DNA, 25 bp, Homo sapien
catggagatcagctacatatatcac

SEQ ID NO: 4368730 - DNA, 25 bp, Homo sapien
catgatccctcttcatggagatcag

SEQ ID NO: 4368731 - DNA, 25 bp, Homo sapien
tgccaagagtatttgccagcctgag

SEQ ID NO: 4368732 - DNA, 25 bp, Homo sapien
taggctccccaagtagaaaccaagc

SEQ ID NO: 4368733 - DNA, 25 bp, Homo sapien
tacagatcatactgatagcctggcc

SEQ ID NO: 4368734 - DNA, 25 bp, Homo sapien
tgcctgagcagtcagcagacctgcg

SEQ ID NO: 4368735 - DNA, 25 bp, Homo sapien
gccccttggtaatgacagtaggttc

SEQ ID NO: 4368736 - DNA, 25 bp, Homo sapien
attttcattgtctctgaggtacggg

SEQ ID NO: 4368737 - DNA, 25 bp, Homo sapien
tcattgtctctgaggtacgggacca

SEQ ID NO: 4368738 - DNA, 25 bp, Homo sapien
cccttggtaatgacagtaggttcat

SEQ ID NO: 4368739 - DNA, 25 bp, Homo sapien
attcagatagacaacccccctcctc

SEQ ID NO: 4368740 - DNA, 25 bp, Homo sapien
tccttgatcactttagtcacttctg

SEQ ID NO: 4368741 - DNA, 25 bp, Homo sapien
ttcagatagacaacccccctcctcc

SEQ ID NO: 4368742 - DNA, 25 bp, Homo sapien
ttagtcacttctgctaactttgcca

SEQ ID NO: 4368743 - DNA, 25 bp, Homo sapien
gactgtctctgttcgggtccaacca

SEQ ID NO: 4368744 - DNA, 25 bp, Homo sapien
actgtctctgttcgggtccaaccat

SEQ ID NO: 4368745 - DNA, 25 bp, Homo sapien
ggactgtctctgttcgggtccaacc

SEQ ID NO: 4368746 - DNA, 25 bp, Homo sapien
cccatagattctaggactggtttag

SEQ ID NO: 4368747 - DNA, 25 bp, Homo sapien
tatcccatagattctaggactggtt

SEQ ID NO: 4368748 - DNA, 25 bp, Homo sapien
tagattctaggactggtttagaaga

SEQ ID NO: 4368749 - DNA, 25 bp, Homo sapien
catagattctaggactggtttagaa

SEQ ID NO: 4368750 - DNA, 25 bp, Homo sapien
ggctcagcctctaagaagtctccac

SEQ ID NO: 4368751 - DNA, 25 bp, Homo sapien
tggctcagcctctaagaagtctcca

SEQ ID NO: 4368752 - DNA, 25 bp, Homo sapien
ttggctcagcctctaagaagtctcc

SEQ ID NO: 4368753 - DNA, 25 bp, Homo sapien
tttccaagaaactgagtgagtggcc

SEQ ID NO: 4368754 - DNA, 25 bp, Homo sapien
aatgccagaaatagtgccattgatt

SEQ ID NO: 4368755 - DNA, 25 bp, Homo sapien
tgggttctgtaggtacttgtggaaa

SEQ ID NO: 4368756 - DNA, 25 bp, Homo sapien
ctgtaggataatgggttctgtaggt

SEQ ID NO: 4368757 - DNA, 25 bp, Homo sapien
ttccttcacttgcttcatggaaaac

SEQ ID NO: 4368758 - DNA, 25 bp, Homo sapien
tctcagtctccttggctgctccatt

SEQ ID NO: 4368759 - DNA, 25 bp, Homo sapien
ttctcagtctccttggctgctccat

SEQ ID NO: 4368760 - DNA, 25 bp, Homo sapien
cacttgcttcatggaaaactttctc

SEQ ID NO: 4368761 - DNA, 25 bp, Homo sapien
gtcacttctgtgcctttagcagttc

SEQ ID NO: 4368762 - DNA, 25 bp, Homo sapien
ctcactcccagctgtcacttctgtg

SEQ ID NO: 4368763 - DNA, 25 bp, Homo sapien
cacttctgtgcctttagcagttctg

SEQ ID NO: 4368764 - DNA, 25 bp, Homo sapien
tttagcagttctgactctgtctaat

SEQ ID NO: 4368765 - DNA, 25 bp, Homo sapien
ccaacatgagtacacttggaaagtg

SEQ ID NO: 4368766 - DNA, 25 bp, Homo sapien
tgaaccatccccttgttgcttgcta

SEQ ID NO: 4368767 - DNA, 25 bp, Homo sapien
cctcattggaagaatgactaccaac

SEQ ID NO: 4368768 - DNA, 25 bp, Homo sapien
ttttcctagtccctcattggaagaa

SEQ ID NO: 4368769 - DNA, 25 bp, Homo sapien
tgtgctctgctgcacttgtcaccac

SEQ ID NO: 4368770 - DNA, 25 bp, Homo sapien
taccctagctatacaggccaatgcg

SEQ ID NO: 4368771 - DNA, 25 bp, Homo sapien
gccaatgcgcatttcctaagatgca

SEQ ID NO: 4368772 - DNA, 25 bp, Homo sapien
aatcttcactgacatgcctgcctct

SEQ ID NO: 4368773 - DNA, 25 bp, Homo sapien
ggtagcactatctcatgaataaggg

SEQ ID NO: 4368774 - DNA, 25 bp, Homo sapien
tcgtcaaatacttacaagggaattg

SEQ ID NO: 4368775 - DNA, 25 bp, Homo sapien
gggtagatttgagacaaactttaga

SEQ ID NO: 4368776 - DNA, 25 bp, Homo sapien
cattctatcaatcaacgtggatcta

SEQ ID NO: 4368777 - DNA, 25 bp, Homo sapien
tgctgctgtgattatggaaacaact

SEQ ID NO: 4368778 - DNA, 25 bp, Homo sapien
tttaagaagtggcacagtagtattc

SEQ ID NO: 4368779 - DNA, 25 bp, Homo sapien
cttccaactggcctgcattttcagt

SEQ ID NO: 4368780 - DNA, 25 bp, Homo sapien
tcaggccacatggttggctttgctg

SEQ ID NO: 4368781 - DNA, 25 bp, Homo sapien
caatggaacaaagctctgcacatac

SEQ ID NO: 4368782 - DNA, 25 bp, Homo sapien
atgcagaatgattatctttgttgat

SEQ ID NO: 4368783 - DNA, 25 bp, Homo sapien
gaaatgccacatcagtagaggacaa

SEQ ID NO: 4368784 - DNA, 25 bp, Homo sapien
gttgatatctgtttaggaaatctgg

SEQ ID NO: 4368785 - DNA, 25 bp, Homo sapien
gaagaaatggagctgggctcaaagt

SEQ ID NO: 4368786 - DNA, 25 bp, Homo sapien
agaaatggagctgggctcaaagttt

SEQ ID NO: 4368787 - DNA, 25 bp, Homo sapien
ctgaagaaatggagctgggctcaaa

SEQ ID NO: 4368788 - DNA, 25 bp, Homo sapien
tctgaagaaatggagctgggctcaa

SEQ ID NO: 4368789 - DNA, 25 bp, Homo sapien
ttaacagacatccatgagggacaga

SEQ ID NO: 4368790 - DNA, 25 bp, Homo sapien
ggctgatcaacccagtatacagtgg

SEQ ID NO: 4368791 - DNA, 25 bp, Homo sapien
ctggttggagccactttaacagaca

SEQ ID NO: 4368792 - DNA, 25 bp, Homo sapien
tatacagtgggttgcaagtgtgcat

SEQ ID NO: 4368793 - DNA, 25 bp, Homo sapien
aacaccaggtggtaaatcctgggca

SEQ ID NO: 4368794 - DNA, 25 bp, Homo sapien
tctgggaacatgaagcagttgaact

SEQ ID NO: 4368795 - DNA, 25 bp, Homo sapien
ctgtgaagagtcctaagtctttctg

SEQ ID NO: 4368796 - DNA, 25 bp, Homo sapien
agcactggagtcatgtggaatctcc

SEQ ID NO: 4368797 - DNA, 25 bp, Homo sapien
tttcagtaactctaacaacattcat

SEQ ID NO: 4368798 - DNA, 25 bp, Homo sapien
tgctttcagtaactctaacaacatt

SEQ ID NO: 4368799 - DNA, 25 bp, Homo sapien
gctttcagtaactctaacaacattc

SEQ ID NO: 4368800 - DNA, 25 bp, Homo sapien
ctgctttcagtaactctaacaacat

SEQ ID NO: 4368801 - DNA, 25 bp, Homo sapien
tctctgggagcgctgtttttcccac

SEQ ID NO: 4368802 - DNA, 25 bp, Homo sapien
catctctctgggagcgctgtttttc

SEQ ID NO: 4368803 - DNA, 25 bp, Homo sapien
ctgtgttcatctctctgggagcgct

SEQ ID NO: 4368804 - DNA, 25 bp, Homo sapien
tagagcaaggcggaagaatgcagca

SEQ ID NO: 4368805 - DNA, 25 bp, Homo sapien
ggagatttgcctgccacagttgcat

SEQ ID NO: 4368806 - DNA, 25 bp, Homo sapien
gatttgcctgccacagttgcatttc

SEQ ID NO: 4368807 - DNA, 25 bp, Homo sapien
tgcattggtcacaggtacacctctc

SEQ ID NO: 4368808 - DNA, 25 bp, Homo sapien
cctccaacccaccaatcacatccat

SEQ ID NO: 4368809 - DNA, 25 bp, Homo sapien
tatacagcttgtaagtggccctagc

SEQ ID NO: 4368810 - DNA, 25 bp, Homo sapien
tcccctgggtgatctgaatgcacat

SEQ ID NO: 4368811 - DNA, 25 bp, Homo sapien
ggccctagctgacctttgaacccag

SEQ ID NO: 4368812 - DNA, 25 bp, Homo sapien
tagaaatgcaaacgctttggcccca

SEQ ID NO: 4368813 - DNA, 25 bp, Homo sapien
actagaggtaattgtaactaatcac

SEQ ID NO: 4368814 - DNA, 25 bp, Homo sapien
tgttcctgaacagctaatatttcat

SEQ ID NO: 4368815 - DNA, 25 bp, Homo sapien
ggcaagaaaacgagtttgtcagtaa

SEQ ID NO: 4368816 - DNA, 25 bp, Homo sapien
taattaaggaagtcccaagtctgta

SEQ ID NO: 4368817 - DNA, 25 bp, Homo sapien
aatgacaggcgttcccagctaggga

SEQ ID NO: 4368818 - DNA, 25 bp, Homo sapien
tagaggctcctgctacggactggtc

SEQ ID NO: 4368819 - DNA, 25 bp, Homo sapien
taagaagggcgaaacagagttctcc

SEQ ID NO: 4368820 - DNA, 25 bp, Homo sapien
tgcttggagcttgaaaacacctggc

SEQ ID NO: 4368821 - DNA, 25 bp, Homo sapien
gaggctgaacacactcggcctcggc

SEQ ID NO: 4368822 - DNA, 25 bp, Homo sapien
ctcgccgccgactccggtagcagcg

SEQ ID NO: 4368823 - DNA, 25 bp, Homo sapien
ctcgcgggccaatcgcctgccagca

SEQ ID NO: 4368824 - DNA, 25 bp, Homo sapien
tcactttgccgagatagctggcgga

SEQ ID NO: 4368825 - DNA, 25 bp, Homo sapien
gcggagtgcggactcgccccggtgc

SEQ ID NO: 4368826 - DNA, 25 bp, Homo sapien
tccgcccaccctctagggagctccg

SEQ ID NO: 4368827 - DNA, 25 bp, Homo sapien
tagggagctccgctctcccgcctaa

SEQ ID NO: 4368828 - DNA, 25 bp, Homo sapien
agctcggcggaggcacgcccctcgc

SEQ ID NO: 4368829 - DNA, 25 bp, Homo sapien
tgcagaagcgcacgagtctgcggcc

SEQ ID NO: 4368830 - DNA, 25 bp, Homo sapien
acgccgaacgggacgcgctgcagaa

SEQ ID NO: 4368831 - DNA, 25 bp, Homo sapien
gttagacgccccgaaactgagctgc

SEQ ID NO: 4368832 - DNA, 25 bp, Homo sapien
gttcctgaactacgcggacgccgaa

SEQ ID NO: 4368833 - DNA, 25 bp, Homo sapien
agcagcctccccaagctagagccct

SEQ ID NO: 4368834 - DNA, 25 bp, Homo sapien
ctcgctgcgcctctggcgcgctctg

SEQ ID NO: 4368835 - DNA, 25 bp, Homo sapien
ggaagatgcccccaattaagttgat

SEQ ID NO: 4368836 - DNA, 25 bp, Homo sapien
ccctgcagagcgagtttcccttgac

SEQ ID NO: 4368837 - DNA, 25 bp, Homo sapien
ggcttgcccgatagcccagttcggt

SEQ ID NO: 4368838 - DNA, 25 bp, Homo sapien
tgcgcgccctgttgtgtaagctcgg

SEQ ID NO: 4368839 - DNA, 25 bp, Homo sapien
ctcgggaaagcgcagtcggaaagtt

SEQ ID NO: 4368840 - DNA, 25 bp, Homo sapien
acggagaagttgctggcttgcccga

SEQ ID NO: 4368841 - DNA, 25 bp, Homo sapien
tttccgatgcttgctgcgcccctgg

SEQ ID NO: 4368842 - DNA, 25 bp, Homo sapien
gatccagttcgcctgctcccttccg

SEQ ID NO: 4368843 - DNA, 25 bp, Homo sapien
tccgctcgctggcttttccgatgct

SEQ ID NO: 4368844 - DNA, 25 bp, Homo sapien
gctggcgtgggcgagcccctgcgcg

SEQ ID NO: 4368845 - DNA, 25 bp, Homo sapien
gacttcttgtacgtgctgactctgc

SEQ ID NO: 4368846 - DNA, 25 bp, Homo sapien
tcaaatgcgccttgaccaagacggg

SEQ ID NO: 4368847 - DNA, 25 bp, Homo sapien
tacatgttcaatttggctctggccg

SEQ ID NO: 4368848 - DNA, 25 bp, Homo sapien
tacctgccggctgtctacatcttgg

SEQ ID NO: 4368849 - DNA, 25 bp, Homo sapien
taaactttgctggtcaggttgtagc

SEQ ID NO: 4368850 - DNA, 25 bp, Homo sapien
cagattatgatgtggacctgtcacc

SEQ ID NO: 4368851 - DNA, 25 bp, Homo sapien
tttattgaagaagctcacagtcctt

SEQ ID NO: 4368852 - DNA, 25 bp, Homo sapien
cagctggaatttggctagtgacaat

SEQ ID NO: 4368853 - DNA, 25 bp, Homo sapien
ttaaagtaacacactaccagcgagt

SEQ ID NO: 4368854 - DNA, 25 bp, Homo sapien
tgtcatgttttagcagtcaagtggg

SEQ ID NO: 4368855 - DNA, 25 bp, Homo sapien
tcaggaggtttagagtattgtcact

SEQ ID NO: 4368856 - DNA, 25 bp, Homo sapien
aaaaggcagctggtataatcggtta

SEQ ID NO: 4368857 - DNA, 25 bp, Homo sapien
ttcctttgacatccccacactgttg

SEQ ID NO: 4368858 - DNA, 25 bp, Homo sapien
ttaaaaggagaggattcctttgaca

SEQ ID NO: 4368859 - DNA, 25 bp, Homo sapien
tcagcccacaatattaaaaggagag

SEQ ID NO: 4368860 - DNA, 25 bp, Homo sapien
ctttgacatccccacactgttggct

SEQ ID NO: 4368861 - DNA, 25 bp, Homo sapien
gaatgaatgaacgaagaccagacct

SEQ ID NO: 4368862 - DNA, 25 bp, Homo sapien
tgagaacgctccaatccatgtttac

SEQ ID NO: 4368863 - DNA, 25 bp, Homo sapien
aagaccagacctgagaacgctccaa

SEQ ID NO: 4368864 - DNA, 25 bp, Homo sapien
catgtttacaccctccagtggaact

SEQ ID NO: 4368865 - DNA, 25 bp, Homo sapien
cttctctgcttttaggcttggtgac

SEQ ID NO: 4368866 - DNA, 25 bp, Homo sapien
gcttggtgacctatgcttcagggag

SEQ ID NO: 4368867 - DNA, 25 bp, Homo sapien
aggcaggtggctccacattctgttg

SEQ ID NO: 4368868 - DNA, 25 bp, Homo sapien
tgttgggggtctaccttgtctacca

SEQ ID NO: 4368869 - DNA, 25 bp, Homo sapien
tagtattggttgtgctttccttcag

SEQ ID NO: 4368870 - DNA, 25 bp, Homo sapien
gtttctggaaccaataatggcttta

SEQ ID NO: 4368871 - DNA, 25 bp, Homo sapien
ggtagagctgtcttattggaacaat

SEQ ID NO: 4368872 - DNA, 25 bp, Homo sapien
actagtttgagggatgaaaaagcta

SEQ ID NO: 4368873 - DNA, 25 bp, Homo sapien
tgacataagcagaagaaccatcccc

SEQ ID NO: 4368874 - DNA, 25 bp, Homo sapien
caactgggcaaccattctctaaaga

SEQ ID NO: 4368875 - DNA, 25 bp, Homo sapien
tgcaactgggcaaccattctctaaa

SEQ ID NO: 4368876 - DNA, 25 bp, Homo sapien
attgcaactgggcaaccattctcta

SEQ ID NO: 4368877 - DNA, 25 bp, Homo sapien
cattctgaaccttacacttgcttct

SEQ ID NO: 4368878 - DNA, 25 bp, Homo sapien
ccagcaataagtctaaagtttgctt

SEQ ID NO: 4368879 - DNA, 25 bp, Homo sapien
ctgaggtcagcagctacaagtaatt

SEQ ID NO: 4368880 - DNA, 25 bp, Homo sapien
taaacattctgaaccttacacttgc

SEQ ID NO: 4368881 - DNA, 25 bp, Homo sapien
tcctatttccctgagcgtgatttga

SEQ ID NO: 4368882 - DNA, 25 bp, Homo sapien
ctgatgagcaagcaccagaacccag

SEQ ID NO: 4368883 - DNA, 25 bp, Homo sapien
tccctgagcgtgatttgattccata

SEQ ID NO: 4368884 - DNA, 25 bp, Homo sapien
gtaggaggattataggtctgctctg

SEQ ID NO: 4368885 - DNA, 25 bp, Homo sapien
catcataagcttgtgttcatcagtc

SEQ ID NO: 4368886 - DNA, 25 bp, Homo sapien
tcataagcttgtgttcatcagtcat

SEQ ID NO: 4368887 - DNA, 25 bp, Homo sapien
tctcatcataagcttgtgttcatca

SEQ ID NO: 4368888 - DNA, 25 bp, Homo sapien
gaactctcatcataagcttgtgttc

SEQ ID NO: 4368889 - DNA, 25 bp, Homo sapien
ttcggtgagatagaaagacagcttc

SEQ ID NO: 4368890 - DNA, 25 bp, Homo sapien
ccggctgttcggtgagatagaaaga

SEQ ID NO: 4368891 - DNA, 25 bp, Homo sapien
tgagatagaaagacagcttcagctg

SEQ ID NO: 4368892 - DNA, 25 bp, Homo sapien
ttcctccaccggctgttcggtgaga

SEQ ID NO: 4368893 - DNA, 25 bp, Homo sapien
attgtgatctcttgaactggaccag

SEQ ID NO: 4368894 - DNA, 25 bp, Homo sapien
cagacggttggttgtgtccccatcc

SEQ ID NO: 4368895 - DNA, 25 bp, Homo sapien
cattgtgccggttgacaccttggtc

SEQ ID NO: 4368896 - DNA, 25 bp, Homo sapien
tcccctctcatatggcctcgtttgg

SEQ ID NO: 4368897 - DNA, 25 bp, Homo sapien
tctgtatgcaacctgaatgttcctg

SEQ ID NO: 4368898 - DNA, 25 bp, Homo sapien
caggtgaatcgttcctaaatagttc

SEQ ID NO: 4368899 - DNA, 25 bp, Homo sapien
tctctcttggttaggcaaggcttcc

SEQ ID NO: 4368900 - DNA, 25 bp, Homo sapien
tcagctgtgcacttctgagaaccca

SEQ ID NO: 4368901 - DNA, 25 bp, Homo sapien
ttaaattcatatgtacacagaggca

SEQ ID NO: 4368902 - DNA, 25 bp, Homo sapien
gacgtgtatttcaaactggcattcc

SEQ ID NO: 4368903 - DNA, 25 bp, Homo sapien
agtgaacaggatttgacactgagtc

SEQ ID NO: 4368904 - DNA, 25 bp, Homo sapien
cattatggccaatcttctaaagacg

SEQ ID NO: 4368905 - DNA, 25 bp, Homo sapien
tttgtccttaggcactggttgcagt

SEQ ID NO: 4368906 - DNA, 25 bp, Homo sapien
gtatataaggtttcacttcacacat

SEQ ID NO: 4368907 - DNA, 25 bp, Homo sapien
tggttgcagttgaagtatataaggt

SEQ ID NO: 4368908 - DNA, 25 bp, Homo sapien
cacataaaacctactggcttgatcg

SEQ ID NO: 4368909 - DNA, 25 bp, Homo sapien
cttcaaagcatcctttcttccccat

SEQ ID NO: 4368910 - DNA, 25 bp, Homo sapien
cttgcatcttcaaagcatcctttct

SEQ ID NO: 4368911 - DNA, 25 bp, Homo sapien
tgcatcttcaaagcatcctttcttc

SEQ ID NO: 4368912 - DNA, 25 bp, Homo sapien
ttgcatcttcaaagcatcctttctt

SEQ ID NO: 4368913 - DNA, 25 bp, Homo sapien
ttatattcacccttctttctccaca

SEQ ID NO: 4368914 - DNA, 25 bp, Homo sapien
ctttggcaacagaaatgccgttctc

SEQ ID NO: 4368915 - DNA, 25 bp, Homo sapien
cagaaatgccgttctctttccacag

SEQ ID NO: 4368916 - DNA, 25 bp, Homo sapien
tcttttatattcacccttctttctc

SEQ ID NO: 4368917 - DNA, 25 bp, Homo sapien
tgaatctcctgcaccttttaaagac

SEQ ID NO: 4368918 - DNA, 25 bp, Homo sapien
tctcccctgcgggaactctgttcat

SEQ ID NO: 4368919 - DNA, 25 bp, Homo sapien
ttatttctcccctgcgggaactctg

SEQ ID NO: 4368920 - DNA, 25 bp, Homo sapien
aatctcctgcaccttttaaagactc

SEQ ID NO: 4368921 - DNA, 25 bp, Homo sapien
cctggaagtcttaagtttaacatca

SEQ ID NO: 4368922 - DNA, 25 bp, Homo sapien
aacatcagcttttggactcatcagc

SEQ ID NO: 4368923 - DNA, 25 bp, Homo sapien
ttaacatcagcttttggactcatca

SEQ ID NO: 4368924 - DNA, 25 bp, Homo sapien
agtttaacatcagcttttggactca

SEQ ID NO: 4368925 - DNA, 25 bp, Homo sapien
cccgccaccttgaaaacgacatgtt

SEQ ID NO: 4368926 - DNA, 25 bp, Homo sapien
aattccttgaacgtacactacggat

SEQ ID NO: 4368927 - DNA, 25 bp, Homo sapien
ggcccgccaccttgaaaacgacatg

SEQ ID NO: 4368928 - DNA, 25 bp, Homo sapien
acactacggattgttcttcttcaga

SEQ ID NO: 4368929 - DNA, 25 bp, Homo sapien
gtggacacctactccacaaagcaca

SEQ ID NO: 4368930 - DNA, 25 bp, Homo sapien
gcctcatgtgattcgctcgtctcgg

SEQ ID NO: 4368931 - DNA, 25 bp, Homo sapien
tagtgtggacacctactccacaaag

SEQ ID NO: 4368932 - DNA, 25 bp, Homo sapien
cacacccgaccctattcacttttca

SEQ ID NO: 4368933 - DNA, 25 bp, Homo sapien
gtagttactgcccaaatacctgatg

SEQ ID NO: 4368934 - DNA, 25 bp, Homo sapien
ggtgagatttgatatcatgcaacaa

SEQ ID NO: 4368935 - DNA, 25 bp, Homo sapien
ggtaaagtcttatgcgaaagagagt

SEQ ID NO: 4368936 - DNA, 25 bp, Homo sapien
tatgattgaggaactaacagaagag

SEQ ID NO: 4368937 - DNA, 25 bp, Homo sapien
gagacatagttaagacagttttact

SEQ ID NO: 4368938 - DNA, 25 bp, Homo sapien
gttttactgagttcatccaatttcc

SEQ ID NO: 4368939 - DNA, 25 bp, Homo sapien
gacagaacaactcagacaacagcaa

SEQ ID NO: 4368940 - DNA, 25 bp, Homo sapien
tctctgagagtttaggtagtcaagg

SEQ ID NO: 4368941 - DNA, 25 bp, Homo sapien
cctggcaactttgtgctgcactgca

SEQ ID NO: 4368942 - DNA, 25 bp, Homo sapien
tgtaacccaaatttagcagcctggc

SEQ ID NO: 4368943 - DNA, 25 bp, Homo sapien
catctttcagcaggtgcctttccat

SEQ ID NO: 4368944 - DNA, 25 bp, Homo sapien
tatttacagagagaaggttatttgc

SEQ ID NO: 4368945 - DNA, 25 bp, Homo sapien
tatttgtgaggcatataattgacat

SEQ ID NO: 4368946 - DNA, 25 bp, Homo sapien
taattgacatgggactagttttccc

SEQ ID NO: 4368947 - DNA, 25 bp, Homo sapien
ttgtagcaagaaattcacaaaggaa

SEQ ID NO: 4368948 - DNA, 25 bp, Homo sapien
tacgaatcgataagaaaaagatgtt

SEQ ID NO: 4368949 - DNA, 25 bp, Homo sapien
gctgttctcatgctacaaggtgcaa

SEQ ID NO: 4368950 - DNA, 25 bp, Homo sapien
tggtcctttacgcaaaaatgtctga

SEQ ID NO: 4368951 - DNA, 25 bp, Homo sapien
ttgaaagacttactggagccactgc

SEQ ID NO: 4368952 - DNA, 25 bp, Homo sapien
gattccttaaaccagaccctgtggc

SEQ ID NO: 4368953 - DNA, 25 bp, Homo sapien
gtcactgcgcccggcaggaaaattc

SEQ ID NO: 4368954 - DNA, 25 bp, Homo sapien
aaattctttttaatgcaacagtgca

SEQ ID NO: 4368955 - DNA, 25 bp, Homo sapien
ttttaatgcaacagtgcaatttctc

SEQ ID NO: 4368956 - DNA, 25 bp, Homo sapien
gcaacagtgcaatttctctcattct

SEQ ID NO: 4368957 - DNA, 25 bp, Homo sapien
gcctaaggcctctgataataactga

SEQ ID NO: 4368958 - DNA, 25 bp, Homo sapien
gggcagctaagacagcagggtccta

SEQ ID NO: 4368959 - DNA, 25 bp, Homo sapien
ggtcatttctcaagggactgtcagg

SEQ ID NO: 4368960 - DNA, 25 bp, Homo sapien
aattgtggcatctttctggtactga

SEQ ID NO: 4368961 - DNA, 25 bp, Homo sapien
gaagagctatttcttggacacagga

SEQ ID NO: 4368962 - DNA, 25 bp, Homo sapien
caggagtgagttcagagtcccgacc

SEQ ID NO: 4368963 - DNA, 25 bp, Homo sapien
tgggagtgcacaccttagcccacag

SEQ ID NO: 4368964 - DNA, 25 bp, Homo sapien
ttggcaccatttgggcagagcagtc

SEQ ID NO: 4368965 - DNA, 25 bp, Homo sapien
taaaacgcttggtggacattacaca

SEQ ID NO: 4368966 - DNA, 25 bp, Homo sapien
tgtgcccaaggacttcacgctgcag

SEQ ID NO: 4368967 - DNA, 25 bp, Homo sapien
tctagttgtggcatcgcaggcaaat

SEQ ID NO: 4368968 - DNA, 25 bp, Homo sapien
tggaggttaactagcaaacgcagcg

SEQ ID NO: 4368969 - DNA, 25 bp, Homo sapien
cctccgatgcggacggtgaaaccag

SEQ ID NO: 4368970 - DNA, 25 bp, Homo sapien
agccagcgctgacgcagctccaccg

SEQ ID NO: 4368971 - DNA, 25 bp, Homo sapien
gaaaccagggagcagtgacatcagg

SEQ ID NO: 4368972 - DNA, 25 bp, Homo sapien
gcagtgacatcaggacggggagcca

SEQ ID NO: 4368973 - DNA, 25 bp, Homo sapien
ggtgaaacgaattccaagtggccca

SEQ ID NO: 4368974 - DNA, 25 bp, Homo sapien
gcgggcgccctgagacttctggatt

SEQ ID NO: 4368975 - DNA, 25 bp, Homo sapien
tgagcatgccctgaactaactgcgg

SEQ ID NO: 4368976 - DNA, 25 bp, Homo sapien
caactctgcggtttcttgcggacca

SEQ ID NO: 4368977 - DNA, 25 bp, Homo sapien
tgataacgggagttggcaagaccac

SEQ ID NO: 4368978 - DNA, 25 bp, Homo sapien
gctgcagtgcacagagtcggtcaga

SEQ ID NO: 4368979 - DNA, 25 bp, Homo sapien
aaagcggcctgcatgcttcctacag

SEQ ID NO: 4368980 - DNA, 25 bp, Homo sapien
cagagtagcgtttctgtggcgaacg

SEQ ID NO: 4368981 - DNA, 25 bp, Homo sapien
tgcgcgcggcgagtaggaagccctc

SEQ ID NO: 4368982 - DNA, 25 bp, Homo sapien
cgcggcgagtaggaagccctcgccc

SEQ ID NO: 4368983 - DNA, 25 bp, Homo sapien
cgcgcggcgagtaggaagccctcgc

SEQ ID NO: 4368984 - DNA, 25 bp, Homo sapien
gctgcgcgcggcgagtaggaagccc

SEQ ID NO: 4368985 - DNA, 25 bp, Homo sapien
cggcggtgggcgcacgttccgcggg

SEQ ID NO: 4368986 - DNA, 25 bp, Homo sapien
acgttccgcggggactcatgccacg

SEQ ID NO: 4368987 - DNA, 25 bp, Homo sapien
ctgtgggagagagcgcgatgggccg

SEQ ID NO: 4368988 - DNA, 25 bp, Homo sapien
cgatgggccgcggcggtgggcgcac

SEQ ID NO: 4368989 - DNA, 25 bp, Homo sapien
agctccagccgtcgcctcgcgcagg

SEQ ID NO: 4368990 - DNA, 25 bp, Homo sapien
tgccgcagctaggagctccagccgt

SEQ ID NO: 4368991 - DNA, 25 bp, Homo sapien
ccgggctgccgcagctaggagctcc

SEQ ID NO: 4368992 - DNA, 25 bp, Homo sapien
gtcgcctcgcgcaggctgcgggcat

SEQ ID NO: 4368993 - DNA, 25 bp, Homo sapien
gagctgccccttcatggagacgtcg

SEQ ID NO: 4368994 - DNA, 25 bp, Homo sapien
cgttagggcgcagtatcggcagctt

SEQ ID NO: 4368995 - DNA, 25 bp, Homo sapien
cgtgacgggctccttcatcgagaag

SEQ ID NO: 4368996 - DNA, 25 bp, Homo sapien
gattggagaccactttgcattggcc

SEQ ID NO: 4368997 - DNA, 25 bp, Homo sapien
taggtagggaacaagagaacccatc

SEQ ID NO: 4368998 - DNA, 25 bp, Homo sapien
aaccatcaaggtcgaggaagccctg

SEQ ID NO: 4368999 - DNA, 25 bp, Homo sapien
gacaagttggatgacactactccca

SEQ ID NO: 4369000 - DNA, 25 bp, Homo sapien
gaagtccgggagaaccatatgaagg

SEQ ID NO: 4369001 - DNA, 25 bp, Homo sapien
tcatgtcaagtactgtctggagggt

SEQ ID NO: 4369002 - DNA, 25 bp, Homo sapien
gcaggacctctttatagtctaggat

SEQ ID NO: 4369003 - DNA, 25 bp, Homo sapien
tgctgggtgcgttaatcacctccgc

SEQ ID NO: 4369004 - DNA, 25 bp, Homo sapien
taaaatgctgccaagtatctaagaa

SEQ ID NO: 4369005 - DNA, 25 bp, Homo sapien
ttgaggatgccggttcgttacatgg

SEQ ID NO: 4369006 - DNA, 25 bp, Homo sapien
tagtcttgtattagaatggatgatg

SEQ ID NO: 4369007 - DNA, 25 bp, Homo sapien
cgtgtttgaggatgccggttcgtta

SEQ ID NO: 4369008 - DNA, 25 bp, Homo sapien
gggatacgtgtttgaggatgccggt

SEQ ID NO: 4369009 - DNA, 25 bp, Homo sapien
tgttgtcagtaatccgacttcggca

SEQ ID NO: 4369010 - DNA, 25 bp, Homo sapien
tttttgtgttgtcagtaatccgact

SEQ ID NO: 4369011 - DNA, 25 bp, Homo sapien
tccgacttcggcagaaagctgcttt

SEQ ID NO: 4369012 - DNA, 25 bp, Homo sapien
tcagtaatccgacttcggcagaaag

SEQ ID NO: 4369013 - DNA, 25 bp, Homo sapien
tgtgtaattaaattgtgggcccaaa

SEQ ID NO: 4369014 - DNA, 25 bp, Homo sapien
tgcgcccggctagaatgttatgttt

SEQ ID NO: 4369015 - DNA, 25 bp, Homo sapien
taaatatgacgtggttcaatgacag

SEQ ID NO: 4369016 - DNA, 25 bp, Homo sapien
ccaggaaatttggagtgccagtgaa

SEQ ID NO: 4369017 - DNA, 25 bp, Homo sapien
tcttcaatactttctaaagataaag

SEQ ID NO: 4369018 - DNA, 25 bp, Homo sapien
ctttctaaagataaagtgcttgtct

SEQ ID NO: 4369019 - DNA, 25 bp, Homo sapien
aaagataaagtgcttgtcttgttca

SEQ ID NO: 4369020 - DNA, 25 bp, Homo sapien
tctacagttttctcttcaatacttt

SEQ ID NO: 4369021 - DNA, 25 bp, Homo sapien
attcacttgcattctcatgaactct

SEQ ID NO: 4369022 - DNA, 25 bp, Homo sapien
caggagcgatcccactattgttcag

SEQ ID NO: 4369023 - DNA, 25 bp, Homo sapien
ggagcgatcccactattgttcagca

SEQ ID NO: 4369024 - DNA, 25 bp, Homo sapien
tcacaggagcgatcccactattgtt

SEQ ID NO: 4369025 - DNA, 25 bp, Homo sapien
gagcgatcccactattgttcagcac

SEQ ID NO: 4369026 - DNA, 25 bp, Homo sapien
tcagaacggcatattctttgaatac

SEQ ID NO: 4369027 - DNA, 25 bp, Homo sapien
ttgggaaggtaagttcagaacggca

SEQ ID NO: 4369028 - DNA, 25 bp, Homo sapien
agctgagagcagacgcttctaaggc

SEQ ID NO: 4369029 - DNA, 25 bp, Homo sapien
cagacgcttctaaggcatcttggga

SEQ ID NO: 4369030 - DNA, 25 bp, Homo sapien
actctctaagaaagtgtgaaagaac

SEQ ID NO: 4369031 - DNA, 25 bp, Homo sapien
agaaaaccctccaacactctctaag

SEQ ID NO: 4369032 - DNA, 25 bp, Homo sapien
ccctccaacactctctaagaaagtg

SEQ ID NO: 4369033 - DNA, 25 bp, Homo sapien
cttgtcagagaatggtgccatgtag

SEQ ID NO: 4369034 - DNA, 25 bp, Homo sapien
gaagaagggagtgcgcaggtagctc

SEQ ID NO: 4369035 - DNA, 25 bp, Homo sapien
agaagggagtgcgcaggtagctcat

SEQ ID NO: 4369036 - DNA, 25 bp, Homo sapien
ggaagaagggagtgcgcaggtagct

SEQ ID NO: 4369037 - DNA, 25 bp, Homo sapien
aagaagggagtgcgcaggtagctca

SEQ ID NO: 4369038 - DNA, 25 bp, Homo sapien
tgatgattgcagaaaagccaagacc

SEQ ID NO: 4369039 - DNA, 25 bp, Homo sapien
gagccacagttggtgcacattcaat

SEQ ID NO: 4369040 - DNA, 25 bp, Homo sapien
ttattattcagcttaggagccacag

SEQ ID NO: 4369041 - DNA, 25 bp, Homo sapien
gaaacaaatgaagtgcacccagatg

SEQ ID NO: 4369042 - DNA, 25 bp, Homo sapien
ccagtatttgtgtagcagggctctt

SEQ ID NO: 4369043 - DNA, 25 bp, Homo sapien
gacaccgaatttatcacagcaggct

SEQ ID NO: 4369044 - DNA, 25 bp, Homo sapien
gaaattcccatatgcgacaccgaat

SEQ ID NO: 4369045 - DNA, 25 bp, Homo sapien
gtctttattcaagggcatgcaggca

SEQ ID NO: 4369046 - DNA, 25 bp, Homo sapien
tgtgcactttctacacaaatcctga

SEQ ID NO: 4369047 - DNA, 25 bp, Homo sapien
gactttgaatgcataggctcagttc

SEQ ID NO: 4369048 - DNA, 25 bp, Homo sapien
gctcagttctgctgtgcactttcta

SEQ ID NO: 4369049 - DNA, 25 bp, Homo sapien
tcaggacaatccttggtatgaggga

SEQ ID NO: 4369050 - DNA, 25 bp, Homo sapien
tgaaatcatagcacaggcccttcct

SEQ ID NO: 4369051 - DNA, 25 bp, Homo sapien
cataacagcttctcatgcacatggg

SEQ ID NO: 4369052 - DNA, 25 bp, Homo sapien
tcactgctaagaaacgaggcaaccc

SEQ ID NO: 4369053 - DNA, 25 bp, Homo sapien
tcaagaccgcccaaagtagttgctg

SEQ ID NO: 4369054 - DNA, 25 bp, Homo sapien
catggatctcatggtgggaactaca

SEQ ID NO: 4369055 - DNA, 25 bp, Homo sapien
gtggacttatgagaaaagccagctg

SEQ ID NO: 4369056 - DNA, 25 bp, Homo sapien
tgggaactacatagagtggacttat

SEQ ID NO: 4369057 - DNA, 25 bp, Homo sapien
tggctcatggatctcatggtgggaa

SEQ ID NO: 4369058 - DNA, 25 bp, Homo sapien
atgactccctaaatccatgtaactg

SEQ ID NO: 4369059 - DNA, 25 bp, Homo sapien
catgtaactgagtccgattgccaga

SEQ ID NO: 4369060 - DNA, 25 bp, Homo sapien
tccgattgccagatatgcagttctc

SEQ ID NO: 4369061 - DNA, 25 bp, Homo sapien
ttctcatgtagaatgagtgccccat

SEQ ID NO: 4369062 - DNA, 25 bp, Homo sapien
aaaatccagtgacttcttcctgtac

SEQ ID NO: 4369063 - DNA, 25 bp, Homo sapien
cagcaaaaatccagtgacttcttcc

SEQ ID NO: 4369064 - DNA, 25 bp, Homo sapien
gcaaaaatccagtgacttcttcctg

SEQ ID NO: 4369065 - DNA, 25 bp, Homo sapien
aaaaatccagtgacttcttcctgta

SEQ ID NO: 4369066 - DNA, 25 bp, Homo sapien
tgccaagaccagttccagcagattg

SEQ ID NO: 4369067 - DNA, 25 bp, Homo sapien
gaatataatataacccgtggcacta

SEQ ID NO: 4369068 - DNA, 25 bp, Homo sapien
cgtggcactaccctcaaatttggct

SEQ ID NO: 4369069 - DNA, 25 bp, Homo sapien
caggccagccacctttagaagtgac

SEQ ID NO: 4369070 - DNA, 25 bp, Homo sapien
ctcatacgtttctgttgtccctctg

SEQ ID NO: 4369071 - DNA, 25 bp, Homo sapien
gtccctctgaagtcataacagggtt

SEQ ID NO: 4369072 - DNA, 25 bp, Homo sapien
cagaagacattgctcatacgtttct

SEQ ID NO: 4369073 - DNA, 25 bp, Homo sapien
tcatttctttagctggactgtatgc

SEQ ID NO: 4369074 - DNA, 25 bp, Homo sapien
ttctgagttatctcactctttttca

SEQ ID NO: 4369075 - DNA, 25 bp, Homo sapien
tctgagttatctcactctttttcat

SEQ ID NO: 4369076 - DNA, 25 bp, Homo sapien
cttttgttctgagttatctcactct

SEQ ID NO: 4369077 - DNA, 25 bp, Homo sapien
ttgttctgagttatctcactctttt

SEQ ID NO: 4369078 - DNA, 25 bp, Homo sapien
tgcgtgtcattgttacccagggacc

SEQ ID NO: 4369079 - DNA, 25 bp, Homo sapien
gctaatcatctgtatcattccacat

SEQ ID NO: 4369080 - DNA, 25 bp, Homo sapien
gtcattgttacccagggaccatgct

SEQ ID NO: 4369081 - DNA, 25 bp, Homo sapien
aatttgcgtgtcattgttacccagg

SEQ ID NO: 4369082 - DNA, 25 bp, Homo sapien
ctcacaccagagagttgcatcctag

SEQ ID NO: 4369083 - DNA, 25 bp, Homo sapien
caccagagagttgcatcctagttcc

SEQ ID NO: 4369084 - DNA, 25 bp, Homo sapien
gttccatcacttactacgagactca

SEQ ID NO: 4369085 - DNA, 25 bp, Homo sapien
gactcattcacgtggactgctccat

SEQ ID NO: 4369086 - DNA, 25 bp, Homo sapien
attcaatgaacagacgcctcaggtg

SEQ ID NO: 4369087 - DNA, 25 bp, Homo sapien
taaggaaagttcaccatcactaggc

SEQ ID NO: 4369088 - DNA, 25 bp, Homo sapien
tactttctagtacacagtgaccaca

SEQ ID NO: 4369089 - DNA, 25 bp, Homo sapien
tcccagagggagaccatataattag

SEQ ID NO: 4369090 - DNA, 25 bp, Homo sapien
gatataccaggtttaatctgtaact

SEQ ID NO: 4369091 - DNA, 25 bp, Homo sapien
ttaagatataccaggtttaatctgt

SEQ ID NO: 4369092 - DNA, 25 bp, Homo sapien
ataccaggtttaatctgtaactttg

SEQ ID NO: 4369093 - DNA, 25 bp, Homo sapien
ccaggtttaatctgtaactttgaca

SEQ ID NO: 4369094 - DNA, 25 bp, Homo sapien
cattttcatcaaccttcatgatctt

SEQ ID NO: 4369095 - DNA, 25 bp, Homo sapien
cttctcctaaccgatcagtcctgca

SEQ ID NO: 4369096 - DNA, 25 bp, Homo sapien
ttttcatcaaccttcatgatcttct

SEQ ID NO: 4369097 - DNA, 25 bp, Homo sapien
gatcagtcctgcaaaccagccccac

SEQ ID NO: 4369098 - DNA, 25 bp, Homo sapien
gcagggtgtggacatgctgaaagag

SEQ ID NO: 4369099 - DNA, 25 bp, Homo sapien
gtggacatgctgaaagagatcacat

SEQ ID NO: 4369100 - DNA, 25 bp, Homo sapien
tcctgtagtgacatgtggaaggcag

SEQ ID NO: 4369101 - DNA, 25 bp, Homo sapien
cctctcctgtagtgacatgtggaag

SEQ ID NO: 4369102 - DNA, 25 bp, Homo sapien
cagtgagaaggcgaacctggagctt

SEQ ID NO: 4369103 - DNA, 25 bp, Homo sapien
tatatgtgaaccaggtcagtgagaa

SEQ ID NO: 4369104 - DNA, 25 bp, Homo sapien
gagcaagcccatgcagaatagacaa

SEQ ID NO: 4369105 - DNA, 25 bp, Homo sapien
gaagaccacctaggtatgctgaggg

SEQ ID NO: 4369106 - DNA, 25 bp, Homo sapien
gaagagtggtgagactggacattct

SEQ ID NO: 4369107 - DNA, 25 bp, Homo sapien
atattgtcttcaaataggagcagtt

SEQ ID NO: 4369108 - DNA, 25 bp, Homo sapien
gtagtttccatcatataagtcttaa

SEQ ID NO: 4369109 - DNA, 25 bp, Homo sapien
tcacatgttcattgccagtatatag

SEQ ID NO: 4369110 - DNA, 25 bp, Homo sapien
cctggaagttgatgtactagtacct

SEQ ID NO: 4369111 - DNA, 25 bp, Homo sapien
agttgatgtactagtacctttcaca

SEQ ID NO: 4369112 - DNA, 25 bp, Homo sapien
gaagttgatgtactagtacctttca

SEQ ID NO: 4369113 - DNA, 25 bp, Homo sapien
tagccctggaagttgatgtactagt

SEQ ID NO: 4369114 - DNA, 25 bp, Homo sapien
caacacttatagctgacaaatcccc

SEQ ID NO: 4369115 - DNA, 25 bp, Homo sapien
gctcaacacttatagctgacaaatc

SEQ ID NO: 4369116 - DNA, 25 bp, Homo sapien
gctgctcaacacttatagctgacaa

SEQ ID NO: 4369117 - DNA, 25 bp, Homo sapien
tgctgctcaacacttatagctgaca

SEQ ID NO: 4369118 - DNA, 25 bp, Homo sapien
gctttcatgctgagactttaatata

SEQ ID NO: 4369119 - DNA, 25 bp, Homo sapien
ctttcatgctgagactttaatatac

SEQ ID NO: 4369120 - DNA, 25 bp, Homo sapien
tttcatgctgagactttaatatacc

SEQ ID NO: 4369121 - DNA, 25 bp, Homo sapien
gctggagagactgccactggctttg

SEQ ID NO: 4369122 - DNA, 25 bp, Homo sapien
gatctctatggatctctggaagaat

SEQ ID NO: 4369123 - DNA, 25 bp, Homo sapien
gctttgggtaaaaaggtgtctgatc

SEQ ID NO: 4369124 - DNA, 25 bp, Homo sapien
aaggctggagagactgccactggct

SEQ ID NO: 4369125 - DNA, 25 bp, Homo sapien
gatttattagagtagttgaaagaca

SEQ ID NO: 4369126 - DNA, 25 bp, Homo sapien
acagtttcactaattgccatgtggg

SEQ ID NO: 4369127 - DNA, 25 bp, Homo sapien
tagagtagttgaaagacagtttcac

SEQ ID NO: 4369128 - DNA, 25 bp, Homo sapien
gtttcactaattgccatgtgggaga

SEQ ID NO: 4369129 - DNA, 25 bp, Homo sapien
ctggcaactgcaagcttctcgcgat

SEQ ID NO: 4369130 - DNA, 25 bp, Homo sapien
tggcaactgcaagcttctcgcgata

SEQ ID NO: 4369131 - DNA, 25 bp, Homo sapien
ggcaactgcaagcttctcgcgatac

SEQ ID NO: 4369132 - DNA, 25 bp, Homo sapien
catgtaagctgcgtggactgttcca

SEQ ID NO: 4369133 - DNA, 25 bp, Homo sapien
gaaagcggatgaactcggaatgtag

SEQ ID NO: 4369134 - DNA, 25 bp, Homo sapien
cttggctcatcctgaagaaagcgga

SEQ ID NO: 4369135 - DNA, 25 bp, Homo sapien
caggacccaattttacccagaatat

SEQ ID NO: 4369136 - DNA, 25 bp, Homo sapien
ttcttagaaagaagcgataagcctt

SEQ ID NO: 4369137 - DNA, 25 bp, Homo sapien
taatgtggatacctttcttagaaag

SEQ ID NO: 4369138 - DNA, 25 bp, Homo sapien
tcctacatgtagaagtgtccttggc

SEQ ID NO: 4369139 - DNA, 25 bp, Homo sapien
gcctttgacaaaagcgtcctacatg

SEQ ID NO: 4369140 - DNA, 25 bp, Homo sapien
cttgggtccttgaatcacaatctgc

SEQ ID NO: 4369141 - DNA, 25 bp, Homo sapien
agatgtaatttgtctccttgggtcc

SEQ ID NO: 4369142 - DNA, 25 bp, Homo sapien
ccttgaatcacaatctgctcttcat

SEQ ID NO: 4369143 - DNA, 25 bp, Homo sapien
agaagatgtaatttgtctccttggg

SEQ ID NO: 4369144 - DNA, 25 bp, Homo sapien
agcccccttctagctcttgaagctt

SEQ ID NO: 4369145 - DNA, 25 bp, Homo sapien
ccccttctagctcttgaagcttttt

SEQ ID NO: 4369146 - DNA, 25 bp, Homo sapien
ccttctagctcttgaagctttttca

SEQ ID NO: 4369147 - DNA, 25 bp, Homo sapien
cttctagctcttgaagctttttcag

SEQ ID NO: 4369148 - DNA, 25 bp, Homo sapien
accaagacaacccagacagccgaag

SEQ ID NO: 4369149 - DNA, 25 bp, Homo sapien
acaacccagacagccgaagtggatt

SEQ ID NO: 4369150 - DNA, 25 bp, Homo sapien
gattcctgaacttggcagattctga

SEQ ID NO: 4369151 - DNA, 25 bp, Homo sapien
tctttcacctttaacatgaccatca

SEQ ID NO: 4369152 - DNA, 25 bp, Homo sapien
acgtgaatgatgtctttccatccag

SEQ ID NO: 4369153 - DNA, 25 bp, Homo sapien
tgtccaacgtgaatgatgtctttcc

SEQ ID NO: 4369154 - DNA, 25 bp, Homo sapien
caaactgtccaacgtgaatgatgtc

SEQ ID NO: 4369155 - DNA, 25 bp, Homo sapien
tggttgaggcaaactgtccaacgtg

SEQ ID NO: 4369156 - DNA, 25 bp, Homo sapien
ccactatggcctaggctgttgaata

SEQ ID NO: 4369157 - DNA, 25 bp, Homo sapien
taaaagatggtaaggtgtcaaagga

SEQ ID NO: 4369158 - DNA, 25 bp, Homo sapien
tatttactaaatactacgcagacat

SEQ ID NO: 4369159 - DNA, 25 bp, Homo sapien
gctggattccgactcctagcctcaa

SEQ ID NO: 4369160 - DNA, 25 bp, Homo sapien
tatgtggtcttatttctaaggcttc

SEQ ID NO: 4369161 - DNA, 25 bp, Homo sapien
gttagatgactagatcgcaaaaatt

SEQ ID NO: 4369162 - DNA, 25 bp, Homo sapien
agatatgtggtcttatttctaaggc

SEQ ID NO: 4369163 - DNA, 25 bp, Homo sapien
ccctttgttagatgactagatcgca

SEQ ID NO: 4369164 - DNA, 25 bp, Homo sapien
gaaaatctttcccatgcacatctgt

SEQ ID NO: 4369165 - DNA, 25 bp, Homo sapien
gaagaacatttaagcatgccagctg

SEQ ID NO: 4369166 - DNA, 25 bp, Homo sapien
gatgagctatcagtcatcaactgaa

SEQ ID NO: 4369167 - DNA, 25 bp, Homo sapien
cagctggaaggcatttacagtttca

SEQ ID NO: 4369168 - DNA, 25 bp, Homo sapien
ggtaacaggagatcactaaagggcc

SEQ ID NO: 4369169 - DNA, 25 bp, Homo sapien
caaggaactgagagtctgtagcagc

SEQ ID NO: 4369170 - DNA, 25 bp, Homo sapien
tgtaacacaagcaagagccatgagg

SEQ ID NO: 4369171 - DNA, 25 bp, Homo sapien
tgtaatcaatgaccaagagctagtg

SEQ ID NO: 4369172 - DNA, 25 bp, Homo sapien
catgaatggatccagagactgagct

SEQ ID NO: 4369173 - DNA, 25 bp, Homo sapien
ggggttatcatcagagctctagagg

SEQ ID NO: 4369174 - DNA, 25 bp, Homo sapien
gtgataaacaaaaggctctgtgcag

SEQ ID NO: 4369175 - DNA, 25 bp, Homo sapien
tctgtgcagggggttatcatcagag

SEQ ID NO: 4369176 - DNA, 25 bp, Homo sapien
cagggggttatcatcagagctctag

SEQ ID NO: 4369177 - DNA, 25 bp, Homo sapien
tgctactgtcacctccatcaccatc

SEQ ID NO: 4369178 - DNA, 25 bp, Homo sapien
tgtacaaggtctgaaatatcagcca

SEQ ID NO: 4369179 - DNA, 25 bp, Homo sapien
tcaccatcaccatgtagaaccactg

SEQ ID NO: 4369180 - DNA, 25 bp, Homo sapien
tgtagaaccactgtacaaggtctga

SEQ ID NO: 4369181 - DNA, 25 bp, Homo sapien
gggcattcgggatgttgcaagtcct

SEQ ID NO: 4369182 - DNA, 25 bp, Homo sapien
tctaatctgccttgcaaaaggagga

SEQ ID NO: 4369183 - DNA, 25 bp, Homo sapien
ttatgcgaaccccaatcatcatgtt

SEQ ID NO: 4369184 - DNA, 25 bp, Homo sapien
ttacacagaaacgttaatcacatat

SEQ ID NO: 4369185 - DNA, 25 bp, Homo sapien
atacatgggaatccacaagaaaggc

SEQ ID NO: 4369186 - DNA, 25 bp, Homo sapien
aggagagtcacctgataattgttct

SEQ ID NO: 4369187 - DNA, 25 bp, Homo sapien
ggaatccacaagaaaggcgatattg

SEQ ID NO: 4369188 - DNA, 25 bp, Homo sapien
tcacctgataattgttctcttggcc

SEQ ID NO: 4369189 - DNA, 25 bp, Homo sapien
tgtaaaagcgttcataaagggcact

SEQ ID NO: 4369190 - DNA, 25 bp, Homo sapien
gagatatcatttagctacacgccca

SEQ ID NO: 4369191 - DNA, 25 bp, Homo sapien
tctgttcaactgacactgccaaggg

SEQ ID NO: 4369192 - DNA, 25 bp, Homo sapien
gaggctacctaacactttccatgag

SEQ ID NO: 4369193 - DNA, 25 bp, Homo sapien
tcaatgaggcacaatccaaacaggc

SEQ ID NO: 4369194 - DNA, 25 bp, Homo sapien
ggttgtgacacatcagacttagccc

SEQ ID NO: 4369195 - DNA, 25 bp, Homo sapien
tttagactgaaaagaagtatcaggg

SEQ ID NO: 4369196 - DNA, 25 bp, Homo sapien
agccccaccctgttgggttgtgaca

SEQ ID NO: 4369197 - DNA, 25 bp, Homo sapien
cagaagcgtacagaagccacatagc

SEQ ID NO: 4369198 - DNA, 25 bp, Homo sapien
tgtctgcagaagcgtacagaagcca

SEQ ID NO: 4369199 - DNA, 25 bp, Homo sapien
gatccgtcagcaccagccatttgct

SEQ ID NO: 4369200 - DNA, 25 bp, Homo sapien
tgcttggaaagatccgtcagcacca

SEQ ID NO: 4369201 - DNA, 25 bp, Homo sapien
atgatgatctgcctgatcacgctga

SEQ ID NO: 4369202 - DNA, 25 bp, Homo sapien
ctgatcacgctgatgtcttcaaggt

SEQ ID NO: 4369203 - DNA, 25 bp, Homo sapien
agcctcctggatcacaccacagccc

SEQ ID NO: 4369204 - DNA, 25 bp, Homo sapien
acagcacccactgcataattctcag

SEQ ID NO: 4369205 - DNA, 25 bp, Homo sapien
caagaaccactgataactggctcca

SEQ ID NO: 4369206 - DNA, 25 bp, Homo sapien
actggctccactatcattatctttg

SEQ ID NO: 4369207 - DNA, 25 bp, Homo sapien
tctttggctgtgggatagcgctgtt

SEQ ID NO: 4369208 - DNA, 25 bp, Homo sapien
tcttcacctatcaagaaccactgat

SEQ ID NO: 4369209 - DNA, 25 bp, Homo sapien
gacctctggcaactaagtgaattcc

SEQ ID NO: 4369210 - DNA, 25 bp, Homo sapien
gactgacttttcctctatacaaaat

SEQ ID NO: 4369211 - DNA, 25 bp, Homo sapien
tacaaaatgttggtaagttgccaga

SEQ ID NO: 4369212 - DNA, 25 bp, Homo sapien
tgcacagtagacacttgacctctgg

SEQ ID NO: 4369213 - DNA, 25 bp, Homo sapien
gagcctgacgggacgcatacagcat

SEQ ID NO: 4369214 - DNA, 25 bp, Homo sapien
tatttgtagagcctgacgggacgca

SEQ ID NO: 4369215 - DNA, 25 bp, Homo sapien
gttatttgtagagcctgacgggacg

SEQ ID NO: 4369216 - DNA, 25 bp, Homo sapien
tgtagagcctgacgggacgcataca

SEQ ID NO: 4369217 - DNA, 25 bp, Homo sapien
aacagacccaggaaatgcctttcct

SEQ ID NO: 4369218 - DNA, 25 bp, Homo sapien
agaaagaacagacccaggaaatgcc

SEQ ID NO: 4369219 - DNA, 25 bp, Homo sapien
gcatacagagagtgaaggaaagaaa

SEQ ID NO: 4369220 - DNA, 25 bp, Homo sapien
ccaggaaatgcctttcctcagaggc

SEQ ID NO: 4369221 - DNA, 25 bp, Homo sapien
ctacaattgggccttaggaaaagtg

SEQ ID NO: 4369222 - DNA, 25 bp, Homo sapien
tctgcagtagtccagcgtcttccct

SEQ ID NO: 4369223 - DNA, 25 bp, Homo sapien
tacaattgggccttaggaaaagtga

SEQ ID NO: 4369224 - DNA, 25 bp, Homo sapien
tgtcattcagtcatgtggcctcaag

SEQ ID NO: 4369225 - DNA, 25 bp, Homo sapien
gaacaagctgggtcacattaactca

SEQ ID NO: 4369226 - DNA, 25 bp, Homo sapien
tgcatcagtgccaagtaccctggac

SEQ ID NO: 4369227 - DNA, 25 bp, Homo sapien
tctgcggctggctggtatcctggct

SEQ ID NO: 4369228 - DNA, 25 bp, Homo sapien
ctgtcccttcaagaaggaagggtca

SEQ ID NO: 4369229 - DNA, 25 bp, Homo sapien
cagatggttgaatggttacacagct

SEQ ID NO: 4369230 - DNA, 25 bp, Homo sapien
cttgggaactcacggctccatgagg

SEQ ID NO: 4369231 - DNA, 25 bp, Homo sapien
aactcacggctccatgaggcagaag

SEQ ID NO: 4369232 - DNA, 25 bp, Homo sapien
caagaaaggctttaggtcctagaga

SEQ ID NO: 4369233 - DNA, 25 bp, Homo sapien
gagactcctggcctaatggaattta

SEQ ID NO: 4369234 - DNA, 25 bp, Homo sapien
aacaccttagtgtaatgagccacct

SEQ ID NO: 4369235 - DNA, 25 bp, Homo sapien
cactaaaatgtcagaccccaggcct

SEQ ID NO: 4369236 - DNA, 25 bp, Homo sapien
taagaatcatctaattgctctccag

SEQ ID NO: 4369237 - DNA, 25 bp, Homo sapien
gcttttaccaacagtgggtattgcc

SEQ ID NO: 4369238 - DNA, 25 bp, Homo sapien
cattcttaccatgaatgattcagaa

SEQ ID NO: 4369239 - DNA, 25 bp, Homo sapien
ccagaaagaggtaccaatttacatt

SEQ ID NO: 4369240 - DNA, 25 bp, Homo sapien
tgtgagtatgtaatcagccatgtct

SEQ ID NO: 4369241 - DNA, 25 bp, Homo sapien
gtctatgtacctacatgtgagtatg

SEQ ID NO: 4369242 - DNA, 25 bp, Homo sapien
ttccccaatataacagcaatacatg

SEQ ID NO: 4369243 - DNA, 25 bp, Homo sapien
tggtatagaaaacaccttatattaa

SEQ ID NO: 4369244 - DNA, 25 bp, Homo sapien
ccgagatcgcatcattggactccag

SEQ ID NO: 4369245 - DNA, 25 bp, Homo sapien
gcctgggcaacaagagcaaaactcc

SEQ ID NO: 4369246 - DNA, 25 bp, Homo sapien
tgagccgagatcgcatcattggact

SEQ ID NO: 4369247 - DNA, 25 bp, Homo sapien
ctgggcaacaagagcaaaactccgt

SEQ ID NO: 4369248 - DNA, 25 bp, Homo sapien
gaaacatactatccttcatctcacc

SEQ ID NO: 4369249 - DNA, 25 bp, Homo sapien
taaagcagcatgaaacatactatcc

SEQ ID NO: 4369250 - DNA, 25 bp, Homo sapien
gaaaatgtctcagatcaaagtaata

SEQ ID NO: 4369251 - DNA, 25 bp, Homo sapien
ccaggatatttcgttaagtatagaa

SEQ ID NO: 4369252 - DNA, 25 bp, Homo sapien
taagtgcccaccatgtgccggaaat

SEQ ID NO: 4369253 - DNA, 25 bp, Homo sapien
tagaagagaacaagtggctgggaaa

SEQ ID NO: 4369254 - DNA, 25 bp, Homo sapien
gcctcattattgtcacacagcagga

SEQ ID NO: 4369255 - DNA, 25 bp, Homo sapien
gcagcataacttgcacacagtggat

SEQ ID NO: 4369256 - DNA, 25 bp, Homo sapien
gacaagtcgggtcaagaaggaacga

SEQ ID NO: 4369257 - DNA, 25 bp, Homo sapien
tagtgaagtgtcttgtaagccatgc

SEQ ID NO: 4369258 - DNA, 25 bp, Homo sapien
gagctgccagtctttcctacggaaa

SEQ ID NO: 4369259 - DNA, 25 bp, Homo sapien
aaagggaaggttatgaggctgtcaa

SEQ ID NO: 4369260 - DNA, 25 bp, Homo sapien
gggcttcctaagctgcaattcagca

SEQ ID NO: 4369261 - DNA, 25 bp, Homo sapien
tagtccgcaacttctagccccaaaa

SEQ ID NO: 4369262 - DNA, 25 bp, Homo sapien
agaacccagctcaggtgcgctcgtc

SEQ ID NO: 4369263 - DNA, 25 bp, Homo sapien
cttctggctgcgatggaggcggatc

SEQ ID NO: 4369264 - DNA, 25 bp, Homo sapien
ttgcaagccccagaaggtaaatttg

SEQ ID NO: 4369265 - DNA, 25 bp, Homo sapien
cctggagcgcgagggtacccatgat

SEQ ID NO: 4369266 - DNA, 25 bp, Homo sapien
gtaaatttgcgtgggagccgcgcac

SEQ ID NO: 4369267 - DNA, 25 bp, Homo sapien
ccaagaaagctgaactcgtcccaag

SEQ ID NO: 4369268 - DNA, 25 bp, Homo sapien
cataacccctttgtggcggaggcgg

SEQ ID NO: 4369269 - DNA, 25 bp, Homo sapien
gataacgacgtggatagcccagggt

SEQ ID NO: 4369270 - DNA, 25 bp, Homo sapien
gatcattccgaagagtctggcctcg

SEQ ID NO: 4369271 - DNA, 25 bp, Homo sapien
tgacagtcctaccagctcgaagaag

SEQ ID NO: 4369272 - DNA, 25 bp, Homo sapien
tatgaataacctgaggataggaagg

SEQ ID NO: 4369273 - DNA, 25 bp, Homo sapien
gataggaaggtaacgtatgaaaatg

SEQ ID NO: 4369274 - DNA, 25 bp, Homo sapien
ttttctgagagggaacgttcatgct

SEQ ID NO: 4369275 - DNA, 25 bp, Homo sapien
cctgaggataggaaggtaacgtatg

SEQ ID NO: 4369276 - DNA, 25 bp, Homo sapien
acgcgtgtttccagctgaggttgaa

SEQ ID NO: 4369277 - DNA, 25 bp, Homo sapien
ttagcctgccagtattgaagtctca

SEQ ID NO: 4369278 - DNA, 25 bp, Homo sapien
tcattcacagtcatgcaagcagagc

SEQ ID NO: 4369279 - DNA, 25 bp, Homo sapien
tacaggagcctgatacatttgtgag

SEQ ID NO: 4369280 - DNA, 25 bp, Homo sapien
aagcatcgtgcaaaactgtttagtg

SEQ ID NO: 4369281 - DNA, 25 bp, Homo sapien
ccaaagcatcgtgcaaaactgttta

SEQ ID NO: 4369282 - DNA, 25 bp, Homo sapien
tcccaaagcatcgtgcaaaactgtt

SEQ ID NO: 4369283 - DNA, 25 bp, Homo sapien
caaagcatcgtgcaaaactgtttag

SEQ ID NO: 4369284 - DNA, 25 bp, Homo sapien
tgtgccatgtcaatgagatacagag

SEQ ID NO: 4369285 - DNA, 25 bp, Homo sapien
aggatacacttttggaactctggag

SEQ ID NO: 4369286 - DNA, 25 bp, Homo sapien
ccggctcattcagggtgtcatcagt

SEQ ID NO: 4369287 - DNA, 25 bp, Homo sapien
caggaaaggctctgcgcaagaagca

SEQ ID NO: 4369288 - DNA, 25 bp, Homo sapien
aaccggagactatcaccctgtgaaa

SEQ ID NO: 4369289 - DNA, 25 bp, Homo sapien
atcaccctgtgaaaggatcacagtg

SEQ ID NO: 4369290 - DNA, 25 bp, Homo sapien
caccctgtgaaaggatcacagtgca

SEQ ID NO: 4369291 - DNA, 25 bp, Homo sapien
ttaaaccggagactatcaccctgtg

SEQ ID NO: 4369292 - DNA, 25 bp, Homo sapien
tcacaggatgtagatgggtccaggc

SEQ ID NO: 4369293 - DNA, 25 bp, Homo sapien
tcgcaatgacgctgcttcacaggat

SEQ ID NO: 4369294 - DNA, 25 bp, Homo sapien
tgggtcctggtgagtgacatagtcc

SEQ ID NO: 4369295 - DNA, 25 bp, Homo sapien
tccttcacaagcaatgaaaggagag

SEQ ID NO: 4369296 - DNA, 25 bp, Homo sapien
cctgctgattgcctaatgagaagct

SEQ ID NO: 4369297 - DNA, 25 bp, Homo sapien
gattgcctaatgagaagctttcttg

SEQ ID NO: 4369298 - DNA, 25 bp, Homo sapien
gcctaatgagaagctttcttgcttt

SEQ ID NO: 4369299 - DNA, 25 bp, Homo sapien
tccttcctgctgattgcctaatgag

SEQ ID NO: 4369300 - DNA, 25 bp, Homo sapien
taatccagcttacacgtgtccttac

SEQ ID NO: 4369301 - DNA, 25 bp, Homo sapien
catgtcatccttcgcactgataatc

SEQ ID NO: 4369302 - DNA, 25 bp, Homo sapien
tggagtggagtctgtacctcagctc

SEQ ID NO: 4369303 - DNA, 25 bp, Homo sapien
gagtctgtacctcagctccactgaa

SEQ ID NO: 4369304 - DNA, 25 bp, Homo sapien
cctgtgagttgtggcatttatgacc

SEQ ID NO: 4369305 - DNA, 25 bp, Homo sapien
ttctgtgcaatatgtgagaccccta

SEQ ID NO: 4369306 - DNA, 25 bp, Homo sapien
ggagcttcggtcaacttctgtgcaa

SEQ ID NO: 4369307 - DNA, 25 bp, Homo sapien
catttatgaccacggcatggagctt

SEQ ID NO: 4369308 - DNA, 25 bp, Homo sapien
tgcttggagaaatagtcaaagcctc

SEQ ID NO: 4369309 - DNA, 25 bp, Homo sapien
ctgcttggagaaatagtcaaagcct

SEQ ID NO: 4369310 - DNA, 25 bp, Homo sapien
cttggagaaatagtcaaagcctcta

SEQ ID NO: 4369311 - DNA, 25 bp, Homo sapien
tggagaaatagtcaaagcctctaag

SEQ ID NO: 4369312 - DNA, 25 bp, Homo sapien
gatgagaagggctgatgatggcccc

SEQ ID NO: 4369313 - DNA, 25 bp, Homo sapien
gctgatgatggccccctttttcctc

SEQ ID NO: 4369314 - DNA, 25 bp, Homo sapien
gaagggctgatgatggccccctttt

SEQ ID NO: 4369315 - DNA, 25 bp, Homo sapien
gggctgatgatggccccctttttcc

SEQ ID NO: 4369316 - DNA, 25 bp, Homo sapien
tccaccacgccctggtgggaaccgc

SEQ ID NO: 4369317 - DNA, 25 bp, Homo sapien
taactgttagagaatgcaagttcat

SEQ ID NO: 4369318 - DNA, 25 bp, Homo sapien
tctctgtaactgttagagaatgcaa

SEQ ID NO: 4369319 - DNA, 25 bp, Homo sapien
ggaaccgctgctataggaacagagg

SEQ ID NO: 4369320 - DNA, 25 bp, Homo sapien
cccatgcagagggtgacccgccttc

SEQ ID NO: 4369321 - DNA, 25 bp, Homo sapien
catgcagagggtgacccgccttccc

SEQ ID NO: 4369322 - DNA, 25 bp, Homo sapien
ccatgcagagggtgacccgccttcc

SEQ ID NO: 4369323 - DNA, 25 bp, Homo sapien
atgcagagggtgacccgccttcccc

SEQ ID NO: 4369324 - DNA, 25 bp, Homo sapien
tgcttcctccaagacctcaagtcct

SEQ ID NO: 4369325 - DNA, 25 bp, Homo sapien
cttcctccaagacctcaagtcctgt

SEQ ID NO: 4369326 - DNA, 25 bp, Homo sapien
ggtgcttcctccaagacctcaagtc

SEQ ID NO: 4369327 - DNA, 25 bp, Homo sapien
tggtgcttcctccaagacctcaagt

SEQ ID NO: 4369328 - DNA, 25 bp, Homo sapien
ttatttgcaagatgcgaataatact

SEQ ID NO: 4369329 - DNA, 25 bp, Homo sapien
cattttggtagttaaaataatgcag

SEQ ID NO: 4369330 - DNA, 25 bp, Homo sapien
tgcaagatgcgaataatactttgct

SEQ ID NO: 4369331 - DNA, 25 bp, Homo sapien
tttgcaagatgcgaataatactttg

SEQ ID NO: 4369332 - DNA, 25 bp, Homo sapien
tacagtgagtttgcacagctcagtt

SEQ ID NO: 4369333 - DNA, 25 bp, Homo sapien
acagctcagtttttacctaaccaca

SEQ ID NO: 4369334 - DNA, 25 bp, Homo sapien
aaaacacttgcctttaagcttgcca

SEQ ID NO: 4369335 - DNA, 25 bp, Homo sapien
tacacagaatagctgagcagttcac

SEQ ID NO: 4369336 - DNA, 25 bp, Homo sapien
ttcaaaaggaactggtagagttcag

SEQ ID NO: 4369337 - DNA, 25 bp, Homo sapien
taatgcttcgttaacttcaaaagga

SEQ ID NO: 4369338 - DNA, 25 bp, Homo sapien
caacgtagaatttagatgggttcat

SEQ ID NO: 4369339 - DNA, 25 bp, Homo sapien
tatagactaattaacctaagctacc

SEQ ID NO: 4369340 - DNA, 25 bp, Homo sapien
gcaaaacaagcattccgtcacctct

SEQ ID NO: 4369341 - DNA, 25 bp, Homo sapien
gagatctgagcaactgtgttaatga

SEQ ID NO: 4369342 - DNA, 25 bp, Homo sapien
taatgaagtaatagcaatggtccac

SEQ ID NO: 4369343 - DNA, 25 bp, Homo sapien
gaccgtgagtaccttgagatctgag

SEQ ID NO: 4369344 - DNA, 25 bp, Homo sapien
ttctagaggcccttcatatcctcgc

SEQ ID NO: 4369345 - DNA, 25 bp, Homo sapien
ttggcaggattcacgtccttgctgt

SEQ ID NO: 4369346 - DNA, 25 bp, Homo sapien
tcatatcctcgccacaggctccttc

SEQ ID NO: 4369347 - DNA, 25 bp, Homo sapien
caaagcagcaatggcatgttaactc

SEQ ID NO: 4369348 - DNA, 25 bp, Homo sapien
ccaaatattgtccagggaggatgta

SEQ ID NO: 4369349 - DNA, 25 bp, Homo sapien
tgaacccgggcagacgaaggttgca

SEQ ID NO: 4369350 - DNA, 25 bp, Homo sapien
tgggaaggcatcacatgtgctcact

SEQ ID NO: 4369351 - DNA, 25 bp, Homo sapien
cagtaatagagaatgccttgcaaca

SEQ ID NO: 4369352 - DNA, 25 bp, Homo sapien
ttgggagcagtacctgaacaagtgc

SEQ ID NO: 4369353 - DNA, 25 bp, Homo sapien
ccagatggtcacctcgacgttagag

SEQ ID NO: 4369354 - DNA, 25 bp, Homo sapien
gacgttagaggcaaaaccagtatgc

SEQ ID NO: 4369355 - DNA, 25 bp, Homo sapien
cattctttggagtgcagcaagatgc

SEQ ID NO: 4369356 - DNA, 25 bp, Homo sapien
ggccggcaaccaacagtatttatca

SEQ ID NO: 4369357 - DNA, 25 bp, Homo sapien
gaagccaagacactgactaactgac

SEQ ID NO: 4369358 - DNA, 25 bp, Homo sapien
gattcagagagtacaggcactagcc

SEQ ID NO: 4369359 - DNA, 25 bp, Homo sapien
tccttggcgaagaagataagtagca

SEQ ID NO: 4369360 - DNA, 25 bp, Homo sapien
tatactcccaaagagtgggcatgac

SEQ ID NO: 4369361 - DNA, 25 bp, Homo sapien
aaattgttcatgtcccagggtttgg

SEQ ID NO: 4369362 - DNA, 25 bp, Homo sapien
tgggcatgaccacagcagagtatat

SEQ ID NO: 4369363 - DNA, 25 bp, Homo sapien
gaaggcttctaccttacacatgaaa

SEQ ID NO: 4369364 - DNA, 25 bp, Homo sapien
tctacaggatgaggactttcaatct

SEQ ID NO: 4369365 - DNA, 25 bp, Homo sapien
cctggaatcgtggcggaaagttcct

SEQ ID NO: 4369366 - DNA, 25 bp, Homo sapien
tcagctgtaatatccatcctggaat

SEQ ID NO: 4369367 - DNA, 25 bp, Homo sapien
tctataatagctgacagtactgcac

SEQ ID NO: 4369368 - DNA, 25 bp, Homo sapien
ttaacagttagaacaaaaccacatg

SEQ ID NO: 4369369 - DNA, 25 bp, Homo sapien
cttacatgtagatttaagataatca

SEQ ID NO: 4369370 - DNA, 25 bp, Homo sapien
gtagatttaagataatcacataaag

SEQ ID NO: 4369371 - DNA, 25 bp, Homo sapien
ttcaaaattatttgctctgctgaaa

SEQ ID NO: 4369372 - DNA, 25 bp, Homo sapien
cctctgtgcagtcatacaagtatat

SEQ ID NO: 4369373 - DNA, 25 bp, Homo sapien
cctgatcgttatccttctggatgga

SEQ ID NO: 4369374 - DNA, 25 bp, Homo sapien
taacaagatgggcaattcttgctgg

SEQ ID NO: 4369375 - DNA, 25 bp, Homo sapien
cttgctggagactgaaatacaatcc

SEQ ID NO: 4369376 - DNA, 25 bp, Homo sapien
gaattaatacattcaggagtctgaa

SEQ ID NO: 4369377 - DNA, 25 bp, Homo sapien
tatactgacatgctaacaaaacttt

SEQ ID NO: 4369378 - DNA, 25 bp, Homo sapien
tagtttaaactaagcactactctga

SEQ ID NO: 4369379 - DNA, 25 bp, Homo sapien
caaaacactaatgttgccgaagtta

SEQ ID NO: 4369380 - DNA, 25 bp, Homo sapien
tctcatctttaggtgatagataagc

SEQ ID NO: 4369381 - DNA, 25 bp, Homo sapien
ttaggtgatagataagccagttgta

SEQ ID NO: 4369382 - DNA, 25 bp, Homo sapien
caggccatcggtttttgtgtaaact

SEQ ID NO: 4369383 - DNA, 25 bp, Homo sapien
ttgtagtgaaagtctgtttgctcca

SEQ ID NO: 4369384 - DNA, 25 bp, Homo sapien
taaaaactcatgcactgggtcactg

SEQ ID NO: 4369385 - DNA, 25 bp, Homo sapien
catgatctctcaacgtgcagtggtg

SEQ ID NO: 4369386 - DNA, 25 bp, Homo sapien
gataccaatggctaaacagttcacc

SEQ ID NO: 4369387 - DNA, 25 bp, Homo sapien
caagaacaatgtctgcactttggcc

SEQ ID NO: 4369388 - DNA, 25 bp, Homo sapien
ctttgggatataaaccagcacagat

SEQ ID NO: 4369389 - DNA, 25 bp, Homo sapien
aactttgggatataaaccagcacag

SEQ ID NO: 4369390 - DNA, 25 bp, Homo sapien
caaatttagtcgaattttagcaact

SEQ ID NO: 4369391 - DNA, 25 bp, Homo sapien
gcaactttgggatataaaccagcac

SEQ ID NO: 4369392 - DNA, 25 bp, Homo sapien
aaaatactgatacaatagacaaaag

SEQ ID NO: 4369393 - DNA, 25 bp, Homo sapien
tactgatacaatagacaaaagatac

SEQ ID NO: 4369394 - DNA, 25 bp, Homo sapien
ctgatacaatagacaaaagatactt

SEQ ID NO: 4369395 - DNA, 25 bp, Homo sapien
gtaaaatactgatacaatagacaaa

SEQ ID NO: 4369396 - DNA, 25 bp, Homo sapien
tcagcaaactgtcctttcatgttat

SEQ ID NO: 4369397 - DNA, 25 bp, Homo sapien
ctgcttacaaatccagctccaagaa

SEQ ID NO: 4369398 - DNA, 25 bp, Homo sapien
ggatctttaggatttctactgctta

SEQ ID NO: 4369399 - DNA, 25 bp, Homo sapien
caaactgtcctttcatgttatgcag

SEQ ID NO: 4369400 - DNA, 25 bp, Homo sapien
gacacccattaagtatatatactga

SEQ ID NO: 4369401 - DNA, 25 bp, Homo sapien
aaataaataagattgcagacaccca

SEQ ID NO: 4369402 - DNA, 25 bp, Homo sapien
gaagaaatgcatcctaataacagaa

SEQ ID NO: 4369403 - DNA, 25 bp, Homo sapien
ggaaagtgaatgaccagatgaatct

SEQ ID NO: 4369404 - DNA, 25 bp, Homo sapien
cacaggatttgtatgcagacactaa

SEQ ID NO: 4369405 - DNA, 25 bp, Homo sapien
tttctactgaaacatggcattccac

SEQ ID NO: 4369406 - DNA, 25 bp, Homo sapien
tttcaggtacctccataaactgtga

SEQ ID NO: 4369407 - DNA, 25 bp, Homo sapien
ctttccttccgaattgtggtgatcc

SEQ ID NO: 4369408 - DNA, 25 bp, Homo sapien
agcaatagtccttttcgtatctgaa

SEQ ID NO: 4369409 - DNA, 25 bp, Homo sapien
ttttcgtatctgaaaccacgtcgcc

SEQ ID NO: 4369410 - DNA, 25 bp, Homo sapien
gtatctgaaaccacgtcgcctagcc

SEQ ID NO: 4369411 - DNA, 25 bp, Homo sapien
agtccttttcgtatctgaaaccacg

SEQ ID NO: 4369412 - DNA, 25 bp, Homo sapien
aatgtttaccctcagatacacgtgg

SEQ ID NO: 4369413 - DNA, 25 bp, Homo sapien
aaggaaagacaagctgaataagctc

SEQ ID NO: 4369414 - DNA, 25 bp, Homo sapien
ccaagataggtgataaatgtttacc

SEQ ID NO: 4369415 - DNA, 25 bp, Homo sapien
catgttaaatctgaatacagggtag

SEQ ID NO: 4369416 - DNA, 25 bp, Homo sapien
tgttaagtgatcacttctagtatcc

SEQ ID NO: 4369417 - DNA, 25 bp, Homo sapien
ctcaaacgcattcacaactgttaag

SEQ ID NO: 4369418 - DNA, 25 bp, Homo sapien
tcaaacgcattcacaactgttaagt

SEQ ID NO: 4369419 - DNA, 25 bp, Homo sapien
ctagtatcctttgccaattcctttc

SEQ ID NO: 4369420 - DNA, 25 bp, Homo sapien
aaaatagcagacatagccaatttaa

SEQ ID NO: 4369421 - DNA, 25 bp, Homo sapien
aattgctctgatgctataatggaga

SEQ ID NO: 4369422 - DNA, 25 bp, Homo sapien
gacattctaataaaacgctaatgaa

SEQ ID NO: 4369423 - DNA, 25 bp, Homo sapien
aatatatctaagcaactcctgttca

SEQ ID NO: 4369424 - DNA, 25 bp, Homo sapien
tgccaagtggactccaagaggtgtc

SEQ ID NO: 4369425 - DNA, 25 bp, Homo sapien
caatagtgagtactgggtctaagca

SEQ ID NO: 4369426 - DNA, 25 bp, Homo sapien
gatctttgaaactgagactagcagc

SEQ ID NO: 4369427 - DNA, 25 bp, Homo sapien
gctcaacgggtaatcgtgccaagtg

SEQ ID NO: 4369428 - DNA, 25 bp, Homo sapien
ttaaaataactaggcatatagatgc

SEQ ID NO: 4369429 - DNA, 25 bp, Homo sapien
taggcatatagatgcaaacaagaaa

SEQ ID NO: 4369430 - DNA, 25 bp, Homo sapien
agcatcccatcagacacagattttt

SEQ ID NO: 4369431 - DNA, 25 bp, Homo sapien
aaaagaacccataagcatcccatca

SEQ ID NO: 4369432 - DNA, 25 bp, Homo sapien
taaagatgtgataatatatgcagaa

SEQ ID NO: 4369433 - DNA, 25 bp, Homo sapien
tcaatgatttgctgatagcttctcc

SEQ ID NO: 4369434 - DNA, 25 bp, Homo sapien
tttgaataaggggactttacagcat

SEQ ID NO: 4369435 - DNA, 25 bp, Homo sapien
caacattgtattaagggtcccagaa

SEQ ID NO: 4369436 - DNA, 25 bp, Homo sapien
agctccatcaggtgtcttatggaga

SEQ ID NO: 4369437 - DNA, 25 bp, Homo sapien
tgtcttatggagagtaacactgcct

SEQ ID NO: 4369438 - DNA, 25 bp, Homo sapien
tcaggtgtcttatggagagtaacac

SEQ ID NO: 4369439 - DNA, 25 bp, Homo sapien
tcttatggagagtaacactgcctca

SEQ ID NO: 4369440 - DNA, 25 bp, Homo sapien
catctagaagacttgctctaagacc

SEQ ID NO: 4369441 - DNA, 25 bp, Homo sapien
gaccattatacagatgatagcaatg

SEQ ID NO: 4369442 - DNA, 25 bp, Homo sapien
gaagacttgctctaagaccattata

SEQ ID NO: 4369443 - DNA, 25 bp, Homo sapien
ggcagttgatagtcatctagaagac

SEQ ID NO: 4369444 - DNA, 25 bp, Homo sapien
cacataaacgacatcatctatggta

SEQ ID NO: 4369445 - DNA, 25 bp, Homo sapien
tgttctgagtatcaaaatgcgtctc

SEQ ID NO: 4369446 - DNA, 25 bp, Homo sapien
acccactcagcggacattgtactga

SEQ ID NO: 4369447 - DNA, 25 bp, Homo sapien
tttggcattagctttactaacccac

SEQ ID NO: 4369448 - DNA, 25 bp, Homo sapien
gcaattactattttccgaacaccag

SEQ ID NO: 4369449 - DNA, 25 bp, Homo sapien
tagcaattactattttccgaacacc

SEQ ID NO: 4369450 - DNA, 25 bp, Homo sapien
ctagtctccgcaatgttggtagcaa

SEQ ID NO: 4369451 - DNA, 25 bp, Homo sapien
ccgcaatgttggtagcaattactat

SEQ ID NO: 4369452 - DNA, 25 bp, Homo sapien
caagaataatgaagtcaagtctcca

SEQ ID NO: 4369453 - DNA, 25 bp, Homo sapien
gataggtaatcaagtaccactggcg

SEQ ID NO: 4369454 - DNA, 25 bp, Homo sapien
gaacaaatgtcaactgtgcagctgt

SEQ ID NO: 4369455 - DNA, 25 bp, Homo sapien
tctactagcttgagatcagattgga

SEQ ID NO: 4369456 - DNA, 25 bp, Homo sapien
gcatcagtgaatgtaaaggtataat

SEQ ID NO: 4369457 - DNA, 25 bp, Homo sapien
gcagaaagaccagtatcgcaccatc

SEQ ID NO: 4369458 - DNA, 25 bp, Homo sapien
caagagatcatgtaaagtgctgata

SEQ ID NO: 4369459 - DNA, 25 bp, Homo sapien
agtgctgatattgtcccagcctggc

SEQ ID NO: 4369460 - DNA, 25 bp, Homo sapien
tacttgtgacatcaagagatcatgt

SEQ ID NO: 4369461 - DNA, 25 bp, Homo sapien
caaattcagatcaactttatcatcc

SEQ ID NO: 4369462 - DNA, 25 bp, Homo sapien
tcaaattcagatcaactttatcatc

SEQ ID NO: 4369463 - DNA, 25 bp, Homo sapien
caatgtatcggatgagggcaacaat

SEQ ID NO: 4369464 - DNA, 25 bp, Homo sapien
tgtatcggatgagggcaacaatcaa

SEQ ID NO: 4369465 - DNA, 25 bp, Homo sapien
cttcttcgcagttcccttacataat

SEQ ID NO: 4369466 - DNA, 25 bp, Homo sapien
catgaaacccctcttaaactgggat

SEQ ID NO: 4369467 - DNA, 25 bp, Homo sapien
cgcagttcccttacataatctggcc

SEQ ID NO: 4369468 - DNA, 25 bp, Homo sapien
tgcatgaaacccctcttaaactggg

SEQ ID NO: 4369469 - DNA, 25 bp, Homo sapien
caggtatatgtatcattggacagtt

SEQ ID NO: 4369470 - DNA, 25 bp, Homo sapien
aaccaggtatatgtatcattggaca

SEQ ID NO: 4369471 - DNA, 25 bp, Homo sapien
ccaggtatatgtatcattggacagt

SEQ ID NO: 4369472 - DNA, 25 bp, Homo sapien
ggtatatgtatcattggacagttac

SEQ ID NO: 4369473 - DNA, 25 bp, Homo sapien
catggatttcatcaagtacgatatg

SEQ ID NO: 4369474 - DNA, 25 bp, Homo sapien
tcagatcgaaaattgagaaggtctt

SEQ ID NO: 4369475 - DNA, 25 bp, Homo sapien
cattcaatgttgcactcatcaatat

SEQ ID NO: 4369476 - DNA, 25 bp, Homo sapien
caatattactttcaagtcagatcga

SEQ ID NO: 4369477 - DNA, 25 bp, Homo sapien
gtacagtataagatagaaccctgtt

SEQ ID NO: 4369478 - DNA, 25 bp, Homo sapien
tataagatagaaccctgtttccttg

SEQ ID NO: 4369479 - DNA, 25 bp, Homo sapien
taagatagaaccctgtttccttggc

SEQ ID NO: 4369480 - DNA, 25 bp, Homo sapien
cagtataagatagaaccctgtttcc

SEQ ID NO: 4369481 - DNA, 25 bp, Homo sapien
ctcttctaataattaactaccacaa

SEQ ID NO: 4369482 - DNA, 25 bp, Homo sapien
tcttctaataattaactaccacaaa

SEQ ID NO: 4369483 - DNA, 25 bp, Homo sapien
cttctaataattaactaccacaaag

SEQ ID NO: 4369484 - DNA, 25 bp, Homo sapien
cactgccacaagattctgccctttc

SEQ ID NO: 4369485 - DNA, 25 bp, Homo sapien
ccagtactattaccactgccacaag

SEQ ID NO: 4369486 - DNA, 25 bp, Homo sapien
ctctggagacgaatttgatatccag

SEQ ID NO: 4369487 - DNA, 25 bp, Homo sapien
gatatccagtactattaccactgcc

SEQ ID NO: 4369488 - DNA, 25 bp, Homo sapien
caatcctaagcctaattaagaatca

SEQ ID NO: 4369489 - DNA, 25 bp, Homo sapien
tgctttcatagtcaccaatcctaag

SEQ ID NO: 4369490 - DNA, 25 bp, Homo sapien
tatctgttaagagagaggttactca

SEQ ID NO: 4369491 - DNA, 25 bp, Homo sapien
taagaatcactccacaccttcagaa

SEQ ID NO: 4369492 - DNA, 25 bp, Homo sapien
tactgttacctgatggttatcaatt

SEQ ID NO: 4369493 - DNA, 25 bp, Homo sapien
acttgagtggttttgccacaaccag

SEQ ID NO: 4369494 - DNA, 25 bp, Homo sapien
tcttggctgagtacaaactattctg

SEQ ID NO: 4369495 - DNA, 25 bp, Homo sapien
tccaaaatgaactgagtaacttgag

SEQ ID NO: 4369496 - DNA, 25 bp, Homo sapien
tcaaaattcgaccaaactgaacata

SEQ ID NO: 4369497 - DNA, 25 bp, Homo sapien
gccatatccaatactggcagtttgg

SEQ ID NO: 4369498 - DNA, 25 bp, Homo sapien
ggcagtttggatatctggatctacc

SEQ ID NO: 4369499 - DNA, 25 bp, Homo sapien
cctgcaagagataagtgcaccaaat

SEQ ID NO: 4369500 - DNA, 25 bp, Homo sapien
gcattccatacgaaggcagcttttc

SEQ ID NO: 4369501 - DNA, 25 bp, Homo sapien
cattccatacgaaggcagcttttct

SEQ ID NO: 4369502 - DNA, 25 bp, Homo sapien
tgcattccatacgaaggcagctttt

SEQ ID NO: 4369503 - DNA, 25 bp, Homo sapien
ttgcattccatacgaaggcagcttt

SEQ ID NO: 4369504 - DNA, 25 bp, Homo sapien
tacggaaatccaactgtcatcagta

SEQ ID NO: 4369505 - DNA, 25 bp, Homo sapien
gagctacacaatttggccctggaca

SEQ ID NO: 4369506 - DNA, 25 bp, Homo sapien
tcatcagtaacagtcaatggatcct

SEQ ID NO: 4369507 - DNA, 25 bp, Homo sapien
tcctcctgttaaggctgttaaagca

SEQ ID NO: 4369508 - DNA, 25 bp, Homo sapien
tgcacatggcacctcactaaactgg

SEQ ID NO: 4369509 - DNA, 25 bp, Homo sapien
cattggcactagcatttctcaaaca

SEQ ID NO: 4369510 - DNA, 25 bp, Homo sapien
gatctcactgatctatgccatgcag

SEQ ID NO: 4369511 - DNA, 25 bp, Homo sapien
tgccatgcagctacctctaaccata

SEQ ID NO: 4369512 - DNA, 25 bp, Homo sapien
gagatactcagaatctcggtcaata

SEQ ID NO: 4369513 - DNA, 25 bp, Homo sapien
ggtctaaagttccatctggttcatt

SEQ ID NO: 4369514 - DNA, 25 bp, Homo sapien
ctgcatttcaatataccgaaggtca

SEQ ID NO: 4369515 - DNA, 25 bp, Homo sapien
cggtcaatatatgatctgttcctga

SEQ ID NO: 4369516 - DNA, 25 bp, Homo sapien
gcatggtgtgttcttagtagaaact

SEQ ID NO: 4369517 - DNA, 25 bp, Homo sapien
ggtgtgttcttagtagaaacttcag

SEQ ID NO: 4369518 - DNA, 25 bp, Homo sapien
tcttagtagaaacttcagtaccgta

SEQ ID NO: 4369519 - DNA, 25 bp, Homo sapien
ctgagcatggtgtgttcttagtaga

SEQ ID NO: 4369520 - DNA, 25 bp, Homo sapien
caatttgttcttctcgtcgttcatc

SEQ ID NO: 4369521 - DNA, 25 bp, Homo sapien
gactctttatcattcttcgcttgaa

SEQ ID NO: 4369522 - DNA, 25 bp, Homo sapien
tcgcttgaacagaattcagtaactg

SEQ ID NO: 4369523 - DNA, 25 bp, Homo sapien
catgatcctcaggagcaaaccagga

SEQ ID NO: 4369524 - DNA, 25 bp, Homo sapien
gaaaggtcgctatgtgcttcttcac

SEQ ID NO: 4369525 - DNA, 25 bp, Homo sapien
tggctaatgttacgcagtacacccg

SEQ ID NO: 4369526 - DNA, 25 bp, Homo sapien
tctaagggaaaggacggccagagat

SEQ ID NO: 4369527 - DNA, 25 bp, Homo sapien
gggagcgccagcataatatatttgc

SEQ ID NO: 4369528 - DNA, 25 bp, Homo sapien
tcatcctctccactactgaatccga

SEQ ID NO: 4369529 - DNA, 25 bp, Homo sapien
tcctctccactactgaatccgagat

SEQ ID NO: 4369530 - DNA, 25 bp, Homo sapien
ctctccactactgaatccgagatta

SEQ ID NO: 4369531 - DNA, 25 bp, Homo sapien
tctccactactgaatccgagattac

SEQ ID NO: 4369532 - DNA, 25 bp, Homo sapien
taccacatgccgatttcgcggcctt

SEQ ID NO: 4369533 - DNA, 25 bp, Homo sapien
cggcctttcaggtgcccgggatgcc

SEQ ID NO: 4369534 - DNA, 25 bp, Homo sapien
tgttttttcgcgtaccacatgccga

SEQ ID NO: 4369535 - DNA, 25 bp, Homo sapien
tcttctgcccctgttttttcgcgta

SEQ ID NO: 4369536 - DNA, 25 bp, Homo sapien
gccccagttctgatggtagtcataa

SEQ ID NO: 4369537 - DNA, 25 bp, Homo sapien
tcacggccccagttctgatggtagt

SEQ ID NO: 4369538 - DNA, 25 bp, Homo sapien
ccatcacggccccagttctgatggt

SEQ ID NO: 4369539 - DNA, 25 bp, Homo sapien
cagttctgatggtagtcataactca

SEQ ID NO: 4369540 - DNA, 25 bp, Homo sapien
agcaaccgctggaaatggcgtccgg

SEQ ID NO: 4369541 - DNA, 25 bp, Homo sapien
agactacaacccgtcagaaccagca

SEQ ID NO: 4369542 - DNA, 25 bp, Homo sapien
ccgtcagaaccagcaaccgctggaa

SEQ ID NO: 4369543 - DNA, 25 bp, Homo sapien
tgtcctggcagactacaacccgtca

SEQ ID NO: 4369544 - DNA, 25 bp, Homo sapien
gcttaggcacagctctagtagattt

SEQ ID NO: 4369545 - DNA, 25 bp, Homo sapien
caaggatttggagcgtcattcatgc

SEQ ID NO: 4369546 - DNA, 25 bp, Homo sapien
gtcacaactctcagaagtcttaggg

SEQ ID NO: 4369547 - DNA, 25 bp, Homo sapien
caaagagttgcctctgtcagtcaca

SEQ ID NO: 4369548 - DNA, 25 bp, Homo sapien
gattttgctctgctgtatccagaag

SEQ ID NO: 4369549 - DNA, 25 bp, Homo sapien
gaaacattctgaaagccgatgtcaa

SEQ ID NO: 4369550 - DNA, 25 bp, Homo sapien
taccatgtttggatgtacctctcat

SEQ ID NO: 4369551 - DNA, 25 bp, Homo sapien
gactaagaaaggttgcccaatcctc

SEQ ID NO: 4369552 - DNA, 25 bp, Homo sapien
gctaaagcagtaagtgtaataagct

SEQ ID NO: 4369553 - DNA, 25 bp, Homo sapien
gactaggaacctgcgtgtttctcag

SEQ ID NO: 4369554 - DNA, 25 bp, Homo sapien
tatgcatggaacagtatattcactg

SEQ ID NO: 4369555 - DNA, 25 bp, Homo sapien
tctcagttggaagctaatttttcat

SEQ ID NO: 4369556 - DNA, 25 bp, Homo sapien
gcaaaaacattggtaaactaggcca

SEQ ID NO: 4369557 - DNA, 25 bp, Homo sapien
tttacactagttccagttgttccca

SEQ ID NO: 4369558 - DNA, 25 bp, Homo sapien
ttgctcctgttagaccaaataccca

SEQ ID NO: 4369559 - DNA, 25 bp, Homo sapien
cacagttgacgttgcagatccattc

SEQ ID NO: 4369560 - DNA, 25 bp, Homo sapien
ccacaaacgtggatgaagaatcttc

SEQ ID NO: 4369561 - DNA, 25 bp, Homo sapien
cctgtgtgcttctactgtgtctgga

SEQ ID NO: 4369562 - DNA, 25 bp, Homo sapien
caacacttttggatcgatagacttc

SEQ ID NO: 4369563 - DNA, 25 bp, Homo sapien
ccatcaggattactggtgggcaaaa

SEQ ID NO: 4369564 - DNA, 25 bp, Homo sapien
tgtaggtgcatggagagacacagtc

SEQ ID NO: 4369565 - DNA, 25 bp, Homo sapien
taggtgcatggagagacacagtccc

SEQ ID NO: 4369566 - DNA, 25 bp, Homo sapien
ctgtaggtgcatggagagacacagt

SEQ ID NO: 4369567 - DNA, 25 bp, Homo sapien
gtaggtgcatggagagacacagtcc

SEQ ID NO: 4369568 - DNA, 25 bp, Homo sapien
tggaatgcacacaagggaatggcaa

SEQ ID NO: 4369569 - DNA, 25 bp, Homo sapien
ggaatggcaagggcataaccggaac

SEQ ID NO: 4369570 - DNA, 25 bp, Homo sapien
gaatggcaagggcataaccggaacg

SEQ ID NO: 4369571 - DNA, 25 bp, Homo sapien
gggaatggcaagggcataaccggaa

SEQ ID NO: 4369572 - DNA, 25 bp, Homo sapien
gtgagtcggttcctccaaataccag

SEQ ID NO: 4369573 - DNA, 25 bp, Homo sapien
gtctgtgagtcggttcctccaaata

SEQ ID NO: 4369574 - DNA, 25 bp, Homo sapien
ctatgtctgtgagtcggttcctcca

SEQ ID NO: 4369575 - DNA, 25 bp, Homo sapien
tatgtctgtgagtcggttcctccaa

SEQ ID NO: 4369576 - DNA, 25 bp, Homo sapien
cactggtagattaagtatcaaatat

SEQ ID NO: 4369577 - DNA, 25 bp, Homo sapien
tcacactggtagattaagtatcaaa

SEQ ID NO: 4369578 - DNA, 25 bp, Homo sapien
tatcaaatattcagtcaaaactcca

SEQ ID NO: 4369579 - DNA, 25 bp, Homo sapien
aaatattcagtcaaaactccatttg

SEQ ID NO: 4369580 - DNA, 25 bp, Homo sapien
ggccaccagatggaccacctgactg

SEQ ID NO: 4369581 - DNA, 25 bp, Homo sapien
gggattagaagacttgtttccatca

SEQ ID NO: 4369582 - DNA, 25 bp, Homo sapien
tggaatcgtgccacactgcctgtaa

SEQ ID NO: 4369583 - DNA, 25 bp, Homo sapien
tctgtctacctgataggccaccaga

SEQ ID NO: 4369584 - DNA, 25 bp, Homo sapien
actggtaatctgagacgctgtatta

SEQ ID NO: 4369585 - DNA, 25 bp, Homo sapien
ctgagacgctgtattactacttagc

SEQ ID NO: 4369586 - DNA, 25 bp, Homo sapien
aatctgagacgctgtattactactt

SEQ ID NO: 4369587 - DNA, 25 bp, Homo sapien
acactggtaatctgagacgctgtat

SEQ ID NO: 4369588 - DNA, 25 bp, Homo sapien
cagcataagaaacggaagtcagaaa

SEQ ID NO: 4369589 - DNA, 25 bp, Homo sapien
gcagcataagaaacggaagtcagaa

SEQ ID NO: 4369590 - DNA, 25 bp, Homo sapien
gcataagaaacggaagtcagaaacc

SEQ ID NO: 4369591 - DNA, 25 bp, Homo sapien
cataagaaacggaagtcagaaacct

SEQ ID NO: 4369592 - DNA, 25 bp, Homo sapien
ggagaatgttgaatcaccaggtcta

SEQ ID NO: 4369593 - DNA, 25 bp, Homo sapien
aggaatgtgcaaactatgggcagcc

SEQ ID NO: 4369594 - DNA, 25 bp, Homo sapien
agagcgatggatacgggcctcaaca

SEQ ID NO: 4369595 - DNA, 25 bp, Homo sapien
tgtgcaaactatgggcagccacatt

SEQ ID NO: 4369596 - DNA, 25 bp, Homo sapien
acactgaatggccaagtgttccaca

SEQ ID NO: 4369597 - DNA, 25 bp, Homo sapien
caatgacactgaatggccaagtgtt

SEQ ID NO: 4369598 - DNA, 25 bp, Homo sapien
gaatggccaagtgttccacagtagt

SEQ ID NO: 4369599 - DNA, 25 bp, Homo sapien
actgaatggccaagtgttccacagt

SEQ ID NO: 4369600 - DNA, 25 bp, Homo sapien
aaatctaaatctaacgtttgatcca

SEQ ID NO: 4369601 - DNA, 25 bp, Homo sapien
cattaaaatctaaatctaacgtttg

SEQ ID NO: 4369602 - DNA, 25 bp, Homo sapien
taaaatctaaatctaacgtttgatc

SEQ ID NO: 4369603 - DNA, 25 bp, Homo sapien
tatggtattgcaccataaaaacaca

SEQ ID NO: 4369604 - DNA, 25 bp, Homo sapien
gtattgcaccataaaaacacaccat

SEQ ID NO: 4369605 - DNA, 25 bp, Homo sapien
tgatatggtattgcaccataaaaac

SEQ ID NO: 4369606 - DNA, 25 bp, Homo sapien
tggctttgatatggtattgcaccat

SEQ ID NO: 4369607 - DNA, 25 bp, Homo sapien
tgtccatgctcgagctattaaatct

SEQ ID NO: 4369608 - DNA, 25 bp, Homo sapien
tggcaaaaaagaatgtctttcctgt

SEQ ID NO: 4369609 - DNA, 25 bp, Homo sapien
ttctttggagtctttcaatcaaggg

SEQ ID NO: 4369610 - DNA, 25 bp, Homo sapien
ctgttcctgtccatgctcgagctat

SEQ ID NO: 4369611 - DNA, 25 bp, Homo sapien
tcctccaagggtgttttcagctcca

SEQ ID NO: 4369612 - DNA, 25 bp, Homo sapien
cctccaagggtgttttcagctccat

SEQ ID NO: 4369613 - DNA, 25 bp, Homo sapien
tttaactccatagagcctatacggg

SEQ ID NO: 4369614 - DNA, 25 bp, Homo sapien
cctgcagattgaagttggccaagaa

SEQ ID NO: 4369615 - DNA, 25 bp, Homo sapien
gagaccatgtaagatcctgtagata

SEQ ID NO: 4369616 - DNA, 25 bp, Homo sapien
gatatggtcatatacagggatgtgc

SEQ ID NO: 4369617 - DNA, 25 bp, Homo sapien
tcaaggtcaaacagccaataagtgg

SEQ ID NO: 4369618 - DNA, 25 bp, Homo sapien
gtggtagaactggaattccaatctg

SEQ ID NO: 4369619 - DNA, 25 bp, Homo sapien
cagatgttaagtatgtttttcaagg

SEQ ID NO: 4369620 - DNA, 25 bp, Homo sapien
gaattccaatctgggcagtatggca

SEQ ID NO: 4369621 - DNA, 25 bp, Homo sapien
ggaaatgagttctgtgaaagtgaaa

SEQ ID NO: 4369622 - DNA, 25 bp, Homo sapien
aggggaaatgagttctgtgaaagtg

SEQ ID NO: 4369623 - DNA, 25 bp, Homo sapien
caggggaaatgagttctgtgaaagt

SEQ ID NO: 4369624 - DNA, 25 bp, Homo sapien
gtaacaaagatgacctttcctccag

SEQ ID NO: 4369625 - DNA, 25 bp, Homo sapien
tctagcacgcactttaaaactggtc

SEQ ID NO: 4369626 - DNA, 25 bp, Homo sapien
tccaccaaatgtcttagttcatggc

SEQ ID NO: 4369627 - DNA, 25 bp, Homo sapien
ggacatgaacataattcaggcagtt

SEQ ID NO: 4369628 - DNA, 25 bp, Homo sapien
gagatagataaattctcagaaacat

SEQ ID NO: 4369629 - DNA, 25 bp, Homo sapien
ggaagagatagataaattctcagaa

SEQ ID NO: 4369630 - DNA, 25 bp, Homo sapien
atagataaattctcagaaacataca

SEQ ID NO: 4369631 - DNA, 25 bp, Homo sapien
ctggaagagatagataaattctcag

SEQ ID NO: 4369632 - DNA, 25 bp, Homo sapien
gatgcctctttgtgtggagctgtcc

SEQ ID NO: 4369633 - DNA, 25 bp, Homo sapien
agagggcgtggtgctgatttctact

SEQ ID NO: 4369634 - DNA, 25 bp, Homo sapien
gatgttacggttgtctctctgaggg

SEQ ID NO: 4369635 - DNA, 25 bp, Homo sapien
tgttggaatcctgtttagcttctgt

SEQ ID NO: 4369636 - DNA, 25 bp, Homo sapien
tccagcgtttggacaagacaaacac

SEQ ID NO: 4369637 - DNA, 25 bp, Homo sapien
tggccagcagggtaagtagaaagct

SEQ ID NO: 4369638 - DNA, 25 bp, Homo sapien
tgaaaccccacgacgttctggacca

SEQ ID NO: 4369639 - DNA, 25 bp, Homo sapien
tttttcccatcggacgccactgcat

SEQ ID NO: 4369640 - DNA, 25 bp, Homo sapien
ccctgctggagatgggcgtcgtcct

SEQ ID NO: 4369641 - DNA, 25 bp, Homo sapien
ctccctccacaactgatctctcctc

SEQ ID NO: 4369642 - DNA, 25 bp, Homo sapien
cgcccatgcgcgctcgtcacagtgg

SEQ ID NO: 4369643 - DNA, 25 bp, Homo sapien
cctcttaatcggcttcctcctggaa

SEQ ID NO: 4369644 - DNA, 25 bp, Homo sapien
tccgaaggccaaagcgtacacgata

SEQ ID NO: 4369645 - DNA, 25 bp, Homo sapien
tcatgggcagccaaaggacgacttt

SEQ ID NO: 4369646 - DNA, 25 bp, Homo sapien
ccttcaagttgctagagaggccctg

SEQ ID NO: 4369647 - DNA, 25 bp, Homo sapien
tgaagatggtcaccgacaggacgct

SEQ ID NO: 4369648 - DNA, 25 bp, Homo sapien
tctttccacaggctagagtcatttg

SEQ ID NO: 4369649 - DNA, 25 bp, Homo sapien
taaaaggtccgtagaattatgattc

SEQ ID NO: 4369650 - DNA, 25 bp, Homo sapien
tagatattcagggttcctggcggat

SEQ ID NO: 4369651 - DNA, 25 bp, Homo sapien
gtcatgagacatgtcaagcaaaaaa

SEQ ID NO: 4369652 - DNA, 25 bp, Homo sapien
ttctcaaaagaaagaccggctgctg

SEQ ID NO: 4369653 - DNA, 25 bp, Homo sapien
gggtccttcttatggagcaaagcag

SEQ ID NO: 4369654 - DNA, 25 bp, Homo sapien
ttgtcagtcctgcagaaaatggtca

SEQ ID NO: 4369655 - DNA, 25 bp, Homo sapien
aatggtcagccatgtctcctttaga

SEQ ID NO: 4369656 - DNA, 25 bp, Homo sapien
catgtggcccaagctaagcccattg

SEQ ID NO: 4369657 - DNA, 25 bp, Homo sapien
gtgttccattctccatgacctaagg

SEQ ID NO: 4369658 - DNA, 25 bp, Homo sapien
ggcatgtggcccaagctaagcccat

SEQ ID NO: 4369659 - DNA, 25 bp, Homo sapien
gttccattctccatgacctaagggg

SEQ ID NO: 4369660 - DNA, 25 bp, Homo sapien
ttttcagactcatctgtcctcctaa

SEQ ID NO: 4369661 - DNA, 25 bp, Homo sapien
tctgtcctcctaacatgtttagttc

SEQ ID NO: 4369662 - DNA, 25 bp, Homo sapien
ctcctaacatgtttagttctatgtg

SEQ ID NO: 4369663 - DNA, 25 bp, Homo sapien
cagactcatctgtcctcctaacatg

SEQ ID NO: 4369664 - DNA, 25 bp, Homo sapien
tatttggcattgagttgccctcctc

SEQ ID NO: 4369665 - DNA, 25 bp, Homo sapien
acccctttgagcttgattctgtctg

SEQ ID NO: 4369666 - DNA, 25 bp, Homo sapien
agtgccttggaacaacttctcatct

SEQ ID NO: 4369667 - DNA, 25 bp, Homo sapien
tctgtctgtgagtagtttatttggc

SEQ ID NO: 4369668 - DNA, 25 bp, Homo sapien
tcttgaatggtaagtattcccctgg

SEQ ID NO: 4369669 - DNA, 25 bp, Homo sapien
acagaattaggtcctagtaaagctg

SEQ ID NO: 4369670 - DNA, 25 bp, Homo sapien
gagattgttgaatcctgcatcttga

SEQ ID NO: 4369671 - DNA, 25 bp, Homo sapien
aattaggtcctagtaaagctgtggg

SEQ ID NO: 4369672 - DNA, 25 bp, Homo sapien
caagactcgtggtgatgccggtgct

SEQ ID NO: 4369673 - DNA, 25 bp, Homo sapien
ctttccccaagactcgtggtgatgc

SEQ ID NO: 4369674 - DNA, 25 bp, Homo sapien
tggtgatgccggtgcttgtcatctt

SEQ ID NO: 4369675 - DNA, 25 bp, Homo sapien
tctgttctccctgtaggacatccat

SEQ ID NO: 4369676 - DNA, 25 bp, Homo sapien
acattgggaatgctgatctagtgga

SEQ ID NO: 4369677 - DNA, 25 bp, Homo sapien
gtggaagccacttaatattctgtgg

SEQ ID NO: 4369678 - DNA, 25 bp, Homo sapien
gctttatagcccatgtgtgaatttc

SEQ ID NO: 4369679 - DNA, 25 bp, Homo sapien
ttaggatgcatataaactccttggg

SEQ ID NO: 4369680 - DNA, 25 bp, Homo sapien
ttcctaagaagccagcattgctgct

SEQ ID NO: 4369681 - DNA, 25 bp, Homo sapien
ggctcttagtggctatcgaagcttt

SEQ ID NO: 4369682 - DNA, 25 bp, Homo sapien
tgctatagtggaaccaggggctctt

SEQ ID NO: 4369683 - DNA, 25 bp, Homo sapien
tctcaatggtccatggctttcctaa

SEQ ID NO: 4369684 - DNA, 25 bp, Homo sapien
tagcacgtgcattgggcatctgcag

SEQ ID NO: 4369685 - DNA, 25 bp, Homo sapien
aatttatctgtagcacgtgcattgg

SEQ ID NO: 4369686 - DNA, 25 bp, Homo sapien
cattgggcatctgcagccatctaga

SEQ ID NO: 4369687 - DNA, 25 bp, Homo sapien
tctgtagcacgtgcattgggcatct

SEQ ID NO: 4369688 - DNA, 25 bp, Homo sapien
tataaattgtagaggctatggctga

SEQ ID NO: 4369689 - DNA, 25 bp, Homo sapien
ctatggctgaatgtgtttgatattt

SEQ ID NO: 4369690 - DNA, 25 bp, Homo sapien
gtgtttgatatttagaatacccaag

SEQ ID NO: 4369691 - DNA, 25 bp, Homo sapien
tacccaagatcatcgccaggtctaa

SEQ ID NO: 4369692 - DNA, 25 bp, Homo sapien
actgcttctggcaaattgaaatgca

SEQ ID NO: 4369693 - DNA, 25 bp, Homo sapien
ctgcttctggcaaattgaaatgcaa

SEQ ID NO: 4369694 - DNA, 25 bp, Homo sapien
ttctggcaaattgaaatgcaaacat

SEQ ID NO: 4369695 - DNA, 25 bp, Homo sapien
gcttctggcaaattgaaatgcaaac

SEQ ID NO: 4369696 - DNA, 25 bp, Homo sapien
tacatatggtctctatatatccatc

SEQ ID NO: 4369697 - DNA, 25 bp, Homo sapien
tatatccatcataaaataagcaccc

SEQ ID NO: 4369698 - DNA, 25 bp, Homo sapien
tgtttgcctcataaacttacctgct

SEQ ID NO: 4369699 - DNA, 25 bp, Homo sapien
cctctagcctgtccatatgatctca

SEQ ID NO: 4369700 - DNA, 25 bp, Homo sapien
ggtccaatggagttaggtaattctg

SEQ ID NO: 4369701 - DNA, 25 bp, Homo sapien
caggattggtgattacagcttgcac

SEQ ID NO: 4369702 - DNA, 25 bp, Homo sapien
cctaaaattatatcattgggtgaat

SEQ ID NO: 4369703 - DNA, 25 bp, Homo sapien
ccacactgtcatgccttgttatatg

SEQ ID NO: 4369704 - DNA, 25 bp, Homo sapien
aaatctccacaagtggcaaaagcac

SEQ ID NO: 4369705 - DNA, 25 bp, Homo sapien
tgagggttgaggctgatctggaagg

SEQ ID NO: 4369706 - DNA, 25 bp, Homo sapien
gaaatgatctgttggagaatatcga

SEQ ID NO: 4369707 - DNA, 25 bp, Homo sapien
tggagaatatcgaagtcaagcagct

SEQ ID NO: 4369708 - DNA, 25 bp, Homo sapien
ctccaatagctggtatcctcaaggc

SEQ ID NO: 4369709 - DNA, 25 bp, Homo sapien
gtatcctcaaggctttgctgtttgg

SEQ ID NO: 4369710 - DNA, 25 bp, Homo sapien
ccatagctaactccaatagctggta

SEQ ID NO: 4369711 - DNA, 25 bp, Homo sapien
atcctcaaggctttgctgtttggtg

SEQ ID NO: 4369712 - DNA, 25 bp, Homo sapien
caggagacttttgcagtggacaacc

SEQ ID NO: 4369713 - DNA, 25 bp, Homo sapien
gacttttgcagtggacaacctcctg

SEQ ID NO: 4369714 - DNA, 25 bp, Homo sapien
ccccaggagacttttgcagtggaca

SEQ ID NO: 4369715 - DNA, 25 bp, Homo sapien
cttttgcagtggacaacctcctgct

SEQ ID NO: 4369716 - DNA, 25 bp, Homo sapien
gggagcaggatctaaggaaaatctc

SEQ ID NO: 4369717 - DNA, 25 bp, Homo sapien
aataactctgattggctttgactgg

SEQ ID NO: 4369718 - DNA, 25 bp, Homo sapien
aaatctcagggtattaccatttgca

SEQ ID NO: 4369719 - DNA, 25 bp, Homo sapien
taacgagctccaacagttttcccat

SEQ ID NO: 4369720 - DNA, 25 bp, Homo sapien
ttttcctggaattccagttcctcca

SEQ ID NO: 4369721 - DNA, 25 bp, Homo sapien
tttcctggaattccagttcctccat

SEQ ID NO: 4369722 - DNA, 25 bp, Homo sapien
agttcagcgtgttcttagctaccag

SEQ ID NO: 4369723 - DNA, 25 bp, Homo sapien
ttagggaattaagttcagcgtgttc

SEQ ID NO: 4369724 - DNA, 25 bp, Homo sapien
gaggagcacagattcggttaaatag

SEQ ID NO: 4369725 - DNA, 25 bp, Homo sapien
tgaggagcacagattcggttaaata

SEQ ID NO: 4369726 - DNA, 25 bp, Homo sapien
tttgcccagaaagcaacttgcggtt

SEQ ID NO: 4369727 - DNA, 25 bp, Homo sapien
aaaagactttcttgaagtgaacatc

SEQ ID NO: 4369728 - DNA, 25 bp, Homo sapien
tttcttgaagtgaacatcacacagc

SEQ ID NO: 4369729 - DNA, 25 bp, Homo sapien
tgcccagaaagcaacttgcggtttt

SEQ ID NO: 4369730 - DNA, 25 bp, Homo sapien
aaccacagtatttaagccagcgaca

SEQ ID NO: 4369731 - DNA, 25 bp, Homo sapien
tttaagccagcgacatgtgagtctg

SEQ ID NO: 4369732 - DNA, 25 bp, Homo sapien
cagcgacatgtgagtctgggagcca

SEQ ID NO: 4369733 - DNA, 25 bp, Homo sapien
gggagggttagcacaaccacagtat

SEQ ID NO: 4369734 - DNA, 25 bp, Homo sapien
tgtcagatctttgtgccaccaggct

SEQ ID NO: 4369735 - DNA, 25 bp, Homo sapien
caccccaaatttgacttgtctctaa

SEQ ID NO: 4369736 - DNA, 25 bp, Homo sapien
tgtctctgcactgtcaatgtctcgg

SEQ ID NO: 4369737 - DNA, 25 bp, Homo sapien
ctcttgaacttgatggtgtctctgc

SEQ ID NO: 4369738 - DNA, 25 bp, Homo sapien
ttagggagtagttagttgcacaatc

SEQ ID NO: 4369739 - DNA, 25 bp, Homo sapien
catgttgtgctgattgatgttattt

SEQ ID NO: 4369740 - DNA, 25 bp, Homo sapien
tagttgcacaatcttcattatctca

SEQ ID NO: 4369741 - DNA, 25 bp, Homo sapien
gctgattgatgttatttcatcctcc

SEQ ID NO: 4369742 - DNA, 25 bp, Homo sapien
aatccacagcttgcagagcaacagc

SEQ ID NO: 4369743 - DNA, 25 bp, Homo sapien
ctgtagaatccacagcttgcagagc

SEQ ID NO: 4369744 - DNA, 25 bp, Homo sapien
gaatccacagcttgcagagcaacag

SEQ ID NO: 4369745 - DNA, 25 bp, Homo sapien
tagaatccacagcttgcagagcaac

SEQ ID NO: 4369746 - DNA, 25 bp, Homo sapien
ggcaggatacaacaggattactgaa

SEQ ID NO: 4369747 - DNA, 25 bp, Homo sapien
gatattagacctttgaatgataact

SEQ ID NO: 4369748 - DNA, 25 bp, Homo sapien
taagagggcatttcactgtagtttt

SEQ ID NO: 4369749 - DNA, 25 bp, Homo sapien
tgaatctcaggaaattagaatttcc

SEQ ID NO: 4369750 - DNA, 25 bp, Homo sapien
atgatcctggagacagcctctacat

SEQ ID NO: 4369751 - DNA, 25 bp, Homo sapien
tttctccacacacttctcctgatgg

SEQ ID NO: 4369752 - DNA, 25 bp, Homo sapien
ctggagacagcctctacatctttct

SEQ ID NO: 4369753 - DNA, 25 bp, Homo sapien
cacacttctcctgatggttggtcat

SEQ ID NO: 4369754 - DNA, 25 bp, Homo sapien
attgtgatttgtggagtccagaaga

SEQ ID NO: 4369755 - DNA, 25 bp, Homo sapien
aattgtgatttgtggagtccagaag

SEQ ID NO: 4369756 - DNA, 25 bp, Homo sapien
ttgtgatttgtggagtccagaagat

SEQ ID NO: 4369757 - DNA, 25 bp, Homo sapien
cctggtttactgatagcagctctca

SEQ ID NO: 4369758 - DNA, 25 bp, Homo sapien
taatgcatcccagaaatcccttgtc

SEQ ID NO: 4369759 - DNA, 25 bp, Homo sapien
cagcctcaattagagtaagtccaca

SEQ ID NO: 4369760 - DNA, 25 bp, Homo sapien
gcatctctgctggatagtcccactt

SEQ ID NO: 4369761 - DNA, 25 bp, Homo sapien
agttgaggaggccatttagaaaaat

SEQ ID NO: 4369762 - DNA, 25 bp, Homo sapien
ttcagagcagcttgcgaaagtctcc

SEQ ID NO: 4369763 - DNA, 25 bp, Homo sapien
caggtagaggtttaatgagtaagcc

SEQ ID NO: 4369764 - DNA, 25 bp, Homo sapien
tgtttggatatgaccaaaacacaga

SEQ ID NO: 4369765 - DNA, 25 bp, Homo sapien
tcaaaatcgaacttcaaaagtactg

SEQ ID NO: 4369766 - DNA, 25 bp, Homo sapien
ttgcttctccagaggctagctgcac

SEQ ID NO: 4369767 - DNA, 25 bp, Homo sapien
aatatcccactaagctttaggcaac

SEQ ID NO: 4369768 - DNA, 25 bp, Homo sapien
gagatttgcatataaggataaccaa

SEQ ID NO: 4369769 - DNA, 25 bp, Homo sapien
tttcctgacttgtttctaaggcaac

SEQ ID NO: 4369770 - DNA, 25 bp, Homo sapien
cacatgctcgagattgttgcttatg

SEQ ID NO: 4369771 - DNA, 25 bp, Homo sapien
cctgatctaggcgttatttcctgac

SEQ ID NO: 4369772 - DNA, 25 bp, Homo sapien
tgtggtatctcaaatgacagcagaa

SEQ ID NO: 4369773 - DNA, 25 bp, Homo sapien
gacagcaataacacataagacagga

SEQ ID NO: 4369774 - DNA, 25 bp, Homo sapien
gtagtcacactactccttaaatggc

SEQ ID NO: 4369775 - DNA, 25 bp, Homo sapien
tcagaaactacgtaaaggaagaatg

SEQ ID NO: 4369776 - DNA, 25 bp, Homo sapien
tgtcagagaatgagtaactaaaggt

SEQ ID NO: 4369777 - DNA, 25 bp, Homo sapien
cctcggcactgaaccagggccagga

SEQ ID NO: 4369778 - DNA, 25 bp, Homo sapien
ctgtgtcaggtattaacctcttagt

SEQ ID NO: 4369779 - DNA, 25 bp, Homo sapien
cggcactgaaccagggccaggaatg

SEQ ID NO: 4369780 - DNA, 25 bp, Homo sapien
gtgtcaggtattaacctcttagttg

SEQ ID NO: 4369781 - DNA, 25 bp, Homo sapien
cctgcaacattcttctgatgacttg

SEQ ID NO: 4369782 - DNA, 25 bp, Homo sapien
tgatgacttgccagagctcttaaag

SEQ ID NO: 4369783 - DNA, 25 bp, Homo sapien
tccagccttcaatcttagtgacaca

SEQ ID NO: 4369784 - DNA, 25 bp, Homo sapien
tctgctgagcaccactatcttgtag

SEQ ID NO: 4369785 - DNA, 25 bp, Homo sapien
ttgcagctactgtgttgccccacca

SEQ ID NO: 4369786 - DNA, 25 bp, Homo sapien
aatgcagtcatctccatctggacag

SEQ ID NO: 4369787 - DNA, 25 bp, Homo sapien
ggacagatcactatttccactgtgt

SEQ ID NO: 4369788 - DNA, 25 bp, Homo sapien
gcagctactgtgttgccccaccagg

SEQ ID NO: 4369789 - DNA, 25 bp, Homo sapien
agaggccacaaaactgtgctgcatg

SEQ ID NO: 4369790 - DNA, 25 bp, Homo sapien
catgtgtcctctggtaaagaggcca

SEQ ID NO: 4369791 - DNA, 25 bp, Homo sapien
tgtgctgcatgtgcccccggcttaa

SEQ ID NO: 4369792 - DNA, 25 bp, Homo sapien
tgtcctctggtaaagaggccacaaa

SEQ ID NO: 4369793 - DNA, 25 bp, Homo sapien
aggcatcaagatcaaagtcacactg

SEQ ID NO: 4369794 - DNA, 25 bp, Homo sapien
gcatcaagatcaaagtcacactgat

SEQ ID NO: 4369795 - DNA, 25 bp, Homo sapien
acactgatagagagctaacagaaat

SEQ ID NO: 4369796 - DNA, 25 bp, Homo sapien
tgatagagagctaacagaaataaaa

SEQ ID NO: 4369797 - DNA, 25 bp, Homo sapien
ttgattgattgatagctagatagct

SEQ ID NO: 4369798 - DNA, 25 bp, Homo sapien
aaatacttggagcatctaggaaatt

SEQ ID NO: 4369799 - DNA, 25 bp, Homo sapien
aattgattcctcgatatacgattga

SEQ ID NO: 4369800 - DNA, 25 bp, Homo sapien
gagcatctaggaaattgattcctcg

SEQ ID NO: 4369801 - DNA, 25 bp, Homo sapien
caaaggatgtggcatcagactgagc

SEQ ID NO: 4369802 - DNA, 25 bp, Homo sapien
cagaaatcgcaatcaacagcaccag

SEQ ID NO: 4369803 - DNA, 25 bp, Homo sapien
cagatgctcaagattccattttcaa

SEQ ID NO: 4369804 - DNA, 25 bp, Homo sapien
agagatcaaattccaggcgactccc

SEQ ID NO: 4369805 - DNA, 25 bp, Homo sapien
tctggaggaagtcatgttcaagtga

SEQ ID NO: 4369806 - DNA, 25 bp, Homo sapien
tcaagtgaggcctgatgaaagagta

SEQ ID NO: 4369807 - DNA, 25 bp, Homo sapien
gacccaggggaatgtcgtaggcttc

SEQ ID NO: 4369808 - DNA, 25 bp, Homo sapien
taggagttcactaagtgacccaggg

SEQ ID NO: 4369809 - DNA, 25 bp, Homo sapien
ttgggagacctagcggaaaccttca

SEQ ID NO: 4369810 - DNA, 25 bp, Homo sapien
aggtcacccagggaactgctcctct

SEQ ID NO: 4369811 - DNA, 25 bp, Homo sapien
ctagcggaaaccttcaggtcaccca

SEQ ID NO: 4369812 - DNA, 25 bp, Homo sapien
agtgactggatttgggagacctagc

SEQ ID NO: 4369813 - DNA, 25 bp, Homo sapien
catttggaaagtgcttgtcggcaaa

SEQ ID NO: 4369814 - DNA, 25 bp, Homo sapien
aggcgtgtagcttcatcccctgcca

SEQ ID NO: 4369815 - DNA, 25 bp, Homo sapien
gacttgcagcgtcagcatttggaaa

SEQ ID NO: 4369816 - DNA, 25 bp, Homo sapien
aatcgactgtatgaaggcgtgtagc

SEQ ID NO: 4369817 - DNA, 25 bp, Homo sapien
catgttgatcaatcattcttcccca

SEQ ID NO: 4369818 - DNA, 25 bp, Homo sapien
catcaacctgcaagaaatactaaaa

SEQ ID NO: 4369819 - DNA, 25 bp, Homo sapien
aattaaggaggactgatattatcag

SEQ ID NO: 4369820 - DNA, 25 bp, Homo sapien
tactaaaatactgatgactcggctg

SEQ ID NO: 4369821 - DNA, 25 bp, Homo sapien
tctgatgtctctaaagcactaccga

SEQ ID NO: 4369822 - DNA, 25 bp, Homo sapien
tctgggcctaaaggatagatcaaag

SEQ ID NO: 4369823 - DNA, 25 bp, Homo sapien
tccatcatgtcagagcaggtgaaga

SEQ ID NO: 4369824 - DNA, 25 bp, Homo sapien
tagtttcaagccaactgtggatacc

SEQ ID NO: 4369825 - DNA, 25 bp, Homo sapien
gagtatgtgtccaatgctgccttcc

SEQ ID NO: 4369826 - DNA, 25 bp, Homo sapien
gattgtaggtgcaagctgtccagag

SEQ ID NO: 4369827 - DNA, 25 bp, Homo sapien
agaagctctcgacaatacccgttgg

SEQ ID NO: 4369828 - DNA, 25 bp, Homo sapien
tacccgttggcaaggagtctgcctc

SEQ ID NO: 4369829 - DNA, 25 bp, Homo sapien
tcagggcttcctcaacctttgagtt

SEQ ID NO: 4369830 - DNA, 25 bp, Homo sapien
gttctatatttacattgctcagggc

SEQ ID NO: 4369831 - DNA, 25 bp, Homo sapien
ttaagtgtacagcatctataagttc

SEQ ID NO: 4369832 - DNA, 25 bp, Homo sapien
caagtgtgtgctgtccttggtaaca

SEQ ID NO: 4369833 - DNA, 25 bp, Homo sapien
cattgaattaggtccatcatgccta

SEQ ID NO: 4369834 - DNA, 25 bp, Homo sapien
ctaatttccgtaacagggcattgtt

SEQ ID NO: 4369835 - DNA, 25 bp, Homo sapien
atcatgcctaaattcaatgctctct

SEQ ID NO: 4369836 - DNA, 25 bp, Homo sapien
atttccgtaacagggcattgttact

SEQ ID NO: 4369837 - DNA, 25 bp, Homo sapien
cttccccagccctcacatccaggaa

SEQ ID NO: 4369838 - DNA, 25 bp, Homo sapien
ttccccagccctcacatccaggaac

SEQ ID NO: 4369839 - DNA, 25 bp, Homo sapien
ccagccctcacatccaggaacctac

SEQ ID NO: 4369840 - DNA, 25 bp, Homo sapien
ccccagccctcacatccaggaacct

SEQ ID NO: 4369841 - DNA, 25 bp, Homo sapien
catgaatttttgcagtaaggtaatg

SEQ ID NO: 4369842 - DNA, 25 bp, Homo sapien
ttgcagtaaggtaatgactaagtgc

SEQ ID NO: 4369843 - DNA, 25 bp, Homo sapien
ctggctgtgaacatgaatttttgca

SEQ ID NO: 4369844 - DNA, 25 bp, Homo sapien
cagtaaggtaatgactaagtgcttt

SEQ ID NO: 4369845 - DNA, 25 bp, Homo sapien
aaaagctgatttgacagtctgcctg

SEQ ID NO: 4369846 - DNA, 25 bp, Homo sapien
gctgagtctgaaacaaacgtgtttg

SEQ ID NO: 4369847 - DNA, 25 bp, Homo sapien
gatgggggttattgactatggtctc

SEQ ID NO: 4369848 - DNA, 25 bp, Homo sapien
ggttgaaaactgacaacccacaggc

SEQ ID NO: 4369849 - DNA, 25 bp, Homo sapien
tggtgtgcgattttctatagttccc

SEQ ID NO: 4369850 - DNA, 25 bp, Homo sapien
gaaggtccctgcagttcattcatta

SEQ ID NO: 4369851 - DNA, 25 bp, Homo sapien
tgcttgaggtagcatggctggtccc

SEQ ID NO: 4369852 - DNA, 25 bp, Homo sapien
caccctggaaaaatgcatctgaagg

SEQ ID NO: 4369853 - DNA, 25 bp, Homo sapien
gtcaataattcatagctgcaacggc

SEQ ID NO: 4369854 - DNA, 25 bp, Homo sapien
tagtcaataattcatagctgcaacg

SEQ ID NO: 4369855 - DNA, 25 bp, Homo sapien
aactgggctgaatagtcaataattc

SEQ ID NO: 4369856 - DNA, 25 bp, Homo sapien
caataattcatagctgcaacggcaa

SEQ ID NO: 4369857 - DNA, 25 bp, Homo sapien
catgatgaccataggcactgactgt

SEQ ID NO: 4369858 - DNA, 25 bp, Homo sapien
caatgtcctttggactgcagccaag

SEQ ID NO: 4369859 - DNA, 25 bp, Homo sapien
gggcaagtctccctagcccatgatc

SEQ ID NO: 4369860 - DNA, 25 bp, Homo sapien
catcttctgggcaagtctccctagc

SEQ ID NO: 4369861 - DNA, 25 bp, Homo sapien
tgcacttaggtcagattggccccat

SEQ ID NO: 4369862 - DNA, 25 bp, Homo sapien
tatcctagggaagcaaggcaaccct

SEQ ID NO: 4369863 - DNA, 25 bp, Homo sapien
aaagcacttttttgggcactggcag

SEQ ID NO: 4369864 - DNA, 25 bp, Homo sapien
tctccaatggtcaggcatggtctgc

SEQ ID NO: 4369865 - DNA, 25 bp, Homo sapien
tggtcagaagcttaaccagatcttc

SEQ ID NO: 4369866 - DNA, 25 bp, Homo sapien
cagatcttctgatcaatgtcccaaa

SEQ ID NO: 4369867 - DNA, 25 bp, Homo sapien
gtttggaatgcaccagtcctctgga

SEQ ID NO: 4369868 - DNA, 25 bp, Homo sapien
caaaggctgtaatcaacatctgagg

SEQ ID NO: 4369869 - DNA, 25 bp, Homo sapien
cactggttatttccataaactggaa

SEQ ID NO: 4369870 - DNA, 25 bp, Homo sapien
ctgtctaaatggtagttatgtccca

SEQ ID NO: 4369871 - DNA, 25 bp, Homo sapien
tggaaagaaggactgtctaaatggt

SEQ ID NO: 4369872 - DNA, 25 bp, Homo sapien
gaaggactgtctaaatggtagttat

SEQ ID NO: 4369873 - DNA, 25 bp, Homo sapien
ccctgccatggatgtatgtctgggt

SEQ ID NO: 4369874 - DNA, 25 bp, Homo sapien
cacttgagttcgtctggccctgcca

SEQ ID NO: 4369875 - DNA, 25 bp, Homo sapien
tctgagttcagtgtggcaagtgcca

SEQ ID NO: 4369876 - DNA, 25 bp, Homo sapien
tgattctgagttcagtgtggcaagt

SEQ ID NO: 4369877 - DNA, 25 bp, Homo sapien
tgagaatgcctaattgcacacagtc

SEQ ID NO: 4369878 - DNA, 25 bp, Homo sapien
tgaattcccaaagacaatgtatgag

SEQ ID NO: 4369879 - DNA, 25 bp, Homo sapien
tgccatattcctagaagagggatag

SEQ ID NO: 4369880 - DNA, 25 bp, Homo sapien
gatatgtactgccaaacatcccgca

SEQ ID NO: 4369881 - DNA, 25 bp, Homo sapien
taccaaagtgccagtttatgatcca

SEQ ID NO: 4369882 - DNA, 25 bp, Homo sapien
tgagcaacaattcctcagtgtagtt

SEQ ID NO: 4369883 - DNA, 25 bp, Homo sapien
ttcccatctgataagtgagcaacaa

SEQ ID NO: 4369884 - DNA, 25 bp, Homo sapien
tctctgtcgcctaggaaggtctcca

SEQ ID NO: 4369885 - DNA, 25 bp, Homo sapien
ttaataatcagtcatgttcatagtt

SEQ ID NO: 4369886 - DNA, 25 bp, Homo sapien
taatcagtcatgttcatagttttct

SEQ ID NO: 4369887 - DNA, 25 bp, Homo sapien
ttgtttaacatgagacatttaataa

SEQ ID NO: 4369888 - DNA, 25 bp, Homo sapien
tgatgtcaatctgatatcttcttgc

SEQ ID NO: 4369889 - DNA, 25 bp, Homo sapien
cagaaggtgtgaaaatgtagacccc

SEQ ID NO: 4369890 - DNA, 25 bp, Homo sapien
gaagaataggaaccagaaggtgtga

SEQ ID NO: 4369891 - DNA, 25 bp, Homo sapien
tccagccaatcaggagaagaatagg

SEQ ID NO: 4369892 - DNA, 25 bp, Homo sapien
agagaagacaacataaatcattatg

SEQ ID NO: 4369893 - DNA, 25 bp, Homo sapien
gtgggtggctaggtcaggccacgct

SEQ ID NO: 4369894 - DNA, 25 bp, Homo sapien
ggtggctaggtcaggccacgcttac

SEQ ID NO: 4369895 - DNA, 25 bp, Homo sapien
attcctgttggtgggtggctaggtc

SEQ ID NO: 4369896 - DNA, 25 bp, Homo sapien
tattcctgttggtgggtggctaggt

SEQ ID NO: 4369897 - DNA, 25 bp, Homo sapien
gattgcggcagctgcccgtctcctg

SEQ ID NO: 4369898 - DNA, 25 bp, Homo sapien
cagcgtctctttgaactttaaatag

SEQ ID NO: 4369899 - DNA, 25 bp, Homo sapien
ttcttttgttatccagcgtctcttt

SEQ ID NO: 4369900 - DNA, 25 bp, Homo sapien
gagaaatctgaagattgcggcagct

SEQ ID NO: 4369901 - DNA, 25 bp, Homo sapien
aagcagaactcctctggctctttat

SEQ ID NO: 4369902 - DNA, 25 bp, Homo sapien
gaaagcagaactcctctggctcttt

SEQ ID NO: 4369903 - DNA, 25 bp, Homo sapien
agcagaactcctctggctctttatt

SEQ ID NO: 4369904 - DNA, 25 bp, Homo sapien
gggaaagcagaactcctctggctct

SEQ ID NO: 4369905 - DNA, 25 bp, Homo sapien
tggaatcatagctgagtaggcctca

SEQ ID NO: 4369906 - DNA, 25 bp, Homo sapien
gcaggctgtattggaatcatagctg

SEQ ID NO: 4369907 - DNA, 25 bp, Homo sapien
tgcaggctgtattggaatcatagct

SEQ ID NO: 4369908 - DNA, 25 bp, Homo sapien
aatcatagctgagtaggcctcagga

SEQ ID NO: 4369909 - DNA, 25 bp, Homo sapien
gtgctcatgttcttcgagtctggta

SEQ ID NO: 4369910 - DNA, 25 bp, Homo sapien
gagtctggtatcagcaatctcctct

SEQ ID NO: 4369911 - DNA, 25 bp, Homo sapien
gatagatgtttattgactgagttgg

SEQ ID NO: 4369912 - DNA, 25 bp, Homo sapien
caaaaagtgttactacttcagatag

SEQ ID NO: 4369913 - DNA, 25 bp, Homo sapien
ctcagagagatttgtaacgatgtta

SEQ ID NO: 4369914 - DNA, 25 bp, Homo sapien
cattataatagaagaccaaatctca

SEQ ID NO: 4369915 - DNA, 25 bp, Homo sapien
ttataatagaagaccaaatctcaga

SEQ ID NO: 4369916 - DNA, 25 bp, Homo sapien
tcagagagatttgtaacgatgttac

SEQ ID NO: 4369917 - DNA, 25 bp, Homo sapien
tgcgtactggcttcccgtttataaa

SEQ ID NO: 4369918 - DNA, 25 bp, Homo sapien
tactggcttcccgtttataaaatca

SEQ ID NO: 4369919 - DNA, 25 bp, Homo sapien
aaagcgcactccacatccgctggct

SEQ ID NO: 4369920 - DNA, 25 bp, Homo sapien
aagcaaagcgcactccacatccgct

SEQ ID NO: 4369921 - DNA, 25 bp, Homo sapien
caaagcaaagcgcactccacatccg

SEQ ID NO: 4369922 - DNA, 25 bp, Homo sapien
gcaaagcgcactccacatccgctgg

SEQ ID NO: 4369923 - DNA, 25 bp, Homo sapien
caagcagcggcaggtaatcaggtcc

SEQ ID NO: 4369924 - DNA, 25 bp, Homo sapien
tcgtagcccaagcagcggcaggtaa

SEQ ID NO: 4369925 - DNA, 25 bp, Homo sapien
gtagcccaagcagcggcaggtaatc

SEQ ID NO: 4369926 - DNA, 25 bp, Homo sapien
gcccaagcagcggcaggtaatcagg

SEQ ID NO: 4369927 - DNA, 25 bp, Homo sapien
agacccggatggagaggataggccc

SEQ ID NO: 4369928 - DNA, 25 bp, Homo sapien
gacccggatggagaggataggcccg

SEQ ID NO: 4369929 - DNA, 25 bp, Homo sapien
ctacagacccggatggagaggatag

SEQ ID NO: 4369930 - DNA, 25 bp, Homo sapien
acagacccggatggagaggataggc

SEQ ID NO: 4369931 - DNA, 25 bp, Homo sapien
gagcttagagcatcgcctcggtcac

SEQ ID NO: 4369932 - DNA, 25 bp, Homo sapien
tgagcttagagcatcgcctcggtca

SEQ ID NO: 4369933 - DNA, 25 bp, Homo sapien
ctgagcttagagcatcgcctcggtc

SEQ ID NO: 4369934 - DNA, 25 bp, Homo sapien
aggtcccccacgtagagcgaggcca

SEQ ID NO: 4369935 - DNA, 25 bp, Homo sapien
ctcggcacggctgcccgcagggcca

SEQ ID NO: 4369936 - DNA, 25 bp, Homo sapien
cccccacgtagagcgaggccatggg

SEQ ID NO: 4369937 - DNA, 25 bp, Homo sapien
gggggcgctggggttcatctcggca

SEQ ID NO: 4369938 - DNA, 25 bp, Homo sapien
tccagggcaacagaaccaactcgta

SEQ ID NO: 4369939 - DNA, 25 bp, Homo sapien
tgtgaaacaccttccagggcaacag

SEQ ID NO: 4369940 - DNA, 25 bp, Homo sapien
ccaactcgtactgggccgcttatct

SEQ ID NO: 4369941 - DNA, 25 bp, Homo sapien
ctactgtgaaacaccttccagggca

SEQ ID NO: 4369942 - DNA, 25 bp, Homo sapien
aaataagccttgtcgagttgacaca

SEQ ID NO: 4369943 - DNA, 25 bp, Homo sapien
taaaataagccttgtcgagttgaca

SEQ ID NO: 4369944 - DNA, 25 bp, Homo sapien
aaaataagccttgtcgagttgacac

SEQ ID NO: 4369945 - DNA, 25 bp, Homo sapien
gacaaaagtaatgcttcagaggaag

SEQ ID NO: 4369946 - DNA, 25 bp, Homo sapien
ctccaaggccctccggaagaatgga

SEQ ID NO: 4369947 - DNA, 25 bp, Homo sapien
gaggttagggacaacctgagaatca

SEQ ID NO: 4369948 - DNA, 25 bp, Homo sapien
ggctgaaaccagaagtggatctggt

SEQ ID NO: 4369949 - DNA, 25 bp, Homo sapien
ttccctttctcagagaagttctcac

SEQ ID NO: 4369950 - DNA, 25 bp, Homo sapien
ggtcatctaggacccatcccttgtc

SEQ ID NO: 4369951 - DNA, 25 bp, Homo sapien
tcagagatctgctcgggttctgctt

SEQ ID NO: 4369952 - DNA, 25 bp, Homo sapien
gatctgctcgggttctgcttccctt

SEQ ID NO: 4369953 - DNA, 25 bp, Homo sapien
gtgggtttgacaacttctgagttgg

SEQ ID NO: 4369954 - DNA, 25 bp, Homo sapien
tgggtttgacaacttctgagttggt

SEQ ID NO: 4369955 - DNA, 25 bp, Homo sapien
tcttccccgttgcctgcagaataca

SEQ ID NO: 4369956 - DNA, 25 bp, Homo sapien
ttccccgttgcctgcagaatacagt

SEQ ID NO: 4369957 - DNA, 25 bp, Homo sapien
cctcttccccgttgcctgcagaata

SEQ ID NO: 4369958 - DNA, 25 bp, Homo sapien
tgcctcttccccgttgcctgcagaa

SEQ ID NO: 4369959 - DNA, 25 bp, Homo sapien
tagaacacaaggcttccatactctg

SEQ ID NO: 4369960 - DNA, 25 bp, Homo sapien
gggcatagaacacaaggcttccata

SEQ ID NO: 4369961 - DNA, 25 bp, Homo sapien
cttgggcatagaacacaaggcttcc

SEQ ID NO: 4369962 - DNA, 25 bp, Homo sapien
acaaggcttccatactctgagccct

SEQ ID NO: 4369963 - DNA, 25 bp, Homo sapien
ctccctctgtggtgaacataagtga

SEQ ID NO: 4369964 - DNA, 25 bp, Homo sapien
ttccaattccacgttcctgtttctc

SEQ ID NO: 4369965 - DNA, 25 bp, Homo sapien
cctctgtggtgaacataagtgattg

SEQ ID NO: 4369966 - DNA, 25 bp, Homo sapien
aactccctctgtggtgaacataagt

SEQ ID NO: 4369967 - DNA, 25 bp, Homo sapien
tgttcaccaactttctgtctgatct

SEQ ID NO: 4369968 - DNA, 25 bp, Homo sapien
gttcaccaactttctgtctgatcta

SEQ ID NO: 4369969 - DNA, 25 bp, Homo sapien
gctccatgaacatagggcttcttgg

SEQ ID NO: 4369970 - DNA, 25 bp, Homo sapien
tccatgaacatagggcttcttggtt

SEQ ID NO: 4369971 - DNA, 25 bp, Homo sapien
tgataaatgcataaactccttccat

SEQ ID NO: 4369972 - DNA, 25 bp, Homo sapien
gagaagagagatcagtctgggtttg

SEQ ID NO: 4369973 - DNA, 25 bp, Homo sapien
tttaaatcttgccagcttactttta

SEQ ID NO: 4369974 - DNA, 25 bp, Homo sapien
gaagagagatcagtctgggtttggg

SEQ ID NO: 4369975 - DNA, 25 bp, Homo sapien
ttgccagcttacttttatattcaag

SEQ ID NO: 4369976 - DNA, 25 bp, Homo sapien
tgctcagtcggcctgcaaaagctag

SEQ ID NO: 4369977 - DNA, 25 bp, Homo sapien
tcagtcggcctgcaaaagctagagt

SEQ ID NO: 4369978 - DNA, 25 bp, Homo sapien
ctgctcagtcggcctgcaaaagcta

SEQ ID NO: 4369979 - DNA, 25 bp, Homo sapien
gctcagtcggcctgcaaaagctaga

SEQ ID NO: 4369980 - DNA, 25 bp, Homo sapien
tgtctgacagcatttggagcccctc

SEQ ID NO: 4369981 - DNA, 25 bp, Homo sapien
gagaatcgaccctcaaccctggagg

SEQ ID NO: 4369982 - DNA, 25 bp, Homo sapien
caaatcctgggcagggaatccaacc

SEQ ID NO: 4369983 - DNA, 25 bp, Homo sapien
aatgtggccaaacacccaggcaagg

SEQ ID NO: 4369984 - DNA, 25 bp, Homo sapien
tgcaactactgttccctgcaggaac

SEQ ID NO: 4369985 - DNA, 25 bp, Homo sapien
tctgcaactactgttccctgcagga

SEQ ID NO: 4369986 - DNA, 25 bp, Homo sapien
ctgcaactactgttccctgcaggaa

SEQ ID NO: 4369987 - DNA, 25 bp, Homo sapien
gcaactactgttccctgcaggaaca

SEQ ID NO: 4369988 - DNA, 25 bp, Homo sapien
gaacctatatttcctgcgcaggctc

SEQ ID NO: 4369989 - DNA, 25 bp, Homo sapien
aaggaacctatatttcctgcgcagg

SEQ ID NO: 4369990 - DNA, 25 bp, Homo sapien
tcacccctcaaggaacctatatttc

SEQ ID NO: 4369991 - DNA, 25 bp, Homo sapien
cctcaaggaacctatatttcctgcg

SEQ ID NO: 4369992 - DNA, 25 bp, Homo sapien
tgaaataaggggagtccacttctca

SEQ ID NO: 4369993 - DNA, 25 bp, Homo sapien
gaaataaggggagtccacttctcac

SEQ ID NO: 4369994 - DNA, 25 bp, Homo sapien
ctgaaataaggggagtccacttctc

SEQ ID NO: 4369995 - DNA, 25 bp, Homo sapien
ttgggcaaatgaggggagtccactc

SEQ ID NO: 4369996 - DNA, 25 bp, Homo sapien
ggcaaatgaggggagtccactcctc

SEQ ID NO: 4369997 - DNA, 25 bp, Homo sapien
caaatgaggggagtccactcctcac

SEQ ID NO: 4369998 - DNA, 25 bp, Homo sapien
tgggcaaatgaggggagtccactcc

SEQ ID NO: 4369999 - DNA, 25 bp, Homo sapien
caggccctctggtgctaagaaaggc

SEQ ID NO: 4370000 - DNA, 25 bp, Homo sapien
tttactcttagcttcctgcttgcta

SEQ ID NO: 4370001 - DNA, 25 bp, Homo sapien
ccagagcccacttttactcttagct

SEQ ID NO: 4370002 - DNA, 25 bp, Homo sapien
taccttcctggcttcagctatgccc

SEQ ID NO: 4370003 - DNA, 25 bp, Homo sapien
tctcattactaatcaacacaagagt

SEQ ID NO: 4370004 - DNA, 25 bp, Homo sapien
gcagatacctgtttggcataacaca

SEQ ID NO: 4370005 - DNA, 25 bp, Homo sapien
catttccgacttgaccagttcacac

SEQ ID NO: 4370006 - DNA, 25 bp, Homo sapien
accatattgatcctgaactcagcgc

SEQ ID NO: 4370007 - DNA, 25 bp, Homo sapien
cagctgtacagcatgtcaatccctt

SEQ ID NO: 4370008 - DNA, 25 bp, Homo sapien
cctaaagggcagctaaattctattc

SEQ ID NO: 4370009 - DNA, 25 bp, Homo sapien
tacctgggatatctaacaccttaaa

SEQ ID NO: 4370010 - DNA, 25 bp, Homo sapien
caaagataccgtcaaatcctaaagg

SEQ ID NO: 4370011 - DNA, 25 bp, Homo sapien
cacatgaagtcaaagggagacccaa

SEQ ID NO: 4370012 - DNA, 25 bp, Homo sapien
cattagagtctgatggaagtccctc

SEQ ID NO: 4370013 - DNA, 25 bp, Homo sapien
tatatacaaacgcattaacagggag

SEQ ID NO: 4370014 - DNA, 25 bp, Homo sapien
tacaacaggtagtttggcaactcgc

SEQ ID NO: 4370015 - DNA, 25 bp, Homo sapien
tcggtcagggcatctataggctcta

SEQ ID NO: 4370016 - DNA, 25 bp, Homo sapien
caactgcttgggtacagggacatgc

SEQ ID NO: 4370017 - DNA, 25 bp, Homo sapien
tcaacgtggccatagtgaagagccg

SEQ ID NO: 4370018 - DNA, 25 bp, Homo sapien
tggatgacaacttcctgaccagtgc

SEQ ID NO: 4370019 - DNA, 25 bp, Homo sapien
tatcagctccggagatgagcacagg

SEQ ID NO: 4370020 - DNA, 25 bp, Homo sapien
caggcaggttgctttctaaggccgc

SEQ ID NO: 4370021 - DNA, 25 bp, Homo sapien
taaccagccacgagaagtattaggg

SEQ ID NO: 4370022 - DNA, 25 bp, Homo sapien
caggctaggcaagggacaatggcct

SEQ ID NO: 4370023 - DNA, 25 bp, Homo sapien
ggtctcatcaaactggccaatcagg

SEQ ID NO: 4370024 - DNA, 25 bp, Homo sapien
gatgggaaattacactctcctgcag

SEQ ID NO: 4370025 - DNA, 25 bp, Homo sapien
taggtcaggtatgtcagaacagagc

SEQ ID NO: 4370026 - DNA, 25 bp, Homo sapien
gctgagatggaactgcccggctcat

SEQ ID NO: 4370027 - DNA, 25 bp, Homo sapien
gacatgtgggcagtagatacaatgg

SEQ ID NO: 4370028 - DNA, 25 bp, Homo sapien
gcactggaggaggatgataactttt

SEQ ID NO: 4370029 - DNA, 25 bp, Homo sapien
gatacaatggtgtccccttggctgg

SEQ ID NO: 4370030 - DNA, 25 bp, Homo sapien
gggttaactacaggatcgggagcca

SEQ ID NO: 4370031 - DNA, 25 bp, Homo sapien
cttgcaaactgcgtgtggtcctcct

SEQ ID NO: 4370032 - DNA, 25 bp, Homo sapien
ggcagcgacaaagctcccagaaggt

SEQ ID NO: 4370033 - DNA, 25 bp, Homo sapien
tgaacagtcccttcagaccctggag

SEQ ID NO: 4370034 - DNA, 25 bp, Homo sapien
caacaggcatagagacagggcgtgc

SEQ ID NO: 4370035 - DNA, 25 bp, Homo sapien
ttcatgcacatcttatcaaccttac

SEQ ID NO: 4370036 - DNA, 25 bp, Homo sapien
cttactttgcaaggacttcagcctt

SEQ ID NO: 4370037 - DNA, 25 bp, Homo sapien
aatatattcaaaccaagaaagcagc

SEQ ID NO: 4370038 - DNA, 25 bp, Homo sapien
taaaccaaaatcgtacagccattga

SEQ ID NO: 4370039 - DNA, 25 bp, Homo sapien
tggggttgagtattaaagggctcca

SEQ ID NO: 4370040 - DNA, 25 bp, Homo sapien
gaaagtgcaatatagtataactggg

SEQ ID NO: 4370041 - DNA, 25 bp, Homo sapien
ctttgtagctcctagaaagtgcaat

SEQ ID NO: 4370042 - DNA, 25 bp, Homo sapien
gtagctcctagaaagtgcaatatag

SEQ ID NO: 4370043 - DNA, 25 bp, Homo sapien
gtccttccaaatagacatgccggta

SEQ ID NO: 4370044 - DNA, 25 bp, Homo sapien
ccttccaaatagacatgccggtagc

SEQ ID NO: 4370045 - DNA, 25 bp, Homo sapien
caaatatggatgcttctgtcagtcc

SEQ ID NO: 4370046 - DNA, 25 bp, Homo sapien
gatttcattgatggttatgtgtaca

SEQ ID NO: 4370047 - DNA, 25 bp, Homo sapien
gatcgtgatcccacacaaggaaccg

SEQ ID NO: 4370048 - DNA, 25 bp, Homo sapien
accaaagctatttctggcatgtgta

SEQ ID NO: 4370049 - DNA, 25 bp, Homo sapien
ttgtccaacaaagtctcgtccaatg

SEQ ID NO: 4370050 - DNA, 25 bp, Homo sapien
cacaaggaaccgaaccaaagctatt

SEQ ID NO: 4370051 - DNA, 25 bp, Homo sapien
cagtgtttcttcccacacagggtta

SEQ ID NO: 4370052 - DNA, 25 bp, Homo sapien
tgtcagtgtttcttcccacacaggg

SEQ ID NO: 4370053 - DNA, 25 bp, Homo sapien
aatgtcagtgtttcttcccacacag

SEQ ID NO: 4370054 - DNA, 25 bp, Homo sapien
taaatgtcagtgtttcttcccacac

SEQ ID NO: 4370055 - DNA, 25 bp, Homo sapien
tggcaatccaataatttcaacttca

SEQ ID NO: 4370056 - DNA, 25 bp, Homo sapien
attgtcatctaccacacgggtttga

SEQ ID NO: 4370057 - DNA, 25 bp, Homo sapien
ttcaacttcaacaaaagggtcaatg

SEQ ID NO: 4370058 - DNA, 25 bp, Homo sapien
gtcatctaccacacgggtttgatct

SEQ ID NO: 4370059 - DNA, 25 bp, Homo sapien
tcgcctcgatctccaaacatggagt

SEQ ID NO: 4370060 - DNA, 25 bp, Homo sapien
tccaaacatggagtctggaggtttg

SEQ ID NO: 4370061 - DNA, 25 bp, Homo sapien
cactgataactttcaggatgagctg

SEQ ID NO: 4370062 - DNA, 25 bp, Homo sapien
tttggggagttgctgtccactgata

SEQ ID NO: 4370063 - DNA, 25 bp, Homo sapien
gcatcattcgtccttcagattgata

SEQ ID NO: 4370064 - DNA, 25 bp, Homo sapien
gggtttgaggacatagccacaattg

SEQ ID NO: 4370065 - DNA, 25 bp, Homo sapien
gacatagccacaattgccatttgcc

SEQ ID NO: 4370066 - DNA, 25 bp, Homo sapien
catttgccttgaatttggctcggtt

SEQ ID NO: 4370067 - DNA, 25 bp, Homo sapien
ggtaaatcctcgtgagttgcttttg

SEQ ID NO: 4370068 - DNA, 25 bp, Homo sapien
gtttcactgaatgataacacatttc

SEQ ID NO: 4370069 - DNA, 25 bp, Homo sapien
gctgaacaacctgatgtgctcttgt

SEQ ID NO: 4370070 - DNA, 25 bp, Homo sapien
tactggaatcaatgcggtaggcaga

SEQ ID NO: 4370071 - DNA, 25 bp, Homo sapien
atccacaatgtcctgagcggccacg

SEQ ID NO: 4370072 - DNA, 25 bp, Homo sapien
gcggccacggagtttgtgtacacaa

SEQ ID NO: 4370073 - DNA, 25 bp, Homo sapien
gagttctcggcagagcttcatggtt

SEQ ID NO: 4370074 - DNA, 25 bp, Homo sapien
cacaaccaaatcagagagttctcgg

SEQ ID NO: 4370075 - DNA, 25 bp, Homo sapien
ccttgccagtactctgctgtgtgtc

SEQ ID NO: 4370076 - DNA, 25 bp, Homo sapien
cctccttgccagtactctgctgtgt

SEQ ID NO: 4370077 - DNA, 25 bp, Homo sapien
aagatttagaccgtgattttgtagt

SEQ ID NO: 4370078 - DNA, 25 bp, Homo sapien
tcatcatcagtactgtaagatttag

SEQ ID NO: 4370079 - DNA, 25 bp, Homo sapien
gagggatcgtccatgtgatttcttt

SEQ ID NO: 4370080 - DNA, 25 bp, Homo sapien
ttactatgcataaccaaccctggga

SEQ ID NO: 4370081 - DNA, 25 bp, Homo sapien
gtctagctacaagtcctctctctgg

SEQ ID NO: 4370082 - DNA, 25 bp, Homo sapien
gcaaattgaggtatatggtcaccct

SEQ ID NO: 4370083 - DNA, 25 bp, Homo sapien
tgggacaacaggtataaagcacggc

SEQ ID NO: 4370084 - DNA, 25 bp, Homo sapien
gcccgcactgtgaaactatcaggat

SEQ ID NO: 4370085 - DNA, 25 bp, Homo sapien
catttaagccttcatgcgtggcctt

SEQ ID NO: 4370086 - DNA, 25 bp, Homo sapien
gagattcttttaacagtgactccag

SEQ ID NO: 4370087 - DNA, 25 bp, Homo sapien
ccttatgaaagattccacctgatgc

SEQ ID NO: 4370088 - DNA, 25 bp, Homo sapien
catgggcatcccagagaagcaggtc

SEQ ID NO: 4370089 - DNA, 25 bp, Homo sapien
ccaagaggtccatgtctggaagggc

SEQ ID NO: 4370090 - DNA, 25 bp, Homo sapien
tccagccagccttgacagggagcat

SEQ ID NO: 4370091 - DNA, 25 bp, Homo sapien
agggcttggaaatccctctggtcca

SEQ ID NO: 4370092 - DNA, 25 bp, Homo sapien
ccaaggtgataaggcaacttcttac

SEQ ID NO: 4370093 - DNA, 25 bp, Homo sapien
tcatccccaaggtgataaggcaact

SEQ ID NO: 4370094 - DNA, 25 bp, Homo sapien
ctgcatcatccccaaggtgataagg

SEQ ID NO: 4370095 - DNA, 25 bp, Homo sapien
tttgcactcgtcttcaatttcatct

SEQ ID NO: 4370096 - DNA, 25 bp, Homo sapien
gatactgcagtgattctcgatagac

SEQ ID NO: 4370097 - DNA, 25 bp, Homo sapien
tgtatcaacagatgacaggtccagt

SEQ ID NO: 4370098 - DNA, 25 bp, Homo sapien
caggtccagtttgtctccgaatatt

SEQ ID NO: 4370099 - DNA, 25 bp, Homo sapien
cctttcaggtactgagcaatcttcc

SEQ ID NO: 4370100 - DNA, 25 bp, Homo sapien
tcattcttcacaaaggcatgcttgt

SEQ ID NO: 4370101 - DNA, 25 bp, Homo sapien
gaagtgagagtgtaaccatgatgta

SEQ ID NO: 4370102 - DNA, 25 bp, Homo sapien
taaccatgatgtactactggctctc

SEQ ID NO: 4370103 - DNA, 25 bp, Homo sapien
ggcatgcttgttgatggtctccaca

SEQ ID NO: 4370104 - DNA, 25 bp, Homo sapien
gctaaaactataggtgtacaatacc

SEQ ID NO: 4370105 - DNA, 25 bp, Homo sapien
cacactgttgcccaaataatctttc

SEQ ID NO: 4370106 - DNA, 25 bp, Homo sapien
aaaaccctttacagctgaccctcag

SEQ ID NO: 4370107 - DNA, 25 bp, Homo sapien
ccattgtatatcaaccaaccggtga

SEQ ID NO: 4370108 - DNA, 25 bp, Homo sapien
tggtacacttcatggtgcaatgggt

SEQ ID NO: 4370109 - DNA, 25 bp, Homo sapien
caggtatgtattgtgagaggaagca

SEQ ID NO: 4370110 - DNA, 25 bp, Homo sapien
gggctgatccatgtcttggtacact

SEQ ID NO: 4370111 - DNA, 25 bp, Homo sapien
taaatatgtcacaggcaggactacg

SEQ ID NO: 4370112 - DNA, 25 bp, Homo sapien
ttcaaagcatatatacttaatggct

SEQ ID NO: 4370113 - DNA, 25 bp, Homo sapien
gaaagagagtgacttactacagctt

SEQ ID NO: 4370114 - DNA, 25 bp, Homo sapien
agtgacttactacagctttcaaagc

SEQ ID NO: 4370115 - DNA, 25 bp, Homo sapien
gacttactacagctttcaaagcata

SEQ ID NO: 4370116 - DNA, 25 bp, Homo sapien
caggaagtaaatagatggtattaaa

SEQ ID NO: 4370117 - DNA, 25 bp, Homo sapien
acaggaagtaaatagatggtattaa

SEQ ID NO: 4370118 - DNA, 25 bp, Homo sapien
ccacaggaagtaaatagatggtatt

SEQ ID NO: 4370119 - DNA, 25 bp, Homo sapien
cacaggaagtaaatagatggtatta

SEQ ID NO: 4370120 - DNA, 25 bp, Homo sapien
cttctttatgatgtcaagacaatag

SEQ ID NO: 4370121 - DNA, 25 bp, Homo sapien
tgatgtcaagacaatagtccgttgt

SEQ ID NO: 4370122 - DNA, 25 bp, Homo sapien
tcaagacaatagtccgttgtcacat

SEQ ID NO: 4370123 - DNA, 25 bp, Homo sapien
tttatgatgtcaagacaatagtccg

SEQ ID NO: 4370124 - DNA, 25 bp, Homo sapien
tattagcactaaaagtgatccattt

SEQ ID NO: 4370125 - DNA, 25 bp, Homo sapien
tcaaaccaacattaacttatcattc

SEQ ID NO: 4370126 - DNA, 25 bp, Homo sapien
taacttatcattctatagctaccat

SEQ ID NO: 4370127 - DNA, 25 bp, Homo sapien
ggagatatgtttcaaaagccatgaa

SEQ ID NO: 4370128 - DNA, 25 bp, Homo sapien
tcattaatagcgtctcaaatccttg

SEQ ID NO: 4370129 - DNA, 25 bp, Homo sapien
gaaatgttactaatccaagcaccca

SEQ ID NO: 4370130 - DNA, 25 bp, Homo sapien
tccagcaaacgttaaaaagcatgtt

SEQ ID NO: 4370131 - DNA, 25 bp, Homo sapien
tttgtccactacaaaaacttagcac

SEQ ID NO: 4370132 - DNA, 25 bp, Homo sapien
cacagttaggtgatctttcttgtca

SEQ ID NO: 4370133 - DNA, 25 bp, Homo sapien
cttgtcactgtagctcaaaagtaac

SEQ ID NO: 4370134 - DNA, 25 bp, Homo sapien
agttccctgattctcatctgtgtcg

SEQ ID NO: 4370135 - DNA, 25 bp, Homo sapien
agtaacaaataaaggtctcgtctca

SEQ ID NO: 4370136 - DNA, 25 bp, Homo sapien
ttcttcggggcagattaacattcag

SEQ ID NO: 4370137 - DNA, 25 bp, Homo sapien
ttcaatattcagcaagccgtcacca

SEQ ID NO: 4370138 - DNA, 25 bp, Homo sapien
tatgcatcagctgatgtatctcttc

SEQ ID NO: 4370139 - DNA, 25 bp, Homo sapien
ccattcttatcagcttcctcaaagg

SEQ ID NO: 4370140 - DNA, 25 bp, Homo sapien
ccacttcgggctttcaactatggac

SEQ ID NO: 4370141 - DNA, 25 bp, Homo sapien
tcaactatggacactactctatgcc

SEQ ID NO: 4370142 - DNA, 25 bp, Homo sapien
tcgggctttcaactatggacactac

SEQ ID NO: 4370143 - DNA, 25 bp, Homo sapien
tatggacactactctatgccccaca

SEQ ID NO: 4370144 - DNA, 25 bp, Homo sapien
gatgccagccatcaggtacttgagg

SEQ ID NO: 4370145 - DNA, 25 bp, Homo sapien
gaatatttcagactgccggccctca

SEQ ID NO: 4370146 - DNA, 25 bp, Homo sapien
gtcgaagttcccctcagcttgtctg

SEQ ID NO: 4370147 - DNA, 25 bp, Homo sapien
cagggactccatgtggttgccatgg

SEQ ID NO: 4370148 - DNA, 25 bp, Homo sapien
gtgaggaaaatgagatacacacagt

SEQ ID NO: 4370149 - DNA, 25 bp, Homo sapien
aggcaaagatacttctttacatgca

SEQ ID NO: 4370150 - DNA, 25 bp, Homo sapien
tatacagcaggcaaagatacttctt

SEQ ID NO: 4370151 - DNA, 25 bp, Homo sapien
gagatacacacagttatacagcagg

SEQ ID NO: 4370152 - DNA, 25 bp, Homo sapien
ttaaaaataagtatgaggctgggtg

SEQ ID NO: 4370153 - DNA, 25 bp, Homo sapien
taaaaataagtatgaggctgggtgc

SEQ ID NO: 4370154 - DNA, 25 bp, Homo sapien
tattaaaaataagtatgaggctggg

SEQ ID NO: 4370155 - DNA, 25 bp, Homo sapien
aaaataagtatgaggctgggtgctc

SEQ ID NO: 4370156 - DNA, 25 bp, Homo sapien
tccaggtaaaagaggcggacaagcc

SEQ ID NO: 4370157 - DNA, 25 bp, Homo sapien
tcttcctagagggtcgccatcggag

SEQ ID NO: 4370158 - DNA, 25 bp, Homo sapien
catcggaggcgtgtccggtgctcat

SEQ ID NO: 4370159 - DNA, 25 bp, Homo sapien
cctttggttccacgtttcagcttga

SEQ ID NO: 4370160 - DNA, 25 bp, Homo sapien
gagtgtatccagctatcacacaatg

SEQ ID NO: 4370161 - DNA, 25 bp, Homo sapien
cagctatcacacaatgcacaggcat

SEQ ID NO: 4370162 - DNA, 25 bp, Homo sapien
tgtatccagctatcacacaatgcac

SEQ ID NO: 4370163 - DNA, 25 bp, Homo sapien
attagagtgtatccagctatcacac

SEQ ID NO: 4370164 - DNA, 25 bp, Homo sapien
tctatttgagttatttcatgtatat

SEQ ID NO: 4370165 - DNA, 25 bp, Homo sapien
accactcccgggcttaagacacatt

SEQ ID NO: 4370166 - DNA, 25 bp, Homo sapien
aaactacagatagaacatgattcta

SEQ ID NO: 4370167 - DNA, 25 bp, Homo sapien
cccgggcttaagacacatttttatg

SEQ ID NO: 4370168 - DNA, 25 bp, Homo sapien
gacttgctcgtataactgctgaaga

SEQ ID NO: 4370169 - DNA, 25 bp, Homo sapien
gcaaaagaacactgaacaacctgga

SEQ ID NO: 4370170 - DNA, 25 bp, Homo sapien
cagtaaatggttccagcatccccta

SEQ ID NO: 4370171 - DNA, 25 bp, Homo sapien
aaatgcagcggctcaaagtagtggc

SEQ ID NO: 4370172 - DNA, 25 bp, Homo sapien
tcaattcaacaaaaagcactgaggc

SEQ ID NO: 4370173 - DNA, 25 bp, Homo sapien
caattcaacaaaaagcactgaggca

SEQ ID NO: 4370174 - DNA, 25 bp, Homo sapien
tgaacaatgtatcgaactgttatcc

SEQ ID NO: 4370175 - DNA, 25 bp, Homo sapien
gagatgtaggagctttgcctggact

SEQ ID NO: 4370176 - DNA, 25 bp, Homo sapien
cattcagtacaggaatgaacaatgt

SEQ ID NO: 4370177 - DNA, 25 bp, Homo sapien
tcccagacgtgggtcactacaacat

SEQ ID NO: 4370178 - DNA, 25 bp, Homo sapien
cttctagagccatcatcatatccat

SEQ ID NO: 4370179 - DNA, 25 bp, Homo sapien
ttctagagccatcatcatatccatg

SEQ ID NO: 4370180 - DNA, 25 bp, Homo sapien
tgataaatcctattgcaggggctgg

SEQ ID NO: 4370181 - DNA, 25 bp, Homo sapien
taacattgccaatgaggtcagtggt

SEQ ID NO: 4370182 - DNA, 25 bp, Homo sapien
ccttccctgagtgtgaagaactcaa

SEQ ID NO: 4370183 - DNA, 25 bp, Homo sapien
tcaggagacgttttagatcatgagg

SEQ ID NO: 4370184 - DNA, 25 bp, Homo sapien
cagtgcagccgaaatcctgtcctga

SEQ ID NO: 4370185 - DNA, 25 bp, Homo sapien
gtgcagccgaaatcctgtcctgatc

SEQ ID NO: 4370186 - DNA, 25 bp, Homo sapien
ccagtgcagccgaaatcctgtcctg

SEQ ID NO: 4370187 - DNA, 25 bp, Homo sapien
agtgcagccgaaatcctgtcctgat

SEQ ID NO: 4370188 - DNA, 25 bp, Homo sapien
ctgataccaacctcaagaagcagca

SEQ ID NO: 4370189 - DNA, 25 bp, Homo sapien
cactgataccaacctcaagaagcag

SEQ ID NO: 4370190 - DNA, 25 bp, Homo sapien
tgataccaacctcaagaagcagcag

SEQ ID NO: 4370191 - DNA, 25 bp, Homo sapien
ctcactgataccaacctcaagaagc

SEQ ID NO: 4370192 - DNA, 25 bp, Homo sapien
caaagataagcactgggaaagacct

SEQ ID NO: 4370193 - DNA, 25 bp, Homo sapien
gctgtgagccggcaaaatattttct

SEQ ID NO: 4370194 - DNA, 25 bp, Homo sapien
tttagctaatagagcctgtgcccag

SEQ ID NO: 4370195 - DNA, 25 bp, Homo sapien
tgtgccaacactgcggtaaaaggac

SEQ ID NO: 4370196 - DNA, 25 bp, Homo sapien
gcttcaacccttgcttatacacctg

SEQ ID NO: 4370197 - DNA, 25 bp, Homo sapien
tctttattataacacctggtccttg

SEQ ID NO: 4370198 - DNA, 25 bp, Homo sapien
taccagaagttactacaagagagct

SEQ ID NO: 4370199 - DNA, 25 bp, Homo sapien
cttctccatactcaggtaccactgg

SEQ ID NO: 4370200 - DNA, 25 bp, Homo sapien
ttaaaattagtagtatgagtcttac

SEQ ID NO: 4370201 - DNA, 25 bp, Homo sapien
cttaaaattagtagtatgagtctta

SEQ ID NO: 4370202 - DNA, 25 bp, Homo sapien
tttatacacttcaaggtctgccatt

SEQ ID NO: 4370203 - DNA, 25 bp, Homo sapien
ttatacacttcaaggtctgccatta

SEQ ID NO: 4370204 - DNA, 25 bp, Homo sapien
ttttatacacttcaaggtctgccat

SEQ ID NO: 4370205 - DNA, 25 bp, Homo sapien
tgcatgcttcgtgcagcgcgttaaa

SEQ ID NO: 4370206 - DNA, 25 bp, Homo sapien
tttgtcccaaagtgaaaagcacagc

SEQ ID NO: 4370207 - DNA, 25 bp, Homo sapien
taagcacgctggaagcatctgctcg

SEQ ID NO: 4370208 - DNA, 25 bp, Homo sapien
tactttgggtatgagacatgcatgc

SEQ ID NO: 4370209 - DNA, 25 bp, Homo sapien
gcatctcccatatgcaaggctctaa

SEQ ID NO: 4370210 - DNA, 25 bp, Homo sapien
cattccctattctctagagctctca

SEQ ID NO: 4370211 - DNA, 25 bp, Homo sapien
aagtcacattccctattctctagag

SEQ ID NO: 4370212 - DNA, 25 bp, Homo sapien
tgcaaggctctaaagtcacattccc

SEQ ID NO: 4370213 - DNA, 25 bp, Homo sapien
cttaagatcctatatgcaaagccgg

SEQ ID NO: 4370214 - DNA, 25 bp, Homo sapien
gtgttccccttaagatcctatatgc

SEQ ID NO: 4370215 - DNA, 25 bp, Homo sapien
caaagccggagatattgtgcaaaac

SEQ ID NO: 4370216 - DNA, 25 bp, Homo sapien
tattgtgcaaaacaagagcaatctg

SEQ ID NO: 4370217 - DNA, 25 bp, Homo sapien
gcttcttgggaataccttgcttttc

SEQ ID NO: 4370218 - DNA, 25 bp, Homo sapien
caacatcttgttccgtactgttgcc

SEQ ID NO: 4370219 - DNA, 25 bp, Homo sapien
ttgttccgtactgttgcctgcttct

SEQ ID NO: 4370220 - DNA, 25 bp, Homo sapien
cacagcaacatcttgttccgtactg

SEQ ID NO: 4370221 - DNA, 25 bp, Homo sapien
gggcttcccatacatccagatctcc

SEQ ID NO: 4370222 - DNA, 25 bp, Homo sapien
atctccaatttgccatttaaagagc

SEQ ID NO: 4370223 - DNA, 25 bp, Homo sapien
ggcttcccatacatccagatctcca

SEQ ID NO: 4370224 - DNA, 25 bp, Homo sapien
atgattatagcctttgagatctctg

SEQ ID NO: 4370225 - DNA, 25 bp, Homo sapien
aatgattatagcctttgagatctct

SEQ ID NO: 4370226 - DNA, 25 bp, Homo sapien
aaatgattatagcctttgagatctc

SEQ ID NO: 4370227 - DNA, 25 bp, Homo sapien
tgattatagcctttgagatctctga

SEQ ID NO: 4370228 - DNA, 25 bp, Homo sapien
agtgccacagggtcaagtcgccatt

SEQ ID NO: 4370229 - DNA, 25 bp, Homo sapien
gaaaagcaacgcagaacctcagtgc

SEQ ID NO: 4370230 - DNA, 25 bp, Homo sapien
taaagcaatgaacaggacccttggc

SEQ ID NO: 4370231 - DNA, 25 bp, Homo sapien
tgctaagggcacttcaccactggaa

SEQ ID NO: 4370232 - DNA, 25 bp, Homo sapien
ttctggcaccacataagtctttggc

SEQ ID NO: 4370233 - DNA, 25 bp, Homo sapien
gattgacagagcttatccctgactg

SEQ ID NO: 4370234 - DNA, 25 bp, Homo sapien
caggcctctgatagagattactcca

SEQ ID NO: 4370235 - DNA, 25 bp, Homo sapien
gaaatcactctctactttacaaggg

SEQ ID NO: 4370236 - DNA, 25 bp, Homo sapien
agtcctccaccctgatagtaacggt

SEQ ID NO: 4370237 - DNA, 25 bp, Homo sapien
ctgttctgttgttatatgggacata

SEQ ID NO: 4370238 - DNA, 25 bp, Homo sapien
tatatgggacataatatatagataa

SEQ ID NO: 4370239 - DNA, 25 bp, Homo sapien
ctgatagtaacggtttagtgctgca

SEQ ID NO: 4370240 - DNA, 25 bp, Homo sapien
tcaagctcttggttccatccaacaa

SEQ ID NO: 4370241 - DNA, 25 bp, Homo sapien
gagtgctagaataaaagtcctgtca

SEQ ID NO: 4370242 - DNA, 25 bp, Homo sapien
gagatagtaagtgcaatgggacttc

SEQ ID NO: 4370243 - DNA, 25 bp, Homo sapien
ggcactggtaccaactaccctacga

SEQ ID NO: 4370244 - DNA, 25 bp, Homo sapien
gcggtactgcacacagttccttttt

SEQ ID NO: 4370245 - DNA, 25 bp, Homo sapien
cagaaaatgcctgcggtactgcaca

SEQ ID NO: 4370246 - DNA, 25 bp, Homo sapien
aaacacactgttgtccaccagaaaa

SEQ ID NO: 4370247 - DNA, 25 bp, Homo sapien
tccaccagaaaatgcctgcggtact

SEQ ID NO: 4370248 - DNA, 25 bp, Homo sapien
tctggcacagcatcaaaaccaaatt

SEQ ID NO: 4370249 - DNA, 25 bp, Homo sapien
tgtcagaagatttctggcacagcat

SEQ ID NO: 4370250 - DNA, 25 bp, Homo sapien
cagaagatttctggcacagcatcaa

SEQ ID NO: 4370251 - DNA, 25 bp, Homo sapien
ggcacagcatcaaaaccaaattgcc

SEQ ID NO: 4370252 - DNA, 25 bp, Homo sapien
tcctgaattttgtgtcagtacagca

SEQ ID NO: 4370253 - DNA, 25 bp, Homo sapien
taaatggaaacagcaggttgcaaac

SEQ ID NO: 4370254 - DNA, 25 bp, Homo sapien
aatggaaacagcaggttgcaaaccc

SEQ ID NO: 4370255 - DNA, 25 bp, Homo sapien
tggaaacagcaggttgcaaacccac

SEQ ID NO: 4370256 - DNA, 25 bp, Homo sapien
ctaaatggaaacagcaggttgcaaa

SEQ ID NO: 4370257 - DNA, 25 bp, Homo sapien
cacatccagcaccagttcctccctg

SEQ ID NO: 4370258 - DNA, 25 bp, Homo sapien
accagttcctccctgacattccgct

SEQ ID NO: 4370259 - DNA, 25 bp, Homo sapien
caccagttcctccctgacattccgc

SEQ ID NO: 4370260 - DNA, 25 bp, Homo sapien
atccagcaccagttcctccctgaca

SEQ ID NO: 4370261 - DNA, 25 bp, Homo sapien
ctcatttccttcttcttaagccttg

SEQ ID NO: 4370262 - DNA, 25 bp, Homo sapien
aagtgctcatttccttcttcttaag

SEQ ID NO: 4370263 - DNA, 25 bp, Homo sapien
atggagaagtgctcatttccttctt

SEQ ID NO: 4370264 - DNA, 25 bp, Homo sapien
ggagaagtgctcatttccttcttct

SEQ ID NO: 4370265 - DNA, 25 bp, Homo sapien
gccacccagcagatggccttcccca

SEQ ID NO: 4370266 - DNA, 25 bp, Homo sapien
cccagcagatggccttccccaccat

SEQ ID NO: 4370267 - DNA, 25 bp, Homo sapien
ccgccacccagcagatggccttccc

SEQ ID NO: 4370268 - DNA, 25 bp, Homo sapien
cacccagcagatggccttccccacc

SEQ ID NO: 4370269 - DNA, 25 bp, Homo sapien
tcgaactcctgacactgtaagccac

SEQ ID NO: 4370270 - DNA, 25 bp, Homo sapien
gattaattttctatgcagcttggat

SEQ ID NO: 4370271 - DNA, 25 bp, Homo sapien
aataaaatgagcttggttagtcctc

SEQ ID NO: 4370272 - DNA, 25 bp, Homo sapien
ctgacactgtaagccacctgcctca

SEQ ID NO: 4370273 - DNA, 25 bp, Homo sapien
ggtgcgctattaagaatgctggact

SEQ ID NO: 4370274 - DNA, 25 bp, Homo sapien
ctggactgccgggagtagtggctcg

SEQ ID NO: 4370275 - DNA, 25 bp, Homo sapien
ggactgccgggagtagtggctcgtg

SEQ ID NO: 4370276 - DNA, 25 bp, Homo sapien
gtggtgcgctattaagaatgctgga

SEQ ID NO: 4370277 - DNA, 25 bp, Homo sapien
aagacagagatcttgatgataataa

SEQ ID NO: 4370278 - DNA, 25 bp, Homo sapien
actgaactgtgtctaaatgattttc

SEQ ID NO: 4370279 - DNA, 25 bp, Homo sapien
taagcccctgctagtgagaagagag

SEQ ID NO: 4370280 - DNA, 25 bp, Homo sapien
ccacttggtccacaattcacagctg

SEQ ID NO: 4370281 - DNA, 25 bp, Homo sapien
tcaaagtaatgagttctgcaccact

SEQ ID NO: 4370282 - DNA, 25 bp, Homo sapien
cacagagccagaacaaaggattact

SEQ ID NO: 4370283 - DNA, 25 bp, Homo sapien
gatccttcaggcatgcagaccaaca

SEQ ID NO: 4370284 - DNA, 25 bp, Homo sapien
ggattactgaatcactcaccttatc

SEQ ID NO: 4370285 - DNA, 25 bp, Homo sapien
aaactctgtgctgcacttgccaaga

SEQ ID NO: 4370286 - DNA, 25 bp, Homo sapien
gaattggagccagttacaagccacc

SEQ ID NO: 4370287 - DNA, 25 bp, Homo sapien
tacattatggcaccctaacaaggag

SEQ ID NO: 4370288 - DNA, 25 bp, Homo sapien
ggtatgtagcgagacagtactcacg

SEQ ID NO: 4370289 - DNA, 25 bp, Homo sapien
tgaccaaaacgctgaggcaactgaa

SEQ ID NO: 4370290 - DNA, 25 bp, Homo sapien
ggcacaaggagccacctccgaagtg

SEQ ID NO: 4370291 - DNA, 25 bp, Homo sapien
aaggactcctcggagtccgtggcac

SEQ ID NO: 4370292 - DNA, 25 bp, Homo sapien
tcctcagctttgagtgttcagtagc

SEQ ID NO: 4370293 - DNA, 25 bp, Homo sapien
gtgatgagttattggcccctgtgac

SEQ ID NO: 4370294 - DNA, 25 bp, Homo sapien
aaagaaatagctgccttggtagtga

SEQ ID NO: 4370295 - DNA, 25 bp, Homo sapien
tcaactatcccagccgtgtagccag

SEQ ID NO: 4370296 - DNA, 25 bp, Homo sapien
cgtgtagccagtcccttagtataac

SEQ ID NO: 4370297 - DNA, 25 bp, Homo sapien
tatcatgaagaaaccatctcctagg

SEQ ID NO: 4370298 - DNA, 25 bp, Homo sapien
gaacggaggagaccaaccataaggc

SEQ ID NO: 4370299 - DNA, 25 bp, Homo sapien
gaggagtgcacatgctcatcagcag

SEQ ID NO: 4370300 - DNA, 25 bp, Homo sapien
taatgaacaaaaggctactctaggg

SEQ ID NO: 4370301 - DNA, 25 bp, Homo sapien
aggaggtctccttgggcatgcacgc

SEQ ID NO: 4370302 - DNA, 25 bp, Homo sapien
ttcagcctggtaacttctcataaag

SEQ ID NO: 4370303 - DNA, 25 bp, Homo sapien
taccattggactaacactttgatca

SEQ ID NO: 4370304 - DNA, 25 bp, Homo sapien
cactctttggagaaggttacctcta

SEQ ID NO: 4370305 - DNA, 25 bp, Homo sapien
caaaaaattcaatatggcagcccaa

SEQ ID NO: 4370306 - DNA, 25 bp, Homo sapien
tatgcgacttataagttctctgaac

SEQ ID NO: 4370307 - DNA, 25 bp, Homo sapien
taagtaagtttctgtgaactgtcca

SEQ ID NO: 4370308 - DNA, 25 bp, Homo sapien
tcagattcacgctgaaatatccacc

SEQ ID NO: 4370309 - DNA, 25 bp, Homo sapien
ttcagtattaaggagcagttgttca

SEQ ID NO: 4370310 - DNA, 25 bp, Homo sapien
tctttttgtaaccatgccttcccag

SEQ ID NO: 4370311 - DNA, 25 bp, Homo sapien
tccaagaagttggaaccatagtaat

SEQ ID NO: 4370312 - DNA, 25 bp, Homo sapien
agtttcagcgagttctactccagcc

SEQ ID NO: 4370313 - DNA, 25 bp, Homo sapien
catagtaattgggaaggttttagct

SEQ ID NO: 4370314 - DNA, 25 bp, Homo sapien
gacaaccacaggtgatgatctggct

SEQ ID NO: 4370315 - DNA, 25 bp, Homo sapien
ggctggctaagctctaacgagtcat

SEQ ID NO: 4370316 - DNA, 25 bp, Homo sapien
catgcaatgcatagcctggacaacc

SEQ ID NO: 4370317 - DNA, 25 bp, Homo sapien
taaatcctgcttagagctgagatgg

SEQ ID NO: 4370318 - DNA, 25 bp, Homo sapien
gcgtaatcgtccacgtagtttaaca

SEQ ID NO: 4370319 - DNA, 25 bp, Homo sapien
tccgaagagcttgtaaattttgatg

SEQ ID NO: 4370320 - DNA, 25 bp, Homo sapien
cattctcagttattcggcgtaatcg

SEQ ID NO: 4370321 - DNA, 25 bp, Homo sapien
taaattctactggaatatccgaaga

SEQ ID NO: 4370322 - DNA, 25 bp, Homo sapien
ctcaccaggcctgtactacattttt

SEQ ID NO: 4370323 - DNA, 25 bp, Homo sapien
tcaccaggcctgtactacattttta

SEQ ID NO: 4370324 - DNA, 25 bp, Homo sapien
agaaatctataacaagaggaatctt

SEQ ID NO: 4370325 - DNA, 25 bp, Homo sapien
cctgaatgaccactgagtcaacaaa

SEQ ID NO: 4370326 - DNA, 25 bp, Homo sapien
tctataacaagaggaatcttggaaa

SEQ ID NO: 4370327 - DNA, 25 bp, Homo sapien
cttgaatcaaatggtaatgaaggct

SEQ ID NO: 4370328 - DNA, 25 bp, Homo sapien
tacagcaaaagcaatattaaaagga

SEQ ID NO: 4370329 - DNA, 25 bp, Homo sapien
aacacaacatatcaacacccatggg

SEQ ID NO: 4370330 - DNA, 25 bp, Homo sapien
tatcaacacccatgggatacagcaa

SEQ ID NO: 4370331 - DNA, 25 bp, Homo sapien
gtagaaaagcaaacaggaatccatt

SEQ ID NO: 4370332 - DNA, 25 bp, Homo sapien
aagtaacattattccagctatggcc

SEQ ID NO: 4370333 - DNA, 25 bp, Homo sapien
gtcgaatgcttctcaaaagtaacat

SEQ ID NO: 4370334 - DNA, 25 bp, Homo sapien
agtaacattattccagctatggcca

SEQ ID NO: 4370335 - DNA, 25 bp, Homo sapien
cagtcgaatgcttctcaaaagtaac

SEQ ID NO: 4370336 - DNA, 25 bp, Homo sapien
aaggtacatactctgggttctgtga

SEQ ID NO: 4370337 - DNA, 25 bp, Homo sapien
ctctgggttctgtgattggattatt

SEQ ID NO: 4370338 - DNA, 25 bp, Homo sapien
aaatatgcacaaaggtacatactct

SEQ ID NO: 4370339 - DNA, 25 bp, Homo sapien
catactctgggttctgtgattggat

SEQ ID NO: 4370340 - DNA, 25 bp, Homo sapien
aggatcttttcggccgaagtgggtg

SEQ ID NO: 4370341 - DNA, 25 bp, Homo sapien
tgggaggatcttttcggccgaagtg

SEQ ID NO: 4370342 - DNA, 25 bp, Homo sapien
tgggccagagaggaataccgtgtcc

SEQ ID NO: 4370343 - DNA, 25 bp, Homo sapien
tccgagccacgacgttgggctccat

SEQ ID NO: 4370344 - DNA, 25 bp, Homo sapien
gatccgagccacgacgttgggctcc

SEQ ID NO: 4370345 - DNA, 25 bp, Homo sapien
ccggactaggcgcaggtggtcgtct

SEQ ID NO: 4370346 - DNA, 25 bp, Homo sapien
tcgtctgcccactgcgagatccgag

SEQ ID NO: 4370347 - DNA, 25 bp, Homo sapien
ggcagacggcgagccggtggccgcg

SEQ ID NO: 4370348 - DNA, 25 bp, Homo sapien
cttgtcggcagacggcgagccggtg

SEQ ID NO: 4370349 - DNA, 25 bp, Homo sapien
tccgtccttgtcggcagacggcgag

SEQ ID NO: 4370350 - DNA, 25 bp, Homo sapien
cgtccttgtcggcagacggcgagcc

SEQ ID NO: 4370351 - DNA, 25 bp, Homo sapien
ggcctcctgcgagcggccctgagct

SEQ ID NO: 4370352 - DNA, 25 bp, Homo sapien
gccctgagctcctccggctggcggc

SEQ ID NO: 4370353 - DNA, 25 bp, Homo sapien
ccctgagctcctccggctggcggca

SEQ ID NO: 4370354 - DNA, 25 bp, Homo sapien
ttcccggcctcctgcgagcggccct

SEQ ID NO: 4370355 - DNA, 25 bp, Homo sapien
ggttttcgcaggtgccacacaagga

SEQ ID NO: 4370356 - DNA, 25 bp, Homo sapien
gggccccagatatcagacgtcttaa

SEQ ID NO: 4370357 - DNA, 25 bp, Homo sapien
gattccacgatgcaggagatctctg

SEQ ID NO: 4370358 - DNA, 25 bp, Homo sapien
cgcttttatgcagggtgattccacg

SEQ ID NO: 4370359 - DNA, 25 bp, Homo sapien
caaggctaatgctagatattccaaa

SEQ ID NO: 4370360 - DNA, 25 bp, Homo sapien
gactcaccaatataatttgacagtg

SEQ ID NO: 4370361 - DNA, 25 bp, Homo sapien
aattcttgcaaaggcaacatctggg

SEQ ID NO: 4370362 - DNA, 25 bp, Homo sapien
tgtgtatctctaattcaaacttgga

SEQ ID NO: 4370363 - DNA, 25 bp, Homo sapien
taaacaaggctccttaaaggcaatc

SEQ ID NO: 4370364 - DNA, 25 bp, Homo sapien
tggcattgtcaaatcaggcagatac

SEQ ID NO: 4370365 - DNA, 25 bp, Homo sapien
cacttaagcaggagggaatgagttc

SEQ ID NO: 4370366 - DNA, 25 bp, Homo sapien
tagtctgccctgctataagacctgc

SEQ ID NO: 4370367 - DNA, 25 bp, Homo sapien
tcgctatctaccaaagacattggtt

SEQ ID NO: 4370368 - DNA, 25 bp, Homo sapien
aaataattgtgcctcgctatctacc

SEQ ID NO: 4370369 - DNA, 25 bp, Homo sapien
aattgtgcctcgctatctaccaaag

SEQ ID NO: 4370370 - DNA, 25 bp, Homo sapien
tgtgcctcgctatctaccaaagaca

SEQ ID NO: 4370371 - DNA, 25 bp, Homo sapien
ctttcaattacttggaaccacagaa

SEQ ID NO: 4370372 - DNA, 25 bp, Homo sapien
catacagctttagtcattctttcaa

SEQ ID NO: 4370373 - DNA, 25 bp, Homo sapien
ttggaaatctgcatggaatgttccc

SEQ ID NO: 4370374 - DNA, 25 bp, Homo sapien
cattttagcagggtctatgacatac

SEQ ID NO: 4370375 - DNA, 25 bp, Homo sapien
ctagcctggaaaatatagcggaccc

SEQ ID NO: 4370376 - DNA, 25 bp, Homo sapien
tgtaggatataattcacccctgtgg

SEQ ID NO: 4370377 - DNA, 25 bp, Homo sapien
aatatttatcatgggcagggcacgg

SEQ ID NO: 4370378 - DNA, 25 bp, Homo sapien
ctgcttgaagctatgagattgggac

SEQ ID NO: 4370379 - DNA, 25 bp, Homo sapien
cagatttaggcagatcatttttaaa

SEQ ID NO: 4370380 - DNA, 25 bp, Homo sapien
tttatcaggatcaatcaatcaagaa

SEQ ID NO: 4370381 - DNA, 25 bp, Homo sapien
gttgcacatagctattaacaagtta

SEQ ID NO: 4370382 - DNA, 25 bp, Homo sapien
tgatcaatgtatgcaacacagttgc

SEQ ID NO: 4370383 - DNA, 25 bp, Homo sapien
caggatctgacatcgatgcccaaca

SEQ ID NO: 4370384 - DNA, 25 bp, Homo sapien
tggacaaccatgtgacaaagtactg

SEQ ID NO: 4370385 - DNA, 25 bp, Homo sapien
tatggtttggtgtagcctccttgcc

SEQ ID NO: 4370386 - DNA, 25 bp, Homo sapien
tgagttctagaggtcactgccccat

SEQ ID NO: 4370387 - DNA, 25 bp, Homo sapien
cactgggtgtatgtaatacgctggg

SEQ ID NO: 4370388 - DNA, 25 bp, Homo sapien
tacgctgggaattgctaaagtactc

SEQ ID NO: 4370389 - DNA, 25 bp, Homo sapien
ggaatagcaactgtccactgaaaac

SEQ ID NO: 4370390 - DNA, 25 bp, Homo sapien
tgcaaagaaccttatcactgggtgt

SEQ ID NO: 4370391 - DNA, 25 bp, Homo sapien
ctccattggctgtctgtgtgccagg

SEQ ID NO: 4370392 - DNA, 25 bp, Homo sapien
aacatatataagcttagggtaaaag

SEQ ID NO: 4370393 - DNA, 25 bp, Homo sapien
tgatcccctccattggctgtctgtg

SEQ ID NO: 4370394 - DNA, 25 bp, Homo sapien
gaatttgatcccctccattggctgt

SEQ ID NO: 4370395 - DNA, 25 bp, Homo sapien
tacagctcagcagtgataggtacta

SEQ ID NO: 4370396 - DNA, 25 bp, Homo sapien
gcactgattatcattgctctccgaa

SEQ ID NO: 4370397 - DNA, 25 bp, Homo sapien
taccacccgtgactactgcattgca

SEQ ID NO: 4370398 - DNA, 25 bp, Homo sapien
tacctgactacatggttaccacccg

SEQ ID NO: 4370399 - DNA, 25 bp, Homo sapien
tgctagaatgtccagtagcatatat

SEQ ID NO: 4370400 - DNA, 25 bp, Homo sapien
gctagaatgtccagtagcatatata

SEQ ID NO: 4370401 - DNA, 25 bp, Homo sapien
gactccacataataaccatccaggg

SEQ ID NO: 4370402 - DNA, 25 bp, Homo sapien
tgtaacacatgagccacccagtttt

SEQ ID NO: 4370403 - DNA, 25 bp, Homo sapien
gcagctttcacattcggaaatgtga

SEQ ID NO: 4370404 - DNA, 25 bp, Homo sapien
tttcacattcggaaatgtgaagaaa

SEQ ID NO: 4370405 - DNA, 25 bp, Homo sapien
cagctttcacattcggaaatgtgaa

SEQ ID NO: 4370406 - DNA, 25 bp, Homo sapien
agctttcacattcggaaatgtgaag

SEQ ID NO: 4370407 - DNA, 25 bp, Homo sapien
gtttcctcccagattggacacggta

SEQ ID NO: 4370408 - DNA, 25 bp, Homo sapien
catgtatgttcctccaataagtgga

SEQ ID NO: 4370409 - DNA, 25 bp, Homo sapien
gagctactgtagaaggccagtttcc

SEQ ID NO: 4370410 - DNA, 25 bp, Homo sapien
caattctggtttgatgctcctacac

SEQ ID NO: 4370411 - DNA, 25 bp, Homo sapien
gtttcaataatggtattcctttgaa

SEQ ID NO: 4370412 - DNA, 25 bp, Homo sapien
acatccttaagaggcaaaaagtact

SEQ ID NO: 4370413 - DNA, 25 bp, Homo sapien
ggcactaaaggatacataatgcata

SEQ ID NO: 4370414 - DNA, 25 bp, Homo sapien
gagaaaatgttagatgaggtggcac

SEQ ID NO: 4370415 - DNA, 25 bp, Homo sapien
gatgttctactttaggagtccacca

SEQ ID NO: 4370416 - DNA, 25 bp, Homo sapien
taactcagcaggactacgatatagt

SEQ ID NO: 4370417 - DNA, 25 bp, Homo sapien
atatagtaatatatagggaatcccc

SEQ ID NO: 4370418 - DNA, 25 bp, Homo sapien
aaccagtagggcatattctaaccca

SEQ ID NO: 4370419 - DNA, 25 bp, Homo sapien
tgttctttgggtactccctcttcta

SEQ ID NO: 4370420 - DNA, 25 bp, Homo sapien
cattggaactgccaataaggctaaa

SEQ ID NO: 4370421 - DNA, 25 bp, Homo sapien
taatcagaggcagtattatctgcaa

SEQ ID NO: 4370422 - DNA, 25 bp, Homo sapien
gggacctgcagtgtatttgctgata

SEQ ID NO: 4370423 - DNA, 25 bp, Homo sapien
gcttgtaagtatctgtgatcccttg

SEQ ID NO: 4370424 - DNA, 25 bp, Homo sapien
ctttgcagttagaatcagaaggcaa

SEQ ID NO: 4370425 - DNA, 25 bp, Homo sapien
aaggcaaaatgtcagaactgctggc

SEQ ID NO: 4370426 - DNA, 25 bp, Homo sapien
gtcagaactgctggcatttttataa

SEQ ID NO: 4370427 - DNA, 25 bp, Homo sapien
aagggcaaccaatgttgttgttatt

SEQ ID NO: 4370428 - DNA, 25 bp, Homo sapien
agggcaaccaatgttgttgttatta

SEQ ID NO: 4370429 - DNA, 25 bp, Homo sapien
caactgagttgaatgaacaaaagcc

SEQ ID NO: 4370430 - DNA, 25 bp, Homo sapien
aacagtcctgactcttaaacgtaga

SEQ ID NO: 4370431 - DNA, 25 bp, Homo sapien
cgtagagacccaaaataggtgacaa

SEQ ID NO: 4370432 - DNA, 25 bp, Homo sapien
ttcaaggcattgtaccaggcacagc

SEQ ID NO: 4370433 - DNA, 25 bp, Homo sapien
caatagatcctttacttcaccagcc

SEQ ID NO: 4370434 - DNA, 25 bp, Homo sapien
gggaagtcaagctgtccaagttaca

SEQ ID NO: 4370435 - DNA, 25 bp, Homo sapien
caggtgaacaaactaaggcttaggg

SEQ ID NO: 4370436 - DNA, 25 bp, Homo sapien
caagttacattctaagtcagtggta

SEQ ID NO: 4370437 - DNA, 25 bp, Homo sapien
gactaaatattctgaagtggctgca

SEQ ID NO: 4370438 - DNA, 25 bp, Homo sapien
gaccaatgttgatagatgatagcca

SEQ ID NO: 4370439 - DNA, 25 bp, Homo sapien
tacaatagctcgcacctgagtgtct

SEQ ID NO: 4370440 - DNA, 25 bp, Homo sapien
catgatttccgagtaaagacctaaa

SEQ ID NO: 4370441 - DNA, 25 bp, Homo sapien
tgtcattaaaccgtcttgctccctg

SEQ ID NO: 4370442 - DNA, 25 bp, Homo sapien
catttattcctgtatgtgcgtgcct

SEQ ID NO: 4370443 - DNA, 25 bp, Homo sapien
ggagagggcctcaattaccagttta

SEQ ID NO: 4370444 - DNA, 25 bp, Homo sapien
tttaaagcatcaatgtcgctgggca

SEQ ID NO: 4370445 - DNA, 25 bp, Homo sapien
cactgtgctcagctaaagacatgtt

SEQ ID NO: 4370446 - DNA, 25 bp, Homo sapien
gacatgtttttatatgagcctaaga

SEQ ID NO: 4370447 - DNA, 25 bp, Homo sapien
tctcttgaatatgcctaagatctag

SEQ ID NO: 4370448 - DNA, 25 bp, Homo sapien
taagatctagcaatcttgccgggca

SEQ ID NO: 4370449 - DNA, 25 bp, Homo sapien
gaataatgttatgagttcaagagtt

SEQ ID NO: 4370450 - DNA, 25 bp, Homo sapien
ccagagaataatgttatgagttcaa

SEQ ID NO: 4370451 - DNA, 25 bp, Homo sapien
aaacatcattccagagaataatgtt

SEQ ID NO: 4370452 - DNA, 25 bp, Homo sapien
tcttaatgtaagagtgattggtaaa

SEQ ID NO: 4370453 - DNA, 25 bp, Homo sapien
tgcccagtcgtgacttattttttat

SEQ ID NO: 4370454 - DNA, 25 bp, Homo sapien
tgtgcccagtcgtgacttatttttt

SEQ ID NO: 4370455 - DNA, 25 bp, Homo sapien
tactaactggcaactctgaactctc

SEQ ID NO: 4370456 - DNA, 25 bp, Homo sapien
cttagaatcccgtcccttagctggt

SEQ ID NO: 4370457 - DNA, 25 bp, Homo sapien
ccctgttccattcactagaaggctg

SEQ ID NO: 4370458 - DNA, 25 bp, Homo sapien
tcttgagtgcagaactctgccttat

SEQ ID NO: 4370459 - DNA, 25 bp, Homo sapien
gctcatttggacgaaacagaaaact

SEQ ID NO: 4370460 - DNA, 25 bp, Homo sapien
ctcatttggacgaaacagaaaactt

SEQ ID NO: 4370461 - DNA, 25 bp, Homo sapien
tcatttggacgaaacagaaaactta

SEQ ID NO: 4370462 - DNA, 25 bp, Homo sapien
tctcccatacaatgatttccagtaa

SEQ ID NO: 4370463 - DNA, 25 bp, Homo sapien
tccaacgtcacacactctttcaaaa

SEQ ID NO: 4370464 - DNA, 25 bp, Homo sapien
gagttatctcccatacaatgatttc

SEQ ID NO: 4370465 - DNA, 25 bp, Homo sapien
tttccagtaaattaatgagcttccc

SEQ ID NO: 4370466 - DNA, 25 bp, Homo sapien
cattgcccaaaaagtaacccgctgt

SEQ ID NO: 4370467 - DNA, 25 bp, Homo sapien
ctgaaagagtaacgattcctctggg

SEQ ID NO: 4370468 - DNA, 25 bp, Homo sapien
ttgaggctgaaaccgcaaatatttg

SEQ ID NO: 4370469 - DNA, 25 bp, Homo sapien
ttgttacaaaagtcggcagattcaa

SEQ ID NO: 4370470 - DNA, 25 bp, Homo sapien
aaaatgctgcttagttcggcccgga

SEQ ID NO: 4370471 - DNA, 25 bp, Homo sapien
caagccaagatttgcgacgaccgaa

SEQ ID NO: 4370472 - DNA, 25 bp, Homo sapien
tcggtattcccaagcaaacggtcca

SEQ ID NO: 4370473 - DNA, 25 bp, Homo sapien
gcttttaagaagtcgccagtgccgg

SEQ ID NO: 4370474 - DNA, 25 bp, Homo sapien
gggggccgaggctgagcgttttgga

SEQ ID NO: 4370475 - DNA, 25 bp, Homo sapien
ggccgaggctgagcgttttggatcc

SEQ ID NO: 4370476 - DNA, 25 bp, Homo sapien
ccgaggctgagcgttttggatccgt

SEQ ID NO: 4370477 - DNA, 25 bp, Homo sapien
tgtggggggccgaggctgagcgttt

SEQ ID NO: 4370478 - DNA, 25 bp, Homo sapien
tgccgtggtgccaggatggaaacca

SEQ ID NO: 4370479 - DNA, 25 bp, Homo sapien
tactgcagcccggagtgctgaagcc

SEQ ID NO: 4370480 - DNA, 25 bp, Homo sapien
cctggaacggcgtcaaagagcctga

SEQ ID NO: 4370481 - DNA, 25 bp, Homo sapien
ccaggtccaaggctgtcgcgctgga

SEQ ID NO: 4370482 - DNA, 25 bp, Homo sapien
tctcgtggcccagttcggaaacaat

SEQ ID NO: 4370483 - DNA, 25 bp, Homo sapien
tatcaatgcggcagagagcactttc

SEQ ID NO: 4370484 - DNA, 25 bp, Homo sapien
gaaacaatgcttggtgggaacctgc

SEQ ID NO: 4370485 - DNA, 25 bp, Homo sapien
agccaatcagggacacgctctcgtg

SEQ ID NO: 4370486 - DNA, 25 bp, Homo sapien
tttggaatactggtgttccctgatt

SEQ ID NO: 4370487 - DNA, 25 bp, Homo sapien
tataaaacccttctggtggtcgcca

SEQ ID NO: 4370488 - DNA, 25 bp, Homo sapien
ataaaacccttctggtggtcgccat

SEQ ID NO: 4370489 - DNA, 25 bp, Homo sapien
tcttttggaatactggtgttccctg

SEQ ID NO: 4370490 - DNA, 25 bp, Homo sapien
tgaacttgaaaggagctattggccc

SEQ ID NO: 4370491 - DNA, 25 bp, Homo sapien
tagggtagaagagagtctggactac

SEQ ID NO: 4370492 - DNA, 25 bp, Homo sapien
cattcagctgttcattatattctgg

SEQ ID NO: 4370493 - DNA, 25 bp, Homo sapien
cattgatttagatagtacattcagc

SEQ ID NO: 4370494 - DNA, 25 bp, Homo sapien
cagccagaaaggacagcataccact

SEQ ID NO: 4370495 - DNA, 25 bp, Homo sapien
tcagccagaaaggacagcataccac

SEQ ID NO: 4370496 - DNA, 25 bp, Homo sapien
tactattggtgtgggcaaacctcct

SEQ ID NO: 4370497 - DNA, 25 bp, Homo sapien
gggttccctgccacttgtgtactat

SEQ ID NO: 4370498 - DNA, 25 bp, Homo sapien
gcttcccacgtaggtgctgtagcac

SEQ ID NO: 4370499 - DNA, 25 bp, Homo sapien
cggttctctaattgggtgctgtgcc

SEQ ID NO: 4370500 - DNA, 25 bp, Homo sapien
ttggcaggagtatcacagaattggt

SEQ ID NO: 4370501 - DNA, 25 bp, Homo sapien
tgtggcatgacaggtgatgttaact

SEQ ID NO: 4370502 - DNA, 25 bp, Homo sapien
tggtttctgtgatgattcctcattg

SEQ ID NO: 4370503 - DNA, 25 bp, Homo sapien
atcaggaggcacacggtgtggattt

SEQ ID NO: 4370504 - DNA, 25 bp, Homo sapien
tgtcatggccctagatctaaatgcc

SEQ ID NO: 4370505 - DNA, 25 bp, Homo sapien
caaccctaccaatatcagatgaaga

SEQ ID NO: 4370506 - DNA, 25 bp, Homo sapien
ccgtgccggccctaatcagcataat

SEQ ID NO: 4370507 - DNA, 25 bp, Homo sapien
tctaaatgccaggagattctcacag

SEQ ID NO: 4370508 - DNA, 25 bp, Homo sapien
ggagctttatcctcctagccttata

SEQ ID NO: 4370509 - DNA, 25 bp, Homo sapien
cagaagctatgatgcatacctacag

SEQ ID NO: 4370510 - DNA, 25 bp, Homo sapien
tttgctggtcagagaaacggttctg

SEQ ID NO: 4370511 - DNA, 25 bp, Homo sapien
tcaatgacgtttctggtgtagtgca

SEQ ID NO: 4370512 - DNA, 25 bp, Homo sapien
caggtttccttagtccagattgtcc

SEQ ID NO: 4370513 - DNA, 25 bp, Homo sapien
aatttcaggtttccttagtccagat

SEQ ID NO: 4370514 - DNA, 25 bp, Homo sapien
tttcaggtttccttagtccagattg

SEQ ID NO: 4370515 - DNA, 25 bp, Homo sapien
gtttccttagtccagattgtcctga

SEQ ID NO: 4370516 - DNA, 25 bp, Homo sapien
tgttggcaaggtttgaccacttggg

SEQ ID NO: 4370517 - DNA, 25 bp, Homo sapien
tatgctttggctttgacactaatga

SEQ ID NO: 4370518 - DNA, 25 bp, Homo sapien
gggaaacatcaaaatgcaccgtaaa

SEQ ID NO: 4370519 - DNA, 25 bp, Homo sapien
taggaatctctctttactgcgtgtt

SEQ ID NO: 4370520 - DNA, 25 bp, Homo sapien
taaattcttattgagggccatacct

SEQ ID NO: 4370521 - DNA, 25 bp, Homo sapien
tcaaacctataggagagagatgcag

SEQ ID NO: 4370522 - DNA, 25 bp, Homo sapien
ccacgcccggcaagcatttacagtt

SEQ ID NO: 4370523 - DNA, 25 bp, Homo sapien
tacagttttaaatctcccagtcaga

SEQ ID NO: 4370524 - DNA, 25 bp, Homo sapien
ccagagagcaaaggatccacagatg

SEQ ID NO: 4370525 - DNA, 25 bp, Homo sapien
gaatgtaagttgacgttaaatgagg

SEQ ID NO: 4370526 - DNA, 25 bp, Homo sapien
tggattccaatcacgattcctgtga

SEQ ID NO: 4370527 - DNA, 25 bp, Homo sapien
tcctgtgatgggtaggaacttggca

SEQ ID NO: 4370528 - DNA, 25 bp, Homo sapien
tttactaatgattagtaagctgttg

SEQ ID NO: 4370529 - DNA, 25 bp, Homo sapien
tactaatgattagtaagctgttgag

SEQ ID NO: 4370530 - DNA, 25 bp, Homo sapien
ttactaatgattagtaagctgttga

SEQ ID NO: 4370531 - DNA, 25 bp, Homo sapien
ttttactaatgattagtaagctgtt

SEQ ID NO: 4370532 - DNA, 25 bp, Homo sapien
ggtatggaactgaccattaatatac

SEQ ID NO: 4370533 - DNA, 25 bp, Homo sapien
cgttcttctacgtcagtcagagcta

SEQ ID NO: 4370534 - DNA, 25 bp, Homo sapien
tcacaggtaacgttcttctacgtca

SEQ ID NO: 4370535 - DNA, 25 bp, Homo sapien
cagtcagagctaaagcagcttgggt

SEQ ID NO: 4370536 - DNA, 25 bp, Homo sapien
gataggcttacagtaccctctgaga

SEQ ID NO: 4370537 - DNA, 25 bp, Homo sapien
tccaaagcctgtagtgtcaagtgca

SEQ ID NO: 4370538 - DNA, 25 bp, Homo sapien
gcacttttctggctgcgaggttcca

SEQ ID NO: 4370539 - DNA, 25 bp, Homo sapien
tgcagtcccggaagatgattatagg

SEQ ID NO: 4370540 - DNA, 25 bp, Homo sapien
ggaagacgaagaggcactgcattat

SEQ ID NO: 4370541 - DNA, 25 bp, Homo sapien
gaagacgaagaggcactgcattatt

SEQ ID NO: 4370542 - DNA, 25 bp, Homo sapien
agacgaagaggcactgcattatttg

SEQ ID NO: 4370543 - DNA, 25 bp, Homo sapien
aagacgaagaggcactgcattattt

SEQ ID NO: 4370544 - DNA, 25 bp, Homo sapien
tcaaagatgatatctggccaaaccc

SEQ ID NO: 4370545 - DNA, 25 bp, Homo sapien
gtgatccatcttcgaagtccaccga

SEQ ID NO: 4370546 - DNA, 25 bp, Homo sapien
aaacacagaataaagccagcaggaa

SEQ ID NO: 4370547 - DNA, 25 bp, Homo sapien
cagtactacttggttcccgatatgg

SEQ ID NO: 4370548 - DNA, 25 bp, Homo sapien
atatttgacagacatccttgcagtt

SEQ ID NO: 4370549 - DNA, 25 bp, Homo sapien
gggttaagtgggcattttgacaaca

SEQ ID NO: 4370550 - DNA, 25 bp, Homo sapien
cctgccactcaatgggagaatcagc

SEQ ID NO: 4370551 - DNA, 25 bp, Homo sapien
aatcagcagaacctgtaggatctta

SEQ ID NO: 4370552 - DNA, 25 bp, Homo sapien
cttgtcttcggtgctctatacattc

SEQ ID NO: 4370553 - DNA, 25 bp, Homo sapien
ccaattcattcacccggcggcacca

SEQ ID NO: 4370554 - DNA, 25 bp, Homo sapien
agaaccaattcattcacccggcggc

SEQ ID NO: 4370555 - DNA, 25 bp, Homo sapien
acagaaccaattcattcacccggcg

SEQ ID NO: 4370556 - DNA, 25 bp, Homo sapien
tcacagaaccaattcattcacccgg

SEQ ID NO: 4370557 - DNA, 25 bp, Homo sapien
cataaccaaaggaagcacagtctgc

SEQ ID NO: 4370558 - DNA, 25 bp, Homo sapien
gtgtccataaccaaaggaagcacag

SEQ ID NO: 4370559 - DNA, 25 bp, Homo sapien
ttatgtgtccataaccaaaggaagc

SEQ ID NO: 4370560 - DNA, 25 bp, Homo sapien
taaccaaaggaagcacagtctgcac

SEQ ID NO: 4370561 - DNA, 25 bp, Homo sapien
tcatcccatcggagctgctgcgact

SEQ ID NO: 4370562 - DNA, 25 bp, Homo sapien
ccctcaggatcaggaaagtttgaga

SEQ ID NO: 4370563 - DNA, 25 bp, Homo sapien
gaactggtttagcttgccctcagga

SEQ ID NO: 4370564 - DNA, 25 bp, Homo sapien
cagctctcatcccatcggagctgct

SEQ ID NO: 4370565 - DNA, 25 bp, Homo sapien
cagctgagctgccagttcctctgag

SEQ ID NO: 4370566 - DNA, 25 bp, Homo sapien
gagctgccagttcctctgagtcctc

SEQ ID NO: 4370567 - DNA, 25 bp, Homo sapien
gccagttcctctgagtcctcaaaga

SEQ ID NO: 4370568 - DNA, 25 bp, Homo sapien
ctgcagctgagctgccagttcctct

SEQ ID NO: 4370569 - DNA, 25 bp, Homo sapien
ccagctcatgtaaacacttgaagtt

SEQ ID NO: 4370570 - DNA, 25 bp, Homo sapien
agcacacacaggcaaacagcacccg

SEQ ID NO: 4370571 - DNA, 25 bp, Homo sapien
gctcatgtaaacacttgaagttcac

SEQ ID NO: 4370572 - DNA, 25 bp, Homo sapien
ctcatgtaaacacttgaagttcaca

SEQ ID NO: 4370573 - DNA, 25 bp, Homo sapien
caggtccaccgaccctagaagcagg

SEQ ID NO: 4370574 - DNA, 25 bp, Homo sapien
ggaggacgtgtgcagacagacaccc

SEQ ID NO: 4370575 - DNA, 25 bp, Homo sapien
aggtggctgtaatactccctcagag

SEQ ID NO: 4370576 - DNA, 25 bp, Homo sapien
caccgaccctagaagcagggggtag

SEQ ID NO: 4370577 - DNA, 25 bp, Homo sapien
gttgtgttcgtcaagagtcagttgc

SEQ ID NO: 4370578 - DNA, 25 bp, Homo sapien
tgttcgtcaagagtcagttgctcaa

SEQ ID NO: 4370579 - DNA, 25 bp, Homo sapien
tgtgttcgtcaagagtcagttgctc

SEQ ID NO: 4370580 - DNA, 25 bp, Homo sapien
gttcgtcaagagtcagttgctcaaa

SEQ ID NO: 4370581 - DNA, 25 bp, Homo sapien
tgccagcaggatggagaagtcttcg

SEQ ID NO: 4370582 - DNA, 25 bp, Homo sapien
ctgccagcaggatggagaagtcttc

SEQ ID NO: 4370583 - DNA, 25 bp, Homo sapien
agcaggatggagaagtcttcgtcct

SEQ ID NO: 4370584 - DNA, 25 bp, Homo sapien
ccagcaggatggagaagtcttcgtc

SEQ ID NO: 4370585 - DNA, 25 bp, Homo sapien
tggtcacagcctcaggatagctggg

SEQ ID NO: 4370586 - DNA, 25 bp, Homo sapien
aaggccgaccgctcctggctgggtc

SEQ ID NO: 4370587 - DNA, 25 bp, Homo sapien
tgtcatagatggtcacagcctcagg

SEQ ID NO: 4370588 - DNA, 25 bp, Homo sapien
tagatggtcacagcctcaggatagc

SEQ ID NO: 4370589 - DNA, 25 bp, Homo sapien
catgtagcaaggcatagggacaatg

SEQ ID NO: 4370590 - DNA, 25 bp, Homo sapien
tgtgtcaacataagatgaggaagaa

SEQ ID NO: 4370591 - DNA, 25 bp, Homo sapien
ttcaagatagtaggggctagcttca

SEQ ID NO: 4370592 - DNA, 25 bp, Homo sapien
aaaggcttcgggtctggagcacagc

SEQ ID NO: 4370593 - DNA, 25 bp, Homo sapien
tttagtagtgcttttacaagtgctg

SEQ ID NO: 4370594 - DNA, 25 bp, Homo sapien
tagtagtgcttttacaagtgctgtt

SEQ ID NO: 4370595 - DNA, 25 bp, Homo sapien
tgtttagtagtgcttttacaagtgc

SEQ ID NO: 4370596 - DNA, 25 bp, Homo sapien
ttgtttagtagtgcttttacaagtg

SEQ ID NO: 4370597 - DNA, 25 bp, Homo sapien
ggtgatatggcctaaacttcacagg

SEQ ID NO: 4370598 - DNA, 25 bp, Homo sapien
ccctggtgatatggcctaaacttca

SEQ ID NO: 4370599 - DNA, 25 bp, Homo sapien
agagttccctggtgatatggcctaa

SEQ ID NO: 4370600 - DNA, 25 bp, Homo sapien
gatatggcctaaacttcacaggtac

SEQ ID NO: 4370601 - DNA, 25 bp, Homo sapien
gccagtgtgctatctaccaatacca

SEQ ID NO: 4370602 - DNA, 25 bp, Homo sapien
catactcttcgtgtgggaaaatacc

SEQ ID NO: 4370603 - DNA, 25 bp, Homo sapien
gaaaggaattgatctctcgaaacat

SEQ ID NO: 4370604 - DNA, 25 bp, Homo sapien
aaatccaaggcattagcggagcaaa

SEQ ID NO: 4370605 - DNA, 25 bp, Homo sapien
ggatgcaggggacattggaaacaaa

SEQ ID NO: 4370606 - DNA, 25 bp, Homo sapien
ttgggaatagtctgatgttctacta

SEQ ID NO: 4370607 - DNA, 25 bp, Homo sapien
gttctactaagttcagaggatgcag

SEQ ID NO: 4370608 - DNA, 25 bp, Homo sapien
atgttctactaagttcagaggatgc

SEQ ID NO: 4370609 - DNA, 25 bp, Homo sapien
atccatgcccccgggatgaaacttt

SEQ ID NO: 4370610 - DNA, 25 bp, Homo sapien
catgcccccgggatgaaactttctc

SEQ ID NO: 4370611 - DNA, 25 bp, Homo sapien
ccatgcccccgggatgaaactttct

SEQ ID NO: 4370612 - DNA, 25 bp, Homo sapien
ctaatccatgcccccgggatgaaac

SEQ ID NO: 4370613 - DNA, 25 bp, Homo sapien
ttgatctcgaccccagctttcgcag

SEQ ID NO: 4370614 - DNA, 25 bp, Homo sapien
cccagctttcgcagctgctggcttc

SEQ ID NO: 4370615 - DNA, 25 bp, Homo sapien
tgcacttcgtatccccttgatctcg

SEQ ID NO: 4370616 - DNA, 25 bp, Homo sapien
ccatttgtgcacttcgtatcccctt

SEQ ID NO: 4370617 - DNA, 25 bp, Homo sapien
gcagggaccgctgctagagaaacgt

SEQ ID NO: 4370618 - DNA, 25 bp, Homo sapien
ctagagaaacgtttggatgctgtcc

SEQ ID NO: 4370619 - DNA, 25 bp, Homo sapien
gaccgctgctagagaaacgtttgga

SEQ ID NO: 4370620 - DNA, 25 bp, Homo sapien
cgctgctagagaaacgtttggatgc

SEQ ID NO: 4370621 - DNA, 25 bp, Homo sapien
tgctggaccacttttgatgtgtctg

SEQ ID NO: 4370622 - DNA, 25 bp, Homo sapien
aatacttggctctgggacatgtttt

SEQ ID NO: 4370623 - DNA, 25 bp, Homo sapien
gctggaccacttttgatgtgtctgt

SEQ ID NO: 4370624 - DNA, 25 bp, Homo sapien
aaggcttctgtaatagacatatttc

SEQ ID NO: 4370625 - DNA, 25 bp, Homo sapien
tttaaaggcttctgtaatagacata

SEQ ID NO: 4370626 - DNA, 25 bp, Homo sapien
taaaggcttctgtaatagacatatt

SEQ ID NO: 4370627 - DNA, 25 bp, Homo sapien
atttaaaggcttctgtaatagacat

SEQ ID NO: 4370628 - DNA, 25 bp, Homo sapien
atcgacatacttcctcattgatttt

SEQ ID NO: 4370629 - DNA, 25 bp, Homo sapien
aatcgacatacttcctcattgattt

SEQ ID NO: 4370630 - DNA, 25 bp, Homo sapien
gaatcgacatacttcctcattgatt

SEQ ID NO: 4370631 - DNA, 25 bp, Homo sapien
cattaattcctcaatggcatctttc

SEQ ID NO: 4370632 - DNA, 25 bp, Homo sapien
tttcattaattcctcaatggcatct

SEQ ID NO: 4370633 - DNA, 25 bp, Homo sapien
ttacaactggcatttcattaattcc

SEQ ID NO: 4370634 - DNA, 25 bp, Homo sapien
acaactggcatttcattaattcctc

SEQ ID NO: 4370635 - DNA, 25 bp, Homo sapien
tggtataagagacttctctggctgg

SEQ ID NO: 4370636 - DNA, 25 bp, Homo sapien
tctctggctggcaagaattacctag

SEQ ID NO: 4370637 - DNA, 25 bp, Homo sapien
tagtccactcgcagtggtataagag

SEQ ID NO: 4370638 - DNA, 25 bp, Homo sapien
gcaagaattacctagatgttcccat

SEQ ID NO: 4370639 - DNA, 25 bp, Homo sapien
tatggcttggtttactttaggatta

SEQ ID NO: 4370640 - DNA, 25 bp, Homo sapien
aaacagaagctttgtatggcttggt

SEQ ID NO: 4370641 - DNA, 25 bp, Homo sapien
gctttgtatggcttggtttacttta

SEQ ID NO: 4370642 - DNA, 25 bp, Homo sapien
ttcgccaaacagaagctttgtatgg

SEQ ID NO: 4370643 - DNA, 25 bp, Homo sapien
atgtttctttacagcttctcctggg

SEQ ID NO: 4370644 - DNA, 25 bp, Homo sapien
taatacacaggaaaccaacatgttt

SEQ ID NO: 4370645 - DNA, 25 bp, Homo sapien
tgtgtgaagaggaattttctgcata

SEQ ID NO: 4370646 - DNA, 25 bp, Homo sapien
ctggggaaagagaagtaaccactga

SEQ ID NO: 4370647 - DNA, 25 bp, Homo sapien
ccagggcacagcgtgcatctgcccc

SEQ ID NO: 4370648 - DNA, 25 bp, Homo sapien
tcatagagtgcaatgtttgtgcttc

SEQ ID NO: 4370649 - DNA, 25 bp, Homo sapien
aatcatagagtgcaatgtttgtgct

SEQ ID NO: 4370650 - DNA, 25 bp, Homo sapien
cctaaatcatagagtgcaatgtttg

SEQ ID NO: 4370651 - DNA, 25 bp, Homo sapien
ccatcttgatagttcacccatggaa

SEQ ID NO: 4370652 - DNA, 25 bp, Homo sapien
gccatcttgatagttcacccatgga

SEQ ID NO: 4370653 - DNA, 25 bp, Homo sapien
actgagaatttcaaactggacaggc

SEQ ID NO: 4370654 - DNA, 25 bp, Homo sapien
ctgagaatttcaaactggacaggcc

SEQ ID NO: 4370655 - DNA, 25 bp, Homo sapien
tcttaataacttgaggcaggtatgt

SEQ ID NO: 4370656 - DNA, 25 bp, Homo sapien
cttgaggcaggtatgtaatgttttc

SEQ ID NO: 4370657 - DNA, 25 bp, Homo sapien
aataacttgaggcaggtatgtaatg

SEQ ID NO: 4370658 - DNA, 25 bp, Homo sapien
aacattttcttaataacttgaggca

SEQ ID NO: 4370659 - DNA, 25 bp, Homo sapien
tcaacaggacaggatttaggtagcc

SEQ ID NO: 4370660 - DNA, 25 bp, Homo sapien
tgggagtagccaaatgcacagggac

SEQ ID NO: 4370661 - DNA, 25 bp, Homo sapien
tggaagtagacatccctggacgggc

SEQ ID NO: 4370662 - DNA, 25 bp, Homo sapien
cacagggacttggttcagtctgcac

SEQ ID NO: 4370663 - DNA, 25 bp, Homo sapien
gcacctgtctatcaaaaggctggga

SEQ ID NO: 4370664 - DNA, 25 bp, Homo sapien
aggttctgtaactcgggatgtggca

SEQ ID NO: 4370665 - DNA, 25 bp, Homo sapien
ctttgcttcttgtcctgcacctgtc

SEQ ID NO: 4370666 - DNA, 25 bp, Homo sapien
ccacactataaggttctgtaactcg

SEQ ID NO: 4370667 - DNA, 25 bp, Homo sapien
gggaatgcgaaccaatgaggaagca

SEQ ID NO: 4370668 - DNA, 25 bp, Homo sapien
ttgtgggaatgcgaaccaatgagga

SEQ ID NO: 4370669 - DNA, 25 bp, Homo sapien
ggtttgtgggaatgcgaaccaatga

SEQ ID NO: 4370670 - DNA, 25 bp, Homo sapien
tgggaatgcgaaccaatgaggaagc

SEQ ID NO: 4370671 - DNA, 25 bp, Homo sapien
gcttctaactgccacgttttgaggt

SEQ ID NO: 4370672 - DNA, 25 bp, Homo sapien
taactgccacgttttgaggtatttc

SEQ ID NO: 4370673 - DNA, 25 bp, Homo sapien
tctaactgccacgttttgaggtatt

SEQ ID NO: 4370674 - DNA, 25 bp, Homo sapien
tgccacgttttgaggtatttctggc

SEQ ID NO: 4370675 - DNA, 25 bp, Homo sapien
tgcacatctgggccccatggaccat

SEQ ID NO: 4370676 - DNA, 25 bp, Homo sapien
tgcacttttgcacatctgggcccca

SEQ ID NO: 4370677 - DNA, 25 bp, Homo sapien
tgtgcacttttgcacatctgggccc

SEQ ID NO: 4370678 - DNA, 25 bp, Homo sapien
tttgcacatctgggccccatggacc

SEQ ID NO: 4370679 - DNA, 25 bp, Homo sapien
tgatgtgaacacagatcgggcgaag

SEQ ID NO: 4370680 - DNA, 25 bp, Homo sapien
tcatggtagctcatggaatgaggag

SEQ ID NO: 4370681 - DNA, 25 bp, Homo sapien
gtttcctcgaccctcagtggtggta

SEQ ID NO: 4370682 - DNA, 25 bp, Homo sapien
ttctgaatctgtcaccggaaggagc

SEQ ID NO: 4370683 - DNA, 25 bp, Homo sapien
gaatttggtcagacgccattgcaga

SEQ ID NO: 4370684 - DNA, 25 bp, Homo sapien
gaagagccgggtaagctgttttcca

SEQ ID NO: 4370685 - DNA, 25 bp, Homo sapien
gctttagaattctgagaggtctgga

SEQ ID NO: 4370686 - DNA, 25 bp, Homo sapien
tgtaggtttccatgctcagctttag

SEQ ID NO: 4370687 - DNA, 25 bp, Homo sapien
ctagatggtagaccaagaaggaaac

SEQ ID NO: 4370688 - DNA, 25 bp, Homo sapien
agatggtagaccaagaaggaaaccg

SEQ ID NO: 4370689 - DNA, 25 bp, Homo sapien
agaaggaaaccggacatagtccaag

SEQ ID NO: 4370690 - DNA, 25 bp, Homo sapien
tagaccaagaaggaaaccggacata

SEQ ID NO: 4370691 - DNA, 25 bp, Homo sapien
caggtcattacttgcaaattgccaa

SEQ ID NO: 4370692 - DNA, 25 bp, Homo sapien
gttgcaaagtatgcttgtccaagaa

SEQ ID NO: 4370693 - DNA, 25 bp, Homo sapien
caactgcagttattggcattccggc

SEQ ID NO: 4370694 - DNA, 25 bp, Homo sapien
gcattccggctactactgtggttga

SEQ ID NO: 4370695 - DNA, 25 bp, Homo sapien
aacctgtcggctgtgccaggtgcta

SEQ ID NO: 4370696 - DNA, 25 bp, Homo sapien
atgaagggctagtcagggtggaaag

SEQ ID NO: 4370697 - DNA, 25 bp, Homo sapien
caaacctgtcggctgtgccaggtgc

SEQ ID NO: 4370698 - DNA, 25 bp, Homo sapien
aatgaagggctagtcagggtggaaa

SEQ ID NO: 4370699 - DNA, 25 bp, Homo sapien
agaaccttcagaacttaaggtcagg

SEQ ID NO: 4370700 - DNA, 25 bp, Homo sapien
taagaaccttcagaacttaaggtca

SEQ ID NO: 4370701 - DNA, 25 bp, Homo sapien
gaaccttcagaacttaaggtcaggc

SEQ ID NO: 4370702 - DNA, 25 bp, Homo sapien
aagaaccttcagaacttaaggtcag

SEQ ID NO: 4370703 - DNA, 25 bp, Homo sapien
gcacaggtcccagaccttgatatca

SEQ ID NO: 4370704 - DNA, 25 bp, Homo sapien
tggcacaggtcccagaccttgatat

SEQ ID NO: 4370705 - DNA, 25 bp, Homo sapien
caggtcccagaccttgatatcattg

SEQ ID NO: 4370706 - DNA, 25 bp, Homo sapien
aggtcccagaccttgatatcattgt

SEQ ID NO: 4370707 - DNA, 25 bp, Homo sapien
aatctgatcacttgtgtcattgaag

SEQ ID NO: 4370708 - DNA, 25 bp, Homo sapien
gaaataatctgatcacttgtgtcat

SEQ ID NO: 4370709 - DNA, 25 bp, Homo sapien
atcacttgtgtcattgaaggtcaca

SEQ ID NO: 4370710 - DNA, 25 bp, Homo sapien
cagaaataatctgatcacttgtgtc

SEQ ID NO: 4370711 - DNA, 25 bp, Homo sapien
actgctagtgcaaacaaggtggcta

SEQ ID NO: 4370712 - DNA, 25 bp, Homo sapien
atcgtcactgctagtgcaaacaagg

SEQ ID NO: 4370713 - DNA, 25 bp, Homo sapien
tgcaaacaaggtggctagataacag

SEQ ID NO: 4370714 - DNA, 25 bp, Homo sapien
caaggtggctagataacaggaattc

SEQ ID NO: 4370715 - DNA, 25 bp, Homo sapien
cagttttatctgtggatgctgggaa

SEQ ID NO: 4370716 - DNA, 25 bp, Homo sapien
tatcccacacagccacagttttatc

SEQ ID NO: 4370717 - DNA, 25 bp, Homo sapien
agttttatctgtggatgctgggaag

SEQ ID NO: 4370718 - DNA, 25 bp, Homo sapien
cacacagccacagttttatctgtgg

SEQ ID NO: 4370719 - DNA, 25 bp, Homo sapien
tcagtatggcagaattatcacagtc

SEQ ID NO: 4370720 - DNA, 25 bp, Homo sapien
ccttcagtatggcagaattatcaca

SEQ ID NO: 4370721 - DNA, 25 bp, Homo sapien
gtgttccttcagtatggcagaatta

SEQ ID NO: 4370722 - DNA, 25 bp, Homo sapien
tatggcagaattatcacagtcacca

SEQ ID NO: 4370723 - DNA, 25 bp, Homo sapien
gaccagcggtaactctgggcctgta

SEQ ID NO: 4370724 - DNA, 25 bp, Homo sapien
gatcccgccactcccaacagcaact

SEQ ID NO: 4370725 - DNA, 25 bp, Homo sapien
tcggaggtcctgcttgcagcaaagc

SEQ ID NO: 4370726 - DNA, 25 bp, Homo sapien
acacctcggaggtcctgcttgcagc

SEQ ID NO: 4370727 - DNA, 25 bp, Homo sapien
ttgcagctactccacagctttttga

SEQ ID NO: 4370728 - DNA, 25 bp, Homo sapien
catagggtccctgtagtgcctctgt

SEQ ID NO: 4370729 - DNA, 25 bp, Homo sapien
catccctcagtgcatagggtccctg

SEQ ID NO: 4370730 - DNA, 25 bp, Homo sapien
tcagtgcatagggtccctgtagtgc

SEQ ID NO: 4370731 - DNA, 25 bp, Homo sapien
tccacaaagttgagaagacactcct

SEQ ID NO: 4370732 - DNA, 25 bp, Homo sapien
agacactccttctacccctagtggg

SEQ ID NO: 4370733 - DNA, 25 bp, Homo sapien
tggctccagcattctttgattctga

SEQ ID NO: 4370734 - DNA, 25 bp, Homo sapien
tagcacgacagagatgcccagaagc

SEQ ID NO: 4370735 - DNA, 25 bp, Homo sapien
ggtaactcctctttgccttcctcca

SEQ ID NO: 4370736 - DNA, 25 bp, Homo sapien
cagggtaactcctctttgccttcct

SEQ ID NO: 4370737 - DNA, 25 bp, Homo sapien
tcagggtaactcctctttgccttcc

SEQ ID NO: 4370738 - DNA, 25 bp, Homo sapien
gtaactcctctttgccttcctccac

SEQ ID NO: 4370739 - DNA, 25 bp, Homo sapien
aggtaagtaaggtcagttctaagca

SEQ ID NO: 4370740 - DNA, 25 bp, Homo sapien
ggtaagtaaggtcagttctaagcaa

SEQ ID NO: 4370741 - DNA, 25 bp, Homo sapien
gtctgccaaagtgtatcccctcctt

SEQ ID NO: 4370742 - DNA, 25 bp, Homo sapien
agtctgccaaagtgtatcccctcct

SEQ ID NO: 4370743 - DNA, 25 bp, Homo sapien
gctccacaggctcatgtctaacatg

SEQ ID NO: 4370744 - DNA, 25 bp, Homo sapien
caggctccagatccagtcaatactg

SEQ ID NO: 4370745 - DNA, 25 bp, Homo sapien
cctgtctcttgtcccatactggttg

SEQ ID NO: 4370746 - DNA, 25 bp, Homo sapien
tcccatactggttgggccattttcc

SEQ ID NO: 4370747 - DNA, 25 bp, Homo sapien
aaagtgctggtgacactttgtccat

SEQ ID NO: 4370748 - DNA, 25 bp, Homo sapien
tgggaaagggtggatcatcatgatt

SEQ ID NO: 4370749 - DNA, 25 bp, Homo sapien
ttcccattcctgaaggttgccgctg

SEQ ID NO: 4370750 - DNA, 25 bp, Homo sapien
ttcctgaaggttgccgctgctccta

SEQ ID NO: 4370751 - DNA, 25 bp, Homo sapien
ccattcctgaaggttgccgctgctc

SEQ ID NO: 4370752 - DNA, 25 bp, Homo sapien
ttgcaacagttgtgttctctgagaa

SEQ ID NO: 4370753 - DNA, 25 bp, Homo sapien
cagctgtagcagtgtggagttaaaa

SEQ ID NO: 4370754 - DNA, 25 bp, Homo sapien
tcccatcttgcgaacagggctgtgc

SEQ ID NO: 4370755 - DNA, 25 bp, Homo sapien
tttcacggccatgcttcccatcttg

SEQ ID NO: 4370756 - DNA, 25 bp, Homo sapien
cactaacagacttggctaagaacat

SEQ ID NO: 4370757 - DNA, 25 bp, Homo sapien
atgacccctctgagtcactaacaga

SEQ ID NO: 4370758 - DNA, 25 bp, Homo sapien
ccctctgagtcactaacagacttgg

SEQ ID NO: 4370759 - DNA, 25 bp, Homo sapien
gagcaggaagcatgttcattaatgg

SEQ ID NO: 4370760 - DNA, 25 bp, Homo sapien
ggcaggcacctgcatctggaagcca

SEQ ID NO: 4370761 - DNA, 25 bp, Homo sapien
gcaggcacctgcatctggaagccat

SEQ ID NO: 4370762 - DNA, 25 bp, Homo sapien
tggcaggcacctgcatctggaagcc

SEQ ID NO: 4370763 - DNA, 25 bp, Homo sapien
ctggcaggcacctgcatctggaagc

SEQ ID NO: 4370764 - DNA, 25 bp, Homo sapien
tttcgtcctaaagtagaggtcaggc

SEQ ID NO: 4370765 - DNA, 25 bp, Homo sapien
ggaattccacatagatgcagcagct

SEQ ID NO: 4370766 - DNA, 25 bp, Homo sapien
tcagggaacatccaccactgcagtg

SEQ ID NO: 4370767 - DNA, 25 bp, Homo sapien
caagcatttggcagttggtggagac

SEQ ID NO: 4370768 - DNA, 25 bp, Homo sapien
gttgaaccgtacaagtgtaatcagg

SEQ ID NO: 4370769 - DNA, 25 bp, Homo sapien
tcaactagagttgaaccgtacaagt

SEQ ID NO: 4370770 - DNA, 25 bp, Homo sapien
actagagttgaaccgtacaagtgta

SEQ ID NO: 4370771 - DNA, 25 bp, Homo sapien
gtacaagtgtaatcaggtccatttg

SEQ ID NO: 4370772 - DNA, 25 bp, Homo sapien
gggaatccacagacgctctgaaaga

SEQ ID NO: 4370773 - DNA, 25 bp, Homo sapien
atccacagacgctctgaaagaacag

SEQ ID NO: 4370774 - DNA, 25 bp, Homo sapien
aaagcagagggaatccacagacgct

SEQ ID NO: 4370775 - DNA, 25 bp, Homo sapien
gagggaatccacagacgctctgaaa

SEQ ID NO: 4370776 - DNA, 25 bp, Homo sapien
tcttcatgtaacaggctcaaggccc

SEQ ID NO: 4370777 - DNA, 25 bp, Homo sapien
catcccggttcagagctgtttaggc

SEQ ID NO: 4370778 - DNA, 25 bp, Homo sapien
gacctcctcgtacacagctgttctg

SEQ ID NO: 4370779 - DNA, 25 bp, Homo sapien
caaactgtgcttaaggagggacctc

SEQ ID NO: 4370780 - DNA, 25 bp, Homo sapien
caagccttgaggttggtggcccacg

SEQ ID NO: 4370781 - DNA, 25 bp, Homo sapien
tcatgttgctcgactaagcagcacc

SEQ ID NO: 4370782 - DNA, 25 bp, Homo sapien
gacagtgttacccagtgcagttcaa

SEQ ID NO: 4370783 - DNA, 25 bp, Homo sapien
caaggtgccataaacttgactttcc

SEQ ID NO: 4370784 - DNA, 25 bp, Homo sapien
tggatgctgactgccgttcagctcc

SEQ ID NO: 4370785 - DNA, 25 bp, Homo sapien
tgccgttcagctcctgcaaagttgc

SEQ ID NO: 4370786 - DNA, 25 bp, Homo sapien
gcaaagttgcacctctgggatacat

SEQ ID NO: 4370787 - DNA, 25 bp, Homo sapien
tcagctcctgcaaagttgcacctct

SEQ ID NO: 4370788 - DNA, 25 bp, Homo sapien
catttattccattcgacgtatttat

SEQ ID NO: 4370789 - DNA, 25 bp, Homo sapien
tttgttcatgtaatatcagtccttg

SEQ ID NO: 4370790 - DNA, 25 bp, Homo sapien
ttcatgtaatatcagtccttgggaa

SEQ ID NO: 4370791 - DNA, 25 bp, Homo sapien
tccattcgacgtatttatcataatt

SEQ ID NO: 4370792 - DNA, 25 bp, Homo sapien
aagaagggaccaagtagctgaatca

SEQ ID NO: 4370793 - DNA, 25 bp, Homo sapien
ttattaagcctgtagacctgggagc

SEQ ID NO: 4370794 - DNA, 25 bp, Homo sapien
tcagaaaggacctgtcaatcctttc

SEQ ID NO: 4370795 - DNA, 25 bp, Homo sapien
ataggagttgtacagttattaagcc

SEQ ID NO: 4370796 - DNA, 25 bp, Homo sapien
tatattcagaattgaatctgagatc

SEQ ID NO: 4370797 - DNA, 25 bp, Homo sapien
gatggtattcagaaatattgttgcg

SEQ ID NO: 4370798 - DNA, 25 bp, Homo sapien
tctccatattgatcttcattgacta

SEQ ID NO: 4370799 - DNA, 25 bp, Homo sapien
tagtcagaccctttaaggctgaata

SEQ ID NO: 4370800 - DNA, 25 bp, Homo sapien
tattgttgcgttaaatactggttct

SEQ ID NO: 4370801 - DNA, 25 bp, Homo sapien
tagtgcttgtcctcacaggtggcca

SEQ ID NO: 4370802 - DNA, 25 bp, Homo sapien
taattcactggcgtgttccgcggca

SEQ ID NO: 4370803 - DNA, 25 bp, Homo sapien
cctgagtggtgctggattgctgccc

SEQ ID NO: 4370804 - DNA, 25 bp, Homo sapien
tatggacctgctgcacacctagtgc

SEQ ID NO: 4370805 - DNA, 25 bp, Homo sapien
tcccccactgcatggatttggctgt

SEQ ID NO: 4370806 - DNA, 25 bp, Homo sapien
ggatttggctgtttaatcagccgag

SEQ ID NO: 4370807 - DNA, 25 bp, Homo sapien
gctgcgtgcagtcaccatgaatgct

SEQ ID NO: 4370808 - DNA, 25 bp, Homo sapien
gccgagattacagcccgggaagatt

SEQ ID NO: 4370809 - DNA, 25 bp, Homo sapien
tcaaagagtccaccgcaaagcagac

SEQ ID NO: 4370810 - DNA, 25 bp, Homo sapien
gctcaacctctcgtgactgcctgtg

SEQ ID NO: 4370811 - DNA, 25 bp, Homo sapien
tgaggaccgacttctgagcaagcag

SEQ ID NO: 4370812 - DNA, 25 bp, Homo sapien
tgtgggcttggctcgaaagtcagcc

SEQ ID NO: 4370813 - DNA, 25 bp, Homo sapien
tggagagactggatccccagctagg

SEQ ID NO: 4370814 - DNA, 25 bp, Homo sapien
tcaccaggacctgcaaagagctaca

SEQ ID NO: 4370815 - DNA, 25 bp, Homo sapien
tctaagtccattacagagagtcagg

SEQ ID NO: 4370816 - DNA, 25 bp, Homo sapien
ttcggtgtccagatgtctaagtcca

SEQ ID NO: 4370817 - DNA, 25 bp, Homo sapien
gccatagacagatgaccaatgatgg

SEQ ID NO: 4370818 - DNA, 25 bp, Homo sapien
gtggtctgggacagccatagacaga

SEQ ID NO: 4370819 - DNA, 25 bp, Homo sapien
tggtctgggacagccatagacagat

SEQ ID NO: 4370820 - DNA, 25 bp, Homo sapien
gatgaccaatgatgggcagaatcat

SEQ ID NO: 4370821 - DNA, 25 bp, Homo sapien
atcagctttggagcaccccactcat

SEQ ID NO: 4370822 - DNA, 25 bp, Homo sapien
aatcagctttggagcaccccactca

SEQ ID NO: 4370823 - DNA, 25 bp, Homo sapien
ctgggcagcaatcagctttggagca

SEQ ID NO: 4370824 - DNA, 25 bp, Homo sapien
ggcagcaatcagctttggagcaccc

SEQ ID NO: 4370825 - DNA, 25 bp, Homo sapien
aagctgatgtaaaggagtggaatcc

SEQ ID NO: 4370826 - DNA, 25 bp, Homo sapien
ccaagctgatgtaaaggagtggaat

SEQ ID NO: 4370827 - DNA, 25 bp, Homo sapien
caagctgatgtaaaggagtggaatc

SEQ ID NO: 4370828 - DNA, 25 bp, Homo sapien
aaagatgactcatccacaattccac

SEQ ID NO: 4370829 - DNA, 25 bp, Homo sapien
aaaaagatgactcatccacaattcc

SEQ ID NO: 4370830 - DNA, 25 bp, Homo sapien
aaaagatgactcatccacaattcca

SEQ ID NO: 4370831 - DNA, 25 bp, Homo sapien
tccaaagtaaatgtgattcgtagac

SEQ ID NO: 4370832 - DNA, 25 bp, Homo sapien
tgtttccccagttctgcatagctct

SEQ ID NO: 4370833 - DNA, 25 bp, Homo sapien
agttctgcatagctcttaactttgc

SEQ ID NO: 4370834 - DNA, 25 bp, Homo sapien
tccccagttctgcatagctcttaac

SEQ ID NO: 4370835 - DNA, 25 bp, Homo sapien
catagctcttaactttgcctgtgac

SEQ ID NO: 4370836 - DNA, 25 bp, Homo sapien
ttccaaacagtcttgtgttctgaaa

SEQ ID NO: 4370837 - DNA, 25 bp, Homo sapien
tagcggcagggggtcaaattttcca

SEQ ID NO: 4370838 - DNA, 25 bp, Homo sapien
tgtccttgaaatccagacacctgga

SEQ ID NO: 4370839 - DNA, 25 bp, Homo sapien
aagcccctggtgttgatgaattccc

SEQ ID NO: 4370840 - DNA, 25 bp, Homo sapien
ggttccatgaagtatactcagagac

SEQ ID NO: 4370841 - DNA, 25 bp, Homo sapien
atggttccatgaagtatactcagag

SEQ ID NO: 4370842 - DNA, 25 bp, Homo sapien
taaaaagctatgtgggagtttgtga

SEQ ID NO: 4370843 - DNA, 25 bp, Homo sapien
ataagcaggtaaaaagctatgtggg

SEQ ID NO: 4370844 - DNA, 25 bp, Homo sapien
tccaaagctatcaggtatgcccaga

SEQ ID NO: 4370845 - DNA, 25 bp, Homo sapien
tcagattcctccaaagctatcaggt

SEQ ID NO: 4370846 - DNA, 25 bp, Homo sapien
cctccaaagctatcaggtatgccca

SEQ ID NO: 4370847 - DNA, 25 bp, Homo sapien
gattcctccaaagctatcaggtatg

SEQ ID NO: 4370848 - DNA, 25 bp, Homo sapien
cagttgctgaacagtgccatcttta

SEQ ID NO: 4370849 - DNA, 25 bp, Homo sapien
ctgtccttggcgtcacactcgatgg

SEQ ID NO: 4370850 - DNA, 25 bp, Homo sapien
tggacagccccttcagttgctgaac

SEQ ID NO: 4370851 - DNA, 25 bp, Homo sapien
actcgatgggtcttctccatgttcc

SEQ ID NO: 4370852 - DNA, 25 bp, Homo sapien
ttagtgccgctaacaattcacctcc

SEQ ID NO: 4370853 - DNA, 25 bp, Homo sapien
ctgggcaggttgattagatccttga

SEQ ID NO: 4370854 - DNA, 25 bp, Homo sapien
ggcaggttgattagatccttgaatt

SEQ ID NO: 4370855 - DNA, 25 bp, Homo sapien
ttgcatgaataattagtgccgctaa

SEQ ID NO: 4370856 - DNA, 25 bp, Homo sapien
agaccagggtgctgctcgtggaaaa

SEQ ID NO: 4370857 - DNA, 25 bp, Homo sapien
cgagccatgcgaaccaagagccagg

SEQ ID NO: 4370858 - DNA, 25 bp, Homo sapien
cctcccgagccatgcgaaccaagag

SEQ ID NO: 4370859 - DNA, 25 bp, Homo sapien
ccagggagctctcagggaagaccag

SEQ ID NO: 4370860 - DNA, 25 bp, Homo sapien
ctccaagcccaggaacgaggagggt

SEQ ID NO: 4370861 - DNA, 25 bp, Homo sapien
gagccaagctggactcaacagaagc

SEQ ID NO: 4370862 - DNA, 25 bp, Homo sapien
ccaagctggactcaacagaagccag

SEQ ID NO: 4370863 - DNA, 25 bp, Homo sapien
aacgaggagggtcaagagccaagct

SEQ ID NO: 4370864 - DNA, 25 bp, Homo sapien
tcccctctatcttccattgccagga

SEQ ID NO: 4370865 - DNA, 25 bp, Homo sapien
ctctatcttccattgccaggaagag

SEQ ID NO: 4370866 - DNA, 25 bp, Homo sapien
ccctctatcttccattgccaggaag

SEQ ID NO: 4370867 - DNA, 25 bp, Homo sapien
cctctatcttccattgccaggaaga

SEQ ID NO: 4370868 - DNA, 25 bp, Homo sapien
gatgtgctgggataggcttcttgtt

SEQ ID NO: 4370869 - DNA, 25 bp, Homo sapien
gcacaggaaccgcatcagaacttgt

SEQ ID NO: 4370870 - DNA, 25 bp, Homo sapien
tgaaaactcccttggaatggattcc

SEQ ID NO: 4370871 - DNA, 25 bp, Homo sapien
agatgaagttgggtcctcctcagaa

SEQ ID NO: 4370872 - DNA, 25 bp, Homo sapien
aatctttgagaaccaaagccagggc

SEQ ID NO: 4370873 - DNA, 25 bp, Homo sapien
tgaggtcataccacaccctcacacg

SEQ ID NO: 4370874 - DNA, 25 bp, Homo sapien
ttatggtggccacggttctaaacac

SEQ ID NO: 4370875 - DNA, 25 bp, Homo sapien
cacgccttccatataagggggtcct

SEQ ID NO: 4370876 - DNA, 25 bp, Homo sapien
ttcttggttattctgcacaccccac

SEQ ID NO: 4370877 - DNA, 25 bp, Homo sapien
ggtttcaccagcaattctgcatctg

SEQ ID NO: 4370878 - DNA, 25 bp, Homo sapien
tcctctatgattgaaccagtccttg

SEQ ID NO: 4370879 - DNA, 25 bp, Homo sapien
tgtatgtgcaaacttgcaagtcccg

SEQ ID NO: 4370880 - DNA, 25 bp, Homo sapien
tcccggatgaaccagctgcaagctg

SEQ ID NO: 4370881 - DNA, 25 bp, Homo sapien
ttgatgcatcttagtagctactgag

SEQ ID NO: 4370882 - DNA, 25 bp, Homo sapien
ctagctcttgatgcatcttagtagc

SEQ ID NO: 4370883 - DNA, 25 bp, Homo sapien
taacagggctcaaagtagtcatggg

SEQ ID NO: 4370884 - DNA, 25 bp, Homo sapien
tagtcatttataacagggctcaaag

SEQ ID NO: 4370885 - DNA, 25 bp, Homo sapien
tgctggctcttcaggatttgctgac

SEQ ID NO: 4370886 - DNA, 25 bp, Homo sapien
tgaaggaagctggctcttctggatt

SEQ ID NO: 4370887 - DNA, 25 bp, Homo sapien
tggtgctgaaggaagctggctcttc

SEQ ID NO: 4370888 - DNA, 25 bp, Homo sapien
aagctggctcttctggatttgctgg

SEQ ID NO: 4370889 - DNA, 25 bp, Homo sapien
ctgtagagaccaagggagaggaaga

SEQ ID NO: 4370890 - DNA, 25 bp, Homo sapien
aggaagaagacaaaatatccaggtt

SEQ ID NO: 4370891 - DNA, 25 bp, Homo sapien
gaagacaaaatatccaggtttgagc

SEQ ID NO: 4370892 - DNA, 25 bp, Homo sapien
gacaaaatatccaggtttgagcttc

SEQ ID NO: 4370893 - DNA, 25 bp, Homo sapien
taagtggtacacgtctcacaaagag

SEQ ID NO: 4370894 - DNA, 25 bp, Homo sapien
cttctccagctgcaaagtgagtggc

SEQ ID NO: 4370895 - DNA, 25 bp, Homo sapien
agctgcaaagtgagtggcaccatcc

SEQ ID NO: 4370896 - DNA, 25 bp, Homo sapien
tcctgtgttgggagtgccttaagtg

SEQ ID NO: 4370897 - DNA, 25 bp, Homo sapien
ctaacaattctgactttcttctcta

SEQ ID NO: 4370898 - DNA, 25 bp, Homo sapien
taacaattctgactttcttctctac

SEQ ID NO: 4370899 - DNA, 25 bp, Homo sapien
gccggaaattccttgccctgacaat

SEQ ID NO: 4370900 - DNA, 25 bp, Homo sapien
gatggtacatccgaaagaacacagc

SEQ ID NO: 4370901 - DNA, 25 bp, Homo sapien
taacttgagagtgaactgatggtac

SEQ ID NO: 4370902 - DNA, 25 bp, Homo sapien
ggcagccggaaattccttgccctga

SEQ ID NO: 4370903 - DNA, 25 bp, Homo sapien
tcactctggaatgggcatgcttccc

SEQ ID NO: 4370904 - DNA, 25 bp, Homo sapien
attcactctggaatgggcatgcttc

SEQ ID NO: 4370905 - DNA, 25 bp, Homo sapien
actctggaatgggcatgcttcccag

SEQ ID NO: 4370906 - DNA, 25 bp, Homo sapien
tctggaatgggcatgcttcccagca

SEQ ID NO: 4370907 - DNA, 25 bp, Homo sapien
tttgcctcccttcccatatctccac

SEQ ID NO: 4370908 - DNA, 25 bp, Homo sapien
cttatgcttgacaatagcctttcct

SEQ ID NO: 4370909 - DNA, 25 bp, Homo sapien
tgcttgacaatagcctttcctttgg

SEQ ID NO: 4370910 - DNA, 25 bp, Homo sapien
tttcctttggcccttgctgagctgt

SEQ ID NO: 4370911 - DNA, 25 bp, Homo sapien
tgtttcttttggcagcaatgtctgt

SEQ ID NO: 4370912 - DNA, 25 bp, Homo sapien
gtttgtgaactcttagacactgcga

SEQ ID NO: 4370913 - DNA, 25 bp, Homo sapien
tagacactgcgactgactcggtcat

SEQ ID NO: 4370914 - DNA, 25 bp, Homo sapien
gctgatggatttgctgcctcggatg

SEQ ID NO: 4370915 - DNA, 25 bp, Homo sapien
tcggatgttgcctgcgtctcagttt

SEQ ID NO: 4370916 - DNA, 25 bp, Homo sapien
tttatttcctcgcagattctgacag

SEQ ID NO: 4370917 - DNA, 25 bp, Homo sapien
cttcttgacggtagcatttttccag

SEQ ID NO: 4370918 - DNA, 25 bp, Homo sapien
taaaagaggacacattgactttcaa

SEQ ID NO: 4370919 - DNA, 25 bp, Homo sapien
ctgacagctctataagcacacactg

SEQ ID NO: 4370920 - DNA, 25 bp, Homo sapien
gaaactatggcttagcagcactgga

SEQ ID NO: 4370921 - DNA, 25 bp, Homo sapien
aactatggcttagcagcactggact

SEQ ID NO: 4370922 - DNA, 25 bp, Homo sapien
ggaagtgctaagaaactatggctta

SEQ ID NO: 4370923 - DNA, 25 bp, Homo sapien
ctatggcttagcagcactggactct

SEQ ID NO: 4370924 - DNA, 25 bp, Homo sapien
gattatgggaacagcctcctaactg

SEQ ID NO: 4370925 - DNA, 25 bp, Homo sapien
gcagtctatccttagcacaatagca

SEQ ID NO: 4370926 - DNA, 25 bp, Homo sapien
gaaagtcagattgtgtcacttctgt

SEQ ID NO: 4370927 - DNA, 25 bp, Homo sapien
catgtttcagcctcgcctctgcagt

SEQ ID NO: 4370928 - DNA, 25 bp, Homo sapien
gaggaccctgcagggacattccaca

SEQ ID NO: 4370929 - DNA, 25 bp, Homo sapien
tctggaaacacatctatacatatag

SEQ ID NO: 4370930 - DNA, 25 bp, Homo sapien
gcaggacttgttccagattgaaata

SEQ ID NO: 4370931 - DNA, 25 bp, Homo sapien
ggtgggcccactggaacaaccagag

SEQ ID NO: 4370932 - DNA, 25 bp, Homo sapien
tggctattttaggttcacttgcatc

SEQ ID NO: 4370933 - DNA, 25 bp, Homo sapien
gttggctattttaggttcacttgca

SEQ ID NO: 4370934 - DNA, 25 bp, Homo sapien
gctattttaggttcacttgcatcca

SEQ ID NO: 4370935 - DNA, 25 bp, Homo sapien
ctattttaggttcacttgcatccat

SEQ ID NO: 4370936 - DNA, 25 bp, Homo sapien
catgtgcacttccttctgtgagttg

SEQ ID NO: 4370937 - DNA, 25 bp, Homo sapien
tctgagagatatttggagttgtgac

SEQ ID NO: 4370938 - DNA, 25 bp, Homo sapien
tgtgggtttatgactcatgtgcact

SEQ ID NO: 4370939 - DNA, 25 bp, Homo sapien
gagttgtgacaaaatttaactccat

SEQ ID NO: 4370940 - DNA, 25 bp, Homo sapien
tgtcagggtaatcgaaaattctcag

SEQ ID NO: 4370941 - DNA, 25 bp, Homo sapien
ctgtgtcagggtaatcgaaaattct

SEQ ID NO: 4370942 - DNA, 25 bp, Homo sapien
taaacaaataccctcgagtctctct

SEQ ID NO: 4370943 - DNA, 25 bp, Homo sapien
taatcgaaaattctcagacagccgg

SEQ ID NO: 4370944 - DNA, 25 bp, Homo sapien
ggtttctcccctgtgacagtacctc

SEQ ID NO: 4370945 - DNA, 25 bp, Homo sapien
ctaataaataacctagaatgtgatt

SEQ ID NO: 4370946 - DNA, 25 bp, Homo sapien
actcgattcaagtgatgtctgccag

SEQ ID NO: 4370947 - DNA, 25 bp, Homo sapien
ccacactgttttccgagggcccagg

SEQ ID NO: 4370948 - DNA, 25 bp, Homo sapien
aaatatgcccacaccagagccccac

SEQ ID NO: 4370949 - DNA, 25 bp, Homo sapien
gaaatatgcccacaccagagcccca

SEQ ID NO: 4370950 - DNA, 25 bp, Homo sapien
aatatgcccacaccagagccccacc

SEQ ID NO: 4370951 - DNA, 25 bp, Homo sapien
agaaatatgcccacaccagagcccc

SEQ ID NO: 4370952 - DNA, 25 bp, Homo sapien
ctcttcctaaacaagctgtagggag

SEQ ID NO: 4370953 - DNA, 25 bp, Homo sapien
ctgtagggagcctgacttcttcctc

SEQ ID NO: 4370954 - DNA, 25 bp, Homo sapien
taaacaagctgtagggagcctgact

SEQ ID NO: 4370955 - DNA, 25 bp, Homo sapien
cttcctcagtaaccaccaaagtggg

SEQ ID NO: 4370956 - DNA, 25 bp, Homo sapien
tgttaactatagtctccctacaaag

SEQ ID NO: 4370957 - DNA, 25 bp, Homo sapien
tgtgttgtgatcaaatcaaagtcat

SEQ ID NO: 4370958 - DNA, 25 bp, Homo sapien
tattcctcctatctggcagtaatat

SEQ ID NO: 4370959 - DNA, 25 bp, Homo sapien
gctacctgtatacaatgtgttgtga

SEQ ID NO: 4370960 - DNA, 25 bp, Homo sapien
caaactgtctagagtcagggaaaac

SEQ ID NO: 4370961 - DNA, 25 bp, Homo sapien
tataaactgccctgtgaagaccact

SEQ ID NO: 4370962 - DNA, 25 bp, Homo sapien
tctctcagggtagctacagggtgga

SEQ ID NO: 4370963 - DNA, 25 bp, Homo sapien
ggatggatataaccacacaaggcat

SEQ ID NO: 4370964 - DNA, 25 bp, Homo sapien
ctttggctagaggagtaaaaatcgc

SEQ ID NO: 4370965 - DNA, 25 bp, Homo sapien
cagtttgcccaaaggtaccatcagc

SEQ ID NO: 4370966 - DNA, 25 bp, Homo sapien
gaaattgtccgagccatgacacatg

SEQ ID NO: 4370967 - DNA, 25 bp, Homo sapien
tgtgataaaccaaggcatggcgatg

SEQ ID NO: 4370968 - DNA, 25 bp, Homo sapien
gctcttagtgaaatcggtggtgaca

SEQ ID NO: 4370969 - DNA, 25 bp, Homo sapien
tctgtgaacaagctgagtaccatct

SEQ ID NO: 4370970 - DNA, 25 bp, Homo sapien
agttcaatatgatcccaccggtctg

SEQ ID NO: 4370971 - DNA, 25 bp, Homo sapien
taggaagcctattctgtagcaagac

SEQ ID NO: 4370972 - DNA, 25 bp, Homo sapien
caattgcggagcgtctgggatgcac

SEQ ID NO: 4370973 - DNA, 25 bp, Homo sapien
tgggatgcacactacctcagctagc

SEQ ID NO: 4370974 - DNA, 25 bp, Homo sapien
caattgaaaaccacacgcggctggg

SEQ ID NO: 4370975 - DNA, 25 bp, Homo sapien
agtgagttatttgaggttccccaga

SEQ ID NO: 4370976 - DNA, 25 bp, Homo sapien
cagaaacactaacccaatgagataa

SEQ ID NO: 4370977 - DNA, 25 bp, Homo sapien
tatttgttggtagcttgactcttca

SEQ ID NO: 4370978 - DNA, 25 bp, Homo sapien
ggaattgggacatatcagaaacact

SEQ ID NO: 4370979 - DNA, 25 bp, Homo sapien
aaaagctcaagataaggtctatgca

SEQ ID NO: 4370980 - DNA, 25 bp, Homo sapien
tgtgtattcaatccagcgaactgct

SEQ ID NO: 4370981 - DNA, 25 bp, Homo sapien
gaacactccgcactaaggttaaggc

SEQ ID NO: 4370982 - DNA, 25 bp, Homo sapien
tagaaaccctgtgtctggcttccca

SEQ ID NO: 4370983 - DNA, 25 bp, Homo sapien
ttgacaaacgagcaaagcaggcctg

SEQ ID NO: 4370984 - DNA, 25 bp, Homo sapien
cctttactgtaactgctcaatgcct

SEQ ID NO: 4370985 - DNA, 25 bp, Homo sapien
agcaggtacatactggcagaggcct

SEQ ID NO: 4370986 - DNA, 25 bp, Homo sapien
gaagttagcctctatcgccctgaaa

SEQ ID NO: 4370987 - DNA, 25 bp, Homo sapien
gagaatcccttagagctctgataca

SEQ ID NO: 4370988 - DNA, 25 bp, Homo sapien
tggcaaataggacaaccagtaaact

SEQ ID NO: 4370989 - DNA, 25 bp, Homo sapien
agaatatcaatctaggccgggcgcg

SEQ ID NO: 4370990 - DNA, 25 bp, Homo sapien
acttttcacaagaattgagtataaa

SEQ ID NO: 4370991 - DNA, 25 bp, Homo sapien
aacactttagtgctatttatgagta

SEQ ID NO: 4370992 - DNA, 25 bp, Homo sapien
tattaggaatattcggctgataccc

SEQ ID NO: 4370993 - DNA, 25 bp, Homo sapien
gatagtggcccaactctggtaacaa

SEQ ID NO: 4370994 - DNA, 25 bp, Homo sapien
gagtaggtcgcatctctgtgtgcca

SEQ ID NO: 4370995 - DNA, 25 bp, Homo sapien
catctagtggcaagttttcaccagc

SEQ ID NO: 4370996 - DNA, 25 bp, Homo sapien
tgagaccctggtcaaggaaaacagt

SEQ ID NO: 4370997 - DNA, 25 bp, Homo sapien
caacatggcagggtcaagttgacct

SEQ ID NO: 4370998 - DNA, 25 bp, Homo sapien
gcatggagcccaacacatccgatag

SEQ ID NO: 4370999 - DNA, 25 bp, Homo sapien
tccccaagggctaaagagataaata

SEQ ID NO: 4371000 - DNA, 25 bp, Homo sapien
ggaacacagagaaccagttattaac

SEQ ID NO: 4371001 - DNA, 25 bp, Homo sapien
cattctgatatttacggttcaaaag

SEQ ID NO: 4371002 - DNA, 25 bp, Homo sapien
cttctgttcaatcccctgggaagag

SEQ ID NO: 4371003 - DNA, 25 bp, Homo sapien
aataaataataacagctcggcccag

SEQ ID NO: 4371004 - DNA, 25 bp, Homo sapien
tttaataaacgtcctagtactctga

SEQ ID NO: 4371005 - DNA, 25 bp, Homo sapien
aaggctctagactataaaaacatct

SEQ ID NO: 4371006 - DNA, 25 bp, Homo sapien
gctctagactataaaaacatcttgt

SEQ ID NO: 4371007 - DNA, 25 bp, Homo sapien
ggctctagactataaaaacatcttg

SEQ ID NO: 4371008 - DNA, 25 bp, Homo sapien
taaaggctctagactataaaaacat

SEQ ID NO: 4371009 - DNA, 25 bp, Homo sapien
agggcgatgagtcctgatgaagcac

SEQ ID NO: 4371010 - DNA, 25 bp, Homo sapien
gtcctgatgaagcacttatggacaa

SEQ ID NO: 4371011 - DNA, 25 bp, Homo sapien
tggagccagtagacaggagggcgat

SEQ ID NO: 4371012 - DNA, 25 bp, Homo sapien
cagtagacaggagggcgatgagtcc

SEQ ID NO: 4371013 - DNA, 25 bp, Homo sapien
tttagacagaaacctagaacacatg

SEQ ID NO: 4371014 - DNA, 25 bp, Homo sapien
gaattccatttaaccttcacgaaga

SEQ ID NO: 4371015 - DNA, 25 bp, Homo sapien
taatcataatgatgtgcagccccat

SEQ ID NO: 4371016 - DNA, 25 bp, Homo sapien
cacgaagagctgatcaaagaacatg

SEQ ID NO: 4371017 - DNA, 25 bp, Homo sapien
gcctcagaactctacaattttcagc

SEQ ID NO: 4371018 - DNA, 25 bp, Homo sapien
agttcgaagctactcctagcctcag

SEQ ID NO: 4371019 - DNA, 25 bp, Homo sapien
tgcaacagcaaggaggttctaaaag

SEQ ID NO: 4371020 - DNA, 25 bp, Homo sapien
aagtcttccctgcaaatcagtgttt

SEQ ID NO: 4371021 - DNA, 25 bp, Homo sapien
tggctgcacattcctggataacatc

SEQ ID NO: 4371022 - DNA, 25 bp, Homo sapien
gaacctatttaactgcattggccat

SEQ ID NO: 4371023 - DNA, 25 bp, Homo sapien
cactatttaatggactgactcccag

SEQ ID NO: 4371024 - DNA, 25 bp, Homo sapien
gagaagactgattcttgcccaaaag

SEQ ID NO: 4371025 - DNA, 25 bp, Homo sapien
gagtgttgttatagaagatggaaaa

SEQ ID NO: 4371026 - DNA, 25 bp, Homo sapien
agtgttgttatagaagatggaaaat

SEQ ID NO: 4371027 - DNA, 25 bp, Homo sapien
gtgttgttatagaagatggaaaatg

SEQ ID NO: 4371028 - DNA, 25 bp, Homo sapien
actgtatcccgtatggcttttatgg

SEQ ID NO: 4371029 - DNA, 25 bp, Homo sapien
ggtcccagttatcaaggtcaatcaa

SEQ ID NO: 4371030 - DNA, 25 bp, Homo sapien
ggtcaatcaatacagtacaaactgt

SEQ ID NO: 4371031 - DNA, 25 bp, Homo sapien
tagatcttaatgagaggctctggtc

SEQ ID NO: 4371032 - DNA, 25 bp, Homo sapien
ttccaaaatccaaattctttaagca

SEQ ID NO: 4371033 - DNA, 25 bp, Homo sapien
ctcagacaattccaaaatccaaatt

SEQ ID NO: 4371034 - DNA, 25 bp, Homo sapien
gcaaaaatcaaaaaattctcttcaa

SEQ ID NO: 4371035 - DNA, 25 bp, Homo sapien
atccaaattctttaagcaaaaatca

SEQ ID NO: 4371036 - DNA, 25 bp, Homo sapien
cacttctttggaaacagcatcctcc

SEQ ID NO: 4371037 - DNA, 25 bp, Homo sapien
ccttccgagacatctttctattatc

SEQ ID NO: 4371038 - DNA, 25 bp, Homo sapien
gcttcagaaagttttcgagtcactt

SEQ ID NO: 4371039 - DNA, 25 bp, Homo sapien
catctttctccttccgagacatctt

SEQ ID NO: 4371040 - DNA, 25 bp, Homo sapien
tgctacagaggtgaacatcacactc

SEQ ID NO: 4371041 - DNA, 25 bp, Homo sapien
tatgctacagaggtgaacatcacac

SEQ ID NO: 4371042 - DNA, 25 bp, Homo sapien
tttccatatgctacagaggtgaaca

SEQ ID NO: 4371043 - DNA, 25 bp, Homo sapien
tccatatgctacagaggtgaacatc

SEQ ID NO: 4371044 - DNA, 25 bp, Homo sapien
gtggaggcccacatgagctgaatcc

SEQ ID NO: 4371045 - DNA, 25 bp, Homo sapien
ggaaacagtcccatacagtggaggc

SEQ ID NO: 4371046 - DNA, 25 bp, Homo sapien
tggccatgcctcacaggaaacagtc

SEQ ID NO: 4371047 - DNA, 25 bp, Homo sapien
ttcccgatacacagatggccatgcc

SEQ ID NO: 4371048 - DNA, 25 bp, Homo sapien
cagactgaataagatccatatgcca

SEQ ID NO: 4371049 - DNA, 25 bp, Homo sapien
tgcaaaggctaccaaatatgtgctt

SEQ ID NO: 4371050 - DNA, 25 bp, Homo sapien
tgtatgcaaaggctaccaaatatgt

SEQ ID NO: 4371051 - DNA, 25 bp, Homo sapien
gactgaataagatccatatgccata

SEQ ID NO: 4371052 - DNA, 25 bp, Homo sapien
cacgatgaacgcgtttccgaagaag

SEQ ID NO: 4371053 - DNA, 25 bp, Homo sapien
gatgaacgcgtttccgaagaagagc

SEQ ID NO: 4371054 - DNA, 25 bp, Homo sapien
agacacgatgaacgcgtttccgaag

SEQ ID NO: 4371055 - DNA, 25 bp, Homo sapien
aacgcgtttccgaagaagagcgcgg

SEQ ID NO: 4371056 - DNA, 25 bp, Homo sapien
ctgcaggcgagaacagggaacgtag

SEQ ID NO: 4371057 - DNA, 25 bp, Homo sapien
cgagaacagggaacgtagagccggc

SEQ ID NO: 4371058 - DNA, 25 bp, Homo sapien
cagggaacgtagagccggccgccaa

SEQ ID NO: 4371059 - DNA, 25 bp, Homo sapien
gcgggcaaaggcccttgactccgcc

SEQ ID NO: 4371060 - DNA, 25 bp, Homo sapien
cactagataggcttccgggcgtgat

SEQ ID NO: 4371061 - DNA, 25 bp, Homo sapien
ccggtttggcgaagagcaagcgtcc

SEQ ID NO: 4371062 - DNA, 25 bp, Homo sapien
tatgacgtgcgcatcattaccgcca

SEQ ID NO: 4371063 - DNA, 25 bp, Homo sapien
gattggccagcttggcgccactaga

SEQ ID NO: 4371064 - DNA, 25 bp, Homo sapien
cctaaccgggagaaacatccaacat

SEQ ID NO: 4371065 - DNA, 25 bp, Homo sapien
gaaacatccaacatcctgcagaaac

SEQ ID NO: 4371066 - DNA, 25 bp, Homo sapien
ctggactgtgaacaacctaaccggg

SEQ ID NO: 4371067 - DNA, 25 bp, Homo sapien
gactgtgaacaacctaaccgggaga

SEQ ID NO: 4371068 - DNA, 25 bp, Homo sapien
caggaagtcccgttgggtctctcat

SEQ ID NO: 4371069 - DNA, 25 bp, Homo sapien
tccaggaagtcccgttgggtctctc

SEQ ID NO: 4371070 - DNA, 25 bp, Homo sapien
agaacaggaagcctggaatttgttt

SEQ ID NO: 4371071 - DNA, 25 bp, Homo sapien
caagaacaggaagcctggaatttgt

SEQ ID NO: 4371072 - DNA, 25 bp, Homo sapien
cccagaaatagaagtgtgggtaact

SEQ ID NO: 4371073 - DNA, 25 bp, Homo sapien
tatcagcatgttggtggcagaatcc

SEQ ID NO: 4371074 - DNA, 25 bp, Homo sapien
tcaatttgggttatgcatctaggtg

SEQ ID NO: 4371075 - DNA, 25 bp, Homo sapien
cattttaggacacatatatgctgca

SEQ ID NO: 4371076 - DNA, 25 bp, Homo sapien
gggcacccaggcagatatgctatgc

SEQ ID NO: 4371077 - DNA, 25 bp, Homo sapien
cacaggtcgggtgttgctacaagat

SEQ ID NO: 4371078 - DNA, 25 bp, Homo sapien
cagtcattaaagcaggcaaggcggc

SEQ ID NO: 4371079 - DNA, 25 bp, Homo sapien
tccagccaggatgattgagaaccca

SEQ ID NO: 4371080 - DNA, 25 bp, Homo sapien
ggtgttcaaatccatcagctccaaa

SEQ ID NO: 4371081 - DNA, 25 bp, Homo sapien
gagcactagccgcagtgacccagtt

SEQ ID NO: 4371082 - DNA, 25 bp, Homo sapien
tgtcattgtacatcccagagcacta

SEQ ID NO: 4371083 - DNA, 25 bp, Homo sapien
tgatcacaacataaagggaagacca

SEQ ID NO: 4371084 - DNA, 25 bp, Homo sapien
gaaaaagagtagcaaagaaggctgt

SEQ ID NO: 4371085 - DNA, 25 bp, Homo sapien
aagcaagaatgcagatggattactt

SEQ ID NO: 4371086 - DNA, 25 bp, Homo sapien
aagaaggctgttgcaaatgtgtggt

SEQ ID NO: 4371087 - DNA, 25 bp, Homo sapien
gaatgcagatggattacttcacatt

SEQ ID NO: 4371088 - DNA, 25 bp, Homo sapien
gaagccggctggaggcatctccttt

SEQ ID NO: 4371089 - DNA, 25 bp, Homo sapien
acttagcagttgtcacaggaatggc

SEQ ID NO: 4371090 - DNA, 25 bp, Homo sapien
tcagggagtcatggtacaatcctac

SEQ ID NO: 4371091 - DNA, 25 bp, Homo sapien
tgagcgcataccgtgaggagcatcc

SEQ ID NO: 4371092 - DNA, 25 bp, Homo sapien
tatcttgaaaatttgcctcaagctc

SEQ ID NO: 4371093 - DNA, 25 bp, Homo sapien
ggaggaactagatcatctatcttga

SEQ ID NO: 4371094 - DNA, 25 bp, Homo sapien
ggcagccactaaacagagaggagga

SEQ ID NO: 4371095 - DNA, 25 bp, Homo sapien
ctcagtaggtgaacactaagaaagc

SEQ ID NO: 4371096 - DNA, 25 bp, Homo sapien
ggattgcagtaatgagactgcttat

SEQ ID NO: 4371097 - DNA, 25 bp, Homo sapien
attgcagtaatgtggccatggctca

SEQ ID NO: 4371098 - DNA, 25 bp, Homo sapien
ggctggattgcagtaatgagactgc

SEQ ID NO: 4371099 - DNA, 25 bp, Homo sapien
tagattgcagtaatgtggccatggc

SEQ ID NO: 4371100 - DNA, 25 bp, Homo sapien
gcatccttagcttgttgcttccatc

SEQ ID NO: 4371101 - DNA, 25 bp, Homo sapien
ttctgccccagcatccttagcttgt

SEQ ID NO: 4371102 - DNA, 25 bp, Homo sapien
tcatgagtaacccaggttccatctt

SEQ ID NO: 4371103 - DNA, 25 bp, Homo sapien
taaacatattaagtctagaggcagc

SEQ ID NO: 4371104 - DNA, 25 bp, Homo sapien
ggtggtctgtccctagtctaaatga

SEQ ID NO: 4371105 - DNA, 25 bp, Homo sapien
gaactgggctataccctggaagtaa

SEQ ID NO: 4371106 - DNA, 25 bp, Homo sapien
gaatgtcccctcttgcaatcctaag

SEQ ID NO: 4371107 - DNA, 25 bp, Homo sapien
cagtagaacttcaacagtctgaggg

SEQ ID NO: 4371108 - DNA, 25 bp, Homo sapien
ctcacagggtgtgccggaatcagag

SEQ ID NO: 4371109 - DNA, 25 bp, Homo sapien
tgagtagacactgaccaagatcttg

SEQ ID NO: 4371110 - DNA, 25 bp, Homo sapien
gtacaaggcccacgaaatagtcggc

SEQ ID NO: 4371111 - DNA, 25 bp, Homo sapien
gcctggtacgtaatagacgctctga

SEQ ID NO: 4371112 - DNA, 25 bp, Homo sapien
ggtgtctgggtcttctcggaacaaa

SEQ ID NO: 4371113 - DNA, 25 bp, Homo sapien
gtttcacatcctccctcgggtgtct

SEQ ID NO: 4371114 - DNA, 25 bp, Homo sapien
cctccctcgggtgtctgggtcttct

SEQ ID NO: 4371115 - DNA, 25 bp, Homo sapien
tctgggtcttctcggaacaaagtga

SEQ ID NO: 4371116 - DNA, 25 bp, Homo sapien
tggagcccgtcccacgcggcacgcg

SEQ ID NO: 4371117 - DNA, 25 bp, Homo sapien
aggcaggtggagcccgtcccacgcg

SEQ ID NO: 4371118 - DNA, 25 bp, Homo sapien
gtcccacgcggcacgcgccttcctt

SEQ ID NO: 4371119 - DNA, 25 bp, Homo sapien
cgtcccacgcggcacgcgccttcct

SEQ ID NO: 4371120 - DNA, 25 bp, Homo sapien
tctcaggctcccgttcaggtaaagg

SEQ ID NO: 4371121 - DNA, 25 bp, Homo sapien
caggtgtatacatcagaccgaggcg

SEQ ID NO: 4371122 - DNA, 25 bp, Homo sapien
tcgggtcccgtcagcatgaagatgg

SEQ ID NO: 4371123 - DNA, 25 bp, Homo sapien
accgaggcgccgaaggatttagttg

SEQ ID NO: 4371124 - DNA, 25 bp, Homo sapien
aggagtccacttcatgtttctggcc

SEQ ID NO: 4371125 - DNA, 25 bp, Homo sapien
ggcagtcatggcatgagaaggcccc

SEQ ID NO: 4371126 - DNA, 25 bp, Homo sapien
gctgacgggcagatacacaatgggc

SEQ ID NO: 4371127 - DNA, 25 bp, Homo sapien
tttttaatgatgaccagagttaccc

SEQ ID NO: 4371128 - DNA, 25 bp, Homo sapien
ggaaaagactacagattacacactc

SEQ ID NO: 4371129 - DNA, 25 bp, Homo sapien
tcacacttgtacatatagacagcaa

SEQ ID NO: 4371130 - DNA, 25 bp, Homo sapien
ttactggaactagtactaccatgcg

SEQ ID NO: 4371131 - DNA, 25 bp, Homo sapien
gcttgggcctggtagaagtttgacc

SEQ ID NO: 4371132 - DNA, 25 bp, Homo sapien
tattttgccctagttaatcctgttg

SEQ ID NO: 4371133 - DNA, 25 bp, Homo sapien
tcgccatggaattctttcagttacc

SEQ ID NO: 4371134 - DNA, 25 bp, Homo sapien
tgttcacaaaagaattcgccatgga

SEQ ID NO: 4371135 - DNA, 25 bp, Homo sapien
tataacttgtaaaccagtgactcct

SEQ ID NO: 4371136 - DNA, 25 bp, Homo sapien
cactgttctggatgctagatgtgca

SEQ ID NO: 4371137 - DNA, 25 bp, Homo sapien
gatgtgcaaaaccatgttagcaggg

SEQ ID NO: 4371138 - DNA, 25 bp, Homo sapien
tagcagggttggcaactactggaac

SEQ ID NO: 4371139 - DNA, 25 bp, Homo sapien
gagaggacaccattcaacccagtac

SEQ ID NO: 4371140 - DNA, 25 bp, Homo sapien
cagaaagactgatgcaaattggaat

SEQ ID NO: 4371141 - DNA, 25 bp, Homo sapien
atcattatttgagccacagaaagac

SEQ ID NO: 4371142 - DNA, 25 bp, Homo sapien
gaaagctaattattcacaagtaggg

SEQ ID NO: 4371143 - DNA, 25 bp, Homo sapien
ctttgcgatagatgaacaaaatggc

SEQ ID NO: 4371144 - DNA, 25 bp, Homo sapien
gggttatcttgtacatcctgatctt

SEQ ID NO: 4371145 - DNA, 25 bp, Homo sapien
tgtacatcctgatcttgtggactaa

SEQ ID NO: 4371146 - DNA, 25 bp, Homo sapien
taagcttggctgagcgccctctggg

SEQ ID NO: 4371147 - DNA, 25 bp, Homo sapien
tagctgctctaagcttggctgagcg

SEQ ID NO: 4371148 - DNA, 25 bp, Homo sapien
tccgtgttttcatgatctgaaccca

SEQ ID NO: 4371149 - DNA, 25 bp, Homo sapien
ttttcatgatctgaacccaattgag

SEQ ID NO: 4371150 - DNA, 25 bp, Homo sapien
tcatgatctgaacccaattgagatg

SEQ ID NO: 4371151 - DNA, 25 bp, Homo sapien
tcatagagacttcttccgtgttttc

SEQ ID NO: 4371152 - DNA, 25 bp, Homo sapien
caagcaaaaatcttttgacgatgcg

SEQ ID NO: 4371153 - DNA, 25 bp, Homo sapien
catgcttattccaagcaaaaatctt

SEQ ID NO: 4371154 - DNA, 25 bp, Homo sapien
ctgtcatgcttattccaagcaaaaa

SEQ ID NO: 4371155 - DNA, 25 bp, Homo sapien
aatcttttgacgatgcgatcctcta

SEQ ID NO: 4371156 - DNA, 25 bp, Homo sapien
tccgtgtataaatagcagagggagg

SEQ ID NO: 4371157 - DNA, 25 bp, Homo sapien
ctttccgtgtataaatagcagaggg

SEQ ID NO: 4371158 - DNA, 25 bp, Homo sapien
tataaatagcagagggaggaaatgt

SEQ ID NO: 4371159 - DNA, 25 bp, Homo sapien
ataaatagcagagggaggaaatgtt

SEQ ID NO: 4371160 - DNA, 25 bp, Homo sapien
tccattcttatgtccaaagggccat

SEQ ID NO: 4371161 - DNA, 25 bp, Homo sapien
ttcttatgtccaaagggccatcttt

SEQ ID NO: 4371162 - DNA, 25 bp, Homo sapien
catccattcttatgtccaaagggcc

SEQ ID NO: 4371163 - DNA, 25 bp, Homo sapien
cattcttatgtccaaagggccatct

SEQ ID NO: 4371164 - DNA, 25 bp, Homo sapien
gtctctgtccaaggcatagagaaca

SEQ ID NO: 4371165 - DNA, 25 bp, Homo sapien
gcataagctgttgggtctctgtcca

SEQ ID NO: 4371166 - DNA, 25 bp, Homo sapien
taatgcataagctgttgggtctctg

SEQ ID NO: 4371167 - DNA, 25 bp, Homo sapien
ggtctctgtccaaggcatagagaac

SEQ ID NO: 4371168 - DNA, 25 bp, Homo sapien
aaacaatgaacaacttcatccacca

SEQ ID NO: 4371169 - DNA, 25 bp, Homo sapien
tctgtcctttttgtggtgacaaaca

SEQ ID NO: 4371170 - DNA, 25 bp, Homo sapien
ttttgtggtgacaaacaatgaacaa

SEQ ID NO: 4371171 - DNA, 25 bp, Homo sapien
atctagaaaaatctgtcctttttgt

SEQ ID NO: 4371172 - DNA, 25 bp, Homo sapien
tttgctcccgggcttcatattctct

SEQ ID NO: 4371173 - DNA, 25 bp, Homo sapien
cttgagatctgtgtaactcctggac

SEQ ID NO: 4371174 - DNA, 25 bp, Homo sapien
ctcctggacttgagtttgatctgtt

SEQ ID NO: 4371175 - DNA, 25 bp, Homo sapien
ttttctgctgtagtatgtattcttt

SEQ ID NO: 4371176 - DNA, 25 bp, Homo sapien
tggcctctaactcgggccagcgact

SEQ ID NO: 4371177 - DNA, 25 bp, Homo sapien
ctgaagcacgaagacttctcagctg

SEQ ID NO: 4371178 - DNA, 25 bp, Homo sapien
gaagcacgaagacttctcagctggc

SEQ ID NO: 4371179 - DNA, 25 bp, Homo sapien
ctggcctctaactcgggccagcgac

SEQ ID NO: 4371180 - DNA, 25 bp, Homo sapien
aatcaagggcagagggatagtgaat

SEQ ID NO: 4371181 - DNA, 25 bp, Homo sapien
cctcaagtccaaagatggcagactt

SEQ ID NO: 4371182 - DNA, 25 bp, Homo sapien
gaaagacttccttgaatgtgtctgt

SEQ ID NO: 4371183 - DNA, 25 bp, Homo sapien
gaataaggtctgcactgacctcaag

SEQ ID NO: 4371184 - DNA, 25 bp, Homo sapien
tctgtacccagtgactggactatcc

SEQ ID NO: 4371185 - DNA, 25 bp, Homo sapien
ttccgcagggatctgtacccagtga

SEQ ID NO: 4371186 - DNA, 25 bp, Homo sapien
tgggcactgccatcgcttccgcagg

SEQ ID NO: 4371187 - DNA, 25 bp, Homo sapien
agtgactggactatcctctggctcc

SEQ ID NO: 4371188 - DNA, 25 bp, Homo sapien
tctcaagtttccaaagcagagttca

SEQ ID NO: 4371189 - DNA, 25 bp, Homo sapien
agctctcaagtttccaaagcagagt

SEQ ID NO: 4371190 - DNA, 25 bp, Homo sapien
aagtttccaaagcagagttcaggcc

SEQ ID NO: 4371191 - DNA, 25 bp, Homo sapien
ttccaaagcagagttcaggcctcat

SEQ ID NO: 4371192 - DNA, 25 bp, Homo sapien
agcatgctggcctacgtctgagggt

SEQ ID NO: 4371193 - DNA, 25 bp, Homo sapien
gctggcctacgtctgagggtaaagc

SEQ ID NO: 4371194 - DNA, 25 bp, Homo sapien
catgctggcctacgtctgagggtaa

SEQ ID NO: 4371195 - DNA, 25 bp, Homo sapien
tgctggcctacgtctgagggtaaag

SEQ ID NO: 4371196 - DNA, 25 bp, Homo sapien
cagaccaggggcagttgagtttccc

SEQ ID NO: 4371197 - DNA, 25 bp, Homo sapien
gttgagtttccctggtgaagcaaac

SEQ ID NO: 4371198 - DNA, 25 bp, Homo sapien
ccctggtgaagcaaaccttgaaggt

SEQ ID NO: 4371199 - DNA, 25 bp, Homo sapien
ctggtgaagcaaaccttgaaggtgg

SEQ ID NO: 4371200 - DNA, 25 bp, Homo sapien
tgctgcattgattctaaggtggtag

SEQ ID NO: 4371201 - DNA, 25 bp, Homo sapien
gcttgctgcattgattctaaggtgg

SEQ ID NO: 4371202 - DNA, 25 bp, Homo sapien
tgattctaaggtggtagtagtatct

SEQ ID NO: 4371203 - DNA, 25 bp, Homo sapien
cattgattctaaggtggtagtagta

SEQ ID NO: 4371204 - DNA, 25 bp, Homo sapien
ttactgctgaaactacaaagggtcc

SEQ ID NO: 4371205 - DNA, 25 bp, Homo sapien
cattggtgaaagctgatccccgtgc

SEQ ID NO: 4371206 - DNA, 25 bp, Homo sapien
cagaagcagaatgtccgaggcatca

SEQ ID NO: 4371207 - DNA, 25 bp, Homo sapien
cagtggttacgaaatgcaggtcagc

SEQ ID NO: 4371208 - DNA, 25 bp, Homo sapien
ctctcatgcgcattcctttttcttg

SEQ ID NO: 4371209 - DNA, 25 bp, Homo sapien
ctgattctcgaaaggcttttcagtc

SEQ ID NO: 4371210 - DNA, 25 bp, Homo sapien
catgactctcatgcgcattcctttt

SEQ ID NO: 4371211 - DNA, 25 bp, Homo sapien
tgattctcgaaaggcttttcagtcc

SEQ ID NO: 4371212 - DNA, 25 bp, Homo sapien
tggagacagtttggcagcggatgtg

SEQ ID NO: 4371213 - DNA, 25 bp, Homo sapien
gtacatcttgggtggtgccgaaaag

SEQ ID NO: 4371214 - DNA, 25 bp, Homo sapien
gtggtgccgaaaagcagggattaca

SEQ ID NO: 4371215 - DNA, 25 bp, Homo sapien
gaaaagcagggattacaaatgctgg

SEQ ID NO: 4371216 - DNA, 25 bp, Homo sapien
tcaacccagctctgcggattccaca

SEQ ID NO: 4371217 - DNA, 25 bp, Homo sapien
acccagctctgcggattccacattc

SEQ ID NO: 4371218 - DNA, 25 bp, Homo sapien
agctctgcggattccacattcttcc

SEQ ID NO: 4371219 - DNA, 25 bp, Homo sapien
aacccagctctgcggattccacatt

SEQ ID NO: 4371220 - DNA, 25 bp, Homo sapien
ctggggagctgaagggttttctaga

SEQ ID NO: 4371221 - DNA, 25 bp, Homo sapien
tcaagacagactctcctccagaagg

SEQ ID NO: 4371222 - DNA, 25 bp, Homo sapien
tgggccccaggagatcagaagatta

SEQ ID NO: 4371223 - DNA, 25 bp, Homo sapien
tgtggtagcctaacagcatgcagca

SEQ ID NO: 4371224 - DNA, 25 bp, Homo sapien
cagcagggctgtaacgtgtctggca

SEQ ID NO: 4371225 - DNA, 25 bp, Homo sapien
ttgcagcactacaaccaccagagaa

SEQ ID NO: 4371226 - DNA, 25 bp, Homo sapien
aatcacaggagtttctcatttttat

SEQ ID NO: 4371227 - DNA, 25 bp, Homo sapien
atcacaggagtttctcatttttata

SEQ ID NO: 4371228 - DNA, 25 bp, Homo sapien
aaaaaagagggcaagaattctctgc

SEQ ID NO: 4371229 - DNA, 25 bp, Homo sapien
gagatggcagagtaaagccttgcac

SEQ ID NO: 4371230 - DNA, 25 bp, Homo sapien
tgtgggcacactttctgaccccaaa

SEQ ID NO: 4371231 - DNA, 25 bp, Homo sapien
tcactccagggacttttacagagtc

SEQ ID NO: 4371232 - DNA, 25 bp, Homo sapien
acttcaaagattcttgaaactctct

SEQ ID NO: 4371233 - DNA, 25 bp, Homo sapien
gccaacttcaaagattcttgaaact

SEQ ID NO: 4371234 - DNA, 25 bp, Homo sapien
caacttcaaagattcttgaaactct

SEQ ID NO: 4371235 - DNA, 25 bp, Homo sapien
ttcaaagattcttgaaactctctgg

SEQ ID NO: 4371236 - DNA, 25 bp, Homo sapien
taataggtactgaagtaaacaggcc

SEQ ID NO: 4371237 - DNA, 25 bp, Homo sapien
ttctaataggtactgaagtaaacag

SEQ ID NO: 4371238 - DNA, 25 bp, Homo sapien
gctgtaagttccagaggcttcaaat

SEQ ID NO: 4371239 - DNA, 25 bp, Homo sapien
ggttgtgtttaattattgttgtagc

SEQ ID NO: 4371240 - DNA, 25 bp, Homo sapien
aggtcatcagtgatacggagacgat

SEQ ID NO: 4371241 - DNA, 25 bp, Homo sapien
tcagtgatacggagacgatcacttg

SEQ ID NO: 4371242 - DNA, 25 bp, Homo sapien
gatacggagacgatcacttgttata

SEQ ID NO: 4371243 - DNA, 25 bp, Homo sapien
tacggagacgatcacttgttataaa

SEQ ID NO: 4371244 - DNA, 25 bp, Homo sapien
gaaccaaccacaatgtaaaattcta

SEQ ID NO: 4371245 - DNA, 25 bp, Homo sapien
gcagctgaggaggaaccaaccacaa

SEQ ID NO: 4371246 - DNA, 25 bp, Homo sapien
aattctagtgttgtcactgtgttca

SEQ ID NO: 4371247 - DNA, 25 bp, Homo sapien
aagaaaagccttcagcagctgagga

SEQ ID NO: 4371248 - DNA, 25 bp, Homo sapien
tgaacagtgcacgtagagactcagg

SEQ ID NO: 4371249 - DNA, 25 bp, Homo sapien
tgatgaaggccgcaacgaagtagga

SEQ ID NO: 4371250 - DNA, 25 bp, Homo sapien
tttaaccacacctcgagcaaaggat

SEQ ID NO: 4371251 - DNA, 25 bp, Homo sapien
tacaatgatgttaggtcaggccgcc

SEQ ID NO: 4371252 - DNA, 25 bp, Homo sapien
aagtagaggtccagagttgcattcc

SEQ ID NO: 4371253 - DNA, 25 bp, Homo sapien
gcctgagagtatagactgcaagacc

SEQ ID NO: 4371254 - DNA, 25 bp, Homo sapien
gaccagaccataccttaaaagagcc

SEQ ID NO: 4371255 - DNA, 25 bp, Homo sapien
tctggccccttaggagagaaaggag

SEQ ID NO: 4371256 - DNA, 25 bp, Homo sapien
tagactggtgcgaggttccacgtga

SEQ ID NO: 4371257 - DNA, 25 bp, Homo sapien
gttactattataggcggtcttccat

SEQ ID NO: 4371258 - DNA, 25 bp, Homo sapien
tccacgtgagtggaaaaaatttctc

SEQ ID NO: 4371259 - DNA, 25 bp, Homo sapien
catggtttcaaccaaccactgatgg

SEQ ID NO: 4371260 - DNA, 25 bp, Homo sapien
tgccttccttcaaaccttcacagtt

SEQ ID NO: 4371261 - DNA, 25 bp, Homo sapien
ggtagttcactttgccttccttcaa

SEQ ID NO: 4371262 - DNA, 25 bp, Homo sapien
ttttctggtagttcactttgccttc

SEQ ID NO: 4371263 - DNA, 25 bp, Homo sapien
tttgccttccttcaaaccttcacag

SEQ ID NO: 4371264 - DNA, 25 bp, Homo sapien
tcaattcatttagaagatcaattgc

SEQ ID NO: 4371265 - DNA, 25 bp, Homo sapien
tgctcatgtaatgtggcaccttggc

SEQ ID NO: 4371266 - DNA, 25 bp, Homo sapien
ttagtagatgctcatgtaatgtggc

SEQ ID NO: 4371267 - DNA, 25 bp, Homo sapien
tagaagatcaattgcatttagtaga

SEQ ID NO: 4371268 - DNA, 25 bp, Homo sapien
taccatagactagctggcatatgaa

SEQ ID NO: 4371269 - DNA, 25 bp, Homo sapien
gacttctggtgaggtcactctaggc

SEQ ID NO: 4371270 - DNA, 25 bp, Homo sapien
gagagtagcatgctctctcatggcc

SEQ ID NO: 4371271 - DNA, 25 bp, Homo sapien
tcagggtgctaacatggttgacttc

SEQ ID NO: 4371272 - DNA, 25 bp, Homo sapien
ggtatgaaagatagtaagcccacac

SEQ ID NO: 4371273 - DNA, 25 bp, Homo sapien
gatctggaatctgaacattagcctg

SEQ ID NO: 4371274 - DNA, 25 bp, Homo sapien
tgtttctggttgctaatgtggctgg

SEQ ID NO: 4371275 - DNA, 25 bp, Homo sapien
tgggtaacctttttgcctcatatgg

SEQ ID NO: 4371276 - DNA, 25 bp, Homo sapien
tccatttccttatcagtacttttgg

SEQ ID NO: 4371277 - DNA, 25 bp, Homo sapien
tacttttggttgagacccatagccc

SEQ ID NO: 4371278 - DNA, 25 bp, Homo sapien
ttgagacccatagcccagacttttc

SEQ ID NO: 4371279 - DNA, 25 bp, Homo sapien
ccttatcagtacttttggttgagac

SEQ ID NO: 4371280 - DNA, 25 bp, Homo sapien
tactccaattcttaagtgtactgct

SEQ ID NO: 4371281 - DNA, 25 bp, Homo sapien
actctactccaattcttaagtgtac

SEQ ID NO: 4371282 - DNA, 25 bp, Homo sapien
ctccaattcttaagtgtactgctgc

SEQ ID NO: 4371283 - DNA, 25 bp, Homo sapien
cccaactctactccaattcttaagt

SEQ ID NO: 4371284 - DNA, 25 bp, Homo sapien
catttaaagtagtcttctgtggttg

SEQ ID NO: 4371285 - DNA, 25 bp, Homo sapien
ggttgggaagcctcgcctcccaaga

SEQ ID NO: 4371286 - DNA, 25 bp, Homo sapien
tctgtggttgggaagcctcgcctcc

SEQ ID NO: 4371287 - DNA, 25 bp, Homo sapien
ttttcatttaaagtagtcttctgtg

SEQ ID NO: 4371288 - DNA, 25 bp, Homo sapien
agaagaagaactgcgcttcacagag

SEQ ID NO: 4371289 - DNA, 25 bp, Homo sapien
ggtggagaagaagaactgcgcttca

SEQ ID NO: 4371290 - DNA, 25 bp, Homo sapien
tgcgcttcacagagtccggggtgtg

SEQ ID NO: 4371291 - DNA, 25 bp, Homo sapien
ccctgctctgctggcggtcctaggt

SEQ ID NO: 4371292 - DNA, 25 bp, Homo sapien
aatgtttccccactggcgacattct

SEQ ID NO: 4371293 - DNA, 25 bp, Homo sapien
tccccactggcgacattctctgcag

SEQ ID NO: 4371294 - DNA, 25 bp, Homo sapien
ttctaatgtttccccactggcgaca

SEQ ID NO: 4371295 - DNA, 25 bp, Homo sapien
gtttccccactggcgacattctctg

SEQ ID NO: 4371296 - DNA, 25 bp, Homo sapien
tggaggagggcctttagctctgcat

SEQ ID NO: 4371297 - DNA, 25 bp, Homo sapien
gtttttcgacttgtagaactctgga

SEQ ID NO: 4371298 - DNA, 25 bp, Homo sapien
ttcgacttgtagaactctggaggag

SEQ ID NO: 4371299 - DNA, 25 bp, Homo sapien
ttttcgacttgtagaactctggagg

SEQ ID NO: 4371300 - DNA, 25 bp, Homo sapien
tcagacttgcagaggtcaggctcga

SEQ ID NO: 4371301 - DNA, 25 bp, Homo sapien
cactggttatccgcatggggccact

SEQ ID NO: 4371302 - DNA, 25 bp, Homo sapien
ggctcgaagggaccactggttatcc

SEQ ID NO: 4371303 - DNA, 25 bp, Homo sapien
agacttgcagaggtcaggctcgaag

SEQ ID NO: 4371304 - DNA, 25 bp, Homo sapien
agtccatactgtttagaagggtctt

SEQ ID NO: 4371305 - DNA, 25 bp, Homo sapien
catactgtttagaagggtcttgttt

SEQ ID NO: 4371306 - DNA, 25 bp, Homo sapien
agaagggtcttgtttgtaaatagtg

SEQ ID NO: 4371307 - DNA, 25 bp, Homo sapien
tcaaaacgcgtttccacctcactga

SEQ ID NO: 4371308 - DNA, 25 bp, Homo sapien
catccttgggcttgccctctcctga

SEQ ID NO: 4371309 - DNA, 25 bp, Homo sapien
tgcatccttgggcttgccctctcct

SEQ ID NO: 4371310 - DNA, 25 bp, Homo sapien
tgggcttgccctctcctgagctgac

SEQ ID NO: 4371311 - DNA, 25 bp, Homo sapien
ccttgggcttgccctctcctgagct

SEQ ID NO: 4371312 - DNA, 25 bp, Homo sapien
acactttatgtatgtcaaattcagc

SEQ ID NO: 4371313 - DNA, 25 bp, Homo sapien
atccacagcatacactttatgtatg

SEQ ID NO: 4371314 - DNA, 25 bp, Homo sapien
catccacagcatacactttatgtat

SEQ ID NO: 4371315 - DNA, 25 bp, Homo sapien
tttatgtatgtcaaattcagctttt

SEQ ID NO: 4371316 - DNA, 25 bp, Homo sapien
ttgtgtcacttgtgtgttctgattt

SEQ ID NO: 4371317 - DNA, 25 bp, Homo sapien
aatgagtgggcaactttgttccagg

SEQ ID NO: 4371318 - DNA, 25 bp, Homo sapien
tactggcgtgcagttaaatgagtgg

SEQ ID NO: 4371319 - DNA, 25 bp, Homo sapien
cttctactggcgtgcagttaaatga

SEQ ID NO: 4371320 - DNA, 25 bp, Homo sapien
cacatggaccccaagttcaattttt

SEQ ID NO: 4371321 - DNA, 25 bp, Homo sapien
gaagccatccacatggaccccaagt

SEQ ID NO: 4371322 - DNA, 25 bp, Homo sapien
gctacattagcgatgaagccatcca

SEQ ID NO: 4371323 - DNA, 25 bp, Homo sapien
accacaaaagtatgagctacattag

SEQ ID NO: 4371324 - DNA, 25 bp, Homo sapien
cttccttgagaatataatcctggtt

SEQ ID NO: 4371325 - DNA, 25 bp, Homo sapien
tcttcaaaggggagaagtgacatac

SEQ ID NO: 4371326 - DNA, 25 bp, Homo sapien
agaatataatcctggttgctcttca

SEQ ID NO: 4371327 - DNA, 25 bp, Homo sapien
tataatcctggttgctcttcaaagg

SEQ ID NO: 4371328 - DNA, 25 bp, Homo sapien
tccctgtttcttccataatcacggc

SEQ ID NO: 4371329 - DNA, 25 bp, Homo sapien
tcacacaggctcagtaccgacacac

SEQ ID NO: 4371330 - DNA, 25 bp, Homo sapien
ataatcacggcatcacctttctcac

SEQ ID NO: 4371331 - DNA, 25 bp, Homo sapien
gtttcttccataatcacggcatcac

SEQ ID NO: 4371332 - DNA, 25 bp, Homo sapien
gatagtttgctcctgctgctcatcc

SEQ ID NO: 4371333 - DNA, 25 bp, Homo sapien
ttggtcacgaccaggtcctcagcga

SEQ ID NO: 4371334 - DNA, 25 bp, Homo sapien
cctgctgctcatccttgcccgacat

SEQ ID NO: 4371335 - DNA, 25 bp, Homo sapien
gtcctcagcgatagtttgctcctgc

SEQ ID NO: 4371336 - DNA, 25 bp, Homo sapien
tgtttcctgtgacctagactcagcc

SEQ ID NO: 4371337 - DNA, 25 bp, Homo sapien
tgtagtagccccaacgtgtggaagt

SEQ ID NO: 4371338 - DNA, 25 bp, Homo sapien
cagttgggatctataaacatgggcc

SEQ ID NO: 4371339 - DNA, 25 bp, Homo sapien
tcatgtagcattccaaccctgagtg

SEQ ID NO: 4371340 - DNA, 25 bp, Homo sapien
ctgctcgaactaaagtcggtggagg

SEQ ID NO: 4371341 - DNA, 25 bp, Homo sapien
aggctccgggcgcaccaggaagccc

SEQ ID NO: 4371342 - DNA, 25 bp, Homo sapien
tggagccgggcggaatctgggatgc

SEQ ID NO: 4371343 - DNA, 25 bp, Homo sapien
gggtcggcacgcgaggcaggctccg

SEQ ID NO: 4371344 - DNA, 25 bp, Homo sapien
ggctgcggtcgcacgcacttcgtgc

SEQ ID NO: 4371345 - DNA, 25 bp, Homo sapien
ggtcgcacgcacttcgtgcttcagg

SEQ ID NO: 4371346 - DNA, 25 bp, Homo sapien
cttcgtgcttcaggcggccgtcgcc

SEQ ID NO: 4371347 - DNA, 25 bp, Homo sapien
tgccgggctgcggtcgcacgcactt

SEQ ID NO: 4371348 - DNA, 25 bp, Homo sapien
taaaatcagaggtggttgatctccc

SEQ ID NO: 4371349 - DNA, 25 bp, Homo sapien
tcacaacgtgggtaacattcggtaa

SEQ ID NO: 4371350 - DNA, 25 bp, Homo sapien
gaaccagagcaaggacggtggcttt

SEQ ID NO: 4371351 - DNA, 25 bp, Homo sapien
cattcggtaataaaacgcgctcgga

SEQ ID NO: 4371352 - DNA, 25 bp, Homo sapien
gcaagtggtcccttgtagctgacca

SEQ ID NO: 4371353 - DNA, 25 bp, Homo sapien
caatccacatcttggtgggaacaaa

SEQ ID NO: 4371354 - DNA, 25 bp, Homo sapien
gttactaatccactataggctgatg

SEQ ID NO: 4371355 - DNA, 25 bp, Homo sapien
ggtctaaaccacctccagactagag

SEQ ID NO: 4371356 - DNA, 25 bp, Homo sapien
ttaaaccaaggagtgaactgcagcc

SEQ ID NO: 4371357 - DNA, 25 bp, Homo sapien
tgaaattagttacatgaggccacct

SEQ ID NO: 4371358 - DNA, 25 bp, Homo sapien
tggaaaggaaattggtctcaaaggc

SEQ ID NO: 4371359 - DNA, 25 bp, Homo sapien
ggtgtatcatacattacctacatga

SEQ ID NO: 4371360 - DNA, 25 bp, Homo sapien
taattacaccaatggctgctcctgc

SEQ ID NO: 4371361 - DNA, 25 bp, Homo sapien
taatcctcagaaaggcaagatctgg

SEQ ID NO: 4371362 - DNA, 25 bp, Homo sapien
tgtcctggctgtaatgactgaaacc

SEQ ID NO: 4371363 - DNA, 25 bp, Homo sapien
agcattccgcgtaagactagcccag

SEQ ID NO: 4371364 - DNA, 25 bp, Homo sapien
accaatcaatcttcttattaactgg

SEQ ID NO: 4371365 - DNA, 25 bp, Homo sapien
gaccaatcaatcttcttattaactg

SEQ ID NO: 4371366 - DNA, 25 bp, Homo sapien
tgaccaatcaatcttcttattaact

SEQ ID NO: 4371367 - DNA, 25 bp, Homo sapien
ccaatcaatcttcttattaactgga

SEQ ID NO: 4371368 - DNA, 25 bp, Homo sapien
gccagctgggttgggtcatagaaca

SEQ ID NO: 4371369 - DNA, 25 bp, Homo sapien
ctgtggcagtcttatgattggttga

SEQ ID NO: 4371370 - DNA, 25 bp, Homo sapien
agtgttggggagatgttttatccac

SEQ ID NO: 4371371 - DNA, 25 bp, Homo sapien
tacagaagagctctgattgactcag

SEQ ID NO: 4371372 - DNA, 25 bp, Homo sapien
tgtttttaaatagctgagcacctac

SEQ ID NO: 4371373 - DNA, 25 bp, Homo sapien
tgcttaaaggtgggattaattctcc

SEQ ID NO: 4371374 - DNA, 25 bp, Homo sapien
ccagttgtctaatgatgaatgtttg

SEQ ID NO: 4371375 - DNA, 25 bp, Homo sapien
tcaacagcctatccattttggtagg

SEQ ID NO: 4371376 - DNA, 25 bp, Homo sapien
tggagttcacccgtttggctgggaa

SEQ ID NO: 4371377 - DNA, 25 bp, Homo sapien
cctcacagtaaacaagtggagttca

SEQ ID NO: 4371378 - DNA, 25 bp, Homo sapien
gatggagccagtggacctcacagta

SEQ ID NO: 4371379 - DNA, 25 bp, Homo sapien
gcatgcagccctttggcgtgccact

SEQ ID NO: 4371380 - DNA, 25 bp, Homo sapien
gccaccggtgatggcagctgccttc

SEQ ID NO: 4371381 - DNA, 25 bp, Homo sapien
caccggtgatggcagctgccttctc

SEQ ID NO: 4371382 - DNA, 25 bp, Homo sapien
ccaccggtgatggcagctgccttct

SEQ ID NO: 4371383 - DNA, 25 bp, Homo sapien
ggcacagaatacagagcctagggat

SEQ ID NO: 4371384 - DNA, 25 bp, Homo sapien
tttggtgcctggactgtaaccacag

SEQ ID NO: 4371385 - DNA, 25 bp, Homo sapien
ttttggtgcctggactgtaaccaca

SEQ ID NO: 4371386 - DNA, 25 bp, Homo sapien
acattgtggagatggttggccttac

SEQ ID NO: 4371387 - DNA, 25 bp, Homo sapien
cacattgtggagatggttggcctta

SEQ ID NO: 4371388 - DNA, 25 bp, Homo sapien
cagcttcaggcaaagtaagcaaagc

SEQ ID NO: 4371389 - DNA, 25 bp, Homo sapien
gatcccagtcatcgtgtcacctgca

SEQ ID NO: 4371390 - DNA, 25 bp, Homo sapien
cgaaaattcctgtagcgaatctagg

SEQ ID NO: 4371391 - DNA, 25 bp, Homo sapien
taggacccctggaaagtaggctatg

SEQ ID NO: 4371392 - DNA, 25 bp, Homo sapien
gagcggcctggctttgtctgagtca

SEQ ID NO: 4371393 - DNA, 25 bp, Homo sapien
tcactccaggctgtatactttggtt

SEQ ID NO: 4371394 - DNA, 25 bp, Homo sapien
tcgcgtggtgtctgatgtcacaggc

SEQ ID NO: 4371395 - DNA, 25 bp, Homo sapien
tactttggttaccatggtcgcgtgg

SEQ ID NO: 4371396 - DNA, 25 bp, Homo sapien
ggagcctccgcaggatgaacacctc

SEQ ID NO: 4371397 - DNA, 25 bp, Homo sapien
ctggagaatcgaggctctgcctcag

SEQ ID NO: 4371398 - DNA, 25 bp, Homo sapien
ttgttctccggcaaagtcaatttcc

SEQ ID NO: 4371399 - DNA, 25 bp, Homo sapien
tctgcctcagatgttcggagcctcc

SEQ ID NO: 4371400 - DNA, 25 bp, Homo sapien
tatttcaaatgactcaggcgccctc

SEQ ID NO: 4371401 - DNA, 25 bp, Homo sapien
gtaaataaatgaggccgcacaggct

SEQ ID NO: 4371402 - DNA, 25 bp, Homo sapien
tgttgccactatagaagccccttgt

SEQ ID NO: 4371403 - DNA, 25 bp, Homo sapien
tgagctcccttagatgacgatcggc

SEQ ID NO: 4371404 - DNA, 25 bp, Homo sapien
tcaggtgccctatgcagcagagtgg

SEQ ID NO: 4371405 - DNA, 25 bp, Homo sapien
gagccatgggcagcaagtagatcat

SEQ ID NO: 4371406 - DNA, 25 bp, Homo sapien
tggagccatgggcagcaagtagatc

SEQ ID NO: 4371407 - DNA, 25 bp, Homo sapien
tcacagcaatggtggccgtcaggtg

SEQ ID NO: 4371408 - DNA, 25 bp, Homo sapien
cacgccgggatcgagaatgcatttt

SEQ ID NO: 4371409 - DNA, 25 bp, Homo sapien
cgggatcgagaatgcatttttggca

SEQ ID NO: 4371410 - DNA, 25 bp, Homo sapien
gcaggcccaaaccttgcagaagcca

SEQ ID NO: 4371411 - DNA, 25 bp, Homo sapien
acaggcacacgccgggatcgagaat

SEQ ID NO: 4371412 - DNA, 25 bp, Homo sapien
ggaaaatcctcccagctttgcgggc

SEQ ID NO: 4371413 - DNA, 25 bp, Homo sapien
ggccgcagagcgagagcgtttccat

SEQ ID NO: 4371414 - DNA, 25 bp, Homo sapien
gttttcagtttaatcagcggtatcg

SEQ ID NO: 4371415 - DNA, 25 bp, Homo sapien
cagcggtatcgtttttgagaggaaa

SEQ ID NO: 4371416 - DNA, 25 bp, Homo sapien
gagcactgatttccccagcgtcggg

SEQ ID NO: 4371417 - DNA, 25 bp, Homo sapien
aggcagacccctatccctgtcgaga

SEQ ID NO: 4371418 - DNA, 25 bp, Homo sapien
agcgggaagagcctctctgtgctcc

SEQ ID NO: 4371419 - DNA, 25 bp, Homo sapien
cttgcctaacgagggccaggcggct

SEQ ID NO: 4371420 - DNA, 25 bp, Homo sapien
gagaaaatatcctgtacattccatt

SEQ ID NO: 4371421 - DNA, 25 bp, Homo sapien
tgagcttggtagactaaaccttagg

SEQ ID NO: 4371422 - DNA, 25 bp, Homo sapien
tatcctgtacattccattaccttcc

SEQ ID NO: 4371423 - DNA, 25 bp, Homo sapien
ggtcaagaactgagcttggtagact

SEQ ID NO: 4371424 - DNA, 25 bp, Homo sapien
ccaatacaaggtagacttctgggtt

SEQ ID NO: 4371425 - DNA, 25 bp, Homo sapien
tcatatgttgaggtcttaaccttag

SEQ ID NO: 4371426 - DNA, 25 bp, Homo sapien
tcattagctcatgggaggtgggact

SEQ ID NO: 4371427 - DNA, 25 bp, Homo sapien
cccgggttttgcagccttgccgtga

SEQ ID NO: 4371428 - DNA, 25 bp, Homo sapien
aacctgggcaacagagcagtacgcc

SEQ ID NO: 4371429 - DNA, 25 bp, Homo sapien
atgatcaagccactgcactctaacc

SEQ ID NO: 4371430 - DNA, 25 bp, Homo sapien
ctaacctgggcaacagagcagtacg

SEQ ID NO: 4371431 - DNA, 25 bp, Homo sapien
cctgggcaacagagcagtacgccat

SEQ ID NO: 4371432 - DNA, 25 bp, Homo sapien
tctgcttcataatagctgtcatgag

SEQ ID NO: 4371433 - DNA, 25 bp, Homo sapien
catgagtcatgtccaataaaaacgt

SEQ ID NO: 4371434 - DNA, 25 bp, Homo sapien
acgtggttgcacaaacaaagttgga

SEQ ID NO: 4371435 - DNA, 25 bp, Homo sapien
cattaagtttaaacgtggttgcaca

SEQ ID NO: 4371436 - DNA, 25 bp, Homo sapien
cgggactcttgtggccttaacaaca

SEQ ID NO: 4371437 - DNA, 25 bp, Homo sapien
aaggtggtcgggactcttgtggcct

SEQ ID NO: 4371438 - DNA, 25 bp, Homo sapien
ctcttgtggccttaacaacagcttt

SEQ ID NO: 4371439 - DNA, 25 bp, Homo sapien
ggtcgggactcttgtggccttaaca

SEQ ID NO: 4371440 - DNA, 25 bp, Homo sapien
cattcatagatgatgccctggacac

SEQ ID NO: 4371441 - DNA, 25 bp, Homo sapien
tggtgtccggtaaaggttgtctcca

SEQ ID NO: 4371442 - DNA, 25 bp, Homo sapien
tccggtaaaggttgtctccattcat

SEQ ID NO: 4371443 - DNA, 25 bp, Homo sapien
gaaagttcaaggtcatggtgctggt

SEQ ID NO: 4371444 - DNA, 25 bp, Homo sapien
ccttgccagagaactttgtggttgg

SEQ ID NO: 4371445 - DNA, 25 bp, Homo sapien
ttagtttgccttgccagagaacttt

SEQ ID NO: 4371446 - DNA, 25 bp, Homo sapien
tggttggatgtctctgaaaggctcg

SEQ ID NO: 4371447 - DNA, 25 bp, Homo sapien
gggaaccgccagtgattagtttgcc

SEQ ID NO: 4371448 - DNA, 25 bp, Homo sapien
gaagtggctgcgaactcagagataa

SEQ ID NO: 4371449 - DNA, 25 bp, Homo sapien
tcgagtcagcatcgactccctgtga

SEQ ID NO: 4371450 - DNA, 25 bp, Homo sapien
cactgaaggccttgggcaattgtgc

SEQ ID NO: 4371451 - DNA, 25 bp, Homo sapien
gggcaattgtgccagccagaatcac

SEQ ID NO: 4371452 - DNA, 25 bp, Homo sapien
tataaactagcttcctacactggcc

SEQ ID NO: 4371453 - DNA, 25 bp, Homo sapien
cagaaggaggctcaatgcaagtatc

SEQ ID NO: 4371454 - DNA, 25 bp, Homo sapien
tcctggcatgtgctcggctgctgga

SEQ ID NO: 4371455 - DNA, 25 bp, Homo sapien
tgcgcggacttagccttcctaagaa

SEQ ID NO: 4371456 - DNA, 25 bp, Homo sapien
cagaatattcgcctctccagatgtc

SEQ ID NO: 4371457 - DNA, 25 bp, Homo sapien
tttactttcccgatagcctatgccc

SEQ ID NO: 4371458 - DNA, 25 bp, Homo sapien
atagcctatgcccaggtttctgagg

SEQ ID NO: 4371459 - DNA, 25 bp, Homo sapien
gacgtggcttcctggtgttgtaact

SEQ ID NO: 4371460 - DNA, 25 bp, Homo sapien
atctagagacccactgcagaagtga

SEQ ID NO: 4371461 - DNA, 25 bp, Homo sapien
tgagaattttgtcgacttagtgcca

SEQ ID NO: 4371462 - DNA, 25 bp, Homo sapien
gaaggcagggtcatggacatctaga

SEQ ID NO: 4371463 - DNA, 25 bp, Homo sapien
caagtattgtcctgctttgatgaaa

SEQ ID NO: 4371464 - DNA, 25 bp, Homo sapien
cagagtgcagaaagccttcttgcag

SEQ ID NO: 4371465 - DNA, 25 bp, Homo sapien
gagccagagtgcagaaagccttctt

SEQ ID NO: 4371466 - DNA, 25 bp, Homo sapien
caatgaggacctgagccagagtgca

SEQ ID NO: 4371467 - DNA, 25 bp, Homo sapien
gaaagccttcttgcagatcttccat

SEQ ID NO: 4371468 - DNA, 25 bp, Homo sapien
tatacatgagcaataagcctctgtc

SEQ ID NO: 4371469 - DNA, 25 bp, Homo sapien
ggccctggccataagctaaatgtaa

SEQ ID NO: 4371470 - DNA, 25 bp, Homo sapien
agtgacgcagtcaggcagcagtgtc

SEQ ID NO: 4371471 - DNA, 25 bp, Homo sapien
tgcagtgggcacataggtccaatcc

SEQ ID NO: 4371472 - DNA, 25 bp, Homo sapien
ggtttgtccaaggtcttgcactgac

SEQ ID NO: 4371473 - DNA, 25 bp, Homo sapien
gggtttgtccaaggtcttgcactga

SEQ ID NO: 4371474 - DNA, 25 bp, Homo sapien
cgggtttgtccaaggtcttgcactg

SEQ ID NO: 4371475 - DNA, 25 bp, Homo sapien
tgcaggctgttatcttgatgggaat

SEQ ID NO: 4371476 - DNA, 25 bp, Homo sapien
tcaggagcaggaggtaagaacagcc

SEQ ID NO: 4371477 - DNA, 25 bp, Homo sapien
cagcgtccttgggtactaaatgcaa

SEQ ID NO: 4371478 - DNA, 25 bp, Homo sapien
aaatgcaatgctatgtactccccag

SEQ ID NO: 4371479 - DNA, 25 bp, Homo sapien
ctggacagcttgcaaccacaagcaa

SEQ ID NO: 4371480 - DNA, 25 bp, Homo sapien
tactggagttgatctctggacctgg

SEQ ID NO: 4371481 - DNA, 25 bp, Homo sapien
aaccacaagcaacgggctgggtgca

SEQ ID NO: 4371482 - DNA, 25 bp, Homo sapien
gggttactggagttgatctctggac

SEQ ID NO: 4371483 - DNA, 25 bp, Homo sapien
ctcctaacttcgtgaatggcccgcc

SEQ ID NO: 4371484 - DNA, 25 bp, Homo sapien
taacttcgtgaatggcccgccttgg

SEQ ID NO: 4371485 - DNA, 25 bp, Homo sapien
tggacatgcccatatgaaagacaag

SEQ ID NO: 4371486 - DNA, 25 bp, Homo sapien
tattacataccctaatatgggccag

SEQ ID NO: 4371487 - DNA, 25 bp, Homo sapien
tgggccagacactcataggattagg

SEQ ID NO: 4371488 - DNA, 25 bp, Homo sapien
catgtgcaggccaggatttggctca

SEQ ID NO: 4371489 - DNA, 25 bp, Homo sapien
cagacagaaatcagactacacctac

SEQ ID NO: 4371490 - DNA, 25 bp, Homo sapien
gcatgacagacagaaatcagactac

SEQ ID NO: 4371491 - DNA, 25 bp, Homo sapien
aaaggcatgacagacagaaatcaga

SEQ ID NO: 4371492 - DNA, 25 bp, Homo sapien
tgacagacagaaatcagactacacc

SEQ ID NO: 4371493 - DNA, 25 bp, Homo sapien
agaaaagtgatagctgatacaggga

SEQ ID NO: 4371494 - DNA, 25 bp, Homo sapien
cagaaaagtgatagctgatacaggg

SEQ ID NO: 4371495 - DNA, 25 bp, Homo sapien
tattgaacatagatggcaaaagcag

SEQ ID NO: 4371496 - DNA, 25 bp, Homo sapien
aagcaggcagggtaggaattttctc

SEQ ID NO: 4371497 - DNA, 25 bp, Homo sapien
cacctggaatcaaagagcccaagca

SEQ ID NO: 4371498 - DNA, 25 bp, Homo sapien
gcccaagcagttttgcatgccttaa

SEQ ID NO: 4371499 - DNA, 25 bp, Homo sapien
ttcatgatgagttaagaaatggctc

SEQ ID NO: 4371500 - DNA, 25 bp, Homo sapien
caaacccttcagtatgcccatgcat

SEQ ID NO: 4371501 - DNA, 25 bp, Homo sapien
tagggaagtgatgctccccttctca

SEQ ID NO: 4371502 - DNA, 25 bp, Homo sapien
ccagctgcaaaggacaaatgtaatg

SEQ ID NO: 4371503 - DNA, 25 bp, Homo sapien
agttcgtgaccgacctgggcaacgt

SEQ ID NO: 4371504 - DNA, 25 bp, Homo sapien
gttcgtgaccgacctgggcaacgta

SEQ ID NO: 4371505 - DNA, 25 bp, Homo sapien
ttcgtgaccgacctgggcaacgtag

SEQ ID NO: 4371506 - DNA, 25 bp, Homo sapien
atctcaaactaccatctaatggagg

SEQ ID NO: 4371507 - DNA, 25 bp, Homo sapien
gaagacttacaatagctcacaatgc

SEQ ID NO: 4371508 - DNA, 25 bp, Homo sapien
gtttgtcagaaaaccagtacagcca

SEQ ID NO: 4371509 - DNA, 25 bp, Homo sapien
aatgtcacattgttgggcgactccc

SEQ ID NO: 4371510 - DNA, 25 bp, Homo sapien
tatttaaataaggtatttgaagcag

SEQ ID NO: 4371511 - DNA, 25 bp, Homo sapien
ttatttaaataaggtatttgaagca

SEQ ID NO: 4371512 - DNA, 25 bp, Homo sapien
accacttaaatagaacagtgtctgc

SEQ ID NO: 4371513 - DNA, 25 bp, Homo sapien
cacgctccagttcttatagcaataa

SEQ ID NO: 4371514 - DNA, 25 bp, Homo sapien
gtgttaagaaagtattcaccatcat

SEQ ID NO: 4371515 - DNA, 25 bp, Homo sapien
tttttacagaattcacgctccagtt

SEQ ID NO: 4371516 - DNA, 25 bp, Homo sapien
ttgattgagtccatacatcacactg

SEQ ID NO: 4371517 - DNA, 25 bp, Homo sapien
tgtcctcagtgttctagagacctag

SEQ ID NO: 4371518 - DNA, 25 bp, Homo sapien
ccaagaactgatgcaggctcaaagg

SEQ ID NO: 4371519 - DNA, 25 bp, Homo sapien
cacactgtagataggcaaaaccaag

SEQ ID NO: 4371520 - DNA, 25 bp, Homo sapien
gacctctcaaaggagcgagatcgtt

SEQ ID NO: 4371521 - DNA, 25 bp, Homo sapien
atgtcctgagcgactgccaccatgg

SEQ ID NO: 4371522 - DNA, 25 bp, Homo sapien
catggtgcttgcttttatgggacct

SEQ ID NO: 4371523 - DNA, 25 bp, Homo sapien
cgagatcgttcacgcctgtccctat

SEQ ID NO: 4371524 - DNA, 25 bp, Homo sapien
ctgagatcgagaacgagattttttc

SEQ ID NO: 4371525 - DNA, 25 bp, Homo sapien
tccttttatgaccatgtctgtttga

SEQ ID NO: 4371526 - DNA, 25 bp, Homo sapien
ttccttttatgaccatgtctgtttg

SEQ ID NO: 4371527 - DNA, 25 bp, Homo sapien
agatcgagaacgagattttttcctt

SEQ ID NO: 4371528 - DNA, 25 bp, Homo sapien
tgatgtcttcgagggctttcactgt

SEQ ID NO: 4371529 - DNA, 25 bp, Homo sapien
tcttgatctcgagctgtatgttcca

SEQ ID NO: 4371530 - DNA, 25 bp, Homo sapien
gcttggccttaaggtgaggagaacc

SEQ ID NO: 4371531 - DNA, 25 bp, Homo sapien
gctgtatgttccagatcgactccgc

SEQ ID NO: 4371532 - DNA, 25 bp, Homo sapien
cagattattccggtggttgctcata

SEQ ID NO: 4371533 - DNA, 25 bp, Homo sapien
taagtatctcccacatgttcaaaag

SEQ ID NO: 4371534 - DNA, 25 bp, Homo sapien
gggtagctcctacacttctccaaaa

SEQ ID NO: 4371535 - DNA, 25 bp, Homo sapien
tatggccctcaagcactttgtgggt

SEQ ID NO: 4371536 - DNA, 25 bp, Homo sapien
aacgtgatcgtgttcttgacctcga

SEQ ID NO: 4371537 - DNA, 25 bp, Homo sapien
tggagtatgtgatctagaacgtgat

SEQ ID NO: 4371538 - DNA, 25 bp, Homo sapien
gatcgacttgcacttctgctatttc

SEQ ID NO: 4371539 - DNA, 25 bp, Homo sapien
tgttcttgacctcgatcgacttgca

SEQ ID NO: 4371540 - DNA, 25 bp, Homo sapien
tcttcacattaatggagattggtga

SEQ ID NO: 4371541 - DNA, 25 bp, Homo sapien
tcttttttgactgtcttcacattaa

SEQ ID NO: 4371542 - DNA, 25 bp, Homo sapien
tgtctatcctcaggttcttttttga

SEQ ID NO: 4371543 - DNA, 25 bp, Homo sapien
aagcctgttgtctatcctcaggttc

SEQ ID NO: 4371544 - DNA, 25 bp, Homo sapien
taacaacatgttaactactggattt

SEQ ID NO: 4371545 - DNA, 25 bp, Homo sapien
ctggatttaacagagggccaaaagt

SEQ ID NO: 4371546 - DNA, 25 bp, Homo sapien
ataacaacatgttaactactggatt

SEQ ID NO: 4371547 - DNA, 25 bp, Homo sapien
tcagtgcccccaagtcattttaatt

SEQ ID NO: 4371548 - DNA, 25 bp, Homo sapien
agctctctaataaagacacactttc

SEQ ID NO: 4371549 - DNA, 25 bp, Homo sapien
tttcagtgcccccaagtcattttaa

SEQ ID NO: 4371550 - DNA, 25 bp, Homo sapien
ctttcaaatgtaaaagctctctaat

SEQ ID NO: 4371551 - DNA, 25 bp, Homo sapien
tggcttggaggctggagaaaatcca

SEQ ID NO: 4371552 - DNA, 25 bp, Homo sapien
atggcttggaggctggagaaaatcc

SEQ ID NO: 4371553 - DNA, 25 bp, Homo sapien
ggcttggaggctggagaaaatccac

SEQ ID NO: 4371554 - DNA, 25 bp, Homo sapien
ttaatttggcttcttgtaaggctac

SEQ ID NO: 4371555 - DNA, 25 bp, Homo sapien
agggctggagttccatccggattca

SEQ ID NO: 4371556 - DNA, 25 bp, Homo sapien
gagttccatccggattcaatccctt

SEQ ID NO: 4371557 - DNA, 25 bp, Homo sapien
taatttggcttcttgtaaggctact

SEQ ID NO: 4371558 - DNA, 25 bp, Homo sapien
agtagcttggactcttagcatgttg

SEQ ID NO: 4371559 - DNA, 25 bp, Homo sapien
tcttagcatgttggcacaaacgagt

SEQ ID NO: 4371560 - DNA, 25 bp, Homo sapien
cttggactcttagcatgttggcaca

SEQ ID NO: 4371561 - DNA, 25 bp, Homo sapien
tgttggcacaaacgagtaaatagag

SEQ ID NO: 4371562 - DNA, 25 bp, Homo sapien
ggatttcctcttctgtagtaccaaa

SEQ ID NO: 4371563 - DNA, 25 bp, Homo sapien
aaccaatggggacgagttggcaacg

SEQ ID NO: 4371564 - DNA, 25 bp, Homo sapien
aatggggacgagttggcaacggaat

SEQ ID NO: 4371565 - DNA, 25 bp, Homo sapien
gatttcctcttctgtagtaccaaaa

SEQ ID NO: 4371566 - DNA, 25 bp, Homo sapien
gctaaatctgtattggaaccaccga

SEQ ID NO: 4371567 - DNA, 25 bp, Homo sapien
ctgtattggaaccaccgaaaatttg

SEQ ID NO: 4371568 - DNA, 25 bp, Homo sapien
gaacaaaatgggaaatatacaccta

SEQ ID NO: 4371569 - DNA, 25 bp, Homo sapien
ccaccgaaaatttgtgtgatttatc

SEQ ID NO: 4371570 - DNA, 25 bp, Homo sapien
tgcaaggtagatgcaagcacatgct

SEQ ID NO: 4371571 - DNA, 25 bp, Homo sapien
ggttgaaatcgaacaaacacattgg

SEQ ID NO: 4371572 - DNA, 25 bp, Homo sapien
agcacatgctatagtctctggttga

SEQ ID NO: 4371573 - DNA, 25 bp, Homo sapien
acattggttcgaagactgtcattca

SEQ ID NO: 4371574 - DNA, 25 bp, Homo sapien
aaaggcattttcagtaagtaccaag

SEQ ID NO: 4371575 - DNA, 25 bp, Homo sapien
gaaacagtagttgtggctgaaccac

SEQ ID NO: 4371576 - DNA, 25 bp, Homo sapien
tcctatatatgagcgaagccctttt

SEQ ID NO: 4371577 - DNA, 25 bp, Homo sapien
taagcttgcatgtaaacaaaccagt

SEQ ID NO: 4371578 - DNA, 25 bp, Homo sapien
ttaagccagtgtgggaactggtgcc

SEQ ID NO: 4371579 - DNA, 25 bp, Homo sapien
ccgcaatacagccaagcagttatat

SEQ ID NO: 4371580 - DNA, 25 bp, Homo sapien
gcaagtttgtcgtctcctttggtag

SEQ ID NO: 4371581 - DNA, 25 bp, Homo sapien
cctttggtagtattcatgctataca

SEQ ID NO: 4371582 - DNA, 25 bp, Homo sapien
tagttacaagtatacattaaataca

SEQ ID NO: 4371583 - DNA, 25 bp, Homo sapien
atacataggcatgtcaaatagttac

SEQ ID NO: 4371584 - DNA, 25 bp, Homo sapien
tctatcaaaaatgaactattcattt

SEQ ID NO: 4371585 - DNA, 25 bp, Homo sapien
ttcattttgatagttacaagtatac

SEQ ID NO: 4371586 - DNA, 25 bp, Homo sapien
ccacttcagtgaatctcggatgaga

SEQ ID NO: 4371587 - DNA, 25 bp, Homo sapien
gccagatggatatggaccacttcag

SEQ ID NO: 4371588 - DNA, 25 bp, Homo sapien
gagagcagggtagccaatcaggcca

SEQ ID NO: 4371589 - DNA, 25 bp, Homo sapien
tttgacaccccgacagaactagaag

SEQ ID NO: 4371590 - DNA, 25 bp, Homo sapien
ctatgacttaccatcatggactacc

SEQ ID NO: 4371591 - DNA, 25 bp, Homo sapien
tttcctggctaggaaagaaatctaa

SEQ ID NO: 4371592 - DNA, 25 bp, Homo sapien
gggtttgattacgttcacattctaa

SEQ ID NO: 4371593 - DNA, 25 bp, Homo sapien
cacattctaagacttgtaaatacat

SEQ ID NO: 4371594 - DNA, 25 bp, Homo sapien
gaaccagggtttgattacgttcaca

SEQ ID NO: 4371595 - DNA, 25 bp, Homo sapien
gttcacattctaagacttgtaaata

SEQ ID NO: 4371596 - DNA, 25 bp, Homo sapien
tggtaacagtgagcagccaacacac

SEQ ID NO: 4371597 - DNA, 25 bp, Homo sapien
tgggcaccgtgctagattatttcac

SEQ ID NO: 4371598 - DNA, 25 bp, Homo sapien
gacccgggtaactcactctatggct

SEQ ID NO: 4371599 - DNA, 25 bp, Homo sapien
gaatgtttttcgatgaagcctgaac

SEQ ID NO: 4371600 - DNA, 25 bp, Homo sapien
aatgtagttctgatcaaggatcagg

SEQ ID NO: 4371601 - DNA, 25 bp, Homo sapien
atgtagttctgatcaaggatcaggg

SEQ ID NO: 4371602 - DNA, 25 bp, Homo sapien
ctcctttagcaccctcctctctgct

SEQ ID NO: 4371603 - DNA, 25 bp, Homo sapien
aactcctttagcaccctcctctctg

SEQ ID NO: 4371604 - DNA, 25 bp, Homo sapien
ctatagtttgtaagaaataaaatca

SEQ ID NO: 4371605 - DNA, 25 bp, Homo sapien
aaaattttatttgtggcatctccat

SEQ ID NO: 4371606 - DNA, 25 bp, Homo sapien
ctgttttgcacatccaaaaaatttt

SEQ ID NO: 4371607 - DNA, 25 bp, Homo sapien
taaaatcaaaactgttttgcacatc

SEQ ID NO: 4371608 - DNA, 25 bp, Homo sapien
aagcattaatcttgtgctgtccaag

SEQ ID NO: 4371609 - DNA, 25 bp, Homo sapien
tatacatctacgagactaagttcct

SEQ ID NO: 4371610 - DNA, 25 bp, Homo sapien
taaactcctgcaaacaagttaaagc

SEQ ID NO: 4371611 - DNA, 25 bp, Homo sapien
aacgatagcatgatttgtcatcaca

SEQ ID NO: 4371612 - DNA, 25 bp, Homo sapien
gatccaggcccaaatttggtcaggg

SEQ ID NO: 4371613 - DNA, 25 bp, Homo sapien
caaagtaatgtgctccaggctggtc

SEQ ID NO: 4371614 - DNA, 25 bp, Homo sapien
catattcaagggctctgtaccagac

SEQ ID NO: 4371615 - DNA, 25 bp, Homo sapien
tatttaaaactccacgtgacccatg

SEQ ID NO: 4371616 - DNA, 25 bp, Homo sapien
gagtctttgctctaggcagaataca

SEQ ID NO: 4371617 - DNA, 25 bp, Homo sapien
gataaaatagctccagtgttacagc

SEQ ID NO: 4371618 - DNA, 25 bp, Homo sapien
tctatttcaatacatgcaccgaagg

SEQ ID NO: 4371619 - DNA, 25 bp, Homo sapien
ccgaaggttagaaaacaatctgcga

SEQ ID NO: 4371620 - DNA, 25 bp, Homo sapien
tcccaaatcagacttaatgatgcca

SEQ ID NO: 4371621 - DNA, 25 bp, Homo sapien
cttgcaatccagacagaagacggta

SEQ ID NO: 4371622 - DNA, 25 bp, Homo sapien
gaagacggtatcatcaaaatcccta

SEQ ID NO: 4371623 - DNA, 25 bp, Homo sapien
gaactgccttcaaatggtgatataa

SEQ ID NO: 4371624 - DNA, 25 bp, Homo sapien
gaaaattttaatacgctgcatctca

SEQ ID NO: 4371625 - DNA, 25 bp, Homo sapien
tgaagagaccaatgacctacaagca

SEQ ID NO: 4371626 - DNA, 25 bp, Homo sapien
aactgaaggaggaataggccaaaca

SEQ ID NO: 4371627 - DNA, 25 bp, Homo sapien
taattctcaatgtgtagccaggctg

SEQ ID NO: 4371628 - DNA, 25 bp, Homo sapien
ctccttggggattttcgatacttca

SEQ ID NO: 4371629 - DNA, 25 bp, Homo sapien
ctgttagtccccgattccagtgacc

SEQ ID NO: 4371630 - DNA, 25 bp, Homo sapien
tggggattttcgatacttcactcac

SEQ ID NO: 4371631 - DNA, 25 bp, Homo sapien
tccagtgacctattctcagagcact

SEQ ID NO: 4371632 - DNA, 25 bp, Homo sapien
agcttcatctctatgtaccactcca

SEQ ID NO: 4371633 - DNA, 25 bp, Homo sapien
gacgacagcttcatctctatgtacc

SEQ ID NO: 4371634 - DNA, 25 bp, Homo sapien
gacagcttcatctctatgtaccact

SEQ ID NO: 4371635 - DNA, 25 bp, Homo sapien
catgacgacagcttcatctctatgt

SEQ ID NO: 4371636 - DNA, 25 bp, Homo sapien
aggctttggtaaatgtagctggtcg

SEQ ID NO: 4371637 - DNA, 25 bp, Homo sapien
tcacccaggctttggtaaatgtagc

SEQ ID NO: 4371638 - DNA, 25 bp, Homo sapien
caggctttggtaaatgtagctggtc

SEQ ID NO: 4371639 - DNA, 25 bp, Homo sapien
acccaggctttggtaaatgtagctg

SEQ ID NO: 4371640 - DNA, 25 bp, Homo sapien
aatcttaagccacaggcctggcttc

SEQ ID NO: 4371641 - DNA, 25 bp, Homo sapien
agaatacactcacacttgagccaaa

SEQ ID NO: 4371642 - DNA, 25 bp, Homo sapien
ttaatcttaagccacaggcctggct

SEQ ID NO: 4371643 - DNA, 25 bp, Homo sapien
cttgagccaaatgtactccctttct

SEQ ID NO: 4371644 - DNA, 25 bp, Homo sapien
ttcctcttaactggcggaggtggtg

SEQ ID NO: 4371645 - DNA, 25 bp, Homo sapien
taggtgcttcttcgatttttgatgc

SEQ ID NO: 4371646 - DNA, 25 bp, Homo sapien
gaggtggtggaatacattaatcaca

SEQ ID NO: 4371647 - DNA, 25 bp, Homo sapien
ttttgatgcaagattaatacaagcc

SEQ ID NO: 4371648 - DNA, 25 bp, Homo sapien
tgtttgacgaaagatttggagtaga

SEQ ID NO: 4371649 - DNA, 25 bp, Homo sapien
ctcgaaactgtgtttgacgaaagat

SEQ ID NO: 4371650 - DNA, 25 bp, Homo sapien
ttggagtagaaaaaacgatgaaaca

SEQ ID NO: 4371651 - DNA, 25 bp, Homo sapien
gatgaaacaacacctgccccgttgc

SEQ ID NO: 4371652 - DNA, 25 bp, Homo sapien
gaaacttccgagtacaggcgatcgc

SEQ ID NO: 4371653 - DNA, 25 bp, Homo sapien
caggtcgagcccatcctgcatggat

SEQ ID NO: 4371654 - DNA, 25 bp, Homo sapien
cgtaagtccgtctcactgggcaggt

SEQ ID NO: 4371655 - DNA, 25 bp, Homo sapien
tcctccggaatcagagagtggtcga

SEQ ID NO: 4371656 - DNA, 25 bp, Homo sapien
ctcccgtcgtggtcgtcgtcgtggt

SEQ ID NO: 4371657 - DNA, 25 bp, Homo sapien
gctgtcgaatgaggcccggacgcca

SEQ ID NO: 4371658 - DNA, 25 bp, Homo sapien
cagcagtagctgtcgaatgaggccc

SEQ ID NO: 4371659 - DNA, 25 bp, Homo sapien
gctgcggcagcagtagctgtcgaat

SEQ ID NO: 4371660 - DNA, 25 bp, Homo sapien
agtagctgtcgaatgaggcccggac

SEQ ID NO: 4371661 - DNA, 25 bp, Homo sapien
agtcttagcgagccgcacgcaagcc

SEQ ID NO: 4371662 - DNA, 25 bp, Homo sapien
tagcgagccgcacgcaagcccaacg

SEQ ID NO: 4371663 - DNA, 25 bp, Homo sapien
gcgagccgcacgcaagcccaacgca

SEQ ID NO: 4371664 - DNA, 25 bp, Homo sapien
cttagcgagccgcacgcaagcccaa

SEQ ID NO: 4371665 - DNA, 25 bp, Homo sapien
tatcggttcccaaatgaaagctccc

SEQ ID NO: 4371666 - DNA, 25 bp, Homo sapien
tacagtatttgaagaacacagggct

SEQ ID NO: 4371667 - DNA, 25 bp, Homo sapien
aagtgaccctcaaggaatctggaga

SEQ ID NO: 4371668 - DNA, 25 bp, Homo sapien
tgtgatagccacacgaataacggag

SEQ ID NO: 4371669 - DNA, 25 bp, Homo sapien
cctgggagtctctattcatacatgg

SEQ ID NO: 4371670 - DNA, 25 bp, Homo sapien
tagtcttagggcgaggacttgacag

SEQ ID NO: 4371671 - DNA, 25 bp, Homo sapien
tcatacatggttacctaccgcgggt

SEQ ID NO: 4371672 - DNA, 25 bp, Homo sapien
gaggtaatttgattatgcctgggag

SEQ ID NO: 4371673 - DNA, 25 bp, Homo sapien
catcacgttttactcttgacgctca

SEQ ID NO: 4371674 - DNA, 25 bp, Homo sapien
cagggaggtactctctgaaatttcc

SEQ ID NO: 4371675 - DNA, 25 bp, Homo sapien
aaagcgataccccaaagacagaggc

SEQ ID NO: 4371676 - DNA, 25 bp, Homo sapien
gacagaggctttagaagctgcctca

SEQ ID NO: 4371677 - DNA, 25 bp, Homo sapien
gccttatcagttgattaagtgaacc

SEQ ID NO: 4371678 - DNA, 25 bp, Homo sapien
cgcacccggccttatcagttgatta

SEQ ID NO: 4371679 - DNA, 25 bp, Homo sapien
tgaaccttcagtgggcaaagttgtt

SEQ ID NO: 4371680 - DNA, 25 bp, Homo sapien
gattaagtgaaccttcagtgggcaa

SEQ ID NO: 4371681 - DNA, 25 bp, Homo sapien
aagagagtgtaattatggtgctggc

SEQ ID NO: 4371682 - DNA, 25 bp, Homo sapien
gttggaggaatacataggagtagtc

SEQ ID NO: 4371683 - DNA, 25 bp, Homo sapien
aatctttccacctcaatatttatga

SEQ ID NO: 4371684 - DNA, 25 bp, Homo sapien
cttcgagtgattggaatgtacagcc

SEQ ID NO: 4371685 - DNA, 25 bp, Homo sapien
atccagcagatagtggtcttttgga

SEQ ID NO: 4371686 - DNA, 25 bp, Homo sapien
tccagcagatagtggtcttttggat

SEQ ID NO: 4371687 - DNA, 25 bp, Homo sapien
catccactatccagcagatagtggt

SEQ ID NO: 4371688 - DNA, 25 bp, Homo sapien
ccagcagatagtggtcttttggatg

SEQ ID NO: 4371689 - DNA, 25 bp, Homo sapien
ctcagctccgtgagcgttatagcag

SEQ ID NO: 4371690 - DNA, 25 bp, Homo sapien
cgtggtgacccctgtgttgctctcc

SEQ ID NO: 4371691 - DNA, 25 bp, Homo sapien
tccgtgagcgttatagcagctccaa

SEQ ID NO: 4371692 - DNA, 25 bp, Homo sapien
gcgtggtgacccctgtgttgctctc

SEQ ID NO: 4371693 - DNA, 25 bp, Homo sapien
cagcacctattggttcttcatgcca

SEQ ID NO: 4371694 - DNA, 25 bp, Homo sapien
ttgtccagcacctattggttcttca

SEQ ID NO: 4371695 - DNA, 25 bp, Homo sapien
tccagcacctattggttcttcatgc

SEQ ID NO: 4371696 - DNA, 25 bp, Homo sapien
gtccagcacctattggttcttcatg

SEQ ID NO: 4371697 - DNA, 25 bp, Homo sapien
cacagtcaacccagagctggcagtc

SEQ ID NO: 4371698 - DNA, 25 bp, Homo sapien
cagtcaacccagagctggcagtctg

SEQ ID NO: 4371699 - DNA, 25 bp, Homo sapien
agtcaacccagagctggcagtctgg

SEQ ID NO: 4371700 - DNA, 25 bp, Homo sapien
tccacagtcaacccagagctggcag

SEQ ID NO: 4371701 - DNA, 25 bp, Homo sapien
ctatctccagctgcagccgagtgac

SEQ ID NO: 4371702 - DNA, 25 bp, Homo sapien
gttcttcagaggctggcacgtggcc

SEQ ID NO: 4371703 - DNA, 25 bp, Homo sapien
aggtcctcaatggtcttgaaataat

SEQ ID NO: 4371704 - DNA, 25 bp, Homo sapien
cctcaatggtcttgaaataatggct

SEQ ID NO: 4371705 - DNA, 25 bp, Homo sapien
tcaatggtcttgaaataatggctcc

SEQ ID NO: 4371706 - DNA, 25 bp, Homo sapien
gtcctcaatggtcttgaaataatgg

SEQ ID NO: 4371707 - DNA, 25 bp, Homo sapien
caggtggttgtcaggttttgcatgg

SEQ ID NO: 4371708 - DNA, 25 bp, Homo sapien
gtaggagaccaggtggttgtcaggt

SEQ ID NO: 4371709 - DNA, 25 bp, Homo sapien
gaccaggtggttgtcaggttttgca

SEQ ID NO: 4371710 - DNA, 25 bp, Homo sapien
ggttgtcaggttttgcatggtctcc

SEQ ID NO: 4371711 - DNA, 25 bp, Homo sapien
ccagaaccccggccatccccgcagt

SEQ ID NO: 4371712 - DNA, 25 bp, Homo sapien
aaccccggccatccccgcagtcagg

SEQ ID NO: 4371713 - DNA, 25 bp, Homo sapien
agaaccccggccatccccgcagtca

SEQ ID NO: 4371714 - DNA, 25 bp, Homo sapien
ggccatccccgcagtcaggcccccg

SEQ ID NO: 4371715 - DNA, 25 bp, Homo sapien
gacatggagattcggcagccagagc

SEQ ID NO: 4371716 - DNA, 25 bp, Homo sapien
cgggacatggagattcggcagccag

SEQ ID NO: 4371717 - DNA, 25 bp, Homo sapien
ggcgcctgcacagacgctggccatg

SEQ ID NO: 4371718 - DNA, 25 bp, Homo sapien
cagccagagctcccggcgcctgcac

SEQ ID NO: 4371719 - DNA, 25 bp, Homo sapien
cggtagttggtgtagaaggcggagt

SEQ ID NO: 4371720 - DNA, 25 bp, Homo sapien
gttggtgtagaaggcggagtgagtg

SEQ ID NO: 4371721 - DNA, 25 bp, Homo sapien
tagaaggcggagtgagtggtgaagc

SEQ ID NO: 4371722 - DNA, 25 bp, Homo sapien
gtgtagaaggcggagtgagtggtga

SEQ ID NO: 4371723 - DNA, 25 bp, Homo sapien
tctgagatctgttcccagtggacct

SEQ ID NO: 4371724 - DNA, 25 bp, Homo sapien
tgtatctggcagtcatttccaggag

SEQ ID NO: 4371725 - DNA, 25 bp, Homo sapien
cacaagcataggagggagaagtctg

SEQ ID NO: 4371726 - DNA, 25 bp, Homo sapien
gccatccagggcagttccataattt

SEQ ID NO: 4371727 - DNA, 25 bp, Homo sapien
aagacaaatgttaaggtgaccagca

SEQ ID NO: 4371728 - DNA, 25 bp, Homo sapien
aattaagtccccagctagaaggagc

SEQ ID NO: 4371729 - DNA, 25 bp, Homo sapien
gaaggagctacactcaatacacaga

SEQ ID NO: 4371730 - DNA, 25 bp, Homo sapien
ggagcacctgactttatgcatgagc

SEQ ID NO: 4371731 - DNA, 25 bp, Homo sapien
taatgaacacttaggcatacgctgc

SEQ ID NO: 4371732 - DNA, 25 bp, Homo sapien
tttgtaatgaacacttaggcatacg

SEQ ID NO: 4371733 - DNA, 25 bp, Homo sapien
gatttgtaatgaacacttaggcata

SEQ ID NO: 4371734 - DNA, 25 bp, Homo sapien
tgtaatgaacacttaggcatacgct

SEQ ID NO: 4371735 - DNA, 25 bp, Homo sapien
tcagagcctctcctagcatttatga

SEQ ID NO: 4371736 - DNA, 25 bp, Homo sapien
tttctgcctgaaccaagaccaactg

SEQ ID NO: 4371737 - DNA, 25 bp, Homo sapien
gatgttctacgttttgccgaaagcc

SEQ ID NO: 4371738 - DNA, 25 bp, Homo sapien
aaatagagattgtgacttcttggcc

SEQ ID NO: 4371739 - DNA, 25 bp, Homo sapien
aaaagcctgcggcacccagtgtttc

SEQ ID NO: 4371740 - DNA, 25 bp, Homo sapien
ggcacccagtgtttcaaggtggtct

SEQ ID NO: 4371741 - DNA, 25 bp, Homo sapien
attcaaggactagctaagcaggtca

SEQ ID NO: 4371742 - DNA, 25 bp, Homo sapien
ggactagctaagcaggtcagaccct

SEQ ID NO: 4371743 - DNA, 25 bp, Homo sapien
cggaaggactctggcgatatcataa

SEQ ID NO: 4371744 - DNA, 25 bp, Homo sapien
gatatcataatcgtcacaagccctg

SEQ ID NO: 4371745 - DNA, 25 bp, Homo sapien
aagccaggaacgatcgcggtcagct

SEQ ID NO: 4371746 - DNA, 25 bp, Homo sapien
gagctcagtggtagtctgctgccta

SEQ ID NO: 4371747 - DNA, 25 bp, Homo sapien
gagcggctcaaaagccggaaaactg

SEQ ID NO: 4371748 - DNA, 25 bp, Homo sapien
ggactcgccggaagagcggctcaaa

SEQ ID NO: 4371749 - DNA, 25 bp, Homo sapien
aaaactggcaaatccgagtctcccg

SEQ ID NO: 4371750 - DNA, 25 bp, Homo sapien
aaactggcaaatccgagtctcccgg

SEQ ID NO: 4371751 - DNA, 25 bp, Homo sapien
agcgttttacccttgcgcggccgtg

SEQ ID NO: 4371752 - DNA, 25 bp, Homo sapien
ttagttcggctctattgccgcgagc

SEQ ID NO: 4371753 - DNA, 25 bp, Homo sapien
gcggcgccgcctcttgtgacgtaag

SEQ ID NO: 4371754 - DNA, 25 bp, Homo sapien
tgacgtaagccgcagaatcctctgt

SEQ ID NO: 4371755 - DNA, 25 bp, Homo sapien
actgcaaaatgtcttcgctgttagg

SEQ ID NO: 4371756 - DNA, 25 bp, Homo sapien
cgttctctcggcgtgtgaactggga

SEQ ID NO: 4371757 - DNA, 25 bp, Homo sapien
tgccagccatatgaaatgacaactg

SEQ ID NO: 4371758 - DNA, 25 bp, Homo sapien
ggctgggaagtataatgcgcattct

SEQ ID NO: 4371759 - DNA, 25 bp, Homo sapien
taaagaccaaatgaaaatccagctg

SEQ ID NO: 4371760 - DNA, 25 bp, Homo sapien
ctaaagaccaaatgaaaatccagct

SEQ ID NO: 4371761 - DNA, 25 bp, Homo sapien
aagaccaaatgaaaatccagctgca

SEQ ID NO: 4371762 - DNA, 25 bp, Homo sapien
aactaaagaccaaatgaaaatccag

SEQ ID NO: 4371763 - DNA, 25 bp, Homo sapien
cccgcttgaatactgccgccgttag

SEQ ID NO: 4371764 - DNA, 25 bp, Homo sapien
gccgcggcccgcttgaatactgccg

SEQ ID NO: 4371765 - DNA, 25 bp, Homo sapien
cgcttgaatactgccgccgttagga

SEQ ID NO: 4371766 - DNA, 25 bp, Homo sapien
ggcccgcttgaatactgccgccgtt

SEQ ID NO: 4371767 - DNA, 25 bp, Homo sapien
agggcctcttttcttgtcttccact

SEQ ID NO: 4371768 - DNA, 25 bp, Homo sapien
ttccactctcacttgtcttttctcc

SEQ ID NO: 4371769 - DNA, 25 bp, Homo sapien
tgtcttccactctcacttgtctttt

SEQ ID NO: 4371770 - DNA, 25 bp, Homo sapien
cttgtcttccactctcacttgtctt

SEQ ID NO: 4371771 - DNA, 25 bp, Homo sapien
gatggtggagccaactttagtttcc

SEQ ID NO: 4371772 - DNA, 25 bp, Homo sapien
ttcctgagtttcccttgtctccact

SEQ ID NO: 4371773 - DNA, 25 bp, Homo sapien
cttcctctatctctttaacttctgt

SEQ ID NO: 4371774 - DNA, 25 bp, Homo sapien
gcttcctctatctctttaacttctg

SEQ ID NO: 4371775 - DNA, 25 bp, Homo sapien
acaattctggatcaccttcctctgc

SEQ ID NO: 4371776 - DNA, 25 bp, Homo sapien
ttgcttttgtataattgtggtctgg

SEQ ID NO: 4371777 - DNA, 25 bp, Homo sapien
ctggagaattgagagtggattttgc

SEQ ID NO: 4371778 - DNA, 25 bp, Homo sapien
tgcttttgtataattgtggtctggg

SEQ ID NO: 4371779 - DNA, 25 bp, Homo sapien
gctctgtgggggtaaatcatctctg

SEQ ID NO: 4371780 - DNA, 25 bp, Homo sapien
cctccaaccagggatctgggagcaa

SEQ ID NO: 4371781 - DNA, 25 bp, Homo sapien
aacatgtgggtaagacaccctctgc

SEQ ID NO: 4371782 - DNA, 25 bp, Homo sapien
tctgggagcaacatgtgggtaagac

SEQ ID NO: 4371783 - DNA, 25 bp, Homo sapien
caaccagggatctgggagcaacatg

SEQ ID NO: 4371784 - DNA, 25 bp, Homo sapien
actgccttttgtaacaacattggct

SEQ ID NO: 4371785 - DNA, 25 bp, Homo sapien
ttcgtatgacatagaggacattggt

SEQ ID NO: 4371786 - DNA, 25 bp, Homo sapien
caacattggctttcgtatgacatag

SEQ ID NO: 4371787 - DNA, 25 bp, Homo sapien
tgtaacaacattggctttcgtatga

SEQ ID NO: 4371788 - DNA, 25 bp, Homo sapien
ggtctagtgaggcataacacacaaa

SEQ ID NO: 4371789 - DNA, 25 bp, Homo sapien
gaacattccatttaaccatgtggga

SEQ ID NO: 4371790 - DNA, 25 bp, Homo sapien
gaaaattccatataactaagaggag

SEQ ID NO: 4371791 - DNA, 25 bp, Homo sapien
aaacgagagaactttaagtctatca

SEQ ID NO: 4371792 - DNA, 25 bp, Homo sapien
cagaagagttgccttctgagatgct

SEQ ID NO: 4371793 - DNA, 25 bp, Homo sapien
gatttttaatgatcacagcaaatgc

SEQ ID NO: 4371794 - DNA, 25 bp, Homo sapien
ccaatgtgccagtacccatttgggc

SEQ ID NO: 4371795 - DNA, 25 bp, Homo sapien
taaaaagcgagttcataggaacacc

SEQ ID NO: 4371796 - DNA, 25 bp, Homo sapien
gccattcagggctggcttccccagc

SEQ ID NO: 4371797 - DNA, 25 bp, Homo sapien
gtagttctgccattcagggctggct

SEQ ID NO: 4371798 - DNA, 25 bp, Homo sapien
tttgtagttctgccattcagggctg

SEQ ID NO: 4371799 - DNA, 25 bp, Homo sapien
tgccattcagggctggcttccccag

SEQ ID NO: 4371800 - DNA, 25 bp, Homo sapien
tcactccgcttgtggctttggacac

SEQ ID NO: 4371801 - DNA, 25 bp, Homo sapien
gttctccagcttctttgctgactcc

SEQ ID NO: 4371802 - DNA, 25 bp, Homo sapien
tccacactctctcttcgttctccag

SEQ ID NO: 4371803 - DNA, 25 bp, Homo sapien
ttggacactgctttttctccacact

SEQ ID NO: 4371804 - DNA, 25 bp, Homo sapien
caaggctccgagcttcattcttcat

SEQ ID NO: 4371805 - DNA, 25 bp, Homo sapien
ccgctgcaaggctccgagcttcatt

SEQ ID NO: 4371806 - DNA, 25 bp, Homo sapien
tcagataaagttcttcccgctgcaa

SEQ ID NO: 4371807 - DNA, 25 bp, Homo sapien
aattctgcctcttgttcagataaag

SEQ ID NO: 4371808 - DNA, 25 bp, Homo sapien
tcatgggcaagatgtccctcaaacc

SEQ ID NO: 4371809 - DNA, 25 bp, Homo sapien
tggagctaccgccaacccacgggtg

SEQ ID NO: 4371810 - DNA, 25 bp, Homo sapien
tgttgtgatctccacacatctgttt

SEQ ID NO: 4371811 - DNA, 25 bp, Homo sapien
tttatcatgaatggagctaccgcca

SEQ ID NO: 4371812 - DNA, 25 bp, Homo sapien
ttctctctctttttctcctttcttc

SEQ ID NO: 4371813 - DNA, 25 bp, Homo sapien
tctttctttctctctctttttctcc

SEQ ID NO: 4371814 - DNA, 25 bp, Homo sapien
ctttctttctctctctttttctcct

SEQ ID NO: 4371815 - DNA, 25 bp, Homo sapien
tctctctctttttctcctttcttcc

SEQ ID NO: 4371816 - DNA, 25 bp, Homo sapien
ttgaatcaaactatgtaaaaggttg

SEQ ID NO: 4371817 - DNA, 25 bp, Homo sapien
atcaaactatgtaaaaggttgtctt

SEQ ID NO: 4371818 - DNA, 25 bp, Homo sapien
gaatcaaactatgtaaaaggttgtc

SEQ ID NO: 4371819 - DNA, 25 bp, Homo sapien
caaactatgtaaaaggttgtcttgg

SEQ ID NO: 4371820 - DNA, 25 bp, Homo sapien
ccttgcttagaagaacttggcctag

SEQ ID NO: 4371821 - DNA, 25 bp, Homo sapien
tgatatccctccatgaagagtttgg

SEQ ID NO: 4371822 - DNA, 25 bp, Homo sapien
gctagtggcttcgttacattggaac

SEQ ID NO: 4371823 - DNA, 25 bp, Homo sapien
gattcttccaactccaatagcctgt

SEQ ID NO: 4371824 - DNA, 25 bp, Homo sapien
acttccgacttgactctaggccttg

SEQ ID NO: 4371825 - DNA, 25 bp, Homo sapien
tgtaaaaatcaagccataagggtgg

SEQ ID NO: 4371826 - DNA, 25 bp, Homo sapien
ctaggccttgcctttctactcctgt

SEQ ID NO: 4371827 - DNA, 25 bp, Homo sapien
tctgaagttcgtgcaaccctctgcc

SEQ ID NO: 4371828 - DNA, 25 bp, Homo sapien
ctttggtatggttgactttgaaggt

SEQ ID NO: 4371829 - DNA, 25 bp, Homo sapien
gtatggttgactttgaaggtgtcat

SEQ ID NO: 4371830 - DNA, 25 bp, Homo sapien
tttggtatggttgactttgaaggtg

SEQ ID NO: 4371831 - DNA, 25 bp, Homo sapien
tggtatggttgactttgaaggtgtc

SEQ ID NO: 4371832 - DNA, 25 bp, Homo sapien
caaagctgcaagcaaggcgttggct

SEQ ID NO: 4371833 - DNA, 25 bp, Homo sapien
caaacgtgatttagctgggtcctct

SEQ ID NO: 4371834 - DNA, 25 bp, Homo sapien
tagaagcaggttacatgtcccaccc

SEQ ID NO: 4371835 - DNA, 25 bp, Homo sapien
tatctgagggcatactctgtagctc

SEQ ID NO: 4371836 - DNA, 25 bp, Homo sapien
tattgggcagtcgtcagggtcatct

SEQ ID NO: 4371837 - DNA, 25 bp, Homo sapien
tgccacgttgatgcactggagccat

SEQ ID NO: 4371838 - DNA, 25 bp, Homo sapien
tctgtgaagatttcgaaagcccggg

SEQ ID NO: 4371839 - DNA, 25 bp, Homo sapien
agagcggtccctgcgtttcttggcc

SEQ ID NO: 4371840 - DNA, 25 bp, Homo sapien
ttccttctatgagaggctggccatc

SEQ ID NO: 4371841 - DNA, 25 bp, Homo sapien
ccttctatgagaggctggccatctt

SEQ ID NO: 4371842 - DNA, 25 bp, Homo sapien
cagtgtaaaatagcgtgttttccac

SEQ ID NO: 4371843 - DNA, 25 bp, Homo sapien
agccagtgtaaaatagcgtgttttc

SEQ ID NO: 4371844 - DNA, 25 bp, Homo sapien
ctgttgaaggtagcagaataatcat

SEQ ID NO: 4371845 - DNA, 25 bp, Homo sapien
gatatgttatcacagcctcttcaca

SEQ ID NO: 4371846 - DNA, 25 bp, Homo sapien
gcccatagtacgtccttttaagcag

SEQ ID NO: 4371847 - DNA, 25 bp, Homo sapien
taacatgtggaatgatctacgaggg

SEQ ID NO: 4371848 - DNA, 25 bp, Homo sapien
tacatctaacatatgcatggctggg

SEQ ID NO: 4371849 - DNA, 25 bp, Homo sapien
aatttggctaggacattctctacta

SEQ ID NO: 4371850 - DNA, 25 bp, Homo sapien
ttggctaggacattctctactaaca

SEQ ID NO: 4371851 - DNA, 25 bp, Homo sapien
gacattctctactaacatggatctg

SEQ ID NO: 4371852 - DNA, 25 bp, Homo sapien
gctaggacattctctactaacatgg

SEQ ID NO: 4371853 - DNA, 25 bp, Homo sapien
taagaaagggcctagagcctgcgag

SEQ ID NO: 4371854 - DNA, 25 bp, Homo sapien
cagctagcccagcatgaagcctcat

SEQ ID NO: 4371855 - DNA, 25 bp, Homo sapien
ggtgctctcgaacacccctcatggg

SEQ ID NO: 4371856 - DNA, 25 bp, Homo sapien
ccaggaaagagattgagtaacagtc

SEQ ID NO: 4371857 - DNA, 25 bp, Homo sapien
gggccaaacattttgattcaatatg

SEQ ID NO: 4371858 - DNA, 25 bp, Homo sapien
ttcatgtagcaaaaggaaatgagca

SEQ ID NO: 4371859 - DNA, 25 bp, Homo sapien
tgattcaatatgctctgctataaaa

SEQ ID NO: 4371860 - DNA, 25 bp, Homo sapien
tattgctatatgttctcagtctata

SEQ ID NO: 4371861 - DNA, 25 bp, Homo sapien
tgtttcactgaagccaaacacgtca

SEQ ID NO: 4371862 - DNA, 25 bp, Homo sapien
ctcaggattgttgcacatgaagcat

SEQ ID NO: 4371863 - DNA, 25 bp, Homo sapien
aacctcacttcttccagatggagct

SEQ ID NO: 4371864 - DNA, 25 bp, Homo sapien
gatggagctgtacctggtccagatc

SEQ ID NO: 4371865 - DNA, 25 bp, Homo sapien
catcttgccctagtggctattgtcc

SEQ ID NO: 4371866 - DNA, 25 bp, Homo sapien
ttgccctagtggctattgtcctaac

SEQ ID NO: 4371867 - DNA, 25 bp, Homo sapien
tcttgccctagtggctattgtccta

SEQ ID NO: 4371868 - DNA, 25 bp, Homo sapien
tcatcttgccctagtggctattgtc

SEQ ID NO: 4371869 - DNA, 25 bp, Homo sapien
tgaaggcgaagagtagagtgtgtat

SEQ ID NO: 4371870 - DNA, 25 bp, Homo sapien
cttggtgggtgtacttgttctgttt

SEQ ID NO: 4371871 - DNA, 25 bp, Homo sapien
ggcgaagagtagagtgtgtattggg

SEQ ID NO: 4371872 - DNA, 25 bp, Homo sapien
gttgcttggtgggtgtacttgttct

SEQ ID NO: 4371873 - DNA, 25 bp, Homo sapien
tgccacttagaaactgcctgtcaga

SEQ ID NO: 4371874 - DNA, 25 bp, Homo sapien
cacttagaaactgcctgtcagattt

SEQ ID NO: 4371875 - DNA, 25 bp, Homo sapien
agaaactgcctgtcagattttcctg

SEQ ID NO: 4371876 - DNA, 25 bp, Homo sapien
accattgccacttagaaactgcctg

SEQ ID NO: 4371877 - DNA, 25 bp, Homo sapien
ttctgctgtggaaacgtggactcca

SEQ ID NO: 4371878 - DNA, 25 bp, Homo sapien
tctgctgtggaaacgtggactccat

SEQ ID NO: 4371879 - DNA, 25 bp, Homo sapien
cttctgctgtggaaacgtggactcc

SEQ ID NO: 4371880 - DNA, 25 bp, Homo sapien
tgcacagaatgactctgaatggaca

SEQ ID NO: 4371881 - DNA, 25 bp, Homo sapien
ttgcacagaatgactctgaatggac

SEQ ID NO: 4371882 - DNA, 25 bp, Homo sapien
aggaattgcacagaatgactctgaa

SEQ ID NO: 4371883 - DNA, 25 bp, Homo sapien
gaattgcacagaatgactctgaatg

SEQ ID NO: 4371884 - DNA, 25 bp, Homo sapien
gctgaggttcttggctgatgagaat

SEQ ID NO: 4371885 - DNA, 25 bp, Homo sapien
ttggctgatgagaataaaactggac

SEQ ID NO: 4371886 - DNA, 25 bp, Homo sapien
acttactgtataggcagtaatgacc

SEQ ID NO: 4371887 - DNA, 25 bp, Homo sapien
gtgaagaacaactttgctacacaac

SEQ ID NO: 4371888 - DNA, 25 bp, Homo sapien
gagctcggttctgtagaaggtgttc

SEQ ID NO: 4371889 - DNA, 25 bp, Homo sapien
ttcagaagtgtgagttgttgaactg

SEQ ID NO: 4371890 - DNA, 25 bp, Homo sapien
cagaagtgtgagttgttgaactgac

SEQ ID NO: 4371891 - DNA, 25 bp, Homo sapien
tttgatgttttcagagctcggttct

SEQ ID NO: 4371892 - DNA, 25 bp, Homo sapien
ggaaaaactgccaaatctctcattt

SEQ ID NO: 4371893 - DNA, 25 bp, Homo sapien
cactgaaggaaaaactgccaaatct

SEQ ID NO: 4371894 - DNA, 25 bp, Homo sapien
ctgcactgaaggaaaaactgccaaa

SEQ ID NO: 4371895 - DNA, 25 bp, Homo sapien
gaaaaactgccaaatctctcatttg

SEQ ID NO: 4371896 - DNA, 25 bp, Homo sapien
attctgtagatcatctgttcactgt

SEQ ID NO: 4371897 - DNA, 25 bp, Homo sapien
agatcatctgttcactgtgatgata

SEQ ID NO: 4371898 - DNA, 25 bp, Homo sapien
ctgtagatcatctgttcactgtgat

SEQ ID NO: 4371899 - DNA, 25 bp, Homo sapien
tcatctgttcactgtgatgatagtt

SEQ ID NO: 4371900 - DNA, 25 bp, Homo sapien
ctagtgctctcctatccggagattg

SEQ ID NO: 4371901 - DNA, 25 bp, Homo sapien
tcctatccggagattggccctgtgc

SEQ ID NO: 4371902 - DNA, 25 bp, Homo sapien
ggccctgtgcatggatatcctgtgt

SEQ ID NO: 4371903 - DNA, 25 bp, Homo sapien
cctgtgcatggatatcctgtgttca

SEQ ID NO: 4371904 - DNA, 25 bp, Homo sapien
gggccattgctaacagccacacagg

SEQ ID NO: 4371905 - DNA, 25 bp, Homo sapien
ctgaatggatcttgctggatggatg

SEQ ID NO: 4371906 - DNA, 25 bp, Homo sapien
gatggatgaaacatgacttgcagcc

SEQ ID NO: 4371907 - DNA, 25 bp, Homo sapien
tctgtcctggagctcttgctgccct

SEQ ID NO: 4371908 - DNA, 25 bp, Homo sapien
gcaacaatacagagccactttgtgg

SEQ ID NO: 4371909 - DNA, 25 bp, Homo sapien
ttgtacagaggcaaataaggcaggc

SEQ ID NO: 4371910 - DNA, 25 bp, Homo sapien
gatcccctgcaggtaccattccatg

SEQ ID NO: 4371911 - DNA, 25 bp, Homo sapien
gagtcagtggaagcccatatggtag

SEQ ID NO: 4371912 - DNA, 25 bp, Homo sapien
tggtcagccatccaccaaaggtggc

SEQ ID NO: 4371913 - DNA, 25 bp, Homo sapien
gttggccctggccagatttgttgct

SEQ ID NO: 4371914 - DNA, 25 bp, Homo sapien
catccaccaaaggtggcaatcctgt

SEQ ID NO: 4371915 - DNA, 25 bp, Homo sapien
caaaggtggcaatcctgttcctcac

SEQ ID NO: 4371916 - DNA, 25 bp, Homo sapien
tgctgttgttgccaagcactgggcc

SEQ ID NO: 4371917 - DNA, 25 bp, Homo sapien
tgtgctgttgttgccaagcactggg

SEQ ID NO: 4371918 - DNA, 25 bp, Homo sapien
cctgtgctgttgttgccaagcactg

SEQ ID NO: 4371919 - DNA, 25 bp, Homo sapien
ctgtgctgttgttgccaagcactgg

SEQ ID NO: 4371920 - DNA, 25 bp, Homo sapien
ggaccacagcaatggataaacagct

SEQ ID NO: 4371921 - DNA, 25 bp, Homo sapien
tgcctagaatcaggtgggacttccc

SEQ ID NO: 4371922 - DNA, 25 bp, Homo sapien
gccacgttgagaccagacatctctg

SEQ ID NO: 4371923 - DNA, 25 bp, Homo sapien
cagcgcctgctacatgaaacatggg

SEQ ID NO: 4371924 - DNA, 25 bp, Homo sapien
aagctgcgaccagaggcatgccacc

SEQ ID NO: 4371925 - DNA, 25 bp, Homo sapien
gaagctgcgaccagaggcatgccac

SEQ ID NO: 4371926 - DNA, 25 bp, Homo sapien
gagtgtgcatgtgctcaaccaattt

SEQ ID NO: 4371927 - DNA, 25 bp, Homo sapien
tgctcctggatctccatacaaaatg

SEQ ID NO: 4371928 - DNA, 25 bp, Homo sapien
ctaagagtgtgcatgtgctcaacca

SEQ ID NO: 4371929 - DNA, 25 bp, Homo sapien
gtgcatgtgctcaaccaattttatt

SEQ ID NO: 4371930 - DNA, 25 bp, Homo sapien
tggctttttctatgagggctgtagc

SEQ ID NO: 4371931 - DNA, 25 bp, Homo sapien
tctggctttttctatgagggctgta

SEQ ID NO: 4371932 - DNA, 25 bp, Homo sapien
tgtctggctttttctatgagggctg

SEQ ID NO: 4371933 - DNA, 25 bp, Homo sapien
gctgtctggctttttctatgagggc

SEQ ID NO: 4371934 - DNA, 25 bp, Homo sapien
ttgcatgattatgtggttgggaaat

SEQ ID NO: 4371935 - DNA, 25 bp, Homo sapien
tgcatgattatgtggttgggaaatg

SEQ ID NO: 4371936 - DNA, 25 bp, Homo sapien
cttgcatgattatgtggttgggaaa

SEQ ID NO: 4371937 - DNA, 25 bp, Homo sapien
tcttgcatgattatgtggttgggaa

SEQ ID NO: 4371938 - DNA, 25 bp, Homo sapien
agacctctttccaggatttttgtga

SEQ ID NO: 4371939 - DNA, 25 bp, Homo sapien
cctctttccaggatttttgtgaatt

SEQ ID NO: 4371940 - DNA, 25 bp, Homo sapien
cacagacctctttccaggatttttg

SEQ ID NO: 4371941 - DNA, 25 bp, Homo sapien
tcacagacctctttccaggattttt

SEQ ID NO: 4371942 - DNA, 25 bp, Homo sapien
ctggggacagggaaccagaaataat

SEQ ID NO: 4371943 - DNA, 25 bp, Homo sapien
gggacagggaaccagaaataatata

SEQ ID NO: 4371944 - DNA, 25 bp, Homo sapien
tggggacagggaaccagaaataata

SEQ ID NO: 4371945 - DNA, 25 bp, Homo sapien
ggacagggaaccagaaataatatat

SEQ ID NO: 4371946 - DNA, 25 bp, Homo sapien
caatggtacactgatcagggactgg

SEQ ID NO: 4371947 - DNA, 25 bp, Homo sapien
tattctataggacttgcagttgtct

SEQ ID NO: 4371948 - DNA, 25 bp, Homo sapien
taagtgcaagtagagcttatcttgg

SEQ ID NO: 4371949 - DNA, 25 bp, Homo sapien
catggcatatgctttcactttgctg

SEQ ID NO: 4371950 - DNA, 25 bp, Homo sapien
ttgggtatgaaactgaagactcccc

SEQ ID NO: 4371951 - DNA, 25 bp, Homo sapien
tctctcagtgtctgtcttaaacggc

SEQ ID NO: 4371952 - DNA, 25 bp, Homo sapien
gaacccacaccctttgtgagcatag

SEQ ID NO: 4371953 - DNA, 25 bp, Homo sapien
tctatttctgaaagagagatgctgg

SEQ ID NO: 4371954 - DNA, 25 bp, Homo sapien
gaaacttggcccagactatatcttc

SEQ ID NO: 4371955 - DNA, 25 bp, Homo sapien
cctgcatttatcttgtcttcaaaag

SEQ ID NO: 4371956 - DNA, 25 bp, Homo sapien
actatatcttctgatagagccaggg

SEQ ID NO: 4371957 - DNA, 25 bp, Homo sapien
ccaggggtattgctccctgcattta

SEQ ID NO: 4371958 - DNA, 25 bp, Homo sapien
cttccagtttctcagggaattcaat

SEQ ID NO: 4371959 - DNA, 25 bp, Homo sapien
tcattttcagttactatgagcttgg

SEQ ID NO: 4371960 - DNA, 25 bp, Homo sapien
gggaattcaatttcagtgctgattt

SEQ ID NO: 4371961 - DNA, 25 bp, Homo sapien
cttcattttcagttactatgagctt

SEQ ID NO: 4371962 - DNA, 25 bp, Homo sapien
cagtcctggcgttgagggagggttc

SEQ ID NO: 4371963 - DNA, 25 bp, Homo sapien
ctatatctgcggtggacactggtga

SEQ ID NO: 4371964 - DNA, 25 bp, Homo sapien
cactgcgttagcagggttggatagt

SEQ ID NO: 4371965 - DNA, 25 bp, Homo sapien
aggacagcagtcctggcgttgaggg

SEQ ID NO: 4371966 - DNA, 25 bp, Homo sapien
ctggaatgacaggttgcaaagggcc

SEQ ID NO: 4371967 - DNA, 25 bp, Homo sapien
tgaagagcgattactttcaaggtct

SEQ ID NO: 4371968 - DNA, 25 bp, Homo sapien
gttctgatgtgactcccaggatgtc

SEQ ID NO: 4371969 - DNA, 25 bp, Homo sapien
tgcttgagtatacattagggccaca

SEQ ID NO: 4371970 - DNA, 25 bp, Homo sapien
tcctccataactgagcaccttccat

SEQ ID NO: 4371971 - DNA, 25 bp, Homo sapien
acccacagaatttgacactagtctc

SEQ ID NO: 4371972 - DNA, 25 bp, Homo sapien
acagaatttgacactagtctcaaat

SEQ ID NO: 4371973 - DNA, 25 bp, Homo sapien
ccacagaatttgacactagtctcaa

SEQ ID NO: 4371974 - DNA, 25 bp, Homo sapien
tgctcatgcggaagatgtctctgct

SEQ ID NO: 4371975 - DNA, 25 bp, Homo sapien
cagttgtcgggtaaggagtttagca

SEQ ID NO: 4371976 - DNA, 25 bp, Homo sapien
gttggctcaccaggtatgtcaggca

SEQ ID NO: 4371977 - DNA, 25 bp, Homo sapien
ggtgaaacgaatgctccatgttggc

SEQ ID NO: 4371978 - DNA, 25 bp, Homo sapien
caccccatctcaacttaaaaataca

SEQ ID NO: 4371979 - DNA, 25 bp, Homo sapien
gcctgtaatcccagctacttgagag

SEQ ID NO: 4371980 - DNA, 25 bp, Homo sapien
aaactagccgggcacagtggcacat

SEQ ID NO: 4371981 - DNA, 25 bp, Homo sapien
gctgaggcacgagaatcacttgaac

SEQ ID NO: 4371982 - DNA, 25 bp, Homo sapien
aaaacaccaactcccatcactggtt

SEQ ID NO: 4371983 - DNA, 25 bp, Homo sapien
catgcatacgccatgtgtcttagca

SEQ ID NO: 4371984 - DNA, 25 bp, Homo sapien
caaaaagtagcctgggaaattctag

SEQ ID NO: 4371985 - DNA, 25 bp, Homo sapien
gccatgggacagcattcattcctca

SEQ ID NO: 4371986 - DNA, 25 bp, Homo sapien
tggtgaatctgagatttgttcactt

SEQ ID NO: 4371987 - DNA, 25 bp, Homo sapien
cacagaaatgcaacctgggcaagat

SEQ ID NO: 4371988 - DNA, 25 bp, Homo sapien
gtcacagaaatgcaacctgggcaag

SEQ ID NO: 4371989 - DNA, 25 bp, Homo sapien
agtgtttttgtaggcctgccggatg

SEQ ID NO: 4371990 - DNA, 25 bp, Homo sapien
ccaggatgaggacagtaatgtggct

SEQ ID NO: 4371991 - DNA, 25 bp, Homo sapien
cagatgggcactcatttgaaagaca

SEQ ID NO: 4371992 - DNA, 25 bp, Homo sapien
gcacagaaggtgaggcataagccaa

SEQ ID NO: 4371993 - DNA, 25 bp, Homo sapien
tacacctggctttatgcaagcacag

SEQ ID NO: 4371994 - DNA, 25 bp, Homo sapien
tgtgtgattccaggccgtctctacc

SEQ ID NO: 4371995 - DNA, 25 bp, Homo sapien
cagaggttgaattttttggttcttg

SEQ ID NO: 4371996 - DNA, 25 bp, Homo sapien
ttgaattttttggttcttgcaaaga

SEQ ID NO: 4371997 - DNA, 25 bp, Homo sapien
tgaattttttggttcttgcaaagat

SEQ ID NO: 4371998 - DNA, 25 bp, Homo sapien
gaggttgaattttttggttcttgca

SEQ ID NO: 4371999 - DNA, 25 bp, Homo sapien
cagttctcccgccctcctctgggaa

SEQ ID NO: 4372000 - DNA, 25 bp, Homo sapien
tcagttctcccgccctcctctggga

SEQ ID NO: 4372001 - DNA, 25 bp, Homo sapien
agttctcccgccctcctctgggaag

SEQ ID NO: 4372002 - DNA, 25 bp, Homo sapien
gccactggctcatagactgctatct

SEQ ID NO: 4372003 - DNA, 25 bp, Homo sapien
tccagtgaggtaggggaatctctca

SEQ ID NO: 4372004 - DNA, 25 bp, Homo sapien
tccacatgcccaacagctccataaa

SEQ ID NO: 4372005 - DNA, 25 bp, Homo sapien
ctctcaccaatctctttcagcattg

SEQ ID NO: 4372006 - DNA, 25 bp, Homo sapien
tgtcattatgggttgaatccttcaa

SEQ ID NO: 4372007 - DNA, 25 bp, Homo sapien
aatgcccaattaggaaaggaataca

SEQ ID NO: 4372008 - DNA, 25 bp, Homo sapien
tgatgtcattatgggttgaatcctt

SEQ ID NO: 4372009 - DNA, 25 bp, Homo sapien
gaatccttcaaatgcccaattagga

SEQ ID NO: 4372010 - DNA, 25 bp, Homo sapien
agcagctgttatccaagcaatcatc

SEQ ID NO: 4372011 - DNA, 25 bp, Homo sapien
gcagctgttatccaagcaatcatca

SEQ ID NO: 4372012 - DNA, 25 bp, Homo sapien
cagctgttatccaagcaatcatcat

SEQ ID NO: 4372013 - DNA, 25 bp, Homo sapien
cagcagctgttatccaagcaatcat

SEQ ID NO: 4372014 - DNA, 25 bp, Homo sapien
caaatactgattgagtccttcctat

SEQ ID NO: 4372015 - DNA, 25 bp, Homo sapien
tactgattgagtccttcctatttgc

SEQ ID NO: 4372016 - DNA, 25 bp, Homo sapien
agaatcccacagatctgttcactcc

SEQ ID NO: 4372017 - DNA, 25 bp, Homo sapien
gtcctgttgattccaatgcccaaga

SEQ ID NO: 4372018 - DNA, 25 bp, Homo sapien
tgagggagaaggtgaatcaggcagt

SEQ ID NO: 4372019 - DNA, 25 bp, Homo sapien
gaaggtgaatcaggcagtttctgta

SEQ ID NO: 4372020 - DNA, 25 bp, Homo sapien
ggagaaggtgaatcaggcagtttct

SEQ ID NO: 4372021 - DNA, 25 bp, Homo sapien
gaatcaggcagtttctgtattgtac

SEQ ID NO: 4372022 - DNA, 25 bp, Homo sapien
ctgtggtgacagaccctttgaaatc

SEQ ID NO: 4372023 - DNA, 25 bp, Homo sapien
gcaggaacagagcacgaagagccga

SEQ ID NO: 4372024 - DNA, 25 bp, Homo sapien
gagaggctgctttaccatgaaggta

SEQ ID NO: 4372025 - DNA, 25 bp, Homo sapien
ggtgacaggaaacgggactccacaa

SEQ ID NO: 4372026 - DNA, 25 bp, Homo sapien
tctttgctgctacatgcaaaagccg

SEQ ID NO: 4372027 - DNA, 25 bp, Homo sapien
tgtctattaattggctgaggctgct

SEQ ID NO: 4372028 - DNA, 25 bp, Homo sapien
caaggccaggagttctgtcaggtgt

SEQ ID NO: 4372029 - DNA, 25 bp, Homo sapien
ccgtagtagatggtactgttctggc

SEQ ID NO: 4372030 - DNA, 25 bp, Homo sapien
tttacaaagcacatccaaggcaggc

SEQ ID NO: 4372031 - DNA, 25 bp, Homo sapien
cactcggaatgggacaagctcttca

SEQ ID NO: 4372032 - DNA, 25 bp, Homo sapien
gaactcgcagatgagagagcgcatg

SEQ ID NO: 4372033 - DNA, 25 bp, Homo sapien
ccaccgagggaggtcagcttttaca

SEQ ID NO: 4372034 - DNA, 25 bp, Homo sapien
cctatttctgcatgcgcggtcacag

SEQ ID NO: 4372035 - DNA, 25 bp, Homo sapien
caggcacaccatacaaggcgggaaa

SEQ ID NO: 4372036 - DNA, 25 bp, Homo sapien
gttataaccgtgatccctcttgccg

SEQ ID NO: 4372037 - DNA, 25 bp, Homo sapien
gactaagcgctgcaggagtccactg

SEQ ID NO: 4372038 - DNA, 25 bp, Homo sapien
actggcagggcagcacggagttccc

SEQ ID NO: 4372039 - DNA, 25 bp, Homo sapien
catggcagtggccttagggtctgct

SEQ ID NO: 4372040 - DNA, 25 bp, Homo sapien
ctgggctcgcatggtggaagaggac

SEQ ID NO: 4372041 - DNA, 25 bp, Homo sapien
ctggcagggcagcacggagttccca

SEQ ID NO: 4372042 - DNA, 25 bp, Homo sapien
gacaaaatagcagtatgggcttggg

SEQ ID NO: 4372043 - DNA, 25 bp, Homo sapien
caggaagcatggacaaaatagcagt

SEQ ID NO: 4372044 - DNA, 25 bp, Homo sapien
caaaatagcagtatgggcttgggga

SEQ ID NO: 4372045 - DNA, 25 bp, Homo sapien
ctatgccaggaagcatggacaaaat

SEQ ID NO: 4372046 - DNA, 25 bp, Homo sapien
tcatgtattgttctctgacttcaag

SEQ ID NO: 4372047 - DNA, 25 bp, Homo sapien
ttgttctctgacttcaagttcaaaa

SEQ ID NO: 4372048 - DNA, 25 bp, Homo sapien
ctgacttcaagttcaaaaacatgtt

SEQ ID NO: 4372049 - DNA, 25 bp, Homo sapien
tgtattgttctctgacttcaagttc

SEQ ID NO: 4372050 - DNA, 25 bp, Homo sapien
aaataaaagaagacaaggagaatat

SEQ ID NO: 4372051 - DNA, 25 bp, Homo sapien
ataaaagaagacaaggagaatattt

SEQ ID NO: 4372052 - DNA, 25 bp, Homo sapien
aataaaagaagacaaggagaatatt

SEQ ID NO: 4372053 - DNA, 25 bp, Homo sapien
tgaccagaagcacggaaatgcagtt

SEQ ID NO: 4372054 - DNA, 25 bp, Homo sapien
gacaggtttttcataccccactgag

SEQ ID NO: 4372055 - DNA, 25 bp, Homo sapien
taacagaggtgtactatttggcttt

SEQ ID NO: 4372056 - DNA, 25 bp, Homo sapien
cacagttggtagttgaacaggtgac

SEQ ID NO: 4372057 - DNA, 25 bp, Homo sapien
ttttaatgagtctaagtaattcatc

SEQ ID NO: 4372058 - DNA, 25 bp, Homo sapien
gcttacaattcttttaatgagtcta

SEQ ID NO: 4372059 - DNA, 25 bp, Homo sapien
aatgagtctaagtaattcatctgcc

SEQ ID NO: 4372060 - DNA, 25 bp, Homo sapien
ggaagaatgcttacaattcttttaa

SEQ ID NO: 4372061 - DNA, 25 bp, Homo sapien
gcttcccacaaaccataaatgcttg

SEQ ID NO: 4372062 - DNA, 25 bp, Homo sapien
tgcttctaatactctaggtcttgct

SEQ ID NO: 4372063 - DNA, 25 bp, Homo sapien
taatttgcttctaatactctaggtc

SEQ ID NO: 4372064 - DNA, 25 bp, Homo sapien
tactctaggtcttgcttcccacaaa

SEQ ID NO: 4372065 - DNA, 25 bp, Homo sapien
gtgtgatcagccaggagatctgcct

SEQ ID NO: 4372066 - DNA, 25 bp, Homo sapien
ggtagttagacatattcctgcacag

SEQ ID NO: 4372067 - DNA, 25 bp, Homo sapien
tatgctctttactataacttccgtg

SEQ ID NO: 4372068 - DNA, 25 bp, Homo sapien
tgccttggtaattgcagccagagac

SEQ ID NO: 4372069 - DNA, 25 bp, Homo sapien
tggactcggtctctctgatggctgt

SEQ ID NO: 4372070 - DNA, 25 bp, Homo sapien
gcaactcatgatatcagatgcgatt

SEQ ID NO: 4372071 - DNA, 25 bp, Homo sapien
caaagggtctcaggttatgttccaa

SEQ ID NO: 4372072 - DNA, 25 bp, Homo sapien
gaggagtgtcttcgtctttcccaaa

SEQ ID NO: 4372073 - DNA, 25 bp, Homo sapien
ccctgtcttaattctccctcaaata

SEQ ID NO: 4372074 - DNA, 25 bp, Homo sapien
gagaaataatgggacctccaaaaca

SEQ ID NO: 4372075 - DNA, 25 bp, Homo sapien
caaatacctgatcatctttactgag

SEQ ID NO: 4372076 - DNA, 25 bp, Homo sapien
tttactgagaaataatgggacctcc

SEQ ID NO: 4372077 - DNA, 25 bp, Homo sapien
taagaagtggtacattttggaccag

SEQ ID NO: 4372078 - DNA, 25 bp, Homo sapien
ctttgctagattttgcccggtgatc

SEQ ID NO: 4372079 - DNA, 25 bp, Homo sapien
ggaccagacatgaaaaaagccagag

SEQ ID NO: 4372080 - DNA, 25 bp, Homo sapien
tcttacactcaggtgacacttatgg

SEQ ID NO: 4372081 - DNA, 25 bp, Homo sapien
tgatgggatcccaactcaccgtaac

SEQ ID NO: 4372082 - DNA, 25 bp, Homo sapien
atgggatcccaactcaccgtaacct

SEQ ID NO: 4372083 - DNA, 25 bp, Homo sapien
tgcagtgatgggatcccaactcacc

SEQ ID NO: 4372084 - DNA, 25 bp, Homo sapien
cagtgatgggatcccaactcaccgt

SEQ ID NO: 4372085 - DNA, 25 bp, Homo sapien
tatgtatgactactgcctggccaac

SEQ ID NO: 4372086 - DNA, 25 bp, Homo sapien
gacaagttcctgcacatgtaggcca

SEQ ID NO: 4372087 - DNA, 25 bp, Homo sapien
tagcttctgaactcacattctgggc

SEQ ID NO: 4372088 - DNA, 25 bp, Homo sapien
aaatgcccagggttgtcactgctca

SEQ ID NO: 4372089 - DNA, 25 bp, Homo sapien
gaattatttcagtagccactcaact

SEQ ID NO: 4372090 - DNA, 25 bp, Homo sapien
tgaattatttcagtagccactcaac

SEQ ID NO: 4372091 - DNA, 25 bp, Homo sapien
accatgttacttctgctcagaactc

SEQ ID NO: 4372092 - DNA, 25 bp, Homo sapien
tgttcccttcactacagccacaccg

SEQ ID NO: 4372093 - DNA, 25 bp, Homo sapien
tcagaactctccagtggctgcccaa

SEQ ID NO: 4372094 - DNA, 25 bp, Homo sapien
gacctcagaaactccagcctacaac

SEQ ID NO: 4372095 - DNA, 25 bp, Homo sapien
cattgtagcacattcacataaggga

SEQ ID NO: 4372096 - DNA, 25 bp, Homo sapien
taagggaatactctgcctcagcaaa

SEQ ID NO: 4372097 - DNA, 25 bp, Homo sapien
ggtgtgtaaactggcacatccctgt

SEQ ID NO: 4372098 - DNA, 25 bp, Homo sapien
aaaacgtaatttgagccctatgaca

SEQ ID NO: 4372099 - DNA, 25 bp, Homo sapien
agacgatcccttcctgttctacgtt

SEQ ID NO: 4372100 - DNA, 25 bp, Homo sapien
tcattgcaagtgcaggagaagccac

SEQ ID NO: 4372101 - DNA, 25 bp, Homo sapien
catattcgcatcattgcaagtgcag

SEQ ID NO: 4372102 - DNA, 25 bp, Homo sapien
ggcaatttagacgatcccttcctgt

SEQ ID NO: 4372103 - DNA, 25 bp, Homo sapien
tctcagtgtcatttcaaggacataa

SEQ ID NO: 4372104 - DNA, 25 bp, Homo sapien
taaataatatttttgtgagaattcc

SEQ ID NO: 4372105 - DNA, 25 bp, Homo sapien
tactgatgctgttatgctgctctgc

SEQ ID NO: 4372106 - DNA, 25 bp, Homo sapien
ctgcttttccctggattggctccct

SEQ ID NO: 4372107 - DNA, 25 bp, Homo sapien
gctcgtgaaagatctttttgtccca

SEQ ID NO: 4372108 - DNA, 25 bp, Homo sapien
gagtcatctaaggagaagaggtccc

SEQ ID NO: 4372109 - DNA, 25 bp, Homo sapien
ctaattatcttaatttgctccaaag

SEQ ID NO: 4372110 - DNA, 25 bp, Homo sapien
agaagaggtccccagctcgtgaaag

SEQ ID NO: 4372111 - DNA, 25 bp, Homo sapien
aggatgagtttgatcagttgacttt

SEQ ID NO: 4372112 - DNA, 25 bp, Homo sapien
agacaaaaacatgtagaaggaggta

SEQ ID NO: 4372113 - DNA, 25 bp, Homo sapien
ggaggtatacttcttattccatgaa

SEQ ID NO: 4372114 - DNA, 25 bp, Homo sapien
ccagttatcagaggtcagtaagaca

SEQ ID NO: 4372115 - DNA, 25 bp, Homo sapien
ttttctccagactttgaggtcttca

SEQ ID NO: 4372116 - DNA, 25 bp, Homo sapien
aagttgttcattgcggagccggtgc

SEQ ID NO: 4372117 - DNA, 25 bp, Homo sapien
aaggaatgcagcctgatgccaccgg

SEQ ID NO: 4372118 - DNA, 25 bp, Homo sapien
ctccgagggcacagcgagtggaatc

SEQ ID NO: 4372119 - DNA, 25 bp, Homo sapien
aaaggcgcccttgcagttactcagc

SEQ ID NO: 4372120 - DNA, 25 bp, Homo sapien
gctgtggcgtgctgctacacttcac

SEQ ID NO: 4372121 - DNA, 25 bp, Homo sapien
tcacacagcgtgaaaggactacagg

SEQ ID NO: 4372122 - DNA, 25 bp, Homo sapien
taagcaatgctaaaggcttcagccc

SEQ ID NO: 4372123 - DNA, 25 bp, Homo sapien
ggactacaggcgttcccatgggaat

SEQ ID NO: 4372124 - DNA, 25 bp, Homo sapien
gctgcctgtcaagccagtggtacat

SEQ ID NO: 4372125 - DNA, 25 bp, Homo sapien
ggacccatgaccatgctcagaggca

SEQ ID NO: 4372126 - DNA, 25 bp, Homo sapien
gatctttagagcactgcagctggga

SEQ ID NO: 4372127 - DNA, 25 bp, Homo sapien
aatagaaggcaaaatccttgatctt

SEQ ID NO: 4372128 - DNA, 25 bp, Homo sapien
cgtgcggaatcaggcaaatgagtaa

SEQ ID NO: 4372129 - DNA, 25 bp, Homo sapien
taacaattgacgcaaagcttcactt

SEQ ID NO: 4372130 - DNA, 25 bp, Homo sapien
ttctgcttagacctaacaattgacg

SEQ ID NO: 4372131 - DNA, 25 bp, Homo sapien
gatttctctgagcagatctgtagtt

SEQ ID NO: 4372132 - DNA, 25 bp, Homo sapien
gatttgctgtgacatatccttaacc

SEQ ID NO: 4372133 - DNA, 25 bp, Homo sapien
cagaatgtgctgatcaaactgcata

SEQ ID NO: 4372134 - DNA, 25 bp, Homo sapien
gaggctctgatgtactctttactga

SEQ ID NO: 4372135 - DNA, 25 bp, Homo sapien
tccaggaaatgctgagtagatgcca

SEQ ID NO: 4372136 - DNA, 25 bp, Homo sapien
aaatggctggcatttgaatgtaaat

SEQ ID NO: 4372137 - DNA, 25 bp, Homo sapien
ccaaaacacaaagtctggattattc

SEQ ID NO: 4372138 - DNA, 25 bp, Homo sapien
gaatgtaaatcttagtgcttgagcc

SEQ ID NO: 4372139 - DNA, 25 bp, Homo sapien
tcttagtgcttgagcctaactccat

SEQ ID NO: 4372140 - DNA, 25 bp, Homo sapien
cctgtttagtttcgggctctcttct

SEQ ID NO: 4372141 - DNA, 25 bp, Homo sapien
tctaaatggtggattcctccctgtt

SEQ ID NO: 4372142 - DNA, 25 bp, Homo sapien
ctccctgtttagtttcgggctctct

SEQ ID NO: 4372143 - DNA, 25 bp, Homo sapien
gccagacttctaaatggtggattcc

SEQ ID NO: 4372144 - DNA, 25 bp, Homo sapien
tccaaatgtcacctcagtctgtgtt

SEQ ID NO: 4372145 - DNA, 25 bp, Homo sapien
ccaaatgtcacctcagtctgtgttt

SEQ ID NO: 4372146 - DNA, 25 bp, Homo sapien
tttccaaatgtcacctcagtctgtg

SEQ ID NO: 4372147 - DNA, 25 bp, Homo sapien
cttttccaaatgtcacctcagtctg

SEQ ID NO: 4372148 - DNA, 25 bp, Homo sapien
cgcggtaagcgcgaagaagccggct

SEQ ID NO: 4372149 - DNA, 25 bp, Homo sapien
cacacgggcaaactggcgggctttg

SEQ ID NO: 4372150 - DNA, 25 bp, Homo sapien
tcactgtttggtcccgttgtcgtgc

SEQ ID NO: 4372151 - DNA, 25 bp, Homo sapien
gctgctgcgtggcacacgggcaaac

SEQ ID NO: 4372152 - DNA, 25 bp, Homo sapien
cttgggcgcggcccgcagatgcgtg

SEQ ID NO: 4372153 - DNA, 25 bp, Homo sapien
gcgcggcccgcagatgcgtgcagca

SEQ ID NO: 4372154 - DNA, 25 bp, Homo sapien
tgggcgcggcccgcagatgcgtgca

SEQ ID NO: 4372155 - DNA, 25 bp, Homo sapien
cggcccgcagatgcgtgcagcatgc

SEQ ID NO: 4372156 - DNA, 25 bp, Homo sapien
ctgtggagcgcttattggtttttct

SEQ ID NO: 4372157 - DNA, 25 bp, Homo sapien
tgtggagcgcttattggtttttctg

SEQ ID NO: 4372158 - DNA, 25 bp, Homo sapien
tggagcgcttattggtttttctgtg

SEQ ID NO: 4372159 - DNA, 25 bp, Homo sapien
ggagcgcttattggtttttctgtgt

SEQ ID NO: 4372160 - DNA, 25 bp, Homo sapien
tggcaatttgtatatggtgatcaga

SEQ ID NO: 4372161 - DNA, 25 bp, Homo sapien
caatttgtatatggtgatcagacat

SEQ ID NO: 4372162 - DNA, 25 bp, Homo sapien
gtctgtgcgcttggcaatttgtata

SEQ ID NO: 4372163 - DNA, 25 bp, Homo sapien
tgtctgtgcgcttggcaatttgtat

SEQ ID NO: 4372164 - DNA, 25 bp, Homo sapien
tcagctgaaagcgtgtggataacac

SEQ ID NO: 4372165 - DNA, 25 bp, Homo sapien
aattgtgaccaaagctagaggatca

SEQ ID NO: 4372166 - DNA, 25 bp, Homo sapien
gaggatcacaaacttcagcactcag

SEQ ID NO: 4372167 - DNA, 25 bp, Homo sapien
acttgttcccggacgcagtaaggca

SEQ ID NO: 4372168 - DNA, 25 bp, Homo sapien
tcaacctccagcacagctcttgcca

SEQ ID NO: 4372169 - DNA, 25 bp, Homo sapien
caacctccagcacagctcttgccac

SEQ ID NO: 4372170 - DNA, 25 bp, Homo sapien
tatttgtagcccaaggaggaaagcc

SEQ ID NO: 4372171 - DNA, 25 bp, Homo sapien
gtgtaagcacgttatcatatagtga

SEQ ID NO: 4372172 - DNA, 25 bp, Homo sapien
tctgagaagttgagtatttgtagcc

SEQ ID NO: 4372173 - DNA, 25 bp, Homo sapien
atttccaaaatcatcccagccggaa

SEQ ID NO: 4372174 - DNA, 25 bp, Homo sapien
tcagtgacaccatcaacctgctgcc

SEQ ID NO: 4372175 - DNA, 25 bp, Homo sapien
catcttccgcccacgcagttttcct

SEQ ID NO: 4372176 - DNA, 25 bp, Homo sapien
gcctcaaggctaaattcatacaacc

SEQ ID NO: 4372177 - DNA, 25 bp, Homo sapien
gctgcctcaaggctaaattcataca

SEQ ID NO: 4372178 - DNA, 25 bp, Homo sapien
gagtcgctgtcatccataggttgga

SEQ ID NO: 4372179 - DNA, 25 bp, Homo sapien
gcaagaagctgaaccctgatgggag

SEQ ID NO: 4372180 - DNA, 25 bp, Homo sapien
tatggcaacacaatccagtgcttgg

SEQ ID NO: 4372181 - DNA, 25 bp, Homo sapien
gaggcgaataatagcaggtaactgc

SEQ ID NO: 4372182 - DNA, 25 bp, Homo sapien
tgctggcctgcaagagcactgcgga

SEQ ID NO: 4372183 - DNA, 25 bp, Homo sapien
tcggaggacctcagagcttctgact

SEQ ID NO: 4372184 - DNA, 25 bp, Homo sapien
gaagctgctggcctgcaagagcact

SEQ ID NO: 4372185 - DNA, 25 bp, Homo sapien
ttgctgttgcaaaggttgagaccag

SEQ ID NO: 4372186 - DNA, 25 bp, Homo sapien
ttcttttttgcaggagaccgtagtc

SEQ ID NO: 4372187 - DNA, 25 bp, Homo sapien
gcaggagaccgtagtccttccctgt

SEQ ID NO: 4372188 - DNA, 25 bp, Homo sapien
tttttgcaggagaccgtagtccttc

SEQ ID NO: 4372189 - DNA, 25 bp, Homo sapien
ttgcaggagaccgtagtccttccct

SEQ ID NO: 4372190 - DNA, 25 bp, Homo sapien
ctccttctgccaaccatctacacac

SEQ ID NO: 4372191 - DNA, 25 bp, Homo sapien
tagagctgcggtagaggaggcctgt

SEQ ID NO: 4372192 - DNA, 25 bp, Homo sapien
cctgtggctggtctggggccaacct

SEQ ID NO: 4372193 - DNA, 25 bp, Homo sapien
tggtctggggccaaccttgggctcc

SEQ ID NO: 4372194 - DNA, 25 bp, Homo sapien
tgtggttcgtattcaggaagtgttc

SEQ ID NO: 4372195 - DNA, 25 bp, Homo sapien
tctgtggttcgtattcaggaagtgt

SEQ ID NO: 4372196 - DNA, 25 bp, Homo sapien
cttctgatctgtggttcgtattcag

SEQ ID NO: 4372197 - DNA, 25 bp, Homo sapien
tgatctgtggttcgtattcaggaag

SEQ ID NO: 4372198 - DNA, 25 bp, Homo sapien
gaaccattgctctagatcagggata

SEQ ID NO: 4372199 - DNA, 25 bp, Homo sapien
tgagcagagtgtcactgaaccattg

SEQ ID NO: 4372200 - DNA, 25 bp, Homo sapien
cccacagttctagccaagagggcag

SEQ ID NO: 4372201 - DNA, 25 bp, Homo sapien
cagcagctgtggactagtcgttggc

SEQ ID NO: 4372202 - DNA, 25 bp, Homo sapien
cacatataactcagtcagagtctgg

SEQ ID NO: 4372203 - DNA, 25 bp, Homo sapien
cccttccacatataactcagtcaga

SEQ ID NO: 4372204 - DNA, 25 bp, Homo sapien
ttcatgggaaattgggtgagagcct

SEQ ID NO: 4372205 - DNA, 25 bp, Homo sapien
tataactcagtcagagtctggtcct

SEQ ID NO: 4372206 - DNA, 25 bp, Homo sapien
gacatcaagagctcattggcatggg

SEQ ID NO: 4372207 - DNA, 25 bp, Homo sapien
gcccagcaattggatgttgccatgt

SEQ ID NO: 4372208 - DNA, 25 bp, Homo sapien
cccagcaattggatgttgccatgtg

SEQ ID NO: 4372209 - DNA, 25 bp, Homo sapien
aggaggacatcaagagctcattggc

SEQ ID NO: 4372210 - DNA, 25 bp, Homo sapien
tgttcagaacgtcttgctgggtgtc

SEQ ID NO: 4372211 - DNA, 25 bp, Homo sapien
gggtgtcctgctctcaattttccac

SEQ ID NO: 4372212 - DNA, 25 bp, Homo sapien
ctgggtgtcctgctctcaattttcc

SEQ ID NO: 4372213 - DNA, 25 bp, Homo sapien
tcagaacgtcttgctgggtgtcctg

SEQ ID NO: 4372214 - DNA, 25 bp, Homo sapien
ggtggcctgatgttcccgggcctca

SEQ ID NO: 4372215 - DNA, 25 bp, Homo sapien
cctcttcacagaaagagacgagaga

SEQ ID NO: 4372216 - DNA, 25 bp, Homo sapien
tggcctgatgttcccgggcctcatc

SEQ ID NO: 4372217 - DNA, 25 bp, Homo sapien
agaaatctgcttgatgagggtggcc

SEQ ID NO: 4372218 - DNA, 25 bp, Homo sapien
gaccaagcaaagtactcagcttgtg

SEQ ID NO: 4372219 - DNA, 25 bp, Homo sapien
aagcaaagtactcagcttgtgcaag

SEQ ID NO: 4372220 - DNA, 25 bp, Homo sapien
ctgaccaagcaaagtactcagcttg

SEQ ID NO: 4372221 - DNA, 25 bp, Homo sapien
gcaaagtactcagcttgtgcaagat

SEQ ID NO: 4372222 - DNA, 25 bp, Homo sapien
ttgatatggccctttggagctgcca

SEQ ID NO: 4372223 - DNA, 25 bp, Homo sapien
cctttgatatggccctttggagctg

SEQ ID NO: 4372224 - DNA, 25 bp, Homo sapien
agccaagtctagcatcaggtctgca

SEQ ID NO: 4372225 - DNA, 25 bp, Homo sapien
ctcagccaagtctagcatcaggtct

SEQ ID NO: 4372226 - DNA, 25 bp, Homo sapien
ttagatgaaaatcgagcaggtccat

SEQ ID NO: 4372227 - DNA, 25 bp, Homo sapien
ccttagatgaaaatcgagcaggtcc

SEQ ID NO: 4372228 - DNA, 25 bp, Homo sapien
cttagatgaaaatcgagcaggtcca

SEQ ID NO: 4372229 - DNA, 25 bp, Homo sapien
tccttagatgaaaatcgagcaggtc

SEQ ID NO: 4372230 - DNA, 25 bp, Homo sapien
tataccactgttgttccaaaccagt

SEQ ID NO: 4372231 - DNA, 25 bp, Homo sapien
gattttttataccactgttgttcca

SEQ ID NO: 4372232 - DNA, 25 bp, Homo sapien
tactgattttttataccactgttgt

SEQ ID NO: 4372233 - DNA, 25 bp, Homo sapien
cctgtactgattttttataccactg

SEQ ID NO: 4372234 - DNA, 25 bp, Homo sapien
gctactgacagccaccatgtgcttg

SEQ ID NO: 4372235 - DNA, 25 bp, Homo sapien
tactgacagccaccatgtgcttggc

SEQ ID NO: 4372236 - DNA, 25 bp, Homo sapien
atgctactgacagccaccatgtgct

SEQ ID NO: 4372237 - DNA, 25 bp, Homo sapien
actgacagccaccatgtgcttggct

SEQ ID NO: 4372238 - DNA, 25 bp, Homo sapien
agtcagtttggtaaattgccaactc

SEQ ID NO: 4372239 - DNA, 25 bp, Homo sapien
tgcgacagtttgctgttaccacctc

SEQ ID NO: 4372240 - DNA, 25 bp, Homo sapien
tgctgcttctaccactgcgacagtt

SEQ ID NO: 4372241 - DNA, 25 bp, Homo sapien
ggtaaattgccaactccagagatga

SEQ ID NO: 4372242 - DNA, 25 bp, Homo sapien
taacaaaagtccacttgctgtagac

SEQ ID NO: 4372243 - DNA, 25 bp, Homo sapien
aaagtccacttgctgtagacttttc

SEQ ID NO: 4372244 - DNA, 25 bp, Homo sapien
gagagtttcaggatgtgggatgtgg

SEQ ID NO: 4372245 - DNA, 25 bp, Homo sapien
cactgttgacaattccatggagagt

SEQ ID NO: 4372246 - DNA, 25 bp, Homo sapien
tttctaagctcacaccctcttgtac

SEQ ID NO: 4372247 - DNA, 25 bp, Homo sapien
cagtggtgtttatttggctcagcag

SEQ ID NO: 4372248 - DNA, 25 bp, Homo sapien
gggacatcacctcagtggtgtttat

SEQ ID NO: 4372249 - DNA, 25 bp, Homo sapien
catcacctcagtggtgtttatttgg

SEQ ID NO: 4372250 - DNA, 25 bp, Homo sapien
cctcagtggtgtttatttggctcag

SEQ ID NO: 4372251 - DNA, 25 bp, Homo sapien
gggggaatgatgcaggcaagaaggc

SEQ ID NO: 4372252 - DNA, 25 bp, Homo sapien
ttagaacctgtgctagggggaatga

SEQ ID NO: 4372253 - DNA, 25 bp, Homo sapien
tatttagaacctgtgctagggggaa

SEQ ID NO: 4372254 - DNA, 25 bp, Homo sapien
aatatatttagaacctgtgctaggg

SEQ ID NO: 4372255 - DNA, 25 bp, Homo sapien
gaaggactcaacctgccattgttgg

SEQ ID NO: 4372256 - DNA, 25 bp, Homo sapien
tagccttatggagcggaattctgcc

SEQ ID NO: 4372257 - DNA, 25 bp, Homo sapien
ccttgtgatatccaaagcagagcca

SEQ ID NO: 4372258 - DNA, 25 bp, Homo sapien
gagcttagaagcaggttcacaccca

SEQ ID NO: 4372259 - DNA, 25 bp, Homo sapien
gcacaagaccaagttttgtacttcc

SEQ ID NO: 4372260 - DNA, 25 bp, Homo sapien
agaaggtagaaacgtcatgcacaag

SEQ ID NO: 4372261 - DNA, 25 bp, Homo sapien
tgctgtagacttgcttctttctttc

SEQ ID NO: 4372262 - DNA, 25 bp, Homo sapien
ttccttgctgtagacttgcttcttt

SEQ ID NO: 4372263 - DNA, 25 bp, Homo sapien
agagcaagccattcagccggccaga

SEQ ID NO: 4372264 - DNA, 25 bp, Homo sapien
agcaagccattcagccggccagagt

SEQ ID NO: 4372265 - DNA, 25 bp, Homo sapien
ctagagcaagccattcagccggcca

SEQ ID NO: 4372266 - DNA, 25 bp, Homo sapien
gcaagccattcagccggccagagtt

SEQ ID NO: 4372267 - DNA, 25 bp, Homo sapien
tattcacaagttgtaccccccacat

SEQ ID NO: 4372268 - DNA, 25 bp, Homo sapien
ctattcacaagttgtaccccccaca

SEQ ID NO: 4372269 - DNA, 25 bp, Homo sapien
agtgtttgggaggtcgttgttattg

SEQ ID NO: 4372270 - DNA, 25 bp, Homo sapien
ggtataaacagccaatccatttaca

SEQ ID NO: 4372271 - DNA, 25 bp, Homo sapien
aatccatttacatcgacaccttctt

SEQ ID NO: 4372272 - DNA, 25 bp, Homo sapien
ccctgctccagcatatttggtataa

SEQ ID NO: 4372273 - DNA, 25 bp, Homo sapien
ggagaagaatagtgacaacatcccc

SEQ ID NO: 4372274 - DNA, 25 bp, Homo sapien
tggagaagaatagtgacaacatccc

SEQ ID NO: 4372275 - DNA, 25 bp, Homo sapien
ttggagaagaatagtgacaacatcc

SEQ ID NO: 4372276 - DNA, 25 bp, Homo sapien
acacttggcaaatgccctctgtgcc

SEQ ID NO: 4372277 - DNA, 25 bp, Homo sapien
gcacagtaattagggactggatgtt

SEQ ID NO: 4372278 - DNA, 25 bp, Homo sapien
ttcctggcacagtaattagggactg

SEQ ID NO: 4372279 - DNA, 25 bp, Homo sapien
aaagtcatgtaacatataggaagaa

SEQ ID NO: 4372280 - DNA, 25 bp, Homo sapien
tagcagctgaagtgaactttcctgg

SEQ ID NO: 4372281 - DNA, 25 bp, Homo sapien
cagccagagtccctctctcccctca

SEQ ID NO: 4372282 - DNA, 25 bp, Homo sapien
agccagagtccctctctcccctcac

SEQ ID NO: 4372283 - DNA, 25 bp, Homo sapien
tcagccagagtccctctctcccctc

SEQ ID NO: 4372284 - DNA, 25 bp, Homo sapien
gctgagaatttatcacccgttgctt

SEQ ID NO: 4372285 - DNA, 25 bp, Homo sapien
ttctctgcaaagactgtgttgaaag

SEQ ID NO: 4372286 - DNA, 25 bp, Homo sapien
caaagactgtgttgaaagctgctga

SEQ ID NO: 4372287 - DNA, 25 bp, Homo sapien
aagctgctgagaatttatcacccgt

SEQ ID NO: 4372288 - DNA, 25 bp, Homo sapien
cttctctggcctcttcaccttgcat

SEQ ID NO: 4372289 - DNA, 25 bp, Homo sapien
accaattgccattccactcaatgca

SEQ ID NO: 4372290 - DNA, 25 bp, Homo sapien
attccactcaatgcacatgggccca

SEQ ID NO: 4372291 - DNA, 25 bp, Homo sapien
ccttcgctggtctcaggtcttataa

SEQ ID NO: 4372292 - DNA, 25 bp, Homo sapien
caaaggacgacatatgagggttgca

SEQ ID NO: 4372293 - DNA, 25 bp, Homo sapien
tcaagggtttgtcacatcaggaaac

SEQ ID NO: 4372294 - DNA, 25 bp, Homo sapien
tgtggaatgagatagcccatgcctg

SEQ ID NO: 4372295 - DNA, 25 bp, Homo sapien
tgccatgagcagagatagacactaa

SEQ ID NO: 4372296 - DNA, 25 bp, Homo sapien
tctgaggaactcatgtccaaagcct

SEQ ID NO: 4372297 - DNA, 25 bp, Homo sapien
gtctccatcacaagtcatactcatc

SEQ ID NO: 4372298 - DNA, 25 bp, Homo sapien
cgtctccatcacaagtcatactcat

SEQ ID NO: 4372299 - DNA, 25 bp, Homo sapien
ggtatattcaatagccccagtagga

SEQ ID NO: 4372300 - DNA, 25 bp, Homo sapien
taggaaatcattgtactcacacccc

SEQ ID NO: 4372301 - DNA, 25 bp, Homo sapien
tgagaaacatctagtcataacgctg

SEQ ID NO: 4372302 - DNA, 25 bp, Homo sapien
gtactcacaccccaaatcatatgag

SEQ ID NO: 4372303 - DNA, 25 bp, Homo sapien
gagacaaagtttcccagttgacaaa

SEQ ID NO: 4372304 - DNA, 25 bp, Homo sapien
tgacaaatatggtgagggcttaaaa

SEQ ID NO: 4372305 - DNA, 25 bp, Homo sapien
ggcttaaaatagacagtgctctgga

SEQ ID NO: 4372306 - DNA, 25 bp, Homo sapien
gttgattccaaggatggcaaagcca

SEQ ID NO: 4372307 - DNA, 25 bp, Homo sapien
tccagttcaaagtttaatccttctg

SEQ ID NO: 4372308 - DNA, 25 bp, Homo sapien
gttcaaagtttaatccttctggatg

SEQ ID NO: 4372309 - DNA, 25 bp, Homo sapien
aagtttaatccttctggatgatgtc

SEQ ID NO: 4372310 - DNA, 25 bp, Homo sapien
ctccacaggggagaccggccaaagt

SEQ ID NO: 4372311 - DNA, 25 bp, Homo sapien
gccccttggttaagccacgattctg

SEQ ID NO: 4372312 - DNA, 25 bp, Homo sapien
gttaagccacgattctgctctctga

SEQ ID NO: 4372313 - DNA, 25 bp, Homo sapien
ggatggaggccccttggttaagcca

SEQ ID NO: 4372314 - DNA, 25 bp, Homo sapien
ctttttcatcgttttccttggctct

SEQ ID NO: 4372315 - DNA, 25 bp, Homo sapien
acaaagtctcatacacatcagcagg

SEQ ID NO: 4372316 - DNA, 25 bp, Homo sapien
caacatcacaggacgataaccaggt

SEQ ID NO: 4372317 - DNA, 25 bp, Homo sapien
catcacaggacgataaccaggttcc

SEQ ID NO: 4372318 - DNA, 25 bp, Homo sapien
caggacgataaccaggttccttttg

SEQ ID NO: 4372319 - DNA, 25 bp, Homo sapien
tcacaacatcacaggacgataacca

SEQ ID NO: 4372320 - DNA, 25 bp, Homo sapien
agccagggtagagcccatacacatg

SEQ ID NO: 4372321 - DNA, 25 bp, Homo sapien
gagcccatacacatggggaagtgtg

SEQ ID NO: 4372322 - DNA, 25 bp, Homo sapien
tgtggccgccgcgtcaaggggagaa

SEQ ID NO: 4372323 - DNA, 25 bp, Homo sapien
gcaatgtcagtagactccttccact

SEQ ID NO: 4372324 - DNA, 25 bp, Homo sapien
tccatggccacgtgccataggatgg

SEQ ID NO: 4372325 - DNA, 25 bp, Homo sapien
gccaagatgtggcaggattccctgc

SEQ ID NO: 4372326 - DNA, 25 bp, Homo sapien
gctgggattcatccagcagtccaca

SEQ ID NO: 4372327 - DNA, 25 bp, Homo sapien
cagtccacaccaccaaagggagctt

SEQ ID NO: 4372328 - DNA, 25 bp, Homo sapien
taagcacagaggaggcccaactcac

SEQ ID NO: 4372329 - DNA, 25 bp, Homo sapien
gatgtaagcacagaggaggcccaac

SEQ ID NO: 4372330 - DNA, 25 bp, Homo sapien
atcctgaggatgtaagcacagagga

SEQ ID NO: 4372331 - DNA, 25 bp, Homo sapien
aggatgtaagcacagaggaggccca

SEQ ID NO: 4372332 - DNA, 25 bp, Homo sapien
tccacggccttctgtgatgtgacag

SEQ ID NO: 4372333 - DNA, 25 bp, Homo sapien
ggaggtgaccctgccgatcgtattc

SEQ ID NO: 4372334 - DNA, 25 bp, Homo sapien
gatgtgacagcaataaccccaacca

SEQ ID NO: 4372335 - DNA, 25 bp, Homo sapien
tcatccatctgctactgcaaagtgg

SEQ ID NO: 4372336 - DNA, 25 bp, Homo sapien
cataagttgggagatgcaaacacca

SEQ ID NO: 4372337 - DNA, 25 bp, Homo sapien
cattgccttcaacttcccagcgtaa

SEQ ID NO: 4372338 - DNA, 25 bp, Homo sapien
ccaggatagttgctgcttccccaca

SEQ ID NO: 4372339 - DNA, 25 bp, Homo sapien
caaacaccaggatttgcacagtgct

SEQ ID NO: 4372340 - DNA, 25 bp, Homo sapien
atagtgatggtaggcagggaaccac

SEQ ID NO: 4372341 - DNA, 25 bp, Homo sapien
ggaaccacaaatagctcccgtttgc

SEQ ID NO: 4372342 - DNA, 25 bp, Homo sapien
gccatatcgcaagtgtaaagtaata

SEQ ID NO: 4372343 - DNA, 25 bp, Homo sapien
aagtaatagtgtcaaggggagagtc

SEQ ID NO: 4372344 - DNA, 25 bp, Homo sapien
atttaaccttgccagcaaatgtgag

SEQ ID NO: 4372345 - DNA, 25 bp, Homo sapien
tatttaaccttgccagcaaatgtga

SEQ ID NO: 4372346 - DNA, 25 bp, Homo sapien
taaccttgccagcaaatgtgagttt

SEQ ID NO: 4372347 - DNA, 25 bp, Homo sapien
tttaaccttgccagcaaatgtgagt

SEQ ID NO: 4372348 - DNA, 25 bp, Homo sapien
gattgccatatgtcaacaatagccc

SEQ ID NO: 4372349 - DNA, 25 bp, Homo sapien
tgtgatttccaggtatctgactggg

SEQ ID NO: 4372350 - DNA, 25 bp, Homo sapien
gggccaggcgatccaaatattgagc

SEQ ID NO: 4372351 - DNA, 25 bp, Homo sapien
aacaggactaaatcagattgccata

SEQ ID NO: 4372352 - DNA, 25 bp, Homo sapien
acgatgattctgaggaaagtagttt

SEQ ID NO: 4372353 - DNA, 25 bp, Homo sapien
gccttccaaatttcatacctccatt

SEQ ID NO: 4372354 - DNA, 25 bp, Homo sapien
atacctccattgatgaactctaacg

SEQ ID NO: 4372355 - DNA, 25 bp, Homo sapien
gatgaactctaacgatgattctgag

SEQ ID NO: 4372356 - DNA, 25 bp, Homo sapien
tggtgaccttcaatagactgtgaaa

SEQ ID NO: 4372357 - DNA, 25 bp, Homo sapien
tctggtgaccttcaatagactgtga

SEQ ID NO: 4372358 - DNA, 25 bp, Homo sapien
ctggtgaccttcaatagactgtgaa

SEQ ID NO: 4372359 - DNA, 25 bp, Homo sapien
cttggagactgtaaacagagttgca

SEQ ID NO: 4372360 - DNA, 25 bp, Homo sapien
aagccaaaggtgtgttgtttgtaca

SEQ ID NO: 4372361 - DNA, 25 bp, Homo sapien
ggagttaaagtcacccatggtgctg

SEQ ID NO: 4372362 - DNA, 25 bp, Homo sapien
ctctgggtaatggtaggaatgatac

SEQ ID NO: 4372363 - DNA, 25 bp, Homo sapien
tgattacatcaagccccacatgagc

SEQ ID NO: 4372364 - DNA, 25 bp, Homo sapien
cctggagaccataaacggtggcagc

SEQ ID NO: 4372365 - DNA, 25 bp, Homo sapien
gtcagaatctggctatgctgctgct

SEQ ID NO: 4372366 - DNA, 25 bp, Homo sapien
tccccatagagacgttgatcaatga

SEQ ID NO: 4372367 - DNA, 25 bp, Homo sapien
ttccattgtgtagatgtctattgtg

SEQ ID NO: 4372368 - DNA, 25 bp, Homo sapien
ccattgtgtagatgtctattgtggg

SEQ ID NO: 4372369 - DNA, 25 bp, Homo sapien
tccattgtgtagatgtctattgtgg

SEQ ID NO: 4372370 - DNA, 25 bp, Homo sapien
catcctggccctccccgttctttcg

SEQ ID NO: 4372371 - DNA, 25 bp, Homo sapien
atcatcctggccctccccgttcttt

SEQ ID NO: 4372372 - DNA, 25 bp, Homo sapien
tctgagtgtggtgacctgctggcca

SEQ ID NO: 4372373 - DNA, 25 bp, Homo sapien
tatctactctgagtgtggtgacctg

SEQ ID NO: 4372374 - DNA, 25 bp, Homo sapien
ctgagacttgaaggctgacgtggac

SEQ ID NO: 4372375 - DNA, 25 bp, Homo sapien
gagcagtgttcacattgcctggacc

SEQ ID NO: 4372376 - DNA, 25 bp, Homo sapien
tctaatgggctctggcaatcaatgg

SEQ ID NO: 4372377 - DNA, 25 bp, Homo sapien
tggacctacagaggatgaatgctcc

SEQ ID NO: 4372378 - DNA, 25 bp, Homo sapien
agggtgggcctgcacatcgaaagac

SEQ ID NO: 4372379 - DNA, 25 bp, Homo sapien
cacatcgaaagaccgaccgttcatg

SEQ ID NO: 4372380 - DNA, 25 bp, Homo sapien
cctgcacatcgaaagaccgaccgtt

SEQ ID NO: 4372381 - DNA, 25 bp, Homo sapien
tgggcctgcacatcgaaagaccgac

SEQ ID NO: 4372382 - DNA, 25 bp, Homo sapien
gatcacactgattcctttcagtgca

SEQ ID NO: 4372383 - DNA, 25 bp, Homo sapien
gattagctgatcaataaggccacag

SEQ ID NO: 4372384 - DNA, 25 bp, Homo sapien
agactgaattgtttttagaccactg

SEQ ID NO: 4372385 - DNA, 25 bp, Homo sapien
aaaagatgctaatttgatcacactg

SEQ ID NO: 4372386 - DNA, 25 bp, Homo sapien
ctggaacagtggatgacttctggac

SEQ ID NO: 4372387 - DNA, 25 bp, Homo sapien
gaacagtggatgacttctggacctt

SEQ ID NO: 4372388 - DNA, 25 bp, Homo sapien
cagtggatgacttctggaccttctg

SEQ ID NO: 4372389 - DNA, 25 bp, Homo sapien
gatgacttctggaccttctgctcct

SEQ ID NO: 4372390 - DNA, 25 bp, Homo sapien
gaaagctgtagcagtcggcctgttt

SEQ ID NO: 4372391 - DNA, 25 bp, Homo sapien
tacatattcattactggcagcctcg

SEQ ID NO: 4372392 - DNA, 25 bp, Homo sapien
ggttgattgcctgtgaccctctgcg

SEQ ID NO: 4372393 - DNA, 25 bp, Homo sapien
gcagcctcgctaaacggattgcaca

SEQ ID NO: 4372394 - DNA, 25 bp, Homo sapien
ttggaccaagttccttcatcaatgt

SEQ ID NO: 4372395 - DNA, 25 bp, Homo sapien
tacattcctcaagctttaagaattt

SEQ ID NO: 4372396 - DNA, 25 bp, Homo sapien
tcctcaagctttaagaatttcttca

SEQ ID NO: 4372397 - DNA, 25 bp, Homo sapien
tcaacgagctggaactttggaccaa

SEQ ID NO: 4372398 - DNA, 25 bp, Homo sapien
ttcatccagaaagatggtgtccttg

SEQ ID NO: 4372399 - DNA, 25 bp, Homo sapien
tccagaaagatggtgtccttgaatc

SEQ ID NO: 4372400 - DNA, 25 bp, Homo sapien
taaccaggcgataatgagctttctt

SEQ ID NO: 4372401 - DNA, 25 bp, Homo sapien
ggtgtccttgaatctaaccaggcga

SEQ ID NO: 4372402 - DNA, 25 bp, Homo sapien
ttagaatacaaccatcccatagtac

SEQ ID NO: 4372403 - DNA, 25 bp, Homo sapien
agaatacaaccatcccatagtacag

SEQ ID NO: 4372404 - DNA, 25 bp, Homo sapien
cattagaatacaaccatcccatagt

SEQ ID NO: 4372405 - DNA, 25 bp, Homo sapien
tagaatacaaccatcccatagtaca

SEQ ID NO: 4372406 - DNA, 25 bp, Homo sapien
tgcagtaccgtgaagttaagtggaa

SEQ ID NO: 4372407 - DNA, 25 bp, Homo sapien
ccattttcagtagcttgcagtaccg

SEQ ID NO: 4372408 - DNA, 25 bp, Homo sapien
ttcgcaccaagtagattataccagt

SEQ ID NO: 4372409 - DNA, 25 bp, Homo sapien
cattgccaggcaccatttcttatga

SEQ ID NO: 4372410 - DNA, 25 bp, Homo sapien
tcaggctcttgggtctctaaatttc

SEQ ID NO: 4372411 - DNA, 25 bp, Homo sapien
tcttgggtctctaaatttcccatga

SEQ ID NO: 4372412 - DNA, 25 bp, Homo sapien
atgagcacttctgaactaccggaat

SEQ ID NO: 4372413 - DNA, 25 bp, Homo sapien
gagcacttctgaactaccggaattc

SEQ ID NO: 4372414 - DNA, 25 bp, Homo sapien
tctggtttgttgtatcgtaagatct

SEQ ID NO: 4372415 - DNA, 25 bp, Homo sapien
agtcacagttatctgtgactctggt

SEQ ID NO: 4372416 - DNA, 25 bp, Homo sapien
gtcacagttatctgtgactctggtt

SEQ ID NO: 4372417 - DNA, 25 bp, Homo sapien
gtttgttgtatcgtaagatcttgct

SEQ ID NO: 4372418 - DNA, 25 bp, Homo sapien
tctgctctgtctggcgataatgact

SEQ ID NO: 4372419 - DNA, 25 bp, Homo sapien
tgtaatgatttctggacagcctgag

SEQ ID NO: 4372420 - DNA, 25 bp, Homo sapien
ttcttagcacaacagcagggtcgcg

SEQ ID NO: 4372421 - DNA, 25 bp, Homo sapien
ccattatctgcagtccatacttctg

SEQ ID NO: 4372422 - DNA, 25 bp, Homo sapien
gttgaagtcaaagacaaattgtcca

SEQ ID NO: 4372423 - DNA, 25 bp, Homo sapien
cttgttgaagtcaaagacaaattgt

SEQ ID NO: 4372424 - DNA, 25 bp, Homo sapien
ttgaagtcaaagacaaattgtccat

SEQ ID NO: 4372425 - DNA, 25 bp, Homo sapien
tgttgaagtcaaagacaaattgtcc

SEQ ID NO: 4372426 - DNA, 25 bp, Homo sapien
tgcctcaaatcctgtttagaagtag

SEQ ID NO: 4372427 - DNA, 25 bp, Homo sapien
catattatatacaagttgcctcaaa

SEQ ID NO: 4372428 - DNA, 25 bp, Homo sapien
ttgcctcaaatcctgtttagaagta

SEQ ID NO: 4372429 - DNA, 25 bp, Homo sapien
ttatcatattatatacaagttgcct

SEQ ID NO: 4372430 - DNA, 25 bp, Homo sapien
aaacagatgatcagttccaaatcac

SEQ ID NO: 4372431 - DNA, 25 bp, Homo sapien
ctggttggaaggaccacctagctgc

SEQ ID NO: 4372432 - DNA, 25 bp, Homo sapien
ggtgaactgacatccgagccagagt

SEQ ID NO: 4372433 - DNA, 25 bp, Homo sapien
agggcttgccccaaaacagatgatc

SEQ ID NO: 4372434 - DNA, 25 bp, Homo sapien
tggtcagtagagcagtagcattgct

SEQ ID NO: 4372435 - DNA, 25 bp, Homo sapien
cagtagagcagtagcattgctcaga

SEQ ID NO: 4372436 - DNA, 25 bp, Homo sapien
gtcagtagagcagtagcattgctca

SEQ ID NO: 4372437 - DNA, 25 bp, Homo sapien
agagcagtagcattgctcagagaac

SEQ ID NO: 4372438 - DNA, 25 bp, Homo sapien
tgtttataactatacagaaactttc

SEQ ID NO: 4372439 - DNA, 25 bp, Homo sapien
cattcatgccacaaatatttcacat

SEQ ID NO: 4372440 - DNA, 25 bp, Homo sapien
tgttattatgtgacaggtactgtgt

SEQ ID NO: 4372441 - DNA, 25 bp, Homo sapien
tctgcgacagagcacaagaaaataa

SEQ ID NO: 4372442 - DNA, 25 bp, Homo sapien
ttttgatgtactcctttctgaaagt

SEQ ID NO: 4372443 - DNA, 25 bp, Homo sapien
aatttttttgatgtactcctttctg

SEQ ID NO: 4372444 - DNA, 25 bp, Homo sapien
ctgaaagtgatctttatcccacttc

SEQ ID NO: 4372445 - DNA, 25 bp, Homo sapien
tggatgggaatttttttgatgtact

SEQ ID NO: 4372446 - DNA, 25 bp, Homo sapien
gcagtacctggattatcaacaccct

SEQ ID NO: 4372447 - DNA, 25 bp, Homo sapien
atttcctggaactatgtcggcagta

SEQ ID NO: 4372448 - DNA, 25 bp, Homo sapien
gaactatgtcggcagtacctggatt

SEQ ID NO: 4372449 - DNA, 25 bp, Homo sapien
tatgtcggcagtacctggattatca

SEQ ID NO: 4372450 - DNA, 25 bp, Homo sapien
tctaaggaggtcagcaatatggaaa

SEQ ID NO: 4372451 - DNA, 25 bp, Homo sapien
ctaaggaggtcagcaatatggaaac

SEQ ID NO: 4372452 - DNA, 25 bp, Homo sapien
ttgctgctaatgctcggtaaacatg

SEQ ID NO: 4372453 - DNA, 25 bp, Homo sapien
gctcggtaaacatgggcagccaagg

SEQ ID NO: 4372454 - DNA, 25 bp, Homo sapien
taaacatgggcagccaaggaaaatg

SEQ ID NO: 4372455 - DNA, 25 bp, Homo sapien
ttttgctgctaatgctcggtaaaca

SEQ ID NO: 4372456 - DNA, 25 bp, Homo sapien
ctagcgaattgggatacagactggc

SEQ ID NO: 4372457 - DNA, 25 bp, Homo sapien
gggaggagacacaccatcaatggaa

SEQ ID NO: 4372458 - DNA, 25 bp, Homo sapien
gcaaaccggaatttactgtcagcag

SEQ ID NO: 4372459 - DNA, 25 bp, Homo sapien
gactggcttagtccaaggtatccca

SEQ ID NO: 4372460 - DNA, 25 bp, Homo sapien
taataatttctcagagaaatcattg

SEQ ID NO: 4372461 - DNA, 25 bp, Homo sapien
cagagaaatcattgtctgtggcatt

SEQ ID NO: 4372462 - DNA, 25 bp, Homo sapien
gagaaatcattgtctgtggcatttt

SEQ ID NO: 4372463 - DNA, 25 bp, Homo sapien
ctcagagaaatcattgtctgtggca

SEQ ID NO: 4372464 - DNA, 25 bp, Homo sapien
ggctttccgagtccaagatgcgata

SEQ ID NO: 4372465 - DNA, 25 bp, Homo sapien
tttgcggtgagccaaactccgcggt

SEQ ID NO: 4372466 - DNA, 25 bp, Homo sapien
caattctaggccctcgagtaggaaa

SEQ ID NO: 4372467 - DNA, 25 bp, Homo sapien
agagtccatcgttgcagctttgcgg

SEQ ID NO: 4372468 - DNA, 25 bp, Homo sapien
cggaagccgaatccgcggccagcgt

SEQ ID NO: 4372469 - DNA, 25 bp, Homo sapien
tttcagtctgagatcggcgatgctg

SEQ ID NO: 4372470 - DNA, 25 bp, Homo sapien
cagggctgcggcgtgctttttggct

SEQ ID NO: 4372471 - DNA, 25 bp, Homo sapien
gctgggaacatcatgtagggcgcgt

SEQ ID NO: 4372472 - DNA, 25 bp, Homo sapien
aaggacaagggcgtcacgttgcaat

SEQ ID NO: 4372473 - DNA, 25 bp, Homo sapien
gaaaggacaagggcgtcacgttgca

SEQ ID NO: 4372474 - DNA, 25 bp, Homo sapien
ctgaaaggacaagggcgtcacgttg

SEQ ID NO: 4372475 - DNA, 25 bp, Homo sapien
ggacaagggcgtcacgttgcaatga

SEQ ID NO: 4372476 - DNA, 25 bp, Homo sapien
gctgtgcatcttgttccgacagtga

SEQ ID NO: 4372477 - DNA, 25 bp, Homo sapien
ttggctgtgcatcttgttccgacag

SEQ ID NO: 4372478 - DNA, 25 bp, Homo sapien
acagagcattaacggcgtccagctt

SEQ ID NO: 4372479 - DNA, 25 bp, Homo sapien
gaatagaaacagagcattaacggcg

SEQ ID NO: 4372480 - DNA, 25 bp, Homo sapien
cgaaactcgcttagggtaggcttat

SEQ ID NO: 4372481 - DNA, 25 bp, Homo sapien
cacatggatactccagtgtcccctg

SEQ ID NO: 4372482 - DNA, 25 bp, Homo sapien
ccctgggtctccgaaactcgcttag

SEQ ID NO: 4372483 - DNA, 25 bp, Homo sapien
gttccacatggatactccagtgtcc

SEQ ID NO: 4372484 - DNA, 25 bp, Homo sapien
gctgaaatggcatccttaaagcacc

SEQ ID NO: 4372485 - DNA, 25 bp, Homo sapien
taaggtgcgactctacaagcttcaa

SEQ ID NO: 4372486 - DNA, 25 bp, Homo sapien
gactctacaagcttcaaactggctg

SEQ ID NO: 4372487 - DNA, 25 bp, Homo sapien
gttgacataaggtgcgactctacaa

SEQ ID NO: 4372488 - DNA, 25 bp, Homo sapien
aactggctggcggcccctatgagaa

SEQ ID NO: 4372489 - DNA, 25 bp, Homo sapien
tttcttgttttctacatttagctct

SEQ ID NO: 4372490 - DNA, 25 bp, Homo sapien
ctttatggagttgattttcttgttt

SEQ ID NO: 4372491 - DNA, 25 bp, Homo sapien
cttgttttctacatttagctcttcg

SEQ ID NO: 4372492 - DNA, 25 bp, Homo sapien
gttttctacatttagctcttcgatt

SEQ ID NO: 4372493 - DNA, 25 bp, Homo sapien
cagctcattgagttgttccagggtg

SEQ ID NO: 4372494 - DNA, 25 bp, Homo sapien
gatagtgggtctcgtcaaaaagcct

SEQ ID NO: 4372495 - DNA, 25 bp, Homo sapien
tggctcagttcctctcgcatgaagg

SEQ ID NO: 4372496 - DNA, 25 bp, Homo sapien
cagggtgaaattggtccgacttcgc

SEQ ID NO: 4372497 - DNA, 25 bp, Homo sapien
ttcgcatcctctttgcgatctttca

SEQ ID NO: 4372498 - DNA, 25 bp, Homo sapien
tttgcgatctttcagctccggggac

SEQ ID NO: 4372499 - DNA, 25 bp, Homo sapien
ttgcgatctttcagctccggggaca

SEQ ID NO: 4372500 - DNA, 25 bp, Homo sapien
cctttcgcatcctctttgcgatctt

SEQ ID NO: 4372501 - DNA, 25 bp, Homo sapien
taccagatttgtcgcaaaaaagaat

SEQ ID NO: 4372502 - DNA, 25 bp, Homo sapien
acagcaaatcctgttaccagatttg

SEQ ID NO: 4372503 - DNA, 25 bp, Homo sapien
tggaatcctggtccggcttctcaac

SEQ ID NO: 4372504 - DNA, 25 bp, Homo sapien
acacacacacggacgaaaacagcac

SEQ ID NO: 4372505 - DNA, 25 bp, Homo sapien
gcaaaggtcaagtctgagcggccgc

SEQ ID NO: 4372506 - DNA, 25 bp, Homo sapien
gaagcgcaaaggtcaagtctgagcg

SEQ ID NO: 4372507 - DNA, 25 bp, Homo sapien
ccggagaagcgcaaaggtcaagtct

SEQ ID NO: 4372508 - DNA, 25 bp, Homo sapien
ggaagaatatcccggagaagcgcaa

SEQ ID NO: 4372509 - DNA, 25 bp, Homo sapien
aaatcaaaggcgcagcgccaggcct

SEQ ID NO: 4372510 - DNA, 25 bp, Homo sapien
caaagtctggacataagggcgcggc

SEQ ID NO: 4372511 - DNA, 25 bp, Homo sapien
ccagaaggctggctcgttctcaggc

SEQ ID NO: 4372512 - DNA, 25 bp, Homo sapien
tttcgcactcacttgctccgcagca

SEQ ID NO: 4372513 - DNA, 25 bp, Homo sapien
cttgctggtctaatttaggaacaat

SEQ ID NO: 4372514 - DNA, 25 bp, Homo sapien
aggtatcagcgagagcaacagaccc

SEQ ID NO: 4372515 - DNA, 25 bp, Homo sapien
accccggtgttgtgccgcacaggga

SEQ ID NO: 4372516 - DNA, 25 bp, Homo sapien
aattgggccgaaaggtatcagcgag

SEQ ID NO: 4372517 - DNA, 25 bp, Homo sapien
ggacagccaggtaatctccgtcccg

SEQ ID NO: 4372518 - DNA, 25 bp, Homo sapien
cctggacagccaggtaatctccgtc

SEQ ID NO: 4372519 - DNA, 25 bp, Homo sapien
gcataaggtcccctggacagccagg

SEQ ID NO: 4372520 - DNA, 25 bp, Homo sapien
ggtcccctggacagccaggtaatct

SEQ ID NO: 4372521 - DNA, 25 bp, Homo sapien
caagcggaatattcgcgatcctcgg

SEQ ID NO: 4372522 - DNA, 25 bp, Homo sapien
ttttcatgcaaccagcagctcggat

SEQ ID NO: 4372523 - DNA, 25 bp, Homo sapien
tggaacctttatcctctgcgcccga

SEQ ID NO: 4372524 - DNA, 25 bp, Homo sapien
gtggaaacgcagactcgaccctaaa

SEQ ID NO: 4372525 - DNA, 25 bp, Homo sapien
cgaaacgcctcgcccgggagaagca

SEQ ID NO: 4372526 - DNA, 25 bp, Homo sapien
tcagctttcgttggcttccttctac

SEQ ID NO: 4372527 - DNA, 25 bp, Homo sapien
tttggcccctaagatccaaagattc

SEQ ID NO: 4372528 - DNA, 25 bp, Homo sapien
tccaaagattcaggggctctgcgga

SEQ ID NO: 4372529 - DNA, 25 bp, Homo sapien
ccctcccggcaaactctgcgctaga

SEQ ID NO: 4372530 - DNA, 25 bp, Homo sapien
tctgcggagttcgaggggtcttggc

SEQ ID NO: 4372531 - DNA, 25 bp, Homo sapien
cactatcactctagctgacaaagct

SEQ ID NO: 4372532 - DNA, 25 bp, Homo sapien
tccagggccctctccgtgtccctct

SEQ ID NO: 4372533 - DNA, 25 bp, Homo sapien
ctatcactctagctgacaaagctgg

SEQ ID NO: 4372534 - DNA, 25 bp, Homo sapien
tccactatcactctagctgacaaag

SEQ ID NO: 4372535 - DNA, 25 bp, Homo sapien
cctccgtcagtcgcgggctgcccgg

SEQ ID NO: 4372536 - DNA, 25 bp, Homo sapien
tccgtcagtcgcgggctgcccggct

SEQ ID NO: 4372537 - DNA, 25 bp, Homo sapien
ctccgtcagtcgcgggctgcccggc

SEQ ID NO: 4372538 - DNA, 25 bp, Homo sapien
ctcccggacgggagagcgccctcct

SEQ ID NO: 4372539 - DNA, 25 bp, Homo sapien
ggacgggagagcgccctcctccagc

SEQ ID NO: 4372540 - DNA, 25 bp, Homo sapien
tcccggacgggagagcgccctcctc

SEQ ID NO: 4372541 - DNA, 25 bp, Homo sapien
ccggacgggagagcgccctcctcca

SEQ ID NO: 4372542 - DNA, 25 bp, Homo sapien
tcgtcgcggcccgcctcggtgcagc

SEQ ID NO: 4372543 - DNA, 25 bp, Homo sapien
cctcggtgcagccggtcggctcctt

SEQ ID NO: 4372544 - DNA, 25 bp, Homo sapien
ggtgcagccggtcggctccttggcc

SEQ ID NO: 4372545 - DNA, 25 bp, Homo sapien
gcagccggtcggctccttggccccg

SEQ ID NO: 4372546 - DNA, 25 bp, Homo sapien
aagacttggagacgaacgccgtaag

SEQ ID NO: 4372547 - DNA, 25 bp, Homo sapien
gagacgaacgccgtaagttcttcca

SEQ ID NO: 4372548 - DNA, 25 bp, Homo sapien
tcaaaagacttggagacgaacgccg

SEQ ID NO: 4372549 - DNA, 25 bp, Homo sapien
ggtacgtgatcgcctccttcttctc

SEQ ID NO: 4372550 - DNA, 25 bp, Homo sapien
ccgccgcacgtcagcccggcgctca

SEQ ID NO: 4372551 - DNA, 25 bp, Homo sapien
gtcagcccggcgctcaacctctgcc

SEQ ID NO: 4372552 - DNA, 25 bp, Homo sapien
ctgctccagcccccccaataataac

SEQ ID NO: 4372553 - DNA, 25 bp, Homo sapien
gcccggcgctcaacctctgccagca

SEQ ID NO: 4372554 - DNA, 25 bp, Homo sapien
cactatttatacttcctaacggcgg

SEQ ID NO: 4372555 - DNA, 25 bp, Homo sapien
ttcagatctgatagcgacgctgcgc

SEQ ID NO: 4372556 - DNA, 25 bp, Homo sapien
tcttcctgcggagagttcagatctg

SEQ ID NO: 4372557 - DNA, 25 bp, Homo sapien
ccggagcgcgcttgttcaatgttaa

SEQ ID NO: 4372558 - DNA, 25 bp, Homo sapien
gatgcactcgatatctcggctgaag

SEQ ID NO: 4372559 - DNA, 25 bp, Homo sapien
ggcggcgccctgatctaaagaaacg

SEQ ID NO: 4372560 - DNA, 25 bp, Homo sapien
taaagaaacgactcagggactgcgg

SEQ ID NO: 4372561 - DNA, 25 bp, Homo sapien
aactgaagcaagttcggtggacgcc

SEQ ID NO: 4372562 - DNA, 25 bp, Homo sapien
atctttaggtcactttgggtggtat

SEQ ID NO: 4372563 - DNA, 25 bp, Homo sapien
aatagcattgaatctttaggtcact

SEQ ID NO: 4372564 - DNA, 25 bp, Homo sapien
agcattgaatctttaggtcactttg

SEQ ID NO: 4372565 - DNA, 25 bp, Homo sapien
ctttaggtcactttgggtggtattg

SEQ ID NO: 4372566 - DNA, 25 bp, Homo sapien
gcaaagacgatttgacttcctgtct

SEQ ID NO: 4372567 - DNA, 25 bp, Homo sapien
ggtttgttgtaaatggctcttgtta

SEQ ID NO: 4372568 - DNA, 25 bp, Homo sapien
aaaaatttatactcgccttctcctg

SEQ ID NO: 4372569 - DNA, 25 bp, Homo sapien
tgttaaatgtaatcaaccagccttc

SEQ ID NO: 4372570 - DNA, 25 bp, Homo sapien
gctattttgtctctcatgtctcctg

SEQ ID NO: 4372571 - DNA, 25 bp, Homo sapien
catctaaggcacatcttttgtaaac

SEQ ID NO: 4372572 - DNA, 25 bp, Homo sapien
aaattcattcagctacttttgtgtg

SEQ ID NO: 4372573 - DNA, 25 bp, Homo sapien
tgtcttgtgtaagtatggccacttc

SEQ ID NO: 4372574 - DNA, 25 bp, Homo sapien
agtccgttaccctaaaagccatgag

SEQ ID NO: 4372575 - DNA, 25 bp, Homo sapien
tctggcacctctccaaaatgctgga

SEQ ID NO: 4372576 - DNA, 25 bp, Homo sapien
tggagatttgctggccttagggaca

SEQ ID NO: 4372577 - DNA, 25 bp, Homo sapien
tgggtggccctcagaaaagtcagaa

SEQ ID NO: 4372578 - DNA, 25 bp, Homo sapien
tatctccacatttaagccattgtca

SEQ ID NO: 4372579 - DNA, 25 bp, Homo sapien
catcttctggccatcaactcatgtt

SEQ ID NO: 4372580 - DNA, 25 bp, Homo sapien
aagtatttcctgaatggtatcccag

SEQ ID NO: 4372581 - DNA, 25 bp, Homo sapien
taagtcatgtacaataatcagcctc

SEQ ID NO: 4372582 - DNA, 25 bp, Homo sapien
tccctgtttctccctatatagcctt

SEQ ID NO: 4372583 - DNA, 25 bp, Homo sapien
ccctatatagccttcttgaagtttc

SEQ ID NO: 4372584 - DNA, 25 bp, Homo sapien
aaatgccaattaggaggttgagtat

SEQ ID NO: 4372585 - DNA, 25 bp, Homo sapien
gattattgattggaaaagagttgga

SEQ ID NO: 4372586 - DNA, 25 bp, Homo sapien
ttatggctagttagggttttgagag

SEQ ID NO: 4372587 - DNA, 25 bp, Homo sapien
agagaataagcggaacctttgctct

SEQ ID NO: 4372588 - DNA, 25 bp, Homo sapien
gaataagcggaacctttgctctgag

SEQ ID NO: 4372589 - DNA, 25 bp, Homo sapien
tttgagagaataagcggaacctttg

SEQ ID NO: 4372590 - DNA, 25 bp, Homo sapien
tcttaggtgatagagaaactcccta

SEQ ID NO: 4372591 - DNA, 25 bp, Homo sapien
ccttcgtaattcactggactggtag

SEQ ID NO: 4372592 - DNA, 25 bp, Homo sapien
gatgataggaagagcccatgcaaag

SEQ ID NO: 4372593 - DNA, 25 bp, Homo sapien
taacaaggaggatagtcaatgaaca

SEQ ID NO: 4372594 - DNA, 25 bp, Homo sapien
gacctcgtctccgttctcatagtcg

SEQ ID NO: 4372595 - DNA, 25 bp, Homo sapien
tgtaggtccaggtcaagacctcgtc

SEQ ID NO: 4372596 - DNA, 25 bp, Homo sapien
cagtcacagaagaacgcgtagtcgg

SEQ ID NO: 4372597 - DNA, 25 bp, Homo sapien
tctcatagtcgtagcagtgaaaggt

SEQ ID NO: 4372598 - DNA, 25 bp, Homo sapien
ggtgtgtttacatgactcactttaa

SEQ ID NO: 4372599 - DNA, 25 bp, Homo sapien
ttggtgtgtttacatgactcacttt

SEQ ID NO: 4372600 - DNA, 25 bp, Homo sapien
taattggtgtgtttacatgactcac

SEQ ID NO: 4372601 - DNA, 25 bp, Homo sapien
gactcactttaatataattatggat

SEQ ID NO: 4372602 - DNA, 25 bp, Homo sapien
ggctttaaatagttagaataccatg

SEQ ID NO: 4372603 - DNA, 25 bp, Homo sapien
tagttagaataccatgcagacaccc

SEQ ID NO: 4372604 - DNA, 25 bp, Homo sapien
aatccagttagtgtgagctgtaatc

SEQ ID NO: 4372605 - DNA, 25 bp, Homo sapien
agtgtgagctgtaatctttttactg

SEQ ID NO: 4372606 - DNA, 25 bp, Homo sapien
tcccttatccaagctgtacacttgt

SEQ ID NO: 4372607 - DNA, 25 bp, Homo sapien
taagtggcagatagcttttgtcatc

SEQ ID NO: 4372608 - DNA, 25 bp, Homo sapien
tgtcatcccttatccaagctgtaca

SEQ ID NO: 4372609 - DNA, 25 bp, Homo sapien
gaagagcagggataatcgcctcaat

SEQ ID NO: 4372610 - DNA, 25 bp, Homo sapien
ggtatgatgtatcctattgattgat

SEQ ID NO: 4372611 - DNA, 25 bp, Homo sapien
gatattttccttctgtacccagctt

SEQ ID NO: 4372612 - DNA, 25 bp, Homo sapien
tgttttttcagcattaattgattct

SEQ ID NO: 4372613 - DNA, 25 bp, Homo sapien
tcttgcctctctgggataaatctca

SEQ ID NO: 4372614 - DNA, 25 bp, Homo sapien
tgctgttccaatggttgacgtgtag

SEQ ID NO: 4372615 - DNA, 25 bp, Homo sapien
tccaatggttgacgtgtaggagatc

SEQ ID NO: 4372616 - DNA, 25 bp, Homo sapien
tcattgctgttccaatggttgacgt

SEQ ID NO: 4372617 - DNA, 25 bp, Homo sapien
caatggttgacgtgtaggagatcca

SEQ ID NO: 4372618 - DNA, 25 bp, Homo sapien
cttttagaggataaatgattagtca

SEQ ID NO: 4372619 - DNA, 25 bp, Homo sapien
ttttagaggataaatgattagtcat

SEQ ID NO: 4372620 - DNA, 25 bp, Homo sapien
ttgcctaaaagcaagtaccggcaga

SEQ ID NO: 4372621 - DNA, 25 bp, Homo sapien
caagtaccggcagataaatgcccat

SEQ ID NO: 4372622 - DNA, 25 bp, Homo sapien
cattcatctagtgccccaaagaacg

SEQ ID NO: 4372623 - DNA, 25 bp, Homo sapien
atgaaaaccattcatctagtgcccc

SEQ ID NO: 4372624 - DNA, 25 bp, Homo sapien
cttgaaatggaaccggcaggcttga

SEQ ID NO: 4372625 - DNA, 25 bp, Homo sapien
gcttgaaatggaaccggcaggcttg

SEQ ID NO: 4372626 - DNA, 25 bp, Homo sapien
agcttgaaatggaaccggcaggctt

SEQ ID NO: 4372627 - DNA, 25 bp, Homo sapien
aaatcggttcagagaagcaagcatt

SEQ ID NO: 4372628 - DNA, 25 bp, Homo sapien
gagaaaatcggttcagagaagcaag

SEQ ID NO: 4372629 - DNA, 25 bp, Homo sapien
aggagaaaatcggttcagagaagca

SEQ ID NO: 4372630 - DNA, 25 bp, Homo sapien
gaaaatcggttcagagaagcaagca

SEQ ID NO: 4372631 - DNA, 25 bp, Homo sapien
atattagtgataacagtggagctgg

SEQ ID NO: 4372632 - DNA, 25 bp, Homo sapien
gctgcctggctagaaccactaattg

SEQ ID NO: 4372633 - DNA, 25 bp, Homo sapien
ttacctatattagtgataacagtgg

SEQ ID NO: 4372634 - DNA, 25 bp, Homo sapien
aactttacctatattagtgataaca

SEQ ID NO: 4372635 - DNA, 25 bp, Homo sapien
actgaagctgtgagcaaactttagc

SEQ ID NO: 4372636 - DNA, 25 bp, Homo sapien
tgcaacggactgaagctgtgagcaa

SEQ ID NO: 4372637 - DNA, 25 bp, Homo sapien
acggactgaagctgtgagcaaactt

SEQ ID NO: 4372638 - DNA, 25 bp, Homo sapien
gcaacggactgaagctgtgagcaaa

SEQ ID NO: 4372639 - DNA, 25 bp, Homo sapien
aactgggcattttcggccaccatgg

SEQ ID NO: 4372640 - DNA, 25 bp, Homo sapien
attttcggccaccatggcgaatacg

SEQ ID NO: 4372641 - DNA, 25 bp, Homo sapien
ggcattttcggccaccatggcgaat

SEQ ID NO: 4372642 - DNA, 25 bp, Homo sapien
tgggcattttcggccaccatggcga

SEQ ID NO: 4372643 - DNA, 25 bp, Homo sapien
tgcagcccagtctgcacaatttatc

SEQ ID NO: 4372644 - DNA, 25 bp, Homo sapien
tgcacaatttatcaggccagatggg

SEQ ID NO: 4372645 - DNA, 25 bp, Homo sapien
ggccttgcagcccagtctgcacaat

SEQ ID NO: 4372646 - DNA, 25 bp, Homo sapien
ctgcacaatttatcaggccagatgg

SEQ ID NO: 4372647 - DNA, 25 bp, Homo sapien
tcattgcagggcatcccatgtggta

SEQ ID NO: 4372648 - DNA, 25 bp, Homo sapien
gtggtacctagcagttatttcaggg

SEQ ID NO: 4372649 - DNA, 25 bp, Homo sapien
catcccatgtggtacctagcagtta

SEQ ID NO: 4372650 - DNA, 25 bp, Homo sapien
ttcattgcagggcatcccatgtggt

SEQ ID NO: 4372651 - DNA, 25 bp, Homo sapien
ctcttcatcacttctccttcttctg

SEQ ID NO: 4372652 - DNA, 25 bp, Homo sapien
cttcatcacttctccttcttctgtg

SEQ ID NO: 4372653 - DNA, 25 bp, Homo sapien
cttcctcttcatcacttctccttct

SEQ ID NO: 4372654 - DNA, 25 bp, Homo sapien
tcctcttcatcacttctccttcttc

SEQ ID NO: 4372655 - DNA, 25 bp, Homo sapien
gcagtaggtttttgccattcaagct

SEQ ID NO: 4372656 - DNA, 25 bp, Homo sapien
agcagtaggtttttgccattcaagc

SEQ ID NO: 4372657 - DNA, 25 bp, Homo sapien
cattaaatgtctacttgttctgcca

SEQ ID NO: 4372658 - DNA, 25 bp, Homo sapien
gttctgccactaccctgaaccaagt

SEQ ID NO: 4372659 - DNA, 25 bp, Homo sapien
gtagtaacagtggtacagccctgac

SEQ ID NO: 4372660 - DNA, 25 bp, Homo sapien
agtagtaacagtggtacagccctga

SEQ ID NO: 4372661 - DNA, 25 bp, Homo sapien
tcagtagtaacagtggtacagccct

SEQ ID NO: 4372662 - DNA, 25 bp, Homo sapien
cagtagtaacagtggtacagccctg

SEQ ID NO: 4372663 - DNA, 25 bp, Homo sapien
tacagacttgttagatgaaatcagg

SEQ ID NO: 4372664 - DNA, 25 bp, Homo sapien
ggctcaggactttccacgttacata

SEQ ID NO: 4372665 - DNA, 25 bp, Homo sapien
cagggagcccggcatagccgtgata

SEQ ID NO: 4372666 - DNA, 25 bp, Homo sapien
catatcctatgtgtttcagtttctg

SEQ ID NO: 4372667 - DNA, 25 bp, Homo sapien
tatgatcctgtgtctaaacagtctc

SEQ ID NO: 4372668 - DNA, 25 bp, Homo sapien
ctgtgtctaaacagtctccctggcc

SEQ ID NO: 4372669 - DNA, 25 bp, Homo sapien
atgatcctgtgtctaaacagtctcc

SEQ ID NO: 4372670 - DNA, 25 bp, Homo sapien
ttgtaggagtgtcccgcttcccacg

SEQ ID NO: 4372671 - DNA, 25 bp, Homo sapien
tgctcttatgaagaacaggtcctct

SEQ ID NO: 4372672 - DNA, 25 bp, Homo sapien
tgctgctcttatgaagaacaggtcc

SEQ ID NO: 4372673 - DNA, 25 bp, Homo sapien
acgcggagagcgaagacattccaca

SEQ ID NO: 4372674 - DNA, 25 bp, Homo sapien
ttctctttttaagggtgagtctcca

SEQ ID NO: 4372675 - DNA, 25 bp, Homo sapien
attgcgtttgccaatcaatatttta

SEQ ID NO: 4372676 - DNA, 25 bp, Homo sapien
ttctcaattgcgtttgccaatcaat

SEQ ID NO: 4372677 - DNA, 25 bp, Homo sapien
tcaattgcgtttgccaatcaatatt

SEQ ID NO: 4372678 - DNA, 25 bp, Homo sapien
tcaatggtagactgagttaagaaga

SEQ ID NO: 4372679 - DNA, 25 bp, Homo sapien
tagagcaacacagttggagctgggt

SEQ ID NO: 4372680 - DNA, 25 bp, Homo sapien
tagactgagttaagaagatgtggta

SEQ ID NO: 4372681 - DNA, 25 bp, Homo sapien
agaataagatcatggcctttagagc

SEQ ID NO: 4372682 - DNA, 25 bp, Homo sapien
tgtccatatttatactggcaatgat

SEQ ID NO: 4372683 - DNA, 25 bp, Homo sapien
tataaacttcgtatgtccatattta

SEQ ID NO: 4372684 - DNA, 25 bp, Homo sapien
atgtccatatttatactggcaatga

SEQ ID NO: 4372685 - DNA, 25 bp, Homo sapien
tatgtccatatttatactggcaatg

SEQ ID NO: 4372686 - DNA, 25 bp, Homo sapien
ctgtttttatgggtgctaatacact

SEQ ID NO: 4372687 - DNA, 25 bp, Homo sapien
tgagtcccaataagacagtcccatg

SEQ ID NO: 4372688 - DNA, 25 bp, Homo sapien
tgaataaaaccctcagttactaagc

SEQ ID NO: 4372689 - DNA, 25 bp, Homo sapien
gacagtcccatgacattagtggtat

SEQ ID NO: 4372690 - DNA, 25 bp, Homo sapien
aacttagagcacattcattttctct

SEQ ID NO: 4372691 - DNA, 25 bp, Homo sapien
cattttctcttaagcctttggcact

SEQ ID NO: 4372692 - DNA, 25 bp, Homo sapien
gcctttggcactgacacatccattg

SEQ ID NO: 4372693 - DNA, 25 bp, Homo sapien
gacacatccattgctgacattgttt

SEQ ID NO: 4372694 - DNA, 25 bp, Homo sapien
ccattgatatctttgttatctgcca

SEQ ID NO: 4372695 - DNA, 25 bp, Homo sapien
ctcattcaccagagtttcaggatat

SEQ ID NO: 4372696 - DNA, 25 bp, Homo sapien
ccagagtttcaggatatatatttaa

SEQ ID NO: 4372697 - DNA, 25 bp, Homo sapien
tgctttcagttgtaagccattgata

SEQ ID NO: 4372698 - DNA, 25 bp, Homo sapien
tatgttctgcgcctaatgactcctc

SEQ ID NO: 4372699 - DNA, 25 bp, Homo sapien
ggtgattgcacctccggctatgttc

SEQ ID NO: 4372700 - DNA, 25 bp, Homo sapien
tctgcctgccactaatgaaagagaa

SEQ ID NO: 4372701 - DNA, 25 bp, Homo sapien
gaggattgaattggccctgacagtc

SEQ ID NO: 4372702 - DNA, 25 bp, Homo sapien
aagaaccaagggactggaacttgtg

SEQ ID NO: 4372703 - DNA, 25 bp, Homo sapien
aagggactggaacttgtgtacaaga

SEQ ID NO: 4372704 - DNA, 25 bp, Homo sapien
ggagagtggaagaaccaagggactg

SEQ ID NO: 4372705 - DNA, 25 bp, Homo sapien
tgtgtacaagattagtaaaagatgt

SEQ ID NO: 4372706 - DNA, 25 bp, Homo sapien
catgaatcattagagcaggtctgac

SEQ ID NO: 4372707 - DNA, 25 bp, Homo sapien
gcttaatagtagatctggtatccga

SEQ ID NO: 4372708 - DNA, 25 bp, Homo sapien
tggtatccgaacaggatcatgaatc

SEQ ID NO: 4372709 - DNA, 25 bp, Homo sapien
caggtctgaccacttgttcgttatg

SEQ ID NO: 4372710 - DNA, 25 bp, Homo sapien
tgaaatccacctgatgtttgcatta

SEQ ID NO: 4372711 - DNA, 25 bp, Homo sapien
gtctaatgagccctgctaatacata

SEQ ID NO: 4372712 - DNA, 25 bp, Homo sapien
ggttgtaaggagtagaatgtgaatc

SEQ ID NO: 4372713 - DNA, 25 bp, Homo sapien
gttgttaatggaggttcttgaaatc

SEQ ID NO: 4372714 - DNA, 25 bp, Homo sapien
cctcttacagttaatggttgttcaa

SEQ ID NO: 4372715 - DNA, 25 bp, Homo sapien
tgttgactgagcagcattgacctct

SEQ ID NO: 4372716 - DNA, 25 bp, Homo sapien
tgagcagcattgacctcttacagtt

SEQ ID NO: 4372717 - DNA, 25 bp, Homo sapien
taatggttgttcaaagggagaggtc

SEQ ID NO: 4372718 - DNA, 25 bp, Homo sapien
tcagtgaatcatggtagactccagt

SEQ ID NO: 4372719 - DNA, 25 bp, Homo sapien
gtgccttctcatagatgtgcacagg

SEQ ID NO: 4372720 - DNA, 25 bp, Homo sapien
tccagtgccttggtgggtggtaaaa

SEQ ID NO: 4372721 - DNA, 25 bp, Homo sapien
tctcatagatgtgcacaggcctgtc

SEQ ID NO: 4372722 - DNA, 25 bp, Homo sapien
gtgtggcatcatcacaaagtggaca

SEQ ID NO: 4372723 - DNA, 25 bp, Homo sapien
tcatcacaaagtggacatcaggcat

SEQ ID NO: 4372724 - DNA, 25 bp, Homo sapien
aggtggcaaggtgtggcatcatcac

SEQ ID NO: 4372725 - DNA, 25 bp, Homo sapien
ggcatcatcacaaagtggacatcag

SEQ ID NO: 4372726 - DNA, 25 bp, Homo sapien
agtcatcaattaagaggtcatcaag

SEQ ID NO: 4372727 - DNA, 25 bp, Homo sapien
actttgttcattatcagtgagcaca

SEQ ID NO: 4372728 - DNA, 25 bp, Homo sapien
tctacaaaggtgagttctgtcattt

SEQ ID NO: 4372729 - DNA, 25 bp, Homo sapien
gcaatgatgttgatactagtagttc

SEQ ID NO: 4372730 - DNA, 25 bp, Homo sapien
tcatgctagacctaaccagttggcc

SEQ ID NO: 4372731 - DNA, 25 bp, Homo sapien
cagtcctgtggcctaagtaatatac

SEQ ID NO: 4372732 - DNA, 25 bp, Homo sapien
taattgctctccgacaagaaagact

SEQ ID NO: 4372733 - DNA, 25 bp, Homo sapien
ttacaacatgttagcagatctcagc

SEQ ID NO: 4372734 - DNA, 25 bp, Homo sapien
tctgttgtccagtcactaatttagt

SEQ ID NO: 4372735 - DNA, 25 bp, Homo sapien
gtagctcagaacaaaagataagcaa

SEQ ID NO: 4372736 - DNA, 25 bp, Homo sapien
gtctctgcgaagactgtagctcaga

SEQ ID NO: 4372737 - DNA, 25 bp, Homo sapien
tcagggtaggactgccaacatatag

SEQ ID NO: 4372738 - DNA, 25 bp, Homo sapien
catttgcctgtggttaggtccctcc

SEQ ID NO: 4372739 - DNA, 25 bp, Homo sapien
tatcaaaggcttgcacccatgttac

SEQ ID NO: 4372740 - DNA, 25 bp, Homo sapien
gcatctgccagtaagggtttgcaca

SEQ ID NO: 4372741 - DNA, 25 bp, Homo sapien
ttcaatgccgctaaaaaagaactgc

SEQ ID NO: 4372742 - DNA, 25 bp, Homo sapien
gaatgcactgcctccctttaaggag

SEQ ID NO: 4372743 - DNA, 25 bp, Homo sapien
tatggttctagatagctgctgaagc

SEQ ID NO: 4372744 - DNA, 25 bp, Homo sapien
gtggcttcatatgtcagggacccag

SEQ ID NO: 4372745 - DNA, 25 bp, Homo sapien
taagtggcttccaccatatggttct

SEQ ID NO: 4372746 - DNA, 25 bp, Homo sapien
tgcagtgcccgactgtgcccaccat

SEQ ID NO: 4372747 - DNA, 25 bp, Homo sapien
atgaatttcttcagggcaatcatct

SEQ ID NO: 4372748 - DNA, 25 bp, Homo sapien
gagctgagtagcagtattccttctg

SEQ ID NO: 4372749 - DNA, 25 bp, Homo sapien
ctggaggcaagccgcctgcagtgcc

SEQ ID NO: 4372750 - DNA, 25 bp, Homo sapien
agttgcagagttggcttgggtttca

SEQ ID NO: 4372751 - DNA, 25 bp, Homo sapien
agagttgcagagttggcttgggttt

SEQ ID NO: 4372752 - DNA, 25 bp, Homo sapien
gagttgcagagttggcttgggtttc

SEQ ID NO: 4372753 - DNA, 25 bp, Homo sapien
ttttttaagtgtggcctccttcaca

SEQ ID NO: 4372754 - DNA, 25 bp, Homo sapien
gaaagctccctgataaatgtaatgc

SEQ ID NO: 4372755 - DNA, 25 bp, Homo sapien
gaaggacaaccgaaaagagagcagc

SEQ ID NO: 4372756 - DNA, 25 bp, Homo sapien
aaacatatcagcatcgcagtgagac

SEQ ID NO: 4372757 - DNA, 25 bp, Homo sapien
tccttgccataaatagaaagctccc

SEQ ID NO: 4372758 - DNA, 25 bp, Homo sapien
gaaagaaagacttgcggctcggaac

SEQ ID NO: 4372759 - DNA, 25 bp, Homo sapien
ttttgactaccagagaatgtttcgg

SEQ ID NO: 4372760 - DNA, 25 bp, Homo sapien
taattcctgtggatgacagaatgcg

SEQ ID NO: 4372761 - DNA, 25 bp, Homo sapien
cagaatgcgaccgttgaatgggaca

SEQ ID NO: 4372762 - DNA, 25 bp, Homo sapien
ttctcgtgagttacgggagccagga

SEQ ID NO: 4372763 - DNA, 25 bp, Homo sapien
gcggccgcggcgagttaacatcgtt

SEQ ID NO: 4372764 - DNA, 25 bp, Homo sapien
aacagcagttttgaggatgacccct

SEQ ID NO: 4372765 - DNA, 25 bp, Homo sapien
tttttccaatctgtccgcggctgcc

SEQ ID NO: 4372766 - DNA, 25 bp, Homo sapien
tgctgctttccatttggccggactt

SEQ ID NO: 4372767 - DNA, 25 bp, Homo sapien
gctttgcaggtgacataactaccat

SEQ ID NO: 4372768 - DNA, 25 bp, Homo sapien
ttgggtgcccgtcatggcttcctgt

SEQ ID NO: 4372769 - DNA, 25 bp, Homo sapien
ccggactttgggtgcccgtcatggc

SEQ ID NO: 4372770 - DNA, 25 bp, Homo sapien
tgttcatgaaggtcctagctttata

SEQ ID NO: 4372771 - DNA, 25 bp, Homo sapien
gctgggtaataagcataagaccaat

SEQ ID NO: 4372772 - DNA, 25 bp, Homo sapien
tgttaaatcagttctgtccttggca

SEQ ID NO: 4372773 - DNA, 25 bp, Homo sapien
aacagttagtaatggtgctgggtaa

SEQ ID NO: 4372774 - DNA, 25 bp, Homo sapien
tgagcaagacatgaaactacatgta

SEQ ID NO: 4372775 - DNA, 25 bp, Homo sapien
caagttaagtatcccaatgtgactg

SEQ ID NO: 4372776 - DNA, 25 bp, Homo sapien
taagcagcgtaggtcttgtaggagc

SEQ ID NO: 4372777 - DNA, 25 bp, Homo sapien
tgtaggagcttccaatgtaagccat

SEQ ID NO: 4372778 - DNA, 25 bp, Homo sapien
ttctttggaagttcattgagaaagg

SEQ ID NO: 4372779 - DNA, 25 bp, Homo sapien
ctttggaagttcattgagaaagggt

SEQ ID NO: 4372780 - DNA, 25 bp, Homo sapien
tattctttggaagttcattgagaaa

SEQ ID NO: 4372781 - DNA, 25 bp, Homo sapien
ttggaagttcattgagaaagggtat

SEQ ID NO: 4372782 - DNA, 25 bp, Homo sapien
agaaagtctgaattgctgtgcttgt

SEQ ID NO: 4372783 - DNA, 25 bp, Homo sapien
taggcttatctgaaagttgcttaag

SEQ ID NO: 4372784 - DNA, 25 bp, Homo sapien
cggacttttgacagttaggcttatc

SEQ ID NO: 4372785 - DNA, 25 bp, Homo sapien
acaatggtaacagcggacttttgac

SEQ ID NO: 4372786 - DNA, 25 bp, Homo sapien
gaaggtttccagttgatgctgctct

SEQ ID NO: 4372787 - DNA, 25 bp, Homo sapien
gacactgatctagacaatgtgagga

SEQ ID NO: 4372788 - DNA, 25 bp, Homo sapien
caaagtactgtaattgcctggtagt

SEQ ID NO: 4372789 - DNA, 25 bp, Homo sapien
ggtatttggtccatcagctcttgag

SEQ ID NO: 4372790 - DNA, 25 bp, Homo sapien
aaccaaaatctcgcaaacaattgaa

SEQ ID NO: 4372791 - DNA, 25 bp, Homo sapien
aaaatgcccagccagtcgcagtggt

SEQ ID NO: 4372792 - DNA, 25 bp, Homo sapien
aatgcccagccagtcgcagtggttc

SEQ ID NO: 4372793 - DNA, 25 bp, Homo sapien
aaaaccaaaatctcgcaaacaattg

SEQ ID NO: 4372794 - DNA, 25 bp, Homo sapien
gtttgtatagtcgaatatgtcagtc

SEQ ID NO: 4372795 - DNA, 25 bp, Homo sapien
tcttaggattcccagaatagtgatt

SEQ ID NO: 4372796 - DNA, 25 bp, Homo sapien
gccagattgcgttcatactctccaa

SEQ ID NO: 4372797 - DNA, 25 bp, Homo sapien
gcaatcagtgctttaaagtttgtat

SEQ ID NO: 4372798 - DNA, 25 bp, Homo sapien
ttagatgtatagcacacacctactg

SEQ ID NO: 4372799 - DNA, 25 bp, Homo sapien
agccacagaactcttactcacataa

SEQ ID NO: 4372800 - DNA, 25 bp, Homo sapien
gtgttttagatgtatagcacacacc

SEQ ID NO: 4372801 - DNA, 25 bp, Homo sapien
gtatagcacacacctactgtttcta

SEQ ID NO: 4372802 - DNA, 25 bp, Homo sapien
gaaagagacagttccccaacactca

SEQ ID NO: 4372803 - DNA, 25 bp, Homo sapien
gctctgatctagcactttgctatag

SEQ ID NO: 4372804 - DNA, 25 bp, Homo sapien
cttaaatgtgttgtagctctgatct

SEQ ID NO: 4372805 - DNA, 25 bp, Homo sapien
taataccgctagttgtgaattagct

SEQ ID NO: 4372806 - DNA, 25 bp, Homo sapien
ggactcctagaatcaaggctcaggg

SEQ ID NO: 4372807 - DNA, 25 bp, Homo sapien
gccttagggagacaacctgcggttg

SEQ ID NO: 4372808 - DNA, 25 bp, Homo sapien
tctggttcttcatgcgtcactctgg

SEQ ID NO: 4372809 - DNA, 25 bp, Homo sapien
taaatcctggtccaagccttaggga

SEQ ID NO: 4372810 - DNA, 25 bp, Homo sapien
catgtttacacttccagtgttaggg

SEQ ID NO: 4372811 - DNA, 25 bp, Homo sapien
gcctcataagctagatgccagtgaa

SEQ ID NO: 4372812 - DNA, 25 bp, Homo sapien
cagtgaaattggcatacacatcaat

SEQ ID NO: 4372813 - DNA, 25 bp, Homo sapien
taaagttctatactgtaatcaagac

SEQ ID NO: 4372814 - DNA, 25 bp, Homo sapien
tgttttactttagtgccgtattgtg

SEQ ID NO: 4372815 - DNA, 25 bp, Homo sapien
tagtgccgtattgtggatgccagag

SEQ ID NO: 4372816 - DNA, 25 bp, Homo sapien
ggcagacggctattatgttttactt

SEQ ID NO: 4372817 - DNA, 25 bp, Homo sapien
ccagttgtacttcctttggcagacg

SEQ ID NO: 4372818 - DNA, 25 bp, Homo sapien
tatacaaggagtctcagttttcaga

SEQ ID NO: 4372819 - DNA, 25 bp, Homo sapien
aatctggtgcctatctggatttaca

SEQ ID NO: 4372820 - DNA, 25 bp, Homo sapien
taaagcatactgtggctatacaagg

SEQ ID NO: 4372821 - DNA, 25 bp, Homo sapien
aatgccatgataaaattcagaaaac

SEQ ID NO: 4372822 - DNA, 25 bp, Homo sapien
tggtgtagtctaattcaataaagtc

SEQ ID NO: 4372823 - DNA, 25 bp, Homo sapien
tgtagtctaattcaataaagtcatc

SEQ ID NO: 4372824 - DNA, 25 bp, Homo sapien
tagtctaattcaataaagtcatcat

SEQ ID NO: 4372825 - DNA, 25 bp, Homo sapien
ggtgtagtctaattcaataaagtca

SEQ ID NO: 4372826 - DNA, 25 bp, Homo sapien
gtattaagctgagcacaaaagctaa

SEQ ID NO: 4372827 - DNA, 25 bp, Homo sapien
tgtattaagctgagcacaaaagcta

SEQ ID NO: 4372828 - DNA, 25 bp, Homo sapien
gcacaaaagctaaatgttggattat

SEQ ID NO: 4372829 - DNA, 25 bp, Homo sapien
ctgtattaagctgagcacaaaagct

SEQ ID NO: 4372830 - DNA, 25 bp, Homo sapien
ccataaaaagtggccctgaggatct

SEQ ID NO: 4372831 - DNA, 25 bp, Homo sapien
ctgccataaaaagtggccctgagga

SEQ ID NO: 4372832 - DNA, 25 bp, Homo sapien
tgccataaaaagtggccctgaggat

SEQ ID NO: 4372833 - DNA, 25 bp, Homo sapien
gccataaaaagtggccctgaggatc

SEQ ID NO: 4372834 - DNA, 25 bp, Homo sapien
atttgcgtataacctatgcatacct

SEQ ID NO: 4372835 - DNA, 25 bp, Homo sapien
tacttagggaatcatgacgagaaaa

SEQ ID NO: 4372836 - DNA, 25 bp, Homo sapien
ctatagagcagattaaaggtgagga

SEQ ID NO: 4372837 - DNA, 25 bp, Homo sapien
ggattggttccaagattcccctcag

SEQ ID NO: 4372838 - DNA, 25 bp, Homo sapien
tagtgtattttatagaaactactta

SEQ ID NO: 4372839 - DNA, 25 bp, Homo sapien
cccattaatagtgtattttatagaa

SEQ ID NO: 4372840 - DNA, 25 bp, Homo sapien
taatagtgtattttatagaaactac

SEQ ID NO: 4372841 - DNA, 25 bp, Homo sapien
ccattaatagtgtattttatagaaa

SEQ ID NO: 4372842 - DNA, 25 bp, Homo sapien
atttctggagatacatttccaaaat

SEQ ID NO: 4372843 - DNA, 25 bp, Homo sapien
ggctaaatgtagaacgagcgtcatt

SEQ ID NO: 4372844 - DNA, 25 bp, Homo sapien
tgtgtcttcagtagaattttgccat

SEQ ID NO: 4372845 - DNA, 25 bp, Homo sapien
tgtcttcagtagaattttgccatat

SEQ ID NO: 4372846 - DNA, 25 bp, Homo sapien
tgcagtttcttgtcccgttgaaggg

SEQ ID NO: 4372847 - DNA, 25 bp, Homo sapien
gcggttccttcatggacttaagtct

SEQ ID NO: 4372848 - DNA, 25 bp, Homo sapien
tattttgtgcttctagcggttcctt

SEQ ID NO: 4372849 - DNA, 25 bp, Homo sapien
ttctccttcaaatgtgaagttgact

SEQ ID NO: 4372850 - DNA, 25 bp, Homo sapien
caaatttaaggtgatacttatgtcc

SEQ ID NO: 4372851 - DNA, 25 bp, Homo sapien
cagcaaatttaaggtgatacttatg

SEQ ID NO: 4372852 - DNA, 25 bp, Homo sapien
caacagcaaatttaaggtgatactt

SEQ ID NO: 4372853 - DNA, 25 bp, Homo sapien
ttcaacagcaaatttaaggtgatac

SEQ ID NO: 4372854 - DNA, 25 bp, Homo sapien
ggtagttgatgtagttctgtgccac

SEQ ID NO: 4372855 - DNA, 25 bp, Homo sapien
caaggccgccctggaggctgggtag

SEQ ID NO: 4372856 - DNA, 25 bp, Homo sapien
ggtcccctgctggtagttgatgtag

SEQ ID NO: 4372857 - DNA, 25 bp, Homo sapien
ccctgctggtagttgatgtagttct

SEQ ID NO: 4372858 - DNA, 25 bp, Homo sapien
cttaacgggaccagtagcagagcgc

SEQ ID NO: 4372859 - DNA, 25 bp, Homo sapien
tgccgaggcggaaaagtcgcaagct

SEQ ID NO: 4372860 - DNA, 25 bp, Homo sapien
cagtgacttcagggcttgggctact

SEQ ID NO: 4372861 - DNA, 25 bp, Homo sapien
aagctccttcagtcagtcttcttcc

SEQ ID NO: 4372862 - DNA, 25 bp, Homo sapien
aagtgaatcgcatatatcatgacac

SEQ ID NO: 4372863 - DNA, 25 bp, Homo sapien
ggagcttctgttatattcaaaggta

SEQ ID NO: 4372864 - DNA, 25 bp, Homo sapien
ctgtctattatctgtttaagtctca

SEQ ID NO: 4372865 - DNA, 25 bp, Homo sapien
ttagtttgctgaagacttgaaagtg

SEQ ID NO: 4372866 - DNA, 25 bp, Homo sapien
tggaatgcagagggactatctctgc

SEQ ID NO: 4372867 - DNA, 25 bp, Homo sapien
gaatgcagagggactatctctgctc

SEQ ID NO: 4372868 - DNA, 25 bp, Homo sapien
aatgcagagggactatctctgctca

SEQ ID NO: 4372869 - DNA, 25 bp, Homo sapien
gctacagtagcatcaggtctgaaaa

SEQ ID NO: 4372870 - DNA, 25 bp, Homo sapien
taggttcacaaatggacagatcagg

SEQ ID NO: 4372871 - DNA, 25 bp, Homo sapien
ccttgtattggacaacagtagcagc

SEQ ID NO: 4372872 - DNA, 25 bp, Homo sapien
aatgattcaggcctagctggtggga

SEQ ID NO: 4372873 - DNA, 25 bp, Homo sapien
taagacaaaaaccatctgactcagc

SEQ ID NO: 4372874 - DNA, 25 bp, Homo sapien
gagacagacgttctattatttgtaa

SEQ ID NO: 4372875 - DNA, 25 bp, Homo sapien
tgcagacagctttatctggtgagac

SEQ ID NO: 4372876 - DNA, 25 bp, Homo sapien
aatcttcacgagaacattcaacaca

SEQ ID NO: 4372877 - DNA, 25 bp, Homo sapien
cttttgatgcatgtttgcagacagc

SEQ ID NO: 4372878 - DNA, 25 bp, Homo sapien
gctggtgactgtttagcactgagca

SEQ ID NO: 4372879 - DNA, 25 bp, Homo sapien
tgtgcatgcgcttccagagttaaaa

SEQ ID NO: 4372880 - DNA, 25 bp, Homo sapien
tgcaacatacactgattatccaggt

SEQ ID NO: 4372881 - DNA, 25 bp, Homo sapien
tataaattcagagatgagaccatca

SEQ ID NO: 4372882 - DNA, 25 bp, Homo sapien
tcttcagttccggaggcttcttctg

SEQ ID NO: 4372883 - DNA, 25 bp, Homo sapien
taccagaccaagtgaatgcgacagg

SEQ ID NO: 4372884 - DNA, 25 bp, Homo sapien
tactaagctctgttggtactacagc

SEQ ID NO: 4372885 - DNA, 25 bp, Homo sapien
taagaggtttgccagggtaccagac

SEQ ID NO: 4372886 - DNA, 25 bp, Homo sapien
tataatcaaaatcaattgtatcatc

SEQ ID NO: 4372887 - DNA, 25 bp, Homo sapien
gtataatcaaaatcaattgtatcat

SEQ ID NO: 4372888 - DNA, 25 bp, Homo sapien
cttgtcactgagttatatgaaagtc

SEQ ID NO: 4372889 - DNA, 25 bp, Homo sapien
gaaagtctggttgaatgtctgtcac

SEQ ID NO: 4372890 - DNA, 25 bp, Homo sapien
ttgtcttgtcactgagttatatgaa

SEQ ID NO: 4372891 - DNA, 25 bp, Homo sapien
ttatatgaaagtctggttgaatgtc

SEQ ID NO: 4372892 - DNA, 25 bp, Homo sapien
gacactccctgcatggcaagcttat

SEQ ID NO: 4372893 - DNA, 25 bp, Homo sapien
tttcctactataactgagtactcca

SEQ ID NO: 4372894 - DNA, 25 bp, Homo sapien
tatgtgctcacttcaatgcttgaga

SEQ ID NO: 4372895 - DNA, 25 bp, Homo sapien
gagaaggccttaagagacaacagtc

SEQ ID NO: 4372896 - DNA, 25 bp, Homo sapien
ttatctaacacccagacatcgcagg

SEQ ID NO: 4372897 - DNA, 25 bp, Homo sapien
gaaatgcgtgtcagccttgaaacca

SEQ ID NO: 4372898 - DNA, 25 bp, Homo sapien
aaagaactctaagctgaaatgcgtg

SEQ ID NO: 4372899 - DNA, 25 bp, Homo sapien
tttttgagctaccttgggccaagag

SEQ ID NO: 4372900 - DNA, 25 bp, Homo sapien
agttcgcatgaattcagtctaagga

SEQ ID NO: 4372901 - DNA, 25 bp, Homo sapien
tgattgtaactcttgtggcacaagt

SEQ ID NO: 4372902 - DNA, 25 bp, Homo sapien
aaatgtgattacaactcttgatatg

SEQ ID NO: 4372903 - DNA, 25 bp, Homo sapien
tcttgatatgaaattagaagttcgc

SEQ ID NO: 4372904 - DNA, 25 bp, Homo sapien
cacactagtgagctgtgccaagtag

SEQ ID NO: 4372905 - DNA, 25 bp, Homo sapien
tagtagtgtgacacctgtgttgtca

SEQ ID NO: 4372906 - DNA, 25 bp, Homo sapien
tgtcatttcccacatcacgtaagag

SEQ ID NO: 4372907 - DNA, 25 bp, Homo sapien
cacgtaagagcttccaaggaaagcc

SEQ ID NO: 4372908 - DNA, 25 bp, Homo sapien
gtatcaagcctatgtccacaaagta

SEQ ID NO: 4372909 - DNA, 25 bp, Homo sapien
tgtcgcacacctagcagctaaagtg

SEQ ID NO: 4372910 - DNA, 25 bp, Homo sapien
tatgaagcctacgttgtatcaagcc

SEQ ID NO: 4372911 - DNA, 25 bp, Homo sapien
cacgcaaagtaagagctatgaagcc

SEQ ID NO: 4372912 - DNA, 25 bp, Homo sapien
tggtctttgcttcccagtctgccag

SEQ ID NO: 4372913 - DNA, 25 bp, Homo sapien
tggtttaggtctacagtcaatgtga

SEQ ID NO: 4372914 - DNA, 25 bp, Homo sapien
tctacagtcaatgtgatggtggtct

SEQ ID NO: 4372915 - DNA, 25 bp, Homo sapien
taggtctacagtcaatgtgatggtg

SEQ ID NO: 4372916 - DNA, 25 bp, Homo sapien
tctcgatgagccgtgtacaagttac

SEQ ID NO: 4372917 - DNA, 25 bp, Homo sapien
tgattcttgaaaaacactcgagcag

SEQ ID NO: 4372918 - DNA, 25 bp, Homo sapien
gagcagaacatttccccaaacgtcc

SEQ ID NO: 4372919 - DNA, 25 bp, Homo sapien
tacattgatggttggtctgggtttc

SEQ ID NO: 4372920 - DNA, 25 bp, Homo sapien
tgacatccattgagcactgcttggc

SEQ ID NO: 4372921 - DNA, 25 bp, Homo sapien
tcacagctgaatacaacagtccttc

SEQ ID NO: 4372922 - DNA, 25 bp, Homo sapien
caggctctggcatcaatagatgtag

SEQ ID NO: 4372923 - DNA, 25 bp, Homo sapien
tattgtgggttgtgctcacagctga

SEQ ID NO: 4372924 - DNA, 25 bp, Homo sapien
taaatgtagatgttttggatattct

SEQ ID NO: 4372925 - DNA, 25 bp, Homo sapien
aatgtagatgttttggatattctgg

SEQ ID NO: 4372926 - DNA, 25 bp, Homo sapien
gatgttttggatattctgggatctc

SEQ ID NO: 4372927 - DNA, 25 bp, Homo sapien
gtagatgttttggatattctgggat

SEQ ID NO: 4372928 - DNA, 25 bp, Homo sapien
ggttgtagcgctctgtgctgaagac

SEQ ID NO: 4372929 - DNA, 25 bp, Homo sapien
ctctgggttgtagcgctctgtgctg

SEQ ID NO: 4372930 - DNA, 25 bp, Homo sapien
gctgaagaccacgtgaactttacat

SEQ ID NO: 4372931 - DNA, 25 bp, Homo sapien
gtgaactttacatccctcttttgga

SEQ ID NO: 4372932 - DNA, 25 bp, Homo sapien
gaaagggaaatggttgcgttctgac

SEQ ID NO: 4372933 - DNA, 25 bp, Homo sapien
gaaatggttgcgttctgactggagt

SEQ ID NO: 4372934 - DNA, 25 bp, Homo sapien
gggaaatggttgcgttctgactgga

SEQ ID NO: 4372935 - DNA, 25 bp, Homo sapien
aagggaaatggttgcgttctgactg

SEQ ID NO: 4372936 - DNA, 25 bp, Homo sapien
tgcagaggagtcagcgacaccctca

SEQ ID NO: 4372937 - DNA, 25 bp, Homo sapien
ctgtcctgttgagtaggggcttcct

SEQ ID NO: 4372938 - DNA, 25 bp, Homo sapien
gcacctgggagtctgcctgtcctgt

SEQ ID NO: 4372939 - DNA, 25 bp, Homo sapien
ctgctatgtgcaccgcagcacctgg

SEQ ID NO: 4372940 - DNA, 25 bp, Homo sapien
tgcctcagcctgctgcatagctgag

SEQ ID NO: 4372941 - DNA, 25 bp, Homo sapien
cctcagcctgctgcatagctgagac

SEQ ID NO: 4372942 - DNA, 25 bp, Homo sapien
tcagcctgctgcatagctgagacta

SEQ ID NO: 4372943 - DNA, 25 bp, Homo sapien
agcctgctgcatagctgagactaca

SEQ ID NO: 4372944 - DNA, 25 bp, Homo sapien
cagtggttttaggactgtgttgaac

SEQ ID NO: 4372945 - DNA, 25 bp, Homo sapien
tgttctgtgataaaggggtcgttga

SEQ ID NO: 4372946 - DNA, 25 bp, Homo sapien
tgaactttggctgtccttgatttaa

SEQ ID NO: 4372947 - DNA, 25 bp, Homo sapien
ttcctctggatgcagtgtctgcact

SEQ ID NO: 4372948 - DNA, 25 bp, Homo sapien
gtgtcatttaaaagatgcttgtgtg

SEQ ID NO: 4372949 - DNA, 25 bp, Homo sapien
cattgtgtcatttaaaagatgcttg

SEQ ID NO: 4372950 - DNA, 25 bp, Homo sapien
gtgtgtacagaataatgcaagtagc

SEQ ID NO: 4372951 - DNA, 25 bp, Homo sapien
gtcatttaaaagatgcttgtgtgta

SEQ ID NO: 4372952 - DNA, 25 bp, Homo sapien
agcagctgagcactcagtccaacaa

SEQ ID NO: 4372953 - DNA, 25 bp, Homo sapien
tcgcccctcagggtcagttctggat

SEQ ID NO: 4372954 - DNA, 25 bp, Homo sapien
tctggatggatgatagacattgtgc

SEQ ID NO: 4372955 - DNA, 25 bp, Homo sapien
gctgagcactcagtccaacaatgca

SEQ ID NO: 4372956 - DNA, 25 bp, Homo sapien
tgaaatcagcaaccaaacaacgggt

SEQ ID NO: 4372957 - DNA, 25 bp, Homo sapien
gttcatatagaacactgggctcgga

SEQ ID NO: 4372958 - DNA, 25 bp, Homo sapien
caaatcagacgccagcattagcagg

SEQ ID NO: 4372959 - DNA, 25 bp, Homo sapien
caattccagattctttgaggccgtg

SEQ ID NO: 4372960 - DNA, 25 bp, Homo sapien
tgggcgagccggaccggaagttgaa

SEQ ID NO: 4372961 - DNA, 25 bp, Homo sapien
tcggccagcactcgtagcgcgctgg

SEQ ID NO: 4372962 - DNA, 25 bp, Homo sapien
ccagcactcgtagcgcgctgggcga

SEQ ID NO: 4372963 - DNA, 25 bp, Homo sapien
gttgaagaagtgaagcgccgcgcgc

SEQ ID NO: 4372964 - DNA, 25 bp, Homo sapien
tgcgcgggaccccagcatcctgagg

SEQ ID NO: 4372965 - DNA, 25 bp, Homo sapien
ctgcgcgggaccccagcatcctgag

SEQ ID NO: 4372966 - DNA, 25 bp, Homo sapien
gccaccggggcgagcaacagcagca

SEQ ID NO: 4372967 - DNA, 25 bp, Homo sapien
ccagggagcaggcagccgttgccgg

SEQ ID NO: 4372968 - DNA, 25 bp, Homo sapien
gccgccaccggggcgagcaacagca

SEQ ID NO: 4372969 - DNA, 25 bp, Homo sapien
agggagcaggcagccgttgccggcg

SEQ ID NO: 4372970 - DNA, 25 bp, Homo sapien
tggcgtttcccctgcggtttcgcaa

SEQ ID NO: 4372971 - DNA, 25 bp, Homo sapien
ttggattctccaagcattagggctg

SEQ ID NO: 4372972 - DNA, 25 bp, Homo sapien
gcttagtgctaggatgcggcatcgc

SEQ ID NO: 4372973 - DNA, 25 bp, Homo sapien
gacgcaggaaagttggctcggcacc

SEQ ID NO: 4372974 - DNA, 25 bp, Homo sapien
ctggttgatttgtagaagctctttc

SEQ ID NO: 4372975 - DNA, 25 bp, Homo sapien
gtagaagctctttcaatacgaggga

SEQ ID NO: 4372976 - DNA, 25 bp, Homo sapien
tacgagggaaatcaggccttggtct

SEQ ID NO: 4372977 - DNA, 25 bp, Homo sapien
ggtctgtcatgggtatccctgtgtt

SEQ ID NO: 4372978 - DNA, 25 bp, Homo sapien
gcttgtggaatgtaagaaggcccag

SEQ ID NO: 4372979 - DNA, 25 bp, Homo sapien
cccagcttgtggaatgtaagaaggc

SEQ ID NO: 4372980 - DNA, 25 bp, Homo sapien
agttcccaagcatctcaggccccag

SEQ ID NO: 4372981 - DNA, 25 bp, Homo sapien
ggccaccccagcttgtggaatgtaa

SEQ ID NO: 4372982 - DNA, 25 bp, Homo sapien
tgcttccacgctggacaattgtctg

SEQ ID NO: 4372983 - DNA, 25 bp, Homo sapien
tgcactgggactaccatatcttcag

SEQ ID NO: 4372984 - DNA, 25 bp, Homo sapien
caattttgggatgacccagctggag

SEQ ID NO: 4372985 - DNA, 25 bp, Homo sapien
tgttcccatttgagcatcgtctctg

SEQ ID NO: 4372986 - DNA, 25 bp, Homo sapien
gcccatgttgacacgtaattgccaa

SEQ ID NO: 4372987 - DNA, 25 bp, Homo sapien
catttgggctaaccagactggtggc

SEQ ID NO: 4372988 - DNA, 25 bp, Homo sapien
ctcagggagcctggttggacttcag

SEQ ID NO: 4372989 - DNA, 25 bp, Homo sapien
tccccttactggtggcatgaaataa

SEQ ID NO: 4372990 - DNA, 25 bp, Homo sapien
tctcatggcttgtatccccaccaac

SEQ ID NO: 4372991 - DNA, 25 bp, Homo sapien
ctgtctggtgactcctgcaggatgg

SEQ ID NO: 4372992 - DNA, 25 bp, Homo sapien
ccttccttatcagaatgagaacagg

SEQ ID NO: 4372993 - DNA, 25 bp, Homo sapien
tcctttgccttccttatcagaatga

SEQ ID NO: 4372994 - DNA, 25 bp, Homo sapien
ggctcctctgccttctattccctgt

SEQ ID NO: 4372995 - DNA, 25 bp, Homo sapien
gaaatacttcatgctcataaacaac

SEQ ID NO: 4372996 - DNA, 25 bp, Homo sapien
gatgaggagtaatcagggtccctca

SEQ ID NO: 4372997 - DNA, 25 bp, Homo sapien
atggatgaggagtaatcagggtccc

SEQ ID NO: 4372998 - DNA, 25 bp, Homo sapien
ggagtaatcagggtccctcaaacat

SEQ ID NO: 4372999 - DNA, 25 bp, Homo sapien
gaggagtaatcagggtccctcaaac

SEQ ID NO: 4373000 - DNA, 25 bp, Homo sapien
caggccacaactacccccatgcatc

SEQ ID NO: 4373001 - DNA, 25 bp, Homo sapien
acaggccacaactacccccatgcat

SEQ ID NO: 4373002 - DNA, 25 bp, Homo sapien
cacaggccacaactacccccatgca

SEQ ID NO: 4373003 - DNA, 25 bp, Homo sapien
tcccacacaactccggtgaggtttg

SEQ ID NO: 4373004 - DNA, 25 bp, Homo sapien
cacaactccggtgaggtttgtgtct

SEQ ID NO: 4373005 - DNA, 25 bp, Homo sapien
gggatcttcccacacaactccggtg

SEQ ID NO: 4373006 - DNA, 25 bp, Homo sapien
tcttcccacacaactccggtgaggt

SEQ ID NO: 4373007 - DNA, 25 bp, Homo sapien
ggaggccagggctggggagagcggc

SEQ ID NO: 4373008 - DNA, 25 bp, Homo sapien
ctgcacaagaggaacgcaggaggcc

SEQ ID NO: 4373009 - DNA, 25 bp, Homo sapien
tgcacaagaggaacgcaggaggcca

SEQ ID NO: 4373010 - DNA, 25 bp, Homo sapien
gcaggaggccagggctggggagagc

SEQ ID NO: 4373011 - DNA, 25 bp, Homo sapien
cctgtggaatatcaccttcacatgt

SEQ ID NO: 4373012 - DNA, 25 bp, Homo sapien
gtggaatatcaccttcacatgtttt

SEQ ID NO: 4373013 - DNA, 25 bp, Homo sapien
aatatcaccttcacatgttttggca

SEQ ID NO: 4373014 - DNA, 25 bp, Homo sapien
ctcctgtggaatatcaccttcacat

SEQ ID NO: 4373015 - DNA, 25 bp, Homo sapien
tcaacttcaaggagcttcagcgccc

SEQ ID NO: 4373016 - DNA, 25 bp, Homo sapien
tgtattcccagtacgtgacacatgg

SEQ ID NO: 4373017 - DNA, 25 bp, Homo sapien
cagcgcagttcgaactactccggag

SEQ ID NO: 4373018 - DNA, 25 bp, Homo sapien
tgaaagctggctaaactacgcacct

SEQ ID NO: 4373019 - DNA, 25 bp, Homo sapien
cctgcctgggtttggagttgtcacc

SEQ ID NO: 4373020 - DNA, 25 bp, Homo sapien
gctgttactgatgtgcttccttggc

SEQ ID NO: 4373021 - DNA, 25 bp, Homo sapien
tgtgaccgccgtcttgacagtgttc

SEQ ID NO: 4373022 - DNA, 25 bp, Homo sapien
tgagctcccggagtcatgtgaccgc

SEQ ID NO: 4373023 - DNA, 25 bp, Homo sapien
ggtaacgtctgtgttagcccatggt

SEQ ID NO: 4373024 - DNA, 25 bp, Homo sapien
cccttggattgctatggtaacgtct

SEQ ID NO: 4373025 - DNA, 25 bp, Homo sapien
gatgctggcctttacgatgtggaac

SEQ ID NO: 4373026 - DNA, 25 bp, Homo sapien
ggttctttgcgcagtagcagccact

SEQ ID NO: 4373027 - DNA, 25 bp, Homo sapien
gctagacctggcaactcagagatgt

SEQ ID NO: 4373028 - DNA, 25 bp, Homo sapien
ttctgggtcttcgtgtctggcatca

SEQ ID NO: 4373029 - DNA, 25 bp, Homo sapien
tgtggaaagcgtggaccaccttgct

SEQ ID NO: 4373030 - DNA, 25 bp, Homo sapien
tctggcatcattgactccgaggctc

SEQ ID NO: 4373031 - DNA, 25 bp, Homo sapien
aacttcaaggcaataagccccatgg

SEQ ID NO: 4373032 - DNA, 25 bp, Homo sapien
ctgaaatgataaaggagcccatgtc

SEQ ID NO: 4373033 - DNA, 25 bp, Homo sapien
gaggcaattggaggatgccaagccc

SEQ ID NO: 4373034 - DNA, 25 bp, Homo sapien
ctgaggcaattggaggatgccaagc

SEQ ID NO: 4373035 - DNA, 25 bp, Homo sapien
tttaacctgtccaaacaatcaggaa

SEQ ID NO: 4373036 - DNA, 25 bp, Homo sapien
cctgtccaaacaatcaggaagatta

SEQ ID NO: 4373037 - DNA, 25 bp, Homo sapien
taacctgtccaaacaatcaggaaga

SEQ ID NO: 4373038 - DNA, 25 bp, Homo sapien
gtccaaacaatcaggaagattaggg

SEQ ID NO: 4373039 - DNA, 25 bp, Homo sapien
gggataacggatttgaggatcccaa

SEQ ID NO: 4373040 - DNA, 25 bp, Homo sapien
ccagggggataacggatttgaggat

SEQ ID NO: 4373041 - DNA, 25 bp, Homo sapien
cagggggataacggatttgaggatc

SEQ ID NO: 4373042 - DNA, 25 bp, Homo sapien
ggggataacggatttgaggatccca

SEQ ID NO: 4373043 - DNA, 25 bp, Homo sapien
ggcatatgggctggctccaagcctt

SEQ ID NO: 4373044 - DNA, 25 bp, Homo sapien
ctgatgggcatagagctagtggctt

SEQ ID NO: 4373045 - DNA, 25 bp, Homo sapien
tagtggctttatggcatatgggctg

SEQ ID NO: 4373046 - DNA, 25 bp, Homo sapien
gcaccggtttctccagtaacgtgaa

SEQ ID NO: 4373047 - DNA, 25 bp, Homo sapien
gaggagcctgactctatttttgccc

SEQ ID NO: 4373048 - DNA, 25 bp, Homo sapien
ggagcctgactctatttttgccccc

SEQ ID NO: 4373049 - DNA, 25 bp, Homo sapien
aggagcctgactctatttttgcccc

SEQ ID NO: 4373050 - DNA, 25 bp, Homo sapien
gggttgaggcagctgctcacactca

SEQ ID NO: 4373051 - DNA, 25 bp, Homo sapien
tgggttgaggcagctgctcacactc

SEQ ID NO: 4373052 - DNA, 25 bp, Homo sapien
actgggttgaggcagctgctcacac

SEQ ID NO: 4373053 - DNA, 25 bp, Homo sapien
aggactgggttgaggcagctgctca

SEQ ID NO: 4373054 - DNA, 25 bp, Homo sapien
gcctccatatcttgtaggccacact

SEQ ID NO: 4373055 - DNA, 25 bp, Homo sapien
cagaggcctccatatcttgtaggcc

SEQ ID NO: 4373056 - DNA, 25 bp, Homo sapien
ctccatatcttgtaggccacactgg

SEQ ID NO: 4373057 - DNA, 25 bp, Homo sapien
ccatatcttgtaggccacactggct

SEQ ID NO: 4373058 - DNA, 25 bp, Homo sapien
agcgagtgatatggaagggcacaaa

SEQ ID NO: 4373059 - DNA, 25 bp, Homo sapien
ggagcgagtgatatggaagggcaca

SEQ ID NO: 4373060 - DNA, 25 bp, Homo sapien
cgagtgatatggaagggcacaaaac

SEQ ID NO: 4373061 - DNA, 25 bp, Homo sapien
gaaggagcgagtgatatggaagggc

SEQ ID NO: 4373062 - DNA, 25 bp, Homo sapien
tccggatggacctggctcgggctgt

SEQ ID NO: 4373063 - DNA, 25 bp, Homo sapien
gatggtccggatggacctggctcgg

SEQ ID NO: 4373064 - DNA, 25 bp, Homo sapien
atggacctggctcgggctgtgttgc

SEQ ID NO: 4373065 - DNA, 25 bp, Homo sapien
cagtaggatggtccggatggacctg

SEQ ID NO: 4373066 - DNA, 25 bp, Homo sapien
ctgtcctcatgaggttctcctctgg

SEQ ID NO: 4373067 - DNA, 25 bp, Homo sapien
gaggttctcctctggcttgatcagg

SEQ ID NO: 4373068 - DNA, 25 bp, Homo sapien
tgtcctcatgaggttctcctctggc

SEQ ID NO: 4373069 - DNA, 25 bp, Homo sapien
gttctcctctggcttgatcaggctc

SEQ ID NO: 4373070 - DNA, 25 bp, Homo sapien
catcagtgaatagcacaccaaaatg

SEQ ID NO: 4373071 - DNA, 25 bp, Homo sapien
ctgaccatcagtgaatagcacacca

SEQ ID NO: 4373072 - DNA, 25 bp, Homo sapien
gaaagaaagccagacaatgtcagaa

SEQ ID NO: 4373073 - DNA, 25 bp, Homo sapien
ggagggaaagaaagccagacaatgt

SEQ ID NO: 4373074 - DNA, 25 bp, Homo sapien
aaaattctcttggctggtcatgtca

SEQ ID NO: 4373075 - DNA, 25 bp, Homo sapien
aaaaagccgatcaaaattctcttgg

SEQ ID NO: 4373076 - DNA, 25 bp, Homo sapien
cgtaggcaaaaagccgatcaaaatt

SEQ ID NO: 4373077 - DNA, 25 bp, Homo sapien
tatgccgtaggcaaaaagccgatca

SEQ ID NO: 4373078 - DNA, 25 bp, Homo sapien
tagtggcagccctaggataaagatg

SEQ ID NO: 4373079 - DNA, 25 bp, Homo sapien
caatagcacataaagcaggtcggcc

SEQ ID NO: 4373080 - DNA, 25 bp, Homo sapien
caggatgctgccgtaaaggttgata

SEQ ID NO: 4373081 - DNA, 25 bp, Homo sapien
cattgatgtagtccgtgtgggagaa

SEQ ID NO: 4373082 - DNA, 25 bp, Homo sapien
gttcctgtgatgtattcatgtccac

SEQ ID NO: 4373083 - DNA, 25 bp, Homo sapien
tgttcctgtgatgtattcatgtcca

SEQ ID NO: 4373084 - DNA, 25 bp, Homo sapien
cttgttcctgtgatgtattcatgtc

SEQ ID NO: 4373085 - DNA, 25 bp, Homo sapien
accttgttcctgtgatgtattcatg

SEQ ID NO: 4373086 - DNA, 25 bp, Homo sapien
agagctccacgacggctcccgcttc

SEQ ID NO: 4373087 - DNA, 25 bp, Homo sapien
gcagagctccacgacggctcccgct

SEQ ID NO: 4373088 - DNA, 25 bp, Homo sapien
tccacgacggctcccgcttctgctt

SEQ ID NO: 4373089 - DNA, 25 bp, Homo sapien
ggagcagagctccacgacggctccc

SEQ ID NO: 4373090 - DNA, 25 bp, Homo sapien
tgtccctccagtgcctgtcaccacc

SEQ ID NO: 4373091 - DNA, 25 bp, Homo sapien
tccctccagtgcctgtcaccaccac

SEQ ID NO: 4373092 - DNA, 25 bp, Homo sapien
ctacttgtccctccagtgcctgtca

SEQ ID NO: 4373093 - DNA, 25 bp, Homo sapien
acttgtccctccagtgcctgtcacc

SEQ ID NO: 4373094 - DNA, 25 bp, Homo sapien
gcatttatccagcagctcctgtctc

SEQ ID NO: 4373095 - DNA, 25 bp, Homo sapien
gcacaggagagggaagcatttatcc

SEQ ID NO: 4373096 - DNA, 25 bp, Homo sapien
caggagagggaagcatttatccagc

SEQ ID NO: 4373097 - DNA, 25 bp, Homo sapien
gggaagcatttatccagcagctcct

SEQ ID NO: 4373098 - DNA, 25 bp, Homo sapien
tgtgacagcgggtgcatggcacatc

SEQ ID NO: 4373099 - DNA, 25 bp, Homo sapien
tgagagcaatgacaagaggagaagt

SEQ ID NO: 4373100 - DNA, 25 bp, Homo sapien
catggagcccataacctgtatcgtt

SEQ ID NO: 4373101 - DNA, 25 bp, Homo sapien
tatcgttgttgaacagtgagagcaa

SEQ ID NO: 4373102 - DNA, 25 bp, Homo sapien
ccataacctgtatcgttgttgaaca

SEQ ID NO: 4373103 - DNA, 25 bp, Homo sapien
tacgtgtagcctagatgtggagtag

SEQ ID NO: 4373104 - DNA, 25 bp, Homo sapien
cagctcaggagcaataggatattac

SEQ ID NO: 4373105 - DNA, 25 bp, Homo sapien
aaatatgtgtcctgaaagtgctgct

SEQ ID NO: 4373106 - DNA, 25 bp, Homo sapien
tggagtaggctacatggaataccgt

SEQ ID NO: 4373107 - DNA, 25 bp, Homo sapien
ttgattttgcctatctgggtgccgg

SEQ ID NO: 4373108 - DNA, 25 bp, Homo sapien
cggcgcatcttttggaaggaagact

SEQ ID NO: 4373109 - DNA, 25 bp, Homo sapien
gtgccggcgcatcttttggaaggaa

SEQ ID NO: 4373110 - DNA, 25 bp, Homo sapien
ttttgcctatctgggtgccggcgca

SEQ ID NO: 4373111 - DNA, 25 bp, Homo sapien
gggcattcgtaactggtatgaacta

SEQ ID NO: 4373112 - DNA, 25 bp, Homo sapien
ttagagctagtagggatggcatcgt

SEQ ID NO: 4373113 - DNA, 25 bp, Homo sapien
ctagatctctgcagggttagagcta

SEQ ID NO: 4373114 - DNA, 25 bp, Homo sapien
gccaatggggcattcgtaactggta

SEQ ID NO: 4373115 - DNA, 25 bp, Homo sapien
tgggattctccctctacatccagga

SEQ ID NO: 4373116 - DNA, 25 bp, Homo sapien
ggagctgaactttcaatttgggctg

SEQ ID NO: 4373117 - DNA, 25 bp, Homo sapien
aggagctgaactttcaatttgggct

SEQ ID NO: 4373118 - DNA, 25 bp, Homo sapien
tctccctctacatccaggagctgaa

SEQ ID NO: 4373119 - DNA, 25 bp, Homo sapien
taaatctctgagattgtgtactgct

SEQ ID NO: 4373120 - DNA, 25 bp, Homo sapien
ccttggattcactgattgttgaaaa

SEQ ID NO: 4373121 - DNA, 25 bp, Homo sapien
gagattgtgtactgcttctctaagt

SEQ ID NO: 4373122 - DNA, 25 bp, Homo sapien
tggattcactgattgttgaaaaacc

SEQ ID NO: 4373123 - DNA, 25 bp, Homo sapien
ttctccccacattctagccaaataa

SEQ ID NO: 4373124 - DNA, 25 bp, Homo sapien
acttttgatccaggccaagatccca

SEQ ID NO: 4373125 - DNA, 25 bp, Homo sapien
caaataaaacttttgatccaggcca

SEQ ID NO: 4373126 - DNA, 25 bp, Homo sapien
cacattctagccaaataaaactttt

SEQ ID NO: 4373127 - DNA, 25 bp, Homo sapien
caaatgaaggccctgacaattcctg

SEQ ID NO: 4373128 - DNA, 25 bp, Homo sapien
caatcaaatgaacgtgcaaatccat

SEQ ID NO: 4373129 - DNA, 25 bp, Homo sapien
ggccctgacaattcctgaagtaata

SEQ ID NO: 4373130 - DNA, 25 bp, Homo sapien
aataacaaattcacgaccacaatca

SEQ ID NO: 4373131 - DNA, 25 bp, Homo sapien
ttgttgggaatgattgaactggacc

SEQ ID NO: 4373132 - DNA, 25 bp, Homo sapien
tacactctctgtgtgagagttttgc

SEQ ID NO: 4373133 - DNA, 25 bp, Homo sapien
ctgtttttggtgactacactctctg

SEQ ID NO: 4373134 - DNA, 25 bp, Homo sapien
ctggaccattactccagaaagtctt

SEQ ID NO: 4373135 - DNA, 25 bp, Homo sapien
tgaaggcctgggttcactgaagtag

SEQ ID NO: 4373136 - DNA, 25 bp, Homo sapien
aactggtaaagtgcatgaaggcctg

SEQ ID NO: 4373137 - DNA, 25 bp, Homo sapien
ccctgggtgattttgaatacccatg

SEQ ID NO: 4373138 - DNA, 25 bp, Homo sapien
taggatatggactgggtctttcata

SEQ ID NO: 4373139 - DNA, 25 bp, Homo sapien
ttggcttgaagataggcccctgaat

SEQ ID NO: 4373140 - DNA, 25 bp, Homo sapien
tatgtcactcctgggtgtatgttct

SEQ ID NO: 4373141 - DNA, 25 bp, Homo sapien
gaatgttctgtatgtcactcctggg

SEQ ID NO: 4373142 - DNA, 25 bp, Homo sapien
tggcttgaagataggcccctgaatt

SEQ ID NO: 4373143 - DNA, 25 bp, Homo sapien
tggacttttatacagggcagatttg

SEQ ID NO: 4373144 - DNA, 25 bp, Homo sapien
gacttttatacagggcagatttgct

SEQ ID NO: 4373145 - DNA, 25 bp, Homo sapien
agggcagatttgctgagtatttatc

SEQ ID NO: 4373146 - DNA, 25 bp, Homo sapien
cagatttgctgagtatttatcaaga

SEQ ID NO: 4373147 - DNA, 25 bp, Homo sapien
ctatgccaggtaactcatgctaata

SEQ ID NO: 4373148 - DNA, 25 bp, Homo sapien
gccaggtaactcatgctaataatct

SEQ ID NO: 4373149 - DNA, 25 bp, Homo sapien
tgccaggtaactcatgctaataatc

SEQ ID NO: 4373150 - DNA, 25 bp, Homo sapien
caggtaactcatgctaataatctga

SEQ ID NO: 4373151 - DNA, 25 bp, Homo sapien
tcgaatctcccttgcaggaaaccat

SEQ ID NO: 4373152 - DNA, 25 bp, Homo sapien
tgcttctatcacactcttgagaccg

SEQ ID NO: 4373153 - DNA, 25 bp, Homo sapien
atatgaagtctgaatagtgacagcc

SEQ ID NO: 4373154 - DNA, 25 bp, Homo sapien
tcccttcttgaggaatatgaagtct

SEQ ID NO: 4373155 - DNA, 25 bp, Homo sapien
aactcagagtggcacataggaaatc

SEQ ID NO: 4373156 - DNA, 25 bp, Homo sapien
agtctttgtcgtcctctcctgacca

SEQ ID NO: 4373157 - DNA, 25 bp, Homo sapien
ggatccagagttcagagatgtgaac

SEQ ID NO: 4373158 - DNA, 25 bp, Homo sapien
cataggaaatcccttaagtctttgt

SEQ ID NO: 4373159 - DNA, 25 bp, Homo sapien
ctcggtgcattgctagcacagtccc

SEQ ID NO: 4373160 - DNA, 25 bp, Homo sapien
gtgcattgctagcacagtccccaca

SEQ ID NO: 4373161 - DNA, 25 bp, Homo sapien
tcggtgcattgctagcacagtcccc

SEQ ID NO: 4373162 - DNA, 25 bp, Homo sapien
ggtgcattgctagcacagtccccac

SEQ ID NO: 4373163 - DNA, 25 bp, Homo sapien
ctgtaattgaaggtggtaggataag

SEQ ID NO: 4373164 - DNA, 25 bp, Homo sapien
aattgaaggtggtaggataagaagc

SEQ ID NO: 4373165 - DNA, 25 bp, Homo sapien
ggtggagacagttgggttgtcagag

SEQ ID NO: 4373166 - DNA, 25 bp, Homo sapien
gggaccaggtgttgtcagtgacagg

SEQ ID NO: 4373167 - DNA, 25 bp, Homo sapien
aaaacatccattaaccataggccac

SEQ ID NO: 4373168 - DNA, 25 bp, Homo sapien
aacatccattaaccataggccactg

SEQ ID NO: 4373169 - DNA, 25 bp, Homo sapien
aaacatccattaaccataggccact

SEQ ID NO: 4373170 - DNA, 25 bp, Homo sapien
tctctctgtaataggtgcaaatggc

SEQ ID NO: 4373171 - DNA, 25 bp, Homo sapien
gcttgctgtcaaagcccttccaagg

SEQ ID NO: 4373172 - DNA, 25 bp, Homo sapien
ttctgctcaaccttttcttggagtt

SEQ ID NO: 4373173 - DNA, 25 bp, Homo sapien
tttctgagacttgaatagaagatat

SEQ ID NO: 4373174 - DNA, 25 bp, Homo sapien
tgtcacatgcacagctcaccatata

SEQ ID NO: 4373175 - DNA, 25 bp, Homo sapien
aatgagaagtatattgtcacatgca

SEQ ID NO: 4373176 - DNA, 25 bp, Homo sapien
ctgtaacgaaagtcactagttgtcg

SEQ ID NO: 4373177 - DNA, 25 bp, Homo sapien
cttatatttggcacaagattcttca

SEQ ID NO: 4373178 - DNA, 25 bp, Homo sapien
gccactgggtctgctgtcctttgtg

SEQ ID NO: 4373179 - DNA, 25 bp, Homo sapien
cataggccactgggtctgctgtcct

SEQ ID NO: 4373180 - DNA, 25 bp, Homo sapien
cactgggtctgctgtcctttgtggc

SEQ ID NO: 4373181 - DNA, 25 bp, Homo sapien
aggccactgggtctgctgtcctttg

SEQ ID NO: 4373182 - DNA, 25 bp, Homo sapien
agaagccatgttctttactgacagt

SEQ ID NO: 4373183 - DNA, 25 bp, Homo sapien
tgacagtcaattcagaatagatcat

SEQ ID NO: 4373184 - DNA, 25 bp, Homo sapien
tactgacagtcaattcagaatagat

SEQ ID NO: 4373185 - DNA, 25 bp, Homo sapien
tgttctttactgacagtcaattcag

SEQ ID NO: 4373186 - DNA, 25 bp, Homo sapien
ctgctgctgatttggtggttgcatt

SEQ ID NO: 4373187 - DNA, 25 bp, Homo sapien
ctgatttggtggttgcatttctcat

SEQ ID NO: 4373188 - DNA, 25 bp, Homo sapien
gctgatttggtggttgcatttctca

SEQ ID NO: 4373189 - DNA, 25 bp, Homo sapien
gctgctgatttggtggttgcatttc

SEQ ID NO: 4373190 - DNA, 25 bp, Homo sapien
cagtgcaagcctggtagtggtgaca

SEQ ID NO: 4373191 - DNA, 25 bp, Homo sapien
tggttgtgacttctgctggttccag

SEQ ID NO: 4373192 - DNA, 25 bp, Homo sapien
cattgaagaccaaatagaggaggaa

SEQ ID NO: 4373193 - DNA, 25 bp, Homo sapien
tctgaaggaagcatctgatcttgag

SEQ ID NO: 4373194 - DNA, 25 bp, Homo sapien
tgaaaaaggtgtcaaacaacccaga

SEQ ID NO: 4373195 - DNA, 25 bp, Homo sapien
ctgaaaaaggtgtcaaacaacccag

SEQ ID NO: 4373196 - DNA, 25 bp, Homo sapien
catcgactactgtttatatgaggaa

SEQ ID NO: 4373197 - DNA, 25 bp, Homo sapien
cacaaaggttaattgacatcgacta

SEQ ID NO: 4373198 - DNA, 25 bp, Homo sapien
tggtggccactttgtaaggtttcag

SEQ ID NO: 4373199 - DNA, 25 bp, Homo sapien
tgagcaggaactttgatagtcaatc

SEQ ID NO: 4373200 - DNA, 25 bp, Homo sapien
catgagggtcagttgtgcctgctgt

SEQ ID NO: 4373201 - DNA, 25 bp, Homo sapien
ttatcccctacaccggtggcacatg

SEQ ID NO: 4373202 - DNA, 25 bp, Homo sapien
ggtggcacatggatccatttccgtt

SEQ ID NO: 4373203 - DNA, 25 bp, Homo sapien
ggatccatttccgttgtcatgaggg

SEQ ID NO: 4373204 - DNA, 25 bp, Homo sapien
ctgggaaacatctgtaattggtggc

SEQ ID NO: 4373205 - DNA, 25 bp, Homo sapien
gaaacatctgtaattggtggcccca

SEQ ID NO: 4373206 - DNA, 25 bp, Homo sapien
tctcagcagatccatggtggtctgt

SEQ ID NO: 4373207 - DNA, 25 bp, Homo sapien
tggtctgtccctcagccatctgtgc

SEQ ID NO: 4373208 - DNA, 25 bp, Homo sapien
gccttgtgccctcaggctctgggtg

SEQ ID NO: 4373209 - DNA, 25 bp, Homo sapien
tccttgaaagactccaaggctctgt

SEQ ID NO: 4373210 - DNA, 25 bp, Homo sapien
agtggcggatgggatgccttcctcc

SEQ ID NO: 4373211 - DNA, 25 bp, Homo sapien
tggtagagggatccacaagagcaga

SEQ ID NO: 4373212 - DNA, 25 bp, Homo sapien
gaagtgcaggtcagcttgagcagct

SEQ ID NO: 4373213 - DNA, 25 bp, Homo sapien
ctggagaggtgccagaagtttctca

SEQ ID NO: 4373214 - DNA, 25 bp, Homo sapien
aagtttctcatctagctgtctgtgg

SEQ ID NO: 4373215 - DNA, 25 bp, Homo sapien
cactatacgtctccaaattacagag

SEQ ID NO: 4373216 - DNA, 25 bp, Homo sapien
tgcatggctgagcaaattcacccgt

SEQ ID NO: 4373217 - DNA, 25 bp, Homo sapien
cacagtcacattgcgctctgtgatt

SEQ ID NO: 4373218 - DNA, 25 bp, Homo sapien
tctaaacgtgccactttgatgtgca

SEQ ID NO: 4373219 - DNA, 25 bp, Homo sapien
gaaacttcaaaatgcgtctggtaat

SEQ ID NO: 4373220 - DNA, 25 bp, Homo sapien
tgaggaatacagtgtgccagcatcc

SEQ ID NO: 4373221 - DNA, 25 bp, Homo sapien
cagagtgggtgccaatcagcttctt

SEQ ID NO: 4373222 - DNA, 25 bp, Homo sapien
agctgcattccagagtgggtgccaa

SEQ ID NO: 4373223 - DNA, 25 bp, Homo sapien
gcattccagagtgggtgccaatcag

SEQ ID NO: 4373224 - DNA, 25 bp, Homo sapien
cagccaggagctgcattccagagtg

SEQ ID NO: 4373225 - DNA, 25 bp, Homo sapien
ttcttcacagtccttccgaatacga

SEQ ID NO: 4373226 - DNA, 25 bp, Homo sapien
tgaagaagaacccaatattccctgt

SEQ ID NO: 4373227 - DNA, 25 bp, Homo sapien
taatgcaaaatgaagaagaacccaa

SEQ ID NO: 4373228 - DNA, 25 bp, Homo sapien
ccctgtctattagagttagtgtaat

SEQ ID NO: 4373229 - DNA, 25 bp, Homo sapien
tgggtcagttctgagaagcacatcg

SEQ ID NO: 4373230 - DNA, 25 bp, Homo sapien
cacatcgtccgtagagttggtgggt

SEQ ID NO: 4373231 - DNA, 25 bp, Homo sapien
ctgtttgtacaagattgttggatgc

SEQ ID NO: 4373232 - DNA, 25 bp, Homo sapien
ttgtacaagattgttggatgctggg

SEQ ID NO: 4373233 - DNA, 25 bp, Homo sapien
cttacacgattccatccttcaatgt

SEQ ID NO: 4373234 - DNA, 25 bp, Homo sapien
tacacgattccatccttcaatgttg

SEQ ID NO: 4373235 - DNA, 25 bp, Homo sapien
ccttcaatgttgtctttctttgtac

SEQ ID NO: 4373236 - DNA, 25 bp, Homo sapien
ttcaatgttgtctttctttgtacat

SEQ ID NO: 4373237 - DNA, 25 bp, Homo sapien
ctgaggtgctctgtgaacactggtg

SEQ ID NO: 4373238 - DNA, 25 bp, Homo sapien
aggtgctctgtgaacactggtggtt

SEQ ID NO: 4373239 - DNA, 25 bp, Homo sapien
gtgctctgtgaacactggtggttgg

SEQ ID NO: 4373240 - DNA, 25 bp, Homo sapien
gctctgtgaacactggtggttggtc

SEQ ID NO: 4373241 - DNA, 25 bp, Homo sapien
ggcttttgttctgatgatagtctgc

SEQ ID NO: 4373242 - DNA, 25 bp, Homo sapien
tcctgtgggcgccaaatgatcacaa

SEQ ID NO: 4373243 - DNA, 25 bp, Homo sapien
tagtctgcagctaatctgagcatct

SEQ ID NO: 4373244 - DNA, 25 bp, Homo sapien
catcctgtaactgaatactgggctt

SEQ ID NO: 4373245 - DNA, 25 bp, Homo sapien
ggatccgtattccaaccaggttgga

SEQ ID NO: 4373246 - DNA, 25 bp, Homo sapien
caaatcagaagtgaagacaatccct

SEQ ID NO: 4373247 - DNA, 25 bp, Homo sapien
tctgaggtggcaagtacagcggctt

SEQ ID NO: 4373248 - DNA, 25 bp, Homo sapien
ggttgtaagcaatggcaaatcagaa

SEQ ID NO: 4373249 - DNA, 25 bp, Homo sapien
ctctgtcctatgcataactctgctt

SEQ ID NO: 4373250 - DNA, 25 bp, Homo sapien
tctgtcctatgcataactctgcttt

SEQ ID NO: 4373251 - DNA, 25 bp, Homo sapien
taacattcagttttggccggtttgc

SEQ ID NO: 4373252 - DNA, 25 bp, Homo sapien
tatggccagtctttgccacgggcaa

SEQ ID NO: 4373253 - DNA, 25 bp, Homo sapien
caacaaaagtgggaaacttcagctc

SEQ ID NO: 4373254 - DNA, 25 bp, Homo sapien
catgcatggtggcaaacagccctaa

SEQ ID NO: 4373255 - DNA, 25 bp, Homo sapien
cataaacaccctcttcagctttggc

SEQ ID NO: 4373256 - DNA, 25 bp, Homo sapien
actagattgcctatcataaacaccc

SEQ ID NO: 4373257 - DNA, 25 bp, Homo sapien
tccagacctttttattactagattg

SEQ ID NO: 4373258 - DNA, 25 bp, Homo sapien
gacctttttattactagattgccta

SEQ ID NO: 4373259 - DNA, 25 bp, Homo sapien
gaaaaggctattgcctctgaggccc

SEQ ID NO: 4373260 - DNA, 25 bp, Homo sapien
tacaggtcctgtgaccaacacggca

SEQ ID NO: 4373261 - DNA, 25 bp, Homo sapien
gaagtcgctcttcttaacggcagac

SEQ ID NO: 4373262 - DNA, 25 bp, Homo sapien
tagatggcaggaacctagaagtcgc

SEQ ID NO: 4373263 - DNA, 25 bp, Homo sapien
catagttccctttggatgtgagctg

SEQ ID NO: 4373264 - DNA, 25 bp, Homo sapien
cagggtccgtttttcagcatagttc

SEQ ID NO: 4373265 - DNA, 25 bp, Homo sapien
aggacctggaatcccgctgctctga

SEQ ID NO: 4373266 - DNA, 25 bp, Homo sapien
ggtgtagcatctgacgccccataat

SEQ ID NO: 4373267 - DNA, 25 bp, Homo sapien
tccacaaggcactgttaagtgtgga

SEQ ID NO: 4373268 - DNA, 25 bp, Homo sapien
aactctaaaggtagcctcatagtct

SEQ ID NO: 4373269 - DNA, 25 bp, Homo sapien
caaggcactgttaagtgtggattgt

SEQ ID NO: 4373270 - DNA, 25 bp, Homo sapien
ggtagcctcatagtctccacaaggc

SEQ ID NO: 4373271 - DNA, 25 bp, Homo sapien
gggtaagcaggcctaatggagtcat

SEQ ID NO: 4373272 - DNA, 25 bp, Homo sapien
ctcgtagaagttgtaaataagattt

SEQ ID NO: 4373273 - DNA, 25 bp, Homo sapien
ccttgatgggtttcaaaactattgc

SEQ ID NO: 4373274 - DNA, 25 bp, Homo sapien
aactattgcagctctggtgtcgtgg

SEQ ID NO: 4373275 - DNA, 25 bp, Homo sapien
gatgcccagttcctttgcctaatcc

SEQ ID NO: 4373276 - DNA, 25 bp, Homo sapien
ctaatcctccaatcagtgtagctct

SEQ ID NO: 4373277 - DNA, 25 bp, Homo sapien
aatcctccaatcagtgtagctcttt

SEQ ID NO: 4373278 - DNA, 25 bp, Homo sapien
cctccaatcagtgtagctctttcca

SEQ ID NO: 4373279 - DNA, 25 bp, Homo sapien
gagtggaaatttaatgccagagagg

SEQ ID NO: 4373280 - DNA, 25 bp, Homo sapien
tcaacaccaagtggctaaaagctgt

SEQ ID NO: 4373281 - DNA, 25 bp, Homo sapien
ccagagaggttttggcactttgtca

SEQ ID NO: 4373282 - DNA, 25 bp, Homo sapien
caacattagctttgagggcttttgg

SEQ ID NO: 4373283 - DNA, 25 bp, Homo sapien
gataggtcactattaacaatgccaa

SEQ ID NO: 4373284 - DNA, 25 bp, Homo sapien
tcaaggagcatcagcgtatagaggc

SEQ ID NO: 4373285 - DNA, 25 bp, Homo sapien
gctacactgcaattctgataggtca

SEQ ID NO: 4373286 - DNA, 25 bp, Homo sapien
aatctgtggcctgaagctacactgc

SEQ ID NO: 4373287 - DNA, 25 bp, Homo sapien
ctgagatttgacatgacgtttttct

SEQ ID NO: 4373288 - DNA, 25 bp, Homo sapien
gctgagatttgacatgacgtttttc

SEQ ID NO: 4373289 - DNA, 25 bp, Homo sapien
tgacatgacgtttttctttcaacaa

SEQ ID NO: 4373290 - DNA, 25 bp, Homo sapien
ttgacatgacgtttttctttcaaca

SEQ ID NO: 4373291 - DNA, 25 bp, Homo sapien
tcagagaaagtattgctcctttttc

SEQ ID NO: 4373292 - DNA, 25 bp, Homo sapien
gatactgtcccattcagattcctct

SEQ ID NO: 4373293 - DNA, 25 bp, Homo sapien
cctttttctgtctaaagcgaatcct

SEQ ID NO: 4373294 - DNA, 25 bp, Homo sapien
tctgagaccatgtcccatcaataat

SEQ ID NO: 4373295 - DNA, 25 bp, Homo sapien
ggagatacacttaagactctcccat

SEQ ID NO: 4373296 - DNA, 25 bp, Homo sapien
ctttcaacatggagatacacttaag

SEQ ID NO: 4373297 - DNA, 25 bp, Homo sapien
catggagatacacttaagactctcc

SEQ ID NO: 4373298 - DNA, 25 bp, Homo sapien
caacatggagatacacttaagactc

SEQ ID NO: 4373299 - DNA, 25 bp, Homo sapien
ttcagcaaaccatagcagaacaagg

SEQ ID NO: 4373300 - DNA, 25 bp, Homo sapien
cagcaaaccatagcagaacaaggat

SEQ ID NO: 4373301 - DNA, 25 bp, Homo sapien
tgtaccttcagcaaaccatagcaga

SEQ ID NO: 4373302 - DNA, 25 bp, Homo sapien
taccttcagcaaaccatagcagaac

SEQ ID NO: 4373303 - DNA, 25 bp, Homo sapien
tagtacgtgcacattgtaccatacc

SEQ ID NO: 4373304 - DNA, 25 bp, Homo sapien
tgaatttctcaccaactctgtcctc

SEQ ID NO: 4373305 - DNA, 25 bp, Homo sapien
ttccacatctatagacgatagtacg

SEQ ID NO: 4373306 - DNA, 25 bp, Homo sapien
ggcttcatgaccagacctgaatttc

SEQ ID NO: 4373307 - DNA, 25 bp, Homo sapien
gtaggaagtacaccagtacatatgg

SEQ ID NO: 4373308 - DNA, 25 bp, Homo sapien
taggaagtacaccagtacatatggt

SEQ ID NO: 4373309 - DNA, 25 bp, Homo sapien
aggaagtacaccagtacatatggtt

SEQ ID NO: 4373310 - DNA, 25 bp, Homo sapien
aacattagcataaagtgattcgata

SEQ ID NO: 4373311 - DNA, 25 bp, Homo sapien
tgtattccattgcaaaacattagca

SEQ ID NO: 4373312 - DNA, 25 bp, Homo sapien
gattcgatattatatattccgtcag

SEQ ID NO: 4373313 - DNA, 25 bp, Homo sapien
tatattccgtcagaaatgccaggaa

SEQ ID NO: 4373314 - DNA, 25 bp, Homo sapien
cccatgtcgtgcaagcgatgttcat

SEQ ID NO: 4373315 - DNA, 25 bp, Homo sapien
tattttcacccatgtcgtgcaagcg

SEQ ID NO: 4373316 - DNA, 25 bp, Homo sapien
cagtgatatgagacagcacctttat

SEQ ID NO: 4373317 - DNA, 25 bp, Homo sapien
cctttattttcacccatgtcgtgca

SEQ ID NO: 4373318 - DNA, 25 bp, Homo sapien
ctgtgtgtggaaacttgtgtggtct

SEQ ID NO: 4373319 - DNA, 25 bp, Homo sapien
tgtgtggaaacttgtgtggtcttta

SEQ ID NO: 4373320 - DNA, 25 bp, Homo sapien
tgtgtgtggaaacttgtgtggtctt

SEQ ID NO: 4373321 - DNA, 25 bp, Homo sapien
gtgtggaaacttgtgtggtctttac

SEQ ID NO: 4373322 - DNA, 25 bp, Homo sapien
tcatggagagacttggcaacagtct

SEQ ID NO: 4373323 - DNA, 25 bp, Homo sapien
atggagagacttggcaacagtctct

SEQ ID NO: 4373324 - DNA, 25 bp, Homo sapien
ggagagacttggcaacagtctcttt

SEQ ID NO: 4373325 - DNA, 25 bp, Homo sapien
ttcatggagagacttggcaacagtc

SEQ ID NO: 4373326 - DNA, 25 bp, Homo sapien
tgacactggccatcatcagtagctt

SEQ ID NO: 4373327 - DNA, 25 bp, Homo sapien
catcatcagtagcttcttaggcaaa

SEQ ID NO: 4373328 - DNA, 25 bp, Homo sapien
tgtagcagtcattgacactggccat

SEQ ID NO: 4373329 - DNA, 25 bp, Homo sapien
agtagcttcttaggcaaaggggcag

SEQ ID NO: 4373330 - DNA, 25 bp, Homo sapien
ctccacaaggaatgatgtggagcat

SEQ ID NO: 4373331 - DNA, 25 bp, Homo sapien
gatgtggagcataccaatcttattc

SEQ ID NO: 4373332 - DNA, 25 bp, Homo sapien
ggaatgatgtggagcataccaatct

SEQ ID NO: 4373333 - DNA, 25 bp, Homo sapien
caaggaatgatgtggagcataccaa

SEQ ID NO: 4373334 - DNA, 25 bp, Homo sapien
agagtctgcttttgcatgggcataa

SEQ ID NO: 4373335 - DNA, 25 bp, Homo sapien
acctttgtactccaatattctttga

SEQ ID NO: 4373336 - DNA, 25 bp, Homo sapien
aacctttgtactccaatattctttg

SEQ ID NO: 4373337 - DNA, 25 bp, Homo sapien
cacagaccggacagaaggaaatggg

SEQ ID NO: 4373338 - DNA, 25 bp, Homo sapien
ctccttcgaagacccatctcttcta

SEQ ID NO: 4373339 - DNA, 25 bp, Homo sapien
cctgcaaagaacacacagaccggac

SEQ ID NO: 4373340 - DNA, 25 bp, Homo sapien
tcaatcccctcaatccagagcaagc

SEQ ID NO: 4373341 - DNA, 25 bp, Homo sapien
caggacacaagagtggcctctgagc

SEQ ID NO: 4373342 - DNA, 25 bp, Homo sapien
tcaggacacaagagtggcctctgag

SEQ ID NO: 4373343 - DNA, 25 bp, Homo sapien
gacacaagagtggcctctgagcttc

SEQ ID NO: 4373344 - DNA, 25 bp, Homo sapien
ggacacaagagtggcctctgagctt

SEQ ID NO: 4373345 - DNA, 25 bp, Homo sapien
ccctcatgctgtggaatacactgca

SEQ ID NO: 4373346 - DNA, 25 bp, Homo sapien
gttgaggacgctgccattctccagc

SEQ ID NO: 4373347 - DNA, 25 bp, Homo sapien
actgctttctgtctgttgaggacgc

SEQ ID NO: 4373348 - DNA, 25 bp, Homo sapien
cactgcagccactgaaaacaagtgg

SEQ ID NO: 4373349 - DNA, 25 bp, Homo sapien
gtggggaacggcctgccagtcctct

SEQ ID NO: 4373350 - DNA, 25 bp, Homo sapien
ttagcaagttgcaaagccctcccat

SEQ ID NO: 4373351 - DNA, 25 bp, Homo sapien
tgaccgaagagatctccccaacctg

SEQ ID NO: 4373352 - DNA, 25 bp, Homo sapien
tggagatacaaagattgaccgaaga

SEQ ID NO: 4373353 - DNA, 25 bp, Homo sapien
tatatgcaatgatagaatgcaagcc

SEQ ID NO: 4373354 - DNA, 25 bp, Homo sapien
gaagataactctaagcccctgtgtt

SEQ ID NO: 4373355 - DNA, 25 bp, Homo sapien
aaagtaattagccaactgtgagaat

SEQ ID NO: 4373356 - DNA, 25 bp, Homo sapien
tcataagtgttgagctaacgtaatg

SEQ ID NO: 4373357 - DNA, 25 bp, Homo sapien
accaccaccgtcatggaaaactatg

SEQ ID NO: 4373358 - DNA, 25 bp, Homo sapien
aatgtgcgtcggaaaggcctgtcca

SEQ ID NO: 4373359 - DNA, 25 bp, Homo sapien
ccaccgtcatggaaaactatgaatg

SEQ ID NO: 4373360 - DNA, 25 bp, Homo sapien
aaaactatgaatgtgcgtcggaaag

SEQ ID NO: 4373361 - DNA, 25 bp, Homo sapien
aattaactcttatgttcgtcaagga

SEQ ID NO: 4373362 - DNA, 25 bp, Homo sapien
gaaatccggttcactatgcaccacg

SEQ ID NO: 4373363 - DNA, 25 bp, Homo sapien
caccacgtagaaatgtccagctgcc

SEQ ID NO: 4373364 - DNA, 25 bp, Homo sapien
tcgtcaaggattcattgaaatccgg

SEQ ID NO: 4373365 - DNA, 25 bp, Homo sapien
ttagtatgttcaatatatttgtctt

SEQ ID NO: 4373366 - DNA, 25 bp, Homo sapien
atttgtcttttcttctgtccttcat

SEQ ID NO: 4373367 - DNA, 25 bp, Homo sapien
attagtatgttcaatatatttgtct

SEQ ID NO: 4373368 - DNA, 25 bp, Homo sapien
tatatttgtcttttcttctgtcctt

SEQ ID NO: 4373369 - DNA, 25 bp, Homo sapien
gtggagaaaagtggacattctgcag

SEQ ID NO: 4373370 - DNA, 25 bp, Homo sapien
ggtccaggaccatctgatactgtcc

SEQ ID NO: 4373371 - DNA, 25 bp, Homo sapien
tggtccaggaccatctgatactgtc

SEQ ID NO: 4373372 - DNA, 25 bp, Homo sapien
tctcaagaatgtaataggcaatcag

SEQ ID NO: 4373373 - DNA, 25 bp, Homo sapien
ttattgtttgcatacaagtgagtct

SEQ ID NO: 4373374 - DNA, 25 bp, Homo sapien
tgagtctgaattggggccttttact

SEQ ID NO: 4373375 - DNA, 25 bp, Homo sapien
aatcagatggtgatttatctgaccc

SEQ ID NO: 4373376 - DNA, 25 bp, Homo sapien
acctatatcgcctatgcagaagaga

SEQ ID NO: 4373377 - DNA, 25 bp, Homo sapien
tttggcctcacctatatcgcctatg

SEQ ID NO: 4373378 - DNA, 25 bp, Homo sapien
acggcaccttttggcctcacctata

SEQ ID NO: 4373379 - DNA, 25 bp, Homo sapien
agaccaccacggcaccttttggcct

SEQ ID NO: 4373380 - DNA, 25 bp, Homo sapien
gatgctcattgtaagctctgaatct

SEQ ID NO: 4373381 - DNA, 25 bp, Homo sapien
tggccagagaaggatccgcaagata

SEQ ID NO: 4373382 - DNA, 25 bp, Homo sapien
gatccgcaagatataaattccccgc

SEQ ID NO: 4373383 - DNA, 25 bp, Homo sapien
aagaacaatgttgagcctaaatggg

SEQ ID NO: 4373384 - DNA, 25 bp, Homo sapien
acaataagagaatctggggagagca

SEQ ID NO: 4373385 - DNA, 25 bp, Homo sapien
gggagagcacatctaacttggtgtc

SEQ ID NO: 4373386 - DNA, 25 bp, Homo sapien
tctggggagagcacatctaacttgg

SEQ ID NO: 4373387 - DNA, 25 bp, Homo sapien
agagatttctactgggttttccagg

SEQ ID NO: 4373388 - DNA, 25 bp, Homo sapien
ctcaagttgccccccttcacttatt

SEQ ID NO: 4373389 - DNA, 25 bp, Homo sapien
tcaagttgccccccttcacttatta

SEQ ID NO: 4373390 - DNA, 25 bp, Homo sapien
tcccccatcactctcaagttgcccc

SEQ ID NO: 4373391 - DNA, 25 bp, Homo sapien
gctcacaatactgagaggcctgcag

SEQ ID NO: 4373392 - DNA, 25 bp, Homo sapien
tccgagcagatggaagtagaattca

SEQ ID NO: 4373393 - DNA, 25 bp, Homo sapien
caccactgggcttgttgcttgctca

SEQ ID NO: 4373394 - DNA, 25 bp, Homo sapien
tgatgagctgtgctcacaatactga

SEQ ID NO: 4373395 - DNA, 25 bp, Homo sapien
taaattggagtttgatactctggaa

SEQ ID NO: 4373396 - DNA, 25 bp, Homo sapien
gtgaatcttgtaacattccatcagc

SEQ ID NO: 4373397 - DNA, 25 bp, Homo sapien
cgttaatgaacctatgggcttccct

SEQ ID NO: 4373398 - DNA, 25 bp, Homo sapien
cacaggacagctctgcgatggtgtg

SEQ ID NO: 4373399 - DNA, 25 bp, Homo sapien
tatctgcagaaaacactacccaggg

SEQ ID NO: 4373400 - DNA, 25 bp, Homo sapien
gagagcccagataatgtgacccaca

SEQ ID NO: 4373401 - DNA, 25 bp, Homo sapien
gacccacaagtgcttaacctcctgg

SEQ ID NO: 4373402 - DNA, 25 bp, Homo sapien
gaaaaggtgtatcttgacttctcct

SEQ ID NO: 4373403 - DNA, 25 bp, Homo sapien
gttttgctgcacacaacactgtccg

SEQ ID NO: 4373404 - DNA, 25 bp, Homo sapien
ctgtggccgagttttagagtcttac

SEQ ID NO: 4373405 - DNA, 25 bp, Homo sapien
cagtaatgtgtcagactgtggccga

SEQ ID NO: 4373406 - DNA, 25 bp, Homo sapien
cactgggatataatggaagtagctc

SEQ ID NO: 4373407 - DNA, 25 bp, Homo sapien
tagactgtcagtgcacagttcttgc

SEQ ID NO: 4373408 - DNA, 25 bp, Homo sapien
caaaacttagactgtcagtgcacag

SEQ ID NO: 4373409 - DNA, 25 bp, Homo sapien
acttagactgtcagtgcacagttct

SEQ ID NO: 4373410 - DNA, 25 bp, Homo sapien
aaaacttagactgtcagtgcacagt

SEQ ID NO: 4373411 - DNA, 25 bp, Homo sapien
taagcctttgacctgcaacccttgt

SEQ ID NO: 4373412 - DNA, 25 bp, Homo sapien
tgagtcctgcttgagatgggagtgt

SEQ ID NO: 4373413 - DNA, 25 bp, Homo sapien
gtgctggccataagcctttgacctg

SEQ ID NO: 4373414 - DNA, 25 bp, Homo sapien
acattgttttccgtatagagttggg

SEQ ID NO: 4373415 - DNA, 25 bp, Homo sapien
gccacatggcctaggccgttttccc

SEQ ID NO: 4373416 - DNA, 25 bp, Homo sapien
cccggaagccacatggcctaggccg

SEQ ID NO: 4373417 - DNA, 25 bp, Homo sapien
cggaagccacatggcctaggccgtt

SEQ ID NO: 4373418 - DNA, 25 bp, Homo sapien
aagccacatggcctaggccgttttc

SEQ ID NO: 4373419 - DNA, 25 bp, Homo sapien
tccctttgcagcattccttggcagg

SEQ ID NO: 4373420 - DNA, 25 bp, Homo sapien
tgcagcattccttggcagggtaaac

SEQ ID NO: 4373421 - DNA, 25 bp, Homo sapien
tccttggcagggtaaacagcaccat

SEQ ID NO: 4373422 - DNA, 25 bp, Homo sapien
tctttccctttgcagcattccttgg

SEQ ID NO: 4373423 - DNA, 25 bp, Homo sapien
taaagtctatcaggcttcctctgga

SEQ ID NO: 4373424 - DNA, 25 bp, Homo sapien
taacgggcaaaggtataatattctc

SEQ ID NO: 4373425 - DNA, 25 bp, Homo sapien
aactcagtgattgcctttaacgggc

SEQ ID NO: 4373426 - DNA, 25 bp, Homo sapien
tcctctggacaactcagtgattgcc

SEQ ID NO: 4373427 - DNA, 25 bp, Homo sapien
tgtgcaaggtttataccctctaaaa

SEQ ID NO: 4373428 - DNA, 25 bp, Homo sapien
cttcccttgtgtgcaaggtttatac

SEQ ID NO: 4373429 - DNA, 25 bp, Homo sapien
cctgagcctaaacttgtagcttccc

SEQ ID NO: 4373430 - DNA, 25 bp, Homo sapien
tccctggatagcctgagcctaaact

SEQ ID NO: 4373431 - DNA, 25 bp, Homo sapien
agggttgggcttactaaagcagtca

SEQ ID NO: 4373432 - DNA, 25 bp, Homo sapien
gcttactaaagcagtcagaactttg

SEQ ID NO: 4373433 - DNA, 25 bp, Homo sapien
gctttccataacctcatttggctgg

SEQ ID NO: 4373434 - DNA, 25 bp, Homo sapien
aaggtagataaaacccatagagctt

SEQ ID NO: 4373435 - DNA, 25 bp, Homo sapien
aaaatgtggctatgtgtcgtcttgc

SEQ ID NO: 4373436 - DNA, 25 bp, Homo sapien
ctagaaaaatgtggctatgtgtcgt

SEQ ID NO: 4373437 - DNA, 25 bp, Homo sapien
gtggctatgtgtcgtcttgccctag

SEQ ID NO: 4373438 - DNA, 25 bp, Homo sapien
tatgtgtcgtcttgccctagaaaac

SEQ ID NO: 4373439 - DNA, 25 bp, Homo sapien
ccggattattgtgagccttctgcaa

SEQ ID NO: 4373440 - DNA, 25 bp, Homo sapien
ctgaatccggattattgtgagcctt

SEQ ID NO: 4373441 - DNA, 25 bp, Homo sapien
gcaaagctttagctctgcgctgcag

SEQ ID NO: 4373442 - DNA, 25 bp, Homo sapien
ttggaggagatgtagcctgaatccg

SEQ ID NO: 4373443 - DNA, 25 bp, Homo sapien
acttctcccttggaatgcagctgcc

SEQ ID NO: 4373444 - DNA, 25 bp, Homo sapien
agacacttctcccttggaatgcagc

SEQ ID NO: 4373445 - DNA, 25 bp, Homo sapien
tacaggcgccaacttcaaagagaca

SEQ ID NO: 4373446 - DNA, 25 bp, Homo sapien
taggccaagacgtctacaggcgcca

SEQ ID NO: 4373447 - DNA, 25 bp, Homo sapien
aatagccattcaataggtgttgaat

SEQ ID NO: 4373448 - DNA, 25 bp, Homo sapien
taatagccattcaataggtgttgaa

SEQ ID NO: 4373449 - DNA, 25 bp, Homo sapien
tgtaatagccattcaataggtgttg

SEQ ID NO: 4373450 - DNA, 25 bp, Homo sapien
gtaatagccattcaataggtgttga

SEQ ID NO: 4373451 - DNA, 25 bp, Homo sapien
tccttactccctgagtgtgttggcc

SEQ ID NO: 4373452 - DNA, 25 bp, Homo sapien
cctgcatatgtctggtgcctataat

SEQ ID NO: 4373453 - DNA, 25 bp, Homo sapien
tgttgagtgtatgtgagctccacag

SEQ ID NO: 4373454 - DNA, 25 bp, Homo sapien
taatttgaggatatgagtctgtgtg

SEQ ID NO: 4373455 - DNA, 25 bp, Homo sapien
tctcgggtaggacaacacttaagtc

SEQ ID NO: 4373456 - DNA, 25 bp, Homo sapien
tctctcgggtaggacaacacttaag

SEQ ID NO: 4373457 - DNA, 25 bp, Homo sapien
ctctcgggtaggacaacacttaagt

SEQ ID NO: 4373458 - DNA, 25 bp, Homo sapien
atccaggggcatttgaggtcacata

SEQ ID NO: 4373459 - DNA, 25 bp, Homo sapien
tccaggggcatttgaggtcacatac

SEQ ID NO: 4373460 - DNA, 25 bp, Homo sapien
tatagctatgaagcttccagggtcc

SEQ ID NO: 4373461 - DNA, 25 bp, Homo sapien
ccatcaatggcggagaagcaactga

SEQ ID NO: 4373462 - DNA, 25 bp, Homo sapien
caggatgcttggaagtaggatgtca

SEQ ID NO: 4373463 - DNA, 25 bp, Homo sapien
ccttggaggtgcattctgtggacgc

SEQ ID NO: 4373464 - DNA, 25 bp, Homo sapien
gcagcagcctgtgggctaatgccat

SEQ ID NO: 4373465 - DNA, 25 bp, Homo sapien
ctgccttggcagatgcagcagcctg

SEQ ID NO: 4373466 - DNA, 25 bp, Homo sapien
gccttggcagatgcagcagcctgtg

SEQ ID NO: 4373467 - DNA, 25 bp, Homo sapien
agatgcagcagcctgtgggctaatg

SEQ ID NO: 4373468 - DNA, 25 bp, Homo sapien
tgtgagtctggcaggattgcttacg

SEQ ID NO: 4373469 - DNA, 25 bp, Homo sapien
cgacagctccctgaaggtgtacaat

SEQ ID NO: 4373470 - DNA, 25 bp, Homo sapien
tggcactgctacaagaaccatcaga

SEQ ID NO: 4373471 - DNA, 25 bp, Homo sapien
ggattgcttacgacagctccctgaa

SEQ ID NO: 4373472 - DNA, 25 bp, Homo sapien
ttttatcacactacttcctttgttc

SEQ ID NO: 4373473 - DNA, 25 bp, Homo sapien
tccaaatataactcatctgcaaaac

SEQ ID NO: 4373474 - DNA, 25 bp, Homo sapien
ctgaaaccgtctctttacatatttt

SEQ ID NO: 4373475 - DNA, 25 bp, Homo sapien
tttatcacactacttcctttgttct

SEQ ID NO: 4373476 - DNA, 25 bp, Homo sapien
gaaaccataactcatgaaatagaag

SEQ ID NO: 4373477 - DNA, 25 bp, Homo sapien
tctccttggaaaccataactcatga

SEQ ID NO: 4373478 - DNA, 25 bp, Homo sapien
gaatatatgggcacatgtctccttg

SEQ ID NO: 4373479 - DNA, 25 bp, Homo sapien
tgggcacacctcttgaatatatggg

SEQ ID NO: 4373480 - DNA, 25 bp, Homo sapien
tagctgtggactaaccctcaaaacc

SEQ ID NO: 4373481 - DNA, 25 bp, Homo sapien
agaagtgggacagactgctgcccct

SEQ ID NO: 4373482 - DNA, 25 bp, Homo sapien
gccacctgggctgtatgctccaagc

SEQ ID NO: 4373483 - DNA, 25 bp, Homo sapien
ccctgccagctggagtagtctacga

SEQ ID NO: 4373484 - DNA, 25 bp, Homo sapien
gcagctggggttatttctaccgaca

SEQ ID NO: 4373485 - DNA, 25 bp, Homo sapien
tggcagctggggttatttctaccga

SEQ ID NO: 4373486 - DNA, 25 bp, Homo sapien
cagctggggttatttctaccgacac

SEQ ID NO: 4373487 - DNA, 25 bp, Homo sapien
cttggcagctggggttatttctacc

SEQ ID NO: 4373488 - DNA, 25 bp, Homo sapien
taaatcgccacttgattcccactgt

SEQ ID NO: 4373489 - DNA, 25 bp, Homo sapien
actgtcactccaatcctgcgttcta

SEQ ID NO: 4373490 - DNA, 25 bp, Homo sapien
tctgactcctagaaccacttagctg

SEQ ID NO: 4373491 - DNA, 25 bp, Homo sapien
caatcctgcgttctaccttctgact

SEQ ID NO: 4373492 - DNA, 25 bp, Homo sapien
tcagcactcgttatgtgtcagacac

SEQ ID NO: 4373493 - DNA, 25 bp, Homo sapien
aacaaaatgagacatggcctctctc

SEQ ID NO: 4373494 - DNA, 25 bp, Homo sapien
catttattcagcactcgttatgtgt

SEQ ID NO: 4373495 - DNA, 25 bp, Homo sapien
cagacactcgttatgtgtccagcac

SEQ ID NO: 4373496 - DNA, 25 bp, Homo sapien
gaatgcacagtgctatgataacttt

SEQ ID NO: 4373497 - DNA, 25 bp, Homo sapien
gcacagtgctatgataacttttatt

SEQ ID NO: 4373498 - DNA, 25 bp, Homo sapien
caatggtggcaagtgttacaaagga

SEQ ID NO: 4373499 - DNA, 25 bp, Homo sapien
aaaatttcaatggtggcaagtgtta

SEQ ID NO: 4373500 - DNA, 25 bp, Homo sapien
tttaagtatatgactctttatcaga

SEQ ID NO: 4373501 - DNA, 25 bp, Homo sapien
gagatccaaaggatgtgtgggagct

SEQ ID NO: 4373502 - DNA, 25 bp, Homo sapien
gatccaaaggatgtgtgggagctac

SEQ ID NO: 4373503 - DNA, 25 bp, Homo sapien
tggctctttaagtatatgactcttt

SEQ ID NO: 4373504 - DNA, 25 bp, Homo sapien
aagggaagagcggtcaagatcattg

SEQ ID NO: 4373505 - DNA, 25 bp, Homo sapien
agagcggtcaagatcattgaataaa

SEQ ID NO: 4373506 - DNA, 25 bp, Homo sapien
gaagagcggtcaagatcattgaata

SEQ ID NO: 4373507 - DNA, 25 bp, Homo sapien
agaaaagggaagagcggtcaagatc

SEQ ID NO: 4373508 - DNA, 25 bp, Homo sapien
tggcaaatgagcatgcttctatcca

SEQ ID NO: 4373509 - DNA, 25 bp, Homo sapien
gtctgtttttggaactgtctaatgg

SEQ ID NO: 4373510 - DNA, 25 bp, Homo sapien
tgtttttggaactgtctaatggcaa

SEQ ID NO: 4373511 - DNA, 25 bp, Homo sapien
atggcaaatgagcatgcttctatcc

SEQ ID NO: 4373512 - DNA, 25 bp, Homo sapien
acaggatgcttgccatttggaaagg

SEQ ID NO: 4373513 - DNA, 25 bp, Homo sapien
tctacacatctcagtactgcctgtt

SEQ ID NO: 4373514 - DNA, 25 bp, Homo sapien
caggatgcttgccatttggaaagga

SEQ ID NO: 4373515 - DNA, 25 bp, Homo sapien
ttctacacatctcagtactgcctgt

SEQ ID NO: 4373516 - DNA, 25 bp, Homo sapien
taaaagtcggttgtgcagcatatat

SEQ ID NO: 4373517 - DNA, 25 bp, Homo sapien
cggttgtgcagcatatattcacagc

SEQ ID NO: 4373518 - DNA, 25 bp, Homo sapien
aatgataaaagtcggttgtgcagca

SEQ ID NO: 4373519 - DNA, 25 bp, Homo sapien
tcctaatgataaaagtcggttgtgc

SEQ ID NO: 4373520 - DNA, 25 bp, Homo sapien
ttttattttagcattgatgctgagg

SEQ ID NO: 4373521 - DNA, 25 bp, Homo sapien
ctgttcttccccagctgggctttgg

SEQ ID NO: 4373522 - DNA, 25 bp, Homo sapien
ttttagcattgatgctgaggtccac

SEQ ID NO: 4373523 - DNA, 25 bp, Homo sapien
tgggctttggcatcctccatggaaa

SEQ ID NO: 4373524 - DNA, 25 bp, Homo sapien
ttcagctctgtctcaacgtacttta

SEQ ID NO: 4373525 - DNA, 25 bp, Homo sapien
ctttattatgtctgcattctcatcc

SEQ ID NO: 4373526 - DNA, 25 bp, Homo sapien
ctgtctcaacgtactttattatgtc

SEQ ID NO: 4373527 - DNA, 25 bp, Homo sapien
gttccttatgttccatagtctcttt

SEQ ID NO: 4373528 - DNA, 25 bp, Homo sapien
tgcagaaaacaatgtccccagtgtc

SEQ ID NO: 4373529 - DNA, 25 bp, Homo sapien
ctgcagaaaacaatgtccccagtgt

SEQ ID NO: 4373530 - DNA, 25 bp, Homo sapien
tggctggtagatgctgcagaatctt

SEQ ID NO: 4373531 - DNA, 25 bp, Homo sapien
gctggtagatgctgcagaatctttt

SEQ ID NO: 4373532 - DNA, 25 bp, Homo sapien
tcaatcatttgcaaggtgaactggc

SEQ ID NO: 4373533 - DNA, 25 bp, Homo sapien
catttgcaaggtgaactggctggta

SEQ ID NO: 4373534 - DNA, 25 bp, Homo sapien
caatattgtccaagttccaaaaggc

SEQ ID NO: 4373535 - DNA, 25 bp, Homo sapien
ggtggccaatattgtccaagttcca

SEQ ID NO: 4373536 - DNA, 25 bp, Homo sapien
ctctgggtaggtggccaatattgtc

SEQ ID NO: 4373537 - DNA, 25 bp, Homo sapien
ggtaggtggccaatattgtccaagt

SEQ ID NO: 4373538 - DNA, 25 bp, Homo sapien
cacagcagagcaatgctatgctcag

SEQ ID NO: 4373539 - DNA, 25 bp, Homo sapien
tggtcacagcagagcaatgctatgc

SEQ ID NO: 4373540 - DNA, 25 bp, Homo sapien
agcagagcaatgctatgctcagaag

SEQ ID NO: 4373541 - DNA, 25 bp, Homo sapien
gcagtggtcacagcagagcaatgct

SEQ ID NO: 4373542 - DNA, 25 bp, Homo sapien
gtgaaagtcacttgcagtagtagca

SEQ ID NO: 4373543 - DNA, 25 bp, Homo sapien
cagacttgggaaagctcaggtgaac

SEQ ID NO: 4373544 - DNA, 25 bp, Homo sapien
accagacttgggaaagctcaggtga

SEQ ID NO: 4373545 - DNA, 25 bp, Homo sapien
ccagacttgggaaagctcaggtgaa

SEQ ID NO: 4373546 - DNA, 25 bp, Homo sapien
gcgtgtttatctgtttcggaagggc

SEQ ID NO: 4373547 - DNA, 25 bp, Homo sapien
gcctccactgaggactgtgcgtgtt

SEQ ID NO: 4373548 - DNA, 25 bp, Homo sapien
acgaggccggtagagggcctccact

SEQ ID NO: 4373549 - DNA, 25 bp, Homo sapien
agaggtgtgctcaggagtagacgag

SEQ ID NO: 4373550 - DNA, 25 bp, Homo sapien
cttcttgcccaaacaggttccaaag

SEQ ID NO: 4373551 - DNA, 25 bp, Homo sapien
ctggcaggcaatgtcaagaggagct

SEQ ID NO: 4373552 - DNA, 25 bp, Homo sapien
caggcaatgtcaagaggagctgctt

SEQ ID NO: 4373553 - DNA, 25 bp, Homo sapien
gaaacttgtgaattgtcaggctcca

SEQ ID NO: 4373554 - DNA, 25 bp, Homo sapien
gtcttccttatatggtgaaaagtgc

SEQ ID NO: 4373555 - DNA, 25 bp, Homo sapien
aatttgccctctataatcgttctca

SEQ ID NO: 4373556 - DNA, 25 bp, Homo sapien
tccctttaaggccaagagatttggc

SEQ ID NO: 4373557 - DNA, 25 bp, Homo sapien
tccctgggaagtttgcgggcagccc

SEQ ID NO: 4373558 - DNA, 25 bp, Homo sapien
ggctagagaatttcagggtcagcag

SEQ ID NO: 4373559 - DNA, 25 bp, Homo sapien
gctagagaatttcagggtcagcaga

SEQ ID NO: 4373560 - DNA, 25 bp, Homo sapien
ggcgggttagaaagactggtatgaa

SEQ ID NO: 4373561 - DNA, 25 bp, Homo sapien
ctagagaatttcagggtcagcagag

SEQ ID NO: 4373562 - DNA, 25 bp, Homo sapien
acaaatactttccaggtgcattggc

SEQ ID NO: 4373563 - DNA, 25 bp, Homo sapien
cacaaatactttccaggtgcattgg

SEQ ID NO: 4373564 - DNA, 25 bp, Homo sapien
tcctcatagccaactcttctttctg

SEQ ID NO: 4373565 - DNA, 25 bp, Homo sapien
tcatagccaactcttctttctgcac

SEQ ID NO: 4373566 - DNA, 25 bp, Homo sapien
gttgtcatctcgtctctcctcatag

SEQ ID NO: 4373567 - DNA, 25 bp, Homo sapien
gtggcccccagactgacctcagtgt

SEQ ID NO: 4373568 - DNA, 25 bp, Homo sapien
ccacactggtgaatggttccactga

SEQ ID NO: 4373569 - DNA, 25 bp, Homo sapien
cacactggtgaatggttccactgag

SEQ ID NO: 4373570 - DNA, 25 bp, Homo sapien
gttccactgagtggtaggtgcctct

SEQ ID NO: 4373571 - DNA, 25 bp, Homo sapien
gtggtaggtgcctctgcaatcagga

SEQ ID NO: 4373572 - DNA, 25 bp, Homo sapien
tttttttgcccactgtatacagaag

SEQ ID NO: 4373573 - DNA, 25 bp, Homo sapien
tttttgcccactgtatacagaagca

SEQ ID NO: 4373574 - DNA, 25 bp, Homo sapien
attttttttgcccactgtatacaga

SEQ ID NO: 4373575 - DNA, 25 bp, Homo sapien
ttttttgcccactgtatacagaagc

SEQ ID NO: 4373576 - DNA, 25 bp, Homo sapien
ggcattctaatagcttggtgttcat

SEQ ID NO: 4373577 - DNA, 25 bp, Homo sapien
ctggaagctggcattctaatagctt

SEQ ID NO: 4373578 - DNA, 25 bp, Homo sapien
ctctctggaagctggcattctaata

SEQ ID NO: 4373579 - DNA, 25 bp, Homo sapien
agctggcattctaatagcttggtgt

SEQ ID NO: 4373580 - DNA, 25 bp, Homo sapien
tggcagatgcctagtaataatcacc

SEQ ID NO: 4373581 - DNA, 25 bp, Homo sapien
taattccctgctcatgtatctaacc

SEQ ID NO: 4373582 - DNA, 25 bp, Homo sapien
ccagacagtgtcctactatggcaga

SEQ ID NO: 4373583 - DNA, 25 bp, Homo sapien
gagtgttgcctcttctttaagcggg

SEQ ID NO: 4373584 - DNA, 25 bp, Homo sapien
cactaggtcgcgctttaggttgctg

SEQ ID NO: 4373585 - DNA, 25 bp, Homo sapien
gaggtttccattgggaaacaccatc

SEQ ID NO: 4373586 - DNA, 25 bp, Homo sapien
tcttgcactaggtcgcgctttaggt

SEQ ID NO: 4373587 - DNA, 25 bp, Homo sapien
agctcccatcttgcactaggtcgcg

SEQ ID NO: 4373588 - DNA, 25 bp, Homo sapien
tagaagagtaactattggcccttcc

SEQ ID NO: 4373589 - DNA, 25 bp, Homo sapien
tataagtgctagaatccgttaggac

SEQ ID NO: 4373590 - DNA, 25 bp, Homo sapien
tacggtaaatgctacaatgagcctc

SEQ ID NO: 4373591 - DNA, 25 bp, Homo sapien
gatcatgtcacctaaaaccaagctt

SEQ ID NO: 4373592 - DNA, 25 bp, Homo sapien
caagatgtacagtctccctgactct

SEQ ID NO: 4373593 - DNA, 25 bp, Homo sapien
caggacaacaagtataaagcaggac

SEQ ID NO: 4373594 - DNA, 25 bp, Homo sapien
tccaagtggtgatctagggatgaat

SEQ ID NO: 4373595 - DNA, 25 bp, Homo sapien
taagacttctcatgtaaactaggac

SEQ ID NO: 4373596 - DNA, 25 bp, Homo sapien
tcgggcacttccgcgtggaatagga

SEQ ID NO: 4373597 - DNA, 25 bp, Homo sapien
cgccaggctcgtgctttgggatgcc

SEQ ID NO: 4373598 - DNA, 25 bp, Homo sapien
gaggcgccaggctcgtgctttggga

SEQ ID NO: 4373599 - DNA, 25 bp, Homo sapien
cttccgcgtggaataggaggcgcca

SEQ ID NO: 4373600 - DNA, 25 bp, Homo sapien
tcacttgcctgaaaataaatccggg

SEQ ID NO: 4373601 - DNA, 25 bp, Homo sapien
ggaaccggcgactcattttaatgga

SEQ ID NO: 4373602 - DNA, 25 bp, Homo sapien
ccgtcttgtgttaagcagatgctcc

SEQ ID NO: 4373603 - DNA, 25 bp, Homo sapien
gctttgtcaatcgtggtggctctcc

SEQ ID NO: 4373604 - DNA, 25 bp, Homo sapien
tctttccttcctcttagttgtggtg

SEQ ID NO: 4373605 - DNA, 25 bp, Homo sapien
tggtgatgcacgcagaaggatgact

SEQ ID NO: 4373606 - DNA, 25 bp, Homo sapien
gtttcaatgacatactattgggttc

SEQ ID NO: 4373607 - DNA, 25 bp, Homo sapien
tgcagagcagggtagtgacagaatc

SEQ ID NO: 4373608 - DNA, 25 bp, Homo sapien
gaagaacaactttaggcagcagtaa

SEQ ID NO: 4373609 - DNA, 25 bp, Homo sapien
catcatctgacccaaatagcgttta

SEQ ID NO: 4373610 - DNA, 25 bp, Homo sapien
cactctaaaattggttcggcaagga

SEQ ID NO: 4373611 - DNA, 25 bp, Homo sapien
aatgggttgcccagtgctctgtcct

SEQ ID NO: 4373612 - DNA, 25 bp, Homo sapien
cctcggtggaactctggtgctgtct

SEQ ID NO: 4373613 - DNA, 25 bp, Homo sapien
ccctcctcggtggaactctggtgct

SEQ ID NO: 4373614 - DNA, 25 bp, Homo sapien
tatccctcctcggtggaactctggt

SEQ ID NO: 4373615 - DNA, 25 bp, Homo sapien
ctatccctcctcggtggaactctgg

SEQ ID NO: 4373616 - DNA, 25 bp, Homo sapien
agagctcccagcttccgtttggggg

SEQ ID NO: 4373617 - DNA, 25 bp, Homo sapien
ctaagagctcccagcttccgtttgg

SEQ ID NO: 4373618 - DNA, 25 bp, Homo sapien
gagctcccagcttccgtttggggga

SEQ ID NO: 4373619 - DNA, 25 bp, Homo sapien
taagagctcccagcttccgtttggg

SEQ ID NO: 4373620 - DNA, 25 bp, Homo sapien
tgctgccaaacccatgctatgaagg

SEQ ID NO: 4373621 - DNA, 25 bp, Homo sapien
gctatgaagggaccatggctgtgac

SEQ ID NO: 4373622 - DNA, 25 bp, Homo sapien
gtagctgactcatgttctgggaact

SEQ ID NO: 4373623 - DNA, 25 bp, Homo sapien
cagtcggaggccctcgcagtgttga

SEQ ID NO: 4373624 - DNA, 25 bp, Homo sapien
cagatgcgtccacttgatgaggctg

SEQ ID NO: 4373625 - DNA, 25 bp, Homo sapien
tcagatgcgtccacttgatgaggct

SEQ ID NO: 4373626 - DNA, 25 bp, Homo sapien
gctcagatgcgtccacttgatgagg

SEQ ID NO: 4373627 - DNA, 25 bp, Homo sapien
agatgcgtccacttgatgaggctga

SEQ ID NO: 4373628 - DNA, 25 bp, Homo sapien
tgaaatcacatccagcaatagcttc

SEQ ID NO: 4373629 - DNA, 25 bp, Homo sapien
agcatgtccagcaaagagactctca

SEQ ID NO: 4373630 - DNA, 25 bp, Homo sapien
tcctccctgaagtcctgaaatcaca

SEQ ID NO: 4373631 - DNA, 25 bp, Homo sapien
gcaatagcttcatctgcggcagcat

SEQ ID NO: 4373632 - DNA, 25 bp, Homo sapien
gaaatcacatctagcgatagcttca

SEQ ID NO: 4373633 - DNA, 25 bp, Homo sapien
gctctcctcccagaagtcctgaaat

SEQ ID NO: 4373634 - DNA, 25 bp, Homo sapien
aagtcctgaaatcacatctagcgat

SEQ ID NO: 4373635 - DNA, 25 bp, Homo sapien
gcgatagcttcatctgcggcagcat

SEQ ID NO: 4373636 - DNA, 25 bp, Homo sapien
cccaagatgaagtaaaggcgttgta

SEQ ID NO: 4373637 - DNA, 25 bp, Homo sapien
atgccaggtgccaacagaaagtcag

SEQ ID NO: 4373638 - DNA, 25 bp, Homo sapien
aagctttaggcgcactaacccaaga

SEQ ID NO: 4373639 - DNA, 25 bp, Homo sapien
taaaggcgttgtaatgccaggtgcc

SEQ ID NO: 4373640 - DNA, 25 bp, Homo sapien
taaaattctggtacacacagtatcc

SEQ ID NO: 4373641 - DNA, 25 bp, Homo sapien
agttccataagtgtgtgcctctgtt

SEQ ID NO: 4373642 - DNA, 25 bp, Homo sapien
gcacctgctaaccatacaatgtgtt

SEQ ID NO: 4373643 - DNA, 25 bp, Homo sapien
taaaaacatctgcacgaggtaggaa

SEQ ID NO: 4373644 - DNA, 25 bp, Homo sapien
cctgatctcctggagtgcattgtat

SEQ ID NO: 4373645 - DNA, 25 bp, Homo sapien
cataaaattgccagctacagtagaa

SEQ ID NO: 4373646 - DNA, 25 bp, Homo sapien
taattgatagttgcaagtaaccagt

SEQ ID NO: 4373647 - DNA, 25 bp, Homo sapien
ggtgtgtgtcacttgcaactagagc

SEQ ID NO: 4373648 - DNA, 25 bp, Homo sapien
cttccggttgccaaatgattttcct

SEQ ID NO: 4373649 - DNA, 25 bp, Homo sapien
ttttgccgtcagtttcatttacagc

SEQ ID NO: 4373650 - DNA, 25 bp, Homo sapien
catttacagctatcctcccacacct

SEQ ID NO: 4373651 - DNA, 25 bp, Homo sapien
gctatcctcccacaccttccggttg

SEQ ID NO: 4373652 - DNA, 25 bp, Homo sapien
tatgagtaaacgaaagacccaactg

SEQ ID NO: 4373653 - DNA, 25 bp, Homo sapien
gacccaactgttgttcagctctcct

SEQ ID NO: 4373654 - DNA, 25 bp, Homo sapien
aaacacttgtatgagtaaacgaaag

SEQ ID NO: 4373655 - DNA, 25 bp, Homo sapien
gaaagacccaactgttgttcagctc

SEQ ID NO: 4373656 - DNA, 25 bp, Homo sapien
agagcaggtgctacatttgatctca

SEQ ID NO: 4373657 - DNA, 25 bp, Homo sapien
agcaggtgctacatttgatctcaga

SEQ ID NO: 4373658 - DNA, 25 bp, Homo sapien
caggtattaagctggtaagagcagg

SEQ ID NO: 4373659 - DNA, 25 bp, Homo sapien
atatcaggtattaagctggtaagag

SEQ ID NO: 4373660 - DNA, 25 bp, Homo sapien
aactaccactgatgagtgagaacaa

SEQ ID NO: 4373661 - DNA, 25 bp, Homo sapien
gtttgcttagaatgatggttccaag

SEQ ID NO: 4373662 - DNA, 25 bp, Homo sapien
catgtgccatgttgcttttctgcat

SEQ ID NO: 4373663 - DNA, 25 bp, Homo sapien
tgccatgttgcttttctgcatccat

SEQ ID NO: 4373664 - DNA, 25 bp, Homo sapien
gatacaaatcctttaccagaaatag

SEQ ID NO: 4373665 - DNA, 25 bp, Homo sapien
atttacctcacgactaatgatgttg

SEQ ID NO: 4373666 - DNA, 25 bp, Homo sapien
tctactgggcacgaagtataatagc

SEQ ID NO: 4373667 - DNA, 25 bp, Homo sapien
gaaatacctattcaactgttgccca

SEQ ID NO: 4373668 - DNA, 25 bp, Homo sapien
tttcccacaggtagtcaatagaact

SEQ ID NO: 4373669 - DNA, 25 bp, Homo sapien
caaaggtcttgccaggcttagctca

SEQ ID NO: 4373670 - DNA, 25 bp, Homo sapien
tgttagccttacctgggaagctgta

SEQ ID NO: 4373671 - DNA, 25 bp, Homo sapien
actgtgccagatgctagatgggcaa

SEQ ID NO: 4373672 - DNA, 25 bp, Homo sapien
tacaagtttccactgacatctgcca

SEQ ID NO: 4373673 - DNA, 25 bp, Homo sapien
tacttcttcagccagttgctcttcc

SEQ ID NO: 4373674 - DNA, 25 bp, Homo sapien
tctgccatgcaaatttgtacttctt

SEQ ID NO: 4373675 - DNA, 25 bp, Homo sapien
aatttgtacttcttcagccagttgc

SEQ ID NO: 4373676 - DNA, 25 bp, Homo sapien
tcgccctagaaaagctggtcagaga

SEQ ID NO: 4373677 - DNA, 25 bp, Homo sapien
gagactctctttgctattcaccagg

SEQ ID NO: 4373678 - DNA, 25 bp, Homo sapien
ttgtgggcccaacttatgtgtctga

SEQ ID NO: 4373679 - DNA, 25 bp, Homo sapien
gatgtacgaacagtccatgtcgctg

SEQ ID NO: 4373680 - DNA, 25 bp, Homo sapien
ggtaggcaaggctatctgtgctgct

SEQ ID NO: 4373681 - DNA, 25 bp, Homo sapien
ctatcgcctcggagcattgaaaagc

SEQ ID NO: 4373682 - DNA, 25 bp, Homo sapien
catttgtattggtaggcaaggctat

SEQ ID NO: 4373683 - DNA, 25 bp, Homo sapien
tcgcctcggagcattgaaaagcttt

SEQ ID NO: 4373684 - DNA, 25 bp, Homo sapien
aatagtagcctgcaagtacactacc

SEQ ID NO: 4373685 - DNA, 25 bp, Homo sapien
ccacatctatagtgtgggaaatgac

SEQ ID NO: 4373686 - DNA, 25 bp, Homo sapien
ctatttttgggcctcagagtattgt

SEQ ID NO: 4373687 - DNA, 25 bp, Homo sapien
gtgggaaatgaccttgacgcaatag

SEQ ID NO: 4373688 - DNA, 25 bp, Homo sapien
tgtagacagttgacccaggagacag

SEQ ID NO: 4373689 - DNA, 25 bp, Homo sapien
taggttgtagacagttgacccagga

SEQ ID NO: 4373690 - DNA, 25 bp, Homo sapien
gttgtagacagttgacccaggagac

SEQ ID NO: 4373691 - DNA, 25 bp, Homo sapien
gattaggttgtagacagttgaccca

SEQ ID NO: 4373692 - DNA, 25 bp, Homo sapien
tcgagggcagaaacactacttcaca

SEQ ID NO: 4373693 - DNA, 25 bp, Homo sapien
tatagcactgagtaaaccaaccaag

SEQ ID NO: 4373694 - DNA, 25 bp, Homo sapien
gagaaccaggtactatgtcagacat

SEQ ID NO: 4373695 - DNA, 25 bp, Homo sapien
tcctggttcactctagctgagcgtt

SEQ ID NO: 4373696 - DNA, 25 bp, Homo sapien
tgccttcataaagcaccagaaggtc

SEQ ID NO: 4373697 - DNA, 25 bp, Homo sapien
taaagcaccagaaggtcacaccagc

SEQ ID NO: 4373698 - DNA, 25 bp, Homo sapien
gttaactgccttcataaagcaccag

SEQ ID NO: 4373699 - DNA, 25 bp, Homo sapien
tcagttaactgccttcataaagcac

SEQ ID NO: 4373700 - DNA, 25 bp, Homo sapien
agctcagctcgctagctgcgcgctt

SEQ ID NO: 4373701 - DNA, 25 bp, Homo sapien
ggttgatcagcgaaacagcatccat

SEQ ID NO: 4373702 - DNA, 25 bp, Homo sapien
gagcagctcagctcgctagctgcgc

SEQ ID NO: 4373703 - DNA, 25 bp, Homo sapien
cggcacaggcagtgccactgcgcag

SEQ ID NO: 4373704 - DNA, 25 bp, Homo sapien
tagccttggtgaattctcctgtatt

SEQ ID NO: 4373705 - DNA, 25 bp, Homo sapien
attttgagcacctgcacggggcact

SEQ ID NO: 4373706 - DNA, 25 bp, Homo sapien
tgcagacagtgggacccccatctgg

SEQ ID NO: 4373707 - DNA, 25 bp, Homo sapien
actagagcatactttaaccccaaag

SEQ ID NO: 4373708 - DNA, 25 bp, Homo sapien
gagctccagtccacactcggccctg

SEQ ID NO: 4373709 - DNA, 25 bp, Homo sapien
cacactcggccctgaacgcggagtt

SEQ ID NO: 4373710 - DNA, 25 bp, Homo sapien
ccctgaacgcggagttgaatcagct

SEQ ID NO: 4373711 - DNA, 25 bp, Homo sapien
ctcggccctgaacgcggagttgaat

SEQ ID NO: 4373712 - DNA, 25 bp, Homo sapien
gaggaggggaagctcaatccaggga

SEQ ID NO: 4373713 - DNA, 25 bp, Homo sapien
atttcagttcccatggcaaagagtg

SEQ ID NO: 4373714 - DNA, 25 bp, Homo sapien
ggggaagctcaatccagggaagaac

SEQ ID NO: 4373715 - DNA, 25 bp, Homo sapien
atcttgtccaggcctacaactgtcc

SEQ ID NO: 4373716 - DNA, 25 bp, Homo sapien
ggatcccctgattccctaggccagg

SEQ ID NO: 4373717 - DNA, 25 bp, Homo sapien
cctttccggctctgtgggtttcatc

SEQ ID NO: 4373718 - DNA, 25 bp, Homo sapien
tctgcttttattcccacttctgtgc

SEQ ID NO: 4373719 - DNA, 25 bp, Homo sapien
ggccaggtttccttaaatccattca

SEQ ID NO: 4373720 - DNA, 25 bp, Homo sapien
ctggagcgtattgggcttggctgga

SEQ ID NO: 4373721 - DNA, 25 bp, Homo sapien
tggctggattaagggggctggtgga

SEQ ID NO: 4373722 - DNA, 25 bp, Homo sapien
ggcttggctggattaagggggctgg

SEQ ID NO: 4373723 - DNA, 25 bp, Homo sapien
cctggagcgtattgggcttggctgg

SEQ ID NO: 4373724 - DNA, 25 bp, Homo sapien
tgggaagagttttccaagcacaaaa

SEQ ID NO: 4373725 - DNA, 25 bp, Homo sapien
tggactgggaagagttttccaagca

SEQ ID NO: 4373726 - DNA, 25 bp, Homo sapien
gagttttccaagcacaaaagccact

SEQ ID NO: 4373727 - DNA, 25 bp, Homo sapien
gaagagttttccaagcacaaaagcc

SEQ ID NO: 4373728 - DNA, 25 bp, Homo sapien
cactcagaagagtgcctggacgaga

SEQ ID NO: 4373729 - DNA, 25 bp, Homo sapien
gagtcagtgctgcattagtaggtgc

SEQ ID NO: 4373730 - DNA, 25 bp, Homo sapien
taggtgctgctacagtatttcgtta

SEQ ID NO: 4373731 - DNA, 25 bp, Homo sapien
gactctgccgcttactagcacttac

SEQ ID NO: 4373732 - DNA, 25 bp, Homo sapien
cattctgttggattcagagggttcc

SEQ ID NO: 4373733 - DNA, 25 bp, Homo sapien
aaaaatacatgcctgcctcgtagtg

SEQ ID NO: 4373734 - DNA, 25 bp, Homo sapien
taaaggtggcgcagaaacaaatatc

SEQ ID NO: 4373735 - DNA, 25 bp, Homo sapien
cctcgtagtgaagttgtagctctcc

SEQ ID NO: 4373736 - DNA, 25 bp, Homo sapien
ataatcgtaaccgaatagctcccaa

SEQ ID NO: 4373737 - DNA, 25 bp, Homo sapien
gaagcccataatcgtaaccgaatag

SEQ ID NO: 4373738 - DNA, 25 bp, Homo sapien
cctctaagctcttctaattgtttga

SEQ ID NO: 4373739 - DNA, 25 bp, Homo sapien
tctaattgtttgaagcccataatcg

SEQ ID NO: 4373740 - DNA, 25 bp, Homo sapien
ttcagggcgacagcataagagcagg

SEQ ID NO: 4373741 - DNA, 25 bp, Homo sapien
ctggctgaacatgaggactgaggaa

SEQ ID NO: 4373742 - DNA, 25 bp, Homo sapien
taagagtgggagtaagacagacatg

SEQ ID NO: 4373743 - DNA, 25 bp, Homo sapien
tcaccacactgcaagtgagagcgct

SEQ ID NO: 4373744 - DNA, 25 bp, Homo sapien
ggacagcatctgcagaacttggcag

SEQ ID NO: 4373745 - DNA, 25 bp, Homo sapien
tgcagaacttggcagcgccactgca

SEQ ID NO: 4373746 - DNA, 25 bp, Homo sapien
cagcccttgccacggccaacacctc

SEQ ID NO: 4373747 - DNA, 25 bp, Homo sapien
ttgccacggccaacacctctaaatg

SEQ ID NO: 4373748 - DNA, 25 bp, Homo sapien
ggttttgcttccatgagagtaaaaa

SEQ ID NO: 4373749 - DNA, 25 bp, Homo sapien
aggcccgtctgtcaccaatcttcag

SEQ ID NO: 4373750 - DNA, 25 bp, Homo sapien
ttgaacccattagccaaaaaagtgc

SEQ ID NO: 4373751 - DNA, 25 bp, Homo sapien
agtgcctggtgggttttgcttccat

SEQ ID NO: 4373752 - DNA, 25 bp, Homo sapien
gtaagtccttggagtggctgttgcc

SEQ ID NO: 4373753 - DNA, 25 bp, Homo sapien
gaaacgccgttgcttctgctctgaa

SEQ ID NO: 4373754 - DNA, 25 bp, Homo sapien
cccatgaagggttagtggaatgaca

SEQ ID NO: 4373755 - DNA, 25 bp, Homo sapien
acagttcaagaggaaacgccgttgc

SEQ ID NO: 4373756 - DNA, 25 bp, Homo sapien
cagagatgtgtggatagcctaggcc

SEQ ID NO: 4373757 - DNA, 25 bp, Homo sapien
gagaatgttcctatcaaccagtaag

SEQ ID NO: 4373758 - DNA, 25 bp, Homo sapien
gacatctctcagcatacacagttgg

SEQ ID NO: 4373759 - DNA, 25 bp, Homo sapien
caacatggctgggagtaggtttctc

SEQ ID NO: 4373760 - DNA, 25 bp, Homo sapien
tcaatagaagaggattattggccct

SEQ ID NO: 4373761 - DNA, 25 bp, Homo sapien
ggttgagtctcccaaaatagaagct

SEQ ID NO: 4373762 - DNA, 25 bp, Homo sapien
gaagtcatatgcactgaagaccttg

SEQ ID NO: 4373763 - DNA, 25 bp, Homo sapien
aaatcatgaaaaagagcttcccacc

SEQ ID NO: 4373764 - DNA, 25 bp, Homo sapien
gccccagcttttaactctgccctgc

SEQ ID NO: 4373765 - DNA, 25 bp, Homo sapien
gaccagtccatcgtggagccccatt

SEQ ID NO: 4373766 - DNA, 25 bp, Homo sapien
caaagttaggaccagtccatcgtgg

SEQ ID NO: 4373767 - DNA, 25 bp, Homo sapien
actgaccatggccaaagttaggacc

SEQ ID NO: 4373768 - DNA, 25 bp, Homo sapien
ggccatgagagttagaagaagtgct

SEQ ID NO: 4373769 - DNA, 25 bp, Homo sapien
gaagaagtgctagatgtgagagaca

SEQ ID NO: 4373770 - DNA, 25 bp, Homo sapien
aagagtccccaggacatgaagagtg

SEQ ID NO: 4373771 - DNA, 25 bp, Homo sapien
aagaagagtccccaggacatgaaga

SEQ ID NO: 4373772 - DNA, 25 bp, Homo sapien
catgaggagggtatgaacactgtct

SEQ ID NO: 4373773 - DNA, 25 bp, Homo sapien
gtacttggttcggacagctcccagg

SEQ ID NO: 4373774 - DNA, 25 bp, Homo sapien
gagggccgatgcttccctgggtact

SEQ ID NO: 4373775 - DNA, 25 bp, Homo sapien
gagcatgctgggacattattcacaa

SEQ ID NO: 4373776 - DNA, 25 bp, Homo sapien
ccaggtctttggctcgctcgggtgc

SEQ ID NO: 4373777 - DNA, 25 bp, Homo sapien
gcagtgagtactcagcccgccaggt

SEQ ID NO: 4373778 - DNA, 25 bp, Homo sapien
agcatgtgtccagcgcgcagtgagt

SEQ ID NO: 4373779 - DNA, 25 bp, Homo sapien
ggccacaggtctgcatccagcggct

SEQ ID NO: 4373780 - DNA, 25 bp, Homo sapien
gggccagtttgcatatctgcaaata

SEQ ID NO: 4373781 - DNA, 25 bp, Homo sapien
taaaggctccaggacgtgctccagg

SEQ ID NO: 4373782 - DNA, 25 bp, Homo sapien
catgcaaggggccagtttgcatatc

SEQ ID NO: 4373783 - DNA, 25 bp, Homo sapien
gctccaggacgtgctccaggatgtg

SEQ ID NO: 4373784 - DNA, 25 bp, Homo sapien
aattaaacctcaacgtgaggctggg

SEQ ID NO: 4373785 - DNA, 25 bp, Homo sapien
gtgctgaacgtgtccctttataagg

SEQ ID NO: 4373786 - DNA, 25 bp, Homo sapien
cctcgtaaaggtcccacatctttat

SEQ ID NO: 4373787 - DNA, 25 bp, Homo sapien
gggccaacatctgatgatggccttt

SEQ ID NO: 4373788 - DNA, 25 bp, Homo sapien
catgggtttctttcaagtgtcgagt

SEQ ID NO: 4373789 - DNA, 25 bp, Homo sapien
agcagacggtctcttccatggactg

SEQ ID NO: 4373790 - DNA, 25 bp, Homo sapien
ccctcacttggaatggtgactactg

SEQ ID NO: 4373791 - DNA, 25 bp, Homo sapien
ctttgacagtgaggagagacgaacg

SEQ ID NO: 4373792 - DNA, 25 bp, Homo sapien
cacagcgccctttagtgaagatgcc

SEQ ID NO: 4373793 - DNA, 25 bp, Homo sapien
gtctcaattagctattgccttaggc

SEQ ID NO: 4373794 - DNA, 25 bp, Homo sapien
tattgtgatgcaacaccacgttcct

SEQ ID NO: 4373795 - DNA, 25 bp, Homo sapien
aaatttagcccccttctgacaggtg

SEQ ID NO: 4373796 - DNA, 25 bp, Homo sapien
agctaagattttgatccataaagac

SEQ ID NO: 4373797 - DNA, 25 bp, Homo sapien
ttgatccataaagacttacttctcc

SEQ ID NO: 4373798 - DNA, 25 bp, Homo sapien
aaagacttacttctccattgccttc

SEQ ID NO: 4373799 - DNA, 25 bp, Homo sapien
gattttgatccataaagacttactt

SEQ ID NO: 4373800 - DNA, 25 bp, Homo sapien
cagtccagcggtagaggttttcctt

SEQ ID NO: 4373801 - DNA, 25 bp, Homo sapien
ctctgccagtccagcggtagaggtt

SEQ ID NO: 4373802 - DNA, 25 bp, Homo sapien
gccgggttcttggtggtgaagtcac

SEQ ID NO: 4373803 - DNA, 25 bp, Homo sapien
cagagccaggtttttgtctgctcac

SEQ ID NO: 4373804 - DNA, 25 bp, Homo sapien
cagagtaactggactgtcttcacac

SEQ ID NO: 4373805 - DNA, 25 bp, Homo sapien
ctgagcacacgggtgcagtcaccac

SEQ ID NO: 4373806 - DNA, 25 bp, Homo sapien
gagcacacgggtgcagtcaccacag

SEQ ID NO: 4373807 - DNA, 25 bp, Homo sapien
actggactgtcttcacacctccttt

SEQ ID NO: 4373808 - DNA, 25 bp, Homo sapien
gacttcatggctgacttgcagaaaa

SEQ ID NO: 4373809 - DNA, 25 bp, Homo sapien
cacgcccctgtgagattagacttgc

SEQ ID NO: 4373810 - DNA, 25 bp, Homo sapien
taaaaagaagcgagatcgagaccgg

SEQ ID NO: 4373811 - DNA, 25 bp, Homo sapien
gaaaaagacctccagtgtcacgccc

SEQ ID NO: 4373812 - DNA, 25 bp, Homo sapien
tcttgccctaatttagcatcagctg

SEQ ID NO: 4373813 - DNA, 25 bp, Homo sapien
gtgtctccactgactatctccactg

SEQ ID NO: 4373814 - DNA, 25 bp, Homo sapien
ttgcctctattcaactctgggaaaa

SEQ ID NO: 4373815 - DNA, 25 bp, Homo sapien
ttcctggacttgtgcatcatggctt

SEQ ID NO: 4373816 - DNA, 25 bp, Homo sapien
ggcagtcatctctccagagacttta

SEQ ID NO: 4373817 - DNA, 25 bp, Homo sapien
taaaaaccatctcaggtcatgtatc

SEQ ID NO: 4373818 - DNA, 25 bp, Homo sapien
cttctcgttctttttggcagtcatc

SEQ ID NO: 4373819 - DNA, 25 bp, Homo sapien
cagttggaccaaattaatacctcgc

SEQ ID NO: 4373820 - DNA, 25 bp, Homo sapien
tgcccctctgcatgcgtcagcttag

SEQ ID NO: 4373821 - DNA, 25 bp, Homo sapien
gcccctctgcatgcgtcagcttagg

SEQ ID NO: 4373822 - DNA, 25 bp, Homo sapien
ctgtccatgcatatgctcaaggatc

SEQ ID NO: 4373823 - DNA, 25 bp, Homo sapien
gctcaaggatctgtatatgcatctg

SEQ ID NO: 4373824 - DNA, 25 bp, Homo sapien
gaatctgggaactttgacagtagcc

SEQ ID NO: 4373825 - DNA, 25 bp, Homo sapien
cagagccagagatggtaagtttcca

SEQ ID NO: 4373826 - DNA, 25 bp, Homo sapien
ggttccaacttgcagagtcatctgg

SEQ ID NO: 4373827 - DNA, 25 bp, Homo sapien
gctagagatcccatgtccataggag

SEQ ID NO: 4373828 - DNA, 25 bp, Homo sapien
cccatgcaaaggcagatgcgtgatc

SEQ ID NO: 4373829 - DNA, 25 bp, Homo sapien
tgggatgtatccagaaaacctttag

SEQ ID NO: 4373830 - DNA, 25 bp, Homo sapien
ttctgggaactgaaatgaatagggg

SEQ ID NO: 4373831 - DNA, 25 bp, Homo sapien
cagatgcgtgatctgggatgtatcc

SEQ ID NO: 4373832 - DNA, 25 bp, Homo sapien
ttggcagcttcagaggttgcatctc

SEQ ID NO: 4373833 - DNA, 25 bp, Homo sapien
tgctggcagtggtttggcagcttca

SEQ ID NO: 4373834 - DNA, 25 bp, Homo sapien
atggctgccatagccgctaacacac

SEQ ID NO: 4373835 - DNA, 25 bp, Homo sapien
gattctcagaagcttcctcctggtc

SEQ ID NO: 4373836 - DNA, 25 bp, Homo sapien
gctactccggacattgagatgggag

SEQ ID NO: 4373837 - DNA, 25 bp, Homo sapien
aatgtagggatggttatgttgagaa

SEQ ID NO: 4373838 - DNA, 25 bp, Homo sapien
atgaaaaagagggatattggaatgt

SEQ ID NO: 4373839 - DNA, 25 bp, Homo sapien
gcttccagccaggacaatgaaagag

SEQ ID NO: 4373840 - DNA, 25 bp, Homo sapien
gttgagaaagtttgcccagattgac

SEQ ID NO: 4373841 - DNA, 25 bp, Homo sapien
ccagtggtcttcaatcaggatcacg

SEQ ID NO: 4373842 - DNA, 25 bp, Homo sapien
gatcacgatgagagacaagccaaga

SEQ ID NO: 4373843 - DNA, 25 bp, Homo sapien
ttccaatggattgcggttagagtct

SEQ ID NO: 4373844 - DNA, 25 bp, Homo sapien
ggattgcggttagagtcttgacaga

SEQ ID NO: 4373845 - DNA, 25 bp, Homo sapien
ccattactgctactgactttagact

SEQ ID NO: 4373846 - DNA, 25 bp, Homo sapien
tttggaatatctccacattagccca

SEQ ID NO: 4373847 - DNA, 25 bp, Homo sapien
ggaatatctccacattagcccaact

SEQ ID NO: 4373848 - DNA, 25 bp, Homo sapien
actgactttagacttctggatgaca

SEQ ID NO: 4373849 - DNA, 25 bp, Homo sapien
ggtgacctccaacagctgtccaact

SEQ ID NO: 4373850 - DNA, 25 bp, Homo sapien
tccaacagctgtccaactgcagcat

SEQ ID NO: 4373851 - DNA, 25 bp, Homo sapien
tcagcggtgacctccaacagctgtc

SEQ ID NO: 4373852 - DNA, 25 bp, Homo sapien
gctgtccaactgcagcatccctggg

SEQ ID NO: 4373853 - DNA, 25 bp, Homo sapien
gggtctcatagagtcagtggtggca

SEQ ID NO: 4373854 - DNA, 25 bp, Homo sapien
tcaaaagggtctcatagagtcagtg

SEQ ID NO: 4373855 - DNA, 25 bp, Homo sapien
aaagggtctcatagagtcagtggtg

SEQ ID NO: 4373856 - DNA, 25 bp, Homo sapien
gaattgagatttagaagcaaggtca

SEQ ID NO: 4373857 - DNA, 25 bp, Homo sapien
cgtcccctaatcctgtatcactgtt

SEQ ID NO: 4373858 - DNA, 25 bp, Homo sapien
gagctgccacgtcccctaatcctgt

SEQ ID NO: 4373859 - DNA, 25 bp, Homo sapien
tgtatcactgttagcaccggctcct

SEQ ID NO: 4373860 - DNA, 25 bp, Homo sapien
tgttagcaccggctcctgaagcctc

SEQ ID NO: 4373861 - DNA, 25 bp, Homo sapien
ctgtttattaggcacctccactact

SEQ ID NO: 4373862 - DNA, 25 bp, Homo sapien
tccactactcctatgcagtgcctag

SEQ ID NO: 4373863 - DNA, 25 bp, Homo sapien
agggtttcagaagggtcagtgccca

SEQ ID NO: 4373864 - DNA, 25 bp, Homo sapien
cagtgcctagacttcttcaggagaa

SEQ ID NO: 4373865 - DNA, 25 bp, Homo sapien
gagcagtgtccatcccataggaaac

SEQ ID NO: 4373866 - DNA, 25 bp, Homo sapien
gcagtgtccatcccataggaaacaa

SEQ ID NO: 4373867 - DNA, 25 bp, Homo sapien
cccttgcatgcattgcactttgcat

SEQ ID NO: 4373868 - DNA, 25 bp, Homo sapien
agcagtgtccatcccataggaaaca

SEQ ID NO: 4373869 - DNA, 25 bp, Homo sapien
caatgttgcaacagataaatagaat

SEQ ID NO: 4373870 - DNA, 25 bp, Homo sapien
ttaattctgccatttgtttagtaaa

SEQ ID NO: 4373871 - DNA, 25 bp, Homo sapien
tagaattaattctgccatttgttta

SEQ ID NO: 4373872 - DNA, 25 bp, Homo sapien
ttttctcaatgttgcaacagataaa

SEQ ID NO: 4373873 - DNA, 25 bp, Homo sapien
cagacagtgaggcattgcatccaaa

SEQ ID NO: 4373874 - DNA, 25 bp, Homo sapien
aagtcctaaggccaagatgtgtaca

SEQ ID NO: 4373875 - DNA, 25 bp, Homo sapien
taaatgagatttgcagccaggcatg

SEQ ID NO: 4373876 - DNA, 25 bp, Homo sapien
caaacaacaacatagcagtgggtgg

SEQ ID NO: 4373877 - DNA, 25 bp, Homo sapien
taagggaaatcaggtgactcccgcc

SEQ ID NO: 4373878 - DNA, 25 bp, Homo sapien
gaattggcctcatgatgcatcagga

SEQ ID NO: 4373879 - DNA, 25 bp, Homo sapien
tcaataagggagtgagatgccaaac

SEQ ID NO: 4373880 - DNA, 25 bp, Homo sapien
tggcctgtccagctcaaatcaataa

SEQ ID NO: 4373881 - DNA, 25 bp, Homo sapien
gctgagttccctaaacatagaaaat

SEQ ID NO: 4373882 - DNA, 25 bp, Homo sapien
gagcatctagctgagttccctaaac

SEQ ID NO: 4373883 - DNA, 25 bp, Homo sapien
tacaatgagcatctagctgagttcc

SEQ ID NO: 4373884 - DNA, 25 bp, Homo sapien
ttctgttacaatgagcatctagctg

SEQ ID NO: 4373885 - DNA, 25 bp, Homo sapien
aatttgaaatccattgtcaatcagg

SEQ ID NO: 4373886 - DNA, 25 bp, Homo sapien
ccctataaagagatcataacaaatg

SEQ ID NO: 4373887 - DNA, 25 bp, Homo sapien
ctgtgctcaagtaagcgttacatac

SEQ ID NO: 4373888 - DNA, 25 bp, Homo sapien
caatcaggctttgcaaaataggtaa

SEQ ID NO: 4373889 - DNA, 25 bp, Homo sapien
gttcacagcaacagatatgtttaaa

SEQ ID NO: 4373890 - DNA, 25 bp, Homo sapien
tgtctcaatcaaaccaccattgcca

SEQ ID NO: 4373891 - DNA, 25 bp, Homo sapien
tttagagtgtgaggcaaagtaaggt

SEQ ID NO: 4373892 - DNA, 25 bp, Homo sapien
cattgccaaccttcttgttccatca

SEQ ID NO: 4373893 - DNA, 25 bp, Homo sapien
tgcttttatctgatcctcggctgaa

SEQ ID NO: 4373894 - DNA, 25 bp, Homo sapien
ttatctgatcctcggctgaatcttg

SEQ ID NO: 4373895 - DNA, 25 bp, Homo sapien
ctttgcttttatctgatcctcggct

SEQ ID NO: 4373896 - DNA, 25 bp, Homo sapien
gatcctcggctgaatcttgtctgca

SEQ ID NO: 4373897 - DNA, 25 bp, Homo sapien
tgcagtctgccttaataaaagtggc

SEQ ID NO: 4373898 - DNA, 25 bp, Homo sapien
tgattgtctactgcagtctgcctta

SEQ ID NO: 4373899 - DNA, 25 bp, Homo sapien
tctcttcaaggggtcctcgtgttta

SEQ ID NO: 4373900 - DNA, 25 bp, Homo sapien
aagtggcaagctcttggcttccccg

SEQ ID NO: 4373901 - DNA, 25 bp, Homo sapien
tgtagatgtgcctgccagtcaggga

SEQ ID NO: 4373902 - DNA, 25 bp, Homo sapien
gcttaactacaccatgtagatgtgc

SEQ ID NO: 4373903 - DNA, 25 bp, Homo sapien
ccatgtagatgtgcctgccagtcag

SEQ ID NO: 4373904 - DNA, 25 bp, Homo sapien
ttaactacaccatgtagatgtgcct

SEQ ID NO: 4373905 - DNA, 25 bp, Homo sapien
tgcaagcagaaatatccgccggtct

SEQ ID NO: 4373906 - DNA, 25 bp, Homo sapien
gaaagatggtaagcgaatcccagtc

SEQ ID NO: 4373907 - DNA, 25 bp, Homo sapien
tgttaactgggagcgcagaattcct

SEQ ID NO: 4373908 - DNA, 25 bp, Homo sapien
taaggtcaccttgacggagcgcttc

SEQ ID NO: 4373909 - DNA, 25 bp, Homo sapien
cgcgagaggttaaggtcagaagctc

SEQ ID NO: 4373910 - DNA, 25 bp, Homo sapien
cctaagcgcgaaggctgaattaatc

SEQ ID NO: 4373911 - DNA, 25 bp, Homo sapien
tgagagcagagcgttaacccttcca

SEQ ID NO: 4373912 - DNA, 25 bp, Homo sapien
ttccagtcccagagagcgacaaggc

SEQ ID NO: 4373913 - DNA, 25 bp, Homo sapien
catcggctatttcctgcagcgcatc

SEQ ID NO: 4373914 - DNA, 25 bp, Homo sapien
aacgtgggctggttcgtccgcaagc

SEQ ID NO: 4373915 - DNA, 25 bp, Homo sapien
tgcacgccttcctggacaacgtggg

SEQ ID NO: 4373916 - DNA, 25 bp, Homo sapien
tcccggacgttagccgaggtctgcg

SEQ ID NO: 4373917 - DNA, 25 bp, Homo sapien
gagggtatttcagcaaattcacgac

SEQ ID NO: 4373918 - DNA, 25 bp, Homo sapien
taatgtgctacaggattcaatcagc

SEQ ID NO: 4373919 - DNA, 25 bp, Homo sapien
acaggtatggtcaaacgaggaagca

SEQ ID NO: 4373920 - DNA, 25 bp, Homo sapien
cattgaacgcaacaggagggtattt

SEQ ID NO: 4373921 - DNA, 25 bp, Homo sapien
tctctggtatggcttcaccttttgc

SEQ ID NO: 4373922 - DNA, 25 bp, Homo sapien
tctttgcatccgacttctgtagctt

SEQ ID NO: 4373923 - DNA, 25 bp, Homo sapien
tggtatggcttcaccttttgcacag

SEQ ID NO: 4373924 - DNA, 25 bp, Homo sapien
gttttctctttgcatccgacttctg

SEQ ID NO: 4373925 - DNA, 25 bp, Homo sapien
tgattgttgtaagaagtccagctga

SEQ ID NO: 4373926 - DNA, 25 bp, Homo sapien
taggtatcctaaacaatctcttgct

SEQ ID NO: 4373927 - DNA, 25 bp, Homo sapien
tgattcgcactgagccctgggtact

SEQ ID NO: 4373928 - DNA, 25 bp, Homo sapien
gtcctctgggttggcaattggctgt

SEQ ID NO: 4373929 - DNA, 25 bp, Homo sapien
ccaggtcttccacagcttttgcctt

SEQ ID NO: 4373930 - DNA, 25 bp, Homo sapien
aggtcttccacagcttttgcctttt

SEQ ID NO: 4373931 - DNA, 25 bp, Homo sapien
ctgccaggtcttccacagcttttgc

SEQ ID NO: 4373932 - DNA, 25 bp, Homo sapien
ttgccttttcttcagctcttttcat

SEQ ID NO: 4373933 - DNA, 25 bp, Homo sapien
tctcttgaggaatgttagagtttct

SEQ ID NO: 4373934 - DNA, 25 bp, Homo sapien
tatgctttgcagtgctcctaagatt

SEQ ID NO: 4373935 - DNA, 25 bp, Homo sapien
gagtttctatgggttccctattatg

SEQ ID NO: 4373936 - DNA, 25 bp, Homo sapien
tccctattatgctttgcagtgctcc

SEQ ID NO: 4373937 - DNA, 25 bp, Homo sapien
tagtgggcgaatggtaagaagagcc

SEQ ID NO: 4373938 - DNA, 25 bp, Homo sapien
cttgctgttgagaagccagtgtagt

SEQ ID NO: 4373939 - DNA, 25 bp, Homo sapien
tgagaagccagtgtagtgggcgaat

SEQ ID NO: 4373940 - DNA, 25 bp, Homo sapien
aagccagtgtagtgggcgaatggta

SEQ ID NO: 4373941 - DNA, 25 bp, Homo sapien
gacatataatcgacactacacaggt

SEQ ID NO: 4373942 - DNA, 25 bp, Homo sapien
tatgctggtacctcataaaagtggc

SEQ ID NO: 4373943 - DNA, 25 bp, Homo sapien
tcaaacaagtttgtcacccaaggaa

SEQ ID NO: 4373944 - DNA, 25 bp, Homo sapien
ttctgtgaacttgcctatgctggta

SEQ ID NO: 4373945 - DNA, 25 bp, Homo sapien
aatttcttaaagatacgcatggcat

SEQ ID NO: 4373946 - DNA, 25 bp, Homo sapien
tcagaacgtgtttcaaaagataaaa

SEQ ID NO: 4373947 - DNA, 25 bp, Homo sapien
ccttggttaatcagaacgtgtttca

SEQ ID NO: 4373948 - DNA, 25 bp, Homo sapien
tggttaatcagaacgtgtttcaaaa

SEQ ID NO: 4373949 - DNA, 25 bp, Homo sapien
cctatactcttgctggattggctgc

SEQ ID NO: 4373950 - DNA, 25 bp, Homo sapien
aaacctatactcttgctggattggc

SEQ ID NO: 4373951 - DNA, 25 bp, Homo sapien
tactcttgctggattggctgcttga

SEQ ID NO: 4373952 - DNA, 25 bp, Homo sapien
taaacctatactcttgctggattgg

SEQ ID NO: 4373953 - DNA, 25 bp, Homo sapien
ccttctgcataatgcaagtatcgtt

SEQ ID NO: 4373954 - DNA, 25 bp, Homo sapien
gacggtaagcaagaactgtatcaac

SEQ ID NO: 4373955 - DNA, 25 bp, Homo sapien
gtttcctgtttaccaaatgtctcca

SEQ ID NO: 4373956 - DNA, 25 bp, Homo sapien
gcaagtatcgtttattagtttcctg

SEQ ID NO: 4373957 - DNA, 25 bp, Homo sapien
tttccgctcttcaggaagtatataa

SEQ ID NO: 4373958 - DNA, 25 bp, Homo sapien
aatgtttccgctcttcaggaagtat

SEQ ID NO: 4373959 - DNA, 25 bp, Homo sapien
tgtttccgctcttcaggaagtatat

SEQ ID NO: 4373960 - DNA, 25 bp, Homo sapien
gtttccgctcttcaggaagtatata

SEQ ID NO: 4373961 - DNA, 25 bp, Homo sapien
tagaattgatgtactgaaccttatc

SEQ ID NO: 4373962 - DNA, 25 bp, Homo sapien
ctaaacagtagtatgtgggccattt

SEQ ID NO: 4373963 - DNA, 25 bp, Homo sapien
cagcctcctgtatgttcccactaaa

SEQ ID NO: 4373964 - DNA, 25 bp, Homo sapien
ccagttgtagagattaatattgatc

SEQ ID NO: 4373965 - DNA, 25 bp, Homo sapien
tcgattagcaactgccatagcagct

SEQ ID NO: 4373966 - DNA, 25 bp, Homo sapien
gctagacaagcccacatggtttgct

SEQ ID NO: 4373967 - DNA, 25 bp, Homo sapien
cagtagtcatatctcgattagcaac

SEQ ID NO: 4373968 - DNA, 25 bp, Homo sapien
tgccatagcagctagacaagcccac

SEQ ID NO: 4373969 - DNA, 25 bp, Homo sapien
taacaaagcgacaaagtctcacagc

SEQ ID NO: 4373970 - DNA, 25 bp, Homo sapien
tcttctaatagttacttgatttcca

SEQ ID NO: 4373971 - DNA, 25 bp, Homo sapien
tatgctgatgtgaaccagggagcca

SEQ ID NO: 4373972 - DNA, 25 bp, Homo sapien
tgcttacatattcatggagaatagc

SEQ ID NO: 4373973 - DNA, 25 bp, Homo sapien
gattctgtcacttaagtctcaagct

SEQ ID NO: 4373974 - DNA, 25 bp, Homo sapien
cactgagaaaactacctgagctacc

SEQ ID NO: 4373975 - DNA, 25 bp, Homo sapien
tctcaagctagctttagccgaacaa

SEQ ID NO: 4373976 - DNA, 25 bp, Homo sapien
gagtgcctagactaaaatcacttga

SEQ ID NO: 4373977 - DNA, 25 bp, Homo sapien
tccacaaaggatattgcatgtatcg

SEQ ID NO: 4373978 - DNA, 25 bp, Homo sapien
tataaatcgagtatcttgaagtcca

SEQ ID NO: 4373979 - DNA, 25 bp, Homo sapien
atcgttccatgccaaagtatgcacc

SEQ ID NO: 4373980 - DNA, 25 bp, Homo sapien
tcgagtatcttgaagtccacaaagg

SEQ ID NO: 4373981 - DNA, 25 bp, Homo sapien
gctgcagcagctaaagacttgctaa

SEQ ID NO: 4373982 - DNA, 25 bp, Homo sapien
tacaatttctggtagatatgactct

SEQ ID NO: 4373983 - DNA, 25 bp, Homo sapien
ttcagtgacaatttagctgcagcag

SEQ ID NO: 4373984 - DNA, 25 bp, Homo sapien
gaatgctttacttagaacccttata

SEQ ID NO: 4373985 - DNA, 25 bp, Homo sapien
acagcaaatataagaaagttgacaa

SEQ ID NO: 4373986 - DNA, 25 bp, Homo sapien
tacagcaaatataagaaagttgaca

SEQ ID NO: 4373987 - DNA, 25 bp, Homo sapien
tccttcccaaatcgtttcacagaag

SEQ ID NO: 4373988 - DNA, 25 bp, Homo sapien
cttccttcccaaatcgtttcacaga

SEQ ID NO: 4373989 - DNA, 25 bp, Homo sapien
tcttccttcccaaatcgtttcacag

SEQ ID NO: 4373990 - DNA, 25 bp, Homo sapien
ccttcccaaatcgtttcacagaagt

SEQ ID NO: 4373991 - DNA, 25 bp, Homo sapien
cctaacggctttccggttgatgcct

SEQ ID NO: 4373992 - DNA, 25 bp, Homo sapien
ggctttccggttgatgcctcaaaga

SEQ ID NO: 4373993 - DNA, 25 bp, Homo sapien
ctttccatcacctaacggctttccg

SEQ ID NO: 4373994 - DNA, 25 bp, Homo sapien
atcacctaacggctttccggttgat

SEQ ID NO: 4373995 - DNA, 25 bp, Homo sapien
cgcagaagtgccatgtactttggtc

SEQ ID NO: 4373996 - DNA, 25 bp, Homo sapien
tgacgcagaagtgccatgtactttg

SEQ ID NO: 4373997 - DNA, 25 bp, Homo sapien
gaagtgccatgtactttggtccaaa

SEQ ID NO: 4373998 - DNA, 25 bp, Homo sapien
agtgccatgtactttggtccaaaac

SEQ ID NO: 4373999 - DNA, 25 bp, Homo sapien
tgttggtcaggttgttcaaactcct

SEQ ID NO: 4374000 - DNA, 25 bp, Homo sapien
aaactcctgaccttgtgatgcgccc

SEQ ID NO: 4374001 - DNA, 25 bp, Homo sapien
ccacggccagctaatttttacattt

SEQ ID NO: 4374002 - DNA, 25 bp, Homo sapien
cacggccagctaatttttacatttt

SEQ ID NO: 4374003 - DNA, 25 bp, Homo sapien
tcagaatgtgttcagttgggaacac

SEQ ID NO: 4374004 - DNA, 25 bp, Homo sapien
tatttgtgtacctaaccacgtctaa

SEQ ID NO: 4374005 - DNA, 25 bp, Homo sapien
tactgccatgccttgctcaatgatg

SEQ ID NO: 4374006 - DNA, 25 bp, Homo sapien
caatggctatgacattactcggtga

SEQ ID NO: 4374007 - DNA, 25 bp, Homo sapien
tgtctgccatctggatactatatta

SEQ ID NO: 4374008 - DNA, 25 bp, Homo sapien
attaccaaaagtcttctctcagaga

SEQ ID NO: 4374009 - DNA, 25 bp, Homo sapien
aattaccaaaagtcttctctcagag

SEQ ID NO: 4374010 - DNA, 25 bp, Homo sapien
ccatctggatactatattattccat

SEQ ID NO: 4374011 - DNA, 25 bp, Homo sapien
tactcaaagacacagtctgtgcatt

SEQ ID NO: 4374012 - DNA, 25 bp, Homo sapien
actcaaagacacagtctgtgcattc

SEQ ID NO: 4374013 - DNA, 25 bp, Homo sapien
tcaaagacacagtctgtgcattcag

SEQ ID NO: 4374014 - DNA, 25 bp, Homo sapien
caaagacacagtctgtgcattcaga

SEQ ID NO: 4374015 - DNA, 25 bp, Homo sapien
gagatgaaataaagcgcccttcata

SEQ ID NO: 4374016 - DNA, 25 bp, Homo sapien
tactactaccatctacaagaagaaa

SEQ ID NO: 4374017 - DNA, 25 bp, Homo sapien
ataaagcgcccttcatatgaatata

SEQ ID NO: 4374018 - DNA, 25 bp, Homo sapien
ttggagatgaaataaagcgcccttc

SEQ ID NO: 4374019 - DNA, 25 bp, Homo sapien
ctttctgcctgcagaatcaaactaa

SEQ ID NO: 4374020 - DNA, 25 bp, Homo sapien
gcctgcagaatcaaactaacagttc

SEQ ID NO: 4374021 - DNA, 25 bp, Homo sapien
aattggtgtgttccagttcttcgtg

SEQ ID NO: 4374022 - DNA, 25 bp, Homo sapien
gatcaaatataattggtgtgttcca

SEQ ID NO: 4374023 - DNA, 25 bp, Homo sapien
taatgactctatcacggaattccag

SEQ ID NO: 4374024 - DNA, 25 bp, Homo sapien
agaacacgtaacattgaagagacgt

SEQ ID NO: 4374025 - DNA, 25 bp, Homo sapien
ccactgcatcattaagaacattacg

SEQ ID NO: 4374026 - DNA, 25 bp, Homo sapien
tctatcacggaattccagtaaatcc

SEQ ID NO: 4374027 - DNA, 25 bp, Homo sapien
tccaggagtcaaatccaacatgctc

SEQ ID NO: 4374028 - DNA, 25 bp, Homo sapien
caacatgctcctgtttgttacagct

SEQ ID NO: 4374029 - DNA, 25 bp, Homo sapien
actggcagattaggcctgccttgga

SEQ ID NO: 4374030 - DNA, 25 bp, Homo sapien
gtaactggcagattaggcctgcctt

SEQ ID NO: 4374031 - DNA, 25 bp, Homo sapien
tgtgcaaaaacgacatgtccatttc

SEQ ID NO: 4374032 - DNA, 25 bp, Homo sapien
tcccaatgttgttccaccacatgtg

SEQ ID NO: 4374033 - DNA, 25 bp, Homo sapien
cagcaatctgagtgccatcgataga

SEQ ID NO: 4374034 - DNA, 25 bp, Homo sapien
gatagaccatgcaatattaaatatg

SEQ ID NO: 4374035 - DNA, 25 bp, Homo sapien
cttcctgaaggacctatgtgaggct

SEQ ID NO: 4374036 - DNA, 25 bp, Homo sapien
caaattgcagctaacacagttttct

SEQ ID NO: 4374037 - DNA, 25 bp, Homo sapien
ttctatacagcaaattgcagctaac

SEQ ID NO: 4374038 - DNA, 25 bp, Homo sapien
cagcaaattgcagctaacacagttt

SEQ ID NO: 4374039 - DNA, 25 bp, Homo sapien
tatacagcaaattgcagctaacaca

SEQ ID NO: 4374040 - DNA, 25 bp, Homo sapien
aaaggatcctcaaaaggataatctt

SEQ ID NO: 4374041 - DNA, 25 bp, Homo sapien
tatattacattgaaaggatcctcaa

SEQ ID NO: 4374042 - DNA, 25 bp, Homo sapien
caaaaggataatctttggctctttc

SEQ ID NO: 4374043 - DNA, 25 bp, Homo sapien
cacccttctctttactattcctgta

SEQ ID NO: 4374044 - DNA, 25 bp, Homo sapien
tgaattgtacagtgggcggccgtaa

SEQ ID NO: 4374045 - DNA, 25 bp, Homo sapien
caagcgtaaagtatgaaacgatcca

SEQ ID NO: 4374046 - DNA, 25 bp, Homo sapien
ccaggcaactgaagtaatgggatgc

SEQ ID NO: 4374047 - DNA, 25 bp, Homo sapien
cccagttttatcacacaagcgtaaa

SEQ ID NO: 4374048 - DNA, 25 bp, Homo sapien
ttatatttacagtcttcaccagcag

SEQ ID NO: 4374049 - DNA, 25 bp, Homo sapien
gatcattgaccgagttccaatctac

SEQ ID NO: 4374050 - DNA, 25 bp, Homo sapien
tgaccgagttccaatctacttttaa

SEQ ID NO: 4374051 - DNA, 25 bp, Homo sapien
gataaaataagatcattgaccgagt

SEQ ID NO: 4374052 - DNA, 25 bp, Homo sapien
ggttccagtacctcccattgatatg

SEQ ID NO: 4374053 - DNA, 25 bp, Homo sapien
ggtttacaactggactactctgaga

SEQ ID NO: 4374054 - DNA, 25 bp, Homo sapien
gagaaacttctgctgtatttaccat

SEQ ID NO: 4374055 - DNA, 25 bp, Homo sapien
cattctgttcgtcatattcttctaa

SEQ ID NO: 4374056 - DNA, 25 bp, Homo sapien
cttgcctgctgtataaagaaccttt

SEQ ID NO: 4374057 - DNA, 25 bp, Homo sapien
cttttctgaatcagggccccacgct

SEQ ID NO: 4374058 - DNA, 25 bp, Homo sapien
cacgctactgaatacactggtgttc

SEQ ID NO: 4374059 - DNA, 25 bp, Homo sapien
tggttgaagaggtttaatgattagc

SEQ ID NO: 4374060 - DNA, 25 bp, Homo sapien
caaagagatctccatcacagagctt

SEQ ID NO: 4374061 - DNA, 25 bp, Homo sapien
ttttaacatccaggactgtcagtgt

SEQ ID NO: 4374062 - DNA, 25 bp, Homo sapien
caatttgaaatcttactggccacct

SEQ ID NO: 4374063 - DNA, 25 bp, Homo sapien
gagcttcaagttctacatatccaaa

SEQ ID NO: 4374064 - DNA, 25 bp, Homo sapien
ggtggttcaggataattcaagggca

SEQ ID NO: 4374065 - DNA, 25 bp, Homo sapien
ggttcaggataattcaagggcatta

SEQ ID NO: 4374066 - DNA, 25 bp, Homo sapien
taggggtggttcaggataattcaag

SEQ ID NO: 4374067 - DNA, 25 bp, Homo sapien
caggtaggggtggttcaggataatt

SEQ ID NO: 4374068 - DNA, 25 bp, Homo sapien
tgaaattgtcaattgtaaaacatac

SEQ ID NO: 4374069 - DNA, 25 bp, Homo sapien
ctcaaccaccgtattagattgtttc

SEQ ID NO: 4374070 - DNA, 25 bp, Homo sapien
ccaaagtcagtctcaaccaccgtat

SEQ ID NO: 4374071 - DNA, 25 bp, Homo sapien
ctaagcatcccagtctttgaccaaa

SEQ ID NO: 4374072 - DNA, 25 bp, Homo sapien
tgagctaaagttgatctaagcatcc

SEQ ID NO: 4374073 - DNA, 25 bp, Homo sapien
gttgatctaagcatcccagtctttg

SEQ ID NO: 4374074 - DNA, 25 bp, Homo sapien
cttgctgagctaaagttgatctaag

SEQ ID NO: 4374075 - DNA, 25 bp, Homo sapien
cagaaacagtttaaatgacagagta

SEQ ID NO: 4374076 - DNA, 25 bp, Homo sapien
taagaatcaacagtatctaccgcat

SEQ ID NO: 4374077 - DNA, 25 bp, Homo sapien
taatgtttcctttgtcactgcagtc

SEQ ID NO: 4374078 - DNA, 25 bp, Homo sapien
aagtagcttaactttcatgacgaaa

SEQ ID NO: 4374079 - DNA, 25 bp, Homo sapien
tccatacgtgaccattccaaaagcc

SEQ ID NO: 4374080 - DNA, 25 bp, Homo sapien
tttgctattacacaatgaaagacac

SEQ ID NO: 4374081 - DNA, 25 bp, Homo sapien
tagcagtgtagaacaatactatgcc

SEQ ID NO: 4374082 - DNA, 25 bp, Homo sapien
cagaacagtctccaaaggtcacata

SEQ ID NO: 4374083 - DNA, 25 bp, Homo sapien
actgctccacagtgagcttctacac

SEQ ID NO: 4374084 - DNA, 25 bp, Homo sapien
cagtgagcttctacacttttttcca

SEQ ID NO: 4374085 - DNA, 25 bp, Homo sapien
cttcctaacttggaaatcagatgaa

SEQ ID NO: 4374086 - DNA, 25 bp, Homo sapien
catcttcctgcaagtactgctccac

SEQ ID NO: 4374087 - DNA, 25 bp, Homo sapien
caaagcacctactactagactaagt

SEQ ID NO: 4374088 - DNA, 25 bp, Homo sapien
tactactagactaagtaataggcac

SEQ ID NO: 4374089 - DNA, 25 bp, Homo sapien
tcaacaaagcacctactactagact

SEQ ID NO: 4374090 - DNA, 25 bp, Homo sapien
tattcaatcaacaaagcacctacta

SEQ ID NO: 4374091 - DNA, 25 bp, Homo sapien
ctgttgcctgacacagtataaaatt

SEQ ID NO: 4374092 - DNA, 25 bp, Homo sapien
tgttgcctgacacagtataaaatta

SEQ ID NO: 4374093 - DNA, 25 bp, Homo sapien
caaagtatgatgagccttgggctac

SEQ ID NO: 4374094 - DNA, 25 bp, Homo sapien
tcaccatgtgcagagagtctaccca

SEQ ID NO: 4374095 - DNA, 25 bp, Homo sapien
caagctgcctgcacgagatactgag

SEQ ID NO: 4374096 - DNA, 25 bp, Homo sapien
cagggacccgatgcaactagtgctt

SEQ ID NO: 4374097 - DNA, 25 bp, Homo sapien
cactggttaacaagttccacttcac

SEQ ID NO: 4374098 - DNA, 25 bp, Homo sapien
ttgagttgtttcactggttaacaag

SEQ ID NO: 4374099 - DNA, 25 bp, Homo sapien
tgtttcactggttaacaagttccac

SEQ ID NO: 4374100 - DNA, 25 bp, Homo sapien
actatttgagttgtttcactggtta

SEQ ID NO: 4374101 - DNA, 25 bp, Homo sapien
tatacaatattctatacacaaagcc

SEQ ID NO: 4374102 - DNA, 25 bp, Homo sapien
aaatagggtcaaatggtttcaagat

SEQ ID NO: 4374103 - DNA, 25 bp, Homo sapien
tcacagatgcagattataaggtata

SEQ ID NO: 4374104 - DNA, 25 bp, Homo sapien
gacttagtagatcaaaaggtatcaa

SEQ ID NO: 4374105 - DNA, 25 bp, Homo sapien
gtttaaatcagtgctttcctagttc

SEQ ID NO: 4374106 - DNA, 25 bp, Homo sapien
taaatcagtgctttcctagttctga

SEQ ID NO: 4374107 - DNA, 25 bp, Homo sapien
cagtgctttcctagttctgatgaag

SEQ ID NO: 4374108 - DNA, 25 bp, Homo sapien
aatcagtgctttcctagttctgatg

SEQ ID NO: 4374109 - DNA, 25 bp, Homo sapien
tattaattgccaccttcccatgtga

SEQ ID NO: 4374110 - DNA, 25 bp, Homo sapien
tagagcacagtggaatgaatacatg

SEQ ID NO: 4374111 - DNA, 25 bp, Homo sapien
ggactcttgctgacaaaatataggg

SEQ ID NO: 4374112 - DNA, 25 bp, Homo sapien
tgtgaaataatgaggatctgactgc

SEQ ID NO: 4374113 - DNA, 25 bp, Homo sapien
ggtaaacagccactaaaggaatgaa

SEQ ID NO: 4374114 - DNA, 25 bp, Homo sapien
aggtaaacagccactaaaggaatga

SEQ ID NO: 4374115 - DNA, 25 bp, Homo sapien
taggtaaacagccactaaaggaatg

SEQ ID NO: 4374116 - DNA, 25 bp, Homo sapien
ttttaaaagagatatctttagtctc

SEQ ID NO: 4374117 - DNA, 25 bp, Homo sapien
ttaaaagagatatctttagtctcat

SEQ ID NO: 4374118 - DNA, 25 bp, Homo sapien
tcttttaaaagagatatctttagtc

SEQ ID NO: 4374119 - DNA, 25 bp, Homo sapien
tttaaaagagatatctttagtctca

SEQ ID NO: 4374120 - DNA, 25 bp, Homo sapien
aatttaagatgccacttgattgtat

SEQ ID NO: 4374121 - DNA, 25 bp, Homo sapien
gactccacttccagcaaaaatttaa

SEQ ID NO: 4374122 - DNA, 25 bp, Homo sapien
aaaaatttaagatgccacttgattg

SEQ ID NO: 4374123 - DNA, 25 bp, Homo sapien
cagcaaaaatttaagatgccacttg

SEQ ID NO: 4374124 - DNA, 25 bp, Homo sapien
aattctaattatgccttacccaggg

SEQ ID NO: 4374125 - DNA, 25 bp, Homo sapien
tcgactaagctatcacgaatccagg

SEQ ID NO: 4374126 - DNA, 25 bp, Homo sapien
taaccataacactggcgagtcgttt

SEQ ID NO: 4374127 - DNA, 25 bp, Homo sapien
cagtggctctttaacaatataggga

SEQ ID NO: 4374128 - DNA, 25 bp, Homo sapien
tgaagaggcgtttctggaccactga

SEQ ID NO: 4374129 - DNA, 25 bp, Homo sapien
gcgatacttctacgcggcacgtcat

SEQ ID NO: 4374130 - DNA, 25 bp, Homo sapien
tccaggaaagcggtggcgattgctc

SEQ ID NO: 4374131 - DNA, 25 bp, Homo sapien
tagtgacttctaagagttacgctcc

SEQ ID NO: 4374132 - DNA, 25 bp, Homo sapien
cattttcgagtgaaggacccggagc

SEQ ID NO: 4374133 - DNA, 25 bp, Homo sapien
aaaatagaggccttgagcccgagcg

SEQ ID NO: 4374134 - DNA, 25 bp, Homo sapien
tctatctggaaaagggcgtctcccc

SEQ ID NO: 4374135 - DNA, 25 bp, Homo sapien
tagtggatcccagaaatcattgcgc

SEQ ID NO: 4374136 - DNA, 25 bp, Homo sapien
attgcactaatgtaggcttttcccc

SEQ ID NO: 4374137 - DNA, 25 bp, Homo sapien
gcaatgaccaatgaagctggagctc

SEQ ID NO: 4374138 - DNA, 25 bp, Homo sapien
cctactttaaagatgggcagtcatt

SEQ ID NO: 4374139 - DNA, 25 bp, Homo sapien
ggaaaatatagactcctaagtttca

SEQ ID NO: 4374140 - DNA, 25 bp, Homo sapien
catagctatcgaatttcttaccttg

SEQ ID NO: 4374141 - DNA, 25 bp, Homo sapien
aaaacatagctatcgaatttcttac

SEQ ID NO: 4374142 - DNA, 25 bp, Homo sapien
gagagaaaaacatagctatcgaatt

SEQ ID NO: 4374143 - DNA, 25 bp, Homo sapien
tagctatcgaatttcttaccttgga

SEQ ID NO: 4374144 - DNA, 25 bp, Homo sapien
gcagaaacgaattgctgaaatggaa

SEQ ID NO: 4374145 - DNA, 25 bp, Homo sapien
cagaaacgaattgctgaaatggaaa

SEQ ID NO: 4374146 - DNA, 25 bp, Homo sapien
tgcagaaacgaattgctgaaatgga

SEQ ID NO: 4374147 - DNA, 25 bp, Homo sapien
caacaatggctttgatggtacctga

SEQ ID NO: 4374148 - DNA, 25 bp, Homo sapien
tacctgatggtcaattgagaagcca

SEQ ID NO: 4374149 - DNA, 25 bp, Homo sapien
cccaaagaaagtatgagtgctaacc

SEQ ID NO: 4374150 - DNA, 25 bp, Homo sapien
tgctgggaacacaaaccattgtggc

SEQ ID NO: 4374151 - DNA, 25 bp, Homo sapien
taggaatccttaccagagatccaga

SEQ ID NO: 4374152 - DNA, 25 bp, Homo sapien
tctgtaatgtgaaaatgatggctct

SEQ ID NO: 4374153 - DNA, 25 bp, Homo sapien
tagcagttcttttcggtgtttagga

SEQ ID NO: 4374154 - DNA, 25 bp, Homo sapien
gatccagaaagaacatcgcaatctg

SEQ ID NO: 4374155 - DNA, 25 bp, Homo sapien
ctgggcgtcagggcaagactacgtc

SEQ ID NO: 4374156 - DNA, 25 bp, Homo sapien
gcctgggcgtcagggcaagactacg

SEQ ID NO: 4374157 - DNA, 25 bp, Homo sapien
ggcgtcagggcaagactacgtctca

SEQ ID NO: 4374158 - DNA, 25 bp, Homo sapien
tgggcgtcagggcaagactacgtct

SEQ ID NO: 4374159 - DNA, 25 bp, Homo sapien
tcatggatgagattgatgcagccct

SEQ ID NO: 4374160 - DNA, 25 bp, Homo sapien
ggtttaccaggatgtagtcccactg

SEQ ID NO: 4374161 - DNA, 25 bp, Homo sapien
caaggttgtgctatcaaggctcagc

SEQ ID NO: 4374162 - DNA, 25 bp, Homo sapien
tatgacttaattaccagagagccag

SEQ ID NO: 4374163 - DNA, 25 bp, Homo sapien
gaaaatcccatagctaccactcctg

SEQ ID NO: 4374164 - DNA, 25 bp, Homo sapien
tttaataaccaatgcagtagagctc

SEQ ID NO: 4374165 - DNA, 25 bp, Homo sapien
cccagcctgcagtactaagtttcaa

SEQ ID NO: 4374166 - DNA, 25 bp, Homo sapien
tgttcctttcttcagtgggccattg

SEQ ID NO: 4374167 - DNA, 25 bp, Homo sapien
cctactttaaagttgagtgatagca

SEQ ID NO: 4374168 - DNA, 25 bp, Homo sapien
tcacagctatatggccttggacaag

SEQ ID NO: 4374169 - DNA, 25 bp, Homo sapien
acagcagcataagaaccagttactc

SEQ ID NO: 4374170 - DNA, 25 bp, Homo sapien
aactggcaagatacaaaatgtcaaa

SEQ ID NO: 4374171 - DNA, 25 bp, Homo sapien
tagtttatgtgcaatctgtagggcc

SEQ ID NO: 4374172 - DNA, 25 bp, Homo sapien
gagcatagtctaatctgacccagaa

SEQ ID NO: 4374173 - DNA, 25 bp, Homo sapien
taggtaaggctcttcggtgatccaa

SEQ ID NO: 4374174 - DNA, 25 bp, Homo sapien
gacagtgggccaaaagtcgtaacac

SEQ ID NO: 4374175 - DNA, 25 bp, Homo sapien
acttgaaccgttgtagacccaatgt

SEQ ID NO: 4374176 - DNA, 25 bp, Homo sapien
acattgggtctacaacggttcaagt

SEQ ID NO: 4374177 - DNA, 25 bp, Homo sapien
ttaagttgttggtacttttgcatta

SEQ ID NO: 4374178 - DNA, 25 bp, Homo sapien
taagttgttggtacttttgcattag

SEQ ID NO: 4374179 - DNA, 25 bp, Homo sapien
tagggctcttaaatctatctcaaac

SEQ ID NO: 4374180 - DNA, 25 bp, Homo sapien
ttaaatctatctcaaacacaggtat

SEQ ID NO: 4374181 - DNA, 25 bp, Homo sapien
gctcttaaatctatctcaaacacag

SEQ ID NO: 4374182 - DNA, 25 bp, Homo sapien
aagcatttagggctcttaaatctat

SEQ ID NO: 4374183 - DNA, 25 bp, Homo sapien
gtttagcaatgtacagaataagccc

SEQ ID NO: 4374184 - DNA, 25 bp, Homo sapien
taactttgacatatcattgctaacc

SEQ ID NO: 4374185 - DNA, 25 bp, Homo sapien
cccatttaaacaattcaggttgaca

SEQ ID NO: 4374186 - DNA, 25 bp, Homo sapien
ccatgctaccccattttttgtttag

SEQ ID NO: 4374187 - DNA, 25 bp, Homo sapien
tcaacaaatagaaaatgtgacacag

SEQ ID NO: 4374188 - DNA, 25 bp, Homo sapien
taaactttggtaaacagatagagag

SEQ ID NO: 4374189 - DNA, 25 bp, Homo sapien
gagtatcgacatcagtattactgaa

SEQ ID NO: 4374190 - DNA, 25 bp, Homo sapien
tatattctttaccttatgcagactg

SEQ ID NO: 4374191 - DNA, 25 bp, Homo sapien
aatgagaacgttcttaatttgtcca

SEQ ID NO: 4374192 - DNA, 25 bp, Homo sapien
aggccaggaacatgacatccttttt

SEQ ID NO: 4374193 - DNA, 25 bp, Homo sapien
tgggaatgagaacgttcttaatttg

SEQ ID NO: 4374194 - DNA, 25 bp, Homo sapien
caggccaggaacatgacatcctttt

SEQ ID NO: 4374195 - DNA, 25 bp, Homo sapien
gaacagcttccttatcgccttggat

SEQ ID NO: 4374196 - DNA, 25 bp, Homo sapien
gattgccaacatcacagagagccgt

SEQ ID NO: 4374197 - DNA, 25 bp, Homo sapien
gcatggcagtacacgaggatcttca

SEQ ID NO: 4374198 - DNA, 25 bp, Homo sapien
catgatgttgacctatggtaaggca

SEQ ID NO: 4374199 - DNA, 25 bp, Homo sapien
ccaactcctccagaatcttttattc

SEQ ID NO: 4374200 - DNA, 25 bp, Homo sapien
ctccaactcctccagaatcttttat

SEQ ID NO: 4374201 - DNA, 25 bp, Homo sapien
ttgggggctgaatacactcttctcc

SEQ ID NO: 4374202 - DNA, 25 bp, Homo sapien
atctcgtggtttgggggctgaatac

SEQ ID NO: 4374203 - DNA, 25 bp, Homo sapien
gatatttatcttcacgatgcttcat

SEQ ID NO: 4374204 - DNA, 25 bp, Homo sapien
ttcatcgtgttttcagaaaagccac

SEQ ID NO: 4374205 - DNA, 25 bp, Homo sapien
acgatgcttcatcgtgttttcagaa

SEQ ID NO: 4374206 - DNA, 25 bp, Homo sapien
ggttgttagttcactgtctttgata

SEQ ID NO: 4374207 - DNA, 25 bp, Homo sapien
actcggcggcgtccgctcagctcac

SEQ ID NO: 4374208 - DNA, 25 bp, Homo sapien
gactcggcggcgtccgctcagctca

SEQ ID NO: 4374209 - DNA, 25 bp, Homo sapien
cgactcggcggcgtccgctcagctc

SEQ ID NO: 4374210 - DNA, 25 bp, Homo sapien
cccaaactccagtatgggacaagag

SEQ ID NO: 4374211 - DNA, 25 bp, Homo sapien
ttctccgcatccgtaaaggtcctta

SEQ ID NO: 4374212 - DNA, 25 bp, Homo sapien
ggcacaccagactgtgctacaggaa

SEQ ID NO: 4374213 - DNA, 25 bp, Homo sapien
ctccacagtggagggacgggaaagt

SEQ ID NO: 4374214 - DNA, 25 bp, Homo sapien
gcacggaaacacagcgccacgagct

SEQ ID NO: 4374215 - DNA, 25 bp, Homo sapien
gcgccacgagctccaggcggatgct

SEQ ID NO: 4374216 - DNA, 25 bp, Homo sapien
gcaactccacagcacggaaacacag

SEQ ID NO: 4374217 - DNA, 25 bp, Homo sapien
aagcggaccaggcaactccacagca

SEQ ID NO: 4374218 - DNA, 25 bp, Homo sapien
gggctggaccctccctacctgagca

SEQ ID NO: 4374219 - DNA, 25 bp, Homo sapien
agggagggcagctgattaactgggt

SEQ ID NO: 4374220 - DNA, 25 bp, Homo sapien
ctgattaactgggtaacttattggg

SEQ ID NO: 4374221 - DNA, 25 bp, Homo sapien
agcatgctgacccccttcctacctc

SEQ ID NO: 4374222 - DNA, 25 bp, Homo sapien
gctaacaaacgtcaaagggtactgc

SEQ ID NO: 4374223 - DNA, 25 bp, Homo sapien
tgataacacagcaaggtcacagcag

SEQ ID NO: 4374224 - DNA, 25 bp, Homo sapien
gaagggctcagctatgtctactctg

SEQ ID NO: 4374225 - DNA, 25 bp, Homo sapien
aattatctctcttcgtggccaactg

SEQ ID NO: 4374226 - DNA, 25 bp, Homo sapien
ccagcccagagaatgtgagctgggc

SEQ ID NO: 4374227 - DNA, 25 bp, Homo sapien
aagaacccatgaaagaactccagag

SEQ ID NO: 4374228 - DNA, 25 bp, Homo sapien
gagagtcagcttgaaacattacccc

SEQ ID NO: 4374229 - DNA, 25 bp, Homo sapien
cagataaccgcagaagatcctccat

SEQ ID NO: 4374230 - DNA, 25 bp, Homo sapien
tgaccatccccttgaccacatcctg

SEQ ID NO: 4374231 - DNA, 25 bp, Homo sapien
ctgaccacagaggtggaaccaggga

SEQ ID NO: 4374232 - DNA, 25 bp, Homo sapien
cccttgaccacatcctgtctgctga

SEQ ID NO: 4374233 - DNA, 25 bp, Homo sapien
ccacagaggtggaaccagggacctg

SEQ ID NO: 4374234 - DNA, 25 bp, Homo sapien
gaagaagcatggcagcaaccaaaac

SEQ ID NO: 4374235 - DNA, 25 bp, Homo sapien
aagaagcatggcagcaaccaaaacc

SEQ ID NO: 4374236 - DNA, 25 bp, Homo sapien
agaagcatggcagcaaccaaaaccc

SEQ ID NO: 4374237 - DNA, 25 bp, Homo sapien
aggaagaagcatggcagcaaccaaa

SEQ ID NO: 4374238 - DNA, 25 bp, Homo sapien
cccagcggacaacagtaactgcggg

SEQ ID NO: 4374239 - DNA, 25 bp, Homo sapien
gacaacagtaactgcgggtggtcat

SEQ ID NO: 4374240 - DNA, 25 bp, Homo sapien
tggagcgttatctcccagcggacaa

SEQ ID NO: 4374241 - DNA, 25 bp, Homo sapien
ctgggtctgtggagcgttatctccc

SEQ ID NO: 4374242 - DNA, 25 bp, Homo sapien
ggcgccatgctcttgtacagtgtgc

SEQ ID NO: 4374243 - DNA, 25 bp, Homo sapien
catatgatctcggtgtggccagctc

SEQ ID NO: 4374244 - DNA, 25 bp, Homo sapien
tggatccctcctagatggtttggtg

SEQ ID NO: 4374245 - DNA, 25 bp, Homo sapien
tagatggtttggtgcctcctcgcag

SEQ ID NO: 4374246 - DNA, 25 bp, Homo sapien
acttttgcccgatccccaacaaatg

SEQ ID NO: 4374247 - DNA, 25 bp, Homo sapien
tttagatataagtaacattgaccca

SEQ ID NO: 4374248 - DNA, 25 bp, Homo sapien
caaatgttataaacaggcctgatca

SEQ ID NO: 4374249 - DNA, 25 bp, Homo sapien
tgccccactacatttaggcacagaa

SEQ ID NO: 4374250 - DNA, 25 bp, Homo sapien
cagtgaaggctgaaccattagatga

SEQ ID NO: 4374251 - DNA, 25 bp, Homo sapien
tgagaagatcggagcatgtggatgg

SEQ ID NO: 4374252 - DNA, 25 bp, Homo sapien
tgggttaatcagagtggaggaagcc

SEQ ID NO: 4374253 - DNA, 25 bp, Homo sapien
agtggaggaagcccataacacaagt

SEQ ID NO: 4374254 - DNA, 25 bp, Homo sapien
aactgtagattgaaggcttttagag

SEQ ID NO: 4374255 - DNA, 25 bp, Homo sapien
taaaactcagatgcaatgagacaaa

SEQ ID NO: 4374256 - DNA, 25 bp, Homo sapien
gtagtcactacaatcagttcatctg

SEQ ID NO: 4374257 - DNA, 25 bp, Homo sapien
tccctttctatcgaaggctttctaa

SEQ ID NO: 4374258 - DNA, 25 bp, Homo sapien
cccatagaactcatggtaccttcac

SEQ ID NO: 4374259 - DNA, 25 bp, Homo sapien
ttattgagtacccatagaactcatg

SEQ ID NO: 4374260 - DNA, 25 bp, Homo sapien
ttgagtacccatagaactcatggta

SEQ ID NO: 4374261 - DNA, 25 bp, Homo sapien
tacccatagaactcatggtaccttc

SEQ ID NO: 4374262 - DNA, 25 bp, Homo sapien
ggttaggatgactaggactgccact

SEQ ID NO: 4374263 - DNA, 25 bp, Homo sapien
taaagtgcggttgagaaagccagga

SEQ ID NO: 4374264 - DNA, 25 bp, Homo sapien
tgaaggcagcacatcggcaagtaaa

SEQ ID NO: 4374265 - DNA, 25 bp, Homo sapien
tatatgccgaccttgcccttaagga

SEQ ID NO: 4374266 - DNA, 25 bp, Homo sapien
gtcaactgctcttacacccagagca

SEQ ID NO: 4374267 - DNA, 25 bp, Homo sapien
actggacttggacatcctgagtcaa

SEQ ID NO: 4374268 - DNA, 25 bp, Homo sapien
gacatcctgagtcaaactgccatca

SEQ ID NO: 4374269 - DNA, 25 bp, Homo sapien
gagcagtagctgtcaagtcaatttt

SEQ ID NO: 4374270 - DNA, 25 bp, Homo sapien
catttgcggtcaggattccaatacc

SEQ ID NO: 4374271 - DNA, 25 bp, Homo sapien
ccaacgtgcatattgatttgaaggc

SEQ ID NO: 4374272 - DNA, 25 bp, Homo sapien
gaagactgcactaatgccaccaacg

SEQ ID NO: 4374273 - DNA, 25 bp, Homo sapien
ggagtattgcctcagatatctgggc

SEQ ID NO: 4374274 - DNA, 25 bp, Homo sapien
ggccttccctgagatcagagattct

SEQ ID NO: 4374275 - DNA, 25 bp, Homo sapien
tcaaaagggagatcaccctggtggg

SEQ ID NO: 4374276 - DNA, 25 bp, Homo sapien
ggtacctcatcagtttggctttggg

SEQ ID NO: 4374277 - DNA, 25 bp, Homo sapien
cctgatctaatcaggtgagaccttt

SEQ ID NO: 4374278 - DNA, 25 bp, Homo sapien
gatggtgtcaactggacaaactcag

SEQ ID NO: 4374279 - DNA, 25 bp, Homo sapien
taaggtagtccttatacccagagat

SEQ ID NO: 4374280 - DNA, 25 bp, Homo sapien
tagattttagactagggcgtctcac

SEQ ID NO: 4374281 - DNA, 25 bp, Homo sapien
caggtaaccgtgatgaactgtcaac

SEQ ID NO: 4374282 - DNA, 25 bp, Homo sapien
tatttccccaagacagcctagcctg

SEQ ID NO: 4374283 - DNA, 25 bp, Homo sapien
tgtttatttccccaagacagcctag

SEQ ID NO: 4374284 - DNA, 25 bp, Homo sapien
ttaatgtttatttccccaagacagc

SEQ ID NO: 4374285 - DNA, 25 bp, Homo sapien
ccccaagacagcctagcctgcactc

SEQ ID NO: 4374286 - DNA, 25 bp, Homo sapien
tgttcatggctgcctacatctaaga

SEQ ID NO: 4374287 - DNA, 25 bp, Homo sapien
taaaacaattgaacagattaggcat

SEQ ID NO: 4374288 - DNA, 25 bp, Homo sapien
atttcctacaatgagccaccttata

SEQ ID NO: 4374289 - DNA, 25 bp, Homo sapien
gcatattattaaaggtgttcaaacc

SEQ ID NO: 4374290 - DNA, 25 bp, Homo sapien
tatggcaacttgtgtactgcaacac

SEQ ID NO: 4374291 - DNA, 25 bp, Homo sapien
tttaaacacagcacggtattctacc

SEQ ID NO: 4374292 - DNA, 25 bp, Homo sapien
tgcaacacagtctattttgagggaa

SEQ ID NO: 4374293 - DNA, 25 bp, Homo sapien
ctttattcagcagtacatatgcacc

SEQ ID NO: 4374294 - DNA, 25 bp, Homo sapien
agtaaaccaatgtctgctgctaaac

SEQ ID NO: 4374295 - DNA, 25 bp, Homo sapien
tggtgcaaatgcacagggaaacctt

SEQ ID NO: 4374296 - DNA, 25 bp, Homo sapien
gaagcaactaaaaaaaggcatacta

SEQ ID NO: 4374297 - DNA, 25 bp, Homo sapien
gctgctaaaccagtctttgttttca

SEQ ID NO: 4374298 - DNA, 25 bp, Homo sapien
aacacttatgatctcattttgatga

SEQ ID NO: 4374299 - DNA, 25 bp, Homo sapien
tgtacattaacacttatgatctcat

SEQ ID NO: 4374300 - DNA, 25 bp, Homo sapien
cattaacacttatgatctcattttg

SEQ ID NO: 4374301 - DNA, 25 bp, Homo sapien
gtccagtgtacattaacacttatga

SEQ ID NO: 4374302 - DNA, 25 bp, Homo sapien
ctgaaggtgaatcaagcttgcatgc

SEQ ID NO: 4374303 - DNA, 25 bp, Homo sapien
acatacagcaccacaaccacgctct

SEQ ID NO: 4374304 - DNA, 25 bp, Homo sapien
tgaatcaagcttgcatgcgttcaca

SEQ ID NO: 4374305 - DNA, 25 bp, Homo sapien
tcagccccctgaaggtgaatcaagc

SEQ ID NO: 4374306 - DNA, 25 bp, Homo sapien
tttcaaagatgaacctggctctcca

SEQ ID NO: 4374307 - DNA, 25 bp, Homo sapien
gatctgtgacctgtagcccttttta

SEQ ID NO: 4374308 - DNA, 25 bp, Homo sapien
cctttgacttatatgggcagcctat

SEQ ID NO: 4374309 - DNA, 25 bp, Homo sapien
gaagatgacggtactgcactttccc

SEQ ID NO: 4374310 - DNA, 25 bp, Homo sapien
tttctttcccgatttaatgcagcag

SEQ ID NO: 4374311 - DNA, 25 bp, Homo sapien
catgagccaagcttgatggatcaaa

SEQ ID NO: 4374312 - DNA, 25 bp, Homo sapien
ccgatttaatgcagcagcagatccc

SEQ ID NO: 4374313 - DNA, 25 bp, Homo sapien
gatcccatgagccaagcttgatgga

SEQ ID NO: 4374314 - DNA, 25 bp, Homo sapien
tgtacctaacttccacaacatcttt

SEQ ID NO: 4374315 - DNA, 25 bp, Homo sapien
tgcattgtacctaacttccacaaca

SEQ ID NO: 4374316 - DNA, 25 bp, Homo sapien
atatctcagtgctgcattgtaccta

SEQ ID NO: 4374317 - DNA, 25 bp, Homo sapien
tatctcagtgctgcattgtacctaa

SEQ ID NO: 4374318 - DNA, 25 bp, Homo sapien
tggtacattggcagatgaattgaaa

SEQ ID NO: 4374319 - DNA, 25 bp, Homo sapien
ggtacattggcagatgaattgaaac

SEQ ID NO: 4374320 - DNA, 25 bp, Homo sapien
tccgccttgaattgcctctggaaca

SEQ ID NO: 4374321 - DNA, 25 bp, Homo sapien
ggaacaaggctagggtcttcatcaa

SEQ ID NO: 4374322 - DNA, 25 bp, Homo sapien
gaattgcctctggaacaaggctagg

SEQ ID NO: 4374323 - DNA, 25 bp, Homo sapien
caaatgttccgccttgaattgcctc

SEQ ID NO: 4374324 - DNA, 25 bp, Homo sapien
tttatccagatctatgtttatatat

SEQ ID NO: 4374325 - DNA, 25 bp, Homo sapien
actgatcaatgatctcataggccaa

SEQ ID NO: 4374326 - DNA, 25 bp, Homo sapien
gaactgatcaatgatctcataggcc

SEQ ID NO: 4374327 - DNA, 25 bp, Homo sapien
tcaatgatctcataggccaatttgt

SEQ ID NO: 4374328 - DNA, 25 bp, Homo sapien
tgatcaatgatctcataggccaatt

SEQ ID NO: 4374329 - DNA, 25 bp, Homo sapien
attacttagtccatcgagtactact

SEQ ID NO: 4374330 - DNA, 25 bp, Homo sapien
tacttagtccatcgagtactacttg

SEQ ID NO: 4374331 - DNA, 25 bp, Homo sapien
tagtccatcgagtactacttgcaca

SEQ ID NO: 4374332 - DNA, 25 bp, Homo sapien
cttagtccatcgagtactacttgca

SEQ ID NO: 4374333 - DNA, 25 bp, Homo sapien
taagttacttatggcccaagcagct

SEQ ID NO: 4374334 - DNA, 25 bp, Homo sapien
ttaagttacttatggcccaagcagc

SEQ ID NO: 4374335 - DNA, 25 bp, Homo sapien
ctcaacctcccggattcaaatgatc

SEQ ID NO: 4374336 - DNA, 25 bp, Homo sapien
ggcgcatgctaccacaccaaactaa

SEQ ID NO: 4374337 - DNA, 25 bp, Homo sapien
tagctagaaccacaggcgcatgcta

SEQ ID NO: 4374338 - DNA, 25 bp, Homo sapien
gcctcaacctcccggattcaaatga

SEQ ID NO: 4374339 - DNA, 25 bp, Homo sapien
cttatccaaaaggtgtattatcatt

SEQ ID NO: 4374340 - DNA, 25 bp, Homo sapien
ctgtagaacaagagcatttgaatat

SEQ ID NO: 4374341 - DNA, 25 bp, Homo sapien
gaacaagagcatttgaatatttctc

SEQ ID NO: 4374342 - DNA, 25 bp, Homo sapien
tagaacaagagcatttgaatatttc

SEQ ID NO: 4374343 - DNA, 25 bp, Homo sapien
caagagcatttgaatatttctcatt

SEQ ID NO: 4374344 - DNA, 25 bp, Homo sapien
caacagcctcagatgcactccaata

SEQ ID NO: 4374345 - DNA, 25 bp, Homo sapien
ggatcagatcacaggaccattttaa

SEQ ID NO: 4374346 - DNA, 25 bp, Homo sapien
tgttagagattttagggtgccaggc

SEQ ID NO: 4374347 - DNA, 25 bp, Homo sapien
ccaggctagttaggtgagctgttct

SEQ ID NO: 4374348 - DNA, 25 bp, Homo sapien
gtgaaagagcatcacagttcaaaac

SEQ ID NO: 4374349 - DNA, 25 bp, Homo sapien
gaaagagcatcacagttcaaaacta

SEQ ID NO: 4374350 - DNA, 25 bp, Homo sapien
tgaaagagcatcacagttcaaaact

SEQ ID NO: 4374351 - DNA, 25 bp, Homo sapien
gtgtgaaagagcatcacagttcaaa

SEQ ID NO: 4374352 - DNA, 25 bp, Homo sapien
cagtatcacctgaagagcattttaa

SEQ ID NO: 4374353 - DNA, 25 bp, Homo sapien
taaggtacagggtctctaatctgac

SEQ ID NO: 4374354 - DNA, 25 bp, Homo sapien
cagactaacggtttctcttatgcga

SEQ ID NO: 4374355 - DNA, 25 bp, Homo sapien
tgatgttcaggcataatgacttagg

SEQ ID NO: 4374356 - DNA, 25 bp, Homo sapien
cagctactgcttatatctctgagaa

SEQ ID NO: 4374357 - DNA, 25 bp, Homo sapien
taaataaggatggttggcaaggaag

SEQ ID NO: 4374358 - DNA, 25 bp, Homo sapien
gagtacccttatttcagcaccaatg

SEQ ID NO: 4374359 - DNA, 25 bp, Homo sapien
aacttgccaggtgagtaaataagga

SEQ ID NO: 4374360 - DNA, 25 bp, Homo sapien
taaggtaagagagggcccagactgt

SEQ ID NO: 4374361 - DNA, 25 bp, Homo sapien
gggcccagactgtgtctaccagtat

SEQ ID NO: 4374362 - DNA, 25 bp, Homo sapien
agagagggcccagactgtgtctacc

SEQ ID NO: 4374363 - DNA, 25 bp, Homo sapien
gcagaggaaccaaatgaggaactat

SEQ ID NO: 4374364 - DNA, 25 bp, Homo sapien
tagccatattcaggattctgatccc

SEQ ID NO: 4374365 - DNA, 25 bp, Homo sapien
aatctgatcgctacggtattaaaca

SEQ ID NO: 4374366 - DNA, 25 bp, Homo sapien
tctgatcccagattagtatccaatc

SEQ ID NO: 4374367 - DNA, 25 bp, Homo sapien
tagttcactaagatacacacgcaca

SEQ ID NO: 4374368 - DNA, 25 bp, Homo sapien
gaaaatctgatagtatgctgacaca

SEQ ID NO: 4374369 - DNA, 25 bp, Homo sapien
ttaaagggcaattgatgtccatggt

SEQ ID NO: 4374370 - DNA, 25 bp, Homo sapien
ccatggtttggtatgtgtatatgaa

SEQ ID NO: 4374371 - DNA, 25 bp, Homo sapien
cattggccaaactgtcaaaatgacc

SEQ ID NO: 4374372 - DNA, 25 bp, Homo sapien
acatctgtgtgatgaattaaaacac

SEQ ID NO: 4374373 - DNA, 25 bp, Homo sapien
atgaattaaaacacaaagggctgga

SEQ ID NO: 4374374 - DNA, 25 bp, Homo sapien
atttacatctgtgtgatgaattaaa

SEQ ID NO: 4374375 - DNA, 25 bp, Homo sapien
tgaattaaaacacaaagggctggaa

SEQ ID NO: 4374376 - DNA, 25 bp, Homo sapien
gtgggtctttgtggcgacataagtt

SEQ ID NO: 4374377 - DNA, 25 bp, Homo sapien
taagttgaccataacccaagtaaca

SEQ ID NO: 4374378 - DNA, 25 bp, Homo sapien
tgtggcgacataagttgaccataac

SEQ ID NO: 4374379 - DNA, 25 bp, Homo sapien
gacataagttgaccataacccaagt

SEQ ID NO: 4374380 - DNA, 25 bp, Homo sapien
tctgatggggtgaatggagaagcct

SEQ ID NO: 4374381 - DNA, 25 bp, Homo sapien
tgatatttcccaatgcccacactgc

SEQ ID NO: 4374382 - DNA, 25 bp, Homo sapien
agcctcaggaaaagtggcacagcat

SEQ ID NO: 4374383 - DNA, 25 bp, Homo sapien
gcttgctcacagacattctgatggg

SEQ ID NO: 4374384 - DNA, 25 bp, Homo sapien
tgttcagaagttccagatgcaatgt

SEQ ID NO: 4374385 - DNA, 25 bp, Homo sapien
actactgcttgagtttgttcagaag

SEQ ID NO: 4374386 - DNA, 25 bp, Homo sapien
gaagttccagatgcaatgtttgtca

SEQ ID NO: 4374387 - DNA, 25 bp, Homo sapien
tggactgaactactgcttgagtttg

SEQ ID NO: 4374388 - DNA, 25 bp, Homo sapien
gtcatcaattggtggatttcgatca

SEQ ID NO: 4374389 - DNA, 25 bp, Homo sapien
aagtcatcaattggtggatttcgat

SEQ ID NO: 4374390 - DNA, 25 bp, Homo sapien
catcaattggtggatttcgatcact

SEQ ID NO: 4374391 - DNA, 25 bp, Homo sapien
tcaattggtggatttcgatcactgg

SEQ ID NO: 4374392 - DNA, 25 bp, Homo sapien
aagagataaaaacactcctgtgaaa

SEQ ID NO: 4374393 - DNA, 25 bp, Homo sapien
gtaagagataaaaacactcctgtga

SEQ ID NO: 4374394 - DNA, 25 bp, Homo sapien
tgtaagagataaaaacactcctgtg

SEQ ID NO: 4374395 - DNA, 25 bp, Homo sapien
ctgtaagagataaaaacactcctgt

SEQ ID NO: 4374396 - DNA, 25 bp, Homo sapien
aattgaattccttggttatcacttg

SEQ ID NO: 4374397 - DNA, 25 bp, Homo sapien
ttccttggttatcacttgaagcatt

SEQ ID NO: 4374398 - DNA, 25 bp, Homo sapien
tgaattccttggttatcacttgaag

SEQ ID NO: 4374399 - DNA, 25 bp, Homo sapien
cttaattgaattccttggttatcac

SEQ ID NO: 4374400 - DNA, 25 bp, Homo sapien
ttgaacaatagcttctagagaggta

SEQ ID NO: 4374401 - DNA, 25 bp, Homo sapien
tgaacaatagcttctagagaggtat

SEQ ID NO: 4374402 - DNA, 25 bp, Homo sapien
aacaatagcttctagagaggtattt

SEQ ID NO: 4374403 - DNA, 25 bp, Homo sapien
caatagcttctagagaggtattttg

SEQ ID NO: 4374404 - DNA, 25 bp, Homo sapien
agatatcttcatgtggtacattcct

SEQ ID NO: 4374405 - DNA, 25 bp, Homo sapien
cagatatcttcatgtggtacattcc

SEQ ID NO: 4374406 - DNA, 25 bp, Homo sapien
gatatcttcatgtggtacattcctt

SEQ ID NO: 4374407 - DNA, 25 bp, Homo sapien
ctacaacttcatttcgttgtcttct

SEQ ID NO: 4374408 - DNA, 25 bp, Homo sapien
caacttcatttcgttgtcttctcat

SEQ ID NO: 4374409 - DNA, 25 bp, Homo sapien
tcaactacaacttcatttcgttgtc

SEQ ID NO: 4374410 - DNA, 25 bp, Homo sapien
cttccttaattcaactacaacttca

SEQ ID NO: 4374411 - DNA, 25 bp, Homo sapien
cactgcttcagttataagttagtga

SEQ ID NO: 4374412 - DNA, 25 bp, Homo sapien
tggttaactggctacattgagtgaa

SEQ ID NO: 4374413 - DNA, 25 bp, Homo sapien
aaatatccaaagactctcacacgct

SEQ ID NO: 4374414 - DNA, 25 bp, Homo sapien
acccatagactccaaggaaggaaag

SEQ ID NO: 4374415 - DNA, 25 bp, Homo sapien
catctactgaattctggtctgtttc

SEQ ID NO: 4374416 - DNA, 25 bp, Homo sapien
acaaaggttccgatatcgctcccca

SEQ ID NO: 4374417 - DNA, 25 bp, Homo sapien
cacccctcatctactgaattctggt

SEQ ID NO: 4374418 - DNA, 25 bp, Homo sapien
tggataaacaaaggttccgatatcg

SEQ ID NO: 4374419 - DNA, 25 bp, Homo sapien
cgcttggcataatgcttatggttca

SEQ ID NO: 4374420 - DNA, 25 bp, Homo sapien
ctattttaaagtgagttcggcagca

SEQ ID NO: 4374421 - DNA, 25 bp, Homo sapien
atctcccaaaactatcctggtcttg

SEQ ID NO: 4374422 - DNA, 25 bp, Homo sapien
gcaaaaacgaaacactacatccatt

SEQ ID NO: 4374423 - DNA, 25 bp, Homo sapien
catcagtgctcttaaggaaaacagg

SEQ ID NO: 4374424 - DNA, 25 bp, Homo sapien
gactggaggcgcagagaaagcattc

SEQ ID NO: 4374425 - DNA, 25 bp, Homo sapien
gaaagcattctcacagacagagcag

SEQ ID NO: 4374426 - DNA, 25 bp, Homo sapien
tctgacgggagaaactaacattgag

SEQ ID NO: 4374427 - DNA, 25 bp, Homo sapien
tatgtttgcaattctcctggattta

SEQ ID NO: 4374428 - DNA, 25 bp, Homo sapien
ctgcattccaaagcagccgtaccat

SEQ ID NO: 4374429 - DNA, 25 bp, Homo sapien
tttatatactgccatcctagtgggt

SEQ ID NO: 4374430 - DNA, 25 bp, Homo sapien
gtagtgctggtttcccaactcccaa

SEQ ID NO: 4374431 - DNA, 25 bp, Homo sapien
cctactaaagaacaaggagtgatgt

SEQ ID NO: 4374432 - DNA, 25 bp, Homo sapien
ggagtgatgttaacaattatttgaa

SEQ ID NO: 4374433 - DNA, 25 bp, Homo sapien
aaaccttaaggtattatcttgcttg

SEQ ID NO: 4374434 - DNA, 25 bp, Homo sapien
tgcttgtttttctggaccagtaaca

SEQ ID NO: 4374435 - DNA, 25 bp, Homo sapien
cattctgggtactaaatagtgtgaa

SEQ ID NO: 4374436 - DNA, 25 bp, Homo sapien
tgtattaccaacaaatatctatgac

SEQ ID NO: 4374437 - DNA, 25 bp, Homo sapien
aaacatactatcttaggattccgac

SEQ ID NO: 4374438 - DNA, 25 bp, Homo sapien
gacactgagatagactatgatttac

SEQ ID NO: 4374439 - DNA, 25 bp, Homo sapien
ctctcaagttcagaaatgccatggg

SEQ ID NO: 4374440 - DNA, 25 bp, Homo sapien
tcattatgaaaacgtaccgagaaca

SEQ ID NO: 4374441 - DNA, 25 bp, Homo sapien
aagctaaactcgtgattaagatgca

SEQ ID NO: 4374442 - DNA, 25 bp, Homo sapien
cagaattaacatccctggacactta

SEQ ID NO: 4374443 - DNA, 25 bp, Homo sapien
caatctcgggagcagctgtatctaa

SEQ ID NO: 4374444 - DNA, 25 bp, Homo sapien
taatcaaacgtgatggtgccattcc

SEQ ID NO: 4374445 - DNA, 25 bp, Homo sapien
gctatatccagagtaaaacacaggc

SEQ ID NO: 4374446 - DNA, 25 bp, Homo sapien
gcactgttaggatcaccaggatggc

SEQ ID NO: 4374447 - DNA, 25 bp, Homo sapien
cttgagccgttggttgtccagtttc

SEQ ID NO: 4374448 - DNA, 25 bp, Homo sapien
ttgagccgttggttgtccagtttct

SEQ ID NO: 4374449 - DNA, 25 bp, Homo sapien
attcttgagccgttggttgtccagt

SEQ ID NO: 4374450 - DNA, 25 bp, Homo sapien
tcttgagccgttggttgtccagttt

SEQ ID NO: 4374451 - DNA, 25 bp, Homo sapien
agcgcgactgcagctccggcaaaga

SEQ ID NO: 4374452 - DNA, 25 bp, Homo sapien
aggcagcctcgatctgagggccccg

SEQ ID NO: 4374453 - DNA, 25 bp, Homo sapien
cagctccggcaaagacaactgtggg

SEQ ID NO: 4374454 - DNA, 25 bp, Homo sapien
aaggcgacggaatgtgctgccggct

SEQ ID NO: 4374455 - DNA, 25 bp, Homo sapien
tatcaaatgggcaaagaagtccttc

SEQ ID NO: 4374456 - DNA, 25 bp, Homo sapien
gacatacatttcagggcaaaacccc

SEQ ID NO: 4374457 - DNA, 25 bp, Homo sapien
cacagttagggaggacgtgaagtcc

SEQ ID NO: 4374458 - DNA, 25 bp, Homo sapien
tccttcagggagttggtaatagctc

SEQ ID NO: 4374459 - DNA, 25 bp, Homo sapien
accgaggaggaattgggttgatttg

SEQ ID NO: 4374460 - DNA, 25 bp, Homo sapien
ggaccattcatcccaagtaatgaag

SEQ ID NO: 4374461 - DNA, 25 bp, Homo sapien
atttgaaacttatacttcagtctga

SEQ ID NO: 4374462 - DNA, 25 bp, Homo sapien
tgtgcctggaccattcatcccaagt

SEQ ID NO: 4374463 - DNA, 25 bp, Homo sapien
cgtttctggccttggagcactgaat

SEQ ID NO: 4374464 - DNA, 25 bp, Homo sapien
cactgaattccagcatcttcacagc

SEQ ID NO: 4374465 - DNA, 25 bp, Homo sapien
atcttcacagcccaaatggcctccc

SEQ ID NO: 4374466 - DNA, 25 bp, Homo sapien
gtttctggccttggagcactgaatt

SEQ ID NO: 4374467 - DNA, 25 bp, Homo sapien
tcctcttgcataggcactgatcttc

SEQ ID NO: 4374468 - DNA, 25 bp, Homo sapien
ctcttgcataggcactgatcttcca

SEQ ID NO: 4374469 - DNA, 25 bp, Homo sapien
cttgcataggcactgatcttccaaa

SEQ ID NO: 4374470 - DNA, 25 bp, Homo sapien
tttcctcttgcataggcactgatct

SEQ ID NO: 4374471 - DNA, 25 bp, Homo sapien
agtaagctattagtgccctcctggg

SEQ ID NO: 4374472 - DNA, 25 bp, Homo sapien
tgctggacagcctcaataccactga

SEQ ID NO: 4374473 - DNA, 25 bp, Homo sapien
tctagaatccaaggtatggaggttt

SEQ ID NO: 4374474 - DNA, 25 bp, Homo sapien
cagggatctagaatccaaggtatgg

SEQ ID NO: 4374475 - DNA, 25 bp, Homo sapien
taacatctgtcctaaatacagtctc

SEQ ID NO: 4374476 - DNA, 25 bp, Homo sapien
tacagtctcatcatgtttgtatgcc

SEQ ID NO: 4374477 - DNA, 25 bp, Homo sapien
tgtcctaaatacagtctcatcatgt

SEQ ID NO: 4374478 - DNA, 25 bp, Homo sapien
cagtctcatcatgtttgtatgccat

SEQ ID NO: 4374479 - DNA, 25 bp, Homo sapien
tgtcaaaatcttcccatccccaaat

SEQ ID NO: 4374480 - DNA, 25 bp, Homo sapien
tctgatgtcaaaatcttcccatccc

SEQ ID NO: 4374481 - DNA, 25 bp, Homo sapien
ttttctgatgtcaaaatcttcccat

SEQ ID NO: 4374482 - DNA, 25 bp, Homo sapien
caaatcctcccatccccttcttcat

SEQ ID NO: 4374483 - DNA, 25 bp, Homo sapien
tcaccacaggaattatactctgcat

SEQ ID NO: 4374484 - DNA, 25 bp, Homo sapien
tgacatgggttaattgcaaagcaga

SEQ ID NO: 4374485 - DNA, 25 bp, Homo sapien
tctgccccacaggtattctcaatgg

SEQ ID NO: 4374486 - DNA, 25 bp, Homo sapien
tgatattcgcttaacatctttgggc

SEQ ID NO: 4374487 - DNA, 25 bp, Homo sapien
ggtgaagtgcttatcccaaaggcta

SEQ ID NO: 4374488 - DNA, 25 bp, Homo sapien
ttgattttcacggatgaacacttag

SEQ ID NO: 4374489 - DNA, 25 bp, Homo sapien
ttttattgattttcacggatgaaca

SEQ ID NO: 4374490 - DNA, 25 bp, Homo sapien
tattgattttcacggatgaacactt

SEQ ID NO: 4374491 - DNA, 25 bp, Homo sapien
ttattgattttcacggatgaacact

SEQ ID NO: 4374492 - DNA, 25 bp, Homo sapien
aaaccttgctatgaaacctccaggg

SEQ ID NO: 4374493 - DNA, 25 bp, Homo sapien
tactgtacgcatgattaaccactgg

SEQ ID NO: 4374494 - DNA, 25 bp, Homo sapien
gggatcacaccaaggcagaagtgct

SEQ ID NO: 4374495 - DNA, 25 bp, Homo sapien
tcttggctattgaacaggatgactg

SEQ ID NO: 4374496 - DNA, 25 bp, Homo sapien
tctattgctgaacgccgagacagcg

SEQ ID NO: 4374497 - DNA, 25 bp, Homo sapien
gaagcttcgtgccttcccgtggaaa

SEQ ID NO: 4374498 - DNA, 25 bp, Homo sapien
ccctcgcgccgtagaaaagtcagga

SEQ ID NO: 4374499 - DNA, 25 bp, Homo sapien
tatcgtcagagtgcacttccttggg

SEQ ID NO: 4374500 - DNA, 25 bp, Homo sapien
caatcgggccaattgacaggagcgc

SEQ ID NO: 4374501 - DNA, 25 bp, Homo sapien
tagggtttgagctgaactaggcaca

SEQ ID NO: 4374502 - DNA, 25 bp, Homo sapien
gccttcactctagggaggaatccga

SEQ ID NO: 4374503 - DNA, 25 bp, Homo sapien
agtgaactttggtcccagaccccag

SEQ ID NO: 4374504 - DNA, 25 bp, Homo sapien
caggagatagctagaggccagttca

SEQ ID NO: 4374505 - DNA, 25 bp, Homo sapien
caaaggaggcggtgctttgacctca

SEQ ID NO: 4374506 - DNA, 25 bp, Homo sapien
tgcagaggtggctatgcccgcaaag

SEQ ID NO: 4374507 - DNA, 25 bp, Homo sapien
tcctggaggttaggcaaagcttggc

SEQ ID NO: 4374508 - DNA, 25 bp, Homo sapien
gccctctgatctctgggtaggctgt

SEQ ID NO: 4374509 - DNA, 25 bp, Homo sapien
gggttcattgctgcatactctttgt

SEQ ID NO: 4374510 - DNA, 25 bp, Homo sapien
cctctgatctctgggtaggctgtag

SEQ ID NO: 4374511 - DNA, 25 bp, Homo sapien
atctctcaaattggcggtttgtaac

SEQ ID NO: 4374512 - DNA, 25 bp, Homo sapien
agctttcaactggatatcttatccg

SEQ ID NO: 4374513 - DNA, 25 bp, Homo sapien
taccttgtagaaccaactttgccaa

SEQ ID NO: 4374514 - DNA, 25 bp, Homo sapien
tgggtaaacattgagaaagctttca

SEQ ID NO: 4374515 - DNA, 25 bp, Homo sapien
tgctactgtgcctacctaccttgta

SEQ ID NO: 4374516 - DNA, 25 bp, Homo sapien
tatctcgtaaaatctgacttttgtc

SEQ ID NO: 4374517 - DNA, 25 bp, Homo sapien
tcgtaaaatctgacttttgtccttg

SEQ ID NO: 4374518 - DNA, 25 bp, Homo sapien
taaaatctgacttttgtccttgccc

SEQ ID NO: 4374519 - DNA, 25 bp, Homo sapien
ttatctcgtaaaatctgacttttgt

SEQ ID NO: 4374520 - DNA, 25 bp, Homo sapien
tcaaggttcccctcgatttccagct

SEQ ID NO: 4374521 - DNA, 25 bp, Homo sapien
cgctttgttaacacatagccatggg

SEQ ID NO: 4374522 - DNA, 25 bp, Homo sapien
gatacacatgcttgctgccgctttg

SEQ ID NO: 4374523 - DNA, 25 bp, Homo sapien
gcctatgcaaaagtccgcactacag

SEQ ID NO: 4374524 - DNA, 25 bp, Homo sapien
ataggtttatcacgttcaccttttg

SEQ ID NO: 4374525 - DNA, 25 bp, Homo sapien
ctttcgcgtataggtttatcacgtt

SEQ ID NO: 4374526 - DNA, 25 bp, Homo sapien
tcaccttttgttctaaggttgatgg

SEQ ID NO: 4374527 - DNA, 25 bp, Homo sapien
tgttctaaggttgatggaggttgca

SEQ ID NO: 4374528 - DNA, 25 bp, Homo sapien
tgaagtgctgcatctacacatttct

SEQ ID NO: 4374529 - DNA, 25 bp, Homo sapien
caagtttgaaagagccatacagaga

SEQ ID NO: 4374530 - DNA, 25 bp, Homo sapien
gagcaagtttgaaagagccatacag

SEQ ID NO: 4374531 - DNA, 25 bp, Homo sapien
gagggactttgataattgaagtgct

SEQ ID NO: 4374532 - DNA, 25 bp, Homo sapien
tcttcgtgaagcctcacagggctcc

SEQ ID NO: 4374533 - DNA, 25 bp, Homo sapien
tttctctgtagctctttgatctcat

SEQ ID NO: 4374534 - DNA, 25 bp, Homo sapien
ctcttcgtgaagcctcacagggctc

SEQ ID NO: 4374535 - DNA, 25 bp, Homo sapien
ggctcccccaggttttctctgtagc

SEQ ID NO: 4374536 - DNA, 25 bp, Homo sapien
ctgaaagtcaccttatactcctttt

SEQ ID NO: 4374537 - DNA, 25 bp, Homo sapien
aagtcaccttatactccttttctat

SEQ ID NO: 4374538 - DNA, 25 bp, Homo sapien
tgaaagtcaccttatactccttttc

SEQ ID NO: 4374539 - DNA, 25 bp, Homo sapien
agtcaccttatactccttttctatt

SEQ ID NO: 4374540 - DNA, 25 bp, Homo sapien
tttccttcttgcctcactaactccc

SEQ ID NO: 4374541 - DNA, 25 bp, Homo sapien
cttcttgcctcactaactcccttct

SEQ ID NO: 4374542 - DNA, 25 bp, Homo sapien
ccttcttgcctcactaactcccttc

SEQ ID NO: 4374543 - DNA, 25 bp, Homo sapien
tccttcttgcctcactaactccctt

SEQ ID NO: 4374544 - DNA, 25 bp, Homo sapien
ggtttaatattggatgcattggaat

SEQ ID NO: 4374545 - DNA, 25 bp, Homo sapien
ccaagggggtttaatattggatgca

SEQ ID NO: 4374546 - DNA, 25 bp, Homo sapien
ggggtttaatattggatgcattgga

SEQ ID NO: 4374547 - DNA, 25 bp, Homo sapien
agggggtttaatattggatgcattg

SEQ ID NO: 4374548 - DNA, 25 bp, Homo sapien
tacgaccagatagatgttaaatttc

SEQ ID NO: 4374549 - DNA, 25 bp, Homo sapien
taccactgtacgaccagatagatgt

SEQ ID NO: 4374550 - DNA, 25 bp, Homo sapien
tattataccactgtacgaccagata

SEQ ID NO: 4374551 - DNA, 25 bp, Homo sapien
catgcttgtaaatacggtcattttt

SEQ ID NO: 4374552 - DNA, 25 bp, Homo sapien
ggattgtggggtgataggatctcat

SEQ ID NO: 4374553 - DNA, 25 bp, Homo sapien
caggattgtggggtgataggatctc

SEQ ID NO: 4374554 - DNA, 25 bp, Homo sapien
taaacaggattgtggggtgatagga

SEQ ID NO: 4374555 - DNA, 25 bp, Homo sapien
ttaaacaggattgtggggtgatagg

SEQ ID NO: 4374556 - DNA, 25 bp, Homo sapien
tgattgtctatcacctagggctgaa

SEQ ID NO: 4374557 - DNA, 25 bp, Homo sapien
catctaacatgaagctttgacggga

SEQ ID NO: 4374558 - DNA, 25 bp, Homo sapien
ttaccgctgccagtggattccgtgg

SEQ ID NO: 4374559 - DNA, 25 bp, Homo sapien
ccgagagtatgccttgagtaaagca

SEQ ID NO: 4374560 - DNA, 25 bp, Homo sapien
caggcattgctatgggatgctttag

SEQ ID NO: 4374561 - DNA, 25 bp, Homo sapien
gatgctttagtcttggcttgtccgt

SEQ ID NO: 4374562 - DNA, 25 bp, Homo sapien
tagaatcacgtgctgccctcactgc

SEQ ID NO: 4374563 - DNA, 25 bp, Homo sapien
tgttactcaatccctcctgatagat

SEQ ID NO: 4374564 - DNA, 25 bp, Homo sapien
aatacacaaattctcgcccttttca

SEQ ID NO: 4374565 - DNA, 25 bp, Homo sapien
tcttgacattcaatgtaatacacaa

SEQ ID NO: 4374566 - DNA, 25 bp, Homo sapien
aatgtaatacacaaattctcgccct

SEQ ID NO: 4374567 - DNA, 25 bp, Homo sapien
aagactcttgacattcaatgtaata

SEQ ID NO: 4374568 - DNA, 25 bp, Homo sapien
ttttttctaattcagcttgggaaca

SEQ ID NO: 4374569 - DNA, 25 bp, Homo sapien
tctggaaacttgaattatcagtttt

SEQ ID NO: 4374570 - DNA, 25 bp, Homo sapien
tttctaattcagcttgggaacaggg

SEQ ID NO: 4374571 - DNA, 25 bp, Homo sapien
tactgtattgtcagtttctggaaac

SEQ ID NO: 4374572 - DNA, 25 bp, Homo sapien
ttgtttccataggatgtggcacagg

SEQ ID NO: 4374573 - DNA, 25 bp, Homo sapien
agtaggagatgacttaggtcctttt

SEQ ID NO: 4374574 - DNA, 25 bp, Homo sapien
tttgtttccataggatgtggcacag

SEQ ID NO: 4374575 - DNA, 25 bp, Homo sapien
tcaaccatagctgtctagcactgcc

SEQ ID NO: 4374576 - DNA, 25 bp, Homo sapien
ctgccataggttctgcagagagttc

SEQ ID NO: 4374577 - DNA, 25 bp, Homo sapien
accatagctgtctagcactgccata

SEQ ID NO: 4374578 - DNA, 25 bp, Homo sapien
ctagcactgccataggttctgcaga

SEQ ID NO: 4374579 - DNA, 25 bp, Homo sapien
gaggtatctgatgtcgcccattgtt

SEQ ID NO: 4374580 - DNA, 25 bp, Homo sapien
tccagagtgtcagccaagggcagga

SEQ ID NO: 4374581 - DNA, 25 bp, Homo sapien
tctcaaaagtgtctctccacagctc

SEQ ID NO: 4374582 - DNA, 25 bp, Homo sapien
cactttaccacgtctgaaatggcac

SEQ ID NO: 4374583 - DNA, 25 bp, Homo sapien
tagtataagctaatctcacagccac

SEQ ID NO: 4374584 - DNA, 25 bp, Homo sapien
ctagctgtagtataagctaatctca

SEQ ID NO: 4374585 - DNA, 25 bp, Homo sapien
tgtagtataagctaatctcacagcc

SEQ ID NO: 4374586 - DNA, 25 bp, Homo sapien
gctgtagtataagctaatctcacag

SEQ ID NO: 4374587 - DNA, 25 bp, Homo sapien
taaagatttctgagccataataggt

SEQ ID NO: 4374588 - DNA, 25 bp, Homo sapien
gcctctcttaaagatttctgagcca

SEQ ID NO: 4374589 - DNA, 25 bp, Homo sapien
gagccataataggttgttccatgca

SEQ ID NO: 4374590 - DNA, 25 bp, Homo sapien
ttcctctagcgtctttttctctgtg

SEQ ID NO: 4374591 - DNA, 25 bp, Homo sapien
ctagttgctgatcctgcagggtcta

SEQ ID NO: 4374592 - DNA, 25 bp, Homo sapien
tagttgctgatcctgcagggtctaa

SEQ ID NO: 4374593 - DNA, 25 bp, Homo sapien
agttgctgatcctgcagggtctaag

SEQ ID NO: 4374594 - DNA, 25 bp, Homo sapien
catgtccacatactcagtgtaggtt

SEQ ID NO: 4374595 - DNA, 25 bp, Homo sapien
ggttatggtattttgcctgtgtgca

SEQ ID NO: 4374596 - DNA, 25 bp, Homo sapien
tgtgtgcacaagctgattgaccatc

SEQ ID NO: 4374597 - DNA, 25 bp, Homo sapien
cctgtaccacaccagaaaagtactt

SEQ ID NO: 4374598 - DNA, 25 bp, Homo sapien
gctttgaagtgggtcgttgttctag

SEQ ID NO: 4374599 - DNA, 25 bp, Homo sapien
gtgggtcgttgttctagatgtttta

SEQ ID NO: 4374600 - DNA, 25 bp, Homo sapien
tctgtttgggtctctcccacctctt

SEQ ID NO: 4374601 - DNA, 25 bp, Homo sapien
ttatctgtttgggtctctcccacct

SEQ ID NO: 4374602 - DNA, 25 bp, Homo sapien
ggagaaccaagagcttctcacagcg

SEQ ID NO: 4374603 - DNA, 25 bp, Homo sapien
gataattgtgcataaagcagcctct

SEQ ID NO: 4374604 - DNA, 25 bp, Homo sapien
ttatctgccaatggaggagaaccaa

SEQ ID NO: 4374605 - DNA, 25 bp, Homo sapien
gcctcttagaaacaggattatctgc

SEQ ID NO: 4374606 - DNA, 25 bp, Homo sapien
tgctagttgctcataaactagtggg

SEQ ID NO: 4374607 - DNA, 25 bp, Homo sapien
actagatagagacactttgaagtgg

SEQ ID NO: 4374608 - DNA, 25 bp, Homo sapien
tgggaaggcaaataggtgactagat

SEQ ID NO: 4374609 - DNA, 25 bp, Homo sapien
tttgaagtggttgagagctgtaacg

SEQ ID NO: 4374610 - DNA, 25 bp, Homo sapien
gaagtgaccacagtacgcattgcca

SEQ ID NO: 4374611 - DNA, 25 bp, Homo sapien
gggaagctttgctcatgtgttcttt

SEQ ID NO: 4374612 - DNA, 25 bp, Homo sapien
tttagcttccaattacgcagcattg

SEQ ID NO: 4374613 - DNA, 25 bp, Homo sapien
gctgctttaccttgtaaagaagtga

SEQ ID NO: 4374614 - DNA, 25 bp, Homo sapien
catttgccagtagaaaaccagactt

SEQ ID NO: 4374615 - DNA, 25 bp, Homo sapien
tagaagaatcagtcaaccccattgc

SEQ ID NO: 4374616 - DNA, 25 bp, Homo sapien
cgtgattcctcaaagggtccctaga

SEQ ID NO: 4374617 - DNA, 25 bp, Homo sapien
gccattttggcgtgtgaattatgat

SEQ ID NO: 4374618 - DNA, 25 bp, Homo sapien
ggaaataatgggatctctagagtag

SEQ ID NO: 4374619 - DNA, 25 bp, Homo sapien
ctaagagttaacgattgagaaggaa

SEQ ID NO: 4374620 - DNA, 25 bp, Homo sapien
gagttaacgattgagaaggaaataa

SEQ ID NO: 4374621 - DNA, 25 bp, Homo sapien
tctagagtagacactgtcaagagtg

SEQ ID NO: 4374622 - DNA, 25 bp, Homo sapien
acactcttaggaagttactgctgtc

SEQ ID NO: 4374623 - DNA, 25 bp, Homo sapien
gccacactcttaggaagttactgct

SEQ ID NO: 4374624 - DNA, 25 bp, Homo sapien
cacactcttaggaagttactgctgt

SEQ ID NO: 4374625 - DNA, 25 bp, Homo sapien
tgccacactcttaggaagttactgc

SEQ ID NO: 4374626 - DNA, 25 bp, Homo sapien
tcagacaggtcagaagattgtattt

SEQ ID NO: 4374627 - DNA, 25 bp, Homo sapien
tttcctttataagctgctgtcacag

SEQ ID NO: 4374628 - DNA, 25 bp, Homo sapien
tcctttataagctgctgtcacaggc

SEQ ID NO: 4374629 - DNA, 25 bp, Homo sapien
attcagacaggtcagaagattgtat

SEQ ID NO: 4374630 - DNA, 25 bp, Homo sapien
taagggccactgagtggaaaatagg

SEQ ID NO: 4374631 - DNA, 25 bp, Homo sapien
tcccaaacagctttctataagggcc

SEQ ID NO: 4374632 - DNA, 25 bp, Homo sapien
tggaaaatagggcaacaagggttca

SEQ ID NO: 4374633 - DNA, 25 bp, Homo sapien
ggttcatagtagcatcttcctctgc

SEQ ID NO: 4374634 - DNA, 25 bp, Homo sapien
gcttcccatgcagcaagtgtttcat

SEQ ID NO: 4374635 - DNA, 25 bp, Homo sapien
cttcccatgcagcaagtgtttcata

SEQ ID NO: 4374636 - DNA, 25 bp, Homo sapien
gagtctatgacctggcgttccctgt

SEQ ID NO: 4374637 - DNA, 25 bp, Homo sapien
tatgacctggcgttccctgttcctt

SEQ ID NO: 4374638 - DNA, 25 bp, Homo sapien
gatgagtctatgacctggcgttccc

SEQ ID NO: 4374639 - DNA, 25 bp, Homo sapien
catgatgagtctatgacctggcgtt

SEQ ID NO: 4374640 - DNA, 25 bp, Homo sapien
ctggcatctgcgggggcgacccaga

SEQ ID NO: 4374641 - DNA, 25 bp, Homo sapien
tctgcgggggcgacccagagtttcc

SEQ ID NO: 4374642 - DNA, 25 bp, Homo sapien
atctgcgggggcgacccagagtttc

SEQ ID NO: 4374643 - DNA, 25 bp, Homo sapien
gcatctgcgggggcgacccagagtt

SEQ ID NO: 4374644 - DNA, 25 bp, Homo sapien
gagttactgttctcactcaatggga

SEQ ID NO: 4374645 - DNA, 25 bp, Homo sapien
ttcacaccagactgtccagttagct

SEQ ID NO: 4374646 - DNA, 25 bp, Homo sapien
tcttattcagccattgcctttccat

SEQ ID NO: 4374647 - DNA, 25 bp, Homo sapien
aatgggaggccagcggttctcagca

SEQ ID NO: 4374648 - DNA, 25 bp, Homo sapien
ttcatgggcaggaaaactcactgtt

SEQ ID NO: 4374649 - DNA, 25 bp, Homo sapien
catgggcaggaaaactcactgtttg

SEQ ID NO: 4374650 - DNA, 25 bp, Homo sapien
tcatgggcaggaaaactcactgttt

SEQ ID NO: 4374651 - DNA, 25 bp, Homo sapien
tgctaacataggcaggatagtcctg

SEQ ID NO: 4374652 - DNA, 25 bp, Homo sapien
tataactcataaccctgccatctgg

SEQ ID NO: 4374653 - DNA, 25 bp, Homo sapien
gacaaaggcgggtcatcgatcttaa

SEQ ID NO: 4374654 - DNA, 25 bp, Homo sapien
tggagtttcccagcaacaagcagtt

SEQ ID NO: 4374655 - DNA, 25 bp, Homo sapien
cactgcgtcacctgtgagtggtcag

SEQ ID NO: 4374656 - DNA, 25 bp, Homo sapien
tttgtaacagtggacaggacagacc

SEQ ID NO: 4374657 - DNA, 25 bp, Homo sapien
agtggcaactgcctgcacagcagag

SEQ ID NO: 4374658 - DNA, 25 bp, Homo sapien
tagactttgtataccacctgaccag

SEQ ID NO: 4374659 - DNA, 25 bp, Homo sapien
tcaggacattctgactcctaagagt

SEQ ID NO: 4374660 - DNA, 25 bp, Homo sapien
acagcccatagccaactttctttat

SEQ ID NO: 4374661 - DNA, 25 bp, Homo sapien
caccaatggtgtcagcactttacag

SEQ ID NO: 4374662 - DNA, 25 bp, Homo sapien
caggcggctgagtttgcttggaaat

SEQ ID NO: 4374663 - DNA, 25 bp, Homo sapien
cattcacgttccaaatcgtggacag

SEQ ID NO: 4374664 - DNA, 25 bp, Homo sapien
ttcacgttccaaatcgtggacagta

SEQ ID NO: 4374665 - DNA, 25 bp, Homo sapien
tcacgttccaaatcgtggacagtaa

SEQ ID NO: 4374666 - DNA, 25 bp, Homo sapien
cacgttccaaatcgtggacagtaaa

SEQ ID NO: 4374667 - DNA, 25 bp, Homo sapien
gcagctgtgcaagggtgcagcagta

SEQ ID NO: 4374668 - DNA, 25 bp, Homo sapien
ctgtgcaagggtgcagcagtaggct

SEQ ID NO: 4374669 - DNA, 25 bp, Homo sapien
gcctccacccaagtgggccagcagc

SEQ ID NO: 4374670 - DNA, 25 bp, Homo sapien
ctctggggacaaggataggggggtg

SEQ ID NO: 4374671 - DNA, 25 bp, Homo sapien
ggcgaaacctcattactcttggaag

SEQ ID NO: 4374672 - DNA, 25 bp, Homo sapien
tatcctgctgatgttgagacagtgg

SEQ ID NO: 4374673 - DNA, 25 bp, Homo sapien
gtcactcaagatgcatggcgtgtca

SEQ ID NO: 4374674 - DNA, 25 bp, Homo sapien
tatatggcagtgcacggtcactcaa

SEQ ID NO: 4374675 - DNA, 25 bp, Homo sapien
tttgtgccaggttcataaagtaaac

SEQ ID NO: 4374676 - DNA, 25 bp, Homo sapien
tgtcctctctcctcgttcaaatggg

SEQ ID NO: 4374677 - DNA, 25 bp, Homo sapien
gcttcattagtgagagatgtgtaca

SEQ ID NO: 4374678 - DNA, 25 bp, Homo sapien
ttcagtgagtaagcagtaaaaggca

SEQ ID NO: 4374679 - DNA, 25 bp, Homo sapien
actaggctatgacattaaaacggct

SEQ ID NO: 4374680 - DNA, 25 bp, Homo sapien
agaacgtgactcctatatggatgga

SEQ ID NO: 4374681 - DNA, 25 bp, Homo sapien
gattaacaagggcatagatcgattc

SEQ ID NO: 4374682 - DNA, 25 bp, Homo sapien
cagacacgtgagtaatgcactaggc

SEQ ID NO: 4374683 - DNA, 25 bp, Homo sapien
tgatatatcaccacgtctatgaaga

SEQ ID NO: 4374684 - DNA, 25 bp, Homo sapien
gatgagaaactcataacagcagcag

SEQ ID NO: 4374685 - DNA, 25 bp, Homo sapien
tatgagtattacaagagctgactac

SEQ ID NO: 4374686 - DNA, 25 bp, Homo sapien
taactggattaggtctgagccctgg

SEQ ID NO: 4374687 - DNA, 25 bp, Homo sapien
aagagattactgatatgcaataatg

SEQ ID NO: 4374688 - DNA, 25 bp, Homo sapien
gcaataatgacctatgactttacat

SEQ ID NO: 4374689 - DNA, 25 bp, Homo sapien
tatcttgtattgaaatcgtcaaaac

SEQ ID NO: 4374690 - DNA, 25 bp, Homo sapien
tgtttgcatgtaaagaatgattcac

SEQ ID NO: 4374691 - DNA, 25 bp, Homo sapien
tgaaatactgcaacatcttgaagta

SEQ ID NO: 4374692 - DNA, 25 bp, Homo sapien
tgtgaaatactgcaacatcttgaag

SEQ ID NO: 4374693 - DNA, 25 bp, Homo sapien
ctgtgaaatactgcaacatcttgaa

SEQ ID NO: 4374694 - DNA, 25 bp, Homo sapien
gtgaaatactgcaacatcttgaagt

SEQ ID NO: 4374695 - DNA, 25 bp, Homo sapien
tatcatctttgaagggcctgactaa

SEQ ID NO: 4374696 - DNA, 25 bp, Homo sapien
tctagtctacagaatgacatgtcca

SEQ ID NO: 4374697 - DNA, 25 bp, Homo sapien
tacagcctagtgagcttataactca

SEQ ID NO: 4374698 - DNA, 25 bp, Homo sapien
catgagtttcagttcagtgtaagcc

SEQ ID NO: 4374699 - DNA, 25 bp, Homo sapien
taataatggcatgtggtgttcctta

SEQ ID NO: 4374700 - DNA, 25 bp, Homo sapien
ttaataatggcatgtggtgttcctt

SEQ ID NO: 4374701 - DNA, 25 bp, Homo sapien
ctgccaaaaagtgatgatctccttg

SEQ ID NO: 4374702 - DNA, 25 bp, Homo sapien
gccaaaaagtgatgatctccttgga

SEQ ID NO: 4374703 - DNA, 25 bp, Homo sapien
gggctgcaatcacacgtctcagttg

SEQ ID NO: 4374704 - DNA, 25 bp, Homo sapien
gtctcagttgacagacatccaaatg

SEQ ID NO: 4374705 - DNA, 25 bp, Homo sapien
gaaggtgttcatcctctaaggacaa

SEQ ID NO: 4374706 - DNA, 25 bp, Homo sapien
ggaacaccttgaaaggatactcctg

SEQ ID NO: 4374707 - DNA, 25 bp, Homo sapien
gaggataacctgtgaaaaacttctc

SEQ ID NO: 4374708 - DNA, 25 bp, Homo sapien
cactgcagtatggagggaacacctt

SEQ ID NO: 4374709 - DNA, 25 bp, Homo sapien
cagtttgaatgctctcgaagtgtga

SEQ ID NO: 4374710 - DNA, 25 bp, Homo sapien
ggctgaggtaccacatcacaaagaa

SEQ ID NO: 4374711 - DNA, 25 bp, Homo sapien
aaagtcttgtctgtaaatcggctca

SEQ ID NO: 4374712 - DNA, 25 bp, Homo sapien
catagaagtacatccagttcacgcg

SEQ ID NO: 4374713 - DNA, 25 bp, Homo sapien
ggacagtccagagagccgaggccat

SEQ ID NO: 4374714 - DNA, 25 bp, Homo sapien
ctcagaagcacgcgagccgaaggtt

SEQ ID NO: 4374715 - DNA, 25 bp, Homo sapien
agctcagaagcacgcgagccgaagg

SEQ ID NO: 4374716 - DNA, 25 bp, Homo sapien
gcagctcagaagcacgcgagccgaa

SEQ ID NO: 4374717 - DNA, 25 bp, Homo sapien
agcagctcagaagcacgcgagccga

SEQ ID NO: 4374718 - DNA, 25 bp, Homo sapien
gattgggttaatattccacaccgaa

SEQ ID NO: 4374719 - DNA, 25 bp, Homo sapien
ggaagagttatcaaagattgggtta

SEQ ID NO: 4374720 - DNA, 25 bp, Homo sapien
ttatcaaagattgggttaatattcc

SEQ ID NO: 4374721 - DNA, 25 bp, Homo sapien
taatattccacaccgaaaacacatt

SEQ ID NO: 4374722 - DNA, 25 bp, Homo sapien
agaactgcttaaacctgagagacgg

SEQ ID NO: 4374723 - DNA, 25 bp, Homo sapien
aactgcttaaacctgagagacggag

SEQ ID NO: 4374724 - DNA, 25 bp, Homo sapien
gcttaaacctgagagacggagattg

SEQ ID NO: 4374725 - DNA, 25 bp, Homo sapien
actgcttaaacctgagagacggaga

SEQ ID NO: 4374726 - DNA, 25 bp, Homo sapien
gattaaccagtcagcacagggcctg

SEQ ID NO: 4374727 - DNA, 25 bp, Homo sapien
tcaaactggccagagatctcggatt

SEQ ID NO: 4374728 - DNA, 25 bp, Homo sapien
ggtccaggaccaagagcacttaatg

SEQ ID NO: 4374729 - DNA, 25 bp, Homo sapien
taaataagggctcaattgaagtggc

SEQ ID NO: 4374730 - DNA, 25 bp, Homo sapien
tatgaagatctgtcaagtcttctgg

SEQ ID NO: 4374731 - DNA, 25 bp, Homo sapien
tccatgggtttatataagcccctct

SEQ ID NO: 4374732 - DNA, 25 bp, Homo sapien
tatttcaaccacaatggcttccgtt

SEQ ID NO: 4374733 - DNA, 25 bp, Homo sapien
acaatgccgggcaacaacgttcaca

SEQ ID NO: 4374734 - DNA, 25 bp, Homo sapien
gcacgctagagtcaggatcatccat

SEQ ID NO: 4374735 - DNA, 25 bp, Homo sapien
tagtaggctctctgtaatatttgca

SEQ ID NO: 4374736 - DNA, 25 bp, Homo sapien
cagttaaattttaggtccaagcacg

SEQ ID NO: 4374737 - DNA, 25 bp, Homo sapien
tgctatatgtccagtgtctaacaca

SEQ ID NO: 4374738 - DNA, 25 bp, Homo sapien
atcagtaagtcttctcctagagtcc

SEQ ID NO: 4374739 - DNA, 25 bp, Homo sapien
gtaagtcttctcctagagtccaagg

SEQ ID NO: 4374740 - DNA, 25 bp, Homo sapien
cagtaagtcttctcctagagtccaa

SEQ ID NO: 4374741 - DNA, 25 bp, Homo sapien
taagtcttctcctagagtccaaggt

SEQ ID NO: 4374742 - DNA, 25 bp, Homo sapien
ctcctgagattcctgggcagggagc

SEQ ID NO: 4374743 - DNA, 25 bp, Homo sapien
cagggagcaaagaatgcagcagaag

SEQ ID NO: 4374744 - DNA, 25 bp, Homo sapien
ttcctgggcagggagcaaagaatgc

SEQ ID NO: 4374745 - DNA, 25 bp, Homo sapien
cacatctaatctcacagcctcctga

SEQ ID NO: 4374746 - DNA, 25 bp, Homo sapien
tcaaccgggtccagggagctaagaa

SEQ ID NO: 4374747 - DNA, 25 bp, Homo sapien
agagccaacaggtcaaccgggtcca

SEQ ID NO: 4374748 - DNA, 25 bp, Homo sapien
gagagcaccacgtgatagagcagcc

SEQ ID NO: 4374749 - DNA, 25 bp, Homo sapien
tttacactcggggtgagtagtcgga

SEQ ID NO: 4374750 - DNA, 25 bp, Homo sapien
agtcctcgctactctgcaggcttag

SEQ ID NO: 4374751 - DNA, 25 bp, Homo sapien
cctcgctactctgcaggcttaggta

SEQ ID NO: 4374752 - DNA, 25 bp, Homo sapien
ctgaagtcctcgctactctgcaggc

SEQ ID NO: 4374753 - DNA, 25 bp, Homo sapien
cgctactctgcaggcttaggtagga

SEQ ID NO: 4374754 - DNA, 25 bp, Homo sapien
tctgtattccatgcttaattaaaac

SEQ ID NO: 4374755 - DNA, 25 bp, Homo sapien
tgcttaattaaaacactcagatctg

SEQ ID NO: 4374756 - DNA, 25 bp, Homo sapien
ttccatgcttaattaaaacactcag

SEQ ID NO: 4374757 - DNA, 25 bp, Homo sapien
ttaaaacactcagatctgttgtgaa

SEQ ID NO: 4374758 - DNA, 25 bp, Homo sapien
gatagcttttcccacaacgcagcca

SEQ ID NO: 4374759 - DNA, 25 bp, Homo sapien
ttgatagcttttcccacaacgcagc

SEQ ID NO: 4374760 - DNA, 25 bp, Homo sapien
aaaagacatggtttggcaatttctt

SEQ ID NO: 4374761 - DNA, 25 bp, Homo sapien
tccttgatagcttttcccacaacgc

SEQ ID NO: 4374762 - DNA, 25 bp, Homo sapien
cctgtagccctagccccgtgggatt

SEQ ID NO: 4374763 - DNA, 25 bp, Homo sapien
tgagactccgttgcacctctaggaa

SEQ ID NO: 4374764 - DNA, 25 bp, Homo sapien
aagcgttcgccgcaggcctgttagg

SEQ ID NO: 4374765 - DNA, 25 bp, Homo sapien
tatgttccttaacactgcctgtagg

SEQ ID NO: 4374766 - DNA, 25 bp, Homo sapien
gtcgctacccggatttgacggtggc

SEQ ID NO: 4374767 - DNA, 25 bp, Homo sapien
ggcgacgcaaggcaggtattgcacc

SEQ ID NO: 4374768 - DNA, 25 bp, Homo sapien
ctcttcctcggcaccgctgcaaacg

SEQ ID NO: 4374769 - DNA, 25 bp, Homo sapien
ttgacggtggctggagcggcacggg

SEQ ID NO: 4374770 - DNA, 25 bp, Homo sapien
ctggggcaaggcaaggtggacaacc

SEQ ID NO: 4374771 - DNA, 25 bp, Homo sapien
gtctaggcgtttccgaggacggcgc

SEQ ID NO: 4374772 - DNA, 25 bp, Homo sapien
agctgctcgtcaccgagacccgaga

SEQ ID NO: 4374773 - DNA, 25 bp, Homo sapien
gcgggtccggtggctataccctcca

SEQ ID NO: 4374774 - DNA, 25 bp, Homo sapien
gtggcaggactcaaccgcctcggag

SEQ ID NO: 4374775 - DNA, 25 bp, Homo sapien
gcacccagctcggaagcgggaaggt

SEQ ID NO: 4374776 - DNA, 25 bp, Homo sapien
gcgcacccagctcggaagcgggaag

SEQ ID NO: 4374777 - DNA, 25 bp, Homo sapien
gcgcgcacccagctcggaagcggga

SEQ ID NO: 4374778 - DNA, 25 bp, Homo sapien
cacccagctcggaagcgggaaggtg

SEQ ID NO: 4374779 - DNA, 25 bp, Homo sapien
ggccgggcgcgcgcagaccacgcgc

SEQ ID NO: 4374780 - DNA, 25 bp, Homo sapien
gcctccccgcatccgcacgcacggc

SEQ ID NO: 4374781 - DNA, 25 bp, Homo sapien
cacacacgcagcctccccgcatccg

SEQ ID NO: 4374782 - DNA, 25 bp, Homo sapien
cgcatccgcacgcacggccgggcgc

SEQ ID NO: 4374783 - DNA, 25 bp, Homo sapien
aggccatctcccagcggtggcaaca

SEQ ID NO: 4374784 - DNA, 25 bp, Homo sapien
catctcccagcggtggcaacatgaa

SEQ ID NO: 4374785 - DNA, 25 bp, Homo sapien
tctcccagcggtggcaacatgaagc

SEQ ID NO: 4374786 - DNA, 25 bp, Homo sapien
tcccagcggtggcaacatgaagcca

SEQ ID NO: 4374787 - DNA, 25 bp, Homo sapien
cggaggtggcggccctgatggcggc

SEQ ID NO: 4374788 - DNA, 25 bp, Homo sapien
aggtggcggccctgatggcggcgag

SEQ ID NO: 4374789 - DNA, 25 bp, Homo sapien
ggcggaggtggcggccctgatggcg

SEQ ID NO: 4374790 - DNA, 25 bp, Homo sapien
gaggtggcggccctgatggcggcga

SEQ ID NO: 4374791 - DNA, 25 bp, Homo sapien
agccaccgccgcccacaaaaggatt

SEQ ID NO: 4374792 - DNA, 25 bp, Homo sapien
cagccaccgccgcccacaaaaggat

SEQ ID NO: 4374793 - DNA, 25 bp, Homo sapien
caccccgtgcgccaagcgcagccac

SEQ ID NO: 4374794 - DNA, 25 bp, Homo sapien
cccgtgcgccaagcgcagccaccgc

SEQ ID NO: 4374795 - DNA, 25 bp, Homo sapien
acagactttggtggcccatagtagc

SEQ ID NO: 4374796 - DNA, 25 bp, Homo sapien
aaaagctgagtctgtgagggagatc

SEQ ID NO: 4374797 - DNA, 25 bp, Homo sapien
agaagagaccacagtaccaccagac

SEQ ID NO: 4374798 - DNA, 25 bp, Homo sapien
ctgactgcgtggctatgtcactaaa

SEQ ID NO: 4374799 - DNA, 25 bp, Homo sapien
acttttttctagtaacatagcctat

SEQ ID NO: 4374800 - DNA, 25 bp, Homo sapien
taattgcgcatacaagaagataatc

SEQ ID NO: 4374801 - DNA, 25 bp, Homo sapien
tgttgtatacaagctaaattaaagt

SEQ ID NO: 4374802 - DNA, 25 bp, Homo sapien
gtgtgtacatttaattgcgcataca

SEQ ID NO: 4374803 - DNA, 25 bp, Homo sapien
tagtgagccgttaccaattgcaaag

SEQ ID NO: 4374804 - DNA, 25 bp, Homo sapien
cagccccattcacagtcatggaata

SEQ ID NO: 4374805 - DNA, 25 bp, Homo sapien
tcacagtcatggaatatgttcttag

SEQ ID NO: 4374806 - DNA, 25 bp, Homo sapien
attatgatatagagaaagacagtcc

SEQ ID NO: 4374807 - DNA, 25 bp, Homo sapien
gactcatctttcctgtcctcagtgc

SEQ ID NO: 4374808 - DNA, 25 bp, Homo sapien
ccagccaagcttctgactcatcttt

SEQ ID NO: 4374809 - DNA, 25 bp, Homo sapien
tcagtgcctcctgatctgtgagctc

SEQ ID NO: 4374810 - DNA, 25 bp, Homo sapien
cctcctgatctgtgagctcttggtt

SEQ ID NO: 4374811 - DNA, 25 bp, Homo sapien
ctaggaaggtgataatttgccattt

SEQ ID NO: 4374812 - DNA, 25 bp, Homo sapien
gaaggtgataatttgccattttcca

SEQ ID NO: 4374813 - DNA, 25 bp, Homo sapien
aggaaggtgataatttgccattttc

SEQ ID NO: 4374814 - DNA, 25 bp, Homo sapien
aaggtgataatttgccattttccat

SEQ ID NO: 4374815 - DNA, 25 bp, Homo sapien
gccttgtagtggatggaaaacttac

SEQ ID NO: 4374816 - DNA, 25 bp, Homo sapien
gagccaaagcctatcattgtagaag

SEQ ID NO: 4374817 - DNA, 25 bp, Homo sapien
gcagatagtctggactctggagcca

SEQ ID NO: 4374818 - DNA, 25 bp, Homo sapien
tgctccagagccttgtagtggatgg

SEQ ID NO: 4374819 - DNA, 25 bp, Homo sapien
gatgaggaaaatttagtttgttggc

SEQ ID NO: 4374820 - DNA, 25 bp, Homo sapien
ctgcatcataagatgaggaaaattt

SEQ ID NO: 4374821 - DNA, 25 bp, Homo sapien
tgttctgcatcataagatgaggaaa

SEQ ID NO: 4374822 - DNA, 25 bp, Homo sapien
cataagatgaggaaaatttagtttg

SEQ ID NO: 4374823 - DNA, 25 bp, Homo sapien
ggagaagcacggagcgtgaagtcat

SEQ ID NO: 4374824 - DNA, 25 bp, Homo sapien
gggagaagcacggagcgtgaagtca

SEQ ID NO: 4374825 - DNA, 25 bp, Homo sapien
gaagggagtaagaaaccatggcagg

SEQ ID NO: 4374826 - DNA, 25 bp, Homo sapien
aagggagtaagaaaccatggcagga

SEQ ID NO: 4374827 - DNA, 25 bp, Homo sapien
gagtaagaaaccatggcaggaggcc

SEQ ID NO: 4374828 - DNA, 25 bp, Homo sapien
gggagtaagaaaccatggcaggagg

SEQ ID NO: 4374829 - DNA, 25 bp, Homo sapien
actcgagaatccctccgatgggcca

SEQ ID NO: 4374830 - DNA, 25 bp, Homo sapien
tacacaactgaggatagtaagtttg

SEQ ID NO: 4374831 - DNA, 25 bp, Homo sapien
tgggccacatcagcagatacacaac

SEQ ID NO: 4374832 - DNA, 25 bp, Homo sapien
tagaccttttgaaggtcaactgccc

SEQ ID NO: 4374833 - DNA, 25 bp, Homo sapien
tctaaatcccggagacctggtgtta

SEQ ID NO: 4374834 - DNA, 25 bp, Homo sapien
taaactgccaattaggattgcaaat

SEQ ID NO: 4374835 - DNA, 25 bp, Homo sapien
agaagacatctgaaatgaatacaga

SEQ ID NO: 4374836 - DNA, 25 bp, Homo sapien
gcaaattttctttgggaaccagcaa

SEQ ID NO: 4374837 - DNA, 25 bp, Homo sapien
ttcacatagtatagtactctggatg

SEQ ID NO: 4374838 - DNA, 25 bp, Homo sapien
cattcaggaggcaagtcaatctttt

SEQ ID NO: 4374839 - DNA, 25 bp, Homo sapien
caaaaattgtgattccttgaacgtt

SEQ ID NO: 4374840 - DNA, 25 bp, Homo sapien
tcagtttatcactggacattcagga

SEQ ID NO: 4374841 - DNA, 25 bp, Homo sapien
gcaagttctcattggtggtctgtgt

SEQ ID NO: 4374842 - DNA, 25 bp, Homo sapien
aagccatatcctgtctttggtggtg

SEQ ID NO: 4374843 - DNA, 25 bp, Homo sapien
aggaatggcttgtcctagttcttca

SEQ ID NO: 4374844 - DNA, 25 bp, Homo sapien
tgttaaaattgtggatctaaaagcc

SEQ ID NO: 4374845 - DNA, 25 bp, Homo sapien
gaagtccccatggaatgttactaga

SEQ ID NO: 4374846 - DNA, 25 bp, Homo sapien
taagagagtgctgtagaagtcccca

SEQ ID NO: 4374847 - DNA, 25 bp, Homo sapien
tggaccagaataatgctaatgggct

SEQ ID NO: 4374848 - DNA, 25 bp, Homo sapien
taatgggctgactactcaacaaagg

SEQ ID NO: 4374849 - DNA, 25 bp, Homo sapien
aaaccttagcaaaatcggcatagaa

SEQ ID NO: 4374850 - DNA, 25 bp, Homo sapien
catagaaagggcacaccttaaagta

SEQ ID NO: 4374851 - DNA, 25 bp, Homo sapien
agcaaaatcggcatagaaagggcac

SEQ ID NO: 4374852 - DNA, 25 bp, Homo sapien
ccttagcaaaatcggcatagaaagg

SEQ ID NO: 4374853 - DNA, 25 bp, Homo sapien
catctgtgatagaggactgttgtca

SEQ ID NO: 4374854 - DNA, 25 bp, Homo sapien
tccaggctgagctacatgagccatt

SEQ ID NO: 4374855 - DNA, 25 bp, Homo sapien
gcagaccttgggtgagagctaaaat

SEQ ID NO: 4374856 - DNA, 25 bp, Homo sapien
ttgagggagccctagaactgaccag

SEQ ID NO: 4374857 - DNA, 25 bp, Homo sapien
agaggtgaatgaacatccaggggaa

SEQ ID NO: 4374858 - DNA, 25 bp, Homo sapien
gagaggtgaatgaacatccagggga

SEQ ID NO: 4374859 - DNA, 25 bp, Homo sapien
tgtcttgcctgttatttttattatt

SEQ ID NO: 4374860 - DNA, 25 bp, Homo sapien
cattctttaattttgaaaagacaca

SEQ ID NO: 4374861 - DNA, 25 bp, Homo sapien
ttgacattctttaattttgaaaaga

SEQ ID NO: 4374862 - DNA, 25 bp, Homo sapien
ttatttgacattctttaattttgaa

SEQ ID NO: 4374863 - DNA, 25 bp, Homo sapien
tcacatcttggtttgatatggctta

SEQ ID NO: 4374864 - DNA, 25 bp, Homo sapien
tcctgtggcgactctctgtggtact

SEQ ID NO: 4374865 - DNA, 25 bp, Homo sapien
agtcaaatgtcctgtggcgactctc

SEQ ID NO: 4374866 - DNA, 25 bp, Homo sapien
tggacttgattaagatctggctctt

SEQ ID NO: 4374867 - DNA, 25 bp, Homo sapien
tttggtcaagtctgaagcttctaca

SEQ ID NO: 4374868 - DNA, 25 bp, Homo sapien
gcggtggactcccaggtgcaggctg

SEQ ID NO: 4374869 - DNA, 25 bp, Homo sapien
tacagtggagggagtgtatggcggt

SEQ ID NO: 4374870 - DNA, 25 bp, Homo sapien
ggtgcaggctgtataaactttggtc

SEQ ID NO: 4374871 - DNA, 25 bp, Homo sapien
taccaggactttaaacctgccaatg

SEQ ID NO: 4374872 - DNA, 25 bp, Homo sapien
tgagattgaaagaaggtaccaggac

SEQ ID NO: 4374873 - DNA, 25 bp, Homo sapien
tcagatgactccatcacctttacac

SEQ ID NO: 4374874 - DNA, 25 bp, Homo sapien
aggactttaaacctgccaatgaatc

SEQ ID NO: 4374875 - DNA, 25 bp, Homo sapien
tactatctacccatactgtgttgcc

SEQ ID NO: 4374876 - DNA, 25 bp, Homo sapien
tgtaagtctcttccgtgacacccga

SEQ ID NO: 4374877 - DNA, 25 bp, Homo sapien
ctctgggtaagcaagccctcttact

SEQ ID NO: 4374878 - DNA, 25 bp, Homo sapien
tgatgcaggcaggaacctgtaagtc

SEQ ID NO: 4374879 - DNA, 25 bp, Homo sapien
tccactgcctgagtctgagacagca

SEQ ID NO: 4374880 - DNA, 25 bp, Homo sapien
cagcttgaccagaggggaagagccc

SEQ ID NO: 4374881 - DNA, 25 bp, Homo sapien
gaatgtcttccactgcctgagtctg

SEQ ID NO: 4374882 - DNA, 25 bp, Homo sapien
tgaggtctgaggttgtgtttcctcc

SEQ ID NO: 4374883 - DNA, 25 bp, Homo sapien
ggaaggctctatcccaggaaaagta

SEQ ID NO: 4374884 - DNA, 25 bp, Homo sapien
gaaggctctatcccaggaaaagtac

SEQ ID NO: 4374885 - DNA, 25 bp, Homo sapien
catgggtgtcgtttttagtcgggct

SEQ ID NO: 4374886 - DNA, 25 bp, Homo sapien
gcacgatgcccaaggtagggaacaa

SEQ ID NO: 4374887 - DNA, 25 bp, Homo sapien
cattactcttaaacacacaggctcc

SEQ ID NO: 4374888 - DNA, 25 bp, Homo sapien
taagggcactatgttgttatcagca

SEQ ID NO: 4374889 - DNA, 25 bp, Homo sapien
tcagcaaagcctatccactgcacca

SEQ ID NO: 4374890 - DNA, 25 bp, Homo sapien
cattgctcacacagtaggtaatgac

SEQ ID NO: 4374891 - DNA, 25 bp, Homo sapien
tttaggtttgtgattggtttggcca

SEQ ID NO: 4374892 - DNA, 25 bp, Homo sapien
taggtttgtgattggtttggccaaa

SEQ ID NO: 4374893 - DNA, 25 bp, Homo sapien
aggtttgtgattggtttggccaaag

SEQ ID NO: 4374894 - DNA, 25 bp, Homo sapien
ttaggtttgtgattggtttggccaa

SEQ ID NO: 4374895 - DNA, 25 bp, Homo sapien
aggccatcaggcaagcttctgtgca

SEQ ID NO: 4374896 - DNA, 25 bp, Homo sapien
aagaggtcatctttagtcattatca

SEQ ID NO: 4374897 - DNA, 25 bp, Homo sapien
tcattctgtggctctcttaaggcca

SEQ ID NO: 4374898 - DNA, 25 bp, Homo sapien
tcattatcaagtcgtccaggtttac

SEQ ID NO: 4374899 - DNA, 25 bp, Homo sapien
aatcccgatcttcctgtcagtgcag

SEQ ID NO: 4374900 - DNA, 25 bp, Homo sapien
gcttgtatgcatctgaaagatgctc

SEQ ID NO: 4374901 - DNA, 25 bp, Homo sapien
catgcttgtatgcatctgaaagatg

SEQ ID NO: 4374902 - DNA, 25 bp, Homo sapien
cattagggaggggaatcccgatctt

SEQ ID NO: 4374903 - DNA, 25 bp, Homo sapien
atttctgtttggtttgcggccatga

SEQ ID NO: 4374904 - DNA, 25 bp, Homo sapien
acacagtggatggtgcgtgttcttc

SEQ ID NO: 4374905 - DNA, 25 bp, Homo sapien
aaacacagtggatggtgcgtgttct

SEQ ID NO: 4374906 - DNA, 25 bp, Homo sapien
taaacacagtggatggtgcgtgttc

SEQ ID NO: 4374907 - DNA, 25 bp, Homo sapien
aataaacacagtggatggtgcgtgt

SEQ ID NO: 4374908 - DNA, 25 bp, Homo sapien
ccagtatgagtttgagcccatcacc

SEQ ID NO: 4374909 - DNA, 25 bp, Homo sapien
caattccagtatgagtttgagccca

SEQ ID NO: 4374910 - DNA, 25 bp, Homo sapien
tgagtttgagcccatcacccaggta

SEQ ID NO: 4374911 - DNA, 25 bp, Homo sapien
ttgaaacaattccagtatgagtttg

SEQ ID NO: 4374912 - DNA, 25 bp, Homo sapien
atattcatgttgggtgagaggaggc

SEQ ID NO: 4374913 - DNA, 25 bp, Homo sapien
tattcatgttgggtgagaggaggct

SEQ ID NO: 4374914 - DNA, 25 bp, Homo sapien
attcatgttgggtgagaggaggctt

SEQ ID NO: 4374915 - DNA, 25 bp, Homo sapien
catcactgtgaataggggatccgtg

SEQ ID NO: 4374916 - DNA, 25 bp, Homo sapien
ctgtgaataggggatccgtgtcatc

SEQ ID NO: 4374917 - DNA, 25 bp, Homo sapien
cctggggagtcttttccaccttcat

SEQ ID NO: 4374918 - DNA, 25 bp, Homo sapien
tcagcacccctatcactgcatgcac

SEQ ID NO: 4374919 - DNA, 25 bp, Homo sapien
accgagcagccaggttccagcagat

SEQ ID NO: 4374920 - DNA, 25 bp, Homo sapien
ttgtggctgagcagaaccgagcagc

SEQ ID NO: 4374921 - DNA, 25 bp, Homo sapien
cttgtggctgagcagaaccgagcag

SEQ ID NO: 4374922 - DNA, 25 bp, Homo sapien
cagccaggttccagcagatccttgt

SEQ ID NO: 4374923 - DNA, 25 bp, Homo sapien
caaaggagccactatatcaaagcat

SEQ ID NO: 4374924 - DNA, 25 bp, Homo sapien
tccggtggcccaatacatgcttttt

SEQ ID NO: 4374925 - DNA, 25 bp, Homo sapien
tctccggtctaaagcacaatgtagc

SEQ ID NO: 4374926 - DNA, 25 bp, Homo sapien
taaagtcactgtattatctccggtc

SEQ ID NO: 4374927 - DNA, 25 bp, Homo sapien
aattagaaattgtactgtgatatcc

SEQ ID NO: 4374928 - DNA, 25 bp, Homo sapien
tcaattagaaattgtactgtgatat

SEQ ID NO: 4374929 - DNA, 25 bp, Homo sapien
attagaaattgtactgtgatatcca

SEQ ID NO: 4374930 - DNA, 25 bp, Homo sapien
ttagaaattgtactgtgatatccac

SEQ ID NO: 4374931 - DNA, 25 bp, Homo sapien
tgttaaacatagatcgctcccaggg

SEQ ID NO: 4374932 - DNA, 25 bp, Homo sapien
caagccaggcgaatgtggattggaa

SEQ ID NO: 4374933 - DNA, 25 bp, Homo sapien
tagtagagccaggagaaatattcct

SEQ ID NO: 4374934 - DNA, 25 bp, Homo sapien
taaagacataggcagtgtataccac

SEQ ID NO: 4374935 - DNA, 25 bp, Homo sapien
tccttcaagctgcagtaagtttgtc

SEQ ID NO: 4374936 - DNA, 25 bp, Homo sapien
ggttggctccttcaagctgcagtaa

SEQ ID NO: 4374937 - DNA, 25 bp, Homo sapien
ttggctccttcaagctgcagtaagt

SEQ ID NO: 4374938 - DNA, 25 bp, Homo sapien
gctccttcaagctgcagtaagtttg

SEQ ID NO: 4374939 - DNA, 25 bp, Homo sapien
tattctcaaaggcatcacagtcagg

SEQ ID NO: 4374940 - DNA, 25 bp, Homo sapien
gtaacaaacatgcagtgatcgaggg

SEQ ID NO: 4374941 - DNA, 25 bp, Homo sapien
taatggcttcggaaagactttattc

SEQ ID NO: 4374942 - DNA, 25 bp, Homo sapien
tgtggctccttctgaatattaatgg

SEQ ID NO: 4374943 - DNA, 25 bp, Homo sapien
gatcctgtgtgggttagttctcctc

SEQ ID NO: 4374944 - DNA, 25 bp, Homo sapien
gtgtgggttagttctcctctctggg

SEQ ID NO: 4374945 - DNA, 25 bp, Homo sapien
cttcacgaaatgatcctgtgtgggt

SEQ ID NO: 4374946 - DNA, 25 bp, Homo sapien
ttcagccttgctccttcacgaaatg

SEQ ID NO: 4374947 - DNA, 25 bp, Homo sapien
gcatcacaattgtttgcagttctta

SEQ ID NO: 4374948 - DNA, 25 bp, Homo sapien
ggaacatcatcacactcaactggag

SEQ ID NO: 4374949 - DNA, 25 bp, Homo sapien
ctgtagacgaggatctaggttgaga

SEQ ID NO: 4374950 - DNA, 25 bp, Homo sapien
tatattgtggttcaagcatcacaat

SEQ ID NO: 4374951 - DNA, 25 bp, Homo sapien
tttttggcaggtgacttgtgtgtac

SEQ ID NO: 4374952 - DNA, 25 bp, Homo sapien
ggcaggtgacttgtgtgtactattg

SEQ ID NO: 4374953 - DNA, 25 bp, Homo sapien
gcaggtgacttgtgtgtactattgc

SEQ ID NO: 4374954 - DNA, 25 bp, Homo sapien
tttggcaggtgacttgtgtgtacta

SEQ ID NO: 4374955 - DNA, 25 bp, Homo sapien
tcggaggaatgcagcccaacgactt

SEQ ID NO: 4374956 - DNA, 25 bp, Homo sapien
cagctcgttcgcagttctccaggga

SEQ ID NO: 4374957 - DNA, 25 bp, Homo sapien
cgatcagactggtcctcggaggaat

SEQ ID NO: 4374958 - DNA, 25 bp, Homo sapien
gaaaacactcctacgcaaacttgtg

SEQ ID NO: 4374959 - DNA, 25 bp, Homo sapien
tgcccggagaacttgtgtgtgccca

SEQ ID NO: 4374960 - DNA, 25 bp, Homo sapien
tggtgcctctgaacgtgtgaaacgc

SEQ ID NO: 4374961 - DNA, 25 bp, Homo sapien
aatagatgaaaggatcgtgcccgga

SEQ ID NO: 4374962 - DNA, 25 bp, Homo sapien
tgaaactcggcatcaggctgctaag

SEQ ID NO: 4374963 - DNA, 25 bp, Homo sapien
tggcggaggaccttgaaggctcccg

SEQ ID NO: 4374964 - DNA, 25 bp, Homo sapien
tcctctccatcgagagcagggcttg

SEQ ID NO: 4374965 - DNA, 25 bp, Homo sapien
cgagacgctttctgctcgaggccca

SEQ ID NO: 4374966 - DNA, 25 bp, Homo sapien
tctgtatctccgtggccgagacgct

SEQ ID NO: 4374967 - DNA, 25 bp, Homo sapien
ttgcctgtccttgctgagagattta

SEQ ID NO: 4374968 - DNA, 25 bp, Homo sapien
tcattgaaggcttttgatttagcaa

SEQ ID NO: 4374969 - DNA, 25 bp, Homo sapien
tgtccttgctgagagatttattgct

SEQ ID NO: 4374970 - DNA, 25 bp, Homo sapien
gctgagagatttattgcttcattga

SEQ ID NO: 4374971 - DNA, 25 bp, Homo sapien
agtctctttcccccactctgctcct

SEQ ID NO: 4374972 - DNA, 25 bp, Homo sapien
cccactctgctcctccttctactcc

SEQ ID NO: 4374973 - DNA, 25 bp, Homo sapien
gtctctttcccccactctgctcctc

SEQ ID NO: 4374974 - DNA, 25 bp, Homo sapien
actctgctcctccttctactcccat

SEQ ID NO: 4374975 - DNA, 25 bp, Homo sapien
tttctcctagagctgaaagagtcat

SEQ ID NO: 4374976 - DNA, 25 bp, Homo sapien
gctgaaagagtcatgtgctcctggg

SEQ ID NO: 4374977 - DNA, 25 bp, Homo sapien
tgctcctggggaagaattaatgccc

SEQ ID NO: 4374978 - DNA, 25 bp, Homo sapien
tcctagagctgaaagagtcatgtgc

SEQ ID NO: 4374979 - DNA, 25 bp, Homo sapien
tgtggctttttctgttgtgaggtct

SEQ ID NO: 4374980 - DNA, 25 bp, Homo sapien
ctgtgtcctgttcctgtggcttttt

SEQ ID NO: 4374981 - DNA, 25 bp, Homo sapien
gtggctttttctgttgtgaggtctt

SEQ ID NO: 4374982 - DNA, 25 bp, Homo sapien
gcatttatccattctgtgtcctgtt

SEQ ID NO: 4374983 - DNA, 25 bp, Homo sapien
gcttgcttccactgctgttctccca

SEQ ID NO: 4374984 - DNA, 25 bp, Homo sapien
cctctgaggtgttggcatcagggct

SEQ ID NO: 4374985 - DNA, 25 bp, Homo sapien
tcttggatgtcagactttcctggag

SEQ ID NO: 4374986 - DNA, 25 bp, Homo sapien
caggctgcggtagcccagttgtaat

SEQ ID NO: 4374987 - DNA, 25 bp, Homo sapien
gaaaaggcctggttggaatgctgaa

SEQ ID NO: 4374988 - DNA, 25 bp, Homo sapien
atgaaaaggcctggttggaatgctg

SEQ ID NO: 4374989 - DNA, 25 bp, Homo sapien
tgaaaaggcctggttggaatgctga

SEQ ID NO: 4374990 - DNA, 25 bp, Homo sapien
tgaatttagaatggtaggcaagacc

SEQ ID NO: 4374991 - DNA, 25 bp, Homo sapien
tttagaatggtaggcaagaccacca

SEQ ID NO: 4374992 - DNA, 25 bp, Homo sapien
cagtgaatttagaatggtaggcaag

SEQ ID NO: 4374993 - DNA, 25 bp, Homo sapien
tagaatggtaggcaagaccaccatc

SEQ ID NO: 4374994 - DNA, 25 bp, Homo sapien
tatatatattcagaattaggcagct

SEQ ID NO: 4374995 - DNA, 25 bp, Homo sapien
atatattcagaattaggcagctgga

SEQ ID NO: 4374996 - DNA, 25 bp, Homo sapien
tttttatggtgaaaagatatatata

SEQ ID NO: 4374997 - DNA, 25 bp, Homo sapien
tatatatatattcagaattaggcag

SEQ ID NO: 4374998 - DNA, 25 bp, Homo sapien
caggccgaatcaggatgttgacctt

SEQ ID NO: 4374999 - DNA, 25 bp, Homo sapien
gggtgacgtgcggatcttcttcttt

SEQ ID NO: 4375000 - DNA, 25 bp, Homo sapien
tgacgtgcggatcttcttctttttg

SEQ ID NO: 4375001 - DNA, 25 bp, Homo sapien
atcaggccgaatcaggatgttgacc

SEQ ID NO: 4375002 - DNA, 25 bp, Homo sapien
cactatggctcccaggctaaagtgc

SEQ ID NO: 4375003 - DNA, 25 bp, Homo sapien
gtctcactatggctcccaggctaaa

SEQ ID NO: 4375004 - DNA, 25 bp, Homo sapien
tgatcccactactgatttacatggg

SEQ ID NO: 4375005 - DNA, 25 bp, Homo sapien
gctaaagtgcagtgactattcacag

SEQ ID NO: 4375006 - DNA, 25 bp, Homo sapien
taatgacagtgacaaatgagacctc

SEQ ID NO: 4375007 - DNA, 25 bp, Homo sapien
tagacacctgaacaagacactgaga

SEQ ID NO: 4375008 - DNA, 25 bp, Homo sapien
taaggcaacatcagcagtcagaaga

SEQ ID NO: 4375009 - DNA, 25 bp, Homo sapien
gagacctcccagtggaccatagtga

SEQ ID NO: 4375010 - DNA, 25 bp, Homo sapien
ctggtgtctgcaccgtctatactat

SEQ ID NO: 4375011 - DNA, 25 bp, Homo sapien
tgtctgcaccgtctatactattgaa

SEQ ID NO: 4375012 - DNA, 25 bp, Homo sapien
tctgcaccgtctatactattgaaag

SEQ ID NO: 4375013 - DNA, 25 bp, Homo sapien
tgcaccgtctatactattgaaagcc

SEQ ID NO: 4375014 - DNA, 25 bp, Homo sapien
ctgaaacaaccactaggatcaccac

SEQ ID NO: 4375015 - DNA, 25 bp, Homo sapien
actgaaacaaccactaggatcacca

SEQ ID NO: 4375016 - DNA, 25 bp, Homo sapien
tgaaacaaccactaggatcaccacc

SEQ ID NO: 4375017 - DNA, 25 bp, Homo sapien
aaggtctggcttttgatataaaatg

SEQ ID NO: 4375018 - DNA, 25 bp, Homo sapien
tgcagtcagttggtagtgacagatt

SEQ ID NO: 4375019 - DNA, 25 bp, Homo sapien
cagttggtagtgacagatttatcac

SEQ ID NO: 4375020 - DNA, 25 bp, Homo sapien
atctctgttctccttagtttgtggg

SEQ ID NO: 4375021 - DNA, 25 bp, Homo sapien
gtggtagtaatgcagtcagttggta

SEQ ID NO: 4375022 - DNA, 25 bp, Homo sapien
caaggtgtagataaactgaataatg

SEQ ID NO: 4375023 - DNA, 25 bp, Homo sapien
aacaggatcaggtgtgccacatagg

SEQ ID NO: 4375024 - DNA, 25 bp, Homo sapien
gatggtttcactctgacactgtaga

SEQ ID NO: 4375025 - DNA, 25 bp, Homo sapien
aacatttcccaatctgccggagatg

SEQ ID NO: 4375026 - DNA, 25 bp, Homo sapien
tatacctcttgaacaatgaggattt

SEQ ID NO: 4375027 - DNA, 25 bp, Homo sapien
tactgactagctatccggggaccca

SEQ ID NO: 4375028 - DNA, 25 bp, Homo sapien
tcctgtgctctggactcttgtatac

SEQ ID NO: 4375029 - DNA, 25 bp, Homo sapien
cttgtatacctcttgaacaatgagg

SEQ ID NO: 4375030 - DNA, 25 bp, Homo sapien
tccttcatgatccttgaagcagcag

SEQ ID NO: 4375031 - DNA, 25 bp, Homo sapien
ttccttcatgatccttgaagcagca

SEQ ID NO: 4375032 - DNA, 25 bp, Homo sapien
tctgttcctgagcaactattgtggg

SEQ ID NO: 4375033 - DNA, 25 bp, Homo sapien
agaacagaatgatctggacgattca

SEQ ID NO: 4375034 - DNA, 25 bp, Homo sapien
ctggacgattcatccaggatttggc

SEQ ID NO: 4375035 - DNA, 25 bp, Homo sapien
aagattcctctgctgcctaataaac

SEQ ID NO: 4375036 - DNA, 25 bp, Homo sapien
tatgattggagcctcttaatatgta

SEQ ID NO: 4375037 - DNA, 25 bp, Homo sapien
gcacttgaaatggaatgaccctggg

SEQ ID NO: 4375038 - DNA, 25 bp, Homo sapien
atgattggagcctcttaatatgtaa

SEQ ID NO: 4375039 - DNA, 25 bp, Homo sapien
cagtgagttccacagctaagggtgc

SEQ ID NO: 4375040 - DNA, 25 bp, Homo sapien
acagctaagggtgctggctttctac

SEQ ID NO: 4375041 - DNA, 25 bp, Homo sapien
ggtaaggatgatgaggtctgatgcc

SEQ ID NO: 4375042 - DNA, 25 bp, Homo sapien
tcttggctctcaggtctatccacag

SEQ ID NO: 4375043 - DNA, 25 bp, Homo sapien
cagaggtgcctctactctgctctgt

SEQ ID NO: 4375044 - DNA, 25 bp, Homo sapien
tgccaccctgtgaatctcttggctc

SEQ ID NO: 4375045 - DNA, 25 bp, Homo sapien
atctagaaaaatggttcctgggtgg

SEQ ID NO: 4375046 - DNA, 25 bp, Homo sapien
tctagaaaaatggttcctgggtgga

SEQ ID NO: 4375047 - DNA, 25 bp, Homo sapien
catctagaaaaatggttcctgggtg

SEQ ID NO: 4375048 - DNA, 25 bp, Homo sapien
atagcacttcttgccattacaccag

SEQ ID NO: 4375049 - DNA, 25 bp, Homo sapien
aaaattttactatcacaaccatgac

SEQ ID NO: 4375050 - DNA, 25 bp, Homo sapien
aattttactatcacaaccatgacac

SEQ ID NO: 4375051 - DNA, 25 bp, Homo sapien
ttcttcatagcacttcttgccatta

SEQ ID NO: 4375052 - DNA, 25 bp, Homo sapien
ttatagttcttgtcagcaggtggct

SEQ ID NO: 4375053 - DNA, 25 bp, Homo sapien
tctaatatttgatccttgaccctgg

SEQ ID NO: 4375054 - DNA, 25 bp, Homo sapien
taatacagggacagggaattatgcc

SEQ ID NO: 4375055 - DNA, 25 bp, Homo sapien
actagaagtctatcacgtggccaca

SEQ ID NO: 4375056 - DNA, 25 bp, Homo sapien
taacatgatttatcagcattgttaa

SEQ ID NO: 4375057 - DNA, 25 bp, Homo sapien
catgatttatcagcattgttaaatt

SEQ ID NO: 4375058 - DNA, 25 bp, Homo sapien
aacatgatttatcagcattgttaaa

SEQ ID NO: 4375059 - DNA, 25 bp, Homo sapien
ctaacatgatttatcagcattgtta

SEQ ID NO: 4375060 - DNA, 25 bp, Homo sapien
gttgcatcgggcaaatggtcttcta

SEQ ID NO: 4375061 - DNA, 25 bp, Homo sapien
ctcttgttgcatcgggcaaatggtc

SEQ ID NO: 4375062 - DNA, 25 bp, Homo sapien
ttttctcttgttgcatcgggcaaat

SEQ ID NO: 4375063 - DNA, 25 bp, Homo sapien
caaatggtcttctataataaagtaa

SEQ ID NO: 4375064 - DNA, 25 bp, Homo sapien
ctttggtgctgtagtctttgcacat

SEQ ID NO: 4375065 - DNA, 25 bp, Homo sapien
ctttgcacattggagtcctacagct

SEQ ID NO: 4375066 - DNA, 25 bp, Homo sapien
ttggtgctgtagtctttgcacattg

SEQ ID NO: 4375067 - DNA, 25 bp, Homo sapien
ggtgctgtagtctttgcacattgga

SEQ ID NO: 4375068 - DNA, 25 bp, Homo sapien
ttagaagatgtttctgcattagcag

SEQ ID NO: 4375069 - DNA, 25 bp, Homo sapien
tagatttagaagatgtttctgcatt

SEQ ID NO: 4375070 - DNA, 25 bp, Homo sapien
atttagatttagaagatgtttctgc

SEQ ID NO: 4375071 - DNA, 25 bp, Homo sapien
tagaagatgtttctgcattagcagg

SEQ ID NO: 4375072 - DNA, 25 bp, Homo sapien
gattatcagtgtcaggagatgaggc

SEQ ID NO: 4375073 - DNA, 25 bp, Homo sapien
caggatgccagttagagcaacaata

SEQ ID NO: 4375074 - DNA, 25 bp, Homo sapien
tgcctcatgcagtttcataacagca

SEQ ID NO: 4375075 - DNA, 25 bp, Homo sapien
ggctattttcaatcacaacccactt

SEQ ID NO: 4375076 - DNA, 25 bp, Homo sapien
ctataaagtcactgctcattgtttt

SEQ ID NO: 4375077 - DNA, 25 bp, Homo sapien
ttcatttgaactgaatggttgtcca

SEQ ID NO: 4375078 - DNA, 25 bp, Homo sapien
tgtctccacgtatctcctgcatcat

SEQ ID NO: 4375079 - DNA, 25 bp, Homo sapien
aaagctaactgaatgctctggccca

SEQ ID NO: 4375080 - DNA, 25 bp, Homo sapien
tattaaatcacacatggatggctgg

SEQ ID NO: 4375081 - DNA, 25 bp, Homo sapien
catcatagatttggtgatcctatta

SEQ ID NO: 4375082 - DNA, 25 bp, Homo sapien
tcaagagtgtttaatgtggagtgag

SEQ ID NO: 4375083 - DNA, 25 bp, Homo sapien
ctccttctctggtataatctggcat

SEQ ID NO: 4375084 - DNA, 25 bp, Homo sapien
ttaaggagttttgcttattcagtac

SEQ ID NO: 4375085 - DNA, 25 bp, Homo sapien
tctgaagttgttggctttttgattt

SEQ ID NO: 4375086 - DNA, 25 bp, Homo sapien
tttttatctattgaactattactca

SEQ ID NO: 4375087 - DNA, 25 bp, Homo sapien
agttttgcttattcagtactcctgc

SEQ ID NO: 4375088 - DNA, 25 bp, Homo sapien
taggagcctccagctactagtcata

SEQ ID NO: 4375089 - DNA, 25 bp, Homo sapien
gcattcaagacaatcatcacttggg

SEQ ID NO: 4375090 - DNA, 25 bp, Homo sapien
tggaagctctgagaaccttgtcatt

SEQ ID NO: 4375091 - DNA, 25 bp, Homo sapien
ccttcatgccgaagctatctaggag

SEQ ID NO: 4375092 - DNA, 25 bp, Homo sapien
cactccattgaaagcagatgattca

SEQ ID NO: 4375093 - DNA, 25 bp, Homo sapien
gtcaacttgagtgggtgattctaaa

SEQ ID NO: 4375094 - DNA, 25 bp, Homo sapien
tgtcctgaaaagcagttcggaatcc

SEQ ID NO: 4375095 - DNA, 25 bp, Homo sapien
gaaatcgaagttgacatgacatgag

SEQ ID NO: 4375096 - DNA, 25 bp, Homo sapien
tctacttcagaacatttgacctctt

SEQ ID NO: 4375097 - DNA, 25 bp, Homo sapien
gaaggaacacagagtatgtctactt

SEQ ID NO: 4375098 - DNA, 25 bp, Homo sapien
cacagagtatgtctacttcagaaca

SEQ ID NO: 4375099 - DNA, 25 bp, Homo sapien
tgacctctttttcagataggtagca

SEQ ID NO: 4375100 - DNA, 25 bp, Homo sapien
gtgatctttccaggttaattattgg

SEQ ID NO: 4375101 - DNA, 25 bp, Homo sapien
tattggatgatgtgcagcctttcag

SEQ ID NO: 4375102 - DNA, 25 bp, Homo sapien
gcctttcagtaatttgacagtgctt

SEQ ID NO: 4375103 - DNA, 25 bp, Homo sapien
ggcagaacgccattggcaagtgatc

SEQ ID NO: 4375104 - DNA, 25 bp, Homo sapien
gaagcatcattcacagttaggtttg

SEQ ID NO: 4375105 - DNA, 25 bp, Homo sapien
tgaagcatcattcacagttaggttt

SEQ ID NO: 4375106 - DNA, 25 bp, Homo sapien
ggtttgaagtctcaaagtgcaccca

SEQ ID NO: 4375107 - DNA, 25 bp, Homo sapien
gtttgaagtctcaaagtgcacccat

SEQ ID NO: 4375108 - DNA, 25 bp, Homo sapien
agatctggttgtagtagcttagggc

SEQ ID NO: 4375109 - DNA, 25 bp, Homo sapien
gatctggttgtagtagcttagggca

SEQ ID NO: 4375110 - DNA, 25 bp, Homo sapien
ctggttgtagtagcttagggcagtt

SEQ ID NO: 4375111 - DNA, 25 bp, Homo sapien
ttgtagtagcttagggcagttggat

SEQ ID NO: 4375112 - DNA, 25 bp, Homo sapien
tcaacttctaagtcatccatcaact

SEQ ID NO: 4375113 - DNA, 25 bp, Homo sapien
tgttcaacttctaagtcatccatca

SEQ ID NO: 4375114 - DNA, 25 bp, Homo sapien
ctggctcatggtgttcaacttctaa

SEQ ID NO: 4375115 - DNA, 25 bp, Homo sapien
tctaagtcatccatcaactctttcc

SEQ ID NO: 4375116 - DNA, 25 bp, Homo sapien
tgctgcatgcatcaaagacacatgc

SEQ ID NO: 4375117 - DNA, 25 bp, Homo sapien
ctgggctgctgcatgcatcaaagac

SEQ ID NO: 4375118 - DNA, 25 bp, Homo sapien
gggctgctgcatgcatcaaagacac

SEQ ID NO: 4375119 - DNA, 25 bp, Homo sapien
ctgcatgcatcaaagacacatgcat

SEQ ID NO: 4375120 - DNA, 25 bp, Homo sapien
ctgccagatcgagtataatagctac

SEQ ID NO: 4375121 - DNA, 25 bp, Homo sapien
ttctgccagatcgagtataatagct

SEQ ID NO: 4375122 - DNA, 25 bp, Homo sapien
ttttctgccagatcgagtataatag

SEQ ID NO: 4375123 - DNA, 25 bp, Homo sapien
cagtttttctgccagatcgagtata

SEQ ID NO: 4375124 - DNA, 25 bp, Homo sapien
tacctctgtattcacatcgccgctt

SEQ ID NO: 4375125 - DNA, 25 bp, Homo sapien
ttgtttatggacaatccctgatctc

SEQ ID NO: 4375126 - DNA, 25 bp, Homo sapien
tttccataattgtatgtatccatat

SEQ ID NO: 4375127 - DNA, 25 bp, Homo sapien
ccctgatctcacacctattgtataa

SEQ ID NO: 4375128 - DNA, 25 bp, Homo sapien
ggcaatttctctgagaaacagggaa

SEQ ID NO: 4375129 - DNA, 25 bp, Homo sapien
ttataagtcgttagctatattttta

SEQ ID NO: 4375130 - DNA, 25 bp, Homo sapien
agtcgttagctatatttttaaggca

SEQ ID NO: 4375131 - DNA, 25 bp, Homo sapien
tttttaaggcaatttctctgagaaa

SEQ ID NO: 4375132 - DNA, 25 bp, Homo sapien
tgttcttagggggactaggaaatca

SEQ ID NO: 4375133 - DNA, 25 bp, Homo sapien
ggaaatcaggagacaggattgtcat

SEQ ID NO: 4375134 - DNA, 25 bp, Homo sapien
taggaaatcaggagacaggattgtc

SEQ ID NO: 4375135 - DNA, 25 bp, Homo sapien
ctaggaaatcaggagacaggattgt

SEQ ID NO: 4375136 - DNA, 25 bp, Homo sapien
ttggtccccataaacacaaggcgga

SEQ ID NO: 4375137 - DNA, 25 bp, Homo sapien
tctggcatgctaggaagctaactgg

SEQ ID NO: 4375138 - DNA, 25 bp, Homo sapien
caaggcggagttttacaggatgtct

SEQ ID NO: 4375139 - DNA, 25 bp, Homo sapien
tgtccaggactgttgtgccagaaga

SEQ ID NO: 4375140 - DNA, 25 bp, Homo sapien
taggaacttaggatatgtagggtca

SEQ ID NO: 4375141 - DNA, 25 bp, Homo sapien
ggtcaggatttctatgcctatgcat

SEQ ID NO: 4375142 - DNA, 25 bp, Homo sapien
gatctgcatggatctctgaggatag

SEQ ID NO: 4375143 - DNA, 25 bp, Homo sapien
gccagtcatgatctgcatggatctc

SEQ ID NO: 4375144 - DNA, 25 bp, Homo sapien
aaactgggtggattaattgccctgt

SEQ ID NO: 4375145 - DNA, 25 bp, Homo sapien
cagggcatgacaccgggctgtctgc

SEQ ID NO: 4375146 - DNA, 25 bp, Homo sapien
cgggagcttcggcaagattcacgta

SEQ ID NO: 4375147 - DNA, 25 bp, Homo sapien
gcttccataggtaatgtagcaggac

SEQ ID NO: 4375148 - DNA, 25 bp, Homo sapien
ctttggaatatagtggagagagctt

SEQ ID NO: 4375149 - DNA, 25 bp, Homo sapien
tttggaatatagtggagagagcttg

SEQ ID NO: 4375150 - DNA, 25 bp, Homo sapien
tgtcttcttgatggacaaaagtcac

SEQ ID NO: 4375151 - DNA, 25 bp, Homo sapien
caaaagtcactttcactttggtcat

SEQ ID NO: 4375152 - DNA, 25 bp, Homo sapien
cagattccgaagatactttgtcttc

SEQ ID NO: 4375153 - DNA, 25 bp, Homo sapien
tcatgacttcagattccgaagatac

SEQ ID NO: 4375154 - DNA, 25 bp, Homo sapien
tctgcccatgctcttagaacttgtg

SEQ ID NO: 4375155 - DNA, 25 bp, Homo sapien
gcccatgctcttagaacttgtgtac

SEQ ID NO: 4375156 - DNA, 25 bp, Homo sapien
tgcccatgctcttagaacttgtgta

SEQ ID NO: 4375157 - DNA, 25 bp, Homo sapien
gaacttgtgtacctggcattcagtt

SEQ ID NO: 4375158 - DNA, 25 bp, Homo sapien
gccaatgttcttgcaacggactgtc

SEQ ID NO: 4375159 - DNA, 25 bp, Homo sapien
tcacctctctgggttgccaatgttc

SEQ ID NO: 4375160 - DNA, 25 bp, Homo sapien
tgtcacactttgtactgtgccacaa

SEQ ID NO: 4375161 - DNA, 25 bp, Homo sapien
aaatcactgcttgggaattggccag

SEQ ID NO: 4375162 - DNA, 25 bp, Homo sapien
gagctctttccacaacttgactttg

SEQ ID NO: 4375163 - DNA, 25 bp, Homo sapien
ctctggctttcgtgctctaagtcag

SEQ ID NO: 4375164 - DNA, 25 bp, Homo sapien
cactctctggctttcgtgctctaag

SEQ ID NO: 4375165 - DNA, 25 bp, Homo sapien
gctcatctgttaaagagctctttcc

SEQ ID NO: 4375166 - DNA, 25 bp, Homo sapien
gccatattttggatcttattaatga

SEQ ID NO: 4375167 - DNA, 25 bp, Homo sapien
tgccatattttggatcttattaatg

SEQ ID NO: 4375168 - DNA, 25 bp, Homo sapien
ttttggatcttattaatgatgctac

SEQ ID NO: 4375169 - DNA, 25 bp, Homo sapien
gatcttattaatgatgctacttggg

SEQ ID NO: 4375170 - DNA, 25 bp, Homo sapien
cgtgacagttgataatctcatcgcc

SEQ ID NO: 4375171 - DNA, 25 bp, Homo sapien
gaaactttgaatgttagcatccatg

SEQ ID NO: 4375172 - DNA, 25 bp, Homo sapien
catcgcctttagtctttccattaag

SEQ ID NO: 4375173 - DNA, 25 bp, Homo sapien
gctgcctgttctacaatatctgaca

SEQ ID NO: 4375174 - DNA, 25 bp, Homo sapien
cttctcctcataaccagaagcatta

SEQ ID NO: 4375175 - DNA, 25 bp, Homo sapien
cacatgtggatactgcccccttctt

SEQ ID NO: 4375176 - DNA, 25 bp, Homo sapien
tccactcactccacatgtggatact

SEQ ID NO: 4375177 - DNA, 25 bp, Homo sapien
tcctcataaccagaagcattatgac

SEQ ID NO: 4375178 - DNA, 25 bp, Homo sapien
caacttcttttagtgcctcctcaaa

SEQ ID NO: 4375179 - DNA, 25 bp, Homo sapien
ttgctttgtcagtctagccactcca

SEQ ID NO: 4375180 - DNA, 25 bp, Homo sapien
tgtcagtctagccactccaacttct

SEQ ID NO: 4375181 - DNA, 25 bp, Homo sapien
ttaaagacccaaaggtcttgattca

SEQ ID NO: 4375182 - DNA, 25 bp, Homo sapien
gaccactgtctatagccattgtctg

SEQ ID NO: 4375183 - DNA, 25 bp, Homo sapien
tggtgaccacacctagagattgtga

SEQ ID NO: 4375184 - DNA, 25 bp, Homo sapien
gctgtttgggtatgaccactgtcta

SEQ ID NO: 4375185 - DNA, 25 bp, Homo sapien
gaggacaccgatctcaggtacagtc

SEQ ID NO: 4375186 - DNA, 25 bp, Homo sapien
tgtacagaattccagcaatcgctga

SEQ ID NO: 4375187 - DNA, 25 bp, Homo sapien
cattttgtttgctgtacagaattcc

SEQ ID NO: 4375188 - DNA, 25 bp, Homo sapien
actgtgcactggcagcgttgtgtgt

SEQ ID NO: 4375189 - DNA, 25 bp, Homo sapien
tagaatggatcagttccaagtggca

SEQ ID NO: 4375190 - DNA, 25 bp, Homo sapien
tatcttaggcttggggtcctataat

SEQ ID NO: 4375191 - DNA, 25 bp, Homo sapien
atgtatcttaggcttggggtcctat

SEQ ID NO: 4375192 - DNA, 25 bp, Homo sapien
gtatcttaggcttggggtcctataa

SEQ ID NO: 4375193 - DNA, 25 bp, Homo sapien
aaatgtatcttaggcttggggtcct

SEQ ID NO: 4375194 - DNA, 25 bp, Homo sapien
ctgataggaccattaaattctcgcc

SEQ ID NO: 4375195 - DNA, 25 bp, Homo sapien
gaccattaaattctcgccatcagta

SEQ ID NO: 4375196 - DNA, 25 bp, Homo sapien
cacttttactgataggaccattaaa

SEQ ID NO: 4375197 - DNA, 25 bp, Homo sapien
ttaaattctcgccatcagtactcat

SEQ ID NO: 4375198 - DNA, 25 bp, Homo sapien
ttgtgtcgttgctgctcattttgga

SEQ ID NO: 4375199 - DNA, 25 bp, Homo sapien
tcttcactgtggggttttgtcatga

SEQ ID NO: 4375200 - DNA, 25 bp, Homo sapien
ttctccattgtgtcgttgctgctca

SEQ ID NO: 4375201 - DNA, 25 bp, Homo sapien
ttttctccattgtgtcgttgctgct

SEQ ID NO: 4375202 - DNA, 25 bp, Homo sapien
gcagaatatctgtcaggctcgtctt

SEQ ID NO: 4375203 - DNA, 25 bp, Homo sapien
tatagcctggtgtcaaatgaaaagc

SEQ ID NO: 4375204 - DNA, 25 bp, Homo sapien
actgtgacccttggaacaagcctgt

SEQ ID NO: 4375205 - DNA, 25 bp, Homo sapien
gatttggcttgacaacctgctgaca

SEQ ID NO: 4375206 - DNA, 25 bp, Homo sapien
taggcaggcaattgtcataaacttc

SEQ ID NO: 4375207 - DNA, 25 bp, Homo sapien
agggtagttaggcaggcaattgtca

SEQ ID NO: 4375208 - DNA, 25 bp, Homo sapien
cataaacttcactcctttgagcccg

SEQ ID NO: 4375209 - DNA, 25 bp, Homo sapien
ataaacttcactcctttgagcccgc

SEQ ID NO: 4375210 - DNA, 25 bp, Homo sapien
caggtctgcattacagtggcactgc

SEQ ID NO: 4375211 - DNA, 25 bp, Homo sapien
tgctccccttcaccgattctgtgtt

SEQ ID NO: 4375212 - DNA, 25 bp, Homo sapien
actctgagttcaatatttccttccc

SEQ ID NO: 4375213 - DNA, 25 bp, Homo sapien
taaaactcttgaagtaactctgagt

SEQ ID NO: 4375214 - DNA, 25 bp, Homo sapien
tcaacgtccacctgtagaaactcat

SEQ ID NO: 4375215 - DNA, 25 bp, Homo sapien
tggattatatatggcagctgctatg

SEQ ID NO: 4375216 - DNA, 25 bp, Homo sapien
tgagaatagaactttcatctgacca

SEQ ID NO: 4375217 - DNA, 25 bp, Homo sapien
gatatgtttccagtacaattctctg

SEQ ID NO: 4375218 - DNA, 25 bp, Homo sapien
gcgccgcaagtccacaggcattgag

SEQ ID NO: 4375219 - DNA, 25 bp, Homo sapien
gaaatgttatctgagagctaagacc

SEQ ID NO: 4375220 - DNA, 25 bp, Homo sapien
tgctttgtgccctacgctactgtgg

SEQ ID NO: 4375221 - DNA, 25 bp, Homo sapien
taagacctagagtgagagcctcagg

SEQ ID NO: 4375222 - DNA, 25 bp, Homo sapien
cagactggaccctatatgcaaatat

SEQ ID NO: 4375223 - DNA, 25 bp, Homo sapien
aaccccagtccacaaggatgacctg

SEQ ID NO: 4375224 - DNA, 25 bp, Homo sapien
tggttaggccccatggtctcttcgg

SEQ ID NO: 4375225 - DNA, 25 bp, Homo sapien
gattatattggaagtaaccccagtc

SEQ ID NO: 4375226 - DNA, 25 bp, Homo sapien
cagagcaaactcagatgggccttga

SEQ ID NO: 4375227 - DNA, 25 bp, Homo sapien
tatccaggatgaataatcgcagggc

SEQ ID NO: 4375228 - DNA, 25 bp, Homo sapien
cactctgtgtaggagaataggtccc

SEQ ID NO: 4375229 - DNA, 25 bp, Homo sapien
tagaagaggcaatctggcataaacc

SEQ ID NO: 4375230 - DNA, 25 bp, Homo sapien
tagtctgtggccaacctcataggag

SEQ ID NO: 4375231 - DNA, 25 bp, Homo sapien
tgtcttcttccgacattctgagagg

SEQ ID NO: 4375232 - DNA, 25 bp, Homo sapien
cacttgcctctcattagaatctgat

SEQ ID NO: 4375233 - DNA, 25 bp, Homo sapien
caaggacttctagttaatcttccag

SEQ ID NO: 4375234 - DNA, 25 bp, Homo sapien
agtgtggctatcaagtctggtgatc

SEQ ID NO: 4375235 - DNA, 25 bp, Homo sapien
caagtgtggctatcaagtctggtga

SEQ ID NO: 4375236 - DNA, 25 bp, Homo sapien
tctggtgatcaaaagattaactctg

SEQ ID NO: 4375237 - DNA, 25 bp, Homo sapien
gcccaagtgtggctatcaagtctgg

SEQ ID NO: 4375238 - DNA, 25 bp, Homo sapien
gttagactgtgttgttacagcagga

SEQ ID NO: 4375239 - DNA, 25 bp, Homo sapien
ttagactgtgttgttacagcaggaa

SEQ ID NO: 4375240 - DNA, 25 bp, Homo sapien
caagctgaatctggacatatatcat

SEQ ID NO: 4375241 - DNA, 25 bp, Homo sapien
caatgtaagagttttaaggctcctt

SEQ ID NO: 4375242 - DNA, 25 bp, Homo sapien
tgtgcctgctgccatagtttcttgg

SEQ ID NO: 4375243 - DNA, 25 bp, Homo sapien
caccttcgagttttaagacatttca

SEQ ID NO: 4375244 - DNA, 25 bp, Homo sapien
cacttctggcccatcaatagtaaat

SEQ ID NO: 4375245 - DNA, 25 bp, Homo sapien
gctattggctttaggtgacctgttt

SEQ ID NO: 4375246 - DNA, 25 bp, Homo sapien
tgctattggctttaggtgacctgtt

SEQ ID NO: 4375247 - DNA, 25 bp, Homo sapien
ctattggctttaggtgacctgtttt

SEQ ID NO: 4375248 - DNA, 25 bp, Homo sapien
tctgcctttatagaggcttccggta

SEQ ID NO: 4375249 - DNA, 25 bp, Homo sapien
cttccggtaattaagcctgagaatg

SEQ ID NO: 4375250 - DNA, 25 bp, Homo sapien
catttggggtcacataagaagtctg

SEQ ID NO: 4375251 - DNA, 25 bp, Homo sapien
gtctgagattttgatcagacatctg

SEQ ID NO: 4375252 - DNA, 25 bp, Homo sapien
tttctgtggagatatccaagccagc

SEQ ID NO: 4375253 - DNA, 25 bp, Homo sapien
tggagatatccaagccagctacaga

SEQ ID NO: 4375254 - DNA, 25 bp, Homo sapien
agagcctaatggtaatcccaaagac

SEQ ID NO: 4375255 - DNA, 25 bp, Homo sapien
agcaaagagcctaatggtaatccca

SEQ ID NO: 4375256 - DNA, 25 bp, Homo sapien
caatgccgcttatgctctggttcca

SEQ ID NO: 4375257 - DNA, 25 bp, Homo sapien
aaaaatgtccattgccagaaatacc

SEQ ID NO: 4375258 - DNA, 25 bp, Homo sapien
gaaataccatatgaacaatgccgct

SEQ ID NO: 4375259 - DNA, 25 bp, Homo sapien
ccgatattcggtggtcaggacaaga

SEQ ID NO: 4375260 - DNA, 25 bp, Homo sapien
tgtccacattgtactattcctttgc

SEQ ID NO: 4375261 - DNA, 25 bp, Homo sapien
cttgtccacattgtactattccttt

SEQ ID NO: 4375262 - DNA, 25 bp, Homo sapien
tccacattgtactattcctttgccc

SEQ ID NO: 4375263 - DNA, 25 bp, Homo sapien
ccacattgtactattcctttgccct

SEQ ID NO: 4375264 - DNA, 25 bp, Homo sapien
tgactttaacattgacaattttctt

SEQ ID NO: 4375265 - DNA, 25 bp, Homo sapien
tatctctcaggttatcatcaaggct

SEQ ID NO: 4375266 - DNA, 25 bp, Homo sapien
taatcgcacagtgccttcatggatt

SEQ ID NO: 4375267 - DNA, 25 bp, Homo sapien
taatccagcgctcgtttctccaagc

SEQ ID NO: 4375268 - DNA, 25 bp, Homo sapien
tcatcaaggcttcgttcatgttcac

SEQ ID NO: 4375269 - DNA, 25 bp, Homo sapien
aaccatcatcctactgcgtccggaa

SEQ ID NO: 4375270 - DNA, 25 bp, Homo sapien
tgtagtagcaaaaactagatctagt

SEQ ID NO: 4375271 - DNA, 25 bp, Homo sapien
cactgctacccttcctaccctctga

SEQ ID NO: 4375272 - DNA, 25 bp, Homo sapien
tcattaaccatctctacctcccacc

SEQ ID NO: 4375273 - DNA, 25 bp, Homo sapien
gccatacctttttggtagaagcaaa

SEQ ID NO: 4375274 - DNA, 25 bp, Homo sapien
ctgagtttgtagagccatacctttt

SEQ ID NO: 4375275 - DNA, 25 bp, Homo sapien
gctaggactatagggtaaggccgcc

SEQ ID NO: 4375276 - DNA, 25 bp, Homo sapien
gactatagggtaaggccgccacatc

SEQ ID NO: 4375277 - DNA, 25 bp, Homo sapien
tagcaatgacacgtcttttcatgga

SEQ ID NO: 4375278 - DNA, 25 bp, Homo sapien
caatgacacgtcttttcatggactt

SEQ ID NO: 4375279 - DNA, 25 bp, Homo sapien
ttttagcaatgacacgtcttttcat

SEQ ID NO: 4375280 - DNA, 25 bp, Homo sapien
gcaatgacacgtcttttcatggact

SEQ ID NO: 4375281 - DNA, 25 bp, Homo sapien
ggaatattatattcaattcgacctt

SEQ ID NO: 4375282 - DNA, 25 bp, Homo sapien
ttatattcaattcgaccttcacaat

SEQ ID NO: 4375283 - DNA, 25 bp, Homo sapien
aatattatattcaattcgaccttca

SEQ ID NO: 4375284 - DNA, 25 bp, Homo sapien
tattatattcaattcgaccttcaca

SEQ ID NO: 4375285 - DNA, 25 bp, Homo sapien
caagcctgttgtcatacagcgggca

SEQ ID NO: 4375286 - DNA, 25 bp, Homo sapien
attattaacaccttcagtgatgccc

SEQ ID NO: 4375287 - DNA, 25 bp, Homo sapien
catcagactgataatactctcccag

SEQ ID NO: 4375288 - DNA, 25 bp, Homo sapien
tcccagcttctcagtctgaaatatg

SEQ ID NO: 4375289 - DNA, 25 bp, Homo sapien
ctggggacttcgcagagaaaggaga

SEQ ID NO: 4375290 - DNA, 25 bp, Homo sapien
aggctcctgggaagttgtttggcat

SEQ ID NO: 4375291 - DNA, 25 bp, Homo sapien
gacagctgtggagatcaaggctcct

SEQ ID NO: 4375292 - DNA, 25 bp, Homo sapien
gaaaggagacagctgtggagatcaa

SEQ ID NO: 4375293 - DNA, 25 bp, Homo sapien
ggacagcaactattatagtatccaa

SEQ ID NO: 4375294 - DNA, 25 bp, Homo sapien
tcttgtttagtccagttgtggacag

SEQ ID NO: 4375295 - DNA, 25 bp, Homo sapien
cttgtttagtccagttgtggacagc

SEQ ID NO: 4375296 - DNA, 25 bp, Homo sapien
cagttgtggacagcaactattatag

SEQ ID NO: 4375297 - DNA, 25 bp, Homo sapien
tacaagtttgggatgacgaagagaa

SEQ ID NO: 4375298 - DNA, 25 bp, Homo sapien
ggcactggaaaacgacatacaagtt

SEQ ID NO: 4375299 - DNA, 25 bp, Homo sapien
gagtaggtatacttgaatgtgaagg

SEQ ID NO: 4375300 - DNA, 25 bp, Homo sapien
aagatgcaagggtgttctcaactgg

SEQ ID NO: 4375301 - DNA, 25 bp, Homo sapien
tgggcagagtggaaaagggcaaagg

SEQ ID NO: 4375302 - DNA, 25 bp, Homo sapien
ggatgggcagagtggaaaagggcaa

SEQ ID NO: 4375303 - DNA, 25 bp, Homo sapien
ggcagagtggaaaagggcaaaggaa

SEQ ID NO: 4375304 - DNA, 25 bp, Homo sapien
cagagtggaaaagggcaaaggaagg

SEQ ID NO: 4375305 - DNA, 25 bp, Homo sapien
gcccatgaataccatcaaggactac

SEQ ID NO: 4375306 - DNA, 25 bp, Homo sapien
ataccatcaaggactactgacagac

SEQ ID NO: 4375307 - DNA, 25 bp, Homo sapien
ccttcagcccatgaataccatcaag

SEQ ID NO: 4375308 - DNA, 25 bp, Homo sapien
catgaataccatcaaggactactga

SEQ ID NO: 4375309 - DNA, 25 bp, Homo sapien
gagaaaaacaccttgccttagccac

SEQ ID NO: 4375310 - DNA, 25 bp, Homo sapien
gaatcaaggctacatggccgggctg

SEQ ID NO: 4375311 - DNA, 25 bp, Homo sapien
ttagccacctggaacataattctgg

SEQ ID NO: 4375312 - DNA, 25 bp, Homo sapien
gacgtagaaacactccatgaaatgg

SEQ ID NO: 4375313 - DNA, 25 bp, Homo sapien
gtttagcttcgctctttcatcatcc

SEQ ID NO: 4375314 - DNA, 25 bp, Homo sapien
agtttagcttcgctctttcatcatc

SEQ ID NO: 4375315 - DNA, 25 bp, Homo sapien
ggtatcttgttctattccagtatga

SEQ ID NO: 4375316 - DNA, 25 bp, Homo sapien
catgtacttggatccagagtcctaa

SEQ ID NO: 4375317 - DNA, 25 bp, Homo sapien
tgctgcaagatagcctctctacttc

SEQ ID NO: 4375318 - DNA, 25 bp, Homo sapien
taacagtttgcacttagtttgcttc

SEQ ID NO: 4375319 - DNA, 25 bp, Homo sapien
ggattcagtatagaaaggagaactt

SEQ ID NO: 4375320 - DNA, 25 bp, Homo sapien
tctgcctgaaaaacaatcgtaatgg

SEQ ID NO: 4375321 - DNA, 25 bp, Homo sapien
taagcttgctatcttatataggcac

SEQ ID NO: 4375322 - DNA, 25 bp, Homo sapien
tataggcacagttcattctgcctga

SEQ ID NO: 4375323 - DNA, 25 bp, Homo sapien
tattgttcaagtcccggagcatgtg

SEQ ID NO: 4375324 - DNA, 25 bp, Homo sapien
atgttgttcgctcggaaagggccct

SEQ ID NO: 4375325 - DNA, 25 bp, Homo sapien
cactgcttctggaacaattgtttca

SEQ ID NO: 4375326 - DNA, 25 bp, Homo sapien
gtcccggagcatgtgttccaaaatg

SEQ ID NO: 4375327 - DNA, 25 bp, Homo sapien
catttagttccgttttgatcttggt

SEQ ID NO: 4375328 - DNA, 25 bp, Homo sapien
aactcttcttccaaaatattcttat

SEQ ID NO: 4375329 - DNA, 25 bp, Homo sapien
gcaactcttcttccaaaatattctt

SEQ ID NO: 4375330 - DNA, 25 bp, Homo sapien
cagcaactcttcttccaaaatattc

SEQ ID NO: 4375331 - DNA, 25 bp, Homo sapien
tcagcaactcttcttccaaaatatt

SEQ ID NO: 4375332 - DNA, 25 bp, Homo sapien
tggataaaggacacgaacaaacact

SEQ ID NO: 4375333 - DNA, 25 bp, Homo sapien
acaaaacatacatgtgggcaacaag

SEQ ID NO: 4375334 - DNA, 25 bp, Homo sapien
tacagctgctaggtcataacatcta

SEQ ID NO: 4375335 - DNA, 25 bp, Homo sapien
tgcaacaatcccacatgacactagt

SEQ ID NO: 4375336 - DNA, 25 bp, Homo sapien
taaatagatgactaaaagtgaaact

SEQ ID NO: 4375337 - DNA, 25 bp, Homo sapien
ttttggcaagtttcagaatcaattc

SEQ ID NO: 4375338 - DNA, 25 bp, Homo sapien
gaaactcttctttgtgataacccac

SEQ ID NO: 4375339 - DNA, 25 bp, Homo sapien
tgtaaaactgggactctttcagagg

SEQ ID NO: 4375340 - DNA, 25 bp, Homo sapien
tggtccattagcaccccttctcata

SEQ ID NO: 4375341 - DNA, 25 bp, Homo sapien
aaggccaaggctggtccattagcac

SEQ ID NO: 4375342 - DNA, 25 bp, Homo sapien
gcaaggccaaggctggtccattagc

SEQ ID NO: 4375343 - DNA, 25 bp, Homo sapien
accccttctcatactagtgatcagg

SEQ ID NO: 4375344 - DNA, 25 bp, Homo sapien
acctttttgggcctctaatctcatg

SEQ ID NO: 4375345 - DNA, 25 bp, Homo sapien
gttattctttcaatgacaaggacaa

SEQ ID NO: 4375346 - DNA, 25 bp, Homo sapien
ttttgggcctctaatctcatgaagt

SEQ ID NO: 4375347 - DNA, 25 bp, Homo sapien
aagagataactagaggctgctgaac

SEQ ID NO: 4375348 - DNA, 25 bp, Homo sapien
tgttttatcaaggtggtgtcttcaa

SEQ ID NO: 4375349 - DNA, 25 bp, Homo sapien
ggaagactgcttgattcatgaataa

SEQ ID NO: 4375350 - DNA, 25 bp, Homo sapien
tatcaaggtggtgtcttcaacagca

SEQ ID NO: 4375351 - DNA, 25 bp, Homo sapien
tctggcttggaagactgcttgattc

SEQ ID NO: 4375352 - DNA, 25 bp, Homo sapien
aatttaatggctctatcttccacag

SEQ ID NO: 4375353 - DNA, 25 bp, Homo sapien
aatttgagtgaaatcctcctatagc

SEQ ID NO: 4375354 - DNA, 25 bp, Homo sapien
tatttaatttgagtgaaatcctcct

SEQ ID NO: 4375355 - DNA, 25 bp, Homo sapien
ccacagcaagcagttaaagttgaac

SEQ ID NO: 4375356 - DNA, 25 bp, Homo sapien
tgcagagatgaaggcgaaagacaaa

SEQ ID NO: 4375357 - DNA, 25 bp, Homo sapien
caaagcttctatttcgggattctag

SEQ ID NO: 4375358 - DNA, 25 bp, Homo sapien
tgctacatttaaacctcagacagat

SEQ ID NO: 4375359 - DNA, 25 bp, Homo sapien
gggattctaggacccaaatatgttg

SEQ ID NO: 4375360 - DNA, 25 bp, Homo sapien
tatctctctgttgaagtcttccgtg

SEQ ID NO: 4375361 - DNA, 25 bp, Homo sapien
tagttttgtcaaggagctacctcca

SEQ ID NO: 4375362 - DNA, 25 bp, Homo sapien
taaaaattgactcccagacaccaga

SEQ ID NO: 4375363 - DNA, 25 bp, Homo sapien
ataatcaggaatgagacccgggcaa

SEQ ID NO: 4375364 - DNA, 25 bp, Homo sapien
tatagaattgcagaagtttgccaca

SEQ ID NO: 4375365 - DNA, 25 bp, Homo sapien
atatagaattgcagaagtttgccac

SEQ ID NO: 4375366 - DNA, 25 bp, Homo sapien
taatatagaattgcagaagtttgcc

SEQ ID NO: 4375367 - DNA, 25 bp, Homo sapien
atagaattgcagaagtttgccacat

SEQ ID NO: 4375368 - DNA, 25 bp, Homo sapien
ttcagaaacctttagcgaaacagag

SEQ ID NO: 4375369 - DNA, 25 bp, Homo sapien
gaaacctttagcgaaacagagatgg

SEQ ID NO: 4375370 - DNA, 25 bp, Homo sapien
aacctttagcgaaacagagatggct

SEQ ID NO: 4375371 - DNA, 25 bp, Homo sapien
gagaactatttttggtgactttcca

SEQ ID NO: 4375372 - DNA, 25 bp, Homo sapien
actgccattaaatgttgaatccttc

SEQ ID NO: 4375373 - DNA, 25 bp, Homo sapien
aactgccattaaatgttgaatcctt

SEQ ID NO: 4375374 - DNA, 25 bp, Homo sapien
ctgccattaaatgttgaatccttct

SEQ ID NO: 4375375 - DNA, 25 bp, Homo sapien
taactgccattaaatgttgaatcct

SEQ ID NO: 4375376 - DNA, 25 bp, Homo sapien
gcagccaactcctttaagcaccaga

SEQ ID NO: 4375377 - DNA, 25 bp, Homo sapien
taagcaccagacaaatgttaggcac

SEQ ID NO: 4375378 - DNA, 25 bp, Homo sapien
aactcctttaagcaccagacaaatg

SEQ ID NO: 4375379 - DNA, 25 bp, Homo sapien
gcatgcagccaactcctttaagcac

SEQ ID NO: 4375380 - DNA, 25 bp, Homo sapien
aaattacaaggccaagatatgacat

SEQ ID NO: 4375381 - DNA, 25 bp, Homo sapien
tatgacataaagagtcagctcctct

SEQ ID NO: 4375382 - DNA, 25 bp, Homo sapien
aaccatgcatgttggcaaagaatca

SEQ ID NO: 4375383 - DNA, 25 bp, Homo sapien
gacctgatgaatactttactgctta

SEQ ID NO: 4375384 - DNA, 25 bp, Homo sapien
gatcgcttgaatgtgggaagcagaa

SEQ ID NO: 4375385 - DNA, 25 bp, Homo sapien
ttgaatgtgggaagcagaagttgtt

SEQ ID NO: 4375386 - DNA, 25 bp, Homo sapien
gtgggaagcagaagttgttgtgagc

SEQ ID NO: 4375387 - DNA, 25 bp, Homo sapien
ggatcgcttgaatgtgggaagcaga

SEQ ID NO: 4375388 - DNA, 25 bp, Homo sapien
gtgatcatgggtcaggcaaaagttt

SEQ ID NO: 4375389 - DNA, 25 bp, Homo sapien
tatttggaatttattcatggtgcaa

SEQ ID NO: 4375390 - DNA, 25 bp, Homo sapien
tgatattaggcacctatgtgatcat

SEQ ID NO: 4375391 - DNA, 25 bp, Homo sapien
gatttctctcaacttgatattaggc

SEQ ID NO: 4375392 - DNA, 25 bp, Homo sapien
tacacagttatcaggatgagcactt

SEQ ID NO: 4375393 - DNA, 25 bp, Homo sapien
tgtcttttagctgaacagagaagtt

SEQ ID NO: 4375394 - DNA, 25 bp, Homo sapien
tatttcccagcataccttgtagtta

SEQ ID NO: 4375395 - DNA, 25 bp, Homo sapien
tctgggaaaatacgtctttcatatg

SEQ ID NO: 4375396 - DNA, 25 bp, Homo sapien
tattggccactggaatcatggaagg

SEQ ID NO: 4375397 - DNA, 25 bp, Homo sapien
gcttctgaatgtgtagatctctttc

SEQ ID NO: 4375398 - DNA, 25 bp, Homo sapien
gggaagaatcatgtgcttctgaatg

SEQ ID NO: 4375399 - DNA, 25 bp, Homo sapien
gatctctttcatctaatggaattgc

SEQ ID NO: 4375400 - DNA, 25 bp, Homo sapien
gccacaagctagatttgacacaggg

SEQ ID NO: 4375401 - DNA, 25 bp, Homo sapien
tcttagaagttctagagtgggtctt

SEQ ID NO: 4375402 - DNA, 25 bp, Homo sapien
catacgtagcatctcataaagccac

SEQ ID NO: 4375403 - DNA, 25 bp, Homo sapien
gatactgagttaggtattccttctg

SEQ ID NO: 4375404 - DNA, 25 bp, Homo sapien
cgggaatgtcagaatgtcttgtgcg

SEQ ID NO: 4375405 - DNA, 25 bp, Homo sapien
tgtgagatctgtatctctggaggtg

SEQ ID NO: 4375406 - DNA, 25 bp, Homo sapien
attcatttcaaagacgggaatgtca

SEQ ID NO: 4375407 - DNA, 25 bp, Homo sapien
gaagttgtgagatctgtatctctgg

SEQ ID NO: 4375408 - DNA, 25 bp, Homo sapien
tttcaatgagcaaaagggaatatta

SEQ ID NO: 4375409 - DNA, 25 bp, Homo sapien
tcaaataagtagttcactcagcaga

SEQ ID NO: 4375410 - DNA, 25 bp, Homo sapien
aataagtagttcactcagcagatat

SEQ ID NO: 4375411 - DNA, 25 bp, Homo sapien
tgtagtctttgagatttcaatgagc

SEQ ID NO: 4375412 - DNA, 25 bp, Homo sapien
aaactagatgagcactcccactacc

SEQ ID NO: 4375413 - DNA, 25 bp, Homo sapien
aactagatgagcactcccactacct

SEQ ID NO: 4375414 - DNA, 25 bp, Homo sapien
actaaaagccaaaaactagatgagc

SEQ ID NO: 4375415 - DNA, 25 bp, Homo sapien
gatcttcattgttgaaagaggcact

SEQ ID NO: 4375416 - DNA, 25 bp, Homo sapien
tgagctcagaagttatagatgagcc

SEQ ID NO: 4375417 - DNA, 25 bp, Homo sapien
atcaatcacataatccttgtaactt

SEQ ID NO: 4375418 - DNA, 25 bp, Homo sapien
ccatcaatcacataatccttgtaac

SEQ ID NO: 4375419 - DNA, 25 bp, Homo sapien
tcaatcacataatccttgtaacttt

SEQ ID NO: 4375420 - DNA, 25 bp, Homo sapien
catcaatcacataatccttgtaact

SEQ ID NO: 4375421 - DNA, 25 bp, Homo sapien
tgatacggtgaaaccctgtctctac

SEQ ID NO: 4375422 - DNA, 25 bp, Homo sapien
aatcgaaaccatcctggctgatacg

SEQ ID NO: 4375423 - DNA, 25 bp, Homo sapien
aaatcgaaaccatcctggctgatac

SEQ ID NO: 4375424 - DNA, 25 bp, Homo sapien
tacggtgaaaccctgtctctactaa

SEQ ID NO: 4375425 - DNA, 25 bp, Homo sapien
ttcaatgccatatccctcagttcat

SEQ ID NO: 4375426 - DNA, 25 bp, Homo sapien
tcatttttaaaccgattaccagcta

SEQ ID NO: 4375427 - DNA, 25 bp, Homo sapien
ctgcccacattgacagacttcaatg

SEQ ID NO: 4375428 - DNA, 25 bp, Homo sapien
atgtttgctgtggttaaatcccttc

SEQ ID NO: 4375429 - DNA, 25 bp, Homo sapien
actccttagtgactgtgtctggatg

SEQ ID NO: 4375430 - DNA, 25 bp, Homo sapien
ctgtaataaaccgcaccaagtaggt

SEQ ID NO: 4375431 - DNA, 25 bp, Homo sapien
tgactgtgtctggatgatcgttcat

SEQ ID NO: 4375432 - DNA, 25 bp, Homo sapien
caagtaggtataactccttagtgac

SEQ ID NO: 4375433 - DNA, 25 bp, Homo sapien
atcaatttgccaacccttttagcct

SEQ ID NO: 4375434 - DNA, 25 bp, Homo sapien
caatcaatttgccaacccttttagc

SEQ ID NO: 4375435 - DNA, 25 bp, Homo sapien
attctgcattaaacgaatgataatc

SEQ ID NO: 4375436 - DNA, 25 bp, Homo sapien
tgctgcattgacattaggacatttc

SEQ ID NO: 4375437 - DNA, 25 bp, Homo sapien
gcattaaacgaatgataatcacttc

SEQ ID NO: 4375438 - DNA, 25 bp, Homo sapien
gatctctgaaccctttgaaattctg

SEQ ID NO: 4375439 - DNA, 25 bp, Homo sapien
cccgaggaaacacagggatatttca

SEQ ID NO: 4375440 - DNA, 25 bp, Homo sapien
ggcttctcaagtcgtggctgctttg

SEQ ID NO: 4375441 - DNA, 25 bp, Homo sapien
ctactgtgcactggaattcaaaaag

SEQ ID NO: 4375442 - DNA, 25 bp, Homo sapien
cagtgtgtttcacgtccatctgaca

SEQ ID NO: 4375443 - DNA, 25 bp, Homo sapien
tatgctcggtggtgtctgcttaatc

SEQ ID NO: 4375444 - DNA, 25 bp, Homo sapien
aaaaagtcgcttggactgtcccagc

SEQ ID NO: 4375445 - DNA, 25 bp, Homo sapien
tgacctttaacgcaagtatgctcgg

SEQ ID NO: 4375446 - DNA, 25 bp, Homo sapien
tctgagatgcaaggtaaaaagtcgc

SEQ ID NO: 4375447 - DNA, 25 bp, Homo sapien
cagagtctgtggtagcaaattgtgg

SEQ ID NO: 4375448 - DNA, 25 bp, Homo sapien
tgtggttgtgatactctggtgatat

SEQ ID NO: 4375449 - DNA, 25 bp, Homo sapien
cgtttcgtcattagggatcttacag

SEQ ID NO: 4375450 - DNA, 25 bp, Homo sapien
gatatgatagatgaacgtttcgtca

SEQ ID NO: 4375451 - DNA, 25 bp, Homo sapien
tcttatcatgggttaattgttcagc

SEQ ID NO: 4375452 - DNA, 25 bp, Homo sapien
acatccaacctcttcttatcatggg

SEQ ID NO: 4375453 - DNA, 25 bp, Homo sapien
tcagctccattaggtttatgacatc

SEQ ID NO: 4375454 - DNA, 25 bp, Homo sapien
cctcttcttatcatgggttaattgt

SEQ ID NO: 4375455 - DNA, 25 bp, Homo sapien
atgacgtccatttggagttaggctc

SEQ ID NO: 4375456 - DNA, 25 bp, Homo sapien
gcagggaatgacgtccatttggagt

SEQ ID NO: 4375457 - DNA, 25 bp, Homo sapien
tgaaggcaaatattaatgcagggaa

SEQ ID NO: 4375458 - DNA, 25 bp, Homo sapien
ggtgaaggcaaatattaatgcaggg

SEQ ID NO: 4375459 - DNA, 25 bp, Homo sapien
gattttcaacatacagcggacccaa

SEQ ID NO: 4375460 - DNA, 25 bp, Homo sapien
cacatgcagcacagactgattttca

SEQ ID NO: 4375461 - DNA, 25 bp, Homo sapien
caagcaagaagtgttcagtactgaa

SEQ ID NO: 4375462 - DNA, 25 bp, Homo sapien
tttcccagaactgttagtgttcact

SEQ ID NO: 4375463 - DNA, 25 bp, Homo sapien
tttgttgctggttatctggctcccc

SEQ ID NO: 4375464 - DNA, 25 bp, Homo sapien
ctgatcacttggcaacccaccatgg

SEQ ID NO: 4375465 - DNA, 25 bp, Homo sapien
tcaaagttgtgctgtaattcggggc

SEQ ID NO: 4375466 - DNA, 25 bp, Homo sapien
gctgtcaaataactctcgcccctct

SEQ ID NO: 4375467 - DNA, 25 bp, Homo sapien
ctgctgaagcgagtaggcaagccca

SEQ ID NO: 4375468 - DNA, 25 bp, Homo sapien
attgcttttttctgtcgtggcaggg

SEQ ID NO: 4375469 - DNA, 25 bp, Homo sapien
tgcttttttctgtcgtggcagggtg

SEQ ID NO: 4375470 - DNA, 25 bp, Homo sapien
ttgcttttttctgtcgtggcagggt

SEQ ID NO: 4375471 - DNA, 25 bp, Homo sapien
tctcgaaggtacagcgagtgatggc

SEQ ID NO: 4375472 - DNA, 25 bp, Homo sapien
ctggctcccggccagtaaggcctgg

SEQ ID NO: 4375473 - DNA, 25 bp, Homo sapien
tcagggtaaccaacatgtcgactca

SEQ ID NO: 4375474 - DNA, 25 bp, Homo sapien
taacgcgcctgctatctagagactc

SEQ ID NO: 4375475 - DNA, 25 bp, Homo sapien
ttgctctcttttaaagttagtcttg

SEQ ID NO: 4375476 - DNA, 25 bp, Homo sapien
cataatcaagtttgctctcttttaa

SEQ ID NO: 4375477 - DNA, 25 bp, Homo sapien
tatttgtactcttttcataatcaag

SEQ ID NO: 4375478 - DNA, 25 bp, Homo sapien
tttcataatcaagtttgctctcttt

SEQ ID NO: 4375479 - DNA, 25 bp, Homo sapien
ctgacagatgaagcaataagcccat

SEQ ID NO: 4375480 - DNA, 25 bp, Homo sapien
gtgctggtaatagaggctgttgaca

SEQ ID NO: 4375481 - DNA, 25 bp, Homo sapien
ctttcctggatggaagttggctgca

SEQ ID NO: 4375482 - DNA, 25 bp, Homo sapien
ctgtagcagtgtcatcaaccaaagg

SEQ ID NO: 4375483 - DNA, 25 bp, Homo sapien
ccaaaggttcctggcaaggaggtgc

SEQ ID NO: 4375484 - DNA, 25 bp, Homo sapien
gtgctggtaatagaggctgttgaca

SEQ ID NO: 4375485 - DNA, 25 bp, Homo sapien
ccaaaggttcctggcaaggaggtgc

SEQ ID NO: 4375486 - DNA, 25 bp, Homo sapien
ctttcctggatggaagttggctgca

SEQ ID NO: 4375487 - DNA, 25 bp, Homo sapien
ctgtagcagtgtcatcaaccaaagg

SEQ ID NO: 4375488 - DNA, 25 bp, Homo sapien
cagcataaatggtacctggataaac

SEQ ID NO: 4375489 - DNA, 25 bp, Homo sapien
aatagtatactaaagggagagtcac

SEQ ID NO: 4375490 - DNA, 25 bp, Homo sapien
tattcgagaatgcaatttattgagc

SEQ ID NO: 4375491 - DNA, 25 bp, Homo sapien
aagatccaaccagcctagaaattcg

SEQ ID NO: 4375492 - DNA, 25 bp, Homo sapien
tcttatgaagatagccacaatggct

SEQ ID NO: 4375493 - DNA, 25 bp, Homo sapien
taagatgtatatttcgaagcacctc

SEQ ID NO: 4375494 - DNA, 25 bp, Homo sapien
tacttccacttatggcgtgacagca

SEQ ID NO: 4375495 - DNA, 25 bp, Homo sapien
gacgggtagcttctttgtgcactca

SEQ ID NO: 4375496 - DNA, 25 bp, Homo sapien
ggagtagagtgttgtactagtattc

SEQ ID NO: 4375497 - DNA, 25 bp, Homo sapien
tataaaatgtgtctcattaggctaa

SEQ ID NO: 4375498 - DNA, 25 bp, Homo sapien
ccagaaacatgtgttaaacttgaca

SEQ ID NO: 4375499 - DNA, 25 bp, Homo sapien
tatgatttatgtttgaagcaaccca

SEQ ID NO: 4375500 - DNA, 25 bp, Homo sapien
tggaggaaaaccgccaatcttccta

SEQ ID NO: 4375501 - DNA, 25 bp, Homo sapien
gccaatcttcctagcaacactatca

SEQ ID NO: 4375502 - DNA, 25 bp, Homo sapien
ggaaaaccgccaatcttcctagcaa

SEQ ID NO: 4375503 - DNA, 25 bp, Homo sapien
aaaaccgccaatcttcctagcaaca

SEQ ID NO: 4375504 - DNA, 25 bp, Homo sapien
aagcccatttgcaactgaggaaaga

SEQ ID NO: 4375505 - DNA, 25 bp, Homo sapien
tgccaaaagcccatttgcaactgag

SEQ ID NO: 4375506 - DNA, 25 bp, Homo sapien
gaaagatcacatgtaaaagtaaagg

SEQ ID NO: 4375507 - DNA, 25 bp, Homo sapien
catttgtacatatctgccaaaagcc

SEQ ID NO: 4375508 - DNA, 25 bp, Homo sapien
gccattttgagtggcaaactctagc

SEQ ID NO: 4375509 - DNA, 25 bp, Homo sapien
ggtctgtgacctcaatgcctggtta

SEQ ID NO: 4375510 - DNA, 25 bp, Homo sapien
ggagaagcaaccacgaagggatgaa

SEQ ID NO: 4375511 - DNA, 25 bp, Homo sapien
tatacgaggaatactggtctgtgac

SEQ ID NO: 4375512 - DNA, 25 bp, Homo sapien
cttcacatgcaacatttcaagcttc

SEQ ID NO: 4375513 - DNA, 25 bp, Homo sapien
ttcacatgcaacatttcaagcttca

SEQ ID NO: 4375514 - DNA, 25 bp, Homo sapien
aaggattcttcacatgcaacatttc

SEQ ID NO: 4375515 - DNA, 25 bp, Homo sapien
cacaaggattcttcacatgcaacat

SEQ ID NO: 4375516 - DNA, 25 bp, Homo sapien
gatgtgttcatttcaccaggactcc

SEQ ID NO: 4375517 - DNA, 25 bp, Homo sapien
tgtgctcatagatgtcaagtgggtg

SEQ ID NO: 4375518 - DNA, 25 bp, Homo sapien
gcccactaaatgcatacagtttgaa

SEQ ID NO: 4375519 - DNA, 25 bp, Homo sapien
gaatggattctacacatcaacaaag

SEQ ID NO: 4375520 - DNA, 25 bp, Homo sapien
catctgtatttcaagtgcaagaatt

SEQ ID NO: 4375521 - DNA, 25 bp, Homo sapien
tctgtatttcaagtgcaagaatttt

SEQ ID NO: 4375522 - DNA, 25 bp, Homo sapien
atctgtatttcaagtgcaagaattt

SEQ ID NO: 4375523 - DNA, 25 bp, Homo sapien
tgtgatccatacaccctgctaagag

SEQ ID NO: 4375524 - DNA, 25 bp, Homo sapien
acatatttccctaactgagtaccag

SEQ ID NO: 4375525 - DNA, 25 bp, Homo sapien
tctatgacccataaacctgtgatcc

SEQ ID NO: 4375526 - DNA, 25 bp, Homo sapien
tgcctgctgaactacgaatccctgc

SEQ ID NO: 4375527 - DNA, 25 bp, Homo sapien
ttggcatcatcatcgtttacatgtt

SEQ ID NO: 4375528 - DNA, 25 bp, Homo sapien
ggcatcatcatcgtttacatgtttc

SEQ ID NO: 4375529 - DNA, 25 bp, Homo sapien
gcatcatcatcgtttacatgtttca

SEQ ID NO: 4375530 - DNA, 25 bp, Homo sapien
catcatcatcgtttacatgtttcat

SEQ ID NO: 4375531 - DNA, 25 bp, Homo sapien
attaaggcccacaagctgaaagggt

SEQ ID NO: 4375532 - DNA, 25 bp, Homo sapien
cagagttttggccacctttatctcc

SEQ ID NO: 4375533 - DNA, 25 bp, Homo sapien
tctaccagagttttggccaccttta

SEQ ID NO: 4375534 - DNA, 25 bp, Homo sapien
tgctgctgtcatgtagctctatgat

SEQ ID NO: 4375535 - DNA, 25 bp, Homo sapien
ctgagattttcttgctattttgctt

SEQ ID NO: 4375536 - DNA, 25 bp, Homo sapien
gttctgaatagttatcttatctggg

SEQ ID NO: 4375537 - DNA, 25 bp, Homo sapien
gcttttgttctgaatagttatctta

SEQ ID NO: 4375538 - DNA, 25 bp, Homo sapien
tttgttctgaatagttatcttatct

SEQ ID NO: 4375539 - DNA, 25 bp, Homo sapien
catgaatgctgttatgcagagactg

SEQ ID NO: 4375540 - DNA, 25 bp, Homo sapien
caatttcctcatgaatgctgttatg

SEQ ID NO: 4375541 - DNA, 25 bp, Homo sapien
cctcatgaatgctgttatgcagaga

SEQ ID NO: 4375542 - DNA, 25 bp, Homo sapien
aatgctgttatgcagagactgttct

SEQ ID NO: 4375543 - DNA, 25 bp, Homo sapien
ttcaaaagtggaaatatgagagtca

SEQ ID NO: 4375544 - DNA, 25 bp, Homo sapien
gatttgcttctcatatagcctttca

SEQ ID NO: 4375545 - DNA, 25 bp, Homo sapien
ctcatatagcctttcaaaagtggaa

SEQ ID NO: 4375546 - DNA, 25 bp, Homo sapien
aatatgagagtcagcattgtgattc

SEQ ID NO: 4375547 - DNA, 25 bp, Homo sapien
gacagtagtgtcctagaggctcgaa

SEQ ID NO: 4375548 - DNA, 25 bp, Homo sapien
taacagtatgccactccactgcaca

SEQ ID NO: 4375549 - DNA, 25 bp, Homo sapien
ttatatactctgtgaattaacggta

SEQ ID NO: 4375550 - DNA, 25 bp, Homo sapien
gaggctcgaaagtaaatgcagcact

SEQ ID NO: 4375551 - DNA, 25 bp, Homo sapien
tgtggctggtattttcccaacacgc

SEQ ID NO: 4375552 - DNA, 25 bp, Homo sapien
ggcctgttactaccacttcactgac

SEQ ID NO: 4375553 - DNA, 25 bp, Homo sapien
cggttccaggtattgtgagagagat

SEQ ID NO: 4375554 - DNA, 25 bp, Homo sapien
tatgcaacatctcctcggttccagg

SEQ ID NO: 4375555 - DNA, 25 bp, Homo sapien
cacagctgtcttgaaaatagtccct

SEQ ID NO: 4375556 - DNA, 25 bp, Homo sapien
gtttaaacaaatgtggcctcttggc

SEQ ID NO: 4375557 - DNA, 25 bp, Homo sapien
gaactccctggaattagctgtctaa

SEQ ID NO: 4375558 - DNA, 25 bp, Homo sapien
ctcttggcaggcattgtgagcgaga

SEQ ID NO: 4375559 - DNA, 25 bp, Homo sapien
tcttgatgctcttaaagggtaaaca

SEQ ID NO: 4375560 - DNA, 25 bp, Homo sapien
gcttactcttgatgctcttaaaggg

SEQ ID NO: 4375561 - DNA, 25 bp, Homo sapien
atttgcttactcttgatgctcttaa

SEQ ID NO: 4375562 - DNA, 25 bp, Homo sapien
tgctcttaaagggtaaacaaagctc

SEQ ID NO: 4375563 - DNA, 25 bp, Homo sapien
cattttcttaacagctggcctgacg

SEQ ID NO: 4375564 - DNA, 25 bp, Homo sapien
gacttcctgcatgtatccaacctag

SEQ ID NO: 4375565 - DNA, 25 bp, Homo sapien
tgcctgccactcagaccagtgactt

SEQ ID NO: 4375566 - DNA, 25 bp, Homo sapien
cagttctggctgagcattcctttac

SEQ ID NO: 4375567 - DNA, 25 bp, Homo sapien
tatcagctcattatcggcgtttgca

SEQ ID NO: 4375568 - DNA, 25 bp, Homo sapien
tcagttcctcttaggagtatcagct

SEQ ID NO: 4375569 - DNA, 25 bp, Homo sapien
tcggcgtttgcatctttgtttcctc

SEQ ID NO: 4375570 - DNA, 25 bp, Homo sapien
taggagtatcagctcattatcggcg

SEQ ID NO: 4375571 - DNA, 25 bp, Homo sapien
gtactcctttatttatattgaccat

SEQ ID NO: 4375572 - DNA, 25 bp, Homo sapien
ctgtactcctttatttatattgacc

SEQ ID NO: 4375573 - DNA, 25 bp, Homo sapien
tgtactcctttatttatattgacca

SEQ ID NO: 4375574 - DNA, 25 bp, Homo sapien
gattgactacaagcaggaactgaag

SEQ ID NO: 4375575 - DNA, 25 bp, Homo sapien
gagaagttgttcatggcctggctgt

SEQ ID NO: 4375576 - DNA, 25 bp, Homo sapien
cataattgaccatgtgtccggaaga

SEQ ID NO: 4375577 - DNA, 25 bp, Homo sapien
gaacaatagtctttcagaggtccac

SEQ ID NO: 4375578 - DNA, 25 bp, Homo sapien
cctactaattcagcctctgctggca

SEQ ID NO: 4375579 - DNA, 25 bp, Homo sapien
ctactaattcagcctctgctggcat

SEQ ID NO: 4375580 - DNA, 25 bp, Homo sapien
tcccagggctgtttcacattcccaa

SEQ ID NO: 4375581 - DNA, 25 bp, Homo sapien
ttaagattcccagggctgtttcaca

SEQ ID NO: 4375582 - DNA, 25 bp, Homo sapien
tcacattcccaaggggtttggcaga

SEQ ID NO: 4375583 - DNA, 25 bp, Homo sapien
cattcccaaggggtttggcagagtc

SEQ ID NO: 4375584 - DNA, 25 bp, Homo sapien
ctcctccttatctccttttatctta

SEQ ID NO: 4375585 - DNA, 25 bp, Homo sapien
cttttatcttaaggtttactatctg

SEQ ID NO: 4375586 - DNA, 25 bp, Homo sapien
ctccttatctccttttatcttaagg

SEQ ID NO: 4375587 - DNA, 25 bp, Homo sapien
tcctcctccttatctccttttatct

SEQ ID NO: 4375588 - DNA, 25 bp, Homo sapien
tttggtgatggcaaggagacaactc

SEQ ID NO: 4375589 - DNA, 25 bp, Homo sapien
tggtgatggcaaggagacaactcat

SEQ ID NO: 4375590 - DNA, 25 bp, Homo sapien
ctttggtgatggcaaggagacaact

SEQ ID NO: 4375591 - DNA, 25 bp, Homo sapien
ttggtgatggcaaggagacaactca

SEQ ID NO: 4375592 - DNA, 25 bp, Homo sapien
ttgaagaggtctatgtcatatgcca

SEQ ID NO: 4375593 - DNA, 25 bp, Homo sapien
ccaaaaggtgcaagtgattgaagag

SEQ ID NO: 4375594 - DNA, 25 bp, Homo sapien
tttccaactccaaaaggtgcaagtg

SEQ ID NO: 4375595 - DNA, 25 bp, Homo sapien
caagtgattgaagaggtctatgtca

SEQ ID NO: 4375596 - DNA, 25 bp, Homo sapien
ttaccatctatcgaattaattatgc

SEQ ID NO: 4375597 - DNA, 25 bp, Homo sapien
tatcgaattaattatgcaagtttca

SEQ ID NO: 4375598 - DNA, 25 bp, Homo sapien
ccatctatcgaattaattatgcaag

SEQ ID NO: 4375599 - DNA, 25 bp, Homo sapien
tatttaccatctatcgaattaatta

SEQ ID NO: 4375600 - DNA, 25 bp, Homo sapien
ggtgtgtctctgatagtatttccag

SEQ ID NO: 4375601 - DNA, 25 bp, Homo sapien
ccgatcgctggtaaaatgttgtttc

SEQ ID NO: 4375602 - DNA, 25 bp, Homo sapien
tcactctcaccaatgtaggtaggca

SEQ ID NO: 4375603 - DNA, 25 bp, Homo sapien
gctaagggatgctccgatcgctggt

SEQ ID NO: 4375604 - DNA, 25 bp, Homo sapien
tccgataagtccaacatatgtcagg

SEQ ID NO: 4375605 - DNA, 25 bp, Homo sapien
tatagatcgactgtgttttcgctgc

SEQ ID NO: 4375606 - DNA, 25 bp, Homo sapien
gaaattttggttgaactaagctcac

SEQ ID NO: 4375607 - DNA, 25 bp, Homo sapien
taaccttagtaggagtcaggctgtg

SEQ ID NO: 4375608 - DNA, 25 bp, Homo sapien
cacacatcttatactctgttatctt

SEQ ID NO: 4375609 - DNA, 25 bp, Homo sapien
gtgttcttgaggtataacatggctt

SEQ ID NO: 4375610 - DNA, 25 bp, Homo sapien
tctggtgttcttgaggtataacatg

SEQ ID NO: 4375611 - DNA, 25 bp, Homo sapien
tggcttttgctttctaaacaccaaa

SEQ ID NO: 4375612 - DNA, 25 bp, Homo sapien
ttgttttcagtctcatacatttgct

SEQ ID NO: 4375613 - DNA, 25 bp, Homo sapien
gttttcagtctcatacatttgctgt

SEQ ID NO: 4375614 - DNA, 25 bp, Homo sapien
tgttttcagtctcatacatttgctg

SEQ ID NO: 4375615 - DNA, 25 bp, Homo sapien
ttttcagtctcatacatttgctgta

SEQ ID NO: 4375616 - DNA, 25 bp, Homo sapien
tatattgaaatacgctgtgaactgc

SEQ ID NO: 4375617 - DNA, 25 bp, Homo sapien
tagagcatttacacaccagtgtgga

SEQ ID NO: 4375618 - DNA, 25 bp, Homo sapien
ccagtgtggagagaccatattttct

SEQ ID NO: 4375619 - DNA, 25 bp, Homo sapien
gaacacacctaaatgtctagagtca

SEQ ID NO: 4375620 - DNA, 25 bp, Homo sapien
agctgtgacagttgccatagcaaag

SEQ ID NO: 4375621 - DNA, 25 bp, Homo sapien
aaagggttaggtgcttataatagct

SEQ ID NO: 4375622 - DNA, 25 bp, Homo sapien
aagggttaggtgcttataatagctg

SEQ ID NO: 4375623 - DNA, 25 bp, Homo sapien
gtgacagttgccatagcaaagtatc

SEQ ID NO: 4375624 - DNA, 25 bp, Homo sapien
tggtagctccttggcttctctatgc

SEQ ID NO: 4375625 - DNA, 25 bp, Homo sapien
cttctggtagctccttggcttctct

SEQ ID NO: 4375626 - DNA, 25 bp, Homo sapien
aggcactaaggaaaggtctgttcca

SEQ ID NO: 4375627 - DNA, 25 bp, Homo sapien
agctccttggcttctctatgcaaaa

SEQ ID NO: 4375628 - DNA, 25 bp, Homo sapien
tgcactttagtcaggcagtatgaaa

SEQ ID NO: 4375629 - DNA, 25 bp, Homo sapien
tccaccgcctgtcaatatgtagctg

SEQ ID NO: 4375630 - DNA, 25 bp, Homo sapien
aaccataagtatcgagctctcatca

SEQ ID NO: 4375631 - DNA, 25 bp, Homo sapien
gaaaataccgtcaaaagcttcagaa

SEQ ID NO: 4375632 - DNA, 25 bp, Homo sapien
agactataacttgaatgactcagac

SEQ ID NO: 4375633 - DNA, 25 bp, Homo sapien
gattcaactcgtcttcaaatagact

SEQ ID NO: 4375634 - DNA, 25 bp, Homo sapien
cgtcttcaaatagactataacttga

SEQ ID NO: 4375635 - DNA, 25 bp, Homo sapien
gtttcagattcaactcgtcttcaaa

SEQ ID NO: 4375636 - DNA, 25 bp, Homo sapien
gtgaagccaacacgcatgcaggaac

SEQ ID NO: 4375637 - DNA, 25 bp, Homo sapien
aaccccgcagatcctgttgttattg

SEQ ID NO: 4375638 - DNA, 25 bp, Homo sapien
gcaggaaccccgcagatcctgttgt

SEQ ID NO: 4375639 - DNA, 25 bp, Homo sapien
ccagtgaagccaacacgcatgcagg

SEQ ID NO: 4375640 - DNA, 25 bp, Homo sapien
catgcctccgccacttactcctact

SEQ ID NO: 4375641 - DNA, 25 bp, Homo sapien
ttatctgtagacagcctctccacag

SEQ ID NO: 4375642 - DNA, 25 bp, Homo sapien
caggggctgccgtatctctgccagt

SEQ ID NO: 4375643 - DNA, 25 bp, Homo sapien
ttatgttatctgtagacagcctctc

SEQ ID NO: 4375644 - DNA, 25 bp, Homo sapien
tgtgtttctcaaaaccttgatacat

SEQ ID NO: 4375645 - DNA, 25 bp, Homo sapien
tttgtgtttctcaaaaccttgatac

SEQ ID NO: 4375646 - DNA, 25 bp, Homo sapien
ttgtgtttctcaaaaccttgataca

SEQ ID NO: 4375647 - DNA, 25 bp, Homo sapien
ttttggagtataggccaagggcagc

SEQ ID NO: 4375648 - DNA, 25 bp, Homo sapien
cacggaagcaggattctgaaactct

SEQ ID NO: 4375649 - DNA, 25 bp, Homo sapien
tggtatgtgtactgcctgatgaact

SEQ ID NO: 4375650 - DNA, 25 bp, Homo sapien
agaggactgaggcttttggagtata

SEQ ID NO: 4375651 - DNA, 25 bp, Homo sapien
caaatgccttcataccatgacagtc

SEQ ID NO: 4375652 - DNA, 25 bp, Homo sapien
acagatgacatctattaccagacag

SEQ ID NO: 4375653 - DNA, 25 bp, Homo sapien
tgattgagctgatggctaaagggac

SEQ ID NO: 4375654 - DNA, 25 bp, Homo sapien
agacagatccacttacaaatgcctt

SEQ ID NO: 4375655 - DNA, 25 bp, Homo sapien
ccatggtccacttgtaagtaatttc

SEQ ID NO: 4375656 - DNA, 25 bp, Homo sapien
catggtccacttgtaagtaatttca

SEQ ID NO: 4375657 - DNA, 25 bp, Homo sapien
tggtccacttgtaagtaatttcaaa

SEQ ID NO: 4375658 - DNA, 25 bp, Homo sapien
tcccatggtccacttgtaagtaatt

SEQ ID NO: 4375659 - DNA, 25 bp, Homo sapien
tcacagcttgctacacagcatcaag

SEQ ID NO: 4375660 - DNA, 25 bp, Homo sapien
ggtctgaaagagctcacctaaattt

SEQ ID NO: 4375661 - DNA, 25 bp, Homo sapien
gctcctttaataacattaatgtggg

SEQ ID NO: 4375662 - DNA, 25 bp, Homo sapien
aagagttcagcgcagtttccctcaa

SEQ ID NO: 4375663 - DNA, 25 bp, Homo sapien
caattgtagctgatacttaacaagg

SEQ ID NO: 4375664 - DNA, 25 bp, Homo sapien
gagtacaagaaccaagtgaagaggg

SEQ ID NO: 4375665 - DNA, 25 bp, Homo sapien
ttaacaaggataaatagggctattc

SEQ ID NO: 4375666 - DNA, 25 bp, Homo sapien
gatgtacgctacaaaataacttttc

SEQ ID NO: 4375667 - DNA, 25 bp, Homo sapien
gtgtggtcagatcaatacgtaatat

SEQ ID NO: 4375668 - DNA, 25 bp, Homo sapien
tgtgtgtggtcagatcaatacgtaa

SEQ ID NO: 4375669 - DNA, 25 bp, Homo sapien
tcatgaccagttgatttctattggt

SEQ ID NO: 4375670 - DNA, 25 bp, Homo sapien
attgtgtgtggtcagatcaatacgt

SEQ ID NO: 4375671 - DNA, 25 bp, Homo sapien
tgtaacctctcttcaatatagtgct

SEQ ID NO: 4375672 - DNA, 25 bp, Homo sapien
catacatgaagggatccaagcctcg

SEQ ID NO: 4375673 - DNA, 25 bp, Homo sapien
taactgcattgacaggagtagttcc

SEQ ID NO: 4375674 - DNA, 25 bp, Homo sapien
tccgttatacgttagagtaactgca

SEQ ID NO: 4375675 - DNA, 25 bp, Homo sapien
aaatataggtctctttcataggtgt

SEQ ID NO: 4375676 - DNA, 25 bp, Homo sapien
gccatctgattatcatctgcagcaa

SEQ ID NO: 4375677 - DNA, 25 bp, Homo sapien
tgtgccatctgattatcatctgcag

SEQ ID NO: 4375678 - DNA, 25 bp, Homo sapien
aacagagaaccctgtgccatctgat

SEQ ID NO: 4375679 - DNA, 25 bp, Homo sapien
gaaccctgtgccatctgattatcat

SEQ ID NO: 4375680 - DNA, 25 bp, Homo sapien
catggtaggatgtgaccaccacgga

SEQ ID NO: 4375681 - DNA, 25 bp, Homo sapien
tgagctggctcttgacatggtagga

SEQ ID NO: 4375682 - DNA, 25 bp, Homo sapien
ccaccacggacatgtaggtttattg

SEQ ID NO: 4375683 - DNA, 25 bp, Homo sapien
gtcctctgacgccaatatctttgcc

SEQ ID NO: 4375684 - DNA, 25 bp, Homo sapien
cattggggacgtaggcatttacagt

SEQ ID NO: 4375685 - DNA, 25 bp, Homo sapien
gggacgtaggcatttacagtttgaa

SEQ ID NO: 4375686 - DNA, 25 bp, Homo sapien
cgtaggcatttacagtttgaacata

SEQ ID NO: 4375687 - DNA, 25 bp, Homo sapien
ccgagcattggggacgtaggcattt

SEQ ID NO: 4375688 - DNA, 25 bp, Homo sapien
tccagtactggggtaaccataaatg

SEQ ID NO: 4375689 - DNA, 25 bp, Homo sapien
gtactggggtaaccataaatgctgg

SEQ ID NO: 4375690 - DNA, 25 bp, Homo sapien
agtactggggtaaccataaatgctg

SEQ ID NO: 4375691 - DNA, 25 bp, Homo sapien
gaactgcttgaatatatcccaggtt

SEQ ID NO: 4375692 - DNA, 25 bp, Homo sapien
tgccaccattagcatgaatttcatg

SEQ ID NO: 4375693 - DNA, 25 bp, Homo sapien
aaaatagggcaataaggtgtatcta

SEQ ID NO: 4375694 - DNA, 25 bp, Homo sapien
caaaaggggtcggataacagtgcca

SEQ ID NO: 4375695 - DNA, 25 bp, Homo sapien
tagggcaataaggtgtatctaatat

SEQ ID NO: 4375696 - DNA, 25 bp, Homo sapien
aggccatcacaaagctcgaggtaac

SEQ ID NO: 4375697 - DNA, 25 bp, Homo sapien
gttgtgtcatatcgatgatgattcc

SEQ ID NO: 4375698 - DNA, 25 bp, Homo sapien
ggccctttatagttgtgtcatatcg

SEQ ID NO: 4375699 - DNA, 25 bp, Homo sapien
ttaaatgtttttcgttgacatcagc

SEQ ID NO: 4375700 - DNA, 25 bp, Homo sapien
tccttgagtatggataaaatgctcc

SEQ ID NO: 4375701 - DNA, 25 bp, Homo sapien
tattctgagttgttgaaaaaaccac

SEQ ID NO: 4375702 - DNA, 25 bp, Homo sapien
tgctccaagttgcatccagcgggta

SEQ ID NO: 4375703 - DNA, 25 bp, Homo sapien
aaaaaaccacagatgtctgctccag

SEQ ID NO: 4375704 - DNA, 25 bp, Homo sapien
atatgacattccaaacagactaaat

SEQ ID NO: 4375705 - DNA, 25 bp, Homo sapien
atgacattccaaacagactaaattc

SEQ ID NO: 4375706 - DNA, 25 bp, Homo sapien
tatgacattccaaacagactaaatt

SEQ ID NO: 4375707 - DNA, 25 bp, Homo sapien
cactagtaggatacgtggaacgaga

SEQ ID NO: 4375708 - DNA, 25 bp, Homo sapien
tccatgttgtcccatcgtgcatagt

SEQ ID NO: 4375709 - DNA, 25 bp, Homo sapien
tggaacgagaaattacaatccctct

SEQ ID NO: 4375710 - DNA, 25 bp, Homo sapien
catcgtgcatagttgtctccaagcc

SEQ ID NO: 4375711 - DNA, 25 bp, Homo sapien
tctgtgaccatccatagagattgtg

SEQ ID NO: 4375712 - DNA, 25 bp, Homo sapien
tcgtaatgcaaaactgatgttccat

SEQ ID NO: 4375713 - DNA, 25 bp, Homo sapien
tcagcttccatgcaaattgttctga

SEQ ID NO: 4375714 - DNA, 25 bp, Homo sapien
gttccatcactaagaatctgctcag

SEQ ID NO: 4375715 - DNA, 25 bp, Homo sapien
ttctgcattgattagtagttgttcc

SEQ ID NO: 4375716 - DNA, 25 bp, Homo sapien
taaggtggataatttagttcgtcat

SEQ ID NO: 4375717 - DNA, 25 bp, Homo sapien
gcattgattagtagttgttccattt

SEQ ID NO: 4375718 - DNA, 25 bp, Homo sapien
atttagttcgtcatttctgcattga

SEQ ID NO: 4375719 - DNA, 25 bp, Homo sapien
tgtggaagtcctgaagaaatctggg

SEQ ID NO: 4375720 - DNA, 25 bp, Homo sapien
gaaatctgggaaagctacatgagct

SEQ ID NO: 4375721 - DNA, 25 bp, Homo sapien
tggcccaccactctgctgtggaagt

SEQ ID NO: 4375722 - DNA, 25 bp, Homo sapien
aaagtccacaatttctctggcccac

SEQ ID NO: 4375723 - DNA, 25 bp, Homo sapien
ttatctattgttatgttgggcaaat

SEQ ID NO: 4375724 - DNA, 25 bp, Homo sapien
tcattggtgtttggccatttgacaa

SEQ ID NO: 4375725 - DNA, 25 bp, Homo sapien
gtcattggtgtttggccatttgaca

SEQ ID NO: 4375726 - DNA, 25 bp, Homo sapien
tctttcaaatgcagggtaagtcttt

SEQ ID NO: 4375727 - DNA, 25 bp, Homo sapien
caaatgcagggtaagtctttgtttc

SEQ ID NO: 4375728 - DNA, 25 bp, Homo sapien
catgtagtcaatgtctgtgtactga

SEQ ID NO: 4375729 - DNA, 25 bp, Homo sapien
cttcaccaattgtaaagtctagctg

SEQ ID NO: 4375730 - DNA, 25 bp, Homo sapien
tgtcaacaaactgaggaaggtcctg

SEQ ID NO: 4375731 - DNA, 25 bp, Homo sapien
tattttgtcaacaaactgaggaagg

SEQ ID NO: 4375732 - DNA, 25 bp, Homo sapien
tataaaagtaacagcaatatgaaag

SEQ ID NO: 4375733 - DNA, 25 bp, Homo sapien
agtttgagttcctcttcactagatc

SEQ ID NO: 4375734 - DNA, 25 bp, Homo sapien
ttatcaaagtagggcaaaaaataca

SEQ ID NO: 4375735 - DNA, 25 bp, Homo sapien
tagtaagtgtatcatattttatcat

SEQ ID NO: 4375736 - DNA, 25 bp, Homo sapien
tgcatatccataacgacataattgg

SEQ ID NO: 4375737 - DNA, 25 bp, Homo sapien
tagcagccaccatagcgtcatataa

SEQ ID NO: 4375738 - DNA, 25 bp, Homo sapien
tcccgaacctctgaagtatttgcat

SEQ ID NO: 4375739 - DNA, 25 bp, Homo sapien
atcccaaagcccaataagctggcat

SEQ ID NO: 4375740 - DNA, 25 bp, Homo sapien
cctccaactgtacggtaagttagag

SEQ ID NO: 4375741 - DNA, 25 bp, Homo sapien
ctggagttgggcccaaaaacatata

SEQ ID NO: 4375742 - DNA, 25 bp, Homo sapien
tgtacggtaagttagagcaggagtt

SEQ ID NO: 4375743 - DNA, 25 bp, Homo sapien
caagatccctccaactgtacggtaa

SEQ ID NO: 4375744 - DNA, 25 bp, Homo sapien
cttccagagccatgtaatagggatg

SEQ ID NO: 4375745 - DNA, 25 bp, Homo sapien
gatgaaatccataggaattaagttt

SEQ ID NO: 4375746 - DNA, 25 bp, Homo sapien
gaaaacaccatgagcattgccctcc

SEQ ID NO: 4375747 - DNA, 25 bp, Homo sapien
cattgctgttgagtaagaaaacacc

SEQ ID NO: 4375748 - DNA, 25 bp, Homo sapien
tgaatgaactggtcattaaaagcaa

SEQ ID NO: 4375749 - DNA, 25 bp, Homo sapien
tattctgatggcaggcgagtcgata

SEQ ID NO: 4375750 - DNA, 25 bp, Homo sapien
caagtattccagttcagatctcgct

SEQ ID NO: 4375751 - DNA, 25 bp, Homo sapien
gttggtctcttgtgaacattcccca

SEQ ID NO: 4375752 - DNA, 25 bp, Homo sapien
taacggtactggtacttcatatctc

SEQ ID NO: 4375753 - DNA, 25 bp, Homo sapien
cataagtacttattggggtggttgg

SEQ ID NO: 4375754 - DNA, 25 bp, Homo sapien
tttaacggtactggtacttcatatc

SEQ ID NO: 4375755 - DNA, 25 bp, Homo sapien
atgtttaacggtactggtacttcat

SEQ ID NO: 4375756 - DNA, 25 bp, Homo sapien
gagatggggtcagaaggtaacttta

SEQ ID NO: 4375757 - DNA, 25 bp, Homo sapien
tttcacctccacacgaagagttgag

SEQ ID NO: 4375758 - DNA, 25 bp, Homo sapien
cctccacacgaagagttgagatggg

SEQ ID NO: 4375759 - DNA, 25 bp, Homo sapien
aaactgcaacatatcatttttgtga

SEQ ID NO: 4375760 - DNA, 25 bp, Homo sapien
gatgaatagcgagctgagttgactg

SEQ ID NO: 4375761 - DNA, 25 bp, Homo sapien
gaatagcgagctgagttgactgaat

SEQ ID NO: 4375762 - DNA, 25 bp, Homo sapien
tacccatggatgaatagcgagctga

SEQ ID NO: 4375763 - DNA, 25 bp, Homo sapien
catggatgaatagcgagctgagttg

SEQ ID NO: 4375764 - DNA, 25 bp, Homo sapien
cgttctccatacacagccacgttgt

SEQ ID NO: 4375765 - DNA, 25 bp, Homo sapien
gattccattgaacactaaagtttct

SEQ ID NO: 4375766 - DNA, 25 bp, Homo sapien
cttttgttcagttgccaaatctgca

SEQ ID NO: 4375767 - DNA, 25 bp, Homo sapien
gccacgttgtgtgcacttttgttca

SEQ ID NO: 4375768 - DNA, 25 bp, Homo sapien
ggttgattattttccgccactctaa

SEQ ID NO: 4375769 - DNA, 25 bp, Homo sapien
gccactctaacttctgtaacactgt

SEQ ID NO: 4375770 - DNA, 25 bp, Homo sapien
ctgaaatgctaaggtagttccttcc

SEQ ID NO: 4375771 - DNA, 25 bp, Homo sapien
tagaagcatcataagtgaaattgga

SEQ ID NO: 4375772 - DNA, 25 bp, Homo sapien
tgtatataatatgtagttgccattt

SEQ ID NO: 4375773 - DNA, 25 bp, Homo sapien
tgtgcttacaccccagggtatttaa

SEQ ID NO: 4375774 - DNA, 25 bp, Homo sapien
tagtgtgcttacaccccagggtatt

SEQ ID NO: 4375775 - DNA, 25 bp, Homo sapien
agtgtgcttacaccccagggtattt

SEQ ID NO: 4375776 - DNA, 25 bp, Homo sapien
tgcttacaccccagggtatttaaga

SEQ ID NO: 4375777 - DNA, 25 bp, Homo sapien
tgttttcacctaatgcgactataag

SEQ ID NO: 4375778 - DNA, 25 bp, Homo sapien
taatgcgactataagtcctagagga

SEQ ID NO: 4375779 - DNA, 25 bp, Homo sapien
tcctttggctgtgttgttttcacct

SEQ ID NO: 4375780 - DNA, 25 bp, Homo sapien
tataagtcctagaggattcttacgg

SEQ ID NO: 4375781 - DNA, 25 bp, Homo sapien
gggatgatataacctcctctaagat

SEQ ID NO: 4375782 - DNA, 25 bp, Homo sapien
gttgttgttacatctggttcttgaa

SEQ ID NO: 4375783 - DNA, 25 bp, Homo sapien
tgtctgctggaagatacatatcaac

SEQ ID NO: 4375784 - DNA, 25 bp, Homo sapien
atatcaacccgttgtttcctccatg

SEQ ID NO: 4375785 - DNA, 25 bp, Homo sapien
tgtaggcactcacagtatctgctcc

SEQ ID NO: 4375786 - DNA, 25 bp, Homo sapien
gattcataatcataccaaatagcat

SEQ ID NO: 4375787 - DNA, 25 bp, Homo sapien
cagggatgtaggcactcacagtatc

SEQ ID NO: 4375788 - DNA, 25 bp, Homo sapien
caaatagcatcagggatgtaggcac

SEQ ID NO: 4375789 - DNA, 25 bp, Homo sapien
tttagaacaggagtaataagtaatg

SEQ ID NO: 4375790 - DNA, 25 bp, Homo sapien
ttagaacaggagtaataagtaatgc

SEQ ID NO: 4375791 - DNA, 25 bp, Homo sapien
gaactggtcttgctactgtttctcc

SEQ ID NO: 4375792 - DNA, 25 bp, Homo sapien
tctccaaacacatgggctttataaa

SEQ ID NO: 4375793 - DNA, 25 bp, Homo sapien
ggtgtagcgaatagttaaatactgc

SEQ ID NO: 4375794 - DNA, 25 bp, Homo sapien
tataaaacagagtgtagaggaaggg

SEQ ID NO: 4375795 - DNA, 25 bp, Homo sapien
tgcccaaaaaatgcaggatcctgat

SEQ ID NO: 4375796 - DNA, 25 bp, Homo sapien
gcccaaaaaatgcaggatcctgatg

SEQ ID NO: 4375797 - DNA, 25 bp, Homo sapien
gtttcagccacaaatccacagatgt

SEQ ID NO: 4375798 - DNA, 25 bp, Homo sapien
tcatatccgtcagaattatggtttc

SEQ ID NO: 4375799 - DNA, 25 bp, Homo sapien
gttgcatccatcttctgcaaagttc

SEQ ID NO: 4375800 - DNA, 25 bp, Homo sapien
aaaatgccccaagttgcatccatct

SEQ ID NO: 4375801 - DNA, 25 bp, Homo sapien
gtaacactctatgaaactgtcttac

SEQ ID NO: 4375802 - DNA, 25 bp, Homo sapien
cagcattccagttatagaccattcc

SEQ ID NO: 4375803 - DNA, 25 bp, Homo sapien
gaccattccatttgttcccatgaag

SEQ ID NO: 4375804 - DNA, 25 bp, Homo sapien
catgaagcagtattgtctcctaacc

SEQ ID NO: 4375805 - DNA, 25 bp, Homo sapien
aatgcgcagcatgtcttccagatcc

SEQ ID NO: 4375806 - DNA, 25 bp, Homo sapien
ctctgtggctatagccatgctgtat

SEQ ID NO: 4375807 - DNA, 25 bp, Homo sapien
tactgtttaccccagttctgcacag

SEQ ID NO: 4375808 - DNA, 25 bp, Homo sapien
tgtatccatagaggctatgaacatc

SEQ ID NO: 4375809 - DNA, 25 bp, Homo sapien
tatgaacatcatactgtttacccca

SEQ ID NO: 4375810 - DNA, 25 bp, Homo sapien
tgttttggaatacatgagtttgtca

SEQ ID NO: 4375811 - DNA, 25 bp, Homo sapien
ctttgagaaaatacataagaaacat

SEQ ID NO: 4375812 - DNA, 25 bp, Homo sapien
cattacatccttttgttgaaccttg

SEQ ID NO: 4375813 - DNA, 25 bp, Homo sapien
caggagtaaacggtggataattcaa

SEQ ID NO: 4375814 - DNA, 25 bp, Homo sapien
gtttacattacatccttttgttgaa

SEQ ID NO: 4375815 - DNA, 25 bp, Homo sapien
catccttttgttgaaccttgaataa

SEQ ID NO: 4375816 - DNA, 25 bp, Homo sapien
gcccaccaatcaatgcagtttgggt

SEQ ID NO: 4375817 - DNA, 25 bp, Homo sapien
gggtatactgttaatcctggccata

SEQ ID NO: 4375818 - DNA, 25 bp, Homo sapien
aatccaaagtccatcatattgcact

SEQ ID NO: 4375819 - DNA, 25 bp, Homo sapien
aatactgcattcatttgcccaccaa

SEQ ID NO: 4375820 - DNA, 25 bp, Homo sapien
taggttgcatatgttgttccattgg

SEQ ID NO: 4375821 - DNA, 25 bp, Homo sapien
aattggtgtacttccatctgactca

SEQ ID NO: 4375822 - DNA, 25 bp, Homo sapien
tctccaataattggtgtacttccat

SEQ ID NO: 4375823 - DNA, 25 bp, Homo sapien
cgtcgacctatggaaattgcagggt

SEQ ID NO: 4375824 - DNA, 25 bp, Homo sapien
aaatgtattaaggtataattgatta

SEQ ID NO: 4375825 - DNA, 25 bp, Homo sapien
aaaaatgtattaaggtataattgat

SEQ ID NO: 4375826 - DNA, 25 bp, Homo sapien
gtattaaggtataattgattattac

SEQ ID NO: 4375827 - DNA, 25 bp, Homo sapien
ctaaaaatgtattaaggtataattg

SEQ ID NO: 4375828 - DNA, 25 bp, Homo sapien
gtcttccatgtagtcaatatcagtg

SEQ ID NO: 4375829 - DNA, 25 bp, Homo sapien
tgtccatggtcatgcaaatcttgca

SEQ ID NO: 4375830 - DNA, 25 bp, Homo sapien
tgcacaaattgagggagtccgttaa

SEQ ID NO: 4375831 - DNA, 25 bp, Homo sapien
cgcaacttgatcataagtaaagtct

SEQ ID NO: 4375832 - DNA, 25 bp, Homo sapien
gtatgccagcttcccggtttctcct

SEQ ID NO: 4375833 - DNA, 25 bp, Homo sapien
aaatggtatgccagcttcccggttt

SEQ ID NO: 4375834 - DNA, 25 bp, Homo sapien
tggtatgccagcttcccggtttctc

SEQ ID NO: 4375835 - DNA, 25 bp, Homo sapien
aatggtatgccagcttcccggtttc

SEQ ID NO: 4375836 - DNA, 25 bp, Homo sapien
gtgacttataattccagcgacttag

SEQ ID NO: 4375837 - DNA, 25 bp, Homo sapien
cacttctttcactacatctagtgac

SEQ ID NO: 4375838 - DNA, 25 bp, Homo sapien
tacatctagtgacttataattccag

SEQ ID NO: 4375839 - DNA, 25 bp, Homo sapien
tataattccagcgacttagttggaa

SEQ ID NO: 4375840 - DNA, 25 bp, Homo sapien
tctggtgtatctcctagaaggatgt

SEQ ID NO: 4375841 - DNA, 25 bp, Homo sapien
gaactacttgttctggtgtatctcc

SEQ ID NO: 4375842 - DNA, 25 bp, Homo sapien
tatatgttactattggagtaggctg

SEQ ID NO: 4375843 - DNA, 25 bp, Homo sapien
taaaaatccagaatgccaccggtaa

SEQ ID NO: 4375844 - DNA, 25 bp, Homo sapien
ccattgcattgctattcattaaaaa

SEQ ID NO: 4375845 - DNA, 25 bp, Homo sapien
ccagatgtatcttcaatacacataa

SEQ ID NO: 4375846 - DNA, 25 bp, Homo sapien
cataaagaatgtttgatggccgtat

SEQ ID NO: 4375847 - DNA, 25 bp, Homo sapien
aaaaacaccgaatgactttccagat

SEQ ID NO: 4375848 - DNA, 25 bp, Homo sapien
tgagatctgtaagtactggtcagag

SEQ ID NO: 4375849 - DNA, 25 bp, Homo sapien
ggtctcgagtaaaaattggccatgt

SEQ ID NO: 4375850 - DNA, 25 bp, Homo sapien
gaaatctcttatgaacttgttctcc

SEQ ID NO: 4375851 - DNA, 25 bp, Homo sapien
ccaggataaatcatgacgaaatctc

SEQ ID NO: 4375852 - DNA, 25 bp, Homo sapien
aaccttcacatcatacaacgtatca

SEQ ID NO: 4375853 - DNA, 25 bp, Homo sapien
tgatgaggaacttcatatcttctat

SEQ ID NO: 4375854 - DNA, 25 bp, Homo sapien
tgtgggtccagtaaactcttttaca

SEQ ID NO: 4375855 - DNA, 25 bp, Homo sapien
cttggatgctaaatgggttttgggc

SEQ ID NO: 4375856 - DNA, 25 bp, Homo sapien
tgaaccggaaacgattgggtgtctg

SEQ ID NO: 4375857 - DNA, 25 bp, Homo sapien
catttccaaatagtgtaggtgaagg

SEQ ID NO: 4375858 - DNA, 25 bp, Homo sapien
ccggaaacgattgggtgtctgattt

SEQ ID NO: 4375859 - DNA, 25 bp, Homo sapien
gtctgattttgagttgtgaagagaa

SEQ ID NO: 4375860 - DNA, 25 bp, Homo sapien
gttataaccatgattatcaacgaag

SEQ ID NO: 4375861 - DNA, 25 bp, Homo sapien
aagagagtcattccacggcctccag

SEQ ID NO: 4375862 - DNA, 25 bp, Homo sapien
aataagagagtcattccacggcctc

SEQ ID NO: 4375863 - DNA, 25 bp, Homo sapien
cttgttgttgtcatgtcttgaacgt

SEQ ID NO: 4375864 - DNA, 25 bp, Homo sapien
aataagatcgatccaatattcagca

SEQ ID NO: 4375865 - DNA, 25 bp, Homo sapien
aaataagatcgatccaatattcagc

SEQ ID NO: 4375866 - DNA, 25 bp, Homo sapien
agatcgatccaatattcagcaatta

SEQ ID NO: 4375867 - DNA, 25 bp, Homo sapien
taagatcgatccaatattcagcaat

SEQ ID NO: 4375868 - DNA, 25 bp, Homo sapien
gttctggaatgcagtttattctcac

SEQ ID NO: 4375869 - DNA, 25 bp, Homo sapien
tgttctggaatgcagtttattctca

SEQ ID NO: 4375870 - DNA, 25 bp, Homo sapien
ttgttctggaatgcagtttattctc

SEQ ID NO: 4375871 - DNA, 25 bp, Homo sapien
gacaggatcatttaacacatttgga

SEQ ID NO: 4375872 - DNA, 25 bp, Homo sapien
tcatttaacacatttggacattttc

SEQ ID NO: 4375873 - DNA, 25 bp, Homo sapien
ggatcatttaacacatttggacatt

SEQ ID NO: 4375874 - DNA, 25 bp, Homo sapien
attgacaggatcatttaacacattt

SEQ ID NO: 4375875 - DNA, 25 bp, Homo sapien
gaaggatttgtagtcacacgagtag

SEQ ID NO: 4375876 - DNA, 25 bp, Homo sapien
tgtagtcacacgagtagtagctgga

SEQ ID NO: 4375877 - DNA, 25 bp, Homo sapien
aatcagaaggatttgtagtcacacg

SEQ ID NO: 4375878 - DNA, 25 bp, Homo sapien
ctgaatcagaaggatttgtagtcac

SEQ ID NO: 4375879 - DNA, 25 bp, Homo sapien
taagtactttttgaaagaatacatg

SEQ ID NO: 4375880 - DNA, 25 bp, Homo sapien
aattttctcagaattatcaagtaat

SEQ ID NO: 4375881 - DNA, 25 bp, Homo sapien
tttctcagaattatcaagtaataag

SEQ ID NO: 4375882 - DNA, 25 bp, Homo sapien
tcagaattatcaagtaataagtact

SEQ ID NO: 4375883 - DNA, 25 bp, Homo sapien
ggtgtcttagttgctaaaacaacaa

SEQ ID NO: 4375884 - DNA, 25 bp, Homo sapien
caggtgtcttagttgctaaaacaac

SEQ ID NO: 4375885 - DNA, 25 bp, Homo sapien
aggtgtcttagttgctaaaacaaca

SEQ ID NO: 4375886 - DNA, 25 bp, Homo sapien
tcagagagatttccaatccactaaa

SEQ ID NO: 4375887 - DNA, 25 bp, Homo sapien
gagagatttccaatccactaaattt

SEQ ID NO: 4375888 - DNA, 25 bp, Homo sapien
cagagagatttccaatccactaaat

SEQ ID NO: 4375889 - DNA, 25 bp, Homo sapien
gagatttccaatccactaaatttct

SEQ ID NO: 4375890 - DNA, 25 bp, Homo sapien
cctgttctctttgctatgttgtacc

SEQ ID NO: 4375891 - DNA, 25 bp, Homo sapien
tctttgctatgttgtaccagacttg

SEQ ID NO: 4375892 - DNA, 25 bp, Homo sapien
tctctttgctatgttgtaccagact

SEQ ID NO: 4375893 - DNA, 25 bp, Homo sapien
tgttctctttgctatgttgtaccag

SEQ ID NO: 4375894 - DNA, 25 bp, Homo sapien
gctgtcttagcttgtctcatattaa

SEQ ID NO: 4375895 - DNA, 25 bp, Homo sapien
tagtatagtgctgtcttagcttgtc

SEQ ID NO: 4375896 - DNA, 25 bp, Homo sapien
tcatgcttgtagtatagtgctgtct

SEQ ID NO: 4375897 - DNA, 25 bp, Homo sapien
caatgtgtttcatgcttgtagtata

SEQ ID NO: 4375898 - DNA, 25 bp, Homo sapien
tcaaatgaacctggattggacgagc

SEQ ID NO: 4375899 - DNA, 25 bp, Homo sapien
acagggcaccttataacattggagc

SEQ ID NO: 4375900 - DNA, 25 bp, Homo sapien
tttgaaaaatacgacagagaggcac

SEQ ID NO: 4375901 - DNA, 25 bp, Homo sapien
ccgttctccggcatgtaagcatcta

SEQ ID NO: 4375902 - DNA, 25 bp, Homo sapien
cacttttgctcgaagactgacccaa

SEQ ID NO: 4375903 - DNA, 25 bp, Homo sapien
tacctgcgctaaatccagattccag

SEQ ID NO: 4375904 - DNA, 25 bp, Homo sapien
aacacctcttcagttgtcaaaccac

SEQ ID NO: 4375905 - DNA, 25 bp, Homo sapien
taccaatctgctctttggaacacct

SEQ ID NO: 4375906 - DNA, 25 bp, Homo sapien
tggggtgcccagaaatctctcagaa

SEQ ID NO: 4375907 - DNA, 25 bp, Homo sapien
cagaaatctctcagaattataatcc

SEQ ID NO: 4375908 - DNA, 25 bp, Homo sapien
gggtgcccagaaatctctcagaatt

SEQ ID NO: 4375909 - DNA, 25 bp, Homo sapien
gcccagaaatctctcagaattataa

SEQ ID NO: 4375910 - DNA, 25 bp, Homo sapien
tgtaacctagtatgatcacaaaaca

SEQ ID NO: 4375911 - DNA, 25 bp, Homo sapien
gtaacctagtatgatcacaaaacat

SEQ ID NO: 4375912 - DNA, 25 bp, Homo sapien
ttgtaacctagtatgatcacaaaac

SEQ ID NO: 4375913 - DNA, 25 bp, Homo sapien
cttgtaacctagtatgatcacaaaa

SEQ ID NO: 4375914 - DNA, 25 bp, Homo sapien
agaaggtggaaaagcacagaacaaa

SEQ ID NO: 4375915 - DNA, 25 bp, Homo sapien
aaatttgacatgaaactgactgaac

SEQ ID NO: 4375916 - DNA, 25 bp, Homo sapien
aaaaaatttgacatgaaactgactg

SEQ ID NO: 4375917 - DNA, 25 bp, Homo sapien
tttgacatgaaactgactgaacaat

SEQ ID NO: 4375918 - DNA, 25 bp, Homo sapien
tgtagcatagcaaacaggaactcct

SEQ ID NO: 4375919 - DNA, 25 bp, Homo sapien
tgcaagaggtaccatcaaacagccc

SEQ ID NO: 4375920 - DNA, 25 bp, Homo sapien
cagcccagtgttgcagagaggaaag

SEQ ID NO: 4375921 - DNA, 25 bp, Homo sapien
tgggcttcgcgatacaaagacagtc

SEQ ID NO: 4375922 - DNA, 25 bp, Homo sapien
tgtatttccaacttcttcaataatc

SEQ ID NO: 4375923 - DNA, 25 bp, Homo sapien
tctgtatttccaacttcttcaataa

SEQ ID NO: 4375924 - DNA, 25 bp, Homo sapien
ttttctgtatttccaacttcttcaa

SEQ ID NO: 4375925 - DNA, 25 bp, Homo sapien
tttctgtatttccaacttcttcaat

SEQ ID NO: 4375926 - DNA, 25 bp, Homo sapien
ttctcagctagttcaggtaaaaatc

SEQ ID NO: 4375927 - DNA, 25 bp, Homo sapien
gctagttcaggtaaaaatcgccact

SEQ ID NO: 4375928 - DNA, 25 bp, Homo sapien
taaaaatcgccactgtcctctagcc

SEQ ID NO: 4375929 - DNA, 25 bp, Homo sapien
gttcaggtaaaaatcgccactgtcc

SEQ ID NO: 4375930 - DNA, 25 bp, Homo sapien
cgaacaggtgttggaataaagacca

SEQ ID NO: 4375931 - DNA, 25 bp, Homo sapien
caggtgcatggctcttagaattgag

SEQ ID NO: 4375932 - DNA, 25 bp, Homo sapien
tcaacagaacaggtagtggccttca

SEQ ID NO: 4375933 - DNA, 25 bp, Homo sapien
gaactcctgtttatggctcagaagg

SEQ ID NO: 4375934 - DNA, 25 bp, Homo sapien
cattatgaaagccactaacaccagg

SEQ ID NO: 4375935 - DNA, 25 bp, Homo sapien
aagccactaacaccaggtactcgat

SEQ ID NO: 4375936 - DNA, 25 bp, Homo sapien
gttacattatgaaagccactaacac

SEQ ID NO: 4375937 - DNA, 25 bp, Homo sapien
tatgaaagccactaacaccaggtac

SEQ ID NO: 4375938 - DNA, 25 bp, Homo sapien
caagagcactactgttaggaatgaa

SEQ ID NO: 4375939 - DNA, 25 bp, Homo sapien
ggaatgaactgaatgtaggagatca

SEQ ID NO: 4375940 - DNA, 25 bp, Homo sapien
gcactactgttaggaatgaactgaa

SEQ ID NO: 4375941 - DNA, 25 bp, Homo sapien
ccccaagatatccattttactgctt

SEQ ID NO: 4375942 - DNA, 25 bp, Homo sapien
ggttacatacacaggactttcaact

SEQ ID NO: 4375943 - DNA, 25 bp, Homo sapien
tctgggttacatacacaggactttc

SEQ ID NO: 4375944 - DNA, 25 bp, Homo sapien
ttctctgggttacatacacaggact

SEQ ID NO: 4375945 - DNA, 25 bp, Homo sapien
ttgcaagaatccataggccacacat

SEQ ID NO: 4375946 - DNA, 25 bp, Homo sapien
cttttgagattgtactttagcctga

SEQ ID NO: 4375947 - DNA, 25 bp, Homo sapien
ggactactatctgaagcatctagct

SEQ ID NO: 4375948 - DNA, 25 bp, Homo sapien
gaatatgtgcgtggtcattaaggaa

SEQ ID NO: 4375949 - DNA, 25 bp, Homo sapien
gggcactcatttttcaaacgttgaa

SEQ ID NO: 4375950 - DNA, 25 bp, Homo sapien
ggaagcacgaaaggcatggcatagc

SEQ ID NO: 4375951 - DNA, 25 bp, Homo sapien
catcacagtgcatcaaacccgttaa

SEQ ID NO: 4375952 - DNA, 25 bp, Homo sapien
taaattggctccacggcctttgata

SEQ ID NO: 4375953 - DNA, 25 bp, Homo sapien
gcatagctggagtttaaggttcaag

SEQ ID NO: 4375954 - DNA, 25 bp, Homo sapien
gtgtcacaaagagggtgctcatccc

SEQ ID NO: 4375955 - DNA, 25 bp, Homo sapien
tcatccctaggcgtgtgtcttcggc

SEQ ID NO: 4375956 - DNA, 25 bp, Homo sapien
tagaatgtgacttttcccagggtgg

SEQ ID NO: 4375957 - DNA, 25 bp, Homo sapien
gtgagaacattcgagcaagacccgc

SEQ ID NO: 4375958 - DNA, 25 bp, Homo sapien
tattgcatgccaggagggtgcacgt

SEQ ID NO: 4375959 - DNA, 25 bp, Homo sapien
tggcatcctgctgtaagtctgggta

SEQ ID NO: 4375960 - DNA, 25 bp, Homo sapien
ctttccagccgagaagagaagggtt

SEQ ID NO: 4375961 - DNA, 25 bp, Homo sapien
tctccaggacttcgaggtaatccgg

SEQ ID NO: 4375962 - DNA, 25 bp, Homo sapien
tagtagcatactgccactaccacag

SEQ ID NO: 4375963 - DNA, 25 bp, Homo sapien
gctgtggcctctctcgatctagtag

SEQ ID NO: 4375964 - DNA, 25 bp, Homo sapien
catttttctcatggtggcggaaccc

SEQ ID NO: 4375965 - DNA, 25 bp, Homo sapien
ggtggcggaaccctgccaagtctcc

SEQ ID NO: 4375966 - DNA, 25 bp, Homo sapien
tccttgggtgtctcagcaaactgct

SEQ ID NO: 4375967 - DNA, 25 bp, Homo sapien
tgtactcatacacatgacccacggg

SEQ ID NO: 4375968 - DNA, 25 bp, Homo sapien
accgtcactatggtgttaagctggg

SEQ ID NO: 4375969 - DNA, 25 bp, Homo sapien
ttccagcaaggtccggtagttacta

SEQ ID NO: 4375970 - DNA, 25 bp, Homo sapien
acagcctgtggcattgcatttggat

SEQ ID NO: 4375971 - DNA, 25 bp, Homo sapien
aacagcctgtggcattgcatttgga

SEQ ID NO: 4375972 - DNA, 25 bp, Homo sapien
tcgaccaccacccccacttccgcca

SEQ ID NO: 4375973 - DNA, 25 bp, Homo sapien
aaacagcctgtggcattgcatttgg

SEQ ID NO: 4375974 - DNA, 25 bp, Homo sapien
gcaaattacaggtacacccagtggg

SEQ ID NO: 4375975 - DNA, 25 bp, Homo sapien
gcagcttctttcgacgccttcggag

SEQ ID NO: 4375976 - DNA, 25 bp, Homo sapien
tagtgcaaactctgtaggcctcgga

SEQ ID NO: 4375977 - DNA, 25 bp, Homo sapien
ttcggagcacgtaggcaaagaggcc

SEQ ID NO: 4375978 - DNA, 25 bp, Homo sapien
gctgtttatttgaggacttgtattc

SEQ ID NO: 4375979 - DNA, 25 bp, Homo sapien
cttgtattcgacagaagaagcagta

SEQ ID NO: 4375980 - DNA, 25 bp, Homo sapien
ggaaggcttagttggccatgcattc

SEQ ID NO: 4375981 - DNA, 25 bp, Homo sapien
tgaacagaggatagcattgaggaag

SEQ ID NO: 4375982 - DNA, 25 bp, Homo sapien
ttaggttccgaaatgccccactctc

SEQ ID NO: 4375983 - DNA, 25 bp, Homo sapien
cagtagcatggatcaaaacagggct

SEQ ID NO: 4375984 - DNA, 25 bp, Homo sapien
tgaaagctccagtctgaatgtcctg

SEQ ID NO: 4375985 - DNA, 25 bp, Homo sapien
taatgacattgtaatctgcctgcag

SEQ ID NO: 4375986 - DNA, 25 bp, Homo sapien
catcctagagcaattgtgcttagaa

SEQ ID NO: 4375987 - DNA, 25 bp, Homo sapien
gcatctcagctatggaaggtttcat

SEQ ID NO: 4375988 - DNA, 25 bp, Homo sapien
cctctgtgaagcatctcagctatgg

SEQ ID NO: 4375989 - DNA, 25 bp, Homo sapien
gggtagtccatcctagagcaattgt

SEQ ID NO: 4375990 - DNA, 25 bp, Homo sapien
gcctgcattgcctctgtataacaaa

SEQ ID NO: 4375991 - DNA, 25 bp, Homo sapien
ccttttaggcataggcagattcagt

SEQ ID NO: 4375992 - DNA, 25 bp, Homo sapien
tattgcatgaacaaaagcagcctgc

SEQ ID NO: 4375993 - DNA, 25 bp, Homo sapien
caacagaactggtatatcgtacttc

SEQ ID NO: 4375994 - DNA, 25 bp, Homo sapien
agtgagactatccttcgtaagtatc

SEQ ID NO: 4375995 - DNA, 25 bp, Homo sapien
tatccttcgtaagtatcattttcac

SEQ ID NO: 4375996 - DNA, 25 bp, Homo sapien
tctagtgcaggtggtttgaaaagtg

SEQ ID NO: 4375997 - DNA, 25 bp, Homo sapien
tgaaaagtgagactatccttcgtaa

SEQ ID NO: 4375998 - DNA, 25 bp, Homo sapien
gcattttgcttcgatcccgttgcac

SEQ ID NO: 4375999 - DNA, 25 bp, Homo sapien
tgggtgtcccgaataagagctcaga

SEQ ID NO: 4376000 - DNA, 25 bp, Homo sapien
tctgtctgattctgcctgggtgtcc

SEQ ID NO: 4376001 - DNA, 25 bp, Homo sapien
gtcaaagccttcgatagcccctgga

SEQ ID NO: 4376002 - DNA, 25 bp, Homo sapien
ttcacattgcgccaccgggaaagac

SEQ ID NO: 4376003 - DNA, 25 bp, Homo sapien
cttgggtaacaatggtacatttcac

SEQ ID NO: 4376004 - DNA, 25 bp, Homo sapien
ttgggtaacaatggtacatttcaca

SEQ ID NO: 4376005 - DNA, 25 bp, Homo sapien
atttcacattgcgccaccgggaaag

SEQ ID NO: 4376006 - DNA, 25 bp, Homo sapien
actcaaatatttctccgtgaaattt

SEQ ID NO: 4376007 - DNA, 25 bp, Homo sapien
tttggatgcttttgtccgttctttc

SEQ ID NO: 4376008 - DNA, 25 bp, Homo sapien
caaatatttctccgtgaaattttcg

SEQ ID NO: 4376009 - DNA, 25 bp, Homo sapien
ctcgcgggattggggtggatttaag

SEQ ID NO: 4376010 - DNA, 25 bp, Homo sapien
ttttctttagctcaggatagcgcgt

SEQ ID NO: 4376011 - DNA, 25 bp, Homo sapien
tttccttttctttagctcaggatag

SEQ ID NO: 4376012 - DNA, 25 bp, Homo sapien
tccttttctttagctcaggatagcg

SEQ ID NO: 4376013 - DNA, 25 bp, Homo sapien
cttttctttagctcaggatagcgcg

SEQ ID NO: 4376014 - DNA, 25 bp, Homo sapien
tctggccaccaactttccgaaaggc

SEQ ID NO: 4376015 - DNA, 25 bp, Homo sapien
gggcaaactctctgcgaagctgaat

SEQ ID NO: 4376016 - DNA, 25 bp, Homo sapien
gaaaggctaccgaatcacgcttgta

SEQ ID NO: 4376017 - DNA, 25 bp, Homo sapien
ctatggtgcagagcgctcaggatct

SEQ ID NO: 4376018 - DNA, 25 bp, Homo sapien
ccaggtcgtgtataaggagtcaata

SEQ ID NO: 4376019 - DNA, 25 bp, Homo sapien
aaactggagcgccaggtcgtgtata

SEQ ID NO: 4376020 - DNA, 25 bp, Homo sapien
gagtcaatataggaaacgcagggct

SEQ ID NO: 4376021 - DNA, 25 bp, Homo sapien
tataaggagtcaatataggaaacgc

SEQ ID NO: 4376022 - DNA, 25 bp, Homo sapien
cccagatcagcccatcgccggagct

SEQ ID NO: 4376023 - DNA, 25 bp, Homo sapien
agatcagcccatcgccggagctccg

SEQ ID NO: 4376024 - DNA, 25 bp, Homo sapien
gggagcggcgctcgggagcccccag

SEQ ID NO: 4376025 - DNA, 25 bp, Homo sapien
agcccccagatcagcccatcgccgg

SEQ ID NO: 4376026 - DNA, 25 bp, Homo sapien
tccgcgccaactgtgtaaatcagcc

SEQ ID NO: 4376027 - DNA, 25 bp, Homo sapien
ccgccgcagtcctctcgccgcgcat

SEQ ID NO: 4376028 - DNA, 25 bp, Homo sapien
ccaactgtgtaaatcagccgccgca

SEQ ID NO: 4376029 - DNA, 25 bp, Homo sapien
tcctccgcgccaactgtgtaaatca

SEQ ID NO: 4376030 - DNA, 25 bp, Homo sapien
tgggcggtatcgctaaacgcctccg

SEQ ID NO: 4376031 - DNA, 25 bp, Homo sapien
ttccaagtgatttgcagtaatcccc

SEQ ID NO: 4376032 - DNA, 25 bp, Homo sapien
ggtggagggtgatcaaattaagaac

SEQ ID NO: 4376033 - DNA, 25 bp, Homo sapien
gaacatctgagctgtattggtgggc

SEQ ID NO: 4376034 - DNA, 25 bp, Homo sapien
tggtgacgaagctggtgctaaaaca

SEQ ID NO: 4376035 - DNA, 25 bp, Homo sapien
gtgctaaaacacttatccctctgag

SEQ ID NO: 4376036 - DNA, 25 bp, Homo sapien
atatgaacacactttgttgctggtg

SEQ ID NO: 4376037 - DNA, 25 bp, Homo sapien
tttttggtataaggcaaatatgaac

SEQ ID NO: 4376038 - DNA, 25 bp, Homo sapien
ttctaaactgatcacattcctgtca

SEQ ID NO: 4376039 - DNA, 25 bp, Homo sapien
tctaaactgatcacattcctgtcac

SEQ ID NO: 4376040 - DNA, 25 bp, Homo sapien
ctagtagtagttttctaaactgatc

SEQ ID NO: 4376041 - DNA, 25 bp, Homo sapien
aaactgatcacattcctgtcacttc

SEQ ID NO: 4376042 - DNA, 25 bp, Homo sapien
caattgtctgaaagatacacttctg

SEQ ID NO: 4376043 - DNA, 25 bp, Homo sapien
gatacacttctgttgaacgagctca

SEQ ID NO: 4376044 - DNA, 25 bp, Homo sapien
tgaaagatacacttctgttgaacga

SEQ ID NO: 4376045 - DNA, 25 bp, Homo sapien
gatggatatttgtcaattgtctgaa

SEQ ID NO: 4376046 - DNA, 25 bp, Homo sapien
tgctgatgaagcctttctggactca

SEQ ID NO: 4376047 - DNA, 25 bp, Homo sapien
tctattgctgatgaagcctttctgg

SEQ ID NO: 4376048 - DNA, 25 bp, Homo sapien
gctgatgaagcctttctggactcac

SEQ ID NO: 4376049 - DNA, 25 bp, Homo sapien
cctttctattgctgatgaagccttt

SEQ ID NO: 4376050 - DNA, 25 bp, Homo sapien
gacacacagtccactattccgtatt

SEQ ID NO: 4376051 - DNA, 25 bp, Homo sapien
attccgtattttagcacagtcttgc

SEQ ID NO: 4376052 - DNA, 25 bp, Homo sapien
cagtccactattccgtattttagca

SEQ ID NO: 4376053 - DNA, 25 bp, Homo sapien
ctatgacacacagtccactattccg

SEQ ID NO: 4376054 - DNA, 25 bp, Homo sapien
gatgtccaaggtaatatagctgaga

SEQ ID NO: 4376055 - DNA, 25 bp, Homo sapien
tctacagatgtccaaggtaatatag

SEQ ID NO: 4376056 - DNA, 25 bp, Homo sapien
gggagattgaagttgtcgtctatta

SEQ ID NO: 4376057 - DNA, 25 bp, Homo sapien
gttgtcgtctattagagctgctggt

SEQ ID NO: 4376058 - DNA, 25 bp, Homo sapien
tatattgtctaaataatagtgcttt

SEQ ID NO: 4376059 - DNA, 25 bp, Homo sapien
tagtgctttataaacatgtagctca

SEQ ID NO: 4376060 - DNA, 25 bp, Homo sapien
aggagagtatagacagatggcaatt

SEQ ID NO: 4376061 - DNA, 25 bp, Homo sapien
cacacaaaagccgacaatgtgctca

SEQ ID NO: 4376062 - DNA, 25 bp, Homo sapien
tgactgagctgtaacccggagacag

SEQ ID NO: 4376063 - DNA, 25 bp, Homo sapien
cgtgttcttgactgagctgtaaccc

SEQ ID NO: 4376064 - DNA, 25 bp, Homo sapien
ttcttgactgagctgtaacccggag

SEQ ID NO: 4376065 - DNA, 25 bp, Homo sapien
tgagctgtaacccggagacagtcat

SEQ ID NO: 4376066 - DNA, 25 bp, Homo sapien
tatctgactagggaactgggttgac

SEQ ID NO: 4376067 - DNA, 25 bp, Homo sapien
gactaatgaattgagactgcttggc

SEQ ID NO: 4376068 - DNA, 25 bp, Homo sapien
tcttcggtcctcgtggcagtaggat

SEQ ID NO: 4376069 - DNA, 25 bp, Homo sapien
gacattacctgtgtcctgacagcaa

SEQ ID NO: 4376070 - DNA, 25 bp, Homo sapien
ttataatacattgagctttccaagt

SEQ ID NO: 4376071 - DNA, 25 bp, Homo sapien
catctagccagtggacagtatagag

SEQ ID NO: 4376072 - DNA, 25 bp, Homo sapien
tagcatctagccagtggacagtata

SEQ ID NO: 4376073 - DNA, 25 bp, Homo sapien
ctaaatagcatctagccagtggaca

SEQ ID NO: 4376074 - DNA, 25 bp, Homo sapien
aaatagcatctagccagtggacagt

SEQ ID NO: 4376075 - DNA, 25 bp, Homo sapien
gagatcgagccttatcactcagatt

SEQ ID NO: 4376076 - DNA, 25 bp, Homo sapien
gatcgagccttatcactcagattca

SEQ ID NO: 4376077 - DNA, 25 bp, Homo sapien
gagagatcgagccttatcactcaga

SEQ ID NO: 4376078 - DNA, 25 bp, Homo sapien
aaagagagatcgagccttatcactc

SEQ ID NO: 4376079 - DNA, 25 bp, Homo sapien
taataggcagtccagaaatcaaccc

SEQ ID NO: 4376080 - DNA, 25 bp, Homo sapien
aacacacttgtaggtcttatgctcc

SEQ ID NO: 4376081 - DNA, 25 bp, Homo sapien
ttcccagcctagagaaccacgtgct

SEQ ID NO: 4376082 - DNA, 25 bp, Homo sapien
gactgatttagttaccctggctgtt

SEQ ID NO: 4376083 - DNA, 25 bp, Homo sapien
agagtgatagaagagcgtatctggt

SEQ ID NO: 4376084 - DNA, 25 bp, Homo sapien
cacccagccggaagactgaacttaa

SEQ ID NO: 4376085 - DNA, 25 bp, Homo sapien
gaagagcgtatctggtaggagaaat

SEQ ID NO: 4376086 - DNA, 25 bp, Homo sapien
gcacccagccggaagactgaactta

SEQ ID NO: 4376087 - DNA, 25 bp, Homo sapien
taacctcttcttaacttgtggagta

SEQ ID NO: 4376088 - DNA, 25 bp, Homo sapien
aaactatctctgacagattgatacg

SEQ ID NO: 4376089 - DNA, 25 bp, Homo sapien
ctgaaactatctctgacagattgat

SEQ ID NO: 4376090 - DNA, 25 bp, Homo sapien
tatctctgacagattgatacgtttt

SEQ ID NO: 4376091 - DNA, 25 bp, Homo sapien
gtactgaaactatctctgacagatt

SEQ ID NO: 4376092 - DNA, 25 bp, Homo sapien
gagccttgggataagctagtttcaa

SEQ ID NO: 4376093 - DNA, 25 bp, Homo sapien
tggctgttagcatccctcagttgtg

SEQ ID NO: 4376094 - DNA, 25 bp, Homo sapien
tctggccttacctcaaaagacagtc

SEQ ID NO: 4376095 - DNA, 25 bp, Homo sapien
tcatttgaagtaggaagtctggcct

SEQ ID NO: 4376096 - DNA, 25 bp, Homo sapien
tgagcaacatactgagacgctgttt

SEQ ID NO: 4376097 - DNA, 25 bp, Homo sapien
cagcagtttgggaggctgaggtggg

SEQ ID NO: 4376098 - DNA, 25 bp, Homo sapien
gtgcagttggtcatgcctgtaaacc

SEQ ID NO: 4376099 - DNA, 25 bp, Homo sapien
agcctgagcaacatactgagacgct

SEQ ID NO: 4376100 - DNA, 25 bp, Homo sapien
caaaaagacagtatggttgtctctg

SEQ ID NO: 4376101 - DNA, 25 bp, Homo sapien
gcctcttcactgcacagtctcattt

SEQ ID NO: 4376102 - DNA, 25 bp, Homo sapien
cactgcacagtctcatttgtgtgct

SEQ ID NO: 4376103 - DNA, 25 bp, Homo sapien
aaagacagtatggttgtctctgtgg

SEQ ID NO: 4376104 - DNA, 25 bp, Homo sapien
ttaattgaattgcagtagctttgtg

SEQ ID NO: 4376105 - DNA, 25 bp, Homo sapien
gtgtttagtggtagggctatctcct

SEQ ID NO: 4376106 - DNA, 25 bp, Homo sapien
tgtttagtggtagggctatctcctc

SEQ ID NO: 4376107 - DNA, 25 bp, Homo sapien
tctcctcttcacagttaattgaatt

SEQ ID NO: 4376108 - DNA, 25 bp, Homo sapien
tacattgaattgtgtacaagatcta

SEQ ID NO: 4376109 - DNA, 25 bp, Homo sapien
cattgggatagtggtttcacaggta

SEQ ID NO: 4376110 - DNA, 25 bp, Homo sapien
gaattgtgtacaagatctattcatt

SEQ ID NO: 4376111 - DNA, 25 bp, Homo sapien
ggcctgagtgaactctctggaatga

SEQ ID NO: 4376112 - DNA, 25 bp, Homo sapien
tccactttccttaccttctgattgt

SEQ ID NO: 4376113 - DNA, 25 bp, Homo sapien
gattgtctcataccatcttccatca

SEQ ID NO: 4376114 - DNA, 25 bp, Homo sapien
tcttcctctatttgtgaccgctctg

SEQ ID NO: 4376115 - DNA, 25 bp, Homo sapien
gaccgctctgcaggtgatcaggctt

SEQ ID NO: 4376116 - DNA, 25 bp, Homo sapien
ttccaagtgactggggaagccacag

SEQ ID NO: 4376117 - DNA, 25 bp, Homo sapien
gccacaggacacctagaatcatggt

SEQ ID NO: 4376118 - DNA, 25 bp, Homo sapien
cacaggacacctagaatcatggtgg

SEQ ID NO: 4376119 - DNA, 25 bp, Homo sapien
gggaagccacaggacacctagaatc

SEQ ID NO: 4376120 - DNA, 25 bp, Homo sapien
aacatatttaaagtattgcacacat

SEQ ID NO: 4376121 - DNA, 25 bp, Homo sapien
tacatatttaggtatacactcctta

SEQ ID NO: 4376122 - DNA, 25 bp, Homo sapien
cactccttatagatttagcttgtcc

SEQ ID NO: 4376123 - DNA, 25 bp, Homo sapien
acaaactaactgtgtacttgaggca

SEQ ID NO: 4376124 - DNA, 25 bp, Homo sapien
ttttcagtttggtacatggctccta

SEQ ID NO: 4376125 - DNA, 25 bp, Homo sapien
gcactccatgtgattgagttctctc

SEQ ID NO: 4376126 - DNA, 25 bp, Homo sapien
ggtacatggctcctactgcactcca

SEQ ID NO: 4376127 - DNA, 25 bp, Homo sapien
tcctactgcactccatgtgattgag

SEQ ID NO: 4376128 - DNA, 25 bp, Homo sapien
tctattctggttacaaaacactgac

SEQ ID NO: 4376129 - DNA, 25 bp, Homo sapien
ctctattctggttacaaaacactga

SEQ ID NO: 4376130 - DNA, 25 bp, Homo sapien
ttatggccagataaaggcgagcctc

SEQ ID NO: 4376131 - DNA, 25 bp, Homo sapien
gcacacggacatgcagaatatgccg

SEQ ID NO: 4376132 - DNA, 25 bp, Homo sapien
ggaccatttttagcgtcacagagaa

SEQ ID NO: 4376133 - DNA, 25 bp, Homo sapien
gaaagcattctgtcgttatggccag

SEQ ID NO: 4376134 - DNA, 25 bp, Homo sapien
ggttcctcagccagctaagtagctt

SEQ ID NO: 4376135 - DNA, 25 bp, Homo sapien
tctccataaaacagtcatgacccat

SEQ ID NO: 4376136 - DNA, 25 bp, Homo sapien
gcctttaaacttcttgctctccata

SEQ ID NO: 4376137 - DNA, 25 bp, Homo sapien
tgaccatcctcaatttttcttataa

SEQ ID NO: 4376138 - DNA, 25 bp, Homo sapien
taaaacagtcatgacccattcccat

SEQ ID NO: 4376139 - DNA, 25 bp, Homo sapien
tctgagatcaaactgcaaggcggca

SEQ ID NO: 4376140 - DNA, 25 bp, Homo sapien
gcacagcagtctgagatcaaactgc

SEQ ID NO: 4376141 - DNA, 25 bp, Homo sapien
ctcggagggtcctacacccacggag

SEQ ID NO: 4376142 - DNA, 25 bp, Homo sapien
acccacggagtctcgctgattgcta

SEQ ID NO: 4376143 - DNA, 25 bp, Homo sapien
tctacgtaggggccatagttattta

SEQ ID NO: 4376144 - DNA, 25 bp, Homo sapien
atttagaccctgcctttctacgtag

SEQ ID NO: 4376145 - DNA, 25 bp, Homo sapien
tctcttggaaatttagaccctgcct

SEQ ID NO: 4376146 - DNA, 25 bp, Homo sapien
ccagtattgacctgagtcgaggtgc

SEQ ID NO: 4376147 - DNA, 25 bp, Homo sapien
gaggagcagcaagtccagtattgac

SEQ ID NO: 4376148 - DNA, 25 bp, Homo sapien
tccaggttgaggagcagcaagtcca

SEQ ID NO: 4376149 - DNA, 25 bp, Homo sapien
gaagtaatccaggttgaggagcagc

SEQ ID NO: 4376150 - DNA, 25 bp, Homo sapien
ctacatcttcaaactcatctcccat

SEQ ID NO: 4376151 - DNA, 25 bp, Homo sapien
tggattggctttgcttgcctgccag

SEQ ID NO: 4376152 - DNA, 25 bp, Homo sapien
tgcaacacaggtgcttggattggct

SEQ ID NO: 4376153 - DNA, 25 bp, Homo sapien
gacatgtggcaagtaccagtctcac

SEQ ID NO: 4376154 - DNA, 25 bp, Homo sapien
gatggatcagtagtggcaatcaaac

SEQ ID NO: 4376155 - DNA, 25 bp, Homo sapien
tgaaataggtcccacagttgagcca

SEQ ID NO: 4376156 - DNA, 25 bp, Homo sapien
gctatcattgcctcttagtttttga

SEQ ID NO: 4376157 - DNA, 25 bp, Homo sapien
ggagagcacatactcatttagttgg

SEQ ID NO: 4376158 - DNA, 25 bp, Homo sapien
gaattactattagattcttgaccca

SEQ ID NO: 4376159 - DNA, 25 bp, Homo sapien
ttctgtgcttattttaatatctcat

SEQ ID NO: 4376160 - DNA, 25 bp, Homo sapien
tctgtgcttattttaatatctcata

SEQ ID NO: 4376161 - DNA, 25 bp, Homo sapien
tgtaaactatggtgtacagtgtttc

SEQ ID NO: 4376162 - DNA, 25 bp, Homo sapien
gtggtaatgaaaatacacgtgacta

SEQ ID NO: 4376163 - DNA, 25 bp, Homo sapien
gatacctttttacgagtggtaatga

SEQ ID NO: 4376164 - DNA, 25 bp, Homo sapien
aatacacgtgactaaaagcagagca

SEQ ID NO: 4376165 - DNA, 25 bp, Homo sapien
tgtgtaaaaaagctcctgatatttt

SEQ ID NO: 4376166 - DNA, 25 bp, Homo sapien
attaaacacgttctagccatttggg

SEQ ID NO: 4376167 - DNA, 25 bp, Homo sapien
gaggaatcaatattatccttctggc

SEQ ID NO: 4376168 - DNA, 25 bp, Homo sapien
tactaagttaaagatgtgaggaatc

SEQ ID NO: 4376169 - DNA, 25 bp, Homo sapien
tttttccagtccatcatgtaattgt

SEQ ID NO: 4376170 - DNA, 25 bp, Homo sapien
tccagcgatggaatcctgctttcca

SEQ ID NO: 4376171 - DNA, 25 bp, Homo sapien
tctttcttgctagtgtaatcgttaa

SEQ ID NO: 4376172 - DNA, 25 bp, Homo sapien
cactcccattctgcttcatcaatat

SEQ ID NO: 4376173 - DNA, 25 bp, Homo sapien
caaagtatatgcatgtgttaggaga

SEQ ID NO: 4376174 - DNA, 25 bp, Homo sapien
aaagatgattcagataattcctgct

SEQ ID NO: 4376175 - DNA, 25 bp, Homo sapien
acagattgtgaacagtaaaaactat

SEQ ID NO: 4376176 - DNA, 25 bp, Homo sapien
taggaatagcgtgaggcagtgaacc

SEQ ID NO: 4376177 - DNA, 25 bp, Homo sapien
cagagacagcgagaccaacagctcc

SEQ ID NO: 4376178 - DNA, 25 bp, Homo sapien
ctgtcaatccagagacagcgagacc

SEQ ID NO: 4376179 - DNA, 25 bp, Homo sapien
tcaatccagagacagcgagaccaac

SEQ ID NO: 4376180 - DNA, 25 bp, Homo sapien
aatccagagacagcgagaccaacag

SEQ ID NO: 4376181 - DNA, 25 bp, Homo sapien
cactgtgagtaagcagaccctgtca

SEQ ID NO: 4376182 - DNA, 25 bp, Homo sapien
ggctcacagtagcagcatataggct

SEQ ID NO: 4376183 - DNA, 25 bp, Homo sapien
tttagcatgatgcacaagacacttc

SEQ ID NO: 4376184 - DNA, 25 bp, Homo sapien
taaaagctttccatggtcctgggcc

SEQ ID NO: 4376185 - DNA, 25 bp, Homo sapien
atcatctattaaataaccaaacact

SEQ ID NO: 4376186 - DNA, 25 bp, Homo sapien
catcatctattaaataaccaaacac

SEQ ID NO: 4376187 - DNA, 25 bp, Homo sapien
ccagaatcgacattgttgagcacgt

SEQ ID NO: 4376188 - DNA, 25 bp, Homo sapien
tgtccagaatcgacattgttgagca

SEQ ID NO: 4376189 - DNA, 25 bp, Homo sapien
aaatgatgtccagaatcgacattgt

SEQ ID NO: 4376190 - DNA, 25 bp, Homo sapien
tgatgtccagaatcgacattgttga

SEQ ID NO: 4376191 - DNA, 25 bp, Homo sapien
gacaggccagcttgtgctattgttc

SEQ ID NO: 4376192 - DNA, 25 bp, Homo sapien
tattcttgttgactctgtattcaag

SEQ ID NO: 4376193 - DNA, 25 bp, Homo sapien
attgttctgagtctcatttggattc

SEQ ID NO: 4376194 - DNA, 25 bp, Homo sapien
tgactctgtattcaaggttagatat

SEQ ID NO: 4376195 - DNA, 25 bp, Homo sapien
aattatccttaggaattcagagaca

SEQ ID NO: 4376196 - DNA, 25 bp, Homo sapien
gaattatagaatcctagtgctgcct

SEQ ID NO: 4376197 - DNA, 25 bp, Homo sapien
gctgcctacctaagcctaaaacgag

SEQ ID NO: 4376198 - DNA, 25 bp, Homo sapien
ctttcactgtcataagaggtttgag

SEQ ID NO: 4376199 - DNA, 25 bp, Homo sapien
gaaaactcacactgattcttcaagt

SEQ ID NO: 4376200 - DNA, 25 bp, Homo sapien
gcaaaacgtttgacttcaatgtcct

SEQ ID NO: 4376201 - DNA, 25 bp, Homo sapien
tgtcgtgacatagcaaaacgtttga

SEQ ID NO: 4376202 - DNA, 25 bp, Homo sapien
cactgattcttcaagtgtcgtgaca

SEQ ID NO: 4376203 - DNA, 25 bp, Homo sapien
taaggtgagattagccttctcatca

SEQ ID NO: 4376204 - DNA, 25 bp, Homo sapien
gaaactggataatgggcaatgcaaa

SEQ ID NO: 4376205 - DNA, 25 bp, Homo sapien
cttcatccatgataaggtgagatta

SEQ ID NO: 4376206 - DNA, 25 bp, Homo sapien
aaacaattataatactggacagaac

SEQ ID NO: 4376207 - DNA, 25 bp, Homo sapien
gatgctgaagatgtgaaacaagtgg

SEQ ID NO: 4376208 - DNA, 25 bp, Homo sapien
tgcacaacgtacagcttagttacac

SEQ ID NO: 4376209 - DNA, 25 bp, Homo sapien
gaaaaaataccaatgaccagtaagc

SEQ ID NO: 4376210 - DNA, 25 bp, Homo sapien
gcatgtgcttatatgtgttcctgca

SEQ ID NO: 4376211 - DNA, 25 bp, Homo sapien
tcatagtacttcaatgaatatcaaa

SEQ ID NO: 4376212 - DNA, 25 bp, Homo sapien
ccatcatagtacttcaatgaatatc

SEQ ID NO: 4376213 - DNA, 25 bp, Homo sapien
caggttctgtttcaagaacgtagtt

SEQ ID NO: 4376214 - DNA, 25 bp, Homo sapien
acaggttctgtttcaagaacgtagt

SEQ ID NO: 4376215 - DNA, 25 bp, Homo sapien
taaagagatgttaccgcccaaggag

SEQ ID NO: 4376216 - DNA, 25 bp, Homo sapien
tttaggatttccaccaaaggctgct

SEQ ID NO: 4376217 - DNA, 25 bp, Homo sapien
tgagaaaatcaccatccacggtcgg

SEQ ID NO: 4376218 - DNA, 25 bp, Homo sapien
gaatcgaagtctaccaagaggtggc

SEQ ID NO: 4376219 - DNA, 25 bp, Homo sapien
aaatctgatgcatatgattgtgact

SEQ ID NO: 4376220 - DNA, 25 bp, Homo sapien
gagaaatctgatgcatatgattgtg

SEQ ID NO: 4376221 - DNA, 25 bp, Homo sapien
tctgatgcatatgattgtgactttg

SEQ ID NO: 4376222 - DNA, 25 bp, Homo sapien
aagagaaatctgatgcatatgattg

SEQ ID NO: 4376223 - DNA, 25 bp, Homo sapien
ctaaaatatagtcgttagtaattct

SEQ ID NO: 4376224 - DNA, 25 bp, Homo sapien
aatatagtcgttagtaattctacaa

SEQ ID NO: 4376225 - DNA, 25 bp, Homo sapien
taaaatatagtcgttagtaattcta

SEQ ID NO: 4376226 - DNA, 25 bp, Homo sapien
atatagtcgttagtaattctacaaa

SEQ ID NO: 4376227 - DNA, 25 bp, Homo sapien
tgcactgacattcagtgttactgaa

SEQ ID NO: 4376228 - DNA, 25 bp, Homo sapien
catgtaatacttcggggaaatgcag

SEQ ID NO: 4376229 - DNA, 25 bp, Homo sapien
ccagcctgtaaattggactgcactg

SEQ ID NO: 4376230 - DNA, 25 bp, Homo sapien
aaagatggcaaagtttgcaaggagt

SEQ ID NO: 4376231 - DNA, 25 bp, Homo sapien
atgctttacaattgcaggtagtctt

SEQ ID NO: 4376232 - DNA, 25 bp, Homo sapien
tcatgctttacaattgcaggtagtc

SEQ ID NO: 4376233 - DNA, 25 bp, Homo sapien
catgctttacaattgcaggtagtct

SEQ ID NO: 4376234 - DNA, 25 bp, Homo sapien
cacactcatccagcggaaggatgta

SEQ ID NO: 4376235 - DNA, 25 bp, Homo sapien
acactcatccagcggaaggatgtag

SEQ ID NO: 4376236 - DNA, 25 bp, Homo sapien
tcacactcatccagcggaaggatgt

SEQ ID NO: 4376237 - DNA, 25 bp, Homo sapien
gtgatgttgtagcaactaatatgga

SEQ ID NO: 4376238 - DNA, 25 bp, Homo sapien
tgtttgaaggtggatatctccagag

SEQ ID NO: 4376239 - DNA, 25 bp, Homo sapien
tattagaagtaggtccagagccaca

SEQ ID NO: 4376240 - DNA, 25 bp, Homo sapien
tactagaccctcatagctggatgtg

SEQ ID NO: 4376241 - DNA, 25 bp, Homo sapien
atccatacacaacatcttgtcctca

SEQ ID NO: 4376242 - DNA, 25 bp, Homo sapien
aggtgtgccccctggttctaactgg

SEQ ID NO: 4376243 - DNA, 25 bp, Homo sapien
tggccgtcagtcctgaactggtggc

SEQ ID NO: 4376244 - DNA, 25 bp, Homo sapien
ctgaacttcacactggccgtcagtc

SEQ ID NO: 4376245 - DNA, 25 bp, Homo sapien
tgcaggtcacaggtcctcttggtat

SEQ ID NO: 4376246 - DNA, 25 bp, Homo sapien
tctaacttggggtgtcttgcaggtc

SEQ ID NO: 4376247 - DNA, 25 bp, Homo sapien
ttttgccattgcttctgcgtgtgca

SEQ ID NO: 4376248 - DNA, 25 bp, Homo sapien
attctaacttggggtgtcttgcagg

SEQ ID NO: 4376249 - DNA, 25 bp, Homo sapien
caatcttaaacattgatttgcccat

SEQ ID NO: 4376250 - DNA, 25 bp, Homo sapien
tcaatcttaaacattgatttgccca

SEQ ID NO: 4376251 - DNA, 25 bp, Homo sapien
gatgaaacatcaatcttaaacattg

SEQ ID NO: 4376252 - DNA, 25 bp, Homo sapien
ccctggatgaaacatcaatcttaaa

SEQ ID NO: 4376253 - DNA, 25 bp, Homo sapien
tcatatctgttgagagttgtgagct

SEQ ID NO: 4376254 - DNA, 25 bp, Homo sapien
gtgttctccactgtgatcgtagttg

SEQ ID NO: 4376255 - DNA, 25 bp, Homo sapien
tgtgagctgtcgagtgtgtgttctc

SEQ ID NO: 4376256 - DNA, 25 bp, Homo sapien
gtgacgttttatcccgttgcactgg

SEQ ID NO: 4376257 - DNA, 25 bp, Homo sapien
tgagaaggatattagtatgggaccc

SEQ ID NO: 4376258 - DNA, 25 bp, Homo sapien
gtggctttgagaaggatattagtat

SEQ ID NO: 4376259 - DNA, 25 bp, Homo sapien
ggatattagtatgggaccctaggca

SEQ ID NO: 4376260 - DNA, 25 bp, Homo sapien
gctttgagaaggatattagtatggg

SEQ ID NO: 4376261 - DNA, 25 bp, Homo sapien
tatttggccctgtgataagatatac

SEQ ID NO: 4376262 - DNA, 25 bp, Homo sapien
gatatttggccctgtgataagatat

SEQ ID NO: 4376263 - DNA, 25 bp, Homo sapien
ttggccctgtgataagatatactct

SEQ ID NO: 4376264 - DNA, 25 bp, Homo sapien
ggccctgtgataagatatactcttc

SEQ ID NO: 4376265 - DNA, 25 bp, Homo sapien
ttctgtacaattgatgctgagccat

SEQ ID NO: 4376266 - DNA, 25 bp, Homo sapien
atattctgtacaattgatgctgagc

SEQ ID NO: 4376267 - DNA, 25 bp, Homo sapien
atttctcattacatcttgcttgatc

SEQ ID NO: 4376268 - DNA, 25 bp, Homo sapien
ctcattacatcttgcttgatcttaa

SEQ ID NO: 4376269 - DNA, 25 bp, Homo sapien
aagtggccagaaacaggtgttactt

SEQ ID NO: 4376270 - DNA, 25 bp, Homo sapien
agtggccagaaacaggtgttacttt

SEQ ID NO: 4376271 - DNA, 25 bp, Homo sapien
tgttatcaatatcctttgttgtttc

SEQ ID NO: 4376272 - DNA, 25 bp, Homo sapien
tcttcttattgagctcacattcttc

SEQ ID NO: 4376273 - DNA, 25 bp, Homo sapien
ttcttcaaagtctctaattatgtct

SEQ ID NO: 4376274 - DNA, 25 bp, Homo sapien
cttctcaatcttcttattgagctca

SEQ ID NO: 4376275 - DNA, 25 bp, Homo sapien
cttcaaagtctctaattatgtcttc

SEQ ID NO: 4376276 - DNA, 25 bp, Homo sapien
ctccagccttttcagtatttgccat

SEQ ID NO: 4376277 - DNA, 25 bp, Homo sapien
tttctccagccttttcagtatttgc

SEQ ID NO: 4376278 - DNA, 25 bp, Homo sapien
aggaccccagctttctccagccttt

SEQ ID NO: 4376279 - DNA, 25 bp, Homo sapien
gctttctccagccttttcagtattt

SEQ ID NO: 4376280 - DNA, 25 bp, Homo sapien
gattattacatgtctccccttcgat

SEQ ID NO: 4376281 - DNA, 25 bp, Homo sapien
tgtgtcatttcaggccatagaggta

SEQ ID NO: 4376282 - DNA, 25 bp, Homo sapien
aatgagcctccaggacaatccagaa

SEQ ID NO: 4376283 - DNA, 25 bp, Homo sapien
cctctctccttagtgtgaacgtcag

SEQ ID NO: 4376284 - DNA, 25 bp, Homo sapien
tcaaagttgcatttaatggattagt

SEQ ID NO: 4376285 - DNA, 25 bp, Homo sapien
tctcttccagaatgtatgtgcaact

SEQ ID NO: 4376286 - DNA, 25 bp, Homo sapien
aagcccaaagtggaaatctgagtta

SEQ ID NO: 4376287 - DNA, 25 bp, Homo sapien
actgctaaccatattgtgagcaaca

SEQ ID NO: 4376288 - DNA, 25 bp, Homo sapien
aaccatattgtgagcaacatgtgcc

SEQ ID NO: 4376289 - DNA, 25 bp, Homo sapien
gttttgtacaattctaaatgcccca

SEQ ID NO: 4376290 - DNA, 25 bp, Homo sapien
ttttgtacaattctaaatgccccat

SEQ ID NO: 4376291 - DNA, 25 bp, Homo sapien
ggtaactctctagaacattgctata

SEQ ID NO: 4376292 - DNA, 25 bp, Homo sapien
tctacagctgtttggattgccagag

SEQ ID NO: 4376293 - DNA, 25 bp, Homo sapien
cccaacttgatgacaattgtttaca

SEQ ID NO: 4376294 - DNA, 25 bp, Homo sapien
tattagaaaactcgaaaagctgcag

SEQ ID NO: 4376295 - DNA, 25 bp, Homo sapien
tctaatgtttttgttaaactatagc

SEQ ID NO: 4376296 - DNA, 25 bp, Homo sapien
taatgtttttgttaaactatagcta

SEQ ID NO: 4376297 - DNA, 25 bp, Homo sapien
tggtagataagaagttgcgggtttc

SEQ ID NO: 4376298 - DNA, 25 bp, Homo sapien
agttgcgggtttctattattagatc

SEQ ID NO: 4376299 - DNA, 25 bp, Homo sapien
atcataatctaatgagttgaaatca

SEQ ID NO: 4376300 - DNA, 25 bp, Homo sapien
ttattttgacttaaatgatttacca

SEQ ID NO: 4376301 - DNA, 25 bp, Homo sapien
tttggtaaatgtggtctatcataat

SEQ ID NO: 4376302 - DNA, 25 bp, Homo sapien
tggtaaatgtggtctatcataatct

SEQ ID NO: 4376303 - DNA, 25 bp, Homo sapien
ctttcagatattagcaaaactaatt

SEQ ID NO: 4376304 - DNA, 25 bp, Homo sapien
tctctttcagatattagcaaaacta

SEQ ID NO: 4376305 - DNA, 25 bp, Homo sapien
ctctttcagatattagcaaaactaa

SEQ ID NO: 4376306 - DNA, 25 bp, Homo sapien
tctttcagatattagcaaaactaat

SEQ ID NO: 4376307 - DNA, 25 bp, Homo sapien
ctaccttctgtggtgtggtgaatcc

SEQ ID NO: 4376308 - DNA, 25 bp, Homo sapien
gcggaggtggcagacagtgagaaat

SEQ ID NO: 4376309 - DNA, 25 bp, Homo sapien
tccaaataattgaagctcctgatgc

SEQ ID NO: 4376310 - DNA, 25 bp, Homo sapien
ggtaattgtgttggatactgcttga

SEQ ID NO: 4376311 - DNA, 25 bp, Homo sapien
tacctaggtgaactcgtgtcacagg

SEQ ID NO: 4376312 - DNA, 25 bp, Homo sapien
gttacctaggtgaactcgtgtcaca

SEQ ID NO: 4376313 - DNA, 25 bp, Homo sapien
tgcctcacactttccactcccaagt

SEQ ID NO: 4376314 - DNA, 25 bp, Homo sapien
taggtgaactcgtgtcacagggctt

SEQ ID NO: 4376315 - DNA, 25 bp, Homo sapien
gggactcatcttgcagccattgact

SEQ ID NO: 4376316 - DNA, 25 bp, Homo sapien
ctagggactcatcttgcagccattg

SEQ ID NO: 4376317 - DNA, 25 bp, Homo sapien
tgcctcttgcactgatcccggtcct

SEQ ID NO: 4376318 - DNA, 25 bp, Homo sapien
tcatcttgcagccattgacttcctt

SEQ ID NO: 4376319 - DNA, 25 bp, Homo sapien
agacacctatgtagaacggaacatg

SEQ ID NO: 4376320 - DNA, 25 bp, Homo sapien
aagggaaaatatctgcgtgagagta

SEQ ID NO: 4376321 - DNA, 25 bp, Homo sapien
gtagaacggaacatgcaaggatttt

SEQ ID NO: 4376322 - DNA, 25 bp, Homo sapien
gaaaatatctgcgtgagagtaaatg

SEQ ID NO: 4376323 - DNA, 25 bp, Homo sapien
tggttttaaggtgttcagatacaaa

SEQ ID NO: 4376324 - DNA, 25 bp, Homo sapien
tgttcagatacaaattccagcaaca

SEQ ID NO: 4376325 - DNA, 25 bp, Homo sapien
ttggttttaaggtgttcagatacaa

SEQ ID NO: 4376326 - DNA, 25 bp, Homo sapien
gttcagatacaaattccagcaacat

SEQ ID NO: 4376327 - DNA, 25 bp, Homo sapien
cgcagaaagccccatgtaggacagg

SEQ ID NO: 4376328 - DNA, 25 bp, Homo sapien
tctagctgcagtaattgacaaaggg

SEQ ID NO: 4376329 - DNA, 25 bp, Homo sapien
gatggcaagagctgtagcaactccc

SEQ ID NO: 4376330 - DNA, 25 bp, Homo sapien
taggacagggcataatttcggtcac

SEQ ID NO: 4376331 - DNA, 25 bp, Homo sapien
gagtaaattttgcagagcagttcat

SEQ ID NO: 4376332 - DNA, 25 bp, Homo sapien
cttgttgagtaaattttgcagagca

SEQ ID NO: 4376333 - DNA, 25 bp, Homo sapien
ttgagtaaattttgcagagcagttc

SEQ ID NO: 4376334 - DNA, 25 bp, Homo sapien
tgttgagtaaattttgcagagcagt

SEQ ID NO: 4376335 - DNA, 25 bp, Homo sapien
caccgagattgagtactgtaataat

SEQ ID NO: 4376336 - DNA, 25 bp, Homo sapien
gagattgagtactgtaataatggaa

SEQ ID NO: 4376337 - DNA, 25 bp, Homo sapien
ccgagattgagtactgtaataatgg

SEQ ID NO: 4376338 - DNA, 25 bp, Homo sapien
ggacaccgagattgagtactgtaat

SEQ ID NO: 4376339 - DNA, 25 bp, Homo sapien
tctgtagattctgcgcctgtttgct

SEQ ID NO: 4376340 - DNA, 25 bp, Homo sapien
gaatgtcaggtaggtaaggcaaacc

SEQ ID NO: 4376341 - DNA, 25 bp, Homo sapien
tatggtcccatcaagtattgtgaga

SEQ ID NO: 4376342 - DNA, 25 bp, Homo sapien
cacctggaccgttctgactcttctg

SEQ ID NO: 4376343 - DNA, 25 bp, Homo sapien
caaagtggtcagttgacgtgaaatc

SEQ ID NO: 4376344 - DNA, 25 bp, Homo sapien
agtggtcagttgacgtgaaatcttc

SEQ ID NO: 4376345 - DNA, 25 bp, Homo sapien
ccaaagtggtcagttgacgtgaaat

SEQ ID NO: 4376346 - DNA, 25 bp, Homo sapien
gttttaacatattaaaccacatcaa

SEQ ID NO: 4376347 - DNA, 25 bp, Homo sapien
tatgagaactcatctagacattttc

SEQ ID NO: 4376348 - DNA, 25 bp, Homo sapien
gtgtttatggagctatgagaactca

SEQ ID NO: 4376349 - DNA, 25 bp, Homo sapien
gtttatggagctatgagaactcatc

SEQ ID NO: 4376350 - DNA, 25 bp, Homo sapien
aagcaaatcacacatcgcattattt

SEQ ID NO: 4376351 - DNA, 25 bp, Homo sapien
acacatcgcattatttgattggacc

SEQ ID NO: 4376352 - DNA, 25 bp, Homo sapien
actcccacccatcaaaaagcaaatc

SEQ ID NO: 4376353 - DNA, 25 bp, Homo sapien
acatcgcattatttgattggaccat

SEQ ID NO: 4376354 - DNA, 25 bp, Homo sapien
caacagtcttcaatgtaattgtaga

SEQ ID NO: 4376355 - DNA, 25 bp, Homo sapien
agaactcatggaaatcagtgaagat

SEQ ID NO: 4376356 - DNA, 25 bp, Homo sapien
gaagcattgagcaaatccaaggcag

SEQ ID NO: 4376357 - DNA, 25 bp, Homo sapien
aatcagaaggtgttacagcaatccc

SEQ ID NO: 4376358 - DNA, 25 bp, Homo sapien
tggtttcgaaacagcaggatattgt

SEQ ID NO: 4376359 - DNA, 25 bp, Homo sapien
ttgactgtcacattagtttttaagg

SEQ ID NO: 4376360 - DNA, 25 bp, Homo sapien
agttctgtcctggccacttactgat

SEQ ID NO: 4376361 - DNA, 25 bp, Homo sapien
tcttgggtgtgtattataaactttc

SEQ ID NO: 4376362 - DNA, 25 bp, Homo sapien
ctgtgcatttgatcaatagctttca

SEQ ID NO: 4376363 - DNA, 25 bp, Homo sapien
gatataacaacttccagcacatcta

SEQ ID NO: 4376364 - DNA, 25 bp, Homo sapien
tagatctgtagttctgtgcatttga

SEQ ID NO: 4376365 - DNA, 25 bp, Homo sapien
tagttctgtgcatttgatcaatagc

SEQ ID NO: 4376366 - DNA, 25 bp, Homo sapien
gaaagattgctttagtgtcatgaca

SEQ ID NO: 4376367 - DNA, 25 bp, Homo sapien
taacactgttctgaaataatccgtg

SEQ ID NO: 4376368 - DNA, 25 bp, Homo sapien
cattctgattggatggcagggactc

SEQ ID NO: 4376369 - DNA, 25 bp, Homo sapien
ccgtgcattagagatgttttcttga

SEQ ID NO: 4376370 - DNA, 25 bp, Homo sapien
taagtggtgtatggatccagccaac

SEQ ID NO: 4376371 - DNA, 25 bp, Homo sapien
acagcgtccagagtgtccactttca

SEQ ID NO: 4376372 - DNA, 25 bp, Homo sapien
aatttcaaagggcttagcaacctgc

SEQ ID NO: 4376373 - DNA, 25 bp, Homo sapien
tccctggttatgatagagtttaatt

SEQ ID NO: 4376374 - DNA, 25 bp, Homo sapien
cttatgacgcagcttctgttatagc

SEQ ID NO: 4376375 - DNA, 25 bp, Homo sapien
tagttgatccctattcccatccggt

SEQ ID NO: 4376376 - DNA, 25 bp, Homo sapien
tccggttctcgcttgccgtaactta

SEQ ID NO: 4376377 - DNA, 25 bp, Homo sapien
ctggctggctagttgatccctattc

SEQ ID NO: 4376378 - DNA, 25 bp, Homo sapien
tctacatacaagagaaaggacacca

SEQ ID NO: 4376379 - DNA, 25 bp, Homo sapien
gcaggtcagaggatacattttcagt

SEQ ID NO: 4376380 - DNA, 25 bp, Homo sapien
cactggatatactctgcaggtcaga

SEQ ID NO: 4376381 - DNA, 25 bp, Homo sapien
tttaatttgcatctagcaccaggac

SEQ ID NO: 4376382 - DNA, 25 bp, Homo sapien
catacaggtatacaccttgatgaaa

SEQ ID NO: 4376383 - DNA, 25 bp, Homo sapien
aggtatacaccttgatgaaatgtta

SEQ ID NO: 4376384 - DNA, 25 bp, Homo sapien
cacatacaggtatacaccttgatga

SEQ ID NO: 4376385 - DNA, 25 bp, Homo sapien
tacaggtatacaccttgatgaaatg

SEQ ID NO: 4376386 - DNA, 25 bp, Homo sapien
tagacgggctctttcgttcaccttg

SEQ ID NO: 4376387 - DNA, 25 bp, Homo sapien
gaatgttaggaccacataagatgtc

SEQ ID NO: 4376388 - DNA, 25 bp, Homo sapien
ttgacctgcagagtatagacgggct

SEQ ID NO: 4376389 - DNA, 25 bp, Homo sapien
agaggctgactccaagaatgttagg

SEQ ID NO: 4376390 - DNA, 25 bp, Homo sapien
cttaatttgggggagaatgtggtca

SEQ ID NO: 4376391 - DNA, 25 bp, Homo sapien
ttaatttgggggagaatgtggtcat

SEQ ID NO: 4376392 - DNA, 25 bp, Homo sapien
gggtagctacccctgaattatccaa

SEQ ID NO: 4376393 - DNA, 25 bp, Homo sapien
cattgaagaaggaaatcgaggttgc

SEQ ID NO: 4376394 - DNA, 25 bp, Homo sapien
aaagggacgttactgagttaggcat

SEQ ID NO: 4376395 - DNA, 25 bp, Homo sapien
ttgaagacggaggaataggcccatg

SEQ ID NO: 4376396 - DNA, 25 bp, Homo sapien
ggcttgcatagcagtctccatgtgg

SEQ ID NO: 4376397 - DNA, 25 bp, Homo sapien
tggcttgcatagcagtctccatgtg

SEQ ID NO: 4376398 - DNA, 25 bp, Homo sapien
gcttgcatagcagtctccatgtgga

SEQ ID NO: 4376399 - DNA, 25 bp, Homo sapien
caacctctggtagccatgcttctac

SEQ ID NO: 4376400 - DNA, 25 bp, Homo sapien
caactacactttccaacctctggta

SEQ ID NO: 4376401 - DNA, 25 bp, Homo sapien
aaattgagcatccatatacttaatc

SEQ ID NO: 4376402 - DNA, 25 bp, Homo sapien
tattgtacctattaaacatccctat

SEQ ID NO: 4376403 - DNA, 25 bp, Homo sapien
aggcaaatagggctgcttcaatgct

SEQ ID NO: 4376404 - DNA, 25 bp, Homo sapien
aatagggctgcttcaatgctgagtt

SEQ ID NO: 4376405 - DNA, 25 bp, Homo sapien
caaatagggctgcttcaatgctgag

SEQ ID NO: 4376406 - DNA, 25 bp, Homo sapien
ctaggcaaatagggctgcttcaatg

SEQ ID NO: 4376407 - DNA, 25 bp, Homo sapien
tctcatcttgcaaaatctgctggag

SEQ ID NO: 4376408 - DNA, 25 bp, Homo sapien
ctcatcttgcaaaatctgctggagg

SEQ ID NO: 4376409 - DNA, 25 bp, Homo sapien
gaaatctgtagctcgctctcatctt

SEQ ID NO: 4376410 - DNA, 25 bp, Homo sapien
ctttgaaatctgtagctcgctctca

SEQ ID NO: 4376411 - DNA, 25 bp, Homo sapien
catctgcctagaaagtcagatgact

SEQ ID NO: 4376412 - DNA, 25 bp, Homo sapien
ttgtgagggaggacaagaacatctg

SEQ ID NO: 4376413 - DNA, 25 bp, Homo sapien
gcctagaaagtcagatgacttaaat

SEQ ID NO: 4376414 - DNA, 25 bp, Homo sapien
aatacttaataatcaatgaagtgac

SEQ ID NO: 4376415 - DNA, 25 bp, Homo sapien
tcaaaggaatccgtggtcttagagt

SEQ ID NO: 4376416 - DNA, 25 bp, Homo sapien
gaatccgtggtcttagagtttggca

SEQ ID NO: 4376417 - DNA, 25 bp, Homo sapien
ctctgcatctcgtcaaaggaatccg

SEQ ID NO: 4376418 - DNA, 25 bp, Homo sapien
tctcgtcaaaggaatccgtggtctt

SEQ ID NO: 4376419 - DNA, 25 bp, Homo sapien
cataaaatactgacaatagataaac

SEQ ID NO: 4376420 - DNA, 25 bp, Homo sapien
acataaaatactgacaatagataaa

SEQ ID NO: 4376421 - DNA, 25 bp, Homo sapien
gaaaatgcattgtattcactttatg

SEQ ID NO: 4376422 - DNA, 25 bp, Homo sapien
tttttggccaaagactggatattgt

SEQ ID NO: 4376423 - DNA, 25 bp, Homo sapien
ccaaagactggatattgtagaaaat

SEQ ID NO: 4376424 - DNA, 25 bp, Homo sapien
atattaacaacaacacctcagaatc

SEQ ID NO: 4376425 - DNA, 25 bp, Homo sapien
ctgtggttgtcttacttctggggct

SEQ ID NO: 4376426 - DNA, 25 bp, Homo sapien
cctttctgtggttgtcttacttctg

SEQ ID NO: 4376427 - DNA, 25 bp, Homo sapien
tctgtggttgtcttacttctggggc

SEQ ID NO: 4376428 - DNA, 25 bp, Homo sapien
tttctgtggttgtcttacttctggg

SEQ ID NO: 4376429 - DNA, 25 bp, Homo sapien
tggcacaacattactctcagcatgt

SEQ ID NO: 4376430 - DNA, 25 bp, Homo sapien
gagtttttcagccagtatctgcttt

SEQ ID NO: 4376431 - DNA, 25 bp, Homo sapien
ggtgttctgagtttcgtctctggaa

SEQ ID NO: 4376432 - DNA, 25 bp, Homo sapien
ccagatggccaagcaaatatggcac

SEQ ID NO: 4376433 - DNA, 25 bp, Homo sapien
gttgtctccatgcaacataaaacca

SEQ ID NO: 4376434 - DNA, 25 bp, Homo sapien
ttgtctccatgcaacataaaaccat

SEQ ID NO: 4376435 - DNA, 25 bp, Homo sapien
tcctcaccgatacttatttcgcatg

SEQ ID NO: 4376436 - DNA, 25 bp, Homo sapien
tgagcagtacacagaccaagcagag

SEQ ID NO: 4376437 - DNA, 25 bp, Homo sapien
tatgttcccataatgtacaagagtt

SEQ ID NO: 4376438 - DNA, 25 bp, Homo sapien
tctgtgttccgtagctatcgcacca

SEQ ID NO: 4376439 - DNA, 25 bp, Homo sapien
cactggatgaggcagtccttctggg

SEQ ID NO: 4376440 - DNA, 25 bp, Homo sapien
tgtcttcactggatgaggcagtcct

SEQ ID NO: 4376441 - DNA, 25 bp, Homo sapien
catttctgttgtcttcactggatga

SEQ ID NO: 4376442 - DNA, 25 bp, Homo sapien
ttctggggtggccacagaatacttc

SEQ ID NO: 4376443 - DNA, 25 bp, Homo sapien
tcatttgctctttagtaatgcgtag

SEQ ID NO: 4376444 - DNA, 25 bp, Homo sapien
ccatgttgatatttgtagacttcgc

SEQ ID NO: 4376445 - DNA, 25 bp, Homo sapien
tttgtttagttgttgatccatgttg

SEQ ID NO: 4376446 - DNA, 25 bp, Homo sapien
cgcttattttagtgctgttagtatt

SEQ ID NO: 4376447 - DNA, 25 bp, Homo sapien
gcttaaagttccctatccaatcagt

SEQ ID NO: 4376448 - DNA, 25 bp, Homo sapien
aaagttccctatccaatcagttgca

SEQ ID NO: 4376449 - DNA, 25 bp, Homo sapien
tggcttaaagttccctatccaatca

SEQ ID NO: 4376450 - DNA, 25 bp, Homo sapien
gattggcttaaagttccctatccaa

SEQ ID NO: 4376451 - DNA, 25 bp, Homo sapien
ttatgtgggataatagactcagaga

SEQ ID NO: 4376452 - DNA, 25 bp, Homo sapien
ctggtcccgcggtagcaactacgat

SEQ ID NO: 4376453 - DNA, 25 bp, Homo sapien
gcaactacgatgatcttatgtggga

SEQ ID NO: 4376454 - DNA, 25 bp, Homo sapien
cccgcggtagcaactacgatgatct

SEQ ID NO: 4376455 - DNA, 25 bp, Homo sapien
aataaaatacatcaaggagagcttg

SEQ ID NO: 4376456 - DNA, 25 bp, Homo sapien
caacagcttcattaaatttctagat

SEQ ID NO: 4376457 - DNA, 25 bp, Homo sapien
tttctagattcttgcaaaaggttta

SEQ ID NO: 4376458 - DNA, 25 bp, Homo sapien
tatttttgcagtcttcatgtcaact

SEQ ID NO: 4376459 - DNA, 25 bp, Homo sapien
tctgagtcttctacagatacagcaa

SEQ ID NO: 4376460 - DNA, 25 bp, Homo sapien
gagtcttctacagatacagcaagaa

SEQ ID NO: 4376461 - DNA, 25 bp, Homo sapien
cagcaagaacccattggacgaggtg

SEQ ID NO: 4376462 - DNA, 25 bp, Homo sapien
gacgaggtgacccatggctttctcc

SEQ ID NO: 4376463 - DNA, 25 bp, Homo sapien
aataaccaaattctgaggcattcat

SEQ ID NO: 4376464 - DNA, 25 bp, Homo sapien
aaccaaattctgaggcattcattca

SEQ ID NO: 4376465 - DNA, 25 bp, Homo sapien
ctaataaccaaattctgaggcattc

SEQ ID NO: 4376466 - DNA, 25 bp, Homo sapien
taaccaaattctgaggcattcattc

SEQ ID NO: 4376467 - DNA, 25 bp, Homo sapien
taagctccacggtataaaataacac

SEQ ID NO: 4376468 - DNA, 25 bp, Homo sapien
gagagactatgcttggccagctgca

SEQ ID NO: 4376469 - DNA, 25 bp, Homo sapien
gatacttaggctgagcttacatgag

SEQ ID NO: 4376470 - DNA, 25 bp, Homo sapien
taacaccctgagcaaaacactgact

SEQ ID NO: 4376471 - DNA, 25 bp, Homo sapien
tttgggaatacatggaccagggctg

SEQ ID NO: 4376472 - DNA, 25 bp, Homo sapien
tacatagcccatagatgatcagcag

SEQ ID NO: 4376473 - DNA, 25 bp, Homo sapien
gacaatggcctatatttcagcatga

SEQ ID NO: 4376474 - DNA, 25 bp, Homo sapien
tgcaggtaaagttactacatagccc

SEQ ID NO: 4376475 - DNA, 25 bp, Homo sapien
gccaaggaatggtcaaagcaaaagt

SEQ ID NO: 4376476 - DNA, 25 bp, Homo sapien
catacagtgcgattgagaaaacctt

SEQ ID NO: 4376477 - DNA, 25 bp, Homo sapien
caaaaaatgtgtctaccctgagcaa

SEQ ID NO: 4376478 - DNA, 25 bp, Homo sapien
gaagatttaaatgatggcgagcact

SEQ ID NO: 4376479 - DNA, 25 bp, Homo sapien
tccctagcacgttatctaagtctct

SEQ ID NO: 4376480 - DNA, 25 bp, Homo sapien
ttctgtgattccctagcacgttatc

SEQ ID NO: 4376481 - DNA, 25 bp, Homo sapien
acttctgtgtgcatactcaattatt

SEQ ID NO: 4376482 - DNA, 25 bp, Homo sapien
ttctgtgtgcatactcaattattcc

SEQ ID NO: 4376483 - DNA, 25 bp, Homo sapien
tcagctgtggacagaaaatttgtct

SEQ ID NO: 4376484 - DNA, 25 bp, Homo sapien
gctgtggacagaaaatttgtctttt

SEQ ID NO: 4376485 - DNA, 25 bp, Homo sapien
ctcagctgtggacagaaaatttgtc

SEQ ID NO: 4376486 - DNA, 25 bp, Homo sapien
cagctgtggacagaaaatttgtctt

SEQ ID NO: 4376487 - DNA, 25 bp, Homo sapien
atccatacacgcagcttttgttgag

SEQ ID NO: 4376488 - DNA, 25 bp, Homo sapien
cttgcaatcttgaccaatgatgcat

SEQ ID NO: 4376489 - DNA, 25 bp, Homo sapien
gatgcatccatacacgcagcttttg

SEQ ID NO: 4376490 - DNA, 25 bp, Homo sapien
tgaccaatgatgcatccatacacgc

SEQ ID NO: 4376491 - DNA, 25 bp, Homo sapien
acctggtctgcgtaggatggtttta

SEQ ID NO: 4376492 - DNA, 25 bp, Homo sapien
gacgggaacctggtctgcgtaggat

SEQ ID NO: 4376493 - DNA, 25 bp, Homo sapien
cagtcaccttttcctcacgaaggcc

SEQ ID NO: 4376494 - DNA, 25 bp, Homo sapien
catgtcagaaatcaggacgggaacc

SEQ ID NO: 4376495 - DNA, 25 bp, Homo sapien
cgtgccagtttgaactgtgccagct

SEQ ID NO: 4376496 - DNA, 25 bp, Homo sapien
ggttcgtgccagtttgaactgtgcc

SEQ ID NO: 4376497 - DNA, 25 bp, Homo sapien
atgggttcgtgccagtttgaactgt

SEQ ID NO: 4376498 - DNA, 25 bp, Homo sapien
gccagtttgaactgtgccagctttc

SEQ ID NO: 4376499 - DNA, 25 bp, Homo sapien
tctttactcatgataccacacacga

SEQ ID NO: 4376500 - DNA, 25 bp, Homo sapien
tgtctctgttcccactcgccaaaat

SEQ ID NO: 4376501 - DNA, 25 bp, Homo sapien
gacccaggtgcataacttcttatta

SEQ ID NO: 4376502 - DNA, 25 bp, Homo sapien
cccttctttagcattgctttaaggc

SEQ ID NO: 4376503 - DNA, 25 bp, Homo sapien
ctagtttatgatcttaacctgaatc

SEQ ID NO: 4376504 - DNA, 25 bp, Homo sapien
gtaagaccctgcattctggacttgc

SEQ ID NO: 4376505 - DNA, 25 bp, Homo sapien
tcatgtttagatttgcacttccata

SEQ ID NO: 4376506 - DNA, 25 bp, Homo sapien
tgcacttccatatggggagtccctg

SEQ ID NO: 4376507 - DNA, 25 bp, Homo sapien
ggctaaattttgaacccatgacttc

SEQ ID NO: 4376508 - DNA, 25 bp, Homo sapien
actggctaaattttgaacccatgac

SEQ ID NO: 4376509 - DNA, 25 bp, Homo sapien
tggctaaattttgaacccatgactt

SEQ ID NO: 4376510 - DNA, 25 bp, Homo sapien
aactggctaaattttgaacccatga

SEQ ID NO: 4376511 - DNA, 25 bp, Homo sapien
tacacagtctccagaaacaaccggt

SEQ ID NO: 4376512 - DNA, 25 bp, Homo sapien
gattccatgttttaccccaaggaga

SEQ ID NO: 4376513 - DNA, 25 bp, Homo sapien
tagatgcaacttccttcctaaagaa

SEQ ID NO: 4376514 - DNA, 25 bp, Homo sapien
tcaggccacgagaaacgtcagcaag

SEQ ID NO: 4376515 - DNA, 25 bp, Homo sapien
ttttattggcattagaaaagctgct

SEQ ID NO: 4376516 - DNA, 25 bp, Homo sapien
aaaagctgcttagacatgagtccat

SEQ ID NO: 4376517 - DNA, 25 bp, Homo sapien
tggcattagaaaagctgcttagaca

SEQ ID NO: 4376518 - DNA, 25 bp, Homo sapien
gcattagaaaagctgcttagacatg

SEQ ID NO: 4376519 - DNA, 25 bp, Homo sapien
caggacacctggagattatagaaac

SEQ ID NO: 4376520 - DNA, 25 bp, Homo sapien
catttgggtattgtagaccagtcac

SEQ ID NO: 4376521 - DNA, 25 bp, Homo sapien
ttttcacataaagctaatcactaca

SEQ ID NO: 4376522 - DNA, 25 bp, Homo sapien
tttactgtgttttgctagagcagag

SEQ ID NO: 4376523 - DNA, 25 bp, Homo sapien
tactaactagtgtgacttggctgtc

SEQ ID NO: 4376524 - DNA, 25 bp, Homo sapien
gccctatagtaggttttatagacac

SEQ ID NO: 4376525 - DNA, 25 bp, Homo sapien
cataatctgcaatatagattagtgg

SEQ ID NO: 4376526 - DNA, 25 bp, Homo sapien
agtataatcatgttctgccctatag

SEQ ID NO: 4376527 - DNA, 25 bp, Homo sapien
tattagtttgtagccttgaaacatc

SEQ ID NO: 4376528 - DNA, 25 bp, Homo sapien
cttggataggtaatcacttggttac

SEQ ID NO: 4376529 - DNA, 25 bp, Homo sapien
aagacattagtaatcaaaatctcca

SEQ ID NO: 4376530 - DNA, 25 bp, Homo sapien
tactctgggtacaaaatggaaacag

SEQ ID NO: 4376531 - DNA, 25 bp, Homo sapien
tctttgaccacggtagtgtgatgac

SEQ ID NO: 4376532 - DNA, 25 bp, Homo sapien
cacggtagtgtgatgacatgttgct

SEQ ID NO: 4376533 - DNA, 25 bp, Homo sapien
tgtgatgacatgttgcttgttgaga

SEQ ID NO: 4376534 - DNA, 25 bp, Homo sapien
gatgacatgttgcttgttgagaaaa

SEQ ID NO: 4376535 - DNA, 25 bp, Homo sapien
cacagggacccctcacatgtgaggt

SEQ ID NO: 4376536 - DNA, 25 bp, Homo sapien
ggtcttaaggaaatctgtggaaatc

SEQ ID NO: 4376537 - DNA, 25 bp, Homo sapien
ctgacttatattcagtgattggctg

SEQ ID NO: 4376538 - DNA, 25 bp, Homo sapien
ggctgctgaaatctgggaactcttc

SEQ ID NO: 4376539 - DNA, 25 bp, Homo sapien
tactatgatgactgttaaaactgtc

SEQ ID NO: 4376540 - DNA, 25 bp, Homo sapien
tcaaaattactggttgctattcttc

SEQ ID NO: 4376541 - DNA, 25 bp, Homo sapien
tgaaattataatgagccacctaact

SEQ ID NO: 4376542 - DNA, 25 bp, Homo sapien
gagccacctaacttatacataaagt

SEQ ID NO: 4376543 - DNA, 25 bp, Homo sapien
tagaactaatctctggtagctcacc

SEQ ID NO: 4376544 - DNA, 25 bp, Homo sapien
gatgcatgggtacgttcaataagct

SEQ ID NO: 4376545 - DNA, 25 bp, Homo sapien
ttagagatcagggaattatgggccc

SEQ ID NO: 4376546 - DNA, 25 bp, Homo sapien
tcacacggccatatagtggaagagc

SEQ ID NO: 4376547 - DNA, 25 bp, Homo sapien
cttttcagtcccaaactggactcca

SEQ ID NO: 4376548 - DNA, 25 bp, Homo sapien
ggactccaagcttcaggctgaggcc

SEQ ID NO: 4376549 - DNA, 25 bp, Homo sapien
ttcagtcccaaactggactccaagc

SEQ ID NO: 4376550 - DNA, 25 bp, Homo sapien
tggactccaagcttcaggctgaggc

SEQ ID NO: 4376551 - DNA, 25 bp, Homo sapien
tctcccagctccttaacatggttgt

SEQ ID NO: 4376552 - DNA, 25 bp, Homo sapien
ccagctccttaacatggttgttttt

SEQ ID NO: 4376553 - DNA, 25 bp, Homo sapien
tcccagctccttaacatggttgttt

SEQ ID NO: 4376554 - DNA, 25 bp, Homo sapien
agctccttaacatggttgtttttca

SEQ ID NO: 4376555 - DNA, 25 bp, Homo sapien
gaaaatttgctgttgaaggtctctg

SEQ ID NO: 4376556 - DNA, 25 bp, Homo sapien
ggcaactggagctttctttaacaga

SEQ ID NO: 4376557 - DNA, 25 bp, Homo sapien
aaggaaagctcattctggtcagtaa

SEQ ID NO: 4376558 - DNA, 25 bp, Homo sapien
gcagctgcacttcttgatcgaggat

SEQ ID NO: 4376559 - DNA, 25 bp, Homo sapien
tcaactttgtagagaaacaacacac

SEQ ID NO: 4376560 - DNA, 25 bp, Homo sapien
aaagatacaaaataccaggtccctg

SEQ ID NO: 4376561 - DNA, 25 bp, Homo sapien
aaagccaagcaccacgacatgtgtc

SEQ ID NO: 4376562 - DNA, 25 bp, Homo sapien
tccaggacaataccaaacttaatac

SEQ ID NO: 4376563 - DNA, 25 bp, Homo sapien
ctgttttgaaagttgacttagttgg

SEQ ID NO: 4376564 - DNA, 25 bp, Homo sapien
tctatggaggtagcatctggactga

SEQ ID NO: 4376565 - DNA, 25 bp, Homo sapien
ggtggtgccagaaggtctctctatg

SEQ ID NO: 4376566 - DNA, 25 bp, Homo sapien
ctcaagagaccagcactagataggg

SEQ ID NO: 4376567 - DNA, 25 bp, Homo sapien
gaagataccccaatgaacaggacag

SEQ ID NO: 4376568 - DNA, 25 bp, Homo sapien
ccaagacaattgcattatcagcata

SEQ ID NO: 4376569 - DNA, 25 bp, Homo sapien
tcagcatattcacttaagctatggt

SEQ ID NO: 4376570 - DNA, 25 bp, Homo sapien
cacttaagctatggtctggaatcca

SEQ ID NO: 4376571 - DNA, 25 bp, Homo sapien
acccaagacaattgcattatcagca

SEQ ID NO: 4376572 - DNA, 25 bp, Homo sapien
tctaaacgatgagaaggaagtaagt

SEQ ID NO: 4376573 - DNA, 25 bp, Homo sapien
tactggaattgttgcattctaaacg

SEQ ID NO: 4376574 - DNA, 25 bp, Homo sapien
tgcaagtgtaatcctagtactggaa

SEQ ID NO: 4376575 - DNA, 25 bp, Homo sapien
aataaagaatctctcaagtccttga

SEQ ID NO: 4376576 - DNA, 25 bp, Homo sapien
tatatgttcatgtcacacaccttcc

SEQ ID NO: 4376577 - DNA, 25 bp, Homo sapien
tctgatcagttgagagtagaccagg

SEQ ID NO: 4376578 - DNA, 25 bp, Homo sapien
taagtcacagctatcctgacagact

SEQ ID NO: 4376579 - DNA, 25 bp, Homo sapien
catctaaacttagtgacacacctgt

SEQ ID NO: 4376580 - DNA, 25 bp, Homo sapien
tcaaagcttggcctcttatacagat

SEQ ID NO: 4376581 - DNA, 25 bp, Homo sapien
tgctttcaagtgatacacaggaatc

SEQ ID NO: 4376582 - DNA, 25 bp, Homo sapien
caggatccacgatgttgtcaaaatc

SEQ ID NO: 4376583 - DNA, 25 bp, Homo sapien
taaatctctacctagcaaagtgtcc

SEQ ID NO: 4376584 - DNA, 25 bp, Homo sapien
ctcagacaaagatttaagaagtctc

SEQ ID NO: 4376585 - DNA, 25 bp, Homo sapien
tcttctgacaatcatgaaaagcaca

SEQ ID NO: 4376586 - DNA, 25 bp, Homo sapien
taataagtagagctgtttctcagac

SEQ ID NO: 4376587 - DNA, 25 bp, Homo sapien
aaaacatgatgttgatggatgccat

SEQ ID NO: 4376588 - DNA, 25 bp, Homo sapien
gaaaaggccctcttgtgtcactcgt

SEQ ID NO: 4376589 - DNA, 25 bp, Homo sapien
tgtcactcgtgatctccaggagaga

SEQ ID NO: 4376590 - DNA, 25 bp, Homo sapien
taatgtagttctatgggcacctcca

SEQ ID NO: 4376591 - DNA, 25 bp, Homo sapien
taacaccttacataggagtcaaagc

SEQ ID NO: 4376592 - DNA, 25 bp, Homo sapien
tgactgtctgcatcagctaatttaa

SEQ ID NO: 4376593 - DNA, 25 bp, Homo sapien
cttcgttgactgtctgcatcagcta

SEQ ID NO: 4376594 - DNA, 25 bp, Homo sapien
tttgtaaggcacaatattttctgct

SEQ ID NO: 4376595 - DNA, 25 bp, Homo sapien
actttgtaaggcacaatattttctg

SEQ ID NO: 4376596 - DNA, 25 bp, Homo sapien
tctttagagatggttcaggtctctc

SEQ ID NO: 4376597 - DNA, 25 bp, Homo sapien
atcatccagttcgactatctttaga

SEQ ID NO: 4376598 - DNA, 25 bp, Homo sapien
ccagttcgactatctttagagatgg

SEQ ID NO: 4376599 - DNA, 25 bp, Homo sapien
catccagttcgactatctttagaga

SEQ ID NO: 4376600 - DNA, 25 bp, Homo sapien
ctactggcaataaaagagctgtgtg

SEQ ID NO: 4376601 - DNA, 25 bp, Homo sapien
ctgtgtgttgtactttggtctcctc

SEQ ID NO: 4376602 - DNA, 25 bp, Homo sapien
gagctgtgtgttgtactttggtctc

SEQ ID NO: 4376603 - DNA, 25 bp, Homo sapien
gtgtgttgtactttggtctcctcac

SEQ ID NO: 4376604 - DNA, 25 bp, Homo sapien
tgagaacactgtgcatcaccagtgg

SEQ ID NO: 4376605 - DNA, 25 bp, Homo sapien
ttcatgtggatgtgggaacgtatct

SEQ ID NO: 4376606 - DNA, 25 bp, Homo sapien
tgggaacgtatctggtagcatttta

SEQ ID NO: 4376607 - DNA, 25 bp, Homo sapien
tgcatcaccagtggtttcatgtgga

SEQ ID NO: 4376608 - DNA, 25 bp, Homo sapien
ctcctgtgttttttaagccataatt

SEQ ID NO: 4376609 - DNA, 25 bp, Homo sapien
gattagtctgtacttcgcattcttc

SEQ ID NO: 4376610 - DNA, 25 bp, Homo sapien
tcaatattaagtggttctctccaaa

SEQ ID NO: 4376611 - DNA, 25 bp, Homo sapien
aattttcagattagtctgtacttcg

SEQ ID NO: 4376612 - DNA, 25 bp, Homo sapien
gttcaatattaagtggttctctcca

SEQ ID NO: 4376613 - DNA, 25 bp, Homo sapien
tactgggaaacttcaacatactgtt

SEQ ID NO: 4376614 - DNA, 25 bp, Homo sapien
tgatcacacagtgcatactcctttg

SEQ ID NO: 4376615 - DNA, 25 bp, Homo sapien
aaagcaatagttgtcctggcaaaaa

SEQ ID NO: 4376616 - DNA, 25 bp, Homo sapien
cctttgaggagttatagcaaactgc

SEQ ID NO: 4376617 - DNA, 25 bp, Homo sapien
ttgtcatcatgatttccggttctcc

SEQ ID NO: 4376618 - DNA, 25 bp, Homo sapien
catgatttccggttctccattgact

SEQ ID NO: 4376619 - DNA, 25 bp, Homo sapien
tctccattgacttaacacttcctga

SEQ ID NO: 4376620 - DNA, 25 bp, Homo sapien
gatttccggttctccattgacttaa

SEQ ID NO: 4376621 - DNA, 25 bp, Homo sapien
ggttttgtacgttgtgctcttttca

SEQ ID NO: 4376622 - DNA, 25 bp, Homo sapien
ttcttggttttgtacgttgtgctct

SEQ ID NO: 4376623 - DNA, 25 bp, Homo sapien
cttcatcgaatgacccttcacacaa

SEQ ID NO: 4376624 - DNA, 25 bp, Homo sapien
tgacccttcacacaacagactcttt

SEQ ID NO: 4376625 - DNA, 25 bp, Homo sapien
gatgggcaacatccaatacattgaa

SEQ ID NO: 4376626 - DNA, 25 bp, Homo sapien
catcctttataaactgatgggcaac

SEQ ID NO: 4376627 - DNA, 25 bp, Homo sapien
tttgggttcatctggattaacatcc

SEQ ID NO: 4376628 - DNA, 25 bp, Homo sapien
tcctttgtagaattattctcctctt

SEQ ID NO: 4376629 - DNA, 25 bp, Homo sapien
tctcctctaccatcatctttacctg

SEQ ID NO: 4376630 - DNA, 25 bp, Homo sapien
tctctcctctaccatcatctttacc

SEQ ID NO: 4376631 - DNA, 25 bp, Homo sapien
ttacctggcaggcttttgcttctcc

SEQ ID NO: 4376632 - DNA, 25 bp, Homo sapien
ctcctctaccatcatctttacctgg

SEQ ID NO: 4376633 - DNA, 25 bp, Homo sapien
gagtagagagagtctgtagattgcc

SEQ ID NO: 4376634 - DNA, 25 bp, Homo sapien
gctcaacgtttagaaagcatactgt

SEQ ID NO: 4376635 - DNA, 25 bp, Homo sapien
tatgtaacccgaaggaagttataca

SEQ ID NO: 4376636 - DNA, 25 bp, Homo sapien
caataaagatagaaagggagtagag

SEQ ID NO: 4376637 - DNA, 25 bp, Homo sapien
cacaataagccatatcacagcaaag

SEQ ID NO: 4376638 - DNA, 25 bp, Homo sapien
gactggtgtcgtatctgcatctgga

SEQ ID NO: 4376639 - DNA, 25 bp, Homo sapien
tgcatctggatcacaataagccata

SEQ ID NO: 4376640 - DNA, 25 bp, Homo sapien
tcagtaattatttgactggtgtcgt

SEQ ID NO: 4376641 - DNA, 25 bp, Homo sapien
gtgaactttagcaaagcatcctgaa

SEQ ID NO: 4376642 - DNA, 25 bp, Homo sapien
caaagcatcctgaacaataatcttc

SEQ ID NO: 4376643 - DNA, 25 bp, Homo sapien
tgcaaaagagttgttctgtggagct

SEQ ID NO: 4376644 - DNA, 25 bp, Homo sapien
tggagctttagtgcccctttctggt

SEQ ID NO: 4376645 - DNA, 25 bp, Homo sapien
acactgtccacatactttcccattt

SEQ ID NO: 4376646 - DNA, 25 bp, Homo sapien
tctcacactgtccacatactttccc

SEQ ID NO: 4376647 - DNA, 25 bp, Homo sapien
tcacactgtccacatactttcccat

SEQ ID NO: 4376648 - DNA, 25 bp, Homo sapien
ttctcacactgtccacatactttcc

SEQ ID NO: 4376649 - DNA, 25 bp, Homo sapien
tataattaactgttggtttcactgg

SEQ ID NO: 4376650 - DNA, 25 bp, Homo sapien
ttataattaactgttggtttcactg

SEQ ID NO: 4376651 - DNA, 25 bp, Homo sapien
taattaactgttggtttcactggct

SEQ ID NO: 4376652 - DNA, 25 bp, Homo sapien
ataattaactgttggtttcactggc

SEQ ID NO: 4376653 - DNA, 25 bp, Homo sapien
gaatctgttccttcagcaattttaa

SEQ ID NO: 4376654 - DNA, 25 bp, Homo sapien
atctgttccttcagcaattttaatt

SEQ ID NO: 4376655 - DNA, 25 bp, Homo sapien
ttgaatctgttccttcagcaatttt

SEQ ID NO: 4376656 - DNA, 25 bp, Homo sapien
ctgttccttcagcaattttaatttc

SEQ ID NO: 4376657 - DNA, 25 bp, Homo sapien
atccacttattgcttgtgtcaatat

SEQ ID NO: 4376658 - DNA, 25 bp, Homo sapien
tccacttattgcttgtgtcaatatc

SEQ ID NO: 4376659 - DNA, 25 bp, Homo sapien
catccacttattgcttgtgtcaata

SEQ ID NO: 4376660 - DNA, 25 bp, Homo sapien
ttgacagtcttagagacttcaatgc

SEQ ID NO: 4376661 - DNA, 25 bp, Homo sapien
tgcttgacagtcttagagacttcaa

SEQ ID NO: 4376662 - DNA, 25 bp, Homo sapien
tctgcttgacagtcttagagacttc

SEQ ID NO: 4376663 - DNA, 25 bp, Homo sapien
cagtcttagagacttcaatgcacat

SEQ ID NO: 4376664 - DNA, 25 bp, Homo sapien
tgtgaacatctaaatgcctcttcag

SEQ ID NO: 4376665 - DNA, 25 bp, Homo sapien
accaaatctggcatgtaagcagcat

SEQ ID NO: 4376666 - DNA, 25 bp, Homo sapien
ttataaccaaatctggcatgtaagc

SEQ ID NO: 4376667 - DNA, 25 bp, Homo sapien
ccttcaaaatctcagactctaaagt

SEQ ID NO: 4376668 - DNA, 25 bp, Homo sapien
gattgaccaatttgcccacttttcc

SEQ ID NO: 4376669 - DNA, 25 bp, Homo sapien
cctttattttgtgacatcatatatg

SEQ ID NO: 4376670 - DNA, 25 bp, Homo sapien
cagatttccagtaatactcgcttga

SEQ ID NO: 4376671 - DNA, 25 bp, Homo sapien
ttttccagatttccagtaatactcg

SEQ ID NO: 4376672 - DNA, 25 bp, Homo sapien
ttgtttcttgtggatcggaattctt

SEQ ID NO: 4376673 - DNA, 25 bp, Homo sapien
taaagttagcatttgccttccatca

SEQ ID NO: 4376674 - DNA, 25 bp, Homo sapien
tcttttgtacttctccgaaatctgg

SEQ ID NO: 4376675 - DNA, 25 bp, Homo sapien
cttttgtacttctccgaaatctggt

SEQ ID NO: 4376676 - DNA, 25 bp, Homo sapien
tagcatttgccttccatcaaaatcc

SEQ ID NO: 4376677 - DNA, 25 bp, Homo sapien
attttagctttacagaatttccagg

SEQ ID NO: 4376678 - DNA, 25 bp, Homo sapien
cccatggaagaactacaaaatcttt

SEQ ID NO: 4376679 - DNA, 25 bp, Homo sapien
ttccccatggaagaactacaaaatc

SEQ ID NO: 4376680 - DNA, 25 bp, Homo sapien
acagaatttccaggttttccccatg

SEQ ID NO: 4376681 - DNA, 25 bp, Homo sapien
tattgtctaaaagttattctgattt

SEQ ID NO: 4376682 - DNA, 25 bp, Homo sapien
gattaccaccttaatattgtctaaa

SEQ ID NO: 4376683 - DNA, 25 bp, Homo sapien
taatattgtctaaaagttattctga

SEQ ID NO: 4376684 - DNA, 25 bp, Homo sapien
caccttaatattgtctaaaagttat

SEQ ID NO: 4376685 - DNA, 25 bp, Homo sapien
gaagtgaatcatgatcaggggcttc

SEQ ID NO: 4376686 - DNA, 25 bp, Homo sapien
aagtggaagtgaatcatgatcaggg

SEQ ID NO: 4376687 - DNA, 25 bp, Homo sapien
tggaagtgaatcatgatcaggggct

SEQ ID NO: 4376688 - DNA, 25 bp, Homo sapien
agtgaatcatgatcaggggcttcac

SEQ ID NO: 4376689 - DNA, 25 bp, Homo sapien
ggctgcctgtatcatgaagattccc

SEQ ID NO: 4376690 - DNA, 25 bp, Homo sapien
tcaatgctcaattcgaaggctgcct

SEQ ID NO: 4376691 - DNA, 25 bp, Homo sapien
catgaagattccctccatcgaaacc

SEQ ID NO: 4376692 - DNA, 25 bp, Homo sapien
gattccctccatcgaaaccgagctt

SEQ ID NO: 4376693 - DNA, 25 bp, Homo sapien
tcaggaatcgggcaccccgcaccat

SEQ ID NO: 4376694 - DNA, 25 bp, Homo sapien
tttctcaggaatcgggcaccccgca

SEQ ID NO: 4376695 - DNA, 25 bp, Homo sapien
aggaatcgggcaccccgcaccatag

SEQ ID NO: 4376696 - DNA, 25 bp, Homo sapien
gatttctcaggaatcgggcaccccg

SEQ ID NO: 4376697 - DNA, 25 bp, Homo sapien
ttgtgaggagtagacttcaagaagt

SEQ ID NO: 4376698 - DNA, 25 bp, Homo sapien
tgtgaggagtagacttcaagaagta

SEQ ID NO: 4376699 - DNA, 25 bp, Homo sapien
gaagtaagtgggtgcatgtgaacgc

SEQ ID NO: 4376700 - DNA, 25 bp, Homo sapien
gtgggtgcatgtgaacgcgcaggca

SEQ ID NO: 4376701 - DNA, 25 bp, Homo sapien
tctcagggtgccaaatttttcataa

SEQ ID NO: 4376702 - DNA, 25 bp, Homo sapien
caaatttttcataaggtgcaaatga

SEQ ID NO: 4376703 - DNA, 25 bp, Homo sapien
caaaaggggatgaaatatggtttct

SEQ ID NO: 4376704 - DNA, 25 bp, Homo sapien
gatgaaatatggtttctcagggtgc

SEQ ID NO: 4376705 - DNA, 25 bp, Homo sapien
tgccgggagtttccgtcttggtctc

SEQ ID NO: 4376706 - DNA, 25 bp, Homo sapien
accaccgccggatggccgcggatag

SEQ ID NO: 4376707 - DNA, 25 bp, Homo sapien
cgtcttggtctccttggttaccgcg

SEQ ID NO: 4376708 - DNA, 25 bp, Homo sapien
ccgcggatagctgccgggagtttcc

SEQ ID NO: 4376709 - DNA, 25 bp, Homo sapien
ccatagcaaccagaaagctgggttc

SEQ ID NO: 4376710 - DNA, 25 bp, Homo sapien
gcaaccagaaagctgggttctgcca

SEQ ID NO: 4376711 - DNA, 25 bp, Homo sapien
ctcggtacccatagcaaccagaaag

SEQ ID NO: 4376712 - DNA, 25 bp, Homo sapien
ggtacccatagcaaccagaaagctg

SEQ ID NO: 4376713 - DNA, 25 bp, Homo sapien
ttaaattgtccaaggatttctcgga

SEQ ID NO: 4376714 - DNA, 25 bp, Homo sapien
ctttgggaaagttactgccacaata

SEQ ID NO: 4376715 - DNA, 25 bp, Homo sapien
caaaagatttgtcacaactttgtcc

SEQ ID NO: 4376716 - DNA, 25 bp, Homo sapien
ttgtccataagaaaggtatcattct

SEQ ID NO: 4376717 - DNA, 25 bp, Homo sapien
tgcccattgtgagttaatattaccc

SEQ ID NO: 4376718 - DNA, 25 bp, Homo sapien
ttgctatgtactggtctggattctt

SEQ ID NO: 4376719 - DNA, 25 bp, Homo sapien
ttttgctatgtactggtctggattc

SEQ ID NO: 4376720 - DNA, 25 bp, Homo sapien
tttgctatgtactggtctggattct

SEQ ID NO: 4376721 - DNA, 25 bp, Homo sapien
gcttttgctatgtactggtctggat

SEQ ID NO: 4376722 - DNA, 25 bp, Homo sapien
tcaggatcctcagtcgggaactcgt

SEQ ID NO: 4376723 - DNA, 25 bp, Homo sapien
caatgagcttatggaagacactccc

SEQ ID NO: 4376724 - DNA, 25 bp, Homo sapien
ggaactcgtggcagacttttagcaa

SEQ ID NO: 4376725 - DNA, 25 bp, Homo sapien
ccttgtgcttagaaaactacctgga

SEQ ID NO: 4376726 - DNA, 25 bp, Homo sapien
tcctgagtcacgctaattatgctgc

SEQ ID NO: 4376727 - DNA, 25 bp, Homo sapien
ccagagaggcatgtaccatggccat

SEQ ID NO: 4376728 - DNA, 25 bp, Homo sapien
gaatgctttacagaagcgctcagca

SEQ ID NO: 4376729 - DNA, 25 bp, Homo sapien
tacgtacgctcaaggttttagatgc

SEQ ID NO: 4376730 - DNA, 25 bp, Homo sapien
tttattctgaggctgtgcttttcat

SEQ ID NO: 4376731 - DNA, 25 bp, Homo sapien
cttttattctgaggctgtgcttttc

SEQ ID NO: 4376732 - DNA, 25 bp, Homo sapien
ttttgagaaatcatcttttattctg

SEQ ID NO: 4376733 - DNA, 25 bp, Homo sapien
catcttttattctgaggctgtgctt

SEQ ID NO: 4376734 - DNA, 25 bp, Homo sapien
tgggtgtcaggatttgtcactcttc

SEQ ID NO: 4376735 - DNA, 25 bp, Homo sapien
tcaggatttgtcactcttcccataa

SEQ ID NO: 4376736 - DNA, 25 bp, Homo sapien
tccttttatctcctgggtgtcagga

SEQ ID NO: 4376737 - DNA, 25 bp, Homo sapien
ccttttatctcctgggtgtcaggat

SEQ ID NO: 4376738 - DNA, 25 bp, Homo sapien
gctttgagccagactcatgatcaca

SEQ ID NO: 4376739 - DNA, 25 bp, Homo sapien
ttggattatgcttcataataaacag

SEQ ID NO: 4376740 - DNA, 25 bp, Homo sapien
aattggctttgagccagactcatga

SEQ ID NO: 4376741 - DNA, 25 bp, Homo sapien
ttgctataaattggctttgagccag

SEQ ID NO: 4376742 - DNA, 25 bp, Homo sapien
gaataaatattaggtcactcacaga

SEQ ID NO: 4376743 - DNA, 25 bp, Homo sapien
gcacttcgggtttgtggtaatcaca

SEQ ID NO: 4376744 - DNA, 25 bp, Homo sapien
ctcagagcttttaggatttgtgcag

SEQ ID NO: 4376745 - DNA, 25 bp, Homo sapien
gaagcaagccagataccagattcaa

SEQ ID NO: 4376746 - DNA, 25 bp, Homo sapien
catgtctgaattactacgataaatc

SEQ ID NO: 4376747 - DNA, 25 bp, Homo sapien
tgcttttgagcagtccgtgagtgga

SEQ ID NO: 4376748 - DNA, 25 bp, Homo sapien
cccatttacagtgaatacttggact

SEQ ID NO: 4376749 - DNA, 25 bp, Homo sapien
aatccaaaagcaagatcagttttac

SEQ ID NO: 4376750 - DNA, 25 bp, Homo sapien
caaagaaaactttttgcgtcacttg

SEQ ID NO: 4376751 - DNA, 25 bp, Homo sapien
tagtgcggacaaaattgtcagagaa

SEQ ID NO: 4376752 - DNA, 25 bp, Homo sapien
gcggacaaaattgtcagagaagtca

SEQ ID NO: 4376753 - DNA, 25 bp, Homo sapien
ccatctcatacctagtgcggacaaa

SEQ ID NO: 4376754 - DNA, 25 bp, Homo sapien
gttgaccatctcatacctagtgcgg

SEQ ID NO: 4376755 - DNA, 25 bp, Homo sapien
gaatacaaaacgtctttgaagtcta

SEQ ID NO: 4376756 - DNA, 25 bp, Homo sapien
tatgttcaaagaatacaaaacgtct

SEQ ID NO: 4376757 - DNA, 25 bp, Homo sapien
cactaaatatctcggttatgttcaa

SEQ ID NO: 4376758 - DNA, 25 bp, Homo sapien
ttattccagaaaggtcgcagccacc

SEQ ID NO: 4376759 - DNA, 25 bp, Homo sapien
caaatcttagggttgctcatgagga

SEQ ID NO: 4376760 - DNA, 25 bp, Homo sapien
gccctagatggttatgtgagtacac

SEQ ID NO: 4376761 - DNA, 25 bp, Homo sapien
tctttgacaatggtggccctagatg

SEQ ID NO: 4376762 - DNA, 25 bp, Homo sapien
tatcacttgtactgttcagagctgg

SEQ ID NO: 4376763 - DNA, 25 bp, Homo sapien
gacaaaaggtactgtgaggtgccac

SEQ ID NO: 4376764 - DNA, 25 bp, Homo sapien
tctagtaagttgagcctggaacccc

SEQ ID NO: 4376765 - DNA, 25 bp, Homo sapien
tctagaagtccatggtgcccaggta

SEQ ID NO: 4376766 - DNA, 25 bp, Homo sapien
ggacccttggaagtatatcctagac

SEQ ID NO: 4376767 - DNA, 25 bp, Homo sapien
ggtggtaaccatcttatcaataagg

SEQ ID NO: 4376768 - DNA, 25 bp, Homo sapien
tgtgacccaatagacacgagagctg

SEQ ID NO: 4376769 - DNA, 25 bp, Homo sapien
tcaaactaataaggctgtgacccaa

SEQ ID NO: 4376770 - DNA, 25 bp, Homo sapien
caccgctcccggctgtcttagtgaa

SEQ ID NO: 4376771 - DNA, 25 bp, Homo sapien
caaggacttccagccactatcggaa

SEQ ID NO: 4376772 - DNA, 25 bp, Homo sapien
taagatatgagaacaccacacgaag

SEQ ID NO: 4376773 - DNA, 25 bp, Homo sapien
cacacgaagacagatggctacatga

SEQ ID NO: 4376774 - DNA, 25 bp, Homo sapien
gaaggattctcctaacggtctcagt

SEQ ID NO: 4376775 - DNA, 25 bp, Homo sapien
taataggacagacaggaatgtgagc

SEQ ID NO: 4376776 - DNA, 25 bp, Homo sapien
ccatgaagcatgctaggaacaacag

SEQ ID NO: 4376777 - DNA, 25 bp, Homo sapien
taaaatgagcaagacctaacccgct

SEQ ID NO: 4376778 - DNA, 25 bp, Homo sapien
aatgggaacttattggtcagacacc

SEQ ID NO: 4376779 - DNA, 25 bp, Homo sapien
ttttctttacgatatagaagactgg

SEQ ID NO: 4376780 - DNA, 25 bp, Homo sapien
tagaagactggcacacttgttggaa

SEQ ID NO: 4376781 - DNA, 25 bp, Homo sapien
tctttacgatatagaagactggcac

SEQ ID NO: 4376782 - DNA, 25 bp, Homo sapien
tgataggttttctttacgatataga

SEQ ID NO: 4376783 - DNA, 25 bp, Homo sapien
aggatttgttgagcagtaattagtt

SEQ ID NO: 4376784 - DNA, 25 bp, Homo sapien
tatatccataccttctgcaggaagt

SEQ ID NO: 4376785 - DNA, 25 bp, Homo sapien
aagtatgataattaagctaaattca

SEQ ID NO: 4376786 - DNA, 25 bp, Homo sapien
tgcatctcagagagccattttagga

SEQ ID NO: 4376787 - DNA, 25 bp, Homo sapien
tagcattcaccaggacaagccgagt

SEQ ID NO: 4376788 - DNA, 25 bp, Homo sapien
agccgagtcagagggccaaattctt

SEQ ID NO: 4376789 - DNA, 25 bp, Homo sapien
cattggaattttgacagttgaacca

SEQ ID NO: 4376790 - DNA, 25 bp, Homo sapien
tcagaagagccttcatcattggaat

SEQ ID NO: 4376791 - DNA, 25 bp, Homo sapien
tctttctacccaggtacttatcatc

SEQ ID NO: 4376792 - DNA, 25 bp, Homo sapien
aatccaccagttttatagcactctg

SEQ ID NO: 4376793 - DNA, 25 bp, Homo sapien
gcctttgcatcttgaaaatccacca

SEQ ID NO: 4376794 - DNA, 25 bp, Homo sapien
ggagatactgttctttcacagtgaa

SEQ ID NO: 4376795 - DNA, 25 bp, Homo sapien
tggcagagaaaaatgacttcagtac

SEQ ID NO: 4376796 - DNA, 25 bp, Homo sapien
tgacttcagtacaaaaaattcttcc

SEQ ID NO: 4376797 - DNA, 25 bp, Homo sapien
ctgagatggcagagaaaaatgactt

SEQ ID NO: 4376798 - DNA, 25 bp, Homo sapien
atgacttcagtacaaaaaattcttc

SEQ ID NO: 4376799 - DNA, 25 bp, Homo sapien
cagtgcatgttctcttctgctagta

SEQ ID NO: 4376800 - DNA, 25 bp, Homo sapien
tcacaaggtcatttagttgcagaac

SEQ ID NO: 4376801 - DNA, 25 bp, Homo sapien
agaactgggacaggaattcatgccc

SEQ ID NO: 4376802 - DNA, 25 bp, Homo sapien
tgtgcatatgggagatccaaagatg

SEQ ID NO: 4376803 - DNA, 25 bp, Homo sapien
cttatctgctgctgtgcttttcctt

SEQ ID NO: 4376804 - DNA, 25 bp, Homo sapien
tttcctttggctcccagttgtacca

SEQ ID NO: 4376805 - DNA, 25 bp, Homo sapien
cagctgaggtttcctgttgttttaa

SEQ ID NO: 4376806 - DNA, 25 bp, Homo sapien
tgttttaaagtttgtcttatctgct

SEQ ID NO: 4376807 - DNA, 25 bp, Homo sapien
tgtccttatgagataaggaaacctc

SEQ ID NO: 4376808 - DNA, 25 bp, Homo sapien
aatataatgttgtccttatgagata

SEQ ID NO: 4376809 - DNA, 25 bp, Homo sapien
gagataaggaaacctcttgataaag

SEQ ID NO: 4376810 - DNA, 25 bp, Homo sapien
ccaaggggtgaaaatataatgttgt

SEQ ID NO: 4376811 - DNA, 25 bp, Homo sapien
gctgagcatcttgaggcttgacttc

SEQ ID NO: 4376812 - DNA, 25 bp, Homo sapien
tgagcatcttgaggcttgacttcca

SEQ ID NO: 4376813 - DNA, 25 bp, Homo sapien
ctgagcatcttgaggcttgacttcc

SEQ ID NO: 4376814 - DNA, 25 bp, Homo sapien
tattcattttcaaaatagagttttc

SEQ ID NO: 4376815 - DNA, 25 bp, Homo sapien
caaaatatattcattttcaaaatag

SEQ ID NO: 4376816 - DNA, 25 bp, Homo sapien
ctgtattgtttaaatcaaaatatat

SEQ ID NO: 4376817 - DNA, 25 bp, Homo sapien
aaatatattcattttcaaaatagag

SEQ ID NO: 4376818 - DNA, 25 bp, Homo sapien
gaatctcagtattagagtttccttc

SEQ ID NO: 4376819 - DNA, 25 bp, Homo sapien
tctgaccaaaatatgtgtttgtaga

SEQ ID NO: 4376820 - DNA, 25 bp, Homo sapien
tgtagatacgtagtcaaaatgttat

SEQ ID NO: 4376821 - DNA, 25 bp, Homo sapien
caactggaaatacattagatatagc

SEQ ID NO: 4376822 - DNA, 25 bp, Homo sapien
ctcatcaggttttggatcatatctt

SEQ ID NO: 4376823 - DNA, 25 bp, Homo sapien
tggatcatatcttatcagaaagcac

SEQ ID NO: 4376824 - DNA, 25 bp, Homo sapien
gtaatgctgaactaaacaacctgat

SEQ ID NO: 4376825 - DNA, 25 bp, Homo sapien
gaatagtcctataagaactggatct

SEQ ID NO: 4376826 - DNA, 25 bp, Homo sapien
attgaaatgccattccatactctac

SEQ ID NO: 4376827 - DNA, 25 bp, Homo sapien
tgccattccatactctactaaacat

SEQ ID NO: 4376828 - DNA, 25 bp, Homo sapien
tttgtggtgaaatcatttaaggaga

SEQ ID NO: 4376829 - DNA, 25 bp, Homo sapien
aaggagaataaaagcgatatgttaa

SEQ ID NO: 4376830 - DNA, 25 bp, Homo sapien
aactgacttctgattattcactgga

SEQ ID NO: 4376831 - DNA, 25 bp, Homo sapien
aagcagtactaaattatcccatgaa

SEQ ID NO: 4376832 - DNA, 25 bp, Homo sapien
tctgtaccttatgtaacagtgaagg

SEQ ID NO: 4376833 - DNA, 25 bp, Homo sapien
tctgcattttatatctgtaccttat

SEQ ID NO: 4376834 - DNA, 25 bp, Homo sapien
aagaatacagagaaattgacagatg

SEQ ID NO: 4376835 - DNA, 25 bp, Homo sapien
ttttcttggcataattgcttggctt

SEQ ID NO: 4376836 - DNA, 25 bp, Homo sapien
ttggcttttcgttcatgatgcagaa

SEQ ID NO: 4376837 - DNA, 25 bp, Homo sapien
attgcttggcttttcgttcatgatg

SEQ ID NO: 4376838 - DNA, 25 bp, Homo sapien
ttttttcttggcataattgcttggc

SEQ ID NO: 4376839 - DNA, 25 bp, Homo sapien
ttcatcttgcctcaattctgaatcc

SEQ ID NO: 4376840 - DNA, 25 bp, Homo sapien
tcctcttcatcttgcctcaattctg

SEQ ID NO: 4376841 - DNA, 25 bp, Homo sapien
tcttcatcttgcctcaattctgaat

SEQ ID NO: 4376842 - DNA, 25 bp, Homo sapien
tcctctccagcttttgcatattctc

SEQ ID NO: 4376843 - DNA, 25 bp, Homo sapien
atttggggacgctcttcctctggtt

SEQ ID NO: 4376844 - DNA, 25 bp, Homo sapien
tttggggacgctcttcctctggttc

SEQ ID NO: 4376845 - DNA, 25 bp, Homo sapien
gcctccagaatttggggacgctctt

SEQ ID NO: 4376846 - DNA, 25 bp, Homo sapien
ggcctccagaatttggggacgctct

SEQ ID NO: 4376847 - DNA, 25 bp, Homo sapien
gaaagcaggtttattcacttcaggc

SEQ ID NO: 4376848 - DNA, 25 bp, Homo sapien
ctagaaggaaagcaggtttattcac

SEQ ID NO: 4376849 - DNA, 25 bp, Homo sapien
caggtttattcacttcaggcagctc

SEQ ID NO: 4376850 - DNA, 25 bp, Homo sapien
tttattcacttcaggcagctcttcc

SEQ ID NO: 4376851 - DNA, 25 bp, Homo sapien
cttcacaacagcaggttttagagga

SEQ ID NO: 4376852 - DNA, 25 bp, Homo sapien
ggagaaaaagggtacaatatcatta

SEQ ID NO: 4376853 - DNA, 25 bp, Homo sapien
agggagaaaaagggtacaatatcat

SEQ ID NO: 4376854 - DNA, 25 bp, Homo sapien
tgtgtttctttcatgcaggtacttc

SEQ ID NO: 4376855 - DNA, 25 bp, Homo sapien
tgtttctttcatgcaggtacttctt

SEQ ID NO: 4376856 - DNA, 25 bp, Homo sapien
ttgtgtttctttcatgcaggtactt

SEQ ID NO: 4376857 - DNA, 25 bp, Homo sapien
acttcaccataataaggtttttgtg

SEQ ID NO: 4376858 - DNA, 25 bp, Homo sapien
gtctaaacaagattcctccttagaa

SEQ ID NO: 4376859 - DNA, 25 bp, Homo sapien
tattaagtagagaatgttctgttgg

SEQ ID NO: 4376860 - DNA, 25 bp, Homo sapien
cactttccactaaattagtatctct

SEQ ID NO: 4376861 - DNA, 25 bp, Homo sapien
gaatgttctgttgggtctaaacaag

SEQ ID NO: 4376862 - DNA, 25 bp, Homo sapien
gcagacaccagtcacacaaatactg

SEQ ID NO: 4376863 - DNA, 25 bp, Homo sapien
cagacaccagtcacacaaatactgc

SEQ ID NO: 4376864 - DNA, 25 bp, Homo sapien
tcctcatgaggttggaatgatctta

SEQ ID NO: 4376865 - DNA, 25 bp, Homo sapien
tctctaaggaacttattcggtcctc

SEQ ID NO: 4376866 - DNA, 25 bp, Homo sapien
aatcagtaactgaccacctggctca

SEQ ID NO: 4376867 - DNA, 25 bp, Homo sapien
tcttactggagttaagacagtactc

SEQ ID NO: 4376868 - DNA, 25 bp, Homo sapien
tccatcaagatctcctgtggtaagg

SEQ ID NO: 4376869 - DNA, 25 bp, Homo sapien
taatcgatccaactccactatgagc

SEQ ID NO: 4376870 - DNA, 25 bp, Homo sapien
tatgagccaaaaattcagccagaag

SEQ ID NO: 4376871 - DNA, 25 bp, Homo sapien
gatcctccacatgataccaggttag

SEQ ID NO: 4376872 - DNA, 25 bp, Homo sapien
ctgagaagtttttgaggttttgtat

SEQ ID NO: 4376873 - DNA, 25 bp, Homo sapien
tcaatctcaaagttgcggactcccg

SEQ ID NO: 4376874 - DNA, 25 bp, Homo sapien
agcatttttgccctcagtgtcaatc

SEQ ID NO: 4376875 - DNA, 25 bp, Homo sapien
gactcccgtggtagaatggtctgcc

SEQ ID NO: 4376876 - DNA, 25 bp, Homo sapien
aacctctggtaatcagggtgaagaa

SEQ ID NO: 4376877 - DNA, 25 bp, Homo sapien
acctctggtaatcagggtgaagaac

SEQ ID NO: 4376878 - DNA, 25 bp, Homo sapien
agaacaatttctccatcataactcc

SEQ ID NO: 4376879 - DNA, 25 bp, Homo sapien
tggaggtaaaaacgcagcacacaag

SEQ ID NO: 4376880 - DNA, 25 bp, Homo sapien
ggtaaaaacgcagcacacaagatgt

SEQ ID NO: 4376881 - DNA, 25 bp, Homo sapien
aaacgcagcacacaagatgtcatca

SEQ ID NO: 4376882 - DNA, 25 bp, Homo sapien
ttgtggaggtaaaaacgcagcacac

SEQ ID NO: 4376883 - DNA, 25 bp, Homo sapien
ttagcactccttgtggcattttcaa

SEQ ID NO: 4376884 - DNA, 25 bp, Homo sapien
tttagcactccttgtggcattttca

SEQ ID NO: 4376885 - DNA, 25 bp, Homo sapien
tagcactccttgtggcattttcaag

SEQ ID NO: 4376886 - DNA, 25 bp, Homo sapien
atttagcactccttgtggcattttc

SEQ ID NO: 4376887 - DNA, 25 bp, Homo sapien
tctcttggagtctacagcatcttga

SEQ ID NO: 4376888 - DNA, 25 bp, Homo sapien
atacttggaaaatgccaccccaaag

SEQ ID NO: 4376889 - DNA, 25 bp, Homo sapien
ctacaatttgtggaacatacttgga

SEQ ID NO: 4376890 - DNA, 25 bp, Homo sapien
tgaagaactacaatttgtggaacat

SEQ ID NO: 4376891 - DNA, 25 bp, Homo sapien
tgagcatttgcaaccaaagttatgg

SEQ ID NO: 4376892 - DNA, 25 bp, Homo sapien
gccatcagcctatactaagcctctt

SEQ ID NO: 4376893 - DNA, 25 bp, Homo sapien
cagtattagagaggtcagtatcttc

SEQ ID NO: 4376894 - DNA, 25 bp, Homo sapien
tcacttgatgatccgagctctggcc

SEQ ID NO: 4376895 - DNA, 25 bp, Homo sapien
agttttccatgaggcataatcatac

SEQ ID NO: 4376896 - DNA, 25 bp, Homo sapien
tttgtgaaatatccacagctccatc

SEQ ID NO: 4376897 - DNA, 25 bp, Homo sapien
tcttcttaagaatgaggatttgtga

SEQ ID NO: 4376898 - DNA, 25 bp, Homo sapien
gacaatatccattgaagtcccatat

SEQ ID NO: 4376899 - DNA, 25 bp, Homo sapien
catttagtgtatggtgacaatatcc

SEQ ID NO: 4376900 - DNA, 25 bp, Homo sapien
cagtcaaaagccgagtctcatttgc

SEQ ID NO: 4376901 - DNA, 25 bp, Homo sapien
gctgatttctgcgttgccgtggcaa

SEQ ID NO: 4376902 - DNA, 25 bp, Homo sapien
caagggccatagtgctgatttctgc

SEQ ID NO: 4376903 - DNA, 25 bp, Homo sapien
cagtagaccctgtatcagagctgat

SEQ ID NO: 4376904 - DNA, 25 bp, Homo sapien
cataagggtcttcattcgtgtcgtc

SEQ ID NO: 4376905 - DNA, 25 bp, Homo sapien
caattatcataagggtcttcattcg

SEQ ID NO: 4376906 - DNA, 25 bp, Homo sapien
tcgtgtcgtcttcacattgagaagg

SEQ ID NO: 4376907 - DNA, 25 bp, Homo sapien
agggtcttcattcgtgtcgtcttca

SEQ ID NO: 4376908 - DNA, 25 bp, Homo sapien
aagtaagtgtgggttgagatggctc

SEQ ID NO: 4376909 - DNA, 25 bp, Homo sapien
tgccactaaatgtttacaagacgaa

SEQ ID NO: 4376910 - DNA, 25 bp, Homo sapien
ttgagatggctctggagacttcagg

SEQ ID NO: 4376911 - DNA, 25 bp, Homo sapien
aactgcaatggcgaagaagagaagg

SEQ ID NO: 4376912 - DNA, 25 bp, Homo sapien
attggctgtaagctggagacttgct

SEQ ID NO: 4376913 - DNA, 25 bp, Homo sapien
caggcctgacgggatcactgcagca

SEQ ID NO: 4376914 - DNA, 25 bp, Homo sapien
taccatcaggcctgacgggatcact

SEQ ID NO: 4376915 - DNA, 25 bp, Homo sapien
gtgctgttaccatcaggcctgacgg

SEQ ID NO: 4376916 - DNA, 25 bp, Homo sapien
ttgctcccttcatgatacccacagg

SEQ ID NO: 4376917 - DNA, 25 bp, Homo sapien
gatgttgcttgctcccttcatgata

SEQ ID NO: 4376918 - DNA, 25 bp, Homo sapien
ctgatgttgcttgctcccttcatga

SEQ ID NO: 4376919 - DNA, 25 bp, Homo sapien
ttgcttgctcccttcatgataccca

SEQ ID NO: 4376920 - DNA, 25 bp, Homo sapien
tctgcgcagtaactctgctccaggg

SEQ ID NO: 4376921 - DNA, 25 bp, Homo sapien
ctgtggtctgcgcagtaactctgct

SEQ ID NO: 4376922 - DNA, 25 bp, Homo sapien
tcattgagatgcaggtagtggtccc

SEQ ID NO: 4376923 - DNA, 25 bp, Homo sapien
ggcttcactgcctgggccgccctgt

SEQ ID NO: 4376924 - DNA, 25 bp, Homo sapien
ctaagccaaggctgcggagcgtcat

SEQ ID NO: 4376925 - DNA, 25 bp, Homo sapien
cattgccaacaatgctagctggtta

SEQ ID NO: 4376926 - DNA, 25 bp, Homo sapien
aaagaacaagctatcctctggatgg

SEQ ID NO: 4376927 - DNA, 25 bp, Homo sapien
tcatggcttttcaccctcttgctgg

SEQ ID NO: 4376928 - DNA, 25 bp, Homo sapien
cgagatgaaaagtcgtccatgggct

SEQ ID NO: 4376929 - DNA, 25 bp, Homo sapien
cacagtgctataattggttctcaat

SEQ ID NO: 4376930 - DNA, 25 bp, Homo sapien
tcctccacagtgctataattggttc

SEQ ID NO: 4376931 - DNA, 25 bp, Homo sapien
tccacagtgctataattggttctca

SEQ ID NO: 4376932 - DNA, 25 bp, Homo sapien
tataattggttctcaattctgccat

SEQ ID NO: 4376933 - DNA, 25 bp, Homo sapien
tctccaggatgtgttattgtgcctt

SEQ ID NO: 4376934 - DNA, 25 bp, Homo sapien
cagccatgagcaactatgagccaat

SEQ ID NO: 4376935 - DNA, 25 bp, Homo sapien
cactgtcttggcttattggtagcta

SEQ ID NO: 4376936 - DNA, 25 bp, Homo sapien
ggtagctatctgatatggttggctc

SEQ ID NO: 4376937 - DNA, 25 bp, Homo sapien
ggctattacactggctgagtggccc

SEQ ID NO: 4376938 - DNA, 25 bp, Homo sapien
tttagagacaacatagggattccaa

SEQ ID NO: 4376939 - DNA, 25 bp, Homo sapien
aaggacacccactggtttagagaca

SEQ ID NO: 4376940 - DNA, 25 bp, Homo sapien
ccacaaagaattggacggctattac

SEQ ID NO: 4376941 - DNA, 25 bp, Homo sapien
gttgaaggatgtcatattaagacgc

SEQ ID NO: 4376942 - DNA, 25 bp, Homo sapien
caaaagcatgaatgccctgggcaat

SEQ ID NO: 4376943 - DNA, 25 bp, Homo sapien
caattaaattgagccgagagtgata

SEQ ID NO: 4376944 - DNA, 25 bp, Homo sapien
cgcttttttgatttctctctccaag

SEQ ID NO: 4376945 - DNA, 25 bp, Homo sapien
tgctggttgtactggaaatgatagc

SEQ ID NO: 4376946 - DNA, 25 bp, Homo sapien
atgatagcgtctaaagatgcattgt

SEQ ID NO: 4376947 - DNA, 25 bp, Homo sapien
gtactggaaatgatagcgtctaaag

SEQ ID NO: 4376948 - DNA, 25 bp, Homo sapien
caccacactatttgtattgctggtt

SEQ ID NO: 4376949 - DNA, 25 bp, Homo sapien
agagacatttgttgaacgttgacaa

SEQ ID NO: 4376950 - DNA, 25 bp, Homo sapien
caatagatgagaggccatgacaaat

SEQ ID NO: 4376951 - DNA, 25 bp, Homo sapien
tttgttgaacgttgacaaaaagcat

SEQ ID NO: 4376952 - DNA, 25 bp, Homo sapien
gacatttgttgaacgttgacaaaaa

SEQ ID NO: 4376953 - DNA, 25 bp, Homo sapien
ctaatatatggcaacatttgtgaca

SEQ ID NO: 4376954 - DNA, 25 bp, Homo sapien
caaggctgcggtgaaagcaattgct

SEQ ID NO: 4376955 - DNA, 25 bp, Homo sapien
cactagcaggccgttcaaacaggga

SEQ ID NO: 4376956 - DNA, 25 bp, Homo sapien
gcagctctgcccagttaatggtcat

SEQ ID NO: 4376957 - DNA, 25 bp, Homo sapien
tcttctttggacagcagatcataga

SEQ ID NO: 4376958 - DNA, 25 bp, Homo sapien
gaggatcataccaataatccatgca

SEQ ID NO: 4376959 - DNA, 25 bp, Homo sapien
gaattgattcattggcatcaagagg

SEQ ID NO: 4376960 - DNA, 25 bp, Homo sapien
caggccttggagtttgtattggcaa

SEQ ID NO: 4376961 - DNA, 25 bp, Homo sapien
tgcctttgctcgttcatcttgctca

SEQ ID NO: 4376962 - DNA, 25 bp, Homo sapien
tcacccacaggtgtttgagcttggt

SEQ ID NO: 4376963 - DNA, 25 bp, Homo sapien
tgaagtcagcttgtcccaattaatg

SEQ ID NO: 4376964 - DNA, 25 bp, Homo sapien
gctcataaagctctagcagtataaa

SEQ ID NO: 4376965 - DNA, 25 bp, Homo sapien
ggacatacaaatgattttccttggc

SEQ ID NO: 4376966 - DNA, 25 bp, Homo sapien
taatgtctgggttttatgcctgggt

SEQ ID NO: 4376967 - DNA, 25 bp, Homo sapien
gcctgggtttgacacataacatttg

SEQ ID NO: 4376968 - DNA, 25 bp, Homo sapien
aagccagtcatgacctctctcaggg

SEQ ID NO: 4376969 - DNA, 25 bp, Homo sapien
ctctcagggtttgcatgaagtacca

SEQ ID NO: 4376970 - DNA, 25 bp, Homo sapien
tatagcctttaagcatgctgaaaca

SEQ ID NO: 4376971 - DNA, 25 bp, Homo sapien
tcttgtatggactagataactttcc

SEQ ID NO: 4376972 - DNA, 25 bp, Homo sapien
gaacaagacaacaagatcaatgctc

SEQ ID NO: 4376973 - DNA, 25 bp, Homo sapien
cttcagtgtagagactaggtgtgct

SEQ ID NO: 4376974 - DNA, 25 bp, Homo sapien
caatgcgtgagaaatggtatgacct

SEQ ID NO: 4376975 - DNA, 25 bp, Homo sapien
tccttgagttttggtgatgacgcca

SEQ ID NO: 4376976 - DNA, 25 bp, Homo sapien
ggctaagctgatgcactacacatga

SEQ ID NO: 4376977 - DNA, 25 bp, Homo sapien
tagcagtgcccttagttcacaagtc

SEQ ID NO: 4376978 - DNA, 25 bp, Homo sapien
gaagacgcatagcagcaagtgtcac

SEQ ID NO: 4376979 - DNA, 25 bp, Homo sapien
gcagcaagtgtcacttgaagtttaa

SEQ ID NO: 4376980 - DNA, 25 bp, Homo sapien
gaatgaagacgcatagcagcaagtg

SEQ ID NO: 4376981 - DNA, 25 bp, Homo sapien
ctaataggaatgaagacgcatagca

SEQ ID NO: 4376982 - DNA, 25 bp, Homo sapien
tttacaaagtcacccacgctgagtt

SEQ ID NO: 4376983 - DNA, 25 bp, Homo sapien
tacaaagtcacccacgctgagttgg

SEQ ID NO: 4376984 - DNA, 25 bp, Homo sapien
caaagtcacccacgctgagttggtt

SEQ ID NO: 4376985 - DNA, 25 bp, Homo sapien
agtcacccacgctgagttggttttc

SEQ ID NO: 4376986 - DNA, 25 bp, Homo sapien
tttggcccaagctgtgaccctatgt

SEQ ID NO: 4376987 - DNA, 25 bp, Homo sapien
cagttgccttcaactatttctataa

SEQ ID NO: 4376988 - DNA, 25 bp, Homo sapien
taactcaagtacagctttctggcaa

SEQ ID NO: 4376989 - DNA, 25 bp, Homo sapien
tctggcaactcataatggcttcacc

SEQ ID NO: 4376990 - DNA, 25 bp, Homo sapien
tgtctggaagagttagatgacaaag

SEQ ID NO: 4376991 - DNA, 25 bp, Homo sapien
tggaagagttagatgacaaagctgc

SEQ ID NO: 4376992 - DNA, 25 bp, Homo sapien
cttgcttccattaacatgttgtagt

SEQ ID NO: 4376993 - DNA, 25 bp, Homo sapien
gcagagtttccctaccaatgaagta

SEQ ID NO: 4376994 - DNA, 25 bp, Homo sapien
gggaataggcggcattgaatcagaa

SEQ ID NO: 4376995 - DNA, 25 bp, Homo sapien
gtcctgggaataggcggcattgaat

SEQ ID NO: 4376996 - DNA, 25 bp, Homo sapien
tcaagcaagggtcctgggaataggc

SEQ ID NO: 4376997 - DNA, 25 bp, Homo sapien
gggtcctgggaataggcggcattga

SEQ ID NO: 4376998 - DNA, 25 bp, Homo sapien
gaagtaagcctagatcatggagcca

SEQ ID NO: 4376999 - DNA, 25 bp, Homo sapien
tcctaaaccagacgtggaagatcag

SEQ ID NO: 4377000 - DNA, 25 bp, Homo sapien
acaagtctgactggagaagtaagcc

SEQ ID NO: 4377001 - DNA, 25 bp, Homo sapien
gatacagtctgtgctaaggcctgga

SEQ ID NO: 4377002 - DNA, 25 bp, Homo sapien
ggatatctatccagcactgggatta

SEQ ID NO: 4377003 - DNA, 25 bp, Homo sapien
tccatagcttagtaaactgtgctgt

SEQ ID NO: 4377004 - DNA, 25 bp, Homo sapien
aaaatcttagcttagttaacagtgc

SEQ ID NO: 4377005 - DNA, 25 bp, Homo sapien
tatgttcactagttcaatcgatttg

SEQ ID NO: 4377006 - DNA, 25 bp, Homo sapien
caagcgaagaaggaggggaagaagg

SEQ ID NO: 4377007 - DNA, 25 bp, Homo sapien
ggccagaacaagtccatgatcagta

SEQ ID NO: 4377008 - DNA, 25 bp, Homo sapien
tccagcagaggcgaaaaacaagtca

SEQ ID NO: 4377009 - DNA, 25 bp, Homo sapien
tatcagtcaacatctggcagtcagt

SEQ ID NO: 4377010 - DNA, 25 bp, Homo sapien
tatgcccaggcatccatgactagtg

SEQ ID NO: 4377011 - DNA, 25 bp, Homo sapien
tatattttgaacacacaaggaggca

SEQ ID NO: 4377012 - DNA, 25 bp, Homo sapien
gattctgtttggaactggaaggccg

SEQ ID NO: 4377013 - DNA, 25 bp, Homo sapien
tatggcacagcccagtttgattctg

SEQ ID NO: 4377014 - DNA, 25 bp, Homo sapien
ccagctcaatgggatgtccaatcaa

SEQ ID NO: 4377015 - DNA, 25 bp, Homo sapien
gatcagttctctccacctcattctt

SEQ ID NO: 4377016 - DNA, 25 bp, Homo sapien
atcagttctctccacctcattctta

SEQ ID NO: 4377017 - DNA, 25 bp, Homo sapien
catttgatcagttctctccacctca

SEQ ID NO: 4377018 - DNA, 25 bp, Homo sapien
tttgatcagttctctccacctcatt

SEQ ID NO: 4377019 - DNA, 25 bp, Homo sapien
aattacctggtttagaatctggagc

SEQ ID NO: 4377020 - DNA, 25 bp, Homo sapien
tctccaaggccagaagtcagcattt

SEQ ID NO: 4377021 - DNA, 25 bp, Homo sapien
cacatagtaataggccagatctctc

SEQ ID NO: 4377022 - DNA, 25 bp, Homo sapien
taggtgaggcggcttccttcagaag

SEQ ID NO: 4377023 - DNA, 25 bp, Homo sapien
gaccttagtaacacacgcttgaaaa

SEQ ID NO: 4377024 - DNA, 25 bp, Homo sapien
tttcagctttttaggcaatgtgccc

SEQ ID NO: 4377025 - DNA, 25 bp, Homo sapien
taggtgaaatagaccagtattcagc

SEQ ID NO: 4377026 - DNA, 25 bp, Homo sapien
tgtgcccagatgaagagacgtcttc

SEQ ID NO: 4377027 - DNA, 25 bp, Homo sapien
tcagaaagataattgtggcccaagg

SEQ ID NO: 4377028 - DNA, 25 bp, Homo sapien
gaatatcccactttagccaacatga

SEQ ID NO: 4377029 - DNA, 25 bp, Homo sapien
ggtaacctgcaagttaacagcaaac

SEQ ID NO: 4377030 - DNA, 25 bp, Homo sapien
gacagtaatggagcttatttcctac

SEQ ID NO: 4377031 - DNA, 25 bp, Homo sapien
gagtacagggtacagacgacttaga

SEQ ID NO: 4377032 - DNA, 25 bp, Homo sapien
tactgctcccctgatgctgtaagcc

SEQ ID NO: 4377033 - DNA, 25 bp, Homo sapien
gaagccaatgaaaactgtaccagca

SEQ ID NO: 4377034 - DNA, 25 bp, Homo sapien
tgagtacttgatagtttacaacact

SEQ ID NO: 4377035 - DNA, 25 bp, Homo sapien
gcaaactaagatggctggtctccct

SEQ ID NO: 4377036 - DNA, 25 bp, Homo sapien
ggaaaacagtctcacgcattgctgg

SEQ ID NO: 4377037 - DNA, 25 bp, Homo sapien
gaagtagtccaaaggtccatcaaca

SEQ ID NO: 4377038 - DNA, 25 bp, Homo sapien
aacaataccggtgatcgcagtgcaa

SEQ ID NO: 4377039 - DNA, 25 bp, Homo sapien
gacagctcaataacaagttctcaac

SEQ ID NO: 4377040 - DNA, 25 bp, Homo sapien
tcattttcctgtggaccagggagag

SEQ ID NO: 4377041 - DNA, 25 bp, Homo sapien
tgaggccctagcagttaccagctgt

SEQ ID NO: 4377042 - DNA, 25 bp, Homo sapien
tctcaacctgttttgcctgattagg

SEQ ID NO: 4377043 - DNA, 25 bp, Homo sapien
tatgagggcccagtatacgaaaggc

SEQ ID NO: 4377044 - DNA, 25 bp, Homo sapien
aaaattgtgcaaagcttatgagggc

SEQ ID NO: 4377045 - DNA, 25 bp, Homo sapien
tgctgataagctcccattagaagtt

SEQ ID NO: 4377046 - DNA, 25 bp, Homo sapien
tgaaaccacttaacatgaacacttg

SEQ ID NO: 4377047 - DNA, 25 bp, Homo sapien
gcagcatatcgctttcaagttaaaa

SEQ ID NO: 4377048 - DNA, 25 bp, Homo sapien
cattaaggcgtaaattcttttggct

SEQ ID NO: 4377049 - DNA, 25 bp, Homo sapien
gtgatgcaaaatcttcagtgtgaga

SEQ ID NO: 4377050 - DNA, 25 bp, Homo sapien
cctggattagatcccttcaggaggg

SEQ ID NO: 4377051 - DNA, 25 bp, Homo sapien
cactgagaagtacatctcttaacat

SEQ ID NO: 4377052 - DNA, 25 bp, Homo sapien
actgagaagtacatctcttaacata

SEQ ID NO: 4377053 - DNA, 25 bp, Homo sapien
ccactgagaagtacatctcttaaca

SEQ ID NO: 4377054 - DNA, 25 bp, Homo sapien
tagtcggttggcacttacgaacaca

SEQ ID NO: 4377055 - DNA, 25 bp, Homo sapien
tggcacttacgaacacatttattgc

SEQ ID NO: 4377056 - DNA, 25 bp, Homo sapien
taagttggtttgatgaattagtcgg

SEQ ID NO: 4377057 - DNA, 25 bp, Homo sapien
tgaaggtctgaagtattaagttggt

SEQ ID NO: 4377058 - DNA, 25 bp, Homo sapien
ttaacagtagcaatggaatcaattt

SEQ ID NO: 4377059 - DNA, 25 bp, Homo sapien
tattaacagtagcaatggaatcaat

SEQ ID NO: 4377060 - DNA, 25 bp, Homo sapien
ctattaacagtagcaatggaatcaa

SEQ ID NO: 4377061 - DNA, 25 bp, Homo sapien
taacagtagcaatggaatcaatttt

SEQ ID NO: 4377062 - DNA, 25 bp, Homo sapien
tcagagtatcactgaaacttttgga

SEQ ID NO: 4377063 - DNA, 25 bp, Homo sapien
taaaatacgttttcagagtatcact

SEQ ID NO: 4377064 - DNA, 25 bp, Homo sapien
ttcagagtatcactgaaacttttgg

SEQ ID NO: 4377065 - DNA, 25 bp, Homo sapien
tacgttttcagagtatcactgaaac

SEQ ID NO: 4377066 - DNA, 25 bp, Homo sapien
tcaagaagttcttttattgcactag

SEQ ID NO: 4377067 - DNA, 25 bp, Homo sapien
tcactgtatcaagaagttcttttat

SEQ ID NO: 4377068 - DNA, 25 bp, Homo sapien
tatcaagaagttcttttattgcact

SEQ ID NO: 4377069 - DNA, 25 bp, Homo sapien
ctgtatcaagaagttcttttattgc

SEQ ID NO: 4377070 - DNA, 25 bp, Homo sapien
ttgggaaaagaataaagaatatcag

SEQ ID NO: 4377071 - DNA, 25 bp, Homo sapien
tgttgggaaaagaataaagaatatc

SEQ ID NO: 4377072 - DNA, 25 bp, Homo sapien
gttgggaaaagaataaagaatatca

SEQ ID NO: 4377073 - DNA, 25 bp, Homo sapien
ctgttgggaaaagaataaagaatat

SEQ ID NO: 4377074 - DNA, 25 bp, Homo sapien
catagtgatcagacagaagtttata

SEQ ID NO: 4377075 - DNA, 25 bp, Homo sapien
tctacaagtcaaaagagtgggtctg

SEQ ID NO: 4377076 - DNA, 25 bp, Homo sapien
gggctagtcatcaaaatgagcgtat

SEQ ID NO: 4377077 - DNA, 25 bp, Homo sapien
tacaataacagtggctagattctac

SEQ ID NO: 4377078 - DNA, 25 bp, Homo sapien
caaaagactgttaaatgcctaccaa

SEQ ID NO: 4377079 - DNA, 25 bp, Homo sapien
ccaaggtgtgcacatagagaagcta

SEQ ID NO: 4377080 - DNA, 25 bp, Homo sapien
cctaagcctctgtttggacacgagg

SEQ ID NO: 4377081 - DNA, 25 bp, Homo sapien
gggaggcgcaactcctcaggtgact

SEQ ID NO: 4377082 - DNA, 25 bp, Homo sapien
tttagctgacaaccacatcaatctc

SEQ ID NO: 4377083 - DNA, 25 bp, Homo sapien
aatttccactactgaaagagcaggt

SEQ ID NO: 4377084 - DNA, 25 bp, Homo sapien
cactactgaaagagcaggtttagct

SEQ ID NO: 4377085 - DNA, 25 bp, Homo sapien
gtttagctgacaaccacatcaatct

SEQ ID NO: 4377086 - DNA, 25 bp, Homo sapien
catctgggatcttactgagaatttg

SEQ ID NO: 4377087 - DNA, 25 bp, Homo sapien
aattctggctctggtcgttcaatca

SEQ ID NO: 4377088 - DNA, 25 bp, Homo sapien
ctgtcattgatctcatctgggatct

SEQ ID NO: 4377089 - DNA, 25 bp, Homo sapien
tgctcgtgccttttcgtttaggtct

SEQ ID NO: 4377090 - DNA, 25 bp, Homo sapien
cataatgatgtcttgtgtgagacct

SEQ ID NO: 4377091 - DNA, 25 bp, Homo sapien
catcagctgccatacgaagaaggga

SEQ ID NO: 4377092 - DNA, 25 bp, Homo sapien
tcttgtgtgagacctggattttctt

SEQ ID NO: 4377093 - DNA, 25 bp, Homo sapien
ccatacgaagaagggactccgtgaa

SEQ ID NO: 4377094 - DNA, 25 bp, Homo sapien
gtttcctgtaggatgcctgccaatt

SEQ ID NO: 4377095 - DNA, 25 bp, Homo sapien
gtaaattctgtaatcacacttgatg

SEQ ID NO: 4377096 - DNA, 25 bp, Homo sapien
cctgccaattttaatcattatgctg

SEQ ID NO: 4377097 - DNA, 25 bp, Homo sapien
tcccagtaaattctgtaatcacact

SEQ ID NO: 4377098 - DNA, 25 bp, Homo sapien
tggaatatagtaaaacaggcataag

SEQ ID NO: 4377099 - DNA, 25 bp, Homo sapien
gctaaggagagaacactctgaaaaa

SEQ ID NO: 4377100 - DNA, 25 bp, Homo sapien
acagctaaggagagaacactctgaa

SEQ ID NO: 4377101 - DNA, 25 bp, Homo sapien
gatgaatgctaacgaaataacattt

SEQ ID NO: 4377102 - DNA, 25 bp, Homo sapien
tgggctgcagacagatttactcgtt

SEQ ID NO: 4377103 - DNA, 25 bp, Homo sapien
ggctgcagacagatttactcgttct

SEQ ID NO: 4377104 - DNA, 25 bp, Homo sapien
aagcggctctcagtgtctgggctgc

SEQ ID NO: 4377105 - DNA, 25 bp, Homo sapien
ctgcagacagatttactcgttctag

SEQ ID NO: 4377106 - DNA, 25 bp, Homo sapien
catagaaaccatggatgtggtctca

SEQ ID NO: 4377107 - DNA, 25 bp, Homo sapien
tgcatagaggggcatagaaaccatg

SEQ ID NO: 4377108 - DNA, 25 bp, Homo sapien
acaggatacatgactgcatagaggg

SEQ ID NO: 4377109 - DNA, 25 bp, Homo sapien
cattaaacacaggatacatgactgc

SEQ ID NO: 4377110 - DNA, 25 bp, Homo sapien
aagccaactacagttgaaaaagcag

SEQ ID NO: 4377111 - DNA, 25 bp, Homo sapien
agccaactacagttgaaaaagcagt

SEQ ID NO: 4377112 - DNA, 25 bp, Homo sapien
gccaactacagttgaaaaagcagtg

SEQ ID NO: 4377113 - DNA, 25 bp, Homo sapien
aaagccaactacagttgaaaaagca

SEQ ID NO: 4377114 - DNA, 25 bp, Homo sapien
tttttagggctttctcatgccaaaa

SEQ ID NO: 4377115 - DNA, 25 bp, Homo sapien
gggctttctcatgccaaaatgctgt

SEQ ID NO: 4377116 - DNA, 25 bp, Homo sapien
aaatgctgttagtcacttccaaaca

SEQ ID NO: 4377117 - DNA, 25 bp, Homo sapien
caagagaccaagatttagaggagaa

SEQ ID NO: 4377118 - DNA, 25 bp, Homo sapien
ccaaaaatgtaagggtgagcttgaa

SEQ ID NO: 4377119 - DNA, 25 bp, Homo sapien
tgacaaaattgaaattaccatcttc

SEQ ID NO: 4377120 - DNA, 25 bp, Homo sapien
tcaactgtataagaatgaaactgaa

SEQ ID NO: 4377121 - DNA, 25 bp, Homo sapien
ggcaacctggattctatcaactgta

SEQ ID NO: 4377122 - DNA, 25 bp, Homo sapien
gggctgttgaccttactctatgcca

SEQ ID NO: 4377123 - DNA, 25 bp, Homo sapien
atgactgcagaacttgtttccaaga

SEQ ID NO: 4377124 - DNA, 25 bp, Homo sapien
tcagggctgttgaccttactctatg

SEQ ID NO: 4377125 - DNA, 25 bp, Homo sapien
ctctatgccataccgtggtactaca

SEQ ID NO: 4377126 - DNA, 25 bp, Homo sapien
tttagggcaaaacgagacaacatta

SEQ ID NO: 4377127 - DNA, 25 bp, Homo sapien
catggttccagtaccaacgttctgg

SEQ ID NO: 4377128 - DNA, 25 bp, Homo sapien
tatcgcttgcaaaaagcaggacagt

SEQ ID NO: 4377129 - DNA, 25 bp, Homo sapien
gacaacattagggaagaagagtcca

SEQ ID NO: 4377130 - DNA, 25 bp, Homo sapien
tatgacacctaagagggtcaagtct

SEQ ID NO: 4377131 - DNA, 25 bp, Homo sapien
cttaggtatgacacctaagagggtc

SEQ ID NO: 4377132 - DNA, 25 bp, Homo sapien
taggtatgacacctaagagggtcaa

SEQ ID NO: 4377133 - DNA, 25 bp, Homo sapien
tgacacctaagagggtcaagtcttt

SEQ ID NO: 4377134 - DNA, 25 bp, Homo sapien
tagagggccacatcattaaactgga

SEQ ID NO: 4377135 - DNA, 25 bp, Homo sapien
tgaatccgtagaccccaacatttgt

SEQ ID NO: 4377136 - DNA, 25 bp, Homo sapien
actggaactgaatccgtagacccca

SEQ ID NO: 4377137 - DNA, 25 bp, Homo sapien
attatctccttagagggccacatca

SEQ ID NO: 4377138 - DNA, 25 bp, Homo sapien
agcctcacctctcggtccgaagcca

SEQ ID NO: 4377139 - DNA, 25 bp, Homo sapien
tctcggtccgaagccacaccttcaa

SEQ ID NO: 4377140 - DNA, 25 bp, Homo sapien
ggtccgaagccacaccttcaaagga

SEQ ID NO: 4377141 - DNA, 25 bp, Homo sapien
acctctcggtccgaagccacacctt

SEQ ID NO: 4377142 - DNA, 25 bp, Homo sapien
aaccaagcccaagtgcctcagccat

SEQ ID NO: 4377143 - DNA, 25 bp, Homo sapien
cctagacctcttctgctcggtgcag

SEQ ID NO: 4377144 - DNA, 25 bp, Homo sapien
agccatggcccctgcgtgaccctag

SEQ ID NO: 4377145 - DNA, 25 bp, Homo sapien
gggactgggacagaacagctacacc

SEQ ID NO: 4377146 - DNA, 25 bp, Homo sapien
aggacccaagaggaaccaggcgttg

SEQ ID NO: 4377147 - DNA, 25 bp, Homo sapien
ttcactccggcgacgccggaaggac

SEQ ID NO: 4377148 - DNA, 25 bp, Homo sapien
ttgcagccctcttcaactcccggat

SEQ ID NO: 4377149 - DNA, 25 bp, Homo sapien
tcaactcccggatcaattcactccg

SEQ ID NO: 4377150 - DNA, 25 bp, Homo sapien
tctagccaatagtaggagaattccc

SEQ ID NO: 4377151 - DNA, 25 bp, Homo sapien
cgatgggtggtgacacttctagcca

SEQ ID NO: 4377152 - DNA, 25 bp, Homo sapien
tcctgcaatcggaagactacacttc

SEQ ID NO: 4377153 - DNA, 25 bp, Homo sapien
tcgtagtcccgctcgccggcgttgt

SEQ ID NO: 4377154 - DNA, 25 bp, Homo sapien
gccaatcagggtgcggagtaggccc

SEQ ID NO: 4377155 - DNA, 25 bp, Homo sapien
gaaatcgcccaggtgaagggagggc

SEQ ID NO: 4377156 - DNA, 25 bp, Homo sapien
accgggcatccggacacacaggtcg

SEQ ID NO: 4377157 - DNA, 25 bp, Homo sapien
gaagtgcagggagcggaaaggtacc

SEQ ID NO: 4377158 - DNA, 25 bp, Homo sapien
cagatatctttgatagctccttcct

SEQ ID NO: 4377159 - DNA, 25 bp, Homo sapien
caaccctgagtaggtgcttgcttct

SEQ ID NO: 4377160 - DNA, 25 bp, Homo sapien
taactgaccacctagttggcctcct

SEQ ID NO: 4377161 - DNA, 25 bp, Homo sapien
tcttggatccctgctagcacttttt

SEQ ID NO: 4377162 - DNA, 25 bp, Homo sapien
caaaagcctttcgaattccaaatgg

SEQ ID NO: 4377163 - DNA, 25 bp, Homo sapien
gcaagaattaaggatagtttattca

SEQ ID NO: 4377164 - DNA, 25 bp, Homo sapien
tctaccactggtaaccaagaagaga

SEQ ID NO: 4377165 - DNA, 25 bp, Homo sapien
cactggtaaccaagaagagaaatgc

SEQ ID NO: 4377166 - DNA, 25 bp, Homo sapien
gagaaatgcaagaattaaggatagt

SEQ ID NO: 4377167 - DNA, 25 bp, Homo sapien
cctctcccacaaacataatgggagc

SEQ ID NO: 4377168 - DNA, 25 bp, Homo sapien
acagccacatggtccaaatttcttg

SEQ ID NO: 4377169 - DNA, 25 bp, Homo sapien
aaacataatgggagctctttccagg

SEQ ID NO: 4377170 - DNA, 25 bp, Homo sapien
tgtggttttgacatcccattttccc

SEQ ID NO: 4377171 - DNA, 25 bp, Homo sapien
tccaatgaaataccgcaagatttat

SEQ ID NO: 4377172 - DNA, 25 bp, Homo sapien
tataaaatctgctacagcgtaagca

SEQ ID NO: 4377173 - DNA, 25 bp, Homo sapien
ttaaataagattgccagatccttcc

SEQ ID NO: 4377174 - DNA, 25 bp, Homo sapien
caagaaaaggtaagattgctgtacc

SEQ ID NO: 4377175 - DNA, 25 bp, Homo sapien
gcaatgctgtttacccacagtacaa

SEQ ID NO: 4377176 - DNA, 25 bp, Homo sapien
tggtttctaatagaccagggtggtg

SEQ ID NO: 4377177 - DNA, 25 bp, Homo sapien
tgtcatttcaacgttgttcgcagca

SEQ ID NO: 4377178 - DNA, 25 bp, Homo sapien
gaagtttgctgcatccatgtactct

SEQ ID NO: 4377179 - DNA, 25 bp, Homo sapien
cccttagtacctgtgatgtgatttc

SEQ ID NO: 4377180 - DNA, 25 bp, Homo sapien
tttccccttagtacctgtgatgtga

SEQ ID NO: 4377181 - DNA, 25 bp, Homo sapien
tccccttagtacctgtgatgtgatt

SEQ ID NO: 4377182 - DNA, 25 bp, Homo sapien
ttttccccttagtacctgtgatgtg

SEQ ID NO: 4377183 - DNA, 25 bp, Homo sapien
caagtatccgcctaataactattag

SEQ ID NO: 4377184 - DNA, 25 bp, Homo sapien
ctgcaatgttcccaattccaagtat

SEQ ID NO: 4377185 - DNA, 25 bp, Homo sapien
caattccaagtatccgcctaataac

SEQ ID NO: 4377186 - DNA, 25 bp, Homo sapien
gttcccaattccaagtatccgccta

SEQ ID NO: 4377187 - DNA, 25 bp, Homo sapien
cacctgctgcttctattgcccccat

SEQ ID NO: 4377188 - DNA, 25 bp, Homo sapien
gaatcagtgagagatttgtatccat

SEQ ID NO: 4377189 - DNA, 25 bp, Homo sapien
gaaagcagaactatgaaatagctca

SEQ ID NO: 4377190 - DNA, 25 bp, Homo sapien
tattcagtagcctgcatgtgtccaa

SEQ ID NO: 4377191 - DNA, 25 bp, Homo sapien
ggttgaggaacttcaccaggataca

SEQ ID NO: 4377192 - DNA, 25 bp, Homo sapien
ccttgtcaattcagatgcgaagtgg

SEQ ID NO: 4377193 - DNA, 25 bp, Homo sapien
caattcagatgcgaagtggaacaaa

SEQ ID NO: 4377194 - DNA, 25 bp, Homo sapien
cattccttgtcaattcagatgcgaa

SEQ ID NO: 4377195 - DNA, 25 bp, Homo sapien
tcagatgcgaagtggaacaaacgtc

SEQ ID NO: 4377196 - DNA, 25 bp, Homo sapien
ctttccccatccgtcataagggtca

SEQ ID NO: 4377197 - DNA, 25 bp, Homo sapien
catccgtcataagggtcatggccaa

SEQ ID NO: 4377198 - DNA, 25 bp, Homo sapien
gtcataagggtcatggccaacactc

SEQ ID NO: 4377199 - DNA, 25 bp, Homo sapien
tccccatccgtcataagggtcatgg

SEQ ID NO: 4377200 - DNA, 25 bp, Homo sapien
tctgttgtacaacacgggtagtaat

SEQ ID NO: 4377201 - DNA, 25 bp, Homo sapien
tagtaattgactataactggaaatc

SEQ ID NO: 4377202 - DNA, 25 bp, Homo sapien
tagaaggcatctgttgtacaacacg

SEQ ID NO: 4377203 - DNA, 25 bp, Homo sapien
tatattctaatacagatcatctata

SEQ ID NO: 4377204 - DNA, 25 bp, Homo sapien
atctacgagcagatattcttcctcc

SEQ ID NO: 4377205 - DNA, 25 bp, Homo sapien
ctaaaatccatctacgagcagatat

SEQ ID NO: 4377206 - DNA, 25 bp, Homo sapien
aaaatccatctacgagcagatattc

SEQ ID NO: 4377207 - DNA, 25 bp, Homo sapien
tccatctacgagcagatattcttcc

SEQ ID NO: 4377208 - DNA, 25 bp, Homo sapien
tactccacgtctgagtccaacagct

SEQ ID NO: 4377209 - DNA, 25 bp, Homo sapien
tttctgtgtacttggagatgcctct

SEQ ID NO: 4377210 - DNA, 25 bp, Homo sapien
tcaacgtagcccgatattttcctct

SEQ ID NO: 4377211 - DNA, 25 bp, Homo sapien
tcctcttatgtggttcacttgtact

SEQ ID NO: 4377212 - DNA, 25 bp, Homo sapien
tgagaattcggaatttatatcccgt

SEQ ID NO: 4377213 - DNA, 25 bp, Homo sapien
tccaaatgagaaggtaattgcaggt

SEQ ID NO: 4377214 - DNA, 25 bp, Homo sapien
gaagagaagttggtagcagcccttg

SEQ ID NO: 4377215 - DNA, 25 bp, Homo sapien
tcaagcagagattacgaaggattct

SEQ ID NO: 4377216 - DNA, 25 bp, Homo sapien
ccaaggctcaatgctgacccagctc

SEQ ID NO: 4377217 - DNA, 25 bp, Homo sapien
acatccaaggctcaatgctgaccca

SEQ ID NO: 4377218 - DNA, 25 bp, Homo sapien
tccaaggctcaatgctgacccagct

SEQ ID NO: 4377219 - DNA, 25 bp, Homo sapien
catccaaggctcaatgctgacccag

SEQ ID NO: 4377220 - DNA, 25 bp, Homo sapien
gcttctttgcggtttcctccagctt

SEQ ID NO: 4377221 - DNA, 25 bp, Homo sapien
agcttctttgcggtttcctccagct

SEQ ID NO: 4377222 - DNA, 25 bp, Homo sapien
tccaatattgtgttccatttcctgc

SEQ ID NO: 4377223 - DNA, 25 bp, Homo sapien
cctccaatattgtgttccatttcct

SEQ ID NO: 4377224 - DNA, 25 bp, Homo sapien
tcctccaatattgtgttccatttcc

SEQ ID NO: 4377225 - DNA, 25 bp, Homo sapien
ctccaatattgtgttccatttcctg

SEQ ID NO: 4377226 - DNA, 25 bp, Homo sapien
tttctattggtttcataatatcacc

SEQ ID NO: 4377227 - DNA, 25 bp, Homo sapien
ttgccatgaagtaaatcctctttat

SEQ ID NO: 4377228 - DNA, 25 bp, Homo sapien
tctattggtttcataatatcaccaa

SEQ ID NO: 4377229 - DNA, 25 bp, Homo sapien
aaaattgccatgaagtaaatcctct

SEQ ID NO: 4377230 - DNA, 25 bp, Homo sapien
aagagaacgcagcagcctgacctgt

SEQ ID NO: 4377231 - DNA, 25 bp, Homo sapien
aaatcatggagatatggcccagtct

SEQ ID NO: 4377232 - DNA, 25 bp, Homo sapien
tgtttttgctggcatctgtataaga

SEQ ID NO: 4377233 - DNA, 25 bp, Homo sapien
tatcaagtctactctttctgtcttt

SEQ ID NO: 4377234 - DNA, 25 bp, Homo sapien
tgcatgcacatgacactctcataca

SEQ ID NO: 4377235 - DNA, 25 bp, Homo sapien
cacatgccaatccaagtagagaaag

SEQ ID NO: 4377236 - DNA, 25 bp, Homo sapien
tcttccctcagagctagctcaaata

SEQ ID NO: 4377237 - DNA, 25 bp, Homo sapien
gtgggaaaaggcactttataattca

SEQ ID NO: 4377238 - DNA, 25 bp, Homo sapien
aagaatgttagaaggtcataaacta

SEQ ID NO: 4377239 - DNA, 25 bp, Homo sapien
aaggtcataaactaataagagacca

SEQ ID NO: 4377240 - DNA, 25 bp, Homo sapien
tgttagaaggtcataaactaataag

SEQ ID NO: 4377241 - DNA, 25 bp, Homo sapien
ggtcataaactaataagagaccaca

SEQ ID NO: 4377242 - DNA, 25 bp, Homo sapien
tgaaaagaatccgttggctgagcgt

SEQ ID NO: 4377243 - DNA, 25 bp, Homo sapien
tgagaatgggtgctcgcatagaaac

SEQ ID NO: 4377244 - DNA, 25 bp, Homo sapien
tacttatagggaaccagacactgaa

SEQ ID NO: 4377245 - DNA, 25 bp, Homo sapien
cataaagacatcagaagggcagcaa

SEQ ID NO: 4377246 - DNA, 25 bp, Homo sapien
gcctttggggcggttgtcatctcga

SEQ ID NO: 4377247 - DNA, 25 bp, Homo sapien
tcagctcttcgatgtgatttctcag

SEQ ID NO: 4377248 - DNA, 25 bp, Homo sapien
ggttgtcatctcgaacttcttgctc

SEQ ID NO: 4377249 - DNA, 25 bp, Homo sapien
cgtagtgttcctctcggcctttggg

SEQ ID NO: 4377250 - DNA, 25 bp, Homo sapien
cataggtctcttcagcattatgctc

SEQ ID NO: 4377251 - DNA, 25 bp, Homo sapien
ataggtctcttcagcattatgctcc

SEQ ID NO: 4377252 - DNA, 25 bp, Homo sapien
taggtctcttcagcattatgctcca

SEQ ID NO: 4377253 - DNA, 25 bp, Homo sapien
ctaaaacaaaccacagatatcattt

SEQ ID NO: 4377254 - DNA, 25 bp, Homo sapien
aacaaaccacagatatcatttaaac

SEQ ID NO: 4377255 - DNA, 25 bp, Homo sapien
aaaacaaaccacagatatcatttaa

SEQ ID NO: 4377256 - DNA, 25 bp, Homo sapien
acaaaccacagatatcatttaaaca

SEQ ID NO: 4377257 - DNA, 25 bp, Homo sapien
tccaaaaagttcactcaaaatagca

SEQ ID NO: 4377258 - DNA, 25 bp, Homo sapien
atttaaagacttgcaataatatatt

SEQ ID NO: 4377259 - DNA, 25 bp, Homo sapien
aaggatttatctactaggtgtgaag

SEQ ID NO: 4377260 - DNA, 25 bp, Homo sapien
tttaaagacttgcaataatatattt

SEQ ID NO: 4377261 - DNA, 25 bp, Homo sapien
ttctaaccaaatgtctccagtgcca

SEQ ID NO: 4377262 - DNA, 25 bp, Homo sapien
aaccaaatgtctccagtgccatgat

SEQ ID NO: 4377263 - DNA, 25 bp, Homo sapien
ctaaccaaatgtctccagtgccatg

SEQ ID NO: 4377264 - DNA, 25 bp, Homo sapien
cttctaaccaaatgtctccagtgcc

SEQ ID NO: 4377265 - DNA, 25 bp, Homo sapien
tcagtctctgggattcaatccttac

SEQ ID NO: 4377266 - DNA, 25 bp, Homo sapien
gatcagtctctgggattcaatcctt

SEQ ID NO: 4377267 - DNA, 25 bp, Homo sapien
atcagtctctgggattcaatcctta

SEQ ID NO: 4377268 - DNA, 25 bp, Homo sapien
tgatcagtctctgggattcaatcct

SEQ ID NO: 4377269 - DNA, 25 bp, Homo sapien
cttcctggtactgttcatcaacatt

SEQ ID NO: 4377270 - DNA, 25 bp, Homo sapien
ttcctggtactgttcatcaacattg

SEQ ID NO: 4377271 - DNA, 25 bp, Homo sapien
ctcttcctggtactgttcatcaaca

SEQ ID NO: 4377272 - DNA, 25 bp, Homo sapien
tcttcctggtactgttcatcaacat

SEQ ID NO: 4377273 - DNA, 25 bp, Homo sapien
ttgcttttgattactttgtttttgc

SEQ ID NO: 4377274 - DNA, 25 bp, Homo sapien
cctcaccttgattattagggtcatc

SEQ ID NO: 4377275 - DNA, 25 bp, Homo sapien
catcctcaccttgattattagggtc

SEQ ID NO: 4377276 - DNA, 25 bp, Homo sapien
ttctctcacttgctcggcttcttca

SEQ ID NO: 4377277 - DNA, 25 bp, Homo sapien
gcctcagattctgggtcggcttctc

SEQ ID NO: 4377278 - DNA, 25 bp, Homo sapien
gggtccttgttcacgaggctcatgt

SEQ ID NO: 4377279 - DNA, 25 bp, Homo sapien
ttcacgaggctcatgtctattacct

SEQ ID NO: 4377280 - DNA, 25 bp, Homo sapien
ggcttctcggggtccttgttcacga

SEQ ID NO: 4377281 - DNA, 25 bp, Homo sapien
ctctgctccctgaacgatatcatta

SEQ ID NO: 4377282 - DNA, 25 bp, Homo sapien
tatccatagcatcataatgagcttg

SEQ ID NO: 4377283 - DNA, 25 bp, Homo sapien
gctccctgaacgatatcattatcca

SEQ ID NO: 4377284 - DNA, 25 bp, Homo sapien
gatatcattatccatagcatcataa

SEQ ID NO: 4377285 - DNA, 25 bp, Homo sapien
gttcctgctgccgtagtaagtgccc

SEQ ID NO: 4377286 - DNA, 25 bp, Homo sapien
cagcctctgctggtgcaaagcttcc

SEQ ID NO: 4377287 - DNA, 25 bp, Homo sapien
ctgctgccgtagtaagtgcccctgc

SEQ ID NO: 4377288 - DNA, 25 bp, Homo sapien
gccgtagtaagtgcccctgcagcct

SEQ ID NO: 4377289 - DNA, 25 bp, Homo sapien
tcctcatagggtgattggaatttga

SEQ ID NO: 4377290 - DNA, 25 bp, Homo sapien
aactgttcctcatagggtgattgga

SEQ ID NO: 4377291 - DNA, 25 bp, Homo sapien
attggaatttgatcattggcttggc

SEQ ID NO: 4377292 - DNA, 25 bp, Homo sapien
gggtgattggaatttgatcattggc

SEQ ID NO: 4377293 - DNA, 25 bp, Homo sapien
aaggtgatgtgagaatgaatctctg

SEQ ID NO: 4377294 - DNA, 25 bp, Homo sapien
tctactctattaaggtgatgtgaga

SEQ ID NO: 4377295 - DNA, 25 bp, Homo sapien
aggtgatgtgagaatgaatctctga

SEQ ID NO: 4377296 - DNA, 25 bp, Homo sapien
ctgttctactctattaaggtgatgt

SEQ ID NO: 4377297 - DNA, 25 bp, Homo sapien
ttctgcttgcccgacctgctccatt

SEQ ID NO: 4377298 - DNA, 25 bp, Homo sapien
cctgctcctctggtgatggatcgtg

SEQ ID NO: 4377299 - DNA, 25 bp, Homo sapien
ggatcgtgttcctcctcaagatgtt

SEQ ID NO: 4377300 - DNA, 25 bp, Homo sapien
ctgatgctcctcaggttctctgcgt

SEQ ID NO: 4377301 - DNA, 25 bp, Homo sapien
aattctgcctccttatgggtgggag

SEQ ID NO: 4377302 - DNA, 25 bp, Homo sapien
ccttatgggtgggagcatagagttt

SEQ ID NO: 4377303 - DNA, 25 bp, Homo sapien
gggagcatagagttttgtgtcttct

SEQ ID NO: 4377304 - DNA, 25 bp, Homo sapien
gcctccttatgggtgggagcataga

SEQ ID NO: 4377305 - DNA, 25 bp, Homo sapien
ctgccacacatcattatttcgagac

SEQ ID NO: 4377306 - DNA, 25 bp, Homo sapien
gccacacatcattatttcgagacac

SEQ ID NO: 4377307 - DNA, 25 bp, Homo sapien
tgccacacatcattatttcgagaca

SEQ ID NO: 4377308 - DNA, 25 bp, Homo sapien
tcaggttttcgaaggcttggaatcc

SEQ ID NO: 4377309 - DNA, 25 bp, Homo sapien
ggaatcctattcagagtatctttca

SEQ ID NO: 4377310 - DNA, 25 bp, Homo sapien
tcctgcacctctcgggttggcttct

SEQ ID NO: 4377311 - DNA, 25 bp, Homo sapien
tttgctgttctgctggatcaggttt

SEQ ID NO: 4377312 - DNA, 25 bp, Homo sapien
ttcaacaggtctaggacaaggccca

SEQ ID NO: 4377313 - DNA, 25 bp, Homo sapien
tattaaaaatgtaggctcctggtcc

SEQ ID NO: 4377314 - DNA, 25 bp, Homo sapien
tgtgtgttgcacaattagggaccat

SEQ ID NO: 4377315 - DNA, 25 bp, Homo sapien
tgctaaataattcccagggcactgc

SEQ ID NO: 4377316 - DNA, 25 bp, Homo sapien
tcatgctcggagagtaaattcttat

SEQ ID NO: 4377317 - DNA, 25 bp, Homo sapien
gtggtcttccaaagtcactacaagt

SEQ ID NO: 4377318 - DNA, 25 bp, Homo sapien
gctcggagagtaaattcttatgctg

SEQ ID NO: 4377319 - DNA, 25 bp, Homo sapien
cactacaagttgttcatgctcggag

SEQ ID NO: 4377320 - DNA, 25 bp, Homo sapien
gatttgtaaagcaggccaattaggg

SEQ ID NO: 4377321 - DNA, 25 bp, Homo sapien
catcttttagcttacaatgctgaag

SEQ ID NO: 4377322 - DNA, 25 bp, Homo sapien
tattaggtacactctagttaatgca

SEQ ID NO: 4377323 - DNA, 25 bp, Homo sapien
cccacaataacaacgtggatttgta

SEQ ID NO: 4377324 - DNA, 25 bp, Homo sapien
tgtgctttccttagttgtctattct

SEQ ID NO: 4377325 - DNA, 25 bp, Homo sapien
cttgaagctgtgtatgtatgtcttg

SEQ ID NO: 4377326 - DNA, 25 bp, Homo sapien
catcttgaagctgtgtatgtatgtc

SEQ ID NO: 4377327 - DNA, 25 bp, Homo sapien
ggtgtgctttccttagttgtctatt

SEQ ID NO: 4377328 - DNA, 25 bp, Homo sapien
ccttgtttgcgatgttcctcttcca

SEQ ID NO: 4377329 - DNA, 25 bp, Homo sapien
tgtttctttagctcctcgtgttggc

SEQ ID NO: 4377330 - DNA, 25 bp, Homo sapien
tgcttatggtcattaaatgttctac

SEQ ID NO: 4377331 - DNA, 25 bp, Homo sapien
tgctggagctgcaagtatttttgct

SEQ ID NO: 4377332 - DNA, 25 bp, Homo sapien
gacattcagtgcactgtatctgcta

SEQ ID NO: 4377333 - DNA, 25 bp, Homo sapien
cattcagtgcactgtatctgctatt

SEQ ID NO: 4377334 - DNA, 25 bp, Homo sapien
atgttggacattcagtgcactgtat

SEQ ID NO: 4377335 - DNA, 25 bp, Homo sapien
tggacattcagtgcactgtatctgc

SEQ ID NO: 4377336 - DNA, 25 bp, Homo sapien
aaagtaaaagagttcgcaactgtat

SEQ ID NO: 4377337 - DNA, 25 bp, Homo sapien
aaaagagttcgcaactgtatttctc

SEQ ID NO: 4377338 - DNA, 25 bp, Homo sapien
taaaagagttcgcaactgtatttct

SEQ ID NO: 4377339 - DNA, 25 bp, Homo sapien
agtaaaagagttcgcaactgtattt

SEQ ID NO: 4377340 - DNA, 25 bp, Homo sapien
tcctttatttaatgtttcttgtgct

SEQ ID NO: 4377341 - DNA, 25 bp, Homo sapien
tttcttgtgcttctaacttataaac

SEQ ID NO: 4377342 - DNA, 25 bp, Homo sapien
tgcttctaacttataaacaagaaaa

SEQ ID NO: 4377343 - DNA, 25 bp, Homo sapien
atttaatgtttcttgtgcttctaac

SEQ ID NO: 4377344 - DNA, 25 bp, Homo sapien
gatttctctaatcttgatctgtgtt

SEQ ID NO: 4377345 - DNA, 25 bp, Homo sapien
gcaaggatttctctaatcttgatct

SEQ ID NO: 4377346 - DNA, 25 bp, Homo sapien
tctttttgcaaggatttctctaatc

SEQ ID NO: 4377347 - DNA, 25 bp, Homo sapien
tcctttgcttttttatgttcaagtc

SEQ ID NO: 4377348 - DNA, 25 bp, Homo sapien
ggagaaagcacccagtaatagcaga

SEQ ID NO: 4377349 - DNA, 25 bp, Homo sapien
caggcacacgtggtaatcattgaca

SEQ ID NO: 4377350 - DNA, 25 bp, Homo sapien
aaagtagctctaaggatggtgccgg

SEQ ID NO: 4377351 - DNA, 25 bp, Homo sapien
taaaatgtggatccagctccaaggc

SEQ ID NO: 4377352 - DNA, 25 bp, Homo sapien
tcacccaagatggtaaaggtgagat

SEQ ID NO: 4377353 - DNA, 25 bp, Homo sapien
caagatggtaaaggtgagattggca

SEQ ID NO: 4377354 - DNA, 25 bp, Homo sapien
cataatatcacccaagatggtaaag

SEQ ID NO: 4377355 - DNA, 25 bp, Homo sapien
accctgcatcataatatcacccaag

SEQ ID NO: 4377356 - DNA, 25 bp, Homo sapien
cccacaggccataggcatatctctg

SEQ ID NO: 4377357 - DNA, 25 bp, Homo sapien
ttgtcactcccactactacactgtg

SEQ ID NO: 4377358 - DNA, 25 bp, Homo sapien
ctttaggtagagatttgtcactccc

SEQ ID NO: 4377359 - DNA, 25 bp, Homo sapien
gatgtccagtttaaatatcctatgg

SEQ ID NO: 4377360 - DNA, 25 bp, Homo sapien
cctccatggactcagcagagctctg

SEQ ID NO: 4377361 - DNA, 25 bp, Homo sapien
tcctccatggactcagcagagctct

SEQ ID NO: 4377362 - DNA, 25 bp, Homo sapien
cacagtcaaactggacccagagaat

SEQ ID NO: 4377363 - DNA, 25 bp, Homo sapien
cagacaatctagtaggccagggaga

SEQ ID NO: 4377364 - DNA, 25 bp, Homo sapien
tgcttctgggcgtcaaatctcggaa

SEQ ID NO: 4377365 - DNA, 25 bp, Homo sapien
gaaactcaacgtggatcacgcccca

SEQ ID NO: 4377366 - DNA, 25 bp, Homo sapien
cattacggatgctgttcaccaaggc

SEQ ID NO: 4377367 - DNA, 25 bp, Homo sapien
gctttcaagtccacagaaaaattag

SEQ ID NO: 4377368 - DNA, 25 bp, Homo sapien
tggctttcaagtccacagaaaaatt

SEQ ID NO: 4377369 - DNA, 25 bp, Homo sapien
atttggctttcaagtccacagaaaa

SEQ ID NO: 4377370 - DNA, 25 bp, Homo sapien
ttatttggctttcaagtccacagaa

SEQ ID NO: 4377371 - DNA, 25 bp, Homo sapien
taaaaagcatgtcaagacgactcat

SEQ ID NO: 4377372 - DNA, 25 bp, Homo sapien
cagccactgacaaatcaagtctatg

SEQ ID NO: 4377373 - DNA, 25 bp, Homo sapien
gacgactcatgggaaacagccactg

SEQ ID NO: 4377374 - DNA, 25 bp, Homo sapien
tctatgtttggtggacctaaagacc

SEQ ID NO: 4377375 - DNA, 25 bp, Homo sapien
tatggacactaggtgcttcaggaag

SEQ ID NO: 4377376 - DNA, 25 bp, Homo sapien
tgttctacttgttctatgtcactga

SEQ ID NO: 4377377 - DNA, 25 bp, Homo sapien
tattaactcataccctccgcctaaa

SEQ ID NO: 4377378 - DNA, 25 bp, Homo sapien
taaaggacagatttacttattgcct

SEQ ID NO: 4377379 - DNA, 25 bp, Homo sapien
tcactactgtaatgatacatccaca

SEQ ID NO: 4377380 - DNA, 25 bp, Homo sapien
tagatgaactcatcatgccaaattc

SEQ ID NO: 4377381 - DNA, 25 bp, Homo sapien
tctgcagtgcttaccactcggaggg

SEQ ID NO: 4377382 - DNA, 25 bp, Homo sapien
cactcggaggggcagagcattcttc

SEQ ID NO: 4377383 - DNA, 25 bp, Homo sapien
ccaattcacttattccttcagccac

SEQ ID NO: 4377384 - DNA, 25 bp, Homo sapien
caattcacttattccttcagccaca

SEQ ID NO: 4377385 - DNA, 25 bp, Homo sapien
gtaatgtggtattgtaccccagccc

SEQ ID NO: 4377386 - DNA, 25 bp, Homo sapien
atgtggtattgtaccccagcccttt

SEQ ID NO: 4377387 - DNA, 25 bp, Homo sapien
gaggagcccaatgcaaaaaacactt

SEQ ID NO: 4377388 - DNA, 25 bp, Homo sapien
caaagaagtaaccaatgacaagatg

SEQ ID NO: 4377389 - DNA, 25 bp, Homo sapien
taacaaatgtctgcacaccgaaaga

SEQ ID NO: 4377390 - DNA, 25 bp, Homo sapien
ccatcctgagtgttagaggagccca

SEQ ID NO: 4377391 - DNA, 25 bp, Homo sapien
cacaacctttctggaaaacagtatc

SEQ ID NO: 4377392 - DNA, 25 bp, Homo sapien
cctttctggaaaacagtatcaggat

SEQ ID NO: 4377393 - DNA, 25 bp, Homo sapien
taaactagcacaacctttctggaaa

SEQ ID NO: 4377394 - DNA, 25 bp, Homo sapien
tctggaaaacagtatcaggatttct

SEQ ID NO: 4377395 - DNA, 25 bp, Homo sapien
catttaccacctctcttccccacta

SEQ ID NO: 4377396 - DNA, 25 bp, Homo sapien
ttaccacctctcttccccactacca

SEQ ID NO: 4377397 - DNA, 25 bp, Homo sapien
ccacctctcttccccactaccacca

SEQ ID NO: 4377398 - DNA, 25 bp, Homo sapien
taccatttaccacctctcttcccca

SEQ ID NO: 4377399 - DNA, 25 bp, Homo sapien
gcataagtattgaaaactaaccaca

SEQ ID NO: 4377400 - DNA, 25 bp, Homo sapien
aagctgcataagtattgaaaactaa

SEQ ID NO: 4377401 - DNA, 25 bp, Homo sapien
ggatacgtccttaacaagaggacat

SEQ ID NO: 4377402 - DNA, 25 bp, Homo sapien
aatatgtataggatacgtccttaac

SEQ ID NO: 4377403 - DNA, 25 bp, Homo sapien
gatgggctggtgctacgaagttcta

SEQ ID NO: 4377404 - DNA, 25 bp, Homo sapien
ttgacaagagctcgggtaaaggact

SEQ ID NO: 4377405 - DNA, 25 bp, Homo sapien
taaactactgcaggatggtgaatgg

SEQ ID NO: 4377406 - DNA, 25 bp, Homo sapien
gtaaaggactatctgtgcacccgcc

SEQ ID NO: 4377407 - DNA, 25 bp, Homo sapien
cggcagtcctgaaacgctcacctct

SEQ ID NO: 4377408 - DNA, 25 bp, Homo sapien
gtgccggcagtcctgaaacgctcac

SEQ ID NO: 4377409 - DNA, 25 bp, Homo sapien
ctggtgccggcagtcctgaaacgct

SEQ ID NO: 4377410 - DNA, 25 bp, Homo sapien
cctgaaacgctcacctctgacgtcc

SEQ ID NO: 4377411 - DNA, 25 bp, Homo sapien
agccacttttcctgcccgggtggag

SEQ ID NO: 4377412 - DNA, 25 bp, Homo sapien
caaagttggccaccggctgcgcgcg

SEQ ID NO: 4377413 - DNA, 25 bp, Homo sapien
ggctgcgcgcgtcccgttagccgta

SEQ ID NO: 4377414 - DNA, 25 bp, Homo sapien
gaggcgcggggcaaagttggccacc

SEQ ID NO: 4377415 - DNA, 25 bp, Homo sapien
cagctcgtagtagagcatcgcgccg

SEQ ID NO: 4377416 - DNA, 25 bp, Homo sapien
gagaaagccgaacacgacggtcagc

SEQ ID NO: 4377417 - DNA, 25 bp, Homo sapien
tgtaactgggcggagagggactcct

SEQ ID NO: 4377418 - DNA, 25 bp, Homo sapien
tggaaaatccgcttctgctttcggg

SEQ ID NO: 4377419 - DNA, 25 bp, Homo sapien
agtcccgcctggacccaaagccgcg

SEQ ID NO: 4377420 - DNA, 25 bp, Homo sapien
ccgcctggacccaaagccgcggccg

SEQ ID NO: 4377421 - DNA, 25 bp, Homo sapien
tcccgcctggacccaaagccgcggc

SEQ ID NO: 4377422 - DNA, 25 bp, Homo sapien
gcctggacccaaagccgcggccgcc

SEQ ID NO: 4377423 - DNA, 25 bp, Homo sapien
ttggtccgagcgagcgtctcagcag

SEQ ID NO: 4377424 - DNA, 25 bp, Homo sapien
cagccaaacttctgcgaggctcgtt

SEQ ID NO: 4377425 - DNA, 25 bp, Homo sapien
gctattctggccaacgggattccgg

SEQ ID NO: 4377426 - DNA, 25 bp, Homo sapien
cacgactttgttgccacctaaggga

SEQ ID NO: 4377427 - DNA, 25 bp, Homo sapien
tggggagacattagcaacactaagc

SEQ ID NO: 4377428 - DNA, 25 bp, Homo sapien
agtcaggggcctcgatgtgtgtatt

SEQ ID NO: 4377429 - DNA, 25 bp, Homo sapien
tatgatggggagacattagcaacac

SEQ ID NO: 4377430 - DNA, 25 bp, Homo sapien
tcgatgtgtgtattctgcttgttgg

SEQ ID NO: 4377431 - DNA, 25 bp, Homo sapien
gatacagaagttgtccttctaaatt

SEQ ID NO: 4377432 - DNA, 25 bp, Homo sapien
gatatgtccatttggcagtgtgaca

SEQ ID NO: 4377433 - DNA, 25 bp, Homo sapien
atttggcagtgtgacattgacaggc

SEQ ID NO: 4377434 - DNA, 25 bp, Homo sapien
tagtctgatacagaagttgtccttc

SEQ ID NO: 4377435 - DNA, 25 bp, Homo sapien
tgaggcccatactgctgctctgtcc

SEQ ID NO: 4377436 - DNA, 25 bp, Homo sapien
tgtggccctcctgatacatgaggcc

SEQ ID NO: 4377437 - DNA, 25 bp, Homo sapien
ctgtccttgtttgagctcttgctag

SEQ ID NO: 4377438 - DNA, 25 bp, Homo sapien
tcttgctagtttggcttcaacacca

SEQ ID NO: 4377439 - DNA, 25 bp, Homo sapien
catagtgacatatggattagcccag

SEQ ID NO: 4377440 - DNA, 25 bp, Homo sapien
tagtgacatatggattagcccagtc

SEQ ID NO: 4377441 - DNA, 25 bp, Homo sapien
ttcatagtgacatatggattagccc

SEQ ID NO: 4377442 - DNA, 25 bp, Homo sapien
gacatatggattagcccagtcttcc

SEQ ID NO: 4377443 - DNA, 25 bp, Homo sapien
tgtgaggacctcctaggtaccagtg

SEQ ID NO: 4377444 - DNA, 25 bp, Homo sapien
gaaactgcttgcattatcttgggag

SEQ ID NO: 4377445 - DNA, 25 bp, Homo sapien
gaagccaagtctttgcgtcaggaca

SEQ ID NO: 4377446 - DNA, 25 bp, Homo sapien
taaaatgctgactgctcataaagga

SEQ ID NO: 4377447 - DNA, 25 bp, Homo sapien
tgggatgccggctccaacagcacct

SEQ ID NO: 4377448 - DNA, 25 bp, Homo sapien
acagcacctcctttgtggctctggc

SEQ ID NO: 4377449 - DNA, 25 bp, Homo sapien
caacagcacctcctttgtggctctg

SEQ ID NO: 4377450 - DNA, 25 bp, Homo sapien
tttgccgctgggatgccggctccaa

SEQ ID NO: 4377451 - DNA, 25 bp, Homo sapien
taagtgtgagtaagaagtacttcgc

SEQ ID NO: 4377452 - DNA, 25 bp, Homo sapien
gccatccctatatttgaaagtcctg

SEQ ID NO: 4377453 - DNA, 25 bp, Homo sapien
tctgaagtcgtgctatcacttgggc

SEQ ID NO: 4377454 - DNA, 25 bp, Homo sapien
gctgaaatgcttgactcagagggca

SEQ ID NO: 4377455 - DNA, 25 bp, Homo sapien
tcaaaggatcgagtgattaagaggg

SEQ ID NO: 4377456 - DNA, 25 bp, Homo sapien
actgtgagctgctagctttaggaaa

SEQ ID NO: 4377457 - DNA, 25 bp, Homo sapien
tgtgagctgctagctttaggaaagg

SEQ ID NO: 4377458 - DNA, 25 bp, Homo sapien
atatcttcaaaggatcgagtgatta

SEQ ID NO: 4377459 - DNA, 25 bp, Homo sapien
ttttcacgaaacagactccagaggt

SEQ ID NO: 4377460 - DNA, 25 bp, Homo sapien
ttatggcttcggagcctgggctgtc

SEQ ID NO: 4377461 - DNA, 25 bp, Homo sapien
tttgtggccttccagacaacagctg

SEQ ID NO: 4377462 - DNA, 25 bp, Homo sapien
tcctttgttggagggcacgatgcac

SEQ ID NO: 4377463 - DNA, 25 bp, Homo sapien
atggtgctcgcgactggctgttcct

SEQ ID NO: 4377464 - DNA, 25 bp, Homo sapien
gagagcttcccgctccgagcaggag

SEQ ID NO: 4377465 - DNA, 25 bp, Homo sapien
ttgtaaaagcgttggctcctcctta

SEQ ID NO: 4377466 - DNA, 25 bp, Homo sapien
gccaaataaaacgaagagagatgac

SEQ ID NO: 4377467 - DNA, 25 bp, Homo sapien
ttggtctctgctcgtgcacaactgg

SEQ ID NO: 4377468 - DNA, 25 bp, Homo sapien
tcgtgcacaactggtttggttctga

SEQ ID NO: 4377469 - DNA, 25 bp, Homo sapien
ctctaaccgactccccagactcggg

SEQ ID NO: 4377470 - DNA, 25 bp, Homo sapien
tctgagcaggctgatgtttgagagg

SEQ ID NO: 4377471 - DNA, 25 bp, Homo sapien
ttctgtagcctcagcggaatcatca

SEQ ID NO: 4377472 - DNA, 25 bp, Homo sapien
ctcagcggaatcatcatcgaaccac

SEQ ID NO: 4377473 - DNA, 25 bp, Homo sapien
gtagcctcagcggaatcatcatcga

SEQ ID NO: 4377474 - DNA, 25 bp, Homo sapien
ctgaattctgtagcctcagcggaat

SEQ ID NO: 4377475 - DNA, 25 bp, Homo sapien
gagcagagcgtgcaaggccttggag

SEQ ID NO: 4377476 - DNA, 25 bp, Homo sapien
gtctcctggggccaatatacactgt

SEQ ID NO: 4377477 - DNA, 25 bp, Homo sapien
tcttttgtcaccatcattggctcca

SEQ ID NO: 4377478 - DNA, 25 bp, Homo sapien
tccaaatacctagcgtccccaaatg

SEQ ID NO: 4377479 - DNA, 25 bp, Homo sapien
gtctgtgttaaatttggtaggatcc

SEQ ID NO: 4377480 - DNA, 25 bp, Homo sapien
attggtctgtgttaaatttggtagg

SEQ ID NO: 4377481 - DNA, 25 bp, Homo sapien
ttgtgcctgagatcctctgagaagt

SEQ ID NO: 4377482 - DNA, 25 bp, Homo sapien
tctttgtgcctgagatcctctgaga

SEQ ID NO: 4377483 - DNA, 25 bp, Homo sapien
tgcagtcatgctgactgagctattc

SEQ ID NO: 4377484 - DNA, 25 bp, Homo sapien
gcagtcatgctgactgagctattct

SEQ ID NO: 4377485 - DNA, 25 bp, Homo sapien
agtcatgctgactgagctattctct

SEQ ID NO: 4377486 - DNA, 25 bp, Homo sapien
cagtcatgctgactgagctattctc

SEQ ID NO: 4377487 - DNA, 25 bp, Homo sapien
ctgttaagttgtggatgctgctttt

SEQ ID NO: 4377488 - DNA, 25 bp, Homo sapien
tcagcagttttagagctgatgtagt

SEQ ID NO: 4377489 - DNA, 25 bp, Homo sapien
cagttttagagctgatgtagtctgt

SEQ ID NO: 4377490 - DNA, 25 bp, Homo sapien
ttagagctgatgtagtctgtttcat

SEQ ID NO: 4377491 - DNA, 25 bp, Homo sapien
ttttggagtcatacagaagggaaca

SEQ ID NO: 4377492 - DNA, 25 bp, Homo sapien
tctttttggagtcatacagaaggga

SEQ ID NO: 4377493 - DNA, 25 bp, Homo sapien
tgttgctagtttatgaatattacag

SEQ ID NO: 4377494 - DNA, 25 bp, Homo sapien
tttgttgctagtttatgaatattac

SEQ ID NO: 4377495 - DNA, 25 bp, Homo sapien
ttcaaagtggttagatgatcggtct

SEQ ID NO: 4377496 - DNA, 25 bp, Homo sapien
catataccgcaatggaaaagttgtc

SEQ ID NO: 4377497 - DNA, 25 bp, Homo sapien
tcgcatttgcatactgaaagcatcg

SEQ ID NO: 4377498 - DNA, 25 bp, Homo sapien
tgatcggtctgtgtatatttgctga

SEQ ID NO: 4377499 - DNA, 25 bp, Homo sapien
cagacgtgaaatttccctgcttctg

SEQ ID NO: 4377500 - DNA, 25 bp, Homo sapien
gactgtaagattaattgaggcagcc

SEQ ID NO: 4377501 - DNA, 25 bp, Homo sapien
cagaggcacagactgtaagattaat

SEQ ID NO: 4377502 - DNA, 25 bp, Homo sapien
tcagatggaattaaaatgactgcag

SEQ ID NO: 4377503 - DNA, 25 bp, Homo sapien
ttctgaaattgaagaaccatttagt

SEQ ID NO: 4377504 - DNA, 25 bp, Homo sapien
gttctgaaattgaagaaccatttag

SEQ ID NO: 4377505 - DNA, 25 bp, Homo sapien
caggctggttgtggtctggttccaa

SEQ ID NO: 4377506 - DNA, 25 bp, Homo sapien
gccctggtagctggaaggaatcagt

SEQ ID NO: 4377507 - DNA, 25 bp, Homo sapien
ccctggtagctggaaggaatcagta

SEQ ID NO: 4377508 - DNA, 25 bp, Homo sapien
atcatcaaatttgtaatccacagtt

SEQ ID NO: 4377509 - DNA, 25 bp, Homo sapien
tatcatcaaatttgtaatccacagt

SEQ ID NO: 4377510 - DNA, 25 bp, Homo sapien
cttggggagtttgttggcgtcctgt

SEQ ID NO: 4377511 - DNA, 25 bp, Homo sapien
tcctgtttccttccccagtgtgctt

SEQ ID NO: 4377512 - DNA, 25 bp, Homo sapien
cccagtgtgctttctgcccttgaaa

SEQ ID NO: 4377513 - DNA, 25 bp, Homo sapien
agtgtgctttctgcccttgaaacat

SEQ ID NO: 4377514 - DNA, 25 bp, Homo sapien
ttgctttctcgtatccattacttga

SEQ ID NO: 4377515 - DNA, 25 bp, Homo sapien
atgtttgctttctcgtatccattac

SEQ ID NO: 4377516 - DNA, 25 bp, Homo sapien
tgaaattggaaggttgctgagagct

SEQ ID NO: 4377517 - DNA, 25 bp, Homo sapien
cattacttgaatctttgtaagtgaa

SEQ ID NO: 4377518 - DNA, 25 bp, Homo sapien
ttaataatgatgtctttccagctct

SEQ ID NO: 4377519 - DNA, 25 bp, Homo sapien
cctggcgttgtgctttgctccttgc

SEQ ID NO: 4377520 - DNA, 25 bp, Homo sapien
ctcaaacctggcgttgtgctttgct

SEQ ID NO: 4377521 - DNA, 25 bp, Homo sapien
attaataatgatgtctttccagctc

SEQ ID NO: 4377522 - DNA, 25 bp, Homo sapien
tgccttcagggtgtggcacaagaat

SEQ ID NO: 4377523 - DNA, 25 bp, Homo sapien
tgctgaactgcgagttaacttcagg

SEQ ID NO: 4377524 - DNA, 25 bp, Homo sapien
gaatgcagcaagctcaagagatttt

SEQ ID NO: 4377525 - DNA, 25 bp, Homo sapien
taacttcagggaccttttgaattgc

SEQ ID NO: 4377526 - DNA, 25 bp, Homo sapien
agctcctctctattcagaactaggc

SEQ ID NO: 4377527 - DNA, 25 bp, Homo sapien
cagctcctctctattcagaactagg

SEQ ID NO: 4377528 - DNA, 25 bp, Homo sapien
tcctctctattcagaactaggccat

SEQ ID NO: 4377529 - DNA, 25 bp, Homo sapien
gctcctctctattcagaactaggcc

SEQ ID NO: 4377530 - DNA, 25 bp, Homo sapien
caggtgaccacaggcctagattatt

SEQ ID NO: 4377531 - DNA, 25 bp, Homo sapien
tgatagaatggcttggctccgcaca

SEQ ID NO: 4377532 - DNA, 25 bp, Homo sapien
agttctgaggcctaggctccttcca

SEQ ID NO: 4377533 - DNA, 25 bp, Homo sapien
tgagtacttagtcacttggccatat

SEQ ID NO: 4377534 - DNA, 25 bp, Homo sapien
gaagaacattatccctcagtgctct

SEQ ID NO: 4377535 - DNA, 25 bp, Homo sapien
tgaagaacattatccctcagtgctc

SEQ ID NO: 4377536 - DNA, 25 bp, Homo sapien
atttacacagctcatcacttagatg

SEQ ID NO: 4377537 - DNA, 25 bp, Homo sapien
cacagctcatcacttagatgaagaa

SEQ ID NO: 4377538 - DNA, 25 bp, Homo sapien
tgagccatttctcgtagtagtatgg

SEQ ID NO: 4377539 - DNA, 25 bp, Homo sapien
tttcacatgagcaaagttggcgcac

SEQ ID NO: 4377540 - DNA, 25 bp, Homo sapien
tagtatggacttaatcctatcttct

SEQ ID NO: 4377541 - DNA, 25 bp, Homo sapien
atcatgggagtctttgtgtttcaca

SEQ ID NO: 4377542 - DNA, 25 bp, Homo sapien
agtagatagggccataaagagctca

SEQ ID NO: 4377543 - DNA, 25 bp, Homo sapien
ccagtggacaagtagatagggccat

SEQ ID NO: 4377544 - DNA, 25 bp, Homo sapien
acagccagtggacaagtagataggg

SEQ ID NO: 4377545 - DNA, 25 bp, Homo sapien
gggccataaagagctcacgcttagc

SEQ ID NO: 4377546 - DNA, 25 bp, Homo sapien
actggctcatcgagaccttcccctt

SEQ ID NO: 4377547 - DNA, 25 bp, Homo sapien
taactggctcatcgagaccttcccc

SEQ ID NO: 4377548 - DNA, 25 bp, Homo sapien
gataactggctcatcgagaccttcc

SEQ ID NO: 4377549 - DNA, 25 bp, Homo sapien
ataactggctcatcgagaccttccc

SEQ ID NO: 4377550 - DNA, 25 bp, Homo sapien
ctgtcatacaggacagttgagggct

SEQ ID NO: 4377551 - DNA, 25 bp, Homo sapien
gtcatacaggacagttgagggctcc

SEQ ID NO: 4377552 - DNA, 25 bp, Homo sapien
catacaggacagttgagggctcctc

SEQ ID NO: 4377553 - DNA, 25 bp, Homo sapien
tcatacaggacagttgagggctcct

SEQ ID NO: 4377554 - DNA, 25 bp, Homo sapien
ctgctcctctagtcttggagttggg

SEQ ID NO: 4377555 - DNA, 25 bp, Homo sapien
ttggagttgggtcccgactctcacc

SEQ ID NO: 4377556 - DNA, 25 bp, Homo sapien
tacccacaacataatcattccagat

SEQ ID NO: 4377557 - DNA, 25 bp, Homo sapien
gactctcaccaatacccacaacata

SEQ ID NO: 4377558 - DNA, 25 bp, Homo sapien
ctttgcaactttcttcttgatggaa

SEQ ID NO: 4377559 - DNA, 25 bp, Homo sapien
tttcttcttgatggaaaaggggcat

SEQ ID NO: 4377560 - DNA, 25 bp, Homo sapien
caactttcttcttgatggaaaaggg

SEQ ID NO: 4377561 - DNA, 25 bp, Homo sapien
gcaactttcttcttgatggaaaagg

SEQ ID NO: 4377562 - DNA, 25 bp, Homo sapien
ggtatactgcatgcctgactctatg

SEQ ID NO: 4377563 - DNA, 25 bp, Homo sapien
tgtttatagccactggtatactgca

SEQ ID NO: 4377564 - DNA, 25 bp, Homo sapien
actggtatactgcatgcctgactct

SEQ ID NO: 4377565 - DNA, 25 bp, Homo sapien
ctgtttatagccactggtatactgc

SEQ ID NO: 4377566 - DNA, 25 bp, Homo sapien
cttcttcaccagacctagacgctgc

SEQ ID NO: 4377567 - DNA, 25 bp, Homo sapien
tcttcaccagacctagacgctgcca

SEQ ID NO: 4377568 - DNA, 25 bp, Homo sapien
agacctagacgctgccaccctgtgt

SEQ ID NO: 4377569 - DNA, 25 bp, Homo sapien
accagacctagacgctgccaccctg

SEQ ID NO: 4377570 - DNA, 25 bp, Homo sapien
gcttgacctcttggtaattactgca

SEQ ID NO: 4377571 - DNA, 25 bp, Homo sapien
gacctcttggtaattactgcatcaa

SEQ ID NO: 4377572 - DNA, 25 bp, Homo sapien
cttggcttgacctcttggtaattac

SEQ ID NO: 4377573 - DNA, 25 bp, Homo sapien
ggtaattactgcatcaattagggta

SEQ ID NO: 4377574 - DNA, 25 bp, Homo sapien
ctcagctggtggttgatatagttca

SEQ ID NO: 4377575 - DNA, 25 bp, Homo sapien
tctcagctggtggttgatatagttc

SEQ ID NO: 4377576 - DNA, 25 bp, Homo sapien
tggttgatatagttcattcagctgg

SEQ ID NO: 4377577 - DNA, 25 bp, Homo sapien
tggtggttgatatagttcattcagc

SEQ ID NO: 4377578 - DNA, 25 bp, Homo sapien
agacagctgattgtctaccactagg

SEQ ID NO: 4377579 - DNA, 25 bp, Homo sapien
taaggattgtctgccaaagaagtcc

SEQ ID NO: 4377580 - DNA, 25 bp, Homo sapien
ctaccactagggcaatttgtaagga

SEQ ID NO: 4377581 - DNA, 25 bp, Homo sapien
taggtagtagcatctttgagagggc

SEQ ID NO: 4377582 - DNA, 25 bp, Homo sapien
tttccacttcttctataatcctcat

SEQ ID NO: 4377583 - DNA, 25 bp, Homo sapien
catggatttcagatcctccaatatt

SEQ ID NO: 4377584 - DNA, 25 bp, Homo sapien
caatatttggtgacttccactttcc

SEQ ID NO: 4377585 - DNA, 25 bp, Homo sapien
ttcagatcctccaatatttggtgac

SEQ ID NO: 4377586 - DNA, 25 bp, Homo sapien
aatgtgttatttcactgggttgatt

SEQ ID NO: 4377587 - DNA, 25 bp, Homo sapien
gacggacactttcccattacagtgc

SEQ ID NO: 4377588 - DNA, 25 bp, Homo sapien
cactgggttgattgacggacacttt

SEQ ID NO: 4377589 - DNA, 25 bp, Homo sapien
gcaatttgggaaatcgcactgttaa

SEQ ID NO: 4377590 - DNA, 25 bp, Homo sapien
gataagcagaggtagcattttcaat

SEQ ID NO: 4377591 - DNA, 25 bp, Homo sapien
cattcctgtggatctgtcctgtagc

SEQ ID NO: 4377592 - DNA, 25 bp, Homo sapien
ccctttggacaaggtaggtatgcct

SEQ ID NO: 4377593 - DNA, 25 bp, Homo sapien
gtagcctttccacgctatcctcagg

SEQ ID NO: 4377594 - DNA, 25 bp, Homo sapien
ccaagccatgctgggttgaaataag

SEQ ID NO: 4377595 - DNA, 25 bp, Homo sapien
aagccatgctgggttgaaataagga

SEQ ID NO: 4377596 - DNA, 25 bp, Homo sapien
tgattggatttgattttaatagaac

SEQ ID NO: 4377597 - DNA, 25 bp, Homo sapien
tgattttaatagaacataacattga

SEQ ID NO: 4377598 - DNA, 25 bp, Homo sapien
tgaaccaggttgacagctaatgatt

SEQ ID NO: 4377599 - DNA, 25 bp, Homo sapien
ctaagtaagttgaaccaggttgaca

SEQ ID NO: 4377600 - DNA, 25 bp, Homo sapien
taagttgaaccaggttgacagctaa

SEQ ID NO: 4377601 - DNA, 25 bp, Homo sapien
atccaaaactgtttactccttcaag

SEQ ID NO: 4377602 - DNA, 25 bp, Homo sapien
tgtggtccatttgcccttgctctgg

SEQ ID NO: 4377603 - DNA, 25 bp, Homo sapien
cttctccagctattgtggtccattt

SEQ ID NO: 4377604 - DNA, 25 bp, Homo sapien
ttgctctgggctagttccttggtaa

SEQ ID NO: 4377605 - DNA, 25 bp, Homo sapien
ccttgctctgggctagttccttggt

SEQ ID NO: 4377606 - DNA, 25 bp, Homo sapien
ggagtatggattttgctgggtcctc

SEQ ID NO: 4377607 - DNA, 25 bp, Homo sapien
gatgccatgacaggagtatggattt

SEQ ID NO: 4377608 - DNA, 25 bp, Homo sapien
atgccatgacaggagtatggatttt

SEQ ID NO: 4377609 - DNA, 25 bp, Homo sapien
aataatctactaggatttttataag

SEQ ID NO: 4377610 - DNA, 25 bp, Homo sapien
tcagaaaggtcagggtttatatagg

SEQ ID NO: 4377611 - DNA, 25 bp, Homo sapien
cacaaatacttaggtacttcagaaa

SEQ ID NO: 4377612 - DNA, 25 bp, Homo sapien
tcagttgaagaagcccacaaatact

SEQ ID NO: 4377613 - DNA, 25 bp, Homo sapien
gacttcctcaactaactgaaggtcg

SEQ ID NO: 4377614 - DNA, 25 bp, Homo sapien
tgctaagtgctgtctttcaatgagc

SEQ ID NO: 4377615 - DNA, 25 bp, Homo sapien
gagcttgtctgtgaagacttcctca

SEQ ID NO: 4377616 - DNA, 25 bp, Homo sapien
ccctcggtgtggcagcagttgctga

SEQ ID NO: 4377617 - DNA, 25 bp, Homo sapien
aggtggcatagtaggttttgcccca

SEQ ID NO: 4377618 - DNA, 25 bp, Homo sapien
tgagcattgttctctgggctagcaa

SEQ ID NO: 4377619 - DNA, 25 bp, Homo sapien
tctcaaagtgtcaaggcagcgaaac

SEQ ID NO: 4377620 - DNA, 25 bp, Homo sapien
cacatgtaatgggttggttctgaag

SEQ ID NO: 4377621 - DNA, 25 bp, Homo sapien
agaaccaggccaaaccacccgattg

SEQ ID NO: 4377622 - DNA, 25 bp, Homo sapien
cacccgattgttccaagacagtctg

SEQ ID NO: 4377623 - DNA, 25 bp, Homo sapien
gacagtctgtgttagttccattttc

SEQ ID NO: 4377624 - DNA, 25 bp, Homo sapien
gaatgcataggcctcatgcaatacc

SEQ ID NO: 4377625 - DNA, 25 bp, Homo sapien
ctgctgttatcatttctgtgggcat

SEQ ID NO: 4377626 - DNA, 25 bp, Homo sapien
cattgcctagatttaactgctgtta

SEQ ID NO: 4377627 - DNA, 25 bp, Homo sapien
ccttcccattgcctagatttaactg

SEQ ID NO: 4377628 - DNA, 25 bp, Homo sapien
ttaactgctgttatcatttctgtgg

SEQ ID NO: 4377629 - DNA, 25 bp, Homo sapien
tcaggcagagtttaatcagggctcc

SEQ ID NO: 4377630 - DNA, 25 bp, Homo sapien
gatgttacatttgagctgcacttgg

SEQ ID NO: 4377631 - DNA, 25 bp, Homo sapien
gctccagtttaccacatgcatcagt

SEQ ID NO: 4377632 - DNA, 25 bp, Homo sapien
gataccagagattgtagctgccaag

SEQ ID NO: 4377633 - DNA, 25 bp, Homo sapien
cagctcttgctctgttaacaatggg

SEQ ID NO: 4377634 - DNA, 25 bp, Homo sapien
tcactcatgaacactacaggcactg

SEQ ID NO: 4377635 - DNA, 25 bp, Homo sapien
tccataccaccagctgacatgagat

SEQ ID NO: 4377636 - DNA, 25 bp, Homo sapien
ggggctatgagctgaagtatattca

SEQ ID NO: 4377637 - DNA, 25 bp, Homo sapien
agaaatggattttttggtcctaatg

SEQ ID NO: 4377638 - DNA, 25 bp, Homo sapien
ttttggtcctaatgtcatcaacctc

SEQ ID NO: 4377639 - DNA, 25 bp, Homo sapien
ggattttttggtcctaatgtcatca

SEQ ID NO: 4377640 - DNA, 25 bp, Homo sapien
aatggattttttggtcctaatgtca

SEQ ID NO: 4377641 - DNA, 25 bp, Homo sapien
tattgaatacactgagttcccctcc

SEQ ID NO: 4377642 - DNA, 25 bp, Homo sapien
tctccttctcccagtggtatttttg

SEQ ID NO: 4377643 - DNA, 25 bp, Homo sapien
cagtggtatttttgctgtcattagc

SEQ ID NO: 4377644 - DNA, 25 bp, Homo sapien
tctcccagtggtatttttgctgtca

SEQ ID NO: 4377645 - DNA, 25 bp, Homo sapien
tgtggcatttgataaccagatttct

SEQ ID NO: 4377646 - DNA, 25 bp, Homo sapien
gcttctcaaagcacatagtctcctt

SEQ ID NO: 4377647 - DNA, 25 bp, Homo sapien
aatggtgttggaaattggctctgca

SEQ ID NO: 4377648 - DNA, 25 bp, Homo sapien
taaccagatttcttgtctgagctgg

SEQ ID NO: 4377649 - DNA, 25 bp, Homo sapien
tctcacatatttctttgtcattcat

SEQ ID NO: 4377650 - DNA, 25 bp, Homo sapien
ctctcacatatttctttgtcattca

SEQ ID NO: 4377651 - DNA, 25 bp, Homo sapien
tctctcacatatttctttgtcattc

SEQ ID NO: 4377652 - DNA, 25 bp, Homo sapien
cagtcagaacttgagttgccaagat

SEQ ID NO: 4377653 - DNA, 25 bp, Homo sapien
aacaacaacagtcagaacttgagtt

SEQ ID NO: 4377654 - DNA, 25 bp, Homo sapien
acaacagtcagaacttgagttgcca

SEQ ID NO: 4377655 - DNA, 25 bp, Homo sapien
ttgggggcggcaacaacaacagtca

SEQ ID NO: 4377656 - DNA, 25 bp, Homo sapien
ggccctgacaagctattcccaatga

SEQ ID NO: 4377657 - DNA, 25 bp, Homo sapien
tctttggacacaattgcagcttgag

SEQ ID NO: 4377658 - DNA, 25 bp, Homo sapien
tccctaggaaactcaacatgctgtc

SEQ ID NO: 4377659 - DNA, 25 bp, Homo sapien
tgcccagcaggttgccgtgtcattc

SEQ ID NO: 4377660 - DNA, 25 bp, Homo sapien
atgtaactgtgccaacaatggccat

SEQ ID NO: 4377661 - DNA, 25 bp, Homo sapien
aatgtaactgtgccaacaatggcca

SEQ ID NO: 4377662 - DNA, 25 bp, Homo sapien
ctgacaagaaccttgcccataactt

SEQ ID NO: 4377663 - DNA, 25 bp, Homo sapien
ttctcctgacaagaaccttgcccat

SEQ ID NO: 4377664 - DNA, 25 bp, Homo sapien
attctcctgacaagaaccttgccca

SEQ ID NO: 4377665 - DNA, 25 bp, Homo sapien
ctcctgacaagaaccttgcccataa

SEQ ID NO: 4377666 - DNA, 25 bp, Homo sapien
cccagttttgccttcgtaacacttg

SEQ ID NO: 4377667 - DNA, 25 bp, Homo sapien
tttgccttcgtaacacttgtaggac

SEQ ID NO: 4377668 - DNA, 25 bp, Homo sapien
agttttgccttcgtaacacttgtag

SEQ ID NO: 4377669 - DNA, 25 bp, Homo sapien
gccttcgtaacacttgtaggacatt

SEQ ID NO: 4377670 - DNA, 25 bp, Homo sapien
tactgagcatatcgtagtcgcagct

SEQ ID NO: 4377671 - DNA, 25 bp, Homo sapien
tatcgtagtcgcagctcataacttt

SEQ ID NO: 4377672 - DNA, 25 bp, Homo sapien
gtcgcagctcataactttatcatgt

SEQ ID NO: 4377673 - DNA, 25 bp, Homo sapien
catttttactgagcatatcgtagtc

SEQ ID NO: 4377674 - DNA, 25 bp, Homo sapien
catcatgtttttccactctagttac

SEQ ID NO: 4377675 - DNA, 25 bp, Homo sapien
ctaggtgacatcatgtttttccact

SEQ ID NO: 4377676 - DNA, 25 bp, Homo sapien
gacatcatgtttttccactctagtt

SEQ ID NO: 4377677 - DNA, 25 bp, Homo sapien
gtgacatcatgtttttccactctag

SEQ ID NO: 4377678 - DNA, 25 bp, Homo sapien
cagtccggttaacttcagacctatg

SEQ ID NO: 4377679 - DNA, 25 bp, Homo sapien
cttcagacctatggtatagacattc

SEQ ID NO: 4377680 - DNA, 25 bp, Homo sapien
ccggttaacttcagacctatggtat

SEQ ID NO: 4377681 - DNA, 25 bp, Homo sapien
taacttcagacctatggtatagaca

SEQ ID NO: 4377682 - DNA, 25 bp, Homo sapien
tctccagtctgcaactaagcctgcg

SEQ ID NO: 4377683 - DNA, 25 bp, Homo sapien
gagccattgtggctccttgccaagt

SEQ ID NO: 4377684 - DNA, 25 bp, Homo sapien
taagcatccatttgtgagccattgt

SEQ ID NO: 4377685 - DNA, 25 bp, Homo sapien
ctggaaaggtccacatttacagtta

SEQ ID NO: 4377686 - DNA, 25 bp, Homo sapien
acacttggcaggatttggccagtgc

SEQ ID NO: 4377687 - DNA, 25 bp, Homo sapien
ctgctcacacttggcaggatttggc

SEQ ID NO: 4377688 - DNA, 25 bp, Homo sapien
cttggcaggatttggccagtgctgc

SEQ ID NO: 4377689 - DNA, 25 bp, Homo sapien
ccagtgctgctgctcattaggggct

SEQ ID NO: 4377690 - DNA, 25 bp, Homo sapien
tatttggtgagtggttacactgctt

SEQ ID NO: 4377691 - DNA, 25 bp, Homo sapien
ctgaggtttaggttttatgtgggat

SEQ ID NO: 4377692 - DNA, 25 bp, Homo sapien
gaagaggcaatgaaaccagtgcctg

SEQ ID NO: 4377693 - DNA, 25 bp, Homo sapien
tggtgagtggttacactgcttttca

SEQ ID NO: 4377694 - DNA, 25 bp, Homo sapien
tcatctgtcctgcaatagcttagtg

SEQ ID NO: 4377695 - DNA, 25 bp, Homo sapien
tgcaatagcttagtgttcagaagtt

SEQ ID NO: 4377696 - DNA, 25 bp, Homo sapien
tgtcctgcaatagcttagtgttcag

SEQ ID NO: 4377697 - DNA, 25 bp, Homo sapien
tctgtcctgcaatagcttagtgttc

SEQ ID NO: 4377698 - DNA, 25 bp, Homo sapien
ttttccagtccaatacccttcagga

SEQ ID NO: 4377699 - DNA, 25 bp, Homo sapien
tttggttctaagcacgttggtctca

SEQ ID NO: 4377700 - DNA, 25 bp, Homo sapien
ttcaggagtccaccgcaatgctgta

SEQ ID NO: 4377701 - DNA, 25 bp, Homo sapien
cgttggtctcatctcgaatgacttt

SEQ ID NO: 4377702 - DNA, 25 bp, Homo sapien
agatgaataacaatgtggttggttt

SEQ ID NO: 4377703 - DNA, 25 bp, Homo sapien
taatatttactctgtcttcactctc

SEQ ID NO: 4377704 - DNA, 25 bp, Homo sapien
aatatttactctgtcttcactctcc

SEQ ID NO: 4377705 - DNA, 25 bp, Homo sapien
tagtgaacattatgtctcctgttcc

SEQ ID NO: 4377706 - DNA, 25 bp, Homo sapien
gtagtgaacattatgtctcctgttc

SEQ ID NO: 4377707 - DNA, 25 bp, Homo sapien
gtgaacattatgtctcctgttcctt

SEQ ID NO: 4377708 - DNA, 25 bp, Homo sapien
agtgaacattatgtctcctgttcct

SEQ ID NO: 4377709 - DNA, 25 bp, Homo sapien
aaagatactgcttcctacaagaaat

SEQ ID NO: 4377710 - DNA, 25 bp, Homo sapien
caagaaatgcttggaaggagctaaa

SEQ ID NO: 4377711 - DNA, 25 bp, Homo sapien
aagatactgcttcctacaagaaatg

SEQ ID NO: 4377712 - DNA, 25 bp, Homo sapien
atgcttggaaggagctaaaactttt

SEQ ID NO: 4377713 - DNA, 25 bp, Homo sapien
tctccttgagctgaatagaattaaa

SEQ ID NO: 4377714 - DNA, 25 bp, Homo sapien
tccactggttctgggttgtgtatga

SEQ ID NO: 4377715 - DNA, 25 bp, Homo sapien
cttgctcttgcctatccactggttc

SEQ ID NO: 4377716 - DNA, 25 bp, Homo sapien
tccctttgattgtgtaagctgttcc

SEQ ID NO: 4377717 - DNA, 25 bp, Homo sapien
cagatgcctaaatgtctcctcggca

SEQ ID NO: 4377718 - DNA, 25 bp, Homo sapien
ccaagagtcagatgcctaaatgtct

SEQ ID NO: 4377719 - DNA, 25 bp, Homo sapien
ctcggcatatttgcatcctgacagc

SEQ ID NO: 4377720 - DNA, 25 bp, Homo sapien
gattagaggggtgcacatttcctca

SEQ ID NO: 4377721 - DNA, 25 bp, Homo sapien
ttggcactctcatacacaggtcggg

SEQ ID NO: 4377722 - DNA, 25 bp, Homo sapien
aaatctggttcctcaataaagggca

SEQ ID NO: 4377723 - DNA, 25 bp, Homo sapien
tgaacataacatcgcacaagcttgc

SEQ ID NO: 4377724 - DNA, 25 bp, Homo sapien
cctcagacgtcataaagtagtggct

SEQ ID NO: 4377725 - DNA, 25 bp, Homo sapien
tcatacgtggcttatggactggata

SEQ ID NO: 4377726 - DNA, 25 bp, Homo sapien
gcttatggactggatagcactggat

SEQ ID NO: 4377727 - DNA, 25 bp, Homo sapien
gactggatagcactggattccgccg

SEQ ID NO: 4377728 - DNA, 25 bp, Homo sapien
tggatagcactggattccgccgcag

SEQ ID NO: 4377729 - DNA, 25 bp, Homo sapien
ctgtgggatgtagaatggagggact

SEQ ID NO: 4377730 - DNA, 25 bp, Homo sapien
tgtgggatgtagaatggagggactc

SEQ ID NO: 4377731 - DNA, 25 bp, Homo sapien
gggatgtagaatggagggactcctt

SEQ ID NO: 4377732 - DNA, 25 bp, Homo sapien
tgggatgtagaatggagggactcct

SEQ ID NO: 4377733 - DNA, 25 bp, Homo sapien
gatatagacctaccttgacagagct

SEQ ID NO: 4377734 - DNA, 25 bp, Homo sapien
gaaaccacatgggattactgctggc

SEQ ID NO: 4377735 - DNA, 25 bp, Homo sapien
tactgctggcctttagtgcctaggg

SEQ ID NO: 4377736 - DNA, 25 bp, Homo sapien
tttataaccgaaagcactgaaggtg

SEQ ID NO: 4377737 - DNA, 25 bp, Homo sapien
aagttgaggtggatcaaatcagctc

SEQ ID NO: 4377738 - DNA, 25 bp, Homo sapien
gagagtcccctatttactgccaagc

SEQ ID NO: 4377739 - DNA, 25 bp, Homo sapien
aagtcctgccaaagacattccactg

SEQ ID NO: 4377740 - DNA, 25 bp, Homo sapien
tcagtcctggcacccataagttgag

SEQ ID NO: 4377741 - DNA, 25 bp, Homo sapien
tagacacggaaaatgactctgaggt

SEQ ID NO: 4377742 - DNA, 25 bp, Homo sapien
taattgacctgaatgaacaatccgg

SEQ ID NO: 4377743 - DNA, 25 bp, Homo sapien
caatccggttgagtgtggatgtcaa

SEQ ID NO: 4377744 - DNA, 25 bp, Homo sapien
tttgtaacaaaaacactgaggctct

SEQ ID NO: 4377745 - DNA, 25 bp, Homo sapien
cctctggcacatgggaagtactaaa

SEQ ID NO: 4377746 - DNA, 25 bp, Homo sapien
ttttgaggctatctgtgaagtgcct

SEQ ID NO: 4377747 - DNA, 25 bp, Homo sapien
tttggactttctgtgtaacggctgc

SEQ ID NO: 4377748 - DNA, 25 bp, Homo sapien
tgaagtgccttatatgatctagagc

SEQ ID NO: 4377749 - DNA, 25 bp, Homo sapien
cagggcactggtttcttcatagtca

SEQ ID NO: 4377750 - DNA, 25 bp, Homo sapien
ctcactggggatgtcttgcaactca

SEQ ID NO: 4377751 - DNA, 25 bp, Homo sapien
tgtaaattacttgtcactggttcct

SEQ ID NO: 4377752 - DNA, 25 bp, Homo sapien
tgtcttgcaactcatctccagggca

SEQ ID NO: 4377753 - DNA, 25 bp, Homo sapien
atgataaaagggagccagtgcatca

SEQ ID NO: 4377754 - DNA, 25 bp, Homo sapien
gatgataaaagggagccagtgcatc

SEQ ID NO: 4377755 - DNA, 25 bp, Homo sapien
agtgcatcagggcagtaaaaacaag

SEQ ID NO: 4377756 - DNA, 25 bp, Homo sapien
gtaaaaacaaggatgttcataccca

SEQ ID NO: 4377757 - DNA, 25 bp, Homo sapien
gattggctgccatggttgctgttcc

SEQ ID NO: 4377758 - DNA, 25 bp, Homo sapien
ctttgtcatccagaatcgcacctgt

SEQ ID NO: 4377759 - DNA, 25 bp, Homo sapien
cccaatgaaatttcgaatttctgtg

SEQ ID NO: 4377760 - DNA, 25 bp, Homo sapien
tccagttcagaatgaggcgacgatg

SEQ ID NO: 4377761 - DNA, 25 bp, Homo sapien
cacaggttggctctgcacacatatg

SEQ ID NO: 4377762 - DNA, 25 bp, Homo sapien
taaatatgtgctggcaaggtcccag

SEQ ID NO: 4377763 - DNA, 25 bp, Homo sapien
taagggtacacacagttagagtggc

SEQ ID NO: 4377764 - DNA, 25 bp, Homo sapien
gccagctggcaaatgttacttaatg

SEQ ID NO: 4377765 - DNA, 25 bp, Homo sapien
gatatgctaaatgatctgtcacagt

SEQ ID NO: 4377766 - DNA, 25 bp, Homo sapien
gaacatgcctttgcaagttagaaga

SEQ ID NO: 4377767 - DNA, 25 bp, Homo sapien
cataagtgacacttaaatggcttct

SEQ ID NO: 4377768 - DNA, 25 bp, Homo sapien
ggtttgttgaccaaaacacctatca

SEQ ID NO: 4377769 - DNA, 25 bp, Homo sapien
gaacacataacacagtcatgggcag

SEQ ID NO: 4377770 - DNA, 25 bp, Homo sapien
tgggcagtatactattaagccttcc

SEQ ID NO: 4377771 - DNA, 25 bp, Homo sapien
tcttggccagaaaaagaatgttcta

SEQ ID NO: 4377772 - DNA, 25 bp, Homo sapien
gacatggaggtcagacgagcctttg

SEQ ID NO: 4377773 - DNA, 25 bp, Homo sapien
gcattgttaaccctgatcatttgga

SEQ ID NO: 4377774 - DNA, 25 bp, Homo sapien
tcctaggtttgggtggtcctcctgc

SEQ ID NO: 4377775 - DNA, 25 bp, Homo sapien
gctgacatgtctaacttctggcatt

SEQ ID NO: 4377776 - DNA, 25 bp, Homo sapien
cagtgcatcctatcaagggtacatg

SEQ ID NO: 4377777 - DNA, 25 bp, Homo sapien
caagtgccgtgttaggtttgcagac

SEQ ID NO: 4377778 - DNA, 25 bp, Homo sapien
tttgcagaccttggaaaaatcttgc

SEQ ID NO: 4377779 - DNA, 25 bp, Homo sapien
ccgtgttaggtttgcagaccttgga

SEQ ID NO: 4377780 - DNA, 25 bp, Homo sapien
tgggttctcaagtgccgtgttaggt

SEQ ID NO: 4377781 - DNA, 25 bp, Homo sapien
tttcccttccgcagaaggttctctg

SEQ ID NO: 4377782 - DNA, 25 bp, Homo sapien
ttgggaggcgccctgaagttgaaca

SEQ ID NO: 4377783 - DNA, 25 bp, Homo sapien
catagagggcactgactgtaagagc

SEQ ID NO: 4377784 - DNA, 25 bp, Homo sapien
cagggcactgaagctctctagcttt

SEQ ID NO: 4377785 - DNA, 25 bp, Homo sapien
cacaagaccatgaagcgtttggcat

SEQ ID NO: 4377786 - DNA, 25 bp, Homo sapien
aaagcacaagaccatgaagcgtttg

SEQ ID NO: 4377787 - DNA, 25 bp, Homo sapien
ggtaaaagcacaagaccatgaagcg

SEQ ID NO: 4377788 - DNA, 25 bp, Homo sapien
taaaagcacaagaccatgaagcgtt

SEQ ID NO: 4377789 - DNA, 25 bp, Homo sapien
tcaaagagctgtgatgctagaccag

SEQ ID NO: 4377790 - DNA, 25 bp, Homo sapien
gcaaagtcttaacagcatggcctga

SEQ ID NO: 4377791 - DNA, 25 bp, Homo sapien
gggcagtgtgccattagaaagctca

SEQ ID NO: 4377792 - DNA, 25 bp, Homo sapien
tacaaattgcaacgtacagggtact

SEQ ID NO: 4377793 - DNA, 25 bp, Homo sapien
aagttctctgatcaggcagttggaa

SEQ ID NO: 4377794 - DNA, 25 bp, Homo sapien
caagttctctgatcaggcagttgga

SEQ ID NO: 4377795 - DNA, 25 bp, Homo sapien
ccaagttctctgatcaggcagttgg

SEQ ID NO: 4377796 - DNA, 25 bp, Homo sapien
ttgtgggtgaaacaagaatcctgga

SEQ ID NO: 4377797 - DNA, 25 bp, Homo sapien
gaaggcctcaagtatttctctttta

SEQ ID NO: 4377798 - DNA, 25 bp, Homo sapien
gcttcaagtgggtcagttagttttc

SEQ ID NO: 4377799 - DNA, 25 bp, Homo sapien
gggtgaaacaagaatcctggagaag

SEQ ID NO: 4377800 - DNA, 25 bp, Homo sapien
tcatacatctgctcatatttcgtca

SEQ ID NO: 4377801 - DNA, 25 bp, Homo sapien
caaacagaatgatccaactttcaga

SEQ ID NO: 4377802 - DNA, 25 bp, Homo sapien
tttacagtggaaataccgcctttca

SEQ ID NO: 4377803 - DNA, 25 bp, Homo sapien
gagttcactagatcaaacaacttca

SEQ ID NO: 4377804 - DNA, 25 bp, Homo sapien
cacgtggttttttcgaggctcagtc

SEQ ID NO: 4377805 - DNA, 25 bp, Homo sapien
catctgaagcaggtcttgattcgac

SEQ ID NO: 4377806 - DNA, 25 bp, Homo sapien
tgcatgctgcaaggaaccatctgaa

SEQ ID NO: 4377807 - DNA, 25 bp, Homo sapien
caagtctctatcaggaaatgggtac

SEQ ID NO: 4377808 - DNA, 25 bp, Homo sapien
gagcccgaggttgtttccaggtcac

SEQ ID NO: 4377809 - DNA, 25 bp, Homo sapien
gcccgggttggcatgactcatatta

SEQ ID NO: 4377810 - DNA, 25 bp, Homo sapien
gcatgcatgcgcttatgacggcaaa

SEQ ID NO: 4377811 - DNA, 25 bp, Homo sapien
tattggcgccaaaatagtcagcaag

SEQ ID NO: 4377812 - DNA, 25 bp, Homo sapien
gaatctcaggctttatgtcaattgc

SEQ ID NO: 4377813 - DNA, 25 bp, Homo sapien
agaatctcaggctttatgtcaattg

SEQ ID NO: 4377814 - DNA, 25 bp, Homo sapien
aaagaatctcaggctttatgtcaat

SEQ ID NO: 4377815 - DNA, 25 bp, Homo sapien
atctcaggctttatgtcaattgctt

SEQ ID NO: 4377816 - DNA, 25 bp, Homo sapien
ttccccaagggagatgagagcaccc

SEQ ID NO: 4377817 - DNA, 25 bp, Homo sapien
caaaagaaagctgtgtcgaggcaaa

SEQ ID NO: 4377818 - DNA, 25 bp, Homo sapien
agtaggtggtcagatcagatgtccc

SEQ ID NO: 4377819 - DNA, 25 bp, Homo sapien
catcaggtcctgtagtagtgtctca

SEQ ID NO: 4377820 - DNA, 25 bp, Homo sapien
taaatagccctactggattggacca

SEQ ID NO: 4377821 - DNA, 25 bp, Homo sapien
gattaaatcctacaacctgtggagg

SEQ ID NO: 4377822 - DNA, 25 bp, Homo sapien
gagggctggagtgttgaaaacttac

SEQ ID NO: 4377823 - DNA, 25 bp, Homo sapien
gctaacacggtgaccctctaaaggc

SEQ ID NO: 4377824 - DNA, 25 bp, Homo sapien
cgacgaagtggcaaacgttttgcca

SEQ ID NO: 4377825 - DNA, 25 bp, Homo sapien
gatgtgcttgtgttgtttgaggccc

SEQ ID NO: 4377826 - DNA, 25 bp, Homo sapien
cgttttgccacactccgggcatgca

SEQ ID NO: 4377827 - DNA, 25 bp, Homo sapien
gacatgctgagagcgaatgtgccgc

SEQ ID NO: 4377828 - DNA, 25 bp, Homo sapien
catctggtggcgaattaaattggac

SEQ ID NO: 4377829 - DNA, 25 bp, Homo sapien
tccactgtcatgtgacatctggtgg

SEQ ID NO: 4377830 - DNA, 25 bp, Homo sapien
ccagttaaatgccttgggacactga

SEQ ID NO: 4377831 - DNA, 25 bp, Homo sapien
cagtatgtgacagcatgtgtttctc

SEQ ID NO: 4377832 - DNA, 25 bp, Homo sapien
acaactctattcgtactggcacaag

SEQ ID NO: 4377833 - DNA, 25 bp, Homo sapien
tctgagcacaggtggtgatacctct

SEQ ID NO: 4377834 - DNA, 25 bp, Homo sapien
caattaagacctttgtgcacctaga

SEQ ID NO: 4377835 - DNA, 25 bp, Homo sapien
tgtgtggagtcataagaaaggccct

SEQ ID NO: 4377836 - DNA, 25 bp, Homo sapien
aaatttgggcacaattatattaaag

SEQ ID NO: 4377837 - DNA, 25 bp, Homo sapien
aattatattaaagggacatgctgtg

SEQ ID NO: 4377838 - DNA, 25 bp, Homo sapien
gacaccagagatattactttacagt

SEQ ID NO: 4377839 - DNA, 25 bp, Homo sapien
tgacaccagagatattactttacag

SEQ ID NO: 4377840 - DNA, 25 bp, Homo sapien
tcttcgcagcgatattgccgttctt

SEQ ID NO: 4377841 - DNA, 25 bp, Homo sapien
acttttggtgatctgctagttcagc

SEQ ID NO: 4377842 - DNA, 25 bp, Homo sapien
tagttcagccttagattcaaagagc

SEQ ID NO: 4377843 - DNA, 25 bp, Homo sapien
tgcaaatcaggaaaaacttggtcac

SEQ ID NO: 4377844 - DNA, 25 bp, Homo sapien
catggggatagtcttcgctcttcat

SEQ ID NO: 4377845 - DNA, 25 bp, Homo sapien
tttcatggggatagtcttcgctctt

SEQ ID NO: 4377846 - DNA, 25 bp, Homo sapien
agtttcatggggatagtcttcgctc

SEQ ID NO: 4377847 - DNA, 25 bp, Homo sapien
tcatggggatagtcttcgctcttca

SEQ ID NO: 4377848 - DNA, 25 bp, Homo sapien
ccggcgcaatgtctgcaactactct

SEQ ID NO: 4377849 - DNA, 25 bp, Homo sapien
tctcccggcgcaatgtctgcaacta

SEQ ID NO: 4377850 - DNA, 25 bp, Homo sapien
gaagctcctctcccggcgcaatgtc

SEQ ID NO: 4377851 - DNA, 25 bp, Homo sapien
cctctcccggcgcaatgtctgcaac

SEQ ID NO: 4377852 - DNA, 25 bp, Homo sapien
tagcaaaccacacgtactcacagag

SEQ ID NO: 4377853 - DNA, 25 bp, Homo sapien
ggctagctgcgtcacatatatcctg

SEQ ID NO: 4377854 - DNA, 25 bp, Homo sapien
cagaagggtgctcccataccagggt

SEQ ID NO: 4377855 - DNA, 25 bp, Homo sapien
gcaagtttgcaaaagtagcgccttc

SEQ ID NO: 4377856 - DNA, 25 bp, Homo sapien
ccaagagccactgcctttctcctga

SEQ ID NO: 4377857 - DNA, 25 bp, Homo sapien
tccaagagccactgcctttctcctg

SEQ ID NO: 4377858 - DNA, 25 bp, Homo sapien
ttccaagagccactgcctttctcct

SEQ ID NO: 4377859 - DNA, 25 bp, Homo sapien
gatagaatccagactaacttggcaa

SEQ ID NO: 4377860 - DNA, 25 bp, Homo sapien
aaacaatggacttctctcaacagtt

SEQ ID NO: 4377861 - DNA, 25 bp, Homo sapien
tccttggaagtacactgagaacagt

SEQ ID NO: 4377862 - DNA, 25 bp, Homo sapien
gcactttgtatcctattaaccctag

SEQ ID NO: 4377863 - DNA, 25 bp, Homo sapien
tgtagtccactattaatcatgtctc

SEQ ID NO: 4377864 - DNA, 25 bp, Homo sapien
tttactcaatccaatgtgaacagtc

SEQ ID NO: 4377865 - DNA, 25 bp, Homo sapien
catgtgaagaatattgagtgcatac

SEQ ID NO: 4377866 - DNA, 25 bp, Homo sapien
gaaattgatggatacactgtaacta

SEQ ID NO: 4377867 - DNA, 25 bp, Homo sapien
tctgggcatgcttccccatatagca

SEQ ID NO: 4377868 - DNA, 25 bp, Homo sapien
tggcaagcgccagatataatgaggg

SEQ ID NO: 4377869 - DNA, 25 bp, Homo sapien
caataagaatgtccctcgaagttcc

SEQ ID NO: 4377870 - DNA, 25 bp, Homo sapien
gacattccaagccatgaaaggcaaa

SEQ ID NO: 4377871 - DNA, 25 bp, Homo sapien
cagaagcgtgaattatgaatgacct

SEQ ID NO: 4377872 - DNA, 25 bp, Homo sapien
gaatggaacttcagcaattggaggg

SEQ ID NO: 4377873 - DNA, 25 bp, Homo sapien
taggtagccgtttgcatgtttgaac

SEQ ID NO: 4377874 - DNA, 25 bp, Homo sapien
tgaatgaccttcaacctatgcagga

SEQ ID NO: 4377875 - DNA, 25 bp, Homo sapien
cactgtagagtcttgttgccgttca

SEQ ID NO: 4377876 - DNA, 25 bp, Homo sapien
tgccgttcattaaccacaagggagc

SEQ ID NO: 4377877 - DNA, 25 bp, Homo sapien
tgccacatcagctaggatcgtcctg

SEQ ID NO: 4377878 - DNA, 25 bp, Homo sapien
gaacaatgcctgttccaactgaaaa

SEQ ID NO: 4377879 - DNA, 25 bp, Homo sapien
acatcaggcattagataatctctta

SEQ ID NO: 4377880 - DNA, 25 bp, Homo sapien
tcaggcattagataatctcttatcg

SEQ ID NO: 4377881 - DNA, 25 bp, Homo sapien
ggcattagataatctcttatcgaca

SEQ ID NO: 4377882 - DNA, 25 bp, Homo sapien
cattagataatctcttatcgacaca

SEQ ID NO: 4377883 - DNA, 25 bp, Homo sapien
gctctgcctttcagggccaattctt

SEQ ID NO: 4377884 - DNA, 25 bp, Homo sapien
tgctctgcctttcagggccaattct

SEQ ID NO: 4377885 - DNA, 25 bp, Homo sapien
gatcatttatctggcatgcaacaag

SEQ ID NO: 4377886 - DNA, 25 bp, Homo sapien
gactggcatctatgcagaacttcac

SEQ ID NO: 4377887 - DNA, 25 bp, Homo sapien
gctgatcataacagccagcgaatct

SEQ ID NO: 4377888 - DNA, 25 bp, Homo sapien
cagcgaatctaatgtacttgagcca

SEQ ID NO: 4377889 - DNA, 25 bp, Homo sapien
tacttcaagaaaaacccagtgctcc

SEQ ID NO: 4377890 - DNA, 25 bp, Homo sapien
aagggctttagtcaagaagccctat

SEQ ID NO: 4377891 - DNA, 25 bp, Homo sapien
aaacccagtgctccaagggctttag

SEQ ID NO: 4377892 - DNA, 25 bp, Homo sapien
gctttagtcaagaagccctatgaat

SEQ ID NO: 4377893 - DNA, 25 bp, Homo sapien
aaagaaaaatcgaacataagatagg

SEQ ID NO: 4377894 - DNA, 25 bp, Homo sapien
taacaacgacagaagtgtacactta

SEQ ID NO: 4377895 - DNA, 25 bp, Homo sapien
aagatagggatattattaaacacac

SEQ ID NO: 4377896 - DNA, 25 bp, Homo sapien
gaaattgaagggcaataagtcgtcc

SEQ ID NO: 4377897 - DNA, 25 bp, Homo sapien
caaagtcaagaagcatccatcccct

SEQ ID NO: 4377898 - DNA, 25 bp, Homo sapien
tgtttcttcaactctcagtgctgag

SEQ ID NO: 4377899 - DNA, 25 bp, Homo sapien
gttctcctgacacaccaaagaaata

SEQ ID NO: 4377900 - DNA, 25 bp, Homo sapien
agagagacgtggaaaacttgttaat

SEQ ID NO: 4377901 - DNA, 25 bp, Homo sapien
gccccaagacaaaagcttagctttc

SEQ ID NO: 4377902 - DNA, 25 bp, Homo sapien
ctgttatacgattattcaaagattt

SEQ ID NO: 4377903 - DNA, 25 bp, Homo sapien
gaatgtctttttactaatctgttat

SEQ ID NO: 4377904 - DNA, 25 bp, Homo sapien
cctctcaatattcttgccccaagac

SEQ ID NO: 4377905 - DNA, 25 bp, Homo sapien
tttgatttgctagcagaactgcatt

SEQ ID NO: 4377906 - DNA, 25 bp, Homo sapien
caaatgtcttaatcgtgtcggaaat

SEQ ID NO: 4377907 - DNA, 25 bp, Homo sapien
tcccaaatgtcttaatcgtgtcgga

SEQ ID NO: 4377908 - DNA, 25 bp, Homo sapien
tgatttgctagcagaactgcatttg

SEQ ID NO: 4377909 - DNA, 25 bp, Homo sapien
tttaaaagctgtcaacctccaaaga

SEQ ID NO: 4377910 - DNA, 25 bp, Homo sapien
gtcaacctccaaagatagcttaaaa

SEQ ID NO: 4377911 - DNA, 25 bp, Homo sapien
ataaagtaacgacacatcttcagtc

SEQ ID NO: 4377912 - DNA, 25 bp, Homo sapien
taaaataaagtaacgacacatcttc

SEQ ID NO: 4377913 - DNA, 25 bp, Homo sapien
cacacgatgttggacagcaaagctg

SEQ ID NO: 4377914 - DNA, 25 bp, Homo sapien
aatctagccaaagggtccgaatgtg

SEQ ID NO: 4377915 - DNA, 25 bp, Homo sapien
gaatgtgactttctcgcgaagcagc

SEQ ID NO: 4377916 - DNA, 25 bp, Homo sapien
cgcgaagcagcacacgatgttggac

SEQ ID NO: 4377917 - DNA, 25 bp, Homo sapien
gcaccgtttcgcaggaggaacaagg

SEQ ID NO: 4377918 - DNA, 25 bp, Homo sapien
gagacgtgtccagaccgcaccgttt

SEQ ID NO: 4377919 - DNA, 25 bp, Homo sapien
gaaatcgcccggcttagcaacgtag

SEQ ID NO: 4377920 - DNA, 25 bp, Homo sapien
gcaacgtagataagcagcagggctc

SEQ ID NO: 4377921 - DNA, 25 bp, Homo sapien
aacgatcccgagcaacatttagaga

SEQ ID NO: 4377922 - DNA, 25 bp, Homo sapien
tatggcctcaactcagcaataatag

SEQ ID NO: 4377923 - DNA, 25 bp, Homo sapien
ccaggaccacgcgtttcggatttat

SEQ ID NO: 4377924 - DNA, 25 bp, Homo sapien
tatcagcccgatgtgtaatgaaagt

SEQ ID NO: 4377925 - DNA, 25 bp, Homo sapien
gagaggtcacaaaaaggtcgccaag

SEQ ID NO: 4377926 - DNA, 25 bp, Homo sapien
agccgccgggtttctatttcatgaa

SEQ ID NO: 4377927 - DNA, 25 bp, Homo sapien
gacagactgattatggatgcaccat

SEQ ID NO: 4377928 - DNA, 25 bp, Homo sapien
gatctgctcggccatccagaaagaa

SEQ ID NO: 4377929 - DNA, 25 bp, Homo sapien
taagcgagtctagggacacttgcgg

SEQ ID NO: 4377930 - DNA, 25 bp, Homo sapien
ctttagctgcaaacgggataacaca

SEQ ID NO: 4377931 - DNA, 25 bp, Homo sapien
tggaaagtgtgctgacggttaaact

SEQ ID NO: 4377932 - DNA, 25 bp, Homo sapien
tgactaatttgtttcggtggcctgt

SEQ ID NO: 4377933 - DNA, 25 bp, Homo sapien
gatggcattgcgctccgaaataaag

SEQ ID NO: 4377934 - DNA, 25 bp, Homo sapien
aaattggaccggctcgagctatgag

SEQ ID NO: 4377935 - DNA, 25 bp, Homo sapien
ggaaccgattgcttcagacagtgcg

SEQ ID NO: 4377936 - DNA, 25 bp, Homo sapien
gatacttgcaggtacggcaggacgc

SEQ ID NO: 4377937 - DNA, 25 bp, Homo sapien
caggcgccggcaacacagctctgcc

SEQ ID NO: 4377938 - DNA, 25 bp, Homo sapien
ccgccaggcgccggcaacacagctc

SEQ ID NO: 4377939 - DNA, 25 bp, Homo sapien
ccctccgagaccttggaagatgtac

SEQ ID NO: 4377940 - DNA, 25 bp, Homo sapien
cctgagagaaggctattcctacgtc

SEQ ID NO: 4377941 - DNA, 25 bp, Homo sapien
aagagtgaacgcttaccctccgaga

SEQ ID NO: 4377942 - DNA, 25 bp, Homo sapien
cagtccaggcatgtagacatcagcc

SEQ ID NO: 4377943 - DNA, 25 bp, Homo sapien
ttcagaatttagaggatatggacag

SEQ ID NO: 4377944 - DNA, 25 bp, Homo sapien
cactgccatcaaaaggggtctgacc

SEQ ID NO: 4377945 - DNA, 25 bp, Homo sapien
gggtctgacctggatatttacaaat

SEQ ID NO: 4377946 - DNA, 25 bp, Homo sapien
tatttacaaattccctgagccaaca

SEQ ID NO: 4377947 - DNA, 25 bp, Homo sapien
agccattgggctttccagccttttc

SEQ ID NO: 4377948 - DNA, 25 bp, Homo sapien
actgcaagccattgggctttccagc

SEQ ID NO: 4377949 - DNA, 25 bp, Homo sapien
tccagccttttctatgtggtcagcc

SEQ ID NO: 4377950 - DNA, 25 bp, Homo sapien
cagccttttctatgtggtcagccat

SEQ ID NO: 4377951 - DNA, 25 bp, Homo sapien
ctttgtgagtaaagtgaggattcca

SEQ ID NO: 4377952 - DNA, 25 bp, Homo sapien
ggattccaaaagtaccagagatgtg

SEQ ID NO: 4377953 - DNA, 25 bp, Homo sapien
aagtaccagagatgtgtcatagaaa

SEQ ID NO: 4377954 - DNA, 25 bp, Homo sapien
catagaaatagggttagtgacagtg

SEQ ID NO: 4377955 - DNA, 25 bp, Homo sapien
atttctccagtcacattgtttatag

SEQ ID NO: 4377956 - DNA, 25 bp, Homo sapien
ttataggaagtgaagttattcgtaa

SEQ ID NO: 4377957 - DNA, 25 bp, Homo sapien
ccagtcacattgtttataggaagtg

SEQ ID NO: 4377958 - DNA, 25 bp, Homo sapien
taggaagtgaagttattcgtaatca

SEQ ID NO: 4377959 - DNA, 25 bp, Homo sapien
aatgttccaatttggcagttgtagc

SEQ ID NO: 4377960 - DNA, 25 bp, Homo sapien
ttatgtgaatgttccaatttggcag

SEQ ID NO: 4377961 - DNA, 25 bp, Homo sapien
tgaatgttccaatttggcagttgta

SEQ ID NO: 4377962 - DNA, 25 bp, Homo sapien
tgtgaatgttccaatttggcagttg

SEQ ID NO: 4377963 - DNA, 25 bp, Homo sapien
aaggaagaggaccaagagggtatat

SEQ ID NO: 4377964 - DNA, 25 bp, Homo sapien
gatgaaggcaggtctacgttgagac

SEQ ID NO: 4377965 - DNA, 25 bp, Homo sapien
agaggaccaagagggtatatataaa

SEQ ID NO: 4377966 - DNA, 25 bp, Homo sapien
cccagatgaaggcaggtctacgttg

SEQ ID NO: 4377967 - DNA, 25 bp, Homo sapien
gagggaaggataaatctctttgctg

SEQ ID NO: 4377968 - DNA, 25 bp, Homo sapien
gataagatggaggaggacaataaag

SEQ ID NO: 4377969 - DNA, 25 bp, Homo sapien
ggagggaaggataaatctctttgct

SEQ ID NO: 4377970 - DNA, 25 bp, Homo sapien
gggagaatagatcagataagatgga

SEQ ID NO: 4377971 - DNA, 25 bp, Homo sapien
aagatcctgaataccccaggtgaaa

SEQ ID NO: 4377972 - DNA, 25 bp, Homo sapien
tagctaatcccggatcacacctctg

SEQ ID NO: 4377973 - DNA, 25 bp, Homo sapien
ttggtctaaccagagctgatgccca

SEQ ID NO: 4377974 - DNA, 25 bp, Homo sapien
ctgtccaggtggatcaatgcttggt

SEQ ID NO: 4377975 - DNA, 25 bp, Homo sapien
cttaaggtggtcagaggtaaaagct

SEQ ID NO: 4377976 - DNA, 25 bp, Homo sapien
tctggtttcaaagcattataatgca

SEQ ID NO: 4377977 - DNA, 25 bp, Homo sapien
caccataactacacccatttctggg

SEQ ID NO: 4377978 - DNA, 25 bp, Homo sapien
tacgttacacatgcacaacaccata

SEQ ID NO: 4377979 - DNA, 25 bp, Homo sapien
tataacaatcccaagaagatcttgc

SEQ ID NO: 4377980 - DNA, 25 bp, Homo sapien
caaggaaccgctactgggagaaggt

SEQ ID NO: 4377981 - DNA, 25 bp, Homo sapien
gaactgtccgtggtttacactgccc

SEQ ID NO: 4377982 - DNA, 25 bp, Homo sapien
gctgcttagcagatatgtttcccaa

SEQ ID NO: 4377983 - DNA, 25 bp, Homo sapien
tgtgggactccctcggctaaatgca

SEQ ID NO: 4377984 - DNA, 25 bp, Homo sapien
gaaaggtgttcctaaaatagctgag

SEQ ID NO: 4377985 - DNA, 25 bp, Homo sapien
aagaaaggtgttcctaaaatagctg

SEQ ID NO: 4377986 - DNA, 25 bp, Homo sapien
aacagtgtgcatataaatgtctgga

SEQ ID NO: 4377987 - DNA, 25 bp, Homo sapien
aataaacagtgtgcatataaatgtc

SEQ ID NO: 4377988 - DNA, 25 bp, Homo sapien
tcaatctatcagaaagctttcaggg

SEQ ID NO: 4377989 - DNA, 25 bp, Homo sapien
gaatatatctaggaactacccacat

SEQ ID NO: 4377990 - DNA, 25 bp, Homo sapien
ctcagttgcctctatccccaaaatg

SEQ ID NO: 4377991 - DNA, 25 bp, Homo sapien
ccttggacatgatctgaatggtaag

SEQ ID NO: 4377992 - DNA, 25 bp, Homo sapien
tgatttccaaatcccgaatctttct

SEQ ID NO: 4377993 - DNA, 25 bp, Homo sapien
tcttttctgatggtatgatggtgaa

SEQ ID NO: 4377994 - DNA, 25 bp, Homo sapien
ttgcacaatagggaagttttctggc

SEQ ID NO: 4377995 - DNA, 25 bp, Homo sapien
cgtcttgtttgttgcacaataggga

SEQ ID NO: 4377996 - DNA, 25 bp, Homo sapien
actgtaggtagctcaataaaaagtt

SEQ ID NO: 4377997 - DNA, 25 bp, Homo sapien
ataaaaagttgacagtgtttatctg

SEQ ID NO: 4377998 - DNA, 25 bp, Homo sapien
gtactgctaatttacacaaaccttc

SEQ ID NO: 4377999 - DNA, 25 bp, Homo sapien
tgccaggttgcaaggtcttctggct

SEQ ID NO: 4378000 - DNA, 25 bp, Homo sapien
tactgtgttctaaaggggccaagga

SEQ ID NO: 4378001 - DNA, 25 bp, Homo sapien
tactgttactgtgttctaaaggggc

SEQ ID NO: 4378002 - DNA, 25 bp, Homo sapien
tgttactgtgttctaaaggggccaa

SEQ ID NO: 4378003 - DNA, 25 bp, Homo sapien
actgtgttctaaaggggccaaggag

SEQ ID NO: 4378004 - DNA, 25 bp, Homo sapien
gctgcttagagggacatgtctggac

SEQ ID NO: 4378005 - DNA, 25 bp, Homo sapien
tagttaagtagagattctgctgccc

SEQ ID NO: 4378006 - DNA, 25 bp, Homo sapien
aaccctgtcttatcaaggactggtg

SEQ ID NO: 4378007 - DNA, 25 bp, Homo sapien
taggcagctcgtcctaagaccctta

SEQ ID NO: 4378008 - DNA, 25 bp, Homo sapien
ctttcatggcccatggtctgacttt

SEQ ID NO: 4378009 - DNA, 25 bp, Homo sapien
ttaaatttcctagatggtcattttg

SEQ ID NO: 4378010 - DNA, 25 bp, Homo sapien
gcccatggtctgacttttacccaag

SEQ ID NO: 4378011 - DNA, 25 bp, Homo sapien
aatttcctagatggtcattttgaag

SEQ ID NO: 4378012 - DNA, 25 bp, Homo sapien
tctcacatatgaaaacgtgtttact

SEQ ID NO: 4378013 - DNA, 25 bp, Homo sapien
ctcacatatgaaaacgtgtttacta

SEQ ID NO: 4378014 - DNA, 25 bp, Homo sapien
acatatgaaaacgtgtttactattc

SEQ ID NO: 4378015 - DNA, 25 bp, Homo sapien
tcacatatgaaaacgtgtttactat

SEQ ID NO: 4378016 - DNA, 25 bp, Homo sapien
gctattctccaaggagccggctgct

SEQ ID NO: 4378017 - DNA, 25 bp, Homo sapien
gctgataacgctcctgcctgctatt

SEQ ID NO: 4378018 - DNA, 25 bp, Homo sapien
gctggaagactgctccgaacctcat

SEQ ID NO: 4378019 - DNA, 25 bp, Homo sapien
tgcctgcggcaatcagtcctggttt

SEQ ID NO: 4378020 - DNA, 25 bp, Homo sapien
tgattgacgaaaccaagagtgagca

SEQ ID NO: 4378021 - DNA, 25 bp, Homo sapien
gacgcgggctgctctagtcaggact

SEQ ID NO: 4378022 - DNA, 25 bp, Homo sapien
aaaaataaacacgaacagaggctgc

SEQ ID NO: 4378023 - DNA, 25 bp, Homo sapien
ctacccaccgtgagagagcaggacg

SEQ ID NO: 4378024 - DNA, 25 bp, Homo sapien
ggtcttgacagccactataaagtac

SEQ ID NO: 4378025 - DNA, 25 bp, Homo sapien
taatggcacttgactttttcaggca

SEQ ID NO: 4378026 - DNA, 25 bp, Homo sapien
ccccaagtgtcagtaacaaagatga

SEQ ID NO: 4378027 - DNA, 25 bp, Homo sapien
taataaatctgcgtctatagcagct

SEQ ID NO: 4378028 - DNA, 25 bp, Homo sapien
cacccacaggcaatgtaattctgaa

SEQ ID NO: 4378029 - DNA, 25 bp, Homo sapien
actgctgcaaatgttctggtgtaga

SEQ ID NO: 4378030 - DNA, 25 bp, Homo sapien
ctggtgtagacatagccccgaggca

SEQ ID NO: 4378031 - DNA, 25 bp, Homo sapien
taatgttgccgtcgtttactgctgc

SEQ ID NO: 4378032 - DNA, 25 bp, Homo sapien
gagtctgtgactaaacccagaggcg

SEQ ID NO: 4378033 - DNA, 25 bp, Homo sapien
caactccagatttcagagagatcaa

SEQ ID NO: 4378034 - DNA, 25 bp, Homo sapien
taacaagtttggtcggcttcaatta

SEQ ID NO: 4378035 - DNA, 25 bp, Homo sapien
gcttattgacacaaacagttgatac

SEQ ID NO: 4378036 - DNA, 25 bp, Homo sapien
aaaggcatatgtttgaccaaccagc

SEQ ID NO: 4378037 - DNA, 25 bp, Homo sapien
ttgaccaaccagcttttctcttgtt

SEQ ID NO: 4378038 - DNA, 25 bp, Homo sapien
catatgtttgaccaaccagcttttc

SEQ ID NO: 4378039 - DNA, 25 bp, Homo sapien
tttctcttgtttctcgagcaatcat

SEQ ID NO: 4378040 - DNA, 25 bp, Homo sapien
ttctgaaaataagatgcaagcttca

SEQ ID NO: 4378041 - DNA, 25 bp, Homo sapien
tctaggcttgaagtgggtgctcatt

SEQ ID NO: 4378042 - DNA, 25 bp, Homo sapien
tatttatcagtaaggagcacatgta

SEQ ID NO: 4378043 - DNA, 25 bp, Homo sapien
taagatacatgcttctgaataagac

SEQ ID NO: 4378044 - DNA, 25 bp, Homo sapien
caagttctgttcatgacaaatgaga

SEQ ID NO: 4378045 - DNA, 25 bp, Homo sapien
taatcaaagttagaagtggacagag

SEQ ID NO: 4378046 - DNA, 25 bp, Homo sapien
tggacagagaactaatcaatggtac

SEQ ID NO: 4378047 - DNA, 25 bp, Homo sapien
actctcagataacccctaaaataag

SEQ ID NO: 4378048 - DNA, 25 bp, Homo sapien
tatctggttctagcaacagcaaaaa

SEQ ID NO: 4378049 - DNA, 25 bp, Homo sapien
tcttctgcttaatgcatagcttgaa

SEQ ID NO: 4378050 - DNA, 25 bp, Homo sapien
tagccgaccatggagcatggccacc

SEQ ID NO: 4378051 - DNA, 25 bp, Homo sapien
caggatccatgaaggctcttcttct

SEQ ID NO: 4378052 - DNA, 25 bp, Homo sapien
gcatagacttttgtaattgacagaa

SEQ ID NO: 4378053 - DNA, 25 bp, Homo sapien
ctgaaacctgtttgacattcccaat

SEQ ID NO: 4378054 - DNA, 25 bp, Homo sapien
gttactatctcttcacattgcttgc

SEQ ID NO: 4378055 - DNA, 25 bp, Homo sapien
tttgcccaaagttactcagttacta

SEQ ID NO: 4378056 - DNA, 25 bp, Homo sapien
tcaactgccaagacgatgttccaca

SEQ ID NO: 4378057 - DNA, 25 bp, Homo sapien
gccacttcaactgccaagacgatgt

SEQ ID NO: 4378058 - DNA, 25 bp, Homo sapien
tgccaagacgatgttccacaatttc

SEQ ID NO: 4378059 - DNA, 25 bp, Homo sapien
aaggccacttcaactgccaagacga

SEQ ID NO: 4378060 - DNA, 25 bp, Homo sapien
tgcccctagtctttgcaggaaaaag

SEQ ID NO: 4378061 - DNA, 25 bp, Homo sapien
gaatatgtcagtgatacagtgcccg

SEQ ID NO: 4378062 - DNA, 25 bp, Homo sapien
gaagtacagacaggcacattcattt

SEQ ID NO: 4378063 - DNA, 25 bp, Homo sapien
tactgactcaacatgctatctgtag

SEQ ID NO: 4378064 - DNA, 25 bp, Homo sapien
ccaactgacagcagtcctttccaca

SEQ ID NO: 4378065 - DNA, 25 bp, Homo sapien
tgacagcagtcctttccacaaactg

SEQ ID NO: 4378066 - DNA, 25 bp, Homo sapien
ctgacagcagtcctttccacaaact

SEQ ID NO: 4378067 - DNA, 25 bp, Homo sapien
aactgacagcagtcctttccacaaa

SEQ ID NO: 4378068 - DNA, 25 bp, Homo sapien
gtcacaccttacgatactacagcag

SEQ ID NO: 4378069 - DNA, 25 bp, Homo sapien
gggactgacttatggacatgcacta

SEQ ID NO: 4378070 - DNA, 25 bp, Homo sapien
acagcatggctgacgatttgcaacc

SEQ ID NO: 4378071 - DNA, 25 bp, Homo sapien
ctacagcaggaagttagaaggatcc

SEQ ID NO: 4378072 - DNA, 25 bp, Homo sapien
tcatgctattcctaggtggtcagcc

SEQ ID NO: 4378073 - DNA, 25 bp, Homo sapien
catgctattcctaggtggtcagcct

SEQ ID NO: 4378074 - DNA, 25 bp, Homo sapien
atgctattcctaggtggtcagcctg

SEQ ID NO: 4378075 - DNA, 25 bp, Homo sapien
atttctccatcctgtatctgtatac

SEQ ID NO: 4378076 - DNA, 25 bp, Homo sapien
ttctccatcctgtatctgtatacag

SEQ ID NO: 4378077 - DNA, 25 bp, Homo sapien
tatttctccatcctgtatctgtata

SEQ ID NO: 4378078 - DNA, 25 bp, Homo sapien
ttatttctccatcctgtatctgtat

SEQ ID NO: 4378079 - DNA, 25 bp, Homo sapien
gttgcagtcgctgaagttctcatca

SEQ ID NO: 4378080 - DNA, 25 bp, Homo sapien
ttgttgcagtcgctgaagttctcat

SEQ ID NO: 4378081 - DNA, 25 bp, Homo sapien
tgcagtcgctgaagttctcatcaca

SEQ ID NO: 4378082 - DNA, 25 bp, Homo sapien
ctttgttgcagtcgctgaagttctc

SEQ ID NO: 4378083 - DNA, 25 bp, Homo sapien
gaaataagcaaattgcatcagtgaa

SEQ ID NO: 4378084 - DNA, 25 bp, Homo sapien
agaaataagcaaattgcatcagtga

SEQ ID NO: 4378085 - DNA, 25 bp, Homo sapien
gtcccagatgtgaactctgctctaa

SEQ ID NO: 4378086 - DNA, 25 bp, Homo sapien
agcttcctttgaagacaggcaagag

SEQ ID NO: 4378087 - DNA, 25 bp, Homo sapien
cacattgcctaatgggggtcctttc

SEQ ID NO: 4378088 - DNA, 25 bp, Homo sapien
gagatcagatcaagccttccaatat

SEQ ID NO: 4378089 - DNA, 25 bp, Homo sapien
tagaatccaatgtcttgttcactgt

SEQ ID NO: 4378090 - DNA, 25 bp, Homo sapien
cattggaattagctgggtcagtttc

SEQ ID NO: 4378091 - DNA, 25 bp, Homo sapien
tggaacattggaattagctgggtca

SEQ ID NO: 4378092 - DNA, 25 bp, Homo sapien
actgtctggaacattggaattagct

SEQ ID NO: 4378093 - DNA, 25 bp, Homo sapien
taagcaatatgcacaggagtagccc

SEQ ID NO: 4378094 - DNA, 25 bp, Homo sapien
tttgagggatatcgagttgctaaac

SEQ ID NO: 4378095 - DNA, 25 bp, Homo sapien
gagtagcccatgaagtgcgatttga

SEQ ID NO: 4378096 - DNA, 25 bp, Homo sapien
catgaagtgcgatttgagggatatc

SEQ ID NO: 4378097 - DNA, 25 bp, Homo sapien
atccccccagatatgctgcatagac

SEQ ID NO: 4378098 - DNA, 25 bp, Homo sapien
ggtatccccccagatatgctgcata

SEQ ID NO: 4378099 - DNA, 25 bp, Homo sapien
aggtatccccccagatatgctgcat

SEQ ID NO: 4378100 - DNA, 25 bp, Homo sapien
tatccccccagatatgctgcataga

SEQ ID NO: 4378101 - DNA, 25 bp, Homo sapien
tattggactttgaattcctctctac

SEQ ID NO: 4378102 - DNA, 25 bp, Homo sapien
gtattggactttgaattcctctcta

SEQ ID NO: 4378103 - DNA, 25 bp, Homo sapien
cgagtattggactttgaattcctct

SEQ ID NO: 4378104 - DNA, 25 bp, Homo sapien
gagtattggactttgaattcctctc

SEQ ID NO: 4378105 - DNA, 25 bp, Homo sapien
ccctcaggaggcttctgggccatta

SEQ ID NO: 4378106 - DNA, 25 bp, Homo sapien
tgaagaatactctgcgctcccagga

SEQ ID NO: 4378107 - DNA, 25 bp, Homo sapien
ttctcagagccctaatcccatggtc

SEQ ID NO: 4378108 - DNA, 25 bp, Homo sapien
agccgtgtctgtgccatggtggaca

SEQ ID NO: 4378109 - DNA, 25 bp, Homo sapien
gaaattcacttcgaagaaacttctg

SEQ ID NO: 4378110 - DNA, 25 bp, Homo sapien
aattcacttcgaagaaacttctgtg

SEQ ID NO: 4378111 - DNA, 25 bp, Homo sapien
cagtgaaattcacttcgaagaaact

SEQ ID NO: 4378112 - DNA, 25 bp, Homo sapien
tcacttcgaagaaacttctgtggat

SEQ ID NO: 4378113 - DNA, 25 bp, Homo sapien
caacagctcagtaataagatacaca

SEQ ID NO: 4378114 - DNA, 25 bp, Homo sapien
tgaggcaacagctcagtaataagat

SEQ ID NO: 4378115 - DNA, 25 bp, Homo sapien
acagctcagtaataagatacacaac

SEQ ID NO: 4378116 - DNA, 25 bp, Homo sapien
ggcaacagctcagtaataagataca

SEQ ID NO: 4378117 - DNA, 25 bp, Homo sapien
gatccacaagcaccctctttttcct

SEQ ID NO: 4378118 - DNA, 25 bp, Homo sapien
cacatttgatccggatccacaagca

SEQ ID NO: 4378119 - DNA, 25 bp, Homo sapien
tttgatccggatccacaagcaccct

SEQ ID NO: 4378120 - DNA, 25 bp, Homo sapien
catttgatccggatccacaagcacc

SEQ ID NO: 4378121 - DNA, 25 bp, Homo sapien
aatgttacgtaaaatatgtgcatta

SEQ ID NO: 4378122 - DNA, 25 bp, Homo sapien
tatgtgcattataattgagatgggg

SEQ ID NO: 4378123 - DNA, 25 bp, Homo sapien
tgttacgtaaaatatgtgcattata

SEQ ID NO: 4378124 - DNA, 25 bp, Homo sapien
attataattgagatggggattttca

SEQ ID NO: 4378125 - DNA, 25 bp, Homo sapien
taacacgtgactcgaaggatttgcc

SEQ ID NO: 4378126 - DNA, 25 bp, Homo sapien
tggtggcagcatacccaaatttcaa

SEQ ID NO: 4378127 - DNA, 25 bp, Homo sapien
ggtaaattgtaccagggacattgcc

SEQ ID NO: 4378128 - DNA, 25 bp, Homo sapien
caagtatattcatggacaagtggag

SEQ ID NO: 4378129 - DNA, 25 bp, Homo sapien
tgtagaccatcagtaaactcagggc

SEQ ID NO: 4378130 - DNA, 25 bp, Homo sapien
tagttatggtccctcaacagctgca

SEQ ID NO: 4378131 - DNA, 25 bp, Homo sapien
tttgaccagacccacatagatgcct

SEQ ID NO: 4378132 - DNA, 25 bp, Homo sapien
agaaatattcttggcggcaggctgg

SEQ ID NO: 4378133 - DNA, 25 bp, Homo sapien
ccacaattacttcactgaccacttc

SEQ ID NO: 4378134 - DNA, 25 bp, Homo sapien
tcttcacaaggtcagctccattcag

SEQ ID NO: 4378135 - DNA, 25 bp, Homo sapien
ttagctacactttgctagaacatcc

SEQ ID NO: 4378136 - DNA, 25 bp, Homo sapien
ctttgctagaacatccagagcttcc

SEQ ID NO: 4378137 - DNA, 25 bp, Homo sapien
ccacgatgttatctagacccaaata

SEQ ID NO: 4378138 - DNA, 25 bp, Homo sapien
gaaaattaactgaatctcgtgtgtg

SEQ ID NO: 4378139 - DNA, 25 bp, Homo sapien
tcctcttaggtggtactgagagtat

SEQ ID NO: 4378140 - DNA, 25 bp, Homo sapien
gaatttctggtggtgtgatatgaca

SEQ ID NO: 4378141 - DNA, 25 bp, Homo sapien
gccaatagaggtataaagataacac

SEQ ID NO: 4378142 - DNA, 25 bp, Homo sapien
tgccaatagaggtataaagataaca

SEQ ID NO: 4378143 - DNA, 25 bp, Homo sapien
ctgccaatagaggtataaagataac

SEQ ID NO: 4378144 - DNA, 25 bp, Homo sapien
ttcatcagtgaatgatggatttcct

SEQ ID NO: 4378145 - DNA, 25 bp, Homo sapien
tttggttgcacagccactgggtctg

SEQ ID NO: 4378146 - DNA, 25 bp, Homo sapien
ttgggtgtgtgtttcccttctagag

SEQ ID NO: 4378147 - DNA, 25 bp, Homo sapien
agaggctttatttgggagttccatg

SEQ ID NO: 4378148 - DNA, 25 bp, Homo sapien
ggaagcacgtaggcatttggacggc

SEQ ID NO: 4378149 - DNA, 25 bp, Homo sapien
tagcctaggactcaactcttagatg

SEQ ID NO: 4378150 - DNA, 25 bp, Homo sapien
tactattatcatcaaggaagggcag

SEQ ID NO: 4378151 - DNA, 25 bp, Homo sapien
gaaagcaaaggtttgccaagcctac

SEQ ID NO: 4378152 - DNA, 25 bp, Homo sapien
gctttatgctcccaatagcctagga

SEQ ID NO: 4378153 - DNA, 25 bp, Homo sapien
gagacatatgctgatcctataacac

SEQ ID NO: 4378154 - DNA, 25 bp, Homo sapien
cctcataactgcctttgagaaggag

SEQ ID NO: 4378155 - DNA, 25 bp, Homo sapien
ggcagttcctctttcaaaaggatgt

SEQ ID NO: 4378156 - DNA, 25 bp, Homo sapien
ctggtacatgagagataaggtgatt

SEQ ID NO: 4378157 - DNA, 25 bp, Homo sapien
tctgtaccatatgggacatttcatg

SEQ ID NO: 4378158 - DNA, 25 bp, Homo sapien
taccatatgggacatttcatgtgaa

SEQ ID NO: 4378159 - DNA, 25 bp, Homo sapien
gcatctgtaccatatgggacatttc

SEQ ID NO: 4378160 - DNA, 25 bp, Homo sapien
gacatttcatgtgaatttgcattca

SEQ ID NO: 4378161 - DNA, 25 bp, Homo sapien
tgtagatgagttcactttgaaaaag

SEQ ID NO: 4378162 - DNA, 25 bp, Homo sapien
aatgtagatgagttcactttgaaaa

SEQ ID NO: 4378163 - DNA, 25 bp, Homo sapien
tcaaatgtagatgagttcactttga

SEQ ID NO: 4378164 - DNA, 25 bp, Homo sapien
gattcaaatgtagatgagttcactt

SEQ ID NO: 4378165 - DNA, 25 bp, Homo sapien
tacaaacctcgtctagtcggtgaca

SEQ ID NO: 4378166 - DNA, 25 bp, Homo sapien
ctgtaactgaaggaggttctgtggc

SEQ ID NO: 4378167 - DNA, 25 bp, Homo sapien
catttgggaatgttagctcaggttc

SEQ ID NO: 4378168 - DNA, 25 bp, Homo sapien
tgtgctgattcataccgagactgtt

SEQ ID NO: 4378169 - DNA, 25 bp, Homo sapien
tatcacatcataattttgcctttct

SEQ ID NO: 4378170 - DNA, 25 bp, Homo sapien
tatagcacatatcacatcataattt

SEQ ID NO: 4378171 - DNA, 25 bp, Homo sapien
catatcacatcataattttgccttt

SEQ ID NO: 4378172 - DNA, 25 bp, Homo sapien
gcacatatcacatcataattttgcc

SEQ ID NO: 4378173 - DNA, 25 bp, Homo sapien
tcttttctcaacacaacttagagga

SEQ ID NO: 4378174 - DNA, 25 bp, Homo sapien
cagtgctctgaggtgcttagttgga

SEQ ID NO: 4378175 - DNA, 25 bp, Homo sapien
tgtggagcagaaactaaagtcaatt

SEQ ID NO: 4378176 - DNA, 25 bp, Homo sapien
gagattcataacagatctgtggagc

SEQ ID NO: 4378177 - DNA, 25 bp, Homo sapien
taatgggcggagtatgccttcttca

SEQ ID NO: 4378178 - DNA, 25 bp, Homo sapien
acatcttgttaatgggcggagtatg

SEQ ID NO: 4378179 - DNA, 25 bp, Homo sapien
acaaaacactgatgccttgggaaga

SEQ ID NO: 4378180 - DNA, 25 bp, Homo sapien
aaacactgatgccttgggaagatac

SEQ ID NO: 4378181 - DNA, 25 bp, Homo sapien
actagacactagtttcacacgggag

SEQ ID NO: 4378182 - DNA, 25 bp, Homo sapien
taccccgagaaagaatgcagttcat

SEQ ID NO: 4378183 - DNA, 25 bp, Homo sapien
ggctgaactaaagtcataccccgag

SEQ ID NO: 4378184 - DNA, 25 bp, Homo sapien
tacagccatgctacatttgagagga

SEQ ID NO: 4378185 - DNA, 25 bp, Homo sapien
tagaaagccgagaaacaaagccaca

SEQ ID NO: 4378186 - DNA, 25 bp, Homo sapien
tcaaagacatctagtgcaactggca

SEQ ID NO: 4378187 - DNA, 25 bp, Homo sapien
gatcttcaagaagggtgccaacaac

SEQ ID NO: 4378188 - DNA, 25 bp, Homo sapien
actgatggaaccgaatagaaagccg

SEQ ID NO: 4378189 - DNA, 25 bp, Homo sapien
gaagaaaaccctgccatttgggaca

SEQ ID NO: 4378190 - DNA, 25 bp, Homo sapien
tatagaaacaacctgaatgcgaagg

SEQ ID NO: 4378191 - DNA, 25 bp, Homo sapien
tatcactagtcatcatggaaacgca

SEQ ID NO: 4378192 - DNA, 25 bp, Homo sapien
ttgggacaatgtggacaaacctgga

SEQ ID NO: 4378193 - DNA, 25 bp, Homo sapien
tctggataatcttgatgagtattgc

SEQ ID NO: 4378194 - DNA, 25 bp, Homo sapien
ctggataatcttgatgagtattgca

SEQ ID NO: 4378195 - DNA, 25 bp, Homo sapien
tggataatcttgatgagtattgcac

SEQ ID NO: 4378196 - DNA, 25 bp, Homo sapien
ctgaaatgctatgaaaccaaaggtc

SEQ ID NO: 4378197 - DNA, 25 bp, Homo sapien
agttgaaattaagtcctgaaggcac

SEQ ID NO: 4378198 - DNA, 25 bp, Homo sapien
gatgtaatgattcaagcacaaaagt

SEQ ID NO: 4378199 - DNA, 25 bp, Homo sapien
aacagatttcacaagaggatacata

SEQ ID NO: 4378200 - DNA, 25 bp, Homo sapien
cattttgtgcgtctgttttgatgca

SEQ ID NO: 4378201 - DNA, 25 bp, Homo sapien
gaaccataacctaattcagtgatga

SEQ ID NO: 4378202 - DNA, 25 bp, Homo sapien
cagtgatgagtacagtgctgacatt

SEQ ID NO: 4378203 - DNA, 25 bp, Homo sapien
caaccattttgtgcgtctgttttga

SEQ ID NO: 4378204 - DNA, 25 bp, Homo sapien
atataaatgtgttaactcaaaatac

SEQ ID NO: 4378205 - DNA, 25 bp, Homo sapien
aatgtgttaactcaaaatacattct

SEQ ID NO: 4378206 - DNA, 25 bp, Homo sapien
taaatgtgttaactcaaaatacatt

SEQ ID NO: 4378207 - DNA, 25 bp, Homo sapien
ctgcaatatataaatgtgttaactc

SEQ ID NO: 4378208 - DNA, 25 bp, Homo sapien
tacttcgatcttccttttggtccat

SEQ ID NO: 4378209 - DNA, 25 bp, Homo sapien
tagtcctgccccaggcatatttgac

SEQ ID NO: 4378210 - DNA, 25 bp, Homo sapien
ggagaaccctcctttggagtgaatg

SEQ ID NO: 4378211 - DNA, 25 bp, Homo sapien
gaagttcaaactcagcaggaatggg

SEQ ID NO: 4378212 - DNA, 25 bp, Homo sapien
ggagggagtgctggctactccatct

SEQ ID NO: 4378213 - DNA, 25 bp, Homo sapien
cttgaatattgagggagggagtgct

SEQ ID NO: 4378214 - DNA, 25 bp, Homo sapien
gggagggagtgctggctactccatc

SEQ ID NO: 4378215 - DNA, 25 bp, Homo sapien
agggagtgctggctactccatctgc

SEQ ID NO: 4378216 - DNA, 25 bp, Homo sapien
tatttcagggtagttgccatataca

SEQ ID NO: 4378217 - DNA, 25 bp, Homo sapien
tccaaaggtatttcagggtagttgc

SEQ ID NO: 4378218 - DNA, 25 bp, Homo sapien
ggtagttgccatatacacactcatt

SEQ ID NO: 4378219 - DNA, 25 bp, Homo sapien
caaaggtatttcagggtagttgcca

SEQ ID NO: 4378220 - DNA, 25 bp, Homo sapien
cactgctcatctttacggagcagca

SEQ ID NO: 4378221 - DNA, 25 bp, Homo sapien
aaatgagggagatcagaaacgcttt

SEQ ID NO: 4378222 - DNA, 25 bp, Homo sapien
cagtgatgcctctgggtattcgtaa

SEQ ID NO: 4378223 - DNA, 25 bp, Homo sapien
aacgctttgtatggggcactgctca

SEQ ID NO: 4378224 - DNA, 25 bp, Homo sapien
tttgaacagacagcagggttggata

SEQ ID NO: 4378225 - DNA, 25 bp, Homo sapien
ctttgaacagacagcagggttggat

SEQ ID NO: 4378226 - DNA, 25 bp, Homo sapien
ttgaacagacagcagggttggatag

SEQ ID NO: 4378227 - DNA, 25 bp, Homo sapien
cttcatccaattctttcaaatccac

SEQ ID NO: 4378228 - DNA, 25 bp, Homo sapien
tccaattctttcaaatccacatttt

SEQ ID NO: 4378229 - DNA, 25 bp, Homo sapien
tccacattttcacacctaaatattt

SEQ ID NO: 4378230 - DNA, 25 bp, Homo sapien
cacattttcacacctaaatattttc

SEQ ID NO: 4378231 - DNA, 25 bp, Homo sapien
cacaaactctcccaatgcataatct

SEQ ID NO: 4378232 - DNA, 25 bp, Homo sapien
atgcataatctaagcgagtgcattt

SEQ ID NO: 4378233 - DNA, 25 bp, Homo sapien
taagcgagtgcatttagatttcagt

SEQ ID NO: 4378234 - DNA, 25 bp, Homo sapien
aaactctcccaatgcataatctaag

SEQ ID NO: 4378235 - DNA, 25 bp, Homo sapien
ggcctttccgcctagtttaactgca

SEQ ID NO: 4378236 - DNA, 25 bp, Homo sapien
tcctgagtttcaccattaatgccca

SEQ ID NO: 4378237 - DNA, 25 bp, Homo sapien
ccattcaaaatcctgagtttcacca

SEQ ID NO: 4378238 - DNA, 25 bp, Homo sapien
tgcaaatctggtcagatgccattca

SEQ ID NO: 4378239 - DNA, 25 bp, Homo sapien
taagcagctaactcatgtatactaa

SEQ ID NO: 4378240 - DNA, 25 bp, Homo sapien
tgattgagccgtcattcccagttga

SEQ ID NO: 4378241 - DNA, 25 bp, Homo sapien
tcccagttgatctgctgatgatctg

SEQ ID NO: 4378242 - DNA, 25 bp, Homo sapien
tactaaacaaatttggcttggctgc

SEQ ID NO: 4378243 - DNA, 25 bp, Homo sapien
gctctcagctttaataacctatggg

SEQ ID NO: 4378244 - DNA, 25 bp, Homo sapien
gctaatcttcctagataggctctca

SEQ ID NO: 4378245 - DNA, 25 bp, Homo sapien
taatcaagcgactgcctgtttgctc

SEQ ID NO: 4378246 - DNA, 25 bp, Homo sapien
tgctccgtggttaaagcacttcctg

SEQ ID NO: 4378247 - DNA, 25 bp, Homo sapien
tgttttcaatgaactcaaagactag

SEQ ID NO: 4378248 - DNA, 25 bp, Homo sapien
tattatctgcagagttgtccaacgg

SEQ ID NO: 4378249 - DNA, 25 bp, Homo sapien
cagggatagaaatgaattgtaagca

SEQ ID NO: 4378250 - DNA, 25 bp, Homo sapien
tgtaagcatagctcctgcccatttt

SEQ ID NO: 4378251 - DNA, 25 bp, Homo sapien
tcaggagcttataggtaaaacttcc

SEQ ID NO: 4378252 - DNA, 25 bp, Homo sapien
agcaaggccactgtagtcaaactgc

SEQ ID NO: 4378253 - DNA, 25 bp, Homo sapien
caggaggtttcgattgggcacagcc

SEQ ID NO: 4378254 - DNA, 25 bp, Homo sapien
gtctaaagacgacctgggatgctcc

SEQ ID NO: 4378255 - DNA, 25 bp, Homo sapien
tctcaatttcaagttttccgatcac

SEQ ID NO: 4378256 - DNA, 25 bp, Homo sapien
tggcaaatggcatcgctgtgctcat

SEQ ID NO: 4378257 - DNA, 25 bp, Homo sapien
tcaggcatgtcaccaggagattggc

SEQ ID NO: 4378258 - DNA, 25 bp, Homo sapien
gcatcgctgtgctcataggagacac

SEQ ID NO: 4378259 - DNA, 25 bp, Homo sapien
tgatgctcaggcatgtcaccaggag

SEQ ID NO: 4378260 - DNA, 25 bp, Homo sapien
tgtactttgcagaagggcacttaac

SEQ ID NO: 4378261 - DNA, 25 bp, Homo sapien
aagttcaaagatatagcttgacttg

SEQ ID NO: 4378262 - DNA, 25 bp, Homo sapien
caaagatatagcttgacttgtactt

SEQ ID NO: 4378263 - DNA, 25 bp, Homo sapien
gtactttgcagaagggcacttaact

SEQ ID NO: 4378264 - DNA, 25 bp, Homo sapien
ctgctagttccaattgatttccttt

SEQ ID NO: 4378265 - DNA, 25 bp, Homo sapien
acaattaggtagactggtctgccac

SEQ ID NO: 4378266 - DNA, 25 bp, Homo sapien
caaagtcgcacagactaatttcaat

SEQ ID NO: 4378267 - DNA, 25 bp, Homo sapien
atacaattaggtagactggtctgcc

SEQ ID NO: 4378268 - DNA, 25 bp, Homo sapien
ctgattagattcaaagtcgcacaga

SEQ ID NO: 4378269 - DNA, 25 bp, Homo sapien
agtagattgttctattctgtgccaa

SEQ ID NO: 4378270 - DNA, 25 bp, Homo sapien
aaaggttaaaggctacagtagattg

SEQ ID NO: 4378271 - DNA, 25 bp, Homo sapien
ggctacagtagattgttctattctg

SEQ ID NO: 4378272 - DNA, 25 bp, Homo sapien
tcttataagcacagttaaaagggaa

SEQ ID NO: 4378273 - DNA, 25 bp, Homo sapien
tactgaagctgtgtaaactcaacat

SEQ ID NO: 4378274 - DNA, 25 bp, Homo sapien
ggtatgtactgaagctgtgtaaact

SEQ ID NO: 4378275 - DNA, 25 bp, Homo sapien
caggtatgtactgaagctgtgtaaa

SEQ ID NO: 4378276 - DNA, 25 bp, Homo sapien
tatgtactgaagctgtgtaaactca

SEQ ID NO: 4378277 - DNA, 25 bp, Homo sapien
tgtacataaagagcaggcacacctc

SEQ ID NO: 4378278 - DNA, 25 bp, Homo sapien
gcttccttaactagctcctgggtag

SEQ ID NO: 4378279 - DNA, 25 bp, Homo sapien
ttacttggagagcagaaagaccctc

SEQ ID NO: 4378280 - DNA, 25 bp, Homo sapien
cacaaggtgtactatcggctcatac

SEQ ID NO: 4378281 - DNA, 25 bp, Homo sapien
caattccagtcttgtacgtacatac

SEQ ID NO: 4378282 - DNA, 25 bp, Homo sapien
tatatccctgacatgccaattccag

SEQ ID NO: 4378283 - DNA, 25 bp, Homo sapien
gtgttccacttcctgagttaggtag

SEQ ID NO: 4378284 - DNA, 25 bp, Homo sapien
taaataaacggtggtatagtcacaa

SEQ ID NO: 4378285 - DNA, 25 bp, Homo sapien
ttcctacctcagcctcctgagtagc

SEQ ID NO: 4378286 - DNA, 25 bp, Homo sapien
tcacaggtttaagcaattttcctac

SEQ ID NO: 4378287 - DNA, 25 bp, Homo sapien
gagccaccatatccagccaattttt

SEQ ID NO: 4378288 - DNA, 25 bp, Homo sapien
attgcaacatccacctcacaggttt

SEQ ID NO: 4378289 - DNA, 25 bp, Homo sapien
tgtcatcaactgtggaaaaatgtcc

SEQ ID NO: 4378290 - DNA, 25 bp, Homo sapien
gtttgtttaacactacatatatctc

SEQ ID NO: 4378291 - DNA, 25 bp, Homo sapien
gtttaacactacatatatctccagg

SEQ ID NO: 4378292 - DNA, 25 bp, Homo sapien
ccaccatccatgtcatcaactgtgg

SEQ ID NO: 4378293 - DNA, 25 bp, Homo sapien
ccagcgaggactggtgacactttat

SEQ ID NO: 4378294 - DNA, 25 bp, Homo sapien
tattttttgattactgctatagcca

SEQ ID NO: 4378295 - DNA, 25 bp, Homo sapien
caaatgtagccgcacactggactaa

SEQ ID NO: 4378296 - DNA, 25 bp, Homo sapien
gccgcacactggactaagggtagag

SEQ ID NO: 4378297 - DNA, 25 bp, Homo sapien
gatgactcccagtgaaggctctgcg

SEQ ID NO: 4378298 - DNA, 25 bp, Homo sapien
tcccagtgaaggctctgcgctgtgc

SEQ ID NO: 4378299 - DNA, 25 bp, Homo sapien
tttgacccttaactggggtgctcca

SEQ ID NO: 4378300 - DNA, 25 bp, Homo sapien
cccttaactggggtgctccaacatt

SEQ ID NO: 4378301 - DNA, 25 bp, Homo sapien
gaaattaaaatctcgccctcctgtg

SEQ ID NO: 4378302 - DNA, 25 bp, Homo sapien
gagagcttgctcacattcagcggca

SEQ ID NO: 4378303 - DNA, 25 bp, Homo sapien
ttgatagatccctgtctgcccggtg

SEQ ID NO: 4378304 - DNA, 25 bp, Homo sapien
gattacccttgtgaagccttgcagg

SEQ ID NO: 4378305 - DNA, 25 bp, Homo sapien
gaaatactcatgttaataaactcct

SEQ ID NO: 4378306 - DNA, 25 bp, Homo sapien
tgctgctatggataaaatagctttc

SEQ ID NO: 4378307 - DNA, 25 bp, Homo sapien
ctgctgctatggataaaatagcttt

SEQ ID NO: 4378308 - DNA, 25 bp, Homo sapien
tctttttagaaatactcatgttaat

SEQ ID NO: 4378309 - DNA, 25 bp, Homo sapien
gcactggaagtaaagccaagcagat

SEQ ID NO: 4378310 - DNA, 25 bp, Homo sapien
gccttcacatgcctctgcaattaga

SEQ ID NO: 4378311 - DNA, 25 bp, Homo sapien
tcttctaaagattacggccttcaca

SEQ ID NO: 4378312 - DNA, 25 bp, Homo sapien
gcagggccagaccatgcaaggcttt

SEQ ID NO: 4378313 - DNA, 25 bp, Homo sapien
tggaatgcagcggtgcaatccgggc

SEQ ID NO: 4378314 - DNA, 25 bp, Homo sapien
gaatgcagcggtgcaatccgggctc

SEQ ID NO: 4378315 - DNA, 25 bp, Homo sapien
atgcagcggtgcaatccgggctcac

SEQ ID NO: 4378316 - DNA, 25 bp, Homo sapien
ctggaatgcagcggtgcaatccggg

SEQ ID NO: 4378317 - DNA, 25 bp, Homo sapien
gtcatgcatcgagaagtcagtgctc

SEQ ID NO: 4378318 - DNA, 25 bp, Homo sapien
aagtcatgcatcgagaagtcagtgc

SEQ ID NO: 4378319 - DNA, 25 bp, Homo sapien
agtcatgcatcgagaagtcagtgct

SEQ ID NO: 4378320 - DNA, 25 bp, Homo sapien
tgagtggcgaaccaagggaagccct

SEQ ID NO: 4378321 - DNA, 25 bp, Homo sapien
gaaacccgcattttattgacagtca

SEQ ID NO: 4378322 - DNA, 25 bp, Homo sapien
gctgtcagttcggtaaagtcaccct

SEQ ID NO: 4378323 - DNA, 25 bp, Homo sapien
ctctggtattaccacgagaattgaa

SEQ ID NO: 4378324 - DNA, 25 bp, Homo sapien
agaactcatacaaaattttccagat

SEQ ID NO: 4378325 - DNA, 25 bp, Homo sapien
tattcaagaactcatacaaaatttt

SEQ ID NO: 4378326 - DNA, 25 bp, Homo sapien
gaactcatacaaaattttccagata

SEQ ID NO: 4378327 - DNA, 25 bp, Homo sapien
tcaagaactcatacaaaattttcca

SEQ ID NO: 4378328 - DNA, 25 bp, Homo sapien
ttcctcctcttcttcgtcctggtta

SEQ ID NO: 4378329 - DNA, 25 bp, Homo sapien
tcctcctcttcttcgtcctggttaa

SEQ ID NO: 4378330 - DNA, 25 bp, Homo sapien
gcaactacgcgcaaccagtcacgta

SEQ ID NO: 4378331 - DNA, 25 bp, Homo sapien
tagcaactacgcgcaaccagtcacg

SEQ ID NO: 4378332 - DNA, 25 bp, Homo sapien
aactacgcgcaaccagtcacgtaga

SEQ ID NO: 4378333 - DNA, 25 bp, Homo sapien
ctacgcgcaaccagtcacgtagatt

SEQ ID NO: 4378334 - DNA, 25 bp, Homo sapien
cttttggagaaaggcacctcggatg

SEQ ID NO: 4378335 - DNA, 25 bp, Homo sapien
tttggagaaaggcacctcggatgtc

SEQ ID NO: 4378336 - DNA, 25 bp, Homo sapien
tggagaaaggcacctcggatgtcac

SEQ ID NO: 4378337 - DNA, 25 bp, Homo sapien
agaaaggcacctcggatgtcacggt

SEQ ID NO: 4378338 - DNA, 25 bp, Homo sapien
agagtgaacttcagaacttgcttct

SEQ ID NO: 4378339 - DNA, 25 bp, Homo sapien
gcaatcaagagtgaacttcagaact

SEQ ID NO: 4378340 - DNA, 25 bp, Homo sapien
attctacagggtgggtgcaatcaag

SEQ ID NO: 4378341 - DNA, 25 bp, Homo sapien
gattctacagggtgggtgcaatcaa

SEQ ID NO: 4378342 - DNA, 25 bp, Homo sapien
gttttcagggattgagacatctcag

SEQ ID NO: 4378343 - DNA, 25 bp, Homo sapien
aaggcacactaacattggaaggcag

SEQ ID NO: 4378344 - DNA, 25 bp, Homo sapien
gcaagcaccgagactgattacatta

SEQ ID NO: 4378345 - DNA, 25 bp, Homo sapien
gatctctatagcataccagctcaga

SEQ ID NO: 4378346 - DNA, 25 bp, Homo sapien
aaaggatgctcggtttatgcccaaa

SEQ ID NO: 4378347 - DNA, 25 bp, Homo sapien
gaaaattcccatgcaagataggctc

SEQ ID NO: 4378348 - DNA, 25 bp, Homo sapien
gttattgttttctcgcaggccagga

SEQ ID NO: 4378349 - DNA, 25 bp, Homo sapien
gacaggccttccatgagagcagtgg

SEQ ID NO: 4378350 - DNA, 25 bp, Homo sapien
catttagttaagaaggctcccaagg

SEQ ID NO: 4378351 - DNA, 25 bp, Homo sapien
cattgggtgttagcactagtcttcc

SEQ ID NO: 4378352 - DNA, 25 bp, Homo sapien
tccagtggtgcctctgaaaagatct

SEQ ID NO: 4378353 - DNA, 25 bp, Homo sapien
gcatacagccgtccctcttagtagg

SEQ ID NO: 4378354 - DNA, 25 bp, Homo sapien
taatacgtaaccatgagatacttgt

SEQ ID NO: 4378355 - DNA, 25 bp, Homo sapien
tacctaacatttggggctggcgata

SEQ ID NO: 4378356 - DNA, 25 bp, Homo sapien
tatgtgctcaataggtcatagttgt

SEQ ID NO: 4378357 - DNA, 25 bp, Homo sapien
gctggcgataaatggatggtaattc

SEQ ID NO: 4378358 - DNA, 25 bp, Homo sapien
aagcattaacaaaggttgacaaagg

SEQ ID NO: 4378359 - DNA, 25 bp, Homo sapien
gcctgacttcagatgaagcattaac

SEQ ID NO: 4378360 - DNA, 25 bp, Homo sapien
aaggtcagggtcacatcgcaaggat

SEQ ID NO: 4378361 - DNA, 25 bp, Homo sapien
acttcagatgaagcattaacaaagg

SEQ ID NO: 4378362 - DNA, 25 bp, Homo sapien
gtcactggaatatctaatctctgcg

SEQ ID NO: 4378363 - DNA, 25 bp, Homo sapien
ggaatatctaatctctgcggacaca

SEQ ID NO: 4378364 - DNA, 25 bp, Homo sapien
tcctcccgataaaccagaggtagag

SEQ ID NO: 4378365 - DNA, 25 bp, Homo sapien
gctgatccgagagatagctttcaga

SEQ ID NO: 4378366 - DNA, 25 bp, Homo sapien
cagacatggcaaaggtgttggtaaa

SEQ ID NO: 4378367 - DNA, 25 bp, Homo sapien
gccaacttggtgctacttatcttaa

SEQ ID NO: 4378368 - DNA, 25 bp, Homo sapien
cagcacagtggtggaaagttcaggc

SEQ ID NO: 4378369 - DNA, 25 bp, Homo sapien
tttgtaggtatcacatcagacttgc

SEQ ID NO: 4378370 - DNA, 25 bp, Homo sapien
tagaatcccggtagacacagtactg

SEQ ID NO: 4378371 - DNA, 25 bp, Homo sapien
ctttttagaatcccggtagacacag

SEQ ID NO: 4378372 - DNA, 25 bp, Homo sapien
tttagaatcccggtagacacagtac

SEQ ID NO: 4378373 - DNA, 25 bp, Homo sapien
gaatcccggtagacacagtactgga

SEQ ID NO: 4378374 - DNA, 25 bp, Homo sapien
tcctgcttgcaggtagagagcacat

SEQ ID NO: 4378375 - DNA, 25 bp, Homo sapien
ctttcatttcgccacagcacagcag

SEQ ID NO: 4378376 - DNA, 25 bp, Homo sapien
aaaaagagggatctggtatgggatt

SEQ ID NO: 4378377 - DNA, 25 bp, Homo sapien
gaaaaaagagggatctggtatggga

SEQ ID NO: 4378378 - DNA, 25 bp, Homo sapien
gagggatctggtatgggattgtacc

SEQ ID NO: 4378379 - DNA, 25 bp, Homo sapien
gggatctggtatgggattgtaccat

SEQ ID NO: 4378380 - DNA, 25 bp, Homo sapien
cacctcttaaatcttgttgactact

SEQ ID NO: 4378381 - DNA, 25 bp, Homo sapien
catcatcattccccgggcaggaagc

SEQ ID NO: 4378382 - DNA, 25 bp, Homo sapien
aaatcttgttgactacttccagatg

SEQ ID NO: 4378383 - DNA, 25 bp, Homo sapien
agaagtggatgataaaggggccacc

SEQ ID NO: 4378384 - DNA, 25 bp, Homo sapien
tatcttttctacagaggctgcattg

SEQ ID NO: 4378385 - DNA, 25 bp, Homo sapien
tacagaggctgcattgtgccagaga

SEQ ID NO: 4378386 - DNA, 25 bp, Homo sapien
gctgcattgtgccagagattgaata

SEQ ID NO: 4378387 - DNA, 25 bp, Homo sapien
cctaatatcttttctacagaggctg

SEQ ID NO: 4378388 - DNA, 25 bp, Homo sapien
cctggtgtgtagtaattctgattta

SEQ ID NO: 4378389 - DNA, 25 bp, Homo sapien
ggtgtgtagtaattctgatttatca

SEQ ID NO: 4378390 - DNA, 25 bp, Homo sapien
ctttgttttatcaagacctggtgtg

SEQ ID NO: 4378391 - DNA, 25 bp, Homo sapien
ttttatcaagacctggtgtgtagta

SEQ ID NO: 4378392 - DNA, 25 bp, Homo sapien
gaccctgaatagtacaagcagaccc

SEQ ID NO: 4378393 - DNA, 25 bp, Homo sapien
tggacgttaattcagcagaccctga

SEQ ID NO: 4378394 - DNA, 25 bp, Homo sapien
cagaccctgagactgaatcctataa

SEQ ID NO: 4378395 - DNA, 25 bp, Homo sapien
ctatgtctgacacctagctaggtca

SEQ ID NO: 4378396 - DNA, 25 bp, Homo sapien
catcagtgctggttaaaagcacccc

SEQ ID NO: 4378397 - DNA, 25 bp, Homo sapien
tcacatagctgtaacttgcctccag

SEQ ID NO: 4378398 - DNA, 25 bp, Homo sapien
gggacatagattcacttctgactga

SEQ ID NO: 4378399 - DNA, 25 bp, Homo sapien
cataaatggcaggttagagggacat

SEQ ID NO: 4378400 - DNA, 25 bp, Homo sapien
tctcagaggcctatgattcatttgc

SEQ ID NO: 4378401 - DNA, 25 bp, Homo sapien
ctaactactggtgagtgcagtgaca

SEQ ID NO: 4378402 - DNA, 25 bp, Homo sapien
agcagatgggttttagcaacttcac

SEQ ID NO: 4378403 - DNA, 25 bp, Homo sapien
gaaatagagggcacctgaaacaacc

SEQ ID NO: 4378404 - DNA, 25 bp, Homo sapien
acagaactgcccgaaaggtgatccc

SEQ ID NO: 4378405 - DNA, 25 bp, Homo sapien
tcatctacagcatggatgcaggacc

SEQ ID NO: 4378406 - DNA, 25 bp, Homo sapien
cttgttgcagaagcccgatgctggc

SEQ ID NO: 4378407 - DNA, 25 bp, Homo sapien
tctgcgcatggctcgaatgtgctcc

SEQ ID NO: 4378408 - DNA, 25 bp, Homo sapien
tgtataacttcccactcccacttaa

SEQ ID NO: 4378409 - DNA, 25 bp, Homo sapien
tgcccggccgacacttgtctctgta

SEQ ID NO: 4378410 - DNA, 25 bp, Homo sapien
gattcaggagtgaccaagaaacttg

SEQ ID NO: 4378411 - DNA, 25 bp, Homo sapien
gagagagtttcactgtaagtaaaga

SEQ ID NO: 4378412 - DNA, 25 bp, Homo sapien
cagtcagatcggattaaggtccacc

SEQ ID NO: 4378413 - DNA, 25 bp, Homo sapien
cctgggctcataggtagattatatg

SEQ ID NO: 4378414 - DNA, 25 bp, Homo sapien
tgctcattatgtcccaagtacctat

SEQ ID NO: 4378415 - DNA, 25 bp, Homo sapien
tggcagggactgctagctaatcact

SEQ ID NO: 4378416 - DNA, 25 bp, Homo sapien
aacttacaattgtggtggaaggcga

SEQ ID NO: 4378417 - DNA, 25 bp, Homo sapien
aaacttacaattgtggtggaaggcg

SEQ ID NO: 4378418 - DNA, 25 bp, Homo sapien
cttacaattgtggtggaaggcgaag

SEQ ID NO: 4378419 - DNA, 25 bp, Homo sapien
acttacaattgtggtggaaggcgaa

SEQ ID NO: 4378420 - DNA, 25 bp, Homo sapien
ttgctacaggactgagatctggtga

SEQ ID NO: 4378421 - DNA, 25 bp, Homo sapien
gctacaggactgagatctggtgatt

SEQ ID NO: 4378422 - DNA, 25 bp, Homo sapien
agatctggtgatttcaccgagagat

SEQ ID NO: 4378423 - DNA, 25 bp, Homo sapien
gatttcaccgagagatttatcttat

SEQ ID NO: 4378424 - DNA, 25 bp, Homo sapien
cactttttgtgacggtactttagag

SEQ ID NO: 4378425 - DNA, 25 bp, Homo sapien
gatgaatggcatcattccaagcaaa

SEQ ID NO: 4378426 - DNA, 25 bp, Homo sapien
tgcttagtattctgacaatgatgaa

SEQ ID NO: 4378427 - DNA, 25 bp, Homo sapien
caaaaccgactttcttcacacaaag

SEQ ID NO: 4378428 - DNA, 25 bp, Homo sapien
taagtaccaacagtatgctaggcac

SEQ ID NO: 4378429 - DNA, 25 bp, Homo sapien
tctgcaacaatgaattctctaatgg

SEQ ID NO: 4378430 - DNA, 25 bp, Homo sapien
gttcaagatgaaatgcaccccaagt

SEQ ID NO: 4378431 - DNA, 25 bp, Homo sapien
tcagccagcgtaaggaaggttatgc

SEQ ID NO: 4378432 - DNA, 25 bp, Homo sapien
gagctgcaagggtctattcaaggaa

SEQ ID NO: 4378433 - DNA, 25 bp, Homo sapien
aatgaagtagcgttgaatttaggtt

SEQ ID NO: 4378434 - DNA, 25 bp, Homo sapien
tgcaagggtctattcaaggaagata

SEQ ID NO: 4378435 - DNA, 25 bp, Homo sapien
atttaggttttgagtgacagcagga

SEQ ID NO: 4378436 - DNA, 25 bp, Homo sapien
gtgatactggaaatatctgttcatc

SEQ ID NO: 4378437 - DNA, 25 bp, Homo sapien
tactggaaatatctgttcatcaatc

SEQ ID NO: 4378438 - DNA, 25 bp, Homo sapien
gatactggaaatatctgttcatcaa

SEQ ID NO: 4378439 - DNA, 25 bp, Homo sapien
tgatactggaaatatctgttcatca

SEQ ID NO: 4378440 - DNA, 25 bp, Homo sapien
aatccatgtttcaagtctcctagga

SEQ ID NO: 4378441 - DNA, 25 bp, Homo sapien
ggtgacaggatgtaatccatgtttc

SEQ ID NO: 4378442 - DNA, 25 bp, Homo sapien
aaccagccaaatattgtggtgacag

SEQ ID NO: 4378443 - DNA, 25 bp, Homo sapien
acaccaacaccagaatgtggcttga

SEQ ID NO: 4378444 - DNA, 25 bp, Homo sapien
taacacagaggctatgctcacatag

SEQ ID NO: 4378445 - DNA, 25 bp, Homo sapien
tcaaaagttgacctcccaggtggca

SEQ ID NO: 4378446 - DNA, 25 bp, Homo sapien
aagaaaaggagcaccgaatctctga

SEQ ID NO: 4378447 - DNA, 25 bp, Homo sapien
cacatagtgaacaggtcttcagaaa

SEQ ID NO: 4378448 - DNA, 25 bp, Homo sapien
cagtaccagattatgaggtccagcc

SEQ ID NO: 4378449 - DNA, 25 bp, Homo sapien
gatgagttccatgcctgtcctggtg

SEQ ID NO: 4378450 - DNA, 25 bp, Homo sapien
gtccagccgggtaagaactctattc

SEQ ID NO: 4378451 - DNA, 25 bp, Homo sapien
gagcgacctttgacacaggctgatg

SEQ ID NO: 4378452 - DNA, 25 bp, Homo sapien
gctggcatatctgtagtaatcgtag

SEQ ID NO: 4378453 - DNA, 25 bp, Homo sapien
taggtatcagcagttagtgctggca

SEQ ID NO: 4378454 - DNA, 25 bp, Homo sapien
gcagttagtgctggcatatctgtag

SEQ ID NO: 4378455 - DNA, 25 bp, Homo sapien
tagtaatcgtagaagaagtaatcat

SEQ ID NO: 4378456 - DNA, 25 bp, Homo sapien
cattagtagaagcaagttatttctc

SEQ ID NO: 4378457 - DNA, 25 bp, Homo sapien
gcattagtagaagcaagttatttct

SEQ ID NO: 4378458 - DNA, 25 bp, Homo sapien
tgcattagtagaagcaagttatttc

SEQ ID NO: 4378459 - DNA, 25 bp, Homo sapien
ttgcattagtagaagcaagttattt

SEQ ID NO: 4378460 - DNA, 25 bp, Homo sapien
ggactcagaactatgaatctccaca

SEQ ID NO: 4378461 - DNA, 25 bp, Homo sapien
actcagaactatgaatctccacatg

SEQ ID NO: 4378462 - DNA, 25 bp, Homo sapien
tttggactcagaactatgaatctcc

SEQ ID NO: 4378463 - DNA, 25 bp, Homo sapien
atctttggactcagaactatgaatc

SEQ ID NO: 4378464 - DNA, 25 bp, Homo sapien
gaattgacaagattccccctattca

SEQ ID NO: 4378465 - DNA, 25 bp, Homo sapien
gcaggctcacgtcacacttagaaga

SEQ ID NO: 4378466 - DNA, 25 bp, Homo sapien
ttctctctgaacctgtgaattgaca

SEQ ID NO: 4378467 - DNA, 25 bp, Homo sapien
tcagctgctgaggaaaaaggtgttc

SEQ ID NO: 4378468 - DNA, 25 bp, Homo sapien
aaatgactaacttttccagatagcc

SEQ ID NO: 4378469 - DNA, 25 bp, Homo sapien
taccccttctcactggctagtcagg

SEQ ID NO: 4378470 - DNA, 25 bp, Homo sapien
gatgttctctattcgtcagctagca

SEQ ID NO: 4378471 - DNA, 25 bp, Homo sapien
cctttacacaatgagtagccagcag

SEQ ID NO: 4378472 - DNA, 25 bp, Homo sapien
agagcctcatgctccaaagtcccaa

SEQ ID NO: 4378473 - DNA, 25 bp, Homo sapien
tcttcatgatgagtgggaccctgac

SEQ ID NO: 4378474 - DNA, 25 bp, Homo sapien
ccaggcttgctggcttgcagtcaat

SEQ ID NO: 4378475 - DNA, 25 bp, Homo sapien
gaggctagcctctactttgcatgtg

SEQ ID NO: 4378476 - DNA, 25 bp, Homo sapien
gaatacgatctactagggttgccaa

SEQ ID NO: 4378477 - DNA, 25 bp, Homo sapien
caagctagcctatgaagacctgtct

SEQ ID NO: 4378478 - DNA, 25 bp, Homo sapien
ccaaagtccagataagctaaagcag

SEQ ID NO: 4378479 - DNA, 25 bp, Homo sapien
tttaagtgaggaaaacatagcccaa

SEQ ID NO: 4378480 - DNA, 25 bp, Homo sapien
tccctcagaccaaacctctgctggt

SEQ ID NO: 4378481 - DNA, 25 bp, Homo sapien
caagagcaaatggaacttgagcctc

SEQ ID NO: 4378482 - DNA, 25 bp, Homo sapien
gaccaaacctctgctggttctactt

SEQ ID NO: 4378483 - DNA, 25 bp, Homo sapien
cttgagcctcaaaagatttgagctc

SEQ ID NO: 4378484 - DNA, 25 bp, Homo sapien
acacctaaagatttccccacaagag

SEQ ID NO: 4378485 - DNA, 25 bp, Homo sapien
ggccgtaagtctgaattcctgacac

SEQ ID NO: 4378486 - DNA, 25 bp, Homo sapien
gttaggccgtaagtctgaattcctg

SEQ ID NO: 4378487 - DNA, 25 bp, Homo sapien
tatacacctaaagatttccccacaa

SEQ ID NO: 4378488 - DNA, 25 bp, Homo sapien
tcagctggactcatcatcaaaatgc

SEQ ID NO: 4378489 - DNA, 25 bp, Homo sapien
cagctggactcatcatcaaaatgct

SEQ ID NO: 4378490 - DNA, 25 bp, Homo sapien
gtttacatattagatgacctgttca

SEQ ID NO: 4378491 - DNA, 25 bp, Homo sapien
gagaacgaagcatctccttagatag

SEQ ID NO: 4378492 - DNA, 25 bp, Homo sapien
ctcatttatatcgaagacatgctgg

SEQ ID NO: 4378493 - DNA, 25 bp, Homo sapien
tttcaaccacatcctgagaacgaag

SEQ ID NO: 4378494 - DNA, 25 bp, Homo sapien
tttttaacatcggggcggaaatgca

SEQ ID NO: 4378495 - DNA, 25 bp, Homo sapien
ttttaacatcggggcggaaatgcat

SEQ ID NO: 4378496 - DNA, 25 bp, Homo sapien
tgtcactaattaatgctcctgctgc

SEQ ID NO: 4378497 - DNA, 25 bp, Homo sapien
ctgcatacaagaatgtggacctgtg

SEQ ID NO: 4378498 - DNA, 25 bp, Homo sapien
ggacactcaggactcgacttctttt

SEQ ID NO: 4378499 - DNA, 25 bp, Homo sapien
cctgacccattgttagaagcttcct

SEQ ID NO: 4378500 - DNA, 25 bp, Homo sapien
gatcactgaggatgcctgtccaaaa

SEQ ID NO: 4378501 - DNA, 25 bp, Homo sapien
tctttctccaaaaccgagcctagca

SEQ ID NO: 4378502 - DNA, 25 bp, Homo sapien
gactcagaatgactccaggataaaa

SEQ ID NO: 4378503 - DNA, 25 bp, Homo sapien
cctcatgcatatacaccactggatt

SEQ ID NO: 4378504 - DNA, 25 bp, Homo sapien
taacacaagaactattgagattact

SEQ ID NO: 4378505 - DNA, 25 bp, Homo sapien
tgaactcagtgaaacttgtccacct

SEQ ID NO: 4378506 - DNA, 25 bp, Homo sapien
gagatggacctacttcataccatta

SEQ ID NO: 4378507 - DNA, 25 bp, Homo sapien
catatgaatttgatactttgagaac

SEQ ID NO: 4378508 - DNA, 25 bp, Homo sapien
ctggcctgcaaaatatggtggcatt

SEQ ID NO: 4378509 - DNA, 25 bp, Homo sapien
actggcctgcaaaatatggtggcat

SEQ ID NO: 4378510 - DNA, 25 bp, Homo sapien
cgggctggatatttagtgccgctgt

SEQ ID NO: 4378511 - DNA, 25 bp, Homo sapien
aagtaaattgagaggctaacacagc

SEQ ID NO: 4378512 - DNA, 25 bp, Homo sapien
tgagaggctaacacagccctcactc

SEQ ID NO: 4378513 - DNA, 25 bp, Homo sapien
cccagtcgggctggatatttagtgc

SEQ ID NO: 4378514 - DNA, 25 bp, Homo sapien
tcctgaaaacaatagcggcttcttg

SEQ ID NO: 4378515 - DNA, 25 bp, Homo sapien
tagtcataaacgtgcagaggctgag

SEQ ID NO: 4378516 - DNA, 25 bp, Homo sapien
gaactgcacctgctagaatatcgtg

SEQ ID NO: 4378517 - DNA, 25 bp, Homo sapien
catccgagccgaagcaatgggactt

SEQ ID NO: 4378518 - DNA, 25 bp, Homo sapien
ttcgtcaaggtgcagccaggcacca

SEQ ID NO: 4378519 - DNA, 25 bp, Homo sapien
cttcgtcaaggtgcagccaggcacc

SEQ ID NO: 4378520 - DNA, 25 bp, Homo sapien
ctttagtatacatctgtgacacaga

SEQ ID NO: 4378521 - DNA, 25 bp, Homo sapien
ggttgagatttactgaaacgaagat

SEQ ID NO: 4378522 - DNA, 25 bp, Homo sapien
cttctttagtatacatctgtgacac

SEQ ID NO: 4378523 - DNA, 25 bp, Homo sapien
gaagatcagatgaaaagagtaagtc

SEQ ID NO: 4378524 - DNA, 25 bp, Homo sapien
attatcagatggtacagtcaatgtc

SEQ ID NO: 4378525 - DNA, 25 bp, Homo sapien
ttatcagatggtacagtcaatgtca

SEQ ID NO: 4378526 - DNA, 25 bp, Homo sapien
tatcagatggtacagtcaatgtcat

SEQ ID NO: 4378527 - DNA, 25 bp, Homo sapien
tttctcagttcttaatatgtctcca

SEQ ID NO: 4378528 - DNA, 25 bp, Homo sapien
catcttaccccagtgagtacacaca

SEQ ID NO: 4378529 - DNA, 25 bp, Homo sapien
tccataaacatcttaccccagtgag

SEQ ID NO: 4378530 - DNA, 25 bp, Homo sapien
ctcagttcttaatatgtctccataa

SEQ ID NO: 4378531 - DNA, 25 bp, Homo sapien
caagaatattgtcacctgccacctg

SEQ ID NO: 4378532 - DNA, 25 bp, Homo sapien
cagagtcggagaacttgagatgcac

SEQ ID NO: 4378533 - DNA, 25 bp, Homo sapien
tacaccgcagatttgagcagtgctg

SEQ ID NO: 4378534 - DNA, 25 bp, Homo sapien
caccgactattttgcaagagctcag

SEQ ID NO: 4378535 - DNA, 25 bp, Homo sapien
tgtagagccagagcaaatgcacccc

SEQ ID NO: 4378536 - DNA, 25 bp, Homo sapien
cttacgtatgagattggaaggctac

SEQ ID NO: 4378537 - DNA, 25 bp, Homo sapien
tcataataccatgcagacaatgtgg

SEQ ID NO: 4378538 - DNA, 25 bp, Homo sapien
gctacatgtgtaagggaacgtgcat

SEQ ID NO: 4378539 - DNA, 25 bp, Homo sapien
aaacttttgcttatggcacaggcac

SEQ ID NO: 4378540 - DNA, 25 bp, Homo sapien
cctgctgccgttacaaagtcattag

SEQ ID NO: 4378541 - DNA, 25 bp, Homo sapien
agagtggcttgtgacgctctccaca

SEQ ID NO: 4378542 - DNA, 25 bp, Homo sapien
gcacccagtgagtggctacctcaga

SEQ ID NO: 4378543 - DNA, 25 bp, Homo sapien
ccacaggagtgggattcaaagaaca

SEQ ID NO: 4378544 - DNA, 25 bp, Homo sapien
gaacagccttctcaggaagtcagca

SEQ ID NO: 4378545 - DNA, 25 bp, Homo sapien
tggaacaacaaaacggtacatgcct

SEQ ID NO: 4378546 - DNA, 25 bp, Homo sapien
gcctatccaggcaagcagactatta

SEQ ID NO: 4378547 - DNA, 25 bp, Homo sapien
tttttctgttgggtcgttccaagca

SEQ ID NO: 4378548 - DNA, 25 bp, Homo sapien
agaagtgaaatgctaggccaggatg

SEQ ID NO: 4378549 - DNA, 25 bp, Homo sapien
ggtgtatggaggaccacagtgttct

SEQ ID NO: 4378550 - DNA, 25 bp, Homo sapien
caagcagaagcgagaagtgaaatgc

SEQ ID NO: 4378551 - DNA, 25 bp, Homo sapien
ttcctctcactcttctgcactgtct

SEQ ID NO: 4378552 - DNA, 25 bp, Homo sapien
cccaatgtggacttcatcccagttc

SEQ ID NO: 4378553 - DNA, 25 bp, Homo sapien
ttccccaagacctccccaatgtgga

SEQ ID NO: 4378554 - DNA, 25 bp, Homo sapien
tgcactgtcttgttccccaagacct

SEQ ID NO: 4378555 - DNA, 25 bp, Homo sapien
gctgtttctgtgtccgtcccactga

SEQ ID NO: 4378556 - DNA, 25 bp, Homo sapien
atctcaactaaacctccggaaccat

SEQ ID NO: 4378557 - DNA, 25 bp, Homo sapien
ccggaaccattaggaacacagacca

SEQ ID NO: 4378558 - DNA, 25 bp, Homo sapien
tcttcttcggcataagtacacacaa

SEQ ID NO: 4378559 - DNA, 25 bp, Homo sapien
gaaggttggcagaaacatttatgtc

SEQ ID NO: 4378560 - DNA, 25 bp, Homo sapien
ggaaggttggcagaaacatttatgt

SEQ ID NO: 4378561 - DNA, 25 bp, Homo sapien
gggaaggttggcagaaacatttatg

SEQ ID NO: 4378562 - DNA, 25 bp, Homo sapien
tcttgtaagtggcaagaagctggag

SEQ ID NO: 4378563 - DNA, 25 bp, Homo sapien
ggaaaccatggagacttcagtttgg

SEQ ID NO: 4378564 - DNA, 25 bp, Homo sapien
tgttcttgaactgtgatgggaaagt

SEQ ID NO: 4378565 - DNA, 25 bp, Homo sapien
gctggaggaatgagatcctttaaag

SEQ ID NO: 4378566 - DNA, 25 bp, Homo sapien
aaggataaaatacgcaaaaactgtg

SEQ ID NO: 4378567 - DNA, 25 bp, Homo sapien
taaaatacgcaaaaactgtgagcat

SEQ ID NO: 4378568 - DNA, 25 bp, Homo sapien
gcacaaaggataaaatacgcaaaaa

SEQ ID NO: 4378569 - DNA, 25 bp, Homo sapien
gataaaatacgcaaaaactgtgagc

SEQ ID NO: 4378570 - DNA, 25 bp, Homo sapien
tctccagagggacccattggacaag

SEQ ID NO: 4378571 - DNA, 25 bp, Homo sapien
cacttgagctaaataggtagaagcc

SEQ ID NO: 4378572 - DNA, 25 bp, Homo sapien
tagaagccattagttatacccacag

SEQ ID NO: 4378573 - DNA, 25 bp, Homo sapien
tctgtgtgcaaactaaggatctgga

SEQ ID NO: 4378574 - DNA, 25 bp, Homo sapien
tctcactatacagccaatttccttg

SEQ ID NO: 4378575 - DNA, 25 bp, Homo sapien
ttacacttgttctcactatacagcc

SEQ ID NO: 4378576 - DNA, 25 bp, Homo sapien
ttctgatcgatttgtctgtctcctc

SEQ ID NO: 4378577 - DNA, 25 bp, Homo sapien
tatcctcttccttacacttgttctc

SEQ ID NO: 4378578 - DNA, 25 bp, Homo sapien
tgaaggccagaagagtgggaagggg

SEQ ID NO: 4378579 - DNA, 25 bp, Homo sapien
cagaagagtgggaagggggaaatct

SEQ ID NO: 4378580 - DNA, 25 bp, Homo sapien
ctgaaggccagaagagtgggaaggg

SEQ ID NO: 4378581 - DNA, 25 bp, Homo sapien
gttgtgtttatctcagttactgggc

SEQ ID NO: 4378582 - DNA, 25 bp, Homo sapien
catcaaaatactgcaagaagactgt

SEQ ID NO: 4378583 - DNA, 25 bp, Homo sapien
cctcggcctccgttgggagaaggat

SEQ ID NO: 4378584 - DNA, 25 bp, Homo sapien
cccgggtaatggtcaagtaatagca

SEQ ID NO: 4378585 - DNA, 25 bp, Homo sapien
ccttgccgcggtcttgctaatcgca

SEQ ID NO: 4378586 - DNA, 25 bp, Homo sapien
agcaagtgtaggagtaacaagtgcc

SEQ ID NO: 4378587 - DNA, 25 bp, Homo sapien
aatcgcatcgccttttgagacttta

SEQ ID NO: 4378588 - DNA, 25 bp, Homo sapien
acagagagcaagtgtaggagtaaca

SEQ ID NO: 4378589 - DNA, 25 bp, Homo sapien
tccgtggtctctggtctaggtccat

SEQ ID NO: 4378590 - DNA, 25 bp, Homo sapien
caatctcggtgtagattcagtgggt

SEQ ID NO: 4378591 - DNA, 25 bp, Homo sapien
agattcagtgggtattttcagggtc

SEQ ID NO: 4378592 - DNA, 25 bp, Homo sapien
tgcaaactgtgttgtgcattcaatc

SEQ ID NO: 4378593 - DNA, 25 bp, Homo sapien
aggctgcacccagacgaagcgccgg

SEQ ID NO: 4378594 - DNA, 25 bp, Homo sapien
caagcccgaggtgcgcgggtcgcag

SEQ ID NO: 4378595 - DNA, 25 bp, Homo sapien
ctcggcgcccagcaagcccgaggtg

SEQ ID NO: 4378596 - DNA, 25 bp, Homo sapien
tctccgcggcccaacgctctggcag

SEQ ID NO: 4378597 - DNA, 25 bp, Homo sapien
tgtggccagtttccttgccctgcct

SEQ ID NO: 4378598 - DNA, 25 bp, Homo sapien
ttgtggccagtttccttgccctgcc

SEQ ID NO: 4378599 - DNA, 25 bp, Homo sapien
agcattgtcagtttggacaccttcg

SEQ ID NO: 4378600 - DNA, 25 bp, Homo sapien
agtttggacaccttcgcacatgcgc

SEQ ID NO: 4378601 - DNA, 25 bp, Homo sapien
gtcagtttggacaccttcgcacatg

SEQ ID NO: 4378602 - DNA, 25 bp, Homo sapien
cattgtcagtttggacaccttcgca

SEQ ID NO: 4378603 - DNA, 25 bp, Homo sapien
cttccacgtccagccagggaaaggg

SEQ ID NO: 4378604 - DNA, 25 bp, Homo sapien
tcagggctagctcggcttccacgtc

SEQ ID NO: 4378605 - DNA, 25 bp, Homo sapien
gcttgcagagaaatgcgcgctttga

SEQ ID NO: 4378606 - DNA, 25 bp, Homo sapien
ttgaacgccggcgaggcgacagctc

SEQ ID NO: 4378607 - DNA, 25 bp, Homo sapien
ggcagctctggtgctcacgccgctt

SEQ ID NO: 4378608 - DNA, 25 bp, Homo sapien
tcacgccgcttagggctccagctgt

SEQ ID NO: 4378609 - DNA, 25 bp, Homo sapien
tggtttctttggccgcggcagctct

SEQ ID NO: 4378610 - DNA, 25 bp, Homo sapien
tcccgcacagcctagtctgcggcgc

SEQ ID NO: 4378611 - DNA, 25 bp, Homo sapien
tcttcattgcaattagtctcaacaa

SEQ ID NO: 4378612 - DNA, 25 bp, Homo sapien
tagcctaatagcagacacactttca

SEQ ID NO: 4378613 - DNA, 25 bp, Homo sapien
gcatggctagacctaccctcttcat

SEQ ID NO: 4378614 - DNA, 25 bp, Homo sapien
gtctcaacaaatagcctaatagcag

SEQ ID NO: 4378615 - DNA, 25 bp, Homo sapien
ggcagaggcaccaggagttcctggg

SEQ ID NO: 4378616 - DNA, 25 bp, Homo sapien
tccctgaagctcagaggcagaggca

SEQ ID NO: 4378617 - DNA, 25 bp, Homo sapien
ggcagctgtgctggagattctgtca

SEQ ID NO: 4378618 - DNA, 25 bp, Homo sapien
gcagctgtgctggagattctgtcat

SEQ ID NO: 4378619 - DNA, 25 bp, Homo sapien
tctgggacacactgcattatacagc

SEQ ID NO: 4378620 - DNA, 25 bp, Homo sapien
ggaatatgtttccaaagggctgtct

SEQ ID NO: 4378621 - DNA, 25 bp, Homo sapien
tatcctgggccactaaaaagagcca

SEQ ID NO: 4378622 - DNA, 25 bp, Homo sapien
gtcattaatcttggatggccaggat

SEQ ID NO: 4378623 - DNA, 25 bp, Homo sapien
cacagaggtggtgtctgtagctgaa

SEQ ID NO: 4378624 - DNA, 25 bp, Homo sapien
tggcaaaagctctcatgccggcact

SEQ ID NO: 4378625 - DNA, 25 bp, Homo sapien
tacgggaagattgtcctcacagctc

SEQ ID NO: 4378626 - DNA, 25 bp, Homo sapien
tccagttggtgcaacaggagatctg

SEQ ID NO: 4378627 - DNA, 25 bp, Homo sapien
ggcctctgacagaggtattgttctt

SEQ ID NO: 4378628 - DNA, 25 bp, Homo sapien
ttcttcctcattgcccgtattcacg

SEQ ID NO: 4378629 - DNA, 25 bp, Homo sapien
ctgacagaggtattgttcttgtttg

SEQ ID NO: 4378630 - DNA, 25 bp, Homo sapien
cgtattcacgattggtattggctga

SEQ ID NO: 4378631 - DNA, 25 bp, Homo sapien
gaatatgtgctgtactgttacgtgt

SEQ ID NO: 4378632 - DNA, 25 bp, Homo sapien
gccttgtggcacacaaaggtgagaa

SEQ ID NO: 4378633 - DNA, 25 bp, Homo sapien
tgttacgtgtaagagattctgcaga

SEQ ID NO: 4378634 - DNA, 25 bp, Homo sapien
tcagtacgcccttgaagaattgcct

SEQ ID NO: 4378635 - DNA, 25 bp, Homo sapien
catgctaatcctctatgtgtcattc

SEQ ID NO: 4378636 - DNA, 25 bp, Homo sapien
ggccatgctaatcctctatgtgtca

SEQ ID NO: 4378637 - DNA, 25 bp, Homo sapien
gctaatcctctatgtgtcattccaa

SEQ ID NO: 4378638 - DNA, 25 bp, Homo sapien
ggggccatgctaatcctctatgtgt

SEQ ID NO: 4378639 - DNA, 25 bp, Homo sapien
aagagctgttttcccatccacagtc

SEQ ID NO: 4378640 - DNA, 25 bp, Homo sapien
aagagcaaactgtcaatggaatgat

SEQ ID NO: 4378641 - DNA, 25 bp, Homo sapien
tgattttgacgaataaatgacttgt

SEQ ID NO: 4378642 - DNA, 25 bp, Homo sapien
aagcaaaagttacagccgataaaca

SEQ ID NO: 4378643 - DNA, 25 bp, Homo sapien
ttatcctctcttgctcctgccacag

SEQ ID NO: 4378644 - DNA, 25 bp, Homo sapien
gcttatcctctcttgctcctgccac

SEQ ID NO: 4378645 - DNA, 25 bp, Homo sapien
atcctctcttgctcctgccacagac

SEQ ID NO: 4378646 - DNA, 25 bp, Homo sapien
ctagcttatcctctcttgctcctgc

SEQ ID NO: 4378647 - DNA, 25 bp, Homo sapien
catctacccacaggttctctttgtt

SEQ ID NO: 4378648 - DNA, 25 bp, Homo sapien
agaaggagcagagtgtccgcaatcc

SEQ ID NO: 4378649 - DNA, 25 bp, Homo sapien
tcggccctgtgtagatgggccacat

SEQ ID NO: 4378650 - DNA, 25 bp, Homo sapien
agagtgtccgcaatcccctgaactc

SEQ ID NO: 4378651 - DNA, 25 bp, Homo sapien
ttatcccacagtttcggccctgtgt

SEQ ID NO: 4378652 - DNA, 25 bp, Homo sapien
ggctaacagtgcagtagaaagggac

SEQ ID NO: 4378653 - DNA, 25 bp, Homo sapien
tagaaagggaccctgccctacaatc

SEQ ID NO: 4378654 - DNA, 25 bp, Homo sapien
cagtagaaagggaccctgccctaca

SEQ ID NO: 4378655 - DNA, 25 bp, Homo sapien
taacagtgcagtagaaagggaccct

SEQ ID NO: 4378656 - DNA, 25 bp, Homo sapien
tctcttaagtctcgagccaggctaa

SEQ ID NO: 4378657 - DNA, 25 bp, Homo sapien
aaggaagcccctcattctgaaggac

SEQ ID NO: 4378658 - DNA, 25 bp, Homo sapien
tacactttgtatgacggtgggtgca

SEQ ID NO: 4378659 - DNA, 25 bp, Homo sapien
aagattgctgcctccttaaaaaggg

SEQ ID NO: 4378660 - DNA, 25 bp, Homo sapien
acggatgcgcacgatcggcgttccc

SEQ ID NO: 4378661 - DNA, 25 bp, Homo sapien
gtgacggatgcgcacgatcggcgtt

SEQ ID NO: 4378662 - DNA, 25 bp, Homo sapien
cccattgccggcgaggggtgacgga

SEQ ID NO: 4378663 - DNA, 25 bp, Homo sapien
cgaggggtgacggatgcgcacgatc

SEQ ID NO: 4378664 - DNA, 25 bp, Homo sapien
gacagagcccaactcttcgcggtgg

SEQ ID NO: 4378665 - DNA, 25 bp, Homo sapien
ggcgcctacgcccttctcagttagg

SEQ ID NO: 4378666 - DNA, 25 bp, Homo sapien
gaaagtcagcgagaaaaacagcgcg

SEQ ID NO: 4378667 - DNA, 25 bp, Homo sapien
tgctctagaatgaacggtggaaggc

SEQ ID NO: 4378668 - DNA, 25 bp, Homo sapien
tctcgcggctctcgtgagagtcact

SEQ ID NO: 4378669 - DNA, 25 bp, Homo sapien
gattggccaagctgactctcgcggc

SEQ ID NO: 4378670 - DNA, 25 bp, Homo sapien
cgctgccgggcgagtcggcttataa

SEQ ID NO: 4378671 - DNA, 25 bp, Homo sapien
tcggcttataaagggagcggccgcc

SEQ ID NO: 4378672 - DNA, 25 bp, Homo sapien
tatggagtctcgttcctcaccacag

SEQ ID NO: 4378673 - DNA, 25 bp, Homo sapien
catgatggcatacctctgctatgga

SEQ ID NO: 4378674 - DNA, 25 bp, Homo sapien
gaaatataagctcaccaacgtcaag

SEQ ID NO: 4378675 - DNA, 25 bp, Homo sapien
tggatatctgcgctccatcccaatg

SEQ ID NO: 4378676 - DNA, 25 bp, Homo sapien
cacaaggccagtagtgaagccagca

SEQ ID NO: 4378677 - DNA, 25 bp, Homo sapien
gaagtaatgagaccacgctccactg

SEQ ID NO: 4378678 - DNA, 25 bp, Homo sapien
tcagcgctggctcagtaatcaagac

SEQ ID NO: 4378679 - DNA, 25 bp, Homo sapien
tataacttgcacagcggtgttggca

SEQ ID NO: 4378680 - DNA, 25 bp, Homo sapien
gataatgttcgggtagataaactgg

SEQ ID NO: 4378681 - DNA, 25 bp, Homo sapien
gccttgatcattcccgagccgttgt

SEQ ID NO: 4378682 - DNA, 25 bp, Homo sapien
gagccgttgtcgatcaccaccggta

SEQ ID NO: 4378683 - DNA, 25 bp, Homo sapien
gcttggtcgcccacgcagagttcta

SEQ ID NO: 4378684 - DNA, 25 bp, Homo sapien
gtatcaggaaaacccgactttcgca

SEQ ID NO: 4378685 - DNA, 25 bp, Homo sapien
gaatcccggaatcccagtatcagga

SEQ ID NO: 4378686 - DNA, 25 bp, Homo sapien
tctctgagccgctctagctacgggc

SEQ ID NO: 4378687 - DNA, 25 bp, Homo sapien
tgttaccgcccgctattgcttctcg

SEQ ID NO: 4378688 - DNA, 25 bp, Homo sapien
taatgttgcgcatgcccactgtgcc

SEQ ID NO: 4378689 - DNA, 25 bp, Homo sapien
gaagccttagcttaatgtatgccgg

SEQ ID NO: 4378690 - DNA, 25 bp, Homo sapien
taaaagtggttagtcctgtcgcctc

SEQ ID NO: 4378691 - DNA, 25 bp, Homo sapien
tctgtcaccaggtaagggcatcttg

SEQ ID NO: 4378692 - DNA, 25 bp, Homo sapien
ccacagtggttgataggaaataagc

SEQ ID NO: 4378693 - DNA, 25 bp, Homo sapien
caagattcatgcaaggtaaaaaacc

SEQ ID NO: 4378694 - DNA, 25 bp, Homo sapien
tagaattgtaattgtggttccacca

SEQ ID NO: 4378695 - DNA, 25 bp, Homo sapien
tagtcttccatagtcgcatgcatca

SEQ ID NO: 4378696 - DNA, 25 bp, Homo sapien
taatacagtcattatcttttacaca

SEQ ID NO: 4378697 - DNA, 25 bp, Homo sapien
gacagttatacaaagtttaatacag

SEQ ID NO: 4378698 - DNA, 25 bp, Homo sapien
cagttatacaaagtttaatacagtc

SEQ ID NO: 4378699 - DNA, 25 bp, Homo sapien
acaaagtttaatacagtcattatct

SEQ ID NO: 4378700 - DNA, 25 bp, Homo sapien
tagaatattaatctctgtgaaacaa

SEQ ID NO: 4378701 - DNA, 25 bp, Homo sapien
tgtgaaacaataagacaagtgtatg

SEQ ID NO: 4378702 - DNA, 25 bp, Homo sapien
tctctgtgaaacaataagacaagtg

SEQ ID NO: 4378703 - DNA, 25 bp, Homo sapien
tattaatctctgtgaaacaataaga

SEQ ID NO: 4378704 - DNA, 25 bp, Homo sapien
taagattctccataagttgatgtcc

SEQ ID NO: 4378705 - DNA, 25 bp, Homo sapien
ttttaaggccattggagacttctgc

SEQ ID NO: 4378706 - DNA, 25 bp, Homo sapien
caaaacctgcattagatgagtggtc

SEQ ID NO: 4378707 - DNA, 25 bp, Homo sapien
agatatacacgtccatctaccacaa

SEQ ID NO: 4378708 - DNA, 25 bp, Homo sapien
ctgtattgtctggttttagacaacc

SEQ ID NO: 4378709 - DNA, 25 bp, Homo sapien
tgtctggttttagacaacccatttg

SEQ ID NO: 4378710 - DNA, 25 bp, Homo sapien
tctggttttagacaacccatttgaa

SEQ ID NO: 4378711 - DNA, 25 bp, Homo sapien
tattgtctggttttagacaacccat

SEQ ID NO: 4378712 - DNA, 25 bp, Homo sapien
tactaccaattttgtggaccaaagc

SEQ ID NO: 4378713 - DNA, 25 bp, Homo sapien
cactgtgtaaccatttctgaggcac

SEQ ID NO: 4378714 - DNA, 25 bp, Homo sapien
catgagccacgatccttagtatcta

SEQ ID NO: 4378715 - DNA, 25 bp, Homo sapien
gatagctagttacccattcctcaga

SEQ ID NO: 4378716 - DNA, 25 bp, Homo sapien
tcattgattgtgaaagtgcaacaag

SEQ ID NO: 4378717 - DNA, 25 bp, Homo sapien
attgtgaaagtgcaacaagtccttc

SEQ ID NO: 4378718 - DNA, 25 bp, Homo sapien
ttgattgtgaaagtgcaacaagtcc

SEQ ID NO: 4378719 - DNA, 25 bp, Homo sapien
ccccaaatgtagatatgagagaaag

SEQ ID NO: 4378720 - DNA, 25 bp, Homo sapien
aatgtttgggtggatagcagatata

SEQ ID NO: 4378721 - DNA, 25 bp, Homo sapien
taatactatgtcagtttagaagctg

SEQ ID NO: 4378722 - DNA, 25 bp, Homo sapien
gatccttaaggtacttagtagagct

SEQ ID NO: 4378723 - DNA, 25 bp, Homo sapien
gaaggaatcgttaatagaatcagtc

SEQ ID NO: 4378724 - DNA, 25 bp, Homo sapien
cactgagatagtttgcgcctgcatt

SEQ ID NO: 4378725 - DNA, 25 bp, Homo sapien
tccagggtagtgttgcttttcagta

SEQ ID NO: 4378726 - DNA, 25 bp, Homo sapien
taagactcctgttgtgtgaagtaag

SEQ ID NO: 4378727 - DNA, 25 bp, Homo sapien
gaaagatctattacttccagggtag

SEQ ID NO: 4378728 - DNA, 25 bp, Homo sapien
tacacaactaaattgctcatttatg

SEQ ID NO: 4378729 - DNA, 25 bp, Homo sapien
caagaaagttaatgaaaattcacca

SEQ ID NO: 4378730 - DNA, 25 bp, Homo sapien
ctaatcattggaaataatgtctaac

SEQ ID NO: 4378731 - DNA, 25 bp, Homo sapien
taaagcttaggacaaaggattgaca

SEQ ID NO: 4378732 - DNA, 25 bp, Homo sapien
cagctgacatcaaggtagcgcaggc

SEQ ID NO: 4378733 - DNA, 25 bp, Homo sapien
gattttctttcaacatgcggcctac

SEQ ID NO: 4378734 - DNA, 25 bp, Homo sapien
tgtgtagtgcaacaagacagtgatt

SEQ ID NO: 4378735 - DNA, 25 bp, Homo sapien
tcagatacagtgcatcacataactg

SEQ ID NO: 4378736 - DNA, 25 bp, Homo sapien
gacatatgctgttatttaaattagc

SEQ ID NO: 4378737 - DNA, 25 bp, Homo sapien
agacatatgctgttatttaaattag

SEQ ID NO: 4378738 - DNA, 25 bp, Homo sapien
cagacatatgctgttatttaaatta

SEQ ID NO: 4378739 - DNA, 25 bp, Homo sapien
acatatgctgttatttaaattagct

SEQ ID NO: 4378740 - DNA, 25 bp, Homo sapien
aataagtgttccataagcagcctac

SEQ ID NO: 4378741 - DNA, 25 bp, Homo sapien
ggcaaatattttcatctagctgagt

SEQ ID NO: 4378742 - DNA, 25 bp, Homo sapien
caagtctgtcagatactagctctac

SEQ ID NO: 4378743 - DNA, 25 bp, Homo sapien
tgaaattatgcttccctcacagaaa

SEQ ID NO: 4378744 - DNA, 25 bp, Homo sapien
actagcacctagctggctgccagaa

SEQ ID NO: 4378745 - DNA, 25 bp, Homo sapien
tgatttgtctagagtggcacctggc

SEQ ID NO: 4378746 - DNA, 25 bp, Homo sapien
tttaggctacaacgcttgaaagcag

SEQ ID NO: 4378747 - DNA, 25 bp, Homo sapien
cctcaggtggatttaggaatgacac

SEQ ID NO: 4378748 - DNA, 25 bp, Homo sapien
tttcaaaggtgtaatggttcagcca

SEQ ID NO: 4378749 - DNA, 25 bp, Homo sapien
catgtaccttgacataaacttgtag

SEQ ID NO: 4378750 - DNA, 25 bp, Homo sapien
caggtttactcactaagaacttgag

SEQ ID NO: 4378751 - DNA, 25 bp, Homo sapien
tcttaactactttgaccctcacagg

SEQ ID NO: 4378752 - DNA, 25 bp, Homo sapien
cactgtacagtataggtcggtttag

SEQ ID NO: 4378753 - DNA, 25 bp, Homo sapien
ttcactgtacagtataggtcggttt

SEQ ID NO: 4378754 - DNA, 25 bp, Homo sapien
ctgttcactgtacagtataggtcgg

SEQ ID NO: 4378755 - DNA, 25 bp, Homo sapien
ctgtacagtataggtcggtttaggt

SEQ ID NO: 4378756 - DNA, 25 bp, Homo sapien
gatcacagtcacccagatctaattt

SEQ ID NO: 4378757 - DNA, 25 bp, Homo sapien
ttcttaggtatttcagagtccgatt

SEQ ID NO: 4378758 - DNA, 25 bp, Homo sapien
ccaccttcgggcccaatatcattaa

SEQ ID NO: 4378759 - DNA, 25 bp, Homo sapien
tagcaatcaattctccaccttcggg

SEQ ID NO: 4378760 - DNA, 25 bp, Homo sapien
ccttcgggcccaatatcattaaaca

SEQ ID NO: 4378761 - DNA, 25 bp, Homo sapien
aatatcattaaacatgaggtttaag

SEQ ID NO: 4378762 - DNA, 25 bp, Homo sapien
tatgcaccaacatcacatagaaggt

SEQ ID NO: 4378763 - DNA, 25 bp, Homo sapien
cagcatagtatgcaccaacatcaca

SEQ ID NO: 4378764 - DNA, 25 bp, Homo sapien
catagaaggttatatccaacatcca

SEQ ID NO: 4378765 - DNA, 25 bp, Homo sapien
ctgaagcagtttcgcagcatagtat

SEQ ID NO: 4378766 - DNA, 25 bp, Homo sapien
taatatacagacaattctttaaaat

SEQ ID NO: 4378767 - DNA, 25 bp, Homo sapien
cattaatatacagacaattctttaa

SEQ ID NO: 4378768 - DNA, 25 bp, Homo sapien
ttaatatacagacaattctttaaaa

SEQ ID NO: 4378769 - DNA, 25 bp, Homo sapien
tttggaaagaatccaaaaatcttca

SEQ ID NO: 4378770 - DNA, 25 bp, Homo sapien
agcgattgttaccagcaatgtttaa

SEQ ID NO: 4378771 - DNA, 25 bp, Homo sapien
tctttctactggcactaagcgattg

SEQ ID NO: 4378772 - DNA, 25 bp, Homo sapien
ctgtaactctttctactggcactaa

SEQ ID NO: 4378773 - DNA, 25 bp, Homo sapien
ggcactaagcgattgttaccagcaa

SEQ ID NO: 4378774 - DNA, 25 bp, Homo sapien
cagctcaggttaggcgtggtggttc

SEQ ID NO: 4378775 - DNA, 25 bp, Homo sapien
cagattagaataatgtttctggaga

SEQ ID NO: 4378776 - DNA, 25 bp, Homo sapien
catacacagattagaataatgtttc

SEQ ID NO: 4378777 - DNA, 25 bp, Homo sapien
cttggagtatatgcaatataaaagg

SEQ ID NO: 4378778 - DNA, 25 bp, Homo sapien
ggagtatatgcaatataaaaggatt

SEQ ID NO: 4378779 - DNA, 25 bp, Homo sapien
gcaggagttgagatctcctttctgt

SEQ ID NO: 4378780 - DNA, 25 bp, Homo sapien
gataaagcacctactcccacaagct

SEQ ID NO: 4378781 - DNA, 25 bp, Homo sapien
aacctaactcaaaagggatctgata

SEQ ID NO: 4378782 - DNA, 25 bp, Homo sapien
cctctacaccatcccaagtttgaat

SEQ ID NO: 4378783 - DNA, 25 bp, Homo sapien
agtggaggcccaagccggggacctg

SEQ ID NO: 4378784 - DNA, 25 bp, Homo sapien
gcacgggcggcctcccgggagctcc

SEQ ID NO: 4378785 - DNA, 25 bp, Homo sapien
cctgagtggaggcccaagccgggga

SEQ ID NO: 4378786 - DNA, 25 bp, Homo sapien
ggccgcgcccggagtactggcctga

SEQ ID NO: 4378787 - DNA, 25 bp, Homo sapien
actggccgcggcggctgcgctgcca

SEQ ID NO: 4378788 - DNA, 25 bp, Homo sapien
ccactggccgcggcggctgcgctgc

SEQ ID NO: 4378789 - DNA, 25 bp, Homo sapien
cactggccgcggcggctgcgctgcc

SEQ ID NO: 4378790 - DNA, 25 bp, Homo sapien
ctggccgcggcggctgcgctgccat

SEQ ID NO: 4378791 - DNA, 25 bp, Homo sapien
tcagcacatgataaaggcgttgggc

SEQ ID NO: 4378792 - DNA, 25 bp, Homo sapien
gcagtgaccgcctactctgtggagg

SEQ ID NO: 4378793 - DNA, 25 bp, Homo sapien
aaagcccgctcctacaaagtgtgca

SEQ ID NO: 4378794 - DNA, 25 bp, Homo sapien
ccagcgaagaagcagagtagcatca

SEQ ID NO: 4378795 - DNA, 25 bp, Homo sapien
tctgcccaaggaaatagtgaaccag

SEQ ID NO: 4378796 - DNA, 25 bp, Homo sapien
taggtgccatcccagaagagatcgg

SEQ ID NO: 4378797 - DNA, 25 bp, Homo sapien
cagaccaagctgagggagatctacc

SEQ ID NO: 4378798 - DNA, 25 bp, Homo sapien
tacaccctggaaatcattgacctgg

SEQ ID NO: 4378799 - DNA, 25 bp, Homo sapien
cagagtttccgttaacagcagatgt

SEQ ID NO: 4378800 - DNA, 25 bp, Homo sapien
gcaaaaccagacttgtcccaacaga

SEQ ID NO: 4378801 - DNA, 25 bp, Homo sapien
aacagaaactgtcccgtgtgtgcag

SEQ ID NO: 4378802 - DNA, 25 bp, Homo sapien
ttatgggagacaatctaaatgtcag

SEQ ID NO: 4378803 - DNA, 25 bp, Homo sapien
atgcctggaggcaatatgttaacaa

SEQ ID NO: 4378804 - DNA, 25 bp, Homo sapien
aatgcctggaggcaatatgttaaca

SEQ ID NO: 4378805 - DNA, 25 bp, Homo sapien
aaatgcctggaggcaatatgttaac

SEQ ID NO: 4378806 - DNA, 25 bp, Homo sapien
ggaaagcagttgcagtaccaaaatc

SEQ ID NO: 4378807 - DNA, 25 bp, Homo sapien
tgaaactattagacagctagtgcct

SEQ ID NO: 4378808 - DNA, 25 bp, Homo sapien
ttttggcaaggcttctaaacagcaa

SEQ ID NO: 4378809 - DNA, 25 bp, Homo sapien
catagacagagaataatggcatgct

SEQ ID NO: 4378810 - DNA, 25 bp, Homo sapien
tcagttcatgactctggaattcgtt

SEQ ID NO: 4378811 - DNA, 25 bp, Homo sapien
gttcatgactctggaattcgttcat

SEQ ID NO: 4378812 - DNA, 25 bp, Homo sapien
catgactctggaattcgttcatgtt

SEQ ID NO: 4378813 - DNA, 25 bp, Homo sapien
cagttcatgactctggaattcgttc

SEQ ID NO: 4378814 - DNA, 25 bp, Homo sapien
tgatctgaggaagcttggtcacagc

SEQ ID NO: 4378815 - DNA, 25 bp, Homo sapien
gctctttgaggaaccgcacgttttg

SEQ ID NO: 4378816 - DNA, 25 bp, Homo sapien
agatgacccgtctgtatgaccgatg

SEQ ID NO: 4378817 - DNA, 25 bp, Homo sapien
cacgttttggcagaacatggtccac

SEQ ID NO: 4378818 - DNA, 25 bp, Homo sapien
taattagacctctcggcagatgttg

SEQ ID NO: 4378819 - DNA, 25 bp, Homo sapien
ttaattagacctctcggcagatgtt

SEQ ID NO: 4378820 - DNA, 25 bp, Homo sapien
gcttcaccccaggtctggtacctcc

SEQ ID NO: 4378821 - DNA, 25 bp, Homo sapien
ggcttcaccccaggtctggtacctc

SEQ ID NO: 4378822 - DNA, 25 bp, Homo sapien
cgcttgggaacaagtagatacacac

SEQ ID NO: 4378823 - DNA, 25 bp, Homo sapien
cacctggtgctttgcaggggccgca

SEQ ID NO: 4378824 - DNA, 25 bp, Homo sapien
tctgtttgccaagaccgcttgggaa

SEQ ID NO: 4378825 - DNA, 25 bp, Homo sapien
tgccaagaccgcttgggaacaagta

SEQ ID NO: 4378826 - DNA, 25 bp, Homo sapien
gttgaatacttccagagcagagagg

SEQ ID NO: 4378827 - DNA, 25 bp, Homo sapien
cctcagcacttgaagagacatggaa

SEQ ID NO: 4378828 - DNA, 25 bp, Homo sapien
aagcagcttcaagttgccaccaaca

SEQ ID NO: 4378829 - DNA, 25 bp, Homo sapien
tgttccaagaaaggttgaatacttc

SEQ ID NO: 4378830 - DNA, 25 bp, Homo sapien
aaatcggagcctgctgagtaagttt

SEQ ID NO: 4378831 - DNA, 25 bp, Homo sapien
tctccaaagcacagttgttgataac

SEQ ID NO: 4378832 - DNA, 25 bp, Homo sapien
taactaatgacttcaatgctggtaa

SEQ ID NO: 4378833 - DNA, 25 bp, Homo sapien
gctgtaaaagtctcactctccaaag

SEQ ID NO: 4378834 - DNA, 25 bp, Homo sapien
atttgaaagtaaaggaatgacctgg

SEQ ID NO: 4378835 - DNA, 25 bp, Homo sapien
agatttgaaagtaaaggaatgacct

SEQ ID NO: 4378836 - DNA, 25 bp, Homo sapien
gaagatttgaaagtaaaggaatgac

SEQ ID NO: 4378837 - DNA, 25 bp, Homo sapien
cttgaagatttgaaagtaaaggaat

SEQ ID NO: 4378838 - DNA, 25 bp, Homo sapien
tgttttaggcaccatctcacaggga

SEQ ID NO: 4378839 - DNA, 25 bp, Homo sapien
atgttttaggcaccatctcacaggg

SEQ ID NO: 4378840 - DNA, 25 bp, Homo sapien
catgttttaggcaccatctcacagg

SEQ ID NO: 4378841 - DNA, 25 bp, Homo sapien
acatgttttaggcaccatctcacag

SEQ ID NO: 4378842 - DNA, 25 bp, Homo sapien
tcttcctaggtatgacgctcaggct

SEQ ID NO: 4378843 - DNA, 25 bp, Homo sapien
tcagtggctgtgaacctaggtaagg

SEQ ID NO: 4378844 - DNA, 25 bp, Homo sapien
gaatctggtgggctaataactctga

SEQ ID NO: 4378845 - DNA, 25 bp, Homo sapien
cagggccattcacccatgtcagtgg

SEQ ID NO: 4378846 - DNA, 25 bp, Homo sapien
tgagccggcgagtcttcaaaacctc

SEQ ID NO: 4378847 - DNA, 25 bp, Homo sapien
aaacctccacctagatccttattgc

SEQ ID NO: 4378848 - DNA, 25 bp, Homo sapien
ccttattgcaggaaagatctaattt

SEQ ID NO: 4378849 - DNA, 25 bp, Homo sapien
tagtgagcactggtgaagatctagg

SEQ ID NO: 4378850 - DNA, 25 bp, Homo sapien
tcaagtacttcgagactttgcagca

SEQ ID NO: 4378851 - DNA, 25 bp, Homo sapien
ctttgcagcataggtagcagttgac

SEQ ID NO: 4378852 - DNA, 25 bp, Homo sapien
gttcagactgccaacaatgtctctg

SEQ ID NO: 4378853 - DNA, 25 bp, Homo sapien
ttttaatccctgagcaatactgttc

SEQ ID NO: 4378854 - DNA, 25 bp, Homo sapien
gagggagcaatccacaagctcaatc

SEQ ID NO: 4378855 - DNA, 25 bp, Homo sapien
tggaacttctgaaggatcagaggca

SEQ ID NO: 4378856 - DNA, 25 bp, Homo sapien
tcccactttactgttccaagacaaa

SEQ ID NO: 4378857 - DNA, 25 bp, Homo sapien
aatgtcccatcttctgacgtgaggg

SEQ ID NO: 4378858 - DNA, 25 bp, Homo sapien
tcagtggtgagtctgcagctaccca

SEQ ID NO: 4378859 - DNA, 25 bp, Homo sapien
cagtgcttgaacatcgtcagtggtg

SEQ ID NO: 4378860 - DNA, 25 bp, Homo sapien
taacttgctgaccagatgcatttgc

SEQ ID NO: 4378861 - DNA, 25 bp, Homo sapien
cagctacccagcctcaagattttta

SEQ ID NO: 4378862 - DNA, 25 bp, Homo sapien
ctatgcaaagtctgctgcatacaga

SEQ ID NO: 4378863 - DNA, 25 bp, Homo sapien
tatgcaaagtctgctgcatacagac

SEQ ID NO: 4378864 - DNA, 25 bp, Homo sapien
tctccatactggatctccattccat

SEQ ID NO: 4378865 - DNA, 25 bp, Homo sapien
ttgttgacagcctttttgcccagct

SEQ ID NO: 4378866 - DNA, 25 bp, Homo sapien
tcatgtccgctgttgttaatccaca

SEQ ID NO: 4378867 - DNA, 25 bp, Homo sapien
tccacagttattcaaatctagacac

SEQ ID NO: 4378868 - DNA, 25 bp, Homo sapien
ctccttctgaggaagttttcttcct

SEQ ID NO: 4378869 - DNA, 25 bp, Homo sapien
tcttctgtatccagtcgctgggttg

SEQ ID NO: 4378870 - DNA, 25 bp, Homo sapien
ttgggaatcacttgttttaaggtca

SEQ ID NO: 4378871 - DNA, 25 bp, Homo sapien
tgaagtctggggcttagtttctcct

SEQ ID NO: 4378872 - DNA, 25 bp, Homo sapien
tgaagttgatgggggtagttcccaa

SEQ ID NO: 4378873 - DNA, 25 bp, Homo sapien
tagttcccaataagacatcttcctg

SEQ ID NO: 4378874 - DNA, 25 bp, Homo sapien
tgatgggggtagttcccaataagac

SEQ ID NO: 4378875 - DNA, 25 bp, Homo sapien
gggtagttcccaataagacatcttc

SEQ ID NO: 4378876 - DNA, 25 bp, Homo sapien
aagattctgtcaagcctgtgttcaa

SEQ ID NO: 4378877 - DNA, 25 bp, Homo sapien
gtcaagcctgtgttcaatcaaaata

SEQ ID NO: 4378878 - DNA, 25 bp, Homo sapien
aagaagattctgtcaagcctgtgtt

SEQ ID NO: 4378879 - DNA, 25 bp, Homo sapien
ttctgtcaagcctgtgttcaatcaa

SEQ ID NO: 4378880 - DNA, 25 bp, Homo sapien
ctttaaaagggactggccatttgca

SEQ ID NO: 4378881 - DNA, 25 bp, Homo sapien
ccagaggagtttgccttcagcgacc

SEQ ID NO: 4378882 - DNA, 25 bp, Homo sapien
gtcaacacatcttaaattacagctg

SEQ ID NO: 4378883 - DNA, 25 bp, Homo sapien
cctatttcattgtgtgagatacaag

SEQ ID NO: 4378884 - DNA, 25 bp, Homo sapien
tgatgggatcttaacctggtgggaa

SEQ ID NO: 4378885 - DNA, 25 bp, Homo sapien
cattgattgagtgggacaagagcca

SEQ ID NO: 4378886 - DNA, 25 bp, Homo sapien
gattcaatgacgaacaagagacagt

SEQ ID NO: 4378887 - DNA, 25 bp, Homo sapien
cttggaacagtgagtgacattgcct

SEQ ID NO: 4378888 - DNA, 25 bp, Homo sapien
gggtgaggtctggtatgaattgaag

SEQ ID NO: 4378889 - DNA, 25 bp, Homo sapien
ctcccaggcaggaacggctggaaga

SEQ ID NO: 4378890 - DNA, 25 bp, Homo sapien
aagaaagggtaagctcaagagctcc

SEQ ID NO: 4378891 - DNA, 25 bp, Homo sapien
acggctggaagagcctagcattgga

SEQ ID NO: 4378892 - DNA, 25 bp, Homo sapien
acctccatggtcattttcagccaat

SEQ ID NO: 4378893 - DNA, 25 bp, Homo sapien
gacacctccatggtcattttcagcc

SEQ ID NO: 4378894 - DNA, 25 bp, Homo sapien
atggtcattttcagccaatttcacc

SEQ ID NO: 4378895 - DNA, 25 bp, Homo sapien
ccaggacacctccatggtcattttc

SEQ ID NO: 4378896 - DNA, 25 bp, Homo sapien
ttggagatttagacagggctattct

SEQ ID NO: 4378897 - DNA, 25 bp, Homo sapien
tctggggagctagctcagtaaatgg

SEQ ID NO: 4378898 - DNA, 25 bp, Homo sapien
gagatttagacagggctattctctg

SEQ ID NO: 4378899 - DNA, 25 bp, Homo sapien
ctattctctggggagctagctcagt

SEQ ID NO: 4378900 - DNA, 25 bp, Homo sapien
ccacatccccatagactttgactat

SEQ ID NO: 4378901 - DNA, 25 bp, Homo sapien
gactttgactatgtaactggctgtg

SEQ ID NO: 4378902 - DNA, 25 bp, Homo sapien
catagactttgactatgtaactggc

SEQ ID NO: 4378903 - DNA, 25 bp, Homo sapien
gactatgtaactggctgtgtggagc

SEQ ID NO: 4378904 - DNA, 25 bp, Homo sapien
taataactcgctgagtaataaagga

SEQ ID NO: 4378905 - DNA, 25 bp, Homo sapien
tgtaataactcgctgagtaataaag

SEQ ID NO: 4378906 - DNA, 25 bp, Homo sapien
aactcgctgagtaataaaggatgca

SEQ ID NO: 4378907 - DNA, 25 bp, Homo sapien
tcctctgtaataactcgctgagtaa

SEQ ID NO: 4378908 - DNA, 25 bp, Homo sapien
ctcagagaggccttgaagtacaaag

SEQ ID NO: 4378909 - DNA, 25 bp, Homo sapien
tcagaactctcgtctcattgatctc

SEQ ID NO: 4378910 - DNA, 25 bp, Homo sapien
gaactctcgtctcattgatctcaga

SEQ ID NO: 4378911 - DNA, 25 bp, Homo sapien
taatgtctcagaactctcgtctcat

SEQ ID NO: 4378912 - DNA, 25 bp, Homo sapien
tgtctcagaactctcgtctcattga

SEQ ID NO: 4378913 - DNA, 25 bp, Homo sapien
gttctttcgagacagctcattgtat

SEQ ID NO: 4378914 - DNA, 25 bp, Homo sapien
tctttcgagacagctcattgtattg

SEQ ID NO: 4378915 - DNA, 25 bp, Homo sapien
ttctttcgagacagctcattgtatt

SEQ ID NO: 4378916 - DNA, 25 bp, Homo sapien
cagcaagatgagtgttgtcagtctg

SEQ ID NO: 4378917 - DNA, 25 bp, Homo sapien
tctgcagagcgatgctagaattgtc

SEQ ID NO: 4378918 - DNA, 25 bp, Homo sapien
gttgtcagtctgcagagcgatgcta

SEQ ID NO: 4378919 - DNA, 25 bp, Homo sapien
atcagcagcaagatgagtgttgtca

SEQ ID NO: 4378920 - DNA, 25 bp, Homo sapien
ttgaagtaatgtcccagactctgac

SEQ ID NO: 4378921 - DNA, 25 bp, Homo sapien
cttgaagtaatgtcccagactctga

SEQ ID NO: 4378922 - DNA, 25 bp, Homo sapien
cagcctccaattcttagtctccatg

SEQ ID NO: 4378923 - DNA, 25 bp, Homo sapien
ccagcctccaattcttagtctccat

SEQ ID NO: 4378924 - DNA, 25 bp, Homo sapien
agcctccaattcttagtctccatgc

SEQ ID NO: 4378925 - DNA, 25 bp, Homo sapien
ggctttgcatggtcttcttctcatt

SEQ ID NO: 4378926 - DNA, 25 bp, Homo sapien
ggccaggcagtcattcaggctttgc

SEQ ID NO: 4378927 - DNA, 25 bp, Homo sapien
caggcagtcattcaggctttgcatg

SEQ ID NO: 4378928 - DNA, 25 bp, Homo sapien
cctgtccacgtaggaggccaggcag

SEQ ID NO: 4378929 - DNA, 25 bp, Homo sapien
ctgcatagacactggacacggttct

SEQ ID NO: 4378930 - DNA, 25 bp, Homo sapien
catccccatggccaggccactgaac

SEQ ID NO: 4378931 - DNA, 25 bp, Homo sapien
acacggttctgatcggctgggcacc

SEQ ID NO: 4378932 - DNA, 25 bp, Homo sapien
gatccgggaaccagaagcctcggcc

SEQ ID NO: 4378933 - DNA, 25 bp, Homo sapien
tgtccgggaggagagcgagaggaca

SEQ ID NO: 4378934 - DNA, 25 bp, Homo sapien
cgagaggacaggactcaggttttgc

SEQ ID NO: 4378935 - DNA, 25 bp, Homo sapien
gagcgagaggacaggactcaggttt

SEQ ID NO: 4378936 - DNA, 25 bp, Homo sapien
ctgtccgggaggagagcgagaggac

SEQ ID NO: 4378937 - DNA, 25 bp, Homo sapien
caccctgtggaatcccacattttca

SEQ ID NO: 4378938 - DNA, 25 bp, Homo sapien
gctggcaaggtggagtgctctctgc

SEQ ID NO: 4378939 - DNA, 25 bp, Homo sapien
agttatctctgcaaagcaggtttga

SEQ ID NO: 4378940 - DNA, 25 bp, Homo sapien
tatccacttgagatttcatccaagg

SEQ ID NO: 4378941 - DNA, 25 bp, Homo sapien
gaatcgctataggagggactttgca

SEQ ID NO: 4378942 - DNA, 25 bp, Homo sapien
tgcatgtcgcgtgactacacggtag

SEQ ID NO: 4378943 - DNA, 25 bp, Homo sapien
tgagcagcgagttgaagcagccact

SEQ ID NO: 4378944 - DNA, 25 bp, Homo sapien
tagatttactcaactcagggttccc

SEQ ID NO: 4378945 - DNA, 25 bp, Homo sapien
actttttggcacagtcagggcaata

SEQ ID NO: 4378946 - DNA, 25 bp, Homo sapien
agggcaatatacttgctcctcgtgg

SEQ ID NO: 4378947 - DNA, 25 bp, Homo sapien
tttggcacagtcagggcaatatact

SEQ ID NO: 4378948 - DNA, 25 bp, Homo sapien
gcaatatacttgctcctcgtggaaa

SEQ ID NO: 4378949 - DNA, 25 bp, Homo sapien
aagcggtctttgtgcgagatggtcc

SEQ ID NO: 4378950 - DNA, 25 bp, Homo sapien
cccaagatgcgatggccttgttgca

SEQ ID NO: 4378951 - DNA, 25 bp, Homo sapien
atacaaagccctcggcatgccaggg

SEQ ID NO: 4378952 - DNA, 25 bp, Homo sapien
gccagggctcatcctagtaagtgac

SEQ ID NO: 4378953 - DNA, 25 bp, Homo sapien
tcctgagtggcaaacttgttgcaca

SEQ ID NO: 4378954 - DNA, 25 bp, Homo sapien
ttacacttgggagagtcctcctgag

SEQ ID NO: 4378955 - DNA, 25 bp, Homo sapien
cttacacttgggagagtcctcctga

SEQ ID NO: 4378956 - DNA, 25 bp, Homo sapien
tacacttgggagagtcctcctgagt

SEQ ID NO: 4378957 - DNA, 25 bp, Homo sapien
caggggtcatgccaggagcagtttt

SEQ ID NO: 4378958 - DNA, 25 bp, Homo sapien
agcagtggtggtcacccttctgcac

SEQ ID NO: 4378959 - DNA, 25 bp, Homo sapien
tccttggagtccacatggatgggct

SEQ ID NO: 4378960 - DNA, 25 bp, Homo sapien
cacatggatgggcttgcagcattcc

SEQ ID NO: 4378961 - DNA, 25 bp, Homo sapien
tgtttaacgcaaaagctacctagga

SEQ ID NO: 4378962 - DNA, 25 bp, Homo sapien
gagaggccccatgcaaagcaaaatg

SEQ ID NO: 4378963 - DNA, 25 bp, Homo sapien
gataaaaagggaacaccacaggcgc

SEQ ID NO: 4378964 - DNA, 25 bp, Homo sapien
tatttctccctgtcgtaatgaccag

SEQ ID NO: 4378965 - DNA, 25 bp, Homo sapien
tgagattctcaaatgactgttgtaa

SEQ ID NO: 4378966 - DNA, 25 bp, Homo sapien
tccaacgttacaagcagagaacagc

SEQ ID NO: 4378967 - DNA, 25 bp, Homo sapien
tggaggaaagggagcatgaactatc

SEQ ID NO: 4378968 - DNA, 25 bp, Homo sapien
tcttcactcacttgtgaacaagaag

SEQ ID NO: 4378969 - DNA, 25 bp, Homo sapien
cccagtacgggtgatgtgtacccaa

SEQ ID NO: 4378970 - DNA, 25 bp, Homo sapien
cattcaagtgcaccaaggctttaga

SEQ ID NO: 4378971 - DNA, 25 bp, Homo sapien
caagtgttgtcttttacgcctcagg

SEQ ID NO: 4378972 - DNA, 25 bp, Homo sapien
ccactatgcaagtaccagggctggc

SEQ ID NO: 4378973 - DNA, 25 bp, Homo sapien
ttaaagatctctataaagtcagtca

SEQ ID NO: 4378974 - DNA, 25 bp, Homo sapien
agtcaagggaatttctatctaagca

SEQ ID NO: 4378975 - DNA, 25 bp, Homo sapien
agtcagtcaagggaatttctatcta

SEQ ID NO: 4378976 - DNA, 25 bp, Homo sapien
gatctctataaagtcagtcaaggga

SEQ ID NO: 4378977 - DNA, 25 bp, Homo sapien
tatctctgtcactcaacggtctcgg

SEQ ID NO: 4378978 - DNA, 25 bp, Homo sapien
cacaagaagcggatccaggtagcaa

SEQ ID NO: 4378979 - DNA, 25 bp, Homo sapien
gataattggctcaggtctcggctct

SEQ ID NO: 4378980 - DNA, 25 bp, Homo sapien
tgtattaccccgcacagtgcaggag

SEQ ID NO: 4378981 - DNA, 25 bp, Homo sapien
aataggggtagcaggaggcggcgga

SEQ ID NO: 4378982 - DNA, 25 bp, Homo sapien
ggtaataggggtagcaggaggcggc

SEQ ID NO: 4378983 - DNA, 25 bp, Homo sapien
gtaataggggtagcaggaggcggcg

SEQ ID NO: 4378984 - DNA, 25 bp, Homo sapien
taataggggtagcaggaggcggcgg

SEQ ID NO: 4378985 - DNA, 25 bp, Homo sapien
tccagatgttcagttgcgttgccct

SEQ ID NO: 4378986 - DNA, 25 bp, Homo sapien
tgctgcaacgagctggtggagccca

SEQ ID NO: 4378987 - DNA, 25 bp, Homo sapien
aaccacaacctcgttggtgctgcaa

SEQ ID NO: 4378988 - DNA, 25 bp, Homo sapien
ccagtgtgtcatcctcgtagtaacg

SEQ ID NO: 4378989 - DNA, 25 bp, Homo sapien
tgttaactgtagcatccaaagatga

SEQ ID NO: 4378990 - DNA, 25 bp, Homo sapien
tagggtgagtactctgtaagtctgg

SEQ ID NO: 4378991 - DNA, 25 bp, Homo sapien
taatcaagcacctcccagtaacaag

SEQ ID NO: 4378992 - DNA, 25 bp, Homo sapien
gacaacagatgtatcagatgaggaa

SEQ ID NO: 4378993 - DNA, 25 bp, Homo sapien
ttgccacaaatagcccacagctggt

SEQ ID NO: 4378994 - DNA, 25 bp, Homo sapien
acacaggtaattgggctactggaag

SEQ ID NO: 4378995 - DNA, 25 bp, Homo sapien
gaaatgagagatgtacctgccagga

SEQ ID NO: 4378996 - DNA, 25 bp, Homo sapien
cctgccaggagactcagtaaccaaa

SEQ ID NO: 4378997 - DNA, 25 bp, Homo sapien
tagaaacagtaggtttcggccaggc

SEQ ID NO: 4378998 - DNA, 25 bp, Homo sapien
ttaatggcacctaaagtatcagcca

SEQ ID NO: 4378999 - DNA, 25 bp, Homo sapien
caaagactagaggttactaacagac

SEQ ID NO: 4379000 - DNA, 25 bp, Homo sapien
cagccacataagaaccctcttaaaa

SEQ ID NO: 4379001 - DNA, 25 bp, Homo sapien
cataactttaaggtctccagagcca

SEQ ID NO: 4379002 - DNA, 25 bp, Homo sapien
gtagagcagccagtatgaatccaca

SEQ ID NO: 4379003 - DNA, 25 bp, Homo sapien
aaagacctgagtacagagagtgtcc

SEQ ID NO: 4379004 - DNA, 25 bp, Homo sapien
gtaagcccaaatctctgagtagagc

SEQ ID NO: 4379005 - DNA, 25 bp, Homo sapien
agctgtagtgattaagagtcttgca

SEQ ID NO: 4379006 - DNA, 25 bp, Homo sapien
tgtatggatctatgacccagttcac

SEQ ID NO: 4379007 - DNA, 25 bp, Homo sapien
tttctagcgccagaagaaccactac

SEQ ID NO: 4379008 - DNA, 25 bp, Homo sapien
gttgatgactgctttaagggaccta

SEQ ID NO: 4379009 - DNA, 25 bp, Homo sapien
tttgaaattttatgtgtctgcagtg

SEQ ID NO: 4379010 - DNA, 25 bp, Homo sapien
tctttgaaattttatgtgtctgcag

SEQ ID NO: 4379011 - DNA, 25 bp, Homo sapien
tatctttgaaattttatgtgtctgc

SEQ ID NO: 4379012 - DNA, 25 bp, Homo sapien
cagtatctttgaaattttatgtgtc

SEQ ID NO: 4379013 - DNA, 25 bp, Homo sapien
cgaaagattctaatgtgtacaggag

SEQ ID NO: 4379014 - DNA, 25 bp, Homo sapien
ttatagtacatgtcacagcttcccc

SEQ ID NO: 4379015 - DNA, 25 bp, Homo sapien
tctagtgccacatagcgaaaaactg

SEQ ID NO: 4379016 - DNA, 25 bp, Homo sapien
aaatctgtcgcttttagcataggaa

SEQ ID NO: 4379017 - DNA, 25 bp, Homo sapien
gaaagatggtcgtctccagcagaga

SEQ ID NO: 4379018 - DNA, 25 bp, Homo sapien
cactgatttgtacgtctgactgaga

SEQ ID NO: 4379019 - DNA, 25 bp, Homo sapien
gatgatcgatcccagcacagtagtg

SEQ ID NO: 4379020 - DNA, 25 bp, Homo sapien
ggagaacggcattcagacacggaca

SEQ ID NO: 4379021 - DNA, 25 bp, Homo sapien
tgtacgccttaatgttcattttgat

SEQ ID NO: 4379022 - DNA, 25 bp, Homo sapien
aggaggcattgctgtgaaagataat

SEQ ID NO: 4379023 - DNA, 25 bp, Homo sapien
gaggcattgctgtgaaagataattt

SEQ ID NO: 4379024 - DNA, 25 bp, Homo sapien
agtagctttgtacgccttaatgttc

SEQ ID NO: 4379025 - DNA, 25 bp, Homo sapien
tacatcatgaggatcagttagctgc

SEQ ID NO: 4379026 - DNA, 25 bp, Homo sapien
tatcaattggcctaactaagcagga

SEQ ID NO: 4379027 - DNA, 25 bp, Homo sapien
catggcattagcgtaaaaaggacac

SEQ ID NO: 4379028 - DNA, 25 bp, Homo sapien
tggccttgttcaacctcagctcaga

SEQ ID NO: 4379029 - DNA, 25 bp, Homo sapien
tgaaggactgttcccaagatggaac

SEQ ID NO: 4379030 - DNA, 25 bp, Homo sapien
tgtcacatctcaggacaaatgccct

SEQ ID NO: 4379031 - DNA, 25 bp, Homo sapien
cattccattttttgagtgcagcagg

SEQ ID NO: 4379032 - DNA, 25 bp, Homo sapien
taggcaacaggagaatgtcactatc

SEQ ID NO: 4379033 - DNA, 25 bp, Homo sapien
gacaagaatggagtaggtgtgggca

SEQ ID NO: 4379034 - DNA, 25 bp, Homo sapien
tttctcacttataaggaacttgttc

SEQ ID NO: 4379035 - DNA, 25 bp, Homo sapien
tcccatgctgcctattttctcactt

SEQ ID NO: 4379036 - DNA, 25 bp, Homo sapien
acttgttcgctaccccctgcagttt

SEQ ID NO: 4379037 - DNA, 25 bp, Homo sapien
ccattgggtctttgtgagtaggcag

SEQ ID NO: 4379038 - DNA, 25 bp, Homo sapien
tgcaccttggcggttccccagggtg

SEQ ID NO: 4379039 - DNA, 25 bp, Homo sapien
taggcaggtgggtcttgtgcacctt

SEQ ID NO: 4379040 - DNA, 25 bp, Homo sapien
aaactcccacaccattgggtctttg

SEQ ID NO: 4379041 - DNA, 25 bp, Homo sapien
tgaagttgtgcatcagctcactgta

SEQ ID NO: 4379042 - DNA, 25 bp, Homo sapien
ttaagcaggggacccatgtggatcc

SEQ ID NO: 4379043 - DNA, 25 bp, Homo sapien
cagggatggggcaccaaaaaggcct

SEQ ID NO: 4379044 - DNA, 25 bp, Homo sapien
cagccactctgaggggttcctagga

SEQ ID NO: 4379045 - DNA, 25 bp, Homo sapien
tctatacactgcttaggcacagccc

SEQ ID NO: 4379046 - DNA, 25 bp, Homo sapien
agtccacttctatacactgcttagg

SEQ ID NO: 4379047 - DNA, 25 bp, Homo sapien
gacaagtccacttctatacactgct

SEQ ID NO: 4379048 - DNA, 25 bp, Homo sapien
ctgatgacaagtccacttctataca

SEQ ID NO: 4379049 - DNA, 25 bp, Homo sapien
taacagggtgtttggtgcagcagca

SEQ ID NO: 4379050 - DNA, 25 bp, Homo sapien
cacatggccttagggaaatgttctc

SEQ ID NO: 4379051 - DNA, 25 bp, Homo sapien
ctgtggaaaggagttggaatcccct

SEQ ID NO: 4379052 - DNA, 25 bp, Homo sapien
agcagcagctttggaattgatgaga

SEQ ID NO: 4379053 - DNA, 25 bp, Homo sapien
tttgttgctatatatagcaatgtgg

SEQ ID NO: 4379054 - DNA, 25 bp, Homo sapien
gacctgtgatcttaactaaattcat

SEQ ID NO: 4379055 - DNA, 25 bp, Homo sapien
aaaaattgacctgtgatcttaacta

SEQ ID NO: 4379056 - DNA, 25 bp, Homo sapien
ttttgtaagtaccttaggattatca

SEQ ID NO: 4379057 - DNA, 25 bp, Homo sapien
cagggcctggatccgcagtatcgct

SEQ ID NO: 4379058 - DNA, 25 bp, Homo sapien
aactgagcaggaacaccaagtggca

SEQ ID NO: 4379059 - DNA, 25 bp, Homo sapien
tatcgctgataccacaactgagcag

SEQ ID NO: 4379060 - DNA, 25 bp, Homo sapien
cagaaccagaagctgagccatgctg

SEQ ID NO: 4379061 - DNA, 25 bp, Homo sapien
ctggtttggaagaagtcctgagagg

SEQ ID NO: 4379062 - DNA, 25 bp, Homo sapien
tggtttggaagaagtcctgagaggc

SEQ ID NO: 4379063 - DNA, 25 bp, Homo sapien
gccactgggtggctgtaccctcagg

SEQ ID NO: 4379064 - DNA, 25 bp, Homo sapien
cagtaaaccagaatgttcatgttca

SEQ ID NO: 4379065 - DNA, 25 bp, Homo sapien
gaattccatcttctacacaacagta

SEQ ID NO: 4379066 - DNA, 25 bp, Homo sapien
tctacacaacagtaaaccagaatgt

SEQ ID NO: 4379067 - DNA, 25 bp, Homo sapien
caaatacagctgcagtatgaattcc

SEQ ID NO: 4379068 - DNA, 25 bp, Homo sapien
catgtcggacttgtcttctttattc

SEQ ID NO: 4379069 - DNA, 25 bp, Homo sapien
ccatgtcggacttgtcttctttatt

SEQ ID NO: 4379070 - DNA, 25 bp, Homo sapien
atgtcggacttgtcttctttattcc

SEQ ID NO: 4379071 - DNA, 25 bp, Homo sapien
ctaggagacacaagcgtcctcctcc

SEQ ID NO: 4379072 - DNA, 25 bp, Homo sapien
taggagacacaagcgtcctcctcca

SEQ ID NO: 4379073 - DNA, 25 bp, Homo sapien
tccttccctgtattctcgtctctcc

SEQ ID NO: 4379074 - DNA, 25 bp, Homo sapien
taatgttctcatgtatccatactga

SEQ ID NO: 4379075 - DNA, 25 bp, Homo sapien
ttcctaatgttctcatgtatccata

SEQ ID NO: 4379076 - DNA, 25 bp, Homo sapien
ctcatgtatccatactgagtccctg

SEQ ID NO: 4379077 - DNA, 25 bp, Homo sapien
ccatttgtcaactggaagtgctgct

SEQ ID NO: 4379078 - DNA, 25 bp, Homo sapien
gaatgcttattctcgtcactgtcct

SEQ ID NO: 4379079 - DNA, 25 bp, Homo sapien
tctaccaaagcctgaaggcacagaa

SEQ ID NO: 4379080 - DNA, 25 bp, Homo sapien
tactactttggtacaggctatcagg

SEQ ID NO: 4379081 - DNA, 25 bp, Homo sapien
gactaggtccctttcgatgattcag

SEQ ID NO: 4379082 - DNA, 25 bp, Homo sapien
ttcgatgattcagcagattcgtttt

SEQ ID NO: 4379083 - DNA, 25 bp, Homo sapien
taggtccctttcgatgattcagcag

SEQ ID NO: 4379084 - DNA, 25 bp, Homo sapien
ccctttcgatgattcagcagattcg

SEQ ID NO: 4379085 - DNA, 25 bp, Homo sapien
tgtgtgccaggtaccgtcttaagtg

SEQ ID NO: 4379086 - DNA, 25 bp, Homo sapien
tccactaaattgagttgatgatcca

SEQ ID NO: 4379087 - DNA, 25 bp, Homo sapien
catgacctatagacttgtatgtacg

SEQ ID NO: 4379088 - DNA, 25 bp, Homo sapien
aaatgtcctaaaacaagcgctatgg

SEQ ID NO: 4379089 - DNA, 25 bp, Homo sapien
tttacacagaggattccccatgtct

SEQ ID NO: 4379090 - DNA, 25 bp, Homo sapien
ccccatgtctcataagcttaaagaa

SEQ ID NO: 4379091 - DNA, 25 bp, Homo sapien
ttgtttacacagaggattccccatg

SEQ ID NO: 4379092 - DNA, 25 bp, Homo sapien
tacacagaggattccccatgtctca

SEQ ID NO: 4379093 - DNA, 25 bp, Homo sapien
tgtagctatcaacaccaatctagga

SEQ ID NO: 4379094 - DNA, 25 bp, Homo sapien
tttaaaaagctgcaacaggctaggc

SEQ ID NO: 4379095 - DNA, 25 bp, Homo sapien
caattacaagcaagttaagcagcag

SEQ ID NO: 4379096 - DNA, 25 bp, Homo sapien
taaataaatgatcctgtaggcccac

SEQ ID NO: 4379097 - DNA, 25 bp, Homo sapien
ctgtttcatgtttacccgttctaca

SEQ ID NO: 4379098 - DNA, 25 bp, Homo sapien
cagaatgacaaggaagggaccttaa

SEQ ID NO: 4379099 - DNA, 25 bp, Homo sapien
tgtcaacaggaattacaatgtgatt

SEQ ID NO: 4379100 - DNA, 25 bp, Homo sapien
acaattcaagcatggaactgtttca

SEQ ID NO: 4379101 - DNA, 25 bp, Homo sapien
tagatgtcatctagcctaacccttt

SEQ ID NO: 4379102 - DNA, 25 bp, Homo sapien
tagttcctcatgtcatgttcaccaa

SEQ ID NO: 4379103 - DNA, 25 bp, Homo sapien
catgtaagtgttcaaatagtttgct

SEQ ID NO: 4379104 - DNA, 25 bp, Homo sapien
agtttattaagattccctctcagta

SEQ ID NO: 4379105 - DNA, 25 bp, Homo sapien
ccagtatcactgagaggactagtac

SEQ ID NO: 4379106 - DNA, 25 bp, Homo sapien
taaagctagctagaacctcactatg

SEQ ID NO: 4379107 - DNA, 25 bp, Homo sapien
caacttttgagtagtacaggcacca

SEQ ID NO: 4379108 - DNA, 25 bp, Homo sapien
cagctgagtaattgcccaacatgtc

SEQ ID NO: 4379109 - DNA, 25 bp, Homo sapien
caatcattttgcatagatgcgccag

SEQ ID NO: 4379110 - DNA, 25 bp, Homo sapien
gattctgagacaaagatctctccaa

SEQ ID NO: 4379111 - DNA, 25 bp, Homo sapien
cactgcccaaaggttgctctggaac

SEQ ID NO: 4379112 - DNA, 25 bp, Homo sapien
ccttagggcccagctagttacatat

SEQ ID NO: 4379113 - DNA, 25 bp, Homo sapien
gattatacggtattctccaatagaa

SEQ ID NO: 4379114 - DNA, 25 bp, Homo sapien
gggacaacagagatctggactagat

SEQ ID NO: 4379115 - DNA, 25 bp, Homo sapien
tgtaagcccctcctgaatacttaag

SEQ ID NO: 4379116 - DNA, 25 bp, Homo sapien
gaaacagctgcaccaatgtgatagc

SEQ ID NO: 4379117 - DNA, 25 bp, Homo sapien
tccaggcgagattttccgttgcacc

SEQ ID NO: 4379118 - DNA, 25 bp, Homo sapien
tcaaaattgataccttaaaggccat

SEQ ID NO: 4379119 - DNA, 25 bp, Homo sapien
ggatgtaatcattattgctggagca

SEQ ID NO: 4379120 - DNA, 25 bp, Homo sapien
tgctggagcagtctatccccatata

SEQ ID NO: 4379121 - DNA, 25 bp, Homo sapien
gaatgtgcattctagctagtcccag

SEQ ID NO: 4379122 - DNA, 25 bp, Homo sapien
tatgtcttcgtcagtgcagaggagc

SEQ ID NO: 4379123 - DNA, 25 bp, Homo sapien
tatcatggccctctgtaacaagtct

SEQ ID NO: 4379124 - DNA, 25 bp, Homo sapien
tccaggactataaagctttcagggc

SEQ ID NO: 4379125 - DNA, 25 bp, Homo sapien
gttgatgcgtgcacagatcttcagg

SEQ ID NO: 4379126 - DNA, 25 bp, Homo sapien
aagattccttcagagagttgatgcg

SEQ ID NO: 4379127 - DNA, 25 bp, Homo sapien
cctgtgctctgaattcatctgcgat

SEQ ID NO: 4379128 - DNA, 25 bp, Homo sapien
gctgggcctagcttgatattcattg

SEQ ID NO: 4379129 - DNA, 25 bp, Homo sapien
tttgttctggtaaagtagccacatg

SEQ ID NO: 4379130 - DNA, 25 bp, Homo sapien
tctgaagatgacagaatcaaagccc

SEQ ID NO: 4379131 - DNA, 25 bp, Homo sapien
ccctacctggaagagtgacactact

SEQ ID NO: 4379132 - DNA, 25 bp, Homo sapien
ggatataaaccaactctcttctgca

SEQ ID NO: 4379133 - DNA, 25 bp, Homo sapien
tatataactagtgtgggtctcatca

SEQ ID NO: 4379134 - DNA, 25 bp, Homo sapien
catatataactagtgtgggtctcat

SEQ ID NO: 4379135 - DNA, 25 bp, Homo sapien
cagccccttggagaaggtggatata

SEQ ID NO: 4379136 - DNA, 25 bp, Homo sapien
taacatatataactagtgtgggtct

SEQ ID NO: 4379137 - DNA, 25 bp, Homo sapien
tacatatacacagtacttctctagc

SEQ ID NO: 4379138 - DNA, 25 bp, Homo sapien
ggtgtggatgtatctaacattgctg

SEQ ID NO: 4379139 - DNA, 25 bp, Homo sapien
gcccttttgtgcaaaaggtgtggat

SEQ ID NO: 4379140 - DNA, 25 bp, Homo sapien
tggatgtatctaacattgctgtgtg

SEQ ID NO: 4379141 - DNA, 25 bp, Homo sapien
tggtagcaagtcactgttctcaggc

SEQ ID NO: 4379142 - DNA, 25 bp, Homo sapien
gccaagtcttcttctgcagatggat

SEQ ID NO: 4379143 - DNA, 25 bp, Homo sapien
cagacgagttgtcatagcagatggc

SEQ ID NO: 4379144 - DNA, 25 bp, Homo sapien
gaattctcacatcccgaagctcacg

SEQ ID NO: 4379145 - DNA, 25 bp, Homo sapien
ctggaaaatgtagtacaagcaaaat

SEQ ID NO: 4379146 - DNA, 25 bp, Homo sapien
aaatacagcattgcactttccttgc

SEQ ID NO: 4379147 - DNA, 25 bp, Homo sapien
aatgtagtacaagcaaaatacagca

SEQ ID NO: 4379148 - DNA, 25 bp, Homo sapien
tacagcattgcactttccttgcatt

SEQ ID NO: 4379149 - DNA, 25 bp, Homo sapien
atcagggccacttggacgacggcca

SEQ ID NO: 4379150 - DNA, 25 bp, Homo sapien
gattatcaggcttacgattccaacg

SEQ ID NO: 4379151 - DNA, 25 bp, Homo sapien
tgcctaaggatatgttctctcgctg

SEQ ID NO: 4379152 - DNA, 25 bp, Homo sapien
gccacgatgcccaagactttgatta

SEQ ID NO: 4379153 - DNA, 25 bp, Homo sapien
tggcacatgacatagtgcagaatcg

SEQ ID NO: 4379154 - DNA, 25 bp, Homo sapien
cagaattcacacttgagcaactcac

SEQ ID NO: 4379155 - DNA, 25 bp, Homo sapien
attcattagcatatcccattttccc

SEQ ID NO: 4379156 - DNA, 25 bp, Homo sapien
ttttgaccgcaaaaattcattagca

SEQ ID NO: 4379157 - DNA, 25 bp, Homo sapien
aaagaggccgttttttcacaggctg

SEQ ID NO: 4379158 - DNA, 25 bp, Homo sapien
tgtgtcagatgaattatccgcatgt

SEQ ID NO: 4379159 - DNA, 25 bp, Homo sapien
ctattagcaaagaggaacgactcac

SEQ ID NO: 4379160 - DNA, 25 bp, Homo sapien
tcacctgattatccaaaagaggccg

SEQ ID NO: 4379161 - DNA, 25 bp, Homo sapien
cattgattcactggtgagccctcag

SEQ ID NO: 4379162 - DNA, 25 bp, Homo sapien
gaacaacagcttattggacagaaac

SEQ ID NO: 4379163 - DNA, 25 bp, Homo sapien
tgctaagggcatacacttctcacag

SEQ ID NO: 4379164 - DNA, 25 bp, Homo sapien
tacttggttaactcaggaatactac

SEQ ID NO: 4379165 - DNA, 25 bp, Homo sapien
ttattagagaacagtaatatgtaac

SEQ ID NO: 4379166 - DNA, 25 bp, Homo sapien
acacacacaaatatgcttgctactt

SEQ ID NO: 4379167 - DNA, 25 bp, Homo sapien
gagaacagtaatatgtaacttttaa

SEQ ID NO: 4379168 - DNA, 25 bp, Homo sapien
acacacaaatatgcttgctacttac

SEQ ID NO: 4379169 - DNA, 25 bp, Homo sapien
gactgatgccacagcaggtaattcc

SEQ ID NO: 4379170 - DNA, 25 bp, Homo sapien
taattactgaagcactgactgatgc

SEQ ID NO: 4379171 - DNA, 25 bp, Homo sapien
tactgttactccttgtggtggcagc

SEQ ID NO: 4379172 - DNA, 25 bp, Homo sapien
gaaatggctccaatccctcctgaat

SEQ ID NO: 4379173 - DNA, 25 bp, Homo sapien
tatggcacgctaaagaaagcagaga

SEQ ID NO: 4379174 - DNA, 25 bp, Homo sapien
gtttccatgcctgttgtagcagtcc

SEQ ID NO: 4379175 - DNA, 25 bp, Homo sapien
cagaatacgtacaacaaagccggaa

SEQ ID NO: 4379176 - DNA, 25 bp, Homo sapien
taactgaaaatgatcatgagggcaa

SEQ ID NO: 4379177 - DNA, 25 bp, Homo sapien
ctaacaaaggatgttcagaagtcaa

SEQ ID NO: 4379178 - DNA, 25 bp, Homo sapien
gacacattcatctgactcttctggc

SEQ ID NO: 4379179 - DNA, 25 bp, Homo sapien
caaaggatgttcagaagtcaaatct

SEQ ID NO: 4379180 - DNA, 25 bp, Homo sapien
gggttctatccatccggacacattc

SEQ ID NO: 4379181 - DNA, 25 bp, Homo sapien
cttaagagaaaaaactttgtgcaga

SEQ ID NO: 4379182 - DNA, 25 bp, Homo sapien
gatgacactggttcaaatgcattcc

SEQ ID NO: 4379183 - DNA, 25 bp, Homo sapien
ctttgtgcagatgacactggttcaa

SEQ ID NO: 4379184 - DNA, 25 bp, Homo sapien
gagaaaaaactttgtgcagatgaca

SEQ ID NO: 4379185 - DNA, 25 bp, Homo sapien
aagaaagtcaaagagcttccaaggg

SEQ ID NO: 4379186 - DNA, 25 bp, Homo sapien
agaaagtcaaagagcttccaagggc

SEQ ID NO: 4379187 - DNA, 25 bp, Homo sapien
tctgagctggaggagatgtcgacat

SEQ ID NO: 4379188 - DNA, 25 bp, Homo sapien
taggtttaccgcaacagtctgtgga

SEQ ID NO: 4379189 - DNA, 25 bp, Homo sapien
gactctgaatcggtgaacaatgctg

SEQ ID NO: 4379190 - DNA, 25 bp, Homo sapien
tgctgcaaatttggccctggctgga

SEQ ID NO: 4379191 - DNA, 25 bp, Homo sapien
gaaggtggtgaatgaagaggaatct

SEQ ID NO: 4379192 - DNA, 25 bp, Homo sapien
gtaatatcagctgatgatgggaaac

SEQ ID NO: 4379193 - DNA, 25 bp, Homo sapien
ggtgaatgaagaggaatctgctgat

SEQ ID NO: 4379194 - DNA, 25 bp, Homo sapien
ctgttgtaatatcagctgatgatgg

SEQ ID NO: 4379195 - DNA, 25 bp, Homo sapien
ggagtatcatcatagaacaagtata

SEQ ID NO: 4379196 - DNA, 25 bp, Homo sapien
aactgcctaaaacttaataatctga

SEQ ID NO: 4379197 - DNA, 25 bp, Homo sapien
ttataggtcacctgaatatctacat

SEQ ID NO: 4379198 - DNA, 25 bp, Homo sapien
cgtgcttccaactaatagggtaatt

SEQ ID NO: 4379199 - DNA, 25 bp, Homo sapien
taggctagtacttcacactaagact

SEQ ID NO: 4379200 - DNA, 25 bp, Homo sapien
tcatataagtatctaggctagtact

SEQ ID NO: 4379201 - DNA, 25 bp, Homo sapien
caataaatatccactaattgttaaa

SEQ ID NO: 4379202 - DNA, 25 bp, Homo sapien
aattaacatctgattaacatccaaa

SEQ ID NO: 4379203 - DNA, 25 bp, Homo sapien
gaattaatggctgacatctctcaca

SEQ ID NO: 4379204 - DNA, 25 bp, Homo sapien
gctatgtgaagcaatacctctgtaa

SEQ ID NO: 4379205 - DNA, 25 bp, Homo sapien
gaaaagacctagtgctctgggaaaa

SEQ ID NO: 4379206 - DNA, 25 bp, Homo sapien
gatcctaactgagtctagggccctg

SEQ ID NO: 4379207 - DNA, 25 bp, Homo sapien
tacacaagatattgaccatcagagg

SEQ ID NO: 4379208 - DNA, 25 bp, Homo sapien
tgtacagtagtgtaaaaacccagct

SEQ ID NO: 4379209 - DNA, 25 bp, Homo sapien
tgagcagtcatcctaaggaccatgg

SEQ ID NO: 4379210 - DNA, 25 bp, Homo sapien
ctgtcaaaactagccagacgctggt

SEQ ID NO: 4379211 - DNA, 25 bp, Homo sapien
gaaagactgcaataattcccaaaat

SEQ ID NO: 4379212 - DNA, 25 bp, Homo sapien
caaagcctacttacataagattcag

SEQ ID NO: 4379213 - DNA, 25 bp, Homo sapien
ccgcgcccagcttgaatatatttat

SEQ ID NO: 4379214 - DNA, 25 bp, Homo sapien
gtgatacctaattagtaccaataag

SEQ ID NO: 4379215 - DNA, 25 bp, Homo sapien
aaggagcttactatctagcagacaa

SEQ ID NO: 4379216 - DNA, 25 bp, Homo sapien
gcttactatctagcagacaagctaa

SEQ ID NO: 4379217 - DNA, 25 bp, Homo sapien
ctagcagacaagctaagatcagtat

SEQ ID NO: 4379218 - DNA, 25 bp, Homo sapien
ctatctagcagacaagctaagatca

SEQ ID NO: 4379219 - DNA, 25 bp, Homo sapien
agacagtaagctcactctggatggc

SEQ ID NO: 4379220 - DNA, 25 bp, Homo sapien
aaaggtgtcactcctgttcaagtca

SEQ ID NO: 4379221 - DNA, 25 bp, Homo sapien
tatcaatataaggagagaccagtgc

SEQ ID NO: 4379222 - DNA, 25 bp, Homo sapien
tgtaaggtgtatagcccagtgcaac

SEQ ID NO: 4379223 - DNA, 25 bp, Homo sapien
gaatacttgatgtccgggtgacagc

SEQ ID NO: 4379224 - DNA, 25 bp, Homo sapien
taatacacccaacttctggctgcgt

SEQ ID NO: 4379225 - DNA, 25 bp, Homo sapien
cattctgtgagctagataatacacc

SEQ ID NO: 4379226 - DNA, 25 bp, Homo sapien
gctgattttagaactggtcactgtt

SEQ ID NO: 4379227 - DNA, 25 bp, Homo sapien
aaaagtctacattttgcctgagtta

SEQ ID NO: 4379228 - DNA, 25 bp, Homo sapien
tccaaacatgaacgctacactgcca

SEQ ID NO: 4379229 - DNA, 25 bp, Homo sapien
gaagaagaatattagggcactctgg

SEQ ID NO: 4379230 - DNA, 25 bp, Homo sapien
ggtgtcccacattcatttcatctga

SEQ ID NO: 4379231 - DNA, 25 bp, Homo sapien
gaaggaatggagcatttaacatagt

SEQ ID NO: 4379232 - DNA, 25 bp, Homo sapien
aaattaactgttgtactgacttcta

SEQ ID NO: 4379233 - DNA, 25 bp, Homo sapien
cccacgccggactgtagtggtgcga

SEQ ID NO: 4379234 - DNA, 25 bp, Homo sapien
tatgcccggctcatctcttaacaca

SEQ ID NO: 4379235 - DNA, 25 bp, Homo sapien
tcacagaggctcataattagaacac

SEQ ID NO: 4379236 - DNA, 25 bp, Homo sapien
ttagaacacatcaatctggacccca

SEQ ID NO: 4379237 - DNA, 25 bp, Homo sapien
taacggctccgagaatagagctgag

SEQ ID NO: 4379238 - DNA, 25 bp, Homo sapien
tagttacctgaaagctaagaaccaa

SEQ ID NO: 4379239 - DNA, 25 bp, Homo sapien
tgtaagaatatatcgaggccgggcg

SEQ ID NO: 4379240 - DNA, 25 bp, Homo sapien
ttgtttatccactcagcagctaaag

SEQ ID NO: 4379241 - DNA, 25 bp, Homo sapien
ctgtaagaatatatcgaggccgggc

SEQ ID NO: 4379242 - DNA, 25 bp, Homo sapien
ccactcagcagctaaaggacatttg

SEQ ID NO: 4379243 - DNA, 25 bp, Homo sapien
aggaagatgacgatgacgacgagac

SEQ ID NO: 4379244 - DNA, 25 bp, Homo sapien
cacagtggtagcgggtgtgaaaatc

SEQ ID NO: 4379245 - DNA, 25 bp, Homo sapien
gatgacgacgagacaacaggaatgt

SEQ ID NO: 4379246 - DNA, 25 bp, Homo sapien
gaatgtcagactgtacagcagccac

SEQ ID NO: 4379247 - DNA, 25 bp, Homo sapien
tgatgagccctccatacctatggaa

SEQ ID NO: 4379248 - DNA, 25 bp, Homo sapien
aatgtacaagagctgaaggcacgcc

SEQ ID NO: 4379249 - DNA, 25 bp, Homo sapien
aaactgaagatccaagccaggtgtg

SEQ ID NO: 4379250 - DNA, 25 bp, Homo sapien
tcatctgggagactatccggaactc

SEQ ID NO: 4379251 - DNA, 25 bp, Homo sapien
catttgagctcggagatacatttga

SEQ ID NO: 4379252 - DNA, 25 bp, Homo sapien
ggaagtactccctagtaacatagtc

SEQ ID NO: 4379253 - DNA, 25 bp, Homo sapien
tcggagatacatttgagcttggctt

SEQ ID NO: 4379254 - DNA, 25 bp, Homo sapien
ttgagcttggcttgccgttagggta

SEQ ID NO: 4379255 - DNA, 25 bp, Homo sapien
acggcttattaactgtgcaggtgta

SEQ ID NO: 4379256 - DNA, 25 bp, Homo sapien
ggaacggcttattaactgtgcaggt

SEQ ID NO: 4379257 - DNA, 25 bp, Homo sapien
gaacggcttattaactgtgcaggtg

SEQ ID NO: 4379258 - DNA, 25 bp, Homo sapien
tgggaacggcttattaactgtgcag

SEQ ID NO: 4379259 - DNA, 25 bp, Homo sapien
tttaaggatagctacaacgtgtttc

SEQ ID NO: 4379260 - DNA, 25 bp, Homo sapien
gatttctagtatcttaaaatatcat

SEQ ID NO: 4379261 - DNA, 25 bp, Homo sapien
tacaacgtgtttcaataagatttct

SEQ ID NO: 4379262 - DNA, 25 bp, Homo sapien
agactggagtgcaagtgcgcgattt

SEQ ID NO: 4379263 - DNA, 25 bp, Homo sapien
tgcagccccaatttcctagactcag

SEQ ID NO: 4379264 - DNA, 25 bp, Homo sapien
gccccaatttcctagactcagatga

SEQ ID NO: 4379265 - DNA, 25 bp, Homo sapien
atttcctagactcagatgatccttc

SEQ ID NO: 4379266 - DNA, 25 bp, Homo sapien
agccatcgcaccagaccacactttt

SEQ ID NO: 4379267 - DNA, 25 bp, Homo sapien
gataatagaggatgaggacactagc

SEQ ID NO: 4379268 - DNA, 25 bp, Homo sapien
gaaaaggcttctacacccaatcact

SEQ ID NO: 4379269 - DNA, 25 bp, Homo sapien
ggacactagcagtagaacactgaga

SEQ ID NO: 4379270 - DNA, 25 bp, Homo sapien
caaatggactctgatatgtggctga

SEQ ID NO: 4379271 - DNA, 25 bp, Homo sapien
tcaatcagtaggtacacagttcccc

SEQ ID NO: 4379272 - DNA, 25 bp, Homo sapien
taagagatctgttaccatgctcccc

SEQ ID NO: 4379273 - DNA, 25 bp, Homo sapien
aactacctagctggttacctgacag

SEQ ID NO: 4379274 - DNA, 25 bp, Homo sapien
caggtggtatgactggactttggac

SEQ ID NO: 4379275 - DNA, 25 bp, Homo sapien
cccttagctgaagaaatagagcaca

SEQ ID NO: 4379276 - DNA, 25 bp, Homo sapien
gaccacagcatgtagttagcaaaga

SEQ ID NO: 4379277 - DNA, 25 bp, Homo sapien
tataaattacacgatagcccctgac

SEQ ID NO: 4379278 - DNA, 25 bp, Homo sapien
gctgccggcatctagtagccaggga

SEQ ID NO: 4379279 - DNA, 25 bp, Homo sapien
tctgaacatgatcagtgcaaatgga

SEQ ID NO: 4379280 - DNA, 25 bp, Homo sapien
gaaatgcttagatgtctaccaagga

SEQ ID NO: 4379281 - DNA, 25 bp, Homo sapien
taccctatcttgaatggatacttgc

SEQ ID NO: 4379282 - DNA, 25 bp, Homo sapien
gaaagctgaaaccacataagatctg

SEQ ID NO: 4379283 - DNA, 25 bp, Homo sapien
gatggtcttccactggacaaacttg

SEQ ID NO: 4379284 - DNA, 25 bp, Homo sapien
gacatacttgactgctgtgtgacac

SEQ ID NO: 4379285 - DNA, 25 bp, Homo sapien
tgtgtgacacttcctgtgggagatg

SEQ ID NO: 4379286 - DNA, 25 bp, Homo sapien
tgggacatacttgactgctgtgtga

SEQ ID NO: 4379287 - DNA, 25 bp, Homo sapien
agaatatgtcggtaaaaacctgaag

SEQ ID NO: 4379288 - DNA, 25 bp, Homo sapien
ttagaatatgtcggtaaaaacctga

SEQ ID NO: 4379289 - DNA, 25 bp, Homo sapien
tagaatatgtcggtaaaaacctgaa

SEQ ID NO: 4379290 - DNA, 25 bp, Homo sapien
agctgcagtatgcagcatcaagtgc

SEQ ID NO: 4379291 - DNA, 25 bp, Homo sapien
tatgcagcatcaagtgctgttgttg

SEQ ID NO: 4379292 - DNA, 25 bp, Homo sapien
cagtatgcagcatcaagtgctgttg

SEQ ID NO: 4379293 - DNA, 25 bp, Homo sapien
tgcagtatgcagcatcaagtgctgt

SEQ ID NO: 4379294 - DNA, 25 bp, Homo sapien
gctcaaggggattatgtctcatacc

SEQ ID NO: 4379295 - DNA, 25 bp, Homo sapien
tctgaggctcaaggggattatgtct

SEQ ID NO: 4379296 - DNA, 25 bp, Homo sapien
gttttctgaggctcaaggggattat

SEQ ID NO: 4379297 - DNA, 25 bp, Homo sapien
gaggctcaaggggattatgtctcat

SEQ ID NO: 4379298 - DNA, 25 bp, Homo sapien
atctccctaagtctatattttgagt

SEQ ID NO: 4379299 - DNA, 25 bp, Homo sapien
acagatctccctaagtctatatttt

SEQ ID NO: 4379300 - DNA, 25 bp, Homo sapien
tctatattttgagttccaatataaa

SEQ ID NO: 4379301 - DNA, 25 bp, Homo sapien
gatctccctaagtctatattttgag

SEQ ID NO: 4379302 - DNA, 25 bp, Homo sapien
ctgtacagcatgtcggtctgaacca

SEQ ID NO: 4379303 - DNA, 25 bp, Homo sapien
gcatgtcggtctgaaccactgtaga

SEQ ID NO: 4379304 - DNA, 25 bp, Homo sapien
catgtcggtctgaaccactgtagac

SEQ ID NO: 4379305 - DNA, 25 bp, Homo sapien
cagcatgtcggtctgaaccactgta

SEQ ID NO: 4379306 - DNA, 25 bp, Homo sapien
cacagaagatgttcccgggtttggt

SEQ ID NO: 4379307 - DNA, 25 bp, Homo sapien
gtgacatgcaaaaggccagcttaag

SEQ ID NO: 4379308 - DNA, 25 bp, Homo sapien
tgctgcctgtcatactactaccgta

SEQ ID NO: 4379309 - DNA, 25 bp, Homo sapien
taccgtatcgtgtaccagtgacatg

SEQ ID NO: 4379310 - DNA, 25 bp, Homo sapien
aaactttttaccgaactgctgcctg

SEQ ID NO: 4379311 - DNA, 25 bp, Homo sapien
taaacatcggttgagcggaactggc

SEQ ID NO: 4379312 - DNA, 25 bp, Homo sapien
ttctcggcataagtctaaacatcgg

SEQ ID NO: 4379313 - DNA, 25 bp, Homo sapien
cagttctggtgcacaagaggcctac

SEQ ID NO: 4379314 - DNA, 25 bp, Homo sapien
tcgcactgcatttcgaggcctggca

SEQ ID NO: 4379315 - DNA, 25 bp, Homo sapien
tgtaaaattgctatagggtcccagc

SEQ ID NO: 4379316 - DNA, 25 bp, Homo sapien
tctgactattacaagttaacaaagg

SEQ ID NO: 4379317 - DNA, 25 bp, Homo sapien
taatcatcttagactggaatgggtc

SEQ ID NO: 4379318 - DNA, 25 bp, Homo sapien
ggattctttcagttagtccttgata

SEQ ID NO: 4379319 - DNA, 25 bp, Homo sapien
taaaaccactgttggtggagcgcgg

SEQ ID NO: 4379320 - DNA, 25 bp, Homo sapien
ccaaaaacttgacagggagatgagg

SEQ ID NO: 4379321 - DNA, 25 bp, Homo sapien
caatgtcaaaaccactggagcaatc

SEQ ID NO: 4379322 - DNA, 25 bp, Homo sapien
gtaattagtagaggctaacagctgg

SEQ ID NO: 4379323 - DNA, 25 bp, Homo sapien
agctggatccaggttttccaccccg

SEQ ID NO: 4379324 - DNA, 25 bp, Homo sapien
accctacgcgcaaggaacctcaagt

SEQ ID NO: 4379325 - DNA, 25 bp, Homo sapien
tatgctgagcaggtaaccaaattct

SEQ ID NO: 4379326 - DNA, 25 bp, Homo sapien
ataaagtctagaacgtgaggaagcc

SEQ ID NO: 4379327 - DNA, 25 bp, Homo sapien
cgtaaggatggttcagcccggtatt

SEQ ID NO: 4379328 - DNA, 25 bp, Homo sapien
ggtgaggtgtcgtagaatttgtccc

SEQ ID NO: 4379329 - DNA, 25 bp, Homo sapien
gaaagcctactaccgcgggtgagtg

SEQ ID NO: 4379330 - DNA, 25 bp, Homo sapien
gtgaaagcacccctctcggcgtgtt

SEQ ID NO: 4379331 - DNA, 25 bp, Homo sapien
tcgtcaagattaagttgcatgtgtg

SEQ ID NO: 4379332 - DNA, 25 bp, Homo sapien
gtgtcgtcaagattaagttgcatgt

SEQ ID NO: 4379333 - DNA, 25 bp, Homo sapien
tctcagtgttgtttcaacgactacc

SEQ ID NO: 4379334 - DNA, 25 bp, Homo sapien
caacgactacccgatagggtgagat

SEQ ID NO: 4379335 - DNA, 25 bp, Homo sapien
gtgagaacattctgcatttgaaaaa

SEQ ID NO: 4379336 - DNA, 25 bp, Homo sapien
aatgtgagaacattctgcatttgaa

SEQ ID NO: 4379337 - DNA, 25 bp, Homo sapien
caagaaatgtgagaacattctgcat

SEQ ID NO: 4379338 - DNA, 25 bp, Homo sapien
gaaatgtgagaacattctgcatttg

SEQ ID NO: 4379339 - DNA, 25 bp, Homo sapien
aatgacaccagtggccaaatacaga

SEQ ID NO: 4379340 - DNA, 25 bp, Homo sapien
taacctatgtaggaatgtggctgag

SEQ ID NO: 4379341 - DNA, 25 bp, Homo sapien
cactgtgcttgacagctaacctatg

SEQ ID NO: 4379342 - DNA, 25 bp, Homo sapien
tgtggctgagaacgataatagaaac

SEQ ID NO: 4379343 - DNA, 25 bp, Homo sapien
caagtggtttagtgttctgactgca

SEQ ID NO: 4379344 - DNA, 25 bp, Homo sapien
cagtacgaaggtcctagtgggaaca

SEQ ID NO: 4379345 - DNA, 25 bp, Homo sapien
cctgatagtgaaaggatgaccacct

SEQ ID NO: 4379346 - DNA, 25 bp, Homo sapien
cactactgttgttattgggcctgat

SEQ ID NO: 4379347 - DNA, 25 bp, Homo sapien
cagcctggattggatgttaagtaaa

SEQ ID NO: 4379348 - DNA, 25 bp, Homo sapien
cagcggacagtcagaatggttggaa

SEQ ID NO: 4379349 - DNA, 25 bp, Homo sapien
agttcgctcaaaatactcaacaggg

SEQ ID NO: 4379350 - DNA, 25 bp, Homo sapien
cattttgtgcatatgcagcctggat

SEQ ID NO: 4379351 - DNA, 25 bp, Homo sapien
tattcatggtccgtatggctccagt

SEQ ID NO: 4379352 - DNA, 25 bp, Homo sapien
caccagcctgtacgaatatgtgcta

SEQ ID NO: 4379353 - DNA, 25 bp, Homo sapien
cagtacgccattgcctctcaagaaa

SEQ ID NO: 4379354 - DNA, 25 bp, Homo sapien
cagattaagttttgagagccaccag

SEQ ID NO: 4379355 - DNA, 25 bp, Homo sapien
gagtgttgttcagaagaatttgtgg

SEQ ID NO: 4379356 - DNA, 25 bp, Homo sapien
tgttcagaagaatttgtggttcggg

SEQ ID NO: 4379357 - DNA, 25 bp, Homo sapien
tgttgttcagaagaatttgtggttc

SEQ ID NO: 4379358 - DNA, 25 bp, Homo sapien
aatgagtgttgttcagaagaatttg

SEQ ID NO: 4379359 - DNA, 25 bp, Homo sapien
gaaaatgtttccctggtccagtgat

SEQ ID NO: 4379360 - DNA, 25 bp, Homo sapien
aactggcatagacaccgaggaaccc

SEQ ID NO: 4379361 - DNA, 25 bp, Homo sapien
aaaatttgcctatgtgagtcaccgg

SEQ ID NO: 4379362 - DNA, 25 bp, Homo sapien
tcagcagagccaaggtagatccagg

SEQ ID NO: 4379363 - DNA, 25 bp, Homo sapien
ctttgccacgcttctgtctctatgg

SEQ ID NO: 4379364 - DNA, 25 bp, Homo sapien
tttgccacgcttctgtctctatggc

SEQ ID NO: 4379365 - DNA, 25 bp, Homo sapien
tctttgccacgcttctgtctctatg

SEQ ID NO: 4379366 - DNA, 25 bp, Homo sapien
aaacaaaccagaccattgcattgac

SEQ ID NO: 4379367 - DNA, 25 bp, Homo sapien
tgaccctggacatctttaattgaga

SEQ ID NO: 4379368 - DNA, 25 bp, Homo sapien
gaggatttacacacgtcttcagttt

SEQ ID NO: 4379369 - DNA, 25 bp, Homo sapien
agattttatggcacaaggaatggca

SEQ ID NO: 4379370 - DNA, 25 bp, Homo sapien
tccagcgtaggcgtcgagggaaact

SEQ ID NO: 4379371 - DNA, 25 bp, Homo sapien
caatgaatggctcacaatcccagca

SEQ ID NO: 4379372 - DNA, 25 bp, Homo sapien
gcgtaggcgtcgagggaaactccat

SEQ ID NO: 4379373 - DNA, 25 bp, Homo sapien
aacaaacaacctatcaacaggtggg

SEQ ID NO: 4379374 - DNA, 25 bp, Homo sapien
ggctttgtttccattaaggactcaa

SEQ ID NO: 4379375 - DNA, 25 bp, Homo sapien
acaggattaacaggatttttatcag

SEQ ID NO: 4379376 - DNA, 25 bp, Homo sapien
tgttatattaccaactttacatggc

SEQ ID NO: 4379377 - DNA, 25 bp, Homo sapien
gggatgttatattaccaactttaca

SEQ ID NO: 4379378 - DNA, 25 bp, Homo sapien
tgcaaaatgttctacccgttaagct

SEQ ID NO: 4379379 - DNA, 25 bp, Homo sapien
gcaaaatgttctacccgttaagcta

SEQ ID NO: 4379380 - DNA, 25 bp, Homo sapien
gtgcaaaatgttctacccgttaagc

SEQ ID NO: 4379381 - DNA, 25 bp, Homo sapien
cctggccaactcaagattcttaaac

SEQ ID NO: 4379382 - DNA, 25 bp, Homo sapien
cattaattaccatactttgttgaat

SEQ ID NO: 4379383 - DNA, 25 bp, Homo sapien
cttaaacattaattaccatactttg

SEQ ID NO: 4379384 - DNA, 25 bp, Homo sapien
ggccaactcaagattcttaaacatt

SEQ ID NO: 4379385 - DNA, 25 bp, Homo sapien
gctactcaaggagttgaatctcccc

SEQ ID NO: 4379386 - DNA, 25 bp, Homo sapien
gaggttatagcataccccatgagca

SEQ ID NO: 4379387 - DNA, 25 bp, Homo sapien
tggtttcaactagtaggtaatctgc

SEQ ID NO: 4379388 - DNA, 25 bp, Homo sapien
tctgcatgacgataactaggcattc

SEQ ID NO: 4379389 - DNA, 25 bp, Homo sapien
taccaaaatttgcacgaatggacca

SEQ ID NO: 4379390 - DNA, 25 bp, Homo sapien
catataggacagtttagttacctgc

SEQ ID NO: 4379391 - DNA, 25 bp, Homo sapien
catagtttcaggagggacaacatct

SEQ ID NO: 4379392 - DNA, 25 bp, Homo sapien
caactgatagtacatgataggtgca

SEQ ID NO: 4379393 - DNA, 25 bp, Homo sapien
ttaaaatgacatattctcccaatac

SEQ ID NO: 4379394 - DNA, 25 bp, Homo sapien
ctaattcacttggaacctttctgct

SEQ ID NO: 4379395 - DNA, 25 bp, Homo sapien
gaattatttgtgtcacagctcagct

SEQ ID NO: 4379396 - DNA, 25 bp, Homo sapien
ttgaattatttgtgtcacagctcag

SEQ ID NO: 4379397 - DNA, 25 bp, Homo sapien
tataagtggagttggctaaaatacc

SEQ ID NO: 4379398 - DNA, 25 bp, Homo sapien
tttccagaagatgcgttggtgtgcc

SEQ ID NO: 4379399 - DNA, 25 bp, Homo sapien
tgtgccaaattcactaggcaagcgg

SEQ ID NO: 4379400 - DNA, 25 bp, Homo sapien
ggtgtgccataggtttctaacttcc

SEQ ID NO: 4379401 - DNA, 25 bp, Homo sapien
tatagggtacttaagcatttccact

SEQ ID NO: 4379402 - DNA, 25 bp, Homo sapien
taattttaagccaacatagtagtct

SEQ ID NO: 4379403 - DNA, 25 bp, Homo sapien
aaacagttgctaaatgtaggacatc

SEQ ID NO: 4379404 - DNA, 25 bp, Homo sapien
taaagtagttctagtaaacatgtcc

SEQ ID NO: 4379405 - DNA, 25 bp, Homo sapien
tcattgtttgcaccttttagctatt

SEQ ID NO: 4379406 - DNA, 25 bp, Homo sapien
gtctcagaatttcacttgtttgtat

SEQ ID NO: 4379407 - DNA, 25 bp, Homo sapien
attgtttgcaccttttagctattgc

SEQ ID NO: 4379408 - DNA, 25 bp, Homo sapien
cattgtttgcaccttttagctattg

SEQ ID NO: 4379409 - DNA, 25 bp, Homo sapien
gaacctggtgtgttttccacagtga

SEQ ID NO: 4379410 - DNA, 25 bp, Homo sapien
gaattttttcccctctcgtagctga

SEQ ID NO: 4379411 - DNA, 25 bp, Homo sapien
tgagcagtacacatcccttctactg

SEQ ID NO: 4379412 - DNA, 25 bp, Homo sapien
gaagtatatgcattgaggccagcgt

SEQ ID NO: 4379413 - DNA, 25 bp, Homo sapien
ggttacatcttgtggcctcctcaag

SEQ ID NO: 4379414 - DNA, 25 bp, Homo sapien
tcttgtggcctcctcaagtggcctt

SEQ ID NO: 4379415 - DNA, 25 bp, Homo sapien
ttcaaacaggttacatcttgtggcc

SEQ ID NO: 4379416 - DNA, 25 bp, Homo sapien
cttgggctaatgaattcaaacaggt

SEQ ID NO: 4379417 - DNA, 25 bp, Homo sapien
gagggcaatagtggaacgaactttc

SEQ ID NO: 4379418 - DNA, 25 bp, Homo sapien
taacagtgcaagtgagtataactct

SEQ ID NO: 4379419 - DNA, 25 bp, Homo sapien
ggtcatttacttgtacgagacagaa

SEQ ID NO: 4379420 - DNA, 25 bp, Homo sapien
tgaaggaaatgaaccacatagactt

SEQ ID NO: 4379421 - DNA, 25 bp, Homo sapien
ggcggcatcagtgctaccattgaga

SEQ ID NO: 4379422 - DNA, 25 bp, Homo sapien
ctggcctcgaagagaggcggcatca

SEQ ID NO: 4379423 - DNA, 25 bp, Homo sapien
ttggcaggacattcatgctcatgac

SEQ ID NO: 4379424 - DNA, 25 bp, Homo sapien
tgctcatgacatcacatgctgagag

SEQ ID NO: 4379425 - DNA, 25 bp, Homo sapien
ctgaaccaggattgtgggtggaaca

SEQ ID NO: 4379426 - DNA, 25 bp, Homo sapien
ggattgtgggtggaacattggcaca

SEQ ID NO: 4379427 - DNA, 25 bp, Homo sapien
caggattgtgggtggaacattggca

SEQ ID NO: 4379428 - DNA, 25 bp, Homo sapien
aggattgtgggtggaacattggcac

SEQ ID NO: 4379429 - DNA, 25 bp, Homo sapien
tcatttgctgtctgattttgcttat

SEQ ID NO: 4379430 - DNA, 25 bp, Homo sapien
tcaaggagagcttctagaggtgtga

SEQ ID NO: 4379431 - DNA, 25 bp, Homo sapien
catcaaggagagcttctagaggtgt

SEQ ID NO: 4379432 - DNA, 25 bp, Homo sapien
aggagagcttctagaggtgtgaggg

SEQ ID NO: 4379433 - DNA, 25 bp, Homo sapien
ccgagggccttgggccgttctcttg

SEQ ID NO: 4379434 - DNA, 25 bp, Homo sapien
tctcttggttttgaagtagcctcca

SEQ ID NO: 4379435 - DNA, 25 bp, Homo sapien
ttgaagtagcctccatgagcaagga

SEQ ID NO: 4379436 - DNA, 25 bp, Homo sapien
ggttttgaagtagcctccatgagca

SEQ ID NO: 4379437 - DNA, 25 bp, Homo sapien
tactttcccattgatgctaccgtga

SEQ ID NO: 4379438 - DNA, 25 bp, Homo sapien
gcttgctccttggaacccaagccag

SEQ ID NO: 4379439 - DNA, 25 bp, Homo sapien
gctaccgtgatcgtgcactctggag

SEQ ID NO: 4379440 - DNA, 25 bp, Homo sapien
tggttctgaactacctactttccca

SEQ ID NO: 4379441 - DNA, 25 bp, Homo sapien
tgatggggagaaggattgggtaagt

SEQ ID NO: 4379442 - DNA, 25 bp, Homo sapien
tcatgataaggacaaaagaatcttg

SEQ ID NO: 4379443 - DNA, 25 bp, Homo sapien
aagaatcttgcactgtgtcaggctg

SEQ ID NO: 4379444 - DNA, 25 bp, Homo sapien
attgggtaagtgtcctcctggaggg

SEQ ID NO: 4379445 - DNA, 25 bp, Homo sapien
agccaggcgttgtctccggaacaaa

SEQ ID NO: 4379446 - DNA, 25 bp, Homo sapien
ttcgtagcctgttagagagtttttc

SEQ ID NO: 4379447 - DNA, 25 bp, Homo sapien
gtctccggaacaaatccaactttca

SEQ ID NO: 4379448 - DNA, 25 bp, Homo sapien
ccaactttcacttcgtagcctgtta

SEQ ID NO: 4379449 - DNA, 25 bp, Homo sapien
cctctgaaccctccttgaaccccat

SEQ ID NO: 4379450 - DNA, 25 bp, Homo sapien
tcagtgtgccggaacttcatgactg

SEQ ID NO: 4379451 - DNA, 25 bp, Homo sapien
gaggcatcagtgtgccggaacttca

SEQ ID NO: 4379452 - DNA, 25 bp, Homo sapien
tcagggtgacaagaagtggattcta

SEQ ID NO: 4379453 - DNA, 25 bp, Homo sapien
aacttcatgactgggttcagtgcca

SEQ ID NO: 4379454 - DNA, 25 bp, Homo sapien
ttagccaatgttaccgaagtcagtg

SEQ ID NO: 4379455 - DNA, 25 bp, Homo sapien
tagaactacctgttgtccgaagacc

SEQ ID NO: 4379456 - DNA, 25 bp, Homo sapien
gagacaagcgtatcagcaactgcca

SEQ ID NO: 4379457 - DNA, 25 bp, Homo sapien
aaagctagaatgtggagtcctgtca

SEQ ID NO: 4379458 - DNA, 25 bp, Homo sapien
cattcccagcgagaaatactaagta

SEQ ID NO: 4379459 - DNA, 25 bp, Homo sapien
cctgcggtttgggatgctgtttctg

SEQ ID NO: 4379460 - DNA, 25 bp, Homo sapien
agtaaactccttggtgaaacttcag

SEQ ID NO: 4379461 - DNA, 25 bp, Homo sapien
caaatactctttcgtggccaggcca

SEQ ID NO: 4379462 - DNA, 25 bp, Homo sapien
gacacgtcttgttccaaacagcatg

SEQ ID NO: 4379463 - DNA, 25 bp, Homo sapien
cagacacgtgggtcctcagtttcag

SEQ ID NO: 4379464 - DNA, 25 bp, Homo sapien
gcatgaaaatggagcgctggcacac

SEQ ID NO: 4379465 - DNA, 25 bp, Homo sapien
tctccagaggtctttgcagacacgt

SEQ ID NO: 4379466 - DNA, 25 bp, Homo sapien
gattttcaacctgatgtagcttctg

SEQ ID NO: 4379467 - DNA, 25 bp, Homo sapien
acccgctgcgtagactccgtaagca

SEQ ID NO: 4379468 - DNA, 25 bp, Homo sapien
taaggtagacttccaacaaatgttg

SEQ ID NO: 4379469 - DNA, 25 bp, Homo sapien
ctgtgtttggccctccgcggacttt

SEQ ID NO: 4379470 - DNA, 25 bp, Homo sapien
gaccacaaactagtagaccttattc

SEQ ID NO: 4379471 - DNA, 25 bp, Homo sapien
attctttatgacctttccagaggaa

SEQ ID NO: 4379472 - DNA, 25 bp, Homo sapien
cattacaagtccgtcatctcacctg

SEQ ID NO: 4379473 - DNA, 25 bp, Homo sapien
tattcatgccgatcctttgcttggc

SEQ ID NO: 4379474 - DNA, 25 bp, Homo sapien
tccaaaccacaaatccacacaatga

SEQ ID NO: 4379475 - DNA, 25 bp, Homo sapien
cacaatgaaatctcactcggagagc

SEQ ID NO: 4379476 - DNA, 25 bp, Homo sapien
tgaagcagagtaccaataaataagt

SEQ ID NO: 4379477 - DNA, 25 bp, Homo sapien
gaaaatcaagtaattggctccaaac

SEQ ID NO: 4379478 - DNA, 25 bp, Homo sapien
taatcctaaagcatgccaagatggc

SEQ ID NO: 4379479 - DNA, 25 bp, Homo sapien
tgctcaggaagtgccaatgcccatc

SEQ ID NO: 4379480 - DNA, 25 bp, Homo sapien
gaaagtgagctagccccaaggaata

SEQ ID NO: 4379481 - DNA, 25 bp, Homo sapien
caatgtgatctcagtggctggctca

SEQ ID NO: 4379482 - DNA, 25 bp, Homo sapien
tctagcccacaggttaagttactga

SEQ ID NO: 4379483 - DNA, 25 bp, Homo sapien
tcaccatttctacccacttgtgtgt

SEQ ID NO: 4379484 - DNA, 25 bp, Homo sapien
taagcccttcaacagaactatcctg

SEQ ID NO: 4379485 - DNA, 25 bp, Homo sapien
tgacaggctatgactagggattgaa

SEQ ID NO: 4379486 - DNA, 25 bp, Homo sapien
catcatttgcaatcagggcctctga

SEQ ID NO: 4379487 - DNA, 25 bp, Homo sapien
tcttctcgagcgctgatttccaggg

SEQ ID NO: 4379488 - DNA, 25 bp, Homo sapien
cctctgtggcgtaggagaaaccctc

SEQ ID NO: 4379489 - DNA, 25 bp, Homo sapien
gctttgctacttgtccggccgtttg

SEQ ID NO: 4379490 - DNA, 25 bp, Homo sapien
ttattatccttgtgtagaacagggc

SEQ ID NO: 4379491 - DNA, 25 bp, Homo sapien
cagggcatcacattaaggcctcttc

SEQ ID NO: 4379492 - DNA, 25 bp, Homo sapien
cctcttctaagagtgccagtgtgct

SEQ ID NO: 4379493 - DNA, 25 bp, Homo sapien
gaatggatttcaggcgaccaggcag

SEQ ID NO: 4379494 - DNA, 25 bp, Homo sapien
ttaaggctccaaaggaagttgctta

SEQ ID NO: 4379495 - DNA, 25 bp, Homo sapien
taaggctccaaaggaagttgcttac

SEQ ID NO: 4379496 - DNA, 25 bp, Homo sapien
tctcaagctgaccaacagtgcgagg

SEQ ID NO: 4379497 - DNA, 25 bp, Homo sapien
caggagcgtgccgatagacatcatc

SEQ ID NO: 4379498 - DNA, 25 bp, Homo sapien
aaacaccagggtgctgatcagcagc

SEQ ID NO: 4379499 - DNA, 25 bp, Homo sapien
tctgtgtaggagctgacgtgagcca

SEQ ID NO: 4379500 - DNA, 25 bp, Homo sapien
gcatagaacccatgagccacaaaca

SEQ ID NO: 4379501 - DNA, 25 bp, Homo sapien
gacccaatggccactacgaatttgg

SEQ ID NO: 4379502 - DNA, 25 bp, Homo sapien
tggcaccatcagagttaagatcacg

SEQ ID NO: 4379503 - DNA, 25 bp, Homo sapien
aatgaccctcggcatcgggaagagg

SEQ ID NO: 4379504 - DNA, 25 bp, Homo sapien
tgagctccttggatggcagcccatt

SEQ ID NO: 4379505 - DNA, 25 bp, Homo sapien
ctgagctccttggatggcagcccat

SEQ ID NO: 4379506 - DNA, 25 bp, Homo sapien
gctccttggatggcagcccattccc

SEQ ID NO: 4379507 - DNA, 25 bp, Homo sapien
ccttggatggcagcccattccctgc

SEQ ID NO: 4379508 - DNA, 25 bp, Homo sapien
gacaccaagagcttgtgaggatgga

SEQ ID NO: 4379509 - DNA, 25 bp, Homo sapien
agacaccaagagcttgtgaggatgg

SEQ ID NO: 4379510 - DNA, 25 bp, Homo sapien
acaccaagagcttgtgaggatggag

SEQ ID NO: 4379511 - DNA, 25 bp, Homo sapien
cagtgatagcataagggatggacgt

SEQ ID NO: 4379512 - DNA, 25 bp, Homo sapien
tgaccagggaggcagtgatagcata

SEQ ID NO: 4379513 - DNA, 25 bp, Homo sapien
catatgctgtcaggcagatgaccag

SEQ ID NO: 4379514 - DNA, 25 bp, Homo sapien
tgaaagcgtagaagcatgttgctgc

SEQ ID NO: 4379515 - DNA, 25 bp, Homo sapien
gacccagaacctgtaagtgagtaaa

SEQ ID NO: 4379516 - DNA, 25 bp, Homo sapien
gaacctgtaagtgagtaaaccattc

SEQ ID NO: 4379517 - DNA, 25 bp, Homo sapien
tgagtaaaccattccttaagctatt

SEQ ID NO: 4379518 - DNA, 25 bp, Homo sapien
atttgacccagaacctgtaagtgag

SEQ ID NO: 4379519 - DNA, 25 bp, Homo sapien
tgaaaatgcaactgaggaccaagaa

SEQ ID NO: 4379520 - DNA, 25 bp, Homo sapien
gatggccaaagtcttccagtaagtc

SEQ ID NO: 4379521 - DNA, 25 bp, Homo sapien
tgacaaccgtaacaagctgcacata

SEQ ID NO: 4379522 - DNA, 25 bp, Homo sapien
catgtagtgcaattagttttgccac

SEQ ID NO: 4379523 - DNA, 25 bp, Homo sapien
gggcagaggctatggtggggccagc

SEQ ID NO: 4379524 - DNA, 25 bp, Homo sapien
caagcctctcccgagtgagcagcag

SEQ ID NO: 4379525 - DNA, 25 bp, Homo sapien
gggccagcggcataggaggcatcac

SEQ ID NO: 4379526 - DNA, 25 bp, Homo sapien
agcttccggggtggcctgggcagag

SEQ ID NO: 4379527 - DNA, 25 bp, Homo sapien
tcggatcaacgtatttgagagctac

SEQ ID NO: 4379528 - DNA, 25 bp, Homo sapien
tcaaggcacagtaggaggagatcgc

SEQ ID NO: 4379529 - DNA, 25 bp, Homo sapien
tgacctgcggtgtacaaagacttag

SEQ ID NO: 4379530 - DNA, 25 bp, Homo sapien
gcctgctgagccctgttaacctgga

SEQ ID NO: 4379531 - DNA, 25 bp, Homo sapien
ctggagggcgaggagagcccggctg

SEQ ID NO: 4379532 - DNA, 25 bp, Homo sapien
tggagggcgaggagagcccggctgg

SEQ ID NO: 4379533 - DNA, 25 bp, Homo sapien
agggcgaggagagcccggctggagt

SEQ ID NO: 4379534 - DNA, 25 bp, Homo sapien
ggagggcgaggagagcccggctgga

SEQ ID NO: 4379535 - DNA, 25 bp, Homo sapien
gttgtgcagaagattgagacccgcg

SEQ ID NO: 4379536 - DNA, 25 bp, Homo sapien
ggttgtgcagaagattgagacccgc

SEQ ID NO: 4379537 - DNA, 25 bp, Homo sapien
gaagaggcctgcgatcatgatgaac

SEQ ID NO: 4379538 - DNA, 25 bp, Homo sapien
caacagagccagaaggtctgggtat

SEQ ID NO: 4379539 - DNA, 25 bp, Homo sapien
ccccagagcaacaatgatggtcacg

SEQ ID NO: 4379540 - DNA, 25 bp, Homo sapien
tgatgaacacccatactgccaggtt

SEQ ID NO: 4379541 - DNA, 25 bp, Homo sapien
tgtccgccatccagcggctgatggt

SEQ ID NO: 4379542 - DNA, 25 bp, Homo sapien
ctccaggatcaggttccagccaatg

SEQ ID NO: 4379543 - DNA, 25 bp, Homo sapien
ggccattgagggttcccacgctgtc

SEQ ID NO: 4379544 - DNA, 25 bp, Homo sapien
tgagtcaaacatgctgctcagagca

SEQ ID NO: 4379545 - DNA, 25 bp, Homo sapien
acacagatggtggacttcaggagat

SEQ ID NO: 4379546 - DNA, 25 bp, Homo sapien
tgcaagggacagacatacacagatg

SEQ ID NO: 4379547 - DNA, 25 bp, Homo sapien
caagggacagacatacacagatggt

SEQ ID NO: 4379548 - DNA, 25 bp, Homo sapien
gcaagggacagacatacacagatgg

SEQ ID NO: 4379549 - DNA, 25 bp, Homo sapien
tgatattgtacaagatttataagta

SEQ ID NO: 4379550 - DNA, 25 bp, Homo sapien
acctgatattgtacaagatttataa

SEQ ID NO: 4379551 - DNA, 25 bp, Homo sapien
gatattgtacaagatttataagtaa

SEQ ID NO: 4379552 - DNA, 25 bp, Homo sapien
ctgatattgtacaagatttataagt

SEQ ID NO: 4379553 - DNA, 25 bp, Homo sapien
ttatatactgctcatgagcactgtg

SEQ ID NO: 4379554 - DNA, 25 bp, Homo sapien
ctctggtttccagatgtaatgtatc

SEQ ID NO: 4379555 - DNA, 25 bp, Homo sapien
tgagcactgtgatgggggtaggtgg

SEQ ID NO: 4379556 - DNA, 25 bp, Homo sapien
tgatgggggtaggtggcaggctctg

SEQ ID NO: 4379557 - DNA, 25 bp, Homo sapien
cacagtacttccctgcatggagaca

SEQ ID NO: 4379558 - DNA, 25 bp, Homo sapien
ggatgaacagtgaccaggctggtaa

SEQ ID NO: 4379559 - DNA, 25 bp, Homo sapien
gagcatgatgatccacttttctgcc

SEQ ID NO: 4379560 - DNA, 25 bp, Homo sapien
tacatctcaccactaaatactccgg

SEQ ID NO: 4379561 - DNA, 25 bp, Homo sapien
tagcttagttccatgtgccgtggtg

SEQ ID NO: 4379562 - DNA, 25 bp, Homo sapien
tgagtacctgggctagcttagttcc

SEQ ID NO: 4379563 - DNA, 25 bp, Homo sapien
ctgataatatggatgcgacggctgc

SEQ ID NO: 4379564 - DNA, 25 bp, Homo sapien
gctgccaacgccaagagagatgagg

SEQ ID NO: 4379565 - DNA, 25 bp, Homo sapien
gcgtaggatcctggagtgcattgca

SEQ ID NO: 4379566 - DNA, 25 bp, Homo sapien
ccagcgaggtgaagaagccactcat

SEQ ID NO: 4379567 - DNA, 25 bp, Homo sapien
gagtgcattgcataccaggcagctc

SEQ ID NO: 4379568 - DNA, 25 bp, Homo sapien
gactccactggtttggtgcgtagga

SEQ ID NO: 4379569 - DNA, 25 bp, Homo sapien
gggctacaaagccttagtggatggt

SEQ ID NO: 4379570 - DNA, 25 bp, Homo sapien
tgaaggtcagctgatggaagggggc

SEQ ID NO: 4379571 - DNA, 25 bp, Homo sapien
gctacaaagccttagtggatggttc

SEQ ID NO: 4379572 - DNA, 25 bp, Homo sapien
tctggaactcatctagtgaacaggg

SEQ ID NO: 4379573 - DNA, 25 bp, Homo sapien
atcatcaagaatccagtttgccatg

SEQ ID NO: 4379574 - DNA, 25 bp, Homo sapien
gatgtgagtatgcagaggacagtgt

SEQ ID NO: 4379575 - DNA, 25 bp, Homo sapien
cagtttgccatgatgcctagaatct

SEQ ID NO: 4379576 - DNA, 25 bp, Homo sapien
tgatgcctagaatctctttgctgaa

SEQ ID NO: 4379577 - DNA, 25 bp, Homo sapien
cagcactaggcctttgtgacacagt

SEQ ID NO: 4379578 - DNA, 25 bp, Homo sapien
aaaatattgcttgtgggacgggcgc

SEQ ID NO: 4379579 - DNA, 25 bp, Homo sapien
gaccactgcagtcacagcctgattg

SEQ ID NO: 4379580 - DNA, 25 bp, Homo sapien
taatctgtgaagaggttgccaagca

SEQ ID NO: 4379581 - DNA, 25 bp, Homo sapien
taaagattgtatataaagcaaattt

SEQ ID NO: 4379582 - DNA, 25 bp, Homo sapien
ttgcaaacagagtatcccattttca

SEQ ID NO: 4379583 - DNA, 25 bp, Homo sapien
ctggctgggccttggttcctccttg

SEQ ID NO: 4379584 - DNA, 25 bp, Homo sapien
gctggtgtagggttgagggtcacca

SEQ ID NO: 4379585 - DNA, 25 bp, Homo sapien
gacttcctcttcttgctggtgtagg

SEQ ID NO: 4379586 - DNA, 25 bp, Homo sapien
gggaggctgagcttgacttcctctt

SEQ ID NO: 4379587 - DNA, 25 bp, Homo sapien
tgtcacaaccacttttggtggctcc

SEQ ID NO: 4379588 - DNA, 25 bp, Homo sapien
cactgcctgtggcttaaggtctaat

SEQ ID NO: 4379589 - DNA, 25 bp, Homo sapien
tcactcatcctacagccattgagct

SEQ ID NO: 4379590 - DNA, 25 bp, Homo sapien
cttagttcagccgtcaaggcccgga

SEQ ID NO: 4379591 - DNA, 25 bp, Homo sapien
cactgtttcctatggtgatcactac

SEQ ID NO: 4379592 - DNA, 25 bp, Homo sapien
ttcctgagcacactgtttcctatgg

SEQ ID NO: 4379593 - DNA, 25 bp, Homo sapien
tctgggtgagctttgccttattctc

SEQ ID NO: 4379594 - DNA, 25 bp, Homo sapien
ctgagcacactgtttcctatggtga

SEQ ID NO: 4379595 - DNA, 25 bp, Homo sapien
tacttctgaacaataactactacag

SEQ ID NO: 4379596 - DNA, 25 bp, Homo sapien
ctactacagacctcacatgagcatg

SEQ ID NO: 4379597 - DNA, 25 bp, Homo sapien
ggaagtctggtcatacttctgaaca

SEQ ID NO: 4379598 - DNA, 25 bp, Homo sapien
gaacaataactactacagacctcac

SEQ ID NO: 4379599 - DNA, 25 bp, Homo sapien
ggtgctggattgatcctgcaccagc

SEQ ID NO: 4379600 - DNA, 25 bp, Homo sapien
acctgcacagcaccaacattcaatg

SEQ ID NO: 4379601 - DNA, 25 bp, Homo sapien
gcattagaaggtgctggattgatcc

SEQ ID NO: 4379602 - DNA, 25 bp, Homo sapien
gaagagtggtcctcaccacatgcag

SEQ ID NO: 4379603 - DNA, 25 bp, Homo sapien
atcacgtaaacaattggtcaatgac

SEQ ID NO: 4379604 - DNA, 25 bp, Homo sapien
gctgaccatccttgaccagtagttc

SEQ ID NO: 4379605 - DNA, 25 bp, Homo sapien
tgaccatccttgaccagtagttctt

SEQ ID NO: 4379606 - DNA, 25 bp, Homo sapien
catccttgaccagtagttctttcac

SEQ ID NO: 4379607 - DNA, 25 bp, Homo sapien
gaccatccttgaccagtagttcttt

SEQ ID NO: 4379608 - DNA, 25 bp, Homo sapien
tctgctcgcagggaatgtgggccct

SEQ ID NO: 4379609 - DNA, 25 bp, Homo sapien
aatgtgggccctggcggtattagca

SEQ ID NO: 4379610 - DNA, 25 bp, Homo sapien
taacgcagtttctgctcgcagggaa

SEQ ID NO: 4379611 - DNA, 25 bp, Homo sapien
ggcggtattagcacccagcctctga

SEQ ID NO: 4379612 - DNA, 25 bp, Homo sapien
gtaaaagggcagacgttgctcccga

SEQ ID NO: 4379613 - DNA, 25 bp, Homo sapien
ggagactgagggttgaagcagtgca

SEQ ID NO: 4379614 - DNA, 25 bp, Homo sapien
tccctttgaggagtttgctcccagg

SEQ ID NO: 4379615 - DNA, 25 bp, Homo sapien
tgggctcggcgggagtccctttgag

SEQ ID NO: 4379616 - DNA, 25 bp, Homo sapien
aaagcgtctccgtttcatggtctcg

SEQ ID NO: 4379617 - DNA, 25 bp, Homo sapien
ctgcggccggaaaagcgtctccgtt

SEQ ID NO: 4379618 - DNA, 25 bp, Homo sapien
catggtctcggtccgaggcggagaa

SEQ ID NO: 4379619 - DNA, 25 bp, Homo sapien
gtctcggtccgaggcggagaacgga

SEQ ID NO: 4379620 - DNA, 25 bp, Homo sapien
gggcctccgcgccatattcctggtc

SEQ ID NO: 4379621 - DNA, 25 bp, Homo sapien
cggtgactccggctccctgggtcat

SEQ ID NO: 4379622 - DNA, 25 bp, Homo sapien
ctccctgggtcattccgggagaggc

SEQ ID NO: 4379623 - DNA, 25 bp, Homo sapien
ggcgccctgggcctccgcgccatat

SEQ ID NO: 4379624 - DNA, 25 bp, Homo sapien
gggctggaggcgacgagctggctgc

SEQ ID NO: 4379625 - DNA, 25 bp, Homo sapien
ggtggctggcagtccgcacttactg

SEQ ID NO: 4379626 - DNA, 25 bp, Homo sapien
tggaggcgacgagctggctgccaag

SEQ ID NO: 4379627 - DNA, 25 bp, Homo sapien
gtccgcacttactgcgcggagctgt

SEQ ID NO: 4379628 - DNA, 25 bp, Homo sapien
tggtggtggcggcaaaggaaggcag

SEQ ID NO: 4379629 - DNA, 25 bp, Homo sapien
ccgctgctgctgaacagctcctcaa

SEQ ID NO: 4379630 - DNA, 25 bp, Homo sapien
ctgggatgggaagtggtggtggcgg

SEQ ID NO: 4379631 - DNA, 25 bp, Homo sapien
gctgctgaacagctcctcaattatt

SEQ ID NO: 4379632 - DNA, 25 bp, Homo sapien
caatgtctgtgcgttgggaaggcat

SEQ ID NO: 4379633 - DNA, 25 bp, Homo sapien
cagtgtcttatgtcaggctgcaggg

SEQ ID NO: 4379634 - DNA, 25 bp, Homo sapien
cagggaccagcaggactctgcaatg

SEQ ID NO: 4379635 - DNA, 25 bp, Homo sapien
tcatcctctgcggagccttcgttgc

SEQ ID NO: 4379636 - DNA, 25 bp, Homo sapien
ctctccactgacatcaagaaacatg

SEQ ID NO: 4379637 - DNA, 25 bp, Homo sapien
ctgacatcaagaaacatgagaaagg

SEQ ID NO: 4379638 - DNA, 25 bp, Homo sapien
tcatttaatttggccatgatgcctt

SEQ ID NO: 4379639 - DNA, 25 bp, Homo sapien
tccactgacatcaagaaacatgaga

SEQ ID NO: 4379640 - DNA, 25 bp, Homo sapien
tgtaggaggatatgatattcacagc

SEQ ID NO: 4379641 - DNA, 25 bp, Homo sapien
gggctgtaggaggatatgatattca

SEQ ID NO: 4379642 - DNA, 25 bp, Homo sapien
gtgttggggagtcgttctctggagc

SEQ ID NO: 4379643 - DNA, 25 bp, Homo sapien
tattcacagctagcatgggtgttgg

SEQ ID NO: 4379644 - DNA, 25 bp, Homo sapien
ggtttgcttcatccacgaggtctgt

SEQ ID NO: 4379645 - DNA, 25 bp, Homo sapien
taatcatcattgcaatggtttgctt

SEQ ID NO: 4379646 - DNA, 25 bp, Homo sapien
cgaggtctgtttccagtgttgtgct

SEQ ID NO: 4379647 - DNA, 25 bp, Homo sapien
tttgcttcatccacgaggtctgttt

SEQ ID NO: 4379648 - DNA, 25 bp, Homo sapien
tgcaaccgagaaatggagggtttct

SEQ ID NO: 4379649 - DNA, 25 bp, Homo sapien
aggaagagtggattttgtaaacagc

SEQ ID NO: 4379650 - DNA, 25 bp, Homo sapien
aacagatattttcgggtaggaagag

SEQ ID NO: 4379651 - DNA, 25 bp, Homo sapien
gtatgttttcccactcatgcaaccg

SEQ ID NO: 4379652 - DNA, 25 bp, Homo sapien
gcgtgaaatcctgcttggaatgaga

SEQ ID NO: 4379653 - DNA, 25 bp, Homo sapien
tcacagttggaaccactccatttcc

SEQ ID NO: 4379654 - DNA, 25 bp, Homo sapien
cttggaatgagaagaaactttattc

SEQ ID NO: 4379655 - DNA, 25 bp, Homo sapien
cctcttcaccatctgtgagcgtgaa

SEQ ID NO: 4379656 - DNA, 25 bp, Homo sapien
ctcctcttttaggtactcatcctct

SEQ ID NO: 4379657 - DNA, 25 bp, Homo sapien
cctcttttaggtactcatcctctgg

SEQ ID NO: 4379658 - DNA, 25 bp, Homo sapien
ctcctcctcttttaggtactcatcc

SEQ ID NO: 4379659 - DNA, 25 bp, Homo sapien
tcctcctcttttaggtactcatcct

SEQ ID NO: 4379660 - DNA, 25 bp, Homo sapien
tcatagctgccctgacaaccttaca

SEQ ID NO: 4379661 - DNA, 25 bp, Homo sapien
tatgttccttttcatgatgctataa

SEQ ID NO: 4379662 - DNA, 25 bp, Homo sapien
tatgttccataccttctgagagtca

SEQ ID NO: 4379663 - DNA, 25 bp, Homo sapien
ctataaaaatcattgaggtatgttc

SEQ ID NO: 4379664 - DNA, 25 bp, Homo sapien
ttatggatctgggagattagggacc

SEQ ID NO: 4379665 - DNA, 25 bp, Homo sapien
gttgttgatcatgcgttcttttacc

SEQ ID NO: 4379666 - DNA, 25 bp, Homo sapien
gtggttgttgatcatgcgttctttt

SEQ ID NO: 4379667 - DNA, 25 bp, Homo sapien
gatctgggagattagggaccatgtc

SEQ ID NO: 4379668 - DNA, 25 bp, Homo sapien
caaaggggactccaattggtctcca

SEQ ID NO: 4379669 - DNA, 25 bp, Homo sapien
tccaaggactgactactttggctga

SEQ ID NO: 4379670 - DNA, 25 bp, Homo sapien
gagcaagtcatctctatccaagctg

SEQ ID NO: 4379671 - DNA, 25 bp, Homo sapien
agtcatctctatccaagctgcagcc

SEQ ID NO: 4379672 - DNA, 25 bp, Homo sapien
gtgtgatacaggaccagctgcatgt

SEQ ID NO: 4379673 - DNA, 25 bp, Homo sapien
tggagcgttgtgtgatacaggacca

SEQ ID NO: 4379674 - DNA, 25 bp, Homo sapien
catttctgtctttagcatagatgat

SEQ ID NO: 4379675 - DNA, 25 bp, Homo sapien
tctgtctttagcatagatgatagaa

SEQ ID NO: 4379676 - DNA, 25 bp, Homo sapien
tgtcacttgttttgcctgacttcgg

SEQ ID NO: 4379677 - DNA, 25 bp, Homo sapien
gacctctggtcccttgaattctttg

SEQ ID NO: 4379678 - DNA, 25 bp, Homo sapien
ggagcaccttcccaataggcattcc

SEQ ID NO: 4379679 - DNA, 25 bp, Homo sapien
cacaaggggcccagctttgattctc

SEQ ID NO: 4379680 - DNA, 25 bp, Homo sapien
caaggtggccggacattcatattat

SEQ ID NO: 4379681 - DNA, 25 bp, Homo sapien
tacagcatatctcaaggagccactt

SEQ ID NO: 4379682 - DNA, 25 bp, Homo sapien
acactgcaagggctttcaaggtggc

SEQ ID NO: 4379683 - DNA, 25 bp, Homo sapien
tcaataggcgcatgtggcttgtggc

SEQ ID NO: 4379684 - DNA, 25 bp, Homo sapien
caagctctttgtggggctggtcagc

SEQ ID NO: 4379685 - DNA, 25 bp, Homo sapien
accatcacagacgtctggctgcgca

SEQ ID NO: 4379686 - DNA, 25 bp, Homo sapien
acaagctctttgtggggctggtcag

SEQ ID NO: 4379687 - DNA, 25 bp, Homo sapien
tcacagacgtctggctgcgcaggat

SEQ ID NO: 4379688 - DNA, 25 bp, Homo sapien
gatggcaggcgtccgctggccggat

SEQ ID NO: 4379689 - DNA, 25 bp, Homo sapien
ttggctccagcgttcttgttgatga

SEQ ID NO: 4379690 - DNA, 25 bp, Homo sapien
atctccgcttcgtgaccaccaggac

SEQ ID NO: 4379691 - DNA, 25 bp, Homo sapien
tgatgatggtccgcacgtaggagat

SEQ ID NO: 4379692 - DNA, 25 bp, Homo sapien
tgcagtgaatcagccggttgtagcg

SEQ ID NO: 4379693 - DNA, 25 bp, Homo sapien
cagccggttgtagcgggaaggagtt

SEQ ID NO: 4379694 - DNA, 25 bp, Homo sapien
atcagccggttgtagcgggaaggag

SEQ ID NO: 4379695 - DNA, 25 bp, Homo sapien
cttgcagtgaatcagccggttgtag

SEQ ID NO: 4379696 - DNA, 25 bp, Homo sapien
ggagcagttccgcatgatcaccgat

SEQ ID NO: 4379697 - DNA, 25 bp, Homo sapien
atgatcaccgattgcagatgcgcag

SEQ ID NO: 4379698 - DNA, 25 bp, Homo sapien
tccgcatgatcaccgattgcagatg

SEQ ID NO: 4379699 - DNA, 25 bp, Homo sapien
agttccgcatgatcaccgattgcag

SEQ ID NO: 4379700 - DNA, 25 bp, Homo sapien
gcttgttcctatcccaacttcatca

SEQ ID NO: 4379701 - DNA, 25 bp, Homo sapien
agctcctctcacagcgaacgccgga

SEQ ID NO: 4379702 - DNA, 25 bp, Homo sapien
tctcacagcgaacgccggagacgga

SEQ ID NO: 4379703 - DNA, 25 bp, Homo sapien
gagacggaaggagctggatactctt

SEQ ID NO: 4379704 - DNA, 25 bp, Homo sapien
tcatctgaataaccacaaagggccc

SEQ ID NO: 4379705 - DNA, 25 bp, Homo sapien
ctactcccctaatatcttgttttct

SEQ ID NO: 4379706 - DNA, 25 bp, Homo sapien
ttctgcatctgaagacctcctgatc

SEQ ID NO: 4379707 - DNA, 25 bp, Homo sapien
tggctccctttctactcccctaata

SEQ ID NO: 4379708 - DNA, 25 bp, Homo sapien
gagatgggtagttccatcttgtttg

SEQ ID NO: 4379709 - DNA, 25 bp, Homo sapien
atgggtagttccatcttgtttggag

SEQ ID NO: 4379710 - DNA, 25 bp, Homo sapien
gatgggtagttccatcttgtttgga

SEQ ID NO: 4379711 - DNA, 25 bp, Homo sapien
tgagatgggtagttccatcttgttt

SEQ ID NO: 4379712 - DNA, 25 bp, Homo sapien
tcatctgtgcggcaaatgctccatg

SEQ ID NO: 4379713 - DNA, 25 bp, Homo sapien
ttgatcatctgtgcggcaaatgctc

SEQ ID NO: 4379714 - DNA, 25 bp, Homo sapien
tctgtgcggcaaatgctccatgtgc

SEQ ID NO: 4379715 - DNA, 25 bp, Homo sapien
ctcttgatcatctgtgcggcaaatg

SEQ ID NO: 4379716 - DNA, 25 bp, Homo sapien
gaggactctcctttggccgtctgta

SEQ ID NO: 4379717 - DNA, 25 bp, Homo sapien
tcatctcttgtctacgtcagaggtt

SEQ ID NO: 4379718 - DNA, 25 bp, Homo sapien
ggactctcctttggccgtctgtaac

SEQ ID NO: 4379719 - DNA, 25 bp, Homo sapien
tcttgtctacgtcagaggtttctga

SEQ ID NO: 4379720 - DNA, 25 bp, Homo sapien
gatctgacagcagcggcaaagtgcc

SEQ ID NO: 4379721 - DNA, 25 bp, Homo sapien
aaagtgcccacgctatagaatggct

SEQ ID NO: 4379722 - DNA, 25 bp, Homo sapien
ccacgctatagaatggcttccacat

SEQ ID NO: 4379723 - DNA, 25 bp, Homo sapien
gcagcggcaaagtgcccacgctata

SEQ ID NO: 4379724 - DNA, 25 bp, Homo sapien
acttaaggcaaagactggacatttt

SEQ ID NO: 4379725 - DNA, 25 bp, Homo sapien
cacacgtgtgcagtgcaccactatg

SEQ ID NO: 4379726 - DNA, 25 bp, Homo sapien
acacgtgtgcagtgcaccactatgc

SEQ ID NO: 4379727 - DNA, 25 bp, Homo sapien
gaccacacgtgtgcagtgcaccact

SEQ ID NO: 4379728 - DNA, 25 bp, Homo sapien
accacacgtgtgcagtgcaccacta

SEQ ID NO: 4379729 - DNA, 25 bp, Homo sapien
ccatgtagaggcagagactattacc

SEQ ID NO: 4379730 - DNA, 25 bp, Homo sapien
actctctttgttccccatgtagagg

SEQ ID NO: 4379731 - DNA, 25 bp, Homo sapien
cagagactattaccagtgacattcc

SEQ ID NO: 4379732 - DNA, 25 bp, Homo sapien
tgttccccatgtagaggcagagact

SEQ ID NO: 4379733 - DNA, 25 bp, Homo sapien
gagacatgggcctagcaggcagtct

SEQ ID NO: 4379734 - DNA, 25 bp, Homo sapien
gctttggcctcaggacaagtgatca

SEQ ID NO: 4379735 - DNA, 25 bp, Homo sapien
gcattccaaggagttgagtctaccc

SEQ ID NO: 4379736 - DNA, 25 bp, Homo sapien
tctcacagacattctagagctgccc

SEQ ID NO: 4379737 - DNA, 25 bp, Homo sapien
cttggagtggattggtccccatccc

SEQ ID NO: 4379738 - DNA, 25 bp, Homo sapien
tggattggtccccatcccttcaaca

SEQ ID NO: 4379739 - DNA, 25 bp, Homo sapien
tggagtggattggtccccatccctt

SEQ ID NO: 4379740 - DNA, 25 bp, Homo sapien
gagtggattggtccccatcccttca

SEQ ID NO: 4379741 - DNA, 25 bp, Homo sapien
gaccctgacaggctttaggaatgct

SEQ ID NO: 4379742 - DNA, 25 bp, Homo sapien
tattctagtatctgatccaggacac

SEQ ID NO: 4379743 - DNA, 25 bp, Homo sapien
taagagcccattattggtacgtaac

SEQ ID NO: 4379744 - DNA, 25 bp, Homo sapien
gaatgctgtccaggtatcctgtagg

SEQ ID NO: 4379745 - DNA, 25 bp, Homo sapien
tcagctgagaggttgggggacattg

SEQ ID NO: 4379746 - DNA, 25 bp, Homo sapien
agctgagaggttgggggacattgta

SEQ ID NO: 4379747 - DNA, 25 bp, Homo sapien
cagctgagaggttgggggacattgt

SEQ ID NO: 4379748 - DNA, 25 bp, Homo sapien
gctgagaggttgggggacattgtac

SEQ ID NO: 4379749 - DNA, 25 bp, Homo sapien
gaaacagcagtctccaaggccctgt

SEQ ID NO: 4379750 - DNA, 25 bp, Homo sapien
ggaaccattaaaggagcagatagac

SEQ ID NO: 4379751 - DNA, 25 bp, Homo sapien
cagatagacagtagagcatcactct

SEQ ID NO: 4379752 - DNA, 25 bp, Homo sapien
agatcagtcactcttattggacagg

SEQ ID NO: 4379753 - DNA, 25 bp, Homo sapien
ggaaatatcagagtagggaataccc

SEQ ID NO: 4379754 - DNA, 25 bp, Homo sapien
cagtgcaggtatgaaggagccagac

SEQ ID NO: 4379755 - DNA, 25 bp, Homo sapien
acagtgcaggtatgaaggagccaga

SEQ ID NO: 4379756 - DNA, 25 bp, Homo sapien
tacagtgcaggtatgaaggagccag

SEQ ID NO: 4379757 - DNA, 25 bp, Homo sapien
tcagatcaacaatggtagctttact

SEQ ID NO: 4379758 - DNA, 25 bp, Homo sapien
cacatttggcattcagtgtgctttg

SEQ ID NO: 4379759 - DNA, 25 bp, Homo sapien
gaattgcggtctttttgccataacc

SEQ ID NO: 4379760 - DNA, 25 bp, Homo sapien
tgctgctcctcacaacggacaagaa

SEQ ID NO: 4379761 - DNA, 25 bp, Homo sapien
agtagaaaatataggtgtagaagag

SEQ ID NO: 4379762 - DNA, 25 bp, Homo sapien
agtgaacacaggacatgagggttcg

SEQ ID NO: 4379763 - DNA, 25 bp, Homo sapien
aatataggtgtagaagagagacgag

SEQ ID NO: 4379764 - DNA, 25 bp, Homo sapien
catgagggttcggattgggaaatat

SEQ ID NO: 4379765 - DNA, 25 bp, Homo sapien
agtatcacagactggagtcagagaa

SEQ ID NO: 4379766 - DNA, 25 bp, Homo sapien
tagagtatcacagactggagtcaga

SEQ ID NO: 4379767 - DNA, 25 bp, Homo sapien
agagtatcacagactggagtcagag

SEQ ID NO: 4379768 - DNA, 25 bp, Homo sapien
gagtatcacagactggagtcagaga

SEQ ID NO: 4379769 - DNA, 25 bp, Homo sapien
aattggtggcagcacgagctttcag

SEQ ID NO: 4379770 - DNA, 25 bp, Homo sapien
tggtggcagcacgagctttcagcat

SEQ ID NO: 4379771 - DNA, 25 bp, Homo sapien
ttaaattggtggcagcacgagcttt

SEQ ID NO: 4379772 - DNA, 25 bp, Homo sapien
ttggtggcagcacgagctttcagca

SEQ ID NO: 4379773 - DNA, 25 bp, Homo sapien
aaaggaattcagttgacatggattt

SEQ ID NO: 4379774 - DNA, 25 bp, Homo sapien
gaggctaagtgcaacagctcgggct

SEQ ID NO: 4379775 - DNA, 25 bp, Homo sapien
taggcacctgatgatcaataagtcc

SEQ ID NO: 4379776 - DNA, 25 bp, Homo sapien
taagtcccaaattggcttcagtccc

SEQ ID NO: 4379777 - DNA, 25 bp, Homo sapien
gaacagccatctatccagggatgtt

SEQ ID NO: 4379778 - DNA, 25 bp, Homo sapien
cttgtggaccgaaagttgtttctgg

SEQ ID NO: 4379779 - DNA, 25 bp, Homo sapien
tgtcctgggacttgccaaacaaacc

SEQ ID NO: 4379780 - DNA, 25 bp, Homo sapien
gcagaagaagtgatcctaggggcct

SEQ ID NO: 4379781 - DNA, 25 bp, Homo sapien
ccactgtttcttgtggaccgaaagt

SEQ ID NO: 4379782 - DNA, 25 bp, Homo sapien
gacccacagaaagatgcactgacta

SEQ ID NO: 4379783 - DNA, 25 bp, Homo sapien
agaaagatgcactgactataaaata

SEQ ID NO: 4379784 - DNA, 25 bp, Homo sapien
cacagaaagatgcactgactataaa

SEQ ID NO: 4379785 - DNA, 25 bp, Homo sapien
tctggggacccacagaaagatgcac

SEQ ID NO: 4379786 - DNA, 25 bp, Homo sapien
gagttaaccaggaataaacacacat

SEQ ID NO: 4379787 - DNA, 25 bp, Homo sapien
tgttgagttaaccaggaataaacac

SEQ ID NO: 4379788 - DNA, 25 bp, Homo sapien
ggaggctcaattactggcagaatcc

SEQ ID NO: 4379789 - DNA, 25 bp, Homo sapien
ttgtggtggaggctcaattactggc

SEQ ID NO: 4379790 - DNA, 25 bp, Homo sapien
gagtgtcactacatgtctcttttta

SEQ ID NO: 4379791 - DNA, 25 bp, Homo sapien
gctgagtgtcactacatgtctcttt

SEQ ID NO: 4379792 - DNA, 25 bp, Homo sapien
ccctgctgagtgtcactacatgtct

SEQ ID NO: 4379793 - DNA, 25 bp, Homo sapien
cactacatgtctctttttatgcact

SEQ ID NO: 4379794 - DNA, 25 bp, Homo sapien
gtctgcagtgtttctatcatagaag

SEQ ID NO: 4379795 - DNA, 25 bp, Homo sapien
ctacagaaagttccatgaaggctca

SEQ ID NO: 4379796 - DNA, 25 bp, Homo sapien
tctatcatagaagcagcagttttcc

SEQ ID NO: 4379797 - DNA, 25 bp, Homo sapien
tacagaaagttccatgaaggctcag

SEQ ID NO: 4379798 - DNA, 25 bp, Homo sapien
catggtgacatataagtaataaact

SEQ ID NO: 4379799 - DNA, 25 bp, Homo sapien
gtgtgctccacatggtgacatataa

SEQ ID NO: 4379800 - DNA, 25 bp, Homo sapien
aagtaataaactcccacagctgaga

SEQ ID NO: 4379801 - DNA, 25 bp, Homo sapien
gctccacatggtgacatataagtaa

SEQ ID NO: 4379802 - DNA, 25 bp, Homo sapien
ggccccagacagacatcacataaac

SEQ ID NO: 4379803 - DNA, 25 bp, Homo sapien
cttggccccagacagacatcacata

SEQ ID NO: 4379804 - DNA, 25 bp, Homo sapien
cagacagacatcacataaacacctg

SEQ ID NO: 4379805 - DNA, 25 bp, Homo sapien
gacagacatcacataaacacctgag

SEQ ID NO: 4379806 - DNA, 25 bp, Homo sapien
tgccgttcagtgtcttcttcactgt

SEQ ID NO: 4379807 - DNA, 25 bp, Homo sapien
cctgccgttcagtgtcttcttcact

SEQ ID NO: 4379808 - DNA, 25 bp, Homo sapien
tcctgccgttcagtgtcttcttcac

SEQ ID NO: 4379809 - DNA, 25 bp, Homo sapien
gccgttcagtgtcttcttcactgtt

SEQ ID NO: 4379810 - DNA, 25 bp, Homo sapien
ctagtcaagtatggttgtgggagga

SEQ ID NO: 4379811 - DNA, 25 bp, Homo sapien
aaactagtcaagtatggttgtggga

SEQ ID NO: 4379812 - DNA, 25 bp, Homo sapien
aaaactagtcaagtatggttgtggg

SEQ ID NO: 4379813 - DNA, 25 bp, Homo sapien
aactagtcaagtatggttgtgggag

SEQ ID NO: 4379814 - DNA, 25 bp, Homo sapien
tcatctaagtacctgaagtagtggc

SEQ ID NO: 4379815 - DNA, 25 bp, Homo sapien
gcagcggtgcacagtagtaggtacc

SEQ ID NO: 4379816 - DNA, 25 bp, Homo sapien
cagagccaagttaggaagttcagtc

SEQ ID NO: 4379817 - DNA, 25 bp, Homo sapien
cactgaggtattgcacgatgatggg

SEQ ID NO: 4379818 - DNA, 25 bp, Homo sapien
taacattggtttacagcaggcctca

SEQ ID NO: 4379819 - DNA, 25 bp, Homo sapien
tctacagtaagatttcctggccggg

SEQ ID NO: 4379820 - DNA, 25 bp, Homo sapien
tcaatagacaaccaacacgccggtg

SEQ ID NO: 4379821 - DNA, 25 bp, Homo sapien
tattcgggagaaagggtccatccac

SEQ ID NO: 4379822 - DNA, 25 bp, Homo sapien
ttattcactgataaactaaaagcca

SEQ ID NO: 4379823 - DNA, 25 bp, Homo sapien
tattcactgataaactaaaagccaa

SEQ ID NO: 4379824 - DNA, 25 bp, Homo sapien
attcactgataaactaaaagccaat

SEQ ID NO: 4379825 - DNA, 25 bp, Homo sapien
ttattaataagcaaagccctgtaag

SEQ ID NO: 4379826 - DNA, 25 bp, Homo sapien
taagcaaagccctgtaaggggagcc

SEQ ID NO: 4379827 - DNA, 25 bp, Homo sapien
caaagccctgtaaggggagcctttg

SEQ ID NO: 4379828 - DNA, 25 bp, Homo sapien
attaataagcaaagccctgtaaggg

SEQ ID NO: 4379829 - DNA, 25 bp, Homo sapien
ttcgtaggtctccttgtcagatgca

SEQ ID NO: 4379830 - DNA, 25 bp, Homo sapien
aatctggaagtaacgaagttcgtag

SEQ ID NO: 4379831 - DNA, 25 bp, Homo sapien
aagccaatcacgaagattgttcttc

SEQ ID NO: 4379832 - DNA, 25 bp, Homo sapien
actcgaagccaatcacgaagattgt

SEQ ID NO: 4379833 - DNA, 25 bp, Homo sapien
taagaaatacaattcctactatgta

SEQ ID NO: 4379834 - DNA, 25 bp, Homo sapien
aatacaattcctactatgtaaaggt

SEQ ID NO: 4379835 - DNA, 25 bp, Homo sapien
catcttttctgtacctagcttcctc

SEQ ID NO: 4379836 - DNA, 25 bp, Homo sapien
tcatcttttctgtacctagcttcct

SEQ ID NO: 4379837 - DNA, 25 bp, Homo sapien
aacattcccgagatttccagttttg

SEQ ID NO: 4379838 - DNA, 25 bp, Homo sapien
caacattcccgagatttccagtttt

SEQ ID NO: 4379839 - DNA, 25 bp, Homo sapien
agggaagagaaccctagatattcac

SEQ ID NO: 4379840 - DNA, 25 bp, Homo sapien
ggaagagaaccctagatattcacta

SEQ ID NO: 4379841 - DNA, 25 bp, Homo sapien
gggaagagaaccctagatattcact

SEQ ID NO: 4379842 - DNA, 25 bp, Homo sapien
agagaaccctagatattcactaggg

SEQ ID NO: 4379843 - DNA, 25 bp, Homo sapien
cttctactggatgagtaaggtccaa

SEQ ID NO: 4379844 - DNA, 25 bp, Homo sapien
attaaacctccaggttgacctcttg

SEQ ID NO: 4379845 - DNA, 25 bp, Homo sapien
caaaaattccatcttctactggatg

SEQ ID NO: 4379846 - DNA, 25 bp, Homo sapien
aacctccaggttgacctcttgggct

SEQ ID NO: 4379847 - DNA, 25 bp, Homo sapien
cagctgccagggagtctcgaaaaac

SEQ ID NO: 4379848 - DNA, 25 bp, Homo sapien
cagttcaggatcctcgcgtcttggt

SEQ ID NO: 4379849 - DNA, 25 bp, Homo sapien
cagggagtctcgaaaaacagttcag

SEQ ID NO: 4379850 - DNA, 25 bp, Homo sapien
aacagttcaggatcctcgcgtcttg

SEQ ID NO: 4379851 - DNA, 25 bp, Homo sapien
tgcagtggcctctacagttacctag

SEQ ID NO: 4379852 - DNA, 25 bp, Homo sapien
catttatatcaaagcgtgctgcgtc

SEQ ID NO: 4379853 - DNA, 25 bp, Homo sapien
gagagtaggccatcggctttccgcg

SEQ ID NO: 4379854 - DNA, 25 bp, Homo sapien
cggccgcgcggtctgcatttatatc

SEQ ID NO: 4379855 - DNA, 25 bp, Homo sapien
gtatgtgtgcagaacatcatatgtt

SEQ ID NO: 4379856 - DNA, 25 bp, Homo sapien
tagctaatgttaggtgtaccatgtt

SEQ ID NO: 4379857 - DNA, 25 bp, Homo sapien
catccatccgcttcggattacaggc

SEQ ID NO: 4379858 - DNA, 25 bp, Homo sapien
caaataagtattcatacatctctgt

SEQ ID NO: 4379859 - DNA, 25 bp, Homo sapien
ggctttcttgggcactagactacaa

SEQ ID NO: 4379860 - DNA, 25 bp, Homo sapien
cccagtggagtgcataagttaaaca

SEQ ID NO: 4379861 - DNA, 25 bp, Homo sapien
cagtgacagccccattaagtgaaac

SEQ ID NO: 4379862 - DNA, 25 bp, Homo sapien
gggaagtgtccccaggtgtagccaa

SEQ ID NO: 4379863 - DNA, 25 bp, Homo sapien
ggcttcaagccatgttcccatagaa

SEQ ID NO: 4379864 - DNA, 25 bp, Homo sapien
ggtgaaagcctggtatgcattgcca

SEQ ID NO: 4379865 - DNA, 25 bp, Homo sapien
ggtgaacctctacatcaatgcctgg

SEQ ID NO: 4379866 - DNA, 25 bp, Homo sapien
tgatgccatatacccaattcagaga

SEQ ID NO: 4379867 - DNA, 25 bp, Homo sapien
taacataaagcgctggtacagagac

SEQ ID NO: 4379868 - DNA, 25 bp, Homo sapien
tactgaatcataacaccagcatggt

SEQ ID NO: 4379869 - DNA, 25 bp, Homo sapien
cccaaattggtttgccgaggctaag

SEQ ID NO: 4379870 - DNA, 25 bp, Homo sapien
ttcaagtgactgagcccctggaagg

SEQ ID NO: 4379871 - DNA, 25 bp, Homo sapien
tatggctacagcatattcttcactc

SEQ ID NO: 4379872 - DNA, 25 bp, Homo sapien
ttcactcattgcacacatgacagac

SEQ ID NO: 4379873 - DNA, 25 bp, Homo sapien
ttatttgcagggttttatggctaca

SEQ ID NO: 4379874 - DNA, 25 bp, Homo sapien
gcatattcttcactcattgcacaca

SEQ ID NO: 4379875 - DNA, 25 bp, Homo sapien
taagatcctcacgaacttcaccagt

SEQ ID NO: 4379876 - DNA, 25 bp, Homo sapien
atcctcacgaacttcaccagtttct

SEQ ID NO: 4379877 - DNA, 25 bp, Homo sapien
aagatcctcacgaacttcaccagtt

SEQ ID NO: 4379878 - DNA, 25 bp, Homo sapien
tcaccagtttctgtcagcagggaaa

SEQ ID NO: 4379879 - DNA, 25 bp, Homo sapien
tgttgaggcagtattcacatatctg

SEQ ID NO: 4379880 - DNA, 25 bp, Homo sapien
tctgaactgaatctgattaagactc

SEQ ID NO: 4379881 - DNA, 25 bp, Homo sapien
gctacacgcacagacactggtactg

SEQ ID NO: 4379882 - DNA, 25 bp, Homo sapien
tatggagtagtcctgctaaaggaaa

SEQ ID NO: 4379883 - DNA, 25 bp, Homo sapien
gaagactcaaatatggcacctgctg

SEQ ID NO: 4379884 - DNA, 25 bp, Homo sapien
gcttctagtcctcgcaacattgggc

SEQ ID NO: 4379885 - DNA, 25 bp, Homo sapien
taacaaggcagtgcaacacccagat

SEQ ID NO: 4379886 - DNA, 25 bp, Homo sapien
gcctctgtggatcagcctagtgaag

SEQ ID NO: 4379887 - DNA, 25 bp, Homo sapien
agtgacagaactagatccaaaccca

SEQ ID NO: 4379888 - DNA, 25 bp, Homo sapien
gacaacattctacgctcaactttag

SEQ ID NO: 4379889 - DNA, 25 bp, Homo sapien
tcattgcgtaagtgcagttgatagc

SEQ ID NO: 4379890 - DNA, 25 bp, Homo sapien
acagcactttttggtacgtatctac

SEQ ID NO: 4379891 - DNA, 25 bp, Homo sapien
tattttttgcccgtgaaaatatcaa

SEQ ID NO: 4379892 - DNA, 25 bp, Homo sapien
tgttgtgagtagaaggacaaatatc

SEQ ID NO: 4379893 - DNA, 25 bp, Homo sapien
gtgaaaatatcaattccaacaaggt

SEQ ID NO: 4379894 - DNA, 25 bp, Homo sapien
tatttggaacatccatgttgtgagt

SEQ ID NO: 4379895 - DNA, 25 bp, Homo sapien
gcatggtcgtcctttgagcaccacg

SEQ ID NO: 4379896 - DNA, 25 bp, Homo sapien
tgcgcaaggccgagcactgcatagg

SEQ ID NO: 4379897 - DNA, 25 bp, Homo sapien
gtagtgaaatcaatttcgtctgcca

SEQ ID NO: 4379898 - DNA, 25 bp, Homo sapien
gagcaccacgaagccgtttttgcgc

SEQ ID NO: 4379899 - DNA, 25 bp, Homo sapien
caggggagatggtagtttttccgtg

SEQ ID NO: 4379900 - DNA, 25 bp, Homo sapien
tgggcaggggagatggtagtttttc

SEQ ID NO: 4379901 - DNA, 25 bp, Homo sapien
ttaacaacgggtatgtaggcaggga

SEQ ID NO: 4379902 - DNA, 25 bp, Homo sapien
taacaacgggtatgtaggcagggaa

SEQ ID NO: 4379903 - DNA, 25 bp, Homo sapien
tcccctacagcagcggcgccggcag

SEQ ID NO: 4379904 - DNA, 25 bp, Homo sapien
ttcagctggcaaagagcgcctttcg

SEQ ID NO: 4379905 - DNA, 25 bp, Homo sapien
ggccgcggcagttccaagagacggg

SEQ ID NO: 4379906 - DNA, 25 bp, Homo sapien
aaagagcgcctttcgtctgcgcacc

SEQ ID NO: 4379907 - DNA, 25 bp, Homo sapien
taaagcctttgggattgacgcgaaa

SEQ ID NO: 4379908 - DNA, 25 bp, Homo sapien
ccagagtctgctgccgctaaagcct

SEQ ID NO: 4379909 - DNA, 25 bp, Homo sapien
gatctcagtagtactaagaagaacc

SEQ ID NO: 4379910 - DNA, 25 bp, Homo sapien
tcagtagtactaagaagaaccaaaa

SEQ ID NO: 4379911 - DNA, 25 bp, Homo sapien
catcgcttcatgcaaaactccacta

SEQ ID NO: 4379912 - DNA, 25 bp, Homo sapien
tatgtttcttcatagggagggcaag

SEQ ID NO: 4379913 - DNA, 25 bp, Homo sapien
ttcttcatagggagggcaagatggt

SEQ ID NO: 4379914 - DNA, 25 bp, Homo sapien
ccactagcatccctcccatgagtac

SEQ ID NO: 4379915 - DNA, 25 bp, Homo sapien
gagtctcctgatgggcctttaaggg

SEQ ID NO: 4379916 - DNA, 25 bp, Homo sapien
gtgtgagtctcctgatgggccttta

SEQ ID NO: 4379917 - DNA, 25 bp, Homo sapien
gtgagtctcctgatgggcctttaag

SEQ ID NO: 4379918 - DNA, 25 bp, Homo sapien
cctgatgggcctttaagggggagct

SEQ ID NO: 4379919 - DNA, 25 bp, Homo sapien
agctgctgaagctgttgtgacccct

SEQ ID NO: 4379920 - DNA, 25 bp, Homo sapien
tgctgaagctgttgtgacccctccc

SEQ ID NO: 4379921 - DNA, 25 bp, Homo sapien
gctgctgaagctgttgtgacccctc

SEQ ID NO: 4379922 - DNA, 25 bp, Homo sapien
ctgaagctgttgtgacccctcccac

SEQ ID NO: 4379923 - DNA, 25 bp, Homo sapien
tgaggtcattgtgttgagctggacc

SEQ ID NO: 4379924 - DNA, 25 bp, Homo sapien
ttgtgttgagctggacctggttgac

SEQ ID NO: 4379925 - DNA, 25 bp, Homo sapien
gtcattgtgttgagctggacctggt

SEQ ID NO: 4379926 - DNA, 25 bp, Homo sapien
cattaatgaggtcattgtgttgagc

SEQ ID NO: 4379927 - DNA, 25 bp, Homo sapien
gctgaggcaggtctcagatagcaac

SEQ ID NO: 4379928 - DNA, 25 bp, Homo sapien
gagagagcaagactgctgagctctt

SEQ ID NO: 4379929 - DNA, 25 bp, Homo sapien
gagagcaagactgctgagctcttct

SEQ ID NO: 4379930 - DNA, 25 bp, Homo sapien
agagagcaagactgctgagctcttc

SEQ ID NO: 4379931 - DNA, 25 bp, Homo sapien
tcaatgcaccggggaggagaagggt

SEQ ID NO: 4379932 - DNA, 25 bp, Homo sapien
aaaggtctccgagatccttctgggc

SEQ ID NO: 4379933 - DNA, 25 bp, Homo sapien
aggtctccgagatccttctgggctc

SEQ ID NO: 4379934 - DNA, 25 bp, Homo sapien
ccaaaggtctccgagatccttctgg

SEQ ID NO: 4379935 - DNA, 25 bp, Homo sapien
ggatatcctggaagtaaggcttctg

SEQ ID NO: 4379936 - DNA, 25 bp, Homo sapien
tatcttccaggatatcctggaagta

SEQ ID NO: 4379937 - DNA, 25 bp, Homo sapien
caggatatcctggaagtaaggcttc

SEQ ID NO: 4379938 - DNA, 25 bp, Homo sapien
ttccaggatatcctggaagtaaggc

SEQ ID NO: 4379939 - DNA, 25 bp, Homo sapien
gagaagtagccggtgtcgtggacaa

SEQ ID NO: 4379940 - DNA, 25 bp, Homo sapien
agctgagaagtagccggtgtcgtgg

SEQ ID NO: 4379941 - DNA, 25 bp, Homo sapien
tagccggtgtcgtggacaagttgta

SEQ ID NO: 4379942 - DNA, 25 bp, Homo sapien
cggtgtcgtggacaagttgtagctc

SEQ ID NO: 4379943 - DNA, 25 bp, Homo sapien
ctggaatatactacaactagccaac

SEQ ID NO: 4379944 - DNA, 25 bp, Homo sapien
ttagtgtctggctgacccccaaaga

SEQ ID NO: 4379945 - DNA, 25 bp, Homo sapien
gttagtgtctggctgacccccaaag

SEQ ID NO: 4379946 - DNA, 25 bp, Homo sapien
ttgttagtgtctggctgacccccaa

SEQ ID NO: 4379947 - DNA, 25 bp, Homo sapien
agtgtctggctgacccccaaagaag

SEQ ID NO: 4379948 - DNA, 25 bp, Homo sapien
caggcgccactagggtatggaaaaa

SEQ ID NO: 4379949 - DNA, 25 bp, Homo sapien
ggatatcctgggtcgatctcagact

SEQ ID NO: 4379950 - DNA, 25 bp, Homo sapien
tcccgttgagccagaccagttggct

SEQ ID NO: 4379951 - DNA, 25 bp, Homo sapien
agtggacgcttctgtctccttggca

SEQ ID NO: 4379952 - DNA, 25 bp, Homo sapien
gcagagctcagacctatcctcaaca

SEQ ID NO: 4379953 - DNA, 25 bp, Homo sapien
gagctcagacctatcctcaacatca

SEQ ID NO: 4379954 - DNA, 25 bp, Homo sapien
gggagcccttcctaaggcagagctc

SEQ ID NO: 4379955 - DNA, 25 bp, Homo sapien
agctcagacctatcctcaacatcat

SEQ ID NO: 4379956 - DNA, 25 bp, Homo sapien
cccctgaaagttggcttgtgccaca

SEQ ID NO: 4379957 - DNA, 25 bp, Homo sapien
gttctctatcagtgccccttgaggg

SEQ ID NO: 4379958 - DNA, 25 bp, Homo sapien
caacacactcttggagtgttctcta

SEQ ID NO: 4379959 - DNA, 25 bp, Homo sapien
agggatggtgtttgagctcccctga

SEQ ID NO: 4379960 - DNA, 25 bp, Homo sapien
tcagggttacacaatatcctaagat

SEQ ID NO: 4379961 - DNA, 25 bp, Homo sapien
gggttacacaatatcctaagatcat

SEQ ID NO: 4379962 - DNA, 25 bp, Homo sapien
ttcagggttacacaatatcctaaga

SEQ ID NO: 4379963 - DNA, 25 bp, Homo sapien
cagggttacacaatatcctaagatc

SEQ ID NO: 4379964 - DNA, 25 bp, Homo sapien
tgttatttaatggctacaacatcaa

SEQ ID NO: 4379965 - DNA, 25 bp, Homo sapien
gtgttatttaatggctacaacatca

SEQ ID NO: 4379966 - DNA, 25 bp, Homo sapien
cagtgttatttaatggctacaacat

SEQ ID NO: 4379967 - DNA, 25 bp, Homo sapien
agtgttatttaatggctacaacatc

SEQ ID NO: 4379968 - DNA, 25 bp, Homo sapien
tctctaccatgtgagtacactggga

SEQ ID NO: 4379969 - DNA, 25 bp, Homo sapien
tgtatctggaggtagggcctataag

SEQ ID NO: 4379970 - DNA, 25 bp, Homo sapien
gaattgaatatttgtgtctccccaa

SEQ ID NO: 4379971 - DNA, 25 bp, Homo sapien
gggctcatcagtaccgctgatgctt

SEQ ID NO: 4379972 - DNA, 25 bp, Homo sapien
ccttcctaatatagctacctgtgat

SEQ ID NO: 4379973 - DNA, 25 bp, Homo sapien
ttctgcctccttcctaatatagcta

SEQ ID NO: 4379974 - DNA, 25 bp, Homo sapien
gcctccttcctaatatagctacctg

SEQ ID NO: 4379975 - DNA, 25 bp, Homo sapien
cctaatatagctacctgtgattttt

SEQ ID NO: 4379976 - DNA, 25 bp, Homo sapien
tgttcgtggacaaaagtgtttgctt

SEQ ID NO: 4379977 - DNA, 25 bp, Homo sapien
gaaatgttatcccttgttcgtggac

SEQ ID NO: 4379978 - DNA, 25 bp, Homo sapien
tatcccttgttcgtggacaaaagtg

SEQ ID NO: 4379979 - DNA, 25 bp, Homo sapien
ttggaaatgttatcccttgttcgtg

SEQ ID NO: 4379980 - DNA, 25 bp, Homo sapien
tcacacttggaacaagtgttttaag

SEQ ID NO: 4379981 - DNA, 25 bp, Homo sapien
tatcaagatttgtagagagattaaa

SEQ ID NO: 4379982 - DNA, 25 bp, Homo sapien
tggattgtgccttctctcatggaga

SEQ ID NO: 4379983 - DNA, 25 bp, Homo sapien
gagagattaaaagatggctgactag

SEQ ID NO: 4379984 - DNA, 25 bp, Homo sapien
tgcccaagataggcctcatcaccat

SEQ ID NO: 4379985 - DNA, 25 bp, Homo sapien
atgcccaagataggcctcatcacca

SEQ ID NO: 4379986 - DNA, 25 bp, Homo sapien
ttttctatgtaaatgaagcaacact

SEQ ID NO: 4379987 - DNA, 25 bp, Homo sapien
ggaaagtactgtgagaaggaaatga

SEQ ID NO: 4379988 - DNA, 25 bp, Homo sapien
aaccaatatcagtttttaaagtgtg

SEQ ID NO: 4379989 - DNA, 25 bp, Homo sapien
tataataaaccaatatcagttttta

SEQ ID NO: 4379990 - DNA, 25 bp, Homo sapien
tattgacatcaaactattgtatata

SEQ ID NO: 4379991 - DNA, 25 bp, Homo sapien
ttattgacatcaaactattgtatat

SEQ ID NO: 4379992 - DNA, 25 bp, Homo sapien
ttgacatcaaactattgtatatata

SEQ ID NO: 4379993 - DNA, 25 bp, Homo sapien
tttattgacatcaaactattgtata

SEQ ID NO: 4379994 - DNA, 25 bp, Homo sapien
ggaccctgtaagcacaagatattgc

SEQ ID NO: 4379995 - DNA, 25 bp, Homo sapien
ggcctacatgtatatacccctttcg

SEQ ID NO: 4379996 - DNA, 25 bp, Homo sapien
cagcagatggatcagagtggttgtc

SEQ ID NO: 4379997 - DNA, 25 bp, Homo sapien
acttgactcatcacctctgcttagg

SEQ ID NO: 4379998 - DNA, 25 bp, Homo sapien
tacaaactgtgcagttgggtttccc

SEQ ID NO: 4379999 - DNA, 25 bp, Homo sapien
aaactgtgcagttgggtttcccaca

SEQ ID NO: 4380000 - DNA, 25 bp, Homo sapien
ccactactacaaactgtgcagttgg

SEQ ID NO: 4380001 - DNA, 25 bp, Homo sapien
catgaacacagtcacccactactac

SEQ ID NO: 4380002 - DNA, 25 bp, Homo sapien
taccaggcactatgcttagcacttc

SEQ ID NO: 4380003 - DNA, 25 bp, Homo sapien
gattcttaccattccctcgttgtga

SEQ ID NO: 4380004 - DNA, 25 bp, Homo sapien
cagtgctgaccatgtagaggaaagt

SEQ ID NO: 4380005 - DNA, 25 bp, Homo sapien
ggagcaatgccttactatatcttag

SEQ ID NO: 4380006 - DNA, 25 bp, Homo sapien
tattatagtaagctagttctttggt

SEQ ID NO: 4380007 - DNA, 25 bp, Homo sapien
gtttgtgggccagtcaaaatagtga

SEQ ID NO: 4380008 - DNA, 25 bp, Homo sapien
tgtagaaggggaacaatataaggta

SEQ ID NO: 4380009 - DNA, 25 bp, Homo sapien
gtttcttgtcaactcacatgtatct

SEQ ID NO: 4380010 - DNA, 25 bp, Homo sapien
cactttattctgttagtaaatgaga

SEQ ID NO: 4380011 - DNA, 25 bp, Homo sapien
tgaaaatagtttatcccaaattggc

SEQ ID NO: 4380012 - DNA, 25 bp, Homo sapien
tcagcatcctgaagaagcatacaag

SEQ ID NO: 4380013 - DNA, 25 bp, Homo sapien
cagtttagcacaaagatgtcctgag

SEQ ID NO: 4380014 - DNA, 25 bp, Homo sapien
gaaaacagcctagagatacgttagc

SEQ ID NO: 4380015 - DNA, 25 bp, Homo sapien
tagcaccctgctaagcttttgggac

SEQ ID NO: 4380016 - DNA, 25 bp, Homo sapien
gataacccacgctatatgatcaggt

SEQ ID NO: 4380017 - DNA, 25 bp, Homo sapien
tcaaaggattgtaccagaagggaat

SEQ ID NO: 4380018 - DNA, 25 bp, Homo sapien
ttctacagcagcttttggcctgtgg

SEQ ID NO: 4380019 - DNA, 25 bp, Homo sapien
cagtctctgtagctcctaggaattt

SEQ ID NO: 4380020 - DNA, 25 bp, Homo sapien
aaaatgtgaacagggtaaaggccag

SEQ ID NO: 4380021 - DNA, 25 bp, Homo sapien
gcagcaatttcctcaaaagactttc

SEQ ID NO: 4380022 - DNA, 25 bp, Homo sapien
aatctgtggaatattaggctgctta

SEQ ID NO: 4380023 - DNA, 25 bp, Homo sapien
ttttgaccctctcttctgttcagta

SEQ ID NO: 4380024 - DNA, 25 bp, Homo sapien
gttttttgaccctctcttctgttca

SEQ ID NO: 4380025 - DNA, 25 bp, Homo sapien
cctctcttctgttcagtaaatctgt

SEQ ID NO: 4380026 - DNA, 25 bp, Homo sapien
gcagcaggacgtggtccttgactga

SEQ ID NO: 4380027 - DNA, 25 bp, Homo sapien
gatggctatcatgctcacataactc

SEQ ID NO: 4380028 - DNA, 25 bp, Homo sapien
gcaggtccaattgctgaatgcagct

SEQ ID NO: 4380029 - DNA, 25 bp, Homo sapien
aaaactcagccaccatgaaccaggg

SEQ ID NO: 4380030 - DNA, 25 bp, Homo sapien
aagagagaacgtcgccctgccttct

SEQ ID NO: 4380031 - DNA, 25 bp, Homo sapien
tagaaagagagaacgtcgccctgcc

SEQ ID NO: 4380032 - DNA, 25 bp, Homo sapien
agatggcacaaacaaacatcccact

SEQ ID NO: 4380033 - DNA, 25 bp, Homo sapien
caaacatcccactcattccaattag

SEQ ID NO: 4380034 - DNA, 25 bp, Homo sapien
agttcatgtgcagagaataaaaaac

SEQ ID NO: 4380035 - DNA, 25 bp, Homo sapien
gttcatgtgcagagaataaaaaaca

SEQ ID NO: 4380036 - DNA, 25 bp, Homo sapien
gagttcatgtgcagagaataaaaaa

SEQ ID NO: 4380037 - DNA, 25 bp, Homo sapien
cttgttgtcaggttcttatatatcc

SEQ ID NO: 4380038 - DNA, 25 bp, Homo sapien
ctcaatgactctcattctacagtga

SEQ ID NO: 4380039 - DNA, 25 bp, Homo sapien
ttggttttaagaagagtatatgact

SEQ ID NO: 4380040 - DNA, 25 bp, Homo sapien
tctcattctacagtgaattacatta

SEQ ID NO: 4380041 - DNA, 25 bp, Homo sapien
tgataccagccgtctgaaaaatgct

SEQ ID NO: 4380042 - DNA, 25 bp, Homo sapien
caactccaatggttgcataaacagg

SEQ ID NO: 4380043 - DNA, 25 bp, Homo sapien
cagtgaaaaccatgtttacagcgcc

SEQ ID NO: 4380044 - DNA, 25 bp, Homo sapien
gcataaacaggtttgctgataccag

SEQ ID NO: 4380045 - DNA, 25 bp, Homo sapien
ttcagtgtaagacctaaaagctagc

SEQ ID NO: 4380046 - DNA, 25 bp, Homo sapien
gaacccttgactccatttggcttgg

SEQ ID NO: 4380047 - DNA, 25 bp, Homo sapien
tggcttgggctatcagaaatcctaa

SEQ ID NO: 4380048 - DNA, 25 bp, Homo sapien
tactcaactgtagaagctccttgca

SEQ ID NO: 4380049 - DNA, 25 bp, Homo sapien
gattccggaaaattgctgagccaca

SEQ ID NO: 4380050 - DNA, 25 bp, Homo sapien
cacatgcagcatcagtgccactaga

SEQ ID NO: 4380051 - DNA, 25 bp, Homo sapien
cactagaataggctgtcggtagctg

SEQ ID NO: 4380052 - DNA, 25 bp, Homo sapien
ggtgacatcatcatatcctctgagt

SEQ ID NO: 4380053 - DNA, 25 bp, Homo sapien
gctttgacttcctcatctaacttga

SEQ ID NO: 4380054 - DNA, 25 bp, Homo sapien
cataattgcccaagataaattcaag

SEQ ID NO: 4380055 - DNA, 25 bp, Homo sapien
caagcaggatgtgccacagatcata

SEQ ID NO: 4380056 - DNA, 25 bp, Homo sapien
agagactgaaggatggctcgcacac

SEQ ID NO: 4380057 - DNA, 25 bp, Homo sapien
tgagagcggttggagcaatttcacc

SEQ ID NO: 4380058 - DNA, 25 bp, Homo sapien
acgatggccagctgatgaaaagtgc

SEQ ID NO: 4380059 - DNA, 25 bp, Homo sapien
gatgaaaagtgccaagtgctcccct

SEQ ID NO: 4380060 - DNA, 25 bp, Homo sapien
ctgactaataagaatgcccgtgacg

SEQ ID NO: 4380061 - DNA, 25 bp, Homo sapien
tatatcttgaatgaaagcccctccc

SEQ ID NO: 4380062 - DNA, 25 bp, Homo sapien
tatagacatagtttgtgcaggagat

SEQ ID NO: 4380063 - DNA, 25 bp, Homo sapien
gcaggagatatttgatatgacctca

SEQ ID NO: 4380064 - DNA, 25 bp, Homo sapien
aaatgttaaagtgcaaccaggacta

SEQ ID NO: 4380065 - DNA, 25 bp, Homo sapien
tatatgagatggtcccaattttgaa

SEQ ID NO: 4380066 - DNA, 25 bp, Homo sapien
gacagaatgtttgctactaacatgg

SEQ ID NO: 4380067 - DNA, 25 bp, Homo sapien
gagagctccaactaatgacagaatg

SEQ ID NO: 4380068 - DNA, 25 bp, Homo sapien
tagtcctgatatgcttcttccagca

SEQ ID NO: 4380069 - DNA, 25 bp, Homo sapien
ggtgaggacaagcttaagataacac

SEQ ID NO: 4380070 - DNA, 25 bp, Homo sapien
caggctcaagcctaatctctacatt

SEQ ID NO: 4380071 - DNA, 25 bp, Homo sapien
gaataattgtctggtgatagctaaa

SEQ ID NO: 4380072 - DNA, 25 bp, Homo sapien
caatggcacaggtttttaatctaga

SEQ ID NO: 4380073 - DNA, 25 bp, Homo sapien
gccaataaatgcctgagtagacagg

SEQ ID NO: 4380074 - DNA, 25 bp, Homo sapien
tgggccttttccatgcaagtatctt

SEQ ID NO: 4380075 - DNA, 25 bp, Homo sapien
cagtcaagcagataatggtaaggcc

SEQ ID NO: 4380076 - DNA, 25 bp, Homo sapien
tctaattaatgggaaagcgaggtac

SEQ ID NO: 4380077 - DNA, 25 bp, Homo sapien
tccaagtgtgtccccaagccaccca

SEQ ID NO: 4380078 - DNA, 25 bp, Homo sapien
ccaagtgtgtccccaagccacccac

SEQ ID NO: 4380079 - DNA, 25 bp, Homo sapien
ttccaagtgtgtccccaagccaccc

SEQ ID NO: 4380080 - DNA, 25 bp, Homo sapien
cttccaagtgtgtccccaagccacc

SEQ ID NO: 4380081 - DNA, 25 bp, Homo sapien
ttttcggtcatccagtggaacaccc

SEQ ID NO: 4380082 - DNA, 25 bp, Homo sapien
ccagagcatggtgattagttgagca

SEQ ID NO: 4380083 - DNA, 25 bp, Homo sapien
tcattgagtatgagattgtgggcag

SEQ ID NO: 4380084 - DNA, 25 bp, Homo sapien
caactgcaaagctggatacagacag

SEQ ID NO: 4380085 - DNA, 25 bp, Homo sapien
cagtatggggatcgctgttttcagc

SEQ ID NO: 4380086 - DNA, 25 bp, Homo sapien
tatggggatcgctgttttcagctct

SEQ ID NO: 4380087 - DNA, 25 bp, Homo sapien
tggacgccagtatggggatcgctgt

SEQ ID NO: 4380088 - DNA, 25 bp, Homo sapien
cgccagtatggggatcgctgttttc

SEQ ID NO: 4380089 - DNA, 25 bp, Homo sapien
gttttctgtgagctcagcaaacagc

SEQ ID NO: 4380090 - DNA, 25 bp, Homo sapien
cagctttggaacagtgcacatcgta

SEQ ID NO: 4380091 - DNA, 25 bp, Homo sapien
tgttaattagggagtcaaggccaag

SEQ ID NO: 4380092 - DNA, 25 bp, Homo sapien
gatattctgcctggagttttctgtg

SEQ ID NO: 4380093 - DNA, 25 bp, Homo sapien
ccaggatggccttgtgtctcccacg

SEQ ID NO: 4380094 - DNA, 25 bp, Homo sapien
aggatggccttgtgtctcccacgtg

SEQ ID NO: 4380095 - DNA, 25 bp, Homo sapien
caggatggccttgtgtctcccacgt

SEQ ID NO: 4380096 - DNA, 25 bp, Homo sapien
atatgatatctatcactgacagaac

SEQ ID NO: 4380097 - DNA, 25 bp, Homo sapien
ctgtgtatgaggaacatatgatatc

SEQ ID NO: 4380098 - DNA, 25 bp, Homo sapien
gtgtatgaggaacatatgatatcta

SEQ ID NO: 4380099 - DNA, 25 bp, Homo sapien
acatatgatatctatcactgacaga

SEQ ID NO: 4380100 - DNA, 25 bp, Homo sapien
tcacaccaatgtcatatccaaactg

SEQ ID NO: 4380101 - DNA, 25 bp, Homo sapien
gatcacaccaatgtcatatccaaac

SEQ ID NO: 4380102 - DNA, 25 bp, Homo sapien
atcacaccaatgtcatatccaaact

SEQ ID NO: 4380103 - DNA, 25 bp, Homo sapien
catgtctaactatcttagagaaatc

SEQ ID NO: 4380104 - DNA, 25 bp, Homo sapien
catgcatacggatacttagtttagc

SEQ ID NO: 4380105 - DNA, 25 bp, Homo sapien
gggcagaacattcatccccttgaac

SEQ ID NO: 4380106 - DNA, 25 bp, Homo sapien
gaacccaaatatcgttcaatgggaa

SEQ ID NO: 4380107 - DNA, 25 bp, Homo sapien
tagttgggagtcctgtcaattccag

SEQ ID NO: 4380108 - DNA, 25 bp, Homo sapien
gcctaggcctagttatgcattgcag

SEQ ID NO: 4380109 - DNA, 25 bp, Homo sapien
tgtgagtgtggcacatgcacctgac

SEQ ID NO: 4380110 - DNA, 25 bp, Homo sapien
caagtctaatcttctcagcggcagc

SEQ ID NO: 4380111 - DNA, 25 bp, Homo sapien
ggtccacagtcaggagcggttccat

SEQ ID NO: 4380112 - DNA, 25 bp, Homo sapien
gtcaggagcggttccatggcatttg

SEQ ID NO: 4380113 - DNA, 25 bp, Homo sapien
tgactttccgcatcagttttggctg

SEQ ID NO: 4380114 - DNA, 25 bp, Homo sapien
ctggtgatgagcacgccccattgcc

SEQ ID NO: 4380115 - DNA, 25 bp, Homo sapien
gaggtgaagttgtggtccgagagca

SEQ ID NO: 4380116 - DNA, 25 bp, Homo sapien
agggaggtgaagttgtggtccgaga

SEQ ID NO: 4380117 - DNA, 25 bp, Homo sapien
cccccagcagcgaaccttggtaggg

SEQ ID NO: 4380118 - DNA, 25 bp, Homo sapien
agcagcgaaccttggtaggggtcca

SEQ ID NO: 4380119 - DNA, 25 bp, Homo sapien
tcacgagggtttggagcactagact

SEQ ID NO: 4380120 - DNA, 25 bp, Homo sapien
cactagactagggtcaagagacctg

SEQ ID NO: 4380121 - DNA, 25 bp, Homo sapien
gactcccttaccttgtggactatgg

SEQ ID NO: 4380122 - DNA, 25 bp, Homo sapien
tatattgcttaggacaaagcccagc

SEQ ID NO: 4380123 - DNA, 25 bp, Homo sapien
ggtttaagtgtagatgaggagcaaa

SEQ ID NO: 4380124 - DNA, 25 bp, Homo sapien
gaagcccatccaggaggtttaagtg

SEQ ID NO: 4380125 - DNA, 25 bp, Homo sapien
tcttctaaaagcactacttgggaca

SEQ ID NO: 4380126 - DNA, 25 bp, Homo sapien
tacttgggacaaacgatggccacta

SEQ ID NO: 4380127 - DNA, 25 bp, Homo sapien
aaataagacgatctttaaatgagct

SEQ ID NO: 4380128 - DNA, 25 bp, Homo sapien
ccaaataagacgatctttaaatgag

SEQ ID NO: 4380129 - DNA, 25 bp, Homo sapien
caaataagacgatctttaaatgagc

SEQ ID NO: 4380130 - DNA, 25 bp, Homo sapien
ataagacgatctttaaatgagcttt

SEQ ID NO: 4380131 - DNA, 25 bp, Homo sapien
taactttggcctgagctggctaggc

SEQ ID NO: 4380132 - DNA, 25 bp, Homo sapien
ctgagctggctaggcttccaattat

SEQ ID NO: 4380133 - DNA, 25 bp, Homo sapien
catttttccttggactaatgataac

SEQ ID NO: 4380134 - DNA, 25 bp, Homo sapien
ctaatgataactttggcctgagctg

SEQ ID NO: 4380135 - DNA, 25 bp, Homo sapien
gatgggggaagagtatcaagttgac

SEQ ID NO: 4380136 - DNA, 25 bp, Homo sapien
ctgaaggctatgctgtttctttctg

SEQ ID NO: 4380137 - DNA, 25 bp, Homo sapien
ccttctagctctaaatccttcaatt

SEQ ID NO: 4380138 - DNA, 25 bp, Homo sapien
ctgctccagtgatgccttctagctc

SEQ ID NO: 4380139 - DNA, 25 bp, Homo sapien
taaatccttcaatttttcaactgcc

SEQ ID NO: 4380140 - DNA, 25 bp, Homo sapien
agatccatggagcactgggtacagt

SEQ ID NO: 4380141 - DNA, 25 bp, Homo sapien
gaaaatgttcatcagaccgtgatgc

SEQ ID NO: 4380142 - DNA, 25 bp, Homo sapien
aactttggacatgaagatgactaat

SEQ ID NO: 4380143 - DNA, 25 bp, Homo sapien
cctcatgactatgggtaaattaaca

SEQ ID NO: 4380144 - DNA, 25 bp, Homo sapien
aatggaaactacagggtgtgccctt

SEQ ID NO: 4380145 - DNA, 25 bp, Homo sapien
gaaacttcatgcaacattcagtgga

SEQ ID NO: 4380146 - DNA, 25 bp, Homo sapien
acagatgttagaggcttcccaggga

SEQ ID NO: 4380147 - DNA, 25 bp, Homo sapien
gaagaccttgatcctagctatttag

SEQ ID NO: 4380148 - DNA, 25 bp, Homo sapien
cattcttcaaagcactggagacgga

SEQ ID NO: 4380149 - DNA, 25 bp, Homo sapien
ggagacggaccagtaagcaaagtat

SEQ ID NO: 4380150 - DNA, 25 bp, Homo sapien
tatcaggcaagaagtggcttggacc

SEQ ID NO: 4380151 - DNA, 25 bp, Homo sapien
cacaggtctctgacagtacaggaat

SEQ ID NO: 4380152 - DNA, 25 bp, Homo sapien
gatgtttacagcatcgatacgctgg

SEQ ID NO: 4380153 - DNA, 25 bp, Homo sapien
tatttttagactgcagataatcgca

SEQ ID NO: 4380154 - DNA, 25 bp, Homo sapien
gagatgccaatgacacatccaaatg

SEQ ID NO: 4380155 - DNA, 25 bp, Homo sapien
caggatggagcaagactgcattaca

SEQ ID NO: 4380156 - DNA, 25 bp, Homo sapien
gataactcaagcagcatgaagccag

SEQ ID NO: 4380157 - DNA, 25 bp, Homo sapien
aaagcatggaggtcgctggtgtcct

SEQ ID NO: 4380158 - DNA, 25 bp, Homo sapien
tggtgtccttagcaagagctgctgt

SEQ ID NO: 4380159 - DNA, 25 bp, Homo sapien
tgagttggttcaaaagaccaaggga

SEQ ID NO: 4380160 - DNA, 25 bp, Homo sapien
gaacacagcgagatacactgcagaa

SEQ ID NO: 4380161 - DNA, 25 bp, Homo sapien
gagatactgcagcatacagaacaca

SEQ ID NO: 4380162 - DNA, 25 bp, Homo sapien
tgcagcatacagaacacagcgagat

SEQ ID NO: 4380163 - DNA, 25 bp, Homo sapien
ccaaggagggtgttgaagaccggag

SEQ ID NO: 4380164 - DNA, 25 bp, Homo sapien
gaattgtctgctatcacttaaggag

SEQ ID NO: 4380165 - DNA, 25 bp, Homo sapien
caagaagccagggtatttgtaggac

SEQ ID NO: 4380166 - DNA, 25 bp, Homo sapien
gagagcaacagtgagccaaaaccta

SEQ ID NO: 4380167 - DNA, 25 bp, Homo sapien
taagtttcactggtcaagatcaggg

SEQ ID NO: 4380168 - DNA, 25 bp, Homo sapien
gctcagcctcaatagtgcaatgcaa

SEQ ID NO: 4380169 - DNA, 25 bp, Homo sapien
tgatcagaacatggtaccagtggtg

SEQ ID NO: 4380170 - DNA, 25 bp, Homo sapien
taaagtccaaagcacagggttatga

SEQ ID NO: 4380171 - DNA, 25 bp, Homo sapien
tgtaggcacagcaaaatcgtagttt

SEQ ID NO: 4380172 - DNA, 25 bp, Homo sapien
tgcaagtgatgcctgttcaagcaga

SEQ ID NO: 4380173 - DNA, 25 bp, Homo sapien
aataatctactggacaggagggacc

SEQ ID NO: 4380174 - DNA, 25 bp, Homo sapien
tacagtatctttgactggcacccag

SEQ ID NO: 4380175 - DNA, 25 bp, Homo sapien
tcgtggaatgtgagactttagcccc

SEQ ID NO: 4380176 - DNA, 25 bp, Homo sapien
gagctggtggcaatcacattcggga

SEQ ID NO: 4380177 - DNA, 25 bp, Homo sapien
cacaggcggccatgcttgtagcttt

SEQ ID NO: 4380178 - DNA, 25 bp, Homo sapien
gtttgcaacacctcgataccacagg

SEQ ID NO: 4380179 - DNA, 25 bp, Homo sapien
tgttaaatgcacctgagattgccgg

SEQ ID NO: 4380180 - DNA, 25 bp, Homo sapien
aaccaagtgacctcttagctgggag

SEQ ID NO: 4380181 - DNA, 25 bp, Homo sapien
gaaagttgtgttagagtgtccctcc

SEQ ID NO: 4380182 - DNA, 25 bp, Homo sapien
tcgctaggccagctcaactcaatgg

SEQ ID NO: 4380183 - DNA, 25 bp, Homo sapien
tcatcttgagaaagtggcaccctcg

SEQ ID NO: 4380184 - DNA, 25 bp, Homo sapien
cagacaaggcagcattcttggggat

SEQ ID NO: 4380185 - DNA, 25 bp, Homo sapien
agggcacatggtccatctttgtcca

SEQ ID NO: 4380186 - DNA, 25 bp, Homo sapien
ggcagcattcttggggatctcctgg

SEQ ID NO: 4380187 - DNA, 25 bp, Homo sapien
ctaattccgaagggcacatggtcca

SEQ ID NO: 4380188 - DNA, 25 bp, Homo sapien
ccatgaagataagtgccaagtgctc

SEQ ID NO: 4380189 - DNA, 25 bp, Homo sapien
ggaaaaagggaaagcgatatgttca

SEQ ID NO: 4380190 - DNA, 25 bp, Homo sapien
gcgatatgttcaaccaagccttctg

SEQ ID NO: 4380191 - DNA, 25 bp, Homo sapien
tagactggcataagtccacatgagt

SEQ ID NO: 4380192 - DNA, 25 bp, Homo sapien
cagatcgcacggatgcaaaaaatac

SEQ ID NO: 4380193 - DNA, 25 bp, Homo sapien
gaatttctgttgagggtcatgaaaa

SEQ ID NO: 4380194 - DNA, 25 bp, Homo sapien
aacacttggctacttcctccagatc

SEQ ID NO: 4380195 - DNA, 25 bp, Homo sapien
gggtcatgaaaaacacttggctact

SEQ ID NO: 4380196 - DNA, 25 bp, Homo sapien
gttagttcaactgcatggtcttttc

SEQ ID NO: 4380197 - DNA, 25 bp, Homo sapien
aagaagttagttcaactgcatggtc

SEQ ID NO: 4380198 - DNA, 25 bp, Homo sapien
gaagttagttcaactgcatggtctt

SEQ ID NO: 4380199 - DNA, 25 bp, Homo sapien
agttcaactgcatggtcttttcccc

SEQ ID NO: 4380200 - DNA, 25 bp, Homo sapien
taaaccttgggttgcagacaactgg

SEQ ID NO: 4380201 - DNA, 25 bp, Homo sapien
ccactgccccaggaaagtaatattt

SEQ ID NO: 4380202 - DNA, 25 bp, Homo sapien
aacaacttcttagggaggtctctgg

SEQ ID NO: 4380203 - DNA, 25 bp, Homo sapien
cagagagggcctatggaaaaccaca

SEQ ID NO: 4380204 - DNA, 25 bp, Homo sapien
aactttaacctttgagctcgcttat

SEQ ID NO: 4380205 - DNA, 25 bp, Homo sapien
aaatgtcctgtttccactgaccgga

SEQ ID NO: 4380206 - DNA, 25 bp, Homo sapien
gctcgcttatgcataaatactccat

SEQ ID NO: 4380207 - DNA, 25 bp, Homo sapien
ccactgaccggatctcaatagcttt

SEQ ID NO: 4380208 - DNA, 25 bp, Homo sapien
tttgtggaatcaaatggttgtttca

SEQ ID NO: 4380209 - DNA, 25 bp, Homo sapien
ttgtggaatcaaatggttgtttcac

SEQ ID NO: 4380210 - DNA, 25 bp, Homo sapien
ttttgtggaatcaaatggttgtttc

SEQ ID NO: 4380211 - DNA, 25 bp, Homo sapien
gtgtaactgctgaaggagataagga

SEQ ID NO: 4380212 - DNA, 25 bp, Homo sapien
ttcatttggggggtgtaactgctga

SEQ ID NO: 4380213 - DNA, 25 bp, Homo sapien
tggggggtgtaactgctgaaggaga

SEQ ID NO: 4380214 - DNA, 25 bp, Homo sapien
atttcttgattttcgtttcatttgg

SEQ ID NO: 4380215 - DNA, 25 bp, Homo sapien
gcatgaggagtgatattgccctgaa

SEQ ID NO: 4380216 - DNA, 25 bp, Homo sapien
ccccattggagcaccacatccttag

SEQ ID NO: 4380217 - DNA, 25 bp, Homo sapien
ctgttttaggcaagatgacaatagc

SEQ ID NO: 4380218 - DNA, 25 bp, Homo sapien
agttatccggccataggtgtttaca

SEQ ID NO: 4380219 - DNA, 25 bp, Homo sapien
tgtagatatcataagagtttcctga

SEQ ID NO: 4380220 - DNA, 25 bp, Homo sapien
tcaacatcaattacatggaaaccag

SEQ ID NO: 4380221 - DNA, 25 bp, Homo sapien
tacatggaaaccagtgtgtgaacca

SEQ ID NO: 4380222 - DNA, 25 bp, Homo sapien
ccgtgagatcaactagcagaggctt

SEQ ID NO: 4380223 - DNA, 25 bp, Homo sapien
gaatttatgatacggtttaggagcc

SEQ ID NO: 4380224 - DNA, 25 bp, Homo sapien
taaatgccatgaatttatgatacgg

SEQ ID NO: 4380225 - DNA, 25 bp, Homo sapien
ggtttaggagcccaagcatatattt

SEQ ID NO: 4380226 - DNA, 25 bp, Homo sapien
cagcattctttaaggcaatcaccaa

SEQ ID NO: 4380227 - DNA, 25 bp, Homo sapien
tcttcccagggagtataggcatggc

SEQ ID NO: 4380228 - DNA, 25 bp, Homo sapien
ggcagcaagcttttttcatggcact

SEQ ID NO: 4380229 - DNA, 25 bp, Homo sapien
tagtggcctaattactcagaggtgg

SEQ ID NO: 4380230 - DNA, 25 bp, Homo sapien
ccactccttggtatagacaggctta

SEQ ID NO: 4380231 - DNA, 25 bp, Homo sapien
gtgaaacctaactaagtaagtctga

SEQ ID NO: 4380232 - DNA, 25 bp, Homo sapien
tctgattgagtaaacagaccaaact

SEQ ID NO: 4380233 - DNA, 25 bp, Homo sapien
gctggtcacacatgcatcatcaatc

SEQ ID NO: 4380234 - DNA, 25 bp, Homo sapien
gttccagcaacatctgaagctggtc

SEQ ID NO: 4380235 - DNA, 25 bp, Homo sapien
cttccaagtccccaacagtgatcca

SEQ ID NO: 4380236 - DNA, 25 bp, Homo sapien
gatagtaaactcgtagcttattctt

SEQ ID NO: 4380237 - DNA, 25 bp, Homo sapien
tataatgtatacagccttccaagtc

SEQ ID NO: 4380238 - DNA, 25 bp, Homo sapien
tctgtttcttaaccatgaaagatag

SEQ ID NO: 4380239 - DNA, 25 bp, Homo sapien
ttgctgtgacagctctcactttttc

SEQ ID NO: 4380240 - DNA, 25 bp, Homo sapien
caaattgctgtgacagctctcactt

SEQ ID NO: 4380241 - DNA, 25 bp, Homo sapien
tgtgacagctctcactttttccttc

SEQ ID NO: 4380242 - DNA, 25 bp, Homo sapien
gctgtgacagctctcactttttcct

SEQ ID NO: 4380243 - DNA, 25 bp, Homo sapien
ttggtagtatagcaatcaggacagc

SEQ ID NO: 4380244 - DNA, 25 bp, Homo sapien
tacatgggattaaactcaaatggca

SEQ ID NO: 4380245 - DNA, 25 bp, Homo sapien
tgtgccactaacaacataatgaagt

SEQ ID NO: 4380246 - DNA, 25 bp, Homo sapien
taatgaagtctgaatgtgaattttc

SEQ ID NO: 4380247 - DNA, 25 bp, Homo sapien
cagatttaatgcagaggtgagagac

SEQ ID NO: 4380248 - DNA, 25 bp, Homo sapien
tactaaatgtccctctaggaagcct

SEQ ID NO: 4380249 - DNA, 25 bp, Homo sapien
tatagcctttgtggtatgtctctgc

SEQ ID NO: 4380250 - DNA, 25 bp, Homo sapien
taaaaacatccgaagatccttgctg

SEQ ID NO: 4380251 - DNA, 25 bp, Homo sapien
tccatctgctgaaatcgcctccggt

SEQ ID NO: 4380252 - DNA, 25 bp, Homo sapien
aattgtcacaaggacattcagtccc

SEQ ID NO: 4380253 - DNA, 25 bp, Homo sapien
gcccacttcggtccaaaagcatcag

SEQ ID NO: 4380254 - DNA, 25 bp, Homo sapien
gatcagattatagactttgccttgc

SEQ ID NO: 4380255 - DNA, 25 bp, Homo sapien
ttaagaagcaccctaagactgactt

SEQ ID NO: 4380256 - DNA, 25 bp, Homo sapien
ccttgtcaataggagccttaggcac

SEQ ID NO: 4380257 - DNA, 25 bp, Homo sapien
taatcttctgcatcgagagtcccta

SEQ ID NO: 4380258 - DNA, 25 bp, Homo sapien
ccttaggcacagatgtgaagctagc

SEQ ID NO: 4380259 - DNA, 25 bp, Homo sapien
ccacagagctgcacaaagtatttct

SEQ ID NO: 4380260 - DNA, 25 bp, Homo sapien
acatttaccaccgaaatctttcttg

SEQ ID NO: 4380261 - DNA, 25 bp, Homo sapien
atttctggtgtgtcgctatgaggcc

SEQ ID NO: 4380262 - DNA, 25 bp, Homo sapien
ctaagaagttcgctagtaaacagag

SEQ ID NO: 4380263 - DNA, 25 bp, Homo sapien
ctgcggctgatgattcctcatcctc

SEQ ID NO: 4380264 - DNA, 25 bp, Homo sapien
ttcatcagtgggagacgtctggtat

SEQ ID NO: 4380265 - DNA, 25 bp, Homo sapien
gcggctgatgattcctcatcctctt

SEQ ID NO: 4380266 - DNA, 25 bp, Homo sapien
tctggtatactctggggtccacaaa

SEQ ID NO: 4380267 - DNA, 25 bp, Homo sapien
tagctctatggtagaaaccaaccaa

SEQ ID NO: 4380268 - DNA, 25 bp, Homo sapien
tctgagaacttttcactgctctgct

SEQ ID NO: 4380269 - DNA, 25 bp, Homo sapien
caaatataaacctcaactgttggcc

SEQ ID NO: 4380270 - DNA, 25 bp, Homo sapien
gagcttggcgaagcctcattcttga

SEQ ID NO: 4380271 - DNA, 25 bp, Homo sapien
tcatgtcagctgttgcccagcacct

SEQ ID NO: 4380272 - DNA, 25 bp, Homo sapien
catgtcagctgttgcccagcaccta

SEQ ID NO: 4380273 - DNA, 25 bp, Homo sapien
atgtcagctgttgcccagcacctac

SEQ ID NO: 4380274 - DNA, 25 bp, Homo sapien
gggaggttgatgtggccagcaaagc

SEQ ID NO: 4380275 - DNA, 25 bp, Homo sapien
ggaatgggttgagacgcgccccagt

SEQ ID NO: 4380276 - DNA, 25 bp, Homo sapien
cagtccctcagtcggggttccagct

SEQ ID NO: 4380277 - DNA, 25 bp, Homo sapien
aatgggttgagacgcgccccagtcc

SEQ ID NO: 4380278 - DNA, 25 bp, Homo sapien
cccatgtacagagggagacgctaca

SEQ ID NO: 4380279 - DNA, 25 bp, Homo sapien
tgcatgaggtacagacagtggtcac

SEQ ID NO: 4380280 - DNA, 25 bp, Homo sapien
tgagcagggcccacacttgtaaact

SEQ ID NO: 4380281 - DNA, 25 bp, Homo sapien
tgaagccttacgttcctgcatgagg

SEQ ID NO: 4380282 - DNA, 25 bp, Homo sapien
ccagcagatgagcttccatggacaa

SEQ ID NO: 4380283 - DNA, 25 bp, Homo sapien
tcacagctggtgtggtgtattctag

SEQ ID NO: 4380284 - DNA, 25 bp, Homo sapien
gagcttccatggacaaatggcagct

SEQ ID NO: 4380285 - DNA, 25 bp, Homo sapien
cacagctggtgtggtgtattctaga

SEQ ID NO: 4380286 - DNA, 25 bp, Homo sapien
aagtctgctattagagtttcccaac

SEQ ID NO: 4380287 - DNA, 25 bp, Homo sapien
ttagagtttcccaactctgtcctgg

SEQ ID NO: 4380288 - DNA, 25 bp, Homo sapien
ttggagagcaaagtctgctattaga

SEQ ID NO: 4380289 - DNA, 25 bp, Homo sapien
ggagagcaaagtctgctattagagt

SEQ ID NO: 4380290 - DNA, 25 bp, Homo sapien
cattcccacattgtactgctcgttg

SEQ ID NO: 4380291 - DNA, 25 bp, Homo sapien
atgagaggtctccagcccatgcgtc

SEQ ID NO: 4380292 - DNA, 25 bp, Homo sapien
gaaatactgccgctgaaactgtccg

SEQ ID NO: 4380293 - DNA, 25 bp, Homo sapien
tctctaatcatcaaggttccttctc

SEQ ID NO: 4380294 - DNA, 25 bp, Homo sapien
aaacactgaagttggcaccaggagt

SEQ ID NO: 4380295 - DNA, 25 bp, Homo sapien
aaaacactgaagttggcaccaggag

SEQ ID NO: 4380296 - DNA, 25 bp, Homo sapien
gaatctaaatgtgggctagaactga

SEQ ID NO: 4380297 - DNA, 25 bp, Homo sapien
ggagtccagacgagaaaatgtatag

SEQ ID NO: 4380298 - DNA, 25 bp, Homo sapien
tgcaattactaaactggagcagtgg

SEQ ID NO: 4380299 - DNA, 25 bp, Homo sapien
tgtatagtaagaagcttccattgca

SEQ ID NO: 4380300 - DNA, 25 bp, Homo sapien
ccaggctgatgcttgtacaatcaag

SEQ ID NO: 4380301 - DNA, 25 bp, Homo sapien
cctttgtgccgtaagtacttgtttg

SEQ ID NO: 4380302 - DNA, 25 bp, Homo sapien
caagttctcctgtcctagtcagacc

SEQ ID NO: 4380303 - DNA, 25 bp, Homo sapien
acagctgtgaaagtgagccctccaa

SEQ ID NO: 4380304 - DNA, 25 bp, Homo sapien
ttcagcagggctatcacatagtgag

SEQ ID NO: 4380305 - DNA, 25 bp, Homo sapien
gaacttatcagatctcttaaagcct

SEQ ID NO: 4380306 - DNA, 25 bp, Homo sapien
tgatgcttgcatgctcagtgcttaa

SEQ ID NO: 4380307 - DNA, 25 bp, Homo sapien
caactagcatataaacttttggaag

SEQ ID NO: 4380308 - DNA, 25 bp, Homo sapien
atcagtctgggtatgtcgctgacag

SEQ ID NO: 4380309 - DNA, 25 bp, Homo sapien
tcctcttcctcgctactttctgact

SEQ ID NO: 4380310 - DNA, 25 bp, Homo sapien
tactttctgactcctcactggagga

SEQ ID NO: 4380311 - DNA, 25 bp, Homo sapien
ggtatgtcgctgacagccactgtcc

SEQ ID NO: 4380312 - DNA, 25 bp, Homo sapien
tgtttcttcaatccggagttctctt

SEQ ID NO: 4380313 - DNA, 25 bp, Homo sapien
gttctttggctaatgccgtcagatc

SEQ ID NO: 4380314 - DNA, 25 bp, Homo sapien
ctcttagttctttggctaatgccgt

SEQ ID NO: 4380315 - DNA, 25 bp, Homo sapien
ttagttctttggctaatgccgtcag

SEQ ID NO: 4380316 - DNA, 25 bp, Homo sapien
caaaaccaatagctagactgagact

SEQ ID NO: 4380317 - DNA, 25 bp, Homo sapien
tcagtgctccagcttaagcaacaag

SEQ ID NO: 4380318 - DNA, 25 bp, Homo sapien
aaattgtgccccagtattctgggac

SEQ ID NO: 4380319 - DNA, 25 bp, Homo sapien
cagcatatgagtggtagatacgacc

SEQ ID NO: 4380320 - DNA, 25 bp, Homo sapien
gccgctctaatttgcatgggttaaa

SEQ ID NO: 4380321 - DNA, 25 bp, Homo sapien
tgctttcagagtaatgcagagggaa

SEQ ID NO: 4380322 - DNA, 25 bp, Homo sapien
tgtgctgaatatccgactacctttt

SEQ ID NO: 4380323 - DNA, 25 bp, Homo sapien
cagttctgcaaaagcatggccgctc

SEQ ID NO: 4380324 - DNA, 25 bp, Homo sapien
aatgacggcccctccaagccaattt

SEQ ID NO: 4380325 - DNA, 25 bp, Homo sapien
tctgaactcatgtaattcctcttga

SEQ ID NO: 4380326 - DNA, 25 bp, Homo sapien
tgtagcaccagaacttcactgtctt

SEQ ID NO: 4380327 - DNA, 25 bp, Homo sapien
tctgtgagagccttttccttaatga

SEQ ID NO: 4380328 - DNA, 25 bp, Homo sapien
tggtttcaccttcgcaggctcatgg

SEQ ID NO: 4380329 - DNA, 25 bp, Homo sapien
gccgggtaatgtccctggattcttc

SEQ ID NO: 4380330 - DNA, 25 bp, Homo sapien
agctggtcgactgggccgggtaatg

SEQ ID NO: 4380331 - DNA, 25 bp, Homo sapien
cacaggtgatccttctgacttactg

SEQ ID NO: 4380332 - DNA, 25 bp, Homo sapien
ttcctcccaggcagtattgccaggt

SEQ ID NO: 4380333 - DNA, 25 bp, Homo sapien
acagctttcctcccaggcagtattg

SEQ ID NO: 4380334 - DNA, 25 bp, Homo sapien
tttcctcccaggcagtattgccagg

SEQ ID NO: 4380335 - DNA, 25 bp, Homo sapien
gctttcctcccaggcagtattgcca

SEQ ID NO: 4380336 - DNA, 25 bp, Homo sapien
tggtgcgttcactggatcctgcttg

SEQ ID NO: 4380337 - DNA, 25 bp, Homo sapien
actggatcctgcttgtgatccaggc

SEQ ID NO: 4380338 - DNA, 25 bp, Homo sapien
tgcaaggggctctccaagatgggct

SEQ ID NO: 4380339 - DNA, 25 bp, Homo sapien
ctcagttctccggagatcagggttg

SEQ ID NO: 4380340 - DNA, 25 bp, Homo sapien
ttgagatcctagtctgggtcccaga

SEQ ID NO: 4380341 - DNA, 25 bp, Homo sapien
ttgctctgatgggttgagatcctag

SEQ ID NO: 4380342 - DNA, 25 bp, Homo sapien
caggagaattctttctggctaatgc

SEQ ID NO: 4380343 - DNA, 25 bp, Homo sapien
ccagagcactaccattcccaggaga

SEQ ID NO: 4380344 - DNA, 25 bp, Homo sapien
catggtaaatggcaatccaagtctt

SEQ ID NO: 4380345 - DNA, 25 bp, Homo sapien
tgtgcttcaatctacctgacttcag

SEQ ID NO: 4380346 - DNA, 25 bp, Homo sapien
ttctccactactacgaaaggtctgg

SEQ ID NO: 4380347 - DNA, 25 bp, Homo sapien
caagtcttagccagggaatgaagag

SEQ ID NO: 4380348 - DNA, 25 bp, Homo sapien
gatctgagttctggcgtggcatctc

SEQ ID NO: 4380349 - DNA, 25 bp, Homo sapien
ttcctgtcgtaaccaagagcttcgg

SEQ ID NO: 4380350 - DNA, 25 bp, Homo sapien
gaggtcacgttcagagcctcctgaa

SEQ ID NO: 4380351 - DNA, 25 bp, Homo sapien
ggtcaaacttttcaatgcgagtggg

SEQ ID NO: 4380352 - DNA, 25 bp, Homo sapien
tgggattttacagctaccagatgtg

SEQ ID NO: 4380353 - DNA, 25 bp, Homo sapien
ggaggcggtcaaggcaggtccctgg

SEQ ID NO: 4380354 - DNA, 25 bp, Homo sapien
gattttacagctaccagatgtggga

SEQ ID NO: 4380355 - DNA, 25 bp, Homo sapien
ccctgggattttacagctaccagat

SEQ ID NO: 4380356 - DNA, 25 bp, Homo sapien
taatgctgaaggactccgaccttgg

SEQ ID NO: 4380357 - DNA, 25 bp, Homo sapien
gaactttgccggttgagccttgacc

SEQ ID NO: 4380358 - DNA, 25 bp, Homo sapien
ggtgttcgagcaggctgaactccac

SEQ ID NO: 4380359 - DNA, 25 bp, Homo sapien
tgttggcaaccttgtgaggcatggc

SEQ ID NO: 4380360 - DNA, 25 bp, Homo sapien
tctgatcaactgattttaagaagac

SEQ ID NO: 4380361 - DNA, 25 bp, Homo sapien
gacaaaactctgtgctgcatcaaga

SEQ ID NO: 4380362 - DNA, 25 bp, Homo sapien
gccatttgaatcctctgatcaactg

SEQ ID NO: 4380363 - DNA, 25 bp, Homo sapien
tgtgctgcatcaagagtttgcaaag

SEQ ID NO: 4380364 - DNA, 25 bp, Homo sapien
taaaggactatcgatttggaatgag

SEQ ID NO: 4380365 - DNA, 25 bp, Homo sapien
gaacaaagcagtataagagcattac

SEQ ID NO: 4380366 - DNA, 25 bp, Homo sapien
gtcccaccctcagcctttggtgtag

SEQ ID NO: 4380367 - DNA, 25 bp, Homo sapien
aggtactcagaaatgcagtgatcac

SEQ ID NO: 4380368 - DNA, 25 bp, Homo sapien
gaaatgcgtgaagcccaaaggaagc

SEQ ID NO: 4380369 - DNA, 25 bp, Homo sapien
taaatatgaaatccccaaagaatgt

SEQ ID NO: 4380370 - DNA, 25 bp, Homo sapien
aaagaatgttcccatatatctgtgg

SEQ ID NO: 4380371 - DNA, 25 bp, Homo sapien
agcccaaaggaagcacaccagatgc

SEQ ID NO: 4380372 - DNA, 25 bp, Homo sapien
tgactgggaaacctcacatcaggag

SEQ ID NO: 4380373 - DNA, 25 bp, Homo sapien
catccttgggagtgagagtgccttg

SEQ ID NO: 4380374 - DNA, 25 bp, Homo sapien
tctcgagttgggctacatccttggg

SEQ ID NO: 4380375 - DNA, 25 bp, Homo sapien
tctcccatgggtgatgctcaagcag

SEQ ID NO: 4380376 - DNA, 25 bp, Homo sapien
tttcttgctttagctgcctctgcag

SEQ ID NO: 4380377 - DNA, 25 bp, Homo sapien
taatggtacagtggcttcttctcca

SEQ ID NO: 4380378 - DNA, 25 bp, Homo sapien
catgctggcttctcactaggactca

SEQ ID NO: 4380379 - DNA, 25 bp, Homo sapien
cttccaattgtttgcgcttatattc

SEQ ID NO: 4380380 - DNA, 25 bp, Homo sapien
gctgcaagatctctaactgtctctg

SEQ ID NO: 4380381 - DNA, 25 bp, Homo sapien
ctcctctaactgtcgcctgatgtat

SEQ ID NO: 4380382 - DNA, 25 bp, Homo sapien
agatctctaactgtctctgctcctc

SEQ ID NO: 4380383 - DNA, 25 bp, Homo sapien
tcctctaactgtcgcctgatgtatt

SEQ ID NO: 4380384 - DNA, 25 bp, Homo sapien
gcatctgctcctcatagtgccggcg

SEQ ID NO: 4380385 - DNA, 25 bp, Homo sapien
ggcgcatctgctcctcatagtgccg

SEQ ID NO: 4380386 - DNA, 25 bp, Homo sapien
gttcatgctccgcacgcctcctctc

SEQ ID NO: 4380387 - DNA, 25 bp, Homo sapien
tgctcctcatagtgccggcgctgct

SEQ ID NO: 4380388 - DNA, 25 bp, Homo sapien
cccagacatgaacttttaatgagat

SEQ ID NO: 4380389 - DNA, 25 bp, Homo sapien
aaatgctccaaggttcttctctccg

SEQ ID NO: 4380390 - DNA, 25 bp, Homo sapien
tgagatatgcctaaatgctccaagg

SEQ ID NO: 4380391 - DNA, 25 bp, Homo sapien
gaaccccagacatgaacttttaatg

SEQ ID NO: 4380392 - DNA, 25 bp, Homo sapien
agaaaagtacgcacctacaccaggg

SEQ ID NO: 4380393 - DNA, 25 bp, Homo sapien
tcagagcagattggtgaccgccctg

SEQ ID NO: 4380394 - DNA, 25 bp, Homo sapien
tgagaaacaaatcttggccctggtc

SEQ ID NO: 4380395 - DNA, 25 bp, Homo sapien
acaccagggtgttctagctctcata

SEQ ID NO: 4380396 - DNA, 25 bp, Homo sapien
tttgtgctcacaggccaacttttga

SEQ ID NO: 4380397 - DNA, 25 bp, Homo sapien
gctcacaggccaacttttgattagc

SEQ ID NO: 4380398 - DNA, 25 bp, Homo sapien
tcacaggccaacttttgattagcag

SEQ ID NO: 4380399 - DNA, 25 bp, Homo sapien
gtgctcacaggccaacttttgatta

SEQ ID NO: 4380400 - DNA, 25 bp, Homo sapien
aaagcatcacactctctggcctaga

SEQ ID NO: 4380401 - DNA, 25 bp, Homo sapien
taatcaacatggtctacaaagccct

SEQ ID NO: 4380402 - DNA, 25 bp, Homo sapien
ggtccacaggctacatttgtctcaa

SEQ ID NO: 4380403 - DNA, 25 bp, Homo sapien
tctgaccaagccaggtgaggctccc

SEQ ID NO: 4380404 - DNA, 25 bp, Homo sapien
tcgatgcgcttctgacgctcggcca

SEQ ID NO: 4380405 - DNA, 25 bp, Homo sapien
cgtagggcctcagaacgctccttgt

SEQ ID NO: 4380406 - DNA, 25 bp, Homo sapien
gtcgactcccctggcagattcagga

SEQ ID NO: 4380407 - DNA, 25 bp, Homo sapien
agctgccgcttgtgctcctcattct

SEQ ID NO: 4380408 - DNA, 25 bp, Homo sapien
tagaagacttggcttttgctctcat

SEQ ID NO: 4380409 - DNA, 25 bp, Homo sapien
agaagacttggcttttgctctcata

SEQ ID NO: 4380410 - DNA, 25 bp, Homo sapien
gaagacttggcttttgctctcatac

SEQ ID NO: 4380411 - DNA, 25 bp, Homo sapien
ttagaagacttggcttttgctctca

SEQ ID NO: 4380412 - DNA, 25 bp, Homo sapien
ccactgtactcatactctgtctcat

SEQ ID NO: 4380413 - DNA, 25 bp, Homo sapien
tcacttccactgtactcatactctg

SEQ ID NO: 4380414 - DNA, 25 bp, Homo sapien
cttccactgtactcatactctgtct

SEQ ID NO: 4380415 - DNA, 25 bp, Homo sapien
tccactgtactcatactctgtctca

SEQ ID NO: 4380416 - DNA, 25 bp, Homo sapien
ccccaccgctagtccccagcttgtg

SEQ ID NO: 4380417 - DNA, 25 bp, Homo sapien
cccaccgctagtccccagcttgtgt

SEQ ID NO: 4380418 - DNA, 25 bp, Homo sapien
ctctccaatccagtctcaactttca

SEQ ID NO: 4380419 - DNA, 25 bp, Homo sapien
tcaactttcatactgctcaccgccc

SEQ ID NO: 4380420 - DNA, 25 bp, Homo sapien
tgcctggcagaggtaatgtttcttg

SEQ ID NO: 4380421 - DNA, 25 bp, Homo sapien
catgaaagattctacttcaatagtc

SEQ ID NO: 4380422 - DNA, 25 bp, Homo sapien
gcagaggtaatgtttcttgcagttc

SEQ ID NO: 4380423 - DNA, 25 bp, Homo sapien
atagtctcacgccactgatgcccag

SEQ ID NO: 4380424 - DNA, 25 bp, Homo sapien
tgtcgctcattaggttggtctcgta

SEQ ID NO: 4380425 - DNA, 25 bp, Homo sapien
tgtgattctttaccaagcagctctc

SEQ ID NO: 4380426 - DNA, 25 bp, Homo sapien
ttctgttgctggtcgctggctgtga

SEQ ID NO: 4380427 - DNA, 25 bp, Homo sapien
ccttgagttgaatgcggacctgtcg

SEQ ID NO: 4380428 - DNA, 25 bp, Homo sapien
caatatggccaccttcaagtctgca

SEQ ID NO: 4380429 - DNA, 25 bp, Homo sapien
ttctggacaagagctgcaatatggc

SEQ ID NO: 4380430 - DNA, 25 bp, Homo sapien
atgagtgaatgcgtgatgaaggttc

SEQ ID NO: 4380431 - DNA, 25 bp, Homo sapien
gaatgcgtgatgaaggttctggaca

SEQ ID NO: 4380432 - DNA, 25 bp, Homo sapien
ctggtatgtatatgcacttagggaa

SEQ ID NO: 4380433 - DNA, 25 bp, Homo sapien
gattgttgtaaggaatagaagagaa

SEQ ID NO: 4380434 - DNA, 25 bp, Homo sapien
ggctgactctctaaactatcaccct

SEQ ID NO: 4380435 - DNA, 25 bp, Homo sapien
gagaaatcagccaatctaacaggct

SEQ ID NO: 4380436 - DNA, 25 bp, Homo sapien
tcttagacttcagccgaggcgctgg

SEQ ID NO: 4380437 - DNA, 25 bp, Homo sapien
cacttcttagacttcagccgaggcg

SEQ ID NO: 4380438 - DNA, 25 bp, Homo sapien
gacttcagccgaggcgctgggttcc

SEQ ID NO: 4380439 - DNA, 25 bp, Homo sapien
tagacttcagccgaggcgctgggtt

SEQ ID NO: 4380440 - DNA, 25 bp, Homo sapien
gtagtggaagtaaagcaactgcagc

SEQ ID NO: 4380441 - DNA, 25 bp, Homo sapien
cctggcaaggaaacttcagtacctg

SEQ ID NO: 4380442 - DNA, 25 bp, Homo sapien
cctggttgatttaagatgactctgc

SEQ ID NO: 4380443 - DNA, 25 bp, Homo sapien
tgaatccatgcagggctcggtgtag

SEQ ID NO: 4380444 - DNA, 25 bp, Homo sapien
ccttctgccatttcaatggcggtga

SEQ ID NO: 4380445 - DNA, 25 bp, Homo sapien
tttcaatggcggtgatacccaaaga

SEQ ID NO: 4380446 - DNA, 25 bp, Homo sapien
aatggcggtgatacccaaagaccac

SEQ ID NO: 4380447 - DNA, 25 bp, Homo sapien
tgccatttcaatggcggtgataccc

SEQ ID NO: 4380448 - DNA, 25 bp, Homo sapien
tccagaggtgttgtgcagcctagcc

SEQ ID NO: 4380449 - DNA, 25 bp, Homo sapien
tagcctgtggcatgattaataccct

SEQ ID NO: 4380450 - DNA, 25 bp, Homo sapien
tagccgttggatacattagcgagtc

SEQ ID NO: 4380451 - DNA, 25 bp, Homo sapien
caagacagatcacaggagacaagca

SEQ ID NO: 4380452 - DNA, 25 bp, Homo sapien
tcagaccttcaagcttgcaattccc

SEQ ID NO: 4380453 - DNA, 25 bp, Homo sapien
catgatacccatatctggcctggga

SEQ ID NO: 4380454 - DNA, 25 bp, Homo sapien
gggcctcaaaaacgctgcaatgttt

SEQ ID NO: 4380455 - DNA, 25 bp, Homo sapien
gcccagatgtagactagttagcact

SEQ ID NO: 4380456 - DNA, 25 bp, Homo sapien
cactgttcgatcaagctgagcactg

SEQ ID NO: 4380457 - DNA, 25 bp, Homo sapien
tcctgcccactgttcgatcaagctg

SEQ ID NO: 4380458 - DNA, 25 bp, Homo sapien
ttcctcctgcccactgttcgatcaa

SEQ ID NO: 4380459 - DNA, 25 bp, Homo sapien
gaaatcatatgtggcatctgggttt

SEQ ID NO: 4380460 - DNA, 25 bp, Homo sapien
gccctttaatatctcgatgaatcac

SEQ ID NO: 4380461 - DNA, 25 bp, Homo sapien
cagtcagcaagacattttgcccttt

SEQ ID NO: 4380462 - DNA, 25 bp, Homo sapien
gaatcactttatgctggtgcaggtg

SEQ ID NO: 4380463 - DNA, 25 bp, Homo sapien
tgcattttcagtcagcaagacattt

SEQ ID NO: 4380464 - DNA, 25 bp, Homo sapien
tcttgatcaggtcggtgacagagcc

SEQ ID NO: 4380465 - DNA, 25 bp, Homo sapien
gtaagatttccctgcagatgtatgc

SEQ ID NO: 4380466 - DNA, 25 bp, Homo sapien
ccttttgtgttcttgatcaggtcgg

SEQ ID NO: 4380467 - DNA, 25 bp, Homo sapien
ctctttcaacgtgttaccttttgtg

SEQ ID NO: 4380468 - DNA, 25 bp, Homo sapien
tgatatgtgccctctaaacagctgg

SEQ ID NO: 4380469 - DNA, 25 bp, Homo sapien
tatcatggcagcatttagcctctag

SEQ ID NO: 4380470 - DNA, 25 bp, Homo sapien
cccagtatcttattctgagacgatc

SEQ ID NO: 4380471 - DNA, 25 bp, Homo sapien
tcaggcccaatatttctagatcatt

SEQ ID NO: 4380472 - DNA, 25 bp, Homo sapien
gcgagtctgacgagtgctaggccct

SEQ ID NO: 4380473 - DNA, 25 bp, Homo sapien
ttgtccttcaaacctggcagaatgt

SEQ ID NO: 4380474 - DNA, 25 bp, Homo sapien
gccctctgcatagacgcgagtctga

SEQ ID NO: 4380475 - DNA, 25 bp, Homo sapien
gaatgtaggagctgtaacttccaca

SEQ ID NO: 4380476 - DNA, 25 bp, Homo sapien
tcaattaacttcactggacccagca

SEQ ID NO: 4380477 - DNA, 25 bp, Homo sapien
ggcgaaaaagagtcaagccctatta

SEQ ID NO: 4380478 - DNA, 25 bp, Homo sapien
ccactaatgagttttgaggcccggg

SEQ ID NO: 4380479 - DNA, 25 bp, Homo sapien
caggatctgcaaaagggcgaaaaag

SEQ ID NO: 4380480 - DNA, 25 bp, Homo sapien
aaagcaccatagtatgtagcaatat

SEQ ID NO: 4380481 - DNA, 25 bp, Homo sapien
tgtagcaatattccggtgatgagaa

SEQ ID NO: 4380482 - DNA, 25 bp, Homo sapien
aaagttggtcatccatgcctggtgg

SEQ ID NO: 4380483 - DNA, 25 bp, Homo sapien
tgcctggtgggttctttttgataaa

SEQ ID NO: 4380484 - DNA, 25 bp, Homo sapien
cattcctgattgagtttaatcgaca

SEQ ID NO: 4380485 - DNA, 25 bp, Homo sapien
gagtttaatcgacattcaccaggga

SEQ ID NO: 4380486 - DNA, 25 bp, Homo sapien
tctcaggcaatgtcaagtcccccca

SEQ ID NO: 4380487 - DNA, 25 bp, Homo sapien
ttcaccagggatctcttccttaatt

SEQ ID NO: 4380488 - DNA, 25 bp, Homo sapien
tagcccctacactccttcacatacc

SEQ ID NO: 4380489 - DNA, 25 bp, Homo sapien
gtcatagcccctacactccttcaca

SEQ ID NO: 4380490 - DNA, 25 bp, Homo sapien
gcccctacactccttcacatacctg

SEQ ID NO: 4380491 - DNA, 25 bp, Homo sapien
ctggtcatagcccctacactccttc

SEQ ID NO: 4380492 - DNA, 25 bp, Homo sapien
gggccaaataattgtggacgaatgt

SEQ ID NO: 4380493 - DNA, 25 bp, Homo sapien
tgtaggatgtgagcggatgtacttt

SEQ ID NO: 4380494 - DNA, 25 bp, Homo sapien
tttaaacttgctgtatggggccaaa

SEQ ID NO: 4380495 - DNA, 25 bp, Homo sapien
tatggtgcacattggctatttttaa

SEQ ID NO: 4380496 - DNA, 25 bp, Homo sapien
cagctgttgccattaagcaggtgtt

SEQ ID NO: 4380497 - DNA, 25 bp, Homo sapien
gactagtcaggaagaagtctagaga

SEQ ID NO: 4380498 - DNA, 25 bp, Homo sapien
tgtgtggacactggctagaaccatc

SEQ ID NO: 4380499 - DNA, 25 bp, Homo sapien
ccactatcccatagatgtgtggaca

SEQ ID NO: 4380500 - DNA, 25 bp, Homo sapien
ctcctcctagatgccgtaggtcaat

SEQ ID NO: 4380501 - DNA, 25 bp, Homo sapien
gctcctcctagatgccgtaggtcaa

SEQ ID NO: 4380502 - DNA, 25 bp, Homo sapien
agctcctcctagatgccgtaggtca

SEQ ID NO: 4380503 - DNA, 25 bp, Homo sapien
tatcactgacatacatccctaggct

SEQ ID NO: 4380504 - DNA, 25 bp, Homo sapien
aaccttaactgtggaggccatgcat

SEQ ID NO: 4380505 - DNA, 25 bp, Homo sapien
ggccatgcattagaatgatggagca

SEQ ID NO: 4380506 - DNA, 25 bp, Homo sapien
cataaagtgtgatcagtggaaatcc

SEQ ID NO: 4380507 - DNA, 25 bp, Homo sapien
taggcttagcaaaaggatcgaaaac

SEQ ID NO: 4380508 - DNA, 25 bp, Homo sapien
tgatgtccagtgaatcctttcgagt

SEQ ID NO: 4380509 - DNA, 25 bp, Homo sapien
tagaaaaatccccaggacaacagaa

SEQ ID NO: 4380510 - DNA, 25 bp, Homo sapien
ctgggctgaatggaagactttggtc

SEQ ID NO: 4380511 - DNA, 25 bp, Homo sapien
gctggcccgttttgacatgacgacc

SEQ ID NO: 4380512 - DNA, 25 bp, Homo sapien
catccataaccttgatggctgcaag

SEQ ID NO: 4380513 - DNA, 25 bp, Homo sapien
tgatggctgcaagctggcccgtttt

SEQ ID NO: 4380514 - DNA, 25 bp, Homo sapien
ccctgtgacatccataaccttgatg

SEQ ID NO: 4380515 - DNA, 25 bp, Homo sapien
attctgatggtgcttccttccgctt

SEQ ID NO: 4380516 - DNA, 25 bp, Homo sapien
gatggtgcttccttccgcttttgac

SEQ ID NO: 4380517 - DNA, 25 bp, Homo sapien
tctgattctgatggtgcttccttcc

SEQ ID NO: 4380518 - DNA, 25 bp, Homo sapien
actctgattctgatggtgcttcctt

SEQ ID NO: 4380519 - DNA, 25 bp, Homo sapien
agccctggaccagaatcccagaggc

SEQ ID NO: 4380520 - DNA, 25 bp, Homo sapien
gccctggaccagaatcccagaggcc

SEQ ID NO: 4380521 - DNA, 25 bp, Homo sapien
agacaaaccactgggcacggcttgc

SEQ ID NO: 4380522 - DNA, 25 bp, Homo sapien
tacagacaaaccactgggcacggct

SEQ ID NO: 4380523 - DNA, 25 bp, Homo sapien
ccactgggcacggcttgcagggccc

SEQ ID NO: 4380524 - DNA, 25 bp, Homo sapien
gacaaaccactgggcacggcttgca

SEQ ID NO: 4380525 - DNA, 25 bp, Homo sapien
tgagacgggtaagcacagcatcttg

SEQ ID NO: 4380526 - DNA, 25 bp, Homo sapien
cagcatcttgctgactcttggaaat

SEQ ID NO: 4380527 - DNA, 25 bp, Homo sapien
gagcaggtatttcacatagtctagg

SEQ ID NO: 4380528 - DNA, 25 bp, Homo sapien
ttaggtcgactcatcagggatcgtg

SEQ ID NO: 4380529 - DNA, 25 bp, Homo sapien
tctaaaaggcatagaagaaggtcac

SEQ ID NO: 4380530 - DNA, 25 bp, Homo sapien
cagtttttctaaaaggcatagaaga

SEQ ID NO: 4380531 - DNA, 25 bp, Homo sapien
tttctaaaaggcatagaagaaggtc

SEQ ID NO: 4380532 - DNA, 25 bp, Homo sapien
ccagtttttctaaaaggcatagaag

SEQ ID NO: 4380533 - DNA, 25 bp, Homo sapien
cagagaccgggacacagatatgaga

SEQ ID NO: 4380534 - DNA, 25 bp, Homo sapien
aacagagaccgggacacagatatga

SEQ ID NO: 4380535 - DNA, 25 bp, Homo sapien
aacagacaacagagaccgggacaca

SEQ ID NO: 4380536 - DNA, 25 bp, Homo sapien
agacaacagagaccgggacacagat

SEQ ID NO: 4380537 - DNA, 25 bp, Homo sapien
agagacaggtctacttccctaggtc

SEQ ID NO: 4380538 - DNA, 25 bp, Homo sapien
ttccctaggtctgaacatcctttcc

SEQ ID NO: 4380539 - DNA, 25 bp, Homo sapien
ggtctacttccctaggtctgaacat

SEQ ID NO: 4380540 - DNA, 25 bp, Homo sapien
tgagagacaggtctacttccctagg

SEQ ID NO: 4380541 - DNA, 25 bp, Homo sapien
gcatgacccttccattgcaccacat

SEQ ID NO: 4380542 - DNA, 25 bp, Homo sapien
actacactctgaggagtccttctgg

SEQ ID NO: 4380543 - DNA, 25 bp, Homo sapien
atatccactccctgccaattgcaag

SEQ ID NO: 4380544 - DNA, 25 bp, Homo sapien
tgcaccacatcaagactacactctg

SEQ ID NO: 4380545 - DNA, 25 bp, Homo sapien
ccctgcctggtaccgagactcattt

SEQ ID NO: 4380546 - DNA, 25 bp, Homo sapien
aatagtaattattggcttcactcca

SEQ ID NO: 4380547 - DNA, 25 bp, Homo sapien
agttctagcatttacttgcacttct

SEQ ID NO: 4380548 - DNA, 25 bp, Homo sapien
taaacatcaagttcaagctcccctg

SEQ ID NO: 4380549 - DNA, 25 bp, Homo sapien
ctgtctttgactttcccccatccca

SEQ ID NO: 4380550 - DNA, 25 bp, Homo sapien
agactgtctttgactttcccccatc

SEQ ID NO: 4380551 - DNA, 25 bp, Homo sapien
tgtctttgactttcccccatcccac

SEQ ID NO: 4380552 - DNA, 25 bp, Homo sapien
gactgtctttgactttcccccatcc

SEQ ID NO: 4380553 - DNA, 25 bp, Homo sapien
tgttgggactaacaaagtcctcctg

SEQ ID NO: 4380554 - DNA, 25 bp, Homo sapien
tctggagaattccaagatccagaag

SEQ ID NO: 4380555 - DNA, 25 bp, Homo sapien
caattgcagtatcaatctctggaga

SEQ ID NO: 4380556 - DNA, 25 bp, Homo sapien
tgtgggtaccaagggcttcaatgac

SEQ ID NO: 4380557 - DNA, 25 bp, Homo sapien
cattcaccaaggagcagaggagttc

SEQ ID NO: 4380558 - DNA, 25 bp, Homo sapien
tcagaactacttcgagggtactgtc

SEQ ID NO: 4380559 - DNA, 25 bp, Homo sapien
gggatcgccaaaaccattcacttag

SEQ ID NO: 4380560 - DNA, 25 bp, Homo sapien
gatggcgctgcatgggaatacaagc

SEQ ID NO: 4380561 - DNA, 25 bp, Homo sapien
cctatacagtgaaggctgtggcaca

SEQ ID NO: 4380562 - DNA, 25 bp, Homo sapien
aactgatgagcttttccgaagtaga

SEQ ID NO: 4380563 - DNA, 25 bp, Homo sapien
tcaatgcaagacataggtggaccca

SEQ ID NO: 4380564 - DNA, 25 bp, Homo sapien
gaagtagagctggatcctaatgcca

SEQ ID NO: 4380565 - DNA, 25 bp, Homo sapien
tatatgatgccaagtctttggtcag

SEQ ID NO: 4380566 - DNA, 25 bp, Homo sapien
caagaacatgctaaggcaagtaggg

SEQ ID NO: 4380567 - DNA, 25 bp, Homo sapien
tattctgggtattatatgctgctgc

SEQ ID NO: 4380568 - DNA, 25 bp, Homo sapien
ctcagggcaagttcaagattattct

SEQ ID NO: 4380569 - DNA, 25 bp, Homo sapien
tcttgttcgacaggattgcattccc

SEQ ID NO: 4380570 - DNA, 25 bp, Homo sapien
cagttaccttctatgttgtgtgcca

SEQ ID NO: 4380571 - DNA, 25 bp, Homo sapien
gatactgttaaactctctgctggcc

SEQ ID NO: 4380572 - DNA, 25 bp, Homo sapien
tggccttcatagctccagatgcgtg

SEQ ID NO: 4380573 - DNA, 25 bp, Homo sapien
gagaactagctttcatccgggcacg

SEQ ID NO: 4380574 - DNA, 25 bp, Homo sapien
tgtcaccacgagagctgcactgagt

SEQ ID NO: 4380575 - DNA, 25 bp, Homo sapien
gagagggccccagaaatagcttact

SEQ ID NO: 4380576 - DNA, 25 bp, Homo sapien
tgatgctctatagtcgttgccggaa

SEQ ID NO: 4380577 - DNA, 25 bp, Homo sapien
tgtgggcatacttcacgcagagtaa

SEQ ID NO: 4380578 - DNA, 25 bp, Homo sapien
gcagagtaatgccatttggccctca

SEQ ID NO: 4380579 - DNA, 25 bp, Homo sapien
catttggccctcatatttcttagaa

SEQ ID NO: 4380580 - DNA, 25 bp, Homo sapien
tggtcttctaacaaaatactaataa

SEQ ID NO: 4380581 - DNA, 25 bp, Homo sapien
tacctttcagaaccttttacaagca

SEQ ID NO: 4380582 - DNA, 25 bp, Homo sapien
attatctgagcaagaatcattctca

SEQ ID NO: 4380583 - DNA, 25 bp, Homo sapien
taactgggaccatactgtattttct

SEQ ID NO: 4380584 - DNA, 25 bp, Homo sapien
gaaaaagatcaatatctcccctgct

SEQ ID NO: 4380585 - DNA, 25 bp, Homo sapien
tgccaagtggttcaaatcagatcca

SEQ ID NO: 4380586 - DNA, 25 bp, Homo sapien
caaggttgtgaaactctgccaagtg

SEQ ID NO: 4380587 - DNA, 25 bp, Homo sapien
tgaaatatctactctctaggccctt

SEQ ID NO: 4380588 - DNA, 25 bp, Homo sapien
cacataggtaacttacgtatgcccc

SEQ ID NO: 4380589 - DNA, 25 bp, Homo sapien
gctatgatctagagcaaagggagca

SEQ ID NO: 4380590 - DNA, 25 bp, Homo sapien
tgatttgtggattacaccgcatgga

SEQ ID NO: 4380591 - DNA, 25 bp, Homo sapien
ccaagtgagaatgacagaaactgac

SEQ ID NO: 4380592 - DNA, 25 bp, Homo sapien
ccgcatggattacgttgccctagaa

SEQ ID NO: 4380593 - DNA, 25 bp, Homo sapien
tacaaaaaaccatagaagaggactg

SEQ ID NO: 4380594 - DNA, 25 bp, Homo sapien
tgttggtaattagatgggccaccct

SEQ ID NO: 4380595 - DNA, 25 bp, Homo sapien
aaatgactttacatggctgctacta

SEQ ID NO: 4380596 - DNA, 25 bp, Homo sapien
gaggactgcaggtagctaagctttc

SEQ ID NO: 4380597 - DNA, 25 bp, Homo sapien
ggaaagttaccaaaagtgatcagta

SEQ ID NO: 4380598 - DNA, 25 bp, Homo sapien
taatgatgcccttgggtcttcgtgg

SEQ ID NO: 4380599 - DNA, 25 bp, Homo sapien
taacaactgaggtccataatgatgc

SEQ ID NO: 4380600 - DNA, 25 bp, Homo sapien
taccccacccagaaccttgaataga

SEQ ID NO: 4380601 - DNA, 25 bp, Homo sapien
ctaaggaaacaatggagggcgctgt

SEQ ID NO: 4380602 - DNA, 25 bp, Homo sapien
agatttattgcttgtgaggaagata

SEQ ID NO: 4380603 - DNA, 25 bp, Homo sapien
gagtctctctgccccttgaggacaa

SEQ ID NO: 4380604 - DNA, 25 bp, Homo sapien
tgggggtggattctgcctgcctttc

SEQ ID NO: 4380605 - DNA, 25 bp, Homo sapien
aagtcttcaagtaccagtgccttgt

SEQ ID NO: 4380606 - DNA, 25 bp, Homo sapien
tcaagtacagcactggacagtgggt

SEQ ID NO: 4380607 - DNA, 25 bp, Homo sapien
ggagctgagagcaagtcttcaagta

SEQ ID NO: 4380608 - DNA, 25 bp, Homo sapien
ggtgggaagtgtcaagtacagcact

SEQ ID NO: 4380609 - DNA, 25 bp, Homo sapien
taacgtttgaatctaggactgtctg

SEQ ID NO: 4380610 - DNA, 25 bp, Homo sapien
gactctgcccaagctcataatgact

SEQ ID NO: 4380611 - DNA, 25 bp, Homo sapien
gcctaactaccgtacagtgcagaag

SEQ ID NO: 4380612 - DNA, 25 bp, Homo sapien
ctcctgaccccagggaattcacttg

SEQ ID NO: 4380613 - DNA, 25 bp, Homo sapien
tattttgttagtatagtacaagtac

SEQ ID NO: 4380614 - DNA, 25 bp, Homo sapien
ggctattaatgcagttgtaaatggg

SEQ ID NO: 4380615 - DNA, 25 bp, Homo sapien
agaatcacatattttgggccgggca

SEQ ID NO: 4380616 - DNA, 25 bp, Homo sapien
agtacctgtatcaaatccactacaa

SEQ ID NO: 4380617 - DNA, 25 bp, Homo sapien
tttgcaccacatcagcatatgagag

SEQ ID NO: 4380618 - DNA, 25 bp, Homo sapien
tttctaatagactgtcaagagctgc

SEQ ID NO: 4380619 - DNA, 25 bp, Homo sapien
ggtagttaaatcttaggctcacaaa

SEQ ID NO: 4380620 - DNA, 25 bp, Homo sapien
tacaatcatagggtgggaactcgac

SEQ ID NO: 4380621 - DNA, 25 bp, Homo sapien
ggtaagcaaagtagacaagtctctg

SEQ ID NO: 4380622 - DNA, 25 bp, Homo sapien
tataatctgagtttagcaccccacc

SEQ ID NO: 4380623 - DNA, 25 bp, Homo sapien
caggaatgtgcaaaggtcttgaggc

SEQ ID NO: 4380624 - DNA, 25 bp, Homo sapien
cagccagtctttggtaggtctgtgc

SEQ ID NO: 4380625 - DNA, 25 bp, Homo sapien
ggataacatcaagggacagtcctgc

SEQ ID NO: 4380626 - DNA, 25 bp, Homo sapien
tcatatgagagatgtgcaatgcctg

SEQ ID NO: 4380627 - DNA, 25 bp, Homo sapien
gataatgcccttcactcactggttc

SEQ ID NO: 4380628 - DNA, 25 bp, Homo sapien
taatatgactttactggctgcacag

SEQ ID NO: 4380629 - DNA, 25 bp, Homo sapien
aaaattgcattatgtgtcatcttca

SEQ ID NO: 4380630 - DNA, 25 bp, Homo sapien
aaaagaactattcatacaaaaattg

SEQ ID NO: 4380631 - DNA, 25 bp, Homo sapien
aatgcatgcagatataggaggtgtg

SEQ ID NO: 4380632 - DNA, 25 bp, Homo sapien
gactattctctatcctatcactgta

SEQ ID NO: 4380633 - DNA, 25 bp, Homo sapien
aagggcacagcacggataaacagac

SEQ ID NO: 4380634 - DNA, 25 bp, Homo sapien
gaaacagtaaggtaatgtccctgac

SEQ ID NO: 4380635 - DNA, 25 bp, Homo sapien
tacaaacaggtcagagtacggagag

SEQ ID NO: 4380636 - DNA, 25 bp, Homo sapien
gaatgccccgcaatgtgctaccata

SEQ ID NO: 4380637 - DNA, 25 bp, Homo sapien
ccagaacatcctgctattgtgtcaa

SEQ ID NO: 4380638 - DNA, 25 bp, Homo sapien
gactggggatgtagaactgtgctcc

SEQ ID NO: 4380639 - DNA, 25 bp, Homo sapien
ggtagatcctaactatcctcccaga

SEQ ID NO: 4380640 - DNA, 25 bp, Homo sapien
aagggacggctccatgaggtagatc

SEQ ID NO: 4380641 - DNA, 25 bp, Homo sapien
taagataaattcagctaggagcctc

SEQ ID NO: 4380642 - DNA, 25 bp, Homo sapien
tcacctgcagataataaagtgggct

SEQ ID NO: 4380643 - DNA, 25 bp, Homo sapien
ttttaaacagagatcagggcatggg

SEQ ID NO: 4380644 - DNA, 25 bp, Homo sapien
tggaggaacgccaacgtaaggacag

SEQ ID NO: 4380645 - DNA, 25 bp, Homo sapien
aactgaatttctcaagccatactcg

SEQ ID NO: 4380646 - DNA, 25 bp, Homo sapien
cacctccctgaatgtgatgcacaga

SEQ ID NO: 4380647 - DNA, 25 bp, Homo sapien
agatgttaaacagtaacgggcaagt

SEQ ID NO: 4380648 - DNA, 25 bp, Homo sapien
tactcgaagtatcaactcgaagatg

SEQ ID NO: 4380649 - DNA, 25 bp, Homo sapien
tgtaaccagctgctacacttgtctg

SEQ ID NO: 4380650 - DNA, 25 bp, Homo sapien
gagaggaacaaaatggacacagtag

SEQ ID NO: 4380651 - DNA, 25 bp, Homo sapien
tccgaagcaatatcagaggccactg

SEQ ID NO: 4380652 - DNA, 25 bp, Homo sapien
gcttctccttgcaaagtgagcaaca

SEQ ID NO: 4380653 - DNA, 25 bp, Homo sapien
gaaggctttcctggtcttcccacag

SEQ ID NO: 4380654 - DNA, 25 bp, Homo sapien
cgtgaagagccctaaattctgtgcc

SEQ ID NO: 4380655 - DNA, 25 bp, Homo sapien
cctgctaaaaccttgcggctctgaa

SEQ ID NO: 4380656 - DNA, 25 bp, Homo sapien
gaaggaactctggagaccctctagc

SEQ ID NO: 4380657 - DNA, 25 bp, Homo sapien
acttgcccgtatgttccatttccaa

SEQ ID NO: 4380658 - DNA, 25 bp, Homo sapien
taaacttgcccgtatgttccatttc

SEQ ID NO: 4380659 - DNA, 25 bp, Homo sapien
cttataaacttgcccgtatgttcca

SEQ ID NO: 4380660 - DNA, 25 bp, Homo sapien
tataaacttgcccgtatgttccatt

SEQ ID NO: 4380661 - DNA, 25 bp, Homo sapien
catgcttagcaaacagagtcaggta

SEQ ID NO: 4380662 - DNA, 25 bp, Homo sapien
tagttagacaattgagaaggcgcat

SEQ ID NO: 4380663 - DNA, 25 bp, Homo sapien
tagggtttgatattccctgccacta

SEQ ID NO: 4380664 - DNA, 25 bp, Homo sapien
tggccagtaaacgaaaacctattgc

SEQ ID NO: 4380665 - DNA, 25 bp, Homo sapien
tctgccaaacgactgtgcttactct

SEQ ID NO: 4380666 - DNA, 25 bp, Homo sapien
atacggatggctgatagtgctccca

SEQ ID NO: 4380667 - DNA, 25 bp, Homo sapien
cctattgacatctgccaaacgactg

SEQ ID NO: 4380668 - DNA, 25 bp, Homo sapien
agaatgactgctacccccggattcc

SEQ ID NO: 4380669 - DNA, 25 bp, Homo sapien
ttgtttggtttcagccctaactgac

SEQ ID NO: 4380670 - DNA, 25 bp, Homo sapien
tttgtttggtttcagccctaactga

SEQ ID NO: 4380671 - DNA, 25 bp, Homo sapien
tgtttggtttcagccctaactgaca

SEQ ID NO: 4380672 - DNA, 25 bp, Homo sapien
cagtaggagaactctccacatttat

SEQ ID NO: 4380673 - DNA, 25 bp, Homo sapien
aacaggaacagtaggagaactctcc

SEQ ID NO: 4380674 - DNA, 25 bp, Homo sapien
ggaacagtaggagaactctccacat

SEQ ID NO: 4380675 - DNA, 25 bp, Homo sapien
gaaaacaggaacagtaggagaactc

SEQ ID NO: 4380676 - DNA, 25 bp, Homo sapien
cctcttcacaatacagtgagcttcc

SEQ ID NO: 4380677 - DNA, 25 bp, Homo sapien
ccctcttcacaatacagtgagcttc

SEQ ID NO: 4380678 - DNA, 25 bp, Homo sapien
cttcacaatacagtgagcttccttc

SEQ ID NO: 4380679 - DNA, 25 bp, Homo sapien
tcttcacaatacagtgagcttcctt

SEQ ID NO: 4380680 - DNA, 25 bp, Homo sapien
ctctccccaggcatcagctacagcc

SEQ ID NO: 4380681 - DNA, 25 bp, Homo sapien
ccccaggcatcagctacagcctcca

SEQ ID NO: 4380682 - DNA, 25 bp, Homo sapien
gcatcagctacagcctccagctcac

SEQ ID NO: 4380683 - DNA, 25 bp, Homo sapien
ctccccaggcatcagctacagcctc

SEQ ID NO: 4380684 - DNA, 25 bp, Homo sapien
tacactcccgcattctgtgtccttg

SEQ ID NO: 4380685 - DNA, 25 bp, Homo sapien
cagaagatgttctgtacactcccgc

SEQ ID NO: 4380686 - DNA, 25 bp, Homo sapien
cattcccagaagatgttctgtacac

SEQ ID NO: 4380687 - DNA, 25 bp, Homo sapien
gttctgtacactcccgcattctgtg

SEQ ID NO: 4380688 - DNA, 25 bp, Homo sapien
ctcttggtacattagctttcagctg

SEQ ID NO: 4380689 - DNA, 25 bp, Homo sapien
tggtacattagctttcagctgaaag

SEQ ID NO: 4380690 - DNA, 25 bp, Homo sapien
cttggtacattagctttcagctgaa

SEQ ID NO: 4380691 - DNA, 25 bp, Homo sapien
tcttggtacattagctttcagctga

SEQ ID NO: 4380692 - DNA, 25 bp, Homo sapien
ggacacagcaggagtaaggctctca

SEQ ID NO: 4380693 - DNA, 25 bp, Homo sapien
gaagctggcccattgtcaggatcac

SEQ ID NO: 4380694 - DNA, 25 bp, Homo sapien
tacagctgtccaccaatgttctggg

SEQ ID NO: 4380695 - DNA, 25 bp, Homo sapien
tgccctagactcagagtggacccgg

SEQ ID NO: 4380696 - DNA, 25 bp, Homo sapien
gaaactaataaagacagcaacttac

SEQ ID NO: 4380697 - DNA, 25 bp, Homo sapien
taaagacagcaacttacaggagatg

SEQ ID NO: 4380698 - DNA, 25 bp, Homo sapien
gaaagtactacctgttcaaaatcaa

SEQ ID NO: 4380699 - DNA, 25 bp, Homo sapien
tttctaaaccatgtgaaagtactac

SEQ ID NO: 4380700 - DNA, 25 bp, Homo sapien
acttggctttctgtattgcacacat

SEQ ID NO: 4380701 - DNA, 25 bp, Homo sapien
cacttggctttctgtattgcacaca

SEQ ID NO: 4380702 - DNA, 25 bp, Homo sapien
acacttggctttctgtattgcacac

SEQ ID NO: 4380703 - DNA, 25 bp, Homo sapien
cacacttggctttctgtattgcaca

SEQ ID NO: 4380704 - DNA, 25 bp, Homo sapien
ggcacccagaagtgtgatattcctg

SEQ ID NO: 4380705 - DNA, 25 bp, Homo sapien
ttactgtaaccgtgagctcccaggc

SEQ ID NO: 4380706 - DNA, 25 bp, Homo sapien
gagcccaagaattaactgcccagag

SEQ ID NO: 4380707 - DNA, 25 bp, Homo sapien
catctaagataacacagcgatttgc

SEQ ID NO: 4380708 - DNA, 25 bp, Homo sapien
gagaaggaaaagtcgaaggagctga

SEQ ID NO: 4380709 - DNA, 25 bp, Homo sapien
tctccactggtatgtgggtgaaagt

SEQ ID NO: 4380710 - DNA, 25 bp, Homo sapien
tgagctaaagaaatggcggaaggaa

SEQ ID NO: 4380711 - DNA, 25 bp, Homo sapien
caatcttggtagaaacatcatacag

SEQ ID NO: 4380712 - DNA, 25 bp, Homo sapien
acatacatcacatgggtgtcagaga

SEQ ID NO: 4380713 - DNA, 25 bp, Homo sapien
cacatgggtgtcagagaatcctgtg

SEQ ID NO: 4380714 - DNA, 25 bp, Homo sapien
tggaatgaaacctcattcccgtcct

SEQ ID NO: 4380715 - DNA, 25 bp, Homo sapien
tgagatgatgagtttgggcagaaac

SEQ ID NO: 4380716 - DNA, 25 bp, Homo sapien
aagtccaaaaacaaggtatggccag

SEQ ID NO: 4380717 - DNA, 25 bp, Homo sapien
caaggtatggccagtctaataaccc

SEQ ID NO: 4380718 - DNA, 25 bp, Homo sapien
caaaccatcctacttgagttgtcct

SEQ ID NO: 4380719 - DNA, 25 bp, Homo sapien
tgaggggcttcttgagaaacttcaa

SEQ ID NO: 4380720 - DNA, 25 bp, Homo sapien
tttattaagccagcatcgaaactca

SEQ ID NO: 4380721 - DNA, 25 bp, Homo sapien
gcatcgaaactcaagattccccaga

SEQ ID NO: 4380722 - DNA, 25 bp, Homo sapien
cttctccaagaagcacaaagctgtt

SEQ ID NO: 4380723 - DNA, 25 bp, Homo sapien
caaagctgtttctactttattaagc

SEQ ID NO: 4380724 - DNA, 25 bp, Homo sapien
ctccatctggtccacttccctccat

SEQ ID NO: 4380725 - DNA, 25 bp, Homo sapien
cctccatctggtccacttccctcca

SEQ ID NO: 4380726 - DNA, 25 bp, Homo sapien
cttccctccatctggtccacttccc

SEQ ID NO: 4380727 - DNA, 25 bp, Homo sapien
tccctccatctggtccacttccctc

SEQ ID NO: 4380728 - DNA, 25 bp, Homo sapien
tatgcaatcattgtgtctggcttct

SEQ ID NO: 4380729 - DNA, 25 bp, Homo sapien
cataaaattcactcaggttaccacc

SEQ ID NO: 4380730 - DNA, 25 bp, Homo sapien
catgctgcagcctgattcagtactt

SEQ ID NO: 4380731 - DNA, 25 bp, Homo sapien
ggttaccaccatccaatattgaagc

SEQ ID NO: 4380732 - DNA, 25 bp, Homo sapien
tacaccggtataagatgaaactggc

SEQ ID NO: 4380733 - DNA, 25 bp, Homo sapien
gaggtgctctacaaaggactggcca

SEQ ID NO: 4380734 - DNA, 25 bp, Homo sapien
tgaaactggcataagctctacgagc

SEQ ID NO: 4380735 - DNA, 25 bp, Homo sapien
tcaatacaatgaaacggcgtctgag

SEQ ID NO: 4380736 - DNA, 25 bp, Homo sapien
aagaaaccagaaaacgtcctgctca

SEQ ID NO: 4380737 - DNA, 25 bp, Homo sapien
agaaaccagaaaacgtcctgctcac

SEQ ID NO: 4380738 - DNA, 25 bp, Homo sapien
gagccgagagatctatttcatccag

SEQ ID NO: 4380739 - DNA, 25 bp, Homo sapien
catccaggcttcgagccggggagtc

SEQ ID NO: 4380740 - DNA, 25 bp, Homo sapien
gagatctatttcatccaggcttcga

SEQ ID NO: 4380741 - DNA, 25 bp, Homo sapien
cctcagagccgagagatctatttca

SEQ ID NO: 4380742 - DNA, 25 bp, Homo sapien
ccttggaaattccaccttggtctat

SEQ ID NO: 4380743 - DNA, 25 bp, Homo sapien
ctacttcttcgctggagaaatggac

SEQ ID NO: 4380744 - DNA, 25 bp, Homo sapien
gtctacttcttcgctggagaaatgg

SEQ ID NO: 4380745 - DNA, 25 bp, Homo sapien
ttcttcgctggagaaatggaccaaa

SEQ ID NO: 4380746 - DNA, 25 bp, Homo sapien
ctgcgtgggtgtatttaaatgggac

SEQ ID NO: 4380747 - DNA, 25 bp, Homo sapien
gcattggctgttataatgagacaca

SEQ ID NO: 4380748 - DNA, 25 bp, Homo sapien
ggtggagaaccacgcagaactgtct

SEQ ID NO: 4380749 - DNA, 25 bp, Homo sapien
tcactcgcgtcctcatgcgggtgtc

SEQ ID NO: 4380750 - DNA, 25 bp, Homo sapien
ggagtttctgactgagctggagttg

SEQ ID NO: 4380751 - DNA, 25 bp, Homo sapien
gagttggggcatttgcaaatccaca

SEQ ID NO: 4380752 - DNA, 25 bp, Homo sapien
ccggaaggatcacaactctcaatgt

SEQ ID NO: 4380753 - DNA, 25 bp, Homo sapien
gcaggcccggaaggatcacaactct

SEQ ID NO: 4380754 - DNA, 25 bp, Homo sapien
ctgtgtcattccaattttagtatat

SEQ ID NO: 4380755 - DNA, 25 bp, Homo sapien
tccttgcacagggaccacactaatc

SEQ ID NO: 4380756 - DNA, 25 bp, Homo sapien
catccttgcacagggaccacactaa

SEQ ID NO: 4380757 - DNA, 25 bp, Homo sapien
tgcacagggaccacactaatcttct

SEQ ID NO: 4380758 - DNA, 25 bp, Homo sapien
agatgggtgagagaagtgggatccg

SEQ ID NO: 4380759 - DNA, 25 bp, Homo sapien
tgggtgagagaagtgggatccgtac

SEQ ID NO: 4380760 - DNA, 25 bp, Homo sapien
gatgggtgagagaagtgggatccgt

SEQ ID NO: 4380761 - DNA, 25 bp, Homo sapien
aagatgggtgagagaagtgggatcc

SEQ ID NO: 4380762 - DNA, 25 bp, Homo sapien
ggccctttcctacgccaagaggaga

SEQ ID NO: 4380763 - DNA, 25 bp, Homo sapien
gaacacttcacatggagcagcgtaa

SEQ ID NO: 4380764 - DNA, 25 bp, Homo sapien
gtaataactgtgataccgctcccca

SEQ ID NO: 4380765 - DNA, 25 bp, Homo sapien
tctctgccgggaagaaaagcttggg

SEQ ID NO: 4380766 - DNA, 25 bp, Homo sapien
cgtggaggtagataagtggatggtg

SEQ ID NO: 4380767 - DNA, 25 bp, Homo sapien
agtggatggtgtggggatgagccca

SEQ ID NO: 4380768 - DNA, 25 bp, Homo sapien
tctctctggggataggtatgtgacg

SEQ ID NO: 4380769 - DNA, 25 bp, Homo sapien
gataggtatgtgacgtggaggtaga

SEQ ID NO: 4380770 - DNA, 25 bp, Homo sapien
gctcgctacgctccacggaagtaac

SEQ ID NO: 4380771 - DNA, 25 bp, Homo sapien
ggatttattgtatgggcccacccca

SEQ ID NO: 4380772 - DNA, 25 bp, Homo sapien
gctccacggaagtaacaccaatgat

SEQ ID NO: 4380773 - DNA, 25 bp, Homo sapien
gtatttagttggctcgctacgctcc

SEQ ID NO: 4380774 - DNA, 25 bp, Homo sapien
gttcagatagggagattcttgacaa

SEQ ID NO: 4380775 - DNA, 25 bp, Homo sapien
aagggatgccttgttatctgaatca

SEQ ID NO: 4380776 - DNA, 25 bp, Homo sapien
ttcttgacaagagagtttggatagc

SEQ ID NO: 4380777 - DNA, 25 bp, Homo sapien
tcgttggttctctgagttcagatag

SEQ ID NO: 4380778 - DNA, 25 bp, Homo sapien
atatcaccgttggtgaaagccaaga

SEQ ID NO: 4380779 - DNA, 25 bp, Homo sapien
cccatgatgagagcaatagtttata

SEQ ID NO: 4380780 - DNA, 25 bp, Homo sapien
ttagcgctctggaaaaatatcaccg

SEQ ID NO: 4380781 - DNA, 25 bp, Homo sapien
tctggaaaaatatcaccgttggtga

SEQ ID NO: 4380782 - DNA, 25 bp, Homo sapien
tttgttctgttctcaggcccaatag

SEQ ID NO: 4380783 - DNA, 25 bp, Homo sapien
agtgtcgggcccaatagctttgttc

SEQ ID NO: 4380784 - DNA, 25 bp, Homo sapien
ttctcaggcccaatagctttggaaa

SEQ ID NO: 4380785 - DNA, 25 bp, Homo sapien
gagtgtcgggcccaatagctttgtt

SEQ ID NO: 4380786 - DNA, 25 bp, Homo sapien
tagggtgctcattataggattagtg

SEQ ID NO: 4380787 - DNA, 25 bp, Homo sapien
gcctcctgtgctcacacaaacaggc

SEQ ID NO: 4380788 - DNA, 25 bp, Homo sapien
catgtgagcacacggtaagaaggtg

SEQ ID NO: 4380789 - DNA, 25 bp, Homo sapien
tagtggccttggaagaagagacacc

SEQ ID NO: 4380790 - DNA, 25 bp, Homo sapien
tatctaatgaccagctctctatgcc

SEQ ID NO: 4380791 - DNA, 25 bp, Homo sapien
caattatctaatgaccagctctcta

SEQ ID NO: 4380792 - DNA, 25 bp, Homo sapien
ctctctatgcctccctgtgatgcat

SEQ ID NO: 4380793 - DNA, 25 bp, Homo sapien
cacacaattatctaatgaccagctc

SEQ ID NO: 4380794 - DNA, 25 bp, Homo sapien
aagtaaatcttatcacccctttgca

SEQ ID NO: 4380795 - DNA, 25 bp, Homo sapien
tgctgtactatgtaaactgctactg

SEQ ID NO: 4380796 - DNA, 25 bp, Homo sapien
acttctagtaggtagtaatggtgtc

SEQ ID NO: 4380797 - DNA, 25 bp, Homo sapien
tcagagaatgacaggtaattaagtc

SEQ ID NO: 4380798 - DNA, 25 bp, Homo sapien
aatacagtgaagtccctgccccatg

SEQ ID NO: 4380799 - DNA, 25 bp, Homo sapien
caatgggctgcagcaatgttgctag

SEQ ID NO: 4380800 - DNA, 25 bp, Homo sapien
tgtgccaagcactggtccaggctct

SEQ ID NO: 4380801 - DNA, 25 bp, Homo sapien
gagggttcaaaacagcttagaggta

SEQ ID NO: 4380802 - DNA, 25 bp, Homo sapien
tatcaaagggtactctaacatccga

SEQ ID NO: 4380803 - DNA, 25 bp, Homo sapien
gaaatgttccctagctatgagatcc

SEQ ID NO: 4380804 - DNA, 25 bp, Homo sapien
ttgtaacttcactggaagccctggt

SEQ ID NO: 4380805 - DNA, 25 bp, Homo sapien
tagctttatgaaaacagggatcggc

SEQ ID NO: 4380806 - DNA, 25 bp, Homo sapien
taaagtctgccgtgttcgtacagtg

SEQ ID NO: 4380807 - DNA, 25 bp, Homo sapien
cagtgtcaatgttaccagaagtgcc

SEQ ID NO: 4380808 - DNA, 25 bp, Homo sapien
tacgagaatgcgtcaggcctggctt

SEQ ID NO: 4380809 - DNA, 25 bp, Homo sapien
ggctttggctatgacatccccagga

SEQ ID NO: 4380810 - DNA, 25 bp, Homo sapien
gaattgcaccaaaaatccacggatc

SEQ ID NO: 4380811 - DNA, 25 bp, Homo sapien
tggcctctttggtcccaacagaagg

SEQ ID NO: 4380812 - DNA, 25 bp, Homo sapien
tgggatcttccttagctaatacggg

SEQ ID NO: 4380813 - DNA, 25 bp, Homo sapien
agttcctcctcagctcgaatgggat

SEQ ID NO: 4380814 - DNA, 25 bp, Homo sapien
gagagactggaatgctgctaaagcc

SEQ ID NO: 4380815 - DNA, 25 bp, Homo sapien
gatgggcaactagctacttttcgaa

SEQ ID NO: 4380816 - DNA, 25 bp, Homo sapien
tcactagacatgtacaaaggctggg

SEQ ID NO: 4380817 - DNA, 25 bp, Homo sapien
taaccaggtgctaaggatgctgctg

SEQ ID NO: 4380818 - DNA, 25 bp, Homo sapien
gaagaatttgtcactcactggatcc

SEQ ID NO: 4380819 - DNA, 25 bp, Homo sapien
taaattgtagcatttcgagctgctg

SEQ ID NO: 4380820 - DNA, 25 bp, Homo sapien
tcgagctgctgttgaaacccacacc

SEQ ID NO: 4380821 - DNA, 25 bp, Homo sapien
gaatgtcctcacttgggtcatcaag

SEQ ID NO: 4380822 - DNA, 25 bp, Homo sapien
aacagggagcccatttaggagctac

SEQ ID NO: 4380823 - DNA, 25 bp, Homo sapien
gctgtagtcgcctttagctgagata

SEQ ID NO: 4380824 - DNA, 25 bp, Homo sapien
tagacatcagtgcagaggagtgaca

SEQ ID NO: 4380825 - DNA, 25 bp, Homo sapien
tacggctgctgtattgagaacacac

SEQ ID NO: 4380826 - DNA, 25 bp, Homo sapien
tgaatggacttatttaggatcgcac

SEQ ID NO: 4380827 - DNA, 25 bp, Homo sapien
ttcgacacctggagtcattttagac

SEQ ID NO: 4380828 - DNA, 25 bp, Homo sapien
tgccaaagatcagggatcttcgaca

SEQ ID NO: 4380829 - DNA, 25 bp, Homo sapien
tttaggatcgcacagctgaaacgag

SEQ ID NO: 4380830 - DNA, 25 bp, Homo sapien
taaagcactgtagccgaagtcctcg

SEQ ID NO: 4380831 - DNA, 25 bp, Homo sapien
tctgtatcttgcacaatgacagcca

SEQ ID NO: 4380832 - DNA, 25 bp, Homo sapien
gtcacgctttcccagcatgctgcgg

SEQ ID NO: 4380833 - DNA, 25 bp, Homo sapien
ggcaaaccggccagcttggtactct

SEQ ID NO: 4380834 - DNA, 25 bp, Homo sapien
tgtgtagcatgccaatagcttctgt

SEQ ID NO: 4380835 - DNA, 25 bp, Homo sapien
caatacctggttcattcaaggagtc

SEQ ID NO: 4380836 - DNA, 25 bp, Homo sapien
caggctctctgtaggctttaactca

SEQ ID NO: 4380837 - DNA, 25 bp, Homo sapien
ccttgtggcacaaaagattctaact

SEQ ID NO: 4380838 - DNA, 25 bp, Homo sapien
taacagtgttatcatcagcaattaa

SEQ ID NO: 4380839 - DNA, 25 bp, Homo sapien
cagcaattaacaacttgctgtggac

SEQ ID NO: 4380840 - DNA, 25 bp, Homo sapien
taggtttccttcgagctctgcatgt

SEQ ID NO: 4380841 - DNA, 25 bp, Homo sapien
tgctgtggacatagataagctcagt

SEQ ID NO: 4380842 - DNA, 25 bp, Homo sapien
taagaccacagaatgatatgtaatt

SEQ ID NO: 4380843 - DNA, 25 bp, Homo sapien
ctaagaccacagaatgatatgtaat

SEQ ID NO: 4380844 - DNA, 25 bp, Homo sapien
gaaatcacgtatgtgacacctccaa

SEQ ID NO: 4380845 - DNA, 25 bp, Homo sapien
tattttcagcgtaggtatcttccac

SEQ ID NO: 4380846 - DNA, 25 bp, Homo sapien
cactattattgtgggtttactgcaa

SEQ ID NO: 4380847 - DNA, 25 bp, Homo sapien
gattctcgactctattcagttgacc

SEQ ID NO: 4380848 - DNA, 25 bp, Homo sapien
taaaacctccagtacgatgttgaca

SEQ ID NO: 4380849 - DNA, 25 bp, Homo sapien
atttcactgaggaattctgtggtac

SEQ ID NO: 4380850 - DNA, 25 bp, Homo sapien
cttgtatcttgaaacactgctagac

SEQ ID NO: 4380851 - DNA, 25 bp, Homo sapien
cctgtgtattccaagtttgttgagg

SEQ ID NO: 4380852 - DNA, 25 bp, Homo sapien
tatctgtgaattcccaacatttcct

SEQ ID NO: 4380853 - DNA, 25 bp, Homo sapien
tccttaaatgcctgtaccaaatgag

SEQ ID NO: 4380854 - DNA, 25 bp, Homo sapien
ctatagctgcctctcataagtttgg

SEQ ID NO: 4380855 - DNA, 25 bp, Homo sapien
tgtgtgagggccacaggccttacat

SEQ ID NO: 4380856 - DNA, 25 bp, Homo sapien
tggttttcaccctgatttgagcagc

SEQ ID NO: 4380857 - DNA, 25 bp, Homo sapien
cccagggatatgttggaagtttcta

SEQ ID NO: 4380858 - DNA, 25 bp, Homo sapien
gttaaaatgccacaaagcttgctat

SEQ ID NO: 4380859 - DNA, 25 bp, Homo sapien
aactgtgggacatgggagccttaac

SEQ ID NO: 4380860 - DNA, 25 bp, Homo sapien
ttattacaggtgaacattttgtggg

SEQ ID NO: 4380861 - DNA, 25 bp, Homo sapien
cagagttctataatcacactgtgaa

SEQ ID NO: 4380862 - DNA, 25 bp, Homo sapien
tggtttgggcaacttaatgagaata

SEQ ID NO: 4380863 - DNA, 25 bp, Homo sapien
tataaacagagttctataatcacac

SEQ ID NO: 4380864 - DNA, 25 bp, Homo sapien
aggatggaattttctcctctgcaca

SEQ ID NO: 4380865 - DNA, 25 bp, Homo sapien
ctctgcttttaactgtccaaggatg

SEQ ID NO: 4380866 - DNA, 25 bp, Homo sapien
tctgcttttaactgtccaaggatgg

SEQ ID NO: 4380867 - DNA, 25 bp, Homo sapien
gcttttaactgtccaaggatggaat

SEQ ID NO: 4380868 - DNA, 25 bp, Homo sapien
gtatctgtaggtttaatcctaacac

SEQ ID NO: 4380869 - DNA, 25 bp, Homo sapien
catgcagtatctgtaggtttaatcc

SEQ ID NO: 4380870 - DNA, 25 bp, Homo sapien
tcaaaacaaccaatcccatgcagta

SEQ ID NO: 4380871 - DNA, 25 bp, Homo sapien
ccaatcccatgcagtatctgtaggt

SEQ ID NO: 4380872 - DNA, 25 bp, Homo sapien
gctcaaaatagaccatttagagttt

SEQ ID NO: 4380873 - DNA, 25 bp, Homo sapien
gatgcatgaccgaaagctcaaaata

SEQ ID NO: 4380874 - DNA, 25 bp, Homo sapien
aatagaccatttagagttttggcac

SEQ ID NO: 4380875 - DNA, 25 bp, Homo sapien
tgatgcatgaccgaaagctcaaaat

SEQ ID NO: 4380876 - DNA, 25 bp, Homo sapien
gaaatgtctccttcgaaccctggca

SEQ ID NO: 4380877 - DNA, 25 bp, Homo sapien
aagtgcatgattgcctgtagagcat

SEQ ID NO: 4380878 - DNA, 25 bp, Homo sapien
tggcagaagtggtatcacgacatat

SEQ ID NO: 4380879 - DNA, 25 bp, Homo sapien
tcctccgccggttgaaatgtctcct

SEQ ID NO: 4380880 - DNA, 25 bp, Homo sapien
tagctggcgctacaatcgtctgcca

SEQ ID NO: 4380881 - DNA, 25 bp, Homo sapien
ctggccagaacatagttacttttta

SEQ ID NO: 4380882 - DNA, 25 bp, Homo sapien
agtagctggcgctacaatcgtctgc

SEQ ID NO: 4380883 - DNA, 25 bp, Homo sapien
cgagtagctggcgctacaatcgtct

SEQ ID NO: 4380884 - DNA, 25 bp, Homo sapien
tgcgttcagcaaactagtggaaact

SEQ ID NO: 4380885 - DNA, 25 bp, Homo sapien
taacaagccctttgctattttacaa

SEQ ID NO: 4380886 - DNA, 25 bp, Homo sapien
tggaatttcaaacgcaaaattgtgg

SEQ ID NO: 4380887 - DNA, 25 bp, Homo sapien
taggactctcttagctccataacaa

SEQ ID NO: 4380888 - DNA, 25 bp, Homo sapien
tggcactctcacaagggaagcagga

SEQ ID NO: 4380889 - DNA, 25 bp, Homo sapien
taaaaatgaccgctatgaaggctca

SEQ ID NO: 4380890 - DNA, 25 bp, Homo sapien
tactgtgttaaaatggccccaatgc

SEQ ID NO: 4380891 - DNA, 25 bp, Homo sapien
cccactctgtgaccggagaaacgaa

SEQ ID NO: 4380892 - DNA, 25 bp, Homo sapien
cgttcagcagctatgcgatgtggca

SEQ ID NO: 4380893 - DNA, 25 bp, Homo sapien
ccagggccccatagcattaagatca

SEQ ID NO: 4380894 - DNA, 25 bp, Homo sapien
gacgtccccaagctacgttaagcag

SEQ ID NO: 4380895 - DNA, 25 bp, Homo sapien
ttaagcagatgccagaacaggccgg

SEQ ID NO: 4380896 - DNA, 25 bp, Homo sapien
gaacaacagccagtcgtgagaaacc

SEQ ID NO: 4380897 - DNA, 25 bp, Homo sapien
cagagtgttgtaatcgtgtgcctaa

SEQ ID NO: 4380898 - DNA, 25 bp, Homo sapien
gaagaaacagcgtgtcagaaggaca

SEQ ID NO: 4380899 - DNA, 25 bp, Homo sapien
tcttatccagaagtagccgtccaat

SEQ ID NO: 4380900 - DNA, 25 bp, Homo sapien
tacttagaccagtccagggagttgg

SEQ ID NO: 4380901 - DNA, 25 bp, Homo sapien
taagtttgggatggcacatcatggc

SEQ ID NO: 4380902 - DNA, 25 bp, Homo sapien
ggctggattccaacgctggcagaaa

SEQ ID NO: 4380903 - DNA, 25 bp, Homo sapien
gcctggctgactgcggactgtcatt

SEQ ID NO: 4380904 - DNA, 25 bp, Homo sapien
gcctatcttgttgaacacaactttg

SEQ ID NO: 4380905 - DNA, 25 bp, Homo sapien
aatggcatcgcctatcttgttgaac

SEQ ID NO: 4380906 - DNA, 25 bp, Homo sapien
tgttgaacacaactttgtcatcagc

SEQ ID NO: 4380907 - DNA, 25 bp, Homo sapien
tctgggcaatggcatcgcctatctt

SEQ ID NO: 4380908 - DNA, 25 bp, Homo sapien
tttataccagcagaccaatcagcag

SEQ ID NO: 4380909 - DNA, 25 bp, Homo sapien
gcgtggatggactcttcatggtact

SEQ ID NO: 4380910 - DNA, 25 bp, Homo sapien
tcatggtactttataccagcagacc

SEQ ID NO: 4380911 - DNA, 25 bp, Homo sapien
tctctatcacatggacgtaagcggc

SEQ ID NO: 4380912 - DNA, 25 bp, Homo sapien
tccaggctgtattactcgagcttct

SEQ ID NO: 4380913 - DNA, 25 bp, Homo sapien
ctgtccaggctgtattactcgagct

SEQ ID NO: 4380914 - DNA, 25 bp, Homo sapien
attactcgagcttcttctcgctcag

SEQ ID NO: 4380915 - DNA, 25 bp, Homo sapien
gctgtattactcgagcttcttctcg

SEQ ID NO: 4380916 - DNA, 25 bp, Homo sapien
gcttcagcatcatctatcccattgc

SEQ ID NO: 4380917 - DNA, 25 bp, Homo sapien
ctcctgaggggcttcagcatcatct

SEQ ID NO: 4380918 - DNA, 25 bp, Homo sapien
cagcatcatctatcccattgcctga

SEQ ID NO: 4380919 - DNA, 25 bp, Homo sapien
catctatcccattgcctgagtccaa

SEQ ID NO: 4380920 - DNA, 25 bp, Homo sapien
cttctctgagtgctcttggcaggct

SEQ ID NO: 4380921 - DNA, 25 bp, Homo sapien
tgtgtagaagcagtttcaggaccat

SEQ ID NO: 4380922 - DNA, 25 bp, Homo sapien
agcagtttcaggaccatctctccca

SEQ ID NO: 4380923 - DNA, 25 bp, Homo sapien
gctacccatgccttttcctgccatg

SEQ ID NO: 4380924 - DNA, 25 bp, Homo sapien
agccttaactccagccagtctgtag

SEQ ID NO: 4380925 - DNA, 25 bp, Homo sapien
tactttaggcactgagatggcaaaa

SEQ ID NO: 4380926 - DNA, 25 bp, Homo sapien
gccagtctgtaggagattttacttt

SEQ ID NO: 4380927 - DNA, 25 bp, Homo sapien
ggagattttactttaggcactgaga

SEQ ID NO: 4380928 - DNA, 25 bp, Homo sapien
ctgtacgttagcatggacagaccca

SEQ ID NO: 4380929 - DNA, 25 bp, Homo sapien
cagacccaggcacttgatatctcaa

SEQ ID NO: 4380930 - DNA, 25 bp, Homo sapien
gaaagggaccgatattttgatttca

SEQ ID NO: 4380931 - DNA, 25 bp, Homo sapien
ttagcatggacagacccaggcactt

SEQ ID NO: 4380932 - DNA, 25 bp, Homo sapien
tccggggcgtggagtacctgtcaat

SEQ ID NO: 4380933 - DNA, 25 bp, Homo sapien
atcacgagccgccttcccgtggact

SEQ ID NO: 4380934 - DNA, 25 bp, Homo sapien
gcgctggatgaagtgacgtgccaca

SEQ ID NO: 4380935 - DNA, 25 bp, Homo sapien
agaggcaatgtcatgccagggcatc

SEQ ID NO: 4380936 - DNA, 25 bp, Homo sapien
tagtcctttccatgccagaatctgg

SEQ ID NO: 4380937 - DNA, 25 bp, Homo sapien
cagcaaaaggtttatcaagttgaac

SEQ ID NO: 4380938 - DNA, 25 bp, Homo sapien
tatcaagttgaacccagtctttgaa

SEQ ID NO: 4380939 - DNA, 25 bp, Homo sapien
aagacgaaattgcagtagtcctttc

SEQ ID NO: 4380940 - DNA, 25 bp, Homo sapien
cacaactagggtggcatctgtccat

SEQ ID NO: 4380941 - DNA, 25 bp, Homo sapien
tttcttaagacacaactagggtggc

SEQ ID NO: 4380942 - DNA, 25 bp, Homo sapien
gcaagaccccctcagagactgtggt

SEQ ID NO: 4380943 - DNA, 25 bp, Homo sapien
taagacacaactagggtggcatctg

SEQ ID NO: 4380944 - DNA, 25 bp, Homo sapien
cattgtttacctagttccctccaga

SEQ ID NO: 4380945 - DNA, 25 bp, Homo sapien
aggtcacttccagtgcctcacttga

SEQ ID NO: 4380946 - DNA, 25 bp, Homo sapien
tgctgtctgtgtgtagtaactcaag

SEQ ID NO: 4380947 - DNA, 25 bp, Homo sapien
gttttggactccaaatctaaggtca

SEQ ID NO: 4380948 - DNA, 25 bp, Homo sapien
tctgtggatcaatgatgactcttgc

SEQ ID NO: 4380949 - DNA, 25 bp, Homo sapien
taatattatcccttgtgacgagaca

SEQ ID NO: 4380950 - DNA, 25 bp, Homo sapien
tgtagtatctacctaaaatgcctgt

SEQ ID NO: 4380951 - DNA, 25 bp, Homo sapien
gactcttgcagtaggagtatcttcc

SEQ ID NO: 4380952 - DNA, 25 bp, Homo sapien
gtctagtgagtccttgctcagactc

SEQ ID NO: 4380953 - DNA, 25 bp, Homo sapien
aggtctagtgagtccttgctcagac

SEQ ID NO: 4380954 - DNA, 25 bp, Homo sapien
ggtctagtgagtccttgctcagact

SEQ ID NO: 4380955 - DNA, 25 bp, Homo sapien
gaggtctagtgagtccttgctcaga

SEQ ID NO: 4380956 - DNA, 25 bp, Homo sapien
aaaccatggattaaattgtgatgac

SEQ ID NO: 4380957 - DNA, 25 bp, Homo sapien
tggattaaattgtgatgacttctat

SEQ ID NO: 4380958 - DNA, 25 bp, Homo sapien
ttttaaaccatggattaaattgtga

SEQ ID NO: 4380959 - DNA, 25 bp, Homo sapien
ctggacgggtgaaagagtttgaagt

SEQ ID NO: 4380960 - DNA, 25 bp, Homo sapien
aagataaattctagtcaaggccatg

SEQ ID NO: 4380961 - DNA, 25 bp, Homo sapien
ccaggcagggctataacatcagtct

SEQ ID NO: 4380962 - DNA, 25 bp, Homo sapien
taaaaacaggtatgtagtgtctggc

SEQ ID NO: 4380963 - DNA, 25 bp, Homo sapien
tagaatgatatagcgacctctcaac

SEQ ID NO: 4380964 - DNA, 25 bp, Homo sapien
tatctgcgtcgtgcaggtggtgcct

SEQ ID NO: 4380965 - DNA, 25 bp, Homo sapien
gctgcttgtagagactaaatttgga

SEQ ID NO: 4380966 - DNA, 25 bp, Homo sapien
tgctgatgctatctgcgtcgtgcag

SEQ ID NO: 4380967 - DNA, 25 bp, Homo sapien
tgcttgtagagactaaatttggaga

SEQ ID NO: 4380968 - DNA, 25 bp, Homo sapien
gattccatagactccattgcggcag

SEQ ID NO: 4380969 - DNA, 25 bp, Homo sapien
taggttttgaacaggctcattttta

SEQ ID NO: 4380970 - DNA, 25 bp, Homo sapien
ctttgagtcttaaggattccataga

SEQ ID NO: 4380971 - DNA, 25 bp, Homo sapien
gatgggtaggttttgaacaggctca

SEQ ID NO: 4380972 - DNA, 25 bp, Homo sapien
atacatttccataaaggttaaatat

SEQ ID NO: 4380973 - DNA, 25 bp, Homo sapien
catttccataaaggttaaatatact

SEQ ID NO: 4380974 - DNA, 25 bp, Homo sapien
tacatttccataaaggttaaatata

SEQ ID NO: 4380975 - DNA, 25 bp, Homo sapien
tatacatttccataaaggttaaata

SEQ ID NO: 4380976 - DNA, 25 bp, Homo sapien
ccacaaaggccaccgattggtcaat

SEQ ID NO: 4380977 - DNA, 25 bp, Homo sapien
tagacggtggatgacacatgatccg

SEQ ID NO: 4380978 - DNA, 25 bp, Homo sapien
tggtgagcccacaaatagacggtgg

SEQ ID NO: 4380979 - DNA, 25 bp, Homo sapien
gatgacaagcttctcatggtgagcc

SEQ ID NO: 4380980 - DNA, 25 bp, Homo sapien
gatactagtttagccactcttgctc

SEQ ID NO: 4380981 - DNA, 25 bp, Homo sapien
tggtttactgtacgttcaagtcctc

SEQ ID NO: 4380982 - DNA, 25 bp, Homo sapien
aaatgccccaagtgcacttgagaag

SEQ ID NO: 4380983 - DNA, 25 bp, Homo sapien
tgtatgcccattggatccagttggt

SEQ ID NO: 4380984 - DNA, 25 bp, Homo sapien
gaggagatctctttgctgctatcag

SEQ ID NO: 4380985 - DNA, 25 bp, Homo sapien
taaggcattttaaatcctagaggag

SEQ ID NO: 4380986 - DNA, 25 bp, Homo sapien
tcttgatgtacctcaatgactgggt

SEQ ID NO: 4380987 - DNA, 25 bp, Homo sapien
tacatattttaagcctgctggaggt

SEQ ID NO: 4380988 - DNA, 25 bp, Homo sapien
tagacgcatcaaagtcctcttggtg

SEQ ID NO: 4380989 - DNA, 25 bp, Homo sapien
gagcattatgaagatcctcactcct

SEQ ID NO: 4380990 - DNA, 25 bp, Homo sapien
tattgatgccaagagcgagttccac

SEQ ID NO: 4380991 - DNA, 25 bp, Homo sapien
ctttatgttgggatgtagacgcatc

SEQ ID NO: 4380992 - DNA, 25 bp, Homo sapien
gtgccttgtagatgctaacatgcta

SEQ ID NO: 4380993 - DNA, 25 bp, Homo sapien
agtgccttgtagatgctaacatgct

SEQ ID NO: 4380994 - DNA, 25 bp, Homo sapien
attaaatcaaaagtgccttgtagat

SEQ ID NO: 4380995 - DNA, 25 bp, Homo sapien
tgccttgtagatgctaacatgctat

SEQ ID NO: 4380996 - DNA, 25 bp, Homo sapien
gaccaggtccaatagctaatagtat

SEQ ID NO: 4380997 - DNA, 25 bp, Homo sapien
gacaggctttcaggctaggctaaac

SEQ ID NO: 4380998 - DNA, 25 bp, Homo sapien
cacacaagcgtgagatgtgccacac

SEQ ID NO: 4380999 - DNA, 25 bp, Homo sapien
ccattctagttctggttggtgacag

SEQ ID NO: 4381000 - DNA, 25 bp, Homo sapien
tcagctgacccaaagtttccataga

SEQ ID NO: 4381001 - DNA, 25 bp, Homo sapien
aaacatcccatgctttagtgcctag

SEQ ID NO: 4381002 - DNA, 25 bp, Homo sapien
cttatctctggtgaactcagctgac

SEQ ID NO: 4381003 - DNA, 25 bp, Homo sapien
tagaaaaacagatggcctggagttg

SEQ ID NO: 4381004 - DNA, 25 bp, Homo sapien
tgcttttcgtttaagaatgcagtcc

SEQ ID NO: 4381005 - DNA, 25 bp, Homo sapien
ccctcaaccactgggcgtttcagga

SEQ ID NO: 4381006 - DNA, 25 bp, Homo sapien
gtccaacctccaacgatttccctca

SEQ ID NO: 4381007 - DNA, 25 bp, Homo sapien
cgtttaagaatgcagtccaacctcc

SEQ ID NO: 4381008 - DNA, 25 bp, Homo sapien
tgaacagcactataccactgtacat

SEQ ID NO: 4381009 - DNA, 25 bp, Homo sapien
tttcactgaaggcttagtcaactgg

SEQ ID NO: 4381010 - DNA, 25 bp, Homo sapien
cataatgtgtaattcttgaacagca

SEQ ID NO: 4381011 - DNA, 25 bp, Homo sapien
ggccaaaccatccacagatacagct

SEQ ID NO: 4381012 - DNA, 25 bp, Homo sapien
cagtctgtgataaaaatctcttcat

SEQ ID NO: 4381013 - DNA, 25 bp, Homo sapien
tgcctcttccattgcatttgccaca

SEQ ID NO: 4381014 - DNA, 25 bp, Homo sapien
ttcatttgcctcttccattgcattt

SEQ ID NO: 4381015 - DNA, 25 bp, Homo sapien
ctcttccattgcatttgccacatct

SEQ ID NO: 4381016 - DNA, 25 bp, Homo sapien
tggtgccatgtttctggatgaattc

SEQ ID NO: 4381017 - DNA, 25 bp, Homo sapien
aatcgatgatctttgagaaagttgg

SEQ ID NO: 4381018 - DNA, 25 bp, Homo sapien
tagcagcatatgacccaaatcgatg

SEQ ID NO: 4381019 - DNA, 25 bp, Homo sapien
taaagcattctcttggatagcagca

SEQ ID NO: 4381020 - DNA, 25 bp, Homo sapien
ttaagtattagttagagagctgttg

SEQ ID NO: 4381021 - DNA, 25 bp, Homo sapien
tccacggatgatggggagtagtttc

SEQ ID NO: 4381022 - DNA, 25 bp, Homo sapien
tgttggctcccgtacagcagcggtc

SEQ ID NO: 4381023 - DNA, 25 bp, Homo sapien
agctgttggctcccgtacagcagcg

SEQ ID NO: 4381024 - DNA, 25 bp, Homo sapien
gctaccacaagggaatcagtcatgc

SEQ ID NO: 4381025 - DNA, 25 bp, Homo sapien
ctaccacaagggaatcagtcatgct

SEQ ID NO: 4381026 - DNA, 25 bp, Homo sapien
atttggcaatgacatacgggtaagt

SEQ ID NO: 4381027 - DNA, 25 bp, Homo sapien
tggccaataaagtaagggaccagtg

SEQ ID NO: 4381028 - DNA, 25 bp, Homo sapien
agtggccaataaagtaagggaccag

SEQ ID NO: 4381029 - DNA, 25 bp, Homo sapien
tggcaatgacatacgggtaagtgag

SEQ ID NO: 4381030 - DNA, 25 bp, Homo sapien
ctaccagcaggacgaaggcaatggc

SEQ ID NO: 4381031 - DNA, 25 bp, Homo sapien
gaaagattatcaattcggattccat

SEQ ID NO: 4381032 - DNA, 25 bp, Homo sapien
gattccatatttcgtttctgtctcc

SEQ ID NO: 4381033 - DNA, 25 bp, Homo sapien
gcaccgctgtctggtttcatataca

SEQ ID NO: 4381034 - DNA, 25 bp, Homo sapien
cagctaaggagttctgggagacagt

SEQ ID NO: 4381035 - DNA, 25 bp, Homo sapien
tgctcctgggagctgttgacacttc

SEQ ID NO: 4381036 - DNA, 25 bp, Homo sapien
gctggactccgatcagttcttggct

SEQ ID NO: 4381037 - DNA, 25 bp, Homo sapien
agccagctaaggagttctgggagac

SEQ ID NO: 4381038 - DNA, 25 bp, Homo sapien
ctgtgtcctccagatcttttcatta

SEQ ID NO: 4381039 - DNA, 25 bp, Homo sapien
tctgtgtcctccagatcttttcatt

SEQ ID NO: 4381040 - DNA, 25 bp, Homo sapien
cacagcaattcaagcctggtattct

SEQ ID NO: 4381041 - DNA, 25 bp, Homo sapien
ccacagcaattcaagcctggtattc

SEQ ID NO: 4381042 - DNA, 25 bp, Homo sapien
ccaaatcatggatgaaagacagctg

SEQ ID NO: 4381043 - DNA, 25 bp, Homo sapien
tttggtcccaaatcatggatgaaag

SEQ ID NO: 4381044 - DNA, 25 bp, Homo sapien
cctttggtcccaaatcatggatgaa

SEQ ID NO: 4381045 - DNA, 25 bp, Homo sapien
atgccctttggtcccaaatcatgga

SEQ ID NO: 4381046 - DNA, 25 bp, Homo sapien
catgatagtttctatacatgggcat

SEQ ID NO: 4381047 - DNA, 25 bp, Homo sapien
tgtggcatgatagtttctatacatg

SEQ ID NO: 4381048 - DNA, 25 bp, Homo sapien
agtatctttgtcaagtaatcttcca

SEQ ID NO: 4381049 - DNA, 25 bp, Homo sapien
gatagtttctatacatgggcatttt

SEQ ID NO: 4381050 - DNA, 25 bp, Homo sapien
actgggcatctctcgaggctcctct

SEQ ID NO: 4381051 - DNA, 25 bp, Homo sapien
tcctctctgacgttttgcctcctaa

SEQ ID NO: 4381052 - DNA, 25 bp, Homo sapien
tgaacggggcaaactgggcatctct

SEQ ID NO: 4381053 - DNA, 25 bp, Homo sapien
tctctgacgttttgcctcctaaacg

SEQ ID NO: 4381054 - DNA, 25 bp, Homo sapien
gaatttcctcttaacttgccattta

SEQ ID NO: 4381055 - DNA, 25 bp, Homo sapien
tttaaattccccatgtgttaattca

SEQ ID NO: 4381056 - DNA, 25 bp, Homo sapien
tagtgtaaagattaatacttggtac

SEQ ID NO: 4381057 - DNA, 25 bp, Homo sapien
tgcttgaatttcctcttaacttgcc

SEQ ID NO: 4381058 - DNA, 25 bp, Homo sapien
ccttgttgtagatgtgaagcgttcc

SEQ ID NO: 4381059 - DNA, 25 bp, Homo sapien
ccagaacttgtgcttttattggaca

SEQ ID NO: 4381060 - DNA, 25 bp, Homo sapien
ggagagatacgtctgtatattaggc

SEQ ID NO: 4381061 - DNA, 25 bp, Homo sapien
tagatgtgaagcgttccacttccag

SEQ ID NO: 4381062 - DNA, 25 bp, Homo sapien
cttgagtgttataaatagcagagaa

SEQ ID NO: 4381063 - DNA, 25 bp, Homo sapien
ataaatagcagagaaagggatatac

SEQ ID NO: 4381064 - DNA, 25 bp, Homo sapien
gttataaatagcagagaaagggata

SEQ ID NO: 4381065 - DNA, 25 bp, Homo sapien
taaatagcagagaaagggatataca

SEQ ID NO: 4381066 - DNA, 25 bp, Homo sapien
cagtgcagaggtatttacccgtggc

SEQ ID NO: 4381067 - DNA, 25 bp, Homo sapien
gagttcccgcgtgtccagattttct

SEQ ID NO: 4381068 - DNA, 25 bp, Homo sapien
acccgtggctcgtttttcagtgaca

SEQ ID NO: 4381069 - DNA, 25 bp, Homo sapien
gatcgctgggagacacgtcgtagtc

SEQ ID NO: 4381070 - DNA, 25 bp, Homo sapien
ctttggacagagtaaaagcaaaggg

SEQ ID NO: 4381071 - DNA, 25 bp, Homo sapien
aacattgccttagccaaaatacaat

SEQ ID NO: 4381072 - DNA, 25 bp, Homo sapien
gatgaagctggtgatcaatttgatc

SEQ ID NO: 4381073 - DNA, 25 bp, Homo sapien
caataactttaggagctgggtccca

SEQ ID NO: 4381074 - DNA, 25 bp, Homo sapien
gcatttttaatgagtagcttagaga

SEQ ID NO: 4381075 - DNA, 25 bp, Homo sapien
ggctggttatgcaatccttccttgg

SEQ ID NO: 4381076 - DNA, 25 bp, Homo sapien
atagcgctctccacttttctcacaa

SEQ ID NO: 4381077 - DNA, 25 bp, Homo sapien
acttttctcacaacagtggctcctg

SEQ ID NO: 4381078 - DNA, 25 bp, Homo sapien
ctctccctggctggttatgcaatcc

SEQ ID NO: 4381079 - DNA, 25 bp, Homo sapien
caaccctactatgcaaccttagagg

SEQ ID NO: 4381080 - DNA, 25 bp, Homo sapien
taagtgactgtaagggtcacccaac

SEQ ID NO: 4381081 - DNA, 25 bp, Homo sapien
ttagaggctctatacaggaaacttg

SEQ ID NO: 4381082 - DNA, 25 bp, Homo sapien
tacaacagacctatgaagtaactgc

SEQ ID NO: 4381083 - DNA, 25 bp, Homo sapien
ataataggtagataagacttgccct

SEQ ID NO: 4381084 - DNA, 25 bp, Homo sapien
taaacaatgctgagactattggcaa

SEQ ID NO: 4381085 - DNA, 25 bp, Homo sapien
tctacctcaaagctccaataagaat

SEQ ID NO: 4381086 - DNA, 25 bp, Homo sapien
gacttgccctatcaggtagatcaat

SEQ ID NO: 4381087 - DNA, 25 bp, Homo sapien
aattacacatatgttcccttctacc

SEQ ID NO: 4381088 - DNA, 25 bp, Homo sapien
tgtttccaaccgtcctctcattatt

SEQ ID NO: 4381089 - DNA, 25 bp, Homo sapien
atatgttcccttctaccgcttctct

SEQ ID NO: 4381090 - DNA, 25 bp, Homo sapien
tatttcatcagtcaactccctcatc

SEQ ID NO: 4381091 - DNA, 25 bp, Homo sapien
ggtaagttctgaatggtgttagctt

SEQ ID NO: 4381092 - DNA, 25 bp, Homo sapien
ttaggtaagttctgaatggtgttag

SEQ ID NO: 4381093 - DNA, 25 bp, Homo sapien
ttctgaatggtgttagctttgagtt

SEQ ID NO: 4381094 - DNA, 25 bp, Homo sapien
agttctgaatggtgttagctttgag

SEQ ID NO: 4381095 - DNA, 25 bp, Homo sapien
gctgatagccaagaggtggcaaaat

SEQ ID NO: 4381096 - DNA, 25 bp, Homo sapien
gaaagcagttgctccatatcacctt

SEQ ID NO: 4381097 - DNA, 25 bp, Homo sapien
gaaagaatccttactatgaaaccaa

SEQ ID NO: 4381098 - DNA, 25 bp, Homo sapien
tggcaaaatcgactaccctgagaat

SEQ ID NO: 4381099 - DNA, 25 bp, Homo sapien
gttgtacaaaatgcagcacccaaga

SEQ ID NO: 4381100 - DNA, 25 bp, Homo sapien
tggttgtacaaaatgcagcacccaa

SEQ ID NO: 4381101 - DNA, 25 bp, Homo sapien
agaacttcatgaccatattatcaac

SEQ ID NO: 4381102 - DNA, 25 bp, Homo sapien
ggttgtacaaaatgcagcacccaag

SEQ ID NO: 4381103 - DNA, 25 bp, Homo sapien
tgaatgtcatcatacccagaaaata

SEQ ID NO: 4381104 - DNA, 25 bp, Homo sapien
tgttaatattcatggtatggtgtgg

SEQ ID NO: 4381105 - DNA, 25 bp, Homo sapien
gaatgtcatcatacccagaaaataa

SEQ ID NO: 4381106 - DNA, 25 bp, Homo sapien
tcatggtatggtgtggtatgtgtat

SEQ ID NO: 4381107 - DNA, 25 bp, Homo sapien
tttccttaatgcatgggattcctgg

SEQ ID NO: 4381108 - DNA, 25 bp, Homo sapien
ggttttctaatatcccgtctctcta

SEQ ID NO: 4381109 - DNA, 25 bp, Homo sapien
aataaaccaagcagtttgcctctgg

SEQ ID NO: 4381110 - DNA, 25 bp, Homo sapien
gattcctggattactcgtatacctg

SEQ ID NO: 4381111 - DNA, 25 bp, Homo sapien
ctgcttgtggttatctacgttcata

SEQ ID NO: 4381112 - DNA, 25 bp, Homo sapien
cagtttattcctggacaaaagagct

SEQ ID NO: 4381113 - DNA, 25 bp, Homo sapien
tgtcaagatgatgacgaaactcagt

SEQ ID NO: 4381114 - DNA, 25 bp, Homo sapien
tgaacactcatccaggaaagtactg

SEQ ID NO: 4381115 - DNA, 25 bp, Homo sapien
tctatctacaggcagacaagggagg

SEQ ID NO: 4381116 - DNA, 25 bp, Homo sapien
aaaagctggcaaactcatggaggag

SEQ ID NO: 4381117 - DNA, 25 bp, Homo sapien
agggccaactcaccaatgcacagga

SEQ ID NO: 4381118 - DNA, 25 bp, Homo sapien
taaggcgtttcagatccactcttgg

SEQ ID NO: 4381119 - DNA, 25 bp, Homo sapien
tgatgagttcacaatggctgatgac

SEQ ID NO: 4381120 - DNA, 25 bp, Homo sapien
tttgatgagttcacaatggctgatg

SEQ ID NO: 4381121 - DNA, 25 bp, Homo sapien
gatgagttcacaatggctgatgacc

SEQ ID NO: 4381122 - DNA, 25 bp, Homo sapien
tgagttcacaatggctgatgaccct

SEQ ID NO: 4381123 - DNA, 25 bp, Homo sapien
cacgtagggtcaaaggatattctct

SEQ ID NO: 4381124 - DNA, 25 bp, Homo sapien
taatagtatgtgatgtggctgggct

SEQ ID NO: 4381125 - DNA, 25 bp, Homo sapien
ggctgaaccacattgcccagaattc

SEQ ID NO: 4381126 - DNA, 25 bp, Homo sapien
ttgtaggcttccacgtagggtcaaa

SEQ ID NO: 4381127 - DNA, 25 bp, Homo sapien
caatctcttgcaataatggccagga

SEQ ID NO: 4381128 - DNA, 25 bp, Homo sapien
tactggaattatgagacagggcctg

SEQ ID NO: 4381129 - DNA, 25 bp, Homo sapien
tgtttagccagtcccacaattgagg

SEQ ID NO: 4381130 - DNA, 25 bp, Homo sapien
gacctcttggcgtggaatcacccag

SEQ ID NO: 4381131 - DNA, 25 bp, Homo sapien
tgaaggcccagtgcctagtgaactg

SEQ ID NO: 4381132 - DNA, 25 bp, Homo sapien
gaactcgacctagtctacctgtaga

SEQ ID NO: 4381133 - DNA, 25 bp, Homo sapien
tataagcataaacacaatgggccga

SEQ ID NO: 4381134 - DNA, 25 bp, Homo sapien
tatgcaccctgtacctccgttattg

SEQ ID NO: 4381135 - DNA, 25 bp, Homo sapien
ccagctgatctgcaaggtgagaagg

SEQ ID NO: 4381136 - DNA, 25 bp, Homo sapien
gacacgaaggtctcgctgagcaaac

SEQ ID NO: 4381137 - DNA, 25 bp, Homo sapien
tgggtggccccaaatgagattctta

SEQ ID NO: 4381138 - DNA, 25 bp, Homo sapien
tttctgcagggcacataccaggttc

SEQ ID NO: 4381139 - DNA, 25 bp, Homo sapien
tcatttgaaccctcatgctggcagg

SEQ ID NO: 4381140 - DNA, 25 bp, Homo sapien
tggcccacggtcatcaacaaggaag

SEQ ID NO: 4381141 - DNA, 25 bp, Homo sapien
ttgaaggtcctacggatccacgtgg

SEQ ID NO: 4381142 - DNA, 25 bp, Homo sapien
caccgagtgactggcaatgctggca

SEQ ID NO: 4381143 - DNA, 25 bp, Homo sapien
cttgtaagtttcacgatggctgtcc

SEQ ID NO: 4381144 - DNA, 25 bp, Homo sapien
tttccttgtaagtttcacgatggct

SEQ ID NO: 4381145 - DNA, 25 bp, Homo sapien
tccttgtaagtttcacgatggctgt

SEQ ID NO: 4381146 - DNA, 25 bp, Homo sapien
gtaagtttcacgatggctgtcctgt

SEQ ID NO: 4381147 - DNA, 25 bp, Homo sapien
taatggtcactagcatgagaaagag

SEQ ID NO: 4381148 - DNA, 25 bp, Homo sapien
taggtgaaatcaggtgacagtgtca

SEQ ID NO: 4381149 - DNA, 25 bp, Homo sapien
ggtctgtctagccaggtcccaaggc

SEQ ID NO: 4381150 - DNA, 25 bp, Homo sapien
ccttggccctaggaaatcaggcgta

SEQ ID NO: 4381151 - DNA, 25 bp, Homo sapien
cactcttttttaggaggactgtgtc

SEQ ID NO: 4381152 - DNA, 25 bp, Homo sapien
gtcctgagagctaagccacacacag

SEQ ID NO: 4381153 - DNA, 25 bp, Homo sapien
caggcatcggagcacaaaggtttca

SEQ ID NO: 4381154 - DNA, 25 bp, Homo sapien
gctgggatgggcctcacactctttt

SEQ ID NO: 4381155 - DNA, 25 bp, Homo sapien
tctctgaaaacgacaggaggcattc

SEQ ID NO: 4381156 - DNA, 25 bp, Homo sapien
tatttctcatcagttgagagcagca

SEQ ID NO: 4381157 - DNA, 25 bp, Homo sapien
aacgacaggaggcattcacatagaa

SEQ ID NO: 4381158 - DNA, 25 bp, Homo sapien
tttatttctcatcagttgagagcag

SEQ ID NO: 4381159 - DNA, 25 bp, Homo sapien
ggactgagtctacaagggcggttct

SEQ ID NO: 4381160 - DNA, 25 bp, Homo sapien
caaatacaggcgtggcggtagttca

SEQ ID NO: 4381161 - DNA, 25 bp, Homo sapien
ggcggttctcaagggcgtcacaaaa

SEQ ID NO: 4381162 - DNA, 25 bp, Homo sapien
caatcgtattgtgaggaagaagacc

SEQ ID NO: 4381163 - DNA, 25 bp, Homo sapien
ccggattcgccccggattcgcaggg

SEQ ID NO: 4381164 - DNA, 25 bp, Homo sapien
gatcgcccgcgttccttgttctctt

SEQ ID NO: 4381165 - DNA, 25 bp, Homo sapien
caggtctcgcgactgggcctctgat

SEQ ID NO: 4381166 - DNA, 25 bp, Homo sapien
ggcaggaactctccgcccggattcg

SEQ ID NO: 4381167 - DNA, 25 bp, Homo sapien
taagagactggagctttgctggagt

SEQ ID NO: 4381168 - DNA, 25 bp, Homo sapien
ttaagagactggagctttgctggag

SEQ ID NO: 4381169 - DNA, 25 bp, Homo sapien
gctttgctggagtctttataagcct

SEQ ID NO: 4381170 - DNA, 25 bp, Homo sapien
attaagagactggagctttgctgga

SEQ ID NO: 4381171 - DNA, 25 bp, Homo sapien
aacatccgtttctcgtatcgtgcca

SEQ ID NO: 4381172 - DNA, 25 bp, Homo sapien
tttatgtcaatctgcgctgtgtgga

SEQ ID NO: 4381173 - DNA, 25 bp, Homo sapien
tggaagtcccacaaacatccgtttc

SEQ ID NO: 4381174 - DNA, 25 bp, Homo sapien
gggcttacgtactaggaaaatgtga

SEQ ID NO: 4381175 - DNA, 25 bp, Homo sapien
ggaaacaagagtgatacgactttat

SEQ ID NO: 4381176 - DNA, 25 bp, Homo sapien
tcatccctttccaagaagatgggaa

SEQ ID NO: 4381177 - DNA, 25 bp, Homo sapien
gggaaacaagagtgatacgacttta

SEQ ID NO: 4381178 - DNA, 25 bp, Homo sapien
gaaacaagagtgatacgactttatg

SEQ ID NO: 4381179 - DNA, 25 bp, Homo sapien
cccgaaactgggtgtctagtccact

SEQ ID NO: 4381180 - DNA, 25 bp, Homo sapien
aactgggtgtctagtccacttacca

SEQ ID NO: 4381181 - DNA, 25 bp, Homo sapien
tccagtgtctgggtgcccgatgagt

SEQ ID NO: 4381182 - DNA, 25 bp, Homo sapien
ccgatgagtaatgcccgaaactggg

SEQ ID NO: 4381183 - DNA, 25 bp, Homo sapien
aactttgtagtctccctcattgggc

SEQ ID NO: 4381184 - DNA, 25 bp, Homo sapien
catggcttcaaaagtcacctattgg

SEQ ID NO: 4381185 - DNA, 25 bp, Homo sapien
gctctttgtgccctatgacatgcca

SEQ ID NO: 4381186 - DNA, 25 bp, Homo sapien
tcattcttccagtcaaccaaggaag

SEQ ID NO: 4381187 - DNA, 25 bp, Homo sapien
ttctgttcctaggttagtttgtcta

SEQ ID NO: 4381188 - DNA, 25 bp, Homo sapien
gaaaagagcctccagatccatctat

SEQ ID NO: 4381189 - DNA, 25 bp, Homo sapien
tctcatgatttagctaccactcata

SEQ ID NO: 4381190 - DNA, 25 bp, Homo sapien
ctctttctttgttacggctgtatag

SEQ ID NO: 4381191 - DNA, 25 bp, Homo sapien
aaaatatatcaggattaccaacacc

SEQ ID NO: 4381192 - DNA, 25 bp, Homo sapien
taccaacacctacttgatgatcagt

SEQ ID NO: 4381193 - DNA, 25 bp, Homo sapien
acttgatgatcagtttcaaagatgg

SEQ ID NO: 4381194 - DNA, 25 bp, Homo sapien
atagcttacttgatttgatccccac

SEQ ID NO: 4381195 - DNA, 25 bp, Homo sapien
accttaaatcagtactggaagctag

SEQ ID NO: 4381196 - DNA, 25 bp, Homo sapien
gggaaggaagccatataaatgccag

SEQ ID NO: 4381197 - DNA, 25 bp, Homo sapien
aatcagtactggaagctagggaagg

SEQ ID NO: 4381198 - DNA, 25 bp, Homo sapien
gaagctagggaaggaagccatataa

SEQ ID NO: 4381199 - DNA, 25 bp, Homo sapien
tgtgggtcccactgtctccgtgata

SEQ ID NO: 4381200 - DNA, 25 bp, Homo sapien
tccgtgatagcagaggcaacaaagc

SEQ ID NO: 4381201 - DNA, 25 bp, Homo sapien
tgtggtatgtgctcatgaagcgctc

SEQ ID NO: 4381202 - DNA, 25 bp, Homo sapien
tgcaggctgccgtatctgtgggtcc

SEQ ID NO: 4381203 - DNA, 25 bp, Homo sapien
tggagcctctagcctgccctgggaa

SEQ ID NO: 4381204 - DNA, 25 bp, Homo sapien
agaccacggcccaggtagttatgca

SEQ ID NO: 4381205 - DNA, 25 bp, Homo sapien
tttggagcctctagcctgccctggg

SEQ ID NO: 4381206 - DNA, 25 bp, Homo sapien
gaagcctggtggactggtgctgaga

SEQ ID NO: 4381207 - DNA, 25 bp, Homo sapien
atgtccaatgcagctaggacttttg

SEQ ID NO: 4381208 - DNA, 25 bp, Homo sapien
gacttttgtcactccatctttctct

SEQ ID NO: 4381209 - DNA, 25 bp, Homo sapien
caatgcagctaggacttttgtcact

SEQ ID NO: 4381210 - DNA, 25 bp, Homo sapien
gctaggacttttgtcactccatctt

SEQ ID NO: 4381211 - DNA, 25 bp, Homo sapien
ttcctgatgcagtggatgcaaagat

SEQ ID NO: 4381212 - DNA, 25 bp, Homo sapien
aagatacgctttctcttgggtgaaa

SEQ ID NO: 4381213 - DNA, 25 bp, Homo sapien
tcctccttgacagaaacaaagagcc

SEQ ID NO: 4381214 - DNA, 25 bp, Homo sapien
ggtgaaatttacaagcacattttcc

SEQ ID NO: 4381215 - DNA, 25 bp, Homo sapien
gagatgcaaggcgatagggaaaggt

SEQ ID NO: 4381216 - DNA, 25 bp, Homo sapien
gatgcaaggcgatagggaaaggtcc

SEQ ID NO: 4381217 - DNA, 25 bp, Homo sapien
tgcaaggcgatagggaaaggtcctt

SEQ ID NO: 4381218 - DNA, 25 bp, Homo sapien
tagagatgcaaggcgatagggaaag

SEQ ID NO: 4381219 - DNA, 25 bp, Homo sapien
tctctgagagttcgtatttggctaa

SEQ ID NO: 4381220 - DNA, 25 bp, Homo sapien
tcccactagtgaccaccaaagagag

SEQ ID NO: 4381221 - DNA, 25 bp, Homo sapien
ccaaagagagggaatctaagagaga

SEQ ID NO: 4381222 - DNA, 25 bp, Homo sapien
tgctaaacccaacacaaatgaaagg

SEQ ID NO: 4381223 - DNA, 25 bp, Homo sapien
gctctggacttcctactatagattt

SEQ ID NO: 4381224 - DNA, 25 bp, Homo sapien
ctggacttcctactatagatttgat

SEQ ID NO: 4381225 - DNA, 25 bp, Homo sapien
tcagctctggacttcctactataga

SEQ ID NO: 4381226 - DNA, 25 bp, Homo sapien
gacttcctactatagatttgattaa

SEQ ID NO: 4381227 - DNA, 25 bp, Homo sapien
tgatgtaacagaagttcatgtctac

SEQ ID NO: 4381228 - DNA, 25 bp, Homo sapien
caggatatgatgtaacagaagttca

SEQ ID NO: 4381229 - DNA, 25 bp, Homo sapien
gatatgatgtaacagaagttcatgt

SEQ ID NO: 4381230 - DNA, 25 bp, Homo sapien
tcaggatatgatgtaacagaagttc

SEQ ID NO: 4381231 - DNA, 25 bp, Homo sapien
ttcttcggatagacactgaaataaa

SEQ ID NO: 4381232 - DNA, 25 bp, Homo sapien
atggaactgtccaagctgcttagaa

SEQ ID NO: 4381233 - DNA, 25 bp, Homo sapien
tcctaacttcttcggatagacactg

SEQ ID NO: 4381234 - DNA, 25 bp, Homo sapien
cttttggatcaaatcaagtgtgtag

SEQ ID NO: 4381235 - DNA, 25 bp, Homo sapien
agataccacctctcccctccataaa

SEQ ID NO: 4381236 - DNA, 25 bp, Homo sapien
tcccctccataaatgaatagtccat

SEQ ID NO: 4381237 - DNA, 25 bp, Homo sapien
gataccacctctcccctccataaat

SEQ ID NO: 4381238 - DNA, 25 bp, Homo sapien
ctctcccctccataaatgaatagtc

SEQ ID NO: 4381239 - DNA, 25 bp, Homo sapien
ctcattggctatgttatactttttt

SEQ ID NO: 4381240 - DNA, 25 bp, Homo sapien
tttgtaacaaaaatatgtcctcctg

SEQ ID NO: 4381241 - DNA, 25 bp, Homo sapien
caaaaatatgtcctcctgtctcctg

SEQ ID NO: 4381242 - DNA, 25 bp, Homo sapien
gtaacaaaaatatgtcctcctgtct

SEQ ID NO: 4381243 - DNA, 25 bp, Homo sapien
acaaaaatatgtcctcctgtctcct

SEQ ID NO: 4381244 - DNA, 25 bp, Homo sapien
agcggagctccggtcagtcggtcac

SEQ ID NO: 4381245 - DNA, 25 bp, Homo sapien
tgtgcccgcgaactttcccagaggt

SEQ ID NO: 4381246 - DNA, 25 bp, Homo sapien
cagacgaagggaagcaatggcattt

SEQ ID NO: 4381247 - DNA, 25 bp, Homo sapien
aagggcctgtcactctcggcagaaa

SEQ ID NO: 4381248 - DNA, 25 bp, Homo sapien
gctgttaacgaggataaagtctctg

SEQ ID NO: 4381249 - DNA, 25 bp, Homo sapien
cagctgttaacgaggataaagtctc

SEQ ID NO: 4381250 - DNA, 25 bp, Homo sapien
agctgttaacgaggataaagtctct

SEQ ID NO: 4381251 - DNA, 25 bp, Homo sapien
gcagctgttaacgaggataaagtct

SEQ ID NO: 4381252 - DNA, 25 bp, Homo sapien
acctccgccttgctggttgagatgg

SEQ ID NO: 4381253 - DNA, 25 bp, Homo sapien
cacatgtagcttggtcatattgctc

SEQ ID NO: 4381254 - DNA, 25 bp, Homo sapien
ttggagagcaaagtgtagaactttt

SEQ ID NO: 4381255 - DNA, 25 bp, Homo sapien
tgtagaactttttgactcccaaatc

SEQ ID NO: 4381256 - DNA, 25 bp, Homo sapien
gcacctccagagaagtggtacttaa

SEQ ID NO: 4381257 - DNA, 25 bp, Homo sapien
ggaatattcctcgtggtctagaagg

SEQ ID NO: 4381258 - DNA, 25 bp, Homo sapien
tagggctcgactccatctttagaaa

SEQ ID NO: 4381259 - DNA, 25 bp, Homo sapien
gctggcaaccctaaatgcgtccttt

SEQ ID NO: 4381260 - DNA, 25 bp, Homo sapien
tatttccggctttgtttagcaatac

SEQ ID NO: 4381261 - DNA, 25 bp, Homo sapien
gtctcttcggaagttcatctttaaa

SEQ ID NO: 4381262 - DNA, 25 bp, Homo sapien
gattgtaattttaggatctgagtgt

SEQ ID NO: 4381263 - DNA, 25 bp, Homo sapien
tataaagtcagtaatttggagtctc

SEQ ID NO: 4381264 - DNA, 25 bp, Homo sapien
atctctgtcatggtgtaaagacacc

SEQ ID NO: 4381265 - DNA, 25 bp, Homo sapien
tctctgtcatggtgtaaagacacca

SEQ ID NO: 4381266 - DNA, 25 bp, Homo sapien
agctgttgggctcccaagctctgcc

SEQ ID NO: 4381267 - DNA, 25 bp, Homo sapien
gcagctgttgggctcccaagctctg

SEQ ID NO: 4381268 - DNA, 25 bp, Homo sapien
gatatctgccttggaatttccactg

SEQ ID NO: 4381269 - DNA, 25 bp, Homo sapien
tctgtcaacgtttacttctcttccc

SEQ ID NO: 4381270 - DNA, 25 bp, Homo sapien
cctcatgcattcctgtgacgaggaa

SEQ ID NO: 4381271 - DNA, 25 bp, Homo sapien
tgacgaggaatctgcactgaggttt

SEQ ID NO: 4381272 - DNA, 25 bp, Homo sapien
gagttggctcaggacattcagatgc

SEQ ID NO: 4381273 - DNA, 25 bp, Homo sapien
gactgtctgatatgattgctgatct

SEQ ID NO: 4381274 - DNA, 25 bp, Homo sapien
tcagataggacacaaggggttccat

SEQ ID NO: 4381275 - DNA, 25 bp, Homo sapien
tcagatgccattattttagtaatga

SEQ ID NO: 4381276 - DNA, 25 bp, Homo sapien
agctgatgctctgccgagtgaatgg

SEQ ID NO: 4381277 - DNA, 25 bp, Homo sapien
ctgcagagggcttgtaagttcacct

SEQ ID NO: 4381278 - DNA, 25 bp, Homo sapien
gaagctaatgatggactggctcgac

SEQ ID NO: 4381279 - DNA, 25 bp, Homo sapien
tgatggactggctcgaccatggctc

SEQ ID NO: 4381280 - DNA, 25 bp, Homo sapien
gactttgtgggccaaaagcagccat

SEQ ID NO: 4381281 - DNA, 25 bp, Homo sapien
tggtcaagcttaacattaggcgtga

SEQ ID NO: 4381282 - DNA, 25 bp, Homo sapien
tgggaaatccacagtctaccgcatc

SEQ ID NO: 4381283 - DNA, 25 bp, Homo sapien
aaactgctttgacattcccgcatga

SEQ ID NO: 4381284 - DNA, 25 bp, Homo sapien
ggctgatgtaacgacacagctgctg

SEQ ID NO: 4381285 - DNA, 25 bp, Homo sapien
gatgtaacgacacagctgctggatg

SEQ ID NO: 4381286 - DNA, 25 bp, Homo sapien
tttgcaaggctgatgtaacgacaca

SEQ ID NO: 4381287 - DNA, 25 bp, Homo sapien
tctatggacaaatagtattccttgt

SEQ ID NO: 4381288 - DNA, 25 bp, Homo sapien
tattcctgaggtctcctcacagctg

SEQ ID NO: 4381289 - DNA, 25 bp, Homo sapien
taattccattgaaaagccttgtcgg

SEQ ID NO: 4381290 - DNA, 25 bp, Homo sapien
cttgtcggctttcatcaggtaggta

SEQ ID NO: 4381291 - DNA, 25 bp, Homo sapien
aactgtatggatgaaagccttccac

SEQ ID NO: 4381292 - DNA, 25 bp, Homo sapien
tattcacttttattatttcttctgt

SEQ ID NO: 4381293 - DNA, 25 bp, Homo sapien
ttattcacttttattatttcttctg

SEQ ID NO: 4381294 - DNA, 25 bp, Homo sapien
agtggcctttattcacttttattat

SEQ ID NO: 4381295 - DNA, 25 bp, Homo sapien
gataaagtaccctgcatcatgccaa

SEQ ID NO: 4381296 - DNA, 25 bp, Homo sapien
gatgttcctttgacccagttaactg

SEQ ID NO: 4381297 - DNA, 25 bp, Homo sapien
tacattttggtcagacatggctgga

SEQ ID NO: 4381298 - DNA, 25 bp, Homo sapien
catggtgaaaccacgcctagtagag

SEQ ID NO: 4381299 - DNA, 25 bp, Homo sapien
cagaaatccgttttcttgcctggga

SEQ ID NO: 4381300 - DNA, 25 bp, Homo sapien
gatgcctctgcgtcgttctttgaag

SEQ ID NO: 4381301 - DNA, 25 bp, Homo sapien
cagataatgtgacgacagtccggac

SEQ ID NO: 4381302 - DNA, 25 bp, Homo sapien
tgaccactgaggaactgttacagac

SEQ ID NO: 4381303 - DNA, 25 bp, Homo sapien
ctggatccaggtgctttactagggt

SEQ ID NO: 4381304 - DNA, 25 bp, Homo sapien
atccaggtgctttactagggtttcg

SEQ ID NO: 4381305 - DNA, 25 bp, Homo sapien
ttcggaagcactggggcaataggat

SEQ ID NO: 4381306 - DNA, 25 bp, Homo sapien
ctttactagggtttcggaagcactg

SEQ ID NO: 4381307 - DNA, 25 bp, Homo sapien
caccagggccggaaaatactgacgg

SEQ ID NO: 4381308 - DNA, 25 bp, Homo sapien
caaaggctgtgattgtacgtgcaac

SEQ ID NO: 4381309 - DNA, 25 bp, Homo sapien
gaaacccttttacagacagcagctt

SEQ ID NO: 4381310 - DNA, 25 bp, Homo sapien
taactggaagtttaccagcaggtgg

SEQ ID NO: 4381311 - DNA, 25 bp, Homo sapien
cagaatttcctctgtcgggcttggg

SEQ ID NO: 4381312 - DNA, 25 bp, Homo sapien
tcttgaatgtgacctggcagccagt

SEQ ID NO: 4381313 - DNA, 25 bp, Homo sapien
tacagtacagtaagccctctaagaa

SEQ ID NO: 4381314 - DNA, 25 bp, Homo sapien
caaagatagtattctgtgtctcccc

SEQ ID NO: 4381315 - DNA, 25 bp, Homo sapien
gggtaagccccagtctgtctcaaac

SEQ ID NO: 4381316 - DNA, 25 bp, Homo sapien
ctttgaggaggccagactggactgc

SEQ ID NO: 4381317 - DNA, 25 bp, Homo sapien
cacagccacactgttgcacaggttg

SEQ ID NO: 4381318 - DNA, 25 bp, Homo sapien
ggcgatgtgagctcttagccctatc

SEQ ID NO: 4381319 - DNA, 25 bp, Homo sapien
gacattcgtattttcagccacaccc

SEQ ID NO: 4381320 - DNA, 25 bp, Homo sapien
tctgtgtcagacattcgtattttca

SEQ ID NO: 4381321 - DNA, 25 bp, Homo sapien
acataaaagttttgtctgtgtcaga

SEQ ID NO: 4381322 - DNA, 25 bp, Homo sapien
cataaaagttttgtctgtgtcagac

SEQ ID NO: 4381323 - DNA, 25 bp, Homo sapien
caacaagccatggttgccaggaggc

SEQ ID NO: 4381324 - DNA, 25 bp, Homo sapien
ccgtgttccgctttgcccaagtcaa

SEQ ID NO: 4381325 - DNA, 25 bp, Homo sapien
ggacaggtcatatgtttgtttctct

SEQ ID NO: 4381326 - DNA, 25 bp, Homo sapien
tcaccttgctgtgacagtggttggg

SEQ ID NO: 4381327 - DNA, 25 bp, Homo sapien
tctccattccaataggatccctgga

SEQ ID NO: 4381328 - DNA, 25 bp, Homo sapien
agtctccattccaataggatccctg

SEQ ID NO: 4381329 - DNA, 25 bp, Homo sapien
tgaattatttcgtacatccctgtag

SEQ ID NO: 4381330 - DNA, 25 bp, Homo sapien
cgtacatccctgtagttgtccccag

SEQ ID NO: 4381331 - DNA, 25 bp, Homo sapien
cctcctagctgttccagtagccagg

SEQ ID NO: 4381332 - DNA, 25 bp, Homo sapien
tcctagctgttccagtagccaggtg

SEQ ID NO: 4381333 - DNA, 25 bp, Homo sapien
ctagctgttccagtagccaggtggg

SEQ ID NO: 4381334 - DNA, 25 bp, Homo sapien
tgattggtacccctcctagctgttc

SEQ ID NO: 4381335 - DNA, 25 bp, Homo sapien
tctgtggactttggagaccttcccc

SEQ ID NO: 4381336 - DNA, 25 bp, Homo sapien
ccaaattgctgattctctgtggact

SEQ ID NO: 4381337 - DNA, 25 bp, Homo sapien
tgtccatccggtcccatgtcctagt

SEQ ID NO: 4381338 - DNA, 25 bp, Homo sapien
atttgctgtccatccggtcccatgt

SEQ ID NO: 4381339 - DNA, 25 bp, Homo sapien
ggttcccagttgctctcctcatttc

SEQ ID NO: 4381340 - DNA, 25 bp, Homo sapien
aggggttcccagttgctctcctcat

SEQ ID NO: 4381341 - DNA, 25 bp, Homo sapien
cctcatttccatctttgctccctga

SEQ ID NO: 4381342 - DNA, 25 bp, Homo sapien
ctcatttccatctttgctccctgac

SEQ ID NO: 4381343 - DNA, 25 bp, Homo sapien
gtctccttgccgttgtctctctcag

SEQ ID NO: 4381344 - DNA, 25 bp, Homo sapien
tcttgtctccttgccgttgtctctc

SEQ ID NO: 4381345 - DNA, 25 bp, Homo sapien
gggttcttgtctccttgccgttgtc

SEQ ID NO: 4381346 - DNA, 25 bp, Homo sapien
ccttgccgttgtctctctcagtcat

SEQ ID NO: 4381347 - DNA, 25 bp, Homo sapien
aattaaggtgaataaaacattcata

SEQ ID NO: 4381348 - DNA, 25 bp, Homo sapien
gcctggccgggcctgtttataacta

SEQ ID NO: 4381349 - DNA, 25 bp, Homo sapien
gccgggcctgtttataactattatg

SEQ ID NO: 4381350 - DNA, 25 bp, Homo sapien
ctattatgctcaaggtaaatgtaga

SEQ ID NO: 4381351 - DNA, 25 bp, Homo sapien
gctttgagccacaacttcactgtct

SEQ ID NO: 4381352 - DNA, 25 bp, Homo sapien
cttggacttagtggggtcactggca

SEQ ID NO: 4381353 - DNA, 25 bp, Homo sapien
cagtgttttcccttgggtcgagcca

SEQ ID NO: 4381354 - DNA, 25 bp, Homo sapien
agtgttttcccttgggtcgagccat

SEQ ID NO: 4381355 - DNA, 25 bp, Homo sapien
ttggacttagtggggtcactggcaa

SEQ ID NO: 4381356 - DNA, 25 bp, Homo sapien
cccaggacatcagcattgagttgtt

SEQ ID NO: 4381357 - DNA, 25 bp, Homo sapien
catcagcattgagttgtttttgcac

SEQ ID NO: 4381358 - DNA, 25 bp, Homo sapien
caacagcagtgactgctatgcccag

SEQ ID NO: 4381359 - DNA, 25 bp, Homo sapien
gactgctatgcccaggacatcagca

SEQ ID NO: 4381360 - DNA, 25 bp, Homo sapien
gaatgagtagattcccgtgtagacc

SEQ ID NO: 4381361 - DNA, 25 bp, Homo sapien
agggcggtcattccaccttcccctg

SEQ ID NO: 4381362 - DNA, 25 bp, Homo sapien
ccttctgttctcagggcggtcattc

SEQ ID NO: 4381363 - DNA, 25 bp, Homo sapien
ttcccctgagtctctggtccatgac

SEQ ID NO: 4381364 - DNA, 25 bp, Homo sapien
gaatgcttttgtgagtggaaaggta

SEQ ID NO: 4381365 - DNA, 25 bp, Homo sapien
ggtctgtgttgcttattgagtacat

SEQ ID NO: 4381366 - DNA, 25 bp, Homo sapien
cactcggcattgtagtggaaatgga

SEQ ID NO: 4381367 - DNA, 25 bp, Homo sapien
ttcaacactgaacagcttcactcgg

SEQ ID NO: 4381368 - DNA, 25 bp, Homo sapien
ggaaatataacaggaatagcaggga

SEQ ID NO: 4381369 - DNA, 25 bp, Homo sapien
tcaaaaccagtgatcagggatggcc

SEQ ID NO: 4381370 - DNA, 25 bp, Homo sapien
aaaaccagtgatcagggatggcctg

SEQ ID NO: 4381371 - DNA, 25 bp, Homo sapien
aggcctggaaatctacattttcaaa

SEQ ID NO: 4381372 - DNA, 25 bp, Homo sapien
tctgaaggcctggaaatctacattt

SEQ ID NO: 4381373 - DNA, 25 bp, Homo sapien
agtgccatcagtacctagcttctgt

SEQ ID NO: 4381374 - DNA, 25 bp, Homo sapien
cagaggaagtgccatcagtacctag

SEQ ID NO: 4381375 - DNA, 25 bp, Homo sapien
cagtacctagcttctgtgtgaaaat

SEQ ID NO: 4381376 - DNA, 25 bp, Homo sapien
ccatcagtacctagcttctgtgtga

SEQ ID NO: 4381377 - DNA, 25 bp, Homo sapien
tctcctgtgaagtggtcataacgct

SEQ ID NO: 4381378 - DNA, 25 bp, Homo sapien
gaagtggtcataacgctggttgtac

SEQ ID NO: 4381379 - DNA, 25 bp, Homo sapien
taacgctggttgtactgtgaagtga

SEQ ID NO: 4381380 - DNA, 25 bp, Homo sapien
gttgtactgtgaagtgaaggatgca

SEQ ID NO: 4381381 - DNA, 25 bp, Homo sapien
ttgaatgtgtagttagagtatgttc

SEQ ID NO: 4381382 - DNA, 25 bp, Homo sapien
tgcctgttgcttgtggttccatccc

SEQ ID NO: 4381383 - DNA, 25 bp, Homo sapien
tagttagagtatgttcatccttcag

SEQ ID NO: 4381384 - DNA, 25 bp, Homo sapien
gctcttcctgtaaggacttttatga

SEQ ID NO: 4381385 - DNA, 25 bp, Homo sapien
aataatccatgtaaatttggcatac

SEQ ID NO: 4381386 - DNA, 25 bp, Homo sapien
taatccatgtaaatttggcatacat

SEQ ID NO: 4381387 - DNA, 25 bp, Homo sapien
ataatccatgtaaatttggcataca

SEQ ID NO: 4381388 - DNA, 25 bp, Homo sapien
gagattcagacccatttggtggcca

SEQ ID NO: 4381389 - DNA, 25 bp, Homo sapien
tgccctatgccctgagaaactgaga

SEQ ID NO: 4381390 - DNA, 25 bp, Homo sapien
tagccaagccagctgagctatagac

SEQ ID NO: 4381391 - DNA, 25 bp, Homo sapien
gctatagacattagcctcaactgct

SEQ ID NO: 4381392 - DNA, 25 bp, Homo sapien
gaaaggtacccagcacataataggc

SEQ ID NO: 4381393 - DNA, 25 bp, Homo sapien
caagcgaggctctacatccaactct

SEQ ID NO: 4381394 - DNA, 25 bp, Homo sapien
ttttatctcatggagggaagcggag

SEQ ID NO: 4381395 - DNA, 25 bp, Homo sapien
tgtttctgtgatcccggcatcgtga

SEQ ID NO: 4381396 - DNA, 25 bp, Homo sapien
ttagcgaaaaccttcattttgatca

SEQ ID NO: 4381397 - DNA, 25 bp, Homo sapien
tagcgaaaaccttcattttgatcac

SEQ ID NO: 4381398 - DNA, 25 bp, Homo sapien
tctttgttcattgttcgcatgctca

SEQ ID NO: 4381399 - DNA, 25 bp, Homo sapien
gttcgcatgctcacttttatctgag

SEQ ID NO: 4381400 - DNA, 25 bp, Homo sapien
tgtttatattgaccagccttgttct

SEQ ID NO: 4381401 - DNA, 25 bp, Homo sapien
catcccctgagtccatgcagcttgt

SEQ ID NO: 4381402 - DNA, 25 bp, Homo sapien
cacactacgtatgtttgtgggttca

SEQ ID NO: 4381403 - DNA, 25 bp, Homo sapien
tgtgggttcatatgtgtccacgtgc

SEQ ID NO: 4381404 - DNA, 25 bp, Homo sapien
tggctgccagcacatcacactacgt

SEQ ID NO: 4381405 - DNA, 25 bp, Homo sapien
gtccacgtgcagaatctgcccattt

SEQ ID NO: 4381406 - DNA, 25 bp, Homo sapien
ccgtgcagacgtggagagccatctt

SEQ ID NO: 4381407 - DNA, 25 bp, Homo sapien
tttccaaacgttcagtgcaaggcag

SEQ ID NO: 4381408 - DNA, 25 bp, Homo sapien
gcatgcaagcattctgtaccgggta

SEQ ID NO: 4381409 - DNA, 25 bp, Homo sapien
tcaagtctgcatcagaaagccgtgc

SEQ ID NO: 4381410 - DNA, 25 bp, Homo sapien
actgccatcttggttcagaaggcct

SEQ ID NO: 4381411 - DNA, 25 bp, Homo sapien
ccatcttggttcagaaggcctccta

SEQ ID NO: 4381412 - DNA, 25 bp, Homo sapien
ttcagaaggcctcctaataatggca

SEQ ID NO: 4381413 - DNA, 25 bp, Homo sapien
tcttggttcagaaggcctcctaata

SEQ ID NO: 4381414 - DNA, 25 bp, Homo sapien
aaatgcttgattccatcagtttctt

SEQ ID NO: 4381415 - DNA, 25 bp, Homo sapien
tctggggcaatctcttgtttagttg

SEQ ID NO: 4381416 - DNA, 25 bp, Homo sapien
tgcacttctggggcaatctcttgtt

SEQ ID NO: 4381417 - DNA, 25 bp, Homo sapien
tggggcaatctcttgtttagttggc

SEQ ID NO: 4381418 - DNA, 25 bp, Homo sapien
acttctggggcaatctcttgtttag

SEQ ID NO: 4381419 - DNA, 25 bp, Homo sapien
tttctgtgtctttcccggtctgtgg

SEQ ID NO: 4381420 - DNA, 25 bp, Homo sapien
tctgtgtctttcccggtctgtggtt

SEQ ID NO: 4381421 - DNA, 25 bp, Homo sapien
tgtgtctttcccggtctgtggtttc

SEQ ID NO: 4381422 - DNA, 25 bp, Homo sapien
tgtctttcccggtctgtggtttctc

SEQ ID NO: 4381423 - DNA, 25 bp, Homo sapien
aaagatagatacagcgggcggtcgc

SEQ ID NO: 4381424 - DNA, 25 bp, Homo sapien
gattggatgatagctttgcagacgg

SEQ ID NO: 4381425 - DNA, 25 bp, Homo sapien
gaacaagatacaagacagggagatc

SEQ ID NO: 4381426 - DNA, 25 bp, Homo sapien
caaatgtctggtaggccgatgctga

SEQ ID NO: 4381427 - DNA, 25 bp, Homo sapien
cagttgctttgccaacatgtgggtg

SEQ ID NO: 4381428 - DNA, 25 bp, Homo sapien
cagtgtaagtgtatccaggttgcct

SEQ ID NO: 4381429 - DNA, 25 bp, Homo sapien
taggaagtgggcgtctctggacaca

SEQ ID NO: 4381430 - DNA, 25 bp, Homo sapien
ggttggtgctaaccaccctgcatgt

SEQ ID NO: 4381431 - DNA, 25 bp, Homo sapien
tgtagtctcccatagactggtgggc

SEQ ID NO: 4381432 - DNA, 25 bp, Homo sapien
catccgcgaatgtttagcttgttgg

SEQ ID NO: 4381433 - DNA, 25 bp, Homo sapien
tgtcggttccagaagcgagtaaact

SEQ ID NO: 4381434 - DNA, 25 bp, Homo sapien
cgagtaaactgacctgcgaggaaca

SEQ ID NO: 4381435 - DNA, 25 bp, Homo sapien
cttggagtaaatatgtctagtgctg

SEQ ID NO: 4381436 - DNA, 25 bp, Homo sapien
gagtaaatatgtctagtgctgagaa

SEQ ID NO: 4381437 - DNA, 25 bp, Homo sapien
taaatatgtctagtgctgagaattc

SEQ ID NO: 4381438 - DNA, 25 bp, Homo sapien
ggacacttggagtaaatatgtctag

SEQ ID NO: 4381439 - DNA, 25 bp, Homo sapien
cctaattcttgctccacagacagtc

SEQ ID NO: 4381440 - DNA, 25 bp, Homo sapien
cctttcctgttcctaattcttgctc

SEQ ID NO: 4381441 - DNA, 25 bp, Homo sapien
gcatcagtgccacagatgcgtatct

SEQ ID NO: 4381442 - DNA, 25 bp, Homo sapien
tgccacagatgcgtatctccccttt

SEQ ID NO: 4381443 - DNA, 25 bp, Homo sapien
cttgctgaaagttgtagaaccatgg

SEQ ID NO: 4381444 - DNA, 25 bp, Homo sapien
gaaagttgtagaaccatggcttatg

SEQ ID NO: 4381445 - DNA, 25 bp, Homo sapien
ttgtagaaccatggcttatgggcca

SEQ ID NO: 4381446 - DNA, 25 bp, Homo sapien
tgctgaaagttgtagaaccatggct

SEQ ID NO: 4381447 - DNA, 25 bp, Homo sapien
tcattgactctcaagagcatcgtaa

SEQ ID NO: 4381448 - DNA, 25 bp, Homo sapien
tgactctcaagagcatcgtaactgg

SEQ ID NO: 4381449 - DNA, 25 bp, Homo sapien
tcaagagcatcgtaactgggaagac

SEQ ID NO: 4381450 - DNA, 25 bp, Homo sapien
gagcatcgtaactgggaagacacag

SEQ ID NO: 4381451 - DNA, 25 bp, Homo sapien
cttcttctttttcaatagcagtctc

SEQ ID NO: 4381452 - DNA, 25 bp, Homo sapien
ttctttttcaatagcagtctcagtc

SEQ ID NO: 4381453 - DNA, 25 bp, Homo sapien
ctttttcaatagcagtctcagtcat

SEQ ID NO: 4381454 - DNA, 25 bp, Homo sapien
tcttctttttcaatagcagtctcag

SEQ ID NO: 4381455 - DNA, 25 bp, Homo sapien
cttttacttttatcctcactgccat

SEQ ID NO: 4381456 - DNA, 25 bp, Homo sapien
ctgcatcaggttcttttacttttat

SEQ ID NO: 4381457 - DNA, 25 bp, Homo sapien
ttcttttacttttatcctcactgcc

SEQ ID NO: 4381458 - DNA, 25 bp, Homo sapien
gcatcaggttcttttacttttatcc

SEQ ID NO: 4381459 - DNA, 25 bp, Homo sapien
tttccttcatcaggggttgggtgga

SEQ ID NO: 4381460 - DNA, 25 bp, Homo sapien
gttgggtggagagcatcccaatgat

SEQ ID NO: 4381461 - DNA, 25 bp, Homo sapien
tggagagcatcccaatgataagcat

SEQ ID NO: 4381462 - DNA, 25 bp, Homo sapien
ggtggagagcatcccaatgataagc

SEQ ID NO: 4381463 - DNA, 25 bp, Homo sapien
gaaatctggtgcactttggtcaact

SEQ ID NO: 4381464 - DNA, 25 bp, Homo sapien
gaggccggccacctatgtgatattt

SEQ ID NO: 4381465 - DNA, 25 bp, Homo sapien
taaacttcagtggacccgctttgga

SEQ ID NO: 4381466 - DNA, 25 bp, Homo sapien
ggtcaactggaagcacaaagtgttc

SEQ ID NO: 4381467 - DNA, 25 bp, Homo sapien
tggctgccagttcccaagttcctct

SEQ ID NO: 4381468 - DNA, 25 bp, Homo sapien
gcttagacgcatgcttattctagaa

SEQ ID NO: 4381469 - DNA, 25 bp, Homo sapien
gcctaactccgccttcactgaaaat

SEQ ID NO: 4381470 - DNA, 25 bp, Homo sapien
gagtcttcaaggtcactcccacttt

SEQ ID NO: 4381471 - DNA, 25 bp, Homo sapien
taagtactgtgggttgtaagtgtcc

SEQ ID NO: 4381472 - DNA, 25 bp, Homo sapien
gattgagtcaagaggaaaagcccat

SEQ ID NO: 4381473 - DNA, 25 bp, Homo sapien
tctggacaccaagccagcatcatgg

SEQ ID NO: 4381474 - DNA, 25 bp, Homo sapien
caaagggacacaaagcgtggcctgc

SEQ ID NO: 4381475 - DNA, 25 bp, Homo sapien
cagggctaggatttcagtgttgtca

SEQ ID NO: 4381476 - DNA, 25 bp, Homo sapien
tatgttcactcagataagactgccc

SEQ ID NO: 4381477 - DNA, 25 bp, Homo sapien
tcagagtattaccacacagcaacag

SEQ ID NO: 4381478 - DNA, 25 bp, Homo sapien
agtttagtgcctctgcccattgtcc

SEQ ID NO: 4381479 - DNA, 25 bp, Homo sapien
gattgaaacgtttacatgtacccaa

SEQ ID NO: 4381480 - DNA, 25 bp, Homo sapien
tctgtgtgcctatattgacgtagtg

SEQ ID NO: 4381481 - DNA, 25 bp, Homo sapien
caaagttctggccttccaaaactca

SEQ ID NO: 4381482 - DNA, 25 bp, Homo sapien
tgacccactatgaccacagcatctg

SEQ ID NO: 4381483 - DNA, 25 bp, Homo sapien
taaagtgttctattaacctgatctc

SEQ ID NO: 4381484 - DNA, 25 bp, Homo sapien
aaattattactctctatggcactgt

SEQ ID NO: 4381485 - DNA, 25 bp, Homo sapien
tcattatattccttcagtcagaaaa

SEQ ID NO: 4381486 - DNA, 25 bp, Homo sapien
gaagtgtgtgaagtacaaagctgac

SEQ ID NO: 4381487 - DNA, 25 bp, Homo sapien
tgtcaaaattgagaagtgccctaat

SEQ ID NO: 4381488 - DNA, 25 bp, Homo sapien
tttacctcactgttggacatacatt

SEQ ID NO: 4381489 - DNA, 25 bp, Homo sapien
atccttgcacaattctttaaattga

SEQ ID NO: 4381490 - DNA, 25 bp, Homo sapien
caataattcagtattcatgtcaaaa

SEQ ID NO: 4381491 - DNA, 25 bp, Homo sapien
catttgctcaaggaaaacactcttc

SEQ ID NO: 4381492 - DNA, 25 bp, Homo sapien
actcttcccctttgcaacatgtgta

SEQ ID NO: 4381493 - DNA, 25 bp, Homo sapien
ttcaaaatgggctctttgctcagga

SEQ ID NO: 4381494 - DNA, 25 bp, Homo sapien
tcagcatttttgagccactctccaa

SEQ ID NO: 4381495 - DNA, 25 bp, Homo sapien
gaatgttgtcatagcaatactcctg

SEQ ID NO: 4381496 - DNA, 25 bp, Homo sapien
gaatcttcagtaacagggtcagctc

SEQ ID NO: 4381497 - DNA, 25 bp, Homo sapien
tattttccggaaggctttcatgaaa

SEQ ID NO: 4381498 - DNA, 25 bp, Homo sapien
agcaccactattttccggaaggctt

SEQ ID NO: 4381499 - DNA, 25 bp, Homo sapien
tacttcgtgaagtgttgaacgcttt

SEQ ID NO: 4381500 - DNA, 25 bp, Homo sapien
acttcgtgaagtgttgaacgctttg

SEQ ID NO: 4381501 - DNA, 25 bp, Homo sapien
aatacttcgtgaagtgttgaacgct

SEQ ID NO: 4381502 - DNA, 25 bp, Homo sapien
aaaatacttcgtgaagtgttgaacg

SEQ ID NO: 4381503 - DNA, 25 bp, Homo sapien
aaagttccatcaggctgttatccat

SEQ ID NO: 4381504 - DNA, 25 bp, Homo sapien
tattggcaggaaaaagttccatcag

SEQ ID NO: 4381505 - DNA, 25 bp, Homo sapien
aaaaagttccatcaggctgttatcc

SEQ ID NO: 4381506 - DNA, 25 bp, Homo sapien
cttattggcaggaaaaagttccatc

SEQ ID NO: 4381507 - DNA, 25 bp, Homo sapien
tttccttgcagttactgcattgata

SEQ ID NO: 4381508 - DNA, 25 bp, Homo sapien
actttccttgcagttactgcattga

SEQ ID NO: 4381509 - DNA, 25 bp, Homo sapien
tccttgcagttactgcattgatatc

SEQ ID NO: 4381510 - DNA, 25 bp, Homo sapien
ctttccttgcagttactgcattgat

SEQ ID NO: 4381511 - DNA, 25 bp, Homo sapien
cagaagaacaccagtcaacatagcc

SEQ ID NO: 4381512 - DNA, 25 bp, Homo sapien
caccagtcaacatagccagtttttt

SEQ ID NO: 4381513 - DNA, 25 bp, Homo sapien
gtcaacatagccagttttttcctct

SEQ ID NO: 4381514 - DNA, 25 bp, Homo sapien
cagttttttcctctccgagtctgaa

SEQ ID NO: 4381515 - DNA, 25 bp, Homo sapien
ttcatcttcacaacatttctcaagg

SEQ ID NO: 4381516 - DNA, 25 bp, Homo sapien
tctcaaggtatttgtagtgcctgat

SEQ ID NO: 4381517 - DNA, 25 bp, Homo sapien
tcaaggtatttgtagtgcctgatta

SEQ ID NO: 4381518 - DNA, 25 bp, Homo sapien
aaggtatttgtagtgcctgattaac

SEQ ID NO: 4381519 - DNA, 25 bp, Homo sapien
cttcttgggctgcaaacacgcagac

SEQ ID NO: 4381520 - DNA, 25 bp, Homo sapien
caaacacgcagacatctgtacgcat

SEQ ID NO: 4381521 - DNA, 25 bp, Homo sapien
gcaaacacgcagacatctgtacgca

SEQ ID NO: 4381522 - DNA, 25 bp, Homo sapien
tgaataacgtagtcctgaaactgag

SEQ ID NO: 4381523 - DNA, 25 bp, Homo sapien
tcagccttgaataacgtagtcctga

SEQ ID NO: 4381524 - DNA, 25 bp, Homo sapien
aacgtagtcctgaaactgagtaggg

SEQ ID NO: 4381525 - DNA, 25 bp, Homo sapien
ccttgaataacgtagtcctgaaact

SEQ ID NO: 4381526 - DNA, 25 bp, Homo sapien
aatccccaatgtagtggcaactgcc

SEQ ID NO: 4381527 - DNA, 25 bp, Homo sapien
cagaaatccccaatgtagtggcaac

SEQ ID NO: 4381528 - DNA, 25 bp, Homo sapien
tccccaatgtagtggcaactgccat

SEQ ID NO: 4381529 - DNA, 25 bp, Homo sapien
gaaatccccaatgtagtggcaactg

SEQ ID NO: 4381530 - DNA, 25 bp, Homo sapien
tctgccgtgctgattcccatgatgg

SEQ ID NO: 4381531 - DNA, 25 bp, Homo sapien
gccgtgctgattcccatgatggctg

SEQ ID NO: 4381532 - DNA, 25 bp, Homo sapien
catctgccgtgctgattcccatgat

SEQ ID NO: 4381533 - DNA, 25 bp, Homo sapien
gtgctgattcccatgatggctgcca

SEQ ID NO: 4381534 - DNA, 25 bp, Homo sapien
tagctactgagtccaaggcgaacag

SEQ ID NO: 4381535 - DNA, 25 bp, Homo sapien
tccaaggcgaacagacatcctttcc

SEQ ID NO: 4381536 - DNA, 25 bp, Homo sapien
ggtctttggatcaaatattagtgca

SEQ ID NO: 4381537 - DNA, 25 bp, Homo sapien
tcagtgagtagctactgagtccaag

SEQ ID NO: 4381538 - DNA, 25 bp, Homo sapien
ggtacatgaaagctatcgtaaactc

SEQ ID NO: 4381539 - DNA, 25 bp, Homo sapien
tacaacaggtacatgaaagctatcg

SEQ ID NO: 4381540 - DNA, 25 bp, Homo sapien
gctatcgtaaactcttcattgacat

SEQ ID NO: 4381541 - DNA, 25 bp, Homo sapien
gtagttgcatacaacaggtacatga

SEQ ID NO: 4381542 - DNA, 25 bp, Homo sapien
ttgagcagagaaatgttttggactt

SEQ ID NO: 4381543 - DNA, 25 bp, Homo sapien
tgagcagagaaatgttttggactta

SEQ ID NO: 4381544 - DNA, 25 bp, Homo sapien
cttcctgaacgtttacacgaggcat

SEQ ID NO: 4381545 - DNA, 25 bp, Homo sapien
gctgggggcgagaggaattctggaa

SEQ ID NO: 4381546 - DNA, 25 bp, Homo sapien
tggtggaacttcctgaacgtttaca

SEQ ID NO: 4381547 - DNA, 25 bp, Homo sapien
ttctggaaagaatagtcgtacccat

SEQ ID NO: 4381548 - DNA, 25 bp, Homo sapien
gatttattggcttgccagctttgag

SEQ ID NO: 4381549 - DNA, 25 bp, Homo sapien
caattctgtcaacaaaaagctagcc

SEQ ID NO: 4381550 - DNA, 25 bp, Homo sapien
tccttgagcaaatgtatatcctgtg

SEQ ID NO: 4381551 - DNA, 25 bp, Homo sapien
gagtgtagttgctagttccttgagc

SEQ ID NO: 4381552 - DNA, 25 bp, Homo sapien
tatatgagtaaataaaaaaatagaa

SEQ ID NO: 4381553 - DNA, 25 bp, Homo sapien
agtatatgagtaaataaaaaaatag

SEQ ID NO: 4381554 - DNA, 25 bp, Homo sapien
caagtatatgagtaaataaaaaaat

SEQ ID NO: 4381555 - DNA, 25 bp, Homo sapien
tcaagtatatgagtaaataaaaaaa

SEQ ID NO: 4381556 - DNA, 25 bp, Homo sapien
gccgggcactagaggtgtttctaaa

SEQ ID NO: 4381557 - DNA, 25 bp, Homo sapien
tactacattaactactccctggagg

SEQ ID NO: 4381558 - DNA, 25 bp, Homo sapien
ccctggaggtgaattaggccaagac

SEQ ID NO: 4381559 - DNA, 25 bp, Homo sapien
tgatccagtgtcaaccggagatgtt

SEQ ID NO: 4381560 - DNA, 25 bp, Homo sapien
taacctcgagctactggatacttga

SEQ ID NO: 4381561 - DNA, 25 bp, Homo sapien
tgtatttacctaccaagaagtgccc

SEQ ID NO: 4381562 - DNA, 25 bp, Homo sapien
tactgttctgagtggtaacctcgag

SEQ ID NO: 4381563 - DNA, 25 bp, Homo sapien
ggtgactgtactcgcaatgtgctag

SEQ ID NO: 4381564 - DNA, 25 bp, Homo sapien
tactagattctgtccaggcccgaga

SEQ ID NO: 4381565 - DNA, 25 bp, Homo sapien
gaaaataaatatcgccctacgtgga

SEQ ID NO: 4381566 - DNA, 25 bp, Homo sapien
ggctgatctgagcaatctccaagga

SEQ ID NO: 4381567 - DNA, 25 bp, Homo sapien
gacacgaggttgcagtactggctga

SEQ ID NO: 4381568 - DNA, 25 bp, Homo sapien
ggataggacccgcgagagaaagcct

SEQ ID NO: 4381569 - DNA, 25 bp, Homo sapien
aaggcacagggagaggataggaccc

SEQ ID NO: 4381570 - DNA, 25 bp, Homo sapien
agagaaagcctgagcgcgcgctgag

SEQ ID NO: 4381571 - DNA, 25 bp, Homo sapien
aagcctgagcgcgcgctgagaccca

SEQ ID NO: 4381572 - DNA, 25 bp, Homo sapien
cagctctcactgacgaattggaaga

SEQ ID NO: 4381573 - DNA, 25 bp, Homo sapien
gcccagatgacgaagatgaccagct

SEQ ID NO: 4381574 - DNA, 25 bp, Homo sapien
tagaggaccgtgagacagaagacag

SEQ ID NO: 4381575 - DNA, 25 bp, Homo sapien
tttgcagaggaggtcgccgaagttc

SEQ ID NO: 4381576 - DNA, 25 bp, Homo sapien
cggctcagctgaacaggctctggga

SEQ ID NO: 4381577 - DNA, 25 bp, Homo sapien
tgggacgtgactgcgctgggaggct

SEQ ID NO: 4381578 - DNA, 25 bp, Homo sapien
cagacgcgtagggaggatgcttgga

SEQ ID NO: 4381579 - DNA, 25 bp, Homo sapien
agctggctcccgaggaggtccgctt

SEQ ID NO: 4381580 - DNA, 25 bp, Homo sapien
catttgcgttctcgatccagttcca

SEQ ID NO: 4381581 - DNA, 25 bp, Homo sapien
ttcccaaagcgtcgcagcgagtggg

SEQ ID NO: 4381582 - DNA, 25 bp, Homo sapien
tagtgtgccccggaaggacaggtca

SEQ ID NO: 4381583 - DNA, 25 bp, Homo sapien
gaaaaagcgagcttgaccaactcga

SEQ ID NO: 4381584 - DNA, 25 bp, Homo sapien
tagtcactgccttgaccatacacat

SEQ ID NO: 4381585 - DNA, 25 bp, Homo sapien
aacatattcagcactgtggccagcg

SEQ ID NO: 4381586 - DNA, 25 bp, Homo sapien
ccacgaagcacaggccggcgttagt

SEQ ID NO: 4381587 - DNA, 25 bp, Homo sapien
caaagcgccgctggaggaatggctt

SEQ ID NO: 4381588 - DNA, 25 bp, Homo sapien
cattgtgctaagtatgttaagtgta

SEQ ID NO: 4381589 - DNA, 25 bp, Homo sapien
ggtaaggtttatgggtacagatcaa

SEQ ID NO: 4381590 - DNA, 25 bp, Homo sapien
tgtgagaggactacagtaacgaccc

SEQ ID NO: 4381591 - DNA, 25 bp, Homo sapien
gcccatgccacaaggcctggataat

SEQ ID NO: 4381592 - DNA, 25 bp, Homo sapien
ttttgggatcatgaaaactttctgg

SEQ ID NO: 4381593 - DNA, 25 bp, Homo sapien
gcaggaatgaacaactagatcaata

SEQ ID NO: 4381594 - DNA, 25 bp, Homo sapien
aaaacatgacgtagagcaggaatga

SEQ ID NO: 4381595 - DNA, 25 bp, Homo sapien
ccttgaagacgttatagtaagtgaa

SEQ ID NO: 4381596 - DNA, 25 bp, Homo sapien
tccctctgagattgcatagaatcaa

SEQ ID NO: 4381597 - DNA, 25 bp, Homo sapien
gatgatggctgtcaatccttggtca

SEQ ID NO: 4381598 - DNA, 25 bp, Homo sapien
gtgtcagcaaggtcgtgctccctct

SEQ ID NO: 4381599 - DNA, 25 bp, Homo sapien
gtttcttccgagcttctgatgatgg

SEQ ID NO: 4381600 - DNA, 25 bp, Homo sapien
ataaatatgagcactacagcaaaca

SEQ ID NO: 4381601 - DNA, 25 bp, Homo sapien
ttatgaaacaagtgagtactaaaac

SEQ ID NO: 4381602 - DNA, 25 bp, Homo sapien
ccaggctggagtgtagtggcatgat

SEQ ID NO: 4381603 - DNA, 25 bp, Homo sapien
tagtggcatgatctcaccacactgc

SEQ ID NO: 4381604 - DNA, 25 bp, Homo sapien
ctcccgggttcaaacaattctcttg

SEQ ID NO: 4381605 - DNA, 25 bp, Homo sapien
tttgaaaccaagtctcgctctgtcg

SEQ ID NO: 4381606 - DNA, 25 bp, Homo sapien
caaactgcgatcttttagtggtgcc

SEQ ID NO: 4381607 - DNA, 25 bp, Homo sapien
tatgaggtagagtcctgaaagatct

SEQ ID NO: 4381608 - DNA, 25 bp, Homo sapien
tgtgatacactacttgagagatgga

SEQ ID NO: 4381609 - DNA, 25 bp, Homo sapien
cattctcttgggataagtgagtcac

SEQ ID NO: 4381610 - DNA, 25 bp, Homo sapien
ccccttgatagatggaatagagtcc

SEQ ID NO: 4381611 - DNA, 25 bp, Homo sapien
aaaaaactggcttcatggtccatgt

SEQ ID NO: 4381612 - DNA, 25 bp, Homo sapien
ttttcatcaacaatatagggtcagg

SEQ ID NO: 4381613 - DNA, 25 bp, Homo sapien
ggtccatgtctatcaagtgctcatt

SEQ ID NO: 4381614 - DNA, 25 bp, Homo sapien
ttatttcctcctgaaatcgaaagta

SEQ ID NO: 4381615 - DNA, 25 bp, Homo sapien
tttcctcctgaaatcgaaagtatgt

SEQ ID NO: 4381616 - DNA, 25 bp, Homo sapien
tcctgaaatcgaaagtatgtttggg

SEQ ID NO: 4381617 - DNA, 25 bp, Homo sapien
cctcctgaaatcgaaagtatgtttg

SEQ ID NO: 4381618 - DNA, 25 bp, Homo sapien
tagtaaaaccctttttcatggatga

SEQ ID NO: 4381619 - DNA, 25 bp, Homo sapien
tgcccactccttgatgattcccagg

SEQ ID NO: 4381620 - DNA, 25 bp, Homo sapien
cagttcaccattcctcaagtgcaag

SEQ ID NO: 4381621 - DNA, 25 bp, Homo sapien
cctcaagtgcaagttgctcaggaat

SEQ ID NO: 4381622 - DNA, 25 bp, Homo sapien
tattttgcggcccagagccttttca

SEQ ID NO: 4381623 - DNA, 25 bp, Homo sapien
ggtcccagttatgtgagctgctact

SEQ ID NO: 4381624 - DNA, 25 bp, Homo sapien
cactaggggagaaatattttgttgc

SEQ ID NO: 4381625 - DNA, 25 bp, Homo sapien
tggtcccagttatgtgagctgctac

SEQ ID NO: 4381626 - DNA, 25 bp, Homo sapien
tctcactaggggagaaatattttgt

SEQ ID NO: 4381627 - DNA, 25 bp, Homo sapien
agtgtctcacgggtagggtccaaag

SEQ ID NO: 4381628 - DNA, 25 bp, Homo sapien
taagcagtaacatggattataattt

SEQ ID NO: 4381629 - DNA, 25 bp, Homo sapien
ttattagtgtctcacgggtagggtc

SEQ ID NO: 4381630 - DNA, 25 bp, Homo sapien
tgtctcacgggtagggtccaaagag

SEQ ID NO: 4381631 - DNA, 25 bp, Homo sapien
tttcatcaaacagacagtgctaggg

SEQ ID NO: 4381632 - DNA, 25 bp, Homo sapien
caccccagagggctacaaatattaa

SEQ ID NO: 4381633 - DNA, 25 bp, Homo sapien
tagggtaaggcactacaccccagag

SEQ ID NO: 4381634 - DNA, 25 bp, Homo sapien
cgtagtcctactattcgggaagctg

SEQ ID NO: 4381635 - DNA, 25 bp, Homo sapien
cattaatctggtatgcctcatctga

SEQ ID NO: 4381636 - DNA, 25 bp, Homo sapien
tacatgcatctatctgctgtagacc

SEQ ID NO: 4381637 - DNA, 25 bp, Homo sapien
ggagtgttcaacattctcactactg

SEQ ID NO: 4381638 - DNA, 25 bp, Homo sapien
catctgaataggtggagtgttcaac

SEQ ID NO: 4381639 - DNA, 25 bp, Homo sapien
aaggaaatgaacaaggtacatgtga

SEQ ID NO: 4381640 - DNA, 25 bp, Homo sapien
aagaaggcttagaccccaggaacag

SEQ ID NO: 4381641 - DNA, 25 bp, Homo sapien
cagagtgcagggaatttacttagaa

SEQ ID NO: 4381642 - DNA, 25 bp, Homo sapien
caggaacaggtcctgtcctttatat

SEQ ID NO: 4381643 - DNA, 25 bp, Homo sapien
atgaagatgacagtaaaaaattaaa

SEQ ID NO: 4381644 - DNA, 25 bp, Homo sapien
tgaagatgacagtaaaaaattaaaa

SEQ ID NO: 4381645 - DNA, 25 bp, Homo sapien
catgaagatgacagtaaaaaattaa

SEQ ID NO: 4381646 - DNA, 25 bp, Homo sapien
tagaaatggtttcctcagaggttct

SEQ ID NO: 4381647 - DNA, 25 bp, Homo sapien
agaaatggtttcctcagaggttctc

SEQ ID NO: 4381648 - DNA, 25 bp, Homo sapien
taaaaagagtgactagaagcatggc

SEQ ID NO: 4381649 - DNA, 25 bp, Homo sapien
aagggtctttcctacaatgtgggag

SEQ ID NO: 4381650 - DNA, 25 bp, Homo sapien
gcaagccctgatgccggataatggg

SEQ ID NO: 4381651 - DNA, 25 bp, Homo sapien
ccctgggcactgacttacgggaagg

SEQ ID NO: 4381652 - DNA, 25 bp, Homo sapien
tgtgttctctcccagcttcccgcta

SEQ ID NO: 4381653 - DNA, 25 bp, Homo sapien
tgttctctcccagcttcccgctatt

SEQ ID NO: 4381654 - DNA, 25 bp, Homo sapien
tctgtgttctctcccagcttcccgc

SEQ ID NO: 4381655 - DNA, 25 bp, Homo sapien
ttccctctgtgttctctcccagctt

SEQ ID NO: 4381656 - DNA, 25 bp, Homo sapien
cattctttatgactttgtgaccttc

SEQ ID NO: 4381657 - DNA, 25 bp, Homo sapien
cactacacccggctgcaaatattat

SEQ ID NO: 4381658 - DNA, 25 bp, Homo sapien
ctgttaactaacatgtctctgctgg

SEQ ID NO: 4381659 - DNA, 25 bp, Homo sapien
cttctcttcattaccctgtgtgtgc

SEQ ID NO: 4381660 - DNA, 25 bp, Homo sapien
tcagtttccataatgtgagatcaaa

SEQ ID NO: 4381661 - DNA, 25 bp, Homo sapien
ttagactagatgtggaggctgtccg

SEQ ID NO: 4381662 - DNA, 25 bp, Homo sapien
tgccctttgctgctatgccccattt

SEQ ID NO: 4381663 - DNA, 25 bp, Homo sapien
gaagagtctagacttgattatctta

SEQ ID NO: 4381664 - DNA, 25 bp, Homo sapien
aacaagcaatgccacttttggagta

SEQ ID NO: 4381665 - DNA, 25 bp, Homo sapien
aatgccacttttggagtacttgtcc

SEQ ID NO: 4381666 - DNA, 25 bp, Homo sapien
gagttgccacttgacttgccagcag

SEQ ID NO: 4381667 - DNA, 25 bp, Homo sapien
ctttctaacgagctgacggagttgc

SEQ ID NO: 4381668 - DNA, 25 bp, Homo sapien
gattttacccatgacatgcccgtgc

SEQ ID NO: 4381669 - DNA, 25 bp, Homo sapien
gaataggcagaatgccagtcctttg

SEQ ID NO: 4381670 - DNA, 25 bp, Homo sapien
ctcacttattgtcaacacaggaatg

SEQ ID NO: 4381671 - DNA, 25 bp, Homo sapien
gccagtcctttgtattctcacttat

SEQ ID NO: 4381672 - DNA, 25 bp, Homo sapien
tagcagttagagtgtacccacagag

SEQ ID NO: 4381673 - DNA, 25 bp, Homo sapien
tgtgatttagcagttagagtgtacc

SEQ ID NO: 4381674 - DNA, 25 bp, Homo sapien
taagcgcctcgaagactgagtgcac

SEQ ID NO: 4381675 - DNA, 25 bp, Homo sapien
caaagaagcaggtaaccagacattt

SEQ ID NO: 4381676 - DNA, 25 bp, Homo sapien
agctcgttggtaaagtacacgtaag

SEQ ID NO: 4381677 - DNA, 25 bp, Homo sapien
cttcagctcgttggtaaagtacacg

SEQ ID NO: 4381678 - DNA, 25 bp, Homo sapien
tcagctcgttggtaaagtacacgta

SEQ ID NO: 4381679 - DNA, 25 bp, Homo sapien
cagctcgttggtaaagtacacgtaa

SEQ ID NO: 4381680 - DNA, 25 bp, Homo sapien
acgatcagcacgcaggtctgtccca

SEQ ID NO: 4381681 - DNA, 25 bp, Homo sapien
gatcacgatcagcacgcaggtctgt

SEQ ID NO: 4381682 - DNA, 25 bp, Homo sapien
ctgtgaagatcacgatcagcacgca

SEQ ID NO: 4381683 - DNA, 25 bp, Homo sapien
gaagatcacgatcagcacgcaggtc

SEQ ID NO: 4381684 - DNA, 25 bp, Homo sapien
tcttttatagtcagtgaggaaatga

SEQ ID NO: 4381685 - DNA, 25 bp, Homo sapien
caggcagccggtcactgaagccctt

SEQ ID NO: 4381686 - DNA, 25 bp, Homo sapien
gtcagagtctgactgctgtaagtca

SEQ ID NO: 4381687 - DNA, 25 bp, Homo sapien
tgtaagtcagccaggcagccggtca

SEQ ID NO: 4381688 - DNA, 25 bp, Homo sapien
tgcatctaggaaggtggtcccataa

SEQ ID NO: 4381689 - DNA, 25 bp, Homo sapien
gcccttagtgatggtggtgtaaaca

SEQ ID NO: 4381690 - DNA, 25 bp, Homo sapien
cattttctgttacctagtggcatca

SEQ ID NO: 4381691 - DNA, 25 bp, Homo sapien
tgtgctgtgtaacaacgtttccatc

SEQ ID NO: 4381692 - DNA, 25 bp, Homo sapien
aggtgttgttgtcataggaggtgac

SEQ ID NO: 4381693 - DNA, 25 bp, Homo sapien
gctccatgcacgttactgcccgcct

SEQ ID NO: 4381694 - DNA, 25 bp, Homo sapien
catgcacgttactgcccgcctctcc

SEQ ID NO: 4381695 - DNA, 25 bp, Homo sapien
ggtgttgttgtcataggaggtgaca

SEQ ID NO: 4381696 - DNA, 25 bp, Homo sapien
catggagactgacacactgcaaggg

SEQ ID NO: 4381697 - DNA, 25 bp, Homo sapien
tgcagggtgaatccattagccatgg

SEQ ID NO: 4381698 - DNA, 25 bp, Homo sapien
gtaccagttgagcttgatatgcata

SEQ ID NO: 4381699 - DNA, 25 bp, Homo sapien
ttcacaaattgttagccgcactgcc

SEQ ID NO: 4381700 - DNA, 25 bp, Homo sapien
ctctgcacttgattgatgagggagc

SEQ ID NO: 4381701 - DNA, 25 bp, Homo sapien
cttgattgatgagggagcaacccag

SEQ ID NO: 4381702 - DNA, 25 bp, Homo sapien
gcaacccagactctcttctcctgta

SEQ ID NO: 4381703 - DNA, 25 bp, Homo sapien
gcacttgattgatgagggagcaacc

SEQ ID NO: 4381704 - DNA, 25 bp, Homo sapien
gaagtgaggcctgcagatcatcgct

SEQ ID NO: 4381705 - DNA, 25 bp, Homo sapien
caagagtagcaacgatccatgggag

SEQ ID NO: 4381706 - DNA, 25 bp, Homo sapien
caattgctcagtgtgataggcccaa

SEQ ID NO: 4381707 - DNA, 25 bp, Homo sapien
catatggtggctgcggtgcactaaa

SEQ ID NO: 4381708 - DNA, 25 bp, Homo sapien
gattagccttaagctgaacagcagc

SEQ ID NO: 4381709 - DNA, 25 bp, Homo sapien
ctctgatggaggactagggatttct

SEQ ID NO: 4381710 - DNA, 25 bp, Homo sapien
cctgttatagaaggtcagattagcc

SEQ ID NO: 4381711 - DNA, 25 bp, Homo sapien
cagcagcagctacctgggcctttct

SEQ ID NO: 4381712 - DNA, 25 bp, Homo sapien
gagcatttgatttcagctgagcagg

SEQ ID NO: 4381713 - DNA, 25 bp, Homo sapien
tgagcaggtttagtcatctaggagc

SEQ ID NO: 4381714 - DNA, 25 bp, Homo sapien
tgtgtgtgtccattcagggaagcat

SEQ ID NO: 4381715 - DNA, 25 bp, Homo sapien
ttcctcaggtgaagagactctgtgt

SEQ ID NO: 4381716 - DNA, 25 bp, Homo sapien
tcacgtcttcaagtcttgaacagct

SEQ ID NO: 4381717 - DNA, 25 bp, Homo sapien
cagcttcccactgcaatcgataagg

SEQ ID NO: 4381718 - DNA, 25 bp, Homo sapien
taaggccatgccatagagtttgacg

SEQ ID NO: 4381719 - DNA, 25 bp, Homo sapien
cgtcttcaagtcttgaacagcttcc

SEQ ID NO: 4381720 - DNA, 25 bp, Homo sapien
accacctggatgatgtgcagcactg

SEQ ID NO: 4381721 - DNA, 25 bp, Homo sapien
tggatgatgtgcagcactgtttgca

SEQ ID NO: 4381722 - DNA, 25 bp, Homo sapien
cacctggatgatgtgcagcactgtt

SEQ ID NO: 4381723 - DNA, 25 bp, Homo sapien
tgtaggtcatgaagatgagcatgag

SEQ ID NO: 4381724 - DNA, 25 bp, Homo sapien
gctgcccaacagttttgtgtgtcta

SEQ ID NO: 4381725 - DNA, 25 bp, Homo sapien
ttgtgtgtctacataaggatggttc

SEQ ID NO: 4381726 - DNA, 25 bp, Homo sapien
ctgctgcccaacagttttgtgtgtc

SEQ ID NO: 4381727 - DNA, 25 bp, Homo sapien
tctacataaggatggttccatttgg

SEQ ID NO: 4381728 - DNA, 25 bp, Homo sapien
tctcttgggctatcgagtccttcat

SEQ ID NO: 4381729 - DNA, 25 bp, Homo sapien
actgctagtataatcactgccacaa

SEQ ID NO: 4381730 - DNA, 25 bp, Homo sapien
ggctctcttgggctatcgagtcctt

SEQ ID NO: 4381731 - DNA, 25 bp, Homo sapien
tcatagaacactgctagtataatca

SEQ ID NO: 4381732 - DNA, 25 bp, Homo sapien
tgaagaactgagactaaaacatatg

SEQ ID NO: 4381733 - DNA, 25 bp, Homo sapien
cacacacccctattggatctgtttt

SEQ ID NO: 4381734 - DNA, 25 bp, Homo sapien
caaaatattgccgatcattagagaa

SEQ ID NO: 4381735 - DNA, 25 bp, Homo sapien
ccataattatatgagcgaattcctc

SEQ ID NO: 4381736 - DNA, 25 bp, Homo sapien
tgcggaacacgaacagaaccgcggt

SEQ ID NO: 4381737 - DNA, 25 bp, Homo sapien
taagttccgggttggctagctgtac

SEQ ID NO: 4381738 - DNA, 25 bp, Homo sapien
acagcacgatgtgcagggacggcca

SEQ ID NO: 4381739 - DNA, 25 bp, Homo sapien
tgtgagggagtcagacctacctgca

SEQ ID NO: 4381740 - DNA, 25 bp, Homo sapien
cagtttgagaacctgccttcagtga

SEQ ID NO: 4381741 - DNA, 25 bp, Homo sapien
cctaacatgtgtattgaaggtccca

SEQ ID NO: 4381742 - DNA, 25 bp, Homo sapien
tactccactgggcagaagattggga

SEQ ID NO: 4381743 - DNA, 25 bp, Homo sapien
tccaaaggagggcaacacatactgt

SEQ ID NO: 4381744 - DNA, 25 bp, Homo sapien
tagagatccggaatcatttgctgtc

SEQ ID NO: 4381745 - DNA, 25 bp, Homo sapien
tccccttcgtagtgggaaataagca

SEQ ID NO: 4381746 - DNA, 25 bp, Homo sapien
tactataggctttggctcacaattc

SEQ ID NO: 4381747 - DNA, 25 bp, Homo sapien
tctgagagagccttttagagatccg

SEQ ID NO: 4381748 - DNA, 25 bp, Homo sapien
aaaaaagaccttcgatgatgcaggt

SEQ ID NO: 4381749 - DNA, 25 bp, Homo sapien
tttgccagtctgacaagacagttgg

SEQ ID NO: 4381750 - DNA, 25 bp, Homo sapien
tattggttccttcaaatggtgtcaa

SEQ ID NO: 4381751 - DNA, 25 bp, Homo sapien
ggaggatagttatcacagaataaga

SEQ ID NO: 4381752 - DNA, 25 bp, Homo sapien
gtcaaagatgttcccactggcagtg

SEQ ID NO: 4381753 - DNA, 25 bp, Homo sapien
tccgcagcccctaaaagtagcatgg

SEQ ID NO: 4381754 - DNA, 25 bp, Homo sapien
taagcttgggctgttgaaacttcca

SEQ ID NO: 4381755 - DNA, 25 bp, Homo sapien
aattccataactcgcaagtagaggg

SEQ ID NO: 4381756 - DNA, 25 bp, Homo sapien
tacatgatgccatcgtctctgagga

SEQ ID NO: 4381757 - DNA, 25 bp, Homo sapien
caatacttcaccatgacatagcggg

SEQ ID NO: 4381758 - DNA, 25 bp, Homo sapien
ggtgggccagctagtgaaaatcata

SEQ ID NO: 4381759 - DNA, 25 bp, Homo sapien
gatgtccagtttagacgggccctga

SEQ ID NO: 4381760 - DNA, 25 bp, Homo sapien
aacaatttggccatctagtgaccgg

SEQ ID NO: 4381761 - DNA, 25 bp, Homo sapien
taatcagggactttacaaagactca

SEQ ID NO: 4381762 - DNA, 25 bp, Homo sapien
actggagttccatacatagccctga

SEQ ID NO: 4381763 - DNA, 25 bp, Homo sapien
gactcataggtgatacttcctccaa

SEQ ID NO: 4381764 - DNA, 25 bp, Homo sapien
ataaacctttggaactagcctgtat

SEQ ID NO: 4381765 - DNA, 25 bp, Homo sapien
tgcaaattctgcctggatcaaccat

SEQ ID NO: 4381766 - DNA, 25 bp, Homo sapien
ctttgtggcccgtacaacatcatga

SEQ ID NO: 4381767 - DNA, 25 bp, Homo sapien
caaccatatacttctgtaagacttc

SEQ ID NO: 4381768 - DNA, 25 bp, Homo sapien
gcaagatcagagtcctttggaatcc

SEQ ID NO: 4381769 - DNA, 25 bp, Homo sapien
tttccagacggcctagagcaggccc

SEQ ID NO: 4381770 - DNA, 25 bp, Homo sapien
aactggccccacttcgcaagatcag

SEQ ID NO: 4381771 - DNA, 25 bp, Homo sapien
gaagctaagttttccagacggccta

SEQ ID NO: 4381772 - DNA, 25 bp, Homo sapien
catgggtggtacagccaaataaagc

SEQ ID NO: 4381773 - DNA, 25 bp, Homo sapien
aaattttgtaatatctagacacaga

SEQ ID NO: 4381774 - DNA, 25 bp, Homo sapien
aagtagcttgaaattcacctaagaa

SEQ ID NO: 4381775 - DNA, 25 bp, Homo sapien
caggaggaaattcatgggtggtaca

SEQ ID NO: 4381776 - DNA, 25 bp, Homo sapien
tccccagtgccataatccacatgaa

SEQ ID NO: 4381777 - DNA, 25 bp, Homo sapien
atgacgccactacccactctagagg

SEQ ID NO: 4381778 - DNA, 25 bp, Homo sapien
actctagagggcctcaaggcaagga

SEQ ID NO: 4381779 - DNA, 25 bp, Homo sapien
gaatagcaaagccatgacgccacta

SEQ ID NO: 4381780 - DNA, 25 bp, Homo sapien
agcattcaattcctcagccattgct

SEQ ID NO: 4381781 - DNA, 25 bp, Homo sapien
cattgctgtacacagctcatcataa

SEQ ID NO: 4381782 - DNA, 25 bp, Homo sapien
caatggaaacaatgacagcattcaa

SEQ ID NO: 4381783 - DNA, 25 bp, Homo sapien
caattcctcagccattgctgtacac

SEQ ID NO: 4381784 - DNA, 25 bp, Homo sapien
acttgggcagaagaccacgcgcttt

SEQ ID NO: 4381785 - DNA, 25 bp, Homo sapien
tgatggctcagtcccaggtagtgga

SEQ ID NO: 4381786 - DNA, 25 bp, Homo sapien
tttcagtggctcttcgggcttcgga

SEQ ID NO: 4381787 - DNA, 25 bp, Homo sapien
tcctccgtggatataaacgacgctg

SEQ ID NO: 4381788 - DNA, 25 bp, Homo sapien
tgtctgaattcctacaagcagctgc

SEQ ID NO: 4381789 - DNA, 25 bp, Homo sapien
cctacaagcagctgccactggactg

SEQ ID NO: 4381790 - DNA, 25 bp, Homo sapien
cactggactggagggctcattgagc

SEQ ID NO: 4381791 - DNA, 25 bp, Homo sapien
aactgagtgtctgaattcctacaag

SEQ ID NO: 4381792 - DNA, 25 bp, Homo sapien
cggtacaccttgaagagggtccgtg

SEQ ID NO: 4381793 - DNA, 25 bp, Homo sapien
ctttctatagttgttacttctttga

SEQ ID NO: 4381794 - DNA, 25 bp, Homo sapien
cctacccaggtctgatggctgaaga

SEQ ID NO: 4381795 - DNA, 25 bp, Homo sapien
tggaaccagacaaagaaatccggtg

SEQ ID NO: 4381796 - DNA, 25 bp, Homo sapien
tccataaccattccaggatctaggg

SEQ ID NO: 4381797 - DNA, 25 bp, Homo sapien
gataaagggtactcattacgcccca

SEQ ID NO: 4381798 - DNA, 25 bp, Homo sapien
gaaaagggctggaactaaggtgcaa

SEQ ID NO: 4381799 - DNA, 25 bp, Homo sapien
catcataggtatggctaacaaggaa

SEQ ID NO: 4381800 - DNA, 25 bp, Homo sapien
tgaaatccagtaaggtgtctggccc

SEQ ID NO: 4381801 - DNA, 25 bp, Homo sapien
aagggttgcacaagctcagagaaga

SEQ ID NO: 4381802 - DNA, 25 bp, Homo sapien
tcttcaatcactgacccccttcttc

SEQ ID NO: 4381803 - DNA, 25 bp, Homo sapien
cttcaatcactgacccccttcttcc

SEQ ID NO: 4381804 - DNA, 25 bp, Homo sapien
tgacctaaggttgcgcagtaaagca

SEQ ID NO: 4381805 - DNA, 25 bp, Homo sapien
cagtaaagcacggttagtcccatca

SEQ ID NO: 4381806 - DNA, 25 bp, Homo sapien
tcacacaggtttaggaagtcaaagg

SEQ ID NO: 4381807 - DNA, 25 bp, Homo sapien
tgtcttcaaccatgggcggcatatt

SEQ ID NO: 4381808 - DNA, 25 bp, Homo sapien
gcaacatgatcagacaagcagctct

SEQ ID NO: 4381809 - DNA, 25 bp, Homo sapien
gctctcagatgacatgtgacaatat

SEQ ID NO: 4381810 - DNA, 25 bp, Homo sapien
caatcttagcaagcagcttctcaat

SEQ ID NO: 4381811 - DNA, 25 bp, Homo sapien
gacaatattaaattcaatcttagca

SEQ ID NO: 4381812 - DNA, 25 bp, Homo sapien
taaggacaatttctacagccagtag

SEQ ID NO: 4381813 - DNA, 25 bp, Homo sapien
tagcatcagtacaaaagcccaagcc

SEQ ID NO: 4381814 - DNA, 25 bp, Homo sapien
ccaagacgttggaacaagtcactcc

SEQ ID NO: 4381815 - DNA, 25 bp, Homo sapien
tcaagttaatgcagctcagtccctc

SEQ ID NO: 4381816 - DNA, 25 bp, Homo sapien
ttctttgccaaggtaatgggtgagg

SEQ ID NO: 4381817 - DNA, 25 bp, Homo sapien
tctttgccaaggtaatgggtgaggc

SEQ ID NO: 4381818 - DNA, 25 bp, Homo sapien
ctttgccaaggtaatgggtgaggca

SEQ ID NO: 4381819 - DNA, 25 bp, Homo sapien
tttgccaaggtaatgggtgaggcat

SEQ ID NO: 4381820 - DNA, 25 bp, Homo sapien
ggacagacaactgatctcttcatgc

SEQ ID NO: 4381821 - DNA, 25 bp, Homo sapien
tggacagacaactgatctcttcatg

SEQ ID NO: 4381822 - DNA, 25 bp, Homo sapien
tttggtttgtgtgcaacttccctgt

SEQ ID NO: 4381823 - DNA, 25 bp, Homo sapien
gtttggtttgtgtgcaacttccctg

SEQ ID NO: 4381824 - DNA, 25 bp, Homo sapien
gacaagtacgacaaccagatctctg

SEQ ID NO: 4381825 - DNA, 25 bp, Homo sapien
cagaacagcagatggaggacacaac

SEQ ID NO: 4381826 - DNA, 25 bp, Homo sapien
cccagcaggcggtgagaaatttact

SEQ ID NO: 4381827 - DNA, 25 bp, Homo sapien
caactttgcaatgagagcaggctga

SEQ ID NO: 4381828 - DNA, 25 bp, Homo sapien
tgtattcacatagtgactagtgttc

SEQ ID NO: 4381829 - DNA, 25 bp, Homo sapien
ctggtactacacatagtgtattcac

SEQ ID NO: 4381830 - DNA, 25 bp, Homo sapien
gttcacacagtgtaaaagatgtcca

SEQ ID NO: 4381831 - DNA, 25 bp, Homo sapien
catagtgactagtgttcacacagtg

SEQ ID NO: 4381832 - DNA, 25 bp, Homo sapien
catccagggattatgtaacttaaac

SEQ ID NO: 4381833 - DNA, 25 bp, Homo sapien
taaagcagctatgacatccagggat

SEQ ID NO: 4381834 - DNA, 25 bp, Homo sapien
aacattgtctactccctgacatcca

SEQ ID NO: 4381835 - DNA, 25 bp, Homo sapien
cttaaacattgtctactccctgaca

SEQ ID NO: 4381836 - DNA, 25 bp, Homo sapien
caaagccacaaggaccaatctgtat

SEQ ID NO: 4381837 - DNA, 25 bp, Homo sapien
gacacattctgggtagccaataaat

SEQ ID NO: 4381838 - DNA, 25 bp, Homo sapien
aatatgctggcgctttaaaaatgaa

SEQ ID NO: 4381839 - DNA, 25 bp, Homo sapien
aaagaccctgaaagcaaaccgtgtg

SEQ ID NO: 4381840 - DNA, 25 bp, Homo sapien
acagaaaaggctactaagcctgtga

SEQ ID NO: 4381841 - DNA, 25 bp, Homo sapien
cccactgtccttaacaaaagtatag

SEQ ID NO: 4381842 - DNA, 25 bp, Homo sapien
gttatacaactatagaactaatagg

SEQ ID NO: 4381843 - DNA, 25 bp, Homo sapien
taggatttaatctaaaatggactaa

SEQ ID NO: 4381844 - DNA, 25 bp, Homo sapien
tgacaggcccattgcagtcctcagg

SEQ ID NO: 4381845 - DNA, 25 bp, Homo sapien
ttgacatcactccaacagacaggtt

SEQ ID NO: 4381846 - DNA, 25 bp, Homo sapien
catcagttttggaggacatccttga

SEQ ID NO: 4381847 - DNA, 25 bp, Homo sapien
tgctggcagtactccgtctgggctt

SEQ ID NO: 4381848 - DNA, 25 bp, Homo sapien
tgatgattcatatatccagttagaa

SEQ ID NO: 4381849 - DNA, 25 bp, Homo sapien
tgggttaatgtattcaaatcgtggt

SEQ ID NO: 4381850 - DNA, 25 bp, Homo sapien
caatagtacttatgtaacaaggttg

SEQ ID NO: 4381851 - DNA, 25 bp, Homo sapien
cagcaaactaaatctacggacccta

SEQ ID NO: 4381852 - DNA, 25 bp, Homo sapien
gccaaaatgcctagctgtagccaat

SEQ ID NO: 4381853 - DNA, 25 bp, Homo sapien
tatctttaaagcaaatactgaggcc

SEQ ID NO: 4381854 - DNA, 25 bp, Homo sapien
gaggttgtcactgtagctatagccc

SEQ ID NO: 4381855 - DNA, 25 bp, Homo sapien
tctagccactggatcatacccaaat

SEQ ID NO: 4381856 - DNA, 25 bp, Homo sapien
catgattattaatagcagtccctgc

SEQ ID NO: 4381857 - DNA, 25 bp, Homo sapien
aaaaaacactgttgacctagcatga

SEQ ID NO: 4381858 - DNA, 25 bp, Homo sapien
tacggctacctaaatacatgtaact

SEQ ID NO: 4381859 - DNA, 25 bp, Homo sapien
gaaaggtgagcttcccaataggtat

SEQ ID NO: 4381860 - DNA, 25 bp, Homo sapien
tcaggctccacctcgtataaacggt

SEQ ID NO: 4381861 - DNA, 25 bp, Homo sapien
caggctggaatcgaattcaggctcc

SEQ ID NO: 4381862 - DNA, 25 bp, Homo sapien
ttacagttgtaagcgaccacgcctg

SEQ ID NO: 4381863 - DNA, 25 bp, Homo sapien
cttgagttcaggagtaacacaggct

SEQ ID NO: 4381864 - DNA, 25 bp, Homo sapien
tcataggtactatctgcagagacca

SEQ ID NO: 4381865 - DNA, 25 bp, Homo sapien
cacaccaggtagctgaatcaatctg

SEQ ID NO: 4381866 - DNA, 25 bp, Homo sapien
taatgtgcatgaagaaatacgcatc

SEQ ID NO: 4381867 - DNA, 25 bp, Homo sapien
cacagagaattcaggtgaggtgaca

SEQ ID NO: 4381868 - DNA, 25 bp, Homo sapien
tcttgacaccagtgctaaagaaggg

SEQ ID NO: 4381869 - DNA, 25 bp, Homo sapien
gggcaggggtctatagcttcataga

SEQ ID NO: 4381870 - DNA, 25 bp, Homo sapien
ggggggcaggggtctatagcttcat

SEQ ID NO: 4381871 - DNA, 25 bp, Homo sapien
taaagaaggggatgatcattttcac

SEQ ID NO: 4381872 - DNA, 25 bp, Homo sapien
tgctgtctccgggaacggagcgctc

SEQ ID NO: 4381873 - DNA, 25 bp, Homo sapien
cattgcgagactgcccttgcctgct

SEQ ID NO: 4381874 - DNA, 25 bp, Homo sapien
cctggggacattgcgagactgccct

SEQ ID NO: 4381875 - DNA, 25 bp, Homo sapien
tctccgggaacggagcgctccacag

SEQ ID NO: 4381876 - DNA, 25 bp, Homo sapien
aaatattgcgtaagaggaggaagag

SEQ ID NO: 4381877 - DNA, 25 bp, Homo sapien
aatattgcgtaagaggaggaagaga

SEQ ID NO: 4381878 - DNA, 25 bp, Homo sapien
ccaggcagcgggatgtagacgtaat

SEQ ID NO: 4381879 - DNA, 25 bp, Homo sapien
cggaaagtggcgtccagcagcatca

SEQ ID NO: 4381880 - DNA, 25 bp, Homo sapien
gggtcggacacggagccaggcagcg

SEQ ID NO: 4381881 - DNA, 25 bp, Homo sapien
gtagacgtaataggcggccagcgcc

SEQ ID NO: 4381882 - DNA, 25 bp, Homo sapien
gcaaagaggaaagggcgataccacc

SEQ ID NO: 4381883 - DNA, 25 bp, Homo sapien
ctcggctcgccagcgggctggcaaa

SEQ ID NO: 4381884 - DNA, 25 bp, Homo sapien
ttgccctggctcggctcgccagcgg

SEQ ID NO: 4381885 - DNA, 25 bp, Homo sapien
gctcgccagcgggctggcaaagagg

SEQ ID NO: 4381886 - DNA, 25 bp, Homo sapien
tgtggcagtcactacaggtttgagg

SEQ ID NO: 4381887 - DNA, 25 bp, Homo sapien
gagtctctggacaaagcaagtgggt

SEQ ID NO: 4381888 - DNA, 25 bp, Homo sapien
ccctctacggtgtccttgcaaagtg

SEQ ID NO: 4381889 - DNA, 25 bp, Homo sapien
cacgcgtttcttataagcccaggag

SEQ ID NO: 4381890 - DNA, 25 bp, Homo sapien
gagtcaaagtgtctgtacctggtag

SEQ ID NO: 4381891 - DNA, 25 bp, Homo sapien
gaagaggcccacttgggaatgacag

SEQ ID NO: 4381892 - DNA, 25 bp, Homo sapien
agcctattgtagagaagtgttcggg

SEQ ID NO: 4381893 - DNA, 25 bp, Homo sapien
gggaccccaaggtgtgaaatctctg

SEQ ID NO: 4381894 - DNA, 25 bp, Homo sapien
catgaacaattgataaagcaacagt

SEQ ID NO: 4381895 - DNA, 25 bp, Homo sapien
caattgataaagcaacagtaacaag

SEQ ID NO: 4381896 - DNA, 25 bp, Homo sapien
gaacaattgataaagcaacagtaac

SEQ ID NO: 4381897 - DNA, 25 bp, Homo sapien
tcatgaacaattgataaagcaacag

SEQ ID NO: 4381898 - DNA, 25 bp, Homo sapien
aagggattttggcaagccgcgcagc

SEQ ID NO: 4381899 - DNA, 25 bp, Homo sapien
gcttatctcagagtgcgccgtggtt

SEQ ID NO: 4381900 - DNA, 25 bp, Homo sapien
cctagtgaccgcgaattccggagcg

SEQ ID NO: 4381901 - DNA, 25 bp, Homo sapien
gctcttttgcctgcggtcgacgtcc

SEQ ID NO: 4381902 - DNA, 25 bp, Homo sapien
tgtgcctggctgtctaagtgccctt

SEQ ID NO: 4381903 - DNA, 25 bp, Homo sapien
ctcccttagtgtatttgtgtagcaa

SEQ ID NO: 4381904 - DNA, 25 bp, Homo sapien
tactctcactaggattgaatcttag

SEQ ID NO: 4381905 - DNA, 25 bp, Homo sapien
tataataggagaaaatactctcact

SEQ ID NO: 4381906 - DNA, 25 bp, Homo sapien
tataaaatcaaaacggtgagtatat

SEQ ID NO: 4381907 - DNA, 25 bp, Homo sapien
aatatagtgaatgtttagcttgtcg

SEQ ID NO: 4381908 - DNA, 25 bp, Homo sapien
cacacgcgtggtcttaatatagtga

SEQ ID NO: 4381909 - DNA, 25 bp, Homo sapien
tagcttgtcgttactattataaaat

SEQ ID NO: 4381910 - DNA, 25 bp, Homo sapien
accactgttacctatcagatatagg

SEQ ID NO: 4381911 - DNA, 25 bp, Homo sapien
gcacacatatgctcccatgaaacca

SEQ ID NO: 4381912 - DNA, 25 bp, Homo sapien
tgacacagcaccagttcactagtcc

SEQ ID NO: 4381913 - DNA, 25 bp, Homo sapien
caacatcagttatacatgcttagat

SEQ ID NO: 4381914 - DNA, 25 bp, Homo sapien
gatggctgtggtaattgcttctctc

SEQ ID NO: 4381915 - DNA, 25 bp, Homo sapien
agtaatcgctcctcggatagacctc

SEQ ID NO: 4381916 - DNA, 25 bp, Homo sapien
tagcagtaatcgctcctcggataga

SEQ ID NO: 4381917 - DNA, 25 bp, Homo sapien
gcagtaatcgctcctcggatagacc

SEQ ID NO: 4381918 - DNA, 25 bp, Homo sapien
tttttcaattagcagtaatcgctcc

SEQ ID NO: 4381919 - DNA, 25 bp, Homo sapien
caactgagcttatccatatatacag

SEQ ID NO: 4381920 - DNA, 25 bp, Homo sapien
gttcataaaagtaaggatacaactg

SEQ ID NO: 4381921 - DNA, 25 bp, Homo sapien
tgaatttgcctctatatcttatgga

SEQ ID NO: 4381922 - DNA, 25 bp, Homo sapien
tgcctctatatcttatggacataag

SEQ ID NO: 4381923 - DNA, 25 bp, Homo sapien
ggaaggtgaccatcaaacagaagaa

SEQ ID NO: 4381924 - DNA, 25 bp, Homo sapien
cagacaggccaacgcccagaatggc

SEQ ID NO: 4381925 - DNA, 25 bp, Homo sapien
caaacagaagaaccccccatggcct

SEQ ID NO: 4381926 - DNA, 25 bp, Homo sapien
ctcagacaggccaacgcccagaatg

SEQ ID NO: 4381927 - DNA, 25 bp, Homo sapien
tagacacctggtgcaacagtggatc

SEQ ID NO: 4381928 - DNA, 25 bp, Homo sapien
aatgaacagtgccccagtggtctgc

SEQ ID NO: 4381929 - DNA, 25 bp, Homo sapien
caataaattggttgctgtgtcaatg

SEQ ID NO: 4381930 - DNA, 25 bp, Homo sapien
gatctgagccggagaaatgaacagt

SEQ ID NO: 4381931 - DNA, 25 bp, Homo sapien
ggtccaataatagtaagtccctggc

SEQ ID NO: 4381932 - DNA, 25 bp, Homo sapien
tcaagaacggtccaataatagtaag

SEQ ID NO: 4381933 - DNA, 25 bp, Homo sapien
ccagaggtattgatactccaaagcc

SEQ ID NO: 4381934 - DNA, 25 bp, Homo sapien
ttgtacttgcatgaatgcccagagg

SEQ ID NO: 4381935 - DNA, 25 bp, Homo sapien
gactggggcgaattacttcctgtgg

SEQ ID NO: 4381936 - DNA, 25 bp, Homo sapien
agttcattaatccacattgcacaca

SEQ ID NO: 4381937 - DNA, 25 bp, Homo sapien
ccagcaggtcaagttcattaatcca

SEQ ID NO: 4381938 - DNA, 25 bp, Homo sapien
gaactattgctggaaaaagactggg

SEQ ID NO: 4381939 - DNA, 25 bp, Homo sapien
ctctctctccttccttgctacaccc

SEQ ID NO: 4381940 - DNA, 25 bp, Homo sapien
ctctccttccttgctacacccttac

SEQ ID NO: 4381941 - DNA, 25 bp, Homo sapien
ctctctccttccttgctacaccctt

SEQ ID NO: 4381942 - DNA, 25 bp, Homo sapien
tctctctccttccttgctacaccct

SEQ ID NO: 4381943 - DNA, 25 bp, Homo sapien
tcggcagtttttgtaacgcttctgt

SEQ ID NO: 4381944 - DNA, 25 bp, Homo sapien
cccaaacagccagcgatttattcat

SEQ ID NO: 4381945 - DNA, 25 bp, Homo sapien
tccgctcctttgtaaagagataggc

SEQ ID NO: 4381946 - DNA, 25 bp, Homo sapien
taaagagataggcaatatttcggca

SEQ ID NO: 4381947 - DNA, 25 bp, Homo sapien
gcctgcctccaggtgtcattacact

SEQ ID NO: 4381948 - DNA, 25 bp, Homo sapien
ctttcctttgatggtttgtcataaa

SEQ ID NO: 4381949 - DNA, 25 bp, Homo sapien
ttgtcataaatagctgcctgcctcc

SEQ ID NO: 4381950 - DNA, 25 bp, Homo sapien
gcctccaggtgtcattacactccat

SEQ ID NO: 4381951 - DNA, 25 bp, Homo sapien
cacagtactaggtgggcattggagt

SEQ ID NO: 4381952 - DNA, 25 bp, Homo sapien
cagcttcacagtactaggtgggcat

SEQ ID NO: 4381953 - DNA, 25 bp, Homo sapien
tggtgacaagcttttgttatccagc

SEQ ID NO: 4381954 - DNA, 25 bp, Homo sapien
gatatcttagtggtagtgcctgctc

SEQ ID NO: 4381955 - DNA, 25 bp, Homo sapien
gaaactgtcctctaattggtataga

SEQ ID NO: 4381956 - DNA, 25 bp, Homo sapien
aaactgtcctctaattggtatagaa

SEQ ID NO: 4381957 - DNA, 25 bp, Homo sapien
cattccacaggcgaggcttgggctt

SEQ ID NO: 4381958 - DNA, 25 bp, Homo sapien
tctgccaggactttggttaaggctc

SEQ ID NO: 4381959 - DNA, 25 bp, Homo sapien
tgaacacaatcacgaggctctgcca

SEQ ID NO: 4381960 - DNA, 25 bp, Homo sapien
agaccaaggctttcggctctctcca

SEQ ID NO: 4381961 - DNA, 25 bp, Homo sapien
aaagattggctgctcaccagtgagc

SEQ ID NO: 4381962 - DNA, 25 bp, Homo sapien
ctcttggaacctaagctggcctgtg

SEQ ID NO: 4381963 - DNA, 25 bp, Homo sapien
gtgagcctttctagatacccagtgg

SEQ ID NO: 4381964 - DNA, 25 bp, Homo sapien
tgctgtgcaagttctaggcttaccc

SEQ ID NO: 4381965 - DNA, 25 bp, Homo sapien
gatttgacccaaaatggacattttc

SEQ ID NO: 4381966 - DNA, 25 bp, Homo sapien
tctttgagaataatagatctttttc

SEQ ID NO: 4381967 - DNA, 25 bp, Homo sapien
cctccaaacagatttgacccaaaat

SEQ ID NO: 4381968 - DNA, 25 bp, Homo sapien
caaacagatttgacccaaaatggac

SEQ ID NO: 4381969 - DNA, 25 bp, Homo sapien
ttttggatcatattccacacacgtt

SEQ ID NO: 4381970 - DNA, 25 bp, Homo sapien
catagcatctgccattagtgactgc

SEQ ID NO: 4381971 - DNA, 25 bp, Homo sapien
tggatcatattccacacacgttcat

SEQ ID NO: 4381972 - DNA, 25 bp, Homo sapien
ccttcaagggtgtccatagcatctg

SEQ ID NO: 4381973 - DNA, 25 bp, Homo sapien
tatcagtgtggaattcacacagaaa

SEQ ID NO: 4381974 - DNA, 25 bp, Homo sapien
ttatcagtgtggaattcacacagaa

SEQ ID NO: 4381975 - DNA, 25 bp, Homo sapien
ctgtggcaccaagataaaaattatc

SEQ ID NO: 4381976 - DNA, 25 bp, Homo sapien
tagggaatggttgctagctctgcca

SEQ ID NO: 4381977 - DNA, 25 bp, Homo sapien
tgcttgattaatcacctgggactgc

SEQ ID NO: 4381978 - DNA, 25 bp, Homo sapien
gactgatgtcctgtaggtagggaat

SEQ ID NO: 4381979 - DNA, 25 bp, Homo sapien
gaggctggcatattgcaacttctcc

SEQ ID NO: 4381980 - DNA, 25 bp, Homo sapien
ttcattaaaactctttgaaacaatc

SEQ ID NO: 4381981 - DNA, 25 bp, Homo sapien
ctttgaaacaatcttccaaaaactg

SEQ ID NO: 4381982 - DNA, 25 bp, Homo sapien
ctacttcaatttcattaaaactctt

SEQ ID NO: 4381983 - DNA, 25 bp, Homo sapien
taaaactctttgaaacaatcttcca

SEQ ID NO: 4381984 - DNA, 25 bp, Homo sapien
tatcttctctggtcagaccgaaagg

SEQ ID NO: 4381985 - DNA, 25 bp, Homo sapien
attcaattgggtgcttctaataaaa

SEQ ID NO: 4381986 - DNA, 25 bp, Homo sapien
taaaatccaatattggcaagattcg

SEQ ID NO: 4381987 - DNA, 25 bp, Homo sapien
ggcaagattcgcttccccattgtct

SEQ ID NO: 4381988 - DNA, 25 bp, Homo sapien
tgtgaatatcggcagcttcctgctt

SEQ ID NO: 4381989 - DNA, 25 bp, Homo sapien
gcagcttcctgcttgatattttttc

SEQ ID NO: 4381990 - DNA, 25 bp, Homo sapien
ctgtgaatatcggcagcttcctgct

SEQ ID NO: 4381991 - DNA, 25 bp, Homo sapien
tatcggcagcttcctgcttgatatt

SEQ ID NO: 4381992 - DNA, 25 bp, Homo sapien
tgtttttgaacccaagagtcaagag

SEQ ID NO: 4381993 - DNA, 25 bp, Homo sapien
ccaagagtcaagagatattgttggg

SEQ ID NO: 4381994 - DNA, 25 bp, Homo sapien
gggaggaaaagatgaccagtcaact

SEQ ID NO: 4381995 - DNA, 25 bp, Homo sapien
gaacccaagagtcaagagatattgt

SEQ ID NO: 4381996 - DNA, 25 bp, Homo sapien
ggcaacatgtggagtgcttgaagat

SEQ ID NO: 4381997 - DNA, 25 bp, Homo sapien
gaggcaacatgtggagtgcttgaag

SEQ ID NO: 4381998 - DNA, 25 bp, Homo sapien
aggcaacatgtggagtgcttgaaga

SEQ ID NO: 4381999 - DNA, 25 bp, Homo sapien
atgccacctcgagcttctccacaga

SEQ ID NO: 4382000 - DNA, 25 bp, Homo sapien
tcgagcttctccacagaacctcagt

SEQ ID NO: 4382001 - DNA, 25 bp, Homo sapien
gcttctccacagaacctcagttttt

SEQ ID NO: 4382002 - DNA, 25 bp, Homo sapien
agatgccacctcgagcttctccaca

SEQ ID NO: 4382003 - DNA, 25 bp, Homo sapien
ggctcatggcactgtcacgtgacca

SEQ ID NO: 4382004 - DNA, 25 bp, Homo sapien
tgacctaaagttgggcagagtttct

SEQ ID NO: 4382005 - DNA, 25 bp, Homo sapien
cgtgaccagggagcaataaactcga

SEQ ID NO: 4382006 - DNA, 25 bp, Homo sapien
tctatgcttgatgaaggtgacctaa

SEQ ID NO: 4382007 - DNA, 25 bp, Homo sapien
tgcagtgaaagcttcataattgtat

SEQ ID NO: 4382008 - DNA, 25 bp, Homo sapien
gcagtgaaagcttcataattgtatt

SEQ ID NO: 4382009 - DNA, 25 bp, Homo sapien
ctgcagtgaaagcttcataattgta

SEQ ID NO: 4382010 - DNA, 25 bp, Homo sapien
tggagaatgcagcaagggaaaaatg

SEQ ID NO: 4382011 - DNA, 25 bp, Homo sapien
gagagggctacgacaacttctagtc

SEQ ID NO: 4382012 - DNA, 25 bp, Homo sapien
aaaatggcagagtaacatagccagt

SEQ ID NO: 4382013 - DNA, 25 bp, Homo sapien
tgtcctaagggtcctggcttgctgg

SEQ ID NO: 4382014 - DNA, 25 bp, Homo sapien
cagctctaatcacctctctgcatct

SEQ ID NO: 4382015 - DNA, 25 bp, Homo sapien
gagaggtgtccagagctaaaaataa

SEQ ID NO: 4382016 - DNA, 25 bp, Homo sapien
tcagctcttatttttgtcgcaaatg

SEQ ID NO: 4382017 - DNA, 25 bp, Homo sapien
tgtacatatactctgcatatgcagg

SEQ ID NO: 4382018 - DNA, 25 bp, Homo sapien
caggatgagtttttgtgaaagcatc

SEQ ID NO: 4382019 - DNA, 25 bp, Homo sapien
tgtacataaccgagaaagattcagc

SEQ ID NO: 4382020 - DNA, 25 bp, Homo sapien
tagggattcgaatgtatacatttga

SEQ ID NO: 4382021 - DNA, 25 bp, Homo sapien
tgatttaggacagaacaaggtttag

SEQ ID NO: 4382022 - DNA, 25 bp, Homo sapien
aagatggcatagacttggcactctc

SEQ ID NO: 4382023 - DNA, 25 bp, Homo sapien
gatggcatagacttggcactctctg

SEQ ID NO: 4382024 - DNA, 25 bp, Homo sapien
taaattaagtcaagcattcgctggg

SEQ ID NO: 4382025 - DNA, 25 bp, Homo sapien
tcacatgtgagcgtaaaaacagagt

SEQ ID NO: 4382026 - DNA, 25 bp, Homo sapien
caagattggaaggaggcatgtctca

SEQ ID NO: 4382027 - DNA, 25 bp, Homo sapien
gaaaaattttttcgcatcagatgga

SEQ ID NO: 4382028 - DNA, 25 bp, Homo sapien
agccagaacatgtagtcagcaatca

SEQ ID NO: 4382029 - DNA, 25 bp, Homo sapien
acagtttgatgagcttgcttatgct

SEQ ID NO: 4382030 - DNA, 25 bp, Homo sapien
gtttgatgagcttgcttatgctctc

SEQ ID NO: 4382031 - DNA, 25 bp, Homo sapien
aacatgtagtcagcaatcatggcac

SEQ ID NO: 4382032 - DNA, 25 bp, Homo sapien
tctatgcctaattgcctgattctaa

SEQ ID NO: 4382033 - DNA, 25 bp, Homo sapien
gccttcttctatgcctaattgcctg

SEQ ID NO: 4382034 - DNA, 25 bp, Homo sapien
gcctaattgcctgattctaatatct

SEQ ID NO: 4382035 - DNA, 25 bp, Homo sapien
tcttctatgcctaattgcctgattc

SEQ ID NO: 4382036 - DNA, 25 bp, Homo sapien
tagggacagtgatactctctggcta

SEQ ID NO: 4382037 - DNA, 25 bp, Homo sapien
cctgccaggcttgtgtttaataggg

SEQ ID NO: 4382038 - DNA, 25 bp, Homo sapien
tctggaccccatttgctgtctggaa

SEQ ID NO: 4382039 - DNA, 25 bp, Homo sapien
gggaacaatccagggttatctgtat

SEQ ID NO: 4382040 - DNA, 25 bp, Homo sapien
aaatattgattggctgctgttacaa

SEQ ID NO: 4382041 - DNA, 25 bp, Homo sapien
tgggtcctgatagggccatatggat

SEQ ID NO: 4382042 - DNA, 25 bp, Homo sapien
gttgggtcctgatagggccatatgg

SEQ ID NO: 4382043 - DNA, 25 bp, Homo sapien
ttgggtcctgatagggccatatgga

SEQ ID NO: 4382044 - DNA, 25 bp, Homo sapien
gctctgattctctggagtgttgatg

SEQ ID NO: 4382045 - DNA, 25 bp, Homo sapien
cccacagggaattttcctaccagtg

SEQ ID NO: 4382046 - DNA, 25 bp, Homo sapien
gcctggtaaaccttagagaagcttc

SEQ ID NO: 4382047 - DNA, 25 bp, Homo sapien
gagaagcttccttcgcactcatttt

SEQ ID NO: 4382048 - DNA, 25 bp, Homo sapien
gggtcactctcccatgatggacagt

SEQ ID NO: 4382049 - DNA, 25 bp, Homo sapien
gaatgtatggttcttcaatcttgaa

SEQ ID NO: 4382050 - DNA, 25 bp, Homo sapien
tcttggaacatttccctaccagcag

SEQ ID NO: 4382051 - DNA, 25 bp, Homo sapien
cttcaggtatgcatggaaatctgga

SEQ ID NO: 4382052 - DNA, 25 bp, Homo sapien
cttgtaagcaaccttcacaattagt

SEQ ID NO: 4382053 - DNA, 25 bp, Homo sapien
accttcacaattagtggcatcaaga

SEQ ID NO: 4382054 - DNA, 25 bp, Homo sapien
gcagaccgatccagaaacagaactt

SEQ ID NO: 4382055 - DNA, 25 bp, Homo sapien
tttatgtgcataatagtgtgatgaa

SEQ ID NO: 4382056 - DNA, 25 bp, Homo sapien
tgattccggaaataggctgggttta

SEQ ID NO: 4382057 - DNA, 25 bp, Homo sapien
gttgcttgacgaagatgattccgga

SEQ ID NO: 4382058 - DNA, 25 bp, Homo sapien
tacctctccagacatctaaacactg

SEQ ID NO: 4382059 - DNA, 25 bp, Homo sapien
catctaaacactgttgcttgacgaa

SEQ ID NO: 4382060 - DNA, 25 bp, Homo sapien
ggcagtcctcagcatgggagcacac

SEQ ID NO: 4382061 - DNA, 25 bp, Homo sapien
tgccagcttcaagtgtcaaaatgaa

SEQ ID NO: 4382062 - DNA, 25 bp, Homo sapien
tcagcatgggagcacaccctaatct

SEQ ID NO: 4382063 - DNA, 25 bp, Homo sapien
aaatgaacatctcccaaaggcagtc

SEQ ID NO: 4382064 - DNA, 25 bp, Homo sapien
tgtctcaatgaaacttgccacgctt

SEQ ID NO: 4382065 - DNA, 25 bp, Homo sapien
tatcttcagcaggtgcatcaaatgg

SEQ ID NO: 4382066 - DNA, 25 bp, Homo sapien
gataacaggtaacaagctttgtctc

SEQ ID NO: 4382067 - DNA, 25 bp, Homo sapien
tgtgtgcatgattcagggcaagatc

SEQ ID NO: 4382068 - DNA, 25 bp, Homo sapien
tatggtttccggattccagttgagt

SEQ ID NO: 4382069 - DNA, 25 bp, Homo sapien
ttttctttatgactctcaatgcttt

SEQ ID NO: 4382070 - DNA, 25 bp, Homo sapien
tctttatgactctcaatgcttttct

SEQ ID NO: 4382071 - DNA, 25 bp, Homo sapien
ttggaaatatggtttccggattcca

SEQ ID NO: 4382072 - DNA, 25 bp, Homo sapien
tagatcttttacatatagaacttcc

SEQ ID NO: 4382073 - DNA, 25 bp, Homo sapien
acagtgctgttagatcttttacata

SEQ ID NO: 4382074 - DNA, 25 bp, Homo sapien
tcttttacatatagaacttcctttg

SEQ ID NO: 4382075 - DNA, 25 bp, Homo sapien
cacagtgctgttagatcttttacat

SEQ ID NO: 4382076 - DNA, 25 bp, Homo sapien
cactatcataggatggtaatcgggt

SEQ ID NO: 4382077 - DNA, 25 bp, Homo sapien
tcagcgctggcactatcataggatg

SEQ ID NO: 4382078 - DNA, 25 bp, Homo sapien
aatcgggttctaatgcaagtttgta

SEQ ID NO: 4382079 - DNA, 25 bp, Homo sapien
ggcatttgggtcagcgctggcacta

SEQ ID NO: 4382080 - DNA, 25 bp, Homo sapien
gggctgcatacaaataggaactgtg

SEQ ID NO: 4382081 - DNA, 25 bp, Homo sapien
gagtcagacggtgggtgtgcagcac

SEQ ID NO: 4382082 - DNA, 25 bp, Homo sapien
caaataggaactgtggctcttcccc

SEQ ID NO: 4382083 - DNA, 25 bp, Homo sapien
tagcatgagtcagatgagtcagacg

SEQ ID NO: 4382084 - DNA, 25 bp, Homo sapien
ttgcaccactttcacgacaacatct

SEQ ID NO: 4382085 - DNA, 25 bp, Homo sapien
cactttcacgacaacatctcacatt

SEQ ID NO: 4382086 - DNA, 25 bp, Homo sapien
taatactttactctttacattgcac

SEQ ID NO: 4382087 - DNA, 25 bp, Homo sapien
tctttacattgcaccactttcacga

SEQ ID NO: 4382088 - DNA, 25 bp, Homo sapien
tctataggtacagtatgtcatgagc

SEQ ID NO: 4382089 - DNA, 25 bp, Homo sapien
tgggcagctaagtgatgaaagcaac

SEQ ID NO: 4382090 - DNA, 25 bp, Homo sapien
tcatcaacaaagcaaggccaatggt

SEQ ID NO: 4382091 - DNA, 25 bp, Homo sapien
gcatacagtttggtccttctatagg

SEQ ID NO: 4382092 - DNA, 25 bp, Homo sapien
ccagaacccctcaatgtaattgcaa

SEQ ID NO: 4382093 - DNA, 25 bp, Homo sapien
gtaattgcaactttccatttcatag

SEQ ID NO: 4382094 - DNA, 25 bp, Homo sapien
tttatgtaaactgggaactgcaaaa

SEQ ID NO: 4382095 - DNA, 25 bp, Homo sapien
cactgcttattacagtatggccaga

SEQ ID NO: 4382096 - DNA, 25 bp, Homo sapien
gccaaggcgtatttcttttgtctat

SEQ ID NO: 4382097 - DNA, 25 bp, Homo sapien
tttgtctatagcaagagctggcatc

SEQ ID NO: 4382098 - DNA, 25 bp, Homo sapien
tatttcttttgtctatagcaagagc

SEQ ID NO: 4382099 - DNA, 25 bp, Homo sapien
tgtctatagcaagagctggcatcct

SEQ ID NO: 4382100 - DNA, 25 bp, Homo sapien
gaaattatgtacactcaaagggtct

SEQ ID NO: 4382101 - DNA, 25 bp, Homo sapien
cagcagcttggcatgttggctgact

SEQ ID NO: 4382102 - DNA, 25 bp, Homo sapien
gctgactcccagtagacatgaagga

SEQ ID NO: 4382103 - DNA, 25 bp, Homo sapien
tcaaagggtctactatttcagcagc

SEQ ID NO: 4382104 - DNA, 25 bp, Homo sapien
gatttctacctgtttacctccacag

SEQ ID NO: 4382105 - DNA, 25 bp, Homo sapien
gatagatcctattcactgcattctc

SEQ ID NO: 4382106 - DNA, 25 bp, Homo sapien
tgggtgcgctaaggtggacattttc

SEQ ID NO: 4382107 - DNA, 25 bp, Homo sapien
gaggcatggtgattaactgattgtc

SEQ ID NO: 4382108 - DNA, 25 bp, Homo sapien
cccctttgtaccattggacacatat

SEQ ID NO: 4382109 - DNA, 25 bp, Homo sapien
tttgtaccattggacacatatgttg

SEQ ID NO: 4382110 - DNA, 25 bp, Homo sapien
ccctttgtaccattggacacatatg

SEQ ID NO: 4382111 - DNA, 25 bp, Homo sapien
cctttgtaccattggacacatatgt

SEQ ID NO: 4382112 - DNA, 25 bp, Homo sapien
aagtgtcttaaatgtgcaggctgaa

SEQ ID NO: 4382113 - DNA, 25 bp, Homo sapien
aaatgtgcaggctgaaaaagcatgg

SEQ ID NO: 4382114 - DNA, 25 bp, Homo sapien
tgtctgaaagtgtcttaaatgtgca

SEQ ID NO: 4382115 - DNA, 25 bp, Homo sapien
aaaaagcatggccaaatccaaccat

SEQ ID NO: 4382116 - DNA, 25 bp, Homo sapien
ccgaggataaacagcacaatgttgt

SEQ ID NO: 4382117 - DNA, 25 bp, Homo sapien
cacttgagaaaccattggttgagat

SEQ ID NO: 4382118 - DNA, 25 bp, Homo sapien
tatgatttgcccgaggataaacagc

SEQ ID NO: 4382119 - DNA, 25 bp, Homo sapien
gcagaataaacgctcatttttaaca

SEQ ID NO: 4382120 - DNA, 25 bp, Homo sapien
tgtggtggtggcccgcacagtcagt

SEQ ID NO: 4382121 - DNA, 25 bp, Homo sapien
gcccgcacagtcagtgcaggtattc

SEQ ID NO: 4382122 - DNA, 25 bp, Homo sapien
ggtggcccgcacagtcagtgcaggt

SEQ ID NO: 4382123 - DNA, 25 bp, Homo sapien
tggcccgcacagtcagtgcaggtat

SEQ ID NO: 4382124 - DNA, 25 bp, Homo sapien
tcataaatggtgtcaatttcaatgt

SEQ ID NO: 4382125 - DNA, 25 bp, Homo sapien
tggtgtcaatttcaatgtatttcaa

SEQ ID NO: 4382126 - DNA, 25 bp, Homo sapien
gcttctatgaacactaaaacttcct

SEQ ID NO: 4382127 - DNA, 25 bp, Homo sapien
aaaggtccatggaaggcgggatcta

SEQ ID NO: 4382128 - DNA, 25 bp, Homo sapien
ccagccactgaacgagaaaagcttt

SEQ ID NO: 4382129 - DNA, 25 bp, Homo sapien
gaacgagaaaagctttaactgggca

SEQ ID NO: 4382130 - DNA, 25 bp, Homo sapien
acgagaaaagctttaactgggcaga

SEQ ID NO: 4382131 - DNA, 25 bp, Homo sapien
cactgaacgagaaaagctttaactg

SEQ ID NO: 4382132 - DNA, 25 bp, Homo sapien
gacagggcgaagctctggactcctc

SEQ ID NO: 4382133 - DNA, 25 bp, Homo sapien
cggggacagggcgaagctctggact

SEQ ID NO: 4382134 - DNA, 25 bp, Homo sapien
cccgcggggacagggcgaagctctg

SEQ ID NO: 4382135 - DNA, 25 bp, Homo sapien
ccccgcggggacagggcgaagctct

SEQ ID NO: 4382136 - DNA, 25 bp, Homo sapien
tgcgaggcctgatcaggctgcttgc

SEQ ID NO: 4382137 - DNA, 25 bp, Homo sapien
ttgaaacgtcccgtgccacgaggcc

SEQ ID NO: 4382138 - DNA, 25 bp, Homo sapien
acgtcccactgcgaggcctgatcag

SEQ ID NO: 4382139 - DNA, 25 bp, Homo sapien
tcgcggggacgccaggacttgaaac

SEQ ID NO: 4382140 - DNA, 25 bp, Homo sapien
gctgtgtgatgcactcaaacctaaa

SEQ ID NO: 4382141 - DNA, 25 bp, Homo sapien
cattatttcagggttaggtgcgtca

SEQ ID NO: 4382142 - DNA, 25 bp, Homo sapien
taaataccagtgtttcagcgtgatc

SEQ ID NO: 4382143 - DNA, 25 bp, Homo sapien
ggtgcgtcatacctgcaaataacct

SEQ ID NO: 4382144 - DNA, 25 bp, Homo sapien
tctgaccattgacttgcaagttctt

SEQ ID NO: 4382145 - DNA, 25 bp, Homo sapien
catcttgatcgcctttatttcctgt

SEQ ID NO: 4382146 - DNA, 25 bp, Homo sapien
cattgacttgcaagttctttgaggg

SEQ ID NO: 4382147 - DNA, 25 bp, Homo sapien
tgagggtagaaactgcatcttgatc

SEQ ID NO: 4382148 - DNA, 25 bp, Homo sapien
ggaccggagcaggggacgcatctgc

SEQ ID NO: 4382149 - DNA, 25 bp, Homo sapien
gcaggggacgcatctgcagccacct

SEQ ID NO: 4382150 - DNA, 25 bp, Homo sapien
cggagcaggggacgcatctgcagcc

SEQ ID NO: 4382151 - DNA, 25 bp, Homo sapien
gagcaggggacgcatctgcagccac

SEQ ID NO: 4382152 - DNA, 25 bp, Homo sapien
aaggtaagggagcttcctgcgtccg

SEQ ID NO: 4382153 - DNA, 25 bp, Homo sapien
tatggttgcagatcaggtgcaaacg

SEQ ID NO: 4382154 - DNA, 25 bp, Homo sapien
catttggccatcgtttggctgcaca

SEQ ID NO: 4382155 - DNA, 25 bp, Homo sapien
tggctgcacactaagcaccacgaag

SEQ ID NO: 4382156 - DNA, 25 bp, Homo sapien
agcgttggggttcatggaagctccc

SEQ ID NO: 4382157 - DNA, 25 bp, Homo sapien
aacatctgaagatgccagtccctca

SEQ ID NO: 4382158 - DNA, 25 bp, Homo sapien
cctcaccctatcctctgatgaaaat

SEQ ID NO: 4382159 - DNA, 25 bp, Homo sapien
ttaagcgttggggttcatggaagct

SEQ ID NO: 4382160 - DNA, 25 bp, Homo sapien
tggccagtcgcttgtttaactcccg

SEQ ID NO: 4382161 - DNA, 25 bp, Homo sapien
cattggcgtcttcggagcagatgca

SEQ ID NO: 4382162 - DNA, 25 bp, Homo sapien
tgccagagttgagcgagacgaagcc

SEQ ID NO: 4382163 - DNA, 25 bp, Homo sapien
gacgaagccgtgtctaaataagtac

SEQ ID NO: 4382164 - DNA, 25 bp, Homo sapien
cggctgtaagccgaggatcaggcgg

SEQ ID NO: 4382165 - DNA, 25 bp, Homo sapien
gctgtaagccgaggatcaggcggcg

SEQ ID NO: 4382166 - DNA, 25 bp, Homo sapien
gggagcgccgcggctgtaagccgag

SEQ ID NO: 4382167 - DNA, 25 bp, Homo sapien
cgccgcggctgtaagccgaggatca

SEQ ID NO: 4382168 - DNA, 25 bp, Homo sapien
tgcagtcgcctccaaagccttagag

SEQ ID NO: 4382169 - DNA, 25 bp, Homo sapien
tttcctggcgaaatacggaggctga

SEQ ID NO: 4382170 - DNA, 25 bp, Homo sapien
gaacaatgccgcctccagaagaaaa

SEQ ID NO: 4382171 - DNA, 25 bp, Homo sapien
catggaaatcggctgagaggtacaa

SEQ ID NO: 4382172 - DNA, 25 bp, Homo sapien
ttctggctaccctatgggcaaaagg

SEQ ID NO: 4382173 - DNA, 25 bp, Homo sapien
tgattctggctaccctatgggcaaa

SEQ ID NO: 4382174 - DNA, 25 bp, Homo sapien
aggtgattctggctaccctatgggc

SEQ ID NO: 4382175 - DNA, 25 bp, Homo sapien
ctggctaccctatgggcaaaaggtt

SEQ ID NO: 4382176 - DNA, 25 bp, Homo sapien
agaggggcatgtctggtaccgaaaa

SEQ ID NO: 4382177 - DNA, 25 bp, Homo sapien
gatgtgaacatatgggaacaggagt

SEQ ID NO: 4382178 - DNA, 25 bp, Homo sapien
gcatgtctggtaccgaaaaagatca

SEQ ID NO: 4382179 - DNA, 25 bp, Homo sapien
atgtgaacatatgggaacaggagtg

SEQ ID NO: 4382180 - DNA, 25 bp, Homo sapien
aacagtctatgtctgaacttgcctc

SEQ ID NO: 4382181 - DNA, 25 bp, Homo sapien
tttggggttgaacagtctatgtctg

SEQ ID NO: 4382182 - DNA, 25 bp, Homo sapien
gggttgaacagtctatgtctgaact

SEQ ID NO: 4382183 - DNA, 25 bp, Homo sapien
tgaacagtctatgtctgaacttgcc

SEQ ID NO: 4382184 - DNA, 25 bp, Homo sapien
tattgtggccataactactgctttc

SEQ ID NO: 4382185 - DNA, 25 bp, Homo sapien
tctgagaggacttggtcatctactg

SEQ ID NO: 4382186 - DNA, 25 bp, Homo sapien
actgtaaagacctgattactcactg

SEQ ID NO: 4382187 - DNA, 25 bp, Homo sapien
ctgccaataccacatgtgtctattg

SEQ ID NO: 4382188 - DNA, 25 bp, Homo sapien
tcgatacttcggtattaatttgctc

SEQ ID NO: 4382189 - DNA, 25 bp, Homo sapien
cataagattgtatcgatacttcggt

SEQ ID NO: 4382190 - DNA, 25 bp, Homo sapien
tacttcggtattaatttgctcgtca

SEQ ID NO: 4382191 - DNA, 25 bp, Homo sapien
taaccaacataagattgtatcgata

SEQ ID NO: 4382192 - DNA, 25 bp, Homo sapien
gcagacgccactagagtatcattgg

SEQ ID NO: 4382193 - DNA, 25 bp, Homo sapien
gctgcagcagttctaagtcttgtgt

SEQ ID NO: 4382194 - DNA, 25 bp, Homo sapien
agcaccctttgagaagacactagca

SEQ ID NO: 4382195 - DNA, 25 bp, Homo sapien
ctagcatctttagcctcagtggtgg

SEQ ID NO: 4382196 - DNA, 25 bp, Homo sapien
caatcttctattgctgtctctacca

SEQ ID NO: 4382197 - DNA, 25 bp, Homo sapien
cttgctttcatatcagtgcaacaat

SEQ ID NO: 4382198 - DNA, 25 bp, Homo sapien
agtgcaacaatcttctattgctgtc

SEQ ID NO: 4382199 - DNA, 25 bp, Homo sapien
tatcagtgcaacaatcttctattgc

SEQ ID NO: 4382200 - DNA, 25 bp, Homo sapien
taatgcttgtgctggaagagattct

SEQ ID NO: 4382201 - DNA, 25 bp, Homo sapien
tctggtaggtgagaacaattatggc

SEQ ID NO: 4382202 - DNA, 25 bp, Homo sapien
tcatcttgcagcaatgtgtaatgct

SEQ ID NO: 4382203 - DNA, 25 bp, Homo sapien
gaaggagctttgcaggacaactgac

SEQ ID NO: 4382204 - DNA, 25 bp, Homo sapien
tcaatgtaggtggatactctattac

SEQ ID NO: 4382205 - DNA, 25 bp, Homo sapien
cacatcaatgtaggtggatactcta

SEQ ID NO: 4382206 - DNA, 25 bp, Homo sapien
tcacatcaatgtaggtggatactct

SEQ ID NO: 4382207 - DNA, 25 bp, Homo sapien
catcaatgtaggtggatactctatt

SEQ ID NO: 4382208 - DNA, 25 bp, Homo sapien
ttttcaacgtcagtaattcaaaatc

SEQ ID NO: 4382209 - DNA, 25 bp, Homo sapien
attttcaacgtcagtaattcaaaat

SEQ ID NO: 4382210 - DNA, 25 bp, Homo sapien
gcacagcatcagggagtggtcccct

SEQ ID NO: 4382211 - DNA, 25 bp, Homo sapien
ggcttagggaatccttttctgatga

SEQ ID NO: 4382212 - DNA, 25 bp, Homo sapien
tcccctgtgaggttagaaagtataa

SEQ ID NO: 4382213 - DNA, 25 bp, Homo sapien
tgggagccttaggaaacttgactgg

SEQ ID NO: 4382214 - DNA, 25 bp, Homo sapien
ctttgttcactgagagttaattgct

SEQ ID NO: 4382215 - DNA, 25 bp, Homo sapien
tcactgagagttaattgctcatcaa

SEQ ID NO: 4382216 - DNA, 25 bp, Homo sapien
ctgagagttaattgctcatcaatac

SEQ ID NO: 4382217 - DNA, 25 bp, Homo sapien
tgttcactgagagttaattgctcat

SEQ ID NO: 4382218 - DNA, 25 bp, Homo sapien
tatgcagccaccttgttaatcactg

SEQ ID NO: 4382219 - DNA, 25 bp, Homo sapien
atgcagccaccttgttaatcactgt

SEQ ID NO: 4382220 - DNA, 25 bp, Homo sapien
atatgcagccaccttgttaatcact

SEQ ID NO: 4382221 - DNA, 25 bp, Homo sapien
catatgcagccaccttgttaatcac

SEQ ID NO: 4382222 - DNA, 25 bp, Homo sapien
gaagttcttcggaatttgcaaggta

SEQ ID NO: 4382223 - DNA, 25 bp, Homo sapien
tcttgggtatattctagcatgttca

SEQ ID NO: 4382224 - DNA, 25 bp, Homo sapien
ttaaagaggagcctagattgttcct

SEQ ID NO: 4382225 - DNA, 25 bp, Homo sapien
ctatcaactatcatcatacagcggg

SEQ ID NO: 4382226 - DNA, 25 bp, Homo sapien
tttgtttccaaatctcgtagcttcc

SEQ ID NO: 4382227 - DNA, 25 bp, Homo sapien
gatatatctctcacaacaagatccc

SEQ ID NO: 4382228 - DNA, 25 bp, Homo sapien
catgatggctgtagatatatctctc

SEQ ID NO: 4382229 - DNA, 25 bp, Homo sapien
tacaaaatcccatcccgaagcctta

SEQ ID NO: 4382230 - DNA, 25 bp, Homo sapien
cttccacgtgttgtaggcacaggtt

SEQ ID NO: 4382231 - DNA, 25 bp, Homo sapien
ccgtattttcctctatgctctttat

SEQ ID NO: 4382232 - DNA, 25 bp, Homo sapien
tgcttccgtattttcctctatgctc

SEQ ID NO: 4382233 - DNA, 25 bp, Homo sapien
cacaggtttccgttaaatgcttccg

SEQ ID NO: 4382234 - DNA, 25 bp, Homo sapien
gcctgatggtcggatttacatggag

SEQ ID NO: 4382235 - DNA, 25 bp, Homo sapien
tctggacatcagcaccgggaattca

SEQ ID NO: 4382236 - DNA, 25 bp, Homo sapien
cccaggattctggatcgtggttgca

SEQ ID NO: 4382237 - DNA, 25 bp, Homo sapien
ttgcagccgaaagaagtaacgttgt

SEQ ID NO: 4382238 - DNA, 25 bp, Homo sapien
aggcagcggtgccttggaaaacctg

SEQ ID NO: 4382239 - DNA, 25 bp, Homo sapien
atcgctggtgcttcggccgccgttt

SEQ ID NO: 4382240 - DNA, 25 bp, Homo sapien
aaagcccaagtagaaatcgctggtg

SEQ ID NO: 4382241 - DNA, 25 bp, Homo sapien
cctgcatgtagagcggaaaagccca

SEQ ID NO: 4382242 - DNA, 25 bp, Homo sapien
tctttccaactgagcggtgcgcgcg

SEQ ID NO: 4382243 - DNA, 25 bp, Homo sapien
tccaactgagcggtgcgcgcgcgtt

SEQ ID NO: 4382244 - DNA, 25 bp, Homo sapien
gcggtgcgcgcgcgttcccagacat

SEQ ID NO: 4382245 - DNA, 25 bp, Homo sapien
ggcttttctttccaactgagcggtg

SEQ ID NO: 4382246 - DNA, 25 bp, Homo sapien
ccaagaagcgaaacttttgcagata

SEQ ID NO: 4382247 - DNA, 25 bp, Homo sapien
ctgtttccaagaagcgaaacttttg

SEQ ID NO: 4382248 - DNA, 25 bp, Homo sapien
gaagcgaaacttttgcagatatgcc

SEQ ID NO: 4382249 - DNA, 25 bp, Homo sapien
cgaaacttttgcagatatgcctgct

SEQ ID NO: 4382250 - DNA, 25 bp, Homo sapien
gaaatgctgccgtaactttaaatct

SEQ ID NO: 4382251 - DNA, 25 bp, Homo sapien
tctagcaatactaggaggcagcctt

SEQ ID NO: 4382252 - DNA, 25 bp, Homo sapien
caatcttcgtgagttgctgacaaca

SEQ ID NO: 4382253 - DNA, 25 bp, Homo sapien
gcagtgtctatcttgagcattccag

SEQ ID NO: 4382254 - DNA, 25 bp, Homo sapien
gagttctgagccaaggattgacaca

SEQ ID NO: 4382255 - DNA, 25 bp, Homo sapien
tgggactgctttagtacttgctgcc

SEQ ID NO: 4382256 - DNA, 25 bp, Homo sapien
gaaaccttctgtggtgttcaattgc

SEQ ID NO: 4382257 - DNA, 25 bp, Homo sapien
gcttggcctctgcaaacttttctag

SEQ ID NO: 4382258 - DNA, 25 bp, Homo sapien
tgaggcatctctgaccgctgggaga

SEQ ID NO: 4382259 - DNA, 25 bp, Homo sapien
atctctgaccgctgggagaactggg

SEQ ID NO: 4382260 - DNA, 25 bp, Homo sapien
ggacagaacttggtctggcagcaag

SEQ ID NO: 4382261 - DNA, 25 bp, Homo sapien
ctaatttgggtcaatcagtggactg

SEQ ID NO: 4382262 - DNA, 25 bp, Homo sapien
ggttggcatccagtcatagggaata

SEQ ID NO: 4382263 - DNA, 25 bp, Homo sapien
cttgtgaaaactgatagggataagg

SEQ ID NO: 4382264 - DNA, 25 bp, Homo sapien
gttggcatccagtcatagggaatag

SEQ ID NO: 4382265 - DNA, 25 bp, Homo sapien
actgatagggataaggttggcatcc

SEQ ID NO: 4382266 - DNA, 25 bp, Homo sapien
tctgcgaggtgatgctcgctgtggg

SEQ ID NO: 4382267 - DNA, 25 bp, Homo sapien
ttgaactggaagttccaggcaagca

SEQ ID NO: 4382268 - DNA, 25 bp, Homo sapien
aagttccaggcaagcatgtgggccc

SEQ ID NO: 4382269 - DNA, 25 bp, Homo sapien
tccttgtcatgggacgcatgtacct

SEQ ID NO: 4382270 - DNA, 25 bp, Homo sapien
ggaatgttgcgggagtatcaagcat

SEQ ID NO: 4382271 - DNA, 25 bp, Homo sapien
tttttgcaggaatgttgcgggagta

SEQ ID NO: 4382272 - DNA, 25 bp, Homo sapien
caggaatgttgcgggagtatcaagc

SEQ ID NO: 4382273 - DNA, 25 bp, Homo sapien
tttgcaggaatgttgcgggagtatc

SEQ ID NO: 4382274 - DNA, 25 bp, Homo sapien
gatggaggagtggaagctttgaagc

SEQ ID NO: 4382275 - DNA, 25 bp, Homo sapien
taggagtctgaattatattcaagga

SEQ ID NO: 4382276 - DNA, 25 bp, Homo sapien
tattcaaggaatgattggtagtcat

SEQ ID NO: 4382277 - DNA, 25 bp, Homo sapien
tattaactggggattccgggagatg

SEQ ID NO: 4382278 - DNA, 25 bp, Homo sapien
gtgtaggtactaagccagtgttgtg

SEQ ID NO: 4382279 - DNA, 25 bp, Homo sapien
caggaaccacgtctgacctattttt

SEQ ID NO: 4382280 - DNA, 25 bp, Homo sapien
taaggtccttggttgcaggaaccac

SEQ ID NO: 4382281 - DNA, 25 bp, Homo sapien
cagtgttgtgtacatatggatttcc

SEQ ID NO: 4382282 - DNA, 25 bp, Homo sapien
caggattccagatgtaaattttgtg

SEQ ID NO: 4382283 - DNA, 25 bp, Homo sapien
tgaatcttaagtaatcggatggatg

SEQ ID NO: 4382284 - DNA, 25 bp, Homo sapien
tgtctcccaacgtgtacccaatgat

SEQ ID NO: 4382285 - DNA, 25 bp, Homo sapien
taatcggatggatgacaggattcca

SEQ ID NO: 4382286 - DNA, 25 bp, Homo sapien
cttagggcatgttcttctgcttgtc

SEQ ID NO: 4382287 - DNA, 25 bp, Homo sapien
tgggggtcatcttagggcatgttct

SEQ ID NO: 4382288 - DNA, 25 bp, Homo sapien
tgcttgtctccttcttatccaaggt

SEQ ID NO: 4382289 - DNA, 25 bp, Homo sapien
tcctggaacttgtaggaaggagtaa

SEQ ID NO: 4382290 - DNA, 25 bp, Homo sapien
ggaggaaggatacactcttttctcc

SEQ ID NO: 4382291 - DNA, 25 bp, Homo sapien
tgctttacagatggctatgcagaac

SEQ ID NO: 4382292 - DNA, 25 bp, Homo sapien
tccaccagtcctacaaatgtgatca

SEQ ID NO: 4382293 - DNA, 25 bp, Homo sapien
ggttagagacaagataacagcattg

SEQ ID NO: 4382294 - DNA, 25 bp, Homo sapien
gaagtgagaatgctttctacctacc

SEQ ID NO: 4382295 - DNA, 25 bp, Homo sapien
gatgtggtcataaagcggagaaggc

SEQ ID NO: 4382296 - DNA, 25 bp, Homo sapien
tcagatgtggtcataaagcggagaa

SEQ ID NO: 4382297 - DNA, 25 bp, Homo sapien
tgtggtcataaagcggagaaggcag

SEQ ID NO: 4382298 - DNA, 25 bp, Homo sapien
cagatgtggtcataaagcggagaag

SEQ ID NO: 4382299 - DNA, 25 bp, Homo sapien
agtgggtttttggctgacccctcat

SEQ ID NO: 4382300 - DNA, 25 bp, Homo sapien
tggtttctgaggaagccttttcagg

SEQ ID NO: 4382301 - DNA, 25 bp, Homo sapien
tattggtttctgaggaagccttttc

SEQ ID NO: 4382302 - DNA, 25 bp, Homo sapien
gtttctgaggaagccttttcaggca

SEQ ID NO: 4382303 - DNA, 25 bp, Homo sapien
cttctattggtttctgaggaagcct

SEQ ID NO: 4382304 - DNA, 25 bp, Homo sapien
ggagcctgcatattcctgtttcggt

SEQ ID NO: 4382305 - DNA, 25 bp, Homo sapien
tgatgatacatcaagagtgactccc

SEQ ID NO: 4382306 - DNA, 25 bp, Homo sapien
tggaacacagtcttgatgatacatc

SEQ ID NO: 4382307 - DNA, 25 bp, Homo sapien
ttatgtataatctctgaaacccaga

SEQ ID NO: 4382308 - DNA, 25 bp, Homo sapien
catgacataccatggataggaacag

SEQ ID NO: 4382309 - DNA, 25 bp, Homo sapien
tcttcacttcctgtcagactttgcc

SEQ ID NO: 4382310 - DNA, 25 bp, Homo sapien
gaacagcgtagaaggtgtttgacca

SEQ ID NO: 4382311 - DNA, 25 bp, Homo sapien
ttgccattcatgacataccatggat

SEQ ID NO: 4382312 - DNA, 25 bp, Homo sapien
cctctcagagttatccatgaggatt

SEQ ID NO: 4382313 - DNA, 25 bp, Homo sapien
gacctctcagagttatccatgagga

SEQ ID NO: 4382314 - DNA, 25 bp, Homo sapien
tctcagagttatccatgaggattgg

SEQ ID NO: 4382315 - DNA, 25 bp, Homo sapien
tgacctctcagagttatccatgagg

SEQ ID NO: 4382316 - DNA, 25 bp, Homo sapien
gcaagagatctagctttcaccctat

SEQ ID NO: 4382317 - DNA, 25 bp, Homo sapien
taggaaagtctcaaaaggaggcgag

SEQ ID NO: 4382318 - DNA, 25 bp, Homo sapien
gaaaaaccggtgctgatatacttga

SEQ ID NO: 4382319 - DNA, 25 bp, Homo sapien
cttgaacgcttagcagccattgagg

SEQ ID NO: 4382320 - DNA, 25 bp, Homo sapien
tagccagctaccttccactgtttta

SEQ ID NO: 4382321 - DNA, 25 bp, Homo sapien
ttctgcgtaactgtagcctctagcc

SEQ ID NO: 4382322 - DNA, 25 bp, Homo sapien
taactgtagcctctagccagctacc

SEQ ID NO: 4382323 - DNA, 25 bp, Homo sapien
tctagccagctaccttccactgttt

SEQ ID NO: 4382324 - DNA, 25 bp, Homo sapien
gggtttccatccagctctacatccg

SEQ ID NO: 4382325 - DNA, 25 bp, Homo sapien
ctgaagcaggtagacgagaagagga

SEQ ID NO: 4382326 - DNA, 25 bp, Homo sapien
cgagttatgattcaggagccactgg

SEQ ID NO: 4382327 - DNA, 25 bp, Homo sapien
tatccaattgccagacactcgtggg

SEQ ID NO: 4382328 - DNA, 25 bp, Homo sapien
gatttagatctatacaaggtatgca

SEQ ID NO: 4382329 - DNA, 25 bp, Homo sapien
taagtaatatataatgctcacagca

SEQ ID NO: 4382330 - DNA, 25 bp, Homo sapien
ccaagtgttcttcgtcatccataaa

SEQ ID NO: 4382331 - DNA, 25 bp, Homo sapien
gatctcattgtaactgtggccattt

SEQ ID NO: 4382332 - DNA, 25 bp, Homo sapien
caatgcagtatcatctctaaaaaca

SEQ ID NO: 4382333 - DNA, 25 bp, Homo sapien
cagagctctcagtatgtggcgtttc

SEQ ID NO: 4382334 - DNA, 25 bp, Homo sapien
tatgtggcgtttctcaatgcagtat

SEQ ID NO: 4382335 - DNA, 25 bp, Homo sapien
tcagtatgtggcgtttctcaatgca

SEQ ID NO: 4382336 - DNA, 25 bp, Homo sapien
caacggcgaataatccttgcggttt

SEQ ID NO: 4382337 - DNA, 25 bp, Homo sapien
cctgtacttgaatggagcacaagat

SEQ ID NO: 4382338 - DNA, 25 bp, Homo sapien
gttccttagaagatgtgcctgtact

SEQ ID NO: 4382339 - DNA, 25 bp, Homo sapien
attttcaacggcgaataatccttgc

SEQ ID NO: 4382340 - DNA, 25 bp, Homo sapien
tgcatatgagtcatcagacttgctg

SEQ ID NO: 4382341 - DNA, 25 bp, Homo sapien
ccaccttcaagcatgtgagaatgca

SEQ ID NO: 4382342 - DNA, 25 bp, Homo sapien
ggttttaaacattggagccacctgc

SEQ ID NO: 4382343 - DNA, 25 bp, Homo sapien
taagagtcagtagctcataacactc

SEQ ID NO: 4382344 - DNA, 25 bp, Homo sapien
gctatcttatatcgcaccttgtaat

SEQ ID NO: 4382345 - DNA, 25 bp, Homo sapien
ctgtagctatcttatatcgcacctt

SEQ ID NO: 4382346 - DNA, 25 bp, Homo sapien
tcttatatcgcaccttgtaatgttc

SEQ ID NO: 4382347 - DNA, 25 bp, Homo sapien
tatatcgcaccttgtaatgttccat

SEQ ID NO: 4382348 - DNA, 25 bp, Homo sapien
cctaattcaattgctcaggatggct

SEQ ID NO: 4382349 - DNA, 25 bp, Homo sapien
ggttctatgtatccaatccaaaggt

SEQ ID NO: 4382350 - DNA, 25 bp, Homo sapien
gatttgaaaggagcaaagcgctcct

SEQ ID NO: 4382351 - DNA, 25 bp, Homo sapien
gcctggcctgacatagttaattttt

SEQ ID NO: 4382352 - DNA, 25 bp, Homo sapien
tatcccaccttcttcttgcatattc

SEQ ID NO: 4382353 - DNA, 25 bp, Homo sapien
cttgcatattctttcagtagaacca

SEQ ID NO: 4382354 - DNA, 25 bp, Homo sapien
ttctttcagtagaaccaatgtactt

SEQ ID NO: 4382355 - DNA, 25 bp, Homo sapien
tgagttgcttcttcccatatcccac

SEQ ID NO: 4382356 - DNA, 25 bp, Homo sapien
tttaactttggttagcaccaactga

SEQ ID NO: 4382357 - DNA, 25 bp, Homo sapien
ggttagcaccaactgatattcaaaa

SEQ ID NO: 4382358 - DNA, 25 bp, Homo sapien
ttctgtaacaatagagccaatgacc

SEQ ID NO: 4382359 - DNA, 25 bp, Homo sapien
caatgaccagttgcctaaaatctct

SEQ ID NO: 4382360 - DNA, 25 bp, Homo sapien
catccacaacaccacaattatcacc

SEQ ID NO: 4382361 - DNA, 25 bp, Homo sapien
atcatccacaacaccacaattatca

SEQ ID NO: 4382362 - DNA, 25 bp, Homo sapien
atccacaacaccacaattatcacca

SEQ ID NO: 4382363 - DNA, 25 bp, Homo sapien
tcatccacaacaccacaattatcac

SEQ ID NO: 4382364 - DNA, 25 bp, Homo sapien
ggcaatgcctaaacccagttctgcc

SEQ ID NO: 4382365 - DNA, 25 bp, Homo sapien
aaggcaatgcctaaacccagttctg

SEQ ID NO: 4382366 - DNA, 25 bp, Homo sapien
aggcaatgcctaaacccagttctgc

SEQ ID NO: 4382367 - DNA, 25 bp, Homo sapien
tctgtcaacttgttcctgtcctatt

SEQ ID NO: 4382368 - DNA, 25 bp, Homo sapien
tactcagcataagccctctgctgca

SEQ ID NO: 4382369 - DNA, 25 bp, Homo sapien
cctgtcctatttcttgtgatgagta

SEQ ID NO: 4382370 - DNA, 25 bp, Homo sapien
tgtgatgagtactcagcataagccc

SEQ ID NO: 4382371 - DNA, 25 bp, Homo sapien
agtttaatgctaacctttccacatc

SEQ ID NO: 4382372 - DNA, 25 bp, Homo sapien
gtttaatgctaacctttccacatca

SEQ ID NO: 4382373 - DNA, 25 bp, Homo sapien
tacatcatcgaagtgcatactaaaa

SEQ ID NO: 4382374 - DNA, 25 bp, Homo sapien
gtctttacatcatcgaagtgcatac

SEQ ID NO: 4382375 - DNA, 25 bp, Homo sapien
gaggcccagacagcgttcctctgtt

SEQ ID NO: 4382376 - DNA, 25 bp, Homo sapien
ctcaggatgcgtctgaagaggccca

SEQ ID NO: 4382377 - DNA, 25 bp, Homo sapien
agaggcccagacagcgttcctctgt

SEQ ID NO: 4382378 - DNA, 25 bp, Homo sapien
tctggggactcaggatgcgtctgaa

SEQ ID NO: 4382379 - DNA, 25 bp, Homo sapien
gaaagcaagctgaccacagattggg

SEQ ID NO: 4382380 - DNA, 25 bp, Homo sapien
tctgtctgtcttggaaaggccaaag

SEQ ID NO: 4382381 - DNA, 25 bp, Homo sapien
aaaaaggaaaccataggcagccaga

SEQ ID NO: 4382382 - DNA, 25 bp, Homo sapien
tgggacttgaacagcaggtcactcc

SEQ ID NO: 4382383 - DNA, 25 bp, Homo sapien
cactgttgatgcatcatctttaaag

SEQ ID NO: 4382384 - DNA, 25 bp, Homo sapien
ttaaagacgtgcctgagaactttgc

SEQ ID NO: 4382385 - DNA, 25 bp, Homo sapien
cagggatttcttgtggcagctgtca

SEQ ID NO: 4382386 - DNA, 25 bp, Homo sapien
gccatgacccttggcggcttgttga

SEQ ID NO: 4382387 - DNA, 25 bp, Homo sapien
gaatggtgcctgatctatttgagga

SEQ ID NO: 4382388 - DNA, 25 bp, Homo sapien
taagcaccaccttaagatggaggag

SEQ ID NO: 4382389 - DNA, 25 bp, Homo sapien
tattagattcgccaggagaagtggg

SEQ ID NO: 4382390 - DNA, 25 bp, Homo sapien
gaactggtaatgagattccgacttg

SEQ ID NO: 4382391 - DNA, 25 bp, Homo sapien
acatttggggtttttgcattagaag

SEQ ID NO: 4382392 - DNA, 25 bp, Homo sapien
ttggggtttttgcattagaagtcat

SEQ ID NO: 4382393 - DNA, 25 bp, Homo sapien
tttggggtttttgcattagaagtca

SEQ ID NO: 4382394 - DNA, 25 bp, Homo sapien
catttggggtttttgcattagaagt

SEQ ID NO: 4382395 - DNA, 25 bp, Homo sapien
tggatccgacatccagaaaaagcgt

SEQ ID NO: 4382396 - DNA, 25 bp, Homo sapien
tccgacatccagaaaaagcgtaaaa

SEQ ID NO: 4382397 - DNA, 25 bp, Homo sapien
ggatccgacatccagaaaaagcgta

SEQ ID NO: 4382398 - DNA, 25 bp, Homo sapien
gatccgacatccagaaaaagcgtaa

SEQ ID NO: 4382399 - DNA, 25 bp, Homo sapien
tacattgagagttcaggccaagcac

SEQ ID NO: 4382400 - DNA, 25 bp, Homo sapien
gactggtaactagtgacagcatttg

SEQ ID NO: 4382401 - DNA, 25 bp, Homo sapien
caggccaagcacatatgctcattat

SEQ ID NO: 4382402 - DNA, 25 bp, Homo sapien
agcagcaagttctgtctgagagcca

SEQ ID NO: 4382403 - DNA, 25 bp, Homo sapien
tgggcttcataaaggagacacctgc

SEQ ID NO: 4382404 - DNA, 25 bp, Homo sapien
cagttggtagcttgtaacttgtcca

SEQ ID NO: 4382405 - DNA, 25 bp, Homo sapien
ctgggttctttagatatggtgctgc

SEQ ID NO: 4382406 - DNA, 25 bp, Homo sapien
ttcgggacaagctatttcagtgggc

SEQ ID NO: 4382407 - DNA, 25 bp, Homo sapien
cagaacaaatttgcatgccccaatt

SEQ ID NO: 4382408 - DNA, 25 bp, Homo sapien
cataaatgaactaccacattaaaat

SEQ ID NO: 4382409 - DNA, 25 bp, Homo sapien
tcctcttgttcttagttgcagaaca

SEQ ID NO: 4382410 - DNA, 25 bp, Homo sapien
aaatagcttctaaatcctcctcttg

SEQ ID NO: 4382411 - DNA, 25 bp, Homo sapien
taagaatagaggcatataggaggtc

SEQ ID NO: 4382412 - DNA, 25 bp, Homo sapien
tcaaggttatgaaatcattctgtgg

SEQ ID NO: 4382413 - DNA, 25 bp, Homo sapien
gatttataaattcgtgctgtgctct

SEQ ID NO: 4382414 - DNA, 25 bp, Homo sapien
ggtggacacaggagtaccttcagaa

SEQ ID NO: 4382415 - DNA, 25 bp, Homo sapien
aaatgaatacgatgattagataagg

SEQ ID NO: 4382416 - DNA, 25 bp, Homo sapien
aatacgatgattagataaggtttgc

SEQ ID NO: 4382417 - DNA, 25 bp, Homo sapien
tcaatgggcagctatctgcatcagt

SEQ ID NO: 4382418 - DNA, 25 bp, Homo sapien
tatctgcatcagtaaatgaatacga

SEQ ID NO: 4382419 - DNA, 25 bp, Homo sapien
agggcactgctattccatcatctag

SEQ ID NO: 4382420 - DNA, 25 bp, Homo sapien
ttcttgggcagttcgatgtggatga

SEQ ID NO: 4382421 - DNA, 25 bp, Homo sapien
agattagcccgtggtacatttgttc

SEQ ID NO: 4382422 - DNA, 25 bp, Homo sapien
gaatcttgtgagacagggaagccat

SEQ ID NO: 4382423 - DNA, 25 bp, Homo sapien
ggaaaattgcatcaggacagcatga

SEQ ID NO: 4382424 - DNA, 25 bp, Homo sapien
tcccactctgttcagggatccagct

SEQ ID NO: 4382425 - DNA, 25 bp, Homo sapien
tgaggccttgtttgttgagccgaat

SEQ ID NO: 4382426 - DNA, 25 bp, Homo sapien
tgagccgaatatcagataagtaagc

SEQ ID NO: 4382427 - DNA, 25 bp, Homo sapien
aattggcagttcagggaattattca

SEQ ID NO: 4382428 - DNA, 25 bp, Homo sapien
caaattggcagttcagggaattatt

SEQ ID NO: 4382429 - DNA, 25 bp, Homo sapien
ccaaattggcagttcagggaattat

SEQ ID NO: 4382430 - DNA, 25 bp, Homo sapien
tccaaattggcagttcagggaatta

SEQ ID NO: 4382431 - DNA, 25 bp, Homo sapien
taggcaccagatttctagctccaac

SEQ ID NO: 4382432 - DNA, 25 bp, Homo sapien
tgcacaatcagtttagctttggcac

SEQ ID NO: 4382433 - DNA, 25 bp, Homo sapien
ctttggcactgataggcaccagatt

SEQ ID NO: 4382434 - DNA, 25 bp, Homo sapien
caacttcagatttgcaagtggaact

SEQ ID NO: 4382435 - DNA, 25 bp, Homo sapien
gattccttgccctgctcattatctt

SEQ ID NO: 4382436 - DNA, 25 bp, Homo sapien
tcaagagcgccaatggaagtaaatc

SEQ ID NO: 4382437 - DNA, 25 bp, Homo sapien
tcttctctacatctctccaaaatgc

SEQ ID NO: 4382438 - DNA, 25 bp, Homo sapien
ggccaatacacccagtgacaacttg

SEQ ID NO: 4382439 - DNA, 25 bp, Homo sapien
catcaattggcagaacctaaagaag

SEQ ID NO: 4382440 - DNA, 25 bp, Homo sapien
aaggaaactggatatttttagcacg

SEQ ID NO: 4382441 - DNA, 25 bp, Homo sapien
agtttaaagactggcaggtacacca

SEQ ID NO: 4382442 - DNA, 25 bp, Homo sapien
tggataagtacacaaagcgtcaatg

SEQ ID NO: 4382443 - DNA, 25 bp, Homo sapien
tcagttttcactatcctaaatagcc

SEQ ID NO: 4382444 - DNA, 25 bp, Homo sapien
aactctctcagccaacgtttctttg

SEQ ID NO: 4382445 - DNA, 25 bp, Homo sapien
aagttccaagcctctccaaatttct

SEQ ID NO: 4382446 - DNA, 25 bp, Homo sapien
cagccaacgtttctttgacatcata

SEQ ID NO: 4382447 - DNA, 25 bp, Homo sapien
gatctgatcagaggccagacaagag

SEQ ID NO: 4382448 - DNA, 25 bp, Homo sapien
caagagatcaagtgaagaacaagag

SEQ ID NO: 4382449 - DNA, 25 bp, Homo sapien
tgatcagaggccagacaagagatca

SEQ ID NO: 4382450 - DNA, 25 bp, Homo sapien
caggatctgatcagaggccagacaa

SEQ ID NO: 4382451 - DNA, 25 bp, Homo sapien
tgtaatgctagggaatctaccctct

SEQ ID NO: 4382452 - DNA, 25 bp, Homo sapien
tgctagggaatctaccctcttataa

SEQ ID NO: 4382453 - DNA, 25 bp, Homo sapien
tccactagagatgtagggaaattcc

SEQ ID NO: 4382454 - DNA, 25 bp, Homo sapien
gggaaattccagtgaagtctgcatc

SEQ ID NO: 4382455 - DNA, 25 bp, Homo sapien
cactcaggtaacagatgatgtccat

SEQ ID NO: 4382456 - DNA, 25 bp, Homo sapien
ctgtgtgttaataaaggccctgcca

SEQ ID NO: 4382457 - DNA, 25 bp, Homo sapien
cctgccactcaggtaacagatgatg

SEQ ID NO: 4382458 - DNA, 25 bp, Homo sapien
tgtgttaataaaggccctgccactc

SEQ ID NO: 4382459 - DNA, 25 bp, Homo sapien
gcggcgcgcccctcgccaaggtggt

SEQ ID NO: 4382460 - DNA, 25 bp, Homo sapien
tgcggcgcgcccctcgccaaggtgg

SEQ ID NO: 4382461 - DNA, 25 bp, Homo sapien
gccaaacgtgaaacaaatagtgtaa

SEQ ID NO: 4382462 - DNA, 25 bp, Homo sapien
gatgattaataagacaagaactcat

SEQ ID NO: 4382463 - DNA, 25 bp, Homo sapien
tgatattcaaaaggaaattcatata

SEQ ID NO: 4382464 - DNA, 25 bp, Homo sapien
agatgacagcaatagatcaaaatat

SEQ ID NO: 4382465 - DNA, 25 bp, Homo sapien
taaaaagcaatacggtgaaagtaga

SEQ ID NO: 4382466 - DNA, 25 bp, Homo sapien
aagctttaccctcttagagaggcct

SEQ ID NO: 4382467 - DNA, 25 bp, Homo sapien
agtccattccctttcactcgagtcg

SEQ ID NO: 4382468 - DNA, 25 bp, Homo sapien
gagaggcctagctgaaattccttcc

SEQ ID NO: 4382469 - DNA, 25 bp, Homo sapien
agatgccgcacaaggaagaatttcc

SEQ ID NO: 4382470 - DNA, 25 bp, Homo sapien
ttgtaaaaatctccctcagcggatg

SEQ ID NO: 4382471 - DNA, 25 bp, Homo sapien
tggcatgcctttcaggaatccagcc

SEQ ID NO: 4382472 - DNA, 25 bp, Homo sapien
cagtaaaactaaccagaatgcgtcc

SEQ ID NO: 4382473 - DNA, 25 bp, Homo sapien
tacggctgctgaaaatccggcctgg

SEQ ID NO: 4382474 - DNA, 25 bp, Homo sapien
gttttgccaaaacaagctccgcgct

SEQ ID NO: 4382475 - DNA, 25 bp, Homo sapien
cacttggctcgacaaacgcgtcttt

SEQ ID NO: 4382476 - DNA, 25 bp, Homo sapien
gaaacatatcttttgatgggcacca

SEQ ID NO: 4382477 - DNA, 25 bp, Homo sapien
cacccatcggtgtatagtgactggt

SEQ ID NO: 4382478 - DNA, 25 bp, Homo sapien
tgtaaactgtgctagggcatgtgct

SEQ ID NO: 4382479 - DNA, 25 bp, Homo sapien
cctggccgatagtgggagtgttaaa

SEQ ID NO: 4382480 - DNA, 25 bp, Homo sapien
cctaacaagtgtataccctgctgca

SEQ ID NO: 4382481 - DNA, 25 bp, Homo sapien
cttatatgtattggatcataactat

SEQ ID NO: 4382482 - DNA, 25 bp, Homo sapien
gtattggatcataactatattcttt

SEQ ID NO: 4382483 - DNA, 25 bp, Homo sapien
tatatgtattggatcataactatat

SEQ ID NO: 4382484 - DNA, 25 bp, Homo sapien
tatgtattggatcataactatattc

SEQ ID NO: 4382485 - DNA, 25 bp, Homo sapien
tatttgctgacggatttaatgtgtc

SEQ ID NO: 4382486 - DNA, 25 bp, Homo sapien
gcattatggtatagctcctataggc

SEQ ID NO: 4382487 - DNA, 25 bp, Homo sapien
gatttgcattatggtatagctccta

SEQ ID NO: 4382488 - DNA, 25 bp, Homo sapien
cattatggtatagctcctataggca

SEQ ID NO: 4382489 - DNA, 25 bp, Homo sapien
tgcagatgagaccattctaccttgg

SEQ ID NO: 4382490 - DNA, 25 bp, Homo sapien
cacttctaagcgctgattattttta

SEQ ID NO: 4382491 - DNA, 25 bp, Homo sapien
caatttaacattgcttcatccaagg

SEQ ID NO: 4382492 - DNA, 25 bp, Homo sapien
atccaaggtcacttctaagcgctga

SEQ ID NO: 4382493 - DNA, 25 bp, Homo sapien
acacaaatgcatttcgtttaagctt

SEQ ID NO: 4382494 - DNA, 25 bp, Homo sapien
tacacaaatgcatttcgtttaagct

SEQ ID NO: 4382495 - DNA, 25 bp, Homo sapien
acaaatgcatttcgtttaagctttc

SEQ ID NO: 4382496 - DNA, 25 bp, Homo sapien
cacaaatgcatttcgtttaagcttt

SEQ ID NO: 4382497 - DNA, 25 bp, Homo sapien
ctagtcctgtaaggcttgcccaggc

SEQ ID NO: 4382498 - DNA, 25 bp, Homo sapien
tagtcctgtaaggcttgcccaggct

SEQ ID NO: 4382499 - DNA, 25 bp, Homo sapien
caaataaaatccacgtaaaggccat

SEQ ID NO: 4382500 - DNA, 25 bp, Homo sapien
gcaaataaaatccacgtaaaggcca

SEQ ID NO: 4382501 - DNA, 25 bp, Homo sapien
aactcatgtaatcttgtgaagaggc

SEQ ID NO: 4382502 - DNA, 25 bp, Homo sapien
gagactgttactgcccttaggatac

SEQ ID NO: 4382503 - DNA, 25 bp, Homo sapien
cacagctaatgcaaagtagagccta

SEQ ID NO: 4382504 - DNA, 25 bp, Homo sapien
gatgacagggcaagtacttaattcc

SEQ ID NO: 4382505 - DNA, 25 bp, Homo sapien
tcagtgactggaatacaggagtagc

SEQ ID NO: 4382506 - DNA, 25 bp, Homo sapien
taaaaaaggcaattgctgggctggc

SEQ ID NO: 4382507 - DNA, 25 bp, Homo sapien
ggcctttgcatctgcatgagctgga

SEQ ID NO: 4382508 - DNA, 25 bp, Homo sapien
gatttagttataggagagggcactc

SEQ ID NO: 4382509 - DNA, 25 bp, Homo sapien
cattgttgagagcatggactccggt

SEQ ID NO: 4382510 - DNA, 25 bp, Homo sapien
accatttggaatttctggaaccttg

SEQ ID NO: 4382511 - DNA, 25 bp, Homo sapien
ccatttggaatttctggaaccttgc

SEQ ID NO: 4382512 - DNA, 25 bp, Homo sapien
catttggaatttctggaaccttgcc

SEQ ID NO: 4382513 - DNA, 25 bp, Homo sapien
aaatgaagcctatgttatgtcggac

SEQ ID NO: 4382514 - DNA, 25 bp, Homo sapien
gagacctaactccaaattccacata

SEQ ID NO: 4382515 - DNA, 25 bp, Homo sapien
tggctgaatttgtataagctatctg

SEQ ID NO: 4382516 - DNA, 25 bp, Homo sapien
tatgtcggactgttcctagagggtc

SEQ ID NO: 4382517 - DNA, 25 bp, Homo sapien
cagtttgaatttgtacctcaggggg

SEQ ID NO: 4382518 - DNA, 25 bp, Homo sapien
tttgaatttgtacctcagggggcat

SEQ ID NO: 4382519 - DNA, 25 bp, Homo sapien
gtttgaatttgtacctcagggggca

SEQ ID NO: 4382520 - DNA, 25 bp, Homo sapien
gagccaccgcctccgaccctcatat

SEQ ID NO: 4382521 - DNA, 25 bp, Homo sapien
cgaccctcatatgagccttttaaaa

SEQ ID NO: 4382522 - DNA, 25 bp, Homo sapien
ctccgaccctcatatgagcctttta

SEQ ID NO: 4382523 - DNA, 25 bp, Homo sapien
cgcctccgaccctcatatgagcctt

SEQ ID NO: 4382524 - DNA, 25 bp, Homo sapien
gatgcaccagagactttcagtttgt

SEQ ID NO: 4382525 - DNA, 25 bp, Homo sapien
cagtttgtcggctgaagtgtgaaaa

SEQ ID NO: 4382526 - DNA, 25 bp, Homo sapien
gtttgtcggctgaagtgtgaaaata

SEQ ID NO: 4382527 - DNA, 25 bp, Homo sapien
tttcagtttgtcggctgaagtgtga

SEQ ID NO: 4382528 - DNA, 25 bp, Homo sapien
tgtacagggaataataaccacccac

SEQ ID NO: 4382529 - DNA, 25 bp, Homo sapien
taataaccacccacacctgagaaat

SEQ ID NO: 4382530 - DNA, 25 bp, Homo sapien
attctgtacagggaataataaccac

SEQ ID NO: 4382531 - DNA, 25 bp, Homo sapien
cacacctgagaaatctctgatgtta

SEQ ID NO: 4382532 - DNA, 25 bp, Homo sapien
tactgcccagagctccagtttcatc

SEQ ID NO: 4382533 - DNA, 25 bp, Homo sapien
cagagctccagtttcatcaacaatc

SEQ ID NO: 4382534 - DNA, 25 bp, Homo sapien
tgcccagagctccagtttcatcaac

SEQ ID NO: 4382535 - DNA, 25 bp, Homo sapien
cttactgcccagagctccagtttca

SEQ ID NO: 4382536 - DNA, 25 bp, Homo sapien
tggaaatgctgtagtcccaactcat

SEQ ID NO: 4382537 - DNA, 25 bp, Homo sapien
tgtagtcccaactcatgtttgtcct

SEQ ID NO: 4382538 - DNA, 25 bp, Homo sapien
caatcccatcctctagaaaggcaaa

SEQ ID NO: 4382539 - DNA, 25 bp, Homo sapien
tgctgtagtcccaactcatgtttgt

SEQ ID NO: 4382540 - DNA, 25 bp, Homo sapien
ttggtgcatgaaggtatgggttggt

SEQ ID NO: 4382541 - DNA, 25 bp, Homo sapien
tggtgcatgaaggtatgggttggtt

SEQ ID NO: 4382542 - DNA, 25 bp, Homo sapien
tttggtgcatgaaggtatgggttgg

SEQ ID NO: 4382543 - DNA, 25 bp, Homo sapien
tccacatcaagataatcctgttcct

SEQ ID NO: 4382544 - DNA, 25 bp, Homo sapien
gcatttcggcatttactaaaagtgc

SEQ ID NO: 4382545 - DNA, 25 bp, Homo sapien
aagtgctatagcaatttccacatca

SEQ ID NO: 4382546 - DNA, 25 bp, Homo sapien
gatatacagctggtggcatttcggc

SEQ ID NO: 4382547 - DNA, 25 bp, Homo sapien
tttacgtacaagagacagtgcctga

SEQ ID NO: 4382548 - DNA, 25 bp, Homo sapien
ttacgtacaagagacagtgcctgat

SEQ ID NO: 4382549 - DNA, 25 bp, Homo sapien
tacgtacaagagacagtgcctgata

SEQ ID NO: 4382550 - DNA, 25 bp, Homo sapien
atttacgtacaagagacagtgcctg

SEQ ID NO: 4382551 - DNA, 25 bp, Homo sapien
tgcttgactcaaatgacatgctaag

SEQ ID NO: 4382552 - DNA, 25 bp, Homo sapien
gtaatataaggcaccaactccagtg

SEQ ID NO: 4382553 - DNA, 25 bp, Homo sapien
tttggcattaactctgagcctagtc

SEQ ID NO: 4382554 - DNA, 25 bp, Homo sapien
tctttagctgggaggcagtacaact

SEQ ID NO: 4382555 - DNA, 25 bp, Homo sapien
ggccaacagggcgttatcatgctga

SEQ ID NO: 4382556 - DNA, 25 bp, Homo sapien
ctgaggagtgctggctaccaagcct

SEQ ID NO: 4382557 - DNA, 25 bp, Homo sapien
cattagatggtgtacctgggccaac

SEQ ID NO: 4382558 - DNA, 25 bp, Homo sapien
gcctgactctggaagcattagatgg

SEQ ID NO: 4382559 - DNA, 25 bp, Homo sapien
ctagggaaggcagggcacctcttgg

SEQ ID NO: 4382560 - DNA, 25 bp, Homo sapien
gatgggcacatgagagttaggcagc

SEQ ID NO: 4382561 - DNA, 25 bp, Homo sapien
gtactggctctctccagtaggctgg

SEQ ID NO: 4382562 - DNA, 25 bp, Homo sapien
tagggcaagaccatttcccctggtg

SEQ ID NO: 4382563 - DNA, 25 bp, Homo sapien
tccctgcatgcatgttcaggtgccc

SEQ ID NO: 4382564 - DNA, 25 bp, Homo sapien
tgcacacacgcatccctgcatgcat

SEQ ID NO: 4382565 - DNA, 25 bp, Homo sapien
catgcatgttcaggtgccctggccc

SEQ ID NO: 4382566 - DNA, 25 bp, Homo sapien
tgcatgcatgttcaggtgccctggc

SEQ ID NO: 4382567 - DNA, 25 bp, Homo sapien
gactggctttgttgacattggcttg

SEQ ID NO: 4382568 - DNA, 25 bp, Homo sapien
ggctttgttgacattggcttgacta

SEQ ID NO: 4382569 - DNA, 25 bp, Homo sapien
gaaaggactggctttgttgacattg

SEQ ID NO: 4382570 - DNA, 25 bp, Homo sapien
tgttgacattggcttgactaggcat

SEQ ID NO: 4382571 - DNA, 25 bp, Homo sapien
catctggcgtcagaaaagttgtttc

SEQ ID NO: 4382572 - DNA, 25 bp, Homo sapien
gcatctggcgtcagaaaagttgttt

SEQ ID NO: 4382573 - DNA, 25 bp, Homo sapien
cagcatctggcgtcagaaaagttgt

SEQ ID NO: 4382574 - DNA, 25 bp, Homo sapien
tcagcatctggcgtcagaaaagttg

SEQ ID NO: 4382575 - DNA, 25 bp, Homo sapien
gaacaatgaaggattcatccacccc

SEQ ID NO: 4382576 - DNA, 25 bp, Homo sapien
gagagatatggtcccattgtgaacc

SEQ ID NO: 4382577 - DNA, 25 bp, Homo sapien
tgtgaaccatagtgaacaacattgg

SEQ ID NO: 4382578 - DNA, 25 bp, Homo sapien
caacattgggctttggaactagaag

SEQ ID NO: 4382579 - DNA, 25 bp, Homo sapien
tgtcatggtaatcttgtagtctctt

SEQ ID NO: 4382580 - DNA, 25 bp, Homo sapien
tccacgattagaagtaattttgtca

SEQ ID NO: 4382581 - DNA, 25 bp, Homo sapien
tcttgtagtctcttatggactcact

SEQ ID NO: 4382582 - DNA, 25 bp, Homo sapien
ctaaagtaagcataataggtgatgt

SEQ ID NO: 4382583 - DNA, 25 bp, Homo sapien
tgtagctttctctatcagtactcac

SEQ ID NO: 4382584 - DNA, 25 bp, Homo sapien
tttttccttgacacaagccattctc

SEQ ID NO: 4382585 - DNA, 25 bp, Homo sapien
cagtactcaccgcttttactttcct

SEQ ID NO: 4382586 - DNA, 25 bp, Homo sapien
ggatgtagctttctctatcagtact

SEQ ID NO: 4382587 - DNA, 25 bp, Homo sapien
tcatcctatgcatcgcctcttccat

SEQ ID NO: 4382588 - DNA, 25 bp, Homo sapien
tccatgtaacctttcaccataacat

SEQ ID NO: 4382589 - DNA, 25 bp, Homo sapien
ttccatgtaacctttcaccataaca

SEQ ID NO: 4382590 - DNA, 25 bp, Homo sapien
tatgcatcgcctcttccatgtaacc

SEQ ID NO: 4382591 - DNA, 25 bp, Homo sapien
cagaaactgacttttttcctccttg

SEQ ID NO: 4382592 - DNA, 25 bp, Homo sapien
ctgacttttttcctccttgatccat

SEQ ID NO: 4382593 - DNA, 25 bp, Homo sapien
actgacttttttcctccttgatcca

SEQ ID NO: 4382594 - DNA, 25 bp, Homo sapien
catacacaggttggtcgtttcttct

SEQ ID NO: 4382595 - DNA, 25 bp, Homo sapien
aagctgaggcattcctttacttctt

SEQ ID NO: 4382596 - DNA, 25 bp, Homo sapien
tcactcagagctactctctcataca

SEQ ID NO: 4382597 - DNA, 25 bp, Homo sapien
caaaagctgaggcattcctttactt

SEQ ID NO: 4382598 - DNA, 25 bp, Homo sapien
gtgactgttatttcagaatgtagcc

SEQ ID NO: 4382599 - DNA, 25 bp, Homo sapien
ttgtccttgtgactgttatttcaga

SEQ ID NO: 4382600 - DNA, 25 bp, Homo sapien
gtccttgtgactgttatttcagaat

SEQ ID NO: 4382601 - DNA, 25 bp, Homo sapien
gactgttatttcagaatgtagccat

SEQ ID NO: 4382602 - DNA, 25 bp, Homo sapien
catcagtatgatggaaaatggcaac

SEQ ID NO: 4382603 - DNA, 25 bp, Homo sapien
tagcagcaccgtatttgcccaaagg

SEQ ID NO: 4382604 - DNA, 25 bp, Homo sapien
tctttgattcattctgggcaagcca

SEQ ID NO: 4382605 - DNA, 25 bp, Homo sapien
tatctgccacatcatcccacggttt

SEQ ID NO: 4382606 - DNA, 25 bp, Homo sapien
ggcaatgggccagagactgcttcaa

SEQ ID NO: 4382607 - DNA, 25 bp, Homo sapien
caatgggccagagactgcttcaaat

SEQ ID NO: 4382608 - DNA, 25 bp, Homo sapien
gcaatgggccagagactgcttcaaa

SEQ ID NO: 4382609 - DNA, 25 bp, Homo sapien
aggcaatgggccagagactgcttca

SEQ ID NO: 4382610 - DNA, 25 bp, Homo sapien
tctgccaggtaatcattgagcacat

SEQ ID NO: 4382611 - DNA, 25 bp, Homo sapien
gtaatcattgagcacatggaggcca

SEQ ID NO: 4382612 - DNA, 25 bp, Homo sapien
tcattgagcacatggaggccagcag

SEQ ID NO: 4382613 - DNA, 25 bp, Homo sapien
tgccaggtaatcattgagcacatgg

SEQ ID NO: 4382614 - DNA, 25 bp, Homo sapien
ttgaaactgtgttctcccattggtg

SEQ ID NO: 4382615 - DNA, 25 bp, Homo sapien
gctgtcagagcaagaccaataacta

SEQ ID NO: 4382616 - DNA, 25 bp, Homo sapien
gtagaaaatgcattgctgtcatcat

SEQ ID NO: 4382617 - DNA, 25 bp, Homo sapien
tccagtaagcattcaaaaacatatg

SEQ ID NO: 4382618 - DNA, 25 bp, Homo sapien
agcaaatggtttccacggctgtcag

SEQ ID NO: 4382619 - DNA, 25 bp, Homo sapien
agaagtccattcttcttgattcata

SEQ ID NO: 4382620 - DNA, 25 bp, Homo sapien
ctctgactcctagatatataatttt

SEQ ID NO: 4382621 - DNA, 25 bp, Homo sapien
tagatgtaccgtcaacagtatttgc

SEQ ID NO: 4382622 - DNA, 25 bp, Homo sapien
gacattttacaaccatgctctgggt

SEQ ID NO: 4382623 - DNA, 25 bp, Homo sapien
atgcagaagtaagaagcccactttt

SEQ ID NO: 4382624 - DNA, 25 bp, Homo sapien
tatttgctgctttagcagtggatgc

SEQ ID NO: 4382625 - DNA, 25 bp, Homo sapien
tgttgttccactaaactggtgttca

SEQ ID NO: 4382626 - DNA, 25 bp, Homo sapien
tgtgttgttccactaaactggtgtt

SEQ ID NO: 4382627 - DNA, 25 bp, Homo sapien
gtgtgttgttccactaaactggtgt

SEQ ID NO: 4382628 - DNA, 25 bp, Homo sapien
gtgttgttccactaaactggtgttc

SEQ ID NO: 4382629 - DNA, 25 bp, Homo sapien
gcagaaactcattttggcgccctcc

SEQ ID NO: 4382630 - DNA, 25 bp, Homo sapien
agatgtttcacaaccagagcatggg

SEQ ID NO: 4382631 - DNA, 25 bp, Homo sapien
gatacaacactttcattactggctg

SEQ ID NO: 4382632 - DNA, 25 bp, Homo sapien
cctctggacaggtaagatacaacac

SEQ ID NO: 4382633 - DNA, 25 bp, Homo sapien
gcccctgcctatgctgatataaact

SEQ ID NO: 4382634 - DNA, 25 bp, Homo sapien
ggttataaataagcccctgcctatg

SEQ ID NO: 4382635 - DNA, 25 bp, Homo sapien
taaataagcccctgcctatgctgat

SEQ ID NO: 4382636 - DNA, 25 bp, Homo sapien
tttctggttataaataagcccctgc

SEQ ID NO: 4382637 - DNA, 25 bp, Homo sapien
gatgaagatgtaatttggaaggcca

SEQ ID NO: 4382638 - DNA, 25 bp, Homo sapien
ctggcagagtggatgaagatgtaat

SEQ ID NO: 4382639 - DNA, 25 bp, Homo sapien
tctctcacagaacatttatatgtca

SEQ ID NO: 4382640 - DNA, 25 bp, Homo sapien
atttggaaggccagcagaatcttca

SEQ ID NO: 4382641 - DNA, 25 bp, Homo sapien
gcatatcatgtgatcaacaactggg

SEQ ID NO: 4382642 - DNA, 25 bp, Homo sapien
tatcatgtgatcaacaactgggcag

SEQ ID NO: 4382643 - DNA, 25 bp, Homo sapien
catatcatgtgatcaacaactgggc

SEQ ID NO: 4382644 - DNA, 25 bp, Homo sapien
cgcatatcatgtgatcaacaactgg

SEQ ID NO: 4382645 - DNA, 25 bp, Homo sapien
tagcagttgcccctttgacacattc

SEQ ID NO: 4382646 - DNA, 25 bp, Homo sapien
acagctgtagcagttgcccctttga

SEQ ID NO: 4382647 - DNA, 25 bp, Homo sapien
tttgtgtaacagctgtagcagttgc

SEQ ID NO: 4382648 - DNA, 25 bp, Homo sapien
tgtaacagctgtagcagttgcccct

SEQ ID NO: 4382649 - DNA, 25 bp, Homo sapien
taaaagagctaatcaagtcaggtcg

SEQ ID NO: 4382650 - DNA, 25 bp, Homo sapien
agtataaaagagctaatcaagtcag

SEQ ID NO: 4382651 - DNA, 25 bp, Homo sapien
caggtcgaacatattgtcttaactc

SEQ ID NO: 4382652 - DNA, 25 bp, Homo sapien
gctaatcaagtcaggtcgaacatat

SEQ ID NO: 4382653 - DNA, 25 bp, Homo sapien
aagaaatcatgccattaactgggat

SEQ ID NO: 4382654 - DNA, 25 bp, Homo sapien
agccacaaaacctagctgaaaatga

SEQ ID NO: 4382655 - DNA, 25 bp, Homo sapien
agagaaacaagaaatcatgccatta

SEQ ID NO: 4382656 - DNA, 25 bp, Homo sapien
tcatgccattaactgggatttccca

SEQ ID NO: 4382657 - DNA, 25 bp, Homo sapien
tacaagccttgggtgagtaccagag

SEQ ID NO: 4382658 - DNA, 25 bp, Homo sapien
ttggtttgtacaagccttgggtgag

SEQ ID NO: 4382659 - DNA, 25 bp, Homo sapien
tttggccccatgtggtagagctaca

SEQ ID NO: 4382660 - DNA, 25 bp, Homo sapien
catgtggtagagctacatagttctc

SEQ ID NO: 4382661 - DNA, 25 bp, Homo sapien
acacagagacacctcggattccagg

SEQ ID NO: 4382662 - DNA, 25 bp, Homo sapien
cggattccaggggtgtgcttagcat

SEQ ID NO: 4382663 - DNA, 25 bp, Homo sapien
tctgcctgatactcctcccaaacac

SEQ ID NO: 4382664 - DNA, 25 bp, Homo sapien
ctctgcctgatactcctcccaaaca

SEQ ID NO: 4382665 - DNA, 25 bp, Homo sapien
cacagttgcaagcacgtttattagt

SEQ ID NO: 4382666 - DNA, 25 bp, Homo sapien
cgtttattagtgaaagttgcatcca

SEQ ID NO: 4382667 - DNA, 25 bp, Homo sapien
ttctgcaattttcgtctatagagtt

SEQ ID NO: 4382668 - DNA, 25 bp, Homo sapien
cagcatagtttgttgcattcagtaa

SEQ ID NO: 4382669 - DNA, 25 bp, Homo sapien
ctcttgtaatgccagctcgtttctt

SEQ ID NO: 4382670 - DNA, 25 bp, Homo sapien
tcttgtaatgccagctcgtttcttc

SEQ ID NO: 4382671 - DNA, 25 bp, Homo sapien
gtaatgccagctcgtttcttctcca

SEQ ID NO: 4382672 - DNA, 25 bp, Homo sapien
ttgtaatgccagctcgtttcttctc

SEQ ID NO: 4382673 - DNA, 25 bp, Homo sapien
caccaggaacttgagtggatccttg

SEQ ID NO: 4382674 - DNA, 25 bp, Homo sapien
gcttttcaatttccgctggtgaaca

SEQ ID NO: 4382675 - DNA, 25 bp, Homo sapien
gaggcagattttctggcagtccagc

SEQ ID NO: 4382676 - DNA, 25 bp, Homo sapien
aatgctcgttcctaatagatcttgg

SEQ ID NO: 4382677 - DNA, 25 bp, Homo sapien
tacaaacactgcatggaatccttgg

SEQ ID NO: 4382678 - DNA, 25 bp, Homo sapien
gaagaaaatgcctaggccagtatga

SEQ ID NO: 4382679 - DNA, 25 bp, Homo sapien
gtgccttaacgtatgaaatctgagc

SEQ ID NO: 4382680 - DNA, 25 bp, Homo sapien
tatcagtgttatggcaaaaggcaga

SEQ ID NO: 4382681 - DNA, 25 bp, Homo sapien
catttcagcagatgctgcaaattca

SEQ ID NO: 4382682 - DNA, 25 bp, Homo sapien
ttcagtctttccagaactagagaga

SEQ ID NO: 4382683 - DNA, 25 bp, Homo sapien
tcagtctttccagaactagagagat

SEQ ID NO: 4382684 - DNA, 25 bp, Homo sapien
cagatgctgcaaattcagtctttcc

SEQ ID NO: 4382685 - DNA, 25 bp, Homo sapien
tctaggacccttatctcgggagcaa

SEQ ID NO: 4382686 - DNA, 25 bp, Homo sapien
caactgggactgactggctcacaag

SEQ ID NO: 4382687 - DNA, 25 bp, Homo sapien
tacagcatggccacaatattagggt

SEQ ID NO: 4382688 - DNA, 25 bp, Homo sapien
tttactagcatacagctgcccagcg

SEQ ID NO: 4382689 - DNA, 25 bp, Homo sapien
gatgtgaactccttagcaacgtctt

SEQ ID NO: 4382690 - DNA, 25 bp, Homo sapien
tttactcctcagtatgtgtgatgcc

SEQ ID NO: 4382691 - DNA, 25 bp, Homo sapien
ctgaactgttgatgtctatgtttac

SEQ ID NO: 4382692 - DNA, 25 bp, Homo sapien
ggactatgtacttactgccgtctaa

SEQ ID NO: 4382693 - DNA, 25 bp, Homo sapien
gtttcttcccaacaatattagtgta

SEQ ID NO: 4382694 - DNA, 25 bp, Homo sapien
aaaactcgtgtctttgctgaaatcg

SEQ ID NO: 4382695 - DNA, 25 bp, Homo sapien
tattagtgtagtttgaagaagaaac

SEQ ID NO: 4382696 - DNA, 25 bp, Homo sapien
gctgaaatcgattgggtttcttccc

SEQ ID NO: 4382697 - DNA, 25 bp, Homo sapien
gccaggattatttgtatggaggcct

SEQ ID NO: 4382698 - DNA, 25 bp, Homo sapien
taggtataaggatggcttaggctgc

SEQ ID NO: 4382699 - DNA, 25 bp, Homo sapien
taaatgtgcttttgtgctggtgtgc

SEQ ID NO: 4382700 - DNA, 25 bp, Homo sapien
ggcagtgactattcttgtaaggtgt

SEQ ID NO: 4382701 - DNA, 25 bp, Homo sapien
gagacaatgttatatcatgaatagg

SEQ ID NO: 4382702 - DNA, 25 bp, Homo sapien
tatatcatgaataggctcttcccag

SEQ ID NO: 4382703 - DNA, 25 bp, Homo sapien
cacaggagacaatgttatatcatga

SEQ ID NO: 4382704 - DNA, 25 bp, Homo sapien
caatgttatatcatgaataggctct

SEQ ID NO: 4382705 - DNA, 25 bp, Homo sapien
gatgggataggagccctcgattgct

SEQ ID NO: 4382706 - DNA, 25 bp, Homo sapien
gccctcgattgctgggataatgccc

SEQ ID NO: 4382707 - DNA, 25 bp, Homo sapien
actggtacctcctgacacttctcta

SEQ ID NO: 4382708 - DNA, 25 bp, Homo sapien
gaggaatgtctatgggacctagatc

SEQ ID NO: 4382709 - DNA, 25 bp, Homo sapien
ttctagatgtacaatcatgttgtct

SEQ ID NO: 4382710 - DNA, 25 bp, Homo sapien
ttttctagatgtacaatcatgttgt

SEQ ID NO: 4382711 - DNA, 25 bp, Homo sapien
agatgtacaatcatgttgtctgcaa

SEQ ID NO: 4382712 - DNA, 25 bp, Homo sapien
ctagatgtacaatcatgttgtctgc

SEQ ID NO: 4382713 - DNA, 25 bp, Homo sapien
ttcaccttccaggataaaagcatac

SEQ ID NO: 4382714 - DNA, 25 bp, Homo sapien
tccaggataaaagcatactgtttgg

SEQ ID NO: 4382715 - DNA, 25 bp, Homo sapien
tactgtttggataagcactgaaaat

SEQ ID NO: 4382716 - DNA, 25 bp, Homo sapien
aaatggttcaaggaaagagtcctag

SEQ ID NO: 4382717 - DNA, 25 bp, Homo sapien
gatgccatctgaactatttcttagt

SEQ ID NO: 4382718 - DNA, 25 bp, Homo sapien
tattgatgccatctgaactatttct

SEQ ID NO: 4382719 - DNA, 25 bp, Homo sapien
tattattgatgccatctgaactatt

SEQ ID NO: 4382720 - DNA, 25 bp, Homo sapien
catctgaactatttcttagtggatt

SEQ ID NO: 4382721 - DNA, 25 bp, Homo sapien
tccaattatagtacatgtgctacca

SEQ ID NO: 4382722 - DNA, 25 bp, Homo sapien
atagtacatgtgctaccaaagcaag

SEQ ID NO: 4382723 - DNA, 25 bp, Homo sapien
ccaattatagtacatgtgctaccaa

SEQ ID NO: 4382724 - DNA, 25 bp, Homo sapien
attatagtacatgtgctaccaaagc

SEQ ID NO: 4382725 - DNA, 25 bp, Homo sapien
tgcttgtttagcagggacattgaca

SEQ ID NO: 4382726 - DNA, 25 bp, Homo sapien
ttttttgtgcatgcaagttagattt

SEQ ID NO: 4382727 - DNA, 25 bp, Homo sapien
tagcagggacattgacaaagccaag

SEQ ID NO: 4382728 - DNA, 25 bp, Homo sapien
ggacattgacaaagccaaggatgat

SEQ ID NO: 4382729 - DNA, 25 bp, Homo sapien
tatatgaaaagggactgaactgagc

SEQ ID NO: 4382730 - DNA, 25 bp, Homo sapien
acatttagcttcctctagaaccagg

SEQ ID NO: 4382731 - DNA, 25 bp, Homo sapien
gatcaagggcttcatcggtactggc

SEQ ID NO: 4382732 - DNA, 25 bp, Homo sapien
tctttcccaggtaacaagcacagga

SEQ ID NO: 4382733 - DNA, 25 bp, Homo sapien
gatagaaaagccaatcagcctttat

SEQ ID NO: 4382734 - DNA, 25 bp, Homo sapien
tagcggctttctagcaaaggcttct

SEQ ID NO: 4382735 - DNA, 25 bp, Homo sapien
tctctaaagttagcggctttctagc

SEQ ID NO: 4382736 - DNA, 25 bp, Homo sapien
tgaatcttctttaagccagagcttt

SEQ ID NO: 4382737 - DNA, 25 bp, Homo sapien
ctggagtgaaatacatcgctatttt

SEQ ID NO: 4382738 - DNA, 25 bp, Homo sapien
tttttcggtgaagctccttccatgt

SEQ ID NO: 4382739 - DNA, 25 bp, Homo sapien
tgaaatacatcgctatttttcggtg

SEQ ID NO: 4382740 - DNA, 25 bp, Homo sapien
catcgctatttttcggtgaagctcc

SEQ ID NO: 4382741 - DNA, 25 bp, Homo sapien
tgtttatggaggacttactcatgcc

SEQ ID NO: 4382742 - DNA, 25 bp, Homo sapien
atgtttatggaggacttactcatgc

SEQ ID NO: 4382743 - DNA, 25 bp, Homo sapien
tcatcgtctatctctgctgagagaa

SEQ ID NO: 4382744 - DNA, 25 bp, Homo sapien
gatggtatcgtttgcatatttgaac

SEQ ID NO: 4382745 - DNA, 25 bp, Homo sapien
tatatagtcctgtttagattggcac

SEQ ID NO: 4382746 - DNA, 25 bp, Homo sapien
agagaagaattggttggatggtatc

SEQ ID NO: 4382747 - DNA, 25 bp, Homo sapien
cacattgaataggaaggatctgtac

SEQ ID NO: 4382748 - DNA, 25 bp, Homo sapien
acacacacacgaggtgcacagggtt

SEQ ID NO: 4382749 - DNA, 25 bp, Homo sapien
gtagcaaggatctcatgttcacaca

SEQ ID NO: 4382750 - DNA, 25 bp, Homo sapien
tagtaagtcctagttcatgcagatg

SEQ ID NO: 4382751 - DNA, 25 bp, Homo sapien
gtatcatcaagctctgcgccctctg

SEQ ID NO: 4382752 - DNA, 25 bp, Homo sapien
tgaagtcccgtcaattaaattctga

SEQ ID NO: 4382753 - DNA, 25 bp, Homo sapien
ttctgagaaaaaccgttagcactta

SEQ ID NO: 4382754 - DNA, 25 bp, Homo sapien
gcctggataccagtatcatcaagct

SEQ ID NO: 4382755 - DNA, 25 bp, Homo sapien
gaagttgaatttgaggctttgagag

SEQ ID NO: 4382756 - DNA, 25 bp, Homo sapien
tgaaatgaagcccttgaagttgaat

SEQ ID NO: 4382757 - DNA, 25 bp, Homo sapien
tgcattcccacttttatcattgtcc

SEQ ID NO: 4382758 - DNA, 25 bp, Homo sapien
gcagctctgaaaagtgctgaaatga

SEQ ID NO: 4382759 - DNA, 25 bp, Homo sapien
ggtatcacttcaagaccaatcagaa

SEQ ID NO: 4382760 - DNA, 25 bp, Homo sapien
aagcctcttggcctcttgaacggtg

SEQ ID NO: 4382761 - DNA, 25 bp, Homo sapien
tcagcaggctttgggtcatttacta

SEQ ID NO: 4382762 - DNA, 25 bp, Homo sapien
gaaacatgaacacccaaggtcttga

SEQ ID NO: 4382763 - DNA, 25 bp, Homo sapien
tgtttctgtattatcctctcttccg

SEQ ID NO: 4382764 - DNA, 25 bp, Homo sapien
tccggttggaatgcaccaaaagtgc

SEQ ID NO: 4382765 - DNA, 25 bp, Homo sapien
ctctcttccggttggaatgcaccaa

SEQ ID NO: 4382766 - DNA, 25 bp, Homo sapien
tgtattatcctctcttccggttgga

SEQ ID NO: 4382767 - DNA, 25 bp, Homo sapien
aacagttacaagcagcggtgtgttg

SEQ ID NO: 4382768 - DNA, 25 bp, Homo sapien
gagtctgtggcaattattaagaggc

SEQ ID NO: 4382769 - DNA, 25 bp, Homo sapien
tctgtggcaattattaagaggcaca

SEQ ID NO: 4382770 - DNA, 25 bp, Homo sapien
gcagcggtgtgttgtctttgagaaa

SEQ ID NO: 4382771 - DNA, 25 bp, Homo sapien
ctatcaaaggattcaatctgtgtca

SEQ ID NO: 4382772 - DNA, 25 bp, Homo sapien
actatcaaaggattcaatctgtgtc

SEQ ID NO: 4382773 - DNA, 25 bp, Homo sapien
cctgagggcttgtcatctgagcccc

SEQ ID NO: 4382774 - DNA, 25 bp, Homo sapien
aatgaatggagcctgagggcttgtc

SEQ ID NO: 4382775 - DNA, 25 bp, Homo sapien
ctttgaaataattgccagtaagagc

SEQ ID NO: 4382776 - DNA, 25 bp, Homo sapien
gaaataattgccagtaagagcttta

SEQ ID NO: 4382777 - DNA, 25 bp, Homo sapien
gaaggattgttgtactgatgcagcc

SEQ ID NO: 4382778 - DNA, 25 bp, Homo sapien
tgaatgtttgagattggaactgaat

SEQ ID NO: 4382779 - DNA, 25 bp, Homo sapien
ctgttgaatgtttgagattggaact

SEQ ID NO: 4382780 - DNA, 25 bp, Homo sapien
attgttgtactgatgcagccaagcc

SEQ ID NO: 4382781 - DNA, 25 bp, Homo sapien
tcatgctgcattggtcacttgcact

SEQ ID NO: 4382782 - DNA, 25 bp, Homo sapien
tcacttgcactgtgttaggtacaaa

SEQ ID NO: 4382783 - DNA, 25 bp, Homo sapien
ctgtgttaggtacaaacaagttgtt

SEQ ID NO: 4382784 - DNA, 25 bp, Homo sapien
catgctgcattggtcacttgcactg

SEQ ID NO: 4382785 - DNA, 25 bp, Homo sapien
aatgttgattctgtttcctcaatca

SEQ ID NO: 4382786 - DNA, 25 bp, Homo sapien
ttgattctgtttcctcaatcatcat

SEQ ID NO: 4382787 - DNA, 25 bp, Homo sapien
ccaatgttgattctgtttcctcaat

SEQ ID NO: 4382788 - DNA, 25 bp, Homo sapien
tgttgattctgtttcctcaatcatc

SEQ ID NO: 4382789 - DNA, 25 bp, Homo sapien
gactccactggcattatcagagacc

SEQ ID NO: 4382790 - DNA, 25 bp, Homo sapien
gaagttccatattccaagactccac

SEQ ID NO: 4382791 - DNA, 25 bp, Homo sapien
gctcttaactgtcccataagtgtct

SEQ ID NO: 4382792 - DNA, 25 bp, Homo sapien
tggccttctgatacttgccaagctc

SEQ ID NO: 4382793 - DNA, 25 bp, Homo sapien
ttccattaagattcagtcctattct

SEQ ID NO: 4382794 - DNA, 25 bp, Homo sapien
aatgatgattggtttctggaacaaa

SEQ ID NO: 4382795 - DNA, 25 bp, Homo sapien
tattcttcccccgaaatgatgattg

SEQ ID NO: 4382796 - DNA, 25 bp, Homo sapien
ttaagattcagtcctattcttcccc

SEQ ID NO: 4382797 - DNA, 25 bp, Homo sapien
cttcttagattgatcttctcacaca

SEQ ID NO: 4382798 - DNA, 25 bp, Homo sapien
gatacataatcttaggcaggtaaaa

SEQ ID NO: 4382799 - DNA, 25 bp, Homo sapien
caagtctccaaggtgttgcaataca

SEQ ID NO: 4382800 - DNA, 25 bp, Homo sapien
ggcaggtaaaaacccatatcaagta

SEQ ID NO: 4382801 - DNA, 25 bp, Homo sapien
gagctggcttcagacagttatgtcc

SEQ ID NO: 4382802 - DNA, 25 bp, Homo sapien
tacctctcgtactgtgtctatccaa

SEQ ID NO: 4382803 - DNA, 25 bp, Homo sapien
tgcttctgtgtacttctacctctcg

SEQ ID NO: 4382804 - DNA, 25 bp, Homo sapien
ccatgatacgtacagagttgttttc

SEQ ID NO: 4382805 - DNA, 25 bp, Homo sapien
tgctaaatgtctgttactatgggtt

SEQ ID NO: 4382806 - DNA, 25 bp, Homo sapien
agaggcctgacaacatgtaccctag

SEQ ID NO: 4382807 - DNA, 25 bp, Homo sapien
tcttaattagaataccatagtcctg

SEQ ID NO: 4382808 - DNA, 25 bp, Homo sapien
catagtcctgagtcaaaccagtcaa

SEQ ID NO: 4382809 - DNA, 25 bp, Homo sapien
ctgttgtagtaatgttcatagtgaa

SEQ ID NO: 4382810 - DNA, 25 bp, Homo sapien
ggtttccaacaagattctttcaggc

SEQ ID NO: 4382811 - DNA, 25 bp, Homo sapien
ggcatagaatagggacttttctgtt

SEQ ID NO: 4382812 - DNA, 25 bp, Homo sapien
ttatacataaaccatggtttccaac

SEQ ID NO: 4382813 - DNA, 25 bp, Homo sapien
ttgcctagtgaaatatgctgagctt

SEQ ID NO: 4382814 - DNA, 25 bp, Homo sapien
taggtccatttagtactatttgttc

SEQ ID NO: 4382815 - DNA, 25 bp, Homo sapien
tgtaggcacacttatcactctcttt

SEQ ID NO: 4382816 - DNA, 25 bp, Homo sapien
tatcaaggctactataatgagcagc

SEQ ID NO: 4382817 - DNA, 25 bp, Homo sapien
aaattagtatcatttacagtatctt

SEQ ID NO: 4382818 - DNA, 25 bp, Homo sapien
tcctttgaatgggagcttcctttcc

SEQ ID NO: 4382819 - DNA, 25 bp, Homo sapien
ttcctttgaatgggagcttcctttc

SEQ ID NO: 4382820 - DNA, 25 bp, Homo sapien
taacactgtccttcgggcgactgag

SEQ ID NO: 4382821 - DNA, 25 bp, Homo sapien
ttctttagacatcgttaggcgccga

SEQ ID NO: 4382822 - DNA, 25 bp, Homo sapien
gttaggcgccgaagctcttgcagga

SEQ ID NO: 4382823 - DNA, 25 bp, Homo sapien
ccttcgggcgactgagggagtttca

SEQ ID NO: 4382824 - DNA, 25 bp, Homo sapien
attatcatccctgtccatcttgtaa

SEQ ID NO: 4382825 - DNA, 25 bp, Homo sapien
ttcttggaggcccaattatcatccc

SEQ ID NO: 4382826 - DNA, 25 bp, Homo sapien
caattatcatccctgtccatcttgt

SEQ ID NO: 4382827 - DNA, 25 bp, Homo sapien
ttggaggcccaattatcatccctgt

SEQ ID NO: 4382828 - DNA, 25 bp, Homo sapien
tctggccttcttcgagtttttccaa

SEQ ID NO: 4382829 - DNA, 25 bp, Homo sapien
tcgtcatcttctagatcccagctaa

SEQ ID NO: 4382830 - DNA, 25 bp, Homo sapien
tgcgagggacttttactcccgagcc

SEQ ID NO: 4382831 - DNA, 25 bp, Homo sapien
ttttccaacagtcggaaattgcgag

SEQ ID NO: 4382832 - DNA, 25 bp, Homo sapien
caagccagacacctctatatctaga

SEQ ID NO: 4382833 - DNA, 25 bp, Homo sapien
tatatcagacttctacccaagatga

SEQ ID NO: 4382834 - DNA, 25 bp, Homo sapien
caaggttctcaaatggatgagccag

SEQ ID NO: 4382835 - DNA, 25 bp, Homo sapien
tatacctaagcgtgtgtcatcacag

SEQ ID NO: 4382836 - DNA, 25 bp, Homo sapien
gatataccccattgacttgagttga

SEQ ID NO: 4382837 - DNA, 25 bp, Homo sapien
catttttcttatagatgatataccc

SEQ ID NO: 4382838 - DNA, 25 bp, Homo sapien
ttgagttgactcaaagtaggatgtt

SEQ ID NO: 4382839 - DNA, 25 bp, Homo sapien
tggcttatgacatatctaagatatg

SEQ ID NO: 4382840 - DNA, 25 bp, Homo sapien
gatgtttccttagcattcttttgcc

SEQ ID NO: 4382841 - DNA, 25 bp, Homo sapien
gtctgttcgcctgaattcatctaag

SEQ ID NO: 4382842 - DNA, 25 bp, Homo sapien
ttcttttgccaatttgcgaagtctg

SEQ ID NO: 4382843 - DNA, 25 bp, Homo sapien
caagtctcattagatgtttccttag

SEQ ID NO: 4382844 - DNA, 25 bp, Homo sapien
tctttcatcctgtgtcgctcattca

SEQ ID NO: 4382845 - DNA, 25 bp, Homo sapien
ctttcatcctgtgtcgctcattcat

SEQ ID NO: 4382846 - DNA, 25 bp, Homo sapien
gtctttcatcctgtgtcgctcattc

SEQ ID NO: 4382847 - DNA, 25 bp, Homo sapien
tctttcaacctgtaacattggctct

SEQ ID NO: 4382848 - DNA, 25 bp, Homo sapien
aacctgtaacattggctctccttcc

SEQ ID NO: 4382849 - DNA, 25 bp, Homo sapien
tgtaacattggctctccttccccca

SEQ ID NO: 4382850 - DNA, 25 bp, Homo sapien
ttcaacctgtaacattggctctcct

SEQ ID NO: 4382851 - DNA, 25 bp, Homo sapien
tgtgacctgaccattactgtttgcc

SEQ ID NO: 4382852 - DNA, 25 bp, Homo sapien
tctggagtgcagatgaaacgaaatg

SEQ ID NO: 4382853 - DNA, 25 bp, Homo sapien
taagcggaaaaacatcaatactggc

SEQ ID NO: 4382854 - DNA, 25 bp, Homo sapien
gtttggcttccaacctagactgtaa

SEQ ID NO: 4382855 - DNA, 25 bp, Homo sapien
ttacagaacaccagaagtcaggaag

SEQ ID NO: 4382856 - DNA, 25 bp, Homo sapien
aagaaggacattgagcaaaatatat

SEQ ID NO: 4382857 - DNA, 25 bp, Homo sapien
ggaagaaggacattgagcaaaatat

SEQ ID NO: 4382858 - DNA, 25 bp, Homo sapien
acagaacaccagaagtcaggaagaa

SEQ ID NO: 4382859 - DNA, 25 bp, Homo sapien
gagtgacttgtccacagttccaaag

SEQ ID NO: 4382860 - DNA, 25 bp, Homo sapien
tgtggaatatcatgacgagtaggct

SEQ ID NO: 4382861 - DNA, 25 bp, Homo sapien
caacaaaggcgtatatatgtaggca

SEQ ID NO: 4382862 - DNA, 25 bp, Homo sapien
cattcctgatgatggtagcccactc

SEQ ID NO: 4382863 - DNA, 25 bp, Homo sapien
tcttcctcatgaagcttatttctag

SEQ ID NO: 4382864 - DNA, 25 bp, Homo sapien
tctacctatcttgggttttgacatg

SEQ ID NO: 4382865 - DNA, 25 bp, Homo sapien
tgatgtaatgtaagagatgtgctac

SEQ ID NO: 4382866 - DNA, 25 bp, Homo sapien
ttgtgtcttagggactagcaaggcc

SEQ ID NO: 4382867 - DNA, 25 bp, Homo sapien
aaaggacatttgattccagaggaac

SEQ ID NO: 4382868 - DNA, 25 bp, Homo sapien
ggaacaccactgataattcaattag

SEQ ID NO: 4382869 - DNA, 25 bp, Homo sapien
aatcatattcctgaacaccagcagg

SEQ ID NO: 4382870 - DNA, 25 bp, Homo sapien
tattgttgcaagttccagtccagca

SEQ ID NO: 4382871 - DNA, 25 bp, Homo sapien
taacctaatttctggccgcttcttc

SEQ ID NO: 4382872 - DNA, 25 bp, Homo sapien
ggagattagccatgattactgaaag

SEQ ID NO: 4382873 - DNA, 25 bp, Homo sapien
ccgcttcttcgtggaaaagtgatta

SEQ ID NO: 4382874 - DNA, 25 bp, Homo sapien
tgacagaaccggagattagccatga

SEQ ID NO: 4382875 - DNA, 25 bp, Homo sapien
ggagtccaagtttttgtccctggca

SEQ ID NO: 4382876 - DNA, 25 bp, Homo sapien
tcaaggttgaccacatttgggccat

SEQ ID NO: 4382877 - DNA, 25 bp, Homo sapien
gaaacacgggcataagcgttgggca

SEQ ID NO: 4382878 - DNA, 25 bp, Homo sapien
ttgggagtcaggcaatccaggccac

SEQ ID NO: 4382879 - DNA, 25 bp, Homo sapien
ctgcaaccttttggccaaatgctca

SEQ ID NO: 4382880 - DNA, 25 bp, Homo sapien
tcagtacagccattgctgcaacctt

SEQ ID NO: 4382881 - DNA, 25 bp, Homo sapien
gtactgctcagtggctactcttcta

SEQ ID NO: 4382882 - DNA, 25 bp, Homo sapien
ctatactccggtcagttcattaaaa

SEQ ID NO: 4382883 - DNA, 25 bp, Homo sapien
ccaggatggggctgccgatccacag

SEQ ID NO: 4382884 - DNA, 25 bp, Homo sapien
gatggggctgccgatccacagggag

SEQ ID NO: 4382885 - DNA, 25 bp, Homo sapien
acagggagtacttgcgctcggagga

SEQ ID NO: 4382886 - DNA, 25 bp, Homo sapien
ttgcgctcggaggagcagtgatctt

SEQ ID NO: 4382887 - DNA, 25 bp, Homo sapien
gatgtagggtagctcatagctcttc

SEQ ID NO: 4382888 - DNA, 25 bp, Homo sapien
gatgacctggatgtagggtagctca

SEQ ID NO: 4382889 - DNA, 25 bp, Homo sapien
ggatgtagggtagctcatagctctt

SEQ ID NO: 4382890 - DNA, 25 bp, Homo sapien
gacctggatgtagggtagctcatag

SEQ ID NO: 4382891 - DNA, 25 bp, Homo sapien
ggcgtggtagagggcatacccctca

SEQ ID NO: 4382892 - DNA, 25 bp, Homo sapien
tggtagagggcatacccctcataga

SEQ ID NO: 4382893 - DNA, 25 bp, Homo sapien
catcaccgtgccagtggtacggcca

SEQ ID NO: 4382894 - DNA, 25 bp, Homo sapien
atgcaggatggcgtggtagagggca

SEQ ID NO: 4382895 - DNA, 25 bp, Homo sapien
tacaagcccggtgatatcatcatgg

SEQ ID NO: 4382896 - DNA, 25 bp, Homo sapien
gcggtcctcctgtatgtcctctatg

SEQ ID NO: 4382897 - DNA, 25 bp, Homo sapien
gggcaaacgcagtctccgcggtcct

SEQ ID NO: 4382898 - DNA, 25 bp, Homo sapien
cgtcgcctgcgaagctggtcttgca

SEQ ID NO: 4382899 - DNA, 25 bp, Homo sapien
gtatcgcatgctgcatatgtcttta

SEQ ID NO: 4382900 - DNA, 25 bp, Homo sapien
tgccccatgacacactccaatgtgt

SEQ ID NO: 4382901 - DNA, 25 bp, Homo sapien
tggctgcatagtatcgcatgctgca

SEQ ID NO: 4382902 - DNA, 25 bp, Homo sapien
taatagctttgagctccatccacgt

SEQ ID NO: 4382903 - DNA, 25 bp, Homo sapien
ttcaatctctattttcttctcatta

SEQ ID NO: 4382904 - DNA, 25 bp, Homo sapien
caatctctattttcttctcattaac

SEQ ID NO: 4382905 - DNA, 25 bp, Homo sapien
aatctctattttcttctcattaacc

SEQ ID NO: 4382906 - DNA, 25 bp, Homo sapien
tctctattttcttctcattaaccat

SEQ ID NO: 4382907 - DNA, 25 bp, Homo sapien
taactggcaactgaagagacagtac

SEQ ID NO: 4382908 - DNA, 25 bp, Homo sapien
gagacagtacatatctgtgaccagt

SEQ ID NO: 4382909 - DNA, 25 bp, Homo sapien
gggctttgcagtaccacctaagaaa

SEQ ID NO: 4382910 - DNA, 25 bp, Homo sapien
tcatgaatggtctaagtgcttaaca

SEQ ID NO: 4382911 - DNA, 25 bp, Homo sapien
ggaatttcaccaagtctgtctcatc

SEQ ID NO: 4382912 - DNA, 25 bp, Homo sapien
atttcccctgccaaagcattccata

SEQ ID NO: 4382913 - DNA, 25 bp, Homo sapien
caacacagaaacatatgggcagaag

SEQ ID NO: 4382914 - DNA, 25 bp, Homo sapien
ccataagtgtggatgagataaaact

SEQ ID NO: 4382915 - DNA, 25 bp, Homo sapien
atttcccaaatcctcctaacacctg

SEQ ID NO: 4382916 - DNA, 25 bp, Homo sapien
cttcacagtttgatatttgagcatc

SEQ ID NO: 4382917 - DNA, 25 bp, Homo sapien
tcctaacacctggtcttcatatgtc

SEQ ID NO: 4382918 - DNA, 25 bp, Homo sapien
cagtttgatatttgagcatcgggta

SEQ ID NO: 4382919 - DNA, 25 bp, Homo sapien
aggagatagatgtggtgatgggaac

SEQ ID NO: 4382920 - DNA, 25 bp, Homo sapien
atagatgtggtgatgggaacttctc

SEQ ID NO: 4382921 - DNA, 25 bp, Homo sapien
tttggcaggagatagatgtggtgat

SEQ ID NO: 4382922 - DNA, 25 bp, Homo sapien
agtttggcaggagatagatgtggtg

SEQ ID NO: 4382923 - DNA, 25 bp, Homo sapien
tatgttagacaaccgctgatgcatt

SEQ ID NO: 4382924 - DNA, 25 bp, Homo sapien
tagacaaccgctgatgcatttcaat

SEQ ID NO: 4382925 - DNA, 25 bp, Homo sapien
tttctatgttagacaaccgctgatg

SEQ ID NO: 4382926 - DNA, 25 bp, Homo sapien
ccaaatccaaagtagtaaggccaat

SEQ ID NO: 4382927 - DNA, 25 bp, Homo sapien
cagtggagcacccaaagagcactgg

SEQ ID NO: 4382928 - DNA, 25 bp, Homo sapien
tggagcacccaaagagcactggaaa

SEQ ID NO: 4382929 - DNA, 25 bp, Homo sapien
agcacccaaagagcactggaaattg

SEQ ID NO: 4382930 - DNA, 25 bp, Homo sapien
cacccaaagagcactggaaattgac

SEQ ID NO: 4382931 - DNA, 25 bp, Homo sapien
aatcggtcaccaataaatcggtcac

SEQ ID NO: 4382932 - DNA, 25 bp, Homo sapien
tctccatgtaatgatcaacaaatcg

SEQ ID NO: 4382933 - DNA, 25 bp, Homo sapien
aatcggtcaccaataaatcgggctg

SEQ ID NO: 4382934 - DNA, 25 bp, Homo sapien
ccatgaaacaagaggagattgaagc

SEQ ID NO: 4382935 - DNA, 25 bp, Homo sapien
tacttgcccttctgggcgcagtggt

SEQ ID NO: 4382936 - DNA, 25 bp, Homo sapien
tatcggggcaatgggtgggcgaggg

SEQ ID NO: 4382937 - DNA, 25 bp, Homo sapien
gggcgcagtggtcccggccctggga

SEQ ID NO: 4382938 - DNA, 25 bp, Homo sapien
ttctgtgctaggagcctacttgccc

SEQ ID NO: 4382939 - DNA, 25 bp, Homo sapien
agtctgcacccaactagtaagccag

SEQ ID NO: 4382940 - DNA, 25 bp, Homo sapien
gccacagagctttactcagtgtttt

SEQ ID NO: 4382941 - DNA, 25 bp, Homo sapien
ggccacagagctttactcagtgttt

SEQ ID NO: 4382942 - DNA, 25 bp, Homo sapien
gcacccaactagtaagccagcagtc

SEQ ID NO: 4382943 - DNA, 25 bp, Homo sapien
ggatatgggcaaccttctgagatga

SEQ ID NO: 4382944 - DNA, 25 bp, Homo sapien
tgtggacccatgactacccaacagc

SEQ ID NO: 4382945 - DNA, 25 bp, Homo sapien
gagatgatgtcatagcctgacatgc

SEQ ID NO: 4382946 - DNA, 25 bp, Homo sapien
tgcaacccttttgccactccatccc

SEQ ID NO: 4382947 - DNA, 25 bp, Homo sapien
tcatttcctgtgaagtataacattt

SEQ ID NO: 4382948 - DNA, 25 bp, Homo sapien
gcatcagcatattgtttaaccttga

SEQ ID NO: 4382949 - DNA, 25 bp, Homo sapien
cagtggtccgtagctgtttctgcta

SEQ ID NO: 4382950 - DNA, 25 bp, Homo sapien
ttctttcaagcagtggtccgtagct

SEQ ID NO: 4382951 - DNA, 25 bp, Homo sapien
agtgtcatcatggtcataatagtag

SEQ ID NO: 4382952 - DNA, 25 bp, Homo sapien
tcatcatggtcataatagtagtatt

SEQ ID NO: 4382953 - DNA, 25 bp, Homo sapien
tgtcatcatggtcataatagtagta

SEQ ID NO: 4382954 - DNA, 25 bp, Homo sapien
tcagtgtcatcatggtcataatagt

SEQ ID NO: 4382955 - DNA, 25 bp, Homo sapien
gctatttctaccactagaatagagc

SEQ ID NO: 4382956 - DNA, 25 bp, Homo sapien
gaacccaagccagtttcatgttaca

SEQ ID NO: 4382957 - DNA, 25 bp, Homo sapien
tctgatgagcatatacttacggtaa

SEQ ID NO: 4382958 - DNA, 25 bp, Homo sapien
gtgacactttgacttactctctagg

SEQ ID NO: 4382959 - DNA, 25 bp, Homo sapien
taatgtaacagttaacctcttcttc

SEQ ID NO: 4382960 - DNA, 25 bp, Homo sapien
ctttgactctcttgctaaatggtca

SEQ ID NO: 4382961 - DNA, 25 bp, Homo sapien
ctcttgctaaatggtcactaatgta

SEQ ID NO: 4382962 - DNA, 25 bp, Homo sapien
ggtcactaatgtaacagttaacctc

SEQ ID NO: 4382963 - DNA, 25 bp, Homo sapien
tggccccggaaaatttacagctatc

SEQ ID NO: 4382964 - DNA, 25 bp, Homo sapien
ttatttaggtaacaggcagtatgcc

SEQ ID NO: 4382965 - DNA, 25 bp, Homo sapien
gaagtgctaccaggcagatttcaga

SEQ ID NO: 4382966 - DNA, 25 bp, Homo sapien
tgtaatggatcatgcactgaaggct

SEQ ID NO: 4382967 - DNA, 25 bp, Homo sapien
ccaaatcctaatgtagttactctca

SEQ ID NO: 4382968 - DNA, 25 bp, Homo sapien
tgggagcaaggtcaccctgaacatt

SEQ ID NO: 4382969 - DNA, 25 bp, Homo sapien
tagtaaatccaaatcctaatgtagt

SEQ ID NO: 4382970 - DNA, 25 bp, Homo sapien
ggccaggctctttataaaccttgaa

SEQ ID NO: 4382971 - DNA, 25 bp, Homo sapien
tctggaccagtttctaatagccact

SEQ ID NO: 4382972 - DNA, 25 bp, Homo sapien
ctaatagccacttgttttgctccat

SEQ ID NO: 4382973 - DNA, 25 bp, Homo sapien
taagcatgacctctggaccagtttc

SEQ ID NO: 4382974 - DNA, 25 bp, Homo sapien
tctgctgtttaagcatgacctctgg

SEQ ID NO: 4382975 - DNA, 25 bp, Homo sapien
acctggtagagaacacttggattca

SEQ ID NO: 4382976 - DNA, 25 bp, Homo sapien
tacctggtagagaacacttggattc

SEQ ID NO: 4382977 - DNA, 25 bp, Homo sapien
tgtctctgctgagaatcacgtgctt

SEQ ID NO: 4382978 - DNA, 25 bp, Homo sapien
tgagaatcacgtgcttcctgatact

SEQ ID NO: 4382979 - DNA, 25 bp, Homo sapien
gctgagaatcacgtgcttcctgata

SEQ ID NO: 4382980 - DNA, 25 bp, Homo sapien
tctgctgagaatcacgtgcttcctg

SEQ ID NO: 4382981 - DNA, 25 bp, Homo sapien
gaaattaatccctggtacagcagag

SEQ ID NO: 4382982 - DNA, 25 bp, Homo sapien
gctcgtatgggagagtcatccagca

SEQ ID NO: 4382983 - DNA, 25 bp, Homo sapien
cacagaagttctttacacgagtgaa

SEQ ID NO: 4382984 - DNA, 25 bp, Homo sapien
cctggatctgccatgtaatgaagac

SEQ ID NO: 4382985 - DNA, 25 bp, Homo sapien
gatctgctgtgcaacagtcaggcat

SEQ ID NO: 4382986 - DNA, 25 bp, Homo sapien
ttcaagatctgctgtgcaacagtca

SEQ ID NO: 4382987 - DNA, 25 bp, Homo sapien
caagatctgctgtgcaacagtcagg

SEQ ID NO: 4382988 - DNA, 25 bp, Homo sapien
ccttcaagatctgctgtgcaacagt

SEQ ID NO: 4382989 - DNA, 25 bp, Homo sapien
tactgaagaggctaaagataaaccc

SEQ ID NO: 4382990 - DNA, 25 bp, Homo sapien
taacacggaagccacaagcatacag

SEQ ID NO: 4382991 - DNA, 25 bp, Homo sapien
ggtcagctgtaaactcttggcccta

SEQ ID NO: 4382992 - DNA, 25 bp, Homo sapien
gacaggtgcccaatcttgagctcat

SEQ ID NO: 4382993 - DNA, 25 bp, Homo sapien
cagcgaagggagataagggtaaggc

SEQ ID NO: 4382994 - DNA, 25 bp, Homo sapien
tcagcgaagggagataagggtaagg

SEQ ID NO: 4382995 - DNA, 25 bp, Homo sapien
gagtcagcgaagggagataagggta

SEQ ID NO: 4382996 - DNA, 25 bp, Homo sapien
agtcagcgaagggagataagggtaa

SEQ ID NO: 4382997 - DNA, 25 bp, Homo sapien
cgctaagccaagaaggagtcagtca

SEQ ID NO: 4382998 - DNA, 25 bp, Homo sapien
ttcagccgctaagccaagaaggagt

SEQ ID NO: 4382999 - DNA, 25 bp, Homo sapien
gcttccgaggcgatcaggcagcatc

SEQ ID NO: 4383000 - DNA, 25 bp, Homo sapien
ttacctaaagctcggcatccgtgat

SEQ ID NO: 4383001 - DNA, 25 bp, Homo sapien
tcccctaaaggtgaagcccattctg

SEQ ID NO: 4383002 - DNA, 25 bp, Homo sapien
taagtgcttgggactagacgatcat

SEQ ID NO: 4383003 - DNA, 25 bp, Homo sapien
cagccaatcctgatcaaagcaagaa

SEQ ID NO: 4383004 - DNA, 25 bp, Homo sapien
cagttggtttgatgatatgcccgct

SEQ ID NO: 4383005 - DNA, 25 bp, Homo sapien
tatcgactgaatatttgggcaaggg

SEQ ID NO: 4383006 - DNA, 25 bp, Homo sapien
tcaggctgtggctaacttcgttcaa

SEQ ID NO: 4383007 - DNA, 25 bp, Homo sapien
tttttcgtctcgtgctaaaggcatg

SEQ ID NO: 4383008 - DNA, 25 bp, Homo sapien
tgatttcaatctggtgccccactca

SEQ ID NO: 4383009 - DNA, 25 bp, Homo sapien
taggtctggacagtatcttatgtct

SEQ ID NO: 4383010 - DNA, 25 bp, Homo sapien
gaagtgcgtaggtctaactatagca

SEQ ID NO: 4383011 - DNA, 25 bp, Homo sapien
cccagtcccttgtacaaagtaggtg

SEQ ID NO: 4383012 - DNA, 25 bp, Homo sapien
aactatagcatactggagcctcttt

SEQ ID NO: 4383013 - DNA, 25 bp, Homo sapien
cttcatatgacagaggaagagacat

SEQ ID NO: 4383014 - DNA, 25 bp, Homo sapien
cactgtaatcacgtgcaggaaaaaa

SEQ ID NO: 4383015 - DNA, 25 bp, Homo sapien
agctgaatgagggatctagcatctc

SEQ ID NO: 4383016 - DNA, 25 bp, Homo sapien
gaagagggttggttcgacaggcagc

SEQ ID NO: 4383017 - DNA, 25 bp, Homo sapien
ctcattgggtgcagtgatccaatcc

SEQ ID NO: 4383018 - DNA, 25 bp, Homo sapien
gcactgtattaaaaatactcttagt

SEQ ID NO: 4383019 - DNA, 25 bp, Homo sapien
tcagcactgtattaaaaatactctt

SEQ ID NO: 4383020 - DNA, 25 bp, Homo sapien
ctgaggatgatctacaaagccagtt

SEQ ID NO: 4383021 - DNA, 25 bp, Homo sapien
caaagccagttcagctggctcttca

SEQ ID NO: 4383022 - DNA, 25 bp, Homo sapien
tactcgaataggattcaactttggc

SEQ ID NO: 4383023 - DNA, 25 bp, Homo sapien
tactctgttccagtgatatggcggc

SEQ ID NO: 4383024 - DNA, 25 bp, Homo sapien
tagtgttagttaggaactgggcctc

SEQ ID NO: 4383025 - DNA, 25 bp, Homo sapien
tacagcattatagcaatggagccga

SEQ ID NO: 4383026 - DNA, 25 bp, Homo sapien
agaagaacttggtaatttgttccat

SEQ ID NO: 4383027 - DNA, 25 bp, Homo sapien
gcatcatattcagtccgaggcctct

SEQ ID NO: 4383028 - DNA, 25 bp, Homo sapien
tcaaagtaaagtgactggagattcc

SEQ ID NO: 4383029 - DNA, 25 bp, Homo sapien
caaagtaaagtgactggagattccc

SEQ ID NO: 4383030 - DNA, 25 bp, Homo sapien
atcatattcagtccgaggcctcttc

SEQ ID NO: 4383031 - DNA, 25 bp, Homo sapien
agtagttgttctctgtttctgctgt

SEQ ID NO: 4383032 - DNA, 25 bp, Homo sapien
gtagttgttctctgtttctgctgtc

SEQ ID NO: 4383033 - DNA, 25 bp, Homo sapien
gttgttctctgtttctgctgtcatt

SEQ ID NO: 4383034 - DNA, 25 bp, Homo sapien
gttctctgtttctgctgtcattaag

SEQ ID NO: 4383035 - DNA, 25 bp, Homo sapien
tgcctgtctgtgcatgaagaagaaa

SEQ ID NO: 4383036 - DNA, 25 bp, Homo sapien
gcctgtctgtgcatgaagaagaaaa

SEQ ID NO: 4383037 - DNA, 25 bp, Homo sapien
aattggtgcctgtctgtgcatgaag

SEQ ID NO: 4383038 - DNA, 25 bp, Homo sapien
tcaaattggtgcctgtctgtgcatg

SEQ ID NO: 4383039 - DNA, 25 bp, Homo sapien
cttggtctttgcgactcctaagcat

SEQ ID NO: 4383040 - DNA, 25 bp, Homo sapien
tttgcgactcctaagcatttttcct

SEQ ID NO: 4383041 - DNA, 25 bp, Homo sapien
tgttatttgctcttcagtcattggt

SEQ ID NO: 4383042 - DNA, 25 bp, Homo sapien
ttatttgctcttcagtcattggttc

SEQ ID NO: 4383043 - DNA, 25 bp, Homo sapien
tgtcacagaccagagtaggctaagg

SEQ ID NO: 4383044 - DNA, 25 bp, Homo sapien
tacccttgaggaaaagatcagccaa

SEQ ID NO: 4383045 - DNA, 25 bp, Homo sapien
tgtaggccaggcatagcagttcgca

SEQ ID NO: 4383046 - DNA, 25 bp, Homo sapien
aaactcaacagctatgatgcccggg

SEQ ID NO: 4383047 - DNA, 25 bp, Homo sapien
atccaaaccaagaggaaatccctga

SEQ ID NO: 4383048 - DNA, 25 bp, Homo sapien
tccaaaccaagaggaaatccctgat

SEQ ID NO: 4383049 - DNA, 25 bp, Homo sapien
gatccaaaccaagaggaaatccctg

SEQ ID NO: 4383050 - DNA, 25 bp, Homo sapien
caaaccaagaggaaatccctgattt

SEQ ID NO: 4383051 - DNA, 25 bp, Homo sapien
gaagaattacacggggaatccatgt

SEQ ID NO: 4383052 - DNA, 25 bp, Homo sapien
tgttgaaacattgcagcccaatgtt

SEQ ID NO: 4383053 - DNA, 25 bp, Homo sapien
ccaagagatgtagcatcaaatatcg

SEQ ID NO: 4383054 - DNA, 25 bp, Homo sapien
tagcatcaaatatcgggttttaaca

SEQ ID NO: 4383055 - DNA, 25 bp, Homo sapien
gcatagaaatccaaggaaatctgga

SEQ ID NO: 4383056 - DNA, 25 bp, Homo sapien
agaaatccaaggaaatctggagtgt

SEQ ID NO: 4383057 - DNA, 25 bp, Homo sapien
cagcatagaaatccaaggaaatctg

SEQ ID NO: 4383058 - DNA, 25 bp, Homo sapien
tagaaatccaaggaaatctggagtg

SEQ ID NO: 4383059 - DNA, 25 bp, Homo sapien
tgttcagcataaggtgctcgtatgt

SEQ ID NO: 4383060 - DNA, 25 bp, Homo sapien
cgtatgttctcttggacctggctgg

SEQ ID NO: 4383061 - DNA, 25 bp, Homo sapien
ctatgtgaggcttcgcagatggcaa

SEQ ID NO: 4383062 - DNA, 25 bp, Homo sapien
gttctctaagtgtgtgttcagcata

SEQ ID NO: 4383063 - DNA, 25 bp, Homo sapien
gactactgggtctactgccaacagg

SEQ ID NO: 4383064 - DNA, 25 bp, Homo sapien
tatggccgactagtgaatgctaaga

SEQ ID NO: 4383065 - DNA, 25 bp, Homo sapien
tgaaagttgaaggacacaggtagga

SEQ ID NO: 4383066 - DNA, 25 bp, Homo sapien
ctttctctgcgggtacagaccagtg

SEQ ID NO: 4383067 - DNA, 25 bp, Homo sapien
actgcagactcccatctagctctga

SEQ ID NO: 4383068 - DNA, 25 bp, Homo sapien
gactcccatctagctctgacacagt

SEQ ID NO: 4383069 - DNA, 25 bp, Homo sapien
tgcagactcccatctagctctgaca

SEQ ID NO: 4383070 - DNA, 25 bp, Homo sapien
gaacaactgcagactcccatctagc

SEQ ID NO: 4383071 - DNA, 25 bp, Homo sapien
cagggatttgatatccatgatagca

SEQ ID NO: 4383072 - DNA, 25 bp, Homo sapien
ggtagccagctgcaagatatctgtc

SEQ ID NO: 4383073 - DNA, 25 bp, Homo sapien
tgtgcaggttctatcacgccaggga

SEQ ID NO: 4383074 - DNA, 25 bp, Homo sapien
ccttgagtagttggtatgcagatct

SEQ ID NO: 4383075 - DNA, 25 bp, Homo sapien
attcccaagatggagctaggtgctc

SEQ ID NO: 4383076 - DNA, 25 bp, Homo sapien
ggtcactggcaatgggaaaattccc

SEQ ID NO: 4383077 - DNA, 25 bp, Homo sapien
tcatgtaagagacagttccaggtca

SEQ ID NO: 4383078 - DNA, 25 bp, Homo sapien
aagatggagctaggtgctccgctca

SEQ ID NO: 4383079 - DNA, 25 bp, Homo sapien
aggtagtagatgattccagagagac

SEQ ID NO: 4383080 - DNA, 25 bp, Homo sapien
agactttccgtggaacagcaggcag

SEQ ID NO: 4383081 - DNA, 25 bp, Homo sapien
atgaggtagtagatgattccagaga

SEQ ID NO: 4383082 - DNA, 25 bp, Homo sapien
tccagagagactttccgtggaacag

SEQ ID NO: 4383083 - DNA, 25 bp, Homo sapien
caatcatctttatttggttgctctg

SEQ ID NO: 4383084 - DNA, 25 bp, Homo sapien
cattcactcaatcatctttatttgg

SEQ ID NO: 4383085 - DNA, 25 bp, Homo sapien
tcatctttatttggttgctctgtga

SEQ ID NO: 4383086 - DNA, 25 bp, Homo sapien
tctttagccattcactcaatcatct

SEQ ID NO: 4383087 - DNA, 25 bp, Homo sapien
gacaactgcttcacaaagtaagcca

SEQ ID NO: 4383088 - DNA, 25 bp, Homo sapien
ggacacattgatgactgagttgcct

SEQ ID NO: 4383089 - DNA, 25 bp, Homo sapien
tggttatgttcagatgccctgaagg

SEQ ID NO: 4383090 - DNA, 25 bp, Homo sapien
gggatatgctcttctcgaggacaca

SEQ ID NO: 4383091 - DNA, 25 bp, Homo sapien
ccaggtggtgacgatctgagcctca

SEQ ID NO: 4383092 - DNA, 25 bp, Homo sapien
gatggcattatctgtcacatgttct

SEQ ID NO: 4383093 - DNA, 25 bp, Homo sapien
ggctactcactctatgctacagagg

SEQ ID NO: 4383094 - DNA, 25 bp, Homo sapien
cactgtctctattctccaggtggtg

SEQ ID NO: 4383095 - DNA, 25 bp, Homo sapien
taacttcagctaaggactgattgaa

SEQ ID NO: 4383096 - DNA, 25 bp, Homo sapien
aatgagtgggattttaacttcagct

SEQ ID NO: 4383097 - DNA, 25 bp, Homo sapien
ctggatcatgcagaatgagtgggat

SEQ ID NO: 4383098 - DNA, 25 bp, Homo sapien
gctaaggactgattgaaagatgaca

SEQ ID NO: 4383099 - DNA, 25 bp, Homo sapien
cataatggcatttgtgctttgtaag

SEQ ID NO: 4383100 - DNA, 25 bp, Homo sapien
gggccctcataatggcatttgtgct

SEQ ID NO: 4383101 - DNA, 25 bp, Homo sapien
ggccctcataatggcatttgtgctt

SEQ ID NO: 4383102 - DNA, 25 bp, Homo sapien
cctcataatggcatttgtgctttgt

SEQ ID NO: 4383103 - DNA, 25 bp, Homo sapien
atatgaggacacagttaagtgaaaa

SEQ ID NO: 4383104 - DNA, 25 bp, Homo sapien
ttgattttccttggatgtacatttc

SEQ ID NO: 4383105 - DNA, 25 bp, Homo sapien
ttagagagtcgaagggagaaggaga

SEQ ID NO: 4383106 - DNA, 25 bp, Homo sapien
gtgtgtggatttgccagacctcttg

SEQ ID NO: 4383107 - DNA, 25 bp, Homo sapien
gatttgccagacctcttgattgttc

SEQ ID NO: 4383108 - DNA, 25 bp, Homo sapien
tagtgtgtggatttgccagacctct

SEQ ID NO: 4383109 - DNA, 25 bp, Homo sapien
ccatctaagtttgtgctggaacttc

SEQ ID NO: 4383110 - DNA, 25 bp, Homo sapien
tgtgctggaacttcatattctagat

SEQ ID NO: 4383111 - DNA, 25 bp, Homo sapien
agctgctgttcaaaccttcacatag

SEQ ID NO: 4383112 - DNA, 25 bp, Homo sapien
tgcctcatttcacatctgcttgaca

SEQ ID NO: 4383113 - DNA, 25 bp, Homo sapien
agatatttatctgttccatacgtac

SEQ ID NO: 4383114 - DNA, 25 bp, Homo sapien
cgaacggtataccttgaattggtat

SEQ ID NO: 4383115 - DNA, 25 bp, Homo sapien
catacgtactctctccatctgaaat

SEQ ID NO: 4383116 - DNA, 25 bp, Homo sapien
taccttgaattggtatgaaagttcc

SEQ ID NO: 4383117 - DNA, 25 bp, Homo sapien
cggaattcacttgatgggtctggca

SEQ ID NO: 4383118 - DNA, 25 bp, Homo sapien
caaataggttcatgtatagggcaca

SEQ ID NO: 4383119 - DNA, 25 bp, Homo sapien
gaagctcagttaggccatggaacca

SEQ ID NO: 4383120 - DNA, 25 bp, Homo sapien
tcatgacatacaggtttcttcccag

SEQ ID NO: 4383121 - DNA, 25 bp, Homo sapien
taaataggcatcgtgtgatcaggct

SEQ ID NO: 4383122 - DNA, 25 bp, Homo sapien
gagaactgaaatagccatcagctgt

SEQ ID NO: 4383123 - DNA, 25 bp, Homo sapien
gatcaggctgatgtatgtaagcagc

SEQ ID NO: 4383124 - DNA, 25 bp, Homo sapien
tgtaagcagccaacttgtcaaagaa

SEQ ID NO: 4383125 - DNA, 25 bp, Homo sapien
gagggcactatactgcatgtatgac

SEQ ID NO: 4383126 - DNA, 25 bp, Homo sapien
agccacaccgttgtgcagtgttccg

SEQ ID NO: 4383127 - DNA, 25 bp, Homo sapien
cagtgttccgtgatgactgcagatt

SEQ ID NO: 4383128 - DNA, 25 bp, Homo sapien
tacaaacaactgagctccaaagagt

SEQ ID NO: 4383129 - DNA, 25 bp, Homo sapien
tccagagcccttttgtattctataa

SEQ ID NO: 4383130 - DNA, 25 bp, Homo sapien
aagaactgtccagagcccttttgta

SEQ ID NO: 4383131 - DNA, 25 bp, Homo sapien
tgtattctataataggagtctgcat

SEQ ID NO: 4383132 - DNA, 25 bp, Homo sapien
ccttttgtattctataataggagtc

SEQ ID NO: 4383133 - DNA, 25 bp, Homo sapien
gaaggagggccaacaggaggcaact

SEQ ID NO: 4383134 - DNA, 25 bp, Homo sapien
agagcacagggtgaaggagggccaa

SEQ ID NO: 4383135 - DNA, 25 bp, Homo sapien
atgacaggcagacttagagagcaca

SEQ ID NO: 4383136 - DNA, 25 bp, Homo sapien
aggatgacaggcagacttagagagc

SEQ ID NO: 4383137 - DNA, 25 bp, Homo sapien
gttgccaagttggacagctatcccc

SEQ ID NO: 4383138 - DNA, 25 bp, Homo sapien
tcaatgttgccaagttggacagcta

SEQ ID NO: 4383139 - DNA, 25 bp, Homo sapien
aatgttgccaagttggacagctatc

SEQ ID NO: 4383140 - DNA, 25 bp, Homo sapien
cccgtcaatgttgccaagttggaca

SEQ ID NO: 4383141 - DNA, 25 bp, Homo sapien
ctggatctctgtgatatttgttttc

SEQ ID NO: 4383142 - DNA, 25 bp, Homo sapien
ctctggatctctgtgatatttgttt

SEQ ID NO: 4383143 - DNA, 25 bp, Homo sapien
gatctctgtgatatttgttttccac

SEQ ID NO: 4383144 - DNA, 25 bp, Homo sapien
ctactctggatctctgtgatatttg

SEQ ID NO: 4383145 - DNA, 25 bp, Homo sapien
ggctacatttgtacgtgcatatgtt

SEQ ID NO: 4383146 - DNA, 25 bp, Homo sapien
gtgctggctacatttgtacgtgcat

SEQ ID NO: 4383147 - DNA, 25 bp, Homo sapien
gcatggcgtacctgtcttcttgtgc

SEQ ID NO: 4383148 - DNA, 25 bp, Homo sapien
cttggttctgagcatggcgtacctg

SEQ ID NO: 4383149 - DNA, 25 bp, Homo sapien
tgcttggtcaagtcctagctttcct

SEQ ID NO: 4383150 - DNA, 25 bp, Homo sapien
cagtccacagaagcctcaccatttt

SEQ ID NO: 4383151 - DNA, 25 bp, Homo sapien
tctgaactattgtagcactcatggg

SEQ ID NO: 4383152 - DNA, 25 bp, Homo sapien
gaactattgtagcactcatgggtca

SEQ ID NO: 4383153 - DNA, 25 bp, Homo sapien
tggtaaaactaagactcggatgcgg

SEQ ID NO: 4383154 - DNA, 25 bp, Homo sapien
tgttcataaagagcccgttacacgg

SEQ ID NO: 4383155 - DNA, 25 bp, Homo sapien
tggaaattcccgtgccacatggcct

SEQ ID NO: 4383156 - DNA, 25 bp, Homo sapien
tgggaaaacccattgccgggctcaa

SEQ ID NO: 4383157 - DNA, 25 bp, Homo sapien
gaaattgggatttagtcctgcctct

SEQ ID NO: 4383158 - DNA, 25 bp, Homo sapien
cacagtaacaagtagccatggtggg

SEQ ID NO: 4383159 - DNA, 25 bp, Homo sapien
gctcttgagacaatagctccctgtg

SEQ ID NO: 4383160 - DNA, 25 bp, Homo sapien
tagaatagttcttgtgacgggagcc

SEQ ID NO: 4383161 - DNA, 25 bp, Homo sapien
ccagattcatgtgtatttggagcct

SEQ ID NO: 4383162 - DNA, 25 bp, Homo sapien
gagatctggcaaattaggtagagaa

SEQ ID NO: 4383163 - DNA, 25 bp, Homo sapien
tccagagagaaaaacggtctctgcc

SEQ ID NO: 4383164 - DNA, 25 bp, Homo sapien
tttggagccttgtcagggagatctg

SEQ ID NO: 4383165 - DNA, 25 bp, Homo sapien
tgttctccctgaagctaccatagcg

SEQ ID NO: 4383166 - DNA, 25 bp, Homo sapien
gaactgatgccaaattcactttctg

SEQ ID NO: 4383167 - DNA, 25 bp, Homo sapien
gctaccatagcgaactgatgccaaa

SEQ ID NO: 4383168 - DNA, 25 bp, Homo sapien
ccctgcaatgattatcaatgttctc

SEQ ID NO: 4383169 - DNA, 25 bp, Homo sapien
tcagcggttggtccgaatggtatca

SEQ ID NO: 4383170 - DNA, 25 bp, Homo sapien
gaaatgtgaagatcagcggttggtc

SEQ ID NO: 4383171 - DNA, 25 bp, Homo sapien
gacaagttcaaactgccaaactctc

SEQ ID NO: 4383172 - DNA, 25 bp, Homo sapien
gccaaactctccaatgactgaaatg

SEQ ID NO: 4383173 - DNA, 25 bp, Homo sapien
aactgtatcttcttcccggctgttg

SEQ ID NO: 4383174 - DNA, 25 bp, Homo sapien
tgcctcttcctcgatctgtttcttg

SEQ ID NO: 4383175 - DNA, 25 bp, Homo sapien
ctgtatcttcttcccggctgttgtt

SEQ ID NO: 4383176 - DNA, 25 bp, Homo sapien
ttcccggctgttgttactctgcctc

SEQ ID NO: 4383177 - DNA, 25 bp, Homo sapien
tccccttccccaagtagtgactaca

SEQ ID NO: 4383178 - DNA, 25 bp, Homo sapien
cttccccaagtagtgactacatgga

SEQ ID NO: 4383179 - DNA, 25 bp, Homo sapien
catcatatcaaggaaaggggcgctg

SEQ ID NO: 4383180 - DNA, 25 bp, Homo sapien
tcttgaattgctgataccacccatt

SEQ ID NO: 4383181 - DNA, 25 bp, Homo sapien
caatgtgggcaggacttagttggaa

SEQ ID NO: 4383182 - DNA, 25 bp, Homo sapien
cggtcagcaatgtgggcaggactta

SEQ ID NO: 4383183 - DNA, 25 bp, Homo sapien
ggacttagttggaatggctcacctc

SEQ ID NO: 4383184 - DNA, 25 bp, Homo sapien
tcttacggtcagcaatgtgggcagg

SEQ ID NO: 4383185 - DNA, 25 bp, Homo sapien
atgtaacacatgcgtggttggctgc

SEQ ID NO: 4383186 - DNA, 25 bp, Homo sapien
aatgtaacacatgcgtggttggctg

SEQ ID NO: 4383187 - DNA, 25 bp, Homo sapien
tgtaacacatgcgtggttggctgct

SEQ ID NO: 4383188 - DNA, 25 bp, Homo sapien
aaatgtaacacatgcgtggttggct

SEQ ID NO: 4383189 - DNA, 25 bp, Homo sapien
atgaggatataccaatcacactcac

SEQ ID NO: 4383190 - DNA, 25 bp, Homo sapien
cctctaaagcagtgagtgtcaccac

SEQ ID NO: 4383191 - DNA, 25 bp, Homo sapien
aatgctctcccaccgatctgcagga

SEQ ID NO: 4383192 - DNA, 25 bp, Homo sapien
acattgactgtcaatgccatgtagc

SEQ ID NO: 4383193 - DNA, 25 bp, Homo sapien
ccccaggcatagaaaaccaccaata

SEQ ID NO: 4383194 - DNA, 25 bp, Homo sapien
ccaatacaacactgccttcctgatg

SEQ ID NO: 4383195 - DNA, 25 bp, Homo sapien
tgaaatcaacagcaaggcttcccca

SEQ ID NO: 4383196 - DNA, 25 bp, Homo sapien
gccatccagaacatagagcttggga

SEQ ID NO: 4383197 - DNA, 25 bp, Homo sapien
gccacgctcacttgcaccgtattta

SEQ ID NO: 4383198 - DNA, 25 bp, Homo sapien
gtatatccttgaccgctgccactgt

SEQ ID NO: 4383199 - DNA, 25 bp, Homo sapien
ctctccatactgcagatgttgcttg

SEQ ID NO: 4383200 - DNA, 25 bp, Homo sapien
gctctgctctattatttggagctta

SEQ ID NO: 4383201 - DNA, 25 bp, Homo sapien
agggtcttaaaggtggtagtctgct

SEQ ID NO: 4383202 - DNA, 25 bp, Homo sapien
ggtagtctgctttgaacttgaagct

SEQ ID NO: 4383203 - DNA, 25 bp, Homo sapien
ttcagtatgtttagataagagggtc

SEQ ID NO: 4383204 - DNA, 25 bp, Homo sapien
tatgtatctacccaaagactgaaca

SEQ ID NO: 4383205 - DNA, 25 bp, Homo sapien
tatcaggatgcgtgtcgagagctct

SEQ ID NO: 4383206 - DNA, 25 bp, Homo sapien
tcaggatgcgtgtcgagagctcttc

SEQ ID NO: 4383207 - DNA, 25 bp, Homo sapien
gatgcgtgtcgagagctcttccttc

SEQ ID NO: 4383208 - DNA, 25 bp, Homo sapien
ttattatcaggatgcgtgtcgagag

SEQ ID NO: 4383209 - DNA, 25 bp, Homo sapien
tccctaatggccgtagactggtgta

SEQ ID NO: 4383210 - DNA, 25 bp, Homo sapien
attgcacatctttaagggaggtgac

SEQ ID NO: 4383211 - DNA, 25 bp, Homo sapien
tgaggtgtcatcttcttggattgca

SEQ ID NO: 4383212 - DNA, 25 bp, Homo sapien
tgggaattctcttgccctaggtaat

SEQ ID NO: 4383213 - DNA, 25 bp, Homo sapien
ttggaggggtctggaagcagacact

SEQ ID NO: 4383214 - DNA, 25 bp, Homo sapien
gcaaccaaatcagtgttcaggtatc

SEQ ID NO: 4383215 - DNA, 25 bp, Homo sapien
aaccaaatcagtgttcaggtatcca

SEQ ID NO: 4383216 - DNA, 25 bp, Homo sapien
acagcaaccaaatcagtgttcaggt

SEQ ID NO: 4383217 - DNA, 25 bp, Homo sapien
tgcagaggagattttaacaacgatt

SEQ ID NO: 4383218 - DNA, 25 bp, Homo sapien
gctgaccagcaagaacttgcagagg

SEQ ID NO: 4383219 - DNA, 25 bp, Homo sapien
tcgagtcgaggagttaatgcaggat

SEQ ID NO: 4383220 - DNA, 25 bp, Homo sapien
taacaacgatttcaagacctgcagg

SEQ ID NO: 4383221 - DNA, 25 bp, Homo sapien
tttcatttacagtaggtgttttgca

SEQ ID NO: 4383222 - DNA, 25 bp, Homo sapien
acttgagcagaaagttccacctggc

SEQ ID NO: 4383223 - DNA, 25 bp, Homo sapien
aatttgtagtaaggagagtcgcacg

SEQ ID NO: 4383224 - DNA, 25 bp, Homo sapien
cccgacagccacaggacagaagata

SEQ ID NO: 4383225 - DNA, 25 bp, Homo sapien
catatttcaatttgccttgcgtttg

SEQ ID NO: 4383226 - DNA, 25 bp, Homo sapien
catcagatgttgatacgctgggtgg

SEQ ID NO: 4383227 - DNA, 25 bp, Homo sapien
cattttgtgtaagatttgcagtttc

SEQ ID NO: 4383228 - DNA, 25 bp, Homo sapien
gcgtttgcattgaaacatcagatgt

SEQ ID NO: 4383229 - DNA, 25 bp, Homo sapien
cgatacaagtgcctcccaaggaagt

SEQ ID NO: 4383230 - DNA, 25 bp, Homo sapien
ccaaggaagtgatcgcctccaacag

SEQ ID NO: 4383231 - DNA, 25 bp, Homo sapien
cagggccataatcagctgaagtagc

SEQ ID NO: 4383232 - DNA, 25 bp, Homo sapien
gattcactgtggcaagtatccaggg

SEQ ID NO: 4383233 - DNA, 25 bp, Homo sapien
taaatgggttgtcagcgtcagctgc

SEQ ID NO: 4383234 - DNA, 25 bp, Homo sapien
ggttgtcagcgtcagctgcatattc

SEQ ID NO: 4383235 - DNA, 25 bp, Homo sapien
ccctctaaatgggttgtcagcgtca

SEQ ID NO: 4383236 - DNA, 25 bp, Homo sapien
tcaccctctaaatgggttgtcagcg

SEQ ID NO: 4383237 - DNA, 25 bp, Homo sapien
catttgtcataggattgctaagagg

SEQ ID NO: 4383238 - DNA, 25 bp, Homo sapien
gtaagtttcatttgtcataggattg

SEQ ID NO: 4383239 - DNA, 25 bp, Homo sapien
ataggattgctaagaggaatattat

SEQ ID NO: 4383240 - DNA, 25 bp, Homo sapien
gtttcatttgtcataggattgctaa

SEQ ID NO: 4383241 - DNA, 25 bp, Homo sapien
tctctgatcttggaacccacaacct

SEQ ID NO: 4383242 - DNA, 25 bp, Homo sapien
gccgttgccagcagacctaatgtct

SEQ ID NO: 4383243 - DNA, 25 bp, Homo sapien
agtggtgtcgcctggaagcaggaaa

SEQ ID NO: 4383244 - DNA, 25 bp, Homo sapien
agcaggaaacagtcttctctgatct

SEQ ID NO: 4383245 - DNA, 25 bp, Homo sapien
agagagtctgagaaacagaaattgc

SEQ ID NO: 4383246 - DNA, 25 bp, Homo sapien
caggaatacagataacaagagagtc

SEQ ID NO: 4383247 - DNA, 25 bp, Homo sapien
ctgagaaacagaaattgcaagctcc

SEQ ID NO: 4383248 - DNA, 25 bp, Homo sapien
ggaatacagataacaagagagtctg

SEQ ID NO: 4383249 - DNA, 25 bp, Homo sapien
aactggggcaaaggtcacacgttat

SEQ ID NO: 4383250 - DNA, 25 bp, Homo sapien
ctgtgcccccgctctaaggatctgt

SEQ ID NO: 4383251 - DNA, 25 bp, Homo sapien
cccgctctaaggatctgtggaagtt

SEQ ID NO: 4383252 - DNA, 25 bp, Homo sapien
cacacgttattccttagcaaagaac

SEQ ID NO: 4383253 - DNA, 25 bp, Homo sapien
attgagcgtgaggcaaatgaagagg

SEQ ID NO: 4383254 - DNA, 25 bp, Homo sapien
tgattgagcgtgaggcaaatgaaga

SEQ ID NO: 4383255 - DNA, 25 bp, Homo sapien
gattgagcgtgaggcaaatgaagag

SEQ ID NO: 4383256 - DNA, 25 bp, Homo sapien
ttgattgagcgtgaggcaaatgaag

SEQ ID NO: 4383257 - DNA, 25 bp, Homo sapien
taccttgttagtgccagaaagtggc

SEQ ID NO: 4383258 - DNA, 25 bp, Homo sapien
gctaatttagcaaacagaccaggaa

SEQ ID NO: 4383259 - DNA, 25 bp, Homo sapien
ccagtggcagacacacttcttagaa

SEQ ID NO: 4383260 - DNA, 25 bp, Homo sapien
tgttttctgctaacccataacccag

SEQ ID NO: 4383261 - DNA, 25 bp, Homo sapien
ggatcatacaaacccaacaaccaag

SEQ ID NO: 4383262 - DNA, 25 bp, Homo sapien
gattccaccccattggtcttagttc

SEQ ID NO: 4383263 - DNA, 25 bp, Homo sapien
aaattgtctgcccaatggatcatac

SEQ ID NO: 4383264 - DNA, 25 bp, Homo sapien
actgtgatatctttttcggtataga

SEQ ID NO: 4383265 - DNA, 25 bp, Homo sapien
caaagcactttggtacagcagagaa

SEQ ID NO: 4383266 - DNA, 25 bp, Homo sapien
cagttctagcaactgcagtggctta

SEQ ID NO: 4383267 - DNA, 25 bp, Homo sapien
ggattctaatccttaggagtccaac

SEQ ID NO: 4383268 - DNA, 25 bp, Homo sapien
tctgatctgctacggattatactag

SEQ ID NO: 4383269 - DNA, 25 bp, Homo sapien
tgttttgtgctcaaccgtgtggcta

SEQ ID NO: 4383270 - DNA, 25 bp, Homo sapien
taatcttcaacacatctacacattg

SEQ ID NO: 4383271 - DNA, 25 bp, Homo sapien
caatcccttagctgattagatgctc

SEQ ID NO: 4383272 - DNA, 25 bp, Homo sapien
gcttctgtgaaataacgtcttttaa

SEQ ID NO: 4383273 - DNA, 25 bp, Homo sapien
gcttaaagtatatatcttgggaaac

SEQ ID NO: 4383274 - DNA, 25 bp, Homo sapien
caatacgtttatgaaaaacagtggt

SEQ ID NO: 4383275 - DNA, 25 bp, Homo sapien
tgaatgtgttataggttatgaaggc

SEQ ID NO: 4383276 - DNA, 25 bp, Homo sapien
tattaatcagtaacaccagtatggg

SEQ ID NO: 4383277 - DNA, 25 bp, Homo sapien
tgtaattaacatggtccaggacagc

SEQ ID NO: 4383278 - DNA, 25 bp, Homo sapien
tcaacactgtcaacgtaaaggcaga

SEQ ID NO: 4383279 - DNA, 25 bp, Homo sapien
taatccagtgctataggtaggctca

SEQ ID NO: 4383280 - DNA, 25 bp, Homo sapien
tgtgatgtggaactaaaatacgtcg

SEQ ID NO: 4383281 - DNA, 25 bp, Homo sapien
tcatgcgagaataatcacaggttct

SEQ ID NO: 4383282 - DNA, 25 bp, Homo sapien
ccatccttatcatgcgagaataatc

SEQ ID NO: 4383283 - DNA, 25 bp, Homo sapien
tatcatgcgagaataatcacaggtt

SEQ ID NO: 4383284 - DNA, 25 bp, Homo sapien
tccttatcatgcgagaataatcaca

SEQ ID NO: 4383285 - DNA, 25 bp, Homo sapien
caatgatgttatctggtcaatggca

SEQ ID NO: 4383286 - DNA, 25 bp, Homo sapien
ttatgggatttcctacacggagaca

SEQ ID NO: 4383287 - DNA, 25 bp, Homo sapien
cagtcctctttaggcctctactcaa

SEQ ID NO: 4383288 - DNA, 25 bp, Homo sapien
cattctacataaacagatagctcct

SEQ ID NO: 4383289 - DNA, 25 bp, Homo sapien
cccaagacgtcaggataataaagct

SEQ ID NO: 4383290 - DNA, 25 bp, Homo sapien
acatttgtgtctattcctgggagca

SEQ ID NO: 4383291 - DNA, 25 bp, Homo sapien
tctattggagcagcatcgtggcaca

SEQ ID NO: 4383292 - DNA, 25 bp, Homo sapien
taagttctcagaaaaacacaggcgg

SEQ ID NO: 4383293 - DNA, 25 bp, Homo sapien
gaattcaagtgccagatactcagca

SEQ ID NO: 4383294 - DNA, 25 bp, Homo sapien
taaacaataacagaggtcaaccaca

SEQ ID NO: 4383295 - DNA, 25 bp, Homo sapien
tactcagcatattaggtttcctacg

SEQ ID NO: 4383296 - DNA, 25 bp, Homo sapien
tggacctccagcaataaaagcagga

SEQ ID NO: 4383297 - DNA, 25 bp, Homo sapien
atgtgatccaaaaccctaaaaagag

SEQ ID NO: 4383298 - DNA, 25 bp, Homo sapien
aaagagctggcacaaaaccatcgtg

SEQ ID NO: 4383299 - DNA, 25 bp, Homo sapien
catcgtgaatgactgcctctcttga

SEQ ID NO: 4383300 - DNA, 25 bp, Homo sapien
gcaaatgctaccctaccttagtaaa

SEQ ID NO: 4383301 - DNA, 25 bp, Homo sapien
tgctctgggagccataaaatgtacc

SEQ ID NO: 4383302 - DNA, 25 bp, Homo sapien
gaatgatggacacttcgagaagcta

SEQ ID NO: 4383303 - DNA, 25 bp, Homo sapien
tcttacagattgacatgaccaaagt

SEQ ID NO: 4383304 - DNA, 25 bp, Homo sapien
tctaagttgcatgagcacaaggttt

SEQ ID NO: 4383305 - DNA, 25 bp, Homo sapien
tggccatggttcaagtgggactata

SEQ ID NO: 4383306 - DNA, 25 bp, Homo sapien
ctggccatggttcaagtgggactat

SEQ ID NO: 4383307 - DNA, 25 bp, Homo sapien
ctacagctttggaagccatatttgc

SEQ ID NO: 4383308 - DNA, 25 bp, Homo sapien
gccatatttgcattgttgtaaagag

SEQ ID NO: 4383309 - DNA, 25 bp, Homo sapien
gcattgttgtaaagagttggctaac

SEQ ID NO: 4383310 - DNA, 25 bp, Homo sapien
ctttggaagccatatttgcattgtt

SEQ ID NO: 4383311 - DNA, 25 bp, Homo sapien
acaggaaccaactgcctctagttct

SEQ ID NO: 4383312 - DNA, 25 bp, Homo sapien
agtatcacacattcctcaacacagg

SEQ ID NO: 4383313 - DNA, 25 bp, Homo sapien
aatctttcagtatcacacattcctc

SEQ ID NO: 4383314 - DNA, 25 bp, Homo sapien
acattcctcaacacaggaaccaact

SEQ ID NO: 4383315 - DNA, 25 bp, Homo sapien
tcaaatattccacctgttcccctat

SEQ ID NO: 4383316 - DNA, 25 bp, Homo sapien
aatattccacctgttcccctatagc

SEQ ID NO: 4383317 - DNA, 25 bp, Homo sapien
cccctatagctgtgaactagagcac

SEQ ID NO: 4383318 - DNA, 25 bp, Homo sapien
tcccctatagctgtgaactagagca

SEQ ID NO: 4383319 - DNA, 25 bp, Homo sapien
tcttggctaaggtatctggtctctc

SEQ ID NO: 4383320 - DNA, 25 bp, Homo sapien
tatttctagcaatcagaggagggac

SEQ ID NO: 4383321 - DNA, 25 bp, Homo sapien
aatatatgcttcaggtgttcggccc

SEQ ID NO: 4383322 - DNA, 25 bp, Homo sapien
ttactgaccagttcctaagctaggg

SEQ ID NO: 4383323 - DNA, 25 bp, Homo sapien
aggattagctaagcccaggaaggcc

SEQ ID NO: 4383324 - DNA, 25 bp, Homo sapien
tagacccagctacacagaatgctga

SEQ ID NO: 4383325 - DNA, 25 bp, Homo sapien
ttcatatgatctgggcgtgatgcct

SEQ ID NO: 4383326 - DNA, 25 bp, Homo sapien
aaaggaaagatctagccgggcacag

SEQ ID NO: 4383327 - DNA, 25 bp, Homo sapien
tgtgaaatgaaccatggtggcggac

SEQ ID NO: 4383328 - DNA, 25 bp, Homo sapien
tgtgtgcactacaaccaacaaagat

SEQ ID NO: 4383329 - DNA, 25 bp, Homo sapien
ggtggcggacacctacacaaagaga

SEQ ID NO: 4383330 - DNA, 25 bp, Homo sapien
caacaaagatccgataactgagagg

SEQ ID NO: 4383331 - DNA, 25 bp, Homo sapien
cctaacagtagaatcaaaggatgca

SEQ ID NO: 4383332 - DNA, 25 bp, Homo sapien
aaagaaccacttgccagatacctgc

SEQ ID NO: 4383333 - DNA, 25 bp, Homo sapien
atatccctcggtctacatcccataa

SEQ ID NO: 4383334 - DNA, 25 bp, Homo sapien
ggtgttttgtcaaggtatggatgca

SEQ ID NO: 4383335 - DNA, 25 bp, Homo sapien
ggttggcatttggattattagtccc

SEQ ID NO: 4383336 - DNA, 25 bp, Homo sapien
cttgctaacataaggttggcatttg

SEQ ID NO: 4383337 - DNA, 25 bp, Homo sapien
ttgctaacataaggttggcatttgg

SEQ ID NO: 4383338 - DNA, 25 bp, Homo sapien
ggcatttggattattagtccctggt

SEQ ID NO: 4383339 - DNA, 25 bp, Homo sapien
gggcatcactcagtccagtgaggct

SEQ ID NO: 4383340 - DNA, 25 bp, Homo sapien
gtgttcccagttgagacaggcattt

SEQ ID NO: 4383341 - DNA, 25 bp, Homo sapien
ggcatttaacttagctgactgagaa

SEQ ID NO: 4383342 - DNA, 25 bp, Homo sapien
tccagcttgtagacagcagactgtg

SEQ ID NO: 4383343 - DNA, 25 bp, Homo sapien
gagattgccagttgggtcccatttg

SEQ ID NO: 4383344 - DNA, 25 bp, Homo sapien
agattgccagttgggtcccatttga

SEQ ID NO: 4383345 - DNA, 25 bp, Homo sapien
agttgggtcccatttgatagcattt

SEQ ID NO: 4383346 - DNA, 25 bp, Homo sapien
tgccagttgggtcccatttgatagc

SEQ ID NO: 4383347 - DNA, 25 bp, Homo sapien
gctctgccaatcaacatccaatgct

SEQ ID NO: 4383348 - DNA, 25 bp, Homo sapien
ttacagacatgaatgcacatatctg

SEQ ID NO: 4383349 - DNA, 25 bp, Homo sapien
gtctgtcttgtcctaatttacagac

SEQ ID NO: 4383350 - DNA, 25 bp, Homo sapien
tctgtactacaagaagcaaaggtgt

SEQ ID NO: 4383351 - DNA, 25 bp, Homo sapien
tatccgcatgatgtgtgaactctgc

SEQ ID NO: 4383352 - DNA, 25 bp, Homo sapien
agtgcttcactgctaagggctgcca

SEQ ID NO: 4383353 - DNA, 25 bp, Homo sapien
gtgtccaattcccagctgagtgctt

SEQ ID NO: 4383354 - DNA, 25 bp, Homo sapien
gatctaaagacctagcacccttggt

SEQ ID NO: 4383355 - DNA, 25 bp, Homo sapien
tatgttctctgcgtttttggataga

SEQ ID NO: 4383356 - DNA, 25 bp, Homo sapien
taaccagtgcacttttcatctcaca

SEQ ID NO: 4383357 - DNA, 25 bp, Homo sapien
taaatcatttcttcccgcagcatcg

SEQ ID NO: 4383358 - DNA, 25 bp, Homo sapien
gcatcgaatctgtggtttatcctaa

SEQ ID NO: 4383359 - DNA, 25 bp, Homo sapien
gcttcaccagtatgtgcgtcccaaa

SEQ ID NO: 4383360 - DNA, 25 bp, Homo sapien
aaaggaaactgttgcttggcttcac

SEQ ID NO: 4383361 - DNA, 25 bp, Homo sapien
gttgcttggcttcaccagtatgtgc

SEQ ID NO: 4383362 - DNA, 25 bp, Homo sapien
gtatgtgcgtcccaaataattgtag

SEQ ID NO: 4383363 - DNA, 25 bp, Homo sapien
taatgcaaatatagggcctttatgc

SEQ ID NO: 4383364 - DNA, 25 bp, Homo sapien
cttgtctactccagcacttaggatg

SEQ ID NO: 4383365 - DNA, 25 bp, Homo sapien
tccagcacttaggatgaaatttcct

SEQ ID NO: 4383366 - DNA, 25 bp, Homo sapien
tatgctgccctaaggtgctagcaag

SEQ ID NO: 4383367 - DNA, 25 bp, Homo sapien
taggaaccagttgctagaagtgtac

SEQ ID NO: 4383368 - DNA, 25 bp, Homo sapien
tattctggcaaacccatcataggaa

SEQ ID NO: 4383369 - DNA, 25 bp, Homo sapien
cagttgctagaagtgtaccttcact

SEQ ID NO: 4383370 - DNA, 25 bp, Homo sapien
cccatcataggaaccagttgctaga

SEQ ID NO: 4383371 - DNA, 25 bp, Homo sapien
gtactaactgtgtagagccactggt

SEQ ID NO: 4383372 - DNA, 25 bp, Homo sapien
ccttgttgcttggaacatcttgccc

SEQ ID NO: 4383373 - DNA, 25 bp, Homo sapien
tccaatctagagatgtgacatcctt

SEQ ID NO: 4383374 - DNA, 25 bp, Homo sapien
gctgttctcactaagattccatatt

SEQ ID NO: 4383375 - DNA, 25 bp, Homo sapien
acttcagattcatggccccgcaaca

SEQ ID NO: 4383376 - DNA, 25 bp, Homo sapien
taaaaacttcagattcatggccccg

SEQ ID NO: 4383377 - DNA, 25 bp, Homo sapien
aaaacttcagattcatggccccgca

SEQ ID NO: 4383378 - DNA, 25 bp, Homo sapien
atggccccgcaacacaacagcttta

SEQ ID NO: 4383379 - DNA, 25 bp, Homo sapien
gcagatccttgttggctggctgcag

SEQ ID NO: 4383380 - DNA, 25 bp, Homo sapien
tgctgtgcaagcttatctctataag

SEQ ID NO: 4383381 - DNA, 25 bp, Homo sapien
atcagggacagagactctattggtc

SEQ ID NO: 4383382 - DNA, 25 bp, Homo sapien
cagagactctattggtcgaccatca

SEQ ID NO: 4383383 - DNA, 25 bp, Homo sapien
gtgggacgagggcaccatttatatt

SEQ ID NO: 4383384 - DNA, 25 bp, Homo sapien
ttctgcttctacatactgtagacct

SEQ ID NO: 4383385 - DNA, 25 bp, Homo sapien
gcaccatttatattggactgactga

SEQ ID NO: 4383386 - DNA, 25 bp, Homo sapien
gcttctacatactgtagacctttct

SEQ ID NO: 4383387 - DNA, 25 bp, Homo sapien
agctctcttcactgcagttcttcat

SEQ ID NO: 4383388 - DNA, 25 bp, Homo sapien
cagacgctgagctctcttcactgca

SEQ ID NO: 4383389 - DNA, 25 bp, Homo sapien
gacgctgagctctcttcactgcagt

SEQ ID NO: 4383390 - DNA, 25 bp, Homo sapien
tgagctctcttcactgcagttcttc

SEQ ID NO: 4383391 - DNA, 25 bp, Homo sapien
gactagaagcacattactgataacc

SEQ ID NO: 4383392 - DNA, 25 bp, Homo sapien
gcacattactgataaccacttcaac

SEQ ID NO: 4383393 - DNA, 25 bp, Homo sapien
gactccatcgaatacactggtaatg

SEQ ID NO: 4383394 - DNA, 25 bp, Homo sapien
cacttcaacctgactccatcgaata

SEQ ID NO: 4383395 - DNA, 25 bp, Homo sapien
gctgtctcctaatccaattcagtgc

SEQ ID NO: 4383396 - DNA, 25 bp, Homo sapien
tcagtgctctattgcagggaaagca

SEQ ID NO: 4383397 - DNA, 25 bp, Homo sapien
gaaagcagcagtataaagattccag

SEQ ID NO: 4383398 - DNA, 25 bp, Homo sapien
aaatacttcctttgccacgatgttc

SEQ ID NO: 4383399 - DNA, 25 bp, Homo sapien
tatataccaagaagttgacctcatc

SEQ ID NO: 4383400 - DNA, 25 bp, Homo sapien
tataccaagaagttgacctcatcac

SEQ ID NO: 4383401 - DNA, 25 bp, Homo sapien
atataccaagaagttgacctcatca

SEQ ID NO: 4383402 - DNA, 25 bp, Homo sapien
accatgaggtcacaacacaggatat

SEQ ID NO: 4383403 - DNA, 25 bp, Homo sapien
taaaccatgaggtcacaacacagga

SEQ ID NO: 4383404 - DNA, 25 bp, Homo sapien
cccacttaaaccatgaggtcacaac

SEQ ID NO: 4383405 - DNA, 25 bp, Homo sapien
ccatgaggtcacaacacaggatata

SEQ ID NO: 4383406 - DNA, 25 bp, Homo sapien
aactcaaatattataggaagaacaa

SEQ ID NO: 4383407 - DNA, 25 bp, Homo sapien
gaatctcaaagagtggaacacatgc

SEQ ID NO: 4383408 - DNA, 25 bp, Homo sapien
gctttacaaggacagttaatcacct

SEQ ID NO: 4383409 - DNA, 25 bp, Homo sapien
cacctgaatagataggaactctgct

SEQ ID NO: 4383410 - DNA, 25 bp, Homo sapien
aggctgtagtgagctatgattatac

SEQ ID NO: 4383411 - DNA, 25 bp, Homo sapien
ggctgtagtgagctatgattatacc

SEQ ID NO: 4383412 - DNA, 25 bp, Homo sapien
acagaagccaatttgagtaccgata

SEQ ID NO: 4383413 - DNA, 25 bp, Homo sapien
tttacatacagttttgccttgatta

SEQ ID NO: 4383414 - DNA, 25 bp, Homo sapien
gacacagaagccaatttgagtaccg

SEQ ID NO: 4383415 - DNA, 25 bp, Homo sapien
ttacatacagttttgccttgattaa

SEQ ID NO: 4383416 - DNA, 25 bp, Homo sapien
gatatttaataacaggtgggttgtg

SEQ ID NO: 4383417 - DNA, 25 bp, Homo sapien
tggatatacagataactctttaggg

SEQ ID NO: 4383418 - DNA, 25 bp, Homo sapien
ttgattctggtattatgatggcaaa

SEQ ID NO: 4383419 - DNA, 25 bp, Homo sapien
tttgatcatgagctgttttcagcaa

SEQ ID NO: 4383420 - DNA, 25 bp, Homo sapien
gaagacactggtactaaaattagaa

SEQ ID NO: 4383421 - DNA, 25 bp, Homo sapien
actccagcctgactagataaggcaa

SEQ ID NO: 4383422 - DNA, 25 bp, Homo sapien
tatgccgtgactgcgctgcatgcac

SEQ ID NO: 4383423 - DNA, 25 bp, Homo sapien
ttctatctggaaggcatgaacacac

SEQ ID NO: 4383424 - DNA, 25 bp, Homo sapien
tcacgtgatactacagtctttcaca

SEQ ID NO: 4383425 - DNA, 25 bp, Homo sapien
cgtgatactacagtctttcacagct

SEQ ID NO: 4383426 - DNA, 25 bp, Homo sapien
cattttaggctcagttatttcagcc

SEQ ID NO: 4383427 - DNA, 25 bp, Homo sapien
cacagcttccattttaggctcagtt

SEQ ID NO: 4383428 - DNA, 25 bp, Homo sapien
aataccaaagttgatttaccatgaa

SEQ ID NO: 4383429 - DNA, 25 bp, Homo sapien
ctaaggatccgacaacaaagaagag

SEQ ID NO: 4383430 - DNA, 25 bp, Homo sapien
ctttcatgagaaactctagtactcc

SEQ ID NO: 4383431 - DNA, 25 bp, Homo sapien
agagtaacaggtttcaaatgtgaac

SEQ ID NO: 4383432 - DNA, 25 bp, Homo sapien
gtcaaattgtgagaaactttcaaaa

SEQ ID NO: 4383433 - DNA, 25 bp, Homo sapien
ttttgtcaaattgtgagaaactttc

SEQ ID NO: 4383434 - DNA, 25 bp, Homo sapien
gtattttgtcaaattgtgagaaact

SEQ ID NO: 4383435 - DNA, 25 bp, Homo sapien
tgtcaaattgtgagaaactttcaaa

SEQ ID NO: 4383436 - DNA, 25 bp, Homo sapien
gatgtgcaactgaatatccggtcac

SEQ ID NO: 4383437 - DNA, 25 bp, Homo sapien
cattggcagtgcattgatgtgggga

SEQ ID NO: 4383438 - DNA, 25 bp, Homo sapien
gaatatccggtcaccgccaatcaca

SEQ ID NO: 4383439 - DNA, 25 bp, Homo sapien
tccggtcaccgccaatcacaagttg

SEQ ID NO: 4383440 - DNA, 25 bp, Homo sapien
gttcaagtggttctcctggtctcag

SEQ ID NO: 4383441 - DNA, 25 bp, Homo sapien
tcctgagtagctggcactacaggta

SEQ ID NO: 4383442 - DNA, 25 bp, Homo sapien
gagttcaagtggttctcctggtctc

SEQ ID NO: 4383443 - DNA, 25 bp, Homo sapien
tcaagtggttctcctggtctcagcc

SEQ ID NO: 4383444 - DNA, 25 bp, Homo sapien
tatcaccggtgctttgcggaacctc

SEQ ID NO: 4383445 - DNA, 25 bp, Homo sapien
gataaagtcatcagggtgtagcccc

SEQ ID NO: 4383446 - DNA, 25 bp, Homo sapien
ttctagaaacatacgcaggaccata

SEQ ID NO: 4383447 - DNA, 25 bp, Homo sapien
tcaagtccaaaacatgtgtgtcccg

SEQ ID NO: 4383448 - DNA, 25 bp, Homo sapien
ggtgaccaataaaggtggatcttcc

SEQ ID NO: 4383449 - DNA, 25 bp, Homo sapien
ctttgaaaatgcttgagagaacctg

SEQ ID NO: 4383450 - DNA, 25 bp, Homo sapien
aaaactatcacctcctttgtgtact

SEQ ID NO: 4383451 - DNA, 25 bp, Homo sapien
caccagtggattgttactttgaaaa

SEQ ID NO: 4383452 - DNA, 25 bp, Homo sapien
taagcattacatcctccactgtcct

SEQ ID NO: 4383453 - DNA, 25 bp, Homo sapien
tcaaagcctctaagcattacatcct

SEQ ID NO: 4383454 - DNA, 25 bp, Homo sapien
ctcacccgatcctcatttcccatgg

SEQ ID NO: 4383455 - DNA, 25 bp, Homo sapien
tttcccatggaattacacatacaga

SEQ ID NO: 4383456 - DNA, 25 bp, Homo sapien
gatcacgcacagctttgcaattact

SEQ ID NO: 4383457 - DNA, 25 bp, Homo sapien
tgtcagatcacgcacagctttgcaa

SEQ ID NO: 4383458 - DNA, 25 bp, Homo sapien
gcaattactgcctatgttttcattt

SEQ ID NO: 4383459 - DNA, 25 bp, Homo sapien
tttgcaattactgcctatgttttca

SEQ ID NO: 4383460 - DNA, 25 bp, Homo sapien
ggatgattgtaagatttgtcctgca

SEQ ID NO: 4383461 - DNA, 25 bp, Homo sapien
tgcctcctgggttcaagcgattcac

SEQ ID NO: 4383462 - DNA, 25 bp, Homo sapien
ctgcctcctgggttcaagcgattca

SEQ ID NO: 4383463 - DNA, 25 bp, Homo sapien
acagagcctttctctgttgcccaga

SEQ ID NO: 4383464 - DNA, 25 bp, Homo sapien
gacagagcctttctctgttgcccag

SEQ ID NO: 4383465 - DNA, 25 bp, Homo sapien
tgaaagtagacccttatctttcacc

SEQ ID NO: 4383466 - DNA, 25 bp, Homo sapien
cttcctgacagcaatctgggcaagg

SEQ ID NO: 4383467 - DNA, 25 bp, Homo sapien
taagcataagactcaaaactagaaa

SEQ ID NO: 4383468 - DNA, 25 bp, Homo sapien
gagaaaaacaataacctacaggaga

SEQ ID NO: 4383469 - DNA, 25 bp, Homo sapien
gaaaagagaatccttaacacactgt

SEQ ID NO: 4383470 - DNA, 25 bp, Homo sapien
ggagaaaagagaatccttaacacac

SEQ ID NO: 4383471 - DNA, 25 bp, Homo sapien
cactgttggtggccattactgaaaa

SEQ ID NO: 4383472 - DNA, 25 bp, Homo sapien
actgttggtggccattactgaaaat

SEQ ID NO: 4383473 - DNA, 25 bp, Homo sapien
tccatacagtaaggatcttgggccc

SEQ ID NO: 4383474 - DNA, 25 bp, Homo sapien
cccaccagagtacagtgtaatgcca

SEQ ID NO: 4383475 - DNA, 25 bp, Homo sapien
cgcaactttgaggtctacagcccaa

SEQ ID NO: 4383476 - DNA, 25 bp, Homo sapien
tggaaggcacaaaaacactagtcat

SEQ ID NO: 4383477 - DNA, 25 bp, Homo sapien
gaaacactgaactgtcctttaccag

SEQ ID NO: 4383478 - DNA, 25 bp, Homo sapien
cttgaatgccgagaacatatgggat

SEQ ID NO: 4383479 - DNA, 25 bp, Homo sapien
tgtaatggtatcttctctcagagga

SEQ ID NO: 4383480 - DNA, 25 bp, Homo sapien
tatcaagcacgtaatagtacctggg

SEQ ID NO: 4383481 - DNA, 25 bp, Homo sapien
tttccagtggatactctacacctag

SEQ ID NO: 4383482 - DNA, 25 bp, Homo sapien
cagatgacctccttcctgatgaaag

SEQ ID NO: 4383483 - DNA, 25 bp, Homo sapien
taaagaatgctgataacataccagt

SEQ ID NO: 4383484 - DNA, 25 bp, Homo sapien
catacaaccagctaatggcaaaggc

SEQ ID NO: 4383485 - DNA, 25 bp, Homo sapien
ctacataatcaattgagttaactca

SEQ ID NO: 4383486 - DNA, 25 bp, Homo sapien
tgactacataatcaattgagttaac

SEQ ID NO: 4383487 - DNA, 25 bp, Homo sapien
gactacataatcaattgagttaact

SEQ ID NO: 4383488 - DNA, 25 bp, Homo sapien
caatagtgaaaaggggggcaacaga

SEQ ID NO: 4383489 - DNA, 25 bp, Homo sapien
gattcttggtccagaattagttcca

SEQ ID NO: 4383490 - DNA, 25 bp, Homo sapien
tactcctaacaacttgaaaagacag

SEQ ID NO: 4383491 - DNA, 25 bp, Homo sapien
tagttccattataacctacggcttg

SEQ ID NO: 4383492 - DNA, 25 bp, Homo sapien
taaagctgtgtcactaatccaaagt

SEQ ID NO: 4383493 - DNA, 25 bp, Homo sapien
cctgtttccattaaggctaccttca

SEQ ID NO: 4383494 - DNA, 25 bp, Homo sapien
ggctgttccttgtgaggtttacaga

SEQ ID NO: 4383495 - DNA, 25 bp, Homo sapien
atcccatcgaggctgttccttgtga

SEQ ID NO: 4383496 - DNA, 25 bp, Homo sapien
cagaaggcaagcctgtttccattaa

SEQ ID NO: 4383497 - DNA, 25 bp, Homo sapien
acactttgtaaaactgtgtgtcatc

SEQ ID NO: 4383498 - DNA, 25 bp, Homo sapien
atgaaacactttgtaaaactgtgtg

SEQ ID NO: 4383499 - DNA, 25 bp, Homo sapien
gaaacactttgtaaaactgtgtgtc

SEQ ID NO: 4383500 - DNA, 25 bp, Homo sapien
atatgaaacactttgtaaaactgtg

SEQ ID NO: 4383501 - DNA, 25 bp, Homo sapien
gaagacctgagatctataacagctg

SEQ ID NO: 4383502 - DNA, 25 bp, Homo sapien
gagatctataacagctgcagatcaa

SEQ ID NO: 4383503 - DNA, 25 bp, Homo sapien
tgtatactattcttcacacagctca

SEQ ID NO: 4383504 - DNA, 25 bp, Homo sapien
gactactagtatcaacatctggcaa

SEQ ID NO: 4383505 - DNA, 25 bp, Homo sapien
cactgattttttcctaaccagcaag

SEQ ID NO: 4383506 - DNA, 25 bp, Homo sapien
cgatgcccgaccaagtaaaacttcg

SEQ ID NO: 4383507 - DNA, 25 bp, Homo sapien
gatggtgctgcagaacatagtttga

SEQ ID NO: 4383508 - DNA, 25 bp, Homo sapien
gactcaagggatcaccacagctcag

SEQ ID NO: 4383509 - DNA, 25 bp, Homo sapien
cttccagtggccaaatcaagttcca

SEQ ID NO: 4383510 - DNA, 25 bp, Homo sapien
tcccacaaataggaggtcctgtagg

SEQ ID NO: 4383511 - DNA, 25 bp, Homo sapien
ggaacaaggaagtactcctcccaca

SEQ ID NO: 4383512 - DNA, 25 bp, Homo sapien
tacctggtagcaatatggtaacacc

SEQ ID NO: 4383513 - DNA, 25 bp, Homo sapien
gtaatccgtgcactccgggaagagg

SEQ ID NO: 4383514 - DNA, 25 bp, Homo sapien
tatcagttttggtcggctgcagtgg

SEQ ID NO: 4383515 - DNA, 25 bp, Homo sapien
atggtacgaaaacaactgaatagtc

SEQ ID NO: 4383516 - DNA, 25 bp, Homo sapien
aatccgtgcactccgggaagagggc

SEQ ID NO: 4383517 - DNA, 25 bp, Homo sapien
acacgccattgcagcctagggacag

SEQ ID NO: 4383518 - DNA, 25 bp, Homo sapien
caagaacacgccattgcagcctagg

SEQ ID NO: 4383519 - DNA, 25 bp, Homo sapien
aacacgccattgcagcctagggaca

SEQ ID NO: 4383520 - DNA, 25 bp, Homo sapien
agaacacgccattgcagcctaggga

SEQ ID NO: 4383521 - DNA, 25 bp, Homo sapien
tacatgaggacatatgacccaaatt

SEQ ID NO: 4383522 - DNA, 25 bp, Homo sapien
acaattacatgaggacatatgaccc

SEQ ID NO: 4383523 - DNA, 25 bp, Homo sapien
caacaattacatgaggacatatgac

SEQ ID NO: 4383524 - DNA, 25 bp, Homo sapien
aattacatgaggacatatgacccaa

SEQ ID NO: 4383525 - DNA, 25 bp, Homo sapien
gactaactgcaattgggaacaaggg

SEQ ID NO: 4383526 - DNA, 25 bp, Homo sapien
tatgatgagattagacttgctggca

SEQ ID NO: 4383527 - DNA, 25 bp, Homo sapien
tttgccatggaaggttaaataccca

SEQ ID NO: 4383528 - DNA, 25 bp, Homo sapien
caaattagccgtttcctgggatggg

SEQ ID NO: 4383529 - DNA, 25 bp, Homo sapien
ccacgtccggccaatataggaattt

SEQ ID NO: 4383530 - DNA, 25 bp, Homo sapien
accacgtccggccaatataggaatt

SEQ ID NO: 4383531 - DNA, 25 bp, Homo sapien
agatgtctcatgttcacgaactgaa

SEQ ID NO: 4383532 - DNA, 25 bp, Homo sapien
aagatgtctcatgttcacgaactga

SEQ ID NO: 4383533 - DNA, 25 bp, Homo sapien
gatgtctcatgttcacgaactgaaa

SEQ ID NO: 4383534 - DNA, 25 bp, Homo sapien
tgttatgggttctagctaacacaat

SEQ ID NO: 4383535 - DNA, 25 bp, Homo sapien
caattacagtaagcttgcaggatac

SEQ ID NO: 4383536 - DNA, 25 bp, Homo sapien
gtatacaaaagtcaatcgcttccca

SEQ ID NO: 4383537 - DNA, 25 bp, Homo sapien
tgatagtactacattttacttaacc

SEQ ID NO: 4383538 - DNA, 25 bp, Homo sapien
ggatttgccctacttgacctcaaga

SEQ ID NO: 4383539 - DNA, 25 bp, Homo sapien
gacaatatggtattagtgaaagaac

SEQ ID NO: 4383540 - DNA, 25 bp, Homo sapien
caaaatagcccagaatacatctgta

SEQ ID NO: 4383541 - DNA, 25 bp, Homo sapien
caaaaaaccagtctagactcagccc

SEQ ID NO: 4383542 - DNA, 25 bp, Homo sapien
aatggagacgcccttcagtaggtca

SEQ ID NO: 4383543 - DNA, 25 bp, Homo sapien
caagtttaaatcttgtgtccacaca

SEQ ID NO: 4383544 - DNA, 25 bp, Homo sapien
tggtaccgccactttgggagacagt

SEQ ID NO: 4383545 - DNA, 25 bp, Homo sapien
ggacttactacatacaccattaggg

SEQ ID NO: 4383546 - DNA, 25 bp, Homo sapien
catgaaccgttttctaaaggctcca

SEQ ID NO: 4383547 - DNA, 25 bp, Homo sapien
cacgtccggccatgaaccgttttct

SEQ ID NO: 4383548 - DNA, 25 bp, Homo sapien
gccatgaaccgttttctaaaggctc

SEQ ID NO: 4383549 - DNA, 25 bp, Homo sapien
tatgttccaacattagtgaagacca

SEQ ID NO: 4383550 - DNA, 25 bp, Homo sapien
gtgaagaccaaattccatggatacc

SEQ ID NO: 4383551 - DNA, 25 bp, Homo sapien
tttgtaatcattagcctaaaggaga

SEQ ID NO: 4383552 - DNA, 25 bp, Homo sapien
cattaatcaatagcgataaagtggg

SEQ ID NO: 4383553 - DNA, 25 bp, Homo sapien
tgaattagaagtgtgctgttggccg

SEQ ID NO: 4383554 - DNA, 25 bp, Homo sapien
aagtgtgctgttggccgggcgcact

SEQ ID NO: 4383555 - DNA, 25 bp, Homo sapien
tagaagtgtgctgttggccgggcgc

SEQ ID NO: 4383556 - DNA, 25 bp, Homo sapien
ctgaattagaagtgtgctgttggcc

SEQ ID NO: 4383557 - DNA, 25 bp, Homo sapien
tcctctattctccaactctgtcttg

SEQ ID NO: 4383558 - DNA, 25 bp, Homo sapien
ggtgttgccatcacctactcccatt

SEQ ID NO: 4383559 - DNA, 25 bp, Homo sapien
tctgacaactcggtgttgccatcac

SEQ ID NO: 4383560 - DNA, 25 bp, Homo sapien
ccaactctgtcttgtcgcaactcat

SEQ ID NO: 4383561 - DNA, 25 bp, Homo sapien
caggtttaactgctacggtcaggcc

SEQ ID NO: 4383562 - DNA, 25 bp, Homo sapien
gagtatattccttgtttcccctagc

SEQ ID NO: 4383563 - DNA, 25 bp, Homo sapien
cggtcaggccaaggtctttgaatct

SEQ ID NO: 4383564 - DNA, 25 bp, Homo sapien
tctacactgttttcaagccaaaagg

SEQ ID NO: 4383565 - DNA, 25 bp, Homo sapien
taccagatgctgagggtcaagatgg

SEQ ID NO: 4383566 - DNA, 25 bp, Homo sapien
ctcagtcagagcctcataggattca

SEQ ID NO: 4383567 - DNA, 25 bp, Homo sapien
gaaaggctaaagagtgccaggcact

SEQ ID NO: 4383568 - DNA, 25 bp, Homo sapien
taggattcaactcaacaatggaaag

SEQ ID NO: 4383569 - DNA, 25 bp, Homo sapien
cgacgtttctgagtactgactctaa

SEQ ID NO: 4383570 - DNA, 25 bp, Homo sapien
tcattcagaacgtcgacgtttctga

SEQ ID NO: 4383571 - DNA, 25 bp, Homo sapien
aagtacaattctatactcctttgaa

SEQ ID NO: 4383572 - DNA, 25 bp, Homo sapien
tactcctttgaacgagtattttcta

SEQ ID NO: 4383573 - DNA, 25 bp, Homo sapien
gagtcactctaagcacacacaacaa

SEQ ID NO: 4383574 - DNA, 25 bp, Homo sapien
aaatagcagccaaccggccaggggc

SEQ ID NO: 4383575 - DNA, 25 bp, Homo sapien
cagcattgttatcagtctcttccac

SEQ ID NO: 4383576 - DNA, 25 bp, Homo sapien
gtattgcatgtgtcctcctttccag

SEQ ID NO: 4383577 - DNA, 25 bp, Homo sapien
ttactataccccatctggcaaggtg

SEQ ID NO: 4383578 - DNA, 25 bp, Homo sapien
tatatgaatgagtgccaaagagcac

SEQ ID NO: 4383579 - DNA, 25 bp, Homo sapien
catggtgctgctcgtctgtagtcct

SEQ ID NO: 4383580 - DNA, 25 bp, Homo sapien
gtccaaggtcaaagatgtattccca

SEQ ID NO: 4383581 - DNA, 25 bp, Homo sapien
gaatgctgtaaaacagtgagatcta

SEQ ID NO: 4383582 - DNA, 25 bp, Homo sapien
ttctagctgggcgtgtaagcggaca

SEQ ID NO: 4383583 - DNA, 25 bp, Homo sapien
tcttctggtagataaaactcactta

SEQ ID NO: 4383584 - DNA, 25 bp, Homo sapien
aaactccagtgcagtcagaatgctg

SEQ ID NO: 4383585 - DNA, 25 bp, Homo sapien
tccgttcaagaaacatcgtagttgg

SEQ ID NO: 4383586 - DNA, 25 bp, Homo sapien
tattaagaactctgccaaatgctgg

SEQ ID NO: 4383587 - DNA, 25 bp, Homo sapien
gaaggacaaagggaacaacagcatg

SEQ ID NO: 4383588 - DNA, 25 bp, Homo sapien
aactaccgtatttgagaggccggca

SEQ ID NO: 4383589 - DNA, 25 bp, Homo sapien
tcatctaagacagacccaggtttga

SEQ ID NO: 4383590 - DNA, 25 bp, Homo sapien
cctctggctctatggttacagggca

SEQ ID NO: 4383591 - DNA, 25 bp, Homo sapien
gcagagcaggagataccaccttcgt

SEQ ID NO: 4383592 - DNA, 25 bp, Homo sapien
gattagcctagggtataaacagcat

SEQ ID NO: 4383593 - DNA, 25 bp, Homo sapien
tgctacaagttgtactagggagatt

SEQ ID NO: 4383594 - DNA, 25 bp, Homo sapien
tacaagttctagtgaataccaatgt

SEQ ID NO: 4383595 - DNA, 25 bp, Homo sapien
aaatgtgtcaagtcaggaattcttt

SEQ ID NO: 4383596 - DNA, 25 bp, Homo sapien
tgcatttcagtgacttatactgtaa

SEQ ID NO: 4383597 - DNA, 25 bp, Homo sapien
tatttcaggtaagtagatgaacaca

SEQ ID NO: 4383598 - DNA, 25 bp, Homo sapien
atttcaggtaagtagatgaacacac

SEQ ID NO: 4383599 - DNA, 25 bp, Homo sapien
cacgagggccttattatccaaactg

SEQ ID NO: 4383600 - DNA, 25 bp, Homo sapien
ggcaataactttgccaattctacac

SEQ ID NO: 4383601 - DNA, 25 bp, Homo sapien
aattctacactcctgaacccaactt

SEQ ID NO: 4383602 - DNA, 25 bp, Homo sapien
taactttgccaattctacactcctg

SEQ ID NO: 4383603 - DNA, 25 bp, Homo sapien
tttgccaattctacactcctgaacc

SEQ ID NO: 4383604 - DNA, 25 bp, Homo sapien
tacaaataaacacgtcccggagcaa

SEQ ID NO: 4383605 - DNA, 25 bp, Homo sapien
ttacaaataaacacgtcccggagca

SEQ ID NO: 4383606 - DNA, 25 bp, Homo sapien
caaataaacacgtcccggagcaagg

SEQ ID NO: 4383607 - DNA, 25 bp, Homo sapien
cttaagacgataaaaagcactaagt

SEQ ID NO: 4383608 - DNA, 25 bp, Homo sapien
tcccgggaatggaggcacaaggaaa

SEQ ID NO: 4383609 - DNA, 25 bp, Homo sapien
ctggaaacggtggcctccaacgccg

SEQ ID NO: 4383610 - DNA, 25 bp, Homo sapien
gaatggaggcacaaggaaattcccc

SEQ ID NO: 4383611 - DNA, 25 bp, Homo sapien
ggcacaaggaaattcccctcctcgc

SEQ ID NO: 4383612 - DNA, 25 bp, Homo sapien
tcaaaatgtgatccagagcacggga

SEQ ID NO: 4383613 - DNA, 25 bp, Homo sapien
caaaatgtgatccagagcacgggat

SEQ ID NO: 4383614 - DNA, 25 bp, Homo sapien
taagttcagtaattagacaggtgct

SEQ ID NO: 4383615 - DNA, 25 bp, Homo sapien
cttggccaaggtcaatgtctctttc

SEQ ID NO: 4383616 - DNA, 25 bp, Homo sapien
ctttcccccctgagcccttgcttgg

SEQ ID NO: 4383617 - DNA, 25 bp, Homo sapien
gtggcctaataagttcagtaattag

SEQ ID NO: 4383618 - DNA, 25 bp, Homo sapien
cagttttccatgcttctatgaccca

SEQ ID NO: 4383619 - DNA, 25 bp, Homo sapien
tcaagatgtcagtacacaagctgct

SEQ ID NO: 4383620 - DNA, 25 bp, Homo sapien
tggttcttccgagatgaggcacatg

SEQ ID NO: 4383621 - DNA, 25 bp, Homo sapien
tccttcagtgcatagcgtgttgctt

SEQ ID NO: 4383622 - DNA, 25 bp, Homo sapien
gagaggccgtgagatgtgattgagc

SEQ ID NO: 4383623 - DNA, 25 bp, Homo sapien
agctgattggagaggccgtgagatg

SEQ ID NO: 4383624 - DNA, 25 bp, Homo sapien
tgagatgtgattgagccagctctgc

SEQ ID NO: 4383625 - DNA, 25 bp, Homo sapien
gccgtgagatgtgattgagccagct

SEQ ID NO: 4383626 - DNA, 25 bp, Homo sapien
gtctttgcaatacccaggaagtcag

SEQ ID NO: 4383627 - DNA, 25 bp, Homo sapien
tagattcaaggcacatgggctatgc

SEQ ID NO: 4383628 - DNA, 25 bp, Homo sapien
gagagagctctctatggtcccttcc

SEQ ID NO: 4383629 - DNA, 25 bp, Homo sapien
tgctcacaacgcactggagagagag

SEQ ID NO: 4383630 - DNA, 25 bp, Homo sapien
aagcagcaggtcttatagagggcat

SEQ ID NO: 4383631 - DNA, 25 bp, Homo sapien
taagattgataacatggaagcagca

SEQ ID NO: 4383632 - DNA, 25 bp, Homo sapien
taagaaggcattttgcgggtatatc

SEQ ID NO: 4383633 - DNA, 25 bp, Homo sapien
ttaggactccaagtgtaagaaggca

SEQ ID NO: 4383634 - DNA, 25 bp, Homo sapien
cttcaacttctcacaatcatccttt

SEQ ID NO: 4383635 - DNA, 25 bp, Homo sapien
tcaacttctcacaatcatcctttat

SEQ ID NO: 4383636 - DNA, 25 bp, Homo sapien
caacttctcacaatcatcctttatt

SEQ ID NO: 4383637 - DNA, 25 bp, Homo sapien
acttctcacaatcatcctttattct

SEQ ID NO: 4383638 - DNA, 25 bp, Homo sapien
ttctctagctcaacactcattacac

SEQ ID NO: 4383639 - DNA, 25 bp, Homo sapien
cactcattacacttagactccaggc

SEQ ID NO: 4383640 - DNA, 25 bp, Homo sapien
ccaggcagcttgttcactttgggaa

SEQ ID NO: 4383641 - DNA, 25 bp, Homo sapien
cattacacttagactccaggcagct

SEQ ID NO: 4383642 - DNA, 25 bp, Homo sapien
agtgaagtgtgccaggtaaataaca

SEQ ID NO: 4383643 - DNA, 25 bp, Homo sapien
gattgtgttagttggaagacagtga

SEQ ID NO: 4383644 - DNA, 25 bp, Homo sapien
tcataaagatgattgtgttagttgg

SEQ ID NO: 4383645 - DNA, 25 bp, Homo sapien
gacagtgaagtgtgccaggtaaata

SEQ ID NO: 4383646 - DNA, 25 bp, Homo sapien
atccagacatctatgtggagcaaaa

SEQ ID NO: 4383647 - DNA, 25 bp, Homo sapien
gatataagttgctacatccagacat

SEQ ID NO: 4383648 - DNA, 25 bp, Homo sapien
cagacatctatgtggagcaaaaggc

SEQ ID NO: 4383649 - DNA, 25 bp, Homo sapien
tagaaaagatataagttgctacatc

SEQ ID NO: 4383650 - DNA, 25 bp, Homo sapien
tctcccacagaggtgtcttgctgct

SEQ ID NO: 4383651 - DNA, 25 bp, Homo sapien
ctcccacagaggtgtcttgctgctg

SEQ ID NO: 4383652 - DNA, 25 bp, Homo sapien
tcccacagaggtgtcttgctgctgg

SEQ ID NO: 4383653 - DNA, 25 bp, Homo sapien
aatatcagctactagcacagtgccc

SEQ ID NO: 4383654 - DNA, 25 bp, Homo sapien
tccctacataatccagatcccagag

SEQ ID NO: 4383655 - DNA, 25 bp, Homo sapien
gcatgtagcatgtttctcagggaac

SEQ ID NO: 4383656 - DNA, 25 bp, Homo sapien
tcacagttatgtccaaaggatcatg

SEQ ID NO: 4383657 - DNA, 25 bp, Homo sapien
ttagcctgaccacatcacataagca

SEQ ID NO: 4383658 - DNA, 25 bp, Homo sapien
tgccttttagcctgaccacatcaca

SEQ ID NO: 4383659 - DNA, 25 bp, Homo sapien
ttttagcctgaccacatcacataag

SEQ ID NO: 4383660 - DNA, 25 bp, Homo sapien
ccttttagcctgaccacatcacata

SEQ ID NO: 4383661 - DNA, 25 bp, Homo sapien
tatctgcagatgtctcaactcctcc

SEQ ID NO: 4383662 - DNA, 25 bp, Homo sapien
cttcccaggaaggtgtatctgcaga

SEQ ID NO: 4383663 - DNA, 25 bp, Homo sapien
gaaggtgtatctgcagatgtctcaa

SEQ ID NO: 4383664 - DNA, 25 bp, Homo sapien
gatgtctcaactcctcctccaggag

SEQ ID NO: 4383665 - DNA, 25 bp, Homo sapien
ttctggacacggtgatattccttca

SEQ ID NO: 4383666 - DNA, 25 bp, Homo sapien
ggcagtgaccttgttctggacacgg

SEQ ID NO: 4383667 - DNA, 25 bp, Homo sapien
cttgttctggacacggtgatattcc

SEQ ID NO: 4383668 - DNA, 25 bp, Homo sapien
gaccttgttctggacacggtgatat

SEQ ID NO: 4383669 - DNA, 25 bp, Homo sapien
tgatgaacccggtggcatcgattgg

SEQ ID NO: 4383670 - DNA, 25 bp, Homo sapien
gatgttgatgaacccggtggcatcg

SEQ ID NO: 4383671 - DNA, 25 bp, Homo sapien
aattgatgttgatgaacccggtggc

SEQ ID NO: 4383672 - DNA, 25 bp, Homo sapien
gagggaattgatgttgatgaacccg

SEQ ID NO: 4383673 - DNA, 25 bp, Homo sapien
ggcggacacgttcacattcagggct

SEQ ID NO: 4383674 - DNA, 25 bp, Homo sapien
atgcagtggcggacacgttcacatt

SEQ ID NO: 4383675 - DNA, 25 bp, Homo sapien
gcagtggcggacacgttcacattca

SEQ ID NO: 4383676 - DNA, 25 bp, Homo sapien
agtggcggacacgttcacattcagg

SEQ ID NO: 4383677 - DNA, 25 bp, Homo sapien
tcaatagagccaacacggtgcttgc

SEQ ID NO: 4383678 - DNA, 25 bp, Homo sapien
tgtcaatagagccaacacggtgctt

SEQ ID NO: 4383679 - DNA, 25 bp, Homo sapien
gagccaacacggtgcttgcccgcga

SEQ ID NO: 4383680 - DNA, 25 bp, Homo sapien
atagagccaacacggtgcttgcccg

SEQ ID NO: 4383681 - DNA, 25 bp, Homo sapien
caggggtgttggggctttggctggg

SEQ ID NO: 4383682 - DNA, 25 bp, Homo sapien
ttgagaatgtcaggggtgttggggc

SEQ ID NO: 4383683 - DNA, 25 bp, Homo sapien
tgtcaggggtgttggggctttggct

SEQ ID NO: 4383684 - DNA, 25 bp, Homo sapien
cttgagaatgtcaggggtgttgggg

SEQ ID NO: 4383685 - DNA, 25 bp, Homo sapien
tgaggcacttgatccgattgtagaa

SEQ ID NO: 4383686 - DNA, 25 bp, Homo sapien
atattccatcagatcgttgaggcac

SEQ ID NO: 4383687 - DNA, 25 bp, Homo sapien
ttgaggcacttgatccgattgtaga

SEQ ID NO: 4383688 - DNA, 25 bp, Homo sapien
tccatcagatcgttgaggcacttga

SEQ ID NO: 4383689 - DNA, 25 bp, Homo sapien
cgaacatgcaccagggagcaatgac

SEQ ID NO: 4383690 - DNA, 25 bp, Homo sapien
ctcgaacatgcaccagggagcaatg

SEQ ID NO: 4383691 - DNA, 25 bp, Homo sapien
tcgaacatgcaccagggagcaatga

SEQ ID NO: 4383692 - DNA, 25 bp, Homo sapien
aggtgagctgaaccgggcctgatca

SEQ ID NO: 4383693 - DNA, 25 bp, Homo sapien
gaaccgggcctgatcattgcccttt

SEQ ID NO: 4383694 - DNA, 25 bp, Homo sapien
gctgaaccgggcctgatcattgccc

SEQ ID NO: 4383695 - DNA, 25 bp, Homo sapien
agtagcaggtgagctgaaccgggcc

SEQ ID NO: 4383696 - DNA, 25 bp, Homo sapien
ttcagccacacaaagatgcaggagg

SEQ ID NO: 4383697 - DNA, 25 bp, Homo sapien
gcccaggtaggcaatgatgtcattg

SEQ ID NO: 4383698 - DNA, 25 bp, Homo sapien
tggccgatgttgcccaggtaggcaa

SEQ ID NO: 4383699 - DNA, 25 bp, Homo sapien
tccttcagccacacaaagatgcagg

SEQ ID NO: 4383700 - DNA, 25 bp, Homo sapien
caagcctaaagtgcgctgctgaagg

SEQ ID NO: 4383701 - DNA, 25 bp, Homo sapien
gctgatgactcaaaggatgggctct

SEQ ID NO: 4383702 - DNA, 25 bp, Homo sapien
gagattggacttggacctgtagcca

SEQ ID NO: 4383703 - DNA, 25 bp, Homo sapien
gctgtgtgtgccctataaatgccct

SEQ ID NO: 4383704 - DNA, 25 bp, Homo sapien
agcgctgtgagctggactggaaagc

SEQ ID NO: 4383705 - DNA, 25 bp, Homo sapien
gcgctgtgagctggactggaaagca

SEQ ID NO: 4383706 - DNA, 25 bp, Homo sapien
cgctgtgagctggactggaaagcat

SEQ ID NO: 4383707 - DNA, 25 bp, Homo sapien
ttttctgagattaggagtccatggg

SEQ ID NO: 4383708 - DNA, 25 bp, Homo sapien
caagtttgtacatggcctgtggata

SEQ ID NO: 4383709 - DNA, 25 bp, Homo sapien
acgcccacagggctacgtcgatggc

SEQ ID NO: 4383710 - DNA, 25 bp, Homo sapien
cgatggcaatgcgattttctgagat

SEQ ID NO: 4383711 - DNA, 25 bp, Homo sapien
ggagcacaatttggagggatgttaa

SEQ ID NO: 4383712 - DNA, 25 bp, Homo sapien
gatgttaaatgtgcaggcagccctt

SEQ ID NO: 4383713 - DNA, 25 bp, Homo sapien
gagcagatgcccatcccaagaatga

SEQ ID NO: 4383714 - DNA, 25 bp, Homo sapien
tagtcaccgggatcttgatttccag

SEQ ID NO: 4383715 - DNA, 25 bp, Homo sapien
gaagtttcttccgtgttgcactggc

SEQ ID NO: 4383716 - DNA, 25 bp, Homo sapien
taggaagcccgtacatgtcggcaca

SEQ ID NO: 4383717 - DNA, 25 bp, Homo sapien
gaagaatgcttctcttaggagccag

SEQ ID NO: 4383718 - DNA, 25 bp, Homo sapien
gaaactgccccaactgtatagaact

SEQ ID NO: 4383719 - DNA, 25 bp, Homo sapien
tttggagttagagtgtacacgataa

SEQ ID NO: 4383720 - DNA, 25 bp, Homo sapien
ctttaagctcagaaggctactacag

SEQ ID NO: 4383721 - DNA, 25 bp, Homo sapien
aaggctactacaggtctcttttgga

SEQ ID NO: 4383722 - DNA, 25 bp, Homo sapien
tagagtgtacacgataatttttctc

SEQ ID NO: 4383723 - DNA, 25 bp, Homo sapien
aatagaaaccacaaatcctgcctgc

SEQ ID NO: 4383724 - DNA, 25 bp, Homo sapien
atagaaaccacaaatcctgcctgcc

SEQ ID NO: 4383725 - DNA, 25 bp, Homo sapien
aaattgtggcagggctaaaaataga

SEQ ID NO: 4383726 - DNA, 25 bp, Homo sapien
taaaattgtggcagggctaaaaata

SEQ ID NO: 4383727 - DNA, 25 bp, Homo sapien
acagctataagagggcagatgtttt

SEQ ID NO: 4383728 - DNA, 25 bp, Homo sapien
gagtcatctactattttatgtcaga

SEQ ID NO: 4383729 - DNA, 25 bp, Homo sapien
catttgaagacactgagtcatctac

SEQ ID NO: 4383730 - DNA, 25 bp, Homo sapien
taggcctagacattcgctagtcagt

SEQ ID NO: 4383731 - DNA, 25 bp, Homo sapien
gctaccaagtaatacacatttgtct

SEQ ID NO: 4383732 - DNA, 25 bp, Homo sapien
ctttccatggcggttgccagtcagt

SEQ ID NO: 4383733 - DNA, 25 bp, Homo sapien
ttccttgctgttcataagctaccaa

SEQ ID NO: 4383734 - DNA, 25 bp, Homo sapien
atggcggttgccagtcagtttttcc

SEQ ID NO: 4383735 - DNA, 25 bp, Homo sapien
gtggaacaatgtggttgggaaattc

SEQ ID NO: 4383736 - DNA, 25 bp, Homo sapien
aagaagaagatatgaagtggaacaa

SEQ ID NO: 4383737 - DNA, 25 bp, Homo sapien
tgtggttgggaaattcccatatctt

SEQ ID NO: 4383738 - DNA, 25 bp, Homo sapien
aaagaagaagatatgaagtggaaca

SEQ ID NO: 4383739 - DNA, 25 bp, Homo sapien
agaggtcgcgttgagctgagatcgc

SEQ ID NO: 4383740 - DNA, 25 bp, Homo sapien
cccgggaggcagaggtcgcgttgag

SEQ ID NO: 4383741 - DNA, 25 bp, Homo sapien
tgagatcgcaccattgcattccaac

SEQ ID NO: 4383742 - DNA, 25 bp, Homo sapien
ctgagatcgcaccattgcattccaa

SEQ ID NO: 4383743 - DNA, 25 bp, Homo sapien
tgccgtatacattctacaacagtgt

SEQ ID NO: 4383744 - DNA, 25 bp, Homo sapien
caacagtgttcttagggtagtattg

SEQ ID NO: 4383745 - DNA, 25 bp, Homo sapien
tccatgtccagcatgccgtatacat

SEQ ID NO: 4383746 - DNA, 25 bp, Homo sapien
caccaatggagcaagccgatttcca

SEQ ID NO: 4383747 - DNA, 25 bp, Homo sapien
cgtgaactgatagccaaatggtaaa

SEQ ID NO: 4383748 - DNA, 25 bp, Homo sapien
tttgttgtgtactgggaagcactgg

SEQ ID NO: 4383749 - DNA, 25 bp, Homo sapien
actgggtgtgctgaagaaacgacaa

SEQ ID NO: 4383750 - DNA, 25 bp, Homo sapien
ttagagaataggacgtgaactgata

SEQ ID NO: 4383751 - DNA, 25 bp, Homo sapien
tggtggcagttattggataggcctt

SEQ ID NO: 4383752 - DNA, 25 bp, Homo sapien
ttagcatgctgatcatacttggaaa

SEQ ID NO: 4383753 - DNA, 25 bp, Homo sapien
ggcagttattggataggccttggcc

SEQ ID NO: 4383754 - DNA, 25 bp, Homo sapien
tgtatctttcctgttagcatgctga

SEQ ID NO: 4383755 - DNA, 25 bp, Homo sapien
cactggtgtcttgttattcttctgg

SEQ ID NO: 4383756 - DNA, 25 bp, Homo sapien
gttcaggctccatgtgctatcttca

SEQ ID NO: 4383757 - DNA, 25 bp, Homo sapien
tgtcttgtaagacttccccgttcag

SEQ ID NO: 4383758 - DNA, 25 bp, Homo sapien
gctatcttcactacatgttttccat

SEQ ID NO: 4383759 - DNA, 25 bp, Homo sapien
tgcctttctgagatgcgtttctcct

SEQ ID NO: 4383760 - DNA, 25 bp, Homo sapien
ttttcttgaggagttaacttaggca

SEQ ID NO: 4383761 - DNA, 25 bp, Homo sapien
tttcttgaggagttaacttaggcat

SEQ ID NO: 4383762 - DNA, 25 bp, Homo sapien
tttgtgcctttctgagatgcgtttc

SEQ ID NO: 4383763 - DNA, 25 bp, Homo sapien
tcccaagaaggcttttgattggatt

SEQ ID NO: 4383764 - DNA, 25 bp, Homo sapien
gcttttgattggattcaaatatgtc

SEQ ID NO: 4383765 - DNA, 25 bp, Homo sapien
aaggcttttgattggattcaaatat

SEQ ID NO: 4383766 - DNA, 25 bp, Homo sapien
ttttgattggattcaaatatgtcag

SEQ ID NO: 4383767 - DNA, 25 bp, Homo sapien
gagaaaaaccataggcctcggagga

SEQ ID NO: 4383768 - DNA, 25 bp, Homo sapien
cccaggctgcgacagccaagtcggt

SEQ ID NO: 4383769 - DNA, 25 bp, Homo sapien
acaggcctggaacggaaagaatgag

SEQ ID NO: 4383770 - DNA, 25 bp, Homo sapien
cgacagccaagtcggtgggcgcgca

SEQ ID NO: 4383771 - DNA, 25 bp, Homo sapien
taggaactgcgaaggggatctttcc

SEQ ID NO: 4383772 - DNA, 25 bp, Homo sapien
tagttaccgtttggctcaggatgtc

SEQ ID NO: 4383773 - DNA, 25 bp, Homo sapien
ggatctttcccgggagcctctggct

SEQ ID NO: 4383774 - DNA, 25 bp, Homo sapien
tagactagcatttacagcactggcc

SEQ ID NO: 4383775 - DNA, 25 bp, Homo sapien
gagattatgttcgagtgtgtatatg

SEQ ID NO: 4383776 - DNA, 25 bp, Homo sapien
atgacataattgtaactcaaattcc

SEQ ID NO: 4383777 - DNA, 25 bp, Homo sapien
taattgtaactcaaattccacgtca

SEQ ID NO: 4383778 - DNA, 25 bp, Homo sapien
gattatgttcgagtgtgtatatgtg

SEQ ID NO: 4383779 - DNA, 25 bp, Homo sapien
ccgaaaaccttgtagtgaagagctg

SEQ ID NO: 4383780 - DNA, 25 bp, Homo sapien
accttgtagtgaagagctgccaaca

SEQ ID NO: 4383781 - DNA, 25 bp, Homo sapien
gtagtgaagagctgccaacagcaca

SEQ ID NO: 4383782 - DNA, 25 bp, Homo sapien
ttgtagtgaagagctgccaacagca

SEQ ID NO: 4383783 - DNA, 25 bp, Homo sapien
atatcctctgatccttacattttat

SEQ ID NO: 4383784 - DNA, 25 bp, Homo sapien
catatcctctgatccttacatttta

SEQ ID NO: 4383785 - DNA, 25 bp, Homo sapien
cattttatagggcacacctcttccc

SEQ ID NO: 4383786 - DNA, 25 bp, Homo sapien
tcgcactgtttgacgctcagcctgt

SEQ ID NO: 4383787 - DNA, 25 bp, Homo sapien
gtttgacgctcagcctgttgcagca

SEQ ID NO: 4383788 - DNA, 25 bp, Homo sapien
tcttgattctcgcactgtttgacgc

SEQ ID NO: 4383789 - DNA, 25 bp, Homo sapien
aaaattttagtcttgattctcgcac

SEQ ID NO: 4383790 - DNA, 25 bp, Homo sapien
tcaaaatataactgggaaagtaaga

SEQ ID NO: 4383791 - DNA, 25 bp, Homo sapien
tcaaagtgccttctgagcgacatat

SEQ ID NO: 4383792 - DNA, 25 bp, Homo sapien
gcaggcattgaagggatagccccat

SEQ ID NO: 4383793 - DNA, 25 bp, Homo sapien
gctgatatccagacaggatccctta

SEQ ID NO: 4383794 - DNA, 25 bp, Homo sapien
ttttctatttggcatccacagcagg

SEQ ID NO: 4383795 - DNA, 25 bp, Homo sapien
tttcttcctttagcggtcatggtgg

SEQ ID NO: 4383796 - DNA, 25 bp, Homo sapien
tagcggtcatggtggtcttactcat

SEQ ID NO: 4383797 - DNA, 25 bp, Homo sapien
ggtcttactcatgcgtgtatccaag

SEQ ID NO: 4383798 - DNA, 25 bp, Homo sapien
gcgtgtatccaagtatgtgtgcagg

SEQ ID NO: 4383799 - DNA, 25 bp, Homo sapien
tgcctcttcgttgtgacttgtcttg

SEQ ID NO: 4383800 - DNA, 25 bp, Homo sapien
ctgcctcttcgttgtgacttgtctt

SEQ ID NO: 4383801 - DNA, 25 bp, Homo sapien
actatttgcagatgacccagaagat

SEQ ID NO: 4383802 - DNA, 25 bp, Homo sapien
tatttgcagatgacccagaagattt

SEQ ID NO: 4383803 - DNA, 25 bp, Homo sapien
cacagatttgaatcacatgctgtct

SEQ ID NO: 4383804 - DNA, 25 bp, Homo sapien
ccagcacagatttgaatcacatgct

SEQ ID NO: 4383805 - DNA, 25 bp, Homo sapien
aacagccaacctgaaaactctgcag

SEQ ID NO: 4383806 - DNA, 25 bp, Homo sapien
tgtaccaggtgaacagccaacctga

SEQ ID NO: 4383807 - DNA, 25 bp, Homo sapien
ctttgtaccaggtgaacagccaacc

SEQ ID NO: 4383808 - DNA, 25 bp, Homo sapien
caggtgaacagccaacctgaaaact

SEQ ID NO: 4383809 - DNA, 25 bp, Homo sapien
agaagcacgacactctcctctttgg

SEQ ID NO: 4383810 - DNA, 25 bp, Homo sapien
tattcacgggcgattccagagaaat

SEQ ID NO: 4383811 - DNA, 25 bp, Homo sapien
aagacctgagatatttagaagcacg

SEQ ID NO: 4383812 - DNA, 25 bp, Homo sapien
tctgggtgaagtatacaaagacctg

SEQ ID NO: 4383813 - DNA, 25 bp, Homo sapien
cagtccctgcaagaaaatgtcccag

SEQ ID NO: 4383814 - DNA, 25 bp, Homo sapien
gaaaatgtcccagcaacttcttggt

SEQ ID NO: 4383815 - DNA, 25 bp, Homo sapien
tcttggttgcctcatgacttccttc

SEQ ID NO: 4383816 - DNA, 25 bp, Homo sapien
cttcctttgtaccagtccctgcaag

SEQ ID NO: 4383817 - DNA, 25 bp, Homo sapien
tgaaagttggacttatggggtctcc

SEQ ID NO: 4383818 - DNA, 25 bp, Homo sapien
tttcacaatatagtcagcagcctgt

SEQ ID NO: 4383819 - DNA, 25 bp, Homo sapien
ggagggtgggctcccgtataggcat

SEQ ID NO: 4383820 - DNA, 25 bp, Homo sapien
tgggctcccgtataggcatctgcat

SEQ ID NO: 4383821 - DNA, 25 bp, Homo sapien
ccactgtgaccaagaatgtctccat

SEQ ID NO: 4383822 - DNA, 25 bp, Homo sapien
tgcttcctttgctccactgtgacca

SEQ ID NO: 4383823 - DNA, 25 bp, Homo sapien
ctgcttcctttgctccactgtgacc

SEQ ID NO: 4383824 - DNA, 25 bp, Homo sapien
gctccactgtgaccaagaatgtctc

SEQ ID NO: 4383825 - DNA, 25 bp, Homo sapien
ggcagaatgtaagccctgccaggcc

SEQ ID NO: 4383826 - DNA, 25 bp, Homo sapien
caggccttctgttgagacatcttgg

SEQ ID NO: 4383827 - DNA, 25 bp, Homo sapien
gatgctcagatgactccgaatctgg

SEQ ID NO: 4383828 - DNA, 25 bp, Homo sapien
caccgatgtcgggaggatgctcaga

SEQ ID NO: 4383829 - DNA, 25 bp, Homo sapien
tactctgcctcggttactccttgtg

SEQ ID NO: 4383830 - DNA, 25 bp, Homo sapien
tagttgaagctgcttgccacaggca

SEQ ID NO: 4383831 - DNA, 25 bp, Homo sapien
gcagtatggatatttctgactgtcc

SEQ ID NO: 4383832 - DNA, 25 bp, Homo sapien
catctcttagtagattgctttgtga

SEQ ID NO: 4383833 - DNA, 25 bp, Homo sapien
atgaaagcggctcggtagtaaaatt

SEQ ID NO: 4383834 - DNA, 25 bp, Homo sapien
caggagagatgaaagcggctcggta

SEQ ID NO: 4383835 - DNA, 25 bp, Homo sapien
agagatgaaagcggctcggtagtaa

SEQ ID NO: 4383836 - DNA, 25 bp, Homo sapien
agatgaaagcggctcggtagtaaaa

SEQ ID NO: 4383837 - DNA, 25 bp, Homo sapien
tctctctggctactgtacatgccat

SEQ ID NO: 4383838 - DNA, 25 bp, Homo sapien
cagacagaaaagatattatgggttt

SEQ ID NO: 4383839 - DNA, 25 bp, Homo sapien
agtaaaacaatgatgcatgaagttg

SEQ ID NO: 4383840 - DNA, 25 bp, Homo sapien
gcatgaagttgaactgactgccaaa

SEQ ID NO: 4383841 - DNA, 25 bp, Homo sapien
ccttggtagactctaactggctgta

SEQ ID NO: 4383842 - DNA, 25 bp, Homo sapien
gttttccattctaagcccagtgtcc

SEQ ID NO: 4383843 - DNA, 25 bp, Homo sapien
tttttgatgtatctatcccaaggca

SEQ ID NO: 4383844 - DNA, 25 bp, Homo sapien
caaatggttgctcctaagagcgtca

SEQ ID NO: 4383845 - DNA, 25 bp, Homo sapien
caagctctagaacgctgactccggg

SEQ ID NO: 4383846 - DNA, 25 bp, Homo sapien
gaacatttctgctgaggtcgttgct

SEQ ID NO: 4383847 - DNA, 25 bp, Homo sapien
caacagcacgttgtcaattagaaca

SEQ ID NO: 4383848 - DNA, 25 bp, Homo sapien
tcatataaaacgagggagccacagc

SEQ ID NO: 4383849 - DNA, 25 bp, Homo sapien
ctgagcacatcacacaggcatattt

SEQ ID NO: 4383850 - DNA, 25 bp, Homo sapien
gcacatcacacaggcatatttggtt

SEQ ID NO: 4383851 - DNA, 25 bp, Homo sapien
acatcacacaggcatatttggttag

SEQ ID NO: 4383852 - DNA, 25 bp, Homo sapien
gagcacatcacacaggcatatttgg

SEQ ID NO: 4383853 - DNA, 25 bp, Homo sapien
tgggaaactggttgccaggagagca

SEQ ID NO: 4383854 - DNA, 25 bp, Homo sapien
cagggtagagtgggaaactggttgc

SEQ ID NO: 4383855 - DNA, 25 bp, Homo sapien
gagtgggaaactggttgccaggaga

SEQ ID NO: 4383856 - DNA, 25 bp, Homo sapien
ggtagagtgggaaactggttgccag

SEQ ID NO: 4383857 - DNA, 25 bp, Homo sapien
acttggttagcagttgagctctgca

SEQ ID NO: 4383858 - DNA, 25 bp, Homo sapien
tctcggggactaaaggacagcccat

SEQ ID NO: 4383859 - DNA, 25 bp, Homo sapien
tgttctcaggcaaacccagccaatg

SEQ ID NO: 4383860 - DNA, 25 bp, Homo sapien
ccagcagacctttctcggggactaa

SEQ ID NO: 4383861 - DNA, 25 bp, Homo sapien
gatgttgtgaatagatcaccctcac

SEQ ID NO: 4383862 - DNA, 25 bp, Homo sapien
gacagatgttgtgaatagatcaccc

SEQ ID NO: 4383863 - DNA, 25 bp, Homo sapien
atgttgtgaatagatcaccctcaca

SEQ ID NO: 4383864 - DNA, 25 bp, Homo sapien
acagatgttgtgaatagatcaccct

SEQ ID NO: 4383865 - DNA, 25 bp, Homo sapien
cacgatgcggaacaagaataacatt

SEQ ID NO: 4383866 - DNA, 25 bp, Homo sapien
ggagacatttctggtgggataacaa

SEQ ID NO: 4383867 - DNA, 25 bp, Homo sapien
cagtctgacgaggagctacatttcc

SEQ ID NO: 4383868 - DNA, 25 bp, Homo sapien
ccccacgatgcggaacaagaataac

SEQ ID NO: 4383869 - DNA, 25 bp, Homo sapien
caggtcgggcctgttgattccggct

SEQ ID NO: 4383870 - DNA, 25 bp, Homo sapien
ggctaaccttgctgccgcgatgcac

SEQ ID NO: 4383871 - DNA, 25 bp, Homo sapien
tctctagtcacagaggttccggcca

SEQ ID NO: 4383872 - DNA, 25 bp, Homo sapien
tgcacgtgtccaggtcgggcctgtt

SEQ ID NO: 4383873 - DNA, 25 bp, Homo sapien
gtgccagaacaagggtctggctctt

SEQ ID NO: 4383874 - DNA, 25 bp, Homo sapien
ctggtgccagaacaagggtctggct

SEQ ID NO: 4383875 - DNA, 25 bp, Homo sapien
tggtgccagaacaagggtctggctc

SEQ ID NO: 4383876 - DNA, 25 bp, Homo sapien
ggtgccagaacaagggtctggctct

SEQ ID NO: 4383877 - DNA, 25 bp, Homo sapien
tatcttcttaggccggaaggaggga

SEQ ID NO: 4383878 - DNA, 25 bp, Homo sapien
atatcttcttaggccggaaggaggg

SEQ ID NO: 4383879 - DNA, 25 bp, Homo sapien
aggatcaaagagacttgcattaaat

SEQ ID NO: 4383880 - DNA, 25 bp, Homo sapien
caggatcaaagagacttgcattaaa

SEQ ID NO: 4383881 - DNA, 25 bp, Homo sapien
acaatatagatgtttgaggcctttt

SEQ ID NO: 4383882 - DNA, 25 bp, Homo sapien
ccaggatcaaagagacttgcattaa

SEQ ID NO: 4383883 - DNA, 25 bp, Homo sapien
tctccaattgttctgggtattcttt

SEQ ID NO: 4383884 - DNA, 25 bp, Homo sapien
ctccaattgttctgggtattctttt

SEQ ID NO: 4383885 - DNA, 25 bp, Homo sapien
caagttgggccataggacagctgta

SEQ ID NO: 4383886 - DNA, 25 bp, Homo sapien
tgaagacactcaactaccctgagag

SEQ ID NO: 4383887 - DNA, 25 bp, Homo sapien
tgcagtatcagatccgaggaatatc

SEQ ID NO: 4383888 - DNA, 25 bp, Homo sapien
agttgcctcttccagcactactggg

SEQ ID NO: 4383889 - DNA, 25 bp, Homo sapien
tctccgcgatgaggaagtggtctct

SEQ ID NO: 4383890 - DNA, 25 bp, Homo sapien
tggacttcaggcatctccgcgatga

SEQ ID NO: 4383891 - DNA, 25 bp, Homo sapien
aggaagtggtctctgtggtcagcag

SEQ ID NO: 4383892 - DNA, 25 bp, Homo sapien
cttcaggcatctccgcgatgaggaa

SEQ ID NO: 4383893 - DNA, 25 bp, Homo sapien
tggagtgggcttattgaaaggtgta

SEQ ID NO: 4383894 - DNA, 25 bp, Homo sapien
cacagtcttcccgattctctctatt

SEQ ID NO: 4383895 - DNA, 25 bp, Homo sapien
aatggaactggagacatgtggtcca

SEQ ID NO: 4383896 - DNA, 25 bp, Homo sapien
tccacagtcttcccgattctctcta

SEQ ID NO: 4383897 - DNA, 25 bp, Homo sapien
ggttcttgtgagtcaactttatgga

SEQ ID NO: 4383898 - DNA, 25 bp, Homo sapien
acatctgagcctcggtatcaaccat

SEQ ID NO: 4383899 - DNA, 25 bp, Homo sapien
gcacatctgagcctcggtatcaacc

SEQ ID NO: 4383900 - DNA, 25 bp, Homo sapien
ttctctaaggttcttgtgagtcaac

SEQ ID NO: 4383901 - DNA, 25 bp, Homo sapien
ggaaaaagctgcattatccagggct

SEQ ID NO: 4383902 - DNA, 25 bp, Homo sapien
tattttccggtgtaacagccaggta

SEQ ID NO: 4383903 - DNA, 25 bp, Homo sapien
taacagccaggtaaatggaaagaaa

SEQ ID NO: 4383904 - DNA, 25 bp, Homo sapien
tggaaagaaactctgcatacttttt

SEQ ID NO: 4383905 - DNA, 25 bp, Homo sapien
gcatactttttagcacttgtgatca

SEQ ID NO: 4383906 - DNA, 25 bp, Homo sapien
caaaatactgaattgctttcgggca

SEQ ID NO: 4383907 - DNA, 25 bp, Homo sapien
ctgaattgctttcgggcagccatgt

SEQ ID NO: 4383908 - DNA, 25 bp, Homo sapien
tgcatctaataagtcatagttactg

SEQ ID NO: 4383909 - DNA, 25 bp, Homo sapien
tagttactgactgaacaaggatgca

SEQ ID NO: 4383910 - DNA, 25 bp, Homo sapien
tgtgccatgaacatgacacctgtgt

SEQ ID NO: 4383911 - DNA, 25 bp, Homo sapien
catcccgtcttttgaactctatggg

SEQ ID NO: 4383912 - DNA, 25 bp, Homo sapien
ctgtgtcctctgttacgttcttgtg

SEQ ID NO: 4383913 - DNA, 25 bp, Homo sapien
gtgtcaaggatatctccagtcatcc

SEQ ID NO: 4383914 - DNA, 25 bp, Homo sapien
gcaggttcaggcagagtaatcaaca

SEQ ID NO: 4383915 - DNA, 25 bp, Homo sapien
caaagtattacaaactgggtgccta

SEQ ID NO: 4383916 - DNA, 25 bp, Homo sapien
gctgaaatctgcgaagacccaagta

SEQ ID NO: 4383917 - DNA, 25 bp, Homo sapien
tctaagttttcaccctaatgggcca

SEQ ID NO: 4383918 - DNA, 25 bp, Homo sapien
ctggaaatggatgccgggtatttgt

SEQ ID NO: 4383919 - DNA, 25 bp, Homo sapien
tggatgccgggtatttgttttcttc

SEQ ID NO: 4383920 - DNA, 25 bp, Homo sapien
tcacatcatgcaggacctggaaatg

SEQ ID NO: 4383921 - DNA, 25 bp, Homo sapien
aatggatgccgggtatttgttttct

SEQ ID NO: 4383922 - DNA, 25 bp, Homo sapien
atgacttcatggagacagccctgaa

SEQ ID NO: 4383923 - DNA, 25 bp, Homo sapien
gatggcatggagagtcctggcctgg

SEQ ID NO: 4383924 - DNA, 25 bp, Homo sapien
cctgggaaggctggtgatgacttca

SEQ ID NO: 4383925 - DNA, 25 bp, Homo sapien
cttgctaaggatggcatggagagtc

SEQ ID NO: 4383926 - DNA, 25 bp, Homo sapien
aatagtggggttgatattcaggata

SEQ ID NO: 4383927 - DNA, 25 bp, Homo sapien
taccatgatgactggtaatagtggg

SEQ ID NO: 4383928 - DNA, 25 bp, Homo sapien
tgcatgagtctaccatgatgactgg

SEQ ID NO: 4383929 - DNA, 25 bp, Homo sapien
ggatatttagcaaccagttcttcct

SEQ ID NO: 4383930 - DNA, 25 bp, Homo sapien
gccaaactgatttgttcatgctctt

SEQ ID NO: 4383931 - DNA, 25 bp, Homo sapien
tgatttgttcatgctcttgcgaaag

SEQ ID NO: 4383932 - DNA, 25 bp, Homo sapien
tgttcatgctcttgcgaaagctgga

SEQ ID NO: 4383933 - DNA, 25 bp, Homo sapien
tgctcttgcgaaagctggattttac

SEQ ID NO: 4383934 - DNA, 25 bp, Homo sapien
tttttgtggttataaatccagcacc

SEQ ID NO: 4383935 - DNA, 25 bp, Homo sapien
ttttgtggttataaatccagcacct

SEQ ID NO: 4383936 - DNA, 25 bp, Homo sapien
gtttttgtggttataaatccagcac

SEQ ID NO: 4383937 - DNA, 25 bp, Homo sapien
gattgccccaacatattcctgactg

SEQ ID NO: 4383938 - DNA, 25 bp, Homo sapien
caaaccttgttaactaggcgagcca

SEQ ID NO: 4383939 - DNA, 25 bp, Homo sapien
ggagtcatgccaggaaaaggtgcca

SEQ ID NO: 4383940 - DNA, 25 bp, Homo sapien
cacatatacgtacagcaaggagtca

SEQ ID NO: 4383941 - DNA, 25 bp, Homo sapien
tttcctgttgacttcgtgtatcctc

SEQ ID NO: 4383942 - DNA, 25 bp, Homo sapien
catcgttaatatgacattctccagg

SEQ ID NO: 4383943 - DNA, 25 bp, Homo sapien
gacttcgtgtatcctctacttcctg

SEQ ID NO: 4383944 - DNA, 25 bp, Homo sapien
tcagttgccactcatcgttaatatg

SEQ ID NO: 4383945 - DNA, 25 bp, Homo sapien
tgtaccagatacacgcagattgttg

SEQ ID NO: 4383946 - DNA, 25 bp, Homo sapien
tagagctgtccctacaactcagtga

SEQ ID NO: 4383947 - DNA, 25 bp, Homo sapien
gaaagggctttggtgatacatggac

SEQ ID NO: 4383948 - DNA, 25 bp, Homo sapien
tactgacataggaaggtttctgccc

SEQ ID NO: 4383949 - DNA, 25 bp, Homo sapien
tctgttcttggctgcgtttcaggcc

SEQ ID NO: 4383950 - DNA, 25 bp, Homo sapien
caaaaaatggctttgcgggaccatt

SEQ ID NO: 4383951 - DNA, 25 bp, Homo sapien
caggccaagattcagtgctcacacc

SEQ ID NO: 4383952 - DNA, 25 bp, Homo sapien
gaagatatcacagaggttgctgccc

SEQ ID NO: 4383953 - DNA, 25 bp, Homo sapien
catagttagctgtggaagtcttact

SEQ ID NO: 4383954 - DNA, 25 bp, Homo sapien
tctttgtgcagaagggccaatttcc

SEQ ID NO: 4383955 - DNA, 25 bp, Homo sapien
tcattgaagaccactcttctcaact

SEQ ID NO: 4383956 - DNA, 25 bp, Homo sapien
tcatctgcaaggactaggtcaagcc

SEQ ID NO: 4383957 - DNA, 25 bp, Homo sapien
ctttgagaggctgaggcgggcagat

SEQ ID NO: 4383958 - DNA, 25 bp, Homo sapien
cagcatgggcaatagagtaagactc

SEQ ID NO: 4383959 - DNA, 25 bp, Homo sapien
gtggctcacacctgtaatcccagca

SEQ ID NO: 4383960 - DNA, 25 bp, Homo sapien
ggaataaaaagataggccaggccca

SEQ ID NO: 4383961 - DNA, 25 bp, Homo sapien
tacctctcacaatacaattcaaaga

SEQ ID NO: 4383962 - DNA, 25 bp, Homo sapien
gaccaatacctctcacaatacaatt

SEQ ID NO: 4383963 - DNA, 25 bp, Homo sapien
caatacctctcacaatacaattcaa

SEQ ID NO: 4383964 - DNA, 25 bp, Homo sapien
cctctcacaatacaattcaaagaca

SEQ ID NO: 4383965 - DNA, 25 bp, Homo sapien
gaccattgtgacagacttccccaga

SEQ ID NO: 4383966 - DNA, 25 bp, Homo sapien
gcaagtgtgagacaacctgagcatt

SEQ ID NO: 4383967 - DNA, 25 bp, Homo sapien
cagcccttgataggatggaaattca

SEQ ID NO: 4383968 - DNA, 25 bp, Homo sapien
gagtcactcagttactacacgggaa

SEQ ID NO: 4383969 - DNA, 25 bp, Homo sapien
aggtggcaatagcagtgtttgcttc

SEQ ID NO: 4383970 - DNA, 25 bp, Homo sapien
gcttcacctcagtaccttcctctgc

SEQ ID NO: 4383971 - DNA, 25 bp, Homo sapien
taccttcctctgcaaaaaggtggca

SEQ ID NO: 4383972 - DNA, 25 bp, Homo sapien
gtagggtttgggcaagtcgcttcac

SEQ ID NO: 4383973 - DNA, 25 bp, Homo sapien
gagttaactctatgaggcgtttcca

SEQ ID NO: 4383974 - DNA, 25 bp, Homo sapien
ctacagaaaagtcccatcgggaaag

SEQ ID NO: 4383975 - DNA, 25 bp, Homo sapien
tgtagttcccacagatctaacaaga

SEQ ID NO: 4383976 - DNA, 25 bp, Homo sapien
tccaatgatgtgcagcctacagaaa

SEQ ID NO: 4383977 - DNA, 25 bp, Homo sapien
ttctttctccattgccagctcagct

SEQ ID NO: 4383978 - DNA, 25 bp, Homo sapien
ctaaacgccaggcaaccattccctt

SEQ ID NO: 4383979 - DNA, 25 bp, Homo sapien
ggctccaccacagggatggttctgg

SEQ ID NO: 4383980 - DNA, 25 bp, Homo sapien
tccacaacctcccatgcccacggca

SEQ ID NO: 4383981 - DNA, 25 bp, Homo sapien
gatggcagctgctcgagttgtcaga

SEQ ID NO: 4383982 - DNA, 25 bp, Homo sapien
gccatgatgtaccttgatggcagct

SEQ ID NO: 4383983 - DNA, 25 bp, Homo sapien
taatggtagtctctgtacatccgat

SEQ ID NO: 4383984 - DNA, 25 bp, Homo sapien
tacatccgatgtttgagagccgtcc

SEQ ID NO: 4383985 - DNA, 25 bp, Homo sapien
ggccctttgacctacagcttggcat

SEQ ID NO: 4383986 - DNA, 25 bp, Homo sapien
ctttgggaactgcacctatattcct

SEQ ID NO: 4383987 - DNA, 25 bp, Homo sapien
aactgcacctatattcctccttcgg

SEQ ID NO: 4383988 - DNA, 25 bp, Homo sapien
cttcggccctttgacctacagcttg

SEQ ID NO: 4383989 - DNA, 25 bp, Homo sapien
gctttgctgtgagctgcgcagtatc

SEQ ID NO: 4383990 - DNA, 25 bp, Homo sapien
tttctctgaaatccccagttctcac

SEQ ID NO: 4383991 - DNA, 25 bp, Homo sapien
tgaaatccccagttctcacctgtga

SEQ ID NO: 4383992 - DNA, 25 bp, Homo sapien
gaaccgcattgtggaaagccaggaa

SEQ ID NO: 4383993 - DNA, 25 bp, Homo sapien
tattgaacttgattgacatgaagtc

SEQ ID NO: 4383994 - DNA, 25 bp, Homo sapien
atgtgcatggcagtcagtattgaac

SEQ ID NO: 4383995 - DNA, 25 bp, Homo sapien
catgaagactatgcgtacctccagc

SEQ ID NO: 4383996 - DNA, 25 bp, Homo sapien
ttgacatgaagtcatcaagaccatg

SEQ ID NO: 4383997 - DNA, 25 bp, Homo sapien
tgtgttcctgtcaacttgagagagg

SEQ ID NO: 4383998 - DNA, 25 bp, Homo sapien
cacttgtggataagtggacacttgg

SEQ ID NO: 4383999 - DNA, 25 bp, Homo sapien
cacagcttccaaaaattggtcacag

SEQ ID NO: 4384000 - DNA, 25 bp, Homo sapien
gtgcagccaacccacactgagtgat

SEQ ID NO: 4384001 - DNA, 25 bp, Homo sapien
ggcttggagtattcttgccagtgtc

SEQ ID NO: 4384002 - DNA, 25 bp, Homo sapien
tccctcaattgccagggcacctggg

SEQ ID NO: 4384003 - DNA, 25 bp, Homo sapien
ctcactggcttggagtattcttgcc

SEQ ID NO: 4384004 - DNA, 25 bp, Homo sapien
tcagcctggtggtattctcactggc

SEQ ID NO: 4384005 - DNA, 25 bp, Homo sapien
caccctttaggccggttggttgcat

SEQ ID NO: 4384006 - DNA, 25 bp, Homo sapien
cctttaggccggttggttgcattca

SEQ ID NO: 4384007 - DNA, 25 bp, Homo sapien
tcaccctttaggccggttggttgca

SEQ ID NO: 4384008 - DNA, 25 bp, Homo sapien
tttaggccggttggttgcattcact

SEQ ID NO: 4384009 - DNA, 25 bp, Homo sapien
gctgaacatagttatctttttcctt

SEQ ID NO: 4384010 - DNA, 25 bp, Homo sapien
tgcaaggattggctgggcagctgcc

SEQ ID NO: 4384011 - DNA, 25 bp, Homo sapien
ttgctgagcttgcaaggattggctg

SEQ ID NO: 4384012 - DNA, 25 bp, Homo sapien
ctaggttgtcttgctgagcttgcaa

SEQ ID NO: 4384013 - DNA, 25 bp, Homo sapien
ctttctgctgactgccccgcttcat

SEQ ID NO: 4384014 - DNA, 25 bp, Homo sapien
gatctccctcatgactgggggagag

SEQ ID NO: 4384015 - DNA, 25 bp, Homo sapien
cccgcttcatccctgaacttttcag

SEQ ID NO: 4384016 - DNA, 25 bp, Homo sapien
gaaagagagcttgtttgtgaccaag

SEQ ID NO: 4384017 - DNA, 25 bp, Homo sapien
gtttctaacataattaatagtccgc

SEQ ID NO: 4384018 - DNA, 25 bp, Homo sapien
cctttaaccctctggaatagcaagc

SEQ ID NO: 4384019 - DNA, 25 bp, Homo sapien
tgatactaatgctaaaacttgcctt

SEQ ID NO: 4384020 - DNA, 25 bp, Homo sapien
gaatagcaagccaagctgaacctgc

SEQ ID NO: 4384021 - DNA, 25 bp, Homo sapien
tggcttaaagctttacgcttctcta

SEQ ID NO: 4384022 - DNA, 25 bp, Homo sapien
ggacaaatgagccaatagctagaag

SEQ ID NO: 4384023 - DNA, 25 bp, Homo sapien
tgtacttcggggaggaaatatgtca

SEQ ID NO: 4384024 - DNA, 25 bp, Homo sapien
actaataatagcatagtagtatctg

SEQ ID NO: 4384025 - DNA, 25 bp, Homo sapien
ctgcagatgttttagtcacctccat

SEQ ID NO: 4384026 - DNA, 25 bp, Homo sapien
taagctgcagatgttttagtcacct

SEQ ID NO: 4384027 - DNA, 25 bp, Homo sapien
gctgcagatgttttagtcacctcca

SEQ ID NO: 4384028 - DNA, 25 bp, Homo sapien
aagctgcagatgttttagtcacctc

SEQ ID NO: 4384029 - DNA, 25 bp, Homo sapien
gaagcaagtgtcttgtaggtaggca

SEQ ID NO: 4384030 - DNA, 25 bp, Homo sapien
cgtgtgtcagaatgtgaagcaagtg

SEQ ID NO: 4384031 - DNA, 25 bp, Homo sapien
atgtaatgaaggctttacgtgtgtc

SEQ ID NO: 4384032 - DNA, 25 bp, Homo sapien
ggctttacgtgtgtcagaatgtgaa

SEQ ID NO: 4384033 - DNA, 25 bp, Homo sapien
tagattgtttcatgctttatcatca

SEQ ID NO: 4384034 - DNA, 25 bp, Homo sapien
agcccacctagcttagtgcctttca

SEQ ID NO: 4384035 - DNA, 25 bp, Homo sapien
ctaggatatcaggataagtaatttt

SEQ ID NO: 4384036 - DNA, 25 bp, Homo sapien
tttatcatcagtttgccaagcccac

SEQ ID NO: 4384037 - DNA, 25 bp, Homo sapien
ggctggcgttctgctattattctca

SEQ ID NO: 4384038 - DNA, 25 bp, Homo sapien
gactccgtggggcacaatattttta

SEQ ID NO: 4384039 - DNA, 25 bp, Homo sapien
cccaagattctcaccagcctagaaa

SEQ ID NO: 4384040 - DNA, 25 bp, Homo sapien
ttcaccaactgtggtgactccgtgg

SEQ ID NO: 4384041 - DNA, 25 bp, Homo sapien
tgccagctttgatttaaggacgaga

SEQ ID NO: 4384042 - DNA, 25 bp, Homo sapien
aaacagagctcaaggttgaattgtt

SEQ ID NO: 4384043 - DNA, 25 bp, Homo sapien
tttgatagcatcaaatgatattaac

SEQ ID NO: 4384044 - DNA, 25 bp, Homo sapien
gctcaaggttgaattgttttacaaa

SEQ ID NO: 4384045 - DNA, 25 bp, Homo sapien
agtctgaattaagaccccgcggaca

SEQ ID NO: 4384046 - DNA, 25 bp, Homo sapien
ctctatgactctaggatcctttatt

SEQ ID NO: 4384047 - DNA, 25 bp, Homo sapien
tttcagtggtttttgtacgcgacag

SEQ ID NO: 4384048 - DNA, 25 bp, Homo sapien
cccgcggacatggaagatccccttt

SEQ ID NO: 4384049 - DNA, 25 bp, Homo sapien
tttcatagtcaaattggctgtagag

SEQ ID NO: 4384050 - DNA, 25 bp, Homo sapien
gtagagttcacccaaaatgatgtct

SEQ ID NO: 4384051 - DNA, 25 bp, Homo sapien
tatggcctgatctcgtactttcttc

SEQ ID NO: 4384052 - DNA, 25 bp, Homo sapien
gatatcacaggccatagaaatgtgt

SEQ ID NO: 4384053 - DNA, 25 bp, Homo sapien
caaggaatcactatgctcctggcag

SEQ ID NO: 4384054 - DNA, 25 bp, Homo sapien
ttctcctccaaggaatcactatgct

SEQ ID NO: 4384055 - DNA, 25 bp, Homo sapien
ggaatcactatgctcctggcaggac

SEQ ID NO: 4384056 - DNA, 25 bp, Homo sapien
tcctccaaggaatcactatgctcct

SEQ ID NO: 4384057 - DNA, 25 bp, Homo sapien
tactggggagcacggcgtagctcat

SEQ ID NO: 4384058 - DNA, 25 bp, Homo sapien
gctggtgttcctgacccctcttgct

SEQ ID NO: 4384059 - DNA, 25 bp, Homo sapien
ctggctgtgcagttacacccggtta

SEQ ID NO: 4384060 - DNA, 25 bp, Homo sapien
ggcgtagctcatgcctacgacactc

SEQ ID NO: 4384061 - DNA, 25 bp, Homo sapien
taatggacagcagtttcttctaaag

SEQ ID NO: 4384062 - DNA, 25 bp, Homo sapien
caggtattcctggatttccgttcca

SEQ ID NO: 4384063 - DNA, 25 bp, Homo sapien
gatgaatagaaacaccataatggac

SEQ ID NO: 4384064 - DNA, 25 bp, Homo sapien
tccaggctggttgggactgtctccc

SEQ ID NO: 4384065 - DNA, 25 bp, Homo sapien
aaaaagccacagtttccttcattct

SEQ ID NO: 4384066 - DNA, 25 bp, Homo sapien
tccaaaaaagccacagtttccttca

SEQ ID NO: 4384067 - DNA, 25 bp, Homo sapien
cagtttccttcattctttctcctcc

SEQ ID NO: 4384068 - DNA, 25 bp, Homo sapien
cacagtttccttcattctttctcct

SEQ ID NO: 4384069 - DNA, 25 bp, Homo sapien
tccaaaattagtggaccagatgtct

SEQ ID NO: 4384070 - DNA, 25 bp, Homo sapien
aaagcttgcttcttcaactattatg

SEQ ID NO: 4384071 - DNA, 25 bp, Homo sapien
ccagatgtctaagagtccagaatgt

SEQ ID NO: 4384072 - DNA, 25 bp, Homo sapien
agcttgcttcttcaactattatgga

SEQ ID NO: 4384073 - DNA, 25 bp, Homo sapien
caattcttgctcaataccacaaaga

SEQ ID NO: 4384074 - DNA, 25 bp, Homo sapien
taaggtaacacactgatgaggaata

SEQ ID NO: 4384075 - DNA, 25 bp, Homo sapien
aacctccgtttacaccagacagtct

SEQ ID NO: 4384076 - DNA, 25 bp, Homo sapien
ccagacagtctctaaggtaacacac

SEQ ID NO: 4384077 - DNA, 25 bp, Homo sapien
tccatacactgtaaacctccgttta

SEQ ID NO: 4384078 - DNA, 25 bp, Homo sapien
cagtctcacttctactttccttacg

SEQ ID NO: 4384079 - DNA, 25 bp, Homo sapien
gcctaggagttgtccttgcctcttc

SEQ ID NO: 4384080 - DNA, 25 bp, Homo sapien
tccaaatcagtctcacttctacttt

SEQ ID NO: 4384081 - DNA, 25 bp, Homo sapien
gtctggcagcctaggagttgtcctt

SEQ ID NO: 4384082 - DNA, 25 bp, Homo sapien
cactggagtctgagctactgtcttt

SEQ ID NO: 4384083 - DNA, 25 bp, Homo sapien
gctactgtctttgcccataagggtc

SEQ ID NO: 4384084 - DNA, 25 bp, Homo sapien
tgcccataagggtccccattcctta

SEQ ID NO: 4384085 - DNA, 25 bp, Homo sapien
gtacaattgatctttcccactggag

SEQ ID NO: 4384086 - DNA, 25 bp, Homo sapien
cagtccggccactctggagtatgca

SEQ ID NO: 4384087 - DNA, 25 bp, Homo sapien
tgagttcttcagtccggccactctg

SEQ ID NO: 4384088 - DNA, 25 bp, Homo sapien
cactctggagtatgcagatgatgta

SEQ ID NO: 4384089 - DNA, 25 bp, Homo sapien
gatgatgtagtatcgtgagtgagca

SEQ ID NO: 4384090 - DNA, 25 bp, Homo sapien
gctgtatgaatccaattatatggca

SEQ ID NO: 4384091 - DNA, 25 bp, Homo sapien
gacacgaaggaaccttagatgaata

SEQ ID NO: 4384092 - DNA, 25 bp, Homo sapien
aacttgggagcaaccaaaatgccca

SEQ ID NO: 4384093 - DNA, 25 bp, Homo sapien
tacagcaactgtacccaaataagtt

SEQ ID NO: 4384094 - DNA, 25 bp, Homo sapien
tacaagatctttaagtcagacccag

SEQ ID NO: 4384095 - DNA, 25 bp, Homo sapien
ggatatctcgttttgttggctgtaa

SEQ ID NO: 4384096 - DNA, 25 bp, Homo sapien
ggaaagcaatctgtgccaagcctct

SEQ ID NO: 4384097 - DNA, 25 bp, Homo sapien
tcagacccagtcaaagattagtcag

SEQ ID NO: 4384098 - DNA, 25 bp, Homo sapien
taatgaccaagtataggaagaagaa

SEQ ID NO: 4384099 - DNA, 25 bp, Homo sapien
aatgaccaagtataggaagaagaat

SEQ ID NO: 4384100 - DNA, 25 bp, Homo sapien
tttccacattggatttttctctata

SEQ ID NO: 4384101 - DNA, 25 bp, Homo sapien
ttaatgaccaagtataggaagaaga

SEQ ID NO: 4384102 - DNA, 25 bp, Homo sapien
tggtggacttaagatttgaacctgt

SEQ ID NO: 4384103 - DNA, 25 bp, Homo sapien
cctgcctcagtcatgaggttggaaa

SEQ ID NO: 4384104 - DNA, 25 bp, Homo sapien
gaaccatgagtctcagagaagctaa

SEQ ID NO: 4384105 - DNA, 25 bp, Homo sapien
taaatgagtccaatttttgcctgcc

SEQ ID NO: 4384106 - DNA, 25 bp, Homo sapien
tgctttctggtgtctggtgacagct

SEQ ID NO: 4384107 - DNA, 25 bp, Homo sapien
tacttcttggatcaaggcttgagcc

SEQ ID NO: 4384108 - DNA, 25 bp, Homo sapien
ttcttaggacttgacacccataccc

SEQ ID NO: 4384109 - DNA, 25 bp, Homo sapien
cagtctggcctatccacttgtaacc

SEQ ID NO: 4384110 - DNA, 25 bp, Homo sapien
gaacctcttgcaatcctgcctgtag

SEQ ID NO: 4384111 - DNA, 25 bp, Homo sapien
tcactgataagtccggagagttacc

SEQ ID NO: 4384112 - DNA, 25 bp, Homo sapien
tagggcctactccaacaagtttgag

SEQ ID NO: 4384113 - DNA, 25 bp, Homo sapien
ttccctcggctgtagagtatccagg

SEQ ID NO: 4384114 - DNA, 25 bp, Homo sapien
actgtgaaagatccaaaggtgaaga

SEQ ID NO: 4384115 - DNA, 25 bp, Homo sapien
aatctgtagtacaccgaactgggaa

SEQ ID NO: 4384116 - DNA, 25 bp, Homo sapien
cgaactgggaactgtgaaagatcca

SEQ ID NO: 4384117 - DNA, 25 bp, Homo sapien
atttagcaagtacaatctgtagtac

SEQ ID NO: 4384118 - DNA, 25 bp, Homo sapien
ctttgcttcggcaattattccctct

SEQ ID NO: 4384119 - DNA, 25 bp, Homo sapien
gatctttgcttcggcaattattccc

SEQ ID NO: 4384120 - DNA, 25 bp, Homo sapien
tctttgcttcggcaattattccctc

SEQ ID NO: 4384121 - DNA, 25 bp, Homo sapien
tttgcttcggcaattattccctctc

SEQ ID NO: 4384122 - DNA, 25 bp, Homo sapien
cagcatcctttgtgacttttgtatg

SEQ ID NO: 4384123 - DNA, 25 bp, Homo sapien
agcatcctttgtgacttttgtatgc

SEQ ID NO: 4384124 - DNA, 25 bp, Homo sapien
tcagcatcctttgtgacttttgtat

SEQ ID NO: 4384125 - DNA, 25 bp, Homo sapien
catcctttgtgacttttgtatgctt

SEQ ID NO: 4384126 - DNA, 25 bp, Homo sapien
tggccccactccctattaagaatgt

SEQ ID NO: 4384127 - DNA, 25 bp, Homo sapien
caagaggcaatatttaatggtgcaa

SEQ ID NO: 4384128 - DNA, 25 bp, Homo sapien
gaagggctgcttagaatatactagc

SEQ ID NO: 4384129 - DNA, 25 bp, Homo sapien
tatcaaaagaccgaatgtcaccctt

SEQ ID NO: 4384130 - DNA, 25 bp, Homo sapien
ttgtcgttgttgttccaaactgagt

SEQ ID NO: 4384131 - DNA, 25 bp, Homo sapien
tctatttttatggacgcctttctga

SEQ ID NO: 4384132 - DNA, 25 bp, Homo sapien
tccaaactgagttgttctattttta

SEQ ID NO: 4384133 - DNA, 25 bp, Homo sapien
tcttcagactggcaagccagtattt

SEQ ID NO: 4384134 - DNA, 25 bp, Homo sapien
tagtgaacgatccttaagccttagt

SEQ ID NO: 4384135 - DNA, 25 bp, Homo sapien
tgaacgatccttaagccttagtaaa

SEQ ID NO: 4384136 - DNA, 25 bp, Homo sapien
gtgaacgatccttaagccttagtaa

SEQ ID NO: 4384137 - DNA, 25 bp, Homo sapien
atagtgaacgatccttaagccttag

SEQ ID NO: 4384138 - DNA, 25 bp, Homo sapien
gaaagatgtacgctcataggaatgg

SEQ ID NO: 4384139 - DNA, 25 bp, Homo sapien
cgctcataggaatggaagtattagg

SEQ ID NO: 4384140 - DNA, 25 bp, Homo sapien
gaagtttcagatgaagaccctgtca

SEQ ID NO: 4384141 - DNA, 25 bp, Homo sapien
agtattaggtgatcctgcaaacact

SEQ ID NO: 4384142 - DNA, 25 bp, Homo sapien
tgccatcttttggacagttgctccc

SEQ ID NO: 4384143 - DNA, 25 bp, Homo sapien
ctaattgatgccatcttttggacag

SEQ ID NO: 4384144 - DNA, 25 bp, Homo sapien
atcttttggacagttgctcccctgc

SEQ ID NO: 4384145 - DNA, 25 bp, Homo sapien
tgatgccatcttttggacagttgct

SEQ ID NO: 4384146 - DNA, 25 bp, Homo sapien
tgctatcaagagtagctttgaccat

SEQ ID NO: 4384147 - DNA, 25 bp, Homo sapien
ctttggccctgctatcaagagtagc

SEQ ID NO: 4384148 - DNA, 25 bp, Homo sapien
gccctgctatcaagagtagctttga

SEQ ID NO: 4384149 - DNA, 25 bp, Homo sapien
tggccctgctatcaagagtagcttt

SEQ ID NO: 4384150 - DNA, 25 bp, Homo sapien
acaaattggcatatcatttttgcac

SEQ ID NO: 4384151 - DNA, 25 bp, Homo sapien
caaattggcatatcatttttgcaca

SEQ ID NO: 4384152 - DNA, 25 bp, Homo sapien
tggatggaaagctttgcaatgcttt

SEQ ID NO: 4384153 - DNA, 25 bp, Homo sapien
gaaagctttgcaatgctttgtaaag

SEQ ID NO: 4384154 - DNA, 25 bp, Homo sapien
tgacttctatctccctgtgttggat

SEQ ID NO: 4384155 - DNA, 25 bp, Homo sapien
ggagaaatgacttctatctccctgt

SEQ ID NO: 4384156 - DNA, 25 bp, Homo sapien
gaggtggaagtgaacagccgtttcc

SEQ ID NO: 4384157 - DNA, 25 bp, Homo sapien
agaggtggaagtgaacagccgtttc

SEQ ID NO: 4384158 - DNA, 25 bp, Homo sapien
cagaggtggaagtgaacagccgttt

SEQ ID NO: 4384159 - DNA, 25 bp, Homo sapien
ttctatacctttcctctgacctttc

SEQ ID NO: 4384160 - DNA, 25 bp, Homo sapien
ggcacagatcccttctatacctttc

SEQ ID NO: 4384161 - DNA, 25 bp, Homo sapien
ctgtggcacagatcccttctatacc

SEQ ID NO: 4384162 - DNA, 25 bp, Homo sapien
gatcccttctatacctttcctctga

SEQ ID NO: 4384163 - DNA, 25 bp, Homo sapien
tacattaccccatactgaacatatt

SEQ ID NO: 4384164 - DNA, 25 bp, Homo sapien
cagcggctgcatacattaccccata

SEQ ID NO: 4384165 - DNA, 25 bp, Homo sapien
ggctgcatacattaccccatactga

SEQ ID NO: 4384166 - DNA, 25 bp, Homo sapien
acaacagcggctgcatacattaccc

SEQ ID NO: 4384167 - DNA, 25 bp, Homo sapien
cctgaatcttgttaactgaatttgg

SEQ ID NO: 4384168 - DNA, 25 bp, Homo sapien
tgaatcttgttaactgaatttggtc

SEQ ID NO: 4384169 - DNA, 25 bp, Homo sapien
gaatcttgttaactgaatttggtcc

SEQ ID NO: 4384170 - DNA, 25 bp, Homo sapien
acctgaatcttgttaactgaatttg

SEQ ID NO: 4384171 - DNA, 25 bp, Homo sapien
gcatttcgttgcagcttgtctaaac

SEQ ID NO: 4384172 - DNA, 25 bp, Homo sapien
aatgctgggccaatactgtgctgct

SEQ ID NO: 4384173 - DNA, 25 bp, Homo sapien
ttgctgtgcctctgatacatccgtt

SEQ ID NO: 4384174 - DNA, 25 bp, Homo sapien
tgctctttagctgctccgctttgcc

SEQ ID NO: 4384175 - DNA, 25 bp, Homo sapien
aaggtgaacagttcagacagggtga

SEQ ID NO: 4384176 - DNA, 25 bp, Homo sapien
aggtgaacagttcagacagggtgaa

SEQ ID NO: 4384177 - DNA, 25 bp, Homo sapien
caacaaggtgaacagttcagacagg

SEQ ID NO: 4384178 - DNA, 25 bp, Homo sapien
tgttcaacaaggtgaacagttcaga

SEQ ID NO: 4384179 - DNA, 25 bp, Homo sapien
ggatcacccactgggagtttcatct

SEQ ID NO: 4384180 - DNA, 25 bp, Homo sapien
tgcaggatcacccactgggagtttc

SEQ ID NO: 4384181 - DNA, 25 bp, Homo sapien
gatcacccactgggagtttcatctt

SEQ ID NO: 4384182 - DNA, 25 bp, Homo sapien
gtgcaggatcacccactgggagttt

SEQ ID NO: 4384183 - DNA, 25 bp, Homo sapien
tatattaggagaggatgatgctatg

SEQ ID NO: 4384184 - DNA, 25 bp, Homo sapien
tattaggagaggatgatgctatgac

SEQ ID NO: 4384185 - DNA, 25 bp, Homo sapien
agaggatgatgctatgactttctca

SEQ ID NO: 4384186 - DNA, 25 bp, Homo sapien
ctttatattaggagaggatgatgct

SEQ ID NO: 4384187 - DNA, 25 bp, Homo sapien
tcacacgaggatgcttgtttctcca

SEQ ID NO: 4384188 - DNA, 25 bp, Homo sapien
ttctccattagtgtgaatggtttca

SEQ ID NO: 4384189 - DNA, 25 bp, Homo sapien
cacgaggatgcttgtttctccatta

SEQ ID NO: 4384190 - DNA, 25 bp, Homo sapien
tccattagtgtgaatggtttcacat

SEQ ID NO: 4384191 - DNA, 25 bp, Homo sapien
tgggaagccgtgagttccaagagca

SEQ ID NO: 4384192 - DNA, 25 bp, Homo sapien
ctgaggtttgggaagccgtgagttc

SEQ ID NO: 4384193 - DNA, 25 bp, Homo sapien
gtttgggaagccgtgagttccaaga

SEQ ID NO: 4384194 - DNA, 25 bp, Homo sapien
aagccgtgagttccaagagcagctg

SEQ ID NO: 4384195 - DNA, 25 bp, Homo sapien
gccaaaccatcaagatcaaactgtg

SEQ ID NO: 4384196 - DNA, 25 bp, Homo sapien
aaatccctttcaatctttgaggcag

SEQ ID NO: 4384197 - DNA, 25 bp, Homo sapien
gatgaacttggcatgaaaggagaga

SEQ ID NO: 4384198 - DNA, 25 bp, Homo sapien
cagctggtggtgcaatgagtctcag

SEQ ID NO: 4384199 - DNA, 25 bp, Homo sapien
tttcaaatagttacttgcggcaatg

SEQ ID NO: 4384200 - DNA, 25 bp, Homo sapien
tacttgcggcaatgcattgtctctg

SEQ ID NO: 4384201 - DNA, 25 bp, Homo sapien
taagagatgacactaaacgttagac

SEQ ID NO: 4384202 - DNA, 25 bp, Homo sapien
gaagagtgtcttcagatatcacaga

SEQ ID NO: 4384203 - DNA, 25 bp, Homo sapien
tccccaccaccagtccattggcaaa

SEQ ID NO: 4384204 - DNA, 25 bp, Homo sapien
atccccaccaccagtccattggcaa

SEQ ID NO: 4384205 - DNA, 25 bp, Homo sapien
tatgccagcacttaaaggacccctc

SEQ ID NO: 4384206 - DNA, 25 bp, Homo sapien
ttagaatgattgctatccaggtcca

SEQ ID NO: 4384207 - DNA, 25 bp, Homo sapien
ctctgaaaatgacctgactggtacc

SEQ ID NO: 4384208 - DNA, 25 bp, Homo sapien
tcgtagcctaccatcgctatgccag

SEQ ID NO: 4384209 - DNA, 25 bp, Homo sapien
ttgtgcagagatagagaagatgacc

SEQ ID NO: 4384210 - DNA, 25 bp, Homo sapien
aaaagaagctcctcagtcttctgca

SEQ ID NO: 4384211 - DNA, 25 bp, Homo sapien
ctgaaaagaagctcctcagtcttct

SEQ ID NO: 4384212 - DNA, 25 bp, Homo sapien
gaaaagaagctcctcagtcttctgc

SEQ ID NO: 4384213 - DNA, 25 bp, Homo sapien
aagaagctcctcagtcttctgcata

SEQ ID NO: 4384214 - DNA, 25 bp, Homo sapien
ccagatgtcaccttccttgtcatgt

SEQ ID NO: 4384215 - DNA, 25 bp, Homo sapien
cacagagcgcttagtaggaaatcca

SEQ ID NO: 4384216 - DNA, 25 bp, Homo sapien
tcttttcgtgtgaagtggtagggaa

SEQ ID NO: 4384217 - DNA, 25 bp, Homo sapien
gggaagggccattgcatatataata

SEQ ID NO: 4384218 - DNA, 25 bp, Homo sapien
cccttctcttccaaccaactctttg

SEQ ID NO: 4384219 - DNA, 25 bp, Homo sapien
cggtctttgtgctctagtcccttct

SEQ ID NO: 4384220 - DNA, 25 bp, Homo sapien
tctttgtgctctagtcccttctctt

SEQ ID NO: 4384221 - DNA, 25 bp, Homo sapien
aactctttgctctgttgggcaccat

SEQ ID NO: 4384222 - DNA, 25 bp, Homo sapien
gaccctggaccatcaatttcagtgt

SEQ ID NO: 4384223 - DNA, 25 bp, Homo sapien
aatgaccctggaccatcaatttcag

SEQ ID NO: 4384224 - DNA, 25 bp, Homo sapien
cccttattaaatgaccctggaccat

SEQ ID NO: 4384225 - DNA, 25 bp, Homo sapien
tattaaatgaccctggaccatcaat

SEQ ID NO: 4384226 - DNA, 25 bp, Homo sapien
gctgttgctgaacttctctagattt

SEQ ID NO: 4384227 - DNA, 25 bp, Homo sapien
gctgaacttctctagatttacagcc

SEQ ID NO: 4384228 - DNA, 25 bp, Homo sapien
ctgtgctgttgctgaacttctctag

SEQ ID NO: 4384229 - DNA, 25 bp, Homo sapien
cttctctagatttacagccttcaca

SEQ ID NO: 4384230 - DNA, 25 bp, Homo sapien
catatacggtctgttgtttccagag

SEQ ID NO: 4384231 - DNA, 25 bp, Homo sapien
tatatcacttacactggcaccaaaa

SEQ ID NO: 4384232 - DNA, 25 bp, Homo sapien
taatgagtgatcataccaggttgca

SEQ ID NO: 4384233 - DNA, 25 bp, Homo sapien
tacctaggtctaaatctgataaaac

SEQ ID NO: 4384234 - DNA, 25 bp, Homo sapien
tctcctaaacttggctgaactagcc

SEQ ID NO: 4384235 - DNA, 25 bp, Homo sapien
ctcagagtttacaatgagataggtt

SEQ ID NO: 4384236 - DNA, 25 bp, Homo sapien
gagataggttttgtctattggataa

SEQ ID NO: 4384237 - DNA, 25 bp, Homo sapien
gaactagcccatgaggcacactcag

SEQ ID NO: 4384238 - DNA, 25 bp, Homo sapien
tgttctctctgatctcaccttctga

SEQ ID NO: 4384239 - DNA, 25 bp, Homo sapien
tctgaaagccagtcattccatttgc

SEQ ID NO: 4384240 - DNA, 25 bp, Homo sapien
ctctgatctcaccttctgaaagcca

SEQ ID NO: 4384241 - DNA, 25 bp, Homo sapien
cttgaatgttctctctgatctcacc

SEQ ID NO: 4384242 - DNA, 25 bp, Homo sapien
attgatagataatacttttcatgga

SEQ ID NO: 4384243 - DNA, 25 bp, Homo sapien
ttgatagataatacttttcatggaa

SEQ ID NO: 4384244 - DNA, 25 bp, Homo sapien
gaaggttccaataagtattactcca

SEQ ID NO: 4384245 - DNA, 25 bp, Homo sapien
caattactgaaggttccaataagta

SEQ ID NO: 4384246 - DNA, 25 bp, Homo sapien
tactgaaggttccaataagtattac

SEQ ID NO: 4384247 - DNA, 25 bp, Homo sapien
tccccaattactgaaggttccaata

SEQ ID NO: 4384248 - DNA, 25 bp, Homo sapien
tctctctaatagtccaagaccttcc

SEQ ID NO: 4384249 - DNA, 25 bp, Homo sapien
aagaccttccctccaggtgacattt

SEQ ID NO: 4384250 - DNA, 25 bp, Homo sapien
ggaattcatagtataaagcctagaa

SEQ ID NO: 4384251 - DNA, 25 bp, Homo sapien
gggttggtgcctgaagatagtaaac

SEQ ID NO: 4384252 - DNA, 25 bp, Homo sapien
aataaacccggaatctctggattgt

SEQ ID NO: 4384253 - DNA, 25 bp, Homo sapien
aaataaacccggaatctctggattg

SEQ ID NO: 4384254 - DNA, 25 bp, Homo sapien
taaacccggaatctctggattgtaa

SEQ ID NO: 4384255 - DNA, 25 bp, Homo sapien
ataaataaacccggaatctctggat

SEQ ID NO: 4384256 - DNA, 25 bp, Homo sapien
tctctgctttcggagaaagcagatg

SEQ ID NO: 4384257 - DNA, 25 bp, Homo sapien
ctgctttcggagaaagcagatgcct

SEQ ID NO: 4384258 - DNA, 25 bp, Homo sapien
tagtaaagcttgctatttggtaaga

SEQ ID NO: 4384259 - DNA, 25 bp, Homo sapien
gaaattaatagtaaagcttgctatt

SEQ ID NO: 4384260 - DNA, 25 bp, Homo sapien
ggcaggggaccctccaattctttca

SEQ ID NO: 4384261 - DNA, 25 bp, Homo sapien
attcccatttttatgccaccctcta

SEQ ID NO: 4384262 - DNA, 25 bp, Homo sapien
aactccctcttagagtgcatagatg

SEQ ID NO: 4384263 - DNA, 25 bp, Homo sapien
taccacactatcaaccttactcatt

SEQ ID NO: 4384264 - DNA, 25 bp, Homo sapien
tagtctttgtagattaccaactggc

SEQ ID NO: 4384265 - DNA, 25 bp, Homo sapien
gtctttgtagattaccaactggcaa

SEQ ID NO: 4384266 - DNA, 25 bp, Homo sapien
tggctagtctttgtagattaccaac

SEQ ID NO: 4384267 - DNA, 25 bp, Homo sapien
ctttgtagattaccaactggcaatc

SEQ ID NO: 4384268 - DNA, 25 bp, Homo sapien
ggcctcatattacattttgaatatt

SEQ ID NO: 4384269 - DNA, 25 bp, Homo sapien
cggcctcatattacattttgaatat

SEQ ID NO: 4384270 - DNA, 25 bp, Homo sapien
tgcccggcctcatattacattttga

SEQ ID NO: 4384271 - DNA, 25 bp, Homo sapien
ccggcctcatattacattttgaata

SEQ ID NO: 4384272 - DNA, 25 bp, Homo sapien
tcagcaattaaaacttctaaaggtc

SEQ ID NO: 4384273 - DNA, 25 bp, Homo sapien
ttctaaaggtcttggtgaagtgcca

SEQ ID NO: 4384274 - DNA, 25 bp, Homo sapien
aggtcttggtgaagtgccacctcac

SEQ ID NO: 4384275 - DNA, 25 bp, Homo sapien
acttctaaaggtcttggtgaagtgc

SEQ ID NO: 4384276 - DNA, 25 bp, Homo sapien
gaaagggcctcatttgcactagtgg

SEQ ID NO: 4384277 - DNA, 25 bp, Homo sapien
aaatggagtctgctgatttgcttta

SEQ ID NO: 4384278 - DNA, 25 bp, Homo sapien
ggttttcatgtcacaatccattaag

SEQ ID NO: 4384279 - DNA, 25 bp, Homo sapien
cattaagagttgaaatggagtctgc

SEQ ID NO: 4384280 - DNA, 25 bp, Homo sapien
tccagcctcttcaaactttcggaaa

SEQ ID NO: 4384281 - DNA, 25 bp, Homo sapien
tcaaactttcggaaagttttgctca

SEQ ID NO: 4384282 - DNA, 25 bp, Homo sapien
cagcctcttcaaactttcggaaagt

SEQ ID NO: 4384283 - DNA, 25 bp, Homo sapien
caaactttcggaaagttttgctcat

SEQ ID NO: 4384284 - DNA, 25 bp, Homo sapien
ctttttgacctttggtggcttctga

SEQ ID NO: 4384285 - DNA, 25 bp, Homo sapien
taggtgctttttgacctttggtggc

SEQ ID NO: 4384286 - DNA, 25 bp, Homo sapien
tcatttaggtgctttttgacctttg

SEQ ID NO: 4384287 - DNA, 25 bp, Homo sapien
tcatgaaatgagatacagtcgctac

SEQ ID NO: 4384288 - DNA, 25 bp, Homo sapien
aaaccttttgcagaatgttctcttc

SEQ ID NO: 4384289 - DNA, 25 bp, Homo sapien
acagggagaccagcaaaccttttgc

SEQ ID NO: 4384290 - DNA, 25 bp, Homo sapien
ctgtaagggaacagggagaccagca

SEQ ID NO: 4384291 - DNA, 25 bp, Homo sapien
accagcaaaccttttgcagaatgtt

SEQ ID NO: 4384292 - DNA, 25 bp, Homo sapien
catgtatgcattcacaccggcagca

SEQ ID NO: 4384293 - DNA, 25 bp, Homo sapien
tgccattgaaggagctaagtctgcc

SEQ ID NO: 4384294 - DNA, 25 bp, Homo sapien
caggtaacagagcatcagatcaggc

SEQ ID NO: 4384295 - DNA, 25 bp, Homo sapien
ggctcagccacactatgcagggttt

SEQ ID NO: 4384296 - DNA, 25 bp, Homo sapien
gaaatctgctctgccgtcaagcttc

SEQ ID NO: 4384297 - DNA, 25 bp, Homo sapien
ctctgccgtcaagcttcaggttcat

SEQ ID NO: 4384298 - DNA, 25 bp, Homo sapien
atctgctctgccgtcaagcttcagg

SEQ ID NO: 4384299 - DNA, 25 bp, Homo sapien
ttgaaatctgctctgccgtcaagct

SEQ ID NO: 4384300 - DNA, 25 bp, Homo sapien
gctggccctgtctttaagtattgag

SEQ ID NO: 4384301 - DNA, 25 bp, Homo sapien
ttttcattttgcaccgagccctgca

SEQ ID NO: 4384302 - DNA, 25 bp, Homo sapien
tccctagtctgaataaccagtttcc

SEQ ID NO: 4384303 - DNA, 25 bp, Homo sapien
taccctttcaatgtagcagaaatgc

SEQ ID NO: 4384304 - DNA, 25 bp, Homo sapien
aactggcatccctgattgtgtgcaa

SEQ ID NO: 4384305 - DNA, 25 bp, Homo sapien
acagatcaatgagccaaactggcat

SEQ ID NO: 4384306 - DNA, 25 bp, Homo sapien
tcatcacatctttgacctggacctg

SEQ ID NO: 4384307 - DNA, 25 bp, Homo sapien
cctggacctggatcttacagatcaa

SEQ ID NO: 4384308 - DNA, 25 bp, Homo sapien
tgtctgtatctgacggctgaggcac

SEQ ID NO: 4384309 - DNA, 25 bp, Homo sapien
gagcccgtgtgctggtattttccct

SEQ ID NO: 4384310 - DNA, 25 bp, Homo sapien
tctgaaaacacgaaagtattcctgg

SEQ ID NO: 4384311 - DNA, 25 bp, Homo sapien
tgtcccaattaagcaagcctacttg

SEQ ID NO: 4384312 - DNA, 25 bp, Homo sapien
gcagggaggatatgtaattggacat

SEQ ID NO: 4384313 - DNA, 25 bp, Homo sapien
tgtttctgaactggatggaagctct

SEQ ID NO: 4384314 - DNA, 25 bp, Homo sapien
tggaagctctgcaaaaatcctcctg

SEQ ID NO: 4384315 - DNA, 25 bp, Homo sapien
ttcagttttatattgttctgaaggt

SEQ ID NO: 4384316 - DNA, 25 bp, Homo sapien
tgttggacagccagaaacctttctg

SEQ ID NO: 4384317 - DNA, 25 bp, Homo sapien
ctgctgggagactaaagaaaagggc

SEQ ID NO: 4384318 - DNA, 25 bp, Homo sapien
taaacccctaaacacttggctgcga

SEQ ID NO: 4384319 - DNA, 25 bp, Homo sapien
ctttctgagtagtgtctctccctta

SEQ ID NO: 4384320 - DNA, 25 bp, Homo sapien
tatgttatatgaatccaacttaaac

SEQ ID NO: 4384321 - DNA, 25 bp, Homo sapien
tattttgctacattatgcacctgtt

SEQ ID NO: 4384322 - DNA, 25 bp, Homo sapien
tatcacataagtctaagcatatata

SEQ ID NO: 4384323 - DNA, 25 bp, Homo sapien
gaattatagcaaacatctttgactt

SEQ ID NO: 4384324 - DNA, 25 bp, Homo sapien
aagctctaaatttaaagtccagaag

SEQ ID NO: 4384325 - DNA, 25 bp, Homo sapien
tcaggaactctctaagctctaaatt

SEQ ID NO: 4384326 - DNA, 25 bp, Homo sapien
tttgaatcattctcaggaactctct

SEQ ID NO: 4384327 - DNA, 25 bp, Homo sapien
tcattctcaggaactctctaagctc

SEQ ID NO: 4384328 - DNA, 25 bp, Homo sapien
cctgagacagctgtatgttccaaaa

SEQ ID NO: 4384329 - DNA, 25 bp, Homo sapien
gccctgagacagctgtatgttccaa

SEQ ID NO: 4384330 - DNA, 25 bp, Homo sapien
aaatatactccacactcacactaac

SEQ ID NO: 4384331 - DNA, 25 bp, Homo sapien
gacagctgtatgttccaaaatatac

SEQ ID NO: 4384332 - DNA, 25 bp, Homo sapien
ttcaaggtcagatcattacaaacac

SEQ ID NO: 4384333 - DNA, 25 bp, Homo sapien
cttcaaggtcagatcattacaaaca

SEQ ID NO: 4384334 - DNA, 25 bp, Homo sapien
atcattacaaacacaaccagaaaaa

SEQ ID NO: 4384335 - DNA, 25 bp, Homo sapien
gctactaaatttggagagtaaagta

SEQ ID NO: 4384336 - DNA, 25 bp, Homo sapien
atttggagagtaaagtatagtggac

SEQ ID NO: 4384337 - DNA, 25 bp, Homo sapien
gtaaagtatagtggacagagatgga

SEQ ID NO: 4384338 - DNA, 25 bp, Homo sapien
tgagctactaaatttggagagtaaa

SEQ ID NO: 4384339 - DNA, 25 bp, Homo sapien
gagcgtcccgttgtttactatctgg

SEQ ID NO: 4384340 - DNA, 25 bp, Homo sapien
tattccaagatgttgcttgagcgtc

SEQ ID NO: 4384341 - DNA, 25 bp, Homo sapien
tgttgcttgagcgtcccgttgttta

SEQ ID NO: 4384342 - DNA, 25 bp, Homo sapien
aagatgttgcttgagcgtcccgttg

SEQ ID NO: 4384343 - DNA, 25 bp, Homo sapien
gtactaaccatggcagaccctgctc

SEQ ID NO: 4384344 - DNA, 25 bp, Homo sapien
ggcatgctcagggtggtagggccag

SEQ ID NO: 4384345 - DNA, 25 bp, Homo sapien
gattgggcatgctcagggtggtagg

SEQ ID NO: 4384346 - DNA, 25 bp, Homo sapien
taaccatggcagaccctgctcagct

SEQ ID NO: 4384347 - DNA, 25 bp, Homo sapien
gacattgcaggggtaggaaaatctt

SEQ ID NO: 4384348 - DNA, 25 bp, Homo sapien
ggacattgcaggggtaggaaaatct

SEQ ID NO: 4384349 - DNA, 25 bp, Homo sapien
ttgcaggggtaggaaaatcttgcaa

SEQ ID NO: 4384350 - DNA, 25 bp, Homo sapien
cattgcaggggtaggaaaatcttgc

SEQ ID NO: 4384351 - DNA, 25 bp, Homo sapien
ttctctagacttgctgttggacctg

SEQ ID NO: 4384352 - DNA, 25 bp, Homo sapien
caaagctccaccaggtggtcaggca

SEQ ID NO: 4384353 - DNA, 25 bp, Homo sapien
tgggaaaattgacctagcacagtgt

SEQ ID NO: 4384354 - DNA, 25 bp, Homo sapien
caccaggtggtcaggcactgggaaa

SEQ ID NO: 4384355 - DNA, 25 bp, Homo sapien
tgcatccaaaaagtacatgaggttg

SEQ ID NO: 4384356 - DNA, 25 bp, Homo sapien
tcctcgaggatgctgttaagaaaga

SEQ ID NO: 4384357 - DNA, 25 bp, Homo sapien
agtgaagctctggtgtttcaactcc

SEQ ID NO: 4384358 - DNA, 25 bp, Homo sapien
aaagaactggctactcgaaagtgaa

SEQ ID NO: 4384359 - DNA, 25 bp, Homo sapien
gaattttcaagctctcgacaggacc

SEQ ID NO: 4384360 - DNA, 25 bp, Homo sapien
ccttggaacttgctcaaaaggcaga

SEQ ID NO: 4384361 - DNA, 25 bp, Homo sapien
ttggcttcagactagcagtgtcacc

SEQ ID NO: 4384362 - DNA, 25 bp, Homo sapien
ccagtaggtggcattactttaacca

SEQ ID NO: 4384363 - DNA, 25 bp, Homo sapien
catgttaaagatgccctctttgtca

SEQ ID NO: 4384364 - DNA, 25 bp, Homo sapien
ggtggccatgttagtggccatgtta

SEQ ID NO: 4384365 - DNA, 25 bp, Homo sapien
gcctatagaagtcccgtgggtggcc

SEQ ID NO: 4384366 - DNA, 25 bp, Homo sapien
tgttttgatgcctatagaagtcccg

SEQ ID NO: 4384367 - DNA, 25 bp, Homo sapien
ttaaaaagtactcatatagtatgac

SEQ ID NO: 4384368 - DNA, 25 bp, Homo sapien
aagtactcatatagtatgactgaag

SEQ ID NO: 4384369 - DNA, 25 bp, Homo sapien
ctcatatagtatgactgaagtttcc

SEQ ID NO: 4384370 - DNA, 25 bp, Homo sapien
aaaagtactcatatagtatgactga

SEQ ID NO: 4384371 - DNA, 25 bp, Homo sapien
cacttgcattggaaagtgaagagga

SEQ ID NO: 4384372 - DNA, 25 bp, Homo sapien
tgcttggtctgcaagcccccagata

SEQ ID NO: 4384373 - DNA, 25 bp, Homo sapien
gaaggagctggttgccatgaagcta

SEQ ID NO: 4384374 - DNA, 25 bp, Homo sapien
gatatccactgcagccctgaaggag

SEQ ID NO: 4384375 - DNA, 25 bp, Homo sapien
agccctcatgttcagcacaccataa

SEQ ID NO: 4384376 - DNA, 25 bp, Homo sapien
cataaccaggactgtttaatgggca

SEQ ID NO: 4384377 - DNA, 25 bp, Homo sapien
tgttcagcacaccataaccaggact

SEQ ID NO: 4384378 - DNA, 25 bp, Homo sapien
gggcaatgctcatctgaggcatcca

SEQ ID NO: 4384379 - DNA, 25 bp, Homo sapien
ccatcatcatagcagccagatttta

SEQ ID NO: 4384380 - DNA, 25 bp, Homo sapien
catcatcatagcagccagattttac

SEQ ID NO: 4384381 - DNA, 25 bp, Homo sapien
catcatagcagccagattttaccaa

SEQ ID NO: 4384382 - DNA, 25 bp, Homo sapien
catagcagccagattttaccaaggg

SEQ ID NO: 4384383 - DNA, 25 bp, Homo sapien
ttaatatgcagagacctaaatcctg

SEQ ID NO: 4384384 - DNA, 25 bp, Homo sapien
tagagagtccgaagcatatggcaga

SEQ ID NO: 4384385 - DNA, 25 bp, Homo sapien
gattagttcttagtcacacactgtg

SEQ ID NO: 4384386 - DNA, 25 bp, Homo sapien
catggcccaagaagcatagagagtc

SEQ ID NO: 4384387 - DNA, 25 bp, Homo sapien
agacagcctggcctgatcggcatcc

SEQ ID NO: 4384388 - DNA, 25 bp, Homo sapien
tgatcggcatccataaaagcatttg

SEQ ID NO: 4384389 - DNA, 25 bp, Homo sapien
agtactgggccctcaacagccacga

SEQ ID NO: 4384390 - DNA, 25 bp, Homo sapien
catccataaaagcatttgctccctg

SEQ ID NO: 4384391 - DNA, 25 bp, Homo sapien
tttcctgtccgtgctaatagcatca

SEQ ID NO: 4384392 - DNA, 25 bp, Homo sapien
cacactccctcgagttccatgagtt

SEQ ID NO: 4384393 - DNA, 25 bp, Homo sapien
tctataccaccagtcactgattcag

SEQ ID NO: 4384394 - DNA, 25 bp, Homo sapien
tagcatcatctataccaccagtcac

SEQ ID NO: 4384395 - DNA, 25 bp, Homo sapien
atatcctgcacactgtaccagctcc

SEQ ID NO: 4384396 - DNA, 25 bp, Homo sapien
tgccatatcctgcacactgtaccag

SEQ ID NO: 4384397 - DNA, 25 bp, Homo sapien
ccatatcctgcacactgtaccagct

SEQ ID NO: 4384398 - DNA, 25 bp, Homo sapien
tctgccatatcctgcacactgtacc

SEQ ID NO: 4384399 - DNA, 25 bp, Homo sapien
tggacccaaagcactccatggcgtc

SEQ ID NO: 4384400 - DNA, 25 bp, Homo sapien
gacccaaagcactccatggcgtcca

SEQ ID NO: 4384401 - DNA, 25 bp, Homo sapien
ggtgatattcttgctggtcttgaca

SEQ ID NO: 4384402 - DNA, 25 bp, Homo sapien
cccaaagcactccatggcgtccaca

SEQ ID NO: 4384403 - DNA, 25 bp, Homo sapien
tgggtctagcattgccatggacaag

SEQ ID NO: 4384404 - DNA, 25 bp, Homo sapien
catttgtgttgggtctagcattgcc

SEQ ID NO: 4384405 - DNA, 25 bp, Homo sapien
gggtctagcattgccatggacaaga

SEQ ID NO: 4384406 - DNA, 25 bp, Homo sapien
tgtgttgggtctagcattgccatgg

SEQ ID NO: 4384407 - DNA, 25 bp, Homo sapien
cagtgctcaaagcataaaagtgttc

SEQ ID NO: 4384408 - DNA, 25 bp, Homo sapien
ctcaaagcataaaagtgttctgctg

SEQ ID NO: 4384409 - DNA, 25 bp, Homo sapien
ctccagtgctcaaagcataaaagtg

SEQ ID NO: 4384410 - DNA, 25 bp, Homo sapien
gtgctcaaagcataaaagtgttctg

SEQ ID NO: 4384411 - DNA, 25 bp, Homo sapien
gacacggtccacgtgcttgccattg

SEQ ID NO: 4384412 - DNA, 25 bp, Homo sapien
gcttgccattgatggtgatgtggaa

SEQ ID NO: 4384413 - DNA, 25 bp, Homo sapien
aggagacacggtccacgtgcttgcc

SEQ ID NO: 4384414 - DNA, 25 bp, Homo sapien
acggtccacgtgcttgccattgatg

SEQ ID NO: 4384415 - DNA, 25 bp, Homo sapien
acagggagcttcagcattttgagca

SEQ ID NO: 4384416 - DNA, 25 bp, Homo sapien
attttgagcaactgtccctttagcc

SEQ ID NO: 4384417 - DNA, 25 bp, Homo sapien
cacagggagcttcagcattttgagc

SEQ ID NO: 4384418 - DNA, 25 bp, Homo sapien
tttgagcaactgtccctttagccat

SEQ ID NO: 4384419 - DNA, 25 bp, Homo sapien
ttcatctccactactataaacagct

SEQ ID NO: 4384420 - DNA, 25 bp, Homo sapien
tcatctccactactataaacagcta

SEQ ID NO: 4384421 - DNA, 25 bp, Homo sapien
cttcatctccactactataaacagc

SEQ ID NO: 4384422 - DNA, 25 bp, Homo sapien
tcatctagatactgctctttcctgg

SEQ ID NO: 4384423 - DNA, 25 bp, Homo sapien
gggttgtgcccactttgaaggccat

SEQ ID NO: 4384424 - DNA, 25 bp, Homo sapien
caatgtacaagctttcatctagata

SEQ ID NO: 4384425 - DNA, 25 bp, Homo sapien
cacattctagggttgtgcccacttt

SEQ ID NO: 4384426 - DNA, 25 bp, Homo sapien
gggcacatttgagccttctccccat

SEQ ID NO: 4384427 - DNA, 25 bp, Homo sapien
aggcaatctgataactacccagaac

SEQ ID NO: 4384428 - DNA, 25 bp, Homo sapien
atatgggcacatttgagccttctcc

SEQ ID NO: 4384429 - DNA, 25 bp, Homo sapien
gcaatctgataactacccagaacct

SEQ ID NO: 4384430 - DNA, 25 bp, Homo sapien
catattctcccaggcttagtgccaa

SEQ ID NO: 4384431 - DNA, 25 bp, Homo sapien
ttagtgccaaagaggagacaaccca

SEQ ID NO: 4384432 - DNA, 25 bp, Homo sapien
agtgtctactcccatgggcccttga

SEQ ID NO: 4384433 - DNA, 25 bp, Homo sapien
taaacaagacctattggagtactgc

SEQ ID NO: 4384434 - DNA, 25 bp, Homo sapien
ggagttttcttcacaagaaatccag

SEQ ID NO: 4384435 - DNA, 25 bp, Homo sapien
ctccagaaagcgtcactaacaatcc

SEQ ID NO: 4384436 - DNA, 25 bp, Homo sapien
atgggtctgagttaggggctttctt

SEQ ID NO: 4384437 - DNA, 25 bp, Homo sapien
agagcctccagaaagcgtcactaac

SEQ ID NO: 4384438 - DNA, 25 bp, Homo sapien
tccagaaacctcctttattctcaga

SEQ ID NO: 4384439 - DNA, 25 bp, Homo sapien
cagtggacagtattatgttttatgg

SEQ ID NO: 4384440 - DNA, 25 bp, Homo sapien
agtggacagtattatgttttatggc

SEQ ID NO: 4384441 - DNA, 25 bp, Homo sapien
tggacagtattatgttttatggcag

SEQ ID NO: 4384442 - DNA, 25 bp, Homo sapien
gtggacagtattatgttttatggca

SEQ ID NO: 4384443 - DNA, 25 bp, Homo sapien
tgctgagtgtgcattccacgttgct

SEQ ID NO: 4384444 - DNA, 25 bp, Homo sapien
gcttgctgagtgtgcattccacgtt

SEQ ID NO: 4384445 - DNA, 25 bp, Homo sapien
tgagtgtgcattccacgttgctttt

SEQ ID NO: 4384446 - DNA, 25 bp, Homo sapien
agcttgctgagtgtgcattccacgt

SEQ ID NO: 4384447 - DNA, 25 bp, Homo sapien
tagaatgcttagaggtcacgaagga

SEQ ID NO: 4384448 - DNA, 25 bp, Homo sapien
tgcttagaggtcacgaaggaaacac

SEQ ID NO: 4384449 - DNA, 25 bp, Homo sapien
ggagtagaatgcttagaggtcacga

SEQ ID NO: 4384450 - DNA, 25 bp, Homo sapien
aatgcttagaggtcacgaaggaaac

SEQ ID NO: 4384451 - DNA, 25 bp, Homo sapien
ctactgtactggtagggtcgagtga

SEQ ID NO: 4384452 - DNA, 25 bp, Homo sapien
ctgggctactgtactggtagggtcg

SEQ ID NO: 4384453 - DNA, 25 bp, Homo sapien
ggctactgtactggtagggtcgagt

SEQ ID NO: 4384454 - DNA, 25 bp, Homo sapien
tactgtactggtagggtcgagtgaa

SEQ ID NO: 4384455 - DNA, 25 bp, Homo sapien
tcgtccgttttgcatattgaaaggc

SEQ ID NO: 4384456 - DNA, 25 bp, Homo sapien
gtccgttttgcatattgaaaggctg

SEQ ID NO: 4384457 - DNA, 25 bp, Homo sapien
gctgacccacactgtttgggttcat

SEQ ID NO: 4384458 - DNA, 25 bp, Homo sapien
cttcgtccgttttgcatattgaaag

SEQ ID NO: 4384459 - DNA, 25 bp, Homo sapien
gaaggggctttctctcggttcctgc

SEQ ID NO: 4384460 - DNA, 25 bp, Homo sapien
aaggggctttctctcggttcctgct

SEQ ID NO: 4384461 - DNA, 25 bp, Homo sapien
agaaggggctttctctcggttcctg

SEQ ID NO: 4384462 - DNA, 25 bp, Homo sapien
tggctgcgctgactgaaaccctgag

SEQ ID NO: 4384463 - DNA, 25 bp, Homo sapien
ttcagcttcaacatgtccagtgtct

SEQ ID NO: 4384464 - DNA, 25 bp, Homo sapien
tctgtctgtggctgcgctgactgaa

SEQ ID NO: 4384465 - DNA, 25 bp, Homo sapien
cagcttcaacatgtccagtgtcttc

SEQ ID NO: 4384466 - DNA, 25 bp, Homo sapien
ttctaggtctatttccccattgaca

SEQ ID NO: 4384467 - DNA, 25 bp, Homo sapien
ttgacacgtggatttagtgtttgct

SEQ ID NO: 4384468 - DNA, 25 bp, Homo sapien
tcagtcttctaggtctatttcccca

SEQ ID NO: 4384469 - DNA, 25 bp, Homo sapien
tttccccattgacacgtggatttag

SEQ ID NO: 4384470 - DNA, 25 bp, Homo sapien
gctgggcaccgttctgttttctttc

SEQ ID NO: 4384471 - DNA, 25 bp, Homo sapien
tatccaagtatgcagtacgctcttg

SEQ ID NO: 4384472 - DNA, 25 bp, Homo sapien
tacgctcttgggtcgtctcatgaga

SEQ ID NO: 4384473 - DNA, 25 bp, Homo sapien
caccttggtataaatgctgctgggc

SEQ ID NO: 4384474 - DNA, 25 bp, Homo sapien
taatcatgtctgcatgaccccagag

SEQ ID NO: 4384475 - DNA, 25 bp, Homo sapien
ggccacggcataccagatcattcat

SEQ ID NO: 4384476 - DNA, 25 bp, Homo sapien
caagcaggcaagttctttgagagcc

SEQ ID NO: 4384477 - DNA, 25 bp, Homo sapien
tacctacccaagtgtgcctggcata

SEQ ID NO: 4384478 - DNA, 25 bp, Homo sapien
tgtccttgtcggaggaacaatcagt

SEQ ID NO: 4384479 - DNA, 25 bp, Homo sapien
acttggtgtccttgtcggaggaaca

SEQ ID NO: 4384480 - DNA, 25 bp, Homo sapien
gaacaatcagtggaagcttctatct

SEQ ID NO: 4384481 - DNA, 25 bp, Homo sapien
tcggaggaacaatcagtggaagctt

SEQ ID NO: 4384482 - DNA, 25 bp, Homo sapien
acttgggacctcagataccgcttca

SEQ ID NO: 4384483 - DNA, 25 bp, Homo sapien
taccgcttcaatcaccatagggcca

SEQ ID NO: 4384484 - DNA, 25 bp, Homo sapien
tagggccacacttacgtgatttata

SEQ ID NO: 4384485 - DNA, 25 bp, Homo sapien
gggcagcagtatccaactgcctgga

SEQ ID NO: 4384486 - DNA, 25 bp, Homo sapien
acagggcgggcaacctgtcccgagt

SEQ ID NO: 4384487 - DNA, 25 bp, Homo sapien
cgggcaacctgtcccgagtgacaga

SEQ ID NO: 4384488 - DNA, 25 bp, Homo sapien
ggacagggcgggcaacctgtcccga

SEQ ID NO: 4384489 - DNA, 25 bp, Homo sapien
ggcgggcaacctgtcccgagtgaca

SEQ ID NO: 4384490 - DNA, 25 bp, Homo sapien
aagggtctgcgaaacatatgtgtcc

SEQ ID NO: 4384491 - DNA, 25 bp, Homo sapien
cactggttagggtgctcctggatca

SEQ ID NO: 4384492 - DNA, 25 bp, Homo sapien
tcaagctagctacctctatgggcca

SEQ ID NO: 4384493 - DNA, 25 bp, Homo sapien
tcaggcaagacagaccagtgctcac

SEQ ID NO: 4384494 - DNA, 25 bp, Homo sapien
aatcggccccagactccagggttgt

SEQ ID NO: 4384495 - DNA, 25 bp, Homo sapien
cacccctctgcgcataaattagcag

SEQ ID NO: 4384496 - DNA, 25 bp, Homo sapien
tcttcttgaatgagactgcacacgt

SEQ ID NO: 4384497 - DNA, 25 bp, Homo sapien
gttagtggacaactttctggagacc

SEQ ID NO: 4384498 - DNA, 25 bp, Homo sapien
tctagtctaggtgtacacaagggac

SEQ ID NO: 4384499 - DNA, 25 bp, Homo sapien
gaagctactgaggtcatgtctctga

SEQ ID NO: 4384500 - DNA, 25 bp, Homo sapien
gcccctgaagataagtgcctgaagg

SEQ ID NO: 4384501 - DNA, 25 bp, Homo sapien
gaaagcttttcaggctacctctgtg

SEQ ID NO: 4384502 - DNA, 25 bp, Homo sapien
gaccaccctgcggagatcagaactg

SEQ ID NO: 4384503 - DNA, 25 bp, Homo sapien
tgctgctacctcaagtgtcatgtgg

SEQ ID NO: 4384504 - DNA, 25 bp, Homo sapien
tgcaatggcccatgcaaggtcggtg

SEQ ID NO: 4384505 - DNA, 25 bp, Homo sapien
tcccctggagctgttgtggttcaaa

SEQ ID NO: 4384506 - DNA, 25 bp, Homo sapien
ctggtgttacaaagggcccttggct

SEQ ID NO: 4384507 - DNA, 25 bp, Homo sapien
taaatcaagcatatctggaaaccac

SEQ ID NO: 4384508 - DNA, 25 bp, Homo sapien
gctaggatctactgtttcaaggagg

SEQ ID NO: 4384509 - DNA, 25 bp, Homo sapien
gaaagattccttctgtgggctcaaa

SEQ ID NO: 4384510 - DNA, 25 bp, Homo sapien
gctgttattcgatggaatgttgtca

SEQ ID NO: 4384511 - DNA, 25 bp, Homo sapien
tcaagtagaatgtaaaactctcacc

SEQ ID NO: 4384512 - DNA, 25 bp, Homo sapien
tccatctatcctaacaatctctatg

SEQ ID NO: 4384513 - DNA, 25 bp, Homo sapien
gattagtgttttcatgacgtatcat

SEQ ID NO: 4384514 - DNA, 25 bp, Homo sapien
gaagatggccgaaattgttgtacct

SEQ ID NO: 4384515 - DNA, 25 bp, Homo sapien
ttgattaggaagatggccgaaattg

SEQ ID NO: 4384516 - DNA, 25 bp, Homo sapien
gccgaaattgttgtaccttccagaa

SEQ ID NO: 4384517 - DNA, 25 bp, Homo sapien
ccatctcacagtattgattaggaag

SEQ ID NO: 4384518 - DNA, 25 bp, Homo sapien
acccagtggctcagtgtcatgcttg

SEQ ID NO: 4384519 - DNA, 25 bp, Homo sapien
ttcttcaagatagagcaagggttga

SEQ ID NO: 4384520 - DNA, 25 bp, Homo sapien
gtttcttcaagatagagcaagggtt

SEQ ID NO: 4384521 - DNA, 25 bp, Homo sapien
ggttgacacccagtggctcagtgtc

SEQ ID NO: 4384522 - DNA, 25 bp, Homo sapien
tattgattcctgtatcaagatttcc

SEQ ID NO: 4384523 - DNA, 25 bp, Homo sapien
attgattcctgtatcaagatttcct

SEQ ID NO: 4384524 - DNA, 25 bp, Homo sapien
atcaagatttcctgcttatgtccta

SEQ ID NO: 4384525 - DNA, 25 bp, Homo sapien
ttgattcctgtatcaagatttcctg

SEQ ID NO: 4384526 - DNA, 25 bp, Homo sapien
agatctatagatcttatcagctcac

SEQ ID NO: 4384527 - DNA, 25 bp, Homo sapien
tggagtgttggagaaaagactccca

SEQ ID NO: 4384528 - DNA, 25 bp, Homo sapien
atagtcagatgccactggagtgttg

SEQ ID NO: 4384529 - DNA, 25 bp, Homo sapien
ggagaaaagactcccagaatctccc

SEQ ID NO: 4384530 - DNA, 25 bp, Homo sapien
gatgccactggagtgttggagaaaa

SEQ ID NO: 4384531 - DNA, 25 bp, Homo sapien
ttattaatgactttcttaatggtta

SEQ ID NO: 4384532 - DNA, 25 bp, Homo sapien
gagcacaaggaactttattaatgac

SEQ ID NO: 4384533 - DNA, 25 bp, Homo sapien
caaggagagcacaaggaactttatt

SEQ ID NO: 4384534 - DNA, 25 bp, Homo sapien
gagagcacaaggaactttattaatg

SEQ ID NO: 4384535 - DNA, 25 bp, Homo sapien
caacagcatggtcccgagagtctga

SEQ ID NO: 4384536 - DNA, 25 bp, Homo sapien
tttcaacagcatggtcccgagagtc

SEQ ID NO: 4384537 - DNA, 25 bp, Homo sapien
cagaggcagcgtggtttagtggttt

SEQ ID NO: 4384538 - DNA, 25 bp, Homo sapien
gcatggtcccgagagtctgacaaac

SEQ ID NO: 4384539 - DNA, 25 bp, Homo sapien
catcgttaacaatgaggatattaat

SEQ ID NO: 4384540 - DNA, 25 bp, Homo sapien
attaatatgtttcacacagttgtta

SEQ ID NO: 4384541 - DNA, 25 bp, Homo sapien
tcttcatcgttaacaatgaggatat

SEQ ID NO: 4384542 - DNA, 25 bp, Homo sapien
gtttcttcatcgttaacaatgagga

SEQ ID NO: 4384543 - DNA, 25 bp, Homo sapien
gtttccacggcaggcagtgtcagca

SEQ ID NO: 4384544 - DNA, 25 bp, Homo sapien
ggaagggaagcatgaccaacagcta

SEQ ID NO: 4384545 - DNA, 25 bp, Homo sapien
ccaacagctatgagagtgccgtttc

SEQ ID NO: 4384546 - DNA, 25 bp, Homo sapien
tctaggagttgctaacaccagcagc

SEQ ID NO: 4384547 - DNA, 25 bp, Homo sapien
ctctcttacatttccgccccatctt

SEQ ID NO: 4384548 - DNA, 25 bp, Homo sapien
tctcttacatttccgccccatcttt

SEQ ID NO: 4384549 - DNA, 25 bp, Homo sapien
attcactggaaccatttgatgtttt

SEQ ID NO: 4384550 - DNA, 25 bp, Homo sapien
cttgaattcactggaaccatttgat

SEQ ID NO: 4384551 - DNA, 25 bp, Homo sapien
tggaaccatttgatgttttggccat

SEQ ID NO: 4384552 - DNA, 25 bp, Homo sapien
actggaaccatttgatgttttggcc

SEQ ID NO: 4384553 - DNA, 25 bp, Homo sapien
tgagtcctagcatgtgtcaactgcc

SEQ ID NO: 4384554 - DNA, 25 bp, Homo sapien
cactccgaagtctgtatctacaacc

SEQ ID NO: 4384555 - DNA, 25 bp, Homo sapien
tacaacctggacctttattctgagt

SEQ ID NO: 4384556 - DNA, 25 bp, Homo sapien
ctggttaataatgccaccatccaca

SEQ ID NO: 4384557 - DNA, 25 bp, Homo sapien
tccagagtgttgaaccaggaacatt

SEQ ID NO: 4384558 - DNA, 25 bp, Homo sapien
gggcttcatatgtcacctaacagta

SEQ ID NO: 4384559 - DNA, 25 bp, Homo sapien
tgttggcaagacattacatggcaag

SEQ ID NO: 4384560 - DNA, 25 bp, Homo sapien
caataagagggtttgtcatcagaga

SEQ ID NO: 4384561 - DNA, 25 bp, Homo sapien
caggtctgaatgttttggtccccac

SEQ ID NO: 4384562 - DNA, 25 bp, Homo sapien
gtcatagcaaccttagaagagagct

SEQ ID NO: 4384563 - DNA, 25 bp, Homo sapien
ccatggactgcactccttagaagca

SEQ ID NO: 4384564 - DNA, 25 bp, Homo sapien
gagctggtctggtgtagtacaaatg

SEQ ID NO: 4384565 - DNA, 25 bp, Homo sapien
gcagcctggtactcccaggctaaag

SEQ ID NO: 4384566 - DNA, 25 bp, Homo sapien
gtactcccaggctaaagctatcctc

SEQ ID NO: 4384567 - DNA, 25 bp, Homo sapien
cctccctactaagcctctcaaattg

SEQ ID NO: 4384568 - DNA, 25 bp, Homo sapien
ctggtactcccaggctaaagctatc

SEQ ID NO: 4384569 - DNA, 25 bp, Homo sapien
tattgtgcttaaccaaactgaaagc

SEQ ID NO: 4384570 - DNA, 25 bp, Homo sapien
aactgaaagccactaatgactatgc

SEQ ID NO: 4384571 - DNA, 25 bp, Homo sapien
tatcactacccaccttgcagagttt

SEQ ID NO: 4384572 - DNA, 25 bp, Homo sapien
tactggtttgaagcatgggtctacc

SEQ ID NO: 4384573 - DNA, 25 bp, Homo sapien
taacaccctcacttatctggacgat

SEQ ID NO: 4384574 - DNA, 25 bp, Homo sapien
ttatctaataagctaaaggcaggac

SEQ ID NO: 4384575 - DNA, 25 bp, Homo sapien
tacccataagacctgggtcacagtg

SEQ ID NO: 4384576 - DNA, 25 bp, Homo sapien
ggtcacagtgttacaagacttcctg

SEQ ID NO: 4384577 - DNA, 25 bp, Homo sapien
tgaaatcagtctgaactcaggagac

SEQ ID NO: 4384578 - DNA, 25 bp, Homo sapien
ggcacttgttattgatcacacagct

SEQ ID NO: 4384579 - DNA, 25 bp, Homo sapien
gggatcagaaagactaaggcacttg

SEQ ID NO: 4384580 - DNA, 25 bp, Homo sapien
cccggccaaatctcatgtcagtcat

SEQ ID NO: 4384581 - DNA, 25 bp, Homo sapien
acagtcatggcagaaaatgaaggag

SEQ ID NO: 4384582 - DNA, 25 bp, Homo sapien
acatggatgggaaggcctcagggaa

SEQ ID NO: 4384583 - DNA, 25 bp, Homo sapien
gaaaatgaaggagaagcaaggcaca

SEQ ID NO: 4384584 - DNA, 25 bp, Homo sapien
cagaaaatgaaggagaagcaaggca

SEQ ID NO: 4384585 - DNA, 25 bp, Homo sapien
aagaaatagtttcaggactcccctg

SEQ ID NO: 4384586 - DNA, 25 bp, Homo sapien
ttaaaaatgagaccagcaggctagc

SEQ ID NO: 4384587 - DNA, 25 bp, Homo sapien
aggctaccgtttcccattgctgtga

SEQ ID NO: 4384588 - DNA, 25 bp, Homo sapien
accacgtgacatgtagagttccagc

SEQ ID NO: 4384589 - DNA, 25 bp, Homo sapien
tgcaatgcattatgattacagctgt

SEQ ID NO: 4384590 - DNA, 25 bp, Homo sapien
taaggtggggaggtcgctcaagccc

SEQ ID NO: 4384591 - DNA, 25 bp, Homo sapien
ctaaggtggggaggtcgctcaagcc

SEQ ID NO: 4384592 - DNA, 25 bp, Homo sapien
agctgcaatgcattatgattacagc

SEQ ID NO: 4384593 - DNA, 25 bp, Homo sapien
tgcaaggcggcagcgaggcgggggg

SEQ ID NO: 4384594 - DNA, 25 bp, Homo sapien
caaggcggcagcgaggcggggggag

SEQ ID NO: 4384595 - DNA, 25 bp, Homo sapien
aactgcaaggcggcagcgaggcggg

SEQ ID NO: 4384596 - DNA, 25 bp, Homo sapien
ctgcaaggcggcagcgaggcggggg

SEQ ID NO: 4384597 - DNA, 25 bp, Homo sapien
ctctgggacgcattcaaagcagtgt

SEQ ID NO: 4384598 - DNA, 25 bp, Homo sapien
ggacgcattcaaagcagtgtgtaga

SEQ ID NO: 4384599 - DNA, 25 bp, Homo sapien
tgggacgcattcaaagcagtgtgta

SEQ ID NO: 4384600 - DNA, 25 bp, Homo sapien
acaaggatacccaggaattgaactc

SEQ ID NO: 4384601 - DNA, 25 bp, Homo sapien
gaaggttaatatatcccgatgccac

SEQ ID NO: 4384602 - DNA, 25 bp, Homo sapien
ggcatgaacaccacaacagatggga

SEQ ID NO: 4384603 - DNA, 25 bp, Homo sapien
tatcacttagtagagaaagccccaa

SEQ ID NO: 4384604 - DNA, 25 bp, Homo sapien
tttagcaaccagcatgaatgccctg

SEQ ID NO: 4384605 - DNA, 25 bp, Homo sapien
caaaggaccacactagctctctaac

SEQ ID NO: 4384606 - DNA, 25 bp, Homo sapien
aatggtgtgacattcccaaaggacc

SEQ ID NO: 4384607 - DNA, 25 bp, Homo sapien
gagacctttaacaacagactagacc

SEQ ID NO: 4384608 - DNA, 25 bp, Homo sapien
agaaactaacataagagctccagca

SEQ ID NO: 4384609 - DNA, 25 bp, Homo sapien
cattagctagaactcattcacgtgg

SEQ ID NO: 4384610 - DNA, 25 bp, Homo sapien
ttcacgtggccacatctaagatggc

SEQ ID NO: 4384611 - DNA, 25 bp, Homo sapien
tacgtcaaccaaactttagggcaga

SEQ ID NO: 4384612 - DNA, 25 bp, Homo sapien
tgggcccagggataagatgaaatag

SEQ ID NO: 4384613 - DNA, 25 bp, Homo sapien
tttatttatcaagtatgatgtaccg

SEQ ID NO: 4384614 - DNA, 25 bp, Homo sapien
catttatttatcaagtatgatgtac

SEQ ID NO: 4384615 - DNA, 25 bp, Homo sapien
tttatcaagtatgatgtaccgtaca

SEQ ID NO: 4384616 - DNA, 25 bp, Homo sapien
atttatcaagtatgatgtaccgtac

SEQ ID NO: 4384617 - DNA, 25 bp, Homo sapien
cacatgactgtagttagactggtcc

SEQ ID NO: 4384618 - DNA, 25 bp, Homo sapien
tagctctagtggtggccagcgttcc

SEQ ID NO: 4384619 - DNA, 25 bp, Homo sapien
caaacatattggattagtggcctac

SEQ ID NO: 4384620 - DNA, 25 bp, Homo sapien
tatgacatcactagccaatgggaat

SEQ ID NO: 4384621 - DNA, 25 bp, Homo sapien
tgtgccagctcaactcaaacagagg

SEQ ID NO: 4384622 - DNA, 25 bp, Homo sapien
ctggcggcccagaaaagctagtggt

SEQ ID NO: 4384623 - DNA, 25 bp, Homo sapien
ttaatagattgaatggtgcccacgc

SEQ ID NO: 4384624 - DNA, 25 bp, Homo sapien
caaaccaggagtgctaatgttaagc

SEQ ID NO: 4384625 - DNA, 25 bp, Homo sapien
ttatcagcgcacaggtggtatttgg

SEQ ID NO: 4384626 - DNA, 25 bp, Homo sapien
cttaagttatcagcgcacaggtggt

SEQ ID NO: 4384627 - DNA, 25 bp, Homo sapien
tatttttccttaagttatcagcgca

SEQ ID NO: 4384628 - DNA, 25 bp, Homo sapien
ccatccctgagttacatcaattaaa

SEQ ID NO: 4384629 - DNA, 25 bp, Homo sapien
taccactgggctgctgccagtcgca

SEQ ID NO: 4384630 - DNA, 25 bp, Homo sapien
ctaccactgggctgctgccagtcgc

SEQ ID NO: 4384631 - DNA, 25 bp, Homo sapien
accactgggctgctgccagtcgcat

SEQ ID NO: 4384632 - DNA, 25 bp, Homo sapien
tcactctttactatcttcactcttt

SEQ ID NO: 4384633 - DNA, 25 bp, Homo sapien
ggtttttatctgcatggaatacttt

SEQ ID NO: 4384634 - DNA, 25 bp, Homo sapien
tggtttttatctgcatggaatactt

SEQ ID NO: 4384635 - DNA, 25 bp, Homo sapien
tctctaacgagtgtgggtcccctgt

SEQ ID NO: 4384636 - DNA, 25 bp, Homo sapien
tgaagcccaaagagcactctcagtg

SEQ ID NO: 4384637 - DNA, 25 bp, Homo sapien
caatctcaagagttcatgaagccca

SEQ ID NO: 4384638 - DNA, 25 bp, Homo sapien
tagtccagtgtctggctcctagaag

SEQ ID NO: 4384639 - DNA, 25 bp, Homo sapien
cctctgttgaggtaagtctgttgtg

SEQ ID NO: 4384640 - DNA, 25 bp, Homo sapien
ccatccctccacagatctggattct

SEQ ID NO: 4384641 - DNA, 25 bp, Homo sapien
ggtaagtctgttgtgagtctgccat

SEQ ID NO: 4384642 - DNA, 25 bp, Homo sapien
gattcttgcctctgttgaggtaagt

SEQ ID NO: 4384643 - DNA, 25 bp, Homo sapien
tctgagtcacttggaaaataccttt

SEQ ID NO: 4384644 - DNA, 25 bp, Homo sapien
tggtggccctgagactgcttgaaga

SEQ ID NO: 4384645 - DNA, 25 bp, Homo sapien
tgctttgtgcctcttagaagatgcc

SEQ ID NO: 4384646 - DNA, 25 bp, Homo sapien
gaagcagcacatacccctttgttag

SEQ ID NO: 4384647 - DNA, 25 bp, Homo sapien
gaacccacagtcatcgagaatcggc

SEQ ID NO: 4384648 - DNA, 25 bp, Homo sapien
cagcagtgtttatggtactaaggcc

SEQ ID NO: 4384649 - DNA, 25 bp, Homo sapien
tcggcatcaaaataacgtctcagtg

SEQ ID NO: 4384650 - DNA, 25 bp, Homo sapien
cagtaagggtatgtgtcttgcatcc

SEQ ID NO: 4384651 - DNA, 25 bp, Homo sapien
gacacgtttgtcattctgcagcccc

SEQ ID NO: 4384652 - DNA, 25 bp, Homo sapien
caaaatgagccatcaacaaaagcag

SEQ ID NO: 4384653 - DNA, 25 bp, Homo sapien
tccaaagcagtgactggcactccga

SEQ ID NO: 4384654 - DNA, 25 bp, Homo sapien
tattaaactggaacacaaaatgcgt

SEQ ID NO: 4384655 - DNA, 25 bp, Homo sapien
gatttttagcaactgcgtcgggctt

SEQ ID NO: 4384656 - DNA, 25 bp, Homo sapien
aaatcagtctagcagggcgtttcta

SEQ ID NO: 4384657 - DNA, 25 bp, Homo sapien
taaagcaggatctgacatactccag

SEQ ID NO: 4384658 - DNA, 25 bp, Homo sapien
cagtcaaggataccacaggtgaaca

SEQ ID NO: 4384659 - DNA, 25 bp, Homo sapien
taatcatagaaccaagcggccagca

SEQ ID NO: 4384660 - DNA, 25 bp, Homo sapien
acagtaactgctcacaatggtaggg

SEQ ID NO: 4384661 - DNA, 25 bp, Homo sapien
ggattacagggcacactcagtttag

SEQ ID NO: 4384662 - DNA, 25 bp, Homo sapien
cataacatccattaagggcactggg

SEQ ID NO: 4384663 - DNA, 25 bp, Homo sapien
tatcagatgccaaagtgatctatca

SEQ ID NO: 4384664 - DNA, 25 bp, Homo sapien
tactggaaacgaagatagtgaaact

SEQ ID NO: 4384665 - DNA, 25 bp, Homo sapien
tgtaagtaaaccgtaagaatcagat

SEQ ID NO: 4384666 - DNA, 25 bp, Homo sapien
tatcttcaagaaagccgaattacaa

SEQ ID NO: 4384667 - DNA, 25 bp, Homo sapien
tagtcaaagttctaagccgtcaggc

SEQ ID NO: 4384668 - DNA, 25 bp, Homo sapien
tgacatctcatggtaccactgtggg

SEQ ID NO: 4384669 - DNA, 25 bp, Homo sapien
tatgagcggctcaacaccattgacc

SEQ ID NO: 4384670 - DNA, 25 bp, Homo sapien
gaccacaaagcagggcaagttgaca

SEQ ID NO: 4384671 - DNA, 25 bp, Homo sapien
taaaactggccacttggagtaacac

SEQ ID NO: 4384672 - DNA, 25 bp, Homo sapien
tccaacattacacattgagcagtaa

SEQ ID NO: 4384673 - DNA, 25 bp, Homo sapien
tctcattcctgtaccgctgttcaga

SEQ ID NO: 4384674 - DNA, 25 bp, Homo sapien
gacaccttgctcttatgttgcttgc

SEQ ID NO: 4384675 - DNA, 25 bp, Homo sapien
cgagagcggggattgaagtaaggac

SEQ ID NO: 4384676 - DNA, 25 bp, Homo sapien
ctgccgagagcggggattgaagtaa

SEQ ID NO: 4384677 - DNA, 25 bp, Homo sapien
ccgagagcggggattgaagtaagga

SEQ ID NO: 4384678 - DNA, 25 bp, Homo sapien
gccgagagcggggattgaagtaagg

SEQ ID NO: 4384679 - DNA, 25 bp, Homo sapien
tacacaggttcgatctaaaaagata

SEQ ID NO: 4384680 - DNA, 25 bp, Homo sapien
gacaacctgaccaattatcactgta

SEQ ID NO: 4384681 - DNA, 25 bp, Homo sapien
aatgattcctccaaccattgtcaga

SEQ ID NO: 4384682 - DNA, 25 bp, Homo sapien
ttgtcagaaaaattgctgtagagcc

SEQ ID NO: 4384683 - DNA, 25 bp, Homo sapien
tacatatttctcctgttaggcatca

SEQ ID NO: 4384684 - DNA, 25 bp, Homo sapien
tctcctgttaggcatcatcttaaac

SEQ ID NO: 4384685 - DNA, 25 bp, Homo sapien
tatttctcctgttaggcatcatctt

SEQ ID NO: 4384686 - DNA, 25 bp, Homo sapien
tggcccgccgttgacccagctctga

SEQ ID NO: 4384687 - DNA, 25 bp, Homo sapien
cccttgatagtgagcctgagccaca

SEQ ID NO: 4384688 - DNA, 25 bp, Homo sapien
gcctcttggcatgattcttcccttg

SEQ ID NO: 4384689 - DNA, 25 bp, Homo sapien
gccgcagcctcttggcatgattctt

SEQ ID NO: 4384690 - DNA, 25 bp, Homo sapien
atgattcttcccttgatagtgagcc

SEQ ID NO: 4384691 - DNA, 25 bp, Homo sapien
tccgtggccaggatcactcggcctc

SEQ ID NO: 4384692 - DNA, 25 bp, Homo sapien
gatcactcggcctcctggcttaaag

SEQ ID NO: 4384693 - DNA, 25 bp, Homo sapien
attctccgtggccaggatcactcgg

SEQ ID NO: 4384694 - DNA, 25 bp, Homo sapien
agtaatcattctccgtggccaggat

SEQ ID NO: 4384695 - DNA, 25 bp, Homo sapien
ctgcaggctcgaccacattgctcat

SEQ ID NO: 4384696 - DNA, 25 bp, Homo sapien
tagctgcaggctcgaccacattgct

SEQ ID NO: 4384697 - DNA, 25 bp, Homo sapien
ctggagtagctgcaggctcgaccac

SEQ ID NO: 4384698 - DNA, 25 bp, Homo sapien
agtagctgcaggctcgaccacattg

SEQ ID NO: 4384699 - DNA, 25 bp, Homo sapien
taatttcggagtttcttaccatgat

SEQ ID NO: 4384700 - DNA, 25 bp, Homo sapien
gcatagtaatttcggagtttcttac

SEQ ID NO: 4384701 - DNA, 25 bp, Homo sapien
tgctgcatagtaatttcggagtttc

SEQ ID NO: 4384702 - DNA, 25 bp, Homo sapien
ctatttgctgcatagtaatttcgga

SEQ ID NO: 4384703 - DNA, 25 bp, Homo sapien
ttcaaggtgacattgcagagtttgc

SEQ ID NO: 4384704 - DNA, 25 bp, Homo sapien
gctgtgcagagttcaaggtgacatt

SEQ ID NO: 4384705 - DNA, 25 bp, Homo sapien
ggtgacattgcagagtttgcagtac

SEQ ID NO: 4384706 - DNA, 25 bp, Homo sapien
cagagttcaaggtgacattgcagag

SEQ ID NO: 4384707 - DNA, 25 bp, Homo sapien
gcacggcgtgttgcaagaggatcat

SEQ ID NO: 4384708 - DNA, 25 bp, Homo sapien
tcctgtagacctggtggccactgac

SEQ ID NO: 4384709 - DNA, 25 bp, Homo sapien
ggcaaggaagcctcctgcccaaaag

SEQ ID NO: 4384710 - DNA, 25 bp, Homo sapien
ttcttcccctgcaagaggcaaggaa

SEQ ID NO: 4384711 - DNA, 25 bp, Homo sapien
tggggcataatccagtgggtgatga

SEQ ID NO: 4384712 - DNA, 25 bp, Homo sapien
gggcataatccagtgggtgatgaga

SEQ ID NO: 4384713 - DNA, 25 bp, Homo sapien
ctggggcataatccagtgggtgatg

SEQ ID NO: 4384714 - DNA, 25 bp, Homo sapien
ggcataatccagtgggtgatgagaa

SEQ ID NO: 4384715 - DNA, 25 bp, Homo sapien
ggcaataatagaattactaaaatga

SEQ ID NO: 4384716 - DNA, 25 bp, Homo sapien
ggaaatgtgtacattatggcaataa

SEQ ID NO: 4384717 - DNA, 25 bp, Homo sapien
tgtgtacattatggcaataatagaa

SEQ ID NO: 4384718 - DNA, 25 bp, Homo sapien
tacattatggcaataatagaattac

SEQ ID NO: 4384719 - DNA, 25 bp, Homo sapien
aagtgcataagtattagtcatagaa

SEQ ID NO: 4384720 - DNA, 25 bp, Homo sapien
acttctcattaatcacaaaatttag

SEQ ID NO: 4384721 - DNA, 25 bp, Homo sapien
caaaggaaatcagcgtgatgggaaa

SEQ ID NO: 4384722 - DNA, 25 bp, Homo sapien
ttaacaatacttctcattaatcaca

SEQ ID NO: 4384723 - DNA, 25 bp, Homo sapien
aatcaaatgctaccaattgcctagg

SEQ ID NO: 4384724 - DNA, 25 bp, Homo sapien
attgcctaggcatgtctggacttgt

SEQ ID NO: 4384725 - DNA, 25 bp, Homo sapien
ggtgtcaaaacctctggataaagga

SEQ ID NO: 4384726 - DNA, 25 bp, Homo sapien
gaaagctcactttcacttgaggaaa

SEQ ID NO: 4384727 - DNA, 25 bp, Homo sapien
taaaggaacaggttaggagcacctc

SEQ ID NO: 4384728 - DNA, 25 bp, Homo sapien
tactcagaggtcatcagaacgcagc

SEQ ID NO: 4384729 - DNA, 25 bp, Homo sapien
gaaaggcagcgagcattactcagag

SEQ ID NO: 4384730 - DNA, 25 bp, Homo sapien
tttggaaaggagctaagacgacatt

SEQ ID NO: 4384731 - DNA, 25 bp, Homo sapien
cacttgaggcaaggtgtatcctata

SEQ ID NO: 4384732 - DNA, 25 bp, Homo sapien
aaagctacagacagttcagcgtcgc

SEQ ID NO: 4384733 - DNA, 25 bp, Homo sapien
gctgtgacggttcctaatcctagag

SEQ ID NO: 4384734 - DNA, 25 bp, Homo sapien
tgtttttcagtctccgctgtgacgg

SEQ ID NO: 4384735 - DNA, 25 bp, Homo sapien
tgccatcacgaaggatggaatcccc

SEQ ID NO: 4384736 - DNA, 25 bp, Homo sapien
tcaacccggtatggatgccatcacg

SEQ ID NO: 4384737 - DNA, 25 bp, Homo sapien
ggccaaggcagctgcacgcacagat

SEQ ID NO: 4384738 - DNA, 25 bp, Homo sapien
gctgcacgcacagatgatccacctg

SEQ ID NO: 4384739 - DNA, 25 bp, Homo sapien
gcatcggaaaggaaccgctagtccc

SEQ ID NO: 4384740 - DNA, 25 bp, Homo sapien
tagaagcagcgcaagccctgtcacg

SEQ ID NO: 4384741 - DNA, 25 bp, Homo sapien
gaaagagcatcggaaaggaaccgct

SEQ ID NO: 4384742 - DNA, 25 bp, Homo sapien
cagcgcaagccctgtcacgtggagg

SEQ ID NO: 4384743 - DNA, 25 bp, Homo sapien
ggacgcgccggcagtctccgcgccg

SEQ ID NO: 4384744 - DNA, 25 bp, Homo sapien
ccgggacgcgccggcagtctccgcg

SEQ ID NO: 4384745 - DNA, 25 bp, Homo sapien
tccgcagccgaaggctgactgtcaa

SEQ ID NO: 4384746 - DNA, 25 bp, Homo sapien
cggagcaactttctccgccggccgc

SEQ ID NO: 4384747 - DNA, 25 bp, Homo sapien
gccgaaggctgactgtcaaaagtca

SEQ ID NO: 4384748 - DNA, 25 bp, Homo sapien
tgtcaaaagtcagtccaacccgacc

SEQ ID NO: 4384749 - DNA, 25 bp, Homo sapien
tccagtcattgggatccaaacattg

SEQ ID NO: 4384750 - DNA, 25 bp, Homo sapien
gctcggcgtcgccactgcgcatgtg

SEQ ID NO: 4384751 - DNA, 25 bp, Homo sapien
gggcagagcttttgcaactttcatc

SEQ ID NO: 4384752 - DNA, 25 bp, Homo sapien
ccttagcctgctggttggcggttaa

SEQ ID NO: 4384753 - DNA, 25 bp, Homo sapien
tgtcctagatttggccaatggaaaa

SEQ ID NO: 4384754 - DNA, 25 bp, Homo sapien
aactacatgtccatagagccctagg

SEQ ID NO: 4384755 - DNA, 25 bp, Homo sapien
taactatgcctgacaactttctatg

SEQ ID NO: 4384756 - DNA, 25 bp, Homo sapien
ccaagatgtaggcactaactatgcc

SEQ ID NO: 4384757 - DNA, 25 bp, Homo sapien
tcttcaatgtggaggaaactacagt

SEQ ID NO: 4384758 - DNA, 25 bp, Homo sapien
caacagttataagtgattagaaatg

SEQ ID NO: 4384759 - DNA, 25 bp, Homo sapien
caagcaccagtccataaatatattt

SEQ ID NO: 4384760 - DNA, 25 bp, Homo sapien
tatcttctaagtagtgattcccaag

SEQ ID NO: 4384761 - DNA, 25 bp, Homo sapien
tagaccagagccgttcctatttggc

SEQ ID NO: 4384762 - DNA, 25 bp, Homo sapien
tgtagaccagagccgttcctatttg

SEQ ID NO: 4384763 - DNA, 25 bp, Homo sapien
gtagaccagagccgttcctatttgg

SEQ ID NO: 4384764 - DNA, 25 bp, Homo sapien
ctgtagaccagagccgttcctattt

SEQ ID NO: 4384765 - DNA, 25 bp, Homo sapien
ctaggatgacacaacaccctcacta

SEQ ID NO: 4384766 - DNA, 25 bp, Homo sapien
gctgtcctaggatgacacaacaccc

SEQ ID NO: 4384767 - DNA, 25 bp, Homo sapien
gtcctaggatgacacaacaccctca

SEQ ID NO: 4384768 - DNA, 25 bp, Homo sapien
ggatgacacaacaccctcactactg

SEQ ID NO: 4384769 - DNA, 25 bp, Homo sapien
gggctgggacccgatgcggttagag

SEQ ID NO: 4384770 - DNA, 25 bp, Homo sapien
gacccgatgcggttagagccgcgga

SEQ ID NO: 4384771 - DNA, 25 bp, Homo sapien
ctgggacccgatgcggttagagccg

SEQ ID NO: 4384772 - DNA, 25 bp, Homo sapien
gggccgtgccgcccgctctcctctc

SEQ ID NO: 4384773 - DNA, 25 bp, Homo sapien
ctttgcttctactcccagttttggg

SEQ ID NO: 4384774 - DNA, 25 bp, Homo sapien
ctcctagctgcagaggcgagggctc

SEQ ID NO: 4384775 - DNA, 25 bp, Homo sapien
ctctcctagctgcagaggcgagggc

SEQ ID NO: 4384776 - DNA, 25 bp, Homo sapien
gagggctcgccgctccctctccttt

SEQ ID NO: 4384777 - DNA, 25 bp, Homo sapien
ctaagtgtattatgtgatgcctgtt

SEQ ID NO: 4384778 - DNA, 25 bp, Homo sapien
aaacgcttagatctttcattcatag

SEQ ID NO: 4384779 - DNA, 25 bp, Homo sapien
ttccttttagctgagacaaacgctt

SEQ ID NO: 4384780 - DNA, 25 bp, Homo sapien
agtgtattatgtgatgcctgttcca

SEQ ID NO: 4384781 - DNA, 25 bp, Homo sapien
ccaaatccaactgattaccaaatct

SEQ ID NO: 4384782 - DNA, 25 bp, Homo sapien
aaatccaactgattaccaaatcttg

SEQ ID NO: 4384783 - DNA, 25 bp, Homo sapien
aatccaactgattaccaaatcttgg

SEQ ID NO: 4384784 - DNA, 25 bp, Homo sapien
gccaaatccaactgattaccaaatc

SEQ ID NO: 4384785 - DNA, 25 bp, Homo sapien
caccattgagtgctacagcatccta

SEQ ID NO: 4384786 - DNA, 25 bp, Homo sapien
tttttggtcatactgttaagacctc

SEQ ID NO: 4384787 - DNA, 25 bp, Homo sapien
ttgagtgctacagcatcctatagag

SEQ ID NO: 4384788 - DNA, 25 bp, Homo sapien
agaacttcagtttttggtcatactg

SEQ ID NO: 4384789 - DNA, 25 bp, Homo sapien
tgttgtgaaatagcccttttgccag

SEQ ID NO: 4384790 - DNA, 25 bp, Homo sapien
cacttgtgctgaaattaagctaccc

SEQ ID NO: 4384791 - DNA, 25 bp, Homo sapien
cacttctgggagatctgagtttctt

SEQ ID NO: 4384792 - DNA, 25 bp, Homo sapien
aagctaccctctctctgattgcact

SEQ ID NO: 4384793 - DNA, 25 bp, Homo sapien
gcctataagtattggcagaatcacc

SEQ ID NO: 4384794 - DNA, 25 bp, Homo sapien
agaatcaccaccacgatcacagcag

SEQ ID NO: 4384795 - DNA, 25 bp, Homo sapien
cctgctgcaaagcaaattggtggag

SEQ ID NO: 4384796 - DNA, 25 bp, Homo sapien
tctccttagcctataagtattggca

SEQ ID NO: 4384797 - DNA, 25 bp, Homo sapien
ctagaagaaggagatgctactgtaa

SEQ ID NO: 4384798 - DNA, 25 bp, Homo sapien
tgctactgtaatcaggcaggttggc

SEQ ID NO: 4384799 - DNA, 25 bp, Homo sapien
ttggccttcgctgagaagtgaccat

SEQ ID NO: 4384800 - DNA, 25 bp, Homo sapien
ttcgctgagaagtgaccattgattg

SEQ ID NO: 4384801 - DNA, 25 bp, Homo sapien
acctgttcccatgcactttagactc

SEQ ID NO: 4384802 - DNA, 25 bp, Homo sapien
gctaggaacaggccgcattctttca

SEQ ID NO: 4384803 - DNA, 25 bp, Homo sapien
ttctttgtcacatactccacctgtt

SEQ ID NO: 4384804 - DNA, 25 bp, Homo sapien
acagcttgtattgctaggaacaggc

SEQ ID NO: 4384805 - DNA, 25 bp, Homo sapien
tctataaaacggaagaagtatgagt

SEQ ID NO: 4384806 - DNA, 25 bp, Homo sapien
tactgacaagatatagttgagtgct

SEQ ID NO: 4384807 - DNA, 25 bp, Homo sapien
aatgcagtaattctgatcatgggtg

SEQ ID NO: 4384808 - DNA, 25 bp, Homo sapien
ggcagggactgcttatactgacaag

SEQ ID NO: 4384809 - DNA, 25 bp, Homo sapien
catcatcagtctttatagtttagcc

SEQ ID NO: 4384810 - DNA, 25 bp, Homo sapien
ttctgtatgactaataatgactccc

SEQ ID NO: 4384811 - DNA, 25 bp, Homo sapien
accccaatactcttagtgtatgaga

SEQ ID NO: 4384812 - DNA, 25 bp, Homo sapien
tgagatttcctattactgcataacc

SEQ ID NO: 4384813 - DNA, 25 bp, Homo sapien
caatcggtgactgtgtgggacttat

SEQ ID NO: 4384814 - DNA, 25 bp, Homo sapien
aatacagtgctttctcagttgaagg

SEQ ID NO: 4384815 - DNA, 25 bp, Homo sapien
gaatccagctgggtactatgaagcc

SEQ ID NO: 4384816 - DNA, 25 bp, Homo sapien
tattgaggtggtgcgaaattctcac

SEQ ID NO: 4384817 - DNA, 25 bp, Homo sapien
tgtagatatgatgcagccattgacc

SEQ ID NO: 4384818 - DNA, 25 bp, Homo sapien
ggttataaacgagaacgtgtgccat

SEQ ID NO: 4384819 - DNA, 25 bp, Homo sapien
gacctgtttacacgttcatgtgctg

SEQ ID NO: 4384820 - DNA, 25 bp, Homo sapien
cattttgggaattggagatcgtcac

SEQ ID NO: 4384821 - DNA, 25 bp, Homo sapien
cactgcatcctgctttaacccactt

SEQ ID NO: 4384822 - DNA, 25 bp, Homo sapien
tgcatcctgctttaacccacttttt

SEQ ID NO: 4384823 - DNA, 25 bp, Homo sapien
catcctgctttaacccactttttga

SEQ ID NO: 4384824 - DNA, 25 bp, Homo sapien
actgcatcctgctttaacccacttt

SEQ ID NO: 4384825 - DNA, 25 bp, Homo sapien
gaaagtcagtcaaccataatcacct

SEQ ID NO: 4384826 - DNA, 25 bp, Homo sapien
acttattaaactcctgacatgccag

SEQ ID NO: 4384827 - DNA, 25 bp, Homo sapien
cagtcctgactctagcttaagcaca

SEQ ID NO: 4384828 - DNA, 25 bp, Homo sapien
gctttaaatagttggactccacctc

SEQ ID NO: 4384829 - DNA, 25 bp, Homo sapien
tgacattgcatacattcgaaagacc

SEQ ID NO: 4384830 - DNA, 25 bp, Homo sapien
tgcacatcatggtggctggacaaca

SEQ ID NO: 4384831 - DNA, 25 bp, Homo sapien
tatctagctattcgacagcatgcca

SEQ ID NO: 4384832 - DNA, 25 bp, Homo sapien
ggaatgccagaactacaatcttttg

SEQ ID NO: 4384833 - DNA, 25 bp, Homo sapien
ggatcttattcttatttcccaggga

SEQ ID NO: 4384834 - DNA, 25 bp, Homo sapien
caaatgagacctgttataaggtggt

SEQ ID NO: 4384835 - DNA, 25 bp, Homo sapien
gaagggactcttgagatttcaccag

SEQ ID NO: 4384836 - DNA, 25 bp, Homo sapien
tgaaatgtggacacaacaaaggctg

SEQ ID NO: 4384837 - DNA, 25 bp, Homo sapien
tgctacatgggtgactaagatctgt

SEQ ID NO: 4384838 - DNA, 25 bp, Homo sapien
gataatatagccacttctgggtact

SEQ ID NO: 4384839 - DNA, 25 bp, Homo sapien
cagttctcgtggtttagacagttcc

SEQ ID NO: 4384840 - DNA, 25 bp, Homo sapien
gggtacttcagtatcagagatcagt

SEQ ID NO: 4384841 - DNA, 25 bp, Homo sapien
gaagtcctgtggtatactgcattca

SEQ ID NO: 4384842 - DNA, 25 bp, Homo sapien
gcatttgacacagcaagatgcatgt

SEQ ID NO: 4384843 - DNA, 25 bp, Homo sapien
tcttcccagtcttgctgttcctagc

SEQ ID NO: 4384844 - DNA, 25 bp, Homo sapien
tgtccttttaatgatggcccagaaa

SEQ ID NO: 4384845 - DNA, 25 bp, Homo sapien
tgcagacaggcataattaggtcctc

SEQ ID NO: 4384846 - DNA, 25 bp, Homo sapien
tttgcagacaggcataattaggtcc

SEQ ID NO: 4384847 - DNA, 25 bp, Homo sapien
gtttgcagacaggcataattaggtc

SEQ ID NO: 4384848 - DNA, 25 bp, Homo sapien
cagacaggcataattaggtcctcag

SEQ ID NO: 4384849 - DNA, 25 bp, Homo sapien
gctgttctatataaggtacttttcc

SEQ ID NO: 4384850 - DNA, 25 bp, Homo sapien
cacagtttgaactgatgctgttcta

SEQ ID NO: 4384851 - DNA, 25 bp, Homo sapien
tgaactgatgctgttctatataagg

SEQ ID NO: 4384852 - DNA, 25 bp, Homo sapien
tgcacagtttgaactgatgctgttc

SEQ ID NO: 4384853 - DNA, 25 bp, Homo sapien
aggacaggtgttgtgttaatctcac

SEQ ID NO: 4384854 - DNA, 25 bp, Homo sapien
taaggacaggtgttgtgttaatctc

SEQ ID NO: 4384855 - DNA, 25 bp, Homo sapien
tcacacagtaaggacaggtgttgtg

SEQ ID NO: 4384856 - DNA, 25 bp, Homo sapien
cacagtaaggacaggtgttgtgtta

SEQ ID NO: 4384857 - DNA, 25 bp, Homo sapien
ggcaccacctagcagagtcagtgaa

SEQ ID NO: 4384858 - DNA, 25 bp, Homo sapien
atgccaacaatcagggcaccaccta

SEQ ID NO: 4384859 - DNA, 25 bp, Homo sapien
gggcaccacctagcagagtcagtga

SEQ ID NO: 4384860 - DNA, 25 bp, Homo sapien
aacaatcagggcaccacctagcaga

SEQ ID NO: 4384861 - DNA, 25 bp, Homo sapien
tataagaatgacatcttcagattgg

SEQ ID NO: 4384862 - DNA, 25 bp, Homo sapien
ttttttataagaatgacatcttcag

SEQ ID NO: 4384863 - DNA, 25 bp, Homo sapien
ataagaatgacatcttcagattggc

SEQ ID NO: 4384864 - DNA, 25 bp, Homo sapien
tttataagaatgacatcttcagatt

SEQ ID NO: 4384865 - DNA, 25 bp, Homo sapien
ccatttttgtgatcgaagaattctt

SEQ ID NO: 4384866 - DNA, 25 bp, Homo sapien
ctgtagaagcatgaaaagggggttc

SEQ ID NO: 4384867 - DNA, 25 bp, Homo sapien
atcatttctatcttggtggcactta

SEQ ID NO: 4384868 - DNA, 25 bp, Homo sapien
ggtggcacttaggtgtgtaaaagca

SEQ ID NO: 4384869 - DNA, 25 bp, Homo sapien
gaaaaagataaaggcactgtcacca

SEQ ID NO: 4384870 - DNA, 25 bp, Homo sapien
tattacatagctcatgggaaagggt

SEQ ID NO: 4384871 - DNA, 25 bp, Homo sapien
tggactcttggacagtatgaatccg

SEQ ID NO: 4384872 - DNA, 25 bp, Homo sapien
gaatatgactcctccctacatgcag

SEQ ID NO: 4384873 - DNA, 25 bp, Homo sapien
gacattgcaggagagtcagtgacca

SEQ ID NO: 4384874 - DNA, 25 bp, Homo sapien
aacgcttagtaatgcctctgttgtc

SEQ ID NO: 4384875 - DNA, 25 bp, Homo sapien
tatgagctttcaacgcttagtaatg

SEQ ID NO: 4384876 - DNA, 25 bp, Homo sapien
gatctcctgtagcaaaatatcaccc

SEQ ID NO: 4384877 - DNA, 25 bp, Homo sapien
tatcaccctgaagaaaagcacgttg

SEQ ID NO: 4384878 - DNA, 25 bp, Homo sapien
ctgaagacacgggtacttcccctga

SEQ ID NO: 4384879 - DNA, 25 bp, Homo sapien
cgggtacttcccctgaccgtggcag

SEQ ID NO: 4384880 - DNA, 25 bp, Homo sapien
tgaagacacgggtacttcccctgac

SEQ ID NO: 4384881 - DNA, 25 bp, Homo sapien
tacttcccctgaccgtggcagtgca

SEQ ID NO: 4384882 - DNA, 25 bp, Homo sapien
tggatggcagtgcaggtcgattctt

SEQ ID NO: 4384883 - DNA, 25 bp, Homo sapien
gatatctgtgtggatggcagtgcag

SEQ ID NO: 4384884 - DNA, 25 bp, Homo sapien
gatggcagtgcaggtcgattcttct

SEQ ID NO: 4384885 - DNA, 25 bp, Homo sapien
tgtggatggcagtgcaggtcgattc

SEQ ID NO: 4384886 - DNA, 25 bp, Homo sapien
tccagcactggatggcagcctcttg

SEQ ID NO: 4384887 - DNA, 25 bp, Homo sapien
aaggctttagaatggttgttccgag

SEQ ID NO: 4384888 - DNA, 25 bp, Homo sapien
gaacattaggactgagaagcccatc

SEQ ID NO: 4384889 - DNA, 25 bp, Homo sapien
tcttgtgcacatctagtgggtctcc

SEQ ID NO: 4384890 - DNA, 25 bp, Homo sapien
gatactgcagtgagctcataaagaa

SEQ ID NO: 4384891 - DNA, 25 bp, Homo sapien
tactgcagtgagctcataaagaagg

SEQ ID NO: 4384892 - DNA, 25 bp, Homo sapien
ctgcagtgagctcataaagaagggg

SEQ ID NO: 4384893 - DNA, 25 bp, Homo sapien
agatactgcagtgagctcataaaga

SEQ ID NO: 4384894 - DNA, 25 bp, Homo sapien
gggactggagggataatctcatttg

SEQ ID NO: 4384895 - DNA, 25 bp, Homo sapien
tccatggggactggagggataatct

SEQ ID NO: 4384896 - DNA, 25 bp, Homo sapien
ctggagggataatctcatttgctgc

SEQ ID NO: 4384897 - DNA, 25 bp, Homo sapien
agggataatctcatttgctgcctac

SEQ ID NO: 4384898 - DNA, 25 bp, Homo sapien
aaatcccagttcagagcttggtgaa

SEQ ID NO: 4384899 - DNA, 25 bp, Homo sapien
atgaaatcccagttcagagcttggt

SEQ ID NO: 4384900 - DNA, 25 bp, Homo sapien
cgtgagcaggatgaatgcaacaaaa

SEQ ID NO: 4384901 - DNA, 25 bp, Homo sapien
gtgtctcgtgagcaggatgaatgca

SEQ ID NO: 4384902 - DNA, 25 bp, Homo sapien
tgcacgtccctcctgaaaatttgtt

SEQ ID NO: 4384903 - DNA, 25 bp, Homo sapien
tatctttcagggatattgcacgtcc

SEQ ID NO: 4384904 - DNA, 25 bp, Homo sapien
gaaatgttgcctcatgcaagtctgt

SEQ ID NO: 4384905 - DNA, 25 bp, Homo sapien
gaattaacagcgtcctgaacagggt

SEQ ID NO: 4384906 - DNA, 25 bp, Homo sapien
tccttctcctcctctctggccactc

SEQ ID NO: 4384907 - DNA, 25 bp, Homo sapien
cttctcctcctctctggccactcat

SEQ ID NO: 4384908 - DNA, 25 bp, Homo sapien
ctccttctcctcctctctggccact

SEQ ID NO: 4384909 - DNA, 25 bp, Homo sapien
cctccttctcctcctctctggccac

SEQ ID NO: 4384910 - DNA, 25 bp, Homo sapien
ccagcaaaggatgagatacattctc

SEQ ID NO: 4384911 - DNA, 25 bp, Homo sapien
gtgcctgcaaacctgctccagcaaa

SEQ ID NO: 4384912 - DNA, 25 bp, Homo sapien
ctgctccagcaaaggatgagataca

SEQ ID NO: 4384913 - DNA, 25 bp, Homo sapien
ggatgagatacattctcgcagggca

SEQ ID NO: 4384914 - DNA, 25 bp, Homo sapien
ggtgggcatggcggcatccagccca

SEQ ID NO: 4384915 - DNA, 25 bp, Homo sapien
gcccaggctgggtacgatctcagtt

SEQ ID NO: 4384916 - DNA, 25 bp, Homo sapien
tgggcatggcggcatccagcccaca

SEQ ID NO: 4384917 - DNA, 25 bp, Homo sapien
gtgggcatggcggcatccagcccac

SEQ ID NO: 4384918 - DNA, 25 bp, Homo sapien
tgaacagacataacactcaattaga

SEQ ID NO: 4384919 - DNA, 25 bp, Homo sapien
tagccagagtataatacagagagat

SEQ ID NO: 4384920 - DNA, 25 bp, Homo sapien
tgagaagataattagtgaacacaga

SEQ ID NO: 4384921 - DNA, 25 bp, Homo sapien
aaatgagatccacgaaaaatttcag

SEQ ID NO: 4384922 - DNA, 25 bp, Homo sapien
aaacaccatccagttgtagtggcac

SEQ ID NO: 4384923 - DNA, 25 bp, Homo sapien
aaagatagagagtagggcaggctgt

SEQ ID NO: 4384924 - DNA, 25 bp, Homo sapien
ctcatgaaaaagtcaggacaaatag

SEQ ID NO: 4384925 - DNA, 25 bp, Homo sapien
catccagttgtagtggcacacctat

SEQ ID NO: 4384926 - DNA, 25 bp, Homo sapien
tactggatatatgctctcaattaga

SEQ ID NO: 4384927 - DNA, 25 bp, Homo sapien
atactactggatatatgctctcaat

SEQ ID NO: 4384928 - DNA, 25 bp, Homo sapien
acactcagacttcctgtgcaccacg

SEQ ID NO: 4384929 - DNA, 25 bp, Homo sapien
ggagagaaaagagcccctcacactc

SEQ ID NO: 4384930 - DNA, 25 bp, Homo sapien
ccctcacactcagacttcctgtgca

SEQ ID NO: 4384931 - DNA, 25 bp, Homo sapien
tcagacttcctgtgcaccacgcctg

SEQ ID NO: 4384932 - DNA, 25 bp, Homo sapien
cctggtgccaacaagtcatggtttt

SEQ ID NO: 4384933 - DNA, 25 bp, Homo sapien
ctcctggtgccaacaagtcatggtt

SEQ ID NO: 4384934 - DNA, 25 bp, Homo sapien
tcctcctggtgccaacaagtcatgg

SEQ ID NO: 4384935 - DNA, 25 bp, Homo sapien
tcctggtgccaacaagtcatggttt

SEQ ID NO: 4384936 - DNA, 25 bp, Homo sapien
tttttgggtacggtgcagtgatctg

SEQ ID NO: 4384937 - DNA, 25 bp, Homo sapien
tgggtacggtgcagtgatctgcatc

SEQ ID NO: 4384938 - DNA, 25 bp, Homo sapien
tttgggtacggtgcagtgatctgca

SEQ ID NO: 4384939 - DNA, 25 bp, Homo sapien
ggtacggtgcagtgatctgcatctt

SEQ ID NO: 4384940 - DNA, 25 bp, Homo sapien
attttagcattatcttttgcaacac

SEQ ID NO: 4384941 - DNA, 25 bp, Homo sapien
tattttagcattatcttttgcaaca

SEQ ID NO: 4384942 - DNA, 25 bp, Homo sapien
cagctattttagcattatcttttgc

SEQ ID NO: 4384943 - DNA, 25 bp, Homo sapien
gctattttagcattatcttttgcaa

SEQ ID NO: 4384944 - DNA, 25 bp, Homo sapien
attttcagtcacctcgttttgggct

SEQ ID NO: 4384945 - DNA, 25 bp, Homo sapien
ctgactttctgtcagtagactttac

SEQ ID NO: 4384946 - DNA, 25 bp, Homo sapien
tcacctcgttttgggcttccactgc

SEQ ID NO: 4384947 - DNA, 25 bp, Homo sapien
gtagactttacctgctcttcttcct

SEQ ID NO: 4384948 - DNA, 25 bp, Homo sapien
tctgcaatgagtccaatgcctctcc

SEQ ID NO: 4384949 - DNA, 25 bp, Homo sapien
ctttgagtgtctactgtacttggac

SEQ ID NO: 4384950 - DNA, 25 bp, Homo sapien
ctgagggttcactttgagtgtctac

SEQ ID NO: 4384951 - DNA, 25 bp, Homo sapien
tctggctctttcatatctgagggtt

SEQ ID NO: 4384952 - DNA, 25 bp, Homo sapien
ctggagaaccaggaacttctgtctt

SEQ ID NO: 4384953 - DNA, 25 bp, Homo sapien
gggacctctaccatacatctgtcat

SEQ ID NO: 4384954 - DNA, 25 bp, Homo sapien
actatgccctaaaggacatgaggcc

SEQ ID NO: 4384955 - DNA, 25 bp, Homo sapien
taaactatgccctatgcttgtctct

SEQ ID NO: 4384956 - DNA, 25 bp, Homo sapien
gcttctgtactctgcactggaacct

SEQ ID NO: 4384957 - DNA, 25 bp, Homo sapien
tgttcctcataggtagcacctgcta

SEQ ID NO: 4384958 - DNA, 25 bp, Homo sapien
agttctggtcctgtcatctggtgca

SEQ ID NO: 4384959 - DNA, 25 bp, Homo sapien
tggtcctcggtattctcaccagcag

SEQ ID NO: 4384960 - DNA, 25 bp, Homo sapien
catctaagtcactccaacagttgga

SEQ ID NO: 4384961 - DNA, 25 bp, Homo sapien
gggtcccatcccctgtcgacttgag

SEQ ID NO: 4384962 - DNA, 25 bp, Homo sapien
gacttgagggcatttaactcttctt

SEQ ID NO: 4384963 - DNA, 25 bp, Homo sapien
catcccctgtcgacttgagggcatt

SEQ ID NO: 4384964 - DNA, 25 bp, Homo sapien
cctgtcgacttgagggcatttaact

SEQ ID NO: 4384965 - DNA, 25 bp, Homo sapien
caaacattactgagagtgtcggaag

SEQ ID NO: 4384966 - DNA, 25 bp, Homo sapien
tatcaaacattactgagagtgtcgg

SEQ ID NO: 4384967 - DNA, 25 bp, Homo sapien
ggtatcaaacattactgagagtgtc

SEQ ID NO: 4384968 - DNA, 25 bp, Homo sapien
cttggtatcaaacattactgagagt

SEQ ID NO: 4384969 - DNA, 25 bp, Homo sapien
tgccgcctatattcagccagctgtt

SEQ ID NO: 4384970 - DNA, 25 bp, Homo sapien
ccagcaacatatctttcagggtgtc

SEQ ID NO: 4384971 - DNA, 25 bp, Homo sapien
cagctgttcttcaatctccagcaac

SEQ ID NO: 4384972 - DNA, 25 bp, Homo sapien
caatctccagcaacatatctttcag

SEQ ID NO: 4384973 - DNA, 25 bp, Homo sapien
tgctagagagtccttgatttccctg

SEQ ID NO: 4384974 - DNA, 25 bp, Homo sapien
tggatatagaggtgtctccgctgcc

SEQ ID NO: 4384975 - DNA, 25 bp, Homo sapien
gatttccctgatggacgcctcggtg

SEQ ID NO: 4384976 - DNA, 25 bp, Homo sapien
agacgggcccagcatgttacgagac

SEQ ID NO: 4384977 - DNA, 25 bp, Homo sapien
gtagatctcccggctctgcgtggcc

SEQ ID NO: 4384978 - DNA, 25 bp, Homo sapien
acagtagatctcccggctctgcgtg

SEQ ID NO: 4384979 - DNA, 25 bp, Homo sapien
agtagatctcccggctctgcgtggc

SEQ ID NO: 4384980 - DNA, 25 bp, Homo sapien
aaacagtagatctcccggctctgcg

SEQ ID NO: 4384981 - DNA, 25 bp, Homo sapien
tcccacattgactgccccatgcccc

SEQ ID NO: 4384982 - DNA, 25 bp, Homo sapien
acattgactgccccatgccccaacc

SEQ ID NO: 4384983 - DNA, 25 bp, Homo sapien
tcaggcatcactcttctctccattt

SEQ ID NO: 4384984 - DNA, 25 bp, Homo sapien
tctccattttggttcccacattgac

SEQ ID NO: 4384985 - DNA, 25 bp, Homo sapien
gctttcagcttctttgcttttcatt

SEQ ID NO: 4384986 - DNA, 25 bp, Homo sapien
tttcagcttctttgcttttcatttc

SEQ ID NO: 4384987 - DNA, 25 bp, Homo sapien
gaggctttcagcttctttgcttttc

SEQ ID NO: 4384988 - DNA, 25 bp, Homo sapien
aggctttcagcttctttgcttttca

SEQ ID NO: 4384989 - DNA, 25 bp, Homo sapien
gcgcctccggctgccctgaagtgtg

SEQ ID NO: 4384990 - DNA, 25 bp, Homo sapien
tcccctggcgcctccggctgccctg

SEQ ID NO: 4384991 - DNA, 25 bp, Homo sapien
ctgaagtgtgatttgcacggggatg

SEQ ID NO: 4384992 - DNA, 25 bp, Homo sapien
gaagtgtgatttgcacggggatgct

SEQ ID NO: 4384993 - DNA, 25 bp, Homo sapien
aatggctccctttcacctgagtcat

SEQ ID NO: 4384994 - DNA, 25 bp, Homo sapien
tggctccctttcacctgagtcatgc

SEQ ID NO: 4384995 - DNA, 25 bp, Homo sapien
aaaatggctccctttcacctgagtc

SEQ ID NO: 4384996 - DNA, 25 bp, Homo sapien
ccaggggtctgagaaaatggctccc

SEQ ID NO: 4384997 - DNA, 25 bp, Homo sapien
tcaggcaggctagccacgtggttct

SEQ ID NO: 4384998 - DNA, 25 bp, Homo sapien
cagcgcagctgcagccattagaagc

SEQ ID NO: 4384999 - DNA, 25 bp, Homo sapien
gaaaggtgaagcttagacatccacg

SEQ ID NO: 4385000 - DNA, 25 bp, Homo sapien
caaggcggagcggtcagttctagat

SEQ ID NO: 4385001 - DNA, 25 bp, Homo sapien
tgtttccgcctcggcagccgggagc

SEQ ID NO: 4385002 - DNA, 25 bp, Homo sapien
ctgtgtttccgcctcggcagccggg

SEQ ID NO: 4385003 - DNA, 25 bp, Homo sapien
tttccgcctcggcagccgggagcat

SEQ ID NO: 4385004 - DNA, 25 bp, Homo sapien
tgtgtttccgcctcggcagccggga

SEQ ID NO: 4385005 - DNA, 25 bp, Homo sapien
gagacctcaacgcttgtggaaagtt

SEQ ID NO: 4385006 - DNA, 25 bp, Homo sapien
aggaaatgttttgccctggccgcgt

SEQ ID NO: 4385007 - DNA, 25 bp, Homo sapien
gggaccctctataattggtgaggga

SEQ ID NO: 4385008 - DNA, 25 bp, Homo sapien
tggtgagggacgtactcagttcaag

SEQ ID NO: 4385009 - DNA, 25 bp, Homo sapien
ctgttagagtgcaagctgaaataat

SEQ ID NO: 4385010 - DNA, 25 bp, Homo sapien
tgttagagtgcaagctgaaataatg

SEQ ID NO: 4385011 - DNA, 25 bp, Homo sapien
gctgaaataatgggttttctagtta

SEQ ID NO: 4385012 - DNA, 25 bp, Homo sapien
tggagccttcgatgggatctttcct

SEQ ID NO: 4385013 - DNA, 25 bp, Homo sapien
caaacttctggagccttcgatggga

SEQ ID NO: 4385014 - DNA, 25 bp, Homo sapien
aacaacaaggaagtatgatctgtgc

SEQ ID NO: 4385015 - DNA, 25 bp, Homo sapien
atgatctgtgccacaaacttctgga

SEQ ID NO: 4385016 - DNA, 25 bp, Homo sapien
gaataccaagctaggccatgtgtca

SEQ ID NO: 4385017 - DNA, 25 bp, Homo sapien
aacttgagacttttgcatgcagcca

SEQ ID NO: 4385018 - DNA, 25 bp, Homo sapien
ccatacctggcctgtagtgctttca

SEQ ID NO: 4385019 - DNA, 25 bp, Homo sapien
gcctgagtcagaagcgtgtccctta

SEQ ID NO: 4385020 - DNA, 25 bp, Homo sapien
tcgtgtgacggtgcttagaaacccc

SEQ ID NO: 4385021 - DNA, 25 bp, Homo sapien
taagtactgtctagggaaacgaatc

SEQ ID NO: 4385022 - DNA, 25 bp, Homo sapien
tatatggcgggatggcgttcccctc

SEQ ID NO: 4385023 - DNA, 25 bp, Homo sapien
tgagagtcgcctcactcgtgtgacg

SEQ ID NO: 4385024 - DNA, 25 bp, Homo sapien
ttttcgaagagaaagatttatgccg

SEQ ID NO: 4385025 - DNA, 25 bp, Homo sapien
ttcgaagagaaagatttatgccgga

SEQ ID NO: 4385026 - DNA, 25 bp, Homo sapien
ttgaagcagtttatgccttttttgt

SEQ ID NO: 4385027 - DNA, 25 bp, Homo sapien
ttttttcgaagagaaagatttatgc

SEQ ID NO: 4385028 - DNA, 25 bp, Homo sapien
caaatgtgtgtcgagtatgcaagga

SEQ ID NO: 4385029 - DNA, 25 bp, Homo sapien
ttactgagagctaatagcagtggcc

SEQ ID NO: 4385030 - DNA, 25 bp, Homo sapien
caagagccaagctttgaatgtgact

SEQ ID NO: 4385031 - DNA, 25 bp, Homo sapien
tgatcctgaagcataaacgtactga

SEQ ID NO: 4385032 - DNA, 25 bp, Homo sapien
tgagaaataacactaggaagccact

SEQ ID NO: 4385033 - DNA, 25 bp, Homo sapien
tatacagttaagtccacggatactc

SEQ ID NO: 4385034 - DNA, 25 bp, Homo sapien
ccttaaccatgggtgctagtaactt

SEQ ID NO: 4385035 - DNA, 25 bp, Homo sapien
tacacgaccagaactaaaatgcaat

SEQ ID NO: 4385036 - DNA, 25 bp, Homo sapien
tccaaggtcacggtcggtgagcaag

SEQ ID NO: 4385037 - DNA, 25 bp, Homo sapien
cagatctagagggttgttagccagg

SEQ ID NO: 4385038 - DNA, 25 bp, Homo sapien
tatcaaatggccgaaaggactacag

SEQ ID NO: 4385039 - DNA, 25 bp, Homo sapien
gactctgattcccagtttctgaccc

SEQ ID NO: 4385040 - DNA, 25 bp, Homo sapien
atgtgtgaccaaagacaatgcttcg

SEQ ID NO: 4385041 - DNA, 25 bp, Homo sapien
aacttccatttttacaggctgggcg

SEQ ID NO: 4385042 - DNA, 25 bp, Homo sapien
aaagacaatgcttcgtccagtgtgg

SEQ ID NO: 4385043 - DNA, 25 bp, Homo sapien
ccaaagacaatgcttcgtccagtgt

SEQ ID NO: 4385044 - DNA, 25 bp, Homo sapien
tagctaagcctaggctgggcagata

SEQ ID NO: 4385045 - DNA, 25 bp, Homo sapien
tcctggtagcagtctctgcccacaa

SEQ ID NO: 4385046 - DNA, 25 bp, Homo sapien
actctcctggtagcagtctctgccc

SEQ ID NO: 4385047 - DNA, 25 bp, Homo sapien
gaagctagctaagcctaggctgggc

SEQ ID NO: 4385048 - DNA, 25 bp, Homo sapien
cgtttgcgacgctcggagtgacctt

SEQ ID NO: 4385049 - DNA, 25 bp, Homo sapien
cccttaaggaaaatggcgcctggca

SEQ ID NO: 4385050 - DNA, 25 bp, Homo sapien
catctgtggccgagttgctgttgcc

SEQ ID NO: 4385051 - DNA, 25 bp, Homo sapien
ggctgcctcgacagcacgtttgcga

SEQ ID NO: 4385052 - DNA, 25 bp, Homo sapien
ccggcttttcccacgcagctccttc

SEQ ID NO: 4385053 - DNA, 25 bp, Homo sapien
gcttttcccacgcagctccttcgcg

SEQ ID NO: 4385054 - DNA, 25 bp, Homo sapien
ttcccacgcagctccttcgcgcggt

SEQ ID NO: 4385055 - DNA, 25 bp, Homo sapien
ccacgcagctccttcgcgcggtcat

SEQ ID NO: 4385056 - DNA, 25 bp, Homo sapien
tactgttacatttagaccccattgt

SEQ ID NO: 4385057 - DNA, 25 bp, Homo sapien
ttgttcctcttgagagttgagggcc

SEQ ID NO: 4385058 - DNA, 25 bp, Homo sapien
cttgagagttgagggcctactgtta

SEQ ID NO: 4385059 - DNA, 25 bp, Homo sapien
tattgttcatgatatcattggtcca

SEQ ID NO: 4385060 - DNA, 25 bp, Homo sapien
gaaaactataggctggaaactccta

SEQ ID NO: 4385061 - DNA, 25 bp, Homo sapien
gaatgaactatcaccacctagctgg

SEQ ID NO: 4385062 - DNA, 25 bp, Homo sapien
ggtgccctatctagccttctctgaa

SEQ ID NO: 4385063 - DNA, 25 bp, Homo sapien
tctaactcaaagatccatagggaac

SEQ ID NO: 4385064 - DNA, 25 bp, Homo sapien
caaagttaatgtagctttccctgca

SEQ ID NO: 4385065 - DNA, 25 bp, Homo sapien
ttgcctatgtcacaaaagtgcatgg

SEQ ID NO: 4385066 - DNA, 25 bp, Homo sapien
tttattaattgcctcccacgcagca

SEQ ID NO: 4385067 - DNA, 25 bp, Homo sapien
cagggccccaagcatgagtaaagtt

SEQ ID NO: 4385068 - DNA, 25 bp, Homo sapien
tgctggattataccccattggaggc

SEQ ID NO: 4385069 - DNA, 25 bp, Homo sapien
taaatcgcattgctggaaccaccaa

SEQ ID NO: 4385070 - DNA, 25 bp, Homo sapien
agtaccaacttatgtgacccctgag

SEQ ID NO: 4385071 - DNA, 25 bp, Homo sapien
tagccaaagataggagacgtctgaa

SEQ ID NO: 4385072 - DNA, 25 bp, Homo sapien
tagctgccaaaaatgaggcctgtcc

SEQ ID NO: 4385073 - DNA, 25 bp, Homo sapien
tatacactgaatctgaggcaaccca

SEQ ID NO: 4385074 - DNA, 25 bp, Homo sapien
taaaatgatgacaggcccaaatggg

SEQ ID NO: 4385075 - DNA, 25 bp, Homo sapien
aatgaagggaattgctgaacaggcc

SEQ ID NO: 4385076 - DNA, 25 bp, Homo sapien
taaatagcctacaaataaacattaa

SEQ ID NO: 4385077 - DNA, 25 bp, Homo sapien
taaatatacattcataactgccatc

SEQ ID NO: 4385078 - DNA, 25 bp, Homo sapien
gaagtgatataaatagcctacaaat

SEQ ID NO: 4385079 - DNA, 25 bp, Homo sapien
tgccatctacaatattctgttttgg

SEQ ID NO: 4385080 - DNA, 25 bp, Homo sapien
gatgcacatattagcacattcacaa

SEQ ID NO: 4385081 - DNA, 25 bp, Homo sapien
taagagacacattattataccacag

SEQ ID NO: 4385082 - DNA, 25 bp, Homo sapien
gactttaccatcaagcaagactaac

SEQ ID NO: 4385083 - DNA, 25 bp, Homo sapien
aaaacaatgcacgtctatatatcag

SEQ ID NO: 4385084 - DNA, 25 bp, Homo sapien
gaaacaatgaactcccctcagaggt

SEQ ID NO: 4385085 - DNA, 25 bp, Homo sapien
cttttgatctcagaaggcgcctttg

SEQ ID NO: 4385086 - DNA, 25 bp, Homo sapien
tgcaaacacaatggcgagctgctat

SEQ ID NO: 4385087 - DNA, 25 bp, Homo sapien
tgttcagatgcagggacaatcccaa

SEQ ID NO: 4385088 - DNA, 25 bp, Homo sapien
acctaagcagctcacacggttgtca

SEQ ID NO: 4385089 - DNA, 25 bp, Homo sapien
gaaaactgtcccaagagcctgttgc

SEQ ID NO: 4385090 - DNA, 25 bp, Homo sapien
taattccagattctaagaaaactgt

SEQ ID NO: 4385091 - DNA, 25 bp, Homo sapien
cacagccatgccatcatcagttaca

SEQ ID NO: 4385092 - DNA, 25 bp, Homo sapien
agtcatcgtaaccagccaacaagag

SEQ ID NO: 4385093 - DNA, 25 bp, Homo sapien
catcagagccagtggcgaaggcata

SEQ ID NO: 4385094 - DNA, 25 bp, Homo sapien
gatctgcacgaaggtcaaagagccg

SEQ ID NO: 4385095 - DNA, 25 bp, Homo sapien
caagagacgcccactttttgagaag

SEQ ID NO: 4385096 - DNA, 25 bp, Homo sapien
atttagtctccacaccattctctga

SEQ ID NO: 4385097 - DNA, 25 bp, Homo sapien
aactgatacagcaaggcatggtagc

SEQ ID NO: 4385098 - DNA, 25 bp, Homo sapien
gactctgcctctaccaaagattaaa

SEQ ID NO: 4385099 - DNA, 25 bp, Homo sapien
tctgatctgcttaggtaacctaact

SEQ ID NO: 4385100 - DNA, 25 bp, Homo sapien
gaaagactcatcacatctccagaat

SEQ ID NO: 4385101 - DNA, 25 bp, Homo sapien
ggcagtttcgatgtcccataaagca

SEQ ID NO: 4385102 - DNA, 25 bp, Homo sapien
tcccataatttggaagaggcatcac

SEQ ID NO: 4385103 - DNA, 25 bp, Homo sapien
tctgagacatgtcccgtgaaagact

SEQ ID NO: 4385104 - DNA, 25 bp, Homo sapien
gaacttgtaacaatttggctgtcat

SEQ ID NO: 4385105 - DNA, 25 bp, Homo sapien
tgaacttgtaacaatttggctgtca

SEQ ID NO: 4385106 - DNA, 25 bp, Homo sapien
taaaaaacgacagcaggacaagtac

SEQ ID NO: 4385107 - DNA, 25 bp, Homo sapien
ctaaaaaacgacagcaggacaagta

SEQ ID NO: 4385108 - DNA, 25 bp, Homo sapien
tctatggccgactgtgttaagcacc

SEQ ID NO: 4385109 - DNA, 25 bp, Homo sapien
taatctatggccgactgtgttaagc

SEQ ID NO: 4385110 - DNA, 25 bp, Homo sapien
actataatctatggccgactgtgtt

SEQ ID NO: 4385111 - DNA, 25 bp, Homo sapien
agaactataatctatggccgactgt

SEQ ID NO: 4385112 - DNA, 25 bp, Homo sapien
ccaggaggacctcaaaggaatagca

SEQ ID NO: 4385113 - DNA, 25 bp, Homo sapien
tgtgtgacctggcaactctcggctt

SEQ ID NO: 4385114 - DNA, 25 bp, Homo sapien
tgttgtccaagcctccacaggcaac

SEQ ID NO: 4385115 - DNA, 25 bp, Homo sapien
ggcaacataattaccagagggagca

SEQ ID NO: 4385116 - DNA, 25 bp, Homo sapien
tgtatagctatcccaaataattaat

SEQ ID NO: 4385117 - DNA, 25 bp, Homo sapien
tatagctatcccaaataattaattt

SEQ ID NO: 4385118 - DNA, 25 bp, Homo sapien
ttgtatagctatcccaaataattaa

SEQ ID NO: 4385119 - DNA, 25 bp, Homo sapien
gtatagctatcccaaataattaatt

SEQ ID NO: 4385120 - DNA, 25 bp, Homo sapien
ggtggcccctcagtgtacgtcttgt

SEQ ID NO: 4385121 - DNA, 25 bp, Homo sapien
gaatcgtatccccaatgcatagcat

SEQ ID NO: 4385122 - DNA, 25 bp, Homo sapien
catttgtattcgacccacagagtcc

SEQ ID NO: 4385123 - DNA, 25 bp, Homo sapien
catagattttagctaggtggcccct

SEQ ID NO: 4385124 - DNA, 25 bp, Homo sapien
acaagcgttgcatcattacatgctt

SEQ ID NO: 4385125 - DNA, 25 bp, Homo sapien
ctgaacaagcgttgcatcattacat

SEQ ID NO: 4385126 - DNA, 25 bp, Homo sapien
tgaacaagcgttgcatcattacatg

SEQ ID NO: 4385127 - DNA, 25 bp, Homo sapien
gaacaagcgttgcatcattacatgc

SEQ ID NO: 4385128 - DNA, 25 bp, Homo sapien
aacagctattgtgagaggttcaaac

SEQ ID NO: 4385129 - DNA, 25 bp, Homo sapien
gaaacagctattgtgagaggttcaa

SEQ ID NO: 4385130 - DNA, 25 bp, Homo sapien
cttgtacgttgctttagcctttact

SEQ ID NO: 4385131 - DNA, 25 bp, Homo sapien
cagaaacagctattgtgagaggttc

SEQ ID NO: 4385132 - DNA, 25 bp, Homo sapien
tctgattccgcagttgttctgcttc

SEQ ID NO: 4385133 - DNA, 25 bp, Homo sapien
gcttcttgcctcaactgttccagtt

SEQ ID NO: 4385134 - DNA, 25 bp, Homo sapien
ctgaatctgattccgcagttgttct

SEQ ID NO: 4385135 - DNA, 25 bp, Homo sapien
gcctcaactgttccagttcgctcat

SEQ ID NO: 4385136 - DNA, 25 bp, Homo sapien
ctcaggagctaatgagtgaaaacag

SEQ ID NO: 4385137 - DNA, 25 bp, Homo sapien
taaagtcagttacagacatcaagac

SEQ ID NO: 4385138 - DNA, 25 bp, Homo sapien
tattcatcatagcttcacaaagtat

SEQ ID NO: 4385139 - DNA, 25 bp, Homo sapien
aaaatgttctaacacagagaaagac

SEQ ID NO: 4385140 - DNA, 25 bp, Homo sapien
tcaatatctaccaaaccacaatact

SEQ ID NO: 4385141 - DNA, 25 bp, Homo sapien
taacaaccataatgaatcaggtaca

SEQ ID NO: 4385142 - DNA, 25 bp, Homo sapien
tgtagcatacggcattaacttttgg

SEQ ID NO: 4385143 - DNA, 25 bp, Homo sapien
aagtgttccatacaaagacatctcc

SEQ ID NO: 4385144 - DNA, 25 bp, Homo sapien
gaagttagtcaaaaccgtacagctg

SEQ ID NO: 4385145 - DNA, 25 bp, Homo sapien
taatacagataactaagatcccttg

SEQ ID NO: 4385146 - DNA, 25 bp, Homo sapien
gtacttaactgcctaccatgttcca

SEQ ID NO: 4385147 - DNA, 25 bp, Homo sapien
tacacagtttcatcggcacggtggc

SEQ ID NO: 4385148 - DNA, 25 bp, Homo sapien
gagcccttttaatacgtaatacaga

SEQ ID NO: 4385149 - DNA, 25 bp, Homo sapien
tgttctgtcaaaaaactacgcttcc

SEQ ID NO: 4385150 - DNA, 25 bp, Homo sapien
tgaccgcaatcctgtttgtaacctt

SEQ ID NO: 4385151 - DNA, 25 bp, Homo sapien
gcgagatcccgcttctatttataaa

SEQ ID NO: 4385152 - DNA, 25 bp, Homo sapien
catttactcagttcctacccggtgc

SEQ ID NO: 4385153 - DNA, 25 bp, Homo sapien
ctgggcagtcccgaatacccgttat

SEQ ID NO: 4385154 - DNA, 25 bp, Homo sapien
aagcactctccacccaacagccctg

SEQ ID NO: 4385155 - DNA, 25 bp, Homo sapien
agccctgctgggcagtcccgaatac

SEQ ID NO: 4385156 - DNA, 25 bp, Homo sapien
ttatgagtcttccaagcactctcca

SEQ ID NO: 4385157 - DNA, 25 bp, Homo sapien
cgagcggtctggaccgcccgggaag

SEQ ID NO: 4385158 - DNA, 25 bp, Homo sapien
gcctcggggagtgacgagaaaccag

SEQ ID NO: 4385159 - DNA, 25 bp, Homo sapien
tcgtggggccagttcccgcgtggca

SEQ ID NO: 4385160 - DNA, 25 bp, Homo sapien
ggtctgcaggacttggaccgccgac

SEQ ID NO: 4385161 - DNA, 25 bp, Homo sapien
cccgttccgcaggggtggctcgcgg

SEQ ID NO: 4385162 - DNA, 25 bp, Homo sapien
gcaggggtggctcgcggcgccccac

SEQ ID NO: 4385163 - DNA, 25 bp, Homo sapien
gccccgttccgcaggggtggctcgc

SEQ ID NO: 4385164 - DNA, 25 bp, Homo sapien
cgttccgcaggggtggctcgcggcg

SEQ ID NO: 4385165 - DNA, 25 bp, Homo sapien
tgcgagaagcccgggatcgcttcgc

SEQ ID NO: 4385166 - DNA, 25 bp, Homo sapien
gcccgggatcgcttcgcggggcgca

SEQ ID NO: 4385167 - DNA, 25 bp, Homo sapien
ctgcgagaagcccgggatcgcttcg

SEQ ID NO: 4385168 - DNA, 25 bp, Homo sapien
gagaagcccgggatcgcttcgcggg

SEQ ID NO: 4385169 - DNA, 25 bp, Homo sapien
ccgccgctcgcgagctcgccgccta

SEQ ID NO: 4385170 - DNA, 25 bp, Homo sapien
cgccgctcgcgagctcgccgcctac

SEQ ID NO: 4385171 - DNA, 25 bp, Homo sapien
cgacgagccgccgctcgcgagctcg

SEQ ID NO: 4385172 - DNA, 25 bp, Homo sapien
cgagccgccgctcgcgagctcgccg

SEQ ID NO: 4385173 - DNA, 25 bp, Homo sapien
tcgaccgcgcgctgccggtgtccgc

SEQ ID NO: 4385174 - DNA, 25 bp, Homo sapien
gcgcgctgccggtgtccgctgggcg

SEQ ID NO: 4385175 - DNA, 25 bp, Homo sapien
tcaggcccgcgtcgaccgcgcgctg

SEQ ID NO: 4385176 - DNA, 25 bp, Homo sapien
ccggtgtccgctgggcgctcagcag

SEQ ID NO: 4385177 - DNA, 25 bp, Homo sapien
cgcggagccggcgtggagagcgcag

SEQ ID NO: 4385178 - DNA, 25 bp, Homo sapien
tggagagcgcagctcacagccgaga

SEQ ID NO: 4385179 - DNA, 25 bp, Homo sapien
gaggcgcgaggcacgaggcgcgcgg

SEQ ID NO: 4385180 - DNA, 25 bp, Homo sapien
gcgcagctcacagccgagaccagag

SEQ ID NO: 4385181 - DNA, 25 bp, Homo sapien
tttttgccagatttcttaattccac

SEQ ID NO: 4385182 - DNA, 25 bp, Homo sapien
ttcactttcagctcctcgagttcct

SEQ ID NO: 4385183 - DNA, 25 bp, Homo sapien
tggccttcactttcagctcctcgag

SEQ ID NO: 4385184 - DNA, 25 bp, Homo sapien
ttctttctggccttcactttcagct

SEQ ID NO: 4385185 - DNA, 25 bp, Homo sapien
actttcagctcctcgagttccttct

SEQ ID NO: 4385186 - DNA, 25 bp, Homo sapien
gtcttgggctgtttcaagggcttct

SEQ ID NO: 4385187 - DNA, 25 bp, Homo sapien
cgtcttgggctgtttcaagggcttc

SEQ ID NO: 4385188 - DNA, 25 bp, Homo sapien
cctgcgtcttgggctgtttcaaggg

SEQ ID NO: 4385189 - DNA, 25 bp, Homo sapien
tgcgtcttgggctgtttcaagggct

SEQ ID NO: 4385190 - DNA, 25 bp, Homo sapien
gaaaggcctcgccagatgacagtgc

SEQ ID NO: 4385191 - DNA, 25 bp, Homo sapien
tgttttggaaaacgaatccctctgc

SEQ ID NO: 4385192 - DNA, 25 bp, Homo sapien
ttcaaatgttcttaagtgctccagc

SEQ ID NO: 4385193 - DNA, 25 bp, Homo sapien
cacaagaataggtttgttactgcag

SEQ ID NO: 4385194 - DNA, 25 bp, Homo sapien
acagctcaatatagcatctacctcc

SEQ ID NO: 4385195 - DNA, 25 bp, Homo sapien
gctcaatatagcatctacctccctg

SEQ ID NO: 4385196 - DNA, 25 bp, Homo sapien
tcacagctcaatatagcatctacct

SEQ ID NO: 4385197 - DNA, 25 bp, Homo sapien
caatatagcatctacctccctggct

SEQ ID NO: 4385198 - DNA, 25 bp, Homo sapien
tctcatcgcaaagctccaaacgtag

SEQ ID NO: 4385199 - DNA, 25 bp, Homo sapien
gctccaaacgtagatctgattgaga

SEQ ID NO: 4385200 - DNA, 25 bp, Homo sapien
caatacggcatcagtaaacagagca

SEQ ID NO: 4385201 - DNA, 25 bp, Homo sapien
agatgtagaacaagtagaggaaagc

SEQ ID NO: 4385202 - DNA, 25 bp, Homo sapien
tggatgacacatgggcacagcagac

SEQ ID NO: 4385203 - DNA, 25 bp, Homo sapien
gcatgaggctcccatgatctctcag

SEQ ID NO: 4385204 - DNA, 25 bp, Homo sapien
ctgtacaagatgctgatagggttaa

SEQ ID NO: 4385205 - DNA, 25 bp, Homo sapien
tcagcctcgcaagcgctgtacaaga

SEQ ID NO: 4385206 - DNA, 25 bp, Homo sapien
cagttgggacggtggaggctcccaa

SEQ ID NO: 4385207 - DNA, 25 bp, Homo sapien
cagcagttgggacggtggaggctcc

SEQ ID NO: 4385208 - DNA, 25 bp, Homo sapien
gtggcagcagttgggacggtggagg

SEQ ID NO: 4385209 - DNA, 25 bp, Homo sapien
ccctgggtggcagcagttgggacgg

SEQ ID NO: 4385210 - DNA, 25 bp, Homo sapien
ttggtctgacgaccccagttcacag

SEQ ID NO: 4385211 - DNA, 25 bp, Homo sapien
ttgtttggtctgacgaccccagttc

SEQ ID NO: 4385212 - DNA, 25 bp, Homo sapien
ctgacgaccccagttcacaggtgga

SEQ ID NO: 4385213 - DNA, 25 bp, Homo sapien
gtctgacgaccccagttcacaggtg

SEQ ID NO: 4385214 - DNA, 25 bp, Homo sapien
caagctattttggatcatacctaca

SEQ ID NO: 4385215 - DNA, 25 bp, Homo sapien
aaatgcatgtcaaatcagaagccag

SEQ ID NO: 4385216 - DNA, 25 bp, Homo sapien
cttatattctagttgaagactggga

SEQ ID NO: 4385217 - DNA, 25 bp, Homo sapien
cattctgggcctctaataagtattt

SEQ ID NO: 4385218 - DNA, 25 bp, Homo sapien
gattttagatgccatgaggatgcac

SEQ ID NO: 4385219 - DNA, 25 bp, Homo sapien
gcaattccagtccacgatggctatg

SEQ ID NO: 4385220 - DNA, 25 bp, Homo sapien
cgttctactgggctgattttggaca

SEQ ID NO: 4385221 - DNA, 25 bp, Homo sapien
ttcacataaatacacccacagagga

SEQ ID NO: 4385222 - DNA, 25 bp, Homo sapien
tatcctagggtctctatggcagtgt

SEQ ID NO: 4385223 - DNA, 25 bp, Homo sapien
tctactaggatggttagacatgcag

SEQ ID NO: 4385224 - DNA, 25 bp, Homo sapien
cacaccaagggctcagtctactagg

SEQ ID NO: 4385225 - DNA, 25 bp, Homo sapien
cagtgtaatagtggcaggaggaaac

SEQ ID NO: 4385226 - DNA, 25 bp, Homo sapien
aattcttggagatctagagcatacc

SEQ ID NO: 4385227 - DNA, 25 bp, Homo sapien
tatttaatagtcttttagcttccca

SEQ ID NO: 4385228 - DNA, 25 bp, Homo sapien
aaaataatgttttacgtgtgccaca

SEQ ID NO: 4385229 - DNA, 25 bp, Homo sapien
tagtggttacatatgccctaacaat

SEQ ID NO: 4385230 - DNA, 25 bp, Homo sapien
ccaactctgtttagtgtattaatta

SEQ ID NO: 4385231 - DNA, 25 bp, Homo sapien
ccttttgtcaccttacgtttcatag

SEQ ID NO: 4385232 - DNA, 25 bp, Homo sapien
tgagaaagagttcccaagcttctac

SEQ ID NO: 4385233 - DNA, 25 bp, Homo sapien
gtttcatagctttagtatactcagg

SEQ ID NO: 4385234 - DNA, 25 bp, Homo sapien
ttggactgttgtgcactgtgattac

SEQ ID NO: 4385235 - DNA, 25 bp, Homo sapien
ttattgactagtaaaagttactgcc

SEQ ID NO: 4385236 - DNA, 25 bp, Homo sapien
taccttaggcttacagaattaaata

SEQ ID NO: 4385237 - DNA, 25 bp, Homo sapien
tactgcctatgctttttaccttagg

SEQ ID NO: 4385238 - DNA, 25 bp, Homo sapien
tataaagtgggaatctcatctgaac

SEQ ID NO: 4385239 - DNA, 25 bp, Homo sapien
caaagtcctccgtttattaacagca

SEQ ID NO: 4385240 - DNA, 25 bp, Homo sapien
aaactacggtattgcctttgctgtg

SEQ ID NO: 4385241 - DNA, 25 bp, Homo sapien
ccttcacactctaaggtagcaggtg

SEQ ID NO: 4385242 - DNA, 25 bp, Homo sapien
atggtaaatttaatagttcagacat

SEQ ID NO: 4385243 - DNA, 25 bp, Homo sapien
tggtaaatttaatagttcagacatc

SEQ ID NO: 4385244 - DNA, 25 bp, Homo sapien
aatggtaaatttaatagttcagaca

SEQ ID NO: 4385245 - DNA, 25 bp, Homo sapien
caaaatggtaaatttaatagttcag

SEQ ID NO: 4385246 - DNA, 25 bp, Homo sapien
gacaagacttgacttttgggcttca

SEQ ID NO: 4385247 - DNA, 25 bp, Homo sapien
ttagacaagacttgacttttgggct

SEQ ID NO: 4385248 - DNA, 25 bp, Homo sapien
tttccttccgtgctttgatgcgggc

SEQ ID NO: 4385249 - DNA, 25 bp, Homo sapien
tgcgggctcgtttctcacgttccag

SEQ ID NO: 4385250 - DNA, 25 bp, Homo sapien
cagtccctgtatttggtgtgttata

SEQ ID NO: 4385251 - DNA, 25 bp, Homo sapien
tgaaaccctataccaactatcccta

SEQ ID NO: 4385252 - DNA, 25 bp, Homo sapien
tatgaacctgtaacaaattgggcct

SEQ ID NO: 4385253 - DNA, 25 bp, Homo sapien
gaatagtaatcactgtaaacctaca

SEQ ID NO: 4385254 - DNA, 25 bp, Homo sapien
gcataccaagctctatttgaattga

SEQ ID NO: 4385255 - DNA, 25 bp, Homo sapien
tgagataacacgtattacagctgga

SEQ ID NO: 4385256 - DNA, 25 bp, Homo sapien
tgccagtgctatgggagaggtcata

SEQ ID NO: 4385257 - DNA, 25 bp, Homo sapien
taaaacctgtaaaagtgatactgga

SEQ ID NO: 4385258 - DNA, 25 bp, Homo sapien
tgaccatatgtcatctggtataaag

SEQ ID NO: 4385259 - DNA, 25 bp, Homo sapien
tcatctggtatgatatatgaccata

SEQ ID NO: 4385260 - DNA, 25 bp, Homo sapien
tctttatgtcatctggtatgatata

SEQ ID NO: 4385261 - DNA, 25 bp, Homo sapien
tggtatgatatatgaccatatgtca

SEQ ID NO: 4385262 - DNA, 25 bp, Homo sapien
tggtccacataaggcaaggcaaaga

SEQ ID NO: 4385263 - DNA, 25 bp, Homo sapien
gccaaggtataacccactgcttgaa

SEQ ID NO: 4385264 - DNA, 25 bp, Homo sapien
tatttaggtgccaaggtataaccca

SEQ ID NO: 4385265 - DNA, 25 bp, Homo sapien
ggcaaagaatcgtttcctattgtat

SEQ ID NO: 4385266 - DNA, 25 bp, Homo sapien
cttagaagagccacagtgttaacta

SEQ ID NO: 4385267 - DNA, 25 bp, Homo sapien
tcttagaagagccacagtgttaact

SEQ ID NO: 4385268 - DNA, 25 bp, Homo sapien
tgaagaagccttagggcatcttctc

SEQ ID NO: 4385269 - DNA, 25 bp, Homo sapien
caactttatctaatgcatccatgga

SEQ ID NO: 4385270 - DNA, 25 bp, Homo sapien
agctctttcttgaccagtctgaaga

SEQ ID NO: 4385271 - DNA, 25 bp, Homo sapien
tcttctccaagcaccaggtctagct

SEQ ID NO: 4385272 - DNA, 25 bp, Homo sapien
tggacttggcattggcaatctctgc

SEQ ID NO: 4385273 - DNA, 25 bp, Homo sapien
taaccgctctggacttggcattggc

SEQ ID NO: 4385274 - DNA, 25 bp, Homo sapien
cttatctaaccgctctggacttggc

SEQ ID NO: 4385275 - DNA, 25 bp, Homo sapien
cgctctggacttggcattggcaatc

SEQ ID NO: 4385276 - DNA, 25 bp, Homo sapien
gtttctttctttcagtaagacatac

SEQ ID NO: 4385277 - DNA, 25 bp, Homo sapien
tagttgctgacaggtccatgctgct

SEQ ID NO: 4385278 - DNA, 25 bp, Homo sapien
tttgttccttagttgctgacaggtc

SEQ ID NO: 4385279 - DNA, 25 bp, Homo sapien
caaagtttgtgtaaatcttcattac

SEQ ID NO: 4385280 - DNA, 25 bp, Homo sapien
ttccttagttgctgacaggtccatg

SEQ ID NO: 4385281 - DNA, 25 bp, Homo sapien
ccttgacaatgtggtatgaagtaat

SEQ ID NO: 4385282 - DNA, 25 bp, Homo sapien
tccttgacaatgtggtatgaagtaa

SEQ ID NO: 4385283 - DNA, 25 bp, Homo sapien
ttggtgtactcttaggcaacaaact

SEQ ID NO: 4385284 - DNA, 25 bp, Homo sapien
tgtactcttaggcaacaaactaaga

SEQ ID NO: 4385285 - DNA, 25 bp, Homo sapien
catttggtgtactcttaggcaacaa

SEQ ID NO: 4385286 - DNA, 25 bp, Homo sapien
acatttggtgtactcttaggcaaca

SEQ ID NO: 4385287 - DNA, 25 bp, Homo sapien
agaagggccaaaccggccgcagcca

SEQ ID NO: 4385288 - DNA, 25 bp, Homo sapien
cctgaggagttattaacgatcggga

SEQ ID NO: 4385289 - DNA, 25 bp, Homo sapien
gttattaacgatcgggaagatttca

SEQ ID NO: 4385290 - DNA, 25 bp, Homo sapien
gatttcagggcggatgaaactctcc

SEQ ID NO: 4385291 - DNA, 25 bp, Homo sapien
ctcctgcccgtagtagccatggcgg

SEQ ID NO: 4385292 - DNA, 25 bp, Homo sapien
ccatgagtttgttgcggcgggtttc

SEQ ID NO: 4385293 - DNA, 25 bp, Homo sapien
tactgcggtggcagctctgtctggc

SEQ ID NO: 4385294 - DNA, 25 bp, Homo sapien
cactcgtggctttccgaaggctgct

SEQ ID NO: 4385295 - DNA, 25 bp, Homo sapien
ggtaatgtgcctacctcataacaag

SEQ ID NO: 4385296 - DNA, 25 bp, Homo sapien
aaacccagtcatcctgcttatgagc

SEQ ID NO: 4385297 - DNA, 25 bp, Homo sapien
atgtgcctacctcataacaaggttt

SEQ ID NO: 4385298 - DNA, 25 bp, Homo sapien
agtcatcctgcttatgagctacaaa

SEQ ID NO: 4385299 - DNA, 25 bp, Homo sapien
atagcactctgacctgggcaaccgt

SEQ ID NO: 4385300 - DNA, 25 bp, Homo sapien
gatcattctccgaaagcaactcctg

SEQ ID NO: 4385301 - DNA, 25 bp, Homo sapien
atgcatgtgagaggagatggaccct

SEQ ID NO: 4385302 - DNA, 25 bp, Homo sapien
caaaagagcctctgacattactgtc

SEQ ID NO: 4385303 - DNA, 25 bp, Homo sapien
tatttagtacctgaggctcagatgt

SEQ ID NO: 4385304 - DNA, 25 bp, Homo sapien
aatgacaagaggtagtatttagtac

SEQ ID NO: 4385305 - DNA, 25 bp, Homo sapien
tttcagtaaagactgtttcgctgtg

SEQ ID NO: 4385306 - DNA, 25 bp, Homo sapien
gatgttaaacacaaactcagtattt

SEQ ID NO: 4385307 - DNA, 25 bp, Homo sapien
cacaagtgaattgaaaagccacagg

SEQ ID NO: 4385308 - DNA, 25 bp, Homo sapien
caaatcagggtatttgaatatacat

SEQ ID NO: 4385309 - DNA, 25 bp, Homo sapien
tttgctgcctaaacacacaagtgaa

SEQ ID NO: 4385310 - DNA, 25 bp, Homo sapien
tgggtctccacttaaggccaaatgg

SEQ ID NO: 4385311 - DNA, 25 bp, Homo sapien
tactgatgtggataaaatacttggc

SEQ ID NO: 4385312 - DNA, 25 bp, Homo sapien
tggataaaatacttggcccataggt

SEQ ID NO: 4385313 - DNA, 25 bp, Homo sapien
aatccagattggaagagtaaccttt

SEQ ID NO: 4385314 - DNA, 25 bp, Homo sapien
taacctttgatgatactgatgtgga

SEQ ID NO: 4385315 - DNA, 25 bp, Homo sapien
caacaaaagtggatacttaatgcaa

SEQ ID NO: 4385316 - DNA, 25 bp, Homo sapien
agcatacaccctattccaatctaga

SEQ ID NO: 4385317 - DNA, 25 bp, Homo sapien
gagataaccactgctagcatacacc

SEQ ID NO: 4385318 - DNA, 25 bp, Homo sapien
catatgtttacgtatttaagcggga

SEQ ID NO: 4385319 - DNA, 25 bp, Homo sapien
ctgagatcaagagttattctatgta

SEQ ID NO: 4385320 - DNA, 25 bp, Homo sapien
tgacattcgtcatagtaactaatat

SEQ ID NO: 4385321 - DNA, 25 bp, Homo sapien
cctgcatgttattggaagacatctg

SEQ ID NO: 4385322 - DNA, 25 bp, Homo sapien
catatatggctttgtaggatccctg

SEQ ID NO: 4385323 - DNA, 25 bp, Homo sapien
aagcacattcttcaggtatgtggtg

SEQ ID NO: 4385324 - DNA, 25 bp, Homo sapien
gcacattcttcaggtatgtggtgtg

SEQ ID NO: 4385325 - DNA, 25 bp, Homo sapien
agcacattcttcaggtatgtggtgt

SEQ ID NO: 4385326 - DNA, 25 bp, Homo sapien
ctaatttcacgagtgccacagtacc

SEQ ID NO: 4385327 - DNA, 25 bp, Homo sapien
tgccacagtaccaggtctgtaatga

SEQ ID NO: 4385328 - DNA, 25 bp, Homo sapien
gaggtttcttcacccgtccagtaga

SEQ ID NO: 4385329 - DNA, 25 bp, Homo sapien
ttcttcacccgtccagtagagggcg

SEQ ID NO: 4385330 - DNA, 25 bp, Homo sapien
ttttgggcagtcagctttgtaccag

SEQ ID NO: 4385331 - DNA, 25 bp, Homo sapien
ttgggcagtcagctttgtaccagcc

SEQ ID NO: 4385332 - DNA, 25 bp, Homo sapien
ccaattgatttttgggcagtcagct

SEQ ID NO: 4385333 - DNA, 25 bp, Homo sapien
caccaattgatttttgggcagtcag

SEQ ID NO: 4385334 - DNA, 25 bp, Homo sapien
cttgccactgtttttgtcagggagc

SEQ ID NO: 4385335 - DNA, 25 bp, Homo sapien
ttcaccagtgtctcggagcccagca

SEQ ID NO: 4385336 - DNA, 25 bp, Homo sapien
ttagggcgagtaggctgtgagagcc

SEQ ID NO: 4385337 - DNA, 25 bp, Homo sapien
agagcctctaagtcttgcagctcct

SEQ ID NO: 4385338 - DNA, 25 bp, Homo sapien
atacatatacataagatgggcatgg

SEQ ID NO: 4385339 - DNA, 25 bp, Homo sapien
aatatacatatacataagatgggca

SEQ ID NO: 4385340 - DNA, 25 bp, Homo sapien
cagtggttagcattagaaataatat

SEQ ID NO: 4385341 - DNA, 25 bp, Homo sapien
gcagtggttagcattagaaataata

SEQ ID NO: 4385342 - DNA, 25 bp, Homo sapien
ccgtgcccggcgctacattgttata

SEQ ID NO: 4385343 - DNA, 25 bp, Homo sapien
cgtgcccggcgctacattgttatag

SEQ ID NO: 4385344 - DNA, 25 bp, Homo sapien
gtgcccggcgctacattgttatagt

SEQ ID NO: 4385345 - DNA, 25 bp, Homo sapien
catgtgtcaccaaaagaagggaata

SEQ ID NO: 4385346 - DNA, 25 bp, Homo sapien
gactacagtgttgtgaccaagcgag

SEQ ID NO: 4385347 - DNA, 25 bp, Homo sapien
gaaacgattgctcggctgtccatag

SEQ ID NO: 4385348 - DNA, 25 bp, Homo sapien
gtctgtggagctgccgaatagtcat

SEQ ID NO: 4385349 - DNA, 25 bp, Homo sapien
ctgtccataggagcacttggagcca

SEQ ID NO: 4385350 - DNA, 25 bp, Homo sapien
agagggagaccgtggggagacggag

SEQ ID NO: 4385351 - DNA, 25 bp, Homo sapien
ggagaccgtggggagacggagagga

SEQ ID NO: 4385352 - DNA, 25 bp, Homo sapien
aggagaatcaggcagcagtaccgtc

SEQ ID NO: 4385353 - DNA, 25 bp, Homo sapien
gaccgtggggagacggagaggaaga

SEQ ID NO: 4385354 - DNA, 25 bp, Homo sapien
ctgtagggtcctgcatggggcattt

SEQ ID NO: 4385355 - DNA, 25 bp, Homo sapien
agctggcctcggcagccgtcacctc

SEQ ID NO: 4385356 - DNA, 25 bp, Homo sapien
gccttctccactggcagatagcctg

SEQ ID NO: 4385357 - DNA, 25 bp, Homo sapien
gctggtcccccacgaaatccagcat

SEQ ID NO: 4385358 - DNA, 25 bp, Homo sapien
ccccaggtattgttgagtctgttca

SEQ ID NO: 4385359 - DNA, 25 bp, Homo sapien
cttctaggtaccaaggatattagcc

SEQ ID NO: 4385360 - DNA, 25 bp, Homo sapien
cactcttgatgtgccgcttgtctca

SEQ ID NO: 4385361 - DNA, 25 bp, Homo sapien
cattgtaggcaaaatcctcttgtgg

SEQ ID NO: 4385362 - DNA, 25 bp, Homo sapien
tccagatagctcatgcaaaatcata

SEQ ID NO: 4385363 - DNA, 25 bp, Homo sapien
tgatttccagatagctcatgcaaaa

SEQ ID NO: 4385364 - DNA, 25 bp, Homo sapien
ccaaaaatgcattcctgatttccag

SEQ ID NO: 4385365 - DNA, 25 bp, Homo sapien
cacaaaattcaatttcaggttaaat

SEQ ID NO: 4385366 - DNA, 25 bp, Homo sapien
cctttagccagtagtacaaattgga

SEQ ID NO: 4385367 - DNA, 25 bp, Homo sapien
agccagtagtacaaattggattcca

SEQ ID NO: 4385368 - DNA, 25 bp, Homo sapien
ttagccagtagtacaaattggattc

SEQ ID NO: 4385369 - DNA, 25 bp, Homo sapien
aggacctttagccagtagtacaaat

SEQ ID NO: 4385370 - DNA, 25 bp, Homo sapien
tccagattgactgagaaagcacggt

SEQ ID NO: 4385371 - DNA, 25 bp, Homo sapien
tcaactaccatacaaacagggctgt

SEQ ID NO: 4385372 - DNA, 25 bp, Homo sapien
tttcctggtggacgagatctaccca

SEQ ID NO: 4385373 - DNA, 25 bp, Homo sapien
aagtatcccacggagctcatcaggg

SEQ ID NO: 4385374 - DNA, 25 bp, Homo sapien
ttttgaaactcagcaataatcactg

SEQ ID NO: 4385375 - DNA, 25 bp, Homo sapien
gaagtagcctactagaaatggttat

SEQ ID NO: 4385376 - DNA, 25 bp, Homo sapien
gcctactagaaatggttatattttg

SEQ ID NO: 4385377 - DNA, 25 bp, Homo sapien
cagcatgtagaagtagcctactaga

SEQ ID NO: 4385378 - DNA, 25 bp, Homo sapien
tctcagagtacctcagaagggaaat

SEQ ID NO: 4385379 - DNA, 25 bp, Homo sapien
ggaagtcacctgtatgtaactgaag

SEQ ID NO: 4385380 - DNA, 25 bp, Homo sapien
catgccatgaagataagatgccaaa

SEQ ID NO: 4385381 - DNA, 25 bp, Homo sapien
ctacaggcgaagtcagtccctggaa

SEQ ID NO: 4385382 - DNA, 25 bp, Homo sapien
cagactgggtttctcgaattctaca

SEQ ID NO: 4385383 - DNA, 25 bp, Homo sapien
ctgagactgggtggtcgctgctacc

SEQ ID NO: 4385384 - DNA, 25 bp, Homo sapien
tcttacaataccattcttgaaagca

SEQ ID NO: 4385385 - DNA, 25 bp, Homo sapien
tgtagagaagcacggtctgagactg

SEQ ID NO: 4385386 - DNA, 25 bp, Homo sapien
cagtagaagcttattccccagccaa

SEQ ID NO: 4385387 - DNA, 25 bp, Homo sapien
gataacttctatacctgacattggg

SEQ ID NO: 4385388 - DNA, 25 bp, Homo sapien
tggtttctgttaacttgaggccctc

SEQ ID NO: 4385389 - DNA, 25 bp, Homo sapien
gaatgcatgaagagacagtaccttg

SEQ ID NO: 4385390 - DNA, 25 bp, Homo sapien
tttggtccgttgatctagtgaggct

SEQ ID NO: 4385391 - DNA, 25 bp, Homo sapien
ccttgggctatatgaccatggcctt

SEQ ID NO: 4385392 - DNA, 25 bp, Homo sapien
tctctggaatcaaagggctacagta

SEQ ID NO: 4385393 - DNA, 25 bp, Homo sapien
tttggatctgaacagagactgggca

SEQ ID NO: 4385394 - DNA, 25 bp, Homo sapien
ggtccatcagagagagcgcaattct

SEQ ID NO: 4385395 - DNA, 25 bp, Homo sapien
tcccagagattgcaggatgaggaac

SEQ ID NO: 4385396 - DNA, 25 bp, Homo sapien
cagtgagaaaattgctgaccgcttc

SEQ ID NO: 4385397 - DNA, 25 bp, Homo sapien
gaggacatccaggtcaccaagatta

SEQ ID NO: 4385398 - DNA, 25 bp, Homo sapien
tgagaacaccaagtctgagacaagc

SEQ ID NO: 4385399 - DNA, 25 bp, Homo sapien
tgcagttcttgagggagcggtccca

SEQ ID NO: 4385400 - DNA, 25 bp, Homo sapien
tagtcgatacgttccaaagtagcca

SEQ ID NO: 4385401 - DNA, 25 bp, Homo sapien
tatgtctctctctcgccgggtgtag

SEQ ID NO: 4385402 - DNA, 25 bp, Homo sapien
aaaacagtaaccctgctgaattttg

SEQ ID NO: 4385403 - DNA, 25 bp, Homo sapien
tcatgggtccctgaaaacagtaacc

SEQ ID NO: 4385404 - DNA, 25 bp, Homo sapien
cctgaaaacagtaaccctgctgaat

SEQ ID NO: 4385405 - DNA, 25 bp, Homo sapien
cttcatgggtccctgaaaacagtaa

SEQ ID NO: 4385406 - DNA, 25 bp, Homo sapien
gccccgaggcggttccatagtgaat

SEQ ID NO: 4385407 - DNA, 25 bp, Homo sapien
cctaggttgtatctggaccggatga

SEQ ID NO: 4385408 - DNA, 25 bp, Homo sapien
gaatctccagtgctcgcgtataggc

SEQ ID NO: 4385409 - DNA, 25 bp, Homo sapien
tgtaggcgcccaggttgatgcagct

SEQ ID NO: 4385410 - DNA, 25 bp, Homo sapien
ggaacagaacccctagacctgtctg

SEQ ID NO: 4385411 - DNA, 25 bp, Homo sapien
tctggccgaacagttaaggcagcgt

SEQ ID NO: 4385412 - DNA, 25 bp, Homo sapien
ggcagcgttaaatgcatctattgct

SEQ ID NO: 4385413 - DNA, 25 bp, Homo sapien
gcaggtctgggtcgatcatatctcc

SEQ ID NO: 4385414 - DNA, 25 bp, Homo sapien
aatccaattcttcagagcgtcacag

SEQ ID NO: 4385415 - DNA, 25 bp, Homo sapien
gggacttagacatccgccgggtgag

SEQ ID NO: 4385416 - DNA, 25 bp, Homo sapien
tcaaagcttttaagttgttgggctg

SEQ ID NO: 4385417 - DNA, 25 bp, Homo sapien
cctgctgatggccagtgttagtata

SEQ ID NO: 4385418 - DNA, 25 bp, Homo sapien
aaataggagctctagtcaagtaggg

SEQ ID NO: 4385419 - DNA, 25 bp, Homo sapien
ctggatgcacattacaaacacctgg

SEQ ID NO: 4385420 - DNA, 25 bp, Homo sapien
catgtgtatacagggttaagaacca

SEQ ID NO: 4385421 - DNA, 25 bp, Homo sapien
gattgtaaagccctagaattgcaag

SEQ ID NO: 4385422 - DNA, 25 bp, Homo sapien
gggcgacaatagctgcttgttcatt

SEQ ID NO: 4385423 - DNA, 25 bp, Homo sapien
ctctggagggcgacaatagctgctt

SEQ ID NO: 4385424 - DNA, 25 bp, Homo sapien
gggttatcccgaggaactgccatgc

SEQ ID NO: 4385425 - DNA, 25 bp, Homo sapien
cattttcattctccgcctgggttat

SEQ ID NO: 4385426 - DNA, 25 bp, Homo sapien
ccaatctttatttataggcactgta

SEQ ID NO: 4385427 - DNA, 25 bp, Homo sapien
gcactgtaaacactgccaattagaa

SEQ ID NO: 4385428 - DNA, 25 bp, Homo sapien
cttttaaacaagtagactaagctag

SEQ ID NO: 4385429 - DNA, 25 bp, Homo sapien
taagctaggttaactcctctgggaa

SEQ ID NO: 4385430 - DNA, 25 bp, Homo sapien
gagtctggcagaatgaagggagaat

SEQ ID NO: 4385431 - DNA, 25 bp, Homo sapien
tctgagtctggcagaatgaagggag

SEQ ID NO: 4385432 - DNA, 25 bp, Homo sapien
tctggcagaatgaagggagaatgac

SEQ ID NO: 4385433 - DNA, 25 bp, Homo sapien
atgccctttctgagtctggcagaat

SEQ ID NO: 4385434 - DNA, 25 bp, Homo sapien
caggatggtgactggcagatcccct

SEQ ID NO: 4385435 - DNA, 25 bp, Homo sapien
tgctgcttccatgaacaggatggtg

SEQ ID NO: 4385436 - DNA, 25 bp, Homo sapien
gatggtgactggcagatccccttcc

SEQ ID NO: 4385437 - DNA, 25 bp, Homo sapien
ggttttcagtgtgaaagtaatatcc

SEQ ID NO: 4385438 - DNA, 25 bp, Homo sapien
ttctcactagccgagatggttactt

SEQ ID NO: 4385439 - DNA, 25 bp, Homo sapien
cagatatccagttcctccgagccat

SEQ ID NO: 4385440 - DNA, 25 bp, Homo sapien
cactagccgagatggttacttggtt

SEQ ID NO: 4385441 - DNA, 25 bp, Homo sapien
tggttctcagatatccagttcctcc

SEQ ID NO: 4385442 - DNA, 25 bp, Homo sapien
cattgcaagtgattctaccattatt

SEQ ID NO: 4385443 - DNA, 25 bp, Homo sapien
ctaccattattcttaactctgcttc

SEQ ID NO: 4385444 - DNA, 25 bp, Homo sapien
gcattcattgcaagtgattctacca

SEQ ID NO: 4385445 - DNA, 25 bp, Homo sapien
cagcattcattgcaagtgattctac

SEQ ID NO: 4385446 - DNA, 25 bp, Homo sapien
aaagtaatgcgcttccccagcgatg

SEQ ID NO: 4385447 - DNA, 25 bp, Homo sapien
tttctagaaagtaatgcgcttcccc

SEQ ID NO: 4385448 - DNA, 25 bp, Homo sapien
agcgatgttctttggtcagtcgagc

SEQ ID NO: 4385449 - DNA, 25 bp, Homo sapien
gcttccccagcgatgttctttggtc

SEQ ID NO: 4385450 - DNA, 25 bp, Homo sapien
tgggctttagaagtgggcaatggca

SEQ ID NO: 4385451 - DNA, 25 bp, Homo sapien
gggcaatggcagctgaatgccggag

SEQ ID NO: 4385452 - DNA, 25 bp, Homo sapien
ctagcaaggtcctactgcctgggct

SEQ ID NO: 4385453 - DNA, 25 bp, Homo sapien
tggcagctgaatgccggaggggcct

SEQ ID NO: 4385454 - DNA, 25 bp, Homo sapien
taacacggtcattgaaagcatatgc

SEQ ID NO: 4385455 - DNA, 25 bp, Homo sapien
taacaactagcagaccttgactgac

SEQ ID NO: 4385456 - DNA, 25 bp, Homo sapien
catctgtaaagcatacggtcacatg

SEQ ID NO: 4385457 - DNA, 25 bp, Homo sapien
gcaaaactccgttggctaaccacaa

SEQ ID NO: 4385458 - DNA, 25 bp, Homo sapien
tggacgtgccgggtactttgaacta

SEQ ID NO: 4385459 - DNA, 25 bp, Homo sapien
cagacttgctggtttaggattgaga

SEQ ID NO: 4385460 - DNA, 25 bp, Homo sapien
gggactcagatgaactttaccaggc

SEQ ID NO: 4385461 - DNA, 25 bp, Homo sapien
cataaataaggctgcgctttgtccc

SEQ ID NO: 4385462 - DNA, 25 bp, Homo sapien
accactcagttctggttgagatctg

SEQ ID NO: 4385463 - DNA, 25 bp, Homo sapien
tgagtcggagccactaattccaatt

SEQ ID NO: 4385464 - DNA, 25 bp, Homo sapien
aagccgactcagagttgagggcgct

SEQ ID NO: 4385465 - DNA, 25 bp, Homo sapien
gagggcgctttttccaccactcagt

SEQ ID NO: 4385466 - DNA, 25 bp, Homo sapien
cccttggtatttcgatctccatgaa

SEQ ID NO: 4385467 - DNA, 25 bp, Homo sapien
tccatgaaacttaacatcgtcccat

SEQ ID NO: 4385468 - DNA, 25 bp, Homo sapien
ccagttctagatgaggatgattttc

SEQ ID NO: 4385469 - DNA, 25 bp, Homo sapien
gattttctctctgccattggatgtc

SEQ ID NO: 4385470 - DNA, 25 bp, Homo sapien
tcactcaggtcgaggagatctaagc

SEQ ID NO: 4385471 - DNA, 25 bp, Homo sapien
tgaggtcagatccatcggccttttt

SEQ ID NO: 4385472 - DNA, 25 bp, Homo sapien
cagcatccgtgctgatgaggtcaga

SEQ ID NO: 4385473 - DNA, 25 bp, Homo sapien
tttgggtttgagagactggttcact

SEQ ID NO: 4385474 - DNA, 25 bp, Homo sapien
tgaacctcatctgatagtatgtgaa

SEQ ID NO: 4385475 - DNA, 25 bp, Homo sapien
tctcgagttttgaaggggccagctc

SEQ ID NO: 4385476 - DNA, 25 bp, Homo sapien
gtttcacggatcagaggaatgaacc

SEQ ID NO: 4385477 - DNA, 25 bp, Homo sapien
gcaattggacatacaaggttatctg

SEQ ID NO: 4385478 - DNA, 25 bp, Homo sapien
gaaagtcatcgatggagggactcag

SEQ ID NO: 4385479 - DNA, 25 bp, Homo sapien
gcttccgatttggtttcacagagaa

SEQ ID NO: 4385480 - DNA, 25 bp, Homo sapien
cagctgtattggatgttactggcct

SEQ ID NO: 4385481 - DNA, 25 bp, Homo sapien
ggccttgctattgcttccgatttgg

SEQ ID NO: 4385482 - DNA, 25 bp, Homo sapien
ggaccagtggcttcagactcaaaga

SEQ ID NO: 4385483 - DNA, 25 bp, Homo sapien
accagtggcttcagactcaaagatg

SEQ ID NO: 4385484 - DNA, 25 bp, Homo sapien
gaccagtggcttcagactcaaagat

SEQ ID NO: 4385485 - DNA, 25 bp, Homo sapien
aagctatcctcgcatctcagtatcc

SEQ ID NO: 4385486 - DNA, 25 bp, Homo sapien
ctcgcatctcagtatcccaaatagc

SEQ ID NO: 4385487 - DNA, 25 bp, Homo sapien
caaggtcccaccatcttgcctaggc

SEQ ID NO: 4385488 - DNA, 25 bp, Homo sapien
atcctcgcatctcagtatcccaaat

SEQ ID NO: 4385489 - DNA, 25 bp, Homo sapien
gcagtctcatagtttagagctgatg

SEQ ID NO: 4385490 - DNA, 25 bp, Homo sapien
tggcacagtgtcagcagtctcatag

SEQ ID NO: 4385491 - DNA, 25 bp, Homo sapien
caggggacctgagtaatggtaacta

SEQ ID NO: 4385492 - DNA, 25 bp, Homo sapien
taactatggggagaaagtgcacttc

SEQ ID NO: 4385493 - DNA, 25 bp, Homo sapien
agggcaatatggaagcacttagtgg

SEQ ID NO: 4385494 - DNA, 25 bp, Homo sapien
tgaaagggcaatatggaagcactta

SEQ ID NO: 4385495 - DNA, 25 bp, Homo sapien
gaagcacttagtggtcttttggaga

SEQ ID NO: 4385496 - DNA, 25 bp, Homo sapien
gaaagggcaatatggaagcacttag

SEQ ID NO: 4385497 - DNA, 25 bp, Homo sapien
tctcatttgtagttagtgcatgtcc

SEQ ID NO: 4385498 - DNA, 25 bp, Homo sapien
gatcaacgcagtgatgaggtcctac

SEQ ID NO: 4385499 - DNA, 25 bp, Homo sapien
tccaaaggacctgtacattgataca

SEQ ID NO: 4385500 - DNA, 25 bp, Homo sapien
gaactcatctagtgtgatcaacgca

SEQ ID NO: 4385501 - DNA, 25 bp, Homo sapien
gcagactcctccctcggtatctcct

SEQ ID NO: 4385502 - DNA, 25 bp, Homo sapien
agtaaggaggggcttttcttcagca

SEQ ID NO: 4385503 - DNA, 25 bp, Homo sapien
gatgtcatagtaaggaggggctttt

SEQ ID NO: 4385504 - DNA, 25 bp, Homo sapien
tccctcggtatctccttcatcacca

SEQ ID NO: 4385505 - DNA, 25 bp, Homo sapien
aacagccttatctgccgccctagag

SEQ ID NO: 4385506 - DNA, 25 bp, Homo sapien
ggcaacagccttatctgccgcccta

SEQ ID NO: 4385507 - DNA, 25 bp, Homo sapien
ttatctgccgccctagagccttttc

SEQ ID NO: 4385508 - DNA, 25 bp, Homo sapien
cttatctgccgccctagagcctttt

SEQ ID NO: 4385509 - DNA, 25 bp, Homo sapien
acaaagtggcatgcttatatttcaa

SEQ ID NO: 4385510 - DNA, 25 bp, Homo sapien
tctagtaatatagcaataaacaaag

SEQ ID NO: 4385511 - DNA, 25 bp, Homo sapien
ctttccatgcttcagtaagttctag

SEQ ID NO: 4385512 - DNA, 25 bp, Homo sapien
caaagtggcatgcttatatttcaat

SEQ ID NO: 4385513 - DNA, 25 bp, Homo sapien
cttttttgaagacagtgccactttt

SEQ ID NO: 4385514 - DNA, 25 bp, Homo sapien
caaagccagggtcaggtcacttttt

SEQ ID NO: 4385515 - DNA, 25 bp, Homo sapien
tttttgaagacagtgccactttttc

SEQ ID NO: 4385516 - DNA, 25 bp, Homo sapien
gccagggtcaggtcacttttttgaa

SEQ ID NO: 4385517 - DNA, 25 bp, Homo sapien
ttggcttttgcgataataccccatg

SEQ ID NO: 4385518 - DNA, 25 bp, Homo sapien
gataataccccatgagcgtcactgt

SEQ ID NO: 4385519 - DNA, 25 bp, Homo sapien
cccatgagcgtcactgttttacaag

SEQ ID NO: 4385520 - DNA, 25 bp, Homo sapien
tttgcgataataccccatgagcgtc

SEQ ID NO: 4385521 - DNA, 25 bp, Homo sapien
ggcggcagccacttctcactataat

SEQ ID NO: 4385522 - DNA, 25 bp, Homo sapien
gttcatgatctcgctcagatttggg

SEQ ID NO: 4385523 - DNA, 25 bp, Homo sapien
tctcactataatcacataggcaaac

SEQ ID NO: 4385524 - DNA, 25 bp, Homo sapien
gatttggggcggcagccacttctca

SEQ ID NO: 4385525 - DNA, 25 bp, Homo sapien
tttttcccctccagcattgctttct

SEQ ID NO: 4385526 - DNA, 25 bp, Homo sapien
ttctccatgcaacaggtgcacattt

SEQ ID NO: 4385527 - DNA, 25 bp, Homo sapien
ccagcattgctttctccatgcaaca

SEQ ID NO: 4385528 - DNA, 25 bp, Homo sapien
ccatgcaacaggtgcacatttcttc

SEQ ID NO: 4385529 - DNA, 25 bp, Homo sapien
cacggcaaacactcacggtaagaag

SEQ ID NO: 4385530 - DNA, 25 bp, Homo sapien
aaagtgaaatttgatccttatcatg

SEQ ID NO: 4385531 - DNA, 25 bp, Homo sapien
aaacactcacggtaagaagagagac

SEQ ID NO: 4385532 - DNA, 25 bp, Homo sapien
agtgaaatttgatccttatcatgac

SEQ ID NO: 4385533 - DNA, 25 bp, Homo sapien
gaaggctgtgtgcagaatctgagag

SEQ ID NO: 4385534 - DNA, 25 bp, Homo sapien
ttggaaggctgtgtgcagaatctga

SEQ ID NO: 4385535 - DNA, 25 bp, Homo sapien
tgtgtgcagaatctgagaggtaaga

SEQ ID NO: 4385536 - DNA, 25 bp, Homo sapien
caagttggaaggctgtgtgcagaat

SEQ ID NO: 4385537 - DNA, 25 bp, Homo sapien
tcattagtgtgagttactgagaatc

SEQ ID NO: 4385538 - DNA, 25 bp, Homo sapien
tagtgtgagttactgagaatccagc

SEQ ID NO: 4385539 - DNA, 25 bp, Homo sapien
cctgtcattagtgtgagttactgag

SEQ ID NO: 4385540 - DNA, 25 bp, Homo sapien
cattagtgtgagttactgagaatcc

SEQ ID NO: 4385541 - DNA, 25 bp, Homo sapien
gacctgcgtagacctatcttgctct

SEQ ID NO: 4385542 - DNA, 25 bp, Homo sapien
ttttaaatctgtcccggtgacctgc

SEQ ID NO: 4385543 - DNA, 25 bp, Homo sapien
ttgtttatcagaccgggacatagct

SEQ ID NO: 4385544 - DNA, 25 bp, Homo sapien
aactcccatgacatcttttcccaaa

SEQ ID NO: 4385545 - DNA, 25 bp, Homo sapien
agctctgagatttagtctgggcttt

SEQ ID NO: 4385546 - DNA, 25 bp, Homo sapien
cagctctgagatttagtctgggctt

SEQ ID NO: 4385547 - DNA, 25 bp, Homo sapien
tcagctctgagatttagtctgggct

SEQ ID NO: 4385548 - DNA, 25 bp, Homo sapien
ccagtctgtgcgatgccaaaatcca

SEQ ID NO: 4385549 - DNA, 25 bp, Homo sapien
gttcagcggcatttatacgttcaca

SEQ ID NO: 4385550 - DNA, 25 bp, Homo sapien
catagtgtgaatttgaacgccagtc

SEQ ID NO: 4385551 - DNA, 25 bp, Homo sapien
caccatgatgttatagtaagcgttc

SEQ ID NO: 4385552 - DNA, 25 bp, Homo sapien
tggcctccggactgaaattaattgt

SEQ ID NO: 4385553 - DNA, 25 bp, Homo sapien
cgatgtccctctcgcggctgttctg

SEQ ID NO: 4385554 - DNA, 25 bp, Homo sapien
aatgacaacactgcgggaccgcgga

SEQ ID NO: 4385555 - DNA, 25 bp, Homo sapien
tgggcctcatttctcctccgagggc

SEQ ID NO: 4385556 - DNA, 25 bp, Homo sapien
gaaaggccgtattactttggcatca

SEQ ID NO: 4385557 - DNA, 25 bp, Homo sapien
tgagtctcctgtatactcgaccctg

SEQ ID NO: 4385558 - DNA, 25 bp, Homo sapien
gagctagaacaaccaaaggacgcag

SEQ ID NO: 4385559 - DNA, 25 bp, Homo sapien
tatagtagacataatggaaaggccg

SEQ ID NO: 4385560 - DNA, 25 bp, Homo sapien
tgtcagcatgactttaaattgcccc

SEQ ID NO: 4385561 - DNA, 25 bp, Homo sapien
ttaagcatcttaacacagtggatct

SEQ ID NO: 4385562 - DNA, 25 bp, Homo sapien
aaattgcccctagtattccataata

SEQ ID NO: 4385563 - DNA, 25 bp, Homo sapien
tgtcagtataaactctgtcagcatg

SEQ ID NO: 4385564 - DNA, 25 bp, Homo sapien
gcctgaaagctgaactgtcgatacg

SEQ ID NO: 4385565 - DNA, 25 bp, Homo sapien
tacggttcacaatcaccatggccag

SEQ ID NO: 4385566 - DNA, 25 bp, Homo sapien
gctgacttcaaaacggatgggcctg

SEQ ID NO: 4385567 - DNA, 25 bp, Homo sapien
tcattagacaaaagcactggcagct

SEQ ID NO: 4385568 - DNA, 25 bp, Homo sapien
tattgcctgtgatgtgaagtaacct

SEQ ID NO: 4385569 - DNA, 25 bp, Homo sapien
tagaaaggcagttacaggagtggct

SEQ ID NO: 4385570 - DNA, 25 bp, Homo sapien
tgtcaacagggaggaaacactttgt

SEQ ID NO: 4385571 - DNA, 25 bp, Homo sapien
gaagtaacctggtgaacccagtcaa

SEQ ID NO: 4385572 - DNA, 25 bp, Homo sapien
tcatttctggacctggatgattgga

SEQ ID NO: 4385573 - DNA, 25 bp, Homo sapien
cagagatgttaagggctagtaccaa

SEQ ID NO: 4385574 - DNA, 25 bp, Homo sapien
ctagtaccaattcagtggcatgggc

SEQ ID NO: 4385575 - DNA, 25 bp, Homo sapien
ggcccatataacatccaagctagtg

SEQ ID NO: 4385576 - DNA, 25 bp, Homo sapien
gaaattgagcaaattcaggtgcctt

SEQ ID NO: 4385577 - DNA, 25 bp, Homo sapien
ctgcttttgatcaacaattatttcg

SEQ ID NO: 4385578 - DNA, 25 bp, Homo sapien
gatcaacaattatttcgaggtcttc

SEQ ID NO: 4385579 - DNA, 25 bp, Homo sapien
tcactgcttagttttccatatcctt

SEQ ID NO: 4385580 - DNA, 25 bp, Homo sapien
ttatttcgaggtcttcatcactgct

SEQ ID NO: 4385581 - DNA, 25 bp, Homo sapien
gcagtggcttccttgccagaacttg

SEQ ID NO: 4385582 - DNA, 25 bp, Homo sapien
gagatggaatgtgggtccttccatc

SEQ ID NO: 4385583 - DNA, 25 bp, Homo sapien
catgacccggtttctggacaaaagg

SEQ ID NO: 4385584 - DNA, 25 bp, Homo sapien
caagtagctcatttgcatgacccgg

SEQ ID NO: 4385585 - DNA, 25 bp, Homo sapien
cacagcttctgcgtggtctttcaca

SEQ ID NO: 4385586 - DNA, 25 bp, Homo sapien
tatttctagtgcgagcataatcctc

SEQ ID NO: 4385587 - DNA, 25 bp, Homo sapien
tgtcaagcacaaaaagcaagtccac

SEQ ID NO: 4385588 - DNA, 25 bp, Homo sapien
gccgggaatccctgtcttctatcta

SEQ ID NO: 4385589 - DNA, 25 bp, Homo sapien
catattcttcatgaatatccttcat

SEQ ID NO: 4385590 - DNA, 25 bp, Homo sapien
tatatctactgcagactcatgctgt

SEQ ID NO: 4385591 - DNA, 25 bp, Homo sapien
gttttataatagctggatcctcaca

SEQ ID NO: 4385592 - DNA, 25 bp, Homo sapien
tcactgctacaaagattgacccctt

SEQ ID NO: 4385593 - DNA, 25 bp, Homo sapien
tacaagcatagtcgcaaggccaagg

SEQ ID NO: 4385594 - DNA, 25 bp, Homo sapien
gctgggcagtggcatacccaagact

SEQ ID NO: 4385595 - DNA, 25 bp, Homo sapien
ttatacaaggtcaaaagcacaccct

SEQ ID NO: 4385596 - DNA, 25 bp, Homo sapien
tagtccgttttgacactgctgggca

SEQ ID NO: 4385597 - DNA, 25 bp, Homo sapien
gaaggagaatatagaaagtggaaac

SEQ ID NO: 4385598 - DNA, 25 bp, Homo sapien
caggctggcattgcatgtctgcggc

SEQ ID NO: 4385599 - DNA, 25 bp, Homo sapien
tagggactcctagtgtgggagttcc

SEQ ID NO: 4385600 - DNA, 25 bp, Homo sapien
cagccctagctgtacattgacctct

SEQ ID NO: 4385601 - DNA, 25 bp, Homo sapien
cgaacgggtaacaggacccatgcaa

SEQ ID NO: 4385602 - DNA, 25 bp, Homo sapien
ttcaacacttgtcattctgctatat

SEQ ID NO: 4385603 - DNA, 25 bp, Homo sapien
ctgtagttccatgcctagctctatt

SEQ ID NO: 4385604 - DNA, 25 bp, Homo sapien
tcaacacttgtcattctgctatata

SEQ ID NO: 4385605 - DNA, 25 bp, Homo sapien
cacctgtagttccatgcctagctct

SEQ ID NO: 4385606 - DNA, 25 bp, Homo sapien
tccgacagcagttccgacatcataa

SEQ ID NO: 4385607 - DNA, 25 bp, Homo sapien
tcataacgttctgtcatagcctcag

SEQ ID NO: 4385608 - DNA, 25 bp, Homo sapien
tatcaaaattgttgttgacaaccag

SEQ ID NO: 4385609 - DNA, 25 bp, Homo sapien
tataagcaaatgacagcctccgaca

SEQ ID NO: 4385610 - DNA, 25 bp, Homo sapien
tagaggaatggcttctaattccaca

SEQ ID NO: 4385611 - DNA, 25 bp, Homo sapien
ggtgtccagaactttagaggaatgg

SEQ ID NO: 4385612 - DNA, 25 bp, Homo sapien
ctgaagtggtgaagaggtgtccaga

SEQ ID NO: 4385613 - DNA, 25 bp, Homo sapien
cagaactttagaggaatggcttcta

SEQ ID NO: 4385614 - DNA, 25 bp, Homo sapien
ggccagtctagtcagtccaaggaga

SEQ ID NO: 4385615 - DNA, 25 bp, Homo sapien
cagcagcagggtagttgcggaacca

SEQ ID NO: 4385616 - DNA, 25 bp, Homo sapien
tttacagactatcttggagccccgg

SEQ ID NO: 4385617 - DNA, 25 bp, Homo sapien
caggtagtactaaataaacgcaggc

SEQ ID NO: 4385618 - DNA, 25 bp, Homo sapien
gatgggcatgcacgttacagttaac

SEQ ID NO: 4385619 - DNA, 25 bp, Homo sapien
cagttaacaaccatgtgaagggagg

SEQ ID NO: 4385620 - DNA, 25 bp, Homo sapien
caaattggctggtcgttatggagtc

SEQ ID NO: 4385621 - DNA, 25 bp, Homo sapien
catgtgtacataatcccctgccgaa

SEQ ID NO: 4385622 - DNA, 25 bp, Homo sapien
ccttcaccctacgcctcttccatct

SEQ ID NO: 4385623 - DNA, 25 bp, Homo sapien
cccttcaccctacgcctcttccatc

SEQ ID NO: 4385624 - DNA, 25 bp, Homo sapien
tctcccttcaccctacgcctcttcc

SEQ ID NO: 4385625 - DNA, 25 bp, Homo sapien
ctctcccttcaccctacgcctcttc

SEQ ID NO: 4385626 - DNA, 25 bp, Homo sapien
tctgtatttataccaccccagaaat

SEQ ID NO: 4385627 - DNA, 25 bp, Homo sapien
tgtatttataccaccccagaaataa

SEQ ID NO: 4385628 - DNA, 25 bp, Homo sapien
tatttctctgtatttataccacccc

SEQ ID NO: 4385629 - DNA, 25 bp, Homo sapien
tctctgtatttataccaccccagaa

SEQ ID NO: 4385630 - DNA, 25 bp, Homo sapien
ggccctcaatgagcaacagagtttt

SEQ ID NO: 4385631 - DNA, 25 bp, Homo sapien
tgctcctaagaaatatacctgcggc

SEQ ID NO: 4385632 - DNA, 25 bp, Homo sapien
tcatcagtgcccttggtcaaaagaa

SEQ ID NO: 4385633 - DNA, 25 bp, Homo sapien
ttggtggaattaagaccataggccc

SEQ ID NO: 4385634 - DNA, 25 bp, Homo sapien
ggcctcggaagttttatgcttaaca

SEQ ID NO: 4385635 - DNA, 25 bp, Homo sapien
tgttacagcagtgcacaagcaaaag

SEQ ID NO: 4385636 - DNA, 25 bp, Homo sapien
aattaaaccctcagacattgttcca

SEQ ID NO: 4385637 - DNA, 25 bp, Homo sapien
tttccccttagtggtcaattgtcaa

SEQ ID NO: 4385638 - DNA, 25 bp, Homo sapien
ttagtcatacgggaaatcttttgga

SEQ ID NO: 4385639 - DNA, 25 bp, Homo sapien
taagaaccaaccaaccgtatgaatg

SEQ ID NO: 4385640 - DNA, 25 bp, Homo sapien
cttgcccaagagagtagagtgtgtt

SEQ ID NO: 4385641 - DNA, 25 bp, Homo sapien
taggtgcgataaagagtccagttca

SEQ ID NO: 4385642 - DNA, 25 bp, Homo sapien
gaaggcagcacttgaccacagaaac

SEQ ID NO: 4385643 - DNA, 25 bp, Homo sapien
acagaaacttggtgaaccgccttgc

SEQ ID NO: 4385644 - DNA, 25 bp, Homo sapien
aacggaaacacggtcatctctaggg

SEQ ID NO: 4385645 - DNA, 25 bp, Homo sapien
tcacttgttgagctgtgcgaaggca

SEQ ID NO: 4385646 - DNA, 25 bp, Homo sapien
tctgcttcggtttcttcagggctcc

SEQ ID NO: 4385647 - DNA, 25 bp, Homo sapien
gatgcttttcccccgtgcttacttg

SEQ ID NO: 4385648 - DNA, 25 bp, Homo sapien
tccctgaggccaccggatgcttttc

SEQ ID NO: 4385649 - DNA, 25 bp, Homo sapien
cagggctccctgaggccaccggatg

SEQ ID NO: 4385650 - DNA, 25 bp, Homo sapien
cagcgggttctcagagggtgctcct

SEQ ID NO: 4385651 - DNA, 25 bp, Homo sapien
aaaggtgggtgcacagcgggttctc

SEQ ID NO: 4385652 - DNA, 25 bp, Homo sapien
tggagctccgggtactcggccggcc

SEQ ID NO: 4385653 - DNA, 25 bp, Homo sapien
tgccgggaactgttctccgctcggg

SEQ ID NO: 4385654 - DNA, 25 bp, Homo sapien
acgcgggagagcgcgcagagaaggc

SEQ ID NO: 4385655 - DNA, 25 bp, Homo sapien
tcctgctcgcggggcgtctctagaa

SEQ ID NO: 4385656 - DNA, 25 bp, Homo sapien
ctcgcggggcgtctctagaactcac

SEQ ID NO: 4385657 - DNA, 25 bp, Homo sapien
agagaaggcgaggagccgggtcggc

SEQ ID NO: 4385658 - DNA, 25 bp, Homo sapien
ttcttcgccgaactctttctcgctt

SEQ ID NO: 4385659 - DNA, 25 bp, Homo sapien
cgaactctttctcgcttcctgccag

SEQ ID NO: 4385660 - DNA, 25 bp, Homo sapien
tcgccgaactctttctcgcttcctg

SEQ ID NO: 4385661 - DNA, 25 bp, Homo sapien
tccttcttcgccgaactctttctcg

SEQ ID NO: 4385662 - DNA, 25 bp, Homo sapien
gccctgacgtgagcgcctacaccag

SEQ ID NO: 4385663 - DNA, 25 bp, Homo sapien
tgacgtgagcgcctacaccagccgc

SEQ ID NO: 4385664 - DNA, 25 bp, Homo sapien
ccagccctgacgtgagcgcctacac

SEQ ID NO: 4385665 - DNA, 25 bp, Homo sapien
tcctcccagccctgacgtgagcgcc

SEQ ID NO: 4385666 - DNA, 25 bp, Homo sapien
gctctgcttactttctaacccaatt

SEQ ID NO: 4385667 - DNA, 25 bp, Homo sapien
ggactgttatgcttgcctgacttta

SEQ ID NO: 4385668 - DNA, 25 bp, Homo sapien
gcagcttcttcacatgacctcttgc

SEQ ID NO: 4385669 - DNA, 25 bp, Homo sapien
gtatccagagattggaccgtttctc

SEQ ID NO: 4385670 - DNA, 25 bp, Homo sapien
tattgaccgcaaagaaatattggat

SEQ ID NO: 4385671 - DNA, 25 bp, Homo sapien
gaccgcaaagaaatattggatatga

SEQ ID NO: 4385672 - DNA, 25 bp, Homo sapien
ctagtctgtaatattgaccgcaaag

SEQ ID NO: 4385673 - DNA, 25 bp, Homo sapien
tattggatatgaaatctctgattga

SEQ ID NO: 4385674 - DNA, 25 bp, Homo sapien
gatgcagagtggcaacttgcttcat

SEQ ID NO: 4385675 - DNA, 25 bp, Homo sapien
agatgcagagtggcaacttgcttca

SEQ ID NO: 4385676 - DNA, 25 bp, Homo sapien
cttaggggcttgtctggatgttgat

SEQ ID NO: 4385677 - DNA, 25 bp, Homo sapien
ttattggacctggaccacaatttct

SEQ ID NO: 4385678 - DNA, 25 bp, Homo sapien
tgttgatggccgtgtcctatgcatg

SEQ ID NO: 4385679 - DNA, 25 bp, Homo sapien
accacaatttctgccccagtcaagg

SEQ ID NO: 4385680 - DNA, 25 bp, Homo sapien
taatgaatcctaaatggagatgctc

SEQ ID NO: 4385681 - DNA, 25 bp, Homo sapien
tctgaggtccattttttcggtgtag

SEQ ID NO: 4385682 - DNA, 25 bp, Homo sapien
caaatctgaatatactctgaggtcc

SEQ ID NO: 4385683 - DNA, 25 bp, Homo sapien
tataagagggacattttccagggta

SEQ ID NO: 4385684 - DNA, 25 bp, Homo sapien
tataattgatgagaaacaggagtgt

SEQ ID NO: 4385685 - DNA, 25 bp, Homo sapien
agagctctccccaacaacatggtgt

SEQ ID NO: 4385686 - DNA, 25 bp, Homo sapien
cacagcgtggtgtgaccgcatgtca

SEQ ID NO: 4385687 - DNA, 25 bp, Homo sapien
aaattcaacggccagctgcttttta

SEQ ID NO: 4385688 - DNA, 25 bp, Homo sapien
ttaaattctggtaagctcatttcag

SEQ ID NO: 4385689 - DNA, 25 bp, Homo sapien
aatccctgaaggtagtaaattcatc

SEQ ID NO: 4385690 - DNA, 25 bp, Homo sapien
taaattctggtaagctcatttcagt

SEQ ID NO: 4385691 - DNA, 25 bp, Homo sapien
taaattcatctcttactttgttcct

SEQ ID NO: 4385692 - DNA, 25 bp, Homo sapien
tgtgtccctttgaggcatcatggga

SEQ ID NO: 4385693 - DNA, 25 bp, Homo sapien
cccttgtacaagtctcggtgacact

SEQ ID NO: 4385694 - DNA, 25 bp, Homo sapien
cactttgcctaaagcttctttgctg

SEQ ID NO: 4385695 - DNA, 25 bp, Homo sapien
gatgcatgagcttcagtatcacaaa

SEQ ID NO: 4385696 - DNA, 25 bp, Homo sapien
gacagtagatgatctgagagccatt

SEQ ID NO: 4385697 - DNA, 25 bp, Homo sapien
gcttcggatctcatagtgaggataa

SEQ ID NO: 4385698 - DNA, 25 bp, Homo sapien
gagagtgctgacagtagatgatctg

SEQ ID NO: 4385699 - DNA, 25 bp, Homo sapien
ctaaaggcaggattggcttcggatc

SEQ ID NO: 4385700 - DNA, 25 bp, Homo sapien
taatcgaattaaactgcatttatgc

SEQ ID NO: 4385701 - DNA, 25 bp, Homo sapien
tagtgactggtaaatagttgacatt

SEQ ID NO: 4385702 - DNA, 25 bp, Homo sapien
tgtactttcaaagctgagcatagtg

SEQ ID NO: 4385703 - DNA, 25 bp, Homo sapien
taaatgtccacaataaattagagct

SEQ ID NO: 4385704 - DNA, 25 bp, Homo sapien
tcatgcctgcctctactgatgcttc

SEQ ID NO: 4385705 - DNA, 25 bp, Homo sapien
atgaggctagccagaacttcatgcc

SEQ ID NO: 4385706 - DNA, 25 bp, Homo sapien
tactgatgcttccaaggctgtaggc

SEQ ID NO: 4385707 - DNA, 25 bp, Homo sapien
caaatgtgatgactccaagaaggtg

SEQ ID NO: 4385708 - DNA, 25 bp, Homo sapien
ctttccttctctcccgctggcactg

SEQ ID NO: 4385709 - DNA, 25 bp, Homo sapien
gctggcactggaaggtaactgacat

SEQ ID NO: 4385710 - DNA, 25 bp, Homo sapien
cctagctttagtttccacaaagact

SEQ ID NO: 4385711 - DNA, 25 bp, Homo sapien
tcttaagcacatccatgaccacgag

SEQ ID NO: 4385712 - DNA, 25 bp, Homo sapien
acatgaaaccctgggcttcattcct

SEQ ID NO: 4385713 - DNA, 25 bp, Homo sapien
tgaccacgaggctagtgcactgagc

SEQ ID NO: 4385714 - DNA, 25 bp, Homo sapien
gctagacagatgtaggcttgactga

SEQ ID NO: 4385715 - DNA, 25 bp, Homo sapien
gactgaatacatctcagcacctgag

SEQ ID NO: 4385716 - DNA, 25 bp, Homo sapien
ggaatagataagtatgccagctctg

SEQ ID NO: 4385717 - DNA, 25 bp, Homo sapien
aagatgctttgcactcctgcttccg

SEQ ID NO: 4385718 - DNA, 25 bp, Homo sapien
ctgcctggtggagagttagtgctac

SEQ ID NO: 4385719 - DNA, 25 bp, Homo sapien
tactgtaatggtagcctcaatttcc

SEQ ID NO: 4385720 - DNA, 25 bp, Homo sapien
ggaaggattccttaatgcatactgc

SEQ ID NO: 4385721 - DNA, 25 bp, Homo sapien
cctctttagttatgaggaggagaat

SEQ ID NO: 4385722 - DNA, 25 bp, Homo sapien
ccttttgccatgcaacaactcctta

SEQ ID NO: 4385723 - DNA, 25 bp, Homo sapien
tcctcagcccactgttttgatggga

SEQ ID NO: 4385724 - DNA, 25 bp, Homo sapien
tttgccatgcaacaactccttagtt

SEQ ID NO: 4385725 - DNA, 25 bp, Homo sapien
tgtcctcagcccactgttttgatgg

SEQ ID NO: 4385726 - DNA, 25 bp, Homo sapien
tattatctgttttggcatttggtac

SEQ ID NO: 4385727 - DNA, 25 bp, Homo sapien
catttgtatattatctgttttggca

SEQ ID NO: 4385728 - DNA, 25 bp, Homo sapien
tgtatattatctgttttggcatttg

SEQ ID NO: 4385729 - DNA, 25 bp, Homo sapien
tacaatttttcccacatttgtatat

SEQ ID NO: 4385730 - DNA, 25 bp, Homo sapien
gcttgtatcttcagtggtcctgtgt

SEQ ID NO: 4385731 - DNA, 25 bp, Homo sapien
catttcttgcttgtatcttcagtgg

SEQ ID NO: 4385732 - DNA, 25 bp, Homo sapien
cttgcttgtatcttcagtggtcctg

SEQ ID NO: 4385733 - DNA, 25 bp, Homo sapien
gtatcttcagtggtcctgtgttcct

SEQ ID NO: 4385734 - DNA, 25 bp, Homo sapien
caataactatgtgaagaactaagga

SEQ ID NO: 4385735 - DNA, 25 bp, Homo sapien
catgtctgacttagaagtctgggta

SEQ ID NO: 4385736 - DNA, 25 bp, Homo sapien
caggcagtaaattctctgggacttg

SEQ ID NO: 4385737 - DNA, 25 bp, Homo sapien
taagaatgaaggagcgggaaatgtc

SEQ ID NO: 4385738 - DNA, 25 bp, Homo sapien
caagcgacgaaacctctgcgatggt

SEQ ID NO: 4385739 - DNA, 25 bp, Homo sapien
tggaaatgttgtactaaagcaagcg

SEQ ID NO: 4385740 - DNA, 25 bp, Homo sapien
cgatggtctaacatggccacgatgc

SEQ ID NO: 4385741 - DNA, 25 bp, Homo sapien
tgcgcaagaactctttggaaatgtt

SEQ ID NO: 4385742 - DNA, 25 bp, Homo sapien
gactcaaggaagttggatgtaaata

SEQ ID NO: 4385743 - DNA, 25 bp, Homo sapien
gaatcccagagctctaagttaccag

SEQ ID NO: 4385744 - DNA, 25 bp, Homo sapien
cagcagtggcaacttgcaagaaaat

SEQ ID NO: 4385745 - DNA, 25 bp, Homo sapien
tgggttccacttcttgactgacagg

SEQ ID NO: 4385746 - DNA, 25 bp, Homo sapien
ggaagctcactctgcattgtctgga

SEQ ID NO: 4385747 - DNA, 25 bp, Homo sapien
tgaactcagatcctcagacttgtga

SEQ ID NO: 4385748 - DNA, 25 bp, Homo sapien
gggaaaggctacacctgaactcaga

SEQ ID NO: 4385749 - DNA, 25 bp, Homo sapien
gaagggtgtgaaacttcccacaggc

SEQ ID NO: 4385750 - DNA, 25 bp, Homo sapien
tggcagcaacatgccaactattttc

SEQ ID NO: 4385751 - DNA, 25 bp, Homo sapien
aaatagcaacatattcttatggtag

SEQ ID NO: 4385752 - DNA, 25 bp, Homo sapien
ttggcagcaacatgccaactatttt

SEQ ID NO: 4385753 - DNA, 25 bp, Homo sapien
taagtagccatatattggttaaaga

SEQ ID NO: 4385754 - DNA, 25 bp, Homo sapien
gtagtttaaaacacttcatgcctaa

SEQ ID NO: 4385755 - DNA, 25 bp, Homo sapien
aagaaatagataatctaagtagcca

SEQ ID NO: 4385756 - DNA, 25 bp, Homo sapien
gtccggagttagaacagcctgacca

SEQ ID NO: 4385757 - DNA, 25 bp, Homo sapien
tgagggagtgtgaacaagtttaaag

SEQ ID NO: 4385758 - DNA, 25 bp, Homo sapien
agtgagggagtgtgaacaagtttaa

SEQ ID NO: 4385759 - DNA, 25 bp, Homo sapien
ggagagtgagggagtgtgaacaagt

SEQ ID NO: 4385760 - DNA, 25 bp, Homo sapien
gagtgagggagtgtgaacaagttta

SEQ ID NO: 4385761 - DNA, 25 bp, Homo sapien
ccagaagattctccgtgtaaaagcg

SEQ ID NO: 4385762 - DNA, 25 bp, Homo sapien
aagattctccgtgtaaaagcgttca

SEQ ID NO: 4385763 - DNA, 25 bp, Homo sapien
tttggccagaagattctccgtgtaa

SEQ ID NO: 4385764 - DNA, 25 bp, Homo sapien
tgtaaaagcgttcatgttctttcat

SEQ ID NO: 4385765 - DNA, 25 bp, Homo sapien
ggaaacacctgatatgttaccctgg

SEQ ID NO: 4385766 - DNA, 25 bp, Homo sapien
tggagccgcccatggtggtagcaaa

SEQ ID NO: 4385767 - DNA, 25 bp, Homo sapien
agagctgaagtaacaatatgaattt

SEQ ID NO: 4385768 - DNA, 25 bp, Homo sapien
gaacactctagtttccccagagctg

SEQ ID NO: 4385769 - DNA, 25 bp, Homo sapien
ctgtctttacttcatgaaccctaac

SEQ ID NO: 4385770 - DNA, 25 bp, Homo sapien
atgctggaaacattcatacccagag

SEQ ID NO: 4385771 - DNA, 25 bp, Homo sapien
ctgctccataagcatgctggaaaca

SEQ ID NO: 4385772 - DNA, 25 bp, Homo sapien
gaaacattcatacccagaggatttc

SEQ ID NO: 4385773 - DNA, 25 bp, Homo sapien
gctccataagcatgctggaaacatt

SEQ ID NO: 4385774 - DNA, 25 bp, Homo sapien
tcccatcccaagaactgggtcagcc

SEQ ID NO: 4385775 - DNA, 25 bp, Homo sapien
aattgtgaatgagagcttatttatt

SEQ ID NO: 4385776 - DNA, 25 bp, Homo sapien
ctgcttgcctcttggtgtatagagg

SEQ ID NO: 4385777 - DNA, 25 bp, Homo sapien
tgcctcttggtgtatagaggaatgc

SEQ ID NO: 4385778 - DNA, 25 bp, Homo sapien
tttcacatggattttatatcttgag

SEQ ID NO: 4385779 - DNA, 25 bp, Homo sapien
gcattacccctggtgccgtcatgag

SEQ ID NO: 4385780 - DNA, 25 bp, Homo sapien
acttggaagaaccatacagtgcatt

SEQ ID NO: 4385781 - DNA, 25 bp, Homo sapien
tggtgccgtcatgagctttgaggaa

SEQ ID NO: 4385782 - DNA, 25 bp, Homo sapien
gaaccatacagtgcattacccctgg

SEQ ID NO: 4385783 - DNA, 25 bp, Homo sapien
aaagaaaacgtttaggcaactgatg

SEQ ID NO: 4385784 - DNA, 25 bp, Homo sapien
ggtgccgatttctggctacagcaga

SEQ ID NO: 4385785 - DNA, 25 bp, Homo sapien
tacagcagatgcctgttgcttcctg

SEQ ID NO: 4385786 - DNA, 25 bp, Homo sapien
caactgatgtttatgtgggtgccga

SEQ ID NO: 4385787 - DNA, 25 bp, Homo sapien
tggcaaacctaaactccaattttca

SEQ ID NO: 4385788 - DNA, 25 bp, Homo sapien
ctaaactccaattttcaaatggtat

SEQ ID NO: 4385789 - DNA, 25 bp, Homo sapien
cactggttggcaaacctaaactcca

SEQ ID NO: 4385790 - DNA, 25 bp, Homo sapien
ctggttggcaaacctaaactccaat

SEQ ID NO: 4385791 - DNA, 25 bp, Homo sapien
tgtgactgctgaaggccgtgcacac

SEQ ID NO: 4385792 - DNA, 25 bp, Homo sapien
atcaccaacggcgtgtcttccatgg

SEQ ID NO: 4385793 - DNA, 25 bp, Homo sapien
tctgttttgatatcaccaacggcgt

SEQ ID NO: 4385794 - DNA, 25 bp, Homo sapien
ctgtcttctgttttgatatcaccaa

SEQ ID NO: 4385795 - DNA, 25 bp, Homo sapien
cttcggagcgaacagcaggacaatc

SEQ ID NO: 4385796 - DNA, 25 bp, Homo sapien
agcaggacaatccacacttccgtag

SEQ ID NO: 4385797 - DNA, 25 bp, Homo sapien
ctctctacttcggagcgaacagcag

SEQ ID NO: 4385798 - DNA, 25 bp, Homo sapien
cacgggtcgtctttgctctctctac

SEQ ID NO: 4385799 - DNA, 25 bp, Homo sapien
gagttgacaacatcgagatacagaa

SEQ ID NO: 4385800 - DNA, 25 bp, Homo sapien
ctggaaatcagatgcacctgcaact

SEQ ID NO: 4385801 - DNA, 25 bp, Homo sapien
tgacaacatcgagatacagaaattc

SEQ ID NO: 4385802 - DNA, 25 bp, Homo sapien
aaaaaagcggatctgctttttgcac

SEQ ID NO: 4385803 - DNA, 25 bp, Homo sapien
tatggtcctcaatgctgttctggcc

SEQ ID NO: 4385804 - DNA, 25 bp, Homo sapien
gattgccataactgatagggtgcta

SEQ ID NO: 4385805 - DNA, 25 bp, Homo sapien
ccaaagtgccatactggaggtaaag

SEQ ID NO: 4385806 - DNA, 25 bp, Homo sapien
tgcactctgggtcatgggtaccact

SEQ ID NO: 4385807 - DNA, 25 bp, Homo sapien
tgctgatgaatcagtgtcttcatca

SEQ ID NO: 4385808 - DNA, 25 bp, Homo sapien
tctcgcagttccagaaggcattcat

SEQ ID NO: 4385809 - DNA, 25 bp, Homo sapien
ggaaccgttcagagtcttctcgcag

SEQ ID NO: 4385810 - DNA, 25 bp, Homo sapien
caaatagggcccacatctttatgaa

SEQ ID NO: 4385811 - DNA, 25 bp, Homo sapien
tcgcccaccttattcttgactttgc

SEQ ID NO: 4385812 - DNA, 25 bp, Homo sapien
ttcgcccaccttattcttgactttg

SEQ ID NO: 4385813 - DNA, 25 bp, Homo sapien
cagtagagaaaatgagaacgttcct

SEQ ID NO: 4385814 - DNA, 25 bp, Homo sapien
catgtagccttgtcaagaatctgct

SEQ ID NO: 4385815 - DNA, 25 bp, Homo sapien
gatatacagtgtttctcttaccggt

SEQ ID NO: 4385816 - DNA, 25 bp, Homo sapien
ggcagtctacctccaactgtaaatg

SEQ ID NO: 4385817 - DNA, 25 bp, Homo sapien
ctagatggcctagaagggctgccta

SEQ ID NO: 4385818 - DNA, 25 bp, Homo sapien
taacattactagagctactactagc

SEQ ID NO: 4385819 - DNA, 25 bp, Homo sapien
tactagcactagatggcctagaagg

SEQ ID NO: 4385820 - DNA, 25 bp, Homo sapien
gctctttttgctcttaacattacta

SEQ ID NO: 4385821 - DNA, 25 bp, Homo sapien
tagtgaagaggaggccgggaattta

SEQ ID NO: 4385822 - DNA, 25 bp, Homo sapien
attgaagactgagaagtagatgtac

SEQ ID NO: 4385823 - DNA, 25 bp, Homo sapien
aggaggccgggaatttaagctccag

SEQ ID NO: 4385824 - DNA, 25 bp, Homo sapien
taagctccagtactttaattgaaga

SEQ ID NO: 4385825 - DNA, 25 bp, Homo sapien
tatagaccctctcattattggcaaa

SEQ ID NO: 4385826 - DNA, 25 bp, Homo sapien
tattggcaaaaggtaccataattcc

SEQ ID NO: 4385827 - DNA, 25 bp, Homo sapien
gaacatagatgagtttcaaaccagt

SEQ ID NO: 4385828 - DNA, 25 bp, Homo sapien
gtttaataagtatgttcctacatgg

SEQ ID NO: 4385829 - DNA, 25 bp, Homo sapien
tctggtgatagaattctgggtaaca

SEQ ID NO: 4385830 - DNA, 25 bp, Homo sapien
catctggtgatagaattctgggtaa

SEQ ID NO: 4385831 - DNA, 25 bp, Homo sapien
atctggtgatagaattctgggtaac

SEQ ID NO: 4385832 - DNA, 25 bp, Homo sapien
gcatctggtgatagaattctgggta

SEQ ID NO: 4385833 - DNA, 25 bp, Homo sapien
tgtgaaggagatctagagctctgac

SEQ ID NO: 4385834 - DNA, 25 bp, Homo sapien
tctagagctctgacgactgcctttt

SEQ ID NO: 4385835 - DNA, 25 bp, Homo sapien
gccttttgtgctagctgtaggtagt

SEQ ID NO: 4385836 - DNA, 25 bp, Homo sapien
tctgacgactgccttttgtgctagc

SEQ ID NO: 4385837 - DNA, 25 bp, Homo sapien
tgtttgaaggataatacggatctca

SEQ ID NO: 4385838 - DNA, 25 bp, Homo sapien
catttcacgaagtttgatgtcttgt

SEQ ID NO: 4385839 - DNA, 25 bp, Homo sapien
caaaagacggatttcctttgtgagt

SEQ ID NO: 4385840 - DNA, 25 bp, Homo sapien
caataactttgtgaaactgtttcat

SEQ ID NO: 4385841 - DNA, 25 bp, Homo sapien
taacattatttgccaaatgttctat

SEQ ID NO: 4385842 - DNA, 25 bp, Homo sapien
ctgctcctccgtttctttacttagt

SEQ ID NO: 4385843 - DNA, 25 bp, Homo sapien
atgttctataacatctaatgtattt

SEQ ID NO: 4385844 - DNA, 25 bp, Homo sapien
aacattatttgccaaatgttctata

SEQ ID NO: 4385845 - DNA, 25 bp, Homo sapien
agttgaatttttagctcatactcat

SEQ ID NO: 4385846 - DNA, 25 bp, Homo sapien
tctagttgaatttttagctcatact

SEQ ID NO: 4385847 - DNA, 25 bp, Homo sapien
tagttgaatttttagctcatactca

SEQ ID NO: 4385848 - DNA, 25 bp, Homo sapien
cttctagttgaatttttagctcata

SEQ ID NO: 4385849 - DNA, 25 bp, Homo sapien
tgttacagctgttcagcacttgaag

SEQ ID NO: 4385850 - DNA, 25 bp, Homo sapien
tgatcttggcatccaaacagtcacc

SEQ ID NO: 4385851 - DNA, 25 bp, Homo sapien
gggtattttctagagcgtagatttc

SEQ ID NO: 4385852 - DNA, 25 bp, Homo sapien
gctgttcagcacttgaagggtattt

SEQ ID NO: 4385853 - DNA, 25 bp, Homo sapien
tgattgccggtttttcactccactg

SEQ ID NO: 4385854 - DNA, 25 bp, Homo sapien
tcttgcagaagtaatccctttatca

SEQ ID NO: 4385855 - DNA, 25 bp, Homo sapien
taaggtgagtttcatataagcagca

SEQ ID NO: 4385856 - DNA, 25 bp, Homo sapien
tctaaagcccgatttaagtccagtg

SEQ ID NO: 4385857 - DNA, 25 bp, Homo sapien
tcaattttacttagccgctcgcgaa

SEQ ID NO: 4385858 - DNA, 25 bp, Homo sapien
ctttattacataataggcctgtgtt

SEQ ID NO: 4385859 - DNA, 25 bp, Homo sapien
tacttagccgctcgcgaaactcagt

SEQ ID NO: 4385860 - DNA, 25 bp, Homo sapien
tattacataataggcctgtgttttc

SEQ ID NO: 4385861 - DNA, 25 bp, Homo sapien
cccgttcttgatcaacatatcttat

SEQ ID NO: 4385862 - DNA, 25 bp, Homo sapien
tttgtgacgcaagcattgttttatg

SEQ ID NO: 4385863 - DNA, 25 bp, Homo sapien
gatttcttcagttcgctcttccatt

SEQ ID NO: 4385864 - DNA, 25 bp, Homo sapien
gccttactgtgaagcatttctcgag

SEQ ID NO: 4385865 - DNA, 25 bp, Homo sapien
attcaattttaaagtcaagctttgc

SEQ ID NO: 4385866 - DNA, 25 bp, Homo sapien
ttcaattttaaagtcaagctttgct

SEQ ID NO: 4385867 - DNA, 25 bp, Homo sapien
gagatgaaatcaacgtaactactag

SEQ ID NO: 4385868 - DNA, 25 bp, Homo sapien
gatacttacatctcacgtgcaccaa

SEQ ID NO: 4385869 - DNA, 25 bp, Homo sapien
caattcagtcgtgaatagagtactg

SEQ ID NO: 4385870 - DNA, 25 bp, Homo sapien
tagtgtaaccaagaagtttctaagc

SEQ ID NO: 4385871 - DNA, 25 bp, Homo sapien
aaatgggccaagaatacaaactaga

SEQ ID NO: 4385872 - DNA, 25 bp, Homo sapien
gaatacaaactagagctccaaagaa

SEQ ID NO: 4385873 - DNA, 25 bp, Homo sapien
aatacaaactagagctccaaagaaa

SEQ ID NO: 4385874 - DNA, 25 bp, Homo sapien
tatatgtaaacttcccagcggaaaa

SEQ ID NO: 4385875 - DNA, 25 bp, Homo sapien
catgcaatggacttatagaaagcct

SEQ ID NO: 4385876 - DNA, 25 bp, Homo sapien
taattgaacaactgcactgtacatg

SEQ ID NO: 4385877 - DNA, 25 bp, Homo sapien
actgataggagtattaatggtaccc

SEQ ID NO: 4385878 - DNA, 25 bp, Homo sapien
aaattaggatatccagcctcagtgg

SEQ ID NO: 4385879 - DNA, 25 bp, Homo sapien
tctgtcgatgaaaaggtttagttca

SEQ ID NO: 4385880 - DNA, 25 bp, Homo sapien
tctctgatctgtcgatgaaaaggtt

SEQ ID NO: 4385881 - DNA, 25 bp, Homo sapien
tgatctgtcgatgaaaaggtttagt

SEQ ID NO: 4385882 - DNA, 25 bp, Homo sapien
ctttctctgatctgtcgatgaaaag

SEQ ID NO: 4385883 - DNA, 25 bp, Homo sapien
tccgttccacttgttgaatgtgaaa

SEQ ID NO: 4385884 - DNA, 25 bp, Homo sapien
tttaaccgtgacattctccgttcca

SEQ ID NO: 4385885 - DNA, 25 bp, Homo sapien
gacattctccgttccacttgttgaa

SEQ ID NO: 4385886 - DNA, 25 bp, Homo sapien
gtgacattctccgttccacttgttg

SEQ ID NO: 4385887 - DNA, 25 bp, Homo sapien
tgctgcttcaaggtttcaaaatcca

SEQ ID NO: 4385888 - DNA, 25 bp, Homo sapien
gatgtttcagagaggaacgagttcc

SEQ ID NO: 4385889 - DNA, 25 bp, Homo sapien
gcacaccttttatgaggttcagttg

SEQ ID NO: 4385890 - DNA, 25 bp, Homo sapien
cattgtctcagtctgtaactcctga

SEQ ID NO: 4385891 - DNA, 25 bp, Homo sapien
attagtagctttctcttctacagac

SEQ ID NO: 4385892 - DNA, 25 bp, Homo sapien
tacagacatggttttctcagttatc

SEQ ID NO: 4385893 - DNA, 25 bp, Homo sapien
tctcttctacagacatggttttctc

SEQ ID NO: 4385894 - DNA, 25 bp, Homo sapien
cctcctcctttagcatatcttccaa

SEQ ID NO: 4385895 - DNA, 25 bp, Homo sapien
ttgtttgtattatctcattatgatt

SEQ ID NO: 4385896 - DNA, 25 bp, Homo sapien
attttgtttgtattatctcattatg

SEQ ID NO: 4385897 - DNA, 25 bp, Homo sapien
ttttgtttgtattatctcattatga

SEQ ID NO: 4385898 - DNA, 25 bp, Homo sapien
ctttaattttgtttgtattatctca

SEQ ID NO: 4385899 - DNA, 25 bp, Homo sapien
tcactggaagttctattcacagtgg

SEQ ID NO: 4385900 - DNA, 25 bp, Homo sapien
ctcagagcttctaaatcactggaag

SEQ ID NO: 4385901 - DNA, 25 bp, Homo sapien
atcactggaagttctattcacagtg

SEQ ID NO: 4385902 - DNA, 25 bp, Homo sapien
cctgatatgccgttctacattttaa

SEQ ID NO: 4385903 - DNA, 25 bp, Homo sapien
ttaaaagtttacgatcagccacaga

SEQ ID NO: 4385904 - DNA, 25 bp, Homo sapien
tttaaaagtttacgatcagccacag

SEQ ID NO: 4385905 - DNA, 25 bp, Homo sapien
tttcatggtcctgatatgccgttct

SEQ ID NO: 4385906 - DNA, 25 bp, Homo sapien
tcccattgtttaatgagttcttgtc

SEQ ID NO: 4385907 - DNA, 25 bp, Homo sapien
cagttatctatgtctccatccctct

SEQ ID NO: 4385908 - DNA, 25 bp, Homo sapien
gaatcttacgaaaatcttgtgctgc

SEQ ID NO: 4385909 - DNA, 25 bp, Homo sapien
gcatctgttctattgtgttctccca

SEQ ID NO: 4385910 - DNA, 25 bp, Homo sapien
gtctttctaattgcagagtcagtgc

SEQ ID NO: 4385911 - DNA, 25 bp, Homo sapien
ctctgtaagttcgttgtcaagtatc

SEQ ID NO: 4385912 - DNA, 25 bp, Homo sapien
ctgtgcgcttatagtctctgtaagt

SEQ ID NO: 4385913 - DNA, 25 bp, Homo sapien
ttacattccaaagttagtctttcta

SEQ ID NO: 4385914 - DNA, 25 bp, Homo sapien
tgttgtgcatacttctggagagtga

SEQ ID NO: 4385915 - DNA, 25 bp, Homo sapien
ttgctggtcccagttcatttgacat

SEQ ID NO: 4385916 - DNA, 25 bp, Homo sapien
tgagagcatcactatctttatgagc

SEQ ID NO: 4385917 - DNA, 25 bp, Homo sapien
ttctaaccaggcctccaatgcttgc

SEQ ID NO: 4385918 - DNA, 25 bp, Homo sapien
tctcattttccagccgttgaatttc

SEQ ID NO: 4385919 - DNA, 25 bp, Homo sapien
tttcatctttcactcgtcccaattc

SEQ ID NO: 4385920 - DNA, 25 bp, Homo sapien
aattctctttgagcaatggccttaa

SEQ ID NO: 4385921 - DNA, 25 bp, Homo sapien
cttttccagtattgaagccatctca

SEQ ID NO: 4385922 - DNA, 25 bp, Homo sapien
tttgaagtgagaagtcatagaatta

SEQ ID NO: 4385923 - DNA, 25 bp, Homo sapien
ctgtgtaattgagagctcttgctta

SEQ ID NO: 4385924 - DNA, 25 bp, Homo sapien
atcttgcaagcttgctctttcatcc

SEQ ID NO: 4385925 - DNA, 25 bp, Homo sapien
taattcgctcttcatactcacgtaa

SEQ ID NO: 4385926 - DNA, 25 bp, Homo sapien
ataaatactatgattaaccaaagtc

SEQ ID NO: 4385927 - DNA, 25 bp, Homo sapien
aatactatgattaaccaaagtccta

SEQ ID NO: 4385928 - DNA, 25 bp, Homo sapien
tatgattaaccaaagtcctattaag

SEQ ID NO: 4385929 - DNA, 25 bp, Homo sapien
tactatgattaaccaaagtcctatt

SEQ ID NO: 4385930 - DNA, 25 bp, Homo sapien
tatttcctgtgtggagccaagaacc

SEQ ID NO: 4385931 - DNA, 25 bp, Homo sapien
tttcaagtatccctgctccacaagg

SEQ ID NO: 4385932 - DNA, 25 bp, Homo sapien
tcagccacaatcagcttacaggtgc

SEQ ID NO: 4385933 - DNA, 25 bp, Homo sapien
tagcaacaacccaatcacctggaag

SEQ ID NO: 4385934 - DNA, 25 bp, Homo sapien
ttgttctcctcgttcgccaccggga

SEQ ID NO: 4385935 - DNA, 25 bp, Homo sapien
gttctcctcgttcgccaccgggatg

SEQ ID NO: 4385936 - DNA, 25 bp, Homo sapien
tcctcgttcgccaccgggatggcga

SEQ ID NO: 4385937 - DNA, 25 bp, Homo sapien
ttcgccaccgggatggcgaacccat

SEQ ID NO: 4385938 - DNA, 25 bp, Homo sapien
gagaagatacagagcaaagatccgc

SEQ ID NO: 4385939 - DNA, 25 bp, Homo sapien
caaagatccgccttcttgtacagcg

SEQ ID NO: 4385940 - DNA, 25 bp, Homo sapien
ccttcttgtacagcgggtgagcagc

SEQ ID NO: 4385941 - DNA, 25 bp, Homo sapien
gggtgagcagcacccgcgtcaagcc

SEQ ID NO: 4385942 - DNA, 25 bp, Homo sapien
ctgcacagtgccgcggcaattgccg

SEQ ID NO: 4385943 - DNA, 25 bp, Homo sapien
caattgccgggggagccctagcaac

SEQ ID NO: 4385944 - DNA, 25 bp, Homo sapien
tgcacagtgccgcggcaattgccgg

SEQ ID NO: 4385945 - DNA, 25 bp, Homo sapien
cctagcaaccttcccgcgtccttag

SEQ ID NO: 4385946 - DNA, 25 bp, Homo sapien
ggaaacgctccagcccgaaggcgaa

SEQ ID NO: 4385947 - DNA, 25 bp, Homo sapien
acgctccagcccgaaggcgaaactt

SEQ ID NO: 4385948 - DNA, 25 bp, Homo sapien
caaacaggaaacgctccagcccgaa

SEQ ID NO: 4385949 - DNA, 25 bp, Homo sapien
caggaaacgctccagcccgaaggcg

SEQ ID NO: 4385950 - DNA, 25 bp, Homo sapien
ctgcaggccgaagaatctttttctt

SEQ ID NO: 4385951 - DNA, 25 bp, Homo sapien
tgcaggccgaagaatctttttctta

SEQ ID NO: 4385952 - DNA, 25 bp, Homo sapien
gcaggccgaagaatctttttcttac

SEQ ID NO: 4385953 - DNA, 25 bp, Homo sapien
cactgagggatgagcagcaacttgc

SEQ ID NO: 4385954 - DNA, 25 bp, Homo sapien
gaagtaaaccacacgatcctccgat

SEQ ID NO: 4385955 - DNA, 25 bp, Homo sapien
acgaaaaggcggctctcggatcgct

SEQ ID NO: 4385956 - DNA, 25 bp, Homo sapien
caggcggcagcgtaactttccacga

SEQ ID NO: 4385957 - DNA, 25 bp, Homo sapien
tttttaatatgaatactgagctgcc

SEQ ID NO: 4385958 - DNA, 25 bp, Homo sapien
catcccagtttttaatatgaatact

SEQ ID NO: 4385959 - DNA, 25 bp, Homo sapien
aatatgaatactgagctgcctcgac

SEQ ID NO: 4385960 - DNA, 25 bp, Homo sapien
tttaatatgaatactgagctgcctc

SEQ ID NO: 4385961 - DNA, 25 bp, Homo sapien
gttccatgcccttataccgcacggg

SEQ ID NO: 4385962 - DNA, 25 bp, Homo sapien
ccgcacgggcataagaagtctagca

SEQ ID NO: 4385963 - DNA, 25 bp, Homo sapien
tgtagctgccaaatgcatgactgtg

SEQ ID NO: 4385964 - DNA, 25 bp, Homo sapien
ggaatacgtcctacagaaacagtta

SEQ ID NO: 4385965 - DNA, 25 bp, Homo sapien
tattcttctaaacactgctagttgc

SEQ ID NO: 4385966 - DNA, 25 bp, Homo sapien
cctgacatctgagccaaatctttgg

SEQ ID NO: 4385967 - DNA, 25 bp, Homo sapien
tggaccagataccaacctaacaatt

SEQ ID NO: 4385968 - DNA, 25 bp, Homo sapien
tcaggatcgtaatggataaatcagc

SEQ ID NO: 4385969 - DNA, 25 bp, Homo sapien
cactacaatttctagcccgactaaa

SEQ ID NO: 4385970 - DNA, 25 bp, Homo sapien
tctcacttcagtctttcacatgtct

SEQ ID NO: 4385971 - DNA, 25 bp, Homo sapien
ccttcaccttaacactacaatttct

SEQ ID NO: 4385972 - DNA, 25 bp, Homo sapien
ttcagtctttcacatgtctgttccc

SEQ ID NO: 4385973 - DNA, 25 bp, Homo sapien
tgttacgctagctcagttcaccgcc

SEQ ID NO: 4385974 - DNA, 25 bp, Homo sapien
ggttgtcctacaggccttagcgtgg

SEQ ID NO: 4385975 - DNA, 25 bp, Homo sapien
ccagaacccctagaatatgccaggt

SEQ ID NO: 4385976 - DNA, 25 bp, Homo sapien
tcacgtaggaagcagggttatcatc

SEQ ID NO: 4385977 - DNA, 25 bp, Homo sapien
aagtcacgttagttcctgagcctca

SEQ ID NO: 4385978 - DNA, 25 bp, Homo sapien
caaagatatcataaggttgggacct

SEQ ID NO: 4385979 - DNA, 25 bp, Homo sapien
taaaggtatacatttctgcgtgctc

SEQ ID NO: 4385980 - DNA, 25 bp, Homo sapien
taatttagccctccatgcaatggtc

SEQ ID NO: 4385981 - DNA, 25 bp, Homo sapien
atcttcttttcggtccacttggtct

SEQ ID NO: 4385982 - DNA, 25 bp, Homo sapien
taagccaactccagagaacaccagt

SEQ ID NO: 4385983 - DNA, 25 bp, Homo sapien
tttgggaaaatgtattccatcttct

SEQ ID NO: 4385984 - DNA, 25 bp, Homo sapien
caagatgttgataagccaactccag

SEQ ID NO: 4385985 - DNA, 25 bp, Homo sapien
cttattttaggcagtcatcttgagt

SEQ ID NO: 4385986 - DNA, 25 bp, Homo sapien
gtgcttcactgtgggactccttcct

SEQ ID NO: 4385987 - DNA, 25 bp, Homo sapien
tgcttcactgtgggactccttcctg

SEQ ID NO: 4385988 - DNA, 25 bp, Homo sapien
gtggagagataggaggactttctaa

SEQ ID NO: 4385989 - DNA, 25 bp, Homo sapien
agtaatttatgaaaggccaaccagg

SEQ ID NO: 4385990 - DNA, 25 bp, Homo sapien
aaaaacgctgactctagctgtcaca

SEQ ID NO: 4385991 - DNA, 25 bp, Homo sapien
ccttggctaaatccagtggagagat

SEQ ID NO: 4385992 - DNA, 25 bp, Homo sapien
cttctcacttggtcagaactacaca

SEQ ID NO: 4385993 - DNA, 25 bp, Homo sapien
ttcttctcacttggtcagaactaca

SEQ ID NO: 4385994 - DNA, 25 bp, Homo sapien
tctcacttggtcagaactacacatt

SEQ ID NO: 4385995 - DNA, 25 bp, Homo sapien
tcacttggtcagaactacacattat

SEQ ID NO: 4385996 - DNA, 25 bp, Homo sapien
taatggctttcgaaatgcaactgga

SEQ ID NO: 4385997 - DNA, 25 bp, Homo sapien
gaatatacacttaagtaatggcttt

SEQ ID NO: 4385998 - DNA, 25 bp, Homo sapien
agtgctcagctggacacatcactgc

SEQ ID NO: 4385999 - DNA, 25 bp, Homo sapien
ttcgaaatgcaactggaagagatct

SEQ ID NO: 4386000 - DNA, 25 bp, Homo sapien
tcttctcaccctttgtttctcccag

SEQ ID NO: 4386001 - DNA, 25 bp, Homo sapien
gcctaacttagtgcatagcacagga

SEQ ID NO: 4386002 - DNA, 25 bp, Homo sapien
ctgagccatttcaccccgcctgagg

SEQ ID NO: 4386003 - DNA, 25 bp, Homo sapien
gacccactctccttctgacctgagc

SEQ ID NO: 4386004 - DNA, 25 bp, Homo sapien
taacttagtgcatagcacaggatca

SEQ ID NO: 4386005 - DNA, 25 bp, Homo sapien
gcagtgggcttcttgtcaccattat

SEQ ID NO: 4386006 - DNA, 25 bp, Homo sapien
gttagctcatcaatcctcacgacag

SEQ ID NO: 4386007 - DNA, 25 bp, Homo sapien
tgggaaaggattagcaactgtaact

SEQ ID NO: 4386008 - DNA, 25 bp, Homo sapien
tacacttacctgattccgaagccct

SEQ ID NO: 4386009 - DNA, 25 bp, Homo sapien
ctgcagaagaaaaaacaagacaact

SEQ ID NO: 4386010 - DNA, 25 bp, Homo sapien
cagaagaaaaaacaagacaactgtt

SEQ ID NO: 4386011 - DNA, 25 bp, Homo sapien
tgcagaagaaaaaacaagacaactg

SEQ ID NO: 4386012 - DNA, 25 bp, Homo sapien
gcagaagaaaaaacaagacaactgt

SEQ ID NO: 4386013 - DNA, 25 bp, Homo sapien
ctggcgatgaggactagcagttgat

SEQ ID NO: 4386014 - DNA, 25 bp, Homo sapien
gcattgaaccctggcgatgaggact

SEQ ID NO: 4386015 - DNA, 25 bp, Homo sapien
acagaaagcattgaaccctggcgat

SEQ ID NO: 4386016 - DNA, 25 bp, Homo sapien
tagaaagttcaagcacagttaggtt

SEQ ID NO: 4386017 - DNA, 25 bp, Homo sapien
gccagggccgcttgggctattatca

SEQ ID NO: 4386018 - DNA, 25 bp, Homo sapien
ggctgtaatgctgcgtttcccctgc

SEQ ID NO: 4386019 - DNA, 25 bp, Homo sapien
gagagtaatttatcacagcgcattg

SEQ ID NO: 4386020 - DNA, 25 bp, Homo sapien
ttcgtgcctgacactttagacctgg

SEQ ID NO: 4386021 - DNA, 25 bp, Homo sapien
agggaaagtaatttgcgatgcgtcc

SEQ ID NO: 4386022 - DNA, 25 bp, Homo sapien
cagggaaagtaatttgcgatgcgtc

SEQ ID NO: 4386023 - DNA, 25 bp, Homo sapien
ggaaagtaatttgcgatgcgtccat

SEQ ID NO: 4386024 - DNA, 25 bp, Homo sapien
gggaaagtaatttgcgatgcgtcca

SEQ ID NO: 4386025 - DNA, 25 bp, Homo sapien
tgggagacagggacaatgactgaat

SEQ ID NO: 4386026 - DNA, 25 bp, Homo sapien
gggagacagggacaatgactgaatg

SEQ ID NO: 4386027 - DNA, 25 bp, Homo sapien
ggagacagggacaatgactgaatga

SEQ ID NO: 4386028 - DNA, 25 bp, Homo sapien
tcctgtgtgccattaactctctcct

SEQ ID NO: 4386029 - DNA, 25 bp, Homo sapien
tgaaaggaagaagcactcattgccc

SEQ ID NO: 4386030 - DNA, 25 bp, Homo sapien
aagagggtggaagaccaattgtcct

SEQ ID NO: 4386031 - DNA, 25 bp, Homo sapien
ccttgtgttaggcagcaacaggttg

SEQ ID NO: 4386032 - DNA, 25 bp, Homo sapien
attcatcctaaagttttctgtgctg

SEQ ID NO: 4386033 - DNA, 25 bp, Homo sapien
aaattcatcctaaagttttctgtgc

SEQ ID NO: 4386034 - DNA, 25 bp, Homo sapien
tcatcctaaagttttctgtgctgtg

SEQ ID NO: 4386035 - DNA, 25 bp, Homo sapien
aaaattcatcctaaagttttctgtg

SEQ ID NO: 4386036 - DNA, 25 bp, Homo sapien
atatctgttagttcccaagcacaag

SEQ ID NO: 4386037 - DNA, 25 bp, Homo sapien
ttcccaagcacaagtaccacttaag

SEQ ID NO: 4386038 - DNA, 25 bp, Homo sapien
caagtaccacttaagaccctgaagc

SEQ ID NO: 4386039 - DNA, 25 bp, Homo sapien
gaaatatctgttagttcccaagcac

SEQ ID NO: 4386040 - DNA, 25 bp, Homo sapien
caggtacagaaccttctagtctttc

SEQ ID NO: 4386041 - DNA, 25 bp, Homo sapien
taacaggtacagaaccttctagtct

SEQ ID NO: 4386042 - DNA, 25 bp, Homo sapien
tgttaacaggtacagaaccttctag

SEQ ID NO: 4386043 - DNA, 25 bp, Homo sapien
ctgttaacaggtacagaaccttcta

SEQ ID NO: 4386044 - DNA, 25 bp, Homo sapien
gaagggcatcttggatgggctcatc

SEQ ID NO: 4386045 - DNA, 25 bp, Homo sapien
tcaggagactggacacaaccaagga

SEQ ID NO: 4386046 - DNA, 25 bp, Homo sapien
gtagatactcgatcctcatggaaga

SEQ ID NO: 4386047 - DNA, 25 bp, Homo sapien
tggacacaaccaaggaaagtctcag

SEQ ID NO: 4386048 - DNA, 25 bp, Homo sapien
gaaacataaatgagaggttccaaaa

SEQ ID NO: 4386049 - DNA, 25 bp, Homo sapien
aacatggcactgtaagattaacaca

SEQ ID NO: 4386050 - DNA, 25 bp, Homo sapien
gaagtctggatatagcataaggctg

SEQ ID NO: 4386051 - DNA, 25 bp, Homo sapien
cactgaccctcaaaaataagacttc

SEQ ID NO: 4386052 - DNA, 25 bp, Homo sapien
ctggaccgcaacattatgttcatta

SEQ ID NO: 4386053 - DNA, 25 bp, Homo sapien
ggaccgcaacattatgttcattagt

SEQ ID NO: 4386054 - DNA, 25 bp, Homo sapien
ctgcaactggaccgcaacattatgt

SEQ ID NO: 4386055 - DNA, 25 bp, Homo sapien
aactggaccgcaacattatgttcat

SEQ ID NO: 4386056 - DNA, 25 bp, Homo sapien
tgagcgggattctgacaaagcccca

SEQ ID NO: 4386057 - DNA, 25 bp, Homo sapien
gcgggattctgacaaagccccaaat

SEQ ID NO: 4386058 - DNA, 25 bp, Homo sapien
ctgatgtgagcgggattctgacaaa

SEQ ID NO: 4386059 - DNA, 25 bp, Homo sapien
tgtgagcgggattctgacaaagccc

SEQ ID NO: 4386060 - DNA, 25 bp, Homo sapien
aaggaaatttttgcttgcacacagg

SEQ ID NO: 4386061 - DNA, 25 bp, Homo sapien
ggaaatttttgcttgcacacaggac

SEQ ID NO: 4386062 - DNA, 25 bp, Homo sapien
gaaggaaatttttgcttgcacacag

SEQ ID NO: 4386063 - DNA, 25 bp, Homo sapien
gaaatttttgcttgcacacaggaca

SEQ ID NO: 4386064 - DNA, 25 bp, Homo sapien
tgtttcttctagctctatgtctatc

SEQ ID NO: 4386065 - DNA, 25 bp, Homo sapien
aaatggcacatacatcatactcatc

SEQ ID NO: 4386066 - DNA, 25 bp, Homo sapien
atggcacatacatcatactcatctc

SEQ ID NO: 4386067 - DNA, 25 bp, Homo sapien
acaaatggcacatacatcatactca

SEQ ID NO: 4386068 - DNA, 25 bp, Homo sapien
aaatgactatcaagatgagacagat

SEQ ID NO: 4386069 - DNA, 25 bp, Homo sapien
acctcaatgtcattggatccaatgt

SEQ ID NO: 4386070 - DNA, 25 bp, Homo sapien
aaggtggtcccctttttcatacatg

SEQ ID NO: 4386071 - DNA, 25 bp, Homo sapien
aggtggtcccctttttcatacatga

SEQ ID NO: 4386072 - DNA, 25 bp, Homo sapien
tatatcaaaattacaatcaagtctt

SEQ ID NO: 4386073 - DNA, 25 bp, Homo sapien
tctttatatcaaaattacaatcaag

SEQ ID NO: 4386074 - DNA, 25 bp, Homo sapien
tttatatcaaaattacaatcaagtc

SEQ ID NO: 4386075 - DNA, 25 bp, Homo sapien
aatctttatatcaaaattacaatca

SEQ ID NO: 4386076 - DNA, 25 bp, Homo sapien
ttgttttttactggtggaggcactc

SEQ ID NO: 4386077 - DNA, 25 bp, Homo sapien
taacacaatgaaagtgccagacaaa

SEQ ID NO: 4386078 - DNA, 25 bp, Homo sapien
cagacaaattgttttttactggtgg

SEQ ID NO: 4386079 - DNA, 25 bp, Homo sapien
ggcactctgcgttcacaggcattct

SEQ ID NO: 4386080 - DNA, 25 bp, Homo sapien
caagatggtgtagacttgtgtggct

SEQ ID NO: 4386081 - DNA, 25 bp, Homo sapien
tgtctgcttctacaggcagtaggtt

SEQ ID NO: 4386082 - DNA, 25 bp, Homo sapien
ctaaaatgtctgcttctacaggcag

SEQ ID NO: 4386083 - DNA, 25 bp, Homo sapien
tcagctggaagtctataaccaaatc

SEQ ID NO: 4386084 - DNA, 25 bp, Homo sapien
cctgctggccacatcgcaggagaag

SEQ ID NO: 4386085 - DNA, 25 bp, Homo sapien
ggccacatcgcaggagaagtcccta

SEQ ID NO: 4386086 - DNA, 25 bp, Homo sapien
tgctggccacatcgcaggagaagtc

SEQ ID NO: 4386087 - DNA, 25 bp, Homo sapien
ctggccacatcgcaggagaagtccc

SEQ ID NO: 4386088 - DNA, 25 bp, Homo sapien
ctgtgtctagtcggctcctcttttt

SEQ ID NO: 4386089 - DNA, 25 bp, Homo sapien
ttggagggtgccaactttcttgctg

SEQ ID NO: 4386090 - DNA, 25 bp, Homo sapien
gccttcctttcaacaacctgcttgg

SEQ ID NO: 4386091 - DNA, 25 bp, Homo sapien
ctggtcttccggtgggagaagctct

SEQ ID NO: 4386092 - DNA, 25 bp, Homo sapien
ggcacagttgaggagggatacccaa

SEQ ID NO: 4386093 - DNA, 25 bp, Homo sapien
cctactctcttggtaagtgtaactc

SEQ ID NO: 4386094 - DNA, 25 bp, Homo sapien
gaagagtgcaaaaagtaccctccat

SEQ ID NO: 4386095 - DNA, 25 bp, Homo sapien
taggtaacgatgaagacaaaaccca

SEQ ID NO: 4386096 - DNA, 25 bp, Homo sapien
caccctggtgacacaagggggtgca

SEQ ID NO: 4386097 - DNA, 25 bp, Homo sapien
aagggggtgcacaggacttgcttcc

SEQ ID NO: 4386098 - DNA, 25 bp, Homo sapien
tcctctctagcattcggaaggcctg

SEQ ID NO: 4386099 - DNA, 25 bp, Homo sapien
gaaggcctgtctgttcttatgcggg

SEQ ID NO: 4386100 - DNA, 25 bp, Homo sapien
gatacctccaatgatacccttgacc

SEQ ID NO: 4386101 - DNA, 25 bp, Homo sapien
tacatcagaagtattgtgatgatac

SEQ ID NO: 4386102 - DNA, 25 bp, Homo sapien
tacctccaatgatacccttgaccat

SEQ ID NO: 4386103 - DNA, 25 bp, Homo sapien
cagaagtattgtgatgatacctcca

SEQ ID NO: 4386104 - DNA, 25 bp, Homo sapien
ttggtcaacctgaagaaaatgtgta

SEQ ID NO: 4386105 - DNA, 25 bp, Homo sapien
ggttaatgctcttggtcaacctgaa

SEQ ID NO: 4386106 - DNA, 25 bp, Homo sapien
tcttggtcaacctgaagaaaatgtg

SEQ ID NO: 4386107 - DNA, 25 bp, Homo sapien
cttggttaatgctcttggtcaacct

SEQ ID NO: 4386108 - DNA, 25 bp, Homo sapien
ggctaggtaggccacctgccagttc

SEQ ID NO: 4386109 - DNA, 25 bp, Homo sapien
gttgtggctaggtaggccacctgcc

SEQ ID NO: 4386110 - DNA, 25 bp, Homo sapien
tccaaactgtccaaacgtaccagga

SEQ ID NO: 4386111 - DNA, 25 bp, Homo sapien
gactgtctctggtctctgatttggg

SEQ ID NO: 4386112 - DNA, 25 bp, Homo sapien
cccactgccagctcatcatggataa

SEQ ID NO: 4386113 - DNA, 25 bp, Homo sapien
tcgccacgctcgtcatggacaatgg

SEQ ID NO: 4386114 - DNA, 25 bp, Homo sapien
ataagcacagagtcttgccctcgcc

SEQ ID NO: 4386115 - DNA, 25 bp, Homo sapien
cgcatctgccccataagcacagagt

SEQ ID NO: 4386116 - DNA, 25 bp, Homo sapien
gtgaggcacccatggcaccagggca

SEQ ID NO: 4386117 - DNA, 25 bp, Homo sapien
cttagcaggcgacgatgcccctcca

SEQ ID NO: 4386118 - DNA, 25 bp, Homo sapien
ccatcgtgaggcacccatggcacca

SEQ ID NO: 4386119 - DNA, 25 bp, Homo sapien
gacgatgcccctccatcgtgaggca

SEQ ID NO: 4386120 - DNA, 25 bp, Homo sapien
ccaaagccaaccgtgggatgaccca

SEQ ID NO: 4386121 - DNA, 25 bp, Homo sapien
agccaaccgtgggatgacccagatc

SEQ ID NO: 4386122 - DNA, 25 bp, Homo sapien
aaagccaaccgtgggatgacccaga

SEQ ID NO: 4386123 - DNA, 25 bp, Homo sapien
ccaaccgtgggatgacccagatcat

SEQ ID NO: 4386124 - DNA, 25 bp, Homo sapien
tctacaccccagccatgtaggtggc

SEQ ID NO: 4386125 - DNA, 25 bp, Homo sapien
acaccccagccatgtaggtggccat

SEQ ID NO: 4386126 - DNA, 25 bp, Homo sapien
cttctacaccccagccatgtaggtg

SEQ ID NO: 4386127 - DNA, 25 bp, Homo sapien
tacaccccagccatgtaggtggcca

SEQ ID NO: 4386128 - DNA, 25 bp, Homo sapien
tcaggctgtgctttccctgtaagcc

SEQ ID NO: 4386129 - DNA, 25 bp, Homo sapien
gctttccctgtaagcctctggctgt

SEQ ID NO: 4386130 - DNA, 25 bp, Homo sapien
gtgctttccctgtaagcctctggct

SEQ ID NO: 4386131 - DNA, 25 bp, Homo sapien
tttccctgtaagcctctggctgtac

SEQ ID NO: 4386132 - DNA, 25 bp, Homo sapien
actctggcagggtcacccacactgt

SEQ ID NO: 4386133 - DNA, 25 bp, Homo sapien
cactggcaccgtgatggactctggc

SEQ ID NO: 4386134 - DNA, 25 bp, Homo sapien
tctggcagggtcacccacactgtgc

SEQ ID NO: 4386135 - DNA, 25 bp, Homo sapien
ctggcaccgtgatggactctggcag

SEQ ID NO: 4386136 - DNA, 25 bp, Homo sapien
tctggacccggctgactaccgcatg

SEQ ID NO: 4386137 - DNA, 25 bp, Homo sapien
gggaagtgcagctacagcttcacca

SEQ ID NO: 4386138 - DNA, 25 bp, Homo sapien
aagagccccgggaagtgcagctaca

SEQ ID NO: 4386139 - DNA, 25 bp, Homo sapien
tgactaccgcatgaagagccccggg

SEQ ID NO: 4386140 - DNA, 25 bp, Homo sapien
catttgcaaagacctctacaccaat

SEQ ID NO: 4386141 - DNA, 25 bp, Homo sapien
caccaatgcagtactgtccagtggc

SEQ ID NO: 4386142 - DNA, 25 bp, Homo sapien
ctgaagcccaagtcggcaccatcag

SEQ ID NO: 4386143 - DNA, 25 bp, Homo sapien
actgtccagtggcaccactgtgtac

SEQ ID NO: 4386144 - DNA, 25 bp, Homo sapien
aatgcagataaagatcattgctcct

SEQ ID NO: 4386145 - DNA, 25 bp, Homo sapien
gcgcagatactctgtgtgggtccag

SEQ ID NO: 4386146 - DNA, 25 bp, Homo sapien
tcctgagcgcagatactctgtgtgg

SEQ ID NO: 4386147 - DNA, 25 bp, Homo sapien
tcctcctgagcgcagatactctgtg

SEQ ID NO: 4386148 - DNA, 25 bp, Homo sapien
tggatcagcaagcagcagtaccaca

SEQ ID NO: 4386149 - DNA, 25 bp, Homo sapien
tcagcaagcagcagtaccacaagtc

SEQ ID NO: 4386150 - DNA, 25 bp, Homo sapien
agcagcagtaccacaagtcccaccc

SEQ ID NO: 4386151 - DNA, 25 bp, Homo sapien
agcagtaccacaagtcccacccctc

SEQ ID NO: 4386152 - DNA, 25 bp, Homo sapien
ccgctgcctcaaggcctctaggcca

SEQ ID NO: 4386153 - DNA, 25 bp, Homo sapien
aaacatgtcttgaagcacagttgaa

SEQ ID NO: 4386154 - DNA, 25 bp, Homo sapien
tgcctcaaggcctctaggccatcca

SEQ ID NO: 4386155 - DNA, 25 bp, Homo sapien
tctaggccatccaggttgggctggt

SEQ ID NO: 4386156 - DNA, 25 bp, Homo sapien
cccggcacatccagtacaccttctc

SEQ ID NO: 4386157 - DNA, 25 bp, Homo sapien
tcccggcacatccagtacaccttct

SEQ ID NO: 4386158 - DNA, 25 bp, Homo sapien
ccggcacatccagtacaccttctcc

SEQ ID NO: 4386159 - DNA, 25 bp, Homo sapien
tgccccccaggaaagtcttcagaac

SEQ ID NO: 4386160 - DNA, 25 bp, Homo sapien
ctgccccccaggaaagtcttcagaa

SEQ ID NO: 4386161 - DNA, 25 bp, Homo sapien
caggggccggaggggttctgggcag

SEQ ID NO: 4386162 - DNA, 25 bp, Homo sapien
gccggaggggttctgggcagtccca

SEQ ID NO: 4386163 - DNA, 25 bp, Homo sapien
gcgccaagatggagaagtgctcccg

SEQ ID NO: 4386164 - DNA, 25 bp, Homo sapien
tgcgccaagatggagaagtgctccc

SEQ ID NO: 4386165 - DNA, 25 bp, Homo sapien
cgccaagatggagaagtgctcccgc

SEQ ID NO: 4386166 - DNA, 25 bp, Homo sapien
ccaagatggagaagtgctcccgctg

SEQ ID NO: 4386167 - DNA, 25 bp, Homo sapien
ctgcgcatcaccatggcccgccggc

SEQ ID NO: 4386168 - DNA, 25 bp, Homo sapien
cgaggctgcggcagcccatgcggac

SEQ ID NO: 4386169 - DNA, 25 bp, Homo sapien
ccctgggtgatggcgaggctgcggc

SEQ ID NO: 4386170 - DNA, 25 bp, Homo sapien
cgccggccctgggtgatggcgaggc

SEQ ID NO: 4386171 - DNA, 25 bp, Homo sapien
aatacacctgcttatagaggaagga

SEQ ID NO: 4386172 - DNA, 25 bp, Homo sapien
ccaatacacctgcttatagaggaag

SEQ ID NO: 4386173 - DNA, 25 bp, Homo sapien
caatacacctgcttatagaggaagg

SEQ ID NO: 4386174 - DNA, 25 bp, Homo sapien
ctcagggcttccggggtcggcatcc

SEQ ID NO: 4386175 - DNA, 25 bp, Homo sapien
ggcttccggggtcggcatccatgtc

SEQ ID NO: 4386176 - DNA, 25 bp, Homo sapien
gggcttccggggtcggcatccatgt

SEQ ID NO: 4386177 - DNA, 25 bp, Homo sapien
cagggcttccggggtcggcatccat

SEQ ID NO: 4386178 - DNA, 25 bp, Homo sapien
ggtcttcgaccttcgctcgctttct

SEQ ID NO: 4386179 - DNA, 25 bp, Homo sapien
ctggtcctcgtccaggaatccttcc

SEQ ID NO: 4386180 - DNA, 25 bp, Homo sapien
ttcgaccttcgctcgctttctgggc

SEQ ID NO: 4386181 - DNA, 25 bp, Homo sapien
ggcagctcctggtcttcgaccttcg

SEQ ID NO: 4386182 - DNA, 25 bp, Homo sapien
ccctgaggcagagaaaactgttcac

SEQ ID NO: 4386183 - DNA, 25 bp, Homo sapien
ctggtgagagtcagggggccggggc

SEQ ID NO: 4386184 - DNA, 25 bp, Homo sapien
ggccggggcccctgaggcagagaaa

SEQ ID NO: 4386185 - DNA, 25 bp, Homo sapien
tcagggggccggggcccctgaggca

SEQ ID NO: 4386186 - DNA, 25 bp, Homo sapien
ttggaggagagtgtccacttggctc

SEQ ID NO: 4386187 - DNA, 25 bp, Homo sapien
ggagagtgtccacttggctcccagg

SEQ ID NO: 4386188 - DNA, 25 bp, Homo sapien
ccttggaggagagtgtccacttggc

SEQ ID NO: 4386189 - DNA, 25 bp, Homo sapien
gtgtccacttggctcccagggccgg

SEQ ID NO: 4386190 - DNA, 25 bp, Homo sapien
agcagtggccacgcatcacggtcac

SEQ ID NO: 4386191 - DNA, 25 bp, Homo sapien
tccaatacgccttctcccccacggc

SEQ ID NO: 4386192 - DNA, 25 bp, Homo sapien
agtggccacgcatcacggtcacctg

SEQ ID NO: 4386193 - DNA, 25 bp, Homo sapien
gtagcagtggccacgcatcacggtc

SEQ ID NO: 4386194 - DNA, 25 bp, Homo sapien
tcctccgggccggcttgctcagcac

SEQ ID NO: 4386195 - DNA, 25 bp, Homo sapien
cgtcgtcctccgggccggcttgctc

SEQ ID NO: 4386196 - DNA, 25 bp, Homo sapien
cgtcgtcgtcctccgggccggcttg

SEQ ID NO: 4386197 - DNA, 25 bp, Homo sapien
ctacaggattcggggtccgtcgtcg

SEQ ID NO: 4386198 - DNA, 25 bp, Homo sapien
ctggctccggctccttggggcactg

SEQ ID NO: 4386199 - DNA, 25 bp, Homo sapien
tcaggaccccggggatgtcccaaga

SEQ ID NO: 4386200 - DNA, 25 bp, Homo sapien
cagagccctcaggaccccggggatg

SEQ ID NO: 4386201 - DNA, 25 bp, Homo sapien
gagccctcaggaccccggggatgtc

SEQ ID NO: 4386202 - DNA, 25 bp, Homo sapien
agcttctccctctggcgccagggct

SEQ ID NO: 4386203 - DNA, 25 bp, Homo sapien
ggctgggcagcttctccctctggcg

SEQ ID NO: 4386204 - DNA, 25 bp, Homo sapien
ttctccctctggcgccagggctcca

SEQ ID NO: 4386205 - DNA, 25 bp, Homo sapien
gggctccaggccttgctcatcgggc

SEQ ID NO: 4386206 - DNA, 25 bp, Homo sapien
acaccttgtccccgacagccttctc

SEQ ID NO: 4386207 - DNA, 25 bp, Homo sapien
tacaccttgtccccgacagccttct

SEQ ID NO: 4386208 - DNA, 25 bp, Homo sapien
ggcggcacttccagtacaccttgtc

SEQ ID NO: 4386209 - DNA, 25 bp, Homo sapien
tggcggcacttccagtacaccttgt

SEQ ID NO: 4386210 - DNA, 25 bp, Homo sapien
atggtgtcctcaggaactccaggga

SEQ ID NO: 4386211 - DNA, 25 bp, Homo sapien
aatggtgtcctcaggaactccaggg

SEQ ID NO: 4386212 - DNA, 25 bp, Homo sapien
aggctgccaggatgacgtccgtgct

SEQ ID NO: 4386213 - DNA, 25 bp, Homo sapien
tcagctggcaggatatgcaaggtgc

SEQ ID NO: 4386214 - DNA, 25 bp, Homo sapien
agaacttcccgggcttcctgaggct

SEQ ID NO: 4386215 - DNA, 25 bp, Homo sapien
aacctcatcttggttggaggccgtg

SEQ ID NO: 4386216 - DNA, 25 bp, Homo sapien
aacctggagtccagcggttccgctc

SEQ ID NO: 4386217 - DNA, 25 bp, Homo sapien
ctgtccctcaggtcatgctcagcgc

SEQ ID NO: 4386218 - DNA, 25 bp, Homo sapien
ggcattccgggacccagggcctgtc

SEQ ID NO: 4386219 - DNA, 25 bp, Homo sapien
tcagcgcccccgcaaggaacctgga

SEQ ID NO: 4386220 - DNA, 25 bp, Homo sapien
cttagaaagcgtgcttttgatctgc

SEQ ID NO: 4386221 - DNA, 25 bp, Homo sapien
tcaaaggggcgatagacctggttgc

SEQ ID NO: 4386222 - DNA, 25 bp, Homo sapien
tgcagctgtaacaaagaagtaccat

SEQ ID NO: 4386223 - DNA, 25 bp, Homo sapien
atgtacagacttcaatacttaataa

SEQ ID NO: 4386224 - DNA, 25 bp, Homo sapien
cacatgaatcactcgaacccaggag

SEQ ID NO: 4386225 - DNA, 25 bp, Homo sapien
gaggcacatgaatcactcgaaccca

SEQ ID NO: 4386226 - DNA, 25 bp, Homo sapien
tgagctgaggttgcaccactgtgct

SEQ ID NO: 4386227 - DNA, 25 bp, Homo sapien
ggcacatgaatcactcgaacccagg

SEQ ID NO: 4386228 - DNA, 25 bp, Homo sapien
cctatgttgtccacaatcctctctc

SEQ ID NO: 4386229 - DNA, 25 bp, Homo sapien
tgttgtccacaatcctctctcccat

SEQ ID NO: 4386230 - DNA, 25 bp, Homo sapien
cttgtccctatgttgtccacaatcc

SEQ ID NO: 4386231 - DNA, 25 bp, Homo sapien
tatgttgtccacaatcctctctccc

SEQ ID NO: 4386232 - DNA, 25 bp, Homo sapien
caaaaaaggctactcatatctgaga

SEQ ID NO: 4386233 - DNA, 25 bp, Homo sapien
tgttttataagatattagcccctta

SEQ ID NO: 4386234 - DNA, 25 bp, Homo sapien
gcttaaaatacactggacgttagac

SEQ ID NO: 4386235 - DNA, 25 bp, Homo sapien
ggaaacaaattaggtgagctttaca

SEQ ID NO: 4386236 - DNA, 25 bp, Homo sapien
taatgactcttacttaacgagaata

SEQ ID NO: 4386237 - DNA, 25 bp, Homo sapien
ctggtactgcctaacaaaatgtgat

SEQ ID NO: 4386238 - DNA, 25 bp, Homo sapien
ttccatgtaacttaaccatatccca

SEQ ID NO: 4386239 - DNA, 25 bp, Homo sapien
tttattcacaccaacatcgcacatg

SEQ ID NO: 4386240 - DNA, 25 bp, Homo sapien
ttttcatatcctggacaggccccca

SEQ ID NO: 4386241 - DNA, 25 bp, Homo sapien
gatgagacaggattgttcccttcat

SEQ ID NO: 4386242 - DNA, 25 bp, Homo sapien
aactaggtttcccaggagcttcagg

SEQ ID NO: 4386243 - DNA, 25 bp, Homo sapien
tccaggtcatatactacagcgatag

SEQ ID NO: 4386244 - DNA, 25 bp, Homo sapien
agcttcaggcttctcaacttccaag

SEQ ID NO: 4386245 - DNA, 25 bp, Homo sapien
catgatcagtaaggtagtggaggca

SEQ ID NO: 4386246 - DNA, 25 bp, Homo sapien
tgactggtactattttaagacggct

SEQ ID NO: 4386247 - DNA, 25 bp, Homo sapien
taagacggctttgcgctctctggtt

SEQ ID NO: 4386248 - DNA, 25 bp, Homo sapien
gctgagtcacacttaaagctggttt

SEQ ID NO: 4386249 - DNA, 25 bp, Homo sapien
aactacaactcctatgacatgggcc

SEQ ID NO: 4386250 - DNA, 25 bp, Homo sapien
cagctctttccaccaaggctttgca

SEQ ID NO: 4386251 - DNA, 25 bp, Homo sapien
agctgggcagctctttccaccaagg

SEQ ID NO: 4386252 - DNA, 25 bp, Homo sapien
ggcagctctttccaccaaggctttg

SEQ ID NO: 4386253 - DNA, 25 bp, Homo sapien
ctctttccaccaaggctttgcattt

SEQ ID NO: 4386254 - DNA, 25 bp, Homo sapien
gaggaaactgtgagcgatctcagca

SEQ ID NO: 4386255 - DNA, 25 bp, Homo sapien
tggaggaaactgtgagcgatctcag

SEQ ID NO: 4386256 - DNA, 25 bp, Homo sapien
cttggaggaaactgtgagcgatctc

SEQ ID NO: 4386257 - DNA, 25 bp, Homo sapien
aggaaactgtgagcgatctcagcac

SEQ ID NO: 4386258 - DNA, 25 bp, Homo sapien
ttctatgaaccctgttgtcagcacc

SEQ ID NO: 4386259 - DNA, 25 bp, Homo sapien
tgccagttaggcttaattttgacat

SEQ ID NO: 4386260 - DNA, 25 bp, Homo sapien
atgaaccctgttgtcagcacctctg

SEQ ID NO: 4386261 - DNA, 25 bp, Homo sapien
gacatatcggtcagactggtgccag

SEQ ID NO: 4386262 - DNA, 25 bp, Homo sapien
tagtgggaagagcaatatgcattca

SEQ ID NO: 4386263 - DNA, 25 bp, Homo sapien
actttgctggattatcactctggat

SEQ ID NO: 4386264 - DNA, 25 bp, Homo sapien
gtctggccagcattagggatttttc

SEQ ID NO: 4386265 - DNA, 25 bp, Homo sapien
ggatcatccaggtaaacaccttggt

SEQ ID NO: 4386266 - DNA, 25 bp, Homo sapien
gtaagccctcagtgtatatttgttg

SEQ ID NO: 4386267 - DNA, 25 bp, Homo sapien
tatgtacttagttcatagtaagccc

SEQ ID NO: 4386268 - DNA, 25 bp, Homo sapien
tatgcatgcatagagggaactgtat

SEQ ID NO: 4386269 - DNA, 25 bp, Homo sapien
tatagaacttaaactctgcaacgag

SEQ ID NO: 4386270 - DNA, 25 bp, Homo sapien
tatctgggccagaagttggctttat

SEQ ID NO: 4386271 - DNA, 25 bp, Homo sapien
atgtaaagggatatctcattggaac

SEQ ID NO: 4386272 - DNA, 25 bp, Homo sapien
tctgacctgatgtaagagtgtccac

SEQ ID NO: 4386273 - DNA, 25 bp, Homo sapien
acttgatcccagttgtgaattttaa

SEQ ID NO: 4386274 - DNA, 25 bp, Homo sapien
ctcttgagctcaaggtgtccgcctt

SEQ ID NO: 4386275 - DNA, 25 bp, Homo sapien
gggattccactgtcttgcctaggat

SEQ ID NO: 4386276 - DNA, 25 bp, Homo sapien
gagctcaaggtgtccgcctttcttg

SEQ ID NO: 4386277 - DNA, 25 bp, Homo sapien
ttccactgtcttgcctaggatggtc

SEQ ID NO: 4386278 - DNA, 25 bp, Homo sapien
taacaagagatattcgaactgcctc

SEQ ID NO: 4386279 - DNA, 25 bp, Homo sapien
gcaaatgaggcttgatttacccaca

SEQ ID NO: 4386280 - DNA, 25 bp, Homo sapien
tactcgaatgggcaccttcttttgg

SEQ ID NO: 4386281 - DNA, 25 bp, Homo sapien
gagttcagcatttcatcgttcagtg

SEQ ID NO: 4386282 - DNA, 25 bp, Homo sapien
tggatggaatgactgaatctgatac

SEQ ID NO: 4386283 - DNA, 25 bp, Homo sapien
tcacagtactaaccgtcgtaggcgg

SEQ ID NO: 4386284 - DNA, 25 bp, Homo sapien
tgaagatgctgttctgatggatgga

SEQ ID NO: 4386285 - DNA, 25 bp, Homo sapien
tctcgtagacgaaggactgatgaag

SEQ ID NO: 4386286 - DNA, 25 bp, Homo sapien
tcaaggttgattggcaaaactgggc

SEQ ID NO: 4386287 - DNA, 25 bp, Homo sapien
gatagacagccaggtaacttgagtg

SEQ ID NO: 4386288 - DNA, 25 bp, Homo sapien
tctttaacctaatgcgaggaatgca

SEQ ID NO: 4386289 - DNA, 25 bp, Homo sapien
aaaaaccccagcgacgcaatcgtag

SEQ ID NO: 4386290 - DNA, 25 bp, Homo sapien
gcagacaaagaaacctcccaaggga

SEQ ID NO: 4386291 - DNA, 25 bp, Homo sapien
tagagctgagtctcagagcagacaa

SEQ ID NO: 4386292 - DNA, 25 bp, Homo sapien
gagcagacaaagaaacctcccaagg

SEQ ID NO: 4386293 - DNA, 25 bp, Homo sapien
agctgagtctcagagcagacaaaga

SEQ ID NO: 4386294 - DNA, 25 bp, Homo sapien
ggatcgccagtctttacatcgcact

SEQ ID NO: 4386295 - DNA, 25 bp, Homo sapien
gcttgtacaagcttgccaaagatag

SEQ ID NO: 4386296 - DNA, 25 bp, Homo sapien
caactagtgcttctggcgatgacat

SEQ ID NO: 4386297 - DNA, 25 bp, Homo sapien
taagctacagcgtactccaggagaa

SEQ ID NO: 4386298 - DNA, 25 bp, Homo sapien
gtgagtatagctgaaccaattcttc

SEQ ID NO: 4386299 - DNA, 25 bp, Homo sapien
aaagggtagccattaattcaggtag

SEQ ID NO: 4386300 - DNA, 25 bp, Homo sapien
gctagcaacaggttaaattgtctca

SEQ ID NO: 4386301 - DNA, 25 bp, Homo sapien
taaatgtatttgagagggttccgtc

SEQ ID NO: 4386302 - DNA, 25 bp, Homo sapien
actagtgttctcatgggctgttgcc

SEQ ID NO: 4386303 - DNA, 25 bp, Homo sapien
taaatcttggactgggaaacagcac

SEQ ID NO: 4386304 - DNA, 25 bp, Homo sapien
gaaacttacctgagatgatgctggg

SEQ ID NO: 4386305 - DNA, 25 bp, Homo sapien
aacagatttacgcttttgaggctca

SEQ ID NO: 4386306 - DNA, 25 bp, Homo sapien
tccagtactgaggtaaggtacacaa

SEQ ID NO: 4386307 - DNA, 25 bp, Homo sapien
caattttatccaaccagagagggct

SEQ ID NO: 4386308 - DNA, 25 bp, Homo sapien
aaggcccttccagtagtaatttgag

SEQ ID NO: 4386309 - DNA, 25 bp, Homo sapien
tctagtcacatgtcagaccctgagc

SEQ ID NO: 4386310 - DNA, 25 bp, Homo sapien
tacaagcttctgaactgcaaaacct

SEQ ID NO: 4386311 - DNA, 25 bp, Homo sapien
ggtactcaaggttactcattccagg

SEQ ID NO: 4386312 - DNA, 25 bp, Homo sapien
taaggcagtagttggctctaagctg

SEQ ID NO: 4386313 - DNA, 25 bp, Homo sapien
caaaaacctaggagagcattctaca

SEQ ID NO: 4386314 - DNA, 25 bp, Homo sapien
gaagtttgattatgtcaagaaatag

SEQ ID NO: 4386315 - DNA, 25 bp, Homo sapien
taatcataacaattgcagaagtttg

SEQ ID NO: 4386316 - DNA, 25 bp, Homo sapien
tgatattgagaacatttcagttttc

SEQ ID NO: 4386317 - DNA, 25 bp, Homo sapien
tgctaacagggtttaagcttaatca

SEQ ID NO: 4386318 - DNA, 25 bp, Homo sapien
tattcagaaggtgtgtgcttgccca

SEQ ID NO: 4386319 - DNA, 25 bp, Homo sapien
cacacccctaggtcaatttcttagg

SEQ ID NO: 4386320 - DNA, 25 bp, Homo sapien
caagtatccaagttgccaggccagt

SEQ ID NO: 4386321 - DNA, 25 bp, Homo sapien
caggccagttgcctgtacctggaac

SEQ ID NO: 4386322 - DNA, 25 bp, Homo sapien
tattataaaaacttagtactcatat

SEQ ID NO: 4386323 - DNA, 25 bp, Homo sapien
ttattataaaaacttagtactcata

SEQ ID NO: 4386324 - DNA, 25 bp, Homo sapien
ccttctagtaaatctttagcttcat

SEQ ID NO: 4386325 - DNA, 25 bp, Homo sapien
aatttacgtgggagatatttctaca

SEQ ID NO: 4386326 - DNA, 25 bp, Homo sapien
tctgcttggtaaaaagctactcttg

SEQ ID NO: 4386327 - DNA, 25 bp, Homo sapien
taaccctgacactgcaactggatga

SEQ ID NO: 4386328 - DNA, 25 bp, Homo sapien
gagatttagcagaaacagtgtttta

SEQ ID NO: 4386329 - DNA, 25 bp, Homo sapien
gagtcagaagccctccatataaaac

SEQ ID NO: 4386330 - DNA, 25 bp, Homo sapien
cagaagccctccatataaaacaagc

SEQ ID NO: 4386331 - DNA, 25 bp, Homo sapien
tcagaagccctccatataaaacaag

SEQ ID NO: 4386332 - DNA, 25 bp, Homo sapien
gtcagaagccctccatataaaacaa

SEQ ID NO: 4386333 - DNA, 25 bp, Homo sapien
cagcctaggagacaggacttacaga

SEQ ID NO: 4386334 - DNA, 25 bp, Homo sapien
gaaagccctctcctgtataagtaaa

SEQ ID NO: 4386335 - DNA, 25 bp, Homo sapien
tacctttctaatagccaggaatttg

SEQ ID NO: 4386336 - DNA, 25 bp, Homo sapien
tatctaggtaatctccgtttcaagg

SEQ ID NO: 4386337 - DNA, 25 bp, Homo sapien
atgatttaaaagcataattcgtcga

SEQ ID NO: 4386338 - DNA, 25 bp, Homo sapien
tttaaaagcataattcgtcgatgag

SEQ ID NO: 4386339 - DNA, 25 bp, Homo sapien
gatttaaaagcataattcgtcgatg

SEQ ID NO: 4386340 - DNA, 25 bp, Homo sapien
taaaagcataattcgtcgatgagca

SEQ ID NO: 4386341 - DNA, 25 bp, Homo sapien
caaaaaactgtacataaaggccaat

SEQ ID NO: 4386342 - DNA, 25 bp, Homo sapien
tcaacacacccaatgcgtatcctaa

SEQ ID NO: 4386343 - DNA, 25 bp, Homo sapien
tgaaactgtagtaaattaacacaac

SEQ ID NO: 4386344 - DNA, 25 bp, Homo sapien
tacttagaaaagtaaggcactctca

SEQ ID NO: 4386345 - DNA, 25 bp, Homo sapien
tatatttcctcatggctctacagtg

SEQ ID NO: 4386346 - DNA, 25 bp, Homo sapien
tgaacactgtgataatctgctgagg

SEQ ID NO: 4386347 - DNA, 25 bp, Homo sapien
ggtaatatcaatcttcctaggacaa

SEQ ID NO: 4386348 - DNA, 25 bp, Homo sapien
gcttaagtgctagtgtgccttctca

SEQ ID NO: 4386349 - DNA, 25 bp, Homo sapien
ttaatgctgcttcccgttttgtcat

SEQ ID NO: 4386350 - DNA, 25 bp, Homo sapien
tattaatgctgcttcccgttttgtc

SEQ ID NO: 4386351 - DNA, 25 bp, Homo sapien
agtattaatgctgcttcccgttttg

SEQ ID NO: 4386352 - DNA, 25 bp, Homo sapien
ctagtattaatgctgcttcccgttt

SEQ ID NO: 4386353 - DNA, 25 bp, Homo sapien
tcagaggacttttagtgcaattccc

SEQ ID NO: 4386354 - DNA, 25 bp, Homo sapien
aaaaactaagacatttcagaggact

SEQ ID NO: 4386355 - DNA, 25 bp, Homo sapien
gcaattcccgaggtattttagctaa

SEQ ID NO: 4386356 - DNA, 25 bp, Homo sapien
taaaaaagacgtctggaaatattca

SEQ ID NO: 4386357 - DNA, 25 bp, Homo sapien
tacccttccctaagtgtggctctag

SEQ ID NO: 4386358 - DNA, 25 bp, Homo sapien
gaatgggtccaaagcaatcacttag

SEQ ID NO: 4386359 - DNA, 25 bp, Homo sapien
gggtagcaccatcacaaagttcaga

SEQ ID NO: 4386360 - DNA, 25 bp, Homo sapien
gaatcatatacctctgtgtgtgcga

SEQ ID NO: 4386361 - DNA, 25 bp, Homo sapien
taagtaaactaaatctccaatctcc

SEQ ID NO: 4386362 - DNA, 25 bp, Homo sapien
aatctccaatctccccgacttcact

SEQ ID NO: 4386363 - DNA, 25 bp, Homo sapien
aagcaacagaataagtaaactaaat

SEQ ID NO: 4386364 - DNA, 25 bp, Homo sapien
cagaataagtaaactaaatctccaa

SEQ ID NO: 4386365 - DNA, 25 bp, Homo sapien
gcagcaatggtcagtccaactgcta

SEQ ID NO: 4386366 - DNA, 25 bp, Homo sapien
cagcaatggtcagtccaactgctac

SEQ ID NO: 4386367 - DNA, 25 bp, Homo sapien
gcaatggtcagtccaactgctacca

SEQ ID NO: 4386368 - DNA, 25 bp, Homo sapien
agcagcaatggtcagtccaactgct

SEQ ID NO: 4386369 - DNA, 25 bp, Homo sapien
ttttaaggcggaaatattctgtcca

SEQ ID NO: 4386370 - DNA, 25 bp, Homo sapien
ggaaagagggcaagttcgacttgct

SEQ ID NO: 4386371 - DNA, 25 bp, Homo sapien
caatagtgaaaaagatgattccctc

SEQ ID NO: 4386372 - DNA, 25 bp, Homo sapien
aagttacaggattcatcatatggga

SEQ ID NO: 4386373 - DNA, 25 bp, Homo sapien
aaatacgtttccactaatctccgag

SEQ ID NO: 4386374 - DNA, 25 bp, Homo sapien
gatgtgttagggcaagggcacttat

SEQ ID NO: 4386375 - DNA, 25 bp, Homo sapien
gccaaagagaaggacatagcaaagt

SEQ ID NO: 4386376 - DNA, 25 bp, Homo sapien
gaagcatggagaagacatctgtcag

SEQ ID NO: 4386377 - DNA, 25 bp, Homo sapien
gtgagtgtgactccccaataaccga

SEQ ID NO: 4386378 - DNA, 25 bp, Homo sapien
ctggagaaccgtgcagaaagacgat

SEQ ID NO: 4386379 - DNA, 25 bp, Homo sapien
cccaagagagcgagccaacagggtt

SEQ ID NO: 4386380 - DNA, 25 bp, Homo sapien
gagttccaggcaagcaacacctgca

SEQ ID NO: 4386381 - DNA, 25 bp, Homo sapien
gccctacgcaacacggcaggagcag

SEQ ID NO: 4386382 - DNA, 25 bp, Homo sapien
gcggccaacacctgcacgcctttac

SEQ ID NO: 4386383 - DNA, 25 bp, Homo sapien
caacctcaagcacaggcgccctacg

SEQ ID NO: 4386384 - DNA, 25 bp, Homo sapien
ttaccagagagcgacgcaaccccca

SEQ ID NO: 4386385 - DNA, 25 bp, Homo sapien
atgaaacatctgaatccattacaga

SEQ ID NO: 4386386 - DNA, 25 bp, Homo sapien
gaatccattacagaacacttctgaa

SEQ ID NO: 4386387 - DNA, 25 bp, Homo sapien
tctgaatccattacagaacacttct

SEQ ID NO: 4386388 - DNA, 25 bp, Homo sapien
catctgaatccattacagaacactt

SEQ ID NO: 4386389 - DNA, 25 bp, Homo sapien
ttcgtgtcttgactctttttgggaa

SEQ ID NO: 4386390 - DNA, 25 bp, Homo sapien
ggttctggctttcgcaaaacaactg

SEQ ID NO: 4386391 - DNA, 25 bp, Homo sapien
ttttgggaaagttattgctagaggc

SEQ ID NO: 4386392 - DNA, 25 bp, Homo sapien
aaaacaactgtgagttcatcctccc

SEQ ID NO: 4386393 - DNA, 25 bp, Homo sapien
gatgggtctccaaggctgcttggaa

SEQ ID NO: 4386394 - DNA, 25 bp, Homo sapien
atgggtctccaaggctgcttggaaa

SEQ ID NO: 4386395 - DNA, 25 bp, Homo sapien
cagatgggtctccaaggctgcttgg

SEQ ID NO: 4386396 - DNA, 25 bp, Homo sapien
agatgggtctccaaggctgcttgga

SEQ ID NO: 4386397 - DNA, 25 bp, Homo sapien
cttctctcttcagagcaaacaaatt

SEQ ID NO: 4386398 - DNA, 25 bp, Homo sapien
ttcttctactccttctctcttcaga

SEQ ID NO: 4386399 - DNA, 25 bp, Homo sapien
tcttttcttctactccttctctctt

SEQ ID NO: 4386400 - DNA, 25 bp, Homo sapien
gagcaaacaaatttctctctctgtc

SEQ ID NO: 4386401 - DNA, 25 bp, Homo sapien
gctgtgtagtttcaccctctcccct

SEQ ID NO: 4386402 - DNA, 25 bp, Homo sapien
ctgaatccttggccttaagtgacat

SEQ ID NO: 4386403 - DNA, 25 bp, Homo sapien
tctcccctgaatccttggccttaag

SEQ ID NO: 4386404 - DNA, 25 bp, Homo sapien
cccctgaatccttggccttaagtga

SEQ ID NO: 4386405 - DNA, 25 bp, Homo sapien
cactgaaggagttaagggattagaa

SEQ ID NO: 4386406 - DNA, 25 bp, Homo sapien
aatttcagagcctttagtggccctc

SEQ ID NO: 4386407 - DNA, 25 bp, Homo sapien
ttttctttggtcagctcaatttcag

SEQ ID NO: 4386408 - DNA, 25 bp, Homo sapien
agagcctttagtggccctcactgaa

SEQ ID NO: 4386409 - DNA, 25 bp, Homo sapien
tccagcctcttctcttcacactggc

SEQ ID NO: 4386410 - DNA, 25 bp, Homo sapien
ggactttccagcctcttctcttcac

SEQ ID NO: 4386411 - DNA, 25 bp, Homo sapien
ctttccagcctcttctcttcacact

SEQ ID NO: 4386412 - DNA, 25 bp, Homo sapien
gactttccagcctcttctcttcaca

SEQ ID NO: 4386413 - DNA, 25 bp, Homo sapien
tcaccactgtagacccaaaagctat

SEQ ID NO: 4386414 - DNA, 25 bp, Homo sapien
tttccttgatagtgcccttcccact

SEQ ID NO: 4386415 - DNA, 25 bp, Homo sapien
atttgtggagctttcccaaccaagg

SEQ ID NO: 4386416 - DNA, 25 bp, Homo sapien
gctcctgcttcctgatctaacttta

SEQ ID NO: 4386417 - DNA, 25 bp, Homo sapien
accagtagatttggctttttcccat

SEQ ID NO: 4386418 - DNA, 25 bp, Homo sapien
tagcagagttcctaaaccagtagat

SEQ ID NO: 4386419 - DNA, 25 bp, Homo sapien
cgggtccttgtgtagccttggataa

SEQ ID NO: 4386420 - DNA, 25 bp, Homo sapien
gggagctactcttgggcagacccat

SEQ ID NO: 4386421 - DNA, 25 bp, Homo sapien
gctcctggccttctgcggttcttgc

SEQ ID NO: 4386422 - DNA, 25 bp, Homo sapien
gcggttcttgcaactctgttgacat

SEQ ID NO: 4386423 - DNA, 25 bp, Homo sapien
gattctgatgaatgtgatcatcatc

SEQ ID NO: 4386424 - DNA, 25 bp, Homo sapien
tgaacttggcgcaccgctgattctg

SEQ ID NO: 4386425 - DNA, 25 bp, Homo sapien
gaaaacacctttgatactttctcat

SEQ ID NO: 4386426 - DNA, 25 bp, Homo sapien
acctttgatactttctcatctccca

SEQ ID NO: 4386427 - DNA, 25 bp, Homo sapien
aaacacctttgatactttctcatct

SEQ ID NO: 4386428 - DNA, 25 bp, Homo sapien
ttgaaaacacctttgatactttctc

SEQ ID NO: 4386429 - DNA, 25 bp, Homo sapien
acacaatgctgttgttaatagcgaa

SEQ ID NO: 4386430 - DNA, 25 bp, Homo sapien
tagcgaatgaaatgactggaactgt

SEQ ID NO: 4386431 - DNA, 25 bp, Homo sapien
cgtgactgttggtagaagctttgtc

SEQ ID NO: 4386432 - DNA, 25 bp, Homo sapien
aagctttgtcttgaacacaatgctg

SEQ ID NO: 4386433 - DNA, 25 bp, Homo sapien
tctgaacgagctggtaatttacaaa

SEQ ID NO: 4386434 - DNA, 25 bp, Homo sapien
tgatctgaacgagctggtaatttac

SEQ ID NO: 4386435 - DNA, 25 bp, Homo sapien
cttttgttgatctgaacgagctggt

SEQ ID NO: 4386436 - DNA, 25 bp, Homo sapien
tgttgatctgaacgagctggtaatt

SEQ ID NO: 4386437 - DNA, 25 bp, Homo sapien
gcagatcctgggaatttcatgtagg

SEQ ID NO: 4386438 - DNA, 25 bp, Homo sapien
gaattagttctgaaatctctgaggt

SEQ ID NO: 4386439 - DNA, 25 bp, Homo sapien
tcatgtaggcaaacatgagatcctt

SEQ ID NO: 4386440 - DNA, 25 bp, Homo sapien
agggctggcactgctaaagcaagca

SEQ ID NO: 4386441 - DNA, 25 bp, Homo sapien
gctgggggtacttcgttttgtcgca

SEQ ID NO: 4386442 - DNA, 25 bp, Homo sapien
ctttaagcacttttggtaaaagctg

SEQ ID NO: 4386443 - DNA, 25 bp, Homo sapien
ttttgctggctagtttcatatctac

SEQ ID NO: 4386444 - DNA, 25 bp, Homo sapien
cgttttgtcgcagttgtaaaggatc

SEQ ID NO: 4386445 - DNA, 25 bp, Homo sapien
gactgcccaaggccaatccagaatc

SEQ ID NO: 4386446 - DNA, 25 bp, Homo sapien
tccagaatcacggatgtcagctcta

SEQ ID NO: 4386447 - DNA, 25 bp, Homo sapien
aatccactttcatagagagtgagtg

SEQ ID NO: 4386448 - DNA, 25 bp, Homo sapien
gagtgagtgggcaatgtggacttta

SEQ ID NO: 4386449 - DNA, 25 bp, Homo sapien
tgtcttttgactttacccattccta

SEQ ID NO: 4386450 - DNA, 25 bp, Homo sapien
cttgctaaaactctcttgtcttttg

SEQ ID NO: 4386451 - DNA, 25 bp, Homo sapien
gattgtcattaacacatcctcccat

SEQ ID NO: 4386452 - DNA, 25 bp, Homo sapien
tttggattgtcattaacacatcctc

SEQ ID NO: 4386453 - DNA, 25 bp, Homo sapien
caaattggatgttctttcatctggg

SEQ ID NO: 4386454 - DNA, 25 bp, Homo sapien
catctgggatcctatctttcctgga

SEQ ID NO: 4386455 - DNA, 25 bp, Homo sapien
ctttcctggaaataactctatccat

SEQ ID NO: 4386456 - DNA, 25 bp, Homo sapien
ctctatccatggactggtagatcat

SEQ ID NO: 4386457 - DNA, 25 bp, Homo sapien
cacttaattgcatgcttttgtgtcc

SEQ ID NO: 4386458 - DNA, 25 bp, Homo sapien
aaaaacctcatggcctctcttctcc

SEQ ID NO: 4386459 - DNA, 25 bp, Homo sapien
tttgtgtcctatcatgaccaggaac

SEQ ID NO: 4386460 - DNA, 25 bp, Homo sapien
ttcaaaaacctcatggcctctcttc

SEQ ID NO: 4386461 - DNA, 25 bp, Homo sapien
taaatttagcttttatgctgaaagc

SEQ ID NO: 4386462 - DNA, 25 bp, Homo sapien
gcttttatgctgaaagctgtggcct

SEQ ID NO: 4386463 - DNA, 25 bp, Homo sapien
ttttatgctgaaagctgtggcctgt

SEQ ID NO: 4386464 - DNA, 25 bp, Homo sapien
tttagcttttatgctgaaagctgtg

SEQ ID NO: 4386465 - DNA, 25 bp, Homo sapien
cagcaaatggacttctcttgctctt

SEQ ID NO: 4386466 - DNA, 25 bp, Homo sapien
ttcagcaaatggacttctcttgctc

SEQ ID NO: 4386467 - DNA, 25 bp, Homo sapien
tcttcagcaaatggacttctcttgc

SEQ ID NO: 4386468 - DNA, 25 bp, Homo sapien
gtcttcagcaaatggacttctcttg

SEQ ID NO: 4386469 - DNA, 25 bp, Homo sapien
gatttgtggctaggcaaattttcct

SEQ ID NO: 4386470 - DNA, 25 bp, Homo sapien
caattaattctatatgatttgtggc

SEQ ID NO: 4386471 - DNA, 25 bp, Homo sapien
tctatatgatttgtggctaggcaaa

SEQ ID NO: 4386472 - DNA, 25 bp, Homo sapien
ttccagcagtctgtctttcaggcat

SEQ ID NO: 4386473 - DNA, 25 bp, Homo sapien
gcttggcactgaaccggtaaacgaa

SEQ ID NO: 4386474 - DNA, 25 bp, Homo sapien
cctccaccattctgttagggaacaa

SEQ ID NO: 4386475 - DNA, 25 bp, Homo sapien
ttctcccaagttaggtcaaggccca

SEQ ID NO: 4386476 - DNA, 25 bp, Homo sapien
tcattgccccagcttttagcccagt

SEQ ID NO: 4386477 - DNA, 25 bp, Homo sapien
caagaaattgagacttagccagttg

SEQ ID NO: 4386478 - DNA, 25 bp, Homo sapien
gaaaagtggactttcaggctcctgc

SEQ ID NO: 4386479 - DNA, 25 bp, Homo sapien
ggtctgggcaccagttctagaaaga

SEQ ID NO: 4386480 - DNA, 25 bp, Homo sapien
aaattttcctcaagctagtccctca

SEQ ID NO: 4386481 - DNA, 25 bp, Homo sapien
tactacttgcagcagtgtatggcat

SEQ ID NO: 4386482 - DNA, 25 bp, Homo sapien
cagcagctgctggtaatttggtgca

SEQ ID NO: 4386483 - DNA, 25 bp, Homo sapien
taggataaaataccaaacaggcagc

SEQ ID NO: 4386484 - DNA, 25 bp, Homo sapien
gagtaatgcactctacatgtggtct

SEQ ID NO: 4386485 - DNA, 25 bp, Homo sapien
caatgcgctggttgtactgaatcca

SEQ ID NO: 4386486 - DNA, 25 bp, Homo sapien
aacattgacaatgcgctggttgtac

SEQ ID NO: 4386487 - DNA, 25 bp, Homo sapien
gtgggcacaacattgacaatgcgct

SEQ ID NO: 4386488 - DNA, 25 bp, Homo sapien
gtactgaatccaccacttaaccctg

SEQ ID NO: 4386489 - DNA, 25 bp, Homo sapien
cacactgtacttgcccagggtagtc

SEQ ID NO: 4386490 - DNA, 25 bp, Homo sapien
ctacatgtgccttgatttgggcagc

SEQ ID NO: 4386491 - DNA, 25 bp, Homo sapien
gagcacaggttgatcttcccaggca

SEQ ID NO: 4386492 - DNA, 25 bp, Homo sapien
tctaagcatgtggatggctacttcc

SEQ ID NO: 4386493 - DNA, 25 bp, Homo sapien
ttcttcatctttccactgcccttgt

SEQ ID NO: 4386494 - DNA, 25 bp, Homo sapien
catctttccactgcccttgtgctcc

SEQ ID NO: 4386495 - DNA, 25 bp, Homo sapien
ttcatctttccactgcccttgtgct

SEQ ID NO: 4386496 - DNA, 25 bp, Homo sapien
taagttcttcatctttccactgccc

SEQ ID NO: 4386497 - DNA, 25 bp, Homo sapien
aagttgcccattcgatgcagtcaca

SEQ ID NO: 4386498 - DNA, 25 bp, Homo sapien
tcttgctctgactaacccagggctg

SEQ ID NO: 4386499 - DNA, 25 bp, Homo sapien
tgcagtcacacaaagccccgttttg

SEQ ID NO: 4386500 - DNA, 25 bp, Homo sapien
ggaaatatgtcacattgaaaacatc

SEQ ID NO: 4386501 - DNA, 25 bp, Homo sapien
catatgatacctcatatttgtggcc

SEQ ID NO: 4386502 - DNA, 25 bp, Homo sapien
tgctgccccatatgatacctcatat

SEQ ID NO: 4386503 - DNA, 25 bp, Homo sapien
gatacctcatatttgtggcccttca

SEQ ID NO: 4386504 - DNA, 25 bp, Homo sapien
tgccccatatgatacctcatatttg

SEQ ID NO: 4386505 - DNA, 25 bp, Homo sapien
tcagtgatatgacagcttgacagct

SEQ ID NO: 4386506 - DNA, 25 bp, Homo sapien
agtgatatgacagcttgacagctac

SEQ ID NO: 4386507 - DNA, 25 bp, Homo sapien
cagtgatatgacagcttgacagcta

SEQ ID NO: 4386508 - DNA, 25 bp, Homo sapien
taaatgcagtccaactatttactgt

SEQ ID NO: 4386509 - DNA, 25 bp, Homo sapien
atgcagtccaactatttactgttag

SEQ ID NO: 4386510 - DNA, 25 bp, Homo sapien
ttaaatgcagtccaactatttactg

SEQ ID NO: 4386511 - DNA, 25 bp, Homo sapien
cagtccaactatttactgttaggaa

SEQ ID NO: 4386512 - DNA, 25 bp, Homo sapien
cagctgcagcttgtttatgtgaagg

SEQ ID NO: 4386513 - DNA, 25 bp, Homo sapien
agcagcattgcacagggtgttcaag

SEQ ID NO: 4386514 - DNA, 25 bp, Homo sapien
cacggccaagtgtctgagttctggg

SEQ ID NO: 4386515 - DNA, 25 bp, Homo sapien
ggatggactaagcttggccgattgc

SEQ ID NO: 4386516 - DNA, 25 bp, Homo sapien
cagctgtcagagaattgagtcctgc

SEQ ID NO: 4386517 - DNA, 25 bp, Homo sapien
tttgaaaacatcatcaatcacccca

SEQ ID NO: 4386518 - DNA, 25 bp, Homo sapien
catcatcaatcaccccatcattggt

SEQ ID NO: 4386519 - DNA, 25 bp, Homo sapien
gaaaacatcatcaatcaccccatca

SEQ ID NO: 4386520 - DNA, 25 bp, Homo sapien
tattttcacctatttgatgtagcag

SEQ ID NO: 4386521 - DNA, 25 bp, Homo sapien
tagcagattatttacggagccaaca

SEQ ID NO: 4386522 - DNA, 25 bp, Homo sapien
ggagccaacatgttgacacactata

SEQ ID NO: 4386523 - DNA, 25 bp, Homo sapien
tctgaaccttcctctgtaggctgca

SEQ ID NO: 4386524 - DNA, 25 bp, Homo sapien
taagaatatggtgccttagatgtca

SEQ ID NO: 4386525 - DNA, 25 bp, Homo sapien
gataagaatatggtgccttagatgt

SEQ ID NO: 4386526 - DNA, 25 bp, Homo sapien
gagataagaatatggtgccttagat

SEQ ID NO: 4386527 - DNA, 25 bp, Homo sapien
aagaatatggtgccttagatgtcat

SEQ ID NO: 4386528 - DNA, 25 bp, Homo sapien
ctgtcaaacagctctgtaaagcagc

SEQ ID NO: 4386529 - DNA, 25 bp, Homo sapien
tcattgtcattccaaaattttaggt

SEQ ID NO: 4386530 - DNA, 25 bp, Homo sapien
cagcatctcatgagagagacaaagc

SEQ ID NO: 4386531 - DNA, 25 bp, Homo sapien
tccttatatggagtaaatcacccca

SEQ ID NO: 4386532 - DNA, 25 bp, Homo sapien
ctcattagtaccacctttgaaacct

SEQ ID NO: 4386533 - DNA, 25 bp, Homo sapien
atttcctagtctcccttgaacttca

SEQ ID NO: 4386534 - DNA, 25 bp, Homo sapien
tgtgtttatttcctagtctcccttg

SEQ ID NO: 4386535 - DNA, 25 bp, Homo sapien
ctctcattagtaccacctttgaaac

SEQ ID NO: 4386536 - DNA, 25 bp, Homo sapien
ggtagtaattgctattacattacag

SEQ ID NO: 4386537 - DNA, 25 bp, Homo sapien
gattgacccctggtagtaattgcta

SEQ ID NO: 4386538 - DNA, 25 bp, Homo sapien
tgagattgacccctggtagtaattg

SEQ ID NO: 4386539 - DNA, 25 bp, Homo sapien
gacccctggtagtaattgctattac

SEQ ID NO: 4386540 - DNA, 25 bp, Homo sapien
ctaatatccagggttcaaaatgagc

SEQ ID NO: 4386541 - DNA, 25 bp, Homo sapien
acacagccgtgtgctcacttctcag

SEQ ID NO: 4386542 - DNA, 25 bp, Homo sapien
cctcccagtacgtgcacattcgtgg

SEQ ID NO: 4386543 - DNA, 25 bp, Homo sapien
cattcgtggagcaacacagccgtgt

SEQ ID NO: 4386544 - DNA, 25 bp, Homo sapien
tcctgcttgaggcacgtcttttctc

SEQ ID NO: 4386545 - DNA, 25 bp, Homo sapien
ccttgtgcatttccatggtaaccga

SEQ ID NO: 4386546 - DNA, 25 bp, Homo sapien
tattcaagggtttgtcagaaacagg

SEQ ID NO: 4386547 - DNA, 25 bp, Homo sapien
catgctgacagtatctggcttgttg

SEQ ID NO: 4386548 - DNA, 25 bp, Homo sapien
ccatggtaaccgatggcatgctgac

SEQ ID NO: 4386549 - DNA, 25 bp, Homo sapien
tagctgctttatccccacttcaggg

SEQ ID NO: 4386550 - DNA, 25 bp, Homo sapien
tatattacttaacctagcacttgtg

SEQ ID NO: 4386551 - DNA, 25 bp, Homo sapien
cacttcagggccaatatataacatt

SEQ ID NO: 4386552 - DNA, 25 bp, Homo sapien
ggttgtgtgatcttcagcctcagtt

SEQ ID NO: 4386553 - DNA, 25 bp, Homo sapien
ccagccattgcccttgtgaagagta

SEQ ID NO: 4386554 - DNA, 25 bp, Homo sapien
cactaatttgtaatcttggccagcc

SEQ ID NO: 4386555 - DNA, 25 bp, Homo sapien
tgactctttgtcatactcccagggt

SEQ ID NO: 4386556 - DNA, 25 bp, Homo sapien
catgacctcggtacagattccagcc

SEQ ID NO: 4386557 - DNA, 25 bp, Homo sapien
catagtgttccagtaccatgccatg

SEQ ID NO: 4386558 - DNA, 25 bp, Homo sapien
cagggcctccaatgggccaacacat

SEQ ID NO: 4386559 - DNA, 25 bp, Homo sapien
aatgggccaacacattgaatcacag

SEQ ID NO: 4386560 - DNA, 25 bp, Homo sapien
tcacagagatattccgagaggtcag

SEQ ID NO: 4386561 - DNA, 25 bp, Homo sapien
gagttaacggtatcactgcacactg

SEQ ID NO: 4386562 - DNA, 25 bp, Homo sapien
taagatataaacattgaaactggcg

SEQ ID NO: 4386563 - DNA, 25 bp, Homo sapien
tagaccatccaagatacatagaggg

SEQ ID NO: 4386564 - DNA, 25 bp, Homo sapien
gaaactggcgtttctgtttgcctgt

SEQ ID NO: 4386565 - DNA, 25 bp, Homo sapien
ccaaacagttgctaaactcaactct

SEQ ID NO: 4386566 - DNA, 25 bp, Homo sapien
cagttgctaaactcaactctcggtg

SEQ ID NO: 4386567 - DNA, 25 bp, Homo sapien
gctaaactcaactctcggtgttcac

SEQ ID NO: 4386568 - DNA, 25 bp, Homo sapien
tgttacatggccagtccaaacagtt

SEQ ID NO: 4386569 - DNA, 25 bp, Homo sapien
tgcctacagccgtactatgttgccc

SEQ ID NO: 4386570 - DNA, 25 bp, Homo sapien
gagaaccagagtaaacagcccagat

SEQ ID NO: 4386571 - DNA, 25 bp, Homo sapien
tgcccaccaggggaaatactagaaa

SEQ ID NO: 4386572 - DNA, 25 bp, Homo sapien
cggggtcctcagaaaatgataggtg

SEQ ID NO: 4386573 - DNA, 25 bp, Homo sapien
tcagggaagtcccattcagaagagt

SEQ ID NO: 4386574 - DNA, 25 bp, Homo sapien
ttttctattgagcatgaagatcagg

SEQ ID NO: 4386575 - DNA, 25 bp, Homo sapien
ttccaaagctgaggctttttctatt

SEQ ID NO: 4386576 - DNA, 25 bp, Homo sapien
tattgagcatgaagatcaggtaaaa

SEQ ID NO: 4386577 - DNA, 25 bp, Homo sapien
tgggcttcaggttgcaaagttggta

SEQ ID NO: 4386578 - DNA, 25 bp, Homo sapien
aagttggtaatagcagcgaatatcc

SEQ ID NO: 4386579 - DNA, 25 bp, Homo sapien
cagaggcctgatggataacacatgc

SEQ ID NO: 4386580 - DNA, 25 bp, Homo sapien
aatagcagcgaatatcctcgtaacc

SEQ ID NO: 4386581 - DNA, 25 bp, Homo sapien
gtttcaactggaacttatgcagggc

SEQ ID NO: 4386582 - DNA, 25 bp, Homo sapien
cgtttgcagacttctttgtgcggtg

SEQ ID NO: 4386583 - DNA, 25 bp, Homo sapien
tatgcagggcccgtttgcagacttc

SEQ ID NO: 4386584 - DNA, 25 bp, Homo sapien
tctttgtgcggtggttcattcccca

SEQ ID NO: 4386585 - DNA, 25 bp, Homo sapien
cctcccccatgaattagttcctttg

SEQ ID NO: 4386586 - DNA, 25 bp, Homo sapien
cctttgtcctgaaatgtgtggttag

SEQ ID NO: 4386587 - DNA, 25 bp, Homo sapien
aatgtgtggttagcccagatattca

SEQ ID NO: 4386588 - DNA, 25 bp, Homo sapien
tataaatggtgtgtggtctcccctc

SEQ ID NO: 4386589 - DNA, 25 bp, Homo sapien
cctttctccattcatcaaacatgag

SEQ ID NO: 4386590 - DNA, 25 bp, Homo sapien
tagtctcctctatccccatttcttg

SEQ ID NO: 4386591 - DNA, 25 bp, Homo sapien
atttcttgctaactccctcctgccc

SEQ ID NO: 4386592 - DNA, 25 bp, Homo sapien
tcaggagagtgcatacttcatccct

SEQ ID NO: 4386593 - DNA, 25 bp, Homo sapien
ttcagtcccatcagttagagcagca

SEQ ID NO: 4386594 - DNA, 25 bp, Homo sapien
caggccagactccttttggcaattt

SEQ ID NO: 4386595 - DNA, 25 bp, Homo sapien
tcctccctactgcttgctgccaagg

SEQ ID NO: 4386596 - DNA, 25 bp, Homo sapien
aagctcaggccagactccttttggc

SEQ ID NO: 4386597 - DNA, 25 bp, Homo sapien
tgcacgctgctggaattttcaactg

SEQ ID NO: 4386598 - DNA, 25 bp, Homo sapien
tttgatgggctaaatcaggaagcat

SEQ ID NO: 4386599 - DNA, 25 bp, Homo sapien
ttttcaactgaagggtcgtgcacca

SEQ ID NO: 4386600 - DNA, 25 bp, Homo sapien
ggtgcataggcagccacacactgaa

SEQ ID NO: 4386601 - DNA, 25 bp, Homo sapien
cagcccaccgtctttgtcactataa

SEQ ID NO: 4386602 - DNA, 25 bp, Homo sapien
ttcttgtccagcccaccgtctttgt

SEQ ID NO: 4386603 - DNA, 25 bp, Homo sapien
gcccaccgtctttgtcactataaca

SEQ ID NO: 4386604 - DNA, 25 bp, Homo sapien
ttgtccagcccaccgtctttgtcac

SEQ ID NO: 4386605 - DNA, 25 bp, Homo sapien
catacgtttcctcataaactggtat

SEQ ID NO: 4386606 - DNA, 25 bp, Homo sapien
tttttgttcatacgtttcctcataa

SEQ ID NO: 4386607 - DNA, 25 bp, Homo sapien
tttgttcatacgtttcctcataaac

SEQ ID NO: 4386608 - DNA, 25 bp, Homo sapien
gttcatacgtttcctcataaactgg

SEQ ID NO: 4386609 - DNA, 25 bp, Homo sapien
tagccgtgcagtgtcagcaggtgca

SEQ ID NO: 4386610 - DNA, 25 bp, Homo sapien
taagcatagccgtgcagtgtcagca

SEQ ID NO: 4386611 - DNA, 25 bp, Homo sapien
tgttacagcagagcatataagcata

SEQ ID NO: 4386612 - DNA, 25 bp, Homo sapien
agcatataagcatagccgtgcagtg

SEQ ID NO: 4386613 - DNA, 25 bp, Homo sapien
tgcctttccagcttggctatgtgag

SEQ ID NO: 4386614 - DNA, 25 bp, Homo sapien
atatgggacccaggacaatacctcc

SEQ ID NO: 4386615 - DNA, 25 bp, Homo sapien
cagatatgggacccaggacaatacc

SEQ ID NO: 4386616 - DNA, 25 bp, Homo sapien
cctttagtggcgacttctttagcct

SEQ ID NO: 4386617 - DNA, 25 bp, Homo sapien
cagacgggtagacaaccaactccat

SEQ ID NO: 4386618 - DNA, 25 bp, Homo sapien
gacgggtagacaaccaactccatga

SEQ ID NO: 4386619 - DNA, 25 bp, Homo sapien
gggcagacgggtagacaaccaactc

SEQ ID NO: 4386620 - DNA, 25 bp, Homo sapien
gcagacgggtagacaaccaactcca

SEQ ID NO: 4386621 - DNA, 25 bp, Homo sapien
gtcatgtgcagtcactaccagttga

SEQ ID NO: 4386622 - DNA, 25 bp, Homo sapien
tcttgttctccaccagctgagcctt

SEQ ID NO: 4386623 - DNA, 25 bp, Homo sapien
tccaccagctgagccttcttcttct

SEQ ID NO: 4386624 - DNA, 25 bp, Homo sapien
catgtgcagtcactaccagttgagc

SEQ ID NO: 4386625 - DNA, 25 bp, Homo sapien
tttgccagtagctttcgtctcagca

SEQ ID NO: 4386626 - DNA, 25 bp, Homo sapien
cagcatgggccaatagtctcttctt

SEQ ID NO: 4386627 - DNA, 25 bp, Homo sapien
tgatggtggtaactccttctagaag

SEQ ID NO: 4386628 - DNA, 25 bp, Homo sapien
aagtgatgatggtggtaactccttc

SEQ ID NO: 4386629 - DNA, 25 bp, Homo sapien
gtggatagctctttgacacggcaac

SEQ ID NO: 4386630 - DNA, 25 bp, Homo sapien
ttatagtggatagctctttgacacg

SEQ ID NO: 4386631 - DNA, 25 bp, Homo sapien
tagtggatagctctttgacacggca

SEQ ID NO: 4386632 - DNA, 25 bp, Homo sapien
tatagtggatagctctttgacacgg

SEQ ID NO: 4386633 - DNA, 25 bp, Homo sapien
tgagctgaatatcctgtccaatggc

SEQ ID NO: 4386634 - DNA, 25 bp, Homo sapien
gagctgaatatcctgtccaatggca

SEQ ID NO: 4386635 - DNA, 25 bp, Homo sapien
aatatcctgtccaatggcaaaattt

SEQ ID NO: 4386636 - DNA, 25 bp, Homo sapien
agctgaatatcctgtccaatggcaa

SEQ ID NO: 4386637 - DNA, 25 bp, Homo sapien
agttgccctttgaacgctaatacac

SEQ ID NO: 4386638 - DNA, 25 bp, Homo sapien
gacagttgccctttgaacgctaata

SEQ ID NO: 4386639 - DNA, 25 bp, Homo sapien
cttggacagttgccctttgaacgct

SEQ ID NO: 4386640 - DNA, 25 bp, Homo sapien
tggacagttgccctttgaacgctaa

SEQ ID NO: 4386641 - DNA, 25 bp, Homo sapien
ggtttgctcaatttgaacaactgcc

SEQ ID NO: 4386642 - DNA, 25 bp, Homo sapien
caaaggtgacctgctgagttatcaa

SEQ ID NO: 4386643 - DNA, 25 bp, Homo sapien
tggcaaatcaatcaaaggatctacc

SEQ ID NO: 4386644 - DNA, 25 bp, Homo sapien
ccgatcctgcctaagttcattgtaa

SEQ ID NO: 4386645 - DNA, 25 bp, Homo sapien
tcttgatgtttgtgacaggccacga

SEQ ID NO: 4386646 - DNA, 25 bp, Homo sapien
aaatccactgggcttgaattcatca

SEQ ID NO: 4386647 - DNA, 25 bp, Homo sapien
tgtgggagcatgtcaagtcagagat

SEQ ID NO: 4386648 - DNA, 25 bp, Homo sapien
gaggcctcagtaaattgaaaattgc

SEQ ID NO: 4386649 - DNA, 25 bp, Homo sapien
gctctgatccaattttcagcactaa

SEQ ID NO: 4386650 - DNA, 25 bp, Homo sapien
tgttgcagattaagattttctcccc

SEQ ID NO: 4386651 - DNA, 25 bp, Homo sapien
caagagaacggcattgtgttgcaga

SEQ ID NO: 4386652 - DNA, 25 bp, Homo sapien
aatgagagaatgttagctctgatcc

SEQ ID NO: 4386653 - DNA, 25 bp, Homo sapien
caatatctgcttcagaggacatgtt

SEQ ID NO: 4386654 - DNA, 25 bp, Homo sapien
ctattgtccaatcagtttcaatatc

SEQ ID NO: 4386655 - DNA, 25 bp, Homo sapien
ctgcttcagaggacatgttagccat

SEQ ID NO: 4386656 - DNA, 25 bp, Homo sapien
tatctgcttcagaggacatgttagc

SEQ ID NO: 4386657 - DNA, 25 bp, Homo sapien
aaataatgctatatatggttgagtc

SEQ ID NO: 4386658 - DNA, 25 bp, Homo sapien
tttccgctgaggtagcatgaaccag

SEQ ID NO: 4386659 - DNA, 25 bp, Homo sapien
gaggtagcatgaaccagcaaaataa

SEQ ID NO: 4386660 - DNA, 25 bp, Homo sapien
atggttgagtcatcagtatgatttc

SEQ ID NO: 4386661 - DNA, 25 bp, Homo sapien
attcagcatggacccattcagacaa

SEQ ID NO: 4386662 - DNA, 25 bp, Homo sapien
gaacatgctcttagtgaactgcaac

SEQ ID NO: 4386663 - DNA, 25 bp, Homo sapien
cttttaggcttgcagtggatgctgt

SEQ ID NO: 4386664 - DNA, 25 bp, Homo sapien
gacccattcagacaacaggttcctg

SEQ ID NO: 4386665 - DNA, 25 bp, Homo sapien
tccagagcagatgaacattatattt

SEQ ID NO: 4386666 - DNA, 25 bp, Homo sapien
caggttccttatctggtgagggccc

SEQ ID NO: 4386667 - DNA, 25 bp, Homo sapien
gtgagggcccaatctctcattccag

SEQ ID NO: 4386668 - DNA, 25 bp, Homo sapien
tggtgagggcccaatctctcattcc

SEQ ID NO: 4386669 - DNA, 25 bp, Homo sapien
ttaatcaccagttagctcaaacagg

SEQ ID NO: 4386670 - DNA, 25 bp, Homo sapien
tagaaacaatcaagctggcagcagt

SEQ ID NO: 4386671 - DNA, 25 bp, Homo sapien
tgtttgaaactggtcaattcagtag

SEQ ID NO: 4386672 - DNA, 25 bp, Homo sapien
ggttaatcacctcttgaccaatctg

SEQ ID NO: 4386673 - DNA, 25 bp, Homo sapien
caatttccacgaagtagtactcttt

SEQ ID NO: 4386674 - DNA, 25 bp, Homo sapien
cagcaatttccacgaagtagtactc

SEQ ID NO: 4386675 - DNA, 25 bp, Homo sapien
gcaatttccacgaagtagtactctt

SEQ ID NO: 4386676 - DNA, 25 bp, Homo sapien
ttcagcaatttccacgaagtagtac

SEQ ID NO: 4386677 - DNA, 25 bp, Homo sapien
taatggagtccagtcaacttcattg

SEQ ID NO: 4386678 - DNA, 25 bp, Homo sapien
aaaattataaaacttgctgtggagc

SEQ ID NO: 4386679 - DNA, 25 bp, Homo sapien
tcgccaaggactgtcaaaattataa

SEQ ID NO: 4386680 - DNA, 25 bp, Homo sapien
tctgtttggaaaagtaatggagtcc

SEQ ID NO: 4386681 - DNA, 25 bp, Homo sapien
ttttgggataacactctgctttcac

SEQ ID NO: 4386682 - DNA, 25 bp, Homo sapien
aaattttgatgctttggactcacat

SEQ ID NO: 4386683 - DNA, 25 bp, Homo sapien
caaattttgatgctttggactcaca

SEQ ID NO: 4386684 - DNA, 25 bp, Homo sapien
cacttttgggataacactctgcttt

SEQ ID NO: 4386685 - DNA, 25 bp, Homo sapien
ggcacacacagatctgcattgtaga

SEQ ID NO: 4386686 - DNA, 25 bp, Homo sapien
cacagctgtaggacatgggaaagtg

SEQ ID NO: 4386687 - DNA, 25 bp, Homo sapien
tcagaacactatggaaaccacagct

SEQ ID NO: 4386688 - DNA, 25 bp, Homo sapien
cacagatctgcattgtagaatgaaa

SEQ ID NO: 4386689 - DNA, 25 bp, Homo sapien
ctgaaactcattgtacgatgaagaa

SEQ ID NO: 4386690 - DNA, 25 bp, Homo sapien
tgaaactcattgtacgatgaagaaa

SEQ ID NO: 4386691 - DNA, 25 bp, Homo sapien
gaaactcattgtacgatgaagaaac

SEQ ID NO: 4386692 - DNA, 25 bp, Homo sapien
agaaacgaatagaaaatcatcttcc

SEQ ID NO: 4386693 - DNA, 25 bp, Homo sapien
gatcacagagattagggaagcagga

SEQ ID NO: 4386694 - DNA, 25 bp, Homo sapien
tgaatgccttgcatcctaactcctg

SEQ ID NO: 4386695 - DNA, 25 bp, Homo sapien
taactcctgtgtataccacttgaaa

SEQ ID NO: 4386696 - DNA, 25 bp, Homo sapien
acttccttgtatgaaactgaatgcc

SEQ ID NO: 4386697 - DNA, 25 bp, Homo sapien
tcttcaagcctcgttttcccttctg

SEQ ID NO: 4386698 - DNA, 25 bp, Homo sapien
tccaggtcttatcttcaagcctcgt

SEQ ID NO: 4386699 - DNA, 25 bp, Homo sapien
ttctccaggtcttatcttcaagcct

SEQ ID NO: 4386700 - DNA, 25 bp, Homo sapien
ggtcttatcttcaagcctcgttttc

SEQ ID NO: 4386701 - DNA, 25 bp, Homo sapien
gatttgttaacctgatagtctgaga

SEQ ID NO: 4386702 - DNA, 25 bp, Homo sapien
tgcttctgtgcatctaatcctgtgg

SEQ ID NO: 4386703 - DNA, 25 bp, Homo sapien
catccaatgaccactagatgagcct

SEQ ID NO: 4386704 - DNA, 25 bp, Homo sapien
ctagatgagcctaagacatccccag

SEQ ID NO: 4386705 - DNA, 25 bp, Homo sapien
caacatccgtatcccctgtccctgt

SEQ ID NO: 4386706 - DNA, 25 bp, Homo sapien
tctcatgctcccaacatccgtatcc

SEQ ID NO: 4386707 - DNA, 25 bp, Homo sapien
tcaaaacccactctcagatacctca

SEQ ID NO: 4386708 - DNA, 25 bp, Homo sapien
tgtccctgtaccctctgggtcaaaa

SEQ ID NO: 4386709 - DNA, 25 bp, Homo sapien
tcacctaggtcgttagcatgaatac

SEQ ID NO: 4386710 - DNA, 25 bp, Homo sapien
tgtttcacctaggtcgttagcatga

SEQ ID NO: 4386711 - DNA, 25 bp, Homo sapien
ttactgtttcacctaggtcgttagc

SEQ ID NO: 4386712 - DNA, 25 bp, Homo sapien
cctaggtcgttagcatgaataccca

SEQ ID NO: 4386713 - DNA, 25 bp, Homo sapien
aacattccatctccaaccagctgag

SEQ ID NO: 4386714 - DNA, 25 bp, Homo sapien
aaagccaacattccatctccaacca

SEQ ID NO: 4386715 - DNA, 25 bp, Homo sapien
ttccatctccaaccagctgagtcat

SEQ ID NO: 4386716 - DNA, 25 bp, Homo sapien
ggcaaaaagccaacattccatctcc

SEQ ID NO: 4386717 - DNA, 25 bp, Homo sapien
aataggtggaaacgacttgtctcca

SEQ ID NO: 4386718 - DNA, 25 bp, Homo sapien
cttgaaaccttaactgagccctgaa

SEQ ID NO: 4386719 - DNA, 25 bp, Homo sapien
acgacttgtctccaaagaccttcag

SEQ ID NO: 4386720 - DNA, 25 bp, Homo sapien
gatgtatgcagtaaaaataggtgga

SEQ ID NO: 4386721 - DNA, 25 bp, Homo sapien
cacacgaggagtgcttttaacaaga

SEQ ID NO: 4386722 - DNA, 25 bp, Homo sapien
acacgaggagtgcttttaacaagat

SEQ ID NO: 4386723 - DNA, 25 bp, Homo sapien
acacacgaggagtgcttttaacaag

SEQ ID NO: 4386724 - DNA, 25 bp, Homo sapien
gctgtgttggagaacgttgaagatc

SEQ ID NO: 4386725 - DNA, 25 bp, Homo sapien
gtgttggagaacgttgaagatctga

SEQ ID NO: 4386726 - DNA, 25 bp, Homo sapien
cagctgtgttggagaacgttgaaga

SEQ ID NO: 4386727 - DNA, 25 bp, Homo sapien
ttcagctgtgttggagaacgttgaa

SEQ ID NO: 4386728 - DNA, 25 bp, Homo sapien
gagttagccgttgaaaggcacaaag

SEQ ID NO: 4386729 - DNA, 25 bp, Homo sapien
tataaaagcctcttgaagaacagcc

SEQ ID NO: 4386730 - DNA, 25 bp, Homo sapien
cacaaagaagtacaatggatataaa

SEQ ID NO: 4386731 - DNA, 25 bp, Homo sapien
gaagagttagccgttgaaaggcaca

SEQ ID NO: 4386732 - DNA, 25 bp, Homo sapien
ttagcagacaggccgccagcgagcc

SEQ ID NO: 4386733 - DNA, 25 bp, Homo sapien
gagcctgcactgtcaccttccccac

SEQ ID NO: 4386734 - DNA, 25 bp, Homo sapien
cgccagcgagcctgcactgtcacct

SEQ ID NO: 4386735 - DNA, 25 bp, Homo sapien
tagcagacaggccgccagcgagcct

SEQ ID NO: 4386736 - DNA, 25 bp, Homo sapien
acagacggttccaaattcatttccg

SEQ ID NO: 4386737 - DNA, 25 bp, Homo sapien
aggtccgtggctcctgacctgagag

SEQ ID NO: 4386738 - DNA, 25 bp, Homo sapien
tgagagccgctctcttctgagaggg

SEQ ID NO: 4386739 - DNA, 25 bp, Homo sapien
tggacacactgtgcacccggaaaaa

SEQ ID NO: 4386740 - DNA, 25 bp, Homo sapien
ccacgagcccgtgaaggcgcgtggg

SEQ ID NO: 4386741 - DNA, 25 bp, Homo sapien
ctgcgcctcggagcagcccacgagc

SEQ ID NO: 4386742 - DNA, 25 bp, Homo sapien
agcagcccacgagcccgtgaaggcg

SEQ ID NO: 4386743 - DNA, 25 bp, Homo sapien
tcggagcagcccacgagcccgtgaa

SEQ ID NO: 4386744 - DNA, 25 bp, Homo sapien
gggcttcgactcactcggccagtac

SEQ ID NO: 4386745 - DNA, 25 bp, Homo sapien
aaagcccgggcttcgactcactcgg

SEQ ID NO: 4386746 - DNA, 25 bp, Homo sapien
ctggaaagcccgggcttcgactcac

SEQ ID NO: 4386747 - DNA, 25 bp, Homo sapien
actcggccagtaccgctccgaggag

SEQ ID NO: 4386748 - DNA, 25 bp, Homo sapien
ctaggttttccaggattggagacct

SEQ ID NO: 4386749 - DNA, 25 bp, Homo sapien
cccactgggctcccatcctaggttt

SEQ ID NO: 4386750 - DNA, 25 bp, Homo sapien
tgggctcccatcctaggttttccag

SEQ ID NO: 4386751 - DNA, 25 bp, Homo sapien
cactgggctcccatcctaggttttc

SEQ ID NO: 4386752 - DNA, 25 bp, Homo sapien
ctcacggcatcttttgttggcccca

SEQ ID NO: 4386753 - DNA, 25 bp, Homo sapien
ttggccccatacaagagagaacaaa

SEQ ID NO: 4386754 - DNA, 25 bp, Homo sapien
ttttgttggccccatacaagagaga

SEQ ID NO: 4386755 - DNA, 25 bp, Homo sapien
caaaatggttattcaggggaacgct

SEQ ID NO: 4386756 - DNA, 25 bp, Homo sapien
tcttctaacatactcgagaggtgta

SEQ ID NO: 4386757 - DNA, 25 bp, Homo sapien
agtaggaagggatgatttggaaatt

SEQ ID NO: 4386758 - DNA, 25 bp, Homo sapien
tctaacatactcgagaggtgtaggg

SEQ ID NO: 4386759 - DNA, 25 bp, Homo sapien
tgactcttctaacatactcgagagg

SEQ ID NO: 4386760 - DNA, 25 bp, Homo sapien
aaagctctgtactcgaccccgcgag

SEQ ID NO: 4386761 - DNA, 25 bp, Homo sapien
tgaagcggcactgagccgctgcgca

SEQ ID NO: 4386762 - DNA, 25 bp, Homo sapien
gggctggaacccgactcagatgtga

SEQ ID NO: 4386763 - DNA, 25 bp, Homo sapien
ttatccacgaagactaaagctctgt

SEQ ID NO: 4386764 - DNA, 25 bp, Homo sapien
ctgttggacacagtaggagctgcgc

SEQ ID NO: 4386765 - DNA, 25 bp, Homo sapien
ccagtcccagaaatcgctggaatcc

SEQ ID NO: 4386766 - DNA, 25 bp, Homo sapien
aggagctgcgcagcgccagtcccag

SEQ ID NO: 4386767 - DNA, 25 bp, Homo sapien
tcccagaaatcgctggaatcctgct

SEQ ID NO: 4386768 - DNA, 25 bp, Homo sapien
gacgccagaaagagagtatatgcct

SEQ ID NO: 4386769 - DNA, 25 bp, Homo sapien
tgtcgaacgtgcaatagcagagtcc

SEQ ID NO: 4386770 - DNA, 25 bp, Homo sapien
gcaaaatgttggaggcgacgccaga

SEQ ID NO: 4386771 - DNA, 25 bp, Homo sapien
ggtaagaaacggtgcgctgacagcc

SEQ ID NO: 4386772 - DNA, 25 bp, Homo sapien
ggccgcgtttctccgcggcggcaaa

SEQ ID NO: 4386773 - DNA, 25 bp, Homo sapien
caacgggccgcgtttctccgcggcg

SEQ ID NO: 4386774 - DNA, 25 bp, Homo sapien
cggctggcaacgggccgcgtttctc

SEQ ID NO: 4386775 - DNA, 25 bp, Homo sapien
aaaaccgcagcggctggcaacgggc

SEQ ID NO: 4386776 - DNA, 25 bp, Homo sapien
ttagcttaggcccactgagaccctg

SEQ ID NO: 4386777 - DNA, 25 bp, Homo sapien
gtaaccaatcttgctggattctgag

SEQ ID NO: 4386778 - DNA, 25 bp, Homo sapien
ttctgaggactatccaggcggatgg

SEQ ID NO: 4386779 - DNA, 25 bp, Homo sapien
gggcgccctgctttgtaagtaacca

SEQ ID NO: 4386780 - DNA, 25 bp, Homo sapien
ggactgaaacagcaattgttatccc

SEQ ID NO: 4386781 - DNA, 25 bp, Homo sapien
tgaaattgggtctggactgaaacag

SEQ ID NO: 4386782 - DNA, 25 bp, Homo sapien
ttatttggtgaaattgggtctggac

SEQ ID NO: 4386783 - DNA, 25 bp, Homo sapien
cagcaattgttatcccttgttcatt

SEQ ID NO: 4386784 - DNA, 25 bp, Homo sapien
ccagccgcgctgaaaagccggtggc

SEQ ID NO: 4386785 - DNA, 25 bp, Homo sapien
tgaaaccagccgcgctgaaaagccg

SEQ ID NO: 4386786 - DNA, 25 bp, Homo sapien
ccctgaaaccagccgcgctgaaaag

SEQ ID NO: 4386787 - DNA, 25 bp, Homo sapien
aaaccagccgcgctgaaaagccggt

SEQ ID NO: 4386788 - DNA, 25 bp, Homo sapien
cctgggcgccgagtggaaacttttg

SEQ ID NO: 4386789 - DNA, 25 bp, Homo sapien
agaaggataagtacacgctgcccgg

SEQ ID NO: 4386790 - DNA, 25 bp, Homo sapien
gttcatcgacgaggctaagcggctg

SEQ ID NO: 4386791 - DNA, 25 bp, Homo sapien
gacagttacgcgcacatgaacggct

SEQ ID NO: 4386792 - DNA, 25 bp, Homo sapien
gcaaaaatggccatgcaggttgaca

SEQ ID NO: 4386793 - DNA, 25 bp, Homo sapien
gccgagaatccatgtatatatttga

SEQ ID NO: 4386794 - DNA, 25 bp, Homo sapien
taatagcttttgttcgatcccaact

SEQ ID NO: 4386795 - DNA, 25 bp, Homo sapien
tatttgaatcagtctgccgagaatc

SEQ ID NO: 4386796 - DNA, 25 bp, Homo sapien
agcctgtagccccaaatcggataat

SEQ ID NO: 4386797 - DNA, 25 bp, Homo sapien
tgtccggtctaatcacatttggaga

SEQ ID NO: 4386798 - DNA, 25 bp, Homo sapien
catgcaaagtgttcatctgctgggt

SEQ ID NO: 4386799 - DNA, 25 bp, Homo sapien
tcttaaattggcagcgcgggtccaa

SEQ ID NO: 4386800 - DNA, 25 bp, Homo sapien
aactcgggacttcaacgctcagacc

SEQ ID NO: 4386801 - DNA, 25 bp, Homo sapien
caggcagcatttaggagaggacctc

SEQ ID NO: 4386802 - DNA, 25 bp, Homo sapien
ggttaataatatcgcaactcgggac

SEQ ID NO: 4386803 - DNA, 25 bp, Homo sapien
tactgatacctctcgcggagtgcgg

SEQ ID NO: 4386804 - DNA, 25 bp, Homo sapien
tataccaaacggggcgtcagggcca

SEQ ID NO: 4386805 - DNA, 25 bp, Homo sapien
tggtggaagcgtttgtctgatgttt

SEQ ID NO: 4386806 - DNA, 25 bp, Homo sapien
acgtgctgtgccttcgaaacgccgc

SEQ ID NO: 4386807 - DNA, 25 bp, Homo sapien
aacggggcgtcagggccacgtgctg

SEQ ID NO: 4386808 - DNA, 25 bp, Homo sapien
agatctggccgcagcgctgagtgaa

SEQ ID NO: 4386809 - DNA, 25 bp, Homo sapien
tgtttgatctgggactgcgtagtca

SEQ ID NO: 4386810 - DNA, 25 bp, Homo sapien
agcgaattatctggagcgtgtttga

SEQ ID NO: 4386811 - DNA, 25 bp, Homo sapien
tgagtgaagcgaattatctggagcg

SEQ ID NO: 4386812 - DNA, 25 bp, Homo sapien
catttaactggccaggtccgagtga

SEQ ID NO: 4386813 - DNA, 25 bp, Homo sapien
cagagtctgcctctaaacgcgtggg

SEQ ID NO: 4386814 - DNA, 25 bp, Homo sapien
tcaggcccctcgctgatttgaacag

SEQ ID NO: 4386815 - DNA, 25 bp, Homo sapien
tcttggtccgtcatatgtgggtgca

SEQ ID NO: 4386816 - DNA, 25 bp, Homo sapien
ctaagataagccaacccaacaggtt

SEQ ID NO: 4386817 - DNA, 25 bp, Homo sapien
aagaattggaaatatgaacctccca

SEQ ID NO: 4386818 - DNA, 25 bp, Homo sapien
aattggaaatatgaacctcccagga

SEQ ID NO: 4386819 - DNA, 25 bp, Homo sapien
taagataagccaacccaacaggttg

SEQ ID NO: 4386820 - DNA, 25 bp, Homo sapien
cttaaaatcaacaggatttgagcag

SEQ ID NO: 4386821 - DNA, 25 bp, Homo sapien
gatttgagcagcaatacccctgccc

SEQ ID NO: 4386822 - DNA, 25 bp, Homo sapien
taaaatcaacaggatttgagcagca

SEQ ID NO: 4386823 - DNA, 25 bp, Homo sapien
aacaggatttgagcagcaatacccc

SEQ ID NO: 4386824 - DNA, 25 bp, Homo sapien
cactttcggattccatagacaatct

SEQ ID NO: 4386825 - DNA, 25 bp, Homo sapien
cggattccatagacaatctccaaat

SEQ ID NO: 4386826 - DNA, 25 bp, Homo sapien
caacactttcggattccatagacaa

SEQ ID NO: 4386827 - DNA, 25 bp, Homo sapien
tttcggattccatagacaatctcca

SEQ ID NO: 4386828 - DNA, 25 bp, Homo sapien
gctcttctcgcatctgcttatttct

SEQ ID NO: 4386829 - DNA, 25 bp, Homo sapien
caggtggcctccaaaatcgattttg

SEQ ID NO: 4386830 - DNA, 25 bp, Homo sapien
tttagagtacccagtcaccgtggta

SEQ ID NO: 4386831 - DNA, 25 bp, Homo sapien
aaatttttcgagtcagttcatggcc

SEQ ID NO: 4386832 - DNA, 25 bp, Homo sapien
gaccctgtctcacggaggcatagca

SEQ ID NO: 4386833 - DNA, 25 bp, Homo sapien
aggtgtgaacaagcagccgtaaaaa

SEQ ID NO: 4386834 - DNA, 25 bp, Homo sapien
gagaaattggcatgtgtacaagttt

SEQ ID NO: 4386835 - DNA, 25 bp, Homo sapien
caagcagccgtaaaaatacggagag

SEQ ID NO: 4386836 - DNA, 25 bp, Homo sapien
agaatgagctatggtaaaggtgtga

SEQ ID NO: 4386837 - DNA, 25 bp, Homo sapien
ctttgtaatggaggggcgaaacact

SEQ ID NO: 4386838 - DNA, 25 bp, Homo sapien
ctgctgtaagtaagcctcagcatgg

SEQ ID NO: 4386839 - DNA, 25 bp, Homo sapien
aatggaggggcgaaacactgagatc

SEQ ID NO: 4386840 - DNA, 25 bp, Homo sapien
taagcctcagcatgggcaagattgg

SEQ ID NO: 4386841 - DNA, 25 bp, Homo sapien
ttattcttcttaggatggctgccag

SEQ ID NO: 4386842 - DNA, 25 bp, Homo sapien
cactcatgagaggattgaagggcaa

SEQ ID NO: 4386843 - DNA, 25 bp, Homo sapien
tccccaaggagccaacagagtttct

SEQ ID NO: 4386844 - DNA, 25 bp, Homo sapien
catgggtagattggcctcaaggaga

SEQ ID NO: 4386845 - DNA, 25 bp, Homo sapien
tttgtggagatagttttggaaacac

SEQ ID NO: 4386846 - DNA, 25 bp, Homo sapien
ttctgaaagtttcctaacgctaaga

SEQ ID NO: 4386847 - DNA, 25 bp, Homo sapien
tctgaaagtttcctaacgctaagag

SEQ ID NO: 4386848 - DNA, 25 bp, Homo sapien
attcttgtctagtatttgtggagat

SEQ ID NO: 4386849 - DNA, 25 bp, Homo sapien
tcatcttagaacattctttgggcct

SEQ ID NO: 4386850 - DNA, 25 bp, Homo sapien
acattctttgggcctccaactttct

SEQ ID NO: 4386851 - DNA, 25 bp, Homo sapien
tagaacattctttgggcctccaact

SEQ ID NO: 4386852 - DNA, 25 bp, Homo sapien
cttttccttcttgatcacctatgct

SEQ ID NO: 4386853 - DNA, 25 bp, Homo sapien
tttccactcctcttcggtagcaggc

SEQ ID NO: 4386854 - DNA, 25 bp, Homo sapien
gacatttattcccacacctgtttgg

SEQ ID NO: 4386855 - DNA, 25 bp, Homo sapien
tgttgatcggatgtaaagtttctga

SEQ ID NO: 4386856 - DNA, 25 bp, Homo sapien
tcttcggtagcaggcctaagaggca

SEQ ID NO: 4386857 - DNA, 25 bp, Homo sapien
gaaggtcgtggcaatgctgtctcag

SEQ ID NO: 4386858 - DNA, 25 bp, Homo sapien
tgacgtccacgtgcatttgtctgtg

SEQ ID NO: 4386859 - DNA, 25 bp, Homo sapien
gagaagaaattctagcttgacgtcc

SEQ ID NO: 4386860 - DNA, 25 bp, Homo sapien
agaatgtccgtttctagagtacaga

SEQ ID NO: 4386861 - DNA, 25 bp, Homo sapien
ttgctgttttttggcacctgaaaca

SEQ ID NO: 4386862 - DNA, 25 bp, Homo sapien
gctgttttttggcacctgaaacact

SEQ ID NO: 4386863 - DNA, 25 bp, Homo sapien
attgctgttttttggcacctgaaac

SEQ ID NO: 4386864 - DNA, 25 bp, Homo sapien
ctgttttttggcacctgaaacactt

SEQ ID NO: 4386865 - DNA, 25 bp, Homo sapien
gcctcagccaactgccacaactcct

SEQ ID NO: 4386866 - DNA, 25 bp, Homo sapien
agggattgcctgctcttcggacatt

SEQ ID NO: 4386867 - DNA, 25 bp, Homo sapien
actcctgagtgaaagggattgcctg

SEQ ID NO: 4386868 - DNA, 25 bp, Homo sapien
gccaactgccacaactcctgagtga

SEQ ID NO: 4386869 - DNA, 25 bp, Homo sapien
gccatgggaccccaaactattctga

SEQ ID NO: 4386870 - DNA, 25 bp, Homo sapien
gtacagttgtaaaggatcagctctg

SEQ ID NO: 4386871 - DNA, 25 bp, Homo sapien
gccagtacagttgtaaaggatcagc

SEQ ID NO: 4386872 - DNA, 25 bp, Homo sapien
tcttgccagtacagttgtaaaggat

SEQ ID NO: 4386873 - DNA, 25 bp, Homo sapien
aagttctgtatggagccatggcagg

SEQ ID NO: 4386874 - DNA, 25 bp, Homo sapien
ttcaatattcgcatcttgctgcacc

SEQ ID NO: 4386875 - DNA, 25 bp, Homo sapien
caaggtataaataggtttatctcgg

SEQ ID NO: 4386876 - DNA, 25 bp, Homo sapien
tatctcggcaataagtcagaggcag

SEQ ID NO: 4386877 - DNA, 25 bp, Homo sapien
gagtaaagactgtatcctcttcctg

SEQ ID NO: 4386878 - DNA, 25 bp, Homo sapien
cctcttcctgaaatcctcctttaag

SEQ ID NO: 4386879 - DNA, 25 bp, Homo sapien
ctgtgccaaagaaagagtaaagact

SEQ ID NO: 4386880 - DNA, 25 bp, Homo sapien
ctcttcctgaaatcctcctttaagg

SEQ ID NO: 4386881 - DNA, 25 bp, Homo sapien
atgcaagtgctaaccaggcccgaca

SEQ ID NO: 4386882 - DNA, 25 bp, Homo sapien
gcaagtgctaaccaggcccgacact

SEQ ID NO: 4386883 - DNA, 25 bp, Homo sapien
cagacgagatcgggcgcgttcaggg

SEQ ID NO: 4386884 - DNA, 25 bp, Homo sapien
gcgttcagggtggtatggccgtaga

SEQ ID NO: 4386885 - DNA, 25 bp, Homo sapien
tccttccatggggttgtgactaaga

SEQ ID NO: 4386886 - DNA, 25 bp, Homo sapien
caatttatactcacatcatctactg

SEQ ID NO: 4386887 - DNA, 25 bp, Homo sapien
actcacatcatctactgaaggaaac

SEQ ID NO: 4386888 - DNA, 25 bp, Homo sapien
cagagtgacatttgcgcctaatcct

SEQ ID NO: 4386889 - DNA, 25 bp, Homo sapien
ggtgtccttactctgcgtttggcca

SEQ ID NO: 4386890 - DNA, 25 bp, Homo sapien
cagagtggtgtccttactctgcgtt

SEQ ID NO: 4386891 - DNA, 25 bp, Homo sapien
tactctgcgtttggccacttcaagt

SEQ ID NO: 4386892 - DNA, 25 bp, Homo sapien
tgcgtttggccacttcaagtctgaa

SEQ ID NO: 4386893 - DNA, 25 bp, Homo sapien
gcctcactgaagcatctttaccgtg

SEQ ID NO: 4386894 - DNA, 25 bp, Homo sapien
cggcctcactgaagcatctttaccg

SEQ ID NO: 4386895 - DNA, 25 bp, Homo sapien
tcactgaagcatctttaccgtggct

SEQ ID NO: 4386896 - DNA, 25 bp, Homo sapien
cctcactgaagcatctttaccgtgg

SEQ ID NO: 4386897 - DNA, 25 bp, Homo sapien
tcaaacacgaagcaaaccaccacca

SEQ ID NO: 4386898 - DNA, 25 bp, Homo sapien
aaacacgaagcaaaccaccaccagg

SEQ ID NO: 4386899 - DNA, 25 bp, Homo sapien
ggtcaaacacgaagcaaaccaccac

SEQ ID NO: 4386900 - DNA, 25 bp, Homo sapien
acacgaagcaaaccaccaccaggtg

SEQ ID NO: 4386901 - DNA, 25 bp, Homo sapien
gtttcaccaatggtttgccttccat

SEQ ID NO: 4386902 - DNA, 25 bp, Homo sapien
tgtttcaccaatggtttgccttcca

SEQ ID NO: 4386903 - DNA, 25 bp, Homo sapien
ctgtttcaccaatggtttgccttcc

SEQ ID NO: 4386904 - DNA, 25 bp, Homo sapien
actttctctagagggggtctcacgg

SEQ ID NO: 4386905 - DNA, 25 bp, Homo sapien
tgatcaggtatgatgacatggccta

SEQ ID NO: 4386906 - DNA, 25 bp, Homo sapien
ggttcaggtatgaagtgatcaggta

SEQ ID NO: 4386907 - DNA, 25 bp, Homo sapien
ggtctcacgggtagtagacaccgga

SEQ ID NO: 4386908 - DNA, 25 bp, Homo sapien
tctccaagagccctttttcagcctc

SEQ ID NO: 4386909 - DNA, 25 bp, Homo sapien
tccaagagccctttttcagcctccc

SEQ ID NO: 4386910 - DNA, 25 bp, Homo sapien
ccaagagccctttttcagcctccct

SEQ ID NO: 4386911 - DNA, 25 bp, Homo sapien
agcctccctgttgggtctagtttct

SEQ ID NO: 4386912 - DNA, 25 bp, Homo sapien
tcagtccatcggtctaacatggatg

SEQ ID NO: 4386913 - DNA, 25 bp, Homo sapien
ccatcggtctaacatggatggagta

SEQ ID NO: 4386914 - DNA, 25 bp, Homo sapien
catggatggagtaactgtatttctt

SEQ ID NO: 4386915 - DNA, 25 bp, Homo sapien
tctaacatggatggagtaactgtat

SEQ ID NO: 4386916 - DNA, 25 bp, Homo sapien
ataagtccaatgtccaaattccaag

SEQ ID NO: 4386917 - DNA, 25 bp, Homo sapien
cttgagggcctatgtaggtattttc

SEQ ID NO: 4386918 - DNA, 25 bp, Homo sapien
ttgagggcctatgtaggtattttct

SEQ ID NO: 4386919 - DNA, 25 bp, Homo sapien
aagtccaatgtccaaattccaagca

SEQ ID NO: 4386920 - DNA, 25 bp, Homo sapien
aaatgggagaattggacttaagcat

SEQ ID NO: 4386921 - DNA, 25 bp, Homo sapien
tgctaacagggaaatgggagaattg

SEQ ID NO: 4386922 - DNA, 25 bp, Homo sapien
cagggaaatgggagaattggactta

SEQ ID NO: 4386923 - DNA, 25 bp, Homo sapien
ctgctaacagggaaatgggagaatt

SEQ ID NO: 4386924 - DNA, 25 bp, Homo sapien
tgccattatcttttgcaaatgcttg

SEQ ID NO: 4386925 - DNA, 25 bp, Homo sapien
tcttttgcaaatgcttggctgacag

SEQ ID NO: 4386926 - DNA, 25 bp, Homo sapien
tatcttttgcaaatgcttggctgac

SEQ ID NO: 4386927 - DNA, 25 bp, Homo sapien
tcttctgccattatcttttgcaaat

SEQ ID NO: 4386928 - DNA, 25 bp, Homo sapien
tcttcccactattgagatgtgtgat

SEQ ID NO: 4386929 - DNA, 25 bp, Homo sapien
catgctggaactggcactgcagacg

SEQ ID NO: 4386930 - DNA, 25 bp, Homo sapien
ccctcacattctttagctgtctgga

SEQ ID NO: 4386931 - DNA, 25 bp, Homo sapien
gatgggcttgactttgggtcttggc

SEQ ID NO: 4386932 - DNA, 25 bp, Homo sapien
cagggcactcgaggattcgcttcat

SEQ ID NO: 4386933 - DNA, 25 bp, Homo sapien
atttgatagttttcagagaagcaca

SEQ ID NO: 4386934 - DNA, 25 bp, Homo sapien
cctggctgatcattgacttccagaa

SEQ ID NO: 4386935 - DNA, 25 bp, Homo sapien
gacttccagaagtttgttaatttga

SEQ ID NO: 4386936 - DNA, 25 bp, Homo sapien
aacttcagctttactggtgaattta

SEQ ID NO: 4386937 - DNA, 25 bp, Homo sapien
tgttgggaataaatgacggtgccag

SEQ ID NO: 4386938 - DNA, 25 bp, Homo sapien
acttcagctttactggtgaatttac

SEQ ID NO: 4386939 - DNA, 25 bp, Homo sapien
gacttattcacatcactggatcctc

SEQ ID NO: 4386940 - DNA, 25 bp, Homo sapien
taaagggtaccctcaaggcagagta

SEQ ID NO: 4386941 - DNA, 25 bp, Homo sapien
gtaattcatactgcgtgctggctga

SEQ ID NO: 4386942 - DNA, 25 bp, Homo sapien
gctaaggacggccaaattgctacat

SEQ ID NO: 4386943 - DNA, 25 bp, Homo sapien
ggagagacagctgttgtgaacatac

SEQ ID NO: 4386944 - DNA, 25 bp, Homo sapien
cttcccggagagacagctgttgtga

SEQ ID NO: 4386945 - DNA, 25 bp, Homo sapien
ggcttcccggagagacagctgttgt

SEQ ID NO: 4386946 - DNA, 25 bp, Homo sapien
tcccggagagacagctgttgtgaac

SEQ ID NO: 4386947 - DNA, 25 bp, Homo sapien
tattcagcaataacatatgggagac

SEQ ID NO: 4386948 - DNA, 25 bp, Homo sapien
gagactggttattgttacaactttc

SEQ ID NO: 4386949 - DNA, 25 bp, Homo sapien
cagctcatcactaggggaaacaaca

SEQ ID NO: 4386950 - DNA, 25 bp, Homo sapien
catatgggagactggttattgttac

SEQ ID NO: 4386951 - DNA, 25 bp, Homo sapien
tgagattcagaccttgacagttgta

SEQ ID NO: 4386952 - DNA, 25 bp, Homo sapien
caccatgggagagaatttgaacgct

SEQ ID NO: 4386953 - DNA, 25 bp, Homo sapien
tggggcaacgctgatgaaaggcaaa

SEQ ID NO: 4386954 - DNA, 25 bp, Homo sapien
acagttgtaaccgatagactgggct

SEQ ID NO: 4386955 - DNA, 25 bp, Homo sapien
tggccgcccctgaggagaatcatca

SEQ ID NO: 4386956 - DNA, 25 bp, Homo sapien
tcagatttgaagtaagagctgtatc

SEQ ID NO: 4386957 - DNA, 25 bp, Homo sapien
catcaactgggctttacggaagaga

SEQ ID NO: 4386958 - DNA, 25 bp, Homo sapien
gagagaaatccaaacgaccatcagc

SEQ ID NO: 4386959 - DNA, 25 bp, Homo sapien
tctagaataggatcaagtgcacgca

SEQ ID NO: 4386960 - DNA, 25 bp, Homo sapien
agggtgaaactccatggtgacagct

SEQ ID NO: 4386961 - DNA, 25 bp, Homo sapien
tgatgatcctttgtgcccacttaca

SEQ ID NO: 4386962 - DNA, 25 bp, Homo sapien
gataaatgaggtggagtccttgtcc

SEQ ID NO: 4386963 - DNA, 25 bp, Homo sapien
agctggagaggaatggtcctcttct

SEQ ID NO: 4386964 - DNA, 25 bp, Homo sapien
agagctggagaggaatggtcctctt

SEQ ID NO: 4386965 - DNA, 25 bp, Homo sapien
ctggagaggaatggtcctcttctca

SEQ ID NO: 4386966 - DNA, 25 bp, Homo sapien
tggagaggaatggtcctcttctcag

SEQ ID NO: 4386967 - DNA, 25 bp, Homo sapien
cactcaaagactaggagactgagca

SEQ ID NO: 4386968 - DNA, 25 bp, Homo sapien
cagtacagaaggtcccagatgggcc

SEQ ID NO: 4386969 - DNA, 25 bp, Homo sapien
tcccatggtggtacagaagcaagtc

SEQ ID NO: 4386970 - DNA, 25 bp, Homo sapien
gcatgaagagccagtacagaaggtc

SEQ ID NO: 4386971 - DNA, 25 bp, Homo sapien
cgacgctctcgacaggggagtgctc

SEQ ID NO: 4386972 - DNA, 25 bp, Homo sapien
gacgctctcgacaggggagtgctcc

SEQ ID NO: 4386973 - DNA, 25 bp, Homo sapien
acgctctcgacaggggagtgctcca

SEQ ID NO: 4386974 - DNA, 25 bp, Homo sapien
ccaggacatctgaaccctgttctgg

SEQ ID NO: 4386975 - DNA, 25 bp, Homo sapien
gttcactgctagaaatggtggttct

SEQ ID NO: 4386976 - DNA, 25 bp, Homo sapien
ggacctcaacagctttccaaaggct

SEQ ID NO: 4386977 - DNA, 25 bp, Homo sapien
tctggtattcccaaccactggttag

SEQ ID NO: 4386978 - DNA, 25 bp, Homo sapien
cagcgtttctgaagcctgccttggt

SEQ ID NO: 4386979 - DNA, 25 bp, Homo sapien
ggtgaaatcacagcgtggctgcaga

SEQ ID NO: 4386980 - DNA, 25 bp, Homo sapien
cagtcagcgtttctgaagcctgcct

SEQ ID NO: 4386981 - DNA, 25 bp, Homo sapien
ctgccttggtgaaatcacagcgtgg

SEQ ID NO: 4386982 - DNA, 25 bp, Homo sapien
tccaaagcctctggaggcgtcttag

SEQ ID NO: 4386983 - DNA, 25 bp, Homo sapien
cacaatgggatttgggggccaatct

SEQ ID NO: 4386984 - DNA, 25 bp, Homo sapien
gccaatctattgtgtctggatcccc

SEQ ID NO: 4386985 - DNA, 25 bp, Homo sapien
gatagttgttttgtcacggttgaga

SEQ ID NO: 4386986 - DNA, 25 bp, Homo sapien
tgttgactgatacatgcaattacct

SEQ ID NO: 4386987 - DNA, 25 bp, Homo sapien
tacctcctctaatattgctctcaac

SEQ ID NO: 4386988 - DNA, 25 bp, Homo sapien
tcttgtgcccgttttactgtaattc

SEQ ID NO: 4386989 - DNA, 25 bp, Homo sapien
ctcggcggccatgggacaaaagctg

SEQ ID NO: 4386990 - DNA, 25 bp, Homo sapien
gccagtgattaccccctgcttttcc

SEQ ID NO: 4386991 - DNA, 25 bp, Homo sapien
agtgattaccccctgcttttcccat

SEQ ID NO: 4386992 - DNA, 25 bp, Homo sapien
aagccagtgattaccccctgctttt

SEQ ID NO: 4386993 - DNA, 25 bp, Homo sapien
aaagccagtgattaccccctgcttt

SEQ ID NO: 4386994 - DNA, 25 bp, Homo sapien
tccaatgaggaacaagctccattct

SEQ ID NO: 4386995 - DNA, 25 bp, Homo sapien
ggcaactgcctgagctcatggtctg

SEQ ID NO: 4386996 - DNA, 25 bp, Homo sapien
tttctttagcgaaggcaactgcctg

SEQ ID NO: 4386997 - DNA, 25 bp, Homo sapien
ctggcctttctttagcgaaggcaac

SEQ ID NO: 4386998 - DNA, 25 bp, Homo sapien
tctgagtgccgggaatcgtactgtc

SEQ ID NO: 4386999 - DNA, 25 bp, Homo sapien
gactgtgtctatgccttttttaagg

SEQ ID NO: 4387000 - DNA, 25 bp, Homo sapien
actgtcatggtgcttctcatggctt

SEQ ID NO: 4387001 - DNA, 25 bp, Homo sapien
tgttatagggctttgggttcacaag

SEQ ID NO: 4387002 - DNA, 25 bp, Homo sapien
cttaaccaagtggacacatgagagg

SEQ ID NO: 4387003 - DNA, 25 bp, Homo sapien
ttaaccaagtggacacatgagaggc

SEQ ID NO: 4387004 - DNA, 25 bp, Homo sapien
tcgtaacaggcccagtatatccttc

SEQ ID NO: 4387005 - DNA, 25 bp, Homo sapien
tatttctgagcctctcgtaacaggc

SEQ ID NO: 4387006 - DNA, 25 bp, Homo sapien
tatatccttccttgctcatgtaaag

SEQ ID NO: 4387007 - DNA, 25 bp, Homo sapien
tatcatatgactccaggcagtcctc

SEQ ID NO: 4387008 - DNA, 25 bp, Homo sapien
tgtggatatatagccatagcaagtc

SEQ ID NO: 4387009 - DNA, 25 bp, Homo sapien
tgatatgtggatatatagccatagc

SEQ ID NO: 4387010 - DNA, 25 bp, Homo sapien
tggtttgatatgtggatatatagcc

SEQ ID NO: 4387011 - DNA, 25 bp, Homo sapien
tatgtggatatatagccatagcaag

SEQ ID NO: 4387012 - DNA, 25 bp, Homo sapien
tgggcatggctgattgcacagagca

SEQ ID NO: 4387013 - DNA, 25 bp, Homo sapien
cagagcagaacaggggttagtttga

SEQ ID NO: 4387014 - DNA, 25 bp, Homo sapien
gcaatcagtgtagatcagcactaat

SEQ ID NO: 4387015 - DNA, 25 bp, Homo sapien
aacaggggttagtttgaattgcagg

SEQ ID NO: 4387016 - DNA, 25 bp, Homo sapien
ttgtctattgatgatcctccaagtg

SEQ ID NO: 4387017 - DNA, 25 bp, Homo sapien
tcctctggagctggttgacccttgt

SEQ ID NO: 4387018 - DNA, 25 bp, Homo sapien
gaataggttctctgagctgtagaag

SEQ ID NO: 4387019 - DNA, 25 bp, Homo sapien
tagctgtggtcatacagaagggcaa

SEQ ID NO: 4387020 - DNA, 25 bp, Homo sapien
gattggagattagacaagctatgtc

SEQ ID NO: 4387021 - DNA, 25 bp, Homo sapien
ggtccgtggtcaactgtctaatgat

SEQ ID NO: 4387022 - DNA, 25 bp, Homo sapien
cctgccaacgattggagattagaca

SEQ ID NO: 4387023 - DNA, 25 bp, Homo sapien
cctagagcacgtgagctatggtccg

SEQ ID NO: 4387024 - DNA, 25 bp, Homo sapien
ctgtaaatgggaagtatggattcat

SEQ ID NO: 4387025 - DNA, 25 bp, Homo sapien
tcttcaatattcgtaagaatgagat

SEQ ID NO: 4387026 - DNA, 25 bp, Homo sapien
caaatgaagtccagaccaagtacaa

SEQ ID NO: 4387027 - DNA, 25 bp, Homo sapien
agaatgagattggataaaggacaca

SEQ ID NO: 4387028 - DNA, 25 bp, Homo sapien
tctcctggctgctcaactaatgcag

SEQ ID NO: 4387029 - DNA, 25 bp, Homo sapien
ataacgctgagtggagcaacagatc

SEQ ID NO: 4387030 - DNA, 25 bp, Homo sapien
cataacgctgagtggagcaacagat

SEQ ID NO: 4387031 - DNA, 25 bp, Homo sapien
ccataacgctgagtggagcaacaga

SEQ ID NO: 4387032 - DNA, 25 bp, Homo sapien
tccataacgctgagtggagcaacag

SEQ ID NO: 4387033 - DNA, 25 bp, Homo sapien
caatgacagctgatacgccatgcat

SEQ ID NO: 4387034 - DNA, 25 bp, Homo sapien
tgtgtaacaacccattatctgtgca

SEQ ID NO: 4387035 - DNA, 25 bp, Homo sapien
cgccatgcatcttggaaacaaattt

SEQ ID NO: 4387036 - DNA, 25 bp, Homo sapien
tttgtgtaacaacccattatctgtg

SEQ ID NO: 4387037 - DNA, 25 bp, Homo sapien
gcagctcaactgtgtctgtaaggac

SEQ ID NO: 4387038 - DNA, 25 bp, Homo sapien
tgtaaggacagctgccaatgagtgc

SEQ ID NO: 4387039 - DNA, 25 bp, Homo sapien
gagtgcatcctgtgcggcttaaggc

SEQ ID NO: 4387040 - DNA, 25 bp, Homo sapien
tatcagccagtattggcagctcaac

SEQ ID NO: 4387041 - DNA, 25 bp, Homo sapien
ctttcttccttgaatgatgtgccca

SEQ ID NO: 4387042 - DNA, 25 bp, Homo sapien
tcccagatagggtaaataacggtca

SEQ ID NO: 4387043 - DNA, 25 bp, Homo sapien
gtttgccctgcaagtgccagagcat

SEQ ID NO: 4387044 - DNA, 25 bp, Homo sapien
tgtctggttcctcttttgctggccc

SEQ ID NO: 4387045 - DNA, 25 bp, Homo sapien
aaagttttttctctgttgtcctcat

SEQ ID NO: 4387046 - DNA, 25 bp, Homo sapien
ctatcagggaaaagttttttctctg

SEQ ID NO: 4387047 - DNA, 25 bp, Homo sapien
ctggctgatcctgttatagagaaca

SEQ ID NO: 4387048 - DNA, 25 bp, Homo sapien
tctgggttggcccagcgactggaca

SEQ ID NO: 4387049 - DNA, 25 bp, Homo sapien
taatgactccaactgggagagccag

SEQ ID NO: 4387050 - DNA, 25 bp, Homo sapien
agagccagggcaaggtcacaagtga

SEQ ID NO: 4387051 - DNA, 25 bp, Homo sapien
ggttactcaatctgttccccttcat

SEQ ID NO: 4387052 - DNA, 25 bp, Homo sapien
tctttttggttactcaatctgttcc

SEQ ID NO: 4387053 - DNA, 25 bp, Homo sapien
ttgatgtagaaccaaagtctgagaa

SEQ ID NO: 4387054 - DNA, 25 bp, Homo sapien
ccagtctctatttgtgcactctttg

SEQ ID NO: 4387055 - DNA, 25 bp, Homo sapien
cctggcgtctttgatgcatctctct

SEQ ID NO: 4387056 - DNA, 25 bp, Homo sapien
aatgctcaagattgtcactgtcatc

SEQ ID NO: 4387057 - DNA, 25 bp, Homo sapien
tcctccacttcaatgctcaagattg

SEQ ID NO: 4387058 - DNA, 25 bp, Homo sapien
tggcgtctttgatgcatctctcttg

SEQ ID NO: 4387059 - DNA, 25 bp, Homo sapien
tggacgaaagtatttcccaaatatc

SEQ ID NO: 4387060 - DNA, 25 bp, Homo sapien
tagctctgtaactactggacgaaag

SEQ ID NO: 4387061 - DNA, 25 bp, Homo sapien
tctaactctaacgtgtattgttttg

SEQ ID NO: 4387062 - DNA, 25 bp, Homo sapien
ccttagaggttctttctctaactct

SEQ ID NO: 4387063 - DNA, 25 bp, Homo sapien
ctcttcagcatattcttgaaatgca

SEQ ID NO: 4387064 - DNA, 25 bp, Homo sapien
tctcttcagcatattcttgaaatgc

SEQ ID NO: 4387065 - DNA, 25 bp, Homo sapien
tctgactatgctgagaagagtccat

SEQ ID NO: 4387066 - DNA, 25 bp, Homo sapien
tgagatctgactatgctgagaagag

SEQ ID NO: 4387067 - DNA, 25 bp, Homo sapien
gatctgactatgctgagaagagtcc

SEQ ID NO: 4387068 - DNA, 25 bp, Homo sapien
ctgagatctgactatgctgagaaga

SEQ ID NO: 4387069 - DNA, 25 bp, Homo sapien
tcacaatcaagaattggacacttag

SEQ ID NO: 4387070 - DNA, 25 bp, Homo sapien
tatgttatagtgatactgtaagtgt

SEQ ID NO: 4387071 - DNA, 25 bp, Homo sapien
gttttagcagatatgataatgttgg

SEQ ID NO: 4387072 - DNA, 25 bp, Homo sapien
taatgttggtttgaattacccttca

SEQ ID NO: 4387073 - DNA, 25 bp, Homo sapien
aaaggcctcaagctagaaagtgtaa

SEQ ID NO: 4387074 - DNA, 25 bp, Homo sapien
tcacagcttgtatggattctgcaaa

SEQ ID NO: 4387075 - DNA, 25 bp, Homo sapien
cttgtatggattctgcaaaggcctc

SEQ ID NO: 4387076 - DNA, 25 bp, Homo sapien
ctcaagctagaaagtgtaaggtggc

SEQ ID NO: 4387077 - DNA, 25 bp, Homo sapien
ggctctcatgagcaaggaaagagat

SEQ ID NO: 4387078 - DNA, 25 bp, Homo sapien
ggaaagagattctgaaccaacccat

SEQ ID NO: 4387079 - DNA, 25 bp, Homo sapien
gctctcacaatgtgactgccactct

SEQ ID NO: 4387080 - DNA, 25 bp, Homo sapien
caagtccagggctctcatgagcaag

SEQ ID NO: 4387081 - DNA, 25 bp, Homo sapien
ctttgcccgaaagccagcatagtca

SEQ ID NO: 4387082 - DNA, 25 bp, Homo sapien
cagtcccactgtcattggttggtca

SEQ ID NO: 4387083 - DNA, 25 bp, Homo sapien
accctttgcccgaaagccagcatag

SEQ ID NO: 4387084 - DNA, 25 bp, Homo sapien
attcagtcccactgtcattggttgg

SEQ ID NO: 4387085 - DNA, 25 bp, Homo sapien
cagggatagagccacctgagactgg

SEQ ID NO: 4387086 - DNA, 25 bp, Homo sapien
ggtccgtgagcccgacatcctggga

SEQ ID NO: 4387087 - DNA, 25 bp, Homo sapien
ccacctgagactggcatcaatgaga

SEQ ID NO: 4387088 - DNA, 25 bp, Homo sapien
gatagagccacctgagactggcatc

SEQ ID NO: 4387089 - DNA, 25 bp, Homo sapien
tttagcagccacacagaatcttaga

SEQ ID NO: 4387090 - DNA, 25 bp, Homo sapien
caggaccctggaacattcaagaaat

SEQ ID NO: 4387091 - DNA, 25 bp, Homo sapien
cagtggtactgtagagatcacagct

SEQ ID NO: 4387092 - DNA, 25 bp, Homo sapien
tgcattcaaaaatagtcccacgatc

SEQ ID NO: 4387093 - DNA, 25 bp, Homo sapien
gtttgtgagttttcattccctggag

SEQ ID NO: 4387094 - DNA, 25 bp, Homo sapien
cctggagtgccaaagagaatgctgc

SEQ ID NO: 4387095 - DNA, 25 bp, Homo sapien
gagtccttctcatgccacactgtgg

SEQ ID NO: 4387096 - DNA, 25 bp, Homo sapien
gaatgctgccatgagcatcccttta

SEQ ID NO: 4387097 - DNA, 25 bp, Homo sapien
aattctggcttgtcgaaacctggca

SEQ ID NO: 4387098 - DNA, 25 bp, Homo sapien
ctggcttgtcgaaacctggcaaatg

SEQ ID NO: 4387099 - DNA, 25 bp, Homo sapien
ttctggcttgtcgaaacctggcaaa

SEQ ID NO: 4387100 - DNA, 25 bp, Homo sapien
ggaattctggcttgtcgaaacctgg

SEQ ID NO: 4387101 - DNA, 25 bp, Homo sapien
ctcctcgtgagcagaccatgtttct

SEQ ID NO: 4387102 - DNA, 25 bp, Homo sapien
tgggggctcctcgtgagcagaccat

SEQ ID NO: 4387103 - DNA, 25 bp, Homo sapien
gtttctacatagtgataggtggtca

SEQ ID NO: 4387104 - DNA, 25 bp, Homo sapien
gaccatgtttctacatagtgatagg

SEQ ID NO: 4387105 - DNA, 25 bp, Homo sapien
attttatcttgaattgtgggtaaca

SEQ ID NO: 4387106 - DNA, 25 bp, Homo sapien
tttatcttgaattgtgggtaacagc

SEQ ID NO: 4387107 - DNA, 25 bp, Homo sapien
ttatcttgaattgtgggtaacagcc

SEQ ID NO: 4387108 - DNA, 25 bp, Homo sapien
tgcaagctggcctagtttactgctc

SEQ ID NO: 4387109 - DNA, 25 bp, Homo sapien
aagctggcctagtttactgctctgt

SEQ ID NO: 4387110 - DNA, 25 bp, Homo sapien
gcaagctggcctagtttactgctct

SEQ ID NO: 4387111 - DNA, 25 bp, Homo sapien
gctggcctagtttactgctctgttt

SEQ ID NO: 4387112 - DNA, 25 bp, Homo sapien
gaagcagcacccagtaccaagtgta

SEQ ID NO: 4387113 - DNA, 25 bp, Homo sapien
tccagctgaactccttgggaacagt

SEQ ID NO: 4387114 - DNA, 25 bp, Homo sapien
gaacagtctgggctatgtacccctg

SEQ ID NO: 4387115 - DNA, 25 bp, Homo sapien
tgttggcctacatttagctgggaag

SEQ ID NO: 4387116 - DNA, 25 bp, Homo sapien
aagggatatgcaacaggttctgcat

SEQ ID NO: 4387117 - DNA, 25 bp, Homo sapien
agaagggatatgcaacaggttctgc

SEQ ID NO: 4387118 - DNA, 25 bp, Homo sapien
gaagggatatgcaacaggttctgca

SEQ ID NO: 4387119 - DNA, 25 bp, Homo sapien
cttgtattggctgatccctgctggt

SEQ ID NO: 4387120 - DNA, 25 bp, Homo sapien
gcatgccggggccagaacaggaaag

SEQ ID NO: 4387121 - DNA, 25 bp, Homo sapien
gccctgcatgccggggccagaacag

SEQ ID NO: 4387122 - DNA, 25 bp, Homo sapien
ctgctggtatggctgtctgccctgc

SEQ ID NO: 4387123 - DNA, 25 bp, Homo sapien
tctttgctgtcagtgatagtgaagt

SEQ ID NO: 4387124 - DNA, 25 bp, Homo sapien
cagtgatagtgaagtgaaatacata

SEQ ID NO: 4387125 - DNA, 25 bp, Homo sapien
tgctgtcagtgatagtgaagtgaaa

SEQ ID NO: 4387126 - DNA, 25 bp, Homo sapien
aatggaaatgaattgtgttgggcat

SEQ ID NO: 4387127 - DNA, 25 bp, Homo sapien
gatggataatgggaacatggttgcc

SEQ ID NO: 4387128 - DNA, 25 bp, Homo sapien
gggtctggtcaattcatgagctgcc

SEQ ID NO: 4387129 - DNA, 25 bp, Homo sapien
tacttaaacctttgtgaggaacaca

SEQ ID NO: 4387130 - DNA, 25 bp, Homo sapien
cagacatgcataatcaatcttgtac

SEQ ID NO: 4387131 - DNA, 25 bp, Homo sapien
ttgctggagcaccacgacttctcat

SEQ ID NO: 4387132 - DNA, 25 bp, Homo sapien
cattgaaactttgggttccttctgt

SEQ ID NO: 4387133 - DNA, 25 bp, Homo sapien
tccttctgtattagaaccttccctg

SEQ ID NO: 4387134 - DNA, 25 bp, Homo sapien
cacgacttctcattgaaactttggg

SEQ ID NO: 4387135 - DNA, 25 bp, Homo sapien
gacatcatcttttggacgggttaca

SEQ ID NO: 4387136 - DNA, 25 bp, Homo sapien
tgacctgggtccttgtagcacttga

SEQ ID NO: 4387137 - DNA, 25 bp, Homo sapien
ggtccaagtctacatttccagccag

SEQ ID NO: 4387138 - DNA, 25 bp, Homo sapien
ctgttacctatgatgcagggctgac

SEQ ID NO: 4387139 - DNA, 25 bp, Homo sapien
ttggttcctctttactgtttcatac

SEQ ID NO: 4387140 - DNA, 25 bp, Homo sapien
ggttcctctttactgtttcatacat

SEQ ID NO: 4387141 - DNA, 25 bp, Homo sapien
cttgattggttcctctttactgttt

SEQ ID NO: 4387142 - DNA, 25 bp, Homo sapien
gattggttcctctttactgtttcat

SEQ ID NO: 4387143 - DNA, 25 bp, Homo sapien
cctgggttcggcagagttactctgc

SEQ ID NO: 4387144 - DNA, 25 bp, Homo sapien
ggttcggcagagttactctgctcct

SEQ ID NO: 4387145 - DNA, 25 bp, Homo sapien
tgggttcggcagagttactctgctc

SEQ ID NO: 4387146 - DNA, 25 bp, Homo sapien
tcctgggttcggcagagttactctg

SEQ ID NO: 4387147 - DNA, 25 bp, Homo sapien
caggagcattcaacccaagtgacca

SEQ ID NO: 4387148 - DNA, 25 bp, Homo sapien
ttcagggtgggatagtagtcgagga

SEQ ID NO: 4387149 - DNA, 25 bp, Homo sapien
tgaccagccacatgggttgctggat

SEQ ID NO: 4387150 - DNA, 25 bp, Homo sapien
cctggcaggcagtaactggagatgg

SEQ ID NO: 4387151 - DNA, 25 bp, Homo sapien
tctcaatagcttcttctattagagg

SEQ ID NO: 4387152 - DNA, 25 bp, Homo sapien
cagaggcctttgtctcaatagcttc

SEQ ID NO: 4387153 - DNA, 25 bp, Homo sapien
gcctttgtctcaatagcttcttcta

SEQ ID NO: 4387154 - DNA, 25 bp, Homo sapien
aatttcaattttggcagaggccttt

SEQ ID NO: 4387155 - DNA, 25 bp, Homo sapien
atttgagatctctatagcttttcaa

SEQ ID NO: 4387156 - DNA, 25 bp, Homo sapien
tgagatctctatagcttttcaatat

SEQ ID NO: 4387157 - DNA, 25 bp, Homo sapien
cccagcctctccgggctggcgtcat

SEQ ID NO: 4387158 - DNA, 25 bp, Homo sapien
tggctgtgtatctgcgtcccagccc

SEQ ID NO: 4387159 - DNA, 25 bp, Homo sapien
ctggctgtgtatctgcgtcccagcc

SEQ ID NO: 4387160 - DNA, 25 bp, Homo sapien
tcccagcctctccgggctggcgtca

SEQ ID NO: 4387161 - DNA, 25 bp, Homo sapien
agcttcataagtttgccatgtgcag

SEQ ID NO: 4387162 - DNA, 25 bp, Homo sapien
gcttcataagtttgccatgtgcagt

SEQ ID NO: 4387163 - DNA, 25 bp, Homo sapien
cacaagactcctcatgaaaacaatt

SEQ ID NO: 4387164 - DNA, 25 bp, Homo sapien
cagtccacccgtaggactttccttg

SEQ ID NO: 4387165 - DNA, 25 bp, Homo sapien
ggatttctcatcagtccacccgtag

SEQ ID NO: 4387166 - DNA, 25 bp, Homo sapien
ctgtctccagttcgcatcataagga

SEQ ID NO: 4387167 - DNA, 25 bp, Homo sapien
cagttcgcatcataaggatttctca

SEQ ID NO: 4387168 - DNA, 25 bp, Homo sapien
agagagcctggaagtgacactcaga

SEQ ID NO: 4387169 - DNA, 25 bp, Homo sapien
gtacagctcagatggagaatttggg

SEQ ID NO: 4387170 - DNA, 25 bp, Homo sapien
gacagtctttgcaagctggagcatg

SEQ ID NO: 4387171 - DNA, 25 bp, Homo sapien
taaggtgaagcctctatcggtgcag

SEQ ID NO: 4387172 - DNA, 25 bp, Homo sapien
gcactggcctggcacgtgagggcct

SEQ ID NO: 4387173 - DNA, 25 bp, Homo sapien
ggtctgtaacctctctcctgccagg

SEQ ID NO: 4387174 - DNA, 25 bp, Homo sapien
cctgccagggcggacgttactgatg

SEQ ID NO: 4387175 - DNA, 25 bp, Homo sapien
aaaacaaccaagtgataaaactgag

SEQ ID NO: 4387176 - DNA, 25 bp, Homo sapien
agaattccaagttccgtggcactgg

SEQ ID NO: 4387177 - DNA, 25 bp, Homo sapien
gctgcgcaggttccaagtcacaggg

SEQ ID NO: 4387178 - DNA, 25 bp, Homo sapien
cgactggcggcttcatgcgattgga

SEQ ID NO: 4387179 - DNA, 25 bp, Homo sapien
aaacaagaatcaggcttgggctgcg

SEQ ID NO: 4387180 - DNA, 25 bp, Homo sapien
cagtttaaatgggattcacagtagg

SEQ ID NO: 4387181 - DNA, 25 bp, Homo sapien
agtgtgtggatgtgtcagcgtgaat

SEQ ID NO: 4387182 - DNA, 25 bp, Homo sapien
cgtgaatgtgactcattaaaacaga

SEQ ID NO: 4387183 - DNA, 25 bp, Homo sapien
tgaggtttgtttggaattattttga

SEQ ID NO: 4387184 - DNA, 25 bp, Homo sapien
tcagaatctgtctctaaccactcag

SEQ ID NO: 4387185 - DNA, 25 bp, Homo sapien
aatctgtctctaaccactcagaatc

SEQ ID NO: 4387186 - DNA, 25 bp, Homo sapien
ttttcaaccactcagaatctgtctc

SEQ ID NO: 4387187 - DNA, 25 bp, Homo sapien
agaatctgtctctaaccactcagaa

SEQ ID NO: 4387188 - DNA, 25 bp, Homo sapien
caacatgctttcatatcctgccgag

SEQ ID NO: 4387189 - DNA, 25 bp, Homo sapien
catggttttcaaagggtcggccaag

SEQ ID NO: 4387190 - DNA, 25 bp, Homo sapien
tactaatagtgcaccacaacatgct

SEQ ID NO: 4387191 - DNA, 25 bp, Homo sapien
caagagaattgggacgggctgcatt

SEQ ID NO: 4387192 - DNA, 25 bp, Homo sapien
tccatggtgaggtttccaaaaagct

SEQ ID NO: 4387193 - DNA, 25 bp, Homo sapien
tgctccagaggaaaagcggcaaaat

SEQ ID NO: 4387194 - DNA, 25 bp, Homo sapien
gctactgaacattcaattctgccca

SEQ ID NO: 4387195 - DNA, 25 bp, Homo sapien
gaaaagcggcaaaatccaatctgag

SEQ ID NO: 4387196 - DNA, 25 bp, Homo sapien
tctgcacctgggattaccagcttgt

SEQ ID NO: 4387197 - DNA, 25 bp, Homo sapien
agcaaacattctcacctgcacctga

SEQ ID NO: 4387198 - DNA, 25 bp, Homo sapien
cagcaaacattctcacctgcacctg

SEQ ID NO: 4387199 - DNA, 25 bp, Homo sapien
ttctgcacctgggattaccagcttg

SEQ ID NO: 4387200 - DNA, 25 bp, Homo sapien
catccaacataattactgtgattct

SEQ ID NO: 4387201 - DNA, 25 bp, Homo sapien
gcacattcatccaacataattactg

SEQ ID NO: 4387202 - DNA, 25 bp, Homo sapien
ggccactgtatgcacattcatccaa

SEQ ID NO: 4387203 - DNA, 25 bp, Homo sapien
aaactgctaggccactgtatgcaca

SEQ ID NO: 4387204 - DNA, 25 bp, Homo sapien
acattcctttcctgttactgtccag

SEQ ID NO: 4387205 - DNA, 25 bp, Homo sapien
tttcctgttactgtccagtttccca

SEQ ID NO: 4387206 - DNA, 25 bp, Homo sapien
gcttctctacattcctttcctgtta

SEQ ID NO: 4387207 - DNA, 25 bp, Homo sapien
ctgcttctctacattcctttcctgt

SEQ ID NO: 4387208 - DNA, 25 bp, Homo sapien
ctctaagccagactcagtgattatg

SEQ ID NO: 4387209 - DNA, 25 bp, Homo sapien
tgggtatagaatctccacgtccttc

SEQ ID NO: 4387210 - DNA, 25 bp, Homo sapien
gaaagatagaatgtactgtcaggta

SEQ ID NO: 4387211 - DNA, 25 bp, Homo sapien
ccagactcagtgattatggaggaaa

SEQ ID NO: 4387212 - DNA, 25 bp, Homo sapien
gggactgccctgtcacaacagtggg

SEQ ID NO: 4387213 - DNA, 25 bp, Homo sapien
ttccttctccttgtaaccactgact

SEQ ID NO: 4387214 - DNA, 25 bp, Homo sapien
tccttgtaaccactgactctgagct

SEQ ID NO: 4387215 - DNA, 25 bp, Homo sapien
gggctgccaattacacattctgatg

SEQ ID NO: 4387216 - DNA, 25 bp, Homo sapien
catggcgtctggctcataagagaaa

SEQ ID NO: 4387217 - DNA, 25 bp, Homo sapien
cacattaggctcgtgcttttaggaa

SEQ ID NO: 4387218 - DNA, 25 bp, Homo sapien
aacttgggacttacttaacatggcg

SEQ ID NO: 4387219 - DNA, 25 bp, Homo sapien
gaaaggttttgcagatgtatcgcca

SEQ ID NO: 4387220 - DNA, 25 bp, Homo sapien
tcactggcttagactgacacaagag

SEQ ID NO: 4387221 - DNA, 25 bp, Homo sapien
gggcaggatccctgcaaccaggata

SEQ ID NO: 4387222 - DNA, 25 bp, Homo sapien
tgttctccaccatgaataaattctc

SEQ ID NO: 4387223 - DNA, 25 bp, Homo sapien
tctagcgtgaacagttctcactggc

SEQ ID NO: 4387224 - DNA, 25 bp, Homo sapien
caaaaggtgacaatgcactgaactc

SEQ ID NO: 4387225 - DNA, 25 bp, Homo sapien
ggtggacgataaaaggaaagcagac

SEQ ID NO: 4387226 - DNA, 25 bp, Homo sapien
gcatgtgagattgggttctttctga

SEQ ID NO: 4387227 - DNA, 25 bp, Homo sapien
aatgttgccttctcatactctatgg

SEQ ID NO: 4387228 - DNA, 25 bp, Homo sapien
tacagagctgtccggcacatggcca

SEQ ID NO: 4387229 - DNA, 25 bp, Homo sapien
acagagctgtccggcacatggccat

SEQ ID NO: 4387230 - DNA, 25 bp, Homo sapien
atacagagctgtccggcacatggcc

SEQ ID NO: 4387231 - DNA, 25 bp, Homo sapien
catacagagctgtccggcacatggc

SEQ ID NO: 4387232 - DNA, 25 bp, Homo sapien
gtaggcagggagtggtctagaaaac

SEQ ID NO: 4387233 - DNA, 25 bp, Homo sapien
ctttttgcaggatggcgtgagatga

SEQ ID NO: 4387234 - DNA, 25 bp, Homo sapien
gacaaacaccctgaagagtgtcatt

SEQ ID NO: 4387235 - DNA, 25 bp, Homo sapien
gtcattaagttgcttggcttctttc

SEQ ID NO: 4387236 - DNA, 25 bp, Homo sapien
cagaggctgcatggtatataatgcc

SEQ ID NO: 4387237 - DNA, 25 bp, Homo sapien
ttattctcattctggcatgaaggca

SEQ ID NO: 4387238 - DNA, 25 bp, Homo sapien
tataatgccacaggagattgaatac

SEQ ID NO: 4387239 - DNA, 25 bp, Homo sapien
ctcattctggcatgaaggcacagtg

SEQ ID NO: 4387240 - DNA, 25 bp, Homo sapien
ggtggagccattcttagtagctatg

SEQ ID NO: 4387241 - DNA, 25 bp, Homo sapien
gagccattcttagtagctatgtctg

SEQ ID NO: 4387242 - DNA, 25 bp, Homo sapien
cattcttagtagctatgtctgcgtg

SEQ ID NO: 4387243 - DNA, 25 bp, Homo sapien
gtggtggagccattcttagtagcta

SEQ ID NO: 4387244 - DNA, 25 bp, Homo sapien
tctgtagtcacaggattagaagtag

SEQ ID NO: 4387245 - DNA, 25 bp, Homo sapien
cacaggattagaagtaggggtggtt

SEQ ID NO: 4387246 - DNA, 25 bp, Homo sapien
tttctgtagtcacaggattagaagt

SEQ ID NO: 4387247 - DNA, 25 bp, Homo sapien
tgtagtcacaggattagaagtaggg

SEQ ID NO: 4387248 - DNA, 25 bp, Homo sapien
taggattcagaggtcctgataccca

SEQ ID NO: 4387249 - DNA, 25 bp, Homo sapien
aggattcagaggtcctgatacccag

SEQ ID NO: 4387250 - DNA, 25 bp, Homo sapien
ttataggattcagaggtcctgatac

SEQ ID NO: 4387251 - DNA, 25 bp, Homo sapien
tataggattcagaggtcctgatacc

SEQ ID NO: 4387252 - DNA, 25 bp, Homo sapien
atttttgtctaaacagaataaatgt

SEQ ID NO: 4387253 - DNA, 25 bp, Homo sapien
tggtttatccacgatttttctaatc

SEQ ID NO: 4387254 - DNA, 25 bp, Homo sapien
aaataaatgtgttggtttatccacg

SEQ ID NO: 4387255 - DNA, 25 bp, Homo sapien
tatacatatctacccgactccagtc

SEQ ID NO: 4387256 - DNA, 25 bp, Homo sapien
tgcagtaagcggagtcatttaagaa

SEQ ID NO: 4387257 - DNA, 25 bp, Homo sapien
tgaaaagtaaacacaccctggatgt

SEQ ID NO: 4387258 - DNA, 25 bp, Homo sapien
catttaagaagcgaggtactcaggg

SEQ ID NO: 4387259 - DNA, 25 bp, Homo sapien
ggctttagtataaagggcaatgaag

SEQ ID NO: 4387260 - DNA, 25 bp, Homo sapien
atgaggcgaacaggagccagccgag

SEQ ID NO: 4387261 - DNA, 25 bp, Homo sapien
tgaagtagaacgtgatgaggcgaac

SEQ ID NO: 4387262 - DNA, 25 bp, Homo sapien
tgtttccgccctctcatcaacaggg

SEQ ID NO: 4387263 - DNA, 25 bp, Homo sapien
tacagtcacattgtttggtcctttg

SEQ ID NO: 4387264 - DNA, 25 bp, Homo sapien
catgaagcttacagtcacattgttt

SEQ ID NO: 4387265 - DNA, 25 bp, Homo sapien
agttaattaattggacacagcatac

SEQ ID NO: 4387266 - DNA, 25 bp, Homo sapien
tcctttgtttgctaatagttaatta

SEQ ID NO: 4387267 - DNA, 25 bp, Homo sapien
cttctctttggctccttggcactgg

SEQ ID NO: 4387268 - DNA, 25 bp, Homo sapien
tggctccttggcactggtctggaga

SEQ ID NO: 4387269 - DNA, 25 bp, Homo sapien
cttggttattctcatttcttctctt

SEQ ID NO: 4387270 - DNA, 25 bp, Homo sapien
ctttggctccttggcactggtctgg

SEQ ID NO: 4387271 - DNA, 25 bp, Homo sapien
tgagcttgccgcttgtcagaagaaa

SEQ ID NO: 4387272 - DNA, 25 bp, Homo sapien
gatgcatcgtgttaattccactggg

SEQ ID NO: 4387273 - DNA, 25 bp, Homo sapien
agaagaaactctggtccgaagccgg

SEQ ID NO: 4387274 - DNA, 25 bp, Homo sapien
aagccgggctgcagactcactgtgt

SEQ ID NO: 4387275 - DNA, 25 bp, Homo sapien
tgttttcgcaaatttaatcctccaa

SEQ ID NO: 4387276 - DNA, 25 bp, Homo sapien
agtatctgctttgcatcaggcacag

SEQ ID NO: 4387277 - DNA, 25 bp, Homo sapien
tgcatcaggcacagctatgctaggc

SEQ ID NO: 4387278 - DNA, 25 bp, Homo sapien
tgctttgcatcaggcacagctatgc

SEQ ID NO: 4387279 - DNA, 25 bp, Homo sapien
cacagctatgctaggcatgaagaca

SEQ ID NO: 4387280 - DNA, 25 bp, Homo sapien
ctatgcataggataatgtgaatgtc

SEQ ID NO: 4387281 - DNA, 25 bp, Homo sapien
cataggataatgtgaatgtcaacgg

SEQ ID NO: 4387282 - DNA, 25 bp, Homo sapien
gataatgtgaatgtcaacggagaag

SEQ ID NO: 4387283 - DNA, 25 bp, Homo sapien
tgaatgtcaacggagaagtgcctac

SEQ ID NO: 4387284 - DNA, 25 bp, Homo sapien
tcacaatcagctccgcttttattct

SEQ ID NO: 4387285 - DNA, 25 bp, Homo sapien
cgtgattggtctttacaagtgctgt

SEQ ID NO: 4387286 - DNA, 25 bp, Homo sapien
caggaaattattcacgtgattggtc

SEQ ID NO: 4387287 - DNA, 25 bp, Homo sapien
taaccataaaggctacctcagacag

SEQ ID NO: 4387288 - DNA, 25 bp, Homo sapien
tgaataaatcgcaagtgaatggtga

SEQ ID NO: 4387289 - DNA, 25 bp, Homo sapien
caagtgaatggtgacccaaagcttc

SEQ ID NO: 4387290 - DNA, 25 bp, Homo sapien
tgctgaataaatcgcaagtgaatgg

SEQ ID NO: 4387291 - DNA, 25 bp, Homo sapien
agttgctgaataaatcgcaagtgaa

SEQ ID NO: 4387292 - DNA, 25 bp, Homo sapien
tagatgcctcatgccgaatctctct

SEQ ID NO: 4387293 - DNA, 25 bp, Homo sapien
tctggcatcttccttactagcaaga

SEQ ID NO: 4387294 - DNA, 25 bp, Homo sapien
ggaattgcatccaacctcatagctg

SEQ ID NO: 4387295 - DNA, 25 bp, Homo sapien
tgtgagagtacaagtggtaaaattg

SEQ ID NO: 4387296 - DNA, 25 bp, Homo sapien
gctctcccaggcttcttagaactca

SEQ ID NO: 4387297 - DNA, 25 bp, Homo sapien
cagattcccaagacaaaggacaatt

SEQ ID NO: 4387298 - DNA, 25 bp, Homo sapien
tgccagcaactcagcccatgtctcc

SEQ ID NO: 4387299 - DNA, 25 bp, Homo sapien
acaattgaggcccagttagtgctca

SEQ ID NO: 4387300 - DNA, 25 bp, Homo sapien
tttgttagccggtgactgtttctct

SEQ ID NO: 4387301 - DNA, 25 bp, Homo sapien
taacagatggttttgttagccggtg

SEQ ID NO: 4387302 - DNA, 25 bp, Homo sapien
ataactcctgacaataaaaggctgt

SEQ ID NO: 4387303 - DNA, 25 bp, Homo sapien
taagtggtagccttttacctccaga

SEQ ID NO: 4387304 - DNA, 25 bp, Homo sapien
gaaacttgatgtgtgtaattgcagc

SEQ ID NO: 4387305 - DNA, 25 bp, Homo sapien
aacttgatgtgtgtaattgcagcca

SEQ ID NO: 4387306 - DNA, 25 bp, Homo sapien
ctgaaacttgatgtgtgtaattgca

SEQ ID NO: 4387307 - DNA, 25 bp, Homo sapien
ttctgaaacttgatgtgtgtaattg

SEQ ID NO: 4387308 - DNA, 25 bp, Homo sapien
ccagacccttaagaaggccggccat

SEQ ID NO: 4387309 - DNA, 25 bp, Homo sapien
tctccagacccttaagaaggccggc

SEQ ID NO: 4387310 - DNA, 25 bp, Homo sapien
tcaatatgacgtgtgtttgagtgaa

SEQ ID NO: 4387311 - DNA, 25 bp, Homo sapien
ttaaatcgtgttcaatatgacgtgt

SEQ ID NO: 4387312 - DNA, 25 bp, Homo sapien
tgaggaggctgaggatagcgaacat

SEQ ID NO: 4387313 - DNA, 25 bp, Homo sapien
gaacatatgaagcaaactcccacct

SEQ ID NO: 4387314 - DNA, 25 bp, Homo sapien
caattcatcagtcccttagtggaga

SEQ ID NO: 4387315 - DNA, 25 bp, Homo sapien
tgcaggtcaccaaagagttccacat

SEQ ID NO: 4387316 - DNA, 25 bp, Homo sapien
ggtagtccacaataacaccttgaga

SEQ ID NO: 4387317 - DNA, 25 bp, Homo sapien
aatcaggtgtctttcggtcagtgga

SEQ ID NO: 4387318 - DNA, 25 bp, Homo sapien
acaaccccagctactgaaaatgcca

SEQ ID NO: 4387319 - DNA, 25 bp, Homo sapien
gtgaaacgcactgggcttattgcaa

SEQ ID NO: 4387320 - DNA, 25 bp, Homo sapien
aaacacccggaagcagtgaaacgca

SEQ ID NO: 4387321 - DNA, 25 bp, Homo sapien
tcactggagactaaagggaatgctt

SEQ ID NO: 4387322 - DNA, 25 bp, Homo sapien
cctggagagagtatgggttgattca

SEQ ID NO: 4387323 - DNA, 25 bp, Homo sapien
tgcttgaagcatctcagaggcgtgc

SEQ ID NO: 4387324 - DNA, 25 bp, Homo sapien
gaagcatctcagaggcgtgcaccat

SEQ ID NO: 4387325 - DNA, 25 bp, Homo sapien
gaaagagccctggacggctttggaa

SEQ ID NO: 4387326 - DNA, 25 bp, Homo sapien
tggtgaccccaaaacagaaggcagc

SEQ ID NO: 4387327 - DNA, 25 bp, Homo sapien
tcagtattccttagacgagagcccc

SEQ ID NO: 4387328 - DNA, 25 bp, Homo sapien
tgaaaatgacgagtagtggtgaccc

SEQ ID NO: 4387329 - DNA, 25 bp, Homo sapien
cttcaccttgaccagtagtggtcat

SEQ ID NO: 4387330 - DNA, 25 bp, Homo sapien
cagccgtgactgctaaaagcgtgtt

SEQ ID NO: 4387331 - DNA, 25 bp, Homo sapien
ggcagccgtgactgctaaaagcgtg

SEQ ID NO: 4387332 - DNA, 25 bp, Homo sapien
cgtgactgctaaaagcgtgttctgt

SEQ ID NO: 4387333 - DNA, 25 bp, Homo sapien
tgctaaaagcgtgttctgtgttccc

SEQ ID NO: 4387334 - DNA, 25 bp, Homo sapien
gtagagtgtcaagccagaataaggg

SEQ ID NO: 4387335 - DNA, 25 bp, Homo sapien
tctgctggtagacttgtagagtgtc

SEQ ID NO: 4387336 - DNA, 25 bp, Homo sapien
tagacttgtagagtgtcaagccaga

SEQ ID NO: 4387337 - DNA, 25 bp, Homo sapien
caagccagaataagggggtgctgca

SEQ ID NO: 4387338 - DNA, 25 bp, Homo sapien
tggtgcactttggattcggaacgcc

SEQ ID NO: 4387339 - DNA, 25 bp, Homo sapien
gagatagagctcttcatacaggaag

SEQ ID NO: 4387340 - DNA, 25 bp, Homo sapien
tgtttgggttatctgcaccctccga

SEQ ID NO: 4387341 - DNA, 25 bp, Homo sapien
gccatgtcgtaaaaacaatgtccac

SEQ ID NO: 4387342 - DNA, 25 bp, Homo sapien
catctcctgtcattaggcctccatg

SEQ ID NO: 4387343 - DNA, 25 bp, Homo sapien
acaaagacgcaaaaaggtttcgcat

SEQ ID NO: 4387344 - DNA, 25 bp, Homo sapien
gaaaaggagcttgacacctttcgca

SEQ ID NO: 4387345 - DNA, 25 bp, Homo sapien
aaggtttcgcattccttcacacaca

SEQ ID NO: 4387346 - DNA, 25 bp, Homo sapien
agcacgaggaccaagagaactaagt

SEQ ID NO: 4387347 - DNA, 25 bp, Homo sapien
tgcccaggcagtggacagaaaacag

SEQ ID NO: 4387348 - DNA, 25 bp, Homo sapien
gaccaagagaactaagtgggcaaga

SEQ ID NO: 4387349 - DNA, 25 bp, Homo sapien
agagaactaagtgggcaagatgccc

SEQ ID NO: 4387350 - DNA, 25 bp, Homo sapien
gtaatcttcaatctgccaaattgta

SEQ ID NO: 4387351 - DNA, 25 bp, Homo sapien
gctttcactcagtaatgttctcact

SEQ ID NO: 4387352 - DNA, 25 bp, Homo sapien
attgtatgcatgacttgtgttggtg

SEQ ID NO: 4387353 - DNA, 25 bp, Homo sapien
tgcaaggaacttcaagtctcttctg

SEQ ID NO: 4387354 - DNA, 25 bp, Homo sapien
gaaatacagttgctactgtggcctg

SEQ ID NO: 4387355 - DNA, 25 bp, Homo sapien
aatacagttgctactgtggcctggg

SEQ ID NO: 4387356 - DNA, 25 bp, Homo sapien
atgaaatacagttgctactgtggcc

SEQ ID NO: 4387357 - DNA, 25 bp, Homo sapien
atacagttgctactgtggcctggga

SEQ ID NO: 4387358 - DNA, 25 bp, Homo sapien
tatagacttgcaattaatctttaca

SEQ ID NO: 4387359 - DNA, 25 bp, Homo sapien
ttgattgctgattatagacttgcaa

SEQ ID NO: 4387360 - DNA, 25 bp, Homo sapien
atttatacctaggtacatgacttct

SEQ ID NO: 4387361 - DNA, 25 bp, Homo sapien
gctgattatagacttgcaattaatc

SEQ ID NO: 4387362 - DNA, 25 bp, Homo sapien
gaagtcaagacatcataagatactg

SEQ ID NO: 4387363 - DNA, 25 bp, Homo sapien
caaaagagaaagcttccaacatccc

SEQ ID NO: 4387364 - DNA, 25 bp, Homo sapien
gtttttcctaattatgaacagatgt

SEQ ID NO: 4387365 - DNA, 25 bp, Homo sapien
tcaattgattatatgactttcctca

SEQ ID NO: 4387366 - DNA, 25 bp, Homo sapien
tcagaaaaagcctccgtggctggcg

SEQ ID NO: 4387367 - DNA, 25 bp, Homo sapien
tgctggaaacacattagaggtgcct

SEQ ID NO: 4387368 - DNA, 25 bp, Homo sapien
tagctgtgcctacctaagcggcatg

SEQ ID NO: 4387369 - DNA, 25 bp, Homo sapien
tctcagacagggaatgtactgctcc

SEQ ID NO: 4387370 - DNA, 25 bp, Homo sapien
aattgagaatcaggtgcccttgttc

SEQ ID NO: 4387371 - DNA, 25 bp, Homo sapien
gcaggaaattgagaatcaggtgccc

SEQ ID NO: 4387372 - DNA, 25 bp, Homo sapien
gaatcaggtgcccttgttcataaga

SEQ ID NO: 4387373 - DNA, 25 bp, Homo sapien
tcaggtgcccttgttcataagagat

SEQ ID NO: 4387374 - DNA, 25 bp, Homo sapien
tcaacggaagtagataaggacaaag

SEQ ID NO: 4387375 - DNA, 25 bp, Homo sapien
acggaagtagataaggacaaaggag

SEQ ID NO: 4387376 - DNA, 25 bp, Homo sapien
caacggaagtagataaggacaaagg

SEQ ID NO: 4387377 - DNA, 25 bp, Homo sapien
cggaagtagataaggacaaaggagt

SEQ ID NO: 4387378 - DNA, 25 bp, Homo sapien
taagtgcgagagagtgaccacgtag

SEQ ID NO: 4387379 - DNA, 25 bp, Homo sapien
gagagtgaccacgtaggggcgggca

SEQ ID NO: 4387380 - DNA, 25 bp, Homo sapien
agtgaccacgtaggggcgggcacca

SEQ ID NO: 4387381 - DNA, 25 bp, Homo sapien
ctaagtgcgagagagtgaccacgta

SEQ ID NO: 4387382 - DNA, 25 bp, Homo sapien
tcagggatgcgtgagtacaggaacg

SEQ ID NO: 4387383 - DNA, 25 bp, Homo sapien
tgcgtgagtacaggaacggactgca

SEQ ID NO: 4387384 - DNA, 25 bp, Homo sapien
gctagttgccgttctaagtccatca

SEQ ID NO: 4387385 - DNA, 25 bp, Homo sapien
ctttaaaagccaggctagttgccgt

SEQ ID NO: 4387386 - DNA, 25 bp, Homo sapien
aatcatcattgacaacgcactgatg

SEQ ID NO: 4387387 - DNA, 25 bp, Homo sapien
caactgtcgccttccatgcaataaa

SEQ ID NO: 4387388 - DNA, 25 bp, Homo sapien
aaaaaatggatctggtgctacttca

SEQ ID NO: 4387389 - DNA, 25 bp, Homo sapien
aatggatctggtgctacttcacctc

SEQ ID NO: 4387390 - DNA, 25 bp, Homo sapien
cacaaacttgtgagctaggtaatga

SEQ ID NO: 4387391 - DNA, 25 bp, Homo sapien
tctaacaggtgaatgtcacatggca

SEQ ID NO: 4387392 - DNA, 25 bp, Homo sapien
tgcctgcatgagtaggacctagctg

SEQ ID NO: 4387393 - DNA, 25 bp, Homo sapien
tgcaattctgtagggactttctccg

SEQ ID NO: 4387394 - DNA, 25 bp, Homo sapien
catggggatgatgctcatctgctcc

SEQ ID NO: 4387395 - DNA, 25 bp, Homo sapien
atggggatgatgctcatctgctccc

SEQ ID NO: 4387396 - DNA, 25 bp, Homo sapien
ccatggggatgatgctcatctgctc

SEQ ID NO: 4387397 - DNA, 25 bp, Homo sapien
cccatggggatgatgctcatctgct

SEQ ID NO: 4387398 - DNA, 25 bp, Homo sapien
taggtcaagttactgctacgggtgt

SEQ ID NO: 4387399 - DNA, 25 bp, Homo sapien
gcacacggcaagacagaatatctca

SEQ ID NO: 4387400 - DNA, 25 bp, Homo sapien
tgaacctgtccaatttagcacacgg

SEQ ID NO: 4387401 - DNA, 25 bp, Homo sapien
tcatccattcgcctagaaacacggg

SEQ ID NO: 4387402 - DNA, 25 bp, Homo sapien
ccagagccggagaagccccgtgcgg

SEQ ID NO: 4387403 - DNA, 25 bp, Homo sapien
ggcccagagccggagaagccccgtg

SEQ ID NO: 4387404 - DNA, 25 bp, Homo sapien
gcccagagccggagaagccccgtgc

SEQ ID NO: 4387405 - DNA, 25 bp, Homo sapien
cccagagccggagaagccccgtgcg

SEQ ID NO: 4387406 - DNA, 25 bp, Homo sapien
aagactgtgccagctgccggtctag

SEQ ID NO: 4387407 - DNA, 25 bp, Homo sapien
tcagcgagagacgtttctccccagg

SEQ ID NO: 4387408 - DNA, 25 bp, Homo sapien
tcttcctgcctcgaacaatttggga

SEQ ID NO: 4387409 - DNA, 25 bp, Homo sapien
gaagcgtgtcacgatccagagctgt

SEQ ID NO: 4387410 - DNA, 25 bp, Homo sapien
cttcttgtatagagggctgatttac

SEQ ID NO: 4387411 - DNA, 25 bp, Homo sapien
attttaaagtggttctcttgaagct

SEQ ID NO: 4387412 - DNA, 25 bp, Homo sapien
gagggctgatttacctgatggtgtt

SEQ ID NO: 4387413 - DNA, 25 bp, Homo sapien
gagacatcctttctcactgttaggt

SEQ ID NO: 4387414 - DNA, 25 bp, Homo sapien
taggtattcacctgccaaatgttgg

SEQ ID NO: 4387415 - DNA, 25 bp, Homo sapien
tccttacactcaagacagcagttgg

SEQ ID NO: 4387416 - DNA, 25 bp, Homo sapien
cctggtaagaatagtgagatcctgt

SEQ ID NO: 4387417 - DNA, 25 bp, Homo sapien
ccgtctgaaaagaatagtgagctcc

SEQ ID NO: 4387418 - DNA, 25 bp, Homo sapien
accgatctgtgaaatccaaaactgt

SEQ ID NO: 4387419 - DNA, 25 bp, Homo sapien
ttaccgatctgtgaaatccaaaact

SEQ ID NO: 4387420 - DNA, 25 bp, Homo sapien
ctgtgaaatccaaaactgttccctc

SEQ ID NO: 4387421 - DNA, 25 bp, Homo sapien
atctgtgaaatccaaaactgttccc

SEQ ID NO: 4387422 - DNA, 25 bp, Homo sapien
cctgcgtagacatgctttactttct

SEQ ID NO: 4387423 - DNA, 25 bp, Homo sapien
ctgcgtagacatgctttactttctt

SEQ ID NO: 4387424 - DNA, 25 bp, Homo sapien
tgctttactttctttcgaagcatat

SEQ ID NO: 4387425 - DNA, 25 bp, Homo sapien
catgctttactttctttcgaagcat

SEQ ID NO: 4387426 - DNA, 25 bp, Homo sapien
tggaaatgctacaaggatgctaagt

SEQ ID NO: 4387427 - DNA, 25 bp, Homo sapien
tctaagttacatgggatctcacact

SEQ ID NO: 4387428 - DNA, 25 bp, Homo sapien
cagtcctgtactagctgtttctgag

SEQ ID NO: 4387429 - DNA, 25 bp, Homo sapien
aacagttgaataccgtacataacac

SEQ ID NO: 4387430 - DNA, 25 bp, Homo sapien
tttatgtgtataacatacccttagt

SEQ ID NO: 4387431 - DNA, 25 bp, Homo sapien
tgttgctgccttcacattctttatg

SEQ ID NO: 4387432 - DNA, 25 bp, Homo sapien
gtgtataacatacccttagtgccat

SEQ ID NO: 4387433 - DNA, 25 bp, Homo sapien
tgccatctctcgttttggatgatgg

SEQ ID NO: 4387434 - DNA, 25 bp, Homo sapien
caggaccacctctttgtcaatagtg

SEQ ID NO: 4387435 - DNA, 25 bp, Homo sapien
tgttgaactttcctaccactgtgcc

SEQ ID NO: 4387436 - DNA, 25 bp, Homo sapien
aaactgagtgtcctcctagaaagct

SEQ ID NO: 4387437 - DNA, 25 bp, Homo sapien
taattcttatctgctgggagtccac

SEQ ID NO: 4387438 - DNA, 25 bp, Homo sapien
tttgaccataatttcaagaatgtaa

SEQ ID NO: 4387439 - DNA, 25 bp, Homo sapien
catacactttacctttgaatacagc

SEQ ID NO: 4387440 - DNA, 25 bp, Homo sapien
ggattttcagcctgttgaatgttct

SEQ ID NO: 4387441 - DNA, 25 bp, Homo sapien
ttgtgtggtatgtctttaactggcc

SEQ ID NO: 4387442 - DNA, 25 bp, Homo sapien
aatgttctcccttatttgccctgga

SEQ ID NO: 4387443 - DNA, 25 bp, Homo sapien
tctttgtgataacagtaactgccat

SEQ ID NO: 4387444 - DNA, 25 bp, Homo sapien
ttctttgtgataacagtaactgcca

SEQ ID NO: 4387445 - DNA, 25 bp, Homo sapien
ggtttacagtgatgacctgtttatc

SEQ ID NO: 4387446 - DNA, 25 bp, Homo sapien
tccatccctaccatctaatcttttt

SEQ ID NO: 4387447 - DNA, 25 bp, Homo sapien
gacctgtttatcatgaaagttaaaa

SEQ ID NO: 4387448 - DNA, 25 bp, Homo sapien
caactcttaggaaggtttacagtga

SEQ ID NO: 4387449 - DNA, 25 bp, Homo sapien
cctacaagtactgaaaaggcacagg

SEQ ID NO: 4387450 - DNA, 25 bp, Homo sapien
gaaggtctttgaccgacacctccac

SEQ ID NO: 4387451 - DNA, 25 bp, Homo sapien
tgtttattcagctcctgtcaagtgg

SEQ ID NO: 4387452 - DNA, 25 bp, Homo sapien
ggtttgccataatcctcatggttgt

SEQ ID NO: 4387453 - DNA, 25 bp, Homo sapien
cttggaggtttgctagagaacagta

SEQ ID NO: 4387454 - DNA, 25 bp, Homo sapien
ttctcctcacccaattatactggca

SEQ ID NO: 4387455 - DNA, 25 bp, Homo sapien
ctatacaggtactctggcccgagct

SEQ ID NO: 4387456 - DNA, 25 bp, Homo sapien
tatactggcaactatgtctatacag

SEQ ID NO: 4387457 - DNA, 25 bp, Homo sapien
atttctcccagttgattgagcacca

SEQ ID NO: 4387458 - DNA, 25 bp, Homo sapien
ctggctaccttctgggtgtcatctc

SEQ ID NO: 4387459 - DNA, 25 bp, Homo sapien
taccttctgggtgtcatctcgatga

SEQ ID NO: 4387460 - DNA, 25 bp, Homo sapien
tgtcatctcgatgaatttctcccag

SEQ ID NO: 4387461 - DNA, 25 bp, Homo sapien
taatggagacggtaggatttaagct

SEQ ID NO: 4387462 - DNA, 25 bp, Homo sapien
gatttaagctgaacgctgatgtagg

SEQ ID NO: 4387463 - DNA, 25 bp, Homo sapien
tgattgatggcaggccccgacacgt

SEQ ID NO: 4387464 - DNA, 25 bp, Homo sapien
gtcagcattctgaccctgattgatg

SEQ ID NO: 4387465 - DNA, 25 bp, Homo sapien
ttggactccatgtgctgtttcccgg

SEQ ID NO: 4387466 - DNA, 25 bp, Homo sapien
ttggaagaatgctggaacgagttat

SEQ ID NO: 4387467 - DNA, 25 bp, Homo sapien
tgtttcccggaaggagaagcagcgt

SEQ ID NO: 4387468 - DNA, 25 bp, Homo sapien
caaatgcaggtatcaagtgcttgga

SEQ ID NO: 4387469 - DNA, 25 bp, Homo sapien
cagtaatcacaaggaaagtgtcccc

SEQ ID NO: 4387470 - DNA, 25 bp, Homo sapien
caaagtatgggccagggagaactac

SEQ ID NO: 4387471 - DNA, 25 bp, Homo sapien
gaaatacttgcattctgccctacgg

SEQ ID NO: 4387472 - DNA, 25 bp, Homo sapien
ggagaactacagctacgaagacctg

SEQ ID NO: 4387473 - DNA, 25 bp, Homo sapien
tcatcagtacaactcctggaaaagg

SEQ ID NO: 4387474 - DNA, 25 bp, Homo sapien
tatagcacagggatatcatttatgc

SEQ ID NO: 4387475 - DNA, 25 bp, Homo sapien
aaggctctgataggaatgtgccagc

SEQ ID NO: 4387476 - DNA, 25 bp, Homo sapien
tgtttatcacaacctgcactgccaa

SEQ ID NO: 4387477 - DNA, 25 bp, Homo sapien
ctggtacagtgttatataggcatgg

SEQ ID NO: 4387478 - DNA, 25 bp, Homo sapien
taatacagtgaattaccttggctga

SEQ ID NO: 4387479 - DNA, 25 bp, Homo sapien
taaaattacttgttactgccccgca

SEQ ID NO: 4387480 - DNA, 25 bp, Homo sapien
gtgcagtggcagacttatggctcca

SEQ ID NO: 4387481 - DNA, 25 bp, Homo sapien
gactcagcacttccaatcctaggca

SEQ ID NO: 4387482 - DNA, 25 bp, Homo sapien
ttggaaccctcatactctacaggta

SEQ ID NO: 4387483 - DNA, 25 bp, Homo sapien
gaaaaagcttctcaacatttgggaa

SEQ ID NO: 4387484 - DNA, 25 bp, Homo sapien
cacagaattacgatacgactcagca

SEQ ID NO: 4387485 - DNA, 25 bp, Homo sapien
gaactggctacagctaggaaacctg

SEQ ID NO: 4387486 - DNA, 25 bp, Homo sapien
ctgatccagctacctaaatccaggg

SEQ ID NO: 4387487 - DNA, 25 bp, Homo sapien
caagttagtgaacaaggaactggct

SEQ ID NO: 4387488 - DNA, 25 bp, Homo sapien
ggttggtctaaagaacacatcctcc

SEQ ID NO: 4387489 - DNA, 25 bp, Homo sapien
gaatagtacaatgtgtgcccttttg

SEQ ID NO: 4387490 - DNA, 25 bp, Homo sapien
tgactggcttaactgagcataatgt

SEQ ID NO: 4387491 - DNA, 25 bp, Homo sapien
tcatatgccataagactgtcttaaa

SEQ ID NO: 4387492 - DNA, 25 bp, Homo sapien
caagatttatgcacgttgcagcatg

SEQ ID NO: 4387493 - DNA, 25 bp, Homo sapien
taaaggaaaatctgttgatataata

SEQ ID NO: 4387494 - DNA, 25 bp, Homo sapien
agttaaaggaaaatctgttgatata

SEQ ID NO: 4387495 - DNA, 25 bp, Homo sapien
aaggaaaatctgttgatataatagc

SEQ ID NO: 4387496 - DNA, 25 bp, Homo sapien
gaaaatctgttgatataatagcttc

SEQ ID NO: 4387497 - DNA, 25 bp, Homo sapien
taaatacccgccaggatggctgcaa

SEQ ID NO: 4387498 - DNA, 25 bp, Homo sapien
tatggccctacctcatgaaggacag

SEQ ID NO: 4387499 - DNA, 25 bp, Homo sapien
tcgatacacgagttgggatgcctag

SEQ ID NO: 4387500 - DNA, 25 bp, Homo sapien
gcaaattaaccgcagagcagcagga

SEQ ID NO: 4387501 - DNA, 25 bp, Homo sapien
ggccacgaaccaatatgacttttaa

SEQ ID NO: 4387502 - DNA, 25 bp, Homo sapien
atccaaggcactaggccacgaacca

SEQ ID NO: 4387503 - DNA, 25 bp, Homo sapien
ggcactaggccacgaaccaatatga

SEQ ID NO: 4387504 - DNA, 25 bp, Homo sapien
ctaggccacgaaccaatatgacttt

SEQ ID NO: 4387505 - DNA, 25 bp, Homo sapien
gctaatgggatctcatttcaaaaca

SEQ ID NO: 4387506 - DNA, 25 bp, Homo sapien
aagctaatgggatctcatttcaaaa

SEQ ID NO: 4387507 - DNA, 25 bp, Homo sapien
aaaaaaaagctaatgggatctcatt

SEQ ID NO: 4387508 - DNA, 25 bp, Homo sapien
aaaagctaatgggatctcatttcaa

SEQ ID NO: 4387509 - DNA, 25 bp, Homo sapien
tatcaaccctagaccttagagagtg

SEQ ID NO: 4387510 - DNA, 25 bp, Homo sapien
tataaatgtttagagcggcccagac

SEQ ID NO: 4387511 - DNA, 25 bp, Homo sapien
caatacatttttcaggtaggcacca

SEQ ID NO: 4387512 - DNA, 25 bp, Homo sapien
tataaacatgggtaaggtaagcgca

SEQ ID NO: 4387513 - DNA, 25 bp, Homo sapien
gactatgtacattctagaaggttcc

SEQ ID NO: 4387514 - DNA, 25 bp, Homo sapien
acagactatgtacattctagaaggt

SEQ ID NO: 4387515 - DNA, 25 bp, Homo sapien
ctatgtacattctagaaggttcctt

SEQ ID NO: 4387516 - DNA, 25 bp, Homo sapien
tctgttgtatttattgtacagacta

SEQ ID NO: 4387517 - DNA, 25 bp, Homo sapien
gtcatcaataagaacaggccatgct

SEQ ID NO: 4387518 - DNA, 25 bp, Homo sapien
tcatcaataagaacaggccatgctc

SEQ ID NO: 4387519 - DNA, 25 bp, Homo sapien
tttgagggcgtgcaaattccacaaa

SEQ ID NO: 4387520 - DNA, 25 bp, Homo sapien
catctgcaatcatcgtactgaagtc

SEQ ID NO: 4387521 - DNA, 25 bp, Homo sapien
gtcatctgcaatcatcgtactgaag

SEQ ID NO: 4387522 - DNA, 25 bp, Homo sapien
tcatctgcaatcatcgtactgaagt

SEQ ID NO: 4387523 - DNA, 25 bp, Homo sapien
atgtcatctgcaatcatcgtactga

SEQ ID NO: 4387524 - DNA, 25 bp, Homo sapien
aatttattccataagtctaagaatt

SEQ ID NO: 4387525 - DNA, 25 bp, Homo sapien
cactaagttccagtaggcaatggcc

SEQ ID NO: 4387526 - DNA, 25 bp, Homo sapien
taagcactaagttccagtaggcaat

SEQ ID NO: 4387527 - DNA, 25 bp, Homo sapien
attaagcactaagttccagtaggca

SEQ ID NO: 4387528 - DNA, 25 bp, Homo sapien
gaaacctgcaagactgacccttaac

SEQ ID NO: 4387529 - DNA, 25 bp, Homo sapien
gaaatcaattataggctgcatgcag

SEQ ID NO: 4387530 - DNA, 25 bp, Homo sapien
cacacacagtagctggaaacctgca

SEQ ID NO: 4387531 - DNA, 25 bp, Homo sapien
tcagaaactgctaagtcgacaaact

SEQ ID NO: 4387532 - DNA, 25 bp, Homo sapien
gatcacctttactggctataccctt

SEQ ID NO: 4387533 - DNA, 25 bp, Homo sapien
tcactctgtagctctcttggatctc

SEQ ID NO: 4387534 - DNA, 25 bp, Homo sapien
gcactcagagtcttctacttttata

SEQ ID NO: 4387535 - DNA, 25 bp, Homo sapien
ggtaaccttgaaatagcactcagag

SEQ ID NO: 4387536 - DNA, 25 bp, Homo sapien
tctatggttggaacttagattattt

SEQ ID NO: 4387537 - DNA, 25 bp, Homo sapien
cttctatggttggaacttagattat

SEQ ID NO: 4387538 - DNA, 25 bp, Homo sapien
cagcttcttctatggttggaactta

SEQ ID NO: 4387539 - DNA, 25 bp, Homo sapien
tcttctatggttggaacttagatta

SEQ ID NO: 4387540 - DNA, 25 bp, Homo sapien
tattgaacagaatagcaatgtcttc

SEQ ID NO: 4387541 - DNA, 25 bp, Homo sapien
tagcaatgtcttcttcttcccacat

SEQ ID NO: 4387542 - DNA, 25 bp, Homo sapien
ctttattgaacagaatagcaatgtc

SEQ ID NO: 4387543 - DNA, 25 bp, Homo sapien
attgaacagaatagcaatgtcttct

SEQ ID NO: 4387544 - DNA, 25 bp, Homo sapien
tctgtgataggaatggacaacttcc

SEQ ID NO: 4387545 - DNA, 25 bp, Homo sapien
aaaataattggaatgctggcctgga

SEQ ID NO: 4387546 - DNA, 25 bp, Homo sapien
cagtccctgcatgttcaaaaggaga

SEQ ID NO: 4387547 - DNA, 25 bp, Homo sapien
tatggccctaaaaatgatatggctg

SEQ ID NO: 4387548 - DNA, 25 bp, Homo sapien
tgtattgtacactgtatggctgtgg

SEQ ID NO: 4387549 - DNA, 25 bp, Homo sapien
tattgactaaggtccatattctaca

SEQ ID NO: 4387550 - DNA, 25 bp, Homo sapien
cattgctgtgccatcgatcttcaga

SEQ ID NO: 4387551 - DNA, 25 bp, Homo sapien
gatttccatataccctcttccctag

SEQ ID NO: 4387552 - DNA, 25 bp, Homo sapien
taaagtggaattagtgcagaaggcc

SEQ ID NO: 4387553 - DNA, 25 bp, Homo sapien
caatctaatccgttcatataatctg

SEQ ID NO: 4387554 - DNA, 25 bp, Homo sapien
aaatcctatctatattgagcaatca

SEQ ID NO: 4387555 - DNA, 25 bp, Homo sapien
caatcaagttggaaaggaggcttta

SEQ ID NO: 4387556 - DNA, 25 bp, Homo sapien
tattacaaaaacgacactgtcaatg

SEQ ID NO: 4387557 - DNA, 25 bp, Homo sapien
ttacaaaaacgacactgtcaatgta

SEQ ID NO: 4387558 - DNA, 25 bp, Homo sapien
ctattacaaaaacgacactgtcaat

SEQ ID NO: 4387559 - DNA, 25 bp, Homo sapien
acaaaaacgacactgtcaatgtatt

SEQ ID NO: 4387560 - DNA, 25 bp, Homo sapien
gtcctggttctttcaattcttgttc

SEQ ID NO: 4387561 - DNA, 25 bp, Homo sapien
cttaaatcgtcctggttctttcaat

SEQ ID NO: 4387562 - DNA, 25 bp, Homo sapien
cctttagtttttctatgctgtcaca

SEQ ID NO: 4387563 - DNA, 25 bp, Homo sapien
caattcttgttccatcttgggtatc

SEQ ID NO: 4387564 - DNA, 25 bp, Homo sapien
aataatcaacacactaatgctggct

SEQ ID NO: 4387565 - DNA, 25 bp, Homo sapien
taatcaacacactaatgctggctgg

SEQ ID NO: 4387566 - DNA, 25 bp, Homo sapien
aatcaacacactaatgctggctgga

SEQ ID NO: 4387567 - DNA, 25 bp, Homo sapien
gcaataatcaacacactaatgctgg

SEQ ID NO: 4387568 - DNA, 25 bp, Homo sapien
tccaattttattctcatcttgaggg

SEQ ID NO: 4387569 - DNA, 25 bp, Homo sapien
attccaattttattctcatcttgag

SEQ ID NO: 4387570 - DNA, 25 bp, Homo sapien
ctattccaattttattctcatcttg

SEQ ID NO: 4387571 - DNA, 25 bp, Homo sapien
ccaattttattctcatcttgagggt

SEQ ID NO: 4387572 - DNA, 25 bp, Homo sapien
ttatctgttgcaacatctaacttcc

SEQ ID NO: 4387573 - DNA, 25 bp, Homo sapien
aattatctgttgcaacatctaactt

SEQ ID NO: 4387574 - DNA, 25 bp, Homo sapien
aactttatccttctgcgatgatttc

SEQ ID NO: 4387575 - DNA, 25 bp, Homo sapien
actttatccttctgcgatgatttca

SEQ ID NO: 4387576 - DNA, 25 bp, Homo sapien
aactgaaactctatgtaaaatcaca

SEQ ID NO: 4387577 - DNA, 25 bp, Homo sapien
acagaagcgaaggaagctcaaccac

SEQ ID NO: 4387578 - DNA, 25 bp, Homo sapien
cagttttggaagagaaataggacag

SEQ ID NO: 4387579 - DNA, 25 bp, Homo sapien
ttctatatggctaactaaacattct

SEQ ID NO: 4387580 - DNA, 25 bp, Homo sapien
gggtcctgagagcatacagaaaggc

SEQ ID NO: 4387581 - DNA, 25 bp, Homo sapien
ctctgagatggatgcacaagcagac

SEQ ID NO: 4387582 - DNA, 25 bp, Homo sapien
aaggtgacatgatcagacgcaggga

SEQ ID NO: 4387583 - DNA, 25 bp, Homo sapien
gacgcagggaagaagatgacatgat

SEQ ID NO: 4387584 - DNA, 25 bp, Homo sapien
gaaaagaaggcaggatactctctcc

SEQ ID NO: 4387585 - DNA, 25 bp, Homo sapien
agagcctagcagagacccttggtct

SEQ ID NO: 4387586 - DNA, 25 bp, Homo sapien
gaatcacttcattcccttagccaga

SEQ ID NO: 4387587 - DNA, 25 bp, Homo sapien
gacatttctcctagttgtatccagg

SEQ ID NO: 4387588 - DNA, 25 bp, Homo sapien
gacagatcagagaaccttaaccaga

SEQ ID NO: 4387589 - DNA, 25 bp, Homo sapien
tctggcccaaacagacagatcgtaa

SEQ ID NO: 4387590 - DNA, 25 bp, Homo sapien
tctttccataaatcatactgcttgc

SEQ ID NO: 4387591 - DNA, 25 bp, Homo sapien
catcaacttccagattagacagatc

SEQ ID NO: 4387592 - DNA, 25 bp, Homo sapien
gattaacctgcaagtacaccaacca

SEQ ID NO: 4387593 - DNA, 25 bp, Homo sapien
actgtgactgtcagtgaccactgca

SEQ ID NO: 4387594 - DNA, 25 bp, Homo sapien
atacctttctcccttgagtgacaga

SEQ ID NO: 4387595 - DNA, 25 bp, Homo sapien
gtgcaggaagtgttggagattaacc

SEQ ID NO: 4387596 - DNA, 25 bp, Homo sapien
cctgatataacatattggcataact

SEQ ID NO: 4387597 - DNA, 25 bp, Homo sapien
tgcagggtcaatcacctttgttgaa

SEQ ID NO: 4387598 - DNA, 25 bp, Homo sapien
gaaggaaaaatcatagcttaagtca

SEQ ID NO: 4387599 - DNA, 25 bp, Homo sapien
agaactattcattctactatactat

SEQ ID NO: 4387600 - DNA, 25 bp, Homo sapien
taagccacaaaggtgtaccaggcag

SEQ ID NO: 4387601 - DNA, 25 bp, Homo sapien
gctactgagttctaccaggccaaga

SEQ ID NO: 4387602 - DNA, 25 bp, Homo sapien
gaataaagctggagtatacctgacc

SEQ ID NO: 4387603 - DNA, 25 bp, Homo sapien
caagaactgacagtacggactccag

SEQ ID NO: 4387604 - DNA, 25 bp, Homo sapien
gaacaaaaccctcatagtactctta

SEQ ID NO: 4387605 - DNA, 25 bp, Homo sapien
aaatacttgtacaggttatggccag

SEQ ID NO: 4387606 - DNA, 25 bp, Homo sapien
tcaaatactaagcaaaacgaacaaa

SEQ ID NO: 4387607 - DNA, 25 bp, Homo sapien
acagggcactctaagtcagggttcc

SEQ ID NO: 4387608 - DNA, 25 bp, Homo sapien
tctgtattactttagtcccctctta

SEQ ID NO: 4387609 - DNA, 25 bp, Homo sapien
atcactaactccagcctaaacaaca

SEQ ID NO: 4387610 - DNA, 25 bp, Homo sapien
ggctctgtattactttagtcccctc

SEQ ID NO: 4387611 - DNA, 25 bp, Homo sapien
tgtattactttagtcccctcttatc

SEQ ID NO: 4387612 - DNA, 25 bp, Homo sapien
cagcccctacggtgagttagctaaa

SEQ ID NO: 4387613 - DNA, 25 bp, Homo sapien
tagctaaaccagagaatatcacgac

SEQ ID NO: 4387614 - DNA, 25 bp, Homo sapien
tagaagcttacaagctgaactctcc

SEQ ID NO: 4387615 - DNA, 25 bp, Homo sapien
gcaaccacaggctagcaccagcatg

SEQ ID NO: 4387616 - DNA, 25 bp, Homo sapien
tgaattcctgaacaggtgatgagta

SEQ ID NO: 4387617 - DNA, 25 bp, Homo sapien
ggatgatgcggatctggagaccatc

SEQ ID NO: 4387618 - DNA, 25 bp, Homo sapien
ctacgaaccacttgatgcctgaatt

SEQ ID NO: 4387619 - DNA, 25 bp, Homo sapien
tgatgagtatttccgggaccccact

SEQ ID NO: 4387620 - DNA, 25 bp, Homo sapien
gaagagcacacatttcagctgtggc

SEQ ID NO: 4387621 - DNA, 25 bp, Homo sapien
agagcacacatttcagctgtggctg

SEQ ID NO: 4387622 - DNA, 25 bp, Homo sapien
ctgaagagcacacatttcagctgtg

SEQ ID NO: 4387623 - DNA, 25 bp, Homo sapien
gagcacacatttcagctgtggctga

SEQ ID NO: 4387624 - DNA, 25 bp, Homo sapien
taaacaactcgaccacaagggtctg

SEQ ID NO: 4387625 - DNA, 25 bp, Homo sapien
gaagagcgtccagcagagtcaggta

SEQ ID NO: 4387626 - DNA, 25 bp, Homo sapien
ggaattcaactcacgctcagactgt

SEQ ID NO: 4387627 - DNA, 25 bp, Homo sapien
tgtacaatgccaaacagcgcttctg

SEQ ID NO: 4387628 - DNA, 25 bp, Homo sapien
aagggcgctcgctagtctgtgttcc

SEQ ID NO: 4387629 - DNA, 25 bp, Homo sapien
ttctccaaaagcatgggacgcctcg

SEQ ID NO: 4387630 - DNA, 25 bp, Homo sapien
taaaataggtgctcgaaagggcgct

SEQ ID NO: 4387631 - DNA, 25 bp, Homo sapien
tgagaacaggttgcacttccgtacc

SEQ ID NO: 4387632 - DNA, 25 bp, Homo sapien
gctcatgcgcagtgcggggcggccc

SEQ ID NO: 4387633 - DNA, 25 bp, Homo sapien
cggctcctctcacgggcttgcccgg

SEQ ID NO: 4387634 - DNA, 25 bp, Homo sapien
cggcggctcctctcacgggcttgcc

SEQ ID NO: 4387635 - DNA, 25 bp, Homo sapien
ggctccgcagcgaatggacggcggc

SEQ ID NO: 4387636 - DNA, 25 bp, Homo sapien
cggagggacggaggcaggcggaggg

SEQ ID NO: 4387637 - DNA, 25 bp, Homo sapien
ggacgaccacggccgggtctacgca

SEQ ID NO: 4387638 - DNA, 25 bp, Homo sapien
gacgaccacggccgggtctacgcag

SEQ ID NO: 4387639 - DNA, 25 bp, Homo sapien
acgaccacggccgggtctacgcagg

SEQ ID NO: 4387640 - DNA, 25 bp, Homo sapien
gcggcggataagttgagcagctggg

SEQ ID NO: 4387641 - DNA, 25 bp, Homo sapien
gaaacggatggttgaggagcttcat

SEQ ID NO: 4387642 - DNA, 25 bp, Homo sapien
gaagcgggcacgagcggcggcggat

SEQ ID NO: 4387643 - DNA, 25 bp, Homo sapien
gggcggctgaaacggatggttgagg

SEQ ID NO: 4387644 - DNA, 25 bp, Homo sapien
ctctcgcctgcgtttggacacttcc

SEQ ID NO: 4387645 - DNA, 25 bp, Homo sapien
tctcgcctgcgtttggacacttcct

SEQ ID NO: 4387646 - DNA, 25 bp, Homo sapien
ctcgcctgcgtttggacacttcctc

SEQ ID NO: 4387647 - DNA, 25 bp, Homo sapien
tagaggcatggacttgcagtaacag

SEQ ID NO: 4387648 - DNA, 25 bp, Homo sapien
tccaccctcatggtagaggcatgga

SEQ ID NO: 4387649 - DNA, 25 bp, Homo sapien
tcacctcaaggtacatgtggatctg

SEQ ID NO: 4387650 - DNA, 25 bp, Homo sapien
gatctgttgatcttaactcctccac

SEQ ID NO: 4387651 - DNA, 25 bp, Homo sapien
atctcagccttgtttagaaccttgc

SEQ ID NO: 4387652 - DNA, 25 bp, Homo sapien
tattcttgcagctcaatgatcttca

SEQ ID NO: 4387653 - DNA, 25 bp, Homo sapien
gttctatcagattgattattttctt

SEQ ID NO: 4387654 - DNA, 25 bp, Homo sapien
tgtattcttgcagctcaatgatctt

SEQ ID NO: 4387655 - DNA, 25 bp, Homo sapien
gagctgccaaccaaggccaacttgg

SEQ ID NO: 4387656 - DNA, 25 bp, Homo sapien
aaagaaccagtactccataggcaga

SEQ ID NO: 4387657 - DNA, 25 bp, Homo sapien
gaggagtagctgctctccaagagcc

SEQ ID NO: 4387658 - DNA, 25 bp, Homo sapien
caaaaagttggaagatgtgaccgcc

SEQ ID NO: 4387659 - DNA, 25 bp, Homo sapien
tgcccacactgaggcgcaagccgga

SEQ ID NO: 4387660 - DNA, 25 bp, Homo sapien
actgaggcgcaagccggacacaggc

SEQ ID NO: 4387661 - DNA, 25 bp, Homo sapien
gaggcgcaagccggacacaggcttc

SEQ ID NO: 4387662 - DNA, 25 bp, Homo sapien
cacactgaggcgcaagccggacaca

SEQ ID NO: 4387663 - DNA, 25 bp, Homo sapien
tctgttaagtggttgacaggtgcct

SEQ ID NO: 4387664 - DNA, 25 bp, Homo sapien
tggttgacaggtgcctgggtcacac

SEQ ID NO: 4387665 - DNA, 25 bp, Homo sapien
cagcaacacagtctgttaagtggtt

SEQ ID NO: 4387666 - DNA, 25 bp, Homo sapien
tgggtcacaccggagcaggctacag

SEQ ID NO: 4387667 - DNA, 25 bp, Homo sapien
cattttcatcataacagcaactgga

SEQ ID NO: 4387668 - DNA, 25 bp, Homo sapien
gcattcagcaggctcaggcttttaa

SEQ ID NO: 4387669 - DNA, 25 bp, Homo sapien
tagttgttgaactccagggcacctg

SEQ ID NO: 4387670 - DNA, 25 bp, Homo sapien
gaaactttccaatcacaaacactag

SEQ ID NO: 4387671 - DNA, 25 bp, Homo sapien
gagagaagacactacttaactggcc

SEQ ID NO: 4387672 - DNA, 25 bp, Homo sapien
gataattagtgacccaaatgcatga

SEQ ID NO: 4387673 - DNA, 25 bp, Homo sapien
ttaactggccatttccttgctggag

SEQ ID NO: 4387674 - DNA, 25 bp, Homo sapien
gaaaggtgttcagcataagcataca

SEQ ID NO: 4387675 - DNA, 25 bp, Homo sapien
ccgattcccttttgtctgattcttc

SEQ ID NO: 4387676 - DNA, 25 bp, Homo sapien
ttccgattcccttttgtctgattct

SEQ ID NO: 4387677 - DNA, 25 bp, Homo sapien
ttattccgattcccttttgtctgat

SEQ ID NO: 4387678 - DNA, 25 bp, Homo sapien
tattccgattcccttttgtctgatt

SEQ ID NO: 4387679 - DNA, 25 bp, Homo sapien
tttctttactgtgccatcctttgga

SEQ ID NO: 4387680 - DNA, 25 bp, Homo sapien
ttctttactgtgccatcctttggag

SEQ ID NO: 4387681 - DNA, 25 bp, Homo sapien
tctggtgtagctcgcagttctcaac

SEQ ID NO: 4387682 - DNA, 25 bp, Homo sapien
gagtatacaccaagtcaagaaaggg

SEQ ID NO: 4387683 - DNA, 25 bp, Homo sapien
tttcaacgatatgactgggaagctc

SEQ ID NO: 4387684 - DNA, 25 bp, Homo sapien
gaattgcacctaggaagctttcaac

SEQ ID NO: 4387685 - DNA, 25 bp, Homo sapien
cgatcataaccatgagggaatctcc

SEQ ID NO: 4387686 - DNA, 25 bp, Homo sapien
atgagggaatctcccgctttcactt

SEQ ID NO: 4387687 - DNA, 25 bp, Homo sapien
catcttcatggcgatcataaccatg

SEQ ID NO: 4387688 - DNA, 25 bp, Homo sapien
ggaatctcccgctttcactttgtct

SEQ ID NO: 4387689 - DNA, 25 bp, Homo sapien
tgcactggtcaaatcagaggcctac

SEQ ID NO: 4387690 - DNA, 25 bp, Homo sapien
tggtcaaatcagaggcctacagccc

SEQ ID NO: 4387691 - DNA, 25 bp, Homo sapien
tactggtcaaatcagaggcctacag

SEQ ID NO: 4387692 - DNA, 25 bp, Homo sapien
aaatgcactggtcaaatcagaggcc

SEQ ID NO: 4387693 - DNA, 25 bp, Homo sapien
taaaaggagactacggatactgatc

SEQ ID NO: 4387694 - DNA, 25 bp, Homo sapien
gagggatctggcctcatgaaagaga

SEQ ID NO: 4387695 - DNA, 25 bp, Homo sapien
tgaggagactctactgtattcaagt

SEQ ID NO: 4387696 - DNA, 25 bp, Homo sapien
gctagggtctaaatgtctatatccc

SEQ ID NO: 4387697 - DNA, 25 bp, Homo sapien
ttttcaatggttccagtcataggag

SEQ ID NO: 4387698 - DNA, 25 bp, Homo sapien
tggttccagtcataggagctaaggg

SEQ ID NO: 4387699 - DNA, 25 bp, Homo sapien
gggccgccctgagtttcttgtgagc

SEQ ID NO: 4387700 - DNA, 25 bp, Homo sapien
gaatgtcaatctcaatacttccttc

SEQ ID NO: 4387701 - DNA, 25 bp, Homo sapien
gacatcaaagccctgagataccacc

SEQ ID NO: 4387702 - DNA, 25 bp, Homo sapien
ggaaaagtgttcagacatcaaagcc

SEQ ID NO: 4387703 - DNA, 25 bp, Homo sapien
ttccccacaaggaacaactggtcca

SEQ ID NO: 4387704 - DNA, 25 bp, Homo sapien
caccaggattccagttgtcaggggg

SEQ ID NO: 4387705 - DNA, 25 bp, Homo sapien
catttcaggtaagtgcagtctccct

SEQ ID NO: 4387706 - DNA, 25 bp, Homo sapien
tccctcgctgtaaagattaccaagg

SEQ ID NO: 4387707 - DNA, 25 bp, Homo sapien
tttccaggataatcagcttcgcttt

SEQ ID NO: 4387708 - DNA, 25 bp, Homo sapien
taatcagcttcgctttactagcaac

SEQ ID NO: 4387709 - DNA, 25 bp, Homo sapien
taagatcagaatcaattcttcacta

SEQ ID NO: 4387710 - DNA, 25 bp, Homo sapien
tcagaatcaattcttcactattggt

SEQ ID NO: 4387711 - DNA, 25 bp, Homo sapien
ataagatcagaatcaattcttcact

SEQ ID NO: 4387712 - DNA, 25 bp, Homo sapien
gatcagaatcaattcttcactattg

SEQ ID NO: 4387713 - DNA, 25 bp, Homo sapien
ccacaatgctagtgtagaagtcaca

SEQ ID NO: 4387714 - DNA, 25 bp, Homo sapien
tatcaacacgtaggcccaatcatgg

SEQ ID NO: 4387715 - DNA, 25 bp, Homo sapien
tacccaagtaggcagactttccatg

SEQ ID NO: 4387716 - DNA, 25 bp, Homo sapien
tactttaccagctaacagggacaag

SEQ ID NO: 4387717 - DNA, 25 bp, Homo sapien
catgctataagacccatcatggtta

SEQ ID NO: 4387718 - DNA, 25 bp, Homo sapien
tataagacccatcatggttatacgt

SEQ ID NO: 4387719 - DNA, 25 bp, Homo sapien
gacccatcatggttatacgttacag

SEQ ID NO: 4387720 - DNA, 25 bp, Homo sapien
ctgcatgctataagacccatcatgg

SEQ ID NO: 4387721 - DNA, 25 bp, Homo sapien
tctgcgcccatgtaagatagagaac

SEQ ID NO: 4387722 - DNA, 25 bp, Homo sapien
gttttacggtgcctcaatctgcgcc

SEQ ID NO: 4387723 - DNA, 25 bp, Homo sapien
gagaatggaatctgccacctgatca

SEQ ID NO: 4387724 - DNA, 25 bp, Homo sapien
tgactcactaaatctccgagccttg

SEQ ID NO: 4387725 - DNA, 25 bp, Homo sapien
tctcactggaggcttagataatcat

SEQ ID NO: 4387726 - DNA, 25 bp, Homo sapien
gttattggcacacaataaagtataa

SEQ ID NO: 4387727 - DNA, 25 bp, Homo sapien
gacataatgttattggcacacaata

SEQ ID NO: 4387728 - DNA, 25 bp, Homo sapien
acatctcactggaggcttagataat

SEQ ID NO: 4387729 - DNA, 25 bp, Homo sapien
taactccagagtatgcctagattac

SEQ ID NO: 4387730 - DNA, 25 bp, Homo sapien
gttgattatccgaggagacgaaaac

SEQ ID NO: 4387731 - DNA, 25 bp, Homo sapien
cagagtatgcctagattacatgagt

SEQ ID NO: 4387732 - DNA, 25 bp, Homo sapien
tacatgagtatggaaatggttgatt

SEQ ID NO: 4387733 - DNA, 25 bp, Homo sapien
tagtcagagctgatgttccgacccc

SEQ ID NO: 4387734 - DNA, 25 bp, Homo sapien
cctggctgaatctgaggaggtcctc

SEQ ID NO: 4387735 - DNA, 25 bp, Homo sapien
gatgctccacccaaataggaaagtg

SEQ ID NO: 4387736 - DNA, 25 bp, Homo sapien
tggtgacttaagacgaacatggcgg

SEQ ID NO: 4387737 - DNA, 25 bp, Homo sapien
tactaaagtacaggaactccagggc

SEQ ID NO: 4387738 - DNA, 25 bp, Homo sapien
tatcctggagtgtgggttcaaaccc

SEQ ID NO: 4387739 - DNA, 25 bp, Homo sapien
gaaagtgcctccagttacaccacgg

SEQ ID NO: 4387740 - DNA, 25 bp, Homo sapien
catgtatttaactggcgcgaatgcc

SEQ ID NO: 4387741 - DNA, 25 bp, Homo sapien
ccgtgcctggcacttctggtatctt

SEQ ID NO: 4387742 - DNA, 25 bp, Homo sapien
attttataaatagggacaggatctc

SEQ ID NO: 4387743 - DNA, 25 bp, Homo sapien
cctggcacttctggtatcttttttt

SEQ ID NO: 4387744 - DNA, 25 bp, Homo sapien
ttacgggtgggagataccgtgcctg

SEQ ID NO: 4387745 - DNA, 25 bp, Homo sapien
tatcatagaattctggtcctgctgc

SEQ ID NO: 4387746 - DNA, 25 bp, Homo sapien
gaaaatcagtcactaagtcgagcca

SEQ ID NO: 4387747 - DNA, 25 bp, Homo sapien
gacatgtcacattcaaggttagcca

SEQ ID NO: 4387748 - DNA, 25 bp, Homo sapien
gcagaagggatacagtgaccagcta

SEQ ID NO: 4387749 - DNA, 25 bp, Homo sapien
gtttttaccatctttaagagtcatg

SEQ ID NO: 4387750 - DNA, 25 bp, Homo sapien
agtcatgtttctggtatacgagata

SEQ ID NO: 4387751 - DNA, 25 bp, Homo sapien
tatacgagatattcagtcttcttcc

SEQ ID NO: 4387752 - DNA, 25 bp, Homo sapien
cactgctagacgaaaatggagagaa

SEQ ID NO: 4387753 - DNA, 25 bp, Homo sapien
gctgaaaaagcttccgattctggag

SEQ ID NO: 4387754 - DNA, 25 bp, Homo sapien
caagtatctggaatctgaactgttc

SEQ ID NO: 4387755 - DNA, 25 bp, Homo sapien
tccgaaagtcagagctagcctgaaa

SEQ ID NO: 4387756 - DNA, 25 bp, Homo sapien
gggatgctcaaactgtatagggtaa

SEQ ID NO: 4387757 - DNA, 25 bp, Homo sapien
cactatggcccttcctatgcttgga

SEQ ID NO: 4387758 - DNA, 25 bp, Homo sapien
tgaaactgtaagctacctgatgagg

SEQ ID NO: 4387759 - DNA, 25 bp, Homo sapien
gcaatgcatatgtgtggtagccagg

SEQ ID NO: 4387760 - DNA, 25 bp, Homo sapien
tcacaggatggaaaaagcggaagta

SEQ ID NO: 4387761 - DNA, 25 bp, Homo sapien
cctgaagagtgaaagtgtcggtcat

SEQ ID NO: 4387762 - DNA, 25 bp, Homo sapien
tgaaatcagtgtgcacgttcccagc

SEQ ID NO: 4387763 - DNA, 25 bp, Homo sapien
gccttccgactgagcaacaactgtt

SEQ ID NO: 4387764 - DNA, 25 bp, Homo sapien
gaagtcaatgttggtgtgcagtcca

SEQ ID NO: 4387765 - DNA, 25 bp, Homo sapien
tcagttttgtcaatgccgcctggcg

SEQ ID NO: 4387766 - DNA, 25 bp, Homo sapien
acacgaccagcttcgcaatcatggg

SEQ ID NO: 4387767 - DNA, 25 bp, Homo sapien
gcaatcatggggtcataatgcacgg

SEQ ID NO: 4387768 - DNA, 25 bp, Homo sapien
attgtactgacgaaggctgtacctc

SEQ ID NO: 4387769 - DNA, 25 bp, Homo sapien
tattctagcttcgaaggcatggccc

SEQ ID NO: 4387770 - DNA, 25 bp, Homo sapien
tagagaggtgcactaatgggcctgc

SEQ ID NO: 4387771 - DNA, 25 bp, Homo sapien
catggccctgcagagttatttcttc

SEQ ID NO: 4387772 - DNA, 25 bp, Homo sapien
gaagttattgctaggatcttctgca

SEQ ID NO: 4387773 - DNA, 25 bp, Homo sapien
tccccagatgataaaagctggcttc

SEQ ID NO: 4387774 - DNA, 25 bp, Homo sapien
tctttctgaagagccttgacaagct

SEQ ID NO: 4387775 - DNA, 25 bp, Homo sapien
ttgaactctataaaccaggtccagc

SEQ ID NO: 4387776 - DNA, 25 bp, Homo sapien
taagttctagtgtccctccccagat

SEQ ID NO: 4387777 - DNA, 25 bp, Homo sapien
ctcagtaacaggatgttccacttgc

SEQ ID NO: 4387778 - DNA, 25 bp, Homo sapien
gagtccataataaactccacagtcc

SEQ ID NO: 4387779 - DNA, 25 bp, Homo sapien
aggatgttccacttgcagccttgta

SEQ ID NO: 4387780 - DNA, 25 bp, Homo sapien
taagctgccactccaccaagtcagt

SEQ ID NO: 4387781 - DNA, 25 bp, Homo sapien
gaagcctgagctgtaattgacaaat

SEQ ID NO: 4387782 - DNA, 25 bp, Homo sapien
aggtcacagggcaagctgcttgtcc

SEQ ID NO: 4387783 - DNA, 25 bp, Homo sapien
tctgatccggcatctaaggagctta

SEQ ID NO: 4387784 - DNA, 25 bp, Homo sapien
tcctggtagctcagtgtggacaact

SEQ ID NO: 4387785 - DNA, 25 bp, Homo sapien
aacataatttacagctttagcagct

SEQ ID NO: 4387786 - DNA, 25 bp, Homo sapien
cataatttacagctttagcagctct

SEQ ID NO: 4387787 - DNA, 25 bp, Homo sapien
acataatttacagctttagcagctc

SEQ ID NO: 4387788 - DNA, 25 bp, Homo sapien
ccatggtgatcaccaaacacctgga

SEQ ID NO: 4387789 - DNA, 25 bp, Homo sapien
tgatcttctgatgtcgcctctgcac

SEQ ID NO: 4387790 - DNA, 25 bp, Homo sapien
gcacactacagtctctttcaaacaa

SEQ ID NO: 4387791 - DNA, 25 bp, Homo sapien
gatgtcgcctctgcacactacagtc

SEQ ID NO: 4387792 - DNA, 25 bp, Homo sapien
gggctgcacgccagctccccggttc

SEQ ID NO: 4387793 - DNA, 25 bp, Homo sapien
cgggcaccggcggccacactgcctc

SEQ ID NO: 4387794 - DNA, 25 bp, Homo sapien
ggccacactgcctcggccgacccac

SEQ ID NO: 4387795 - DNA, 25 bp, Homo sapien
agccggctccgtggacagcagggcg

SEQ ID NO: 4387796 - DNA, 25 bp, Homo sapien
tgggcccacggcaggctgttcgcgg

SEQ ID NO: 4387797 - DNA, 25 bp, Homo sapien
cagcagggcgaagcgggtaatgtag

SEQ ID NO: 4387798 - DNA, 25 bp, Homo sapien
ggtaatgtaggggtgcagcaccggc

SEQ ID NO: 4387799 - DNA, 25 bp, Homo sapien
tacaaacttctcgatcagcatagca

SEQ ID NO: 4387800 - DNA, 25 bp, Homo sapien
cattgaaagacttcttagcttctct

SEQ ID NO: 4387801 - DNA, 25 bp, Homo sapien
cgtgctgactctaactgttcttgaa

SEQ ID NO: 4387802 - DNA, 25 bp, Homo sapien
cagcatagcatcatcattgaaagac

SEQ ID NO: 4387803 - DNA, 25 bp, Homo sapien
taatcatgacaggatagccaattct

SEQ ID NO: 4387804 - DNA, 25 bp, Homo sapien
caccccggacggctttaatcatgac

SEQ ID NO: 4387805 - DNA, 25 bp, Homo sapien
tcctggcgtgttccttcaggcactg

SEQ ID NO: 4387806 - DNA, 25 bp, Homo sapien
caggcactggtctgattggtcctca

SEQ ID NO: 4387807 - DNA, 25 bp, Homo sapien
tgtctctaattgcagatggaggagg

SEQ ID NO: 4387808 - DNA, 25 bp, Homo sapien
ttccttcttgcttacaaagttcagc

SEQ ID NO: 4387809 - DNA, 25 bp, Homo sapien
ttcttgcttacaaagttcagcaaat

SEQ ID NO: 4387810 - DNA, 25 bp, Homo sapien
atgtctctaattgcagatggaggag

SEQ ID NO: 4387811 - DNA, 25 bp, Homo sapien
agaggaaattcagtaactgaaggac

SEQ ID NO: 4387812 - DNA, 25 bp, Homo sapien
gaaattcagtaactgaaggacagca

SEQ ID NO: 4387813 - DNA, 25 bp, Homo sapien
ggaaattcagtaactgaaggacagc

SEQ ID NO: 4387814 - DNA, 25 bp, Homo sapien
attcagtaactgaaggacagcaaga

SEQ ID NO: 4387815 - DNA, 25 bp, Homo sapien
catgagactcattcatgaccatgag

SEQ ID NO: 4387816 - DNA, 25 bp, Homo sapien
atgagactcattcatgaccatgaga

SEQ ID NO: 4387817 - DNA, 25 bp, Homo sapien
atgtctcgcatctggatcacatgga

SEQ ID NO: 4387818 - DNA, 25 bp, Homo sapien
gcattggttaaatacagcctccaaa

SEQ ID NO: 4387819 - DNA, 25 bp, Homo sapien
tctcgcatctggatcacatggatgc

SEQ ID NO: 4387820 - DNA, 25 bp, Homo sapien
ctggatcacatggatgcaagaggtg

SEQ ID NO: 4387821 - DNA, 25 bp, Homo sapien
ttttctccatagataggtagctctg

SEQ ID NO: 4387822 - DNA, 25 bp, Homo sapien
ggccgatggaatatgcttcatctgc

SEQ ID NO: 4387823 - DNA, 25 bp, Homo sapien
agcggggccgatggaatatgcttca

SEQ ID NO: 4387824 - DNA, 25 bp, Homo sapien
cggggccgatggaatatgcttcatc

SEQ ID NO: 4387825 - DNA, 25 bp, Homo sapien
gggccgatggaatatgcttcatctg

SEQ ID NO: 4387826 - DNA, 25 bp, Homo sapien
tgggcgtggtggtcggcacccgtag

SEQ ID NO: 4387827 - DNA, 25 bp, Homo sapien
ctgtaatcccagcaaggccaaggcg

SEQ ID NO: 4387828 - DNA, 25 bp, Homo sapien
taatcccagcaaggccaaggcgggc

SEQ ID NO: 4387829 - DNA, 25 bp, Homo sapien
ctgggcgtggtggtcggcacccgta

SEQ ID NO: 4387830 - DNA, 25 bp, Homo sapien
gtttgcaatgaggaccttggtaatg

SEQ ID NO: 4387831 - DNA, 25 bp, Homo sapien
catgcatggaatttctgtcagcctc

SEQ ID NO: 4387832 - DNA, 25 bp, Homo sapien
gcgcatcaccctgcaggcaatttct

SEQ ID NO: 4387833 - DNA, 25 bp, Homo sapien
gtctgtacacccagttttttggctg

SEQ ID NO: 4387834 - DNA, 25 bp, Homo sapien
ggttctttgcctccacacccatgtc

SEQ ID NO: 4387835 - DNA, 25 bp, Homo sapien
tgtaaacggctacgagctgcagcga

SEQ ID NO: 4387836 - DNA, 25 bp, Homo sapien
ttctctgaactggacacctgatggg

SEQ ID NO: 4387837 - DNA, 25 bp, Homo sapien
ggtgctgcgaaagcccgatgtaaac

SEQ ID NO: 4387838 - DNA, 25 bp, Homo sapien
gcaaagctatctacaagcctgaggg

SEQ ID NO: 4387839 - DNA, 25 bp, Homo sapien
ccgacaccgcagaggccgccgccat

SEQ ID NO: 4387840 - DNA, 25 bp, Homo sapien
ctcgggagacgatgccaccggttcc

SEQ ID NO: 4387841 - DNA, 25 bp, Homo sapien
ggagacgatgccaccggttcctctc

SEQ ID NO: 4387842 - DNA, 25 bp, Homo sapien
gagcaggctcgggagacgatgccac

SEQ ID NO: 4387843 - DNA, 25 bp, Homo sapien
gagcccggcttcagtagcgacgatt

SEQ ID NO: 4387844 - DNA, 25 bp, Homo sapien
gcgtctccacgaacaccaatcaaag

SEQ ID NO: 4387845 - DNA, 25 bp, Homo sapien
tggcctttgtttctgcgtcccctgg

SEQ ID NO: 4387846 - DNA, 25 bp, Homo sapien
gatccaagaatgtgagggcgtctcc

SEQ ID NO: 4387847 - DNA, 25 bp, Homo sapien
cctacctgtcgatgtttggttttgt

SEQ ID NO: 4387848 - DNA, 25 bp, Homo sapien
ttaattaggtcctacctgtcgatgt

SEQ ID NO: 4387849 - DNA, 25 bp, Homo sapien
tatctgtgcattctgttgatggttc

SEQ ID NO: 4387850 - DNA, 25 bp, Homo sapien
taggtcctacctgtcgatgtttggt

SEQ ID NO: 4387851 - DNA, 25 bp, Homo sapien
gagaaggtcctaaatgctgccaggt

SEQ ID NO: 4387852 - DNA, 25 bp, Homo sapien
cgtgccagcggattcttgccatttt

SEQ ID NO: 4387853 - DNA, 25 bp, Homo sapien
tagttgaacacaacaccacggagtg

SEQ ID NO: 4387854 - DNA, 25 bp, Homo sapien
tattgaagacggtcacagagtggga

SEQ ID NO: 4387855 - DNA, 25 bp, Homo sapien
aacccatttccctgtaaggtgagcg

SEQ ID NO: 4387856 - DNA, 25 bp, Homo sapien
tttgaaggacccacactctgaggga

SEQ ID NO: 4387857 - DNA, 25 bp, Homo sapien
tagtctagcgattctggagcaggag

SEQ ID NO: 4387858 - DNA, 25 bp, Homo sapien
gaaaaggagttaagtgctacaccag

SEQ ID NO: 4387859 - DNA, 25 bp, Homo sapien
tagacacccatacccataaggcaga

SEQ ID NO: 4387860 - DNA, 25 bp, Homo sapien
tccagatgattgacaccttaggcgg

SEQ ID NO: 4387861 - DNA, 25 bp, Homo sapien
cttaggcggattttatagacaccca

SEQ ID NO: 4387862 - DNA, 25 bp, Homo sapien
tgtgtagtcagacgagcactcatcc

SEQ ID NO: 4387863 - DNA, 25 bp, Homo sapien
ggccaccagacatgcggttagcaaa

SEQ ID NO: 4387864 - DNA, 25 bp, Homo sapien
caaatgctgggaagtggcactgcca

SEQ ID NO: 4387865 - DNA, 25 bp, Homo sapien
catgcgttcatatcctctactgggc

SEQ ID NO: 4387866 - DNA, 25 bp, Homo sapien
caagcagtcctgtgatactcaggcc

SEQ ID NO: 4387867 - DNA, 25 bp, Homo sapien
ctctgccactaagaagtttcccaga

SEQ ID NO: 4387868 - DNA, 25 bp, Homo sapien
tcccagacctgatcacttcctgctt

SEQ ID NO: 4387869 - DNA, 25 bp, Homo sapien
gccactaagaagtttcccagacctg

SEQ ID NO: 4387870 - DNA, 25 bp, Homo sapien
tgccactaagaagtttcccagacct

SEQ ID NO: 4387871 - DNA, 25 bp, Homo sapien
cagggcagtcatcaggcaagctctg

SEQ ID NO: 4387872 - DNA, 25 bp, Homo sapien
ggcagaaatccttataacaatgtgt

SEQ ID NO: 4387873 - DNA, 25 bp, Homo sapien
ttctggaaagtcaccctggtctgct

SEQ ID NO: 4387874 - DNA, 25 bp, Homo sapien
tttctggcatatgactctcctggtc

SEQ ID NO: 4387875 - DNA, 25 bp, Homo sapien
cgtgagtcgaagagagtgcaacccg

SEQ ID NO: 4387876 - DNA, 25 bp, Homo sapien
gaagtcgcaggtggtatttctgttg

SEQ ID NO: 4387877 - DNA, 25 bp, Homo sapien
ccaacaggacataaagggaagtcgc

SEQ ID NO: 4387878 - DNA, 25 bp, Homo sapien
tgagcgcgtgagtgtttaaatgagt

SEQ ID NO: 4387879 - DNA, 25 bp, Homo sapien
acttgaaggaatgcccgactgctgt

SEQ ID NO: 4387880 - DNA, 25 bp, Homo sapien
caaaggcttgaagttggacatcggt

SEQ ID NO: 4387881 - DNA, 25 bp, Homo sapien
ggctctgttcactcacgcacttgaa

SEQ ID NO: 4387882 - DNA, 25 bp, Homo sapien
gacatcggttgttttcacctgcagg

SEQ ID NO: 4387883 - DNA, 25 bp, Homo sapien
tgtttgattccttggtaaattgtct

SEQ ID NO: 4387884 - DNA, 25 bp, Homo sapien
cactgatataatatgattcttcatc

SEQ ID NO: 4387885 - DNA, 25 bp, Homo sapien
ggtcaaataggctcccacttcactg

SEQ ID NO: 4387886 - DNA, 25 bp, Homo sapien
ctggatctgagacggtcaaataggc

SEQ ID NO: 4387887 - DNA, 25 bp, Homo sapien
tctgagacggtcaaataggctccca

SEQ ID NO: 4387888 - DNA, 25 bp, Homo sapien
caccaaccagcccaattcatcctgc

SEQ ID NO: 4387889 - DNA, 25 bp, Homo sapien
tgccaataaccatggggtcctaagg

SEQ ID NO: 4387890 - DNA, 25 bp, Homo sapien
cagcatgccaataaccatggggtcc

SEQ ID NO: 4387891 - DNA, 25 bp, Homo sapien
ctggcaccaaccagcccaattcatc

SEQ ID NO: 4387892 - DNA, 25 bp, Homo sapien
gtggaagtttcatagtcccagctgt

SEQ ID NO: 4387893 - DNA, 25 bp, Homo sapien
cgtggaagtttcatagtcccagctg

SEQ ID NO: 4387894 - DNA, 25 bp, Homo sapien
gtgactaaatcaagaaagctttgtt

SEQ ID NO: 4387895 - DNA, 25 bp, Homo sapien
ttgtgactaaatcaagaaagctttg

SEQ ID NO: 4387896 - DNA, 25 bp, Homo sapien
tgttgtgactaaatcaagaaagctt

SEQ ID NO: 4387897 - DNA, 25 bp, Homo sapien
tgtgactaaatcaagaaagctttgt

SEQ ID NO: 4387898 - DNA, 25 bp, Homo sapien
cctcccggcgaaggtcagctacttt

SEQ ID NO: 4387899 - DNA, 25 bp, Homo sapien
atggaatgaataaggaacatgtggc

SEQ ID NO: 4387900 - DNA, 25 bp, Homo sapien
cagctactttgggaatttgtgatgg

SEQ ID NO: 4387901 - DNA, 25 bp, Homo sapien
agtaaatgcgtaagttcctgggata

SEQ ID NO: 4387902 - DNA, 25 bp, Homo sapien
gaaaccactgacttctcaagcgcaa

SEQ ID NO: 4387903 - DNA, 25 bp, Homo sapien
cccattttgtgtgacggttgacata

SEQ ID NO: 4387904 - DNA, 25 bp, Homo sapien
ggtgcaatcattgaatcattgctca

SEQ ID NO: 4387905 - DNA, 25 bp, Homo sapien
ttttccagggatagagcagttactc

SEQ ID NO: 4387906 - DNA, 25 bp, Homo sapien
tgatttcggttttagaataatcctg

SEQ ID NO: 4387907 - DNA, 25 bp, Homo sapien
gggaatttctacaggtttattcatc

SEQ ID NO: 4387908 - DNA, 25 bp, Homo sapien
ctgttctgacatttgatttcggttt

SEQ ID NO: 4387909 - DNA, 25 bp, Homo sapien
ttcctccgaataatcctgttcctct

SEQ ID NO: 4387910 - DNA, 25 bp, Homo sapien
gaagccctttttgggctgcacagaa

SEQ ID NO: 4387911 - DNA, 25 bp, Homo sapien
gaggtcaagtctcccataagaggcc

SEQ ID NO: 4387912 - DNA, 25 bp, Homo sapien
gtcaagtctcccataagaggccctg

SEQ ID NO: 4387913 - DNA, 25 bp, Homo sapien
cccagaggtcaagtctcccataaga

SEQ ID NO: 4387914 - DNA, 25 bp, Homo sapien
gaaggttggattttcgggtgccaca

SEQ ID NO: 4387915 - DNA, 25 bp, Homo sapien
gggtcgatgttgaagtatctccgag

SEQ ID NO: 4387916 - DNA, 25 bp, Homo sapien
ttttcgggtgccacagttcccagag

SEQ ID NO: 4387917 - DNA, 25 bp, Homo sapien
gagattcacaaatccgccctgaaaa

SEQ ID NO: 4387918 - DNA, 25 bp, Homo sapien
gctgacggttgatgaactggttcca

SEQ ID NO: 4387919 - DNA, 25 bp, Homo sapien
tattgtgggcagctgccgttgttcc

SEQ ID NO: 4387920 - DNA, 25 bp, Homo sapien
ttctgaccggttgtgcttttgtgca

SEQ ID NO: 4387921 - DNA, 25 bp, Homo sapien
tccagtcttgactgacgatggctga

SEQ ID NO: 4387922 - DNA, 25 bp, Homo sapien
gaccatccatgaatcttgctgctaa

SEQ ID NO: 4387923 - DNA, 25 bp, Homo sapien
tgcttgcttagctggttgctggaca

SEQ ID NO: 4387924 - DNA, 25 bp, Homo sapien
taagctagggccgactgtaacttca

SEQ ID NO: 4387925 - DNA, 25 bp, Homo sapien
ccgctgtttgaaaggtgatatgacc

SEQ ID NO: 4387926 - DNA, 25 bp, Homo sapien
gccatgtccatcattgttaattacc

SEQ ID NO: 4387927 - DNA, 25 bp, Homo sapien
gctgttttgtggattaaagcactgc

SEQ ID NO: 4387928 - DNA, 25 bp, Homo sapien
ttaccatgtgctgatgagccctgta

SEQ ID NO: 4387929 - DNA, 25 bp, Homo sapien
gattaaagcactgcgaacagtgcct

SEQ ID NO: 4387930 - DNA, 25 bp, Homo sapien
cggccagggacgcgaagagcgcggc

SEQ ID NO: 4387931 - DNA, 25 bp, Homo sapien
ggccagggacgcgaagagcgcggcc

SEQ ID NO: 4387932 - DNA, 25 bp, Homo sapien
ccgaatcggtgccagagaaacctac

SEQ ID NO: 4387933 - DNA, 25 bp, Homo sapien
gcaggccccgaatcggtgccagaga

SEQ ID NO: 4387934 - DNA, 25 bp, Homo sapien
aggttctgcagcgtgcggcgaagtc

SEQ ID NO: 4387935 - DNA, 25 bp, Homo sapien
gttctgcagcgtgcggcgaagtccg

SEQ ID NO: 4387936 - DNA, 25 bp, Homo sapien
agcagccgaaaagcccgcccagggc

SEQ ID NO: 4387937 - DNA, 25 bp, Homo sapien
cagccgaaaagcccgcccagggccg

SEQ ID NO: 4387938 - DNA, 25 bp, Homo sapien
ctgcttatgagaagcagccgaaaag

SEQ ID NO: 4387939 - DNA, 25 bp, Homo sapien
ctcctacccctacggagcagggagg

SEQ ID NO: 4387940 - DNA, 25 bp, Homo sapien
ttctcagccgggagaaagccagcca

SEQ ID NO: 4387941 - DNA, 25 bp, Homo sapien
cttcccagggagtctgcggcagccg

SEQ ID NO: 4387942 - DNA, 25 bp, Homo sapien
gcgagcaggagcctaaaaaccccta

SEQ ID NO: 4387943 - DNA, 25 bp, Homo sapien
ttgcgggaagcaacaggagcacagc

SEQ ID NO: 4387944 - DNA, 25 bp, Homo sapien
tttttcccagacgacaccagcaagc

SEQ ID NO: 4387945 - DNA, 25 bp, Homo sapien
tcccagacgacaccagcaagcagag

SEQ ID NO: 4387946 - DNA, 25 bp, Homo sapien
tgagaattatcccatgattcctgtc

SEQ ID NO: 4387947 - DNA, 25 bp, Homo sapien
tttatgagaattatcccatgattcc

SEQ ID NO: 4387948 - DNA, 25 bp, Homo sapien
gaaatgatccctgaaagtatagtct

SEQ ID NO: 4387949 - DNA, 25 bp, Homo sapien
atcagtgctctacacgttcagagaa

SEQ ID NO: 4387950 - DNA, 25 bp, Homo sapien
agaaacttctctagtgacgaactat

SEQ ID NO: 4387951 - DNA, 25 bp, Homo sapien
acttctctagtgacgaactatagaa

SEQ ID NO: 4387952 - DNA, 25 bp, Homo sapien
cccttgtcagaggaagtctgcactt

SEQ ID NO: 4387953 - DNA, 25 bp, Homo sapien
tgccattcccacaagcaggtctctg

SEQ ID NO: 4387954 - DNA, 25 bp, Homo sapien
cagctggtgatgtccggagcccatt

SEQ ID NO: 4387955 - DNA, 25 bp, Homo sapien
ctttccatggttgctgaatgcagct

SEQ ID NO: 4387956 - DNA, 25 bp, Homo sapien
tccagtagcgggagttggttccagc

SEQ ID NO: 4387957 - DNA, 25 bp, Homo sapien
tctaaataattctgagggccgggtg

SEQ ID NO: 4387958 - DNA, 25 bp, Homo sapien
gcccttgggccacgtgtacaattaa

SEQ ID NO: 4387959 - DNA, 25 bp, Homo sapien
tgagaggaacactctgcgggaccct

SEQ ID NO: 4387960 - DNA, 25 bp, Homo sapien
aaacatcctaccgtgggagcacaga

SEQ ID NO: 4387961 - DNA, 25 bp, Homo sapien
gaattgcccggctccgaatatcgaa

SEQ ID NO: 4387962 - DNA, 25 bp, Homo sapien
ggaacgaactctctctacaacgaag

SEQ ID NO: 4387963 - DNA, 25 bp, Homo sapien
gagaagcccacgcagcaaagaattg

SEQ ID NO: 4387964 - DNA, 25 bp, Homo sapien
cgggaatgcgggcgctctggagccg

SEQ ID NO: 4387965 - DNA, 25 bp, Homo sapien
tgctttctgcgtagctgggcagggc

SEQ ID NO: 4387966 - DNA, 25 bp, Homo sapien
ccggctgctttctgcgtagctgggc

SEQ ID NO: 4387967 - DNA, 25 bp, Homo sapien
ctgctttctgcgtagctgggcaggg

SEQ ID NO: 4387968 - DNA, 25 bp, Homo sapien
tcagctctcctgggcggaggtcctc

SEQ ID NO: 4387969 - DNA, 25 bp, Homo sapien
gggcgcagcgccctcgcctggaaac

SEQ ID NO: 4387970 - DNA, 25 bp, Homo sapien
ccccgcaggagccagccggcccgtg

SEQ ID NO: 4387971 - DNA, 25 bp, Homo sapien
cgctcctcctcggtgctgcgggtcg

SEQ ID NO: 4387972 - DNA, 25 bp, Homo sapien
gccgtggcccaaagaggcgcttagt

SEQ ID NO: 4387973 - DNA, 25 bp, Homo sapien
gaagaaagtcagagacgccgtggcc

SEQ ID NO: 4387974 - DNA, 25 bp, Homo sapien
ggcgcttagtctttcctcgctcaca

SEQ ID NO: 4387975 - DNA, 25 bp, Homo sapien
aattccgagaagaaagtcagagacg

SEQ ID NO: 4387976 - DNA, 25 bp, Homo sapien
tcgtccgactggaaaaggcccgcga

SEQ ID NO: 4387977 - DNA, 25 bp, Homo sapien
cgtccgactggaaaaggcccgcgag

SEQ ID NO: 4387978 - DNA, 25 bp, Homo sapien
agccccagttatgaccggacaccag

SEQ ID NO: 4387979 - DNA, 25 bp, Homo sapien
cgggagccccagttatgaccggaca

SEQ ID NO: 4387980 - DNA, 25 bp, Homo sapien
ctctcagcgggagccccagttatga

SEQ ID NO: 4387981 - DNA, 25 bp, Homo sapien
cagttatgaccggacaccagcgcac

SEQ ID NO: 4387982 - DNA, 25 bp, Homo sapien
aaggagacagccacgtggggacatg

SEQ ID NO: 4387983 - DNA, 25 bp, Homo sapien
cagagccagtttgagggtctggtga

SEQ ID NO: 4387984 - DNA, 25 bp, Homo sapien
gagggtcagagccagtttgagggtc

SEQ ID NO: 4387985 - DNA, 25 bp, Homo sapien
agagccagtttgagggtctggtgac

SEQ ID NO: 4387986 - DNA, 25 bp, Homo sapien
ggcttaaccaggtccttatgggtga

SEQ ID NO: 4387987 - DNA, 25 bp, Homo sapien
ctggcttaaccaggtccttatgggt

SEQ ID NO: 4387988 - DNA, 25 bp, Homo sapien
gcttaaccaggtccttatgggtgag

SEQ ID NO: 4387989 - DNA, 25 bp, Homo sapien
ccctggcttaaccaggtccttatgg

SEQ ID NO: 4387990 - DNA, 25 bp, Homo sapien
tccatggagctaaactccctgctgg

SEQ ID NO: 4387991 - DNA, 25 bp, Homo sapien
catggagctaaactccctgctggag

SEQ ID NO: 4387992 - DNA, 25 bp, Homo sapien
gtccatggagctaaactccctgctg

SEQ ID NO: 4387993 - DNA, 25 bp, Homo sapien
tggagctaaactccctgctggagca

SEQ ID NO: 4387994 - DNA, 25 bp, Homo sapien
ctgctagggaccatagagccaccca

SEQ ID NO: 4387995 - DNA, 25 bp, Homo sapien
gcctggctcaggagccttcgtcagc

SEQ ID NO: 4387996 - DNA, 25 bp, Homo sapien
gagccttcgtcagccataggcagcc

SEQ ID NO: 4387997 - DNA, 25 bp, Homo sapien
ctagggaccatagagccacccactg

SEQ ID NO: 4387998 - DNA, 25 bp, Homo sapien
ctctgcagggtaagtggcacctggg

SEQ ID NO: 4387999 - DNA, 25 bp, Homo sapien
ggtaaaatgattagttggttccagc

SEQ ID NO: 4388000 - DNA, 25 bp, Homo sapien
gcccctctgcagggtaagtggcacc

SEQ ID NO: 4388001 - DNA, 25 bp, Homo sapien
tgcagggtaagtggcacctggggta

SEQ ID NO: 4388002 - DNA, 25 bp, Homo sapien
ccctaacacagcatacacgcagaaa

SEQ ID NO: 4388003 - DNA, 25 bp, Homo sapien
tacaccttagagtgcaacctcaggg

SEQ ID NO: 4388004 - DNA, 25 bp, Homo sapien
acacagcatacacgcagaaacacat

SEQ ID NO: 4388005 - DNA, 25 bp, Homo sapien
ttttccatacaccttagagtgcaac

SEQ ID NO: 4388006 - DNA, 25 bp, Homo sapien
ggtcatgggctctgaggccctaaga

SEQ ID NO: 4388007 - DNA, 25 bp, Homo sapien
tttaatcccctgctggattcactgg

SEQ ID NO: 4388008 - DNA, 25 bp, Homo sapien
ccctaagagtcttaggcactaagga

SEQ ID NO: 4388009 - DNA, 25 bp, Homo sapien
aatctcagactcaggatctggccag

SEQ ID NO: 4388010 - DNA, 25 bp, Homo sapien
tggacagcagttgactaagagtaac

SEQ ID NO: 4388011 - DNA, 25 bp, Homo sapien
tacttctcaatgtgagacatttgcc

SEQ ID NO: 4388012 - DNA, 25 bp, Homo sapien
gccccattagctctacacaaatgaa

SEQ ID NO: 4388013 - DNA, 25 bp, Homo sapien
aaacctggaaagtgaaacagtggat

SEQ ID NO: 4388014 - DNA, 25 bp, Homo sapien
tgctccactctcccatgggaccctc

SEQ ID NO: 4388015 - DNA, 25 bp, Homo sapien
ctaggtgatgtcttccttagcatct

SEQ ID NO: 4388016 - DNA, 25 bp, Homo sapien
ttagcatctaagcagctggcatcac

SEQ ID NO: 4388017 - DNA, 25 bp, Homo sapien
tcttccttagcatctaagcagctgg

SEQ ID NO: 4388018 - DNA, 25 bp, Homo sapien
tatttttaatccatggtccggatcc

SEQ ID NO: 4388019 - DNA, 25 bp, Homo sapien
ttttaatccatggtccggatcctgc

SEQ ID NO: 4388020 - DNA, 25 bp, Homo sapien
ttaatccatggtccggatcctgctc

SEQ ID NO: 4388021 - DNA, 25 bp, Homo sapien
atatttttaatccatggtccggatc

SEQ ID NO: 4388022 - DNA, 25 bp, Homo sapien
cttttccacttctctcatctttctg

SEQ ID NO: 4388023 - DNA, 25 bp, Homo sapien
tttccacttctctcatctttctggg

SEQ ID NO: 4388024 - DNA, 25 bp, Homo sapien
ttctctcatctttctgggttagggt

SEQ ID NO: 4388025 - DNA, 25 bp, Homo sapien
acttctctcatctttctgggttagg

SEQ ID NO: 4388026 - DNA, 25 bp, Homo sapien
ctcgtgctcatttcaaactgtggat

SEQ ID NO: 4388027 - DNA, 25 bp, Homo sapien
gctcatttcaaactgtggatttcct

SEQ ID NO: 4388028 - DNA, 25 bp, Homo sapien
atttcaaactgtggatttccttggt

SEQ ID NO: 4388029 - DNA, 25 bp, Homo sapien
tcatttcaaactgtggatttccttg

SEQ ID NO: 4388030 - DNA, 25 bp, Homo sapien
actcaattgataaagctcgctgtgg

SEQ ID NO: 4388031 - DNA, 25 bp, Homo sapien
gggaaggtcagaactcaattgataa

SEQ ID NO: 4388032 - DNA, 25 bp, Homo sapien
aagctcgctgtggattttcccacca

SEQ ID NO: 4388033 - DNA, 25 bp, Homo sapien
gataaagctcgctgtggattttccc

SEQ ID NO: 4388034 - DNA, 25 bp, Homo sapien
acttatttctgaaaaccaacagtct

SEQ ID NO: 4388035 - DNA, 25 bp, Homo sapien
ttatttctgaaaaccaacagtctct

SEQ ID NO: 4388036 - DNA, 25 bp, Homo sapien
tgaaaaccaacagtctctgatttct

SEQ ID NO: 4388037 - DNA, 25 bp, Homo sapien
gttgttccatcaataatttacttat

SEQ ID NO: 4388038 - DNA, 25 bp, Homo sapien
ccccttccaagctggcgaattgaaa

SEQ ID NO: 4388039 - DNA, 25 bp, Homo sapien
ccaagctggcgaattgaaagtgtca

SEQ ID NO: 4388040 - DNA, 25 bp, Homo sapien
ctgcaggatgtatttctcaagtcca

SEQ ID NO: 4388041 - DNA, 25 bp, Homo sapien
ttcgactggcaatctcaaactttct

SEQ ID NO: 4388042 - DNA, 25 bp, Homo sapien
ccaggctccattcgtatcttacaga

SEQ ID NO: 4388043 - DNA, 25 bp, Homo sapien
gaattgtccagacgctgaaagggcc

SEQ ID NO: 4388044 - DNA, 25 bp, Homo sapien
gtaatgaggagataatccctggtcc

SEQ ID NO: 4388045 - DNA, 25 bp, Homo sapien
ctctggctgggtttaaatcgaatca

SEQ ID NO: 4388046 - DNA, 25 bp, Homo sapien
gatgtgaatccagagaggtaccagc

SEQ ID NO: 4388047 - DNA, 25 bp, Homo sapien
ggttggcaatgtgatctctccctga

SEQ ID NO: 4388048 - DNA, 25 bp, Homo sapien
tcataggcaagtaatcagaggatgt

SEQ ID NO: 4388049 - DNA, 25 bp, Homo sapien
catgctgctgcaccttcataggcaa

SEQ ID NO: 4388050 - DNA, 25 bp, Homo sapien
cacaggacttgatcaaatcctctat

SEQ ID NO: 4388051 - DNA, 25 bp, Homo sapien
tgctgctaggtccacagccaactca

SEQ ID NO: 4388052 - DNA, 25 bp, Homo sapien
tgccaaagcttgttgtagttcagtt

SEQ ID NO: 4388053 - DNA, 25 bp, Homo sapien
aagcttgttgtagttcagttgagaa

SEQ ID NO: 4388054 - DNA, 25 bp, Homo sapien
aaacaaatgccttgttggaaatcaa

SEQ ID NO: 4388055 - DNA, 25 bp, Homo sapien
ttgttggaaatcaaaagtataccat

SEQ ID NO: 4388056 - DNA, 25 bp, Homo sapien
gaaaacaaatgccttgttggaaatc

SEQ ID NO: 4388057 - DNA, 25 bp, Homo sapien
gtggaaaacaaatgccttgttggaa

SEQ ID NO: 4388058 - DNA, 25 bp, Homo sapien
aaatcatctacctctgtgcattgta

SEQ ID NO: 4388059 - DNA, 25 bp, Homo sapien
tgatttaggtatacggcatagagac

SEQ ID NO: 4388060 - DNA, 25 bp, Homo sapien
caagcaaaatcatctacctctgtgc

SEQ ID NO: 4388061 - DNA, 25 bp, Homo sapien
tacggcatagagacaagcaaaatca

SEQ ID NO: 4388062 - DNA, 25 bp, Homo sapien
tagttcacctgggtctatctccata

SEQ ID NO: 4388063 - DNA, 25 bp, Homo sapien
tatctccatatcttcaggagactcg

SEQ ID NO: 4388064 - DNA, 25 bp, Homo sapien
tcaggagactcgaaatccagcagac

SEQ ID NO: 4388065 - DNA, 25 bp, Homo sapien
gccgagcctcctagttcacctgggt

SEQ ID NO: 4388066 - DNA, 25 bp, Homo sapien
ttataagtctctggcttggtccttt

SEQ ID NO: 4388067 - DNA, 25 bp, Homo sapien
gagggagattgtgatccagttggcg

SEQ ID NO: 4388068 - DNA, 25 bp, Homo sapien
tttataagtctctggcttggtcctt

SEQ ID NO: 4388069 - DNA, 25 bp, Homo sapien
tgtgatccagttggcgctggcatac

SEQ ID NO: 4388070 - DNA, 25 bp, Homo sapien
gccaaatagaaacaacataaagcaa

SEQ ID NO: 4388071 - DNA, 25 bp, Homo sapien
aagccaaatagaaacaacataaagc

SEQ ID NO: 4388072 - DNA, 25 bp, Homo sapien
aaagccaaatagaaacaacataaag

SEQ ID NO: 4388073 - DNA, 25 bp, Homo sapien
ttaaaagccaaatagaaacaacata

SEQ ID NO: 4388074 - DNA, 25 bp, Homo sapien
tcgagcagctccataaggctgtggg

SEQ ID NO: 4388075 - DNA, 25 bp, Homo sapien
ggcagcatttaggtacaaaacacaa

SEQ ID NO: 4388076 - DNA, 25 bp, Homo sapien
tgcttttcctggacaacaggggcag

SEQ ID NO: 4388077 - DNA, 25 bp, Homo sapien
gggcagctgtgtcgagcagctccat

SEQ ID NO: 4388078 - DNA, 25 bp, Homo sapien
tggagcctgaaggatacagacggtt

SEQ ID NO: 4388079 - DNA, 25 bp, Homo sapien
ccagatataggtgctcctcacaggc

SEQ ID NO: 4388080 - DNA, 25 bp, Homo sapien
aataaacataaatcgcaatgccaag

SEQ ID NO: 4388081 - DNA, 25 bp, Homo sapien
gggctgccagagtctattcaggcct

SEQ ID NO: 4388082 - DNA, 25 bp, Homo sapien
ccaaagtaggcgcagtcttgacact

SEQ ID NO: 4388083 - DNA, 25 bp, Homo sapien
ccagattgccctagctcggggcaga

SEQ ID NO: 4388084 - DNA, 25 bp, Homo sapien
taggcgcagtcttgacactcttgcc

SEQ ID NO: 4388085 - DNA, 25 bp, Homo sapien
gtcttgacactcttgccagattgcc

SEQ ID NO: 4388086 - DNA, 25 bp, Homo sapien
catagataggcacagagtgctctgg

SEQ ID NO: 4388087 - DNA, 25 bp, Homo sapien
caggcagcatttttcagtaagtgga

SEQ ID NO: 4388088 - DNA, 25 bp, Homo sapien
caacaagccagagtattctaatgtg

SEQ ID NO: 4388089 - DNA, 25 bp, Homo sapien
tgctctgggagcatctacaagggct

SEQ ID NO: 4388090 - DNA, 25 bp, Homo sapien
tttgtccaggacatcgacatctccc

SEQ ID NO: 4388091 - DNA, 25 bp, Homo sapien
ctgccctttgtccaggacatcgaca

SEQ ID NO: 4388092 - DNA, 25 bp, Homo sapien
ccctttgtccaggacatcgacatct

SEQ ID NO: 4388093 - DNA, 25 bp, Homo sapien
ctttgtccaggacatcgacatctcc

SEQ ID NO: 4388094 - DNA, 25 bp, Homo sapien
taagtgggcccataacagtagtcaa

SEQ ID NO: 4388095 - DNA, 25 bp, Homo sapien
aagaggctggtgtttgatggtcccc

SEQ ID NO: 4388096 - DNA, 25 bp, Homo sapien
tagatcgggcaaccaatacggagct

SEQ ID NO: 4388097 - DNA, 25 bp, Homo sapien
tatcaaagacgctgagaggtgggca

SEQ ID NO: 4388098 - DNA, 25 bp, Homo sapien
cactggcccatatagcctatttgtt

SEQ ID NO: 4388099 - DNA, 25 bp, Homo sapien
tcccactggcccatatagcctattt

SEQ ID NO: 4388100 - DNA, 25 bp, Homo sapien
ctggcccatatagcctatttgttgc

SEQ ID NO: 4388101 - DNA, 25 bp, Homo sapien
ccactggcccatatagcctatttgt

SEQ ID NO: 4388102 - DNA, 25 bp, Homo sapien
catgctgtgcgttacatctccagga

SEQ ID NO: 4388103 - DNA, 25 bp, Homo sapien
tattgtgggactctaacctcgctgt

SEQ ID NO: 4388104 - DNA, 25 bp, Homo sapien
caggcttgcggttactcccacatat

SEQ ID NO: 4388105 - DNA, 25 bp, Homo sapien
gcagtaatcatttcacagggtgtaa

SEQ ID NO: 4388106 - DNA, 25 bp, Homo sapien
gtccttgccacttaacgcagaaatg

SEQ ID NO: 4388107 - DNA, 25 bp, Homo sapien
tgtttttagaccattgatgtttcca

SEQ ID NO: 4388108 - DNA, 25 bp, Homo sapien
cgcagaaatgtaagggctgacttta

SEQ ID NO: 4388109 - DNA, 25 bp, Homo sapien
tacttcagtaaagcttggagtcgga

SEQ ID NO: 4388110 - DNA, 25 bp, Homo sapien
caatgtgccagaagttcagggttct

SEQ ID NO: 4388111 - DNA, 25 bp, Homo sapien
agcaatgtgccagaagttcagggtt

SEQ ID NO: 4388112 - DNA, 25 bp, Homo sapien
aatgtgccagaagttcagggttctc

SEQ ID NO: 4388113 - DNA, 25 bp, Homo sapien
gtgccagaagttcagggttctcagc

SEQ ID NO: 4388114 - DNA, 25 bp, Homo sapien
cattctttctgataacatgaattat

SEQ ID NO: 4388115 - DNA, 25 bp, Homo sapien
tactctccattctttctgataacat

SEQ ID NO: 4388116 - DNA, 25 bp, Homo sapien
ccattctttctgataacatgaatta

SEQ ID NO: 4388117 - DNA, 25 bp, Homo sapien
tctttctgataacatgaattattat

SEQ ID NO: 4388118 - DNA, 25 bp, Homo sapien
aagaacatctggaattagatgcttt

SEQ ID NO: 4388119 - DNA, 25 bp, Homo sapien
tgaagaacatctggaattagatgct

SEQ ID NO: 4388120 - DNA, 25 bp, Homo sapien
aacatctggaattagatgctttagc

SEQ ID NO: 4388121 - DNA, 25 bp, Homo sapien
gaacatctggaattagatgctttag

SEQ ID NO: 4388122 - DNA, 25 bp, Homo sapien
ggtgcaaacaaggtaggtgttacaa

SEQ ID NO: 4388123 - DNA, 25 bp, Homo sapien
tgcaaacaaggtaggtgttacaaac

SEQ ID NO: 4388124 - DNA, 25 bp, Homo sapien
gcagaggtgcaaacaaggtaggtgt

SEQ ID NO: 4388125 - DNA, 25 bp, Homo sapien
aggtgcaaacaaggtaggtgttaca

SEQ ID NO: 4388126 - DNA, 25 bp, Homo sapien
tctcttcagtctcaagcaagtcacg

SEQ ID NO: 4388127 - DNA, 25 bp, Homo sapien
tatgtaaatctcttcagtctcaagc

SEQ ID NO: 4388128 - DNA, 25 bp, Homo sapien
tcagtctcaagcaagtcacgtataa

SEQ ID NO: 4388129 - DNA, 25 bp, Homo sapien
ctcaagcaagtcacgtataatgcgc

SEQ ID NO: 4388130 - DNA, 25 bp, Homo sapien
ctcacaaacgcacactgtgatcaca

SEQ ID NO: 4388131 - DNA, 25 bp, Homo sapien
cagcatctcacaaacgcacactgtg

SEQ ID NO: 4388132 - DNA, 25 bp, Homo sapien
attgaacacccaaggtcagcatctc

SEQ ID NO: 4388133 - DNA, 25 bp, Homo sapien
ttcattctgttctattgaacaccca

SEQ ID NO: 4388134 - DNA, 25 bp, Homo sapien
gagtgggatttgaaccgtgtactct

SEQ ID NO: 4388135 - DNA, 25 bp, Homo sapien
aagagtactcaatgtaaaccctagg

SEQ ID NO: 4388136 - DNA, 25 bp, Homo sapien
tgccttttggaaattggttgagtgg

SEQ ID NO: 4388137 - DNA, 25 bp, Homo sapien
tattaaagagtactcaatgtaaacc

SEQ ID NO: 4388138 - DNA, 25 bp, Homo sapien
ctggtatcaggccattttcacaggg

SEQ ID NO: 4388139 - DNA, 25 bp, Homo sapien
gaggccccactgagtgtcagatggc

SEQ ID NO: 4388140 - DNA, 25 bp, Homo sapien
agcacagctctactggaccagggag

SEQ ID NO: 4388141 - DNA, 25 bp, Homo sapien
gtcagatggcacataagagatttcc

SEQ ID NO: 4388142 - DNA, 25 bp, Homo sapien
tattatctccgttaaatgttttgtg

SEQ ID NO: 4388143 - DNA, 25 bp, Homo sapien
gtacaataacagaatcgctcaaaat

SEQ ID NO: 4388144 - DNA, 25 bp, Homo sapien
aacaacatgcgggaaacaagaaatc

SEQ ID NO: 4388145 - DNA, 25 bp, Homo sapien
tgtggctttagggagaggtctaaca

SEQ ID NO: 4388146 - DNA, 25 bp, Homo sapien
gcatctctcgatattgtctggttac

SEQ ID NO: 4388147 - DNA, 25 bp, Homo sapien
tagaagtccgcatctctcgatattg

SEQ ID NO: 4388148 - DNA, 25 bp, Homo sapien
tataatctctctcgttgagtagaag

SEQ ID NO: 4388149 - DNA, 25 bp, Homo sapien
tctcgttgagtagaagtccgcatct

SEQ ID NO: 4388150 - DNA, 25 bp, Homo sapien
gcggcagggaaacacttcctggaat

SEQ ID NO: 4388151 - DNA, 25 bp, Homo sapien
ctgacgagcggcagggaaacacttc

SEQ ID NO: 4388152 - DNA, 25 bp, Homo sapien
tttgagtaagtgatcgcaattaact

SEQ ID NO: 4388153 - DNA, 25 bp, Homo sapien
gcaattaactgacgagcggcaggga

SEQ ID NO: 4388154 - DNA, 25 bp, Homo sapien
gtgaaaacacggctgtgccgcggcc

SEQ ID NO: 4388155 - DNA, 25 bp, Homo sapien
cctgagaacgctttcggcgagttac

SEQ ID NO: 4388156 - DNA, 25 bp, Homo sapien
aattcgagtcgaaagcccgtgtcgg

SEQ ID NO: 4388157 - DNA, 25 bp, Homo sapien
ggtacaccgatgtggtaaccgcaca

SEQ ID NO: 4388158 - DNA, 25 bp, Homo sapien
tatggatcatgttaaaggtacaccg

SEQ ID NO: 4388159 - DNA, 25 bp, Homo sapien
tgaggcccaattgcactagaatctg

SEQ ID NO: 4388160 - DNA, 25 bp, Homo sapien
aaaatgggtcactttggctagaatc

SEQ ID NO: 4388161 - DNA, 25 bp, Homo sapien
tcacattgtaaagggtccagttctt

SEQ ID NO: 4388162 - DNA, 25 bp, Homo sapien
gaatctgcatttcagaacacaggag

SEQ ID NO: 4388163 - DNA, 25 bp, Homo sapien
gatcagccaggatcaggtgcattca

SEQ ID NO: 4388164 - DNA, 25 bp, Homo sapien
atcaggtgcattcagcggggtatgg

SEQ ID NO: 4388165 - DNA, 25 bp, Homo sapien
cattcagcggggtatggctgtagac

SEQ ID NO: 4388166 - DNA, 25 bp, Homo sapien
agcttctgagatcagccaggatcag

SEQ ID NO: 4388167 - DNA, 25 bp, Homo sapien
cataggaacaggaagatgggagggc

SEQ ID NO: 4388168 - DNA, 25 bp, Homo sapien
gtcacgtagcactgaaaactgctca

SEQ ID NO: 4388169 - DNA, 25 bp, Homo sapien
aaactgctcaaagctagatagtgcc

SEQ ID NO: 4388170 - DNA, 25 bp, Homo sapien
agccctggaggtgtcataggaacag

SEQ ID NO: 4388171 - DNA, 25 bp, Homo sapien
accaccctcgactaggccttcctca

SEQ ID NO: 4388172 - DNA, 25 bp, Homo sapien
ttccaccaccctcgactaggccttc

SEQ ID NO: 4388173 - DNA, 25 bp, Homo sapien
ccatttccaccaccctcgactaggc

SEQ ID NO: 4388174 - DNA, 25 bp, Homo sapien
tccccatttccaccaccctcgacta

SEQ ID NO: 4388175 - DNA, 25 bp, Homo sapien
aaagattgttcctactcctgcagcc

SEQ ID NO: 4388176 - DNA, 25 bp, Homo sapien
gtaccttaccaggatttgcccattg

SEQ ID NO: 4388177 - DNA, 25 bp, Homo sapien
tatgctttcatgtgggaactacgag

SEQ ID NO: 4388178 - DNA, 25 bp, Homo sapien
tgtgagcccttgagaaaccagcgtc

SEQ ID NO: 4388179 - DNA, 25 bp, Homo sapien
taataggcctgattcactggagaga

SEQ ID NO: 4388180 - DNA, 25 bp, Homo sapien
caccaacctggtgagtaataggcct

SEQ ID NO: 4388181 - DNA, 25 bp, Homo sapien
gaaggttctgaaccagctgccggct

SEQ ID NO: 4388182 - DNA, 25 bp, Homo sapien
tacagtagccatataagcaacagca

SEQ ID NO: 4388183 - DNA, 25 bp, Homo sapien
cagaggatggttgttatctggatga

SEQ ID NO: 4388184 - DNA, 25 bp, Homo sapien
ttccttccagatgtatggtggagga

SEQ ID NO: 4388185 - DNA, 25 bp, Homo sapien
gttccttccagatgtatggtggagg

SEQ ID NO: 4388186 - DNA, 25 bp, Homo sapien
ttgttatctggatgagcactgtgga

SEQ ID NO: 4388187 - DNA, 25 bp, Homo sapien
ccaccctgatgtggagtgatcatgg

SEQ ID NO: 4388188 - DNA, 25 bp, Homo sapien
ctggcctttgcctccaccctgatgt

SEQ ID NO: 4388189 - DNA, 25 bp, Homo sapien
ggaaatatagctggatccgaaagct

SEQ ID NO: 4388190 - DNA, 25 bp, Homo sapien
tggagtgatcatgggggtgggaaat

SEQ ID NO: 4388191 - DNA, 25 bp, Homo sapien
taccacccccgaggaagagagccta

SEQ ID NO: 4388192 - DNA, 25 bp, Homo sapien
gagcctacctttccatccaaggaag

SEQ ID NO: 4388193 - DNA, 25 bp, Homo sapien
ctacctttccatccaaggaagtgtt

SEQ ID NO: 4388194 - DNA, 25 bp, Homo sapien
gcctacctttccatccaaggaagtg

SEQ ID NO: 4388195 - DNA, 25 bp, Homo sapien
ttccccagtaaccatcactttgagt

SEQ ID NO: 4388196 - DNA, 25 bp, Homo sapien
tggctagggtcctgacctccaatcc

SEQ ID NO: 4388197 - DNA, 25 bp, Homo sapien
aagagaggacctggtgtaagcagcc

SEQ ID NO: 4388198 - DNA, 25 bp, Homo sapien
gcatggacctcatccgaggtggcac

SEQ ID NO: 4388199 - DNA, 25 bp, Homo sapien
caacatcgtgcctaaaaagtctctg

SEQ ID NO: 4388200 - DNA, 25 bp, Homo sapien
gggtgtccacaacatcgtgcctaaa

SEQ ID NO: 4388201 - DNA, 25 bp, Homo sapien
gatgctgagtgtagggtgtccacaa

SEQ ID NO: 4388202 - DNA, 25 bp, Homo sapien
aacatttggggaatgcctaccaggg

SEQ ID NO: 4388203 - DNA, 25 bp, Homo sapien
cataacacgggcagctggttgctca

SEQ ID NO: 4388204 - DNA, 25 bp, Homo sapien
gactgaactcactctaaggcctttg

SEQ ID NO: 4388205 - DNA, 25 bp, Homo sapien
ctgctagggagattatatgaaggcc

SEQ ID NO: 4388206 - DNA, 25 bp, Homo sapien
tgtggacacatacccttgtagggct

SEQ ID NO: 4388207 - DNA, 25 bp, Homo sapien
tctgcattatagagccacctaagat

SEQ ID NO: 4388208 - DNA, 25 bp, Homo sapien
tggtcttagccctgttcctatagga

SEQ ID NO: 4388209 - DNA, 25 bp, Homo sapien
tgtgccacaaaatgacgtttcggtt

SEQ ID NO: 4388210 - DNA, 25 bp, Homo sapien
taaatgactcatgctggaatatctg

SEQ ID NO: 4388211 - DNA, 25 bp, Homo sapien
atattatgattcttatctgggaaag

SEQ ID NO: 4388212 - DNA, 25 bp, Homo sapien
aagatgtcactttaagctcttttgc

SEQ ID NO: 4388213 - DNA, 25 bp, Homo sapien
tgctgaggtgtaaaagagaggatcc

SEQ ID NO: 4388214 - DNA, 25 bp, Homo sapien
ccacaaattttgttctcaggtacat

SEQ ID NO: 4388215 - DNA, 25 bp, Homo sapien
aaaggtctccgagcctggcctgctg

SEQ ID NO: 4388216 - DNA, 25 bp, Homo sapien
gatggctttcaaagatttcttcact

SEQ ID NO: 4388217 - DNA, 25 bp, Homo sapien
gaaaggtctccgagcctggcctgct

SEQ ID NO: 4388218 - DNA, 25 bp, Homo sapien
ttcttaaaaacaggagctattaggc

SEQ ID NO: 4388219 - DNA, 25 bp, Homo sapien
tcttaaaaacaggagctattaggcc

SEQ ID NO: 4388220 - DNA, 25 bp, Homo sapien
tcagccacctgtgaaattgctatga

SEQ ID NO: 4388221 - DNA, 25 bp, Homo sapien
taagttaggtagttaagtaagctgc

SEQ ID NO: 4388222 - DNA, 25 bp, Homo sapien
ttagggcacaagagattaaataagc

SEQ ID NO: 4388223 - DNA, 25 bp, Homo sapien
gtaagctgccagattagtaaacagc

SEQ ID NO: 4388224 - DNA, 25 bp, Homo sapien
gcagttcccgtgagtcatgctttca

SEQ ID NO: 4388225 - DNA, 25 bp, Homo sapien
gggctttcccagatgacgtcagtga

SEQ ID NO: 4388226 - DNA, 25 bp, Homo sapien
agatggccccggaagagtctcagct

SEQ ID NO: 4388227 - DNA, 25 bp, Homo sapien
tgcagggcatcacccttgccagatg

SEQ ID NO: 4388228 - DNA, 25 bp, Homo sapien
ttcctccaccaccttgactgttaac

SEQ ID NO: 4388229 - DNA, 25 bp, Homo sapien
ctccaccaccttgactgttaacata

SEQ ID NO: 4388230 - DNA, 25 bp, Homo sapien
ccaccaccttgactgttaacataca

SEQ ID NO: 4388231 - DNA, 25 bp, Homo sapien
tcctccaccaccttgactgttaaca

SEQ ID NO: 4388232 - DNA, 25 bp, Homo sapien
tactttggggattgatgatggatca

SEQ ID NO: 4388233 - DNA, 25 bp, Homo sapien
cttccggactctttcaaggtcagtg

SEQ ID NO: 4388234 - DNA, 25 bp, Homo sapien
tttcttccggactctttcaaggtca

SEQ ID NO: 4388235 - DNA, 25 bp, Homo sapien
tgatgatggatcataaatgttgctg

SEQ ID NO: 4388236 - DNA, 25 bp, Homo sapien
taaggttcctcagacgttctcagag

SEQ ID NO: 4388237 - DNA, 25 bp, Homo sapien
ttccccgggagttcaactctgtctc

SEQ ID NO: 4388238 - DNA, 25 bp, Homo sapien
acgttctcagaggacgagctagagg

SEQ ID NO: 4388239 - DNA, 25 bp, Homo sapien
aactctgtctccgtataaggttcct

SEQ ID NO: 4388240 - DNA, 25 bp, Homo sapien
ttagcttgaggacagacgaaaggtc

SEQ ID NO: 4388241 - DNA, 25 bp, Homo sapien
tatttgaaaagctgagaaacaaccc

SEQ ID NO: 4388242 - DNA, 25 bp, Homo sapien
tacctggaaacaacgaatgaggcca

SEQ ID NO: 4388243 - DNA, 25 bp, Homo sapien
ggcatccagctaacaagagtcagag

SEQ ID NO: 4388244 - DNA, 25 bp, Homo sapien
tatccattgtagacaaccagtcaca

SEQ ID NO: 4388245 - DNA, 25 bp, Homo sapien
gttaaaacagcgaccattatccatt

SEQ ID NO: 4388246 - DNA, 25 bp, Homo sapien
ttaaatagtatctgttaaaacagcg

SEQ ID NO: 4388247 - DNA, 25 bp, Homo sapien
cattgtagacaaccagtcacagtcc

SEQ ID NO: 4388248 - DNA, 25 bp, Homo sapien
tcatggtgctgatgaaacacaaaag

SEQ ID NO: 4388249 - DNA, 25 bp, Homo sapien
aagccacaaagcttcttttcctcaa

SEQ ID NO: 4388250 - DNA, 25 bp, Homo sapien
tggtgctgatgaaacacaaaagcca

SEQ ID NO: 4388251 - DNA, 25 bp, Homo sapien
aaagccacaaagcttcttttcctca

SEQ ID NO: 4388252 - DNA, 25 bp, Homo sapien
gctggctggtttttgatgacaccca

SEQ ID NO: 4388253 - DNA, 25 bp, Homo sapien
tggagggctggctggtttttgatga

SEQ ID NO: 4388254 - DNA, 25 bp, Homo sapien
cattttggtgaagactcaggatgtg

SEQ ID NO: 4388255 - DNA, 25 bp, Homo sapien
tttgatgacacccattttggtgaag

SEQ ID NO: 4388256 - DNA, 25 bp, Homo sapien
cctctgcaaaactttctgggctttg

SEQ ID NO: 4388257 - DNA, 25 bp, Homo sapien
aggttgcactggacgagtctgtttg

SEQ ID NO: 4388258 - DNA, 25 bp, Homo sapien
ctctgcaaaactttctgggctttgg

SEQ ID NO: 4388259 - DNA, 25 bp, Homo sapien
actggacgagtctgtttggctgcca

SEQ ID NO: 4388260 - DNA, 25 bp, Homo sapien
gaatgtcgcaatgtcgttcaaggcg

SEQ ID NO: 4388261 - DNA, 25 bp, Homo sapien
gggtactccttgactgtgcccagga

SEQ ID NO: 4388262 - DNA, 25 bp, Homo sapien
tatcaaccccttctcgagactggca

SEQ ID NO: 4388263 - DNA, 25 bp, Homo sapien
tgcatcgagggtgagcagcaactca

SEQ ID NO: 4388264 - DNA, 25 bp, Homo sapien
gaggtagattcctgcctcacaccat

SEQ ID NO: 4388265 - DNA, 25 bp, Homo sapien
gggaagccaagaggtagattcctgc

SEQ ID NO: 4388266 - DNA, 25 bp, Homo sapien
agattcctgcctcacaccattggct

SEQ ID NO: 4388267 - DNA, 25 bp, Homo sapien
ccaagaggtagattcctgcctcaca

SEQ ID NO: 4388268 - DNA, 25 bp, Homo sapien
gccaccgtaatcctcagcaggtctg

SEQ ID NO: 4388269 - DNA, 25 bp, Homo sapien
ttgtaaggtgtctacaaggattccc

SEQ ID NO: 4388270 - DNA, 25 bp, Homo sapien
tcatgggacggcatcgagtttaagg

SEQ ID NO: 4388271 - DNA, 25 bp, Homo sapien
caatgggaaattgtcatgggacggc

SEQ ID NO: 4388272 - DNA, 25 bp, Homo sapien
gtattccagacctatcgacgctgag

SEQ ID NO: 4388273 - DNA, 25 bp, Homo sapien
ctttatatgagggaagcactctgca

SEQ ID NO: 4388274 - DNA, 25 bp, Homo sapien
gatggagcatgctgactcattgccg

SEQ ID NO: 4388275 - DNA, 25 bp, Homo sapien
ggatatgtacgtgcccatgagtaac

SEQ ID NO: 4388276 - DNA, 25 bp, Homo sapien
catcatgttcttggctgtgttttgc

SEQ ID NO: 4388277 - DNA, 25 bp, Homo sapien
taccttcgtgccaggtatacttcta

SEQ ID NO: 4388278 - DNA, 25 bp, Homo sapien
ggatggccagagcactttttacctt

SEQ ID NO: 4388279 - DNA, 25 bp, Homo sapien
cttcttcacagaaaatcttgcagac

SEQ ID NO: 4388280 - DNA, 25 bp, Homo sapien
tccattgatgaaatcgtcacagagg

SEQ ID NO: 4388281 - DNA, 25 bp, Homo sapien
ggctttggatgagctggtccccaac

SEQ ID NO: 4388282 - DNA, 25 bp, Homo sapien
ataatggtggctttggatgagctgg

SEQ ID NO: 4388283 - DNA, 25 bp, Homo sapien
tggtggctttggatgagctggtccc

SEQ ID NO: 4388284 - DNA, 25 bp, Homo sapien
ctgcaaagtgaacacccacagccag

SEQ ID NO: 4388285 - DNA, 25 bp, Homo sapien
aagtcagagcatcatgaggctgaga

SEQ ID NO: 4388286 - DNA, 25 bp, Homo sapien
gcgtcagaagtcagagcatcatgag

SEQ ID NO: 4388287 - DNA, 25 bp, Homo sapien
tcagaagtcagagcatcatgaggct

SEQ ID NO: 4388288 - DNA, 25 bp, Homo sapien
gacacctatggtccagaaccagctc

SEQ ID NO: 4388289 - DNA, 25 bp, Homo sapien
tgcgctatgccacagacacctatgg

SEQ ID NO: 4388290 - DNA, 25 bp, Homo sapien
tcattatgttgtgaccacttatctg

SEQ ID NO: 4388291 - DNA, 25 bp, Homo sapien
tgtgaccacttatctgctgcctgcg

SEQ ID NO: 4388292 - DNA, 25 bp, Homo sapien
tgactggacatgatccatcattgtc

SEQ ID NO: 4388293 - DNA, 25 bp, Homo sapien
tctgtgctgcccgtattattcatag

SEQ ID NO: 4388294 - DNA, 25 bp, Homo sapien
agcagttgttaatgtgcctctctcc

SEQ ID NO: 4388295 - DNA, 25 bp, Homo sapien
tcctgtgtcctttagcaaccttcca

SEQ ID NO: 4388296 - DNA, 25 bp, Homo sapien
tgttccttaagaatctgctccacgt

SEQ ID NO: 4388297 - DNA, 25 bp, Homo sapien
gaatctgctccacgtgcatcacgct

SEQ ID NO: 4388298 - DNA, 25 bp, Homo sapien
ccttaagaatctgctccacgtgcat

SEQ ID NO: 4388299 - DNA, 25 bp, Homo sapien
tttgtgttccttaagaatctgctcc

SEQ ID NO: 4388300 - DNA, 25 bp, Homo sapien
gcactccggccggagtgacagagca

SEQ ID NO: 4388301 - DNA, 25 bp, Homo sapien
aattccagctacttgggaggctgag

SEQ ID NO: 4388302 - DNA, 25 bp, Homo sapien
tagcttgagcccagaagatcaaagc

SEQ ID NO: 4388303 - DNA, 25 bp, Homo sapien
cgggtgtgatggtggggcatgcctg

SEQ ID NO: 4388304 - DNA, 25 bp, Homo sapien
cttcagatgatgctcagaccaaaag

SEQ ID NO: 4388305 - DNA, 25 bp, Homo sapien
aatcgtgctcaaaatgctgtagttg

SEQ ID NO: 4388306 - DNA, 25 bp, Homo sapien
tcagaccaaaagtgactaaaggctt

SEQ ID NO: 4388307 - DNA, 25 bp, Homo sapien
tagttgtaggcactggttaagcttc

SEQ ID NO: 4388308 - DNA, 25 bp, Homo sapien
gaaagtgatgttaggttagcattca

SEQ ID NO: 4388309 - DNA, 25 bp, Homo sapien
tgagaaagtgatgttaggttagcat

SEQ ID NO: 4388310 - DNA, 25 bp, Homo sapien
tgatgttaggttagcattcatttcc

SEQ ID NO: 4388311 - DNA, 25 bp, Homo sapien
gatgttaggttagcattcatttcca

SEQ ID NO: 4388312 - DNA, 25 bp, Homo sapien
tctcaagttggttgagattgagttt

SEQ ID NO: 4388313 - DNA, 25 bp, Homo sapien
gctggttcttggatgcatgacagca

SEQ ID NO: 4388314 - DNA, 25 bp, Homo sapien
gagtttgctgttgggacatttggtt

SEQ ID NO: 4388315 - DNA, 25 bp, Homo sapien
tgttgggacatttggttgctggttc

SEQ ID NO: 4388316 - DNA, 25 bp, Homo sapien
tgagcattagaacaggcccatactt

SEQ ID NO: 4388317 - DNA, 25 bp, Homo sapien
aatcaagggatcacctctgcacgca

SEQ ID NO: 4388318 - DNA, 25 bp, Homo sapien
cctggaagggttacattgccatacc

SEQ ID NO: 4388319 - DNA, 25 bp, Homo sapien
gcaaaacaaaagtggcagagcctga

SEQ ID NO: 4388320 - DNA, 25 bp, Homo sapien
gcacttgctcgtactctccttgatg

SEQ ID NO: 4388321 - DNA, 25 bp, Homo sapien
tgtgccctgagcacttgctcgtact

SEQ ID NO: 4388322 - DNA, 25 bp, Homo sapien
tggaggtgccgttgtgcgtgtgccc

SEQ ID NO: 4388323 - DNA, 25 bp, Homo sapien
cacagcaggaatgacgggcagctga

SEQ ID NO: 4388324 - DNA, 25 bp, Homo sapien
aaccttttctccagagaccttcctg

SEQ ID NO: 4388325 - DNA, 25 bp, Homo sapien
accttttctccagagaccttcctga

SEQ ID NO: 4388326 - DNA, 25 bp, Homo sapien
ttttctccagagaccttcctgactg

SEQ ID NO: 4388327 - DNA, 25 bp, Homo sapien
ttctccagagaccttcctgactgac

SEQ ID NO: 4388328 - DNA, 25 bp, Homo sapien
ttgtcatcccggtgcttctgctctt

SEQ ID NO: 4388329 - DNA, 25 bp, Homo sapien
cacgcccttcttggattgaggcaaa

SEQ ID NO: 4388330 - DNA, 25 bp, Homo sapien
gcaccgtgctcatgagcccaaggca

SEQ ID NO: 4388331 - DNA, 25 bp, Homo sapien
atgacacccctttgcaccaacagga

SEQ ID NO: 4388332 - DNA, 25 bp, Homo sapien
ttctttcattacaaactgcctgtct

SEQ ID NO: 4388333 - DNA, 25 bp, Homo sapien
tctttcattacaaactgcctgtctg

SEQ ID NO: 4388334 - DNA, 25 bp, Homo sapien
aaggtttaagatgatcagtggcttc

SEQ ID NO: 4388335 - DNA, 25 bp, Homo sapien
ggaaggtttaagatgatcagtggct

SEQ ID NO: 4388336 - DNA, 25 bp, Homo sapien
aacgagggcttaactgttaattctg

SEQ ID NO: 4388337 - DNA, 25 bp, Homo sapien
taactgttaattctgcttccagctc

SEQ ID NO: 4388338 - DNA, 25 bp, Homo sapien
ggcttaactgttaattctgcttcca

SEQ ID NO: 4388339 - DNA, 25 bp, Homo sapien
agctctctccgagaggcaggcatac

SEQ ID NO: 4388340 - DNA, 25 bp, Homo sapien
cacagacactggcctctgagaggtc

SEQ ID NO: 4388341 - DNA, 25 bp, Homo sapien
ctctgagaggtcactgaccgctcac

SEQ ID NO: 4388342 - DNA, 25 bp, Homo sapien
tgctggcacagacactggcctctga

SEQ ID NO: 4388343 - DNA, 25 bp, Homo sapien
ggcctctgagaggtcactgaccgct

SEQ ID NO: 4388344 - DNA, 25 bp, Homo sapien
ccttgtgtgggacatgagaaggtct

SEQ ID NO: 4388345 - DNA, 25 bp, Homo sapien
aggcaggacccaaacgtctgcagca

SEQ ID NO: 4388346 - DNA, 25 bp, Homo sapien
cgtggatagcatgcttctgggcagc

SEQ ID NO: 4388347 - DNA, 25 bp, Homo sapien
agcttgtcccgctgccttgtgtggg

SEQ ID NO: 4388348 - DNA, 25 bp, Homo sapien
tcagttggcttttgtcgatgtagcc

SEQ ID NO: 4388349 - DNA, 25 bp, Homo sapien
tttgtcgatgtagccgtgaaggtca

SEQ ID NO: 4388350 - DNA, 25 bp, Homo sapien
ggtcagagacagagtttaccatgat

SEQ ID NO: 4388351 - DNA, 25 bp, Homo sapien
tcccgggtcagttggcttttgtcga

SEQ ID NO: 4388352 - DNA, 25 bp, Homo sapien
gatagtatttaatgccaatgtcagt

SEQ ID NO: 4388353 - DNA, 25 bp, Homo sapien
cagtgaatgtcctctggataaagcg

SEQ ID NO: 4388354 - DNA, 25 bp, Homo sapien
taaagcgagatggacgaaggatgaa

SEQ ID NO: 4388355 - DNA, 25 bp, Homo sapien
cgaaggatgaatatgagctgtaagt

SEQ ID NO: 4388356 - DNA, 25 bp, Homo sapien
agacctctggaatagtcatgggcat

SEQ ID NO: 4388357 - DNA, 25 bp, Homo sapien
cagaactctctagaggccagacctc

SEQ ID NO: 4388358 - DNA, 25 bp, Homo sapien
aagccagaactctctagaggccaga

SEQ ID NO: 4388359 - DNA, 25 bp, Homo sapien
cctctggaatagtcatgggcatcaa

SEQ ID NO: 4388360 - DNA, 25 bp, Homo sapien
tgcagttatcccaaagataaatcct

SEQ ID NO: 4388361 - DNA, 25 bp, Homo sapien
ctgcagttatcccaaagataaatcc

SEQ ID NO: 4388362 - DNA, 25 bp, Homo sapien
gctgcagttatcccaaagataaatc

SEQ ID NO: 4388363 - DNA, 25 bp, Homo sapien
agctattcgtgtcaaggatgccttt

SEQ ID NO: 4388364 - DNA, 25 bp, Homo sapien
ctattcgtgtcaaggatgcctttac

SEQ ID NO: 4388365 - DNA, 25 bp, Homo sapien
gctattcgtgtcaaggatgccttta

SEQ ID NO: 4388366 - DNA, 25 bp, Homo sapien
tctgtcgataacaacaatgaatcca

SEQ ID NO: 4388367 - DNA, 25 bp, Homo sapien
caatgaatccaatgctggcagcctc

SEQ ID NO: 4388368 - DNA, 25 bp, Homo sapien
tccacttgtctcttcgtctgtcgat

SEQ ID NO: 4388369 - DNA, 25 bp, Homo sapien
tcttcgtctgtcgataacaacaatg

SEQ ID NO: 4388370 - DNA, 25 bp, Homo sapien
tctgatcaccatggaattaaactgg

SEQ ID NO: 4388371 - DNA, 25 bp, Homo sapien
tctgctgcactagcaaaaacgtgtg

SEQ ID NO: 4388372 - DNA, 25 bp, Homo sapien
gcttccgaatgttactgggcactga

SEQ ID NO: 4388373 - DNA, 25 bp, Homo sapien
tatagaggtggttgcttagcttccg

SEQ ID NO: 4388374 - DNA, 25 bp, Homo sapien
tactaacaaaaggtcatggatcacc

SEQ ID NO: 4388375 - DNA, 25 bp, Homo sapien
gattttataccagtggctcatgcac

SEQ ID NO: 4388376 - DNA, 25 bp, Homo sapien
tgggatgtgctaacacaataggcac

SEQ ID NO: 4388377 - DNA, 25 bp, Homo sapien
tcagaaggcaaaagctcgtgtgctc

SEQ ID NO: 4388378 - DNA, 25 bp, Homo sapien
taaataggtccctcaacagattccg

SEQ ID NO: 4388379 - DNA, 25 bp, Homo sapien
gacggcacctgatgggctaaaactg

SEQ ID NO: 4388380 - DNA, 25 bp, Homo sapien
tacaatttatatagcagacggcacc

SEQ ID NO: 4388381 - DNA, 25 bp, Homo sapien
taatgagtttcctgcggtctgagac

SEQ ID NO: 4388382 - DNA, 25 bp, Homo sapien
tgagcaaaagcggaagaagaaaggc

SEQ ID NO: 4388383 - DNA, 25 bp, Homo sapien
ctccactttttgtggaaaggaacag

SEQ ID NO: 4388384 - DNA, 25 bp, Homo sapien
aagtagtgtgagcaaaagcggaaga

SEQ ID NO: 4388385 - DNA, 25 bp, Homo sapien
cagacagccactctttcccgaaaga

SEQ ID NO: 4388386 - DNA, 25 bp, Homo sapien
cacaagtggtatcagacgccaggca

SEQ ID NO: 4388387 - DNA, 25 bp, Homo sapien
tcatgggctcagctacaagcacagt

SEQ ID NO: 4388388 - DNA, 25 bp, Homo sapien
gacctgggcccataccgatttaagc

SEQ ID NO: 4388389 - DNA, 25 bp, Homo sapien
taacgcgtggcatatggcagtggca

SEQ ID NO: 4388390 - DNA, 25 bp, Homo sapien
gaagtatatgtctcaacccagccct

SEQ ID NO: 4388391 - DNA, 25 bp, Homo sapien
ccagccctgccacatgggaagtgtg

SEQ ID NO: 4388392 - DNA, 25 bp, Homo sapien
ttatgcataccagggtacaccatgc

SEQ ID NO: 4388393 - DNA, 25 bp, Homo sapien
ccttgctcgtgactgatgggtgaca

SEQ ID NO: 4388394 - DNA, 25 bp, Homo sapien
aaggcggcaggacactgtgctcagc

SEQ ID NO: 4388395 - DNA, 25 bp, Homo sapien
gcggcaggacactgtgctcagctca

SEQ ID NO: 4388396 - DNA, 25 bp, Homo sapien
ctaaggcggcaggacactgtgctca

SEQ ID NO: 4388397 - DNA, 25 bp, Homo sapien
cggcaggacactgtgctcagctcac

SEQ ID NO: 4388398 - DNA, 25 bp, Homo sapien
ctggggatgctagtcaggtaggtca

SEQ ID NO: 4388399 - DNA, 25 bp, Homo sapien
tggggatgctagtcaggtaggtcat

SEQ ID NO: 4388400 - DNA, 25 bp, Homo sapien
tctgggatgtgtttgaaccccgaaa

SEQ ID NO: 4388401 - DNA, 25 bp, Homo sapien
aacgtgatgatgggggcgccatcct

SEQ ID NO: 4388402 - DNA, 25 bp, Homo sapien
cccgaaaactctgggaacgtgatga

SEQ ID NO: 4388403 - DNA, 25 bp, Homo sapien
gacattcaggaagtcttcatctggg

SEQ ID NO: 4388404 - DNA, 25 bp, Homo sapien
gaaagaatggcaaattgtctgtgaa

SEQ ID NO: 4388405 - DNA, 25 bp, Homo sapien
atctccaccgccatcaggggtctga

SEQ ID NO: 4388406 - DNA, 25 bp, Homo sapien
tcaggggtctgacttcctgctgcat

SEQ ID NO: 4388407 - DNA, 25 bp, Homo sapien
aagttgttctattatctccaccgcc

SEQ ID NO: 4388408 - DNA, 25 bp, Homo sapien
gagatttgctgacaaatactccagc

SEQ ID NO: 4388409 - DNA, 25 bp, Homo sapien
gggccttctctgttagaaacacaaa

SEQ ID NO: 4388410 - DNA, 25 bp, Homo sapien
aactccttcgtcactgttcattcgg

SEQ ID NO: 4388411 - DNA, 25 bp, Homo sapien
tcattcggtgggtgtaataacggca

SEQ ID NO: 4388412 - DNA, 25 bp, Homo sapien
gtcaatatttgaggtgtgctttaaa

SEQ ID NO: 4388413 - DNA, 25 bp, Homo sapien
gatgatgaaccgagagaaaaacaaa

SEQ ID NO: 4388414 - DNA, 25 bp, Homo sapien
catatttcagagatgatgaaccgag

SEQ ID NO: 4388415 - DNA, 25 bp, Homo sapien
agtgctagaattagaggcacaaacc

SEQ ID NO: 4388416 - DNA, 25 bp, Homo sapien
tcagacaggcttgcatgcaaaggcc

SEQ ID NO: 4388417 - DNA, 25 bp, Homo sapien
gtgatcagggcaagtacactctgag

SEQ ID NO: 4388418 - DNA, 25 bp, Homo sapien
tgcagatacacccagccttcagttg

SEQ ID NO: 4388419 - DNA, 25 bp, Homo sapien
cccactcctgtataggtaggtaggg

SEQ ID NO: 4388420 - DNA, 25 bp, Homo sapien
cagaggtctgtggaggcttcctgct

SEQ ID NO: 4388421 - DNA, 25 bp, Homo sapien
tcacagaggtctgtggaggcttcct

SEQ ID NO: 4388422 - DNA, 25 bp, Homo sapien
gcctcacagaggtctgtggaggctt

SEQ ID NO: 4388423 - DNA, 25 bp, Homo sapien
aggtctgtggaggcttcctgcttct

SEQ ID NO: 4388424 - DNA, 25 bp, Homo sapien
ctccacaaccagactggacttgacc

SEQ ID NO: 4388425 - DNA, 25 bp, Homo sapien
cacaaccagactggacttgaccact

SEQ ID NO: 4388426 - DNA, 25 bp, Homo sapien
tccacaaccagactggacttgacca

SEQ ID NO: 4388427 - DNA, 25 bp, Homo sapien
acaaccagactggacttgaccactg

SEQ ID NO: 4388428 - DNA, 25 bp, Homo sapien
tgtgaccgcatccaaatgctagggt

SEQ ID NO: 4388429 - DNA, 25 bp, Homo sapien
cacactgcttcagagtgcagggagg

SEQ ID NO: 4388430 - DNA, 25 bp, Homo sapien
aaaagaaaatgtgaccgcatccaaa

SEQ ID NO: 4388431 - DNA, 25 bp, Homo sapien
catccaaatgctagggtggtttgtg

SEQ ID NO: 4388432 - DNA, 25 bp, Homo sapien
tccgcaccaaggtgtaaggtgagta

SEQ ID NO: 4388433 - DNA, 25 bp, Homo sapien
ctactaaacggtgataggccctcat

SEQ ID NO: 4388434 - DNA, 25 bp, Homo sapien
tgcctctgttatccgcaccaaggtg

SEQ ID NO: 4388435 - DNA, 25 bp, Homo sapien
gccatatattccagcctgatgcaac

SEQ ID NO: 4388436 - DNA, 25 bp, Homo sapien
accagaccacgactggattccagga

SEQ ID NO: 4388437 - DNA, 25 bp, Homo sapien
actggattccaggaaacggcgccac

SEQ ID NO: 4388438 - DNA, 25 bp, Homo sapien
tgctcacacttcatgcaccagacca

SEQ ID NO: 4388439 - DNA, 25 bp, Homo sapien
gcgccacctcgctcgctctccattt

SEQ ID NO: 4388440 - DNA, 25 bp, Homo sapien
gaggcttaacgctgcagccagtaag

SEQ ID NO: 4388441 - DNA, 25 bp, Homo sapien
aaaatccagaggcttaacgctgcag

SEQ ID NO: 4388442 - DNA, 25 bp, Homo sapien
gtaataaaatccagaggcttaacgc

SEQ ID NO: 4388443 - DNA, 25 bp, Homo sapien
tgcagccagtaagattcactatctg

SEQ ID NO: 4388444 - DNA, 25 bp, Homo sapien
atgtagagcgcctcctgaacgactc

SEQ ID NO: 4388445 - DNA, 25 bp, Homo sapien
agacaggatgtagagcgcctcctga

SEQ ID NO: 4388446 - DNA, 25 bp, Homo sapien
tgacacggcaaacggtaaaggttca

SEQ ID NO: 4388447 - DNA, 25 bp, Homo sapien
cacggcaaacggtaaaggttcagat

SEQ ID NO: 4388448 - DNA, 25 bp, Homo sapien
actcatttgggaagagctggtccat

SEQ ID NO: 4388449 - DNA, 25 bp, Homo sapien
tcagaagctacttgataaggaaata

SEQ ID NO: 4388450 - DNA, 25 bp, Homo sapien
gaattatcaaaactgggccttccca

SEQ ID NO: 4388451 - DNA, 25 bp, Homo sapien
caaagtatgtcctcacaagtgtatc

SEQ ID NO: 4388452 - DNA, 25 bp, Homo sapien
tttgtcgtaaaagttcagtgcccac

SEQ ID NO: 4388453 - DNA, 25 bp, Homo sapien
cgattattacagcaaacacgttgga

SEQ ID NO: 4388454 - DNA, 25 bp, Homo sapien
tcccgataattccagttgcccacat

SEQ ID NO: 4388455 - DNA, 25 bp, Homo sapien
gcaacagagaaaatgatcccgataa

SEQ ID NO: 4388456 - DNA, 25 bp, Homo sapien
cctggctttatcaataaaagctgat

SEQ ID NO: 4388457 - DNA, 25 bp, Homo sapien
gatttgcattcatgggaggacctcc

SEQ ID NO: 4388458 - DNA, 25 bp, Homo sapien
gccagtcgccgggtgagctcctggg

SEQ ID NO: 4388459 - DNA, 25 bp, Homo sapien
gacatgagtgatcactgtggccagt

SEQ ID NO: 4388460 - DNA, 25 bp, Homo sapien
cgacatgagtgatcactgtggccag

SEQ ID NO: 4388461 - DNA, 25 bp, Homo sapien
tcactgtggccagtcgccgggtgag

SEQ ID NO: 4388462 - DNA, 25 bp, Homo sapien
aaaaggaagcaagtcgccaatctcg

SEQ ID NO: 4388463 - DNA, 25 bp, Homo sapien
caaaactgtttctaccgctgcggtg

SEQ ID NO: 4388464 - DNA, 25 bp, Homo sapien
actgtagagtgagggatgctccgcc

SEQ ID NO: 4388465 - DNA, 25 bp, Homo sapien
tttaaaggcatctccgcccaaggat

SEQ ID NO: 4388466 - DNA, 25 bp, Homo sapien
tcgcaccggggtccggatcatcaga

SEQ ID NO: 4388467 - DNA, 25 bp, Homo sapien
acagtgactgaggcgctccagtcgc

SEQ ID NO: 4388468 - DNA, 25 bp, Homo sapien
actgaggcgctccagtcgcaccggg

SEQ ID NO: 4388469 - DNA, 25 bp, Homo sapien
gtccggatcatcagacgcgcgccgg

SEQ ID NO: 4388470 - DNA, 25 bp, Homo sapien
agctgccgccatccggcaggacccg

SEQ ID NO: 4388471 - DNA, 25 bp, Homo sapien
agttcttgacctccgctggccacac

SEQ ID NO: 4388472 - DNA, 25 bp, Homo sapien
gaggctgggtgaggcgccgctgctt

SEQ ID NO: 4388473 - DNA, 25 bp, Homo sapien
acttggggttgttccacgcagttct

SEQ ID NO: 4388474 - DNA, 25 bp, Homo sapien
ggcgcccgggctgcgctccgacaag

SEQ ID NO: 4388475 - DNA, 25 bp, Homo sapien
cccggcgcccgggctgcgctccgac

SEQ ID NO: 4388476 - DNA, 25 bp, Homo sapien
gagcccggcgcccgggctgcgctcc

SEQ ID NO: 4388477 - DNA, 25 bp, Homo sapien
ctgggagcccggcgcccgggctgcg

SEQ ID NO: 4388478 - DNA, 25 bp, Homo sapien
tgaatactcagcaggcggaatggcg

SEQ ID NO: 4388479 - DNA, 25 bp, Homo sapien
aatgcgaattcggtcaggttgtccc

SEQ ID NO: 4388480 - DNA, 25 bp, Homo sapien
cagttcagcagagcgctacgggaaa

SEQ ID NO: 4388481 - DNA, 25 bp, Homo sapien
tacgggaaacgcctgagcaaatgcg

SEQ ID NO: 4388482 - DNA, 25 bp, Homo sapien
ctctttcctcttcgatatgtaaaaa

SEQ ID NO: 4388483 - DNA, 25 bp, Homo sapien
tatgtaaaaagccaagccgcaaaca

SEQ ID NO: 4388484 - DNA, 25 bp, Homo sapien
gccgcaaacaccctggatccaaatt

SEQ ID NO: 4388485 - DNA, 25 bp, Homo sapien
ttcctcttcgatatgtaaaaagcca

SEQ ID NO: 4388486 - DNA, 25 bp, Homo sapien
gatcacttctctataactggcctcc

SEQ ID NO: 4388487 - DNA, 25 bp, Homo sapien
caaactatatcacctcttgtaaggg

SEQ ID NO: 4388488 - DNA, 25 bp, Homo sapien
tattgtaaggacagcaccaaactaa

SEQ ID NO: 4388489 - DNA, 25 bp, Homo sapien
ggaaaaggtatcaacttaaatctgc

SEQ ID NO: 4388490 - DNA, 25 bp, Homo sapien
cgaatgcctcgctgggattggctca

SEQ ID NO: 4388491 - DNA, 25 bp, Homo sapien
tagccgagtggtttcaacggtgacg

SEQ ID NO: 4388492 - DNA, 25 bp, Homo sapien
atgtggacgacaacggagacgcagc

SEQ ID NO: 4388493 - DNA, 25 bp, Homo sapien
caagaggcttttacaccgaacggag

SEQ ID NO: 4388494 - DNA, 25 bp, Homo sapien
cattagtcatgagctcttgggacga

SEQ ID NO: 4388495 - DNA, 25 bp, Homo sapien
gaatcctgcctgaatactcgtaaca

SEQ ID NO: 4388496 - DNA, 25 bp, Homo sapien
tgagcaggcgatcacagcatgcact

SEQ ID NO: 4388497 - DNA, 25 bp, Homo sapien
tcctgtttagagttagaccctgtgg

SEQ ID NO: 4388498 - DNA, 25 bp, Homo sapien
tcattaggatacaaccctcttgacc

SEQ ID NO: 4388499 - DNA, 25 bp, Homo sapien
taggatcaagtcactagcagatttg

SEQ ID NO: 4388500 - DNA, 25 bp, Homo sapien
taatgaaagcgacaagggagctctc

SEQ ID NO: 4388501 - DNA, 25 bp, Homo sapien
taacatttgaattcggtgggtcgga

SEQ ID NO: 4388502 - DNA, 25 bp, Homo sapien
tgtagccagatagcttggcacctta

SEQ ID NO: 4388503 - DNA, 25 bp, Homo sapien
ctctgatgatcactgcgaaccaccg

SEQ ID NO: 4388504 - DNA, 25 bp, Homo sapien
gatagcttggcaccttattgcacca

SEQ ID NO: 4388505 - DNA, 25 bp, Homo sapien
tattgcaccacagctctgatgatca

SEQ ID NO: 4388506 - DNA, 25 bp, Homo sapien
caacaaaagtatttgagcatggaat

SEQ ID NO: 4388507 - DNA, 25 bp, Homo sapien
acaaaagtatttgagcatggaatac

SEQ ID NO: 4388508 - DNA, 25 bp, Homo sapien
tcagtatcctctcaacaaaagtatt

SEQ ID NO: 4388509 - DNA, 25 bp, Homo sapien
cagtatcctctcaacaaaagtattt

SEQ ID NO: 4388510 - DNA, 25 bp, Homo sapien
gctgtttgtcagtcaggtcctttgc

SEQ ID NO: 4388511 - DNA, 25 bp, Homo sapien
tatggctggcaacaatgatagctgt

SEQ ID NO: 4388512 - DNA, 25 bp, Homo sapien
gtcttgtaggcacaatctaaggaag

SEQ ID NO: 4388513 - DNA, 25 bp, Homo sapien
tccaagggtgcccactcgctttgca

SEQ ID NO: 4388514 - DNA, 25 bp, Homo sapien
tttttcaattctgttggtgactcac

SEQ ID NO: 4388515 - DNA, 25 bp, Homo sapien
tatataaccgaaacaaagttgcacc

SEQ ID NO: 4388516 - DNA, 25 bp, Homo sapien
aagttgcaccaaacaatatttactc

SEQ ID NO: 4388517 - DNA, 25 bp, Homo sapien
ttgctataggtgatacatattttcc

SEQ ID NO: 4388518 - DNA, 25 bp, Homo sapien
gctattttcatcatgggttccccca

SEQ ID NO: 4388519 - DNA, 25 bp, Homo sapien
tggctattttcatcatgggttcccc

SEQ ID NO: 4388520 - DNA, 25 bp, Homo sapien
ttttcatcatgggttcccccagctc

SEQ ID NO: 4388521 - DNA, 25 bp, Homo sapien
ctctggctattttcatcatgggttc

SEQ ID NO: 4388522 - DNA, 25 bp, Homo sapien
cctgcttccttgcataagaagtata

SEQ ID NO: 4388523 - DNA, 25 bp, Homo sapien
agaagtatatgatggtcacattagc

SEQ ID NO: 4388524 - DNA, 25 bp, Homo sapien
tatatgatggtcacattagctctca

SEQ ID NO: 4388525 - DNA, 25 bp, Homo sapien
gctccgtgttgattcattcacccag

SEQ ID NO: 4388526 - DNA, 25 bp, Homo sapien
tgtctctgctgccaggaacccaggg

SEQ ID NO: 4388527 - DNA, 25 bp, Homo sapien
gtctctgctgccaggaacccagggc

SEQ ID NO: 4388528 - DNA, 25 bp, Homo sapien
tcaataggtaactgtctctgctgcc

SEQ ID NO: 4388529 - DNA, 25 bp, Homo sapien
aactgtctctgctgccaggaaccca

SEQ ID NO: 4388530 - DNA, 25 bp, Homo sapien
ctggataagactcccccacttccgc

SEQ ID NO: 4388531 - DNA, 25 bp, Homo sapien
ggcctggataagactcccccacttc

SEQ ID NO: 4388532 - DNA, 25 bp, Homo sapien
agggcctggataagactcccccact

SEQ ID NO: 4388533 - DNA, 25 bp, Homo sapien
cccccacttccgcagccctcctcct

SEQ ID NO: 4388534 - DNA, 25 bp, Homo sapien
tccacctacactgggaatgagttgg

SEQ ID NO: 4388535 - DNA, 25 bp, Homo sapien
gatcgtagctcctggaaaggcttcc

SEQ ID NO: 4388536 - DNA, 25 bp, Homo sapien
agatgctgaatggataagcggtcac

SEQ ID NO: 4388537 - DNA, 25 bp, Homo sapien
cggtcacatgatcaaagtactgcct

SEQ ID NO: 4388538 - DNA, 25 bp, Homo sapien
ctgcgaacatagctgacttggattt

SEQ ID NO: 4388539 - DNA, 25 bp, Homo sapien
caagcttaggtgtggaacatttgtg

SEQ ID NO: 4388540 - DNA, 25 bp, Homo sapien
caagccacaagcttaggtgtggaac

SEQ ID NO: 4388541 - DNA, 25 bp, Homo sapien
ttggatttgcaagccacaagcttag

SEQ ID NO: 4388542 - DNA, 25 bp, Homo sapien
ctgtcttaagagctatcaccttact

SEQ ID NO: 4388543 - DNA, 25 bp, Homo sapien
tgaacctgtcttaagagctatcacc

SEQ ID NO: 4388544 - DNA, 25 bp, Homo sapien
ttctgaacctgtcttaagagctatc

SEQ ID NO: 4388545 - DNA, 25 bp, Homo sapien
cctgtcttaagagctatcaccttac

SEQ ID NO: 4388546 - DNA, 25 bp, Homo sapien
tccaagtgcttacacaggcctctga

SEQ ID NO: 4388547 - DNA, 25 bp, Homo sapien
attccaagtgcttacacaggcctct

SEQ ID NO: 4388548 - DNA, 25 bp, Homo sapien
ttccaagtgcttacacaggcctctg

SEQ ID NO: 4388549 - DNA, 25 bp, Homo sapien
cattccaagtgcttacacaggcctc

SEQ ID NO: 4388550 - DNA, 25 bp, Homo sapien
tctggcttggtctcatgtttcaggg

SEQ ID NO: 4388551 - DNA, 25 bp, Homo sapien
tatgaaagaatagaatttcggccag

SEQ ID NO: 4388552 - DNA, 25 bp, Homo sapien
ggaaattactcaatagatgctccta

SEQ ID NO: 4388553 - DNA, 25 bp, Homo sapien
aagaatagaatttcggccaggcata

SEQ ID NO: 4388554 - DNA, 25 bp, Homo sapien
tatgagatctaatacaacacccagg

SEQ ID NO: 4388555 - DNA, 25 bp, Homo sapien
aatgattttgcaaccccaagttggg

SEQ ID NO: 4388556 - DNA, 25 bp, Homo sapien
cccgaagccattgagaccagaatag

SEQ ID NO: 4388557 - DNA, 25 bp, Homo sapien
tgtatatgtgtgtttcccgaagcca

SEQ ID NO: 4388558 - DNA, 25 bp, Homo sapien
ttggcaactggagtcccttaacctc

SEQ ID NO: 4388559 - DNA, 25 bp, Homo sapien
gatcaaccttggcaactggagtccc

SEQ ID NO: 4388560 - DNA, 25 bp, Homo sapien
tcagatcaaccttggcaactggagt

SEQ ID NO: 4388561 - DNA, 25 bp, Homo sapien
caaccttggcaactggagtccctta

SEQ ID NO: 4388562 - DNA, 25 bp, Homo sapien
cgctccaccaaagactctgggccac

SEQ ID NO: 4388563 - DNA, 25 bp, Homo sapien
tccgctccaccaaagactctgggcc

SEQ ID NO: 4388564 - DNA, 25 bp, Homo sapien
attccgctccaccaaagactctggg

SEQ ID NO: 4388565 - DNA, 25 bp, Homo sapien
gattccgctccaccaaagactctgg

SEQ ID NO: 4388566 - DNA, 25 bp, Homo sapien
gctgggcctgctctaacttgtgcct

SEQ ID NO: 4388567 - DNA, 25 bp, Homo sapien
gccccacagtaagttggcccaaatg

SEQ ID NO: 4388568 - DNA, 25 bp, Homo sapien
tgctctaacttgtgcctctgctcta

SEQ ID NO: 4388569 - DNA, 25 bp, Homo sapien
gttccttgcctagaatactccctta

SEQ ID NO: 4388570 - DNA, 25 bp, Homo sapien
aaactccagggcctccgatatcatt

SEQ ID NO: 4388571 - DNA, 25 bp, Homo sapien
ccagacctgcatccttggaacctga

SEQ ID NO: 4388572 - DNA, 25 bp, Homo sapien
gacctgcatccttggaacctgacct

SEQ ID NO: 4388573 - DNA, 25 bp, Homo sapien
agggcctccgatatcattttccaga

SEQ ID NO: 4388574 - DNA, 25 bp, Homo sapien
tacaactggtgaacactaagaggcc

SEQ ID NO: 4388575 - DNA, 25 bp, Homo sapien
tgtaccatcaaggagaatctgtcgc

SEQ ID NO: 4388576 - DNA, 25 bp, Homo sapien
tgtcacgcttctaaggcacagagca

SEQ ID NO: 4388577 - DNA, 25 bp, Homo sapien
cagttccggtccaaaatgggccatc

SEQ ID NO: 4388578 - DNA, 25 bp, Homo sapien
agtggaagaacctatgagatgttct

SEQ ID NO: 4388579 - DNA, 25 bp, Homo sapien
gaggaggacagaacacaagtatttc

SEQ ID NO: 4388580 - DNA, 25 bp, Homo sapien
gttcttggcaaggagcccaaatgac

SEQ ID NO: 4388581 - DNA, 25 bp, Homo sapien
acgagggaggatgcagaataagaaa

SEQ ID NO: 4388582 - DNA, 25 bp, Homo sapien
gaatcttttagcagacttgccgaaa

SEQ ID NO: 4388583 - DNA, 25 bp, Homo sapien
tttagcagacttgccgaaacaagaa

SEQ ID NO: 4388584 - DNA, 25 bp, Homo sapien
aatcttttagcagacttgccgaaac

SEQ ID NO: 4388585 - DNA, 25 bp, Homo sapien
tcttttagcagacttgccgaaacaa

SEQ ID NO: 4388586 - DNA, 25 bp, Homo sapien
gagccgccacgcccagcaagagcca

SEQ ID NO: 4388587 - DNA, 25 bp, Homo sapien
tgagccgccacgcccagcaagagcc

SEQ ID NO: 4388588 - DNA, 25 bp, Homo sapien
agccgccacgcccagcaagagccag

SEQ ID NO: 4388589 - DNA, 25 bp, Homo sapien
gtgagccgccacgcccagcaagagc

SEQ ID NO: 4388590 - DNA, 25 bp, Homo sapien
agtgatcaggggcacgccacttagc

SEQ ID NO: 4388591 - DNA, 25 bp, Homo sapien
tagactcctggggtagctacttgct

SEQ ID NO: 4388592 - DNA, 25 bp, Homo sapien
cattgacttcggagatgaaagacct

SEQ ID NO: 4388593 - DNA, 25 bp, Homo sapien
gctacttgctatctgagtgatcagg

SEQ ID NO: 4388594 - DNA, 25 bp, Homo sapien
gggatcccctgatgtatggcctcaa

SEQ ID NO: 4388595 - DNA, 25 bp, Homo sapien
cctcctgaggtaggtcatgcaaaca

SEQ ID NO: 4388596 - DNA, 25 bp, Homo sapien
tgcaaacattcctggccggtctcaa

SEQ ID NO: 4388597 - DNA, 25 bp, Homo sapien
gataagagccagtcaccaggttaaa

SEQ ID NO: 4388598 - DNA, 25 bp, Homo sapien
tcttccagcgggctgtaggcgtaca

SEQ ID NO: 4388599 - DNA, 25 bp, Homo sapien
cagcaccgtggcgataacctcgttc

SEQ ID NO: 4388600 - DNA, 25 bp, Homo sapien
tgggtgtacgacttcctgatggtga

SEQ ID NO: 4388601 - DNA, 25 bp, Homo sapien
cacgatcctgcggatgtgggtgtac

SEQ ID NO: 4388602 - DNA, 25 bp, Homo sapien
accgtttacgtgctgcagccaggcg

SEQ ID NO: 4388603 - DNA, 25 bp, Homo sapien
tctgattaggccaagtctaccctct

SEQ ID NO: 4388604 - DNA, 25 bp, Homo sapien
agccaggcgctcatcaggttctaag

SEQ ID NO: 4388605 - DNA, 25 bp, Homo sapien
tcttgccaagagaaacagtcgattg

SEQ ID NO: 4388606 - DNA, 25 bp, Homo sapien
caacgacatagatgcggtcccggaa

SEQ ID NO: 4388607 - DNA, 25 bp, Homo sapien
ggtggaagggtcataacactgagtc

SEQ ID NO: 4388608 - DNA, 25 bp, Homo sapien
tgtctgtggccagtttcccattggg

SEQ ID NO: 4388609 - DNA, 25 bp, Homo sapien
gatgcatttagcctccacgggcatg

SEQ ID NO: 4388610 - DNA, 25 bp, Homo sapien
tcccaggatacaggacagagctccg

SEQ ID NO: 4388611 - DNA, 25 bp, Homo sapien
cctatagtcacaaggcccatgggct

SEQ ID NO: 4388612 - DNA, 25 bp, Homo sapien
ggaatccagctctcaggcaagaata

SEQ ID NO: 4388613 - DNA, 25 bp, Homo sapien
ccttttagatcgtggagcagctctg

SEQ ID NO: 4388614 - DNA, 25 bp, Homo sapien
tgtgttgtacattccattaagctgg

SEQ ID NO: 4388615 - DNA, 25 bp, Homo sapien
ctttgcttgtgcctacaatgactgt

SEQ ID NO: 4388616 - DNA, 25 bp, Homo sapien
gctggaacatgcttggacatctgat

SEQ ID NO: 4388617 - DNA, 25 bp, Homo sapien
tacaatgactgtgttgtacattcca

SEQ ID NO: 4388618 - DNA, 25 bp, Homo sapien
tacctgaggttgcattactaaagtc

SEQ ID NO: 4388619 - DNA, 25 bp, Homo sapien
taaagtgatccgcatgtgtccagtg

SEQ ID NO: 4388620 - DNA, 25 bp, Homo sapien
gacatgcaggcctgtaagtggctca

SEQ ID NO: 4388621 - DNA, 25 bp, Homo sapien
gacatgcagaccaagagatctccca

SEQ ID NO: 4388622 - DNA, 25 bp, Homo sapien
tcaccacttggaaggacattgtttc

SEQ ID NO: 4388623 - DNA, 25 bp, Homo sapien
tctccttggaagtaaagtgatcaga

SEQ ID NO: 4388624 - DNA, 25 bp, Homo sapien
tgatcagaaagctgaccaccacggc

SEQ ID NO: 4388625 - DNA, 25 bp, Homo sapien
ctgaagcaatagctcctaggaggag

SEQ ID NO: 4388626 - DNA, 25 bp, Homo sapien
gttactggtagaaatcgtgtcctat

SEQ ID NO: 4388627 - DNA, 25 bp, Homo sapien
tactggtagaaatcgtgtcctatac

SEQ ID NO: 4388628 - DNA, 25 bp, Homo sapien
gcagttactggtagaaatcgtgtcc

SEQ ID NO: 4388629 - DNA, 25 bp, Homo sapien
ctgaagtaataatacaggcagttac

SEQ ID NO: 4388630 - DNA, 25 bp, Homo sapien
gggtcgtaggtctccacattgttga

SEQ ID NO: 4388631 - DNA, 25 bp, Homo sapien
tctgtaagccgtcaaagcctccgat

SEQ ID NO: 4388632 - DNA, 25 bp, Homo sapien
cagcggcctatgtttaaatactcaa

SEQ ID NO: 4388633 - DNA, 25 bp, Homo sapien
tctgaatccacttgttgatcgaaga

SEQ ID NO: 4388634 - DNA, 25 bp, Homo sapien
tgtgaagatgtcaaccctccctagg

SEQ ID NO: 4388635 - DNA, 25 bp, Homo sapien
cttactatgagggaagctgagcttc

SEQ ID NO: 4388636 - DNA, 25 bp, Homo sapien
aaaccctgagaaagcatattgtgtg

SEQ ID NO: 4388637 - DNA, 25 bp, Homo sapien
taggttaatctatatactcagtgcc

SEQ ID NO: 4388638 - DNA, 25 bp, Homo sapien
cgtgcagccgccaatgatcatgaac

SEQ ID NO: 4388639 - DNA, 25 bp, Homo sapien
ctctgttagcgggagcttggccacc

SEQ ID NO: 4388640 - DNA, 25 bp, Homo sapien
tcaatgtcacgcatgcaaactccac

SEQ ID NO: 4388641 - DNA, 25 bp, Homo sapien
aaaccgttcatccttcgtgcagccg

SEQ ID NO: 4388642 - DNA, 25 bp, Homo sapien
tgggcttggtgcgttccgaaatgat

SEQ ID NO: 4388643 - DNA, 25 bp, Homo sapien
ggccctgacggtatggacagcagaa

SEQ ID NO: 4388644 - DNA, 25 bp, Homo sapien
tgttccttacaggtcagcagagtgg

SEQ ID NO: 4388645 - DNA, 25 bp, Homo sapien
gacagcagaacagtgccgggataag

SEQ ID NO: 4388646 - DNA, 25 bp, Homo sapien
ggtacagtgagttccgcatcctccg

SEQ ID NO: 4388647 - DNA, 25 bp, Homo sapien
gcaatgagaccccaattaggaggtc

SEQ ID NO: 4388648 - DNA, 25 bp, Homo sapien
actactgtcatcaggagtcaaccca

SEQ ID NO: 4388649 - DNA, 25 bp, Homo sapien
tgtgttcacagagtagcctccaggc

SEQ ID NO: 4388650 - DNA, 25 bp, Homo sapien
gactcagggaatcaactggcaatga

SEQ ID NO: 4388651 - DNA, 25 bp, Homo sapien
tcattgccagaaaggtggtacatcc

SEQ ID NO: 4388652 - DNA, 25 bp, Homo sapien
gtccacgggcaggtcaagaaactcc

SEQ ID NO: 4388653 - DNA, 25 bp, Homo sapien
tcggtcacgtaaaggtcatcactct

SEQ ID NO: 4388654 - DNA, 25 bp, Homo sapien
taagcgcacgttctcgaggacatag

SEQ ID NO: 4388655 - DNA, 25 bp, Homo sapien
tgccctgttgcagtgcctttccacg

SEQ ID NO: 4388656 - DNA, 25 bp, Homo sapien
gctgccctgttgcagtgcctttcca

SEQ ID NO: 4388657 - DNA, 25 bp, Homo sapien
tgcagtgcctttccacgctcctgcc

SEQ ID NO: 4388658 - DNA, 25 bp, Homo sapien
tgttgcagtgcctttccacgctcct

SEQ ID NO: 4388659 - DNA, 25 bp, Homo sapien
ctctcggcctgagctgcctttcctc

SEQ ID NO: 4388660 - DNA, 25 bp, Homo sapien
ctcggcctgagctgcctttcctcat

SEQ ID NO: 4388661 - DNA, 25 bp, Homo sapien
tctcggcctgagctgcctttcctca

SEQ ID NO: 4388662 - DNA, 25 bp, Homo sapien
gagtcctaaagagtctgggtacaaa

SEQ ID NO: 4388663 - DNA, 25 bp, Homo sapien
tttataccaaaacaggagacgtgag

SEQ ID NO: 4388664 - DNA, 25 bp, Homo sapien
caaaacaccttgcacttagaacatg

SEQ ID NO: 4388665 - DNA, 25 bp, Homo sapien
ttttacaacctataggcagcaaccg

SEQ ID NO: 4388666 - DNA, 25 bp, Homo sapien
aaaagcagcagtccggtatggcagc

SEQ ID NO: 4388667 - DNA, 25 bp, Homo sapien
cccctgtagctctggatttgtaaag

SEQ ID NO: 4388668 - DNA, 25 bp, Homo sapien
cagatgtagctgagaggattgccag

SEQ ID NO: 4388669 - DNA, 25 bp, Homo sapien
aaaagaacatgtgccttgatcgccg

SEQ ID NO: 4388670 - DNA, 25 bp, Homo sapien
gagttgttaaatggccagcagcaga

SEQ ID NO: 4388671 - DNA, 25 bp, Homo sapien
tgtccctgggtactctcgagactgg

SEQ ID NO: 4388672 - DNA, 25 bp, Homo sapien
caggcgtcactctgaggcatggaca

SEQ ID NO: 4388673 - DNA, 25 bp, Homo sapien
ggaccacaggagtcaaatccaggct

SEQ ID NO: 4388674 - DNA, 25 bp, Homo sapien
ccaagtagccggaagtacagacgcc

SEQ ID NO: 4388675 - DNA, 25 bp, Homo sapien
aagtagccggaagtacagacgcccg

SEQ ID NO: 4388676 - DNA, 25 bp, Homo sapien
ccactacacctggctaatttttgta

SEQ ID NO: 4388677 - DNA, 25 bp, Homo sapien
tcccaagtagccggaagtacagacg

SEQ ID NO: 4388678 - DNA, 25 bp, Homo sapien
tgtggacccagtagactaaccctga

SEQ ID NO: 4388679 - DNA, 25 bp, Homo sapien
catagtatatcatagtaggtgcctg

SEQ ID NO: 4388680 - DNA, 25 bp, Homo sapien
gactctggtgaatgctctgaaaagg

SEQ ID NO: 4388681 - DNA, 25 bp, Homo sapien
ttccaagagccaggattgggcttct

SEQ ID NO: 4388682 - DNA, 25 bp, Homo sapien
tagggaaataagcaacactggacct

SEQ ID NO: 4388683 - DNA, 25 bp, Homo sapien
caactgttatgtaccgtagggatcc

SEQ ID NO: 4388684 - DNA, 25 bp, Homo sapien
tcactttggccacgggacttagcct

SEQ ID NO: 4388685 - DNA, 25 bp, Homo sapien
cattgcataagccaaggagccaacc

SEQ ID NO: 4388686 - DNA, 25 bp, Homo sapien
ccaaggcacccacgctgtaaactgg

SEQ ID NO: 4388687 - DNA, 25 bp, Homo sapien
gattggtctgtaaacccaaggcacc

SEQ ID NO: 4388688 - DNA, 25 bp, Homo sapien
tggcctggtaggaaaagctcttccc

SEQ ID NO: 4388689 - DNA, 25 bp, Homo sapien
tgtttcatggcatcgctgattggtc

SEQ ID NO: 4388690 - DNA, 25 bp, Homo sapien
atcggattgtctcttcctgcaccag

SEQ ID NO: 4388691 - DNA, 25 bp, Homo sapien
tcatcggattgtctcttcctgcacc

SEQ ID NO: 4388692 - DNA, 25 bp, Homo sapien
ttgtctcttcctgcaccaggaaatt

SEQ ID NO: 4388693 - DNA, 25 bp, Homo sapien
ggattgtctcttcctgcaccaggaa

SEQ ID NO: 4388694 - DNA, 25 bp, Homo sapien
gagagaagcaattggtgggtaacag

SEQ ID NO: 4388695 - DNA, 25 bp, Homo sapien
agagaagcaattggtgggtaacagg

SEQ ID NO: 4388696 - DNA, 25 bp, Homo sapien
ggagagaagcaattggtgggtaaca

SEQ ID NO: 4388697 - DNA, 25 bp, Homo sapien
ttcagagaagagcactgagccagtt

SEQ ID NO: 4388698 - DNA, 25 bp, Homo sapien
ctgcttcagagaagagcactgagcc

SEQ ID NO: 4388699 - DNA, 25 bp, Homo sapien
gaagagcactgagccagtttgttca

SEQ ID NO: 4388700 - DNA, 25 bp, Homo sapien
agagaagagcactgagccagtttgt

SEQ ID NO: 4388701 - DNA, 25 bp, Homo sapien
tgcttggtgatcagcgccttgctgg

SEQ ID NO: 4388702 - DNA, 25 bp, Homo sapien
tacgtgtagtccaacagagtgtgca

SEQ ID NO: 4388703 - DNA, 25 bp, Homo sapien
aggacccgctggacattctgcttgg

SEQ ID NO: 4388704 - DNA, 25 bp, Homo sapien
ttcctttaaatcgttgcagaacatg

SEQ ID NO: 4388705 - DNA, 25 bp, Homo sapien
catgcccgattgtgatctccaaagt

SEQ ID NO: 4388706 - DNA, 25 bp, Homo sapien
gtcccagatctattttattggcttt

SEQ ID NO: 4388707 - DNA, 25 bp, Homo sapien
ttttattggctcaaagtgcaggaga

SEQ ID NO: 4388708 - DNA, 25 bp, Homo sapien
ctccatgcccgattgtgatctccaa

SEQ ID NO: 4388709 - DNA, 25 bp, Homo sapien
acccaatgtccgtaggttcccagat

SEQ ID NO: 4388710 - DNA, 25 bp, Homo sapien
tgaacccaatgtccgtaggttccca

SEQ ID NO: 4388711 - DNA, 25 bp, Homo sapien
gcagctgaacccaatgtccgtaggt

SEQ ID NO: 4388712 - DNA, 25 bp, Homo sapien
tgtccgtaggttcccagatgcagct

SEQ ID NO: 4388713 - DNA, 25 bp, Homo sapien
gccactcatccatttctttacccct

SEQ ID NO: 4388714 - DNA, 25 bp, Homo sapien
agaaaatcactagacacttgacttg

SEQ ID NO: 4388715 - DNA, 25 bp, Homo sapien
tctttaccccttttcctaatctgca

SEQ ID NO: 4388716 - DNA, 25 bp, Homo sapien
tcactagacacttgacttgctgact

SEQ ID NO: 4388717 - DNA, 25 bp, Homo sapien
tataactgaggcaacacatctctag

SEQ ID NO: 4388718 - DNA, 25 bp, Homo sapien
acagtcatctcaggaggcaaagcaa

SEQ ID NO: 4388719 - DNA, 25 bp, Homo sapien
ggcaaagcaaatttcaccctcgtga

SEQ ID NO: 4388720 - DNA, 25 bp, Homo sapien
tatacttaaagcatctcagtgcaga

SEQ ID NO: 4388721 - DNA, 25 bp, Homo sapien
tccatatcgggaaatgctcttctcc

SEQ ID NO: 4388722 - DNA, 25 bp, Homo sapien
actcaaatcatgtgattcaggcggg

SEQ ID NO: 4388723 - DNA, 25 bp, Homo sapien
ggagctctcacgtcattacaggcct

SEQ ID NO: 4388724 - DNA, 25 bp, Homo sapien
gtccagcatctctccatatcgggaa

SEQ ID NO: 4388725 - DNA, 25 bp, Homo sapien
ctaatgcattagactaaagagcgct

SEQ ID NO: 4388726 - DNA, 25 bp, Homo sapien
ttattccacttaggacaactatttg

SEQ ID NO: 4388727 - DNA, 25 bp, Homo sapien
tttgtatactcactgctgaagtact

SEQ ID NO: 4388728 - DNA, 25 bp, Homo sapien
ccacttaggacaactatttgtatac

SEQ ID NO: 4388729 - DNA, 25 bp, Homo sapien
tctcactcctgtcttgtaccgcagt

SEQ ID NO: 4388730 - DNA, 25 bp, Homo sapien
ctctaggtctggttccttgaggcta

SEQ ID NO: 4388731 - DNA, 25 bp, Homo sapien
tatgttgagaggactttacccgcca

SEQ ID NO: 4388732 - DNA, 25 bp, Homo sapien
gcaatctcctttgttgatgctgctg

SEQ ID NO: 4388733 - DNA, 25 bp, Homo sapien
tcaagattgggctctcacactaaca

SEQ ID NO: 4388734 - DNA, 25 bp, Homo sapien
caagattgggctctcacactaacac

SEQ ID NO: 4388735 - DNA, 25 bp, Homo sapien
gcacccaatttgactctggtcctag

SEQ ID NO: 4388736 - DNA, 25 bp, Homo sapien
tgactctggtcctaggcatgctgac

SEQ ID NO: 4388737 - DNA, 25 bp, Homo sapien
aatttgactctggtcctaggcatgc

SEQ ID NO: 4388738 - DNA, 25 bp, Homo sapien
caacttgcacccaatttgactctgg

SEQ ID NO: 4388739 - DNA, 25 bp, Homo sapien
taagatctcgaccaagtctcctgtt

SEQ ID NO: 4388740 - DNA, 25 bp, Homo sapien
aagcaccacgcggtggcaggagaat

SEQ ID NO: 4388741 - DNA, 25 bp, Homo sapien
gagagtcccgcgtcgtcaaatttga

SEQ ID NO: 4388742 - DNA, 25 bp, Homo sapien
tcagagcgttttccattcgcagggt

SEQ ID NO: 4388743 - DNA, 25 bp, Homo sapien
ctttgtcctgccatcaacatcgaga

SEQ ID NO: 4388744 - DNA, 25 bp, Homo sapien
ggtccaggcgcccctttgtcctgcc

SEQ ID NO: 4388745 - DNA, 25 bp, Homo sapien
ccctttgtcctgccatcaacatcga

SEQ ID NO: 4388746 - DNA, 25 bp, Homo sapien
tccaggcgcccctttgtcctgccat

SEQ ID NO: 4388747 - DNA, 25 bp, Homo sapien
agtattgggacactcatctgccagg

SEQ ID NO: 4388748 - DNA, 25 bp, Homo sapien
aggcaaacgcacttacccgaaacag

SEQ ID NO: 4388749 - DNA, 25 bp, Homo sapien
tgccaggcccaaatgctgtaccact

SEQ ID NO: 4388750 - DNA, 25 bp, Homo sapien
cagaggcagagcagtattgggacac

SEQ ID NO: 4388751 - DNA, 25 bp, Homo sapien
gctagccttccggtttggagttcat

SEQ ID NO: 4388752 - DNA, 25 bp, Homo sapien
gtggcagccctaagggagctagcct

SEQ ID NO: 4388753 - DNA, 25 bp, Homo sapien
ccaggatggcgttgtgtcctggttt

SEQ ID NO: 4388754 - DNA, 25 bp, Homo sapien
ctaagggagctagccttccggtttg

SEQ ID NO: 4388755 - DNA, 25 bp, Homo sapien
tcagagagatctttgggattttgag

SEQ ID NO: 4388756 - DNA, 25 bp, Homo sapien
catggtatgggaaggtatattatca

SEQ ID NO: 4388757 - DNA, 25 bp, Homo sapien
gatctttgggattttgagtgttcag

SEQ ID NO: 4388758 - DNA, 25 bp, Homo sapien
tatcagattcaaaccggagaccgaa

SEQ ID NO: 4388759 - DNA, 25 bp, Homo sapien
agcatgggtgagacaccaaagtctt

SEQ ID NO: 4388760 - DNA, 25 bp, Homo sapien
catagctgatcttgataaagaggac

SEQ ID NO: 4388761 - DNA, 25 bp, Homo sapien
tgtgcctcttgtgacagcccagaac

SEQ ID NO: 4388762 - DNA, 25 bp, Homo sapien
gactgcagggccatagctgatcttg

SEQ ID NO: 4388763 - DNA, 25 bp, Homo sapien
tcacctgaaatgtgacgtcctcttt

SEQ ID NO: 4388764 - DNA, 25 bp, Homo sapien
cctgaaatgtgacgtcctctttccc

SEQ ID NO: 4388765 - DNA, 25 bp, Homo sapien
ctgaaatgtgacgtcctctttccca

SEQ ID NO: 4388766 - DNA, 25 bp, Homo sapien
cacctgaaatgtgacgtcctctttc

SEQ ID NO: 4388767 - DNA, 25 bp, Homo sapien
tcaggcccgtgggaagcactcataa

SEQ ID NO: 4388768 - DNA, 25 bp, Homo sapien
ggatctaagaaaacctcaagcttgc

SEQ ID NO: 4388769 - DNA, 25 bp, Homo sapien
cactgccttggaatctaatagtaca

SEQ ID NO: 4388770 - DNA, 25 bp, Homo sapien
tctgtgagtgctacctcaggcccgt

SEQ ID NO: 4388771 - DNA, 25 bp, Homo sapien
taatctcttttataagctggaggtg

SEQ ID NO: 4388772 - DNA, 25 bp, Homo sapien
agctggaggtgtttaatcaaccaag

SEQ ID NO: 4388773 - DNA, 25 bp, Homo sapien
ggtgtttaatcaaccaagggacata

SEQ ID NO: 4388774 - DNA, 25 bp, Homo sapien
tggaggtgtttaatcaaccaaggga

SEQ ID NO: 4388775 - DNA, 25 bp, Homo sapien
tgctgcattcttgggtctgctctgt

SEQ ID NO: 4388776 - DNA, 25 bp, Homo sapien
ctaacgtgacaatgggccctcgggg

SEQ ID NO: 4388777 - DNA, 25 bp, Homo sapien
ggtttgttaaagcacgaaggagagc

SEQ ID NO: 4388778 - DNA, 25 bp, Homo sapien
ttaaagcacgaaggagagccagcag

SEQ ID NO: 4388779 - DNA, 25 bp, Homo sapien
agcagcctcaccaagcatgaccaga

SEQ ID NO: 4388780 - DNA, 25 bp, Homo sapien
ccaggcgaatgctgtgactgaagcc

SEQ ID NO: 4388781 - DNA, 25 bp, Homo sapien
ctccaggcgaatgctgtgactgaag

SEQ ID NO: 4388782 - DNA, 25 bp, Homo sapien
cctcaccaagcatgaccagaggcat

SEQ ID NO: 4388783 - DNA, 25 bp, Homo sapien
gaaatgtggtacgttgtgctaagcc

SEQ ID NO: 4388784 - DNA, 25 bp, Homo sapien
tcagagatggcaacaccagacctag

SEQ ID NO: 4388785 - DNA, 25 bp, Homo sapien
ctgagacccaaaggacgagtaggag

SEQ ID NO: 4388786 - DNA, 25 bp, Homo sapien
taaacagagagtatacaccaggccc

SEQ ID NO: 4388787 - DNA, 25 bp, Homo sapien
caggattctatggattctttggctt

SEQ ID NO: 4388788 - DNA, 25 bp, Homo sapien
ttcagcggatggatgaagcaagctg

SEQ ID NO: 4388789 - DNA, 25 bp, Homo sapien
cacagtagcttcagcggatggatga

SEQ ID NO: 4388790 - DNA, 25 bp, Homo sapien
gtccaacatcacagtagcttcagcg

SEQ ID NO: 4388791 - DNA, 25 bp, Homo sapien
ccctcagattggagttcccaccaac

SEQ ID NO: 4388792 - DNA, 25 bp, Homo sapien
cctcagattggagttcccaccaacc

SEQ ID NO: 4388793 - DNA, 25 bp, Homo sapien
ttttcaggcaacttgaggcatctgg

SEQ ID NO: 4388794 - DNA, 25 bp, Homo sapien
ggcaacttgaggcatctggaccagt

SEQ ID NO: 4388795 - DNA, 25 bp, Homo sapien
caacttgaggcatctggaccagtca

SEQ ID NO: 4388796 - DNA, 25 bp, Homo sapien
caggcaacttgaggcatctggacca

SEQ ID NO: 4388797 - DNA, 25 bp, Homo sapien
tgtctctgcttaaaacaaggtgttt

SEQ ID NO: 4388798 - DNA, 25 bp, Homo sapien
actgtctctgcttaaaacaaggtgt

SEQ ID NO: 4388799 - DNA, 25 bp, Homo sapien
tttaactgtctctgcttaaaacaag

SEQ ID NO: 4388800 - DNA, 25 bp, Homo sapien
taactgtctctgcttaaaacaaggt

SEQ ID NO: 4388801 - DNA, 25 bp, Homo sapien
gggtctcgtcctcttgggcacccga

SEQ ID NO: 4388802 - DNA, 25 bp, Homo sapien
cagcagccctttgggtgggtctcgt

SEQ ID NO: 4388803 - DNA, 25 bp, Homo sapien
ggtgggtctcgtcctcttgggcacc

SEQ ID NO: 4388804 - DNA, 25 bp, Homo sapien
tcagcagccctttgggtgggtctcg

SEQ ID NO: 4388805 - DNA, 25 bp, Homo sapien
gctcagtgttttggcccggacggtc

SEQ ID NO: 4388806 - DNA, 25 bp, Homo sapien
aaaggcgaggaaccggtcagagtct

SEQ ID NO: 4388807 - DNA, 25 bp, Homo sapien
caccgggaagcgtgaactacatctc

SEQ ID NO: 4388808 - DNA, 25 bp, Homo sapien
tgcttccagtgttcgccgagaggta

SEQ ID NO: 4388809 - DNA, 25 bp, Homo sapien
ccagcggcggccggcctctcagagc

SEQ ID NO: 4388810 - DNA, 25 bp, Homo sapien
tgcgggagggcagccagcggcggcc

SEQ ID NO: 4388811 - DNA, 25 bp, Homo sapien
agcggcggccggcctctcagagcca

SEQ ID NO: 4388812 - DNA, 25 bp, Homo sapien
ggcggccggcctctcagagccagac

SEQ ID NO: 4388813 - DNA, 25 bp, Homo sapien
ggctggtgcggcctggctagggcgg

SEQ ID NO: 4388814 - DNA, 25 bp, Homo sapien
ccgcaggtgcggtaggctagtcgcc

SEQ ID NO: 4388815 - DNA, 25 bp, Homo sapien
tgcttgttgccgatgggctgcgaac

SEQ ID NO: 4388816 - DNA, 25 bp, Homo sapien
gcttggtagctacagccctgaggga

SEQ ID NO: 4388817 - DNA, 25 bp, Homo sapien
agcgcgcgctgtcgctgcttttgca

SEQ ID NO: 4388818 - DNA, 25 bp, Homo sapien
gagagttcgagtttttattggcgag

SEQ ID NO: 4388819 - DNA, 25 bp, Homo sapien
ccgggtgaagactgttaacgcggcg

SEQ ID NO: 4388820 - DNA, 25 bp, Homo sapien
tattgtcactaggtgggcctgccct

SEQ ID NO: 4388821 - DNA, 25 bp, Homo sapien
tattcatcatcccagagttaaagta

SEQ ID NO: 4388822 - DNA, 25 bp, Homo sapien
taaattgaagagtttggcactctgc

SEQ ID NO: 4388823 - DNA, 25 bp, Homo sapien
catcttaaagactactaaactggtg

SEQ ID NO: 4388824 - DNA, 25 bp, Homo sapien
caataaaacaatcgctaagcaaact

SEQ ID NO: 4388825 - DNA, 25 bp, Homo sapien
tatgcagcagttctctactacaagt

SEQ ID NO: 4388826 - DNA, 25 bp, Homo sapien
taacctcatcgtatagaatttctgc

SEQ ID NO: 4388827 - DNA, 25 bp, Homo sapien
taagcttgtttcagtacactcacgc

SEQ ID NO: 4388828 - DNA, 25 bp, Homo sapien
gagaggctctattccagtctgcacc

SEQ ID NO: 4388829 - DNA, 25 bp, Homo sapien
attgattcaggatcttattgtccat

SEQ ID NO: 4388830 - DNA, 25 bp, Homo sapien
gcattgattcaggatcttattgtcc

SEQ ID NO: 4388831 - DNA, 25 bp, Homo sapien
cattgattcaggatcttattgtcca

SEQ ID NO: 4388832 - DNA, 25 bp, Homo sapien
cttctgtgctttcctgagagcctca

SEQ ID NO: 4388833 - DNA, 25 bp, Homo sapien
tgtgctttcctgagagcctcattca

SEQ ID NO: 4388834 - DNA, 25 bp, Homo sapien
tctgtgctttcctgagagcctcatt

SEQ ID NO: 4388835 - DNA, 25 bp, Homo sapien
tcttctgtgctttcctgagagcctc

SEQ ID NO: 4388836 - DNA, 25 bp, Homo sapien
tatcctacataacacaattgtgaaa

SEQ ID NO: 4388837 - DNA, 25 bp, Homo sapien
aaagcattaagaagttatattcaga

SEQ ID NO: 4388838 - DNA, 25 bp, Homo sapien
cagatgtgaggcatagttatcctac

SEQ ID NO: 4388839 - DNA, 25 bp, Homo sapien
aagatttagactgttaattttagtg

SEQ ID NO: 4388840 - DNA, 25 bp, Homo sapien
tgttgacattgaggtatagtctcca

SEQ ID NO: 4388841 - DNA, 25 bp, Homo sapien
ttgcaagatacattagagatacagc

SEQ ID NO: 4388842 - DNA, 25 bp, Homo sapien
cagttaatgaaagggacataatagg

SEQ ID NO: 4388843 - DNA, 25 bp, Homo sapien
tatatatgcagtaacattgccccag

SEQ ID NO: 4388844 - DNA, 25 bp, Homo sapien
aatatatatcctgggcggaagacgg

SEQ ID NO: 4388845 - DNA, 25 bp, Homo sapien
gaagccacactgatccaagatggga

SEQ ID NO: 4388846 - DNA, 25 bp, Homo sapien
tgcccaggccagtgtcctatcatgg

SEQ ID NO: 4388847 - DNA, 25 bp, Homo sapien
gacaggatacctcaccgaagaagcc

SEQ ID NO: 4388848 - DNA, 25 bp, Homo sapien
aacccagctgtgatacctcagttgg

SEQ ID NO: 4388849 - DNA, 25 bp, Homo sapien
tgtaaagtgccatgactgaataatc

SEQ ID NO: 4388850 - DNA, 25 bp, Homo sapien
cactgactttactgcacaggtatga

SEQ ID NO: 4388851 - DNA, 25 bp, Homo sapien
ttttcctctatgtgagtcagctaca

SEQ ID NO: 4388852 - DNA, 25 bp, Homo sapien
agtagagacggatcactcctgacca

SEQ ID NO: 4388853 - DNA, 25 bp, Homo sapien
cagtaggtttgactagctagctatc

SEQ ID NO: 4388854 - DNA, 25 bp, Homo sapien
caccaacgtgtggttgcttggcaga

SEQ ID NO: 4388855 - DNA, 25 bp, Homo sapien
tattgtcacatctaatgctaggcac

SEQ ID NO: 4388856 - DNA, 25 bp, Homo sapien
tgctttcaattagaggctccagagt

SEQ ID NO: 4388857 - DNA, 25 bp, Homo sapien
tagacctaaggtcatttgctttcaa

SEQ ID NO: 4388858 - DNA, 25 bp, Homo sapien
gctttacaactagtatagacctaag

SEQ ID NO: 4388859 - DNA, 25 bp, Homo sapien
tcttagttaagttgtagcacgtgaa

SEQ ID NO: 4388860 - DNA, 25 bp, Homo sapien
gactctcagccaccggacttctttt

SEQ ID NO: 4388861 - DNA, 25 bp, Homo sapien
gggtcagcgtcagcattcctggaac

SEQ ID NO: 4388862 - DNA, 25 bp, Homo sapien
caggaggactctcagccaccggact

SEQ ID NO: 4388863 - DNA, 25 bp, Homo sapien
cacgttgagcccctcaatctgttgg

SEQ ID NO: 4388864 - DNA, 25 bp, Homo sapien
ttgacttcccaaggcggcctacagg

SEQ ID NO: 4388865 - DNA, 25 bp, Homo sapien
tctgtgtgcgggatttcaagctata

SEQ ID NO: 4388866 - DNA, 25 bp, Homo sapien
tttcaagctatagcctgggttctca

SEQ ID NO: 4388867 - DNA, 25 bp, Homo sapien
gatacaggggaagcctcaaggcagc

SEQ ID NO: 4388868 - DNA, 25 bp, Homo sapien
tctgctgctatgtctctggtgactt

SEQ ID NO: 4388869 - DNA, 25 bp, Homo sapien
gtggttggttggcaagctcatgacc

SEQ ID NO: 4388870 - DNA, 25 bp, Homo sapien
gttggttggcaagctcatgacctgt

SEQ ID NO: 4388871 - DNA, 25 bp, Homo sapien
aggtggttggttggcaagctcatga

SEQ ID NO: 4388872 - DNA, 25 bp, Homo sapien
tatcatcatgagagcatgcctcagc

SEQ ID NO: 4388873 - DNA, 25 bp, Homo sapien
tagcagttcctagtaccatctcagt

SEQ ID NO: 4388874 - DNA, 25 bp, Homo sapien
cagtagtcttattttagtcgcagcg

SEQ ID NO: 4388875 - DNA, 25 bp, Homo sapien
tgcctgacccgagataaaaagttta

SEQ ID NO: 4388876 - DNA, 25 bp, Homo sapien
tgaatcacctctggagcagtgctgg

SEQ ID NO: 4388877 - DNA, 25 bp, Homo sapien
aacagggcagtgctccctcctaagg

SEQ ID NO: 4388878 - DNA, 25 bp, Homo sapien
ggtgcttgtcatgtttaggccttca

SEQ ID NO: 4388879 - DNA, 25 bp, Homo sapien
tagcatatcagcaggcacctagttc

SEQ ID NO: 4388880 - DNA, 25 bp, Homo sapien
acacagcacatactaccttatgttg

SEQ ID NO: 4388881 - DNA, 25 bp, Homo sapien
cacatcttacattgtacatattact

SEQ ID NO: 4388882 - DNA, 25 bp, Homo sapien
actgggctcagacctagtctctaaa

SEQ ID NO: 4388883 - DNA, 25 bp, Homo sapien
acatactaccttatgttgcactggg

SEQ ID NO: 4388884 - DNA, 25 bp, Homo sapien
gacgggacttgagctttctgtgaca

SEQ ID NO: 4388885 - DNA, 25 bp, Homo sapien
gactcatgagcctgattgttgccca

SEQ ID NO: 4388886 - DNA, 25 bp, Homo sapien
cggagattacattcttggacgggac

SEQ ID NO: 4388887 - DNA, 25 bp, Homo sapien
tagaagttatctctcacatcccgga

SEQ ID NO: 4388888 - DNA, 25 bp, Homo sapien
ttctgccaaaatcccttagtaaatc

SEQ ID NO: 4388889 - DNA, 25 bp, Homo sapien
atcccttagtaaatcagttattgtc

SEQ ID NO: 4388890 - DNA, 25 bp, Homo sapien
catctgaacttcctactcaggcttg

SEQ ID NO: 4388891 - DNA, 25 bp, Homo sapien
ctactcaggcttgtcgtatatgtac

SEQ ID NO: 4388892 - DNA, 25 bp, Homo sapien
tggagaaattacgtgtcatatcctg

SEQ ID NO: 4388893 - DNA, 25 bp, Homo sapien
gagaaattacgtgtcatatcctgaa

SEQ ID NO: 4388894 - DNA, 25 bp, Homo sapien
tcttggagaaattacgtgtcatatc

SEQ ID NO: 4388895 - DNA, 25 bp, Homo sapien
cttggagaaattacgtgtcatatcc

SEQ ID NO: 4388896 - DNA, 25 bp, Homo sapien
gctggataatactcagtttgatgga

SEQ ID NO: 4388897 - DNA, 25 bp, Homo sapien
gctgtatacctagtgatggaattgc

SEQ ID NO: 4388898 - DNA, 25 bp, Homo sapien
cacgttgtgacttgcatcaatactc

SEQ ID NO: 4388899 - DNA, 25 bp, Homo sapien
ttacagtgcagagttcatccacgtt

SEQ ID NO: 4388900 - DNA, 25 bp, Homo sapien
tttgtgcctgcacgtgtccttccac

SEQ ID NO: 4388901 - DNA, 25 bp, Homo sapien
taaggagccactttattgcagccgc

SEQ ID NO: 4388902 - DNA, 25 bp, Homo sapien
ttcccttgtagtgaagactgaacca

SEQ ID NO: 4388903 - DNA, 25 bp, Homo sapien
gaaacacctggaccgagttgcctct

SEQ ID NO: 4388904 - DNA, 25 bp, Homo sapien
taagctactcggagagcagagaccg

SEQ ID NO: 4388905 - DNA, 25 bp, Homo sapien
gcagagaccgtgttaatgatccccg

SEQ ID NO: 4388906 - DNA, 25 bp, Homo sapien
ctttaagacttagggccgggctcag

SEQ ID NO: 4388907 - DNA, 25 bp, Homo sapien
gtttttcaggatatagccccagcca

SEQ ID NO: 4388908 - DNA, 25 bp, Homo sapien
cacagcgaagctgtaactgaggacc

SEQ ID NO: 4388909 - DNA, 25 bp, Homo sapien
ggtttccagtgtgactcggcatgtc

SEQ ID NO: 4388910 - DNA, 25 bp, Homo sapien
tattgaatgaggaccagtgagcgga

SEQ ID NO: 4388911 - DNA, 25 bp, Homo sapien
tacagtgagtaatattcaccaggcc

SEQ ID NO: 4388912 - DNA, 25 bp, Homo sapien
gctttgtcggccagcgtttctgcag

SEQ ID NO: 4388913 - DNA, 25 bp, Homo sapien
tcagtggatccgtgctttgtcggcc

SEQ ID NO: 4388914 - DNA, 25 bp, Homo sapien
cctgggtgtgcttaagggggctcct

SEQ ID NO: 4388915 - DNA, 25 bp, Homo sapien
cggccagcgtttctgcagtctttgt

SEQ ID NO: 4388916 - DNA, 25 bp, Homo sapien
tcacccattttgtgggctggagtta

SEQ ID NO: 4388917 - DNA, 25 bp, Homo sapien
cacccattttgtgggctggagttac

SEQ ID NO: 4388918 - DNA, 25 bp, Homo sapien
tgaagagagattgggcttcagcctt

SEQ ID NO: 4388919 - DNA, 25 bp, Homo sapien
cagttaccctgaagagagattgggc

SEQ ID NO: 4388920 - DNA, 25 bp, Homo sapien
taccctgaagagagattgggcttca

SEQ ID NO: 4388921 - DNA, 25 bp, Homo sapien
agcagttaccctgaagagagattgg

SEQ ID NO: 4388922 - DNA, 25 bp, Homo sapien
aagcagatcgcaggttccacgccat

SEQ ID NO: 4388923 - DNA, 25 bp, Homo sapien
taggaatagactgtgtgcaccagtc

SEQ ID NO: 4388924 - DNA, 25 bp, Homo sapien
ttacacatgtgtgcgaagcagatcg

SEQ ID NO: 4388925 - DNA, 25 bp, Homo sapien
cttggcagaagtgtagcagcgttac

SEQ ID NO: 4388926 - DNA, 25 bp, Homo sapien
gccgggtgtgatagctcaacgcctg

SEQ ID NO: 4388927 - DNA, 25 bp, Homo sapien
atggccgggtgtgatagctcaacgc

SEQ ID NO: 4388928 - DNA, 25 bp, Homo sapien
tggccgggtgtgatagctcaacgcc

SEQ ID NO: 4388929 - DNA, 25 bp, Homo sapien
aatggccgggtgtgatagctcaacg

SEQ ID NO: 4388930 - DNA, 25 bp, Homo sapien
aacatgcaagccgtgaagtcaggaa

SEQ ID NO: 4388931 - DNA, 25 bp, Homo sapien
tcaaaaggtggtgagttccccgtca

SEQ ID NO: 4388932 - DNA, 25 bp, Homo sapien
gacgaagacccctcaaacgtgtgaa

SEQ ID NO: 4388933 - DNA, 25 bp, Homo sapien
ggaatagctgaaccccttggataag

SEQ ID NO: 4388934 - DNA, 25 bp, Homo sapien
tgacggcccaagattccaacagctt

SEQ ID NO: 4388935 - DNA, 25 bp, Homo sapien
catgagtcatgcaggtgacggccca

SEQ ID NO: 4388936 - DNA, 25 bp, Homo sapien
taatcaagtgctcacgcatcctggg

SEQ ID NO: 4388937 - DNA, 25 bp, Homo sapien
tcatcttggccataaggaggtctgt

SEQ ID NO: 4388938 - DNA, 25 bp, Homo sapien
ggccagatggcagttaacgaacgca

SEQ ID NO: 4388939 - DNA, 25 bp, Homo sapien
ttaacgaacgcaggagccttccaca

SEQ ID NO: 4388940 - DNA, 25 bp, Homo sapien
ctgagagacggccagatggcagtta

SEQ ID NO: 4388941 - DNA, 25 bp, Homo sapien
gatggcagttaacgaacgcaggagc

SEQ ID NO: 4388942 - DNA, 25 bp, Homo sapien
gctgagctgggtgtgccaagtccat

SEQ ID NO: 4388943 - DNA, 25 bp, Homo sapien
tgtcctgtcggcagccatggtgtca

SEQ ID NO: 4388944 - DNA, 25 bp, Homo sapien
cctgtcctgtcggcagccatggtgt

SEQ ID NO: 4388945 - DNA, 25 bp, Homo sapien
gtcctgtcggcagccatggtgtcac

SEQ ID NO: 4388946 - DNA, 25 bp, Homo sapien
cgcaggggcccatgccatgctctcg

SEQ ID NO: 4388947 - DNA, 25 bp, Homo sapien
cgttgagaatccggggagctgaggc

SEQ ID NO: 4388948 - DNA, 25 bp, Homo sapien
tcacacgttgagaatccggggagct

SEQ ID NO: 4388949 - DNA, 25 bp, Homo sapien
cacacgttgagaatccggggagctg

SEQ ID NO: 4388950 - DNA, 25 bp, Homo sapien
cacgttgagaatccggggagctgag

SEQ ID NO: 4388951 - DNA, 25 bp, Homo sapien
gttaggagtgaacttcttcctcacc

SEQ ID NO: 4388952 - DNA, 25 bp, Homo sapien
aaagatggcggaggggttaggagtg

SEQ ID NO: 4388953 - DNA, 25 bp, Homo sapien
ctgaaagatggcggaggggttagga

SEQ ID NO: 4388954 - DNA, 25 bp, Homo sapien
agatggcggaggggttaggagtgaa

SEQ ID NO: 4388955 - DNA, 25 bp, Homo sapien
cttgggtttttgttcgggacatctg

SEQ ID NO: 4388956 - DNA, 25 bp, Homo sapien
tgttcgggacatctggttggcactg

SEQ ID NO: 4388957 - DNA, 25 bp, Homo sapien
tttttgttcgggacatctggttggc

SEQ ID NO: 4388958 - DNA, 25 bp, Homo sapien
ggacatctggttggcactgctgtcc

SEQ ID NO: 4388959 - DNA, 25 bp, Homo sapien
acccctgctacaccagcttccggct

SEQ ID NO: 4388960 - DNA, 25 bp, Homo sapien
cctgctacaccagcttccggctgac

SEQ ID NO: 4388961 - DNA, 25 bp, Homo sapien
ccctgctacaccagcttccggctga

SEQ ID NO: 4388962 - DNA, 25 bp, Homo sapien
cccctgctacaccagcttccggctg

SEQ ID NO: 4388963 - DNA, 25 bp, Homo sapien
tgtgggttgtgatgactcgggctgg

SEQ ID NO: 4388964 - DNA, 25 bp, Homo sapien
tccagtccaagcctggaattcctgt

SEQ ID NO: 4388965 - DNA, 25 bp, Homo sapien
ctgtcccatcccgaagtgtgggttg

SEQ ID NO: 4388966 - DNA, 25 bp, Homo sapien
ttgtggatcttgagggcttcactcc

SEQ ID NO: 4388967 - DNA, 25 bp, Homo sapien
tgccaattgctgaaaccctcggctc

SEQ ID NO: 4388968 - DNA, 25 bp, Homo sapien
ggaacagagaacacggtcacaagct

SEQ ID NO: 4388969 - DNA, 25 bp, Homo sapien
atgcacggccctgccaattgctgaa

SEQ ID NO: 4388970 - DNA, 25 bp, Homo sapien
cacggtcacaagcttgcacagggtc

SEQ ID NO: 4388971 - DNA, 25 bp, Homo sapien
gactgcttatgcctgaagaggaaat

SEQ ID NO: 4388972 - DNA, 25 bp, Homo sapien
cctggcttgccagacccgcttaaga

SEQ ID NO: 4388973 - DNA, 25 bp, Homo sapien
gacccaggtcatggtgactgcttat

SEQ ID NO: 4388974 - DNA, 25 bp, Homo sapien
gcacagccctggcttgccagacccg

SEQ ID NO: 4388975 - DNA, 25 bp, Homo sapien
tcccgaagccgcgagcttctgaaga

SEQ ID NO: 4388976 - DNA, 25 bp, Homo sapien
tcctgcggaagcaggtcctcccctg

SEQ ID NO: 4388977 - DNA, 25 bp, Homo sapien
ctggcatcctgagcccgctgccctg

SEQ ID NO: 4388978 - DNA, 25 bp, Homo sapien
catgcccacgctgagccttgggcct

SEQ ID NO: 4388979 - DNA, 25 bp, Homo sapien
gccacagacgacagcaatcctggcg

SEQ ID NO: 4388980 - DNA, 25 bp, Homo sapien
ctggcggccgccagaggaggaaccc

SEQ ID NO: 4388981 - DNA, 25 bp, Homo sapien
cagacgacagcaatcctggcggccg

SEQ ID NO: 4388982 - DNA, 25 bp, Homo sapien
agagccacagacgacagcaatcctg

SEQ ID NO: 4388983 - DNA, 25 bp, Homo sapien
caccctaaatagtcaatggtaagga

SEQ ID NO: 4388984 - DNA, 25 bp, Homo sapien
gaaatagctgcatcaaaggaaaagt

SEQ ID NO: 4388985 - DNA, 25 bp, Homo sapien
tagtcccacattagaaacaccctaa

SEQ ID NO: 4388986 - DNA, 25 bp, Homo sapien
aaacttgaagatataaaggcatatc

SEQ ID NO: 4388987 - DNA, 25 bp, Homo sapien
ggacagacttctacaactggtgaaa

SEQ ID NO: 4388988 - DNA, 25 bp, Homo sapien
gaacatgtagtaacacggacagact

SEQ ID NO: 4388989 - DNA, 25 bp, Homo sapien
tgaaagcccctgtcacagtgggact

SEQ ID NO: 4388990 - DNA, 25 bp, Homo sapien
cattacggagtagaaagaactcgtc

SEQ ID NO: 4388991 - DNA, 25 bp, Homo sapien
ctgcagtgcccacggaccaaacggg

SEQ ID NO: 4388992 - DNA, 25 bp, Homo sapien
tccgaggtcgcgtgggatccgggct

SEQ ID NO: 4388993 - DNA, 25 bp, Homo sapien
gttccaactcggctgaaggcaggcc

SEQ ID NO: 4388994 - DNA, 25 bp, Homo sapien
ctcgagcactgagtccgggcatgga

SEQ ID NO: 4388995 - DNA, 25 bp, Homo sapien
gggcctccgcgtcctcccaccacag

SEQ ID NO: 4388996 - DNA, 25 bp, Homo sapien
ggactcgttgcggtccctacccagc

SEQ ID NO: 4388997 - DNA, 25 bp, Homo sapien
cccaccacagggtggggactcgttg

SEQ ID NO: 4388998 - DNA, 25 bp, Homo sapien
cacagggtggggactcgttgcggtc

SEQ ID NO: 4388999 - DNA, 25 bp, Homo sapien
cgggcgtggtccacaagccgaagtc

SEQ ID NO: 4389000 - DNA, 25 bp, Homo sapien
gccgaagtcccgctggtactgagtg

SEQ ID NO: 4389001 - DNA, 25 bp, Homo sapien
ctgtcgaggtccgagtagccgtgca

SEQ ID NO: 4389002 - DNA, 25 bp, Homo sapien
aggactgcgcggaggatttgcccct

SEQ ID NO: 4389003 - DNA, 25 bp, Homo sapien
cccgccgccccgctcccggcgcgcg

SEQ ID NO: 4389004 - DNA, 25 bp, Homo sapien
gcgcccgccgccccgctcccggcgc

SEQ ID NO: 4389005 - DNA, 25 bp, Homo sapien
cagccccggcgcccgccgccccgct

SEQ ID NO: 4389006 - DNA, 25 bp, Homo sapien
gcccgccgccccgctcccggcgcgc

SEQ ID NO: 4389007 - DNA, 25 bp, Homo sapien
tagcttgaagttgtagcaaagtgac

SEQ ID NO: 4389008 - DNA, 25 bp, Homo sapien
catgacggctgcctagaagtggcag

SEQ ID NO: 4389009 - DNA, 25 bp, Homo sapien
gaggcgccaggtgtagagggagatc

SEQ ID NO: 4389010 - DNA, 25 bp, Homo sapien
gcagcaggcgaggcgccaggtgtag

SEQ ID NO: 4389011 - DNA, 25 bp, Homo sapien
cgtttcctcgctggcaaaatgatgg

SEQ ID NO: 4389012 - DNA, 25 bp, Homo sapien
tgaaggactgccaaatactggacaa

SEQ ID NO: 4389013 - DNA, 25 bp, Homo sapien
cgagtttagaacagaatcctgtgcc

SEQ ID NO: 4389014 - DNA, 25 bp, Homo sapien
caatttctatgtgctgggcgcgtgc

SEQ ID NO: 4389015 - DNA, 25 bp, Homo sapien
ggccttcgatcctcccaggacaaag

SEQ ID NO: 4389016 - DNA, 25 bp, Homo sapien
cggcacacaacctgagtccgatcgg

SEQ ID NO: 4389017 - DNA, 25 bp, Homo sapien
aggctgaaatcagggccttcgatcc

SEQ ID NO: 4389018 - DNA, 25 bp, Homo sapien
acctgagtccgatcggccacaggag

SEQ ID NO: 4389019 - DNA, 25 bp, Homo sapien
ctcaggcggcaaggaccagatgcac

SEQ ID NO: 4389020 - DNA, 25 bp, Homo sapien
caaggaccagatgcaccactactgt

SEQ ID NO: 4389021 - DNA, 25 bp, Homo sapien
acattctaaaaagacacggactggg

SEQ ID NO: 4389022 - DNA, 25 bp, Homo sapien
gcatcttccagacgggagcatagcc

SEQ ID NO: 4389023 - DNA, 25 bp, Homo sapien
tccaaatcagttcatgaccgtaagt

SEQ ID NO: 4389024 - DNA, 25 bp, Homo sapien
tggggccattagtccttatttcatg

SEQ ID NO: 4389025 - DNA, 25 bp, Homo sapien
gttcatgaccgtaagtaacatacca

SEQ ID NO: 4389026 - DNA, 25 bp, Homo sapien
cagattttcactagcggctccctgt

SEQ ID NO: 4389027 - DNA, 25 bp, Homo sapien
catggtgacagatcccaagttgaca

SEQ ID NO: 4389028 - DNA, 25 bp, Homo sapien
caaatggtaagtagcatggtgacag

SEQ ID NO: 4389029 - DNA, 25 bp, Homo sapien
gccactcactatgtagccgattaaa

SEQ ID NO: 4389030 - DNA, 25 bp, Homo sapien
caaacagtgtgacatacaaatggta

SEQ ID NO: 4389031 - DNA, 25 bp, Homo sapien
gtcatacagagcaatggctccgcca

SEQ ID NO: 4389032 - DNA, 25 bp, Homo sapien
atagcactggcgagacagaggtcag

SEQ ID NO: 4389033 - DNA, 25 bp, Homo sapien
tctactccagtcatacagagcaatg

SEQ ID NO: 4389034 - DNA, 25 bp, Homo sapien
gccaactcagcatgtctaaatagca

SEQ ID NO: 4389035 - DNA, 25 bp, Homo sapien
gtgccgcatgatcaaaaaatttcca

SEQ ID NO: 4389036 - DNA, 25 bp, Homo sapien
cgaggactgtcatgatggcaccaga

SEQ ID NO: 4389037 - DNA, 25 bp, Homo sapien
cgtgaacatcggaaggaaaataatg

SEQ ID NO: 4389038 - DNA, 25 bp, Homo sapien
tgctgtgaacgtgaacatcggaagg

SEQ ID NO: 4389039 - DNA, 25 bp, Homo sapien
gtgcagacagctgcgaggactgtca

SEQ ID NO: 4389040 - DNA, 25 bp, Homo sapien
tgaggccaggacaacaaatactagt

SEQ ID NO: 4389041 - DNA, 25 bp, Homo sapien
aattccagcacagtgtgaggcatga

SEQ ID NO: 4389042 - DNA, 25 bp, Homo sapien
tagaagtaggtaagttgtcgccagg

SEQ ID NO: 4389043 - DNA, 25 bp, Homo sapien
ggtttcacgggtgtctacatgtcaa

SEQ ID NO: 4389044 - DNA, 25 bp, Homo sapien
tcctgtggcaactttacccacgtaa

SEQ ID NO: 4389045 - DNA, 25 bp, Homo sapien
ctgtggcaactttacccacgtaact

SEQ ID NO: 4389046 - DNA, 25 bp, Homo sapien
ttcctgtggcaactttacccacgta

SEQ ID NO: 4389047 - DNA, 25 bp, Homo sapien
tggctaggaagtggttccctgctac

SEQ ID NO: 4389048 - DNA, 25 bp, Homo sapien
ctgtgaactgaacacactgggggaa

SEQ ID NO: 4389049 - DNA, 25 bp, Homo sapien
aggcagccgggaagtctgggaacca

SEQ ID NO: 4389050 - DNA, 25 bp, Homo sapien
ctgggggaaatgagcttgcttaagg

SEQ ID NO: 4389051 - DNA, 25 bp, Homo sapien
tatagctctgatttaaagctttctg

SEQ ID NO: 4389052 - DNA, 25 bp, Homo sapien
aatggagggcctaaactaatgaaat

SEQ ID NO: 4389053 - DNA, 25 bp, Homo sapien
gacatgcttaaattctacactaacc

SEQ ID NO: 4389054 - DNA, 25 bp, Homo sapien
atcaaggcccgatgagattacaaaa

SEQ ID NO: 4389055 - DNA, 25 bp, Homo sapien
taaactaatgaaatcaaggcccgat

SEQ ID NO: 4389056 - DNA, 25 bp, Homo sapien
gctcttgacccagaatgttcactat

SEQ ID NO: 4389057 - DNA, 25 bp, Homo sapien
gcagataggtacactgccatgaact

SEQ ID NO: 4389058 - DNA, 25 bp, Homo sapien
tacactgccatgaactgctcttgac

SEQ ID NO: 4389059 - DNA, 25 bp, Homo sapien
ctgctcttgacccagaatgttcact

SEQ ID NO: 4389060 - DNA, 25 bp, Homo sapien
tgaatgttgacagcaacattggaga

SEQ ID NO: 4389061 - DNA, 25 bp, Homo sapien
gaatgttgacagcaacattggagaa

SEQ ID NO: 4389062 - DNA, 25 bp, Homo sapien
tgttgacagcaacattggagaacaa

SEQ ID NO: 4389063 - DNA, 25 bp, Homo sapien
aatgttgacagcaacattggagaac

SEQ ID NO: 4389064 - DNA, 25 bp, Homo sapien
tatctgatcattgtccgctgcagag

SEQ ID NO: 4389065 - DNA, 25 bp, Homo sapien
ggctggattcgatgtgaaatatctg

SEQ ID NO: 4389066 - DNA, 25 bp, Homo sapien
aatatctgatcattgtccgctgcag

SEQ ID NO: 4389067 - DNA, 25 bp, Homo sapien
tctgatcattgtccgctgcagagaa

SEQ ID NO: 4389068 - DNA, 25 bp, Homo sapien
tatgtaagagtactgtatacctggg

SEQ ID NO: 4389069 - DNA, 25 bp, Homo sapien
cactgcctagggttggtaaagtcac

SEQ ID NO: 4389070 - DNA, 25 bp, Homo sapien
taaatgctctgggagctaacttcct

SEQ ID NO: 4389071 - DNA, 25 bp, Homo sapien
caggaaagtctgatctacattaccc

SEQ ID NO: 4389072 - DNA, 25 bp, Homo sapien
gttttaagtttgaggctgcctgaga

SEQ ID NO: 4389073 - DNA, 25 bp, Homo sapien
ggctgtctgtttaacctgactggga

SEQ ID NO: 4389074 - DNA, 25 bp, Homo sapien
gattccatgcaaaacccactttcag

SEQ ID NO: 4389075 - DNA, 25 bp, Homo sapien
tattcctggactctacaaggccaca

SEQ ID NO: 4389076 - DNA, 25 bp, Homo sapien
gaagaaatcacgagggcaactagga

SEQ ID NO: 4389077 - DNA, 25 bp, Homo sapien
gtgtagagaggagcaaactaaaacc

SEQ ID NO: 4389078 - DNA, 25 bp, Homo sapien
tgatcacttggaatgaaattacaaa

SEQ ID NO: 4389079 - DNA, 25 bp, Homo sapien
ttataggaggcaacaaaagtggtgc

SEQ ID NO: 4389080 - DNA, 25 bp, Homo sapien
tcaggaataggtaaggaggccttag

SEQ ID NO: 4389081 - DNA, 25 bp, Homo sapien
agcaacatcaggaataggtaaggag

SEQ ID NO: 4389082 - DNA, 25 bp, Homo sapien
aacatcaggaataggtaaggaggcc

SEQ ID NO: 4389083 - DNA, 25 bp, Homo sapien
ggaggccttagtctgggaagacagc

SEQ ID NO: 4389084 - DNA, 25 bp, Homo sapien
cttgaaaaggtacaaggagagagag

SEQ ID NO: 4389085 - DNA, 25 bp, Homo sapien
ttgaaaaggtacaaggagagagaga

SEQ ID NO: 4389086 - DNA, 25 bp, Homo sapien
tgaaaaggtacaaggagagagagaa

SEQ ID NO: 4389087 - DNA, 25 bp, Homo sapien
cttgaatggttaaaacgtgtaagct

SEQ ID NO: 4389088 - DNA, 25 bp, Homo sapien
tgaatggttaaaacgtgtaagctaa

SEQ ID NO: 4389089 - DNA, 25 bp, Homo sapien
ttgaatggttaaaacgtgtaagcta

SEQ ID NO: 4389090 - DNA, 25 bp, Homo sapien
tggttaaaacgtgtaagctaacaca

SEQ ID NO: 4389091 - DNA, 25 bp, Homo sapien
tccgctggccatcacttaggttatt

SEQ ID NO: 4389092 - DNA, 25 bp, Homo sapien
ccgctggccatcacttaggttattc

SEQ ID NO: 4389093 - DNA, 25 bp, Homo sapien
gtccgctggccatcacttaggttat

SEQ ID NO: 4389094 - DNA, 25 bp, Homo sapien
agtccgctggccatcacttaggtta

SEQ ID NO: 4389095 - DNA, 25 bp, Homo sapien
actttagtagagctgagatccactg

SEQ ID NO: 4389096 - DNA, 25 bp, Homo sapien
ctgcaaccccgacctgtggaaaaat

SEQ ID NO: 4389097 - DNA, 25 bp, Homo sapien
taaactttagtagagctgagacatc

SEQ ID NO: 4389098 - DNA, 25 bp, Homo sapien
tcaaggtgatccaagtaaaacagtg

SEQ ID NO: 4389099 - DNA, 25 bp, Homo sapien
catttttaacaactatccgtggtga

SEQ ID NO: 4389100 - DNA, 25 bp, Homo sapien
gggacagaattctggaacactgtta

SEQ ID NO: 4389101 - DNA, 25 bp, Homo sapien
aagtacaacaccagatatataaaac

SEQ ID NO: 4389102 - DNA, 25 bp, Homo sapien
ttactgtgaagaatattaagtgcac

SEQ ID NO: 4389103 - DNA, 25 bp, Homo sapien
tgctatccaaccaatcagcttttat

SEQ ID NO: 4389104 - DNA, 25 bp, Homo sapien
tatgctatccaaccaatcagctttt

SEQ ID NO: 4389105 - DNA, 25 bp, Homo sapien
ggtcttatgctatccaaccaatcag

SEQ ID NO: 4389106 - DNA, 25 bp, Homo sapien
ttttgtggtcttatgctatccaacc

SEQ ID NO: 4389107 - DNA, 25 bp, Homo sapien
aattcttcactgtcattgcttttta

SEQ ID NO: 4389108 - DNA, 25 bp, Homo sapien
caaaccaacagaagggaatacttgg

SEQ ID NO: 4389109 - DNA, 25 bp, Homo sapien
tacttggcacagtgaaacctaataa

SEQ ID NO: 4389110 - DNA, 25 bp, Homo sapien
ggcacagtgaaacctaataagtgaa

SEQ ID NO: 4389111 - DNA, 25 bp, Homo sapien
cttgtccctgggtctgatcttcgag

SEQ ID NO: 4389112 - DNA, 25 bp, Homo sapien
cacttgtccctgggtctgatcttcg

SEQ ID NO: 4389113 - DNA, 25 bp, Homo sapien
ctgaatccgcatttttgttgaataa

SEQ ID NO: 4389114 - DNA, 25 bp, Homo sapien
tctgaatccgcatttttgttgaata

SEQ ID NO: 4389115 - DNA, 25 bp, Homo sapien
tactgatcatgcctcctagtcctag

SEQ ID NO: 4389116 - DNA, 25 bp, Homo sapien
aattatttgtgagctgttaccccaa

SEQ ID NO: 4389117 - DNA, 25 bp, Homo sapien
taaattaaaacactcctctcacctc

SEQ ID NO: 4389118 - DNA, 25 bp, Homo sapien
gagtctacagcttgacttcctcaaa

SEQ ID NO: 4389119 - DNA, 25 bp, Homo sapien
acttcaaacactttaacctgttgca

SEQ ID NO: 4389120 - DNA, 25 bp, Homo sapien
ctggatcatggcaacactttcctta

SEQ ID NO: 4389121 - DNA, 25 bp, Homo sapien
gcaacactttccttaacttcaaaca

SEQ ID NO: 4389122 - DNA, 25 bp, Homo sapien
cttcaaacactttaacctgttgcat

SEQ ID NO: 4389123 - DNA, 25 bp, Homo sapien
ccttggtgttcagtagtctagcggg

SEQ ID NO: 4389124 - DNA, 25 bp, Homo sapien
tctaccatgacagagggagtgttcc

SEQ ID NO: 4389125 - DNA, 25 bp, Homo sapien
caaaagctgcaaggtcttctgaggc

SEQ ID NO: 4389126 - DNA, 25 bp, Homo sapien
cagatggcttcactcgtacctggag

SEQ ID NO: 4389127 - DNA, 25 bp, Homo sapien
gcatatgacaactcacgacagcagg

SEQ ID NO: 4389128 - DNA, 25 bp, Homo sapien
gaatacttaagttgccaccagccac

SEQ ID NO: 4389129 - DNA, 25 bp, Homo sapien
gctgctttggtccttctgccaggaa

SEQ ID NO: 4389130 - DNA, 25 bp, Homo sapien
tgaagcgccgcaataaaatggatgg

SEQ ID NO: 4389131 - DNA, 25 bp, Homo sapien
tctttgtggactactgaaatctgtc

SEQ ID NO: 4389132 - DNA, 25 bp, Homo sapien
ggtcccacttcaggcctattattaa

SEQ ID NO: 4389133 - DNA, 25 bp, Homo sapien
taatacatcaaatgacacggattgg

SEQ ID NO: 4389134 - DNA, 25 bp, Homo sapien
cacggattgggtcattcttctgcac

SEQ ID NO: 4389135 - DNA, 25 bp, Homo sapien
gagctgcggcggggttaggaccgca

SEQ ID NO: 4389136 - DNA, 25 bp, Homo sapien
gcccaccgacgcaccccacgcctgg

SEQ ID NO: 4389137 - DNA, 25 bp, Homo sapien
gggttaggaccgcagtgagctcctc

SEQ ID NO: 4389138 - DNA, 25 bp, Homo sapien
taggaccgcagtgagctcctcgcag

SEQ ID NO: 4389139 - DNA, 25 bp, Homo sapien
gccccaccatggcccgaccttacca

SEQ ID NO: 4389140 - DNA, 25 bp, Homo sapien
acaggccatcctccctaggaccagg

SEQ ID NO: 4389141 - DNA, 25 bp, Homo sapien
ctacaggccatcctccctaggacca

SEQ ID NO: 4389142 - DNA, 25 bp, Homo sapien
aggccatcctccctaggaccagggc

SEQ ID NO: 4389143 - DNA, 25 bp, Homo sapien
ggccatcctccctaggaccagggct

SEQ ID NO: 4389144 - DNA, 25 bp, Homo sapien
gggttgccaagtgccgccaaagatg

SEQ ID NO: 4389145 - DNA, 25 bp, Homo sapien
agatgtactccagcttgagccccgg

SEQ ID NO: 4389146 - DNA, 25 bp, Homo sapien
gctcccttctggcagttggaaccga

SEQ ID NO: 4389147 - DNA, 25 bp, Homo sapien
ctccatttgagccagctggtctgct

SEQ ID NO: 4389148 - DNA, 25 bp, Homo sapien
ttgaactgtcgaggggtctcccagc

SEQ ID NO: 4389149 - DNA, 25 bp, Homo sapien
ctcagggtcatagagcacagaggcc

SEQ ID NO: 4389150 - DNA, 25 bp, Homo sapien
ggcctcattggccacaaagtttcca

SEQ ID NO: 4389151 - DNA, 25 bp, Homo sapien
cagaggccaggttgggtaagatgat

SEQ ID NO: 4389152 - DNA, 25 bp, Homo sapien
tggcaatttggaattcgcaatcaaa

SEQ ID NO: 4389153 - DNA, 25 bp, Homo sapien
tcctggggtcgctgtgccagcttct

SEQ ID NO: 4389154 - DNA, 25 bp, Homo sapien
gcttctgcccagtaaatggcaattt

SEQ ID NO: 4389155 - DNA, 25 bp, Homo sapien
tggaattcgcaatcaaatagaatgt

SEQ ID NO: 4389156 - DNA, 25 bp, Homo sapien
actggcgcacggcacccatggccat

SEQ ID NO: 4389157 - DNA, 25 bp, Homo sapien
atagctgcacacacgggtggaggtc

SEQ ID NO: 4389158 - DNA, 25 bp, Homo sapien
tgcacacacgggtggaggtcacaca

SEQ ID NO: 4389159 - DNA, 25 bp, Homo sapien
cttgctcacgggatagctgcacaca

SEQ ID NO: 4389160 - DNA, 25 bp, Homo sapien
gacagcatggtgtaaggcagtcgct

SEQ ID NO: 4389161 - DNA, 25 bp, Homo sapien
gaggacagcatggtgtaaggcagtc

SEQ ID NO: 4389162 - DNA, 25 bp, Homo sapien
agcatggtgtaaggcagtcgcttgc

SEQ ID NO: 4389163 - DNA, 25 bp, Homo sapien
ctgcacgtcatggaggacagcatgg

SEQ ID NO: 4389164 - DNA, 25 bp, Homo sapien
tcatagcagacaaccggggcagcac

SEQ ID NO: 4389165 - DNA, 25 bp, Homo sapien
cttcatagcagacaaccggggcagc

SEQ ID NO: 4389166 - DNA, 25 bp, Homo sapien
gcaccgtctccgcaggtggcttagt

SEQ ID NO: 4389167 - DNA, 25 bp, Homo sapien
ccgtctccgcaggtggcttagtgtg

SEQ ID NO: 4389168 - DNA, 25 bp, Homo sapien
ggacagctccgtgctggatcatgtg

SEQ ID NO: 4389169 - DNA, 25 bp, Homo sapien
tccgtgctggatcatgtggatgagt

SEQ ID NO: 4389170 - DNA, 25 bp, Homo sapien
tgctggatcatgtggatgagtgccc

SEQ ID NO: 4389171 - DNA, 25 bp, Homo sapien
cagctccgtgctggatcatgtggat

SEQ ID NO: 4389172 - DNA, 25 bp, Homo sapien
ctagaccaggttctcctggttgaat

SEQ ID NO: 4389173 - DNA, 25 bp, Homo sapien
tagaccaggttctcctggttgaatg

SEQ ID NO: 4389174 - DNA, 25 bp, Homo sapien
accaggttctcctggttgaatgtgg

SEQ ID NO: 4389175 - DNA, 25 bp, Homo sapien
gttgaatgtggagacagggtcatcc

SEQ ID NO: 4389176 - DNA, 25 bp, Homo sapien
ccttgaagcctgatctgagacctgt

SEQ ID NO: 4389177 - DNA, 25 bp, Homo sapien
gcgcagctccaggtctaaaattctc

SEQ ID NO: 4389178 - DNA, 25 bp, Homo sapien
cttgaggttccaaccccttgagagg

SEQ ID NO: 4389179 - DNA, 25 bp, Homo sapien
aaattctctcctgacagagccctgg

SEQ ID NO: 4389180 - DNA, 25 bp, Homo sapien
attttcagcgtgctttggaagctcg

SEQ ID NO: 4389181 - DNA, 25 bp, Homo sapien
tcagcgtgctttggaagctcgtaga

SEQ ID NO: 4389182 - DNA, 25 bp, Homo sapien
gctttggaagctcgtagatagagtc

SEQ ID NO: 4389183 - DNA, 25 bp, Homo sapien
gctcgtagatagagtcaaagatgag

SEQ ID NO: 4389184 - DNA, 25 bp, Homo sapien
aggtgctcagaaacgaggtgcagcc

SEQ ID NO: 4389185 - DNA, 25 bp, Homo sapien
tgctcagaaacgaggtgcagcccaa

SEQ ID NO: 4389186 - DNA, 25 bp, Homo sapien
gaaacgaggtgcagcccaaaaagat

SEQ ID NO: 4389187 - DNA, 25 bp, Homo sapien
ggtgcagcccaaaaagatggcccct

SEQ ID NO: 4389188 - DNA, 25 bp, Homo sapien
gccctgagtttgtgcctggtgatct

SEQ ID NO: 4389189 - DNA, 25 bp, Homo sapien
gggcccagggaaacacgtcatacag

SEQ ID NO: 4389190 - DNA, 25 bp, Homo sapien
gcacgacctcttggtacctaaatat

SEQ ID NO: 4389191 - DNA, 25 bp, Homo sapien
gattaagctcagcacgacctcttgg

SEQ ID NO: 4389192 - DNA, 25 bp, Homo sapien
gatacctgagggtcgaagggtctac

SEQ ID NO: 4389193 - DNA, 25 bp, Homo sapien
cacagtgctgacaaatgccaggcca

SEQ ID NO: 4389194 - DNA, 25 bp, Homo sapien
cgatgactctgactgtggacctgac

SEQ ID NO: 4389195 - DNA, 25 bp, Homo sapien
taagaggaagtggtggccaaacaca

SEQ ID NO: 4389196 - DNA, 25 bp, Homo sapien
gctcctggcggaaggcttctgccag

SEQ ID NO: 4389197 - DNA, 25 bp, Homo sapien
ctgctcctggcggaaggcttctgcc

SEQ ID NO: 4389198 - DNA, 25 bp, Homo sapien
cctgctcctggcggaaggcttctgc

SEQ ID NO: 4389199 - DNA, 25 bp, Homo sapien
tgctcctggcggaaggcttctgcca

SEQ ID NO: 4389200 - DNA, 25 bp, Homo sapien
cacgtgtgcccgctgctgcagatga

SEQ ID NO: 4389201 - DNA, 25 bp, Homo sapien
gcagaagcgtctcttttgccgccac

SEQ ID NO: 4389202 - DNA, 25 bp, Homo sapien
agcgtctcttttgccgccacgtgtg

SEQ ID NO: 4389203 - DNA, 25 bp, Homo sapien
gtgtgcccgctgctgcagatgatgc

SEQ ID NO: 4389204 - DNA, 25 bp, Homo sapien
gtgtagtgaccatctagccgcctcc

SEQ ID NO: 4389205 - DNA, 25 bp, Homo sapien
gccctgcctcgttctccaaacaggt

SEQ ID NO: 4389206 - DNA, 25 bp, Homo sapien
tgagtgtagtgaccatctagccgcc

SEQ ID NO: 4389207 - DNA, 25 bp, Homo sapien
tccctgagtgtagtgaccatctagc

SEQ ID NO: 4389208 - DNA, 25 bp, Homo sapien
tgccggagaactgctccgagttgga

SEQ ID NO: 4389209 - DNA, 25 bp, Homo sapien
tcagcaccgcaacggggatcgggcc

SEQ ID NO: 4389210 - DNA, 25 bp, Homo sapien
ggatcgggcccacccacacggtgaa

SEQ ID NO: 4389211 - DNA, 25 bp, Homo sapien
gaactgctccgagttggagaccagt

SEQ ID NO: 4389212 - DNA, 25 bp, Homo sapien
gtgcagctgaaagcatagctgccac

SEQ ID NO: 4389213 - DNA, 25 bp, Homo sapien
aagcatagctgccacaggtttccaa

SEQ ID NO: 4389214 - DNA, 25 bp, Homo sapien
gaaggagatggccagtaaagccagc

SEQ ID NO: 4389215 - DNA, 25 bp, Homo sapien
atggccagtaaagccagcccactga

SEQ ID NO: 4389216 - DNA, 25 bp, Homo sapien
tgcacctgaacacagaaggagaatt

SEQ ID NO: 4389217 - DNA, 25 bp, Homo sapien
cctgaacacagaaggagaattccat

SEQ ID NO: 4389218 - DNA, 25 bp, Homo sapien
ctccatgcacctgaacacagaagga

SEQ ID NO: 4389219 - DNA, 25 bp, Homo sapien
tccatgcacctgaacacagaaggag

SEQ ID NO: 4389220 - DNA, 25 bp, Homo sapien
caaaaacttctacgccagtgtgaga

SEQ ID NO: 4389221 - DNA, 25 bp, Homo sapien
tccccggctcggaggaatgtctctg

SEQ ID NO: 4389222 - DNA, 25 bp, Homo sapien
tgagacactgattagcaagagctgc

SEQ ID NO: 4389223 - DNA, 25 bp, Homo sapien
gccaatccggaactgctgtgcgaaa

SEQ ID NO: 4389224 - DNA, 25 bp, Homo sapien
aactgtcgttggacagaaggaccga

SEQ ID NO: 4389225 - DNA, 25 bp, Homo sapien
ggaccgatggggtgtcaaactccac

SEQ ID NO: 4389226 - DNA, 25 bp, Homo sapien
cagcaaacatggcatagaatcggga

SEQ ID NO: 4389227 - DNA, 25 bp, Homo sapien
tgacagcgaccttgttctctgcagc

SEQ ID NO: 4389228 - DNA, 25 bp, Homo sapien
tacagatacagtctagggcggctga

SEQ ID NO: 4389229 - DNA, 25 bp, Homo sapien
catgtgctggctggtctcagtaggc

SEQ ID NO: 4389230 - DNA, 25 bp, Homo sapien
ctccgggagcggtaatcattgtgta

SEQ ID NO: 4389231 - DNA, 25 bp, Homo sapien
taagaagtttggtgccgctgcgtga

SEQ ID NO: 4389232 - DNA, 25 bp, Homo sapien
tatcggagcctagaaccgtgtgcag

SEQ ID NO: 4389233 - DNA, 25 bp, Homo sapien
aatggtcagcatggtacagtctgca

SEQ ID NO: 4389234 - DNA, 25 bp, Homo sapien
tctgcaaatgcttctcggatggtct

SEQ ID NO: 4389235 - DNA, 25 bp, Homo sapien
tcggatggtctcttgaatcaataag

SEQ ID NO: 4389236 - DNA, 25 bp, Homo sapien
gctatgcacaagagctgccgttccc

SEQ ID NO: 4389237 - DNA, 25 bp, Homo sapien
gcggagcagggctctagctatgcac

SEQ ID NO: 4389238 - DNA, 25 bp, Homo sapien
gcagggctctagctatgcacaagag

SEQ ID NO: 4389239 - DNA, 25 bp, Homo sapien
ctagctatgcacaagagctgccgtt

SEQ ID NO: 4389240 - DNA, 25 bp, Homo sapien
cagcacggcttcccctaagctcttc

SEQ ID NO: 4389241 - DNA, 25 bp, Homo sapien
tcagcacggcttcccctaagctctt

SEQ ID NO: 4389242 - DNA, 25 bp, Homo sapien
ctcagcacggcttcccctaagctct

SEQ ID NO: 4389243 - DNA, 25 bp, Homo sapien
cagtgtactggttgaaggggtccaa

SEQ ID NO: 4389244 - DNA, 25 bp, Homo sapien
tctggtcttcagtgtactggttgaa

SEQ ID NO: 4389245 - DNA, 25 bp, Homo sapien
caaatctggtcttcagtgtactggt

SEQ ID NO: 4389246 - DNA, 25 bp, Homo sapien
gcatcccaaatctggtcttcagtgt

SEQ ID NO: 4389247 - DNA, 25 bp, Homo sapien
tatcaaggtcgtggttaacagtggg

SEQ ID NO: 4389248 - DNA, 25 bp, Homo sapien
tcaagatccacaaagaggcacgtct

SEQ ID NO: 4389249 - DNA, 25 bp, Homo sapien
gacacacgcttcaggaggcaatgca

SEQ ID NO: 4389250 - DNA, 25 bp, Homo sapien
aacaggaataatggccaagggcggc

SEQ ID NO: 4389251 - DNA, 25 bp, Homo sapien
tgacagtgccactgaacagcaccgg

SEQ ID NO: 4389252 - DNA, 25 bp, Homo sapien
cttgaggaatgatagagagtttgct

SEQ ID NO: 4389253 - DNA, 25 bp, Homo sapien
ttgatgcagcctccagataactcca

SEQ ID NO: 4389254 - DNA, 25 bp, Homo sapien
tttgcttcggaggtcggcaaggcca

SEQ ID NO: 4389255 - DNA, 25 bp, Homo sapien
tgtctaacagcctaatgggaacctg

SEQ ID NO: 4389256 - DNA, 25 bp, Homo sapien
tagaaatgagtgactccaggccggt

SEQ ID NO: 4389257 - DNA, 25 bp, Homo sapien
taggaaacctggtccgtctagcagg

SEQ ID NO: 4389258 - DNA, 25 bp, Homo sapien
taagacttggaagaagtaacgccca

SEQ ID NO: 4389259 - DNA, 25 bp, Homo sapien
caaagatacctcttatacaaggata

SEQ ID NO: 4389260 - DNA, 25 bp, Homo sapien
agctagaagagttttgatgccaaag

SEQ ID NO: 4389261 - DNA, 25 bp, Homo sapien
tggaatgcaattcaggaacgaaagt

SEQ ID NO: 4389262 - DNA, 25 bp, Homo sapien
tgccaaagaagcatggagcctagaa

SEQ ID NO: 4389263 - DNA, 25 bp, Homo sapien
tctctttaggtttgatcgtgaagga

SEQ ID NO: 4389264 - DNA, 25 bp, Homo sapien
catctctgcgttctcaaaggtcacc

SEQ ID NO: 4389265 - DNA, 25 bp, Homo sapien
gatactttctttaggacgagaggga

SEQ ID NO: 4389266 - DNA, 25 bp, Homo sapien
gttttctcggtacctcatctctgcg

SEQ ID NO: 4389267 - DNA, 25 bp, Homo sapien
caaagtcaagtgttgggaactcaga

SEQ ID NO: 4389268 - DNA, 25 bp, Homo sapien
tggactgagccgtattcatgccact

SEQ ID NO: 4389269 - DNA, 25 bp, Homo sapien
cgtacactcagttcccaattgaaag

SEQ ID NO: 4389270 - DNA, 25 bp, Homo sapien
gagtaatttttcaggccggacacta

SEQ ID NO: 4389271 - DNA, 25 bp, Homo sapien
gccttcggaactgtgagtgacttaa

SEQ ID NO: 4389272 - DNA, 25 bp, Homo sapien
tggattaagacatccctgtaggaaa

SEQ ID NO: 4389273 - DNA, 25 bp, Homo sapien
catgcgtcctgttaagccttcggaa

SEQ ID NO: 4389274 - DNA, 25 bp, Homo sapien
ggaagagctggatactctggtatca

SEQ ID NO: 4389275 - DNA, 25 bp, Homo sapien
tctccaccgaggtgaatcgagcttc

SEQ ID NO: 4389276 - DNA, 25 bp, Homo sapien
gtgaatcgagcttctgtctcagatg

SEQ ID NO: 4389277 - DNA, 25 bp, Homo sapien
cagtctgaccgtaaactggaacagc

SEQ ID NO: 4389278 - DNA, 25 bp, Homo sapien
tgtagtgattgatcctctccaccga

SEQ ID NO: 4389279 - DNA, 25 bp, Homo sapien
gaacgatcatcagccccgtggtggt

SEQ ID NO: 4389280 - DNA, 25 bp, Homo sapien
caccgcatcgcacacgtaaacaaaa

SEQ ID NO: 4389281 - DNA, 25 bp, Homo sapien
tggacagcataagagatggcgagac

SEQ ID NO: 4389282 - DNA, 25 bp, Homo sapien
gggaatctgcccgtgcataagaacg

SEQ ID NO: 4389283 - DNA, 25 bp, Homo sapien
aggtgactgcgtgatattgtccaga

SEQ ID NO: 4389284 - DNA, 25 bp, Homo sapien
ccctttattgtaggcgtggatggtg

SEQ ID NO: 4389285 - DNA, 25 bp, Homo sapien
caaggccctgtatgctggacgtgat

SEQ ID NO: 4389286 - DNA, 25 bp, Homo sapien
aactcctgccctttattgtaggcgt

SEQ ID NO: 4389287 - DNA, 25 bp, Homo sapien
tcctgcgatcattcccacacagaag

SEQ ID NO: 4389288 - DNA, 25 bp, Homo sapien
cacagaagaacaccaggataacgtt

SEQ ID NO: 4389289 - DNA, 25 bp, Homo sapien
tggagacaatgtgcaggactgaaaa

SEQ ID NO: 4389290 - DNA, 25 bp, Homo sapien
actgccacaaggaaccacgggaaga

SEQ ID NO: 4389291 - DNA, 25 bp, Homo sapien
tgggtttacaatggcctatcaatgc

SEQ ID NO: 4389292 - DNA, 25 bp, Homo sapien
tatgtatcagttcgagtatcaggga

SEQ ID NO: 4389293 - DNA, 25 bp, Homo sapien
tattcaaggagtgaaacaacacccg

SEQ ID NO: 4389294 - DNA, 25 bp, Homo sapien
gatttcttgttacctctggccatgg

SEQ ID NO: 4389295 - DNA, 25 bp, Homo sapien
aacttcatagggcttcgaaggatcc

SEQ ID NO: 4389296 - DNA, 25 bp, Homo sapien
aacctgttgagaatcctccctgtgg

SEQ ID NO: 4389297 - DNA, 25 bp, Homo sapien
aaggatccttcggaaaagctcgtca

SEQ ID NO: 4389298 - DNA, 25 bp, Homo sapien
aaagctcgtcatgcagccgggagga

SEQ ID NO: 4389299 - DNA, 25 bp, Homo sapien
tgctgtcactcaccgaggtctcgtt

SEQ ID NO: 4389300 - DNA, 25 bp, Homo sapien
gacaaagacaactcctcgaatggct

SEQ ID NO: 4389301 - DNA, 25 bp, Homo sapien
cgtagatgctggcatagtactgcat

SEQ ID NO: 4389302 - DNA, 25 bp, Homo sapien
gaggattgtccttcatgctgtcact

SEQ ID NO: 4389303 - DNA, 25 bp, Homo sapien
ccagcagcctggatgtagacaccat

SEQ ID NO: 4389304 - DNA, 25 bp, Homo sapien
aaagggccataataaccaggaatgc

SEQ ID NO: 4389305 - DNA, 25 bp, Homo sapien
cccgcttccttgcttgatccagtaa

SEQ ID NO: 4389306 - DNA, 25 bp, Homo sapien
gatccagtaactcaaccaccaggtg

SEQ ID NO: 4389307 - DNA, 25 bp, Homo sapien
gtatgtgccctatcagggaaaatat

SEQ ID NO: 4389308 - DNA, 25 bp, Homo sapien
gcctcctgtgttccacacaaatagc

SEQ ID NO: 4389309 - DNA, 25 bp, Homo sapien
ttttctgtatgtgccctatcaggga

SEQ ID NO: 4389310 - DNA, 25 bp, Homo sapien
gctgcctctgggagcgagcagcctc

SEQ ID NO: 4389311 - DNA, 25 bp, Homo sapien
tgttttaggacccttgtcttgtgac

SEQ ID NO: 4389312 - DNA, 25 bp, Homo sapien
tactgatcctgttttaggacccttg

SEQ ID NO: 4389313 - DNA, 25 bp, Homo sapien
cctgttttaggacccttgtcttgtg

SEQ ID NO: 4389314 - DNA, 25 bp, Homo sapien
tgatcctgttttaggacccttgtct

SEQ ID NO: 4389315 - DNA, 25 bp, Homo sapien
ggcacagcagtctgttcaccagaaa

SEQ ID NO: 4389316 - DNA, 25 bp, Homo sapien
tgtctctcccagcaacaggttatta

SEQ ID NO: 4389317 - DNA, 25 bp, Homo sapien
tacagccctctttcatgaagatcac

SEQ ID NO: 4389318 - DNA, 25 bp, Homo sapien
tgggtgcctctttccgtaatacagc

SEQ ID NO: 4389319 - DNA, 25 bp, Homo sapien
gaagatcacttcatcacagtcaacc

SEQ ID NO: 4389320 - DNA, 25 bp, Homo sapien
tcgtccaggatgtagatgctcctgt

SEQ ID NO: 4389321 - DNA, 25 bp, Homo sapien
ctgtcactatacaaggcccgggcaa

SEQ ID NO: 4389322 - DNA, 25 bp, Homo sapien
gacttgagatgtttccggatagcac

SEQ ID NO: 4389323 - DNA, 25 bp, Homo sapien
tagcactattgaagatgtggttgcc

SEQ ID NO: 4389324 - DNA, 25 bp, Homo sapien
gcagctgttcagcacagagttgtat

SEQ ID NO: 4389325 - DNA, 25 bp, Homo sapien
aagaatggccaggtcaggcctcagg

SEQ ID NO: 4389326 - DNA, 25 bp, Homo sapien
ggaagaatggccaggtcaggcctca

SEQ ID NO: 4389327 - DNA, 25 bp, Homo sapien
tccgtcaggtcgctgctgggaagaa

SEQ ID NO: 4389328 - DNA, 25 bp, Homo sapien
gatggaaagcatgacagaagccaaa

SEQ ID NO: 4389329 - DNA, 25 bp, Homo sapien
gcggccaagatggaaagcatgacag

SEQ ID NO: 4389330 - DNA, 25 bp, Homo sapien
caagatggaaagcatgacagaagcc

SEQ ID NO: 4389331 - DNA, 25 bp, Homo sapien
atggaaagcatgacagaagccaaac

SEQ ID NO: 4389332 - DNA, 25 bp, Homo sapien
cacataagcgaaggttccactgatt

SEQ ID NO: 4389333 - DNA, 25 bp, Homo sapien
tcagagtagcattgaggatccaggc

SEQ ID NO: 4389334 - DNA, 25 bp, Homo sapien
gcaatgctgccctctagaagcgtca

SEQ ID NO: 4389335 - DNA, 25 bp, Homo sapien
cctgctgggccacataagcgaaggt

SEQ ID NO: 4389336 - DNA, 25 bp, Homo sapien
tgtggcactcaatagatacatgctg

SEQ ID NO: 4389337 - DNA, 25 bp, Homo sapien
gcatgactctttcagggattaggca

SEQ ID NO: 4389338 - DNA, 25 bp, Homo sapien
tggaccatgaactccccaagggcat

SEQ ID NO: 4389339 - DNA, 25 bp, Homo sapien
gacattttcaatacacgggcatacc

SEQ ID NO: 4389340 - DNA, 25 bp, Homo sapien
tgccacagattccaaccagtttacc

SEQ ID NO: 4389341 - DNA, 25 bp, Homo sapien
acactgccacagattccaaccagtt

SEQ ID NO: 4389342 - DNA, 25 bp, Homo sapien
cccacactgccacagattccaacca

SEQ ID NO: 4389343 - DNA, 25 bp, Homo sapien
ctgccacagattccaaccagtttac

SEQ ID NO: 4389344 - DNA, 25 bp, Homo sapien
tctgctcaggccagttagatttaca

SEQ ID NO: 4389345 - DNA, 25 bp, Homo sapien
gcaaaatgagggtcaacatacaaag

SEQ ID NO: 4389346 - DNA, 25 bp, Homo sapien
gagaattaaggcatctctcttcaaa

SEQ ID NO: 4389347 - DNA, 25 bp, Homo sapien
tcttcaaatggctaaaggtctccca

SEQ ID NO: 4389348 - DNA, 25 bp, Homo sapien
ggaactataggcgtacagctggcta

SEQ ID NO: 4389349 - DNA, 25 bp, Homo sapien
actataggcgtacagctggctaatt

SEQ ID NO: 4389350 - DNA, 25 bp, Homo sapien
tggaactataggcgtacagctggct

SEQ ID NO: 4389351 - DNA, 25 bp, Homo sapien
gaactataggcgtacagctggctaa

SEQ ID NO: 4389352 - DNA, 25 bp, Homo sapien
ttcctcttcgggactgggccgctcg

SEQ ID NO: 4389353 - DNA, 25 bp, Homo sapien
ggcccaggtggatgtgcttgccttc

SEQ ID NO: 4389354 - DNA, 25 bp, Homo sapien
gcaccgcctgatgctcagtgcgctg

SEQ ID NO: 4389355 - DNA, 25 bp, Homo sapien
gatcgatgctgtgcagtgtcctctg

SEQ ID NO: 4389356 - DNA, 25 bp, Homo sapien
ctggctggtttgttctttatcatgt

SEQ ID NO: 4389357 - DNA, 25 bp, Homo sapien
ttctttatcatgtgaacctcttcca

SEQ ID NO: 4389358 - DNA, 25 bp, Homo sapien
atcttgatgtgaggactggctggtt

SEQ ID NO: 4389359 - DNA, 25 bp, Homo sapien
ctctatcttgatgtgaggactggct

SEQ ID NO: 4389360 - DNA, 25 bp, Homo sapien
aagaccagggagacaagcctagggc

SEQ ID NO: 4389361 - DNA, 25 bp, Homo sapien
aagcctagggcgtacactcacgtag

SEQ ID NO: 4389362 - DNA, 25 bp, Homo sapien
gatgagacactggatcaagaccagg

SEQ ID NO: 4389363 - DNA, 25 bp, Homo sapien
aaacacatcaggctatacagtggaa

SEQ ID NO: 4389364 - DNA, 25 bp, Homo sapien
gtatttcactgggtgtcctgtgtct

SEQ ID NO: 4389365 - DNA, 25 bp, Homo sapien
cagtatttcactgggtgtcctgtgt

SEQ ID NO: 4389366 - DNA, 25 bp, Homo sapien
gcagtatttcactgggtgtcctgtg

SEQ ID NO: 4389367 - DNA, 25 bp, Homo sapien
agtatttcactgggtgtcctgtgtc

SEQ ID NO: 4389368 - DNA, 25 bp, Homo sapien
agtcatggaattgaagactgtcacc

SEQ ID NO: 4389369 - DNA, 25 bp, Homo sapien
tggaattgaagactgtcaccactgt

SEQ ID NO: 4389370 - DNA, 25 bp, Homo sapien
aattgaagactgtcaccactgtgaa

SEQ ID NO: 4389371 - DNA, 25 bp, Homo sapien
catggaattgaagactgtcaccact

SEQ ID NO: 4389372 - DNA, 25 bp, Homo sapien
gcctaatgatgctatgcaactgaag

SEQ ID NO: 4389373 - DNA, 25 bp, Homo sapien
gcaactgaagtaacctgacaccatg

SEQ ID NO: 4389374 - DNA, 25 bp, Homo sapien
catgaatttcctctcaggcgctagg

SEQ ID NO: 4389375 - DNA, 25 bp, Homo sapien
gaaggctgcaacttcacggtcagct

SEQ ID NO: 4389376 - DNA, 25 bp, Homo sapien
agaaggtcaccacgctggcaatcac

SEQ ID NO: 4389377 - DNA, 25 bp, Homo sapien
tgctgtcagatcgaagcccagggtc

SEQ ID NO: 4389378 - DNA, 25 bp, Homo sapien
cccagggtcatatgaacagagaagg

SEQ ID NO: 4389379 - DNA, 25 bp, Homo sapien
cacccacagtgatgctctggaagta

SEQ ID NO: 4389380 - DNA, 25 bp, Homo sapien
tatgggttcaaacctctaagatccc

SEQ ID NO: 4389381 - DNA, 25 bp, Homo sapien
gatattatgtcctacgatactagac

SEQ ID NO: 4389382 - DNA, 25 bp, Homo sapien
aagtgtgtgaattataagacccaaa

SEQ ID NO: 4389383 - DNA, 25 bp, Homo sapien
tagtcctagtacgtaatgtgctcag

SEQ ID NO: 4389384 - DNA, 25 bp, Homo sapien
tcctgaaatatgctgtgagccgtga

SEQ ID NO: 4389385 - DNA, 25 bp, Homo sapien
tggacacgttcatccgtggcggcca

SEQ ID NO: 4389386 - DNA, 25 bp, Homo sapien
aacttcattcatcttctggacacgt

SEQ ID NO: 4389387 - DNA, 25 bp, Homo sapien
ggcggccacgcattttctcctgaaa

SEQ ID NO: 4389388 - DNA, 25 bp, Homo sapien
tgagaactacctaatctgcttaagg

SEQ ID NO: 4389389 - DNA, 25 bp, Homo sapien
taaggtcattctcaataaaatgagc

SEQ ID NO: 4389390 - DNA, 25 bp, Homo sapien
aaaatgagcatataatcctgcttgc

SEQ ID NO: 4389391 - DNA, 25 bp, Homo sapien
ctgaaaggaaaagcgatgccacgcc

SEQ ID NO: 4389392 - DNA, 25 bp, Homo sapien
cattctctgcccatcgttggagcaa

SEQ ID NO: 4389393 - DNA, 25 bp, Homo sapien
aagatggcaacaacgggtcctccag

SEQ ID NO: 4389394 - DNA, 25 bp, Homo sapien
aatcatgcctaagatggcaacaacg

SEQ ID NO: 4389395 - DNA, 25 bp, Homo sapien
tgccaacggctgctgcctcaaacat

SEQ ID NO: 4389396 - DNA, 25 bp, Homo sapien
caatgcccaagtcagtgcaagcgac

SEQ ID NO: 4389397 - DNA, 25 bp, Homo sapien
cacgatttccgtcaggaggaggccc

SEQ ID NO: 4389398 - DNA, 25 bp, Homo sapien
tgttgcctgggtatactccaagagg

SEQ ID NO: 4389399 - DNA, 25 bp, Homo sapien
ggaggcccagcactaacaacaagct

SEQ ID NO: 4389400 - DNA, 25 bp, Homo sapien
tgcaacgccggagcacacactcaca

SEQ ID NO: 4389401 - DNA, 25 bp, Homo sapien
cctccagctgaggtcctgcaacgcc

SEQ ID NO: 4389402 - DNA, 25 bp, Homo sapien
ggtagcatatgtctaacaccacctg

SEQ ID NO: 4389403 - DNA, 25 bp, Homo sapien
acactcacacaaggcacattcagca

SEQ ID NO: 4389404 - DNA, 25 bp, Homo sapien
taacaggtcatctggtctccgacgg

SEQ ID NO: 4389405 - DNA, 25 bp, Homo sapien
aaaatggctggtgctactggtgcac

SEQ ID NO: 4389406 - DNA, 25 bp, Homo sapien
tctccgacggttgtttaacgacaca

SEQ ID NO: 4389407 - DNA, 25 bp, Homo sapien
gacaccacggtctggaggtagctac

SEQ ID NO: 4389408 - DNA, 25 bp, Homo sapien
ctcggcactgatggagcagtctcca

SEQ ID NO: 4389409 - DNA, 25 bp, Homo sapien
tcggcactgatggagcagtctccaa

SEQ ID NO: 4389410 - DNA, 25 bp, Homo sapien
actgatggagcagtctccaaaggaa

SEQ ID NO: 4389411 - DNA, 25 bp, Homo sapien
ggcactgatggagcagtctccaaag

SEQ ID NO: 4389412 - DNA, 25 bp, Homo sapien
gagactgttagcatagctgtctggc

SEQ ID NO: 4389413 - DNA, 25 bp, Homo sapien
catttttcagcactgggtaatagca

SEQ ID NO: 4389414 - DNA, 25 bp, Homo sapien
attaaagaagttccaacacatcggg

SEQ ID NO: 4389415 - DNA, 25 bp, Homo sapien
gtaatagcatcagcgcctcccagat

SEQ ID NO: 4389416 - DNA, 25 bp, Homo sapien
aactcttggcgagagattctgccca

SEQ ID NO: 4389417 - DNA, 25 bp, Homo sapien
ctcttggcgagagattctgcccagc

SEQ ID NO: 4389418 - DNA, 25 bp, Homo sapien
gaactcttggcgagagattctgccc

SEQ ID NO: 4389419 - DNA, 25 bp, Homo sapien
tgaactcttggcgagagattctgcc

SEQ ID NO: 4389420 - DNA, 25 bp, Homo sapien
gcagaatacagccatcctgaaaatt

SEQ ID NO: 4389421 - DNA, 25 bp, Homo sapien
tggttccactacagagagactcccc

SEQ ID NO: 4389422 - DNA, 25 bp, Homo sapien
aaatccagatcctgacagcaccaag

SEQ ID NO: 4389423 - DNA, 25 bp, Homo sapien
tgtcactggttccactacagagaga

SEQ ID NO: 4389424 - DNA, 25 bp, Homo sapien
cccaaatccagatcctgacagcacc

SEQ ID NO: 4389425 - DNA, 25 bp, Homo sapien
ttctatgagatcagagcagccacca

SEQ ID NO: 4389426 - DNA, 25 bp, Homo sapien
cattactttctcagctctagggcag

SEQ ID NO: 4389427 - DNA, 25 bp, Homo sapien
taatcaaggtctcaagtgtaaggca

SEQ ID NO: 4389428 - DNA, 25 bp, Homo sapien
cacagatcataggtgaggcctggtc

SEQ ID NO: 4389429 - DNA, 25 bp, Homo sapien
gcgtgatcatcaggcacacgatgga

SEQ ID NO: 4389430 - DNA, 25 bp, Homo sapien
gtgatcatcaggcacacgatggaca

SEQ ID NO: 4389431 - DNA, 25 bp, Homo sapien
gctgcgtgatcatcaggcacacgat

SEQ ID NO: 4389432 - DNA, 25 bp, Homo sapien
cagctgcgtgatcatcaggcacacg

SEQ ID NO: 4389433 - DNA, 25 bp, Homo sapien
agaagatccacacaacccttcgcag

SEQ ID NO: 4389434 - DNA, 25 bp, Homo sapien
acaacccttcgcagggaagcagcgt

SEQ ID NO: 4389435 - DNA, 25 bp, Homo sapien
cacacaacccttcgcagggaagcag

SEQ ID NO: 4389436 - DNA, 25 bp, Homo sapien
agatccacacaacccttcgcaggga

SEQ ID NO: 4389437 - DNA, 25 bp, Homo sapien
gaagactcgtgcttggacagagacc

SEQ ID NO: 4389438 - DNA, 25 bp, Homo sapien
gaaagccacgaaaaagtcatacagg

SEQ ID NO: 4389439 - DNA, 25 bp, Homo sapien
gagaccacacgtcttccattgagag

SEQ ID NO: 4389440 - DNA, 25 bp, Homo sapien
tctgcagttcacgtcagaagactcg

SEQ ID NO: 4389441 - DNA, 25 bp, Homo sapien
ttcagagcactcaagccatgatggt

SEQ ID NO: 4389442 - DNA, 25 bp, Homo sapien
ggaagtagtccggatgggcttcaga

SEQ ID NO: 4389443 - DNA, 25 bp, Homo sapien
atgatggtactttcccttgggatgc

SEQ ID NO: 4389444 - DNA, 25 bp, Homo sapien
tggtactttcccttgggatgctcct

SEQ ID NO: 4389445 - DNA, 25 bp, Homo sapien
tcgggctgctgtttccaaggcatct

SEQ ID NO: 4389446 - DNA, 25 bp, Homo sapien
ggaggcatcaagagagaggccctcg

SEQ ID NO: 4389447 - DNA, 25 bp, Homo sapien
catcaagagagaggccctcggctcg

SEQ ID NO: 4389448 - DNA, 25 bp, Homo sapien
gctcgggctgctgtttccaaggcat

SEQ ID NO: 4389449 - DNA, 25 bp, Homo sapien
ttttgatagcacaagaagtatataa

SEQ ID NO: 4389450 - DNA, 25 bp, Homo sapien
tgaaattacttgaccacagtaccat

SEQ ID NO: 4389451 - DNA, 25 bp, Homo sapien
cctgacttcaagtggagatctcact

SEQ ID NO: 4389452 - DNA, 25 bp, Homo sapien
agtggagatctcacttcttgtttaa

SEQ ID NO: 4389453 - DNA, 25 bp, Homo sapien
cagatgtccggttgttccagtacca

SEQ ID NO: 4389454 - DNA, 25 bp, Homo sapien
catttctccagtgaggtgtgctgca

SEQ ID NO: 4389455 - DNA, 25 bp, Homo sapien
catgtttcatcctcctaattagggc

SEQ ID NO: 4389456 - DNA, 25 bp, Homo sapien
tagtgtcatgcctaagaactcttct

SEQ ID NO: 4389457 - DNA, 25 bp, Homo sapien
tatctttacacattgcccaagtcag

SEQ ID NO: 4389458 - DNA, 25 bp, Homo sapien
gaatcaaaccttgctactctaagca

SEQ ID NO: 4389459 - DNA, 25 bp, Homo sapien
gagtagaaattctcacagtaagagg

SEQ ID NO: 4389460 - DNA, 25 bp, Homo sapien
tctaagcaacgaactttccaagtca

SEQ ID NO: 4389461 - DNA, 25 bp, Homo sapien
ccacatagggatgagaggaattaat

SEQ ID NO: 4389462 - DNA, 25 bp, Homo sapien
tacttagccaataaatcttagggtc

SEQ ID NO: 4389463 - DNA, 25 bp, Homo sapien
tgatacatgcatctaccacataggg

SEQ ID NO: 4389464 - DNA, 25 bp, Homo sapien
tcttagggtctgtctcaacgatttc

SEQ ID NO: 4389465 - DNA, 25 bp, Homo sapien
ccaatgtcaccaatcgagaaataca

SEQ ID NO: 4389466 - DNA, 25 bp, Homo sapien
tcaactagtccttactgagggccta

SEQ ID NO: 4389467 - DNA, 25 bp, Homo sapien
gatacaaccacataagccttaaaag

SEQ ID NO: 4389468 - DNA, 25 bp, Homo sapien
cactgttctagatacaggagagaac

SEQ ID NO: 4389469 - DNA, 25 bp, Homo sapien
tcattaaacccaacagcttacaggg

SEQ ID NO: 4389470 - DNA, 25 bp, Homo sapien
gatcaacactctagttcagcactgt

SEQ ID NO: 4389471 - DNA, 25 bp, Homo sapien
gatttttaatatgctaccagcaggg

SEQ ID NO: 4389472 - DNA, 25 bp, Homo sapien
gagactagtctgtgtaaccctccaa

SEQ ID NO: 4389473 - DNA, 25 bp, Homo sapien
gaggcgggaggcttgcttgaagctg

SEQ ID NO: 4389474 - DNA, 25 bp, Homo sapien
ttgaagctgggagttcaacaacagc

SEQ ID NO: 4389475 - DNA, 25 bp, Homo sapien
aagctgggagttcaacaacagcctg

SEQ ID NO: 4389476 - DNA, 25 bp, Homo sapien
agcctggccaacagtgagagtgcct

SEQ ID NO: 4389477 - DNA, 25 bp, Homo sapien
taaatccttaccatcaatcccagac

SEQ ID NO: 4389478 - DNA, 25 bp, Homo sapien
aatgcctccctatcttctagaaacg

SEQ ID NO: 4389479 - DNA, 25 bp, Homo sapien
tatgtccacgaataggtttaaatcc

SEQ ID NO: 4389480 - DNA, 25 bp, Homo sapien
tctctgacatggataggcagagccg

SEQ ID NO: 4389481 - DNA, 25 bp, Homo sapien
tcttttcctatgtcgatatccttca

SEQ ID NO: 4389482 - DNA, 25 bp, Homo sapien
tcctgaacttggaatcttcacggtc

SEQ ID NO: 4389483 - DNA, 25 bp, Homo sapien
gatgatatactcttttcctatgtcg

SEQ ID NO: 4389484 - DNA, 25 bp, Homo sapien
gtctctgtgcgtcccagaagtgctg

SEQ ID NO: 4389485 - DNA, 25 bp, Homo sapien
tctctgagtggaggttccagggctc

SEQ ID NO: 4389486 - DNA, 25 bp, Homo sapien
agactgttagtttcacatcagaatt

SEQ ID NO: 4389487 - DNA, 25 bp, Homo sapien
cttctctgagtggaggttccagggc

SEQ ID NO: 4389488 - DNA, 25 bp, Homo sapien
ttccagggctcacagactgttagtt

SEQ ID NO: 4389489 - DNA, 25 bp, Homo sapien
aacacttattctaccaatgatatat

SEQ ID NO: 4389490 - DNA, 25 bp, Homo sapien
caaacacttattctaccaatgatat

SEQ ID NO: 4389491 - DNA, 25 bp, Homo sapien
ttattctaccaatgatatattccat

SEQ ID NO: 4389492 - DNA, 25 bp, Homo sapien
cacttattctaccaatgatatattc

SEQ ID NO: 4389493 - DNA, 25 bp, Homo sapien
ttcgaaggtcgctggcggctccgct

SEQ ID NO: 4389494 - DNA, 25 bp, Homo sapien
ggcggctccgctgcgggttgagcag

SEQ ID NO: 4389495 - DNA, 25 bp, Homo sapien
gctggcggctccgctgcgggttgag

SEQ ID NO: 4389496 - DNA, 25 bp, Homo sapien
ggtcgctggcggctccgctgcgggt

SEQ ID NO: 4389497 - DNA, 25 bp, Homo sapien
ccggcctgcccaggcgagcgcgacc

SEQ ID NO: 4389498 - DNA, 25 bp, Homo sapien
tagggcgttcccacagcccgctccg

SEQ ID NO: 4389499 - DNA, 25 bp, Homo sapien
ttcgcctgggatgcccgggccctag

SEQ ID NO: 4389500 - DNA, 25 bp, Homo sapien
aggtgggcgtttctctcagacccgc

SEQ ID NO: 4389501 - DNA, 25 bp, Homo sapien
tgtcttccagcacacgaccccgtca

SEQ ID NO: 4389502 - DNA, 25 bp, Homo sapien
aggccatacgccgttccccaagtct

SEQ ID NO: 4389503 - DNA, 25 bp, Homo sapien
ccacgccccgaggaaatgcaaaggg

SEQ ID NO: 4389504 - DNA, 25 bp, Homo sapien
cccgtgacaaccgagctggagggca

SEQ ID NO: 4389505 - DNA, 25 bp, Homo sapien
cacgctcccgagcatgagccctgca

SEQ ID NO: 4389506 - DNA, 25 bp, Homo sapien
gctcaaccacgctcccgagcatgag

SEQ ID NO: 4389507 - DNA, 25 bp, Homo sapien
tgctccaggacaaccgcgccagccg

SEQ ID NO: 4389508 - DNA, 25 bp, Homo sapien
caagcctttatagcggcatcggccg

SEQ ID NO: 4389509 - DNA, 25 bp, Homo sapien
ctaggtagatggcatgtggcccgca

SEQ ID NO: 4389510 - DNA, 25 bp, Homo sapien
ggcccgcagctgtcaggtcattgat

SEQ ID NO: 4389511 - DNA, 25 bp, Homo sapien
tattgattataggagaccaccagtg

SEQ ID NO: 4389512 - DNA, 25 bp, Homo sapien
caattcaattgttgagaccctgagg

SEQ ID NO: 4389513 - DNA, 25 bp, Homo sapien
cgacaactgtctgtctcagatcatg

SEQ ID NO: 4389514 - DNA, 25 bp, Homo sapien
tgccagcttccgcagcctttttgtc

SEQ ID NO: 4389515 - DNA, 25 bp, Homo sapien
acccacgacaactgtctgtctcaga

SEQ ID NO: 4389516 - DNA, 25 bp, Homo sapien
ccttgccagcttccgcagccttttt

SEQ ID NO: 4389517 - DNA, 25 bp, Homo sapien
aatttagggccatcttccagtttct

SEQ ID NO: 4389518 - DNA, 25 bp, Homo sapien
caagaatttagggccatcttccagt

SEQ ID NO: 4389519 - DNA, 25 bp, Homo sapien
agaatttagggccatcttccagttt

SEQ ID NO: 4389520 - DNA, 25 bp, Homo sapien
cttcaagaatttagggccatcttcc

SEQ ID NO: 4389521 - DNA, 25 bp, Homo sapien
cggatagtcacctgagcagtcaagc

SEQ ID NO: 4389522 - DNA, 25 bp, Homo sapien
gcctgaatggttccggatagtcacc

SEQ ID NO: 4389523 - DNA, 25 bp, Homo sapien
tccttctgcacaggaaacttgcatg

SEQ ID NO: 4389524 - DNA, 25 bp, Homo sapien
tctgcacaggaaacttgcatgcaat

SEQ ID NO: 4389525 - DNA, 25 bp, Homo sapien
cagcaacattgtcatgacgaacatc

SEQ ID NO: 4389526 - DNA, 25 bp, Homo sapien
caccagcaacattgtcatgacgaac

SEQ ID NO: 4389527 - DNA, 25 bp, Homo sapien
ccagcaacattgtcatgacgaacat

SEQ ID NO: 4389528 - DNA, 25 bp, Homo sapien
gcaacattgtcatgacgaacatcct

SEQ ID NO: 4389529 - DNA, 25 bp, Homo sapien
gcttcatggtgcgttttgacagact

SEQ ID NO: 4389530 - DNA, 25 bp, Homo sapien
aaagcttcatggtgcgttttgacag

SEQ ID NO: 4389531 - DNA, 25 bp, Homo sapien
aaacacattcttgacactgaagccc

SEQ ID NO: 4389532 - DNA, 25 bp, Homo sapien
ttgacagactttacttcagttgtaa

SEQ ID NO: 4389533 - DNA, 25 bp, Homo sapien
ccaggtttgagaatgccagtctcca

SEQ ID NO: 4389534 - DNA, 25 bp, Homo sapien
accaggtttgagaatgccagtctcc

SEQ ID NO: 4389535 - DNA, 25 bp, Homo sapien
cattgttaccggtgactttccatcc

SEQ ID NO: 4389536 - DNA, 25 bp, Homo sapien
cactggcattgccattgttaccggt

SEQ ID NO: 4389537 - DNA, 25 bp, Homo sapien
ttgccattgttaccggtgactttcc

SEQ ID NO: 4389538 - DNA, 25 bp, Homo sapien
tggcattgccattgttaccggtgac

SEQ ID NO: 4389539 - DNA, 25 bp, Homo sapien
cttgaaccaaggcgtgttagcactt

SEQ ID NO: 4389540 - DNA, 25 bp, Homo sapien
caaggcgtgttagcacttggctcca

SEQ ID NO: 4389541 - DNA, 25 bp, Homo sapien
aaggcgtgttagcacttggctccag

SEQ ID NO: 4389542 - DNA, 25 bp, Homo sapien
gcgtgttagcacttggctccagcat

SEQ ID NO: 4389543 - DNA, 25 bp, Homo sapien
ttgtcatcattccaaccagaaattg

SEQ ID NO: 4389544 - DNA, 25 bp, Homo sapien
ttccaaccagaaattggcacaaatg

SEQ ID NO: 4389545 - DNA, 25 bp, Homo sapien
caaccagaaattggcacaaatgcta

SEQ ID NO: 4389546 - DNA, 25 bp, Homo sapien
gttgtcatcattccaaccagaaatt

SEQ ID NO: 4389547 - DNA, 25 bp, Homo sapien
ccttgtatctcttctggctataggg

SEQ ID NO: 4389548 - DNA, 25 bp, Homo sapien
ttgtatctcttctggctatagggtg

SEQ ID NO: 4389549 - DNA, 25 bp, Homo sapien
ttccttgtatctcttctggctatag

SEQ ID NO: 4389550 - DNA, 25 bp, Homo sapien
tggctatagggtggctcagtgtaac

SEQ ID NO: 4389551 - DNA, 25 bp, Homo sapien
catgctctcgggtctgcccattctt

SEQ ID NO: 4389552 - DNA, 25 bp, Homo sapien
ataccagcttcaaattcgccaacac

SEQ ID NO: 4389553 - DNA, 25 bp, Homo sapien
agaagggcatgctctcgggtctgcc

SEQ ID NO: 4389554 - DNA, 25 bp, Homo sapien
caggacagcacggtcagcctgagat

SEQ ID NO: 4389555 - DNA, 25 bp, Homo sapien
gggcatcaatgatagtcacgtagta

SEQ ID NO: 4389556 - DNA, 25 bp, Homo sapien
atcaatgatagtcacgtagtacttg

SEQ ID NO: 4389557 - DNA, 25 bp, Homo sapien
gcatcaatgatagtcacgtagtact

SEQ ID NO: 4389558 - DNA, 25 bp, Homo sapien
ctggggcatcaatgatagtcacgta

SEQ ID NO: 4389559 - DNA, 25 bp, Homo sapien
gtcaatgacgccgcatttgtagatc

SEQ ID NO: 4389560 - DNA, 25 bp, Homo sapien
ttttgtcaatgacgccgcatttgta

SEQ ID NO: 4389561 - DNA, 25 bp, Homo sapien
gttcttttgtcaatgacgccgcatt

SEQ ID NO: 4389562 - DNA, 25 bp, Homo sapien
tcttttgtcaatgacgccgcatttg

SEQ ID NO: 4389563 - DNA, 25 bp, Homo sapien
gggagttttcatgacacctgtgttc

SEQ ID NO: 4389564 - DNA, 25 bp, Homo sapien
gttttcatgacacctgtgttctagc

SEQ ID NO: 4389565 - DNA, 25 bp, Homo sapien
ttggcttgggagttttcatgacacc

SEQ ID NO: 4389566 - DNA, 25 bp, Homo sapien
gagttttcatgacacctgtgttcta

SEQ ID NO: 4389567 - DNA, 25 bp, Homo sapien
cagaagaagggaaggagtagaacaa

SEQ ID NO: 4389568 - DNA, 25 bp, Homo sapien
attccgtctgtaactgactatgaac

SEQ ID NO: 4389569 - DNA, 25 bp, Homo sapien
agtcaagtgcagtaggcagaagaag

SEQ ID NO: 4389570 - DNA, 25 bp, Homo sapien
ggaattccgtctgtaactgactatg

SEQ ID NO: 4389571 - DNA, 25 bp, Homo sapien
aaagctatccaactagggcctggaa

SEQ ID NO: 4389572 - DNA, 25 bp, Homo sapien
ggcataaagaggctgagtagcccaa

SEQ ID NO: 4389573 - DNA, 25 bp, Homo sapien
acaatggtatactcgtgctatggaa

SEQ ID NO: 4389574 - DNA, 25 bp, Homo sapien
tgtaggcatacactctagctctagt

SEQ ID NO: 4389575 - DNA, 25 bp, Homo sapien
tcggaatcgccacgtggaaacagct

SEQ ID NO: 4389576 - DNA, 25 bp, Homo sapien
tccaaatcccgacgtgcaacgcggg

SEQ ID NO: 4389577 - DNA, 25 bp, Homo sapien
aactgcagaagcctgtggcgtggaa

SEQ ID NO: 4389578 - DNA, 25 bp, Homo sapien
ggcaagaaatgacaaactcctcggt

SEQ ID NO: 4389579 - DNA, 25 bp, Homo sapien
tgcgcctggatccacccccgtctcc

SEQ ID NO: 4389580 - DNA, 25 bp, Homo sapien
gcttaagacacaggaggctgatagg

SEQ ID NO: 4389581 - DNA, 25 bp, Homo sapien
ctctgcttaagacacaggaggctga

SEQ ID NO: 4389582 - DNA, 25 bp, Homo sapien
acccccgtctccactctgcttaaga

SEQ ID NO: 4389583 - DNA, 25 bp, Homo sapien
ttagtggttgattgccatcagcccc

SEQ ID NO: 4389584 - DNA, 25 bp, Homo sapien
tagccggtgctatctgtcgaaagga

SEQ ID NO: 4389585 - DNA, 25 bp, Homo sapien
tcagctgggtcgttcagcagtcagt

SEQ ID NO: 4389586 - DNA, 25 bp, Homo sapien
tccaggttctaatgatagccggtgc

SEQ ID NO: 4389587 - DNA, 25 bp, Homo sapien
caggctactttgtgtaccctaggct

SEQ ID NO: 4389588 - DNA, 25 bp, Homo sapien
tcgcattgcttatggaagtccagga

SEQ ID NO: 4389589 - DNA, 25 bp, Homo sapien
aaagctgacgtgaagcgtgttccca

SEQ ID NO: 4389590 - DNA, 25 bp, Homo sapien
ccctaggcttcagcaggattttgag

SEQ ID NO: 4389591 - DNA, 25 bp, Homo sapien
tcttcaaagctgaactgaatgagtt

SEQ ID NO: 4389592 - DNA, 25 bp, Homo sapien
ccaaaggctgcaaggtcatggcgtc

SEQ ID NO: 4389593 - DNA, 25 bp, Homo sapien
tgtgccacgtgttgctcagacaggg

SEQ ID NO: 4389594 - DNA, 25 bp, Homo sapien
cctgggacccaactggtaagactgg

SEQ ID NO: 4389595 - DNA, 25 bp, Homo sapien
cattcagctccatggtgggagagta

SEQ ID NO: 4389596 - DNA, 25 bp, Homo sapien
agccttggtggcctgtcgatgaccc

SEQ ID NO: 4389597 - DNA, 25 bp, Homo sapien
ggatcccttttaccaggatgagaca

SEQ ID NO: 4389598 - DNA, 25 bp, Homo sapien
tctaagataagagggccagtaagtg

SEQ ID NO: 4389599 - DNA, 25 bp, Homo sapien
ctgggctacagctacggcgggggca

SEQ ID NO: 4389600 - DNA, 25 bp, Homo sapien
tgggctacagctacggcgggggcag

SEQ ID NO: 4389601 - DNA, 25 bp, Homo sapien
gggctacagctacggcgggggcagc

SEQ ID NO: 4389602 - DNA, 25 bp, Homo sapien
gctacagctacggcgggggcagcgc

SEQ ID NO: 4389603 - DNA, 25 bp, Homo sapien
ggtgcacctaccgattggctctgca

SEQ ID NO: 4389604 - DNA, 25 bp, Homo sapien
acagtccttccgcatggccatggga

SEQ ID NO: 4389605 - DNA, 25 bp, Homo sapien
cagacttgttggtgctaccccttac

SEQ ID NO: 4389606 - DNA, 25 bp, Homo sapien
ggaactaaatccaggtgcgctaact

SEQ ID NO: 4389607 - DNA, 25 bp, Homo sapien
tggagcagccaagaatttcgggctg

SEQ ID NO: 4389608 - DNA, 25 bp, Homo sapien
agaatttcgggctgtttgactttct

SEQ ID NO: 4389609 - DNA, 25 bp, Homo sapien
gaggagaccaggaaccctgcttcag

SEQ ID NO: 4389610 - DNA, 25 bp, Homo sapien
cagcccctcagggcttcccaaggat

SEQ ID NO: 4389611 - DNA, 25 bp, Homo sapien
taataccagggctaatccaggaaat

SEQ ID NO: 4389612 - DNA, 25 bp, Homo sapien
aagtcctctaaagtactccctgtga

SEQ ID NO: 4389613 - DNA, 25 bp, Homo sapien
tcatgggcctggaatcacgatttca

SEQ ID NO: 4389614 - DNA, 25 bp, Homo sapien
taactgtaataagcagcttgggtga

SEQ ID NO: 4389615 - DNA, 25 bp, Homo sapien
caaatgggtgcgctacattggccgc

SEQ ID NO: 4389616 - DNA, 25 bp, Homo sapien
tatgaaactcgctgctagctgccac

SEQ ID NO: 4389617 - DNA, 25 bp, Homo sapien
cccgagtctaggtctgggccaagca

SEQ ID NO: 4389618 - DNA, 25 bp, Homo sapien
cattacaagtgggaccggtggagca

SEQ ID NO: 4389619 - DNA, 25 bp, Homo sapien
cccaaaggccagtaatggatccccg

SEQ ID NO: 4389620 - DNA, 25 bp, Homo sapien
gagggttggttgcccctcacctcag

SEQ ID NO: 4389621 - DNA, 25 bp, Homo sapien
tacacgtgtgacttcgtccagttac

SEQ ID NO: 4389622 - DNA, 25 bp, Homo sapien
cctcagtccctactctgctttggga

SEQ ID NO: 4389623 - DNA, 25 bp, Homo sapien
tttaccttattggtctcggttctga

SEQ ID NO: 4389624 - DNA, 25 bp, Homo sapien
gattttgcaggacttacactagccc

SEQ ID NO: 4389625 - DNA, 25 bp, Homo sapien
ctcaggctgtaaagggacgaggtct

SEQ ID NO: 4389626 - DNA, 25 bp, Homo sapien
cagacttcggatcttgactatgcca

SEQ ID NO: 4389627 - DNA, 25 bp, Homo sapien
tcacttgccctgtagctgtggatgc

SEQ ID NO: 4389628 - DNA, 25 bp, Homo sapien
ggcttcgagcccttcagacaagtaa

SEQ ID NO: 4389629 - DNA, 25 bp, Homo sapien
tcttctggtgacctctcaggtgcag

SEQ ID NO: 4389630 - DNA, 25 bp, Homo sapien
ctctgctatgggttgaagattcagc

SEQ ID NO: 4389631 - DNA, 25 bp, Homo sapien
ttatctgctccatacgtgtccctca

SEQ ID NO: 4389632 - DNA, 25 bp, Homo sapien
gcctggaccaggcatcggctgcccc

SEQ ID NO: 4389633 - DNA, 25 bp, Homo sapien
gtgtccctcacagcctggaccaggc

SEQ ID NO: 4389634 - DNA, 25 bp, Homo sapien
tgcccccacctccatgtaggttgca

SEQ ID NO: 4389635 - DNA, 25 bp, Homo sapien
agggcagagtccaaccaaccccagg

SEQ ID NO: 4389636 - DNA, 25 bp, Homo sapien
gaagggcagagtccaaccaacccca

SEQ ID NO: 4389637 - DNA, 25 bp, Homo sapien
aagggcagagtccaaccaaccccag

SEQ ID NO: 4389638 - DNA, 25 bp, Homo sapien
tggaagggcagagtccaaccaaccc

SEQ ID NO: 4389639 - DNA, 25 bp, Homo sapien
catggcatatgtgcagggcagcaga

SEQ ID NO: 4389640 - DNA, 25 bp, Homo sapien
gacggcatggcatatgtgcagggca

SEQ ID NO: 4389641 - DNA, 25 bp, Homo sapien
atgacggcatggcatatgtgcaggg

SEQ ID NO: 4389642 - DNA, 25 bp, Homo sapien
cggcatggcatatgtgcagggcagc

SEQ ID NO: 4389643 - DNA, 25 bp, Homo sapien
caggaactccctatcccttcccact

SEQ ID NO: 4389644 - DNA, 25 bp, Homo sapien
tcccccaggttgtcccagctggtac

SEQ ID NO: 4389645 - DNA, 25 bp, Homo sapien
ccactcccccaggttgtcccagctg

SEQ ID NO: 4389646 - DNA, 25 bp, Homo sapien
tcccactcccccaggttgtcccagc

SEQ ID NO: 4389647 - DNA, 25 bp, Homo sapien
gtagggcagtgtgtggaaataccag

SEQ ID NO: 4389648 - DNA, 25 bp, Homo sapien
aggtagggcagtgtgtggaaatacc

SEQ ID NO: 4389649 - DNA, 25 bp, Homo sapien
caggaggtagggcagtgtgtggaaa

SEQ ID NO: 4389650 - DNA, 25 bp, Homo sapien
ggaggtagggcagtgtgtggaaata

SEQ ID NO: 4389651 - DNA, 25 bp, Homo sapien
ctgaagcagatgccaatgaagttgg

SEQ ID NO: 4389652 - DNA, 25 bp, Homo sapien
tggaggtgaagagggtagaaacgat

SEQ ID NO: 4389653 - DNA, 25 bp, Homo sapien
atgccaatgaagttggaggtgaaga

SEQ ID NO: 4389654 - DNA, 25 bp, Homo sapien
cagatgccaatgaagttggaggtga

SEQ ID NO: 4389655 - DNA, 25 bp, Homo sapien
gtatgcggtggtcaaggccaagggc

SEQ ID NO: 4389656 - DNA, 25 bp, Homo sapien
tatgcggtggtcaaggccaagggca

SEQ ID NO: 4389657 - DNA, 25 bp, Homo sapien
atgcggtggtcaaggccaagggcag

SEQ ID NO: 4389658 - DNA, 25 bp, Homo sapien
gcggtggtcaaggccaagggcagga

SEQ ID NO: 4389659 - DNA, 25 bp, Homo sapien
tcaccagctgtcaagggatacctga

SEQ ID NO: 4389660 - DNA, 25 bp, Homo sapien
cacagtggtgcagaataggacttct

SEQ ID NO: 4389661 - DNA, 25 bp, Homo sapien
tgtcagcacctagagagggcaagac

SEQ ID NO: 4389662 - DNA, 25 bp, Homo sapien
ggacctgctcctcaaccaaatatgg

SEQ ID NO: 4389663 - DNA, 25 bp, Homo sapien
ggatccctcagcagcgacaagatac

SEQ ID NO: 4389664 - DNA, 25 bp, Homo sapien
ccaggtggaaggctcgatgcaggaa

SEQ ID NO: 4389665 - DNA, 25 bp, Homo sapien
tcaaaggagcgggacaggtagccgc

SEQ ID NO: 4389666 - DNA, 25 bp, Homo sapien
aagcgccagttcactgtccagtgga

SEQ ID NO: 4389667 - DNA, 25 bp, Homo sapien
aggtgggcagtcaacagggccaggt

SEQ ID NO: 4389668 - DNA, 25 bp, Homo sapien
aacagtaacccaggggcgaagagca

SEQ ID NO: 4389669 - DNA, 25 bp, Homo sapien
gaaggccagcacagattcccagctt

SEQ ID NO: 4389670 - DNA, 25 bp, Homo sapien
cggaagccaaactgtgtgaggagaa

SEQ ID NO: 4389671 - DNA, 25 bp, Homo sapien
gaagagcagcacattcatcttcaca

SEQ ID NO: 4389672 - DNA, 25 bp, Homo sapien
tgggacctacactcacaactgttgg

SEQ ID NO: 4389673 - DNA, 25 bp, Homo sapien
gatacatagtctctatgcctactag

SEQ ID NO: 4389674 - DNA, 25 bp, Homo sapien
ccaacaaggaatgctgtctgggagg

SEQ ID NO: 4389675 - DNA, 25 bp, Homo sapien
gcgaatgagcatatactgagtattt

SEQ ID NO: 4389676 - DNA, 25 bp, Homo sapien
aaatgcagaaaacgagaggggacca

SEQ ID NO: 4389677 - DNA, 25 bp, Homo sapien
gaaatgcagaaaacgagaggggacc

SEQ ID NO: 4389678 - DNA, 25 bp, Homo sapien
ggaaatgcagaaaacgagaggggac

SEQ ID NO: 4389679 - DNA, 25 bp, Homo sapien
gtaagaggcgcagcacatgaagaaa

SEQ ID NO: 4389680 - DNA, 25 bp, Homo sapien
gggtcattgaagagccgcagcacaa

SEQ ID NO: 4389681 - DNA, 25 bp, Homo sapien
gaagagccgcagcacaaagatggag

SEQ ID NO: 4389682 - DNA, 25 bp, Homo sapien
ccagcaggaggttgatactgaggaa

SEQ ID NO: 4389683 - DNA, 25 bp, Homo sapien
gacaagcagcaaggtagccaggtag

SEQ ID NO: 4389684 - DNA, 25 bp, Homo sapien
caggtagagcacagcaaagatgttc

SEQ ID NO: 4389685 - DNA, 25 bp, Homo sapien
taaagatgtacacgaaaccagctgg

SEQ ID NO: 4389686 - DNA, 25 bp, Homo sapien
gatgttctgggccatgcggatgtca

SEQ ID NO: 4389687 - DNA, 25 bp, Homo sapien
ccctgcagttgggtatagtcatagg

SEQ ID NO: 4389688 - DNA, 25 bp, Homo sapien
catgtaggccttccagtcaatctct

SEQ ID NO: 4389689 - DNA, 25 bp, Homo sapien
cattgatgacgccttctacctcggc

SEQ ID NO: 4389690 - DNA, 25 bp, Homo sapien
acaagtggtccggtgtcaccctgca

SEQ ID NO: 4389691 - DNA, 25 bp, Homo sapien
tgccatgcgggcagattaagatccg

SEQ ID NO: 4389692 - DNA, 25 bp, Homo sapien
gaaggccaatctctagggtatccac

SEQ ID NO: 4389693 - DNA, 25 bp, Homo sapien
gactcaagtggtcacaagatgccat

SEQ ID NO: 4389694 - DNA, 25 bp, Homo sapien
tgccatcattgagaagggacgttca

SEQ ID NO: 4389695 - DNA, 25 bp, Homo sapien
tgccaccctgtgaatgacccagaag

SEQ ID NO: 4389696 - DNA, 25 bp, Homo sapien
caccctgtgaatgacccagaaggtg

SEQ ID NO: 4389697 - DNA, 25 bp, Homo sapien
ctgtgaatgacccagaaggtgatgc

SEQ ID NO: 4389698 - DNA, 25 bp, Homo sapien
tgtgaatgacccagaaggtgatgcc

SEQ ID NO: 4389699 - DNA, 25 bp, Homo sapien
ccagcagcgtgtagcgcggctcccg

SEQ ID NO: 4389700 - DNA, 25 bp, Homo sapien
cagcgtgtagcgcggctcccgcagc

SEQ ID NO: 4389701 - DNA, 25 bp, Homo sapien
tctgcctgggccgcggaaccggacc

SEQ ID NO: 4389702 - DNA, 25 bp, Homo sapien
ctctgcctgggccgcggaaccggac

SEQ ID NO: 4389703 - DNA, 25 bp, Homo sapien
tgatgcactccacgctccataggag

SEQ ID NO: 4389704 - DNA, 25 bp, Homo sapien
ggtacacaggcgctaatttagaacg

SEQ ID NO: 4389705 - DNA, 25 bp, Homo sapien
gacacttaggttccgcttcccgtgc

SEQ ID NO: 4389706 - DNA, 25 bp, Homo sapien
gccgatccgagtagccagtcttcat

SEQ ID NO: 4389707 - DNA, 25 bp, Homo sapien
tgagtgcggccctaggaaatgactt

SEQ ID NO: 4389708 - DNA, 25 bp, Homo sapien
tgatgagcccacgtgagtctgacac

SEQ ID NO: 4389709 - DNA, 25 bp, Homo sapien
tatgagaggacgcagtgatgagccc

SEQ ID NO: 4389710 - DNA, 25 bp, Homo sapien
cgagccttccggatgctgagaaaaa

SEQ ID NO: 4389711 - DNA, 25 bp, Homo sapien
tccaaggtaaaatcggatctgggcc

SEQ ID NO: 4389712 - DNA, 25 bp, Homo sapien
gcagagccagtaaacaaagagtcgg

SEQ ID NO: 4389713 - DNA, 25 bp, Homo sapien
tggaggaacatttacgaagggcacc

SEQ ID NO: 4389714 - DNA, 25 bp, Homo sapien
ctcaagtgggtggaaagctcatgca

SEQ ID NO: 4389715 - DNA, 25 bp, Homo sapien
ccgccgtggtgctgaagcggacagc

SEQ ID NO: 4389716 - DNA, 25 bp, Homo sapien
gctgaagcggacagctccggagtgc

SEQ ID NO: 4389717 - DNA, 25 bp, Homo sapien
ttaaagtgcatgagcgcggcggcgg

SEQ ID NO: 4389718 - DNA, 25 bp, Homo sapien
ccgctaccgcggccgccgtggtgct

SEQ ID NO: 4389719 - DNA, 25 bp, Homo sapien
gcgctcctggccgctgcgaggctgg

SEQ ID NO: 4389720 - DNA, 25 bp, Homo sapien
cctggccgctgcgaggctgggcccg

SEQ ID NO: 4389721 - DNA, 25 bp, Homo sapien
gctcctggccgctgcgaggctgggc

SEQ ID NO: 4389722 - DNA, 25 bp, Homo sapien
ctcctggccgctgcgaggctgggcc

SEQ ID NO: 4389723 - DNA, 25 bp, Homo sapien
tcgtctatccggtcatcctcgatca

SEQ ID NO: 4389724 - DNA, 25 bp, Homo sapien
cttcagcacgtcgtctatccggtca

SEQ ID NO: 4389725 - DNA, 25 bp, Homo sapien
tacactccggacggcggcttctccc

SEQ ID NO: 4389726 - DNA, 25 bp, Homo sapien
ccatccccttcagcacgtcgtctat

SEQ ID NO: 4389727 - DNA, 25 bp, Homo sapien
gagaaagcgcgtcagccgcgcggcc

SEQ ID NO: 4389728 - DNA, 25 bp, Homo sapien
gggagaaagcgcgtcagccgcgcgg

SEQ ID NO: 4389729 - DNA, 25 bp, Homo sapien
cggcgatgagaatgagccccgcgtc

SEQ ID NO: 4389730 - DNA, 25 bp, Homo sapien
gcggcggcgatgagaatgagccccg

SEQ ID NO: 4389731 - DNA, 25 bp, Homo sapien
gtggcccagcgacgcccctcggaac

SEQ ID NO: 4389732 - DNA, 25 bp, Homo sapien
cagctactgcccgtggcccagcgac

SEQ ID NO: 4389733 - DNA, 25 bp, Homo sapien
cccctcggaaccctgtgccgcggtg

SEQ ID NO: 4389734 - DNA, 25 bp, Homo sapien
ctagcttcccgcgcagctactgccc

SEQ ID NO: 4389735 - DNA, 25 bp, Homo sapien
tcgcttggctcggccgatctggccc

SEQ ID NO: 4389736 - DNA, 25 bp, Homo sapien
cccgcgaagaaggagttggtgtcct

SEQ ID NO: 4389737 - DNA, 25 bp, Homo sapien
gtcgcttggcctggttgcccgcgaa

SEQ ID NO: 4389738 - DNA, 25 bp, Homo sapien
ggtctgcgccgaagcggcccatctt

SEQ ID NO: 4389739 - DNA, 25 bp, Homo sapien
cgcgggcggcgggcttgctgccgga

SEQ ID NO: 4389740 - DNA, 25 bp, Homo sapien
gggcggcgggcttgctgccggaccg

SEQ ID NO: 4389741 - DNA, 25 bp, Homo sapien
ggcggcgggcttgctgccggaccgg

SEQ ID NO: 4389742 - DNA, 25 bp, Homo sapien
cggggcgggagcgggactgcggcgg

SEQ ID NO: 4389743 - DNA, 25 bp, Homo sapien
ccggcggaaggatgaagtcatgcag

SEQ ID NO: 4389744 - DNA, 25 bp, Homo sapien
gggagccggcggaaggatgaagtca

SEQ ID NO: 4389745 - DNA, 25 bp, Homo sapien
gagccggcggaaggatgaagtcatg

SEQ ID NO: 4389746 - DNA, 25 bp, Homo sapien
gccggcggaaggatgaagtcatgca

SEQ ID NO: 4389747 - DNA, 25 bp, Homo sapien
tgaggagccaagcggggcctcctcc

SEQ ID NO: 4389748 - DNA, 25 bp, Homo sapien
ggctgaggagccaagcggggcctcc

SEQ ID NO: 4389749 - DNA, 25 bp, Homo sapien
ctgaggagccaagcggggcctcctc

SEQ ID NO: 4389750 - DNA, 25 bp, Homo sapien
cggggctgaggagccaagcggggcc

SEQ ID NO: 4389751 - DNA, 25 bp, Homo sapien
tgcgccctgccagtctttgtatttt

SEQ ID NO: 4389752 - DNA, 25 bp, Homo sapien
actgcgccctgccagtctttgtatt

SEQ ID NO: 4389753 - DNA, 25 bp, Homo sapien
ccactgcgccctgccagtctttgta

SEQ ID NO: 4389754 - DNA, 25 bp, Homo sapien
ttgtagagatgaggtttcactatgt

SEQ ID NO: 4389755 - DNA, 25 bp, Homo sapien
caagggtggacacggctgcagactt

SEQ ID NO: 4389756 - DNA, 25 bp, Homo sapien
gatgttatcagcaggccatgcatcc

SEQ ID NO: 4389757 - DNA, 25 bp, Homo sapien
tccttcggaagaaccccaattatga

SEQ ID NO: 4389758 - DNA, 25 bp, Homo sapien
ccagacgcatacaaccccagtgttg

SEQ ID NO: 4389759 - DNA, 25 bp, Homo sapien
ccagcgagacctggaatttccggtc

SEQ ID NO: 4389760 - DNA, 25 bp, Homo sapien
gacgccacggccgaagcagctagct

SEQ ID NO: 4389761 - DNA, 25 bp, Homo sapien
agcctggtgccagcgagacctggaa

SEQ ID NO: 4389762 - DNA, 25 bp, Homo sapien
tagctccgttcgtgatccgggagcc

SEQ ID NO: 4389763 - DNA, 25 bp, Homo sapien
tctcgccgaacccatactggaagta

SEQ ID NO: 4389764 - DNA, 25 bp, Homo sapien
tagcaaaccggttccagaatctgag

SEQ ID NO: 4389765 - DNA, 25 bp, Homo sapien
tagaagtgacacttagcaaaccggt

SEQ ID NO: 4389766 - DNA, 25 bp, Homo sapien
tcatgagcctaatggcatggtccca

SEQ ID NO: 4389767 - DNA, 25 bp, Homo sapien
tcaagtggctccgtgaagcagagga

SEQ ID NO: 4389768 - DNA, 25 bp, Homo sapien
tacagttgggagagtagcaaggacc

SEQ ID NO: 4389769 - DNA, 25 bp, Homo sapien
tgcctgtagtgtgatgtgtctgaac

SEQ ID NO: 4389770 - DNA, 25 bp, Homo sapien
gaggaggagtctgaccacaactgag

SEQ ID NO: 4389771 - DNA, 25 bp, Homo sapien
ttctccacgcataaggcaaggcagg

SEQ ID NO: 4389772 - DNA, 25 bp, Homo sapien
gcaggtggtcagtcacacaggcctt

SEQ ID NO: 4389773 - DNA, 25 bp, Homo sapien
tgtagtcctaagttaacctcgtggc

SEQ ID NO: 4389774 - DNA, 25 bp, Homo sapien
aacaaatcactctactctgtggagg

SEQ ID NO: 4389775 - DNA, 25 bp, Homo sapien
gggagacatacaccttttctctggg

SEQ ID NO: 4389776 - DNA, 25 bp, Homo sapien
gcatcccgggccgtatcccgggaga

SEQ ID NO: 4389777 - DNA, 25 bp, Homo sapien
ccgggagaccctgttgcgtggtgat

SEQ ID NO: 4389778 - DNA, 25 bp, Homo sapien
accctgttgcgtggtgatgggttgc

SEQ ID NO: 4389779 - DNA, 25 bp, Homo sapien
gtgcatcagacttaggccttgccat

SEQ ID NO: 4389780 - DNA, 25 bp, Homo sapien
gggtgtgtcagagaaaagaagaggc

SEQ ID NO: 4389781 - DNA, 25 bp, Homo sapien
agacaagggcaatgatgggggcggg

SEQ ID NO: 4389782 - DNA, 25 bp, Homo sapien
gagctccctcgggagacagacaagg

SEQ ID NO: 4389783 - DNA, 25 bp, Homo sapien
agaagaggctgtcggctgaaagcat

SEQ ID NO: 4389784 - DNA, 25 bp, Homo sapien
caaggtaagaacgagagccaacggg

SEQ ID NO: 4389785 - DNA, 25 bp, Homo sapien
tctggttgccacagagctgggactt

SEQ ID NO: 4389786 - DNA, 25 bp, Homo sapien
tctgtctgaatgaaaggccaaggct

SEQ ID NO: 4389787 - DNA, 25 bp, Homo sapien
tgttaatgcccacgtagtggaggcc

SEQ ID NO: 4389788 - DNA, 25 bp, Homo sapien
tcctgccttccgaaggcagaaggaa

SEQ ID NO: 4389789 - DNA, 25 bp, Homo sapien
agattccaggtaggatgaactggga

SEQ ID NO: 4389790 - DNA, 25 bp, Homo sapien
acattctgggctgacgggcatggct

SEQ ID NO: 4389791 - DNA, 25 bp, Homo sapien
tatacatctggtcattggaggttcc

SEQ ID NO: 4389792 - DNA, 25 bp, Homo sapien
tggtctccgtgtcactgctgctggt

SEQ ID NO: 4389793 - DNA, 25 bp, Homo sapien
tgctgtgacagagccctcgatggcc

SEQ ID NO: 4389794 - DNA, 25 bp, Homo sapien
catttgtcgtcgctgtcggaagggc

SEQ ID NO: 4389795 - DNA, 25 bp, Homo sapien
ggcggccggactttcacaccctgtg

SEQ ID NO: 4389796 - DNA, 25 bp, Homo sapien
tactggtgacataagcatggtccac

SEQ ID NO: 4389797 - DNA, 25 bp, Homo sapien
aatgagtctgccaatactggtgaca

SEQ ID NO: 4389798 - DNA, 25 bp, Homo sapien
ctcccagcagtgagaagatagtgtg

SEQ ID NO: 4389799 - DNA, 25 bp, Homo sapien
ctcctttagagtaacgattccaatg

SEQ ID NO: 4389800 - DNA, 25 bp, Homo sapien
gaagtgacttgttccaggcgggtcc

SEQ ID NO: 4389801 - DNA, 25 bp, Homo sapien
cagatataccgagaagggagagccc

SEQ ID NO: 4389802 - DNA, 25 bp, Homo sapien
cacttttcatcacaccggagaggga

SEQ ID NO: 4389803 - DNA, 25 bp, Homo sapien
cacaccgaccttaagggcacttggg

SEQ ID NO: 4389804 - DNA, 25 bp, Homo sapien
gcttcttgtgtaccaattactcaga

SEQ ID NO: 4389805 - DNA, 25 bp, Homo sapien
cacccatggcatgacagtacttaga

SEQ ID NO: 4389806 - DNA, 25 bp, Homo sapien
tgagcagtaataacagcttcttgtg

SEQ ID NO: 4389807 - DNA, 25 bp, Homo sapien
tgagtttacttgtaagcctcttcgc

SEQ ID NO: 4389808 - DNA, 25 bp, Homo sapien
gtgctaggccctattgtaagtgctt

SEQ ID NO: 4389809 - DNA, 25 bp, Homo sapien
tgtgtgctaggccctattgtaagtg

SEQ ID NO: 4389810 - DNA, 25 bp, Homo sapien
gtaggagtagtaacagtaattccta

SEQ ID NO: 4389811 - DNA, 25 bp, Homo sapien
taggagtagtaacagtaattcctaa

SEQ ID NO: 4389812 - DNA, 25 bp, Homo sapien
agctggaagggagcaggatcaattt

SEQ ID NO: 4389813 - DNA, 25 bp, Homo sapien
cttgtgcaaagaggtccgctccacc

SEQ ID NO: 4389814 - DNA, 25 bp, Homo sapien
aagttgacaggttcatctagttgct

SEQ ID NO: 4389815 - DNA, 25 bp, Homo sapien
gaagggagcaggatcaattttgcag

SEQ ID NO: 4389816 - DNA, 25 bp, Homo sapien
ttcagggctcatctcgccttccagg

SEQ ID NO: 4389817 - DNA, 25 bp, Homo sapien
tcagggctcatctcgccttccaggt

SEQ ID NO: 4389818 - DNA, 25 bp, Homo sapien
gcttgcgcttctcacaggattccaa

SEQ ID NO: 4389819 - DNA, 25 bp, Homo sapien
tgccagggagattcggacacgcttc

SEQ ID NO: 4389820 - DNA, 25 bp, Homo sapien
gagattcggacacgcttcagcttgc

SEQ ID NO: 4389821 - DNA, 25 bp, Homo sapien
gacacgcttcagcttgcgcttctca

SEQ ID NO: 4389822 - DNA, 25 bp, Homo sapien
agggcgatgcctgccgactctgcgc

SEQ ID NO: 4389823 - DNA, 25 bp, Homo sapien
cagcctcagggggtggactgccaca

SEQ ID NO: 4389824 - DNA, 25 bp, Homo sapien
gaagaggctccggagggcgatgcct

SEQ ID NO: 4389825 - DNA, 25 bp, Homo sapien
cctcagggggtggactgccacagaa

SEQ ID NO: 4389826 - DNA, 25 bp, Homo sapien
ataaggccccagggggcaatgtcat

SEQ ID NO: 4389827 - DNA, 25 bp, Homo sapien
cataaggccccagggggcaatgtca

SEQ ID NO: 4389828 - DNA, 25 bp, Homo sapien
acataaggccccagggggcaatgtc

SEQ ID NO: 4389829 - DNA, 25 bp, Homo sapien
ctgtgggactctctccgaggttcct

SEQ ID NO: 4389830 - DNA, 25 bp, Homo sapien
cccctcttgagtgcaggctttaggg

SEQ ID NO: 4389831 - DNA, 25 bp, Homo sapien
ggccccctcttgagtgcaggcttta

SEQ ID NO: 4389832 - DNA, 25 bp, Homo sapien
caggctttaggggcttgtgggtctc

SEQ ID NO: 4389833 - DNA, 25 bp, Homo sapien
tgccaccacctgtgaacgctcgatg

SEQ ID NO: 4389834 - DNA, 25 bp, Homo sapien
gggaccctcctgatcagatagtgga

SEQ ID NO: 4389835 - DNA, 25 bp, Homo sapien
acctgtgaacgctcgatggagccca

SEQ ID NO: 4389836 - DNA, 25 bp, Homo sapien
ggtggctctgcgctcctgcatgtgc

SEQ ID NO: 4389837 - DNA, 25 bp, Homo sapien
gggactccactagggccagcattcg

SEQ ID NO: 4389838 - DNA, 25 bp, Homo sapien
ggaacatcccgcaccatgatgtcct

SEQ ID NO: 4389839 - DNA, 25 bp, Homo sapien
tgagggccacatggggaacatcccg

SEQ ID NO: 4389840 - DNA, 25 bp, Homo sapien
cttggtcctgtgcagtgccaaacgc

SEQ ID NO: 4389841 - DNA, 25 bp, Homo sapien
acactgtgtgtgtcaccgctcctgc

SEQ ID NO: 4389842 - DNA, 25 bp, Homo sapien
caggatgacggcgatcatgacaggc

SEQ ID NO: 4389843 - DNA, 25 bp, Homo sapien
tggcctgtgagctcgaacacgatca

SEQ ID NO: 4389844 - DNA, 25 bp, Homo sapien
agactctgggcgacagcgttggcca

SEQ ID NO: 4389845 - DNA, 25 bp, Homo sapien
ccggtaggtgctgctgtccgtatga

SEQ ID NO: 4389846 - DNA, 25 bp, Homo sapien
acaatccggtaggtgctgctgtccg

SEQ ID NO: 4389847 - DNA, 25 bp, Homo sapien
gtgctgctgtccgtatgaattccat

SEQ ID NO: 4389848 - DNA, 25 bp, Homo sapien
ccccaggcacaatccggtaggtgct

SEQ ID NO: 4389849 - DNA, 25 bp, Homo sapien
ctttcacccaccagacgcccaaatg

SEQ ID NO: 4389850 - DNA, 25 bp, Homo sapien
gctttcacccaccagacgcccaaat

SEQ ID NO: 4389851 - DNA, 25 bp, Homo sapien
aatgacaaagacaggcatgaaggcc

SEQ ID NO: 4389852 - DNA, 25 bp, Homo sapien
aaagacaggcatgaaggccccacag

SEQ ID NO: 4389853 - DNA, 25 bp, Homo sapien
tggtggccagtgcagacatccagaa

SEQ ID NO: 4389854 - DNA, 25 bp, Homo sapien
acagggaactgggatggtggtggcc

SEQ ID NO: 4389855 - DNA, 25 bp, Homo sapien
agacgttggcacgtggtgggttcca

SEQ ID NO: 4389856 - DNA, 25 bp, Homo sapien
tccgattgtcaaacagggtgaccag

SEQ ID NO: 4389857 - DNA, 25 bp, Homo sapien
tggcggacccacgtccgattgtcaa

SEQ ID NO: 4389858 - DNA, 25 bp, Homo sapien
tcaaacagggtgaccagcgtctctt

SEQ ID NO: 4389859 - DNA, 25 bp, Homo sapien
ctgtccagccatgaactgtccaaag

SEQ ID NO: 4389860 - DNA, 25 bp, Homo sapien
atgaactgtccaaagccagggggga

SEQ ID NO: 4389861 - DNA, 25 bp, Homo sapien
cagccatgaactgtccaaagccagg

SEQ ID NO: 4389862 - DNA, 25 bp, Homo sapien
ccatgaactgtccaaagccaggggg

SEQ ID NO: 4389863 - DNA, 25 bp, Homo sapien
gggctgggtggcctcgcatatctca

SEQ ID NO: 4389864 - DNA, 25 bp, Homo sapien
tcacatcagtcgtgggtggccaagg

SEQ ID NO: 4389865 - DNA, 25 bp, Homo sapien
gctgggtggcctcgcatatctcagg

SEQ ID NO: 4389866 - DNA, 25 bp, Homo sapien
tagagtcgtaggtttcacatcagtc

SEQ ID NO: 4389867 - DNA, 25 bp, Homo sapien
gagatctcatctatccccatgggtc

SEQ ID NO: 4389868 - DNA, 25 bp, Homo sapien
tataaaaatgctcagtcagcctgga

SEQ ID NO: 4389869 - DNA, 25 bp, Homo sapien
tgaggaggccttagtctttgattcc

SEQ ID NO: 4389870 - DNA, 25 bp, Homo sapien
gagcattcctatatgggccagccca

SEQ ID NO: 4389871 - DNA, 25 bp, Homo sapien
tcctcatgaggaagcgattgatggt

SEQ ID NO: 4389872 - DNA, 25 bp, Homo sapien
ggctccaccgaagccactagcaata

SEQ ID NO: 4389873 - DNA, 25 bp, Homo sapien
ttcaggtagacaaagagggctccac

SEQ ID NO: 4389874 - DNA, 25 bp, Homo sapien
tgcttccgcatcacctggacaatct

SEQ ID NO: 4389875 - DNA, 25 bp, Homo sapien
cgagccggaatcgggttttgaagag

SEQ ID NO: 4389876 - DNA, 25 bp, Homo sapien
cggaatcgggttttgaagagggctg

SEQ ID NO: 4389877 - DNA, 25 bp, Homo sapien
caaaggggaagtcgagccggaatcg

SEQ ID NO: 4389878 - DNA, 25 bp, Homo sapien
tcgagccggaatcgggttttgaaga

SEQ ID NO: 4389879 - DNA, 25 bp, Homo sapien
ccagtagttccgcactgcaaagaag

SEQ ID NO: 4389880 - DNA, 25 bp, Homo sapien
gttccagactgccaagacccggaag

SEQ ID NO: 4389881 - DNA, 25 bp, Homo sapien
gtggcagcgaagaagccccgccagt

SEQ ID NO: 4389882 - DNA, 25 bp, Homo sapien
gacccggaagatgaaggcactgaag

SEQ ID NO: 4389883 - DNA, 25 bp, Homo sapien
gcagcccacccccacggcacaggcg

SEQ ID NO: 4389884 - DNA, 25 bp, Homo sapien
cagcccacccccacggcacaggcgg

SEQ ID NO: 4389885 - DNA, 25 bp, Homo sapien
gcatctctgtgttccgggattcatt

SEQ ID NO: 4389886 - DNA, 25 bp, Homo sapien
agcatctctgtgttccgggattcat

SEQ ID NO: 4389887 - DNA, 25 bp, Homo sapien
ctgagaagggcagcacacatgcttg

SEQ ID NO: 4389888 - DNA, 25 bp, Homo sapien
gcacacatgcttgcgatatgcacaa

SEQ ID NO: 4389889 - DNA, 25 bp, Homo sapien
gggcagcacacatgcttgcgatatg

SEQ ID NO: 4389890 - DNA, 25 bp, Homo sapien
gaagggcagcacacatgcttgcgat

SEQ ID NO: 4389891 - DNA, 25 bp, Homo sapien
tgagtcgggagggggcccgccctga

SEQ ID NO: 4389892 - DNA, 25 bp, Homo sapien
tgcggggtggggcaggcggtgagtc

SEQ ID NO: 4389893 - DNA, 25 bp, Homo sapien
gtggggcaggcggtgagtcgggagg

SEQ ID NO: 4389894 - DNA, 25 bp, Homo sapien
ggcaggcggtgagtcgggagggggc

SEQ ID NO: 4389895 - DNA, 25 bp, Homo sapien
aggagggactccttcattccccagc

SEQ ID NO: 4389896 - DNA, 25 bp, Homo sapien
ccaggagggactccttcattcccca

SEQ ID NO: 4389897 - DNA, 25 bp, Homo sapien
tccaccaggagggactccttcattc

SEQ ID NO: 4389898 - DNA, 25 bp, Homo sapien
agggactccttcattccccagcctg

SEQ ID NO: 4389899 - DNA, 25 bp, Homo sapien
cactccccgcaagatggtcttcatc

SEQ ID NO: 4389900 - DNA, 25 bp, Homo sapien
taaaggtcttgagtgtgaggtattc

SEQ ID NO: 4389901 - DNA, 25 bp, Homo sapien
tagggcgcaggtcagcccaatgacc

SEQ ID NO: 4389902 - DNA, 25 bp, Homo sapien
tttgccaagcggcatcccgctgcct

SEQ ID NO: 4389903 - DNA, 25 bp, Homo sapien
tgttcaagccccgggacatccactg

SEQ ID NO: 4389904 - DNA, 25 bp, Homo sapien
caggccaggtactggagcaagatgc

SEQ ID NO: 4389905 - DNA, 25 bp, Homo sapien
gatctgtgtgaatccggctgagaaa

SEQ ID NO: 4389906 - DNA, 25 bp, Homo sapien
ggccaggatctgtgtgaatccggct

SEQ ID NO: 4389907 - DNA, 25 bp, Homo sapien
acaaagcgcaatctaggcaagagga

SEQ ID NO: 4389908 - DNA, 25 bp, Homo sapien
tggaccacgctgatacgacaggctg

SEQ ID NO: 4389909 - DNA, 25 bp, Homo sapien
tctagacgagtgtggcatggacgca

SEQ ID NO: 4389910 - DNA, 25 bp, Homo sapien
gagggtattcactgggacaaagcgc

SEQ ID NO: 4389911 - DNA, 25 bp, Homo sapien
gcaggaccaggaagatccaatcttc

SEQ ID NO: 4389912 - DNA, 25 bp, Homo sapien
atgacccagctgaccaatgccatga

SEQ ID NO: 4389913 - DNA, 25 bp, Homo sapien
tcttcaccaaccctggatactagga

SEQ ID NO: 4389914 - DNA, 25 bp, Homo sapien
ggcagcaatggcatagtccatgacc

SEQ ID NO: 4389915 - DNA, 25 bp, Homo sapien
cggcatcgggcgcaacggctccgtc

SEQ ID NO: 4389916 - DNA, 25 bp, Homo sapien
ggtcctgagtgtaccggccatacat

SEQ ID NO: 4389917 - DNA, 25 bp, Homo sapien
cgggcgcaacggctccgtccatatt

SEQ ID NO: 4389918 - DNA, 25 bp, Homo sapien
cccaaggtcctgagtgtaccggcca

SEQ ID NO: 4389919 - DNA, 25 bp, Homo sapien
agggtctgctcgtactgcagcgccc

SEQ ID NO: 4389920 - DNA, 25 bp, Homo sapien
cagggtctgctcgtactgcagcgcc

SEQ ID NO: 4389921 - DNA, 25 bp, Homo sapien
ccttcctccgccgccgcggccgcca

SEQ ID NO: 4389922 - DNA, 25 bp, Homo sapien
cttcctccgccgccgcggccgccat

SEQ ID NO: 4389923 - DNA, 25 bp, Homo sapien
ctggactcggctcccggcccgcaaa

SEQ ID NO: 4389924 - DNA, 25 bp, Homo sapien
cggcccgcaaagtccgcgccggcag

SEQ ID NO: 4389925 - DNA, 25 bp, Homo sapien
gccgagagcagagtgcggcgggccc

SEQ ID NO: 4389926 - DNA, 25 bp, Homo sapien
cctccctcggcggttccggctctgt

SEQ ID NO: 4389927 - DNA, 25 bp, Homo sapien
cctgcatggattcgaggtggactcc

SEQ ID NO: 4389928 - DNA, 25 bp, Homo sapien
caccgtggcggcatctttaactggc

SEQ ID NO: 4389929 - DNA, 25 bp, Homo sapien
gggaaactgactcgcctgtgaaaga

SEQ ID NO: 4389930 - DNA, 25 bp, Homo sapien
cactcaggtcatgggcattgttcaa

SEQ ID NO: 4389931 - DNA, 25 bp, Homo sapien
gggatctattgccaccctcgaagaa

SEQ ID NO: 4389932 - DNA, 25 bp, Homo sapien
cctttttagagatcccctagcagag

SEQ ID NO: 4389933 - DNA, 25 bp, Homo sapien
tgtttgctcagctgtcacatccagg

SEQ ID NO: 4389934 - DNA, 25 bp, Homo sapien
tgtatagggacagcatttctgagag

SEQ ID NO: 4389935 - DNA, 25 bp, Homo sapien
ttttcagtcctgtgtatccctttta

SEQ ID NO: 4389936 - DNA, 25 bp, Homo sapien
tgaaggtttataatgtacagtgaaa

SEQ ID NO: 4389937 - DNA, 25 bp, Homo sapien
aaatgattcccttttcagtcctgtg

SEQ ID NO: 4389938 - DNA, 25 bp, Homo sapien
ctgtgtatcccttttaccagggctt

SEQ ID NO: 4389939 - DNA, 25 bp, Homo sapien
aagtaggaaatcttgtccagttgtc

SEQ ID NO: 4389940 - DNA, 25 bp, Homo sapien
ggaaatcttgtccagttgtctccca

SEQ ID NO: 4389941 - DNA, 25 bp, Homo sapien
aatcttgtccagttgtctcccaggg

SEQ ID NO: 4389942 - DNA, 25 bp, Homo sapien
ggagaaagtaggaaatcttgtccag

SEQ ID NO: 4389943 - DNA, 25 bp, Homo sapien
agacaatgctgatgtcggcagtgtc

SEQ ID NO: 4389944 - DNA, 25 bp, Homo sapien
ggaagggagctgtacacgagacaat

SEQ ID NO: 4389945 - DNA, 25 bp, Homo sapien
gggagctgtacacgagacaatgctg

SEQ ID NO: 4389946 - DNA, 25 bp, Homo sapien
ctgatgtcggcagtgtctgagaacc

SEQ ID NO: 4389947 - DNA, 25 bp, Homo sapien
ggaagagcgtatactgtccagtagg

SEQ ID NO: 4389948 - DNA, 25 bp, Homo sapien
caagagttcgtgtatcctgttcagg

SEQ ID NO: 4389949 - DNA, 25 bp, Homo sapien
tcctagggtcctgcgtgagggtcca

SEQ ID NO: 4389950 - DNA, 25 bp, Homo sapien
gagtccacgagttccattcaagagt

SEQ ID NO: 4389951 - DNA, 25 bp, Homo sapien
aagtttgtctccaacaatccagaag

SEQ ID NO: 4389952 - DNA, 25 bp, Homo sapien
tggttcagcagaccaggaatcttgg

SEQ ID NO: 4389953 - DNA, 25 bp, Homo sapien
ctggaggtttggttcagcagaccag

SEQ ID NO: 4389954 - DNA, 25 bp, Homo sapien
gaagtttgtctccaacaatccagaa

SEQ ID NO: 4389955 - DNA, 25 bp, Homo sapien
ctcgttcagtgtgaggactagagag

SEQ ID NO: 4389956 - DNA, 25 bp, Homo sapien
cgttcagtgtgaggactagagaggt

SEQ ID NO: 4389957 - DNA, 25 bp, Homo sapien
gttcagtgtgaggactagagaggtt

SEQ ID NO: 4389958 - DNA, 25 bp, Homo sapien
tcgttcagtgtgaggactagagagg

SEQ ID NO: 4389959 - DNA, 25 bp, Homo sapien
ccgcctgacgcagagggtggaccct

SEQ ID NO: 4389960 - DNA, 25 bp, Homo sapien
gagggtggaccctcctacaagcatc

SEQ ID NO: 4389961 - DNA, 25 bp, Homo sapien
ggaccctcctacaagcatcaggaaa

SEQ ID NO: 4389962 - DNA, 25 bp, Homo sapien
gacgcagagggtggaccctcctaca

SEQ ID NO: 4389963 - DNA, 25 bp, Homo sapien
gctcaggaagatggcattgggatcc

SEQ ID NO: 4389964 - DNA, 25 bp, Homo sapien
agatggcattgggatccttgtgagc

SEQ ID NO: 4389965 - DNA, 25 bp, Homo sapien
tttcctcggagcaggtgttggaagc

SEQ ID NO: 4389966 - DNA, 25 bp, Homo sapien
gatccttgtgagctgtggtcctgcc

SEQ ID NO: 4389967 - DNA, 25 bp, Homo sapien
gtcctgaggccaaacaccagggcca

SEQ ID NO: 4389968 - DNA, 25 bp, Homo sapien
tgagggcagaggatggtcctgaggc

SEQ ID NO: 4389969 - DNA, 25 bp, Homo sapien
gaggatggtcctgaggccaaacacc

SEQ ID NO: 4389970 - DNA, 25 bp, Homo sapien
gcagaggatggtcctgaggccaaac

SEQ ID NO: 4389971 - DNA, 25 bp, Homo sapien
tctgcagggccccaaggaggagacg

SEQ ID NO: 4389972 - DNA, 25 bp, Homo sapien
gcagggccccaaggaggagacggac

SEQ ID NO: 4389973 - DNA, 25 bp, Homo sapien
ctctgcagggccccaaggaggagac

SEQ ID NO: 4389974 - DNA, 25 bp, Homo sapien
ctgggttccaaggaggctctgcagg

SEQ ID NO: 4389975 - DNA, 25 bp, Homo sapien
tccctccagcagaagggtcactgct

SEQ ID NO: 4389976 - DNA, 25 bp, Homo sapien
caagtgggtcccagttgtccccgtg

SEQ ID NO: 4389977 - DNA, 25 bp, Homo sapien
cagaagggtcactgctcccagaatg

SEQ ID NO: 4389978 - DNA, 25 bp, Homo sapien
cagaatgtcctgtgccttggtctcc

SEQ ID NO: 4389979 - DNA, 25 bp, Homo sapien
tttccattctcccaagctaaagtcc

SEQ ID NO: 4389980 - DNA, 25 bp, Homo sapien
cagcaggacaggtgtaggcaaaggg

SEQ ID NO: 4389981 - DNA, 25 bp, Homo sapien
ttccattctcccaagctaaagtcca

SEQ ID NO: 4389982 - DNA, 25 bp, Homo sapien
taggcaaagggtgaacctctgggca

SEQ ID NO: 4389983 - DNA, 25 bp, Homo sapien
gaggagccgggctggacagcgttag

SEQ ID NO: 4389984 - DNA, 25 bp, Homo sapien
aggacatgggagtcacgaagcagtt

SEQ ID NO: 4389985 - DNA, 25 bp, Homo sapien
gtcacgaagcagtttactgaggact

SEQ ID NO: 4389986 - DNA, 25 bp, Homo sapien
actgaggactcggaggtcacaagca

SEQ ID NO: 4389987 - DNA, 25 bp, Homo sapien
gttaggagaagcatgaccacgagga

SEQ ID NO: 4389988 - DNA, 25 bp, Homo sapien
gagaagcatgaccacgaggagcaat

SEQ ID NO: 4389989 - DNA, 25 bp, Homo sapien
aggagaagcatgaccacgaggagca

SEQ ID NO: 4389990 - DNA, 25 bp, Homo sapien
agaagcatgaccacgaggagcaatt

SEQ ID NO: 4389991 - DNA, 25 bp, Homo sapien
ccctgaatccttcctggggccatgg

SEQ ID NO: 4389992 - DNA, 25 bp, Homo sapien
tctggccggggtgtctggctggcgt

SEQ ID NO: 4389993 - DNA, 25 bp, Homo sapien
tggctggcgtggctccctgtttggg

SEQ ID NO: 4389994 - DNA, 25 bp, Homo sapien
tgtctggctggcgtggctccctgtt

SEQ ID NO: 4389995 - DNA, 25 bp, Homo sapien
gcaaaggcgggccaagggtgaagaa

SEQ ID NO: 4389996 - DNA, 25 bp, Homo sapien
cttaggctcttgcacttctgggcag

SEQ ID NO: 4389997 - DNA, 25 bp, Homo sapien
tcttgcacttctgggcagagtaggg

SEQ ID NO: 4389998 - DNA, 25 bp, Homo sapien
gcgggccaagggtgaagaatctatc

SEQ ID NO: 4389999 - DNA, 25 bp, Homo sapien
tggggagcagatgggtaggaagaca

SEQ ID NO: 4390000 - DNA, 25 bp, Homo sapien
ctggggagcagatgggtaggaagac

SEQ ID NO: 4390001 - DNA, 25 bp, Homo sapien
ggggagcagatgggtaggaagacat

SEQ ID NO: 4390002 - DNA, 25 bp, Homo sapien
cacttctgcccaatcagagaaggga

SEQ ID NO: 4390003 - DNA, 25 bp, Homo sapien
cacacaccacggagaagatttggat

SEQ ID NO: 4390004 - DNA, 25 bp, Homo sapien
agacactggtgaaggcccccggaag

SEQ ID NO: 4390005 - DNA, 25 bp, Homo sapien
agcagcaggtcatacgcctgcctgg

SEQ ID NO: 4390006 - DNA, 25 bp, Homo sapien
aaagcggcgtttgacagtgctcagg

SEQ ID NO: 4390007 - DNA, 25 bp, Homo sapien
gcctgtccttcgagtatccgcggga

SEQ ID NO: 4390008 - DNA, 25 bp, Homo sapien
gggacccggagcatcgcagttatag

SEQ ID NO: 4390009 - DNA, 25 bp, Homo sapien
agcggcagccgagcggcctgtcctt

SEQ ID NO: 4390010 - DNA, 25 bp, Homo sapien
ttgcgtttggcaactgatatgctgc

SEQ ID NO: 4390011 - DNA, 25 bp, Homo sapien
gcgtttggcaactgatatgctgctg

SEQ ID NO: 4390012 - DNA, 25 bp, Homo sapien
cgtttggcaactgatatgctgctga

SEQ ID NO: 4390013 - DNA, 25 bp, Homo sapien
acttgcgtttggcaactgatatgct

SEQ ID NO: 4390014 - DNA, 25 bp, Homo sapien
gtgccttctgcagcgccttgatcct

SEQ ID NO: 4390015 - DNA, 25 bp, Homo sapien
gaaaacttcattacccagctttggc

SEQ ID NO: 4390016 - DNA, 25 bp, Homo sapien
ggttctacccctacagtgccttctg

SEQ ID NO: 4390017 - DNA, 25 bp, Homo sapien
cactcccacgccaggttctacccct

SEQ ID NO: 4390018 - DNA, 25 bp, Homo sapien
cccagcatagggtatttgtgcgaca

SEQ ID NO: 4390019 - DNA, 25 bp, Homo sapien
tatttgtgcgacagcttcaggagca

SEQ ID NO: 4390020 - DNA, 25 bp, Homo sapien
catagggtatttgtgcgacagcttc

SEQ ID NO: 4390021 - DNA, 25 bp, Homo sapien
atgtcccagcatagggtatttgtgc

SEQ ID NO: 4390022 - DNA, 25 bp, Homo sapien
tcggtcaagtacatgtgcttccggc

SEQ ID NO: 4390023 - DNA, 25 bp, Homo sapien
tgaggtcttgggaagacaactcggt

SEQ ID NO: 4390024 - DNA, 25 bp, Homo sapien
ttgggaagacaactcggtcaagtac

SEQ ID NO: 4390025 - DNA, 25 bp, Homo sapien
agctggcgggtctcatgagcctgcc

SEQ ID NO: 4390026 - DNA, 25 bp, Homo sapien
ctagcaagttgtagctgcttcactg

SEQ ID NO: 4390027 - DNA, 25 bp, Homo sapien
tgcttcactgtagattttcgtgaga

SEQ ID NO: 4390028 - DNA, 25 bp, Homo sapien
caagttgtagctgcttcactgtaga

SEQ ID NO: 4390029 - DNA, 25 bp, Homo sapien
gcttcactgtagattttcgtgagat

SEQ ID NO: 4390030 - DNA, 25 bp, Homo sapien
ttaggctgccggtgtcatgaccaca

SEQ ID NO: 4390031 - DNA, 25 bp, Homo sapien
cacaggtcccaggtctgcacgattg

SEQ ID NO: 4390032 - DNA, 25 bp, Homo sapien
actccttgcggccttgtccttggca

SEQ ID NO: 4390033 - DNA, 25 bp, Homo sapien
gtccttggcagagagcaccgctgct

SEQ ID NO: 4390034 - DNA, 25 bp, Homo sapien
gacaactctgcgatgtattcggaga

SEQ ID NO: 4390035 - DNA, 25 bp, Homo sapien
tcggagatgagttttacatagcagg

SEQ ID NO: 4390036 - DNA, 25 bp, Homo sapien
agaacacagatggagagtttgcctc

SEQ ID NO: 4390037 - DNA, 25 bp, Homo sapien
tctttggtaacgtagagaaggaaca

SEQ ID NO: 4390038 - DNA, 25 bp, Homo sapien
tctggaaggtgacaggagggctcac

SEQ ID NO: 4390039 - DNA, 25 bp, Homo sapien
aatctggaaggtgacaggagggctc

SEQ ID NO: 4390040 - DNA, 25 bp, Homo sapien
gggaaatctggaaggtgacaggagg

SEQ ID NO: 4390041 - DNA, 25 bp, Homo sapien
ctgggaaatctggaaggtgacagga

SEQ ID NO: 4390042 - DNA, 25 bp, Homo sapien
actgggaccagcctgcaccctcaga

SEQ ID NO: 4390043 - DNA, 25 bp, Homo sapien
ctgccacctcactgggaccagcctg

SEQ ID NO: 4390044 - DNA, 25 bp, Homo sapien
ccagcctgcaccctcagagtttttt

SEQ ID NO: 4390045 - DNA, 25 bp, Homo sapien
ggctgctgccacctcactgggacca

SEQ ID NO: 4390046 - DNA, 25 bp, Homo sapien
caggagagtttcttctgaacagacg

SEQ ID NO: 4390047 - DNA, 25 bp, Homo sapien
agtttcttctgaacagacgtaggtc

SEQ ID NO: 4390048 - DNA, 25 bp, Homo sapien
gagagtttcttctgaacagacgtag

SEQ ID NO: 4390049 - DNA, 25 bp, Homo sapien
gagtttcttctgaacagacgtaggt

SEQ ID NO: 4390050 - DNA, 25 bp, Homo sapien
tcgcttgcccactaaagattttggc

SEQ ID NO: 4390051 - DNA, 25 bp, Homo sapien
gcatgaattccatggttttccctgg

SEQ ID NO: 4390052 - DNA, 25 bp, Homo sapien
tgggtcacctcgcttgcccactaaa

SEQ ID NO: 4390053 - DNA, 25 bp, Homo sapien
tcccgtatctgtcgctgggtcacct

SEQ ID NO: 4390054 - DNA, 25 bp, Homo sapien
gtctgatttagacctccagagccac

SEQ ID NO: 4390055 - DNA, 25 bp, Homo sapien
tgtctgatttagacctccagagcca

SEQ ID NO: 4390056 - DNA, 25 bp, Homo sapien
gcttgtctgatttagacctccagag

SEQ ID NO: 4390057 - DNA, 25 bp, Homo sapien
ttgtctgatttagacctccagagcc

SEQ ID NO: 4390058 - DNA, 25 bp, Homo sapien
agcacccaggccttgagaacccaga

SEQ ID NO: 4390059 - DNA, 25 bp, Homo sapien
tgtccggtggggcgtacatcactga

SEQ ID NO: 4390060 - DNA, 25 bp, Homo sapien
gctccctgaagcaaccaggagccaa

SEQ ID NO: 4390061 - DNA, 25 bp, Homo sapien
gagccaagcaacaggagcacccagg

SEQ ID NO: 4390062 - DNA, 25 bp, Homo sapien
gggaagtcgggggaagaggatctgc

SEQ ID NO: 4390063 - DNA, 25 bp, Homo sapien
ggaagtcgggggaagaggatctgct

SEQ ID NO: 4390064 - DNA, 25 bp, Homo sapien
gtctggcccctgttcgtcgtagtga

SEQ ID NO: 4390065 - DNA, 25 bp, Homo sapien
gatgggaagcacgagttcacccagg

SEQ ID NO: 4390066 - DNA, 25 bp, Homo sapien
gccatacttaagaatctgaaggctg

SEQ ID NO: 4390067 - DNA, 25 bp, Homo sapien
aagacctctgactttgtggagccca

SEQ ID NO: 4390068 - DNA, 25 bp, Homo sapien
gcaccagtgtggctccccgctgtta

SEQ ID NO: 4390069 - DNA, 25 bp, Homo sapien
cccttgcaaagaataactcgcaggg

SEQ ID NO: 4390070 - DNA, 25 bp, Homo sapien
agaataactcgcagggaaaggaaag

SEQ ID NO: 4390071 - DNA, 25 bp, Homo sapien
cgctgatgaggccttgtctgcatcc

SEQ ID NO: 4390072 - DNA, 25 bp, Homo sapien
tctggagttcccatcgagagcagct

SEQ ID NO: 4390073 - DNA, 25 bp, Homo sapien
gctccccgaagttgtctgtgctata

SEQ ID NO: 4390074 - DNA, 25 bp, Homo sapien
gaaagtctgagatcttaatctggct

SEQ ID NO: 4390075 - DNA, 25 bp, Homo sapien
ggcactgagaaaatcgtcctgtttc

SEQ ID NO: 4390076 - DNA, 25 bp, Homo sapien
ccacatcatagagggacgttttcaa

SEQ ID NO: 4390077 - DNA, 25 bp, Homo sapien
acatcatagagggacgttttcaaca

SEQ ID NO: 4390078 - DNA, 25 bp, Homo sapien
gttccacatcatagagggacgtttt

SEQ ID NO: 4390079 - DNA, 25 bp, Homo sapien
catcatagagggacgttttcaacat

SEQ ID NO: 4390080 - DNA, 25 bp, Homo sapien
cagcagccccaggacggacgggtac

SEQ ID NO: 4390081 - DNA, 25 bp, Homo sapien
ctccccaggctctgaggacagcagc

SEQ ID NO: 4390082 - DNA, 25 bp, Homo sapien
cagcagcagccccaggacggacggg

SEQ ID NO: 4390083 - DNA, 25 bp, Homo sapien
tacgccaagtcctggggaccctctc

SEQ ID NO: 4390084 - DNA, 25 bp, Homo sapien
ctgcacacccagcactctctctcgc

SEQ ID NO: 4390085 - DNA, 25 bp, Homo sapien
tgcacacccagcactctctctcgca

SEQ ID NO: 4390086 - DNA, 25 bp, Homo sapien
gatggctcccgagatagaagctagc

SEQ ID NO: 4390087 - DNA, 25 bp, Homo sapien
tgatggatgagaagttaccccaggg

SEQ ID NO: 4390088 - DNA, 25 bp, Homo sapien
taaggcatttccatgctatgcgtgc

SEQ ID NO: 4390089 - DNA, 25 bp, Homo sapien
tttgggaacgagaaagatggctccc

SEQ ID NO: 4390090 - DNA, 25 bp, Homo sapien
ctcttcaccactggaattggtgagg

SEQ ID NO: 4390091 - DNA, 25 bp, Homo sapien
caccactggaattggtgaggcacgg

SEQ ID NO: 4390092 - DNA, 25 bp, Homo sapien
ttcaccactggaattggtgaggcac

SEQ ID NO: 4390093 - DNA, 25 bp, Homo sapien
tcttcaccactggaattggtgaggc

SEQ ID NO: 4390094 - DNA, 25 bp, Homo sapien
tgccaggagaagaagcgagtgagga

SEQ ID NO: 4390095 - DNA, 25 bp, Homo sapien
gagaagaagcgagtgaggaaggcaa

SEQ ID NO: 4390096 - DNA, 25 bp, Homo sapien
gagcagtgacggtgccagaggctgc

SEQ ID NO: 4390097 - DNA, 25 bp, Homo sapien
tggcccctggtaacgctgtccagga

SEQ ID NO: 4390098 - DNA, 25 bp, Homo sapien
ctgtccggagggaggcgcaaacatc

SEQ ID NO: 4390099 - DNA, 25 bp, Homo sapien
gtccggagggaggcgcaaacatcag

SEQ ID NO: 4390100 - DNA, 25 bp, Homo sapien
tgtccggagggaggcgcaaacatca

SEQ ID NO: 4390101 - DNA, 25 bp, Homo sapien
ctgcagcatccagttgctgagcccc

SEQ ID NO: 4390102 - DNA, 25 bp, Homo sapien
tgcagcatccagttgctgagcccca

SEQ ID NO: 4390103 - DNA, 25 bp, Homo sapien
gctgcagcatccagttgctgagccc

SEQ ID NO: 4390104 - DNA, 25 bp, Homo sapien
gggcacgctgaagagctcacgcaca

SEQ ID NO: 4390105 - DNA, 25 bp, Homo sapien
ccagaccttgatggtgagcaccagg

SEQ ID NO: 4390106 - DNA, 25 bp, Homo sapien
tcacgcacacggatctccagggtgc

SEQ ID NO: 4390107 - DNA, 25 bp, Homo sapien
ggtgcccttgttctcaatgtgggct

SEQ ID NO: 4390108 - DNA, 25 bp, Homo sapien
attctaccattcctgacacgactgg

SEQ ID NO: 4390109 - DNA, 25 bp, Homo sapien
taccattcctgacacgactggctta

SEQ ID NO: 4390110 - DNA, 25 bp, Homo sapien
accattcctgacacgactggcttac

SEQ ID NO: 4390111 - DNA, 25 bp, Homo sapien
tctaccattcctgacacgactggct

SEQ ID NO: 4390112 - DNA, 25 bp, Homo sapien
tgtccttgaacacgaatggccaccg

SEQ ID NO: 4390113 - DNA, 25 bp, Homo sapien
taaagaactcgtacatggtgatgtg

SEQ ID NO: 4390114 - DNA, 25 bp, Homo sapien
tgtccaccacgccagtgagcataaa

SEQ ID NO: 4390115 - DNA, 25 bp, Homo sapien
cgtacatggtgatgtgctgccagct

SEQ ID NO: 4390116 - DNA, 25 bp, Homo sapien
atgaccggcatcctcacaggcagga

SEQ ID NO: 4390117 - DNA, 25 bp, Homo sapien
gagacaccagcaccatatagtagag

SEQ ID NO: 4390118 - DNA, 25 bp, Homo sapien
tccctcgagggtgcccatggcttta

SEQ ID NO: 4390119 - DNA, 25 bp, Homo sapien
catcagccgatttactccagacggg

SEQ ID NO: 4390120 - DNA, 25 bp, Homo sapien
ttgttgcagaaacctgagccacacc

SEQ ID NO: 4390121 - DNA, 25 bp, Homo sapien
taggtcttgttgcagaaacctgagc

SEQ ID NO: 4390122 - DNA, 25 bp, Homo sapien
aaggaataggtcttgttgcagaaac

SEQ ID NO: 4390123 - DNA, 25 bp, Homo sapien
cacagaaaggaataggtcttgttgc

SEQ ID NO: 4390124 - DNA, 25 bp, Homo sapien
ttaacacagagacatagaattgctg

SEQ ID NO: 4390125 - DNA, 25 bp, Homo sapien
taacacagagacatagaattgctgc

SEQ ID NO: 4390126 - DNA, 25 bp, Homo sapien
cagaagagtgtctccgtctccattt

SEQ ID NO: 4390127 - DNA, 25 bp, Homo sapien
gagtgtctccgtctccatttttgac

SEQ ID NO: 4390128 - DNA, 25 bp, Homo sapien
gcagacttgtggacaggtcctgaag

SEQ ID NO: 4390129 - DNA, 25 bp, Homo sapien
tgaagccataccaggagctgaccag

SEQ ID NO: 4390130 - DNA, 25 bp, Homo sapien
ctgatacatgggaatggtgtgtgcc

SEQ ID NO: 4390131 - DNA, 25 bp, Homo sapien
gcccaggcataaagctgatacatgg

SEQ ID NO: 4390132 - DNA, 25 bp, Homo sapien
gatacatgggaatggtgtgtgccat

SEQ ID NO: 4390133 - DNA, 25 bp, Homo sapien
gctctgcccaggcataaagctgata

SEQ ID NO: 4390134 - DNA, 25 bp, Homo sapien
tattgcccgtgctgacggctgggca

SEQ ID NO: 4390135 - DNA, 25 bp, Homo sapien
ctggtcaggtgcaaaggtattgccc

SEQ ID NO: 4390136 - DNA, 25 bp, Homo sapien
ctgggtggagccctcttgacctcag

SEQ ID NO: 4390137 - DNA, 25 bp, Homo sapien
caagaatcagtccttgtggctgctc

SEQ ID NO: 4390138 - DNA, 25 bp, Homo sapien
gacgcacgggctagcactgaaaatg

SEQ ID NO: 4390139 - DNA, 25 bp, Homo sapien
gggaattaaatctccggagcgtcac

SEQ ID NO: 4390140 - DNA, 25 bp, Homo sapien
tgtcttctgggaaacgcgccaatgc

SEQ ID NO: 4390141 - DNA, 25 bp, Homo sapien
tctagtgggcgagctttgaacttcc

SEQ ID NO: 4390142 - DNA, 25 bp, Homo sapien
ggcacatagatgtaggtattgtgga

SEQ ID NO: 4390143 - DNA, 25 bp, Homo sapien
taaggcacatagatgtaggtattgt

SEQ ID NO: 4390144 - DNA, 25 bp, Homo sapien
catagatgtaggtattgtggacacc

SEQ ID NO: 4390145 - DNA, 25 bp, Homo sapien
tattgtggacaccagcatatgttga

SEQ ID NO: 4390146 - DNA, 25 bp, Homo sapien
tgagtcgacatggatgaatccccag

SEQ ID NO: 4390147 - DNA, 25 bp, Homo sapien
caagtcaaaggagtgtgcataatac

SEQ ID NO: 4390148 - DNA, 25 bp, Homo sapien
caggctctgctctacgtttttgaga

SEQ ID NO: 4390149 - DNA, 25 bp, Homo sapien
tatttactgaatgaaccagagccag

SEQ ID NO: 4390150 - DNA, 25 bp, Homo sapien
ctccattcgcgctacctggcggctg

SEQ ID NO: 4390151 - DNA, 25 bp, Homo sapien
tcacgtcaccgtcattcttttcctg

SEQ ID NO: 4390152 - DNA, 25 bp, Homo sapien
ttcctgcccgactagtcgctctggg

SEQ ID NO: 4390153 - DNA, 25 bp, Homo sapien
ttcctacgcactcagatccgccgag

SEQ ID NO: 4390154 - DNA, 25 bp, Homo sapien
gaacctgaacctggcacatcctggg

SEQ ID NO: 4390155 - DNA, 25 bp, Homo sapien
cacggatcacacaagacaactggta

SEQ ID NO: 4390156 - DNA, 25 bp, Homo sapien
cgctgtttgatatgaacacggatca

SEQ ID NO: 4390157 - DNA, 25 bp, Homo sapien
gacaactggtaacagcagtggcctc

SEQ ID NO: 4390158 - DNA, 25 bp, Homo sapien
ccatgattggagtgagggtacagca

SEQ ID NO: 4390159 - DNA, 25 bp, Homo sapien
ccactagaatgccatgattggagtg

SEQ ID NO: 4390160 - DNA, 25 bp, Homo sapien
gactagagagtccactagaatgcca

SEQ ID NO: 4390161 - DNA, 25 bp, Homo sapien
acagtgactagagagtccactagaa

SEQ ID NO: 4390162 - DNA, 25 bp, Homo sapien
aggacaggccctccgttacctgctg

SEQ ID NO: 4390163 - DNA, 25 bp, Homo sapien
ggctgttatagccagtaccccagtc

SEQ ID NO: 4390164 - DNA, 25 bp, Homo sapien
gaagcattcccgtgggaaccacagt

SEQ ID NO: 4390165 - DNA, 25 bp, Homo sapien
tgccaacatccggtgaggacaggcc

SEQ ID NO: 4390166 - DNA, 25 bp, Homo sapien
tccaggactagagctagggcacttc

SEQ ID NO: 4390167 - DNA, 25 bp, Homo sapien
gtccttgaccactggatttctgacc

SEQ ID NO: 4390168 - DNA, 25 bp, Homo sapien
ggatttctgacctcattcactttca

SEQ ID NO: 4390169 - DNA, 25 bp, Homo sapien
caggactagagctagggcacttcat

SEQ ID NO: 4390170 - DNA, 25 bp, Homo sapien
gcctcagcgttgacgggcaggcagg

SEQ ID NO: 4390171 - DNA, 25 bp, Homo sapien
gtctgtgagtgggtggccagccgct

SEQ ID NO: 4390172 - DNA, 25 bp, Homo sapien
aactccagctgagtgctctcgaggc

SEQ ID NO: 4390173 - DNA, 25 bp, Homo sapien
ggagacaccgccaactgaactccag

SEQ ID NO: 4390174 - DNA, 25 bp, Homo sapien
gggcccgcagctgaccgccagatta

SEQ ID NO: 4390175 - DNA, 25 bp, Homo sapien
gattactgtgcatcccgaatcacga

SEQ ID NO: 4390176 - DNA, 25 bp, Homo sapien
gatcctcctggaccggtccgtccag

SEQ ID NO: 4390177 - DNA, 25 bp, Homo sapien
acgtgagcggcgcagcaagatccca

SEQ ID NO: 4390178 - DNA, 25 bp, Homo sapien
ctgggacccgacgcgagcctgcccc

SEQ ID NO: 4390179 - DNA, 25 bp, Homo sapien
gcccgccgagcgcaccctctctcgg

SEQ ID NO: 4390180 - DNA, 25 bp, Homo sapien
cgacgcgagcctgccccggagcccg

SEQ ID NO: 4390181 - DNA, 25 bp, Homo sapien
gccgagcgcaccctctctcgggtgc

SEQ ID NO: 4390182 - DNA, 25 bp, Homo sapien
ggcccggctcggctcctagagctgc

SEQ ID NO: 4390183 - DNA, 25 bp, Homo sapien
cccggctcggctcctagagctgcca

SEQ ID NO: 4390184 - DNA, 25 bp, Homo sapien
cggctcggctcctagagctgccacg

SEQ ID NO: 4390185 - DNA, 25 bp, Homo sapien
ggctcggctcctagagctgccacgg

SEQ ID NO: 4390186 - DNA, 25 bp, Homo sapien
cgctaatgaggagcccgttggagtt

SEQ ID NO: 4390187 - DNA, 25 bp, Homo sapien
cccgttggagttaactgtgagagtg

SEQ ID NO: 4390188 - DNA, 25 bp, Homo sapien
gaagtcgaggacgtgtgggcgaccc

SEQ ID NO: 4390189 - DNA, 25 bp, Homo sapien
tgagtgcgagcaccccgatttgtca

SEQ ID NO: 4390190 - DNA, 25 bp, Homo sapien
tctgtgaaacctgccaagactgctg

SEQ ID NO: 4390191 - DNA, 25 bp, Homo sapien
ttacacccgaggtgctgtatgggcg

SEQ ID NO: 4390192 - DNA, 25 bp, Homo sapien
catttgaacccctgaagttgcggga

SEQ ID NO: 4390193 - DNA, 25 bp, Homo sapien
tgtacttggatgaacagcccggcgt

SEQ ID NO: 4390194 - DNA, 25 bp, Homo sapien
agcttgccgcggacagaggccccaa

SEQ ID NO: 4390195 - DNA, 25 bp, Homo sapien
gccacttgacacaagcttgccgcgg

SEQ ID NO: 4390196 - DNA, 25 bp, Homo sapien
ccacaaacaatagggaggcccacac

SEQ ID NO: 4390197 - DNA, 25 bp, Homo sapien
ccgtttccaagaatttcggagccat

SEQ ID NO: 4390198 - DNA, 25 bp, Homo sapien
aagcatgcgaccgtgatttcaggct

SEQ ID NO: 4390199 - DNA, 25 bp, Homo sapien
gcctggaagcatgcgaccgtgattt

SEQ ID NO: 4390200 - DNA, 25 bp, Homo sapien
agccgcaggcctggaagcatgcgac

SEQ ID NO: 4390201 - DNA, 25 bp, Homo sapien
cgcaggcctggaagcatgcgaccgt

SEQ ID NO: 4390202 - DNA, 25 bp, Homo sapien
tcgccctctactgggtccgcaggga

SEQ ID NO: 4390203 - DNA, 25 bp, Homo sapien
gagtctgggtggagggcgcggagat

SEQ ID NO: 4390204 - DNA, 25 bp, Homo sapien
caagatcgtggtcgtttagcgccaa

SEQ ID NO: 4390205 - DNA, 25 bp, Homo sapien
gggctccactcgcataggtgtgaca

SEQ ID NO: 4390206 - DNA, 25 bp, Homo sapien
actgtgcgccccaggtcgaggatct

SEQ ID NO: 4390207 - DNA, 25 bp, Homo sapien
tcgaggatctcgagggatgtcttga

SEQ ID NO: 4390208 - DNA, 25 bp, Homo sapien
agtaaggtactctgtcggctgtgcc

SEQ ID NO: 4390209 - DNA, 25 bp, Homo sapien
cttgcccacggaaacagctgacagg

SEQ ID NO: 4390210 - DNA, 25 bp, Homo sapien
tttgagcctggtcatcatgtagcca

SEQ ID NO: 4390211 - DNA, 25 bp, Homo sapien
agattgcaagtcagatattgcaggc

SEQ ID NO: 4390212 - DNA, 25 bp, Homo sapien
gagcctggtcatcatgtagccatct

SEQ ID NO: 4390213 - DNA, 25 bp, Homo sapien
aagattgcaagtcagatattgcagg

SEQ ID NO: 4390214 - DNA, 25 bp, Homo sapien
ctatgggatctgaaacagagccttt

SEQ ID NO: 4390215 - DNA, 25 bp, Homo sapien
gggatctgaaacagagccttttctg

SEQ ID NO: 4390216 - DNA, 25 bp, Homo sapien
tgggatctgaaacagagccttttct

SEQ ID NO: 4390217 - DNA, 25 bp, Homo sapien
atctgaaacagagccttttctgctc

SEQ ID NO: 4390218 - DNA, 25 bp, Homo sapien
cacaccccagcgtggacttccaggg

SEQ ID NO: 4390219 - DNA, 25 bp, Homo sapien
ggtctgtctcgttcactactctcaa

SEQ ID NO: 4390220 - DNA, 25 bp, Homo sapien
tgcccctccgagtgtgggtctgtct

SEQ ID NO: 4390221 - DNA, 25 bp, Homo sapien
tccgagtgtgggtctgtctcgttca

SEQ ID NO: 4390222 - DNA, 25 bp, Homo sapien
ttagggcagctctgaggaggaactt

SEQ ID NO: 4390223 - DNA, 25 bp, Homo sapien
tagggcagctctgaggaggaactta

SEQ ID NO: 4390224 - DNA, 25 bp, Homo sapien
agggcagctctgaggaggaacttac

SEQ ID NO: 4390225 - DNA, 25 bp, Homo sapien
tactccaaggaggatcgcacgaccc

SEQ ID NO: 4390226 - DNA, 25 bp, Homo sapien
acctagagtctcatggcagtcagcc

SEQ ID NO: 4390227 - DNA, 25 bp, Homo sapien
tcagccagacactgagtgatgccca

SEQ ID NO: 4390228 - DNA, 25 bp, Homo sapien
ctgtagataacggaggcacccgaat

SEQ ID NO: 4390229 - DNA, 25 bp, Homo sapien
ctggagctgtcctctagcgtggccg

SEQ ID NO: 4390230 - DNA, 25 bp, Homo sapien
tgagtcaggctgtcaatcagtccat

SEQ ID NO: 4390231 - DNA, 25 bp, Homo sapien
ggccgtagcatgtccacttagagtg

SEQ ID NO: 4390232 - DNA, 25 bp, Homo sapien
caggctgtcaatcagtccattccat

SEQ ID NO: 4390233 - DNA, 25 bp, Homo sapien
atgccttctggttgtgacttggccc

SEQ ID NO: 4390234 - DNA, 25 bp, Homo sapien
tctggttgtgacttggcccctgcag

SEQ ID NO: 4390235 - DNA, 25 bp, Homo sapien
gagcccatcgaaggacagcttgtca

SEQ ID NO: 4390236 - DNA, 25 bp, Homo sapien
ctccggagaagagcccatcgaagga

SEQ ID NO: 4390237 - DNA, 25 bp, Homo sapien
cagggtgctctctggcaacgacgat

SEQ ID NO: 4390238 - DNA, 25 bp, Homo sapien
tgaagaggccatggctagtagcccg

SEQ ID NO: 4390239 - DNA, 25 bp, Homo sapien
tgtaatcaaaaccaaagcggcggcc

SEQ ID NO: 4390240 - DNA, 25 bp, Homo sapien
tctgggagccctatgcacgttgagg

SEQ ID NO: 4390241 - DNA, 25 bp, Homo sapien
ctgttgaagtcaaggcggagggccc

SEQ ID NO: 4390242 - DNA, 25 bp, Homo sapien
cgccacacgctacgtgaagcgctgg

SEQ ID NO: 4390243 - DNA, 25 bp, Homo sapien
cgaggtggaccctcactggctgttg

SEQ ID NO: 4390244 - DNA, 25 bp, Homo sapien
cagacagctgcttggacgaggccag

SEQ ID NO: 4390245 - DNA, 25 bp, Homo sapien
tgggtgccacaggcaagtgagggcg

SEQ ID NO: 4390246 - DNA, 25 bp, Homo sapien
ctgctgggtgccacaggcaagtgag

SEQ ID NO: 4390247 - DNA, 25 bp, Homo sapien
cccagccccagcagagcaagatctg

SEQ ID NO: 4390248 - DNA, 25 bp, Homo sapien
agccccagcagagcaagatctgctg

SEQ ID NO: 4390249 - DNA, 25 bp, Homo sapien
agagcaagatctgctgccaggccgc

SEQ ID NO: 4390250 - DNA, 25 bp, Homo sapien
ccagcagagcaagatctgctgccag

SEQ ID NO: 4390251 - DNA, 25 bp, Homo sapien
tatgtgatggtatctacaagacttc

SEQ ID NO: 4390252 - DNA, 25 bp, Homo sapien
gatggtatctacaagacttcattct

SEQ ID NO: 4390253 - DNA, 25 bp, Homo sapien
tcctctatgtgatggtatctacaag

SEQ ID NO: 4390254 - DNA, 25 bp, Homo sapien
tgtgatggtatctacaagacttcat

SEQ ID NO: 4390255 - DNA, 25 bp, Homo sapien
gattcttggatctccagggctagga

SEQ ID NO: 4390256 - DNA, 25 bp, Homo sapien
tctgaacatagtgttggtggattcg

SEQ ID NO: 4390257 - DNA, 25 bp, Homo sapien
gattcgaattgattcttggatctcc

SEQ ID NO: 4390258 - DNA, 25 bp, Homo sapien
catagtgttggtggattcgaattga

SEQ ID NO: 4390259 - DNA, 25 bp, Homo sapien
ggatgttgtgcttgtgagtacaagc

SEQ ID NO: 4390260 - DNA, 25 bp, Homo sapien
gcttgtgagtacaagcagtttgtaa

SEQ ID NO: 4390261 - DNA, 25 bp, Homo sapien
taagctgtgaatcacggtgtgcact

SEQ ID NO: 4390262 - DNA, 25 bp, Homo sapien
ctcagtgtgcaagtgaatacggatt

SEQ ID NO: 4390263 - DNA, 25 bp, Homo sapien
gtcctccctccccattaggtggcaa

SEQ ID NO: 4390264 - DNA, 25 bp, Homo sapien
tgagtcctccctccccattaggtgg

SEQ ID NO: 4390265 - DNA, 25 bp, Homo sapien
tcctccctccccattaggtggcaaa

SEQ ID NO: 4390266 - DNA, 25 bp, Homo sapien
tgcttgagtcctccctccccattag

SEQ ID NO: 4390267 - DNA, 25 bp, Homo sapien
cccatcagggaattgaaccccgtct

SEQ ID NO: 4390268 - DNA, 25 bp, Homo sapien
aggtgggaatactcaccactatatt

SEQ ID NO: 4390269 - DNA, 25 bp, Homo sapien
ccgtctcccgcatgacaggtgggaa

SEQ ID NO: 4390270 - DNA, 25 bp, Homo sapien
gaatactcaccactatattaacaag

SEQ ID NO: 4390271 - DNA, 25 bp, Homo sapien
tggctttgtgcagcaatgacccagc

SEQ ID NO: 4390272 - DNA, 25 bp, Homo sapien
acagctgagggccatagacagtgtg

SEQ ID NO: 4390273 - DNA, 25 bp, Homo sapien
ggctgaagggctctctgtcataaag

SEQ ID NO: 4390274 - DNA, 25 bp, Homo sapien
ctttgtgcagcaatgacccagcctc

SEQ ID NO: 4390275 - DNA, 25 bp, Homo sapien
agcaggatggatctgcctaaacttc

SEQ ID NO: 4390276 - DNA, 25 bp, Homo sapien
gttgtaaagatgaccctgaagaacc

SEQ ID NO: 4390277 - DNA, 25 bp, Homo sapien
ctaaacttccaagtgtccaggcaga

SEQ ID NO: 4390278 - DNA, 25 bp, Homo sapien
tagtcgtttgataaagttgtagttg

SEQ ID NO: 4390279 - DNA, 25 bp, Homo sapien
tacagcttaaaggtgtaggtggatt

SEQ ID NO: 4390280 - DNA, 25 bp, Homo sapien
taatcggccaagtgttgcctgagtg

SEQ ID NO: 4390281 - DNA, 25 bp, Homo sapien
cctgggactgattcaagggttagac

SEQ ID NO: 4390282 - DNA, 25 bp, Homo sapien
tggcagatgtttgcggcagaaccct

SEQ ID NO: 4390283 - DNA, 25 bp, Homo sapien
cttcctcacagtcccgcagtgttcc

SEQ ID NO: 4390284 - DNA, 25 bp, Homo sapien
caaaacccttcctcttaatgctgcg

SEQ ID NO: 4390285 - DNA, 25 bp, Homo sapien
tcttaatgctgcgtatctgtggctc

SEQ ID NO: 4390286 - DNA, 25 bp, Homo sapien
ctggagattcgtgctggccacacca

SEQ ID NO: 4390287 - DNA, 25 bp, Homo sapien
tcagcttctgtcacccttgtcaggg

SEQ ID NO: 4390288 - DNA, 25 bp, Homo sapien
cagcttctgtcacccttgtcagggc

SEQ ID NO: 4390289 - DNA, 25 bp, Homo sapien
aaggattcgggtctgtgctgcgctc

SEQ ID NO: 4390290 - DNA, 25 bp, Homo sapien
tttgagagtatccaaaagcaggctg

SEQ ID NO: 4390291 - DNA, 25 bp, Homo sapien
gctgtgcgccgagcagtttcagagc

SEQ ID NO: 4390292 - DNA, 25 bp, Homo sapien
agcctcggggcccataaggattcgg

SEQ ID NO: 4390293 - DNA, 25 bp, Homo sapien
aaggaggacgggcaaaccgcacagt

SEQ ID NO: 4390294 - DNA, 25 bp, Homo sapien
aaaccgcacagtggcacggaaagac

SEQ ID NO: 4390295 - DNA, 25 bp, Homo sapien
aagacaaggatgatggccgcgaagt

SEQ ID NO: 4390296 - DNA, 25 bp, Homo sapien
tccacattctaaaagtagcataatc

SEQ ID NO: 4390297 - DNA, 25 bp, Homo sapien
catcttctgtctcctccacaccttc

SEQ ID NO: 4390298 - DNA, 25 bp, Homo sapien
ttcatcttctgtctcctccacacct

SEQ ID NO: 4390299 - DNA, 25 bp, Homo sapien
ccttcatcttctgtctcctccacac

SEQ ID NO: 4390300 - DNA, 25 bp, Homo sapien
ccgcactccttcatcttctgtctcc

SEQ ID NO: 4390301 - DNA, 25 bp, Homo sapien
cagtggaagacagaagggctgtatc

SEQ ID NO: 4390302 - DNA, 25 bp, Homo sapien
gaagacagaagggctgtatcctcac

SEQ ID NO: 4390303 - DNA, 25 bp, Homo sapien
ccagtctggcagtggaagacagaag

SEQ ID NO: 4390304 - DNA, 25 bp, Homo sapien
tggaagacagaagggctgtatcctc

SEQ ID NO: 4390305 - DNA, 25 bp, Homo sapien
agggtcctttcggtcccatggacag

SEQ ID NO: 4390306 - DNA, 25 bp, Homo sapien
aaacctccagaaagttcagtttgag

SEQ ID NO: 4390307 - DNA, 25 bp, Homo sapien
aaacgtaaatctctgagaggagcca

SEQ ID NO: 4390308 - DNA, 25 bp, Homo sapien
caaaaacgtaaatctctgagaggag

SEQ ID NO: 4390309 - DNA, 25 bp, Homo sapien
acgtaaatctctgagaggagccagc

SEQ ID NO: 4390310 - DNA, 25 bp, Homo sapien
ctccccaaaaacgtaaatctctgag

SEQ ID NO: 4390311 - DNA, 25 bp, Homo sapien
gctgccagaatgaagcggtcacaac

SEQ ID NO: 4390312 - DNA, 25 bp, Homo sapien
cagaatgaagcggtcacaactgcct

SEQ ID NO: 4390313 - DNA, 25 bp, Homo sapien
tgccagaatgaagcggtcacaactg

SEQ ID NO: 4390314 - DNA, 25 bp, Homo sapien
atgaagcggtcacaactgcctggaa

SEQ ID NO: 4390315 - DNA, 25 bp, Homo sapien
ccagcttctaaggacagcgggagct

SEQ ID NO: 4390316 - DNA, 25 bp, Homo sapien
cttctaaggacagcgggagctgaca

SEQ ID NO: 4390317 - DNA, 25 bp, Homo sapien
caaatgcttctcacgatcattatca

SEQ ID NO: 4390318 - DNA, 25 bp, Homo sapien
acgatcattatcagtcttgttctac

SEQ ID NO: 4390319 - DNA, 25 bp, Homo sapien
ctctcagctcagacacgagtaggcc

SEQ ID NO: 4390320 - DNA, 25 bp, Homo sapien
tctcagctcagacacgagtaggcca

SEQ ID NO: 4390321 - DNA, 25 bp, Homo sapien
gctcagacacgagtaggccagactt

SEQ ID NO: 4390322 - DNA, 25 bp, Homo sapien
tcagctcagacacgagtaggccaga

SEQ ID NO: 4390323 - DNA, 25 bp, Homo sapien
gcttatagtctcttgattcattttc

SEQ ID NO: 4390324 - DNA, 25 bp, Homo sapien
tcaagtgcttatagtctcttgattc

SEQ ID NO: 4390325 - DNA, 25 bp, Homo sapien
agtgcttatagtctcttgattcatt

SEQ ID NO: 4390326 - DNA, 25 bp, Homo sapien
ccactcaagtgcttatagtctcttg

SEQ ID NO: 4390327 - DNA, 25 bp, Homo sapien
tgaaggcaaagacagatccccaaaa

SEQ ID NO: 4390328 - DNA, 25 bp, Homo sapien
gacagtgcagtgcttccactctgca

SEQ ID NO: 4390329 - DNA, 25 bp, Homo sapien
ctataatctaatgcgccaaagtagg

SEQ ID NO: 4390330 - DNA, 25 bp, Homo sapien
tatcttccaggtgtccaacttgagc

SEQ ID NO: 4390331 - DNA, 25 bp, Homo sapien
cacagcccttgttgtatctccaaag

SEQ ID NO: 4390332 - DNA, 25 bp, Homo sapien
agcccttgttgtatctccaaagaga

SEQ ID NO: 4390333 - DNA, 25 bp, Homo sapien
cacacagcccttgttgtatctccaa

SEQ ID NO: 4390334 - DNA, 25 bp, Homo sapien
ggccacacagcccttgttgtatctc

SEQ ID NO: 4390335 - DNA, 25 bp, Homo sapien
gtgcccacacagtgcatcacagaaa

SEQ ID NO: 4390336 - DNA, 25 bp, Homo sapien
caagtgcccacacagtgcatcacag

SEQ ID NO: 4390337 - DNA, 25 bp, Homo sapien
ttagtattctatccccaagtgccca

SEQ ID NO: 4390338 - DNA, 25 bp, Homo sapien
ttgtttagtattctatccccaagtg

SEQ ID NO: 4390339 - DNA, 25 bp, Homo sapien
tatgactcaggacagtagttcgtcc

SEQ ID NO: 4390340 - DNA, 25 bp, Homo sapien
tacaggaaaaagtagaccaatctca

SEQ ID NO: 4390341 - DNA, 25 bp, Homo sapien
ttctacagaaataagaccctcgccc

SEQ ID NO: 4390342 - DNA, 25 bp, Homo sapien
tgtgccagggtatactgctaactca

SEQ ID NO: 4390343 - DNA, 25 bp, Homo sapien
tcaccagaggtggatgccggcccta

SEQ ID NO: 4390344 - DNA, 25 bp, Homo sapien
gtcggcctcgtctgctagggcctca

SEQ ID NO: 4390345 - DNA, 25 bp, Homo sapien
tggccctcatactggcttcagctct

SEQ ID NO: 4390346 - DNA, 25 bp, Homo sapien
ggctctggccctgtcggcctcgtct

SEQ ID NO: 4390347 - DNA, 25 bp, Homo sapien
ggtgcttgcggtcaaactgtttcag

SEQ ID NO: 4390348 - DNA, 25 bp, Homo sapien
taataagcctcttcggatacccaaa

SEQ ID NO: 4390349 - DNA, 25 bp, Homo sapien
gtaactgagatatcgctgctgcaca

SEQ ID NO: 4390350 - DNA, 25 bp, Homo sapien
aatgatactttgagggttgcacccc

SEQ ID NO: 4390351 - DNA, 25 bp, Homo sapien
tctgcggcccttgcgatgatgtccg

SEQ ID NO: 4390352 - DNA, 25 bp, Homo sapien
ttgccaaggctttggccgccaaggc

SEQ ID NO: 4390353 - DNA, 25 bp, Homo sapien
gatgtccgggaacagaatcttcaag

SEQ ID NO: 4390354 - DNA, 25 bp, Homo sapien
tctccgagcgtgtgatgggactctt

SEQ ID NO: 4390355 - DNA, 25 bp, Homo sapien
ggggcccgggtctcaccatcatggc

SEQ ID NO: 4390356 - DNA, 25 bp, Homo sapien
gtcggggcccgggtctcaccatcat

SEQ ID NO: 4390357 - DNA, 25 bp, Homo sapien
ggcccgggtctcaccatcatggccg

SEQ ID NO: 4390358 - DNA, 25 bp, Homo sapien
tcggggcccgggtctcaccatcatg

SEQ ID NO: 4390359 - DNA, 25 bp, Homo sapien
gttggacagcggcagtgacggcggg

SEQ ID NO: 4390360 - DNA, 25 bp, Homo sapien
aggcaggtgcagagcgcgtacacgg

SEQ ID NO: 4390361 - DNA, 25 bp, Homo sapien
tgacggcgggagtacaaggagcaat

SEQ ID NO: 4390362 - DNA, 25 bp, Homo sapien
ggagcaatggcagcgggagctttgt

SEQ ID NO: 4390363 - DNA, 25 bp, Homo sapien
cggccgcaacgccgccagcagccgg

SEQ ID NO: 4390364 - DNA, 25 bp, Homo sapien
ctgcggccgcaacgccgccagcagc

SEQ ID NO: 4390365 - DNA, 25 bp, Homo sapien
ccgcaacgccgccagcagccggaac

SEQ ID NO: 4390366 - DNA, 25 bp, Homo sapien
gccgcaacgccgccagcagccggaa

SEQ ID NO: 4390367 - DNA, 25 bp, Homo sapien
ccgcgcccgcgcgaggggccacttc

SEQ ID NO: 4390368 - DNA, 25 bp, Homo sapien
agccaggacggcgaccctagtgccg

SEQ ID NO: 4390369 - DNA, 25 bp, Homo sapien
ggcgaccctagtgccgcgcgcagcc

SEQ ID NO: 4390370 - DNA, 25 bp, Homo sapien
gaggggccacttccggccacctcag

SEQ ID NO: 4390371 - DNA, 25 bp, Homo sapien
tgtgtaagcaacagtacttctgtgt

SEQ ID NO: 4390372 - DNA, 25 bp, Homo sapien
agcaacagtacttctgtgtttggct

SEQ ID NO: 4390373 - DNA, 25 bp, Homo sapien
aattgtgtaagcaacagtacttctg

SEQ ID NO: 4390374 - DNA, 25 bp, Homo sapien
gtaattgtgtaagcaacagtacttc

SEQ ID NO: 4390375 - DNA, 25 bp, Homo sapien
gagtggctggaccagcgattcttga

SEQ ID NO: 4390376 - DNA, 25 bp, Homo sapien
ggctggaccagcgattcttgaggac

SEQ ID NO: 4390377 - DNA, 25 bp, Homo sapien
ggaccagcgattcttgaggaccact

SEQ ID NO: 4390378 - DNA, 25 bp, Homo sapien
gtgagtggctggaccagcgattctt

SEQ ID NO: 4390379 - DNA, 25 bp, Homo sapien
gaacttgagtagtcatggcaacgca

SEQ ID NO: 4390380 - DNA, 25 bp, Homo sapien
gcagtctcgttgatggttctccagc

SEQ ID NO: 4390381 - DNA, 25 bp, Homo sapien
taacaggtcccattccttggagttc

SEQ ID NO: 4390382 - DNA, 25 bp, Homo sapien
gaaaagcgtctttggagttcgcctc

SEQ ID NO: 4390383 - DNA, 25 bp, Homo sapien
tgtaagtcctttgcttccaatggga

SEQ ID NO: 4390384 - DNA, 25 bp, Homo sapien
ttttggctccgagacttctccaaga

SEQ ID NO: 4390385 - DNA, 25 bp, Homo sapien
tccctgagaattttggctccgagac

SEQ ID NO: 4390386 - DNA, 25 bp, Homo sapien
tcctgtcgaggaccttgtcttgtaa

SEQ ID NO: 4390387 - DNA, 25 bp, Homo sapien
tcagaaagtatgtgagtgcgtttgc

SEQ ID NO: 4390388 - DNA, 25 bp, Homo sapien
catccaggtaggaggaatcctatca

SEQ ID NO: 4390389 - DNA, 25 bp, Homo sapien
ggttcctgagtcaattccatccagg

SEQ ID NO: 4390390 - DNA, 25 bp, Homo sapien
gggagaaagtatccctgctgtgaga

SEQ ID NO: 4390391 - DNA, 25 bp, Homo sapien
taatttattttgcatcactttgcat

SEQ ID NO: 4390392 - DNA, 25 bp, Homo sapien
tataaactacacaggcacgcattgg

SEQ ID NO: 4390393 - DNA, 25 bp, Homo sapien
tttcactgacactggaagacccggg

SEQ ID NO: 4390394 - DNA, 25 bp, Homo sapien
ccagtgtcccagtagatgaagccga

SEQ ID NO: 4390395 - DNA, 25 bp, Homo sapien
tgtttccgtcacagagagggctgca

SEQ ID NO: 4390396 - DNA, 25 bp, Homo sapien
cagagcagtgttgagtcagctcccc

SEQ ID NO: 4390397 - DNA, 25 bp, Homo sapien
ccttctggctttcgtaggatctgac

SEQ ID NO: 4390398 - DNA, 25 bp, Homo sapien
tggaaccttctcgtgtagggcccac

SEQ ID NO: 4390399 - DNA, 25 bp, Homo sapien
caagatccactttaggcaggcagta

SEQ ID NO: 4390400 - DNA, 25 bp, Homo sapien
gtgtttgtcttcttcggctctcccg

SEQ ID NO: 4390401 - DNA, 25 bp, Homo sapien
acacagggctagactggacgctctc

SEQ ID NO: 4390402 - DNA, 25 bp, Homo sapien
agtggaaagtcatcagcggcgagtc

SEQ ID NO: 4390403 - DNA, 25 bp, Homo sapien
caagtgtagggttctgtctgtctcc

SEQ ID NO: 4390404 - DNA, 25 bp, Homo sapien
ttctgctggcctgggtttatactgt

SEQ ID NO: 4390405 - DNA, 25 bp, Homo sapien
gtggctgacggctgctgtaaaccat

SEQ ID NO: 4390406 - DNA, 25 bp, Homo sapien
tgtgttgataacttgacccctccag

SEQ ID NO: 4390407 - DNA, 25 bp, Homo sapien
gcactgatttgcacggaggtctcca

SEQ ID NO: 4390408 - DNA, 25 bp, Homo sapien
tttgagagttgctcccgaactgcct

SEQ ID NO: 4390409 - DNA, 25 bp, Homo sapien
cggtgcactgtgttagctctgagag

SEQ ID NO: 4390410 - DNA, 25 bp, Homo sapien
tcccaagcggttcatatcaaggtcc

SEQ ID NO: 4390411 - DNA, 25 bp, Homo sapien
gctctgaatcttgcaagccactgca

SEQ ID NO: 4390412 - DNA, 25 bp, Homo sapien
gctccaggcagatgtaggactcagg

SEQ ID NO: 4390413 - DNA, 25 bp, Homo sapien
acgcatacgtgcacagaacgtgtac

SEQ ID NO: 4390414 - DNA, 25 bp, Homo sapien
agaacgtgtacactggccctcggat

SEQ ID NO: 4390415 - DNA, 25 bp, Homo sapien
gacaccatggtggatggtcctgtct

SEQ ID NO: 4390416 - DNA, 25 bp, Homo sapien
gacaaagcaccgaggtgggcttgaa

SEQ ID NO: 4390417 - DNA, 25 bp, Homo sapien
ccccaggatgtatagacatctcata

SEQ ID NO: 4390418 - DNA, 25 bp, Homo sapien
ctggcaagcccggatgcgacaaagc

SEQ ID NO: 4390419 - DNA, 25 bp, Homo sapien
ccggatgcgacaaagcaccgaggtg

SEQ ID NO: 4390420 - DNA, 25 bp, Homo sapien
gagaggaatcgctgaaagctgccac

SEQ ID NO: 4390421 - DNA, 25 bp, Homo sapien
cacagagaggaatcgctgaaagctg

SEQ ID NO: 4390422 - DNA, 25 bp, Homo sapien
agagaggaatcgctgaaagctgcca

SEQ ID NO: 4390423 - DNA, 25 bp, Homo sapien
acagagaggaatcgctgaaagctgc

SEQ ID NO: 4390424 - DNA, 25 bp, Homo sapien
cagcttcttaggttgggatctcccg

SEQ ID NO: 4390425 - DNA, 25 bp, Homo sapien
cactcagaatcaacttgggcaaagc

SEQ ID NO: 4390426 - DNA, 25 bp, Homo sapien
gatagtgcaatagccctcttactgg

SEQ ID NO: 4390427 - DNA, 25 bp, Homo sapien
gatgcctggagaacaagaacatgct

SEQ ID NO: 4390428 - DNA, 25 bp, Homo sapien
gaggcccaggtcattaagaaagaaa

SEQ ID NO: 4390429 - DNA, 25 bp, Homo sapien
taggagaaagtgtagcaagaagagc

SEQ ID NO: 4390430 - DNA, 25 bp, Homo sapien
aaaatatgcttgaaagcctggcaac

SEQ ID NO: 4390431 - DNA, 25 bp, Homo sapien
catctgtgttgatcataggagaaag

SEQ ID NO: 4390432 - DNA, 25 bp, Homo sapien
cactccgagggtccttgtgctggga

SEQ ID NO: 4390433 - DNA, 25 bp, Homo sapien
gaacagctcgaggatttgtctcagt

SEQ ID NO: 4390434 - DNA, 25 bp, Homo sapien
gaatttcttagatctgtacagaggg

SEQ ID NO: 4390435 - DNA, 25 bp, Homo sapien
cagtagaggtctgttttgggcgata

SEQ ID NO: 4390436 - DNA, 25 bp, Homo sapien
cctgctttggtattgcggtcactat

SEQ ID NO: 4390437 - DNA, 25 bp, Homo sapien
gatccattcactgctctgcccttag

SEQ ID NO: 4390438 - DNA, 25 bp, Homo sapien
ctacctggagagactcaagcaagaa

SEQ ID NO: 4390439 - DNA, 25 bp, Homo sapien
tatctgtcaaagacctagtgttctg

SEQ ID NO: 4390440 - DNA, 25 bp, Homo sapien
gcagaaacctccatgaagaactttg

SEQ ID NO: 4390441 - DNA, 25 bp, Homo sapien
gaagcttcctaagccaatgactgga

SEQ ID NO: 4390442 - DNA, 25 bp, Homo sapien
ggaatcgttagctgctcccctacaa

SEQ ID NO: 4390443 - DNA, 25 bp, Homo sapien
tcttagaatcggcatcaggcaaaca

SEQ ID NO: 4390444 - DNA, 25 bp, Homo sapien
tcagtgcccgctcagaggtgtggct

SEQ ID NO: 4390445 - DNA, 25 bp, Homo sapien
agctccccacgctcgctcagtgccc

SEQ ID NO: 4390446 - DNA, 25 bp, Homo sapien
gcagcaggaatccacaacccgcttt

SEQ ID NO: 4390447 - DNA, 25 bp, Homo sapien
gtgtggctgcgcaggggccatccaa

SEQ ID NO: 4390448 - DNA, 25 bp, Homo sapien
tcctccccgctgagaaggtagacag

SEQ ID NO: 4390449 - DNA, 25 bp, Homo sapien
catccaggtgacctcagagttcacg

SEQ ID NO: 4390450 - DNA, 25 bp, Homo sapien
caagtcaccattccgcagaaatcag

SEQ ID NO: 4390451 - DNA, 25 bp, Homo sapien
atctggccgggcatacagaaggcga

SEQ ID NO: 4390452 - DNA, 25 bp, Homo sapien
ccctcgaggcaagggatgccctcgt

SEQ ID NO: 4390453 - DNA, 25 bp, Homo sapien
gctgtagttccctcgaggcaaggga

SEQ ID NO: 4390454 - DNA, 25 bp, Homo sapien
tgagggctgagctgtagttccctcg

SEQ ID NO: 4390455 - DNA, 25 bp, Homo sapien
ggctgagctgtagttccctcgaggc

SEQ ID NO: 4390456 - DNA, 25 bp, Homo sapien
aggcccattagtttcatgacgcaca

SEQ ID NO: 4390457 - DNA, 25 bp, Homo sapien
ttagtttcatgacgcacactcccag

SEQ ID NO: 4390458 - DNA, 25 bp, Homo sapien
agcaggtttggccacggcctcaacc

SEQ ID NO: 4390459 - DNA, 25 bp, Homo sapien
catgagcaggtttggccacggcctc

SEQ ID NO: 4390460 - DNA, 25 bp, Homo sapien
tctagagccaaagtgaccgggttca

SEQ ID NO: 4390461 - DNA, 25 bp, Homo sapien
ttaaaacagtagagtgcacacgcag

SEQ ID NO: 4390462 - DNA, 25 bp, Homo sapien
tctgagtatggacttgccgcgctga

SEQ ID NO: 4390463 - DNA, 25 bp, Homo sapien
tcatgtacgagctgtgccacactgg

SEQ ID NO: 4390464 - DNA, 25 bp, Homo sapien
tggaggattagaagtaaagccggcc

SEQ ID NO: 4390465 - DNA, 25 bp, Homo sapien
gaatattgccaggtatgaacagcct

SEQ ID NO: 4390466 - DNA, 25 bp, Homo sapien
tgatatccgggaacttacagcactg

SEQ ID NO: 4390467 - DNA, 25 bp, Homo sapien
ggtggacacaacgatatagaagctc

SEQ ID NO: 4390468 - DNA, 25 bp, Homo sapien
caaaggtacaaaagctcggcgtggg

SEQ ID NO: 4390469 - DNA, 25 bp, Homo sapien
tgtcatatataggactgtgggcccc

SEQ ID NO: 4390470 - DNA, 25 bp, Homo sapien
tcacggagccttgtacagacactgg

SEQ ID NO: 4390471 - DNA, 25 bp, Homo sapien
ccacagggtgaatctagacagggcc

SEQ ID NO: 4390472 - DNA, 25 bp, Homo sapien
taaggcatcgtgtgcagagacctcc

SEQ ID NO: 4390473 - DNA, 25 bp, Homo sapien
caatcacttccaggtcagactgcga

SEQ ID NO: 4390474 - DNA, 25 bp, Homo sapien
cacgattccacatagtgagccccaa

SEQ ID NO: 4390475 - DNA, 25 bp, Homo sapien
gagccccaatcgcattgatcccaga

SEQ ID NO: 4390476 - DNA, 25 bp, Homo sapien
tgccggctgcttctgcacataacac

SEQ ID NO: 4390477 - DNA, 25 bp, Homo sapien
tgggaatgtggtgccggctgcttct

SEQ ID NO: 4390478 - DNA, 25 bp, Homo sapien
tgtgggaatgtggtgccggctgctt

SEQ ID NO: 4390479 - DNA, 25 bp, Homo sapien
ctgtgggaatgtggtgccggctgct

SEQ ID NO: 4390480 - DNA, 25 bp, Homo sapien
acatttaacctgatagttgtcaata

SEQ ID NO: 4390481 - DNA, 25 bp, Homo sapien
catttaacctgatagttgtcaataa

SEQ ID NO: 4390482 - DNA, 25 bp, Homo sapien
atacatttaacctgatagttgtcaa

SEQ ID NO: 4390483 - DNA, 25 bp, Homo sapien
tttaacctgatagttgtcaataaaa

SEQ ID NO: 4390484 - DNA, 25 bp, Homo sapien
gcaggaatctcagtgcttggaagct

SEQ ID NO: 4390485 - DNA, 25 bp, Homo sapien
tgcaaatttcaaaaagtgttcggtg

SEQ ID NO: 4390486 - DNA, 25 bp, Homo sapien
catacagtacctcggtgagtcaggg

SEQ ID NO: 4390487 - DNA, 25 bp, Homo sapien
ttcggtgagcgagactgagatctga

SEQ ID NO: 4390488 - DNA, 25 bp, Homo sapien
taggaagcccacaagcttatctcca

SEQ ID NO: 4390489 - DNA, 25 bp, Homo sapien
gctggatgtttctaggaagcccaca

SEQ ID NO: 4390490 - DNA, 25 bp, Homo sapien
gaagcccacaagcttatctccaagc

SEQ ID NO: 4390491 - DNA, 25 bp, Homo sapien
gacaccctgctggatgtttctagga

SEQ ID NO: 4390492 - DNA, 25 bp, Homo sapien
ctggtttaagggacagatatatgca

SEQ ID NO: 4390493 - DNA, 25 bp, Homo sapien
tattttaacaagcaaccaccagtga

SEQ ID NO: 4390494 - DNA, 25 bp, Homo sapien
tttaagggacagatatatgcaacaa

SEQ ID NO: 4390495 - DNA, 25 bp, Homo sapien
aattattgtgtattttaacaagcaa

SEQ ID NO: 4390496 - DNA, 25 bp, Homo sapien
tctaatatccatcatcgagaagaaa

SEQ ID NO: 4390497 - DNA, 25 bp, Homo sapien
tatcaacggagtaaacagaccacat

SEQ ID NO: 4390498 - DNA, 25 bp, Homo sapien
aaggtctaatatccatcatcgagaa

SEQ ID NO: 4390499 - DNA, 25 bp, Homo sapien
tatccatcatcgagaagaaacttaa

SEQ ID NO: 4390500 - DNA, 25 bp, Homo sapien
ggaaacaagactgcttaaagagcat

SEQ ID NO: 4390501 - DNA, 25 bp, Homo sapien
tctggatagaattctaagaatagag

SEQ ID NO: 4390502 - DNA, 25 bp, Homo sapien
ttttctggatagaattctaagaata

SEQ ID NO: 4390503 - DNA, 25 bp, Homo sapien
tagaattctaagaatagaggctgaa

SEQ ID NO: 4390504 - DNA, 25 bp, Homo sapien
accaggtggcattttcccgtggaag

SEQ ID NO: 4390505 - DNA, 25 bp, Homo sapien
caggtggcattttcccgtggaagtc

SEQ ID NO: 4390506 - DNA, 25 bp, Homo sapien
tggcattttcccgtggaagtcagaa

SEQ ID NO: 4390507 - DNA, 25 bp, Homo sapien
cattttcccgtggaagtcagaacct

SEQ ID NO: 4390508 - DNA, 25 bp, Homo sapien
gtagctaaagaaagcgaggcgcccc

SEQ ID NO: 4390509 - DNA, 25 bp, Homo sapien
catctgggtatttaaggagctcgac

SEQ ID NO: 4390510 - DNA, 25 bp, Homo sapien
catttctcaaaacaccgcctggacg

SEQ ID NO: 4390511 - DNA, 25 bp, Homo sapien
ggagctcgaccttccaaactgttaa

SEQ ID NO: 4390512 - DNA, 25 bp, Homo sapien
caaccccagccgtccggcgcaagga

SEQ ID NO: 4390513 - DNA, 25 bp, Homo sapien
ccagccgtccggcgcaaggaaagct

SEQ ID NO: 4390514 - DNA, 25 bp, Homo sapien
gcctccggcagagcagccccggcag

SEQ ID NO: 4390515 - DNA, 25 bp, Homo sapien
gccgcagagttccggcagcgacccc

SEQ ID NO: 4390516 - DNA, 25 bp, Homo sapien
agtgacaccatcctaggtgacagca

SEQ ID NO: 4390517 - DNA, 25 bp, Homo sapien
gtgacaccatcctaggtgacagcac

SEQ ID NO: 4390518 - DNA, 25 bp, Homo sapien
gaagtcgggtctgcgggcggcgcaa

SEQ ID NO: 4390519 - DNA, 25 bp, Homo sapien
tcatctagtttctcgctcttccaac

SEQ ID NO: 4390520 - DNA, 25 bp, Homo sapien
gatagacagcccgtcgcacggctgg

SEQ ID NO: 4390521 - DNA, 25 bp, Homo sapien
acggctggaagtcgggtctgcgggc

SEQ ID NO: 4390522 - DNA, 25 bp, Homo sapien
gagaagcgacgtctgggtgggcagg

SEQ ID NO: 4390523 - DNA, 25 bp, Homo sapien
gaagcgacgtctgggtgggcaggaa

SEQ ID NO: 4390524 - DNA, 25 bp, Homo sapien
gggagaagcgacgtctgggtgggca

SEQ ID NO: 4390525 - DNA, 25 bp, Homo sapien
ccgggagaagcgacgtctgggtggg

SEQ ID NO: 4390526 - DNA, 25 bp, Homo sapien
ctgcggacgcgggagggcgcggcac

SEQ ID NO: 4390527 - DNA, 25 bp, Homo sapien
gcggacgcgggagggcgcggcacgg

SEQ ID NO: 4390528 - DNA, 25 bp, Homo sapien
tgcggacgcgggagggcgcggcacg

SEQ ID NO: 4390529 - DNA, 25 bp, Homo sapien
ggacgcgggagggcgcggcacgggc

SEQ ID NO: 4390530 - DNA, 25 bp, Homo sapien
cgggcgctgcgaccgggtccgggct

SEQ ID NO: 4390531 - DNA, 25 bp, Homo sapien
gcggcggtcccaggctcgaggagga

SEQ ID NO: 4390532 - DNA, 25 bp, Homo sapien
tcccaggctcgaggaggagccgccc

SEQ ID NO: 4390533 - DNA, 25 bp, Homo sapien
ggcgctgcgaccgggtccgggctgg

SEQ ID NO: 4390534 - DNA, 25 bp, Homo sapien
cgcgcgacgttcctcagcgagcccg

SEQ ID NO: 4390535 - DNA, 25 bp, Homo sapien
cgacgttcctcagcgagcccggcct

SEQ ID NO: 4390536 - DNA, 25 bp, Homo sapien
tcggccccgcgcgacgttcctcagc

SEQ ID NO: 4390537 - DNA, 25 bp, Homo sapien
gccccgcgcgacgttcctcagcgag

SEQ ID NO: 4390538 - DNA, 25 bp, Homo sapien
cccgagtgacactggccaccgagaa

SEQ ID NO: 4390539 - DNA, 25 bp, Homo sapien
acactggccaccgagaactgacaca

SEQ ID NO: 4390540 - DNA, 25 bp, Homo sapien
tgcacgccagcctacatatgcactt

SEQ ID NO: 4390541 - DNA, 25 bp, Homo sapien
atgcacgccagcctacatatgcact

SEQ ID NO: 4390542 - DNA, 25 bp, Homo sapien
gcgtccacacgctccacggagggct

SEQ ID NO: 4390543 - DNA, 25 bp, Homo sapien
acgctccacggagggctgcgcacac

SEQ ID NO: 4390544 - DNA, 25 bp, Homo sapien
tccacacgctccacggagggctgcg

SEQ ID NO: 4390545 - DNA, 25 bp, Homo sapien
acacgctccacggagggctgcgcac

SEQ ID NO: 4390546 - DNA, 25 bp, Homo sapien
ccacgcccacccgaacctcctagtg

SEQ ID NO: 4390547 - DNA, 25 bp, Homo sapien
ctcctagtggcccgggccgggtgca

SEQ ID NO: 4390548 - DNA, 25 bp, Homo sapien
cacgcccacccgaacctcctagtgg

SEQ ID NO: 4390549 - DNA, 25 bp, Homo sapien
tcctagtggcccgggccgggtgcat

SEQ ID NO: 4390550 - DNA, 25 bp, Homo sapien
gaaactctgctgtctgcgacgctca

SEQ ID NO: 4390551 - DNA, 25 bp, Homo sapien
cagagtgaccggatcaaatgggcat

SEQ ID NO: 4390552 - DNA, 25 bp, Homo sapien
gaagagactgcgtaagaagttgccc

SEQ ID NO: 4390553 - DNA, 25 bp, Homo sapien
caataaataacgagtacaggaccca

SEQ ID NO: 4390554 - DNA, 25 bp, Homo sapien
catatagcccagtcgatgtgttgga

SEQ ID NO: 4390555 - DNA, 25 bp, Homo sapien
gactacattggattcgttgaggcag

SEQ ID NO: 4390556 - DNA, 25 bp, Homo sapien
tcagcctaggtttggagggagaccc

SEQ ID NO: 4390557 - DNA, 25 bp, Homo sapien
gagacgtgttcgcatcacataagaa

SEQ ID NO: 4390558 - DNA, 25 bp, Homo sapien
cagagacaatctcgtggcctgtgtt

SEQ ID NO: 4390559 - DNA, 25 bp, Homo sapien
gctcttctgacttccggaaagctaa

SEQ ID NO: 4390560 - DNA, 25 bp, Homo sapien
tacattgagtgttgcttaggccgcc

SEQ ID NO: 4390561 - DNA, 25 bp, Homo sapien
gatgtctgctgtccacgctcttctg

SEQ ID NO: 4390562 - DNA, 25 bp, Homo sapien
gctctgtacaattcaaggcacactt

SEQ ID NO: 4390563 - DNA, 25 bp, Homo sapien
cggaaaacttatactccattcaaga

SEQ ID NO: 4390564 - DNA, 25 bp, Homo sapien
gaaagttcatttacaccacaatgaa

SEQ ID NO: 4390565 - DNA, 25 bp, Homo sapien
cattttatttgggttcacaggtgaa

SEQ ID NO: 4390566 - DNA, 25 bp, Homo sapien
gaaaggcttgccacactaacctaag

SEQ ID NO: 4390567 - DNA, 25 bp, Homo sapien
taggcaaccactaatgtacggaaag

SEQ ID NO: 4390568 - DNA, 25 bp, Homo sapien
caagtttttgtattgaccagcccct

SEQ ID NO: 4390569 - DNA, 25 bp, Homo sapien
cacagaggcttgtcatgacaggaaa

SEQ ID NO: 4390570 - DNA, 25 bp, Homo sapien
ggcataggaagcacattcctaaaga

SEQ ID NO: 4390571 - DNA, 25 bp, Homo sapien
tttgaccattagagtcgttacacag

SEQ ID NO: 4390572 - DNA, 25 bp, Homo sapien
cattcctaaagatttgaccattaga

SEQ ID NO: 4390573 - DNA, 25 bp, Homo sapien
ggacagattcagaggcataggaagc

SEQ ID NO: 4390574 - DNA, 25 bp, Homo sapien
tacctgatgctagcatgtgaggcat

SEQ ID NO: 4390575 - DNA, 25 bp, Homo sapien
cactgaaattcagtcagcattacct

SEQ ID NO: 4390576 - DNA, 25 bp, Homo sapien
gctagcatgtgaggcataatctgga

SEQ ID NO: 4390577 - DNA, 25 bp, Homo sapien
cagtcagcattacctgatgctagca

SEQ ID NO: 4390578 - DNA, 25 bp, Homo sapien
ttctctagaactgtgggcaacccaa

SEQ ID NO: 4390579 - DNA, 25 bp, Homo sapien
tcctggctaatggtacgtggttcaa

SEQ ID NO: 4390580 - DNA, 25 bp, Homo sapien
caactgtggaagcatagaacatggg

SEQ ID NO: 4390581 - DNA, 25 bp, Homo sapien
tataagcagcgttcaaggatctcat

SEQ ID NO: 4390582 - DNA, 25 bp, Homo sapien
gcctgattgtagtaaggattcaaca

SEQ ID NO: 4390583 - DNA, 25 bp, Homo sapien
cacatcaggaattgggcagtacctc

SEQ ID NO: 4390584 - DNA, 25 bp, Homo sapien
gattcaacattcgattccccacaaa

SEQ ID NO: 4390585 - DNA, 25 bp, Homo sapien
ggccaaatcgtcctaattcacagag

SEQ ID NO: 4390586 - DNA, 25 bp, Homo sapien
aaagaaatgacaatgcctcggccca

SEQ ID NO: 4390587 - DNA, 25 bp, Homo sapien
tccagggctgaagtattagtgcaca

SEQ ID NO: 4390588 - DNA, 25 bp, Homo sapien
tgccaatgaccaagtgaggacgatc

SEQ ID NO: 4390589 - DNA, 25 bp, Homo sapien
tgtccgagtctacagcaatcacagg

SEQ ID NO: 4390590 - DNA, 25 bp, Homo sapien
cccaaattgatgtgaagaaccaaca

SEQ ID NO: 4390591 - DNA, 25 bp, Homo sapien
aaagaataggaggatttgtacacta

SEQ ID NO: 4390592 - DNA, 25 bp, Homo sapien
gaagaaccaacacaattcctataaa

SEQ ID NO: 4390593 - DNA, 25 bp, Homo sapien
ggtggtaatactacccaaattgatg

SEQ ID NO: 4390594 - DNA, 25 bp, Homo sapien
tgacaaaactattcaaggttgggtg

SEQ ID NO: 4390595 - DNA, 25 bp, Homo sapien
tatgacaaaactattcaaggttggg

SEQ ID NO: 4390596 - DNA, 25 bp, Homo sapien
tgtatgacaaaactattcaaggttg

SEQ ID NO: 4390597 - DNA, 25 bp, Homo sapien
attcactcttcccaatttcaaattg

SEQ ID NO: 4390598 - DNA, 25 bp, Homo sapien
tgggagaagcggcagcattccctgg

SEQ ID NO: 4390599 - DNA, 25 bp, Homo sapien
gtgtgggagaagcggcagcattccc

SEQ ID NO: 4390600 - DNA, 25 bp, Homo sapien
ggagaagcggcagcattccctggag

SEQ ID NO: 4390601 - DNA, 25 bp, Homo sapien
tgtgggagaagcggcagcattccct

SEQ ID NO: 4390602 - DNA, 25 bp, Homo sapien
ttttccacgatgctccggagggagt

SEQ ID NO: 4390603 - DNA, 25 bp, Homo sapien
gcctgccctgattgcaaaagatata

SEQ ID NO: 4390604 - DNA, 25 bp, Homo sapien
cacttcatagggatactgcacagca

SEQ ID NO: 4390605 - DNA, 25 bp, Homo sapien
cggagggagttgaccacttatttgc

SEQ ID NO: 4390606 - DNA, 25 bp, Homo sapien
agggcctcactaaaaatgctgtcca

SEQ ID NO: 4390607 - DNA, 25 bp, Homo sapien
gagggcctcactaaaaatgctgtcc

SEQ ID NO: 4390608 - DNA, 25 bp, Homo sapien
caagctctgaattggcttgttgcag

SEQ ID NO: 4390609 - DNA, 25 bp, Homo sapien
ggcttgttgcagagtctacgggatt

SEQ ID NO: 4390610 - DNA, 25 bp, Homo sapien
gagtctacgggattctagaggttga

SEQ ID NO: 4390611 - DNA, 25 bp, Homo sapien
ttgggcaagctctgaattggcttgt

SEQ ID NO: 4390612 - DNA, 25 bp, Homo sapien
caagcatactgtgaccctaaagcaa

SEQ ID NO: 4390613 - DNA, 25 bp, Homo sapien
ggcactcagcgaaggaccacagtga

SEQ ID NO: 4390614 - DNA, 25 bp, Homo sapien
tattcaaagtctccgcaaccagagg

SEQ ID NO: 4390615 - DNA, 25 bp, Homo sapien
tgtaggaacaagcaccgagaaagta

SEQ ID NO: 4390616 - DNA, 25 bp, Homo sapien
tggaaccttgaccattggaaattcc

SEQ ID NO: 4390617 - DNA, 25 bp, Homo sapien
aaaagtgctgattggaaccttgacc

SEQ ID NO: 4390618 - DNA, 25 bp, Homo sapien
cactcgtaattggttccaaaagtgc

SEQ ID NO: 4390619 - DNA, 25 bp, Homo sapien
gctgattggaaccttgaccattgga

SEQ ID NO: 4390620 - DNA, 25 bp, Homo sapien
tctagaatgcccagcttgagtgctt

SEQ ID NO: 4390621 - DNA, 25 bp, Homo sapien
tctctgagcaaatctgattgcttct

SEQ ID NO: 4390622 - DNA, 25 bp, Homo sapien
gattgcttcttcaaccgggtctgag

SEQ ID NO: 4390623 - DNA, 25 bp, Homo sapien
gtttacaactttatctagaatgccc

SEQ ID NO: 4390624 - DNA, 25 bp, Homo sapien
tgtggcccatgaccccagttagtga

SEQ ID NO: 4390625 - DNA, 25 bp, Homo sapien
taagcagcagcgacaggttaaatct

SEQ ID NO: 4390626 - DNA, 25 bp, Homo sapien
caattgacaatttgactgtggcagc

SEQ ID NO: 4390627 - DNA, 25 bp, Homo sapien
ggttaaatctcatttcacaggtgcc

SEQ ID NO: 4390628 - DNA, 25 bp, Homo sapien
tcagcaataggagatatagaagttt

SEQ ID NO: 4390629 - DNA, 25 bp, Homo sapien
gatgagggtttgcaccgttcctaaa

SEQ ID NO: 4390630 - DNA, 25 bp, Homo sapien
ggcatcctccagtacagaatgtcag

SEQ ID NO: 4390631 - DNA, 25 bp, Homo sapien
cgttcctaaatttgccttgacagtt

SEQ ID NO: 4390632 - DNA, 25 bp, Homo sapien
caaatgtcatattcaagttttccta

SEQ ID NO: 4390633 - DNA, 25 bp, Homo sapien
tcaaaaccccatcatattcttactg

SEQ ID NO: 4390634 - DNA, 25 bp, Homo sapien
caggtgtataattctaatgttagct

SEQ ID NO: 4390635 - DNA, 25 bp, Homo sapien
aattgtgcagactacttaaaaagac

SEQ ID NO: 4390636 - DNA, 25 bp, Homo sapien
tggatcctaagcatccttttatgaa

SEQ ID NO: 4390637 - DNA, 25 bp, Homo sapien
ttaagcagtgctttgggaaaaggcc

SEQ ID NO: 4390638 - DNA, 25 bp, Homo sapien
gaatcctgtagtatgttggatccta

SEQ ID NO: 4390639 - DNA, 25 bp, Homo sapien
aaaggccaatcctagttcattttat

SEQ ID NO: 4390640 - DNA, 25 bp, Homo sapien
gagccttgaggtgctagtactaaaa

SEQ ID NO: 4390641 - DNA, 25 bp, Homo sapien
tctgggtagtaagaggtatcccacc

SEQ ID NO: 4390642 - DNA, 25 bp, Homo sapien
aatgtatagcgaaaacccacctgga

SEQ ID NO: 4390643 - DNA, 25 bp, Homo sapien
ctggacctacagctaaaaggcaggc

SEQ ID NO: 4390644 - DNA, 25 bp, Homo sapien
gccaagctttatgagaatacagcag

SEQ ID NO: 4390645 - DNA, 25 bp, Homo sapien
ccaagctttatgagaatacagcaga

SEQ ID NO: 4390646 - DNA, 25 bp, Homo sapien
tctgagagtcatctcactttgaaag

SEQ ID NO: 4390647 - DNA, 25 bp, Homo sapien
gaatctgagagtcatctcactttga

SEQ ID NO: 4390648 - DNA, 25 bp, Homo sapien
aatctgagagtcatctcactttgaa

SEQ ID NO: 4390649 - DNA, 25 bp, Homo sapien
atctgagagtcatctcactttgaaa

SEQ ID NO: 4390650 - DNA, 25 bp, Homo sapien
ggtggtcaagccagaatttttctaa

SEQ ID NO: 4390651 - DNA, 25 bp, Homo sapien
gacagttgttgccaaggtctatact

SEQ ID NO: 4390652 - DNA, 25 bp, Homo sapien
tacatagggagtaggtggtcaagcc

SEQ ID NO: 4390653 - DNA, 25 bp, Homo sapien
caattcttcacactaatctagacag

SEQ ID NO: 4390654 - DNA, 25 bp, Homo sapien
taacttctggtaagccaacttgagc

SEQ ID NO: 4390655 - DNA, 25 bp, Homo sapien
tgtaacttctggtaagccaacttga

SEQ ID NO: 4390656 - DNA, 25 bp, Homo sapien
gtaacttctggtaagccaacttgag

SEQ ID NO: 4390657 - DNA, 25 bp, Homo sapien
cagtcacaggagaccacatatcata

SEQ ID NO: 4390658 - DNA, 25 bp, Homo sapien
tcacaggagaccacatatcatatga

SEQ ID NO: 4390659 - DNA, 25 bp, Homo sapien
gtcacaggagaccacatatcatatg

SEQ ID NO: 4390660 - DNA, 25 bp, Homo sapien
gccagtcacaggagaccacatatca

SEQ ID NO: 4390661 - DNA, 25 bp, Homo sapien
cactatatagagccttggttgttac

SEQ ID NO: 4390662 - DNA, 25 bp, Homo sapien
agccactatatagagccttggttgt

SEQ ID NO: 4390663 - DNA, 25 bp, Homo sapien
gccactatatagagccttggttgtt

SEQ ID NO: 4390664 - DNA, 25 bp, Homo sapien
cagccactatatagagccttggttg

SEQ ID NO: 4390665 - DNA, 25 bp, Homo sapien
ctctgcgtgggcaatcctatagtga

SEQ ID NO: 4390666 - DNA, 25 bp, Homo sapien
aagccatgccttggattgctgccac

SEQ ID NO: 4390667 - DNA, 25 bp, Homo sapien
ccctccgaaagccatgccttggatt

SEQ ID NO: 4390668 - DNA, 25 bp, Homo sapien
gcaatcctatagtgacagcccaggg

SEQ ID NO: 4390669 - DNA, 25 bp, Homo sapien
taggagcactgaagccacgaatatc

SEQ ID NO: 4390670 - DNA, 25 bp, Homo sapien
gcactgaagccacgaatatcagcac

SEQ ID NO: 4390671 - DNA, 25 bp, Homo sapien
tgtcccagtgtaaggccaaatgtcc

SEQ ID NO: 4390672 - DNA, 25 bp, Homo sapien
ggccaaatgtcctaggagcactgaa

SEQ ID NO: 4390673 - DNA, 25 bp, Homo sapien
aaataagagttgcatgtccttctgc

SEQ ID NO: 4390674 - DNA, 25 bp, Homo sapien
ggtttagccacatatccacaacacg

SEQ ID NO: 4390675 - DNA, 25 bp, Homo sapien
cagccactagccaaagaacttggca

SEQ ID NO: 4390676 - DNA, 25 bp, Homo sapien
gtagtctatacatatgtcaacagct

SEQ ID NO: 4390677 - DNA, 25 bp, Homo sapien
gtggaggttgcataacgaatttctt

SEQ ID NO: 4390678 - DNA, 25 bp, Homo sapien
tgtggaggttgcataacgaatttct

SEQ ID NO: 4390679 - DNA, 25 bp, Homo sapien
tggaggttgcataacgaatttcttt

SEQ ID NO: 4390680 - DNA, 25 bp, Homo sapien
ctgtggaggttgcataacgaatttc

SEQ ID NO: 4390681 - DNA, 25 bp, Homo sapien
aagcagggcctgtctgattactgaa

SEQ ID NO: 4390682 - DNA, 25 bp, Homo sapien
gctatcttcatcttctagagcttca

SEQ ID NO: 4390683 - DNA, 25 bp, Homo sapien
ggcctgtctgattactgaatgagat

SEQ ID NO: 4390684 - DNA, 25 bp, Homo sapien
agataccatcatcttttttgctatc

SEQ ID NO: 4390685 - DNA, 25 bp, Homo sapien
tagttcatcctcatctgggaacttg

SEQ ID NO: 4390686 - DNA, 25 bp, Homo sapien
agtagttcatcctcatctgggaact

SEQ ID NO: 4390687 - DNA, 25 bp, Homo sapien
gttcatcctcatctgggaacttgac

SEQ ID NO: 4390688 - DNA, 25 bp, Homo sapien
ctagtagttcatcctcatctgggaa

SEQ ID NO: 4390689 - DNA, 25 bp, Homo sapien
caatcttaagatcctttacaacttc

SEQ ID NO: 4390690 - DNA, 25 bp, Homo sapien
taagatcctttacaacttcttcagc

SEQ ID NO: 4390691 - DNA, 25 bp, Homo sapien
gctggttcttgaacatcactttcaa

SEQ ID NO: 4390692 - DNA, 25 bp, Homo sapien
ttttattccaagcataatgtcaagg

SEQ ID NO: 4390693 - DNA, 25 bp, Homo sapien
tagatcatcagaagcatcgtttttc

SEQ ID NO: 4390694 - DNA, 25 bp, Homo sapien
ctagatcatcagaagcatcgttttt

SEQ ID NO: 4390695 - DNA, 25 bp, Homo sapien
gatcatcagaagcatcgtttttcct

SEQ ID NO: 4390696 - DNA, 25 bp, Homo sapien
tcatcagaagcatcgtttttcctac

SEQ ID NO: 4390697 - DNA, 25 bp, Homo sapien
tgcgtttcctgtttgagtatcccct

SEQ ID NO: 4390698 - DNA, 25 bp, Homo sapien
gagggctgcgtttcctgtttgagta

SEQ ID NO: 4390699 - DNA, 25 bp, Homo sapien
tcctgtttgagtatccccttcctca

SEQ ID NO: 4390700 - DNA, 25 bp, Homo sapien
tgtttctgagggctgcgtttcctgt

SEQ ID NO: 4390701 - DNA, 25 bp, Homo sapien
tatcagcaggtgtataacagccatc

SEQ ID NO: 4390702 - DNA, 25 bp, Homo sapien
tatggtggagatacatgcaatgcag

SEQ ID NO: 4390703 - DNA, 25 bp, Homo sapien
gagatttgcccaagcccacatatgg

SEQ ID NO: 4390704 - DNA, 25 bp, Homo sapien
cacagctaatgcagtattggtctca

SEQ ID NO: 4390705 - DNA, 25 bp, Homo sapien
tctgtagtccttcttttatgtcacg

SEQ ID NO: 4390706 - DNA, 25 bp, Homo sapien
ggtctattacagctttctgtagtcc

SEQ ID NO: 4390707 - DNA, 25 bp, Homo sapien
tgctccacaaatcacaatggctttt

SEQ ID NO: 4390708 - DNA, 25 bp, Homo sapien
ttttatgtcacggagtaaagtcgta

SEQ ID NO: 4390709 - DNA, 25 bp, Homo sapien
gagtcatagcaatgtaaaggccgca

SEQ ID NO: 4390710 - DNA, 25 bp, Homo sapien
catgtcctatacttataaagagggc

SEQ ID NO: 4390711 - DNA, 25 bp, Homo sapien
cagtaaagcaatcgtgtgaaagcca

SEQ ID NO: 4390712 - DNA, 25 bp, Homo sapien
gcaaacatggctggctaaactagca

SEQ ID NO: 4390713 - DNA, 25 bp, Homo sapien
gcgggtttcggaggcggattagcgc

SEQ ID NO: 4390714 - DNA, 25 bp, Homo sapien
gccaaggcgttgtgcagccgcgtat

SEQ ID NO: 4390715 - DNA, 25 bp, Homo sapien
ctgatcgcgttgaccggcgggtttc

SEQ ID NO: 4390716 - DNA, 25 bp, Homo sapien
cggattagcgccaaggcgttgtgca

SEQ ID NO: 4390717 - DNA, 25 bp, Homo sapien
tatgccgcccctacatgggggatga

SEQ ID NO: 4390718 - DNA, 25 bp, Homo sapien
ccattgtggagcaggtatgccgccc

SEQ ID NO: 4390719 - DNA, 25 bp, Homo sapien
catgcagggtgagggtcaagtagat

SEQ ID NO: 4390720 - DNA, 25 bp, Homo sapien
tgagggtcaagtagatggagtggag

SEQ ID NO: 4390721 - DNA, 25 bp, Homo sapien
ccgtggtgtgggtaatgcagggctg

SEQ ID NO: 4390722 - DNA, 25 bp, Homo sapien
cagaggccgtggtgtgggtaatgca

SEQ ID NO: 4390723 - DNA, 25 bp, Homo sapien
gccgtggtgtgggtaatgcagggct

SEQ ID NO: 4390724 - DNA, 25 bp, Homo sapien
tggtgtgggtaatgcagggctgtct

SEQ ID NO: 4390725 - DNA, 25 bp, Homo sapien
ggatttgctggacctgaatagcagt

SEQ ID NO: 4390726 - DNA, 25 bp, Homo sapien
caatctggaatactcaatctgtgac

SEQ ID NO: 4390727 - DNA, 25 bp, Homo sapien
gctgaggatttgctggacctgaata

SEQ ID NO: 4390728 - DNA, 25 bp, Homo sapien
tgaatagcagttcaactacttcctc

SEQ ID NO: 4390729 - DNA, 25 bp, Homo sapien
ggttgactaagtgattgcctctaaa

SEQ ID NO: 4390730 - DNA, 25 bp, Homo sapien
caagaggttgactaagtgattgcct

SEQ ID NO: 4390731 - DNA, 25 bp, Homo sapien
gaggttgactaagtgattgcctcta

SEQ ID NO: 4390732 - DNA, 25 bp, Homo sapien
agcaagaggttgactaagtgattgc

SEQ ID NO: 4390733 - DNA, 25 bp, Homo sapien
gcacgggaggcggtacctggttgtg

SEQ ID NO: 4390734 - DNA, 25 bp, Homo sapien
cacgggaggcggtacctggttgtgg

SEQ ID NO: 4390735 - DNA, 25 bp, Homo sapien
cgggaggcggtacctggttgtggag

SEQ ID NO: 4390736 - DNA, 25 bp, Homo sapien
gttcccgatttctggaaagtgccca

SEQ ID NO: 4390737 - DNA, 25 bp, Homo sapien
ttcccgatttctggaaagtgcccag

SEQ ID NO: 4390738 - DNA, 25 bp, Homo sapien
tgtgttcccgatttctggaaagtgc

SEQ ID NO: 4390739 - DNA, 25 bp, Homo sapien
ccttgtgttcccgatttctggaaag

SEQ ID NO: 4390740 - DNA, 25 bp, Homo sapien
ctgctgttcaatgtgatgtccacta

SEQ ID NO: 4390741 - DNA, 25 bp, Homo sapien
attttggacatctaaatgtctgtgt

SEQ ID NO: 4390742 - DNA, 25 bp, Homo sapien
tttggacatctaaatgtctgtgtag

SEQ ID NO: 4390743 - DNA, 25 bp, Homo sapien
tgtgatgtccactaaattttggaca

SEQ ID NO: 4390744 - DNA, 25 bp, Homo sapien
actggcttaaggcatttcgaagaat

SEQ ID NO: 4390745 - DNA, 25 bp, Homo sapien
ttgatgtttagaactggcttaaggc

SEQ ID NO: 4390746 - DNA, 25 bp, Homo sapien
tcttgatgtttagaactggcttaag

SEQ ID NO: 4390747 - DNA, 25 bp, Homo sapien
ggcttaaggcatttcgaagaatagc

SEQ ID NO: 4390748 - DNA, 25 bp, Homo sapien
tatcatgggctaattctaagaagga

SEQ ID NO: 4390749 - DNA, 25 bp, Homo sapien
tccaggttggatacatggcaacaag

SEQ ID NO: 4390750 - DNA, 25 bp, Homo sapien
tgagtccctaaaatactatcatggg

SEQ ID NO: 4390751 - DNA, 25 bp, Homo sapien
tccctcagattttgggcctaggaag

SEQ ID NO: 4390752 - DNA, 25 bp, Homo sapien
taacgtgttatctgtcccagaggat

SEQ ID NO: 4390753 - DNA, 25 bp, Homo sapien
ctgtacgtctgttaataccaattgg

SEQ ID NO: 4390754 - DNA, 25 bp, Homo sapien
gaggatgttccatatgcccttgaga

SEQ ID NO: 4390755 - DNA, 25 bp, Homo sapien
taccaattggtctgtagggttgtat

SEQ ID NO: 4390756 - DNA, 25 bp, Homo sapien
taacttctccaagtcaatagcttct

SEQ ID NO: 4390757 - DNA, 25 bp, Homo sapien
ctcttgagctgattaacttctccaa

SEQ ID NO: 4390758 - DNA, 25 bp, Homo sapien
cctcatttacttgttggttgaggag

SEQ ID NO: 4390759 - DNA, 25 bp, Homo sapien
ccaagtcaatagcttctgctgggcc

SEQ ID NO: 4390760 - DNA, 25 bp, Homo sapien
tgtaagtacatagagagtgtcctca

SEQ ID NO: 4390761 - DNA, 25 bp, Homo sapien
tagtgcctgcttgacatgtagtaga

SEQ ID NO: 4390762 - DNA, 25 bp, Homo sapien
agggccatattgtcagtgcctagga

SEQ ID NO: 4390763 - DNA, 25 bp, Homo sapien
gctgcctactaatccattgtacgga

SEQ ID NO: 4390764 - DNA, 25 bp, Homo sapien
ggctattgcgaataaggcctctgtg

SEQ ID NO: 4390765 - DNA, 25 bp, Homo sapien
tagtctagtagtcgtacatacaggt

SEQ ID NO: 4390766 - DNA, 25 bp, Homo sapien
tgtcctcaaggcttatccgtgatgt

SEQ ID NO: 4390767 - DNA, 25 bp, Homo sapien
tatggaataagactacctgggtttg

SEQ ID NO: 4390768 - DNA, 25 bp, Homo sapien
cacaggttagagtcaacataaaaat

SEQ ID NO: 4390769 - DNA, 25 bp, Homo sapien
ataaaaatcatactagaaacaacag

SEQ ID NO: 4390770 - DNA, 25 bp, Homo sapien
aaatcatactagaaacaacagctaa

SEQ ID NO: 4390771 - DNA, 25 bp, Homo sapien
caggttagagtcaacataaaaatca

SEQ ID NO: 4390772 - DNA, 25 bp, Homo sapien
gagtagaggccaaacttcaccttaa

SEQ ID NO: 4390773 - DNA, 25 bp, Homo sapien
ggaatatgagttgtcacataagaag

SEQ ID NO: 4390774 - DNA, 25 bp, Homo sapien
caccttaaccagaatttgacccaag

SEQ ID NO: 4390775 - DNA, 25 bp, Homo sapien
gaagttttatggaatatgagttgtc

SEQ ID NO: 4390776 - DNA, 25 bp, Homo sapien
agcaatggccagtcgcagcggctca

SEQ ID NO: 4390777 - DNA, 25 bp, Homo sapien
gacacaatagctcccaagtatctag

SEQ ID NO: 4390778 - DNA, 25 bp, Homo sapien
gaaacaagctcatcaaggaaagacc

SEQ ID NO: 4390779 - DNA, 25 bp, Homo sapien
aaagggctgcctgtataaactatta

SEQ ID NO: 4390780 - DNA, 25 bp, Homo sapien
tttgttcttgtcatatttgtctcca

SEQ ID NO: 4390781 - DNA, 25 bp, Homo sapien
tgttcttgtcatatttgtctccagg

SEQ ID NO: 4390782 - DNA, 25 bp, Homo sapien
ttcttgtcatatttgtctccagggg

SEQ ID NO: 4390783 - DNA, 25 bp, Homo sapien
ctttgttcttgtcatatttgtctcc

SEQ ID NO: 4390784 - DNA, 25 bp, Homo sapien
ttcaaaccggggcaacggcaatcca

SEQ ID NO: 4390785 - DNA, 25 bp, Homo sapien
agcctaacctgtaggcttcaaaccg

SEQ ID NO: 4390786 - DNA, 25 bp, Homo sapien
tcacccggtagcctaacctgtaggc

SEQ ID NO: 4390787 - DNA, 25 bp, Homo sapien
gagcatcacccggtagcctaacctg

SEQ ID NO: 4390788 - DNA, 25 bp, Homo sapien
aagctccttgatacttagaaactgg

SEQ ID NO: 4390789 - DNA, 25 bp, Homo sapien
ccttgatacttagaaactggctttt

SEQ ID NO: 4390790 - DNA, 25 bp, Homo sapien
gctccttgatacttagaaactggct

SEQ ID NO: 4390791 - DNA, 25 bp, Homo sapien
caaagctccttgatacttagaaact

SEQ ID NO: 4390792 - DNA, 25 bp, Homo sapien
taatggctttgcagtcctccacact

SEQ ID NO: 4390793 - DNA, 25 bp, Homo sapien
gataatggctttgcagtcctccaca

SEQ ID NO: 4390794 - DNA, 25 bp, Homo sapien
cttgataatggctttgcagtcctcc

SEQ ID NO: 4390795 - DNA, 25 bp, Homo sapien
agtcctccacacttagtatgcccat

SEQ ID NO: 4390796 - DNA, 25 bp, Homo sapien
tattgttcccatgcgttcttcccga

SEQ ID NO: 4390797 - DNA, 25 bp, Homo sapien
gcagggcatacatgtccactagtct

SEQ ID NO: 4390798 - DNA, 25 bp, Homo sapien
tgatttgttttgatcgcatcaggca

SEQ ID NO: 4390799 - DNA, 25 bp, Homo sapien
tttacaagtcgtggtgagcagggca

SEQ ID NO: 4390800 - DNA, 25 bp, Homo sapien
gcttgtctgcctgctagacgtggac

SEQ ID NO: 4390801 - DNA, 25 bp, Homo sapien
ccgttacagctaggagcctctgaaa

SEQ ID NO: 4390802 - DNA, 25 bp, Homo sapien
gaacagcatgtgtaggaattcttcg

SEQ ID NO: 4390803 - DNA, 25 bp, Homo sapien
tgatattattgagggcgacaccgtg

SEQ ID NO: 4390804 - DNA, 25 bp, Homo sapien
ttggctttccttaaagggagattca

SEQ ID NO: 4390805 - DNA, 25 bp, Homo sapien
tggctttccttaaagggagattcat

SEQ ID NO: 4390806 - DNA, 25 bp, Homo sapien
tgcttggctttccttaaagggagat

SEQ ID NO: 4390807 - DNA, 25 bp, Homo sapien
ctgagagatgatgtggatggtatta

SEQ ID NO: 4390808 - DNA, 25 bp, Homo sapien
gatgatgtggatggtattagcagaa

SEQ ID NO: 4390809 - DNA, 25 bp, Homo sapien
tggatggtattagcagaaaagccca

SEQ ID NO: 4390810 - DNA, 25 bp, Homo sapien
gatgtggatggtattagcagaaaag

SEQ ID NO: 4390811 - DNA, 25 bp, Homo sapien
gcctttgtttcatattgtgtaacag

SEQ ID NO: 4390812 - DNA, 25 bp, Homo sapien
cagtatcttgcgattgcaatttggt

SEQ ID NO: 4390813 - DNA, 25 bp, Homo sapien
gaatacttgttcaaccatttttcaa

SEQ ID NO: 4390814 - DNA, 25 bp, Homo sapien
ggtgaagatgaatacttgttcaacc

SEQ ID NO: 4390815 - DNA, 25 bp, Homo sapien
gttgtttggcttcattggactctga

SEQ ID NO: 4390816 - DNA, 25 bp, Homo sapien
cctgggcgctgtgttgtttggcttc

SEQ ID NO: 4390817 - DNA, 25 bp, Homo sapien
ttggcttcattggactctgagtgtg

SEQ ID NO: 4390818 - DNA, 25 bp, Homo sapien
atcctgggcgctgtgttgtttggct

SEQ ID NO: 4390819 - DNA, 25 bp, Homo sapien
tgccattaacattatctgcagcagt

SEQ ID NO: 4390820 - DNA, 25 bp, Homo sapien
tgccactaccactgccattaacatt

SEQ ID NO: 4390821 - DNA, 25 bp, Homo sapien
taccactgccattaacattatctgc

SEQ ID NO: 4390822 - DNA, 25 bp, Homo sapien
actgccattaacattatctgcagca

SEQ ID NO: 4390823 - DNA, 25 bp, Homo sapien
ccttagaattgcagactggaggcca

SEQ ID NO: 4390824 - DNA, 25 bp, Homo sapien
ggcatcatcagaaggcgtctaccaa

SEQ ID NO: 4390825 - DNA, 25 bp, Homo sapien
tattacagtcctagggcaaccttgc

SEQ ID NO: 4390826 - DNA, 25 bp, Homo sapien
tgagatgattcaaggagcgtgtgtc

SEQ ID NO: 4390827 - DNA, 25 bp, Homo sapien
tccaaaatgatttgacctttatgga

SEQ ID NO: 4390828 - DNA, 25 bp, Homo sapien
tgatttgacctttatggaataatca

SEQ ID NO: 4390829 - DNA, 25 bp, Homo sapien
aaatgatttgacctttatggaataa

SEQ ID NO: 4390830 - DNA, 25 bp, Homo sapien
gatttgacctttatggaataatcaa

SEQ ID NO: 4390831 - DNA, 25 bp, Homo sapien
tgcttcttaacaccaacagcagcct

SEQ ID NO: 4390832 - DNA, 25 bp, Homo sapien
ctctgtagtaggtttcttttctgca

SEQ ID NO: 4390833 - DNA, 25 bp, Homo sapien
ttctgcttcttaacaccaacagcag

SEQ ID NO: 4390834 - DNA, 25 bp, Homo sapien
gtagtaggtttcttttctgcaggct

SEQ ID NO: 4390835 - DNA, 25 bp, Homo sapien
ttcatctgatttggctggtagtgct

SEQ ID NO: 4390836 - DNA, 25 bp, Homo sapien
tccacccggagcttgtgattcctgg

SEQ ID NO: 4390837 - DNA, 25 bp, Homo sapien
cttatccacccggagcttgtgattc

SEQ ID NO: 4390838 - DNA, 25 bp, Homo sapien
ccacccggagcttgtgattcctggc

SEQ ID NO: 4390839 - DNA, 25 bp, Homo sapien
tatccacccggagcttgtgattcct

SEQ ID NO: 4390840 - DNA, 25 bp, Homo sapien
ggcgaagaatggtgttccggcgcat

SEQ ID NO: 4390841 - DNA, 25 bp, Homo sapien
ctggcgaagaatggtgttccggcgc

SEQ ID NO: 4390842 - DNA, 25 bp, Homo sapien
tggcgaagaatggtgttccggcgca

SEQ ID NO: 4390843 - DNA, 25 bp, Homo sapien
ttgcatatgggtttagcttcaacat

SEQ ID NO: 4390844 - DNA, 25 bp, Homo sapien
ctttgcatatgggtttagcttcaac

SEQ ID NO: 4390845 - DNA, 25 bp, Homo sapien
ggtctttgcatatgggtttagcttc

SEQ ID NO: 4390846 - DNA, 25 bp, Homo sapien
gtctttgcatatgggtttagcttca

SEQ ID NO: 4390847 - DNA, 25 bp, Homo sapien
actctgcgatgaatcttcttgcgtg

SEQ ID NO: 4390848 - DNA, 25 bp, Homo sapien
ggactctgcgatgaatcttcttgcg

SEQ ID NO: 4390849 - DNA, 25 bp, Homo sapien
tgcgatgaatcttcttgcgtggtgc

SEQ ID NO: 4390850 - DNA, 25 bp, Homo sapien
tctgcgatgaatcttcttgcgtggt

SEQ ID NO: 4390851 - DNA, 25 bp, Homo sapien
ggctttacgccaagtgccatacaat

SEQ ID NO: 4390852 - DNA, 25 bp, Homo sapien
gctaagatctgtattaatcaacttg

SEQ ID NO: 4390853 - DNA, 25 bp, Homo sapien
gatctgtattaatcaacttgtgcat

SEQ ID NO: 4390854 - DNA, 25 bp, Homo sapien
gaagcggctttacgccaagtgccat

SEQ ID NO: 4390855 - DNA, 25 bp, Homo sapien
aggagcaagcttcaaaatgttcagc

SEQ ID NO: 4390856 - DNA, 25 bp, Homo sapien
aatgcagaaacgtcccacatgccca

SEQ ID NO: 4390857 - DNA, 25 bp, Homo sapien
gcttcaaaatgttcagcttgcttac

SEQ ID NO: 4390858 - DNA, 25 bp, Homo sapien
ccaaatgcagaaacgtcccacatgc

SEQ ID NO: 4390859 - DNA, 25 bp, Homo sapien
gtgttcactctacgatgccaacggc

SEQ ID NO: 4390860 - DNA, 25 bp, Homo sapien
ctgcgctggatacggcgacggtttc

SEQ ID NO: 4390861 - DNA, 25 bp, Homo sapien
ctacgatgccaacggcgccaggttt

SEQ ID NO: 4390862 - DNA, 25 bp, Homo sapien
cccctgcgctggatacggcgacggt

SEQ ID NO: 4390863 - DNA, 25 bp, Homo sapien
aacaaagttcacaatatctggtcga

SEQ ID NO: 4390864 - DNA, 25 bp, Homo sapien
tcacaatatctggtcgaataggagc

SEQ ID NO: 4390865 - DNA, 25 bp, Homo sapien
ctgttgtttttgcgcaagttggtgt

SEQ ID NO: 4390866 - DNA, 25 bp, Homo sapien
tgtttttgcgcaagttggtgtgaac

SEQ ID NO: 4390867 - DNA, 25 bp, Homo sapien
gagtacaccgatatcattgggcgag

SEQ ID NO: 4390868 - DNA, 25 bp, Homo sapien
accgatatcattgggcgagcacacg

SEQ ID NO: 4390869 - DNA, 25 bp, Homo sapien
tttcggagtacaccgatatcattgg

SEQ ID NO: 4390870 - DNA, 25 bp, Homo sapien
ccttttcggagtacaccgatatcat

SEQ ID NO: 4390871 - DNA, 25 bp, Homo sapien
gagagaggagacagccacgctcctc

SEQ ID NO: 4390872 - DNA, 25 bp, Homo sapien
cacgctcctctcagcccggctgctg

SEQ ID NO: 4390873 - DNA, 25 bp, Homo sapien
cggagagaggagacagccacgctcc

SEQ ID NO: 4390874 - DNA, 25 bp, Homo sapien
gaggagacagccacgctcctctcag

SEQ ID NO: 4390875 - DNA, 25 bp, Homo sapien
gagcagtcagtgggtagcctcctgc

SEQ ID NO: 4390876 - DNA, 25 bp, Homo sapien
gagagcagtcagtgggtagcctcct

SEQ ID NO: 4390877 - DNA, 25 bp, Homo sapien
agcagtcagtgggtagcctcctgct

SEQ ID NO: 4390878 - DNA, 25 bp, Homo sapien
agagcagtcagtgggtagcctcctg

SEQ ID NO: 4390879 - DNA, 25 bp, Homo sapien
tctctaaaacaatagggaggtctct

SEQ ID NO: 4390880 - DNA, 25 bp, Homo sapien
aaaatccttatgaaacagacgtggt

SEQ ID NO: 4390881 - DNA, 25 bp, Homo sapien
ttctgtccatgttcccggcgctact

SEQ ID NO: 4390882 - DNA, 25 bp, Homo sapien
gagctgctgacaggagagatccctt

SEQ ID NO: 4390883 - DNA, 25 bp, Homo sapien
cattgttggatagatttgctgcctg

SEQ ID NO: 4390884 - DNA, 25 bp, Homo sapien
gcttagatgctgtcaaaggccccta

SEQ ID NO: 4390885 - DNA, 25 bp, Homo sapien
ggcccctatcaaacaatgcagtagt

SEQ ID NO: 4390886 - DNA, 25 bp, Homo sapien
ccagtgttcaacctatatgtgggaa

SEQ ID NO: 4390887 - DNA, 25 bp, Homo sapien
gacagtccaatgattacctagtgag

SEQ ID NO: 4390888 - DNA, 25 bp, Homo sapien
cgtttcagatgatttggacagtcca

SEQ ID NO: 4390889 - DNA, 25 bp, Homo sapien
ggcaacctgcaaagagctgtactgt

SEQ ID NO: 4390890 - DNA, 25 bp, Homo sapien
tgtcagctgattgtcccttgaagga

SEQ ID NO: 4390891 - DNA, 25 bp, Homo sapien
tacgggtctttaggccatagaacac

SEQ ID NO: 4390892 - DNA, 25 bp, Homo sapien
ggtcctcctagggtaaactgctcat

SEQ ID NO: 4390893 - DNA, 25 bp, Homo sapien
catgccattgtgataccatctacgg

SEQ ID NO: 4390894 - DNA, 25 bp, Homo sapien
tcagcagtcaggataacttcatctc

SEQ ID NO: 4390895 - DNA, 25 bp, Homo sapien
tatctccccagaagcgttggctcat

SEQ ID NO: 4390896 - DNA, 25 bp, Homo sapien
tactaactagctgggcagtacccac

SEQ ID NO: 4390897 - DNA, 25 bp, Homo sapien
tcatggtgtggccttaaacaagtca

SEQ ID NO: 4390898 - DNA, 25 bp, Homo sapien
actgatcaaagtgtgtgtagaccca

SEQ ID NO: 4390899 - DNA, 25 bp, Homo sapien
ccgtgcgccgtgtgaagactcagat

SEQ ID NO: 4390900 - DNA, 25 bp, Homo sapien
taaacttgaagaccgcttggcagag

SEQ ID NO: 4390901 - DNA, 25 bp, Homo sapien
tcacactcggatgggctctctgaca

SEQ ID NO: 4390902 - DNA, 25 bp, Homo sapien
gttctaggccccatcgctgtatcag

SEQ ID NO: 4390903 - DNA, 25 bp, Homo sapien
gcaggaggatcactttagggtcagg

SEQ ID NO: 4390904 - DNA, 25 bp, Homo sapien
agttcaagatcagtctgagcaacat

SEQ ID NO: 4390905 - DNA, 25 bp, Homo sapien
ttcaagatcagtctgagcaacatag

SEQ ID NO: 4390906 - DNA, 25 bp, Homo sapien
caagatcagtctgagcaacatagca

SEQ ID NO: 4390907 - DNA, 25 bp, Homo sapien
caggcaacttgtgaacagaccatat

SEQ ID NO: 4390908 - DNA, 25 bp, Homo sapien
tccaggtggcttacggaaatgacct

SEQ ID NO: 4390909 - DNA, 25 bp, Homo sapien
gaccaggtcttttggccataagtga

SEQ ID NO: 4390910 - DNA, 25 bp, Homo sapien
ccataagtgactaaagaagagccag

SEQ ID NO: 4390911 - DNA, 25 bp, Homo sapien
gatagtgtcaaatcttgtttttggc

SEQ ID NO: 4390912 - DNA, 25 bp, Homo sapien
gttggtagtgaggtttacagatagt

SEQ ID NO: 4390913 - DNA, 25 bp, Homo sapien
ggtttacagatagtgtcaaatcttg

SEQ ID NO: 4390914 - DNA, 25 bp, Homo sapien
tggcaaatacgtccctttttagtgc

SEQ ID NO: 4390915 - DNA, 25 bp, Homo sapien
tgttgatctttcatactcaagtgcc

SEQ ID NO: 4390916 - DNA, 25 bp, Homo sapien
gacccaacgtgttgatctttcatac

SEQ ID NO: 4390917 - DNA, 25 bp, Homo sapien
tgatctttcatactcaagtgccatt

SEQ ID NO: 4390918 - DNA, 25 bp, Homo sapien
tgtgctaccttgacccaacgtgttg

SEQ ID NO: 4390919 - DNA, 25 bp, Homo sapien
cagttcagctacgaggagaagatgg

SEQ ID NO: 4390920 - DNA, 25 bp, Homo sapien
cagtggtgttaggaaaacgaacgtg

SEQ ID NO: 4390921 - DNA, 25 bp, Homo sapien
aaactccattctcaggatcactcag

SEQ ID NO: 4390922 - DNA, 25 bp, Homo sapien
gaagaacatctacagtggtgttagg

SEQ ID NO: 4390923 - DNA, 25 bp, Homo sapien
gaagtcttaatgactggctaccact

SEQ ID NO: 4390924 - DNA, 25 bp, Homo sapien
ttgcaaaaggcaactcctctcccag

SEQ ID NO: 4390925 - DNA, 25 bp, Homo sapien
tgcccggcctatcttagaagtctta

SEQ ID NO: 4390926 - DNA, 25 bp, Homo sapien
tggaaagaacaagggatgctgagca

SEQ ID NO: 4390927 - DNA, 25 bp, Homo sapien
gacctagagggtttccgcacagggc

SEQ ID NO: 4390928 - DNA, 25 bp, Homo sapien
aatcatctgaggacgcatgttctgc

SEQ ID NO: 4390929 - DNA, 25 bp, Homo sapien
tagcagtctcggtgatcagatcgac

SEQ ID NO: 4390930 - DNA, 25 bp, Homo sapien
cacagggctcatggattcgtttcaa

SEQ ID NO: 4390931 - DNA, 25 bp, Homo sapien
tcagtgatggtcttcctagaaaacc

SEQ ID NO: 4390932 - DNA, 25 bp, Homo sapien
tatgctattgtcatcatacacctta

SEQ ID NO: 4390933 - DNA, 25 bp, Homo sapien
tacccctgatacctcgtaattttga

SEQ ID NO: 4390934 - DNA, 25 bp, Homo sapien
tcatcatacaccttatgtggattaa

SEQ ID NO: 4390935 - DNA, 25 bp, Homo sapien
tgcaaaagcctattcaagtcggact

SEQ ID NO: 4390936 - DNA, 25 bp, Homo sapien
gagcttgagttagccccaatggcag

SEQ ID NO: 4390937 - DNA, 25 bp, Homo sapien
aagtcggactgaactaggctaagca

SEQ ID NO: 4390938 - DNA, 25 bp, Homo sapien
tagcacttggagcaacaattgccgc

SEQ ID NO: 4390939 - DNA, 25 bp, Homo sapien
cagagcagagccctaagcagatggc

SEQ ID NO: 4390940 - DNA, 25 bp, Homo sapien
ccagggtacgatggcaggacttcac

SEQ ID NO: 4390941 - DNA, 25 bp, Homo sapien
aggccactgtaaggaagctcccggc

SEQ ID NO: 4390942 - DNA, 25 bp, Homo sapien
acagcactcagggatcgctggctcc

SEQ ID NO: 4390943 - DNA, 25 bp, Homo sapien
gtaatttgagctcctatcgacttgg

SEQ ID NO: 4390944 - DNA, 25 bp, Homo sapien
gaccctctttgacgctttattacag

SEQ ID NO: 4390945 - DNA, 25 bp, Homo sapien
caagctattaggaagatgtcccatc

SEQ ID NO: 4390946 - DNA, 25 bp, Homo sapien
cccagccagcatgtgcaagctatta

SEQ ID NO: 4390947 - DNA, 25 bp, Homo sapien
tattgaacggcaatgggaacaagaa

SEQ ID NO: 4390948 - DNA, 25 bp, Homo sapien
tctggtctcctgtactgtcagtccc

SEQ ID NO: 4390949 - DNA, 25 bp, Homo sapien
cctctggtctcctgtactgtcagtc

SEQ ID NO: 4390950 - DNA, 25 bp, Homo sapien
ctccctctctgtattgaacggcaat

SEQ ID NO: 4390951 - DNA, 25 bp, Homo sapien
tgtaaaagctagactggcactctgc

SEQ ID NO: 4390952 - DNA, 25 bp, Homo sapien
tgtatttgacacagccacgaaagga

SEQ ID NO: 4390953 - DNA, 25 bp, Homo sapien
tcccactggcaaaggtagttgaaag

SEQ ID NO: 4390954 - DNA, 25 bp, Homo sapien
cagcatttgtcagaacttgagggaa

SEQ ID NO: 4390955 - DNA, 25 bp, Homo sapien
acatccatttatttgggaaattgct

SEQ ID NO: 4390956 - DNA, 25 bp, Homo sapien
tatttgggaaattgcttcacctgta

SEQ ID NO: 4390957 - DNA, 25 bp, Homo sapien
tttatttgggaaattgcttcacctg

SEQ ID NO: 4390958 - DNA, 25 bp, Homo sapien
acacttacatccatttatttgggaa

SEQ ID NO: 4390959 - DNA, 25 bp, Homo sapien
gggagggaggcaactctaaggatcc

SEQ ID NO: 4390960 - DNA, 25 bp, Homo sapien
aaagggcacacacttgcgatgatgt

SEQ ID NO: 4390961 - DNA, 25 bp, Homo sapien
ggcacattattgcaaaactgtcggg

SEQ ID NO: 4390962 - DNA, 25 bp, Homo sapien
gatgatgtggaaaacatgtttctcc

SEQ ID NO: 4390963 - DNA, 25 bp, Homo sapien
tggcaagactcttggccaaaccaaa

SEQ ID NO: 4390964 - DNA, 25 bp, Homo sapien
gggatgcactcttcctatggaacgt

SEQ ID NO: 4390965 - DNA, 25 bp, Homo sapien
tatggaacgtgagtaattcccaaga

SEQ ID NO: 4390966 - DNA, 25 bp, Homo sapien
caagaattcatgtagaacaagaggc

SEQ ID NO: 4390967 - DNA, 25 bp, Homo sapien
ccatccagatgggtaagaatttctc

SEQ ID NO: 4390968 - DNA, 25 bp, Homo sapien
tctcctagcatgacacagaacggat

SEQ ID NO: 4390969 - DNA, 25 bp, Homo sapien
cagaacggattcctgcagaaaggac

SEQ ID NO: 4390970 - DNA, 25 bp, Homo sapien
caggaagtaatgacagctataggcc

SEQ ID NO: 4390971 - DNA, 25 bp, Homo sapien
tggcatgaggcaaatacaacaggct

SEQ ID NO: 4390972 - DNA, 25 bp, Homo sapien
tgtgagcaacacgtggaagtcctag

SEQ ID NO: 4390973 - DNA, 25 bp, Homo sapien
caaaagcagtactctggacaaggac

SEQ ID NO: 4390974 - DNA, 25 bp, Homo sapien
tcaggacatgcgatcataaggaggt

SEQ ID NO: 4390975 - DNA, 25 bp, Homo sapien
gcagtgtctgctacaccagggctgg

SEQ ID NO: 4390976 - DNA, 25 bp, Homo sapien
ggaccacatccattacacaaataag

SEQ ID NO: 4390977 - DNA, 25 bp, Homo sapien
tgtaatacaccttcaagagcagagt

SEQ ID NO: 4390978 - DNA, 25 bp, Homo sapien
tgtccacatcacctatagaaggcaa

SEQ ID NO: 4390979 - DNA, 25 bp, Homo sapien
ctactgtgtatatgattagcagtac

SEQ ID NO: 4390980 - DNA, 25 bp, Homo sapien
tctactgtgtatatgattagcagta

SEQ ID NO: 4390981 - DNA, 25 bp, Homo sapien
ggagaaaagagcatccagagaggtt

SEQ ID NO: 4390982 - DNA, 25 bp, Homo sapien
caggatggaccctgtctgcacacag

SEQ ID NO: 4390983 - DNA, 25 bp, Homo sapien
gttccaggaattaatgccaccatgg

SEQ ID NO: 4390984 - DNA, 25 bp, Homo sapien
agagaggttagggttgacaggatgg

SEQ ID NO: 4390985 - DNA, 25 bp, Homo sapien
aataataattcagaatgtcaccagg

SEQ ID NO: 4390986 - DNA, 25 bp, Homo sapien
aaagcacctgttacaagcagcagca

SEQ ID NO: 4390987 - DNA, 25 bp, Homo sapien
ctcacttcccatatatgcctgtctt

SEQ ID NO: 4390988 - DNA, 25 bp, Homo sapien
gactcttgacccttatacatattaa

SEQ ID NO: 4390989 - DNA, 25 bp, Homo sapien
tgcagaagaatacaagacatcaggg

SEQ ID NO: 4390990 - DNA, 25 bp, Homo sapien
aatgcgtgcagaagaatacaagaca

SEQ ID NO: 4390991 - DNA, 25 bp, Homo sapien
gaatacaagacatcagggagtacag

SEQ ID NO: 4390992 - DNA, 25 bp, Homo sapien
gacatcagggagtacagttagtaaa

SEQ ID NO: 4390993 - DNA, 25 bp, Homo sapien
gccattgttgacaaacagtttttta

SEQ ID NO: 4390994 - DNA, 25 bp, Homo sapien
tggttctgagtacccaacagccaaa

SEQ ID NO: 4390995 - DNA, 25 bp, Homo sapien
gttctgagtacccaacagccaaagt

SEQ ID NO: 4390996 - DNA, 25 bp, Homo sapien
taaagagagaagtgccattgttgac

SEQ ID NO: 4390997 - DNA, 25 bp, Homo sapien
taatcccagtgcctagtgcatacag

SEQ ID NO: 4390998 - DNA, 25 bp, Homo sapien
gactaactacttgcatcacctggaa

SEQ ID NO: 4390999 - DNA, 25 bp, Homo sapien
tctgataaaggtggtccaaggccca

SEQ ID NO: 4391000 - DNA, 25 bp, Homo sapien
tgtttgacctagaagccctgaatcg

SEQ ID NO: 4391001 - DNA, 25 bp, Homo sapien
tgcacgatgggaatgttcagaattg

SEQ ID NO: 4391002 - DNA, 25 bp, Homo sapien
cacgatgggaatgttcagaattggg

SEQ ID NO: 4391003 - DNA, 25 bp, Homo sapien
agaggttcaagaaccagtttggtgt

SEQ ID NO: 4391004 - DNA, 25 bp, Homo sapien
gccgagaggttcaagaaccagtttg

SEQ ID NO: 4391005 - DNA, 25 bp, Homo sapien
tgtgggaaatccctgccactcgctt

SEQ ID NO: 4391006 - DNA, 25 bp, Homo sapien
tcaaggccatgcacgtagcgactgt

SEQ ID NO: 4391007 - DNA, 25 bp, Homo sapien
taaaatagacatgctgaggatcaga

SEQ ID NO: 4391008 - DNA, 25 bp, Homo sapien
taggacctcctgaaacagcgtggaa

SEQ ID NO: 4391009 - DNA, 25 bp, Homo sapien
caaacaaggcaccagctaaaacatt

SEQ ID NO: 4391010 - DNA, 25 bp, Homo sapien
acccaccgaggtcaacacacagcac

SEQ ID NO: 4391011 - DNA, 25 bp, Homo sapien
gtagcagcatgtggcacccaccgag

SEQ ID NO: 4391012 - DNA, 25 bp, Homo sapien
agagcaggtagcagcatgtggcacc

SEQ ID NO: 4391013 - DNA, 25 bp, Homo sapien
gaaaaggctgggaactacacctgcc

SEQ ID NO: 4391014 - DNA, 25 bp, Homo sapien
tggcagctaccaggcacgtcatctt

SEQ ID NO: 4391015 - DNA, 25 bp, Homo sapien
gagattaagtatcctccccaagagc

SEQ ID NO: 4391016 - DNA, 25 bp, Homo sapien
gttccatgttgaccagagctctagc

SEQ ID NO: 4391017 - DNA, 25 bp, Homo sapien
ctgaagagggatcagttcaagacag

SEQ ID NO: 4391018 - DNA, 25 bp, Homo sapien
gcagcctcaaggagtcagcccctga

SEQ ID NO: 4391019 - DNA, 25 bp, Homo sapien
gagggatcagttcaagacagaagac

SEQ ID NO: 4391020 - DNA, 25 bp, Homo sapien
acacagggcagcctcaaggagtcag

SEQ ID NO: 4391021 - DNA, 25 bp, Homo sapien
gaaactgtttgagcaggtccagcct

SEQ ID NO: 4391022 - DNA, 25 bp, Homo sapien
gacaaggaaactgtttgagcaggtc

SEQ ID NO: 4391023 - DNA, 25 bp, Homo sapien
cccctgcctctcttggacatgtttg

SEQ ID NO: 4391024 - DNA, 25 bp, Homo sapien
cctctcttggacatgtttgcttttc

SEQ ID NO: 4391025 - DNA, 25 bp, Homo sapien
agtgtctcccacttcggtgctcaat

SEQ ID NO: 4391026 - DNA, 25 bp, Homo sapien
acttttaatcatccccacacaacaa

SEQ ID NO: 4391027 - DNA, 25 bp, Homo sapien
ctcaatccctccgtaagtgctgagg

SEQ ID NO: 4391028 - DNA, 25 bp, Homo sapien
gtacaaaaggaagctgtcagtgtct

SEQ ID NO: 4391029 - DNA, 25 bp, Homo sapien
ttccggtactctcgaaggacctcag

SEQ ID NO: 4391030 - DNA, 25 bp, Homo sapien
gaacacgtaggcctggtgctccttc

SEQ ID NO: 4391031 - DNA, 25 bp, Homo sapien
ccgcagaagagcaggaacacgtagg

SEQ ID NO: 4391032 - DNA, 25 bp, Homo sapien
cctgtttgtagaggtaggcgccgca

SEQ ID NO: 4391033 - DNA, 25 bp, Homo sapien
taccagacccggattccagtccgat

SEQ ID NO: 4391034 - DNA, 25 bp, Homo sapien
ggaacccgaatctccgaatctccga

SEQ ID NO: 4391035 - DNA, 25 bp, Homo sapien
taagtgaacctcaattcccaacgcc

SEQ ID NO: 4391036 - DNA, 25 bp, Homo sapien
ttctgtccgagaccgtgcggacgcg

SEQ ID NO: 4391037 - DNA, 25 bp, Homo sapien
gggcagtcgcgtcgacagcaagtac

SEQ ID NO: 4391038 - DNA, 25 bp, Homo sapien
caagtacaaggcgaaggtgcagccg

SEQ ID NO: 4391039 - DNA, 25 bp, Homo sapien
gcgtcgacagcaagtacaaggcgaa

SEQ ID NO: 4391040 - DNA, 25 bp, Homo sapien
ccggcgaagaccagaaggaggccga

SEQ ID NO: 4391041 - DNA, 25 bp, Homo sapien
actccgggacgcagcggcgggcgga

SEQ ID NO: 4391042 - DNA, 25 bp, Homo sapien
cgcggggcagccgagaagctcactt

SEQ ID NO: 4391043 - DNA, 25 bp, Homo sapien
gggcagccgagaagctcacttgcac

SEQ ID NO: 4391044 - DNA, 25 bp, Homo sapien
gagaagctcacttgcactccgggac

SEQ ID NO: 4391045 - DNA, 25 bp, Homo sapien
gatttggtggatcacctcttcctgg

SEQ ID NO: 4391046 - DNA, 25 bp, Homo sapien
taaaggcccacgaactcttgttgct

SEQ ID NO: 4391047 - DNA, 25 bp, Homo sapien
cagagcactagggttaataaaggcc

SEQ ID NO: 4391048 - DNA, 25 bp, Homo sapien
tcttgttgctgaaggctctagggct

SEQ ID NO: 4391049 - DNA, 25 bp, Homo sapien
ttggcatcctccactaatgttgtaa

SEQ ID NO: 4391050 - DNA, 25 bp, Homo sapien
ggcatcctccactaatgttgtaagg

SEQ ID NO: 4391051 - DNA, 25 bp, Homo sapien
cctccactaatgttgtaaggtcctg

SEQ ID NO: 4391052 - DNA, 25 bp, Homo sapien
ctaatgttgtaaggtcctggagcat

SEQ ID NO: 4391053 - DNA, 25 bp, Homo sapien
caggtactgagagctaggagaccca

SEQ ID NO: 4391054 - DNA, 25 bp, Homo sapien
gactccctgcttaccaggaaagaga

SEQ ID NO: 4391055 - DNA, 25 bp, Homo sapien
tatttctcctgatcactgttacatg

SEQ ID NO: 4391056 - DNA, 25 bp, Homo sapien
ggagacccacgagcctagagtttac

SEQ ID NO: 4391057 - DNA, 25 bp, Homo sapien
catagagaatccatttttggccggg

SEQ ID NO: 4391058 - DNA, 25 bp, Homo sapien
cgtgttggcaaaataggtgacagcc

SEQ ID NO: 4391059 - DNA, 25 bp, Homo sapien
ggacctcttgactggactcctgctg

SEQ ID NO: 4391060 - DNA, 25 bp, Homo sapien
tcacagatagcagttgaaggagcaa

SEQ ID NO: 4391061 - DNA, 25 bp, Homo sapien
ttcatccactatctagtcccagcag

SEQ ID NO: 4391062 - DNA, 25 bp, Homo sapien
tctccaccttaggtgaaaaataagc

SEQ ID NO: 4391063 - DNA, 25 bp, Homo sapien
ggttgcttaaaatgagcgttgcctg

SEQ ID NO: 4391064 - DNA, 25 bp, Homo sapien
cgttgcctgtaaagtgatccttctc

SEQ ID NO: 4391065 - DNA, 25 bp, Homo sapien
gggccagcacgtggctttcttgcct

SEQ ID NO: 4391066 - DNA, 25 bp, Homo sapien
aaggcagagggccagcacgtggctt

SEQ ID NO: 4391067 - DNA, 25 bp, Homo sapien
cgtggctttcttgccttccctgagc

SEQ ID NO: 4391068 - DNA, 25 bp, Homo sapien
tgccttccctgagcaaacagcccga

SEQ ID NO: 4391069 - DNA, 25 bp, Homo sapien
taggacgctactgaaaaaagccttg

SEQ ID NO: 4391070 - DNA, 25 bp, Homo sapien
cgcgtgacaggcagcagaattgaca

SEQ ID NO: 4391071 - DNA, 25 bp, Homo sapien
cttgaagatgcttgacccgcagccg

SEQ ID NO: 4391072 - DNA, 25 bp, Homo sapien
gaatgcagagttgagtccacggtga

SEQ ID NO: 4391073 - DNA, 25 bp, Homo sapien
gaataggttggaagactgtttcaac

SEQ ID NO: 4391074 - DNA, 25 bp, Homo sapien
tttccatcaggacaagatcataccg

SEQ ID NO: 4391075 - DNA, 25 bp, Homo sapien
aagatcataccgacacagctgaggc

SEQ ID NO: 4391076 - DNA, 25 bp, Homo sapien
tgcaactctgggcaaagaataggtt

SEQ ID NO: 4391077 - DNA, 25 bp, Homo sapien
agcttgtaccttgggcctattagag

SEQ ID NO: 4391078 - DNA, 25 bp, Homo sapien
ggatgggcaagggaccttaacttca

SEQ ID NO: 4391079 - DNA, 25 bp, Homo sapien
tgagcttgtaccttgggcctattag

SEQ ID NO: 4391080 - DNA, 25 bp, Homo sapien
gaccttaacttcattcggagaatcc

SEQ ID NO: 4391081 - DNA, 25 bp, Homo sapien
tcttgcaagtagactcacttggtga

SEQ ID NO: 4391082 - DNA, 25 bp, Homo sapien
tagactcacttggtgatatttctga

SEQ ID NO: 4391083 - DNA, 25 bp, Homo sapien
tcttgattaaatcttgcaagtagac

SEQ ID NO: 4391084 - DNA, 25 bp, Homo sapien
cactttatccagatcttgattaaat

SEQ ID NO: 4391085 - DNA, 25 bp, Homo sapien
gttccatgttataatatccacaaag

SEQ ID NO: 4391086 - DNA, 25 bp, Homo sapien
tcttgttccatgttataatatccac

SEQ ID NO: 4391087 - DNA, 25 bp, Homo sapien
tctctcaatttgatggtaatgtccc

SEQ ID NO: 4391088 - DNA, 25 bp, Homo sapien
ggtaatgtcccctcttcttacattc

SEQ ID NO: 4391089 - DNA, 25 bp, Homo sapien
ggtctttccaattatcagcataata

SEQ ID NO: 4391090 - DNA, 25 bp, Homo sapien
ccccttagatggtctttccaattat

SEQ ID NO: 4391091 - DNA, 25 bp, Homo sapien
gtcaaagaatgccttcgtcattgga

SEQ ID NO: 4391092 - DNA, 25 bp, Homo sapien
cttcgtcattggaggatctttcccc

SEQ ID NO: 4391093 - DNA, 25 bp, Homo sapien
tttttgtgacgtgccgcagctgaca

SEQ ID NO: 4391094 - DNA, 25 bp, Homo sapien
tacaggtatacagacctctggtggt

SEQ ID NO: 4391095 - DNA, 25 bp, Homo sapien
cacagggatacgcagtgatggtgca

SEQ ID NO: 4391096 - DNA, 25 bp, Homo sapien
ttgccattcctataatcctggtagg

SEQ ID NO: 4391097 - DNA, 25 bp, Homo sapien
gcagccaggttgatccaatcctcca

SEQ ID NO: 4391098 - DNA, 25 bp, Homo sapien
catttgggtagaagtctatgtttcc

SEQ ID NO: 4391099 - DNA, 25 bp, Homo sapien
ttcctaatggctccttgtagcccag

SEQ ID NO: 4391100 - DNA, 25 bp, Homo sapien
gggcagccaggttgatccaatcctc

SEQ ID NO: 4391101 - DNA, 25 bp, Homo sapien
taaatatttgagagctaggatggta

SEQ ID NO: 4391102 - DNA, 25 bp, Homo sapien
gctgcaaccctttaattgcctggtg

SEQ ID NO: 4391103 - DNA, 25 bp, Homo sapien
gaaaatgaggacctagaaatgtata

SEQ ID NO: 4391104 - DNA, 25 bp, Homo sapien
aaatgtatatataggtcgggtgcag

SEQ ID NO: 4391105 - DNA, 25 bp, Homo sapien
ctaatctgtcttggtgaggtttccc

SEQ ID NO: 4391106 - DNA, 25 bp, Homo sapien
catcagtgtcggaatggatgacatc

SEQ ID NO: 4391107 - DNA, 25 bp, Homo sapien
tcccgttgaataaagggcctgcagg

SEQ ID NO: 4391108 - DNA, 25 bp, Homo sapien
caacaaactgcgcatcactgggatc

SEQ ID NO: 4391109 - DNA, 25 bp, Homo sapien
tactccgatcatgtaaatgtcatca

SEQ ID NO: 4391110 - DNA, 25 bp, Homo sapien
atccatcgtacatctctccaacaaa

SEQ ID NO: 4391111 - DNA, 25 bp, Homo sapien
ggctcctagacttactccgatcatg

SEQ ID NO: 4391112 - DNA, 25 bp, Homo sapien
aacaaacccagatatgtgggctcct

SEQ ID NO: 4391113 - DNA, 25 bp, Homo sapien
tggaatttcaagaggtccatcattg

SEQ ID NO: 4391114 - DNA, 25 bp, Homo sapien
gaatttcaagaggtccatcattgta

SEQ ID NO: 4391115 - DNA, 25 bp, Homo sapien
aatttcaagaggtccatcattgtaa

SEQ ID NO: 4391116 - DNA, 25 bp, Homo sapien
ggaatttcaagaggtccatcattgt

SEQ ID NO: 4391117 - DNA, 25 bp, Homo sapien
ttttccttgtgtagagcatcagcct

SEQ ID NO: 4391118 - DNA, 25 bp, Homo sapien
taaagttgtagctcctcgattccaa

SEQ ID NO: 4391119 - DNA, 25 bp, Homo sapien
tctggtcttactagaggcatgggta

SEQ ID NO: 4391120 - DNA, 25 bp, Homo sapien
tggcctgaatccatggacaatgaag

SEQ ID NO: 4391121 - DNA, 25 bp, Homo sapien
gacaagcacaacaaactgatgaata

SEQ ID NO: 4391122 - DNA, 25 bp, Homo sapien
cttgacaagcacaacaaactgatga

SEQ ID NO: 4391123 - DNA, 25 bp, Homo sapien
tgacaagcacaacaaactgatgaat

SEQ ID NO: 4391124 - DNA, 25 bp, Homo sapien
tcttgacaagcacaacaaactgatg

SEQ ID NO: 4391125 - DNA, 25 bp, Homo sapien
tcgcagaggcttaagagtttccact

SEQ ID NO: 4391126 - DNA, 25 bp, Homo sapien
actgtgggattttgctcacagtgag

SEQ ID NO: 4391127 - DNA, 25 bp, Homo sapien
gagatcgtgtgtcacattcacaaga

SEQ ID NO: 4391128 - DNA, 25 bp, Homo sapien
caagaatgatttacttcgcagaggc

SEQ ID NO: 4391129 - DNA, 25 bp, Homo sapien
ttccacatcagtgaccctgccattt

SEQ ID NO: 4391130 - DNA, 25 bp, Homo sapien
tgccatttctcacttgcagtccaag

SEQ ID NO: 4391131 - DNA, 25 bp, Homo sapien
tgaccctgccatttctcacttgcag

SEQ ID NO: 4391132 - DNA, 25 bp, Homo sapien
aagataagtgggtttcttcaattca

SEQ ID NO: 4391133 - DNA, 25 bp, Homo sapien
aaggaggagagctcatcaattttcg

SEQ ID NO: 4391134 - DNA, 25 bp, Homo sapien
gaggagagctcatcaattttcggtg

SEQ ID NO: 4391135 - DNA, 25 bp, Homo sapien
ggagagctcatcaattttcggtgaa

SEQ ID NO: 4391136 - DNA, 25 bp, Homo sapien
gagctcatcaattttcggtgaatct

SEQ ID NO: 4391137 - DNA, 25 bp, Homo sapien
agggttggctccaggcgtaggtggc

SEQ ID NO: 4391138 - DNA, 25 bp, Homo sapien
tttttccctatctcagtagatggag

SEQ ID NO: 4391139 - DNA, 25 bp, Homo sapien
cagtagatggagcatacaatcgggt

SEQ ID NO: 4391140 - DNA, 25 bp, Homo sapien
tagatggagcatacaatcgggtttt

SEQ ID NO: 4391141 - DNA, 25 bp, Homo sapien
tctcagtagatggagcatacaatcg

SEQ ID NO: 4391142 - DNA, 25 bp, Homo sapien
ctacctgttgtggtagtagcttgaa

SEQ ID NO: 4391143 - DNA, 25 bp, Homo sapien
cctgttgtggtagtagcttgaatag

SEQ ID NO: 4391144 - DNA, 25 bp, Homo sapien
ctctacctgttgtggtagtagcttg

SEQ ID NO: 4391145 - DNA, 25 bp, Homo sapien
ctctctacctgttgtggtagtagct

SEQ ID NO: 4391146 - DNA, 25 bp, Homo sapien
tgctactctggtatgaccacagatg

SEQ ID NO: 4391147 - DNA, 25 bp, Homo sapien
cttatcagaagggaacactcgagct

SEQ ID NO: 4391148 - DNA, 25 bp, Homo sapien
gaagggaacactcgagctgctactc

SEQ ID NO: 4391149 - DNA, 25 bp, Homo sapien
gagctgctactctggtatgaccaca

SEQ ID NO: 4391150 - DNA, 25 bp, Homo sapien
gcaaattatccaagccaagggcaga

SEQ ID NO: 4391151 - DNA, 25 bp, Homo sapien
tgtgcccctcttgcagtacaaggct

SEQ ID NO: 4391152 - DNA, 25 bp, Homo sapien
agcttaagcgatgaggttgtgcccc

SEQ ID NO: 4391153 - DNA, 25 bp, Homo sapien
tctgattggaacacctgcgaaagct

SEQ ID NO: 4391154 - DNA, 25 bp, Homo sapien
ccatatggccttgggattctcccat

SEQ ID NO: 4391155 - DNA, 25 bp, Homo sapien
tatggccttgggattctcccatggc

SEQ ID NO: 4391156 - DNA, 25 bp, Homo sapien
ggccttgggattctcccatggccct

SEQ ID NO: 4391157 - DNA, 25 bp, Homo sapien
ttactccatatggccttgggattct

SEQ ID NO: 4391158 - DNA, 25 bp, Homo sapien
ccatgtctctactgtggaccacagg

SEQ ID NO: 4391159 - DNA, 25 bp, Homo sapien
gagcgagtataaggatgcgtctcct

SEQ ID NO: 4391160 - DNA, 25 bp, Homo sapien
agcgaaggcaccaactggcagacaa

SEQ ID NO: 4391161 - DNA, 25 bp, Homo sapien
cttggccagtggatggacagtcacc

SEQ ID NO: 4391162 - DNA, 25 bp, Homo sapien
ccggaacgcctcctccggagtggag

SEQ ID NO: 4391163 - DNA, 25 bp, Homo sapien
gagcacctaatgtcctctgggaccc

SEQ ID NO: 4391164 - DNA, 25 bp, Homo sapien
ggaacgcctcctccggagtggagca

SEQ ID NO: 4391165 - DNA, 25 bp, Homo sapien
aaacactgagcacctaatgtcctct

SEQ ID NO: 4391166 - DNA, 25 bp, Homo sapien
agagaaaaccctgccgacagccctt

SEQ ID NO: 4391167 - DNA, 25 bp, Homo sapien
tccggattggctccgccgaagagaa

SEQ ID NO: 4391168 - DNA, 25 bp, Homo sapien
cgggaccgtcccacaattactcttg

SEQ ID NO: 4391169 - DNA, 25 bp, Homo sapien
atctcgtcagcgattgggccgggac

SEQ ID NO: 4391170 - DNA, 25 bp, Homo sapien
acaggtcgccgggatcctagtgacg

SEQ ID NO: 4391171 - DNA, 25 bp, Homo sapien
ggtcgtcttcgtagcggccggtgat

SEQ ID NO: 4391172 - DNA, 25 bp, Homo sapien
cagggtctttgacattcttgtcaga

SEQ ID NO: 4391173 - DNA, 25 bp, Homo sapien
agtcgctcccgccaggctgtaggga

SEQ ID NO: 4391174 - DNA, 25 bp, Homo sapien
tgtaagaggcaagggtatcactgtg

SEQ ID NO: 4391175 - DNA, 25 bp, Homo sapien
taaatttgggtctacctccagatgt

SEQ ID NO: 4391176 - DNA, 25 bp, Homo sapien
tttgtatgtggatactgagtctcca

SEQ ID NO: 4391177 - DNA, 25 bp, Homo sapien
tattgagcatgtctcagtgctaacc

SEQ ID NO: 4391178 - DNA, 25 bp, Homo sapien
tatgtactaagaaaggtgtatcctt

SEQ ID NO: 4391179 - DNA, 25 bp, Homo sapien
aggcccaactagaacttagtattat

SEQ ID NO: 4391180 - DNA, 25 bp, Homo sapien
gaggtgctcacatcctgtttatttc

SEQ ID NO: 4391181 - DNA, 25 bp, Homo sapien
cacacagaaaatcttgatttaatgc

SEQ ID NO: 4391182 - DNA, 25 bp, Homo sapien
ggaggctagtgtctttggaattcac

SEQ ID NO: 4391183 - DNA, 25 bp, Homo sapien
cctaagctgctagatagtagcaact

SEQ ID NO: 4391184 - DNA, 25 bp, Homo sapien
ccagataagcagatatcactcagtt

SEQ ID NO: 4391185 - DNA, 25 bp, Homo sapien
taggcaacttagtatatagggaggc

SEQ ID NO: 4391186 - DNA, 25 bp, Homo sapien
tacagctgataaacgggaggaagca

SEQ ID NO: 4391187 - DNA, 25 bp, Homo sapien
tctgcctttgattagcgatgtttcc

SEQ ID NO: 4391188 - DNA, 25 bp, Homo sapien
gtcttcaataaaccctgggtacagc

SEQ ID NO: 4391189 - DNA, 25 bp, Homo sapien
gtgactcctacccagttataatggg

SEQ ID NO: 4391190 - DNA, 25 bp, Homo sapien
tattcatcggaaggtacattggagc

SEQ ID NO: 4391191 - DNA, 25 bp, Homo sapien
aattattctggtgcctattcatcgg

SEQ ID NO: 4391192 - DNA, 25 bp, Homo sapien
aagcaaggctatccagcacttcatg

SEQ ID NO: 4391193 - DNA, 25 bp, Homo sapien
gggttaccaagcagtgaaacgatgg

SEQ ID NO: 4391194 - DNA, 25 bp, Homo sapien
agtggagctggagcagtaactgcca

SEQ ID NO: 4391195 - DNA, 25 bp, Homo sapien
cactcgtttgcaaacataatgggca

SEQ ID NO: 4391196 - DNA, 25 bp, Homo sapien
ttgttcagcgtattcattcactcac

SEQ ID NO: 4391197 - DNA, 25 bp, Homo sapien
tttacagttagctctaaattacttg

SEQ ID NO: 4391198 - DNA, 25 bp, Homo sapien
tgtgcccaagggactctgattatcc

SEQ ID NO: 4391199 - DNA, 25 bp, Homo sapien
gattatccaagcatcttccgaagag

SEQ ID NO: 4391200 - DNA, 25 bp, Homo sapien
gaagtctgacactacagcgttggca

SEQ ID NO: 4391201 - DNA, 25 bp, Homo sapien
gcacagtgccgtgaacagtggaact

SEQ ID NO: 4391202 - DNA, 25 bp, Homo sapien
ccttctgcttgaccctgagttcctg

SEQ ID NO: 4391203 - DNA, 25 bp, Homo sapien
atggccttctgcttgaccctgagtt

SEQ ID NO: 4391204 - DNA, 25 bp, Homo sapien
ccctgagttcctgaattgaatgtgg

SEQ ID NO: 4391205 - DNA, 25 bp, Homo sapien
tggccttctgcttgaccctgagttc

SEQ ID NO: 4391206 - DNA, 25 bp, Homo sapien
gatttctctgcccactaatggacag

SEQ ID NO: 4391207 - DNA, 25 bp, Homo sapien
caatctttaggttctcagatgggca

SEQ ID NO: 4391208 - DNA, 25 bp, Homo sapien
tgaccgcgaggcaaatgatgtttaa

SEQ ID NO: 4391209 - DNA, 25 bp, Homo sapien
tactgctctaagtgacctgaccgcg

SEQ ID NO: 4391210 - DNA, 25 bp, Homo sapien
tacacttcttaggaaagtgccagga

SEQ ID NO: 4391211 - DNA, 25 bp, Homo sapien
aacccttttctatgagacacctgtg

SEQ ID NO: 4391212 - DNA, 25 bp, Homo sapien
gacacctgtggaactattttttgga

SEQ ID NO: 4391213 - DNA, 25 bp, Homo sapien
tctgtgggccaatgaatatgtgtac

SEQ ID NO: 4391214 - DNA, 25 bp, Homo sapien
cattttaatggcacagtattccact

SEQ ID NO: 4391215 - DNA, 25 bp, Homo sapien
attttaatggcacagtattccacta

SEQ ID NO: 4391216 - DNA, 25 bp, Homo sapien
aactcttagcattacaatttctggg

SEQ ID NO: 4391217 - DNA, 25 bp, Homo sapien
gttactcttgatcaactgtggtttg

SEQ ID NO: 4391218 - DNA, 25 bp, Homo sapien
catttttcatgtgtaggccttcagt

SEQ ID NO: 4391219 - DNA, 25 bp, Homo sapien
tccagcatgggatgattgcgtctcc

SEQ ID NO: 4391220 - DNA, 25 bp, Homo sapien
gctgtcaacttgatacacagttgga

SEQ ID NO: 4391221 - DNA, 25 bp, Homo sapien
aatatatcccactagagacccgcaa

SEQ ID NO: 4391222 - DNA, 25 bp, Homo sapien
cttgccctgtgtaggtaatgtctta

SEQ ID NO: 4391223 - DNA, 25 bp, Homo sapien
tgtaaaataaacaccagtccaagag

SEQ ID NO: 4391224 - DNA, 25 bp, Homo sapien
tccatccccagtgacagcgagattc

SEQ ID NO: 4391225 - DNA, 25 bp, Homo sapien
gcagcagcaggaattgacagtgacc

SEQ ID NO: 4391226 - DNA, 25 bp, Homo sapien
taggtcaaaaagtctccagcaggcc

SEQ ID NO: 4391227 - DNA, 25 bp, Homo sapien
catggagatacctctgtggcccaca

SEQ ID NO: 4391228 - DNA, 25 bp, Homo sapien
gcaggccccaagacacagaagtttg

SEQ ID NO: 4391229 - DNA, 25 bp, Homo sapien
cccacgtggcaaacaatctataaag

SEQ ID NO: 4391230 - DNA, 25 bp, Homo sapien
catgttgacagttacgacaggctga

SEQ ID NO: 4391231 - DNA, 25 bp, Homo sapien
tgaaacaggccacttaataaccttg

SEQ ID NO: 4391232 - DNA, 25 bp, Homo sapien
catttgtgacaaccttgggtcaagc

SEQ ID NO: 4391233 - DNA, 25 bp, Homo sapien
tctagcttgacatgcagtcgatcca

SEQ ID NO: 4391234 - DNA, 25 bp, Homo sapien
caaagttcgctttactgtggtggtc

SEQ ID NO: 4391235 - DNA, 25 bp, Homo sapien
gaggttcggaaacttcagtgcgcac

SEQ ID NO: 4391236 - DNA, 25 bp, Homo sapien
ttctgattcaaggtggaccccaaga

SEQ ID NO: 4391237 - DNA, 25 bp, Homo sapien
cattgcagtctggtggtataatggc

SEQ ID NO: 4391238 - DNA, 25 bp, Homo sapien
agtagaggaaactggcattgcagtc

SEQ ID NO: 4391239 - DNA, 25 bp, Homo sapien
gcttgtccacataaaccagtacatg

SEQ ID NO: 4391240 - DNA, 25 bp, Homo sapien
aaaccagtacatgttcatcctttag

SEQ ID NO: 4391241 - DNA, 25 bp, Homo sapien
ctaatggcgcgtaccctattaaaat

SEQ ID NO: 4391242 - DNA, 25 bp, Homo sapien
atggcgcgtaccctattaaaattca

SEQ ID NO: 4391243 - DNA, 25 bp, Homo sapien
gttgaggctggtttgtgtgtttcgc

SEQ ID NO: 4391244 - DNA, 25 bp, Homo sapien
tgtgtgatgtgatactcagagcact

SEQ ID NO: 4391245 - DNA, 25 bp, Homo sapien
tgtgatgtgatactcagagcactgc

SEQ ID NO: 4391246 - DNA, 25 bp, Homo sapien
tgagtaaccaagtgtaagttgaggc

SEQ ID NO: 4391247 - DNA, 25 bp, Homo sapien
tatatagcagtatgcaaaaaaccag

SEQ ID NO: 4391248 - DNA, 25 bp, Homo sapien
gatggagggatgaggaaattcaaaa

SEQ ID NO: 4391249 - DNA, 25 bp, Homo sapien
gagagacagagaattatatagcagt

SEQ ID NO: 4391250 - DNA, 25 bp, Homo sapien
ggggggtgcgtagatacgggattga

SEQ ID NO: 4391251 - DNA, 25 bp, Homo sapien
tcaaagctcctctctacaccgtgag

SEQ ID NO: 4391252 - DNA, 25 bp, Homo sapien
aattggagttagttgagttatttga

SEQ ID NO: 4391253 - DNA, 25 bp, Homo sapien
cagaactgccgtgagtgtccttccg

SEQ ID NO: 4391254 - DNA, 25 bp, Homo sapien
gagacgatttgccacagaaaaaggg

SEQ ID NO: 4391255 - DNA, 25 bp, Homo sapien
tacaatttccctgatcttgcgctgt

SEQ ID NO: 4391256 - DNA, 25 bp, Homo sapien
gtacaatttccctgatcttgcgctg

SEQ ID NO: 4391257 - DNA, 25 bp, Homo sapien
acaatttccctgatcttgcgctgtg

SEQ ID NO: 4391258 - DNA, 25 bp, Homo sapien
gatgaagggtggaatgctcagacaa

SEQ ID NO: 4391259 - DNA, 25 bp, Homo sapien
ccccgttctacagcggctaggaggg

SEQ ID NO: 4391260 - DNA, 25 bp, Homo sapien
atgggactccggcagcttccagttc

SEQ ID NO: 4391261 - DNA, 25 bp, Homo sapien
aacccagttctgaggacaaacggca

SEQ ID NO: 4391262 - DNA, 25 bp, Homo sapien
agcctagcactgtccctgcaggcag

SEQ ID NO: 4391263 - DNA, 25 bp, Homo sapien
tgaactcctgtaggaacaggctgtt

SEQ ID NO: 4391264 - DNA, 25 bp, Homo sapien
ggctgttcagacacattcccagggc

SEQ ID NO: 4391265 - DNA, 25 bp, Homo sapien
gctccctgcagactgaactcctgta

SEQ ID NO: 4391266 - DNA, 25 bp, Homo sapien
gactgcagaagactcaagtgagaat

SEQ ID NO: 4391267 - DNA, 25 bp, Homo sapien
cgtggccagggactctgactgcaga

SEQ ID NO: 4391268 - DNA, 25 bp, Homo sapien
ggccagggactctgactgcagaaga

SEQ ID NO: 4391269 - DNA, 25 bp, Homo sapien
gactcaagtgagaatttcaaagggc

SEQ ID NO: 4391270 - DNA, 25 bp, Homo sapien
caagtacactgtttgtcttcactgg

SEQ ID NO: 4391271 - DNA, 25 bp, Homo sapien
tcttcactggtttaggacaaagacc

SEQ ID NO: 4391272 - DNA, 25 bp, Homo sapien
aaaccttcagtgtctgcttacacca

SEQ ID NO: 4391273 - DNA, 25 bp, Homo sapien
ctggaccatcaggtctcagcacagg

SEQ ID NO: 4391274 - DNA, 25 bp, Homo sapien
ctagcaaagaagtgcccgataattc

SEQ ID NO: 4391275 - DNA, 25 bp, Homo sapien
ctggctagcaaagaagtgcccgata

SEQ ID NO: 4391276 - DNA, 25 bp, Homo sapien
gctagcaaagaagtgcccgataatt

SEQ ID NO: 4391277 - DNA, 25 bp, Homo sapien
tggctagcaaagaagtgcccgataa

SEQ ID NO: 4391278 - DNA, 25 bp, Homo sapien
gaagagggcactctgatatgcgctt

SEQ ID NO: 4391279 - DNA, 25 bp, Homo sapien
gcactctgatatgcgcttccagctt

SEQ ID NO: 4391280 - DNA, 25 bp, Homo sapien
aatcacccggccagctgtggaagag

SEQ ID NO: 4391281 - DNA, 25 bp, Homo sapien
gagggcactctgatatgcgcttcca

SEQ ID NO: 4391282 - DNA, 25 bp, Homo sapien
ttagaaagctcgagttataattttc

SEQ ID NO: 4391283 - DNA, 25 bp, Homo sapien
gtggcccggtgatgatgaccatcct

SEQ ID NO: 4391284 - DNA, 25 bp, Homo sapien
tgaccatcctttcgctgacgtctgg

SEQ ID NO: 4391285 - DNA, 25 bp, Homo sapien
ggtgatgatgaccatcctttcgctg

SEQ ID NO: 4391286 - DNA, 25 bp, Homo sapien
tcgctgacgtctgggccttccgcag

SEQ ID NO: 4391287 - DNA, 25 bp, Homo sapien
ctgatgctcggctgcattccccagc

SEQ ID NO: 4391288 - DNA, 25 bp, Homo sapien
gaaaacgctgatgctcggctgcatt

SEQ ID NO: 4391289 - DNA, 25 bp, Homo sapien
ctgtggttcacaggagaggaaaacg

SEQ ID NO: 4391290 - DNA, 25 bp, Homo sapien
gagaggaaaacgctgatgctcggct

SEQ ID NO: 4391291 - DNA, 25 bp, Homo sapien
gcttctgccgttacccctggttctg

SEQ ID NO: 4391292 - DNA, 25 bp, Homo sapien
ggtcttgcttctgccgttacccctg

SEQ ID NO: 4391293 - DNA, 25 bp, Homo sapien
tgcttctgccgttacccctggttct

SEQ ID NO: 4391294 - DNA, 25 bp, Homo sapien
cttgcttctgccgttacccctggtt

SEQ ID NO: 4391295 - DNA, 25 bp, Homo sapien
ccaggttggccacagatgcagttct

SEQ ID NO: 4391296 - DNA, 25 bp, Homo sapien
ggttggccacagatgcagttctaag

SEQ ID NO: 4391297 - DNA, 25 bp, Homo sapien
ccccaggttggccacagatgcagtt

SEQ ID NO: 4391298 - DNA, 25 bp, Homo sapien
ctgccccaggttggccacagatgca

SEQ ID NO: 4391299 - DNA, 25 bp, Homo sapien
ctgtgtcacttgagatcctccggga

SEQ ID NO: 4391300 - DNA, 25 bp, Homo sapien
tgtgcatggatcacctctggaccac

SEQ ID NO: 4391301 - DNA, 25 bp, Homo sapien
ggctgcccctgctttattgtgagta

SEQ ID NO: 4391302 - DNA, 25 bp, Homo sapien
tgtgtgctataagccagcttccatc

SEQ ID NO: 4391303 - DNA, 25 bp, Homo sapien
tcaggtgatcaacagctgagcttcc

SEQ ID NO: 4391304 - DNA, 25 bp, Homo sapien
gcctcggccgaaaaacacggatctg

SEQ ID NO: 4391305 - DNA, 25 bp, Homo sapien
gatgcggataaatgtgagactcagg

SEQ ID NO: 4391306 - DNA, 25 bp, Homo sapien
gggccccttcatgggatctgcaaag

SEQ ID NO: 4391307 - DNA, 25 bp, Homo sapien
cccaaaccgagaagggcgaatggct

SEQ ID NO: 4391308 - DNA, 25 bp, Homo sapien
gattctgaaagaaacctccgagggc

SEQ ID NO: 4391309 - DNA, 25 bp, Homo sapien
tgccatcaccgtccacttcgtaatg

SEQ ID NO: 4391310 - DNA, 25 bp, Homo sapien
gattcacgctgaccaaatcagttct

SEQ ID NO: 4391311 - DNA, 25 bp, Homo sapien
cacttgtgcagttttggaatgtcat

SEQ ID NO: 4391312 - DNA, 25 bp, Homo sapien
gagggctacttgtgcacttgtgcag

SEQ ID NO: 4391313 - DNA, 25 bp, Homo sapien
gaagtcggagggctacttgtgcact

SEQ ID NO: 4391314 - DNA, 25 bp, Homo sapien
ctagtccagaagtcggagggctact

SEQ ID NO: 4391315 - DNA, 25 bp, Homo sapien
cgctctcctcccatggatgagtgtg

SEQ ID NO: 4391316 - DNA, 25 bp, Homo sapien
gatgagtgtgaggctctctccctgc

SEQ ID NO: 4391317 - DNA, 25 bp, Homo sapien
ctctcctcccatggatgagtgtgag

SEQ ID NO: 4391318 - DNA, 25 bp, Homo sapien
tctcctcccatggatgagtgtgagg

SEQ ID NO: 4391319 - DNA, 25 bp, Homo sapien
tgatagaggctccggcgaatctcgc

SEQ ID NO: 4391320 - DNA, 25 bp, Homo sapien
gatagaggctccggcgaatctcgcc

SEQ ID NO: 4391321 - DNA, 25 bp, Homo sapien
ttgatagaggctccggcgaatctcg

SEQ ID NO: 4391322 - DNA, 25 bp, Homo sapien
cttgatagaggctccggcgaatctc

SEQ ID NO: 4391323 - DNA, 25 bp, Homo sapien
ctgcggctctgcaggtgtgaagcct

SEQ ID NO: 4391324 - DNA, 25 bp, Homo sapien
acaggcagcgctagtgataatcaag

SEQ ID NO: 4391325 - DNA, 25 bp, Homo sapien
ctgagcacaggcagcgctagtgata

SEQ ID NO: 4391326 - DNA, 25 bp, Homo sapien
cagcgctagtgataatcaagggcat

SEQ ID NO: 4391327 - DNA, 25 bp, Homo sapien
caatttgttggattccaaaagctgt

SEQ ID NO: 4391328 - DNA, 25 bp, Homo sapien
tctcaatttgttggattccaaaagc

SEQ ID NO: 4391329 - DNA, 25 bp, Homo sapien
gcttctcaatttgttggattccaaa

SEQ ID NO: 4391330 - DNA, 25 bp, Homo sapien
tcaatttgttggattccaaaagctg

SEQ ID NO: 4391331 - DNA, 25 bp, Homo sapien
gaaactctgctattcagtgccaaca

SEQ ID NO: 4391332 - DNA, 25 bp, Homo sapien
cctgtgacaaaaggcagaggctctt

SEQ ID NO: 4391333 - DNA, 25 bp, Homo sapien
acacatctggtatccggagaagcat

SEQ ID NO: 4391334 - DNA, 25 bp, Homo sapien
tgaagacggccccaaggcattctgt

SEQ ID NO: 4391335 - DNA, 25 bp, Homo sapien
tacaggctggagaagtatccggagt

SEQ ID NO: 4391336 - DNA, 25 bp, Homo sapien
caaactggtgatgggggtacaggct

SEQ ID NO: 4391337 - DNA, 25 bp, Homo sapien
cgggaacgggccaaactggtgatgg

SEQ ID NO: 4391338 - DNA, 25 bp, Homo sapien
tgatgatgcgggaacgggccaaact

SEQ ID NO: 4391339 - DNA, 25 bp, Homo sapien
ggcagaacgctgacctgagtcagca

SEQ ID NO: 4391340 - DNA, 25 bp, Homo sapien
aaggctgggtcaacactgacattgc

SEQ ID NO: 4391341 - DNA, 25 bp, Homo sapien
tagctgtgctttacacaaggctggg

SEQ ID NO: 4391342 - DNA, 25 bp, Homo sapien
tgagtcagcagaattgctagctgtg

SEQ ID NO: 4391343 - DNA, 25 bp, Homo sapien
taacacggctgtagtgagagccttg

SEQ ID NO: 4391344 - DNA, 25 bp, Homo sapien
cacttaacacggctgtagtgagagc

SEQ ID NO: 4391345 - DNA, 25 bp, Homo sapien
gacagagctccacttaacacggctg

SEQ ID NO: 4391346 - DNA, 25 bp, Homo sapien
gctgtagtgagagccttgctttgac

SEQ ID NO: 4391347 - DNA, 25 bp, Homo sapien
ctttctgagccttatccacaaacag

SEQ ID NO: 4391348 - DNA, 25 bp, Homo sapien
tagtactgttgtgagggtttgttca

SEQ ID NO: 4391349 - DNA, 25 bp, Homo sapien
gtcagaagatctgagtctctgaatc

SEQ ID NO: 4391350 - DNA, 25 bp, Homo sapien
caaacagactcaaataatatctagt

SEQ ID NO: 4391351 - DNA, 25 bp, Homo sapien
caaaaattgatagggtgtggaacac

SEQ ID NO: 4391352 - DNA, 25 bp, Homo sapien
ttaagaacacaagcttaggccgggc

SEQ ID NO: 4391353 - DNA, 25 bp, Homo sapien
caagaagctgtttgtagtgagcaat

SEQ ID NO: 4391354 - DNA, 25 bp, Homo sapien
cattcacgtgtgaaggaaaaaggac

SEQ ID NO: 4391355 - DNA, 25 bp, Homo sapien
gcaaagatttatgtagaggcacacc

SEQ ID NO: 4391356 - DNA, 25 bp, Homo sapien
ataactactacacttctagggcggg

SEQ ID NO: 4391357 - DNA, 25 bp, Homo sapien
catttgtccaaatgcgcgtgctcac

SEQ ID NO: 4391358 - DNA, 25 bp, Homo sapien
cccaaatgcgtaaaactagtgtgct

SEQ ID NO: 4391359 - DNA, 25 bp, Homo sapien
tgctgttctcaggagtcctgggccc

SEQ ID NO: 4391360 - DNA, 25 bp, Homo sapien
ctatgctgctgttctcaggagtcct

SEQ ID NO: 4391361 - DNA, 25 bp, Homo sapien
gctgctgttctcaggagtcctgggc

SEQ ID NO: 4391362 - DNA, 25 bp, Homo sapien
ctgttctcaggagtcctgggcccac

SEQ ID NO: 4391363 - DNA, 25 bp, Homo sapien
ggactctccaggtatcactccagga

SEQ ID NO: 4391364 - DNA, 25 bp, Homo sapien
gagggccgcctccatgccattggac

SEQ ID NO: 4391365 - DNA, 25 bp, Homo sapien
acaggtctgcggtgtggactctcca

SEQ ID NO: 4391366 - DNA, 25 bp, Homo sapien
cctaggtcctgcacaggtgggcagt

SEQ ID NO: 4391367 - DNA, 25 bp, Homo sapien
tgctggtggagatagcacggacagt

SEQ ID NO: 4391368 - DNA, 25 bp, Homo sapien
gctggtggagatagcacggacagtc

SEQ ID NO: 4391369 - DNA, 25 bp, Homo sapien
ctgctggtggagatagcacggacag

SEQ ID NO: 4391370 - DNA, 25 bp, Homo sapien
cctgctggtggagatagcacggaca

SEQ ID NO: 4391371 - DNA, 25 bp, Homo sapien
tgaaaagatgccaagtgcgctgagg

SEQ ID NO: 4391372 - DNA, 25 bp, Homo sapien
tcaaccctgggatcagattggcttg

SEQ ID NO: 4391373 - DNA, 25 bp, Homo sapien
cgctgaggttcaaccctgggatcag

SEQ ID NO: 4391374 - DNA, 25 bp, Homo sapien
caagtgcgctgaggttcaaccctgg

SEQ ID NO: 4391375 - DNA, 25 bp, Homo sapien
tcttaacctgaccatggtgttcctt

SEQ ID NO: 4391376 - DNA, 25 bp, Homo sapien
gggtgccacatcttaacctgaccat

SEQ ID NO: 4391377 - DNA, 25 bp, Homo sapien
gccacatcttaacctgaccatggtg

SEQ ID NO: 4391378 - DNA, 25 bp, Homo sapien
tgtatcagaggtgggtgccacatct

SEQ ID NO: 4391379 - DNA, 25 bp, Homo sapien
cagacatgaatgaacctaagtggta

SEQ ID NO: 4391380 - DNA, 25 bp, Homo sapien
tgtatgaatcactcaggcccttctg

SEQ ID NO: 4391381 - DNA, 25 bp, Homo sapien
tttgttattcacctaccagtgcgtg

SEQ ID NO: 4391382 - DNA, 25 bp, Homo sapien
tactgcctggagtatagagggtaca

SEQ ID NO: 4391383 - DNA, 25 bp, Homo sapien
tagcctagtgaaaaccagcggagaa

SEQ ID NO: 4391384 - DNA, 25 bp, Homo sapien
cctaaggcacttcctcattagctga

SEQ ID NO: 4391385 - DNA, 25 bp, Homo sapien
tcttcacgtgatgttgtccagcgca

SEQ ID NO: 4391386 - DNA, 25 bp, Homo sapien
tcctaggaagtcaggaaaaactctg

SEQ ID NO: 4391387 - DNA, 25 bp, Homo sapien
cacagtgatggttctttccgggttg

SEQ ID NO: 4391388 - DNA, 25 bp, Homo sapien
gccttcttttccaatcagtcttcca

SEQ ID NO: 4391389 - DNA, 25 bp, Homo sapien
gattataagccacgaccaagtggga

SEQ ID NO: 4391390 - DNA, 25 bp, Homo sapien
catgaggccagctttaccctgattc

SEQ ID NO: 4391391 - DNA, 25 bp, Homo sapien
gagggaacattactaccaatacgac

SEQ ID NO: 4391392 - DNA, 25 bp, Homo sapien
ggcttcatcggagaatgctaccaaa

SEQ ID NO: 4391393 - DNA, 25 bp, Homo sapien
gcctcaggccttccaccataggata

SEQ ID NO: 4391394 - DNA, 25 bp, Homo sapien
cataggataaccctcaccagatgct

SEQ ID NO: 4391395 - DNA, 25 bp, Homo sapien
tagaccagtgggagtacatcaactt

SEQ ID NO: 4391396 - DNA, 25 bp, Homo sapien
acagagtgaaaggtcaacccatggg

SEQ ID NO: 4391397 - DNA, 25 bp, Homo sapien
cacaaggaagggatgccctctccct

SEQ ID NO: 4391398 - DNA, 25 bp, Homo sapien
ggaagggatgccctctccctcaatt

SEQ ID NO: 4391399 - DNA, 25 bp, Homo sapien
atgttatggttgtttaaccacaact

SEQ ID NO: 4391400 - DNA, 25 bp, Homo sapien
tgcccagccaagacagtacatttta

SEQ ID NO: 4391401 - DNA, 25 bp, Homo sapien
tctgcatgatttcaagaatcatgcg

SEQ ID NO: 4391402 - DNA, 25 bp, Homo sapien
catgatttcaagaatcatgcggcat

SEQ ID NO: 4391403 - DNA, 25 bp, Homo sapien
gatttcaagaatcatgcggcatgct

SEQ ID NO: 4391404 - DNA, 25 bp, Homo sapien
gttctcttttctatggatatctacc

SEQ ID NO: 4391405 - DNA, 25 bp, Homo sapien
ctgggtctgcttagtgatgttcttt

SEQ ID NO: 4391406 - DNA, 25 bp, Homo sapien
ggtggggaccaggatccgcagcggg

SEQ ID NO: 4391407 - DNA, 25 bp, Homo sapien
tcaagccctcctttccgatgatggc

SEQ ID NO: 4391408 - DNA, 25 bp, Homo sapien
gatccgcagcgggaaatcaatctgt

SEQ ID NO: 4391409 - DNA, 25 bp, Homo sapien
aaataaaatcctaatccactatctt

SEQ ID NO: 4391410 - DNA, 25 bp, Homo sapien
tataatttacacatgactcaactgc

SEQ ID NO: 4391411 - DNA, 25 bp, Homo sapien
ttttcaatgtcactaagtacctttc

SEQ ID NO: 4391412 - DNA, 25 bp, Homo sapien
agtttttgcaactgatcctttatag

SEQ ID NO: 4391413 - DNA, 25 bp, Homo sapien
caaaggtggcacatatccagctcaa

SEQ ID NO: 4391414 - DNA, 25 bp, Homo sapien
taccaatatgtcaaaggtggctcag

SEQ ID NO: 4391415 - DNA, 25 bp, Homo sapien
caaatatcccggtgtgaatgtcctg

SEQ ID NO: 4391416 - DNA, 25 bp, Homo sapien
cgtggagctccatgggtatgtcaaa

SEQ ID NO: 4391417 - DNA, 25 bp, Homo sapien
ttcttctcttgttgcatatgtgacg

SEQ ID NO: 4391418 - DNA, 25 bp, Homo sapien
tgttgcatatgtgacgttgacaacg

SEQ ID NO: 4391419 - DNA, 25 bp, Homo sapien
gcatatgtgacgttgacaacggcgg

SEQ ID NO: 4391420 - DNA, 25 bp, Homo sapien
tatgtgacgttgacaacggcggttt

SEQ ID NO: 4391421 - DNA, 25 bp, Homo sapien
aaaatgcataaaaccctcatcacac

SEQ ID NO: 4391422 - DNA, 25 bp, Homo sapien
cacactggctccacagttatctgca

SEQ ID NO: 4391423 - DNA, 25 bp, Homo sapien
tctacgtttattcatctgagttcac

SEQ ID NO: 4391424 - DNA, 25 bp, Homo sapien
gaaaaagtgctgtcaccctctggct

SEQ ID NO: 4391425 - DNA, 25 bp, Homo sapien
caaacatcactggattgtgtgttct

SEQ ID NO: 4391426 - DNA, 25 bp, Homo sapien
tgcaaacatcactggattgtgtgtt

SEQ ID NO: 4391427 - DNA, 25 bp, Homo sapien
actggattgtgtgttcttctgaatt

SEQ ID NO: 4391428 - DNA, 25 bp, Homo sapien
ctttgttgcaaacatcactggattg

SEQ ID NO: 4391429 - DNA, 25 bp, Homo sapien
gaaaagtaatgcagtaaaagaacat

SEQ ID NO: 4391430 - DNA, 25 bp, Homo sapien
ctttgactgtgtgggttaaatctaa

SEQ ID NO: 4391431 - DNA, 25 bp, Homo sapien
aaggttgaaccatcactatttttgt

SEQ ID NO: 4391432 - DNA, 25 bp, Homo sapien
tattacatcactatcaaggtatgag

SEQ ID NO: 4391433 - DNA, 25 bp, Homo sapien
ctggagttgacctaacctataagaa

SEQ ID NO: 4391434 - DNA, 25 bp, Homo sapien
tgaacttactatttctccctggagt

SEQ ID NO: 4391435 - DNA, 25 bp, Homo sapien
aatacatatactctaggaagcttat

SEQ ID NO: 4391436 - DNA, 25 bp, Homo sapien
tactctaggaagcttatttcaaaga

SEQ ID NO: 4391437 - DNA, 25 bp, Homo sapien
ccatattgagccaaaagtccatcca

SEQ ID NO: 4391438 - DNA, 25 bp, Homo sapien
tccactgtcccatattgagccaaaa

SEQ ID NO: 4391439 - DNA, 25 bp, Homo sapien
attctccactgtcccatattgagcc

SEQ ID NO: 4391440 - DNA, 25 bp, Homo sapien
tattgagccaaaagtccatccaaca

SEQ ID NO: 4391441 - DNA, 25 bp, Homo sapien
ctttgggtggggaataaaatatgag

SEQ ID NO: 4391442 - DNA, 25 bp, Homo sapien
atcttataagctttacaactctgaa

SEQ ID NO: 4391443 - DNA, 25 bp, Homo sapien
tgggtggggaataaaatatgaggca

SEQ ID NO: 4391444 - DNA, 25 bp, Homo sapien
aagctttacaactctgaaaacatac

SEQ ID NO: 4391445 - DNA, 25 bp, Homo sapien
tcacagcaactaattcaaaacaaac

SEQ ID NO: 4391446 - DNA, 25 bp, Homo sapien
actgtcacagcaactaattcaaaac

SEQ ID NO: 4391447 - DNA, 25 bp, Homo sapien
ttaactgtcacagcaactaattcaa

SEQ ID NO: 4391448 - DNA, 25 bp, Homo sapien
acttttgttgccttttcattcactt

SEQ ID NO: 4391449 - DNA, 25 bp, Homo sapien
aatcatgagatacaaggcaggtgga

SEQ ID NO: 4391450 - DNA, 25 bp, Homo sapien
aaatcatgagatacaaggcaggtgg

SEQ ID NO: 4391451 - DNA, 25 bp, Homo sapien
gagggatgtttcgaatctgaatttt

SEQ ID NO: 4391452 - DNA, 25 bp, Homo sapien
aggagggatgtttcgaatctgaatt

SEQ ID NO: 4391453 - DNA, 25 bp, Homo sapien
ggagggatgtttcgaatctgaattt

SEQ ID NO: 4391454 - DNA, 25 bp, Homo sapien
acaagtgtgccagaatgagccttca

SEQ ID NO: 4391455 - DNA, 25 bp, Homo sapien
tgcagttcacaagtgtgccagaatg

SEQ ID NO: 4391456 - DNA, 25 bp, Homo sapien
ctgcagttcacaagtgtgccagaat

SEQ ID NO: 4391457 - DNA, 25 bp, Homo sapien
gcagttcacaagtgtgccagaatga

SEQ ID NO: 4391458 - DNA, 25 bp, Homo sapien
caaacagaagtaaaaagagcagcag

SEQ ID NO: 4391459 - DNA, 25 bp, Homo sapien
tcaaacagaagtaaaaagagcagca

SEQ ID NO: 4391460 - DNA, 25 bp, Homo sapien
aacagaagtaaaaagagcagcagga

SEQ ID NO: 4391461 - DNA, 25 bp, Homo sapien
cctcaaacagaagtaaaaagagcag

SEQ ID NO: 4391462 - DNA, 25 bp, Homo sapien
gaattagccgacttctggttgatgg

SEQ ID NO: 4391463 - DNA, 25 bp, Homo sapien
tgtaaactccttcatgaattagccg

SEQ ID NO: 4391464 - DNA, 25 bp, Homo sapien
catcaaccgcaacgtagagtcactg

SEQ ID NO: 4391465 - DNA, 25 bp, Homo sapien
ccttcggaaggatgtccagcttttc

SEQ ID NO: 4391466 - DNA, 25 bp, Homo sapien
gagcacagcatgtgcgcagcaatca

SEQ ID NO: 4391467 - DNA, 25 bp, Homo sapien
acagcatgtgcgcagcaatcagcaa

SEQ ID NO: 4391468 - DNA, 25 bp, Homo sapien
ccaggggcacttgctgctgggcgct

SEQ ID NO: 4391469 - DNA, 25 bp, Homo sapien
agcatgtgcgcagcaatcagcaagc

SEQ ID NO: 4391470 - DNA, 25 bp, Homo sapien
gagtcactgtttccacagactgtgg

SEQ ID NO: 4391471 - DNA, 25 bp, Homo sapien
taatagcagctaggaaatggtatca

SEQ ID NO: 4391472 - DNA, 25 bp, Homo sapien
taacagcatgggacacctccattgc

SEQ ID NO: 4391473 - DNA, 25 bp, Homo sapien
tcctctgttacaggaagggatatgc

SEQ ID NO: 4391474 - DNA, 25 bp, Homo sapien
taaacacagaattccttccagcggc

SEQ ID NO: 4391475 - DNA, 25 bp, Homo sapien
cagagaggtgcacatgggagtcaat

SEQ ID NO: 4391476 - DNA, 25 bp, Homo sapien
aacagcatctgtctcggttcctgag

SEQ ID NO: 4391477 - DNA, 25 bp, Homo sapien
tctaggctagtgacatgtgcaccgc

SEQ ID NO: 4391478 - DNA, 25 bp, Homo sapien
ataacggtgaacgacctacctggct

SEQ ID NO: 4391479 - DNA, 25 bp, Homo sapien
acggtgaacgacctacctggctcag

SEQ ID NO: 4391480 - DNA, 25 bp, Homo sapien
agtccccgctaccacagcttcaaat

SEQ ID NO: 4391481 - DNA, 25 bp, Homo sapien
tgaataacggtgaacgacctacctg

SEQ ID NO: 4391482 - DNA, 25 bp, Homo sapien
caggacctttccttgcctagagcct

SEQ ID NO: 4391483 - DNA, 25 bp, Homo sapien
tcaggacctttccttgcctagagcc

SEQ ID NO: 4391484 - DNA, 25 bp, Homo sapien
gccccaggattatgagaaagtactc

SEQ ID NO: 4391485 - DNA, 25 bp, Homo sapien
gattcagctaaagacctagttcagg

SEQ ID NO: 4391486 - DNA, 25 bp, Homo sapien
taattagaaggcatgacctggagcc

SEQ ID NO: 4391487 - DNA, 25 bp, Homo sapien
tcaccatggtagataagctcctgcc

SEQ ID NO: 4391488 - DNA, 25 bp, Homo sapien
aagcctgcaccatgatggagggtgc

SEQ ID NO: 4391489 - DNA, 25 bp, Homo sapien
agaatacgccaatgggaaaagtgag

SEQ ID NO: 4391490 - DNA, 25 bp, Homo sapien
gggaggcaacaccttagcaacgctc

SEQ ID NO: 4391491 - DNA, 25 bp, Homo sapien
tagcaacgctctgaggaatggaagg

SEQ ID NO: 4391492 - DNA, 25 bp, Homo sapien
aggaatggaaggcagaatacgccaa

SEQ ID NO: 4391493 - DNA, 25 bp, Homo sapien
gaagtgggctgctttatcctgtagc

SEQ ID NO: 4391494 - DNA, 25 bp, Homo sapien
taaacactgacgtaactgatttgcc

SEQ ID NO: 4391495 - DNA, 25 bp, Homo sapien
taacaggtatttagcacacttcttg

SEQ ID NO: 4391496 - DNA, 25 bp, Homo sapien
taaggcctccatcaaagtaatgctc

SEQ ID NO: 4391497 - DNA, 25 bp, Homo sapien
ctggtggcttgttcgtggaatttat

SEQ ID NO: 4391498 - DNA, 25 bp, Homo sapien
catcccaccacccagtactgtacat

SEQ ID NO: 4391499 - DNA, 25 bp, Homo sapien
catcctgttgtaacgctctgtttac

SEQ ID NO: 4391500 - DNA, 25 bp, Homo sapien
tgttcgtggaatttatcacatcctg

SEQ ID NO: 4391501 - DNA, 25 bp, Homo sapien
aaacaagtgaacagacagcaggagt

SEQ ID NO: 4391502 - DNA, 25 bp, Homo sapien
aacaagtgaacagacagcaggagtg

SEQ ID NO: 4391503 - DNA, 25 bp, Homo sapien
ataaacaagtgaacagacagcagga

SEQ ID NO: 4391504 - DNA, 25 bp, Homo sapien
taaacaagtgaacagacagcaggag

SEQ ID NO: 4391505 - DNA, 25 bp, Homo sapien
tgaacacagcgcagaagtgacacca

SEQ ID NO: 4391506 - DNA, 25 bp, Homo sapien
ccaccattttgatgggctattctgg

SEQ ID NO: 4391507 - DNA, 25 bp, Homo sapien
gctccttacagcttacaggaccaca

SEQ ID NO: 4391508 - DNA, 25 bp, Homo sapien
gaaccaccattttgatgggctattc

SEQ ID NO: 4391509 - DNA, 25 bp, Homo sapien
gaaggctaacctgattgcagtgggc

SEQ ID NO: 4391510 - DNA, 25 bp, Homo sapien
tcgccaaggatgtgaacaagtaagc

SEQ ID NO: 4391511 - DNA, 25 bp, Homo sapien
gagcaagcaacacatggagaggcca

SEQ ID NO: 4391512 - DNA, 25 bp, Homo sapien
tgacaggccgcatcaaatcgccaag

SEQ ID NO: 4391513 - DNA, 25 bp, Homo sapien
ggtgcgatcatcattagtgccaaat

SEQ ID NO: 4391514 - DNA, 25 bp, Homo sapien
cacgaacaagttttggaaaggtgcg

SEQ ID NO: 4391515 - DNA, 25 bp, Homo sapien
agcgggaccagggttagccagtcac

SEQ ID NO: 4391516 - DNA, 25 bp, Homo sapien
agaattctgagagtataatttcacg

SEQ ID NO: 4391517 - DNA, 25 bp, Homo sapien
aaatcttttacccaaggccatgcag

SEQ ID NO: 4391518 - DNA, 25 bp, Homo sapien
ggcacttccgttacgtatacctgaa

SEQ ID NO: 4391519 - DNA, 25 bp, Homo sapien
ccctcatgagatactggcagcccat

SEQ ID NO: 4391520 - DNA, 25 bp, Homo sapien
gatttactataatgccccggagatg

SEQ ID NO: 4391521 - DNA, 25 bp, Homo sapien
tcaagttcctctaggcagctgctca

SEQ ID NO: 4391522 - DNA, 25 bp, Homo sapien
cagtaacccagggaaacctgctcaa

SEQ ID NO: 4391523 - DNA, 25 bp, Homo sapien
ccacaagagggtgcacatttcctta

SEQ ID NO: 4391524 - DNA, 25 bp, Homo sapien
gcacatttccttaggaatacagtaa

SEQ ID NO: 4391525 - DNA, 25 bp, Homo sapien
ggccttacatcccttaatctatgtg

SEQ ID NO: 4391526 - DNA, 25 bp, Homo sapien
gcctggccttacatcccttaatcta

SEQ ID NO: 4391527 - DNA, 25 bp, Homo sapien
cttacatcccttaatctatgtgcac

SEQ ID NO: 4391528 - DNA, 25 bp, Homo sapien
acatcccttaatctatgtgcacagc

SEQ ID NO: 4391529 - DNA, 25 bp, Homo sapien
tccttttgaccctgatacgcaaaac

SEQ ID NO: 4391530 - DNA, 25 bp, Homo sapien
tacgcaaaactgtgccatcagtact

SEQ ID NO: 4391531 - DNA, 25 bp, Homo sapien
cgatgtcggactgcacaatgttggg

SEQ ID NO: 4391532 - DNA, 25 bp, Homo sapien
aggcttcacgggcagtctctgcgat

SEQ ID NO: 4391533 - DNA, 25 bp, Homo sapien
tagaggaatggtcgaccaagttcaa

SEQ ID NO: 4391534 - DNA, 25 bp, Homo sapien
taaatagaggaatggtcgaccaagt

SEQ ID NO: 4391535 - DNA, 25 bp, Homo sapien
gaggaatggtcgaccaagttcaagg

SEQ ID NO: 4391536 - DNA, 25 bp, Homo sapien
cctaaatagaggaatggtcgaccaa

SEQ ID NO: 4391537 - DNA, 25 bp, Homo sapien
cctctggtttggtgggtggtctgaa

SEQ ID NO: 4391538 - DNA, 25 bp, Homo sapien
cacactccttgctaactgaagtagc

SEQ ID NO: 4391539 - DNA, 25 bp, Homo sapien
cactccttgctaactgaagtagcca

SEQ ID NO: 4391540 - DNA, 25 bp, Homo sapien
tcacactccttgctaactgaagtag

SEQ ID NO: 4391541 - DNA, 25 bp, Homo sapien
cccagagatagtaattccaaaagct

SEQ ID NO: 4391542 - DNA, 25 bp, Homo sapien
taaaccagaccagacttaagagaat

SEQ ID NO: 4391543 - DNA, 25 bp, Homo sapien
tttgggaagacaacctttcttcaga

SEQ ID NO: 4391544 - DNA, 25 bp, Homo sapien
taagagaatctaccttattataagg

SEQ ID NO: 4391545 - DNA, 25 bp, Homo sapien
ggaaagccgcattgtgaaaggatcc

SEQ ID NO: 4391546 - DNA, 25 bp, Homo sapien
gtgaaaggatccttcaggaaatgcc

SEQ ID NO: 4391547 - DNA, 25 bp, Homo sapien
ccaaggcactggaaagccgcattgt

SEQ ID NO: 4391548 - DNA, 25 bp, Homo sapien
tgtggggaacatcccctccaaggca

SEQ ID NO: 4391549 - DNA, 25 bp, Homo sapien
tcaactggctcatatctgaagagac

SEQ ID NO: 4391550 - DNA, 25 bp, Homo sapien
gctccactcctagtatagtgccagg

SEQ ID NO: 4391551 - DNA, 25 bp, Homo sapien
tgacctgcccgtgacaacagctatt

SEQ ID NO: 4391552 - DNA, 25 bp, Homo sapien
cacccatggtctctcgaagtgccga

SEQ ID NO: 4391553 - DNA, 25 bp, Homo sapien
cacactgtgtaaacttgtttggggg

SEQ ID NO: 4391554 - DNA, 25 bp, Homo sapien
ctgtgtaaacttgtttgggggtctg

SEQ ID NO: 4391555 - DNA, 25 bp, Homo sapien
gctcaaggcctgtggaggctacaaa

SEQ ID NO: 4391556 - DNA, 25 bp, Homo sapien
tctcctgcgacttaagcatttatgg

SEQ ID NO: 4391557 - DNA, 25 bp, Homo sapien
tgttcctgacactccaaggttaaag

SEQ ID NO: 4391558 - DNA, 25 bp, Homo sapien
accttagtaggtccctggtcatgta

SEQ ID NO: 4391559 - DNA, 25 bp, Homo sapien
acaaataggtcccaaggggcaagca

SEQ ID NO: 4391560 - DNA, 25 bp, Homo sapien
tatgtttttgctgcagatccacaaa

SEQ ID NO: 4391561 - DNA, 25 bp, Homo sapien
tcccaaggggcaagcagaacctgag

SEQ ID NO: 4391562 - DNA, 25 bp, Homo sapien
tctgcttatgtttttgctgcagatc

SEQ ID NO: 4391563 - DNA, 25 bp, Homo sapien
acaccaagtagcaggtgcgcctaga

SEQ ID NO: 4391564 - DNA, 25 bp, Homo sapien
caggtgcgcctagaaaggcaaacac

SEQ ID NO: 4391565 - DNA, 25 bp, Homo sapien
tagcaggtgcgcctagaaaggcaaa

SEQ ID NO: 4391566 - DNA, 25 bp, Homo sapien
caagtagcaggtgcgcctagaaagg

SEQ ID NO: 4391567 - DNA, 25 bp, Homo sapien
ctccatttctagatgccagtgtacc

SEQ ID NO: 4391568 - DNA, 25 bp, Homo sapien
atcacactctacactccacctgcac

SEQ ID NO: 4391569 - DNA, 25 bp, Homo sapien
tctagatgccagtgtacctacatca

SEQ ID NO: 4391570 - DNA, 25 bp, Homo sapien
cagtgtacctacatcacactctaca

SEQ ID NO: 4391571 - DNA, 25 bp, Homo sapien
cctgtttagagatgagatcgcaagt

SEQ ID NO: 4391572 - DNA, 25 bp, Homo sapien
cctggtctagagacaaacctgggtt

SEQ ID NO: 4391573 - DNA, 25 bp, Homo sapien
gggatagtatcatctaacaagccaa

SEQ ID NO: 4391574 - DNA, 25 bp, Homo sapien
catgcagcagttaagaggcaaggcc

SEQ ID NO: 4391575 - DNA, 25 bp, Homo sapien
gatagttcaccttagtgtaaagtcc

SEQ ID NO: 4391576 - DNA, 25 bp, Homo sapien
tttgatagttcaccttagtgtaaag

SEQ ID NO: 4391577 - DNA, 25 bp, Homo sapien
gagacacacaactgtggacccagtg

SEQ ID NO: 4391578 - DNA, 25 bp, Homo sapien
gccccacttcctgctaggatagaga

SEQ ID NO: 4391579 - DNA, 25 bp, Homo sapien
tgcagactatcaagaagctccacct

SEQ ID NO: 4391580 - DNA, 25 bp, Homo sapien
gatgaccagagaccaacacaagttc

SEQ ID NO: 4391581 - DNA, 25 bp, Homo sapien
tgtgcttaatctagctactctgtgg

SEQ ID NO: 4391582 - DNA, 25 bp, Homo sapien
cagcctgtccgacaattctgtgatc

SEQ ID NO: 4391583 - DNA, 25 bp, Homo sapien
cagccagatgcatggcatccctgta

SEQ ID NO: 4391584 - DNA, 25 bp, Homo sapien
gccagatgcatggcatccctgtaag

SEQ ID NO: 4391585 - DNA, 25 bp, Homo sapien
ctcagccagatgcatggcatccctg

SEQ ID NO: 4391586 - DNA, 25 bp, Homo sapien
tcagccagatgcatggcatccctgt

SEQ ID NO: 4391587 - DNA, 25 bp, Homo sapien
catagcctgggccatctattaatga

SEQ ID NO: 4391588 - DNA, 25 bp, Homo sapien
taatgtcatagcctgggccatctat

SEQ ID NO: 4391589 - DNA, 25 bp, Homo sapien
gccatctattaatgaatgggcagaa

SEQ ID NO: 4391590 - DNA, 25 bp, Homo sapien
tctctttcgcccttctaaatgtctg

SEQ ID NO: 4391591 - DNA, 25 bp, Homo sapien
tcatacaattgaggcgggtatggac

SEQ ID NO: 4391592 - DNA, 25 bp, Homo sapien
gcaaataattatggcctcatcctta

SEQ ID NO: 4391593 - DNA, 25 bp, Homo sapien
tgctgttctctacctctccttaaca

SEQ ID NO: 4391594 - DNA, 25 bp, Homo sapien
gcctttctggaagggcaaataatta

SEQ ID NO: 4391595 - DNA, 25 bp, Homo sapien
caaaagtagagacatacaacagatc

SEQ ID NO: 4391596 - DNA, 25 bp, Homo sapien
cacttccaaatcatctaccacagga

SEQ ID NO: 4391597 - DNA, 25 bp, Homo sapien
taccacaggaaatctaggaaaggca

SEQ ID NO: 4391598 - DNA, 25 bp, Homo sapien
gcatggcagcatgtaccaagctgaa

SEQ ID NO: 4391599 - DNA, 25 bp, Homo sapien
aacatatgttcaggataaggctgca

SEQ ID NO: 4391600 - DNA, 25 bp, Homo sapien
gtagctatatagttccttggccaaa

SEQ ID NO: 4391601 - DNA, 25 bp, Homo sapien
cgggtatttggtacactggcacaga

SEQ ID NO: 4391602 - DNA, 25 bp, Homo sapien
gaatacatcacttatcacctgtggg

SEQ ID NO: 4391603 - DNA, 25 bp, Homo sapien
aatagctacataactgtgtccacac

SEQ ID NO: 4391604 - DNA, 25 bp, Homo sapien
tagctacataactgtgtccacacag

SEQ ID NO: 4391605 - DNA, 25 bp, Homo sapien
aaatagctacataactgtgtccaca

SEQ ID NO: 4391606 - DNA, 25 bp, Homo sapien
atagctacataactgtgtccacaca

SEQ ID NO: 4391607 - DNA, 25 bp, Homo sapien
gtggaagtcgctggctttctggcat

SEQ ID NO: 4391608 - DNA, 25 bp, Homo sapien
gcatgaagttcaccaggatcccagg

SEQ ID NO: 4391609 - DNA, 25 bp, Homo sapien
gagaagagccggcatgaagttcacc

SEQ ID NO: 4391610 - DNA, 25 bp, Homo sapien
tacaaggctcttacacagagaagag

SEQ ID NO: 4391611 - DNA, 25 bp, Homo sapien
cagtttgcacgagttacaaagctgc

SEQ ID NO: 4391612 - DNA, 25 bp, Homo sapien
tgggaagctgtaaagactgagctct

SEQ ID NO: 4391613 - DNA, 25 bp, Homo sapien
gaaattaggcattctagttagcacg

SEQ ID NO: 4391614 - DNA, 25 bp, Homo sapien
gcttcagattcattcgtggcaaaaa

SEQ ID NO: 4391615 - DNA, 25 bp, Homo sapien
ggtgtgctcaaatcccttaaacagg

SEQ ID NO: 4391616 - DNA, 25 bp, Homo sapien
ggctgactgacctagacgacaatgt

SEQ ID NO: 4391617 - DNA, 25 bp, Homo sapien
taaacctctttgctaccaggtgtgc

SEQ ID NO: 4391618 - DNA, 25 bp, Homo sapien
aatgtgcatcatcccagaagtaggc

SEQ ID NO: 4391619 - DNA, 25 bp, Homo sapien
aatatggcacaagagcctgtctcga

SEQ ID NO: 4391620 - DNA, 25 bp, Homo sapien
aaattcaacaaggatctctgggcgt

SEQ ID NO: 4391621 - DNA, 25 bp, Homo sapien
ggcactaggctaataatacctgctg

SEQ ID NO: 4391622 - DNA, 25 bp, Homo sapien
tttcttcaactcaaccaaattcaac

SEQ ID NO: 4391623 - DNA, 25 bp, Homo sapien
taaatatcctaaccagccactgact

SEQ ID NO: 4391624 - DNA, 25 bp, Homo sapien
tctaggacggtaacatatgggaagg

SEQ ID NO: 4391625 - DNA, 25 bp, Homo sapien
tcccatatttggcatggatcatgca

SEQ ID NO: 4391626 - DNA, 25 bp, Homo sapien
gaataaagggccactgtgacaatgg

SEQ ID NO: 4391627 - DNA, 25 bp, Homo sapien
catggtgatcacaaacacggctcaa

SEQ ID NO: 4391628 - DNA, 25 bp, Homo sapien
cttagcacacaagggcacacaagag

SEQ ID NO: 4391629 - DNA, 25 bp, Homo sapien
gcagagaattgttcgaaccccggag

SEQ ID NO: 4391630 - DNA, 25 bp, Homo sapien
gagagacctgcgaagaactagtagc

SEQ ID NO: 4391631 - DNA, 25 bp, Homo sapien
atatggcttcctacattaaggagtg

SEQ ID NO: 4391632 - DNA, 25 bp, Homo sapien
tgcgcaattatatggcttcctacat

SEQ ID NO: 4391633 - DNA, 25 bp, Homo sapien
ttatatggcttcctacattaaggag

SEQ ID NO: 4391634 - DNA, 25 bp, Homo sapien
gcaattatatggcttcctacattaa

SEQ ID NO: 4391635 - DNA, 25 bp, Homo sapien
caagttttgcagttaagatagttgt

SEQ ID NO: 4391636 - DNA, 25 bp, Homo sapien
agaacacaagttttgcagttaagat

SEQ ID NO: 4391637 - DNA, 25 bp, Homo sapien
aacacaagttttgcagttaagatag

SEQ ID NO: 4391638 - DNA, 25 bp, Homo sapien
cacaagttttgcagttaagatagtt

SEQ ID NO: 4391639 - DNA, 25 bp, Homo sapien
tcttggaatctaacagctctatgga

SEQ ID NO: 4391640 - DNA, 25 bp, Homo sapien
cagctctatggagttttggccctgc

SEQ ID NO: 4391641 - DNA, 25 bp, Homo sapien
tcccagtcttggaatctaacagctc

SEQ ID NO: 4391642 - DNA, 25 bp, Homo sapien
gcaggtttggaaccctggaattcca

SEQ ID NO: 4391643 - DNA, 25 bp, Homo sapien
cagacaggaaggttgagtatcaact

SEQ ID NO: 4391644 - DNA, 25 bp, Homo sapien
tagactcacagaattctagaacaga

SEQ ID NO: 4391645 - DNA, 25 bp, Homo sapien
tcacacaggcagttgttcctaaata

SEQ ID NO: 4391646 - DNA, 25 bp, Homo sapien
cgggctgccctcatatcacaggtgt

SEQ ID NO: 4391647 - DNA, 25 bp, Homo sapien
aaccatttctggctatagaatctag

SEQ ID NO: 4391648 - DNA, 25 bp, Homo sapien
catttctggctatagaatctagtgt

SEQ ID NO: 4391649 - DNA, 25 bp, Homo sapien
tctggctatagaatctagtgtattc

SEQ ID NO: 4391650 - DNA, 25 bp, Homo sapien
gaatctagtgtattcttgaaataag

SEQ ID NO: 4391651 - DNA, 25 bp, Homo sapien
taaggagtacagctaggctggacca

SEQ ID NO: 4391652 - DNA, 25 bp, Homo sapien
gacgctcaggagtgtcctatccaga

SEQ ID NO: 4391653 - DNA, 25 bp, Homo sapien
ccaggtaggtgtgtttgtgctcaca

SEQ ID NO: 4391654 - DNA, 25 bp, Homo sapien
taaaaagcttcctatgctgggtaca

SEQ ID NO: 4391655 - DNA, 25 bp, Homo sapien
gtggtgcggtcttggctcccaggct

SEQ ID NO: 4391656 - DNA, 25 bp, Homo sapien
tggtgcggtcttggctcccaggctc

SEQ ID NO: 4391657 - DNA, 25 bp, Homo sapien
gtgcggtcttggctcccaggctcaa

SEQ ID NO: 4391658 - DNA, 25 bp, Homo sapien
cagtggtgcggtcttggctcccagg

SEQ ID NO: 4391659 - DNA, 25 bp, Homo sapien
agtaaactatcactaggagagaaaa

SEQ ID NO: 4391660 - DNA, 25 bp, Homo sapien
ggacacaaagcggggaacgtcatag

SEQ ID NO: 4391661 - DNA, 25 bp, Homo sapien
caaagcggggaacgtcatagaccgg

SEQ ID NO: 4391662 - DNA, 25 bp, Homo sapien
tagaccggggcctgtcggagagtgg

SEQ ID NO: 4391663 - DNA, 25 bp, Homo sapien
ctatgtagccataaaaagagtgagt

SEQ ID NO: 4391664 - DNA, 25 bp, Homo sapien
ataaaaagagtgagttcatatcctt

SEQ ID NO: 4391665 - DNA, 25 bp, Homo sapien
ctataaacacatgcacacttatgtt

SEQ ID NO: 4391666 - DNA, 25 bp, Homo sapien
acatacagcatggaatactatgtag

SEQ ID NO: 4391667 - DNA, 25 bp, Homo sapien
aagacatgttcttgactaattacgg

SEQ ID NO: 4391668 - DNA, 25 bp, Homo sapien
tttgctaagtagcatcctcattcca

SEQ ID NO: 4391669 - DNA, 25 bp, Homo sapien
gtagagaggttctgatcactagtcc

SEQ ID NO: 4391670 - DNA, 25 bp, Homo sapien
tgttcttgactaattacggtaatac

SEQ ID NO: 4391671 - DNA, 25 bp, Homo sapien
cagtttgcccaaggtttctttctgc

SEQ ID NO: 4391672 - DNA, 25 bp, Homo sapien
gagggttggcctcttctgtaacctg

SEQ ID NO: 4391673 - DNA, 25 bp, Homo sapien
cctcagagccgagttcatgaatgca

SEQ ID NO: 4391674 - DNA, 25 bp, Homo sapien
tcgtagtgggtgctgaagtcatgct

SEQ ID NO: 4391675 - DNA, 25 bp, Homo sapien
gcaataagcgaatagctagttgggt

SEQ ID NO: 4391676 - DNA, 25 bp, Homo sapien
taaatccgattcttgtatccaccta

SEQ ID NO: 4391677 - DNA, 25 bp, Homo sapien
cgcacccaacctaatagagagcatt

SEQ ID NO: 4391678 - DNA, 25 bp, Homo sapien
cacagtaactttagatgctgtctgc

SEQ ID NO: 4391679 - DNA, 25 bp, Homo sapien
cttgacccgggtgacagttcgctgt

SEQ ID NO: 4391680 - DNA, 25 bp, Homo sapien
gatgggaagacgtgcaatgctacct

SEQ ID NO: 4391681 - DNA, 25 bp, Homo sapien
tcaagacagtatgagaggcccaagg

SEQ ID NO: 4391682 - DNA, 25 bp, Homo sapien
ggcccaaggccttattcagtacaga

SEQ ID NO: 4391683 - DNA, 25 bp, Homo sapien
cctataggagaccaaattcatttgc

SEQ ID NO: 4391684 - DNA, 25 bp, Homo sapien
tagttacttcctagaggtgggcaga

SEQ ID NO: 4391685 - DNA, 25 bp, Homo sapien
atcattcaacttgaggtacaaaagc

SEQ ID NO: 4391686 - DNA, 25 bp, Homo sapien
tacaaaagcacattcaagttagcat

SEQ ID NO: 4391687 - DNA, 25 bp, Homo sapien
taaactaagtttcgacacacagcag

SEQ ID NO: 4391688 - DNA, 25 bp, Homo sapien
acttcattgaacagctccagtccag

SEQ ID NO: 4391689 - DNA, 25 bp, Homo sapien
tagaatgagtaataaagggcccaaa

SEQ ID NO: 4391690 - DNA, 25 bp, Homo sapien
actgtaaaggtggtcatcaaaaact

SEQ ID NO: 4391691 - DNA, 25 bp, Homo sapien
tatgtatctccactaacaaaacaaa

SEQ ID NO: 4391692 - DNA, 25 bp, Homo sapien
tatacgtaaggccaatcgcaaaaaa

SEQ ID NO: 4391693 - DNA, 25 bp, Homo sapien
tttacttatacgtaaggccaatcgc

SEQ ID NO: 4391694 - DNA, 25 bp, Homo sapien
gctgtgtgtacgttttttacttata

SEQ ID NO: 4391695 - DNA, 25 bp, Homo sapien
gactgagtaatcaacttccatgatt

SEQ ID NO: 4391696 - DNA, 25 bp, Homo sapien
caacttccatgattttcccatgcaa

SEQ ID NO: 4391697 - DNA, 25 bp, Homo sapien
attttcccatgcaattccactttac

SEQ ID NO: 4391698 - DNA, 25 bp, Homo sapien
tttagagactgagtaatcaacttcc

SEQ ID NO: 4391699 - DNA, 25 bp, Homo sapien
aaattaaagcactcagaaccttgct

SEQ ID NO: 4391700 - DNA, 25 bp, Homo sapien
ttaaagcactcagaaccttgcttag

SEQ ID NO: 4391701 - DNA, 25 bp, Homo sapien
agaaattaaagcactcagaaccttg

SEQ ID NO: 4391702 - DNA, 25 bp, Homo sapien
aaacagaaattaaagcactcagaac

SEQ ID NO: 4391703 - DNA, 25 bp, Homo sapien
taaaatcggacaaaaaattcagaga

SEQ ID NO: 4391704 - DNA, 25 bp, Homo sapien
tgggggagccccgagatctcgaagg

SEQ ID NO: 4391705 - DNA, 25 bp, Homo sapien
aataggagcgcttgagagagcaagc

SEQ ID NO: 4391706 - DNA, 25 bp, Homo sapien
gatgtgccgtcgtgcgagggctggg

SEQ ID NO: 4391707 - DNA, 25 bp, Homo sapien
aggagacgccagagggcgagaggtt

SEQ ID NO: 4391708 - DNA, 25 bp, Homo sapien
gaagagacgctggatttggggaagg

SEQ ID NO: 4391709 - DNA, 25 bp, Homo sapien
ggaagagacgctggatttggggaag

SEQ ID NO: 4391710 - DNA, 25 bp, Homo sapien
ctcgggagccttcggagcggcacgg

SEQ ID NO: 4391711 - DNA, 25 bp, Homo sapien
agccggcgagcctcgggagccttcg

SEQ ID NO: 4391712 - DNA, 25 bp, Homo sapien
ggcgagcctcgggagccttcggagc

SEQ ID NO: 4391713 - DNA, 25 bp, Homo sapien
taaggagccggcgagcctcgggagc

SEQ ID NO: 4391714 - DNA, 25 bp, Homo sapien
ttcagcaggacctgtcccgccaggg

SEQ ID NO: 4391715 - DNA, 25 bp, Homo sapien
aaggcgtagccggacttcagcagga

SEQ ID NO: 4391716 - DNA, 25 bp, Homo sapien
gctcaggttcccgatgtaaagcttg

SEQ ID NO: 4391717 - DNA, 25 bp, Homo sapien
tcgatggcgcggatggcccagttct

SEQ ID NO: 4391718 - DNA, 25 bp, Homo sapien
ccgtctcttccccgagagcccgcgg

SEQ ID NO: 4391719 - DNA, 25 bp, Homo sapien
cggtacccggcgctcctcgcctcct

SEQ ID NO: 4391720 - DNA, 25 bp, Homo sapien
tcttccccgagagcccgcggctccc

SEQ ID NO: 4391721 - DNA, 25 bp, Homo sapien
gtctcttccccgagagcccgcggct

SEQ ID NO: 4391722 - DNA, 25 bp, Homo sapien
aggcggggactcggcgcggctgcct

SEQ ID NO: 4391723 - DNA, 25 bp, Homo sapien
cctcagcctggctccccccaccgcg

SEQ ID NO: 4391724 - DNA, 25 bp, Homo sapien
gaggcggggactcggcgcggctgcc

SEQ ID NO: 4391725 - DNA, 25 bp, Homo sapien
agcctggctccccccaccgcggccg

SEQ ID NO: 4391726 - DNA, 25 bp, Homo sapien
aaagccattcagagaaattatcttg

SEQ ID NO: 4391727 - DNA, 25 bp, Homo sapien
tcagagaaattatcttggagattct

SEQ ID NO: 4391728 - DNA, 25 bp, Homo sapien
ccattcagagaaattatcttggaga

SEQ ID NO: 4391729 - DNA, 25 bp, Homo sapien
cagagaaattatcttggagattctc

SEQ ID NO: 4391730 - DNA, 25 bp, Homo sapien
ctacatcttagtgaacttgaataca

SEQ ID NO: 4391731 - DNA, 25 bp, Homo sapien
tcttagtgaacttgaatacactaac

SEQ ID NO: 4391732 - DNA, 25 bp, Homo sapien
catcttagtgaacttgaatacacta

SEQ ID NO: 4391733 - DNA, 25 bp, Homo sapien
tacatcttagtgaacttgaatacac

SEQ ID NO: 4391734 - DNA, 25 bp, Homo sapien
cccagtgatggagcgtctgcaggct

SEQ ID NO: 4391735 - DNA, 25 bp, Homo sapien
gctgccatttggattgccccagtga

SEQ ID NO: 4391736 - DNA, 25 bp, Homo sapien
cagcagagggtttggtaggatttcc

SEQ ID NO: 4391737 - DNA, 25 bp, Homo sapien
taaggaaccgtatggacacactgca

SEQ ID NO: 4391738 - DNA, 25 bp, Homo sapien
tttgtagtttactttctgtaagcat

SEQ ID NO: 4391739 - DNA, 25 bp, Homo sapien
ccatttgtagtttactttctgtaag

SEQ ID NO: 4391740 - DNA, 25 bp, Homo sapien
ctgaagggctcctttaggaaccatt

SEQ ID NO: 4391741 - DNA, 25 bp, Homo sapien
catttgtagtttactttctgtaagc

SEQ ID NO: 4391742 - DNA, 25 bp, Homo sapien
ggtgcctgcacagtcttctgcactt

SEQ ID NO: 4391743 - DNA, 25 bp, Homo sapien
gctgcccgcccagtctcctgcggtg

SEQ ID NO: 4391744 - DNA, 25 bp, Homo sapien
tgcggtgcctgcacagtcttctgca

SEQ ID NO: 4391745 - DNA, 25 bp, Homo sapien
tcctgcggtgcctgcacagtcttct

SEQ ID NO: 4391746 - DNA, 25 bp, Homo sapien
tcttggccctagaagtcctgactgg

SEQ ID NO: 4391747 - DNA, 25 bp, Homo sapien
gccttcttggccctagaagtcctga

SEQ ID NO: 4391748 - DNA, 25 bp, Homo sapien
ggtcccaataactgtgcctgattct

SEQ ID NO: 4391749 - DNA, 25 bp, Homo sapien
ctccttccgtgtgaggggattcaag

SEQ ID NO: 4391750 - DNA, 25 bp, Homo sapien
ccgaaggctacagctgaaggaggat

SEQ ID NO: 4391751 - DNA, 25 bp, Homo sapien
tatgccgcccaacactctgacatag

SEQ ID NO: 4391752 - DNA, 25 bp, Homo sapien
taaggtagggtagcttatgccgccc

SEQ ID NO: 4391753 - DNA, 25 bp, Homo sapien
cttttctgaagatggcagccctgtt

SEQ ID NO: 4391754 - DNA, 25 bp, Homo sapien
tcagtaattggcaagtactgtttct

SEQ ID NO: 4391755 - DNA, 25 bp, Homo sapien
agtaattggcaagtactgtttcttc

SEQ ID NO: 4391756 - DNA, 25 bp, Homo sapien
ctgtttcttcttgggacaaattgac

SEQ ID NO: 4391757 - DNA, 25 bp, Homo sapien
aattggcaagtactgtttcttcttg

SEQ ID NO: 4391758 - DNA, 25 bp, Homo sapien
ggtagaccccagttcagtcttctag

SEQ ID NO: 4391759 - DNA, 25 bp, Homo sapien
gatggaccaacaattccagttatcc

SEQ ID NO: 4391760 - DNA, 25 bp, Homo sapien
cagatgactaatgctaacgccaggc

SEQ ID NO: 4391761 - DNA, 25 bp, Homo sapien
ttgtaagagcaaaggtggtggcatc

SEQ ID NO: 4391762 - DNA, 25 bp, Homo sapien
agcaacctgctggtgcctggtgtca

SEQ ID NO: 4391763 - DNA, 25 bp, Homo sapien
tgaaaggccatttgtaagcctggcc

SEQ ID NO: 4391764 - DNA, 25 bp, Homo sapien
tgaagattcatgcactgagggtgat

SEQ ID NO: 4391765 - DNA, 25 bp, Homo sapien
cagcagtttccggtcagggagtgac

SEQ ID NO: 4391766 - DNA, 25 bp, Homo sapien
gagaaacttgagcttgattccacta

SEQ ID NO: 4391767 - DNA, 25 bp, Homo sapien
taacaggtttgatggttaagctagt

SEQ ID NO: 4391768 - DNA, 25 bp, Homo sapien
tgatggttaagctagttacatgtaa

SEQ ID NO: 4391769 - DNA, 25 bp, Homo sapien
ggttaagctagttacatgtaattcc

SEQ ID NO: 4391770 - DNA, 25 bp, Homo sapien
gagccaatcaaaatccactgagatg

SEQ ID NO: 4391771 - DNA, 25 bp, Homo sapien
ctgaaggaatattggaggcgtgtcc

SEQ ID NO: 4391772 - DNA, 25 bp, Homo sapien
ggcgtgtccactgctaataaatcca

SEQ ID NO: 4391773 - DNA, 25 bp, Homo sapien
taagtccaatcctacaagagccaat

SEQ ID NO: 4391774 - DNA, 25 bp, Homo sapien
tcaagcgcacttcacaataggattc

SEQ ID NO: 4391775 - DNA, 25 bp, Homo sapien
tcagccctacagctataagaaatgg

SEQ ID NO: 4391776 - DNA, 25 bp, Homo sapien
ccctttcatgaaactggcgactagc

SEQ ID NO: 4391777 - DNA, 25 bp, Homo sapien
ggcgactagcattacagcacatcaa

SEQ ID NO: 4391778 - DNA, 25 bp, Homo sapien
ccaggtacccagatttgagacatca

SEQ ID NO: 4391779 - DNA, 25 bp, Homo sapien
cctaggttcaattcagatcgtggca

SEQ ID NO: 4391780 - DNA, 25 bp, Homo sapien
catgtattaaagtacccgcagtcta

SEQ ID NO: 4391781 - DNA, 25 bp, Homo sapien
catcatgatcaagagaactgtggac

SEQ ID NO: 4391782 - DNA, 25 bp, Homo sapien
ataatagaacaagaacacttctttg

SEQ ID NO: 4391783 - DNA, 25 bp, Homo sapien
aatagaacaagaacacttctttgtg

SEQ ID NO: 4391784 - DNA, 25 bp, Homo sapien
tagaacaagaacacttctttgtgaa

SEQ ID NO: 4391785 - DNA, 25 bp, Homo sapien
agaactctaattataatagaacaag

SEQ ID NO: 4391786 - DNA, 25 bp, Homo sapien
aaacatttgagtgaaattgggcctc

SEQ ID NO: 4391787 - DNA, 25 bp, Homo sapien
tctcaaaacatttgagtgaaattgg

SEQ ID NO: 4391788 - DNA, 25 bp, Homo sapien
caaaacatttgagtgaaattgggcc

SEQ ID NO: 4391789 - DNA, 25 bp, Homo sapien
gcgtttatttaaacacagttctcaa

SEQ ID NO: 4391790 - DNA, 25 bp, Homo sapien
tcatccatgacaggtatagtgttcc

SEQ ID NO: 4391791 - DNA, 25 bp, Homo sapien
tacataaaagccgacaaatccacat

SEQ ID NO: 4391792 - DNA, 25 bp, Homo sapien
tactagcagtacagagttacagagc

SEQ ID NO: 4391793 - DNA, 25 bp, Homo sapien
catgtactttgaagcacccggtttt

SEQ ID NO: 4391794 - DNA, 25 bp, Homo sapien
gaataccctggattcagtagaaaaa

SEQ ID NO: 4391795 - DNA, 25 bp, Homo sapien
taaaagtcacctaacttcactaggc

SEQ ID NO: 4391796 - DNA, 25 bp, Homo sapien
ccaaaagtagtcatcgtaaaaggtg

SEQ ID NO: 4391797 - DNA, 25 bp, Homo sapien
cttggaacaaagcaccaaactacac

SEQ ID NO: 4391798 - DNA, 25 bp, Homo sapien
tgggaagaaaagaatgaacatgctt

SEQ ID NO: 4391799 - DNA, 25 bp, Homo sapien
ctgggaagaaaagaatgaacatgct

SEQ ID NO: 4391800 - DNA, 25 bp, Homo sapien
gggaagaaaagaatgaacatgcttt

SEQ ID NO: 4391801 - DNA, 25 bp, Homo sapien
ggaagaaaagaatgaacatgcttta

SEQ ID NO: 4391802 - DNA, 25 bp, Homo sapien
ggaacgtgatctgtatcctccacga

SEQ ID NO: 4391803 - DNA, 25 bp, Homo sapien
tgatctgtatcctccacgactatag

SEQ ID NO: 4391804 - DNA, 25 bp, Homo sapien
ggtgagtatgatcgagatctggaac

SEQ ID NO: 4391805 - DNA, 25 bp, Homo sapien
cgagatctggaacgtgatctgtatc

SEQ ID NO: 4391806 - DNA, 25 bp, Homo sapien
taaggtcaaataatccttgctatat

SEQ ID NO: 4391807 - DNA, 25 bp, Homo sapien
accttcaaggtctgtttaaatcttg

SEQ ID NO: 4391808 - DNA, 25 bp, Homo sapien
gtgtcaaataagcactcttaataac

SEQ ID NO: 4391809 - DNA, 25 bp, Homo sapien
aaaaggaaagctgcatgaaccttca

SEQ ID NO: 4391810 - DNA, 25 bp, Homo sapien
tgttgtacagatgctaagtcctctc

SEQ ID NO: 4391811 - DNA, 25 bp, Homo sapien
tgtacctcatcacggtataaaatgg

SEQ ID NO: 4391812 - DNA, 25 bp, Homo sapien
ttttcatgagcttcaaacagtctga

SEQ ID NO: 4391813 - DNA, 25 bp, Homo sapien
aaggctggcttgaatgttcttgtgc

SEQ ID NO: 4391814 - DNA, 25 bp, Homo sapien
tataaatctgatccctgtcttgggc

SEQ ID NO: 4391815 - DNA, 25 bp, Homo sapien
ctataaatctgatccctgtcttggg

SEQ ID NO: 4391816 - DNA, 25 bp, Homo sapien
ataaatctgatccctgtcttgggca

SEQ ID NO: 4391817 - DNA, 25 bp, Homo sapien
taaatctgatccctgtcttgggcag

SEQ ID NO: 4391818 - DNA, 25 bp, Homo sapien
tgcaggtcaagtgatttgccaccct

SEQ ID NO: 4391819 - DNA, 25 bp, Homo sapien
gaaaggcaacacaacacgcattcag

SEQ ID NO: 4391820 - DNA, 25 bp, Homo sapien
tacacattttgacaagggaggacca

SEQ ID NO: 4391821 - DNA, 25 bp, Homo sapien
tagaaactggcatagggttctctct

SEQ ID NO: 4391822 - DNA, 25 bp, Homo sapien
tagccccgatcatatcctctgtcat

SEQ ID NO: 4391823 - DNA, 25 bp, Homo sapien
tagtaatcccgacggcgagagctgc

SEQ ID NO: 4391824 - DNA, 25 bp, Homo sapien
tagtcccgatcatcatagccccgat

SEQ ID NO: 4391825 - DNA, 25 bp, Homo sapien
gatctgctatagtagtcccgatcat

SEQ ID NO: 4391826 - DNA, 25 bp, Homo sapien
caactctgatcctacgcccatcaag

SEQ ID NO: 4391827 - DNA, 25 bp, Homo sapien
taggtctccccatgtaaattcctgg

SEQ ID NO: 4391828 - DNA, 25 bp, Homo sapien
attcctggtgttggcgtatgtggtc

SEQ ID NO: 4391829 - DNA, 25 bp, Homo sapien
catcaagctccattccattggcacg

SEQ ID NO: 4391830 - DNA, 25 bp, Homo sapien
taaacactgactacatatcctggcg

SEQ ID NO: 4391831 - DNA, 25 bp, Homo sapien
caagctagtgtttacgcccaggcag

SEQ ID NO: 4391832 - DNA, 25 bp, Homo sapien
tatagcctgtaggtcaaatctggcc

SEQ ID NO: 4391833 - DNA, 25 bp, Homo sapien
ttaattaggaaatgggcggccgcgc

SEQ ID NO: 4391834 - DNA, 25 bp, Homo sapien
tagacacatcggcaatgggaccata

SEQ ID NO: 4391835 - DNA, 25 bp, Homo sapien
tctgtggtgtacaagctcagcccaa

SEQ ID NO: 4391836 - DNA, 25 bp, Homo sapien
tcttgaacgcctagactgctggtca

SEQ ID NO: 4391837 - DNA, 25 bp, Homo sapien
tacaaaggcaaatcctcttgaacgc

SEQ ID NO: 4391838 - DNA, 25 bp, Homo sapien
cgtaagaaacaagagttggccaggc

SEQ ID NO: 4391839 - DNA, 25 bp, Homo sapien
taagtaggtaaacaagcactcgtgc

SEQ ID NO: 4391840 - DNA, 25 bp, Homo sapien
tcgtgctggcgaaaagcaacttggc

SEQ ID NO: 4391841 - DNA, 25 bp, Homo sapien
taagtacataaacgaagcctgaggg

SEQ ID NO: 4391842 - DNA, 25 bp, Homo sapien
ccaacatgacgcctgcgagtagaca

SEQ ID NO: 4391843 - DNA, 25 bp, Homo sapien
catgacgcctgcgagtagacatggg

SEQ ID NO: 4391844 - DNA, 25 bp, Homo sapien
cgattcccaacatgacgcctgcgag

SEQ ID NO: 4391845 - DNA, 25 bp, Homo sapien
cgcctgcgagtagacatgggagaat

SEQ ID NO: 4391846 - DNA, 25 bp, Homo sapien
gactgtaagacctgctacgtgatcg

SEQ ID NO: 4391847 - DNA, 25 bp, Homo sapien
tgctacgtgatcgtctatgggagcg

SEQ ID NO: 4391848 - DNA, 25 bp, Homo sapien
gataatctcgactgtaagacctgct

SEQ ID NO: 4391849 - DNA, 25 bp, Homo sapien
tcgtctatgggagcgggagcgagac

SEQ ID NO: 4391850 - DNA, 25 bp, Homo sapien
cgtgaccgggtataatgccttcggg

SEQ ID NO: 4391851 - DNA, 25 bp, Homo sapien
gaccgggtataatgccttcgggagc

SEQ ID NO: 4391852 - DNA, 25 bp, Homo sapien
aatgccttcgggagcttcttctgga

SEQ ID NO: 4391853 - DNA, 25 bp, Homo sapien
ggtataatgccttcgggagcttctt

SEQ ID NO: 4391854 - DNA, 25 bp, Homo sapien
tagtaggatcaatacttttcttctc

SEQ ID NO: 4391855 - DNA, 25 bp, Homo sapien
catggttaccaatttagtaggatca

SEQ ID NO: 4391856 - DNA, 25 bp, Homo sapien
tccaggaatatgctaacatggttac

SEQ ID NO: 4391857 - DNA, 25 bp, Homo sapien
ctgcaagacaaagacctcctaaggt

SEQ ID NO: 4391858 - DNA, 25 bp, Homo sapien
gacctggactttgatctggaacgcc

SEQ ID NO: 4391859 - DNA, 25 bp, Homo sapien
cgggacctggactttgatctggaac

SEQ ID NO: 4391860 - DNA, 25 bp, Homo sapien
cctggaatcttccttggagcgagac

SEQ ID NO: 4391861 - DNA, 25 bp, Homo sapien
cgcctggaatcttccttggagcgag

SEQ ID NO: 4391862 - DNA, 25 bp, Homo sapien
acttccacttctggaagcagaacgg

SEQ ID NO: 4391863 - DNA, 25 bp, Homo sapien
cacttctggaagcagaacgggattc

SEQ ID NO: 4391864 - DNA, 25 bp, Homo sapien
gatttccccgatccgtgagcacttc

SEQ ID NO: 4391865 - DNA, 25 bp, Homo sapien
cttgcaggggtatgccttgcagatt

SEQ ID NO: 4391866 - DNA, 25 bp, Homo sapien
tggtgagggacagcaatccccttcc

SEQ ID NO: 4391867 - DNA, 25 bp, Homo sapien
tcaagcagttaagggaactgtccaa

SEQ ID NO: 4391868 - DNA, 25 bp, Homo sapien
tccacctttttggagcagggataag

SEQ ID NO: 4391869 - DNA, 25 bp, Homo sapien
gaatgttactccataaagactaggg

SEQ ID NO: 4391870 - DNA, 25 bp, Homo sapien
cagggcaaacttatggaaaaccagg

SEQ ID NO: 4391871 - DNA, 25 bp, Homo sapien
tgccaaggcaccaaaacagtagatg

SEQ ID NO: 4391872 - DNA, 25 bp, Homo sapien
taactaggtcaccaacgagctaaag

SEQ ID NO: 4391873 - DNA, 25 bp, Homo sapien
aaatcaggagctcctaacctagggc

SEQ ID NO: 4391874 - DNA, 25 bp, Homo sapien
cagcttgggtcataaccagattcca

SEQ ID NO: 4391875 - DNA, 25 bp, Homo sapien
ccgaggaggagacacattaggaccc

SEQ ID NO: 4391876 - DNA, 25 bp, Homo sapien
caatggtccactagcaacgttttct

SEQ ID NO: 4391877 - DNA, 25 bp, Homo sapien
catcttccctatggcccgaggagga

SEQ ID NO: 4391878 - DNA, 25 bp, Homo sapien
tctagagaggacaacatgaagccca

SEQ ID NO: 4391879 - DNA, 25 bp, Homo sapien
tcaactgggtagaaaaccgctggct

SEQ ID NO: 4391880 - DNA, 25 bp, Homo sapien
taagtgcaagggataccaggtaacc

SEQ ID NO: 4391881 - DNA, 25 bp, Homo sapien
catgtgtgacatgatacccttggca

SEQ ID NO: 4391882 - DNA, 25 bp, Homo sapien
aatattctacaagtgggacttctgg

SEQ ID NO: 4391883 - DNA, 25 bp, Homo sapien
tctgattccagattacttcttatct

SEQ ID NO: 4391884 - DNA, 25 bp, Homo sapien
ctgataattagcatgcattctttct

SEQ ID NO: 4391885 - DNA, 25 bp, Homo sapien
cacacaaattgctcaatattctaca

SEQ ID NO: 4391886 - DNA, 25 bp, Homo sapien
ttataaaacttgtcaaatgacgact

SEQ ID NO: 4391887 - DNA, 25 bp, Homo sapien
taaaacttgtcaaatgacgacttcc

SEQ ID NO: 4391888 - DNA, 25 bp, Homo sapien
caaatgacgacttccgcattttcct

SEQ ID NO: 4391889 - DNA, 25 bp, Homo sapien
cttgtcaaatgacgacttccgcatt

SEQ ID NO: 4391890 - DNA, 25 bp, Homo sapien
aaagaaactagaatatgcagctcaa

SEQ ID NO: 4391891 - DNA, 25 bp, Homo sapien
tactccaaatagacttatcatgctt

SEQ ID NO: 4391892 - DNA, 25 bp, Homo sapien
gctggttctagaatatatggtaatc

SEQ ID NO: 4391893 - DNA, 25 bp, Homo sapien
gaagtgcgccactgaacatttactg

SEQ ID NO: 4391894 - DNA, 25 bp, Homo sapien
taagtcttctggatgtccaaaggag

SEQ ID NO: 4391895 - DNA, 25 bp, Homo sapien
gcaagtctttatacctatctgggca

SEQ ID NO: 4391896 - DNA, 25 bp, Homo sapien
tactgcctacataaaacatgctagt

SEQ ID NO: 4391897 - DNA, 25 bp, Homo sapien
caatatgccagtagctatgaaggaa

SEQ ID NO: 4391898 - DNA, 25 bp, Homo sapien
tcaactcagctaagttcaagtggct

SEQ ID NO: 4391899 - DNA, 25 bp, Homo sapien
taaaaccagaagatcaactcttggg

SEQ ID NO: 4391900 - DNA, 25 bp, Homo sapien
gcagccaaactgtctaccagaagag

SEQ ID NO: 4391901 - DNA, 25 bp, Homo sapien
taaaacttcgatacagacagggcac

SEQ ID NO: 4391902 - DNA, 25 bp, Homo sapien
gggaatttcaagactgtaatttgct

SEQ ID NO: 4391903 - DNA, 25 bp, Homo sapien
tatccaaactgtcaggtaacaatct

SEQ ID NO: 4391904 - DNA, 25 bp, Homo sapien
taatttgctacagtgaagaacttct

SEQ ID NO: 4391905 - DNA, 25 bp, Homo sapien
tgataacatcaatctcaatgtaacc

SEQ ID NO: 4391906 - DNA, 25 bp, Homo sapien
aatgtcacgttctagttccagacaa

SEQ ID NO: 4391907 - DNA, 25 bp, Homo sapien
gaaaatgtcacgttctagttccaga

SEQ ID NO: 4391908 - DNA, 25 bp, Homo sapien
gtaatgtcagcttgaaaatgtcacg

SEQ ID NO: 4391909 - DNA, 25 bp, Homo sapien
cctgtaatgtcagcttgaaaatgtc

SEQ ID NO: 4391910 - DNA, 25 bp, Homo sapien
caaagaaatggtgctagtcaacccc

SEQ ID NO: 4391911 - DNA, 25 bp, Homo sapien
cacagaccaacgagggatgagggac

SEQ ID NO: 4391912 - DNA, 25 bp, Homo sapien
gatgagggacacaccagttctttaa

SEQ ID NO: 4391913 - DNA, 25 bp, Homo sapien
tttggccagatcaggttaagcctgc

SEQ ID NO: 4391914 - DNA, 25 bp, Homo sapien
cgtaaaagtttagagatctcggcca

SEQ ID NO: 4391915 - DNA, 25 bp, Homo sapien
caccacaggcatgtctaagatcaag

SEQ ID NO: 4391916 - DNA, 25 bp, Homo sapien
tctcggccagaaagcgaagactctt

SEQ ID NO: 4391917 - DNA, 25 bp, Homo sapien
tcaaagattgcgaaaaacacagtgt

SEQ ID NO: 4391918 - DNA, 25 bp, Homo sapien
tttgcagtccaaacaccaatgactg

SEQ ID NO: 4391919 - DNA, 25 bp, Homo sapien
tctaaaacactcgtgacattggagt

SEQ ID NO: 4391920 - DNA, 25 bp, Homo sapien
tcatccgagtatgtaaacgcaaggc

SEQ ID NO: 4391921 - DNA, 25 bp, Homo sapien
cattggagtcaatcggcttcgggaa

SEQ ID NO: 4391922 - DNA, 25 bp, Homo sapien
gggaagccctttcggcatcagagaa

SEQ ID NO: 4391923 - DNA, 25 bp, Homo sapien
aaactgtagccaacacacgctgtgg

SEQ ID NO: 4391924 - DNA, 25 bp, Homo sapien
ttctagcaagcctcgtatgttcgca

SEQ ID NO: 4391925 - DNA, 25 bp, Homo sapien
caatcccgtggaaatgcgatgtcca

SEQ ID NO: 4391926 - DNA, 25 bp, Homo sapien
aagaacgtcgtctgtccccttgcac

SEQ ID NO: 4391927 - DNA, 25 bp, Homo sapien
cccttgcaccccaccacgcggcctt

SEQ ID NO: 4391928 - DNA, 25 bp, Homo sapien
caaaagaacgtcgtctgtccccttg

SEQ ID NO: 4391929 - DNA, 25 bp, Homo sapien
cttgcaccccaccacgcggccttac

SEQ ID NO: 4391930 - DNA, 25 bp, Homo sapien
aagatggctgcggcggaccttcgca

SEQ ID NO: 4391931 - DNA, 25 bp, Homo sapien
tcgcaggagagcaacgccgaaataa

SEQ ID NO: 4391932 - DNA, 25 bp, Homo sapien
gccgaaataagatatcgctcccctc

SEQ ID NO: 4391933 - DNA, 25 bp, Homo sapien
gggacgcagcggccattttcatctt

SEQ ID NO: 4391934 - DNA, 25 bp, Homo sapien
tcgccgtagttctgctcgccgctgt

SEQ ID NO: 4391935 - DNA, 25 bp, Homo sapien
cgtagttctgctcgccgctgtcgct

SEQ ID NO: 4391936 - DNA, 25 bp, Homo sapien
gccgtagttctgctcgccgctgtcg

SEQ ID NO: 4391937 - DNA, 25 bp, Homo sapien
gctcgccgtagttctgctcgccgct

SEQ ID NO: 4391938 - DNA, 25 bp, Homo sapien
ctgtcgccggtcgatgtgcttcaat

SEQ ID NO: 4391939 - DNA, 25 bp, Homo sapien
gatgtgcttcaatcgaagctgccaa

SEQ ID NO: 4391940 - DNA, 25 bp, Homo sapien
cggtcgatgtgcttcaatcgaagct

SEQ ID NO: 4391941 - DNA, 25 bp, Homo sapien
gcttcaatcgaagctgccaacctct

SEQ ID NO: 4391942 - DNA, 25 bp, Homo sapien
cagccccgcacgacgcgccggtcgc

SEQ ID NO: 4391943 - DNA, 25 bp, Homo sapien
agccccgcacgacgcgccggtcgcc

SEQ ID NO: 4391944 - DNA, 25 bp, Homo sapien
cgcacgacgcgccggtcgcccagcc

SEQ ID NO: 4391945 - DNA, 25 bp, Homo sapien
ccccgcacgacgcgccggtcgccca

SEQ ID NO: 4391946 - DNA, 25 bp, Homo sapien
ctccgcacgggctctaactctaccg

SEQ ID NO: 4391947 - DNA, 25 bp, Homo sapien
agagccgaaatgctccgcaccgcct

SEQ ID NO: 4391948 - DNA, 25 bp, Homo sapien
gcaccgcctccgcacgggctctaac

SEQ ID NO: 4391949 - DNA, 25 bp, Homo sapien
gctcagagccgaaatgctccgcacc

SEQ ID NO: 4391950 - DNA, 25 bp, Homo sapien
gatgatggctgtggttctccctgcc

SEQ ID NO: 4391951 - DNA, 25 bp, Homo sapien
gtgctctctccacccacactatctc

SEQ ID NO: 4391952 - DNA, 25 bp, Homo sapien
cttttaccatgaaatgatgatggct

SEQ ID NO: 4391953 - DNA, 25 bp, Homo sapien
cttcacctggttgattcctacccat

SEQ ID NO: 4391954 - DNA, 25 bp, Homo sapien
gatccatgatttgcccctgttttgg

SEQ ID NO: 4391955 - DNA, 25 bp, Homo sapien
taaatgaaagagtagagggacaggt

SEQ ID NO: 4391956 - DNA, 25 bp, Homo sapien
caggagcaggagatgtaaatgaaag

SEQ ID NO: 4391957 - DNA, 25 bp, Homo sapien
ttcctcttgggagaataatcgggca

SEQ ID NO: 4391958 - DNA, 25 bp, Homo sapien
tccttccgtcttatttcctgctgct

SEQ ID NO: 4391959 - DNA, 25 bp, Homo sapien
cctttgctctccttccgtcttattt

SEQ ID NO: 4391960 - DNA, 25 bp, Homo sapien
tgctgctcacatagcattgctgcag

SEQ ID NO: 4391961 - DNA, 25 bp, Homo sapien
ttcctgctgctcacatagcattgct

SEQ ID NO: 4391962 - DNA, 25 bp, Homo sapien
atttcggctggtgtcgctgctccag

SEQ ID NO: 4391963 - DNA, 25 bp, Homo sapien
tcgctgctccagggaaagttctgtt

SEQ ID NO: 4391964 - DNA, 25 bp, Homo sapien
gctgctccagggaaagttctgttac

SEQ ID NO: 4391965 - DNA, 25 bp, Homo sapien
gaagaaacacagcatttcggctggt

SEQ ID NO: 4391966 - DNA, 25 bp, Homo sapien
aagaacttagtttgaaagccatggg

SEQ ID NO: 4391967 - DNA, 25 bp, Homo sapien
tatgtgaagggccatgtagcacccc

SEQ ID NO: 4391968 - DNA, 25 bp, Homo sapien
ccctgcaggagctcaaggtggctct

SEQ ID NO: 4391969 - DNA, 25 bp, Homo sapien
ccagggcaattttggagagcaaaaa

SEQ ID NO: 4391970 - DNA, 25 bp, Homo sapien
taaaagagcaaataaacccacaatg

SEQ ID NO: 4391971 - DNA, 25 bp, Homo sapien
tcatttatacttcagatagataatt

SEQ ID NO: 4391972 - DNA, 25 bp, Homo sapien
ttatacttcagatagataatttggg

SEQ ID NO: 4391973 - DNA, 25 bp, Homo sapien
gatgtaatttacacttcatttatac

SEQ ID NO: 4391974 - DNA, 25 bp, Homo sapien
gctacaggagtcttaggccagagcc

SEQ ID NO: 4391975 - DNA, 25 bp, Homo sapien
gagaactgctgcatttcaaggccta

SEQ ID NO: 4391976 - DNA, 25 bp, Homo sapien
tccattggtcttggagggaactcaa

SEQ ID NO: 4391977 - DNA, 25 bp, Homo sapien
aatttagatgggtgaacctggtctc

SEQ ID NO: 4391978 - DNA, 25 bp, Homo sapien
ccctcgcccccacttctgccagcac

SEQ ID NO: 4391979 - DNA, 25 bp, Homo sapien
cagcacactcccctcgcccccactt

SEQ ID NO: 4391980 - DNA, 25 bp, Homo sapien
actcccctcgcccccacttctgcca

SEQ ID NO: 4391981 - DNA, 25 bp, Homo sapien
tcccctcgcccccacttctgccagc

SEQ ID NO: 4391982 - DNA, 25 bp, Homo sapien
cagggtctggtcctcagcccttttc

SEQ ID NO: 4391983 - DNA, 25 bp, Homo sapien
agggtctggtcctcagcccttttct

SEQ ID NO: 4391984 - DNA, 25 bp, Homo sapien
tcgatgccactgtccattggtaagg

SEQ ID NO: 4391985 - DNA, 25 bp, Homo sapien
ggtttttactgctgcacggccagaa

SEQ ID NO: 4391986 - DNA, 25 bp, Homo sapien
caaagcgaaacatgggctacactta

SEQ ID NO: 4391987 - DNA, 25 bp, Homo sapien
gaagaggatctctcgactttccacc

SEQ ID NO: 4391988 - DNA, 25 bp, Homo sapien
tgagtccaatgggaatgcaaccgtg

SEQ ID NO: 4391989 - DNA, 25 bp, Homo sapien
aacaaggcgggctttcacatggcca

SEQ ID NO: 4391990 - DNA, 25 bp, Homo sapien
tgtcttcataagttggcacggccct

SEQ ID NO: 4391991 - DNA, 25 bp, Homo sapien
tacagaatataacgcagcttggcag

SEQ ID NO: 4391992 - DNA, 25 bp, Homo sapien
gcagcggtccatgtccaggaggtaa

SEQ ID NO: 4391993 - DNA, 25 bp, Homo sapien
caaatttgtagacgtatcgctctcc

SEQ ID NO: 4391994 - DNA, 25 bp, Homo sapien
ggacgctggttatccgggaaagcca

SEQ ID NO: 4391995 - DNA, 25 bp, Homo sapien
tctgccttcaggaacggacgctggt

SEQ ID NO: 4391996 - DNA, 25 bp, Homo sapien
atcaggggaagagaacgaggtattc

SEQ ID NO: 4391997 - DNA, 25 bp, Homo sapien
cttacagggcccagttggaacaggg

SEQ ID NO: 4391998 - DNA, 25 bp, Homo sapien
cccagttggaacagggcatgggatc

SEQ ID NO: 4391999 - DNA, 25 bp, Homo sapien
gttggaacagggcatgggatcaggg

SEQ ID NO: 4392000 - DNA, 25 bp, Homo sapien
cgagcctgcgcagaagccttaagta

SEQ ID NO: 4392001 - DNA, 25 bp, Homo sapien
aaggagcagccgattaccccaatca

SEQ ID NO: 4392002 - DNA, 25 bp, Homo sapien
cagacttattttgagaactcctggg

SEQ ID NO: 4392003 - DNA, 25 bp, Homo sapien
gaaatctgatgagagcgagcctgcg

SEQ ID NO: 4392004 - DNA, 25 bp, Homo sapien
tcaaggacctcatggtatgtggctg

SEQ ID NO: 4392005 - DNA, 25 bp, Homo sapien
tctgctacactgagggaaccgctaa

SEQ ID NO: 4392006 - DNA, 25 bp, Homo sapien
gacatctgcgtcaatgggatcacct

SEQ ID NO: 4392007 - DNA, 25 bp, Homo sapien
tgttcagcaatagtacaagaggcac

SEQ ID NO: 4392008 - DNA, 25 bp, Homo sapien
tgatgcccttttcatagtaatagcg

SEQ ID NO: 4392009 - DNA, 25 bp, Homo sapien
atagtaatagcggagagagcggctc

SEQ ID NO: 4392010 - DNA, 25 bp, Homo sapien
agtaatagcggagagagcggctcag

SEQ ID NO: 4392011 - DNA, 25 bp, Homo sapien
gatgcccttttcatagtaatagcgg

SEQ ID NO: 4392012 - DNA, 25 bp, Homo sapien
gaaaggtttggtatacgcacagatt

SEQ ID NO: 4392013 - DNA, 25 bp, Homo sapien
tggagaaaggtttggtatacgcaca

SEQ ID NO: 4392014 - DNA, 25 bp, Homo sapien
aggtttggtatacgcacagatttca

SEQ ID NO: 4392015 - DNA, 25 bp, Homo sapien
ggtatacgcacagatttcaaagcag

SEQ ID NO: 4392016 - DNA, 25 bp, Homo sapien
tcctgttaaccccatgccagcgtat

SEQ ID NO: 4392017 - DNA, 25 bp, Homo sapien
agcgagccctagagttaactgaaca

SEQ ID NO: 4392018 - DNA, 25 bp, Homo sapien
ttctctggtgtgctaaagcgagccc

SEQ ID NO: 4392019 - DNA, 25 bp, Homo sapien
catgccagcgtatttctctggtgtg

SEQ ID NO: 4392020 - DNA, 25 bp, Homo sapien
cattaagattgagccacctctgata

SEQ ID NO: 4392021 - DNA, 25 bp, Homo sapien
tacagtatgttcacgtagactcaga

SEQ ID NO: 4392022 - DNA, 25 bp, Homo sapien
ctttccaagagggagagcatatcct

SEQ ID NO: 4392023 - DNA, 25 bp, Homo sapien
tcagagatagactatggcccacagg

SEQ ID NO: 4392024 - DNA, 25 bp, Homo sapien
cattggctgggtcatcaagaagggt

SEQ ID NO: 4392025 - DNA, 25 bp, Homo sapien
agggggcccctctcgatacatggta

SEQ ID NO: 4392026 - DNA, 25 bp, Homo sapien
tgaagggaacctcgcctctggtaag

SEQ ID NO: 4392027 - DNA, 25 bp, Homo sapien
tcttccggttctatcagcttgaact

SEQ ID NO: 4392028 - DNA, 25 bp, Homo sapien
cacaagtgtcgtcaaagtataatcg

SEQ ID NO: 4392029 - DNA, 25 bp, Homo sapien
cacaacacaagtgtcgtcaaagtat

SEQ ID NO: 4392030 - DNA, 25 bp, Homo sapien
caagtgtcgtcaaagtataatcggg

SEQ ID NO: 4392031 - DNA, 25 bp, Homo sapien
cttccagtctctcaggcacaacaca

SEQ ID NO: 4392032 - DNA, 25 bp, Homo sapien
aactgacattctagctccattctga

SEQ ID NO: 4392033 - DNA, 25 bp, Homo sapien
aagggatagggcacaagaacttgag

SEQ ID NO: 4392034 - DNA, 25 bp, Homo sapien
ttgagcagacagcatacacccttga

SEQ ID NO: 4392035 - DNA, 25 bp, Homo sapien
ctgctcctgctcctaattagagtga

SEQ ID NO: 4392036 - DNA, 25 bp, Homo sapien
taagcttgggtattagtcaagcaaa

SEQ ID NO: 4392037 - DNA, 25 bp, Homo sapien
gggtattagtcaagcaaagaaagag

SEQ ID NO: 4392038 - DNA, 25 bp, Homo sapien
gcttgggtattagtcaagcaaagaa

SEQ ID NO: 4392039 - DNA, 25 bp, Homo sapien
ttttaagcttgggtattagtcaagc

SEQ ID NO: 4392040 - DNA, 25 bp, Homo sapien
tgtaggatgactggcagttaggcac

SEQ ID NO: 4392041 - DNA, 25 bp, Homo sapien
agaaataaccccctctcatgtagga

SEQ ID NO: 4392042 - DNA, 25 bp, Homo sapien
tggctgctggagaaataaccccctc

SEQ ID NO: 4392043 - DNA, 25 bp, Homo sapien
cccctctcatgtaggatgactggca

SEQ ID NO: 4392044 - DNA, 25 bp, Homo sapien
aggtggacacaatcctgtcaatagt

SEQ ID NO: 4392045 - DNA, 25 bp, Homo sapien
ggtggacacaatcctgtcaatagtt

SEQ ID NO: 4392046 - DNA, 25 bp, Homo sapien
ctgacatttgccgatggtaactggg

SEQ ID NO: 4392047 - DNA, 25 bp, Homo sapien
tcccattggtgactggaacccgtgt

SEQ ID NO: 4392048 - DNA, 25 bp, Homo sapien
gcccgggaccccatgttcatagagt

SEQ ID NO: 4392049 - DNA, 25 bp, Homo sapien
gaatcgacgcagtaatcccgaggct

SEQ ID NO: 4392050 - DNA, 25 bp, Homo sapien
gggttcagacagttgtctctgaaat

SEQ ID NO: 4392051 - DNA, 25 bp, Homo sapien
gggtggcagggttcagacagttgtc

SEQ ID NO: 4392052 - DNA, 25 bp, Homo sapien
gcagggttcagacagttgtctctga

SEQ ID NO: 4392053 - DNA, 25 bp, Homo sapien
tggcagggttcagacagttgtctct

SEQ ID NO: 4392054 - DNA, 25 bp, Homo sapien
tagaggcctgtgatctgcagaacag

SEQ ID NO: 4392055 - DNA, 25 bp, Homo sapien
gatagctccgagatggcatgtgccg

SEQ ID NO: 4392056 - DNA, 25 bp, Homo sapien
tccccgcggcataactttaaggatg

SEQ ID NO: 4392057 - DNA, 25 bp, Homo sapien
taaggatgcgcaaagcttagaggcc

SEQ ID NO: 4392058 - DNA, 25 bp, Homo sapien
ttacgttatgaaaaccgttagatgc

SEQ ID NO: 4392059 - DNA, 25 bp, Homo sapien
tgaaaaccgttagatgctttttctg

SEQ ID NO: 4392060 - DNA, 25 bp, Homo sapien
ccacactcccaacatttggtttacg

SEQ ID NO: 4392061 - DNA, 25 bp, Homo sapien
tcccaacatttggtttacgttatga

SEQ ID NO: 4392062 - DNA, 25 bp, Homo sapien
cagctcacctctgcttagacaattt

SEQ ID NO: 4392063 - DNA, 25 bp, Homo sapien
cttagacaatttggtggtccccact

SEQ ID NO: 4392064 - DNA, 25 bp, Homo sapien
agtggcacaatgagatcatgggagt

SEQ ID NO: 4392065 - DNA, 25 bp, Homo sapien
gcacaatgagatcatgggagttttg

SEQ ID NO: 4392066 - DNA, 25 bp, Homo sapien
gatggatactggttttcaggcatca

SEQ ID NO: 4392067 - DNA, 25 bp, Homo sapien
tggttttcaggcatcatctttggca

SEQ ID NO: 4392068 - DNA, 25 bp, Homo sapien
gggctgatgtggtggtcgggggacc

SEQ ID NO: 4392069 - DNA, 25 bp, Homo sapien
ggaccgcaaatgtttgctgctgtgg

SEQ ID NO: 4392070 - DNA, 25 bp, Homo sapien
caggggcatgccctgaggtgggcag

SEQ ID NO: 4392071 - DNA, 25 bp, Homo sapien
agagggaggcttcctatcataggca

SEQ ID NO: 4392072 - DNA, 25 bp, Homo sapien
aggggattctgatgggtgggtgaga

SEQ ID NO: 4392073 - DNA, 25 bp, Homo sapien
ttgtaggaggggttaatggcttgaa

SEQ ID NO: 4392074 - DNA, 25 bp, Homo sapien
taacactgggaaggaacattcagct

SEQ ID NO: 4392075 - DNA, 25 bp, Homo sapien
tctgctgggtaagtaacactgggaa

SEQ ID NO: 4392076 - DNA, 25 bp, Homo sapien
ctgggcagcctttcttcgactcctc

SEQ ID NO: 4392077 - DNA, 25 bp, Homo sapien
agcctttcttcgactcctcttgccc

SEQ ID NO: 4392078 - DNA, 25 bp, Homo sapien
tgctcatggctacaagacgacagct

SEQ ID NO: 4392079 - DNA, 25 bp, Homo sapien
tctccatagttagcaccaagagcct

SEQ ID NO: 4392080 - DNA, 25 bp, Homo sapien
gggctgtgcagctcccgtttgatct

SEQ ID NO: 4392081 - DNA, 25 bp, Homo sapien
caatagttgtagaggcacttttctc

SEQ ID NO: 4392082 - DNA, 25 bp, Homo sapien
aactagctgattgttcttggaactc

SEQ ID NO: 4392083 - DNA, 25 bp, Homo sapien
ctgattaacagggagcacaatgctt

SEQ ID NO: 4392084 - DNA, 25 bp, Homo sapien
ttaacagggagcacaatgcttcctt

SEQ ID NO: 4392085 - DNA, 25 bp, Homo sapien
ttccttctgcaaaccttctaactag

SEQ ID NO: 4392086 - DNA, 25 bp, Homo sapien
tgccacagactttgttgtgaataca

SEQ ID NO: 4392087 - DNA, 25 bp, Homo sapien
catgcccgtgctaatggtaaacttc

SEQ ID NO: 4392088 - DNA, 25 bp, Homo sapien
caaggatcaagacgtaggaaaacac

SEQ ID NO: 4392089 - DNA, 25 bp, Homo sapien
tcatcaaagtttcaatttgccacag

SEQ ID NO: 4392090 - DNA, 25 bp, Homo sapien
aggactaagcccatccagatttctc

SEQ ID NO: 4392091 - DNA, 25 bp, Homo sapien
agaaggactaagcccatccagattt

SEQ ID NO: 4392092 - DNA, 25 bp, Homo sapien
aaggactaagcccatccagatttct

SEQ ID NO: 4392093 - DNA, 25 bp, Homo sapien
gactaagcccatccagatttctcct

SEQ ID NO: 4392094 - DNA, 25 bp, Homo sapien
ttgaccgccttccagcagttgccat

SEQ ID NO: 4392095 - DNA, 25 bp, Homo sapien
aggctttgaccgccttccagcagtt

SEQ ID NO: 4392096 - DNA, 25 bp, Homo sapien
gctttgaccgccttccagcagttgc

SEQ ID NO: 4392097 - DNA, 25 bp, Homo sapien
tttgaccgccttccagcagttgcca

SEQ ID NO: 4392098 - DNA, 25 bp, Homo sapien
ccttcttcagtttcatttaccttca

SEQ ID NO: 4392099 - DNA, 25 bp, Homo sapien
ttccttgtcccttcttcagtttcat

SEQ ID NO: 4392100 - DNA, 25 bp, Homo sapien
tgtcccttcttcagtttcatttacc

SEQ ID NO: 4392101 - DNA, 25 bp, Homo sapien
cttcttcagtttcatttaccttcat

SEQ ID NO: 4392102 - DNA, 25 bp, Homo sapien
ctgtcattatcctcttagttcacat

SEQ ID NO: 4392103 - DNA, 25 bp, Homo sapien
tgaccagagcactgacacgtgcttc

SEQ ID NO: 4392104 - DNA, 25 bp, Homo sapien
gaaagttgtgtctcatgacagaagc

SEQ ID NO: 4392105 - DNA, 25 bp, Homo sapien
ttctgaatggcgtgtccatgaggct

SEQ ID NO: 4392106 - DNA, 25 bp, Homo sapien
gccttttttgacgaattttgagaca

SEQ ID NO: 4392107 - DNA, 25 bp, Homo sapien
cttgtgcttccaacatagtgctgcc

SEQ ID NO: 4392108 - DNA, 25 bp, Homo sapien
cttgccttttttgacgaattttgag

SEQ ID NO: 4392109 - DNA, 25 bp, Homo sapien
gctgcctactcttagctcttgcctt

SEQ ID NO: 4392110 - DNA, 25 bp, Homo sapien
gtaccgagaagcagttaagaccatg

SEQ ID NO: 4392111 - DNA, 25 bp, Homo sapien
taaaatagatgacggaactggtacc

SEQ ID NO: 4392112 - DNA, 25 bp, Homo sapien
tcgagctgacgatagcaacatgggt

SEQ ID NO: 4392113 - DNA, 25 bp, Homo sapien
caacatgggtctaggttgtgacaca

SEQ ID NO: 4392114 - DNA, 25 bp, Homo sapien
taagcatggctcaaggattgcaaca

SEQ ID NO: 4392115 - DNA, 25 bp, Homo sapien
cagcacagggtatctggcaatcaaa

SEQ ID NO: 4392116 - DNA, 25 bp, Homo sapien
taaattctgcccatggaagtcggct

SEQ ID NO: 4392117 - DNA, 25 bp, Homo sapien
catggccgcttacagcaatggtagc

SEQ ID NO: 4392118 - DNA, 25 bp, Homo sapien
gagctcaaggcaatggacctgttgc

SEQ ID NO: 4392119 - DNA, 25 bp, Homo sapien
tcaaggcaatggacctgttgcgggc

SEQ ID NO: 4392120 - DNA, 25 bp, Homo sapien
gctcaaggcaatggacctgttgcgg

SEQ ID NO: 4392121 - DNA, 25 bp, Homo sapien
agagctcaaggcaatggacctgttg

SEQ ID NO: 4392122 - DNA, 25 bp, Homo sapien
ctcccaactcattagagatgacagg

SEQ ID NO: 4392123 - DNA, 25 bp, Homo sapien
ggcggcttcctctactgtgacctta

SEQ ID NO: 4392124 - DNA, 25 bp, Homo sapien
cagggcggcttcctctactgtgacc

SEQ ID NO: 4392125 - DNA, 25 bp, Homo sapien
cattagagatgacagggcggcttcc

SEQ ID NO: 4392126 - DNA, 25 bp, Homo sapien
ggctgctcacactggatcacgcaat

SEQ ID NO: 4392127 - DNA, 25 bp, Homo sapien
ggattttatcatgaagggctgctca

SEQ ID NO: 4392128 - DNA, 25 bp, Homo sapien
gattttatcatgaagggctgctcac

SEQ ID NO: 4392129 - DNA, 25 bp, Homo sapien
ctggatcacgcaatcaggataaggg

SEQ ID NO: 4392130 - DNA, 25 bp, Homo sapien
ttcttccgcaagaaataaaattcca

SEQ ID NO: 4392131 - DNA, 25 bp, Homo sapien
tccgcaagaaataaaattccatggc

SEQ ID NO: 4392132 - DNA, 25 bp, Homo sapien
cgcaagaaataaaattccatggctg

SEQ ID NO: 4392133 - DNA, 25 bp, Homo sapien
cttccgcaagaaataaaattccatg

SEQ ID NO: 4392134 - DNA, 25 bp, Homo sapien
gtttacagccatagtgaggttcccc

SEQ ID NO: 4392135 - DNA, 25 bp, Homo sapien
gaagggtttacagccatagtgaggt

SEQ ID NO: 4392136 - DNA, 25 bp, Homo sapien
cagtggaagggtttacagccatagt

SEQ ID NO: 4392137 - DNA, 25 bp, Homo sapien
tgtccagtggaagggtttacagcca

SEQ ID NO: 4392138 - DNA, 25 bp, Homo sapien
tcaaaccccattaagcccaggcttg

SEQ ID NO: 4392139 - DNA, 25 bp, Homo sapien
catcagcccggcagtttaagggtta

SEQ ID NO: 4392140 - DNA, 25 bp, Homo sapien
tatcacgccctttagacagctacag

SEQ ID NO: 4392141 - DNA, 25 bp, Homo sapien
gctttgtgggtcagcggcagctctt

SEQ ID NO: 4392142 - DNA, 25 bp, Homo sapien
gaaaacgtggtgttttgctacacca

SEQ ID NO: 4392143 - DNA, 25 bp, Homo sapien
aaacgtggtgttttgctacaccaca

SEQ ID NO: 4392144 - DNA, 25 bp, Homo sapien
aacgtggtgttttgctacaccacac

SEQ ID NO: 4392145 - DNA, 25 bp, Homo sapien
gactggagtgaagctggtcctgaac

SEQ ID NO: 4392146 - DNA, 25 bp, Homo sapien
tcaaaccaactcataaggtttcatt

SEQ ID NO: 4392147 - DNA, 25 bp, Homo sapien
aagcgctcatggaaaagtaagtgca

SEQ ID NO: 4392148 - DNA, 25 bp, Homo sapien
aggctgtggaaagcgctcatggaaa

SEQ ID NO: 4392149 - DNA, 25 bp, Homo sapien
aatctgggacaaactgttcatcatc

SEQ ID NO: 4392150 - DNA, 25 bp, Homo sapien
ggacaaactgttcatcatcaggaac

SEQ ID NO: 4392151 - DNA, 25 bp, Homo sapien
tctgggacaaactgttcatcatcag

SEQ ID NO: 4392152 - DNA, 25 bp, Homo sapien
tgggacaaactgttcatcatcagga

SEQ ID NO: 4392153 - DNA, 25 bp, Homo sapien
aaagcacagtaaaatgttttatatg

SEQ ID NO: 4392154 - DNA, 25 bp, Homo sapien
cagtaaaatgttttatatggaaaat

SEQ ID NO: 4392155 - DNA, 25 bp, Homo sapien
agcacagtaaaatgttttatatgga

SEQ ID NO: 4392156 - DNA, 25 bp, Homo sapien
cacagtaaaatgttttatatggaaa

SEQ ID NO: 4392157 - DNA, 25 bp, Homo sapien
caagcctcttgaagttgactgagat

SEQ ID NO: 4392158 - DNA, 25 bp, Homo sapien
ctcttgaagttgactgagatcctga

SEQ ID NO: 4392159 - DNA, 25 bp, Homo sapien
ctaaccaagcctcttgaagttgact

SEQ ID NO: 4392160 - DNA, 25 bp, Homo sapien
accaagcctcttgaagttgactgag

SEQ ID NO: 4392161 - DNA, 25 bp, Homo sapien
tctacacgctactgtcactgggagc

SEQ ID NO: 4392162 - DNA, 25 bp, Homo sapien
tgaaaaagaagaccccagaatgagg

SEQ ID NO: 4392163 - DNA, 25 bp, Homo sapien
tgaggatatttctttcgctagggag

SEQ ID NO: 4392164 - DNA, 25 bp, Homo sapien
gaagacagggaagaatctacacgct

SEQ ID NO: 4392165 - DNA, 25 bp, Homo sapien
cagatctgtgtccaaaaacttcctc

SEQ ID NO: 4392166 - DNA, 25 bp, Homo sapien
tttctgtcaatcacaggccgccctc

SEQ ID NO: 4392167 - DNA, 25 bp, Homo sapien
cttcagaatcgtgagccagatctgt

SEQ ID NO: 4392168 - DNA, 25 bp, Homo sapien
gaatcgtgagccagatctgtgtcca

SEQ ID NO: 4392169 - DNA, 25 bp, Homo sapien
gaaagtgaaggctcaagtgtagtaa

SEQ ID NO: 4392170 - DNA, 25 bp, Homo sapien
aagactcatattggagagggaggac

SEQ ID NO: 4392171 - DNA, 25 bp, Homo sapien
ctcatattggagagggaggacaaaa

SEQ ID NO: 4392172 - DNA, 25 bp, Homo sapien
caagtgtagtaaagaggtccacagg

SEQ ID NO: 4392173 - DNA, 25 bp, Homo sapien
aaagggacttgctgatcataaaacc

SEQ ID NO: 4392174 - DNA, 25 bp, Homo sapien
cttgctgatcataaaacccgtccat

SEQ ID NO: 4392175 - DNA, 25 bp, Homo sapien
taaaagggacttgctgatcataaaa

SEQ ID NO: 4392176 - DNA, 25 bp, Homo sapien
gggacttgctgatcataaaacccgt

SEQ ID NO: 4392177 - DNA, 25 bp, Homo sapien
aataccactttgagaggtttcagca

SEQ ID NO: 4392178 - DNA, 25 bp, Homo sapien
gctttcagcgtctctaataccactt

SEQ ID NO: 4392179 - DNA, 25 bp, Homo sapien
taccactttgagaggtttcagcatt

SEQ ID NO: 4392180 - DNA, 25 bp, Homo sapien
ggtgctttcagcgtctctaatacca

SEQ ID NO: 4392181 - DNA, 25 bp, Homo sapien
ctgtaatatgaatttgggagatttt

SEQ ID NO: 4392182 - DNA, 25 bp, Homo sapien
tgtaatatgaatttgggagatttta

SEQ ID NO: 4392183 - DNA, 25 bp, Homo sapien
gtaatatgaatttgggagattttaa

SEQ ID NO: 4392184 - DNA, 25 bp, Homo sapien
ccggcgctaccaaccgcttccaatc

SEQ ID NO: 4392185 - DNA, 25 bp, Homo sapien
attcataaaaacgaggtgcggcgcc

SEQ ID NO: 4392186 - DNA, 25 bp, Homo sapien
cataaaaacgaggtgcggcgcccgg

SEQ ID NO: 4392187 - DNA, 25 bp, Homo sapien
cggcgctaccaaccgcttccaatcc

SEQ ID NO: 4392188 - DNA, 25 bp, Homo sapien
gcctgcgtaagttcctggtcgaccc

SEQ ID NO: 4392189 - DNA, 25 bp, Homo sapien
tccaccctctgaaaatgcggccgga

SEQ ID NO: 4392190 - DNA, 25 bp, Homo sapien
ggtgcgccccgattttctcgagtcg

SEQ ID NO: 4392191 - DNA, 25 bp, Homo sapien
aaccctaatccgctgcgaggctgca

SEQ ID NO: 4392192 - DNA, 25 bp, Homo sapien
gggctctcgaatctccagagactgt

SEQ ID NO: 4392193 - DNA, 25 bp, Homo sapien
aactgcggagctccgccaagcgtct

SEQ ID NO: 4392194 - DNA, 25 bp, Homo sapien
cagagactgtgaaagcctcgcaact

SEQ ID NO: 4392195 - DNA, 25 bp, Homo sapien
cccacgacgtgtggaaagccgctct

SEQ ID NO: 4392196 - DNA, 25 bp, Homo sapien
gaagacggtgaaccgctccgcgcac

SEQ ID NO: 4392197 - DNA, 25 bp, Homo sapien
gggcgcctgggcgaaaggctgggcc

SEQ ID NO: 4392198 - DNA, 25 bp, Homo sapien
aaggctgggccgaaccgctccgaag

SEQ ID NO: 4392199 - DNA, 25 bp, Homo sapien
accgctccgaagacggtgaaccgct

SEQ ID NO: 4392200 - DNA, 25 bp, Homo sapien
gccgctctcccgacttttcaccgag

SEQ ID NO: 4392201 - DNA, 25 bp, Homo sapien
ttttcaccgaggcacgactcttccc

SEQ ID NO: 4392202 - DNA, 25 bp, Homo sapien
gctctcccgacttttcaccgaggca

SEQ ID NO: 4392203 - DNA, 25 bp, Homo sapien
ttctcgccgctctcccgacttttca

SEQ ID NO: 4392204 - DNA, 25 bp, Homo sapien
gccccgaccagaattgggtctcttg

SEQ ID NO: 4392205 - DNA, 25 bp, Homo sapien
accagaattgggtctcttggcgcca

SEQ ID NO: 4392206 - DNA, 25 bp, Homo sapien
agcaaagccccgaccagaattgggt

SEQ ID NO: 4392207 - DNA, 25 bp, Homo sapien
gtctcttggcgccagacgttcgcag

SEQ ID NO: 4392208 - DNA, 25 bp, Homo sapien
taacctccgccagagtgggttctgt

SEQ ID NO: 4392209 - DNA, 25 bp, Homo sapien
gacagggttcgggctcaaagaaatc

SEQ ID NO: 4392210 - DNA, 25 bp, Homo sapien
ttgtactggcaaggcctaagaccca

SEQ ID NO: 4392211 - DNA, 25 bp, Homo sapien
ctttaactgcggctcgtaacctccg

SEQ ID NO: 4392212 - DNA, 25 bp, Homo sapien
tctgttctcgtcctgctggagtgcc

SEQ ID NO: 4392213 - DNA, 25 bp, Homo sapien
gccgtggggcggctctatcttctct

SEQ ID NO: 4392214 - DNA, 25 bp, Homo sapien
cctgtgacggagctctgttctcgtc

SEQ ID NO: 4392215 - DNA, 25 bp, Homo sapien
ctctatcttctctccggggatgctg

SEQ ID NO: 4392216 - DNA, 25 bp, Homo sapien
cacgccgcgtgccagcggtggggag

SEQ ID NO: 4392217 - DNA, 25 bp, Homo sapien
ttcacgccgcgtgccagcggtgggg

SEQ ID NO: 4392218 - DNA, 25 bp, Homo sapien
acgccgcgtgccagcggtggggagg

SEQ ID NO: 4392219 - DNA, 25 bp, Homo sapien
attcacgccgcgtgccagcggtggg

SEQ ID NO: 4392220 - DNA, 25 bp, Homo sapien
aatatttactgatatcttctctcca

SEQ ID NO: 4392221 - DNA, 25 bp, Homo sapien
atttactgatatcttctctccactc

SEQ ID NO: 4392222 - DNA, 25 bp, Homo sapien
tttactgatatcttctctccactct

SEQ ID NO: 4392223 - DNA, 25 bp, Homo sapien
tatttactgatatcttctctccact

SEQ ID NO: 4392224 - DNA, 25 bp, Homo sapien
agttctttgtctattacgttgaggc

SEQ ID NO: 4392225 - DNA, 25 bp, Homo sapien
tagaagttctttgtctattacgttg

SEQ ID NO: 4392226 - DNA, 25 bp, Homo sapien
tgtctattacgttgaggcttccctc

SEQ ID NO: 4392227 - DNA, 25 bp, Homo sapien
tctttgtctattacgttgaggcttc

SEQ ID NO: 4392228 - DNA, 25 bp, Homo sapien
caggccacatagctagcacatagta

SEQ ID NO: 4392229 - DNA, 25 bp, Homo sapien
gtgtgcccaagcaacagagcctgct

SEQ ID NO: 4392230 - DNA, 25 bp, Homo sapien
tggcacagttagtcccaacaacagc

SEQ ID NO: 4392231 - DNA, 25 bp, Homo sapien
tgagtacttaatatgagccagacac

SEQ ID NO: 4392232 - DNA, 25 bp, Homo sapien
gacttctgaattattgtcctgggct

SEQ ID NO: 4392233 - DNA, 25 bp, Homo sapien
taggaacctgcttcagcaactccag

SEQ ID NO: 4392234 - DNA, 25 bp, Homo sapien
tgaattattgtcctgggctggcaag

SEQ ID NO: 4392235 - DNA, 25 bp, Homo sapien
tccttaggaacctgcttcagcaact

SEQ ID NO: 4392236 - DNA, 25 bp, Homo sapien
cctccaatgaggaagtggacaaact

SEQ ID NO: 4392237 - DNA, 25 bp, Homo sapien
ccataggcgtggaaaccagcaaacc

SEQ ID NO: 4392238 - DNA, 25 bp, Homo sapien
tctgactctgatctgccataggcgt

SEQ ID NO: 4392239 - DNA, 25 bp, Homo sapien
ccaagtgtgtttgcaatgggcatag

SEQ ID NO: 4392240 - DNA, 25 bp, Homo sapien
tcatggagatcataagaagaacggt

SEQ ID NO: 4392241 - DNA, 25 bp, Homo sapien
cactgatttccaaagaaacgaaagg

SEQ ID NO: 4392242 - DNA, 25 bp, Homo sapien
ccttcatggaggatgggaccttgca

SEQ ID NO: 4392243 - DNA, 25 bp, Homo sapien
ggtaaatgcaatagttcccacatct

SEQ ID NO: 4392244 - DNA, 25 bp, Homo sapien
gatatgttggaagaagaagagtgtg

SEQ ID NO: 4392245 - DNA, 25 bp, Homo sapien
tgatatgttggaagaagaagagtgt

SEQ ID NO: 4392246 - DNA, 25 bp, Homo sapien
ctgatatgttggaagaagaagagtg

SEQ ID NO: 4392247 - DNA, 25 bp, Homo sapien
atatgttggaagaagaagagtgtgt

SEQ ID NO: 4392248 - DNA, 25 bp, Homo sapien
gagactgtcaatctggctcctggga

SEQ ID NO: 4392249 - DNA, 25 bp, Homo sapien
tgtaaacacgttagggaggtcttgc

SEQ ID NO: 4392250 - DNA, 25 bp, Homo sapien
gggataacactcagcacaggaatgt

SEQ ID NO: 4392251 - DNA, 25 bp, Homo sapien
taggtatgacagtaggcgatctggc

SEQ ID NO: 4392252 - DNA, 25 bp, Homo sapien
tagtccagtgtaacggaaagtagga

SEQ ID NO: 4392253 - DNA, 25 bp, Homo sapien
ctgtaatcattgatagtccagtgta

SEQ ID NO: 4392254 - DNA, 25 bp, Homo sapien
aaggcagtgttgttactttgatgga

SEQ ID NO: 4392255 - DNA, 25 bp, Homo sapien
gagaatgctttaaggttttagattc

SEQ ID NO: 4392256 - DNA, 25 bp, Homo sapien
cagggcgtgagttccaatgctttgg

SEQ ID NO: 4392257 - DNA, 25 bp, Homo sapien
tgctttgggagccttgttggtccac

SEQ ID NO: 4392258 - DNA, 25 bp, Homo sapien
gccttgttggtccactgtggcagga

SEQ ID NO: 4392259 - DNA, 25 bp, Homo sapien
gagtcctcgcccagtcccgaggatg

SEQ ID NO: 4392260 - DNA, 25 bp, Homo sapien
gcataaaggcataaaacttcttccc

SEQ ID NO: 4392261 - DNA, 25 bp, Homo sapien
cgaactttgaggttgatggtacaga

SEQ ID NO: 4392262 - DNA, 25 bp, Homo sapien
cttctctttagttgagttgtctgcc

SEQ ID NO: 4392263 - DNA, 25 bp, Homo sapien
aagaggacagctgtgctgtaagctg

SEQ ID NO: 4392264 - DNA, 25 bp, Homo sapien
tcaccaagtcagtcggaggcaggat

SEQ ID NO: 4392265 - DNA, 25 bp, Homo sapien
tggagtcctccgaaatgtcacacag

SEQ ID NO: 4392266 - DNA, 25 bp, Homo sapien
cagaaaggaccttcgagctggagtc

SEQ ID NO: 4392267 - DNA, 25 bp, Homo sapien
gaacagtagtacaaataggcctctc

SEQ ID NO: 4392268 - DNA, 25 bp, Homo sapien
cgggggttgacacacttccagatca

SEQ ID NO: 4392269 - DNA, 25 bp, Homo sapien
cctgcataaatgagccaaagctttt

SEQ ID NO: 4392270 - DNA, 25 bp, Homo sapien
gttctctcgggggttgacacacttc

SEQ ID NO: 4392271 - DNA, 25 bp, Homo sapien
gagccaaagcttttcaaccaggctt

SEQ ID NO: 4392272 - DNA, 25 bp, Homo sapien
ccagatgttctaatttcaggaggca

SEQ ID NO: 4392273 - DNA, 25 bp, Homo sapien
gaattgcttagttctcctaggtcta

SEQ ID NO: 4392274 - DNA, 25 bp, Homo sapien
gcgattccgtgacaccctctgttat

SEQ ID NO: 4392275 - DNA, 25 bp, Homo sapien
tttagtccctcaacagaaaatgcaa

SEQ ID NO: 4392276 - DNA, 25 bp, Homo sapien
gcccctgatctttactatggtctct

SEQ ID NO: 4392277 - DNA, 25 bp, Homo sapien
ggctgagttcttcactaggtatcca

SEQ ID NO: 4392278 - DNA, 25 bp, Homo sapien
tcactaggtatccaccgttgtccat

SEQ ID NO: 4392279 - DNA, 25 bp, Homo sapien
tactatgtgaatactgtgatctggc

SEQ ID NO: 4392280 - DNA, 25 bp, Homo sapien
cctgctcaagtagtgccttaggata

SEQ ID NO: 4392281 - DNA, 25 bp, Homo sapien
gtgcccccacttctagacatgtgaa

SEQ ID NO: 4392282 - DNA, 25 bp, Homo sapien
agtagtgccttaggatatatcccag

SEQ ID NO: 4392283 - DNA, 25 bp, Homo sapien
ccccacttctagacatgtgaatgct

SEQ ID NO: 4392284 - DNA, 25 bp, Homo sapien
gtagctgccctccatgtgacctaga

SEQ ID NO: 4392285 - DNA, 25 bp, Homo sapien
tgtaactctacttctgtgctgccct

SEQ ID NO: 4392286 - DNA, 25 bp, Homo sapien
tatcatttactcgactttaggctta

SEQ ID NO: 4392287 - DNA, 25 bp, Homo sapien
ccttatctctaagaagtgaattgca

SEQ ID NO: 4392288 - DNA, 25 bp, Homo sapien
tacctactgcatgcttgatactggg

SEQ ID NO: 4392289 - DNA, 25 bp, Homo sapien
tggtttcccacagagatgcctatga

SEQ ID NO: 4392290 - DNA, 25 bp, Homo sapien
aggttcaccacagctctatctaggg

SEQ ID NO: 4392291 - DNA, 25 bp, Homo sapien
gacccatttagagtagtcctccagg

SEQ ID NO: 4392292 - DNA, 25 bp, Homo sapien
tgccagggttttgggatccagctgt

SEQ ID NO: 4392293 - DNA, 25 bp, Homo sapien
ttttcatatgagacagacccgtgtc

SEQ ID NO: 4392294 - DNA, 25 bp, Homo sapien
tagatggctatacagaggttgaaca

SEQ ID NO: 4392295 - DNA, 25 bp, Homo sapien
taaatctgagaaggctgtttgctgc

SEQ ID NO: 4392296 - DNA, 25 bp, Homo sapien
tgttgcacggaaggcacagactagc

SEQ ID NO: 4392297 - DNA, 25 bp, Homo sapien
tcccaattgtggtagtgttgcacgg

SEQ ID NO: 4392298 - DNA, 25 bp, Homo sapien
catgttatgtaacgccagtctggag

SEQ ID NO: 4392299 - DNA, 25 bp, Homo sapien
tgattactgttagagcccggagctg

SEQ ID NO: 4392300 - DNA, 25 bp, Homo sapien
caagatcttgctcctaggtggtcct

SEQ ID NO: 4392301 - DNA, 25 bp, Homo sapien
tcagtggaacgatatcaagtgggtc

SEQ ID NO: 4392302 - DNA, 25 bp, Homo sapien
ccaatgcaagattagaggcagctca

SEQ ID NO: 4392303 - DNA, 25 bp, Homo sapien
gatggaggcccaatgaagctctgca

SEQ ID NO: 4392304 - DNA, 25 bp, Homo sapien
catgtagacaccaggagaaggttcc

SEQ ID NO: 4392305 - DNA, 25 bp, Homo sapien
tgcaaagaagcaggagggaaccgtc

SEQ ID NO: 4392306 - DNA, 25 bp, Homo sapien
tcaggaatagtctgccaccagggct

SEQ ID NO: 4392307 - DNA, 25 bp, Homo sapien
acatctaaggtgtgctatgcaggca

SEQ ID NO: 4392308 - DNA, 25 bp, Homo sapien
gaacggctcttccttctcaacgaga

SEQ ID NO: 4392309 - DNA, 25 bp, Homo sapien
ggctcttccttctcaacgagaagaa

SEQ ID NO: 4392310 - DNA, 25 bp, Homo sapien
ttccttctcaacgagaagaagctgc

SEQ ID NO: 4392311 - DNA, 25 bp, Homo sapien
ttttgaacggctcttccttctcaac

SEQ ID NO: 4392312 - DNA, 25 bp, Homo sapien
cttgaacggcttcaaaattggcaac

SEQ ID NO: 4392313 - DNA, 25 bp, Homo sapien
agtttggcacggctggaagtgaggg

SEQ ID NO: 4392314 - DNA, 25 bp, Homo sapien
cctgactgggcctggagtttggcac

SEQ ID NO: 4392315 - DNA, 25 bp, Homo sapien
aaggacaactgtccttgaacggctt

SEQ ID NO: 4392316 - DNA, 25 bp, Homo sapien
ttctcttttttatccctttagctga

SEQ ID NO: 4392317 - DNA, 25 bp, Homo sapien
tgacacaagacccttgcttctcttt

SEQ ID NO: 4392318 - DNA, 25 bp, Homo sapien
cttttttatccctttagctgagcta

SEQ ID NO: 4392319 - DNA, 25 bp, Homo sapien
atgacacaagacccttgcttctctt

SEQ ID NO: 4392320 - DNA, 25 bp, Homo sapien
gcttgtttttcagcggttctgacaa

SEQ ID NO: 4392321 - DNA, 25 bp, Homo sapien
ttttcagcggttctgacaaaggtct

SEQ ID NO: 4392322 - DNA, 25 bp, Homo sapien
acaaaggtcttgacagggtaggagt

SEQ ID NO: 4392323 - DNA, 25 bp, Homo sapien
tctgacaaaggtcttgacagggtag

SEQ ID NO: 4392324 - DNA, 25 bp, Homo sapien
tctttggtaattgggcgagtcaggc

SEQ ID NO: 4392325 - DNA, 25 bp, Homo sapien
cacctggccaagtgctaagatcagc

SEQ ID NO: 4392326 - DNA, 25 bp, Homo sapien
cacgtttctgtagttagcacccaag

SEQ ID NO: 4392327 - DNA, 25 bp, Homo sapien
cacagagagaattgatacactagac

SEQ ID NO: 4392328 - DNA, 25 bp, Homo sapien
gattgagtagccttccatctttgtc

SEQ ID NO: 4392329 - DNA, 25 bp, Homo sapien
tgtctgtactatgaaacagttcacc

SEQ ID NO: 4392330 - DNA, 25 bp, Homo sapien
tcctagtagtatggaagatctcacc

SEQ ID NO: 4392331 - DNA, 25 bp, Homo sapien
gatgttcaagttcattagaatcaag

SEQ ID NO: 4392332 - DNA, 25 bp, Homo sapien
cgcatgtagtatcccagcagaggcc

SEQ ID NO: 4392333 - DNA, 25 bp, Homo sapien
tgaaaaccaggacgacgattgctct

SEQ ID NO: 4392334 - DNA, 25 bp, Homo sapien
tcttcaccacgagattctagctgca

SEQ ID NO: 4392335 - DNA, 25 bp, Homo sapien
gaagatgctaccttttctcagcagg

SEQ ID NO: 4392336 - DNA, 25 bp, Homo sapien
caggttttcattaagagttgccagg

SEQ ID NO: 4392337 - DNA, 25 bp, Homo sapien
cattcaattttgtgaccggcgcttc

SEQ ID NO: 4392338 - DNA, 25 bp, Homo sapien
aagggctcaaaaataaggcttctca

SEQ ID NO: 4392339 - DNA, 25 bp, Homo sapien
gactagaactgtgaactcctcgaag

SEQ ID NO: 4392340 - DNA, 25 bp, Homo sapien
ggctgcatccagggttctccatcca

SEQ ID NO: 4392341 - DNA, 25 bp, Homo sapien
tctccatccacttgcattggcagca

SEQ ID NO: 4392342 - DNA, 25 bp, Homo sapien
cgtgcaacatggctgcatccagggt

SEQ ID NO: 4392343 - DNA, 25 bp, Homo sapien
ttgcattggcagcagcttgtttgtc

SEQ ID NO: 4392344 - DNA, 25 bp, Homo sapien
ctgcctgcactcttcaggccggtgt

SEQ ID NO: 4392345 - DNA, 25 bp, Homo sapien
agccccaccacttcaaggagctggt

SEQ ID NO: 4392346 - DNA, 25 bp, Homo sapien
ctccatggctccttctagccccacc

SEQ ID NO: 4392347 - DNA, 25 bp, Homo sapien
ttcaggccggtgtagatctgcccca

SEQ ID NO: 4392348 - DNA, 25 bp, Homo sapien
attccctggtttgatgcccaaggtc

SEQ ID NO: 4392349 - DNA, 25 bp, Homo sapien
cctggtttgatgcccaaggtccaat

SEQ ID NO: 4392350 - DNA, 25 bp, Homo sapien
tccctggtttgatgcccaaggtcca

SEQ ID NO: 4392351 - DNA, 25 bp, Homo sapien
ccctggtttgatgcccaaggtccaa

SEQ ID NO: 4392352 - DNA, 25 bp, Homo sapien
cattagaaatgcaaacaggaatttg

SEQ ID NO: 4392353 - DNA, 25 bp, Homo sapien
actacttaataaatagccactgata

SEQ ID NO: 4392354 - DNA, 25 bp, Homo sapien
gggtatgcatctgattcattagaaa

SEQ ID NO: 4392355 - DNA, 25 bp, Homo sapien
taataaatagccactgatagaaaaa

SEQ ID NO: 4392356 - DNA, 25 bp, Homo sapien
ccagttggactggtctgcacagatg

SEQ ID NO: 4392357 - DNA, 25 bp, Homo sapien
tcctggcgaaagagcttcaaagtgc

SEQ ID NO: 4392358 - DNA, 25 bp, Homo sapien
tcagtccccacagtctagacaggtg

SEQ ID NO: 4392359 - DNA, 25 bp, Homo sapien
tttgcagacttagcccactaaggcg

SEQ ID NO: 4392360 - DNA, 25 bp, Homo sapien
agaatccctaaagactgtttcctga

SEQ ID NO: 4392361 - DNA, 25 bp, Homo sapien
aaggaaagctctaactggtccatct

SEQ ID NO: 4392362 - DNA, 25 bp, Homo sapien
aagaatccctaaagactgtttcctg

SEQ ID NO: 4392363 - DNA, 25 bp, Homo sapien
aatccctaaagactgtttcctgatc

SEQ ID NO: 4392364 - DNA, 25 bp, Homo sapien
ggctccgatgaaggcgctgtatgtt

SEQ ID NO: 4392365 - DNA, 25 bp, Homo sapien
cagaagacagaacattcagtacagc

SEQ ID NO: 4392366 - DNA, 25 bp, Homo sapien
caagagaaagtgtgaggccctgcac

SEQ ID NO: 4392367 - DNA, 25 bp, Homo sapien
tgggattctccagggctccgatgaa

SEQ ID NO: 4392368 - DNA, 25 bp, Homo sapien
gtgtcctctgtccatcccttgctta

SEQ ID NO: 4392369 - DNA, 25 bp, Homo sapien
tgtggcagtgtcctctgtccatccc

SEQ ID NO: 4392370 - DNA, 25 bp, Homo sapien
agtgtcctctgtccatcccttgctt

SEQ ID NO: 4392371 - DNA, 25 bp, Homo sapien
ctgtgtggcagtgtcctctgtccat

SEQ ID NO: 4392372 - DNA, 25 bp, Homo sapien
ccctttgggttgttgactctcaatt

SEQ ID NO: 4392373 - DNA, 25 bp, Homo sapien
ttggagccataagcccgcattctgc

SEQ ID NO: 4392374 - DNA, 25 bp, Homo sapien
gcattctgcattagtctcctcactg

SEQ ID NO: 4392375 - DNA, 25 bp, Homo sapien
tgaggccttggagccataagcccgc

SEQ ID NO: 4392376 - DNA, 25 bp, Homo sapien
tccatcatcttcctaataagccatg

SEQ ID NO: 4392377 - DNA, 25 bp, Homo sapien
aagactaatctttgatggagtgcag

SEQ ID NO: 4392378 - DNA, 25 bp, Homo sapien
aacccagattatctaactgtaagca

SEQ ID NO: 4392379 - DNA, 25 bp, Homo sapien
tccatgctaatcttgaatgaccttc

SEQ ID NO: 4392380 - DNA, 25 bp, Homo sapien
agtcagtgccccactctgatcagct

SEQ ID NO: 4392381 - DNA, 25 bp, Homo sapien
cactctgatcagctgatgtcctcat

SEQ ID NO: 4392382 - DNA, 25 bp, Homo sapien
agacactttggtcttgcttgaagaa

SEQ ID NO: 4392383 - DNA, 25 bp, Homo sapien
aaaagcaatcagcagacactttggt

SEQ ID NO: 4392384 - DNA, 25 bp, Homo sapien
gcagacactttggtcttgcttgaag

SEQ ID NO: 4392385 - DNA, 25 bp, Homo sapien
tcaaaagcaatcagcagacactttg

SEQ ID NO: 4392386 - DNA, 25 bp, Homo sapien
atctcatcaagagcttcccccagcc

SEQ ID NO: 4392387 - DNA, 25 bp, Homo sapien
tcagcacatgatctcatcaagagct

SEQ ID NO: 4392388 - DNA, 25 bp, Homo sapien
atgatctcatcaagagcttccccca

SEQ ID NO: 4392389 - DNA, 25 bp, Homo sapien
cagcacatgatctcatcaagagctt

SEQ ID NO: 4392390 - DNA, 25 bp, Homo sapien
cctctgttagcacccacaacttccc

SEQ ID NO: 4392391 - DNA, 25 bp, Homo sapien
ctaccctctgttagcacccacaact

SEQ ID NO: 4392392 - DNA, 25 bp, Homo sapien
taccctctgttagcacccacaactt

SEQ ID NO: 4392393 - DNA, 25 bp, Homo sapien
ccctctgttagcacccacaacttcc

SEQ ID NO: 4392394 - DNA, 25 bp, Homo sapien
cgtgagcccacaggggaatcagctg

SEQ ID NO: 4392395 - DNA, 25 bp, Homo sapien
tgattgaatctctccatttggatca

SEQ ID NO: 4392396 - DNA, 25 bp, Homo sapien
ctgccaggagctttgattgaatctc

SEQ ID NO: 4392397 - DNA, 25 bp, Homo sapien
ctgtccattgaggacctgtgaggac

SEQ ID NO: 4392398 - DNA, 25 bp, Homo sapien
tcacagcccggttcttcttgttttc

SEQ ID NO: 4392399 - DNA, 25 bp, Homo sapien
tgctttcccggatcacagcccggtt

SEQ ID NO: 4392400 - DNA, 25 bp, Homo sapien
ctgggaatgttgagaatggcaatgc

SEQ ID NO: 4392401 - DNA, 25 bp, Homo sapien
tccccagagattggtgcctccgtac

SEQ ID NO: 4392402 - DNA, 25 bp, Homo sapien
gagccttggcaagcgcacgcctgcg

SEQ ID NO: 4392403 - DNA, 25 bp, Homo sapien
ttggcaagcgcacgcctgcgtgccc

SEQ ID NO: 4392404 - DNA, 25 bp, Homo sapien
tcttggcccgacccaggctggtaag

SEQ ID NO: 4392405 - DNA, 25 bp, Homo sapien
cttggcccgacccaggctggtaaga

SEQ ID NO: 4392406 - DNA, 25 bp, Homo sapien
ttggaagcagcgccggagtccgtct

SEQ ID NO: 4392407 - DNA, 25 bp, Homo sapien
tgcccgatgtcggtcttggaagcag

SEQ ID NO: 4392408 - DNA, 25 bp, Homo sapien
cggagtccgtctgaacccaggcccg

SEQ ID NO: 4392409 - DNA, 25 bp, Homo sapien
ctgccggccacgttcaactgtgtcc

SEQ ID NO: 4392410 - DNA, 25 bp, Homo sapien
tgtcttgacccattaatatagtccc

SEQ ID NO: 4392411 - DNA, 25 bp, Homo sapien
taatggtaggataccctagcacctt

SEQ ID NO: 4392412 - DNA, 25 bp, Homo sapien
tctcgtatagtctcttaaaaggatc

SEQ ID NO: 4392413 - DNA, 25 bp, Homo sapien
ggtgttatcagcctataccttctat

SEQ ID NO: 4392414 - DNA, 25 bp, Homo sapien
gtggtcctctgatcacagctgaagg

SEQ ID NO: 4392415 - DNA, 25 bp, Homo sapien
gtcctctgatcacagctgaaggaaa

SEQ ID NO: 4392416 - DNA, 25 bp, Homo sapien
caagtggtcctctgatcacagctga

SEQ ID NO: 4392417 - DNA, 25 bp, Homo sapien
aagtggtcctctgatcacagctgaa

SEQ ID NO: 4392418 - DNA, 25 bp, Homo sapien
cttctgagccatgagagagggctca

SEQ ID NO: 4392419 - DNA, 25 bp, Homo sapien
actcactgtcttaattctgttgggt

SEQ ID NO: 4392420 - DNA, 25 bp, Homo sapien
tggttcacagttgtcccggaccctc

SEQ ID NO: 4392421 - DNA, 25 bp, Homo sapien
tcagaatggagaccctttctgccct

SEQ ID NO: 4392422 - DNA, 25 bp, Homo sapien
gcactgcaggtggatgctaagacag

SEQ ID NO: 4392423 - DNA, 25 bp, Homo sapien
cacagctggagcttaagagccgtga

SEQ ID NO: 4392424 - DNA, 25 bp, Homo sapien
cctctagtttaagagtgtgcagcac

SEQ ID NO: 4392425 - DNA, 25 bp, Homo sapien
taagacagagtagagaatgcccaca

SEQ ID NO: 4392426 - DNA, 25 bp, Homo sapien
agcctctgtctctcaaacccagagg

SEQ ID NO: 4392427 - DNA, 25 bp, Homo sapien
agtgtctttagcaacgaggccccct

SEQ ID NO: 4392428 - DNA, 25 bp, Homo sapien
gtctttagcaacgaggccccctctg

SEQ ID NO: 4392429 - DNA, 25 bp, Homo sapien
tctcaaacccagaggggactgtggg

SEQ ID NO: 4392430 - DNA, 25 bp, Homo sapien
tgcaggtcgctgcaaaagtctccga

SEQ ID NO: 4392431 - DNA, 25 bp, Homo sapien
cgtggagtttcttgcaggtcgctgc

SEQ ID NO: 4392432 - DNA, 25 bp, Homo sapien
tccaactcaatgtggtcgtggagtt

SEQ ID NO: 4392433 - DNA, 25 bp, Homo sapien
tccgaggtgccaaattcaaagtacc

SEQ ID NO: 4392434 - DNA, 25 bp, Homo sapien
gagcatctttgtagccaggagactt

SEQ ID NO: 4392435 - DNA, 25 bp, Homo sapien
ttaaacctgaaggagagaattctcc

SEQ ID NO: 4392436 - DNA, 25 bp, Homo sapien
cataaatgtcaaagctgagcattcc

SEQ ID NO: 4392437 - DNA, 25 bp, Homo sapien
taaaagtttccggaagccacagcta

SEQ ID NO: 4392438 - DNA, 25 bp, Homo sapien
tcagaacaggcacgcagtgatcctc

SEQ ID NO: 4392439 - DNA, 25 bp, Homo sapien
ggcccatcagagagtgtgtcaccac

SEQ ID NO: 4392440 - DNA, 25 bp, Homo sapien
gatcctcaggcaccgagctgtgcat

SEQ ID NO: 4392441 - DNA, 25 bp, Homo sapien
agctctcactgctcatcagaacagg

SEQ ID NO: 4392442 - DNA, 25 bp, Homo sapien
ctcctgttgctatgccccagaggca

SEQ ID NO: 4392443 - DNA, 25 bp, Homo sapien
tcctgttgctatgccccagaggcac

SEQ ID NO: 4392444 - DNA, 25 bp, Homo sapien
ctggctcctgttgctatgccccaga

SEQ ID NO: 4392445 - DNA, 25 bp, Homo sapien
ggctcctgttgctatgccccagagg

SEQ ID NO: 4392446 - DNA, 25 bp, Homo sapien
ggatttggcactggacttcgaatct

SEQ ID NO: 4392447 - DNA, 25 bp, Homo sapien
ctcccttgatcctgctagcctggat

SEQ ID NO: 4392448 - DNA, 25 bp, Homo sapien
gatcctgctagcctggatttggcac

SEQ ID NO: 4392449 - DNA, 25 bp, Homo sapien
ggacttcgaatctctagtgtccaga

SEQ ID NO: 4392450 - DNA, 25 bp, Homo sapien
tgccaacagtgagacgataatctcc

SEQ ID NO: 4392451 - DNA, 25 bp, Homo sapien
cttatgtgccctttattccagatca

SEQ ID NO: 4392452 - DNA, 25 bp, Homo sapien
ttattccagatcactttcaaacact

SEQ ID NO: 4392453 - DNA, 25 bp, Homo sapien
tattgataactaggaggtagacagg

SEQ ID NO: 4392454 - DNA, 25 bp, Homo sapien
gaaaatttccagagagcaggtgaaa

SEQ ID NO: 4392455 - DNA, 25 bp, Homo sapien
gcctctgttccgccagggccacact

SEQ ID NO: 4392456 - DNA, 25 bp, Homo sapien
gggaaaatttccagagagcaggtga

SEQ ID NO: 4392457 - DNA, 25 bp, Homo sapien
ctctgttccgccagggccacactgg

SEQ ID NO: 4392458 - DNA, 25 bp, Homo sapien
ctgctgttgaatttttcaggatgtt

SEQ ID NO: 4392459 - DNA, 25 bp, Homo sapien
ttctctctcatcacatggaatctgt

SEQ ID NO: 4392460 - DNA, 25 bp, Homo sapien
ggaatctgtgtgcaatggaagcgtc

SEQ ID NO: 4392461 - DNA, 25 bp, Homo sapien
tttcaggatgtttctctctcatcac

SEQ ID NO: 4392462 - DNA, 25 bp, Homo sapien
cagatccttggtgagtggtcatgac

SEQ ID NO: 4392463 - DNA, 25 bp, Homo sapien
gacaaagcagatccttggtgagtgg

SEQ ID NO: 4392464 - DNA, 25 bp, Homo sapien
aaagcagatccttggtgagtggtca

SEQ ID NO: 4392465 - DNA, 25 bp, Homo sapien
gcagatccttggtgagtggtcatga

SEQ ID NO: 4392466 - DNA, 25 bp, Homo sapien
agctttttgagcatgaactctgtgt

SEQ ID NO: 4392467 - DNA, 25 bp, Homo sapien
tgtttttaagcatcaagaggtatag

SEQ ID NO: 4392468 - DNA, 25 bp, Homo sapien
tgaggtgcacctggcataggagtcc

SEQ ID NO: 4392469 - DNA, 25 bp, Homo sapien
aagatgggcttattttgtgattggc

SEQ ID NO: 4392470 - DNA, 25 bp, Homo sapien
gagggcatctgcgtgggtcactgga

SEQ ID NO: 4392471 - DNA, 25 bp, Homo sapien
tgaacagccggtccaaaaaggagag

SEQ ID NO: 4392472 - DNA, 25 bp, Homo sapien
ctgggggaagcggagcctgaacagc

SEQ ID NO: 4392473 - DNA, 25 bp, Homo sapien
cctgaacagccggtccaaaaaggag

SEQ ID NO: 4392474 - DNA, 25 bp, Homo sapien
catgatgctgtatgggacctggtcc

SEQ ID NO: 4392475 - DNA, 25 bp, Homo sapien
gggatgacttccagatgccagcggt

SEQ ID NO: 4392476 - DNA, 25 bp, Homo sapien
ctctgctcaatgtctttcaggattt

SEQ ID NO: 4392477 - DNA, 25 bp, Homo sapien
ttcaggatttttgtcaagctgcccc

SEQ ID NO: 4392478 - DNA, 25 bp, Homo sapien
catttgccaccacagcagaaaggct

SEQ ID NO: 4392479 - DNA, 25 bp, Homo sapien
tgtggaggacagcactgcatttgcc

SEQ ID NO: 4392480 - DNA, 25 bp, Homo sapien
tgccaccacagcagaaaggctgtat

SEQ ID NO: 4392481 - DNA, 25 bp, Homo sapien
gacagcactgcatttgccaccacag

SEQ ID NO: 4392482 - DNA, 25 bp, Homo sapien
caggataactgaaagtaatcagagg

SEQ ID NO: 4392483 - DNA, 25 bp, Homo sapien
tctggcgcatgtccaacgccatggg

SEQ ID NO: 4392484 - DNA, 25 bp, Homo sapien
ttttctggccggcagcctgatctgt

SEQ ID NO: 4392485 - DNA, 25 bp, Homo sapien
agttctctgccccttgtcttataca

SEQ ID NO: 4392486 - DNA, 25 bp, Homo sapien
cactggttaccactctgtgtttcct

SEQ ID NO: 4392487 - DNA, 25 bp, Homo sapien
cagcggagacaacgggcaaggtcat

SEQ ID NO: 4392488 - DNA, 25 bp, Homo sapien
ggatgctttgcaaagttggccttat

SEQ ID NO: 4392489 - DNA, 25 bp, Homo sapien
tggtggatgctttgcaaagttggcc

SEQ ID NO: 4392490 - DNA, 25 bp, Homo sapien
ctccccagcggagacaacgggcaag

SEQ ID NO: 4392491 - DNA, 25 bp, Homo sapien
tataaataagcagcaaacgccctct

SEQ ID NO: 4392492 - DNA, 25 bp, Homo sapien
tactataaataagcagcaaacgccc

SEQ ID NO: 4392493 - DNA, 25 bp, Homo sapien
gctgattgtaaatacgcttactata

SEQ ID NO: 4392494 - DNA, 25 bp, Homo sapien
cttactataaataagcagcaaacgc

SEQ ID NO: 4392495 - DNA, 25 bp, Homo sapien
caaaacacggaagtctggagtatca

SEQ ID NO: 4392496 - DNA, 25 bp, Homo sapien
cacaggccaaaacacggaagtctgg

SEQ ID NO: 4392497 - DNA, 25 bp, Homo sapien
tggagtatcacggaaaaagttcaac

SEQ ID NO: 4392498 - DNA, 25 bp, Homo sapien
caaaatccagccaactgtcccatct

SEQ ID NO: 4392499 - DNA, 25 bp, Homo sapien
gaaaacttgtttggggttgagcaga

SEQ ID NO: 4392500 - DNA, 25 bp, Homo sapien
ccccattgtccaggttgaaaacttg

SEQ ID NO: 4392501 - DNA, 25 bp, Homo sapien
gcagatagtggaatttccgaagaat

SEQ ID NO: 4392502 - DNA, 25 bp, Homo sapien
gggttgagcagatagtggaatttcc

SEQ ID NO: 4392503 - DNA, 25 bp, Homo sapien
tccttgtctccctccactcttgggg

SEQ ID NO: 4392504 - DNA, 25 bp, Homo sapien
actcttggggttcaccaagaccagc

SEQ ID NO: 4392505 - DNA, 25 bp, Homo sapien
ttctccttgtctccctccactcttg

SEQ ID NO: 4392506 - DNA, 25 bp, Homo sapien
ggttcaccaagaccagcagggggtg

SEQ ID NO: 4392507 - DNA, 25 bp, Homo sapien
acagcttcggagaggcagatgagaa

SEQ ID NO: 4392508 - DNA, 25 bp, Homo sapien
attagctctgcttcatccaataggg

SEQ ID NO: 4392509 - DNA, 25 bp, Homo sapien
ggcaggcagtcaggtgtttttccac

SEQ ID NO: 4392510 - DNA, 25 bp, Homo sapien
gttgaagccaagacagcttcggaga

SEQ ID NO: 4392511 - DNA, 25 bp, Homo sapien
tgccttccctgcattccttggaact

SEQ ID NO: 4392512 - DNA, 25 bp, Homo sapien
gctgccttccctgcattccttggaa

SEQ ID NO: 4392513 - DNA, 25 bp, Homo sapien
ctgccttccctgcattccttggaac

SEQ ID NO: 4392514 - DNA, 25 bp, Homo sapien
ccttggcggacacgcagccatcaga

SEQ ID NO: 4392515 - DNA, 25 bp, Homo sapien
ctgcatgacaagttcgcccttggcg

SEQ ID NO: 4392516 - DNA, 25 bp, Homo sapien
aagttcgcccttggcggacacgcag

SEQ ID NO: 4392517 - DNA, 25 bp, Homo sapien
tggcggacacgcagccatcagactt

SEQ ID NO: 4392518 - DNA, 25 bp, Homo sapien
ccctcgccggggcaggagcacttac

SEQ ID NO: 4392519 - DNA, 25 bp, Homo sapien
gccctcgccggggcaggagcactta

SEQ ID NO: 4392520 - DNA, 25 bp, Homo sapien
cccaccgtcacacaacgttgataat

SEQ ID NO: 4392521 - DNA, 25 bp, Homo sapien
ggtctctgagttccccaccgtcaca

SEQ ID NO: 4392522 - DNA, 25 bp, Homo sapien
ggcatatggaggtgggcagtaagat

SEQ ID NO: 4392523 - DNA, 25 bp, Homo sapien
tcacacaacgttgataattcacatt

SEQ ID NO: 4392524 - DNA, 25 bp, Homo sapien
agttcccttccacccatgcgtgctg

SEQ ID NO: 4392525 - DNA, 25 bp, Homo sapien
tgatacttttgtggcaccggtcaca

SEQ ID NO: 4392526 - DNA, 25 bp, Homo sapien
tcacacttgacggaggagttccctt

SEQ ID NO: 4392527 - DNA, 25 bp, Homo sapien
agtgccgcgcggtgacactctggta

SEQ ID NO: 4392528 - DNA, 25 bp, Homo sapien
ctgcgggagggaagcgaacgatgcc

SEQ ID NO: 4392529 - DNA, 25 bp, Homo sapien
ggaagcgaacgatgccagggaaaat

SEQ ID NO: 4392530 - DNA, 25 bp, Homo sapien
aaaatggcagaaccatgtccccggg

SEQ ID NO: 4392531 - DNA, 25 bp, Homo sapien
ggaaaatggcagaaccatgtccccg

SEQ ID NO: 4392532 - DNA, 25 bp, Homo sapien
cacatagtgggtaccaggaaggtgc

SEQ ID NO: 4392533 - DNA, 25 bp, Homo sapien
gggagcgtctcttacaacctgtgta

SEQ ID NO: 4392534 - DNA, 25 bp, Homo sapien
tttacaggtggtcctcaaggcagag

SEQ ID NO: 4392535 - DNA, 25 bp, Homo sapien
gatgaggcatgcagtagaacaaggc

SEQ ID NO: 4392536 - DNA, 25 bp, Homo sapien
tggcttttgagtacgttttgacaca

SEQ ID NO: 4392537 - DNA, 25 bp, Homo sapien
tacgttttgacacaaccaggaatgt

SEQ ID NO: 4392538 - DNA, 25 bp, Homo sapien
cagcgttcgtggacagtgtatttac

SEQ ID NO: 4392539 - DNA, 25 bp, Homo sapien
aggaatgtttctggacacacagcgt

SEQ ID NO: 4392540 - DNA, 25 bp, Homo sapien
ggctggtcttgcctaacggaaattc

SEQ ID NO: 4392541 - DNA, 25 bp, Homo sapien
cttgcctaacggaaattcaaaacag

SEQ ID NO: 4392542 - DNA, 25 bp, Homo sapien
gaccctgcttatctgctgcggctgc

SEQ ID NO: 4392543 - DNA, 25 bp, Homo sapien
agagaccctgcttatctgctgcggc

SEQ ID NO: 4392544 - DNA, 25 bp, Homo sapien
gcacatccccagaaaggcgcttttt

SEQ ID NO: 4392545 - DNA, 25 bp, Homo sapien
ggagcacatccccagaaaggcgctt

SEQ ID NO: 4392546 - DNA, 25 bp, Homo sapien
cacatccccagaaaggcgctttttc

SEQ ID NO: 4392547 - DNA, 25 bp, Homo sapien
gagcacatccccagaaaggcgcttt

SEQ ID NO: 4392548 - DNA, 25 bp, Homo sapien
acaggccttgcttgcggacgcccat

SEQ ID NO: 4392549 - DNA, 25 bp, Homo sapien
tgcggacgcccatgagcatgatatg

SEQ ID NO: 4392550 - DNA, 25 bp, Homo sapien
gcagaagttgcagtaggttggtttc

SEQ ID NO: 4392551 - DNA, 25 bp, Homo sapien
tgcttcatggtccaggcgtgccgcc

SEQ ID NO: 4392552 - DNA, 25 bp, Homo sapien
taataggaggtgagaccccaagctg

SEQ ID NO: 4392553 - DNA, 25 bp, Homo sapien
ggtaataggaggtgagaccccaagc

SEQ ID NO: 4392554 - DNA, 25 bp, Homo sapien
tgcaggggtaataggaggtgagacc

SEQ ID NO: 4392555 - DNA, 25 bp, Homo sapien
taggaggtgagaccccaagctggct

SEQ ID NO: 4392556 - DNA, 25 bp, Homo sapien
tgaggaatgtccctcctgcatgtgc

SEQ ID NO: 4392557 - DNA, 25 bp, Homo sapien
gaacttttctcataggctccattac

SEQ ID NO: 4392558 - DNA, 25 bp, Homo sapien
tgcatgtgctatccctgaacttttc

SEQ ID NO: 4392559 - DNA, 25 bp, Homo sapien
caagagtaacactcttgggctggtt

SEQ ID NO: 4392560 - DNA, 25 bp, Homo sapien
tgaccaacatctacctcaagggctt

SEQ ID NO: 4392561 - DNA, 25 bp, Homo sapien
cttcgtggagcccaaaggattgtca

SEQ ID NO: 4392562 - DNA, 25 bp, Homo sapien
taaagcttctagttcaatgcctgac

SEQ ID NO: 4392563 - DNA, 25 bp, Homo sapien
gagaagttcggtaactagcccaagc

SEQ ID NO: 4392564 - DNA, 25 bp, Homo sapien
tccatggacccattcctgtagagac

SEQ ID NO: 4392565 - DNA, 25 bp, Homo sapien
ccggtcgtagtccatcccttgcagc

SEQ ID NO: 4392566 - DNA, 25 bp, Homo sapien
agacacaaagccgtcccggtcgtag

SEQ ID NO: 4392567 - DNA, 25 bp, Homo sapien
gatggtggtcatccctccatggacc

SEQ ID NO: 4392568 - DNA, 25 bp, Homo sapien
agcatttggttgacaatgcaatcca

SEQ ID NO: 4392569 - DNA, 25 bp, Homo sapien
tttggttgacaatgcaatccatctc

SEQ ID NO: 4392570 - DNA, 25 bp, Homo sapien
tctgtgggatcccactccaggtact

SEQ ID NO: 4392571 - DNA, 25 bp, Homo sapien
ggtactgggcaatatgcagcatttg

SEQ ID NO: 4392572 - DNA, 25 bp, Homo sapien
gcttggtccaggagaccgttctcat

SEQ ID NO: 4392573 - DNA, 25 bp, Homo sapien
cttggtccaggagaccgttctcatc

SEQ ID NO: 4392574 - DNA, 25 bp, Homo sapien
cgcttggtccaggagaccgttctca

SEQ ID NO: 4392575 - DNA, 25 bp, Homo sapien
tggtccaggagaccgttctcatctg

SEQ ID NO: 4392576 - DNA, 25 bp, Homo sapien
actccagcttatcctgaggcctccc

SEQ ID NO: 4392577 - DNA, 25 bp, Homo sapien
tagcacacaacatccttcaggtata

SEQ ID NO: 4392578 - DNA, 25 bp, Homo sapien
acacaacatccttcaggtataccac

SEQ ID NO: 4392579 - DNA, 25 bp, Homo sapien
agggacaggtagcacacaacatcct

SEQ ID NO: 4392580 - DNA, 25 bp, Homo sapien
aggggggtcgcagccacttggtctt

SEQ ID NO: 4392581 - DNA, 25 bp, Homo sapien
acttggtcttcagctggtgcttgct

SEQ ID NO: 4392582 - DNA, 25 bp, Homo sapien
gcttgcttctcagccatatttgatt

SEQ ID NO: 4392583 - DNA, 25 bp, Homo sapien
gttccaggggggtcgcagccacttg

SEQ ID NO: 4392584 - DNA, 25 bp, Homo sapien
acaaaaggaaaacatccaaggacat

SEQ ID NO: 4392585 - DNA, 25 bp, Homo sapien
ctgcgatgaacaaaaggaaaacatc

SEQ ID NO: 4392586 - DNA, 25 bp, Homo sapien
tgaacaaaaggaaaacatccaagga

SEQ ID NO: 4392587 - DNA, 25 bp, Homo sapien
cgatgaacaaaaggaaaacatccaa

SEQ ID NO: 4392588 - DNA, 25 bp, Homo sapien
tcctgtcatagagatgcaggggtcc

SEQ ID NO: 4392589 - DNA, 25 bp, Homo sapien
cctgtcatagagatgcaggggtcca

SEQ ID NO: 4392590 - DNA, 25 bp, Homo sapien
ctgtcatagagatgcaggggtccag

SEQ ID NO: 4392591 - DNA, 25 bp, Homo sapien
tgacccttgacaccactgatctttg

SEQ ID NO: 4392592 - DNA, 25 bp, Homo sapien
tgagaaactaacgaaacaccaggac

SEQ ID NO: 4392593 - DNA, 25 bp, Homo sapien
cagagtaaaactagaagagggtcca

SEQ ID NO: 4392594 - DNA, 25 bp, Homo sapien
tattccaagtcgctgaaacatctcg

SEQ ID NO: 4392595 - DNA, 25 bp, Homo sapien
tgggctttgctagatctgagcttgg

SEQ ID NO: 4392596 - DNA, 25 bp, Homo sapien
cagtgatagattgctcaggcctccg

SEQ ID NO: 4392597 - DNA, 25 bp, Homo sapien
actgatctgataggcctagacaggc

SEQ ID NO: 4392598 - DNA, 25 bp, Homo sapien
tccgagccgaagtctggaccctgaa

SEQ ID NO: 4392599 - DNA, 25 bp, Homo sapien
gacatctgtggaagagggcctacca

SEQ ID NO: 4392600 - DNA, 25 bp, Homo sapien
tacgcatggaggtcttaaataagtc

SEQ ID NO: 4392601 - DNA, 25 bp, Homo sapien
ccttgggccaagagtcagataattg

SEQ ID NO: 4392602 - DNA, 25 bp, Homo sapien
ggtacctcagaaacattagccacta

SEQ ID NO: 4392603 - DNA, 25 bp, Homo sapien
tttggggcaggatgctttttaccac

SEQ ID NO: 4392604 - DNA, 25 bp, Homo sapien
tcctagtttcacactttcctcccta

SEQ ID NO: 4392605 - DNA, 25 bp, Homo sapien
ttggggcaggatgctttttaccact

SEQ ID NO: 4392606 - DNA, 25 bp, Homo sapien
agagctcctagtttcacactttcct

SEQ ID NO: 4392607 - DNA, 25 bp, Homo sapien
ggcttcccattgataaatgtgtcag

SEQ ID NO: 4392608 - DNA, 25 bp, Homo sapien
gcttcccattgataaatgtgtcagg

SEQ ID NO: 4392609 - DNA, 25 bp, Homo sapien
cttcccattgataaatgtgtcaggg

SEQ ID NO: 4392610 - DNA, 25 bp, Homo sapien
ttcccattgataaatgtgtcaggga

SEQ ID NO: 4392611 - DNA, 25 bp, Homo sapien
aggggcacaggcctcgtctgctttg

SEQ ID NO: 4392612 - DNA, 25 bp, Homo sapien
gggcacaggcctcgtctgctttggt

SEQ ID NO: 4392613 - DNA, 25 bp, Homo sapien
gcacaggcctcgtctgctttggtgg

SEQ ID NO: 4392614 - DNA, 25 bp, Homo sapien
caggcctcgtctgctttggtggcat

SEQ ID NO: 4392615 - DNA, 25 bp, Homo sapien
tccctccgtcgggtggtcagaggtc

SEQ ID NO: 4392616 - DNA, 25 bp, Homo sapien
cctccgtcgggtggtcagaggtctc

SEQ ID NO: 4392617 - DNA, 25 bp, Homo sapien
tggtcagaggtctcgtgtctgggct

SEQ ID NO: 4392618 - DNA, 25 bp, Homo sapien
ctggctccctccgtcgggtggtcag

SEQ ID NO: 4392619 - DNA, 25 bp, Homo sapien
aggtccacctccaggtacgccctca

SEQ ID NO: 4392620 - DNA, 25 bp, Homo sapien
ggtccacctccaggtacgccctcat

SEQ ID NO: 4392621 - DNA, 25 bp, Homo sapien
tcagattcttcatcaaatcggcaga

SEQ ID NO: 4392622 - DNA, 25 bp, Homo sapien
cagtgagtcatcactggcttgtgct

SEQ ID NO: 4392623 - DNA, 25 bp, Homo sapien
ggcttgtgctttgatggcatcagat

SEQ ID NO: 4392624 - DNA, 25 bp, Homo sapien
gcaaacactcaacaacaacagtttg

SEQ ID NO: 4392625 - DNA, 25 bp, Homo sapien
ttgaggaagcactactctgagatct

SEQ ID NO: 4392626 - DNA, 25 bp, Homo sapien
tgaggaagcactactctgagatctg

SEQ ID NO: 4392627 - DNA, 25 bp, Homo sapien
gaggaagcactactctgagatctgc

SEQ ID NO: 4392628 - DNA, 25 bp, Homo sapien
ggaagcactactctgagatctgctg

SEQ ID NO: 4392629 - DNA, 25 bp, Homo sapien
tcagcatgagattcaggaaacctcg

SEQ ID NO: 4392630 - DNA, 25 bp, Homo sapien
aattagcttgctccctgaaaaccag

SEQ ID NO: 4392631 - DNA, 25 bp, Homo sapien
gaaacctcgtgactggtctcagacc

SEQ ID NO: 4392632 - DNA, 25 bp, Homo sapien
tatgctcccaacattacaggctgag

SEQ ID NO: 4392633 - DNA, 25 bp, Homo sapien
gccagccccgacagaggcgagggcg

SEQ ID NO: 4392634 - DNA, 25 bp, Homo sapien
tagcagccaagcgactccctgcttc

SEQ ID NO: 4392635 - DNA, 25 bp, Homo sapien
gcggctgcgtgctcatagcagccaa

SEQ ID NO: 4392636 - DNA, 25 bp, Homo sapien
aaagtgggggccagccccgacagag

SEQ ID NO: 4392637 - DNA, 25 bp, Homo sapien
agtggccctgaccaaactgttcctc

SEQ ID NO: 4392638 - DNA, 25 bp, Homo sapien
tcatcagccccagggcggacaagct

SEQ ID NO: 4392639 - DNA, 25 bp, Homo sapien
aagctgattagcagccgccgccagg

SEQ ID NO: 4392640 - DNA, 25 bp, Homo sapien
ccagggcggacaagctgattagcag

SEQ ID NO: 4392641 - DNA, 25 bp, Homo sapien
tgctatcttctctgcatggtttctc

SEQ ID NO: 4392642 - DNA, 25 bp, Homo sapien
ctgctatcttctctgcatggtttct

SEQ ID NO: 4392643 - DNA, 25 bp, Homo sapien
gggcagtgagttctttgctggctct

SEQ ID NO: 4392644 - DNA, 25 bp, Homo sapien
tctttgctggctctgctatcttctc

SEQ ID NO: 4392645 - DNA, 25 bp, Homo sapien
ttcttcaaggcaagcggagtctcca

SEQ ID NO: 4392646 - DNA, 25 bp, Homo sapien
tggctcacttgagacttaagaggaa

SEQ ID NO: 4392647 - DNA, 25 bp, Homo sapien
cggagtctccaagagggaaacaaat

SEQ ID NO: 4392648 - DNA, 25 bp, Homo sapien
tataatgccaggtagcacaaatggc

SEQ ID NO: 4392649 - DNA, 25 bp, Homo sapien
cattaaattcagtcaaggcatcttt

SEQ ID NO: 4392650 - DNA, 25 bp, Homo sapien
aaattcagtcaaggcatcttttatc

SEQ ID NO: 4392651 - DNA, 25 bp, Homo sapien
ccctcattaaattcagtcaaggcat

SEQ ID NO: 4392652 - DNA, 25 bp, Homo sapien
ccaccctcattaaattcagtcaagg

SEQ ID NO: 4392653 - DNA, 25 bp, Homo sapien
ctgacagccagaagattttcctctg

SEQ ID NO: 4392654 - DNA, 25 bp, Homo sapien
tctgacagccagaagattttcctct

SEQ ID NO: 4392655 - DNA, 25 bp, Homo sapien
aaaacactaaggagggtaagatgcg

SEQ ID NO: 4392656 - DNA, 25 bp, Homo sapien
tgcggcaagatactgttaatggact

SEQ ID NO: 4392657 - DNA, 25 bp, Homo sapien
taatagctgtcccttactggagacc

SEQ ID NO: 4392658 - DNA, 25 bp, Homo sapien
taaactctcctctactaatccatgc

SEQ ID NO: 4392659 - DNA, 25 bp, Homo sapien
cattgatatggttaagatttttccc

SEQ ID NO: 4392660 - DNA, 25 bp, Homo sapien
cgaccttctttctatatgaccttgg

SEQ ID NO: 4392661 - DNA, 25 bp, Homo sapien
ctagaattgagggacttttggttct

SEQ ID NO: 4392662 - DNA, 25 bp, Homo sapien
gcaagtcactgagctcttctggacg

SEQ ID NO: 4392663 - DNA, 25 bp, Homo sapien
gaggcataccttaagcctcattctc

SEQ ID NO: 4392664 - DNA, 25 bp, Homo sapien
cctaacattcctactgtctgagtgc

SEQ ID NO: 4392665 - DNA, 25 bp, Homo sapien
cttttctttcctaacattcctactg

SEQ ID NO: 4392666 - DNA, 25 bp, Homo sapien
tcctgatagaggcataccttaagcc

SEQ ID NO: 4392667 - DNA, 25 bp, Homo sapien
tgccatgcagggtaagtgacggtca

SEQ ID NO: 4392668 - DNA, 25 bp, Homo sapien
caggtggtgtcctgccacagtccag

SEQ ID NO: 4392669 - DNA, 25 bp, Homo sapien
gcatcaacacagttaatgtgaaggg

SEQ ID NO: 4392670 - DNA, 25 bp, Homo sapien
acagttaatgtgaagggagaggcca

SEQ ID NO: 4392671 - DNA, 25 bp, Homo sapien
gtgagggagacccaccgttcttcac

SEQ ID NO: 4392672 - DNA, 25 bp, Homo sapien
gagtgagggagacccaccgttcttc

SEQ ID NO: 4392673 - DNA, 25 bp, Homo sapien
tggagtgagggagacccaccgttct

SEQ ID NO: 4392674 - DNA, 25 bp, Homo sapien
tctggagtgagggagacccaccgtt

SEQ ID NO: 4392675 - DNA, 25 bp, Homo sapien
acttctgggagcactcaagtgtata

SEQ ID NO: 4392676 - DNA, 25 bp, Homo sapien
ggtttgcgatgtaagcctttcagga

SEQ ID NO: 4392677 - DNA, 25 bp, Homo sapien
caaggtaaattcagaagtcctggct

SEQ ID NO: 4392678 - DNA, 25 bp, Homo sapien
ggcctggctcattgcaggtttgcga

SEQ ID NO: 4392679 - DNA, 25 bp, Homo sapien
tacctgttcatagagatctttctca

SEQ ID NO: 4392680 - DNA, 25 bp, Homo sapien
catcctatgaatcacaccatacctg

SEQ ID NO: 4392681 - DNA, 25 bp, Homo sapien
tgtctccttagctagttccacaagg

SEQ ID NO: 4392682 - DNA, 25 bp, Homo sapien
gttctttacctgtggtaataactca

SEQ ID NO: 4392683 - DNA, 25 bp, Homo sapien
cataagcattatggcctgacaaaca

SEQ ID NO: 4392684 - DNA, 25 bp, Homo sapien
acaccatgcctttgatctacttgaa

SEQ ID NO: 4392685 - DNA, 25 bp, Homo sapien
gtgggaggaccccataagcattatg

SEQ ID NO: 4392686 - DNA, 25 bp, Homo sapien
tggcctgacaaacacaccatgcctt

SEQ ID NO: 4392687 - DNA, 25 bp, Homo sapien
aacacgcaagcaagaccatgactgg

SEQ ID NO: 4392688 - DNA, 25 bp, Homo sapien
catgtaggagatttaccagaggagc

SEQ ID NO: 4392689 - DNA, 25 bp, Homo sapien
gagagccttaggatccacgtttcat

SEQ ID NO: 4392690 - DNA, 25 bp, Homo sapien
gcttcacaaagagtgagtcccatgg

SEQ ID NO: 4392691 - DNA, 25 bp, Homo sapien
tgcctgggttcatgaccaaacctcg

SEQ ID NO: 4392692 - DNA, 25 bp, Homo sapien
tccttcattgacaaccagggtgccc

SEQ ID NO: 4392693 - DNA, 25 bp, Homo sapien
aatggaatctccagcaaatgtagtc

SEQ ID NO: 4392694 - DNA, 25 bp, Homo sapien
tgtgccagcaagtggctctgccagc

SEQ ID NO: 4392695 - DNA, 25 bp, Homo sapien
tcttcaccctgtgctcggagttcag

SEQ ID NO: 4392696 - DNA, 25 bp, Homo sapien
gcaacacttggttgcgcggtggccc

SEQ ID NO: 4392697 - DNA, 25 bp, Homo sapien
agctccaaagctgtctatctccgtg

SEQ ID NO: 4392698 - DNA, 25 bp, Homo sapien
gctactacggcactgcggctctgtg

SEQ ID NO: 4392699 - DNA, 25 bp, Homo sapien
gccagcagctgatgcctgatctcca

SEQ ID NO: 4392700 - DNA, 25 bp, Homo sapien
ctctgggaacacatcatccaagcca

SEQ ID NO: 4392701 - DNA, 25 bp, Homo sapien
ctcacactcaccatgttgctctggg

SEQ ID NO: 4392702 - DNA, 25 bp, Homo sapien
cattccctgagacttcaatgttggc

SEQ ID NO: 4392703 - DNA, 25 bp, Homo sapien
tccatacccgaaaccagtacagaaa

SEQ ID NO: 4392704 - DNA, 25 bp, Homo sapien
gaaagcaaaccattcatcatgtgaa

SEQ ID NO: 4392705 - DNA, 25 bp, Homo sapien
ggagaaagcaaaccattcatcatgt

SEQ ID NO: 4392706 - DNA, 25 bp, Homo sapien
ccattgcttgagtttaatcagacta

SEQ ID NO: 4392707 - DNA, 25 bp, Homo sapien
gtttaatcagactaatgaaccagct

SEQ ID NO: 4392708 - DNA, 25 bp, Homo sapien
atgaaccccagggtttggtcataat

SEQ ID NO: 4392709 - DNA, 25 bp, Homo sapien
cagtggattccaacacatgaacccc

SEQ ID NO: 4392710 - DNA, 25 bp, Homo sapien
ctcacaagcagacccggctggtttc

SEQ ID NO: 4392711 - DNA, 25 bp, Homo sapien
gaaggctcctcacaagcagacccgg

SEQ ID NO: 4392712 - DNA, 25 bp, Homo sapien
gctttcgaggacagtgctaacagct

SEQ ID NO: 4392713 - DNA, 25 bp, Homo sapien
ctttcgaggacagtgctaacagcta

SEQ ID NO: 4392714 - DNA, 25 bp, Homo sapien
gggctttcgaggacagtgctaacag

SEQ ID NO: 4392715 - DNA, 25 bp, Homo sapien
tgggctttcgaggacagtgctaaca

SEQ ID NO: 4392716 - DNA, 25 bp, Homo sapien
tgggagagaagcagagtgagaaaac

SEQ ID NO: 4392717 - DNA, 25 bp, Homo sapien
agactgggagagaagcagagtgaga

SEQ ID NO: 4392718 - DNA, 25 bp, Homo sapien
actgggagagaagcagagtgagaaa

SEQ ID NO: 4392719 - DNA, 25 bp, Homo sapien
atagagactgggagagaagcagagt

SEQ ID NO: 4392720 - DNA, 25 bp, Homo sapien
agaggcaccgttctgagcttctggg

SEQ ID NO: 4392721 - DNA, 25 bp, Homo sapien
ggcagcgtcattcgaatgtgggtca

SEQ ID NO: 4392722 - DNA, 25 bp, Homo sapien
gtcatgaaccaatcgaggctcagag

SEQ ID NO: 4392723 - DNA, 25 bp, Homo sapien
agcagggagtctgccagtccgctca

SEQ ID NO: 4392724 - DNA, 25 bp, Homo sapien
gggaatgacatgagctcctgtggcc

SEQ ID NO: 4392725 - DNA, 25 bp, Homo sapien
tggacacatacagggggtgaccaga

SEQ ID NO: 4392726 - DNA, 25 bp, Homo sapien
ctgaagtttccgcccaaaagacaag

SEQ ID NO: 4392727 - DNA, 25 bp, Homo sapien
cccagtggacacatacagggggtga

SEQ ID NO: 4392728 - DNA, 25 bp, Homo sapien
ctcgttgagacagagccactacctt

SEQ ID NO: 4392729 - DNA, 25 bp, Homo sapien
ctggagtcctcgttgagacagagcc

SEQ ID NO: 4392730 - DNA, 25 bp, Homo sapien
gacagagccactaccttagggactc

SEQ ID NO: 4392731 - DNA, 25 bp, Homo sapien
ccttggggtagcctgactcggactc

SEQ ID NO: 4392732 - DNA, 25 bp, Homo sapien
gcagccctccttctgatgatacaga

SEQ ID NO: 4392733 - DNA, 25 bp, Homo sapien
catacgtccctaaggatgaaatgca

SEQ ID NO: 4392734 - DNA, 25 bp, Homo sapien
acagatgtttcttgggatatgctaa

SEQ ID NO: 4392735 - DNA, 25 bp, Homo sapien
tccttgtactctcttttgtctacac

SEQ ID NO: 4392736 - DNA, 25 bp, Homo sapien
aagcctcggtaagctgcttgaactc

SEQ ID NO: 4392737 - DNA, 25 bp, Homo sapien
taagcctcggtaagctgcttgaact

SEQ ID NO: 4392738 - DNA, 25 bp, Homo sapien
ttaagcctcggtaagctgcttgaac

SEQ ID NO: 4392739 - DNA, 25 bp, Homo sapien
gcctttctgccaggcgaaagagaag

SEQ ID NO: 4392740 - DNA, 25 bp, Homo sapien
aagcagactgcggttcctggcaggg

SEQ ID NO: 4392741 - DNA, 25 bp, Homo sapien
cctccagttgctagggtgatttaaa

SEQ ID NO: 4392742 - DNA, 25 bp, Homo sapien
ctatgaggacgcctttctgccaggc

SEQ ID NO: 4392743 - DNA, 25 bp, Homo sapien
actctttctggtaaggacccggctg

SEQ ID NO: 4392744 - DNA, 25 bp, Homo sapien
ctctttctggtaaggacccggctgc

SEQ ID NO: 4392745 - DNA, 25 bp, Homo sapien
tctgcaatcagctcataggcatccc

SEQ ID NO: 4392746 - DNA, 25 bp, Homo sapien
ctctgcaatcagctcataggcatcc

SEQ ID NO: 4392747 - DNA, 25 bp, Homo sapien
taggcatcccccataagccacacag

SEQ ID NO: 4392748 - DNA, 25 bp, Homo sapien
catcccccataagccacacagaagg

SEQ ID NO: 4392749 - DNA, 25 bp, Homo sapien
tacatacaaaatcatggtccactgc

SEQ ID NO: 4392750 - DNA, 25 bp, Homo sapien
caaacaaactacaacactgatcaaa

SEQ ID NO: 4392751 - DNA, 25 bp, Homo sapien
aatgtcttgtggaaagcaaattgcc

SEQ ID NO: 4392752 - DNA, 25 bp, Homo sapien
tattataatatcacagtacaagtaa

SEQ ID NO: 4392753 - DNA, 25 bp, Homo sapien
aggtcatcaggatggtgccactcaa

SEQ ID NO: 4392754 - DNA, 25 bp, Homo sapien
tcaggatggtgccactcaattcact

SEQ ID NO: 4392755 - DNA, 25 bp, Homo sapien
tcatcaggatggtgccactcaattc

SEQ ID NO: 4392756 - DNA, 25 bp, Homo sapien
gctcatcatttggggtgaggtcatc

SEQ ID NO: 4392757 - DNA, 25 bp, Homo sapien
cttccaggaagaggtcatgatcctg

SEQ ID NO: 4392758 - DNA, 25 bp, Homo sapien
tgaagaaggattcagccagagtccc

SEQ ID NO: 4392759 - DNA, 25 bp, Homo sapien
ggtggatcaagaactgctatcttgg

SEQ ID NO: 4392760 - DNA, 25 bp, Homo sapien
ttgggttgagggtaattcttgaaga

SEQ ID NO: 4392761 - DNA, 25 bp, Homo sapien
gctgcacttccattcattaccaaaa

SEQ ID NO: 4392762 - DNA, 25 bp, Homo sapien
ctcccattgggtaacggcagctcta

SEQ ID NO: 4392763 - DNA, 25 bp, Homo sapien
gagcttcatagccacgactgctgca

SEQ ID NO: 4392764 - DNA, 25 bp, Homo sapien
gcctgatgtagtgaccagactttga

SEQ ID NO: 4392765 - DNA, 25 bp, Homo sapien
aaattttcggcagcacgcctggtga

SEQ ID NO: 4392766 - DNA, 25 bp, Homo sapien
aatgtgtctccacatagtaggagta

SEQ ID NO: 4392767 - DNA, 25 bp, Homo sapien
ctggtgatgatgagcaaagtggcct

SEQ ID NO: 4392768 - DNA, 25 bp, Homo sapien
gagtaaggtcttgggagtaaacaga

SEQ ID NO: 4392769 - DNA, 25 bp, Homo sapien
cgtcacgccaaacatttcgggttca

SEQ ID NO: 4392770 - DNA, 25 bp, Homo sapien
ccttagagatgatcaggtccctggt

SEQ ID NO: 4392771 - DNA, 25 bp, Homo sapien
ccagatgactcctgtgcttagccaa

SEQ ID NO: 4392772 - DNA, 25 bp, Homo sapien
ttcaaaagcccgacctggtgggatg

SEQ ID NO: 4392773 - DNA, 25 bp, Homo sapien
gggaatccgcatgctctaggtcatg

SEQ ID NO: 4392774 - DNA, 25 bp, Homo sapien
aaagctctgaagtttttggctccta

SEQ ID NO: 4392775 - DNA, 25 bp, Homo sapien
tcatgctgtgaatgtcagaactggg

SEQ ID NO: 4392776 - DNA, 25 bp, Homo sapien
tttcttgctccgttaacactggctt

SEQ ID NO: 4392777 - DNA, 25 bp, Homo sapien
taggatggacgatgcttaagtcagg

SEQ ID NO: 4392778 - DNA, 25 bp, Homo sapien
gtgtttgtaaaccaggggctgtctc

SEQ ID NO: 4392779 - DNA, 25 bp, Homo sapien
ctgtaggatggacgatgcttaagtc

SEQ ID NO: 4392780 - DNA, 25 bp, Homo sapien
tggacgatgcttaagtcaggtgttt

SEQ ID NO: 4392781 - DNA, 25 bp, Homo sapien
gtttactttacgctgatccccagag

SEQ ID NO: 4392782 - DNA, 25 bp, Homo sapien
tggtttactttacgctgatccccag

SEQ ID NO: 4392783 - DNA, 25 bp, Homo sapien
actttacgctgatccccagagtttc

SEQ ID NO: 4392784 - DNA, 25 bp, Homo sapien
atgttggtttactttacgctgatcc

SEQ ID NO: 4392785 - DNA, 25 bp, Homo sapien
aataacagcagtatgcccttttgcc

SEQ ID NO: 4392786 - DNA, 25 bp, Homo sapien
ctgacaataacagcagtatgccctt

SEQ ID NO: 4392787 - DNA, 25 bp, Homo sapien
taacagcagtatgcccttttgccat

SEQ ID NO: 4392788 - DNA, 25 bp, Homo sapien
gcagtatgcccttttgccattgaga

SEQ ID NO: 4392789 - DNA, 25 bp, Homo sapien
ctagaccggacccaatatgttaaag

SEQ ID NO: 4392790 - DNA, 25 bp, Homo sapien
atacttccttacaaatctagaccgg

SEQ ID NO: 4392791 - DNA, 25 bp, Homo sapien
gaaggaagggaacatctttcaaaca

SEQ ID NO: 4392792 - DNA, 25 bp, Homo sapien
aggctttctggcactacagtgaagg

SEQ ID NO: 4392793 - DNA, 25 bp, Homo sapien
tgccatccgacttgctgatgcccag

SEQ ID NO: 4392794 - DNA, 25 bp, Homo sapien
atctgcagtgcacggcagcatcagg

SEQ ID NO: 4392795 - DNA, 25 bp, Homo sapien
atcaaggacatctgcagtgcacggc

SEQ ID NO: 4392796 - DNA, 25 bp, Homo sapien
gattccatttctccaccttccactg

SEQ ID NO: 4392797 - DNA, 25 bp, Homo sapien
ggtttgaggtgggaacagccaggcc

SEQ ID NO: 4392798 - DNA, 25 bp, Homo sapien
acaaatgaagctaagaagtggtttg

SEQ ID NO: 4392799 - DNA, 25 bp, Homo sapien
ctgttgttatgagaacaaatgaagc

SEQ ID NO: 4392800 - DNA, 25 bp, Homo sapien
tggtttgaggtgggaacagccaggc

SEQ ID NO: 4392801 - DNA, 25 bp, Homo sapien
tttccatagcaaccgtgacaaaagg

SEQ ID NO: 4392802 - DNA, 25 bp, Homo sapien
gacaaaaggtagtgcaggctcagct

SEQ ID NO: 4392803 - DNA, 25 bp, Homo sapien
tcccattgacagagagcttgcttct

SEQ ID NO: 4392804 - DNA, 25 bp, Homo sapien
aattcgtgattatgccggcctcctg

SEQ ID NO: 4392805 - DNA, 25 bp, Homo sapien
tatctgaaccggttcttgaaggagg

SEQ ID NO: 4392806 - DNA, 25 bp, Homo sapien
gctttatctgaaccggttcttgaag

SEQ ID NO: 4392807 - DNA, 25 bp, Homo sapien
taggctttatctgaaccggttcttg

SEQ ID NO: 4392808 - DNA, 25 bp, Homo sapien
cggttcttgaaggaggttatggttg

SEQ ID NO: 4392809 - DNA, 25 bp, Homo sapien
ccatggacacaatatgggtcagact

SEQ ID NO: 4392810 - DNA, 25 bp, Homo sapien
tgaagaactaagtatacccagctca

SEQ ID NO: 4392811 - DNA, 25 bp, Homo sapien
attcctccattgtgataaactgccc

SEQ ID NO: 4392812 - DNA, 25 bp, Homo sapien
gaagaactaagtatacccagctcag

SEQ ID NO: 4392813 - DNA, 25 bp, Homo sapien
ccaacaacctcagtctgggaagctg

SEQ ID NO: 4392814 - DNA, 25 bp, Homo sapien
acctcagtctgggaagctgggttga

SEQ ID NO: 4392815 - DNA, 25 bp, Homo sapien
tctggtcccagactctaggccaaca

SEQ ID NO: 4392816 - DNA, 25 bp, Homo sapien
tggtcccagactctaggccaacaac

SEQ ID NO: 4392817 - DNA, 25 bp, Homo sapien
ccttctgatgcagcaaactcactgc

SEQ ID NO: 4392818 - DNA, 25 bp, Homo sapien
tcttcactcctgactgactgattgg

SEQ ID NO: 4392819 - DNA, 25 bp, Homo sapien
gacagtctgttgaagaatgggcagc

SEQ ID NO: 4392820 - DNA, 25 bp, Homo sapien
tggtgagcccgactcctgatccaat

SEQ ID NO: 4392821 - DNA, 25 bp, Homo sapien
gctgggttagtgtcctaggcttctc

SEQ ID NO: 4392822 - DNA, 25 bp, Homo sapien
tgttaaatacgtatacatgcctcgt

SEQ ID NO: 4392823 - DNA, 25 bp, Homo sapien
gagggatccttgacattctgagaac

SEQ ID NO: 4392824 - DNA, 25 bp, Homo sapien
tttattttactatgtgataaaggag

SEQ ID NO: 4392825 - DNA, 25 bp, Homo sapien
tggagcagacacggtcctttatttt

SEQ ID NO: 4392826 - DNA, 25 bp, Homo sapien
tgtggccacaacaccttgtagatgt

SEQ ID NO: 4392827 - DNA, 25 bp, Homo sapien
tgcttccaaggagcgccagtcatat

SEQ ID NO: 4392828 - DNA, 25 bp, Homo sapien
acttcggccatagcgcgtgagcatt

SEQ ID NO: 4392829 - DNA, 25 bp, Homo sapien
gaatctgagctaatttggtcctccc

SEQ ID NO: 4392830 - DNA, 25 bp, Homo sapien
ggttcccctgtatgagtcttctctg

SEQ ID NO: 4392831 - DNA, 25 bp, Homo sapien
ggggttcccctgtatgagtcttctc

SEQ ID NO: 4392832 - DNA, 25 bp, Homo sapien
ccaggggttcccctgtatgagtctt

SEQ ID NO: 4392833 - DNA, 25 bp, Homo sapien
ttcccctgtatgagtcttctctgcc

SEQ ID NO: 4392834 - DNA, 25 bp, Homo sapien
gggcactgcttgctgagttcatgtc

SEQ ID NO: 4392835 - DNA, 25 bp, Homo sapien
actgataaaccaattgaggtgtggg

SEQ ID NO: 4392836 - DNA, 25 bp, Homo sapien
tgctgtgcccacaatctgtggcttc

SEQ ID NO: 4392837 - DNA, 25 bp, Homo sapien
aagggccccagaggtgtactgccca

SEQ ID NO: 4392838 - DNA, 25 bp, Homo sapien
gttctgttctcccattcggtgtccc

SEQ ID NO: 4392839 - DNA, 25 bp, Homo sapien
cagggccagtgcaggagtcctcgac

SEQ ID NO: 4392840 - DNA, 25 bp, Homo sapien
cagtgcaggagtcctcgacttgcaa

SEQ ID NO: 4392841 - DNA, 25 bp, Homo sapien
gagtcctcgacttgcaattctgccc

SEQ ID NO: 4392842 - DNA, 25 bp, Homo sapien
cccattctgaatgaagtcttctcca

SEQ ID NO: 4392843 - DNA, 25 bp, Homo sapien
ctccccattctgaatgaagtcttct

SEQ ID NO: 4392844 - DNA, 25 bp, Homo sapien
ccccattctgaatgaagtcttctcc

SEQ ID NO: 4392845 - DNA, 25 bp, Homo sapien
ccattctgaatgaagtcttctccag

SEQ ID NO: 4392846 - DNA, 25 bp, Homo sapien
gaaatgccagcatggaagcaaactg

SEQ ID NO: 4392847 - DNA, 25 bp, Homo sapien
tcttagggaaaggtagccagtcatc

SEQ ID NO: 4392848 - DNA, 25 bp, Homo sapien
cattagctcgaagagaggcaccagg

SEQ ID NO: 4392849 - DNA, 25 bp, Homo sapien
gaaactgtggttagtcatcctgaca

SEQ ID NO: 4392850 - DNA, 25 bp, Homo sapien
gaagtagcctggactgaatcctggc

SEQ ID NO: 4392851 - DNA, 25 bp, Homo sapien
tatatgcacagatctccagccaatg

SEQ ID NO: 4392852 - DNA, 25 bp, Homo sapien
gcagaacaatgactttgggagcaga

SEQ ID NO: 4392853 - DNA, 25 bp, Homo sapien
gacttcagatggcttatggctccac

SEQ ID NO: 4392854 - DNA, 25 bp, Homo sapien
tgagatctcattttgtttggcacaa

SEQ ID NO: 4392855 - DNA, 25 bp, Homo sapien
tgtgactgcccactgtggcgagcac

SEQ ID NO: 4392856 - DNA, 25 bp, Homo sapien
cagatgggtagctttgtgtgactgc

SEQ ID NO: 4392857 - DNA, 25 bp, Homo sapien
tctagattggtgatctggcagatgg

SEQ ID NO: 4392858 - DNA, 25 bp, Homo sapien
gttttattgatgatgcctatttgga

SEQ ID NO: 4392859 - DNA, 25 bp, Homo sapien
ggccagccagcatttgggccccagg

SEQ ID NO: 4392860 - DNA, 25 bp, Homo sapien
gatgcctatttggaccacaaggcca

SEQ ID NO: 4392861 - DNA, 25 bp, Homo sapien
tgggccccaggaagaatatggcccc

SEQ ID NO: 4392862 - DNA, 25 bp, Homo sapien
caatcgatgggcttccggtactcct

SEQ ID NO: 4392863 - DNA, 25 bp, Homo sapien
tactgcctgccacggtagttgggta

SEQ ID NO: 4392864 - DNA, 25 bp, Homo sapien
gcaccttacaggagtggatctctcg

SEQ ID NO: 4392865 - DNA, 25 bp, Homo sapien
aatgcggcggaaagactggacagct

SEQ ID NO: 4392866 - DNA, 25 bp, Homo sapien
gaaacagagggagtacacagtcccc

SEQ ID NO: 4392867 - DNA, 25 bp, Homo sapien
gaaaccattatggaaatcaccagca

SEQ ID NO: 4392868 - DNA, 25 bp, Homo sapien
tagtcattctagtgatgagctgctc

SEQ ID NO: 4392869 - DNA, 25 bp, Homo sapien
caccttgaaagctagatgatctgaa

SEQ ID NO: 4392870 - DNA, 25 bp, Homo sapien
catccaacgctggtattcagggtac

SEQ ID NO: 4392871 - DNA, 25 bp, Homo sapien
gcaatcacagtcatagcgacggcct

SEQ ID NO: 4392872 - DNA, 25 bp, Homo sapien
tatgtgtggaaatctgcacagtcgc

SEQ ID NO: 4392873 - DNA, 25 bp, Homo sapien
caaagttgggcctttcataaacagc

SEQ ID NO: 4392874 - DNA, 25 bp, Homo sapien
tgaagtagagggccaacagagaaag

SEQ ID NO: 4392875 - DNA, 25 bp, Homo sapien
ctgaagtagagggccaacagagaaa

SEQ ID NO: 4392876 - DNA, 25 bp, Homo sapien
tcctatttgaagactacagcagact

SEQ ID NO: 4392877 - DNA, 25 bp, Homo sapien
gaactcccaaggattcaccaagcag

SEQ ID NO: 4392878 - DNA, 25 bp, Homo sapien
caggtgtcatgcttcgaaccgttaa

SEQ ID NO: 4392879 - DNA, 25 bp, Homo sapien
aaatatgcagccctgtgaaagcaga

SEQ ID NO: 4392880 - DNA, 25 bp, Homo sapien
ccggatactgtcttgagaggatctt

SEQ ID NO: 4392881 - DNA, 25 bp, Homo sapien
tgaaaggagcagagccggatactgt

SEQ ID NO: 4392882 - DNA, 25 bp, Homo sapien
ttactttatggatttcacgggcgaa

SEQ ID NO: 4392883 - DNA, 25 bp, Homo sapien
cacgggcgaaaactatgtgagtcat

SEQ ID NO: 4392884 - DNA, 25 bp, Homo sapien
tacatgatgcctgatacggtcacct

SEQ ID NO: 4392885 - DNA, 25 bp, Homo sapien
tgtgtgcctagaaacggatggctgc

SEQ ID NO: 4392886 - DNA, 25 bp, Homo sapien
tggtgggctgcagtgcaaaactcct

SEQ ID NO: 4392887 - DNA, 25 bp, Homo sapien
ggacaatgaccaaggctgggcctaa

SEQ ID NO: 4392888 - DNA, 25 bp, Homo sapien
ttggtgcatagactggttttcccag

SEQ ID NO: 4392889 - DNA, 25 bp, Homo sapien
ggtgcatagactggttttcccagtg

SEQ ID NO: 4392890 - DNA, 25 bp, Homo sapien
tttggtgcatagactggttttccca

SEQ ID NO: 4392891 - DNA, 25 bp, Homo sapien
ttttggtgcatagactggttttccc

SEQ ID NO: 4392892 - DNA, 25 bp, Homo sapien
gactgtgggactcctgaatttgcca

SEQ ID NO: 4392893 - DNA, 25 bp, Homo sapien
taatccataagaagggtgccaccgt

SEQ ID NO: 4392894 - DNA, 25 bp, Homo sapien
cacaacaagctactggctaggtggt

SEQ ID NO: 4392895 - DNA, 25 bp, Homo sapien
cattggaacatgatcggagaacatt

SEQ ID NO: 4392896 - DNA, 25 bp, Homo sapien
gaataaaactctttcatcacacaaa

SEQ ID NO: 4392897 - DNA, 25 bp, Homo sapien
tgtctatataccaacaaatcatact

SEQ ID NO: 4392898 - DNA, 25 bp, Homo sapien
ctataaaactcttatttaactctag

SEQ ID NO: 4392899 - DNA, 25 bp, Homo sapien
cattaagttccatactttaaggact

SEQ ID NO: 4392900 - DNA, 25 bp, Homo sapien
gttgctttaatattaacatacatac

SEQ ID NO: 4392901 - DNA, 25 bp, Homo sapien
ttgcaaatctacactcagttgcttt

SEQ ID NO: 4392902 - DNA, 25 bp, Homo sapien
attaacatacatacaatggtactac

SEQ ID NO: 4392903 - DNA, 25 bp, Homo sapien
acactcagttgctttaatattaaca

SEQ ID NO: 4392904 - DNA, 25 bp, Homo sapien
tgggcatcacaaagacgagtcttct

SEQ ID NO: 4392905 - DNA, 25 bp, Homo sapien
gagcaccatcctccatttatccttg

SEQ ID NO: 4392906 - DNA, 25 bp, Homo sapien
cagaagtttagcgaaaattcggcct

SEQ ID NO: 4392907 - DNA, 25 bp, Homo sapien
cagaaaagtcccaatgtctcttaag

SEQ ID NO: 4392908 - DNA, 25 bp, Homo sapien
ccagctgcttgtttggagcctgctg

SEQ ID NO: 4392909 - DNA, 25 bp, Homo sapien
ctgcttgtttggagcctgctgcagg

SEQ ID NO: 4392910 - DNA, 25 bp, Homo sapien
atccagctgcttgtttggagcctgc

SEQ ID NO: 4392911 - DNA, 25 bp, Homo sapien
ttatccagctgcttgtttggagcct

SEQ ID NO: 4392912 - DNA, 25 bp, Homo sapien
aaggctgtccagctgttggcgatgt

SEQ ID NO: 4392913 - DNA, 25 bp, Homo sapien
aggctgtccagctgttggcgatgtc

SEQ ID NO: 4392914 - DNA, 25 bp, Homo sapien
tctaccagtacctggaactgcttcc

SEQ ID NO: 4392915 - DNA, 25 bp, Homo sapien
cttgttctctaccagtacctggaac

SEQ ID NO: 4392916 - DNA, 25 bp, Homo sapien
ctgtattaatcaaccattcataaaa

SEQ ID NO: 4392917 - DNA, 25 bp, Homo sapien
ccattcataaaacttgttctctacc

SEQ ID NO: 4392918 - DNA, 25 bp, Homo sapien
ctacagggcccaagacaaagatgct

SEQ ID NO: 4392919 - DNA, 25 bp, Homo sapien
aaagctggaagactcttgtgtcgct

SEQ ID NO: 4392920 - DNA, 25 bp, Homo sapien
cgtaagaacgtgaaagatgcaacct

SEQ ID NO: 4392921 - DNA, 25 bp, Homo sapien
ggtgaagtgtagtccctacagggcc

SEQ ID NO: 4392922 - DNA, 25 bp, Homo sapien
gcaatcttagctcttttggtggtcc

SEQ ID NO: 4392923 - DNA, 25 bp, Homo sapien
gggccacatgagtattacaagcaat

SEQ ID NO: 4392924 - DNA, 25 bp, Homo sapien
agtgtctgcttgtaaacctggctca

SEQ ID NO: 4392925 - DNA, 25 bp, Homo sapien
aacgatgaatctttacatgtgcccc

SEQ ID NO: 4392926 - DNA, 25 bp, Homo sapien
cttctagagaagacacgagatcact

SEQ ID NO: 4392927 - DNA, 25 bp, Homo sapien
cactcaaaaaatacgcgcaggttct

SEQ ID NO: 4392928 - DNA, 25 bp, Homo sapien
accgttacgtgactgccttctcaga

SEQ ID NO: 4392929 - DNA, 25 bp, Homo sapien
taaacaacaccgctgaaatactggg

SEQ ID NO: 4392930 - DNA, 25 bp, Homo sapien
gcatgcagtggttgccacagtgcaa

SEQ ID NO: 4392931 - DNA, 25 bp, Homo sapien
caaatggattcccagtcaaacagga

SEQ ID NO: 4392932 - DNA, 25 bp, Homo sapien
gacttgaggcaagctgatgtaccaa

SEQ ID NO: 4392933 - DNA, 25 bp, Homo sapien
tgagaagccactatctgcatgcagt

SEQ ID NO: 4392934 - DNA, 25 bp, Homo sapien
taaaagcagctcgaggagatcagac

SEQ ID NO: 4392935 - DNA, 25 bp, Homo sapien
tgagcgccacaacagcttctcgaga

SEQ ID NO: 4392936 - DNA, 25 bp, Homo sapien
tctcgagacactagactactatggg

SEQ ID NO: 4392937 - DNA, 25 bp, Homo sapien
gacaaaagcttggtgactgtaatca

SEQ ID NO: 4392938 - DNA, 25 bp, Homo sapien
caaagatgtccttagggagaccttg

SEQ ID NO: 4392939 - DNA, 25 bp, Homo sapien
atgtccttagggagaccttgttcaa

SEQ ID NO: 4392940 - DNA, 25 bp, Homo sapien
gactgggccactcttcgccaatcaa

SEQ ID NO: 4392941 - DNA, 25 bp, Homo sapien
actgggccactcttcgccaatcaaa

SEQ ID NO: 4392942 - DNA, 25 bp, Homo sapien
ctgttgaatgtataagaagagcaga

SEQ ID NO: 4392943 - DNA, 25 bp, Homo sapien
gaatgtataagaagagcagaaactg

SEQ ID NO: 4392944 - DNA, 25 bp, Homo sapien
agcagaaactgtagcgtgtccactg

SEQ ID NO: 4392945 - DNA, 25 bp, Homo sapien
agagcagaaactgtagcgtgtccac

SEQ ID NO: 4392946 - DNA, 25 bp, Homo sapien
ggcacccactataaagggttctgct

SEQ ID NO: 4392947 - DNA, 25 bp, Homo sapien
tagaggcgcgggtaagctccttctg

SEQ ID NO: 4392948 - DNA, 25 bp, Homo sapien
ggcgctcctcaggtgtcttcattga

SEQ ID NO: 4392949 - DNA, 25 bp, Homo sapien
tttcgaagtaaagccacgccaggtc

SEQ ID NO: 4392950 - DNA, 25 bp, Homo sapien
agggtgaaaaggcttctttgcatac

SEQ ID NO: 4392951 - DNA, 25 bp, Homo sapien
cagggtgaaaaggcttctttgcata

SEQ ID NO: 4392952 - DNA, 25 bp, Homo sapien
ccgctccgccgcacttctccgcgcg

SEQ ID NO: 4392953 - DNA, 25 bp, Homo sapien
cgccgcacttctccgcgcgccgccg

SEQ ID NO: 4392954 - DNA, 25 bp, Homo sapien
atgcaggcgccgctccgccgcactt

SEQ ID NO: 4392955 - DNA, 25 bp, Homo sapien
ctgctaatgcaggcgccgctccgcc

SEQ ID NO: 4392956 - DNA, 25 bp, Homo sapien
taagaggcctaagcaatgcgtctga

SEQ ID NO: 4392957 - DNA, 25 bp, Homo sapien
aacttaagtcggtctgtcatcactg

SEQ ID NO: 4392958 - DNA, 25 bp, Homo sapien
tgtagcctttccgagacagttgtct

SEQ ID NO: 4392959 - DNA, 25 bp, Homo sapien
cactaagaagcggtggaagccgaat

SEQ ID NO: 4392960 - DNA, 25 bp, Homo sapien
ggccgctgtacctctgctccctcat

SEQ ID NO: 4392961 - DNA, 25 bp, Homo sapien
ctgtcgtggaataactgttcccgct

SEQ ID NO: 4392962 - DNA, 25 bp, Homo sapien
tgttcccgctcattcggccgctgta

SEQ ID NO: 4392963 - DNA, 25 bp, Homo sapien
ggaataactgttcccgctcattcgg

SEQ ID NO: 4392964 - DNA, 25 bp, Homo sapien
taattggtcaagagctgcgactgca

SEQ ID NO: 4392965 - DNA, 25 bp, Homo sapien
tgaagcctaactggttgcccgtgcc

SEQ ID NO: 4392966 - DNA, 25 bp, Homo sapien
tactgcgctgattggcttccaggcg

SEQ ID NO: 4392967 - DNA, 25 bp, Homo sapien
tgatgtcccgggcaacgattggctc

SEQ ID NO: 4392968 - DNA, 25 bp, Homo sapien
gattgtactgatgcttctacatgca

SEQ ID NO: 4392969 - DNA, 25 bp, Homo sapien
taccaattaggatcagcatctcttc

SEQ ID NO: 4392970 - DNA, 25 bp, Homo sapien
tgctgggtaatatgaaccaatgttc

SEQ ID NO: 4392971 - DNA, 25 bp, Homo sapien
gattcactgcctcactaatacttgg

SEQ ID NO: 4392972 - DNA, 25 bp, Homo sapien
cagctttagatctctgagggataga

SEQ ID NO: 4392973 - DNA, 25 bp, Homo sapien
gcacttcctaggtagttagaaacaa

SEQ ID NO: 4392974 - DNA, 25 bp, Homo sapien
gcagagccttgatcaattgaggaaa

SEQ ID NO: 4392975 - DNA, 25 bp, Homo sapien
agtttcagtccaggcatatgtgcag

SEQ ID NO: 4392976 - DNA, 25 bp, Homo sapien
aaatgccaactggagaagtctgttt

SEQ ID NO: 4392977 - DNA, 25 bp, Homo sapien
gaatttgtccatttgcattcggaaa

SEQ ID NO: 4392978 - DNA, 25 bp, Homo sapien
ttaatgtctggtgctgccgcctgag

SEQ ID NO: 4392979 - DNA, 25 bp, Homo sapien
tcggaaaagaatgaccagcaaaagg

SEQ ID NO: 4392980 - DNA, 25 bp, Homo sapien
agcccctcccctgatgaaatataca

SEQ ID NO: 4392981 - DNA, 25 bp, Homo sapien
tggccacctgagaagcttcaagagt

SEQ ID NO: 4392982 - DNA, 25 bp, Homo sapien
gcgacgcccagcagaactcctgagg

SEQ ID NO: 4392983 - DNA, 25 bp, Homo sapien
tcaaagagaggttacggaagcggaa

SEQ ID NO: 4392984 - DNA, 25 bp, Homo sapien
tcagctggtagagttgcccacgtcg

SEQ ID NO: 4392985 - DNA, 25 bp, Homo sapien
catgctgagccactgtaacgtccag

SEQ ID NO: 4392986 - DNA, 25 bp, Homo sapien
cctgagtgtcatgaggaccccaaca

SEQ ID NO: 4392987 - DNA, 25 bp, Homo sapien
taaaatgcctttcgagtcactggag

SEQ ID NO: 4392988 - DNA, 25 bp, Homo sapien
cacccactgggaatgtgaagtgcac

SEQ ID NO: 4392989 - DNA, 25 bp, Homo sapien
tctgatacaaaagctttcaagtcct

SEQ ID NO: 4392990 - DNA, 25 bp, Homo sapien
ggatcacggcaagccttcttttagg

SEQ ID NO: 4392991 - DNA, 25 bp, Homo sapien
tcaagtccttgagccaataatgtac

SEQ ID NO: 4392992 - DNA, 25 bp, Homo sapien
gaatcatatacctcccacaagcaga

SEQ ID NO: 4392993 - DNA, 25 bp, Homo sapien
taaggttggcgcgtcaatgaaattg

SEQ ID NO: 4392994 - DNA, 25 bp, Homo sapien
taacagtccttctttctaggccacc

SEQ ID NO: 4392995 - DNA, 25 bp, Homo sapien
gagatctgtatgtccaacaggaagg

SEQ ID NO: 4392996 - DNA, 25 bp, Homo sapien
cagtgacctgcatggtgttccaaac

SEQ ID NO: 4392997 - DNA, 25 bp, Homo sapien
gcagtgacctgcatggtgttccaaa

SEQ ID NO: 4392998 - DNA, 25 bp, Homo sapien
agtgacctgcatggtgttccaaaca

SEQ ID NO: 4392999 - DNA, 25 bp, Homo sapien
tgcagtgacctgcatggtgttccaa

SEQ ID NO: 4393000 - DNA, 25 bp, Homo sapien
tgggtaggtcctttcttgctagact

SEQ ID NO: 4393001 - DNA, 25 bp, Homo sapien
tgtaaccttgatgacaatcccttgt

SEQ ID NO: 4393002 - DNA, 25 bp, Homo sapien
tgacaatcccttgtacttgggtagg

SEQ ID NO: 4393003 - DNA, 25 bp, Homo sapien
gtcacccctccttgtaaccttgatg

SEQ ID NO: 4393004 - DNA, 25 bp, Homo sapien
cagactcccatgtgttactggcagc

SEQ ID NO: 4393005 - DNA, 25 bp, Homo sapien
gattttgacggtaagccaccatgat

SEQ ID NO: 4393006 - DNA, 25 bp, Homo sapien
cacgcacagtggtgcagcctagtgt

SEQ ID NO: 4393007 - DNA, 25 bp, Homo sapien
tgtctgctggccacgcaagtgtcac

SEQ ID NO: 4393008 - DNA, 25 bp, Homo sapien
cagggtggcctagaacagtggaaat

SEQ ID NO: 4393009 - DNA, 25 bp, Homo sapien
tctgcaagctaggtggcatggtcct

SEQ ID NO: 4393010 - DNA, 25 bp, Homo sapien
tctctggtatcaagctggtcaagcg

SEQ ID NO: 4393011 - DNA, 25 bp, Homo sapien
tcacatggagttagatgctggtctc

SEQ ID NO: 4393012 - DNA, 25 bp, Homo sapien
tctacctccacagcgtttctgccac

SEQ ID NO: 4393013 - DNA, 25 bp, Homo sapien
ccctcatggataagtggtcctcttc

SEQ ID NO: 4393014 - DNA, 25 bp, Homo sapien
tgccttctctacctccacagcgttt

SEQ ID NO: 4393015 - DNA, 25 bp, Homo sapien
agtcacaccctcatggataagtggt

SEQ ID NO: 4393016 - DNA, 25 bp, Homo sapien
tctgattctacgttcctctcaagcc

SEQ ID NO: 4393017 - DNA, 25 bp, Homo sapien
ttccacctacaccagcgtcaccctt

SEQ ID NO: 4393018 - DNA, 25 bp, Homo sapien
gattctacgttcctctcaagccatt

SEQ ID NO: 4393019 - DNA, 25 bp, Homo sapien
agcgtcaccctttccactgaccaca

SEQ ID NO: 4393020 - DNA, 25 bp, Homo sapien
ctttgtttcaataaactccgatgcc

SEQ ID NO: 4393021 - DNA, 25 bp, Homo sapien
ataaactccgatgccaggtttgagg

SEQ ID NO: 4393022 - DNA, 25 bp, Homo sapien
ctcaagggcgccgtgtaaggatttc

SEQ ID NO: 4393023 - DNA, 25 bp, Homo sapien
tatgaaagctctcaagggcgccgtg

SEQ ID NO: 4393024 - DNA, 25 bp, Homo sapien
ttccatggttacctgctcatctgca

SEQ ID NO: 4393025 - DNA, 25 bp, Homo sapien
gattagatgggtgctttgctccagg

SEQ ID NO: 4393026 - DNA, 25 bp, Homo sapien
gcctcagctcacgacttccatggtt

SEQ ID NO: 4393027 - DNA, 25 bp, Homo sapien
aagttcatttctcacgcatgtaaag

SEQ ID NO: 4393028 - DNA, 25 bp, Homo sapien
cgtgcacacgtagagtggctagtga

SEQ ID NO: 4393029 - DNA, 25 bp, Homo sapien
cgatggacagagacagagcgtgcac

SEQ ID NO: 4393030 - DNA, 25 bp, Homo sapien
ggcttgggctgcactctaccctgta

SEQ ID NO: 4393031 - DNA, 25 bp, Homo sapien
tctcataccatggagagatgcctct

SEQ ID NO: 4393032 - DNA, 25 bp, Homo sapien
tattcctgttcttgatgcctcttcc

SEQ ID NO: 4393033 - DNA, 25 bp, Homo sapien
gctgctccagttgctagaatggcat

SEQ ID NO: 4393034 - DNA, 25 bp, Homo sapien
gaatggcatcattagtactgtatca

SEQ ID NO: 4393035 - DNA, 25 bp, Homo sapien
gaagaggatgcatgactccctgagg

SEQ ID NO: 4393036 - DNA, 25 bp, Homo sapien
ttcaaaacgacagcctcttcattgt

SEQ ID NO: 4393037 - DNA, 25 bp, Homo sapien
aagtaatagagccaggtgagaaatt

SEQ ID NO: 4393038 - DNA, 25 bp, Homo sapien
atttgacttcaaaacgacagcctct

SEQ ID NO: 4393039 - DNA, 25 bp, Homo sapien
agtaatagagccaggtgagaaattc

SEQ ID NO: 4393040 - DNA, 25 bp, Homo sapien
gtgccatgatccatcagtccactga

SEQ ID NO: 4393041 - DNA, 25 bp, Homo sapien
atgttcccccgcttagataatgcag

SEQ ID NO: 4393042 - DNA, 25 bp, Homo sapien
cactgactgatgatggagatttcca

SEQ ID NO: 4393043 - DNA, 25 bp, Homo sapien
gaggagttttagtgccatgatccat

SEQ ID NO: 4393044 - DNA, 25 bp, Homo sapien
tcaagccccatggatctagagatca

SEQ ID NO: 4393045 - DNA, 25 bp, Homo sapien
gacaaattggatctgtgtaccgact

SEQ ID NO: 4393046 - DNA, 25 bp, Homo sapien
tgtaccgactccctcctctaagaaa

SEQ ID NO: 4393047 - DNA, 25 bp, Homo sapien
cagtctctgaatcatgtccagggaa

SEQ ID NO: 4393048 - DNA, 25 bp, Homo sapien
ttactgcttgggctatacctgggca

SEQ ID NO: 4393049 - DNA, 25 bp, Homo sapien
agtagttaattctgtcactcaccac

SEQ ID NO: 4393050 - DNA, 25 bp, Homo sapien
gaactcagtgctgcctattagtagt

SEQ ID NO: 4393051 - DNA, 25 bp, Homo sapien
cttgagacaaatctatgccactcag

SEQ ID NO: 4393052 - DNA, 25 bp, Homo sapien
caagaggctggagattgtcaaattc

SEQ ID NO: 4393053 - DNA, 25 bp, Homo sapien
tttaacccaggaatcacagtccgag

SEQ ID NO: 4393054 - DNA, 25 bp, Homo sapien
gattcttggtgaaaccatccctcag

SEQ ID NO: 4393055 - DNA, 25 bp, Homo sapien
gctccaggctgctactaagtttaac

SEQ ID NO: 4393056 - DNA, 25 bp, Homo sapien
gctctgacacgttttattccttcaa

SEQ ID NO: 4393057 - DNA, 25 bp, Homo sapien
tgacacgttttattccttcaagtac

SEQ ID NO: 4393058 - DNA, 25 bp, Homo sapien
tctgacacgttttattccttcaagt

SEQ ID NO: 4393059 - DNA, 25 bp, Homo sapien
ctgacacgttttattccttcaagta

SEQ ID NO: 4393060 - DNA, 25 bp, Homo sapien
aattagaaagactctgaggtcctga

SEQ ID NO: 4393061 - DNA, 25 bp, Homo sapien
tccctattgtcaaggatgagacact

SEQ ID NO: 4393062 - DNA, 25 bp, Homo sapien
cagctaccgaattttaaccagatcc

SEQ ID NO: 4393063 - DNA, 25 bp, Homo sapien
tctgtcccaggcactatactgaagg

SEQ ID NO: 4393064 - DNA, 25 bp, Homo sapien
gaaacaactgtaagtccaccccaca

SEQ ID NO: 4393065 - DNA, 25 bp, Homo sapien
ggaaaagaacaagggcatactcgta

SEQ ID NO: 4393066 - DNA, 25 bp, Homo sapien
gaagagcgggattcaggaaaagaac

SEQ ID NO: 4393067 - DNA, 25 bp, Homo sapien
acctttccgatcatcacgaataggg

SEQ ID NO: 4393068 - DNA, 25 bp, Homo sapien
gatatccagatagacccaaatggcc

SEQ ID NO: 4393069 - DNA, 25 bp, Homo sapien
gacgcccctggaagtcagttagtga

SEQ ID NO: 4393070 - DNA, 25 bp, Homo sapien
tggccttggccatggacacgaacaa

SEQ ID NO: 4393071 - DNA, 25 bp, Homo sapien
tacagagtgatgacgattggatccc

SEQ ID NO: 4393072 - DNA, 25 bp, Homo sapien
tttggatgtatatgtcactgctgct

SEQ ID NO: 4393073 - DNA, 25 bp, Homo sapien
tcttagtttacagaagctccgagct

SEQ ID NO: 4393074 - DNA, 25 bp, Homo sapien
gggagcaatatagaagcaggcttgc

SEQ ID NO: 4393075 - DNA, 25 bp, Homo sapien
cccaaaatgggctagttatatcaaa

SEQ ID NO: 4393076 - DNA, 25 bp, Homo sapien
tgttgttggtgctgactcgcaggca

SEQ ID NO: 4393077 - DNA, 25 bp, Homo sapien
ctcgcaggcatggtaagtcgtttcc

SEQ ID NO: 4393078 - DNA, 25 bp, Homo sapien
agtataagttcatcggtagcagggc

SEQ ID NO: 4393079 - DNA, 25 bp, Homo sapien
gagtcttggaacgtcactgggcttg

SEQ ID NO: 4393080 - DNA, 25 bp, Homo sapien
ttttaatacatgtgctgtggaagtg

SEQ ID NO: 4393081 - DNA, 25 bp, Homo sapien
ttttttaatacatgtgctgtggaag

SEQ ID NO: 4393082 - DNA, 25 bp, Homo sapien
ttaatacatgtgctgtggaagtgag

SEQ ID NO: 4393083 - DNA, 25 bp, Homo sapien
attgttccgatttttttaatacatg

SEQ ID NO: 4393084 - DNA, 25 bp, Homo sapien
gagcacgctctgtgttgatatgcaa

SEQ ID NO: 4393085 - DNA, 25 bp, Homo sapien
tcaagatggcatacaaatgcgccct

SEQ ID NO: 4393086 - DNA, 25 bp, Homo sapien
cctgaatgatgagagtacatggtac

SEQ ID NO: 4393087 - DNA, 25 bp, Homo sapien
gctttagaattgtcagctgaggctc

SEQ ID NO: 4393088 - DNA, 25 bp, Homo sapien
tcaaaaccgatgtagtcccaaagcg

SEQ ID NO: 4393089 - DNA, 25 bp, Homo sapien
taaagacccgtgcagtttacgcagc

SEQ ID NO: 4393090 - DNA, 25 bp, Homo sapien
taacggtcgggctaaatgccaggca

SEQ ID NO: 4393091 - DNA, 25 bp, Homo sapien
gcagctatattcttccgccgcgagg

SEQ ID NO: 4393092 - DNA, 25 bp, Homo sapien
gatggcactcagaaacggcgttgac

SEQ ID NO: 4393093 - DNA, 25 bp, Homo sapien
caatactacagtggaggagatgccc

SEQ ID NO: 4393094 - DNA, 25 bp, Homo sapien
tacaggagtcgatagcagcagttgg

SEQ ID NO: 4393095 - DNA, 25 bp, Homo sapien
gctgaataggcgatcacaacgtgca

SEQ ID NO: 4393096 - DNA, 25 bp, Homo sapien
aaccccccatccagatatattcacg

SEQ ID NO: 4393097 - DNA, 25 bp, Homo sapien
ttaacaattctgagataactgctgc

SEQ ID NO: 4393098 - DNA, 25 bp, Homo sapien
cacaaaggctgatgagttgcaaatg

SEQ ID NO: 4393099 - DNA, 25 bp, Homo sapien
tgctgcatcacagttgcacaaaggc

SEQ ID NO: 4393100 - DNA, 25 bp, Homo sapien
ttctgagataactgctgcatcacag

SEQ ID NO: 4393101 - DNA, 25 bp, Homo sapien
ttagcatccttcaggtagttaaatg

SEQ ID NO: 4393102 - DNA, 25 bp, Homo sapien
tagttaaatgttccattgacatgtg

SEQ ID NO: 4393103 - DNA, 25 bp, Homo sapien
atttaagaaattagcatccttcagg

SEQ ID NO: 4393104 - DNA, 25 bp, Homo sapien
tgacatgtgcaaagtacctacttac

SEQ ID NO: 4393105 - DNA, 25 bp, Homo sapien
tctacaaccacatcatggagttgat

SEQ ID NO: 4393106 - DNA, 25 bp, Homo sapien
tgacgagctgagttgctgcatgacc

SEQ ID NO: 4393107 - DNA, 25 bp, Homo sapien
gctgcatgaccctcatctattaaat

SEQ ID NO: 4393108 - DNA, 25 bp, Homo sapien
aatagacttctgtttatcagataag

SEQ ID NO: 4393109 - DNA, 25 bp, Homo sapien
aacttttggtatgatgacttaatat

SEQ ID NO: 4393110 - DNA, 25 bp, Homo sapien
tttggtatgatgacttaatattcct

SEQ ID NO: 4393111 - DNA, 25 bp, Homo sapien
ttggtatgatgacttaatattcctt

SEQ ID NO: 4393112 - DNA, 25 bp, Homo sapien
cttttggtatgatgacttaatattc

SEQ ID NO: 4393113 - DNA, 25 bp, Homo sapien
cttgaccacagcttctagtttgtca

SEQ ID NO: 4393114 - DNA, 25 bp, Homo sapien
gccactctgacaggcagcaaatact

SEQ ID NO: 4393115 - DNA, 25 bp, Homo sapien
accacagcttctagtttgtcaaaag

SEQ ID NO: 4393116 - DNA, 25 bp, Homo sapien
gacaggcagcaaatactccatcaat

SEQ ID NO: 4393117 - DNA, 25 bp, Homo sapien
tagcggctataacgattcctcagaa

SEQ ID NO: 4393118 - DNA, 25 bp, Homo sapien
catatggaaggcctaccgtgaaggt

SEQ ID NO: 4393119 - DNA, 25 bp, Homo sapien
tgtcatatggaaggcctaccgtgca

SEQ ID NO: 4393120 - DNA, 25 bp, Homo sapien
caaccaaggtgctaacaactgtgct

SEQ ID NO: 4393121 - DNA, 25 bp, Homo sapien
cctttccacctgttaatcgagtagc

SEQ ID NO: 4393122 - DNA, 25 bp, Homo sapien
gttaatcgagtagcgctttgaagaa

SEQ ID NO: 4393123 - DNA, 25 bp, Homo sapien
ggcttttcttaagtctccttctgac

SEQ ID NO: 4393124 - DNA, 25 bp, Homo sapien
ccttctgacactttaacaagataag

SEQ ID NO: 4393125 - DNA, 25 bp, Homo sapien
tggcatcaggattgaggcaacacac

SEQ ID NO: 4393126 - DNA, 25 bp, Homo sapien
ggtacaatggaaggatagagatctc

SEQ ID NO: 4393127 - DNA, 25 bp, Homo sapien
caattgttgcccctttagcttaagt

SEQ ID NO: 4393128 - DNA, 25 bp, Homo sapien
gtatgaaatccacctcagtttcggg

SEQ ID NO: 4393129 - DNA, 25 bp, Homo sapien
tttatctgacagaggcttgaagcgg

SEQ ID NO: 4393130 - DNA, 25 bp, Homo sapien
aattttgaacatctagaggtcaggg

SEQ ID NO: 4393131 - DNA, 25 bp, Homo sapien
cttggcaatgtctagtaatcgctgc

SEQ ID NO: 4393132 - DNA, 25 bp, Homo sapien
aatgtctagtaatcgctgctgttga

SEQ ID NO: 4393133 - DNA, 25 bp, Homo sapien
ttctccatggtacgtcttaaagctg

SEQ ID NO: 4393134 - DNA, 25 bp, Homo sapien
cagaatcgggtggttttcgactcct

SEQ ID NO: 4393135 - DNA, 25 bp, Homo sapien
gataagacagaatcgggtggttttc

SEQ ID NO: 4393136 - DNA, 25 bp, Homo sapien
cacaatcttaaaaggcggacacggc

SEQ ID NO: 4393137 - DNA, 25 bp, Homo sapien
cacagttaattgagcaaaatttttc

SEQ ID NO: 4393138 - DNA, 25 bp, Homo sapien
ttgtattccacgttcatcagatgca

SEQ ID NO: 4393139 - DNA, 25 bp, Homo sapien
tcatcagatgcatttaactcaagaa

SEQ ID NO: 4393140 - DNA, 25 bp, Homo sapien
ttttcactttctctcgaactacttg

SEQ ID NO: 4393141 - DNA, 25 bp, Homo sapien
gctgccaaaatagtggatgtttttc

SEQ ID NO: 4393142 - DNA, 25 bp, Homo sapien
gctgctgccaaaatagtggatgttt

SEQ ID NO: 4393143 - DNA, 25 bp, Homo sapien
gccaaaatagtggatgtttttccag

SEQ ID NO: 4393144 - DNA, 25 bp, Homo sapien
tctagctgctgccaaaatagtggat

SEQ ID NO: 4393145 - DNA, 25 bp, Homo sapien
aaagattttttcagcactgcaacca

SEQ ID NO: 4393146 - DNA, 25 bp, Homo sapien
aagattttttcagcactgcaaccac

SEQ ID NO: 4393147 - DNA, 25 bp, Homo sapien
gattttttcagcactgcaaccactt

SEQ ID NO: 4393148 - DNA, 25 bp, Homo sapien
attttttcagcactgcaaccacttc

SEQ ID NO: 4393149 - DNA, 25 bp, Homo sapien
tcgatccttggtcagcgggggttta

SEQ ID NO: 4393150 - DNA, 25 bp, Homo sapien
cctcgatccttggtcagcgggggtt

SEQ ID NO: 4393151 - DNA, 25 bp, Homo sapien
ttgttctctccgctacttcccgcac

SEQ ID NO: 4393152 - DNA, 25 bp, Homo sapien
gcactggcagctactcctcgatcct

SEQ ID NO: 4393153 - DNA, 25 bp, Homo sapien
cagcccgaaaataaacttagccttg

SEQ ID NO: 4393154 - DNA, 25 bp, Homo sapien
tttattgcgaatcagcaccatagga

SEQ ID NO: 4393155 - DNA, 25 bp, Homo sapien
ccattatgagaaagtacagcccgaa

SEQ ID NO: 4393156 - DNA, 25 bp, Homo sapien
gaaacttttattgcgaatcagcacc

SEQ ID NO: 4393157 - DNA, 25 bp, Homo sapien
gatggtctcgaagtcttagctccgt

SEQ ID NO: 4393158 - DNA, 25 bp, Homo sapien
agttagcctggcttctcgtgcaggt

SEQ ID NO: 4393159 - DNA, 25 bp, Homo sapien
gatacaaaaaggacgagatggtctc

SEQ ID NO: 4393160 - DNA, 25 bp, Homo sapien
ggctcgttcctcaggtttccgcgat

SEQ ID NO: 4393161 - DNA, 25 bp, Homo sapien
tgagaataacgggcccaggagactt

SEQ ID NO: 4393162 - DNA, 25 bp, Homo sapien
ctgagaataacgggcccaggagact

SEQ ID NO: 4393163 - DNA, 25 bp, Homo sapien
gagaataacgggcccaggagactta

SEQ ID NO: 4393164 - DNA, 25 bp, Homo sapien
tacgccggtaggaatacgcgggcac

SEQ ID NO: 4393165 - DNA, 25 bp, Homo sapien
aagcagggcgggaatacgccggtag

SEQ ID NO: 4393166 - DNA, 25 bp, Homo sapien
gtaacgcgtcacttccggtgctggg

SEQ ID NO: 4393167 - DNA, 25 bp, Homo sapien
gaatacgcgggcacgtaacgcgtca

SEQ ID NO: 4393168 - DNA, 25 bp, Homo sapien
caggctcagcaatgagggcggggcg

SEQ ID NO: 4393169 - DNA, 25 bp, Homo sapien
gctcagcaatgagggcggggcggcg

SEQ ID NO: 4393170 - DNA, 25 bp, Homo sapien
gcggcgcgcgggcctctggaaccct

SEQ ID NO: 4393171 - DNA, 25 bp, Homo sapien
ggctcagcaatgagggcggggcggc

SEQ ID NO: 4393172 - DNA, 25 bp, Homo sapien
catctgaagatgctttgccttgccc

SEQ ID NO: 4393173 - DNA, 25 bp, Homo sapien
ctatcttcgtaggtgcgggcctccg

SEQ ID NO: 4393174 - DNA, 25 bp, Homo sapien
tgcttcgtcgcagagcagaacgcgt

SEQ ID NO: 4393175 - DNA, 25 bp, Homo sapien
cagaacgcgtgtgctttaagggcag

SEQ ID NO: 4393176 - DNA, 25 bp, Homo sapien
atgcagctgtggacatctattataa

SEQ ID NO: 4393177 - DNA, 25 bp, Homo sapien
ctgcgtgttgtggagagagaagacc

SEQ ID NO: 4393178 - DNA, 25 bp, Homo sapien
ggacatctattataattcctgagcc

SEQ ID NO: 4393179 - DNA, 25 bp, Homo sapien
atctattataattcctgagccccac

SEQ ID NO: 4393180 - DNA, 25 bp, Homo sapien
tggaagtgaaggcgttcaataaaag

SEQ ID NO: 4393181 - DNA, 25 bp, Homo sapien
taaaagttaaaggactgataatcat

SEQ ID NO: 4393182 - DNA, 25 bp, Homo sapien
tcaataaaagttaaaggactgataa

SEQ ID NO: 4393183 - DNA, 25 bp, Homo sapien
ctggaagtgaaggcgttcaataaaa

SEQ ID NO: 4393184 - DNA, 25 bp, Homo sapien
ggcggctggcctggtgggggctgac

SEQ ID NO: 4393185 - DNA, 25 bp, Homo sapien
tggcctggtgggggctgacccccac

SEQ ID NO: 4393186 - DNA, 25 bp, Homo sapien
ggtggctgccaggtggagacgctcc

SEQ ID NO: 4393187 - DNA, 25 bp, Homo sapien
gacggggtggctgccaggtggagac

SEQ ID NO: 4393188 - DNA, 25 bp, Homo sapien
gcagccaggcagaagctgcaatctc

SEQ ID NO: 4393189 - DNA, 25 bp, Homo sapien
tggcagccaggcagaagctgcaatc

SEQ ID NO: 4393190 - DNA, 25 bp, Homo sapien
gggtggcagccaggcagaagctgca

SEQ ID NO: 4393191 - DNA, 25 bp, Homo sapien
gacggggtggcagccaggcagaagc

SEQ ID NO: 4393192 - DNA, 25 bp, Homo sapien
gcctgcaggcaaatcgcaaaatctg

SEQ ID NO: 4393193 - DNA, 25 bp, Homo sapien
gattttgaagctgtatcccctccca

SEQ ID NO: 4393194 - DNA, 25 bp, Homo sapien
tggtaacagaaaccccatcactggt

SEQ ID NO: 4393195 - DNA, 25 bp, Homo sapien
gagtaccacaccattaaaagcctgc

SEQ ID NO: 4393196 - DNA, 25 bp, Homo sapien
tggggggaataatcattgactagct

SEQ ID NO: 4393197 - DNA, 25 bp, Homo sapien
ccagggactggggggaataatcatt

SEQ ID NO: 4393198 - DNA, 25 bp, Homo sapien
actagctggctattatgagtcacag

SEQ ID NO: 4393199 - DNA, 25 bp, Homo sapien
ctggctattatgagtcacagtttcc

SEQ ID NO: 4393200 - DNA, 25 bp, Homo sapien
taagaccctgctgtagactaaacca

SEQ ID NO: 4393201 - DNA, 25 bp, Homo sapien
gactaaaccaggacccccatggtgc

SEQ ID NO: 4393202 - DNA, 25 bp, Homo sapien
tacactgtgtcaagatgtaacactt

SEQ ID NO: 4393203 - DNA, 25 bp, Homo sapien
ttgttttaatatgtgtcagcatgtg

SEQ ID NO: 4393204 - DNA, 25 bp, Homo sapien
ttgtcagggcctgcgctggcagtcc

SEQ ID NO: 4393205 - DNA, 25 bp, Homo sapien
tgtgtctttctctgcgttgtcaggg

SEQ ID NO: 4393206 - DNA, 25 bp, Homo sapien
aggagctcctgctgtcactggccca

SEQ ID NO: 4393207 - DNA, 25 bp, Homo sapien
tgggtcctgtgtctttctctgcgtt

SEQ ID NO: 4393208 - DNA, 25 bp, Homo sapien
gcctttccacgcttccctgcagggc

SEQ ID NO: 4393209 - DNA, 25 bp, Homo sapien
gtccagccctgtgccgcctttccac

SEQ ID NO: 4393210 - DNA, 25 bp, Homo sapien
gctagatgacccctgaaacagtcca

SEQ ID NO: 4393211 - DNA, 25 bp, Homo sapien
caagcaaatcctcgcctggaggcgg

SEQ ID NO: 4393212 - DNA, 25 bp, Homo sapien
catgctgtgggtgtctatggctgac

SEQ ID NO: 4393213 - DNA, 25 bp, Homo sapien
gatggtcaaggtcgtagctccctcc

SEQ ID NO: 4393214 - DNA, 25 bp, Homo sapien
ccaagtcccgtctggaggatgaagg

SEQ ID NO: 4393215 - DNA, 25 bp, Homo sapien
ttaccctgcggagtggctggagctt

SEQ ID NO: 4393216 - DNA, 25 bp, Homo sapien
agcaggccgggagacgtcacttgtc

SEQ ID NO: 4393217 - DNA, 25 bp, Homo sapien
cacggccccagaacgcggcttgtgg

SEQ ID NO: 4393218 - DNA, 25 bp, Homo sapien
ccagcatccggcgggatttcagagg

SEQ ID NO: 4393219 - DNA, 25 bp, Homo sapien
aggccacggccccagaacgcggctt

SEQ ID NO: 4393220 - DNA, 25 bp, Homo sapien
tgctccagcagggagtttagctcca

SEQ ID NO: 4393221 - DNA, 25 bp, Homo sapien
ttagctccatggacacctttgaagg

SEQ ID NO: 4393222 - DNA, 25 bp, Homo sapien
tgagcagcgctctgaacgtaatttc

SEQ ID NO: 4393223 - DNA, 25 bp, Homo sapien
cctttgaaggctatgaaggtgcaga

SEQ ID NO: 4393224 - DNA, 25 bp, Homo sapien
cggtgcgctggtgtccggtcataac

SEQ ID NO: 4393225 - DNA, 25 bp, Homo sapien
cccacgtggctgtctccttggcggt

SEQ ID NO: 4393226 - DNA, 25 bp, Homo sapien
tccggtcataactggggctcccgct

SEQ ID NO: 4393227 - DNA, 25 bp, Homo sapien
tagcccggcatgtccccacgtggct

SEQ ID NO: 4393228 - DNA, 25 bp, Homo sapien
cagcctccagcaataactctgaggg

SEQ ID NO: 4393229 - DNA, 25 bp, Homo sapien
tgccagcggaagtcaccacattgcc

SEQ ID NO: 4393230 - DNA, 25 bp, Homo sapien
ccagcggaagtcaccacattgcccg

SEQ ID NO: 4393231 - DNA, 25 bp, Homo sapien
tcgcggggccttttccagttggatg

SEQ ID NO: 4393232 - DNA, 25 bp, Homo sapien
gaggaaaactaagcgcctctgtggg

SEQ ID NO: 4393233 - DNA, 25 bp, Homo sapien
cggcagcaccaagaaggagcgtgct

SEQ ID NO: 4393234 - DNA, 25 bp, Homo sapien
cagggcgaccggcagcaccaagaag

SEQ ID NO: 4393235 - DNA, 25 bp, Homo sapien
gcgaccggcagcaccaagaaggagc

SEQ ID NO: 4393236 - DNA, 25 bp, Homo sapien
gtgccctgcgtgctcgtctagctcc

SEQ ID NO: 4393237 - DNA, 25 bp, Homo sapien
tgcccagctacgcagaaagcagccg

SEQ ID NO: 4393238 - DNA, 25 bp, Homo sapien
cgacggctggtttccaggcgagggc

SEQ ID NO: 4393239 - DNA, 25 bp, Homo sapien
ccgcattcccgagagaggcgatgtg

SEQ ID NO: 4393240 - DNA, 25 bp, Homo sapien
ttaaacatatgtagagatgaaggag

SEQ ID NO: 4393241 - DNA, 25 bp, Homo sapien
cttaaacatatgtagagatgaagga

SEQ ID NO: 4393242 - DNA, 25 bp, Homo sapien
ctgtagctgctcaggaaatagttgt

SEQ ID NO: 4393243 - DNA, 25 bp, Homo sapien
ccaggtgctgtggagcatatctact

SEQ ID NO: 4393244 - DNA, 25 bp, Homo sapien
gaggagccattccaataccagtcat

SEQ ID NO: 4393245 - DNA, 25 bp, Homo sapien
tcaggtccttgttcactgtagctgc

SEQ ID NO: 4393246 - DNA, 25 bp, Homo sapien
tcagaattcatgtgcaaggtctttc

SEQ ID NO: 4393247 - DNA, 25 bp, Homo sapien
caggtcagagagtggaggatgtgct

SEQ ID NO: 4393248 - DNA, 25 bp, Homo sapien
gaattcatgtgcaaggtctttccta

SEQ ID NO: 4393249 - DNA, 25 bp, Homo sapien
tccaggtcagagagtggaggatgtg

SEQ ID NO: 4393250 - DNA, 25 bp, Homo sapien
actgtggtgtgataattggcgtccc

SEQ ID NO: 4393251 - DNA, 25 bp, Homo sapien
cactgtctgaacgtacacagtctca

SEQ ID NO: 4393252 - DNA, 25 bp, Homo sapien
ggcgtccctgacttattagggcaaa

SEQ ID NO: 4393253 - DNA, 25 bp, Homo sapien
gacttaatcatgcacagtgagcaag

SEQ ID NO: 4393254 - DNA, 25 bp, Homo sapien
gttgtaccaggttccctagggtgca

SEQ ID NO: 4393255 - DNA, 25 bp, Homo sapien
catagcctctggctgggatcaccca

SEQ ID NO: 4393256 - DNA, 25 bp, Homo sapien
gcaaaataagggtcaaggcctggaa

SEQ ID NO: 4393257 - DNA, 25 bp, Homo sapien
cacaagtgctttgactgaagctcca

SEQ ID NO: 4393258 - DNA, 25 bp, Homo sapien
ttttgcccagttcgctctgtagcag

SEQ ID NO: 4393259 - DNA, 25 bp, Homo sapien
ctgaattttgcccagttcgctctgt

SEQ ID NO: 4393260 - DNA, 25 bp, Homo sapien
gaattttgcccagttcgctctgtag

SEQ ID NO: 4393261 - DNA, 25 bp, Homo sapien
cccagttcgctctgtagcaggatac

SEQ ID NO: 4393262 - DNA, 25 bp, Homo sapien
tgcctcctgccagtcccagagggga

SEQ ID NO: 4393263 - DNA, 25 bp, Homo sapien
gctctgcctcctgccagtcccagag

SEQ ID NO: 4393264 - DNA, 25 bp, Homo sapien
tctgcctcctgccagtcccagaggg

SEQ ID NO: 4393265 - DNA, 25 bp, Homo sapien
ggctctgcctcctgccagtcccaga

SEQ ID NO: 4393266 - DNA, 25 bp, Homo sapien
tctcatacactttaacatgaagata

SEQ ID NO: 4393267 - DNA, 25 bp, Homo sapien
agaacatcacggtcatcccctggta

SEQ ID NO: 4393268 - DNA, 25 bp, Homo sapien
tgttgcaactgaaattccagtaggt

SEQ ID NO: 4393269 - DNA, 25 bp, Homo sapien
aatgatcacagtatggccctttagg

SEQ ID NO: 4393270 - DNA, 25 bp, Homo sapien
acagtgcacatgtggattccagggc

SEQ ID NO: 4393271 - DNA, 25 bp, Homo sapien
aatagtcaaacatgtgccccaggag

SEQ ID NO: 4393272 - DNA, 25 bp, Homo sapien
tgtgtcatcgtacttgggaaaccca

SEQ ID NO: 4393273 - DNA, 25 bp, Homo sapien
tgaccaggaaaccacgactcaaggg

SEQ ID NO: 4393274 - DNA, 25 bp, Homo sapien
cgtggacctgatgaagaatgaaggc

SEQ ID NO: 4393275 - DNA, 25 bp, Homo sapien
gagcttcagctaggccttgaatgat

SEQ ID NO: 4393276 - DNA, 25 bp, Homo sapien
ctaggccttgaatgatgggtaggca

SEQ ID NO: 4393277 - DNA, 25 bp, Homo sapien
gaggcagagcttcagctaggccttg

SEQ ID NO: 4393278 - DNA, 25 bp, Homo sapien
gaaaataatgtggaccaggcctccg

SEQ ID NO: 4393279 - DNA, 25 bp, Homo sapien
tataccgctcagcattcagtgtggg

SEQ ID NO: 4393280 - DNA, 25 bp, Homo sapien
ctagaaatcaaacccagagctgtgg

SEQ ID NO: 4393281 - DNA, 25 bp, Homo sapien
tggaaggactactactcaatggccc

SEQ ID NO: 4393282 - DNA, 25 bp, Homo sapien
ggagtggacatagactgggtcccag

SEQ ID NO: 4393283 - DNA, 25 bp, Homo sapien
gagcatggtaagaatgaacttgagc

SEQ ID NO: 4393284 - DNA, 25 bp, Homo sapien
aatgaacttgagcacgactcatggg

SEQ ID NO: 4393285 - DNA, 25 bp, Homo sapien
tgtcctgagcatggtaagaatgaac

SEQ ID NO: 4393286 - DNA, 25 bp, Homo sapien
gaatatgtgccctggcagctttgaa

SEQ ID NO: 4393287 - DNA, 25 bp, Homo sapien
tgtgccctggcagctttgaaacaag

SEQ ID NO: 4393288 - DNA, 25 bp, Homo sapien
gccctggcagctttgaaacaaggga

SEQ ID NO: 4393289 - DNA, 25 bp, Homo sapien
tatgtgccctggcagctttgaaaca

SEQ ID NO: 4393290 - DNA, 25 bp, Homo sapien
aaaggaggagttcgaatgccttcca

SEQ ID NO: 4393291 - DNA, 25 bp, Homo sapien
aaggaggagttcgaatgccttccaa

SEQ ID NO: 4393292 - DNA, 25 bp, Homo sapien
gaaaggaggagttcgaatgccttcc

SEQ ID NO: 4393293 - DNA, 25 bp, Homo sapien
aggaggagttcgaatgccttccaag

SEQ ID NO: 4393294 - DNA, 25 bp, Homo sapien
gattctggagcctgcgtggaactcc

SEQ ID NO: 4393295 - DNA, 25 bp, Homo sapien
acgaggacgatcctgcagaactggg

SEQ ID NO: 4393296 - DNA, 25 bp, Homo sapien
taatttgtgcggtgattcatgacac

SEQ ID NO: 4393297 - DNA, 25 bp, Homo sapien
attcatgacacaagccgcagcacga

SEQ ID NO: 4393298 - DNA, 25 bp, Homo sapien
ccctgagatctttgatctggtccat

SEQ ID NO: 4393299 - DNA, 25 bp, Homo sapien
tgtggccctgagatctttgatctgg

SEQ ID NO: 4393300 - DNA, 25 bp, Homo sapien
atggtaaagaggaaacactaacata

SEQ ID NO: 4393301 - DNA, 25 bp, Homo sapien
actaacataagaccctcctgtggcc

SEQ ID NO: 4393302 - DNA, 25 bp, Homo sapien
ctactctgaagcctttgtaggggcc

SEQ ID NO: 4393303 - DNA, 25 bp, Homo sapien
gaagcctttgtaggggcctgagcac

SEQ ID NO: 4393304 - DNA, 25 bp, Homo sapien
tactctgaagcctttgtaggggcct

SEQ ID NO: 4393305 - DNA, 25 bp, Homo sapien
tctgaagcctttgtaggggcctgag

SEQ ID NO: 4393306 - DNA, 25 bp, Homo sapien
gtaggcaagtcgattgagcttgtgg

SEQ ID NO: 4393307 - DNA, 25 bp, Homo sapien
cttggcaacgcgggcacgagcacgc

SEQ ID NO: 4393308 - DNA, 25 bp, Homo sapien
ggcaacgcgggcacgagcacgcttc

SEQ ID NO: 4393309 - DNA, 25 bp, Homo sapien
tgtaggcaagtcgattgagcttgtg

SEQ ID NO: 4393310 - DNA, 25 bp, Homo sapien
atcctttgggatcttgggcttagcc

SEQ ID NO: 4393311 - DNA, 25 bp, Homo sapien
acatcctttgggatcttgggcttag

SEQ ID NO: 4393312 - DNA, 25 bp, Homo sapien
tgggcttagcctccttgggcttcac

SEQ ID NO: 4393313 - DNA, 25 bp, Homo sapien
cttgggcttagcctccttgggcttc

SEQ ID NO: 4393314 - DNA, 25 bp, Homo sapien
aagggccctgatagcctcggcatgt

SEQ ID NO: 4393315 - DNA, 25 bp, Homo sapien
catgtgcactcatggcctcggcact

SEQ ID NO: 4393316 - DNA, 25 bp, Homo sapien
ctcggcatgtgcactcatggcctcg

SEQ ID NO: 4393317 - DNA, 25 bp, Homo sapien
cggcatgtgcactcatggcctcggc

SEQ ID NO: 4393318 - DNA, 25 bp, Homo sapien
ctacaatcggaagagcaggaaatag

SEQ ID NO: 4393319 - DNA, 25 bp, Homo sapien
tgtttcacgtaggtcatttcacagg

SEQ ID NO: 4393320 - DNA, 25 bp, Homo sapien
catgtcagatctccaaatggtagct

SEQ ID NO: 4393321 - DNA, 25 bp, Homo sapien
caagaaggcacagcgagttggtcat

SEQ ID NO: 4393322 - DNA, 25 bp, Homo sapien
cacaggatcctgaaaacaacgcttt

SEQ ID NO: 4393323 - DNA, 25 bp, Homo sapien
agctcccgggcgatcctgcccttgc

SEQ ID NO: 4393324 - DNA, 25 bp, Homo sapien
tgccgagcgcgttttctggagtcac

SEQ ID NO: 4393325 - DNA, 25 bp, Homo sapien
ctctttcgagactccctagtggggt

SEQ ID NO: 4393326 - DNA, 25 bp, Homo sapien
tgtgcgtcttctgtcccccgttctt

SEQ ID NO: 4393327 - DNA, 25 bp, Homo sapien
tacggatcgacaaattgaggcccgc

SEQ ID NO: 4393328 - DNA, 25 bp, Homo sapien
gcattgcgccttgcagagtctgggt

SEQ ID NO: 4393329 - DNA, 25 bp, Homo sapien
acaggcaccataacaaacgcacgtg

SEQ ID NO: 4393330 - DNA, 25 bp, Homo sapien
gggaacacggatttctccacggcac

SEQ ID NO: 4393331 - DNA, 25 bp, Homo sapien
taggggccgccctgcggtgccgggc

SEQ ID NO: 4393332 - DNA, 25 bp, Homo sapien
gggccgccctgcggtgccgggccat

SEQ ID NO: 4393333 - DNA, 25 bp, Homo sapien
ccttaggggccgccctgcggtgccg

SEQ ID NO: 4393334 - DNA, 25 bp, Homo sapien
cttaggggccgccctgcggtgccgg

SEQ ID NO: 4393335 - DNA, 25 bp, Homo sapien
ggagtggctctagaggcgccacttg

SEQ ID NO: 4393336 - DNA, 25 bp, Homo sapien
cctcgggggagggagtggctctaga

SEQ ID NO: 4393337 - DNA, 25 bp, Homo sapien
gagggagtggctctagaggcgccac

SEQ ID NO: 4393338 - DNA, 25 bp, Homo sapien
gggagggagtggctctagaggcgcc

SEQ ID NO: 4393339 - DNA, 25 bp, Homo sapien
tatgtgcccaaccacgtgtgaagag

SEQ ID NO: 4393340 - DNA, 25 bp, Homo sapien
gatccaggtttatttgtgagcccag

SEQ ID NO: 4393341 - DNA, 25 bp, Homo sapien
cctgcgaatcctttagtttggagaa

SEQ ID NO: 4393342 - DNA, 25 bp, Homo sapien
tgagcccaggtagtgcctgcgaatc

SEQ ID NO: 4393343 - DNA, 25 bp, Homo sapien
gacgtgccaagctacaggaatgaat

SEQ ID NO: 4393344 - DNA, 25 bp, Homo sapien
gaggaggctgttccagacgtgccaa

SEQ ID NO: 4393345 - DNA, 25 bp, Homo sapien
gccatgtctggtagacgccagtggt

SEQ ID NO: 4393346 - DNA, 25 bp, Homo sapien
atgaatgttggagctgccacgccgg

SEQ ID NO: 4393347 - DNA, 25 bp, Homo sapien
gttctctcggtaagatcaaggtgtg

SEQ ID NO: 4393348 - DNA, 25 bp, Homo sapien
tcctgtttgtccactgaggtaagaa

SEQ ID NO: 4393349 - DNA, 25 bp, Homo sapien
tcaaggtgtgacagcaggcagtgaa

SEQ ID NO: 4393350 - DNA, 25 bp, Homo sapien
cagtgaatttgcagtagcccgtggt

SEQ ID NO: 4393351 - DNA, 25 bp, Homo sapien
caaagcggttgttatcaaattcaga

SEQ ID NO: 4393352 - DNA, 25 bp, Homo sapien
tggtacaaagcggttgttatcaaat

SEQ ID NO: 4393353 - DNA, 25 bp, Homo sapien
caaaatggtacaaagcggttgttat

SEQ ID NO: 4393354 - DNA, 25 bp, Homo sapien
aagcggttgttatcaaattcagaca

SEQ ID NO: 4393355 - DNA, 25 bp, Homo sapien
tttgctggaatctcttggcctagca

SEQ ID NO: 4393356 - DNA, 25 bp, Homo sapien
cagtgtgcaactcatacttagtttc

SEQ ID NO: 4393357 - DNA, 25 bp, Homo sapien
ccatgtactcagtgtgcaactcata

SEQ ID NO: 4393358 - DNA, 25 bp, Homo sapien
tactcagtgtgcaactcatacttag

SEQ ID NO: 4393359 - DNA, 25 bp, Homo sapien
gacactcctcgcttcataggcttgt

SEQ ID NO: 4393360 - DNA, 25 bp, Homo sapien
gaactctggcttagtcacttacctg

SEQ ID NO: 4393361 - DNA, 25 bp, Homo sapien
tacctgctttgtgcccgtgctgtca

SEQ ID NO: 4393362 - DNA, 25 bp, Homo sapien
cgtgctgtcaccaaagctcttgtca

SEQ ID NO: 4393363 - DNA, 25 bp, Homo sapien
cctgggtgctgagtggggatggctc

SEQ ID NO: 4393364 - DNA, 25 bp, Homo sapien
tgctgagtggggatggctccttgaa

SEQ ID NO: 4393365 - DNA, 25 bp, Homo sapien
gaggctcctgggtgctgagtgggga

SEQ ID NO: 4393366 - DNA, 25 bp, Homo sapien
gctgaggctcctgggtgctgagtgg

SEQ ID NO: 4393367 - DNA, 25 bp, Homo sapien
tcaacacagagcactcgagcaatgg

SEQ ID NO: 4393368 - DNA, 25 bp, Homo sapien
gcctcacacatggtacacttacttg

SEQ ID NO: 4393369 - DNA, 25 bp, Homo sapien
gtgacaggtgaacccctcctctgag

SEQ ID NO: 4393370 - DNA, 25 bp, Homo sapien
tcttggctcaatttatgaacttctt

SEQ ID NO: 4393371 - DNA, 25 bp, Homo sapien
gtcttgacgttaccacccatcgcat

SEQ ID NO: 4393372 - DNA, 25 bp, Homo sapien
ctttgttgttcgccctgttctgtcc

SEQ ID NO: 4393373 - DNA, 25 bp, Homo sapien
tctgtcctgaatctttgtgaggtct

SEQ ID NO: 4393374 - DNA, 25 bp, Homo sapien
tgtgaggtcttgacgttaccaccca

SEQ ID NO: 4393375 - DNA, 25 bp, Homo sapien
tcagcccgttgggaggcaaggtcaa

SEQ ID NO: 4393376 - DNA, 25 bp, Homo sapien
aattggtggccaaagaggcttctgc

SEQ ID NO: 4393377 - DNA, 25 bp, Homo sapien
tgtccatccccgtgctgaggtaaga

SEQ ID NO: 4393378 - DNA, 25 bp, Homo sapien
caggtaagactgcaccggattcagg

SEQ ID NO: 4393379 - DNA, 25 bp, Homo sapien
tgtagcctaacttgcctgctcaggt

SEQ ID NO: 4393380 - DNA, 25 bp, Homo sapien
agagagacgtgtcctcgccaacatc

SEQ ID NO: 4393381 - DNA, 25 bp, Homo sapien
taactcttattggaaggcaaggcaa

SEQ ID NO: 4393382 - DNA, 25 bp, Homo sapien
cctggatgcaggatcttggaaaaga

SEQ ID NO: 4393383 - DNA, 25 bp, Homo sapien
gcctttgcaggtactcgataaacac

SEQ ID NO: 4393384 - DNA, 25 bp, Homo sapien
ttgtgtccctagtgcgtttagcttc

SEQ ID NO: 4393385 - DNA, 25 bp, Homo sapien
ccctagtgcgtttagcttcgggtgg

SEQ ID NO: 4393386 - DNA, 25 bp, Homo sapien
agaggacagctgttccccgctccct

SEQ ID NO: 4393387 - DNA, 25 bp, Homo sapien
caagttcttaaaggaatctaattcg

SEQ ID NO: 4393388 - DNA, 25 bp, Homo sapien
cacatgctttgatagttcactctca

SEQ ID NO: 4393389 - DNA, 25 bp, Homo sapien
aatctaattcgagggcacactgctg

SEQ ID NO: 4393390 - DNA, 25 bp, Homo sapien
catggggagttgaaataacaagttc

SEQ ID NO: 4393391 - DNA, 25 bp, Homo sapien
tgcttgagtggatcatgggtgagct

SEQ ID NO: 4393392 - DNA, 25 bp, Homo sapien
gcttgagtggatcatgggtgagctg

SEQ ID NO: 4393393 - DNA, 25 bp, Homo sapien
ggcacacctgcttgagtggatcatg

SEQ ID NO: 4393394 - DNA, 25 bp, Homo sapien
ctgcttgagtggatcatgggtgagc

SEQ ID NO: 4393395 - DNA, 25 bp, Homo sapien
tttgcatgacgtgctatagaattcc

SEQ ID NO: 4393396 - DNA, 25 bp, Homo sapien
tgacgtgctatagaattccaggctc

SEQ ID NO: 4393397 - DNA, 25 bp, Homo sapien
ttttctttgcatgacgtgctataga

SEQ ID NO: 4393398 - DNA, 25 bp, Homo sapien
catgacgtgctatagaattccaggc

SEQ ID NO: 4393399 - DNA, 25 bp, Homo sapien
ctacatacgtgtcccccgcttcttg

SEQ ID NO: 4393400 - DNA, 25 bp, Homo sapien
ttgcaaatgtctgcactctagagtc

SEQ ID NO: 4393401 - DNA, 25 bp, Homo sapien
ttccaccttgtattgccagtttgtt

SEQ ID NO: 4393402 - DNA, 25 bp, Homo sapien
gtctgcactctagagtccttcctgt

SEQ ID NO: 4393403 - DNA, 25 bp, Homo sapien
tggtgagagccaaacccgaagaccc

SEQ ID NO: 4393404 - DNA, 25 bp, Homo sapien
ggccattgttggcagaaaggtgcct

SEQ ID NO: 4393405 - DNA, 25 bp, Homo sapien
gacccacaggtttcaagctggccat

SEQ ID NO: 4393406 - DNA, 25 bp, Homo sapien
agaaaggtgccttcctcgggagaag

SEQ ID NO: 4393407 - DNA, 25 bp, Homo sapien
aaccatggtggccaaagacgaagac

SEQ ID NO: 4393408 - DNA, 25 bp, Homo sapien
gaagctgtactagaggaaaagttaa

SEQ ID NO: 4393409 - DNA, 25 bp, Homo sapien
tgaagggaagctgtactagaggaaa

SEQ ID NO: 4393410 - DNA, 25 bp, Homo sapien
ggccaaagacgaagacagtgaaacc

SEQ ID NO: 4393411 - DNA, 25 bp, Homo sapien
tcaggttatgcatggactgaagtca

SEQ ID NO: 4393412 - DNA, 25 bp, Homo sapien
aagtcaaactacagtctttggcagc

SEQ ID NO: 4393413 - DNA, 25 bp, Homo sapien
ttctgtgaatatgcgtttctctttt

SEQ ID NO: 4393414 - DNA, 25 bp, Homo sapien
ggatttgaggttgtttcaggttatg

SEQ ID NO: 4393415 - DNA, 25 bp, Homo sapien
ctgctgatcgggcacagagccattt

SEQ ID NO: 4393416 - DNA, 25 bp, Homo sapien
tcctgagcaagggtgctgctgatcg

SEQ ID NO: 4393417 - DNA, 25 bp, Homo sapien
ggtgctgctgatcgggcacagagcc

SEQ ID NO: 4393418 - DNA, 25 bp, Homo sapien
tgctgctgatcgggcacagagccat

SEQ ID NO: 4393419 - DNA, 25 bp, Homo sapien
tgatttctctctgggaccatctcag

SEQ ID NO: 4393420 - DNA, 25 bp, Homo sapien
ttttcttcccctgagcacattcagt

SEQ ID NO: 4393421 - DNA, 25 bp, Homo sapien
tgaaatcaagactgggtgccaggcc

SEQ ID NO: 4393422 - DNA, 25 bp, Homo sapien
caggccgtagggctgccagcctgcc

SEQ ID NO: 4393423 - DNA, 25 bp, Homo sapien
caggagtgtgagtggaagtcgacac

SEQ ID NO: 4393424 - DNA, 25 bp, Homo sapien
catgtcaggagtgtgagtggaagtc

SEQ ID NO: 4393425 - DNA, 25 bp, Homo sapien
ctggagaagagtgcgggagtgcagg

SEQ ID NO: 4393426 - DNA, 25 bp, Homo sapien
tgtcaggagtgtgagtggaagtcga

SEQ ID NO: 4393427 - DNA, 25 bp, Homo sapien
ttcctccagggacatgggctggatc

SEQ ID NO: 4393428 - DNA, 25 bp, Homo sapien
ctccagggacatgggctggatctgg

SEQ ID NO: 4393429 - DNA, 25 bp, Homo sapien
tgcaggatctgagaagcttcctcca

SEQ ID NO: 4393430 - DNA, 25 bp, Homo sapien
agggacatgggctggatctggggct

SEQ ID NO: 4393431 - DNA, 25 bp, Homo sapien
attcttcataacaggcgatcccctt

SEQ ID NO: 4393432 - DNA, 25 bp, Homo sapien
caggcgatcccctttgagtccagga

SEQ ID NO: 4393433 - DNA, 25 bp, Homo sapien
tggcctactaatcaatgtgaattct

SEQ ID NO: 4393434 - DNA, 25 bp, Homo sapien
tgtggccctgccatttcctcagtaa

SEQ ID NO: 4393435 - DNA, 25 bp, Homo sapien
tctcaggacagacttgaacaacctt

SEQ ID NO: 4393436 - DNA, 25 bp, Homo sapien
gctctcaggacagacttgaacaacc

SEQ ID NO: 4393437 - DNA, 25 bp, Homo sapien
gaagctctcaggacagacttgaaca

SEQ ID NO: 4393438 - DNA, 25 bp, Homo sapien
caggacagacttgaacaaccttttt

SEQ ID NO: 4393439 - DNA, 25 bp, Homo sapien
gatgctcacaagcagtagagggtga

SEQ ID NO: 4393440 - DNA, 25 bp, Homo sapien
caggtattgagctcaaactgcaggg

SEQ ID NO: 4393441 - DNA, 25 bp, Homo sapien
gacagaaccgactttccggactcag

SEQ ID NO: 4393442 - DNA, 25 bp, Homo sapien
ccagtaaggcattaccggtaaggca

SEQ ID NO: 4393443 - DNA, 25 bp, Homo sapien
gcttcctggattgagacctagccta

SEQ ID NO: 4393444 - DNA, 25 bp, Homo sapien
tgttcacagatccagagcattgcac

SEQ ID NO: 4393445 - DNA, 25 bp, Homo sapien
cacacagaggcatgggctagcaaag

SEQ ID NO: 4393446 - DNA, 25 bp, Homo sapien
gagtacctactacctgccacgaatg

SEQ ID NO: 4393447 - DNA, 25 bp, Homo sapien
cctggaggcttaacacagtctggtg

SEQ ID NO: 4393448 - DNA, 25 bp, Homo sapien
tcctctagaagcctcgtgatgattg

SEQ ID NO: 4393449 - DNA, 25 bp, Homo sapien
cacatggacaaggagaaagagtgca

SEQ ID NO: 4393450 - DNA, 25 bp, Homo sapien
tgagtatccgctctggtccaggcac

SEQ ID NO: 4393451 - DNA, 25 bp, Homo sapien
atgtcaataataccgaatatgatat

SEQ ID NO: 4393452 - DNA, 25 bp, Homo sapien
gatgtcaataataccgaatatgata

SEQ ID NO: 4393453 - DNA, 25 bp, Homo sapien
agaaggatgggtacagtacaataaa

SEQ ID NO: 4393454 - DNA, 25 bp, Homo sapien
agatgtcaataataccgaatatgat

SEQ ID NO: 4393455 - DNA, 25 bp, Homo sapien
catgtctgaggtagcaagtgcagcc

SEQ ID NO: 4393456 - DNA, 25 bp, Homo sapien
ttgggctccaaactaaccatctcgg

SEQ ID NO: 4393457 - DNA, 25 bp, Homo sapien
gccctggagtgagaaagcctggatt

SEQ ID NO: 4393458 - DNA, 25 bp, Homo sapien
tactgactagctgtgccactctggg

SEQ ID NO: 4393459 - DNA, 25 bp, Homo sapien
tcttattgggagacaacaactgtcc

SEQ ID NO: 4393460 - DNA, 25 bp, Homo sapien
ggtggcattccgacagcaggacata

SEQ ID NO: 4393461 - DNA, 25 bp, Homo sapien
tcttcgaatcatgacactgagtgca

SEQ ID NO: 4393462 - DNA, 25 bp, Homo sapien
taactgctgtataggacaagcccct

SEQ ID NO: 4393463 - DNA, 25 bp, Homo sapien
tgggacgacactgggtagaatctag

SEQ ID NO: 4393464 - DNA, 25 bp, Homo sapien
ggacgttatcattggtctggtgaga

SEQ ID NO: 4393465 - DNA, 25 bp, Homo sapien
gagatatcagtctcggaaacttctg

SEQ ID NO: 4393466 - DNA, 25 bp, Homo sapien
tattcatctggatcatgggaccctc

SEQ ID NO: 4393467 - DNA, 25 bp, Homo sapien
taggtagtagagcaactgtaggccc

SEQ ID NO: 4393468 - DNA, 25 bp, Homo sapien
tgatgagggtatcctgcagaagcca

SEQ ID NO: 4393469 - DNA, 25 bp, Homo sapien
agccagggcgctttgtcacagaact

SEQ ID NO: 4393470 - DNA, 25 bp, Homo sapien
aaagtcaagacgatcacaagtgggc

SEQ ID NO: 4393471 - DNA, 25 bp, Homo sapien
gaccttgcatgttctctagttgggc

SEQ ID NO: 4393472 - DNA, 25 bp, Homo sapien
cctaggattctagttgggccagtag

SEQ ID NO: 4393473 - DNA, 25 bp, Homo sapien
ggagagtaccacatcacgggaacac

SEQ ID NO: 4393474 - DNA, 25 bp, Homo sapien
tctggcgtcaagcaaaacttctggc

SEQ ID NO: 4393475 - DNA, 25 bp, Homo sapien
gggttgtcaatagtggctagaacat

SEQ ID NO: 4393476 - DNA, 25 bp, Homo sapien
gctagaacataaaagggtgtgagga

SEQ ID NO: 4393477 - DNA, 25 bp, Homo sapien
gatttgatcaccacagtacttgctg

SEQ ID NO: 4393478 - DNA, 25 bp, Homo sapien
cactttccttagcacgcttcctagg

SEQ ID NO: 4393479 - DNA, 25 bp, Homo sapien
actgaatccaccctactagcacaga

SEQ ID NO: 4393480 - DNA, 25 bp, Homo sapien
ttactgaatccaccctactagcaca

SEQ ID NO: 4393481 - DNA, 25 bp, Homo sapien
ttattactgaatccaccctactagc

SEQ ID NO: 4393482 - DNA, 25 bp, Homo sapien
tattactgaatccaccctactagca

SEQ ID NO: 4393483 - DNA, 25 bp, Homo sapien
agatgatcgtgaacttgatacagca

SEQ ID NO: 4393484 - DNA, 25 bp, Homo sapien
gatgatcgtgaacttgatacagcat

SEQ ID NO: 4393485 - DNA, 25 bp, Homo sapien
aagatgatcgtgaacttgatacagc

SEQ ID NO: 4393486 - DNA, 25 bp, Homo sapien
tgatcgtgaacttgatacagcataa

SEQ ID NO: 4393487 - DNA, 25 bp, Homo sapien
acccagcttggttcttctccaatgc

SEQ ID NO: 4393488 - DNA, 25 bp, Homo sapien
tctccaatgcctccttttggagttg

SEQ ID NO: 4393489 - DNA, 25 bp, Homo sapien
cagcttggttcttctccaatgcctc

SEQ ID NO: 4393490 - DNA, 25 bp, Homo sapien
tagacccagcttggttcttctccaa

SEQ ID NO: 4393491 - DNA, 25 bp, Homo sapien
ctgattttactaccaggtttcatct

SEQ ID NO: 4393492 - DNA, 25 bp, Homo sapien
gccaggaatcgcttaatggtgaaag

SEQ ID NO: 4393493 - DNA, 25 bp, Homo sapien
gattttactaccaggtttcatctga

SEQ ID NO: 4393494 - DNA, 25 bp, Homo sapien
tcgcttaatggtgaaagtcttgtga

SEQ ID NO: 4393495 - DNA, 25 bp, Homo sapien
cgagaaacagagtcaaccacacacc

SEQ ID NO: 4393496 - DNA, 25 bp, Homo sapien
gcgagaaacagagtcaaccacacac

SEQ ID NO: 4393497 - DNA, 25 bp, Homo sapien
ggcgagaaacagagtcaaccacaca

SEQ ID NO: 4393498 - DNA, 25 bp, Homo sapien
aatttcctactccaaagaggcaaag

SEQ ID NO: 4393499 - DNA, 25 bp, Homo sapien
tctgaatttcctactccaaagaggc

SEQ ID NO: 4393500 - DNA, 25 bp, Homo sapien
agtctgaatttcctactccaaagag

SEQ ID NO: 4393501 - DNA, 25 bp, Homo sapien
aagaggcaaagatgcttgcttctct

SEQ ID NO: 4393502 - DNA, 25 bp, Homo sapien
tagcacttccgctgttactgagtca

SEQ ID NO: 4393503 - DNA, 25 bp, Homo sapien
ggcacatgacctaaaatcaaagtgg

SEQ ID NO: 4393504 - DNA, 25 bp, Homo sapien
tttgttgacttatgagcccagggca

SEQ ID NO: 4393505 - DNA, 25 bp, Homo sapien
tatcagatgggcacaactgtctctg

SEQ ID NO: 4393506 - DNA, 25 bp, Homo sapien
gggtggagatccagcttctaaggct

SEQ ID NO: 4393507 - DNA, 25 bp, Homo sapien
ggggtggagatccagcttctaaggc

SEQ ID NO: 4393508 - DNA, 25 bp, Homo sapien
ggctactttattgtcgatttcctcc

SEQ ID NO: 4393509 - DNA, 25 bp, Homo sapien
tggacaacgctgacatctgaagagg

SEQ ID NO: 4393510 - DNA, 25 bp, Homo sapien
tggcagggcggaacatggatccctt

SEQ ID NO: 4393511 - DNA, 25 bp, Homo sapien
tctagggacactagttggacaacgc

SEQ ID NO: 4393512 - DNA, 25 bp, Homo sapien
gcttttttcccactctaggacgcaa

SEQ ID NO: 4393513 - DNA, 25 bp, Homo sapien
gacgcaaatctcgatctgcaagggc

SEQ ID NO: 4393514 - DNA, 25 bp, Homo sapien
ttcccactctaggacgcaaatctcg

SEQ ID NO: 4393515 - DNA, 25 bp, Homo sapien
cactctaggacgcaaatctcgatct

SEQ ID NO: 4393516 - DNA, 25 bp, Homo sapien
gccggatgctaagaccgcgatttcc

SEQ ID NO: 4393517 - DNA, 25 bp, Homo sapien
aggtctgcgtgtcaccgacccgaac

SEQ ID NO: 4393518 - DNA, 25 bp, Homo sapien
gctgggcgcagcaattcaaccgccg

SEQ ID NO: 4393519 - DNA, 25 bp, Homo sapien
tggtgtctctgagactccgagacgc

SEQ ID NO: 4393520 - DNA, 25 bp, Homo sapien
cggtacttagcacacagcgtgactt

SEQ ID NO: 4393521 - DNA, 25 bp, Homo sapien
tcagcgcgttgtctagctgctgcct

SEQ ID NO: 4393522 - DNA, 25 bp, Homo sapien
tactggataaacgaggaaaggattc

SEQ ID NO: 4393523 - DNA, 25 bp, Homo sapien
cacagcgtgacttaatactggataa

SEQ ID NO: 4393524 - DNA, 25 bp, Homo sapien
agcttgggttcccgcgagcacacga

SEQ ID NO: 4393525 - DNA, 25 bp, Homo sapien
ttgggttcccgcgagcacacgagcc

SEQ ID NO: 4393526 - DNA, 25 bp, Homo sapien
gggttcccgcgagcacacgagccag

SEQ ID NO: 4393527 - DNA, 25 bp, Homo sapien
ttcccgcgagcacacgagccaggaa

SEQ ID NO: 4393528 - DNA, 25 bp, Homo sapien
accgccgggccattggagaccagga

SEQ ID NO: 4393529 - DNA, 25 bp, Homo sapien
ccgccgggccattggagaccaggag

SEQ ID NO: 4393530 - DNA, 25 bp, Homo sapien
tgccacaactcccactgggattggt

SEQ ID NO: 4393531 - DNA, 25 bp, Homo sapien
ggtctcctgggtgccacaactccca

SEQ ID NO: 4393532 - DNA, 25 bp, Homo sapien
tgggtgccacaactcccactgggat

SEQ ID NO: 4393533 - DNA, 25 bp, Homo sapien
gctgctggtctcctgggtgccacaa

SEQ ID NO: 4393534 - DNA, 25 bp, Homo sapien
ttctggcataaaattatatagatca

SEQ ID NO: 4393535 - DNA, 25 bp, Homo sapien
attatatagatcacaggcaaaatat

SEQ ID NO: 4393536 - DNA, 25 bp, Homo sapien
gtcttctggcataaaattatataga

SEQ ID NO: 4393537 - DNA, 25 bp, Homo sapien
cttctggcataaaattatatagatc

SEQ ID NO: 4393538 - DNA, 25 bp, Homo sapien
aaatttcatgcgcgtccatgtgaag

SEQ ID NO: 4393539 - DNA, 25 bp, Homo sapien
caaatttcatgcgcgtccatgtgaa

SEQ ID NO: 4393540 - DNA, 25 bp, Homo sapien
gcaccaaatttcatgcgcgtccatg

SEQ ID NO: 4393541 - DNA, 25 bp, Homo sapien
accaaatttcatgcgcgtccatgtg

SEQ ID NO: 4393542 - DNA, 25 bp, Homo sapien
gaaacaggttccactgcggacaaag

SEQ ID NO: 4393543 - DNA, 25 bp, Homo sapien
ttttagaccgtggagactgcgctgc

SEQ ID NO: 4393544 - DNA, 25 bp, Homo sapien
aacctgcctggttgccgtggaaaca

SEQ ID NO: 4393545 - DNA, 25 bp, Homo sapien
tggttaccgtagcagccagatgctg

SEQ ID NO: 4393546 - DNA, 25 bp, Homo sapien
cctgttacgtgctgggcgccggttc

SEQ ID NO: 4393547 - DNA, 25 bp, Homo sapien
tgcttgccctggttcagccaattca

SEQ ID NO: 4393548 - DNA, 25 bp, Homo sapien
tcaggaaacattactgggcacctgt

SEQ ID NO: 4393549 - DNA, 25 bp, Homo sapien
tgtgtacatggatgcctctctcact

SEQ ID NO: 4393550 - DNA, 25 bp, Homo sapien
tgcgcatgcgcgtcttcaagcagct

SEQ ID NO: 4393551 - DNA, 25 bp, Homo sapien
cagagcctgtcgagggtgccagtta

SEQ ID NO: 4393552 - DNA, 25 bp, Homo sapien
ccagcatgctggaggagaacatcga

SEQ ID NO: 4393553 - DNA, 25 bp, Homo sapien
cgtagctccgtataagattccgtgg

SEQ ID NO: 4393554 - DNA, 25 bp, Homo sapien
tcttgtcaagttggccatctccgct

SEQ ID NO: 4393555 - DNA, 25 bp, Homo sapien
catctccgctggtgaagggttgttc

SEQ ID NO: 4393556 - DNA, 25 bp, Homo sapien
caatagctgaaggttgccccatagg

SEQ ID NO: 4393557 - DNA, 25 bp, Homo sapien
tcacttgggagtaaagggctatcta

SEQ ID NO: 4393558 - DNA, 25 bp, Homo sapien
gggcttgctccctgaaaccattctg

SEQ ID NO: 4393559 - DNA, 25 bp, Homo sapien
tggggtgtcctcagagtactgtgct

SEQ ID NO: 4393560 - DNA, 25 bp, Homo sapien
tggtcttgggcagtaagcccacaga

SEQ ID NO: 4393561 - DNA, 25 bp, Homo sapien
tagcaaatggcctctgggctacatc

SEQ ID NO: 4393562 - DNA, 25 bp, Homo sapien
gatttcagttaagcttggttggtaa

SEQ ID NO: 4393563 - DNA, 25 bp, Homo sapien
tctctatgatttcagttaagcttgg

SEQ ID NO: 4393564 - DNA, 25 bp, Homo sapien
atttgcagcttcctctttgagtcct

SEQ ID NO: 4393565 - DNA, 25 bp, Homo sapien
ttcctctttgagtcctgaaaggctc

SEQ ID NO: 4393566 - DNA, 25 bp, Homo sapien
gcctggtctacatctacactgtgac

SEQ ID NO: 4393567 - DNA, 25 bp, Homo sapien
ggcctggtctacatctacactgtga

SEQ ID NO: 4393568 - DNA, 25 bp, Homo sapien
caggcctggtctacatctacactgt

SEQ ID NO: 4393569 - DNA, 25 bp, Homo sapien
gactttgtagaggtctcctttggga

SEQ ID NO: 4393570 - DNA, 25 bp, Homo sapien
tgctggcctgttggtatccattggg

SEQ ID NO: 4393571 - DNA, 25 bp, Homo sapien
gtctcctttgggactgaaagatgct

SEQ ID NO: 4393572 - DNA, 25 bp, Homo sapien
ggtatcataacctctgactttgtag

SEQ ID NO: 4393573 - DNA, 25 bp, Homo sapien
gctgatctgtttgtcattcagacac

SEQ ID NO: 4393574 - DNA, 25 bp, Homo sapien
gatctgtttgtcattcagacactca

SEQ ID NO: 4393575 - DNA, 25 bp, Homo sapien
tctgtttgtcattcagacactcacc

SEQ ID NO: 4393576 - DNA, 25 bp, Homo sapien
tgatctgtttgtcattcagacactc

SEQ ID NO: 4393577 - DNA, 25 bp, Homo sapien
tagaatgtccccgtttttgatgacc

SEQ ID NO: 4393578 - DNA, 25 bp, Homo sapien
catggcacacaaagtcacatagcat

SEQ ID NO: 4393579 - DNA, 25 bp, Homo sapien
cacagaggtacaaagccattttcat

SEQ ID NO: 4393580 - DNA, 25 bp, Homo sapien
catagcatccatgtgacttaacact

SEQ ID NO: 4393581 - DNA, 25 bp, Homo sapien
tatttgtgctcctaagtcggcccac

SEQ ID NO: 4393582 - DNA, 25 bp, Homo sapien
gattcaacagcctcaggagagaggt

SEQ ID NO: 4393583 - DNA, 25 bp, Homo sapien
ccaagacctgtgtactaagagtgct

SEQ ID NO: 4393584 - DNA, 25 bp, Homo sapien
taagggagtcaacctacgctgcact

SEQ ID NO: 4393585 - DNA, 25 bp, Homo sapien
ttttggttgcacaaagaggagacct

SEQ ID NO: 4393586 - DNA, 25 bp, Homo sapien
tacaaactgtattctagagaggtgg

SEQ ID NO: 4393587 - DNA, 25 bp, Homo sapien
caagaatgaggtcgcgaagttagac

SEQ ID NO: 4393588 - DNA, 25 bp, Homo sapien
gaggagaccttttaaagaggcagca

SEQ ID NO: 4393589 - DNA, 25 bp, Homo sapien
ccagaaaaagagtccactggacatg

SEQ ID NO: 4393590 - DNA, 25 bp, Homo sapien
tggtgttggttctgatcccagaaaa

SEQ ID NO: 4393591 - DNA, 25 bp, Homo sapien
tcaagtcctgtttagaattctaact

SEQ ID NO: 4393592 - DNA, 25 bp, Homo sapien
tttgtgcacaaaccttgaggccatt

SEQ ID NO: 4393593 - DNA, 25 bp, Homo sapien
tggacaaggctctggtccagtcacc

SEQ ID NO: 4393594 - DNA, 25 bp, Homo sapien
ggaagccttcttgattgatatctcc

SEQ ID NO: 4393595 - DNA, 25 bp, Homo sapien
aaaccttcataccagaatggtcttt

SEQ ID NO: 4393596 - DNA, 25 bp, Homo sapien
tgattgatatctcctcccccaaaac

SEQ ID NO: 4393597 - DNA, 25 bp, Homo sapien
caaagcagcacttggcagggtttgt

SEQ ID NO: 4393598 - DNA, 25 bp, Homo sapien
ctttccaaagcagcacttggcaggg

SEQ ID NO: 4393599 - DNA, 25 bp, Homo sapien
tccaaagcagcacttggcagggttt

SEQ ID NO: 4393600 - DNA, 25 bp, Homo sapien
tttccaaagcagcacttggcagggt

SEQ ID NO: 4393601 - DNA, 25 bp, Homo sapien
gcttggaaaacacttatggccttgc

SEQ ID NO: 4393602 - DNA, 25 bp, Homo sapien
tcatctaggtagttcccacaggagc

SEQ ID NO: 4393603 - DNA, 25 bp, Homo sapien
ttggagcttctgatcccttggaggg

SEQ ID NO: 4393604 - DNA, 25 bp, Homo sapien
caacagctgcatacaggtcaagagt

SEQ ID NO: 4393605 - DNA, 25 bp, Homo sapien
gtcggggaacggctgcttggggtca

SEQ ID NO: 4393606 - DNA, 25 bp, Homo sapien
gaggagtcggggaacggctgcttgg

SEQ ID NO: 4393607 - DNA, 25 bp, Homo sapien
tgaggagtcggggaacggctgcttg

SEQ ID NO: 4393608 - DNA, 25 bp, Homo sapien
gggtgaggagtcggggaacggctgc

SEQ ID NO: 4393609 - DNA, 25 bp, Homo sapien
cacggtggcaaaaaagcatacagca

SEQ ID NO: 4393610 - DNA, 25 bp, Homo sapien
tctgcctggtagacacatcgacctt

SEQ ID NO: 4393611 - DNA, 25 bp, Homo sapien
gggacataccacaggactcagaacc

SEQ ID NO: 4393612 - DNA, 25 bp, Homo sapien
tagatcgtcagagctttgaggaccc

SEQ ID NO: 4393613 - DNA, 25 bp, Homo sapien
tcatcagacttttacgaggtaggta

SEQ ID NO: 4393614 - DNA, 25 bp, Homo sapien
aatggctgctttcatcggaggatcg

SEQ ID NO: 4393615 - DNA, 25 bp, Homo sapien
aagtgatagagcctggattcggcct

SEQ ID NO: 4393616 - DNA, 25 bp, Homo sapien
cccagtaatggataggccgaaggag

SEQ ID NO: 4393617 - DNA, 25 bp, Homo sapien
gcccaccaggtaccactggcctctt

SEQ ID NO: 4393618 - DNA, 25 bp, Homo sapien
tgtggtggatgtaagagtatactcc

SEQ ID NO: 4393619 - DNA, 25 bp, Homo sapien
gagtatactccgtagcggtccttct

SEQ ID NO: 4393620 - DNA, 25 bp, Homo sapien
tctctattcagggtcaccatggggc

SEQ ID NO: 4393621 - DNA, 25 bp, Homo sapien
gctgtggtcaacaatcgggatttca

SEQ ID NO: 4393622 - DNA, 25 bp, Homo sapien
tcagcggggcataagccttctggca

SEQ ID NO: 4393623 - DNA, 25 bp, Homo sapien
aggtgctgtggtcaacaatcgggat

SEQ ID NO: 4393624 - DNA, 25 bp, Homo sapien
actttcttcttcagcggggcataag

SEQ ID NO: 4393625 - DNA, 25 bp, Homo sapien
cagccgctgacgatgaccatggctc

SEQ ID NO: 4393626 - DNA, 25 bp, Homo sapien
atcagggtctctgggaacctttgca

SEQ ID NO: 4393627 - DNA, 25 bp, Homo sapien
catcagggtctctgggaacctttgc

SEQ ID NO: 4393628 - DNA, 25 bp, Homo sapien
ccccagccgctgacgatgaccatgg

SEQ ID NO: 4393629 - DNA, 25 bp, Homo sapien
tgtttggaggggtgcagcttgcagc

SEQ ID NO: 4393630 - DNA, 25 bp, Homo sapien
ctgtgagaacagagaagctatctgt

SEQ ID NO: 4393631 - DNA, 25 bp, Homo sapien
aggagagaagatactgtgagaacag

SEQ ID NO: 4393632 - DNA, 25 bp, Homo sapien
gaagctatctgtggggtgtttggag

SEQ ID NO: 4393633 - DNA, 25 bp, Homo sapien
aacttttgctgccttggacccagtt

SEQ ID NO: 4393634 - DNA, 25 bp, Homo sapien
ttttgctgccttggacccagttctg

SEQ ID NO: 4393635 - DNA, 25 bp, Homo sapien
acttttgctgccttggacccagttc

SEQ ID NO: 4393636 - DNA, 25 bp, Homo sapien
ttgctgccttggacccagttctgac

SEQ ID NO: 4393637 - DNA, 25 bp, Homo sapien
tggcaccagagcttcaccaacgtga

SEQ ID NO: 4393638 - DNA, 25 bp, Homo sapien
tggtgagtcaagcagacactgtcag

SEQ ID NO: 4393639 - DNA, 25 bp, Homo sapien
gacggactccttgtggaggcaccag

SEQ ID NO: 4393640 - DNA, 25 bp, Homo sapien
aacgtgaagacggactccttgtgga

SEQ ID NO: 4393641 - DNA, 25 bp, Homo sapien
cagatgggcatcacgaaggcattca

SEQ ID NO: 4393642 - DNA, 25 bp, Homo sapien
tgtttgacgccgagatgctgttcat

SEQ ID NO: 4393643 - DNA, 25 bp, Homo sapien
accagagccacgtcattctcgaatg

SEQ ID NO: 4393644 - DNA, 25 bp, Homo sapien
tcattttcatctgaccggagcctcc

SEQ ID NO: 4393645 - DNA, 25 bp, Homo sapien
tggacctccatcccaggtgtcctgc

SEQ ID NO: 4393646 - DNA, 25 bp, Homo sapien
gactcaggttcctggacctccatcc

SEQ ID NO: 4393647 - DNA, 25 bp, Homo sapien
ctggacctccatcccaggtgtcctg

SEQ ID NO: 4393648 - DNA, 25 bp, Homo sapien
tcttgcacttggactcaggttcctg

SEQ ID NO: 4393649 - DNA, 25 bp, Homo sapien
attttgaagtcagaagggctgagca

SEQ ID NO: 4393650 - DNA, 25 bp, Homo sapien
caagtctgaatcacgtagggtcgga

SEQ ID NO: 4393651 - DNA, 25 bp, Homo sapien
tcttccggatcgagtgactggtgga

SEQ ID NO: 4393652 - DNA, 25 bp, Homo sapien
agtgtgcggcggtcacgatccagct

SEQ ID NO: 4393653 - DNA, 25 bp, Homo sapien
tagggatttatgtagccctggtgct

SEQ ID NO: 4393654 - DNA, 25 bp, Homo sapien
ggataaattccttgcagagtaggga

SEQ ID NO: 4393655 - DNA, 25 bp, Homo sapien
tgatgccttgccaaagggatccctg

SEQ ID NO: 4393656 - DNA, 25 bp, Homo sapien
ccagagctgtccacccctggttgga

SEQ ID NO: 4393657 - DNA, 25 bp, Homo sapien
tccattgaagatcctggccatcagc

SEQ ID NO: 4393658 - DNA, 25 bp, Homo sapien
tctgggctgggcgtccattgaagat

SEQ ID NO: 4393659 - DNA, 25 bp, Homo sapien
ccatcagcttccgggagaacttggg

SEQ ID NO: 4393660 - DNA, 25 bp, Homo sapien
ttcaggtgtgacagcatggcaatcc

SEQ ID NO: 4393661 - DNA, 25 bp, Homo sapien
ggcaccacgggtaacttgacatact

SEQ ID NO: 4393662 - DNA, 25 bp, Homo sapien
taggagaagccaccgctaggtcagt

SEQ ID NO: 4393663 - DNA, 25 bp, Homo sapien
catgaaggtgctccaagggatcaca

SEQ ID NO: 4393664 - DNA, 25 bp, Homo sapien
tattactcggtagagtgaggcccag

SEQ ID NO: 4393665 - DNA, 25 bp, Homo sapien
tgatgggagcaacaatgcagaggcc

SEQ ID NO: 4393666 - DNA, 25 bp, Homo sapien
gtcacattgggattggagatgcccc

SEQ ID NO: 4393667 - DNA, 25 bp, Homo sapien
tctccgtgacgctgtaattgcccga

SEQ ID NO: 4393668 - DNA, 25 bp, Homo sapien
gcccgagcgggactcatagctagtt

SEQ ID NO: 4393669 - DNA, 25 bp, Homo sapien
cagcgctggctcaagtcatcaaaga

SEQ ID NO: 4393670 - DNA, 25 bp, Homo sapien
cagcatgtggggggccgggccttca

SEQ ID NO: 4393671 - DNA, 25 bp, Homo sapien
agcatgtggggggccgggccttcag

SEQ ID NO: 4393672 - DNA, 25 bp, Homo sapien
catgtggggggccgggccttcaggc

SEQ ID NO: 4393673 - DNA, 25 bp, Homo sapien
ccagcatgtggggggccgggccttc

SEQ ID NO: 4393674 - DNA, 25 bp, Homo sapien
cagctgcaccagagctatatcgtgg

SEQ ID NO: 4393675 - DNA, 25 bp, Homo sapien
caccgtggtgtctctacgctgggag

SEQ ID NO: 4393676 - DNA, 25 bp, Homo sapien
tccttggagactggtatcaccgtgg

SEQ ID NO: 4393677 - DNA, 25 bp, Homo sapien
atcatgcaagcccaggtagacggtg

SEQ ID NO: 4393678 - DNA, 25 bp, Homo sapien
gagcaaacttcgttccactgagttg

SEQ ID NO: 4393679 - DNA, 25 bp, Homo sapien
aaacttcgttccactgagttgcacc

SEQ ID NO: 4393680 - DNA, 25 bp, Homo sapien
tgagcaaacttcgttccactgagtt

SEQ ID NO: 4393681 - DNA, 25 bp, Homo sapien
gcaaacttcgttccactgagttgca

SEQ ID NO: 4393682 - DNA, 25 bp, Homo sapien
tcacagtgttttgcgaagagagaat

SEQ ID NO: 4393683 - DNA, 25 bp, Homo sapien
tagcaggacccctgaaatggtgggc

SEQ ID NO: 4393684 - DNA, 25 bp, Homo sapien
ggcctagtccaatgatacaccatgg

SEQ ID NO: 4393685 - DNA, 25 bp, Homo sapien
taaaagtcatagaatagctgggtgc

SEQ ID NO: 4393686 - DNA, 25 bp, Homo sapien
agactccttgggcagaacaggtata

SEQ ID NO: 4393687 - DNA, 25 bp, Homo sapien
caggtgggtaggcttctccccaata

SEQ ID NO: 4393688 - DNA, 25 bp, Homo sapien
ccttgggcagaacaggtatatatac

SEQ ID NO: 4393689 - DNA, 25 bp, Homo sapien
atactttattcatccagactccttg

SEQ ID NO: 4393690 - DNA, 25 bp, Homo sapien
taagcatacatttgtggccaccatc

SEQ ID NO: 4393691 - DNA, 25 bp, Homo sapien
aatatcttcaaatacccacagggct

SEQ ID NO: 4393692 - DNA, 25 bp, Homo sapien
tctcagctcagaatcacgaatggct

SEQ ID NO: 4393693 - DNA, 25 bp, Homo sapien
ggaaggtcccttacctgctgaatgg

SEQ ID NO: 4393694 - DNA, 25 bp, Homo sapien
aggttgttccttgtagagaaggtga

SEQ ID NO: 4393695 - DNA, 25 bp, Homo sapien
tgttgagcatcttgtaatagggctc

SEQ ID NO: 4393696 - DNA, 25 bp, Homo sapien
gacttgtatgtggtgaggttgttcc

SEQ ID NO: 4393697 - DNA, 25 bp, Homo sapien
agagaaggtgatcagcccgtgttcc

SEQ ID NO: 4393698 - DNA, 25 bp, Homo sapien
tctaggtactagctggccaatggtg

SEQ ID NO: 4393699 - DNA, 25 bp, Homo sapien
ggtataacagcctatgccagagtcg

SEQ ID NO: 4393700 - DNA, 25 bp, Homo sapien
tacagcctgtgaagctacccatggt

SEQ ID NO: 4393701 - DNA, 25 bp, Homo sapien
tgtgtggtcaactcacctgcccagt

SEQ ID NO: 4393702 - DNA, 25 bp, Homo sapien
gtggtgtctctagccgagaatggca

SEQ ID NO: 4393703 - DNA, 25 bp, Homo sapien
ctttgggtggtgtctctagccgaga

SEQ ID NO: 4393704 - DNA, 25 bp, Homo sapien
ccgagaatggcacctcagtctccag

SEQ ID NO: 4393705 - DNA, 25 bp, Homo sapien
tctagccgagaatggcacctcagtc

SEQ ID NO: 4393706 - DNA, 25 bp, Homo sapien
tgtaagccccagaagacagaacctc

SEQ ID NO: 4393707 - DNA, 25 bp, Homo sapien
gaatgatgggcaaaccctcaagtgg

SEQ ID NO: 4393708 - DNA, 25 bp, Homo sapien
taatgatgacatttcagccctgcgc

SEQ ID NO: 4393709 - DNA, 25 bp, Homo sapien
gattcataaagtcacaggcagtctg

SEQ ID NO: 4393710 - DNA, 25 bp, Homo sapien
tgctctgacttgagttcgctctcca

SEQ ID NO: 4393711 - DNA, 25 bp, Homo sapien
gacttgagttcgctctccagatcga

SEQ ID NO: 4393712 - DNA, 25 bp, Homo sapien
tcgctctccagatcgatttcatttt

SEQ ID NO: 4393713 - DNA, 25 bp, Homo sapien
gagttcgctctccagatcgatttca

SEQ ID NO: 4393714 - DNA, 25 bp, Homo sapien
tgaagatcaaagagggatcaagaga

SEQ ID NO: 4393715 - DNA, 25 bp, Homo sapien
ggatagcgctccagtttgcatgaaa

SEQ ID NO: 4393716 - DNA, 25 bp, Homo sapien
ccccttgggacaatggcaggagatt

SEQ ID NO: 4393717 - DNA, 25 bp, Homo sapien
tcttcctgggatttgcgttaaggga

SEQ ID NO: 4393718 - DNA, 25 bp, Homo sapien
cctgctgaatcaaggccatgtagga

SEQ ID NO: 4393719 - DNA, 25 bp, Homo sapien
gggaatcttgttactccacgtccca

SEQ ID NO: 4393720 - DNA, 25 bp, Homo sapien
aatcttgttactccacgtcccatcc

SEQ ID NO: 4393721 - DNA, 25 bp, Homo sapien
gtgggaatcttgttactccacgtcc

SEQ ID NO: 4393722 - DNA, 25 bp, Homo sapien
ggaatcttgttactccacgtcccat

SEQ ID NO: 4393723 - DNA, 25 bp, Homo sapien
taagcccgatgaactttgttacagt

SEQ ID NO: 4393724 - DNA, 25 bp, Homo sapien
ttcagagtgtgagaccgcctgggac

SEQ ID NO: 4393725 - DNA, 25 bp, Homo sapien
gatgggcagctaggaaattctgtgc

SEQ ID NO: 4393726 - DNA, 25 bp, Homo sapien
cgcctgggacgcatgctttggaatt

SEQ ID NO: 4393727 - DNA, 25 bp, Homo sapien
tggcttgggagggctcgattttccc

SEQ ID NO: 4393728 - DNA, 25 bp, Homo sapien
cacagctgacgagcacttggtcttt

SEQ ID NO: 4393729 - DNA, 25 bp, Homo sapien
tgtgtcacagctgacgagcacttgg

SEQ ID NO: 4393730 - DNA, 25 bp, Homo sapien
tgtcacagctgacgagcacttggtc

SEQ ID NO: 4393731 - DNA, 25 bp, Homo sapien
gggctaagcacagcagctcggtgtg

SEQ ID NO: 4393732 - DNA, 25 bp, Homo sapien
ggctaagcacagcagctcggtgtga

SEQ ID NO: 4393733 - DNA, 25 bp, Homo sapien
gctaagcacagcagctcggtgtgac

SEQ ID NO: 4393734 - DNA, 25 bp, Homo sapien
agggctaagcacagcagctcggtgt

SEQ ID NO: 4393735 - DNA, 25 bp, Homo sapien
cccgagttgtcactatggaacagga

SEQ ID NO: 4393736 - DNA, 25 bp, Homo sapien
cagccctgtatgagagcctccagcc

SEQ ID NO: 4393737 - DNA, 25 bp, Homo sapien
ggttctctcccgagttgtcactatg

SEQ ID NO: 4393738 - DNA, 25 bp, Homo sapien
tgtcactatggaacaggatcaggac

SEQ ID NO: 4393739 - DNA, 25 bp, Homo sapien
gcctgtggtatttgttccgtcttta

SEQ ID NO: 4393740 - DNA, 25 bp, Homo sapien
tgacatagcctcttcccgcaagtgg

SEQ ID NO: 4393741 - DNA, 25 bp, Homo sapien
agcagcataatttgtgaggtctggg

SEQ ID NO: 4393742 - DNA, 25 bp, Homo sapien
acatagcctcttcccgcaagtgggc

SEQ ID NO: 4393743 - DNA, 25 bp, Homo sapien
tccaggacaagtgttcattgcaggc

SEQ ID NO: 4393744 - DNA, 25 bp, Homo sapien
tagctgctaggctctctatcctggg

SEQ ID NO: 4393745 - DNA, 25 bp, Homo sapien
taaaatgcagattcacgactctcct

SEQ ID NO: 4393746 - DNA, 25 bp, Homo sapien
tcaagccaccctagtggccagtggg

SEQ ID NO: 4393747 - DNA, 25 bp, Homo sapien
cgatggtatacaggcattcagagct

SEQ ID NO: 4393748 - DNA, 25 bp, Homo sapien
tcaaatatgtcctcaaactgcaggt

SEQ ID NO: 4393749 - DNA, 25 bp, Homo sapien
tgcaggttgaccatgaaaccctcct

SEQ ID NO: 4393750 - DNA, 25 bp, Homo sapien
ggtgatcaccccagtcctttgagtg

SEQ ID NO: 4393751 - DNA, 25 bp, Homo sapien
tgtggaggatgtagccgaagcggca

SEQ ID NO: 4393752 - DNA, 25 bp, Homo sapien
gcaggagcagtagtagccgccaatg

SEQ ID NO: 4393753 - DNA, 25 bp, Homo sapien
tgttgtctgtgtggaggatgtagcc

SEQ ID NO: 4393754 - DNA, 25 bp, Homo sapien
caatgtagttgtggcagtagtggtc

SEQ ID NO: 4393755 - DNA, 25 bp, Homo sapien
aaattactctgccaggaaaaggagc

SEQ ID NO: 4393756 - DNA, 25 bp, Homo sapien
cagagattgactggcagggacacaa

SEQ ID NO: 4393757 - DNA, 25 bp, Homo sapien
tccaagtagccgtcaataagagaat

SEQ ID NO: 4393758 - DNA, 25 bp, Homo sapien
gcaaattactgatgcatgcgacaca

SEQ ID NO: 4393759 - DNA, 25 bp, Homo sapien
ccacagaaggttgccagcacctggt

SEQ ID NO: 4393760 - DNA, 25 bp, Homo sapien
gaaatctgaccggaaagtgatggac

SEQ ID NO: 4393761 - DNA, 25 bp, Homo sapien
cctcctggccgggagtctgctctgt

SEQ ID NO: 4393762 - DNA, 25 bp, Homo sapien
catgtagtgggcatcaaagcctgtg

SEQ ID NO: 4393763 - DNA, 25 bp, Homo sapien
tttgaggtcaaagagaaagggaaca

SEQ ID NO: 4393764 - DNA, 25 bp, Homo sapien
cagtttcccagctaggcttctttcc

SEQ ID NO: 4393765 - DNA, 25 bp, Homo sapien
caagatgagcagtttcccagctagg

SEQ ID NO: 4393766 - DNA, 25 bp, Homo sapien
gaaagggaacaagatgagcagtttc

SEQ ID NO: 4393767 - DNA, 25 bp, Homo sapien
agagaacaggaagcatgccccagct

SEQ ID NO: 4393768 - DNA, 25 bp, Homo sapien
ctccttgtaacgtctgggctgaagg

SEQ ID NO: 4393769 - DNA, 25 bp, Homo sapien
agctgaggcccatgggaaaatttga

SEQ ID NO: 4393770 - DNA, 25 bp, Homo sapien
gataaatggttatcacctgcagagc

SEQ ID NO: 4393771 - DNA, 25 bp, Homo sapien
tggttgttagcacccatgcccctgt

SEQ ID NO: 4393772 - DNA, 25 bp, Homo sapien
tgaaagcagcttgtaaagcctgcca

SEQ ID NO: 4393773 - DNA, 25 bp, Homo sapien
gagcatcaggtcaaatgagattcgg

SEQ ID NO: 4393774 - DNA, 25 bp, Homo sapien
ggacattaatactctgagcatcagg

SEQ ID NO: 4393775 - DNA, 25 bp, Homo sapien
tacactttcctgaagcaagctcatt

SEQ ID NO: 4393776 - DNA, 25 bp, Homo sapien
tgcacttttggcataaaatgagctt

SEQ ID NO: 4393777 - DNA, 25 bp, Homo sapien
gaagcctgtgctgtttgcacttttg

SEQ ID NO: 4393778 - DNA, 25 bp, Homo sapien
gaataagctagaattggtgtttggg

SEQ ID NO: 4393779 - DNA, 25 bp, Homo sapien
ctggagtgggagaattccaccggag

SEQ ID NO: 4393780 - DNA, 25 bp, Homo sapien
tggagtgggagaattccaccggaga

SEQ ID NO: 4393781 - DNA, 25 bp, Homo sapien
acacagcaggatgcagactgaccca

SEQ ID NO: 4393782 - DNA, 25 bp, Homo sapien
attacacagcaggatgcagactgac

SEQ ID NO: 4393783 - DNA, 25 bp, Homo sapien
ctctcaattacacagcaggatgcag

SEQ ID NO: 4393784 - DNA, 25 bp, Homo sapien
aggatgcagactgacccaatgtggc

SEQ ID NO: 4393785 - DNA, 25 bp, Homo sapien
gttgtcataactggggcttaaagcc

SEQ ID NO: 4393786 - DNA, 25 bp, Homo sapien
cctgatctcaatttctgggtaagta

SEQ ID NO: 4393787 - DNA, 25 bp, Homo sapien
ggtaagtagccaataagttgtcata

SEQ ID NO: 4393788 - DNA, 25 bp, Homo sapien
ctcaatttctgggtaagtagccaat

SEQ ID NO: 4393789 - DNA, 25 bp, Homo sapien
aagtatactacgctccacatagtca

SEQ ID NO: 4393790 - DNA, 25 bp, Homo sapien
gtgggctttcttgaagtatactacg

SEQ ID NO: 4393791 - DNA, 25 bp, Homo sapien
ttgaagtatactacgctccacatag

SEQ ID NO: 4393792 - DNA, 25 bp, Homo sapien
gctttcttgaagtatactacgctcc

SEQ ID NO: 4393793 - DNA, 25 bp, Homo sapien
tcatcgcccctatgggcctgggtgg

SEQ ID NO: 4393794 - DNA, 25 bp, Homo sapien
atgagcagtatgagcagttccatca

SEQ ID NO: 4393795 - DNA, 25 bp, Homo sapien
tcatcatcgcccctatgggcctggg

SEQ ID NO: 4393796 - DNA, 25 bp, Homo sapien
agcagtatgagcagttccatcatca

SEQ ID NO: 4393797 - DNA, 25 bp, Homo sapien
cagttatgcaacattgagaagcagc

SEQ ID NO: 4393798 - DNA, 25 bp, Homo sapien
cctgactatgataaggagtgtttgg

SEQ ID NO: 4393799 - DNA, 25 bp, Homo sapien
tgcaggctcctactggagtgcttgc

SEQ ID NO: 4393800 - DNA, 25 bp, Homo sapien
ctgtaaacatacgatttctgttttc

SEQ ID NO: 4393801 - DNA, 25 bp, Homo sapien
tgctggtgccccacggctgttggaa

SEQ ID NO: 4393802 - DNA, 25 bp, Homo sapien
ctaatgctgacattagggtggcctt

SEQ ID NO: 4393803 - DNA, 25 bp, Homo sapien
ctctgcagaaggctaatgctgacat

SEQ ID NO: 4393804 - DNA, 25 bp, Homo sapien
ggctgttggaacctctgcagaaggc

SEQ ID NO: 4393805 - DNA, 25 bp, Homo sapien
gattccaagttgaagtgcatgaagt

SEQ ID NO: 4393806 - DNA, 25 bp, Homo sapien
gatccgaaacccatctgggacagtg

SEQ ID NO: 4393807 - DNA, 25 bp, Homo sapien
tgcatgaagtaaagcttgatccgaa

SEQ ID NO: 4393808 - DNA, 25 bp, Homo sapien
ggataggagtctggataaccaggcg

SEQ ID NO: 4393809 - DNA, 25 bp, Homo sapien
gcacagagcataatagagaagcagc

SEQ ID NO: 4393810 - DNA, 25 bp, Homo sapien
cacagagcataatagagaagcagcc

SEQ ID NO: 4393811 - DNA, 25 bp, Homo sapien
ggccttggtcctcccagcttgactt

SEQ ID NO: 4393812 - DNA, 25 bp, Homo sapien
gccttggtcctcccagcttgacttg

SEQ ID NO: 4393813 - DNA, 25 bp, Homo sapien
cggccttggtcctcccagcttgact

SEQ ID NO: 4393814 - DNA, 25 bp, Homo sapien
cccggccttggtcctcccagcttga

SEQ ID NO: 4393815 - DNA, 25 bp, Homo sapien
cccggtgtggtgtccgtgatgcctt

SEQ ID NO: 4393816 - DNA, 25 bp, Homo sapien
tgtctctggaattggctggcattct

SEQ ID NO: 4393817 - DNA, 25 bp, Homo sapien
tgtcttcctaccgaaaagatctgct

SEQ ID NO: 4393818 - DNA, 25 bp, Homo sapien
tttgacttgctcttgcactcccagg

SEQ ID NO: 4393819 - DNA, 25 bp, Homo sapien
gggttctagtggaaccatctgtaca

SEQ ID NO: 4393820 - DNA, 25 bp, Homo sapien
ttgttcgggttctagtggaaccatc

SEQ ID NO: 4393821 - DNA, 25 bp, Homo sapien
cacatggagggagttgttttgttcg

SEQ ID NO: 4393822 - DNA, 25 bp, Homo sapien
gctcatttttggacctcatatgccg

SEQ ID NO: 4393823 - DNA, 25 bp, Homo sapien
ggcatcggactcatagaggaatgta

SEQ ID NO: 4393824 - DNA, 25 bp, Homo sapien
ctaaacgcaagctggcgacttcatc

SEQ ID NO: 4393825 - DNA, 25 bp, Homo sapien
caagctggcgacttcatctgaggca

SEQ ID NO: 4393826 - DNA, 25 bp, Homo sapien
ccagccctggaggaccgactgctgg

SEQ ID NO: 4393827 - DNA, 25 bp, Homo sapien
gctcagaaaagaaccacgaacattg

SEQ ID NO: 4393828 - DNA, 25 bp, Homo sapien
tcagtgagtccatgggaagagcacc

SEQ ID NO: 4393829 - DNA, 25 bp, Homo sapien
aagaaccacgaacattgagagacag

SEQ ID NO: 4393830 - DNA, 25 bp, Homo sapien
acacaagctcagaaaagaaccacga

SEQ ID NO: 4393831 - DNA, 25 bp, Homo sapien
gtagaatgatttgagcccagaggca

SEQ ID NO: 4393832 - DNA, 25 bp, Homo sapien
gcccagctcgaattctagactttgg

SEQ ID NO: 4393833 - DNA, 25 bp, Homo sapien
gaatgcgttcaatgcctgcaatgtt

SEQ ID NO: 4393834 - DNA, 25 bp, Homo sapien
aatggcagagcttttcgctggccca

SEQ ID NO: 4393835 - DNA, 25 bp, Homo sapien
gaaacatcaattttgaagaatgcgt

SEQ ID NO: 4393836 - DNA, 25 bp, Homo sapien
aatttttaccactactgagcactta

SEQ ID NO: 4393837 - DNA, 25 bp, Homo sapien
tccaaaggttcttagtaacaatgac

SEQ ID NO: 4393838 - DNA, 25 bp, Homo sapien
taacaatgacgataataatttttac

SEQ ID NO: 4393839 - DNA, 25 bp, Homo sapien
aataatttttaccactactgagcac

SEQ ID NO: 4393840 - DNA, 25 bp, Homo sapien
tgttcaactgaaggttgaggcggga

SEQ ID NO: 4393841 - DNA, 25 bp, Homo sapien
ttcaactgaaggttgaggcgggaca

SEQ ID NO: 4393842 - DNA, 25 bp, Homo sapien
cattgttcaactgaaggttgaggcg

SEQ ID NO: 4393843 - DNA, 25 bp, Homo sapien
aggttgaggcgggacagtgatgcca

SEQ ID NO: 4393844 - DNA, 25 bp, Homo sapien
aggagcagtaacagaaacaccaggt

SEQ ID NO: 4393845 - DNA, 25 bp, Homo sapien
gtggctcctgccatcggaagaacat

SEQ ID NO: 4393846 - DNA, 25 bp, Homo sapien
gcagtaacagaaacaccaggtctct

SEQ ID NO: 4393847 - DNA, 25 bp, Homo sapien
agtggctcctgccatcggaagaaca

SEQ ID NO: 4393848 - DNA, 25 bp, Homo sapien
ggactttaggatctatagacttctt

SEQ ID NO: 4393849 - DNA, 25 bp, Homo sapien
gactttaggatctatagacttcttt

SEQ ID NO: 4393850 - DNA, 25 bp, Homo sapien
catcgatcagtctgtttgcaaaggg

SEQ ID NO: 4393851 - DNA, 25 bp, Homo sapien
tttcctgatcactggctccatcgat

SEQ ID NO: 4393852 - DNA, 25 bp, Homo sapien
acttcatacagacggtgggtgagcc

SEQ ID NO: 4393853 - DNA, 25 bp, Homo sapien
aaagggctgatgcaagcattcatcc

SEQ ID NO: 4393854 - DNA, 25 bp, Homo sapien
gccaacacaaatctccttgaggata

SEQ ID NO: 4393855 - DNA, 25 bp, Homo sapien
tagtgttgccaacacaaatctcctt

SEQ ID NO: 4393856 - DNA, 25 bp, Homo sapien
tggtagtgttgccaacacaaatctc

SEQ ID NO: 4393857 - DNA, 25 bp, Homo sapien
gttgccaacacaaatctccttgagg

SEQ ID NO: 4393858 - DNA, 25 bp, Homo sapien
cttgcaacaacatggtgacacagtc

SEQ ID NO: 4393859 - DNA, 25 bp, Homo sapien
aacaacatggtgacacagtccagat

SEQ ID NO: 4393860 - DNA, 25 bp, Homo sapien
gcaacaacatggtgacacagtccag

SEQ ID NO: 4393861 - DNA, 25 bp, Homo sapien
ttgcaacaacatggtgacacagtcc

SEQ ID NO: 4393862 - DNA, 25 bp, Homo sapien
gccagatctctaggattgactcagg

SEQ ID NO: 4393863 - DNA, 25 bp, Homo sapien
atctcccctgaaggatgtgccagat

SEQ ID NO: 4393864 - DNA, 25 bp, Homo sapien
tgaaggatgtgccagatctctagga

SEQ ID NO: 4393865 - DNA, 25 bp, Homo sapien
gggagcagggccgtaatgcctatac

SEQ ID NO: 4393866 - DNA, 25 bp, Homo sapien
gctcatctgcagttgtatcatcata

SEQ ID NO: 4393867 - DNA, 25 bp, Homo sapien
tgggtgacctgttagatgctctgag

SEQ ID NO: 4393868 - DNA, 25 bp, Homo sapien
catcctccttttttgggtgacctgt

SEQ ID NO: 4393869 - DNA, 25 bp, Homo sapien
ttcttctgacttgatgtctctttcc

SEQ ID NO: 4393870 - DNA, 25 bp, Homo sapien
tgtgtacccaataccaactttggtg

SEQ ID NO: 4393871 - DNA, 25 bp, Homo sapien
tttctctaagagccttgcagtggtc

SEQ ID NO: 4393872 - DNA, 25 bp, Homo sapien
tctgctctgtgtacccaataccaac

SEQ ID NO: 4393873 - DNA, 25 bp, Homo sapien
gaaaagtggacagagtcctcagaca

SEQ ID NO: 4393874 - DNA, 25 bp, Homo sapien
tggatcttccgggacagttttgtca

SEQ ID NO: 4393875 - DNA, 25 bp, Homo sapien
cgtgaaagacggtgtggatcttccg

SEQ ID NO: 4393876 - DNA, 25 bp, Homo sapien
agaaggccagacgtgaaagacggtg

SEQ ID NO: 4393877 - DNA, 25 bp, Homo sapien
ggatcttccgggacagttttgtcat

SEQ ID NO: 4393878 - DNA, 25 bp, Homo sapien
ttctgattggctctgctggtgttca

SEQ ID NO: 4393879 - DNA, 25 bp, Homo sapien
ctggtgttcagtgcctattcctgaa

SEQ ID NO: 4393880 - DNA, 25 bp, Homo sapien
gctggtgttcagtgcctattcctga

SEQ ID NO: 4393881 - DNA, 25 bp, Homo sapien
acctcacatccagggtacaagggcc

SEQ ID NO: 4393882 - DNA, 25 bp, Homo sapien
cacatccagggtacaagggccccca

SEQ ID NO: 4393883 - DNA, 25 bp, Homo sapien
catccagggtacaagggcccccatt

SEQ ID NO: 4393884 - DNA, 25 bp, Homo sapien
caacctcacatccagggtacaaggg

SEQ ID NO: 4393885 - DNA, 25 bp, Homo sapien
cccctcggaccatggaaagggatct

SEQ ID NO: 4393886 - DNA, 25 bp, Homo sapien
gatccctcccctcggaccatggaaa

SEQ ID NO: 4393887 - DNA, 25 bp, Homo sapien
tcctccgatccctcccctcggacca

SEQ ID NO: 4393888 - DNA, 25 bp, Homo sapien
ctcccctcggaccatggaaagggat

SEQ ID NO: 4393889 - DNA, 25 bp, Homo sapien
cccatccatgagagtttttagctgc

SEQ ID NO: 4393890 - DNA, 25 bp, Homo sapien
ccatccatgagagtttttagctgcc

SEQ ID NO: 4393891 - DNA, 25 bp, Homo sapien
gatgaaatattaacttggtctcctc

SEQ ID NO: 4393892 - DNA, 25 bp, Homo sapien
tattaacttggtctcctccgttatc

SEQ ID NO: 4393893 - DNA, 25 bp, Homo sapien
aaatatcagtatcatgcccatcttt

SEQ ID NO: 4393894 - DNA, 25 bp, Homo sapien
cctgatggagtgtagcacggagaaa

SEQ ID NO: 4393895 - DNA, 25 bp, Homo sapien
gagtgtagcacggagaaacttgaat

SEQ ID NO: 4393896 - DNA, 25 bp, Homo sapien
gggctttgcacattccctgatggag

SEQ ID NO: 4393897 - DNA, 25 bp, Homo sapien
tggctagtatgagtctgccctggaa

SEQ ID NO: 4393898 - DNA, 25 bp, Homo sapien
catggtccttccttgagaagctgta

SEQ ID NO: 4393899 - DNA, 25 bp, Homo sapien
gcacacactcctggcggtaataaaa

SEQ ID NO: 4393900 - DNA, 25 bp, Homo sapien
tactgatgtatgtggtctgggcctt

SEQ ID NO: 4393901 - DNA, 25 bp, Homo sapien
ccttcctctcattgtcaattctgag

SEQ ID NO: 4393902 - DNA, 25 bp, Homo sapien
caatgtctaatacagcgttaataac

SEQ ID NO: 4393903 - DNA, 25 bp, Homo sapien
gtatgctcaatgtctaatacagcgt

SEQ ID NO: 4393904 - DNA, 25 bp, Homo sapien
ttctcatccttgtatgctcaatgtc

SEQ ID NO: 4393905 - DNA, 25 bp, Homo sapien
ggcctctgatataagggctgactcc

SEQ ID NO: 4393906 - DNA, 25 bp, Homo sapien
caaagatcgcccactcttgataaca

SEQ ID NO: 4393907 - DNA, 25 bp, Homo sapien
ctttcagacaccagcaaagatcgcc

SEQ ID NO: 4393908 - DNA, 25 bp, Homo sapien
tcacagtggcctctgatataagggc

SEQ ID NO: 4393909 - DNA, 25 bp, Homo sapien
atggcatagtaaggaatgtggaggg

SEQ ID NO: 4393910 - DNA, 25 bp, Homo sapien
catggcatagtaaggaatgtggagg

SEQ ID NO: 4393911 - DNA, 25 bp, Homo sapien
tggcatagtaaggaatgtggaggga

SEQ ID NO: 4393912 - DNA, 25 bp, Homo sapien
gcatggcatagtaaggaatgtggag

SEQ ID NO: 4393913 - DNA, 25 bp, Homo sapien
gctcaaagccttcgccagagtcact

SEQ ID NO: 4393914 - DNA, 25 bp, Homo sapien
tcactctctgggcatgagcgtgcat

SEQ ID NO: 4393915 - DNA, 25 bp, Homo sapien
aaagccttcgccagagtcactctct

SEQ ID NO: 4393916 - DNA, 25 bp, Homo sapien
attattgctcaaagccttcgccaga

SEQ ID NO: 4393917 - DNA, 25 bp, Homo sapien
tgggtgctgaacagtagcaaagaca

SEQ ID NO: 4393918 - DNA, 25 bp, Homo sapien
ctgggtgctgaacagtagcaaagac

SEQ ID NO: 4393919 - DNA, 25 bp, Homo sapien
aagcagtgatatcctctaatttgaa

SEQ ID NO: 4393920 - DNA, 25 bp, Homo sapien
ggaagcagtgatatcctctaatttg

SEQ ID NO: 4393921 - DNA, 25 bp, Homo sapien
ctggtaagtgtagactcagagcaac

SEQ ID NO: 4393922 - DNA, 25 bp, Homo sapien
tgtaggaatccaaggttaactggta

SEQ ID NO: 4393923 - DNA, 25 bp, Homo sapien
tcacagcagccagtagcattgagct

SEQ ID NO: 4393924 - DNA, 25 bp, Homo sapien
tcacaagggtatatgcttctctaag

SEQ ID NO: 4393925 - DNA, 25 bp, Homo sapien
gatatggacaatactagttaagaaa

SEQ ID NO: 4393926 - DNA, 25 bp, Homo sapien
agggatcagaggtctgatatggaca

SEQ ID NO: 4393927 - DNA, 25 bp, Homo sapien
caagggtctcgctgaagacttggag

SEQ ID NO: 4393928 - DNA, 25 bp, Homo sapien
taatgcaagggtctcgctgaagact

SEQ ID NO: 4393929 - DNA, 25 bp, Homo sapien
ccatagccgggtttgagttagcaga

SEQ ID NO: 4393930 - DNA, 25 bp, Homo sapien
gcagctcaagcctcatttcatcctg

SEQ ID NO: 4393931 - DNA, 25 bp, Homo sapien
agttagcagatctctgcagctcaag

SEQ ID NO: 4393932 - DNA, 25 bp, Homo sapien
ttccagggcatcattctccgtctgg

SEQ ID NO: 4393933 - DNA, 25 bp, Homo sapien
ttctgtccctgtagacttaacacac

SEQ ID NO: 4393934 - DNA, 25 bp, Homo sapien
agatttggtcacacacaaaatccag

SEQ ID NO: 4393935 - DNA, 25 bp, Homo sapien
aaggctttaagagctcaaatgtttc

SEQ ID NO: 4393936 - DNA, 25 bp, Homo sapien
caaaatccagtttttacagctgcgc

SEQ ID NO: 4393937 - DNA, 25 bp, Homo sapien
caatctcaaacatacggcgttcggt

SEQ ID NO: 4393938 - DNA, 25 bp, Homo sapien
gatagacgccattgtcgcttcgtgc

SEQ ID NO: 4393939 - DNA, 25 bp, Homo sapien
tgaatgccaagtaagaactcacctg

SEQ ID NO: 4393940 - DNA, 25 bp, Homo sapien
gaactgtgaccgactgcgcttatca

SEQ ID NO: 4393941 - DNA, 25 bp, Homo sapien
gaaactgacggagtctggggtccga

SEQ ID NO: 4393942 - DNA, 25 bp, Homo sapien
agccagcgcgcactggaggcggcag

SEQ ID NO: 4393943 - DNA, 25 bp, Homo sapien
agtctggggtccgagggagcgccgg

SEQ ID NO: 4393944 - DNA, 25 bp, Homo sapien
gccaggacgatggacagcgcagcca

SEQ ID NO: 4393945 - DNA, 25 bp, Homo sapien
agcagcgatggctccgaacctcgct

SEQ ID NO: 4393946 - DNA, 25 bp, Homo sapien
gctggtcaaactctaggcgcggatc

SEQ ID NO: 4393947 - DNA, 25 bp, Homo sapien
cgaacctcgctcctaaagcggcttg

SEQ ID NO: 4393948 - DNA, 25 bp, Homo sapien
ccgcgaaagccgagctggagagtgg

SEQ ID NO: 4393949 - DNA, 25 bp, Homo sapien
cagcaagggcgatgaggttggcttt

SEQ ID NO: 4393950 - DNA, 25 bp, Homo sapien
ccttcttgagaacagcaagggcgat

SEQ ID NO: 4393951 - DNA, 25 bp, Homo sapien
tcttgagaacagcaagggcgatgag

SEQ ID NO: 4393952 - DNA, 25 bp, Homo sapien
caagggcgatgaggttggctttgcc

SEQ ID NO: 4393953 - DNA, 25 bp, Homo sapien
ttctgataaattggtgaaccaatgc

SEQ ID NO: 4393954 - DNA, 25 bp, Homo sapien
gcagttccttgccataaaaactttc

SEQ ID NO: 4393955 - DNA, 25 bp, Homo sapien
tttctgataaattggtgaaccaatg

SEQ ID NO: 4393956 - DNA, 25 bp, Homo sapien
ctttctgataaattggtgaaccaat

SEQ ID NO: 4393957 - DNA, 25 bp, Homo sapien
caaggttggtaatgggttcgtcatc

SEQ ID NO: 4393958 - DNA, 25 bp, Homo sapien
ttcaggtactctgcaaacgactgcc

SEQ ID NO: 4393959 - DNA, 25 bp, Homo sapien
ggtgctctgatttgcagactaccag

SEQ ID NO: 4393960 - DNA, 25 bp, Homo sapien
actgtcttgttgtactggtgctctg

SEQ ID NO: 4393961 - DNA, 25 bp, Homo sapien
cctagttctttgctcttgcaggtcc

SEQ ID NO: 4393962 - DNA, 25 bp, Homo sapien
ttgtactcttttgctgaacccaacc

SEQ ID NO: 4393963 - DNA, 25 bp, Homo sapien
cttccagattgcctagttctttgct

SEQ ID NO: 4393964 - DNA, 25 bp, Homo sapien
tcttttgctgaacccaaccaaataa

SEQ ID NO: 4393965 - DNA, 25 bp, Homo sapien
aggtggggcacagtgctcaaagctg

SEQ ID NO: 4393966 - DNA, 25 bp, Homo sapien
tctaaccaaacactccatccctgaa

SEQ ID NO: 4393967 - DNA, 25 bp, Homo sapien
ctgagaacacatctaaccaaacact

SEQ ID NO: 4393968 - DNA, 25 bp, Homo sapien
ccaaacactccatccctgaacctca

SEQ ID NO: 4393969 - DNA, 25 bp, Homo sapien
cctcatctgccccttctctcaccat

SEQ ID NO: 4393970 - DNA, 25 bp, Homo sapien
cacatctgcagatctgcctcatctg

SEQ ID NO: 4393971 - DNA, 25 bp, Homo sapien
acatctgcagatctgcctcatctgc

SEQ ID NO: 4393972 - DNA, 25 bp, Homo sapien
atccacatctgcagatctgcctcat

SEQ ID NO: 4393973 - DNA, 25 bp, Homo sapien
taatgcaatcctctcattccgcaga

SEQ ID NO: 4393974 - DNA, 25 bp, Homo sapien
tccgcagatgcattaactgaggccc

SEQ ID NO: 4393975 - DNA, 25 bp, Homo sapien
gatcaagtccagactgtgtcctccc

SEQ ID NO: 4393976 - DNA, 25 bp, Homo sapien
cccagagaggtgaccggattgtcca

SEQ ID NO: 4393977 - DNA, 25 bp, Homo sapien
aaagaaggcaggactgaggaaggag

SEQ ID NO: 4393978 - DNA, 25 bp, Homo sapien
gaaggcaggactgaggaaggagaac

SEQ ID NO: 4393979 - DNA, 25 bp, Homo sapien
ctaaaagaaggcaggactgaggaag

SEQ ID NO: 4393980 - DNA, 25 bp, Homo sapien
taaaagaaggcaggactgaggaagg

SEQ ID NO: 4393981 - DNA, 25 bp, Homo sapien
ggtaaacaacgagcaggcagagaga

SEQ ID NO: 4393982 - DNA, 25 bp, Homo sapien
acaagaagttgtagccggatcccgc

SEQ ID NO: 4393983 - DNA, 25 bp, Homo sapien
tcacagaactctgcacgatgcggcc

SEQ ID NO: 4393984 - DNA, 25 bp, Homo sapien
ctgggccctcggcttggaggcttca

SEQ ID NO: 4393985 - DNA, 25 bp, Homo sapien
gcttcagaggtgtaggtggtcacct

SEQ ID NO: 4393986 - DNA, 25 bp, Homo sapien
cacaagtggtcaagctggtacacat

SEQ ID NO: 4393987 - DNA, 25 bp, Homo sapien
atgatgagctcccagctgtccgctg

SEQ ID NO: 4393988 - DNA, 25 bp, Homo sapien
gatgagctcccagctgtccgctggc

SEQ ID NO: 4393989 - DNA, 25 bp, Homo sapien
ttcttccactcacaagtggtcaagc

SEQ ID NO: 4393990 - DNA, 25 bp, Homo sapien
tcagaatcctcatcggcaggactgg

SEQ ID NO: 4393991 - DNA, 25 bp, Homo sapien
cacagaaagagcacggataggtacg

SEQ ID NO: 4393992 - DNA, 25 bp, Homo sapien
gcaggactgggagtaaacaggaccc

SEQ ID NO: 4393993 - DNA, 25 bp, Homo sapien
agaggtggcagttcgagctcagccc

SEQ ID NO: 4393994 - DNA, 25 bp, Homo sapien
tatttggtggccctgcttcacccaa

SEQ ID NO: 4393995 - DNA, 25 bp, Homo sapien
aggcaaggactatttggtggccctg

SEQ ID NO: 4393996 - DNA, 25 bp, Homo sapien
ttcacccaactgctcttctagcatt

SEQ ID NO: 4393997 - DNA, 25 bp, Homo sapien
ggactatttggtggccctgcttcac

SEQ ID NO: 4393998 - DNA, 25 bp, Homo sapien
gacagcagggatttgatgctgtctc

SEQ ID NO: 4393999 - DNA, 25 bp, Homo sapien
ccaaaaccacccagagtcattgagt

SEQ ID NO: 4394000 - DNA, 25 bp, Homo sapien
tcaggagaccagtgcttaaggggca

SEQ ID NO: 4394001 - DNA, 25 bp, Homo sapien
tgcttaaggggcacctcctcaggcc

SEQ ID NO: 4394002 - DNA, 25 bp, Homo sapien
gacagagacccaccagtgacataaa

SEQ ID NO: 4394003 - DNA, 25 bp, Homo sapien
ttggacagagacccaccagtgacat

SEQ ID NO: 4394004 - DNA, 25 bp, Homo sapien
ttttgtcctgtcgtgctcttttgga

SEQ ID NO: 4394005 - DNA, 25 bp, Homo sapien
tgtcctgtcgtgctcttttggacag

SEQ ID NO: 4394006 - DNA, 25 bp, Homo sapien
ccggacacctttagctgcgggacct

SEQ ID NO: 4394007 - DNA, 25 bp, Homo sapien
acacctttagctgcgggaccttgga

SEQ ID NO: 4394008 - DNA, 25 bp, Homo sapien
tgcgggaccttggactagttcctcc

SEQ ID NO: 4394009 - DNA, 25 bp, Homo sapien
tagctgcgggaccttggactagttc

SEQ ID NO: 4394010 - DNA, 25 bp, Homo sapien
gggccagtgaccagaaccacacttg

SEQ ID NO: 4394011 - DNA, 25 bp, Homo sapien
tcggagcctgctgcaaaggcactgc

SEQ ID NO: 4394012 - DNA, 25 bp, Homo sapien
tgaggcctcgagctggcaagtcctt

SEQ ID NO: 4394013 - DNA, 25 bp, Homo sapien
tcaggtcaaacttgatccttggcgt

SEQ ID NO: 4394014 - DNA, 25 bp, Homo sapien
aaagggcctggagtccgcagtccct

SEQ ID NO: 4394015 - DNA, 25 bp, Homo sapien
aagggcctggagtccgcagtccctc

SEQ ID NO: 4394016 - DNA, 25 bp, Homo sapien
agaaagggcctggagtccgcagtcc

SEQ ID NO: 4394017 - DNA, 25 bp, Homo sapien
tcagaaagggcctggagtccgcagt

SEQ ID NO: 4394018 - DNA, 25 bp, Homo sapien
ccaaggtaccaggaacctagcctca

SEQ ID NO: 4394019 - DNA, 25 bp, Homo sapien
caaggtaccaggaacctagcctcat

SEQ ID NO: 4394020 - DNA, 25 bp, Homo sapien
gccaaggtaccaggaacctagcctc

SEQ ID NO: 4394021 - DNA, 25 bp, Homo sapien
gacgctcgtttttgagaatgcagca

SEQ ID NO: 4394022 - DNA, 25 bp, Homo sapien
ctcaaaagacgctcgtttttgagaa

SEQ ID NO: 4394023 - DNA, 25 bp, Homo sapien
cgctcgtttttgagaatgcagcagc

SEQ ID NO: 4394024 - DNA, 25 bp, Homo sapien
aaagacgctcgtttttgagaatgca

SEQ ID NO: 4394025 - DNA, 25 bp, Homo sapien
tagttataacacaagcatgacgcag

SEQ ID NO: 4394026 - DNA, 25 bp, Homo sapien
gaaagaggcactacatcatgggatg

SEQ ID NO: 4394027 - DNA, 25 bp, Homo sapien
ttcaaaaagggatggtgcacgctcg

SEQ ID NO: 4394028 - DNA, 25 bp, Homo sapien
tgagacaaacattcccaaagagagt

SEQ ID NO: 4394029 - DNA, 25 bp, Homo sapien
cagtggctgacacgcggtattgcac

SEQ ID NO: 4394030 - DNA, 25 bp, Homo sapien
tttggggagctccggaggcaggtca

SEQ ID NO: 4394031 - DNA, 25 bp, Homo sapien
ggggagctccggaggcaggtcagtg

SEQ ID NO: 4394032 - DNA, 25 bp, Homo sapien
gtcagtggctgacacgcggtattgc

SEQ ID NO: 4394033 - DNA, 25 bp, Homo sapien
cttttgtgacggaaatgcaggttac

SEQ ID NO: 4394034 - DNA, 25 bp, Homo sapien
tggtgttggtgatggcgccatgctt

SEQ ID NO: 4394035 - DNA, 25 bp, Homo sapien
tctggcgcaagtgaagtcgcagctg

SEQ ID NO: 4394036 - DNA, 25 bp, Homo sapien
gaagtcgcagctggcttttgtgacg

SEQ ID NO: 4394037 - DNA, 25 bp, Homo sapien
ctgcagggatatcagaggcaaactg

SEQ ID NO: 4394038 - DNA, 25 bp, Homo sapien
tgcagggatatcagaggcaaactgt

SEQ ID NO: 4394039 - DNA, 25 bp, Homo sapien
gatatcagaggcaaactgttagctg

SEQ ID NO: 4394040 - DNA, 25 bp, Homo sapien
agggatatcagaggcaaactgttag

SEQ ID NO: 4394041 - DNA, 25 bp, Homo sapien
gacaaatgtatggaactaacgtaag

SEQ ID NO: 4394042 - DNA, 25 bp, Homo sapien
aacattagcaagtggagccgtttct

SEQ ID NO: 4394043 - DNA, 25 bp, Homo sapien
taacaataggataaaatgggtgcgg

SEQ ID NO: 4394044 - DNA, 25 bp, Homo sapien
gggtatatatcctagataagctaac

SEQ ID NO: 4394045 - DNA, 25 bp, Homo sapien
aagatgagtcccctaatgcttgggc

SEQ ID NO: 4394046 - DNA, 25 bp, Homo sapien
ccattgggcccagatctaggtcttc

SEQ ID NO: 4394047 - DNA, 25 bp, Homo sapien
accattagcgtagtggttgccccac

SEQ ID NO: 4394048 - DNA, 25 bp, Homo sapien
taaatgtgcatctagcccagtatgg

SEQ ID NO: 4394049 - DNA, 25 bp, Homo sapien
tcagagagcggcctcaagaggctta

SEQ ID NO: 4394050 - DNA, 25 bp, Homo sapien
cagagagcggcctcaagaggcttac

SEQ ID NO: 4394051 - DNA, 25 bp, Homo sapien
ccggaaacgggtgccacagatttca

SEQ ID NO: 4394052 - DNA, 25 bp, Homo sapien
gatttcacagggatagggcttctca

SEQ ID NO: 4394053 - DNA, 25 bp, Homo sapien
accagtgtggataagcacatgggca

SEQ ID NO: 4394054 - DNA, 25 bp, Homo sapien
tggattcgcaggtggctcttcagag

SEQ ID NO: 4394055 - DNA, 25 bp, Homo sapien
acagccagtgagtgggcctttctcc

SEQ ID NO: 4394056 - DNA, 25 bp, Homo sapien
ctgaacgaagaagaaggcatgagag

SEQ ID NO: 4394057 - DNA, 25 bp, Homo sapien
tgggcagcccctcattagcacacag

SEQ ID NO: 4394058 - DNA, 25 bp, Homo sapien
aagaagaaggcatgagaggtcttct

SEQ ID NO: 4394059 - DNA, 25 bp, Homo sapien
aatctggctccgcaggtttcgcatt

SEQ ID NO: 4394060 - DNA, 25 bp, Homo sapien
tgaattcgagtgtgggttttcaggt

SEQ ID NO: 4394061 - DNA, 25 bp, Homo sapien
cgcaggtttcgcatttgtagggctt

SEQ ID NO: 4394062 - DNA, 25 bp, Homo sapien
ctccagagtgaattcgagtgtgggt

SEQ ID NO: 4394063 - DNA, 25 bp, Homo sapien
cccacagatgttgcaacgatagggt

SEQ ID NO: 4394064 - DNA, 25 bp, Homo sapien
gatgttgcaacgatagggtttctca

SEQ ID NO: 4394065 - DNA, 25 bp, Homo sapien
cacagatgttgcaacgatagggttt

SEQ ID NO: 4394066 - DNA, 25 bp, Homo sapien
gccccacagatgttgcaacgatagg

SEQ ID NO: 4394067 - DNA, 25 bp, Homo sapien
tacagggagtagatgagtcgagtca

SEQ ID NO: 4394068 - DNA, 25 bp, Homo sapien
caataattgtggagagttcgggtcg

SEQ ID NO: 4394069 - DNA, 25 bp, Homo sapien
tagtctcttcacctgtacagtggga

SEQ ID NO: 4394070 - DNA, 25 bp, Homo sapien
tacagtgggattaacacttctgacc

SEQ ID NO: 4394071 - DNA, 25 bp, Homo sapien
tcattgcagaagaaggccccgttct

SEQ ID NO: 4394072 - DNA, 25 bp, Homo sapien
gaagcggcagtcacactcattgcag

SEQ ID NO: 4394073 - DNA, 25 bp, Homo sapien
tagggtttgtcactgtgggtctgca

SEQ ID NO: 4394074 - DNA, 25 bp, Homo sapien
tatggacggtcttgtggctggcgag

SEQ ID NO: 4394075 - DNA, 25 bp, Homo sapien
caccaaagtcagcacgaggaaggga

SEQ ID NO: 4394076 - DNA, 25 bp, Homo sapien
tggtagggggacaccaaagtcagca

SEQ ID NO: 4394077 - DNA, 25 bp, Homo sapien
gaggtagggctctaaggccgctctc

SEQ ID NO: 4394078 - DNA, 25 bp, Homo sapien
gtagggctctaaggccgctctcctc

SEQ ID NO: 4394079 - DNA, 25 bp, Homo sapien
tcttatcattcagagtcttagccat

SEQ ID NO: 4394080 - DNA, 25 bp, Homo sapien
cagagtcttagccatagagaaggga

SEQ ID NO: 4394081 - DNA, 25 bp, Homo sapien
catgggagctcggagcaaaggatct

SEQ ID NO: 4394082 - DNA, 25 bp, Homo sapien
ccacccgacattcatgggagctcgg

SEQ ID NO: 4394083 - DNA, 25 bp, Homo sapien
gccagcggtgtggaggcacatctct

SEQ ID NO: 4394084 - DNA, 25 bp, Homo sapien
tctcctcagggaacgtggggccagc

SEQ ID NO: 4394085 - DNA, 25 bp, Homo sapien
gagtggtgagtggctctcgctgctg

SEQ ID NO: 4394086 - DNA, 25 bp, Homo sapien
tgagagccgcaggacgtgcacttcg

SEQ ID NO: 4394087 - DNA, 25 bp, Homo sapien
tttgaggccctcagccacactgtag

SEQ ID NO: 4394088 - DNA, 25 bp, Homo sapien
tcacgaccccgataggccatgatgt

SEQ ID NO: 4394089 - DNA, 25 bp, Homo sapien
taacgatgttattgagccggctggc

SEQ ID NO: 4394090 - DNA, 25 bp, Homo sapien
catccggctgttgaggaactcttca

SEQ ID NO: 4394091 - DNA, 25 bp, Homo sapien
tcatacacaaacgagtagcctactg

SEQ ID NO: 4394092 - DNA, 25 bp, Homo sapien
gacacttttggaggatcatacacaa

SEQ ID NO: 4394093 - DNA, 25 bp, Homo sapien
gaaatccagcctgaaattgggaaga

SEQ ID NO: 4394094 - DNA, 25 bp, Homo sapien
aacgcatttatgctagaagcctgga

SEQ ID NO: 4394095 - DNA, 25 bp, Homo sapien
tgcaggtacatagccgtggccatca

SEQ ID NO: 4394096 - DNA, 25 bp, Homo sapien
cccgcaaattgagccgagatgtgta

SEQ ID NO: 4394097 - DNA, 25 bp, Homo sapien
tgatgttgccctcccgcaaattgag

SEQ ID NO: 4394098 - DNA, 25 bp, Homo sapien
taaacttccggcaagtgtccacaac

SEQ ID NO: 4394099 - DNA, 25 bp, Homo sapien
cactaaggttgcatttcaactggtc

SEQ ID NO: 4394100 - DNA, 25 bp, Homo sapien
ggttgcatttcaactggtctgtaaa

SEQ ID NO: 4394101 - DNA, 25 bp, Homo sapien
tgatcacactaaggttgcatttcaa

SEQ ID NO: 4394102 - DNA, 25 bp, Homo sapien
ctagattgatcacactaaggttgca

SEQ ID NO: 4394103 - DNA, 25 bp, Homo sapien
tgctctgaaaactcgaaatacttga

SEQ ID NO: 4394104 - DNA, 25 bp, Homo sapien
tgcatatactctgaacacccatgga

SEQ ID NO: 4394105 - DNA, 25 bp, Homo sapien
gaagaatcagctagttcactctcac

SEQ ID NO: 4394106 - DNA, 25 bp, Homo sapien
tcaggtgcttagagtagatgttgga

SEQ ID NO: 4394107 - DNA, 25 bp, Homo sapien
cgattaaggttgagaagaacatcac

SEQ ID NO: 4394108 - DNA, 25 bp, Homo sapien
gaacatcactggcatggcgggtgaa

SEQ ID NO: 4394109 - DNA, 25 bp, Homo sapien
catgaggaccgttttatgggctcta

SEQ ID NO: 4394110 - DNA, 25 bp, Homo sapien
cagtcaagatgtctcgactccggag

SEQ ID NO: 4394111 - DNA, 25 bp, Homo sapien
ccttgcttcacagtccaaaattttg

SEQ ID NO: 4394112 - DNA, 25 bp, Homo sapien
cttgcttcacagtccaaaattttgc

SEQ ID NO: 4394113 - DNA, 25 bp, Homo sapien
ttgcttcacagtccaaaattttgct

SEQ ID NO: 4394114 - DNA, 25 bp, Homo sapien
tgcttcacagtccaaaattttgctc

SEQ ID NO: 4394115 - DNA, 25 bp, Homo sapien
tccttcccccacacaaacactttgc

SEQ ID NO: 4394116 - DNA, 25 bp, Homo sapien
gcaccctgatgtgggtgaatctcat

SEQ ID NO: 4394117 - DNA, 25 bp, Homo sapien
gacagcaccctgatgtgggtgaatc

SEQ ID NO: 4394118 - DNA, 25 bp, Homo sapien
actttgccccattccaggctgctga

SEQ ID NO: 4394119 - DNA, 25 bp, Homo sapien
aatcccatcggctccaaggttagtg

SEQ ID NO: 4394120 - DNA, 25 bp, Homo sapien
aatgccgcaggtgtggaagcaccac

SEQ ID NO: 4394121 - DNA, 25 bp, Homo sapien
tgtacatacacgaggcgcaggtcct

SEQ ID NO: 4394122 - DNA, 25 bp, Homo sapien
gaaccacaggaagcccagatttgcc

SEQ ID NO: 4394123 - DNA, 25 bp, Homo sapien
gcaagcctaggcagacttcgctacc

SEQ ID NO: 4394124 - DNA, 25 bp, Homo sapien
gcggcccttaatttagttacattca

SEQ ID NO: 4394125 - DNA, 25 bp, Homo sapien
ctttgtggtatgaccgtggcggccc

SEQ ID NO: 4394126 - DNA, 25 bp, Homo sapien
ccattttctcgctcacacataagag

SEQ ID NO: 4394127 - DNA, 25 bp, Homo sapien
acgtagtcaatctcggctctgcgga

SEQ ID NO: 4394128 - DNA, 25 bp, Homo sapien
tttccagtccgaacagaggcgcgtt

SEQ ID NO: 4394129 - DNA, 25 bp, Homo sapien
tagagacacagcttggactcggcaa

SEQ ID NO: 4394130 - DNA, 25 bp, Homo sapien
taattggtctcggtagcaggctccg

SEQ ID NO: 4394131 - DNA, 25 bp, Homo sapien
gccaggctactatgcagaggatgtt

SEQ ID NO: 4394132 - DNA, 25 bp, Homo sapien
gccatcttaagtcacgagctcggag

SEQ ID NO: 4394133 - DNA, 25 bp, Homo sapien
tctaaggagctgagataaacccgcc

SEQ ID NO: 4394134 - DNA, 25 bp, Homo sapien
taaactcatggttctggcagccgct

SEQ ID NO: 4394135 - DNA, 25 bp, Homo sapien
aaactttggaggttgtatgccatcc

SEQ ID NO: 4394136 - DNA, 25 bp, Homo sapien
gggcaagcagcgaggcctttctgat

SEQ ID NO: 4394137 - DNA, 25 bp, Homo sapien
tctgtcagtcctagcatctggtcag

SEQ ID NO: 4394138 - DNA, 25 bp, Homo sapien
tatgccatccccattggagggtgcc

SEQ ID NO: 4394139 - DNA, 25 bp, Homo sapien
ggccgcgaactcgatctcagcccac

SEQ ID NO: 4394140 - DNA, 25 bp, Homo sapien
ctaggtggcaggccagcccgtccga

SEQ ID NO: 4394141 - DNA, 25 bp, Homo sapien
tcgatctcagcccaccgctaggtgg

SEQ ID NO: 4394142 - DNA, 25 bp, Homo sapien
accgctaggtggcaggccagcccgt

SEQ ID NO: 4394143 - DNA, 25 bp, Homo sapien
cacaacgcggtatctggagctggtt

SEQ ID NO: 4394144 - DNA, 25 bp, Homo sapien
ttgattcacagagggctacagacca

SEQ ID NO: 4394145 - DNA, 25 bp, Homo sapien
cacttgttgcgcagtgctggaaacc

SEQ ID NO: 4394146 - DNA, 25 bp, Homo sapien
gaatggcactcgacagtattggcag

SEQ ID NO: 4394147 - DNA, 25 bp, Homo sapien
tcaaaaattgacttttgccaatagt

SEQ ID NO: 4394148 - DNA, 25 bp, Homo sapien
gacttttgccaatagtttcacccac

SEQ ID NO: 4394149 - DNA, 25 bp, Homo sapien
aaattgacttttgccaatagtttca

SEQ ID NO: 4394150 - DNA, 25 bp, Homo sapien
taagttcacttcccaatatttttca

SEQ ID NO: 4394151 - DNA, 25 bp, Homo sapien
caaagtgggttgtgagtgtcattac

SEQ ID NO: 4394152 - DNA, 25 bp, Homo sapien
caacaaagtgggttgtgagtgtcat

SEQ ID NO: 4394153 - DNA, 25 bp, Homo sapien
tttttcacaacaaagtgggttgtga

SEQ ID NO: 4394154 - DNA, 25 bp, Homo sapien
cgaggggtggcgctgctgcaccgcc

SEQ ID NO: 4394155 - DNA, 25 bp, Homo sapien
taaaactagccaatgcttcggcctc

SEQ ID NO: 4394156 - DNA, 25 bp, Homo sapien
caagtcgcccagtttttatgaacag

SEQ ID NO: 4394157 - DNA, 25 bp, Homo sapien
tcttcaagggctcagcaaacgacaa

SEQ ID NO: 4394158 - DNA, 25 bp, Homo sapien
gggttttgacatctagccgtggcta

SEQ ID NO: 4394159 - DNA, 25 bp, Homo sapien
gactagggccagatgaacttcaact

SEQ ID NO: 4394160 - DNA, 25 bp, Homo sapien
atttacgaggttctgttctagtgcc

SEQ ID NO: 4394161 - DNA, 25 bp, Homo sapien
ctccaggaatagcgtgtggactagg

SEQ ID NO: 4394162 - DNA, 25 bp, Homo sapien
tgaacttcaacttgggctgcagatt

SEQ ID NO: 4394163 - DNA, 25 bp, Homo sapien
gtgacagcttgggactttcagcacc

SEQ ID NO: 4394164 - DNA, 25 bp, Homo sapien
gcgttacaagactttcctcctggaa

SEQ ID NO: 4394165 - DNA, 25 bp, Homo sapien
cacaaccatcgtagaagggaacaca

SEQ ID NO: 4394166 - DNA, 25 bp, Homo sapien
catttatctgctcaactgtcaggac

SEQ ID NO: 4394167 - DNA, 25 bp, Homo sapien
ttaccacggtcactacatccggcag

SEQ ID NO: 4394168 - DNA, 25 bp, Homo sapien
taacacggcatcataaaggcaacgc

SEQ ID NO: 4394169 - DNA, 25 bp, Homo sapien
taaggacctcgggaatctgaagcct

SEQ ID NO: 4394170 - DNA, 25 bp, Homo sapien
ttactccctcgaggagagccacagg

SEQ ID NO: 4394171 - DNA, 25 bp, Homo sapien
aaaatacaaacaccgcagcggccag

SEQ ID NO: 4394172 - DNA, 25 bp, Homo sapien
tttttacagagcttgcaccatggga

SEQ ID NO: 4394173 - DNA, 25 bp, Homo sapien
acagagtcacgcagcgcccaaaata

SEQ ID NO: 4394174 - DNA, 25 bp, Homo sapien
aacagccattgggagccaacacaga

SEQ ID NO: 4394175 - DNA, 25 bp, Homo sapien
aaaccggccgattcactcaaagaca

SEQ ID NO: 4394176 - DNA, 25 bp, Homo sapien
agactagcccgaatcaccccccaag

SEQ ID NO: 4394177 - DNA, 25 bp, Homo sapien
cccaagcactgtctcgtcctctctg

SEQ ID NO: 4394178 - DNA, 25 bp, Homo sapien
cccaaaccggccgattcactcaaag

SEQ ID NO: 4394179 - DNA, 25 bp, Homo sapien
tagatacacatagaaaacttggagc

SEQ ID NO: 4394180 - DNA, 25 bp, Homo sapien
catttatatcaatagatacacatag

SEQ ID NO: 4394181 - DNA, 25 bp, Homo sapien
aaacttggagccaaagcatttggca

SEQ ID NO: 4394182 - DNA, 25 bp, Homo sapien
cttggagccaaagcatttggcaaga

SEQ ID NO: 4394183 - DNA, 25 bp, Homo sapien
cggcggcagcaacagcaataatcac

SEQ ID NO: 4394184 - DNA, 25 bp, Homo sapien
agcggcaccagcggcaacagcggcg

SEQ ID NO: 4394185 - DNA, 25 bp, Homo sapien
gcagcggcaccagcggcaacagcgg

SEQ ID NO: 4394186 - DNA, 25 bp, Homo sapien
cggcagcggcaccagcggcaacagc

SEQ ID NO: 4394187 - DNA, 25 bp, Homo sapien
atcaccacttctaagaaccccagtt

SEQ ID NO: 4394188 - DNA, 25 bp, Homo sapien
tcttgcatcaccacttctaagaacc

SEQ ID NO: 4394189 - DNA, 25 bp, Homo sapien
ctagaaacttcttgcatcaccactt

SEQ ID NO: 4394190 - DNA, 25 bp, Homo sapien
aacttcttgcatcaccacttctaag

SEQ ID NO: 4394191 - DNA, 25 bp, Homo sapien
ctaagaatcaacagagctcaattct

SEQ ID NO: 4394192 - DNA, 25 bp, Homo sapien
tcaacagagctcaattctcggaatt

SEQ ID NO: 4394193 - DNA, 25 bp, Homo sapien
cagagctcaattctcggaatttgag

SEQ ID NO: 4394194 - DNA, 25 bp, Homo sapien
gaatcaacagagctcaattctcgga

SEQ ID NO: 4394195 - DNA, 25 bp, Homo sapien
ggtcctcataagcagagcgtctcgg

SEQ ID NO: 4394196 - DNA, 25 bp, Homo sapien
cactggccggcatatttcgaggtcc

SEQ ID NO: 4394197 - DNA, 25 bp, Homo sapien
tccgagatttttactgcccctggcc

SEQ ID NO: 4394198 - DNA, 25 bp, Homo sapien
caaagccacaagattttttcactgg

SEQ ID NO: 4394199 - DNA, 25 bp, Homo sapien
tgacgtcggcgccttcgctgtagca

SEQ ID NO: 4394200 - DNA, 25 bp, Homo sapien
tcgctgtagcaaagctcggcctctg

SEQ ID NO: 4394201 - DNA, 25 bp, Homo sapien
aactaatttgctattcggtgacata

SEQ ID NO: 4394202 - DNA, 25 bp, Homo sapien
tcctcctctgtgacgtcggcgcctt

SEQ ID NO: 4394203 - DNA, 25 bp, Homo sapien
ttctttcttacccataaactcagca

SEQ ID NO: 4394204 - DNA, 25 bp, Homo sapien
tcttacccataaactcagcagatcg

SEQ ID NO: 4394205 - DNA, 25 bp, Homo sapien
tttcttacccataaactcagcagat

SEQ ID NO: 4394206 - DNA, 25 bp, Homo sapien
ttacccataaactcagcagatcgag

SEQ ID NO: 4394207 - DNA, 25 bp, Homo sapien
tttcggtgagtctcttttactttga

SEQ ID NO: 4394208 - DNA, 25 bp, Homo sapien
ttcggtgagtctcttttactttgaa

SEQ ID NO: 4394209 - DNA, 25 bp, Homo sapien
tctgaagccagctcgatggcaggga

SEQ ID NO: 4394210 - DNA, 25 bp, Homo sapien
acctccaccggcagaaacctttcag

SEQ ID NO: 4394211 - DNA, 25 bp, Homo sapien
tccaccggcagaaacctttcagctg

SEQ ID NO: 4394212 - DNA, 25 bp, Homo sapien
gagagcggaagaatgtgcggaggga

SEQ ID NO: 4394213 - DNA, 25 bp, Homo sapien
caaccaacacctaatgcaggaagat

SEQ ID NO: 4394214 - DNA, 25 bp, Homo sapien
tgccagaagttgtaaccacttattt

SEQ ID NO: 4394215 - DNA, 25 bp, Homo sapien
attccagacctttgggtgatagact

SEQ ID NO: 4394216 - DNA, 25 bp, Homo sapien
tagactgacaacaggtaatatctcc

SEQ ID NO: 4394217 - DNA, 25 bp, Homo sapien
tccaggtgccaggtctgcacccaga

SEQ ID NO: 4394218 - DNA, 25 bp, Homo sapien
gactcaacaggaataggtacatgac

SEQ ID NO: 4394219 - DNA, 25 bp, Homo sapien
agaagtccagtagactcaacaggaa

SEQ ID NO: 4394220 - DNA, 25 bp, Homo sapien
ataagaagtccagtagactcaacag

SEQ ID NO: 4394221 - DNA, 25 bp, Homo sapien
tgtagtctgtaacagtaggtaacta

SEQ ID NO: 4394222 - DNA, 25 bp, Homo sapien
ctcatacttgttagttttgccagca

SEQ ID NO: 4394223 - DNA, 25 bp, Homo sapien
ggaggtggtcgtagcacaggaaaac

SEQ ID NO: 4394224 - DNA, 25 bp, Homo sapien
caggcatggaggtggtcgtagcaca

SEQ ID NO: 4394225 - DNA, 25 bp, Homo sapien
tcctggaatcaggagctgtctgctc

SEQ ID NO: 4394226 - DNA, 25 bp, Homo sapien
cacattccttcacaaagctaaatat

SEQ ID NO: 4394227 - DNA, 25 bp, Homo sapien
cattccttcacaaagctaaatatag

SEQ ID NO: 4394228 - DNA, 25 bp, Homo sapien
gccacattccttcacaaagctaaat

SEQ ID NO: 4394229 - DNA, 25 bp, Homo sapien
ggaagccacattccttcacaaagct

SEQ ID NO: 4394230 - DNA, 25 bp, Homo sapien
aaagaaaacgatcccagctgttgtg

SEQ ID NO: 4394231 - DNA, 25 bp, Homo sapien
ggactacacacctttgacatatagg

SEQ ID NO: 4394232 - DNA, 25 bp, Homo sapien
aagagaggtatcaagaatgaatccc

SEQ ID NO: 4394233 - DNA, 25 bp, Homo sapien
atgaatcagattaagccagagtgtg

SEQ ID NO: 4394234 - DNA, 25 bp, Homo sapien
tccaaatcttagagagatgactgag

SEQ ID NO: 4394235 - DNA, 25 bp, Homo sapien
tgggcaatctgatgttgagaaggtc

SEQ ID NO: 4394236 - DNA, 25 bp, Homo sapien
tgttgagaaggtccaaatcttagag

SEQ ID NO: 4394237 - DNA, 25 bp, Homo sapien
caaatcttagagagatgactgagct

SEQ ID NO: 4394238 - DNA, 25 bp, Homo sapien
tctggcactgatgaactggatgtaa

SEQ ID NO: 4394239 - DNA, 25 bp, Homo sapien
caggtggtgatcaaagaggagaccc

SEQ ID NO: 4394240 - DNA, 25 bp, Homo sapien
ctatggttgattttatgatgctgat

SEQ ID NO: 4394241 - DNA, 25 bp, Homo sapien
cagccagacacactcaattggttag

SEQ ID NO: 4394242 - DNA, 25 bp, Homo sapien
gcagcaaatcagcacggacccaggg

SEQ ID NO: 4394243 - DNA, 25 bp, Homo sapien
aaatcagcacggacccagggtaagt

SEQ ID NO: 4394244 - DNA, 25 bp, Homo sapien
caggaaaatgaggtagttacagagc

SEQ ID NO: 4394245 - DNA, 25 bp, Homo sapien
gttggtctgtgctactccttcatcc

SEQ ID NO: 4394246 - DNA, 25 bp, Homo sapien
aatgatatctgggggctatgggcat

SEQ ID NO: 4394247 - DNA, 25 bp, Homo sapien
caatgatatctgggggctatgggca

SEQ ID NO: 4394248 - DNA, 25 bp, Homo sapien
cattttccttcagtctccactttct

SEQ ID NO: 4394249 - DNA, 25 bp, Homo sapien
tccatcaaggccattttccttcagt

SEQ ID NO: 4394250 - DNA, 25 bp, Homo sapien
tttccttcagtctccactttctaac

SEQ ID NO: 4394251 - DNA, 25 bp, Homo sapien
ctccatcaaggccattttccttcag

SEQ ID NO: 4394252 - DNA, 25 bp, Homo sapien
gagtctcttctttaagtctgtgtgg

SEQ ID NO: 4394253 - DNA, 25 bp, Homo sapien
tctttaagtctgtgtggttgaccat

SEQ ID NO: 4394254 - DNA, 25 bp, Homo sapien
taatgagtctcttctttaagtctgt

SEQ ID NO: 4394255 - DNA, 25 bp, Homo sapien
ataataataatgagtctcttcttta

SEQ ID NO: 4394256 - DNA, 25 bp, Homo sapien
gctccgcctacgtaaacaaaatcag

SEQ ID NO: 4394257 - DNA, 25 bp, Homo sapien
caaatgttcttattagctccgccta

SEQ ID NO: 4394258 - DNA, 25 bp, Homo sapien
tgaagctacaaccagggactggctg

SEQ ID NO: 4394259 - DNA, 25 bp, Homo sapien
acattctgtcgtcatccctcttgga

SEQ ID NO: 4394260 - DNA, 25 bp, Homo sapien
gtggctacaggatcagttttctttc

SEQ ID NO: 4394261 - DNA, 25 bp, Homo sapien
gtttttctgtggctacaggatcagt

SEQ ID NO: 4394262 - DNA, 25 bp, Homo sapien
tttttctgtggctacaggatcagtt

SEQ ID NO: 4394263 - DNA, 25 bp, Homo sapien
tctgtggctacaggatcagttttct

SEQ ID NO: 4394264 - DNA, 25 bp, Homo sapien
gagagtttgctgtgtctcgagattg

SEQ ID NO: 4394265 - DNA, 25 bp, Homo sapien
cgagattgtgagcagaatctgcctc

SEQ ID NO: 4394266 - DNA, 25 bp, Homo sapien
gcctccagattgcaggaaatactat

SEQ ID NO: 4394267 - DNA, 25 bp, Homo sapien
tcatcccatcctcttctcgggtggg

SEQ ID NO: 4394268 - DNA, 25 bp, Homo sapien
tgtgcacacttcgaagtgacccttg

SEQ ID NO: 4394269 - DNA, 25 bp, Homo sapien
tgcacacttcgaagtgacccttgac

SEQ ID NO: 4394270 - DNA, 25 bp, Homo sapien
ctgtgcacacttcgaagtgaccctt

SEQ ID NO: 4394271 - DNA, 25 bp, Homo sapien
cacacttcgaagtgacccttgacat

SEQ ID NO: 4394272 - DNA, 25 bp, Homo sapien
ttcactgtccaccgtaatgctgtcc

SEQ ID NO: 4394273 - DNA, 25 bp, Homo sapien
cttcagcaaggccatcaacctggaa

SEQ ID NO: 4394274 - DNA, 25 bp, Homo sapien
catctaagtggctcatgtcttcagc

SEQ ID NO: 4394275 - DNA, 25 bp, Homo sapien
tggaagtatattggcccgctgctgc

SEQ ID NO: 4394276 - DNA, 25 bp, Homo sapien
caacctggaagacatctaagtggct

SEQ ID NO: 4394277 - DNA, 25 bp, Homo sapien
gtcatattgcatcatgacatctttg

SEQ ID NO: 4394278 - DNA, 25 bp, Homo sapien
gatagtcatattgcatcatgacatc

SEQ ID NO: 4394279 - DNA, 25 bp, Homo sapien
ctgatagtcatattgcatcatgaca

SEQ ID NO: 4394280 - DNA, 25 bp, Homo sapien
catattgcatcatgacatctttgaa

SEQ ID NO: 4394281 - DNA, 25 bp, Homo sapien
cagtttggattcacttccgcatgcc

SEQ ID NO: 4394282 - DNA, 25 bp, Homo sapien
tcagcatcttggtgggtggaacagt

SEQ ID NO: 4394283 - DNA, 25 bp, Homo sapien
tatgctgtctcctatccaagactca

SEQ ID NO: 4394284 - DNA, 25 bp, Homo sapien
tggctccagtcaaagctaactccat

SEQ ID NO: 4394285 - DNA, 25 bp, Homo sapien
tcactatgactgagtgaacaacaag

SEQ ID NO: 4394286 - DNA, 25 bp, Homo sapien
caagagatccacgaattagacctag

SEQ ID NO: 4394287 - DNA, 25 bp, Homo sapien
tgactgagtgaacaacaagagatcc

SEQ ID NO: 4394288 - DNA, 25 bp, Homo sapien
ttagacctagaaacagcccactcac

SEQ ID NO: 4394289 - DNA, 25 bp, Homo sapien
cagacctggcaagtactcttcctca

SEQ ID NO: 4394290 - DNA, 25 bp, Homo sapien
agacctggcaagtactcttcctcat

SEQ ID NO: 4394291 - DNA, 25 bp, Homo sapien
cacccacagtctcattgtggatctt

SEQ ID NO: 4394292 - DNA, 25 bp, Homo sapien
tgccccacgggcttacactgacaca

SEQ ID NO: 4394293 - DNA, 25 bp, Homo sapien
ccagggtttccctcgagatcttggg

SEQ ID NO: 4394294 - DNA, 25 bp, Homo sapien
agatcttgggccgtgtgcgctgccc

SEQ ID NO: 4394295 - DNA, 25 bp, Homo sapien
caggaggcgtttgattacatttgga

SEQ ID NO: 4394296 - DNA, 25 bp, Homo sapien
ttacatttggatggaacgcctgcat

SEQ ID NO: 4394297 - DNA, 25 bp, Homo sapien
catcgtctggcaacaggaggcgttt

SEQ ID NO: 4394298 - DNA, 25 bp, Homo sapien
ccccactgaatagcacatcgtctgg

SEQ ID NO: 4394299 - DNA, 25 bp, Homo sapien
gagttcttactacatgcagtataag

SEQ ID NO: 4394300 - DNA, 25 bp, Homo sapien
gtttcagtgttaattcacccaggat

SEQ ID NO: 4394301 - DNA, 25 bp, Homo sapien
ttcagtgttaattcacccaggataa

SEQ ID NO: 4394302 - DNA, 25 bp, Homo sapien
tttcagtgttaattcacccaggata

SEQ ID NO: 4394303 - DNA, 25 bp, Homo sapien
cttaacacctgctgtgatctgtgca

SEQ ID NO: 4394304 - DNA, 25 bp, Homo sapien
ctgtagcaagaaggggactctcatt

SEQ ID NO: 4394305 - DNA, 25 bp, Homo sapien
gtccctgtagcaagaaggggactct

SEQ ID NO: 4394306 - DNA, 25 bp, Homo sapien
gatctgtgcagacatctgtgaggca

SEQ ID NO: 4394307 - DNA, 25 bp, Homo sapien
cagacaagccaggatccctttcact

SEQ ID NO: 4394308 - DNA, 25 bp, Homo sapien
ggaaggatctctctcgtcttgtagt

SEQ ID NO: 4394309 - DNA, 25 bp, Homo sapien
tgtagttcttgcaccactgtttggt

SEQ ID NO: 4394310 - DNA, 25 bp, Homo sapien
tgtttggtgtcttgaccacccacag

SEQ ID NO: 4394311 - DNA, 25 bp, Homo sapien
gcacctctaacaagcaagatgctga

SEQ ID NO: 4394312 - DNA, 25 bp, Homo sapien
tgtgatgaatcccagacaacaaata

SEQ ID NO: 4394313 - DNA, 25 bp, Homo sapien
cagacaacaaatatacagtgagcac

SEQ ID NO: 4394314 - DNA, 25 bp, Homo sapien
gatgctgagttaggctgtaaagaga

SEQ ID NO: 4394315 - DNA, 25 bp, Homo sapien
tacctttggagagccacttgcttct

SEQ ID NO: 4394316 - DNA, 25 bp, Homo sapien
ggtaggtcggatctgaccctcagat

SEQ ID NO: 4394317 - DNA, 25 bp, Homo sapien
tacatcacggcagctggtaggtcgg

SEQ ID NO: 4394318 - DNA, 25 bp, Homo sapien
catcctgccgtatgttatggattga

SEQ ID NO: 4394319 - DNA, 25 bp, Homo sapien
ccttggatggcatttaggtctgggg

SEQ ID NO: 4394320 - DNA, 25 bp, Homo sapien
ggcagctgtttaacagcccatggta

SEQ ID NO: 4394321 - DNA, 25 bp, Homo sapien
agctgtttaacagcccatggtaaca

SEQ ID NO: 4394322 - DNA, 25 bp, Homo sapien
aaggtggcagctgtttaacagccca

SEQ ID NO: 4394323 - DNA, 25 bp, Homo sapien
gctgcctagtgaacctggttgcatg

SEQ ID NO: 4394324 - DNA, 25 bp, Homo sapien
gagttcaaatgtacccctcatggag

SEQ ID NO: 4394325 - DNA, 25 bp, Homo sapien
tgcccttgcctgctaggatataaac

SEQ ID NO: 4394326 - DNA, 25 bp, Homo sapien
ctcttattgactgaggtatggctgc

SEQ ID NO: 4394327 - DNA, 25 bp, Homo sapien
gcacctagaaggtctcagtaaggat

SEQ ID NO: 4394328 - DNA, 25 bp, Homo sapien
cagtaaggatgtgttcggtgaaaga

SEQ ID NO: 4394329 - DNA, 25 bp, Homo sapien
tcaggatctagaacagcacccagca

SEQ ID NO: 4394330 - DNA, 25 bp, Homo sapien
taacagctccctgccagactaatga

SEQ ID NO: 4394331 - DNA, 25 bp, Homo sapien
gctggtgggatgagcctccgagaaa

SEQ ID NO: 4394332 - DNA, 25 bp, Homo sapien
agaaagcacccctgcattggcatcc

SEQ ID NO: 4394333 - DNA, 25 bp, Homo sapien
gaaagcacccctgcattggcatcct

SEQ ID NO: 4394334 - DNA, 25 bp, Homo sapien
aggggacctggcactgaagccccag

SEQ ID NO: 4394335 - DNA, 25 bp, Homo sapien
tgcctatgtggaccgatgagtcact

SEQ ID NO: 4394336 - DNA, 25 bp, Homo sapien
gaggccacactgttggagaagcaga

SEQ ID NO: 4394337 - DNA, 25 bp, Homo sapien
agaggcctgcggaaatattcatctg

SEQ ID NO: 4394338 - DNA, 25 bp, Homo sapien
tcgtgtgaagcagtcaagaggcctg

SEQ ID NO: 4394339 - DNA, 25 bp, Homo sapien
gaattgaggccaggtattacctccc

SEQ ID NO: 4394340 - DNA, 25 bp, Homo sapien
tatcatcccaatagcagtgggtggg

SEQ ID NO: 4394341 - DNA, 25 bp, Homo sapien
gccatcccaggatatgtgtgcctca

SEQ ID NO: 4394342 - DNA, 25 bp, Homo sapien
ggatatgcattccttacccaagagc

SEQ ID NO: 4394343 - DNA, 25 bp, Homo sapien
cacttctgaaataggggtggaaaca

SEQ ID NO: 4394344 - DNA, 25 bp, Homo sapien
tttgtgaccaggcagcaggcgttgt

SEQ ID NO: 4394345 - DNA, 25 bp, Homo sapien
ttgtgaccaggcagcaggcgttgta

SEQ ID NO: 4394346 - DNA, 25 bp, Homo sapien
cttctgaaataggggtggaaacagc

SEQ ID NO: 4394347 - DNA, 25 bp, Homo sapien
caatgtgttcctcatgggacctagg

SEQ ID NO: 4394348 - DNA, 25 bp, Homo sapien
tcagttccaggaaaagcgggcatat

SEQ ID NO: 4394349 - DNA, 25 bp, Homo sapien
gggtaaagattgtgcctgactgccc

SEQ ID NO: 4394350 - DNA, 25 bp, Homo sapien
cagcctacagtgttcttgagggtaa

SEQ ID NO: 4394351 - DNA, 25 bp, Homo sapien
tagcaagagccagtgggacaagttg

SEQ ID NO: 4394352 - DNA, 25 bp, Homo sapien
cttttagcaagagccagtgggacaa

SEQ ID NO: 4394353 - DNA, 25 bp, Homo sapien
gtggcggagcccaagatgccttggc

SEQ ID NO: 4394354 - DNA, 25 bp, Homo sapien
agtgggacaagttggtggcggagcc

SEQ ID NO: 4394355 - DNA, 25 bp, Homo sapien
tcatctgacctaccagtactctcct

SEQ ID NO: 4394356 - DNA, 25 bp, Homo sapien
gcctcatctgacctaccagtactct

SEQ ID NO: 4394357 - DNA, 25 bp, Homo sapien
ccagcctcatctgacctaccagtac

SEQ ID NO: 4394358 - DNA, 25 bp, Homo sapien
catctgacctaccagtactctcctt

SEQ ID NO: 4394359 - DNA, 25 bp, Homo sapien
gcattgagccaccatctggggccat

SEQ ID NO: 4394360 - DNA, 25 bp, Homo sapien
tttgagcaatatcccatccatggca

SEQ ID NO: 4394361 - DNA, 25 bp, Homo sapien
aatatcccatccatggcattgagcc

SEQ ID NO: 4394362 - DNA, 25 bp, Homo sapien
cagactcctttgagcaatatcccat

SEQ ID NO: 4394363 - DNA, 25 bp, Homo sapien
gggcccataaaagtctgcactcttg

SEQ ID NO: 4394364 - DNA, 25 bp, Homo sapien
gacaactctggcaacaaatacagat

SEQ ID NO: 4394365 - DNA, 25 bp, Homo sapien
tcagaaatagaccccggcggagctt

SEQ ID NO: 4394366 - DNA, 25 bp, Homo sapien
taagaagcctgccaacgaagcacaa

SEQ ID NO: 4394367 - DNA, 25 bp, Homo sapien
tgtgactgagcggtcaggctgcccc

SEQ ID NO: 4394368 - DNA, 25 bp, Homo sapien
cttcacgtgggacctagaccacagg

SEQ ID NO: 4394369 - DNA, 25 bp, Homo sapien
ccatcctccaagtgtgactgagcgg

SEQ ID NO: 4394370 - DNA, 25 bp, Homo sapien
catttgagtgagaccgccaagagcc

SEQ ID NO: 4394371 - DNA, 25 bp, Homo sapien
ttttagccacaactgggcatgatca

SEQ ID NO: 4394372 - DNA, 25 bp, Homo sapien
catgatcaccatagtcgctacaggg

SEQ ID NO: 4394373 - DNA, 25 bp, Homo sapien
tcctgccagcaacatattttagcca

SEQ ID NO: 4394374 - DNA, 25 bp, Homo sapien
tagatggtggtttgccttaatgaga

SEQ ID NO: 4394375 - DNA, 25 bp, Homo sapien
tcatggagtcctagcgggctctcca

SEQ ID NO: 4394376 - DNA, 25 bp, Homo sapien
agtcctagcgggctctccaacatct

SEQ ID NO: 4394377 - DNA, 25 bp, Homo sapien
aacatctgtgcagtaatcagtgagg

SEQ ID NO: 4394378 - DNA, 25 bp, Homo sapien
ctagcgggctctccaacatctgtgc

SEQ ID NO: 4394379 - DNA, 25 bp, Homo sapien
gataaagtggttcctgtcttcaagg

SEQ ID NO: 4394380 - DNA, 25 bp, Homo sapien
gaaggcctgtcttacaccactacag

SEQ ID NO: 4394381 - DNA, 25 bp, Homo sapien
ccgggacaggcgtgaatattccgct

SEQ ID NO: 4394382 - DNA, 25 bp, Homo sapien
ggacacaccattccctcttatgaga

SEQ ID NO: 4394383 - DNA, 25 bp, Homo sapien
ccttttcagaaatcatgggcggtgt

SEQ ID NO: 4394384 - DNA, 25 bp, Homo sapien
ttcagaaatcatgggcggtgtttcc

SEQ ID NO: 4394385 - DNA, 25 bp, Homo sapien
actgtccactccagccgggtatcac

SEQ ID NO: 4394386 - DNA, 25 bp, Homo sapien
ggtatcaccagggcccaatcagact

SEQ ID NO: 4394387 - DNA, 25 bp, Homo sapien
gagtggtcacttctagaagatctga

SEQ ID NO: 4394388 - DNA, 25 bp, Homo sapien
ggtctaaagggtcaagcttgaagct

SEQ ID NO: 4394389 - DNA, 25 bp, Homo sapien
caagcttgaagcttggagtggtcac

SEQ ID NO: 4394390 - DNA, 25 bp, Homo sapien
tctagaagatctgaactccctgtca

SEQ ID NO: 4394391 - DNA, 25 bp, Homo sapien
ctagggttcttcagtccatggggtg

SEQ ID NO: 4394392 - DNA, 25 bp, Homo sapien
ggtggaaaatgttacatcgtcctta

SEQ ID NO: 4394393 - DNA, 25 bp, Homo sapien
tgttacatcgtccttacagtgatgg

SEQ ID NO: 4394394 - DNA, 25 bp, Homo sapien
ccttacagtgatggtcaagggtttt

SEQ ID NO: 4394395 - DNA, 25 bp, Homo sapien
agaggcttctgcattaactctttct

SEQ ID NO: 4394396 - DNA, 25 bp, Homo sapien
tgcattaactctttctttagttaca

SEQ ID NO: 4394397 - DNA, 25 bp, Homo sapien
gagaattacaccagaggcttctgca

SEQ ID NO: 4394398 - DNA, 25 bp, Homo sapien
cgtgagaattacaccagaggcttct

SEQ ID NO: 4394399 - DNA, 25 bp, Homo sapien
acagtagaggagatgagcaggcttc

SEQ ID NO: 4394400 - DNA, 25 bp, Homo sapien
ctgttaagacaagcctcatagaggg

SEQ ID NO: 4394401 - DNA, 25 bp, Homo sapien
actcattgagagtctgtcaggcctc

SEQ ID NO: 4394402 - DNA, 25 bp, Homo sapien
agatattcttgtcatgtgccccagg

SEQ ID NO: 4394403 - DNA, 25 bp, Homo sapien
tgaggttcccgttaacttcatcttc

SEQ ID NO: 4394404 - DNA, 25 bp, Homo sapien
cctgaggttcccgttaacttcatct

SEQ ID NO: 4394405 - DNA, 25 bp, Homo sapien
ctcctgaggttcccgttaacttcat

SEQ ID NO: 4394406 - DNA, 25 bp, Homo sapien
tcatcgttttgagaattaatgatgc

SEQ ID NO: 4394407 - DNA, 25 bp, Homo sapien
tactctgttaaatgcacggccactg

SEQ ID NO: 4394408 - DNA, 25 bp, Homo sapien
taacaccctgtcactttagcctggc

SEQ ID NO: 4394409 - DNA, 25 bp, Homo sapien
gaactgctctttatccacccgcttg

SEQ ID NO: 4394410 - DNA, 25 bp, Homo sapien
gactagagtaactgtgctgatccca

SEQ ID NO: 4394411 - DNA, 25 bp, Homo sapien
tccccggagagttttggtgacacag

SEQ ID NO: 4394412 - DNA, 25 bp, Homo sapien
tacttccttgacaggcaggcacaca

SEQ ID NO: 4394413 - DNA, 25 bp, Homo sapien
catttaatcatcacggtggcatggg

SEQ ID NO: 4394414 - DNA, 25 bp, Homo sapien
taccaacgaggtggccttgatcaag

SEQ ID NO: 4394415 - DNA, 25 bp, Homo sapien
ctttctcattgcgagatattaggta

SEQ ID NO: 4394416 - DNA, 25 bp, Homo sapien
gtaactgcagaacagaacatccaag

SEQ ID NO: 4394417 - DNA, 25 bp, Homo sapien
cgagatattaggtaactgcagaaca

SEQ ID NO: 4394418 - DNA, 25 bp, Homo sapien
tcattgcgagatattaggtaactgc

SEQ ID NO: 4394419 - DNA, 25 bp, Homo sapien
gctcttccgcttctaacatgaccat

SEQ ID NO: 4394420 - DNA, 25 bp, Homo sapien
tccttgcccgggctcttccgcttct

SEQ ID NO: 4394421 - DNA, 25 bp, Homo sapien
cgggctcttccgcttctaacatgac

SEQ ID NO: 4394422 - DNA, 25 bp, Homo sapien
gcccgggctcttccgcttctaacat

SEQ ID NO: 4394423 - DNA, 25 bp, Homo sapien
cacggcggctccggtgggtgaccca

SEQ ID NO: 4394424 - DNA, 25 bp, Homo sapien
gccataatggactgtgggacaatat

SEQ ID NO: 4394425 - DNA, 25 bp, Homo sapien
tctgtagggtccaagaggctcccct

SEQ ID NO: 4394426 - DNA, 25 bp, Homo sapien
ccacttagttctgccttatggtgga

SEQ ID NO: 4394427 - DNA, 25 bp, Homo sapien
ctgcagctttgtaggattgccataa

SEQ ID NO: 4394428 - DNA, 25 bp, Homo sapien
taaatgtccccttcagtgctttcct

SEQ ID NO: 4394429 - DNA, 25 bp, Homo sapien
tgcctcaagccaactttctgcctgg

SEQ ID NO: 4394430 - DNA, 25 bp, Homo sapien
ccacctcagacctcacagtaaatgt

SEQ ID NO: 4394431 - DNA, 25 bp, Homo sapien
caagcattaataccttttggaacca

SEQ ID NO: 4394432 - DNA, 25 bp, Homo sapien
gcaaagtagttctctgtctgtggaa

SEQ ID NO: 4394433 - DNA, 25 bp, Homo sapien
aagtagttctctgtctgtggaaacc

SEQ ID NO: 4394434 - DNA, 25 bp, Homo sapien
gagcaaagtagttctctgtctgtgg

SEQ ID NO: 4394435 - DNA, 25 bp, Homo sapien
ctgagcaaagtagttctctgtctgt

SEQ ID NO: 4394436 - DNA, 25 bp, Homo sapien
gcactgggtcccaaaagcggctttg

SEQ ID NO: 4394437 - DNA, 25 bp, Homo sapien
acagctaaccgctgcctcaccctgc

SEQ ID NO: 4394438 - DNA, 25 bp, Homo sapien
ctctagacggcgcaggcactgggtc

SEQ ID NO: 4394439 - DNA, 25 bp, Homo sapien
tgcactgctgaccactctgatttac

SEQ ID NO: 4394440 - DNA, 25 bp, Homo sapien
acaggtggaactgagttcagatgag

SEQ ID NO: 4394441 - DNA, 25 bp, Homo sapien
cacaggtggaactgagttcagatga

SEQ ID NO: 4394442 - DNA, 25 bp, Homo sapien
caggtggaactgagttcagatgagg

SEQ ID NO: 4394443 - DNA, 25 bp, Homo sapien
ggtggaactgagttcagatgaggga

SEQ ID NO: 4394444 - DNA, 25 bp, Homo sapien
ttcatgacaaccctggtagtaaatc

SEQ ID NO: 4394445 - DNA, 25 bp, Homo sapien
catcttcatgacaaccctggtagta

SEQ ID NO: 4394446 - DNA, 25 bp, Homo sapien
atcttcatgacaaccctggtagtaa

SEQ ID NO: 4394447 - DNA, 25 bp, Homo sapien
tcttcatgacaaccctggtagtaaa

SEQ ID NO: 4394448 - DNA, 25 bp, Homo sapien
tcaatctttatctccatccccaact

SEQ ID NO: 4394449 - DNA, 25 bp, Homo sapien
aatctttatctccatccccaactac

SEQ ID NO: 4394450 - DNA, 25 bp, Homo sapien
tctttatctccatccccaactacca

SEQ ID NO: 4394451 - DNA, 25 bp, Homo sapien
caatctttatctccatccccaacta

SEQ ID NO: 4394452 - DNA, 25 bp, Homo sapien
tgacataaaggatgaagcagtgttt

SEQ ID NO: 4394453 - DNA, 25 bp, Homo sapien
cttcaaggacatggtaaaatatgac

SEQ ID NO: 4394454 - DNA, 25 bp, Homo sapien
tcaattgtaatggtggttgctatca

SEQ ID NO: 4394455 - DNA, 25 bp, Homo sapien
cctatcccagggacgaaaattatcg

SEQ ID NO: 4394456 - DNA, 25 bp, Homo sapien
caaagcattggctcaatccaaagcc

SEQ ID NO: 4394457 - DNA, 25 bp, Homo sapien
tcacatgagcaaagcattggctcaa

SEQ ID NO: 4394458 - DNA, 25 bp, Homo sapien
caatcacatgagcaaagcattggct

SEQ ID NO: 4394459 - DNA, 25 bp, Homo sapien
gagcaaagcattggctcaatccaaa

SEQ ID NO: 4394460 - DNA, 25 bp, Homo sapien
gaggaaagactggcagccaccttac

SEQ ID NO: 4394461 - DNA, 25 bp, Homo sapien
gtgaggaaagactggcagccacctt

SEQ ID NO: 4394462 - DNA, 25 bp, Homo sapien
aaggtgaggaaagactggcagccac

SEQ ID NO: 4394463 - DNA, 25 bp, Homo sapien
ctgaaggtgaggaaagactggcagc

SEQ ID NO: 4394464 - DNA, 25 bp, Homo sapien
tcagacatgagtgacaggcaagctc

SEQ ID NO: 4394465 - DNA, 25 bp, Homo sapien
gacaggcaagctcccgagaaacctg

SEQ ID NO: 4394466 - DNA, 25 bp, Homo sapien
gagaaacctgtggaacctcaccagc

SEQ ID NO: 4394467 - DNA, 25 bp, Homo sapien
ctcaccagcatgcagactgtcttta

SEQ ID NO: 4394468 - DNA, 25 bp, Homo sapien
tccagttctgagtccatcccctcgc

SEQ ID NO: 4394469 - DNA, 25 bp, Homo sapien
ttggactccagttctgagtccatcc

SEQ ID NO: 4394470 - DNA, 25 bp, Homo sapien
tgagtccatcccctcgccgtcagtc

SEQ ID NO: 4394471 - DNA, 25 bp, Homo sapien
agttctgagtccatcccctcgccgt

SEQ ID NO: 4394472 - DNA, 25 bp, Homo sapien
ataactaagccggcttctgcttgta

SEQ ID NO: 4394473 - DNA, 25 bp, Homo sapien
aataactaagccggcttctgcttgt

SEQ ID NO: 4394474 - DNA, 25 bp, Homo sapien
taactaagccggcttctgcttgtac

SEQ ID NO: 4394475 - DNA, 25 bp, Homo sapien
ctttgccctttacaattactcagca

SEQ ID NO: 4394476 - DNA, 25 bp, Homo sapien
cctttccattgagcaatcttcttgt

SEQ ID NO: 4394477 - DNA, 25 bp, Homo sapien
cacctccactggcaaaacctttcca

SEQ ID NO: 4394478 - DNA, 25 bp, Homo sapien
tttccattgagcaatcttcttgtga

SEQ ID NO: 4394479 - DNA, 25 bp, Homo sapien
tgggcctgtggcctttgatggagcc

SEQ ID NO: 4394480 - DNA, 25 bp, Homo sapien
tcttctaccactggtgctcccttgc

SEQ ID NO: 4394481 - DNA, 25 bp, Homo sapien
cctccgagtgtgctgctcagagcag

SEQ ID NO: 4394482 - DNA, 25 bp, Homo sapien
caggccgggtgattctcatgggcct

SEQ ID NO: 4394483 - DNA, 25 bp, Homo sapien
tcaacaagttggagacacaggaatg

SEQ ID NO: 4394484 - DNA, 25 bp, Homo sapien
tttcttgggcatgaaagagaccggg

SEQ ID NO: 4394485 - DNA, 25 bp, Homo sapien
caaaattgctgaagctcccatggat

SEQ ID NO: 4394486 - DNA, 25 bp, Homo sapien
cacaggaatgattgaggtgctccat

SEQ ID NO: 4394487 - DNA, 25 bp, Homo sapien
aaccctatgaacgtgctgacatgcc

SEQ ID NO: 4394488 - DNA, 25 bp, Homo sapien
tatgaacatactaaacctctggttg

SEQ ID NO: 4394489 - DNA, 25 bp, Homo sapien
cactgttgctgtatacttgccactt

SEQ ID NO: 4394490 - DNA, 25 bp, Homo sapien
gggtacagcggttgtacatcagcat

SEQ ID NO: 4394491 - DNA, 25 bp, Homo sapien
gaagttgtttcaaagttatcctgat

SEQ ID NO: 4394492 - DNA, 25 bp, Homo sapien
aagaagttgtttcaaagttatcctg

SEQ ID NO: 4394493 - DNA, 25 bp, Homo sapien
atgttacctacataaaaagaagttg

SEQ ID NO: 4394494 - DNA, 25 bp, Homo sapien
agttgtttcaaagttatcctgattg

SEQ ID NO: 4394495 - DNA, 25 bp, Homo sapien
gggacctgacctttgcgcaagagca

SEQ ID NO: 4394496 - DNA, 25 bp, Homo sapien
tgaggtaaataaggttcccacaagc

SEQ ID NO: 4394497 - DNA, 25 bp, Homo sapien
tttcacaagtttcacgggacctgac

SEQ ID NO: 4394498 - DNA, 25 bp, Homo sapien
taaggtccaggattcaactctcttg

SEQ ID NO: 4394499 - DNA, 25 bp, Homo sapien
gtacttctaggggattcagaggctc

SEQ ID NO: 4394500 - DNA, 25 bp, Homo sapien
ctccacaccattaatgatctccccc

SEQ ID NO: 4394501 - DNA, 25 bp, Homo sapien
tctccacaccattaatgatctcccc

SEQ ID NO: 4394502 - DNA, 25 bp, Homo sapien
ggaagtggccacgtattcggctaca

SEQ ID NO: 4394503 - DNA, 25 bp, Homo sapien
agacatcactctgggcaacctctgg

SEQ ID NO: 4394504 - DNA, 25 bp, Homo sapien
gaagcctcaggcaccaattggacct

SEQ ID NO: 4394505 - DNA, 25 bp, Homo sapien
cagttcaaaaatgtgtgggtagcca

SEQ ID NO: 4394506 - DNA, 25 bp, Homo sapien
tctatcgacgtctggtgcaatggag

SEQ ID NO: 4394507 - DNA, 25 bp, Homo sapien
ctttggtgccaacgctcagaactgg

SEQ ID NO: 4394508 - DNA, 25 bp, Homo sapien
ttttctagtataaacgtctgccagc

SEQ ID NO: 4394509 - DNA, 25 bp, Homo sapien
gccagggtctctctaatttctgacg

SEQ ID NO: 4394510 - DNA, 25 bp, Homo sapien
tgctttacataaccgaatttgcttc

SEQ ID NO: 4394511 - DNA, 25 bp, Homo sapien
ctttacataaccgaatttgcttcct

SEQ ID NO: 4394512 - DNA, 25 bp, Homo sapien
agagggtgcagtgtgcagggatgga

SEQ ID NO: 4394513 - DNA, 25 bp, Homo sapien
atgtgctttacataaccgaatttgc

SEQ ID NO: 4394514 - DNA, 25 bp, Homo sapien
tcgctgacgagtgaatgaggcacag

SEQ ID NO: 4394515 - DNA, 25 bp, Homo sapien
caccatgaactactagagctttgtc

SEQ ID NO: 4394516 - DNA, 25 bp, Homo sapien
gaactactagagctttgtcacactt

SEQ ID NO: 4394517 - DNA, 25 bp, Homo sapien
tgagggaggcttcgctgacgagtga

SEQ ID NO: 4394518 - DNA, 25 bp, Homo sapien
ctgagtcttctccagtgttctgatg

SEQ ID NO: 4394519 - DNA, 25 bp, Homo sapien
gtcttctccagtgttctgatgggta

SEQ ID NO: 4394520 - DNA, 25 bp, Homo sapien
gagtcttctccagtgttctgatggg

SEQ ID NO: 4394521 - DNA, 25 bp, Homo sapien
tcttctccagtgttctgatgggtag

SEQ ID NO: 4394522 - DNA, 25 bp, Homo sapien
tcatcacaccctgtgaagaatccgt

SEQ ID NO: 4394523 - DNA, 25 bp, Homo sapien
cgtgtctaggcttcccatcatcaca

SEQ ID NO: 4394524 - DNA, 25 bp, Homo sapien
tctgataagcgtgtctaggcttccc

SEQ ID NO: 4394525 - DNA, 25 bp, Homo sapien
cctgtgaagaatccgtaaggtgtgt

SEQ ID NO: 4394526 - DNA, 25 bp, Homo sapien
ccagaatagccttcagtgggtagca

SEQ ID NO: 4394527 - DNA, 25 bp, Homo sapien
tgtctgatctacaggcagcaggtgc

SEQ ID NO: 4394528 - DNA, 25 bp, Homo sapien
ataacatttccccagagatcacagg

SEQ ID NO: 4394529 - DNA, 25 bp, Homo sapien
agatcacaggaagctgcgcaaccag

SEQ ID NO: 4394530 - DNA, 25 bp, Homo sapien
ttctctgaacgtgccagttgctcac

SEQ ID NO: 4394531 - DNA, 25 bp, Homo sapien
ttcctttctctgaacgtgccagttg

SEQ ID NO: 4394532 - DNA, 25 bp, Homo sapien
tgctcaatttccaaagcgtttcctt

SEQ ID NO: 4394533 - DNA, 25 bp, Homo sapien
tagcgtttgctcaatttccaaagcg

SEQ ID NO: 4394534 - DNA, 25 bp, Homo sapien
cctgttgttgcagcgatgcctggaa

SEQ ID NO: 4394535 - DNA, 25 bp, Homo sapien
gaatgtccagtgcagctgcgggtcc

SEQ ID NO: 4394536 - DNA, 25 bp, Homo sapien
tacagggcccattgatgaccacaaa

SEQ ID NO: 4394537 - DNA, 25 bp, Homo sapien
ggaatccttaacacctgcacaccag

SEQ ID NO: 4394538 - DNA, 25 bp, Homo sapien
tgcaggccttgtgagataagacagg

SEQ ID NO: 4394539 - DNA, 25 bp, Homo sapien
tctggaaccccaagcagtttggaga

SEQ ID NO: 4394540 - DNA, 25 bp, Homo sapien
tagactatacacttcctgcaggcct

SEQ ID NO: 4394541 - DNA, 25 bp, Homo sapien
tgaaaatttatcaggacgggtcaga

SEQ ID NO: 4394542 - DNA, 25 bp, Homo sapien
tacagctgactcctgtgaacttgaa

SEQ ID NO: 4394543 - DNA, 25 bp, Homo sapien
gacatatggaaagcctgtgaacttt

SEQ ID NO: 4394544 - DNA, 25 bp, Homo sapien
ttttagctggaaccttgtgcccctg

SEQ ID NO: 4394545 - DNA, 25 bp, Homo sapien
cattagaacaatctttgaggctttc

SEQ ID NO: 4394546 - DNA, 25 bp, Homo sapien
agcagccccatataactcagctctg

SEQ ID NO: 4394547 - DNA, 25 bp, Homo sapien
aaagcagccccatataactcagctc

SEQ ID NO: 4394548 - DNA, 25 bp, Homo sapien
ccagcaatataaaagcagccccata

SEQ ID NO: 4394549 - DNA, 25 bp, Homo sapien
gcagccccatataactcagctctgc

SEQ ID NO: 4394550 - DNA, 25 bp, Homo sapien
gaatgacatgttctctgggccactc

SEQ ID NO: 4394551 - DNA, 25 bp, Homo sapien
ggccactccttgaatgcctctagct

SEQ ID NO: 4394552 - DNA, 25 bp, Homo sapien
gaatgcctctagcttggaagcatta

SEQ ID NO: 4394553 - DNA, 25 bp, Homo sapien
aggccctgaatgacatgttctctgg

SEQ ID NO: 4394554 - DNA, 25 bp, Homo sapien
tatgatcatctgcacagggatacca

SEQ ID NO: 4394555 - DNA, 25 bp, Homo sapien
gggtctctggcccacactaaaatgg

SEQ ID NO: 4394556 - DNA, 25 bp, Homo sapien
gaaatgcaacccctagttctaagaa

SEQ ID NO: 4394557 - DNA, 25 bp, Homo sapien
tgttggcaggtaccactagctatcc

SEQ ID NO: 4394558 - DNA, 25 bp, Homo sapien
tcaggagtccataatactcttgcct

SEQ ID NO: 4394559 - DNA, 25 bp, Homo sapien
aatcaggagtccataatactcttgc

SEQ ID NO: 4394560 - DNA, 25 bp, Homo sapien
ccccaaatcaggagtccataatact

SEQ ID NO: 4394561 - DNA, 25 bp, Homo sapien
ccaaatcaggagtccataatactct

SEQ ID NO: 4394562 - DNA, 25 bp, Homo sapien
cctgtctttccacaactaaggagga

SEQ ID NO: 4394563 - DNA, 25 bp, Homo sapien
taaggaggacacatctcttatctct

SEQ ID NO: 4394564 - DNA, 25 bp, Homo sapien
tagagcaatcctcggcctgtctttc

SEQ ID NO: 4394565 - DNA, 25 bp, Homo sapien
tcttccctgaccattagagcaatcc

SEQ ID NO: 4394566 - DNA, 25 bp, Homo sapien
ataattttccctgctgccctaccat

SEQ ID NO: 4394567 - DNA, 25 bp, Homo sapien
gactctatgtctgtcaccagagaaa

SEQ ID NO: 4394568 - DNA, 25 bp, Homo sapien
acctgccacagtacctgactctatg

SEQ ID NO: 4394569 - DNA, 25 bp, Homo sapien
cgtacacatttgtcaaggaacttca

SEQ ID NO: 4394570 - DNA, 25 bp, Homo sapien
cagagaaaagggatcctcgtacaca

SEQ ID NO: 4394571 - DNA, 25 bp, Homo sapien
caaaacaccactggccggcaaaggg

SEQ ID NO: 4394572 - DNA, 25 bp, Homo sapien
acccccatgtcctggactagccatg

SEQ ID NO: 4394573 - DNA, 25 bp, Homo sapien
acaccactggccggcaaaggggtgt

SEQ ID NO: 4394574 - DNA, 25 bp, Homo sapien
agcaaaacaccactggccggcaaag

SEQ ID NO: 4394575 - DNA, 25 bp, Homo sapien
tctccagatagtcagcctaagctca

SEQ ID NO: 4394576 - DNA, 25 bp, Homo sapien
gaagctctgtatttgtgacttcttg

SEQ ID NO: 4394577 - DNA, 25 bp, Homo sapien
tcacggacaaggatccactgaagct

SEQ ID NO: 4394578 - DNA, 25 bp, Homo sapien
tctgtatttgtgacttcttgtgcca

SEQ ID NO: 4394579 - DNA, 25 bp, Homo sapien
ccccagttattatcaaggctctaag

SEQ ID NO: 4394580 - DNA, 25 bp, Homo sapien
gcttccctctgttgagtgagttccc

SEQ ID NO: 4394581 - DNA, 25 bp, Homo sapien
ggctctaaggtcataactggttaat

SEQ ID NO: 4394582 - DNA, 25 bp, Homo sapien
cacctgctttgttcataaacaagca

SEQ ID NO: 4394583 - DNA, 25 bp, Homo sapien
cagcagacatggtatccaaatccgc

SEQ ID NO: 4394584 - DNA, 25 bp, Homo sapien
tggtatccaaatccgcaatgcgtag

SEQ ID NO: 4394585 - DNA, 25 bp, Homo sapien
gttcctttgctctccaatacacagt

SEQ ID NO: 4394586 - DNA, 25 bp, Homo sapien
aatgcgtagcattcagttcctttgc

SEQ ID NO: 4394587 - DNA, 25 bp, Homo sapien
tgtgggtacggagagcaactgctct

SEQ ID NO: 4394588 - DNA, 25 bp, Homo sapien
ctgctctgtggattcaaggctctca

SEQ ID NO: 4394589 - DNA, 25 bp, Homo sapien
caagtttaataggatctccaagggc

SEQ ID NO: 4394590 - DNA, 25 bp, Homo sapien
gaaccagacagcactcttagataag

SEQ ID NO: 4394591 - DNA, 25 bp, Homo sapien
atatttataattctgtttgtgctga

SEQ ID NO: 4394592 - DNA, 25 bp, Homo sapien
tagatttcatatatctgtcactata

SEQ ID NO: 4394593 - DNA, 25 bp, Homo sapien
aagatatttataattctgtttgtgc

SEQ ID NO: 4394594 - DNA, 25 bp, Homo sapien
attagatttcatatatctgtcacta

SEQ ID NO: 4394595 - DNA, 25 bp, Homo sapien
tgggtgctttttggaaacctgccag

SEQ ID NO: 4394596 - DNA, 25 bp, Homo sapien
tttgagataagatggcatccgagag

SEQ ID NO: 4394597 - DNA, 25 bp, Homo sapien
gatggcatccgagagcttttgcctt

SEQ ID NO: 4394598 - DNA, 25 bp, Homo sapien
gtgctttttggaaacctgccaggtc

SEQ ID NO: 4394599 - DNA, 25 bp, Homo sapien
taaaagctttcggtggctcctggct

SEQ ID NO: 4394600 - DNA, 25 bp, Homo sapien
tccctgttgcactaatccacttgtc

SEQ ID NO: 4394601 - DNA, 25 bp, Homo sapien
tctccctgttgcactaatccacttg

SEQ ID NO: 4394602 - DNA, 25 bp, Homo sapien
gtcacatctctttcacgcttaaaag

SEQ ID NO: 4394603 - DNA, 25 bp, Homo sapien
tttgacacagataaagaacacgaag

SEQ ID NO: 4394604 - DNA, 25 bp, Homo sapien
aacacgaagaatttgcccagaggcc

SEQ ID NO: 4394605 - DNA, 25 bp, Homo sapien
cccacttaggacaggaagtgagtca

SEQ ID NO: 4394606 - DNA, 25 bp, Homo sapien
catgcccttgggcataggtgtatgc

SEQ ID NO: 4394607 - DNA, 25 bp, Homo sapien
acagaggacctatcacaggttggac

SEQ ID NO: 4394608 - DNA, 25 bp, Homo sapien
tccacagaggacctatcacaggttg

SEQ ID NO: 4394609 - DNA, 25 bp, Homo sapien
ttccacagaggacctatcacaggtt

SEQ ID NO: 4394610 - DNA, 25 bp, Homo sapien
cacagaggacctatcacaggttgga

SEQ ID NO: 4394611 - DNA, 25 bp, Homo sapien
tttacccttccggatctgtattctc

SEQ ID NO: 4394612 - DNA, 25 bp, Homo sapien
tacccttccggatctgtattctcca

SEQ ID NO: 4394613 - DNA, 25 bp, Homo sapien
ttacccttccggatctgtattctcc

SEQ ID NO: 4394614 - DNA, 25 bp, Homo sapien
cccttccggatctgtattctccaga

SEQ ID NO: 4394615 - DNA, 25 bp, Homo sapien
ttgcttctgtatctcaactctggac

SEQ ID NO: 4394616 - DNA, 25 bp, Homo sapien
cattgcttctgtatctcaactctgg

SEQ ID NO: 4394617 - DNA, 25 bp, Homo sapien
attgcttctgtatctcaactctgga

SEQ ID NO: 4394618 - DNA, 25 bp, Homo sapien
ctcattgcttctgtatctcaactct

SEQ ID NO: 4394619 - DNA, 25 bp, Homo sapien
tcatgggcccctggtgaaatgtgga

SEQ ID NO: 4394620 - DNA, 25 bp, Homo sapien
gggatgcactcttccctgagctgct

SEQ ID NO: 4394621 - DNA, 25 bp, Homo sapien
gggatctggtcccactgcttaccaa

SEQ ID NO: 4394622 - DNA, 25 bp, Homo sapien
aatgtggatgctgtcatgtgaaggc

SEQ ID NO: 4394623 - DNA, 25 bp, Homo sapien
caagggagataagagaataaaataa

SEQ ID NO: 4394624 - DNA, 25 bp, Homo sapien
gggagataagagaataaaataacac

SEQ ID NO: 4394625 - DNA, 25 bp, Homo sapien
tgaacaagggagataagagaataaa

SEQ ID NO: 4394626 - DNA, 25 bp, Homo sapien
cttgaacaagggagataagagaata

SEQ ID NO: 4394627 - DNA, 25 bp, Homo sapien
ctgacacggccttatcacctgataa

SEQ ID NO: 4394628 - DNA, 25 bp, Homo sapien
gacacggccttatcacctgataata

SEQ ID NO: 4394629 - DNA, 25 bp, Homo sapien
tgacacggccttatcacctgataat

SEQ ID NO: 4394630 - DNA, 25 bp, Homo sapien
aagctattaatttttatcgctgcag

SEQ ID NO: 4394631 - DNA, 25 bp, Homo sapien
tattaatttttatcgctgcagtgca

SEQ ID NO: 4394632 - DNA, 25 bp, Homo sapien
aatttttatcgctgcagtgcaatag

SEQ ID NO: 4394633 - DNA, 25 bp, Homo sapien
taatttttatcgctgcagtgcaata

SEQ ID NO: 4394634 - DNA, 25 bp, Homo sapien
tatatattaaacctagtggatctaa

SEQ ID NO: 4394635 - DNA, 25 bp, Homo sapien
tattaaacctagtggatctaaccat

SEQ ID NO: 4394636 - DNA, 25 bp, Homo sapien
taaacctagtggatctaaccatgct

SEQ ID NO: 4394637 - DNA, 25 bp, Homo sapien
acctagtggatctaaccatgctttc

SEQ ID NO: 4394638 - DNA, 25 bp, Homo sapien
cagactcagttgtaccagcatgcaa

SEQ ID NO: 4394639 - DNA, 25 bp, Homo sapien
cacaggtgagaaagggttccctgaa

SEQ ID NO: 4394640 - DNA, 25 bp, Homo sapien
aatatgaaaagtacctcacaggaga

SEQ ID NO: 4394641 - DNA, 25 bp, Homo sapien
gaaacgagtgcctgtccatgtctgt

SEQ ID NO: 4394642 - DNA, 25 bp, Homo sapien
gggggtaagtgatgcaagcacagga

SEQ ID NO: 4394643 - DNA, 25 bp, Homo sapien
ggtaagtgatgcaagcacaggacac

SEQ ID NO: 4394644 - DNA, 25 bp, Homo sapien
tctccagagggggtaagtgatgcaa

SEQ ID NO: 4394645 - DNA, 25 bp, Homo sapien
accctctccagagggggtaagtgat

SEQ ID NO: 4394646 - DNA, 25 bp, Homo sapien
catgcttcagttgtggtatggggat

SEQ ID NO: 4394647 - DNA, 25 bp, Homo sapien
ggttgccattgaagcattatccagc

SEQ ID NO: 4394648 - DNA, 25 bp, Homo sapien
tgaagcattatccagcaagcatgcc

SEQ ID NO: 4394649 - DNA, 25 bp, Homo sapien
ctgggctgggtcttcggttgccatt

SEQ ID NO: 4394650 - DNA, 25 bp, Homo sapien
tacgcaaagagtgatgctgggctct

SEQ ID NO: 4394651 - DNA, 25 bp, Homo sapien
tgcccgcttctgctactatgtgaat

SEQ ID NO: 4394652 - DNA, 25 bp, Homo sapien
gaatttatggagtcctggtctcgca

SEQ ID NO: 4394653 - DNA, 25 bp, Homo sapien
tagctctgctgacgagctgctgccc

SEQ ID NO: 4394654 - DNA, 25 bp, Homo sapien
gtgtctgctacagcttccaataaag

SEQ ID NO: 4394655 - DNA, 25 bp, Homo sapien
tgctacagcttccaataaaggccag

SEQ ID NO: 4394656 - DNA, 25 bp, Homo sapien
tgtctgctacagcttccaataaagg

SEQ ID NO: 4394657 - DNA, 25 bp, Homo sapien
tctgctacagcttccaataaaggcc

SEQ ID NO: 4394658 - DNA, 25 bp, Homo sapien
aagtagggtttggatatgcatgcat

SEQ ID NO: 4394659 - DNA, 25 bp, Homo sapien
catatgatagaaagggtgtcggaaa

SEQ ID NO: 4394660 - DNA, 25 bp, Homo sapien
gcctgtctgcaatttcctaccgact

SEQ ID NO: 4394661 - DNA, 25 bp, Homo sapien
ccttctttatgtcggctttggaaga

SEQ ID NO: 4394662 - DNA, 25 bp, Homo sapien
cttattaacattgatgcaaggctgg

SEQ ID NO: 4394663 - DNA, 25 bp, Homo sapien
tattaacattgatgcaaggctgggt

SEQ ID NO: 4394664 - DNA, 25 bp, Homo sapien
ccttattaacattgatgcaaggctg

SEQ ID NO: 4394665 - DNA, 25 bp, Homo sapien
ttattaacattgatgcaaggctggg

SEQ ID NO: 4394666 - DNA, 25 bp, Homo sapien
ttgctacagtgttgctctcctccct

SEQ ID NO: 4394667 - DNA, 25 bp, Homo sapien
taagttaactacgatactacttcca

SEQ ID NO: 4394668 - DNA, 25 bp, Homo sapien
tcagcgtgtagaacggtaagttaac

SEQ ID NO: 4394669 - DNA, 25 bp, Homo sapien
tccctgtcttcgctcagcgtgtaga

SEQ ID NO: 4394670 - DNA, 25 bp, Homo sapien
agctttctgatgcatcctcagtcac

SEQ ID NO: 4394671 - DNA, 25 bp, Homo sapien
agcaggtctggccagtcccaacatc

SEQ ID NO: 4394672 - DNA, 25 bp, Homo sapien
ttgctctttgcaagtgcctgatgtg

SEQ ID NO: 4394673 - DNA, 25 bp, Homo sapien
ctctttgcaagtgcctgatgtggac

SEQ ID NO: 4394674 - DNA, 25 bp, Homo sapien
aggtctggccagtcccaacatcctg

SEQ ID NO: 4394675 - DNA, 25 bp, Homo sapien
cctccagaaccatgtttctgctctt

SEQ ID NO: 4394676 - DNA, 25 bp, Homo sapien
gcctccagaaccatgtttctgctct

SEQ ID NO: 4394677 - DNA, 25 bp, Homo sapien
tccagaaccatgtttctgctcttct

SEQ ID NO: 4394678 - DNA, 25 bp, Homo sapien
cagcctccagaaccatgtttctgct

SEQ ID NO: 4394679 - DNA, 25 bp, Homo sapien
gcgtgcttggaggattctttgcatc

SEQ ID NO: 4394680 - DNA, 25 bp, Homo sapien
gcttggaggattctttgcatccaca

SEQ ID NO: 4394681 - DNA, 25 bp, Homo sapien
cagcagtgctgcacactctcttgag

SEQ ID NO: 4394682 - DNA, 25 bp, Homo sapien
tgctgcacactctcttgaggccagg

SEQ ID NO: 4394683 - DNA, 25 bp, Homo sapien
ggtcttcttgagactcagttcttaa

SEQ ID NO: 4394684 - DNA, 25 bp, Homo sapien
tctaaaccaattatctgattgtgag

SEQ ID NO: 4394685 - DNA, 25 bp, Homo sapien
tctccccgtagccatttttgtccaa

SEQ ID NO: 4394686 - DNA, 25 bp, Homo sapien
gattgtgagagacagcaagccccat

SEQ ID NO: 4394687 - DNA, 25 bp, Homo sapien
tcatcaagaactggcagaccttctt

SEQ ID NO: 4394688 - DNA, 25 bp, Homo sapien
agctccatgcaactcaaacctttgg

SEQ ID NO: 4394689 - DNA, 25 bp, Homo sapien
gctcatcaagaactggcagaccttc

SEQ ID NO: 4394690 - DNA, 25 bp, Homo sapien
ttcagctccatgcaactcaaacctt

SEQ ID NO: 4394691 - DNA, 25 bp, Homo sapien
ccagtgggtcctcggttgtgtctcc

SEQ ID NO: 4394692 - DNA, 25 bp, Homo sapien
aggatcatcgttgcctgccccatca

SEQ ID NO: 4394693 - DNA, 25 bp, Homo sapien
tgtctccaggatcatcgttgcctgc

SEQ ID NO: 4394694 - DNA, 25 bp, Homo sapien
gacaaaaatgttcatgacatgtttg

SEQ ID NO: 4394695 - DNA, 25 bp, Homo sapien
tcaggaacgtttacaagatttgcgg

SEQ ID NO: 4394696 - DNA, 25 bp, Homo sapien
ggtccctcctgttacatgtgtggat

SEQ ID NO: 4394697 - DNA, 25 bp, Homo sapien
aactgggagagtgttagagaccacc

SEQ ID NO: 4394698 - DNA, 25 bp, Homo sapien
ggtcactgggtagaatgtaacatca

SEQ ID NO: 4394699 - DNA, 25 bp, Homo sapien
tagtagcatttctggatccggcaca

SEQ ID NO: 4394700 - DNA, 25 bp, Homo sapien
gatattcagggctcgctgtcaacca

SEQ ID NO: 4394701 - DNA, 25 bp, Homo sapien
actcacctgaagatgcaatagccgg

SEQ ID NO: 4394702 - DNA, 25 bp, Homo sapien
gatctgctgagtgacgaccctgtac

SEQ ID NO: 4394703 - DNA, 25 bp, Homo sapien
ctcttcctctagcaggggcaaagtc

SEQ ID NO: 4394704 - DNA, 25 bp, Homo sapien
taatagtagacgcaggcttttccat

SEQ ID NO: 4394705 - DNA, 25 bp, Homo sapien
cagtgccctaatttgacgccttaat

SEQ ID NO: 4394706 - DNA, 25 bp, Homo sapien
ttccactcaagctcagtgccctaat

SEQ ID NO: 4394707 - DNA, 25 bp, Homo sapien
ccttttggcaaagccactgccggct

SEQ ID NO: 4394708 - DNA, 25 bp, Homo sapien
ccactgccggctgcgggtttcccct

SEQ ID NO: 4394709 - DNA, 25 bp, Homo sapien
ggcggcttcgcgggcacacgccttc

SEQ ID NO: 4394710 - DNA, 25 bp, Homo sapien
ctcagtgcgcccaccttttggcaaa

SEQ ID NO: 4394711 - DNA, 25 bp, Homo sapien
gaattcaggcccctgacgtcagcct

SEQ ID NO: 4394712 - DNA, 25 bp, Homo sapien
tagctttagcgatcgggagacagcc

SEQ ID NO: 4394713 - DNA, 25 bp, Homo sapien
tcagggcaccgcacgggagaccaag

SEQ ID NO: 4394714 - DNA, 25 bp, Homo sapien
tccagccctgccgaagtttcacttt

SEQ ID NO: 4394715 - DNA, 25 bp, Homo sapien
ccctgcacatgtgcattttaagaaa

SEQ ID NO: 4394716 - DNA, 25 bp, Homo sapien
ttccctgcacatgtgcattttaaga

SEQ ID NO: 4394717 - DNA, 25 bp, Homo sapien
ctttccctgcacatgtgcattttaa

SEQ ID NO: 4394718 - DNA, 25 bp, Homo sapien
cctgcacatgtgcattttaagaaag

SEQ ID NO: 4394719 - DNA, 25 bp, Homo sapien
agaaccttgagccagttgttgctgg

SEQ ID NO: 4394720 - DNA, 25 bp, Homo sapien
ccttgagccagttgttgctggcaca

SEQ ID NO: 4394721 - DNA, 25 bp, Homo sapien
tgagccagttgttgctggcacaggt

SEQ ID NO: 4394722 - DNA, 25 bp, Homo sapien
aaccttgagccagttgttgctggca

SEQ ID NO: 4394723 - DNA, 25 bp, Homo sapien
caagctgccagccaagcatggactg

SEQ ID NO: 4394724 - DNA, 25 bp, Homo sapien
tcaatcacacccttgtcagctgaag

SEQ ID NO: 4394725 - DNA, 25 bp, Homo sapien
caccaaagtttgtagtcaacaggag

SEQ ID NO: 4394726 - DNA, 25 bp, Homo sapien
gagtgagctgatcccttgttataca

SEQ ID NO: 4394727 - DNA, 25 bp, Homo sapien
tctcttattaatgaggtcaccacag

SEQ ID NO: 4394728 - DNA, 25 bp, Homo sapien
gatgagtgccacagacattcacggg

SEQ ID NO: 4394729 - DNA, 25 bp, Homo sapien
gctgtttaatacagggtgctccctt

SEQ ID NO: 4394730 - DNA, 25 bp, Homo sapien
cagttgagtatagtgtgcccgcaaa

SEQ ID NO: 4394731 - DNA, 25 bp, Homo sapien
caggttgtgcgctgatttgtcacca

SEQ ID NO: 4394732 - DNA, 25 bp, Homo sapien
tgtgcgctgatttgtcaccagtgga

SEQ ID NO: 4394733 - DNA, 25 bp, Homo sapien
ggttgtgcgctgatttgtcaccagt

SEQ ID NO: 4394734 - DNA, 25 bp, Homo sapien
ttccaggttgtgcgctgatttgtca

SEQ ID NO: 4394735 - DNA, 25 bp, Homo sapien
agaatatctagggttccagtagtga

SEQ ID NO: 4394736 - DNA, 25 bp, Homo sapien
ctggacaggaccctaaagataacat

SEQ ID NO: 4394737 - DNA, 25 bp, Homo sapien
gggttccagtagtgacagctggaca

SEQ ID NO: 4394738 - DNA, 25 bp, Homo sapien
cagctggacaggaccctaaagataa

SEQ ID NO: 4394739 - DNA, 25 bp, Homo sapien
tacccagggccgtacagcttgttca

SEQ ID NO: 4394740 - DNA, 25 bp, Homo sapien
cttttaaaccatggcgacatcctgg

SEQ ID NO: 4394741 - DNA, 25 bp, Homo sapien
tattgagctacctactccgtgccag

SEQ ID NO: 4394742 - DNA, 25 bp, Homo sapien
ttcagatcagttgccagtcagcctc

SEQ ID NO: 4394743 - DNA, 25 bp, Homo sapien
tcaatatgctcgtcttattttgggc

SEQ ID NO: 4394744 - DNA, 25 bp, Homo sapien
cttctcttgtagttatcaatatgct

SEQ ID NO: 4394745 - DNA, 25 bp, Homo sapien
tgctcgtcttattttgggcttttac

SEQ ID NO: 4394746 - DNA, 25 bp, Homo sapien
tgtagttatcaatatgctcgtctta

SEQ ID NO: 4394747 - DNA, 25 bp, Homo sapien
tttccatttaaagccctctcgagag

SEQ ID NO: 4394748 - DNA, 25 bp, Homo sapien
ccttctagtttactagaactccatt

SEQ ID NO: 4394749 - DNA, 25 bp, Homo sapien
gccctctcgagaggtctgtctcctg

SEQ ID NO: 4394750 - DNA, 25 bp, Homo sapien
ccagccgtggagtgagcttcagcaa

SEQ ID NO: 4394751 - DNA, 25 bp, Homo sapien
tgaactcttgtcctcggatctctga

SEQ ID NO: 4394752 - DNA, 25 bp, Homo sapien
ttgtcctcggatctctgagcttgat

SEQ ID NO: 4394753 - DNA, 25 bp, Homo sapien
tgggtgaagaggttgaactcttgtc

SEQ ID NO: 4394754 - DNA, 25 bp, Homo sapien
aactcttgtcctcggatctctgagc

SEQ ID NO: 4394755 - DNA, 25 bp, Homo sapien
gtcagcacctaggtttcgaaaggct

SEQ ID NO: 4394756 - DNA, 25 bp, Homo sapien
ggcagtgcagtgtcagcacctaggt

SEQ ID NO: 4394757 - DNA, 25 bp, Homo sapien
cctaggtttcgaaaggctccagatg

SEQ ID NO: 4394758 - DNA, 25 bp, Homo sapien
ggtgacagggtcttggacgtaagaa

SEQ ID NO: 4394759 - DNA, 25 bp, Homo sapien
acaggcacaggtacagtgtgaaatt

SEQ ID NO: 4394760 - DNA, 25 bp, Homo sapien
cacaggcacaggtacagtgtgaaat

SEQ ID NO: 4394761 - DNA, 25 bp, Homo sapien
aacacaggcacaggtacagtgtgaa

SEQ ID NO: 4394762 - DNA, 25 bp, Homo sapien
aaacacaggcacaggtacagtgtga

SEQ ID NO: 4394763 - DNA, 25 bp, Homo sapien
ggctgactttgtgcctttgcccgtg

SEQ ID NO: 4394764 - DNA, 25 bp, Homo sapien
gactttgtgcctttgcccgtgtaat

SEQ ID NO: 4394765 - DNA, 25 bp, Homo sapien
gcccgtgtaatttctaccttccaga

SEQ ID NO: 4394766 - DNA, 25 bp, Homo sapien
tgcctttgcccgtgtaatttctacc

SEQ ID NO: 4394767 - DNA, 25 bp, Homo sapien
gtcagaacttggcagacacgagaat

SEQ ID NO: 4394768 - DNA, 25 bp, Homo sapien
taggtcagaacttggcagacacgag

SEQ ID NO: 4394769 - DNA, 25 bp, Homo sapien
cagacacgagaatgtggttggctcc

SEQ ID NO: 4394770 - DNA, 25 bp, Homo sapien
cttggcagacacgagaatgtggttg

SEQ ID NO: 4394771 - DNA, 25 bp, Homo sapien
tgctgacactcggaggtggggaagg

SEQ ID NO: 4394772 - DNA, 25 bp, Homo sapien
ggtctgtgaaagaggggggtgctga

SEQ ID NO: 4394773 - DNA, 25 bp, Homo sapien
gaggggggtgctgacactcggaggt

SEQ ID NO: 4394774 - DNA, 25 bp, Homo sapien
gggggtgctgacactcggaggtggg

SEQ ID NO: 4394775 - DNA, 25 bp, Homo sapien
gcagcagagtatgacagcagtagaa

SEQ ID NO: 4394776 - DNA, 25 bp, Homo sapien
gcatatttcagagggtgacaagcgc

SEQ ID NO: 4394777 - DNA, 25 bp, Homo sapien
gatctgaggaaaccaacagctctag

SEQ ID NO: 4394778 - DNA, 25 bp, Homo sapien
gtccatggtctcataagtgcttgca

SEQ ID NO: 4394779 - DNA, 25 bp, Homo sapien
gacttgactttttactcctgtgaaa

SEQ ID NO: 4394780 - DNA, 25 bp, Homo sapien
tttccttgctgcccctgagactttg

SEQ ID NO: 4394781 - DNA, 25 bp, Homo sapien
ttgactttttactcctgtgaaacaa

SEQ ID NO: 4394782 - DNA, 25 bp, Homo sapien
cttgctgcccctgagactttgactt

SEQ ID NO: 4394783 - DNA, 25 bp, Homo sapien
aggattcttccactgggagccaata

SEQ ID NO: 4394784 - DNA, 25 bp, Homo sapien
ggagagagaagtcaaggattcttcc

SEQ ID NO: 4394785 - DNA, 25 bp, Homo sapien
gagaagtcaaggattcttccactgg

SEQ ID NO: 4394786 - DNA, 25 bp, Homo sapien
gtcaaggattcttccactgggagcc

SEQ ID NO: 4394787 - DNA, 25 bp, Homo sapien
ggaaccttgctgagattggtacaat

SEQ ID NO: 4394788 - DNA, 25 bp, Homo sapien
gccacaaggtctttgacctgcattt

SEQ ID NO: 4394789 - DNA, 25 bp, Homo sapien
aggaccttcaggatgtcccgagcca

SEQ ID NO: 4394790 - DNA, 25 bp, Homo sapien
gaggtcctgcaaccacagagtagct

SEQ ID NO: 4394791 - DNA, 25 bp, Homo sapien
gtccaaccttcacagacattgtctg

SEQ ID NO: 4394792 - DNA, 25 bp, Homo sapien
cagacattgtctgactaagtatata

SEQ ID NO: 4394793 - DNA, 25 bp, Homo sapien
tacaccggctcacaagaaaggcaag

SEQ ID NO: 4394794 - DNA, 25 bp, Homo sapien
tataactcttgagtgttcactgtgt

SEQ ID NO: 4394795 - DNA, 25 bp, Homo sapien
gggattcaagcacgcacacatagta

SEQ ID NO: 4394796 - DNA, 25 bp, Homo sapien
tggatttctggcgaagatccggccc

SEQ ID NO: 4394797 - DNA, 25 bp, Homo sapien
cccacccattgggagggattctgca

SEQ ID NO: 4394798 - DNA, 25 bp, Homo sapien
agctctttgctgtaacatccctggg

SEQ ID NO: 4394799 - DNA, 25 bp, Homo sapien
cccttgattaattcatgcttgggag

SEQ ID NO: 4394800 - DNA, 25 bp, Homo sapien
gaaaatagctccttactgtatgttt

SEQ ID NO: 4394801 - DNA, 25 bp, Homo sapien
cttactgtatgtttatttccccacg

SEQ ID NO: 4394802 - DNA, 25 bp, Homo sapien
tttccccacgggcttatttcagaga

SEQ ID NO: 4394803 - DNA, 25 bp, Homo sapien
aggaaaacatcgcaggccacgtttc

SEQ ID NO: 4394804 - DNA, 25 bp, Homo sapien
cagggggtctttgaaacgtccatct

SEQ ID NO: 4394805 - DNA, 25 bp, Homo sapien
cgtttccggaactgagaatctcagg

SEQ ID NO: 4394806 - DNA, 25 bp, Homo sapien
tcgcaggccacgtttccggaactga

SEQ ID NO: 4394807 - DNA, 25 bp, Homo sapien
tttgtcttgagccttcctgtagaca

SEQ ID NO: 4394808 - DNA, 25 bp, Homo sapien
tagctgaaaagggagattttgtctt

SEQ ID NO: 4394809 - DNA, 25 bp, Homo sapien
tttagctgaaaagggagattttgtc

SEQ ID NO: 4394810 - DNA, 25 bp, Homo sapien
tagacatatgtgacttggagtttga

SEQ ID NO: 4394811 - DNA, 25 bp, Homo sapien
tgttgtcagggatcacaagctccca

SEQ ID NO: 4394812 - DNA, 25 bp, Homo sapien
tacttactacatgggccttgacggc

SEQ ID NO: 4394813 - DNA, 25 bp, Homo sapien
tgagcagcatatagacataaccccg

SEQ ID NO: 4394814 - DNA, 25 bp, Homo sapien
tctgagatataagcagagcgcctat

SEQ ID NO: 4394815 - DNA, 25 bp, Homo sapien
tcttgtttccagaaacaaagtcgtc

SEQ ID NO: 4394816 - DNA, 25 bp, Homo sapien
caggatttgaattcttgtttccaga

SEQ ID NO: 4394817 - DNA, 25 bp, Homo sapien
tcagggtttaggagaagcaggattt

SEQ ID NO: 4394818 - DNA, 25 bp, Homo sapien
ttgaattcttgtttccagaaacaaa

SEQ ID NO: 4394819 - DNA, 25 bp, Homo sapien
gccttgctgtgtcccgtagtggact

SEQ ID NO: 4394820 - DNA, 25 bp, Homo sapien
ttcaggcttcgagaccaccgccttg

SEQ ID NO: 4394821 - DNA, 25 bp, Homo sapien
agctgaggcgagaatgtctcagttc

SEQ ID NO: 4394822 - DNA, 25 bp, Homo sapien
agttctgttcccttcaggcttcgag

SEQ ID NO: 4394823 - DNA, 25 bp, Homo sapien
tccttgtcttgaggactggactgcg

SEQ ID NO: 4394824 - DNA, 25 bp, Homo sapien
tggactgcggtccaagggcacctac

SEQ ID NO: 4394825 - DNA, 25 bp, Homo sapien
taaactccctggtaaggaatcttca

SEQ ID NO: 4394826 - DNA, 25 bp, Homo sapien
aaggaatcttcaatctccatgtgag

SEQ ID NO: 4394827 - DNA, 25 bp, Homo sapien
catagccagggaacaatgtctttct

SEQ ID NO: 4394828 - DNA, 25 bp, Homo sapien
tgaagtcatagccagggaacaatgt

SEQ ID NO: 4394829 - DNA, 25 bp, Homo sapien
tctgaagtcatagccagggaacaat

SEQ ID NO: 4394830 - DNA, 25 bp, Homo sapien
gtcatagccagggaacaatgtcttt

SEQ ID NO: 4394831 - DNA, 25 bp, Homo sapien
ttggtgtacctctgtacttaatggg

SEQ ID NO: 4394832 - DNA, 25 bp, Homo sapien
gaaaggagaattgtgaccaggtaag

SEQ ID NO: 4394833 - DNA, 25 bp, Homo sapien
caccaggatgtgaggtgcaaatcct

SEQ ID NO: 4394834 - DNA, 25 bp, Homo sapien
gcaaatcctgttatgtgctcagaaa

SEQ ID NO: 4394835 - DNA, 25 bp, Homo sapien
tgctgcaagattctgggacacacgt

SEQ ID NO: 4394836 - DNA, 25 bp, Homo sapien
gtgttacgggaatgagaccatggat

SEQ ID NO: 4394837 - DNA, 25 bp, Homo sapien
cacacgtgctcatggccatcaagaa

SEQ ID NO: 4394838 - DNA, 25 bp, Homo sapien
cagctgcactgtctacacgaggatg

SEQ ID NO: 4394839 - DNA, 25 bp, Homo sapien
gataggtgctgcatgaattttcatg

SEQ ID NO: 4394840 - DNA, 25 bp, Homo sapien
tgttctatcgggcattggctgactc

SEQ ID NO: 4394841 - DNA, 25 bp, Homo sapien
tagaataaatctgaaggaagtgagg

SEQ ID NO: 4394842 - DNA, 25 bp, Homo sapien
tctctggcatgggataggtgctgca

SEQ ID NO: 4394843 - DNA, 25 bp, Homo sapien
attatttccctctgttgataccggt

SEQ ID NO: 4394844 - DNA, 25 bp, Homo sapien
tgttgataccggtttacaattgccg

SEQ ID NO: 4394845 - DNA, 25 bp, Homo sapien
tccaggcgtgactagcccagtggga

SEQ ID NO: 4394846 - DNA, 25 bp, Homo sapien
gactgtcgccaagggctttcagttt

SEQ ID NO: 4394847 - DNA, 25 bp, Homo sapien
ctggttcatagagtatgtgtttgct

SEQ ID NO: 4394848 - DNA, 25 bp, Homo sapien
tggtctgggtgttagtgaacctcat

SEQ ID NO: 4394849 - DNA, 25 bp, Homo sapien
catagagtatgtgtttgctgccctg

SEQ ID NO: 4394850 - DNA, 25 bp, Homo sapien
tgctgccctgatctcagtgttggtc

SEQ ID NO: 4394851 - DNA, 25 bp, Homo sapien
cccttgctgtatgcgtgagacaccg

SEQ ID NO: 4394852 - DNA, 25 bp, Homo sapien
tatttttgccctcctcagcggtaga

SEQ ID NO: 4394853 - DNA, 25 bp, Homo sapien
tgagacaccgagacttggaaagggc

SEQ ID NO: 4394854 - DNA, 25 bp, Homo sapien
aatgtcgaaaggttcttgcttgagc

SEQ ID NO: 4394855 - DNA, 25 bp, Homo sapien
gccttccaccgctccacacagtctc

SEQ ID NO: 4394856 - DNA, 25 bp, Homo sapien
gtagtcaagggaggaaccatctgca

SEQ ID NO: 4394857 - DNA, 25 bp, Homo sapien
ccagcggtagtcaagggaggaacca

SEQ ID NO: 4394858 - DNA, 25 bp, Homo sapien
cacagagccagcggtagtcaaggga

SEQ ID NO: 4394859 - DNA, 25 bp, Homo sapien
aatttggagtaggaagactgtcacg

SEQ ID NO: 4394860 - DNA, 25 bp, Homo sapien
ggtgctctcaaagcagcgtaatgtc

SEQ ID NO: 4394861 - DNA, 25 bp, Homo sapien
ggacaaggacaacatggtaaagagg

SEQ ID NO: 4394862 - DNA, 25 bp, Homo sapien
gactgtcacgttagtcactgaatcc

SEQ ID NO: 4394863 - DNA, 25 bp, Homo sapien
tcacttaggaatatcgccatgggag

SEQ ID NO: 4394864 - DNA, 25 bp, Homo sapien
tgagctgcttttggactaggtgatt

SEQ ID NO: 4394865 - DNA, 25 bp, Homo sapien
gcatatgagaggtatctgagctgct

SEQ ID NO: 4394866 - DNA, 25 bp, Homo sapien
tgactcagctaatgatcacttagga

SEQ ID NO: 4394867 - DNA, 25 bp, Homo sapien
aatgcttagctctctgcaaaaagcc

SEQ ID NO: 4394868 - DNA, 25 bp, Homo sapien
gcccaattgcatgagcagtaggtca

SEQ ID NO: 4394869 - DNA, 25 bp, Homo sapien
gaatccattagatctcctgttcccc

SEQ ID NO: 4394870 - DNA, 25 bp, Homo sapien
cccatgaatccattagatctcctgt

SEQ ID NO: 4394871 - DNA, 25 bp, Homo sapien
ttggtatgcacatcttggctgtttg

SEQ ID NO: 4394872 - DNA, 25 bp, Homo sapien
tgacttaaagggaattttgtggctg

SEQ ID NO: 4394873 - DNA, 25 bp, Homo sapien
tatgttatggagacctagtttttcc

SEQ ID NO: 4394874 - DNA, 25 bp, Homo sapien
atttaccttcgtcagtgatcttagc

SEQ ID NO: 4394875 - DNA, 25 bp, Homo sapien
tggcagagggctctccactccgttt

SEQ ID NO: 4394876 - DNA, 25 bp, Homo sapien
gcagagggctctccactccgtttct

SEQ ID NO: 4394877 - DNA, 25 bp, Homo sapien
tgaacaagtccagttgccgtggggt

SEQ ID NO: 4394878 - DNA, 25 bp, Homo sapien
catggcagagggctctccactccgt

SEQ ID NO: 4394879 - DNA, 25 bp, Homo sapien
ctgaagtacatgctgtacgtttctc

SEQ ID NO: 4394880 - DNA, 25 bp, Homo sapien
ctgttatctgcgcaggcctctctgc

SEQ ID NO: 4394881 - DNA, 25 bp, Homo sapien
ctgctgttatctgcgcaggcctctc

SEQ ID NO: 4394882 - DNA, 25 bp, Homo sapien
catgctgtacgtttctccagctgat

SEQ ID NO: 4394883 - DNA, 25 bp, Homo sapien
gactgggtataaacgcctgtccgct

SEQ ID NO: 4394884 - DNA, 25 bp, Homo sapien
tttgtgtgagacatgctgtgttagg

SEQ ID NO: 4394885 - DNA, 25 bp, Homo sapien
tataaacgcctgtccgctgtgtgct

SEQ ID NO: 4394886 - DNA, 25 bp, Homo sapien
tgtccgctgtgtgctggacagcccc

SEQ ID NO: 4394887 - DNA, 25 bp, Homo sapien
gatcaaaataacgttgcatttgtgt

SEQ ID NO: 4394888 - DNA, 25 bp, Homo sapien
tgaatatattgtactaccctcactg

SEQ ID NO: 4394889 - DNA, 25 bp, Homo sapien
tatattgtactaccctcactgtttt

SEQ ID NO: 4394890 - DNA, 25 bp, Homo sapien
tttttaagatcaaaataacgttgca

SEQ ID NO: 4394891 - DNA, 25 bp, Homo sapien
caccacagtgtctcctttctctgtg

SEQ ID NO: 4394892 - DNA, 25 bp, Homo sapien
acagtgtctcctttctctgtgtagt

SEQ ID NO: 4394893 - DNA, 25 bp, Homo sapien
cagtcaccacagtgtctcctttctc

SEQ ID NO: 4394894 - DNA, 25 bp, Homo sapien
cagtgtctcctttctctgtgtagta

SEQ ID NO: 4394895 - DNA, 25 bp, Homo sapien
ctcattaacattgtaggcaactctg

SEQ ID NO: 4394896 - DNA, 25 bp, Homo sapien
tgcattgatgcgaacatcacactgg

SEQ ID NO: 4394897 - DNA, 25 bp, Homo sapien
ggttaccgtcataccgtatcagcat

SEQ ID NO: 4394898 - DNA, 25 bp, Homo sapien
taggcaactctgaaattttgcagga

SEQ ID NO: 4394899 - DNA, 25 bp, Homo sapien
ctagaactgtccctgatgcacatat

SEQ ID NO: 4394900 - DNA, 25 bp, Homo sapien
tgtccctgatgcacatatagtaaga

SEQ ID NO: 4394901 - DNA, 25 bp, Homo sapien
catatagtaagactttaatttccat

SEQ ID NO: 4394902 - DNA, 25 bp, Homo sapien
gaactgtccctgatgcacatatagt

SEQ ID NO: 4394903 - DNA, 25 bp, Homo sapien
gaccagtaacctcagaagagtcaga

SEQ ID NO: 4394904 - DNA, 25 bp, Homo sapien
ccagtaacctcagaagagtcagaag

SEQ ID NO: 4394905 - DNA, 25 bp, Homo sapien
atgaaggattttgaccagtaacctc

SEQ ID NO: 4394906 - DNA, 25 bp, Homo sapien
ttttgaccagtaacctcagaagagt

SEQ ID NO: 4394907 - DNA, 25 bp, Homo sapien
aaaaggaaggtagagcacgggccat

SEQ ID NO: 4394908 - DNA, 25 bp, Homo sapien
gaaggttctgacctttgtgaccacg

SEQ ID NO: 4394909 - DNA, 25 bp, Homo sapien
gaacacttatgagaggaatcgatgg

SEQ ID NO: 4394910 - DNA, 25 bp, Homo sapien
aaacccgggcttgcgtgtctggcaa

SEQ ID NO: 4394911 - DNA, 25 bp, Homo sapien
tgtgcctttttttttatgtgtgtgt

SEQ ID NO: 4394912 - DNA, 25 bp, Homo sapien
gtgtgtgtgtgtgtcactctgtctc

SEQ ID NO: 4394913 - DNA, 25 bp, Homo sapien
tgtgtgtgtgtcactctgtctccca

SEQ ID NO: 4394914 - DNA, 25 bp, Homo sapien
ctggttgtgcctttttttttatgtg

SEQ ID NO: 4394915 - DNA, 25 bp, Homo sapien
tcatgctgagaatgaagaaccaggg

SEQ ID NO: 4394916 - DNA, 25 bp, Homo sapien
ggcttttccttgctgcttgtggtcc

SEQ ID NO: 4394917 - DNA, 25 bp, Homo sapien
ggggcaacactaaagaaacctgcac

SEQ ID NO: 4394918 - DNA, 25 bp, Homo sapien
gctgctataacacagccaccaagtc

SEQ ID NO: 4394919 - DNA, 25 bp, Homo sapien
tgcagaggtatgtgtctgttgaaag

SEQ ID NO: 4394920 - DNA, 25 bp, Homo sapien
gaggaagctgtacacgatgacacgg

SEQ ID NO: 4394921 - DNA, 25 bp, Homo sapien
cagaggtatgtgtctgttgaaagag

SEQ ID NO: 4394922 - DNA, 25 bp, Homo sapien
tgtacacgatgacacggcagagtca

SEQ ID NO: 4394923 - DNA, 25 bp, Homo sapien
caggtaggtgctcttgttgtaagtc

SEQ ID NO: 4394924 - DNA, 25 bp, Homo sapien
caacttcgtattccttcttagctag

SEQ ID NO: 4394925 - DNA, 25 bp, Homo sapien
gctagttccttgattgatctccaga

SEQ ID NO: 4394926 - DNA, 25 bp, Homo sapien
gatctccagacatggagtggcaggt

SEQ ID NO: 4394927 - DNA, 25 bp, Homo sapien
cacggttgatcatgctgaccacaga

SEQ ID NO: 4394928 - DNA, 25 bp, Homo sapien
gcttgaggtgcctgaccatccctgg

SEQ ID NO: 4394929 - DNA, 25 bp, Homo sapien
atattgaccacacggttgatcatgc

SEQ ID NO: 4394930 - DNA, 25 bp, Homo sapien
tccatattgaccacacggttgatca

SEQ ID NO: 4394931 - DNA, 25 bp, Homo sapien
tctgaatcgactctcaaggctgaat

SEQ ID NO: 4394932 - DNA, 25 bp, Homo sapien
tctgattctgaatcgactctcaagg

SEQ ID NO: 4394933 - DNA, 25 bp, Homo sapien
gtgctatatactcttctgacctctc

SEQ ID NO: 4394934 - DNA, 25 bp, Homo sapien
cctctctgattctgaatcgactctc

SEQ ID NO: 4394935 - DNA, 25 bp, Homo sapien
tgggtctggagacactttctgaatg

SEQ ID NO: 4394936 - DNA, 25 bp, Homo sapien
tgcctaggaggtagctgtggtgttt

SEQ ID NO: 4394937 - DNA, 25 bp, Homo sapien
ggagacactttctgaatgcctagga

SEQ ID NO: 4394938 - DNA, 25 bp, Homo sapien
gctgtggtgttttgcaggataagaa

SEQ ID NO: 4394939 - DNA, 25 bp, Homo sapien
tttactgaaaaatggtagcactggc

SEQ ID NO: 4394940 - DNA, 25 bp, Homo sapien
gagatgtatcggttcagagctgact

SEQ ID NO: 4394941 - DNA, 25 bp, Homo sapien
tatgtgtacccacatacgtgcatgt

SEQ ID NO: 4394942 - DNA, 25 bp, Homo sapien
gactgcgagagacaaaaacgggcag

SEQ ID NO: 4394943 - DNA, 25 bp, Homo sapien
attctttatgtagtagtgatggcca

SEQ ID NO: 4394944 - DNA, 25 bp, Homo sapien
agagaggtaggaaggtggatgaagg

SEQ ID NO: 4394945 - DNA, 25 bp, Homo sapien
tctttatgtagtagtgatggccaat

SEQ ID NO: 4394946 - DNA, 25 bp, Homo sapien
gaggtaggaaggtggatgaaggaaa

SEQ ID NO: 4394947 - DNA, 25 bp, Homo sapien
gcttaggttataaggtactgccacc

SEQ ID NO: 4394948 - DNA, 25 bp, Homo sapien
ggtactgccacctcattccactgtt

SEQ ID NO: 4394949 - DNA, 25 bp, Homo sapien
ccactgttgagaattgtctaatgca

SEQ ID NO: 4394950 - DNA, 25 bp, Homo sapien
ttttacatgtagaatggcttaggtt

SEQ ID NO: 4394951 - DNA, 25 bp, Homo sapien
gctttgtatttgaacggttcgtaca

SEQ ID NO: 4394952 - DNA, 25 bp, Homo sapien
cggttcgtacacaaacagttctctt

SEQ ID NO: 4394953 - DNA, 25 bp, Homo sapien
attaaaagagcagccggtggacgtg

SEQ ID NO: 4394954 - DNA, 25 bp, Homo sapien
tttgattaagtatccggtgaaacca

SEQ ID NO: 4394955 - DNA, 25 bp, Homo sapien
taattgggtaactctctgcctcctc

SEQ ID NO: 4394956 - DNA, 25 bp, Homo sapien
cttctccaaactcaataattgggta

SEQ ID NO: 4394957 - DNA, 25 bp, Homo sapien
tcttctccaaactcaataattgggt

SEQ ID NO: 4394958 - DNA, 25 bp, Homo sapien
tttcttctccaaactcaataattgg

SEQ ID NO: 4394959 - DNA, 25 bp, Homo sapien
taaagatgatggctatgggcatgat

SEQ ID NO: 4394960 - DNA, 25 bp, Homo sapien
tgaagctaaggttaaagatgatggc

SEQ ID NO: 4394961 - DNA, 25 bp, Homo sapien
ggttggggactgattgatgatccct

SEQ ID NO: 4394962 - DNA, 25 bp, Homo sapien
ggcatgatgacagtaattgttcttc

SEQ ID NO: 4394963 - DNA, 25 bp, Homo sapien
ccttgctaaggcacagacttgtgta

SEQ ID NO: 4394964 - DNA, 25 bp, Homo sapien
tccttgctaaggcacagacttgtgt

SEQ ID NO: 4394965 - DNA, 25 bp, Homo sapien
caacaatccttgctaaggcacagac

SEQ ID NO: 4394966 - DNA, 25 bp, Homo sapien
aggcccaacaatccttgctaaggca

SEQ ID NO: 4394967 - DNA, 25 bp, Homo sapien
acatctccaatagaaaggagaacac

SEQ ID NO: 4394968 - DNA, 25 bp, Homo sapien
caatagaaaggagaacacttgggaa

SEQ ID NO: 4394969 - DNA, 25 bp, Homo sapien
tccaatagaaaggagaacacttggg

SEQ ID NO: 4394970 - DNA, 25 bp, Homo sapien
tctccaatagaaaggagaacacttg

SEQ ID NO: 4394971 - DNA, 25 bp, Homo sapien
gatatcacatgacctacaagcaagt

SEQ ID NO: 4394972 - DNA, 25 bp, Homo sapien
ccagctgtgagtggctcaactccag

SEQ ID NO: 4394973 - DNA, 25 bp, Homo sapien
tgccaacctattgtgacacctgggt

SEQ ID NO: 4394974 - DNA, 25 bp, Homo sapien
ggactagagtcttatgcccaggatc

SEQ ID NO: 4394975 - DNA, 25 bp, Homo sapien
gaaaattgctaggtgctcagagagg

SEQ ID NO: 4394976 - DNA, 25 bp, Homo sapien
caaaatatgtgaatacctccagaga

SEQ ID NO: 4394977 - DNA, 25 bp, Homo sapien
gaagagtagttagggtcatagtgcc

SEQ ID NO: 4394978 - DNA, 25 bp, Homo sapien
aacttctgtcaggttagtgctctca

SEQ ID NO: 4394979 - DNA, 25 bp, Homo sapien
agtgctacacaaatgcaatgatgct

SEQ ID NO: 4394980 - DNA, 25 bp, Homo sapien
taatgaactatggaagactaggtgg

SEQ ID NO: 4394981 - DNA, 25 bp, Homo sapien
tcatgaaatagtagtagcggttgcc

SEQ ID NO: 4394982 - DNA, 25 bp, Homo sapien
ggtttctggaaatgatactcatacc

SEQ ID NO: 4394983 - DNA, 25 bp, Homo sapien
gggtcagtcctttgatactattcac

SEQ ID NO: 4394984 - DNA, 25 bp, Homo sapien
cctcgggtcagtcctttgatactat

SEQ ID NO: 4394985 - DNA, 25 bp, Homo sapien
catctacctcgggtcagtcctttga

SEQ ID NO: 4394986 - DNA, 25 bp, Homo sapien
tctacctcgggtcagtcctttgata

SEQ ID NO: 4394987 - DNA, 25 bp, Homo sapien
tacgcaatttgttttccgtccatcc

SEQ ID NO: 4394988 - DNA, 25 bp, Homo sapien
ctttcgatcctttgagcctctcaag

SEQ ID NO: 4394989 - DNA, 25 bp, Homo sapien
tggcatctgcccaactgtgttgggc

SEQ ID NO: 4394990 - DNA, 25 bp, Homo sapien
aggaagcctgggttggcatctgccc

SEQ ID NO: 4394991 - DNA, 25 bp, Homo sapien
gaaagccatttgaggaggtcgctgt

SEQ ID NO: 4394992 - DNA, 25 bp, Homo sapien
gtggcatgaatctggacaagtcttt

SEQ ID NO: 4394993 - DNA, 25 bp, Homo sapien
aggtcgctgtggcatgaatctggac

SEQ ID NO: 4394994 - DNA, 25 bp, Homo sapien
ccatttgaggaggtcgctgtggcat

SEQ ID NO: 4394995 - DNA, 25 bp, Homo sapien
gaacatcttcaatttccgactttgc

SEQ ID NO: 4394996 - DNA, 25 bp, Homo sapien
tccttctctgtatggtgctgtacca

SEQ ID NO: 4394997 - DNA, 25 bp, Homo sapien
caagatctcttattgggaccaggtt

SEQ ID NO: 4394998 - DNA, 25 bp, Homo sapien
caatttccgactttgccttccttct

SEQ ID NO: 4394999 - DNA, 25 bp, Homo sapien
gacttgttggatgattgagtaagcg

SEQ ID NO: 4395000 - DNA, 25 bp, Homo sapien
cagttctctttgcattaacacagga

SEQ ID NO: 4395001 - DNA, 25 bp, Homo sapien
ttccttcctcgtgacagagctgaga

SEQ ID NO: 4395002 - DNA, 25 bp, Homo sapien
catttgttccttcctcgtgacagag

SEQ ID NO: 4395003 - DNA, 25 bp, Homo sapien
tattggtctgagtactttaagagaa

SEQ ID NO: 4395004 - DNA, 25 bp, Homo sapien
tctcctcgaggctttctagttgtag

SEQ ID NO: 4395005 - DNA, 25 bp, Homo sapien
acaagtactgcaaccacaattttgg

SEQ ID NO: 4395006 - DNA, 25 bp, Homo sapien
tctctgctgttcttaacaagtactg

SEQ ID NO: 4395007 - DNA, 25 bp, Homo sapien
agctgaagactcaatatgagaacac

SEQ ID NO: 4395008 - DNA, 25 bp, Homo sapien
tttgtcacggctgctttttgacagc

SEQ ID NO: 4395009 - DNA, 25 bp, Homo sapien
cggctgctttttgacagccaccaag

SEQ ID NO: 4395010 - DNA, 25 bp, Homo sapien
acagccaccaagctgaagactcaat

SEQ ID NO: 4395011 - DNA, 25 bp, Homo sapien
gtttcacactctgtgatatagtcca

SEQ ID NO: 4395012 - DNA, 25 bp, Homo sapien
gttgcttcttggatgacattaatgt

SEQ ID NO: 4395013 - DNA, 25 bp, Homo sapien
gttttgtcaatattgcacgcaagtg

SEQ ID NO: 4395014 - DNA, 25 bp, Homo sapien
tcttggatgacattaatgtttgttt

SEQ ID NO: 4395015 - DNA, 25 bp, Homo sapien
caaagctagagtcaccgagggattg

SEQ ID NO: 4395016 - DNA, 25 bp, Homo sapien
aagacgtgtagttgaaagctgggca

SEQ ID NO: 4395017 - DNA, 25 bp, Homo sapien
attggaaggatgaaagacgtgtagt

SEQ ID NO: 4395018 - DNA, 25 bp, Homo sapien
caccatggaagaccgaaacactctt

SEQ ID NO: 4395019 - DNA, 25 bp, Homo sapien
aggggtttcgtcttgagaatgtcag

SEQ ID NO: 4395020 - DNA, 25 bp, Homo sapien
gattttacagttacatgtcagattg

SEQ ID NO: 4395021 - DNA, 25 bp, Homo sapien
tcactcctcgggcccagtgatttta

SEQ ID NO: 4395022 - DNA, 25 bp, Homo sapien
cagattgaggggtttcgtcttgaga

SEQ ID NO: 4395023 - DNA, 25 bp, Homo sapien
tcctggtcacgtcatttctctttga

SEQ ID NO: 4395024 - DNA, 25 bp, Homo sapien
ttcctggtcacgtcatttctctttg

SEQ ID NO: 4395025 - DNA, 25 bp, Homo sapien
tgaatgtttatgatacttcctggtc

SEQ ID NO: 4395026 - DNA, 25 bp, Homo sapien
tgcgtgcacggtttcttcattaatg

SEQ ID NO: 4395027 - DNA, 25 bp, Homo sapien
tatttggcaattatatctgcgtgca

SEQ ID NO: 4395028 - DNA, 25 bp, Homo sapien
taatgtcgtcttattcctgtgtaaa

SEQ ID NO: 4395029 - DNA, 25 bp, Homo sapien
cttcattaatgtcgtcttattcctg

SEQ ID NO: 4395030 - DNA, 25 bp, Homo sapien
gtctgttcggtactaggatctcctg

SEQ ID NO: 4395031 - DNA, 25 bp, Homo sapien
tatttagtcatgctaggataagacc

SEQ ID NO: 4395032 - DNA, 25 bp, Homo sapien
gctatccagctcgtttgttaattta

SEQ ID NO: 4395033 - DNA, 25 bp, Homo sapien
gtagaaattgtactagctatccagc

SEQ ID NO: 4395034 - DNA, 25 bp, Homo sapien
taacttagaggattatagggcactc

SEQ ID NO: 4395035 - DNA, 25 bp, Homo sapien
gaagcttaagatgagaccctttgga

SEQ ID NO: 4395036 - DNA, 25 bp, Homo sapien
gatatatcattgactacaaggatgg

SEQ ID NO: 4395037 - DNA, 25 bp, Homo sapien
gtagccatcccttgcaagtattagg

SEQ ID NO: 4395038 - DNA, 25 bp, Homo sapien
tctgctcagaacacgtcaccaaatt

SEQ ID NO: 4395039 - DNA, 25 bp, Homo sapien
tgcaatttgggactgtcttctatcc

SEQ ID NO: 4395040 - DNA, 25 bp, Homo sapien
aaataacaaggtggctgaacttctg

SEQ ID NO: 4395041 - DNA, 25 bp, Homo sapien
ggccgacctggtctgctaaaataac

SEQ ID NO: 4395042 - DNA, 25 bp, Homo sapien
gagtttgttgacaaactttgacaac

SEQ ID NO: 4395043 - DNA, 25 bp, Homo sapien
cattccagagtttgttgacaaactt

SEQ ID NO: 4395044 - DNA, 25 bp, Homo sapien
ttccagagtttgttgacaaactttg

SEQ ID NO: 4395045 - DNA, 25 bp, Homo sapien
ccagagtttgttgacaaactttgac

SEQ ID NO: 4395046 - DNA, 25 bp, Homo sapien
tcaacatactcagtgagctgcagct

SEQ ID NO: 4395047 - DNA, 25 bp, Homo sapien
gaagacctggcttgacattctgatc

SEQ ID NO: 4395048 - DNA, 25 bp, Homo sapien
cattctgatcctttgctttagagtc

SEQ ID NO: 4395049 - DNA, 25 bp, Homo sapien
gaagtacaacattccagctggtctg

SEQ ID NO: 4395050 - DNA, 25 bp, Homo sapien
cctctgagtgatcaagtttagattc

SEQ ID NO: 4395051 - DNA, 25 bp, Homo sapien
cctcctctgagtgatcaagtttaga

SEQ ID NO: 4395052 - DNA, 25 bp, Homo sapien
gagtgatcaagtttagattcagttg

SEQ ID NO: 4395053 - DNA, 25 bp, Homo sapien
gatcaagtttagattcagttgccct

SEQ ID NO: 4395054 - DNA, 25 bp, Homo sapien
gataggtgctgtatgtctcaaggag

SEQ ID NO: 4395055 - DNA, 25 bp, Homo sapien
cacagagtaacatgagctatgccca

SEQ ID NO: 4395056 - DNA, 25 bp, Homo sapien
gctgggactttataagcacgcccca

SEQ ID NO: 4395057 - DNA, 25 bp, Homo sapien
cttttcaaaggagtgagtaagcaca

SEQ ID NO: 4395058 - DNA, 25 bp, Homo sapien
aattttatgggaaggctacatgctt

SEQ ID NO: 4395059 - DNA, 25 bp, Homo sapien
cagtattgtaccaagatttgcacac

SEQ ID NO: 4395060 - DNA, 25 bp, Homo sapien
tgtgtctagacacagctcgcttttt

SEQ ID NO: 4395061 - DNA, 25 bp, Homo sapien
gctatttctactcaagtcaaggttt

SEQ ID NO: 4395062 - DNA, 25 bp, Homo sapien
tcttgaacttccaccaagcacagtt

SEQ ID NO: 4395063 - DNA, 25 bp, Homo sapien
gttggactgaattgctgcctactga

SEQ ID NO: 4395064 - DNA, 25 bp, Homo sapien
ggttgtgacttcctgcaggacgtga

SEQ ID NO: 4395065 - DNA, 25 bp, Homo sapien
gttgatgctcagtaatagatcctta

SEQ ID NO: 4395066 - DNA, 25 bp, Homo sapien
tatacaaaactgagcctgtcacaaa

SEQ ID NO: 4395067 - DNA, 25 bp, Homo sapien
caaaatgtgtatcgacagacagtct

SEQ ID NO: 4395068 - DNA, 25 bp, Homo sapien
tcagcagagggtactctggaagcat

SEQ ID NO: 4395069 - DNA, 25 bp, Homo sapien
ggtgctatagaccagtactcagggt

SEQ ID NO: 4395070 - DNA, 25 bp, Homo sapien
tcttggaagatctgaggaagtttcc

SEQ ID NO: 4395071 - DNA, 25 bp, Homo sapien
gaagatctgaggaagtttcctatga

SEQ ID NO: 4395072 - DNA, 25 bp, Homo sapien
ctagtcttggaagatctgaggaagt

SEQ ID NO: 4395073 - DNA, 25 bp, Homo sapien
tggaagatctgaggaagtttcctat

SEQ ID NO: 4395074 - DNA, 25 bp, Homo sapien
gtctgacaaacttgtaggagtttgc

SEQ ID NO: 4395075 - DNA, 25 bp, Homo sapien
tgcatccgatctgaactaaactgag

SEQ ID NO: 4395076 - DNA, 25 bp, Homo sapien
tgtctcctgccataacaccctgaat

SEQ ID NO: 4395077 - DNA, 25 bp, Homo sapien
aaacttgtaggagtttgcgaggtga

SEQ ID NO: 4395078 - DNA, 25 bp, Homo sapien
cttggggaaagtagagaggaagaag

SEQ ID NO: 4395079 - DNA, 25 bp, Homo sapien
cttgtccttgtaggcagttgcaggc

SEQ ID NO: 4395080 - DNA, 25 bp, Homo sapien
ttgtccttgtaggcagttgcaggca

SEQ ID NO: 4395081 - DNA, 25 bp, Homo sapien
ttcttttggcgcctcatcttcagaa

SEQ ID NO: 4395082 - DNA, 25 bp, Homo sapien
gacttacgtcgtagcttagcagagg

SEQ ID NO: 4395083 - DNA, 25 bp, Homo sapien
ggcattgtcccagcgtttcggtaga

SEQ ID NO: 4395084 - DNA, 25 bp, Homo sapien
tcggtagatacttcctcctttgact

SEQ ID NO: 4395085 - DNA, 25 bp, Homo sapien
aagccatcgctgaatcctgccaaaa

SEQ ID NO: 4395086 - DNA, 25 bp, Homo sapien
gcagatggattccaggaacgtggct

SEQ ID NO: 4395087 - DNA, 25 bp, Homo sapien
ttccaggaacgtggctagagctgcc

SEQ ID NO: 4395088 - DNA, 25 bp, Homo sapien
caaagccatcgctgaatcctgccaa

SEQ ID NO: 4395089 - DNA, 25 bp, Homo sapien
gggcacacttggacctggataggct

SEQ ID NO: 4395090 - DNA, 25 bp, Homo sapien
cacttggacctggataggctccacc

SEQ ID NO: 4395091 - DNA, 25 bp, Homo sapien
acctggataggctccaccagtctgc

SEQ ID NO: 4395092 - DNA, 25 bp, Homo sapien
ctcgggcacacttggacctggatag

SEQ ID NO: 4395093 - DNA, 25 bp, Homo sapien
aacttgcaatttagtactgtttata

SEQ ID NO: 4395094 - DNA, 25 bp, Homo sapien
ctctcttgcattcttaacttgcaat

SEQ ID NO: 4395095 - DNA, 25 bp, Homo sapien
aggttagagacattcgactaaatgg

SEQ ID NO: 4395096 - DNA, 25 bp, Homo sapien
cagtgggtcagacagtcttttgtat

SEQ ID NO: 4395097 - DNA, 25 bp, Homo sapien
tccgaagatacggctcagagagcca

SEQ ID NO: 4395098 - DNA, 25 bp, Homo sapien
ctccgaagatacggctcagagagcc

SEQ ID NO: 4395099 - DNA, 25 bp, Homo sapien
tgctgaacctgctcgcaatttattt

SEQ ID NO: 4395100 - DNA, 25 bp, Homo sapien
gaatctaacccatgtggtcactaca

SEQ ID NO: 4395101 - DNA, 25 bp, Homo sapien
ttttcaggacaaaccgactaccaga

SEQ ID NO: 4395102 - DNA, 25 bp, Homo sapien
tcttccgatagacatggatttggca

SEQ ID NO: 4395103 - DNA, 25 bp, Homo sapien
tagaccctaaggatggaaagcccaa

SEQ ID NO: 4395104 - DNA, 25 bp, Homo sapien
tacccacatggagtttagagaggaa

SEQ ID NO: 4395105 - DNA, 25 bp, Homo sapien
tcaaatcagggcaaccacaggatag

SEQ ID NO: 4395106 - DNA, 25 bp, Homo sapien
cacaggatagctggagtgttgactc

SEQ ID NO: 4395107 - DNA, 25 bp, Homo sapien
taataatgagaccaagctcttcttg

SEQ ID NO: 4395108 - DNA, 25 bp, Homo sapien
taatgagaccaagctcttcttgggc

SEQ ID NO: 4395109 - DNA, 25 bp, Homo sapien
cttcttgggcaataaaactctgaat

SEQ ID NO: 4395110 - DNA, 25 bp, Homo sapien
tgatatgaatccctaataatgagac

SEQ ID NO: 4395111 - DNA, 25 bp, Homo sapien
tatgaaggctactatgcagcagggc

SEQ ID NO: 4395112 - DNA, 25 bp, Homo sapien
caaccagggacgctattatgaaggc

SEQ ID NO: 4395113 - DNA, 25 bp, Homo sapien
gaaatgactctgaccctacctatgg

SEQ ID NO: 4395114 - DNA, 25 bp, Homo sapien
tcaaggcctacctttaatgtgcagg

SEQ ID NO: 4395115 - DNA, 25 bp, Homo sapien
tcaaattcatcggacagccacagct

SEQ ID NO: 4395116 - DNA, 25 bp, Homo sapien
catgctttggatggcaggagctcct

SEQ ID NO: 4395117 - DNA, 25 bp, Homo sapien
gcagatagatccctcaagtcagtag

SEQ ID NO: 4395118 - DNA, 25 bp, Homo sapien
gattgttcccatgctttgaccgtgg

SEQ ID NO: 4395119 - DNA, 25 bp, Homo sapien
tgctgagttctgatagatgcaagac

SEQ ID NO: 4395120 - DNA, 25 bp, Homo sapien
taacattgaacctcaaagaggaaag

SEQ ID NO: 4395121 - DNA, 25 bp, Homo sapien
ccttagctccattgttctgcatcag

SEQ ID NO: 4395122 - DNA, 25 bp, Homo sapien
gatgcaagacaagctaaagacctcc

SEQ ID NO: 4395123 - DNA, 25 bp, Homo sapien
gaaacctttggatagaacattgagt

SEQ ID NO: 4395124 - DNA, 25 bp, Homo sapien
catccaaaaactgtcgttcttgaaa

SEQ ID NO: 4395125 - DNA, 25 bp, Homo sapien
ataaacatccaaaaactgtcgttct

SEQ ID NO: 4395126 - DNA, 25 bp, Homo sapien
cctttggatagaacattgagttgca

SEQ ID NO: 4395127 - DNA, 25 bp, Homo sapien
ggacaagtggaaggtattcttcagt

SEQ ID NO: 4395128 - DNA, 25 bp, Homo sapien
ggaaggtattcttcagttgtatttg

SEQ ID NO: 4395129 - DNA, 25 bp, Homo sapien
tatttggtagttcttctgtagcgcc

SEQ ID NO: 4395130 - DNA, 25 bp, Homo sapien
atttctctcttgctagccctcaact

SEQ ID NO: 4395131 - DNA, 25 bp, Homo sapien
tatttccagtgatgtgatgcttatt

SEQ ID NO: 4395132 - DNA, 25 bp, Homo sapien
agtgatgtgatgcttattaccttcc

SEQ ID NO: 4395133 - DNA, 25 bp, Homo sapien
ctttagatacgttgaagacaatact

SEQ ID NO: 4395134 - DNA, 25 bp, Homo sapien
tatgctttctttagatacgttgaag

SEQ ID NO: 4395135 - DNA, 25 bp, Homo sapien
tcctcagtgcttaagcacttcttca

SEQ ID NO: 4395136 - DNA, 25 bp, Homo sapien
tgaagcatctgtattcggggtcctg

SEQ ID NO: 4395137 - DNA, 25 bp, Homo sapien
tgtattcggggtcctgtcctcatcc

SEQ ID NO: 4395138 - DNA, 25 bp, Homo sapien
tctccatttggatggccatcctcag

SEQ ID NO: 4395139 - DNA, 25 bp, Homo sapien
tgtgggaacgtggatcccttctctt

SEQ ID NO: 4395140 - DNA, 25 bp, Homo sapien
gtctcgtgcatggagtacaaggtca

SEQ ID NO: 4395141 - DNA, 25 bp, Homo sapien
acaaggtcacttttcattaggagac

SEQ ID NO: 4395142 - DNA, 25 bp, Homo sapien
cgcagtaatacctacagtgtgggaa

SEQ ID NO: 4395143 - DNA, 25 bp, Homo sapien
tggaacccctgttttgaactgttca

SEQ ID NO: 4395144 - DNA, 25 bp, Homo sapien
gatttccctgtgtaagctcacttgc

SEQ ID NO: 4395145 - DNA, 25 bp, Homo sapien
ctgctgactttgggatgccagctgt

SEQ ID NO: 4395146 - DNA, 25 bp, Homo sapien
tgaactgttcacttctactctggat

SEQ ID NO: 4395147 - DNA, 25 bp, Homo sapien
tggtcctttggctggctgcattact

SEQ ID NO: 4395148 - DNA, 25 bp, Homo sapien
tacttgatgatactccagagcccca

SEQ ID NO: 4395149 - DNA, 25 bp, Homo sapien
tttgagccaaaagagttacttgatg

SEQ ID NO: 4395150 - DNA, 25 bp, Homo sapien
tgttccagaaggtgtgacaatctgg

SEQ ID NO: 4395151 - DNA, 25 bp, Homo sapien
cggcatgccgctaaatgtgtaaaac

SEQ ID NO: 4395152 - DNA, 25 bp, Homo sapien
cccatagccttgtttgaataaataa

SEQ ID NO: 4395153 - DNA, 25 bp, Homo sapien
aaacctagaagatatcccatagcct

SEQ ID NO: 4395154 - DNA, 25 bp, Homo sapien
ggttcatttcggcatgccgctaaat

SEQ ID NO: 4395155 - DNA, 25 bp, Homo sapien
gcccggccagctaacatactctttt

SEQ ID NO: 4395156 - DNA, 25 bp, Homo sapien
cccggccagctaacatactcttttg

SEQ ID NO: 4395157 - DNA, 25 bp, Homo sapien
tcgcccggccagctaacatactctt

SEQ ID NO: 4395158 - DNA, 25 bp, Homo sapien
cctcgcccggccagctaacatactc

SEQ ID NO: 4395159 - DNA, 25 bp, Homo sapien
ccactgctttgacaacaccttttag

SEQ ID NO: 4395160 - DNA, 25 bp, Homo sapien
tgttctttccataagctcgttccct

SEQ ID NO: 4395161 - DNA, 25 bp, Homo sapien
tcactgttttccaatcgcttgttct

SEQ ID NO: 4395162 - DNA, 25 bp, Homo sapien
gctgctgccaagacaatagtatgtt

SEQ ID NO: 4395163 - DNA, 25 bp, Homo sapien
gcgggacttattggagtaactgaaa

SEQ ID NO: 4395164 - DNA, 25 bp, Homo sapien
tgctcctccagacatagagaaaatg

SEQ ID NO: 4395165 - DNA, 25 bp, Homo sapien
gattctggatactgtggctcttcct

SEQ ID NO: 4395166 - DNA, 25 bp, Homo sapien
tactcagtctcttaaggaagggtag

SEQ ID NO: 4395167 - DNA, 25 bp, Homo sapien
tagtgttttcttgtactgccccgac

SEQ ID NO: 4395168 - DNA, 25 bp, Homo sapien
gactgctgcaatcctctctcttaca

SEQ ID NO: 4395169 - DNA, 25 bp, Homo sapien
gccccgactgctgcaatcctctctc

SEQ ID NO: 4395170 - DNA, 25 bp, Homo sapien
ttaagttttggtgattggaatcctc

SEQ ID NO: 4395171 - DNA, 25 bp, Homo sapien
tgtggaaacggccaaatcttcaact

SEQ ID NO: 4395172 - DNA, 25 bp, Homo sapien
ttttctttattcacccagccaactg

SEQ ID NO: 4395173 - DNA, 25 bp, Homo sapien
ctttattcacccagccaactggaag

SEQ ID NO: 4395174 - DNA, 25 bp, Homo sapien
tggaaacggccaaatcttcaactac

SEQ ID NO: 4395175 - DNA, 25 bp, Homo sapien
acattgctttatagtttctgttcca

SEQ ID NO: 4395176 - DNA, 25 bp, Homo sapien
gaagcagcaattcatactttcctta

SEQ ID NO: 4395177 - DNA, 25 bp, Homo sapien
tcttaacacattgctttatagtttc

SEQ ID NO: 4395178 - DNA, 25 bp, Homo sapien
agaagcagcaattcatactttcctt

SEQ ID NO: 4395179 - DNA, 25 bp, Homo sapien
ggagcactgagtatccttgcattca

SEQ ID NO: 4395180 - DNA, 25 bp, Homo sapien
caagttttatctttcatactcagcg

SEQ ID NO: 4395181 - DNA, 25 bp, Homo sapien
tatgaaacgcaagttttatctttca

SEQ ID NO: 4395182 - DNA, 25 bp, Homo sapien
ttatctttcatactcagcgctggag

SEQ ID NO: 4395183 - DNA, 25 bp, Homo sapien
agcatttgatctaccttctctaaga

SEQ ID NO: 4395184 - DNA, 25 bp, Homo sapien
catttgatctaccttctctaagata

SEQ ID NO: 4395185 - DNA, 25 bp, Homo sapien
tatgatgggcttttggcctaaaccc

SEQ ID NO: 4395186 - DNA, 25 bp, Homo sapien
agaaccatgaccttgctgagaggca

SEQ ID NO: 4395187 - DNA, 25 bp, Homo sapien
gcactgcatgccaaatgagacttag

SEQ ID NO: 4395188 - DNA, 25 bp, Homo sapien
tagatgacggaatttggcacagctc

SEQ ID NO: 4395189 - DNA, 25 bp, Homo sapien
tatcatcaaagtgctgactaatgca

SEQ ID NO: 4395190 - DNA, 25 bp, Homo sapien
ctttatcatcaaagtgctgactaat

SEQ ID NO: 4395191 - DNA, 25 bp, Homo sapien
tcatcaaagtgctgactaatgcagt

SEQ ID NO: 4395192 - DNA, 25 bp, Homo sapien
catcaaagtgctgactaatgcagta

SEQ ID NO: 4395193 - DNA, 25 bp, Homo sapien
ttgatgtactttttcgagatttcac

SEQ ID NO: 4395194 - DNA, 25 bp, Homo sapien
ctggaatcttgttcttgctagatct

SEQ ID NO: 4395195 - DNA, 25 bp, Homo sapien
ccaagacctaattcaaatgccacct

SEQ ID NO: 4395196 - DNA, 25 bp, Homo sapien
ctttctctgtgctctgatagcacat

SEQ ID NO: 4395197 - DNA, 25 bp, Homo sapien
ccctttctctgtgctctgatagcac

SEQ ID NO: 4395198 - DNA, 25 bp, Homo sapien
tcccctttctctgtgctctgatagc

SEQ ID NO: 4395199 - DNA, 25 bp, Homo sapien
ctcccctttctctgtgctctgatag

SEQ ID NO: 4395200 - DNA, 25 bp, Homo sapien
acgtcagtgtttatctctatttgaa

SEQ ID NO: 4395201 - DNA, 25 bp, Homo sapien
gtttatctctatttgaattaacact

SEQ ID NO: 4395202 - DNA, 25 bp, Homo sapien
aattgttaacgtcagtgtttatctc

SEQ ID NO: 4395203 - DNA, 25 bp, Homo sapien
ttcctctaaattgttaacgtcagtg

SEQ ID NO: 4395204 - DNA, 25 bp, Homo sapien
tatgctggaacctgctgtgttctac

SEQ ID NO: 4395205 - DNA, 25 bp, Homo sapien
ttatgctggaacctgctgtgttcta

SEQ ID NO: 4395206 - DNA, 25 bp, Homo sapien
gacgcattagactcaaggtggactt

SEQ ID NO: 4395207 - DNA, 25 bp, Homo sapien
gcagcccgttcccattcaaaatgta

SEQ ID NO: 4395208 - DNA, 25 bp, Homo sapien
gacttaatttggagatcacctatga

SEQ ID NO: 4395209 - DNA, 25 bp, Homo sapien
taataacagcattctcgctgacgca

SEQ ID NO: 4395210 - DNA, 25 bp, Homo sapien
taaaatacatagcaggtcagatagc

SEQ ID NO: 4395211 - DNA, 25 bp, Homo sapien
gcattggtgctacagcagatgaaaa

SEQ ID NO: 4395212 - DNA, 25 bp, Homo sapien
cagtccacagagatcctctctttat

SEQ ID NO: 4395213 - DNA, 25 bp, Homo sapien
atgccatcagtccacagagatcctc

SEQ ID NO: 4395214 - DNA, 25 bp, Homo sapien
tattatggtgaatagtgtgaccgct

SEQ ID NO: 4395215 - DNA, 25 bp, Homo sapien
tgaggtctctattatgggtgaaatc

SEQ ID NO: 4395216 - DNA, 25 bp, Homo sapien
tgggtgaaatctggtctgcctaatt

SEQ ID NO: 4395217 - DNA, 25 bp, Homo sapien
tagtgtgaccgctataattgtgagg

SEQ ID NO: 4395218 - DNA, 25 bp, Homo sapien
gattaatttgcctgggatcctacaa

SEQ ID NO: 4395219 - DNA, 25 bp, Homo sapien
aaatgttataaaggagctctgtacc

SEQ ID NO: 4395220 - DNA, 25 bp, Homo sapien
tttatgcagagcctatgatatgtcc

SEQ ID NO: 4395221 - DNA, 25 bp, Homo sapien
caagaagtccatagaccattatagg

SEQ ID NO: 4395222 - DNA, 25 bp, Homo sapien
taaggaaacttgtgaccgatgctat

SEQ ID NO: 4395223 - DNA, 25 bp, Homo sapien
gtatacgcataaagaaaagaggcca

SEQ ID NO: 4395224 - DNA, 25 bp, Homo sapien
tgcgtagtctttcgtttcctgagaa

SEQ ID NO: 4395225 - DNA, 25 bp, Homo sapien
cgactcccatcctaatcttgcgtag

SEQ ID NO: 4395226 - DNA, 25 bp, Homo sapien
tcttccatgaaccactgtgcactgt

SEQ ID NO: 4395227 - DNA, 25 bp, Homo sapien
ctcttccatgaaccactgtgcactg

SEQ ID NO: 4395228 - DNA, 25 bp, Homo sapien
tccatgaaccactgtgcactgtaca

SEQ ID NO: 4395229 - DNA, 25 bp, Homo sapien
attccctcttccatgaaccactgtg

SEQ ID NO: 4395230 - DNA, 25 bp, Homo sapien
gcccatgttaaattttctacgtgaa

SEQ ID NO: 4395231 - DNA, 25 bp, Homo sapien
taaccacctgactcatgctttccag

SEQ ID NO: 4395232 - DNA, 25 bp, Homo sapien
ggtataattatagccttttcccaga

SEQ ID NO: 4395233 - DNA, 25 bp, Homo sapien
tctacgtgaagatcctaaaagcccc

SEQ ID NO: 4395234 - DNA, 25 bp, Homo sapien
atgaaaaaccataagcccttgtatt

SEQ ID NO: 4395235 - DNA, 25 bp, Homo sapien
ataactgtaccagggcttagcccca

SEQ ID NO: 4395236 - DNA, 25 bp, Homo sapien
gattcggagaggacaggactgaaca

SEQ ID NO: 4395237 - DNA, 25 bp, Homo sapien
agccccagttagacacataacaaat

SEQ ID NO: 4395238 - DNA, 25 bp, Homo sapien
gctttgagtcgtaaataactgtacc

SEQ ID NO: 4395239 - DNA, 25 bp, Homo sapien
attgcatcctgcagtaagcaccgag

SEQ ID NO: 4395240 - DNA, 25 bp, Homo sapien
gcaccgagtaagtgtttcttgactc

SEQ ID NO: 4395241 - DNA, 25 bp, Homo sapien
gaaggatgacatcactgactacaga

SEQ ID NO: 4395242 - DNA, 25 bp, Homo sapien
aagaaggatgacatcactgactaca

SEQ ID NO: 4395243 - DNA, 25 bp, Homo sapien
tctcttgtttatgcgatcgtttgtc

SEQ ID NO: 4395244 - DNA, 25 bp, Homo sapien
tttatgcgatcgtttgtcattggcc

SEQ ID NO: 4395245 - DNA, 25 bp, Homo sapien
tcgtttgtcattggccttgtgttgg

SEQ ID NO: 4395246 - DNA, 25 bp, Homo sapien
ctgtttctcttgtttatgcgatcgt

SEQ ID NO: 4395247 - DNA, 25 bp, Homo sapien
gtcccagtaaaatcttcactggcag

SEQ ID NO: 4395248 - DNA, 25 bp, Homo sapien
actggcagcattttagaattgcccc

SEQ ID NO: 4395249 - DNA, 25 bp, Homo sapien
ttgctgccggtgagaagcaacaatc

SEQ ID NO: 4395250 - DNA, 25 bp, Homo sapien
gtttgctgccggtgagaagcaacaa

SEQ ID NO: 4395251 - DNA, 25 bp, Homo sapien
agaatcttgaagcttccgcagaggg

SEQ ID NO: 4395252 - DNA, 25 bp, Homo sapien
cagggccgtgcactgcgagtcagta

SEQ ID NO: 4395253 - DNA, 25 bp, Homo sapien
gagtcagtatgcctccagtccctct

SEQ ID NO: 4395254 - DNA, 25 bp, Homo sapien
agtccctctggtgggcaccggtcca

SEQ ID NO: 4395255 - DNA, 25 bp, Homo sapien
gtaagatgagcacgaagaaaccatg

SEQ ID NO: 4395256 - DNA, 25 bp, Homo sapien
tgagcacgaagaaaccatgtttagt

SEQ ID NO: 4395257 - DNA, 25 bp, Homo sapien
tcccagagctgaaagtaagatgagc

SEQ ID NO: 4395258 - DNA, 25 bp, Homo sapien
ctgaaagtaagatgagcacgaagaa

SEQ ID NO: 4395259 - DNA, 25 bp, Homo sapien
caaataggagcccagtctgcatttt

SEQ ID NO: 4395260 - DNA, 25 bp, Homo sapien
gagtgaaaggtatttcctgttccaa

SEQ ID NO: 4395261 - DNA, 25 bp, Homo sapien
cccgaagagtgaaaggtatttcctg

SEQ ID NO: 4395262 - DNA, 25 bp, Homo sapien
gtatttcctgttccaaataggagcc

SEQ ID NO: 4395263 - DNA, 25 bp, Homo sapien
cagcttgaagctatgtttattaggg

SEQ ID NO: 4395264 - DNA, 25 bp, Homo sapien
aagataggctaatatatttcacacc

SEQ ID NO: 4395265 - DNA, 25 bp, Homo sapien
ctttccccagttgagtctgcttatg

SEQ ID NO: 4395266 - DNA, 25 bp, Homo sapien
gagttctaactacatacaggcttaa

SEQ ID NO: 4395267 - DNA, 25 bp, Homo sapien
tgggcagtgacctaccagatgacct

SEQ ID NO: 4395268 - DNA, 25 bp, Homo sapien
tagactccagtgtgtagtagtgggc

SEQ ID NO: 4395269 - DNA, 25 bp, Homo sapien
gagaggagacctgtttgactttgaa

SEQ ID NO: 4395270 - DNA, 25 bp, Homo sapien
gagccagtgtatagctctgaatcga

SEQ ID NO: 4395271 - DNA, 25 bp, Homo sapien
gcagacttgcttattctgagtgccg

SEQ ID NO: 4395272 - DNA, 25 bp, Homo sapien
gctttagaatcctcaagtagggtgg

SEQ ID NO: 4395273 - DNA, 25 bp, Homo sapien
gaatcgttaagtaccatatgtccag

SEQ ID NO: 4395274 - DNA, 25 bp, Homo sapien
aatttagccatcaaagaccaaggtg

SEQ ID NO: 4395275 - DNA, 25 bp, Homo sapien
gaataccgaactaatggtccttgtc

SEQ ID NO: 4395276 - DNA, 25 bp, Homo sapien
caagttactatgatctacaaggcca

SEQ ID NO: 4395277 - DNA, 25 bp, Homo sapien
catgggaatcttctcacagatcaag

SEQ ID NO: 4395278 - DNA, 25 bp, Homo sapien
ggtccttgtctcaatgacctgccta

SEQ ID NO: 4395279 - DNA, 25 bp, Homo sapien
cagcaaatgattgcaaatgatgatt

SEQ ID NO: 4395280 - DNA, 25 bp, Homo sapien
agttgtgacgatcaagtaagacagc

SEQ ID NO: 4395281 - DNA, 25 bp, Homo sapien
aataacttaatgagccctgctctgc

SEQ ID NO: 4395282 - DNA, 25 bp, Homo sapien
cttggcatcagtgcaaactttcacc

SEQ ID NO: 4395283 - DNA, 25 bp, Homo sapien
agccccagtttggaattgcatcact

SEQ ID NO: 4395284 - DNA, 25 bp, Homo sapien
cccagtttggaattgcatcactgat

SEQ ID NO: 4395285 - DNA, 25 bp, Homo sapien
cagtttggaattgcatcactgattc

SEQ ID NO: 4395286 - DNA, 25 bp, Homo sapien
gtttggaattgcatcactgattctg

SEQ ID NO: 4395287 - DNA, 25 bp, Homo sapien
gtaaagcaattagcatccctctgtc

SEQ ID NO: 4395288 - DNA, 25 bp, Homo sapien
aaactggtttggacatgcttctctc

SEQ ID NO: 4395289 - DNA, 25 bp, Homo sapien
tcctagaggcggtgtatacagcttg

SEQ ID NO: 4395290 - DNA, 25 bp, Homo sapien
tctgcaggtggagcgttggatccta

SEQ ID NO: 4395291 - DNA, 25 bp, Homo sapien
gctgttgtatttgccgtagccttat

SEQ ID NO: 4395292 - DNA, 25 bp, Homo sapien
tccaatcctgtatggagttccctct

SEQ ID NO: 4395293 - DNA, 25 bp, Homo sapien
gacgtttcagctttgtcaactttcc

SEQ ID NO: 4395294 - DNA, 25 bp, Homo sapien
aacatttggcattccatgacgtttc

SEQ ID NO: 4395295 - DNA, 25 bp, Homo sapien
cctagaatactcagaagacacaacg

SEQ ID NO: 4395296 - DNA, 25 bp, Homo sapien
tactcagaagacacaacggtgtatc

SEQ ID NO: 4395297 - DNA, 25 bp, Homo sapien
caacggtgtatcactagaaggagat

SEQ ID NO: 4395298 - DNA, 25 bp, Homo sapien
tcactagaaggagatagttttgttt

SEQ ID NO: 4395299 - DNA, 25 bp, Homo sapien
tactgatgtcgcactcttgctgatg

SEQ ID NO: 4395300 - DNA, 25 bp, Homo sapien
tctccgggtagagctgaactggctg

SEQ ID NO: 4395301 - DNA, 25 bp, Homo sapien
tggctgcagctccaatgagaggcaa

SEQ ID NO: 4395302 - DNA, 25 bp, Homo sapien
gcatactgcatggaatgggtccctc

SEQ ID NO: 4395303 - DNA, 25 bp, Homo sapien
gaatccaggaaagtgttagttcact

SEQ ID NO: 4395304 - DNA, 25 bp, Homo sapien
tcttggaatccaggaaagtgttagt

SEQ ID NO: 4395305 - DNA, 25 bp, Homo sapien
caggaaagtgttagttcactgtgct

SEQ ID NO: 4395306 - DNA, 25 bp, Homo sapien
aggtcttggaatccaggaaagtgtt

SEQ ID NO: 4395307 - DNA, 25 bp, Homo sapien
gccctcttcggaagggaaccgcaca

SEQ ID NO: 4395308 - DNA, 25 bp, Homo sapien
ttcggaagggaaccgcacagtcaca

SEQ ID NO: 4395309 - DNA, 25 bp, Homo sapien
agcagtgccctcttcggaagggaac

SEQ ID NO: 4395310 - DNA, 25 bp, Homo sapien
ctcttcggaagggaaccgcacagtc

SEQ ID NO: 4395311 - DNA, 25 bp, Homo sapien
ggcaaggatggcatctttatcttcc

SEQ ID NO: 4395312 - DNA, 25 bp, Homo sapien
cactgcattgagaacctttgagggc

SEQ ID NO: 4395313 - DNA, 25 bp, Homo sapien
tgtgtccacctgtctcactgcattg

SEQ ID NO: 4395314 - DNA, 25 bp, Homo sapien
ggctgttgaacactttgttccattc

SEQ ID NO: 4395315 - DNA, 25 bp, Homo sapien
ttgaatccagcagttggactagaat

SEQ ID NO: 4395316 - DNA, 25 bp, Homo sapien
aatcatggttttcagatagtacagg

SEQ ID NO: 4395317 - DNA, 25 bp, Homo sapien
cagttggactagaatcatggttttc

SEQ ID NO: 4395318 - DNA, 25 bp, Homo sapien
ggttttcagatagtacaggttccat

SEQ ID NO: 4395319 - DNA, 25 bp, Homo sapien
tcatggagcggattctccgagccac

SEQ ID NO: 4395320 - DNA, 25 bp, Homo sapien
cattgaggacttccacaagtaggca

SEQ ID NO: 4395321 - DNA, 25 bp, Homo sapien
gatgggatcccattcactgtggatg

SEQ ID NO: 4395322 - DNA, 25 bp, Homo sapien
tttcacctgcgtgatgtgccaccgc

SEQ ID NO: 4395323 - DNA, 25 bp, Homo sapien
tgattgtcaacagccaggaagcact

SEQ ID NO: 4395324 - DNA, 25 bp, Homo sapien
ctcacttttaaagggcagtcacagc

SEQ ID NO: 4395325 - DNA, 25 bp, Homo sapien
gatgaagcttgtattgctcaccagg

SEQ ID NO: 4395326 - DNA, 25 bp, Homo sapien
tcccagaggcggaaatttgcaacct

SEQ ID NO: 4395327 - DNA, 25 bp, Homo sapien
gctgctaccccttggatgggcacat

SEQ ID NO: 4395328 - DNA, 25 bp, Homo sapien
ttactgttctaggattgcggtggtc

SEQ ID NO: 4395329 - DNA, 25 bp, Homo sapien
tctgaaggagataaccaaggctgct

SEQ ID NO: 4395330 - DNA, 25 bp, Homo sapien
tgttgaccgccaaggcgagcactga

SEQ ID NO: 4395331 - DNA, 25 bp, Homo sapien
tagattcagtcacctgttcagccgg

SEQ ID NO: 4395332 - DNA, 25 bp, Homo sapien
ctttagattcagtcacctgttcagc

SEQ ID NO: 4395333 - DNA, 25 bp, Homo sapien
gattcagtcacctgttcagccggca

SEQ ID NO: 4395334 - DNA, 25 bp, Homo sapien
ttagattcagtcacctgttcagccg

SEQ ID NO: 4395335 - DNA, 25 bp, Homo sapien
tctatagtgaccagtgatcaaggct

SEQ ID NO: 4395336 - DNA, 25 bp, Homo sapien
gctttatactactcacgtccttggg

SEQ ID NO: 4395337 - DNA, 25 bp, Homo sapien
taattggaaaagagttatcggccca

SEQ ID NO: 4395338 - DNA, 25 bp, Homo sapien
tatcggcccatagctaataagtagt

SEQ ID NO: 4395339 - DNA, 25 bp, Homo sapien
gaattcctatatacctaatacccag

SEQ ID NO: 4395340 - DNA, 25 bp, Homo sapien
ctagcttagtcatggcaagttgcca

SEQ ID NO: 4395341 - DNA, 25 bp, Homo sapien
ccagtgaaacacttgcttgccaact

SEQ ID NO: 4395342 - DNA, 25 bp, Homo sapien
gttcgaacatgtttcacttaaggag

SEQ ID NO: 4395343 - DNA, 25 bp, Homo sapien
gatgagattcacttaggggcagcat

SEQ ID NO: 4395344 - DNA, 25 bp, Homo sapien
tcttatctttgatcgtatatttctc

SEQ ID NO: 4395345 - DNA, 25 bp, Homo sapien
gaaatatgatgagattcacttaggg

SEQ ID NO: 4395346 - DNA, 25 bp, Homo sapien
tctcttatctttgatcgtatatttc

SEQ ID NO: 4395347 - DNA, 25 bp, Homo sapien
gcattcttataacataacctcagag

SEQ ID NO: 4395348 - DNA, 25 bp, Homo sapien
gaatgtttacatgtcaagaggaaaa

SEQ ID NO: 4395349 - DNA, 25 bp, Homo sapien
ctcagagtatctttaccaaaggttt

SEQ ID NO: 4395350 - DNA, 25 bp, Homo sapien
tgtggcatcgtcagcagaatactgc

SEQ ID NO: 4395351 - DNA, 25 bp, Homo sapien
catactgtctgctgatataatatca

SEQ ID NO: 4395352 - DNA, 25 bp, Homo sapien
tctgtgtaacaagagagacatggaa

SEQ ID NO: 4395353 - DNA, 25 bp, Homo sapien
gctctgcagaacatatcaaaatagg

SEQ ID NO: 4395354 - DNA, 25 bp, Homo sapien
tccactatatcatgggctctgcaga

SEQ ID NO: 4395355 - DNA, 25 bp, Homo sapien
ttgtcaaatctgtgtcggctgcccc

SEQ ID NO: 4395356 - DNA, 25 bp, Homo sapien
ttgggcttctcttgtcaaatctgtg

SEQ ID NO: 4395357 - DNA, 25 bp, Homo sapien
atttctattggatatggtttgggct

SEQ ID NO: 4395358 - DNA, 25 bp, Homo sapien
tccattatcaagttttgaagggtgt

SEQ ID NO: 4395359 - DNA, 25 bp, Homo sapien
gaaacactgatgtaacctcaaagcc

SEQ ID NO: 4395360 - DNA, 25 bp, Homo sapien
actgatgtaacctcaaagcctctca

SEQ ID NO: 4395361 - DNA, 25 bp, Homo sapien
ctagggagatcagggaaacactgat

SEQ ID NO: 4395362 - DNA, 25 bp, Homo sapien
gaaatattgctattctaccttagta

SEQ ID NO: 4395363 - DNA, 25 bp, Homo sapien
gcctagagctatagtacatgtgtgt

SEQ ID NO: 4395364 - DNA, 25 bp, Homo sapien
tatgacagcatgttccatacccctg

SEQ ID NO: 4395365 - DNA, 25 bp, Homo sapien
tgtccatctgttgcctagagctata

SEQ ID NO: 4395366 - DNA, 25 bp, Homo sapien
ttgtagttcaaacaagcgattgtcc

SEQ ID NO: 4395367 - DNA, 25 bp, Homo sapien
tgggaaaccagcaaactgaaaaaga

SEQ ID NO: 4395368 - DNA, 25 bp, Homo sapien
gaaaccagcaaactgaaaaagacac

SEQ ID NO: 4395369 - DNA, 25 bp, Homo sapien
ctgtgggaaaccagcaaactgaaaa

SEQ ID NO: 4395370 - DNA, 25 bp, Homo sapien
tgtgggaaaccagcaaactgaaaaa

SEQ ID NO: 4395371 - DNA, 25 bp, Homo sapien
tcagagaacaacatatacttgtgcc

SEQ ID NO: 4395372 - DNA, 25 bp, Homo sapien
tcttgggatcgctcgtttggtgcac

SEQ ID NO: 4395373 - DNA, 25 bp, Homo sapien
ctctcgtgggagacaatcagagaac

SEQ ID NO: 4395374 - DNA, 25 bp, Homo sapien
caaagaatctatttacactactatg

SEQ ID NO: 4395375 - DNA, 25 bp, Homo sapien
tgagccaccgtgccccgcgtgtttt

SEQ ID NO: 4395376 - DNA, 25 bp, Homo sapien
cagaggcagaaaccgccgtaggtta

SEQ ID NO: 4395377 - DNA, 25 bp, Homo sapien
acgatgtacgttccacagaggcaga

SEQ ID NO: 4395378 - DNA, 25 bp, Homo sapien
tgagagcacaccacgtgcatgttgc

SEQ ID NO: 4395379 - DNA, 25 bp, Homo sapien
gatagagccgatccatgagctaaca

SEQ ID NO: 4395380 - DNA, 25 bp, Homo sapien
tccctgtgaggcttgatgaatattg

SEQ ID NO: 4395381 - DNA, 25 bp, Homo sapien
aatagacagagtattcccaccccag

SEQ ID NO: 4395382 - DNA, 25 bp, Homo sapien
tagagactcacatgggtggaatctg

SEQ ID NO: 4395383 - DNA, 25 bp, Homo sapien
tatctagtatgcctgagtagagact

SEQ ID NO: 4395384 - DNA, 25 bp, Homo sapien
tagacctgaaacctttacagttgga

SEQ ID NO: 4395385 - DNA, 25 bp, Homo sapien
aaattatcatgtggcttaatgtgcc

SEQ ID NO: 4395386 - DNA, 25 bp, Homo sapien
tacagttggatgtagcgttgagctt

SEQ ID NO: 4395387 - DNA, 25 bp, Homo sapien
gaaaatctgaattatgccctcattc

SEQ ID NO: 4395388 - DNA, 25 bp, Homo sapien
tacccagagtcgtactgtgcagcct

SEQ ID NO: 4395389 - DNA, 25 bp, Homo sapien
gcctattctgagcaacataaacgtt

SEQ ID NO: 4395390 - DNA, 25 bp, Homo sapien
aaacgttattccttacatatgtatg

SEQ ID NO: 4395391 - DNA, 25 bp, Homo sapien
cagcatacacatcagcaaagtgaga

SEQ ID NO: 4395392 - DNA, 25 bp, Homo sapien
attgctaaggtttcctgtactctgc

SEQ ID NO: 4395393 - DNA, 25 bp, Homo sapien
tctcaagcggctaccgtgaaacggg

SEQ ID NO: 4395394 - DNA, 25 bp, Homo sapien
tactggatggtagcatattgctaag

SEQ ID NO: 4395395 - DNA, 25 bp, Homo sapien
gaaagtcactcacttccaatatccc

SEQ ID NO: 4395396 - DNA, 25 bp, Homo sapien
ccatgtaaataggacgaggtagaca

SEQ ID NO: 4395397 - DNA, 25 bp, Homo sapien
tactgacagagccatggtattccta

SEQ ID NO: 4395398 - DNA, 25 bp, Homo sapien
ccccaccgtgatgagctgctagtct

SEQ ID NO: 4395399 - DNA, 25 bp, Homo sapien
taaatgtgtctactaagagcagcac

SEQ ID NO: 4395400 - DNA, 25 bp, Homo sapien
ccctgacttagggaaaggcacacaa

SEQ ID NO: 4395401 - DNA, 25 bp, Homo sapien
ttgcctctcgtaagtgtgcctatgc

SEQ ID NO: 4395402 - DNA, 25 bp, Homo sapien
gcctctcgtaagtgtgcctatgcaa

SEQ ID NO: 4395403 - DNA, 25 bp, Homo sapien
tgcctctcgtaagtgtgcctatgca

SEQ ID NO: 4395404 - DNA, 25 bp, Homo sapien
gccaggcttggcattgacagcgtcc

SEQ ID NO: 4395405 - DNA, 25 bp, Homo sapien
gggagtttcctagagcgatgctctt

SEQ ID NO: 4395406 - DNA, 25 bp, Homo sapien
gctcttagaaactccttggcaggaa

SEQ ID NO: 4395407 - DNA, 25 bp, Homo sapien
tgctggcattaacaagcctcttatt

SEQ ID NO: 4395408 - DNA, 25 bp, Homo sapien
tgagactgatagaatctgccagaat

SEQ ID NO: 4395409 - DNA, 25 bp, Homo sapien
tcttgtagcctgcagactggaaaca

SEQ ID NO: 4395410 - DNA, 25 bp, Homo sapien
caaactggcgttcccacaatgctgg

SEQ ID NO: 4395411 - DNA, 25 bp, Homo sapien
tggaaacactggatgccttgacccc

SEQ ID NO: 4395412 - DNA, 25 bp, Homo sapien
cagcattgccttgttcacagagaca

SEQ ID NO: 4395413 - DNA, 25 bp, Homo sapien
tgtgcatgcaacagatactgccctt

SEQ ID NO: 4395414 - DNA, 25 bp, Homo sapien
ttctcatgcctcttcaacgtattca

SEQ ID NO: 4395415 - DNA, 25 bp, Homo sapien
aaagcaaaccttgcctgaaacagct

SEQ ID NO: 4395416 - DNA, 25 bp, Homo sapien
tgctctcctaggcagcaatctcttc

SEQ ID NO: 4395417 - DNA, 25 bp, Homo sapien
ctgctctcctaggcagcaatctctt

SEQ ID NO: 4395418 - DNA, 25 bp, Homo sapien
tatcttctgcaaaaatcagggtgat

SEQ ID NO: 4395419 - DNA, 25 bp, Homo sapien
gcaaacactgacattctcatggcca

SEQ ID NO: 4395420 - DNA, 25 bp, Homo sapien
gctgtttcttagcatgtcatttctg

SEQ ID NO: 4395421 - DNA, 25 bp, Homo sapien
acttgtctaaggctcagctctggta

SEQ ID NO: 4395422 - DNA, 25 bp, Homo sapien
tagaggtgagccaagtgtccccatg

SEQ ID NO: 4395423 - DNA, 25 bp, Homo sapien
catagtaggtactggcgagatagcc

SEQ ID NO: 4395424 - DNA, 25 bp, Homo sapien
tttgaaggccctgcggcaagaagga

SEQ ID NO: 4395425 - DNA, 25 bp, Homo sapien
gggccttgcaatccctaaggtcaga

SEQ ID NO: 4395426 - DNA, 25 bp, Homo sapien
atacaccctcatgtggtccattgtt

SEQ ID NO: 4395427 - DNA, 25 bp, Homo sapien
ttatacaccctcatgtggtccattg

SEQ ID NO: 4395428 - DNA, 25 bp, Homo sapien
tacaccctcatgtggtccattgttc

SEQ ID NO: 4395429 - DNA, 25 bp, Homo sapien
tatacaccctcatgtggtccattgt

SEQ ID NO: 4395430 - DNA, 25 bp, Homo sapien
ttttgattgagggtctgaaggactc

SEQ ID NO: 4395431 - DNA, 25 bp, Homo sapien
tgctctcttttctgtcacacggtgg

SEQ ID NO: 4395432 - DNA, 25 bp, Homo sapien
ccagatagtcctccaatttaatgta

SEQ ID NO: 4395433 - DNA, 25 bp, Homo sapien
tgagtgttacccatcatgcaacaat

SEQ ID NO: 4395434 - DNA, 25 bp, Homo sapien
gcgatcattcagaagcggccgcttt

SEQ ID NO: 4395435 - DNA, 25 bp, Homo sapien
tctctgtcctgggtgttcgggatca

SEQ ID NO: 4395436 - DNA, 25 bp, Homo sapien
ccagaggattcgtcagtaagtgtgc

SEQ ID NO: 4395437 - DNA, 25 bp, Homo sapien
tttgtatctagcacggtagcacctg

SEQ ID NO: 4395438 - DNA, 25 bp, Homo sapien
cagccaagagctgctaactgggtca

SEQ ID NO: 4395439 - DNA, 25 bp, Homo sapien
gcaaagcgaggactgtaaggcccgc

SEQ ID NO: 4395440 - DNA, 25 bp, Homo sapien
gcaaaatgtcggaaacgcagccaag

SEQ ID NO: 4395441 - DNA, 25 bp, Homo sapien
ccagggaacagaatgtacttggcag

SEQ ID NO: 4395442 - DNA, 25 bp, Homo sapien
ggctcagattgtcctcccagtttcc

SEQ ID NO: 4395443 - DNA, 25 bp, Homo sapien
cacaccaaacttaagtggctggtga

SEQ ID NO: 4395444 - DNA, 25 bp, Homo sapien
tggctggtgaatgaggctcagattg

SEQ ID NO: 4395445 - DNA, 25 bp, Homo sapien
cagaaggactcagattcacaccaaa

SEQ ID NO: 4395446 - DNA, 25 bp, Homo sapien
ggcttcttgagctaacttcagccca

SEQ ID NO: 4395447 - DNA, 25 bp, Homo sapien
taacttcagcccatcaccgcagtgg

SEQ ID NO: 4395448 - DNA, 25 bp, Homo sapien
ctaacttcagcccatcaccgcagtg

SEQ ID NO: 4395449 - DNA, 25 bp, Homo sapien
aacttcagcccatcaccgcagtggt

SEQ ID NO: 4395450 - DNA, 25 bp, Homo sapien
ggatagacgacctctctagtttttc

SEQ ID NO: 4395451 - DNA, 25 bp, Homo sapien
caggatagacgacctctctagtttt

SEQ ID NO: 4395452 - DNA, 25 bp, Homo sapien
ccttctttcaagaggagtaatgtaa

SEQ ID NO: 4395453 - DNA, 25 bp, Homo sapien
atgtaaaaagtctgacccctagtgg

SEQ ID NO: 4395454 - DNA, 25 bp, Homo sapien
tgctgattcgactttcagggcacag

SEQ ID NO: 4395455 - DNA, 25 bp, Homo sapien
cgactttcagggcacaggattcagt

SEQ ID NO: 4395456 - DNA, 25 bp, Homo sapien
tcagggcacaggattcagtccgcat

SEQ ID NO: 4395457 - DNA, 25 bp, Homo sapien
gcaggtatatgctgattcgactttc

SEQ ID NO: 4395458 - DNA, 25 bp, Homo sapien
cctgggatttgacttaaagttggct

SEQ ID NO: 4395459 - DNA, 25 bp, Homo sapien
ttattctttcgatgattgtaaaacc

SEQ ID NO: 4395460 - DNA, 25 bp, Homo sapien
gaggtgcctgggatttgacttaaag

SEQ ID NO: 4395461 - DNA, 25 bp, Homo sapien
tgtaaaaccccacattatgcaataa

SEQ ID NO: 4395462 - DNA, 25 bp, Homo sapien
gctttcgtgagcaccgggtaagaga

SEQ ID NO: 4395463 - DNA, 25 bp, Homo sapien
aatactgaggatactgtgactttac

SEQ ID NO: 4395464 - DNA, 25 bp, Homo sapien
tatcaggtgaccaatagcatacact

SEQ ID NO: 4395465 - DNA, 25 bp, Homo sapien
aaagcttattccgataatactgagg

SEQ ID NO: 4395466 - DNA, 25 bp, Homo sapien
aattctcttcaggacagcattaata

SEQ ID NO: 4395467 - DNA, 25 bp, Homo sapien
ctcgtttttctgtttgccccttctg

SEQ ID NO: 4395468 - DNA, 25 bp, Homo sapien
tctgtttgccccttctgataggatg

SEQ ID NO: 4395469 - DNA, 25 bp, Homo sapien
tgataggatgaaattctcttcagga

SEQ ID NO: 4395470 - DNA, 25 bp, Homo sapien
tagtgaggacggacaacagagagct

SEQ ID NO: 4395471 - DNA, 25 bp, Homo sapien
gctgctgtggtcagcgagccgagga

SEQ ID NO: 4395472 - DNA, 25 bp, Homo sapien
aaggctctgtggttacgtacttatt

SEQ ID NO: 4395473 - DNA, 25 bp, Homo sapien
gtcagcgagccgaggagccagacaa

SEQ ID NO: 4395474 - DNA, 25 bp, Homo sapien
gctttaacttctcgtttgagcccca

SEQ ID NO: 4395475 - DNA, 25 bp, Homo sapien
tgcccacagctttaactgatacttc

SEQ ID NO: 4395476 - DNA, 25 bp, Homo sapien
gtttgctttctcttcgccgccctcc

SEQ ID NO: 4395477 - DNA, 25 bp, Homo sapien
tttagagggagcagtcaaacctctc

SEQ ID NO: 4395478 - DNA, 25 bp, Homo sapien
gctgaaagctgctgagccacacctg

SEQ ID NO: 4395479 - DNA, 25 bp, Homo sapien
ctgaccgtttcacctgaccagcatt

SEQ ID NO: 4395480 - DNA, 25 bp, Homo sapien
tgctgaaagctgctgagccacacct

SEQ ID NO: 4395481 - DNA, 25 bp, Homo sapien
gggaaagcattcttgccgctccttt

SEQ ID NO: 4395482 - DNA, 25 bp, Homo sapien
tttattactctgaaactggctcgag

SEQ ID NO: 4395483 - DNA, 25 bp, Homo sapien
taaactctctgcgtatcaaagatgc

SEQ ID NO: 4395484 - DNA, 25 bp, Homo sapien
agtaagcatcctgcaaacatttggc

SEQ ID NO: 4395485 - DNA, 25 bp, Homo sapien
aacaataccgagatggcagcgttgg

SEQ ID NO: 4395486 - DNA, 25 bp, Homo sapien
caataccgagatggcagcgttggcg

SEQ ID NO: 4395487 - DNA, 25 bp, Homo sapien
gggcaacaacaataccgagatggca

SEQ ID NO: 4395488 - DNA, 25 bp, Homo sapien
aacaacaataccgagatggcagcgt

SEQ ID NO: 4395489 - DNA, 25 bp, Homo sapien
aacagaaatctggaggactgtttca

SEQ ID NO: 4395490 - DNA, 25 bp, Homo sapien
aatctggaggactgtttcagttttc

SEQ ID NO: 4395491 - DNA, 25 bp, Homo sapien
ggaggactgtttcagttttcacagg

SEQ ID NO: 4395492 - DNA, 25 bp, Homo sapien
ctccaagtaaaaacagaaatctgga

SEQ ID NO: 4395493 - DNA, 25 bp, Homo sapien
gggcaggtacagtttgctgaaggat

SEQ ID NO: 4395494 - DNA, 25 bp, Homo sapien
aggtacagtttgctgaaggatgtga

SEQ ID NO: 4395495 - DNA, 25 bp, Homo sapien
gcaggtacagtttgctgaaggatgt

SEQ ID NO: 4395496 - DNA, 25 bp, Homo sapien
caggtacagtttgctgaaggatgtg

SEQ ID NO: 4395497 - DNA, 25 bp, Homo sapien
tttcaattatgtctccaagtctcac

SEQ ID NO: 4395498 - DNA, 25 bp, Homo sapien
tcatctttcaattatgtctccaagt

SEQ ID NO: 4395499 - DNA, 25 bp, Homo sapien
tctttcaattatgtctccaagtctc

SEQ ID NO: 4395500 - DNA, 25 bp, Homo sapien
catctttcaattatgtctccaagtc

SEQ ID NO: 4395501 - DNA, 25 bp, Homo sapien
agaatctttcccttcgcagactgcc

SEQ ID NO: 4395502 - DNA, 25 bp, Homo sapien
tgcagtctgcaatcctttgataact

SEQ ID NO: 4395503 - DNA, 25 bp, Homo sapien
tgttgttggttgagcccccagtgca

SEQ ID NO: 4395504 - DNA, 25 bp, Homo sapien
atatacaccttcattccagcctctt

SEQ ID NO: 4395505 - DNA, 25 bp, Homo sapien
gaacatggtggtctttccgtccagg

SEQ ID NO: 4395506 - DNA, 25 bp, Homo sapien
gctgtttgaacatggtggtctttcc

SEQ ID NO: 4395507 - DNA, 25 bp, Homo sapien
catggtggtctttccgtccagggac

SEQ ID NO: 4395508 - DNA, 25 bp, Homo sapien
gtttgaacatggtggtctttccgtc

SEQ ID NO: 4395509 - DNA, 25 bp, Homo sapien
tcagtggatgtgttcaagcagaagc

SEQ ID NO: 4395510 - DNA, 25 bp, Homo sapien
ctatggtgccacattttaagaggga

SEQ ID NO: 4395511 - DNA, 25 bp, Homo sapien
taaactgtccagaccagtgagctcc

SEQ ID NO: 4395512 - DNA, 25 bp, Homo sapien
tcctcctgtgaaagaagaactgtat

SEQ ID NO: 4395513 - DNA, 25 bp, Homo sapien
taaatcatccatcaagtgcatgtag

SEQ ID NO: 4395514 - DNA, 25 bp, Homo sapien
tatatatccaacatccattgtcctt

SEQ ID NO: 4395515 - DNA, 25 bp, Homo sapien
tacccaactgttagttatatatcca

SEQ ID NO: 4395516 - DNA, 25 bp, Homo sapien
tacacaaccaaatgcactaaatcat

SEQ ID NO: 4395517 - DNA, 25 bp, Homo sapien
tcaaggcccaggtacacccttgttc

SEQ ID NO: 4395518 - DNA, 25 bp, Homo sapien
aggcccaggtacacccttgttcctg

SEQ ID NO: 4395519 - DNA, 25 bp, Homo sapien
cttgttcctggcactctccaaactt

SEQ ID NO: 4395520 - DNA, 25 bp, Homo sapien
gttcctggcactctccaaactttca

SEQ ID NO: 4395521 - DNA, 25 bp, Homo sapien
tgcatcttgaaccagggtgcctttg

SEQ ID NO: 4395522 - DNA, 25 bp, Homo sapien
cagggtgcctttgcactttagcctg

SEQ ID NO: 4395523 - DNA, 25 bp, Homo sapien
ggtcgcccctccacagtcttctggt

SEQ ID NO: 4395524 - DNA, 25 bp, Homo sapien
gcctgttcagccctggtcgcccctc

SEQ ID NO: 4395525 - DNA, 25 bp, Homo sapien
ttttagttatgagacaggatattgg

SEQ ID NO: 4395526 - DNA, 25 bp, Homo sapien
gttttagttatgagacaggatattg

SEQ ID NO: 4395527 - DNA, 25 bp, Homo sapien
ttaatgtcagggtccagaaatctgg

SEQ ID NO: 4395528 - DNA, 25 bp, Homo sapien
caatcgaatcttggtttgggccaat

SEQ ID NO: 4395529 - DNA, 25 bp, Homo sapien
gcacactgactgtgtaggtcaatga

SEQ ID NO: 4395530 - DNA, 25 bp, Homo sapien
caacatctctgttggtggacagaga

SEQ ID NO: 4395531 - DNA, 25 bp, Homo sapien
caagaactgtttaaggcctcaccac

SEQ ID NO: 4395532 - DNA, 25 bp, Homo sapien
tcaaggtcccaagtgtttaaagcat

SEQ ID NO: 4395533 - DNA, 25 bp, Homo sapien
ctggcataatatggctcaaggtccc

SEQ ID NO: 4395534 - DNA, 25 bp, Homo sapien
gcctcaccacagaatagggctttct

SEQ ID NO: 4395535 - DNA, 25 bp, Homo sapien
gggcttgcgagaagtgtgaatctct

SEQ ID NO: 4395536 - DNA, 25 bp, Homo sapien
tgtgaccattgtttaaactggcctt

SEQ ID NO: 4395537 - DNA, 25 bp, Homo sapien
agaagtgtgaatctctgtgtgacca

SEQ ID NO: 4395538 - DNA, 25 bp, Homo sapien
ctctgtgtgaccattgtttaaactg

SEQ ID NO: 4395539 - DNA, 25 bp, Homo sapien
tctcccattctgtatgtgtatttct

SEQ ID NO: 4395540 - DNA, 25 bp, Homo sapien
ttctcccattctgtatgtgtatttc

SEQ ID NO: 4395541 - DNA, 25 bp, Homo sapien
ctcccattctgtatgtgtatttctt

SEQ ID NO: 4395542 - DNA, 25 bp, Homo sapien
tcggccatcaaataacggttgttag

SEQ ID NO: 4395543 - DNA, 25 bp, Homo sapien
tattaattcatgttggcgtttggag

SEQ ID NO: 4395544 - DNA, 25 bp, Homo sapien
aagctattggtgctgatgagaagtc

SEQ ID NO: 4395545 - DNA, 25 bp, Homo sapien
tcagattcatcaagatgggctgctg

SEQ ID NO: 4395546 - DNA, 25 bp, Homo sapien
gtagcagccataacctgtaactgac

SEQ ID NO: 4395547 - DNA, 25 bp, Homo sapien
gtaaattccagtggttagaacattc

SEQ ID NO: 4395548 - DNA, 25 bp, Homo sapien
agctgtagcagccataacctgtaac

SEQ ID NO: 4395549 - DNA, 25 bp, Homo sapien
cttgaatttctcgagctcagaaggt

SEQ ID NO: 4395550 - DNA, 25 bp, Homo sapien
taaatgtcaactatcattatgtggc

SEQ ID NO: 4395551 - DNA, 25 bp, Homo sapien
accatagtagatatttgaccttgct

SEQ ID NO: 4395552 - DNA, 25 bp, Homo sapien
ttaacttaatgacaagaagcagtgt

SEQ ID NO: 4395553 - DNA, 25 bp, Homo sapien
ctgggaaacccagttctaccatagt

SEQ ID NO: 4395554 - DNA, 25 bp, Homo sapien
tcttgcctgccacttgtatattggc

SEQ ID NO: 4395555 - DNA, 25 bp, Homo sapien
tcacccaggtgtaattgattttctc

SEQ ID NO: 4395556 - DNA, 25 bp, Homo sapien
gagacatgataggtagtgctgagta

SEQ ID NO: 4395557 - DNA, 25 bp, Homo sapien
ggaggtgagagaactccataactcc

SEQ ID NO: 4395558 - DNA, 25 bp, Homo sapien
tttgggtaatgaagactggcaaggt

SEQ ID NO: 4395559 - DNA, 25 bp, Homo sapien
ttgccagtctaggagaggctgcctg

SEQ ID NO: 4395560 - DNA, 25 bp, Homo sapien
cttctaattgccagtctaggagagg

SEQ ID NO: 4395561 - DNA, 25 bp, Homo sapien
gcctgctagaggcagatttgggtaa

SEQ ID NO: 4395562 - DNA, 25 bp, Homo sapien
tctgtgaagacttctctcacccctc

SEQ ID NO: 4395563 - DNA, 25 bp, Homo sapien
tgaagacttctctcacccctcttct

SEQ ID NO: 4395564 - DNA, 25 bp, Homo sapien
tgtgaagacttctctcacccctctt

SEQ ID NO: 4395565 - DNA, 25 bp, Homo sapien
ctgtgaagacttctctcacccctct

SEQ ID NO: 4395566 - DNA, 25 bp, Homo sapien
cctctgctgtggcatgcctgtgctt

SEQ ID NO: 4395567 - DNA, 25 bp, Homo sapien
gctgtggcatgcctgtgcttgtaga

SEQ ID NO: 4395568 - DNA, 25 bp, Homo sapien
gcttgtagagcagctatagatctgc

SEQ ID NO: 4395569 - DNA, 25 bp, Homo sapien
cctgtgcttgtagagcagctataga

SEQ ID NO: 4395570 - DNA, 25 bp, Homo sapien
catggctagctttggcaggcgttgc

SEQ ID NO: 4395571 - DNA, 25 bp, Homo sapien
cacggtgacctctagttgttgatgc

SEQ ID NO: 4395572 - DNA, 25 bp, Homo sapien
gcagggttgctcttgcgctgacgaa

SEQ ID NO: 4395573 - DNA, 25 bp, Homo sapien
tgttgatgccagatgaaatatgccc

SEQ ID NO: 4395574 - DNA, 25 bp, Homo sapien
tgtaatctgtactgaaatttatggc

SEQ ID NO: 4395575 - DNA, 25 bp, Homo sapien
tcttctctatatggccctcagatgg

SEQ ID NO: 4395576 - DNA, 25 bp, Homo sapien
ggccctcagatggaatgtaatctgt

SEQ ID NO: 4395577 - DNA, 25 bp, Homo sapien
ctgtactgaaatttatggcttctga

SEQ ID NO: 4395578 - DNA, 25 bp, Homo sapien
ttgttcaaatggaaattggacctcc

SEQ ID NO: 4395579 - DNA, 25 bp, Homo sapien
tattatcccctggtatgttgtgagg

SEQ ID NO: 4395580 - DNA, 25 bp, Homo sapien
tatattctcataaggtggcatgacc

SEQ ID NO: 4395581 - DNA, 25 bp, Homo sapien
ccttagttaagggaatctgctcaga

SEQ ID NO: 4395582 - DNA, 25 bp, Homo sapien
tacttctgtcgtcagatgcaggtgg

SEQ ID NO: 4395583 - DNA, 25 bp, Homo sapien
tctgagttaggacagcccaacagaa

SEQ ID NO: 4395584 - DNA, 25 bp, Homo sapien
tagtctacttccttacagtgggatg

SEQ ID NO: 4395585 - DNA, 25 bp, Homo sapien
tggatgcagtcagtagccagagact

SEQ ID NO: 4395586 - DNA, 25 bp, Homo sapien
tggaatgatttgtcccagcaaggtg

SEQ ID NO: 4395587 - DNA, 25 bp, Homo sapien
tgagggctacaacataccaggtgct

SEQ ID NO: 4395588 - DNA, 25 bp, Homo sapien
cacgcctgctttgcaatcattggga

SEQ ID NO: 4395589 - DNA, 25 bp, Homo sapien
gagctaggactcaaacctgggcttc

SEQ ID NO: 4395590 - DNA, 25 bp, Homo sapien
agcacaatacaggttggcaagggag

SEQ ID NO: 4395591 - DNA, 25 bp, Homo sapien
ttggcaagggagttatgctccaggc

SEQ ID NO: 4395592 - DNA, 25 bp, Homo sapien
gcaagggagttatgctccaggcagt

SEQ ID NO: 4395593 - DNA, 25 bp, Homo sapien
tacaggttggcaagggagttatgct

SEQ ID NO: 4395594 - DNA, 25 bp, Homo sapien
aaggctctccacgtactgtctggta

SEQ ID NO: 4395595 - DNA, 25 bp, Homo sapien
ggccagatggtcacattgattttct

SEQ ID NO: 4395596 - DNA, 25 bp, Homo sapien
aaatgagcgaggtggtgaacacaat

SEQ ID NO: 4395597 - DNA, 25 bp, Homo sapien
tccgaggccagatggtcacattgat

SEQ ID NO: 4395598 - DNA, 25 bp, Homo sapien
gcagatgttaatggataaagccagg

SEQ ID NO: 4395599 - DNA, 25 bp, Homo sapien
taagactcggtgcaagaagacatca

SEQ ID NO: 4395600 - DNA, 25 bp, Homo sapien
aaatctcccaactcctgcatgtgtg

SEQ ID NO: 4395601 - DNA, 25 bp, Homo sapien
gcatgtgtgacctgagtaagactcg

SEQ ID NO: 4395602 - DNA, 25 bp, Homo sapien
tccatctttggataagtgattaaaa

SEQ ID NO: 4395603 - DNA, 25 bp, Homo sapien
cccccgaggatcttccatttctgac

SEQ ID NO: 4395604 - DNA, 25 bp, Homo sapien
gaattgacccccgaggatcttccat

SEQ ID NO: 4395605 - DNA, 25 bp, Homo sapien
tgaaggaattgacccccgaggatct

SEQ ID NO: 4395606 - DNA, 25 bp, Homo sapien
cgatattcttcagcaattggaaaag

SEQ ID NO: 4395607 - DNA, 25 bp, Homo sapien
atcatgcgatattcttcagcaattg

SEQ ID NO: 4395608 - DNA, 25 bp, Homo sapien
tcagcaattggaaaaggagtttgat

SEQ ID NO: 4395609 - DNA, 25 bp, Homo sapien
catgcgatattcttcagcaattgga

SEQ ID NO: 4395610 - DNA, 25 bp, Homo sapien
tccacgggactgagcagtgaggaca

SEQ ID NO: 4395611 - DNA, 25 bp, Homo sapien
gacaggctccattcgacagagtcca

SEQ ID NO: 4395612 - DNA, 25 bp, Homo sapien
tccattcgacagagtccaaggcaga

SEQ ID NO: 4395613 - DNA, 25 bp, Homo sapien
gacagagtccaaggcagatggtcat

SEQ ID NO: 4395614 - DNA, 25 bp, Homo sapien
gttgagaatctcttagtatgctact

SEQ ID NO: 4395615 - DNA, 25 bp, Homo sapien
ttagatcatcacacggaaaatactt

SEQ ID NO: 4395616 - DNA, 25 bp, Homo sapien
acttatcgtgttcttcatattcaag

SEQ ID NO: 4395617 - DNA, 25 bp, Homo sapien
cttagtatgctacttatggctggaa

SEQ ID NO: 4395618 - DNA, 25 bp, Homo sapien
tagggcttctccacaactttacagg

SEQ ID NO: 4395619 - DNA, 25 bp, Homo sapien
gggcttctccacaactttacaggta

SEQ ID NO: 4395620 - DNA, 25 bp, Homo sapien
agggcttctccacaactttacaggt

SEQ ID NO: 4395621 - DNA, 25 bp, Homo sapien
ggcttctccacaactttacaggtac

SEQ ID NO: 4395622 - DNA, 25 bp, Homo sapien
caatatattcccgaatagcagtgga

SEQ ID NO: 4395623 - DNA, 25 bp, Homo sapien
tagcagtggagttgccggggttggg

SEQ ID NO: 4395624 - DNA, 25 bp, Homo sapien
gaggcacgctggaaaccccgccgag

SEQ ID NO: 4395625 - DNA, 25 bp, Homo sapien
gctggaaaccccgccgagaatcatt

SEQ ID NO: 4395626 - DNA, 25 bp, Homo sapien
tgtctttgattcaggctgctcactg

SEQ ID NO: 4395627 - DNA, 25 bp, Homo sapien
taaaggctgccctggcatgaagatc

SEQ ID NO: 4395628 - DNA, 25 bp, Homo sapien
ccaggctgatactggagtcataagc

SEQ ID NO: 4395629 - DNA, 25 bp, Homo sapien
ttctggacactaaaggctgccctgg

SEQ ID NO: 4395630 - DNA, 25 bp, Homo sapien
gccattgagtgttgccaatatggaa

SEQ ID NO: 4395631 - DNA, 25 bp, Homo sapien
ccattgagtgttgccaatatggaaa

SEQ ID NO: 4395632 - DNA, 25 bp, Homo sapien
tgtgattcaggtggccattgagtgt

SEQ ID NO: 4395633 - DNA, 25 bp, Homo sapien
gtgattcaggtggccattgagtgtt

SEQ ID NO: 4395634 - DNA, 25 bp, Homo sapien
gtgtgaactggcctcagcccattct

SEQ ID NO: 4395635 - DNA, 25 bp, Homo sapien
ctagctcttgacattgagaggtgac

SEQ ID NO: 4395636 - DNA, 25 bp, Homo sapien
tgcctgagtcggctgtgagattcca

SEQ ID NO: 4395637 - DNA, 25 bp, Homo sapien
gcccattctctaatagaagcggtgt

SEQ ID NO: 4395638 - DNA, 25 bp, Homo sapien
tctgttcattgtcattgaactcctc

SEQ ID NO: 4395639 - DNA, 25 bp, Homo sapien
ctgttcacttcaaaagctgctgcca

SEQ ID NO: 4395640 - DNA, 25 bp, Homo sapien
tgtcattgaactcctctttcccaaa

SEQ ID NO: 4395641 - DNA, 25 bp, Homo sapien
aagctgctgccagtatctgttcatt

SEQ ID NO: 4395642 - DNA, 25 bp, Homo sapien
ggaggagactagcttgtgtgatcat

SEQ ID NO: 4395643 - DNA, 25 bp, Homo sapien
agtgtgtaagagaacagccctgctg

SEQ ID NO: 4395644 - DNA, 25 bp, Homo sapien
ctgccccaggcagtgtgtaagagaa

SEQ ID NO: 4395645 - DNA, 25 bp, Homo sapien
cccaggcagtgtgtaagagaacagc

SEQ ID NO: 4395646 - DNA, 25 bp, Homo sapien
agctctctgcctgtgttatcactgt

SEQ ID NO: 4395647 - DNA, 25 bp, Homo sapien
tagctctctgcctgtgttatcactg

SEQ ID NO: 4395648 - DNA, 25 bp, Homo sapien
gtagctctctgcctgtgttatcact

SEQ ID NO: 4395649 - DNA, 25 bp, Homo sapien
tgtcctcattaaaatcttcccgtac

SEQ ID NO: 4395650 - DNA, 25 bp, Homo sapien
gattacctctatgttcttcttattc

SEQ ID NO: 4395651 - DNA, 25 bp, Homo sapien
ctgcagttggcaatgttagactgat

SEQ ID NO: 4395652 - DNA, 25 bp, Homo sapien
gttggcaatgttagactgattacct

SEQ ID NO: 4395653 - DNA, 25 bp, Homo sapien
tagactgattacctctatgttcttc

SEQ ID NO: 4395654 - DNA, 25 bp, Homo sapien
tcccagtgggtttggtggttaggca

SEQ ID NO: 4395655 - DNA, 25 bp, Homo sapien
ctgtcccagtgggtttggtggttag

SEQ ID NO: 4395656 - DNA, 25 bp, Homo sapien
cagtgggtttggtggttaggcaaag

SEQ ID NO: 4395657 - DNA, 25 bp, Homo sapien
tagatgtgcatacctcatgtgatac

SEQ ID NO: 4395658 - DNA, 25 bp, Homo sapien
tactaggctctaagctttaggcagc

SEQ ID NO: 4395659 - DNA, 25 bp, Homo sapien
tggtatgtatagcttaggaccctac

SEQ ID NO: 4395660 - DNA, 25 bp, Homo sapien
catgtgatacaataagaacctttaa

SEQ ID NO: 4395661 - DNA, 25 bp, Homo sapien
gctggtctattttgtgataaaggta

SEQ ID NO: 4395662 - DNA, 25 bp, Homo sapien
gattcaagctcaagtccttctgact

SEQ ID NO: 4395663 - DNA, 25 bp, Homo sapien
tatactgtcctgtaagatgtgtgga

SEQ ID NO: 4395664 - DNA, 25 bp, Homo sapien
gcccagcctcatctaattcttatac

SEQ ID NO: 4395665 - DNA, 25 bp, Homo sapien
tcttctgaaagcgttgacgtaatta

SEQ ID NO: 4395666 - DNA, 25 bp, Homo sapien
ctgaaagcgttgacgtaattaattc

SEQ ID NO: 4395667 - DNA, 25 bp, Homo sapien
aagcgttgacgtaattaattctcga

SEQ ID NO: 4395668 - DNA, 25 bp, Homo sapien
gcgttgacgtaattaattctcgaaa

SEQ ID NO: 4395669 - DNA, 25 bp, Homo sapien
ggctgaactcccaaatggagtgaaa

SEQ ID NO: 4395670 - DNA, 25 bp, Homo sapien
tgtctttgagttgtagtgaataatc

SEQ ID NO: 4395671 - DNA, 25 bp, Homo sapien
tatttcaggctccaacggaggaagt

SEQ ID NO: 4395672 - DNA, 25 bp, Homo sapien
gatatatcacccacaatgttgtatg

SEQ ID NO: 4395673 - DNA, 25 bp, Homo sapien
cctgtgtcttctgatgggggctcgt

SEQ ID NO: 4395674 - DNA, 25 bp, Homo sapien
tcagctattaatatcatcctgagct

SEQ ID NO: 4395675 - DNA, 25 bp, Homo sapien
ctagggtatctaaatgaatgtagca

SEQ ID NO: 4395676 - DNA, 25 bp, Homo sapien
gggctcgtatttgcctcctccattg

SEQ ID NO: 4395677 - DNA, 25 bp, Homo sapien
tactggtcacagacaagactctctt

SEQ ID NO: 4395678 - DNA, 25 bp, Homo sapien
ggattcctctgagcgctgtctatcg

SEQ ID NO: 4395679 - DNA, 25 bp, Homo sapien
cctataggatagaccactggaacaa

SEQ ID NO: 4395680 - DNA, 25 bp, Homo sapien
tgtctatcgcatctgcctgggcaag

SEQ ID NO: 4395681 - DNA, 25 bp, Homo sapien
ccatgggtgatagtcaacagtttct

SEQ ID NO: 4395682 - DNA, 25 bp, Homo sapien
ggtgatagtcaacagtttcttgtgt

SEQ ID NO: 4395683 - DNA, 25 bp, Homo sapien
cagaccctcggttcttcagccttcc

SEQ ID NO: 4395684 - DNA, 25 bp, Homo sapien
ccttccctccatgggtgatagtcaa

SEQ ID NO: 4395685 - DNA, 25 bp, Homo sapien
ggcagaaggtgaaaggcacatctca

SEQ ID NO: 4395686 - DNA, 25 bp, Homo sapien
gcagaaggtgaaaggcacatctcac

SEQ ID NO: 4395687 - DNA, 25 bp, Homo sapien
tggcagaaggtgaaaggcacatctc

SEQ ID NO: 4395688 - DNA, 25 bp, Homo sapien
tgaagagtggcattgagctagagtc

SEQ ID NO: 4395689 - DNA, 25 bp, Homo sapien
ggcaagaagcatcaacctggacctt

SEQ ID NO: 4395690 - DNA, 25 bp, Homo sapien
cattgagctagagtcatcacatgat

SEQ ID NO: 4395691 - DNA, 25 bp, Homo sapien
tcacaggatcttagtatggttgtca

SEQ ID NO: 4395692 - DNA, 25 bp, Homo sapien
aaaactgagggtttcctgatctggg

SEQ ID NO: 4395693 - DNA, 25 bp, Homo sapien
tggataactaaaggctctctcaccc

SEQ ID NO: 4395694 - DNA, 25 bp, Homo sapien
gaaaactgagggtttcctgatctgg

SEQ ID NO: 4395695 - DNA, 25 bp, Homo sapien
tgatctgggacctggataactaaag

SEQ ID NO: 4395696 - DNA, 25 bp, Homo sapien
tcaggtcctcacagttcctccactc

SEQ ID NO: 4395697 - DNA, 25 bp, Homo sapien
ttcaggtcctcacagttcctccact

SEQ ID NO: 4395698 - DNA, 25 bp, Homo sapien
tttcaggtcctcacagttcctccac

SEQ ID NO: 4395699 - DNA, 25 bp, Homo sapien
tgcccgtgtatgtattccagaccat

SEQ ID NO: 4395700 - DNA, 25 bp, Homo sapien
ctagaagtttgtgttaactggtcta

SEQ ID NO: 4395701 - DNA, 25 bp, Homo sapien
accctctcgggcagacccatggttt

SEQ ID NO: 4395702 - DNA, 25 bp, Homo sapien
ctcgggcagacccatggtttcctca

SEQ ID NO: 4395703 - DNA, 25 bp, Homo sapien
tggcaacctcttggcacggaaagcc

SEQ ID NO: 4395704 - DNA, 25 bp, Homo sapien
gccgtatactatatgcatgcaaacg

SEQ ID NO: 4395705 - DNA, 25 bp, Homo sapien
cgtataactctttctatcctgggca

SEQ ID NO: 4395706 - DNA, 25 bp, Homo sapien
gatgtgacatgccagcatctgcggc

SEQ ID NO: 4395707 - DNA, 25 bp, Homo sapien
ttgtatccggagcaatttccctgga

SEQ ID NO: 4395708 - DNA, 25 bp, Homo sapien
tctgaatcctcatcacaattgtatc

SEQ ID NO: 4395709 - DNA, 25 bp, Homo sapien
tatgagagattgttccttcttctga

SEQ ID NO: 4395710 - DNA, 25 bp, Homo sapien
ctttaactatgagagattgttcctt

SEQ ID NO: 4395711 - DNA, 25 bp, Homo sapien
tggtcccagttatccatccctgaag

SEQ ID NO: 4395712 - DNA, 25 bp, Homo sapien
taccacttgataaggatgacttcca

SEQ ID NO: 4395713 - DNA, 25 bp, Homo sapien
gatcacatctctatacggcttagca

SEQ ID NO: 4395714 - DNA, 25 bp, Homo sapien
gtcccagtggcctcttaattgagca

SEQ ID NO: 4395715 - DNA, 25 bp, Homo sapien
tttagggacgctgctcatgagtgac

SEQ ID NO: 4395716 - DNA, 25 bp, Homo sapien
ccttggagttactgagagtggacca

SEQ ID NO: 4395717 - DNA, 25 bp, Homo sapien
ccttgtagataccagttccccagaa

SEQ ID NO: 4395718 - DNA, 25 bp, Homo sapien
catcctgtagctgtggtttagggac

SEQ ID NO: 4395719 - DNA, 25 bp, Homo sapien
ctattcaagaatagtaggatttcct

SEQ ID NO: 4395720 - DNA, 25 bp, Homo sapien
tcttggggttgaaagcgtctttgga

SEQ ID NO: 4395721 - DNA, 25 bp, Homo sapien
actgccacttctctgccgccaatca

SEQ ID NO: 4395722 - DNA, 25 bp, Homo sapien
tctgccgccaatcaattctctgtct

SEQ ID NO: 4395723 - DNA, 25 bp, Homo sapien
tctgtttctgggtatgttctcctca

SEQ ID NO: 4395724 - DNA, 25 bp, Homo sapien
tctgtctgtttctgggtatgttctc

SEQ ID NO: 4395725 - DNA, 25 bp, Homo sapien
aactctccttcgagtgcccctggag

SEQ ID NO: 4395726 - DNA, 25 bp, Homo sapien
ttgtggtgggatgaaactctccttc

SEQ ID NO: 4395727 - DNA, 25 bp, Homo sapien
attctcttatctttacaagggactt

SEQ ID NO: 4395728 - DNA, 25 bp, Homo sapien
gggatgaaactctccttcgagtgcc

SEQ ID NO: 4395729 - DNA, 25 bp, Homo sapien
ctagtctttaatggaacttccaaag

SEQ ID NO: 4395730 - DNA, 25 bp, Homo sapien
ttttggtgcttgtgtcaggcaggca

SEQ ID NO: 4395731 - DNA, 25 bp, Homo sapien
cttccaaagtttttggtgcttgtgt

SEQ ID NO: 4395732 - DNA, 25 bp, Homo sapien
aaagtttttggtgcttgtgtcaggc

SEQ ID NO: 4395733 - DNA, 25 bp, Homo sapien
gatgaactgatcttgaatgatacag

SEQ ID NO: 4395734 - DNA, 25 bp, Homo sapien
aagagatgaactgatcttgaatgat

SEQ ID NO: 4395735 - DNA, 25 bp, Homo sapien
tacagacagaagcagtgttagcagc

SEQ ID NO: 4395736 - DNA, 25 bp, Homo sapien
gaactgatcttgaatgatacagaca

SEQ ID NO: 4395737 - DNA, 25 bp, Homo sapien
cttctctgaagttctgtatgcatta

SEQ ID NO: 4395738 - DNA, 25 bp, Homo sapien
accattggcatttccagacctcttc

SEQ ID NO: 4395739 - DNA, 25 bp, Homo sapien
catttccatcaacaccattggcatt

SEQ ID NO: 4395740 - DNA, 25 bp, Homo sapien
tctgaagttctgtatgcattaatac

SEQ ID NO: 4395741 - DNA, 25 bp, Homo sapien
tagtcctgtgtattgattagggtcc

SEQ ID NO: 4395742 - DNA, 25 bp, Homo sapien
tagcctcatggcctcaaagtgtggt

SEQ ID NO: 4395743 - DNA, 25 bp, Homo sapien
tcagtgaagttgatatccctgggtg

SEQ ID NO: 4395744 - DNA, 25 bp, Homo sapien
caacagactcttgtagctcggaagg

SEQ ID NO: 4395745 - DNA, 25 bp, Homo sapien
gccttttctaatgcatttcctcctt

SEQ ID NO: 4395746 - DNA, 25 bp, Homo sapien
tttctaatgcatttcctcctttcat

SEQ ID NO: 4395747 - DNA, 25 bp, Homo sapien
cttttctaatgcatttcctcctttc

SEQ ID NO: 4395748 - DNA, 25 bp, Homo sapien
cagccttttctaatgcatttcctcc

SEQ ID NO: 4395749 - DNA, 25 bp, Homo sapien
gatccagtggagtccaagtctattt

SEQ ID NO: 4395750 - DNA, 25 bp, Homo sapien
gaccaaccctacaagaagtgttctg

SEQ ID NO: 4395751 - DNA, 25 bp, Homo sapien
tattaggtggaattagctcaagatc

SEQ ID NO: 4395752 - DNA, 25 bp, Homo sapien
agatcattacccttgcaatgcctgt

SEQ ID NO: 4395753 - DNA, 25 bp, Homo sapien
ctgctgttgagaactcagtattaaa

SEQ ID NO: 4395754 - DNA, 25 bp, Homo sapien
tgctgttgagaactcagtattaaag

SEQ ID NO: 4395755 - DNA, 25 bp, Homo sapien
gctgttgagaactcagtattaaaga

SEQ ID NO: 4395756 - DNA, 25 bp, Homo sapien
tgtgcaagagaaagcttaaaccatc

SEQ ID NO: 4395757 - DNA, 25 bp, Homo sapien
ggcacacattgtcccggtgctgagg

SEQ ID NO: 4395758 - DNA, 25 bp, Homo sapien
gctggctgcgcacagtgtactcact

SEQ ID NO: 4395759 - DNA, 25 bp, Homo sapien
ccacctccagtgcattgtgcaagag

SEQ ID NO: 4395760 - DNA, 25 bp, Homo sapien
ggggttgaggagccagattattgtg

SEQ ID NO: 4395761 - DNA, 25 bp, Homo sapien
gggggttgaggagccagattattgt

SEQ ID NO: 4395762 - DNA, 25 bp, Homo sapien
ccccagtgatgcgtaatgacttgca

SEQ ID NO: 4395763 - DNA, 25 bp, Homo sapien
gaaactgtgcttccacgtgtacacg

SEQ ID NO: 4395764 - DNA, 25 bp, Homo sapien
cctgggagagcaaatacaacactga

SEQ ID NO: 4395765 - DNA, 25 bp, Homo sapien
ggagttctgctcgtcccactcaatg

SEQ ID NO: 4395766 - DNA, 25 bp, Homo sapien
tctctaccccagcagactttttcaa

SEQ ID NO: 4395767 - DNA, 25 bp, Homo sapien
aaagtccctaatctctaccccagca

SEQ ID NO: 4395768 - DNA, 25 bp, Homo sapien
cccggaactgtgctaatttgccaat

SEQ ID NO: 4395769 - DNA, 25 bp, Homo sapien
tgaagtttttcccggaactgtgcta

SEQ ID NO: 4395770 - DNA, 25 bp, Homo sapien
cagctttagtctcagtgaccagaag

SEQ ID NO: 4395771 - DNA, 25 bp, Homo sapien
ttctgaccgtaagggctgactgagc

SEQ ID NO: 4395772 - DNA, 25 bp, Homo sapien
aaagaaggcatggttctgaccgtaa

SEQ ID NO: 4395773 - DNA, 25 bp, Homo sapien
tgaccagaagacagcttgtgaaagg

SEQ ID NO: 4395774 - DNA, 25 bp, Homo sapien
ttgtggcactgtgggggaagaatca

SEQ ID NO: 4395775 - DNA, 25 bp, Homo sapien
tgttgtggcactgtgggggaagaat

SEQ ID NO: 4395776 - DNA, 25 bp, Homo sapien
gttgtggcactgtgggggaagaatc

SEQ ID NO: 4395777 - DNA, 25 bp, Homo sapien
atggaatgcagttgactttcccctt

SEQ ID NO: 4395778 - DNA, 25 bp, Homo sapien
tttggagcagggatttctcgccagg

SEQ ID NO: 4395779 - DNA, 25 bp, Homo sapien
gcagggatttctcgccaggaaatat

SEQ ID NO: 4395780 - DNA, 25 bp, Homo sapien
tcctttccagaagagtgagtatgga

SEQ ID NO: 4395781 - DNA, 25 bp, Homo sapien
tcaggtagtctgtggtagttgagtc

SEQ ID NO: 4395782 - DNA, 25 bp, Homo sapien
aggtgttgacttccattgcatgtca

SEQ ID NO: 4395783 - DNA, 25 bp, Homo sapien
tacataacggtcatgctatttacat

SEQ ID NO: 4395784 - DNA, 25 bp, Homo sapien
tagttgagtcccaaaatacaaggtg

SEQ ID NO: 4395785 - DNA, 25 bp, Homo sapien
cagaatctgccagttgccattagga

SEQ ID NO: 4395786 - DNA, 25 bp, Homo sapien
tctgccagttgccattaggagtgtg

SEQ ID NO: 4395787 - DNA, 25 bp, Homo sapien
ccagttgccattaggagtgtgacta

SEQ ID NO: 4395788 - DNA, 25 bp, Homo sapien
gttgccattaggagtgtgactatgg

SEQ ID NO: 4395789 - DNA, 25 bp, Homo sapien
cctatcaattcgaggaatttcattt

SEQ ID NO: 4395790 - DNA, 25 bp, Homo sapien
catcgggtccctttcatcagagcca

SEQ ID NO: 4395791 - DNA, 25 bp, Homo sapien
catttttggtatcctgaatagtgag

SEQ ID NO: 4395792 - DNA, 25 bp, Homo sapien
ttcactcaagagccaaatttgtctt

SEQ ID NO: 4395793 - DNA, 25 bp, Homo sapien
catcaggatgacaagctgtgcatac

SEQ ID NO: 4395794 - DNA, 25 bp, Homo sapien
attgtagatgagagggtgagtgtag

SEQ ID NO: 4395795 - DNA, 25 bp, Homo sapien
tagatgagagggtgagtgtaggtgt

SEQ ID NO: 4395796 - DNA, 25 bp, Homo sapien
tttacatcaggatgacaagctgtgc

SEQ ID NO: 4395797 - DNA, 25 bp, Homo sapien
aggaagtcaatgttcagagctttat

SEQ ID NO: 4395798 - DNA, 25 bp, Homo sapien
ctgaggcgaggtctgggtgtactgg

SEQ ID NO: 4395799 - DNA, 25 bp, Homo sapien
gtgtgtgtgagctattcagtttaat

SEQ ID NO: 4395800 - DNA, 25 bp, Homo sapien
agtcaatgttcagagctttattttg

SEQ ID NO: 4395801 - DNA, 25 bp, Homo sapien
ttactcttattcactttaatattcc

SEQ ID NO: 4395802 - DNA, 25 bp, Homo sapien
gctgccaacttgctttttattatta

SEQ ID NO: 4395803 - DNA, 25 bp, Homo sapien
actcttattcactttaatattccct

SEQ ID NO: 4395804 - DNA, 25 bp, Homo sapien
tttattattactcttattcacttta

SEQ ID NO: 4395805 - DNA, 25 bp, Homo sapien
tgagcctggtgacagtagctgagct

SEQ ID NO: 4395806 - DNA, 25 bp, Homo sapien
tctgcatagtaagaactttcctctg

SEQ ID NO: 4395807 - DNA, 25 bp, Homo sapien
gatcctgaactaactgcctttgcca

SEQ ID NO: 4395808 - DNA, 25 bp, Homo sapien
gctgagctgtgacttagatcctgaa

SEQ ID NO: 4395809 - DNA, 25 bp, Homo sapien
cagacttttggtattcccctacttg

SEQ ID NO: 4395810 - DNA, 25 bp, Homo sapien
ggtattcccctacttgcactttcca

SEQ ID NO: 4395811 - DNA, 25 bp, Homo sapien
tacttgcactttccatcagcagcag

SEQ ID NO: 4395812 - DNA, 25 bp, Homo sapien
catatcccagacttttggtattccc

SEQ ID NO: 4395813 - DNA, 25 bp, Homo sapien
gtaaggcaaggttatcttgttccat

SEQ ID NO: 4395814 - DNA, 25 bp, Homo sapien
caggtaaggcaaggttatcttgttc

SEQ ID NO: 4395815 - DNA, 25 bp, Homo sapien
atccaggtaaggcaaggttatcttg

SEQ ID NO: 4395816 - DNA, 25 bp, Homo sapien
taaatccaggtaaggcaaggttatc

SEQ ID NO: 4395817 - DNA, 25 bp, Homo sapien
ctagtcactacctaggagagtctct

SEQ ID NO: 4395818 - DNA, 25 bp, Homo sapien
agtcactacctaggagagtctcttc

SEQ ID NO: 4395819 - DNA, 25 bp, Homo sapien
cttcaaataaggcaatacctgactt

SEQ ID NO: 4395820 - DNA, 25 bp, Homo sapien
aataaggcaatacctgactttgaaa

SEQ ID NO: 4395821 - DNA, 25 bp, Homo sapien
aagcctaatagctctactgactgag

SEQ ID NO: 4395822 - DNA, 25 bp, Homo sapien
aaccctggatcctcatgctaaaagc

SEQ ID NO: 4395823 - DNA, 25 bp, Homo sapien
agtcttgaaccctggatcctcatgc

SEQ ID NO: 4395824 - DNA, 25 bp, Homo sapien
catgctaaaagcctaatagctctac

SEQ ID NO: 4395825 - DNA, 25 bp, Homo sapien
caggtaaggcattcatctgaatagt

SEQ ID NO: 4395826 - DNA, 25 bp, Homo sapien
gatctatgggcagaatctagaggcc

SEQ ID NO: 4395827 - DNA, 25 bp, Homo sapien
catctgaatagtctgtgtagagaca

SEQ ID NO: 4395828 - DNA, 25 bp, Homo sapien
tcatagagtttcttggatctatggg

SEQ ID NO: 4395829 - DNA, 25 bp, Homo sapien
aacctcatccttgtattcaactggg

SEQ ID NO: 4395830 - DNA, 25 bp, Homo sapien
gctttctcaacctcatccttgtatt

SEQ ID NO: 4395831 - DNA, 25 bp, Homo sapien
tttggccaatttcttgttacaacca

SEQ ID NO: 4395832 - DNA, 25 bp, Homo sapien
gttacaaccagccactttgctttct

SEQ ID NO: 4395833 - DNA, 25 bp, Homo sapien
gcatccgagccagcaagtattaatt

SEQ ID NO: 4395834 - DNA, 25 bp, Homo sapien
cagggaatggttgttgcatcatgac

SEQ ID NO: 4395835 - DNA, 25 bp, Homo sapien
taattctctttgcactctgaagcct

SEQ ID NO: 4395836 - DNA, 25 bp, Homo sapien
gaagttccgttcacaaattctggat

SEQ ID NO: 4395837 - DNA, 25 bp, Homo sapien
aagaaccatatctgtaggcactgtt

SEQ ID NO: 4395838 - DNA, 25 bp, Homo sapien
gaaccatatctgtaggcactgttcc

SEQ ID NO: 4395839 - DNA, 25 bp, Homo sapien
ttaagaaccatatctgtaggcactg

SEQ ID NO: 4395840 - DNA, 25 bp, Homo sapien
accatatctgtaggcactgttccca

SEQ ID NO: 4395841 - DNA, 25 bp, Homo sapien
tgaggacctacaagcatctctccct

SEQ ID NO: 4395842 - DNA, 25 bp, Homo sapien
tgtttttccagatcaacctcagtaa

SEQ ID NO: 4395843 - DNA, 25 bp, Homo sapien
tgtatagcaatcatgccttctcctt

SEQ ID NO: 4395844 - DNA, 25 bp, Homo sapien
taactgccaaaagcccgaatctgag

SEQ ID NO: 4395845 - DNA, 25 bp, Homo sapien
cttggctcctaggagtcaagaagaa

SEQ ID NO: 4395846 - DNA, 25 bp, Homo sapien
tcaagaagaacaaagtgtccctttc

SEQ ID NO: 4395847 - DNA, 25 bp, Homo sapien
cctccatacaaatctaaagtcttca

SEQ ID NO: 4395848 - DNA, 25 bp, Homo sapien
tacgttatgctcagtggtccaagtc

SEQ ID NO: 4395849 - DNA, 25 bp, Homo sapien
tattatttaaatacgttaggctata

SEQ ID NO: 4395850 - DNA, 25 bp, Homo sapien
atattatttaaatacgttaggctat

SEQ ID NO: 4395851 - DNA, 25 bp, Homo sapien
catgacatacgtttaaatgatatta

SEQ ID NO: 4395852 - DNA, 25 bp, Homo sapien
gaaatcatgacatacgtttaaatga

SEQ ID NO: 4395853 - DNA, 25 bp, Homo sapien
gaattttgaaacttcacggtgtgcc

SEQ ID NO: 4395854 - DNA, 25 bp, Homo sapien
ccagcggtgagtttgaatgtgacat

SEQ ID NO: 4395855 - DNA, 25 bp, Homo sapien
tgttctccgttcgttgatatcaaag

SEQ ID NO: 4395856 - DNA, 25 bp, Homo sapien
tacagtactgccctgacccttacat

SEQ ID NO: 4395857 - DNA, 25 bp, Homo sapien
gggacttcaattattccatgtagtt

SEQ ID NO: 4395858 - DNA, 25 bp, Homo sapien
cagaccagagtcaaaatattcgtac

SEQ ID NO: 4395859 - DNA, 25 bp, Homo sapien
tcagaccagagtcaaaatattcgta

SEQ ID NO: 4395860 - DNA, 25 bp, Homo sapien
cacacaccctttggtctcttgaact

SEQ ID NO: 4395861 - DNA, 25 bp, Homo sapien
ttccacacaccctttggtctcttga

SEQ ID NO: 4395862 - DNA, 25 bp, Homo sapien
gtctcttgaactgcccttctttggt

SEQ ID NO: 4395863 - DNA, 25 bp, Homo sapien
cacaccctttggtctcttgaactgc

SEQ ID NO: 4395864 - DNA, 25 bp, Homo sapien
gctactccatggtcttccagctggt

SEQ ID NO: 4395865 - DNA, 25 bp, Homo sapien
ctactccatggtcttccagctggtc

SEQ ID NO: 4395866 - DNA, 25 bp, Homo sapien
aagatggtccaactcaacaggtcct

SEQ ID NO: 4395867 - DNA, 25 bp, Homo sapien
taagatggtccaactcaacaggtcc

SEQ ID NO: 4395868 - DNA, 25 bp, Homo sapien
cagaggatccgttgattatatttat

SEQ ID NO: 4395869 - DNA, 25 bp, Homo sapien
gacagaggatccgttgattatattt

SEQ ID NO: 4395870 - DNA, 25 bp, Homo sapien
ggatccgttgattatatttatctgg

SEQ ID NO: 4395871 - DNA, 25 bp, Homo sapien
gttgacagaggatccgttgattata

SEQ ID NO: 4395872 - DNA, 25 bp, Homo sapien
cactatatagttggacaattgcagt

SEQ ID NO: 4395873 - DNA, 25 bp, Homo sapien
tcttcctcaacagccagtgaatcag

SEQ ID NO: 4395874 - DNA, 25 bp, Homo sapien
tcctctgctcttttgtcggaaactc

SEQ ID NO: 4395875 - DNA, 25 bp, Homo sapien
tcggaaactcggtctcctctttata

SEQ ID NO: 4395876 - DNA, 25 bp, Homo sapien
tggaataacaacaactcagcacctg

SEQ ID NO: 4395877 - DNA, 25 bp, Homo sapien
aagtgttaaagtgcccaatgttctc

SEQ ID NO: 4395878 - DNA, 25 bp, Homo sapien
cctgctctcaaagtgttaaagtgcc

SEQ ID NO: 4395879 - DNA, 25 bp, Homo sapien
gaaggaaatttgcagcattcagaca

SEQ ID NO: 4395880 - DNA, 25 bp, Homo sapien
ttctgacactgagcttattcactac

SEQ ID NO: 4395881 - DNA, 25 bp, Homo sapien
gacactgagcttattcactacaata

SEQ ID NO: 4395882 - DNA, 25 bp, Homo sapien
gagcttattcactacaatacctctg

SEQ ID NO: 4395883 - DNA, 25 bp, Homo sapien
tattcactacaatacctctgtgtcc

SEQ ID NO: 4395884 - DNA, 25 bp, Homo sapien
tgtgacctttgccttttcagttaga

SEQ ID NO: 4395885 - DNA, 25 bp, Homo sapien
cctttgccttttcagttagacttgg

SEQ ID NO: 4395886 - DNA, 25 bp, Homo sapien
tgacctttgccttttcagttagact

SEQ ID NO: 4395887 - DNA, 25 bp, Homo sapien
gccttttcagttagacttggaacat

SEQ ID NO: 4395888 - DNA, 25 bp, Homo sapien
cagcaaacaaagagaaggctcccag

SEQ ID NO: 4395889 - DNA, 25 bp, Homo sapien
cacatggcaatcacactggaattac

SEQ ID NO: 4395890 - DNA, 25 bp, Homo sapien
taagagacagcaaacaaagagaagg

SEQ ID NO: 4395891 - DNA, 25 bp, Homo sapien
gcagccacatggcaatcacactgga

SEQ ID NO: 4395892 - DNA, 25 bp, Homo sapien
agctggaggggtgaggccagagggc

SEQ ID NO: 4395893 - DNA, 25 bp, Homo sapien
acagctggaggggtgaggccagagg

SEQ ID NO: 4395894 - DNA, 25 bp, Homo sapien
ggacagctggaggggtgaggccaga

SEQ ID NO: 4395895 - DNA, 25 bp, Homo sapien
cttctgtgcaccactggacagctgg

SEQ ID NO: 4395896 - DNA, 25 bp, Homo sapien
gttgctataagaggacactgacagg

SEQ ID NO: 4395897 - DNA, 25 bp, Homo sapien
tgtccataaaggcatttgcctgtag

SEQ ID NO: 4395898 - DNA, 25 bp, Homo sapien
gaggtgattggcttccgatgaagtt

SEQ ID NO: 4395899 - DNA, 25 bp, Homo sapien
ctttgcagagatttagaggcctgat

SEQ ID NO: 4395900 - DNA, 25 bp, Homo sapien
ctgcccaggtgatttcgatttgctt

SEQ ID NO: 4395901 - DNA, 25 bp, Homo sapien
ctccctgggcgtaaggagtatccag

SEQ ID NO: 4395902 - DNA, 25 bp, Homo sapien
cctgggcgtaaggagtatccagctg

SEQ ID NO: 4395903 - DNA, 25 bp, Homo sapien
tcctcgccacttgagactccttaag

SEQ ID NO: 4395904 - DNA, 25 bp, Homo sapien
caagtcccaccgacaatggctgttt

SEQ ID NO: 4395905 - DNA, 25 bp, Homo sapien
aagctgaacttcatggtgttaagga

SEQ ID NO: 4395906 - DNA, 25 bp, Homo sapien
taaggaggtgtgtatcaagtcccac

SEQ ID NO: 4395907 - DNA, 25 bp, Homo sapien
tgaacttcatggtgttaaggaggtg

SEQ ID NO: 4395908 - DNA, 25 bp, Homo sapien
aggcatcccgtttggatctttggat

SEQ ID NO: 4395909 - DNA, 25 bp, Homo sapien
ccactcatatgggagtttatctgca

SEQ ID NO: 4395910 - DNA, 25 bp, Homo sapien
ctggctttcgagctatcaggcatcc

SEQ ID NO: 4395911 - DNA, 25 bp, Homo sapien
gggtccgtgtatatgaccactcata

SEQ ID NO: 4395912 - DNA, 25 bp, Homo sapien
gcaaggagctggttaacaatattac

SEQ ID NO: 4395913 - DNA, 25 bp, Homo sapien
ccttttcctggatcaagaaggttga

SEQ ID NO: 4395914 - DNA, 25 bp, Homo sapien
caatattactaggtgagtcacttaa

SEQ ID NO: 4395915 - DNA, 25 bp, Homo sapien
gtcacttaaacactctaaatcctcc

SEQ ID NO: 4395916 - DNA, 25 bp, Homo sapien
cctcttaaaaactgatcaggtggaa

SEQ ID NO: 4395917 - DNA, 25 bp, Homo sapien
cttgcatcctcttaaaaactgatca

SEQ ID NO: 4395918 - DNA, 25 bp, Homo sapien
taaaaactgatcaggtggaaatcct

SEQ ID NO: 4395919 - DNA, 25 bp, Homo sapien
aaactgatcaggtggaaatcctatc

SEQ ID NO: 4395920 - DNA, 25 bp, Homo sapien
tctttgctagtttcgtatttgaaga

SEQ ID NO: 4395921 - DNA, 25 bp, Homo sapien
gaatttgaatcaatctgaagtttga

SEQ ID NO: 4395922 - DNA, 25 bp, Homo sapien
tctctggctaaaatctgaatggcca

SEQ ID NO: 4395923 - DNA, 25 bp, Homo sapien
gaagatatccccagaatttgaatca

SEQ ID NO: 4395924 - DNA, 25 bp, Homo sapien
tttaaaatatctcgaatcacaaacg

SEQ ID NO: 4395925 - DNA, 25 bp, Homo sapien
gcatcaacatccaattcctcttgta

SEQ ID NO: 4395926 - DNA, 25 bp, Homo sapien
tgttattctcatgattatgtaattc

SEQ ID NO: 4395927 - DNA, 25 bp, Homo sapien
cgaatcacaaacgtaggtagttgca

SEQ ID NO: 4395928 - DNA, 25 bp, Homo sapien
tgactgcgtctatgaccatttgcca

SEQ ID NO: 4395929 - DNA, 25 bp, Homo sapien
tggcagttgactgcgtctatgacca

SEQ ID NO: 4395930 - DNA, 25 bp, Homo sapien
tccttgctggcagttgactgcgtct

SEQ ID NO: 4395931 - DNA, 25 bp, Homo sapien
aacccgaagcccaggtttcctgatg

SEQ ID NO: 4395932 - DNA, 25 bp, Homo sapien
tttaaggaagtaaccatctgctttc

SEQ ID NO: 4395933 - DNA, 25 bp, Homo sapien
tactgttgactcttaagctgtcagt

SEQ ID NO: 4395934 - DNA, 25 bp, Homo sapien
taaccatctgctttctactgttgac

SEQ ID NO: 4395935 - DNA, 25 bp, Homo sapien
tcagtaggtgtagaatttagacaca

SEQ ID NO: 4395936 - DNA, 25 bp, Homo sapien
taactctatcgcatgggcagtgtgc

SEQ ID NO: 4395937 - DNA, 25 bp, Homo sapien
cagcacctcttcagatcggtatata

SEQ ID NO: 4395938 - DNA, 25 bp, Homo sapien
ggcagtgtgctgacattgcatactt

SEQ ID NO: 4395939 - DNA, 25 bp, Homo sapien
taacctgacagcagatggcggttgg

SEQ ID NO: 4395940 - DNA, 25 bp, Homo sapien
aaggtgctggttcagtgagataact

SEQ ID NO: 4395941 - DNA, 25 bp, Homo sapien
gtgagataactcttatccagcctaa

SEQ ID NO: 4395942 - DNA, 25 bp, Homo sapien
tccagcctaatctcaagacttcctt

SEQ ID NO: 4395943 - DNA, 25 bp, Homo sapien
agcctaatctcaagacttcctttca

SEQ ID NO: 4395944 - DNA, 25 bp, Homo sapien
cccaaacttgcaggtcgctttcatc

SEQ ID NO: 4395945 - DNA, 25 bp, Homo sapien
aaacttgcaggtcgctttcatctgt

SEQ ID NO: 4395946 - DNA, 25 bp, Homo sapien
tcccaaacttgcaggtcgctttcat

SEQ ID NO: 4395947 - DNA, 25 bp, Homo sapien
caaacttgcaggtcgctttcatctg

SEQ ID NO: 4395948 - DNA, 25 bp, Homo sapien
ttgctagccttggaaagtataactc

SEQ ID NO: 4395949 - DNA, 25 bp, Homo sapien
cttggaaagtataactcttataggg

SEQ ID NO: 4395950 - DNA, 25 bp, Homo sapien
tatttctgtgtttgctagccttgga

SEQ ID NO: 4395951 - DNA, 25 bp, Homo sapien
agtatttctgtgtttgctagccttg

SEQ ID NO: 4395952 - DNA, 25 bp, Homo sapien
tgatggtccattgttggtgactgca

SEQ ID NO: 4395953 - DNA, 25 bp, Homo sapien
gttcaactggtgtgataagccccat

SEQ ID NO: 4395954 - DNA, 25 bp, Homo sapien
tcagtgtcaggcagaaggatctttc

SEQ ID NO: 4395955 - DNA, 25 bp, Homo sapien
cagttcatggattgctgatggtcca

SEQ ID NO: 4395956 - DNA, 25 bp, Homo sapien
attgtcggcactctttcatgaagag

SEQ ID NO: 4395957 - DNA, 25 bp, Homo sapien
tattgtcggcactctttcatgaaga

SEQ ID NO: 4395958 - DNA, 25 bp, Homo sapien
ttgtcggcactctttcatgaagaga

SEQ ID NO: 4395959 - DNA, 25 bp, Homo sapien
ttattgtcggcactctttcatgaag

SEQ ID NO: 4395960 - DNA, 25 bp, Homo sapien
aatgttgggatctgcgtctgcctga

SEQ ID NO: 4395961 - DNA, 25 bp, Homo sapien
ttgggatctgcgtctgcctgatcat

SEQ ID NO: 4395962 - DNA, 25 bp, Homo sapien
cttgccaagacgactgtggggccaa

SEQ ID NO: 4395963 - DNA, 25 bp, Homo sapien
atgttgggatctgcgtctgcctgat

SEQ ID NO: 4395964 - DNA, 25 bp, Homo sapien
gaaagagagtggctgttccataaat

SEQ ID NO: 4395965 - DNA, 25 bp, Homo sapien
caagctgctttttgtaaagtcctgg

SEQ ID NO: 4395966 - DNA, 25 bp, Homo sapien
tgtagtacaggaattggcaagctgc

SEQ ID NO: 4395967 - DNA, 25 bp, Homo sapien
gaaacagccgaagataatgcataaa

SEQ ID NO: 4395968 - DNA, 25 bp, Homo sapien
tagccaaagcgaggcacccttactg

SEQ ID NO: 4395969 - DNA, 25 bp, Homo sapien
cactagggccttggaaattcctgta

SEQ ID NO: 4395970 - DNA, 25 bp, Homo sapien
tgaataaacctaggacttccgagct

SEQ ID NO: 4395971 - DNA, 25 bp, Homo sapien
gtactattcaggtaacactagggcc

SEQ ID NO: 4395972 - DNA, 25 bp, Homo sapien
tatgtgggagcacgctgcagatgat

SEQ ID NO: 4395973 - DNA, 25 bp, Homo sapien
ccgatgatactcagcagtgacctca

SEQ ID NO: 4395974 - DNA, 25 bp, Homo sapien
taacttagtgaccttccgatgatac

SEQ ID NO: 4395975 - DNA, 25 bp, Homo sapien
tgacctcatcagtactgtgggagtg

SEQ ID NO: 4395976 - DNA, 25 bp, Homo sapien
gattgcatccaactaacctaggccc

SEQ ID NO: 4395977 - DNA, 25 bp, Homo sapien
cattgtcagtacaaagggcggagga

SEQ ID NO: 4395978 - DNA, 25 bp, Homo sapien
tacaggcatgtctaagttcacaaag

SEQ ID NO: 4395979 - DNA, 25 bp, Homo sapien
gcgggtcactctcttaggctgcaca

SEQ ID NO: 4395980 - DNA, 25 bp, Homo sapien
gatatgaacgaacttggcttctcag

SEQ ID NO: 4395981 - DNA, 25 bp, Homo sapien
tcaacagaatgcttcgaccctactc

SEQ ID NO: 4395982 - DNA, 25 bp, Homo sapien
gcagaacataagcaatgcctcccct

SEQ ID NO: 4395983 - DNA, 25 bp, Homo sapien
gcgttgttaattgatgaagcctact

SEQ ID NO: 4395984 - DNA, 25 bp, Homo sapien
cagctatggccaatgataccacctg

SEQ ID NO: 4395985 - DNA, 25 bp, Homo sapien
agctatggccaatgataccacctgt

SEQ ID NO: 4395986 - DNA, 25 bp, Homo sapien
aaaccctcagctatggccaatgata

SEQ ID NO: 4395987 - DNA, 25 bp, Homo sapien
accctcagctatggccaatgatacc

SEQ ID NO: 4395988 - DNA, 25 bp, Homo sapien
agctacctgttctgattggtaaatg

SEQ ID NO: 4395989 - DNA, 25 bp, Homo sapien
gttctgattggtaaatgtgtacatt

SEQ ID NO: 4395990 - DNA, 25 bp, Homo sapien
ctgttctgattggtaaatgtgtaca

SEQ ID NO: 4395991 - DNA, 25 bp, Homo sapien
acctgttctgattggtaaatgtgta

SEQ ID NO: 4395992 - DNA, 25 bp, Homo sapien
tggctagctgatacagggaccattc

SEQ ID NO: 4395993 - DNA, 25 bp, Homo sapien
aagcaggaaggctccaatgccttgg

SEQ ID NO: 4395994 - DNA, 25 bp, Homo sapien
caatgccttggggtgaacagcaaat

SEQ ID NO: 4395995 - DNA, 25 bp, Homo sapien
gggaccattcattgtccacagaaac

SEQ ID NO: 4395996 - DNA, 25 bp, Homo sapien
caaagacattaaatagtcatgctgc

SEQ ID NO: 4395997 - DNA, 25 bp, Homo sapien
gagcaaagttaatcctactgaaacc

SEQ ID NO: 4395998 - DNA, 25 bp, Homo sapien
ccttcaattaaaccaagctctaggg

SEQ ID NO: 4395999 - DNA, 25 bp, Homo sapien
tagtcatgctgctccaatatagcca

SEQ ID NO: 4396000 - DNA, 25 bp, Homo sapien
tggctccagtgagtatgaatcttac

SEQ ID NO: 4396001 - DNA, 25 bp, Homo sapien
ccagtgagtatgaatcttacatttg

SEQ ID NO: 4396002 - DNA, 25 bp, Homo sapien
gtaagtctcccctaacacttggctc

SEQ ID NO: 4396003 - DNA, 25 bp, Homo sapien
tctttacagtaagtctcccctaaca

SEQ ID NO: 4396004 - DNA, 25 bp, Homo sapien
tatgttgggcatgagcagagctgcc

SEQ ID NO: 4396005 - DNA, 25 bp, Homo sapien
tgtttcctctaggtaactcactggc

SEQ ID NO: 4396006 - DNA, 25 bp, Homo sapien
ttttgccttagtgcattcaatctct

SEQ ID NO: 4396007 - DNA, 25 bp, Homo sapien
taaactcttgctgtagaattgattc

SEQ ID NO: 4396008 - DNA, 25 bp, Homo sapien
tctacgactgtgctactggctacat

SEQ ID NO: 4396009 - DNA, 25 bp, Homo sapien
gctacatttcgcattggtgacagga

SEQ ID NO: 4396010 - DNA, 25 bp, Homo sapien
cacgaaattgagtgtgatgtgattc

SEQ ID NO: 4396011 - DNA, 25 bp, Homo sapien
ccttgacctcaagagcacgaaattg

SEQ ID NO: 4396012 - DNA, 25 bp, Homo sapien
taaattgcccgctatttaggagaga

SEQ ID NO: 4396013 - DNA, 25 bp, Homo sapien
tctgtgggttcaaagagaccaggta

SEQ ID NO: 4396014 - DNA, 25 bp, Homo sapien
attttgtttctgtgggttcaaagag

SEQ ID NO: 4396015 - DNA, 25 bp, Homo sapien
ttgcccgctatttaggagagaattt

SEQ ID NO: 4396016 - DNA, 25 bp, Homo sapien
ggacccttctatatacttcttagtg

SEQ ID NO: 4396017 - DNA, 25 bp, Homo sapien
tatatacttcttagtgtgtaaccca

SEQ ID NO: 4396018 - DNA, 25 bp, Homo sapien
tatacttcttagtgtgtaacccagt

SEQ ID NO: 4396019 - DNA, 25 bp, Homo sapien
gagagaggacccttctatatacttc

SEQ ID NO: 4396020 - DNA, 25 bp, Homo sapien
gacagcactatctgaacggcaatgc

SEQ ID NO: 4396021 - DNA, 25 bp, Homo sapien
cagagacagcactatctgaacggca

SEQ ID NO: 4396022 - DNA, 25 bp, Homo sapien
gagacagcactatctgaacggcaat

SEQ ID NO: 4396023 - DNA, 25 bp, Homo sapien
acagcactatctgaacggcaatgcc

SEQ ID NO: 4396024 - DNA, 25 bp, Homo sapien
gtgtggatctgggtggaattcttta

SEQ ID NO: 4396025 - DNA, 25 bp, Homo sapien
gaattctttaatgtgacatttgact

SEQ ID NO: 4396026 - DNA, 25 bp, Homo sapien
ctttaatgtgacatttgactggcag

SEQ ID NO: 4396027 - DNA, 25 bp, Homo sapien
gtgacatttgactggcagaagatct

SEQ ID NO: 4396028 - DNA, 25 bp, Homo sapien
tagctcacagtctccggggacagcc

SEQ ID NO: 4396029 - DNA, 25 bp, Homo sapien
cccgatagctcacagtctccgggga

SEQ ID NO: 4396030 - DNA, 25 bp, Homo sapien
cgatagctcacagtctccggggaca

SEQ ID NO: 4396031 - DNA, 25 bp, Homo sapien
gatagctcacagtctccggggacag

SEQ ID NO: 4396032 - DNA, 25 bp, Homo sapien
caacatctgatgtacttttattacc

SEQ ID NO: 4396033 - DNA, 25 bp, Homo sapien
aaactttctggtacagggagcaaca

SEQ ID NO: 4396034 - DNA, 25 bp, Homo sapien
aactttctggtacagggagcaacat

SEQ ID NO: 4396035 - DNA, 25 bp, Homo sapien
acagggagcaacatctgatgtactt

SEQ ID NO: 4396036 - DNA, 25 bp, Homo sapien
cactcagaagccaaacgtctgcaag

SEQ ID NO: 4396037 - DNA, 25 bp, Homo sapien
tcactcagaagccaaacgtctgcaa

SEQ ID NO: 4396038 - DNA, 25 bp, Homo sapien
caaacgtctgcaaggaaaaatctgt

SEQ ID NO: 4396039 - DNA, 25 bp, Homo sapien
aaacgtctgcaaggaaaaatctgta

SEQ ID NO: 4396040 - DNA, 25 bp, Homo sapien
atgtctaaccaactcagagcagtgg

SEQ ID NO: 4396041 - DNA, 25 bp, Homo sapien
gagaaggctgaaagtgctccctgtg

SEQ ID NO: 4396042 - DNA, 25 bp, Homo sapien
ctgtgcttagccctgcggcctggaa

SEQ ID NO: 4396043 - DNA, 25 bp, Homo sapien
agccctgcggcctggaagttcagag

SEQ ID NO: 4396044 - DNA, 25 bp, Homo sapien
ctgtgtgctggatagcagcaatgag

SEQ ID NO: 4396045 - DNA, 25 bp, Homo sapien
agcctccctttattaaacaaatcag

SEQ ID NO: 4396046 - DNA, 25 bp, Homo sapien
taaacaaatcagacacaagcacaaa

SEQ ID NO: 4396047 - DNA, 25 bp, Homo sapien
acaaatcagacacaagcacaaatct

SEQ ID NO: 4396048 - DNA, 25 bp, Homo sapien
ccggagcctgggtgatcattacgcc

SEQ ID NO: 4396049 - DNA, 25 bp, Homo sapien
gagctcatggccgttagcacctaag

SEQ ID NO: 4396050 - DNA, 25 bp, Homo sapien
taattttagaactggagcacacgtg

SEQ ID NO: 4396051 - DNA, 25 bp, Homo sapien
tacgcccatgatacctgaggcagcg

SEQ ID NO: 4396052 - DNA, 25 bp, Homo sapien
gctgttcttgatccagaattgcaat

SEQ ID NO: 4396053 - DNA, 25 bp, Homo sapien
tgttcttgatccagaattgcaatca

SEQ ID NO: 4396054 - DNA, 25 bp, Homo sapien
tcacttcatcagcctgtattcgctc

SEQ ID NO: 4396055 - DNA, 25 bp, Homo sapien
ttgatccagaattgcaatcacttca

SEQ ID NO: 4396056 - DNA, 25 bp, Homo sapien
tccacctcctggattcaagtgattc

SEQ ID NO: 4396057 - DNA, 25 bp, Homo sapien
tggattcaagtgattctcctgcctc

SEQ ID NO: 4396058 - DNA, 25 bp, Homo sapien
ggtgcgatctcgggttacagcaacc

SEQ ID NO: 4396059 - DNA, 25 bp, Homo sapien
agtggtgcgatctcgggttacagca

SEQ ID NO: 4396060 - DNA, 25 bp, Homo sapien
cttttccatcagaggaagggacgct

SEQ ID NO: 4396061 - DNA, 25 bp, Homo sapien
ggaagggacgctggcgttgatgttt

SEQ ID NO: 4396062 - DNA, 25 bp, Homo sapien
tagatgccgctacggcctgaagact

SEQ ID NO: 4396063 - DNA, 25 bp, Homo sapien
ccactgtggccactagatgccgcta

SEQ ID NO: 4396064 - DNA, 25 bp, Homo sapien
ttagcttattttgagagaacaatac

SEQ ID NO: 4396065 - DNA, 25 bp, Homo sapien
tttgtgttagcttattttgagagaa

SEQ ID NO: 4396066 - DNA, 25 bp, Homo sapien
gtgttagcttattttgagagaacaa

SEQ ID NO: 4396067 - DNA, 25 bp, Homo sapien
tgtgttagcttattttgagagaaca

SEQ ID NO: 4396068 - DNA, 25 bp, Homo sapien
tatcgtctttgcttctaggtctgag

SEQ ID NO: 4396069 - DNA, 25 bp, Homo sapien
tgtccaagctcctcatagtccagga

SEQ ID NO: 4396070 - DNA, 25 bp, Homo sapien
gcttcatcaatacttagggctggag

SEQ ID NO: 4396071 - DNA, 25 bp, Homo sapien
tagggcctatctagcagagtttcca

SEQ ID NO: 4396072 - DNA, 25 bp, Homo sapien
ctcagacgaagcaatttaaaggact

SEQ ID NO: 4396073 - DNA, 25 bp, Homo sapien
gctcaagacagattagtgactatca

SEQ ID NO: 4396074 - DNA, 25 bp, Homo sapien
gttcatgaagcaagcctaattggct

SEQ ID NO: 4396075 - DNA, 25 bp, Homo sapien
ctttctgggcgggtgagaaactcac

SEQ ID NO: 4396076 - DNA, 25 bp, Homo sapien
gtgggtccaaggtgaaccacagagc

SEQ ID NO: 4396077 - DNA, 25 bp, Homo sapien
attctctataaagtgggtccaaggt

SEQ ID NO: 4396078 - DNA, 25 bp, Homo sapien
gggtccaaggtgaaccacagagcca

SEQ ID NO: 4396079 - DNA, 25 bp, Homo sapien
ttctctataaagtgggtccaaggtg

SEQ ID NO: 4396080 - DNA, 25 bp, Homo sapien
gaagctgatcatgcgcccacatttt

SEQ ID NO: 4396081 - DNA, 25 bp, Homo sapien
agaagctgatcatgcgcccacattt

SEQ ID NO: 4396082 - DNA, 25 bp, Homo sapien
ctttcccttggtgactgccttcacc

SEQ ID NO: 4396083 - DNA, 25 bp, Homo sapien
ttcaccccatgagggttctctcctc

SEQ ID NO: 4396084 - DNA, 25 bp, Homo sapien
actgggctatattcttcaggccatg

SEQ ID NO: 4396085 - DNA, 25 bp, Homo sapien
gagggtttttgaccattccatggat

SEQ ID NO: 4396086 - DNA, 25 bp, Homo sapien
tcaggccatggagggtttttgacca

SEQ ID NO: 4396087 - DNA, 25 bp, Homo sapien
cattccatggatcctatctgaggta

SEQ ID NO: 4396088 - DNA, 25 bp, Homo sapien
tagcattttctttcggggtctgtaa

SEQ ID NO: 4396089 - DNA, 25 bp, Homo sapien
aatactcgcataacaaattccagcc

SEQ ID NO: 4396090 - DNA, 25 bp, Homo sapien
gtcaccatggcaatactcgcataac

SEQ ID NO: 4396091 - DNA, 25 bp, Homo sapien
ctctttagtgagaaccacctctgga

SEQ ID NO: 4396092 - DNA, 25 bp, Homo sapien
ggcttggcccccattggaatatggc

SEQ ID NO: 4396093 - DNA, 25 bp, Homo sapien
tttgaatgtcaccagagtcctagct

SEQ ID NO: 4396094 - DNA, 25 bp, Homo sapien
agaacgtctctcgtttgggggcttg

SEQ ID NO: 4396095 - DNA, 25 bp, Homo sapien
gctcaagagataaaacgaggtccct

SEQ ID NO: 4396096 - DNA, 25 bp, Homo sapien
catcatagagggactgaggtctcat

SEQ ID NO: 4396097 - DNA, 25 bp, Homo sapien
ccatcatagagggactgaggtctca

SEQ ID NO: 4396098 - DNA, 25 bp, Homo sapien
ttccatcatagagggactgaggtct

SEQ ID NO: 4396099 - DNA, 25 bp, Homo sapien
tcatagagggactgaggtctcatac

SEQ ID NO: 4396100 - DNA, 25 bp, Homo sapien
ccaggatggtgtgctgcctcccatg

SEQ ID NO: 4396101 - DNA, 25 bp, Homo sapien
tagttgaccttggaagccaggatgg

SEQ ID NO: 4396102 - DNA, 25 bp, Homo sapien
ctggtagttgaccttggaagccagg

SEQ ID NO: 4396103 - DNA, 25 bp, Homo sapien
agccaggatggtgtgctgcctccca

SEQ ID NO: 4396104 - DNA, 25 bp, Homo sapien
cttcatggcagtggtggtggtgctt

SEQ ID NO: 4396105 - DNA, 25 bp, Homo sapien
cagtggtggtggtgcttgaggccat

SEQ ID NO: 4396106 - DNA, 25 bp, Homo sapien
atggcagtggtggtggtgcttgagg

SEQ ID NO: 4396107 - DNA, 25 bp, Homo sapien
ggcagtggtggtggtgcttgaggcc

SEQ ID NO: 4396108 - DNA, 25 bp, Homo sapien
aaggaagctgcagtgggcgagcact

SEQ ID NO: 4396109 - DNA, 25 bp, Homo sapien
agctgcagtgggcgagcactcggga

SEQ ID NO: 4396110 - DNA, 25 bp, Homo sapien
ggaagctgcagtgggcgagcactcg

SEQ ID NO: 4396111 - DNA, 25 bp, Homo sapien
aagctgcagtgggcgagcactcggg

SEQ ID NO: 4396112 - DNA, 25 bp, Homo sapien
tctctgtgaatatgaattctcctcc

SEQ ID NO: 4396113 - DNA, 25 bp, Homo sapien
catctctgtgaatatgaattctcct

SEQ ID NO: 4396114 - DNA, 25 bp, Homo sapien
tccatctctgtgaatatgaattctc

SEQ ID NO: 4396115 - DNA, 25 bp, Homo sapien
tctgtgaatatgaattctcctcctt

SEQ ID NO: 4396116 - DNA, 25 bp, Homo sapien
ctgccttggagatatgaacacgacg

SEQ ID NO: 4396117 - DNA, 25 bp, Homo sapien
ggttatggcagctacttcagaagat

SEQ ID NO: 4396118 - DNA, 25 bp, Homo sapien
ttgtgaaatgggatgcaaactgtgc

SEQ ID NO: 4396119 - DNA, 25 bp, Homo sapien
gaacacgacgtcaagcaaaacagag

SEQ ID NO: 4396120 - DNA, 25 bp, Homo sapien
cgttggcctctggatccaacaaaca

SEQ ID NO: 4396121 - DNA, 25 bp, Homo sapien
acaaacagttgtcagcatggatggg

SEQ ID NO: 4396122 - DNA, 25 bp, Homo sapien
tccttccagcattcgttggcctctg

SEQ ID NO: 4396123 - DNA, 25 bp, Homo sapien
tatagtctcgaaatgtgtaagcagg

SEQ ID NO: 4396124 - DNA, 25 bp, Homo sapien
gctgttcggcagaccatgtgtgtat

SEQ ID NO: 4396125 - DNA, 25 bp, Homo sapien
cagacgagcgctcttcagtgggact

SEQ ID NO: 4396126 - DNA, 25 bp, Homo sapien
gtgggactcgaccttcataaccaga

SEQ ID NO: 4396127 - DNA, 25 bp, Homo sapien
ccttcgagccttttcgctgatgtca

SEQ ID NO: 4396128 - DNA, 25 bp, Homo sapien
ggacagttgcaccttcaaacttttc

SEQ ID NO: 4396129 - DNA, 25 bp, Homo sapien
tcaaacttttcattgggtgtatggg

SEQ ID NO: 4396130 - DNA, 25 bp, Homo sapien
tgctttcaggacagttgcaccttca

SEQ ID NO: 4396131 - DNA, 25 bp, Homo sapien
tttgagtgctttcaggacagttgca

SEQ ID NO: 4396132 - DNA, 25 bp, Homo sapien
tagtcaatgctaagaaccatcccca

SEQ ID NO: 4396133 - DNA, 25 bp, Homo sapien
tgataactatgaattcatcaggtct

SEQ ID NO: 4396134 - DNA, 25 bp, Homo sapien
gcaaatacaagaagatacgtcatca

SEQ ID NO: 4396135 - DNA, 25 bp, Homo sapien
ctgagaactctagtcaatgctaaga

SEQ ID NO: 4396136 - DNA, 25 bp, Homo sapien
atgttctcatagagtagaggaccac

SEQ ID NO: 4396137 - DNA, 25 bp, Homo sapien
aggagaacccgctgagtcccgttca

SEQ ID NO: 4396138 - DNA, 25 bp, Homo sapien
tcttccgacaggacgttatccagga

SEQ ID NO: 4396139 - DNA, 25 bp, Homo sapien
gctgctccgagttgtagacgaatgt

SEQ ID NO: 4396140 - DNA, 25 bp, Homo sapien
agagcacattgtcttccctgttacc

SEQ ID NO: 4396141 - DNA, 25 bp, Homo sapien
gagcacattgtcttccctgttacct

SEQ ID NO: 4396142 - DNA, 25 bp, Homo sapien
cagagcacattgtcttccctgttac

SEQ ID NO: 4396143 - DNA, 25 bp, Homo sapien
caatgtgcaattcgagtgagtccat

SEQ ID NO: 4396144 - DNA, 25 bp, Homo sapien
aagcacagaataccaaacagctttc

SEQ ID NO: 4396145 - DNA, 25 bp, Homo sapien
gaagcacagaataccaaacagcttt

SEQ ID NO: 4396146 - DNA, 25 bp, Homo sapien
tttcaatgtgcaattcgagtgagtc

SEQ ID NO: 4396147 - DNA, 25 bp, Homo sapien
cagaagtaaaccataggaaattgct

SEQ ID NO: 4396148 - DNA, 25 bp, Homo sapien
taagcctccggtattctgagaatgg

SEQ ID NO: 4396149 - DNA, 25 bp, Homo sapien
tactgactgtgtaacagaagtaaac

SEQ ID NO: 4396150 - DNA, 25 bp, Homo sapien
attctgagaatggtgatgaccatgc

SEQ ID NO: 4396151 - DNA, 25 bp, Homo sapien
tccctctacgttcactcctgaaggg

SEQ ID NO: 4396152 - DNA, 25 bp, Homo sapien
cttctcttaggtctcgatctatctt

SEQ ID NO: 4396153 - DNA, 25 bp, Homo sapien
ctctacgttcactcctgaagggacc

SEQ ID NO: 4396154 - DNA, 25 bp, Homo sapien
tcgatctatcttgggtgatagcttt

SEQ ID NO: 4396155 - DNA, 25 bp, Homo sapien
gattctcatcctgtcgtcctccata

SEQ ID NO: 4396156 - DNA, 25 bp, Homo sapien
cgattctcatcctgtcgtcctccat

SEQ ID NO: 4396157 - DNA, 25 bp, Homo sapien
agctcagactccagcttatgacgtt

SEQ ID NO: 4396158 - DNA, 25 bp, Homo sapien
ctgattttatcagctcagactccag

SEQ ID NO: 4396159 - DNA, 25 bp, Homo sapien
gctcagactccagcttatgacgttt

SEQ ID NO: 4396160 - DNA, 25 bp, Homo sapien
gataggctttggcacactccagggc

SEQ ID NO: 4396161 - DNA, 25 bp, Homo sapien
ctggcctcaatggatgccgggtcaa

SEQ ID NO: 4396162 - DNA, 25 bp, Homo sapien
tccagggctttcacatactcaccaa

SEQ ID NO: 4396163 - DNA, 25 bp, Homo sapien
cagcagactctcatagtaatccaca

SEQ ID NO: 4396164 - DNA, 25 bp, Homo sapien
ctcgatagtaggcaaactgtaggta

SEQ ID NO: 4396165 - DNA, 25 bp, Homo sapien
gacaaacaagcacctgcatgtagtg

SEQ ID NO: 4396166 - DNA, 25 bp, Homo sapien
tgtaggtaatcatagtgcagaggaa

SEQ ID NO: 4396167 - DNA, 25 bp, Homo sapien
agggcgggtggcaagttccctcaca

SEQ ID NO: 4396168 - DNA, 25 bp, Homo sapien
ccaatacgtgtgttcctccaggttg

SEQ ID NO: 4396169 - DNA, 25 bp, Homo sapien
ctggaagacaagagccaatacgtgt

SEQ ID NO: 4396170 - DNA, 25 bp, Homo sapien
gagccaatacgtgtgttcctccagg

SEQ ID NO: 4396171 - DNA, 25 bp, Homo sapien
gacaagagccaatacgtgtgttcct

SEQ ID NO: 4396172 - DNA, 25 bp, Homo sapien
caagtgacaagcaaaaggtaaaggc

SEQ ID NO: 4396173 - DNA, 25 bp, Homo sapien
taaaggcgaaagatacccaccgaga

SEQ ID NO: 4396174 - DNA, 25 bp, Homo sapien
tttcaaagcggatacaaatagcagc

SEQ ID NO: 4396175 - DNA, 25 bp, Homo sapien
tcctttagggtttcatagcagagct

SEQ ID NO: 4396176 - DNA, 25 bp, Homo sapien
cctcacatagggtccggcattctgt

SEQ ID NO: 4396177 - DNA, 25 bp, Homo sapien
tgttcgaagtgcctgatagccatct

SEQ ID NO: 4396178 - DNA, 25 bp, Homo sapien
ccggcattctgtatcttcaacgaaa

SEQ ID NO: 4396179 - DNA, 25 bp, Homo sapien
tgcaatagcttcatacagaccagcc

SEQ ID NO: 4396180 - DNA, 25 bp, Homo sapien
cttctctgtctaccaactgcaatgc

SEQ ID NO: 4396181 - DNA, 25 bp, Homo sapien
tctaccaactgcaatgcttcaacac

SEQ ID NO: 4396182 - DNA, 25 bp, Homo sapien
agctgtcgccctgtaattctcaatg

SEQ ID NO: 4396183 - DNA, 25 bp, Homo sapien
tcaacaccagctgtcgccctgtaat

SEQ ID NO: 4396184 - DNA, 25 bp, Homo sapien
gtgctcagggttagccacgaaaaat

SEQ ID NO: 4396185 - DNA, 25 bp, Homo sapien
tgcttccactgctttttcgagctgg

SEQ ID NO: 4396186 - DNA, 25 bp, Homo sapien
gccacgaaaaatgtgtgagctgctt

SEQ ID NO: 4396187 - DNA, 25 bp, Homo sapien
ccactgctttttcgagctggttaag

SEQ ID NO: 4396188 - DNA, 25 bp, Homo sapien
aattagcaagaccattatgaaaaac

SEQ ID NO: 4396189 - DNA, 25 bp, Homo sapien
caggtgaagatacaacctacagaat

SEQ ID NO: 4396190 - DNA, 25 bp, Homo sapien
aagatatacaattggccaacaggtg

SEQ ID NO: 4396191 - DNA, 25 bp, Homo sapien
gctgaaaaaactctatagcaagaaa

SEQ ID NO: 4396192 - DNA, 25 bp, Homo sapien
acataaatgataagtgttttaggca

SEQ ID NO: 4396193 - DNA, 25 bp, Homo sapien
tatggaatctgaaacagttgatctc

SEQ ID NO: 4396194 - DNA, 25 bp, Homo sapien
tgcacagtaggataacaatagctaa

SEQ ID NO: 4396195 - DNA, 25 bp, Homo sapien
aagtagagtggaacggtgattgcca

SEQ ID NO: 4396196 - DNA, 25 bp, Homo sapien
caattctgtgcactcagaattattt

SEQ ID NO: 4396197 - DNA, 25 bp, Homo sapien
attctgtgcactcagaattattttg

SEQ ID NO: 4396198 - DNA, 25 bp, Homo sapien
tcaattctgtgcactcagaattatt

SEQ ID NO: 4396199 - DNA, 25 bp, Homo sapien
ttctgtgcactcagaattattttga

SEQ ID NO: 4396200 - DNA, 25 bp, Homo sapien
tataaggccaagcttaaatcctgcc

SEQ ID NO: 4396201 - DNA, 25 bp, Homo sapien
gaaatatgtcatgtcctataaggcc

SEQ ID NO: 4396202 - DNA, 25 bp, Homo sapien
tatgctttggctcaggatattccac

SEQ ID NO: 4396203 - DNA, 25 bp, Homo sapien
aattataaggcagtggtccccagtc

SEQ ID NO: 4396204 - DNA, 25 bp, Homo sapien
gcacagcgtaagtcagttgcctgtt

SEQ ID NO: 4396205 - DNA, 25 bp, Homo sapien
cctttctcttcgtctattttgccca

SEQ ID NO: 4396206 - DNA, 25 bp, Homo sapien
ttcctgcctcgattcctttctcttc

SEQ ID NO: 4396207 - DNA, 25 bp, Homo sapien
ctgcctcgattcctttctcttcgtc

SEQ ID NO: 4396208 - DNA, 25 bp, Homo sapien
tcctgcctcgattcctttctcttcg

SEQ ID NO: 4396209 - DNA, 25 bp, Homo sapien
atgtctggatgctcattatcgtttc

SEQ ID NO: 4396210 - DNA, 25 bp, Homo sapien
tggatgctgatgactgtccctttat

SEQ ID NO: 4396211 - DNA, 25 bp, Homo sapien
cgtttctattaccattaattttgca

SEQ ID NO: 4396212 - DNA, 25 bp, Homo sapien
gtctggatgctgatgactgtccctt

SEQ ID NO: 4396213 - DNA, 25 bp, Homo sapien
gggaggttctgttagtcagtttaca

SEQ ID NO: 4396214 - DNA, 25 bp, Homo sapien
aagatggcgctgagagtcacctccg

SEQ ID NO: 4396215 - DNA, 25 bp, Homo sapien
tgttgtgtcagagacgtttgaacca

SEQ ID NO: 4396216 - DNA, 25 bp, Homo sapien
taaccattatttctcgggcccttga

SEQ ID NO: 4396217 - DNA, 25 bp, Homo sapien
aaggatgatatgtttgtacttgggc

SEQ ID NO: 4396218 - DNA, 25 bp, Homo sapien
gatatgtttgtacttgggctacaca

SEQ ID NO: 4396219 - DNA, 25 bp, Homo sapien
gaaaaggatgatatgtttgtacttg

SEQ ID NO: 4396220 - DNA, 25 bp, Homo sapien
gatgatatgtttgtacttgggctac

SEQ ID NO: 4396221 - DNA, 25 bp, Homo sapien
ctggctggtctcacactcctgacct

SEQ ID NO: 4396222 - DNA, 25 bp, Homo sapien
agtgtttcaccgtattggtctggct

SEQ ID NO: 4396223 - DNA, 25 bp, Homo sapien
agacagtgtttcaccgtattggtct

SEQ ID NO: 4396224 - DNA, 25 bp, Homo sapien
cagtgtttcaccgtattggtctggc

SEQ ID NO: 4396225 - DNA, 25 bp, Homo sapien
gaaagactgaaattcacatcagtgc

SEQ ID NO: 4396226 - DNA, 25 bp, Homo sapien
gaagtcaaagattattatgtgggcc

SEQ ID NO: 4396227 - DNA, 25 bp, Homo sapien
atttcaagagtcaggcaatggccat

SEQ ID NO: 4396228 - DNA, 25 bp, Homo sapien
tcatttcgctgaataccaaaaagtg

SEQ ID NO: 4396229 - DNA, 25 bp, Homo sapien
tgaagctctaacttcagcgtggctg

SEQ ID NO: 4396230 - DNA, 25 bp, Homo sapien
tatggactgttcgtgtccacccaaa

SEQ ID NO: 4396231 - DNA, 25 bp, Homo sapien
taagctttctataacaattccatgg

SEQ ID NO: 4396232 - DNA, 25 bp, Homo sapien
tgtgtgtttacttgtactatggact

SEQ ID NO: 4396233 - DNA, 25 bp, Homo sapien
cagttccctacggtcatgagggcag

SEQ ID NO: 4396234 - DNA, 25 bp, Homo sapien
tattcccgagtactcaacacagggt

SEQ ID NO: 4396235 - DNA, 25 bp, Homo sapien
gatagagaccacaggcagttcccta

SEQ ID NO: 4396236 - DNA, 25 bp, Homo sapien
aacacagggtccacatagcaagggc

SEQ ID NO: 4396237 - DNA, 25 bp, Homo sapien
ctcagctgcagttaactgggatgcc

SEQ ID NO: 4396238 - DNA, 25 bp, Homo sapien
tctcagctgcagttaactgggatgc

SEQ ID NO: 4396239 - DNA, 25 bp, Homo sapien
ttctcagctgcagttaactgggatg

SEQ ID NO: 4396240 - DNA, 25 bp, Homo sapien
tcagctgcagttaactgggatgcct

SEQ ID NO: 4396241 - DNA, 25 bp, Homo sapien
tcccaagcctcaactgttcaagtag

SEQ ID NO: 4396242 - DNA, 25 bp, Homo sapien
cctttgcctagggaaagtcctcaga

SEQ ID NO: 4396243 - DNA, 25 bp, Homo sapien
gattagaaaagcacacgcagctgct

SEQ ID NO: 4396244 - DNA, 25 bp, Homo sapien
tacaaagaatatgcttcccaagcct

SEQ ID NO: 4396245 - DNA, 25 bp, Homo sapien
tggattcatttatagcagagaggac

SEQ ID NO: 4396246 - DNA, 25 bp, Homo sapien
gcgacctcattccaggataacttgg

SEQ ID NO: 4396247 - DNA, 25 bp, Homo sapien
tgtattacctacaaatcaacttgaa

SEQ ID NO: 4396248 - DNA, 25 bp, Homo sapien
aggactgatgaaacggctgccaacc

SEQ ID NO: 4396249 - DNA, 25 bp, Homo sapien
aatctcaaactagatcagacctact

SEQ ID NO: 4396250 - DNA, 25 bp, Homo sapien
tgcaaatctcaaactagatcagacc

SEQ ID NO: 4396251 - DNA, 25 bp, Homo sapien
ttagaaatgcaaatctcaaactaga

SEQ ID NO: 4396252 - DNA, 25 bp, Homo sapien
agaccagaagcaaagggaacttgtt

SEQ ID NO: 4396253 - DNA, 25 bp, Homo sapien
taaggcctaccatctaccagtgtta

SEQ ID NO: 4396254 - DNA, 25 bp, Homo sapien
taaccctgcgcaaaaggtcacagtg

SEQ ID NO: 4396255 - DNA, 25 bp, Homo sapien
taagtcccagggatgtatctgaacc

SEQ ID NO: 4396256 - DNA, 25 bp, Homo sapien
caaaagccagatttagttcagcgag

SEQ ID NO: 4396257 - DNA, 25 bp, Homo sapien
cagcattgtcatacaacactggagg

SEQ ID NO: 4396258 - DNA, 25 bp, Homo sapien
gaaaggtcactggttttagtcatgg

SEQ ID NO: 4396259 - DNA, 25 bp, Homo sapien
tccagccatagtgtcatggtgaaag

SEQ ID NO: 4396260 - DNA, 25 bp, Homo sapien
cagctgcaccgagaggtatcaaaag

SEQ ID NO: 4396261 - DNA, 25 bp, Homo sapien
gctttcctccaacgccagcatcact

SEQ ID NO: 4396262 - DNA, 25 bp, Homo sapien
actgctttcctccaacgccagcatc

SEQ ID NO: 4396263 - DNA, 25 bp, Homo sapien
ttcctccaacgccagcatcactcac

SEQ ID NO: 4396264 - DNA, 25 bp, Homo sapien
tgctttcctccaacgccagcatcac

SEQ ID NO: 4396265 - DNA, 25 bp, Homo sapien
aacacttgccaccaattcccacgaa

SEQ ID NO: 4396266 - DNA, 25 bp, Homo sapien
tccaacacttgccaccaattcccac

SEQ ID NO: 4396267 - DNA, 25 bp, Homo sapien
acttgccaccaattcccacgaatgc

SEQ ID NO: 4396268 - DNA, 25 bp, Homo sapien
acccctccaacacttgccaccaatt

SEQ ID NO: 4396269 - DNA, 25 bp, Homo sapien
gaagattccttctcgtcatctgaga

SEQ ID NO: 4396270 - DNA, 25 bp, Homo sapien
gaaagaaacactgcatgatggctag

SEQ ID NO: 4396271 - DNA, 25 bp, Homo sapien
ttttttagtatcctgcaagagccct

SEQ ID NO: 4396272 - DNA, 25 bp, Homo sapien
ccatatgaatgaagtgtgttacgct

SEQ ID NO: 4396273 - DNA, 25 bp, Homo sapien
gaatatccacacttgtaagtcgtgg

SEQ ID NO: 4396274 - DNA, 25 bp, Homo sapien
aactaaaactgtggcccatacatta

SEQ ID NO: 4396275 - DNA, 25 bp, Homo sapien
taagtcgtggacttaataggtgtcc

SEQ ID NO: 4396276 - DNA, 25 bp, Homo sapien
ggcccatacattacccactgcttta

SEQ ID NO: 4396277 - DNA, 25 bp, Homo sapien
ccttcctagggagtgagtcaacaaa

SEQ ID NO: 4396278 - DNA, 25 bp, Homo sapien
gctcagtaaatctcatcacggtatg

SEQ ID NO: 4396279 - DNA, 25 bp, Homo sapien
tgaagtcgacaggtttaagcaaggg

SEQ ID NO: 4396280 - DNA, 25 bp, Homo sapien
cacggtatgactcttctgaatctga

SEQ ID NO: 4396281 - DNA, 25 bp, Homo sapien
cctggcagcaggaagtaacaggaca

SEQ ID NO: 4396282 - DNA, 25 bp, Homo sapien
taaagcagcttccttaggtgcaaac

SEQ ID NO: 4396283 - DNA, 25 bp, Homo sapien
gaggctataagataagccttcttgt

SEQ ID NO: 4396284 - DNA, 25 bp, Homo sapien
taacaggacatatcagaggctataa

SEQ ID NO: 4396285 - DNA, 25 bp, Homo sapien
cataatacatgcaagtacaagttgt

SEQ ID NO: 4396286 - DNA, 25 bp, Homo sapien
caagaaaggttaagatgaatgggat

SEQ ID NO: 4396287 - DNA, 25 bp, Homo sapien
catccacaaatagcatgagttagat

SEQ ID NO: 4396288 - DNA, 25 bp, Homo sapien
tacaagttgtgtgcatcagcatctc

SEQ ID NO: 4396289 - DNA, 25 bp, Homo sapien
acttctctgtaagatttacagcatg

SEQ ID NO: 4396290 - DNA, 25 bp, Homo sapien
cagaacttctctgtaagatttacag

SEQ ID NO: 4396291 - DNA, 25 bp, Homo sapien
agaacttctctgtaagatttacagc

SEQ ID NO: 4396292 - DNA, 25 bp, Homo sapien
gaacttctctgtaagatttacagca

SEQ ID NO: 4396293 - DNA, 25 bp, Homo sapien
ttcttcttttcccagtcctcctcat

SEQ ID NO: 4396294 - DNA, 25 bp, Homo sapien
tttcttcttttcccagtcctcctca

SEQ ID NO: 4396295 - DNA, 25 bp, Homo sapien
ggacaccaactttcagagggccagt

SEQ ID NO: 4396296 - DNA, 25 bp, Homo sapien
aaagctgatggccagtaactgacca

SEQ ID NO: 4396297 - DNA, 25 bp, Homo sapien
ggtcacagttccatcaaagaggcaa

SEQ ID NO: 4396298 - DNA, 25 bp, Homo sapien
taatcaagagcacacggtccaagga

SEQ ID NO: 4396299 - DNA, 25 bp, Homo sapien
tgagcattttttctaaccccaactg

SEQ ID NO: 4396300 - DNA, 25 bp, Homo sapien
gctctggctgatagtcacactcaga

SEQ ID NO: 4396301 - DNA, 25 bp, Homo sapien
cagatactctgagcaaacccttggc

SEQ ID NO: 4396302 - DNA, 25 bp, Homo sapien
cccaactgtagatggtgtctgtaaa

SEQ ID NO: 4396303 - DNA, 25 bp, Homo sapien
aatggccttagcttgtggccgggca

SEQ ID NO: 4396304 - DNA, 25 bp, Homo sapien
acatggttaaaacaatggccttagc

SEQ ID NO: 4396305 - DNA, 25 bp, Homo sapien
gagacatcaaacttaaggcattcag

SEQ ID NO: 4396306 - DNA, 25 bp, Homo sapien
cagctgtacatgctaaacatggtta

SEQ ID NO: 4396307 - DNA, 25 bp, Homo sapien
gttatttgtgctaggaacactacca

SEQ ID NO: 4396308 - DNA, 25 bp, Homo sapien
cattgaccttagcttgaggcgaacc

SEQ ID NO: 4396309 - DNA, 25 bp, Homo sapien
gggatagcctccaactcaaacattt

SEQ ID NO: 4396310 - DNA, 25 bp, Homo sapien
ggcgaacctggatgcaagtcctgag

SEQ ID NO: 4396311 - DNA, 25 bp, Homo sapien
caagaagacatatggtctgaaaaat

SEQ ID NO: 4396312 - DNA, 25 bp, Homo sapien
tgcaaaacatcttattttacgggaa

SEQ ID NO: 4396313 - DNA, 25 bp, Homo sapien
aagacatatggtctgaaaaatgcaa

SEQ ID NO: 4396314 - DNA, 25 bp, Homo sapien
agaagacatatggtctgaaaaatgc

SEQ ID NO: 4396315 - DNA, 25 bp, Homo sapien
tacactatgccaaaacctcttcaac

SEQ ID NO: 4396316 - DNA, 25 bp, Homo sapien
cctttacactatgccaaaacctctt

SEQ ID NO: 4396317 - DNA, 25 bp, Homo sapien
cttcctttacactatgccaaaacct

SEQ ID NO: 4396318 - DNA, 25 bp, Homo sapien
tttacactatgccaaaacctcttca

SEQ ID NO: 4396319 - DNA, 25 bp, Homo sapien
tgactcatgtctcaaagacaaattg

SEQ ID NO: 4396320 - DNA, 25 bp, Homo sapien
gacaggcatatctaagaattttata

SEQ ID NO: 4396321 - DNA, 25 bp, Homo sapien
attataacacttttagaagttgctc

SEQ ID NO: 4396322 - DNA, 25 bp, Homo sapien
acctatacacaggaacttgaagctg

SEQ ID NO: 4396323 - DNA, 25 bp, Homo sapien
tatatatatatggattatcacctca

SEQ ID NO: 4396324 - DNA, 25 bp, Homo sapien
tgttaagcaatgaacctatatctac

SEQ ID NO: 4396325 - DNA, 25 bp, Homo sapien
gattatcacctcaaaatgttaagca

SEQ ID NO: 4396326 - DNA, 25 bp, Homo sapien
tacaccaagaagagttatacaatgt

SEQ ID NO: 4396327 - DNA, 25 bp, Homo sapien
gtttccatcacgtgcaagactcaaa

SEQ ID NO: 4396328 - DNA, 25 bp, Homo sapien
gacaaacctatgtcctaggagaact

SEQ ID NO: 4396329 - DNA, 25 bp, Homo sapien
ctatcttattgggaaagtggaccag

SEQ ID NO: 4396330 - DNA, 25 bp, Homo sapien
taatctgggacaatgggttacagga

SEQ ID NO: 4396331 - DNA, 25 bp, Homo sapien
aagggattcactgccccaagatgag

SEQ ID NO: 4396332 - DNA, 25 bp, Homo sapien
tttatagggagtaggctggcaacca

SEQ ID NO: 4396333 - DNA, 25 bp, Homo sapien
tagggcttcctattagatctcagaa

SEQ ID NO: 4396334 - DNA, 25 bp, Homo sapien
cataaagatcaggaacaatcgcctc

SEQ ID NO: 4396335 - DNA, 25 bp, Homo sapien
gtgcatttcaggatggccagcaaca

SEQ ID NO: 4396336 - DNA, 25 bp, Homo sapien
cagtcctggcctttacctgttatat

SEQ ID NO: 4396337 - DNA, 25 bp, Homo sapien
actcccctccaagcagtgataacaa

SEQ ID NO: 4396338 - DNA, 25 bp, Homo sapien
ccattatattacacaggcagtcttg

SEQ ID NO: 4396339 - DNA, 25 bp, Homo sapien
tacacgtggaatttctagccagagg

SEQ ID NO: 4396340 - DNA, 25 bp, Homo sapien
tacataatcacataggagtgcctct

SEQ ID NO: 4396341 - DNA, 25 bp, Homo sapien
gccaggtgtggccaatctatgccca

SEQ ID NO: 4396342 - DNA, 25 bp, Homo sapien
ggccttacggcaatacggagtggaa

SEQ ID NO: 4396343 - DNA, 25 bp, Homo sapien
gagttactgtagctatggagaacca

SEQ ID NO: 4396344 - DNA, 25 bp, Homo sapien
cccaaagaaaacgtacaggttgcag

SEQ ID NO: 4396345 - DNA, 25 bp, Homo sapien
gatgtgacacagagctaacccaaag

SEQ ID NO: 4396346 - DNA, 25 bp, Homo sapien
tgcttcctaagaatagatgtgacac

SEQ ID NO: 4396347 - DNA, 25 bp, Homo sapien
acaacaaagaattattcatcccaga

SEQ ID NO: 4396348 - DNA, 25 bp, Homo sapien
caacaaagaattattcatcccagaa

SEQ ID NO: 4396349 - DNA, 25 bp, Homo sapien
ttgacagcctcaatgtcacaatcac

SEQ ID NO: 4396350 - DNA, 25 bp, Homo sapien
caatattcttgacagcctcaatgtc

SEQ ID NO: 4396351 - DNA, 25 bp, Homo sapien
attcttgacagcctcaatgtcacaa

SEQ ID NO: 4396352 - DNA, 25 bp, Homo sapien
acaatattcttgacagcctcaatgt

SEQ ID NO: 4396353 - DNA, 25 bp, Homo sapien
gaaccaagaaattgaactcattggg

SEQ ID NO: 4396354 - DNA, 25 bp, Homo sapien
tgacactgagcaaacctctttacct

SEQ ID NO: 4396355 - DNA, 25 bp, Homo sapien
tttggtatgccactaaatatgtgac

SEQ ID NO: 4396356 - DNA, 25 bp, Homo sapien
gaagaatccagactcctgactccca

SEQ ID NO: 4396357 - DNA, 25 bp, Homo sapien
tgaacacacgaagccacggatcttt

SEQ ID NO: 4396358 - DNA, 25 bp, Homo sapien
ttcatcagacaacacccagtaattc

SEQ ID NO: 4396359 - DNA, 25 bp, Homo sapien
acttacagagtgtgacttgttcctg

SEQ ID NO: 4396360 - DNA, 25 bp, Homo sapien
tcataagtgaaattccaaggaagcc

SEQ ID NO: 4396361 - DNA, 25 bp, Homo sapien
ttatgataacttcaccgtcagacac

SEQ ID NO: 4396362 - DNA, 25 bp, Homo sapien
agacactcaaggtcccctctctgcc

SEQ ID NO: 4396363 - DNA, 25 bp, Homo sapien
tcagacactcaaggtcccctctctg

SEQ ID NO: 4396364 - DNA, 25 bp, Homo sapien
taacttcaccgtcagacactcaagg

SEQ ID NO: 4396365 - DNA, 25 bp, Homo sapien
tgctgaagcatccagagagatcttc

SEQ ID NO: 4396366 - DNA, 25 bp, Homo sapien
gatcttcaaagttatggatgtgaac

SEQ ID NO: 4396367 - DNA, 25 bp, Homo sapien
cagtggaggttgaagaactcattca

SEQ ID NO: 4396368 - DNA, 25 bp, Homo sapien
tacctcctgacgctaactttaggca

SEQ ID NO: 4396369 - DNA, 25 bp, Homo sapien
aggtagttgtagggcactctgcgct

SEQ ID NO: 4396370 - DNA, 25 bp, Homo sapien
tctgcgctggaagtcgctgcgcaca

SEQ ID NO: 4396371 - DNA, 25 bp, Homo sapien
tgcgcacatcctcgctgacgcggtg

SEQ ID NO: 4396372 - DNA, 25 bp, Homo sapien
tcgctgacgcggtggcgggatgcgg

SEQ ID NO: 4396373 - DNA, 25 bp, Homo sapien
ataacagcgcgcccgccccaacaag

SEQ ID NO: 4396374 - DNA, 25 bp, Homo sapien
ctgcgataacagcgcgcccgcccca

SEQ ID NO: 4396375 - DNA, 25 bp, Homo sapien
ccaacaaggagcggaaaaggggcag

SEQ ID NO: 4396376 - DNA, 25 bp, Homo sapien
cgataacagcgcgcccgccccaaca

SEQ ID NO: 4396377 - DNA, 25 bp, Homo sapien
ggcacagcgcgtgcggatttcccgc

SEQ ID NO: 4396378 - DNA, 25 bp, Homo sapien
cgcgtgcggatttcccgcaggcgcc

SEQ ID NO: 4396379 - DNA, 25 bp, Homo sapien
cagcgcgtgcggatttcccgcaggc

SEQ ID NO: 4396380 - DNA, 25 bp, Homo sapien
cacagcgcgtgcggatttcccgcag

SEQ ID NO: 4396381 - DNA, 25 bp, Homo sapien
tccgctgtagtaggcggccgcgccg

SEQ ID NO: 4396382 - DNA, 25 bp, Homo sapien
ctggcgtagagcaggtcgaagggct

SEQ ID NO: 4396383 - DNA, 25 bp, Homo sapien
cgcgccgctggcgtagagcaggtcg

SEQ ID NO: 4396384 - DNA, 25 bp, Homo sapien
cgctcgctcgtagtctccgctgtag

SEQ ID NO: 4396385 - DNA, 25 bp, Homo sapien
gggccgccccacagtggcggcggca

SEQ ID NO: 4396386 - DNA, 25 bp, Homo sapien
gcggcgcccagatgcgctcccgcat

SEQ ID NO: 4396387 - DNA, 25 bp, Homo sapien
ccgccccacagtggcggcggcagta

SEQ ID NO: 4396388 - DNA, 25 bp, Homo sapien
agcggcggcgcccagatgcgctccc

SEQ ID NO: 4396389 - DNA, 25 bp, Homo sapien
cggttacgctcgagagggcttcggg

SEQ ID NO: 4396390 - DNA, 25 bp, Homo sapien
agggcttcggggcacctcgcgtccg

SEQ ID NO: 4396391 - DNA, 25 bp, Homo sapien
agagaggcgcgggacggttacgctc

SEQ ID NO: 4396392 - DNA, 25 bp, Homo sapien
tccgcctcagagaggcgcgggacgg

SEQ ID NO: 4396393 - DNA, 25 bp, Homo sapien
cgagccccaggtgaccgccggcgct

SEQ ID NO: 4396394 - DNA, 25 bp, Homo sapien
cgactccgccgcgatctggccgctc

SEQ ID NO: 4396395 - DNA, 25 bp, Homo sapien
cttccctcggggaagcgcgccgact

SEQ ID NO: 4396396 - DNA, 25 bp, Homo sapien
gatctggccgctccgcgagccccag

SEQ ID NO: 4396397 - DNA, 25 bp, Homo sapien
ctgagaggcggaggccgtgcctggc

SEQ ID NO: 4396398 - DNA, 25 bp, Homo sapien
agcgccagccagagagctagcgccg

SEQ ID NO: 4396399 - DNA, 25 bp, Homo sapien
gcctgagactccgagagccgctctc

SEQ ID NO: 4396400 - DNA, 25 bp, Homo sapien
ctgcctgagactccgagagccgctc

SEQ ID NO: 4396401 - DNA, 25 bp, Homo sapien
tgccaggggcggcacactccagcgc

SEQ ID NO: 4396402 - DNA, 25 bp, Homo sapien
gaggcgctttacacgtgagctccct

SEQ ID NO: 4396403 - DNA, 25 bp, Homo sapien
acgaggcgctttacacgtgagctcc

SEQ ID NO: 4396404 - DNA, 25 bp, Homo sapien
ggacgaggcgctttacacgtgagct

SEQ ID NO: 4396405 - DNA, 25 bp, Homo sapien
cttgaggccggccggggacgaggcg

SEQ ID NO: 4396406 - DNA, 25 bp, Homo sapien
ggatgtgtgtccgggcattggatca

SEQ ID NO: 4396407 - DNA, 25 bp, Homo sapien
cttttcgtccaacttggtgtggatg

SEQ ID NO: 4396408 - DNA, 25 bp, Homo sapien
ttttcgtccaacttggtgtggatgt

SEQ ID NO: 4396409 - DNA, 25 bp, Homo sapien
tgtgtgtccgggcattggatcaggg

SEQ ID NO: 4396410 - DNA, 25 bp, Homo sapien
tcacatttcagaagcatccctgttg

SEQ ID NO: 4396411 - DNA, 25 bp, Homo sapien
tgtagttccaggaggctttgtccca

SEQ ID NO: 4396412 - DNA, 25 bp, Homo sapien
acatttcagaagcatccctgttgca

SEQ ID NO: 4396413 - DNA, 25 bp, Homo sapien
gtagttccaggaggctttgtcccat

SEQ ID NO: 4396414 - DNA, 25 bp, Homo sapien
cacatctacgttatgcgtcatgtaa

SEQ ID NO: 4396415 - DNA, 25 bp, Homo sapien
catttccccacatctacgttatgcg

SEQ ID NO: 4396416 - DNA, 25 bp, Homo sapien
acgttatgcgtcatgtaacctgtgg

SEQ ID NO: 4396417 - DNA, 25 bp, Homo sapien
tccccacatctacgttatgcgtcat

SEQ ID NO: 4396418 - DNA, 25 bp, Homo sapien
gatgtatcagctaattgtttccctg

SEQ ID NO: 4396419 - DNA, 25 bp, Homo sapien
tggaaactataatgtcctgtccaag

SEQ ID NO: 4396420 - DNA, 25 bp, Homo sapien
ctaattgtttccctggtggagtctg

SEQ ID NO: 4396421 - DNA, 25 bp, Homo sapien
taccagacaaaatcctgggcctgat

SEQ ID NO: 4396422 - DNA, 25 bp, Homo sapien
ggtactaagtcggttctattgaaca

SEQ ID NO: 4396423 - DNA, 25 bp, Homo sapien
gatgcagatcatcaatggtcgcctt

SEQ ID NO: 4396424 - DNA, 25 bp, Homo sapien
taaggaattagcagctggccaaggt

SEQ ID NO: 4396425 - DNA, 25 bp, Homo sapien
cagacactgcgggtttatatgatgc

SEQ ID NO: 4396426 - DNA, 25 bp, Homo sapien
catgagtttgtccattcccctctct

SEQ ID NO: 4396427 - DNA, 25 bp, Homo sapien
gagtttgtccattcccctctctttg

SEQ ID NO: 4396428 - DNA, 25 bp, Homo sapien
tgagtttgtccattcccctctcttt

SEQ ID NO: 4396429 - DNA, 25 bp, Homo sapien
agtttgtccattcccctctctttgc

SEQ ID NO: 4396430 - DNA, 25 bp, Homo sapien
gactgtgatcccttgctatacatca

SEQ ID NO: 4396431 - DNA, 25 bp, Homo sapien
tcatcttgtacttaatccagtatga

SEQ ID NO: 4396432 - DNA, 25 bp, Homo sapien
cagtatgactgtgatcccttgctat

SEQ ID NO: 4396433 - DNA, 25 bp, Homo sapien
aatccagtatgactgtgatcccttg

SEQ ID NO: 4396434 - DNA, 25 bp, Homo sapien
ataattgcatgttattctttgacag

SEQ ID NO: 4396435 - DNA, 25 bp, Homo sapien
aattgcatgttattctttgacaggg

SEQ ID NO: 4396436 - DNA, 25 bp, Homo sapien
tgacaggggtcatggtaatcatctc

SEQ ID NO: 4396437 - DNA, 25 bp, Homo sapien
tctttgacaggggtcatggtaatca

SEQ ID NO: 4396438 - DNA, 25 bp, Homo sapien
gggctctgtcagaacatatggttga

SEQ ID NO: 4396439 - DNA, 25 bp, Homo sapien
aatagacgcaaagatctgaagtgcc

SEQ ID NO: 4396440 - DNA, 25 bp, Homo sapien
gccagctgtagcagtcagtgagcag

SEQ ID NO: 4396441 - DNA, 25 bp, Homo sapien
tgtctcctagaacccatgcaatgca

SEQ ID NO: 4396442 - DNA, 25 bp, Homo sapien
tgctccagcatccttctatgggtaa

SEQ ID NO: 4396443 - DNA, 25 bp, Homo sapien
tgtcccttgcagagcgctcctgaca

SEQ ID NO: 4396444 - DNA, 25 bp, Homo sapien
acttcactgactatgactaggtgca

SEQ ID NO: 4396445 - DNA, 25 bp, Homo sapien
gactatgactaggtgcatatgccaa

SEQ ID NO: 4396446 - DNA, 25 bp, Homo sapien
gtcctcctttcatcagctcatctct

SEQ ID NO: 4396447 - DNA, 25 bp, Homo sapien
aaattgtcctcctttcatcagctca

SEQ ID NO: 4396448 - DNA, 25 bp, Homo sapien
gtttccataaattgtcctcctttca

SEQ ID NO: 4396449 - DNA, 25 bp, Homo sapien
cattttcgtttccataaattgtcct

SEQ ID NO: 4396450 - DNA, 25 bp, Homo sapien
tatttgttaactatagcccgtaggc

SEQ ID NO: 4396451 - DNA, 25 bp, Homo sapien
tgtatggccgacaaactaagaatga

SEQ ID NO: 4396452 - DNA, 25 bp, Homo sapien
tatttcgaagaacgatacaagcgac

SEQ ID NO: 4396453 - DNA, 25 bp, Homo sapien
taaacaagaactccccatgggctgg

SEQ ID NO: 4396454 - DNA, 25 bp, Homo sapien
aactaactatcctagcagcgtcagc

SEQ ID NO: 4396455 - DNA, 25 bp, Homo sapien
caattcctcataagacacagtggct

SEQ ID NO: 4396456 - DNA, 25 bp, Homo sapien
tcagctgccagctaacagcaagagc

SEQ ID NO: 4396457 - DNA, 25 bp, Homo sapien
cactgaacagatagcaccttatgag

SEQ ID NO: 4396458 - DNA, 25 bp, Homo sapien
catcacttgagagactggttaaggc

SEQ ID NO: 4396459 - DNA, 25 bp, Homo sapien
cagaatcttatttgtttagtgcact

SEQ ID NO: 4396460 - DNA, 25 bp, Homo sapien
ccatactcactgcagaagataagac

SEQ ID NO: 4396461 - DNA, 25 bp, Homo sapien
cacagaaagcatcgggccatactca

SEQ ID NO: 4396462 - DNA, 25 bp, Homo sapien
cagcatgcagctactcaattggaca

SEQ ID NO: 4396463 - DNA, 25 bp, Homo sapien
cacagacggtgattgatagcaccaa

SEQ ID NO: 4396464 - DNA, 25 bp, Homo sapien
tcttgtggcaaaggcacccaaagct

SEQ ID NO: 4396465 - DNA, 25 bp, Homo sapien
gatcaggaattacaaaccaccgctt

SEQ ID NO: 4396466 - DNA, 25 bp, Homo sapien
tccctcctatattgaggaaagaaga

SEQ ID NO: 4396467 - DNA, 25 bp, Homo sapien
gatagtatctcaatgtccattttcg

SEQ ID NO: 4396468 - DNA, 25 bp, Homo sapien
gattaagccatgtttagcactgagt

SEQ ID NO: 4396469 - DNA, 25 bp, Homo sapien
tactcaatgggaagcagtaatacaa

SEQ ID NO: 4396470 - DNA, 25 bp, Homo sapien
gaaggtgcaggttttggatagggcc

SEQ ID NO: 4396471 - DNA, 25 bp, Homo sapien
tctttcccgctggaaggtgcaggtt

SEQ ID NO: 4396472 - DNA, 25 bp, Homo sapien
tagtctttcccgctggaaggtgcag

SEQ ID NO: 4396473 - DNA, 25 bp, Homo sapien
gatagggccttggtgttgggtaaga

SEQ ID NO: 4396474 - DNA, 25 bp, Homo sapien
gtgaagagagcctgaccaaattcgt

SEQ ID NO: 4396475 - DNA, 25 bp, Homo sapien
agccagtgaagagagcctgaccaaa

SEQ ID NO: 4396476 - DNA, 25 bp, Homo sapien
ccagtgaagagagcctgaccaaatt

SEQ ID NO: 4396477 - DNA, 25 bp, Homo sapien
gaagagagcctgaccaaattcgtac

SEQ ID NO: 4396478 - DNA, 25 bp, Homo sapien
tgactggggtcatagggtcatagaa

SEQ ID NO: 4396479 - DNA, 25 bp, Homo sapien
ttgaacgattctattgccataccat

SEQ ID NO: 4396480 - DNA, 25 bp, Homo sapien
gggtcatagggtcatagaattcttg

SEQ ID NO: 4396481 - DNA, 25 bp, Homo sapien
tattgccataccatgctgtggcaac

SEQ ID NO: 4396482 - DNA, 25 bp, Homo sapien
tcctaagagaagtccctgaaactgg

SEQ ID NO: 4396483 - DNA, 25 bp, Homo sapien
cacatgtgggagttacaagaaggca

SEQ ID NO: 4396484 - DNA, 25 bp, Homo sapien
catacacttcatgccacgatggcca

SEQ ID NO: 4396485 - DNA, 25 bp, Homo sapien
gatggccacaaagattactattcgc

SEQ ID NO: 4396486 - DNA, 25 bp, Homo sapien
aacggtggccacaaagattgctatc

SEQ ID NO: 4396487 - DNA, 25 bp, Homo sapien
aagcacttcatacacttcatgccaa

SEQ ID NO: 4396488 - DNA, 25 bp, Homo sapien
caagaagaaatatcgcacccccaat

SEQ ID NO: 4396489 - DNA, 25 bp, Homo sapien
gctatcactcccaggaggatgccaa

SEQ ID NO: 4396490 - DNA, 25 bp, Homo sapien
caaggcacgggttgcttgcaatgtg

SEQ ID NO: 4396491 - DNA, 25 bp, Homo sapien
aaggcacgggttgcttgcaatgtgc

SEQ ID NO: 4396492 - DNA, 25 bp, Homo sapien
acctttgagatgttaccttgggaca

SEQ ID NO: 4396493 - DNA, 25 bp, Homo sapien
catactgatgtttccgctggtaacc

SEQ ID NO: 4396494 - DNA, 25 bp, Homo sapien
tggactaggaatctagagaccccag

SEQ ID NO: 4396495 - DNA, 25 bp, Homo sapien
taagcagtatttgtatctccagtga

SEQ ID NO: 4396496 - DNA, 25 bp, Homo sapien
gaagaggaaagtaccaagggctcca

SEQ ID NO: 4396497 - DNA, 25 bp, Homo sapien
tgacctcctcataagcatgtatggg

SEQ ID NO: 4396498 - DNA, 25 bp, Homo sapien
cttggaatcacaagccatactgtgg

SEQ ID NO: 4396499 - DNA, 25 bp, Homo sapien
catgttccacggaccacaggtttac

SEQ ID NO: 4396500 - DNA, 25 bp, Homo sapien
gagtcggactgtgtaaaacccctga

SEQ ID NO: 4396501 - DNA, 25 bp, Homo sapien
caagagaagtctaactgggcatcaa

SEQ ID NO: 4396502 - DNA, 25 bp, Homo sapien
tgggcatcaatctcatgagtcggac

SEQ ID NO: 4396503 - DNA, 25 bp, Homo sapien
tgtgcataaactactccagggccct

SEQ ID NO: 4396504 - DNA, 25 bp, Homo sapien
agaagacttgatcaactgaagactg

SEQ ID NO: 4396505 - DNA, 25 bp, Homo sapien
ttccttatgacagagcacatgatca

SEQ ID NO: 4396506 - DNA, 25 bp, Homo sapien
ccttatgacagagcacatgatcaga

SEQ ID NO: 4396507 - DNA, 25 bp, Homo sapien
gacttgatcaactgaagactgataa

SEQ ID NO: 4396508 - DNA, 25 bp, Homo sapien
ctctggacggccgctgtgaggtggg

SEQ ID NO: 4396509 - DNA, 25 bp, Homo sapien
acaacagaatgagcccataagggag

SEQ ID NO: 4396510 - DNA, 25 bp, Homo sapien
agaatgagcccataagggagctgca

SEQ ID NO: 4396511 - DNA, 25 bp, Homo sapien
tcacacaacagaatgagcccataag

SEQ ID NO: 4396512 - DNA, 25 bp, Homo sapien
gctcagattcagcaaggagtcaaag

SEQ ID NO: 4396513 - DNA, 25 bp, Homo sapien
aagactttgcactggatctgcccgg

SEQ ID NO: 4396514 - DNA, 25 bp, Homo sapien
ccaggaaggcgagaatgaagcccaa

SEQ ID NO: 4396515 - DNA, 25 bp, Homo sapien
tgtcgccggcataggagtaaatcct

SEQ ID NO: 4396516 - DNA, 25 bp, Homo sapien
tcccaggctcgggaactgagacgca

SEQ ID NO: 4396517 - DNA, 25 bp, Homo sapien
gagtctggatactagaagctgcggt

SEQ ID NO: 4396518 - DNA, 25 bp, Homo sapien
tagaagctgcggttgctcccaggct

SEQ ID NO: 4396519 - DNA, 25 bp, Homo sapien
tttgcaggtgggcaacccggactcc

SEQ ID NO: 4396520 - DNA, 25 bp, Homo sapien
ttttggctcggatggatactaccag

SEQ ID NO: 4396521 - DNA, 25 bp, Homo sapien
tagctggcaagagcttctaggggca

SEQ ID NO: 4396522 - DNA, 25 bp, Homo sapien
gctcggatggatactaccagataaa

SEQ ID NO: 4396523 - DNA, 25 bp, Homo sapien
gatactaccagataaaaggtctttc

SEQ ID NO: 4396524 - DNA, 25 bp, Homo sapien
taaacaagattaacattccaggtca

SEQ ID NO: 4396525 - DNA, 25 bp, Homo sapien
gaaatcaaagtagctatggttgcga

SEQ ID NO: 4396526 - DNA, 25 bp, Homo sapien
tatattggaatagctcagaaacaga

SEQ ID NO: 4396527 - DNA, 25 bp, Homo sapien
tctcaggcagagctaatcaggttag

SEQ ID NO: 4396528 - DNA, 25 bp, Homo sapien
tcactgatctaatgctgccatgaga

SEQ ID NO: 4396529 - DNA, 25 bp, Homo sapien
atgatttgcaaaccgaatgtattcg

SEQ ID NO: 4396530 - DNA, 25 bp, Homo sapien
tcgtttaggtatccaaacttaatca

SEQ ID NO: 4396531 - DNA, 25 bp, Homo sapien
taaggcatttctctgcccataaaga

SEQ ID NO: 4396532 - DNA, 25 bp, Homo sapien
ggccatcgaagcaggtctcatgaaa

SEQ ID NO: 4396533 - DNA, 25 bp, Homo sapien
gctcagggcttgttagaggactaaa

SEQ ID NO: 4396534 - DNA, 25 bp, Homo sapien
gattacttcctatcagggccatcga

SEQ ID NO: 4396535 - DNA, 25 bp, Homo sapien
gaatgatgctactcctactagaaga

SEQ ID NO: 4396536 - DNA, 25 bp, Homo sapien
caacttccgctctcaggtttaagct

SEQ ID NO: 4396537 - DNA, 25 bp, Homo sapien
tgcagcttgcatagtctcagttgac

SEQ ID NO: 4396538 - DNA, 25 bp, Homo sapien
ttattatacactccctacatgagcc

SEQ ID NO: 4396539 - DNA, 25 bp, Homo sapien
cactgttagcatcaagatcaagaaa

SEQ ID NO: 4396540 - DNA, 25 bp, Homo sapien
caatgaaaatggttcacactttggg

SEQ ID NO: 4396541 - DNA, 25 bp, Homo sapien
gcttttatttgcatcagggcttggg

SEQ ID NO: 4396542 - DNA, 25 bp, Homo sapien
taaagactttatcaacatagccaca

SEQ ID NO: 4396543 - DNA, 25 bp, Homo sapien
ggttgatgtcatgcctaagtactgt

SEQ ID NO: 4396544 - DNA, 25 bp, Homo sapien
catgggaacagatacctatgccgaa

SEQ ID NO: 4396545 - DNA, 25 bp, Homo sapien
aacactatggactatggaggccaca

SEQ ID NO: 4396546 - DNA, 25 bp, Homo sapien
catgttggattctcggcttgggcta

SEQ ID NO: 4396547 - DNA, 25 bp, Homo sapien
tgtgctgtatactgcagtggagtcc

SEQ ID NO: 4396548 - DNA, 25 bp, Homo sapien
gtttttacaatttcttcatatggag

SEQ ID NO: 4396549 - DNA, 25 bp, Homo sapien
agcaggaacaggatataggtcaggg

SEQ ID NO: 4396550 - DNA, 25 bp, Homo sapien
gagtttgaaggtgaattccaacagt

SEQ ID NO: 4396551 - DNA, 25 bp, Homo sapien
cctaaagggccaaaacatggagcag

SEQ ID NO: 4396552 - DNA, 25 bp, Homo sapien
agaaagatgaagacttgtaatcttt

SEQ ID NO: 4396553 - DNA, 25 bp, Homo sapien
tcaggcaagttcaagagcacatatg

SEQ ID NO: 4396554 - DNA, 25 bp, Homo sapien
ttcaagatagtcgaggaaaaggtct

SEQ ID NO: 4396555 - DNA, 25 bp, Homo sapien
taaagaagggtataaccatggcaca

SEQ ID NO: 4396556 - DNA, 25 bp, Homo sapien
gtctattgcccgtcactcagtgcta

SEQ ID NO: 4396557 - DNA, 25 bp, Homo sapien
cataaatagagtccaagtctccaac

SEQ ID NO: 4396558 - DNA, 25 bp, Homo sapien
agtctccaacagcaaaaactgccat

SEQ ID NO: 4396559 - DNA, 25 bp, Homo sapien
ccaagtctccaacagcaaaaactgc

SEQ ID NO: 4396560 - DNA, 25 bp, Homo sapien
atagagtccaagtctccaacagcaa

SEQ ID NO: 4396561 - DNA, 25 bp, Homo sapien
tgagaatcaattcggggtctcctca

SEQ ID NO: 4396562 - DNA, 25 bp, Homo sapien
tgtgagaatcaattcggggtctcct

SEQ ID NO: 4396563 - DNA, 25 bp, Homo sapien
caattcggggtctcctcagccagca

SEQ ID NO: 4396564 - DNA, 25 bp, Homo sapien
aatcaattcggggtctcctcagcca

SEQ ID NO: 4396565 - DNA, 25 bp, Homo sapien
cattagggtgttggtcattataatt

SEQ ID NO: 4396566 - DNA, 25 bp, Homo sapien
attagggtgttggtcattataattt

SEQ ID NO: 4396567 - DNA, 25 bp, Homo sapien
cagatataccagccattagggtgtt

SEQ ID NO: 4396568 - DNA, 25 bp, Homo sapien
gatataccagccattagggtgttgg

SEQ ID NO: 4396569 - DNA, 25 bp, Homo sapien
tcatcttcttcgcatggtaggtccg

SEQ ID NO: 4396570 - DNA, 25 bp, Homo sapien
tcttcttcgcatggtaggtccgaga

SEQ ID NO: 4396571 - DNA, 25 bp, Homo sapien
cgcatggtaggtccgagagcaccaa

SEQ ID NO: 4396572 - DNA, 25 bp, Homo sapien
tcttcgcatggtaggtccgagagca

SEQ ID NO: 4396573 - DNA, 25 bp, Homo sapien
ctggaatagcggcaaacacaagatc

SEQ ID NO: 4396574 - DNA, 25 bp, Homo sapien
cactgaaaagtctggatcttgacat

SEQ ID NO: 4396575 - DNA, 25 bp, Homo sapien
caaacacaagatccctatcgttgag

SEQ ID NO: 4396576 - DNA, 25 bp, Homo sapien
tatcgttgagatcgctgaggtgaca

SEQ ID NO: 4396577 - DNA, 25 bp, Homo sapien
ttaaaggacagtcaacttaggatag

SEQ ID NO: 4396578 - DNA, 25 bp, Homo sapien
caacttaggatagtggtttggtgcc

SEQ ID NO: 4396579 - DNA, 25 bp, Homo sapien
cagtcaacttaggatagtggtttgg

SEQ ID NO: 4396580 - DNA, 25 bp, Homo sapien
aaggacagtcaacttaggatagtgg

SEQ ID NO: 4396581 - DNA, 25 bp, Homo sapien
ttagtatgcagccacggtcgcagcc

SEQ ID NO: 4396582 - DNA, 25 bp, Homo sapien
ccagatacgctccattttgagtgtc

SEQ ID NO: 4396583 - DNA, 25 bp, Homo sapien
cacggtcgcagccatgaatttcaaa

SEQ ID NO: 4396584 - DNA, 25 bp, Homo sapien
cctacagtattatttatcccccaga

SEQ ID NO: 4396585 - DNA, 25 bp, Homo sapien
aaagaaatatctacaccaaagcaat

SEQ ID NO: 4396586 - DNA, 25 bp, Homo sapien
tatcatagaccgtgagactaagtgg

SEQ ID NO: 4396587 - DNA, 25 bp, Homo sapien
caatttttatcatagaccgtgagac

SEQ ID NO: 4396588 - DNA, 25 bp, Homo sapien
aagcaatttttatcatagaccgtga

SEQ ID NO: 4396589 - DNA, 25 bp, Homo sapien
ggagcagagagaatccccagcgcat

SEQ ID NO: 4396590 - DNA, 25 bp, Homo sapien
gggctccctgagcagagacaggagc

SEQ ID NO: 4396591 - DNA, 25 bp, Homo sapien
gagacaggagcagagagaatcccca

SEQ ID NO: 4396592 - DNA, 25 bp, Homo sapien
acaggagcagagagaatccccagcg

SEQ ID NO: 4396593 - DNA, 25 bp, Homo sapien
tgtggcttgtcgattccaatgcaat

SEQ ID NO: 4396594 - DNA, 25 bp, Homo sapien
ggcttgtcgattccaatgcaattga

SEQ ID NO: 4396595 - DNA, 25 bp, Homo sapien
tatctgtggcttgtcgattccaatg

SEQ ID NO: 4396596 - DNA, 25 bp, Homo sapien
ttctatctgtggcttgtcgattcca

SEQ ID NO: 4396597 - DNA, 25 bp, Homo sapien
caggccaaacctcttacaggaatga

SEQ ID NO: 4396598 - DNA, 25 bp, Homo sapien
gcacatccgtgtagaaaaacctccc

SEQ ID NO: 4396599 - DNA, 25 bp, Homo sapien
ctaatgaatgcagtcttgcccaggc

SEQ ID NO: 4396600 - DNA, 25 bp, Homo sapien
gtgtctgtgaccagagcacgtggga

SEQ ID NO: 4396601 - DNA, 25 bp, Homo sapien
aaaagcttcagaaactcaccagata

SEQ ID NO: 4396602 - DNA, 25 bp, Homo sapien
ggatatttcaaactaggaagtttca

SEQ ID NO: 4396603 - DNA, 25 bp, Homo sapien
tacagctcggtatgctttgctcaaa

SEQ ID NO: 4396604 - DNA, 25 bp, Homo sapien
ttaagaacttcatagctgtagggac

SEQ ID NO: 4396605 - DNA, 25 bp, Homo sapien
tataggaccattgcctgttcagaca

SEQ ID NO: 4396606 - DNA, 25 bp, Homo sapien
gatcattgcttctgggcccgagtag

SEQ ID NO: 4396607 - DNA, 25 bp, Homo sapien
cctataggaccttgggccgagattt

SEQ ID NO: 4396608 - DNA, 25 bp, Homo sapien
tagagatccgatccagtgctgccta

SEQ ID NO: 4396609 - DNA, 25 bp, Homo sapien
tgtggaacagccacaaacacggtgg

SEQ ID NO: 4396610 - DNA, 25 bp, Homo sapien
taagactctaacgtgaaatggcccc

SEQ ID NO: 4396611 - DNA, 25 bp, Homo sapien
tagtggtcagccaaacagaagcaag

SEQ ID NO: 4396612 - DNA, 25 bp, Homo sapien
tcagagagccttggtagcaacaaag

SEQ ID NO: 4396613 - DNA, 25 bp, Homo sapien
ataaagcagcataaccaaggcttac

SEQ ID NO: 4396614 - DNA, 25 bp, Homo sapien
tataaagcagcataaccaaggctta

SEQ ID NO: 4396615 - DNA, 25 bp, Homo sapien
ttataaagcagcataaccaaggctt

SEQ ID NO: 4396616 - DNA, 25 bp, Homo sapien
ccttgcctgacatgttttagtggaa

SEQ ID NO: 4396617 - DNA, 25 bp, Homo sapien
aaaggtattctgttgaacatgcctt

SEQ ID NO: 4396618 - DNA, 25 bp, Homo sapien
cttgcctgacatgttttagtggaaa

SEQ ID NO: 4396619 - DNA, 25 bp, Homo sapien
caaaggtattctgttgaacatgcct

SEQ ID NO: 4396620 - DNA, 25 bp, Homo sapien
cttttacagccttcttgtttgcagt

SEQ ID NO: 4396621 - DNA, 25 bp, Homo sapien
tttgcagtgtggtaaatatctcttc

SEQ ID NO: 4396622 - DNA, 25 bp, Homo sapien
gtttgcagtgtggtaaatatctctt

SEQ ID NO: 4396623 - DNA, 25 bp, Homo sapien
ctctcattgacttcttatttaaaat

SEQ ID NO: 4396624 - DNA, 25 bp, Homo sapien
atttaaaattcccagggccacagca

SEQ ID NO: 4396625 - DNA, 25 bp, Homo sapien
agcatctctcattgacttcttattt

SEQ ID NO: 4396626 - DNA, 25 bp, Homo sapien
catctctcattgacttcttatttaa

SEQ ID NO: 4396627 - DNA, 25 bp, Homo sapien
gcatctgtttgaaccaaccttttga

SEQ ID NO: 4396628 - DNA, 25 bp, Homo sapien
tctgtttgaaccaaccttttgagaa

SEQ ID NO: 4396629 - DNA, 25 bp, Homo sapien
ggtggcatctgtttgaaccaacctt

SEQ ID NO: 4396630 - DNA, 25 bp, Homo sapien
tgtttgaaccaaccttttgagaata

SEQ ID NO: 4396631 - DNA, 25 bp, Homo sapien
tcatattcactgccagacatttctc

SEQ ID NO: 4396632 - DNA, 25 bp, Homo sapien
tcttgaattcttcctgtcaccccat

SEQ ID NO: 4396633 - DNA, 25 bp, Homo sapien
attcttcctgtcaccccatcatatt

SEQ ID NO: 4396634 - DNA, 25 bp, Homo sapien
tattcactgccagacatttctccaa

SEQ ID NO: 4396635 - DNA, 25 bp, Homo sapien
ttgaactgggttgtgcacaagcacc

SEQ ID NO: 4396636 - DNA, 25 bp, Homo sapien
catttttgcagctggcgacttgaac

SEQ ID NO: 4396637 - DNA, 25 bp, Homo sapien
tacaacttgtcggacatgcacgcag

SEQ ID NO: 4396638 - DNA, 25 bp, Homo sapien
ccaggcgggtcaagtggcagtaact

SEQ ID NO: 4396639 - DNA, 25 bp, Homo sapien
tgcggtcagtgatgaatctctcagc

SEQ ID NO: 4396640 - DNA, 25 bp, Homo sapien
cagaaaggtaatagatgcggtcagt

SEQ ID NO: 4396641 - DNA, 25 bp, Homo sapien
gcccgacggcatctaacccatagta

SEQ ID NO: 4396642 - DNA, 25 bp, Homo sapien
tctgaggatctcaagcgcagctatg

SEQ ID NO: 4396643 - DNA, 25 bp, Homo sapien
gccatcgggcattaattgatttcct

SEQ ID NO: 4396644 - DNA, 25 bp, Homo sapien
tgttaattcacagctcacagagtga

SEQ ID NO: 4396645 - DNA, 25 bp, Homo sapien
tgctaagcagtagccagccatcggg

SEQ ID NO: 4396646 - DNA, 25 bp, Homo sapien
cacagagcttccatggtcactgcta

SEQ ID NO: 4396647 - DNA, 25 bp, Homo sapien
tatgctatagggacgttccatgccc

SEQ ID NO: 4396648 - DNA, 25 bp, Homo sapien
gcaaacagggaatagtctagtcacc

SEQ ID NO: 4396649 - DNA, 25 bp, Homo sapien
ttgggcacccctagaaataccttga

SEQ ID NO: 4396650 - DNA, 25 bp, Homo sapien
tgttccagaagatggccaatagaga

SEQ ID NO: 4396651 - DNA, 25 bp, Homo sapien
ctacgctgaattagaaaatcctgcc

SEQ ID NO: 4396652 - DNA, 25 bp, Homo sapien
tccctggacttggttgagccttcac

SEQ ID NO: 4396653 - DNA, 25 bp, Homo sapien
gaccagtacatgagctgggacttct

SEQ ID NO: 4396654 - DNA, 25 bp, Homo sapien
tccctggtcgtggatactacgctga

SEQ ID NO: 4396655 - DNA, 25 bp, Homo sapien
tcttgttacaacagtaccgtgctgt

SEQ ID NO: 4396656 - DNA, 25 bp, Homo sapien
tgtgcttcagccatccataacacgc

SEQ ID NO: 4396657 - DNA, 25 bp, Homo sapien
aagctgcactctcggcaatttgtcc

SEQ ID NO: 4396658 - DNA, 25 bp, Homo sapien
cataacacgcccactgtatgtagtc

SEQ ID NO: 4396659 - DNA, 25 bp, Homo sapien
tgggcaggaacacgtttacagccat

SEQ ID NO: 4396660 - DNA, 25 bp, Homo sapien
cttgggcaggaacacgtttacagcc

SEQ ID NO: 4396661 - DNA, 25 bp, Homo sapien
ggttacagagatcctcttccttggg

SEQ ID NO: 4396662 - DNA, 25 bp, Homo sapien
aataggaagtatgagaggggttaca

SEQ ID NO: 4396663 - DNA, 25 bp, Homo sapien
gttgatacttgaaataaacctcctg

SEQ ID NO: 4396664 - DNA, 25 bp, Homo sapien
aaacctcctgaaccatgctaagaag

SEQ ID NO: 4396665 - DNA, 25 bp, Homo sapien
taagcagggaaattacatgatcaca

SEQ ID NO: 4396666 - DNA, 25 bp, Homo sapien
gaagtccaaagtatgataacaagtg

SEQ ID NO: 4396667 - DNA, 25 bp, Homo sapien
gctacaggacatactgaggaccaac

SEQ ID NO: 4396668 - DNA, 25 bp, Homo sapien
aacctgggacccaagggcgtcatga

SEQ ID NO: 4396669 - DNA, 25 bp, Homo sapien
gttttggtgctcaacatcagtgtgg

SEQ ID NO: 4396670 - DNA, 25 bp, Homo sapien
ttaatgggagccactatccgggtct

SEQ ID NO: 4396671 - DNA, 25 bp, Homo sapien
cgttcacccattgcggagtgtttgc

SEQ ID NO: 4396672 - DNA, 25 bp, Homo sapien
tcaaccatgacgttcacccattgcg

SEQ ID NO: 4396673 - DNA, 25 bp, Homo sapien
accatgacgttcacccattgcggag

SEQ ID NO: 4396674 - DNA, 25 bp, Homo sapien
acccattgcggagtgtttgctaggc

SEQ ID NO: 4396675 - DNA, 25 bp, Homo sapien
ttttctgtatgccatgatgtagact

SEQ ID NO: 4396676 - DNA, 25 bp, Homo sapien
tgccatgatgtagactgaaagcaac

SEQ ID NO: 4396677 - DNA, 25 bp, Homo sapien
acctgatggcaaggagtgcttcttc

SEQ ID NO: 4396678 - DNA, 25 bp, Homo sapien
aacctgatggcaaggagtgcttctt

SEQ ID NO: 4396679 - DNA, 25 bp, Homo sapien
gcaaaagctggtgcaattggtaaaa

SEQ ID NO: 4396680 - DNA, 25 bp, Homo sapien
tggtggtaccccatccaaggttgta

SEQ ID NO: 4396681 - DNA, 25 bp, Homo sapien
tagatgataatagctgatagcccac

SEQ ID NO: 4396682 - DNA, 25 bp, Homo sapien
gatagcccactctgtgtagtagcaa

SEQ ID NO: 4396683 - DNA, 25 bp, Homo sapien
aaattgtcccataagcggtatatca

SEQ ID NO: 4396684 - DNA, 25 bp, Homo sapien
ttacttctgtagagtaagcattcca

SEQ ID NO: 4396685 - DNA, 25 bp, Homo sapien
tctgtagagtaagcattccatcttc

SEQ ID NO: 4396686 - DNA, 25 bp, Homo sapien
taaaatgtactgtctgaaattgtcc

SEQ ID NO: 4396687 - DNA, 25 bp, Homo sapien
agggcgaaccccagagcgttctgcc

SEQ ID NO: 4396688 - DNA, 25 bp, Homo sapien
ggcgaaccccagagcgttctgccat

SEQ ID NO: 4396689 - DNA, 25 bp, Homo sapien
ttcagggcgaaccccagagcgttct

SEQ ID NO: 4396690 - DNA, 25 bp, Homo sapien
cagggcgaaccccagagcgttctgc

SEQ ID NO: 4396691 - DNA, 25 bp, Homo sapien
gagtattaggtattccctggttcca

SEQ ID NO: 4396692 - DNA, 25 bp, Homo sapien
cctacagagtattaggtattccctg

SEQ ID NO: 4396693 - DNA, 25 bp, Homo sapien
catggcctacagagtattaggtatt

SEQ ID NO: 4396694 - DNA, 25 bp, Homo sapien
cagagtattaggtattccctggttc

SEQ ID NO: 4396695 - DNA, 25 bp, Homo sapien
aggtaggaggcttctcttgtagaat

SEQ ID NO: 4396696 - DNA, 25 bp, Homo sapien
tgccagtgtgtcttttggcctgctt

SEQ ID NO: 4396697 - DNA, 25 bp, Homo sapien
cttgtagaatttgcagctctgggct

SEQ ID NO: 4396698 - DNA, 25 bp, Homo sapien
ggcttcaggatgctcacccctgaat

SEQ ID NO: 4396699 - DNA, 25 bp, Homo sapien
ggctgctgaccatcactagcgtctt

SEQ ID NO: 4396700 - DNA, 25 bp, Homo sapien
ggacctgctccctgacaaatccaca

SEQ ID NO: 4396701 - DNA, 25 bp, Homo sapien
tctaggaactcagagttatcccctg

SEQ ID NO: 4396702 - DNA, 25 bp, Homo sapien
aactcagagttatcccctgagtggg

SEQ ID NO: 4396703 - DNA, 25 bp, Homo sapien
catgtctgtagatcaccagtccagg

SEQ ID NO: 4396704 - DNA, 25 bp, Homo sapien
tctctgctcatggtatcacaaggcg

SEQ ID NO: 4396705 - DNA, 25 bp, Homo sapien
caaggtgttatctagccggtgttct

SEQ ID NO: 4396706 - DNA, 25 bp, Homo sapien
tcacaaggcggaaaccaaggtgtta

SEQ ID NO: 4396707 - DNA, 25 bp, Homo sapien
atctagatcgaaactctactaagta

SEQ ID NO: 4396708 - DNA, 25 bp, Homo sapien
tttatgaagttggagtaatctagat

SEQ ID NO: 4396709 - DNA, 25 bp, Homo sapien
tatgaagttggagtaatctagatcg

SEQ ID NO: 4396710 - DNA, 25 bp, Homo sapien
aagttggagtaatctagatcgaaac

SEQ ID NO: 4396711 - DNA, 25 bp, Homo sapien
caattgcaggatatttgatacaaga

SEQ ID NO: 4396712 - DNA, 25 bp, Homo sapien
gctacaggtgggttgttaaatccat

SEQ ID NO: 4396713 - DNA, 25 bp, Homo sapien
tttctccacatctatgctacaggtg

SEQ ID NO: 4396714 - DNA, 25 bp, Homo sapien
tatataccctgaccttacaagcaag

SEQ ID NO: 4396715 - DNA, 25 bp, Homo sapien
gagagacatggtgaagccatacaag

SEQ ID NO: 4396716 - DNA, 25 bp, Homo sapien
gagacatggtgaagccatacaagta

SEQ ID NO: 4396717 - DNA, 25 bp, Homo sapien
taaaaatagttaccgcaatcacaaa

SEQ ID NO: 4396718 - DNA, 25 bp, Homo sapien
aagcatggtataaaaatagttaccg

SEQ ID NO: 4396719 - DNA, 25 bp, Homo sapien
tcggtaatatctttaaactgggcca

SEQ ID NO: 4396720 - DNA, 25 bp, Homo sapien
aagcgacaaatttcaccgaccaggg

SEQ ID NO: 4396721 - DNA, 25 bp, Homo sapien
taacatcgtccatgatagaagccag

SEQ ID NO: 4396722 - DNA, 25 bp, Homo sapien
caaaaacgtggtaattgtcttccat

SEQ ID NO: 4396723 - DNA, 25 bp, Homo sapien
cacatagtcaaattcaagtgcaaga

SEQ ID NO: 4396724 - DNA, 25 bp, Homo sapien
ggcaggagacagtctaagcaacagc

SEQ ID NO: 4396725 - DNA, 25 bp, Homo sapien
caagagaggtctttgtaaacagagt

SEQ ID NO: 4396726 - DNA, 25 bp, Homo sapien
ccctgcagatttaagtgggtaattg

SEQ ID NO: 4396727 - DNA, 25 bp, Homo sapien
ctaagactgcttagggacccaggta

SEQ ID NO: 4396728 - DNA, 25 bp, Homo sapien
tcttgttgggtgacacatgagcagt

SEQ ID NO: 4396729 - DNA, 25 bp, Homo sapien
tctcgacgcacaaaggcttgtccct

SEQ ID NO: 4396730 - DNA, 25 bp, Homo sapien
ttcacattacaatgagggctcaggg

SEQ ID NO: 4396731 - DNA, 25 bp, Homo sapien
tcaactgcatcatccggaaactggg

SEQ ID NO: 4396732 - DNA, 25 bp, Homo sapien
gggttgttctgtcacctctatagtc

SEQ ID NO: 4396733 - DNA, 25 bp, Homo sapien
agtcaattggcatatcctctctggg

SEQ ID NO: 4396734 - DNA, 25 bp, Homo sapien
aatgtgctggcgactcttctgggat

SEQ ID NO: 4396735 - DNA, 25 bp, Homo sapien
ccagcttgttcttcacagttagcaa

SEQ ID NO: 4396736 - DNA, 25 bp, Homo sapien
cagttagcaaattcactagagaggt

SEQ ID NO: 4396737 - DNA, 25 bp, Homo sapien
ggtgtcatcgatagtgtcaaggtct

SEQ ID NO: 4396738 - DNA, 25 bp, Homo sapien
agtgtttgaaggacccagggatcca

SEQ ID NO: 4396739 - DNA, 25 bp, Homo sapien
aatgcttaaatttctcttcacacaa

SEQ ID NO: 4396740 - DNA, 25 bp, Homo sapien
tctgtgatgacaagttactgcctaa

SEQ ID NO: 4396741 - DNA, 25 bp, Homo sapien
cttcacacaagtaagatggattgga

SEQ ID NO: 4396742 - DNA, 25 bp, Homo sapien
ctagggaagtgatatttgaaagtta

SEQ ID NO: 4396743 - DNA, 25 bp, Homo sapien
tttcttcaagacatttaaccaaagc

SEQ ID NO: 4396744 - DNA, 25 bp, Homo sapien
tcaggtattgtctgaggtgattatt

SEQ ID NO: 4396745 - DNA, 25 bp, Homo sapien
tcaagacatttaaccaaagcagaat

SEQ ID NO: 4396746 - DNA, 25 bp, Homo sapien
ggtgattattctcttcgtgtaacct

SEQ ID NO: 4396747 - DNA, 25 bp, Homo sapien
ctgcttatttctgtagagctgagag

SEQ ID NO: 4396748 - DNA, 25 bp, Homo sapien
ttcccatgagcacaagtccggaaga

SEQ ID NO: 4396749 - DNA, 25 bp, Homo sapien
cacaagtccggaagaggaaaatttg

SEQ ID NO: 4396750 - DNA, 25 bp, Homo sapien
tctgtagagctgagaggaaagctga

SEQ ID NO: 4396751 - DNA, 25 bp, Homo sapien
catctagtacagtttagactcttgt

SEQ ID NO: 4396752 - DNA, 25 bp, Homo sapien
ctagtacagtttagactcttgtcct

SEQ ID NO: 4396753 - DNA, 25 bp, Homo sapien
tcatctagtacagtttagactcttg

SEQ ID NO: 4396754 - DNA, 25 bp, Homo sapien
tctagtacagtttagactcttgtcc

SEQ ID NO: 4396755 - DNA, 25 bp, Homo sapien
ccgtggaaacgtcaacactagattc

SEQ ID NO: 4396756 - DNA, 25 bp, Homo sapien
cactagattctgacgttgtagtgga

SEQ ID NO: 4396757 - DNA, 25 bp, Homo sapien
ccaagtctccgtggaaacgtcaaca

SEQ ID NO: 4396758 - DNA, 25 bp, Homo sapien
ggaatacgggcaattatagctctgg

SEQ ID NO: 4396759 - DNA, 25 bp, Homo sapien
cttgcagtggaagaaagcgctgcag

SEQ ID NO: 4396760 - DNA, 25 bp, Homo sapien
cagtggaagaaagcgctgcagaaac

SEQ ID NO: 4396761 - DNA, 25 bp, Homo sapien
tgcagtggaagaaagcgctgcagaa

SEQ ID NO: 4396762 - DNA, 25 bp, Homo sapien
tggaagaaagcgctgcagaaactga

SEQ ID NO: 4396763 - DNA, 25 bp, Homo sapien
cgtacataacttttcagtctgagct

SEQ ID NO: 4396764 - DNA, 25 bp, Homo sapien
tctttaggtgcaggaatgttcgtct

SEQ ID NO: 4396765 - DNA, 25 bp, Homo sapien
tctcttgaaggattgaaatcgtaca

SEQ ID NO: 4396766 - DNA, 25 bp, Homo sapien
tattatgggagtgttactaagtctc

SEQ ID NO: 4396767 - DNA, 25 bp, Homo sapien
atgcctcttctctgatcgctgaggg

SEQ ID NO: 4396768 - DNA, 25 bp, Homo sapien
ttattggatgtccaacacccttgag

SEQ ID NO: 4396769 - DNA, 25 bp, Homo sapien
gctggaattaagtatgcctcttctc

SEQ ID NO: 4396770 - DNA, 25 bp, Homo sapien
taaattgaggataaagttaattcat

SEQ ID NO: 4396771 - DNA, 25 bp, Homo sapien
taaaagtcccactgataagcctggg

SEQ ID NO: 4396772 - DNA, 25 bp, Homo sapien
gctgctgcgtaggtgtttggaagga

SEQ ID NO: 4396773 - DNA, 25 bp, Homo sapien
tttgaggtagaaggtgtggctaaaa

SEQ ID NO: 4396774 - DNA, 25 bp, Homo sapien
gattgatcctaatctttttgtcaag

SEQ ID NO: 4396775 - DNA, 25 bp, Homo sapien
taggatccgtaggatccgctgagct

SEQ ID NO: 4396776 - DNA, 25 bp, Homo sapien
tgggctctgcggtcgtaggatccgt

SEQ ID NO: 4396777 - DNA, 25 bp, Homo sapien
gcaccactgggttatgaaaaaaaga

SEQ ID NO: 4396778 - DNA, 25 bp, Homo sapien
ctgcggtcgtaggatccgtaggatc

SEQ ID NO: 4396779 - DNA, 25 bp, Homo sapien
gaggaatttatgaagtccctagccc

SEQ ID NO: 4396780 - DNA, 25 bp, Homo sapien
agcaggtagcacgagccagtctgtc

SEQ ID NO: 4396781 - DNA, 25 bp, Homo sapien
gtagtgaattaatctgtgtctgagc

SEQ ID NO: 4396782 - DNA, 25 bp, Homo sapien
gcccatatggctggtagtgaattaa

SEQ ID NO: 4396783 - DNA, 25 bp, Homo sapien
gctacttgcacccattcttccaact

SEQ ID NO: 4396784 - DNA, 25 bp, Homo sapien
tggatgccagcaacacacttttcaa

SEQ ID NO: 4396785 - DNA, 25 bp, Homo sapien
cttccaactccggctgtgcctacag

SEQ ID NO: 4396786 - DNA, 25 bp, Homo sapien
ttcaataatgtccacgctacttgca

SEQ ID NO: 4396787 - DNA, 25 bp, Homo sapien
tggaaagaactgctcacaaaacttt

SEQ ID NO: 4396788 - DNA, 25 bp, Homo sapien
cactaactgatccaaagtgccagca

SEQ ID NO: 4396789 - DNA, 25 bp, Homo sapien
caccagctgctcgaatgagccagga

SEQ ID NO: 4396790 - DNA, 25 bp, Homo sapien
caacaggggtggatcccctgcttga

SEQ ID NO: 4396791 - DNA, 25 bp, Homo sapien
tgagccaggactgcaaacatgcaac

SEQ ID NO: 4396792 - DNA, 25 bp, Homo sapien
gcttcagggcgctcaggaggtgaca

SEQ ID NO: 4396793 - DNA, 25 bp, Homo sapien
ctaatcccatccaccgacaagctca

SEQ ID NO: 4396794 - DNA, 25 bp, Homo sapien
caccgacaagctcactaagcagttc

SEQ ID NO: 4396795 - DNA, 25 bp, Homo sapien
gacaagctcactaagcagttcctga

SEQ ID NO: 4396796 - DNA, 25 bp, Homo sapien
atccaccgacaagctcactaagcag

SEQ ID NO: 4396797 - DNA, 25 bp, Homo sapien
ggagcaagcttgtgaccgtgccagt

SEQ ID NO: 4396798 - DNA, 25 bp, Homo sapien
gagagttggcaagaatatttgagtc

SEQ ID NO: 4396799 - DNA, 25 bp, Homo sapien
tctagcgtaggagaaaacctttggc

SEQ ID NO: 4396800 - DNA, 25 bp, Homo sapien
ctgagcccctgatgatttcattgat

SEQ ID NO: 4396801 - DNA, 25 bp, Homo sapien
ctaatataaagggtttattatccat

SEQ ID NO: 4396802 - DNA, 25 bp, Homo sapien
ataaagggtttattatccatatttg

SEQ ID NO: 4396803 - DNA, 25 bp, Homo sapien
atataaagggtttattatccatatt

SEQ ID NO: 4396804 - DNA, 25 bp, Homo sapien
taaagggtttattatccatatttgc

SEQ ID NO: 4396805 - DNA, 25 bp, Homo sapien
ttttctgattagtaactagtgagtt

SEQ ID NO: 4396806 - DNA, 25 bp, Homo sapien
tcgccttattgtaccaaagaggtta

SEQ ID NO: 4396807 - DNA, 25 bp, Homo sapien
tatatatcatatcgccttattgtac

SEQ ID NO: 4396808 - DNA, 25 bp, Homo sapien
tagtaactagtgagttatatatatc

SEQ ID NO: 4396809 - DNA, 25 bp, Homo sapien
tgaaagttgccaagaataacccaag

SEQ ID NO: 4396810 - DNA, 25 bp, Homo sapien
tcagctatccgcctcacaaatgggt

SEQ ID NO: 4396811 - DNA, 25 bp, Homo sapien
tgtttcacatagaacacatctatct

SEQ ID NO: 4396812 - DNA, 25 bp, Homo sapien
actgaaatgagttctttgtcacagc

SEQ ID NO: 4396813 - DNA, 25 bp, Homo sapien
tctccgtcagagacatttgcagcac

SEQ ID NO: 4396814 - DNA, 25 bp, Homo sapien
tttttctccgtcagagacatttgca

SEQ ID NO: 4396815 - DNA, 25 bp, Homo sapien
tccgtcagagacatttgcagcacac

SEQ ID NO: 4396816 - DNA, 25 bp, Homo sapien
cgtcagagacatttgcagcacacat

SEQ ID NO: 4396817 - DNA, 25 bp, Homo sapien
acttctgctacatcgtttagctgcc

SEQ ID NO: 4396818 - DNA, 25 bp, Homo sapien
tctgctacatcgtttagctgccagc

SEQ ID NO: 4396819 - DNA, 25 bp, Homo sapien
tgctacatcgtttagctgccagctt

SEQ ID NO: 4396820 - DNA, 25 bp, Homo sapien
tcacttctgctacatcgtttagctg

SEQ ID NO: 4396821 - DNA, 25 bp, Homo sapien
ttatattcgtttcttcagcaagtta

SEQ ID NO: 4396822 - DNA, 25 bp, Homo sapien
atattcgtttcttcagcaagttatc

SEQ ID NO: 4396823 - DNA, 25 bp, Homo sapien
tatattcgtttcttcagcaagttat

SEQ ID NO: 4396824 - DNA, 25 bp, Homo sapien
gattccacagtctgccagaattccc

SEQ ID NO: 4396825 - DNA, 25 bp, Homo sapien
tttctatgagttgaagggcactgtt

SEQ ID NO: 4396826 - DNA, 25 bp, Homo sapien
tagcaataagatctcctgattccac

SEQ ID NO: 4396827 - DNA, 25 bp, Homo sapien
tactgttccaatttagcaataagat

SEQ ID NO: 4396828 - DNA, 25 bp, Homo sapien
tattaccataactactttcctgatc

SEQ ID NO: 4396829 - DNA, 25 bp, Homo sapien
ataactactttcctgatctcacagc

SEQ ID NO: 4396830 - DNA, 25 bp, Homo sapien
taccataactactttcctgatctca

SEQ ID NO: 4396831 - DNA, 25 bp, Homo sapien
tttattaccataactactttcctga

SEQ ID NO: 4396832 - DNA, 25 bp, Homo sapien
gaaggacaaagagtactggatctca

SEQ ID NO: 4396833 - DNA, 25 bp, Homo sapien
agtgacctgtaagcaccaagacaat

SEQ ID NO: 4396834 - DNA, 25 bp, Homo sapien
ttaaggagtgattcagagatcagcc

SEQ ID NO: 4396835 - DNA, 25 bp, Homo sapien
atttaaagaaggacaaagagtactg

SEQ ID NO: 4396836 - DNA, 25 bp, Homo sapien
caagtgtataaggatgccagtgttt

SEQ ID NO: 4396837 - DNA, 25 bp, Homo sapien
tgtcaagtgtataaggatgccagtg

SEQ ID NO: 4396838 - DNA, 25 bp, Homo sapien
atgtcaagtgtataaggatgccagt

SEQ ID NO: 4396839 - DNA, 25 bp, Homo sapien
gtctgaacagtgaatcaaaggggtt

SEQ ID NO: 4396840 - DNA, 25 bp, Homo sapien
tgtaaagagctatctccctgggatt

SEQ ID NO: 4396841 - DNA, 25 bp, Homo sapien
tagtccaataagtcaataactcctg

SEQ ID NO: 4396842 - DNA, 25 bp, Homo sapien
ttaaatccccaattctgtaaagagc

SEQ ID NO: 4396843 - DNA, 25 bp, Homo sapien
gccagccttgctcccaaagagagat

SEQ ID NO: 4396844 - DNA, 25 bp, Homo sapien
tctttttattgccaacatgccattc

SEQ ID NO: 4396845 - DNA, 25 bp, Homo sapien
tattgccaacatgccattcaaggtt

SEQ ID NO: 4396846 - DNA, 25 bp, Homo sapien
ttttattgccaacatgccattcaag

SEQ ID NO: 4396847 - DNA, 25 bp, Homo sapien
tttattgccaacatgccattcaagg

SEQ ID NO: 4396848 - DNA, 25 bp, Homo sapien
agtcctcgttaaacttacaatcatg

SEQ ID NO: 4396849 - DNA, 25 bp, Homo sapien
catggctggggagtcctcgttaaac

SEQ ID NO: 4396850 - DNA, 25 bp, Homo sapien
ggagtcctcgttaaacttacaatca

SEQ ID NO: 4396851 - DNA, 25 bp, Homo sapien
tgcatggctggggagtcctcgttaa

SEQ ID NO: 4396852 - DNA, 25 bp, Homo sapien
tcttgatgaattggtgtccctagaa

SEQ ID NO: 4396853 - DNA, 25 bp, Homo sapien
gatgaattggtgtccctagaaaatg

SEQ ID NO: 4396854 - DNA, 25 bp, Homo sapien
cttgcttcttgatgaattggtgtcc

SEQ ID NO: 4396855 - DNA, 25 bp, Homo sapien
ccctagaaaatgatgtgattgagac

SEQ ID NO: 4396856 - DNA, 25 bp, Homo sapien
actaacagtagaggaggtggaattt

SEQ ID NO: 4396857 - DNA, 25 bp, Homo sapien
aacagtagaggaggtggaattttct

SEQ ID NO: 4396858 - DNA, 25 bp, Homo sapien
taacagtagaggaggtggaattttc

SEQ ID NO: 4396859 - DNA, 25 bp, Homo sapien
ctaacagtagaggaggtggaatttt

SEQ ID NO: 4396860 - DNA, 25 bp, Homo sapien
ttaaataacttatgggccgggtgca

SEQ ID NO: 4396861 - DNA, 25 bp, Homo sapien
ccagaacttcgagaggtcaaggcgg

SEQ ID NO: 4396862 - DNA, 25 bp, Homo sapien
cccagaacttcgagaggtcaaggcg

SEQ ID NO: 4396863 - DNA, 25 bp, Homo sapien
cagggaaaaccctatatcaggtcat

SEQ ID NO: 4396864 - DNA, 25 bp, Homo sapien
ccactgcgttcggtcataaatgcta

SEQ ID NO: 4396865 - DNA, 25 bp, Homo sapien
ccatctacacgtataggcccctgaa

SEQ ID NO: 4396866 - DNA, 25 bp, Homo sapien
tctccgggcaacactaactcaacta

SEQ ID NO: 4396867 - DNA, 25 bp, Homo sapien
caagtagctggtcgtacagatatga

SEQ ID NO: 4396868 - DNA, 25 bp, Homo sapien
tcaatctgatcggaactcctggact

SEQ ID NO: 4396869 - DNA, 25 bp, Homo sapien
gggtctctttatattgctcaatctg

SEQ ID NO: 4396870 - DNA, 25 bp, Homo sapien
tagctggtcgtacagatatgagcca

SEQ ID NO: 4396871 - DNA, 25 bp, Homo sapien
caagatgaaggatcgcttgtgctca

SEQ ID NO: 4396872 - DNA, 25 bp, Homo sapien
ggactttcccggcattaaccaggca

SEQ ID NO: 4396873 - DNA, 25 bp, Homo sapien
taacttaaaggatccgtcttctggc

SEQ ID NO: 4396874 - DNA, 25 bp, Homo sapien
gtcttctggccaccgacaattaggg

SEQ ID NO: 4396875 - DNA, 25 bp, Homo sapien
tggacaggacttcttatgacaaacc

SEQ ID NO: 4396876 - DNA, 25 bp, Homo sapien
tggcaagatgaggacgtttacaacc

SEQ ID NO: 4396877 - DNA, 25 bp, Homo sapien
tgcctacagcagagtgagtagatac

SEQ ID NO: 4396878 - DNA, 25 bp, Homo sapien
taaatagcagagtattgcgggatct

SEQ ID NO: 4396879 - DNA, 25 bp, Homo sapien
gcatagtcacaacaggacaaaactt

SEQ ID NO: 4396880 - DNA, 25 bp, Homo sapien
taaacacagtatttccaaaagcaag

SEQ ID NO: 4396881 - DNA, 25 bp, Homo sapien
ttaaacacagtatttccaaaagcaa

SEQ ID NO: 4396882 - DNA, 25 bp, Homo sapien
gatgtgtgtcccttccgaactgagg

SEQ ID NO: 4396883 - DNA, 25 bp, Homo sapien
gcaattgaaagctgggatgtatcct

SEQ ID NO: 4396884 - DNA, 25 bp, Homo sapien
tgccatatgttggtggtagtcccag

SEQ ID NO: 4396885 - DNA, 25 bp, Homo sapien
cccggccaatggacttcagtagaaa

SEQ ID NO: 4396886 - DNA, 25 bp, Homo sapien
tacagcataggacgtctcagaatcc

SEQ ID NO: 4396887 - DNA, 25 bp, Homo sapien
ctcctccactagctgttcttttagc

SEQ ID NO: 4396888 - DNA, 25 bp, Homo sapien
gagaagagaatagaccatctacagc

SEQ ID NO: 4396889 - DNA, 25 bp, Homo sapien
ctcgtttgctaggatgagaagagaa

SEQ ID NO: 4396890 - DNA, 25 bp, Homo sapien
tcttctataaaaccatgctgttgac

SEQ ID NO: 4396891 - DNA, 25 bp, Homo sapien
taaaaccatgctgttgaccgggcgc

SEQ ID NO: 4396892 - DNA, 25 bp, Homo sapien
aaccatgctgttgaccgggcgcggt

SEQ ID NO: 4396893 - DNA, 25 bp, Homo sapien
tctataaaaccatgctgttgaccgg

SEQ ID NO: 4396894 - DNA, 25 bp, Homo sapien
cttccagtttgttaggtaaggctag

SEQ ID NO: 4396895 - DNA, 25 bp, Homo sapien
tcttccagtttgttaggtaaggcta

SEQ ID NO: 4396896 - DNA, 25 bp, Homo sapien
taacgtagaccatagttctagcatg

SEQ ID NO: 4396897 - DNA, 25 bp, Homo sapien
gatcttacgtagaaagcataggtct

SEQ ID NO: 4396898 - DNA, 25 bp, Homo sapien
caatgcccatagtattgaaatgcaa

SEQ ID NO: 4396899 - DNA, 25 bp, Homo sapien
aatactaaggctaacttgctccagg

SEQ ID NO: 4396900 - DNA, 25 bp, Homo sapien
ttgtaagtcagattctcttgttctt

SEQ ID NO: 4396901 - DNA, 25 bp, Homo sapien
tgtaagtcagattctcttgttcttc

SEQ ID NO: 4396902 - DNA, 25 bp, Homo sapien
tcattcatcatctgtactccaactg

SEQ ID NO: 4396903 - DNA, 25 bp, Homo sapien
cattcatcatctgtactccaactgt

SEQ ID NO: 4396904 - DNA, 25 bp, Homo sapien
ttcatcatctgtactccaactgttt

SEQ ID NO: 4396905 - DNA, 25 bp, Homo sapien
tcatcatctgtactccaactgtttc

SEQ ID NO: 4396906 - DNA, 25 bp, Homo sapien
tgttgaaaggtctttggaaatcaaa

SEQ ID NO: 4396907 - DNA, 25 bp, Homo sapien
gcaatagttcctcacgatttgtata

SEQ ID NO: 4396908 - DNA, 25 bp, Homo sapien
tttttattcagtagagccagcaata

SEQ ID NO: 4396909 - DNA, 25 bp, Homo sapien
agagccagcaatagttcctcacgat

SEQ ID NO: 4396910 - DNA, 25 bp, Homo sapien
ccacctgtaggatttttaattgata

SEQ ID NO: 4396911 - DNA, 25 bp, Homo sapien
gtaggatttttaattgatatgcacg

SEQ ID NO: 4396912 - DNA, 25 bp, Homo sapien
ggatttttaattgatatgcacgtac

SEQ ID NO: 4396913 - DNA, 25 bp, Homo sapien
cctgtaggatttttaattgatatgc

SEQ ID NO: 4396914 - DNA, 25 bp, Homo sapien
tgtaaaaaactcaacacggataaca

SEQ ID NO: 4396915 - DNA, 25 bp, Homo sapien
acagtgcttgagaggatcttgttca

SEQ ID NO: 4396916 - DNA, 25 bp, Homo sapien
aaacagtgcttgagaggatcttgtt

SEQ ID NO: 4396917 - DNA, 25 bp, Homo sapien
cacggataacaaagttaggagtcca

SEQ ID NO: 4396918 - DNA, 25 bp, Homo sapien
tcagtagagcttagttgcaaaaggc

SEQ ID NO: 4396919 - DNA, 25 bp, Homo sapien
caagtgtgcctcagttacgaatgat

SEQ ID NO: 4396920 - DNA, 25 bp, Homo sapien
ctatagctttggaattcagtagagc

SEQ ID NO: 4396921 - DNA, 25 bp, Homo sapien
tatttctatagctttggaattcagt

SEQ ID NO: 4396922 - DNA, 25 bp, Homo sapien
aatgcaatcaagtagttaacatgat

SEQ ID NO: 4396923 - DNA, 25 bp, Homo sapien
gcaatgcaatcaagtagttaacatg

SEQ ID NO: 4396924 - DNA, 25 bp, Homo sapien
tgcaatgcaatcaagtagttaacat

SEQ ID NO: 4396925 - DNA, 25 bp, Homo sapien
aatgcaatgcaatcaagtagttaac

SEQ ID NO: 4396926 - DNA, 25 bp, Homo sapien
ggtccatcctatcaaggatcagggt

SEQ ID NO: 4396927 - DNA, 25 bp, Homo sapien
tcttccaatcttctcaggagctttt

SEQ ID NO: 4396928 - DNA, 25 bp, Homo sapien
gggtctcttatatgtattcttccaa

SEQ ID NO: 4396929 - DNA, 25 bp, Homo sapien
tccagggtgatggtagttctagaaa

SEQ ID NO: 4396930 - DNA, 25 bp, Homo sapien
gcctgaggacaaggatagtaatgcc

SEQ ID NO: 4396931 - DNA, 25 bp, Homo sapien
ccctctaaattctgggtggcctgag

SEQ ID NO: 4396932 - DNA, 25 bp, Homo sapien
ttaagtcaaagtgtaggtctccctc

SEQ ID NO: 4396933 - DNA, 25 bp, Homo sapien
tgttagtaattaagtcaaagtgtag

SEQ ID NO: 4396934 - DNA, 25 bp, Homo sapien
attctctcgtgctatttcctcccaa

SEQ ID NO: 4396935 - DNA, 25 bp, Homo sapien
cattctctcgtgctatttcctccca

SEQ ID NO: 4396936 - DNA, 25 bp, Homo sapien
tctctcgtgctatttcctcccaaat

SEQ ID NO: 4396937 - DNA, 25 bp, Homo sapien
ttctctcgtgctatttcctcccaaa

SEQ ID NO: 4396938 - DNA, 25 bp, Homo sapien
ttagtgccttaatgagacagtatcc

SEQ ID NO: 4396939 - DNA, 25 bp, Homo sapien
cactgatgaagcagctaccactgag

SEQ ID NO: 4396940 - DNA, 25 bp, Homo sapien
ggtactattccaacggcctgttcca

SEQ ID NO: 4396941 - DNA, 25 bp, Homo sapien
taggtgatatttctcagctgtggca

SEQ ID NO: 4396942 - DNA, 25 bp, Homo sapien
tccaacagcatattagtgtgccgga

SEQ ID NO: 4396943 - DNA, 25 bp, Homo sapien
cacatagcctttccatatagccagt

SEQ ID NO: 4396944 - DNA, 25 bp, Homo sapien
agctcttatgggcagtgcagaccca

SEQ ID NO: 4396945 - DNA, 25 bp, Homo sapien
ggttggcaatcagctagatgtcagc

SEQ ID NO: 4396946 - DNA, 25 bp, Homo sapien
gaacatgccctcttcatctcccttt

SEQ ID NO: 4396947 - DNA, 25 bp, Homo sapien
tgcgggttgtagatcccagaatcca

SEQ ID NO: 4396948 - DNA, 25 bp, Homo sapien
actgaggataagttgagagtttgcg

SEQ ID NO: 4396949 - DNA, 25 bp, Homo sapien
gggatatcctgctttgctactgtgg

SEQ ID NO: 4396950 - DNA, 25 bp, Homo sapien
cagtttcccaaaaggaggatgcatt

SEQ ID NO: 4396951 - DNA, 25 bp, Homo sapien
tctgttgccaggagatgaaacagga

SEQ ID NO: 4396952 - DNA, 25 bp, Homo sapien
aggcagtttcccaaaaggaggatgc

SEQ ID NO: 4396953 - DNA, 25 bp, Homo sapien
aggatgcattctgttgccaggagat

SEQ ID NO: 4396954 - DNA, 25 bp, Homo sapien
cacttggtagacacattcatgcgat

SEQ ID NO: 4396955 - DNA, 25 bp, Homo sapien
taattccgggtgcaaaaagagtgta

SEQ ID NO: 4396956 - DNA, 25 bp, Homo sapien
caccgctcacgggaaagactatgtt

SEQ ID NO: 4396957 - DNA, 25 bp, Homo sapien
tatgttttaggtgacccgtgtggcc

SEQ ID NO: 4396958 - DNA, 25 bp, Homo sapien
agcgggcgctgatcttcgctcgcca

SEQ ID NO: 4396959 - DNA, 25 bp, Homo sapien
ctccggatatttggtatcgattggg

SEQ ID NO: 4396960 - DNA, 25 bp, Homo sapien
gaccctggcccggtatggctgaagt

SEQ ID NO: 4396961 - DNA, 25 bp, Homo sapien
tcgcaattgcggttacagacctgca

SEQ ID NO: 4396962 - DNA, 25 bp, Homo sapien
gatcttaggtgctggatcgccttat

SEQ ID NO: 4396963 - DNA, 25 bp, Homo sapien
cactagctgcctcaggacctagctt

SEQ ID NO: 4396964 - DNA, 25 bp, Homo sapien
tgtttttccactagctgcctcagga

SEQ ID NO: 4396965 - DNA, 25 bp, Homo sapien
gctgacagcaagtagccttttgact

SEQ ID NO: 4396966 - DNA, 25 bp, Homo sapien
tctgtcttactgttccggaagggtg

SEQ ID NO: 4396967 - DNA, 25 bp, Homo sapien
ccgtccctggtatggctttgatgaa

SEQ ID NO: 4396968 - DNA, 25 bp, Homo sapien
tcagagtttcaagcactaggagact

SEQ ID NO: 4396969 - DNA, 25 bp, Homo sapien
gaagacttagggctttcacctgtag

SEQ ID NO: 4396970 - DNA, 25 bp, Homo sapien
ttctagacattttggcgtttcatca

SEQ ID NO: 4396971 - DNA, 25 bp, Homo sapien
tctgaaccagcaatcaagactccct

SEQ ID NO: 4396972 - DNA, 25 bp, Homo sapien
tcctgtatcggtaaatgaattgtcc

SEQ ID NO: 4396973 - DNA, 25 bp, Homo sapien
caagatgttgatcgaggcctttcta

SEQ ID NO: 4396974 - DNA, 25 bp, Homo sapien
caagtgttgtcgagtccttctcaaa

SEQ ID NO: 4396975 - DNA, 25 bp, Homo sapien
tagtttcaagtgtcagtatttaatg

SEQ ID NO: 4396976 - DNA, 25 bp, Homo sapien
ttcagcttgaagaccaatacttagg

SEQ ID NO: 4396977 - DNA, 25 bp, Homo sapien
gattccctcagtttcgcttctctgg

SEQ ID NO: 4396978 - DNA, 25 bp, Homo sapien
tgaggaacaggaagtggtgacctcc

SEQ ID NO: 4396979 - DNA, 25 bp, Homo sapien
tccgataaatttgtagagagtggcg

SEQ ID NO: 4396980 - DNA, 25 bp, Homo sapien
gagtcctcattaatatgcccctgtg

SEQ ID NO: 4396981 - DNA, 25 bp, Homo sapien
gacctcctgaacatgtgtatgtaaa

SEQ ID NO: 4396982 - DNA, 25 bp, Homo sapien
aacagctctgtaataattcctgcag

SEQ ID NO: 4396983 - DNA, 25 bp, Homo sapien
tcatttaagtggctggtctgtatta

SEQ ID NO: 4396984 - DNA, 25 bp, Homo sapien
gaaggtggacttcacttgtgcaact

SEQ ID NO: 4396985 - DNA, 25 bp, Homo sapien
tacagcagtagtcacttgattctca

SEQ ID NO: 4396986 - DNA, 25 bp, Homo sapien
gatgattggctgtaaaatcttcacc

SEQ ID NO: 4396987 - DNA, 25 bp, Homo sapien
tatggtgcattcagtttactccaca

SEQ ID NO: 4396988 - DNA, 25 bp, Homo sapien
tgtgccaaattggaaatacccacta

SEQ ID NO: 4396989 - DNA, 25 bp, Homo sapien
gataatagaatagaacttgcagcca

SEQ ID NO: 4396990 - DNA, 25 bp, Homo sapien
gactgtcctgttaatgctgcatggg

SEQ ID NO: 4396991 - DNA, 25 bp, Homo sapien
taatatgggcaggtagaagcaaact

SEQ ID NO: 4396992 - DNA, 25 bp, Homo sapien
tccatggcgagaggtaagaatatta

SEQ ID NO: 4396993 - DNA, 25 bp, Homo sapien
gaagaatctcttttatccatggcga

SEQ ID NO: 4396994 - DNA, 25 bp, Homo sapien
gagtcacttttacaatgagacctgc

SEQ ID NO: 4396995 - DNA, 25 bp, Homo sapien
gagacctgcactttatgccagcact

SEQ ID NO: 4396996 - DNA, 25 bp, Homo sapien
cactgtttgtgaggagcagtactgc

SEQ ID NO: 4396997 - DNA, 25 bp, Homo sapien
taaattagtttgactctgactgatg

SEQ ID NO: 4396998 - DNA, 25 bp, Homo sapien
tgagatataacattcacagatgatc

SEQ ID NO: 4396999 - DNA, 25 bp, Homo sapien
gatgatccccaagtatccttgtcat

SEQ ID NO: 4397000 - DNA, 25 bp, Homo sapien
tgactgacagtcagctttccattga

SEQ ID NO: 4397001 - DNA, 25 bp, Homo sapien
ttcctttatgtgactgacagtcagc

SEQ ID NO: 4397002 - DNA, 25 bp, Homo sapien
tttcatgttgtctgtccacctctga

SEQ ID NO: 4397003 - DNA, 25 bp, Homo sapien
gaccaaaaagactggtagaaggaga

SEQ ID NO: 4397004 - DNA, 25 bp, Homo sapien
caaaaagactggtagaaggagagaa

SEQ ID NO: 4397005 - DNA, 25 bp, Homo sapien
tatttcatgttgtctgtccacctct

SEQ ID NO: 4397006 - DNA, 25 bp, Homo sapien
gattctgtttgatgccacaggctaa

SEQ ID NO: 4397007 - DNA, 25 bp, Homo sapien
catagcatagagaaccagcactgtg

SEQ ID NO: 4397008 - DNA, 25 bp, Homo sapien
agaatttcaccaacacccttgtgta

SEQ ID NO: 4397009 - DNA, 25 bp, Homo sapien
gttgagttgtagaaatatatggccc

SEQ ID NO: 4397010 - DNA, 25 bp, Homo sapien
gtattctataagtctgtgtgctttg

SEQ ID NO: 4397011 - DNA, 25 bp, Homo sapien
taattcatctatgcaaacttgtgtt

SEQ ID NO: 4397012 - DNA, 25 bp, Homo sapien
tcctggatggtttgaccaaggtaaa

SEQ ID NO: 4397013 - DNA, 25 bp, Homo sapien
tctttaaacatcaggtttaatattg

SEQ ID NO: 4397014 - DNA, 25 bp, Homo sapien
tggactactacaaatcctagaacca

SEQ ID NO: 4397015 - DNA, 25 bp, Homo sapien
ggactactacaaatcctagaaccat

SEQ ID NO: 4397016 - DNA, 25 bp, Homo sapien
caaccgtctttgtccattgaaaagg

SEQ ID NO: 4397017 - DNA, 25 bp, Homo sapien
tcaaccgtctttgtccattgaaaag

SEQ ID NO: 4397018 - DNA, 25 bp, Homo sapien
gactgaactgtttctttacatgttg

SEQ ID NO: 4397019 - DNA, 25 bp, Homo sapien
agactgaactgtttctttacatgtt

SEQ ID NO: 4397020 - DNA, 25 bp, Homo sapien
cagactgaactgtttctttacatgt

SEQ ID NO: 4397021 - DNA, 25 bp, Homo sapien
tgatgacaggggcttgcccttccaa

SEQ ID NO: 4397022 - DNA, 25 bp, Homo sapien
gcctttgaatctgacaccaggacca

SEQ ID NO: 4397023 - DNA, 25 bp, Homo sapien
cccttccaaggggagatcgcctttg

SEQ ID NO: 4397024 - DNA, 25 bp, Homo sapien
gagatcgcctttggcaggagtaagt

SEQ ID NO: 4397025 - DNA, 25 bp, Homo sapien
tctgtgagtttgatgtttgaggcca

SEQ ID NO: 4397026 - DNA, 25 bp, Homo sapien
tgtctgtgagtttgatgtttgaggc

SEQ ID NO: 4397027 - DNA, 25 bp, Homo sapien
ctgtgagtttgatgtttgaggccat

SEQ ID NO: 4397028 - DNA, 25 bp, Homo sapien
gtctgtgagtttgatgtttgaggcc

SEQ ID NO: 4397029 - DNA, 25 bp, Homo sapien
aggtctcttgttggttaattcaaca

SEQ ID NO: 4397030 - DNA, 25 bp, Homo sapien
caatctgggcttagaaggacttctt

SEQ ID NO: 4397031 - DNA, 25 bp, Homo sapien
cagttcttgtcgaagggacacagct

SEQ ID NO: 4397032 - DNA, 25 bp, Homo sapien
aaaggaacacagttcttgtcgaagg

SEQ ID NO: 4397033 - DNA, 25 bp, Homo sapien
tactcattttgtgtgatcttaggaa

SEQ ID NO: 4397034 - DNA, 25 bp, Homo sapien
tttctttccatactcattttgtgtg

SEQ ID NO: 4397035 - DNA, 25 bp, Homo sapien
ggtaaaggtttgatgcacaagtaac

SEQ ID NO: 4397036 - DNA, 25 bp, Homo sapien
atggtaaaggtttgatgcacaagta

SEQ ID NO: 4397037 - DNA, 25 bp, Homo sapien
tactcagcaggtcagtacttttctc

SEQ ID NO: 4397038 - DNA, 25 bp, Homo sapien
agcaggtcagtacttttctctccat

SEQ ID NO: 4397039 - DNA, 25 bp, Homo sapien
ttattgtttactcagcaggtcagta

SEQ ID NO: 4397040 - DNA, 25 bp, Homo sapien
tgtttactcagcaggtcagtacttt

SEQ ID NO: 4397041 - DNA, 25 bp, Homo sapien
ctggcaaactgttcaacatctatct

SEQ ID NO: 4397042 - DNA, 25 bp, Homo sapien
ctcccaatccgtgatttctcaaaat

SEQ ID NO: 4397043 - DNA, 25 bp, Homo sapien
taatctcccaatccgtgatttctca

SEQ ID NO: 4397044 - DNA, 25 bp, Homo sapien
gttcaacatctatcttccagcgtgc

SEQ ID NO: 4397045 - DNA, 25 bp, Homo sapien
catctgatcgaggatataaaataag

SEQ ID NO: 4397046 - DNA, 25 bp, Homo sapien
atctgatcgaggatataaaataagt

SEQ ID NO: 4397047 - DNA, 25 bp, Homo sapien
gttcatctttcatggcattactata

SEQ ID NO: 4397048 - DNA, 25 bp, Homo sapien
ccttgtgaaggctggtccccaggtg

SEQ ID NO: 4397049 - DNA, 25 bp, Homo sapien
ctgtttttcggagttagttcatctt

SEQ ID NO: 4397050 - DNA, 25 bp, Homo sapien
ccaggtggtcaaggcatagccttct

SEQ ID NO: 4397051 - DNA, 25 bp, Homo sapien
cttaggccagttctacagaggttag

SEQ ID NO: 4397052 - DNA, 25 bp, Homo sapien
taggccagttctacagaggttagcc

SEQ ID NO: 4397053 - DNA, 25 bp, Homo sapien
tgatattcttaggccagttctacag

SEQ ID NO: 4397054 - DNA, 25 bp, Homo sapien
ggccagttctacagaggttagccat

SEQ ID NO: 4397055 - DNA, 25 bp, Homo sapien
actgtcctctgtactcactgggcct

SEQ ID NO: 4397056 - DNA, 25 bp, Homo sapien
tgtcctctgtactcactgggccttc

SEQ ID NO: 4397057 - DNA, 25 bp, Homo sapien
gtcctctgtactcactgggccttca

SEQ ID NO: 4397058 - DNA, 25 bp, Homo sapien
cactgtcctctgtactcactgggcc

SEQ ID NO: 4397059 - DNA, 25 bp, Homo sapien
tcaattattacatctgtatcccaaa

SEQ ID NO: 4397060 - DNA, 25 bp, Homo sapien
aattattacatctgtatcccaaagt

SEQ ID NO: 4397061 - DNA, 25 bp, Homo sapien
attcaattattacatctgtatccca

SEQ ID NO: 4397062 - DNA, 25 bp, Homo sapien
caattattacatctgtatcccaaag

SEQ ID NO: 4397063 - DNA, 25 bp, Homo sapien
atggggagaagggtcattagggaat

SEQ ID NO: 4397064 - DNA, 25 bp, Homo sapien
gaaatgatggggagaagggtcatta

SEQ ID NO: 4397065 - DNA, 25 bp, Homo sapien
aatgatggggagaagggtcattagg

SEQ ID NO: 4397066 - DNA, 25 bp, Homo sapien
tgatggggagaagggtcattaggga

SEQ ID NO: 4397067 - DNA, 25 bp, Homo sapien
gagctaccattctgctagcaccata

SEQ ID NO: 4397068 - DNA, 25 bp, Homo sapien
tctgctagcaccatagtcactgacc

SEQ ID NO: 4397069 - DNA, 25 bp, Homo sapien
ttctcttaactgagctaccattctg

SEQ ID NO: 4397070 - DNA, 25 bp, Homo sapien
tttgacttatgattgttcagaagtc

SEQ ID NO: 4397071 - DNA, 25 bp, Homo sapien
gtagtatgtagaaacccacaaagct

SEQ ID NO: 4397072 - DNA, 25 bp, Homo sapien
tatgtagaaacccacaaagctgttt

SEQ ID NO: 4397073 - DNA, 25 bp, Homo sapien
tctttctactgtttgtattgcattt

SEQ ID NO: 4397074 - DNA, 25 bp, Homo sapien
tctactgtttgtattgcattttcct

SEQ ID NO: 4397075 - DNA, 25 bp, Homo sapien
gttctggatgaagactagtcgggat

SEQ ID NO: 4397076 - DNA, 25 bp, Homo sapien
caatgacagtaattgaaggcactgg

SEQ ID NO: 4397077 - DNA, 25 bp, Homo sapien
tccaataaggcagtatgaacctggg

SEQ ID NO: 4397078 - DNA, 25 bp, Homo sapien
actagtcgggatattgtgtcaatga

SEQ ID NO: 4397079 - DNA, 25 bp, Homo sapien
gctttgacagctcgtcaggaataaa

SEQ ID NO: 4397080 - DNA, 25 bp, Homo sapien
tgtacatagggtggcaatcttcctt

SEQ ID NO: 4397081 - DNA, 25 bp, Homo sapien
gctgctttgacagctcgtcaggaat

SEQ ID NO: 4397082 - DNA, 25 bp, Homo sapien
tccttcttggatattgtacataggg

SEQ ID NO: 4397083 - DNA, 25 bp, Homo sapien
gcccgtgtgaaacactaattccatc

SEQ ID NO: 4397084 - DNA, 25 bp, Homo sapien
gctgttttgcaagagccgtagcaga

SEQ ID NO: 4397085 - DNA, 25 bp, Homo sapien
ccgtagcagatttagaggcaaagca

SEQ ID NO: 4397086 - DNA, 25 bp, Homo sapien
tgatgagcatcataggcataaagcc

SEQ ID NO: 4397087 - DNA, 25 bp, Homo sapien
cttgttgtgactaatcagttggaaa

SEQ ID NO: 4397088 - DNA, 25 bp, Homo sapien
gttgtgactaatcagttggaaacac

SEQ ID NO: 4397089 - DNA, 25 bp, Homo sapien
ttgtgactaatcagttggaaacacc

SEQ ID NO: 4397090 - DNA, 25 bp, Homo sapien
tgactaatcagttggaaacaccacc

SEQ ID NO: 4397091 - DNA, 25 bp, Homo sapien
taattccctgatgtaagatttgtaa

SEQ ID NO: 4397092 - DNA, 25 bp, Homo sapien
gacttgataattccctgatgtaaga

SEQ ID NO: 4397093 - DNA, 25 bp, Homo sapien
tgataattccctgatgtaagatttg

SEQ ID NO: 4397094 - DNA, 25 bp, Homo sapien
ttcaagacttgataattccctgatg

SEQ ID NO: 4397095 - DNA, 25 bp, Homo sapien
ccaaactgatacacagtacaatcga

SEQ ID NO: 4397096 - DNA, 25 bp, Homo sapien
caaactgatacacagtacaatcgat

SEQ ID NO: 4397097 - DNA, 25 bp, Homo sapien
aactgatacacagtacaatcgatca

SEQ ID NO: 4397098 - DNA, 25 bp, Homo sapien
actgatacacagtacaatcgatcat

SEQ ID NO: 4397099 - DNA, 25 bp, Homo sapien
ttttgttcctctctagagcggagca

SEQ ID NO: 4397100 - DNA, 25 bp, Homo sapien
cagatttctatgttgtgctagtgca

SEQ ID NO: 4397101 - DNA, 25 bp, Homo sapien
gagcggagcacttttgcttcaacaa

SEQ ID NO: 4397102 - DNA, 25 bp, Homo sapien
tcttccattgctagtgccagatttc

SEQ ID NO: 4397103 - DNA, 25 bp, Homo sapien
attaaccccacaactattccagaga

SEQ ID NO: 4397104 - DNA, 25 bp, Homo sapien
gacagatcgatcaggcaaaattatg

SEQ ID NO: 4397105 - DNA, 25 bp, Homo sapien
ccatgacagatcgatcaggcaaaat

SEQ ID NO: 4397106 - DNA, 25 bp, Homo sapien
caggcaaaattatgttcccagaacc

SEQ ID NO: 4397107 - DNA, 25 bp, Homo sapien
ttgggctaagctgtcctgtatccat

SEQ ID NO: 4397108 - DNA, 25 bp, Homo sapien
tgctggattgggctaagctgtcctg

SEQ ID NO: 4397109 - DNA, 25 bp, Homo sapien
cacctccgtgctggattgggctaag

SEQ ID NO: 4397110 - DNA, 25 bp, Homo sapien
ccgtgctggattgggctaagctgtc

SEQ ID NO: 4397111 - DNA, 25 bp, Homo sapien
atgtctttgcaggaaagcacttgcc

SEQ ID NO: 4397112 - DNA, 25 bp, Homo sapien
ttaacgtgttaatttgtctgccaag

SEQ ID NO: 4397113 - DNA, 25 bp, Homo sapien
tcggcctcgtaaatgtgctgcttcc

SEQ ID NO: 4397114 - DNA, 25 bp, Homo sapien
tgccttttcaggatgggtgttaaaa

SEQ ID NO: 4397115 - DNA, 25 bp, Homo sapien
tatctttgtagttgccctgctgctg

SEQ ID NO: 4397116 - DNA, 25 bp, Homo sapien
tagagacagcagtggcgtgttatcc

SEQ ID NO: 4397117 - DNA, 25 bp, Homo sapien
tcttctgggactgaacaaaaatggg

SEQ ID NO: 4397118 - DNA, 25 bp, Homo sapien
cccaatgtgtttgttagatgccacc

SEQ ID NO: 4397119 - DNA, 25 bp, Homo sapien
gactatataaaatctctgttcctca

SEQ ID NO: 4397120 - DNA, 25 bp, Homo sapien
gaaatttggcagttatagatggctt

SEQ ID NO: 4397121 - DNA, 25 bp, Homo sapien
gccctataggagtctaacttagcaa

SEQ ID NO: 4397122 - DNA, 25 bp, Homo sapien
aaatatggttttactgccctatagg

SEQ ID NO: 4397123 - DNA, 25 bp, Homo sapien
gtatgtacaaaccactggaaaacaa

SEQ ID NO: 4397124 - DNA, 25 bp, Homo sapien
tgaagtgaagttctgacaattttct

SEQ ID NO: 4397125 - DNA, 25 bp, Homo sapien
tctcaagtcgttctttaaccatgaa

SEQ ID NO: 4397126 - DNA, 25 bp, Homo sapien
tgtacaaaccactggaaaacaatca

SEQ ID NO: 4397127 - DNA, 25 bp, Homo sapien
gatacacttttaacatcggttctga

SEQ ID NO: 4397128 - DNA, 25 bp, Homo sapien
ctctaatactttgaaaggattcatc

SEQ ID NO: 4397129 - DNA, 25 bp, Homo sapien
ttaacatcggttctgaattcttctc

SEQ ID NO: 4397130 - DNA, 25 bp, Homo sapien
tttccactttgtgagtgtagcccat

SEQ ID NO: 4397131 - DNA, 25 bp, Homo sapien
tcatgtagcaccaacaagaacccag

SEQ ID NO: 4397132 - DNA, 25 bp, Homo sapien
tcagataggtagcagcaccaggtcc

SEQ ID NO: 4397133 - DNA, 25 bp, Homo sapien
caaaatcagataggtagcagcacca

SEQ ID NO: 4397134 - DNA, 25 bp, Homo sapien
cagagatacaaaatcagataggtag

SEQ ID NO: 4397135 - DNA, 25 bp, Homo sapien
tctcggcagcgtcttctccgggtct

SEQ ID NO: 4397136 - DNA, 25 bp, Homo sapien
aagtcgcctagggaaacagcctcct

SEQ ID NO: 4397137 - DNA, 25 bp, Homo sapien
gttggaagtcgcctagggaaacagc

SEQ ID NO: 4397138 - DNA, 25 bp, Homo sapien
cccagccaggcggatgtggaagtac

SEQ ID NO: 4397139 - DNA, 25 bp, Homo sapien
cagtgacacatgtgatgtgacggcg

SEQ ID NO: 4397140 - DNA, 25 bp, Homo sapien
aaggtatgggtatacttcacagggt

SEQ ID NO: 4397141 - DNA, 25 bp, Homo sapien
ggcgcctcccaggaggttgtcttcg

SEQ ID NO: 4397142 - DNA, 25 bp, Homo sapien
cacagggttgattaccagggagatg

SEQ ID NO: 4397143 - DNA, 25 bp, Homo sapien
catcctgggcatcgccacgatggtg

SEQ ID NO: 4397144 - DNA, 25 bp, Homo sapien
gcatcgccacgatggtgaaggcgat

SEQ ID NO: 4397145 - DNA, 25 bp, Homo sapien
tgctcttcctcctacgtactccacg

SEQ ID NO: 4397146 - DNA, 25 bp, Homo sapien
tacgtactccacgaggctctggcag

SEQ ID NO: 4397147 - DNA, 25 bp, Homo sapien
tctctttttgtgcctcttttctttc

SEQ ID NO: 4397148 - DNA, 25 bp, Homo sapien
tttttgtgcctcttttctttcctca

SEQ ID NO: 4397149 - DNA, 25 bp, Homo sapien
ttttgtgcctcttttctttcctcat

SEQ ID NO: 4397150 - DNA, 25 bp, Homo sapien
cttctctttttgtgcctcttttctt

SEQ ID NO: 4397151 - DNA, 25 bp, Homo sapien
ccgctggccgtatcaatggtgtctt

SEQ ID NO: 4397152 - DNA, 25 bp, Homo sapien
tggccgtatcaatggtgtctttcat

SEQ ID NO: 4397153 - DNA, 25 bp, Homo sapien
cgctggccgtatcaatggtgtcttt

SEQ ID NO: 4397154 - DNA, 25 bp, Homo sapien
gctggccgtatcaatggtgtctttc

SEQ ID NO: 4397155 - DNA, 25 bp, Homo sapien
gctctgcatgtaacactgaactggc

SEQ ID NO: 4397156 - DNA, 25 bp, Homo sapien
tcttgtcattggataacccttggaa

SEQ ID NO: 4397157 - DNA, 25 bp, Homo sapien
ggtgtaaccctcctgagatctgtag

SEQ ID NO: 4397158 - DNA, 25 bp, Homo sapien
gatggacataggtgcacagctctgc

SEQ ID NO: 4397159 - DNA, 25 bp, Homo sapien
ataaaattgatgaaccattagcatg

SEQ ID NO: 4397160 - DNA, 25 bp, Homo sapien
aagtctcctatcttaactcagaaag

SEQ ID NO: 4397161 - DNA, 25 bp, Homo sapien
attgatgaaccattagcatgattca

SEQ ID NO: 4397162 - DNA, 25 bp, Homo sapien
tcttaactcagaaagaattagatac

SEQ ID NO: 4397163 - DNA, 25 bp, Homo sapien
ttatctacaaacgtataagacagac

SEQ ID NO: 4397164 - DNA, 25 bp, Homo sapien
tcccttatctacaaacgtataagac

SEQ ID NO: 4397165 - DNA, 25 bp, Homo sapien
cacacatgctttatgaacaatttgt

SEQ ID NO: 4397166 - DNA, 25 bp, Homo sapien
taggcctgggagtgctgcgggagac

SEQ ID NO: 4397167 - DNA, 25 bp, Homo sapien
ccaagactctttcagtaaaacagca

SEQ ID NO: 4397168 - DNA, 25 bp, Homo sapien
gaaccaagactctttcagtaaaaca

SEQ ID NO: 4397169 - DNA, 25 bp, Homo sapien
cttgtctgaaagtctaggaaccaga

SEQ ID NO: 4397170 - DNA, 25 bp, Homo sapien
catctttcatctcactcaacttgtc

SEQ ID NO: 4397171 - DNA, 25 bp, Homo sapien
caacagtagtagtagaacagcaggc

SEQ ID NO: 4397172 - DNA, 25 bp, Homo sapien
tttgaagtacataaaggaaacgtca

SEQ ID NO: 4397173 - DNA, 25 bp, Homo sapien
aggaaacgtcaacaagacacacaac

SEQ ID NO: 4397174 - DNA, 25 bp, Homo sapien
tgaagtacataaaggaaacgtcaac

SEQ ID NO: 4397175 - DNA, 25 bp, Homo sapien
gaaagcccgaagtgtctattgcttc

SEQ ID NO: 4397176 - DNA, 25 bp, Homo sapien
tcctgttgccacagttacatgaaag

SEQ ID NO: 4397177 - DNA, 25 bp, Homo sapien
cagttacatgaaagcccgaagtgtc

SEQ ID NO: 4397178 - DNA, 25 bp, Homo sapien
tgccacagttacatgaaagcccgaa

SEQ ID NO: 4397179 - DNA, 25 bp, Homo sapien
aacaagtctattgtctgttgctgac

SEQ ID NO: 4397180 - DNA, 25 bp, Homo sapien
actgaacacaaagttctgccaagtc

SEQ ID NO: 4397181 - DNA, 25 bp, Homo sapien
caagtcttcctctaatacattatgc

SEQ ID NO: 4397182 - DNA, 25 bp, Homo sapien
tgaacacaaagttctgccaagtctt

SEQ ID NO: 4397183 - DNA, 25 bp, Homo sapien
gtaggacactctttgatattagtgc

SEQ ID NO: 4397184 - DNA, 25 bp, Homo sapien
gacactctttgatattagtgccctg

SEQ ID NO: 4397185 - DNA, 25 bp, Homo sapien
tagtgccctggagggttagtaattg

SEQ ID NO: 4397186 - DNA, 25 bp, Homo sapien
ggagggttagtaattgaacatgcat

SEQ ID NO: 4397187 - DNA, 25 bp, Homo sapien
ttttctcaatctttgcaacgaacat

SEQ ID NO: 4397188 - DNA, 25 bp, Homo sapien
catctttattttctcaatctttgca

SEQ ID NO: 4397189 - DNA, 25 bp, Homo sapien
tttattttctcaatctttgcaacga

SEQ ID NO: 4397190 - DNA, 25 bp, Homo sapien
tattttctcaatctttgcaacgaac

SEQ ID NO: 4397191 - DNA, 25 bp, Homo sapien
gtgagagaagatgcaagttgagaca

SEQ ID NO: 4397192 - DNA, 25 bp, Homo sapien
aaagcatcgtatttttactgacagg

SEQ ID NO: 4397193 - DNA, 25 bp, Homo sapien
taaaacattgattgggtgatcataa

SEQ ID NO: 4397194 - DNA, 25 bp, Homo sapien
ctgacaggagaccaaaacagtcaat

SEQ ID NO: 4397195 - DNA, 25 bp, Homo sapien
tgggatctggcaataactgcgtgtc

SEQ ID NO: 4397196 - DNA, 25 bp, Homo sapien
gttacatttacaacataccacggca

SEQ ID NO: 4397197 - DNA, 25 bp, Homo sapien
ttttcaaggccatagtaaccaccaa

SEQ ID NO: 4397198 - DNA, 25 bp, Homo sapien
tcttcgtcgggttgcaaggagttgc

SEQ ID NO: 4397199 - DNA, 25 bp, Homo sapien
ggtgaaatataagaaacgcaatctc

SEQ ID NO: 4397200 - DNA, 25 bp, Homo sapien
tggtgaaatataagaaacgcaatct

SEQ ID NO: 4397201 - DNA, 25 bp, Homo sapien
ttggtgaaatataagaaacgcaatc

SEQ ID NO: 4397202 - DNA, 25 bp, Homo sapien
ctggaagccagtggcaaactgtggc

SEQ ID NO: 4397203 - DNA, 25 bp, Homo sapien
ggaagccagtggcaaactgtggcac

SEQ ID NO: 4397204 - DNA, 25 bp, Homo sapien
tccacttcctggcagctggatgagg

SEQ ID NO: 4397205 - DNA, 25 bp, Homo sapien
cctttccacttcctggcagctggat

SEQ ID NO: 4397206 - DNA, 25 bp, Homo sapien
gcccctgctgaatcatgactcaata

SEQ ID NO: 4397207 - DNA, 25 bp, Homo sapien
ttcttcaaaagcgttcaagtgagag

SEQ ID NO: 4397208 - DNA, 25 bp, Homo sapien
gctgtttggtctgccattaatgaca

SEQ ID NO: 4397209 - DNA, 25 bp, Homo sapien
gactcaatagcagtactttttcttc

SEQ ID NO: 4397210 - DNA, 25 bp, Homo sapien
taaccttgtattggagctaatacca

SEQ ID NO: 4397211 - DNA, 25 bp, Homo sapien
tcgtctacgtgcatgagcatctcag

SEQ ID NO: 4397212 - DNA, 25 bp, Homo sapien
ccaattctagccatgggagtatgtt

SEQ ID NO: 4397213 - DNA, 25 bp, Homo sapien
aaacgttttacaaatctgagctcag

SEQ ID NO: 4397214 - DNA, 25 bp, Homo sapien
tggcaccgcaggactaccaatctag

SEQ ID NO: 4397215 - DNA, 25 bp, Homo sapien
tgaggcccataaagcatcacattgc

SEQ ID NO: 4397216 - DNA, 25 bp, Homo sapien
agaaatcagtgctcccaaattagga

SEQ ID NO: 4397217 - DNA, 25 bp, Homo sapien
tccaatttgcggaagcacaaaagtc

SEQ ID NO: 4397218 - DNA, 25 bp, Homo sapien
gagccagtgtcccatagtgttgaag

SEQ ID NO: 4397219 - DNA, 25 bp, Homo sapien
ccacctggacatggcactggcaaaa

SEQ ID NO: 4397220 - DNA, 25 bp, Homo sapien
tgaaatacggcaaccaatggcaagg

SEQ ID NO: 4397221 - DNA, 25 bp, Homo sapien
gagggcctagagcttctgcaaagtg

SEQ ID NO: 4397222 - DNA, 25 bp, Homo sapien
ttttcttgtcctacacaaaggaaga

SEQ ID NO: 4397223 - DNA, 25 bp, Homo sapien
tagccactaggtcttgcgttgtcat

SEQ ID NO: 4397224 - DNA, 25 bp, Homo sapien
tctttgtgcacgtgaattttctacc

SEQ ID NO: 4397225 - DNA, 25 bp, Homo sapien
cacattgcaacaagcaagctttggt

SEQ ID NO: 4397226 - DNA, 25 bp, Homo sapien
cctccattcatggttggtgttccag

SEQ ID NO: 4397227 - DNA, 25 bp, Homo sapien
tagcgatggttctctgtacatacac

SEQ ID NO: 4397228 - DNA, 25 bp, Homo sapien
ttctccaatttcatgtagcgatggt

SEQ ID NO: 4397229 - DNA, 25 bp, Homo sapien
ccattcatggttggtgttccagaac

SEQ ID NO: 4397230 - DNA, 25 bp, Homo sapien
ctcccttcagtaatataactgcctt

SEQ ID NO: 4397231 - DNA, 25 bp, Homo sapien
cccttcagtaatataactgccttac

SEQ ID NO: 4397232 - DNA, 25 bp, Homo sapien
tcccttcagtaatataactgcctta

SEQ ID NO: 4397233 - DNA, 25 bp, Homo sapien
gaagagccagcaattccccaataat

SEQ ID NO: 4397234 - DNA, 25 bp, Homo sapien
tgtggccactgagcacgtacaatgt

SEQ ID NO: 4397235 - DNA, 25 bp, Homo sapien
gaagtgactattaaagccagaggtg

SEQ ID NO: 4397236 - DNA, 25 bp, Homo sapien
atataactgaggaggtacagggcga

SEQ ID NO: 4397237 - DNA, 25 bp, Homo sapien
gcctagcttgaacatggcattccat

SEQ ID NO: 4397238 - DNA, 25 bp, Homo sapien
tgcatcatagtataaggtttctgct

SEQ ID NO: 4397239 - DNA, 25 bp, Homo sapien
tcatatcatgtattcctgtctcaat

SEQ ID NO: 4397240 - DNA, 25 bp, Homo sapien
gaagtgatgcattgttaattctttc

SEQ ID NO: 4397241 - DNA, 25 bp, Homo sapien
tttggaagtaattatcatcatattc

SEQ ID NO: 4397242 - DNA, 25 bp, Homo sapien
tatcatcatattctatatgcttcac

SEQ ID NO: 4397243 - DNA, 25 bp, Homo sapien
tcatttttggaagtaattatcatca

SEQ ID NO: 4397244 - DNA, 25 bp, Homo sapien
tggaagtaattatcatcatattcta

SEQ ID NO: 4397245 - DNA, 25 bp, Homo sapien
tcccagaaaccaagctcggcctgat

SEQ ID NO: 4397246 - DNA, 25 bp, Homo sapien
tcggtacaaaatgtgatgagggctt

SEQ ID NO: 4397247 - DNA, 25 bp, Homo sapien
cggcctgattcttgctggcggtaca

SEQ ID NO: 4397248 - DNA, 25 bp, Homo sapien
gcggtacagtgtggaagaatagatc

SEQ ID NO: 4397249 - DNA, 25 bp, Homo sapien
tgcatgctttccaactcaagtagga

SEQ ID NO: 4397250 - DNA, 25 bp, Homo sapien
taggaatacagcacttggtagcact

SEQ ID NO: 4397251 - DNA, 25 bp, Homo sapien
tacacgataccataaccataattca

SEQ ID NO: 4397252 - DNA, 25 bp, Homo sapien
ggtagcactgtatagttaatataat

SEQ ID NO: 4397253 - DNA, 25 bp, Homo sapien
taggctctccagaagatgatgacat

SEQ ID NO: 4397254 - DNA, 25 bp, Homo sapien
gaatgaaggatgtaggctctccaga

SEQ ID NO: 4397255 - DNA, 25 bp, Homo sapien
gctggaatgaaggatgtaggctctc

SEQ ID NO: 4397256 - DNA, 25 bp, Homo sapien
gatgtaggctctccagaagatgatg

SEQ ID NO: 4397257 - DNA, 25 bp, Homo sapien
caagcctgcatggactgtcactcca

SEQ ID NO: 4397258 - DNA, 25 bp, Homo sapien
tgctcagactcaatcaagcctgcat

SEQ ID NO: 4397259 - DNA, 25 bp, Homo sapien
ctgctcagactcaatcaagcctgca

SEQ ID NO: 4397260 - DNA, 25 bp, Homo sapien
gagagccagtgcatgaagtttagga

SEQ ID NO: 4397261 - DNA, 25 bp, Homo sapien
gagaaaagctaaatcttgtaagtgg

SEQ ID NO: 4397262 - DNA, 25 bp, Homo sapien
catgaagtttaggaataaaggataa

SEQ ID NO: 4397263 - DNA, 25 bp, Homo sapien
catctgagaaaagctaaatcttgta

SEQ ID NO: 4397264 - DNA, 25 bp, Homo sapien
tggaatatacacataaacctctggg

SEQ ID NO: 4397265 - DNA, 25 bp, Homo sapien
aatgactttgctaataacagccccg

SEQ ID NO: 4397266 - DNA, 25 bp, Homo sapien
gaagtcattactgcctgtcagtcag

SEQ ID NO: 4397267 - DNA, 25 bp, Homo sapien
tatccaacagaaagttccaatgcag

SEQ ID NO: 4397268 - DNA, 25 bp, Homo sapien
gattattagctgtcacgcccaccta

SEQ ID NO: 4397269 - DNA, 25 bp, Homo sapien
agttcagattattagctgtcacgcc

SEQ ID NO: 4397270 - DNA, 25 bp, Homo sapien
ttagacatgtcaggggcctccctga

SEQ ID NO: 4397271 - DNA, 25 bp, Homo sapien
cagattattagctgtcacgcccacc

SEQ ID NO: 4397272 - DNA, 25 bp, Homo sapien
tctaggtattagatgaaggtcaccc

SEQ ID NO: 4397273 - DNA, 25 bp, Homo sapien
gaaatggtatacctctgcactgtct

SEQ ID NO: 4397274 - DNA, 25 bp, Homo sapien
tgatccaaccaatgatagatggcaa

SEQ ID NO: 4397275 - DNA, 25 bp, Homo sapien
tttagccccacacacggcagatctg

SEQ ID NO: 4397276 - DNA, 25 bp, Homo sapien
ttggatcttcgtggcccatttattc

SEQ ID NO: 4397277 - DNA, 25 bp, Homo sapien
tcactgaccgttgtggaagctgtgg

SEQ ID NO: 4397278 - DNA, 25 bp, Homo sapien
gcatttgactgtgagtgagctctga

SEQ ID NO: 4397279 - DNA, 25 bp, Homo sapien
tgactctcaatagattggatcttcg

SEQ ID NO: 4397280 - DNA, 25 bp, Homo sapien
tgaagatcctctaactgagttcatt

SEQ ID NO: 4397281 - DNA, 25 bp, Homo sapien
ttgaagatcctctaactgagttcat

SEQ ID NO: 4397282 - DNA, 25 bp, Homo sapien
aagatcctctaactgagttcattct

SEQ ID NO: 4397283 - DNA, 25 bp, Homo sapien
gaagatcctctaactgagttcattc

SEQ ID NO: 4397284 - DNA, 25 bp, Homo sapien
tcctgaatgcaagccaagtcataaa

SEQ ID NO: 4397285 - DNA, 25 bp, Homo sapien
gaattcttcagtgacttgccattga

SEQ ID NO: 4397286 - DNA, 25 bp, Homo sapien
cacttggattgaccaaactttgtct

SEQ ID NO: 4397287 - DNA, 25 bp, Homo sapien
tatattcagtctactccacctagca

SEQ ID NO: 4397288 - DNA, 25 bp, Homo sapien
ttccctagaaaccaaggagatgcca

SEQ ID NO: 4397289 - DNA, 25 bp, Homo sapien
ataagattccctttccagagagggt

SEQ ID NO: 4397290 - DNA, 25 bp, Homo sapien
aataagattccctttccagagaggg

SEQ ID NO: 4397291 - DNA, 25 bp, Homo sapien
tgtttaactgtaggtaataagattc

SEQ ID NO: 4397292 - DNA, 25 bp, Homo sapien
cagaagaaaggaatacgtactcaga

SEQ ID NO: 4397293 - DNA, 25 bp, Homo sapien
tcaatctctatagggtattcacatg

SEQ ID NO: 4397294 - DNA, 25 bp, Homo sapien
acaactgtgttgcagtgctcactac

SEQ ID NO: 4397295 - DNA, 25 bp, Homo sapien
tgtattcagagcacggaagtccacc

SEQ ID NO: 4397296 - DNA, 25 bp, Homo sapien
ttgcttgcagaacctacaactgtgt

SEQ ID NO: 4397297 - DNA, 25 bp, Homo sapien
cactggtatcgctgctaatagcacc

SEQ ID NO: 4397298 - DNA, 25 bp, Homo sapien
taagaatccctgaaggctcacctgg

SEQ ID NO: 4397299 - DNA, 25 bp, Homo sapien
ggaatccctagacttcacaagactg

SEQ ID NO: 4397300 - DNA, 25 bp, Homo sapien
ggacatatctgtcattgaggccgat

SEQ ID NO: 4397301 - DNA, 25 bp, Homo sapien
aaatgcccagaagttgaaaaaccag

SEQ ID NO: 4397302 - DNA, 25 bp, Homo sapien
gatagttccgagaaggaaaatgccc

SEQ ID NO: 4397303 - DNA, 25 bp, Homo sapien
tccaagtgagttatataaggagata

SEQ ID NO: 4397304 - DNA, 25 bp, Homo sapien
ccagaagttgaaaaaccaggtcatc

SEQ ID NO: 4397305 - DNA, 25 bp, Homo sapien
ccaaaggtcctcattagtgctgctc

SEQ ID NO: 4397306 - DNA, 25 bp, Homo sapien
gttcttgggttgacagaattccata

SEQ ID NO: 4397307 - DNA, 25 bp, Homo sapien
ccaattaaggttagccctggagcta

SEQ ID NO: 4397308 - DNA, 25 bp, Homo sapien
tgtttgcaagcgataattgccaggt

SEQ ID NO: 4397309 - DNA, 25 bp, Homo sapien
gccagatattacacccataaatttc

SEQ ID NO: 4397310 - DNA, 25 bp, Homo sapien
tatttcccaagtgctgatatgccag

SEQ ID NO: 4397311 - DNA, 25 bp, Homo sapien
ttatttcccaagtgctgatatgcca

SEQ ID NO: 4397312 - DNA, 25 bp, Homo sapien
tgctgatatgccagatattacaccc

SEQ ID NO: 4397313 - DNA, 25 bp, Homo sapien
gaaaatagacggtagtcagatgagt

SEQ ID NO: 4397314 - DNA, 25 bp, Homo sapien
aatagacggtagtcagatgagtgag

SEQ ID NO: 4397315 - DNA, 25 bp, Homo sapien
tagtcagatgagtgagggcgtggga

SEQ ID NO: 4397316 - DNA, 25 bp, Homo sapien
ggtaagaaaatagacggtagtcaga

SEQ ID NO: 4397317 - DNA, 25 bp, Homo sapien
ccgtctttgacactctctcctcctg

SEQ ID NO: 4397318 - DNA, 25 bp, Homo sapien
tgagctccaaggtaccagagttttg

SEQ ID NO: 4397319 - DNA, 25 bp, Homo sapien
gagagacaggattaagacacaggag

SEQ ID NO: 4397320 - DNA, 25 bp, Homo sapien
cagacggagttcagaggagacttga

SEQ ID NO: 4397321 - DNA, 25 bp, Homo sapien
tctttggcaggtccgagcttaggca

SEQ ID NO: 4397322 - DNA, 25 bp, Homo sapien
tggatggccactacacgcaggccca

SEQ ID NO: 4397323 - DNA, 25 bp, Homo sapien
caggcccacgggaattagattgaag

SEQ ID NO: 4397324 - DNA, 25 bp, Homo sapien
tgtagagatagccttcaccattcat

SEQ ID NO: 4397325 - DNA, 25 bp, Homo sapien
ttcatggccacatagaggctagcct

SEQ ID NO: 4397326 - DNA, 25 bp, Homo sapien
tcagtgaacagcacaggtgacggtc

SEQ ID NO: 4397327 - DNA, 25 bp, Homo sapien
gagcccgtctggtctgaagaattca

SEQ ID NO: 4397328 - DNA, 25 bp, Homo sapien
acagacttgtcttggagcccgtctg

SEQ ID NO: 4397329 - DNA, 25 bp, Homo sapien
ggtgacggtccataagatcaatggg

SEQ ID NO: 4397330 - DNA, 25 bp, Homo sapien
ggaaaagacactagcttactaatag

SEQ ID NO: 4397331 - DNA, 25 bp, Homo sapien
tttaagtataagatacactgggccc

SEQ ID NO: 4397332 - DNA, 25 bp, Homo sapien
gaaaggcatagtttggtaaggcagc

SEQ ID NO: 4397333 - DNA, 25 bp, Homo sapien
gcagcttagcaatgctttaagtata

SEQ ID NO: 4397334 - DNA, 25 bp, Homo sapien
cgctgttttcgtccttggtcccatc

SEQ ID NO: 4397335 - DNA, 25 bp, Homo sapien
tgtcacaatccctttgagctggggt

SEQ ID NO: 4397336 - DNA, 25 bp, Homo sapien
gcaggaagtatccctgctggctgaa

SEQ ID NO: 4397337 - DNA, 25 bp, Homo sapien
ctaaatacttcatcagagaggagcc

SEQ ID NO: 4397338 - DNA, 25 bp, Homo sapien
ctggtggagccatcccctgttggag

SEQ ID NO: 4397339 - DNA, 25 bp, Homo sapien
cctggtggagccatcccctgttgga

SEQ ID NO: 4397340 - DNA, 25 bp, Homo sapien
gctcaggataatgagcatcagactc

SEQ ID NO: 4397341 - DNA, 25 bp, Homo sapien
ctgctcaggataatgagcatcagac

SEQ ID NO: 4397342 - DNA, 25 bp, Homo sapien
ggataatgagcatcagactctgagc

SEQ ID NO: 4397343 - DNA, 25 bp, Homo sapien
tcaggataatgagcatcagactctg

SEQ ID NO: 4397344 - DNA, 25 bp, Homo sapien
ctggacttttgaacacactgaaaaa

SEQ ID NO: 4397345 - DNA, 25 bp, Homo sapien
gctctgtggagtaaagtgagtcatg

SEQ ID NO: 4397346 - DNA, 25 bp, Homo sapien
tcatcttcgatctccccattggtca

SEQ ID NO: 4397347 - DNA, 25 bp, Homo sapien
caaatgaagacgagagacaccatca

SEQ ID NO: 4397348 - DNA, 25 bp, Homo sapien
taaggctgaagacgtgtcactctag

SEQ ID NO: 4397349 - DNA, 25 bp, Homo sapien
tgaatataatgcctctggcctctaa

SEQ ID NO: 4397350 - DNA, 25 bp, Homo sapien
ggcctctaatgcgtttcttccaatt

SEQ ID NO: 4397351 - DNA, 25 bp, Homo sapien
tccaaagccctgagttgcctcacat

SEQ ID NO: 4397352 - DNA, 25 bp, Homo sapien
tccaattttgtcctgcacactgaac

SEQ ID NO: 4397353 - DNA, 25 bp, Homo sapien
aaatccgaatccgaatcaatcgtca

SEQ ID NO: 4397354 - DNA, 25 bp, Homo sapien
ccaaatccgaatccgaatcaatcgt

SEQ ID NO: 4397355 - DNA, 25 bp, Homo sapien
tcccaaatccgaatccgaatcaatc

SEQ ID NO: 4397356 - DNA, 25 bp, Homo sapien
aatccgaatccgaatcaatcgtcat

SEQ ID NO: 4397357 - DNA, 25 bp, Homo sapien
agaataatggcctttcttcgcttac

SEQ ID NO: 4397358 - DNA, 25 bp, Homo sapien
ctagaataatggcctttcttcgctt

SEQ ID NO: 4397359 - DNA, 25 bp, Homo sapien
tagaataatggcctttcttcgctta

SEQ ID NO: 4397360 - DNA, 25 bp, Homo sapien
aattcttagtgtggtcttctctatt

SEQ ID NO: 4397361 - DNA, 25 bp, Homo sapien
caattcttagtgtggtcttctctat

SEQ ID NO: 4397362 - DNA, 25 bp, Homo sapien
gaaatctagtgctgaccaggtcctg

SEQ ID NO: 4397363 - DNA, 25 bp, Homo sapien
aaaaagtggtgccttggacagaacg

SEQ ID NO: 4397364 - DNA, 25 bp, Homo sapien
gatcttgggaatgccagcctctcga

SEQ ID NO: 4397365 - DNA, 25 bp, Homo sapien
catctatgacttaggaagcaggccc

SEQ ID NO: 4397366 - DNA, 25 bp, Homo sapien
taaaatcacttgacgattcgaaggc

SEQ ID NO: 4397367 - DNA, 25 bp, Homo sapien
ttacaagcatggagtctgggaggcc

SEQ ID NO: 4397368 - DNA, 25 bp, Homo sapien
gaggcattaacataagtgtggttac

SEQ ID NO: 4397369 - DNA, 25 bp, Homo sapien
tcaaatgcaaaaccatcagtccaag

SEQ ID NO: 4397370 - DNA, 25 bp, Homo sapien
tctcgagttacgtcttgatgagatc

SEQ ID NO: 4397371 - DNA, 25 bp, Homo sapien
taatctcgagttacgtcttgatgag

SEQ ID NO: 4397372 - DNA, 25 bp, Homo sapien
ttaatctcgagttacgtcttgatga

SEQ ID NO: 4397373 - DNA, 25 bp, Homo sapien
aatctcgagttacgtcttgatgaga

SEQ ID NO: 4397374 - DNA, 25 bp, Homo sapien
gactttgtagttcagatatgagtca

SEQ ID NO: 4397375 - DNA, 25 bp, Homo sapien
tatcacctgtcatataaatctattc

SEQ ID NO: 4397376 - DNA, 25 bp, Homo sapien
taaatgtaaaatatcacctgtcata

SEQ ID NO: 4397377 - DNA, 25 bp, Homo sapien
tcttgacccatatattggccaaaac

SEQ ID NO: 4397378 - DNA, 25 bp, Homo sapien
gataatttcaggatccccactgtat

SEQ ID NO: 4397379 - DNA, 25 bp, Homo sapien
cagcttcaatactacacatatcaga

SEQ ID NO: 4397380 - DNA, 25 bp, Homo sapien
tgccatgataatttcaggatcccca

SEQ ID NO: 4397381 - DNA, 25 bp, Homo sapien
tatttatacagcttcaatactacac

SEQ ID NO: 4397382 - DNA, 25 bp, Homo sapien
aaatacacgcaggttgcccttgcac

SEQ ID NO: 4397383 - DNA, 25 bp, Homo sapien
gatcatctccaagtcaactccagag

SEQ ID NO: 4397384 - DNA, 25 bp, Homo sapien
gaagtcaccagtcaggatcctctct

SEQ ID NO: 4397385 - DNA, 25 bp, Homo sapien
gagtgcaagcacgtacttcagagat

SEQ ID NO: 4397386 - DNA, 25 bp, Homo sapien
tttgctgaatatggggcaagaagct

SEQ ID NO: 4397387 - DNA, 25 bp, Homo sapien
ttgctgaatatggggcaagaagcta

SEQ ID NO: 4397388 - DNA, 25 bp, Homo sapien
ttaactgacagagtggttgaaagaa

SEQ ID NO: 4397389 - DNA, 25 bp, Homo sapien
tcagaatgtaaaagaggaatcctgg

SEQ ID NO: 4397390 - DNA, 25 bp, Homo sapien
cagaatgtaaaagaggaatcctggt

SEQ ID NO: 4397391 - DNA, 25 bp, Homo sapien
agaggaatcctggttcccttccacg

SEQ ID NO: 4397392 - DNA, 25 bp, Homo sapien
gaatgtaaaagaggaatcctggttc

SEQ ID NO: 4397393 - DNA, 25 bp, Homo sapien
cgaggacgtgcctctcgcacaggga

SEQ ID NO: 4397394 - DNA, 25 bp, Homo sapien
cagaagcgcactttgctgaacaccc

SEQ ID NO: 4397395 - DNA, 25 bp, Homo sapien
gacactcggtcgctgttggactccc

SEQ ID NO: 4397396 - DNA, 25 bp, Homo sapien
ctcttgcggccgctgcagaagcgca

SEQ ID NO: 4397397 - DNA, 25 bp, Homo sapien
ggatcaaggagctggctatcgccgc

SEQ ID NO: 4397398 - DNA, 25 bp, Homo sapien
aggagctggctatcgccgcagccat

SEQ ID NO: 4397399 - DNA, 25 bp, Homo sapien
ctgccggatcaaggagctggctatc

SEQ ID NO: 4397400 - DNA, 25 bp, Homo sapien
tcaaggagctggctatcgccgcagc

SEQ ID NO: 4397401 - DNA, 25 bp, Homo sapien
tgaggtctacagaatgcatcgcgcc

SEQ ID NO: 4397402 - DNA, 25 bp, Homo sapien
tgaagattaggaggtccgtcccagc

SEQ ID NO: 4397403 - DNA, 25 bp, Homo sapien
cacaaggttagtcaaagtctgggca

SEQ ID NO: 4397404 - DNA, 25 bp, Homo sapien
aggctgcagtatcgaaaacccggcg

SEQ ID NO: 4397405 - DNA, 25 bp, Homo sapien
agattgatgatttgtgagtattcca

SEQ ID NO: 4397406 - DNA, 25 bp, Homo sapien
tgtcaaagcctcttagtctctcagg

SEQ ID NO: 4397407 - DNA, 25 bp, Homo sapien
caacgtttgtgcttgaccagtagga

SEQ ID NO: 4397408 - DNA, 25 bp, Homo sapien
aagtcagtttgcatgcgcttcaaca

SEQ ID NO: 4397409 - DNA, 25 bp, Homo sapien
gaatgtagcgatactgccaacagac

SEQ ID NO: 4397410 - DNA, 25 bp, Homo sapien
catccacggaatgtagcgatactgc

SEQ ID NO: 4397411 - DNA, 25 bp, Homo sapien
cgatactgccaacagacacactgtg

SEQ ID NO: 4397412 - DNA, 25 bp, Homo sapien
gatgtgttgagcttcacgattttcc

SEQ ID NO: 4397413 - DNA, 25 bp, Homo sapien
agttctctccggtctgaccttgaca

SEQ ID NO: 4397414 - DNA, 25 bp, Homo sapien
ttgagttccgtagccaagccctaaa

SEQ ID NO: 4397415 - DNA, 25 bp, Homo sapien
taacgagttgattgtgaggaagaaa

SEQ ID NO: 4397416 - DNA, 25 bp, Homo sapien
cacagtgtgtgacatcacccatatc

SEQ ID NO: 4397417 - DNA, 25 bp, Homo sapien
gctgccaccagtagaacagagttgt

SEQ ID NO: 4397418 - DNA, 25 bp, Homo sapien
caccttccctaaagtggcagaacag

SEQ ID NO: 4397419 - DNA, 25 bp, Homo sapien
ctcaggcaccgtgactgcagagtta

SEQ ID NO: 4397420 - DNA, 25 bp, Homo sapien
ttatccagacacaccaatcattttg

SEQ ID NO: 4397421 - DNA, 25 bp, Homo sapien
tctcttaacaagaaaggcctgcatg

SEQ ID NO: 4397422 - DNA, 25 bp, Homo sapien
aaatgtggacagtattgctccggtc

SEQ ID NO: 4397423 - DNA, 25 bp, Homo sapien
caataagacggacattacaaggctc

SEQ ID NO: 4397424 - DNA, 25 bp, Homo sapien
gctttggtaaggatcgccagtgcaa

SEQ ID NO: 4397425 - DNA, 25 bp, Homo sapien
ggaagagaaatagttgcaaggaaac

SEQ ID NO: 4397426 - DNA, 25 bp, Homo sapien
gaaatagttgcaaggaaactctgca

SEQ ID NO: 4397427 - DNA, 25 bp, Homo sapien
caaggaaactctgcatcaacatggt

SEQ ID NO: 4397428 - DNA, 25 bp, Homo sapien
gaaactctgcatcaacatggtgtac

SEQ ID NO: 4397429 - DNA, 25 bp, Homo sapien
tagagatatcttagcccaaagcctg

SEQ ID NO: 4397430 - DNA, 25 bp, Homo sapien
caaggtaagaattacaccctgcagg

SEQ ID NO: 4397431 - DNA, 25 bp, Homo sapien
gttatgccactgaccaaacttggaa

SEQ ID NO: 4397432 - DNA, 25 bp, Homo sapien
tacactcaaaagctaggcactctct

SEQ ID NO: 4397433 - DNA, 25 bp, Homo sapien
tattcctactcatgcttaagttcgg

SEQ ID NO: 4397434 - DNA, 25 bp, Homo sapien
gagttctctgtctgagctttgccca

SEQ ID NO: 4397435 - DNA, 25 bp, Homo sapien
tcagctgaactaaccacttggatca

SEQ ID NO: 4397436 - DNA, 25 bp, Homo sapien
tcttccttgcctgaacttcttcctt

SEQ ID NO: 4397437 - DNA, 25 bp, Homo sapien
tcacatatcctatgagctgccagtt

SEQ ID NO: 4397438 - DNA, 25 bp, Homo sapien
gctggcacctagatgggtgctttcg

SEQ ID NO: 4397439 - DNA, 25 bp, Homo sapien
cagtcgtgcgttttgattcccaaaa

SEQ ID NO: 4397440 - DNA, 25 bp, Homo sapien
gggtgctttcggaactctgcttcca

SEQ ID NO: 4397441 - DNA, 25 bp, Homo sapien
tagaattggccagatgatggcagca

SEQ ID NO: 4397442 - DNA, 25 bp, Homo sapien
tgagcgggacgcctagagcactgtg

SEQ ID NO: 4397443 - DNA, 25 bp, Homo sapien
gcagagttctactttagccagactg

SEQ ID NO: 4397444 - DNA, 25 bp, Homo sapien
ttagccagactgtgcgccgaacagg

SEQ ID NO: 4397445 - DNA, 25 bp, Homo sapien
ctggatgacactccatactgtcacc

SEQ ID NO: 4397446 - DNA, 25 bp, Homo sapien
tcttctgctagagtccaaaggttcc

SEQ ID NO: 4397447 - DNA, 25 bp, Homo sapien
ttctgctagagtccaaaggttcccc

SEQ ID NO: 4397448 - DNA, 25 bp, Homo sapien
ctgtcttctgctagagtccaaaggt

SEQ ID NO: 4397449 - DNA, 25 bp, Homo sapien
tttcagttcagagcctatgagttta

SEQ ID NO: 4397450 - DNA, 25 bp, Homo sapien
cagttcagagcctatgagtttactc

SEQ ID NO: 4397451 - DNA, 25 bp, Homo sapien
gttcagagcctatgagtttactcat

SEQ ID NO: 4397452 - DNA, 25 bp, Homo sapien
tctttcagttcagagcctatgagtt

SEQ ID NO: 4397453 - DNA, 25 bp, Homo sapien
ttagctctcaaatagccactcaaat

SEQ ID NO: 4397454 - DNA, 25 bp, Homo sapien
attgctcacgattctctgaattctc

SEQ ID NO: 4397455 - DNA, 25 bp, Homo sapien
tcgctgcaggattttgtaaatggtt

SEQ ID NO: 4397456 - DNA, 25 bp, Homo sapien
aaatagccactcaaattgctcacga

SEQ ID NO: 4397457 - DNA, 25 bp, Homo sapien
ttaaagaccatgcaatcgcatccca

SEQ ID NO: 4397458 - DNA, 25 bp, Homo sapien
ttgaagtaacaacgtgggcaatcag

SEQ ID NO: 4397459 - DNA, 25 bp, Homo sapien
agaccatgcaatcgcatcccagctg

SEQ ID NO: 4397460 - DNA, 25 bp, Homo sapien
ttcattgaagtaacaacgtgggcaa

SEQ ID NO: 4397461 - DNA, 25 bp, Homo sapien
caagaatcttcatggagaagcgcgt

SEQ ID NO: 4397462 - DNA, 25 bp, Homo sapien
ttgggctgtcgctggacctcaggct

SEQ ID NO: 4397463 - DNA, 25 bp, Homo sapien
tgcgctagtagtccaaccaacaggc

SEQ ID NO: 4397464 - DNA, 25 bp, Homo sapien
tcggaagccgggtcccgagtccatc

SEQ ID NO: 4397465 - DNA, 25 bp, Homo sapien
ccggagggagcccgggcgccggcag

SEQ ID NO: 4397466 - DNA, 25 bp, Homo sapien
cggagggagcccgggcgccggcagg

SEQ ID NO: 4397467 - DNA, 25 bp, Homo sapien
gccggagggagcccgggcgccggca

SEQ ID NO: 4397468 - DNA, 25 bp, Homo sapien
ctggtctgaggacgacgcggaggac

SEQ ID NO: 4397469 - DNA, 25 bp, Homo sapien
tgggctcgagcacggccccttgaga

SEQ ID NO: 4397470 - DNA, 25 bp, Homo sapien
gctgccacccctcggtgggctcgag

SEQ ID NO: 4397471 - DNA, 25 bp, Homo sapien
cccttgagaccttccggaggcggtg

SEQ ID NO: 4397472 - DNA, 25 bp, Homo sapien
taaacattcgcggttccactggctc

SEQ ID NO: 4397473 - DNA, 25 bp, Homo sapien
gattcaagaagatatgcccaggcct

SEQ ID NO: 4397474 - DNA, 25 bp, Homo sapien
ccagaacatctggagggccgcttga

SEQ ID NO: 4397475 - DNA, 25 bp, Homo sapien
tgagtttacagccaccacctgggtt

SEQ ID NO: 4397476 - DNA, 25 bp, Homo sapien
tctatggtcttatgcaagtgcacat

SEQ ID NO: 4397477 - DNA, 25 bp, Homo sapien
catcctgggcttatgtaaataatcc

SEQ ID NO: 4397478 - DNA, 25 bp, Homo sapien
taggagccagcactagataaccatc

SEQ ID NO: 4397479 - DNA, 25 bp, Homo sapien
cctccaggactgcaaaaattaaatg

SEQ ID NO: 4397480 - DNA, 25 bp, Homo sapien
gtgccgatgtcttgacaaggttcaa

SEQ ID NO: 4397481 - DNA, 25 bp, Homo sapien
acttttggtctggttgcctgtgttt

SEQ ID NO: 4397482 - DNA, 25 bp, Homo sapien
atttttgccaagaatagtgttgtgg

SEQ ID NO: 4397483 - DNA, 25 bp, Homo sapien
gccaagaatagtgttgtggagtgtt

SEQ ID NO: 4397484 - DNA, 25 bp, Homo sapien
aatagtgttgtggagtgttttccca

SEQ ID NO: 4397485 - DNA, 25 bp, Homo sapien
gcgtacagatatccagttttcttag

SEQ ID NO: 4397486 - DNA, 25 bp, Homo sapien
gggtctagttccattccgctgcgta

SEQ ID NO: 4397487 - DNA, 25 bp, Homo sapien
tgtatatggttagctagagataggg

SEQ ID NO: 4397488 - DNA, 25 bp, Homo sapien
tgcaataagttaactgtagacatat

SEQ ID NO: 4397489 - DNA, 25 bp, Homo sapien
taccgctttagccatatcctattgg

SEQ ID NO: 4397490 - DNA, 25 bp, Homo sapien
ccacctgtgattatgttggagtcta

SEQ ID NO: 4397491 - DNA, 25 bp, Homo sapien
tcagtgtgtcgtgtctccattatca

SEQ ID NO: 4397492 - DNA, 25 bp, Homo sapien
tgacctgacataaggtatatccttg

SEQ ID NO: 4397493 - DNA, 25 bp, Homo sapien
gcaagggtgattttctctgacgata

SEQ ID NO: 4397494 - DNA, 25 bp, Homo sapien
cactatctgtatcttgaaaagttgt

SEQ ID NO: 4397495 - DNA, 25 bp, Homo sapien
taatgacaaattaacacctattgca

SEQ ID NO: 4397496 - DNA, 25 bp, Homo sapien
tgacgatatgttttaacgtttcaag

SEQ ID NO: 4397497 - DNA, 25 bp, Homo sapien
aatttcattgcgagtcctcaaaaca

SEQ ID NO: 4397498 - DNA, 25 bp, Homo sapien
tcaagcccactaattatctcttcca

SEQ ID NO: 4397499 - DNA, 25 bp, Homo sapien
cttgaatttcattgcgagtcctcaa

SEQ ID NO: 4397500 - DNA, 25 bp, Homo sapien
tgccttcaagcccactaattatctc

SEQ ID NO: 4397501 - DNA, 25 bp, Homo sapien
actaggctagaagagaggtgacaca

SEQ ID NO: 4397502 - DNA, 25 bp, Homo sapien
gggtcagacctgaaactagtatggt

SEQ ID NO: 4397503 - DNA, 25 bp, Homo sapien
cctgttgtcaccactattaggactg

SEQ ID NO: 4397504 - DNA, 25 bp, Homo sapien
tgtggttaccactgcctgactatca

SEQ ID NO: 4397505 - DNA, 25 bp, Homo sapien
agagctgcaagctacactgcctggg

SEQ ID NO: 4397506 - DNA, 25 bp, Homo sapien
tgcccagctaccactgctgaaagtt

SEQ ID NO: 4397507 - DNA, 25 bp, Homo sapien
tcacagctgggaatgtactgggtct

SEQ ID NO: 4397508 - DNA, 25 bp, Homo sapien
ctaaactggtatccaagtggcaagt

SEQ ID NO: 4397509 - DNA, 25 bp, Homo sapien
aagagagctgattctagagctagac

SEQ ID NO: 4397510 - DNA, 25 bp, Homo sapien
aggtctagcccacacaagttgtata

SEQ ID NO: 4397511 - DNA, 25 bp, Homo sapien
taagcttgggcacagaatcagggta

SEQ ID NO: 4397512 - DNA, 25 bp, Homo sapien
tatactgtaggttttaagagagctg

SEQ ID NO: 4397513 - DNA, 25 bp, Homo sapien
tctggcatccgtcctagcaaggcta

SEQ ID NO: 4397514 - DNA, 25 bp, Homo sapien
caaggctaggaaagtaaatgacgta

SEQ ID NO: 4397515 - DNA, 25 bp, Homo sapien
tattcatttagggttccgtgattcc

SEQ ID NO: 4397516 - DNA, 25 bp, Homo sapien
ttctcctggaaaggcaacaatgact

SEQ ID NO: 4397517 - DNA, 25 bp, Homo sapien
tctctgacttatccacagtgcctag

SEQ ID NO: 4397518 - DNA, 25 bp, Homo sapien
gaggcttaggaaactaggacccatc

SEQ ID NO: 4397519 - DNA, 25 bp, Homo sapien
tcctccaggaacataaaactgacag

SEQ ID NO: 4397520 - DNA, 25 bp, Homo sapien
aatgatttattccttgagcgcccag

SEQ ID NO: 4397521 - DNA, 25 bp, Homo sapien
gccatagccgttttctttgttgtat

SEQ ID NO: 4397522 - DNA, 25 bp, Homo sapien
gggcatttcctgagggcacaactct

SEQ ID NO: 4397523 - DNA, 25 bp, Homo sapien
tgcaagtatggaaaagccatagccg

SEQ ID NO: 4397524 - DNA, 25 bp, Homo sapien
cggccttgtaaatttgcaccaatta

SEQ ID NO: 4397525 - DNA, 25 bp, Homo sapien
catgcgggatgcataggaatttgag

SEQ ID NO: 4397526 - DNA, 25 bp, Homo sapien
cagttgttgctcctctaccatcata

SEQ ID NO: 4397527 - DNA, 25 bp, Homo sapien
ccatcataatatcatgcaggatgca

SEQ ID NO: 4397528 - DNA, 25 bp, Homo sapien
tcccaagctcctcgcccagttgttg

SEQ ID NO: 4397529 - DNA, 25 bp, Homo sapien
tatctggaatctatgagaaagctaa

SEQ ID NO: 4397530 - DNA, 25 bp, Homo sapien
gaaagctaaacaattgaacaagcca

SEQ ID NO: 4397531 - DNA, 25 bp, Homo sapien
tgagaaagctaaacaattgaacaag

SEQ ID NO: 4397532 - DNA, 25 bp, Homo sapien
ttcacaacttatgcatccaccaaag

SEQ ID NO: 4397533 - DNA, 25 bp, Homo sapien
gggaatataattctatatgacttga

SEQ ID NO: 4397534 - DNA, 25 bp, Homo sapien
gcatcatctgactctaacatactac

SEQ ID NO: 4397535 - DNA, 25 bp, Homo sapien
aaagttggagaattaactcccagca

SEQ ID NO: 4397536 - DNA, 25 bp, Homo sapien
tctcttcaagcaatccattgttgac

SEQ ID NO: 4397537 - DNA, 25 bp, Homo sapien
caccagtgggcaagtttagcacctg

SEQ ID NO: 4397538 - DNA, 25 bp, Homo sapien
tcacgacatctagcccaactactgg

SEQ ID NO: 4397539 - DNA, 25 bp, Homo sapien
cattgagccctcatttgcagccaca

SEQ ID NO: 4397540 - DNA, 25 bp, Homo sapien
taactccttgtaccacaccagtggg

SEQ ID NO: 4397541 - DNA, 25 bp, Homo sapien
tattttcatacaagataatagtctt

SEQ ID NO: 4397542 - DNA, 25 bp, Homo sapien
aaatgcagcttaagtttattctgtg

SEQ ID NO: 4397543 - DNA, 25 bp, Homo sapien
cagcttaagtttattctgtggtata

SEQ ID NO: 4397544 - DNA, 25 bp, Homo sapien
tgcagcttaagtttattctgtggta

SEQ ID NO: 4397545 - DNA, 25 bp, Homo sapien
tgataacttggcaacatgcaaacct

SEQ ID NO: 4397546 - DNA, 25 bp, Homo sapien
gcagcttcaggggataagttggttt

SEQ ID NO: 4397547 - DNA, 25 bp, Homo sapien
ggaaacagtctttcactgttgcaga

SEQ ID NO: 4397548 - DNA, 25 bp, Homo sapien
tctttgataacttggcaacatgcaa

SEQ ID NO: 4397549 - DNA, 25 bp, Homo sapien
ctgatcatgtcacatgtctctaaaa

SEQ ID NO: 4397550 - DNA, 25 bp, Homo sapien
ccaaagagagtcatgggcgaagccc

SEQ ID NO: 4397551 - DNA, 25 bp, Homo sapien
gagtcatgggcgaagccccaaagac

SEQ ID NO: 4397552 - DNA, 25 bp, Homo sapien
ggaagaagaaccaaagagagtcatg

SEQ ID NO: 4397553 - DNA, 25 bp, Homo sapien
caaattctcaggctagtgtcacaaa

SEQ ID NO: 4397554 - DNA, 25 bp, Homo sapien
gaatcactgctttgaaggacttccg

SEQ ID NO: 4397555 - DNA, 25 bp, Homo sapien
ccagaagtctgtgttttagcaagta

SEQ ID NO: 4397556 - DNA, 25 bp, Homo sapien
tgtggtgcccaaatcaacagccttg

SEQ ID NO: 4397557 - DNA, 25 bp, Homo sapien
ttcccaaatcatccccaggagtttc

SEQ ID NO: 4397558 - DNA, 25 bp, Homo sapien
cccaggagtttctctggtccctaca

SEQ ID NO: 4397559 - DNA, 25 bp, Homo sapien
agtttctctggtccctacattttgg

SEQ ID NO: 4397560 - DNA, 25 bp, Homo sapien
caggagtttctctggtccctacatt

SEQ ID NO: 4397561 - DNA, 25 bp, Homo sapien
ttgtgtatgggtttatttttcagta

SEQ ID NO: 4397562 - DNA, 25 bp, Homo sapien
gcatgagccacagcacctggcctca

SEQ ID NO: 4397563 - DNA, 25 bp, Homo sapien
aggcatgagccacagcacctggcct

SEQ ID NO: 4397564 - DNA, 25 bp, Homo sapien
acaggcatgagccacagcacctggc

SEQ ID NO: 4397565 - DNA, 25 bp, Homo sapien
tagaccatgacttgaccttgaggat

SEQ ID NO: 4397566 - DNA, 25 bp, Homo sapien
ggttggagctgcaatagacagacag

SEQ ID NO: 4397567 - DNA, 25 bp, Homo sapien
gcagaaagcattccattgacaggcc

SEQ ID NO: 4397568 - DNA, 25 bp, Homo sapien
gaagctacagaataggaacgcagaa

SEQ ID NO: 4397569 - DNA, 25 bp, Homo sapien
tcccttgggtacctaaatgctgcta

SEQ ID NO: 4397570 - DNA, 25 bp, Homo sapien
tggcttgtgagaacgttcccttggg

SEQ ID NO: 4397571 - DNA, 25 bp, Homo sapien
tctttcaactcaagatcagctgctg

SEQ ID NO: 4397572 - DNA, 25 bp, Homo sapien
tcaggtacccagaacttggcatatc

SEQ ID NO: 4397573 - DNA, 25 bp, Homo sapien
agagcaacgcagagtttggagcgtg

SEQ ID NO: 4397574 - DNA, 25 bp, Homo sapien
cagagcaacgcagagtttggagcgt

SEQ ID NO: 4397575 - DNA, 25 bp, Homo sapien
gctggttttctgctggtacacaggg

SEQ ID NO: 4397576 - DNA, 25 bp, Homo sapien
ctggttttctgctggtacacagggt

SEQ ID NO: 4397577 - DNA, 25 bp, Homo sapien
tgtggccagaaatgtgccactctga

SEQ ID NO: 4397578 - DNA, 25 bp, Homo sapien
ggcagaagcagaaattcggcttctg

SEQ ID NO: 4397579 - DNA, 25 bp, Homo sapien
gactacccagaaacggcagaactca

SEQ ID NO: 4397580 - DNA, 25 bp, Homo sapien
tgcaggacctgaaatttgactaccc

SEQ ID NO: 4397581 - DNA, 25 bp, Homo sapien
tgcgtggtacacagatgcaggacct

SEQ ID NO: 4397582 - DNA, 25 bp, Homo sapien
gatgctatcatgagacctggtttgg

SEQ ID NO: 4397583 - DNA, 25 bp, Homo sapien
gccaagccagcactagagcgtagct

SEQ ID NO: 4397584 - DNA, 25 bp, Homo sapien
gtgataaagtaaggcaactcctctg

SEQ ID NO: 4397585 - DNA, 25 bp, Homo sapien
gagacccaaagacagagtgcggctt

SEQ ID NO: 4397586 - DNA, 25 bp, Homo sapien
caaatgctttgagggcaactctgga

SEQ ID NO: 4397587 - DNA, 25 bp, Homo sapien
tggtgcctatactcccctaataggg

SEQ ID NO: 4397588 - DNA, 25 bp, Homo sapien
tgacatatcctaggtcaactgaaac

SEQ ID NO: 4397589 - DNA, 25 bp, Homo sapien
acaccaggtggtcagactcactcag

SEQ ID NO: 4397590 - DNA, 25 bp, Homo sapien
aactggagagacacgcttttgacaa

SEQ ID NO: 4397591 - DNA, 25 bp, Homo sapien
cctgttctccaagagctcgcaaagc

SEQ ID NO: 4397592 - DNA, 25 bp, Homo sapien
ttcctgttctccaagagctcgcaaa

SEQ ID NO: 4397593 - DNA, 25 bp, Homo sapien
ctgttctccaagagctcgcaaagca

SEQ ID NO: 4397594 - DNA, 25 bp, Homo sapien
tcctgttctccaagagctcgcaaag

SEQ ID NO: 4397595 - DNA, 25 bp, Homo sapien
ggcttaaaatgaaaggagagccaac

SEQ ID NO: 4397596 - DNA, 25 bp, Homo sapien
caagacacaggaggtgacagcatct

SEQ ID NO: 4397597 - DNA, 25 bp, Homo sapien
tatcagcgtcttagaagtaggtgct

SEQ ID NO: 4397598 - DNA, 25 bp, Homo sapien
tgagcatgtcgattagctgagaagt

SEQ ID NO: 4397599 - DNA, 25 bp, Homo sapien
taaggctcataagacccaggcagaa

SEQ ID NO: 4397600 - DNA, 25 bp, Homo sapien
cctggtaggtgggataaggtccaat

SEQ ID NO: 4397601 - DNA, 25 bp, Homo sapien
atgaccacaaatgggttaaggctca

SEQ ID NO: 4397602 - DNA, 25 bp, Homo sapien
tagtcaaagtcagaattgggttggc

SEQ ID NO: 4397603 - DNA, 25 bp, Homo sapien
acacgcacaccactgactatggtcc

SEQ ID NO: 4397604 - DNA, 25 bp, Homo sapien
agccccttgccaccaaactcagaga

SEQ ID NO: 4397605 - DNA, 25 bp, Homo sapien
accactgactatggtccccatcact

SEQ ID NO: 4397606 - DNA, 25 bp, Homo sapien
agagacactactgaggaccctcaca

SEQ ID NO: 4397607 - DNA, 25 bp, Homo sapien
cacagctcttgccaccaagaacgac

SEQ ID NO: 4397608 - DNA, 25 bp, Homo sapien
cacacagctcttgccaccaagaacg

SEQ ID NO: 4397609 - DNA, 25 bp, Homo sapien
agcagacctcacacagctcttgcca

SEQ ID NO: 4397610 - DNA, 25 bp, Homo sapien
gacctcacacagctcttgccaccaa

SEQ ID NO: 4397611 - DNA, 25 bp, Homo sapien
gagatgtactgtggcctcaccaaag

SEQ ID NO: 4397612 - DNA, 25 bp, Homo sapien
gaaatgctgctctcccaaatagacc

SEQ ID NO: 4397613 - DNA, 25 bp, Homo sapien
gactagtcccaggagtgttgccttg

SEQ ID NO: 4397614 - DNA, 25 bp, Homo sapien
tgccaagcacacgactccttagagg

SEQ ID NO: 4397615 - DNA, 25 bp, Homo sapien
taccagtgagaagaccttagttgtc

SEQ ID NO: 4397616 - DNA, 25 bp, Homo sapien
taatccaaattcatacactgagcag

SEQ ID NO: 4397617 - DNA, 25 bp, Homo sapien
cagttagatacttgccaatgatggt

SEQ ID NO: 4397618 - DNA, 25 bp, Homo sapien
tatgcgtcagacattatcctgagga

SEQ ID NO: 4397619 - DNA, 25 bp, Homo sapien
ggtgcaatatatccacgcctacacg

SEQ ID NO: 4397620 - DNA, 25 bp, Homo sapien
gaagagcacaatgatctaggacacg

SEQ ID NO: 4397621 - DNA, 25 bp, Homo sapien
gtaataactattcggtcatggtggg

SEQ ID NO: 4397622 - DNA, 25 bp, Homo sapien
acatctctcagaggagggtttgggc

SEQ ID NO: 4397623 - DNA, 25 bp, Homo sapien
cattaacctagaaagagcgtcattg

SEQ ID NO: 4397624 - DNA, 25 bp, Homo sapien
cactgagctgcccaggtaaacagaa

SEQ ID NO: 4397625 - DNA, 25 bp, Homo sapien
gcctaagggtcaaatgctaacaaca

SEQ ID NO: 4397626 - DNA, 25 bp, Homo sapien
taaggcacataagagcagtgggttc

SEQ ID NO: 4397627 - DNA, 25 bp, Homo sapien
gaaaagaatcttgcctctaatccac

SEQ ID NO: 4397628 - DNA, 25 bp, Homo sapien
tcgccaaaagagataggagagaaca

SEQ ID NO: 4397629 - DNA, 25 bp, Homo sapien
aaaatgccatcaagttcgccaaaag

SEQ ID NO: 4397630 - DNA, 25 bp, Homo sapien
taaagaggacacatatgagggtgaa

SEQ ID NO: 4397631 - DNA, 25 bp, Homo sapien
ggacctctgcaaaatgaccacaatg

SEQ ID NO: 4397632 - DNA, 25 bp, Homo sapien
ttatgggacctctgcaaaatgacca

SEQ ID NO: 4397633 - DNA, 25 bp, Homo sapien
tgggacctctgcaaaatgaccacaa

SEQ ID NO: 4397634 - DNA, 25 bp, Homo sapien
tatgggacctctgcaaaatgaccac

SEQ ID NO: 4397635 - DNA, 25 bp, Homo sapien
aaagtcttcgttgcctttggatcag

SEQ ID NO: 4397636 - DNA, 25 bp, Homo sapien
gattcttttcggatgtatttctgag

SEQ ID NO: 4397637 - DNA, 25 bp, Homo sapien
ttcactatatcattgctgtctggat

SEQ ID NO: 4397638 - DNA, 25 bp, Homo sapien
tctggattgacatagaacttctgaa

SEQ ID NO: 4397639 - DNA, 25 bp, Homo sapien
actgcagtcccctcgccgaggattg

SEQ ID NO: 4397640 - DNA, 25 bp, Homo sapien
tatcgacctagtatgatgctcgctc

SEQ ID NO: 4397641 - DNA, 25 bp, Homo sapien
tcgccgaggattgccttggccacac

SEQ ID NO: 4397642 - DNA, 25 bp, Homo sapien
tgctgcaatggacatagcatctcct

SEQ ID NO: 4397643 - DNA, 25 bp, Homo sapien
agtcccccgatagggacaaccacat

SEQ ID NO: 4397644 - DNA, 25 bp, Homo sapien
gtcccccgatagggacaaccacata

SEQ ID NO: 4397645 - DNA, 25 bp, Homo sapien
gatgtgggcccgcttcagattccca

SEQ ID NO: 4397646 - DNA, 25 bp, Homo sapien
gaagccaatctgatgatttcgcccg

SEQ ID NO: 4397647 - DNA, 25 bp, Homo sapien
cctttcgagtgctgggaagttcaat

SEQ ID NO: 4397648 - DNA, 25 bp, Homo sapien
gaagttcaatggaagttggccggaa

SEQ ID NO: 4397649 - DNA, 25 bp, Homo sapien
agatgggatttcttaaaccttgaag

SEQ ID NO: 4397650 - DNA, 25 bp, Homo sapien
gggatacgttgcgacgcgcatctga

SEQ ID NO: 4397651 - DNA, 25 bp, Homo sapien
gcagcagattgcctctacaggggat

SEQ ID NO: 4397652 - DNA, 25 bp, Homo sapien
tctacaggggatacgttgcgacgcg

SEQ ID NO: 4397653 - DNA, 25 bp, Homo sapien
gacgcgcatctgatactgaaatgca

SEQ ID NO: 4397654 - DNA, 25 bp, Homo sapien
gcacagtgcccgctcagattttttt

SEQ ID NO: 4397655 - DNA, 25 bp, Homo sapien
cacagtgcccgctcagatttttttt

SEQ ID NO: 4397656 - DNA, 25 bp, Homo sapien
cagtgcccgctcagatttttttttt

SEQ ID NO: 4397657 - DNA, 25 bp, Homo sapien
acagtgcccgctcagattttttttt

SEQ ID NO: 4397658 - DNA, 25 bp, Homo sapien
gtgacagatcatcccactttgctct

SEQ ID NO: 4397659 - DNA, 25 bp, Homo sapien
ggtgtagtgacagatcatcccactt

SEQ ID NO: 4397660 - DNA, 25 bp, Homo sapien
ggcaggagctgtcctccgagcgtgg

SEQ ID NO: 4397661 - DNA, 25 bp, Homo sapien
gctgtcctccgagcgtggtgctgca

SEQ ID NO: 4397662 - DNA, 25 bp, Homo sapien
ctggaatgcaattgataagccttga

SEQ ID NO: 4397663 - DNA, 25 bp, Homo sapien
gaaaacaaccttcttgctcatgata

SEQ ID NO: 4397664 - DNA, 25 bp, Homo sapien
cttcttgctcatgatagctcctctg

SEQ ID NO: 4397665 - DNA, 25 bp, Homo sapien
tgataagccttgactgggaaaacaa

SEQ ID NO: 4397666 - DNA, 25 bp, Homo sapien
agtcattgctggaatatcttgacct

SEQ ID NO: 4397667 - DNA, 25 bp, Homo sapien
cattgctggaatatcttgacctcat

SEQ ID NO: 4397668 - DNA, 25 bp, Homo sapien
ctttgcttacatagtcattgctgga

SEQ ID NO: 4397669 - DNA, 25 bp, Homo sapien
catagtcattgctggaatatcttga

SEQ ID NO: 4397670 - DNA, 25 bp, Homo sapien
taagtatctaaagagacttgcagag

SEQ ID NO: 4397671 - DNA, 25 bp, Homo sapien
ggctattaagtatctaaagagactt

SEQ ID NO: 4397672 - DNA, 25 bp, Homo sapien
aagagacttgcagagtcgtgtaaca

SEQ ID NO: 4397673 - DNA, 25 bp, Homo sapien
cagtgatctctctaggggctattaa

SEQ ID NO: 4397674 - DNA, 25 bp, Homo sapien
caatagtattctactaggccccact

SEQ ID NO: 4397675 - DNA, 25 bp, Homo sapien
gcagtgcttctaggctatcccatgg

SEQ ID NO: 4397676 - DNA, 25 bp, Homo sapien
tctgaacttggaactgctagaatcc

SEQ ID NO: 4397677 - DNA, 25 bp, Homo sapien
tttggaatcaaagtcagtcagacct

SEQ ID NO: 4397678 - DNA, 25 bp, Homo sapien
ttagctccttgcctgcaaagcctga

SEQ ID NO: 4397679 - DNA, 25 bp, Homo sapien
gcctgaatcttgcatgagttttcca

SEQ ID NO: 4397680 - DNA, 25 bp, Homo sapien
agctcctttaagggttcagccttgg

SEQ ID NO: 4397681 - DNA, 25 bp, Homo sapien
gcagctcctttaagggttcagcctt

SEQ ID NO: 4397682 - DNA, 25 bp, Homo sapien
gaaagtggagctttgatcccagcat

SEQ ID NO: 4397683 - DNA, 25 bp, Homo sapien
tgagtcaaccgcacatgaaagtgga

SEQ ID NO: 4397684 - DNA, 25 bp, Homo sapien
tagttctctgagtcaaccgcacatg

SEQ ID NO: 4397685 - DNA, 25 bp, Homo sapien
cctgctgactcctagttctctgagt

SEQ ID NO: 4397686 - DNA, 25 bp, Homo sapien
tcagtctggagcttccctcaattcc

SEQ ID NO: 4397687 - DNA, 25 bp, Homo sapien
ggaccgtggccaacacagacattgt

SEQ ID NO: 4397688 - DNA, 25 bp, Homo sapien
gatatcataaacctcaccagagaag

SEQ ID NO: 4397689 - DNA, 25 bp, Homo sapien
gaagcattcaggcagtaatacatga

SEQ ID NO: 4397690 - DNA, 25 bp, Homo sapien
ctggacatttcccttctggttagtc

SEQ ID NO: 4397691 - DNA, 25 bp, Homo sapien
gacatttcccttctggttagtcttc

SEQ ID NO: 4397692 - DNA, 25 bp, Homo sapien
catttcccttctggttagtcttcaa

SEQ ID NO: 4397693 - DNA, 25 bp, Homo sapien
tggacatttcccttctggttagtct

SEQ ID NO: 4397694 - DNA, 25 bp, Homo sapien
ctcttgtccccaaaggataccattt

SEQ ID NO: 4397695 - DNA, 25 bp, Homo sapien
ttactgaactgacatcagagatcat

SEQ ID NO: 4397696 - DNA, 25 bp, Homo sapien
tttgtgtttgacttagatggttgaa

SEQ ID NO: 4397697 - DNA, 25 bp, Homo sapien
tgtttgacttagatggttgaaatgt

SEQ ID NO: 4397698 - DNA, 25 bp, Homo sapien
tctgatttcaattggccaaaatcca

SEQ ID NO: 4397699 - DNA, 25 bp, Homo sapien
aaaaacccaagatcgcatatgtctg

SEQ ID NO: 4397700 - DNA, 25 bp, Homo sapien
gcaggaccccacaactgaaggagaa

SEQ ID NO: 4397701 - DNA, 25 bp, Homo sapien
ctttgaaagatcagcaggcctcctg

SEQ ID NO: 4397702 - DNA, 25 bp, Homo sapien
taaacaccagcttgccatgagtcca

SEQ ID NO: 4397703 - DNA, 25 bp, Homo sapien
tctctcagtaagacaggaaccagga

SEQ ID NO: 4397704 - DNA, 25 bp, Homo sapien
agagatttgtttccccatacccatg

SEQ ID NO: 4397705 - DNA, 25 bp, Homo sapien
taaatccagctaacatgccaagtag

SEQ ID NO: 4397706 - DNA, 25 bp, Homo sapien
tgccaagtagttcccaggttcatat

SEQ ID NO: 4397707 - DNA, 25 bp, Homo sapien
gaaactactctggtcactggccaaa

SEQ ID NO: 4397708 - DNA, 25 bp, Homo sapien
gatagagtcatagaaccagtcagcc

SEQ ID NO: 4397709 - DNA, 25 bp, Homo sapien
tccatatcatagtcagtaccccggg

SEQ ID NO: 4397710 - DNA, 25 bp, Homo sapien
gattgtcccctcatcaaagagccga

SEQ ID NO: 4397711 - DNA, 25 bp, Homo sapien
taccccgggcatagacattaagctc

SEQ ID NO: 4397712 - DNA, 25 bp, Homo sapien
cattctgaggaacgtctgagatgtg

SEQ ID NO: 4397713 - DNA, 25 bp, Homo sapien
tcccaaagtcacaatagggtacaaa

SEQ ID NO: 4397714 - DNA, 25 bp, Homo sapien
tcacaatagggtacaaaagttacag

SEQ ID NO: 4397715 - DNA, 25 bp, Homo sapien
cagactgacaatttacaaggacagt

SEQ ID NO: 4397716 - DNA, 25 bp, Homo sapien
gactgacaatttacaaggacagtgt

SEQ ID NO: 4397717 - DNA, 25 bp, Homo sapien
catccatccggcagaattttctagc

SEQ ID NO: 4397718 - DNA, 25 bp, Homo sapien
ttctagcaatgctgcctgtggaggc

SEQ ID NO: 4397719 - DNA, 25 bp, Homo sapien
ttttctagcaatgctgcctgtggag

SEQ ID NO: 4397720 - DNA, 25 bp, Homo sapien
tcagtgtaatgttgtaaagtcatcc

SEQ ID NO: 4397721 - DNA, 25 bp, Homo sapien
tgcctaagggcattctctctccagc

SEQ ID NO: 4397722 - DNA, 25 bp, Homo sapien
gttaatgcaagagaactgacaccat

SEQ ID NO: 4397723 - DNA, 25 bp, Homo sapien
ctctcctcaagtgccagtgactctg

SEQ ID NO: 4397724 - DNA, 25 bp, Homo sapien
ttgttgatatcctgccctgtgtccc

SEQ ID NO: 4397725 - DNA, 25 bp, Homo sapien
tctttgcaaggcagagttgtccgct

SEQ ID NO: 4397726 - DNA, 25 bp, Homo sapien
tatgaggctgagacactactcttcc

SEQ ID NO: 4397727 - DNA, 25 bp, Homo sapien
gcagtttccagagaatggccacaat

SEQ ID NO: 4397728 - DNA, 25 bp, Homo sapien
tgtcttggcaagcaacatggctgac

SEQ ID NO: 4397729 - DNA, 25 bp, Homo sapien
gcagtttaaaagcacgggtagatca

SEQ ID NO: 4397730 - DNA, 25 bp, Homo sapien
gacagaattgcctacctgataactg

SEQ ID NO: 4397731 - DNA, 25 bp, Homo sapien
gactaataaagagctgaatctgctg

SEQ ID NO: 4397732 - DNA, 25 bp, Homo sapien
ttcagattagtacagctacacccat

SEQ ID NO: 4397733 - DNA, 25 bp, Homo sapien
tcaaaatccttccacggtgccccca

SEQ ID NO: 4397734 - DNA, 25 bp, Homo sapien
acggtgcccccatctccatagccaa

SEQ ID NO: 4397735 - DNA, 25 bp, Homo sapien
cacggtgcccccatctccatagcca

SEQ ID NO: 4397736 - DNA, 25 bp, Homo sapien
tctgacaatctgacgcaactatggc

SEQ ID NO: 4397737 - DNA, 25 bp, Homo sapien
cttcagttgctcaggttgtctcccc

SEQ ID NO: 4397738 - DNA, 25 bp, Homo sapien
aaaataattttagcgcagctcctca

SEQ ID NO: 4397739 - DNA, 25 bp, Homo sapien
aaatgctaaccctatcttggcaagg

SEQ ID NO: 4397740 - DNA, 25 bp, Homo sapien
caaggggagaacgagctgcggatct

SEQ ID NO: 4397741 - DNA, 25 bp, Homo sapien
gcacaagacgcagctcaaggggaga

SEQ ID NO: 4397742 - DNA, 25 bp, Homo sapien
gagctgcggatctgcaatagttcat

SEQ ID NO: 4397743 - DNA, 25 bp, Homo sapien
accaagcacaagacgcagctcaagg

SEQ ID NO: 4397744 - DNA, 25 bp, Homo sapien
ctctgaagctaagtcgtggtatcca

SEQ ID NO: 4397745 - DNA, 25 bp, Homo sapien
gtgaccagctgaatctccccagatg

SEQ ID NO: 4397746 - DNA, 25 bp, Homo sapien
tcagagactgttcgcaagagcatca

SEQ ID NO: 4397747 - DNA, 25 bp, Homo sapien
tcagaggctttggataggcaactgc

SEQ ID NO: 4397748 - DNA, 25 bp, Homo sapien
tcctgaccctcggaaactatgggag

SEQ ID NO: 4397749 - DNA, 25 bp, Homo sapien
tcaagtgttccaaaggctgcggctc

SEQ ID NO: 4397750 - DNA, 25 bp, Homo sapien
tacattaggcttcgctaggagttgc

SEQ ID NO: 4397751 - DNA, 25 bp, Homo sapien
agaagtgagatctcctgccaagagc

SEQ ID NO: 4397752 - DNA, 25 bp, Homo sapien
tatgctcctatgctccaattttaaa

SEQ ID NO: 4397753 - DNA, 25 bp, Homo sapien
cacaagaccgaagagtcacaaaggt

SEQ ID NO: 4397754 - DNA, 25 bp, Homo sapien
tcagaaagagtggtacacaggagtc

SEQ ID NO: 4397755 - DNA, 25 bp, Homo sapien
tctgaatgttccacaccctaacggg

SEQ ID NO: 4397756 - DNA, 25 bp, Homo sapien
tttcaagatgtgaggtgtaagcaca

SEQ ID NO: 4397757 - DNA, 25 bp, Homo sapien
caagatgtgaggtgtaagcacaaac

SEQ ID NO: 4397758 - DNA, 25 bp, Homo sapien
cagctgcacgcatgggcaccttcat

SEQ ID NO: 4397759 - DNA, 25 bp, Homo sapien
ctgtttcaagatgtgaggtgtaagc

SEQ ID NO: 4397760 - DNA, 25 bp, Homo sapien
tggagtcgtgccagtgtacactgac

SEQ ID NO: 4397761 - DNA, 25 bp, Homo sapien
gactagaacaactgggcagcttcga

SEQ ID NO: 4397762 - DNA, 25 bp, Homo sapien
ccccaggcatctggagtcgtgccag

SEQ ID NO: 4397763 - DNA, 25 bp, Homo sapien
cttcgaggaatgattggcaaacttg

SEQ ID NO: 4397764 - DNA, 25 bp, Homo sapien
aaccattcttctatccctttcagcg

SEQ ID NO: 4397765 - DNA, 25 bp, Homo sapien
gcgtgcgcatcttgccgaacttctg

SEQ ID NO: 4397766 - DNA, 25 bp, Homo sapien
tggacccagttcctgccataagcgt

SEQ ID NO: 4397767 - DNA, 25 bp, Homo sapien
tgactactccacgtgtacataatcc

SEQ ID NO: 4397768 - DNA, 25 bp, Homo sapien
gagcaacttccacagcaaagccatg

SEQ ID NO: 4397769 - DNA, 25 bp, Homo sapien
gagggatcctgatccatccctgagc

SEQ ID NO: 4397770 - DNA, 25 bp, Homo sapien
ggctccaacagcgtcacacaaagcc

SEQ ID NO: 4397771 - DNA, 25 bp, Homo sapien
acaaagcccacggacccagagggat

SEQ ID NO: 4397772 - DNA, 25 bp, Homo sapien
gagttaccatctccaagtcccctgt

SEQ ID NO: 4397773 - DNA, 25 bp, Homo sapien
ggttctcaatccttcgagttaccat

SEQ ID NO: 4397774 - DNA, 25 bp, Homo sapien
ctctgggctcggttctcaatccttc

SEQ ID NO: 4397775 - DNA, 25 bp, Homo sapien
gctcggttctcaatccttcgagtta

SEQ ID NO: 4397776 - DNA, 25 bp, Homo sapien
tgagcctattccagcctgcacagga

SEQ ID NO: 4397777 - DNA, 25 bp, Homo sapien
ccatcaatgagcctattccagcctg

SEQ ID NO: 4397778 - DNA, 25 bp, Homo sapien
tcaatgagcctattccagcctgcac

SEQ ID NO: 4397779 - DNA, 25 bp, Homo sapien
aatgagcctattccagcctgcacag

SEQ ID NO: 4397780 - DNA, 25 bp, Homo sapien
gcagtctataacctgctgagctgag

SEQ ID NO: 4397781 - DNA, 25 bp, Homo sapien
cagcagtctataacctgctgagctg

SEQ ID NO: 4397782 - DNA, 25 bp, Homo sapien
agcagtctataacctgctgagctga

SEQ ID NO: 4397783 - DNA, 25 bp, Homo sapien
tgcaagtactgcagactgatatatg

SEQ ID NO: 4397784 - DNA, 25 bp, Homo sapien
tactgcagactgatatatgtgctct

SEQ ID NO: 4397785 - DNA, 25 bp, Homo sapien
cacgtctaaattctgatgggcattt

SEQ ID NO: 4397786 - DNA, 25 bp, Homo sapien
cagaagttgccacgtctaaattctg

SEQ ID NO: 4397787 - DNA, 25 bp, Homo sapien
caaattcagtggcaggactaagtca

SEQ ID NO: 4397788 - DNA, 25 bp, Homo sapien
tccccttagagagaaaattggagaa

SEQ ID NO: 4397789 - DNA, 25 bp, Homo sapien
gacacagatgaacgcctttatagac

SEQ ID NO: 4397790 - DNA, 25 bp, Homo sapien
aggagagagcgacaaaatgacttca

SEQ ID NO: 4397791 - DNA, 25 bp, Homo sapien
ccaacgtcgtgaaacctggtgtcta

SEQ ID NO: 4397792 - DNA, 25 bp, Homo sapien
gctaaggctcaaggttaaaagctcc

SEQ ID NO: 4397793 - DNA, 25 bp, Homo sapien
gcaaatgcggtgactaaaacaaacg

SEQ ID NO: 4397794 - DNA, 25 bp, Homo sapien
aagagattccgagggaccagacagc

SEQ ID NO: 4397795 - DNA, 25 bp, Homo sapien
gcagagaatacccatagcgagaaaa

SEQ ID NO: 4397796 - DNA, 25 bp, Homo sapien
gagaatacccatagcgagaaaatct

SEQ ID NO: 4397797 - DNA, 25 bp, Homo sapien
cccatagcgagaaaatcttttaagc

SEQ ID NO: 4397798 - DNA, 25 bp, Homo sapien
aatacccatagcgagaaaatctttt

SEQ ID NO: 4397799 - DNA, 25 bp, Homo sapien
aaaagcacggcctagggcgagcagc

SEQ ID NO: 4397800 - DNA, 25 bp, Homo sapien
gggacggactctcaaggagctgaca

SEQ ID NO: 4397801 - DNA, 25 bp, Homo sapien
cctagggcgagcagctgtcggaggg

SEQ ID NO: 4397802 - DNA, 25 bp, Homo sapien
caaggagctgacagctagcaagagg

SEQ ID NO: 4397803 - DNA, 25 bp, Homo sapien
ctaagaagctccaagaagctccttc

SEQ ID NO: 4397804 - DNA, 25 bp, Homo sapien
tctttaaaaccaccattcgtctcag

SEQ ID NO: 4397805 - DNA, 25 bp, Homo sapien
aaaccaccattcgtctcagatggct

SEQ ID NO: 4397806 - DNA, 25 bp, Homo sapien
ttaaaaccaccattcgtctcagatg

SEQ ID NO: 4397807 - DNA, 25 bp, Homo sapien
accattcgtctcagatggctctgaa

SEQ ID NO: 4397808 - DNA, 25 bp, Homo sapien
ccaattcatttcgagaagacgctga

SEQ ID NO: 4397809 - DNA, 25 bp, Homo sapien
tgaacactaaccagacatttgacga

SEQ ID NO: 4397810 - DNA, 25 bp, Homo sapien
tatcctgaaatacgagtgtgtcact

SEQ ID NO: 4397811 - DNA, 25 bp, Homo sapien
gctacatttccttcgggcttttgaa

SEQ ID NO: 4397812 - DNA, 25 bp, Homo sapien
ccctagagtttatcacaggaagatt

SEQ ID NO: 4397813 - DNA, 25 bp, Homo sapien
gccctagagtttatcacaggaagat

SEQ ID NO: 4397814 - DNA, 25 bp, Homo sapien
ttccagggtgactctcaagcccaag

SEQ ID NO: 4397815 - DNA, 25 bp, Homo sapien
ctagagtttatcacaggaagatttt

SEQ ID NO: 4397816 - DNA, 25 bp, Homo sapien
ccatggcaggcggttattgatataa

SEQ ID NO: 4397817 - DNA, 25 bp, Homo sapien
gaaagccatgaagccaagtgattgt

SEQ ID NO: 4397818 - DNA, 25 bp, Homo sapien
aagatgtacgtgcttctcaggagtc

SEQ ID NO: 4397819 - DNA, 25 bp, Homo sapien
gccattcccgactgtgcaggtacaa

SEQ ID NO: 4397820 - DNA, 25 bp, Homo sapien
tgtcaagtgacatgacgtctttact

SEQ ID NO: 4397821 - DNA, 25 bp, Homo sapien
tctgagagccacagccagcgatgtg

SEQ ID NO: 4397822 - DNA, 25 bp, Homo sapien
tcttcgaatgagaaccgaaactgcg

SEQ ID NO: 4397823 - DNA, 25 bp, Homo sapien
gcacccctggagtttaatgagtcac

SEQ ID NO: 4397824 - DNA, 25 bp, Homo sapien
cccgagctcgtctcatctaagaggg

SEQ ID NO: 4397825 - DNA, 25 bp, Homo sapien
agagggttctttgggcatcaaactc

SEQ ID NO: 4397826 - DNA, 25 bp, Homo sapien
gggcatcaaactcatcaccaactct

SEQ ID NO: 4397827 - DNA, 25 bp, Homo sapien
tgacatctcagagcacattcccgag

SEQ ID NO: 4397828 - DNA, 25 bp, Homo sapien
ctacacagaagcacgaatccggtgg

SEQ ID NO: 4397829 - DNA, 25 bp, Homo sapien
tacacagaagcacgaatccggtggc

SEQ ID NO: 4397830 - DNA, 25 bp, Homo sapien
gaacaggagtgttttcttaatacca

SEQ ID NO: 4397831 - DNA, 25 bp, Homo sapien
tcactccatggctcccgcttctcaa

SEQ ID NO: 4397832 - DNA, 25 bp, Homo sapien
gggcctgctagggaatcactccatg

SEQ ID NO: 4397833 - DNA, 25 bp, Homo sapien
tcccgcttctcaaggggcctgaagg

SEQ ID NO: 4397834 - DNA, 25 bp, Homo sapien
cttcatttcaccagcaggtgcccaa

SEQ ID NO: 4397835 - DNA, 25 bp, Homo sapien
catttcaccagcaggtgcccaaccc

SEQ ID NO: 4397836 - DNA, 25 bp, Homo sapien
ctccttcatttcaccagcaggtgcc

SEQ ID NO: 4397837 - DNA, 25 bp, Homo sapien
atttcaccagcaggtgcccaaccca

SEQ ID NO: 4397838 - DNA, 25 bp, Homo sapien
caggatggctgccaagttagtgtct

SEQ ID NO: 4397839 - DNA, 25 bp, Homo sapien
tagtgtcttgggcacctcgtgtgtg

SEQ ID NO: 4397840 - DNA, 25 bp, Homo sapien
gacagatggtagtggcctggcctat

SEQ ID NO: 4397841 - DNA, 25 bp, Homo sapien
cccataatgggttcaggcgtactta

SEQ ID NO: 4397842 - DNA, 25 bp, Homo sapien
ggtggaccatctttctcacaacggg

SEQ ID NO: 4397843 - DNA, 25 bp, Homo sapien
cgcaggcaccatatgcccgtaggat

SEQ ID NO: 4397844 - DNA, 25 bp, Homo sapien
acggggtaatgagcccgcaggcacc

SEQ ID NO: 4397845 - DNA, 25 bp, Homo sapien
tccgcagctctgacctaggtggacc

SEQ ID NO: 4397846 - DNA, 25 bp, Homo sapien
ttgtagagagcacccagagacgagc

SEQ ID NO: 4397847 - DNA, 25 bp, Homo sapien
tgtagagagcacccagagacgagcg

SEQ ID NO: 4397848 - DNA, 25 bp, Homo sapien
tttgtagagagcacccagagacgag

SEQ ID NO: 4397849 - DNA, 25 bp, Homo sapien
gagtaccagttcttcggaatgttga

SEQ ID NO: 4397850 - DNA, 25 bp, Homo sapien
tcttcggaatgttgaccgccggcca

SEQ ID NO: 4397851 - DNA, 25 bp, Homo sapien
cctggagtaccagttcttcggaatg

SEQ ID NO: 4397852 - DNA, 25 bp, Homo sapien
ccagttcttcggaatgttgaccgcc

SEQ ID NO: 4397853 - DNA, 25 bp, Homo sapien
cacctcagtagcaataatcccaacg

SEQ ID NO: 4397854 - DNA, 25 bp, Homo sapien
ctggcggagccgcaagttacaaccc

SEQ ID NO: 4397855 - DNA, 25 bp, Homo sapien
aggcgcctggcaaactcacactaca

SEQ ID NO: 4397856 - DNA, 25 bp, Homo sapien
cctcagtagcaataatcccaacggc

SEQ ID NO: 4397857 - DNA, 25 bp, Homo sapien
gccagcgctaagacaatacacaaag

SEQ ID NO: 4397858 - DNA, 25 bp, Homo sapien
gagcagggaaccggcgctcctctgc

SEQ ID NO: 4397859 - DNA, 25 bp, Homo sapien
ctctttcggccagcgctaagacaat

SEQ ID NO: 4397860 - DNA, 25 bp, Homo sapien
tttcggccagcgctaagacaataca

SEQ ID NO: 4397861 - DNA, 25 bp, Homo sapien
tcagcgggttactcgggaacaccca

SEQ ID NO: 4397862 - DNA, 25 bp, Homo sapien
agcaacttgtcgctcgggcgccaag

SEQ ID NO: 4397863 - DNA, 25 bp, Homo sapien
gccgcgccgcgagacgacagaagca

SEQ ID NO: 4397864 - DNA, 25 bp, Homo sapien
tacttcagcgggttactcgggaaca

SEQ ID NO: 4397865 - DNA, 25 bp, Homo sapien
cccgctggtcgtgcttcgtaaattc

SEQ ID NO: 4397866 - DNA, 25 bp, Homo sapien
gaaatccttggctgtgtgaatctcc

SEQ ID NO: 4397867 - DNA, 25 bp, Homo sapien
tctggtcgtcgtattcccgctggtc

SEQ ID NO: 4397868 - DNA, 25 bp, Homo sapien
cagctccgggaacgcaggcttgttg

SEQ ID NO: 4397869 - DNA, 25 bp, Homo sapien
tccgtgcgctctgggcgtgcgagct

SEQ ID NO: 4397870 - DNA, 25 bp, Homo sapien
tgcagcgagggtgcgtgtgtggccc

SEQ ID NO: 4397871 - DNA, 25 bp, Homo sapien
cttcatgcaaaacgcgccgagtagc

SEQ ID NO: 4397872 - DNA, 25 bp, Homo sapien
tgcgagcttcgggaggagctggact

SEQ ID NO: 4397873 - DNA, 25 bp, Homo sapien
aacacatcaataacacctgggtagg

SEQ ID NO: 4397874 - DNA, 25 bp, Homo sapien
cctcccagggtaggcgtcaatctgt

SEQ ID NO: 4397875 - DNA, 25 bp, Homo sapien
taatcatgcaaactagctaatggcc

SEQ ID NO: 4397876 - DNA, 25 bp, Homo sapien
taattaaatctaccgaagaggctag

SEQ ID NO: 4397877 - DNA, 25 bp, Homo sapien
aaatttcaaatagggccagttgcag

SEQ ID NO: 4397878 - DNA, 25 bp, Homo sapien
taagtacctacaacaagaaagtaca

SEQ ID NO: 4397879 - DNA, 25 bp, Homo sapien
caaaaatttcaaatagggccagttg

SEQ ID NO: 4397880 - DNA, 25 bp, Homo sapien
agcaataagtacctacaacaagaaa

SEQ ID NO: 4397881 - DNA, 25 bp, Homo sapien
gagattggcctttcctactcagcat

SEQ ID NO: 4397882 - DNA, 25 bp, Homo sapien
gatagtttgaccctttatgttgcta

SEQ ID NO: 4397883 - DNA, 25 bp, Homo sapien
ttgtgtttaaatgagctgatgatgc

SEQ ID NO: 4397884 - DNA, 25 bp, Homo sapien
catccttaaatcctagaaacctttg

SEQ ID NO: 4397885 - DNA, 25 bp, Homo sapien
tgcaagcttgttctcctctgcgctc

SEQ ID NO: 4397886 - DNA, 25 bp, Homo sapien
tccttgtagttgtctggttcattcc

SEQ ID NO: 4397887 - DNA, 25 bp, Homo sapien
ctctgcgctcccactgcatcttgct

SEQ ID NO: 4397888 - DNA, 25 bp, Homo sapien
agaatccctcgctgatccttgtagt

SEQ ID NO: 4397889 - DNA, 25 bp, Homo sapien
gttagactcagtgcctttcggggta

SEQ ID NO: 4397890 - DNA, 25 bp, Homo sapien
tgttagactcagtgcctttcggggt

SEQ ID NO: 4397891 - DNA, 25 bp, Homo sapien
gggtcctgccatgtgtaaatcatac

SEQ ID NO: 4397892 - DNA, 25 bp, Homo sapien
tgcagtccccgtctgtcagggtcct

SEQ ID NO: 4397893 - DNA, 25 bp, Homo sapien
tatttgtgctgtgagatgacatccc

SEQ ID NO: 4397894 - DNA, 25 bp, Homo sapien
tgggctgcactgtctgtaaatctgg

SEQ ID NO: 4397895 - DNA, 25 bp, Homo sapien
cactacctgaatggtagtgaatgat

SEQ ID NO: 4397896 - DNA, 25 bp, Homo sapien
tctcactacctgaatggtagtgaat

SEQ ID NO: 4397897 - DNA, 25 bp, Homo sapien
gctccgaaatggtgttctcactacc

SEQ ID NO: 4397898 - DNA, 25 bp, Homo sapien
tccgaaatggtgttctcactacctg

SEQ ID NO: 4397899 - DNA, 25 bp, Homo sapien
catgcatggaccactcctctaggca

SEQ ID NO: 4397900 - DNA, 25 bp, Homo sapien
tgcatgcatggaccactcctctagg

SEQ ID NO: 4397901 - DNA, 25 bp, Homo sapien
gcatgcatggaccactcctctaggc

SEQ ID NO: 4397902 - DNA, 25 bp, Homo sapien
cctggactaaaaggaatgacaaaat

SEQ ID NO: 4397903 - DNA, 25 bp, Homo sapien
ccaattgtcttgaggcaagcggctg

SEQ ID NO: 4397904 - DNA, 25 bp, Homo sapien
caaggaggatcgtgaacagctgtca

SEQ ID NO: 4397905 - DNA, 25 bp, Homo sapien
tttgtgaaatgacagacacctggac

SEQ ID NO: 4397906 - DNA, 25 bp, Homo sapien
ccccgagttatctaatctgtccagc

SEQ ID NO: 4397907 - DNA, 25 bp, Homo sapien
gtgacctgcgggttaaagtctccac

SEQ ID NO: 4397908 - DNA, 25 bp, Homo sapien
cctgcgggttaaagtctccactgcc

SEQ ID NO: 4397909 - DNA, 25 bp, Homo sapien
tctaatctgtccagcggcacaagct

SEQ ID NO: 4397910 - DNA, 25 bp, Homo sapien
cagaaggctgagtggcatagctcat

SEQ ID NO: 4397911 - DNA, 25 bp, Homo sapien
gtcctcttcatcaggagtctcagaa

SEQ ID NO: 4397912 - DNA, 25 bp, Homo sapien
tcagaaggctgagtggcatagctca

SEQ ID NO: 4397913 - DNA, 25 bp, Homo sapien
tgtggtcctcttcatcaggagtctc

SEQ ID NO: 4397914 - DNA, 25 bp, Homo sapien
tatcgtgacagtcttgtacttgctg

SEQ ID NO: 4397915 - DNA, 25 bp, Homo sapien
ggctctacaattgaatcagactcat

SEQ ID NO: 4397916 - DNA, 25 bp, Homo sapien
atcagactcataggttttacaattc

SEQ ID NO: 4397917 - DNA, 25 bp, Homo sapien
gaaaagccatacactcaggctctac

SEQ ID NO: 4397918 - DNA, 25 bp, Homo sapien
tactggtgagatctcctaatgtcac

SEQ ID NO: 4397919 - DNA, 25 bp, Homo sapien
gagatctcctaatgtcaccagatga

SEQ ID NO: 4397920 - DNA, 25 bp, Homo sapien
tggtgagatctcctaatgtcaccag

SEQ ID NO: 4397921 - DNA, 25 bp, Homo sapien
gtgagatctcctaatgtcaccagat

SEQ ID NO: 4397922 - DNA, 25 bp, Homo sapien
aaactctgggcagtcttaagaaagt

SEQ ID NO: 4397923 - DNA, 25 bp, Homo sapien
gaagtgccagcagttaatgctctga

SEQ ID NO: 4397924 - DNA, 25 bp, Homo sapien
aatgctctgaaggacaaactctggg

SEQ ID NO: 4397925 - DNA, 25 bp, Homo sapien
acatatgcaaatgcagaagtgccag

SEQ ID NO: 4397926 - DNA, 25 bp, Homo sapien
gagtggtaaggcgttgccattccat

SEQ ID NO: 4397927 - DNA, 25 bp, Homo sapien
cctccttgggagtggtaaggcgttg

SEQ ID NO: 4397928 - DNA, 25 bp, Homo sapien
ccttgggagtggtaaggcgttgcca

SEQ ID NO: 4397929 - DNA, 25 bp, Homo sapien
tgggagtggtaaggcgttgccattc

SEQ ID NO: 4397930 - DNA, 25 bp, Homo sapien
aatatccacactgagtgaataagag

SEQ ID NO: 4397931 - DNA, 25 bp, Homo sapien
gattttcgtaaaattctagcctctc

SEQ ID NO: 4397932 - DNA, 25 bp, Homo sapien
cagtaactccagtgtcttcctcaaa

SEQ ID NO: 4397933 - DNA, 25 bp, Homo sapien
tcaaagccactccacatcattctta

SEQ ID NO: 4397934 - DNA, 25 bp, Homo sapien
ccagttccaaacagattttcagagg

SEQ ID NO: 4397935 - DNA, 25 bp, Homo sapien
taattgggcccctcagtgagctttg

SEQ ID NO: 4397936 - DNA, 25 bp, Homo sapien
caatggtgtgcgtgatttcttgtcc

SEQ ID NO: 4397937 - DNA, 25 bp, Homo sapien
tcctgactggtgatctggtaaccaa

SEQ ID NO: 4397938 - DNA, 25 bp, Homo sapien
tgctccttctgatttgatggtctga

SEQ ID NO: 4397939 - DNA, 25 bp, Homo sapien
aagaccaggctccagccttcttcat

SEQ ID NO: 4397940 - DNA, 25 bp, Homo sapien
taagaccaggctccagccttcttca

SEQ ID NO: 4397941 - DNA, 25 bp, Homo sapien
ataagaccaggctccagccttcttc

SEQ ID NO: 4397942 - DNA, 25 bp, Homo sapien
ttctattcgccgttggagggtcagg

SEQ ID NO: 4397943 - DNA, 25 bp, Homo sapien
tcagcatttctattcgccgttggag

SEQ ID NO: 4397944 - DNA, 25 bp, Homo sapien
tattttcgtggctggcaacttcaga

SEQ ID NO: 4397945 - DNA, 25 bp, Homo sapien
tgccagaaagtattttcgtggctgg

SEQ ID NO: 4397946 - DNA, 25 bp, Homo sapien
tagcttgtcatacctcagtaatagg

SEQ ID NO: 4397947 - DNA, 25 bp, Homo sapien
agcttgtcatacctcagtaataggg

SEQ ID NO: 4397948 - DNA, 25 bp, Homo sapien
gcttgtcatacctcagtaatagggg

SEQ ID NO: 4397949 - DNA, 25 bp, Homo sapien
gcctctaagacctgtgaccaaagga

SEQ ID NO: 4397950 - DNA, 25 bp, Homo sapien
catgggaggataaagctgattggcc

SEQ ID NO: 4397951 - DNA, 25 bp, Homo sapien
cattccaggagctaccatcaattgt

SEQ ID NO: 4397952 - DNA, 25 bp, Homo sapien
catcaattgttggagtaggcatggg

SEQ ID NO: 4397953 - DNA, 25 bp, Homo sapien
attgaggacacacggatcgcagcac

SEQ ID NO: 4397954 - DNA, 25 bp, Homo sapien
tgaggacacacggatcgcagcacag

SEQ ID NO: 4397955 - DNA, 25 bp, Homo sapien
cagattgaggacacacggatcgcag

SEQ ID NO: 4397956 - DNA, 25 bp, Homo sapien
ggacacacggatcgcagcacagtgc

SEQ ID NO: 4397957 - DNA, 25 bp, Homo sapien
tggcagaaccacttcacagtcaaca

SEQ ID NO: 4397958 - DNA, 25 bp, Homo sapien
gcagaaccacttcacagtcaacaca

SEQ ID NO: 4397959 - DNA, 25 bp, Homo sapien
gaaccacttcacagtcaacacacat

SEQ ID NO: 4397960 - DNA, 25 bp, Homo sapien
ctagagatgacatccagcagtggca

SEQ ID NO: 4397961 - DNA, 25 bp, Homo sapien
ccaacttcaggcagcatcaacaagc

SEQ ID NO: 4397962 - DNA, 25 bp, Homo sapien
gaaccccaacttcaggcagcatcaa

SEQ ID NO: 4397963 - DNA, 25 bp, Homo sapien
accccaacttcaggcagcatcaaca

SEQ ID NO: 4397964 - DNA, 25 bp, Homo sapien
cagaaccccaacttcaggcagcatc

SEQ ID NO: 4397965 - DNA, 25 bp, Homo sapien
atcatccagtttgatagtcagtcct

SEQ ID NO: 4397966 - DNA, 25 bp, Homo sapien
atccagtttgatagtcagtcctgca

SEQ ID NO: 4397967 - DNA, 25 bp, Homo sapien
gaagtctgtctcagatgcaaggtat

SEQ ID NO: 4397968 - DNA, 25 bp, Homo sapien
aagtctgtctcagatgcaaggtatt

SEQ ID NO: 4397969 - DNA, 25 bp, Homo sapien
gaagacatgctctctacatgtctca

SEQ ID NO: 4397970 - DNA, 25 bp, Homo sapien
ggctaatgtcataggcatgggcaga

SEQ ID NO: 4397971 - DNA, 25 bp, Homo sapien
atgtcataggcatgggcagattcat

SEQ ID NO: 4397972 - DNA, 25 bp, Homo sapien
taatgtcataggcatgggcagattc

SEQ ID NO: 4397973 - DNA, 25 bp, Homo sapien
tctttaagtggctggtgatgtatgc

SEQ ID NO: 4397974 - DNA, 25 bp, Homo sapien
catgagtctttaagtggctggtgat

SEQ ID NO: 4397975 - DNA, 25 bp, Homo sapien
taagtggctggtgatgtatgctgca

SEQ ID NO: 4397976 - DNA, 25 bp, Homo sapien
gagtctttaagtggctggtgatgta

SEQ ID NO: 4397977 - DNA, 25 bp, Homo sapien
cagattgagtcaccggcagagctgt

SEQ ID NO: 4397978 - DNA, 25 bp, Homo sapien
gacagattgagtcaccggcagagct

SEQ ID NO: 4397979 - DNA, 25 bp, Homo sapien
cttgacagattgagtcaccggcaga

SEQ ID NO: 4397980 - DNA, 25 bp, Homo sapien
cagcttaaggggtcaggtcttgaga

SEQ ID NO: 4397981 - DNA, 25 bp, Homo sapien
ctgcaatggtcgagaccaacgaagt

SEQ ID NO: 4397982 - DNA, 25 bp, Homo sapien
aacgaagttcggctgctgtccccag

SEQ ID NO: 4397983 - DNA, 25 bp, Homo sapien
aatggtcgagaccaacgaagttcgg

SEQ ID NO: 4397984 - DNA, 25 bp, Homo sapien
tcgagaccaacgaagttcggctgct

SEQ ID NO: 4397985 - DNA, 25 bp, Homo sapien
ccttgatccctgtgtggcaggattc

SEQ ID NO: 4397986 - DNA, 25 bp, Homo sapien
ggacaccaccttgatccctgtgtgg

SEQ ID NO: 4397987 - DNA, 25 bp, Homo sapien
tgtggcaggattcatggcgcctcag

SEQ ID NO: 4397988 - DNA, 25 bp, Homo sapien
catggcgcctcaggtgatagctgtc

SEQ ID NO: 4397989 - DNA, 25 bp, Homo sapien
cctgattcttgggtgaaatgctgta

SEQ ID NO: 4397990 - DNA, 25 bp, Homo sapien
cacttctacatgaagccttccaagg

SEQ ID NO: 4397991 - DNA, 25 bp, Homo sapien
gaggattcctaggatccccacactt

SEQ ID NO: 4397992 - DNA, 25 bp, Homo sapien
gctgtagaaccactgcaggaatcgc

SEQ ID NO: 4397993 - DNA, 25 bp, Homo sapien
gctccaaggggcattgttttcttcc

SEQ ID NO: 4397994 - DNA, 25 bp, Homo sapien
ttgctccaaggggcattgttttctt

SEQ ID NO: 4397995 - DNA, 25 bp, Homo sapien
tctctgcctcttcaatggcaatata

SEQ ID NO: 4397996 - DNA, 25 bp, Homo sapien
ctctctgcctcttcaatggcaatat

SEQ ID NO: 4397997 - DNA, 25 bp, Homo sapien
caaaaaagcacccacacggctttgg

SEQ ID NO: 4397998 - DNA, 25 bp, Homo sapien
ccatggaatatggtccttgtggtct

SEQ ID NO: 4397999 - DNA, 25 bp, Homo sapien
ttgctctgtctctagtcaaaaaagc

SEQ ID NO: 4398000 - DNA, 25 bp, Homo sapien
actgatgtctcgctgggttggtgca

SEQ ID NO: 4398001 - DNA, 25 bp, Homo sapien
actgctgccacgagcctgaatcctc

SEQ ID NO: 4398002 - DNA, 25 bp, Homo sapien
cttcccactgctgccacgagcctga

SEQ ID NO: 4398003 - DNA, 25 bp, Homo sapien
cccactgctgccacgagcctgaatc

SEQ ID NO: 4398004 - DNA, 25 bp, Homo sapien
tgctgccacgagcctgaatcctcat

SEQ ID NO: 4398005 - DNA, 25 bp, Homo sapien
cgttttacagagcaatcctcctcct

SEQ ID NO: 4398006 - DNA, 25 bp, Homo sapien
tatttcaagtcgttttacagagcaa

SEQ ID NO: 4398007 - DNA, 25 bp, Homo sapien
aagctctgggtacagctgattggga

SEQ ID NO: 4398008 - DNA, 25 bp, Homo sapien
caaagctctgggtacagctgattgg

SEQ ID NO: 4398009 - DNA, 25 bp, Homo sapien
cgcagagttccaactctaagtgaca

SEQ ID NO: 4398010 - DNA, 25 bp, Homo sapien
gctgctggtgtgtcgcagagttcca

SEQ ID NO: 4398011 - DNA, 25 bp, Homo sapien
tgtgtcgcagagttccaactctaag

SEQ ID NO: 4398012 - DNA, 25 bp, Homo sapien
tccaactctaagtgacaccactgag

SEQ ID NO: 4398013 - DNA, 25 bp, Homo sapien
ctcacgcaaacacggagaggctgct

SEQ ID NO: 4398014 - DNA, 25 bp, Homo sapien
cattagacggtcattaaaagagatc

SEQ ID NO: 4398015 - DNA, 25 bp, Homo sapien
gagatctgaagagtcctgaggcacg

SEQ ID NO: 4398016 - DNA, 25 bp, Homo sapien
tggccaacctgtatattcatgagac

SEQ ID NO: 4398017 - DNA, 25 bp, Homo sapien
gaaatatctttctttgcacacatgg

SEQ ID NO: 4398018 - DNA, 25 bp, Homo sapien
tgactatggctacaaatgtgtggga

SEQ ID NO: 4398019 - DNA, 25 bp, Homo sapien
gggcattctctcctaacatccaaga

SEQ ID NO: 4398020 - DNA, 25 bp, Homo sapien
cacttcagatatttgtaggcgattc

SEQ ID NO: 4398021 - DNA, 25 bp, Homo sapien
tgtggcctgtttttagtcatgcact

SEQ ID NO: 4398022 - DNA, 25 bp, Homo sapien
tgtgtgcttacagaacttcacaggt

SEQ ID NO: 4398023 - DNA, 25 bp, Homo sapien
tagcatttcgtagaggacaagtcag

SEQ ID NO: 4398024 - DNA, 25 bp, Homo sapien
gggcgaaatccccaaaatcattgat

SEQ ID NO: 4398025 - DNA, 25 bp, Homo sapien
tcagagtttgtaattggacaggagg

SEQ ID NO: 4398026 - DNA, 25 bp, Homo sapien
tgtattcagcagtaaggccctggtg

SEQ ID NO: 4398027 - DNA, 25 bp, Homo sapien
gaagaaatcataaagcggtcagagt

SEQ ID NO: 4398028 - DNA, 25 bp, Homo sapien
caggaggtggcctataacttacttg

SEQ ID NO: 4398029 - DNA, 25 bp, Homo sapien
taactgtgcccatgccaagattata

SEQ ID NO: 4398030 - DNA, 25 bp, Homo sapien
tccacacaattctggcttattatag

SEQ ID NO: 4398031 - DNA, 25 bp, Homo sapien
tggcccctaaacactatacactgag

SEQ ID NO: 4398032 - DNA, 25 bp, Homo sapien
tacactgagtgatgccaaactttgg

SEQ ID NO: 4398033 - DNA, 25 bp, Homo sapien
gttcatactactaatttgactacag

SEQ ID NO: 4398034 - DNA, 25 bp, Homo sapien
tgtgacaactaatagtaaaactttc

SEQ ID NO: 4398035 - DNA, 25 bp, Homo sapien
caaagaccaaatgttgcctcaattt

SEQ ID NO: 4398036 - DNA, 25 bp, Homo sapien
tctctatgaaaagcataccagtgaa

SEQ ID NO: 4398037 - DNA, 25 bp, Homo sapien
tatctaaggtcccttgctgcaaggt

SEQ ID NO: 4398038 - DNA, 25 bp, Homo sapien
tgagcatgtacgacgacaattctga

SEQ ID NO: 4398039 - DNA, 25 bp, Homo sapien
tctcattggtaaagcatacagtcag

SEQ ID NO: 4398040 - DNA, 25 bp, Homo sapien
tgaatgcttgaatggagagaggaaa

SEQ ID NO: 4398041 - DNA, 25 bp, Homo sapien
ttttgatcaacagccagagttcatg

SEQ ID NO: 4398042 - DNA, 25 bp, Homo sapien
ttatgggaggccaggttgagtcttc

SEQ ID NO: 4398043 - DNA, 25 bp, Homo sapien
gaatccatttttgccatcacctgaa

SEQ ID NO: 4398044 - DNA, 25 bp, Homo sapien
catagcctccgttgatgtagaatcc

SEQ ID NO: 4398045 - DNA, 25 bp, Homo sapien
tccacgatgttatggttgggatcaa

SEQ ID NO: 4398046 - DNA, 25 bp, Homo sapien
attgggtgagggctaccaccaaaat

SEQ ID NO: 4398047 - DNA, 25 bp, Homo sapien
aaagccacacagaattgggtgaggg

SEQ ID NO: 4398048 - DNA, 25 bp, Homo sapien
aattaaaaccctccacgatgttatg

SEQ ID NO: 4398049 - DNA, 25 bp, Homo sapien
cagaatgaaaattgtgaggcccaag

SEQ ID NO: 4398050 - DNA, 25 bp, Homo sapien
atgaaaattgtgaggcccaaggcag

SEQ ID NO: 4398051 - DNA, 25 bp, Homo sapien
aacagaatgaaaattgtgaggccca

SEQ ID NO: 4398052 - DNA, 25 bp, Homo sapien
tccacggtatataacttgaaagtca

SEQ ID NO: 4398053 - DNA, 25 bp, Homo sapien
atcatttcaccagtgaggtacaact

SEQ ID NO: 4398054 - DNA, 25 bp, Homo sapien
gaaccaggaatcagagttgcatttc

SEQ ID NO: 4398055 - DNA, 25 bp, Homo sapien
aaagatgaatgctactgtgatatag

SEQ ID NO: 4398056 - DNA, 25 bp, Homo sapien
aatggctttcccttagaaaagatga

SEQ ID NO: 4398057 - DNA, 25 bp, Homo sapien
atagatgggttttcgaaatggcttt

SEQ ID NO: 4398058 - DNA, 25 bp, Homo sapien
ggtctatatggagccagctttgggt

SEQ ID NO: 4398059 - DNA, 25 bp, Homo sapien
ggtagacctcacaataccaaggctg

SEQ ID NO: 4398060 - DNA, 25 bp, Homo sapien
ctgtattggtagacctcacaatacc

SEQ ID NO: 4398061 - DNA, 25 bp, Homo sapien
cactgatctgcacaatgcaggagaa

SEQ ID NO: 4398062 - DNA, 25 bp, Homo sapien
gtcaggtcgataaattttctcttca

SEQ ID NO: 4398063 - DNA, 25 bp, Homo sapien
cctagaggtgggcatctaacccacg

SEQ ID NO: 4398064 - DNA, 25 bp, Homo sapien
cccacgtcaggtcgataaattttct

SEQ ID NO: 4398065 - DNA, 25 bp, Homo sapien
gggcatctaacccacgtcaggtcga

SEQ ID NO: 4398066 - DNA, 25 bp, Homo sapien
cttgcatgagatactggtaatttcc

SEQ ID NO: 4398067 - DNA, 25 bp, Homo sapien
taatggctacatcttgcatgagata

SEQ ID NO: 4398068 - DNA, 25 bp, Homo sapien
tgttaaacagaccatcaaagtaatg

SEQ ID NO: 4398069 - DNA, 25 bp, Homo sapien
gatactggtaatttccaaagagttg

SEQ ID NO: 4398070 - DNA, 25 bp, Homo sapien
gctgcagagtggactatggtttcta

SEQ ID NO: 4398071 - DNA, 25 bp, Homo sapien
ttaaggttcttctgcgacactctta

SEQ ID NO: 4398072 - DNA, 25 bp, Homo sapien
gacactcttatttaggtctagacca

SEQ ID NO: 4398073 - DNA, 25 bp, Homo sapien
gaccactagaatgaatggctgcaga

SEQ ID NO: 4398074 - DNA, 25 bp, Homo sapien
cctgtcaacctccaattcttcctgt

SEQ ID NO: 4398075 - DNA, 25 bp, Homo sapien
gaaaggctgccattggttcctcagt

SEQ ID NO: 4398076 - DNA, 25 bp, Homo sapien
tccatccgtggaggctttggaaaat

SEQ ID NO: 4398077 - DNA, 25 bp, Homo sapien
tcagtgtccctgtcaacctccaatt

SEQ ID NO: 4398078 - DNA, 25 bp, Homo sapien
taaatactccaaaggatgaaaccag

SEQ ID NO: 4398079 - DNA, 25 bp, Homo sapien
caaaggatgaaaccagagcagctcg

SEQ ID NO: 4398080 - DNA, 25 bp, Homo sapien
gccgtacatggtcaagtatttaaat

SEQ ID NO: 4398081 - DNA, 25 bp, Homo sapien
cagtaatgcactgataaactggatt

SEQ ID NO: 4398082 - DNA, 25 bp, Homo sapien
tagaggtaaaaggggatgccacaga

SEQ ID NO: 4398083 - DNA, 25 bp, Homo sapien
atgcctgcatgagccgctttcaaag

SEQ ID NO: 4398084 - DNA, 25 bp, Homo sapien
tggatgttggttgttttagaggtaa

SEQ ID NO: 4398085 - DNA, 25 bp, Homo sapien
atgaaatgcctgcatgagccgcttt

SEQ ID NO: 4398086 - DNA, 25 bp, Homo sapien
tagaggtggatataaacagcaaaat

SEQ ID NO: 4398087 - DNA, 25 bp, Homo sapien
gtttccagaaagcatcggaagtgtc

SEQ ID NO: 4398088 - DNA, 25 bp, Homo sapien
tccaacccacactcaggtagaggtg

SEQ ID NO: 4398089 - DNA, 25 bp, Homo sapien
aagcatcggaagtgtctcatctccc

SEQ ID NO: 4398090 - DNA, 25 bp, Homo sapien
cccacagtcgttagctccatctcca

SEQ ID NO: 4398091 - DNA, 25 bp, Homo sapien
tccatctccacacatgcccacataa

SEQ ID NO: 4398092 - DNA, 25 bp, Homo sapien
atctccacacatgcccacataataa

SEQ ID NO: 4398093 - DNA, 25 bp, Homo sapien
ctccatctccacacatgcccacata

SEQ ID NO: 4398094 - DNA, 25 bp, Homo sapien
tctgcccaggagacattcttgcaaa

SEQ ID NO: 4398095 - DNA, 25 bp, Homo sapien
tatcacttggtatgatttcccactc

SEQ ID NO: 4398096 - DNA, 25 bp, Homo sapien
gatttcccactcattgcaaaatggt

SEQ ID NO: 4398097 - DNA, 25 bp, Homo sapien
ttggaagcaagctgttgaaatgctg

SEQ ID NO: 4398098 - DNA, 25 bp, Homo sapien
aatgctgaaatatcacttggtatga

SEQ ID NO: 4398099 - DNA, 25 bp, Homo sapien
aattcaggcagcatgcaccgatgga

SEQ ID NO: 4398100 - DNA, 25 bp, Homo sapien
caaaggacctgggttacagcatgca

SEQ ID NO: 4398101 - DNA, 25 bp, Homo sapien
tatagtacaatctaaatgcccgtgg

SEQ ID NO: 4398102 - DNA, 25 bp, Homo sapien
tctgtcacaagagcatagggagctt

SEQ ID NO: 4398103 - DNA, 25 bp, Homo sapien
gcctggagggatcatttcagaattc

SEQ ID NO: 4398104 - DNA, 25 bp, Homo sapien
ttcagaattctttgcaacagtaatg

SEQ ID NO: 4398105 - DNA, 25 bp, Homo sapien
gtaatggccgtttgaaggttatcac

SEQ ID NO: 4398106 - DNA, 25 bp, Homo sapien
ggttcatcggcctcaacaatgatca

SEQ ID NO: 4398107 - DNA, 25 bp, Homo sapien
cttcaaagcttctggtcctgtcggg

SEQ ID NO: 4398108 - DNA, 25 bp, Homo sapien
gctgcacatgtttttaggtaaggga

SEQ ID NO: 4398109 - DNA, 25 bp, Homo sapien
ggcagctgcacatgtttttaggtaa

SEQ ID NO: 4398110 - DNA, 25 bp, Homo sapien
tggtcctgtcggggcagctgcacat

SEQ ID NO: 4398111 - DNA, 25 bp, Homo sapien
tacatgaactcactcagctcacaca

SEQ ID NO: 4398112 - DNA, 25 bp, Homo sapien
tgttcttatgcctaggatacaatca

SEQ ID NO: 4398113 - DNA, 25 bp, Homo sapien
tacagggtaacaaattcgacaacag

SEQ ID NO: 4398114 - DNA, 25 bp, Homo sapien
caatcaacttgccaggcccctagaa

SEQ ID NO: 4398115 - DNA, 25 bp, Homo sapien
acagtcctgatacgggcctcactca

SEQ ID NO: 4398116 - DNA, 25 bp, Homo sapien
atcacagtcctgatacgggcctcac

SEQ ID NO: 4398117 - DNA, 25 bp, Homo sapien
gaaatgttaactctgactccacttt

SEQ ID NO: 4398118 - DNA, 25 bp, Homo sapien
actcagttccttcaagaccagtttg

SEQ ID NO: 4398119 - DNA, 25 bp, Homo sapien
tttattaatgcaatacaggcacatt

SEQ ID NO: 4398120 - DNA, 25 bp, Homo sapien
taagttttattaatgcaatacaggc

SEQ ID NO: 4398121 - DNA, 25 bp, Homo sapien
aacaatgtgcttatcttccaactct

SEQ ID NO: 4398122 - DNA, 25 bp, Homo sapien
aatattaaagtatatctacgtaggc

SEQ ID NO: 4398123 - DNA, 25 bp, Homo sapien
ccatctttaaggttttgtgggcaag

SEQ ID NO: 4398124 - DNA, 25 bp, Homo sapien
ccttgcaccgtgtaactcctcagtt

SEQ ID NO: 4398125 - DNA, 25 bp, Homo sapien
gctcgacttctgaaagattccccat

SEQ ID NO: 4398126 - DNA, 25 bp, Homo sapien
gcaatgacacggaagccttgcaccg

SEQ ID NO: 4398127 - DNA, 25 bp, Homo sapien
gaagaaacaggtaagtgtaaggtca

SEQ ID NO: 4398128 - DNA, 25 bp, Homo sapien
cagggtagaagaaacaggtaagtgt

SEQ ID NO: 4398129 - DNA, 25 bp, Homo sapien
aagaaacaggtaagtgtaaggtcat

SEQ ID NO: 4398130 - DNA, 25 bp, Homo sapien
ctgccagggtagaagaaacaggtaa

SEQ ID NO: 4398131 - DNA, 25 bp, Homo sapien
ctggcacaaggtgatgatggcttcc

SEQ ID NO: 4398132 - DNA, 25 bp, Homo sapien
ttctccccagctagctgagcgatca

SEQ ID NO: 4398133 - DNA, 25 bp, Homo sapien
ttcagatctgcagaacctggccacc

SEQ ID NO: 4398134 - DNA, 25 bp, Homo sapien
atcacggacatcctctgcaggctcg

SEQ ID NO: 4398135 - DNA, 25 bp, Homo sapien
ccaaatttgcaggagtctacaatgc

SEQ ID NO: 4398136 - DNA, 25 bp, Homo sapien
tttatgatgtttgaaactgacgtcc

SEQ ID NO: 4398137 - DNA, 25 bp, Homo sapien
tgaaactgacgtcccaaatttgcag

SEQ ID NO: 4398138 - DNA, 25 bp, Homo sapien
tttgcaggagtctacaatgcaatct

SEQ ID NO: 4398139 - DNA, 25 bp, Homo sapien
tctgtatgtggagtggaaggttccc

SEQ ID NO: 4398140 - DNA, 25 bp, Homo sapien
cagctttaggatgttcttcggaggc

SEQ ID NO: 4398141 - DNA, 25 bp, Homo sapien
gacagatcagccctcctataatgga

SEQ ID NO: 4398142 - DNA, 25 bp, Homo sapien
tagttagggccaggaccaaagccag

SEQ ID NO: 4398143 - DNA, 25 bp, Homo sapien
ggcagtgccctcaaacattttgagg

SEQ ID NO: 4398144 - DNA, 25 bp, Homo sapien
caggcagtgccctcaaacattttga

SEQ ID NO: 4398145 - DNA, 25 bp, Homo sapien
ccaggcagtgccctcaaacattttg

SEQ ID NO: 4398146 - DNA, 25 bp, Homo sapien
aggcagtgccctcaaacattttgag

SEQ ID NO: 4398147 - DNA, 25 bp, Homo sapien
cctggcctgaggcaaagctgtgggc

SEQ ID NO: 4398148 - DNA, 25 bp, Homo sapien
ggcctgaggcaaagctgtgggcttc

SEQ ID NO: 4398149 - DNA, 25 bp, Homo sapien
gcacagcctggcctgaggcaaagct

SEQ ID NO: 4398150 - DNA, 25 bp, Homo sapien
agtgggctccatggcacagcctggc

SEQ ID NO: 4398151 - DNA, 25 bp, Homo sapien
tggcaccaaaatagggtacttagag

SEQ ID NO: 4398152 - DNA, 25 bp, Homo sapien
tcagccactgttggcaccaaaatag

SEQ ID NO: 4398153 - DNA, 25 bp, Homo sapien
cactgttggcaccaaaatagggtac

SEQ ID NO: 4398154 - DNA, 25 bp, Homo sapien
agcctcagccactgttggcaccaaa

SEQ ID NO: 4398155 - DNA, 25 bp, Homo sapien
catcgccgctcaaattgagaaggca

SEQ ID NO: 4398156 - DNA, 25 bp, Homo sapien
cgccgctcaaattgagaaggcaagt

SEQ ID NO: 4398157 - DNA, 25 bp, Homo sapien
ggccatcgccgctcaaattgagaag

SEQ ID NO: 4398158 - DNA, 25 bp, Homo sapien
cagaggccatcgccgctcaaattga

SEQ ID NO: 4398159 - DNA, 25 bp, Homo sapien
cccagaggtccagcccatcttcagt

SEQ ID NO: 4398160 - DNA, 25 bp, Homo sapien
cagttgtcagcagtagggacagtcc

SEQ ID NO: 4398161 - DNA, 25 bp, Homo sapien
agcccatcttcagtgagagtgccag

SEQ ID NO: 4398162 - DNA, 25 bp, Homo sapien
cagtagggacagtcccccagaggtc

SEQ ID NO: 4398163 - DNA, 25 bp, Homo sapien
tccaaccgtggcaggtaactgtgcc

SEQ ID NO: 4398164 - DNA, 25 bp, Homo sapien
tctttctaacaaccaaggctgcacc

SEQ ID NO: 4398165 - DNA, 25 bp, Homo sapien
ccttgtacccctgtgcttgtcagct

SEQ ID NO: 4398166 - DNA, 25 bp, Homo sapien
tccccacatgcagtgggccccttgt

SEQ ID NO: 4398167 - DNA, 25 bp, Homo sapien
cctgcttggtaaacgcagtgttccc

SEQ ID NO: 4398168 - DNA, 25 bp, Homo sapien
caggacctgcttggtaaacgcagtg

SEQ ID NO: 4398169 - DNA, 25 bp, Homo sapien
aaacgcagtgttccccatgtggcat

SEQ ID NO: 4398170 - DNA, 25 bp, Homo sapien
ggtaaacgcagtgttccccatgtgg

SEQ ID NO: 4398171 - DNA, 25 bp, Homo sapien
tttgcccacacatgttgattctctg

SEQ ID NO: 4398172 - DNA, 25 bp, Homo sapien
tctgagcatacacgttgcctatggt

SEQ ID NO: 4398173 - DNA, 25 bp, Homo sapien
agcacacgaggtttatttgcccaca

SEQ ID NO: 4398174 - DNA, 25 bp, Homo sapien
ttgcctatggtcagggcagctggca

SEQ ID NO: 4398175 - DNA, 25 bp, Homo sapien
gatggatctcactaagtcccctttg

SEQ ID NO: 4398176 - DNA, 25 bp, Homo sapien
tgaaggcatcgctgtatagtttgaa

SEQ ID NO: 4398177 - DNA, 25 bp, Homo sapien
acgatgaacttgaaggcatcgctgt

SEQ ID NO: 4398178 - DNA, 25 bp, Homo sapien
gggtacaggatggatctcactaagt

SEQ ID NO: 4398179 - DNA, 25 bp, Homo sapien
gatcaagtaaggctgcttgatggac

SEQ ID NO: 4398180 - DNA, 25 bp, Homo sapien
catagatcaagtaaggctgcttgat

SEQ ID NO: 4398181 - DNA, 25 bp, Homo sapien
aatcatagatcaagtaaggctgctt

SEQ ID NO: 4398182 - DNA, 25 bp, Homo sapien
gtaaggctgcttgatggacacttgg

SEQ ID NO: 4398183 - DNA, 25 bp, Homo sapien
tcctataatcctccaaactgtgaca

SEQ ID NO: 4398184 - DNA, 25 bp, Homo sapien
tgcaaaacgactgctcgtacaggcc

SEQ ID NO: 4398185 - DNA, 25 bp, Homo sapien
caaggcatagtgttctccatctggg

SEQ ID NO: 4398186 - DNA, 25 bp, Homo sapien
tgcccagagggcttgacctggataa

SEQ ID NO: 4398187 - DNA, 25 bp, Homo sapien
tattttgttgaatctatgtaagctc

SEQ ID NO: 4398188 - DNA, 25 bp, Homo sapien
tatgtaagctcaggtagttggtcag

SEQ ID NO: 4398189 - DNA, 25 bp, Homo sapien
tgtattttgttgaatctatgtaagc

SEQ ID NO: 4398190 - DNA, 25 bp, Homo sapien
ttgtattttgttgaatctatgtaag

SEQ ID NO: 4398191 - DNA, 25 bp, Homo sapien
tagaacacgggaacatgcaacaagg

SEQ ID NO: 4398192 - DNA, 25 bp, Homo sapien
tagatgtggtgtgtccctgagagaa

SEQ ID NO: 4398193 - DNA, 25 bp, Homo sapien
gaatccaacgggacttagatgtggt

SEQ ID NO: 4398194 - DNA, 25 bp, Homo sapien
agcgcgaacagcaccaggatctgct

SEQ ID NO: 4398195 - DNA, 25 bp, Homo sapien
cattcaccacgcagcttccatcaat

SEQ ID NO: 4398196 - DNA, 25 bp, Homo sapien
attcaccacgcagcttccatcaatc

SEQ ID NO: 4398197 - DNA, 25 bp, Homo sapien
gaatgtctccgggaaccaagagacg

SEQ ID NO: 4398198 - DNA, 25 bp, Homo sapien
gaataagaatgtctccgggaaccaa

SEQ ID NO: 4398199 - DNA, 25 bp, Homo sapien
tgtctccgggaaccaagagacggga

SEQ ID NO: 4398200 - DNA, 25 bp, Homo sapien
tggaagaataagaatgtctccggga

SEQ ID NO: 4398201 - DNA, 25 bp, Homo sapien
tacaatgattgtaacctggactttg

SEQ ID NO: 4398202 - DNA, 25 bp, Homo sapien
cgaggttatgcagcttaactgattg

SEQ ID NO: 4398203 - DNA, 25 bp, Homo sapien
tgtcttttacaatgattgtaacctg

SEQ ID NO: 4398204 - DNA, 25 bp, Homo sapien
tggactttgttgtggtcctccacga

SEQ ID NO: 4398205 - DNA, 25 bp, Homo sapien
gccacaaagttagggtgaaggcttg

SEQ ID NO: 4398206 - DNA, 25 bp, Homo sapien
tggccacagagtattctatgtaacc

SEQ ID NO: 4398207 - DNA, 25 bp, Homo sapien
gagacagccacaaagttagggtgaa

SEQ ID NO: 4398208 - DNA, 25 bp, Homo sapien
ctgtcgcaaatcatacacacttaag

SEQ ID NO: 4398209 - DNA, 25 bp, Homo sapien
ttcaacctcaatggcgttgggccca

SEQ ID NO: 4398210 - DNA, 25 bp, Homo sapien
gttggatttcaacctcaatggcgtt

SEQ ID NO: 4398211 - DNA, 25 bp, Homo sapien
gatttcaacctcaatggcgttgggc

SEQ ID NO: 4398212 - DNA, 25 bp, Homo sapien
ctcaatggcgttgggcccacacact

SEQ ID NO: 4398213 - DNA, 25 bp, Homo sapien
gagcaggaattgctgtcttctagca

SEQ ID NO: 4398214 - DNA, 25 bp, Homo sapien
tggtcagacccaatccaaatgtctg

SEQ ID NO: 4398215 - DNA, 25 bp, Homo sapien
tcactggtcagacccaatccaaatg

SEQ ID NO: 4398216 - DNA, 25 bp, Homo sapien
gtctgatggatgtcagagcaggaat

SEQ ID NO: 4398217 - DNA, 25 bp, Homo sapien
tccaggtcgttccaaacatacctga

SEQ ID NO: 4398218 - DNA, 25 bp, Homo sapien
catacctgattttctgcacttccat

SEQ ID NO: 4398219 - DNA, 25 bp, Homo sapien
aggtcgttccaaacatacctgattt

SEQ ID NO: 4398220 - DNA, 25 bp, Homo sapien
tgaaaccgcttctccaggtcgttcc

SEQ ID NO: 4398221 - DNA, 25 bp, Homo sapien
gagtggcggtcagccaccagggatt

SEQ ID NO: 4398222 - DNA, 25 bp, Homo sapien
tcctcatatatctttgaaattcgtc

SEQ ID NO: 4398223 - DNA, 25 bp, Homo sapien
cacttcttgcttacaggaaacttca

SEQ ID NO: 4398224 - DNA, 25 bp, Homo sapien
cttggtttatgacagagtggcggtc

SEQ ID NO: 4398225 - DNA, 25 bp, Homo sapien
cacagaggcaatacagaagacacga

SEQ ID NO: 4398226 - DNA, 25 bp, Homo sapien
agaggcaatacagaagacacgatca

SEQ ID NO: 4398227 - DNA, 25 bp, Homo sapien
cagaggcaatacagaagacacgatc

SEQ ID NO: 4398228 - DNA, 25 bp, Homo sapien
gccacagaggcaatacagaagacac

SEQ ID NO: 4398229 - DNA, 25 bp, Homo sapien
cacaggtcagcacggatgcgacaag

SEQ ID NO: 4398230 - DNA, 25 bp, Homo sapien
gcagaaggctttccgtacattgtgg

SEQ ID NO: 4398231 - DNA, 25 bp, Homo sapien
ctgcttcttgcaaggggcatgggat

SEQ ID NO: 4398232 - DNA, 25 bp, Homo sapien
cacggatgcgacaaggcagaaggct

SEQ ID NO: 4398233 - DNA, 25 bp, Homo sapien
cacagatggaattgctgggctttgc

SEQ ID NO: 4398234 - DNA, 25 bp, Homo sapien
cattttgttggtgggtgtctgtgca

SEQ ID NO: 4398235 - DNA, 25 bp, Homo sapien
gctgctgtgatgtgtaattttgaca

SEQ ID NO: 4398236 - DNA, 25 bp, Homo sapien
tgcaactgatatgaatgaagcagca

SEQ ID NO: 4398237 - DNA, 25 bp, Homo sapien
gatatgcacacagtgtgcctccaga

SEQ ID NO: 4398238 - DNA, 25 bp, Homo sapien
tgaaacagaggctgatatgcacaca

SEQ ID NO: 4398239 - DNA, 25 bp, Homo sapien
ggctgatatgcacacagtgtgcctc

SEQ ID NO: 4398240 - DNA, 25 bp, Homo sapien
gagctgctgaaacagaggctgatat

SEQ ID NO: 4398241 - DNA, 25 bp, Homo sapien
ctgtgtacccgtttcacccagtatt

SEQ ID NO: 4398242 - DNA, 25 bp, Homo sapien
tacccgtttcacccagtatttctca

SEQ ID NO: 4398243 - DNA, 25 bp, Homo sapien
tagtgaagctatgggtcctgagacc

SEQ ID NO: 4398244 - DNA, 25 bp, Homo sapien
ctcctgtgggctcttagtgaagcta

SEQ ID NO: 4398245 - DNA, 25 bp, Homo sapien
ctggaggcttcagatttatttcggg

SEQ ID NO: 4398246 - DNA, 25 bp, Homo sapien
gaggcttcagatttatttcgggtct

SEQ ID NO: 4398247 - DNA, 25 bp, Homo sapien
gagcaaagcccgatggtccttctta

SEQ ID NO: 4398248 - DNA, 25 bp, Homo sapien
ccgatggtccttcttactgttctct

SEQ ID NO: 4398249 - DNA, 25 bp, Homo sapien
ccctggttgagcaaagcccgatggt

SEQ ID NO: 4398250 - DNA, 25 bp, Homo sapien
ggtccttcttactgttctcttccat

SEQ ID NO: 4398251 - DNA, 25 bp, Homo sapien
gaacttggaatcgtcacaacttgtg

SEQ ID NO: 4398252 - DNA, 25 bp, Homo sapien
aactcaaccggcgaggatctcttct

SEQ ID NO: 4398253 - DNA, 25 bp, Homo sapien
gatctcttctggctaactccttgga

SEQ ID NO: 4398254 - DNA, 25 bp, Homo sapien
gaaatgtcaaaatcccttgggcttc

SEQ ID NO: 4398255 - DNA, 25 bp, Homo sapien
gtcactccatcttgtattgtgttta

SEQ ID NO: 4398256 - DNA, 25 bp, Homo sapien
actccatcttgtattgtgtttagtt

SEQ ID NO: 4398257 - DNA, 25 bp, Homo sapien
tattgtgtttagttcctgagcacac

SEQ ID NO: 4398258 - DNA, 25 bp, Homo sapien
tcactccatcttgtattgtgtttag

SEQ ID NO: 4398259 - DNA, 25 bp, Homo sapien
gaccatagtcaaaaatgggaccctg

SEQ ID NO: 4398260 - DNA, 25 bp, Homo sapien
tggccatgtaaacccgggaccatag

SEQ ID NO: 4398261 - DNA, 25 bp, Homo sapien
gattgtcacggctgcttccatggtc

SEQ ID NO: 4398262 - DNA, 25 bp, Homo sapien
caggccactgcttcgagattgtcac

SEQ ID NO: 4398263 - DNA, 25 bp, Homo sapien
tgagatgaacatacagggcaccgtc

SEQ ID NO: 4398264 - DNA, 25 bp, Homo sapien
cagacatatttagtgagggaagccc

SEQ ID NO: 4398265 - DNA, 25 bp, Homo sapien
cacaatcggatctgacaaggctggg

SEQ ID NO: 4398266 - DNA, 25 bp, Homo sapien
tgtattgataacaggttgctccgcc

SEQ ID NO: 4398267 - DNA, 25 bp, Homo sapien
atctgtatttgaggcctagatctgc

SEQ ID NO: 4398268 - DNA, 25 bp, Homo sapien
tagcaaagggttgcccattctttgc

SEQ ID NO: 4398269 - DNA, 25 bp, Homo sapien
tctttgcttgactgtgagatcacac

SEQ ID NO: 4398270 - DNA, 25 bp, Homo sapien
caatataaggtttgctcagaagatc

SEQ ID NO: 4398271 - DNA, 25 bp, Homo sapien
ggtagccccaaaactccagctgatg

SEQ ID NO: 4398272 - DNA, 25 bp, Homo sapien
gaaagtattgtcctgtcctaagagg

SEQ ID NO: 4398273 - DNA, 25 bp, Homo sapien
tcaccatgatttgataggtagcccc

SEQ ID NO: 4398274 - DNA, 25 bp, Homo sapien
taacaatatgttgggtaaggccaga

SEQ ID NO: 4398275 - DNA, 25 bp, Homo sapien
gactgatagccgaaacatcttttaa

SEQ ID NO: 4398276 - DNA, 25 bp, Homo sapien
gccacactccggcatgtcagagtgg

SEQ ID NO: 4398277 - DNA, 25 bp, Homo sapien
caactagggtcatttgccaagtccc

SEQ ID NO: 4398278 - DNA, 25 bp, Homo sapien
gtccctctgccatatccgatactgg

SEQ ID NO: 4398279 - DNA, 25 bp, Homo sapien
gcctcttggaaacttagccagatga

SEQ ID NO: 4398280 - DNA, 25 bp, Homo sapien
gggctgttaaagatccatataaccg

SEQ ID NO: 4398281 - DNA, 25 bp, Homo sapien
tcctccttaattgacgtgaaaacag

SEQ ID NO: 4398282 - DNA, 25 bp, Homo sapien
tctactttcctgcagcaaggttttt

SEQ ID NO: 4398283 - DNA, 25 bp, Homo sapien
acaatggaggccctccacaggacgg

SEQ ID NO: 4398284 - DNA, 25 bp, Homo sapien
ccctccacaggacgggagtgcagag

SEQ ID NO: 4398285 - DNA, 25 bp, Homo sapien
aattcaagctgagcatgatgacaat

SEQ ID NO: 4398286 - DNA, 25 bp, Homo sapien
aggccctccacaggacgggagtgca

SEQ ID NO: 4398287 - DNA, 25 bp, Homo sapien
tagaatgaatagacatacaccaagc

SEQ ID NO: 4398288 - DNA, 25 bp, Homo sapien
ccaaacgtctatataattctggtat

SEQ ID NO: 4398289 - DNA, 25 bp, Homo sapien
atccaaacgtctatataattctggt

SEQ ID NO: 4398290 - DNA, 25 bp, Homo sapien
accaagctgtattatcagcacaagg

SEQ ID NO: 4398291 - DNA, 25 bp, Homo sapien
ttttcaataagaagagtagtgatga

SEQ ID NO: 4398292 - DNA, 25 bp, Homo sapien
taaattgttatcatatagaggtcag

SEQ ID NO: 4398293 - DNA, 25 bp, Homo sapien
tagaggtcagtatttagctgcttcc

SEQ ID NO: 4398294 - DNA, 25 bp, Homo sapien
aaaggaagcctgtcaataaaccaat

SEQ ID NO: 4398295 - DNA, 25 bp, Homo sapien
tagataagaatcaactctaaagctg

SEQ ID NO: 4398296 - DNA, 25 bp, Homo sapien
tgatgacttctcacctctgatgcag

SEQ ID NO: 4398297 - DNA, 25 bp, Homo sapien
taaagctgttccctaagtgacctgg

SEQ ID NO: 4398298 - DNA, 25 bp, Homo sapien
tctgatgcagtacagttctactcac

SEQ ID NO: 4398299 - DNA, 25 bp, Homo sapien
atacagttgattgttcccaagaacc

SEQ ID NO: 4398300 - DNA, 25 bp, Homo sapien
acttgtgaaggtgctattactttcc

SEQ ID NO: 4398301 - DNA, 25 bp, Homo sapien
tggttttcctttagagaacacaaga

SEQ ID NO: 4398302 - DNA, 25 bp, Homo sapien
tggagacatggttaactctgagatg

SEQ ID NO: 4398303 - DNA, 25 bp, Homo sapien
tatctccacggaataccaaggctgc

SEQ ID NO: 4398304 - DNA, 25 bp, Homo sapien
ctgtgtatctccacggaataccaag

SEQ ID NO: 4398305 - DNA, 25 bp, Homo sapien
tctccacggaataccaaggctgcct

SEQ ID NO: 4398306 - DNA, 25 bp, Homo sapien
tgtatctccacggaataccaaggct

SEQ ID NO: 4398307 - DNA, 25 bp, Homo sapien
cagaggtggagagatcagccgtcct

SEQ ID NO: 4398308 - DNA, 25 bp, Homo sapien
ttagggtaggcaccattcagattca

SEQ ID NO: 4398309 - DNA, 25 bp, Homo sapien
tgttgaaaatcacagagagtagcag

SEQ ID NO: 4398310 - DNA, 25 bp, Homo sapien
aaaggcaccagcttagggtaggcac

SEQ ID NO: 4398311 - DNA, 25 bp, Homo sapien
gaagccagaagtcaagggataacat

SEQ ID NO: 4398312 - DNA, 25 bp, Homo sapien
ccagaagtcaagggataacatttaa

SEQ ID NO: 4398313 - DNA, 25 bp, Homo sapien
agccagaagtcaagggataacattt

SEQ ID NO: 4398314 - DNA, 25 bp, Homo sapien
gccagaagtcaagggataacattta

SEQ ID NO: 4398315 - DNA, 25 bp, Homo sapien
caagttgctatgcagctattccatt

SEQ ID NO: 4398316 - DNA, 25 bp, Homo sapien
gccaagttgctatgcagctattcca

SEQ ID NO: 4398317 - DNA, 25 bp, Homo sapien
gagagccaagttgctatgcagctat

SEQ ID NO: 4398318 - DNA, 25 bp, Homo sapien
tgctatgcagctattccatttaccc

SEQ ID NO: 4398319 - DNA, 25 bp, Homo sapien
ttgtaatggccagatcctggaacag

SEQ ID NO: 4398320 - DNA, 25 bp, Homo sapien
ctggaacagaaactggtaatttgaa

SEQ ID NO: 4398321 - DNA, 25 bp, Homo sapien
tgttacaccaataagagttgtaatg

SEQ ID NO: 4398322 - DNA, 25 bp, Homo sapien
agaaactggtaatttgaaaggctgt

SEQ ID NO: 4398323 - DNA, 25 bp, Homo sapien
cagtagagcagcagaacaccaacat

SEQ ID NO: 4398324 - DNA, 25 bp, Homo sapien
ccagtagagcagcagaacaccaaca

SEQ ID NO: 4398325 - DNA, 25 bp, Homo sapien
agtagagcagcagaacaccaacata

SEQ ID NO: 4398326 - DNA, 25 bp, Homo sapien
gtagagcagcagaacaccaacatac

SEQ ID NO: 4398327 - DNA, 25 bp, Homo sapien
tgtacttaaacatgcaaaaggaggt

SEQ ID NO: 4398328 - DNA, 25 bp, Homo sapien
tgcaaaaggaggtaacgagagctgc

SEQ ID NO: 4398329 - DNA, 25 bp, Homo sapien
cagagccatgtacttaaacatgcaa

SEQ ID NO: 4398330 - DNA, 25 bp, Homo sapien
aggtaacgagagctgcacgtccttc

SEQ ID NO: 4398331 - DNA, 25 bp, Homo sapien
cactcaatgtttggagttttggaag

SEQ ID NO: 4398332 - DNA, 25 bp, Homo sapien
tgaggtacgcactcaatgtttggag

SEQ ID NO: 4398333 - DNA, 25 bp, Homo sapien
taaggtgaggtacgcactcaatgtt

SEQ ID NO: 4398334 - DNA, 25 bp, Homo sapien
ttgataaggtgaggtacgcactcaa

SEQ ID NO: 4398335 - DNA, 25 bp, Homo sapien
atgagatgcccacatgagccatttt

SEQ ID NO: 4398336 - DNA, 25 bp, Homo sapien
ctgataatgagatgcccacatgagc

SEQ ID NO: 4398337 - DNA, 25 bp, Homo sapien
taatgagatgcccacatgagccatt

SEQ ID NO: 4398338 - DNA, 25 bp, Homo sapien
atgcccacatgagccattttcagag

SEQ ID NO: 4398339 - DNA, 25 bp, Homo sapien
cacagtcattggctccatcaccaca

SEQ ID NO: 4398340 - DNA, 25 bp, Homo sapien
agtcattggctccatcaccacacat

SEQ ID NO: 4398341 - DNA, 25 bp, Homo sapien
acagtcattggctccatcaccacac

SEQ ID NO: 4398342 - DNA, 25 bp, Homo sapien
cccacagtcattggctccatcacca

SEQ ID NO: 4398343 - DNA, 25 bp, Homo sapien
ccagtggttctcagcattgaatgca

SEQ ID NO: 4398344 - DNA, 25 bp, Homo sapien
ttatctcatgcagccgaagtacgga

SEQ ID NO: 4398345 - DNA, 25 bp, Homo sapien
tctgaatggtgagatcccttggtac

SEQ ID NO: 4398346 - DNA, 25 bp, Homo sapien
gagtgactcctggtacctcttccac

SEQ ID NO: 4398347 - DNA, 25 bp, Homo sapien
tctgcccaggagacattcttgcaaa

SEQ ID NO: 4398348 - DNA, 25 bp, Homo sapien
aaaatgatgacctacaggaatttac

SEQ ID NO: 4398349 - DNA, 25 bp, Homo sapien
tatgaaaatgatgacctacaggaat

SEQ ID NO: 4398350 - DNA, 25 bp, Homo sapien
attttatgaaaatgatgacctacag

SEQ ID NO: 4398351 - DNA, 25 bp, Homo sapien
ttttatgaaaatgatgacctacagg

SEQ ID NO: 4398352 - DNA, 25 bp, Homo sapien
aaaaatcttgagcttaatggaacct

SEQ ID NO: 4398353 - DNA, 25 bp, Homo sapien
tgaaaaatcttgagcttaatggaac

SEQ ID NO: 4398354 - DNA, 25 bp, Homo sapien
atcttgagcttaatggaaccttgaa

SEQ ID NO: 4398355 - DNA, 25 bp, Homo sapien
aaatcttgagcttaatggaaccttg

SEQ ID NO: 4398356 - DNA, 25 bp, Homo sapien
gcagtaggctgctgaaatgttgact

SEQ ID NO: 4398357 - DNA, 25 bp, Homo sapien
tgaaaggattttccagttagggcaa

SEQ ID NO: 4398358 - DNA, 25 bp, Homo sapien
catccctgatgttaatgtaattgtc

SEQ ID NO: 4398359 - DNA, 25 bp, Homo sapien
tctgcctttatcagagacttcatcc

SEQ ID NO: 4398360 - DNA, 25 bp, Homo sapien
tgattttctgatacacagagcagca

SEQ ID NO: 4398361 - DNA, 25 bp, Homo sapien
gattcaactccacgcactatattct

SEQ ID NO: 4398362 - DNA, 25 bp, Homo sapien
tctcccaaagactagatccccttag

SEQ ID NO: 4398363 - DNA, 25 bp, Homo sapien
caatctctgtatgaaaagtatggaa

SEQ ID NO: 4398364 - DNA, 25 bp, Homo sapien
tcagaaaccattccagattttctgg

SEQ ID NO: 4398365 - DNA, 25 bp, Homo sapien
tctactaacgtccaagatatagatg

SEQ ID NO: 4398366 - DNA, 25 bp, Homo sapien
ggtggtttcatttgcctcaatgaga

SEQ ID NO: 4398367 - DNA, 25 bp, Homo sapien
tgctgatgaggacccggtggtttca

SEQ ID NO: 4398368 - DNA, 25 bp, Homo sapien
tatcaggtctgattctaccgtctcc

SEQ ID NO: 4398369 - DNA, 25 bp, Homo sapien
tgtgatcattacagtccttatccgg

SEQ ID NO: 4398370 - DNA, 25 bp, Homo sapien
cttcaatcgattctccaagatcagc

SEQ ID NO: 4398371 - DNA, 25 bp, Homo sapien
ctgagatgagctcttccaagacagg

SEQ ID NO: 4398372 - DNA, 25 bp, Homo sapien
cttcttgtaggccagtgctatgact

SEQ ID NO: 4398373 - DNA, 25 bp, Homo sapien
gtagtagcgtgatggtcattttcca

SEQ ID NO: 4398374 - DNA, 25 bp, Homo sapien
tcgtcaaggtagtagcgtgatggtc

SEQ ID NO: 4398375 - DNA, 25 bp, Homo sapien
ctcggaagccctgtgtcgtgtaaat

SEQ ID NO: 4398376 - DNA, 25 bp, Homo sapien
ctgaagttcgctaacaaaactagtg

SEQ ID NO: 4398377 - DNA, 25 bp, Homo sapien
tgaagttcgctaacaaaactagtgg

SEQ ID NO: 4398378 - DNA, 25 bp, Homo sapien
ctttgcagtgccgatgagaatggga

SEQ ID NO: 4398379 - DNA, 25 bp, Homo sapien
gaactgatgcaggattgcaattcct

SEQ ID NO: 4398380 - DNA, 25 bp, Homo sapien
caatgactgtcattctttgcagtgc

SEQ ID NO: 4398381 - DNA, 25 bp, Homo sapien
tgcacctttcatgaatgccagtcgg

SEQ ID NO: 4398382 - DNA, 25 bp, Homo sapien
tggctgttctgcagggcttaactac

SEQ ID NO: 4398383 - DNA, 25 bp, Homo sapien
cttgatgtggaaatcgtccccagaa

SEQ ID NO: 4398384 - DNA, 25 bp, Homo sapien
tgtggaaatcgtccccagaaaaagc

SEQ ID NO: 4398385 - DNA, 25 bp, Homo sapien
taactaccatggcatgtgccggcac

SEQ ID NO: 4398386 - DNA, 25 bp, Homo sapien
tatgagttatcctgagcactggaga

SEQ ID NO: 4398387 - DNA, 25 bp, Homo sapien
gacaatgctcggagaacagtacaga

SEQ ID NO: 4398388 - DNA, 25 bp, Homo sapien
gaaataagacttatagtccccgtga

SEQ ID NO: 4398389 - DNA, 25 bp, Homo sapien
cagccttagattggtttgcccttca

SEQ ID NO: 4398390 - DNA, 25 bp, Homo sapien
ccaggtggtggcttcaaacattttg

SEQ ID NO: 4398391 - DNA, 25 bp, Homo sapien
ccatggcaaagcctggcctgaggca

SEQ ID NO: 4398392 - DNA, 25 bp, Homo sapien
gcaaagcctggcctgaggcaaagct

SEQ ID NO: 4398393 - DNA, 25 bp, Homo sapien
gctgcacacagtgggccccatggca

SEQ ID NO: 4398394 - DNA, 25 bp, Homo sapien
cgctgcacacagtgggccccatggc

SEQ ID NO: 4398395 - DNA, 25 bp, Homo sapien
ccattcctatcacaggacacgactc

SEQ ID NO: 4398396 - DNA, 25 bp, Homo sapien
gacacgactccccagaggtccaagc

SEQ ID NO: 4398397 - DNA, 25 bp, Homo sapien
ttcctatcacaggacacgactcccc

SEQ ID NO: 4398398 - DNA, 25 bp, Homo sapien
cccagaggtccaagccgtcccttgt

SEQ ID NO: 4398399 - DNA, 25 bp, Homo sapien
tctgggggctaatgcagaagatgcc

SEQ ID NO: 4398400 - DNA, 25 bp, Homo sapien
ggtttaactgtccacatacgttgat

SEQ ID NO: 4398401 - DNA, 25 bp, Homo sapien
tgtccacatacgttgatcctctggg

SEQ ID NO: 4398402 - DNA, 25 bp, Homo sapien
aagcagacaaggtttaactgtccac

SEQ ID NO: 4398403 - DNA, 25 bp, Homo sapien
tgacgtcaagggctttcctcaccac

SEQ ID NO: 4398404 - DNA, 25 bp, Homo sapien
gaggaaccgcaattgtgatgacgtc

SEQ ID NO: 4398405 - DNA, 25 bp, Homo sapien
tgtgatgacgtcaagggctttcctc

SEQ ID NO: 4398406 - DNA, 25 bp, Homo sapien
caggtagagccggaggaaccgcaat

SEQ ID NO: 4398407 - DNA, 25 bp, Homo sapien
acctgatggcatccctgtacaactg

SEQ ID NO: 4398408 - DNA, 25 bp, Homo sapien
agagtatagatcatcccaatggtgg

SEQ ID NO: 4398409 - DNA, 25 bp, Homo sapien
cccactaagcacatagacacacaga

SEQ ID NO: 4398410 - DNA, 25 bp, Homo sapien
gaatggatctcacaaggtctccctt

SEQ ID NO: 4398411 - DNA, 25 bp, Homo sapien
gccgcttgtaatccgcttcactctg

SEQ ID NO: 4398412 - DNA, 25 bp, Homo sapien
gaggacatgccgcttgtaatccgct

SEQ ID NO: 4398413 - DNA, 25 bp, Homo sapien
taatccgcttcactctgtgttttcc

SEQ ID NO: 4398414 - DNA, 25 bp, Homo sapien
gcagtaccacggctctcacggtccc

SEQ ID NO: 4398415 - DNA, 25 bp, Homo sapien
gttttggtgactggaatactttctc

SEQ ID NO: 4398416 - DNA, 25 bp, Homo sapien
gagttttggtgactggaatactttc

SEQ ID NO: 4398417 - DNA, 25 bp, Homo sapien
acggagttttggtgactggaatact

SEQ ID NO: 4398418 - DNA, 25 bp, Homo sapien
taacggagttttggtgactggaata

SEQ ID NO: 4398419 - DNA, 25 bp, Homo sapien
gcccacagaggttgtcagctgtgga

SEQ ID NO: 4398420 - DNA, 25 bp, Homo sapien
ggtagaggaggaggcgtagggacca

SEQ ID NO: 4398421 - DNA, 25 bp, Homo sapien
gaccatagcagcgtggagtgtgggc

SEQ ID NO: 4398422 - DNA, 25 bp, Homo sapien
agcccacagaggttgtcagctgtgg

SEQ ID NO: 4398423 - DNA, 25 bp, Homo sapien
aaattaataaatctccaggcaccag

SEQ ID NO: 4398424 - DNA, 25 bp, Homo sapien
cttcaatcagaacggcatcacatgg

SEQ ID NO: 4398425 - DNA, 25 bp, Homo sapien
caccaggacgcgtgattccagctct

SEQ ID NO: 4398426 - DNA, 25 bp, Homo sapien
ggcattagcactttgttccctgtca

SEQ ID NO: 4398427 - DNA, 25 bp, Homo sapien
cagagaccgtaatgctattatgtga

SEQ ID NO: 4398428 - DNA, 25 bp, Homo sapien
ccacatacagagaccgtaatgctat

SEQ ID NO: 4398429 - DNA, 25 bp, Homo sapien
gactcgacgagatggtggagtttta

SEQ ID NO: 4398430 - DNA, 25 bp, Homo sapien
tgctattatgtgactcgacgagatg

SEQ ID NO: 4398431 - DNA, 25 bp, Homo sapien
gattatgatggcaaaagcatattcc

SEQ ID NO: 4398432 - DNA, 25 bp, Homo sapien
cagacactgaagagttgaaatatat

SEQ ID NO: 4398433 - DNA, 25 bp, Homo sapien
gatcatatactgtcaaagatatgga

SEQ ID NO: 4398434 - DNA, 25 bp, Homo sapien
agcatattccttatagtcttcacta

SEQ ID NO: 4398435 - DNA, 25 bp, Homo sapien
tggtgtaacttcaacatcgatagta

SEQ ID NO: 4398436 - DNA, 25 bp, Homo sapien
caacatcgatagtattaggcccaca

SEQ ID NO: 4398437 - DNA, 25 bp, Homo sapien
tttccaaattggtgtaacttcaaca

SEQ ID NO: 4398438 - DNA, 25 bp, Homo sapien
agtattaggcccacatattaacctc

SEQ ID NO: 4398439 - DNA, 25 bp, Homo sapien
tctcttgtcaagcctgatccaaatt

SEQ ID NO: 4398440 - DNA, 25 bp, Homo sapien
tcaagcctgatccaaatttttgatg

SEQ ID NO: 4398441 - DNA, 25 bp, Homo sapien
caagcctgatccaaatttttgatgt

SEQ ID NO: 4398442 - DNA, 25 bp, Homo sapien
ttctcttgtcaagcctgatccaaat

SEQ ID NO: 4398443 - DNA, 25 bp, Homo sapien
tattttctgcactttgatgcatctc

SEQ ID NO: 4398444 - DNA, 25 bp, Homo sapien
cttctaagtagttccaaacatatct

SEQ ID NO: 4398445 - DNA, 25 bp, Homo sapien
ttttctgcactttgatgcatctcac

SEQ ID NO: 4398446 - DNA, 25 bp, Homo sapien
ttctggaactgtccttctaagtagt

SEQ ID NO: 4398447 - DNA, 25 bp, Homo sapien
tatggctctatttatgatatactcc

SEQ ID NO: 4398448 - DNA, 25 bp, Homo sapien
tcttatggctctatttatgatatac

SEQ ID NO: 4398449 - DNA, 25 bp, Homo sapien
tttcttatggctctatttatgatat

SEQ ID NO: 4398450 - DNA, 25 bp, Homo sapien
ggctctatttatgatatactcctca

SEQ ID NO: 4398451 - DNA, 25 bp, Homo sapien
tttaatgctgacaggtagatccata

SEQ ID NO: 4398452 - DNA, 25 bp, Homo sapien
tgcgctgtttaatgctgacaggtag

SEQ ID NO: 4398453 - DNA, 25 bp, Homo sapien
gctgtttaatgctgacaggtagatc

SEQ ID NO: 4398454 - DNA, 25 bp, Homo sapien
aaatgcgctgtttaatgctgacagg

SEQ ID NO: 4398455 - DNA, 25 bp, Homo sapien
ggtcagcaggctacaattcaacctg

SEQ ID NO: 4398456 - DNA, 25 bp, Homo sapien
ccccaagaagttaagagaggtcagc

SEQ ID NO: 4398457 - DNA, 25 bp, Homo sapien
gaggtcagcaggctacaattcaacc

SEQ ID NO: 4398458 - DNA, 25 bp, Homo sapien
gttaagagaggtcagcaggctacaa

SEQ ID NO: 4398459 - DNA, 25 bp, Homo sapien
cacctttcagcccatgacctgatga

SEQ ID NO: 4398460 - DNA, 25 bp, Homo sapien
aaccacctttcagcccatgacctga

SEQ ID NO: 4398461 - DNA, 25 bp, Homo sapien
ctttcagcccatgacctgatgacca

SEQ ID NO: 4398462 - DNA, 25 bp, Homo sapien
ctttcaaccacctttcagcccatga

SEQ ID NO: 4398463 - DNA, 25 bp, Homo sapien
caatgtgcccatacgtgccatgctg

SEQ ID NO: 4398464 - DNA, 25 bp, Homo sapien
ctggtctccagtaaaacaccaaggg

SEQ ID NO: 4398465 - DNA, 25 bp, Homo sapien
aatgagaagatggatccggcaaggc

SEQ ID NO: 4398466 - DNA, 25 bp, Homo sapien
ggcagagacttttccggcagccttg

SEQ ID NO: 4398467 - DNA, 25 bp, Homo sapien
aacatgacacatgtgacagcttgca

SEQ ID NO: 4398468 - DNA, 25 bp, Homo sapien
tctcgtccgttgagatgcctgcctt

SEQ ID NO: 4398469 - DNA, 25 bp, Homo sapien
ccccttacagatgcacgtctaaggt

SEQ ID NO: 4398470 - DNA, 25 bp, Homo sapien
ggaaccttctgaacatgacacatgt

SEQ ID NO: 4398471 - DNA, 25 bp, Homo sapien
cttgtgccccaagctggagcacggc

SEQ ID NO: 4398472 - DNA, 25 bp, Homo sapien
gtcttgtgccccaagctggagcacg

SEQ ID NO: 4398473 - DNA, 25 bp, Homo sapien
tgtgccccaagctggagcacggcct

SEQ ID NO: 4398474 - DNA, 25 bp, Homo sapien
gttttggtcttgtgccccaagctgg

SEQ ID NO: 4398475 - DNA, 25 bp, Homo sapien
cagactcggtgaacaagacatttga

SEQ ID NO: 4398476 - DNA, 25 bp, Homo sapien
gaactggctataccaatgaggctca

SEQ ID NO: 4398477 - DNA, 25 bp, Homo sapien
gaatacactgctcctcacattaggg

SEQ ID NO: 4398478 - DNA, 25 bp, Homo sapien
tgctattatggaatgagagcgtcac

SEQ ID NO: 4398479 - DNA, 25 bp, Homo sapien
agaagggaatgtggctagaatctta

SEQ ID NO: 4398480 - DNA, 25 bp, Homo sapien
gaagaagggaatgtggctagaatct

SEQ ID NO: 4398481 - DNA, 25 bp, Homo sapien
atgggaagaagggaatgtggctaga

SEQ ID NO: 4398482 - DNA, 25 bp, Homo sapien
gctgagaagtgggatgggaagaagg

SEQ ID NO: 4398483 - DNA, 25 bp, Homo sapien
tccttcattgagcagagcgtgctgg

SEQ ID NO: 4398484 - DNA, 25 bp, Homo sapien
attgagcagagcgtgctggcccttc

SEQ ID NO: 4398485 - DNA, 25 bp, Homo sapien
ttctccttcattgagcagagcgtgc

SEQ ID NO: 4398486 - DNA, 25 bp, Homo sapien
agcagagcgtgctggcccttctcaa

SEQ ID NO: 4398487 - DNA, 25 bp, Homo sapien
tcgtgcagacgcttccaggatgaac

SEQ ID NO: 4398488 - DNA, 25 bp, Homo sapien
acttacagggaaagaactcattgcc

SEQ ID NO: 4398489 - DNA, 25 bp, Homo sapien
cacgagtcgccctctgctaggagga

SEQ ID NO: 4398490 - DNA, 25 bp, Homo sapien
tgaggagcgggtgcaagaactccca

SEQ ID NO: 4398491 - DNA, 25 bp, Homo sapien
gatgtccaatggaaataatggcagg

SEQ ID NO: 4398492 - DNA, 25 bp, Homo sapien
aataatggcaggaccggtttctctg

SEQ ID NO: 4398493 - DNA, 25 bp, Homo sapien
cttttgattatcttaggagcatgcc

SEQ ID NO: 4398494 - DNA, 25 bp, Homo sapien
tctcaacctctgtgattgtctagaa

SEQ ID NO: 4398495 - DNA, 25 bp, Homo sapien
tctgtccggttttggagataccagc

SEQ ID NO: 4398496 - DNA, 25 bp, Homo sapien
agcaataatcaggacaacacagccc

SEQ ID NO: 4398497 - DNA, 25 bp, Homo sapien
gcatgatcacaggtctgtccggttt

SEQ ID NO: 4398498 - DNA, 25 bp, Homo sapien
agcccacctgatatgtccctgtaat

SEQ ID NO: 4398499 - DNA, 25 bp, Homo sapien
cacgtgtgtagattggatggccagt

SEQ ID NO: 4398500 - DNA, 25 bp, Homo sapien
tacccaggaatagttgaagacactc

SEQ ID NO: 4398501 - DNA, 25 bp, Homo sapien
tccaatacccaggaatagttgaaga

SEQ ID NO: 4398502 - DNA, 25 bp, Homo sapien
caggaatagttgaagacactctttc

SEQ ID NO: 4398503 - DNA, 25 bp, Homo sapien
ggcaaggttacaaaagctggctgtc

SEQ ID NO: 4398504 - DNA, 25 bp, Homo sapien
gaagagccttgaattgccaacattt

SEQ ID NO: 4398505 - DNA, 25 bp, Homo sapien
gctggctgtcttttcgatgaggaca

SEQ ID NO: 4398506 - DNA, 25 bp, Homo sapien
tcctgctaacatccccaaggcaagg

SEQ ID NO: 4398507 - DNA, 25 bp, Homo sapien
gcggagttttcctcttgtggcccag

SEQ ID NO: 4398508 - DNA, 25 bp, Homo sapien
cacggatgcttacatgtggaaagcg

SEQ ID NO: 4398509 - DNA, 25 bp, Homo sapien
cactggagctgcgtagtacacagaa

SEQ ID NO: 4398510 - DNA, 25 bp, Homo sapien
taggctgatcaaatcacacggatgc

SEQ ID NO: 4398511 - DNA, 25 bp, Homo sapien
gaatcctaatcagaagctgtgcatg

SEQ ID NO: 4398512 - DNA, 25 bp, Homo sapien
caggctttggttaagggccctcaca

SEQ ID NO: 4398513 - DNA, 25 bp, Homo sapien
tcgaatctgtattgcaagccccatc

SEQ ID NO: 4398514 - DNA, 25 bp, Homo sapien
cacaaaggttaatgtgacccaaagc

SEQ ID NO: 4398515 - DNA, 25 bp, Homo sapien
taactgttgctacccattacttggt

SEQ ID NO: 4398516 - DNA, 25 bp, Homo sapien
tctgattcgttggataattctgaaa

SEQ ID NO: 4398517 - DNA, 25 bp, Homo sapien
gaaaatttctgattcgttggataat

SEQ ID NO: 4398518 - DNA, 25 bp, Homo sapien
gattcgttggataattctgaaaagg

SEQ ID NO: 4398519 - DNA, 25 bp, Homo sapien
attcgttggataattctgaaaaggg

SEQ ID NO: 4398520 - DNA, 25 bp, Homo sapien
ttccaaatcggaagcaagagggcgg

SEQ ID NO: 4398521 - DNA, 25 bp, Homo sapien
aagtccatgcgccattgggagggcc

SEQ ID NO: 4398522 - DNA, 25 bp, Homo sapien
cctgtcaggctcttgcggaagtcca

SEQ ID NO: 4398523 - DNA, 25 bp, Homo sapien
cgtgctgcccgcctagaaagggtga

SEQ ID NO: 4398524 - DNA, 25 bp, Homo sapien
cgtgaacgtggcaccacctttctaa

SEQ ID NO: 4398525 - DNA, 25 bp, Homo sapien
gtggcaccacctttctaatctcaat

SEQ ID NO: 4398526 - DNA, 25 bp, Homo sapien
tttttgatgcaaggtcgtgaacgtg

SEQ ID NO: 4398527 - DNA, 25 bp, Homo sapien
caaggtcgtgaacgtggcaccacct

SEQ ID NO: 4398528 - DNA, 25 bp, Homo sapien
gcttaggctgttgacatcactggag

SEQ ID NO: 4398529 - DNA, 25 bp, Homo sapien
tgcacaggttatcagtcatgttcct

SEQ ID NO: 4398530 - DNA, 25 bp, Homo sapien
gcgtttagagcaacagatcgtggat

SEQ ID NO: 4398531 - DNA, 25 bp, Homo sapien
taggttaaacatatgctgcgattgc

SEQ ID NO: 4398532 - DNA, 25 bp, Homo sapien
tggaattggtaaaataactgattcc

SEQ ID NO: 4398533 - DNA, 25 bp, Homo sapien
tggtaaaataactgattccttgaaa

SEQ ID NO: 4398534 - DNA, 25 bp, Homo sapien
tcattcttttggaattggtaaaata

SEQ ID NO: 4398535 - DNA, 25 bp, Homo sapien
tgacgttttctgagtcttcactttt

SEQ ID NO: 4398536 - DNA, 25 bp, Homo sapien
ttcctggtttttctcaattccatgg

SEQ ID NO: 4398537 - DNA, 25 bp, Homo sapien
gctgtggaatcaattcatatgtata

SEQ ID NO: 4398538 - DNA, 25 bp, Homo sapien
ccatggctgtggaatcaattcatat

SEQ ID NO: 4398539 - DNA, 25 bp, Homo sapien
tttatgttttcagcatcacttcctg

SEQ ID NO: 4398540 - DNA, 25 bp, Homo sapien
agcatgggtcttcttcgtacgcaca

SEQ ID NO: 4398541 - DNA, 25 bp, Homo sapien
cgtacgcacaactgagagaaatttc

SEQ ID NO: 4398542 - DNA, 25 bp, Homo sapien
ggtcattccatcattcatggtggcc

SEQ ID NO: 4398543 - DNA, 25 bp, Homo sapien
caacaacacagcagttgcttaggag

SEQ ID NO: 4398544 - DNA, 25 bp, Homo sapien
ctccgttcacacctcctacccccat

SEQ ID NO: 4398545 - DNA, 25 bp, Homo sapien
ctccagtctcccctccgttcacacc

SEQ ID NO: 4398546 - DNA, 25 bp, Homo sapien
agtctcccctccgttcacacctcct

SEQ ID NO: 4398547 - DNA, 25 bp, Homo sapien
tctcccctccgttcacacctcctac

SEQ ID NO: 4398548 - DNA, 25 bp, Homo sapien
taaaaatcctccaactgatgaactg

SEQ ID NO: 4398549 - DNA, 25 bp, Homo sapien
catgcactgccctattgtactcaaa

SEQ ID NO: 4398550 - DNA, 25 bp, Homo sapien
tgcagtagtccatccagcttaagat

SEQ ID NO: 4398551 - DNA, 25 bp, Homo sapien
gaagcacccgtttgagattcccgtg

SEQ ID NO: 4398552 - DNA, 25 bp, Homo sapien
taaaagtcccacatgagagtcctga

SEQ ID NO: 4398553 - DNA, 25 bp, Homo sapien
taaaaatcagtgtacctaggcagtg

SEQ ID NO: 4398554 - DNA, 25 bp, Homo sapien
agcacgaaataagtggcccttgcag

SEQ ID NO: 4398555 - DNA, 25 bp, Homo sapien
tatagttgcgggtggaacagtcaac

SEQ ID NO: 4398556 - DNA, 25 bp, Homo sapien
ttgttcgcgtcaaaagcattgtttt

SEQ ID NO: 4398557 - DNA, 25 bp, Homo sapien
ctgagagtgtaattttgttcgcgtc

SEQ ID NO: 4398558 - DNA, 25 bp, Homo sapien
ctcaaaacatctgagacattcacat

SEQ ID NO: 4398559 - DNA, 25 bp, Homo sapien
cttgctaattatactcattgctctg

SEQ ID NO: 4398560 - DNA, 25 bp, Homo sapien
cgttcaaccatcgtaaggaggcagt

SEQ ID NO: 4398561 - DNA, 25 bp, Homo sapien
gagctggttggcaaaaaagcgttac

SEQ ID NO: 4398562 - DNA, 25 bp, Homo sapien
gaggcagttccttttcatatcatga

SEQ ID NO: 4398563 - DNA, 25 bp, Homo sapien
aagcgttactctattctgggtactc

SEQ ID NO: 4398564 - DNA, 25 bp, Homo sapien
tcatctcctgttcatcccccacact

SEQ ID NO: 4398565 - DNA, 25 bp, Homo sapien
catctcctgttcatcccccacactc

SEQ ID NO: 4398566 - DNA, 25 bp, Homo sapien
tgttgttgccatgggccttcatttt

SEQ ID NO: 4398567 - DNA, 25 bp, Homo sapien
ctatgctgacacaagtacaatttat

SEQ ID NO: 4398568 - DNA, 25 bp, Homo sapien
tattctccagaggtgtttcctccac

SEQ ID NO: 4398569 - DNA, 25 bp, Homo sapien
agacatttcagtggcctctgcttcc

SEQ ID NO: 4398570 - DNA, 25 bp, Homo sapien
taagcaaagggttagcagacatttc

SEQ ID NO: 4398571 - DNA, 25 bp, Homo sapien
agaaaacgtaggctgtcatgtgggt

SEQ ID NO: 4398572 - DNA, 25 bp, Homo sapien
aagaaaacgtaggctgtcatgtggg

SEQ ID NO: 4398573 - DNA, 25 bp, Homo sapien
ttggcgcagggatgttaatgatgac

SEQ ID NO: 4398574 - DNA, 25 bp, Homo sapien
agcatcaggaagaactgcgccaccc

SEQ ID NO: 4398575 - DNA, 25 bp, Homo sapien
cacggttgatagagaacccagcatc

SEQ ID NO: 4398576 - DNA, 25 bp, Homo sapien
gatgacattgttaatgcggcacacc

SEQ ID NO: 4398577 - DNA, 25 bp, Homo sapien
gagttcagcaagttccctcgtgtga

SEQ ID NO: 4398578 - DNA, 25 bp, Homo sapien
ccagtgagtcggtcagcaagttccc

SEQ ID NO: 4398579 - DNA, 25 bp, Homo sapien
tgtccaatgaagtaaagtgtgaact

SEQ ID NO: 4398580 - DNA, 25 bp, Homo sapien
caagttccctcgtgtgtactgaagg

SEQ ID NO: 4398581 - DNA, 25 bp, Homo sapien
gcatcgaagactccctttgacaaga

SEQ ID NO: 4398582 - DNA, 25 bp, Homo sapien
gggaattctccggaacatgtgtgca

SEQ ID NO: 4398583 - DNA, 25 bp, Homo sapien
tgcattgtttcgtggagggcagcca

SEQ ID NO: 4398584 - DNA, 25 bp, Homo sapien
ttcccagcccggattaggcgaggag

SEQ ID NO: 4398585 - DNA, 25 bp, Homo sapien
gctcggtggagcctggcctaacatc

SEQ ID NO: 4398586 - DNA, 25 bp, Homo sapien
aagtgcagctcggtggagcctggcc

SEQ ID NO: 4398587 - DNA, 25 bp, Homo sapien
ctattgacgattacgagatggtagc

SEQ ID NO: 4398588 - DNA, 25 bp, Homo sapien
gacgattacgagatggtagcattgt

SEQ ID NO: 4398589 - DNA, 25 bp, Homo sapien
gctgggtcacaattgtcagaatgca

SEQ ID NO: 4398590 - DNA, 25 bp, Homo sapien
tgtgttgcccaatactgtgtccctg

SEQ ID NO: 4398591 - DNA, 25 bp, Homo sapien
caatacccagggtagggattccagc

SEQ ID NO: 4398592 - DNA, 25 bp, Homo sapien
tataacctgagcacacaagctgggt

SEQ ID NO: 4398593 - DNA, 25 bp, Homo sapien
tgtctttctcaactgcagcttgcag

SEQ ID NO: 4398594 - DNA, 25 bp, Homo sapien
cagcttgcagcgttgacagatgcac

SEQ ID NO: 4398595 - DNA, 25 bp, Homo sapien
tcttgctgactagtgggcctttcac

SEQ ID NO: 4398596 - DNA, 25 bp, Homo sapien
ctgagcactcatgacctgccagcat

SEQ ID NO: 4398597 - DNA, 25 bp, Homo sapien
ttggccacaaaagccctgctgaagt

SEQ ID NO: 4398598 - DNA, 25 bp, Homo sapien
ttccacgtccacaagtgcagccgtg

SEQ ID NO: 4398599 - DNA, 25 bp, Homo sapien
gagggtgaccctattgtccaggaga

SEQ ID NO: 4398600 - DNA, 25 bp, Homo sapien
tgcagccgtgcagtttgtaagcccc

SEQ ID NO: 4398601 - DNA, 25 bp, Homo sapien
cagcgtgtggagaggaaagccactc

SEQ ID NO: 4398602 - DNA, 25 bp, Homo sapien
tctgagtgccagagtgaccgtcctc

SEQ ID NO: 4398603 - DNA, 25 bp, Homo sapien
gctataaacgaacccaacactgtga

SEQ ID NO: 4398604 - DNA, 25 bp, Homo sapien
gctgcttctgcacgcttttcgggtg

SEQ ID NO: 4398605 - DNA, 25 bp, Homo sapien
ttggtgttcctgtcaagtgggatgt

SEQ ID NO: 4398606 - DNA, 25 bp, Homo sapien
gtgttcctgtcaagtgggatgtgac

SEQ ID NO: 4398607 - DNA, 25 bp, Homo sapien
ttcctgtcaagtgggatgtgactgg

SEQ ID NO: 4398608 - DNA, 25 bp, Homo sapien
gtcattggtgttcctgtcaagtggg

SEQ ID NO: 4398609 - DNA, 25 bp, Homo sapien
gcgtaaggccaacaaaaaatgggca

SEQ ID NO: 4398610 - DNA, 25 bp, Homo sapien
ctagagcgtaaggccaacaaaaaat

SEQ ID NO: 4398611 - DNA, 25 bp, Homo sapien
agagcgtaaggccaacaaaaaatgg

SEQ ID NO: 4398612 - DNA, 25 bp, Homo sapien
cgtaaggccaacaaaaaatgggcat

SEQ ID NO: 4398613 - DNA, 25 bp, Homo sapien
attgggggcccggtatgtcttgtct

SEQ ID NO: 4398614 - DNA, 25 bp, Homo sapien
gggcccggtatgtcttgtcttggca

SEQ ID NO: 4398615 - DNA, 25 bp, Homo sapien
ggtatgtcttgtcttggcagctgac

SEQ ID NO: 4398616 - DNA, 25 bp, Homo sapien
cccggtatgtcttgtcttggcagct

SEQ ID NO: 4398617 - DNA, 25 bp, Homo sapien
tttcctcataaaggctcataggtct

SEQ ID NO: 4398618 - DNA, 25 bp, Homo sapien
tggatttcctcataaaggctcatag

SEQ ID NO: 4398619 - DNA, 25 bp, Homo sapien
agtgccaggactcccggcctgcgga

SEQ ID NO: 4398620 - DNA, 25 bp, Homo sapien
tgcggagaaccggttcctccaaggc

SEQ ID NO: 4398621 - DNA, 25 bp, Homo sapien
ccacagagatggtggtgcccctggt

SEQ ID NO: 4398622 - DNA, 25 bp, Homo sapien
gactgccacagagatggtggtgccc

SEQ ID NO: 4398623 - DNA, 25 bp, Homo sapien
ggcagactgccacagagatggtggt

SEQ ID NO: 4398624 - DNA, 25 bp, Homo sapien
aatgttacatttgtggcagactgcc

SEQ ID NO: 4398625 - DNA, 25 bp, Homo sapien
aactttgggaatagcttcgcaggcc

SEQ ID NO: 4398626 - DNA, 25 bp, Homo sapien
tactttcaaacacaggctgtccaca

SEQ ID NO: 4398627 - DNA, 25 bp, Homo sapien
tccacaaccatagggagcagtgtgt

SEQ ID NO: 4398628 - DNA, 25 bp, Homo sapien
gcaaaatcaccgtgcatccctgcaa

SEQ ID NO: 4398629 - DNA, 25 bp, Homo sapien
tccagagaattcctgccgttcctca

SEQ ID NO: 4398630 - DNA, 25 bp, Homo sapien
tcgctgtaattgcacaggcccgagt

SEQ ID NO: 4398631 - DNA, 25 bp, Homo sapien
cagcatttgccaatcgctgtaattg

SEQ ID NO: 4398632 - DNA, 25 bp, Homo sapien
ggcccgagtggctctccagagaatt

SEQ ID NO: 4398633 - DNA, 25 bp, Homo sapien
ttaattgctgttcttcgtttctgac

SEQ ID NO: 4398634 - DNA, 25 bp, Homo sapien
ctcctggaggagttaattgctgttc

SEQ ID NO: 4398635 - DNA, 25 bp, Homo sapien
tggaggagttaattgctgttcttcg

SEQ ID NO: 4398636 - DNA, 25 bp, Homo sapien
ggcctcctggaggagttaattgctg

SEQ ID NO: 4398637 - DNA, 25 bp, Homo sapien
cactacagcccggatctctggggct

SEQ ID NO: 4398638 - DNA, 25 bp, Homo sapien
tgttttctgacttcagccagttcac

SEQ ID NO: 4398639 - DNA, 25 bp, Homo sapien
gactggagcgtagtggctcttcaca

SEQ ID NO: 4398640 - DNA, 25 bp, Homo sapien
tgacttgtgttttctgacttcagcc

SEQ ID NO: 4398641 - DNA, 25 bp, Homo sapien
cagtggctaatctcatcttggttgg

SEQ ID NO: 4398642 - DNA, 25 bp, Homo sapien
tgagaagcaccgagtcagacacgga

SEQ ID NO: 4398643 - DNA, 25 bp, Homo sapien
gaagtgtggcaatttcaggctctgg

SEQ ID NO: 4398644 - DNA, 25 bp, Homo sapien
tcctgattcaggtgtaccacgctat

SEQ ID NO: 4398645 - DNA, 25 bp, Homo sapien
cttggcaatgggagccattcagctt

SEQ ID NO: 4398646 - DNA, 25 bp, Homo sapien
ttggcaatgggagccattcagcttg

SEQ ID NO: 4398647 - DNA, 25 bp, Homo sapien
ggcaatgggagccattcagcttgta

SEQ ID NO: 4398648 - DNA, 25 bp, Homo sapien
gcaatgggagccattcagcttgtac

SEQ ID NO: 4398649 - DNA, 25 bp, Homo sapien
cactttccctcatgaggggaaacgc

SEQ ID NO: 4398650 - DNA, 25 bp, Homo sapien
agatactggccagagggagataaag

SEQ ID NO: 4398651 - DNA, 25 bp, Homo sapien
aaggctggcttcaggcaacattgcc

SEQ ID NO: 4398652 - DNA, 25 bp, Homo sapien
tcatgaggggaaacgcggcctccat

SEQ ID NO: 4398653 - DNA, 25 bp, Homo sapien
taagggagtcatagaagtagccatc

SEQ ID NO: 4398654 - DNA, 25 bp, Homo sapien
tgttgcatggtcaaaaggcattccc

SEQ ID NO: 4398655 - DNA, 25 bp, Homo sapien
gatgcgttcctagttgtcctgtaag

SEQ ID NO: 4398656 - DNA, 25 bp, Homo sapien
caaggctttcggtaaggtcacagta

SEQ ID NO: 4398657 - DNA, 25 bp, Homo sapien
taggagcgtgttttgaaactgggct

SEQ ID NO: 4398658 - DNA, 25 bp, Homo sapien
gatgcaggagaagatcctgtgtccc

SEQ ID NO: 4398659 - DNA, 25 bp, Homo sapien
cagatgatggtagccgacgaaccga

SEQ ID NO: 4398660 - DNA, 25 bp, Homo sapien
cgaaccgacaaacaccttctgggtg

SEQ ID NO: 4398661 - DNA, 25 bp, Homo sapien
tcagccccaccaagggtccaagccc

SEQ ID NO: 4398662 - DNA, 25 bp, Homo sapien
cagccccaccaagggtccaagccct

SEQ ID NO: 4398663 - DNA, 25 bp, Homo sapien
tgtgcggcctgacaaagcgacgcag

SEQ ID NO: 4398664 - DNA, 25 bp, Homo sapien
taaagtaaggcggttcaaagcgcag

SEQ ID NO: 4398665 - DNA, 25 bp, Homo sapien
agttctcgcaactgcctaaaaggag

SEQ ID NO: 4398666 - DNA, 25 bp, Homo sapien
ccatcagctgcggtcaattttccaa

SEQ ID NO: 4398667 - DNA, 25 bp, Homo sapien
tctattgatatcaccctttaaaggg

SEQ ID NO: 4398668 - DNA, 25 bp, Homo sapien
tggccgccatcatttttccgtggag

SEQ ID NO: 4398669 - DNA, 25 bp, Homo sapien
aaaaaatagtcatcgctcgtcttgc

SEQ ID NO: 4398670 - DNA, 25 bp, Homo sapien
gccatagagatgttgtctgatccat

SEQ ID NO: 4398671 - DNA, 25 bp, Homo sapien
tctgagggccgggacacggtgttgg

SEQ ID NO: 4398672 - DNA, 25 bp, Homo sapien
gcccggagttaatgcaagccttgtt

SEQ ID NO: 4398673 - DNA, 25 bp, Homo sapien
ggttttgttgcacgtgctctcttca

SEQ ID NO: 4398674 - DNA, 25 bp, Homo sapien
ttcacaggcccggagttaatgcaag

SEQ ID NO: 4398675 - DNA, 25 bp, Homo sapien
ttggctctggtgtctgagaggccat

SEQ ID NO: 4398676 - DNA, 25 bp, Homo sapien
cacagaatgcattatttggctctgg

SEQ ID NO: 4398677 - DNA, 25 bp, Homo sapien
gcacagaatgcattatttggctctg

SEQ ID NO: 4398678 - DNA, 25 bp, Homo sapien
ctagcacagaatgcattatttggct

SEQ ID NO: 4398679 - DNA, 25 bp, Homo sapien
ctagaatgtgatctccttggagata

SEQ ID NO: 4398680 - DNA, 25 bp, Homo sapien
tagacatggcactaggcgtgcggat

SEQ ID NO: 4398681 - DNA, 25 bp, Homo sapien
tgttctctgaagtactcttctgggt

SEQ ID NO: 4398682 - DNA, 25 bp, Homo sapien
tctcttcactgcacggcagtttgtc

SEQ ID NO: 4398683 - DNA, 25 bp, Homo sapien
gctgtagacactgccgctgcactcc

SEQ ID NO: 4398684 - DNA, 25 bp, Homo sapien
ccgctgcactccagggtctcagaat

SEQ ID NO: 4398685 - DNA, 25 bp, Homo sapien
aagatgctgtagacactgccgctgc

SEQ ID NO: 4398686 - DNA, 25 bp, Homo sapien
aggaagatgctgtagacactgccgc

SEQ ID NO: 4398687 - DNA, 25 bp, Homo sapien
gcataaatccacaaacgcagactcg

SEQ ID NO: 4398688 - DNA, 25 bp, Homo sapien
caaacgcagactcgggcacacacat

SEQ ID NO: 4398689 - DNA, 25 bp, Homo sapien
ccagcagccagtcgccatgcataaa

SEQ ID NO: 4398690 - DNA, 25 bp, Homo sapien
caatgacagaagcatgcagaccatc

SEQ ID NO: 4398691 - DNA, 25 bp, Homo sapien
ttctcagagatctgagaccggcctt

SEQ ID NO: 4398692 - DNA, 25 bp, Homo sapien
gtgcatccccttcattctcagagat

SEQ ID NO: 4398693 - DNA, 25 bp, Homo sapien
tcagagatctgagaccggccttgtt

SEQ ID NO: 4398694 - DNA, 25 bp, Homo sapien
cagtgcatccccttcattctcagag

SEQ ID NO: 4398695 - DNA, 25 bp, Homo sapien
gggcactaaggaactatgggatctt

SEQ ID NO: 4398696 - DNA, 25 bp, Homo sapien
tgcagcagacgaagccctgtgttgc

SEQ ID NO: 4398697 - DNA, 25 bp, Homo sapien
cctctaaagtcggaggctctgcagc

SEQ ID NO: 4398698 - DNA, 25 bp, Homo sapien
tttcagtgtgactgcctttggggcc

SEQ ID NO: 4398699 - DNA, 25 bp, Homo sapien
gtggcggggtcagcgctcagacctc

SEQ ID NO: 4398700 - DNA, 25 bp, Homo sapien
ggaatctgttcagttgcacctctca

SEQ ID NO: 4398701 - DNA, 25 bp, Homo sapien
cgtcttggccacgtttgttctcttt

SEQ ID NO: 4398702 - DNA, 25 bp, Homo sapien
tcttggccacgtttgttctcttttc

SEQ ID NO: 4398703 - DNA, 25 bp, Homo sapien
gggtctgatgtgaactggaatctgt

SEQ ID NO: 4398704 - DNA, 25 bp, Homo sapien
ttttcttccttgcaccgcagagggc

SEQ ID NO: 4398705 - DNA, 25 bp, Homo sapien
ttgcaccgcagagggctgcttccca

SEQ ID NO: 4398706 - DNA, 25 bp, Homo sapien
ttcttccttgcaccgcagagggctg

SEQ ID NO: 4398707 - DNA, 25 bp, Homo sapien
gcactgtatttgcactgggcagtgg

SEQ ID NO: 4398708 - DNA, 25 bp, Homo sapien
cacaggccttgtcatcgataacagg

SEQ ID NO: 4398709 - DNA, 25 bp, Homo sapien
cacatgctgagcaattgagctagca

SEQ ID NO: 4398710 - DNA, 25 bp, Homo sapien
ccccaaagtggtggagcaagagcac

SEQ ID NO: 4398711 - DNA, 25 bp, Homo sapien
catgctgatagaggcagggacgaca

SEQ ID NO: 4398712 - DNA, 25 bp, Homo sapien
agcccatgagttctttgctcgtcta

SEQ ID NO: 4398713 - DNA, 25 bp, Homo sapien
gcccatgagttctttgctcgtctat

SEQ ID NO: 4398714 - DNA, 25 bp, Homo sapien
cagcccatgagttctttgctcgtct

SEQ ID NO: 4398715 - DNA, 25 bp, Homo sapien
cccatgagttctttgctcgtctatc

SEQ ID NO: 4398716 - DNA, 25 bp, Homo sapien
tagtccagctcatgtttggctgatg

SEQ ID NO: 4398717 - DNA, 25 bp, Homo sapien
gtttggctgatgtaatttcccaagg

SEQ ID NO: 4398718 - DNA, 25 bp, Homo sapien
ttcccaaggcaaggacaagactgac

SEQ ID NO: 4398719 - DNA, 25 bp, Homo sapien
gtaatttcccaaggcaaggacaaga

SEQ ID NO: 4398720 - DNA, 25 bp, Homo sapien
cacagatgacatattggactggcat

SEQ ID NO: 4398721 - DNA, 25 bp, Homo sapien
atattggactggcatctcatccgtg

SEQ ID NO: 4398722 - DNA, 25 bp, Homo sapien
tggactggcatctcatccgtgagat

SEQ ID NO: 4398723 - DNA, 25 bp, Homo sapien
ctggcatctcatccgtgagataggg

SEQ ID NO: 4398724 - DNA, 25 bp, Homo sapien
aacccttcacgaagccctggagatg

SEQ ID NO: 4398725 - DNA, 25 bp, Homo sapien
actaacccttcacgaagccctggag

SEQ ID NO: 4398726 - DNA, 25 bp, Homo sapien
ctctctgcttggaactaacccttca

SEQ ID NO: 4398727 - DNA, 25 bp, Homo sapien
tgcttggaactaacccttcacgaag

SEQ ID NO: 4398728 - DNA, 25 bp, Homo sapien
cctgggaaacgggaccatctcatgc

SEQ ID NO: 4398729 - DNA, 25 bp, Homo sapien
ctcctgatttcatgagatgtcccaa

SEQ ID NO: 4398730 - DNA, 25 bp, Homo sapien
atgagatgtcccaacacagcatgaa

SEQ ID NO: 4398731 - DNA, 25 bp, Homo sapien
tgggaaacgggaccatctcatgcac

SEQ ID NO: 4398732 - DNA, 25 bp, Homo sapien
ctgtgtcctgaaacatctggcaatc

SEQ ID NO: 4398733 - DNA, 25 bp, Homo sapien
taggcactgtacaattcccaggaat

SEQ ID NO: 4398734 - DNA, 25 bp, Homo sapien
taataaggactccaataggcactgt

SEQ ID NO: 4398735 - DNA, 25 bp, Homo sapien
gagtgatccatttgtgcctgagcga

SEQ ID NO: 4398736 - DNA, 25 bp, Homo sapien
tgagcgatccctctcctaataagga

SEQ ID NO: 4398737 - DNA, 25 bp, Homo sapien
ccatgtcaccacaaagtttcgcaca

SEQ ID NO: 4398738 - DNA, 25 bp, Homo sapien
caacatctggtttcttgtctgtgtg

SEQ ID NO: 4398739 - DNA, 25 bp, Homo sapien
ttaccactgggatgctgtggagacc

SEQ ID NO: 4398740 - DNA, 25 bp, Homo sapien
ttcgcacaataaacccaacatctgg

SEQ ID NO: 4398741 - DNA, 25 bp, Homo sapien
ccgttatcttcatctggcagggact

SEQ ID NO: 4398742 - DNA, 25 bp, Homo sapien
cgttatcttcatctggcagggactt

SEQ ID NO: 4398743 - DNA, 25 bp, Homo sapien
catgctgtgatcctgccgttatctt

SEQ ID NO: 4398744 - DNA, 25 bp, Homo sapien
ctgtgatcctgccgttatcttcatc

SEQ ID NO: 4398745 - DNA, 25 bp, Homo sapien
tggtctttataactgtctcccaacc

SEQ ID NO: 4398746 - DNA, 25 bp, Homo sapien
tgtcttattcaacttagtttcccca

SEQ ID NO: 4398747 - DNA, 25 bp, Homo sapien
tgaaacaacttggtctttataactg

SEQ ID NO: 4398748 - DNA, 25 bp, Homo sapien
tattcaacttagtttccccatcagc

SEQ ID NO: 4398749 - DNA, 25 bp, Homo sapien
tgcaagacttcctaagcaacatacc

SEQ ID NO: 4398750 - DNA, 25 bp, Homo sapien
ctgcaagacttcctaagcaacatac

SEQ ID NO: 4398751 - DNA, 25 bp, Homo sapien
acacagactggcgagcccgtggact

SEQ ID NO: 4398752 - DNA, 25 bp, Homo sapien
cagtccctccacttgacaggaactt

SEQ ID NO: 4398753 - DNA, 25 bp, Homo sapien
catgtgtttggatcactgattgaga

SEQ ID NO: 4398754 - DNA, 25 bp, Homo sapien
catgtatgtggaccagctgatttgc

SEQ ID NO: 4398755 - DNA, 25 bp, Homo sapien
ctcacatccttcatctgtcttagtg

SEQ ID NO: 4398756 - DNA, 25 bp, Homo sapien
tgtcttagtgtcaccaccatccaca

SEQ ID NO: 4398757 - DNA, 25 bp, Homo sapien
cctctcacatccttcatctgtctta

SEQ ID NO: 4398758 - DNA, 25 bp, Homo sapien
catccttcatctgtcttagtgtcac

SEQ ID NO: 4398759 - DNA, 25 bp, Homo sapien
ggtatgaactgctgtcttactgtag

SEQ ID NO: 4398760 - DNA, 25 bp, Homo sapien
cactctttcatgtgcttaattgggc

SEQ ID NO: 4398761 - DNA, 25 bp, Homo sapien
gtacacttataagacactctcagag

SEQ ID NO: 4398762 - DNA, 25 bp, Homo sapien
gacccttgccttattgaatcatttg

SEQ ID NO: 4398763 - DNA, 25 bp, Homo sapien
tgttcaacggccagaggcacagtgt

SEQ ID NO: 4398764 - DNA, 25 bp, Homo sapien
aagagacccctcttctgttcaacgg

SEQ ID NO: 4398765 - DNA, 25 bp, Homo sapien
caaatccaacttgcaggcacgcaga

SEQ ID NO: 4398766 - DNA, 25 bp, Homo sapien
ggagtttgttgttaatctgcccacc

SEQ ID NO: 4398767 - DNA, 25 bp, Homo sapien
tattcttggcaaatagacgtaggct

SEQ ID NO: 4398768 - DNA, 25 bp, Homo sapien
ttccagctaaagcaggtccgtggcg

SEQ ID NO: 4398769 - DNA, 25 bp, Homo sapien
tgactcagccgcagaatcagcagaa

SEQ ID NO: 4398770 - DNA, 25 bp, Homo sapien
tcaacgtggccactcactaggtggt

SEQ ID NO: 4398771 - DNA, 25 bp, Homo sapien
cacttgatattgatttagggccctt

SEQ ID NO: 4398772 - DNA, 25 bp, Homo sapien
cggtcacttgatattgatttagggc

SEQ ID NO: 4398773 - DNA, 25 bp, Homo sapien
tgatattgatttagggcccttgggt

SEQ ID NO: 4398774 - DNA, 25 bp, Homo sapien
ggaagcggtcacttgatattgattt

SEQ ID NO: 4398775 - DNA, 25 bp, Homo sapien
tcaagacttgaaacggatgtgttgg

SEQ ID NO: 4398776 - DNA, 25 bp, Homo sapien
aattccatacagtttcacccaaggc

SEQ ID NO: 4398777 - DNA, 25 bp, Homo sapien
cacacatactcatggaatctggaag

SEQ ID NO: 4398778 - DNA, 25 bp, Homo sapien
tgaccacacaggaatcagacacatg

SEQ ID NO: 4398779 - DNA, 25 bp, Homo sapien
acacatacacagactcataggatgg

SEQ ID NO: 4398780 - DNA, 25 bp, Homo sapien
gactttgttcaggtcacttgatctt

SEQ ID NO: 4398781 - DNA, 25 bp, Homo sapien
tggagaaacacattggctgtgtgac

SEQ ID NO: 4398782 - DNA, 25 bp, Homo sapien
ttggacacccttgtataaagaaaca

SEQ ID NO: 4398783 - DNA, 25 bp, Homo sapien
catgaagctggaagcgatcattcgc

SEQ ID NO: 4398784 - DNA, 25 bp, Homo sapien
gaaagaatgtttccttgatgaagat

SEQ ID NO: 4398785 - DNA, 25 bp, Homo sapien
gtagggagggaaaacatcaggataa

SEQ ID NO: 4398786 - DNA, 25 bp, Homo sapien
aatagttactgcatgcggggcttca

SEQ ID NO: 4398787 - DNA, 25 bp, Homo sapien
ggtttcaattgtaccactcagtggc

SEQ ID NO: 4398788 - DNA, 25 bp, Homo sapien
tgttgtaacgtgagtgcgcacctcc

SEQ ID NO: 4398789 - DNA, 25 bp, Homo sapien
agagctgtgccaccaaccattgcca

SEQ ID NO: 4398790 - DNA, 25 bp, Homo sapien
gcacctccttcgtatggctgagtaa

SEQ ID NO: 4398791 - DNA, 25 bp, Homo sapien
tatttggagtatctttgggaggcac

SEQ ID NO: 4398792 - DNA, 25 bp, Homo sapien
taaattggagaggatccttgccctg

SEQ ID NO: 4398793 - DNA, 25 bp, Homo sapien
tatcactatttggaagggctttggg

SEQ ID NO: 4398794 - DNA, 25 bp, Homo sapien
tgagagccataagattcggaagctg

SEQ ID NO: 4398795 - DNA, 25 bp, Homo sapien
ccttgggacccttgagattctgagc

SEQ ID NO: 4398796 - DNA, 25 bp, Homo sapien
tactttttgaggtagcagtcacgac

SEQ ID NO: 4398797 - DNA, 25 bp, Homo sapien
ggctctcactgactggaccttggga

SEQ ID NO: 4398798 - DNA, 25 bp, Homo sapien
gattaacagcgcaaaagctccctgg

SEQ ID NO: 4398799 - DNA, 25 bp, Homo sapien
ggaagaacaggttcggcagccaatc

SEQ ID NO: 4398800 - DNA, 25 bp, Homo sapien
taagcagagtcgtgctgggctagct

SEQ ID NO: 4398801 - DNA, 25 bp, Homo sapien
tgtggcagaagcgtaacaataagca

SEQ ID NO: 4398802 - DNA, 25 bp, Homo sapien
cctctttggtggaaatttggacaca

SEQ ID NO: 4398803 - DNA, 25 bp, Homo sapien
cctcgtgtaccaaaaacggtctgtg

SEQ ID NO: 4398804 - DNA, 25 bp, Homo sapien
cagttcccagggtaagcctcgtgta

SEQ ID NO: 4398805 - DNA, 25 bp, Homo sapien
gtgtgggctctcaccaaaccagaga

SEQ ID NO: 4398806 - DNA, 25 bp, Homo sapien
tgttcagcggcttggagcatgtcac

SEQ ID NO: 4398807 - DNA, 25 bp, Homo sapien
tagaggagccggttccatgaaagaa

SEQ ID NO: 4398808 - DNA, 25 bp, Homo sapien
gccaaatggctctcttgataggaaa

SEQ ID NO: 4398809 - DNA, 25 bp, Homo sapien
taaagctctccgtctgattctaggt

SEQ ID NO: 4398810 - DNA, 25 bp, Homo sapien
gctgagcttaagagaggagccaaat

SEQ ID NO: 4398811 - DNA, 25 bp, Homo sapien
gatgggcgtgaaaaatggcctcttc

SEQ ID NO: 4398812 - DNA, 25 bp, Homo sapien
cacagtcgcaatggctggaagaact

SEQ ID NO: 4398813 - DNA, 25 bp, Homo sapien
taaagactcaactgggatgggcgtg

SEQ ID NO: 4398814 - DNA, 25 bp, Homo sapien
caggaagggatcatctaaagactca

SEQ ID NO: 4398815 - DNA, 25 bp, Homo sapien
aaagtgacttcgtaaataccgcagc

SEQ ID NO: 4398816 - DNA, 25 bp, Homo sapien
cgtctgagttcagcaaacttcctgc

SEQ ID NO: 4398817 - DNA, 25 bp, Homo sapien
cccctctctgtactgatcagcaagg

SEQ ID NO: 4398818 - DNA, 25 bp, Homo sapien
tgctgggattctccagaggaatcct

SEQ ID NO: 4398819 - DNA, 25 bp, Homo sapien
ttagaaggaggcatgctccctctca

SEQ ID NO: 4398820 - DNA, 25 bp, Homo sapien
agaaggaggcatgctccctctcagc

SEQ ID NO: 4398821 - DNA, 25 bp, Homo sapien
catctgggtcgcctgtgcaggcttt

SEQ ID NO: 4398822 - DNA, 25 bp, Homo sapien
tcagccccttctcgggcatctgggt

SEQ ID NO: 4398823 - DNA, 25 bp, Homo sapien
gtccaggctggcgacatctccttaa

SEQ ID NO: 4398824 - DNA, 25 bp, Homo sapien
aaggagaggaaatcacgaagccatc

SEQ ID NO: 4398825 - DNA, 25 bp, Homo sapien
atggaggagacctaagcccacgtcc

SEQ ID NO: 4398826 - DNA, 25 bp, Homo sapien
tgaaatattgctctggtaccagtgc

SEQ ID NO: 4398827 - DNA, 25 bp, Homo sapien
cttgtgacactctcaacaaaaaagt

SEQ ID NO: 4398828 - DNA, 25 bp, Homo sapien
agggtcagagccttgcctgcaaact

SEQ ID NO: 4398829 - DNA, 25 bp, Homo sapien
caaaaaagtgaagggtcagagcctt

SEQ ID NO: 4398830 - DNA, 25 bp, Homo sapien
tgtgacactctcaacaaaaaagtga

SEQ ID NO: 4398831 - DNA, 25 bp, Homo sapien
cacagttttcaacatgatggagagc

SEQ ID NO: 4398832 - DNA, 25 bp, Homo sapien
ttcaacatgatggagagcgcctcca

SEQ ID NO: 4398833 - DNA, 25 bp, Homo sapien
agttttcaacatgatggagagcgcc

SEQ ID NO: 4398834 - DNA, 25 bp, Homo sapien
ttttcaacatgatggagagcgcctc

SEQ ID NO: 4398835 - DNA, 25 bp, Homo sapien
ggcgagagggaatgtctctcccaac

SEQ ID NO: 4398836 - DNA, 25 bp, Homo sapien
gaaagttctttggtgagctccctga

SEQ ID NO: 4398837 - DNA, 25 bp, Homo sapien
tcatggaaagggcagcttgggccct

SEQ ID NO: 4398838 - DNA, 25 bp, Homo sapien
tccctgaggccgtcagtggtggagg

SEQ ID NO: 4398839 - DNA, 25 bp, Homo sapien
gcagctgcggttgggcccatcctga

SEQ ID NO: 4398840 - DNA, 25 bp, Homo sapien
tacggcagctgcggttgggcccatc

SEQ ID NO: 4398841 - DNA, 25 bp, Homo sapien
cggcagctgcggttgggcccatcct

SEQ ID NO: 4398842 - DNA, 25 bp, Homo sapien
tattacggcagctgcggttgggccc

SEQ ID NO: 4398843 - DNA, 25 bp, Homo sapien
ctctgtgggcctcagcagctgaagt

SEQ ID NO: 4398844 - DNA, 25 bp, Homo sapien
tgcctggcatatagagggtggccct

SEQ ID NO: 4398845 - DNA, 25 bp, Homo sapien
ccttctgcctggcatatagagggtg

SEQ ID NO: 4398846 - DNA, 25 bp, Homo sapien
gggattccaggagtccttctgcctg

SEQ ID NO: 4398847 - DNA, 25 bp, Homo sapien
agagctctccttcaatcccggacca

SEQ ID NO: 4398848 - DNA, 25 bp, Homo sapien
caggggaagggtggctcctcgaaag

SEQ ID NO: 4398849 - DNA, 25 bp, Homo sapien
ccagagctctccttcaatcccggac

SEQ ID NO: 4398850 - DNA, 25 bp, Homo sapien
gctctccttcaatcccggaccacat

SEQ ID NO: 4398851 - DNA, 25 bp, Homo sapien
taatgttcagaccacagttgctctc

SEQ ID NO: 4398852 - DNA, 25 bp, Homo sapien
ggccttgaggtgcactcccagctgt

SEQ ID NO: 4398853 - DNA, 25 bp, Homo sapien
tgtcaatgtgcacaggatgagaaac

SEQ ID NO: 4398854 - DNA, 25 bp, Homo sapien
gatatggccggtgtccctgtcaatg

SEQ ID NO: 4398855 - DNA, 25 bp, Homo sapien
gagcatcatatgctttaggtccgtt

SEQ ID NO: 4398856 - DNA, 25 bp, Homo sapien
tgtaagtgcattcattgtgaacggg

SEQ ID NO: 4398857 - DNA, 25 bp, Homo sapien
gggccagtgttgcacagagcatcat

SEQ ID NO: 4398858 - DNA, 25 bp, Homo sapien
taggtccgtttgaataactgtcttc

SEQ ID NO: 4398859 - DNA, 25 bp, Homo sapien
ctttcagtcccacttgtgtgctggt

SEQ ID NO: 4398860 - DNA, 25 bp, Homo sapien
tttcagtcccacttgtgtgctggtg

SEQ ID NO: 4398861 - DNA, 25 bp, Homo sapien
ttcagtcccacttgtgtgctggtga

SEQ ID NO: 4398862 - DNA, 25 bp, Homo sapien
tgggaataccatttgagaacactga

SEQ ID NO: 4398863 - DNA, 25 bp, Homo sapien
ttgaacaatgttggcacttcccagt

SEQ ID NO: 4398864 - DNA, 25 bp, Homo sapien
ccagtaggctcacgtgggaagtgtc

SEQ ID NO: 4398865 - DNA, 25 bp, Homo sapien
caccaggaactttgccatgaaatgc

SEQ ID NO: 4398866 - DNA, 25 bp, Homo sapien
gtgtttttgccttggcgagggtgga

SEQ ID NO: 4398867 - DNA, 25 bp, Homo sapien
gcagtcaagggagataggtccttct

SEQ ID NO: 4398868 - DNA, 25 bp, Homo sapien
agggaaccactccccaaaggagcat

SEQ ID NO: 4398869 - DNA, 25 bp, Homo sapien
tcacagtgcacacgatggaagcatt

SEQ ID NO: 4398870 - DNA, 25 bp, Homo sapien
agaactattttggagaagttcacag

SEQ ID NO: 4398871 - DNA, 25 bp, Homo sapien
gaaacctgcattctttccgttgctg

SEQ ID NO: 4398872 - DNA, 25 bp, Homo sapien
agtgtggccaactaggaaacctgca

SEQ ID NO: 4398873 - DNA, 25 bp, Homo sapien
tggttgtacaggcttggacaagtcc

SEQ ID NO: 4398874 - DNA, 25 bp, Homo sapien
tgtcaaagcaccaaattctcagtgt

SEQ ID NO: 4398875 - DNA, 25 bp, Homo sapien
gaaacttttcgtgatagtcccagag

SEQ ID NO: 4398876 - DNA, 25 bp, Homo sapien
taaacatcagcatcgctggcgtcct

SEQ ID NO: 4398877 - DNA, 25 bp, Homo sapien
tcagcaccttcaccaagggtcaagg

SEQ ID NO: 4398878 - DNA, 25 bp, Homo sapien
tatttagaatccgtatggtcccagg

SEQ ID NO: 4398879 - DNA, 25 bp, Homo sapien
tatgtttctaaagagctttgccacc

SEQ ID NO: 4398880 - DNA, 25 bp, Homo sapien
gacctctccaaactcttataagttc

SEQ ID NO: 4398881 - DNA, 25 bp, Homo sapien
gacctgcttataactcatccttggg

SEQ ID NO: 4398882 - DNA, 25 bp, Homo sapien
accactgtaaacaggagatcatctg

SEQ ID NO: 4398883 - DNA, 25 bp, Homo sapien
caggagcccgatctgtttctgagat

SEQ ID NO: 4398884 - DNA, 25 bp, Homo sapien
tacgcagctggaccggaataaggca

SEQ ID NO: 4398885 - DNA, 25 bp, Homo sapien
tctagaatgctggttggaatcaccc

SEQ ID NO: 4398886 - DNA, 25 bp, Homo sapien
tgagatgcattctcccggtgggtaa

SEQ ID NO: 4398887 - DNA, 25 bp, Homo sapien
caactggaactagagatcaatggga

SEQ ID NO: 4398888 - DNA, 25 bp, Homo sapien
aaatgaggaggtttgggatcttcca

SEQ ID NO: 4398889 - DNA, 25 bp, Homo sapien
gaacatgtagaataggacctagttg

SEQ ID NO: 4398890 - DNA, 25 bp, Homo sapien
gagctctgcgggctgttgaacatgt

SEQ ID NO: 4398891 - DNA, 25 bp, Homo sapien
gattaacaaagcctgctcaagccaa

SEQ ID NO: 4398892 - DNA, 25 bp, Homo sapien
catatcagattaaggccagttttgc

SEQ ID NO: 4398893 - DNA, 25 bp, Homo sapien
gagaaggctcaacactcacagagaa

SEQ ID NO: 4398894 - DNA, 25 bp, Homo sapien
gacacggcaggccaaacagggaagt

SEQ ID NO: 4398895 - DNA, 25 bp, Homo sapien
gccataataccattaggagggtgcc

SEQ ID NO: 4398896 - DNA, 25 bp, Homo sapien
tagaggaacctgcagacacgtagtt

SEQ ID NO: 4398897 - DNA, 25 bp, Homo sapien
cattcaatccggtctttgggacggg

SEQ ID NO: 4398898 - DNA, 25 bp, Homo sapien
tggtgcacagctcaattaggaaagg

SEQ ID NO: 4398899 - DNA, 25 bp, Homo sapien
tgagctcggactgccctaggcaaat

SEQ ID NO: 4398900 - DNA, 25 bp, Homo sapien
cctaaagtctaggagaccaagcttg

SEQ ID NO: 4398901 - DNA, 25 bp, Homo sapien
tactgaacgtctaggacatgcaggc

SEQ ID NO: 4398902 - DNA, 25 bp, Homo sapien
caaggccagaagtggaggaagttcc

SEQ ID NO: 4398903 - DNA, 25 bp, Homo sapien
caaggtacagccaaaaaacctgcag

SEQ ID NO: 4398904 - DNA, 25 bp, Homo sapien
gccaaaaaacctgcagaaacatgtc

SEQ ID NO: 4398905 - DNA, 25 bp, Homo sapien
cctgcagaaacatgtccgaagccat

SEQ ID NO: 4398906 - DNA, 25 bp, Homo sapien
aaacctgcagaaacatgtccgaagc

SEQ ID NO: 4398907 - DNA, 25 bp, Homo sapien
caccccagtgcctttcgggtagtca

SEQ ID NO: 4398908 - DNA, 25 bp, Homo sapien
gactgctttgtcctcgatgtccacc

SEQ ID NO: 4398909 - DNA, 25 bp, Homo sapien
ggtgggccggcgtcaccttccttga

SEQ ID NO: 4398910 - DNA, 25 bp, Homo sapien
taagccgaatccaagcctcggtggg

SEQ ID NO: 4398911 - DNA, 25 bp, Homo sapien
ccaaggaagtacatatggtccaaag

SEQ ID NO: 4398912 - DNA, 25 bp, Homo sapien
gctgcaagtaaccatgatatccatg

SEQ ID NO: 4398913 - DNA, 25 bp, Homo sapien
aaggaagtacatatggtccaaagag

SEQ ID NO: 4398914 - DNA, 25 bp, Homo sapien
aaccatgatatccatgtcaggaagg

SEQ ID NO: 4398915 - DNA, 25 bp, Homo sapien
taggaattcaccgtaaccctgcaga

SEQ ID NO: 4398916 - DNA, 25 bp, Homo sapien
gaaagatccagcacaacagtcctaa

SEQ ID NO: 4398917 - DNA, 25 bp, Homo sapien
gcactctcaggtgtgttgacgtata

SEQ ID NO: 4398918 - DNA, 25 bp, Homo sapien
cagtcctaaagggtatttccatggt

SEQ ID NO: 4398919 - DNA, 25 bp, Homo sapien
agaggagcacgtggccacacactgg

SEQ ID NO: 4398920 - DNA, 25 bp, Homo sapien
tgcaggaggaacattcccacggatg

SEQ ID NO: 4398921 - DNA, 25 bp, Homo sapien
cacagtggcgtcctctgagtacaga

SEQ ID NO: 4398922 - DNA, 25 bp, Homo sapien
gggcaatgcaggtcccgccgatgca

SEQ ID NO: 4398923 - DNA, 25 bp, Homo sapien
tcatgcagcaatttgaggactctcc

SEQ ID NO: 4398924 - DNA, 25 bp, Homo sapien
tatggttgccctgtcctccattaag

SEQ ID NO: 4398925 - DNA, 25 bp, Homo sapien
cgagccttatggtctaatactgcgg

SEQ ID NO: 4398926 - DNA, 25 bp, Homo sapien
taatactgcggcaaatgttccacag

SEQ ID NO: 4398927 - DNA, 25 bp, Homo sapien
tggccatggatggtgtggcatcaaa

SEQ ID NO: 4398928 - DNA, 25 bp, Homo sapien
catggatggtgtggcatcaaaaggc

SEQ ID NO: 4398929 - DNA, 25 bp, Homo sapien
tctttcttctaaggtggccatggat

SEQ ID NO: 4398930 - DNA, 25 bp, Homo sapien
ctctgggactaatctttcttctaag

SEQ ID NO: 4398931 - DNA, 25 bp, Homo sapien
tagccacaaggacttcaatatgaac

SEQ ID NO: 4398932 - DNA, 25 bp, Homo sapien
caagtattcgaattgacttctgaaa

SEQ ID NO: 4398933 - DNA, 25 bp, Homo sapien
tttcatagccacaaggacttcaata

SEQ ID NO: 4398934 - DNA, 25 bp, Homo sapien
caatatgaacaagtattcgaattga

SEQ ID NO: 4398935 - DNA, 25 bp, Homo sapien
ggaacatgaatttacagcctttggc

SEQ ID NO: 4398936 - DNA, 25 bp, Homo sapien
aggtgtacccagctctttgtgtctg

SEQ ID NO: 4398937 - DNA, 25 bp, Homo sapien
ggtgtacccagctctttgtgtctgc

SEQ ID NO: 4398938 - DNA, 25 bp, Homo sapien
gtgtacccagctctttgtgtctgct

SEQ ID NO: 4398939 - DNA, 25 bp, Homo sapien
cacagcgtgtcctcctttatcggaa

SEQ ID NO: 4398940 - DNA, 25 bp, Homo sapien
tgtcctcctttatcggaagcgcctt

SEQ ID NO: 4398941 - DNA, 25 bp, Homo sapien
tcctttatcggaagcgcctttgcca

SEQ ID NO: 4398942 - DNA, 25 bp, Homo sapien
ggaagcgcctttgccagcttcctat

SEQ ID NO: 4398943 - DNA, 25 bp, Homo sapien
ctgctcttcgtgctgtcttggcaga

SEQ ID NO: 4398944 - DNA, 25 bp, Homo sapien
agtgtcctgctcttcgtgctgtctt

SEQ ID NO: 4398945 - DNA, 25 bp, Homo sapien
cagagagtggtccagaccttgtctg

SEQ ID NO: 4398946 - DNA, 25 bp, Homo sapien
tcctgctcttcgtgctgtcttggca

SEQ ID NO: 4398947 - DNA, 25 bp, Homo sapien
cctttcagatcgaggaggtggcccg

SEQ ID NO: 4398948 - DNA, 25 bp, Homo sapien
taaacggcgtaacgatggcactgtc

SEQ ID NO: 4398949 - DNA, 25 bp, Homo sapien
ttgtgaccgcaagaaccctaagggc

SEQ ID NO: 4398950 - DNA, 25 bp, Homo sapien
caagtgcctgccgtagtgtctgctc

SEQ ID NO: 4398951 - DNA, 25 bp, Homo sapien
taggcgtttccctagggtggagctc

SEQ ID NO: 4398952 - DNA, 25 bp, Homo sapien
cgtgtggctccgtgatcgtaagtcc

SEQ ID NO: 4398953 - DNA, 25 bp, Homo sapien
ttgtgcattccgtaaaaagctcagg

SEQ ID NO: 4398954 - DNA, 25 bp, Homo sapien
ctggctcttgcacaacagaccgagg

SEQ ID NO: 4398955 - DNA, 25 bp, Homo sapien
taatttttcatgtaggactgtcacg

SEQ ID NO: 4398956 - DNA, 25 bp, Homo sapien
ttttgtctgctgttatggaggtcag

SEQ ID NO: 4398957 - DNA, 25 bp, Homo sapien
gaaacatctaagtgtgactcctcca

SEQ ID NO: 4398958 - DNA, 25 bp, Homo sapien
gactgtcacgagaagtaagattttt

SEQ ID NO: 4398959 - DNA, 25 bp, Homo sapien
ctacccattctctaaggcctcttct

SEQ ID NO: 4398960 - DNA, 25 bp, Homo sapien
acccattctctaaggcctcttctgc

SEQ ID NO: 4398961 - DNA, 25 bp, Homo sapien
cccattctctaaggcctcttctgcc

SEQ ID NO: 4398962 - DNA, 25 bp, Homo sapien
tacccattctctaaggcctcttctg

SEQ ID NO: 4398963 - DNA, 25 bp, Homo sapien
taataggcttcagagacttcaattc

SEQ ID NO: 4398964 - DNA, 25 bp, Homo sapien
ttaataggcttcagagacttcaatt

SEQ ID NO: 4398965 - DNA, 25 bp, Homo sapien
ataggcttcagagacttcaattcct

SEQ ID NO: 4398966 - DNA, 25 bp, Homo sapien
aataggcttcagagacttcaattcc

SEQ ID NO: 4398967 - DNA, 25 bp, Homo sapien
caaacccaggagaatctagccatag

SEQ ID NO: 4398968 - DNA, 25 bp, Homo sapien
taacaggtctcactcccttaggtcc

SEQ ID NO: 4398969 - DNA, 25 bp, Homo sapien
ttaggtccttcataagccctcagct

SEQ ID NO: 4398970 - DNA, 25 bp, Homo sapien
tacagttttcagtaatcatcataca

SEQ ID NO: 4398971 - DNA, 25 bp, Homo sapien
tccagcaaacatctcggcttgtggg

SEQ ID NO: 4398972 - DNA, 25 bp, Homo sapien
cttcacatgaaggatggtcaacagg

SEQ ID NO: 4398973 - DNA, 25 bp, Homo sapien
gagccaggcactaccatatccataa

SEQ ID NO: 4398974 - DNA, 25 bp, Homo sapien
atggattttaagcactgagccaggc

SEQ ID NO: 4398975 - DNA, 25 bp, Homo sapien
gaccagagccacttgagatagggcc

SEQ ID NO: 4398976 - DNA, 25 bp, Homo sapien
tcttaacatgagtaggaggcctgtg

SEQ ID NO: 4398977 - DNA, 25 bp, Homo sapien
ccatctgtttgcatggaccagagcc

SEQ ID NO: 4398978 - DNA, 25 bp, Homo sapien
tctgagcagctctcttaacatgagt

SEQ ID NO: 4398979 - DNA, 25 bp, Homo sapien
ctaggaatagaaggtaagaccagca

SEQ ID NO: 4398980 - DNA, 25 bp, Homo sapien
tttccccgcccaggaaatgactgct

SEQ ID NO: 4398981 - DNA, 25 bp, Homo sapien
cagggccactgtggatgggctttcc

SEQ ID NO: 4398982 - DNA, 25 bp, Homo sapien
cgcccaggaaatgactgctgcattg

SEQ ID NO: 4398983 - DNA, 25 bp, Homo sapien
gctgcattgatctctgtgccactca

SEQ ID NO: 4398984 - DNA, 25 bp, Homo sapien
tcaggccagcacatagacaacatgt

SEQ ID NO: 4398985 - DNA, 25 bp, Homo sapien
aagtttagaaagtctctctagggag

SEQ ID NO: 4398986 - DNA, 25 bp, Homo sapien
tatgccgattttactggcctcgttg

SEQ ID NO: 4398987 - DNA, 25 bp, Homo sapien
tgacttcttggcaaagggattgacc

SEQ ID NO: 4398988 - DNA, 25 bp, Homo sapien
tgagtgcgatgattaaatttgggac

SEQ ID NO: 4398989 - DNA, 25 bp, Homo sapien
gatgattaaatttgggacagagaga

SEQ ID NO: 4398990 - DNA, 25 bp, Homo sapien
tcatttgaatgagtgcgatgattaa

SEQ ID NO: 4398991 - DNA, 25 bp, Homo sapien
agagaaaaagaatcctgtgtgttta

SEQ ID NO: 4398992 - DNA, 25 bp, Homo sapien
aaatcttcaaaacacagttcgctga

SEQ ID NO: 4398993 - DNA, 25 bp, Homo sapien
aatcttcaaaacacagttcgctgat

SEQ ID NO: 4398994 - DNA, 25 bp, Homo sapien
tcttcaaaacacagttcgctgatga

SEQ ID NO: 4398995 - DNA, 25 bp, Homo sapien
cttcaaaacacagttcgctgatgat

SEQ ID NO: 4398996 - DNA, 25 bp, Homo sapien
agtctgaagtctgaggatttactga

SEQ ID NO: 4398997 - DNA, 25 bp, Homo sapien
ccagtctgaagtctgaggatttact

SEQ ID NO: 4398998 - DNA, 25 bp, Homo sapien
gatttactgaatgagtaggatgggt

SEQ ID NO: 4398999 - DNA, 25 bp, Homo sapien
gaggatttactgaatgagtaggatg

SEQ ID NO: 4399000 - DNA, 25 bp, Homo sapien
gacgccttccgctgtcaggttctgg

SEQ ID NO: 4399001 - DNA, 25 bp, Homo sapien
aggtacagaagcaccaggacgcctt

SEQ ID NO: 4399002 - DNA, 25 bp, Homo sapien
catcaccctcctggttacacttggt

SEQ ID NO: 4399003 - DNA, 25 bp, Homo sapien
tacacttggtgtccccttcctcaag

SEQ ID NO: 4399004 - DNA, 25 bp, Homo sapien
gcatggccttcactgatgctgacca

SEQ ID NO: 4399005 - DNA, 25 bp, Homo sapien
ggccttcactgatgctgaccatctg

SEQ ID NO: 4399006 - DNA, 25 bp, Homo sapien
tagcatggccttcactgatgctgac

SEQ ID NO: 4399007 - DNA, 25 bp, Homo sapien
ctttagcatggccttcactgatgct

SEQ ID NO: 4399008 - DNA, 25 bp, Homo sapien
cagggggcaaaaggccataccacac

SEQ ID NO: 4399009 - DNA, 25 bp, Homo sapien
ccagggggcaaaaggccataccaca

SEQ ID NO: 4399010 - DNA, 25 bp, Homo sapien
tccagggggcaaaaggccataccac

SEQ ID NO: 4399011 - DNA, 25 bp, Homo sapien
gccataccacaccctcgcctctcac

SEQ ID NO: 4399012 - DNA, 25 bp, Homo sapien
catattgttgaactgaatcgatgtg

SEQ ID NO: 4399013 - DNA, 25 bp, Homo sapien
tattgttgaactgaatcgatgtgct

SEQ ID NO: 4399014 - DNA, 25 bp, Homo sapien
ttgttttgtcctcatattgttgaac

SEQ ID NO: 4399015 - DNA, 25 bp, Homo sapien
tgttgaactgaatcgatgtgctcac

SEQ ID NO: 4399016 - DNA, 25 bp, Homo sapien
ctgaaatagctggcccatcaggaag

SEQ ID NO: 4399017 - DNA, 25 bp, Homo sapien
ggcccatcaggaaggtactttgttg

SEQ ID NO: 4399018 - DNA, 25 bp, Homo sapien
caggaaggtactttgttgggtgatt

SEQ ID NO: 4399019 - DNA, 25 bp, Homo sapien
tagctggcccatcaggaaggtactt

SEQ ID NO: 4399020 - DNA, 25 bp, Homo sapien
gactcctgttctataagccagcagc

SEQ ID NO: 4399021 - DNA, 25 bp, Homo sapien
gcagcttcatgaggtctgaaaataa

SEQ ID NO: 4399022 - DNA, 25 bp, Homo sapien
taagccagcagcttcatgaggtctg

SEQ ID NO: 4399023 - DNA, 25 bp, Homo sapien
cagaaagactcctgttctataagcc

SEQ ID NO: 4399024 - DNA, 25 bp, Homo sapien
cagggggttgccaagccgtctcaaa

SEQ ID NO: 4399025 - DNA, 25 bp, Homo sapien
ggtgccattagctggcttcccagga

SEQ ID NO: 4399026 - DNA, 25 bp, Homo sapien
gtggggtgtgcaccagccaagcctc

SEQ ID NO: 4399027 - DNA, 25 bp, Homo sapien
ccagccggttctttccccgctgtgg

SEQ ID NO: 4399028 - DNA, 25 bp, Homo sapien
aggcttcaccagacacctcacaggg

SEQ ID NO: 4399029 - DNA, 25 bp, Homo sapien
gggtgaaacacatcacacccatggc

SEQ ID NO: 4399030 - DNA, 25 bp, Homo sapien
accagacacctcacagggtgggagt

SEQ ID NO: 4399031 - DNA, 25 bp, Homo sapien
gagtgtggggtgaaacacatcacac

SEQ ID NO: 4399032 - DNA, 25 bp, Homo sapien
gatatcgaatttcccgtgaggctga

SEQ ID NO: 4399033 - DNA, 25 bp, Homo sapien
taccaggtgacaggaccctatgcat

SEQ ID NO: 4399034 - DNA, 25 bp, Homo sapien
taacgttcatagacaggactgcagt

SEQ ID NO: 4399035 - DNA, 25 bp, Homo sapien
catggagccctcagaagcggttgat

SEQ ID NO: 4399036 - DNA, 25 bp, Homo sapien
taatctgaccctacagagagcccct

SEQ ID NO: 4399037 - DNA, 25 bp, Homo sapien
gcttctggccttgaactatggccca

SEQ ID NO: 4399038 - DNA, 25 bp, Homo sapien
aaaggtcctgatgcttgtggaaaca

SEQ ID NO: 4399039 - DNA, 25 bp, Homo sapien
gccccttggctaataagctctttac

SEQ ID NO: 4399040 - DNA, 25 bp, Homo sapien
tcacgcatgtcactagggatagccc

SEQ ID NO: 4399041 - DNA, 25 bp, Homo sapien
caagagtaccgggatagttgctcat

SEQ ID NO: 4399042 - DNA, 25 bp, Homo sapien
aaactgtggttgcagagcctccaag

SEQ ID NO: 4399043 - DNA, 25 bp, Homo sapien
tctctgagttggaatgggcactgta

SEQ ID NO: 4399044 - DNA, 25 bp, Homo sapien
aattataggcgggatcctgggcttg

SEQ ID NO: 4399045 - DNA, 25 bp, Homo sapien
ggcccaattaaccacttgttcctca

SEQ ID NO: 4399046 - DNA, 25 bp, Homo sapien
aagttgttaccaaagcaaatatcaa

SEQ ID NO: 4399047 - DNA, 25 bp, Homo sapien
gccctgcaatttgctaattataggc

SEQ ID NO: 4399048 - DNA, 25 bp, Homo sapien
aaactcatcaccattcctggaagag

SEQ ID NO: 4399049 - DNA, 25 bp, Homo sapien
agccagggctggatccagggaaact

SEQ ID NO: 4399050 - DNA, 25 bp, Homo sapien
gccagggctggatccagggaaactc

SEQ ID NO: 4399051 - DNA, 25 bp, Homo sapien
tctgcaatggatgtggcatgtgtga

SEQ ID NO: 4399052 - DNA, 25 bp, Homo sapien
ggttgagtcaagagcatctctgcaa

SEQ ID NO: 4399053 - DNA, 25 bp, Homo sapien
ccttggccagagtggttgcagtgga

SEQ ID NO: 4399054 - DNA, 25 bp, Homo sapien
gtgagaaagaggcacacgtagaatt

SEQ ID NO: 4399055 - DNA, 25 bp, Homo sapien
tcagcactttagcaatcccctctgt

SEQ ID NO: 4399056 - DNA, 25 bp, Homo sapien
tcacacgcgattcagcactttagca

SEQ ID NO: 4399057 - DNA, 25 bp, Homo sapien
tgtccatccatggatgcagggtcct

SEQ ID NO: 4399058 - DNA, 25 bp, Homo sapien
tccatccatggatgcagggtccttt

SEQ ID NO: 4399059 - DNA, 25 bp, Homo sapien
cagatgacaaggaaagtggtggacc

SEQ ID NO: 4399060 - DNA, 25 bp, Homo sapien
gggaatcaatacaacagtgctggtc

SEQ ID NO: 4399061 - DNA, 25 bp, Homo sapien
aatgggcaaactgggactcgcaagg

SEQ ID NO: 4399062 - DNA, 25 bp, Homo sapien
ggatctggcccctagacgcaaattt

SEQ ID NO: 4399063 - DNA, 25 bp, Homo sapien
cctttaagcaggatccgggagaatg

SEQ ID NO: 4399064 - DNA, 25 bp, Homo sapien
cacagttctgattaggtgccaagag

SEQ ID NO: 4399065 - DNA, 25 bp, Homo sapien
tcccaggccacagctttaacaaggc

SEQ ID NO: 4399066 - DNA, 25 bp, Homo sapien
ttgcaaaaatttgcgccatgtcaca

SEQ ID NO: 4399067 - DNA, 25 bp, Homo sapien
ccatgcttcctaattactggttttc

SEQ ID NO: 4399068 - DNA, 25 bp, Homo sapien
agctcctctaagaaacccctatacg

SEQ ID NO: 4399069 - DNA, 25 bp, Homo sapien
cgtaacatccttgagattcctaggg

SEQ ID NO: 4399070 - DNA, 25 bp, Homo sapien
tgaagcaaagtgtccaagtgccctc

SEQ ID NO: 4399071 - DNA, 25 bp, Homo sapien
aagtgccctcactagcgatgattag

SEQ ID NO: 4399072 - DNA, 25 bp, Homo sapien
gcaagaccgcctaaatgtaaaccca

SEQ ID NO: 4399073 - DNA, 25 bp, Homo sapien
cactttcttgaggttcgtggcttgc

SEQ ID NO: 4399074 - DNA, 25 bp, Homo sapien
tcttgaggttcgtggcttgcaaagg

SEQ ID NO: 4399075 - DNA, 25 bp, Homo sapien
ctctggagcaagaccgcctaaatgt

SEQ ID NO: 4399076 - DNA, 25 bp, Homo sapien
tcagtccctgttgaccacataacat

SEQ ID NO: 4399077 - DNA, 25 bp, Homo sapien
cagccctgggcaaggattcatggga

SEQ ID NO: 4399078 - DNA, 25 bp, Homo sapien
tcaaatccaacaaaagattcctcag

SEQ ID NO: 4399079 - DNA, 25 bp, Homo sapien
atccaacaaaagattcctcagagcc

SEQ ID NO: 4399080 - DNA, 25 bp, Homo sapien
aacccgatatgatcatcatttcaaa

SEQ ID NO: 4399081 - DNA, 25 bp, Homo sapien
cacggttgtaggtgtggccttccca

SEQ ID NO: 4399082 - DNA, 25 bp, Homo sapien
tctgggacaccctgacacgaaaggt

SEQ ID NO: 4399083 - DNA, 25 bp, Homo sapien
cagtcagtactgtttcaggctcgtc

SEQ ID NO: 4399084 - DNA, 25 bp, Homo sapien
caggctcgtctttgactgggtcacg

SEQ ID NO: 4399085 - DNA, 25 bp, Homo sapien
gtgccatactgttcccttcaccagg

SEQ ID NO: 4399086 - DNA, 25 bp, Homo sapien
catgctttttgtaccggccatagcc

SEQ ID NO: 4399087 - DNA, 25 bp, Homo sapien
ctatttcccacgagcacatgctttt

SEQ ID NO: 4399088 - DNA, 25 bp, Homo sapien
ctctgaagctgtgccatactgttcc

SEQ ID NO: 4399089 - DNA, 25 bp, Homo sapien
gaagcaatgattgggcaaatctggg

SEQ ID NO: 4399090 - DNA, 25 bp, Homo sapien
caaatgccaggtgctcgtagagggc

SEQ ID NO: 4399091 - DNA, 25 bp, Homo sapien
ggtggcaagccggaacaaggcacac

SEQ ID NO: 4399092 - DNA, 25 bp, Homo sapien
ccggagaaccgggaagcaatgattg

SEQ ID NO: 4399093 - DNA, 25 bp, Homo sapien
gcttcttgcagccactcgccccggc

SEQ ID NO: 4399094 - DNA, 25 bp, Homo sapien
aggagggcggcgctccgaaggcggc

SEQ ID NO: 4399095 - DNA, 25 bp, Homo sapien
gttcgcgtcagacaaccccagcggg

SEQ ID NO: 4399096 - DNA, 25 bp, Homo sapien
gcgggccaaaccgcagcttcttgca

SEQ ID NO: 4399097 - DNA, 25 bp, Homo sapien
cttcccacaactctctgtttactga

SEQ ID NO: 4399098 - DNA, 25 bp, Homo sapien
ccatttgcctctgagtcggtgatga

SEQ ID NO: 4399099 - DNA, 25 bp, Homo sapien
ttgccaatctctggcgggactcctt

SEQ ID NO: 4399100 - DNA, 25 bp, Homo sapien
gagcagtggaaaccttgatcaaaga

SEQ ID NO: 4399101 - DNA, 25 bp, Homo sapien
ggacagagtatgggctgagccggca

SEQ ID NO: 4399102 - DNA, 25 bp, Homo sapien
caggacagagtatgggctgagccgg

SEQ ID NO: 4399103 - DNA, 25 bp, Homo sapien
acaggacagagtatgggctgagccg

SEQ ID NO: 4399104 - DNA, 25 bp, Homo sapien
cacaggacagagtatgggctgagcc

SEQ ID NO: 4399105 - DNA, 25 bp, Homo sapien
caggagagcagtttccaagtggagc

SEQ ID NO: 4399106 - DNA, 25 bp, Homo sapien
gcaggaaattcagagagcccacggt

SEQ ID NO: 4399107 - DNA, 25 bp, Homo sapien
gactgaccacggtggagccatgaaa

SEQ ID NO: 4399108 - DNA, 25 bp, Homo sapien
tcaacctcgagagggcacgtaagcc

SEQ ID NO: 4399109 - DNA, 25 bp, Homo sapien
agccctcgttaagcccattgccaag

SEQ ID NO: 4399110 - DNA, 25 bp, Homo sapien
gctgccgttgcaaaacagatgagta

SEQ ID NO: 4399111 - DNA, 25 bp, Homo sapien
cagatgagtaatcagacattccggg

SEQ ID NO: 4399112 - DNA, 25 bp, Homo sapien
ccattgccaagaaaggtgtcttgca

SEQ ID NO: 4399113 - DNA, 25 bp, Homo sapien
ctacaggccctgagtcacgctggat

SEQ ID NO: 4399114 - DNA, 25 bp, Homo sapien
aaggccaaacttgctggagtgcaac

SEQ ID NO: 4399115 - DNA, 25 bp, Homo sapien
cgagatctgcgacggagaggcttac

SEQ ID NO: 4399116 - DNA, 25 bp, Homo sapien
caacattgcatcaccgagatctgcg

SEQ ID NO: 4399117 - DNA, 25 bp, Homo sapien
ccgagctccactgacctcacccaca

SEQ ID NO: 4399118 - DNA, 25 bp, Homo sapien
cagccaccgagctccactgacctca

SEQ ID NO: 4399119 - DNA, 25 bp, Homo sapien
ctctgtgggctgctccgctgcttct

SEQ ID NO: 4399120 - DNA, 25 bp, Homo sapien
ctgtgggctgctccgctgcttctgg

SEQ ID NO: 4399121 - DNA, 25 bp, Homo sapien
tcagagtgcattttccaacccgtgc

SEQ ID NO: 4399122 - DNA, 25 bp, Homo sapien
cctgagtcgagcttccatgagtgcc

SEQ ID NO: 4399123 - DNA, 25 bp, Homo sapien
gcaagggctggcactagccatgcga

SEQ ID NO: 4399124 - DNA, 25 bp, Homo sapien
tagtgttccaaaggagtgcaagggc

SEQ ID NO: 4399125 - DNA, 25 bp, Homo sapien
gcaggcaaagctctgggagaggccc

SEQ ID NO: 4399126 - DNA, 25 bp, Homo sapien
ctgcgcaggcaaagctctgggagag

SEQ ID NO: 4399127 - DNA, 25 bp, Homo sapien
agctctgggagaggccccttggtac

SEQ ID NO: 4399128 - DNA, 25 bp, Homo sapien
aaagctctgggagaggccccttggt

SEQ ID NO: 4399129 - DNA, 25 bp, Homo sapien
gcctgaggtcacaaacggacagccc

SEQ ID NO: 4399130 - DNA, 25 bp, Homo sapien
cccagcttcgaagcttgcctgaggt

SEQ ID NO: 4399131 - DNA, 25 bp, Homo sapien
tggaggcccagcttcgaagcttgcc

SEQ ID NO: 4399132 - DNA, 25 bp, Homo sapien
ggcccagcttcgaagcttgcctgag

SEQ ID NO: 4399133 - DNA, 25 bp, Homo sapien
gccatctgagctgtatctggtcgac

SEQ ID NO: 4399134 - DNA, 25 bp, Homo sapien
gggccatctgagctgtatctggtcg

SEQ ID NO: 4399135 - DNA, 25 bp, Homo sapien
ggccatctgagctgtatctggtcga

SEQ ID NO: 4399136 - DNA, 25 bp, Homo sapien
cttggcatgtgtagcctgcccaggc

SEQ ID NO: 4399137 - DNA, 25 bp, Homo sapien
ttggcatgtgtagcctgcccaggca

SEQ ID NO: 4399138 - DNA, 25 bp, Homo sapien
tggcatgtgtagcctgcccaggcac

SEQ ID NO: 4399139 - DNA, 25 bp, Homo sapien
tgatatcaagtgactctaaagggcc

SEQ ID NO: 4399140 - DNA, 25 bp, Homo sapien
cttttgtttccggaaaggcagcagt

SEQ ID NO: 4399141 - DNA, 25 bp, Homo sapien
ggtcgctgttgtgcctgctgttcca

SEQ ID NO: 4399142 - DNA, 25 bp, Homo sapien
ccagacaggaagacatgatatcaag

SEQ ID NO: 4399143 - DNA, 25 bp, Homo sapien
cccatccagttgaaaatagacaggc

SEQ ID NO: 4399144 - DNA, 25 bp, Homo sapien
gagcgggaatcagaggcaactagtt

SEQ ID NO: 4399145 - DNA, 25 bp, Homo sapien
ccagaagggagctgaaaacggccat

SEQ ID NO: 4399146 - DNA, 25 bp, Homo sapien
tcctggaaactgaggggccttcaca

SEQ ID NO: 4399147 - DNA, 25 bp, Homo sapien
ggtgtgttcaccaacaatctttaaa

SEQ ID NO: 4399148 - DNA, 25 bp, Homo sapien
atgaagcaggcgtatggtgtgttca

SEQ ID NO: 4399149 - DNA, 25 bp, Homo sapien
gtatggtgtgttcaccaacaatctt

SEQ ID NO: 4399150 - DNA, 25 bp, Homo sapien
ctactgcttgatgaagcaggcgtat

SEQ ID NO: 4399151 - DNA, 25 bp, Homo sapien
gagcaggcagtgacagatctcagat

SEQ ID NO: 4399152 - DNA, 25 bp, Homo sapien
tctgcccattggctgagcaccacat

SEQ ID NO: 4399153 - DNA, 25 bp, Homo sapien
ggcagagactccacatcatgatggc

SEQ ID NO: 4399154 - DNA, 25 bp, Homo sapien
tctcccagatgtaccaaagtgcctt

SEQ ID NO: 4399155 - DNA, 25 bp, Homo sapien
aatccgtgccacatcttttgttccc

SEQ ID NO: 4399156 - DNA, 25 bp, Homo sapien
gtgagcacgtgccagccagatctta

SEQ ID NO: 4399157 - DNA, 25 bp, Homo sapien
tgttccctacccatggctcaattag

SEQ ID NO: 4399158 - DNA, 25 bp, Homo sapien
caaaagtccagaagcgggtgagcac

SEQ ID NO: 4399159 - DNA, 25 bp, Homo sapien
ccaggtgtcctgttgcacctcacag

SEQ ID NO: 4399160 - DNA, 25 bp, Homo sapien
tggagggtgggaccctccactgcag

SEQ ID NO: 4399161 - DNA, 25 bp, Homo sapien
cacatatgagtgttggggctgagga

SEQ ID NO: 4399162 - DNA, 25 bp, Homo sapien
gtgtcctgttgcacctcacagcaca

SEQ ID NO: 4399163 - DNA, 25 bp, Homo sapien
catctaatccttctgacatccaaaa

SEQ ID NO: 4399164 - DNA, 25 bp, Homo sapien
aactgctgctggtggatccacatct

SEQ ID NO: 4399165 - DNA, 25 bp, Homo sapien
gacatccaaaaggagctagtcttgg

SEQ ID NO: 4399166 - DNA, 25 bp, Homo sapien
tgctggtggatccacatctaatcct

SEQ ID NO: 4399167 - DNA, 25 bp, Homo sapien
catccacaagtggaatggtgctaga

SEQ ID NO: 4399168 - DNA, 25 bp, Homo sapien
caggttattcactaaagctcagaga

SEQ ID NO: 4399169 - DNA, 25 bp, Homo sapien
caatctaatggaggccctcaggtta

SEQ ID NO: 4399170 - DNA, 25 bp, Homo sapien
aagccttgggctggaaatccaggta

SEQ ID NO: 4399171 - DNA, 25 bp, Homo sapien
gagcctagttgctgtccatgaccta

SEQ ID NO: 4399172 - DNA, 25 bp, Homo sapien
gtgctggttcttgtgtttaagggcc

SEQ ID NO: 4399173 - DNA, 25 bp, Homo sapien
ccatgacctagacagcaggtgttca

SEQ ID NO: 4399174 - DNA, 25 bp, Homo sapien
gctgcagcggcatttgaggttgtac

SEQ ID NO: 4399175 - DNA, 25 bp, Homo sapien
ggttcttccttgcaaatgaacggca

SEQ ID NO: 4399176 - DNA, 25 bp, Homo sapien
agggcgctctttgcagacctggaaa

SEQ ID NO: 4399177 - DNA, 25 bp, Homo sapien
aaatagtgaaactctagagaagggc

SEQ ID NO: 4399178 - DNA, 25 bp, Homo sapien
ttctcatctgggttacttctggagc

SEQ ID NO: 4399179 - DNA, 25 bp, Homo sapien
attgctttgtacttgcatattgcca

SEQ ID NO: 4399180 - DNA, 25 bp, Homo sapien
catgtggtggtgtgtctttaataac

SEQ ID NO: 4399181 - DNA, 25 bp, Homo sapien
cttgcatattgccatgtggtggtgt

SEQ ID NO: 4399182 - DNA, 25 bp, Homo sapien
ggtggtgtgtctttaataaccatca

SEQ ID NO: 4399183 - DNA, 25 bp, Homo sapien
ggaccatcacccctagactgagtag

SEQ ID NO: 4399184 - DNA, 25 bp, Homo sapien
tagcagggtatggtccccctaagtc

SEQ ID NO: 4399185 - DNA, 25 bp, Homo sapien
catcacccctagactgagtagcagg

SEQ ID NO: 4399186 - DNA, 25 bp, Homo sapien
gactgagtagcagggtatggtcccc

SEQ ID NO: 4399187 - DNA, 25 bp, Homo sapien
catctccaaacaacccacaactttt

SEQ ID NO: 4399188 - DNA, 25 bp, Homo sapien
cagcagatggctcagtgtcttagct

SEQ ID NO: 4399189 - DNA, 25 bp, Homo sapien
cagatggctcagtgtcttagctata

SEQ ID NO: 4399190 - DNA, 25 bp, Homo sapien
agatggctcagtgtcttagctataa

SEQ ID NO: 4399191 - DNA, 25 bp, Homo sapien
gcagatggctcagtgtcttagctat

SEQ ID NO: 4399192 - DNA, 25 bp, Homo sapien
ggttctcaagctaccagtcagcaca

SEQ ID NO: 4399193 - DNA, 25 bp, Homo sapien
gaattctgcgatcagcacatacaga

SEQ ID NO: 4399194 - DNA, 25 bp, Homo sapien
catacagacacacgttgaaattcca

SEQ ID NO: 4399195 - DNA, 25 bp, Homo sapien
gcagcaaggtggtcattacaaaggt

SEQ ID NO: 4399196 - DNA, 25 bp, Homo sapien
ctggagagatgacaaacatgtcttt

SEQ ID NO: 4399197 - DNA, 25 bp, Homo sapien
gagcaggtaccgaggggaggagaaa

SEQ ID NO: 4399198 - DNA, 25 bp, Homo sapien
tgatatgtgtgggactgctccctgt

SEQ ID NO: 4399199 - DNA, 25 bp, Homo sapien
caggtgatatgtgtgggactgctcc

SEQ ID NO: 4399200 - DNA, 25 bp, Homo sapien
aagctcgttcaatagccctcccagg

SEQ ID NO: 4399201 - DNA, 25 bp, Homo sapien
ctcccaggatagctcttggcagggc

SEQ ID NO: 4399202 - DNA, 25 bp, Homo sapien
ttggcagggcagctaccacgtctct

SEQ ID NO: 4399203 - DNA, 25 bp, Homo sapien
tcagtcatgcggaggaaaagggaaa

SEQ ID NO: 4399204 - DNA, 25 bp, Homo sapien
gcgttaataccgaggtgcgcactcg

SEQ ID NO: 4399205 - DNA, 25 bp, Homo sapien
tccggactctaaacaggaacttgaa

SEQ ID NO: 4399206 - DNA, 25 bp, Homo sapien
tgtccacgtgcgagggcgttaatac

SEQ ID NO: 4399207 - DNA, 25 bp, Homo sapien
cgcttacggcggactccatgtggag

SEQ ID NO: 4399208 - DNA, 25 bp, Homo sapien
tccttgttttgcagccggggaggcc

SEQ ID NO: 4399209 - DNA, 25 bp, Homo sapien
agtgtgtttcgtagtctctttcagg

SEQ ID NO: 4399210 - DNA, 25 bp, Homo sapien
ggccaggagcagttcaaaaaggata

SEQ ID NO: 4399211 - DNA, 25 bp, Homo sapien
gaacaaggagattccatccaaagaa

SEQ ID NO: 4399212 - DNA, 25 bp, Homo sapien
cattttgggacagtttaaggccagg

SEQ ID NO: 4399213 - DNA, 25 bp, Homo sapien
ttacacatctgtactggtttagaag

SEQ ID NO: 4399214 - DNA, 25 bp, Homo sapien
tcaaagaccgaagctgtcatcacat

SEQ ID NO: 4399215 - DNA, 25 bp, Homo sapien
catttacacatctgtactggtttag

SEQ ID NO: 4399216 - DNA, 25 bp, Homo sapien
ctgtatcaaagaccgaagctgtcat

SEQ ID NO: 4399217 - DNA, 25 bp, Homo sapien
ggtagcgagtgtgcttctgctgggc

SEQ ID NO: 4399218 - DNA, 25 bp, Homo sapien
gggtagcgagtgtgcttctgctggg

SEQ ID NO: 4399219 - DNA, 25 bp, Homo sapien
tctccaccaggttactggtgtgttc

SEQ ID NO: 4399220 - DNA, 25 bp, Homo sapien
gtctctctccaccaggttactggtg

SEQ ID NO: 4399221 - DNA, 25 bp, Homo sapien
gtgttctgccaaagcggagacccca

SEQ ID NO: 4399222 - DNA, 25 bp, Homo sapien
caccaggttactggtgtgttctgcc

SEQ ID NO: 4399223 - DNA, 25 bp, Homo sapien
gaccccatcaaacagttccaccctg

SEQ ID NO: 4399224 - DNA, 25 bp, Homo sapien
tctcagcttggtccacttcatcaca

SEQ ID NO: 4399225 - DNA, 25 bp, Homo sapien
ccatcaaacagttccaccctgcttt

SEQ ID NO: 4399226 - DNA, 25 bp, Homo sapien
tgtgacacagttaaaacccaggtct

SEQ ID NO: 4399227 - DNA, 25 bp, Homo sapien
gtaactgaagacgtaattttgtaga

SEQ ID NO: 4399228 - DNA, 25 bp, Homo sapien
aactgaagacgtaattttgtagact

SEQ ID NO: 4399229 - DNA, 25 bp, Homo sapien
agtaactgaagacgtaattttgtag

SEQ ID NO: 4399230 - DNA, 25 bp, Homo sapien
taactgaagacgtaattttgtagac

SEQ ID NO: 4399231 - DNA, 25 bp, Homo sapien
caagctgctcttgactgtttatgga

SEQ ID NO: 4399232 - DNA, 25 bp, Homo sapien
cacatgccagtgatgttacaagctg

SEQ ID NO: 4399233 - DNA, 25 bp, Homo sapien
aattcacgggatgtccacatgccag

SEQ ID NO: 4399234 - DNA, 25 bp, Homo sapien
gagccatcaataaacaattcacggg

SEQ ID NO: 4399235 - DNA, 25 bp, Homo sapien
ttccactatgtgtggatccctctgc

SEQ ID NO: 4399236 - DNA, 25 bp, Homo sapien
ctattccactatgtgtggatccctc

SEQ ID NO: 4399237 - DNA, 25 bp, Homo sapien
tattccactatgtgtggatccctct

SEQ ID NO: 4399238 - DNA, 25 bp, Homo sapien
attccactatgtgtggatccctctg

SEQ ID NO: 4399239 - DNA, 25 bp, Homo sapien
ggtaaaacatcttcagccactctgg

SEQ ID NO: 4399240 - DNA, 25 bp, Homo sapien
tactcaagtacatttgggtgcatgg

SEQ ID NO: 4399241 - DNA, 25 bp, Homo sapien
ctggctgacccgctgaggactgaaa

SEQ ID NO: 4399242 - DNA, 25 bp, Homo sapien
tctgaggaggcaaatgacctctgga

SEQ ID NO: 4399243 - DNA, 25 bp, Homo sapien
agagcaagccaggccctcacttctg

SEQ ID NO: 4399244 - DNA, 25 bp, Homo sapien
ccagggaggtaaggcgagctctccg

SEQ ID NO: 4399245 - DNA, 25 bp, Homo sapien
gagaggcagttctggaatctaaccc

SEQ ID NO: 4399246 - DNA, 25 bp, Homo sapien
ctctctgtacttgctatgaactggg

SEQ ID NO: 4399247 - DNA, 25 bp, Homo sapien
gttcatgtccataattaagggggtg

SEQ ID NO: 4399248 - DNA, 25 bp, Homo sapien
gatcccagagcgtcccaaagctgtt

SEQ ID NO: 4399249 - DNA, 25 bp, Homo sapien
gagcgtcccaaagctgttacaacct

SEQ ID NO: 4399250 - DNA, 25 bp, Homo sapien
cagggatcccagagcgtcccaaagc

SEQ ID NO: 4399251 - DNA, 25 bp, Homo sapien
gtgtccacacctgccatttgatcat

SEQ ID NO: 4399252 - DNA, 25 bp, Homo sapien
ctctccatatacttgagaagcgccc

SEQ ID NO: 4399253 - DNA, 25 bp, Homo sapien
tatacttgagaagcgccctggactg

SEQ ID NO: 4399254 - DNA, 25 bp, Homo sapien
cctggactgcaatgctaccctcaga

SEQ ID NO: 4399255 - DNA, 25 bp, Homo sapien
gcaatgctaccctcagataactttc

SEQ ID NO: 4399256 - DNA, 25 bp, Homo sapien
tcctagttactcaggcagccaacac

SEQ ID NO: 4399257 - DNA, 25 bp, Homo sapien
tactcaggcagccaacacgagagga

SEQ ID NO: 4399258 - DNA, 25 bp, Homo sapien
ggcagccaacacgagaggatcgctt

SEQ ID NO: 4399259 - DNA, 25 bp, Homo sapien
tagttactcaggcagccaacacgag

SEQ ID NO: 4399260 - DNA, 25 bp, Homo sapien
gagaggctctggttttcagtcccca

SEQ ID NO: 4399261 - DNA, 25 bp, Homo sapien
ttaagagaggctctggttttcagtc

SEQ ID NO: 4399262 - DNA, 25 bp, Homo sapien
agaggctctggttttcagtccccac

SEQ ID NO: 4399263 - DNA, 25 bp, Homo sapien
aagagaggctctggttttcagtccc

SEQ ID NO: 4399264 - DNA, 25 bp, Homo sapien
agattctgcgtccacccctgcaacc

SEQ ID NO: 4399265 - DNA, 25 bp, Homo sapien
ggcctctgcaaggatagggtcagca

SEQ ID NO: 4399266 - DNA, 25 bp, Homo sapien
cctctgcaaggatagggtcagcagc

SEQ ID NO: 4399267 - DNA, 25 bp, Homo sapien
tccccagattctgcgtccacccctg

SEQ ID NO: 4399268 - DNA, 25 bp, Homo sapien
acatcgctggatcctctgtaaaatg

SEQ ID NO: 4399269 - DNA, 25 bp, Homo sapien
tgtaaaatggaatatacagcaggtt

SEQ ID NO: 4399270 - DNA, 25 bp, Homo sapien
tgccacccaggctcagtatgccctt

SEQ ID NO: 4399271 - DNA, 25 bp, Homo sapien
ccacatcccttcacatcgctggatc

SEQ ID NO: 4399272 - DNA, 25 bp, Homo sapien
gagctctaatggtctgaagtcaggc

SEQ ID NO: 4399273 - DNA, 25 bp, Homo sapien
ctggctctctacgtgtttgaacaaa

SEQ ID NO: 4399274 - DNA, 25 bp, Homo sapien
caaactggcattatccaagagctct

SEQ ID NO: 4399275 - DNA, 25 bp, Homo sapien
tcaggaatgttatccaagcagtggc

SEQ ID NO: 4399276 - DNA, 25 bp, Homo sapien
cagtagagtccttggctgttggaaa

SEQ ID NO: 4399277 - DNA, 25 bp, Homo sapien
tttatcttgaggcttaagagtagac

SEQ ID NO: 4399278 - DNA, 25 bp, Homo sapien
gagaagttcacatcaccagtagtct

SEQ ID NO: 4399279 - DNA, 25 bp, Homo sapien
ggaaaggaagttgtccacatgagca

SEQ ID NO: 4399280 - DNA, 25 bp, Homo sapien
gatggtgatggtccaacaggaagcg

SEQ ID NO: 4399281 - DNA, 25 bp, Homo sapien
gacaccagtgatggggtagtgggat

SEQ ID NO: 4399282 - DNA, 25 bp, Homo sapien
ggaagcgtggttgctgtggctcctg

SEQ ID NO: 4399283 - DNA, 25 bp, Homo sapien
acaggaagcgtggttgctgtggctc

SEQ ID NO: 4399284 - DNA, 25 bp, Homo sapien
caaagcctgcatgatccctggaggc

SEQ ID NO: 4399285 - DNA, 25 bp, Homo sapien
aagcctgcatgatccctggaggctg

SEQ ID NO: 4399286 - DNA, 25 bp, Homo sapien
aaagcctgcatgatccctggaggct

SEQ ID NO: 4399287 - DNA, 25 bp, Homo sapien
ctgagtggtccctccaggcctggtt

SEQ ID NO: 4399288 - DNA, 25 bp, Homo sapien
actgtctgagtggtccctccaggcc

SEQ ID NO: 4399289 - DNA, 25 bp, Homo sapien
gagtggtccctccaggcctggttct

SEQ ID NO: 4399290 - DNA, 25 bp, Homo sapien
gtggtccctccaggcctggttctct

SEQ ID NO: 4399291 - DNA, 25 bp, Homo sapien
cccagtctggttaatccttatctca

SEQ ID NO: 4399292 - DNA, 25 bp, Homo sapien
tcatattccctccaactctcctttc

SEQ ID NO: 4399293 - DNA, 25 bp, Homo sapien
tcccccagtctggttaatccttatc

SEQ ID NO: 4399294 - DNA, 25 bp, Homo sapien
acaagcttctctccctcatcatatt

SEQ ID NO: 4399295 - DNA, 25 bp, Homo sapien
tccccctgacattgcagcagaaact

SEQ ID NO: 4399296 - DNA, 25 bp, Homo sapien
tgcagcagaaactgaggggatcttg

SEQ ID NO: 4399297 - DNA, 25 bp, Homo sapien
gggatcttggctctcagcatccagc

SEQ ID NO: 4399298 - DNA, 25 bp, Homo sapien
ccagctttgtccattgctgctcccc

SEQ ID NO: 4399299 - DNA, 25 bp, Homo sapien
tgggattaggccccagatgtttaca

SEQ ID NO: 4399300 - DNA, 25 bp, Homo sapien
gtgatgggattaggccccagatgtt

SEQ ID NO: 4399301 - DNA, 25 bp, Homo sapien
ctgtgatgggattaggccccagatg

SEQ ID NO: 4399302 - DNA, 25 bp, Homo sapien
gatgggattaggccccagatgttta

SEQ ID NO: 4399303 - DNA, 25 bp, Homo sapien
tgttttccttttggtctcagacgct

SEQ ID NO: 4399304 - DNA, 25 bp, Homo sapien
cagacgctggggtctcagtgtcagc

SEQ ID NO: 4399305 - DNA, 25 bp, Homo sapien
gtctcagacgctggggtctcagtgt

SEQ ID NO: 4399306 - DNA, 25 bp, Homo sapien
gtcagctggagactgaaaacttcag

SEQ ID NO: 4399307 - DNA, 25 bp, Homo sapien
gaaataaaatggctccaacagggca

SEQ ID NO: 4399308 - DNA, 25 bp, Homo sapien
ccagaacaagtgtaagggcctcagt

SEQ ID NO: 4399309 - DNA, 25 bp, Homo sapien
tctaggctaccggtgagctgtcact

SEQ ID NO: 4399310 - DNA, 25 bp, Homo sapien
tgcagcagccgacttaggaaccaga

SEQ ID NO: 4399311 - DNA, 25 bp, Homo sapien
tatttcccgattacggccggagcgc

SEQ ID NO: 4399312 - DNA, 25 bp, Homo sapien
ggtctctttaactgctgagattcca

SEQ ID NO: 4399313 - DNA, 25 bp, Homo sapien
actgtgcagccctttatggcgcaaa

SEQ ID NO: 4399314 - DNA, 25 bp, Homo sapien
tggcgcaaaataaaagccgtcccgc

SEQ ID NO: 4399315 - DNA, 25 bp, Homo sapien
tgtccgaaactcgcctggacaagtc

SEQ ID NO: 4399316 - DNA, 25 bp, Homo sapien
ctgtccgaaactcgcctggacaagt

SEQ ID NO: 4399317 - DNA, 25 bp, Homo sapien
actgtccgaaactcgcctggacaag

SEQ ID NO: 4399318 - DNA, 25 bp, Homo sapien
tccgaaactcgcctggacaagtcca

SEQ ID NO: 4399319 - DNA, 25 bp, Homo sapien
tgcgctgcagaagactcgggctgat

SEQ ID NO: 4399320 - DNA, 25 bp, Homo sapien
tacgactagctcctgtgcgctgcag

SEQ ID NO: 4399321 - DNA, 25 bp, Homo sapien
agtacgactagctcctgtgcgctgc

SEQ ID NO: 4399322 - DNA, 25 bp, Homo sapien
actcgggctgatctgaaagcgcctc

SEQ ID NO: 4399323 - DNA, 25 bp, Homo sapien
tcaggttttaagtaggtcttccgca

SEQ ID NO: 4399324 - DNA, 25 bp, Homo sapien
aggaaacactgggttgatatgataa

SEQ ID NO: 4399325 - DNA, 25 bp, Homo sapien
ggaaacactgggttgatatgataac

SEQ ID NO: 4399326 - DNA, 25 bp, Homo sapien
tcattcagacagagagctggggtcc

SEQ ID NO: 4399327 - DNA, 25 bp, Homo sapien
ctcattcagacagagagctggggtc

SEQ ID NO: 4399328 - DNA, 25 bp, Homo sapien
ctcctctcgttaaaatcgctttgaa

SEQ ID NO: 4399329 - DNA, 25 bp, Homo sapien
ctctcgttaaaatcgctttgaaggc

SEQ ID NO: 4399330 - DNA, 25 bp, Homo sapien
cgttaaaatcgctttgaaggcagaa

SEQ ID NO: 4399331 - DNA, 25 bp, Homo sapien
tctcgttaaaatcgctttgaaggca

SEQ ID NO: 4399332 - DNA, 25 bp, Homo sapien
tatcaacacggtaacctgcatgttt

SEQ ID NO: 4399333 - DNA, 25 bp, Homo sapien
tccccattgtgaccacttgattctt

SEQ ID NO: 4399334 - DNA, 25 bp, Homo sapien
cagaacagcattcagcgaaatatca

SEQ ID NO: 4399335 - DNA, 25 bp, Homo sapien
cccattgtgaccacttgattctttc

SEQ ID NO: 4399336 - DNA, 25 bp, Homo sapien
accacatctgaatcccaaactaagc

SEQ ID NO: 4399337 - DNA, 25 bp, Homo sapien
tgaataaaaccagccctcaaacaca

SEQ ID NO: 4399338 - DNA, 25 bp, Homo sapien
catctcaggccctgaataaaaccag

SEQ ID NO: 4399339 - DNA, 25 bp, Homo sapien
taaaaccagccctcaaacacaccat

SEQ ID NO: 4399340 - DNA, 25 bp, Homo sapien
caacaaggtcggtagtatttcttgt

SEQ ID NO: 4399341 - DNA, 25 bp, Homo sapien
cactcaggacactggggagccccat

SEQ ID NO: 4399342 - DNA, 25 bp, Homo sapien
agaccactcaggacactggggagcc

SEQ ID NO: 4399343 - DNA, 25 bp, Homo sapien
ctagaccactcaggacactggggag

SEQ ID NO: 4399344 - DNA, 25 bp, Homo sapien
accactcaggacactggggagcccc

SEQ ID NO: 4399345 - DNA, 25 bp, Homo sapien
tttctgatctcagaggcgatgagct

SEQ ID NO: 4399346 - DNA, 25 bp, Homo sapien
atctcagaggcgatgagcttgacgg

SEQ ID NO: 4399347 - DNA, 25 bp, Homo sapien
gatgagcttgacggctgccaggccc

SEQ ID NO: 4399348 - DNA, 25 bp, Homo sapien
tctgatctcagaggcgatgagcttg

SEQ ID NO: 4399349 - DNA, 25 bp, Homo sapien
agtgtcagattttcagcgtctggtg

SEQ ID NO: 4399350 - DNA, 25 bp, Homo sapien
cggataaagtgtcagattttcagcg

SEQ ID NO: 4399351 - DNA, 25 bp, Homo sapien
taaagtgtcagattttcagcgtctg

SEQ ID NO: 4399352 - DNA, 25 bp, Homo sapien
ctacggataaagtgtcagattttca

SEQ ID NO: 4399353 - DNA, 25 bp, Homo sapien
gaagatgagtccacctccctcagtg

SEQ ID NO: 4399354 - DNA, 25 bp, Homo sapien
atgaagatgagtccacctccctcag

SEQ ID NO: 4399355 - DNA, 25 bp, Homo sapien
ttatgaagatgagtccacctccctc

SEQ ID NO: 4399356 - DNA, 25 bp, Homo sapien
gatgagtccacctccctcagtgtgg

SEQ ID NO: 4399357 - DNA, 25 bp, Homo sapien
agggcagggtcccgagagaactcag

SEQ ID NO: 4399358 - DNA, 25 bp, Homo sapien
ggcagggtcccgagagaactcaggc

SEQ ID NO: 4399359 - DNA, 25 bp, Homo sapien
cagggtcccgagagaactcaggccc

SEQ ID NO: 4399360 - DNA, 25 bp, Homo sapien
gggcagggtcccgagagaactcagg

SEQ ID NO: 4399361 - DNA, 25 bp, Homo sapien
acagatagggagagtcttcttttcc

SEQ ID NO: 4399362 - DNA, 25 bp, Homo sapien
ccacggactgtttatttcccttctg

SEQ ID NO: 4399363 - DNA, 25 bp, Homo sapien
caggcctgtgtctttcctttgtctg

SEQ ID NO: 4399364 - DNA, 25 bp, Homo sapien
tttgtctgccccacggactgtttat

SEQ ID NO: 4399365 - DNA, 25 bp, Homo sapien
gagagtaccccactaaggtccagtg

SEQ ID NO: 4399366 - DNA, 25 bp, Homo sapien
cactaaggtccagtggaggtgccag

SEQ ID NO: 4399367 - DNA, 25 bp, Homo sapien
tacccagccatagcaggaagatgag

SEQ ID NO: 4399368 - DNA, 25 bp, Homo sapien
gaagatgagacaatagagcagagag

SEQ ID NO: 4399369 - DNA, 25 bp, Homo sapien
tgcatccgaatgtcaagaagacttt

SEQ ID NO: 4399370 - DNA, 25 bp, Homo sapien
gcatccgaatgtcaagaagactttt

SEQ ID NO: 4399371 - DNA, 25 bp, Homo sapien
tctgcatccgaatgtcaagaagact

SEQ ID NO: 4399372 - DNA, 25 bp, Homo sapien
tttctgcatccgaatgtcaagaaga

SEQ ID NO: 4399373 - DNA, 25 bp, Homo sapien
tccttgggctgcaatagcattgttc

SEQ ID NO: 4399374 - DNA, 25 bp, Homo sapien
tacacactgcgtgaagcacaaagga

SEQ ID NO: 4399375 - DNA, 25 bp, Homo sapien
tgtagctcaggatagaggtctcctc

SEQ ID NO: 4399376 - DNA, 25 bp, Homo sapien
gccaaggagtttgtcgcagctaaac

SEQ ID NO: 4399377 - DNA, 25 bp, Homo sapien
atgaacaagctccagcagacttctc

SEQ ID NO: 4399378 - DNA, 25 bp, Homo sapien
catgaacaagctccagcagacttct

SEQ ID NO: 4399379 - DNA, 25 bp, Homo sapien
cacaaatgagcccttgttctgggtg

SEQ ID NO: 4399380 - DNA, 25 bp, Homo sapien
cgtgcacaaatgagcccttgttctg

SEQ ID NO: 4399381 - DNA, 25 bp, Homo sapien
tgcacaaatgagcccttgttctggg

SEQ ID NO: 4399382 - DNA, 25 bp, Homo sapien
gtgcacaaatgagcccttgttctgg

SEQ ID NO: 4399383 - DNA, 25 bp, Homo sapien
ttattcatccggtttcctagagccc

SEQ ID NO: 4399384 - DNA, 25 bp, Homo sapien
ccaatttgccaagaaaggggacact

SEQ ID NO: 4399385 - DNA, 25 bp, Homo sapien
gaagaaagggtgttgttattcatcc

SEQ ID NO: 4399386 - DNA, 25 bp, Homo sapien
gtttcctagagccccaccatatgga

SEQ ID NO: 4399387 - DNA, 25 bp, Homo sapien
agagcaccatgtccgcatctcctat

SEQ ID NO: 4399388 - DNA, 25 bp, Homo sapien
ggtaaaagttcagtcaacactgtgc

SEQ ID NO: 4399389 - DNA, 25 bp, Homo sapien
acactgtgcagagcaccatgtccgc

SEQ ID NO: 4399390 - DNA, 25 bp, Homo sapien
gagccggcaggatttcagtgaacct

SEQ ID NO: 4399391 - DNA, 25 bp, Homo sapien
agcagctactgcaagggcacagatg

SEQ ID NO: 4399392 - DNA, 25 bp, Homo sapien
taaatggatggcgtagagagctacg

SEQ ID NO: 4399393 - DNA, 25 bp, Homo sapien
gctgctcggaaatggtggctacttt

SEQ ID NO: 4399394 - DNA, 25 bp, Homo sapien
ggcacagatgcaaaactcggagcag

SEQ ID NO: 4399395 - DNA, 25 bp, Homo sapien
tctttgcgcattctcagccagctgg

SEQ ID NO: 4399396 - DNA, 25 bp, Homo sapien
tggactcgcgctggtaaacgctgtg

SEQ ID NO: 4399397 - DNA, 25 bp, Homo sapien
tccgtcgacattcacagggatgctg

SEQ ID NO: 4399398 - DNA, 25 bp, Homo sapien
ggccaaaccctcagacgcaagagaa

SEQ ID NO: 4399399 - DNA, 25 bp, Homo sapien
tctgcgcgggccaagcttccaggtc

SEQ ID NO: 4399400 - DNA, 25 bp, Homo sapien
ctctcagggctctgcgcgggccaag

SEQ ID NO: 4399401 - DNA, 25 bp, Homo sapien
gtccatgggccagaccgtgtgactc

SEQ ID NO: 4399402 - DNA, 25 bp, Homo sapien
ccgtgtgactcagcctctcagggct

SEQ ID NO: 4399403 - DNA, 25 bp, Homo sapien
gcgtcacctccatcaaggcaggaga

SEQ ID NO: 4399404 - DNA, 25 bp, Homo sapien
agaggagggccaggtccgcatcacc

SEQ ID NO: 4399405 - DNA, 25 bp, Homo sapien
cacctccatcaaggcaggagaggag

SEQ ID NO: 4399406 - DNA, 25 bp, Homo sapien
ggccaggtccgcgtcacctccatca

SEQ ID NO: 4399407 - DNA, 25 bp, Homo sapien
ccggatgtgcggctgaggtccaagg

SEQ ID NO: 4399408 - DNA, 25 bp, Homo sapien
gttgccggatgtgcggctgaggtcc

SEQ ID NO: 4399409 - DNA, 25 bp, Homo sapien
cggatgtgcggctgaggtccaaggt

SEQ ID NO: 4399410 - DNA, 25 bp, Homo sapien
tcagcgttgccggatgtgcggctga

SEQ ID NO: 4399411 - DNA, 25 bp, Homo sapien
gcggctcggccgtgtctggcagccc

SEQ ID NO: 4399412 - DNA, 25 bp, Homo sapien
tgcggctcggccgtgtctggcagcc

SEQ ID NO: 4399413 - DNA, 25 bp, Homo sapien
ctgcggctcggccgtgtctggcagc

SEQ ID NO: 4399414 - DNA, 25 bp, Homo sapien
cctgcggctcggccgtgtctggcag

SEQ ID NO: 4399415 - DNA, 25 bp, Homo sapien
gccctctgaaattccgccagcaccg

SEQ ID NO: 4399416 - DNA, 25 bp, Homo sapien
tgaaattccgccagcaccgggggac

SEQ ID NO: 4399417 - DNA, 25 bp, Homo sapien
tctgaaattccgccagcaccggggg

SEQ ID NO: 4399418 - DNA, 25 bp, Homo sapien
cagcaccgggggacgaagaaggtct

SEQ ID NO: 4399419 - DNA, 25 bp, Homo sapien
cccatccagccacgcggagaatcca

SEQ ID NO: 4399420 - DNA, 25 bp, Homo sapien
agggcgggaagacggggagcacgag

SEQ ID NO: 4399421 - DNA, 25 bp, Homo sapien
tcccatccagccacgcggagaatcc

SEQ ID NO: 4399422 - DNA, 25 bp, Homo sapien
gcacgagccggctttgccctcccat

SEQ ID NO: 4399423 - DNA, 25 bp, Homo sapien
ccacagccgaaaaagccctcccaca

SEQ ID NO: 4399424 - DNA, 25 bp, Homo sapien
atagagccccccacagccgaaaaag

SEQ ID NO: 4399425 - DNA, 25 bp, Homo sapien
caggagacacggttctaacacccat

SEQ ID NO: 4399426 - DNA, 25 bp, Homo sapien
ttggtggcttttcaggagacacggt

SEQ ID NO: 4399427 - DNA, 25 bp, Homo sapien
cgtctctggccgtgaggctatggca

SEQ ID NO: 4399428 - DNA, 25 bp, Homo sapien
tccgtctctggccgtgaggctatgg

SEQ ID NO: 4399429 - DNA, 25 bp, Homo sapien
gaagagcactgagtccgtctctggc

SEQ ID NO: 4399430 - DNA, 25 bp, Homo sapien
gagaagagcactgagtccgtctctg

SEQ ID NO: 4399431 - DNA, 25 bp, Homo sapien
agtttgatgcgtggcgttcaccggc

SEQ ID NO: 4399432 - DNA, 25 bp, Homo sapien
gccaggaaaaacaagtccgagcaag

SEQ ID NO: 4399433 - DNA, 25 bp, Homo sapien
cctgaaatgcggtgggccgactgct

SEQ ID NO: 4399434 - DNA, 25 bp, Homo sapien
taagcatgtgacctttgcagtgcca

SEQ ID NO: 4399435 - DNA, 25 bp, Homo sapien
caacacacagggatatgtggagcca

SEQ ID NO: 4399436 - DNA, 25 bp, Homo sapien
tacgctatttccactgcccctgggt

SEQ ID NO: 4399437 - DNA, 25 bp, Homo sapien
cacagaccacagagtgaacgtaggc

SEQ ID NO: 4399438 - DNA, 25 bp, Homo sapien
gaaagacgaagtcattgccaaggca

SEQ ID NO: 4399439 - DNA, 25 bp, Homo sapien
caaagcccacccatggtatggacca

SEQ ID NO: 4399440 - DNA, 25 bp, Homo sapien
tgcacagtacacataaaaccaactc

SEQ ID NO: 4399441 - DNA, 25 bp, Homo sapien
cataaaaccaactcttagaggccaa

SEQ ID NO: 4399442 - DNA, 25 bp, Homo sapien
aacacccgtgtgatccatcctacat

SEQ ID NO: 4399443 - DNA, 25 bp, Homo sapien
cttttgtaacccaatagcaaacaat

SEQ ID NO: 4399444 - DNA, 25 bp, Homo sapien
ttgtaacccaatagcaaacaatagt

SEQ ID NO: 4399445 - DNA, 25 bp, Homo sapien
taatcagcctttctacggctgcctc

SEQ ID NO: 4399446 - DNA, 25 bp, Homo sapien
cagagccataatcagcctttctacg

SEQ ID NO: 4399447 - DNA, 25 bp, Homo sapien
gatgaatggcttttcgagggttttc

SEQ ID NO: 4399448 - DNA, 25 bp, Homo sapien
cctcgatgccccatagaaaaatgta

SEQ ID NO: 4399449 - DNA, 25 bp, Homo sapien
tggttcagcagcatccgaaagggaa

SEQ ID NO: 4399450 - DNA, 25 bp, Homo sapien
tttttgcctctgctccgatgaatgg

SEQ ID NO: 4399451 - DNA, 25 bp, Homo sapien
gctggtgcagaaagcctcacagatg

SEQ ID NO: 4399452 - DNA, 25 bp, Homo sapien
ctgctggtgcagaaagcctcacaga

SEQ ID NO: 4399453 - DNA, 25 bp, Homo sapien
gcagaaagcctcacagatgttgaca

SEQ ID NO: 4399454 - DNA, 25 bp, Homo sapien
ggtgcagaaagcctcacagatgttg

SEQ ID NO: 4399455 - DNA, 25 bp, Homo sapien
agggctacagtatgccaacatcacc

SEQ ID NO: 4399456 - DNA, 25 bp, Homo sapien
tcaagtctccctatgagaaagaggg

SEQ ID NO: 4399457 - DNA, 25 bp, Homo sapien
cctatgagaaagagggctacagtat

SEQ ID NO: 4399458 - DNA, 25 bp, Homo sapien
ttgctcaagtctccctatgagaaag

SEQ ID NO: 4399459 - DNA, 25 bp, Homo sapien
gtcttttgaactgctaaagtagata

SEQ ID NO: 4399460 - DNA, 25 bp, Homo sapien
gaatggaatgtcttttgaactgcta

SEQ ID NO: 4399461 - DNA, 25 bp, Homo sapien
ttttgaactgctaaagtagataatt

SEQ ID NO: 4399462 - DNA, 25 bp, Homo sapien
gggaatggaatgtcttttgaactgc

SEQ ID NO: 4399463 - DNA, 25 bp, Homo sapien
catttcctaataactgcaaaggcca

SEQ ID NO: 4399464 - DNA, 25 bp, Homo sapien
ccacgcggcctgagtgatttaccca

SEQ ID NO: 4399465 - DNA, 25 bp, Homo sapien
cccattcccggcaatggcgagattt

SEQ ID NO: 4399466 - DNA, 25 bp, Homo sapien
aaaattcggcgatgcgtgccaccgt

SEQ ID NO: 4399467 - DNA, 25 bp, Homo sapien
aggcagctgagaacagatacaaatc

SEQ ID NO: 4399468 - DNA, 25 bp, Homo sapien
acagcaagctgactgctgtccccag

SEQ ID NO: 4399469 - DNA, 25 bp, Homo sapien
catccaaacagaagaccatttgttc

SEQ ID NO: 4399470 - DNA, 25 bp, Homo sapien
tccttctccgttggggtgggcactg

SEQ ID NO: 4399471 - DNA, 25 bp, Homo sapien
cgcccggccggatttggcattttca

SEQ ID NO: 4399472 - DNA, 25 bp, Homo sapien
aactaccaagagatgtagaggcccg

SEQ ID NO: 4399473 - DNA, 25 bp, Homo sapien
taactggcctgggtgtacttccttc

SEQ ID NO: 4399474 - DNA, 25 bp, Homo sapien
gcttgtgggcaagcacgtgtcagca

SEQ ID NO: 4399475 - DNA, 25 bp, Homo sapien
cccatctgggatcggggagcaactg

SEQ ID NO: 4399476 - DNA, 25 bp, Homo sapien
ctccgacgtgaagggacgctgtcct

SEQ ID NO: 4399477 - DNA, 25 bp, Homo sapien
aatgtgccgcacaaggttttcccca

SEQ ID NO: 4399478 - DNA, 25 bp, Homo sapien
cttcctgaggcaaatgtgccgcaca

SEQ ID NO: 4399479 - DNA, 25 bp, Homo sapien
gctggttttcagtctaattcacaat

SEQ ID NO: 4399480 - DNA, 25 bp, Homo sapien
tataactatggactagtcaccctcc

SEQ ID NO: 4399481 - DNA, 25 bp, Homo sapien
gttaagtgacacatcccgttacaga

SEQ ID NO: 4399482 - DNA, 25 bp, Homo sapien
gtcaccctccttattctgattagca

SEQ ID NO: 4399483 - DNA, 25 bp, Homo sapien
ctgtttcattgttggacctttagca

SEQ ID NO: 4399484 - DNA, 25 bp, Homo sapien
catagcactggatatatctgttctg

SEQ ID NO: 4399485 - DNA, 25 bp, Homo sapien
ctctcatactcttttgacgcggcat

SEQ ID NO: 4399486 - DNA, 25 bp, Homo sapien
tgttggacctttagcaaacacttac

SEQ ID NO: 4399487 - DNA, 25 bp, Homo sapien
tgatttcctccaacgtgccacgttc

SEQ ID NO: 4399488 - DNA, 25 bp, Homo sapien
cctccaacgtgccacgttctgtgct

SEQ ID NO: 4399489 - DNA, 25 bp, Homo sapien
ttcctccaacgtgccacgttctgtg

SEQ ID NO: 4399490 - DNA, 25 bp, Homo sapien
gatttcctccaacgtgccacgttct

SEQ ID NO: 4399491 - DNA, 25 bp, Homo sapien
gctcccacacttcaagcaagaggat

SEQ ID NO: 4399492 - DNA, 25 bp, Homo sapien
gaagcattgggaatggctccttgct

SEQ ID NO: 4399493 - DNA, 25 bp, Homo sapien
gccacattcagtagaagatacaaac

SEQ ID NO: 4399494 - DNA, 25 bp, Homo sapien
tgaagccacattcagtagaagatac

SEQ ID NO: 4399495 - DNA, 25 bp, Homo sapien
gatgggatctgacttactttttgaa

SEQ ID NO: 4399496 - DNA, 25 bp, Homo sapien
ctttggaatgaatgtggctgacaga

SEQ ID NO: 4399497 - DNA, 25 bp, Homo sapien
agggagagccagctaggagactcac

SEQ ID NO: 4399498 - DNA, 25 bp, Homo sapien
gaacttactgggaaatgacgagaac

SEQ ID NO: 4399499 - DNA, 25 bp, Homo sapien
gcaatagtggtgacgagaagtgtct

SEQ ID NO: 4399500 - DNA, 25 bp, Homo sapien
tagtggtgacgagaagtgtctgatt

SEQ ID NO: 4399501 - DNA, 25 bp, Homo sapien
tgcctcagtcgaagggagataggaa

SEQ ID NO: 4399502 - DNA, 25 bp, Homo sapien
gtgtctgatttggaaacgatgcctc

SEQ ID NO: 4399503 - DNA, 25 bp, Homo sapien
gagagtcagcagagaagtctaattt

SEQ ID NO: 4399504 - DNA, 25 bp, Homo sapien
agtgatggagagttccaaggattga

SEQ ID NO: 4399505 - DNA, 25 bp, Homo sapien
agcatacacaactctgagagtcagc

SEQ ID NO: 4399506 - DNA, 25 bp, Homo sapien
tccaaggattgagccttgatgttct

SEQ ID NO: 4399507 - DNA, 25 bp, Homo sapien
ctggctggtcctgtcaactccgata

SEQ ID NO: 4399508 - DNA, 25 bp, Homo sapien
tcgcaagagggtgacagtcttccct

SEQ ID NO: 4399509 - DNA, 25 bp, Homo sapien
tgcttcttggaaacattcgcaagag

SEQ ID NO: 4399510 - DNA, 25 bp, Homo sapien
ggctggtcctgtcaactccgataaa

SEQ ID NO: 4399511 - DNA, 25 bp, Homo sapien
ttcctctcgttgttttcctggcaag

SEQ ID NO: 4399512 - DNA, 25 bp, Homo sapien
gccacaagggaaataccaccttctg

SEQ ID NO: 4399513 - DNA, 25 bp, Homo sapien
tttgtgggccgcttccacaggaaaa

SEQ ID NO: 4399514 - DNA, 25 bp, Homo sapien
aggaaaacatgctttctaagaagcc

SEQ ID NO: 4399515 - DNA, 25 bp, Homo sapien
acttgcagatctcggacaggccaga

SEQ ID NO: 4399516 - DNA, 25 bp, Homo sapien
tgctgatggcatggcggtacactga

SEQ ID NO: 4399517 - DNA, 25 bp, Homo sapien
ggctgagaccccaaggctagagata

SEQ ID NO: 4399518 - DNA, 25 bp, Homo sapien
agagtccccgctgtgagataaagtt

SEQ ID NO: 4399519 - DNA, 25 bp, Homo sapien
caacaccaaaacttaggtgttcact

SEQ ID NO: 4399520 - DNA, 25 bp, Homo sapien
cactgatttcatgaggcgattcatt

SEQ ID NO: 4399521 - DNA, 25 bp, Homo sapien
taggtgttcactgatttcatgaggc

SEQ ID NO: 4399522 - DNA, 25 bp, Homo sapien
caaaacttaggtgttcactgatttc

SEQ ID NO: 4399523 - DNA, 25 bp, Homo sapien
tcttggctgccaagagcctcagagt

SEQ ID NO: 4399524 - DNA, 25 bp, Homo sapien
gctgccaagagcctcagagttaaat

SEQ ID NO: 4399525 - DNA, 25 bp, Homo sapien
gccaagagcctcagagttaaattta

SEQ ID NO: 4399526 - DNA, 25 bp, Homo sapien
tgtcttggctgccaagagcctcaga

SEQ ID NO: 4399527 - DNA, 25 bp, Homo sapien
gtcaccagtgtagatagaagccctt

SEQ ID NO: 4399528 - DNA, 25 bp, Homo sapien
tcagaatcctgccagaggagcagta

SEQ ID NO: 4399529 - DNA, 25 bp, Homo sapien
tagatagaagcccttggaaccacgt

SEQ ID NO: 4399530 - DNA, 25 bp, Homo sapien
gaagcccttggaaccacgttccgca

SEQ ID NO: 4399531 - DNA, 25 bp, Homo sapien
tggcaccagtggccacacgagccat

SEQ ID NO: 4399532 - DNA, 25 bp, Homo sapien
ccacacggtatggtcctaattctcc

SEQ ID NO: 4399533 - DNA, 25 bp, Homo sapien
atggagcactgccacacggtatggt

SEQ ID NO: 4399534 - DNA, 25 bp, Homo sapien
cctttgctcctggagcggctgtgtt

SEQ ID NO: 4399535 - DNA, 25 bp, Homo sapien
ggagacaatccttctatcttagggc

SEQ ID NO: 4399536 - DNA, 25 bp, Homo sapien
cagagcaggacgctgcagcgatact

SEQ ID NO: 4399537 - DNA, 25 bp, Homo sapien
attttgcaagcaacggtgtctgagc

SEQ ID NO: 4399538 - DNA, 25 bp, Homo sapien
tgtgtgacttcagacaatttcagcc

SEQ ID NO: 4399539 - DNA, 25 bp, Homo sapien
gtgagaggtggttcttgcggctgac

SEQ ID NO: 4399540 - DNA, 25 bp, Homo sapien
agccccaggcctgtgggattttccg

SEQ ID NO: 4399541 - DNA, 25 bp, Homo sapien
tggttcttgcggctgacttggcaaa

SEQ ID NO: 4399542 - DNA, 25 bp, Homo sapien
gaggtggttcttgcggctgacttgg

SEQ ID NO: 4399543 - DNA, 25 bp, Homo sapien
gatgtaaccctgtcccttgcatgtg

SEQ ID NO: 4399544 - DNA, 25 bp, Homo sapien
ttatgatttgtaaggcgcgactccc

SEQ ID NO: 4399545 - DNA, 25 bp, Homo sapien
cagggcaagttcaaggtagggcaaa

SEQ ID NO: 4399546 - DNA, 25 bp, Homo sapien
aaagccaaggcttcggagactcagc

SEQ ID NO: 4399547 - DNA, 25 bp, Homo sapien
tgctgcccgagcctcgatagacacg

SEQ ID NO: 4399548 - DNA, 25 bp, Homo sapien
gagcctcgatagacacggtgagccg

SEQ ID NO: 4399549 - DNA, 25 bp, Homo sapien
atagacacggtgagccgcagagaac

SEQ ID NO: 4399550 - DNA, 25 bp, Homo sapien
agagaaccgcagctcgacctcaggt

SEQ ID NO: 4399551 - DNA, 25 bp, Homo sapien
tgccaaggagagagctggacgttca

SEQ ID NO: 4399552 - DNA, 25 bp, Homo sapien
ctagcattgtactgcagtcccaggg

SEQ ID NO: 4399553 - DNA, 25 bp, Homo sapien
tagcattgtactgcagtcccaggga

SEQ ID NO: 4399554 - DNA, 25 bp, Homo sapien
cattgtactgcagtcccagggagcc

SEQ ID NO: 4399555 - DNA, 25 bp, Homo sapien
ttccaatgtggtgaacgaggtctcc

SEQ ID NO: 4399556 - DNA, 25 bp, Homo sapien
tgagcagaacacctcctggacgaag

SEQ ID NO: 4399557 - DNA, 25 bp, Homo sapien
tagttggtgtcgaagatgccctccg

SEQ ID NO: 4399558 - DNA, 25 bp, Homo sapien
aaaggtcagattacccagggaggca

SEQ ID NO: 4399559 - DNA, 25 bp, Homo sapien
gtgagggccgagcgggtggcgccgg

SEQ ID NO: 4399560 - DNA, 25 bp, Homo sapien
cgtgagggccgagcgggtggcgccg

SEQ ID NO: 4399561 - DNA, 25 bp, Homo sapien
gaaagacacacgttgccatgagcct

SEQ ID NO: 4399562 - DNA, 25 bp, Homo sapien
taactgagtctacagaggcccggag

SEQ ID NO: 4399563 - DNA, 25 bp, Homo sapien
tagggccagaaagagcaatcacggg

SEQ ID NO: 4399564 - DNA, 25 bp, Homo sapien
tagagagagaatccacgtccagtgc

SEQ ID NO: 4399565 - DNA, 25 bp, Homo sapien
tcagggacatggacgcttggaacag

SEQ ID NO: 4399566 - DNA, 25 bp, Homo sapien
tgggtaactaggcacctcagggaca

SEQ ID NO: 4399567 - DNA, 25 bp, Homo sapien
ggccagggcgacaatgccaattaca

SEQ ID NO: 4399568 - DNA, 25 bp, Homo sapien
gataatgagggactggcctcggaca

SEQ ID NO: 4399569 - DNA, 25 bp, Homo sapien
cacaggtacagtgtccgtccctaac

SEQ ID NO: 4399570 - DNA, 25 bp, Homo sapien
gattgagcttcgtgagtcctaccag

SEQ ID NO: 4399571 - DNA, 25 bp, Homo sapien
tgacgttggcgaagatattccctgg

SEQ ID NO: 4399572 - DNA, 25 bp, Homo sapien
tgttctcatacagccggaggacctg

SEQ ID NO: 4399573 - DNA, 25 bp, Homo sapien
cagggattgtcatacagccgcagct

SEQ ID NO: 4399574 - DNA, 25 bp, Homo sapien
tggggccaggttatgctagggacac

SEQ ID NO: 4399575 - DNA, 25 bp, Homo sapien
ccaaaggcatctagatgcaaaggaa

SEQ ID NO: 4399576 - DNA, 25 bp, Homo sapien
ggaatggggccaggttatgctaggg

SEQ ID NO: 4399577 - DNA, 25 bp, Homo sapien
gggccaggttatgctagggacacat

SEQ ID NO: 4399578 - DNA, 25 bp, Homo sapien
ctgcatgggttcagggatttcttct

SEQ ID NO: 4399579 - DNA, 25 bp, Homo sapien
ggctgcatgggttcagggatttctt

SEQ ID NO: 4399580 - DNA, 25 bp, Homo sapien
gctgcatgggttcagggatttcttc

SEQ ID NO: 4399581 - DNA, 25 bp, Homo sapien
gctgactcaagaccacaggcaaatt

SEQ ID NO: 4399582 - DNA, 25 bp, Homo sapien
gactcaagaccacaggcaaattggg

SEQ ID NO: 4399583 - DNA, 25 bp, Homo sapien
ccagctgactcaagaccacaggcaa

SEQ ID NO: 4399584 - DNA, 25 bp, Homo sapien
ctcaagaccacaggcaaattgggct

SEQ ID NO: 4399585 - DNA, 25 bp, Homo sapien
ccgcccgccgtggacaagagggagc

SEQ ID NO: 4399586 - DNA, 25 bp, Homo sapien
cgcccgcccgccgtggacaagaggg

SEQ ID NO: 4399587 - DNA, 25 bp, Homo sapien
cccgcccgccgtggacaagagggag

SEQ ID NO: 4399588 - DNA, 25 bp, Homo sapien
ggcgcccgcccgccgtggacaagag

SEQ ID NO: 4399589 - DNA, 25 bp, Homo sapien
gacgagggacggctcaaggctgcag

SEQ ID NO: 4399590 - DNA, 25 bp, Homo sapien
gagggacggctcaaggctgcagcat

SEQ ID NO: 4399591 - DNA, 25 bp, Homo sapien
aggaggacgagggacggctcaaggc

SEQ ID NO: 4399592 - DNA, 25 bp, Homo sapien
gaggacgagggacggctcaaggctg

SEQ ID NO: 4399593 - DNA, 25 bp, Homo sapien
cagtagggagccaccaggagttttg

SEQ ID NO: 4399594 - DNA, 25 bp, Homo sapien
tcccgaagagtggagtcctctggag

SEQ ID NO: 4399595 - DNA, 25 bp, Homo sapien
gcagtagggagccaccaggagtttt

SEQ ID NO: 4399596 - DNA, 25 bp, Homo sapien
tgaggactgggatgatcccgaagag

SEQ ID NO: 4399597 - DNA, 25 bp, Homo sapien
catgacagcgcatgggtttccacac

SEQ ID NO: 4399598 - DNA, 25 bp, Homo sapien
cttcatgacagcgcatgggtttcca

SEQ ID NO: 4399599 - DNA, 25 bp, Homo sapien
ggccttcatgacagcgcatgggttt

SEQ ID NO: 4399600 - DNA, 25 bp, Homo sapien
tcatgacagcgcatgggtttccaca

SEQ ID NO: 4399601 - DNA, 25 bp, Homo sapien
ccaggttggaggtgccgtggacatc

SEQ ID NO: 4399602 - DNA, 25 bp, Homo sapien
tgcaggactccgggtttccacacat

SEQ ID NO: 4399603 - DNA, 25 bp, Homo sapien
gcaggactccgggtttccacacatg

SEQ ID NO: 4399604 - DNA, 25 bp, Homo sapien
gaggtgccgtggacatcgggctgca

SEQ ID NO: 4399605 - DNA, 25 bp, Homo sapien
ccagggcttcagggaactctgctat

SEQ ID NO: 4399606 - DNA, 25 bp, Homo sapien
cagggcttcagggaactctgctatc

SEQ ID NO: 4399607 - DNA, 25 bp, Homo sapien
ttcagggaactctgctatctcccgc

SEQ ID NO: 4399608 - DNA, 25 bp, Homo sapien
ggcttcagggaactctgctatctcc

SEQ ID NO: 4399609 - DNA, 25 bp, Homo sapien
tcttaaaatccccagtgacaactcc

SEQ ID NO: 4399610 - DNA, 25 bp, Homo sapien
cttcttaaaatccccagtgacaact

SEQ ID NO: 4399611 - DNA, 25 bp, Homo sapien
aaaatccccagtgacaactcccaga

SEQ ID NO: 4399612 - DNA, 25 bp, Homo sapien
ttaaaatccccagtgacaactccca

SEQ ID NO: 4399613 - DNA, 25 bp, Homo sapien
tctccccagcatgagccatttcctt

SEQ ID NO: 4399614 - DNA, 25 bp, Homo sapien
cttgttctccccagcatgagccatt

SEQ ID NO: 4399615 - DNA, 25 bp, Homo sapien
tgttctccccagcatgagccatttc

SEQ ID NO: 4399616 - DNA, 25 bp, Homo sapien
gttctccccagcatgagccatttcc

SEQ ID NO: 4399617 - DNA, 25 bp, Homo sapien
cgtcgtaggggcacatggatgtcca

SEQ ID NO: 4399618 - DNA, 25 bp, Homo sapien
tccttgagttcacggcgccgtcgta

SEQ ID NO: 4399619 - DNA, 25 bp, Homo sapien
ggaagcagagaaggtccttgagttc

SEQ ID NO: 4399620 - DNA, 25 bp, Homo sapien
ggaaacccaagagccgagtggtcca

SEQ ID NO: 4399621 - DNA, 25 bp, Homo sapien
gagggagattagcaggactagccat

SEQ ID NO: 4399622 - DNA, 25 bp, Homo sapien
gctgcttgagtgttcggagggagat

SEQ ID NO: 4399623 - DNA, 25 bp, Homo sapien
ttccacctgctctgggaaagggccc

SEQ ID NO: 4399624 - DNA, 25 bp, Homo sapien
gcaggactagccattaaggtgcagc

SEQ ID NO: 4399625 - DNA, 25 bp, Homo sapien
ggtggccgaccgcagaccgtgtgag

SEQ ID NO: 4399626 - DNA, 25 bp, Homo sapien
tggccgaccgcagaccgtgtgaggt

SEQ ID NO: 4399627 - DNA, 25 bp, Homo sapien
cgaccgcagaccgtgtgaggtagaa

SEQ ID NO: 4399628 - DNA, 25 bp, Homo sapien
gccgaccgcagaccgtgtgaggtag

SEQ ID NO: 4399629 - DNA, 25 bp, Homo sapien
aggtccttgtctggatgccggctca

SEQ ID NO: 4399630 - DNA, 25 bp, Homo sapien
ctggatgccggctcatgcgtgacat

SEQ ID NO: 4399631 - DNA, 25 bp, Homo sapien
tctggatgccggctcatgcgtgaca

SEQ ID NO: 4399632 - DNA, 25 bp, Homo sapien
ccttgtctggatgccggctcatgcg

SEQ ID NO: 4399633 - DNA, 25 bp, Homo sapien
cctccagccgcagtcatgatgatta

SEQ ID NO: 4399634 - DNA, 25 bp, Homo sapien
tgatggcaacctcatgacagaccct

SEQ ID NO: 4399635 - DNA, 25 bp, Homo sapien
gggattctacaacacgttcaaggaa

SEQ ID NO: 4399636 - DNA, 25 bp, Homo sapien
atgatgattagagccccagccaaga

SEQ ID NO: 4399637 - DNA, 25 bp, Homo sapien
ttaacatgtattgcctgcaggccgc

SEQ ID NO: 4399638 - DNA, 25 bp, Homo sapien
catttaccggcttactctgtgcagg

SEQ ID NO: 4399639 - DNA, 25 bp, Homo sapien
ccaagtagcccataggtcagagaga

SEQ ID NO: 4399640 - DNA, 25 bp, Homo sapien
tggagttgacatgctgaccctgaaa

SEQ ID NO: 4399641 - DNA, 25 bp, Homo sapien
acagcagcgggtctggattcccctc

SEQ ID NO: 4399642 - DNA, 25 bp, Homo sapien
atctggtcaggttctaagtaattag

SEQ ID NO: 4399643 - DNA, 25 bp, Homo sapien
gaaaggaaggcgtggcagtgagaga

SEQ ID NO: 4399644 - DNA, 25 bp, Homo sapien
gcaaccacagtttacaaacgtcaag

SEQ ID NO: 4399645 - DNA, 25 bp, Homo sapien
gatcacggtgatcatggcctgaaca

SEQ ID NO: 4399646 - DNA, 25 bp, Homo sapien
gagttggccaattttaatcatagca

SEQ ID NO: 4399647 - DNA, 25 bp, Homo sapien
catagcaaacacgatgatcacggtg

SEQ ID NO: 4399648 - DNA, 25 bp, Homo sapien
gattaattttcgaaagagttggcca

SEQ ID NO: 4399649 - DNA, 25 bp, Homo sapien
tatgatcttgacctttgcccgtggt

SEQ ID NO: 4399650 - DNA, 25 bp, Homo sapien
aaacccccagaacggactatgatct

SEQ ID NO: 4399651 - DNA, 25 bp, Homo sapien
gaacggactatgatcttgacctttg

SEQ ID NO: 4399652 - DNA, 25 bp, Homo sapien
tttgcccgtggtcaccggctgggcc

SEQ ID NO: 4399653 - DNA, 25 bp, Homo sapien
gctgggtggacaggggcttccgagg

SEQ ID NO: 4399654 - DNA, 25 bp, Homo sapien
gggcttccgaggagctgtccgcagc

SEQ ID NO: 4399655 - DNA, 25 bp, Homo sapien
cttccgaggagctgtccgcagcggg

SEQ ID NO: 4399656 - DNA, 25 bp, Homo sapien
tgttgggagccaaggctgggtggac

SEQ ID NO: 4399657 - DNA, 25 bp, Homo sapien
gcaggccggcgtgcgccccagggcc

SEQ ID NO: 4399658 - DNA, 25 bp, Homo sapien
cggcaggccggcgtgcgccccaggg

SEQ ID NO: 4399659 - DNA, 25 bp, Homo sapien
gccggcgtgcgccccagggcctgcg

SEQ ID NO: 4399660 - DNA, 25 bp, Homo sapien
agcggcaggccggcgtgcgccccag

SEQ ID NO: 4399661 - DNA, 25 bp, Homo sapien
tgatttcggtggaactgcagctccg

SEQ ID NO: 4399662 - DNA, 25 bp, Homo sapien
aatccagagacacaaggcggttcga

SEQ ID NO: 4399663 - DNA, 25 bp, Homo sapien
ctgtcggagatcatgaggcgctgca

SEQ ID NO: 4399664 - DNA, 25 bp, Homo sapien
ttttgttgcgcgacagcctcagggt

SEQ ID NO: 4399665 - DNA, 25 bp, Homo sapien
gagcaccgcgcacagtagagtcccc

SEQ ID NO: 4399666 - DNA, 25 bp, Homo sapien
gaagcccgagcaccgcgcacagtag

SEQ ID NO: 4399667 - DNA, 25 bp, Homo sapien
gcgcacagtagagtccccctcagca

SEQ ID NO: 4399668 - DNA, 25 bp, Homo sapien
tgggcgcgcagaagcccgagcaccg

SEQ ID NO: 4399669 - DNA, 25 bp, Homo sapien
caaccgtgggagtgtggtcaacaca

SEQ ID NO: 4399670 - DNA, 25 bp, Homo sapien
aaaagcaaccgtgggagtgtggtca

SEQ ID NO: 4399671 - DNA, 25 bp, Homo sapien
cacaggagcgttcgcgcctgtactg

SEQ ID NO: 4399672 - DNA, 25 bp, Homo sapien
gtcaacacacaggagcgttcgcgcc

SEQ ID NO: 4399673 - DNA, 25 bp, Homo sapien
ggttctgcactccaaagtaactgaa

SEQ ID NO: 4399674 - DNA, 25 bp, Homo sapien
gcatgtgattcgacactttccacag

SEQ ID NO: 4399675 - DNA, 25 bp, Homo sapien
ctgaaatggttctgcactccaaagt

SEQ ID NO: 4399676 - DNA, 25 bp, Homo sapien
actgaaagacttagagctctgcatg

SEQ ID NO: 4399677 - DNA, 25 bp, Homo sapien
gataaagactttaccagagtaggtc

SEQ ID NO: 4399678 - DNA, 25 bp, Homo sapien
gtcaggaaaggaccctatctcagag

SEQ ID NO: 4399679 - DNA, 25 bp, Homo sapien
aaccgagagaccatatataacctga

SEQ ID NO: 4399680 - DNA, 25 bp, Homo sapien
caaatatcttcaaaccgagagacca

SEQ ID NO: 4399681 - DNA, 25 bp, Homo sapien
gcaagtgcaattgggaaagctttcg

SEQ ID NO: 4399682 - DNA, 25 bp, Homo sapien
tccaaggtcttagggaattcacaaa

SEQ ID NO: 4399683 - DNA, 25 bp, Homo sapien
cagttttgtttagatgcaagtgcaa

SEQ ID NO: 4399684 - DNA, 25 bp, Homo sapien
gttggcttagccacttgtattcaag

SEQ ID NO: 4399685 - DNA, 25 bp, Homo sapien
tgaaaacaatatggacagaagagat

SEQ ID NO: 4399686 - DNA, 25 bp, Homo sapien
tctcaacgtgaataacccaccttgt

SEQ ID NO: 4399687 - DNA, 25 bp, Homo sapien
taatggtaacctacgagagaagact

SEQ ID NO: 4399688 - DNA, 25 bp, Homo sapien
tatctatggcactgagtagaaccca

SEQ ID NO: 4399689 - DNA, 25 bp, Homo sapien
aaatcactgaagaataacacgagca

SEQ ID NO: 4399690 - DNA, 25 bp, Homo sapien
aaaatgatccagagaataagtaact

SEQ ID NO: 4399691 - DNA, 25 bp, Homo sapien
aagtaactatagaaaatagtgctaa

SEQ ID NO: 4399692 - DNA, 25 bp, Homo sapien
ctgaagaataacacgagcatatttg

SEQ ID NO: 4399693 - DNA, 25 bp, Homo sapien
taactgtgggcgttgccagactgct

SEQ ID NO: 4399694 - DNA, 25 bp, Homo sapien
gaaagcacgagcaagcatgttactg

SEQ ID NO: 4399695 - DNA, 25 bp, Homo sapien
tgaatctacatctactgccgaaaga

SEQ ID NO: 4399696 - DNA, 25 bp, Homo sapien
tatttttgcaggaatcatcagtggc

SEQ ID NO: 4399697 - DNA, 25 bp, Homo sapien
gggcccagggtaagcagcattttcc

SEQ ID NO: 4399698 - DNA, 25 bp, Homo sapien
tggttgtctgaggttttggtggcca

SEQ ID NO: 4399699 - DNA, 25 bp, Homo sapien
gagctcctgcgccagatacatgtac

SEQ ID NO: 4399700 - DNA, 25 bp, Homo sapien
tggatcaaccaagagctcctgcgcc

SEQ ID NO: 4399701 - DNA, 25 bp, Homo sapien
tattgctcctggcaacttagccgca

SEQ ID NO: 4399702 - DNA, 25 bp, Homo sapien
ttataatgatggtttccgtcggtgc

SEQ ID NO: 4399703 - DNA, 25 bp, Homo sapien
ggtttgttaaagcacacattagcag

SEQ ID NO: 4399704 - DNA, 25 bp, Homo sapien
cgtcggtgctccacgactggaaagg

SEQ ID NO: 4399705 - DNA, 25 bp, Homo sapien
taaatgactacaccaggactcgtag

SEQ ID NO: 4399706 - DNA, 25 bp, Homo sapien
tataaaccaggctacaactagctct

SEQ ID NO: 4399707 - DNA, 25 bp, Homo sapien
tctaaatgcagtaatctcacaaggt

SEQ ID NO: 4399708 - DNA, 25 bp, Homo sapien
caagaaagcagagtccctggttaat

SEQ ID NO: 4399709 - DNA, 25 bp, Homo sapien
gccccgctgagagcacggtaaacgt

SEQ ID NO: 4399710 - DNA, 25 bp, Homo sapien
gactcaccgctctcaatgttaaagg

SEQ ID NO: 4399711 - DNA, 25 bp, Homo sapien
taaaggtctgctagcttaagcctgt

SEQ ID NO: 4399712 - DNA, 25 bp, Homo sapien
ttagcattaaggtacagaagtcact

SEQ ID NO: 4399713 - DNA, 25 bp, Homo sapien
ttgaacacaactttccaaaggacca

SEQ ID NO: 4399714 - DNA, 25 bp, Homo sapien
caaaggaccatgtcaaggaagaagt

SEQ ID NO: 4399715 - DNA, 25 bp, Homo sapien
ggtgctgaaccgatactctccttgt

SEQ ID NO: 4399716 - DNA, 25 bp, Homo sapien
tccttgtttgtctcggttgaacaca

SEQ ID NO: 4399717 - DNA, 25 bp, Homo sapien
ggtcagtaccataatatccatgctg

SEQ ID NO: 4399718 - DNA, 25 bp, Homo sapien
tccaaaagcctgtgctatgaaactc

SEQ ID NO: 4399719 - DNA, 25 bp, Homo sapien
tcacatttcaatgggcaacttcaaa

SEQ ID NO: 4399720 - DNA, 25 bp, Homo sapien
taagtgtaatttctaagaccagagc

SEQ ID NO: 4399721 - DNA, 25 bp, Homo sapien
gacacaaaggcattgacaagaacaa

SEQ ID NO: 4399722 - DNA, 25 bp, Homo sapien
gatagacacaaaggcattgacaaga

SEQ ID NO: 4399723 - DNA, 25 bp, Homo sapien
tagacacaaaggcattgacaagaac

SEQ ID NO: 4399724 - DNA, 25 bp, Homo sapien
tgtgatagacacaaaggcattgaca

SEQ ID NO: 4399725 - DNA, 25 bp, Homo sapien
gccactgatatggtacacacactat

SEQ ID NO: 4399726 - DNA, 25 bp, Homo sapien
tacacgccactgatatggtacacac

SEQ ID NO: 4399727 - DNA, 25 bp, Homo sapien
cacgccactgatatggtacacacac

SEQ ID NO: 4399728 - DNA, 25 bp, Homo sapien
agttacacgccactgatatggtaca

SEQ ID NO: 4399729 - DNA, 25 bp, Homo sapien
caaacctgtccgtaacatacaagaa

SEQ ID NO: 4399730 - DNA, 25 bp, Homo sapien
gtccctgcaatggaatactcatttc

SEQ ID NO: 4399731 - DNA, 25 bp, Homo sapien
gatctcattcatgcagaggcaaaaa

SEQ ID NO: 4399732 - DNA, 25 bp, Homo sapien
caaagagtgtgcatcatgaccaaac

SEQ ID NO: 4399733 - DNA, 25 bp, Homo sapien
tgaagaactaaatggccaaaacaca

SEQ ID NO: 4399734 - DNA, 25 bp, Homo sapien
tccccaaacaaatgatgtgcttaag

SEQ ID NO: 4399735 - DNA, 25 bp, Homo sapien
caggtatagctaagaaaagctgcta

SEQ ID NO: 4399736 - DNA, 25 bp, Homo sapien
tgaaaacggcaccagaagcagagat

SEQ ID NO: 4399737 - DNA, 25 bp, Homo sapien
tgaagaacctggtcaacagaggcaa

SEQ ID NO: 4399738 - DNA, 25 bp, Homo sapien
ctgaagaacctggtcaacagaggca

SEQ ID NO: 4399739 - DNA, 25 bp, Homo sapien
aaaaggcatccaataacagctggta

SEQ ID NO: 4399740 - DNA, 25 bp, Homo sapien
tcctttatataaaaaggcatccaat

SEQ ID NO: 4399741 - DNA, 25 bp, Homo sapien
atataaaaaggcatccaataacagc

SEQ ID NO: 4399742 - DNA, 25 bp, Homo sapien
taaaaaggcatccaataacagctgg

SEQ ID NO: 4399743 - DNA, 25 bp, Homo sapien
gtcttgcttgcaaaccagtctgaat

SEQ ID NO: 4399744 - DNA, 25 bp, Homo sapien
acagtgtggatagggtagatctcta

SEQ ID NO: 4399745 - DNA, 25 bp, Homo sapien
gaaataccgtggcaaaccttccatg

SEQ ID NO: 4399746 - DNA, 25 bp, Homo sapien
tcagctacccttacatgtgttcaac

SEQ ID NO: 4399747 - DNA, 25 bp, Homo sapien
gcacaggcctccattcagtatactg

SEQ ID NO: 4399748 - DNA, 25 bp, Homo sapien
ccctttctgcaatagcatgcaaaga

SEQ ID NO: 4399749 - DNA, 25 bp, Homo sapien
ggtatattctattgccatagacaag

SEQ ID NO: 4399750 - DNA, 25 bp, Homo sapien
cattcagtatactggccctttctgc

SEQ ID NO: 4399751 - DNA, 25 bp, Homo sapien
cactatgaggtactgaaaactggaa

SEQ ID NO: 4399752 - DNA, 25 bp, Homo sapien
aacccgcttcctgttgtattacaag

SEQ ID NO: 4399753 - DNA, 25 bp, Homo sapien
tagcaaggttgcctgaagggttttc

SEQ ID NO: 4399754 - DNA, 25 bp, Homo sapien
cattgtctacgtgtgaagaattcca

SEQ ID NO: 4399755 - DNA, 25 bp, Homo sapien
gaagggccccagatataagacccga

SEQ ID NO: 4399756 - DNA, 25 bp, Homo sapien
tctgagacaaaacggagaagagaag

SEQ ID NO: 4399757 - DNA, 25 bp, Homo sapien
tctgattttggatgccacacttcat

SEQ ID NO: 4399758 - DNA, 25 bp, Homo sapien
taagacccgaaggtggtctttgtgc

SEQ ID NO: 4399759 - DNA, 25 bp, Homo sapien
ctggaagtctcctaggttacttaag

SEQ ID NO: 4399760 - DNA, 25 bp, Homo sapien
gagaaactggaagtctcctaggtta

SEQ ID NO: 4399761 - DNA, 25 bp, Homo sapien
tggaagtctcctaggttacttaaga

SEQ ID NO: 4399762 - DNA, 25 bp, Homo sapien
atacagcagagtaacactgaagtac

SEQ ID NO: 4399763 - DNA, 25 bp, Homo sapien
tacagcagagtaacactgaagtact

SEQ ID NO: 4399764 - DNA, 25 bp, Homo sapien
atgctgtacaatgccatgaatttaa

SEQ ID NO: 4399765 - DNA, 25 bp, Homo sapien
cagcagagtaacactgaagtactgg

SEQ ID NO: 4399766 - DNA, 25 bp, Homo sapien
gaagttattaaagcagcacggcctt

SEQ ID NO: 4399767 - DNA, 25 bp, Homo sapien
agttattaaagcagcacggccttcc

SEQ ID NO: 4399768 - DNA, 25 bp, Homo sapien
aaggaagttattaaagcagcacggc

SEQ ID NO: 4399769 - DNA, 25 bp, Homo sapien
ggaagttattaaagcagcacggcct

SEQ ID NO: 4399770 - DNA, 25 bp, Homo sapien
tcttagaggtaaagggagatgccac

SEQ ID NO: 4399771 - DNA, 25 bp, Homo sapien
cacaggaaatactaggagtcttaga

SEQ ID NO: 4399772 - DNA, 25 bp, Homo sapien
ataaggaaatgcctccgtgtgccct

SEQ ID NO: 4399773 - DNA, 25 bp, Homo sapien
gaagcttcgagctccgataaggaaa

SEQ ID NO: 4399774 - DNA, 25 bp, Homo sapien
taagttttgtgaatatgatttaggc

SEQ ID NO: 4399775 - DNA, 25 bp, Homo sapien
atatgatttaggctagagtaagaac

SEQ ID NO: 4399776 - DNA, 25 bp, Homo sapien
tttaggctagagtaagaactataaa

SEQ ID NO: 4399777 - DNA, 25 bp, Homo sapien
gatttaggctagagtaagaactata

SEQ ID NO: 4399778 - DNA, 25 bp, Homo sapien
accacaatcatttgcgccatcacca

SEQ ID NO: 4399779 - DNA, 25 bp, Homo sapien
ccacaatcatttgcgccatcaccac

SEQ ID NO: 4399780 - DNA, 25 bp, Homo sapien
acaatcatttgcgccatcaccacac

SEQ ID NO: 4399781 - DNA, 25 bp, Homo sapien
aatcatttgcgccatcaccacacat

SEQ ID NO: 4399782 - DNA, 25 bp, Homo sapien
catctttagagcaaagcgcttgtgc

SEQ ID NO: 4399783 - DNA, 25 bp, Homo sapien
cacatgagactcttttaaagcggca

SEQ ID NO: 4399784 - DNA, 25 bp, Homo sapien
taaagagctaacacaccaagattcc

SEQ ID NO: 4399785 - DNA, 25 bp, Homo sapien
taaagcggcacttaaagttctgaac

SEQ ID NO: 4399786 - DNA, 25 bp, Homo sapien
caaacacggtgccatgcaacatcaa

SEQ ID NO: 4399787 - DNA, 25 bp, Homo sapien
tacgggcaaacacggtgccatgcaa

SEQ ID NO: 4399788 - DNA, 25 bp, Homo sapien
tgccatacgggcaaacacggtgcca

SEQ ID NO: 4399789 - DNA, 25 bp, Homo sapien
ctgatcaggtgccatacgggcaaac

SEQ ID NO: 4399790 - DNA, 25 bp, Homo sapien
aaatgctccagtatcactgagaatg

SEQ ID NO: 4399791 - DNA, 25 bp, Homo sapien
ttgaaaatgctccagtatcactgag

SEQ ID NO: 4399792 - DNA, 25 bp, Homo sapien
tgataacgagtcatttgaagatcct

SEQ ID NO: 4399793 - DNA, 25 bp, Homo sapien
ttcattgcaaaatgataacgagtca

SEQ ID NO: 4399794 - DNA, 25 bp, Homo sapien
ctaagctatcatggaccaatttaac

SEQ ID NO: 4399795 - DNA, 25 bp, Homo sapien
aacggacagtcgatcttgaccttac

SEQ ID NO: 4399796 - DNA, 25 bp, Homo sapien
taaaacggacagtcgatcttgacct

SEQ ID NO: 4399797 - DNA, 25 bp, Homo sapien
actttaaaacggacagtcgatcttg

SEQ ID NO: 4399798 - DNA, 25 bp, Homo sapien
tttaaaacggacagtcgatcttgac

SEQ ID NO: 4399799 - DNA, 25 bp, Homo sapien
catcctttggaggtaatgcttcagc

SEQ ID NO: 4399800 - DNA, 25 bp, Homo sapien
gctgatggatgactgcactgcgtga

SEQ ID NO: 4399801 - DNA, 25 bp, Homo sapien
tatcctgaggtagaatcattccaca

SEQ ID NO: 4399802 - DNA, 25 bp, Homo sapien
cgtgagggagtctgcataatgccaa

SEQ ID NO: 4399803 - DNA, 25 bp, Homo sapien
cagagacagcagtcaacatactgtc

SEQ ID NO: 4399804 - DNA, 25 bp, Homo sapien
ccacagagacagcagtcaacatact

SEQ ID NO: 4399805 - DNA, 25 bp, Homo sapien
gagacagcagtcaacatactgtcac

SEQ ID NO: 4399806 - DNA, 25 bp, Homo sapien
ctggccacagagacagcagtcaaca

SEQ ID NO: 4399807 - DNA, 25 bp, Homo sapien
aacgtgaacgtatcaaacatgtact

SEQ ID NO: 4399808 - DNA, 25 bp, Homo sapien
ctgggctggcagagtaacgataatg

SEQ ID NO: 4399809 - DNA, 25 bp, Homo sapien
ttaaaatggaaacgtgaacgtatca

SEQ ID NO: 4399810 - DNA, 25 bp, Homo sapien
gagtaacgataatgtatggttcttc

SEQ ID NO: 4399811 - DNA, 25 bp, Homo sapien
tcttcaagtactgcaggggtttctt

SEQ ID NO: 4399812 - DNA, 25 bp, Homo sapien
catgacggtgcgaatgttggcttta

SEQ ID NO: 4399813 - DNA, 25 bp, Homo sapien
ctgtgaccatgacggtgcgaatgtt

SEQ ID NO: 4399814 - DNA, 25 bp, Homo sapien
gaccatgacggtgcgaatgttggct

SEQ ID NO: 4399815 - DNA, 25 bp, Homo sapien
ccaaggtaggtctgtatcagttaca

SEQ ID NO: 4399816 - DNA, 25 bp, Homo sapien
tagtagttatatccaaccactgggc

SEQ ID NO: 4399817 - DNA, 25 bp, Homo sapien
caaaaatgctatcctccaaggtagg

SEQ ID NO: 4399818 - DNA, 25 bp, Homo sapien
ccactgggcaaaagtgagaagatca

SEQ ID NO: 4399819 - DNA, 25 bp, Homo sapien
actccaattttctgtgtgcaagagc

SEQ ID NO: 4399820 - DNA, 25 bp, Homo sapien
tgcaagagcaatcacacggaagccc

SEQ ID NO: 4399821 - DNA, 25 bp, Homo sapien
gaagccctgtttagtgaagtcttcc

SEQ ID NO: 4399822 - DNA, 25 bp, Homo sapien
actttatgccatgtcagttttgact

SEQ ID NO: 4399823 - DNA, 25 bp, Homo sapien
ggcctcgggcgctcctttcatgtag

SEQ ID NO: 4399824 - DNA, 25 bp, Homo sapien
ggtttacagagaccggcaatggcct

SEQ ID NO: 4399825 - DNA, 25 bp, Homo sapien
gaaaatgggaactggcgaacaattc

SEQ ID NO: 4399826 - DNA, 25 bp, Homo sapien
ccacactcatacgttgcaaagcaga

SEQ ID NO: 4399827 - DNA, 25 bp, Homo sapien
gcagttgtttgggaggacgaaccac

SEQ ID NO: 4399828 - DNA, 25 bp, Homo sapien
tagattcaggaagcagttgtttggg

SEQ ID NO: 4399829 - DNA, 25 bp, Homo sapien
gacgaaccactgtgggcataattcg

SEQ ID NO: 4399830 - DNA, 25 bp, Homo sapien
cataattcgattatgaagtgctgtt

SEQ ID NO: 4399831 - DNA, 25 bp, Homo sapien
gagagcactccttcaatttttgtaa

SEQ ID NO: 4399832 - DNA, 25 bp, Homo sapien
gtaagtgaatgacaagtagccatac

SEQ ID NO: 4399833 - DNA, 25 bp, Homo sapien
gtagccatacaagcaacaaactggg

SEQ ID NO: 4399834 - DNA, 25 bp, Homo sapien
aaactgggattttaccaacatctca

SEQ ID NO: 4399835 - DNA, 25 bp, Homo sapien
cattcaatggaataagacagagcag

SEQ ID NO: 4399836 - DNA, 25 bp, Homo sapien
gcataaagctgaagccgtgcccatg

SEQ ID NO: 4399837 - DNA, 25 bp, Homo sapien
aaacagaattgtcccttagtagaag

SEQ ID NO: 4399838 - DNA, 25 bp, Homo sapien
aaaagatctttacccactgagagag

SEQ ID NO: 4399839 - DNA, 25 bp, Homo sapien
aaccatcttcagttagagttccagt

SEQ ID NO: 4399840 - DNA, 25 bp, Homo sapien
ccccaaagatctaaaccatcttcag

SEQ ID NO: 4399841 - DNA, 25 bp, Homo sapien
cattttccactcgttgaatccccca

SEQ ID NO: 4399842 - DNA, 25 bp, Homo sapien
gatctaaaccatcttcagttagagt

SEQ ID NO: 4399843 - DNA, 25 bp, Homo sapien
gattgagctgtccacaaatatttat

SEQ ID NO: 4399844 - DNA, 25 bp, Homo sapien
ttgtgataatatcaagagactcgat

SEQ ID NO: 4399845 - DNA, 25 bp, Homo sapien
acaataccagcagtcattgcagcag

SEQ ID NO: 4399846 - DNA, 25 bp, Homo sapien
gtcttctctgagcatacacaatacc

SEQ ID NO: 4399847 - DNA, 25 bp, Homo sapien
gcaactgccacaagacatagtagaa

SEQ ID NO: 4399848 - DNA, 25 bp, Homo sapien
tagtgtagataaacccaatgccagc

SEQ ID NO: 4399849 - DNA, 25 bp, Homo sapien
cagttggtttgggatacaatatgga

SEQ ID NO: 4399850 - DNA, 25 bp, Homo sapien
tagtagaaacaagtaggcatctctg

SEQ ID NO: 4399851 - DNA, 25 bp, Homo sapien
gcaaattagtctttgtcactggaac

SEQ ID NO: 4399852 - DNA, 25 bp, Homo sapien
tatggctttgacgagttctccagtg

SEQ ID NO: 4399853 - DNA, 25 bp, Homo sapien
ttctccagtgtagaaacgagtctga

SEQ ID NO: 4399854 - DNA, 25 bp, Homo sapien
tttcacatccactgaaggatttggc

SEQ ID NO: 4399855 - DNA, 25 bp, Homo sapien
aacatgctttcgtttacaatgcagg

SEQ ID NO: 4399856 - DNA, 25 bp, Homo sapien
caatgcaggtaccattaataagcac

SEQ ID NO: 4399857 - DNA, 25 bp, Homo sapien
tctcctggcacaaggtcggtagaaa

SEQ ID NO: 4399858 - DNA, 25 bp, Homo sapien
gcatcacaaggcattattgtcccat

SEQ ID NO: 4399859 - DNA, 25 bp, Homo sapien
tgatgccaagtaccctctgacgaag

SEQ ID NO: 4399860 - DNA, 25 bp, Homo sapien
tcaagttgaatggtatgtctgccct

SEQ ID NO: 4399861 - DNA, 25 bp, Homo sapien
tattaggctaacaaagcacggtgtg

SEQ ID NO: 4399862 - DNA, 25 bp, Homo sapien
taaaccagtctgaatgtggacgcca

SEQ ID NO: 4399863 - DNA, 25 bp, Homo sapien
tgttatctctacaccgaatccccag

SEQ ID NO: 4399864 - DNA, 25 bp, Homo sapien
ggctgacttctccttatcatagcat

SEQ ID NO: 4399865 - DNA, 25 bp, Homo sapien
gaagtcatccctgatacctacagta

SEQ ID NO: 4399866 - DNA, 25 bp, Homo sapien
tgagctcccctaatacataagttgg

SEQ ID NO: 4399867 - DNA, 25 bp, Homo sapien
aactgaaactcttacggtactatga

SEQ ID NO: 4399868 - DNA, 25 bp, Homo sapien
ctatgagttgccaccatgtcatgca

SEQ ID NO: 4399869 - DNA, 25 bp, Homo sapien
catttactctacaaactgaaactct

SEQ ID NO: 4399870 - DNA, 25 bp, Homo sapien
ccatgtcatgcaacataacatattg

SEQ ID NO: 4399871 - DNA, 25 bp, Homo sapien
tttctaatggaatatagtgagctta

SEQ ID NO: 4399872 - DNA, 25 bp, Homo sapien
ctttctaatggaatatagtgagctt

SEQ ID NO: 4399873 - DNA, 25 bp, Homo sapien
ttctaatggaatatagtgagcttac

SEQ ID NO: 4399874 - DNA, 25 bp, Homo sapien
agtaatagtattcatcagtgctcca

SEQ ID NO: 4399875 - DNA, 25 bp, Homo sapien
ccacaatagctagagcatagtaata

SEQ ID NO: 4399876 - DNA, 25 bp, Homo sapien
gattgatactatggacataaccaca

SEQ ID NO: 4399877 - DNA, 25 bp, Homo sapien
gatactatggacataaccacaatag

SEQ ID NO: 4399878 - DNA, 25 bp, Homo sapien
cagagctagttactgatggaactac

SEQ ID NO: 4399879 - DNA, 25 bp, Homo sapien
gagcaacagagagaatgtactaaag

SEQ ID NO: 4399880 - DNA, 25 bp, Homo sapien
taaaatcaggtcttccaattcctaa

SEQ ID NO: 4399881 - DNA, 25 bp, Homo sapien
gagttaatgggttatgttactttgc

SEQ ID NO: 4399882 - DNA, 25 bp, Homo sapien
agcaatttcatttactccataaagc

SEQ ID NO: 4399883 - DNA, 25 bp, Homo sapien
gcaatttcatttactccataaagca

SEQ ID NO: 4399884 - DNA, 25 bp, Homo sapien
cagaaggcacttttacagcaatttc

SEQ ID NO: 4399885 - DNA, 25 bp, Homo sapien
cagcaatttcatttactccataaag

SEQ ID NO: 4399886 - DNA, 25 bp, Homo sapien
gaacgacacttcaccaactctatga

SEQ ID NO: 4399887 - DNA, 25 bp, Homo sapien
taatttcagggataccaacttcaaa

SEQ ID NO: 4399888 - DNA, 25 bp, Homo sapien
tctaaggtgctatcaattgtaaggc

SEQ ID NO: 4399889 - DNA, 25 bp, Homo sapien
ctttaacatacgcaatacactggtg

SEQ ID NO: 4399890 - DNA, 25 bp, Homo sapien
cataaattgacgtacaagaaacacc

SEQ ID NO: 4399891 - DNA, 25 bp, Homo sapien
ttgtcagtcctgcactatgcttttc

SEQ ID NO: 4399892 - DNA, 25 bp, Homo sapien
tcagtcctgcactatgcttttcata

SEQ ID NO: 4399893 - DNA, 25 bp, Homo sapien
gcttttcataaattgacgtacaaga

SEQ ID NO: 4399894 - DNA, 25 bp, Homo sapien
ctttccacataggaaagctaagctt

SEQ ID NO: 4399895 - DNA, 25 bp, Homo sapien
tctatggctggcaaaagacacacag

SEQ ID NO: 4399896 - DNA, 25 bp, Homo sapien
cacttcaatcaatggagtaagttta

SEQ ID NO: 4399897 - DNA, 25 bp, Homo sapien
gagataccagctataactctaaagc

SEQ ID NO: 4399898 - DNA, 25 bp, Homo sapien
gcactctaaagcaacgatattaatg

SEQ ID NO: 4399899 - DNA, 25 bp, Homo sapien
tctaaagcaacgatattaatgagta

SEQ ID NO: 4399900 - DNA, 25 bp, Homo sapien
tccagaatgttccaattcattagtg

SEQ ID NO: 4399901 - DNA, 25 bp, Homo sapien
caatagttcttaatcaggaatggtt

SEQ ID NO: 4399902 - DNA, 25 bp, Homo sapien
gaactcagactcagtagactttggc

SEQ ID NO: 4399903 - DNA, 25 bp, Homo sapien
gactttggcatcatactgactctaa

SEQ ID NO: 4399904 - DNA, 25 bp, Homo sapien
taaaggaattactacagcttgcccc

SEQ ID NO: 4399905 - DNA, 25 bp, Homo sapien
tcaagtaccacaggctttaagtgtc

SEQ ID NO: 4399906 - DNA, 25 bp, Homo sapien
atattttacactatggtgggtgaaa

SEQ ID NO: 4399907 - DNA, 25 bp, Homo sapien
ttttacactatggtgggtgaaataa

SEQ ID NO: 4399908 - DNA, 25 bp, Homo sapien
tttacactatggtgggtgaaataac

SEQ ID NO: 4399909 - DNA, 25 bp, Homo sapien
tattttacactatggtgggtgaaat

SEQ ID NO: 4399910 - DNA, 25 bp, Homo sapien
gaaagaacgcgaatttttgcacaaa

SEQ ID NO: 4399911 - DNA, 25 bp, Homo sapien
aactgcatggccatttgaaagctta

SEQ ID NO: 4399912 - DNA, 25 bp, Homo sapien
tgtgaatatttactgatcctgtgcc

SEQ ID NO: 4399913 - DNA, 25 bp, Homo sapien
catagattttggacttgaaactggg

SEQ ID NO: 4399914 - DNA, 25 bp, Homo sapien
tggaccagcaccgtaacagacaagt

SEQ ID NO: 4399915 - DNA, 25 bp, Homo sapien
ttttatccaggcagcgatgttccct

SEQ ID NO: 4399916 - DNA, 25 bp, Homo sapien
ggactacagtcctaatggaccagca

SEQ ID NO: 4399917 - DNA, 25 bp, Homo sapien
gcagctggcctagtgaccgagatct

SEQ ID NO: 4399918 - DNA, 25 bp, Homo sapien
gcagctctgacacaggtcgctttca

SEQ ID NO: 4399919 - DNA, 25 bp, Homo sapien
caggtcgctttcacccgccactcag

SEQ ID NO: 4399920 - DNA, 25 bp, Homo sapien
aggtcgctttcacccgccactcagg

SEQ ID NO: 4399921 - DNA, 25 bp, Homo sapien
attgcagctctgacacaggtcgctt

SEQ ID NO: 4399922 - DNA, 25 bp, Homo sapien
aaactatggcaagcttccagcgact

SEQ ID NO: 4399923 - DNA, 25 bp, Homo sapien
ggaggagaaacccaccagagcaaat

SEQ ID NO: 4399924 - DNA, 25 bp, Homo sapien
aatcactcctaaagaaactatggca

SEQ ID NO: 4399925 - DNA, 25 bp, Homo sapien
gcgactcaaattgtaaccataaatc

SEQ ID NO: 4399926 - DNA, 25 bp, Homo sapien
atttcatcttcttgaccctgattga

SEQ ID NO: 4399927 - DNA, 25 bp, Homo sapien
gaccctgattgatggtcttcctttc

SEQ ID NO: 4399928 - DNA, 25 bp, Homo sapien
ttgaccctgattgatggtcttcctt

SEQ ID NO: 4399929 - DNA, 25 bp, Homo sapien
ttcatcttcttgaccctgattgatg

SEQ ID NO: 4399930 - DNA, 25 bp, Homo sapien
gcatctttagatttatgaagtagag

SEQ ID NO: 4399931 - DNA, 25 bp, Homo sapien
tattgcaaggcagaggctaccatta

SEQ ID NO: 4399932 - DNA, 25 bp, Homo sapien
gaggctaccattaacggtttcttca

SEQ ID NO: 4399933 - DNA, 25 bp, Homo sapien
tgttaacatcatcttgtattgcaag

SEQ ID NO: 4399934 - DNA, 25 bp, Homo sapien
tgacagtgggtatttaaaagcaaaa

SEQ ID NO: 4399935 - DNA, 25 bp, Homo sapien
ggtgacagtgggtatttaaaagcaa

SEQ ID NO: 4399936 - DNA, 25 bp, Homo sapien
gtgacagtgggtatttaaaagcaaa

SEQ ID NO: 4399937 - DNA, 25 bp, Homo sapien
gggtgacagtgggtatttaaaagca

SEQ ID NO: 4399938 - DNA, 25 bp, Homo sapien
aaaccaattcttactccacatgtac

SEQ ID NO: 4399939 - DNA, 25 bp, Homo sapien
ggaatgacacgtaggcagcaccatc

SEQ ID NO: 4399940 - DNA, 25 bp, Homo sapien
aaatttaaggaatgacacgtaggca

SEQ ID NO: 4399941 - DNA, 25 bp, Homo sapien
taaaaaccaattcttactccacatg

SEQ ID NO: 4399942 - DNA, 25 bp, Homo sapien
gcagtgcagctgaataaaggagaca

SEQ ID NO: 4399943 - DNA, 25 bp, Homo sapien
catgtaagatcctacagactctggc

SEQ ID NO: 4399944 - DNA, 25 bp, Homo sapien
tgaagtcttacaacgcacaacatga

SEQ ID NO: 4399945 - DNA, 25 bp, Homo sapien
gtatcagagcacttttccaacaacg

SEQ ID NO: 4399946 - DNA, 25 bp, Homo sapien
caaacaccaagattcagggatgtct

SEQ ID NO: 4399947 - DNA, 25 bp, Homo sapien
aacaccaagattcagggatgtctgt

SEQ ID NO: 4399948 - DNA, 25 bp, Homo sapien
caccaagattcagggatgtctgtca

SEQ ID NO: 4399949 - DNA, 25 bp, Homo sapien
caagattcagggatgtctgtcagat

SEQ ID NO: 4399950 - DNA, 25 bp, Homo sapien
ggagcgcgcgcgggctcaggactcc

SEQ ID NO: 4399951 - DNA, 25 bp, Homo sapien
cgcgcgggctcaggactcccgcgcc

SEQ ID NO: 4399952 - DNA, 25 bp, Homo sapien
aggactcccgcgccggatgtgaggt

SEQ ID NO: 4399953 - DNA, 25 bp, Homo sapien
actcccgcgccggatgtgaggtcac

SEQ ID NO: 4399954 - DNA, 25 bp, Homo sapien
cagccggatttccaaatcgcgggtt

SEQ ID NO: 4399955 - DNA, 25 bp, Homo sapien
gattttcgctgcgtcctctccgcga

SEQ ID NO: 4399956 - DNA, 25 bp, Homo sapien
caaattaaatacttccctccgcaga

SEQ ID NO: 4399957 - DNA, 25 bp, Homo sapien
tccgaccgtcctggatgcaaattaa

SEQ ID NO: 4399958 - DNA, 25 bp, Homo sapien
aggacggcatgcatgcggaccccgt

SEQ ID NO: 4399959 - DNA, 25 bp, Homo sapien
ttagcgtcttagagaagaggacggc

SEQ ID NO: 4399960 - DNA, 25 bp, Homo sapien
gaactcagccgccttagcgtcttag

SEQ ID NO: 4399961 - DNA, 25 bp, Homo sapien
ttagagaagaggacggcatgcatgc

SEQ ID NO: 4399962 - DNA, 25 bp, Homo sapien
tagtccctggacacttaccagggcc

SEQ ID NO: 4399963 - DNA, 25 bp, Homo sapien
tgatgacatctcaccaggggcagca

SEQ ID NO: 4399964 - DNA, 25 bp, Homo sapien
cctggtccacgcacgtgatgacatc

SEQ ID NO: 4399965 - DNA, 25 bp, Homo sapien
gagtccgcgacactgataacacctc

SEQ ID NO: 4399966 - DNA, 25 bp, Homo sapien
gactagcctgatgcacgtggagaaa

SEQ ID NO: 4399967 - DNA, 25 bp, Homo sapien
actggaaggatcataggtggcactc

SEQ ID NO: 4399968 - DNA, 25 bp, Homo sapien
tatgtatctagaccggacatggtgc

SEQ ID NO: 4399969 - DNA, 25 bp, Homo sapien
tagcattctcaagcacaaggcgtca

SEQ ID NO: 4399970 - DNA, 25 bp, Homo sapien
tatggaatcctgttaatatagtccc

SEQ ID NO: 4399971 - DNA, 25 bp, Homo sapien
aaacattgtccttcccgtcaacata

SEQ ID NO: 4399972 - DNA, 25 bp, Homo sapien
tatccatatggaacttacttctaca

SEQ ID NO: 4399973 - DNA, 25 bp, Homo sapien
gaatatttccctcatagctttaatc

SEQ ID NO: 4399974 - DNA, 25 bp, Homo sapien
aagaactacagaactctcgagagaa

SEQ ID NO: 4399975 - DNA, 25 bp, Homo sapien
ttgcacacaggtcatcggagcctta

SEQ ID NO: 4399976 - DNA, 25 bp, Homo sapien
tggctgttcaacctcaaactggcgt

SEQ ID NO: 4399977 - DNA, 25 bp, Homo sapien
ggagagttctcgtgcataagtgcct

SEQ ID NO: 4399978 - DNA, 25 bp, Homo sapien
tacttctgcgaggacatctgccaaa

SEQ ID NO: 4399979 - DNA, 25 bp, Homo sapien
aagagccaggctattagcactatcc

SEQ ID NO: 4399980 - DNA, 25 bp, Homo sapien
tacagtgatcaggtgaaactggaga

SEQ ID NO: 4399981 - DNA, 25 bp, Homo sapien
agcttaatttcactgactaaaaact

SEQ ID NO: 4399982 - DNA, 25 bp, Homo sapien
ttcaagtgctatacagtgatcaggt

SEQ ID NO: 4399983 - DNA, 25 bp, Homo sapien
agattgggaatcttgagaaactaaa

SEQ ID NO: 4399984 - DNA, 25 bp, Homo sapien
aaagattgggaatcttgagaaacta

SEQ ID NO: 4399985 - DNA, 25 bp, Homo sapien
gattgggaatcttgagaaactaaaa

SEQ ID NO: 4399986 - DNA, 25 bp, Homo sapien
attgggaatcttgagaaactaaaag

SEQ ID NO: 4399987 - DNA, 25 bp, Homo sapien
ctagttccctctggatgtcagccat

SEQ ID NO: 4399988 - DNA, 25 bp, Homo sapien
ccctagttccctctggatgtcagcc

SEQ ID NO: 4399989 - DNA, 25 bp, Homo sapien
cctagttccctctggatgtcagcca

SEQ ID NO: 4399990 - DNA, 25 bp, Homo sapien
gggaccatgctaattttctgtctca

SEQ ID NO: 4399991 - DNA, 25 bp, Homo sapien
aatatggaacccttgcaaatttgca

SEQ ID NO: 4399992 - DNA, 25 bp, Homo sapien
aaaatatggaacccttgcaaatttg

SEQ ID NO: 4399993 - DNA, 25 bp, Homo sapien
tgtcatccttgcgcagggaccatgc

SEQ ID NO: 4399994 - DNA, 25 bp, Homo sapien
catccaaatgcttggcataaactgc

SEQ ID NO: 4399995 - DNA, 25 bp, Homo sapien
gaagactgttgctgcatccaaatgc

SEQ ID NO: 4399996 - DNA, 25 bp, Homo sapien
ttgctgcatccaaatgcttggcata

SEQ ID NO: 4399997 - DNA, 25 bp, Homo sapien
cacctcccaagaagactgttgctgc

SEQ ID NO: 4399998 - DNA, 25 bp, Homo sapien
taacccgatattgttggaggacaaa

SEQ ID NO: 4399999 - DNA, 25 bp, Homo sapien
gaaagatgctctgggtaacccgata

SEQ ID NO: 4400000 - DNA, 25 bp, Homo sapien
gatgctctgggtaacccgatattgt

SEQ ID NO: 4400001 - DNA, 25 bp, Homo sapien
tctgggtaacccgatattgttggag

SEQ ID NO: 4400002 - DNA, 25 bp, Homo sapien
ccagtataccacagggtccaggcca

SEQ ID NO: 4400003 - DNA, 25 bp, Homo sapien
tcactgccagtataccacagggtcc

SEQ ID NO: 4400004 - DNA, 25 bp, Homo sapien
tttcactgccagtataccacagggt

SEQ ID NO: 4400005 - DNA, 25 bp, Homo sapien
actgccagtataccacagggtccag

SEQ ID NO: 4400006 - DNA, 25 bp, Homo sapien
cattggtgacggagtagcagttgcc

SEQ ID NO: 4400007 - DNA, 25 bp, Homo sapien
tggtctctcactgtacgtgtaaggg

SEQ ID NO: 4400008 - DNA, 25 bp, Homo sapien
tcactagtgagtatcaggcagctgt

SEQ ID NO: 4400009 - DNA, 25 bp, Homo sapien
tggtgaactgccgaagccccgaagt

SEQ ID NO: 4400010 - DNA, 25 bp, Homo sapien
caccaatggcccctttatattcttt

SEQ ID NO: 4400011 - DNA, 25 bp, Homo sapien
tgaggtcttcccctggagcatggca

SEQ ID NO: 4400012 - DNA, 25 bp, Homo sapien
tcttcccctggagcatggcagcttc

SEQ ID NO: 4400013 - DNA, 25 bp, Homo sapien
cagcaccaatggcccctttatattc

SEQ ID NO: 4400014 - DNA, 25 bp, Homo sapien
acattgatgtcatggagctccctcc

SEQ ID NO: 4400015 - DNA, 25 bp, Homo sapien
aaaagatacatatatacctttagaa

SEQ ID NO: 4400016 - DNA, 25 bp, Homo sapien
tatacctttagaattagcaagctgg

SEQ ID NO: 4400017 - DNA, 25 bp, Homo sapien
atacctttagaattagcaagctgga

SEQ ID NO: 4400018 - DNA, 25 bp, Homo sapien
gtcatggaactccttcatagcctgt

SEQ ID NO: 4400019 - DNA, 25 bp, Homo sapien
gtgtgttgccttctgtcttcatggc

SEQ ID NO: 4400020 - DNA, 25 bp, Homo sapien
catggaactccttcatagcctgttc

SEQ ID NO: 4400021 - DNA, 25 bp, Homo sapien
aagtgtgttgccttctgtcttcatg

SEQ ID NO: 4400022 - DNA, 25 bp, Homo sapien
ggaatgggcaggtgcgatggaggct

SEQ ID NO: 4400023 - DNA, 25 bp, Homo sapien
gcaggtgcgatggaggctttgtcct

SEQ ID NO: 4400024 - DNA, 25 bp, Homo sapien
cagatgtggatgactggtctctggg

SEQ ID NO: 4400025 - DNA, 25 bp, Homo sapien
accagatgtggatgactggtctctg

SEQ ID NO: 4400026 - DNA, 25 bp, Homo sapien
tggcccttaaagtcttcactttggc

SEQ ID NO: 4400027 - DNA, 25 bp, Homo sapien
ccttaaagtcttcactttggctttg

SEQ ID NO: 4400028 - DNA, 25 bp, Homo sapien
agcttccttcttcgccttgagtgcc

SEQ ID NO: 4400029 - DNA, 25 bp, Homo sapien
gccttcttggcccttaaagtcttca

SEQ ID NO: 4400030 - DNA, 25 bp, Homo sapien
tctagggaccctatcttatcgtggg

SEQ ID NO: 4400031 - DNA, 25 bp, Homo sapien
caggcaagacttcggtcactgcggc

SEQ ID NO: 4400032 - DNA, 25 bp, Homo sapien
cagataccctggagggacgaaacga

SEQ ID NO: 4400033 - DNA, 25 bp, Homo sapien
caaatcccctggtgaccgagcagat

SEQ ID NO: 4400034 - DNA, 25 bp, Homo sapien
cgttatctcacggtcatatgcatgg

SEQ ID NO: 4400035 - DNA, 25 bp, Homo sapien
gttgaaaatcactgcgttatctcac

SEQ ID NO: 4400036 - DNA, 25 bp, Homo sapien
tcagaatacatgaagagtggggcca

SEQ ID NO: 4400037 - DNA, 25 bp, Homo sapien
tctcacggtcatatgcatggcccca

SEQ ID NO: 4400038 - DNA, 25 bp, Homo sapien
taattcgtttgtcctacaaagacag

SEQ ID NO: 4400039 - DNA, 25 bp, Homo sapien
ctaatctcttggctaattcgtttgt

SEQ ID NO: 4400040 - DNA, 25 bp, Homo sapien
gctaattcgtttgtcctacaaagac

SEQ ID NO: 4400041 - DNA, 25 bp, Homo sapien
tcttggctaattcgtttgtcctaca

SEQ ID NO: 4400042 - DNA, 25 bp, Homo sapien
tactctgacccatgggacagccggt

SEQ ID NO: 4400043 - DNA, 25 bp, Homo sapien
gaaaggtgatttaatgccaacccca

SEQ ID NO: 4400044 - DNA, 25 bp, Homo sapien
gccttggacatagtaacccctcagg

SEQ ID NO: 4400045 - DNA, 25 bp, Homo sapien
ccttgcagacaagggctgggagtta

SEQ ID NO: 4400046 - DNA, 25 bp, Homo sapien
cgtgtatgacgtcccttgttccagc

SEQ ID NO: 4400047 - DNA, 25 bp, Homo sapien
tggtggccgccgtgtatgacgtccc

SEQ ID NO: 4400048 - DNA, 25 bp, Homo sapien
ggtttagagaatccctcagatttcc

SEQ ID NO: 4400049 - DNA, 25 bp, Homo sapien
tagcagaaggtaaggcccatgaaat

SEQ ID NO: 4400050 - DNA, 25 bp, Homo sapien
aaggctccagtgttctagagctttg

SEQ ID NO: 4400051 - DNA, 25 bp, Homo sapien
caatgaagccaaacctcgcttccaa

SEQ ID NO: 4400052 - DNA, 25 bp, Homo sapien
ctcgcttccaaaattcccagtttgg

SEQ ID NO: 4400053 - DNA, 25 bp, Homo sapien
aagattctcgttgaacaatgaagcc

SEQ ID NO: 4400054 - DNA, 25 bp, Homo sapien
ctgtggatgaagaggccggagacac

SEQ ID NO: 4400055 - DNA, 25 bp, Homo sapien
tgtggatgaagaggccggagacacc

SEQ ID NO: 4400056 - DNA, 25 bp, Homo sapien
ctacagcccatactacatcatccat

SEQ ID NO: 4400057 - DNA, 25 bp, Homo sapien
gccacccctacagcccatactacat

SEQ ID NO: 4400058 - DNA, 25 bp, Homo sapien
cagcctccagtctggttccttttca

SEQ ID NO: 4400059 - DNA, 25 bp, Homo sapien
agcctccagtctggttccttttcag

SEQ ID NO: 4400060 - DNA, 25 bp, Homo sapien
ggccagcccggagcaaaactgtgtt

SEQ ID NO: 4400061 - DNA, 25 bp, Homo sapien
gattaggatctatgcagagacctgc

SEQ ID NO: 4400062 - DNA, 25 bp, Homo sapien
tctcgtggccgacgtcattctgtga

SEQ ID NO: 4400063 - DNA, 25 bp, Homo sapien
cagggattcatgctcgccattgcac

SEQ ID NO: 4400064 - DNA, 25 bp, Homo sapien
tgatcttcagaacgaatgctgggcc

SEQ ID NO: 4400065 - DNA, 25 bp, Homo sapien
tacccaaagtcgtagctccgtgatg

SEQ ID NO: 4400066 - DNA, 25 bp, Homo sapien
tcacaagcacttggttggccacaca

SEQ ID NO: 4400067 - DNA, 25 bp, Homo sapien
tctcggttcctgtgtgtgacccaag

SEQ ID NO: 4400068 - DNA, 25 bp, Homo sapien
aatcatcatcactcaggtgtgctgt

SEQ ID NO: 4400069 - DNA, 25 bp, Homo sapien
tcatcatcactcaggtgtgctgtcc

SEQ ID NO: 4400070 - DNA, 25 bp, Homo sapien
taatcatcatcactcaggtgtgctg

SEQ ID NO: 4400071 - DNA, 25 bp, Homo sapien
ttaatcatcatcactcaggtgtgct

SEQ ID NO: 4400072 - DNA, 25 bp, Homo sapien
ggatcccagtagctccacattttct

SEQ ID NO: 4400073 - DNA, 25 bp, Homo sapien
gagtcctggtgcacctgggatccca

SEQ ID NO: 4400074 - DNA, 25 bp, Homo sapien
acctgggatcccagtagctccacat

SEQ ID NO: 4400075 - DNA, 25 bp, Homo sapien
cacattttctttgctgccttcgagg

SEQ ID NO: 4400076 - DNA, 25 bp, Homo sapien
gacagccctggcgtttatgcggaca

SEQ ID NO: 4400077 - DNA, 25 bp, Homo sapien
tcacttaaaacccaattcagagcgg

SEQ ID NO: 4400078 - DNA, 25 bp, Homo sapien
tgtctcaggtagatgatgggctcca

SEQ ID NO: 4400079 - DNA, 25 bp, Homo sapien
gctccacgggaacagagcaaacgtt

SEQ ID NO: 4400080 - DNA, 25 bp, Homo sapien
caatccttagaggttccagcgaaga

SEQ ID NO: 4400081 - DNA, 25 bp, Homo sapien
tctccctgagccattgacacaatgg

SEQ ID NO: 4400082 - DNA, 25 bp, Homo sapien
gcgaagatcttgaagtctccctgag

SEQ ID NO: 4400083 - DNA, 25 bp, Homo sapien
actgaagctgaatcgaacattccaa

SEQ ID NO: 4400084 - DNA, 25 bp, Homo sapien
tgagaacatcgcattaacttgcggt

SEQ ID NO: 4400085 - DNA, 25 bp, Homo sapien
tccagtgagaacatcgcattaactt

SEQ ID NO: 4400086 - DNA, 25 bp, Homo sapien
tcgcattaacttgcggtcgcagacc

SEQ ID NO: 4400087 - DNA, 25 bp, Homo sapien
gaacatcgcattaacttgcggtcgc

SEQ ID NO: 4400088 - DNA, 25 bp, Homo sapien
tagatcattgttctcacagcgtgtg

SEQ ID NO: 4400089 - DNA, 25 bp, Homo sapien
tgaaaacggtttctaagctgaggcc

SEQ ID NO: 4400090 - DNA, 25 bp, Homo sapien
gctgaggcctgagacctagatcatt

SEQ ID NO: 4400091 - DNA, 25 bp, Homo sapien
gaccccaaataaaagagctcaccag

SEQ ID NO: 4400092 - DNA, 25 bp, Homo sapien
caggaactgaaatcaagccatagga

SEQ ID NO: 4400093 - DNA, 25 bp, Homo sapien
gaaggaatttgtcatgggtctagcc

SEQ ID NO: 4400094 - DNA, 25 bp, Homo sapien
cataggaagtccctcctggaagaga

SEQ ID NO: 4400095 - DNA, 25 bp, Homo sapien
atctaacaaggtctaacaaaaacag

SEQ ID NO: 4400096 - DNA, 25 bp, Homo sapien
ctgctccgagtttagggcctcccaa

SEQ ID NO: 4400097 - DNA, 25 bp, Homo sapien
agtttagggcctcccaatacttctg

SEQ ID NO: 4400098 - DNA, 25 bp, Homo sapien
gctccgagtttagggcctcccaata

SEQ ID NO: 4400099 - DNA, 25 bp, Homo sapien
tgctccgagtttagggcctcccaat

SEQ ID NO: 4400100 - DNA, 25 bp, Homo sapien
gcacccggctgatggtctgtatttc

SEQ ID NO: 4400101 - DNA, 25 bp, Homo sapien
ccggctgatggtctgtatttcttac

SEQ ID NO: 4400102 - DNA, 25 bp, Homo sapien
accgcacccggctgatggtctgtat

SEQ ID NO: 4400103 - DNA, 25 bp, Homo sapien
acccggctgatggtctgtatttctt

SEQ ID NO: 4400104 - DNA, 25 bp, Homo sapien
gacagccctcctcaggatcatgaaa

SEQ ID NO: 4400105 - DNA, 25 bp, Homo sapien
gccctcctcaggatcatgaaaggct

SEQ ID NO: 4400106 - DNA, 25 bp, Homo sapien
ctgacagccctcctcaggatcatga

SEQ ID NO: 4400107 - DNA, 25 bp, Homo sapien
cagccctcctcaggatcatgaaagg

SEQ ID NO: 4400108 - DNA, 25 bp, Homo sapien
ccaggaggaagtaacgaggctctta

SEQ ID NO: 4400109 - DNA, 25 bp, Homo sapien
cctcaagcagggaagcatcgggctg

SEQ ID NO: 4400110 - DNA, 25 bp, Homo sapien
gacctgcaaagacggcacagatggg

SEQ ID NO: 4400111 - DNA, 25 bp, Homo sapien
tccagagtggtttctgcgcagacag

SEQ ID NO: 4400112 - DNA, 25 bp, Homo sapien
ttcggccgcagacgaaccaggatct

SEQ ID NO: 4400113 - DNA, 25 bp, Homo sapien
tcggccgcagacgaaccaggatctt

SEQ ID NO: 4400114 - DNA, 25 bp, Homo sapien
cttcggccgcagacgaaccaggatc

SEQ ID NO: 4400115 - DNA, 25 bp, Homo sapien
ggccgcagacgaaccaggatcttca

SEQ ID NO: 4400116 - DNA, 25 bp, Homo sapien
tcagaggaaggagccgctagcctct

SEQ ID NO: 4400117 - DNA, 25 bp, Homo sapien
agaggaaggagccgctagcctctgg

SEQ ID NO: 4400118 - DNA, 25 bp, Homo sapien
cagaggaaggagccgctagcctctg

SEQ ID NO: 4400119 - DNA, 25 bp, Homo sapien
gaggaaggagccgctagcctctggg

SEQ ID NO: 4400120 - DNA, 25 bp, Homo sapien
tggccccactaacacagcaggatgt

SEQ ID NO: 4400121 - DNA, 25 bp, Homo sapien
cacgacagggcccacttgtgtatgg

SEQ ID NO: 4400122 - DNA, 25 bp, Homo sapien
taaagtttatacaggtgtcagccgt

SEQ ID NO: 4400123 - DNA, 25 bp, Homo sapien
tcagacctgagagttacgcctgtgt

SEQ ID NO: 4400124 - DNA, 25 bp, Homo sapien
acgtggataagatgagaacagctgc

SEQ ID NO: 4400125 - DNA, 25 bp, Homo sapien
tatttagcaggtatgaggttaacgt

SEQ ID NO: 4400126 - DNA, 25 bp, Homo sapien
aagtgtcggcgaacgatggcaccca

SEQ ID NO: 4400127 - DNA, 25 bp, Homo sapien
gccccaaggagcacccagcaagtgt

SEQ ID NO: 4400128 - DNA, 25 bp, Homo sapien
ccgcccagcaggcaacagccgtgta

SEQ ID NO: 4400129 - DNA, 25 bp, Homo sapien
cgcccagcaggcaacagccgtgtac

SEQ ID NO: 4400130 - DNA, 25 bp, Homo sapien
ctccaggtcggagttgatggaggag

SEQ ID NO: 4400131 - DNA, 25 bp, Homo sapien
ccaggtcggagttgatggaggagac

SEQ ID NO: 4400132 - DNA, 25 bp, Homo sapien
tccaggtcggagttgatggaggaga

SEQ ID NO: 4400133 - DNA, 25 bp, Homo sapien
aggagctgccggaagacacccgggc

SEQ ID NO: 4400134 - DNA, 25 bp, Homo sapien
ggagctgccggaagacacccgggcc

SEQ ID NO: 4400135 - DNA, 25 bp, Homo sapien
cagaggagctgccggaagacacccg

SEQ ID NO: 4400136 - DNA, 25 bp, Homo sapien
gaggagctgccggaagacacccggg

SEQ ID NO: 4400137 - DNA, 25 bp, Homo sapien
cctgcagggacgcatctccggcgct

SEQ ID NO: 4400138 - DNA, 25 bp, Homo sapien
cgtctgcccgtcacctggcagcctg

SEQ ID NO: 4400139 - DNA, 25 bp, Homo sapien
agggacgcatctccggcgctcgtct

SEQ ID NO: 4400140 - DNA, 25 bp, Homo sapien
gctcgtctgcccgtcacctggcagc

SEQ ID NO: 4400141 - DNA, 25 bp, Homo sapien
gacttgcagtgtgacagtgtggtga

SEQ ID NO: 4400142 - DNA, 25 bp, Homo sapien
tgctgcacaggctcgatggtcagct

SEQ ID NO: 4400143 - DNA, 25 bp, Homo sapien
tcgatggtcagctccatgtagcgac

SEQ ID NO: 4400144 - DNA, 25 bp, Homo sapien
tccatgtagcgactgattgctgtca

SEQ ID NO: 4400145 - DNA, 25 bp, Homo sapien
ggaattctcaaagtcaggaggcatt

SEQ ID NO: 4400146 - DNA, 25 bp, Homo sapien
gacagaaaggggaattctcaaagtc

SEQ ID NO: 4400147 - DNA, 25 bp, Homo sapien
cttgcaagtagaggcagggagacag

SEQ ID NO: 4400148 - DNA, 25 bp, Homo sapien
gggagacagaaaggggaattctcaa

SEQ ID NO: 4400149 - DNA, 25 bp, Homo sapien
gtccgtccgcagtatcctgctgttt

SEQ ID NO: 4400150 - DNA, 25 bp, Homo sapien
gctttcacacgtccgtccgcagtat

SEQ ID NO: 4400151 - DNA, 25 bp, Homo sapien
tcaagatactgttgctgggaccaga

SEQ ID NO: 4400152 - DNA, 25 bp, Homo sapien
ggacagctgtctgagtcgcctgcag

SEQ ID NO: 4400153 - DNA, 25 bp, Homo sapien
ctgcacaggtcaaaagggcttgggt

SEQ ID NO: 4400154 - DNA, 25 bp, Homo sapien
aggtcaaaagggcttgggtgtcagg

SEQ ID NO: 4400155 - DNA, 25 bp, Homo sapien
gaatattccagctgcctagcgtggc

SEQ ID NO: 4400156 - DNA, 25 bp, Homo sapien
ggcccagcatccaatgtgaccctgt

SEQ ID NO: 4400157 - DNA, 25 bp, Homo sapien
tacagtgacaatacatgcagtgggt

SEQ ID NO: 4400158 - DNA, 25 bp, Homo sapien
atgttcctgtcctcacgagggccca

SEQ ID NO: 4400159 - DNA, 25 bp, Homo sapien
gtaaacgacactgccatgcatcaag

SEQ ID NO: 4400160 - DNA, 25 bp, Homo sapien
aacgacactgccatgcatcaaggga

SEQ ID NO: 4400161 - DNA, 25 bp, Homo sapien
agaaatgtaaacgacactgccatgc

SEQ ID NO: 4400162 - DNA, 25 bp, Homo sapien
cactgccatgcatcaagggacacca

SEQ ID NO: 4400163 - DNA, 25 bp, Homo sapien
actccagcctgggcaacacagcgag

SEQ ID NO: 4400164 - DNA, 25 bp, Homo sapien
aattgcttgaaattgggaggtgaag

SEQ ID NO: 4400165 - DNA, 25 bp, Homo sapien
cctgggcaacacagcgagactccat

SEQ ID NO: 4400166 - DNA, 25 bp, Homo sapien
gttgcagtgagccaagatcacgcca

SEQ ID NO: 4400167 - DNA, 25 bp, Homo sapien
gggagagttccatctagcaagagaa

SEQ ID NO: 4400168 - DNA, 25 bp, Homo sapien
ggggcagtgagaggacgagacacag

SEQ ID NO: 4400169 - DNA, 25 bp, Homo sapien
aggggcagtgagaggacgagacaca

SEQ ID NO: 4400170 - DNA, 25 bp, Homo sapien
ctgggagagttccatctagcaagag

SEQ ID NO: 4400171 - DNA, 25 bp, Homo sapien
gctggtcgtgggccacaatggccga

SEQ ID NO: 4400172 - DNA, 25 bp, Homo sapien
ggtcgtgggccacaatggccgaggc

SEQ ID NO: 4400173 - DNA, 25 bp, Homo sapien
ccgacaggagccgggtccacaggtg

SEQ ID NO: 4400174 - DNA, 25 bp, Homo sapien
ggtgctggtcgtgggccacaatggc

SEQ ID NO: 4400175 - DNA, 25 bp, Homo sapien
gccaatgtccgctgggagaacgtga

SEQ ID NO: 4400176 - DNA, 25 bp, Homo sapien
tgttgagtcgtaatccccagtgtcg

SEQ ID NO: 4400177 - DNA, 25 bp, Homo sapien
ccagcggagtacctttgattgatca

SEQ ID NO: 4400178 - DNA, 25 bp, Homo sapien
gaacctggcttcaacttaactctgg

SEQ ID NO: 4400179 - DNA, 25 bp, Homo sapien
gaactgcacggggaagccctctgtc

SEQ ID NO: 4400180 - DNA, 25 bp, Homo sapien
ctctgtcctcgctcacatgctaacc

SEQ ID NO: 4400181 - DNA, 25 bp, Homo sapien
tcaggatgaactgcacggggaagcc

SEQ ID NO: 4400182 - DNA, 25 bp, Homo sapien
taaccacccaccaccatgttacaga

SEQ ID NO: 4400183 - DNA, 25 bp, Homo sapien
ccactgttctgtcagtgagacagga

SEQ ID NO: 4400184 - DNA, 25 bp, Homo sapien
tctcagagtcgtctgcagaggaaac

SEQ ID NO: 4400185 - DNA, 25 bp, Homo sapien
gagacaggaacagttgtctcagagt

SEQ ID NO: 4400186 - DNA, 25 bp, Homo sapien
gactaaatgggcctatgacttgcca

SEQ ID NO: 4400187 - DNA, 25 bp, Homo sapien
aaaagctgagcccatgtccatgcac

SEQ ID NO: 4400188 - DNA, 25 bp, Homo sapien
gatctacacagaacctcacacctgg

SEQ ID NO: 4400189 - DNA, 25 bp, Homo sapien
gctgcctgtccggtgtcaaatctcc

SEQ ID NO: 4400190 - DNA, 25 bp, Homo sapien
agaacacacgggctttccccgagag

SEQ ID NO: 4400191 - DNA, 25 bp, Homo sapien
agccaaaggcagcaacgctacccag

SEQ ID NO: 4400192 - DNA, 25 bp, Homo sapien
gagaggggggatccgagaagcccag

SEQ ID NO: 4400193 - DNA, 25 bp, Homo sapien
caaaggcagcaacgctacccagcag

SEQ ID NO: 4400194 - DNA, 25 bp, Homo sapien
ggcagcaacgctacccagcaggtag

SEQ ID NO: 4400195 - DNA, 25 bp, Homo sapien
gcaagaacgaacaggtgatccacca

SEQ ID NO: 4400196 - DNA, 25 bp, Homo sapien
gcccatgtgccccaagaaacagcca

SEQ ID NO: 4400197 - DNA, 25 bp, Homo sapien
ctgcaagaacgaacaggtgatccac

SEQ ID NO: 4400198 - DNA, 25 bp, Homo sapien
ccatgtgccccaagaaacagccaaa

SEQ ID NO: 4400199 - DNA, 25 bp, Homo sapien
tgtggcccccggatggtggctgaag

SEQ ID NO: 4400200 - DNA, 25 bp, Homo sapien
ggctcgctagcagcctccgctgtgg

SEQ ID NO: 4400201 - DNA, 25 bp, Homo sapien
cgctgtggcccccggatggtggctg

SEQ ID NO: 4400202 - DNA, 25 bp, Homo sapien
tggcccccggatggtggctgaagcc

SEQ ID NO: 4400203 - DNA, 25 bp, Homo sapien
gaagccagaccttgtcagatcagat

SEQ ID NO: 4400204 - DNA, 25 bp, Homo sapien
aagccagaccttgtcagatcagata

SEQ ID NO: 4400205 - DNA, 25 bp, Homo sapien
agccagaccttgtcagatcagatag

SEQ ID NO: 4400206 - DNA, 25 bp, Homo sapien
ttagacttgaatttggatccacaga

SEQ ID NO: 4400207 - DNA, 25 bp, Homo sapien
aattagacttgaatttggatccaca

SEQ ID NO: 4400208 - DNA, 25 bp, Homo sapien
attagacttgaatttggatccacag

SEQ ID NO: 4400209 - DNA, 25 bp, Homo sapien
cactaagtcaatagctgctaggtag

SEQ ID NO: 4400210 - DNA, 25 bp, Homo sapien
tagctgctaggtaggcaccagtgaa

SEQ ID NO: 4400211 - DNA, 25 bp, Homo sapien
gtcaatagctgctaggtaggcacca

SEQ ID NO: 4400212 - DNA, 25 bp, Homo sapien
ctgctaggtaggcaccagtgaaaac

SEQ ID NO: 4400213 - DNA, 25 bp, Homo sapien
acgcagcacacagtgccgactggtc

SEQ ID NO: 4400214 - DNA, 25 bp, Homo sapien
gagccccgacggtgtcacacagact

SEQ ID NO: 4400215 - DNA, 25 bp, Homo sapien
gcagcacacagtgccgactggtcct

SEQ ID NO: 4400216 - DNA, 25 bp, Homo sapien
tggccagaagagccccgacggtgtc

SEQ ID NO: 4400217 - DNA, 25 bp, Homo sapien
ctgtgcacatctcagatagagaagc

SEQ ID NO: 4400218 - DNA, 25 bp, Homo sapien
cagagcacagttaattgcctgaatt

SEQ ID NO: 4400219 - DNA, 25 bp, Homo sapien
tggcctgtgtccatgttctttaaac

SEQ ID NO: 4400220 - DNA, 25 bp, Homo sapien
ctgcagagcacagttaattgcctga

SEQ ID NO: 4400221 - DNA, 25 bp, Homo sapien
ccaaccactgcagataactgcagag

SEQ ID NO: 4400222 - DNA, 25 bp, Homo sapien
aaatacgttgttgtacatgcctccc

SEQ ID NO: 4400223 - DNA, 25 bp, Homo sapien
atacattgtcgtacatgcctcctga

SEQ ID NO: 4400224 - DNA, 25 bp, Homo sapien
attgtcgtacatgcctcctgaaggg

SEQ ID NO: 4400225 - DNA, 25 bp, Homo sapien
tggagaagatgcacggaagggcagg

SEQ ID NO: 4400226 - DNA, 25 bp, Homo sapien
ggctgtttccatcggcgtcactgat

SEQ ID NO: 4400227 - DNA, 25 bp, Homo sapien
tgaaataatacgctgtcgtacctgc

SEQ ID NO: 4400228 - DNA, 25 bp, Homo sapien
tccatcggcgtcactgatagggccc

SEQ ID NO: 4400229 - DNA, 25 bp, Homo sapien
ggctggctgtttccatcggcgtcac

SEQ ID NO: 4400230 - DNA, 25 bp, Homo sapien
tagggcccctgaaatgatacgctgt

SEQ ID NO: 4400231 - DNA, 25 bp, Homo sapien
tgatagggcccctgaaatgatacgc

SEQ ID NO: 4400232 - DNA, 25 bp, Homo sapien
gatagggcccctgaaatgatacgct

SEQ ID NO: 4400233 - DNA, 25 bp, Homo sapien
tagggcccctgaaataatacgctgt

SEQ ID NO: 4400234 - DNA, 25 bp, Homo sapien
tatgttgtcgtacctgccttccgaa

SEQ ID NO: 4400235 - DNA, 25 bp, Homo sapien
aaatatgttgtcgtacctgccttcc

SEQ ID NO: 4400236 - DNA, 25 bp, Homo sapien
aatatgttgtcgtacctgccttccg

SEQ ID NO: 4400237 - DNA, 25 bp, Homo sapien
tgaaatatgttgtcgtacctgcctt

SEQ ID NO: 4400238 - DNA, 25 bp, Homo sapien
gtcgtacctgcctccttgctacatt

SEQ ID NO: 4400239 - DNA, 25 bp, Homo sapien
gtacctgcctccttgctacatttct

SEQ ID NO: 4400240 - DNA, 25 bp, Homo sapien
tgtcgtacctgcctccttgctacat

SEQ ID NO: 4400241 - DNA, 25 bp, Homo sapien
tcgtacctgcctccttgctacattt

SEQ ID NO: 4400242 - DNA, 25 bp, Homo sapien
tcacactgcgagtcaatggcgaagg

SEQ ID NO: 4400243 - DNA, 25 bp, Homo sapien
tcttagaacttaggctaccgtgggc

SEQ ID NO: 4400244 - DNA, 25 bp, Homo sapien
tattatctccggtcataggaggccc

SEQ ID NO: 4400245 - DNA, 25 bp, Homo sapien
taatgaatgcaacactgggcctaca

SEQ ID NO: 4400246 - DNA, 25 bp, Homo sapien
gcgaagcagcggtccaggtagtccc

SEQ ID NO: 4400247 - DNA, 25 bp, Homo sapien
cgtgggcggcgatccagcaggagga

SEQ ID NO: 4400248 - DNA, 25 bp, Homo sapien
tcccagtcccagagcgcgggcgcgg

SEQ ID NO: 4400249 - DNA, 25 bp, Homo sapien
aggcgcagatccacaggccgaagga

SEQ ID NO: 4400250 - DNA, 25 bp, Homo sapien
cttctctgggttccgttccgccgcg

SEQ ID NO: 4400251 - DNA, 25 bp, Homo sapien
tcgccgcgggcaagccccgagcgcc

SEQ ID NO: 4400252 - DNA, 25 bp, Homo sapien
gcgcctccggccgagcgcaccgacc

SEQ ID NO: 4400253 - DNA, 25 bp, Homo sapien
cgcagcctccctcgccgcgggcaag

SEQ ID NO: 4400254 - DNA, 25 bp, Homo sapien
tattgtcgggggtcggcagggcgga

SEQ ID NO: 4400255 - DNA, 25 bp, Homo sapien
ctccccacccctcgcgctattgtcg

SEQ ID NO: 4400256 - DNA, 25 bp, Homo sapien
agctgcgcgcgcacaaagactgcgg

SEQ ID NO: 4400257 - DNA, 25 bp, Homo sapien
gctgcgcgcgcacaaagactgcggc

SEQ ID NO: 4400258 - DNA, 25 bp, Homo sapien
ccctgccggtcgctgtaaggcacgg

SEQ ID NO: 4400259 - DNA, 25 bp, Homo sapien
tcctgagccaacagcaattagttgc

SEQ ID NO: 4400260 - DNA, 25 bp, Homo sapien
caattagttgcgctgctgaagcgca

SEQ ID NO: 4400261 - DNA, 25 bp, Homo sapien
gcacggcgtcccttcctgcgtattg

SEQ ID NO: 4400262 - DNA, 25 bp, Homo sapien
ctgggatcccgaggtgaagggggcg

SEQ ID NO: 4400263 - DNA, 25 bp, Homo sapien
tgatcgccgacagggcgcagtaaaa

SEQ ID NO: 4400264 - DNA, 25 bp, Homo sapien
ctgatcgccgacagggcgcagtaaa

SEQ ID NO: 4400265 - DNA, 25 bp, Homo sapien
tcgccgacagggcgcagtaaaaagg

SEQ ID NO: 4400266 - DNA, 25 bp, Homo sapien
cgacagggcgcagtaaaaagggtgg

SEQ ID NO: 4400267 - DNA, 25 bp, Homo sapien
cacatctgcctctcactctcctttc

SEQ ID NO: 4400268 - DNA, 25 bp, Homo sapien
ccacatctgcctctcactctccttt

SEQ ID NO: 4400269 - DNA, 25 bp, Homo sapien
ttaatggcgtcacccaggtcgatcc

SEQ ID NO: 4400270 - DNA, 25 bp, Homo sapien
cagtggattccctcacagttccgga

SEQ ID NO: 4400271 - DNA, 25 bp, Homo sapien
catggattcatttccggtggccgct

SEQ ID NO: 4400272 - DNA, 25 bp, Homo sapien
tgagtcctttgcttcgagtcccctg

SEQ ID NO: 4400273 - DNA, 25 bp, Homo sapien
tttagactcacatacgcagctgcct

SEQ ID NO: 4400274 - DNA, 25 bp, Homo sapien
gcttgggcgacaaaacaggactctt

SEQ ID NO: 4400275 - DNA, 25 bp, Homo sapien
tcacgtaaagaagcaatgggaggct

SEQ ID NO: 4400276 - DNA, 25 bp, Homo sapien
ggaattttccctccgcattgcagca

SEQ ID NO: 4400277 - DNA, 25 bp, Homo sapien
tcagcgttcggtagcgagggagtcg

SEQ ID NO: 4400278 - DNA, 25 bp, Homo sapien
cggtagcgagggagtcgggacttca

SEQ ID NO: 4400279 - DNA, 25 bp, Homo sapien
ggaggcgagacggtcagcgttcggt

SEQ ID NO: 4400280 - DNA, 25 bp, Homo sapien
gagacggtcagcgttcggtagcgag

SEQ ID NO: 4400281 - DNA, 25 bp, Homo sapien
taaaccgttcgtgaggactctgccc

SEQ ID NO: 4400282 - DNA, 25 bp, Homo sapien
tagagtcggaggaacccaactagga

SEQ ID NO: 4400283 - DNA, 25 bp, Homo sapien
tcttgggacggttccacaggcaaca

SEQ ID NO: 4400284 - DNA, 25 bp, Homo sapien
catgttccttagtggacgtgagccc

SEQ ID NO: 4400285 - DNA, 25 bp, Homo sapien
tctgttgccatgttttttccagggc

SEQ ID NO: 4400286 - DNA, 25 bp, Homo sapien
tctcagagctcgcagtggatgcagt

SEQ ID NO: 4400287 - DNA, 25 bp, Homo sapien
acagcctggactcctttggtcaaag

SEQ ID NO: 4400288 - DNA, 25 bp, Homo sapien
tatccaggtgcttgtagagtctacg

SEQ ID NO: 4400289 - DNA, 25 bp, Homo sapien
tgtcagcaggctatcctttaaggga

SEQ ID NO: 4400290 - DNA, 25 bp, Homo sapien
tcagtcactgggtgaacttccgccc

SEQ ID NO: 4400291 - DNA, 25 bp, Homo sapien
cattccctcgtcaactttgtttagt

SEQ ID NO: 4400292 - DNA, 25 bp, Homo sapien
tgcacagtactattagtggatcact

SEQ ID NO: 4400293 - DNA, 25 bp, Homo sapien
tatgattccagtcacgtgaagtctc

SEQ ID NO: 4400294 - DNA, 25 bp, Homo sapien
tgaatgtttaagataccacgctaaa

SEQ ID NO: 4400295 - DNA, 25 bp, Homo sapien
ctgctaataaataaggtttcggccg

SEQ ID NO: 4400296 - DNA, 25 bp, Homo sapien
gcctgtcacgaagagcacacagtat

SEQ ID NO: 4400297 - DNA, 25 bp, Homo sapien
gaggatggcagtacagcagcttacc

SEQ ID NO: 4400298 - DNA, 25 bp, Homo sapien
tggtgttgatgctgaaaagttacag

SEQ ID NO: 4400299 - DNA, 25 bp, Homo sapien
tttgttctctaggagtcgctggtgt

SEQ ID NO: 4400300 - DNA, 25 bp, Homo sapien
tgtcaacgatattttcaatctgctt

SEQ ID NO: 4400301 - DNA, 25 bp, Homo sapien
gtctggctgtccatgcgctgtcatg

SEQ ID NO: 4400302 - DNA, 25 bp, Homo sapien
tgtagcgcgcagatcgaggctggtc

SEQ ID NO: 4400303 - DNA, 25 bp, Homo sapien
tgcgctgtcatgaatcctcgcatgt

SEQ ID NO: 4400304 - DNA, 25 bp, Homo sapien
catagtccttcaggatgtagcgcgc

SEQ ID NO: 4400305 - DNA, 25 bp, Homo sapien
tggagagaaaagaattttgcaaaat

SEQ ID NO: 4400306 - DNA, 25 bp, Homo sapien
gtggagagaaaagaattttgcaaaa

SEQ ID NO: 4400307 - DNA, 25 bp, Homo sapien
tgtggagagaaaagaattttgcaaa

SEQ ID NO: 4400308 - DNA, 25 bp, Homo sapien
ctgtggagagaaaagaattttgcaa

SEQ ID NO: 4400309 - DNA, 25 bp, Homo sapien
gctacctgtaggagaatgctacgct

SEQ ID NO: 4400310 - DNA, 25 bp, Homo sapien
gctacgctatcaatactacttgcaa

SEQ ID NO: 4400311 - DNA, 25 bp, Homo sapien
aacatttattcatggaggctacctg

SEQ ID NO: 4400312 - DNA, 25 bp, Homo sapien
tattcatggaggctacctgtaggag

SEQ ID NO: 4400313 - DNA, 25 bp, Homo sapien
cagcctacgatgagaacccctgtgc

SEQ ID NO: 4400314 - DNA, 25 bp, Homo sapien
tgcacgtgggtaccatcaaagcagc

SEQ ID NO: 4400315 - DNA, 25 bp, Homo sapien
caagaaatcataggttcccacgtgg

SEQ ID NO: 4400316 - DNA, 25 bp, Homo sapien
ggaaggaggatgctttgtgccccta

SEQ ID NO: 4400317 - DNA, 25 bp, Homo sapien
acagttcttccgatgttggaggtcg

SEQ ID NO: 4400318 - DNA, 25 bp, Homo sapien
gatgttaatgccataggtagcttct

SEQ ID NO: 4400319 - DNA, 25 bp, Homo sapien
cataagctgtcaacagttcttccga

SEQ ID NO: 4400320 - DNA, 25 bp, Homo sapien
tcatcctctctaggcgttatgatgt

SEQ ID NO: 4400321 - DNA, 25 bp, Homo sapien
acttcattccgcgtgtgacaaacac

SEQ ID NO: 4400322 - DNA, 25 bp, Homo sapien
ctcaaagaacatggcacttcattcc

SEQ ID NO: 4400323 - DNA, 25 bp, Homo sapien
gattaatctaaaaagactcagttgt

SEQ ID NO: 4400324 - DNA, 25 bp, Homo sapien
tcctccccatggcatacaaatcgtg

SEQ ID NO: 4400325 - DNA, 25 bp, Homo sapien
gatgcttcgtaaagggcaggagcca

SEQ ID NO: 4400326 - DNA, 25 bp, Homo sapien
ctaaggctacctgcaataaatgatt

SEQ ID NO: 4400327 - DNA, 25 bp, Homo sapien
tctatttatgccctatcctccacag

SEQ ID NO: 4400328 - DNA, 25 bp, Homo sapien
tcatgtgccccaacagactgatgct

SEQ ID NO: 4400329 - DNA, 25 bp, Homo sapien
tggaactgagtatctgaaacctgga

SEQ ID NO: 4400330 - DNA, 25 bp, Homo sapien
atcaaccgtgagatagattttcccc

SEQ ID NO: 4400331 - DNA, 25 bp, Homo sapien
ttcaaggctacactgctgaaatcag

SEQ ID NO: 4400332 - DNA, 25 bp, Homo sapien
ccaaggtcattcaaacggttacatg

SEQ ID NO: 4400333 - DNA, 25 bp, Homo sapien
catgctatctcacagtataaacttg

SEQ ID NO: 4400334 - DNA, 25 bp, Homo sapien
gcagatcactagtattttcaattct

SEQ ID NO: 4400335 - DNA, 25 bp, Homo sapien
ctgaatccctcaaatgcccaaaata

SEQ ID NO: 4400336 - DNA, 25 bp, Homo sapien
cacagtataaacttgtgcagatcac

SEQ ID NO: 4400337 - DNA, 25 bp, Homo sapien
gtaataactagagtgtttccaaagc

SEQ ID NO: 4400338 - DNA, 25 bp, Homo sapien
aataactagagtgtttccaaagcag

SEQ ID NO: 4400339 - DNA, 25 bp, Homo sapien
taactagagtgtttccaaagcagaa

SEQ ID NO: 4400340 - DNA, 25 bp, Homo sapien
aactagagtgtttccaaagcagaaa

SEQ ID NO: 4400341 - DNA, 25 bp, Homo sapien
gaggattccgctgcaagtcatttct

SEQ ID NO: 4400342 - DNA, 25 bp, Homo sapien
tctgccttggtagacacaaaagatg

SEQ ID NO: 4400343 - DNA, 25 bp, Homo sapien
gatcaattgggaggattccgctgca

SEQ ID NO: 4400344 - DNA, 25 bp, Homo sapien
gatctctcatctgatcaattgggag

SEQ ID NO: 4400345 - DNA, 25 bp, Homo sapien
catgatggtgttgattgttgaactc

SEQ ID NO: 4400346 - DNA, 25 bp, Homo sapien
tgtggcagacacagatactttcttg

SEQ ID NO: 4400347 - DNA, 25 bp, Homo sapien
tgttgaactcttaccaacattaggg

SEQ ID NO: 4400348 - DNA, 25 bp, Homo sapien
tcttaccaacattagggtagcccac

SEQ ID NO: 4400349 - DNA, 25 bp, Homo sapien
ccacactgggtgaggctgatcggat

SEQ ID NO: 4400350 - DNA, 25 bp, Homo sapien
gccatctagagccatgtcgtagccc

SEQ ID NO: 4400351 - DNA, 25 bp, Homo sapien
gagacattaagcaactttccccgtg

SEQ ID NO: 4400352 - DNA, 25 bp, Homo sapien
gaattgggaattacacctaggtctg

SEQ ID NO: 4400353 - DNA, 25 bp, Homo sapien
cctaatcccgtgatgccagtgggca

SEQ ID NO: 4400354 - DNA, 25 bp, Homo sapien
tatgttaccaacacaggccttgagg

SEQ ID NO: 4400355 - DNA, 25 bp, Homo sapien
tttgagttgggctctgtctatccca

SEQ ID NO: 4400356 - DNA, 25 bp, Homo sapien
ctacgatgccggaagcctggttggt

SEQ ID NO: 4400357 - DNA, 25 bp, Homo sapien
cagtccgaccgtaagttgcccatct

SEQ ID NO: 4400358 - DNA, 25 bp, Homo sapien
gtaagttgcccatctttcacctttc

SEQ ID NO: 4400359 - DNA, 25 bp, Homo sapien
taaagagctccagtaactcctgctt

SEQ ID NO: 4400360 - DNA, 25 bp, Homo sapien
agagctccagtaactcctgcttgga

SEQ ID NO: 4400361 - DNA, 25 bp, Homo sapien
gcagtcctcttccttgggaccgtct

SEQ ID NO: 4400362 - DNA, 25 bp, Homo sapien
gttttcctgctccgagcctcagaat

SEQ ID NO: 4400363 - DNA, 25 bp, Homo sapien
ccttgggaccgtcttcttctgagca

SEQ ID NO: 4400364 - DNA, 25 bp, Homo sapien
cctggctgcagtcctcttccttggg

SEQ ID NO: 4400365 - DNA, 25 bp, Homo sapien
tcctcctcctctggacagtcctcat

SEQ ID NO: 4400366 - DNA, 25 bp, Homo sapien
cctcctcctctggacagtcctcata

SEQ ID NO: 4400367 - DNA, 25 bp, Homo sapien
tcctcctctggacagtcctcatact

SEQ ID NO: 4400368 - DNA, 25 bp, Homo sapien
ctcctctggacagtcctcatactca

SEQ ID NO: 4400369 - DNA, 25 bp, Homo sapien
ctgtcatcttcatccgttgtgggat

SEQ ID NO: 4400370 - DNA, 25 bp, Homo sapien
ccctagctgggagatgttcggattc

SEQ ID NO: 4400371 - DNA, 25 bp, Homo sapien
taagtgaaggagaatccctagctgg

SEQ ID NO: 4400372 - DNA, 25 bp, Homo sapien
gaatgtccaaacttggttgtgttgc

SEQ ID NO: 4400373 - DNA, 25 bp, Homo sapien
tcagcctggtcgaaactggaatgtc

SEQ ID NO: 4400374 - DNA, 25 bp, Homo sapien
gggattcggttgctcacaggtttaa

SEQ ID NO: 4400375 - DNA, 25 bp, Homo sapien
tcctcagatcaaagggtagggtggc

SEQ ID NO: 4400376 - DNA, 25 bp, Homo sapien
gaaacgagttacctggtctcaagca

SEQ ID NO: 4400377 - DNA, 25 bp, Homo sapien
ccggagctggtgtctatgaggaata

SEQ ID NO: 4400378 - DNA, 25 bp, Homo sapien
gggaatggctccggccaaagctgac

SEQ ID NO: 4400379 - DNA, 25 bp, Homo sapien
cattcaggggaatggctccggccaa

SEQ ID NO: 4400380 - DNA, 25 bp, Homo sapien
caggggaatggctccggccaaagct

SEQ ID NO: 4400381 - DNA, 25 bp, Homo sapien
tcaggggaatggctccggccaaagc

SEQ ID NO: 4400382 - DNA, 25 bp, Homo sapien
ttgttgatcagaatgacgttctcct

SEQ ID NO: 4400383 - DNA, 25 bp, Homo sapien
ttttcgaagtacatggcccaggcac

SEQ ID NO: 4400384 - DNA, 25 bp, Homo sapien
gctgctcagcagtcagcaagtctgc

SEQ ID NO: 4400385 - DNA, 25 bp, Homo sapien
gaatgacgttctccttattggcatc

SEQ ID NO: 4400386 - DNA, 25 bp, Homo sapien
aaacaggagtgggtttcgagcatct

SEQ ID NO: 4400387 - DNA, 25 bp, Homo sapien
ctaaacaggagtgggtttcgagcat

SEQ ID NO: 4400388 - DNA, 25 bp, Homo sapien
caggagtgggtttcgagcatctact

SEQ ID NO: 4400389 - DNA, 25 bp, Homo sapien
acaggagtgggtttcgagcatctac

SEQ ID NO: 4400390 - DNA, 25 bp, Homo sapien
aagtacagcaataagataactttct

SEQ ID NO: 4400391 - DNA, 25 bp, Homo sapien
ggtggcaagcccctcaaatccctca

SEQ ID NO: 4400392 - DNA, 25 bp, Homo sapien
cctcacaaatatagtggggactaca

SEQ ID NO: 4400393 - DNA, 25 bp, Homo sapien
ccatcacgtataagaaagtacagca

SEQ ID NO: 4400394 - DNA, 25 bp, Homo sapien
cgttcaaatggagtcaatatcagct

SEQ ID NO: 4400395 - DNA, 25 bp, Homo sapien
tttcgttcaaatggagtcaatatca

SEQ ID NO: 4400396 - DNA, 25 bp, Homo sapien
ccaaatttcgttcaaatggagtcaa

SEQ ID NO: 4400397 - DNA, 25 bp, Homo sapien
aagtccaaatttcgttcaaatggag

SEQ ID NO: 4400398 - DNA, 25 bp, Homo sapien
cggacaagctgacgtctccattcta

SEQ ID NO: 4400399 - DNA, 25 bp, Homo sapien
agctgacgtctccattctagaaagt

SEQ ID NO: 4400400 - DNA, 25 bp, Homo sapien
caagctgacgtctccattctagaaa

SEQ ID NO: 4400401 - DNA, 25 bp, Homo sapien
gacaagctgacgtctccattctaga

SEQ ID NO: 4400402 - DNA, 25 bp, Homo sapien
ctcctcggtatacacaagaactgtt

SEQ ID NO: 4400403 - DNA, 25 bp, Homo sapien
cctcggtatacacaagaactgtttg

SEQ ID NO: 4400404 - DNA, 25 bp, Homo sapien
gaaagacagtagtccagttctagcc

SEQ ID NO: 4400405 - DNA, 25 bp, Homo sapien
ctggctctcctcgaaagacagtagt

SEQ ID NO: 4400406 - DNA, 25 bp, Homo sapien
tcatagccatcattgagttcacttg

SEQ ID NO: 4400407 - DNA, 25 bp, Homo sapien
tcagtcactgactgaagattaagac

SEQ ID NO: 4400408 - DNA, 25 bp, Homo sapien
taagacgaccccaatcatagccatc

SEQ ID NO: 4400409 - DNA, 25 bp, Homo sapien
aaactctgttcctgcaagttctgca

SEQ ID NO: 4400410 - DNA, 25 bp, Homo sapien
tgatggcgcataagggcccgtccca

SEQ ID NO: 4400411 - DNA, 25 bp, Homo sapien
gctccgctgagtctgatggcgcata

SEQ ID NO: 4400412 - DNA, 25 bp, Homo sapien
gatggcttcggctccgctgagtctg

SEQ ID NO: 4400413 - DNA, 25 bp, Homo sapien
caggagtcagtgtgacgatggcttc

SEQ ID NO: 4400414 - DNA, 25 bp, Homo sapien
ggcaacacgaccgctggacgaagct

SEQ ID NO: 4400415 - DNA, 25 bp, Homo sapien
gcaacacgaccgctggacgaagctt

SEQ ID NO: 4400416 - DNA, 25 bp, Homo sapien
tagcatcaggcgaaactgggtccag

SEQ ID NO: 4400417 - DNA, 25 bp, Homo sapien
ggcctgtggctctaacaagcttcca

SEQ ID NO: 4400418 - DNA, 25 bp, Homo sapien
aaaggtcagtcatagcaagttagca

SEQ ID NO: 4400419 - DNA, 25 bp, Homo sapien
cagttggcaacgctttgagaaggca

SEQ ID NO: 4400420 - DNA, 25 bp, Homo sapien
tcaaatctttttgctgcggggtaac

SEQ ID NO: 4400421 - DNA, 25 bp, Homo sapien
gatgctggtaaatttgggatgtaat

SEQ ID NO: 4400422 - DNA, 25 bp, Homo sapien
tgctgcggggtaaccccaggtccca

SEQ ID NO: 4400423 - DNA, 25 bp, Homo sapien
tggaggattggaccggtctccccgc

SEQ ID NO: 4400424 - DNA, 25 bp, Homo sapien
ctcgcagcaccggagagggcgcact

SEQ ID NO: 4400425 - DNA, 25 bp, Homo sapien
gacaccgcctcggagggaagaaatg

SEQ ID NO: 4400426 - DNA, 25 bp, Homo sapien
gaagaaatgaggtagcggcggttcc

SEQ ID NO: 4400427 - DNA, 25 bp, Homo sapien
cttcctcccggacggcaaggatgtg

SEQ ID NO: 4400428 - DNA, 25 bp, Homo sapien
tggctgtttacctcagactcagacc

SEQ ID NO: 4400429 - DNA, 25 bp, Homo sapien
tgaggctttaatgcaaccctttagc

SEQ ID NO: 4400430 - DNA, 25 bp, Homo sapien
gatctcactccatgatactgtgtaa

SEQ ID NO: 4400431 - DNA, 25 bp, Homo sapien
ctttttggtgcaagaattctggctg

SEQ ID NO: 4400432 - DNA, 25 bp, Homo sapien
tgagctgctcagtggtaccagaaaa

SEQ ID NO: 4400433 - DNA, 25 bp, Homo sapien
tcttgtgacccagtttgagcgcctt

SEQ ID NO: 4400434 - DNA, 25 bp, Homo sapien
tctcctttccacaaacctagctgat

SEQ ID NO: 4400435 - DNA, 25 bp, Homo sapien
gcgccttgactaaccatcgtcttgg

SEQ ID NO: 4400436 - DNA, 25 bp, Homo sapien
ctgttaactctttgactgtggatct

SEQ ID NO: 4400437 - DNA, 25 bp, Homo sapien
tggggacaacactggccagtaggtc

SEQ ID NO: 4400438 - DNA, 25 bp, Homo sapien
tggatcttggacaggtgtgtgtagg

SEQ ID NO: 4400439 - DNA, 25 bp, Homo sapien
ctgcttagccagctgttaactcttt

SEQ ID NO: 4400440 - DNA, 25 bp, Homo sapien
gaagttacaggggatgccattcctt

SEQ ID NO: 4400441 - DNA, 25 bp, Homo sapien
cagcttggagaaggtcggcaatcat

SEQ ID NO: 4400442 - DNA, 25 bp, Homo sapien
ttgacgcgaagttacaggggatgcc

SEQ ID NO: 4400443 - DNA, 25 bp, Homo sapien
gaaggtcggcaatcattttcaggca

SEQ ID NO: 4400444 - DNA, 25 bp, Homo sapien
gaaccaaactactgagggtggcaca

SEQ ID NO: 4400445 - DNA, 25 bp, Homo sapien
tgtgttgagcccacaattatccaat

SEQ ID NO: 4400446 - DNA, 25 bp, Homo sapien
ggagcctttaacatgtgaccacggg

SEQ ID NO: 4400447 - DNA, 25 bp, Homo sapien
ggcttcagttcgaatgttcctcggg

SEQ ID NO: 4400448 - DNA, 25 bp, Homo sapien
cagaaggctttagttcttcacgggc

SEQ ID NO: 4400449 - DNA, 25 bp, Homo sapien
gctgacaaattagcactggttgcat

SEQ ID NO: 4400450 - DNA, 25 bp, Homo sapien
gtgggcagaaggctttagttcttca

SEQ ID NO: 4400451 - DNA, 25 bp, Homo sapien
ggctttagttcttcacgggctgttg

SEQ ID NO: 4400452 - DNA, 25 bp, Homo sapien
gtcccatatccttgatgagagttaa

SEQ ID NO: 4400453 - DNA, 25 bp, Homo sapien
tatccttgatgagagttaaaataaa

SEQ ID NO: 4400454 - DNA, 25 bp, Homo sapien
cccatatccttgatgagagttaaaa

SEQ ID NO: 4400455 - DNA, 25 bp, Homo sapien
catatccttgatgagagttaaaata

SEQ ID NO: 4400456 - DNA, 25 bp, Homo sapien
agatctggttctctgagtttttcca

SEQ ID NO: 4400457 - DNA, 25 bp, Homo sapien
catccagatctggttctctgagttt

SEQ ID NO: 4400458 - DNA, 25 bp, Homo sapien
atcccggcatgagagagtcatccag

SEQ ID NO: 4400459 - DNA, 25 bp, Homo sapien
ccggcatgagagagtcatccagatc

SEQ ID NO: 4400460 - DNA, 25 bp, Homo sapien
cagggcaggcaaacggagcccggca

SEQ ID NO: 4400461 - DNA, 25 bp, Homo sapien
tagggccacggtaaccagaaacaga

SEQ ID NO: 4400462 - DNA, 25 bp, Homo sapien
caaacggagcccggcagtgtggtct

SEQ ID NO: 4400463 - DNA, 25 bp, Homo sapien
caggcaaacggagcccggcagtgtg

SEQ ID NO: 4400464 - DNA, 25 bp, Homo sapien
tcctgatgctccataggtacatctt

SEQ ID NO: 4400465 - DNA, 25 bp, Homo sapien
cgtatggcaatgacatgccctgtgg

SEQ ID NO: 4400466 - DNA, 25 bp, Homo sapien
tcttctgtgtatacgtacttttacg

SEQ ID NO: 4400467 - DNA, 25 bp, Homo sapien
catgttcttgcaaagtgtgttcttc

SEQ ID NO: 4400468 - DNA, 25 bp, Homo sapien
agagagctgaggcagttcttccttc

SEQ ID NO: 4400469 - DNA, 25 bp, Homo sapien
cctgtactttgaacgtgtcttttgc

SEQ ID NO: 4400470 - DNA, 25 bp, Homo sapien
cgtggttgcctaatattagatgtgg

SEQ ID NO: 4400471 - DNA, 25 bp, Homo sapien
ggttccctgtgtgatatacattttc

SEQ ID NO: 4400472 - DNA, 25 bp, Homo sapien
tgtcttttgcttgcgcgtggttgcc

SEQ ID NO: 4400473 - DNA, 25 bp, Homo sapien
cttaacatactgaacactttctagt

SEQ ID NO: 4400474 - DNA, 25 bp, Homo sapien
taacatactgaacactttctagtat

SEQ ID NO: 4400475 - DNA, 25 bp, Homo sapien
ggcttaacatactgaacactttcta

SEQ ID NO: 4400476 - DNA, 25 bp, Homo sapien
gggcttaacatactgaacactttct

SEQ ID NO: 4400477 - DNA, 25 bp, Homo sapien
gtgtctgttaactgtccttcttagg

SEQ ID NO: 4400478 - DNA, 25 bp, Homo sapien
taggtccagaatcaaactcatctgt

SEQ ID NO: 4400479 - DNA, 25 bp, Homo sapien
caatgggctccatggatagggacca

SEQ ID NO: 4400480 - DNA, 25 bp, Homo sapien
tgggctccatggatagggaccagca

SEQ ID NO: 4400481 - DNA, 25 bp, Homo sapien
gcactgtgttgggaactgggtatcc

SEQ ID NO: 4400482 - DNA, 25 bp, Homo sapien
aggatgcacctatggtccaccaagt

SEQ ID NO: 4400483 - DNA, 25 bp, Homo sapien
aagttggtgtctgcttttgaggaga

SEQ ID NO: 4400484 - DNA, 25 bp, Homo sapien
cacctatggtccaccaagttggtgt

SEQ ID NO: 4400485 - DNA, 25 bp, Homo sapien
tatggtccaccaagttggtgtctgc

SEQ ID NO: 4400486 - DNA, 25 bp, Homo sapien
tctcgtctcccaaatcctgctcttt

SEQ ID NO: 4400487 - DNA, 25 bp, Homo sapien
tctttctcgtctcccaaatcctgct

SEQ ID NO: 4400488 - DNA, 25 bp, Homo sapien
cgtctcccaaatcctgctctttcat

SEQ ID NO: 4400489 - DNA, 25 bp, Homo sapien
gccctgctctttctcgtctcccaaa

SEQ ID NO: 4400490 - DNA, 25 bp, Homo sapien
gagccactttgcttcaccgacagtt

SEQ ID NO: 4400491 - DNA, 25 bp, Homo sapien
tttgggcactgactgtgggtccagt

SEQ ID NO: 4400492 - DNA, 25 bp, Homo sapien
gcttcaccgacagttccaggagtcc

SEQ ID NO: 4400493 - DNA, 25 bp, Homo sapien
cactgactgtgggtccagtcctgag

SEQ ID NO: 4400494 - DNA, 25 bp, Homo sapien
gactccctcgtctccctcatttact

SEQ ID NO: 4400495 - DNA, 25 bp, Homo sapien
tccccagagggactccctcgtctcc

SEQ ID NO: 4400496 - DNA, 25 bp, Homo sapien
ggaagatcatgctccagccctttga

SEQ ID NO: 4400497 - DNA, 25 bp, Homo sapien
cttgtaggggaagatcatgctccag

SEQ ID NO: 4400498 - DNA, 25 bp, Homo sapien
ctgccagaactggtcctggattgga

SEQ ID NO: 4400499 - DNA, 25 bp, Homo sapien
cctgccagaactggtcctggattgg

SEQ ID NO: 4400500 - DNA, 25 bp, Homo sapien
tgccagaactggtcctggattggac

SEQ ID NO: 4400501 - DNA, 25 bp, Homo sapien
gaccaagagagagaagtatgcggaa

SEQ ID NO: 4400502 - DNA, 25 bp, Homo sapien
gaagtatgcggaagtccttggcaac

SEQ ID NO: 4400503 - DNA, 25 bp, Homo sapien
gagagagaagtatgcggaagtcctt

SEQ ID NO: 4400504 - DNA, 25 bp, Homo sapien
gagaagtatgcggaagtccttggca

SEQ ID NO: 4400505 - DNA, 25 bp, Homo sapien
gcgacatttacccatgggaaggagg

SEQ ID NO: 4400506 - DNA, 25 bp, Homo sapien
ggaaggaggctcctttagtacagga

SEQ ID NO: 4400507 - DNA, 25 bp, Homo sapien
ttagtacaggagtttcctggaatcc

SEQ ID NO: 4400508 - DNA, 25 bp, Homo sapien
ctgcgacatttacccatgggaagga

SEQ ID NO: 4400509 - DNA, 25 bp, Homo sapien
tcacatggcggatgggcctgcattg

SEQ ID NO: 4400510 - DNA, 25 bp, Homo sapien
gagatcatgaggaaagatgcagggt

SEQ ID NO: 4400511 - DNA, 25 bp, Homo sapien
tgccacccatgattatgcagttcac

SEQ ID NO: 4400512 - DNA, 25 bp, Homo sapien
gggcctgcattgacatgaggatgcc

SEQ ID NO: 4400513 - DNA, 25 bp, Homo sapien
cttcactggatctgccatagccctt

SEQ ID NO: 4400514 - DNA, 25 bp, Homo sapien
ttcactggatctgccatagcccttc

SEQ ID NO: 4400515 - DNA, 25 bp, Homo sapien
cagagttcttctggaaagcttgctg

SEQ ID NO: 4400516 - DNA, 25 bp, Homo sapien
ttcttctggaaagcttgctgtcccc

SEQ ID NO: 4400517 - DNA, 25 bp, Homo sapien
gctgcccaaagacccttcagagttc

SEQ ID NO: 4400518 - DNA, 25 bp, Homo sapien
tgcccaaagacccttcagagttctt

SEQ ID NO: 4400519 - DNA, 25 bp, Homo sapien
tctccctgtctccggtcttggtcat

SEQ ID NO: 4400520 - DNA, 25 bp, Homo sapien
cccactctaggtttcagctccactc

SEQ ID NO: 4400521 - DNA, 25 bp, Homo sapien
cacccactctaggtttcagctccac

SEQ ID NO: 4400522 - DNA, 25 bp, Homo sapien
tcacccactctaggtttcagctcca

SEQ ID NO: 4400523 - DNA, 25 bp, Homo sapien
tcctgtaacacacagttccccatcc

SEQ ID NO: 4400524 - DNA, 25 bp, Homo sapien
tgtaacacacagttccccatcctct

SEQ ID NO: 4400525 - DNA, 25 bp, Homo sapien
cctgtaacacacagttccccatcct

SEQ ID NO: 4400526 - DNA, 25 bp, Homo sapien
taacacacagttccccatcctctcc

SEQ ID NO: 4400527 - DNA, 25 bp, Homo sapien
cgccagccagtttccaggtctgcga

SEQ ID NO: 4400528 - DNA, 25 bp, Homo sapien
tggtgcccttcacggtcctttttgc

SEQ ID NO: 4400529 - DNA, 25 bp, Homo sapien
tccaggtctgcgaatgaagcggtag

SEQ ID NO: 4400530 - DNA, 25 bp, Homo sapien
tcctttttgctcctacggtctggcc

SEQ ID NO: 4400531 - DNA, 25 bp, Homo sapien
atgacccccacgcaatgtggacggt

SEQ ID NO: 4400532 - DNA, 25 bp, Homo sapien
ccccacgcaatgtggacggtcacga

SEQ ID NO: 4400533 - DNA, 25 bp, Homo sapien
caatgtggacggtcacgatggaaga

SEQ ID NO: 4400534 - DNA, 25 bp, Homo sapien
cacgcaatgtggacggtcacgatgg

SEQ ID NO: 4400535 - DNA, 25 bp, Homo sapien
caaagactcgcatgattggttgtgc

SEQ ID NO: 4400536 - DNA, 25 bp, Homo sapien
ttaatctggctactggtgccttctg

SEQ ID NO: 4400537 - DNA, 25 bp, Homo sapien
ggctggtcttcactcttccttcgct

SEQ ID NO: 4400538 - DNA, 25 bp, Homo sapien
tcaggcccgcctgtggcttgaggac

SEQ ID NO: 4400539 - DNA, 25 bp, Homo sapien
gaaggcctcagtgtcagagaaaggc

SEQ ID NO: 4400540 - DNA, 25 bp, Homo sapien
cagaccagagaaggcctcagtgtca

SEQ ID NO: 4400541 - DNA, 25 bp, Homo sapien
agaaggcctcagtgtcagagaaagg

SEQ ID NO: 4400542 - DNA, 25 bp, Homo sapien
tcacagaccagagaaggcctcagtg

SEQ ID NO: 4400543 - DNA, 25 bp, Homo sapien
aactgtgtgggggtggaatcacatc

SEQ ID NO: 4400544 - DNA, 25 bp, Homo sapien
agctcatatcgggtgattgaactgt

SEQ ID NO: 4400545 - DNA, 25 bp, Homo sapien
gtcacacagctcatatcgggtgatt

SEQ ID NO: 4400546 - DNA, 25 bp, Homo sapien
cacagctcatatcgggtgattgaac

SEQ ID NO: 4400547 - DNA, 25 bp, Homo sapien
cccagaatgttctccccaataatcc

SEQ ID NO: 4400548 - DNA, 25 bp, Homo sapien
aatgttctccccaataatcctggcc

SEQ ID NO: 4400549 - DNA, 25 bp, Homo sapien
agaatgttctccccaataatcctgg

SEQ ID NO: 4400550 - DNA, 25 bp, Homo sapien
ccagaatgttctccccaataatcct

SEQ ID NO: 4400551 - DNA, 25 bp, Homo sapien
ccgtgccatggactctgataccagg

SEQ ID NO: 4400552 - DNA, 25 bp, Homo sapien
cgtgccatggactctgataccaggc

SEQ ID NO: 4400553 - DNA, 25 bp, Homo sapien
tgccacattcctgtatgattagttt

SEQ ID NO: 4400554 - DNA, 25 bp, Homo sapien
aatctgctctgtcttttacctctga

SEQ ID NO: 4400555 - DNA, 25 bp, Homo sapien
tctgacaatcacaggccacgtgtaa

SEQ ID NO: 4400556 - DNA, 25 bp, Homo sapien
cccggtgaggttcccattccacaga

SEQ ID NO: 4400557 - DNA, 25 bp, Homo sapien
gcttgcgaaggcatgtgcgggccat

SEQ ID NO: 4400558 - DNA, 25 bp, Homo sapien
caggcgacttcaacaaaggcttgcg

SEQ ID NO: 4400559 - DNA, 25 bp, Homo sapien
tatgcaggcgacttcaacaaaggct

SEQ ID NO: 4400560 - DNA, 25 bp, Homo sapien
ggcgacttcaacaaaggcttgcgaa

SEQ ID NO: 4400561 - DNA, 25 bp, Homo sapien
tgatcctggattttgaagtttgacc

SEQ ID NO: 4400562 - DNA, 25 bp, Homo sapien
agccagaggagccattgacaggggg

SEQ ID NO: 4400563 - DNA, 25 bp, Homo sapien
acctcctgtgcaggatgtagtctga

SEQ ID NO: 4400564 - DNA, 25 bp, Homo sapien
tggattttgaagtttgaccagaagt

SEQ ID NO: 4400565 - DNA, 25 bp, Homo sapien
ctctggtgttggcatcactgatcat

SEQ ID NO: 4400566 - DNA, 25 bp, Homo sapien
aatcgcctatgggaagacccgctgt

SEQ ID NO: 4400567 - DNA, 25 bp, Homo sapien
tgatcatgcagttcatacaggacaa

SEQ ID NO: 4400568 - DNA, 25 bp, Homo sapien
catacaggacaatcgcctatgggaa

SEQ ID NO: 4400569 - DNA, 25 bp, Homo sapien
gattgctatgaatcccattatttca

SEQ ID NO: 4400570 - DNA, 25 bp, Homo sapien
caagcagagctatttgactcttttt

SEQ ID NO: 4400571 - DNA, 25 bp, Homo sapien
ggcaagcagagctatttgactcttt

SEQ ID NO: 4400572 - DNA, 25 bp, Homo sapien
atggcaagcagagctatttgactct

SEQ ID NO: 4400573 - DNA, 25 bp, Homo sapien
tccaatgtccacacagcccatggtg

SEQ ID NO: 4400574 - DNA, 25 bp, Homo sapien
ccaatgtccacacagcccatggtgt

SEQ ID NO: 4400575 - DNA, 25 bp, Homo sapien
atgtccacacagcccatggtgtgag

SEQ ID NO: 4400576 - DNA, 25 bp, Homo sapien
ctatccaatgtccacacagcccatg

SEQ ID NO: 4400577 - DNA, 25 bp, Homo sapien
gtgggttcagtgtacacctgtggca

SEQ ID NO: 4400578 - DNA, 25 bp, Homo sapien
gcccagacagcattctttatttatg

SEQ ID NO: 4400579 - DNA, 25 bp, Homo sapien
cagcattctttatttatgttagtgt

SEQ ID NO: 4400580 - DNA, 25 bp, Homo sapien
acagcattctttatttatgttagtg

SEQ ID NO: 4400581 - DNA, 25 bp, Homo sapien
ctgtgcccagacagcattctttatt

SEQ ID NO: 4400582 - DNA, 25 bp, Homo sapien
caacgttgacgaaggaacagaaagt

SEQ ID NO: 4400583 - DNA, 25 bp, Homo sapien
tccaaggcaagagtcaacgttgacg

SEQ ID NO: 4400584 - DNA, 25 bp, Homo sapien
gctcggtctgtccaaggcaagagtc

SEQ ID NO: 4400585 - DNA, 25 bp, Homo sapien
gagtcaacgttgacgaaggaacaga

SEQ ID NO: 4400586 - DNA, 25 bp, Homo sapien
ataagatgtgcacacacgccaccgc

SEQ ID NO: 4400587 - DNA, 25 bp, Homo sapien
tctggtgagggtcataagatgtgca

SEQ ID NO: 4400588 - DNA, 25 bp, Homo sapien
gcatggctgtcccatcgggcttgac

SEQ ID NO: 4400589 - DNA, 25 bp, Homo sapien
ggtcataagatgtgcacacacgcca

SEQ ID NO: 4400590 - DNA, 25 bp, Homo sapien
tgtgatctggcctatcgcctcgcac

SEQ ID NO: 4400591 - DNA, 25 bp, Homo sapien
atgtgatctggcctatcgcctcgca

SEQ ID NO: 4400592 - DNA, 25 bp, Homo sapien
gtgatctggcctatcgcctcgcaca

SEQ ID NO: 4400593 - DNA, 25 bp, Homo sapien
tgatctggcctatcgcctcgcacat

SEQ ID NO: 4400594 - DNA, 25 bp, Homo sapien
gaagaaccaaataatacgatcagac

SEQ ID NO: 4400595 - DNA, 25 bp, Homo sapien
tactgaagaaccaaataatacgatc

SEQ ID NO: 4400596 - DNA, 25 bp, Homo sapien
tttactgaagaaccaaataatacga

SEQ ID NO: 4400597 - DNA, 25 bp, Homo sapien
tgaaaaccaatgaacagcattgtga

SEQ ID NO: 4400598 - DNA, 25 bp, Homo sapien
cataggaatctggagtgtctgtcgg

SEQ ID NO: 4400599 - DNA, 25 bp, Homo sapien
cgcatcatagctcttccgcatagga

SEQ ID NO: 4400600 - DNA, 25 bp, Homo sapien
gaagtcaacccaatctgtattccag

SEQ ID NO: 4400601 - DNA, 25 bp, Homo sapien
tccagagttaaaaagacgttccgca

SEQ ID NO: 4400602 - DNA, 25 bp, Homo sapien
tgccacccagaatagtgtgtgctgc

SEQ ID NO: 4400603 - DNA, 25 bp, Homo sapien
actttatgtccagcagtgccgatgg

SEQ ID NO: 4400604 - DNA, 25 bp, Homo sapien
tgaggcccgtcagagactttatgtc

SEQ ID NO: 4400605 - DNA, 25 bp, Homo sapien
tcaaggtagtggtctgagctgccat

SEQ ID NO: 4400606 - DNA, 25 bp, Homo sapien
ctccactagattctctggaaattct

SEQ ID NO: 4400607 - DNA, 25 bp, Homo sapien
agaaggcgcagtccgggctttgaac

SEQ ID NO: 4400608 - DNA, 25 bp, Homo sapien
tgaccaaaggtagaacacgtacttc

SEQ ID NO: 4400609 - DNA, 25 bp, Homo sapien
atttgaatttcgctccagaaggcgc

SEQ ID NO: 4400610 - DNA, 25 bp, Homo sapien
ggtgcagagctcttgactattcgaa

SEQ ID NO: 4400611 - DNA, 25 bp, Homo sapien
gctggctgtgagctagctcattcag

SEQ ID NO: 4400612 - DNA, 25 bp, Homo sapien
agaagacccccaccaaaggctggct

SEQ ID NO: 4400613 - DNA, 25 bp, Homo sapien
aagacccccaccaaaggctggctgt

SEQ ID NO: 4400614 - DNA, 25 bp, Homo sapien
gctgtgagctagctcattcagcaga

SEQ ID NO: 4400615 - DNA, 25 bp, Homo sapien
atgtaattgtcagctgtaaaggcac

SEQ ID NO: 4400616 - DNA, 25 bp, Homo sapien
tcctggctcacaaaatgacaccaaa

SEQ ID NO: 4400617 - DNA, 25 bp, Homo sapien
ctcacttggcgctggttgggcagct

SEQ ID NO: 4400618 - DNA, 25 bp, Homo sapien
ttggtcctcccaaattacactgctc

SEQ ID NO: 4400619 - DNA, 25 bp, Homo sapien
aaacatatccttattgcagctagag

SEQ ID NO: 4400620 - DNA, 25 bp, Homo sapien
gcagctagaggtcatggtcgtgtct

SEQ ID NO: 4400621 - DNA, 25 bp, Homo sapien
tcaaatagaaagttatggcgatgga

SEQ ID NO: 4400622 - DNA, 25 bp, Homo sapien
gcatctgctgctggtcatcaaatag

SEQ ID NO: 4400623 - DNA, 25 bp, Homo sapien
ggcggcactgccatgagcatccttg

SEQ ID NO: 4400624 - DNA, 25 bp, Homo sapien
aggcggcactgccatgagcatcctt

SEQ ID NO: 4400625 - DNA, 25 bp, Homo sapien
cgagccaggaggtcgcaggccacag

SEQ ID NO: 4400626 - DNA, 25 bp, Homo sapien
ccaggaggtcgcaggccacaggcct

SEQ ID NO: 4400627 - DNA, 25 bp, Homo sapien
agcgagccaggaggtcgcaggccac

SEQ ID NO: 4400628 - DNA, 25 bp, Homo sapien
tcagcgagccaggaggtcgcaggcc

SEQ ID NO: 4400629 - DNA, 25 bp, Homo sapien
tcattctgccagggcttctggctcc

SEQ ID NO: 4400630 - DNA, 25 bp, Homo sapien
attctgccagggcttctggctcctc

SEQ ID NO: 4400631 - DNA, 25 bp, Homo sapien
tctgccagggcttctggctcctcac

SEQ ID NO: 4400632 - DNA, 25 bp, Homo sapien
ttctgccagggcttctggctcctca

SEQ ID NO: 4400633 - DNA, 25 bp, Homo sapien
gaagacgtggtcgtagcatcgatgc

SEQ ID NO: 4400634 - DNA, 25 bp, Homo sapien
ggccggctgatcctggcctgacaga

SEQ ID NO: 4400635 - DNA, 25 bp, Homo sapien
gccctgaagacgtggtcgtagcatc

SEQ ID NO: 4400636 - DNA, 25 bp, Homo sapien
tggtcgtagcatcgatgcaatcggg

SEQ ID NO: 4400637 - DNA, 25 bp, Homo sapien
aagaatgtctggagcccgagtatca

SEQ ID NO: 4400638 - DNA, 25 bp, Homo sapien
gagcccgagtatcatctggcagcca

SEQ ID NO: 4400639 - DNA, 25 bp, Homo sapien
ccccaagaatgtctggagcccgagt

SEQ ID NO: 4400640 - DNA, 25 bp, Homo sapien
tgtctggagcccgagtatcatctgg

SEQ ID NO: 4400641 - DNA, 25 bp, Homo sapien
tctaaagtcaggccatcctcgtgct

SEQ ID NO: 4400642 - DNA, 25 bp, Homo sapien
catctaaagtcaggccatcctcgtg

SEQ ID NO: 4400643 - DNA, 25 bp, Homo sapien
atctaaagtcaggccatcctcgtgc

SEQ ID NO: 4400644 - DNA, 25 bp, Homo sapien
gcctccagccatacaatcaatccat

SEQ ID NO: 4400645 - DNA, 25 bp, Homo sapien
tccagccatacaatcaatccatcgc

SEQ ID NO: 4400646 - DNA, 25 bp, Homo sapien
gccatacaatcaatccatcgcccat

SEQ ID NO: 4400647 - DNA, 25 bp, Homo sapien
ggtctttagggtccagtgactgtca

SEQ ID NO: 4400648 - DNA, 25 bp, Homo sapien
ggacccggtcctgcggttgttcaga

SEQ ID NO: 4400649 - DNA, 25 bp, Homo sapien
tgcggttgttcagagggtactcccc

SEQ ID NO: 4400650 - DNA, 25 bp, Homo sapien
aggacccggtcctgcggttgttcag

SEQ ID NO: 4400651 - DNA, 25 bp, Homo sapien
gtcctgcggttgttcagagggtact

SEQ ID NO: 4400652 - DNA, 25 bp, Homo sapien
tacaagccctggacaagaaatattc

SEQ ID NO: 4400653 - DNA, 25 bp, Homo sapien
gataacgctctttcttacaagccct

SEQ ID NO: 4400654 - DNA, 25 bp, Homo sapien
tcaggacatgcagctcgttgctcag

SEQ ID NO: 4400655 - DNA, 25 bp, Homo sapien
tattctccaccaacttgcagaggga

SEQ ID NO: 4400656 - DNA, 25 bp, Homo sapien
ccgaggcttaatggacgaacgccag

SEQ ID NO: 4400657 - DNA, 25 bp, Homo sapien
tgcctgcgtcaagccattctgggcc

SEQ ID NO: 4400658 - DNA, 25 bp, Homo sapien
tctctgtgggatcggccgaggctta

SEQ ID NO: 4400659 - DNA, 25 bp, Homo sapien
gctccatccatgagacggctcgagt

SEQ ID NO: 4400660 - DNA, 25 bp, Homo sapien
ccaatacaatggctggtgcacagca

SEQ ID NO: 4400661 - DNA, 25 bp, Homo sapien
ggtggacctgccaatacctagaatg

SEQ ID NO: 4400662 - DNA, 25 bp, Homo sapien
tgagtacacacttgattcagagcct

SEQ ID NO: 4400663 - DNA, 25 bp, Homo sapien
tttgtatagttgtagacactgggcc

SEQ ID NO: 4400664 - DNA, 25 bp, Homo sapien
aaattgatacaaatggacccctggg

SEQ ID NO: 4400665 - DNA, 25 bp, Homo sapien
taagttttcttatgcaggccccagt

SEQ ID NO: 4400666 - DNA, 25 bp, Homo sapien
gaatgagtcttcctggtcccgacag

SEQ ID NO: 4400667 - DNA, 25 bp, Homo sapien
tacaccaagtgacgtgagcatcagg

SEQ ID NO: 4400668 - DNA, 25 bp, Homo sapien
tgccggttccaggtacagtccagca

SEQ ID NO: 4400669 - DNA, 25 bp, Homo sapien
gacgtggccctcacacctgaaatag

SEQ ID NO: 4400670 - DNA, 25 bp, Homo sapien
gagtgttgcagttcccgtggtagat

SEQ ID NO: 4400671 - DNA, 25 bp, Homo sapien
gaaataggcctcgaagacgtcactg

SEQ ID NO: 4400672 - DNA, 25 bp, Homo sapien
tgcagtctcttgtgtccacaggacc

SEQ ID NO: 4400673 - DNA, 25 bp, Homo sapien
gcccgtgcagtctcttgtgtccaca

SEQ ID NO: 4400674 - DNA, 25 bp, Homo sapien
gtgtggcccgtgcagtctcttgtgt

SEQ ID NO: 4400675 - DNA, 25 bp, Homo sapien
cgtgcagtctcttgtgtccacagga

SEQ ID NO: 4400676 - DNA, 25 bp, Homo sapien
ctgatgaggaacgatggaaaggcag

SEQ ID NO: 4400677 - DNA, 25 bp, Homo sapien
gaggaacgatggaaaggcaggcgtg

SEQ ID NO: 4400678 - DNA, 25 bp, Homo sapien
tgaggaacgatggaaaggcaggcgt

SEQ ID NO: 4400679 - DNA, 25 bp, Homo sapien
gatgaggaacgatggaaaggcaggc

SEQ ID NO: 4400680 - DNA, 25 bp, Homo sapien
ggacacgatgctgcacctgcagatt

SEQ ID NO: 4400681 - DNA, 25 bp, Homo sapien
ctgaggacacgatgctgcacctgca

SEQ ID NO: 4400682 - DNA, 25 bp, Homo sapien
ctgtcgacaccgggtggaagcaggg

SEQ ID NO: 4400683 - DNA, 25 bp, Homo sapien
gacactgaggacacgatgctgcacc

SEQ ID NO: 4400684 - DNA, 25 bp, Homo sapien
tcggcaggaacgctcccaaatcttc

SEQ ID NO: 4400685 - DNA, 25 bp, Homo sapien
cggcaggaacgctcccaaatcttct

SEQ ID NO: 4400686 - DNA, 25 bp, Homo sapien
cctcggcaggaacgctcccaaatct

SEQ ID NO: 4400687 - DNA, 25 bp, Homo sapien
caacctcggcaggaacgctcccaaa

SEQ ID NO: 4400688 - DNA, 25 bp, Homo sapien
tggcagcccagggacattactgcct

SEQ ID NO: 4400689 - DNA, 25 bp, Homo sapien
agcccagggacattactgcctgcat

SEQ ID NO: 4400690 - DNA, 25 bp, Homo sapien
gcagcccagggacattactgcctgc

SEQ ID NO: 4400691 - DNA, 25 bp, Homo sapien
cctggcagcccagggacattactgc

SEQ ID NO: 4400692 - DNA, 25 bp, Homo sapien
ccggcctgtggagagtcttgttcct

SEQ ID NO: 4400693 - DNA, 25 bp, Homo sapien
cctggagacccacggtagaggggat

SEQ ID NO: 4400694 - DNA, 25 bp, Homo sapien
cgtccggcctgtggagagtcttgtt

SEQ ID NO: 4400695 - DNA, 25 bp, Homo sapien
cctgtcttccatagtcacctggaga

SEQ ID NO: 4400696 - DNA, 25 bp, Homo sapien
ggaaacgtgatttccctcataccca

SEQ ID NO: 4400697 - DNA, 25 bp, Homo sapien
tctggggcgtccttcagccttgaga

SEQ ID NO: 4400698 - DNA, 25 bp, Homo sapien
tgaggcctggaacccggaaacgtga

SEQ ID NO: 4400699 - DNA, 25 bp, Homo sapien
agtcagtgaggcctggaacccggaa

SEQ ID NO: 4400700 - DNA, 25 bp, Homo sapien
ctggctgggtgatgtcggctaattt

SEQ ID NO: 4400701 - DNA, 25 bp, Homo sapien
ctctggggtgatccagggacatttc

SEQ ID NO: 4400702 - DNA, 25 bp, Homo sapien
cagccaggtcctctggggtgatcca

SEQ ID NO: 4400703 - DNA, 25 bp, Homo sapien
gtgatgtcggctaatttcagaccca

SEQ ID NO: 4400704 - DNA, 25 bp, Homo sapien
ccccagtacatcactgcatgtgaga

SEQ ID NO: 4400705 - DNA, 25 bp, Homo sapien
aagtgccgcaagaggtgacagtgac

SEQ ID NO: 4400706 - DNA, 25 bp, Homo sapien
acatcactgcatgtgagaatacagc

SEQ ID NO: 4400707 - DNA, 25 bp, Homo sapien
gcaaggacttggaagtgccgcaaga

SEQ ID NO: 4400708 - DNA, 25 bp, Homo sapien
aggccttgcggaggccaacactcac

SEQ ID NO: 4400709 - DNA, 25 bp, Homo sapien
tgcagaagacccaaacttgactttt

SEQ ID NO: 4400710 - DNA, 25 bp, Homo sapien
gagctgcagaagacccaaacttgac

SEQ ID NO: 4400711 - DNA, 25 bp, Homo sapien
cagaagacccaaacttgacttttca

SEQ ID NO: 4400712 - DNA, 25 bp, Homo sapien
agctgcagaagacccaaacttgact

SEQ ID NO: 4400713 - DNA, 25 bp, Homo sapien
cccttgtgcttgagttgcttctcca

SEQ ID NO: 4400714 - DNA, 25 bp, Homo sapien
gatcccttgtgcttgagttgcttct

SEQ ID NO: 4400715 - DNA, 25 bp, Homo sapien
taaactggaaatgtgctccctggct

SEQ ID NO: 4400716 - DNA, 25 bp, Homo sapien
tcccttgtgcttgagttgcttctcc

SEQ ID NO: 4400717 - DNA, 25 bp, Homo sapien
gcgtgcactcgcaaatgcaaattct

SEQ ID NO: 4400718 - DNA, 25 bp, Homo sapien
catgagactgccgtgagggctgcat

SEQ ID NO: 4400719 - DNA, 25 bp, Homo sapien
catgaggtaatgcagtgtctggctg

SEQ ID NO: 4400720 - DNA, 25 bp, Homo sapien
ctgtcgcgggaacgcagcgtgcact

SEQ ID NO: 4400721 - DNA, 25 bp, Homo sapien
gtactgccagcctgcactgaacggg

SEQ ID NO: 4400722 - DNA, 25 bp, Homo sapien
gcggctcacgctagtaacagtcagt

SEQ ID NO: 4400723 - DNA, 25 bp, Homo sapien
tctaaggaatcaaccccgtactgcc

SEQ ID NO: 4400724 - DNA, 25 bp, Homo sapien
ttatatgtctaaggaatcaaccccg

SEQ ID NO: 4400725 - DNA, 25 bp, Homo sapien
cccacgccagcggcctgcgtccatc

SEQ ID NO: 4400726 - DNA, 25 bp, Homo sapien
caccccacgccagcggcctgcgtcc

SEQ ID NO: 4400727 - DNA, 25 bp, Homo sapien
tgcgtccatcaccccacgccagcgg

SEQ ID NO: 4400728 - DNA, 25 bp, Homo sapien
cgtccatcaccccacgccagcggcc

SEQ ID NO: 4400729 - DNA, 25 bp, Homo sapien
ctcttctgcatttgttagaggctgc

SEQ ID NO: 4400730 - DNA, 25 bp, Homo sapien
tcttctgcatttgttagaggctgca

SEQ ID NO: 4400731 - DNA, 25 bp, Homo sapien
cttctgcatttgttagaggctgcat

SEQ ID NO: 4400732 - DNA, 25 bp, Homo sapien
cctataagactcagcgacagggaga

SEQ ID NO: 4400733 - DNA, 25 bp, Homo sapien
cggagtcgggctatctaaaacaggt

SEQ ID NO: 4400734 - DNA, 25 bp, Homo sapien
tcaggagacaaagaccgaggacagg

SEQ ID NO: 4400735 - DNA, 25 bp, Homo sapien
tcccttcatctggtgcggagcagta

SEQ ID NO: 4400736 - DNA, 25 bp, Homo sapien
cacaggtgacgccaggtgtggacat

SEQ ID NO: 4400737 - DNA, 25 bp, Homo sapien
aatgcagccttcacagacttgccac

SEQ ID NO: 4400738 - DNA, 25 bp, Homo sapien
agcaggggcactgggcattccaagc

SEQ ID NO: 4400739 - DNA, 25 bp, Homo sapien
gaggttaggcttggcttccttgcaa

SEQ ID NO: 4400740 - DNA, 25 bp, Homo sapien
agggctgtttcgtcctcactccgca

SEQ ID NO: 4400741 - DNA, 25 bp, Homo sapien
gagtatatggcctgacaatgaagcg

SEQ ID NO: 4400742 - DNA, 25 bp, Homo sapien
caatgctgagtctcccgaatgcctc

SEQ ID NO: 4400743 - DNA, 25 bp, Homo sapien
gctacattccacgacaatgagctgg

SEQ ID NO: 4400744 - DNA, 25 bp, Homo sapien
aagtccaagaccaacgtgcccactg

SEQ ID NO: 4400745 - DNA, 25 bp, Homo sapien
cccagtctcctcatatggtgaaggg

SEQ ID NO: 4400746 - DNA, 25 bp, Homo sapien
acgtgcccactgattctgtgtctgg

SEQ ID NO: 4400747 - DNA, 25 bp, Homo sapien
ttccccagtctcctcatatggtgaa

SEQ ID NO: 4400748 - DNA, 25 bp, Homo sapien
cacagcatcaccagggccgtcacca

SEQ ID NO: 4400749 - DNA, 25 bp, Homo sapien
cagcatcaccagggccgtcaccatg

SEQ ID NO: 4400750 - DNA, 25 bp, Homo sapien
acagcatcaccagggccgtcaccat

SEQ ID NO: 4400751 - DNA, 25 bp, Homo sapien
tcacagcatcaccagggccgtcacc

SEQ ID NO: 4400752 - DNA, 25 bp, Homo sapien
cgagcatctctgtgaagccacatga

SEQ ID NO: 4400753 - DNA, 25 bp, Homo sapien
actccacggtgaccggcattgatgg

SEQ ID NO: 4400754 - DNA, 25 bp, Homo sapien
agtccatagaatccaccagcctcat

SEQ ID NO: 4400755 - DNA, 25 bp, Homo sapien
ggggccctgcgagcatctctgtgac

SEQ ID NO: 4400756 - DNA, 25 bp, Homo sapien
catcccttcctaggcaacttggtgg

SEQ ID NO: 4400757 - DNA, 25 bp, Homo sapien
tgtcttctacttcgtaattcctcat

SEQ ID NO: 4400758 - DNA, 25 bp, Homo sapien
gcatgtcttctacttcgtaattcct

SEQ ID NO: 4400759 - DNA, 25 bp, Homo sapien
catgtcttctacttcgtaattcctc

SEQ ID NO: 4400760 - DNA, 25 bp, Homo sapien
atgtcttctacttcgtaattcctca

SEQ ID NO: 4400761 - DNA, 25 bp, Homo sapien
cctggcattggtctgcacggcataa

SEQ ID NO: 4400762 - DNA, 25 bp, Homo sapien
gaagcttttcacgtgctccacctgg

SEQ ID NO: 4400763 - DNA, 25 bp, Homo sapien
tacagagcctgacttagcagctggc

SEQ ID NO: 4400764 - DNA, 25 bp, Homo sapien
caacaaacatcgaagtgcctggcat

SEQ ID NO: 4400765 - DNA, 25 bp, Homo sapien
tctgaggctccctgtattgttacag

SEQ ID NO: 4400766 - DNA, 25 bp, Homo sapien
caatgagggtccgaagggctgtaac

SEQ ID NO: 4400767 - DNA, 25 bp, Homo sapien
tagtatctagggcttgggactctga

SEQ ID NO: 4400768 - DNA, 25 bp, Homo sapien
gcaacttccagacggagggaggaca

SEQ ID NO: 4400769 - DNA, 25 bp, Homo sapien
agctctccaacgactgggcctccct

SEQ ID NO: 4400770 - DNA, 25 bp, Homo sapien
gctctccaacgactgggcctccctc

SEQ ID NO: 4400771 - DNA, 25 bp, Homo sapien
tctcccgggctatgccgatgatggc

SEQ ID NO: 4400772 - DNA, 25 bp, Homo sapien
caggtctaggtccagctgaatgatc

SEQ ID NO: 4400773 - DNA, 25 bp, Homo sapien
tcaaacaactcccggatgttggtct

SEQ ID NO: 4400774 - DNA, 25 bp, Homo sapien
gatggcgcctggcaggaaactgtca

SEQ ID NO: 4400775 - DNA, 25 bp, Homo sapien
gagcgaaacggctgaatgatctcag

SEQ ID NO: 4400776 - DNA, 25 bp, Homo sapien
cagagcgaaacggctgaatgatctc

SEQ ID NO: 4400777 - DNA, 25 bp, Homo sapien
gcgaaacggctgaatgatctcagat

SEQ ID NO: 4400778 - DNA, 25 bp, Homo sapien
gaaacggctgaatgatctcagatac

SEQ ID NO: 4400779 - DNA, 25 bp, Homo sapien
caccacccttctggagagggcattc

SEQ ID NO: 4400780 - DNA, 25 bp, Homo sapien
tgtctcaccacccttctggagaggg

SEQ ID NO: 4400781 - DNA, 25 bp, Homo sapien
gagggcattccttgagaatgggaat

SEQ ID NO: 4400782 - DNA, 25 bp, Homo sapien
ggcattccttgagaatgggaatatg

SEQ ID NO: 4400783 - DNA, 25 bp, Homo sapien
gaattcattaggatgaggtttctaa

SEQ ID NO: 4400784 - DNA, 25 bp, Homo sapien
ctggcctctggtccttgaggtagct

SEQ ID NO: 4400785 - DNA, 25 bp, Homo sapien
tctggtccttgaggtagctgtctct

SEQ ID NO: 4400786 - DNA, 25 bp, Homo sapien
gctggaattcattaggatgaggttt

SEQ ID NO: 4400787 - DNA, 25 bp, Homo sapien
gctaattttcccattgtccactttg

SEQ ID NO: 4400788 - DNA, 25 bp, Homo sapien
cagctgcctggaaaaggggctaatt

SEQ ID NO: 4400789 - DNA, 25 bp, Homo sapien
ttgaaatattgcagcaatatgccac

SEQ ID NO: 4400790 - DNA, 25 bp, Homo sapien
agctgcctggaaaaggggctaattt

SEQ ID NO: 4400791 - DNA, 25 bp, Homo sapien
ctgccttatcatactctggtgtttt

SEQ ID NO: 4400792 - DNA, 25 bp, Homo sapien
ccttatcatactctggtgtttttaa

SEQ ID NO: 4400793 - DNA, 25 bp, Homo sapien
tactctggtgtttttaaattgctgt

SEQ ID NO: 4400794 - DNA, 25 bp, Homo sapien
taaattgctgttcaggagcacctct

SEQ ID NO: 4400795 - DNA, 25 bp, Homo sapien
attggcggtggtggatctcacatcc

SEQ ID NO: 4400796 - DNA, 25 bp, Homo sapien
gatgtgcggttggaattggcggtgg

SEQ ID NO: 4400797 - DNA, 25 bp, Homo sapien
ggatgtttctctgtcaaagcgctct

SEQ ID NO: 4400798 - DNA, 25 bp, Homo sapien
cagaaacttgggtcgcttctgggct

SEQ ID NO: 4400799 - DNA, 25 bp, Homo sapien
aggctggagctttgggcccatcatc

SEQ ID NO: 4400800 - DNA, 25 bp, Homo sapien
agctttgggcccatcatccaagtac

SEQ ID NO: 4400801 - DNA, 25 bp, Homo sapien
tgaggctggagctttgggcccatca

SEQ ID NO: 4400802 - DNA, 25 bp, Homo sapien
ctggagctttgggcccatcatccaa

SEQ ID NO: 4400803 - DNA, 25 bp, Homo sapien
caatgacccgcttagaaaaatctcc

SEQ ID NO: 4400804 - DNA, 25 bp, Homo sapien
gaaaaatctccaggatacgggatca

SEQ ID NO: 4400805 - DNA, 25 bp, Homo sapien
caggatacgggatcactgtccactc

SEQ ID NO: 4400806 - DNA, 25 bp, Homo sapien
agcaatgacccgcttagaaaaatct

SEQ ID NO: 4400807 - DNA, 25 bp, Homo sapien
cacacacatatgaaaccagaagaaa

SEQ ID NO: 4400808 - DNA, 25 bp, Homo sapien
acgcctggccgttaatgtatatatt

SEQ ID NO: 4400809 - DNA, 25 bp, Homo sapien
cacgcctggccgttaatgtatatat

SEQ ID NO: 4400810 - DNA, 25 bp, Homo sapien
cacactgcaaagttctaagacatgg

SEQ ID NO: 4400811 - DNA, 25 bp, Homo sapien
gcactgctgaacgtgagcacggtcc

SEQ ID NO: 4400812 - DNA, 25 bp, Homo sapien
agtaccaagccggaacctctgagtg

SEQ ID NO: 4400813 - DNA, 25 bp, Homo sapien
taagacatggatgccttccctgttc

SEQ ID NO: 4400814 - DNA, 25 bp, Homo sapien
caacgatgaaaaagctctaccccag

SEQ ID NO: 4400815 - DNA, 25 bp, Homo sapien
tcagggaagtacacacaggcagtaa

SEQ ID NO: 4400816 - DNA, 25 bp, Homo sapien
taatgctcggcctaagtcctcggaa

SEQ ID NO: 4400817 - DNA, 25 bp, Homo sapien
tcaagcaacctgtcattagccaagc

SEQ ID NO: 4400818 - DNA, 25 bp, Homo sapien
cgtcgttacaggatggaagtggcct

SEQ ID NO: 4400819 - DNA, 25 bp, Homo sapien
cacatgctccagatggcgtcgttac

SEQ ID NO: 4400820 - DNA, 25 bp, Homo sapien
tcctggatccttgcagcgaggtggc

SEQ ID NO: 4400821 - DNA, 25 bp, Homo sapien
gattcccgagtcactgcttaaaagg

SEQ ID NO: 4400822 - DNA, 25 bp, Homo sapien
gccaatgcatccagtgtgacatttg

SEQ ID NO: 4400823 - DNA, 25 bp, Homo sapien
aggactctaaacatgcaaaaggcag

SEQ ID NO: 4400824 - DNA, 25 bp, Homo sapien
gaactcctgaacctcctgtgggctt

SEQ ID NO: 4400825 - DNA, 25 bp, Homo sapien
gctactcataaaggctgggtccctc

SEQ ID NO: 4400826 - DNA, 25 bp, Homo sapien
ggccgactccttggaaccagcaaga

SEQ ID NO: 4400827 - DNA, 25 bp, Homo sapien
gctgcagcagaaggttcaaaccatg

SEQ ID NO: 4400828 - DNA, 25 bp, Homo sapien
gcaggacgcggccatcaaataagga

SEQ ID NO: 4400829 - DNA, 25 bp, Homo sapien
caaataaggacttggcgcagctcca

SEQ ID NO: 4400830 - DNA, 25 bp, Homo sapien
tcctggaaatgtggagcggccacaa

SEQ ID NO: 4400831 - DNA, 25 bp, Homo sapien
tgcagcctcgccgattcccgagctg

SEQ ID NO: 4400832 - DNA, 25 bp, Homo sapien
ttccttcggctgcagcctcgccgat

SEQ ID NO: 4400833 - DNA, 25 bp, Homo sapien
gccgattcccgagctgtttcctgct

SEQ ID NO: 4400834 - DNA, 25 bp, Homo sapien
ccttcggctgcagcctcgccgattc

SEQ ID NO: 4400835 - DNA, 25 bp, Homo sapien
catttcatgaacttcttttgaacaa

SEQ ID NO: 4400836 - DNA, 25 bp, Homo sapien
catgaacttcttttgaacaatttcc

SEQ ID NO: 4400837 - DNA, 25 bp, Homo sapien
tgaacttcttttgaacaatttcctg

SEQ ID NO: 4400838 - DNA, 25 bp, Homo sapien
tttttctttctatgctcctcttcct

SEQ ID NO: 4400839 - DNA, 25 bp, Homo sapien
caggtgtgtagcacttagagaacat

SEQ ID NO: 4400840 - DNA, 25 bp, Homo sapien
ctgcggccaggtgtgtagcacttag

SEQ ID NO: 4400841 - DNA, 25 bp, Homo sapien
gccaggtgtgtagcacttagagaac

SEQ ID NO: 4400842 - DNA, 25 bp, Homo sapien
cggccaggtgtgtagcacttagaga

SEQ ID NO: 4400843 - DNA, 25 bp, Homo sapien
aggaagtggatgataatagatatcc

SEQ ID NO: 4400844 - DNA, 25 bp, Homo sapien
gaagtggatgataatagatatccac

SEQ ID NO: 4400845 - DNA, 25 bp, Homo sapien
ctttgtgtcattttagtgaacacct

SEQ ID NO: 4400846 - DNA, 25 bp, Homo sapien
cattttagtgaacacctcaaattct

SEQ ID NO: 4400847 - DNA, 25 bp, Homo sapien
cacacagccggtaaaacttccaata

SEQ ID NO: 4400848 - DNA, 25 bp, Homo sapien
gaaacaaggtctcttcaggactcac

SEQ ID NO: 4400849 - DNA, 25 bp, Homo sapien
tctatcatagacacagtaggctggg

SEQ ID NO: 4400850 - DNA, 25 bp, Homo sapien
gactcaccggagaaccaacagaatt

SEQ ID NO: 4400851 - DNA, 25 bp, Homo sapien
cctctgggcgctgagggacacaatg

SEQ ID NO: 4400852 - DNA, 25 bp, Homo sapien
gatttctgaggtcactgaaggacca

SEQ ID NO: 4400853 - DNA, 25 bp, Homo sapien
tctccttgcacaacaagaccagagg

SEQ ID NO: 4400854 - DNA, 25 bp, Homo sapien
gactctgaggtcatgttagtcacag

SEQ ID NO: 4400855 - DNA, 25 bp, Homo sapien
atgaaaagcttttgtgccctggtcc

SEQ ID NO: 4400856 - DNA, 25 bp, Homo sapien
gagaggctacccgtggtttgttgta

SEQ ID NO: 4400857 - DNA, 25 bp, Homo sapien
tgaaaagcttttgtgccctggtccc

SEQ ID NO: 4400858 - DNA, 25 bp, Homo sapien
ctagatccctggggagaggctaccc

SEQ ID NO: 4400859 - DNA, 25 bp, Homo sapien
cagcccgggaactccattcatacag

SEQ ID NO: 4400860 - DNA, 25 bp, Homo sapien
agctctcaggaacagctcggagggc

SEQ ID NO: 4400861 - DNA, 25 bp, Homo sapien
ccgggaactccattcatacagctct

SEQ ID NO: 4400862 - DNA, 25 bp, Homo sapien
tgcaggagttcagcaccgccagcca

SEQ ID NO: 4400863 - DNA, 25 bp, Homo sapien
ccccttggagcagtgtgctgggact

SEQ ID NO: 4400864 - DNA, 25 bp, Homo sapien
catcagttgacagctcagcaaggga

SEQ ID NO: 4400865 - DNA, 25 bp, Homo sapien
caactgaggaaatgacggtcatgtc

SEQ ID NO: 4400866 - DNA, 25 bp, Homo sapien
gaagaaaggctgataaccaactgag

SEQ ID NO: 4400867 - DNA, 25 bp, Homo sapien
ccttcaagccagaacggagagctca

SEQ ID NO: 4400868 - DNA, 25 bp, Homo sapien
aactgtcttgtcatcgagtgccaca

SEQ ID NO: 4400869 - DNA, 25 bp, Homo sapien
tacagaaacgttccggctcttgcca

SEQ ID NO: 4400870 - DNA, 25 bp, Homo sapien
ggttaaggcagaggagacctacgcc

SEQ ID NO: 4400871 - DNA, 25 bp, Homo sapien
aaacatctctgagacacccagggtg

SEQ ID NO: 4400872 - DNA, 25 bp, Homo sapien
caaacatctctgagacacccagggt

SEQ ID NO: 4400873 - DNA, 25 bp, Homo sapien
gcaccatgtcttgcaaacagtagcg

SEQ ID NO: 4400874 - DNA, 25 bp, Homo sapien
ttgcaaacagtagcgcttagcatag

SEQ ID NO: 4400875 - DNA, 25 bp, Homo sapien
cctggctgtcctatagctggaggca

SEQ ID NO: 4400876 - DNA, 25 bp, Homo sapien
cccagcccagagttgagcacgcaat

SEQ ID NO: 4400877 - DNA, 25 bp, Homo sapien
ttccctgacaaaccacgaggagctg

SEQ ID NO: 4400878 - DNA, 25 bp, Homo sapien
ttgagcacgcaatgggcaggaacct

SEQ ID NO: 4400879 - DNA, 25 bp, Homo sapien
tattgctcctggaagcccaggttac

SEQ ID NO: 4400880 - DNA, 25 bp, Homo sapien
ctattgctcctggaagcccaggtta

SEQ ID NO: 4400881 - DNA, 25 bp, Homo sapien
gagtcactgtagtaggttcccaagc

SEQ ID NO: 4400882 - DNA, 25 bp, Homo sapien
tgatctgatgcatggcgaccgagag

SEQ ID NO: 4400883 - DNA, 25 bp, Homo sapien
agcactgaagtgcttctgcatggcc

SEQ ID NO: 4400884 - DNA, 25 bp, Homo sapien
aagagcttatccgtcagcacagcaa

SEQ ID NO: 4400885 - DNA, 25 bp, Homo sapien
ctggtcccacaggtcttgcaagttt

SEQ ID NO: 4400886 - DNA, 25 bp, Homo sapien
ccacaggtcttgcaagtttttcctg

SEQ ID NO: 4400887 - DNA, 25 bp, Homo sapien
tggtcccacaggtcttgcaagtttt

SEQ ID NO: 4400888 - DNA, 25 bp, Homo sapien
tcccacaggtcttgcaagtttttcc

SEQ ID NO: 4400889 - DNA, 25 bp, Homo sapien
tcttcgtgggtaatacaggactgtc

SEQ ID NO: 4400890 - DNA, 25 bp, Homo sapien
gagatgaagagctatcctcagccag

SEQ ID NO: 4400891 - DNA, 25 bp, Homo sapien
cgttcgaattacacaggaagctgga

SEQ ID NO: 4400892 - DNA, 25 bp, Homo sapien
aagaacggatctgcgcaggcataca

SEQ ID NO: 4400893 - DNA, 25 bp, Homo sapien
tgcctttatgaagcccagagtcaag

SEQ ID NO: 4400894 - DNA, 25 bp, Homo sapien
catacttaaaaatcctgttgactat

SEQ ID NO: 4400895 - DNA, 25 bp, Homo sapien
cttcgtgtgcatcaacagcaatgcc

SEQ ID NO: 4400896 - DNA, 25 bp, Homo sapien
cagctgtttaggatgtgttggatac

SEQ ID NO: 4400897 - DNA, 25 bp, Homo sapien
ggtgccctgtgatgtctggtatcca

SEQ ID NO: 4400898 - DNA, 25 bp, Homo sapien
tccttctccatctagcacactggtg

SEQ ID NO: 4400899 - DNA, 25 bp, Homo sapien
ctgatttattctcttcgcctccttc

SEQ ID NO: 4400900 - DNA, 25 bp, Homo sapien
gatttattctcttcgcctccttctc

SEQ ID NO: 4400901 - DNA, 25 bp, Homo sapien
tctccatctagcacactggtgttta

SEQ ID NO: 4400902 - DNA, 25 bp, Homo sapien
aagcagatacagagacgaagaccgt

SEQ ID NO: 4400903 - DNA, 25 bp, Homo sapien
ctccaatggcaagagggtctttggc

SEQ ID NO: 4400904 - DNA, 25 bp, Homo sapien
gaagaccgtgtaagcacagcaatac

SEQ ID NO: 4400905 - DNA, 25 bp, Homo sapien
gagggtctttggcaagcagatacag

SEQ ID NO: 4400906 - DNA, 25 bp, Homo sapien
tttccaggatgaccatgaggaacta

SEQ ID NO: 4400907 - DNA, 25 bp, Homo sapien
gaggaactatggcaaaccagcagga

SEQ ID NO: 4400908 - DNA, 25 bp, Homo sapien
tgtggaccttcaaacacacgggcct

SEQ ID NO: 4400909 - DNA, 25 bp, Homo sapien
gatgaatttccaggatgaccatgag

SEQ ID NO: 4400910 - DNA, 25 bp, Homo sapien
atgagtaacacccaaaggaggcact

SEQ ID NO: 4400911 - DNA, 25 bp, Homo sapien
cagattctgtcccgcaggcaggaag

SEQ ID NO: 4400912 - DNA, 25 bp, Homo sapien
agccagattctgtcccgcaggcagg

SEQ ID NO: 4400913 - DNA, 25 bp, Homo sapien
catgagtaacacccaaaggaggcac

SEQ ID NO: 4400914 - DNA, 25 bp, Homo sapien
aatcacggcggaagggacacatctc

SEQ ID NO: 4400915 - DNA, 25 bp, Homo sapien
cacatctcaccatagtgcagcagga

SEQ ID NO: 4400916 - DNA, 25 bp, Homo sapien
ggcggaagggacacatctcaccata

SEQ ID NO: 4400917 - DNA, 25 bp, Homo sapien
agggacacatctcaccatagtgcag

SEQ ID NO: 4400918 - DNA, 25 bp, Homo sapien
tggagtgcagtgttgtgattttggt

SEQ ID NO: 4400919 - DNA, 25 bp, Homo sapien
gtgcagtgttgtgattttggttcac

SEQ ID NO: 4400920 - DNA, 25 bp, Homo sapien
gcagtgttgtgattttggttcactg

SEQ ID NO: 4400921 - DNA, 25 bp, Homo sapien
gagtgcagtgttgtgattttggttc

SEQ ID NO: 4400922 - DNA, 25 bp, Homo sapien
agtaagcagggccagcctacctggc

SEQ ID NO: 4400923 - DNA, 25 bp, Homo sapien
tatgtagccaatcactcttccctca

SEQ ID NO: 4400924 - DNA, 25 bp, Homo sapien
tctgcaaacgctgctcagcaaattc

SEQ ID NO: 4400925 - DNA, 25 bp, Homo sapien
tgatcaaagcgaaagccactcagtc

SEQ ID NO: 4400926 - DNA, 25 bp, Homo sapien
gacacttcatggctagtgtcaggct

SEQ ID NO: 4400927 - DNA, 25 bp, Homo sapien
cttcatggctagtgtcaggctggat

SEQ ID NO: 4400928 - DNA, 25 bp, Homo sapien
taatgcaagggggacagttccaaaa

SEQ ID NO: 4400929 - DNA, 25 bp, Homo sapien
tcttcatggtaatgcaagggggaca

SEQ ID NO: 4400930 - DNA, 25 bp, Homo sapien
catgccaggccctgcgccactacat

SEQ ID NO: 4400931 - DNA, 25 bp, Homo sapien
ccatgccaggccctgcgccactaca

SEQ ID NO: 4400932 - DNA, 25 bp, Homo sapien
atgccaggccctgcgccactacatc

SEQ ID NO: 4400933 - DNA, 25 bp, Homo sapien
ggagcccccagccgcggcccgctca

SEQ ID NO: 4400934 - DNA, 25 bp, Homo sapien
gagcccccagccgcggcccgctcac

SEQ ID NO: 4400935 - DNA, 25 bp, Homo sapien
gggagcccccagccgcggcccgctc

SEQ ID NO: 4400936 - DNA, 25 bp, Homo sapien
cgggagcccccagccgcggcccgct

SEQ ID NO: 4400937 - DNA, 25 bp, Homo sapien
gctcacgaagtgaaggttaagcacc

SEQ ID NO: 4400938 - DNA, 25 bp, Homo sapien
caggtggtagtccaccggcccggca

SEQ ID NO: 4400939 - DNA, 25 bp, Homo sapien
cggcattgtgctccgccttggtgaa

SEQ ID NO: 4400940 - DNA, 25 bp, Homo sapien
ctcgaacttggcgaggcgcagcagt

SEQ ID NO: 4400941 - DNA, 25 bp, Homo sapien
cctgagccgaggtagtagaaggcgc

SEQ ID NO: 4400942 - DNA, 25 bp, Homo sapien
aggtctcccggcctgagccgaggta

SEQ ID NO: 4400943 - DNA, 25 bp, Homo sapien
ggtggcgctggagaaggtctcccgg

SEQ ID NO: 4400944 - DNA, 25 bp, Homo sapien
ctcccggcctgagccgaggtagtag

SEQ ID NO: 4400945 - DNA, 25 bp, Homo sapien
gccagcagcagggcgcagtagtggg

SEQ ID NO: 4400946 - DNA, 25 bp, Homo sapien
agcagggcgcagtagtgggagcgca

SEQ ID NO: 4400947 - DNA, 25 bp, Homo sapien
tgggagcgcacagcgcccaggcgcg

SEQ ID NO: 4400948 - DNA, 25 bp, Homo sapien
gggcgcagtagtgggagcgcacagc

SEQ ID NO: 4400949 - DNA, 25 bp, Homo sapien
ccgagcgcatgggagcccgcctcgg

SEQ ID NO: 4400950 - DNA, 25 bp, Homo sapien
cccgagcgcatgggagcccgcctcg

SEQ ID NO: 4400951 - DNA, 25 bp, Homo sapien
gcccgagcgcatgggagcccgcctc

SEQ ID NO: 4400952 - DNA, 25 bp, Homo sapien
ggcggccacttagccccggcgccag

SEQ ID NO: 4400953 - DNA, 25 bp, Homo sapien
gctacgagaccgcggcgccagcggt

SEQ ID NO: 4400954 - DNA, 25 bp, Homo sapien
ccagcaacgcgggagagccctcggg

SEQ ID NO: 4400955 - DNA, 25 bp, Homo sapien
tacgagaccgcggcgccagcggtgc

SEQ ID NO: 4400956 - DNA, 25 bp, Homo sapien
gagctacgatcgccacaggactcca

SEQ ID NO: 4400957 - DNA, 25 bp, Homo sapien
catacccgtactccaagctatgtgg

SEQ ID NO: 4400958 - DNA, 25 bp, Homo sapien
gtgagctacgatcgccacaggactc

SEQ ID NO: 4400959 - DNA, 25 bp, Homo sapien
tcatacccgtactccaagctatgtg

SEQ ID NO: 4400960 - DNA, 25 bp, Homo sapien
tctgaatgaaacacgcaccaatggc

SEQ ID NO: 4400961 - DNA, 25 bp, Homo sapien
gaaatcctaccatgagaatccagtg

SEQ ID NO: 4400962 - DNA, 25 bp, Homo sapien
caattcatcacgtaagccacaggag

SEQ ID NO: 4400963 - DNA, 25 bp, Homo sapien
tcagtcagacctgggtaatggtgcc

SEQ ID NO: 4400964 - DNA, 25 bp, Homo sapien
tgatgaaggcataattttgtgacat

SEQ ID NO: 4400965 - DNA, 25 bp, Homo sapien
aagttttgatgaaggcataattttg

SEQ ID NO: 4400966 - DNA, 25 bp, Homo sapien
tataaaaatggcctacatgatttta

SEQ ID NO: 4400967 - DNA, 25 bp, Homo sapien
aaaatggcctacatgattttataaa

SEQ ID NO: 4400968 - DNA, 25 bp, Homo sapien
catgcttgactgagtgatcctgggc

SEQ ID NO: 4400969 - DNA, 25 bp, Homo sapien
tattccatcgatacatctgtcaagg

SEQ ID NO: 4400970 - DNA, 25 bp, Homo sapien
tcttgtaacctagagatggcctaaa

SEQ ID NO: 4400971 - DNA, 25 bp, Homo sapien
cacctaagaagtataaccgaccgca

SEQ ID NO: 4400972 - DNA, 25 bp, Homo sapien
ccatttgggaaaaatcacgaaatat

SEQ ID NO: 4400973 - DNA, 25 bp, Homo sapien
gaaatatgtcctgataagtttcatc

SEQ ID NO: 4400974 - DNA, 25 bp, Homo sapien
ttctgtgaatcttgctggaaacgat

SEQ ID NO: 4400975 - DNA, 25 bp, Homo sapien
tctggattattggatgccatttggg

SEQ ID NO: 4400976 - DNA, 25 bp, Homo sapien
gatggatgcaagttattaacaagac

SEQ ID NO: 4400977 - DNA, 25 bp, Homo sapien
taaaactaatgcacctaatccactg

SEQ ID NO: 4400978 - DNA, 25 bp, Homo sapien
cagatcaatccctcagacgaaggaa

SEQ ID NO: 4400979 - DNA, 25 bp, Homo sapien
gcaggtcatatgagcaagaatgcta

SEQ ID NO: 4400980 - DNA, 25 bp, Homo sapien
tacgttggaacagctggtaagacaa

SEQ ID NO: 4400981 - DNA, 25 bp, Homo sapien
gaagggtctagcagacgttaatacc

SEQ ID NO: 4400982 - DNA, 25 bp, Homo sapien
gagatgtcataccaaaagctagaga

SEQ ID NO: 4400983 - DNA, 25 bp, Homo sapien
aaaggtctaacagcataagccaaga

SEQ ID NO: 4400984 - DNA, 25 bp, Homo sapien
tagtagaaccattgtaccatgcaaa

SEQ ID NO: 4400985 - DNA, 25 bp, Homo sapien
caacccagaatatgctgccatggaa

SEQ ID NO: 4400986 - DNA, 25 bp, Homo sapien
taacttttctatgtgcctggacagc

SEQ ID NO: 4400987 - DNA, 25 bp, Homo sapien
cagaatatctaccacaacagcagtt

SEQ ID NO: 4400988 - DNA, 25 bp, Homo sapien
agcgattcccaacttgtgcttgcta

SEQ ID NO: 4400989 - DNA, 25 bp, Homo sapien
caggtcatcctatgcacgaccttac

SEQ ID NO: 4400990 - DNA, 25 bp, Homo sapien
actttcataattacttagatcagcg

SEQ ID NO: 4400991 - DNA, 25 bp, Homo sapien
gggtgggtaacagcttactttcata

SEQ ID NO: 4400992 - DNA, 25 bp, Homo sapien
aaccagtagcgggtccctaaagcag

SEQ ID NO: 4400993 - DNA, 25 bp, Homo sapien
tagcgggtccctaaagcagtgatga

SEQ ID NO: 4400994 - DNA, 25 bp, Homo sapien
gcgggtccctaaagcagtgatgatt

SEQ ID NO: 4400995 - DNA, 25 bp, Homo sapien
ccagtagcgggtccctaaagcagtg

SEQ ID NO: 4400996 - DNA, 25 bp, Homo sapien
ctgccaacgatcaagaagagtcaca

SEQ ID NO: 4400997 - DNA, 25 bp, Homo sapien
cctggctaatcagctgggtgaactt

SEQ ID NO: 4400998 - DNA, 25 bp, Homo sapien
tccagagaagagtcgaccactgacc

SEQ ID NO: 4400999 - DNA, 25 bp, Homo sapien
gctcctaaatgatggtggcagacac

SEQ ID NO: 4401000 - DNA, 25 bp, Homo sapien
cagacaccgtaaggaaagagcagct

SEQ ID NO: 4401001 - DNA, 25 bp, Homo sapien
ttccatctcggaacatcatgagccg

SEQ ID NO: 4401002 - DNA, 25 bp, Homo sapien
cagtagtaaatacggtcctctgagg

SEQ ID NO: 4401003 - DNA, 25 bp, Homo sapien
tccataggattcaagtgggacaccc

SEQ ID NO: 4401004 - DNA, 25 bp, Homo sapien
tagaaatatctagctgaagtgcctc

SEQ ID NO: 4401005 - DNA, 25 bp, Homo sapien
ggattagccacccaaggattcagtt

SEQ ID NO: 4401006 - DNA, 25 bp, Homo sapien
gaagacatccgtacagcaaataaag

SEQ ID NO: 4401007 - DNA, 25 bp, Homo sapien
gccagagtgaaatagagcaagtcaa

SEQ ID NO: 4401008 - DNA, 25 bp, Homo sapien
gcaagtcaatgtgtactgtcatagg

SEQ ID NO: 4401009 - DNA, 25 bp, Homo sapien
gaatcttccagttgtaaactgataa

SEQ ID NO: 4401010 - DNA, 25 bp, Homo sapien
aatcttccagttgtaaactgataaa

SEQ ID NO: 4401011 - DNA, 25 bp, Homo sapien
tgaatcttccagttgtaaactgata

SEQ ID NO: 4401012 - DNA, 25 bp, Homo sapien
atgaatcttccagttgtaaactgat

SEQ ID NO: 4401013 - DNA, 25 bp, Homo sapien
ttctgattcccgcatctcttcattc

SEQ ID NO: 4401014 - DNA, 25 bp, Homo sapien
ctgattcccgcatctcttcattcat

SEQ ID NO: 4401015 - DNA, 25 bp, Homo sapien
gtccttctgattcccgcatctcttc

SEQ ID NO: 4401016 - DNA, 25 bp, Homo sapien
ccttctgattcccgcatctcttcat

SEQ ID NO: 4401017 - DNA, 25 bp, Homo sapien
gctatataggtattgcctgggaagc

SEQ ID NO: 4401018 - DNA, 25 bp, Homo sapien
ataataacagtaacccctcctgtgg

SEQ ID NO: 4401019 - DNA, 25 bp, Homo sapien
tgaaactgaagcactcacacaaagt

SEQ ID NO: 4401020 - DNA, 25 bp, Homo sapien
tgggttttcacagaggatgcttaca

SEQ ID NO: 4401021 - DNA, 25 bp, Homo sapien
cacagctatgctcaaagggtctttc

SEQ ID NO: 4401022 - DNA, 25 bp, Homo sapien
ggctgcttccacagctatgctcaaa

SEQ ID NO: 4401023 - DNA, 25 bp, Homo sapien
tggcacctcgttttaggaataaaca

SEQ ID NO: 4401024 - DNA, 25 bp, Homo sapien
catgttgattggcacctcgttttag

SEQ ID NO: 4401025 - DNA, 25 bp, Homo sapien
cgtgacaaaataagtcatggaacac

SEQ ID NO: 4401026 - DNA, 25 bp, Homo sapien
ataaagtctccttaaatatgaaagc

SEQ ID NO: 4401027 - DNA, 25 bp, Homo sapien
caaataaagtctccttaaatatgaa

SEQ ID NO: 4401028 - DNA, 25 bp, Homo sapien
ccatcgtgacaaaataagtcatgga

SEQ ID NO: 4401029 - DNA, 25 bp, Homo sapien
atggtgcaatggtccccgcccttgg

SEQ ID NO: 4401030 - DNA, 25 bp, Homo sapien
gacattagcaccattctgtaggagg

SEQ ID NO: 4401031 - DNA, 25 bp, Homo sapien
cgcccttggacatctctttggttga

SEQ ID NO: 4401032 - DNA, 25 bp, Homo sapien
ccctaagacggtggcatggtgcaat

SEQ ID NO: 4401033 - DNA, 25 bp, Homo sapien
ttctaacccatctcttgaagcaaag

SEQ ID NO: 4401034 - DNA, 25 bp, Homo sapien
ccactactattaatagcacagaggt

SEQ ID NO: 4401035 - DNA, 25 bp, Homo sapien
caaccgaagtggtgctcagaaacca

SEQ ID NO: 4401036 - DNA, 25 bp, Homo sapien
ttcatttgcagtttgtgaactagca

SEQ ID NO: 4401037 - DNA, 25 bp, Homo sapien
taatacagcctgaataagtggtgtc

SEQ ID NO: 4401038 - DNA, 25 bp, Homo sapien
tggcccagttcacgtctgcaccatg

SEQ ID NO: 4401039 - DNA, 25 bp, Homo sapien
ttcctctgaattggcccagttcacg

SEQ ID NO: 4401040 - DNA, 25 bp, Homo sapien
gcctgaataagtggtgtcgctttgt

SEQ ID NO: 4401041 - DNA, 25 bp, Homo sapien
ggtttttttcatatgacgccctata

SEQ ID NO: 4401042 - DNA, 25 bp, Homo sapien
gatgtttcgagtcaagaaacataga

SEQ ID NO: 4401043 - DNA, 25 bp, Homo sapien
agctgaagtcctggattaagatgtt

SEQ ID NO: 4401044 - DNA, 25 bp, Homo sapien
tcatatgacgccctataaagctgaa

SEQ ID NO: 4401045 - DNA, 25 bp, Homo sapien
caggctcatataaactattggctga

SEQ ID NO: 4401046 - DNA, 25 bp, Homo sapien
catcatcagagctctgctgaattcc

SEQ ID NO: 4401047 - DNA, 25 bp, Homo sapien
tcttccatcatcagagctctgctga

SEQ ID NO: 4401048 - DNA, 25 bp, Homo sapien
gctgacaccgtggagggtaaagatt

SEQ ID NO: 4401049 - DNA, 25 bp, Homo sapien
gcctcgtcgctatttacagcaatca

SEQ ID NO: 4401050 - DNA, 25 bp, Homo sapien
aggacaaaacagagactcccgcctg

SEQ ID NO: 4401051 - DNA, 25 bp, Homo sapien
aagagtgaatctagctcatcaggac

SEQ ID NO: 4401052 - DNA, 25 bp, Homo sapien
cgcctggcctcgtcgctatttacag

SEQ ID NO: 4401053 - DNA, 25 bp, Homo sapien
ctggggacatgcaagttagcaaagc

SEQ ID NO: 4401054 - DNA, 25 bp, Homo sapien
gcaagttagcaaagcacaaagcagg

SEQ ID NO: 4401055 - DNA, 25 bp, Homo sapien
ggggacatgcaagttagcaaagcac

SEQ ID NO: 4401056 - DNA, 25 bp, Homo sapien
catgcaagttagcaaagcacaaagc

SEQ ID NO: 4401057 - DNA, 25 bp, Homo sapien
ctgacttggtcccctggcccaaatt

SEQ ID NO: 4401058 - DNA, 25 bp, Homo sapien
gctgctcaggaggtgataatgatat

SEQ ID NO: 4401059 - DNA, 25 bp, Homo sapien
caggaggtgataatgatatagaata

SEQ ID NO: 4401060 - DNA, 25 bp, Homo sapien
tttgctctgatatatgcctccttct

SEQ ID NO: 4401061 - DNA, 25 bp, Homo sapien
ttagcttcataaactcgatttataa

SEQ ID NO: 4401062 - DNA, 25 bp, Homo sapien
gcttcataaactcgatttataacat

SEQ ID NO: 4401063 - DNA, 25 bp, Homo sapien
tcataaactcgatttataacatcat

SEQ ID NO: 4401064 - DNA, 25 bp, Homo sapien
aactcgatttataacatcattcccc

SEQ ID NO: 4401065 - DNA, 25 bp, Homo sapien
tggctcccaggtgtctaaagttaaa

SEQ ID NO: 4401066 - DNA, 25 bp, Homo sapien
caggtgtctaaagttaaagatcgta

SEQ ID NO: 4401067 - DNA, 25 bp, Homo sapien
gctcccaggtgtctaaagttaaaga

SEQ ID NO: 4401068 - DNA, 25 bp, Homo sapien
gttctggctcccaggtgtctaaagt

SEQ ID NO: 4401069 - DNA, 25 bp, Homo sapien
ggtgaattccggagcactcgataca

SEQ ID NO: 4401070 - DNA, 25 bp, Homo sapien
ttgatgctggcccaccgtggatctg

SEQ ID NO: 4401071 - DNA, 25 bp, Homo sapien
tcgatacacaaggtgatgcccaggt

SEQ ID NO: 4401072 - DNA, 25 bp, Homo sapien
cattgccagggatacactggacccg

SEQ ID NO: 4401073 - DNA, 25 bp, Homo sapien
gcaatactggtctgaacagccttaa

SEQ ID NO: 4401074 - DNA, 25 bp, Homo sapien
cttttcggaatctgcctggagcatg

SEQ ID NO: 4401075 - DNA, 25 bp, Homo sapien
catgcctggcgcagcttttcggaat

SEQ ID NO: 4401076 - DNA, 25 bp, Homo sapien
tcacccttctctctataagcagtag

SEQ ID NO: 4401077 - DNA, 25 bp, Homo sapien
cagacactaagttaatgccaaaaac

SEQ ID NO: 4401078 - DNA, 25 bp, Homo sapien
gaagaaattaaggtgccaatgaaac

SEQ ID NO: 4401079 - DNA, 25 bp, Homo sapien
gcaaagtatgttaacgaagaaatta

SEQ ID NO: 4401080 - DNA, 25 bp, Homo sapien
attaaggtgccaatgaaacaaatta

SEQ ID NO: 4401081 - DNA, 25 bp, Homo sapien
tgtcttcacaatgtttcactgtgca

SEQ ID NO: 4401082 - DNA, 25 bp, Homo sapien
ctgtgcaaagcctgaggtcttcaac

SEQ ID NO: 4401083 - DNA, 25 bp, Homo sapien
tgttggcgagaccacctcaaagcag

SEQ ID NO: 4401084 - DNA, 25 bp, Homo sapien
agaatcgtcgctctatgtcttcaca

SEQ ID NO: 4401085 - DNA, 25 bp, Homo sapien
cacttgatacttagtagatgctcaa

SEQ ID NO: 4401086 - DNA, 25 bp, Homo sapien
tatagacataaaagtaattttgtcc

SEQ ID NO: 4401087 - DNA, 25 bp, Homo sapien
ggcataactggtctaattttcaaga

SEQ ID NO: 4401088 - DNA, 25 bp, Homo sapien
tgtcctgttaataactgtatctacc

SEQ ID NO: 4401089 - DNA, 25 bp, Homo sapien
tctggtaaaccaactgattattctg

SEQ ID NO: 4401090 - DNA, 25 bp, Homo sapien
tttctggtaaaccaactgattattc

SEQ ID NO: 4401091 - DNA, 25 bp, Homo sapien
tggtaaaccaactgattattctgta

SEQ ID NO: 4401092 - DNA, 25 bp, Homo sapien
ggtaaaccaactgattattctgtat

SEQ ID NO: 4401093 - DNA, 25 bp, Homo sapien
gcgatcctggtaccttaacctccca

SEQ ID NO: 4401094 - DNA, 25 bp, Homo sapien
acagctcatggactgtgaaatatag

SEQ ID NO: 4401095 - DNA, 25 bp, Homo sapien
ctttggattcagaaactgaccacaa

SEQ ID NO: 4401096 - DNA, 25 bp, Homo sapien
cttgcttcattaagaaaaataaggt

SEQ ID NO: 4401097 - DNA, 25 bp, Homo sapien
cgcgccctgccaagacagtttttaa

SEQ ID NO: 4401098 - DNA, 25 bp, Homo sapien
accgcgccctgccaagacagttttt

SEQ ID NO: 4401099 - DNA, 25 bp, Homo sapien
aatagaaaaatttcttgcttcatta

SEQ ID NO: 4401100 - DNA, 25 bp, Homo sapien
ccatagaagtataggtaatagcaaa

SEQ ID NO: 4401101 - DNA, 25 bp, Homo sapien
aagcgtatcttatttatgggagaaa

SEQ ID NO: 4401102 - DNA, 25 bp, Homo sapien
agttgattttgataagactctacgc

SEQ ID NO: 4401103 - DNA, 25 bp, Homo sapien
gataagactctacgcaataattcca

SEQ ID NO: 4401104 - DNA, 25 bp, Homo sapien
cattgtagtagtccatggaagttca

SEQ ID NO: 4401105 - DNA, 25 bp, Homo sapien
catgaaaacatactggtgagtaacc

SEQ ID NO: 4401106 - DNA, 25 bp, Homo sapien
ggaaaggcttagaagactactgtct

SEQ ID NO: 4401107 - DNA, 25 bp, Homo sapien
tataaagactcaccagtcaagctgg

SEQ ID NO: 4401108 - DNA, 25 bp, Homo sapien
tttctatataaccttgacaccaaga

SEQ ID NO: 4401109 - DNA, 25 bp, Homo sapien
tatataaccttgacaccaagacata

SEQ ID NO: 4401110 - DNA, 25 bp, Homo sapien
tttttctatataaccttgacaccaa

SEQ ID NO: 4401111 - DNA, 25 bp, Homo sapien
tctatataaccttgacaccaagaca

SEQ ID NO: 4401112 - DNA, 25 bp, Homo sapien
gctggctcgtttgaacagatatcct

SEQ ID NO: 4401113 - DNA, 25 bp, Homo sapien
ctgttccaagttttgaaggcattgc

SEQ ID NO: 4401114 - DNA, 25 bp, Homo sapien
aactatgccatttgcagcatctacg

SEQ ID NO: 4401115 - DNA, 25 bp, Homo sapien
cagatatccttccataactatgcca

SEQ ID NO: 4401116 - DNA, 25 bp, Homo sapien
agcctggagtgcaatgaagtgatct

SEQ ID NO: 4401117 - DNA, 25 bp, Homo sapien
cagcctggagtgcaatgaagtgatc

SEQ ID NO: 4401118 - DNA, 25 bp, Homo sapien
cccagcctggagtgcaatgaagtga

SEQ ID NO: 4401119 - DNA, 25 bp, Homo sapien
tgcccagcctggagtgcaatgaagt

SEQ ID NO: 4401120 - DNA, 25 bp, Homo sapien
tgacactgtctatggcattttttcc

SEQ ID NO: 4401121 - DNA, 25 bp, Homo sapien
aacagatcttagtctacagtttgaa

SEQ ID NO: 4401122 - DNA, 25 bp, Homo sapien
tttgaagtgggcaagttgaactcac

SEQ ID NO: 4401123 - DNA, 25 bp, Homo sapien
tttgaacacaactctaagactgctg

SEQ ID NO: 4401124 - DNA, 25 bp, Homo sapien
cacaaaaagcatcaaccgtaagact

SEQ ID NO: 4401125 - DNA, 25 bp, Homo sapien
ccaatagatataagataaggtgctt

SEQ ID NO: 4401126 - DNA, 25 bp, Homo sapien
cattagtcactgaagaagttaaaac

SEQ ID NO: 4401127 - DNA, 25 bp, Homo sapien
tttgatcaaacatcaggcagcctgg

SEQ ID NO: 4401128 - DNA, 25 bp, Homo sapien
aaacgtggagtttgtctcacctgac

SEQ ID NO: 4401129 - DNA, 25 bp, Homo sapien
tctgtaagaccaaacacgcatgttg

SEQ ID NO: 4401130 - DNA, 25 bp, Homo sapien
tgccagaaggcatcctgtgcgtact

SEQ ID NO: 4401131 - DNA, 25 bp, Homo sapien
gcatgttgacactaaggtgcatcca

SEQ ID NO: 4401132 - DNA, 25 bp, Homo sapien
tttgctgcatccacaaccagtcgat

SEQ ID NO: 4401133 - DNA, 25 bp, Homo sapien
ctgcatccacaaccagtcgatccaa

SEQ ID NO: 4401134 - DNA, 25 bp, Homo sapien
ttgctgcatccacaaccagtcgatc

SEQ ID NO: 4401135 - DNA, 25 bp, Homo sapien
cctttgctgcatccacaaccagtcg

SEQ ID NO: 4401136 - DNA, 25 bp, Homo sapien
gcagacttaaaaaaagtatggatta

SEQ ID NO: 4401137 - DNA, 25 bp, Homo sapien
tatggattagtttttcaaaccatat

SEQ ID NO: 4401138 - DNA, 25 bp, Homo sapien
aactgcagacttaaaaaaagtatgg

SEQ ID NO: 4401139 - DNA, 25 bp, Homo sapien
agtatggattagtttttcaaaccat

SEQ ID NO: 4401140 - DNA, 25 bp, Homo sapien
ggccaaatgggcatacataaatgac

SEQ ID NO: 4401141 - DNA, 25 bp, Homo sapien
tccttgatgaaagaaggccaaatgg

SEQ ID NO: 4401142 - DNA, 25 bp, Homo sapien
tgtgcaccaagatccttcatgtagg

SEQ ID NO: 4401143 - DNA, 25 bp, Homo sapien
tagggtccaagttcactaaacagat

SEQ ID NO: 4401144 - DNA, 25 bp, Homo sapien
tttttgaagtccaaataatgccaaa

SEQ ID NO: 4401145 - DNA, 25 bp, Homo sapien
aagtgggtgaagaggctcaaggaaa

SEQ ID NO: 4401146 - DNA, 25 bp, Homo sapien
tggttttgtaactgcatacggaaga

SEQ ID NO: 4401147 - DNA, 25 bp, Homo sapien
aaaattctccaaatgatactattca

SEQ ID NO: 4401148 - DNA, 25 bp, Homo sapien
gatctcctttttgattgaagaacat

SEQ ID NO: 4401149 - DNA, 25 bp, Homo sapien
tctgatctcctttttgattgaagaa

SEQ ID NO: 4401150 - DNA, 25 bp, Homo sapien
tgattttaggatttctgatctcctt

SEQ ID NO: 4401151 - DNA, 25 bp, Homo sapien
gattttaggatttctgatctccttt

SEQ ID NO: 4401152 - DNA, 25 bp, Homo sapien
catggccggcaaggcccagtgtgat

SEQ ID NO: 4401153 - DNA, 25 bp, Homo sapien
gctgttctgtgcacacgccatgatg

SEQ ID NO: 4401154 - DNA, 25 bp, Homo sapien
tcaggctatctcctaccaatcaggt

SEQ ID NO: 4401155 - DNA, 25 bp, Homo sapien
gatgttccgcccagatgggtatcag

SEQ ID NO: 4401156 - DNA, 25 bp, Homo sapien
cagtaagacttagggctgcagcaaa

SEQ ID NO: 4401157 - DNA, 25 bp, Homo sapien
cattttggcaactagatatactggc

SEQ ID NO: 4401158 - DNA, 25 bp, Homo sapien
tggagaagtctgagtaacccggatc

SEQ ID NO: 4401159 - DNA, 25 bp, Homo sapien
tctaaccactggactagaggctagg

SEQ ID NO: 4401160 - DNA, 25 bp, Homo sapien
gctatgtgtcggaaacattttcttg

SEQ ID NO: 4401161 - DNA, 25 bp, Homo sapien
ctgaagcacataatcgagggctatg

SEQ ID NO: 4401162 - DNA, 25 bp, Homo sapien
tgactttttcgaattgcttcttggc

SEQ ID NO: 4401163 - DNA, 25 bp, Homo sapien
tacttgggcattttttactaacgca

SEQ ID NO: 4401164 - DNA, 25 bp, Homo sapien
cttagtgaaacttttataacttgct

SEQ ID NO: 4401165 - DNA, 25 bp, Homo sapien
agtgaaacttttataacttgcttca

SEQ ID NO: 4401166 - DNA, 25 bp, Homo sapien
tagtgaaacttttataacttgcttc

SEQ ID NO: 4401167 - DNA, 25 bp, Homo sapien
gtgaaacttttataacttgcttcat

SEQ ID NO: 4401168 - DNA, 25 bp, Homo sapien
tgccttaattgatctctgagtttgg

SEQ ID NO: 4401169 - DNA, 25 bp, Homo sapien
ttgatctctgagtttggtcaaacag

SEQ ID NO: 4401170 - DNA, 25 bp, Homo sapien
ctgaagctgtgccttaattgatctc

SEQ ID NO: 4401171 - DNA, 25 bp, Homo sapien
gctgtgccttaattgatctctgagt

SEQ ID NO: 4401172 - DNA, 25 bp, Homo sapien
aaggttagtaaaagagtaggctgca

SEQ ID NO: 4401173 - DNA, 25 bp, Homo sapien
tccagtctatactttcccaggagaa

SEQ ID NO: 4401174 - DNA, 25 bp, Homo sapien
taggctgcataaccatagagagcat

SEQ ID NO: 4401175 - DNA, 25 bp, Homo sapien
ggaggaaagctaagacgcacttcaa

SEQ ID NO: 4401176 - DNA, 25 bp, Homo sapien
catgcgctcgtagcaaccacagggc

SEQ ID NO: 4401177 - DNA, 25 bp, Homo sapien
gcaactgtgggactacaagccggaa

SEQ ID NO: 4401178 - DNA, 25 bp, Homo sapien
caagccggaacgcagtgctgccaat

SEQ ID NO: 4401179 - DNA, 25 bp, Homo sapien
gaatctgcgctgcacacggggaaag

SEQ ID NO: 4401180 - DNA, 25 bp, Homo sapien
actgcactcattttggagaaagtaa

SEQ ID NO: 4401181 - DNA, 25 bp, Homo sapien
gactgcactcattttggagaaagta

SEQ ID NO: 4401182 - DNA, 25 bp, Homo sapien
ccagatgttatccaagaccacagta

SEQ ID NO: 4401183 - DNA, 25 bp, Homo sapien
agatgttatccaagaccacagtatt

SEQ ID NO: 4401184 - DNA, 25 bp, Homo sapien
cagatgttatccaagaccacagtat

SEQ ID NO: 4401185 - DNA, 25 bp, Homo sapien
tccagatgttatccaagaccacagt

SEQ ID NO: 4401186 - DNA, 25 bp, Homo sapien
gcagcagaggggagaatgaacgcag

SEQ ID NO: 4401187 - DNA, 25 bp, Homo sapien
gcaggaggaattaccaaacacttac

SEQ ID NO: 4401188 - DNA, 25 bp, Homo sapien
ggaaagcaaggcatctttttcacaa

SEQ ID NO: 4401189 - DNA, 25 bp, Homo sapien
gggaaagcaaggcatctttttcaca

SEQ ID NO: 4401190 - DNA, 25 bp, Homo sapien
gaactacagcattactagtcttggg

SEQ ID NO: 4401191 - DNA, 25 bp, Homo sapien
caagctggtatctctataagtgtcc

SEQ ID NO: 4401192 - DNA, 25 bp, Homo sapien
gatacagctgtagggaccaaaaacc

SEQ ID NO: 4401193 - DNA, 25 bp, Homo sapien
ggtttgaatacttggatagccttct

SEQ ID NO: 4401194 - DNA, 25 bp, Homo sapien
actggcttagtgttgtatcacaatc

SEQ ID NO: 4401195 - DNA, 25 bp, Homo sapien
tctacctgtactaatttgtttctcc

SEQ ID NO: 4401196 - DNA, 25 bp, Homo sapien
tgtaggtggcgcgaccttagctcac

SEQ ID NO: 4401197 - DNA, 25 bp, Homo sapien
tgtctggcccttctacctgtactaa

SEQ ID NO: 4401198 - DNA, 25 bp, Homo sapien
gaaacataggctgcttctatatttt

SEQ ID NO: 4401199 - DNA, 25 bp, Homo sapien
ttacattcatacaggaagatttgca

SEQ ID NO: 4401200 - DNA, 25 bp, Homo sapien
cattcatacaggaagatttgcaggc

SEQ ID NO: 4401201 - DNA, 25 bp, Homo sapien
aattacattcatacaggaagatttg

SEQ ID NO: 4401202 - DNA, 25 bp, Homo sapien
tacattcatacaggaagatttgcag

SEQ ID NO: 4401203 - DNA, 25 bp, Homo sapien
ttaaatgactggacaatctgactcc

SEQ ID NO: 4401204 - DNA, 25 bp, Homo sapien
aaactgatataccaaagcccaactg

SEQ ID NO: 4401205 - DNA, 25 bp, Homo sapien
tgagctctgctagagaatctaatgc

SEQ ID NO: 4401206 - DNA, 25 bp, Homo sapien
taaatgacacctctggaatatccag

SEQ ID NO: 4401207 - DNA, 25 bp, Homo sapien
cactgtggccccaacttcccaggct

SEQ ID NO: 4401208 - DNA, 25 bp, Homo sapien
atttcttgtagagaccgagtttcgc

SEQ ID NO: 4401209 - DNA, 25 bp, Homo sapien
agggctcaagcaatcaaaccacctc

SEQ ID NO: 4401210 - DNA, 25 bp, Homo sapien
cagctcactgtggccccaacttccc

SEQ ID NO: 4401211 - DNA, 25 bp, Homo sapien
agtataacagtaaacaaggtaagtg

SEQ ID NO: 4401212 - DNA, 25 bp, Homo sapien
gagttatgtaactactgggagtata

SEQ ID NO: 4401213 - DNA, 25 bp, Homo sapien
aaatgagagttatgtaactactggg

SEQ ID NO: 4401214 - DNA, 25 bp, Homo sapien
taactactgggagtataacagtaaa

SEQ ID NO: 4401215 - DNA, 25 bp, Homo sapien
cacaagtcattcctactgaaaaaaa

SEQ ID NO: 4401216 - DNA, 25 bp, Homo sapien
aaaggccagatagaatagatggtat

SEQ ID NO: 4401217 - DNA, 25 bp, Homo sapien
gaaaatttctgagacgctgtcaaaa

SEQ ID NO: 4401218 - DNA, 25 bp, Homo sapien
gccacaaatataggaattctagttc

SEQ ID NO: 4401219 - DNA, 25 bp, Homo sapien
cttgaagactgtcagaaaacttggt

SEQ ID NO: 4401220 - DNA, 25 bp, Homo sapien
ttgaagactgtcagaaaacttggtc

SEQ ID NO: 4401221 - DNA, 25 bp, Homo sapien
tcaatcattgcaatacaaagtttca

SEQ ID NO: 4401222 - DNA, 25 bp, Homo sapien
tgagccaggtctcgaatcccattca

SEQ ID NO: 4401223 - DNA, 25 bp, Homo sapien
tcatgaactgtttatttgcaacaca

SEQ ID NO: 4401224 - DNA, 25 bp, Homo sapien
tcattactagaatactgagccaggt

SEQ ID NO: 4401225 - DNA, 25 bp, Homo sapien
tacagataggccatatgacacatgt

SEQ ID NO: 4401226 - DNA, 25 bp, Homo sapien
gcgtctctcagtggacagctagata

SEQ ID NO: 4401227 - DNA, 25 bp, Homo sapien
ctacagaaggcagtttagcgagagc

SEQ ID NO: 4401228 - DNA, 25 bp, Homo sapien
tattggtagcaagctaagcgtctct

SEQ ID NO: 4401229 - DNA, 25 bp, Homo sapien
agttttagttccaattctgccacat

SEQ ID NO: 4401230 - DNA, 25 bp, Homo sapien
tatcaagttttagttccaattctgc

SEQ ID NO: 4401231 - DNA, 25 bp, Homo sapien
agttccaattctgccacatcacctt

SEQ ID NO: 4401232 - DNA, 25 bp, Homo sapien
tttagttccaattctgccacatcac

SEQ ID NO: 4401233 - DNA, 25 bp, Homo sapien
gaggttgacgcttcagtgcactcca

SEQ ID NO: 4401234 - DNA, 25 bp, Homo sapien
tatttccagaacaagcatggtggct

SEQ ID NO: 4401235 - DNA, 25 bp, Homo sapien
gtaagatattctcaggagacagagc

SEQ ID NO: 4401236 - DNA, 25 bp, Homo sapien
gatgctctagcatatgactggagaa

SEQ ID NO: 4401237 - DNA, 25 bp, Homo sapien
gatagaaccattctgggacatatgt

SEQ ID NO: 4401238 - DNA, 25 bp, Homo sapien
ttcgcagatgaatagatgacttcta

SEQ ID NO: 4401239 - DNA, 25 bp, Homo sapien
tcctccccaatttttacgaagcaca

SEQ ID NO: 4401240 - DNA, 25 bp, Homo sapien
gagaagacaatgagcacagtcacaa

SEQ ID NO: 4401241 - DNA, 25 bp, Homo sapien
tgatctactaagcaaacctagctag

SEQ ID NO: 4401242 - DNA, 25 bp, Homo sapien
tacaaatgttgtaactgctcctacg

SEQ ID NO: 4401243 - DNA, 25 bp, Homo sapien
gctcctacgtgctcaaattgatcta

SEQ ID NO: 4401244 - DNA, 25 bp, Homo sapien
tgtcaactcatacgagcccctgaga

SEQ ID NO: 4401245 - DNA, 25 bp, Homo sapien
gttgatttctacagcatcatagttg

SEQ ID NO: 4401246 - DNA, 25 bp, Homo sapien
gatttctacagcatcatagttgcac

SEQ ID NO: 4401247 - DNA, 25 bp, Homo sapien
ctgttgatttctacagcatcatagt

SEQ ID NO: 4401248 - DNA, 25 bp, Homo sapien
tttctacagcatcatagttgcacat

SEQ ID NO: 4401249 - DNA, 25 bp, Homo sapien
gaaacttgatctccattgtcacagt

SEQ ID NO: 4401250 - DNA, 25 bp, Homo sapien
aagcagagatagctggccctcacca

SEQ ID NO: 4401251 - DNA, 25 bp, Homo sapien
gccattgaggacacatcaacaaggt

SEQ ID NO: 4401252 - DNA, 25 bp, Homo sapien
tccattgtcacagtatgaagaggtg

SEQ ID NO: 4401253 - DNA, 25 bp, Homo sapien
gattatatcatcacttaccacacag

SEQ ID NO: 4401254 - DNA, 25 bp, Homo sapien
tgcttaagaatctacacttggctaa

SEQ ID NO: 4401255 - DNA, 25 bp, Homo sapien
taaaactcacactgtaaggccagga

SEQ ID NO: 4401256 - DNA, 25 bp, Homo sapien
cacagacctgccagcaaaatgctta

SEQ ID NO: 4401257 - DNA, 25 bp, Homo sapien
gacttaggaaacagcaagcggtaaa

SEQ ID NO: 4401258 - DNA, 25 bp, Homo sapien
gcggtaaaacaagcccctgctctca

SEQ ID NO: 4401259 - DNA, 25 bp, Homo sapien
cacgcactgtactagagacttagga

SEQ ID NO: 4401260 - DNA, 25 bp, Homo sapien
gcaagcggtaaaacaagcccctgct

SEQ ID NO: 4401261 - DNA, 25 bp, Homo sapien
catggagatgcttgcaagagactgt

SEQ ID NO: 4401262 - DNA, 25 bp, Homo sapien
gggtagatcggcctatatgcaacat

SEQ ID NO: 4401263 - DNA, 25 bp, Homo sapien
caggacatttttccgtgctctccaa

SEQ ID NO: 4401264 - DNA, 25 bp, Homo sapien
tagctgccttatcgagacaaaattc

SEQ ID NO: 4401265 - DNA, 25 bp, Homo sapien
ggaaggagcagaacaaggagatcaa

SEQ ID NO: 4401266 - DNA, 25 bp, Homo sapien
ctgagatcactgactaccttcagac

SEQ ID NO: 4401267 - DNA, 25 bp, Homo sapien
aaggagcagaacaaggagatcaatc

SEQ ID NO: 4401268 - DNA, 25 bp, Homo sapien
ggagcagaacaaggagatcaatctg

SEQ ID NO: 4401269 - DNA, 25 bp, Homo sapien
gtagaagggattacgggcacgagcc

SEQ ID NO: 4401270 - DNA, 25 bp, Homo sapien
aagtagaagggattacgggcacgag

SEQ ID NO: 4401271 - DNA, 25 bp, Homo sapien
agtagaagggattacgggcacgagc

SEQ ID NO: 4401272 - DNA, 25 bp, Homo sapien
caagtagaagggattacgggcacga

SEQ ID NO: 4401273 - DNA, 25 bp, Homo sapien
aatgatcactactagcacctgtcgc

SEQ ID NO: 4401274 - DNA, 25 bp, Homo sapien
acctgtcgccaggatacagctgctg

SEQ ID NO: 4401275 - DNA, 25 bp, Homo sapien
cagctgctgcgttcaaaccaaaaga

SEQ ID NO: 4401276 - DNA, 25 bp, Homo sapien
tgtgcatcgcctatttgacttctca

SEQ ID NO: 4401277 - DNA, 25 bp, Homo sapien
aaaatgaactagtgacacacagaaa

SEQ ID NO: 4401278 - DNA, 25 bp, Homo sapien
aagcaatctatccatcatcaggaga

SEQ ID NO: 4401279 - DNA, 25 bp, Homo sapien
gtaagaatgaactagtgacactggc

SEQ ID NO: 4401280 - DNA, 25 bp, Homo sapien
aatctatccatcatcaggagaatga

SEQ ID NO: 4401281 - DNA, 25 bp, Homo sapien
ggcaccaatccagacttaatagcaa

SEQ ID NO: 4401282 - DNA, 25 bp, Homo sapien
tacccactgtattaacaggcagttg

SEQ ID NO: 4401283 - DNA, 25 bp, Homo sapien
ttaatagcaacacataactgaggtg

SEQ ID NO: 4401284 - DNA, 25 bp, Homo sapien
gaacaagaatcgtatctagccgggc

SEQ ID NO: 4401285 - DNA, 25 bp, Homo sapien
atgcggttgatcacagcgcttcccc

SEQ ID NO: 4401286 - DNA, 25 bp, Homo sapien
ccacggaatgcggttgatcacagcg

SEQ ID NO: 4401287 - DNA, 25 bp, Homo sapien
gattcccgcacgcatccaccgcggg

SEQ ID NO: 4401288 - DNA, 25 bp, Homo sapien
ggcgccctccggagagtcgctctgg

SEQ ID NO: 4401289 - DNA, 25 bp, Homo sapien
aagcggggcgagtccttcagacact

SEQ ID NO: 4401290 - DNA, 25 bp, Homo sapien
gcggggcgagtccttcagacactcc

SEQ ID NO: 4401291 - DNA, 25 bp, Homo sapien
gaagcggggcgagtccttcagacac

SEQ ID NO: 4401292 - DNA, 25 bp, Homo sapien
ctgaagcggggcgagtccttcagac

SEQ ID NO: 4401293 - DNA, 25 bp, Homo sapien
gcgctgggacgcagacggctacggc

SEQ ID NO: 4401294 - DNA, 25 bp, Homo sapien
tacggcgggcgcacggccgcgacta

SEQ ID NO: 4401295 - DNA, 25 bp, Homo sapien
cgttgcgcggagctgcgaagggcgc

SEQ ID NO: 4401296 - DNA, 25 bp, Homo sapien
cggccgcgctgggacgcagacggct

SEQ ID NO: 4401297 - DNA, 25 bp, Homo sapien
ggcgacgactagtcaggccccagtc

SEQ ID NO: 4401298 - DNA, 25 bp, Homo sapien
atagcagccgcgaagacggcgacga

SEQ ID NO: 4401299 - DNA, 25 bp, Homo sapien
ttcctcccgccccaagtagagcgct

SEQ ID NO: 4401300 - DNA, 25 bp, Homo sapien
gccccaagtagagcgctggccgcag

SEQ ID NO: 4401301 - DNA, 25 bp, Homo sapien
gacggcaacccgagccaatgagcag

SEQ ID NO: 4401302 - DNA, 25 bp, Homo sapien
tccttgggaaggaagtcacgtggct

SEQ ID NO: 4401303 - DNA, 25 bp, Homo sapien
aatgagcagcgcgaccgtgggcacc

SEQ ID NO: 4401304 - DNA, 25 bp, Homo sapien
gcaacgggtctgagcgacggcaacc

SEQ ID NO: 4401305 - DNA, 25 bp, Homo sapien
gctgtcggcagcttgttgatgtgac

SEQ ID NO: 4401306 - DNA, 25 bp, Homo sapien
gtgactctcgaacacagcagaggtg

SEQ ID NO: 4401307 - DNA, 25 bp, Homo sapien
gcagcttgttgatgtgactctcgaa

SEQ ID NO: 4401308 - DNA, 25 bp, Homo sapien
ttgatgtgactctcgaacacagcag

SEQ ID NO: 4401309 - DNA, 25 bp, Homo sapien
gagtgaagcaggcagtaatttcaga

SEQ ID NO: 4401310 - DNA, 25 bp, Homo sapien
gttgatgtaatgagtgaagcaggca

SEQ ID NO: 4401311 - DNA, 25 bp, Homo sapien
tgtaatgagtgaagcaggcagtaat

SEQ ID NO: 4401312 - DNA, 25 bp, Homo sapien
tggtttggttgatgtaatgagtgaa

SEQ ID NO: 4401313 - DNA, 25 bp, Homo sapien
cttgacaatccagcaagtttgcttt

SEQ ID NO: 4401314 - DNA, 25 bp, Homo sapien
tccagcaagtttgctttgtgtccag

SEQ ID NO: 4401315 - DNA, 25 bp, Homo sapien
caatccagcaagtttgctttgtgtc

SEQ ID NO: 4401316 - DNA, 25 bp, Homo sapien
gacaatccagcaagtttgctttgtg

SEQ ID NO: 4401317 - DNA, 25 bp, Homo sapien
gagcagcgtagctggaatattttct

SEQ ID NO: 4401318 - DNA, 25 bp, Homo sapien
tatgcaaccttcttcttggtccgtg

SEQ ID NO: 4401319 - DNA, 25 bp, Homo sapien
tggtccgtgcatttacatccagctg

SEQ ID NO: 4401320 - DNA, 25 bp, Homo sapien
ggcattggaatctatgcaaccttct

SEQ ID NO: 4401321 - DNA, 25 bp, Homo sapien
aaatccaaggcattggaatctatgc

SEQ ID NO: 4401322 - DNA, 25 bp, Homo sapien
taaaatgtaggcgtgagggtaagaa

SEQ ID NO: 4401323 - DNA, 25 bp, Homo sapien
attttattacagtacgtgtagtgta

SEQ ID NO: 4401324 - DNA, 25 bp, Homo sapien
tagtgtatactaactgaaagggaaa

SEQ ID NO: 4401325 - DNA, 25 bp, Homo sapien
cagtacgtgtagtgtatactaactg

SEQ ID NO: 4401326 - DNA, 25 bp, Homo sapien
tgtagtgtatactaactgaaaggga

SEQ ID NO: 4401327 - DNA, 25 bp, Homo sapien
tctaaatcagtggtattcctagctg

SEQ ID NO: 4401328 - DNA, 25 bp, Homo sapien
ttgaacataccttttctcagctgca

SEQ ID NO: 4401329 - DNA, 25 bp, Homo sapien
gaaatgtttagaatactgcactcac

SEQ ID NO: 4401330 - DNA, 25 bp, Homo sapien
tgtgacagcctaaaaccccactgag

SEQ ID NO: 4401331 - DNA, 25 bp, Homo sapien
agttcagcagtactttgattatata

SEQ ID NO: 4401332 - DNA, 25 bp, Homo sapien
ttcaaatactgctgtttccataaac

SEQ ID NO: 4401333 - DNA, 25 bp, Homo sapien
tggccacattcttctaacagcaagg

SEQ ID NO: 4401334 - DNA, 25 bp, Homo sapien
tcttctaacagcaaggaattctccc

SEQ ID NO: 4401335 - DNA, 25 bp, Homo sapien
ctgcaagtggaagataagctgttca

SEQ ID NO: 4401336 - DNA, 25 bp, Homo sapien
gggctttcctgcacttggttgaagg

SEQ ID NO: 4401337 - DNA, 25 bp, Homo sapien
gtatttcccacctatagcactgctg

SEQ ID NO: 4401338 - DNA, 25 bp, Homo sapien
gaaagagctcctaatgtggtgacag

SEQ ID NO: 4401339 - DNA, 25 bp, Homo sapien
gatgatattacactgtatttgtggt

SEQ ID NO: 4401340 - DNA, 25 bp, Homo sapien
ggcaatatataataactggtatgca

SEQ ID NO: 4401341 - DNA, 25 bp, Homo sapien
ggactgatgatattacactgtattt

SEQ ID NO: 4401342 - DNA, 25 bp, Homo sapien
caatatataataactggtatgcatt

SEQ ID NO: 4401343 - DNA, 25 bp, Homo sapien
tgctgttggtcacttggagtagatc

SEQ ID NO: 4401344 - DNA, 25 bp, Homo sapien
ctatgaacttcgtaatttgttttgc

SEQ ID NO: 4401345 - DNA, 25 bp, Homo sapien
gttttgctgttggtcacttggagta

SEQ ID NO: 4401346 - DNA, 25 bp, Homo sapien
atgaacttcgtaatttgttttgctg

SEQ ID NO: 4401347 - DNA, 25 bp, Homo sapien
ctaaaatcaaatcaactctaggtat

SEQ ID NO: 4401348 - DNA, 25 bp, Homo sapien
caaatcaactctaggtataaaaact

SEQ ID NO: 4401349 - DNA, 25 bp, Homo sapien
aagtaaaccataagaaagccatata

SEQ ID NO: 4401350 - DNA, 25 bp, Homo sapien
tccttgcctaaaggcaagtaaacca

SEQ ID NO: 4401351 - DNA, 25 bp, Homo sapien
cattatcttaggcacagaccattac

SEQ ID NO: 4401352 - DNA, 25 bp, Homo sapien
ttaggcacagaccattacaaaagtc

SEQ ID NO: 4401353 - DNA, 25 bp, Homo sapien
taaagcgaatctcagcaaaattttc

SEQ ID NO: 4401354 - DNA, 25 bp, Homo sapien
aataaagtacattatcttaggcaca

SEQ ID NO: 4401355 - DNA, 25 bp, Homo sapien
tttgaaattaattgtctggctagtt

SEQ ID NO: 4401356 - DNA, 25 bp, Homo sapien
gaaattaattgtctggctagtttga

SEQ ID NO: 4401357 - DNA, 25 bp, Homo sapien
cttttgaaattaattgtctggctag

SEQ ID NO: 4401358 - DNA, 25 bp, Homo sapien
aggtcttttgaaattaattgtctgg

SEQ ID NO: 4401359 - DNA, 25 bp, Homo sapien
tataaaatgcaacaagataagacat

SEQ ID NO: 4401360 - DNA, 25 bp, Homo sapien
tctacccacaagcttggattttcct

SEQ ID NO: 4401361 - DNA, 25 bp, Homo sapien
tgcaacaagataagacatactcctt

SEQ ID NO: 4401362 - DNA, 25 bp, Homo sapien
tatatattcacatgaatcaaaaagt

SEQ ID NO: 4401363 - DNA, 25 bp, Homo sapien
atgtgtatgtgctgaatggcctacg

SEQ ID NO: 4401364 - DNA, 25 bp, Homo sapien
ggcagcaatgccttaaatgtgtatg

SEQ ID NO: 4401365 - DNA, 25 bp, Homo sapien
gctgaatggcctacgagaccctctt

SEQ ID NO: 4401366 - DNA, 25 bp, Homo sapien
gaaagcacgagcaggcagcaatgcc

SEQ ID NO: 4401367 - DNA, 25 bp, Homo sapien
gatgggacctaataaagaccttcac

SEQ ID NO: 4401368 - DNA, 25 bp, Homo sapien
aaattactagcaccatgatgaaagc

SEQ ID NO: 4401369 - DNA, 25 bp, Homo sapien
gcataagcaactgggaaattagctc

SEQ ID NO: 4401370 - DNA, 25 bp, Homo sapien
taagaccgtccaaacgctcaatgac

SEQ ID NO: 4401371 - DNA, 25 bp, Homo sapien
tcctgaatccgatactttggctcca

SEQ ID NO: 4401372 - DNA, 25 bp, Homo sapien
gaatccgatactttggctccaagcc

SEQ ID NO: 4401373 - DNA, 25 bp, Homo sapien
tgaatccgatactttggctccaagc

SEQ ID NO: 4401374 - DNA, 25 bp, Homo sapien
ctttggctccaagccttcagctgca

SEQ ID NO: 4401375 - DNA, 25 bp, Homo sapien
aagagagcagaaacgtgccgggcat

SEQ ID NO: 4401376 - DNA, 25 bp, Homo sapien
tgggagcactagttaaacccaggag

SEQ ID NO: 4401377 - DNA, 25 bp, Homo sapien
tgtgctagctataacctgatgagga

SEQ ID NO: 4401378 - DNA, 25 bp, Homo sapien
caatgagctttgattgcgcctctgc

SEQ ID NO: 4401379 - DNA, 25 bp, Homo sapien
agtggcctcggtgtcactacaggca

SEQ ID NO: 4401380 - DNA, 25 bp, Homo sapien
tcagtggcctcggtgtcactacagg

SEQ ID NO: 4401381 - DNA, 25 bp, Homo sapien
tggcctcggtgtcactacaggcatc

SEQ ID NO: 4401382 - DNA, 25 bp, Homo sapien
cctcggtgtcactacaggcatcttc

SEQ ID NO: 4401383 - DNA, 25 bp, Homo sapien
tgcacatagcctcaattacttaggg

SEQ ID NO: 4401384 - DNA, 25 bp, Homo sapien
caggttatctctgcatgcacatagc

SEQ ID NO: 4401385 - DNA, 25 bp, Homo sapien
actgataaaagcaggacacaggtta

SEQ ID NO: 4401386 - DNA, 25 bp, Homo sapien
ccatggctggccaaatgaaactctc

SEQ ID NO: 4401387 - DNA, 25 bp, Homo sapien
gctataactgtgcctgttaatagcc

SEQ ID NO: 4401388 - DNA, 25 bp, Homo sapien
tatgcctttgcttagctcccgctta

SEQ ID NO: 4401389 - DNA, 25 bp, Homo sapien
tacatatataccacaaaaaactgtg

SEQ ID NO: 4401390 - DNA, 25 bp, Homo sapien
tggtaacttttggatttatgctgtc

SEQ ID NO: 4401391 - DNA, 25 bp, Homo sapien
tttttatgctcatcagtctttaata

SEQ ID NO: 4401392 - DNA, 25 bp, Homo sapien
tgcccggcccaaggtattatcttaa

SEQ ID NO: 4401393 - DNA, 25 bp, Homo sapien
ggacgggctggtctttcacctcagg

SEQ ID NO: 4401394 - DNA, 25 bp, Homo sapien
tgtcttcatactggttactgctgcg

SEQ ID NO: 4401395 - DNA, 25 bp, Homo sapien
tactgctgcgtaatgtaatttcaca

SEQ ID NO: 4401396 - DNA, 25 bp, Homo sapien
tgctggatgatacgtcgccaagatg

SEQ ID NO: 4401397 - DNA, 25 bp, Homo sapien
tatggtaaggagtgcttggttcatc

SEQ ID NO: 4401398 - DNA, 25 bp, Homo sapien
gtctgctggatgatacgtcgccaag

SEQ ID NO: 4401399 - DNA, 25 bp, Homo sapien
cgtcgccaagatgttcatttcatcc

SEQ ID NO: 4401400 - DNA, 25 bp, Homo sapien
gggtaggagtcaaactatcatcgca

SEQ ID NO: 4401401 - DNA, 25 bp, Homo sapien
gaatctggtgtgtaaaatggctccc

SEQ ID NO: 4401402 - DNA, 25 bp, Homo sapien
cagccgaggtagcatgttcccagat

SEQ ID NO: 4401403 - DNA, 25 bp, Homo sapien
catttgaggtccgttagcagttgct

SEQ ID NO: 4401404 - DNA, 25 bp, Homo sapien
taccctgccacagatactacagaag

SEQ ID NO: 4401405 - DNA, 25 bp, Homo sapien
gacaggactgtaactctaactcgac

SEQ ID NO: 4401406 - DNA, 25 bp, Homo sapien
tgggcccacgggaaattacagcaga

SEQ ID NO: 4401407 - DNA, 25 bp, Homo sapien
cgacaggtcagtcccttttaagtga

SEQ ID NO: 4401408 - DNA, 25 bp, Homo sapien
aagatccccttgatgggccggtgcg

SEQ ID NO: 4401409 - DNA, 25 bp, Homo sapien
cattcccgcggggctgttcggccga

SEQ ID NO: 4401410 - DNA, 25 bp, Homo sapien
tgggccggtgcgaggccgtcgaggc

SEQ ID NO: 4401411 - DNA, 25 bp, Homo sapien
tcagctcctcgtcgacattcccgcg

SEQ ID NO: 4401412 - DNA, 25 bp, Homo sapien
tgccgggcgctccggctgtcggctc

SEQ ID NO: 4401413 - DNA, 25 bp, Homo sapien
cgggcgctccggctgtcggctcagg

SEQ ID NO: 4401414 - DNA, 25 bp, Homo sapien
cgctccggctgtcggctcagggtcg

SEQ ID NO: 4401415 - DNA, 25 bp, Homo sapien
ggcgctccggctgtcggctcagggt

SEQ ID NO: 4401416 - DNA, 25 bp, Homo sapien
agaagggtcggcacagcagagactc

SEQ ID NO: 4401417 - DNA, 25 bp, Homo sapien
aggcagccgcagatcccgctcaggg

SEQ ID NO: 4401418 - DNA, 25 bp, Homo sapien
gccgcaactgctgcctcggaaacgg

SEQ ID NO: 4401419 - DNA, 25 bp, Homo sapien
cagagactcgcaggcagccgcagat

SEQ ID NO: 4401420 - DNA, 25 bp, Homo sapien
gcagcggttgtcacgacacaacgac

SEQ ID NO: 4401421 - DNA, 25 bp, Homo sapien
ctctcgcgatatctagggaggaggc

SEQ ID NO: 4401422 - DNA, 25 bp, Homo sapien
cttgacccgcggctcgcggagagac

SEQ ID NO: 4401423 - DNA, 25 bp, Homo sapien
gtggcggctactcgcgcacccttag

SEQ ID NO: 4401424 - DNA, 25 bp, Homo sapien
tctaatgaaagggactacgatcgta

SEQ ID NO: 4401425 - DNA, 25 bp, Homo sapien
tgtgactgggcccttgattaagcaa

SEQ ID NO: 4401426 - DNA, 25 bp, Homo sapien
catccctgaactcaactgtgactgg

SEQ ID NO: 4401427 - DNA, 25 bp, Homo sapien
taacaaacattggaacaggaggtga

SEQ ID NO: 4401428 - DNA, 25 bp, Homo sapien
agcctgcctgagtcatcagctaggt

SEQ ID NO: 4401429 - DNA, 25 bp, Homo sapien
catcagctaggtccacagagtagag

SEQ ID NO: 4401430 - DNA, 25 bp, Homo sapien
gtgcccccgcctaacatctggaaaa

SEQ ID NO: 4401431 - DNA, 25 bp, Homo sapien
tgagtcatcagctaggtccacagag

SEQ ID NO: 4401432 - DNA, 25 bp, Homo sapien
ctgtgttatcaggtgtttttatcaa

SEQ ID NO: 4401433 - DNA, 25 bp, Homo sapien
caagaccctctttgcgctcccgtgg

SEQ ID NO: 4401434 - DNA, 25 bp, Homo sapien
tgttatcaggtgtttttatcaagtg

SEQ ID NO: 4401435 - DNA, 25 bp, Homo sapien
tatcaagtggttctctagacaggac

SEQ ID NO: 4401436 - DNA, 25 bp, Homo sapien
aattccagaagaccattacggtgta

SEQ ID NO: 4401437 - DNA, 25 bp, Homo sapien
gaccattacggtgtatctcttgctg

SEQ ID NO: 4401438 - DNA, 25 bp, Homo sapien
ttccagaagaccattacggtgtatc

SEQ ID NO: 4401439 - DNA, 25 bp, Homo sapien
cagaagaccattacggtgtatctct

SEQ ID NO: 4401440 - DNA, 25 bp, Homo sapien
tgggagcgggatgtcctcatctcac

SEQ ID NO: 4401441 - DNA, 25 bp, Homo sapien
tggtggccctgggagcgggatgtcc

SEQ ID NO: 4401442 - DNA, 25 bp, Homo sapien
ggagcgggatgtcctcatctcactc

SEQ ID NO: 4401443 - DNA, 25 bp, Homo sapien
cctgggagcgggatgtcctcatctc

SEQ ID NO: 4401444 - DNA, 25 bp, Homo sapien
cagctcctgagcccatttgtcactt

SEQ ID NO: 4401445 - DNA, 25 bp, Homo sapien
ggggacacagctgactcatagagca

SEQ ID NO: 4401446 - DNA, 25 bp, Homo sapien
agctcctgagcccatttgtcacttc

SEQ ID NO: 4401447 - DNA, 25 bp, Homo sapien
ggctggtacggcaaacactggcttc

SEQ ID NO: 4401448 - DNA, 25 bp, Homo sapien
gggctggtacggcaaacactggctt

SEQ ID NO: 4401449 - DNA, 25 bp, Homo sapien
ggggctggtacggcaaacactggct

SEQ ID NO: 4401450 - DNA, 25 bp, Homo sapien
acctcaattgaagggctcagtacct

SEQ ID NO: 4401451 - DNA, 25 bp, Homo sapien
tagacctcaattgaagggctcagta

SEQ ID NO: 4401452 - DNA, 25 bp, Homo sapien
gtggagggtttagacctcaattgaa

SEQ ID NO: 4401453 - DNA, 25 bp, Homo sapien
ggtttagacctcaattgaagggctc

SEQ ID NO: 4401454 - DNA, 25 bp, Homo sapien
gtctggacgttcaggccctctcggt

SEQ ID NO: 4401455 - DNA, 25 bp, Homo sapien
gtgcccaacatctccccgaaatagg

SEQ ID NO: 4401456 - DNA, 25 bp, Homo sapien
tcggaggccagaaaccgagggtcac

SEQ ID NO: 4401457 - DNA, 25 bp, Homo sapien
ctcggtctgggagatcccggagaac

SEQ ID NO: 4401458 - DNA, 25 bp, Homo sapien
ggatggcgtgatgatttgttcaaga

SEQ ID NO: 4401459 - DNA, 25 bp, Homo sapien
ttcaagattgtgttatagtagctgc

SEQ ID NO: 4401460 - DNA, 25 bp, Homo sapien
taattggcacaaaagactagttttg

SEQ ID NO: 4401461 - DNA, 25 bp, Homo sapien
cagatgagatttagatgcagagggt

SEQ ID NO: 4401462 - DNA, 25 bp, Homo sapien
taccaagctgtttcctaccaggtca

SEQ ID NO: 4401463 - DNA, 25 bp, Homo sapien
tccgaggcagagtttgatacagcat

SEQ ID NO: 4401464 - DNA, 25 bp, Homo sapien
catgtttggcatagtggaacctgtg

SEQ ID NO: 4401465 - DNA, 25 bp, Homo sapien
gatttctgctcagtatccagtagtg

SEQ ID NO: 4401466 - DNA, 25 bp, Homo sapien
caggccttgatataaccacgtgagg

SEQ ID NO: 4401467 - DNA, 25 bp, Homo sapien
aaagaatactattgttgccacaggg

SEQ ID NO: 4401468 - DNA, 25 bp, Homo sapien
aactgtggcccgaagagtcacatgg

SEQ ID NO: 4401469 - DNA, 25 bp, Homo sapien
aagcatggccctcattagtcggtag

SEQ ID NO: 4401470 - DNA, 25 bp, Homo sapien
tatgcatttctcaagagccctaaac

SEQ ID NO: 4401471 - DNA, 25 bp, Homo sapien
tctcaggtcctaacttcaatgtcat

SEQ ID NO: 4401472 - DNA, 25 bp, Homo sapien
taagcgtgtggtgcctactcattgc

SEQ ID NO: 4401473 - DNA, 25 bp, Homo sapien
aaccctgccttggtgatacttatgc

SEQ ID NO: 4401474 - DNA, 25 bp, Homo sapien
tcaggatagcgtcaaataatgtgca

SEQ ID NO: 4401475 - DNA, 25 bp, Homo sapien
ggattcccaccctctacggacagat

SEQ ID NO: 4401476 - DNA, 25 bp, Homo sapien
gagaagggctgacttagagtgaaca

SEQ ID NO: 4401477 - DNA, 25 bp, Homo sapien
tcttatgtgcacgaagaacaggaca

SEQ ID NO: 4401478 - DNA, 25 bp, Homo sapien
tttgaggcaccgctgaaaaaggcac

SEQ ID NO: 4401479 - DNA, 25 bp, Homo sapien
gagatgatgattgtggacctagcga

SEQ ID NO: 4401480 - DNA, 25 bp, Homo sapien
gacctagcgagaaagtcagcatctg

SEQ ID NO: 4401481 - DNA, 25 bp, Homo sapien
tcaactcccgacagatttgaggcac

SEQ ID NO: 4401482 - DNA, 25 bp, Homo sapien
agagcattactgtgagctctgcccc

SEQ ID NO: 4401483 - DNA, 25 bp, Homo sapien
ttactgtgtgagctccacccccgtc

SEQ ID NO: 4401484 - DNA, 25 bp, Homo sapien
agtattactgtgtgagctccacccc

SEQ ID NO: 4401485 - DNA, 25 bp, Homo sapien
cagcattactgtgtgagctccgccc

SEQ ID NO: 4401486 - DNA, 25 bp, Homo sapien
tcaggatggtcaattccgggcaccc

SEQ ID NO: 4401487 - DNA, 25 bp, Homo sapien
ctggtggtgtcagaatcgagtttga

SEQ ID NO: 4401488 - DNA, 25 bp, Homo sapien
tgtgggagctggtgcgttccttcac

SEQ ID NO: 4401489 - DNA, 25 bp, Homo sapien
acagctgggcccgtgttcactgtgg

SEQ ID NO: 4401490 - DNA, 25 bp, Homo sapien
acatcaagcacctagaaagtggtct

SEQ ID NO: 4401491 - DNA, 25 bp, Homo sapien
gaaaaccatgaattcatagtggtgg

SEQ ID NO: 4401492 - DNA, 25 bp, Homo sapien
ccagtagcagtagacacatcaagca

SEQ ID NO: 4401493 - DNA, 25 bp, Homo sapien
gaaatagaaatataagcgtgaactc

SEQ ID NO: 4401494 - DNA, 25 bp, Homo sapien
aaattacctctgcttgggtgagcta

SEQ ID NO: 4401495 - DNA, 25 bp, Homo sapien
gcagctgggatacctgtgtcactcc

SEQ ID NO: 4401496 - DNA, 25 bp, Homo sapien
tctgcaaagttcctgtgagcgctgt

SEQ ID NO: 4401497 - DNA, 25 bp, Homo sapien
tatttaaagaccaggccttggacgc

SEQ ID NO: 4401498 - DNA, 25 bp, Homo sapien
gattaacaggcagactcactgggca

SEQ ID NO: 4401499 - DNA, 25 bp, Homo sapien
ggaaggtaggtgtgataaacccaga

SEQ ID NO: 4401500 - DNA, 25 bp, Homo sapien
tttccaggcaccagtctactgggtt

SEQ ID NO: 4401501 - DNA, 25 bp, Homo sapien
tcaaacatccctggaaatacaacag

SEQ ID NO: 4401502 - DNA, 25 bp, Homo sapien
tcaacttttctgctcgtgagaccca

SEQ ID NO: 4401503 - DNA, 25 bp, Homo sapien
tggtaactcacatacaggcccgatt

SEQ ID NO: 4401504 - DNA, 25 bp, Homo sapien
tgctgtcttgggacggatcaccgct

SEQ ID NO: 4401505 - DNA, 25 bp, Homo sapien
tgcacttcaggccaaagccgggatg

SEQ ID NO: 4401506 - DNA, 25 bp, Homo sapien
tgtggagggacctgtctcctggtga

SEQ ID NO: 4401507 - DNA, 25 bp, Homo sapien
ggacctgtctcctggtgagtgagtt

SEQ ID NO: 4401508 - DNA, 25 bp, Homo sapien
taattgagatgaggtgtggagggac

SEQ ID NO: 4401509 - DNA, 25 bp, Homo sapien
tctcctggtgagtgagttaattgag

SEQ ID NO: 4401510 - DNA, 25 bp, Homo sapien
tcctggtgagtgagttaattgaggt

SEQ ID NO: 4401511 - DNA, 25 bp, Homo sapien
ctcctggtgagtgagttaattgagg

SEQ ID NO: 4401512 - DNA, 25 bp, Homo sapien
tacttccacattggtttaaccagag

SEQ ID NO: 4401513 - DNA, 25 bp, Homo sapien
tcctggtgagtctcctggaggcagc

SEQ ID NO: 4401514 - DNA, 25 bp, Homo sapien
tcacttaggttcagtgagttctcca

SEQ ID NO: 4401515 - DNA, 25 bp, Homo sapien
caggatccacggagcagaggtcatc

SEQ ID NO: 4401516 - DNA, 25 bp, Homo sapien
gccactgctgaagtcctaagtcact

SEQ ID NO: 4401517 - DNA, 25 bp, Homo sapien
tactttgcaatgtcgttcatatcca

SEQ ID NO: 4401518 - DNA, 25 bp, Homo sapien
atccatcccctttctagtgccactg

SEQ ID NO: 4401519 - DNA, 25 bp, Homo sapien
tgctgaagtcctaagtcactgcctc

SEQ ID NO: 4401520 - DNA, 25 bp, Homo sapien
cctgccctaactcctccctgaccag

SEQ ID NO: 4401521 - DNA, 25 bp, Homo sapien
ctgccctaactcctccctgaccagt

SEQ ID NO: 4401522 - DNA, 25 bp, Homo sapien
cctcctgccctaactcctccctgac

SEQ ID NO: 4401523 - DNA, 25 bp, Homo sapien
gccctaactcctccctgaccagtcc

SEQ ID NO: 4401524 - DNA, 25 bp, Homo sapien
tgccctaactcctccctgaccagtc

SEQ ID NO: 4401525 - DNA, 25 bp, Homo sapien
cctcctgccctaactcctccctgac

SEQ ID NO: 4401526 - DNA, 25 bp, Homo sapien
tgccctaactcctccctgaccggtc

SEQ ID NO: 4401527 - DNA, 25 bp, Homo sapien
agtcctcctgccctaactcctccct

SEQ ID NO: 4401528 - DNA, 25 bp, Homo sapien
tgccctaactcctccctgaccggtc

SEQ ID NO: 4401529 - DNA, 25 bp, Homo sapien
cctcctgccctaactcctccctgac

SEQ ID NO: 4401530 - DNA, 25 bp, Homo sapien
cctgccctaactcctccctgaccgg

SEQ ID NO: 4401531 - DNA, 25 bp, Homo sapien
tccctgaccggtcctcctgccctaa

SEQ ID NO: 4401532 - DNA, 25 bp, Homo sapien
cctgaccagtcctcctgccctaact

SEQ ID NO: 4401533 - DNA, 25 bp, Homo sapien
cctccctgaccagtcctcctgccct

SEQ ID NO: 4401534 - DNA, 25 bp, Homo sapien
ctaactcctccctgaccagtcctcc

SEQ ID NO: 4401535 - DNA, 25 bp, Homo sapien
tccctgaccagtcctcctgccctaa

SEQ ID NO: 4401536 - DNA, 25 bp, Homo sapien
ctccctgacccgtcctccagcccta

SEQ ID NO: 4401537 - DNA, 25 bp, Homo sapien
tgacccgtcctccagccctaactcc

SEQ ID NO: 4401538 - DNA, 25 bp, Homo sapien
gtcctccagccctaactcctccctg

SEQ ID NO: 4401539 - DNA, 25 bp, Homo sapien
cgtcctccagccctaactcctccct

SEQ ID NO: 4401540 - DNA, 25 bp, Homo sapien
tccaagcagagcttgagtattgctg

SEQ ID NO: 4401541 - DNA, 25 bp, Homo sapien
ccatccaagcagagcttgagtattg

SEQ ID NO: 4401542 - DNA, 25 bp, Homo sapien
atccaagcagagcttgagtattgct

SEQ ID NO: 4401543 - DNA, 25 bp, Homo sapien
catccaagcagagcttgagtattgc

SEQ ID NO: 4401544 - DNA, 25 bp, Homo sapien
cctagctattggctaatgggtcagc

SEQ ID NO: 4401545 - DNA, 25 bp, Homo sapien
tgttatcttctgctaatgccctgcc

SEQ ID NO: 4401546 - DNA, 25 bp, Homo sapien
cagtaaacgattatagcccagaagc

SEQ ID NO: 4401547 - DNA, 25 bp, Homo sapien
gaacgagccattatcccctcaggaa

SEQ ID NO: 4401548 - DNA, 25 bp, Homo sapien
caaagacgtgttatccagttggccc

SEQ ID NO: 4401549 - DNA, 25 bp, Homo sapien
gagtctgtctgtcggcttccattcc

SEQ ID NO: 4401550 - DNA, 25 bp, Homo sapien
tttatgagatgtagtgagaaccacc

SEQ ID NO: 4401551 - DNA, 25 bp, Homo sapien
gctggctggttgctcaatcctgtaa

SEQ ID NO: 4401552 - DNA, 25 bp, Homo sapien
gtcccaataaacacgtggtaagtca

SEQ ID NO: 4401553 - DNA, 25 bp, Homo sapien
tcccaataaacacgtggtaagtcaa

SEQ ID NO: 4401554 - DNA, 25 bp, Homo sapien
cctggaagctttctcctggctgcga

SEQ ID NO: 4401555 - DNA, 25 bp, Homo sapien
ctccctaaaacgtatgaccaccttg

SEQ ID NO: 4401556 - DNA, 25 bp, Homo sapien
catttgcttggcgttgcccggcctt

SEQ ID NO: 4401557 - DNA, 25 bp, Homo sapien
cctggctgcgagttgtcccacattt

SEQ ID NO: 4401558 - DNA, 25 bp, Homo sapien
tcttcccattagagcagtctgtggt

SEQ ID NO: 4401559 - DNA, 25 bp, Homo sapien
aacaacaaatcacgtgcttggtttc

SEQ ID NO: 4401560 - DNA, 25 bp, Homo sapien
gaactgaggttttgtcttggctgaa

SEQ ID NO: 4401561 - DNA, 25 bp, Homo sapien
cgaaaacaacaaatcacgtgcttgg

SEQ ID NO: 4401562 - DNA, 25 bp, Homo sapien
gctttggaatataagccctttcacc

SEQ ID NO: 4401563 - DNA, 25 bp, Homo sapien
tcctcatcacgttggcaaggcaggt

SEQ ID NO: 4401564 - DNA, 25 bp, Homo sapien
cctttcaccttctccgctggtcctc

SEQ ID NO: 4401565 - DNA, 25 bp, Homo sapien
ttctccgctggtcctcatcacgttg

SEQ ID NO: 4401566 - DNA, 25 bp, Homo sapien
cagttcagaccatcacaggcagtga

SEQ ID NO: 4401567 - DNA, 25 bp, Homo sapien
gagctggaatgaccacagttcagac

SEQ ID NO: 4401568 - DNA, 25 bp, Homo sapien
ggcaaagacactcacaatggacata

SEQ ID NO: 4401569 - DNA, 25 bp, Homo sapien
tcacacctccacagaagctaagggc

SEQ ID NO: 4401570 - DNA, 25 bp, Homo sapien
agagagcagcgcctcttccgacagc

SEQ ID NO: 4401571 - DNA, 25 bp, Homo sapien
agagagcagcgcctcttccgacggc

SEQ ID NO: 4401572 - DNA, 25 bp, Homo sapien
cagagagcagcgcctcttccgacgg

SEQ ID NO: 4401573 - DNA, 25 bp, Homo sapien
gagagcagcgcctcttccgacggcc

SEQ ID NO: 4401574 - DNA, 25 bp, Homo sapien
tagaaacaacgacttccagcatccc

SEQ ID NO: 4401575 - DNA, 25 bp, Homo sapien
tctcctcgctgaagccctggtgact

SEQ ID NO: 4401576 - DNA, 25 bp, Homo sapien
ttaattgcagcatcacagaaataga

SEQ ID NO: 4401577 - DNA, 25 bp, Homo sapien
tgactgtcacaaacatcgaggttat

SEQ ID NO: 4401578 - DNA, 25 bp, Homo sapien
gatagcatttactgagacgggcctg

SEQ ID NO: 4401579 - DNA, 25 bp, Homo sapien
gatcgcagagaatgtggaattgacc

SEQ ID NO: 4401580 - DNA, 25 bp, Homo sapien
gagcctgtcgaacagcccgctgcag

SEQ ID NO: 4401581 - DNA, 25 bp, Homo sapien
gttcatctcagtatcccctgaacta

SEQ ID NO: 4401582 - DNA, 25 bp, Homo sapien
ccacatttctaaaatcgaagttctg

SEQ ID NO: 4401583 - DNA, 25 bp, Homo sapien
taacgtcagttgcatccttcaggtg

SEQ ID NO: 4401584 - DNA, 25 bp, Homo sapien
ttccccatctcagttaacgtcagtt

SEQ ID NO: 4401585 - DNA, 25 bp, Homo sapien
taaaatcgaagttctgatcttttcc

SEQ ID NO: 4401586 - DNA, 25 bp, Homo sapien
catgactatagctttagagtaagcc

SEQ ID NO: 4401587 - DNA, 25 bp, Homo sapien
tgaaaacactatctctgctccattg

SEQ ID NO: 4401588 - DNA, 25 bp, Homo sapien
gatcagttgacacatttatacaggt

SEQ ID NO: 4401589 - DNA, 25 bp, Homo sapien
ggttgtcccagcgtcatttattgaa

SEQ ID NO: 4401590 - DNA, 25 bp, Homo sapien
gagtcttgaggtagcctaggccaca

SEQ ID NO: 4401591 - DNA, 25 bp, Homo sapien
gcaatggcgccttaaatgtgcggta

SEQ ID NO: 4401592 - DNA, 25 bp, Homo sapien
cgcgcgtgcacaggctagtgtcctt

SEQ ID NO: 4401593 - DNA, 25 bp, Homo sapien
gtgcacctgcgcctatggataaggt

SEQ ID NO: 4401594 - DNA, 25 bp, Homo sapien
caaggcaaggcctcagctgagttca

SEQ ID NO: 4401595 - DNA, 25 bp, Homo sapien
agctgagttcaggaaataggagaac

SEQ ID NO: 4401596 - DNA, 25 bp, Homo sapien
ggcctcagctgagttcaggaaatag

SEQ ID NO: 4401597 - DNA, 25 bp, Homo sapien
aggcaaggcctcagctgagttcagg

SEQ ID NO: 4401598 - DNA, 25 bp, Homo sapien
gaacgcgtcgagtttcatgctcagg

SEQ ID NO: 4401599 - DNA, 25 bp, Homo sapien
tcgccccaggccgtgtagatggaga

SEQ ID NO: 4401600 - DNA, 25 bp, Homo sapien
aagcgcaggaccacgaacgtcccga

SEQ ID NO: 4401601 - DNA, 25 bp, Homo sapien
ccggagcaaccccagaagcgcagga

SEQ ID NO: 4401602 - DNA, 25 bp, Homo sapien
ctgcagcggggcccactgggcaggt

SEQ ID NO: 4401603 - DNA, 25 bp, Homo sapien
ctggcactggcctccatggtcacag

SEQ ID NO: 4401604 - DNA, 25 bp, Homo sapien
gcactggcctccatggtcacagtag

SEQ ID NO: 4401605 - DNA, 25 bp, Homo sapien
cactgggcaggtgctggcactggcc

SEQ ID NO: 4401606 - DNA, 25 bp, Homo sapien
gacacgcaggtgaagccgctctggg

SEQ ID NO: 4401607 - DNA, 25 bp, Homo sapien
acggggacacgcaggtgaagccgct

SEQ ID NO: 4401608 - DNA, 25 bp, Homo sapien
ccctactgcacggggacacgcaggt

SEQ ID NO: 4401609 - DNA, 25 bp, Homo sapien
tactgcacggggacacgcaggtgaa

SEQ ID NO: 4401610 - DNA, 25 bp, Homo sapien
tagccatcgcatctgaagtaagcct

SEQ ID NO: 4401611 - DNA, 25 bp, Homo sapien
taagccttcagcgtgctcacgttca

SEQ ID NO: 4401612 - DNA, 25 bp, Homo sapien
gaagtaagccttcagcgtgctcacg

SEQ ID NO: 4401613 - DNA, 25 bp, Homo sapien
gtagcccttgtagccatcgcatctg

SEQ ID NO: 4401614 - DNA, 25 bp, Homo sapien
gaagctgtatacgtgtgactgcctc

SEQ ID NO: 4401615 - DNA, 25 bp, Homo sapien
tctcgaatctaaaaagcagctggac

SEQ ID NO: 4401616 - DNA, 25 bp, Homo sapien
cagtagttctgagggatttcacccc

SEQ ID NO: 4401617 - DNA, 25 bp, Homo sapien
taattgcatagtcagggcttgcctc

SEQ ID NO: 4401618 - DNA, 25 bp, Homo sapien
acgtcttccccggagatgggctgga

SEQ ID NO: 4401619 - DNA, 25 bp, Homo sapien
acgtggtataagaacgcctccacca

SEQ ID NO: 4401620 - DNA, 25 bp, Homo sapien
tcactcctccgtggaacgtggtata

SEQ ID NO: 4401621 - DNA, 25 bp, Homo sapien
gggctgtcacatcgcgcacgtcttc

SEQ ID NO: 4401622 - DNA, 25 bp, Homo sapien
ttcccgaggccggtgctgcagaatc

SEQ ID NO: 4401623 - DNA, 25 bp, Homo sapien
ctccgagatgaccatccagtgttgg

SEQ ID NO: 4401624 - DNA, 25 bp, Homo sapien
tccagtgttggatggggcttcccga

SEQ ID NO: 4401625 - DNA, 25 bp, Homo sapien
ctggaactccgagatgaccatccag

SEQ ID NO: 4401626 - DNA, 25 bp, Homo sapien
ccacttggctgttgcggagaaaggc

SEQ ID NO: 4401627 - DNA, 25 bp, Homo sapien
tgcggagaaaggcccgcatgtccag

SEQ ID NO: 4401628 - DNA, 25 bp, Homo sapien
cacttggctgttgcggagaaaggcc

SEQ ID NO: 4401629 - DNA, 25 bp, Homo sapien
tctggcgcaggtgacaaatgtcaac

SEQ ID NO: 4401630 - DNA, 25 bp, Homo sapien
taaacggtgatacggcctgttgact

SEQ ID NO: 4401631 - DNA, 25 bp, Homo sapien
gatgaaggccgcacagcgatggttc

SEQ ID NO: 4401632 - DNA, 25 bp, Homo sapien
cactggactaaatgcttgacacgcg

SEQ ID NO: 4401633 - DNA, 25 bp, Homo sapien
ggcgttgacttctgccatggaggca

SEQ ID NO: 4401634 - DNA, 25 bp, Homo sapien
cgaggcgttgacttctgccatggag

SEQ ID NO: 4401635 - DNA, 25 bp, Homo sapien
gttgacttctgccatggaggcattt

SEQ ID NO: 4401636 - DNA, 25 bp, Homo sapien
acttctgccatggaggcattttcct

SEQ ID NO: 4401637 - DNA, 25 bp, Homo sapien
ctgagcaagagctggatgactctta

SEQ ID NO: 4401638 - DNA, 25 bp, Homo sapien
gagcaagagctggatgactcttaag

SEQ ID NO: 4401639 - DNA, 25 bp, Homo sapien
agctggatgactcttaagggaagtt

SEQ ID NO: 4401640 - DNA, 25 bp, Homo sapien
caagagctggatgactcttaaggga

SEQ ID NO: 4401641 - DNA, 25 bp, Homo sapien
atcatcaccccacggtttacccaga

SEQ ID NO: 4401642 - DNA, 25 bp, Homo sapien
tcatcaccccacggtttacccagac

SEQ ID NO: 4401643 - DNA, 25 bp, Homo sapien
tatcatcaccccacggtttacccag

SEQ ID NO: 4401644 - DNA, 25 bp, Homo sapien
catcaccccacggtttacccagact

SEQ ID NO: 4401645 - DNA, 25 bp, Homo sapien
gttggactgaagttgttcccagcca

SEQ ID NO: 4401646 - DNA, 25 bp, Homo sapien
ttggactgaagttgttcccagccag

SEQ ID NO: 4401647 - DNA, 25 bp, Homo sapien
agttggactgaagttgttcccagcc

SEQ ID NO: 4401648 - DNA, 25 bp, Homo sapien
tagcagtggccttgattgtagcagt

SEQ ID NO: 4401649 - DNA, 25 bp, Homo sapien
agcagtggccttgattgtagcagta

SEQ ID NO: 4401650 - DNA, 25 bp, Homo sapien
agatgtagcagtggccttgattgta

SEQ ID NO: 4401651 - DNA, 25 bp, Homo sapien
tctgggagatgtagcagtggccttg

SEQ ID NO: 4401652 - DNA, 25 bp, Homo sapien
ctgacacaggaaagagctccccaga

SEQ ID NO: 4401653 - DNA, 25 bp, Homo sapien
tgacacaggaaagagctccccagag

SEQ ID NO: 4401654 - DNA, 25 bp, Homo sapien
tgactcagagcgggaggaacagatg

SEQ ID NO: 4401655 - DNA, 25 bp, Homo sapien
gtgactcagagcgggaggaacagat

SEQ ID NO: 4401656 - DNA, 25 bp, Homo sapien
gactcagagcgggaggaacagatgg

SEQ ID NO: 4401657 - DNA, 25 bp, Homo sapien
cctcggagccctcgcagtagcggcc

SEQ ID NO: 4401658 - DNA, 25 bp, Homo sapien
actcgggaagcacggctcctcacag

SEQ ID NO: 4401659 - DNA, 25 bp, Homo sapien
caggaacgcagtggacactcgggaa

SEQ ID NO: 4401660 - DNA, 25 bp, Homo sapien
catccccagtcaggtttggagggca

SEQ ID NO: 4401661 - DNA, 25 bp, Homo sapien
tccctgggtcattgtttaccctgac

SEQ ID NO: 4401662 - DNA, 25 bp, Homo sapien
ttggcctgagaacccgtggaccctg

SEQ ID NO: 4401663 - DNA, 25 bp, Homo sapien
tctgggtgtttctgactgacccctt

SEQ ID NO: 4401664 - DNA, 25 bp, Homo sapien
tgcctaaagccacacggtagtcctg

SEQ ID NO: 4401665 - DNA, 25 bp, Homo sapien
tggagtgcagatgccaagccaatct

SEQ ID NO: 4401666 - DNA, 25 bp, Homo sapien
caccctgctggtctgattgtacaaa

SEQ ID NO: 4401667 - DNA, 25 bp, Homo sapien
tccagagtgaatggctccagcgact

SEQ ID NO: 4401668 - DNA, 25 bp, Homo sapien
ggcacttcttgctagaatctccaga

SEQ ID NO: 4401669 - DNA, 25 bp, Homo sapien
acctctcagtgccattgtctcgcac

SEQ ID NO: 4401670 - DNA, 25 bp, Homo sapien
catcgtccttcaggggtggggcccg

SEQ ID NO: 4401671 - DNA, 25 bp, Homo sapien
agaaaacctctcagtgccattgtct

SEQ ID NO: 4401672 - DNA, 25 bp, Homo sapien
ggcccgtggagaagaaaacctctca

SEQ ID NO: 4401673 - DNA, 25 bp, Homo sapien
catggggcaaaagggatgcaggcaa

SEQ ID NO: 4401674 - DNA, 25 bp, Homo sapien
acgcacatggggcaaaagggatgca

SEQ ID NO: 4401675 - DNA, 25 bp, Homo sapien
ctgggaggacgcacatggggcaaaa

SEQ ID NO: 4401676 - DNA, 25 bp, Homo sapien
ggggcaaaagggatgcaggcaaagc

SEQ ID NO: 4401677 - DNA, 25 bp, Homo sapien
ctctccccagccagccaaatagtcc

SEQ ID NO: 4401678 - DNA, 25 bp, Homo sapien
tccccagccagccaaatagtcctac

SEQ ID NO: 4401679 - DNA, 25 bp, Homo sapien
ccccactctccccagccagccaaat

SEQ ID NO: 4401680 - DNA, 25 bp, Homo sapien
ccactctccccagccagccaaatag

SEQ ID NO: 4401681 - DNA, 25 bp, Homo sapien
tactgaatcagcgtggtctgcccct

SEQ ID NO: 4401682 - DNA, 25 bp, Homo sapien
caaagagctccaagtcggtgcagct

SEQ ID NO: 4401683 - DNA, 25 bp, Homo sapien
ccaccattgatggagggcgggtact

SEQ ID NO: 4401684 - DNA, 25 bp, Homo sapien
gaagttggcatcctcagcattgctg

SEQ ID NO: 4401685 - DNA, 25 bp, Homo sapien
gaagtccgatgcttgcgttgcgcag

SEQ ID NO: 4401686 - DNA, 25 bp, Homo sapien
ggcgttcgcctgctcgtagttttta

SEQ ID NO: 4401687 - DNA, 25 bp, Homo sapien
catgagctatctccgtcacagttgg

SEQ ID NO: 4401688 - DNA, 25 bp, Homo sapien
gtttttactgacttccctcgtgtga

SEQ ID NO: 4401689 - DNA, 25 bp, Homo sapien
gccccaggaccctgcccagactcac

SEQ ID NO: 4401690 - DNA, 25 bp, Homo sapien
tgccccaggaccctgcccagactca

SEQ ID NO: 4401691 - DNA, 25 bp, Homo sapien
cccctctgccccaggaccctgccca

SEQ ID NO: 4401692 - DNA, 25 bp, Homo sapien
ctctgccccaggaccctgcccagac

SEQ ID NO: 4401693 - DNA, 25 bp, Homo sapien
ggagccattgggcatcctgaagtcg

SEQ ID NO: 4401694 - DNA, 25 bp, Homo sapien
tgggcatcctgaagtcgtcctctgg

SEQ ID NO: 4401695 - DNA, 25 bp, Homo sapien
catcctgaagtcgtcctctggattg

SEQ ID NO: 4401696 - DNA, 25 bp, Homo sapien
gaatggtggagccattgggcatcct

SEQ ID NO: 4401697 - DNA, 25 bp, Homo sapien
ccctccgtgcggttctggtactcgg

SEQ ID NO: 4401698 - DNA, 25 bp, Homo sapien
tgcggttctggtactcgggcgggag

SEQ ID NO: 4401699 - DNA, 25 bp, Homo sapien
ggagcccctccgtgcggttctggta

SEQ ID NO: 4401700 - DNA, 25 bp, Homo sapien
ctccgtgcggttctggtactcgggc

SEQ ID NO: 4401701 - DNA, 25 bp, Homo sapien
cagccgtcgaagctggccgagacct

SEQ ID NO: 4401702 - DNA, 25 bp, Homo sapien
agcgcgatcaccgagacggtggccc

SEQ ID NO: 4401703 - DNA, 25 bp, Homo sapien
gactccggtggcgttgaacgtctcc

SEQ ID NO: 4401704 - DNA, 25 bp, Homo sapien
cctcagagccgttgcggctcaggag

SEQ ID NO: 4401705 - DNA, 25 bp, Homo sapien
ggttatccagcaggacacggattgc

SEQ ID NO: 4401706 - DNA, 25 bp, Homo sapien
cacggattgcgtcgtgaggctcaag

SEQ ID NO: 4401707 - DNA, 25 bp, Homo sapien
aatgtcacagtctggttatccagca

SEQ ID NO: 4401708 - DNA, 25 bp, Homo sapien
ctccgccgtcttcatggtcaggctg

SEQ ID NO: 4401709 - DNA, 25 bp, Homo sapien
tactgagccgcaaaggcgatgaagt

SEQ ID NO: 4401710 - DNA, 25 bp, Homo sapien
tgctggagcggtactgagccgcaaa

SEQ ID NO: 4401711 - DNA, 25 bp, Homo sapien
gctgctggagcggtactgagccgca

SEQ ID NO: 4401712 - DNA, 25 bp, Homo sapien
ggtactgagccgcaaaggcgatgaa

SEQ ID NO: 4401713 - DNA, 25 bp, Homo sapien
caggaaggaggagttcccgtcttgg

SEQ ID NO: 4401714 - DNA, 25 bp, Homo sapien
gacaccatccaaggtggtgatgtgg

SEQ ID NO: 4401715 - DNA, 25 bp, Homo sapien
tgtaactgacaccatccaaggtggt

SEQ ID NO: 4401716 - DNA, 25 bp, Homo sapien
ccccagcccattgaaggtgtaactg

SEQ ID NO: 4401717 - DNA, 25 bp, Homo sapien
cttgtcattccagcggcagcaccag

SEQ ID NO: 4401718 - DNA, 25 bp, Homo sapien
tgtgggggcctgtatgtagcacagc

SEQ ID NO: 4401719 - DNA, 25 bp, Homo sapien
cagaggtagggcttgtcattccagc

SEQ ID NO: 4401720 - DNA, 25 bp, Homo sapien
tggtacagggcacagaggtagggct

SEQ ID NO: 4401721 - DNA, 25 bp, Homo sapien
cctcctcgccaagaggtgaagctgc

SEQ ID NO: 4401722 - DNA, 25 bp, Homo sapien
agccttcacgaaactctccccaggg

SEQ ID NO: 4401723 - DNA, 25 bp, Homo sapien
cagggcccgtagctgcagcacacgc

SEQ ID NO: 4401724 - DNA, 25 bp, Homo sapien
aaggacgctgcacgtgccagccttc

SEQ ID NO: 4401725 - DNA, 25 bp, Homo sapien
aaacaagtccagtcccactcaggcc

SEQ ID NO: 4401726 - DNA, 25 bp, Homo sapien
tgaaacaagtccagtcccactcagg

SEQ ID NO: 4401727 - DNA, 25 bp, Homo sapien
gaaacaagtccagtcccactcaggc

SEQ ID NO: 4401728 - DNA, 25 bp, Homo sapien
gaatcgtaagtcccgtcgtccctgc

SEQ ID NO: 4401729 - DNA, 25 bp, Homo sapien
atcgtaagtcccgtcgtccctgctg

SEQ ID NO: 4401730 - DNA, 25 bp, Homo sapien
aatcgtaagtcccgtcgtccctgct

SEQ ID NO: 4401731 - DNA, 25 bp, Homo sapien
gcactcgagacggtagttgggcctt

SEQ ID NO: 4401732 - DNA, 25 bp, Homo sapien
cctttcttcccggtgtagcctgtag

SEQ ID NO: 4401733 - DNA, 25 bp, Homo sapien
ccggtgtagcctgtagaactgcagc

SEQ ID NO: 4401734 - DNA, 25 bp, Homo sapien
gctgggccaccgaggctggctcttc

SEQ ID NO: 4401735 - DNA, 25 bp, Homo sapien
cttggagtattgtctgaactgccca

SEQ ID NO: 4401736 - DNA, 25 bp, Homo sapien
ttggagtattgtctgaactgcccat

SEQ ID NO: 4401737 - DNA, 25 bp, Homo sapien
tggagtattgtctgaactgcccatt

SEQ ID NO: 4401738 - DNA, 25 bp, Homo sapien
cccacctcccacaagaccctgtcct

SEQ ID NO: 4401739 - DNA, 25 bp, Homo sapien
aggaatctatcagggcgatacctct

SEQ ID NO: 4401740 - DNA, 25 bp, Homo sapien
catcagtgggctgttttcgaaatag

SEQ ID NO: 4401741 - DNA, 25 bp, Homo sapien
cagtgggctgttttcgaaatagcca

SEQ ID NO: 4401742 - DNA, 25 bp, Homo sapien
atctatcagggcgatacctctccca

SEQ ID NO: 4401743 - DNA, 25 bp, Homo sapien
tgcatcccaccgctctggtagagaa

SEQ ID NO: 4401744 - DNA, 25 bp, Homo sapien
ctgctcccgtccgtggagaggatgg

SEQ ID NO: 4401745 - DNA, 25 bp, Homo sapien
ctcccgtccgtggagaggatggctt

SEQ ID NO: 4401746 - DNA, 25 bp, Homo sapien
cccaccgctctggtagagaaacagg

SEQ ID NO: 4401747 - DNA, 25 bp, Homo sapien
gataggcgtgggcattgacccacgt

SEQ ID NO: 4401748 - DNA, 25 bp, Homo sapien
gcaggataggcgtgggcattgaccc

SEQ ID NO: 4401749 - DNA, 25 bp, Homo sapien
actgggcaggataggcgtgggcatt

SEQ ID NO: 4401750 - DNA, 25 bp, Homo sapien
aggcgtgggcattgacccacgtgac

SEQ ID NO: 4401751 - DNA, 25 bp, Homo sapien
tgtgttcaccatagaacgtctcgta

SEQ ID NO: 4401752 - DNA, 25 bp, Homo sapien
tggactagcaggctgtgttcaccat

SEQ ID NO: 4401753 - DNA, 25 bp, Homo sapien
cttgtagcccccgttgtttgtcatc

SEQ ID NO: 4401754 - DNA, 25 bp, Homo sapien
tctaatccaagactcggcctgctgg

SEQ ID NO: 4401755 - DNA, 25 bp, Homo sapien
tgagaacaggcgtgagtctcttcct

SEQ ID NO: 4401756 - DNA, 25 bp, Homo sapien
catgcctaatctgcagcttcttgag

SEQ ID NO: 4401757 - DNA, 25 bp, Homo sapien
gattggagttattcacccagtccag

SEQ ID NO: 4401758 - DNA, 25 bp, Homo sapien
ggcacggtccacacttcctgcagta

SEQ ID NO: 4401759 - DNA, 25 bp, Homo sapien
atcgtcccagaacggagccaccagg

SEQ ID NO: 4401760 - DNA, 25 bp, Homo sapien
tgataaaatgtggtcccccgaccag

SEQ ID NO: 4401761 - DNA, 25 bp, Homo sapien
gccacagggtcccggcctgtgaagc

SEQ ID NO: 4401762 - DNA, 25 bp, Homo sapien
gtggagaagtcagcatcgtcccaga

SEQ ID NO: 4401763 - DNA, 25 bp, Homo sapien
gagaaaatctggtagtctgactctg

SEQ ID NO: 4401764 - DNA, 25 bp, Homo sapien
taggagaaaatctggtagtctgact

SEQ ID NO: 4401765 - DNA, 25 bp, Homo sapien
tctgactctgggaagatgatctggc

SEQ ID NO: 4401766 - DNA, 25 bp, Homo sapien
tctggtagtctgactctgggaagat

SEQ ID NO: 4401767 - DNA, 25 bp, Homo sapien
cgttcggggtgtagacatcctctct

SEQ ID NO: 4401768 - DNA, 25 bp, Homo sapien
tatcgttcggggtgtagacatcctc

SEQ ID NO: 4401769 - DNA, 25 bp, Homo sapien
tgtggacaccctctctatcgttcgg

SEQ ID NO: 4401770 - DNA, 25 bp, Homo sapien
caggggtgtggacaccctctctatc

SEQ ID NO: 4401771 - DNA, 25 bp, Homo sapien
tagagggaatcacggagagaggagc

SEQ ID NO: 4401772 - DNA, 25 bp, Homo sapien
ctcctgacgaactccaggtccccgg

SEQ ID NO: 4401773 - DNA, 25 bp, Homo sapien
gccagtcgccggcttgaagagtggg

SEQ ID NO: 4401774 - DNA, 25 bp, Homo sapien
gggggaagccagtcgccggcttgaa

SEQ ID NO: 4401775 - DNA, 25 bp, Homo sapien
gacagagaagagcaggaagtccaag

SEQ ID NO: 4401776 - DNA, 25 bp, Homo sapien
ccaggacagagaagagcaggaagtc

SEQ ID NO: 4401777 - DNA, 25 bp, Homo sapien
agaagagcaggaagtccaagtgggc

SEQ ID NO: 4401778 - DNA, 25 bp, Homo sapien
cagagaagagcaggaagtccaagtg

SEQ ID NO: 4401779 - DNA, 25 bp, Homo sapien
accgggacgactttctgcagccata

SEQ ID NO: 4401780 - DNA, 25 bp, Homo sapien
gcatgccggccgcactttttgctac

SEQ ID NO: 4401781 - DNA, 25 bp, Homo sapien
ctgcagccatacctaccacactcgt

SEQ ID NO: 4401782 - DNA, 25 bp, Homo sapien
atgcagcaccgggacgactttctgc

SEQ ID NO: 4401783 - DNA, 25 bp, Homo sapien
acagtcataccttccacagtcatac

SEQ ID NO: 4401784 - DNA, 25 bp, Homo sapien
cacagtcataccttccacacccata

SEQ ID NO: 4401785 - DNA, 25 bp, Homo sapien
acggccataccttccacacccatac

SEQ ID NO: 4401786 - DNA, 25 bp, Homo sapien
tccacagtcataccttccacaccca

SEQ ID NO: 4401787 - DNA, 25 bp, Homo sapien
tccacacccataccttccacatcca

SEQ ID NO: 4401788 - DNA, 25 bp, Homo sapien
cacatccataccttccacagtcata

SEQ ID NO: 4401789 - DNA, 25 bp, Homo sapien
cttccacggtcataccttccacacc

SEQ ID NO: 4401790 - DNA, 25 bp, Homo sapien
cacagtcataccttccacacccata

SEQ ID NO: 4401791 - DNA, 25 bp, Homo sapien
gaaatgatggtctgggaggttgtgg

SEQ ID NO: 4401792 - DNA, 25 bp, Homo sapien
tgtggagcgggtgtgcatggcagtg

SEQ ID NO: 4401793 - DNA, 25 bp, Homo sapien
tgtcttcagtgacggtgttgtcatt

SEQ ID NO: 4401794 - DNA, 25 bp, Homo sapien
ctgtgcgtctcccaccgtctgtctt

SEQ ID NO: 4401795 - DNA, 25 bp, Homo sapien
ggatactgtggaagctgaggtagca

SEQ ID NO: 4401796 - DNA, 25 bp, Homo sapien
gatactgtggaagctgaggtagcac

SEQ ID NO: 4401797 - DNA, 25 bp, Homo sapien
tactgtggaagctgaggtagcactg

SEQ ID NO: 4401798 - DNA, 25 bp, Homo sapien
actgtggaagctgaggtagcactgc

SEQ ID NO: 4401799 - DNA, 25 bp, Homo sapien
ggatgctgaggaagtgtcggtgaca

SEQ ID NO: 4401800 - DNA, 25 bp, Homo sapien
tggacactgaggaagcgtcggtgac

SEQ ID NO: 4401801 - DNA, 25 bp, Homo sapien
actgaggaagcgtcggtgacaggaa

SEQ ID NO: 4401802 - DNA, 25 bp, Homo sapien
aggaagcgtcggtgacaggaagaga

SEQ ID NO: 4401803 - DNA, 25 bp, Homo sapien
gacactgaggaagcgtcggtgacag

SEQ ID NO: 4401804 - DNA, 25 bp, Homo sapien
gatggtgacaggaagaggcgtggtg

SEQ ID NO: 4401805 - DNA, 25 bp, Homo sapien
gtgacaggaagaggcgtggtgtcac

SEQ ID NO: 4401806 - DNA, 25 bp, Homo sapien
tggtgacaggaagaggcgtggtgtc

SEQ ID NO: 4401807 - DNA, 25 bp, Homo sapien
gggatggtgacaggaagaggcgtgg

SEQ ID NO: 4401808 - DNA, 25 bp, Homo sapien
gatactgaggaaaggctggtgacag

SEQ ID NO: 4401809 - DNA, 25 bp, Homo sapien
gtggatactgaggaaaggctggtga

SEQ ID NO: 4401810 - DNA, 25 bp, Homo sapien
gtgacaggaagaggggtggcctgac

SEQ ID NO: 4401811 - DNA, 25 bp, Homo sapien
ctgtggatactgaggaaaggctggt

SEQ ID NO: 4401812 - DNA, 25 bp, Homo sapien
gatgcagaggaagtgtcggtgacag

SEQ ID NO: 4401813 - DNA, 25 bp, Homo sapien
ctgtggatgcagaggaagtgtcggt

SEQ ID NO: 4401814 - DNA, 25 bp, Homo sapien
gtgacaggaagaggcgtggtgtcac

SEQ ID NO: 4401815 - DNA, 25 bp, Homo sapien
gcagaggaagtgtcggtgacaggaa

SEQ ID NO: 4401816 - DNA, 25 bp, Homo sapien
acaggaagagtgctggtgtcacctc

SEQ ID NO: 4401817 - DNA, 25 bp, Homo sapien
aagcatcggtgacaggaagagtgct

SEQ ID NO: 4401818 - DNA, 25 bp, Homo sapien
agagtgctggtgtcacctctggatg

SEQ ID NO: 4401819 - DNA, 25 bp, Homo sapien
gctgaggaagcatcggtgacaggaa

SEQ ID NO: 4401820 - DNA, 25 bp, Homo sapien
gtgacaggaagaggggtggcgtgac

SEQ ID NO: 4401821 - DNA, 25 bp, Homo sapien
tggatgctgaggaagtgctggtgac

SEQ ID NO: 4401822 - DNA, 25 bp, Homo sapien
aagaggggtggcgtgacctgtagat

SEQ ID NO: 4401823 - DNA, 25 bp, Homo sapien
gtgacaggaacaggggtggcgtgac

SEQ ID NO: 4401824 - DNA, 25 bp, Homo sapien
gatactgaggaagtgtcggtgacag

SEQ ID NO: 4401825 - DNA, 25 bp, Homo sapien
tactgaggaagtgtcggtgacagga

SEQ ID NO: 4401826 - DNA, 25 bp, Homo sapien
tggatactgaggaagtgtcggtgac

SEQ ID NO: 4401827 - DNA, 25 bp, Homo sapien
actgaggaagtgtcggtgacaggaa

SEQ ID NO: 4401828 - DNA, 25 bp, Homo sapien
ctgtggatgccgaggaaacgtcggt

SEQ ID NO: 4401829 - DNA, 25 bp, Homo sapien
tggatgccgaggaaacgtcggtgac

SEQ ID NO: 4401830 - DNA, 25 bp, Homo sapien
gaggaaacgtcggtgacaggaagac

SEQ ID NO: 4401831 - DNA, 25 bp, Homo sapien
ggatgctgaggaagtgtcggtgaca

SEQ ID NO: 4401832 - DNA, 25 bp, Homo sapien
tggatgctgaggaagcgtcggtgac

SEQ ID NO: 4401833 - DNA, 25 bp, Homo sapien
tggatgctgaggaagggctagtgac

SEQ ID NO: 4401834 - DNA, 25 bp, Homo sapien
gaggaagcgtcggtgacaggaagag

SEQ ID NO: 4401835 - DNA, 25 bp, Homo sapien
aagggctagtgacaggaagaggcat

SEQ ID NO: 4401836 - DNA, 25 bp, Homo sapien
ctgtggatactgaggaaaggctggt

SEQ ID NO: 4401837 - DNA, 25 bp, Homo sapien
gtggatactgaggaaaggctggtga

SEQ ID NO: 4401838 - DNA, 25 bp, Homo sapien
gtgacaggaagaggggtggcctgac

SEQ ID NO: 4401839 - DNA, 25 bp, Homo sapien
gatactgaggaaaggctggtgacag

SEQ ID NO: 4401840 - DNA, 25 bp, Homo sapien
ggatgctgaggaagtgtcggtgaca

SEQ ID NO: 4401841 - DNA, 25 bp, Homo sapien
tggatgctgaggaagcgtcggtgac

SEQ ID NO: 4401842 - DNA, 25 bp, Homo sapien
gaggaagcgtcggtgacaggaagag

SEQ ID NO: 4401843 - DNA, 25 bp, Homo sapien
gctgaggaagcgtcggtgacaggaa

SEQ ID NO: 4401844 - DNA, 25 bp, Homo sapien
ctgaggaagcgtcggtgacaagaag

SEQ ID NO: 4401845 - DNA, 25 bp, Homo sapien
tgaggaagcgtcggtgacaagaaga

SEQ ID NO: 4401846 - DNA, 25 bp, Homo sapien
gaggaagcgtcggtgacaagaagag

SEQ ID NO: 4401847 - DNA, 25 bp, Homo sapien
gggtgacgtgacctgtagatactga

SEQ ID NO: 4401848 - DNA, 25 bp, Homo sapien
tgacgtgacctgtagatactgagga

SEQ ID NO: 4401849 - DNA, 25 bp, Homo sapien
gggtgacgtgacctgtggatgctga

SEQ ID NO: 4401850 - DNA, 25 bp, Homo sapien
tgaagaggggtgacgtgacctgtag

SEQ ID NO: 4401851 - DNA, 25 bp, Homo sapien
ggatgctgaggaagtgtcggtgaca

SEQ ID NO: 4401852 - DNA, 25 bp, Homo sapien
tgaggaagcgtcggtgacaagaaga

SEQ ID NO: 4401853 - DNA, 25 bp, Homo sapien
ctgaggaagcgtcggtgacaagaag

SEQ ID NO: 4401854 - DNA, 25 bp, Homo sapien
gaggaagcgtcggtgacaagaagag

SEQ ID NO: 4401855 - DNA, 25 bp, Homo sapien
gtggatactgaggaaaggctggtga

SEQ ID NO: 4401856 - DNA, 25 bp, Homo sapien
ctgtggatactgaggaaaggctggt

SEQ ID NO: 4401857 - DNA, 25 bp, Homo sapien
gatactgaggaaaggctggtgacag

SEQ ID NO: 4401858 - DNA, 25 bp, Homo sapien
gtgacaggaagaggggtggcctgac

SEQ ID NO: 4401859 - DNA, 25 bp, Homo sapien
gatactgaggaagcgtcggtgacaa

SEQ ID NO: 4401860 - DNA, 25 bp, Homo sapien
tggatactgaggaagcgtcggtgac

SEQ ID NO: 4401861 - DNA, 25 bp, Homo sapien
ggatgctgaggaagtgtcggtgaca

SEQ ID NO: 4401862 - DNA, 25 bp, Homo sapien
actgaggaagcgtcggtgacaagaa

SEQ ID NO: 4401863 - DNA, 25 bp, Homo sapien
gtgacaggaagaggggtggcctgac

SEQ ID NO: 4401864 - DNA, 25 bp, Homo sapien
gatactgaggaaaggctggtgacag

SEQ ID NO: 4401865 - DNA, 25 bp, Homo sapien
gtggatactgaggaaaggctggtga

SEQ ID NO: 4401866 - DNA, 25 bp, Homo sapien
ctgtggatactgaggaaaggctggt

SEQ ID NO: 4401867 - DNA, 25 bp, Homo sapien
actgaggaagtgtcggtgacaggaa

SEQ ID NO: 4401868 - DNA, 25 bp, Homo sapien
tggatactgaggaagtgtcggtgac

SEQ ID NO: 4401869 - DNA, 25 bp, Homo sapien
gaggaagcgtcggtgacaggaagag

SEQ ID NO: 4401870 - DNA, 25 bp, Homo sapien
gatactgaggaagtgtcggtgacag

SEQ ID NO: 4401871 - DNA, 25 bp, Homo sapien
tggatgctgaggaagggctagtgac

SEQ ID NO: 4401872 - DNA, 25 bp, Homo sapien
aagggctagtgacaggaagaggcat

SEQ ID NO: 4401873 - DNA, 25 bp, Homo sapien
ggatgctgaggaagtgtcggtgaca

SEQ ID NO: 4401874 - DNA, 25 bp, Homo sapien
tggatactgaggaagtgttggtgac

SEQ ID NO: 4401875 - DNA, 25 bp, Homo sapien
ggatactgaggaagtgttggtgaca

SEQ ID NO: 4401876 - DNA, 25 bp, Homo sapien
tactgaggaagtgttggtgacagga

SEQ ID NO: 4401877 - DNA, 25 bp, Homo sapien
gatactgaggaagtgttggtgacag

SEQ ID NO: 4401878 - DNA, 25 bp, Homo sapien
ggatactgaggaagtgtcggtgaca

SEQ ID NO: 4401879 - DNA, 25 bp, Homo sapien
tggatactgaggaagtgtcggtgac

SEQ ID NO: 4401880 - DNA, 25 bp, Homo sapien
gatactgaggaagtgtcggtgacag

SEQ ID NO: 4401881 - DNA, 25 bp, Homo sapien
atactgaggaagtgtcggtgacagg

SEQ ID NO: 4401882 - DNA, 25 bp, Homo sapien
gctgaggaagcgtcggtgacaagaa

SEQ ID NO: 4401883 - DNA, 25 bp, Homo sapien
cgtcggtgacaagaagaggagtggc

SEQ ID NO: 4401884 - DNA, 25 bp, Homo sapien
tgacaagaagaggagtggcgtgacc

SEQ ID NO: 4401885 - DNA, 25 bp, Homo sapien
tggatgctgaggaagcgtcggtgac

SEQ ID NO: 4401886 - DNA, 25 bp, Homo sapien
caggaagagaggtggtgtcacctgt

SEQ ID NO: 4401887 - DNA, 25 bp, Homo sapien
tggatgatgaggaagtgtcggtgac

SEQ ID NO: 4401888 - DNA, 25 bp, Homo sapien
gatgaggaagtgtcggtgacaggaa

SEQ ID NO: 4401889 - DNA, 25 bp, Homo sapien
gtatgctgaggaagtgtcggtgaca

SEQ ID NO: 4401890 - DNA, 25 bp, Homo sapien
tagtgacaggaagaggcgtggtgtc

SEQ ID NO: 4401891 - DNA, 25 bp, Homo sapien
aagggctagtgacaggaagaggcgt

SEQ ID NO: 4401892 - DNA, 25 bp, Homo sapien
ggctagtgacaggaagaggcgtggt

SEQ ID NO: 4401893 - DNA, 25 bp, Homo sapien
tggatgctgaggaagggctagtgac

SEQ ID NO: 4401894 - DNA, 25 bp, Homo sapien
ggctagtgacaggaagaggcgtggt

SEQ ID NO: 4401895 - DNA, 25 bp, Homo sapien
tgacaagaagaggagtggcgtgacc

SEQ ID NO: 4401896 - DNA, 25 bp, Homo sapien
tggatgctgaggaagggctagtgac

SEQ ID NO: 4401897 - DNA, 25 bp, Homo sapien
tggatgctgaggaagcgtcggtgac

SEQ ID NO: 4401898 - DNA, 25 bp, Homo sapien
ggatgctgaggaagtgtcggtgaca

SEQ ID NO: 4401899 - DNA, 25 bp, Homo sapien
ggatgctgaggaagtgtcggtgaca

SEQ ID NO: 4401900 - DNA, 25 bp, Homo sapien
caggaagaggcgtggtgtcacctgt

SEQ ID NO: 4401901 - DNA, 25 bp, Homo sapien
ggaagtgtcggtgacaggaagcggg

SEQ ID NO: 4401902 - DNA, 25 bp, Homo sapien
tggatgctgaggaagggctagtgac

SEQ ID NO: 4401903 - DNA, 25 bp, Homo sapien
ggatgctgaggaagtgtcggtgaca

SEQ ID NO: 4401904 - DNA, 25 bp, Homo sapien
aggaagtgtcggtgtcaggaagagg

SEQ ID NO: 4401905 - DNA, 25 bp, Homo sapien
ctgaggaagtgtcggtgtcaggaag

SEQ ID NO: 4401906 - DNA, 25 bp, Homo sapien
tgctgaggaagtgtcggtgtcagga

SEQ ID NO: 4401907 - DNA, 25 bp, Homo sapien
ggatgctgaggaagtgtcggtgtca

SEQ ID NO: 4401908 - DNA, 25 bp, Homo sapien
ggatgctgaggaagtgtcggtgaca

SEQ ID NO: 4401909 - DNA, 25 bp, Homo sapien
caggaagaggcgtggtgtcacctgt

SEQ ID NO: 4401910 - DNA, 25 bp, Homo sapien
ggatgctgaggaagtgtcggtgaca

SEQ ID NO: 4401911 - DNA, 25 bp, Homo sapien
tggacactgaggaagcgtcggtgac

SEQ ID NO: 4401912 - DNA, 25 bp, Homo sapien
cactgaggaagcgtcggtgacagga

SEQ ID NO: 4401913 - DNA, 25 bp, Homo sapien
agaggggtggcatgacctgtggaca

SEQ ID NO: 4401914 - DNA, 25 bp, Homo sapien
gacactgaggaagcgtcggtgacag

SEQ ID NO: 4401915 - DNA, 25 bp, Homo sapien
gtgacaggaagagaggtggcatgac

SEQ ID NO: 4401916 - DNA, 25 bp, Homo sapien
aggaagggatggtgacaggaagaga

SEQ ID NO: 4401917 - DNA, 25 bp, Homo sapien
ggatggtgacaggaagagaggtggc

SEQ ID NO: 4401918 - DNA, 25 bp, Homo sapien
ctgaggaagggatggtgacaggaag

SEQ ID NO: 4401919 - DNA, 25 bp, Homo sapien
actgacgaagcgtcggtgacaggaa

SEQ ID NO: 4401920 - DNA, 25 bp, Homo sapien
aacactgaggaagcgtcggtgacag

SEQ ID NO: 4401921 - DNA, 25 bp, Homo sapien
ctgtgaacactgaggaagcgtcggt

SEQ ID NO: 4401922 - DNA, 25 bp, Homo sapien
ggcgtgacctgtggacactgacgaa

SEQ ID NO: 4401923 - DNA, 25 bp, Homo sapien
tactgaggaagtgttggtgacagga

SEQ ID NO: 4401924 - DNA, 25 bp, Homo sapien
tggatactgaggaagtgttggtgac

SEQ ID NO: 4401925 - DNA, 25 bp, Homo sapien
gatactgaggaagtgttggtgacag

SEQ ID NO: 4401926 - DNA, 25 bp, Homo sapien
ggatactgaggaagtgttggtgaca

SEQ ID NO: 4401927 - DNA, 25 bp, Homo sapien
ggatgctgaggaagtgtcggtgaca

SEQ ID NO: 4401928 - DNA, 25 bp, Homo sapien
ggatgctgaggaagtgtcggtgaca

SEQ ID NO: 4401929 - DNA, 25 bp, Homo sapien
catgaagagaggtggcgtgacgtgt

SEQ ID NO: 4401930 - DNA, 25 bp, Homo sapien
ggtggcgtgacctgtggatgctgcg

SEQ ID NO: 4401931 - DNA, 25 bp, Homo sapien
gatgctgcggaagtgtcggtgacag

SEQ ID NO: 4401932 - DNA, 25 bp, Homo sapien
cgtgacgtgtggataatgaggaagc

SEQ ID NO: 4401933 - DNA, 25 bp, Homo sapien
acgggtggtgtcacctgtggatact

SEQ ID NO: 4401934 - DNA, 25 bp, Homo sapien
ctgacgaagcgtcggtgacaagaag

SEQ ID NO: 4401935 - DNA, 25 bp, Homo sapien
tggtgtgacctgtagatgctgagga

SEQ ID NO: 4401936 - DNA, 25 bp, Homo sapien
gagggagtgtcggtgacaggtagag

SEQ ID NO: 4401937 - DNA, 25 bp, Homo sapien
ggaagtgctggtgacaggaagaggg

SEQ ID NO: 4401938 - DNA, 25 bp, Homo sapien
tgtggatgctgaggaagtgctggtg

SEQ ID NO: 4401939 - DNA, 25 bp, Homo sapien
gctgaggaagtgctggtgacaggaa

SEQ ID NO: 4401940 - DNA, 25 bp, Homo sapien
gtgacaggaagaggggtggcatgac

SEQ ID NO: 4401941 - DNA, 25 bp, Homo sapien
gaggaagcgtcggtgacaggaagag

SEQ ID NO: 4401942 - DNA, 25 bp, Homo sapien
tggatgctgaggaagcgtcggtgac

SEQ ID NO: 4401943 - DNA, 25 bp, Homo sapien
gctgaggaagcgtcggtgacaggaa

SEQ ID NO: 4401944 - DNA, 25 bp, Homo sapien
ggatgctgaggaagtgtcggtgaca

SEQ ID NO: 4401945 - DNA, 25 bp, Homo sapien
gatactgaggaagcgtcggtgacat

SEQ ID NO: 4401946 - DNA, 25 bp, Homo sapien
aagggctagtgacaggaagaggcgt

SEQ ID NO: 4401947 - DNA, 25 bp, Homo sapien
tggatgctgaggaagggctagtgac

SEQ ID NO: 4401948 - DNA, 25 bp, Homo sapien
tggatgctgaggaagcgtcggtgac

SEQ ID NO: 4401949 - DNA, 25 bp, Homo sapien
gaggaagtgtcggtgacaagaagag

SEQ ID NO: 4401950 - DNA, 25 bp, Homo sapien
tggacactgaggaagcgtcggtgac

SEQ ID NO: 4401951 - DNA, 25 bp, Homo sapien
gaggaagcgtcggtgacaggaagag

SEQ ID NO: 4401952 - DNA, 25 bp, Homo sapien
ggatgctgaggaagtgtcggtgaca

SEQ ID NO: 4401953 - DNA, 25 bp, Homo sapien
gctggtgacaggaagaggggtggcc

SEQ ID NO: 4401954 - DNA, 25 bp, Homo sapien
ggaagggctggtgacaggaagaggg

SEQ ID NO: 4401955 - DNA, 25 bp, Homo sapien
gtgacaggaagaggggtggcctgac

SEQ ID NO: 4401956 - DNA, 25 bp, Homo sapien
ctgaggaagggctggtgacaggaag

SEQ ID NO: 4401957 - DNA, 25 bp, Homo sapien
ggatgctgaggaagtgtcggtgaca

SEQ ID NO: 4401958 - DNA, 25 bp, Homo sapien
ggatgctgaggaagtgtcggtgaca

SEQ ID NO: 4401959 - DNA, 25 bp, Homo sapien
actgaggaagtgtcggtgacaggaa

SEQ ID NO: 4401960 - DNA, 25 bp, Homo sapien
tggatactgaggaagtgtcggtgac

SEQ ID NO: 4401961 - DNA, 25 bp, Homo sapien
tactgaggaagtgtcggtgacagga

SEQ ID NO: 4401962 - DNA, 25 bp, Homo sapien
gatactgaggaagtgtcggtgacag

SEQ ID NO: 4401963 - DNA, 25 bp, Homo sapien
gtgacaggaagaggggtggtgtccc

SEQ ID NO: 4401964 - DNA, 25 bp, Homo sapien
ctggtgacaggaagaggggtggtgt

SEQ ID NO: 4401965 - DNA, 25 bp, Homo sapien
gctggtgacaggaagaggggtggtg

SEQ ID NO: 4401966 - DNA, 25 bp, Homo sapien
ggaagggctggtgacaggaagaggg

SEQ ID NO: 4401967 - DNA, 25 bp, Homo sapien
gatactgaggaagcgtcggtgacaa

SEQ ID NO: 4401968 - DNA, 25 bp, Homo sapien
tgaggaagcatcggtgacatgaaga

SEQ ID NO: 4401969 - DNA, 25 bp, Homo sapien
ggctagtgacaggaagaggcgtggt

SEQ ID NO: 4401970 - DNA, 25 bp, Homo sapien
actgaggaagcgtcggtgacaagaa

SEQ ID NO: 4401971 - DNA, 25 bp, Homo sapien
tgctgaggaagtatcggtgacagga

SEQ ID NO: 4401972 - DNA, 25 bp, Homo sapien
tatcggtgacaggaagcggcgtggt

SEQ ID NO: 4401973 - DNA, 25 bp, Homo sapien
gggtggcctgtcctgtagatactga

SEQ ID NO: 4401974 - DNA, 25 bp, Homo sapien
agatactgaggaagtgtcggtgacc

SEQ ID NO: 4401975 - DNA, 25 bp, Homo sapien
gtgacaggaagaggggtggcgtgac

SEQ ID NO: 4401976 - DNA, 25 bp, Homo sapien
tactgaggaagcgtcggtgacagga

SEQ ID NO: 4401977 - DNA, 25 bp, Homo sapien
aagggctagtgacaggaagaggcgt

SEQ ID NO: 4401978 - DNA, 25 bp, Homo sapien
tggacactgaggaagcgtcggtgac

SEQ ID NO: 4401979 - DNA, 25 bp, Homo sapien
caggaagaggcgtggtgtcacctgt

SEQ ID NO: 4401980 - DNA, 25 bp, Homo sapien
tggatactgaggaagcgtcggtgac

SEQ ID NO: 4401981 - DNA, 25 bp, Homo sapien
gatactgaggaagcgtcggtgacat

SEQ ID NO: 4401982 - DNA, 25 bp, Homo sapien
tactgaggaagcgtcggtgacatga

SEQ ID NO: 4401983 - DNA, 25 bp, Homo sapien
actgaggaagcgtcggtgacatgaa

SEQ ID NO: 4401984 - DNA, 25 bp, Homo sapien
aagcgtcggtgacaagaagagaggt

SEQ ID NO: 4401985 - DNA, 25 bp, Homo sapien
gatactgaggaagcgtcggtgacaa

SEQ ID NO: 4401986 - DNA, 25 bp, Homo sapien
tggatactgaggaagcgtcggtgac

SEQ ID NO: 4401987 - DNA, 25 bp, Homo sapien
actgaggaagcgtcggtgacaagaa

SEQ ID NO: 4401988 - DNA, 25 bp, Homo sapien
actgaggaagcgtcggtgacaggaa

SEQ ID NO: 4401989 - DNA, 25 bp, Homo sapien
gaggaagcgtcggtgacaggaagag

SEQ ID NO: 4401990 - DNA, 25 bp, Homo sapien
aggaagcgtcggtgacaggaagaga

SEQ ID NO: 4401991 - DNA, 25 bp, Homo sapien
ctgaggaagggatggtgacaggaag

SEQ ID NO: 4401992 - DNA, 25 bp, Homo sapien
atggtgacaggaagagaggtggtgt

SEQ ID NO: 4401993 - DNA, 25 bp, Homo sapien
aggaagggatggtgacaggaagaga

SEQ ID NO: 4401994 - DNA, 25 bp, Homo sapien
gtgacaggaagagaggtggtgtcac

SEQ ID NO: 4401995 - DNA, 25 bp, Homo sapien
gaggaagcgtcggtgacaggaagag

SEQ ID NO: 4401996 - DNA, 25 bp, Homo sapien
gatgctgaggaagcgtcggtgacag

SEQ ID NO: 4401997 - DNA, 25 bp, Homo sapien
tggatgctgaggaagcgtcggtgac

SEQ ID NO: 4401998 - DNA, 25 bp, Homo sapien
gctgaggaagcgtcggtgacaggaa

SEQ ID NO: 4401999 - DNA, 25 bp, Homo sapien
cgtcggtgacaggaagacgggtggt

SEQ ID NO: 4402000 - DNA, 25 bp, Homo sapien
tcggtgacaggaagacgggtggtgt

SEQ ID NO: 4402001 - DNA, 25 bp, Homo sapien
gtgacaggaagacgggtggtgtcat

SEQ ID NO: 4402002 - DNA, 25 bp, Homo sapien
cggtgacaggaagacgggtggtgtc

SEQ ID NO: 4402003 - DNA, 25 bp, Homo sapien
tactgaggaagtgtcggtgacagga

SEQ ID NO: 4402004 - DNA, 25 bp, Homo sapien
gatactgaggaagtgtcggtgacag

SEQ ID NO: 4402005 - DNA, 25 bp, Homo sapien
tggatactgaggaagtgtcggtgac

SEQ ID NO: 4402006 - DNA, 25 bp, Homo sapien
actgaggaagtgtcggtgacaggaa

SEQ ID NO: 4402007 - DNA, 25 bp, Homo sapien
tggatgctgaggaagggctagtgac

SEQ ID NO: 4402008 - DNA, 25 bp, Homo sapien
ggctagtgacaggaagaggcgtggt

SEQ ID NO: 4402009 - DNA, 25 bp, Homo sapien
tagtgacaggaagaggcgtggtgtc

SEQ ID NO: 4402010 - DNA, 25 bp, Homo sapien
aagggctagtgacaggaagaggcgt

SEQ ID NO: 4402011 - DNA, 25 bp, Homo sapien
gtgacaggaagaggggtggcctgac

SEQ ID NO: 4402012 - DNA, 25 bp, Homo sapien
gtggatactgaggaaaggctggtga

SEQ ID NO: 4402013 - DNA, 25 bp, Homo sapien
gatactgaggaaaggctggtgacag

SEQ ID NO: 4402014 - DNA, 25 bp, Homo sapien
ctgtggatactgaggaaaggctggt

SEQ ID NO: 4402015 - DNA, 25 bp, Homo sapien
tggatgccgaggaaacgtcggtgac

SEQ ID NO: 4402016 - DNA, 25 bp, Homo sapien
ctgtggatgccgaggaaacgtcggt

SEQ ID NO: 4402017 - DNA, 25 bp, Homo sapien
gaggaaacgtcggtgacaggaagac

SEQ ID NO: 4402018 - DNA, 25 bp, Homo sapien
tgccgaggaaacgtcggtgacagga

SEQ ID NO: 4402019 - DNA, 25 bp, Homo sapien
gaggaaaggccggtgacaggaagag

SEQ ID NO: 4402020 - DNA, 25 bp, Homo sapien
gacaggaagaggggtggcgtgaccg

SEQ ID NO: 4402021 - DNA, 25 bp, Homo sapien
ctgaggaaaggccggtgacaggaag

SEQ ID NO: 4402022 - DNA, 25 bp, Homo sapien
gtgacaggaagaggggtggcgtgac

SEQ ID NO: 4402023 - DNA, 25 bp, Homo sapien
tggcgtgacctgtggatgctgagga

SEQ ID NO: 4402024 - DNA, 25 bp, Homo sapien
gcgtgacctgtggatgctgaggaag

SEQ ID NO: 4402025 - DNA, 25 bp, Homo sapien
gtgacaggaagaggggtggcgtgac

SEQ ID NO: 4402026 - DNA, 25 bp, Homo sapien
ggtggcgtgacctgtggatgctgag

SEQ ID NO: 4402027 - DNA, 25 bp, Homo sapien
tggtgacatgaagaggggtggcgtg

SEQ ID NO: 4402028 - DNA, 25 bp, Homo sapien
gtgacatgaagaggggtggcgtgac

SEQ ID NO: 4402029 - DNA, 25 bp, Homo sapien
ggctggtgacatgaagaggggtggc

SEQ ID NO: 4402030 - DNA, 25 bp, Homo sapien
ctggtgacatgaagaggggtggcgt

SEQ ID NO: 4402031 - DNA, 25 bp, Homo sapien
tggataatgaggaagcattggtgac

SEQ ID NO: 4402032 - DNA, 25 bp, Homo sapien
taatgaggaagcattggtgacagga

SEQ ID NO: 4402033 - DNA, 25 bp, Homo sapien
cattggtgacaggaagaggggtggt

SEQ ID NO: 4402034 - DNA, 25 bp, Homo sapien
aggaagcattggtgacaggaagagg

SEQ ID NO: 4402035 - DNA, 25 bp, Homo sapien
ggatgctgaggaagtgtcggtgaca

SEQ ID NO: 4402036 - DNA, 25 bp, Homo sapien
ggatgctgaggaagtgtcggtgaca

SEQ ID NO: 4402037 - DNA, 25 bp, Homo sapien
gatactgaggaagcgtcggtgacag

SEQ ID NO: 4402038 - DNA, 25 bp, Homo sapien
tggatactgaggaagcgtcggtgac

SEQ ID NO: 4402039 - DNA, 25 bp, Homo sapien
actgaggaagcgtcggtgacaggaa

SEQ ID NO: 4402040 - DNA, 25 bp, Homo sapien
gaggaagcgtcggtgacaggaagag

SEQ ID NO: 4402041 - DNA, 25 bp, Homo sapien
ctagtgacaggaagaggcgtggtgt

SEQ ID NO: 4402042 - DNA, 25 bp, Homo sapien
gctagtgacaggaagaggcgtggtg

SEQ ID NO: 4402043 - DNA, 25 bp, Homo sapien
tagtgacaggaagaggcgtggtgtc

SEQ ID NO: 4402044 - DNA, 25 bp, Homo sapien
agtgacaggaagaggcgtggtgtca

SEQ ID NO: 4402045 - DNA, 25 bp, Homo sapien
gatactgaggaagtgtcggtgacaa

SEQ ID NO: 4402046 - DNA, 25 bp, Homo sapien
tggatactgaggaagtgtcggtgac

SEQ ID NO: 4402047 - DNA, 25 bp, Homo sapien
aagtgtcggtgacaagaagagaggt

SEQ ID NO: 4402048 - DNA, 25 bp, Homo sapien
actgaggaagtgtcggtgacaagaa

SEQ ID NO: 4402049 - DNA, 25 bp, Homo sapien
ggatgctgaggaagtgtcggtgaca

SEQ ID NO: 4402050 - DNA, 25 bp, Homo sapien
cggaagggatggttacaggaagaga

SEQ ID NO: 4402051 - DNA, 25 bp, Homo sapien
ggaagggatggttacaggaagagag

SEQ ID NO: 4402052 - DNA, 25 bp, Homo sapien
ctgcggaagggatggttacaggaag

SEQ ID NO: 4402053 - DNA, 25 bp, Homo sapien
tgcggaagggatggttacaggaaga

SEQ ID NO: 4402054 - DNA, 25 bp, Homo sapien
tggatactgaggaagcgtcggtgac

SEQ ID NO: 4402055 - DNA, 25 bp, Homo sapien
gatactgaggaagcgtcggtgacag

SEQ ID NO: 4402056 - DNA, 25 bp, Homo sapien
gaggaagcgtcggtgacaggaagag

SEQ ID NO: 4402057 - DNA, 25 bp, Homo sapien
actgaggaagcgtcggtgacaggaa

SEQ ID NO: 4402058 - DNA, 25 bp, Homo sapien
ggtggcgtgacctgtggatgctgag

SEQ ID NO: 4402059 - DNA, 25 bp, Homo sapien
ggggtggcgtgacctgtggatgctg

SEQ ID NO: 4402060 - DNA, 25 bp, Homo sapien
tggcgtgacctgtggatgctgagga

SEQ ID NO: 4402061 - DNA, 25 bp, Homo sapien
aggaagaggggtggcgtgacctgtg

SEQ ID NO: 4402062 - DNA, 25 bp, Homo sapien
aagtgtcggtgacaagaagagaggt

SEQ ID NO: 4402063 - DNA, 25 bp, Homo sapien
tggatactgaggaagtgtcggtgac

SEQ ID NO: 4402064 - DNA, 25 bp, Homo sapien
gatactgaggaagtgtcggtgacaa

SEQ ID NO: 4402065 - DNA, 25 bp, Homo sapien
actgaggaagtgtcggtgacaagaa

SEQ ID NO: 4402066 - DNA, 25 bp, Homo sapien
ggatgctgaggaagtgtcggtgaca

SEQ ID NO: 4402067 - DNA, 25 bp, Homo sapien
tagtgacaggaagaggcgtggtgtc

SEQ ID NO: 4402068 - DNA, 25 bp, Homo sapien
tggatgctgaggaagggctagtgac

SEQ ID NO: 4402069 - DNA, 25 bp, Homo sapien
caggaagaggcgtggtgtcacctgt

SEQ ID NO: 4402070 - DNA, 25 bp, Homo sapien
aagggctagtgacaggaagaggcgt

SEQ ID NO: 4402071 - DNA, 25 bp, Homo sapien
tgtggatgctgaggaagcatcagtg

SEQ ID NO: 4402072 - DNA, 25 bp, Homo sapien
gaggaagcatcagtgacatgaagag

SEQ ID NO: 4402073 - DNA, 25 bp, Homo sapien
tgctgaggaagcatcagtgacatga

SEQ ID NO: 4402074 - DNA, 25 bp, Homo sapien
ctgtggatgctgaggaagcatcagt

SEQ ID NO: 4402075 - DNA, 25 bp, Homo sapien
tactgaggaagtgtcggtgacagga

SEQ ID NO: 4402076 - DNA, 25 bp, Homo sapien
gatactgaggaagtgtcggtgacag

SEQ ID NO: 4402077 - DNA, 25 bp, Homo sapien
gatgctgaggaagtgtcagtgacag

SEQ ID NO: 4402078 - DNA, 25 bp, Homo sapien
ggatgctgaggaagtgtcggtgaca

SEQ ID NO: 4402079 - DNA, 25 bp, Homo sapien
tctgaggaagtgtcggtgacaggaa

SEQ ID NO: 4402080 - DNA, 25 bp, Homo sapien
ggtggtgtgacctgtggatactgag

SEQ ID NO: 4402081 - DNA, 25 bp, Homo sapien
ggtgacgtgacctgtggattctgag

SEQ ID NO: 4402082 - DNA, 25 bp, Homo sapien
tggatgctgaggaaaagctggtgac

SEQ ID NO: 4402083 - DNA, 25 bp, Homo sapien
gtgacctgtggatgccgaggaagcg

SEQ ID NO: 4402084 - DNA, 25 bp, Homo sapien
tactgaggaagcatcggtgacatga

SEQ ID NO: 4402085 - DNA, 25 bp, Homo sapien
tggatactgaggaagcatcggtgac

SEQ ID NO: 4402086 - DNA, 25 bp, Homo sapien
ctgaggaagcatcggtgacatgaag

SEQ ID NO: 4402087 - DNA, 25 bp, Homo sapien
actgttgagaaggtgtcggttgcct

SEQ ID NO: 4402088 - DNA, 25 bp, Homo sapien
gacgccaggctgatagtgtcagacc

SEQ ID NO: 4402089 - DNA, 25 bp, Homo sapien
gagtctgggccatccgggaaatggc

SEQ ID NO: 4402090 - DNA, 25 bp, Homo sapien
taagcccagtggatgtgatcgatgg

SEQ ID NO: 4402091 - DNA, 25 bp, Homo sapien
ggaacaatttctgagggcgagtgcc

SEQ ID NO: 4402092 - DNA, 25 bp, Homo sapien
tgaaaaccttgtcgtctctcctgag

SEQ ID NO: 4402093 - DNA, 25 bp, Homo sapien
gacgatcgaagacgccattcctgtg

SEQ ID NO: 4402094 - DNA, 25 bp, Homo sapien
ggcttgagtgtgacccctttgggaa

SEQ ID NO: 4402095 - DNA, 25 bp, Homo sapien
ccctgggtttccaagagtggagcct

SEQ ID NO: 4402096 - DNA, 25 bp, Homo sapien
gaaaaagctgttgtgtcctgagtag

SEQ ID NO: 4402097 - DNA, 25 bp, Homo sapien
aagaagctgcagttgattgtccctc

SEQ ID NO: 4402098 - DNA, 25 bp, Homo sapien
ggtcatttcatctggaggagctgtc

SEQ ID NO: 4402099 - DNA, 25 bp, Homo sapien
tcaggttccgtcagattgtcagaca

SEQ ID NO: 4402100 - DNA, 25 bp, Homo sapien
gattgtcagacaactgaaacttgtt

SEQ ID NO: 4402101 - DNA, 25 bp, Homo sapien
ctcaccaggatgcaagtcaggccct

SEQ ID NO: 4402102 - DNA, 25 bp, Homo sapien
tcaggcccttcaggttccgtcagat

SEQ ID NO: 4402103 - DNA, 25 bp, Homo sapien
cagggtggcttctgtaataagaaat

SEQ ID NO: 4402104 - DNA, 25 bp, Homo sapien
tggccacgccaagggatttctcgtt

SEQ ID NO: 4402105 - DNA, 25 bp, Homo sapien
cttcgtctggttgtgactgaggaaa

SEQ ID NO: 4402106 - DNA, 25 bp, Homo sapien
tgaggaaagatacttccagcgcgtc

SEQ ID NO: 4402107 - DNA, 25 bp, Homo sapien
aggccgagccaggcacattctcggg

SEQ ID NO: 4402108 - DNA, 25 bp, Homo sapien
tttctgggatgatgttagagtgagt

SEQ ID NO: 4402109 - DNA, 25 bp, Homo sapien
caagttcttggactgccacatgcag

SEQ ID NO: 4402110 - DNA, 25 bp, Homo sapien
gtgtttttgcaatgttcctggtgtc

SEQ ID NO: 4402111 - DNA, 25 bp, Homo sapien
agtaggcatcgttttccccagatgg

SEQ ID NO: 4402112 - DNA, 25 bp, Homo sapien
ctccaggatgtgaaggccgagtggc

SEQ ID NO: 4402113 - DNA, 25 bp, Homo sapien
tgactccacaggtgtgccgaggtga

SEQ ID NO: 4402114 - DNA, 25 bp, Homo sapien
ttggctcgggagaaggagtggcagc

SEQ ID NO: 4402115 - DNA, 25 bp, Homo sapien
aacgcctccttctcggaggtgccat

SEQ ID NO: 4402116 - DNA, 25 bp, Homo sapien
tctggtgatcgccacagaagctcca

SEQ ID NO: 4402117 - DNA, 25 bp, Homo sapien
acgccggccagctcaactctctttt

SEQ ID NO: 4402118 - DNA, 25 bp, Homo sapien
caagaagcaccaaaatccggctgtg

SEQ ID NO: 4402119 - DNA, 25 bp, Homo sapien
gccaaaaggcgttgcctgtgttccc

SEQ ID NO: 4402120 - DNA, 25 bp, Homo sapien
tcagtttgccgatgaagagcctaag

SEQ ID NO: 4402121 - DNA, 25 bp, Homo sapien
tcatgacaaccctacgtagtagccc

SEQ ID NO: 4402122 - DNA, 25 bp, Homo sapien
caagggcgtcgctgatgctggacct

SEQ ID NO: 4402123 - DNA, 25 bp, Homo sapien
tcacgcccccgtgcttttccacgcc

SEQ ID NO: 4402124 - DNA, 25 bp, Homo sapien
ggtcttgcccctctgcgctcctctc

SEQ ID NO: 4402125 - DNA, 25 bp, Homo sapien
cctggctccacatggagctgagtgt

SEQ ID NO: 4402126 - DNA, 25 bp, Homo sapien
ttcctggctccacatggagctgagt

SEQ ID NO: 4402127 - DNA, 25 bp, Homo sapien
atggagctgagtgtccagctggtac

SEQ ID NO: 4402128 - DNA, 25 bp, Homo sapien
acatggagctgagtgtccagctggt

SEQ ID NO: 4402129 - DNA, 25 bp, Homo sapien
aactcaagaacttgggcgtcaggag

SEQ ID NO: 4402130 - DNA, 25 bp, Homo sapien
catttgggctcagctttaaatcaca

SEQ ID NO: 4402131 - DNA, 25 bp, Homo sapien
tccaaccgttcaccactgcttttta

SEQ ID NO: 4402132 - DNA, 25 bp, Homo sapien
tgggcgtcaggaggtccaaccgttc

SEQ ID NO: 4402133 - DNA, 25 bp, Homo sapien
ctgaaacatcccgaggtggaagggt

SEQ ID NO: 4402134 - DNA, 25 bp, Homo sapien
aagctcctcaaatatgcgcccaaga

SEQ ID NO: 4402135 - DNA, 25 bp, Homo sapien
cacgtcctcacggtgggatgagcac

SEQ ID NO: 4402136 - DNA, 25 bp, Homo sapien
ttcacggcaaagacttggccctggg

SEQ ID NO: 4402137 - DNA, 25 bp, Homo sapien
ctgggaccacatgcggaaggaggca

SEQ ID NO: 4402138 - DNA, 25 bp, Homo sapien
ccctcctccagcgtgcccccttcat

SEQ ID NO: 4402139 - DNA, 25 bp, Homo sapien
acacaggcagctcagggacacccag

SEQ ID NO: 4402140 - DNA, 25 bp, Homo sapien
cagagacacaggcagctcagggaca

SEQ ID NO: 4402141 - DNA, 25 bp, Homo sapien
ggctgcggcaaaagtccccctggct

SEQ ID NO: 4402142 - DNA, 25 bp, Homo sapien
gcggctggcccgaaccaagtgcgtt

SEQ ID NO: 4402143 - DNA, 25 bp, Homo sapien
tgaggagcagacgtgagcccgtccc

SEQ ID NO: 4402144 - DNA, 25 bp, Homo sapien
cgaaccaagtgcgtttctccgaagg

SEQ ID NO: 4402145 - DNA, 25 bp, Homo sapien
tgagcccgtcccctcaggcggctgg

SEQ ID NO: 4402146 - DNA, 25 bp, Homo sapien
cagagggagcgaccttggggctgta

SEQ ID NO: 4402147 - DNA, 25 bp, Homo sapien
agaaaacaccgatacacccgttgct

SEQ ID NO: 4402148 - DNA, 25 bp, Homo sapien
gccccacgctaatcacccttttctc

SEQ ID NO: 4402149 - DNA, 25 bp, Homo sapien
gatacacccgttgctctgcttctca

SEQ ID NO: 4402150 - DNA, 25 bp, Homo sapien
cacccggcccgtggtcatttttctg

SEQ ID NO: 4402151 - DNA, 25 bp, Homo sapien
ggcccgtggtcatttttctgtcagc

SEQ ID NO: 4402152 - DNA, 25 bp, Homo sapien
ccggcccgtggtcatttttctgtca

SEQ ID NO: 4402153 - DNA, 25 bp, Homo sapien
aggttttgtttggtgacgctttcag

SEQ ID NO: 4402154 - DNA, 25 bp, Homo sapien
tgtttggtgacgctttcaggacaac

SEQ ID NO: 4402155 - DNA, 25 bp, Homo sapien
tgacgctttcaggacaacagttttc

SEQ ID NO: 4402156 - DNA, 25 bp, Homo sapien
tggtgacgctttcaggacaacagtt

SEQ ID NO: 4402157 - DNA, 25 bp, Homo sapien
aagcgctggacatcttgttgaccga

SEQ ID NO: 4402158 - DNA, 25 bp, Homo sapien
tgttgaccgaacacaggtagctgac

SEQ ID NO: 4402159 - DNA, 25 bp, Homo sapien
aggtgagaccaaactaagcgctgga

SEQ ID NO: 4402160 - DNA, 25 bp, Homo sapien
tgacctctttcccatgccaggaagg

SEQ ID NO: 4402161 - DNA, 25 bp, Homo sapien
cacctgtggaggaacgtggctcctc

SEQ ID NO: 4402162 - DNA, 25 bp, Homo sapien
gaaactggagagtgttaactccgca

SEQ ID NO: 4402163 - DNA, 25 bp, Homo sapien
gacccagcatgaagccggtcactag

SEQ ID NO: 4402164 - DNA, 25 bp, Homo sapien
taactccgcagttacagccttctgg

SEQ ID NO: 4402165 - DNA, 25 bp, Homo sapien
tgtgtggattccctagtcagtgacc

SEQ ID NO: 4402166 - DNA, 25 bp, Homo sapien
accgcccacgacatccttcgctccg

SEQ ID NO: 4402167 - DNA, 25 bp, Homo sapien
ccggtggcaggtggagacggccttt

SEQ ID NO: 4402168 - DNA, 25 bp, Homo sapien
gacatccttcgctccgggtcctttc

SEQ ID NO: 4402169 - DNA, 25 bp, Homo sapien
ggcaggtggagacggccttttggag

SEQ ID NO: 4402170 - DNA, 25 bp, Homo sapien
ttatgctgagctcatgctcttctcc

SEQ ID NO: 4402171 - DNA, 25 bp, Homo sapien
cccctgcagggtgggccttgctttt

SEQ ID NO: 4402172 - DNA, 25 bp, Homo sapien
ctgcaaggatagtggttagtggaca

SEQ ID NO: 4402173 - DNA, 25 bp, Homo sapien
gatagtggttagtggacagctccca

SEQ ID NO: 4402174 - DNA, 25 bp, Homo sapien
tctccttacgcaggtgccacatcct

SEQ ID NO: 4402175 - DNA, 25 bp, Homo sapien
ggaggtccagggatctaaactcatt

SEQ ID NO: 4402176 - DNA, 25 bp, Homo sapien
tggaggtccagggatctaaactcat

SEQ ID NO: 4402177 - DNA, 25 bp, Homo sapien
gcttcctcgggtgcacctggagtgt

SEQ ID NO: 4402178 - DNA, 25 bp, Homo sapien
ctgcttcctcgggtgcacctggagt

SEQ ID NO: 4402179 - DNA, 25 bp, Homo sapien
caagccacaccccttgaaactgctt

SEQ ID NO: 4402180 - DNA, 25 bp, Homo sapien
tcctcgggtgcacctggagtgttct

SEQ ID NO: 4402181 - DNA, 25 bp, Homo sapien
tgtttctcgtatgcgggtaaagtgt

SEQ ID NO: 4402182 - DNA, 25 bp, Homo sapien
tgagctggtgtttcttatatgcggg

SEQ ID NO: 4402183 - DNA, 25 bp, Homo sapien
tatatgcgggtaaaggtgttgctcg

SEQ ID NO: 4402184 - DNA, 25 bp, Homo sapien
agtgtttctcatgcaggtaaaggtg

SEQ ID NO: 4402185 - DNA, 25 bp, Homo sapien
tcacatgcgggtaaaaggtgtttca

SEQ ID NO: 4402186 - DNA, 25 bp, Homo sapien
ctcacatgcgggtaaaaggtgtttc

SEQ ID NO: 4402187 - DNA, 25 bp, Homo sapien
cacatgcgggtaaaaggtgtttcat

SEQ ID NO: 4402188 - DNA, 25 bp, Homo sapien
ttatccttctcaggacctgaagtat

SEQ ID NO: 4402189 - DNA, 25 bp, Homo sapien
ttctcaggacctgaagtatggtctt

SEQ ID NO: 4402190 - DNA, 25 bp, Homo sapien
ccttctcaggacctgaagtatggtc

SEQ ID NO: 4402191 - DNA, 25 bp, Homo sapien
tatccttctcaggacctgaagtatg

SEQ ID NO: 4402192 - DNA, 25 bp, Homo sapien
actgggacacgtgttggtgctgact

SEQ ID NO: 4402193 - DNA, 25 bp, Homo sapien
tgtgtggttttggacactgctggag

SEQ ID NO: 4402194 - DNA, 25 bp, Homo sapien
actgctggagtccaagtgccgctgg

SEQ ID NO: 4402195 - DNA, 25 bp, Homo sapien
tggttttggacactgctggagtcca

SEQ ID NO: 4402196 - DNA, 25 bp, Homo sapien
ggttttgggcactgctggagtccaa

SEQ ID NO: 4402197 - DNA, 25 bp, Homo sapien
ggaggaggaaagtttccagaagagc

SEQ ID NO: 4402198 - DNA, 25 bp, Homo sapien
gaggaggaaagtttccagaagagct

SEQ ID NO: 4402199 - DNA, 25 bp, Homo sapien
gaggaaagtttccagaagagcttac

SEQ ID NO: 4402200 - DNA, 25 bp, Homo sapien
ggaggaaagtttccagaagagctta

SEQ ID NO: 4402201 - DNA, 25 bp, Homo sapien
gctctcgtgtttggggattttctcg

SEQ ID NO: 4402202 - DNA, 25 bp, Homo sapien
ctctcgtgtttggggattttctcgg

SEQ ID NO: 4402203 - DNA, 25 bp, Homo sapien
ggctctcgtgtttggggattttctc

SEQ ID NO: 4402204 - DNA, 25 bp, Homo sapien
ccccagctcgcgtgctgggtgggaa

SEQ ID NO: 4402205 - DNA, 25 bp, Homo sapien
ctcggcctcgcggtcgccttcctgc

SEQ ID NO: 4402206 - DNA, 25 bp, Homo sapien
gctcctcatgttgccccagggactg

SEQ ID NO: 4402207 - DNA, 25 bp, Homo sapien
ctgaaggcccgcatgcttgcccgga

SEQ ID NO: 4402208 - DNA, 25 bp, Homo sapien
atgcttgcccggaggaggccgctcc

SEQ ID NO: 4402209 - DNA, 25 bp, Homo sapien
gccagtgccagtacgggtgccagtg

SEQ ID NO: 4402210 - DNA, 25 bp, Homo sapien
gggtgccagtgccagtacgggtgcc

SEQ ID NO: 4402211 - DNA, 25 bp, Homo sapien
gtgccagtgccagtacgggtgccag

SEQ ID NO: 4402212 - DNA, 25 bp, Homo sapien
cagtgccagtacgggtgccagtgcc

SEQ ID NO: 4402213 - DNA, 25 bp, Homo sapien
agacccacgggaggacaaccgatgt

SEQ ID NO: 4402214 - DNA, 25 bp, Homo sapien
atggaaagcagaactcccaagctgg

SEQ ID NO: 4402215 - DNA, 25 bp, Homo sapien
ggaaagcagaactcccaagctggct

SEQ ID NO: 4402216 - DNA, 25 bp, Homo sapien
cgatgtacaaaccagaaggccggtg

SEQ ID NO: 4402217 - DNA, 25 bp, Homo sapien
tcatttgcaggttgatttattctcc

SEQ ID NO: 4402218 - DNA, 25 bp, Homo sapien
tgtgtgggtctgtcagtcttccatg

SEQ ID NO: 4402219 - DNA, 25 bp, Homo sapien
gctgaagactcaaattggaaagctt

SEQ ID NO: 4402220 - DNA, 25 bp, Homo sapien
actcaaattggaaagcttgacgagc

SEQ ID NO: 4402221 - DNA, 25 bp, Homo sapien
caagatggtagaaattaggcaggcc

SEQ ID NO: 4402222 - DNA, 25 bp, Homo sapien
catgctccctaagtgggccgaggaa

SEQ ID NO: 4402223 - DNA, 25 bp, Homo sapien
tggcagacggagatgaagcaaacat

SEQ ID NO: 4402224 - DNA, 25 bp, Homo sapien
ccctccgcggagtttttcaagatgg

SEQ ID NO: 4402225 - DNA, 25 bp, Homo sapien
tccccagggaggttttgtgcattag

SEQ ID NO: 4402226 - DNA, 25 bp, Homo sapien
actcggcttgcggaacatgggtcag

SEQ ID NO: 4402227 - DNA, 25 bp, Homo sapien
gaggttgcccaggttatcagccaca

SEQ ID NO: 4402228 - DNA, 25 bp, Homo sapien
catttcggagtgtggcctggtctct

SEQ ID NO: 4402229 - DNA, 25 bp, Homo sapien
tctggaatgaccacggccaagcctg

SEQ ID NO: 4402230 - DNA, 25 bp, Homo sapien
tggaatgaccacggccaagcctgtc

SEQ ID NO: 4402231 - DNA, 25 bp, Homo sapien
ccctctggaatgaccacggccaagc

SEQ ID NO: 4402232 - DNA, 25 bp, Homo sapien
cctctggaatgaccacggccaagcc

SEQ ID NO: 4402233 - DNA, 25 bp, Homo sapien
catcacgacgctctgcatacagcaa

SEQ ID NO: 4402234 - DNA, 25 bp, Homo sapien
tcacgacgctctgcatacagcaaga

SEQ ID NO: 4402235 - DNA, 25 bp, Homo sapien
caagaggcacaagaggaggtctggc

SEQ ID NO: 4402236 - DNA, 25 bp, Homo sapien
gtcatcacgacgctctgcatacagc

SEQ ID NO: 4402237 - DNA, 25 bp, Homo sapien
tcaagatggacttcggggatcatta

SEQ ID NO: 4402238 - DNA, 25 bp, Homo sapien
aaatagcagtcattggtgaggggca

SEQ ID NO: 4402239 - DNA, 25 bp, Homo sapien
taaaatagcagtcattggtgagggg

SEQ ID NO: 4402240 - DNA, 25 bp, Homo sapien
tggacttcggggatcattaaaatag

SEQ ID NO: 4402241 - DNA, 25 bp, Homo sapien
tggcgttcaccgttctcacccatca

SEQ ID NO: 4402242 - DNA, 25 bp, Homo sapien
tcccaagacacctggtgcgtaacga

SEQ ID NO: 4402243 - DNA, 25 bp, Homo sapien
tctcacccatcacatcagcacaacg

SEQ ID NO: 4402244 - DNA, 25 bp, Homo sapien
taacgattacagagcacccgtcctg

SEQ ID NO: 4402245 - DNA, 25 bp, Homo sapien
acatgatcatatgtgaagctcaaag

SEQ ID NO: 4402246 - DNA, 25 bp, Homo sapien
tgatcatatgtgaagctcaaagagc

SEQ ID NO: 4402247 - DNA, 25 bp, Homo sapien
catatgtgaagctcaaagagctagt

SEQ ID NO: 4402248 - DNA, 25 bp, Homo sapien
tgtgaagctcaaagagctagtttcc

SEQ ID NO: 4402249 - DNA, 25 bp, Homo sapien
ggggactctggccccgctgccggcc

SEQ ID NO: 4402250 - DNA, 25 bp, Homo sapien
accggcggggactctggccccgctg

SEQ ID NO: 4402251 - DNA, 25 bp, Homo sapien
cccgctgccggccgtgtaagggaag

SEQ ID NO: 4402252 - DNA, 25 bp, Homo sapien
ggcggggactctggccccgctgccg

SEQ ID NO: 4402253 - DNA, 25 bp, Homo sapien
tttctctggaagaagcaggtactga

SEQ ID NO: 4402254 - DNA, 25 bp, Homo sapien
tttatttctctggaagaagcaggta

SEQ ID NO: 4402255 - DNA, 25 bp, Homo sapien
aatagaaactaactttatttctctg

SEQ ID NO: 4402256 - DNA, 25 bp, Homo sapien
atagaaactaactttatttctctgg

SEQ ID NO: 4402257 - DNA, 25 bp, Homo sapien
atgccggagcagcaacttcgccaac

SEQ ID NO: 4402258 - DNA, 25 bp, Homo sapien
acttcgccaacaggctggtgggaaa

SEQ ID NO: 4402259 - DNA, 25 bp, Homo sapien
gagcagcaacttcgccaacaggctg

SEQ ID NO: 4402260 - DNA, 25 bp, Homo sapien
gcaacttcgccaacaggctggtggg

SEQ ID NO: 4402261 - DNA, 25 bp, Homo sapien
gccccttggtctccttccagccctg

SEQ ID NO: 4402262 - DNA, 25 bp, Homo sapien
cttggtctccttccagccctggggc

SEQ ID NO: 4402263 - DNA, 25 bp, Homo sapien
ctgccccttggtctccttccagccc

SEQ ID NO: 4402264 - DNA, 25 bp, Homo sapien
cccttggtctccttccagccctggg

SEQ ID NO: 4402265 - DNA, 25 bp, Homo sapien
ctggcaccctttctccgcttcctga

SEQ ID NO: 4402266 - DNA, 25 bp, Homo sapien
ggcaccctttctccgcttcctgagc

SEQ ID NO: 4402267 - DNA, 25 bp, Homo sapien
ggtctggcaccctttctccgcttcc

SEQ ID NO: 4402268 - DNA, 25 bp, Homo sapien
gtctggcaccctttctccgcttcct

SEQ ID NO: 4402269 - DNA, 25 bp, Homo sapien
cattcaagtccatggtaaggccaca

SEQ ID NO: 4402270 - DNA, 25 bp, Homo sapien
ggcaccgggactgaaccaaagtgtg

SEQ ID NO: 4402271 - DNA, 25 bp, Homo sapien
agaggcaggtcatacccagagcctg

SEQ ID NO: 4402272 - DNA, 25 bp, Homo sapien
ggctcaggtgattccttcaggcagg

SEQ ID NO: 4402273 - DNA, 25 bp, Homo sapien
tagagaatgggaaaccaccagcaca

SEQ ID NO: 4402274 - DNA, 25 bp, Homo sapien
ggactgtaaaatttatcatcctgga

SEQ ID NO: 4402275 - DNA, 25 bp, Homo sapien
aacagtttacagaaggttcagcggg

SEQ ID NO: 4402276 - DNA, 25 bp, Homo sapien
ccaccagcacagttaaacagtttac

SEQ ID NO: 4402277 - DNA, 25 bp, Homo sapien
gtgcaaatcagttaagaatgacccg

SEQ ID NO: 4402278 - DNA, 25 bp, Homo sapien
cccgggtgcaaatcagttaagaatg

SEQ ID NO: 4402279 - DNA, 25 bp, Homo sapien
gcgtcccgggtgcaaatcagttaag

SEQ ID NO: 4402280 - DNA, 25 bp, Homo sapien
cagttaagaatgacccgagacagga

SEQ ID NO: 4402281 - DNA, 25 bp, Homo sapien
gccgcagacccagcccgaagagctg

SEQ ID NO: 4402282 - DNA, 25 bp, Homo sapien
gttccagtcgaacatctccagcact

SEQ ID NO: 4402283 - DNA, 25 bp, Homo sapien
ccagaaggtggcagccggcctgctc

SEQ ID NO: 4402284 - DNA, 25 bp, Homo sapien
tgctccaggttccagtcgaacatct

SEQ ID NO: 4402285 - DNA, 25 bp, Homo sapien
gcgccatggacacgcgggcccaggg

SEQ ID NO: 4402286 - DNA, 25 bp, Homo sapien
gtggcgccatggacacgcgggccca

SEQ ID NO: 4402287 - DNA, 25 bp, Homo sapien
agggtggcgccatggacacgcgggc

SEQ ID NO: 4402288 - DNA, 25 bp, Homo sapien
gggtggcgccatggacacgcgggcc

SEQ ID NO: 4402289 - DNA, 25 bp, Homo sapien
cttcagatactgggcagccctctgc

SEQ ID NO: 4402290 - DNA, 25 bp, Homo sapien
tctgcacgctccagccgtggcactg

SEQ ID NO: 4402291 - DNA, 25 bp, Homo sapien
gccctctgcacgctccagccgtggc

SEQ ID NO: 4402292 - DNA, 25 bp, Homo sapien
ctggcactcctctgtggtcacccca

SEQ ID NO: 4402293 - DNA, 25 bp, Homo sapien
ggatcttgtctgctggccggcccgc

SEQ ID NO: 4402294 - DNA, 25 bp, Homo sapien
gcccgcctctggcccatcgccaggg

SEQ ID NO: 4402295 - DNA, 25 bp, Homo sapien
tgtggcagccgagcagtggccctcg

SEQ ID NO: 4402296 - DNA, 25 bp, Homo sapien
cgcctctggcccatcgccagggcag

SEQ ID NO: 4402297 - DNA, 25 bp, Homo sapien
agttggccttggggtccaaggcagc

SEQ ID NO: 4402298 - DNA, 25 bp, Homo sapien
gaagttggccttggggtccaaggca

SEQ ID NO: 4402299 - DNA, 25 bp, Homo sapien
gtggagaagttggccttggggtcca

SEQ ID NO: 4402300 - DNA, 25 bp, Homo sapien
ctgttgttggtggagaagttggcct

SEQ ID NO: 4402301 - DNA, 25 bp, Homo sapien
gggcatcggccgcacggtggccgtg

SEQ ID NO: 4402302 - DNA, 25 bp, Homo sapien
ctggggcatcggccgcacggtggcc

SEQ ID NO: 4402303 - DNA, 25 bp, Homo sapien
ggcatcggccgcacggtggccgtgg

SEQ ID NO: 4402304 - DNA, 25 bp, Homo sapien
tggggcatcggccgcacggtggccg

SEQ ID NO: 4402305 - DNA, 25 bp, Homo sapien
tggtcgctcgggcagcaagtaatag

SEQ ID NO: 4402306 - DNA, 25 bp, Homo sapien
gcgctccaggtaggatggtcgctcg

SEQ ID NO: 4402307 - DNA, 25 bp, Homo sapien
caggaagcgctggtagcgctccagg

SEQ ID NO: 4402308 - DNA, 25 bp, Homo sapien
gcagcaagtaatagtgggtgctgct

SEQ ID NO: 4402309 - DNA, 25 bp, Homo sapien
tgccatcccggacgatgggcaggat

SEQ ID NO: 4402310 - DNA, 25 bp, Homo sapien
cttgccatcccggacgatgggcagg

SEQ ID NO: 4402311 - DNA, 25 bp, Homo sapien
catcccggacgatgggcaggatgca

SEQ ID NO: 4402312 - DNA, 25 bp, Homo sapien
cttcttgccatcccggacgatgggc

SEQ ID NO: 4402313 - DNA, 25 bp, Homo sapien
gctgggtgtcctcgagccttgaggg

SEQ ID NO: 4402314 - DNA, 25 bp, Homo sapien
atggtcttcccaggtgagcttgaga

SEQ ID NO: 4402315 - DNA, 25 bp, Homo sapien
cttcccaggtgagcttgagagccgg

SEQ ID NO: 4402316 - DNA, 25 bp, Homo sapien
tacttggggtctgaggcaaagctct

SEQ ID NO: 4402317 - DNA, 25 bp, Homo sapien
cacaaaggcgtagttggtctggccc

SEQ ID NO: 4402318 - DNA, 25 bp, Homo sapien
ctcgctcacagggtcataggttggt

SEQ ID NO: 4402319 - DNA, 25 bp, Homo sapien
tgctgtagcgcctggaagatctctg

SEQ ID NO: 4402320 - DNA, 25 bp, Homo sapien
tcaccgaagtcgatgagcgtgacct

SEQ ID NO: 4402321 - DNA, 25 bp, Homo sapien
gctccgtctaagctgcagcaagcaa

SEQ ID NO: 4402322 - DNA, 25 bp, Homo sapien
ctatccttggagaggacagtactcc

SEQ ID NO: 4402323 - DNA, 25 bp, Homo sapien
gccctggcgagttagtgagccctca

SEQ ID NO: 4402324 - DNA, 25 bp, Homo sapien
atcaggagggcggaacctgctctgc

SEQ ID NO: 4402325 - DNA, 25 bp, Homo sapien
caacggccacaaagcccagacagcg

SEQ ID NO: 4402326 - DNA, 25 bp, Homo sapien
aacggccacaaagcccagacagcgc

SEQ ID NO: 4402327 - DNA, 25 bp, Homo sapien
cacactcgtgctccagaagctcaga

SEQ ID NO: 4402328 - DNA, 25 bp, Homo sapien
tcgtgctccagaagctcagacaggt

SEQ ID NO: 4402329 - DNA, 25 bp, Homo sapien
ccagggccacactcgtgctccagaa

SEQ ID NO: 4402330 - DNA, 25 bp, Homo sapien
cagggccacactcgtgctccagaag

SEQ ID NO: 4402331 - DNA, 25 bp, Homo sapien
tgggagggagtgaggccgaggcgga

SEQ ID NO: 4402332 - DNA, 25 bp, Homo sapien
gggagggagtgaggccgaggcggaa

SEQ ID NO: 4402333 - DNA, 25 bp, Homo sapien
ggagggagtgaggccgaggcggaag

SEQ ID NO: 4402334 - DNA, 25 bp, Homo sapien
ctgggagggagtgaggccgaggcgg

SEQ ID NO: 4402335 - DNA, 25 bp, Homo sapien
gggcgggctcgagggggggcaggca

SEQ ID NO: 4402336 - DNA, 25 bp, Homo sapien
gggccacactcgtgagcagaagccc

SEQ ID NO: 4402337 - DNA, 25 bp, Homo sapien
ccacactcgtgagcagaagcccagg

SEQ ID NO: 4402338 - DNA, 25 bp, Homo sapien
cagggccacactcgtgagcagaagc

SEQ ID NO: 4402339 - DNA, 25 bp, Homo sapien
cctccggcccagccgcccaggctct

SEQ ID NO: 4402340 - DNA, 25 bp, Homo sapien
tccggcccagccgcccaggctctgt

SEQ ID NO: 4402341 - DNA, 25 bp, Homo sapien
cggcccagccgcccaggctctgtac

SEQ ID NO: 4402342 - DNA, 25 bp, Homo sapien
cccctccggcccagccgcccaggct

SEQ ID NO: 4402343 - DNA, 25 bp, Homo sapien
aaggcatcggaagcagccccactta

SEQ ID NO: 4402344 - DNA, 25 bp, Homo sapien
aggcatcggaagcagccccacttac

SEQ ID NO: 4402345 - DNA, 25 bp, Homo sapien
ggccaaggcatcggaagcagcccca

SEQ ID NO: 4402346 - DNA, 25 bp, Homo sapien
ccaaggcatcggaagcagccccact

SEQ ID NO: 4402347 - DNA, 25 bp, Homo sapien
tgaggtgggcgaggtggaggctccc

SEQ ID NO: 4402348 - DNA, 25 bp, Homo sapien
ctgaggtgggcgaggtggaggctcc

SEQ ID NO: 4402349 - DNA, 25 bp, Homo sapien
tagccgatgagttagggacaccagg

SEQ ID NO: 4402350 - DNA, 25 bp, Homo sapien
aacacggcggtccagtatgataggc

SEQ ID NO: 4402351 - DNA, 25 bp, Homo sapien
ccaggatctgagctcggccgtggaa

SEQ ID NO: 4402352 - DNA, 25 bp, Homo sapien
aacagaacagcagccttagggtggc

SEQ ID NO: 4402353 - DNA, 25 bp, Homo sapien
cacccctcctagatgctgggggggc

SEQ ID NO: 4402354 - DNA, 25 bp, Homo sapien
ttttcacccctcctagatgctgggg

SEQ ID NO: 4402355 - DNA, 25 bp, Homo sapien
gggaggtgctcagttccacgctcag

SEQ ID NO: 4402356 - DNA, 25 bp, Homo sapien
gaggtgctcagttccacgctcagga

SEQ ID NO: 4402357 - DNA, 25 bp, Homo sapien
ggagagagctgggtcaagagagcag

SEQ ID NO: 4402358 - DNA, 25 bp, Homo sapien
cgcctcccagtccacagaacctgac

SEQ ID NO: 4402359 - DNA, 25 bp, Homo sapien
cagtccacagaacctgaccgcacgt

SEQ ID NO: 4402360 - DNA, 25 bp, Homo sapien
tcagagccccttcgtcctggaggaa

SEQ ID NO: 4402361 - DNA, 25 bp, Homo sapien
aacctgaccgcacgtctcagctggg

SEQ ID NO: 4402362 - DNA, 25 bp, Homo sapien
ctggagagaaggcagagaaaggaca

SEQ ID NO: 4402363 - DNA, 25 bp, Homo sapien
tggagagaaggcagagaaaggacac

SEQ ID NO: 4402364 - DNA, 25 bp, Homo sapien
ctgctttccacgcctctcagggcag

SEQ ID NO: 4402365 - DNA, 25 bp, Homo sapien
tgctttccacgcctctcagggcaga

SEQ ID NO: 4402366 - DNA, 25 bp, Homo sapien
tgtgggggcccgctgtgtgggttct

SEQ ID NO: 4402367 - DNA, 25 bp, Homo sapien
caagaggggttacagctgtggctcc

SEQ ID NO: 4402368 - DNA, 25 bp, Homo sapien
accaaacaggagtccatcctcagaa

SEQ ID NO: 4402369 - DNA, 25 bp, Homo sapien
tttccaccaaacaggagtccatcct

SEQ ID NO: 4402370 - DNA, 25 bp, Homo sapien
gacctttccaccaaacaggagtcca

SEQ ID NO: 4402371 - DNA, 25 bp, Homo sapien
cacagcgtccgtgtgttctggccac

SEQ ID NO: 4402372 - DNA, 25 bp, Homo sapien
ccacggaggtcaccacgttgcgagg

SEQ ID NO: 4402373 - DNA, 25 bp, Homo sapien
tcactgtcgccatgccctgtgtgga

SEQ ID NO: 4402374 - DNA, 25 bp, Homo sapien
tggccacgccaccagtagttctcgg

SEQ ID NO: 4402375 - DNA, 25 bp, Homo sapien
ctgcgcgacagagatggcacggtga

SEQ ID NO: 4402376 - DNA, 25 bp, Homo sapien
acagagatggcacggtgaacgccag

SEQ ID NO: 4402377 - DNA, 25 bp, Homo sapien
cgacagagatggcacggtgaacgcc

SEQ ID NO: 4402378 - DNA, 25 bp, Homo sapien
cacggtgaacgccaggcgtggcggg

SEQ ID NO: 4402379 - DNA, 25 bp, Homo sapien
aggcctgtttgcacacggccttacc

SEQ ID NO: 4402380 - DNA, 25 bp, Homo sapien
aataaggaggcacgctggaagctgc

SEQ ID NO: 4402381 - DNA, 25 bp, Homo sapien
caactctctaggtgggtcaggcagc

SEQ ID NO: 4402382 - DNA, 25 bp, Homo sapien
ggcagctttccctatggtttgcaaa

SEQ ID NO: 4402383 - DNA, 25 bp, Homo sapien
cgtctgctgctggacttgtcatacg

SEQ ID NO: 4402384 - DNA, 25 bp, Homo sapien
aggttgtgaggctcccgcgtctgct

SEQ ID NO: 4402385 - DNA, 25 bp, Homo sapien
ttgtcatacgtgatgccgtgagcag

SEQ ID NO: 4402386 - DNA, 25 bp, Homo sapien
tcacaggttgtgaggctcccgcgtc

SEQ ID NO: 4402387 - DNA, 25 bp, Homo sapien
gctgggagtcctgacaccactcgag

SEQ ID NO: 4402388 - DNA, 25 bp, Homo sapien
cttagtgcaggtatggccgaggcaa

SEQ ID NO: 4402389 - DNA, 25 bp, Homo sapien
ctcccttagtgcaggtatggccgag

SEQ ID NO: 4402390 - DNA, 25 bp, Homo sapien
accactcgagaaaacatgcttgctc

SEQ ID NO: 4402391 - DNA, 25 bp, Homo sapien
tgctacccggccgtgactgaagcag

SEQ ID NO: 4402392 - DNA, 25 bp, Homo sapien
tccccgtggccatgggagggccagg

SEQ ID NO: 4402393 - DNA, 25 bp, Homo sapien
tctcccgccatgaacaggccggagt

SEQ ID NO: 4402394 - DNA, 25 bp, Homo sapien
cggagtccccgtggccatgggaggg

SEQ ID NO: 4402395 - DNA, 25 bp, Homo sapien
gctgttgtggcctcctgcccctcac

SEQ ID NO: 4402396 - DNA, 25 bp, Homo sapien
ggctgttgtggcctcctgcccctca

SEQ ID NO: 4402397 - DNA, 25 bp, Homo sapien
cggctgttgtggcctcctgcccctc

SEQ ID NO: 4402398 - DNA, 25 bp, Homo sapien
tccaggcacggagggcaggtgctgt

SEQ ID NO: 4402399 - DNA, 25 bp, Homo sapien
gtggttccaagccagggctggtggc

SEQ ID NO: 4402400 - DNA, 25 bp, Homo sapien
ggcaggtgctgtggttccaagccag

SEQ ID NO: 4402401 - DNA, 25 bp, Homo sapien
ctccaggcacggagggcaggtgctg

SEQ ID NO: 4402402 - DNA, 25 bp, Homo sapien
tgaggctggacttcgggctggaggc

SEQ ID NO: 4402403 - DNA, 25 bp, Homo sapien
tcatgaggctggacttcgggctgga

SEQ ID NO: 4402404 - DNA, 25 bp, Homo sapien
cacggctttccagctcgtggaggtg

SEQ ID NO: 4402405 - DNA, 25 bp, Homo sapien
aggggccaggcccacggctttccag

SEQ ID NO: 4402406 - DNA, 25 bp, Homo sapien
cttccctcgatgacggtgatgacat

SEQ ID NO: 4402407 - DNA, 25 bp, Homo sapien
gcttgtccggttcctcaaagtcctg

SEQ ID NO: 4402408 - DNA, 25 bp, Homo sapien
atgtgcagcttgtccggttcctcaa

SEQ ID NO: 4402409 - DNA, 25 bp, Homo sapien
tcctgaagggcccgcatgtctgtgg

SEQ ID NO: 4402410 - DNA, 25 bp, Homo sapien
cctccttgtcgatcttatgcaggat

SEQ ID NO: 4402411 - DNA, 25 bp, Homo sapien
accatgacgttgtagatgtcctggg

SEQ ID NO: 4402412 - DNA, 25 bp, Homo sapien
cccctccttgtcgatcttatgcagg

SEQ ID NO: 4402413 - DNA, 25 bp, Homo sapien
ggccacaaacgtgggtctgtcctct

SEQ ID NO: 4402414 - DNA, 25 bp, Homo sapien
acatccaggtgtcgctggcatggga

SEQ ID NO: 4402415 - DNA, 25 bp, Homo sapien
cagtgtcaccccgaacatccaggtg

SEQ ID NO: 4402416 - DNA, 25 bp, Homo sapien
gctcctggccgtaggtgaacatttc

SEQ ID NO: 4402417 - DNA, 25 bp, Homo sapien
atccagggctcctggccgtaggtga

SEQ ID NO: 4402418 - DNA, 25 bp, Homo sapien
gggacttaaaacactcatgcagcaa

SEQ ID NO: 4402419 - DNA, 25 bp, Homo sapien
gccaggttcaacagtgggtctcagg

SEQ ID NO: 4402420 - DNA, 25 bp, Homo sapien
gggaaatcgtctaagcccaggcctc

SEQ ID NO: 4402421 - DNA, 25 bp, Homo sapien
ttgacgacacgatgcagggacttgg

SEQ ID NO: 4402422 - DNA, 25 bp, Homo sapien
cgtcctggatcataagggttgccca

SEQ ID NO: 4402423 - DNA, 25 bp, Homo sapien
tctaaattactccaggacaacgggc

SEQ ID NO: 4402424 - DNA, 25 bp, Homo sapien
taatttaagacctctgctcgccctg

SEQ ID NO: 4402425 - DNA, 25 bp, Homo sapien
ccgggaaagtcactcgagatcgcta

SEQ ID NO: 4402426 - DNA, 25 bp, Homo sapien
tgaggtagtgctcgcatcagcccaa

SEQ ID NO: 4402427 - DNA, 25 bp, Homo sapien
ggtgcttacgtagccggtccaacaa

SEQ ID NO: 4402428 - DNA, 25 bp, Homo sapien
tgaataaagcgcttggactccaggt

SEQ ID NO: 4402429 - DNA, 25 bp, Homo sapien
ggtccaacaacgatcccagaggtgc

SEQ ID NO: 4402430 - DNA, 25 bp, Homo sapien
cctcgaggcaatttgggaaactgat

SEQ ID NO: 4402431 - DNA, 25 bp, Homo sapien
cctctccctcgaggcaatttgggaa

SEQ ID NO: 4402432 - DNA, 25 bp, Homo sapien
aggcctctccctcgaggcaatttgg

SEQ ID NO: 4402433 - DNA, 25 bp, Homo sapien
tgtctggggacctctaggagtcctg

SEQ ID NO: 4402434 - DNA, 25 bp, Homo sapien
ccaccccgtagaggcggatgaggtt

SEQ ID NO: 4402435 - DNA, 25 bp, Homo sapien
gacctcccggatgaagtcgtccatg

SEQ ID NO: 4402436 - DNA, 25 bp, Homo sapien
gtcgagcgagtgcatggcattgacc

SEQ ID NO: 4402437 - DNA, 25 bp, Homo sapien
acatcgggcttcaggcacttcacag

SEQ ID NO: 4402438 - DNA, 25 bp, Homo sapien
taaaaggtgttttgctgtagaagga

SEQ ID NO: 4402439 - DNA, 25 bp, Homo sapien
ccgggagaaggacgcactgagtgga

SEQ ID NO: 4402440 - DNA, 25 bp, Homo sapien
gcactgagtggacggagaatgagga

SEQ ID NO: 4402441 - DNA, 25 bp, Homo sapien
attaaaaggtgttttgctgtagaag

SEQ ID NO: 4402442 - DNA, 25 bp, Homo sapien
aaaatcctgagcacggactctggga

SEQ ID NO: 4402443 - DNA, 25 bp, Homo sapien
taaatgtgcttagttaaacctgagc

SEQ ID NO: 4402444 - DNA, 25 bp, Homo sapien
agccacactgtgacgcatccccagt

SEQ ID NO: 4402445 - DNA, 25 bp, Homo sapien
agcacggactctgggatgagccaca

SEQ ID NO: 4402446 - DNA, 25 bp, Homo sapien
tcgcccctgcgcaccacgccaaagg

SEQ ID NO: 4402447 - DNA, 25 bp, Homo sapien
ccctgagggcgcgtcccactcgccc

SEQ ID NO: 4402448 - DNA, 25 bp, Homo sapien
ctcgcccctgcgcaccacgccaaag

SEQ ID NO: 4402449 - DNA, 25 bp, Homo sapien
agggcgcgtcccactcgcccctgcg

SEQ ID NO: 4402450 - DNA, 25 bp, Homo sapien
cgggcgaggtcttccggaaggtgct

SEQ ID NO: 4402451 - DNA, 25 bp, Homo sapien
gtgatgaggtgggaactcagcctcc

SEQ ID NO: 4402452 - DNA, 25 bp, Homo sapien
tgatgaggtgggaactcagcctcca

SEQ ID NO: 4402453 - DNA, 25 bp, Homo sapien
gaacccaaagcctgatgctggcctc

SEQ ID NO: 4402454 - DNA, 25 bp, Homo sapien
cagataggtcctggttttgccaaac

SEQ ID NO: 4402455 - DNA, 25 bp, Homo sapien
agatggaatccaacaccccagggtc

SEQ ID NO: 4402456 - DNA, 25 bp, Homo sapien
tgccagaaagagaccgacaggcatg

SEQ ID NO: 4402457 - DNA, 25 bp, Homo sapien
tccttgtccatttttagccctggcc

SEQ ID NO: 4402458 - DNA, 25 bp, Homo sapien
ttagccctggccccttctctggcct

SEQ ID NO: 4402459 - DNA, 25 bp, Homo sapien
gccctggccccttctctggcctgac

SEQ ID NO: 4402460 - DNA, 25 bp, Homo sapien
ctccttgtccatttttagccctggc

SEQ ID NO: 4402461 - DNA, 25 bp, Homo sapien
catttggtgctgtctgtctccaccc

SEQ ID NO: 4402462 - DNA, 25 bp, Homo sapien
tccaccctcaccagggagtcggctg

SEQ ID NO: 4402463 - DNA, 25 bp, Homo sapien
cctcaccagggagtcggctgccctt

SEQ ID NO: 4402464 - DNA, 25 bp, Homo sapien
caccagggagtcggctgcccttcat

SEQ ID NO: 4402465 - DNA, 25 bp, Homo sapien
ccatgagggtcaaagctggccacgt

SEQ ID NO: 4402466 - DNA, 25 bp, Homo sapien
tatccgtctgggctagggtgcctca

SEQ ID NO: 4402467 - DNA, 25 bp, Homo sapien
gatgaagctagtccttgctgggaag

SEQ ID NO: 4402468 - DNA, 25 bp, Homo sapien
caagcaatgttcaggttacaagacc

SEQ ID NO: 4402469 - DNA, 25 bp, Homo sapien
cttactcatccacgacttgcgtttg

SEQ ID NO: 4402470 - DNA, 25 bp, Homo sapien
tcatccacgacttgcgtttgcacaa

SEQ ID NO: 4402471 - DNA, 25 bp, Homo sapien
gacttgcgtttgcacaaggccttcc

SEQ ID NO: 4402472 - DNA, 25 bp, Homo sapien
tccacgacttgcgtttgcacaaggc

SEQ ID NO: 4402473 - DNA, 25 bp, Homo sapien
ggctctgggacagagttctcagctg

SEQ ID NO: 4402474 - DNA, 25 bp, Homo sapien
ctctgggacagagttctcagctgcc

SEQ ID NO: 4402475 - DNA, 25 bp, Homo sapien
ctgggacagagttctcagctgccac

SEQ ID NO: 4402476 - DNA, 25 bp, Homo sapien
agggctctgggacagagttctcagc

SEQ ID NO: 4402477 - DNA, 25 bp, Homo sapien
cgttgaggtcatctcggagccgcag

SEQ ID NO: 4402478 - DNA, 25 bp, Homo sapien
acaggcgggtgacgttgaggtcatc

SEQ ID NO: 4402479 - DNA, 25 bp, Homo sapien
tactcaaagtgggacaggcgggtga

SEQ ID NO: 4402480 - DNA, 25 bp, Homo sapien
cgacccatgccgatcttctccaggt

SEQ ID NO: 4402481 - DNA, 25 bp, Homo sapien
gcagctccagcagccagcctgtgcc

SEQ ID NO: 4402482 - DNA, 25 bp, Homo sapien
ctgttgcagctgcacctcggacagc

SEQ ID NO: 4402483 - DNA, 25 bp, Homo sapien
ttgcagctgcacctcggacagcagc

SEQ ID NO: 4402484 - DNA, 25 bp, Homo sapien
agctgcacctcggacagcagctcca

SEQ ID NO: 4402485 - DNA, 25 bp, Homo sapien
aagcaagcccagaggcacactagga

SEQ ID NO: 4402486 - DNA, 25 bp, Homo sapien
caggcgtcgtggctttccggaagca

SEQ ID NO: 4402487 - DNA, 25 bp, Homo sapien
tctcccgcagggagagcagtctcca

SEQ ID NO: 4402488 - DNA, 25 bp, Homo sapien
gcacttactatatgcgaggaacagt

SEQ ID NO: 4402489 - DNA, 25 bp, Homo sapien
tgtgtacaggcgtcgccgcagtctg

SEQ ID NO: 4402490 - DNA, 25 bp, Homo sapien
tacaggcgtcgccgcagtctggcca

SEQ ID NO: 4402491 - DNA, 25 bp, Homo sapien
ggccagggaaccgacgtgctgccgg

SEQ ID NO: 4402492 - DNA, 25 bp, Homo sapien
cagggaaccgacgtgctgccggcat

SEQ ID NO: 4402493 - DNA, 25 bp, Homo sapien
atccagtggcctcggctccggagct

SEQ ID NO: 4402494 - DNA, 25 bp, Homo sapien
cacgcagcgggacccccccgagcag

SEQ ID NO: 4402495 - DNA, 25 bp, Homo sapien
ctccacgcagcgggacccccccgag

SEQ ID NO: 4402496 - DNA, 25 bp, Homo sapien
tccacgcagcgggacccccccgagc

SEQ ID NO: 4402497 - DNA, 25 bp, Homo sapien
gtttccacagctggccggtctggca

SEQ ID NO: 4402498 - DNA, 25 bp, Homo sapien
ggtttccacagctggccggtctggc

SEQ ID NO: 4402499 - DNA, 25 bp, Homo sapien
tgggtttccacagctggccggtctg

SEQ ID NO: 4402500 - DNA, 25 bp, Homo sapien
ctgggtttccacagctggccggtct

SEQ ID NO: 4402501 - DNA, 25 bp, Homo sapien
ctgccccgcagctcggccctgcgct

SEQ ID NO: 4402502 - DNA, 25 bp, Homo sapien
cccgcagctcggccctgcgctcagc

SEQ ID NO: 4402503 - DNA, 25 bp, Homo sapien
tccttgacttcagagcggtgacacg

SEQ ID NO: 4402504 - DNA, 25 bp, Homo sapien
ggactcctgctcaaaagccgcccaa

SEQ ID NO: 4402505 - DNA, 25 bp, Homo sapien
acttcagagcggtgacacgagggcc

SEQ ID NO: 4402506 - DNA, 25 bp, Homo sapien
gggcccggactcctgctcaaaagcc

SEQ ID NO: 4402507 - DNA, 25 bp, Homo sapien
ctgctgagagatagtaaacaaaacc

SEQ ID NO: 4402508 - DNA, 25 bp, Homo sapien
ggtgacggctgtgcaacagtatgaa

SEQ ID NO: 4402509 - DNA, 25 bp, Homo sapien
taataggtgcggtttcagtttcaca

SEQ ID NO: 4402510 - DNA, 25 bp, Homo sapien
ggctcaatactgctaaccgatcaat

SEQ ID NO: 4402511 - DNA, 25 bp, Homo sapien
gacagggttccactacgttcaccag

SEQ ID NO: 4402512 - DNA, 25 bp, Homo sapien
ggcaattcagtggagagatacatct

SEQ ID NO: 4402513 - DNA, 25 bp, Homo sapien
cctagatctcaatgtaaagcccaaa

SEQ ID NO: 4402514 - DNA, 25 bp, Homo sapien
aactgttgggactttgggtcaggca

SEQ ID NO: 4402515 - DNA, 25 bp, Homo sapien
tcctctagctaaggccctgggcaag

SEQ ID NO: 4402516 - DNA, 25 bp, Homo sapien
gagggagtcaacaagccaaatacag

SEQ ID NO: 4402517 - DNA, 25 bp, Homo sapien
tgacagtgccaggtaagaggcgaac

SEQ ID NO: 4402518 - DNA, 25 bp, Homo sapien
gagcacccagtctggttcgggacag

SEQ ID NO: 4402519 - DNA, 25 bp, Homo sapien
atgcccctacatcctgcgtcccctt

SEQ ID NO: 4402520 - DNA, 25 bp, Homo sapien
gagctcagcggttccccgcactctt

SEQ ID NO: 4402521 - DNA, 25 bp, Homo sapien
tgcgtccccttcagccccggaggta

SEQ ID NO: 4402522 - DNA, 25 bp, Homo sapien
cagcttcagcgacgcccaggctgag

SEQ ID NO: 4402523 - DNA, 25 bp, Homo sapien
ccgttcaggtaggtttcctggacag

SEQ ID NO: 4402524 - DNA, 25 bp, Homo sapien
cgggcagccaattcgcctcttgcac

SEQ ID NO: 4402525 - DNA, 25 bp, Homo sapien
ctggacagcccgcaccacctgtccc

SEQ ID NO: 4402526 - DNA, 25 bp, Homo sapien
tcggacgccggttcgggctgctgca

SEQ ID NO: 4402527 - DNA, 25 bp, Homo sapien
caaacacgctgtgattcaggccagg

SEQ ID NO: 4402528 - DNA, 25 bp, Homo sapien
gagagccatggctacaacttgagca

SEQ ID NO: 4402529 - DNA, 25 bp, Homo sapien
aactgtgtgcggctgaatcaccggg

SEQ ID NO: 4402530 - DNA, 25 bp, Homo sapien
cagctagaatgaggcctggcgcaaa

SEQ ID NO: 4402531 - DNA, 25 bp, Homo sapien
gacacccaatcaaagtagggcacag

SEQ ID NO: 4402532 - DNA, 25 bp, Homo sapien
agacacccaatcaaagtagggcaca

SEQ ID NO: 4402533 - DNA, 25 bp, Homo sapien
ctacagtgagttttgccctgctcca

SEQ ID NO: 4402534 - DNA, 25 bp, Homo sapien
tataagagatctttacctattctgg

SEQ ID NO: 4402535 - DNA, 25 bp, Homo sapien
gaacgtcttccatgcacttagtgcc

SEQ ID NO: 4402536 - DNA, 25 bp, Homo sapien
cctattctggatctacattattaga

SEQ ID NO: 4402537 - DNA, 25 bp, Homo sapien
ctccctgaccactaacgacgttgaa

SEQ ID NO: 4402538 - DNA, 25 bp, Homo sapien
tagatggagcatacaatcgggtttt

SEQ ID NO: 4402539 - DNA, 25 bp, Homo sapien
tttttccctatctcagtagatggag

SEQ ID NO: 4402540 - DNA, 25 bp, Homo sapien
cagtagatggagcatacaatcgggt

SEQ ID NO: 4402541 - DNA, 25 bp, Homo sapien
tctcagtagatggagcatacaatcg

SEQ ID NO: 4402542 - DNA, 25 bp, Homo sapien
tttcttgctctagacgcccatttaa

SEQ ID NO: 4402543 - DNA, 25 bp, Homo sapien
gactacacttaatctttgccgaaag

SEQ ID NO: 4402544 - DNA, 25 bp, Homo sapien
gctctagacgcccatttaatatatt

SEQ ID NO: 4402545 - DNA, 25 bp, Homo sapien
taccgcaacatcagattaatgagtg

SEQ ID NO: 4402546 - DNA, 25 bp, Homo sapien
tggagcaagatgctcaagtagggcc

SEQ ID NO: 4402547 - DNA, 25 bp, Homo sapien
aagatgctcaagtagggccctccag

SEQ ID NO: 4402548 - DNA, 25 bp, Homo sapien
agcaagatgctcaagtagggccctc

SEQ ID NO: 4402549 - DNA, 25 bp, Homo sapien
gatgctcaagtagggccctccagca

SEQ ID NO: 4402550 - DNA, 25 bp, Homo sapien
tcaccagacgggcaaaaatctcaca

SEQ ID NO: 4402551 - DNA, 25 bp, Homo sapien
cagagaaaacgctcaaaatggctgt

SEQ ID NO: 4402552 - DNA, 25 bp, Homo sapien
tgagatctcttaccagcagaacaga

SEQ ID NO: 4402553 - DNA, 25 bp, Homo sapien
caagaagtgattccctccgtaggag

SEQ ID NO: 4402554 - DNA, 25 bp, Homo sapien
ctcatatttgaaccgcagggccatc

SEQ ID NO: 4402555 - DNA, 25 bp, Homo sapien
ggtctccagctgtaggtccctaaaa

SEQ ID NO: 4402556 - DNA, 25 bp, Homo sapien
gcagcattggttcctcacgtagagt

SEQ ID NO: 4402557 - DNA, 25 bp, Homo sapien
tccagctccgggaccctcatatttg

SEQ ID NO: 4402558 - DNA, 25 bp, Homo sapien
tgcatcctcctctcaacccgctgag

SEQ ID NO: 4402559 - DNA, 25 bp, Homo sapien
gtcgcccctcaggtggatgaacaca

SEQ ID NO: 4402560 - DNA, 25 bp, Homo sapien
gctggtcgcccctcaggtggatgaa

SEQ ID NO: 4402561 - DNA, 25 bp, Homo sapien
cctgctggtcgcccctcaggtggat

SEQ ID NO: 4402562 - DNA, 25 bp, Homo sapien
tcttcactactgcacctgtggcatg

SEQ ID NO: 4402563 - DNA, 25 bp, Homo sapien
ctcttcactactgcacctgtggcat

SEQ ID NO: 4402564 - DNA, 25 bp, Homo sapien
gctcttcactactgcacctgtggca

SEQ ID NO: 4402565 - DNA, 25 bp, Homo sapien
attagcttggcgcaaaaccaccgca

SEQ ID NO: 4402566 - DNA, 25 bp, Homo sapien
agctcaggaaagctcacatccccag

SEQ ID NO: 4402567 - DNA, 25 bp, Homo sapien
gcccttgcgccatgagacaggagag

SEQ ID NO: 4402568 - DNA, 25 bp, Homo sapien
aagaacaagatattagcttggcgca

SEQ ID NO: 4402569 - DNA, 25 bp, Homo sapien
ggactcatctaggaactgggtatga

SEQ ID NO: 4402570 - DNA, 25 bp, Homo sapien
aagggactcatctaggaactgggta

SEQ ID NO: 4402571 - DNA, 25 bp, Homo sapien
gggactcatctaggaactgggtatg

SEQ ID NO: 4402572 - DNA, 25 bp, Homo sapien
agaagggactcatctaggaactggg

SEQ ID NO: 4402573 - DNA, 25 bp, Homo sapien
gccccttacaaatacaacagtgtta

SEQ ID NO: 4402574 - DNA, 25 bp, Homo sapien
aatgccccttacaaatacaacagtg

SEQ ID NO: 4402575 - DNA, 25 bp, Homo sapien
aaaatgccccttacaaatacaacag

SEQ ID NO: 4402576 - DNA, 25 bp, Homo sapien
accttcaaacgaatctaagaattat

SEQ ID NO: 4402577 - DNA, 25 bp, Homo sapien
acattttattgcaaaaagaagggca

SEQ ID NO: 4402578 - DNA, 25 bp, Homo sapien
gggcagagaacagtcttcttcatac

SEQ ID NO: 4402579 - DNA, 25 bp, Homo sapien
aagaagggcagagaacagtcttctt

SEQ ID NO: 4402580 - DNA, 25 bp, Homo sapien
tttgtaacattttattgcaaaaaga

SEQ ID NO: 4402581 - DNA, 25 bp, Homo sapien
atgaaccagcgtacgggccacaaat

SEQ ID NO: 4402582 - DNA, 25 bp, Homo sapien
aatctagtagcgagaagaaactacg

SEQ ID NO: 4402583 - DNA, 25 bp, Homo sapien
cgagaagaaactacgaaaacatgag

SEQ ID NO: 4402584 - DNA, 25 bp, Homo sapien
catcaatgaaccagcgtacgggcca

SEQ ID NO: 4402585 - DNA, 25 bp, Homo sapien
tatctcaggaatggtggactcagca

SEQ ID NO: 4402586 - DNA, 25 bp, Homo sapien
ctcctggtagatatttagtagcagc

SEQ ID NO: 4402587 - DNA, 25 bp, Homo sapien
agtatctcaggaatggtggactcag

SEQ ID NO: 4402588 - DNA, 25 bp, Homo sapien
tctcaggaatggtggactcagcacc

SEQ ID NO: 4402589 - DNA, 25 bp, Homo sapien
ttcccacacaagtgctgcctgagct

SEQ ID NO: 4402590 - DNA, 25 bp, Homo sapien
tgataagaacgcctccccataactc

SEQ ID NO: 4402591 - DNA, 25 bp, Homo sapien
tattcgcacactgataagaacgcct

SEQ ID NO: 4402592 - DNA, 25 bp, Homo sapien
gcagttcctgtaacagccacgttcc

SEQ ID NO: 4402593 - DNA, 25 bp, Homo sapien
tatcactccactcctctctatcaac

SEQ ID NO: 4402594 - DNA, 25 bp, Homo sapien
cgaagctgggtgtccgatatcactc

SEQ ID NO: 4402595 - DNA, 25 bp, Homo sapien
aaacaaacgtctcctgtcaaccctg

SEQ ID NO: 4402596 - DNA, 25 bp, Homo sapien
tataacatcaagaagaccaaacaag

SEQ ID NO: 4402597 - DNA, 25 bp, Homo sapien
caagctggcgatcgaaagttcagga

SEQ ID NO: 4402598 - DNA, 25 bp, Homo sapien
tgtcaaccctgcaccgactctggaa

SEQ ID NO: 4402599 - DNA, 25 bp, Homo sapien
cacagacaagacaagattccctcag

SEQ ID NO: 4402600 - DNA, 25 bp, Homo sapien
ccaggagccacgtccaagtgtgttc

SEQ ID NO: 4402601 - DNA, 25 bp, Homo sapien
tacagcggaatcaaggaagtgcccc

SEQ ID NO: 4402602 - DNA, 25 bp, Homo sapien
ttcagtggaaaagcgaccagggaca

SEQ ID NO: 4402603 - DNA, 25 bp, Homo sapien
acgccaggtcgctgcttcttccttg

SEQ ID NO: 4402604 - DNA, 25 bp, Homo sapien
gacgccaggtcgctgcttcttcctt

SEQ ID NO: 4402605 - DNA, 25 bp, Homo sapien
cgagcagacgccaggtcgctgcttc

SEQ ID NO: 4402606 - DNA, 25 bp, Homo sapien
gcagacgccaggtcgctgcttcttc

SEQ ID NO: 4402607 - DNA, 25 bp, Homo sapien
gatccgtgttagaaattatccacat

SEQ ID NO: 4402608 - DNA, 25 bp, Homo sapien
tggtgcctttgatccgtgttagaaa

SEQ ID NO: 4402609 - DNA, 25 bp, Homo sapien
ctttgatccgtgttagaaattatcc

SEQ ID NO: 4402610 - DNA, 25 bp, Homo sapien
ctttttggtgcctttgatccgtgtt

SEQ ID NO: 4402611 - DNA, 25 bp, Homo sapien
gaatcggaagatctggggtagggtc

SEQ ID NO: 4402612 - DNA, 25 bp, Homo sapien
tccccccaggactgaatcggaagat

SEQ ID NO: 4402613 - DNA, 25 bp, Homo sapien
ccccaggactgaatcggaagatctg

SEQ ID NO: 4402614 - DNA, 25 bp, Homo sapien
ccaggactgaatcggaagatctggg

SEQ ID NO: 4402615 - DNA, 25 bp, Homo sapien
tattagagaccactttctaggtgct

SEQ ID NO: 4402616 - DNA, 25 bp, Homo sapien
ttcccagtgttaggagttagtgccc

SEQ ID NO: 4402617 - DNA, 25 bp, Homo sapien
tccaagagtgaccaattacatgtgt

SEQ ID NO: 4402618 - DNA, 25 bp, Homo sapien
tcttccttcaagtgtccattcccag

SEQ ID NO: 4402619 - DNA, 25 bp, Homo sapien
gaggtaataggctgcgtgactgtca

SEQ ID NO: 4402620 - DNA, 25 bp, Homo sapien
caataagacgagtaatggagatgat

SEQ ID NO: 4402621 - DNA, 25 bp, Homo sapien
cacttgaagtgctgtgttctagcga

SEQ ID NO: 4402622 - DNA, 25 bp, Homo sapien
tagcgatcctctgatgacacatgag

SEQ ID NO: 4402623 - DNA, 25 bp, Homo sapien
attctgacaccaccagcacctggga

SEQ ID NO: 4402624 - DNA, 25 bp, Homo sapien
tgacaccaccagcacctgggacgct

SEQ ID NO: 4402625 - DNA, 25 bp, Homo sapien
ctcagactcaaactcgattctgaca

SEQ ID NO: 4402626 - DNA, 25 bp, Homo sapien
agactcaaactcgattctgacacca

SEQ ID NO: 4402627 - DNA, 25 bp, Homo sapien
caaattttggtctcacggttggagc

SEQ ID NO: 4402628 - DNA, 25 bp, Homo sapien
tcctaaacctgtggagtgtgggctg

SEQ ID NO: 4402629 - DNA, 25 bp, Homo sapien
gaccatcctaaacctgtggagtgtg

SEQ ID NO: 4402630 - DNA, 25 bp, Homo sapien
ggtctcacggttggagcctgtagaa

SEQ ID NO: 4402631 - DNA, 25 bp, Homo sapien
acggatctgctttccgtcacgtagg

SEQ ID NO: 4402632 - DNA, 25 bp, Homo sapien
tctgctttccgtcacgtaggaggca

SEQ ID NO: 4402633 - DNA, 25 bp, Homo sapien
ccccatcacatgagcacaactgttt

SEQ ID NO: 4402634 - DNA, 25 bp, Homo sapien
ctttccgtcacgtaggaggcattct

SEQ ID NO: 4402635 - DNA, 25 bp, Homo sapien
tgtcttaggaaacgtttttctggca

SEQ ID NO: 4402636 - DNA, 25 bp, Homo sapien
aatataatgtaagacctgccttgtc

SEQ ID NO: 4402637 - DNA, 25 bp, Homo sapien
taagacctgccttgtcttaggaaac

SEQ ID NO: 4402638 - DNA, 25 bp, Homo sapien
gaaacgtttttctggcagtggctca

SEQ ID NO: 4402639 - DNA, 25 bp, Homo sapien
tctatgccagttcttttagcatttg

SEQ ID NO: 4402640 - DNA, 25 bp, Homo sapien
taagcggggcataacctagatcctt

SEQ ID NO: 4402641 - DNA, 25 bp, Homo sapien
tacttctatgccagttcttttagca

SEQ ID NO: 4402642 - DNA, 25 bp, Homo sapien
tagattctcataagcggggcataac

SEQ ID NO: 4402643 - DNA, 25 bp, Homo sapien
cacagtaatgatatgacagggggcg

SEQ ID NO: 4402644 - DNA, 25 bp, Homo sapien
gctcacacagtaatgatatgacagg

SEQ ID NO: 4402645 - DNA, 25 bp, Homo sapien
acacagtaatgatatgacagggggc

SEQ ID NO: 4402646 - DNA, 25 bp, Homo sapien
agctcacacagtaatgctctggcag

SEQ ID NO: 4402647 - DNA, 25 bp, Homo sapien
cggagctcacacagtaatgctctgg

SEQ ID NO: 4402648 - DNA, 25 bp, Homo sapien
ggggcggagctcacacagtaatgct

SEQ ID NO: 4402649 - DNA, 25 bp, Homo sapien
gggcggagctcacacagtaatgctc

SEQ ID NO: 4402650 - DNA, 25 bp, Homo sapien
acggagctcacacagtaatactctg

SEQ ID NO: 4402651 - DNA, 25 bp, Homo sapien
agctcacacagtaatactctggcag

SEQ ID NO: 4402652 - DNA, 25 bp, Homo sapien
gggacggagctcacacagtaatact

SEQ ID NO: 4402653 - DNA, 25 bp, Homo sapien
ggagctcacacagtaatactctggc

SEQ ID NO: 4402654 - DNA, 25 bp, Homo sapien
gggacggagctcacacagtaatgct

SEQ ID NO: 4402655 - DNA, 25 bp, Homo sapien
agctcacacagtaatgctctggcag

SEQ ID NO: 4402656 - DNA, 25 bp, Homo sapien
acggagctcacacagtaatgctctg

SEQ ID NO: 4402657 - DNA, 25 bp, Homo sapien
ggagctcacacagtaatgctctggc

SEQ ID NO: 4402658 - DNA, 25 bp, Homo sapien
gcggagctcagtaatgttctggcag

SEQ ID NO: 4402659 - DNA, 25 bp, Homo sapien
gggcggagctcagtaatgttctggc

SEQ ID NO: 4402660 - DNA, 25 bp, Homo sapien
ggcggagctcagtaatgttctggca

SEQ ID NO: 4402661 - DNA, 25 bp, Homo sapien
ggggcggagctcagtaatgttctgg

SEQ ID NO: 4402662 - DNA, 25 bp, Homo sapien
agctcacacagtaatgctctgacag

SEQ ID NO: 4402663 - DNA, 25 bp, Homo sapien
agctcacagtaatgctctgacaggg

SEQ ID NO: 4402664 - DNA, 25 bp, Homo sapien
cgcacacagtaatgctctgacaggg

SEQ ID NO: 4402665 - DNA, 25 bp, Homo sapien
gctcacacagtaatgctctgacagg

SEQ ID NO: 4402666 - DNA, 25 bp, Homo sapien
tcacctagcaaaccatctgccaaga

SEQ ID NO: 4402667 - DNA, 25 bp, Homo sapien
atggactggtaacgatctgtggcct

SEQ ID NO: 4402668 - DNA, 25 bp, Homo sapien
cacacagtaatgctcactggctggc

SEQ ID NO: 4402669 - DNA, 25 bp, Homo sapien
ggaccctgatttaaagaatcgagga

SEQ ID NO: 4402670 - DNA, 25 bp, Homo sapien
cacatgcatgagctattatacataa

SEQ ID NO: 4402671 - DNA, 25 bp, Homo sapien
tgcatgagctattatacataattac

SEQ ID NO: 4402672 - DNA, 25 bp, Homo sapien
gacacatgcatgagctattatacat

SEQ ID NO: 4402673 - DNA, 25 bp, Homo sapien
catgcatgagctattatacataatt

SEQ ID NO: 4402674 - DNA, 25 bp, Homo sapien
aaaagctgattctgtcatcaccgca

SEQ ID NO: 4402675 - DNA, 25 bp, Homo sapien
ctgattctgtcatcaccgcatcttg

SEQ ID NO: 4402676 - DNA, 25 bp, Homo sapien
attctgtcatcaccgcatcttgtct

SEQ ID NO: 4402677 - DNA, 25 bp, Homo sapien
aagctgattctgtcatcaccgcatc

SEQ ID NO: 4402678 - DNA, 25 bp, Homo sapien
attcaaagttttgtcgattatgggt

SEQ ID NO: 4402679 - DNA, 25 bp, Homo sapien
cagtcagcctcattcaaagttttgt

SEQ ID NO: 4402680 - DNA, 25 bp, Homo sapien
cagtggcacagtcagcctcattcaa

SEQ ID NO: 4402681 - DNA, 25 bp, Homo sapien
gtaggagtgaatggctggggggaca

SEQ ID NO: 4402682 - DNA, 25 bp, Homo sapien
ggactgtaaatgacggcagatcggt

SEQ ID NO: 4402683 - DNA, 25 bp, Homo sapien
ttctcagtgctttgctttacaaaaa

SEQ ID NO: 4402684 - DNA, 25 bp, Homo sapien
taaatgacggcagatcggtagagtg

SEQ ID NO: 4402685 - DNA, 25 bp, Homo sapien
cggcagatcggtagagtggaacaga

SEQ ID NO: 4402686 - DNA, 25 bp, Homo sapien
aatgtgctatggagtcagatcttcc

SEQ ID NO: 4402687 - DNA, 25 bp, Homo sapien
caaaagaaatgtgctatggagtcag

SEQ ID NO: 4402688 - DNA, 25 bp, Homo sapien
tgagcaccagcatgacattcaaaag

SEQ ID NO: 4402689 - DNA, 25 bp, Homo sapien
aagaaatgtgctatggagtcagatc

SEQ ID NO: 4402690 - DNA, 25 bp, Homo sapien
tgtggtgagaacgagctccacactg

SEQ ID NO: 4402691 - DNA, 25 bp, Homo sapien
gctgtggtgagaacgagctccacac

SEQ ID NO: 4402692 - DNA, 25 bp, Homo sapien
tggtgagaacgagctccacactgac

SEQ ID NO: 4402693 - DNA, 25 bp, Homo sapien
gtggtgagaacgagctccacactga

SEQ ID NO: 4402694 - DNA, 25 bp, Homo sapien
ctgttgcccctggatgggcttggag

SEQ ID NO: 4402695 - DNA, 25 bp, Homo sapien
tgttgcccctggatgggcttggagt

SEQ ID NO: 4402696 - DNA, 25 bp, Homo sapien
ccagaaacaccatcacatttctcat

SEQ ID NO: 4402697 - DNA, 25 bp, Homo sapien
gaaacaccatcacatttctcattac

SEQ ID NO: 4402698 - DNA, 25 bp, Homo sapien
aaacaccatcacatttctcattact

SEQ ID NO: 4402699 - DNA, 25 bp, Homo sapien
tgagcccagaaacaccatcacattt

SEQ ID NO: 4402700 - DNA, 25 bp, Homo sapien
tggatatacttttggggaaacgaca

SEQ ID NO: 4402701 - DNA, 25 bp, Homo sapien
acagggcaggcttgaaacggtggct

SEQ ID NO: 4402702 - DNA, 25 bp, Homo sapien
tcctggtcatgccacgctggctgca

SEQ ID NO: 4402703 - DNA, 25 bp, Homo sapien
ttatttcctggtcatgccacgctgg

SEQ ID NO: 4402704 - DNA, 25 bp, Homo sapien
gctccattgacggtctgcagcgcac

SEQ ID NO: 4402705 - DNA, 25 bp, Homo sapien
tgacggtctgcagcgcacatagcat

SEQ ID NO: 4402706 - DNA, 25 bp, Homo sapien
cattgacggtctgcagcgcacatag

SEQ ID NO: 4402707 - DNA, 25 bp, Homo sapien
ctctgctccattgacggtctgcagc

SEQ ID NO: 4402708 - DNA, 25 bp, Homo sapien
ccaacagtgtgcacagagcccactg

SEQ ID NO: 4402709 - DNA, 25 bp, Homo sapien
ctgcagaaggcagggcccaacagtg

SEQ ID NO: 4402710 - DNA, 25 bp, Homo sapien
aacagtgtgcacagagcccactgtc

SEQ ID NO: 4402711 - DNA, 25 bp, Homo sapien
aaggcagggcccaacagtgtgcaca

SEQ ID NO: 4402712 - DNA, 25 bp, Homo sapien
cggtcaaacgtcttcagatgcttca

SEQ ID NO: 4402713 - DNA, 25 bp, Homo sapien
ccggtcaaacgtcttcagatgcttc

SEQ ID NO: 4402714 - DNA, 25 bp, Homo sapien
gccataccaagaactgcttaacttt

SEQ ID NO: 4402715 - DNA, 25 bp, Homo sapien
agaactgcttaacttttagacctgt

SEQ ID NO: 4402716 - DNA, 25 bp, Homo sapien
cagccataccaagaactgcttaact

SEQ ID NO: 4402717 - DNA, 25 bp, Homo sapien
taccaagaactgcttaacttttaga

SEQ ID NO: 4402718 - DNA, 25 bp, Homo sapien
aaaatgaagtcttgactaaagcttc

SEQ ID NO: 4402719 - DNA, 25 bp, Homo sapien
agtcttgactaaagcttctgaataa

SEQ ID NO: 4402720 - DNA, 25 bp, Homo sapien
aatttagactatgagtttattactc

SEQ ID NO: 4402721 - DNA, 25 bp, Homo sapien
tagactatgagtttattactctgaa

SEQ ID NO: 4402722 - DNA, 25 bp, Homo sapien
tctggtggtgaacgtgacacgagcc

SEQ ID NO: 4402723 - DNA, 25 bp, Homo sapien
acccctggcgggactcctgatgtgg

SEQ ID NO: 4402724 - DNA, 25 bp, Homo sapien
tgtgaggcaccatgttccatacggc

SEQ ID NO: 4402725 - DNA, 25 bp, Homo sapien
cctttccagcgggatacagccagga

SEQ ID NO: 4402726 - DNA, 25 bp, Homo sapien
gccctgctgatggtggggttggaac

SEQ ID NO: 4402727 - DNA, 25 bp, Homo sapien
cctgctgatggtggggttggaaccg

SEQ ID NO: 4402728 - DNA, 25 bp, Homo sapien
tgtggtgatacacacaaggaggaac

SEQ ID NO: 4402729 - DNA, 25 bp, Homo sapien
ttggaaccgaaggtcttcaaggaga

SEQ ID NO: 4402730 - DNA, 25 bp, Homo sapien
cttcagcagcgacgttttcgtatca

SEQ ID NO: 4402731 - DNA, 25 bp, Homo sapien
gcagcgacgttttcgtatcatcttt

SEQ ID NO: 4402732 - DNA, 25 bp, Homo sapien
tcagcagcgacgttttcgtatcatc

SEQ ID NO: 4402733 - DNA, 25 bp, Homo sapien
gacgttttcgtatcatcttttcgta

SEQ ID NO: 4402734 - DNA, 25 bp, Homo sapien
tgcaatcatgtcttccgcagccaga

SEQ ID NO: 4402735 - DNA, 25 bp, Homo sapien
ggcctgctgaccttctatgtggaga

SEQ ID NO: 4402736 - DNA, 25 bp, Homo sapien
cacacggagtggactaacagagact

SEQ ID NO: 4402737 - DNA, 25 bp, Homo sapien
cttaaagacgtttccgagctgctgg

SEQ ID NO: 4402738 - DNA, 25 bp, Homo sapien
cagcatttggtttaattggagggac

SEQ ID NO: 4402739 - DNA, 25 bp, Homo sapien
tgcatgctgagtcgcagttccgatg

SEQ ID NO: 4402740 - DNA, 25 bp, Homo sapien
aacattcgtgacagattcttcccca

SEQ ID NO: 4402741 - DNA, 25 bp, Homo sapien
agttccgatgttcttatgcttcttc

SEQ ID NO: 4402742 - DNA, 25 bp, Homo sapien
tgctaactgtcctgttcttcgcgcc

SEQ ID NO: 4402743 - DNA, 25 bp, Homo sapien
gaggctgcataacaaccgtgaggat

SEQ ID NO: 4402744 - DNA, 25 bp, Homo sapien
tctggaggtgggaacgatgctaact

SEQ ID NO: 4402745 - DNA, 25 bp, Homo sapien
taacaaccgtgaggatctctggagg

SEQ ID NO: 4402746 - DNA, 25 bp, Homo sapien
aggtccaatagcgagtttgccccga

SEQ ID NO: 4402747 - DNA, 25 bp, Homo sapien
aatagcgagtttgccccgaggcggt

SEQ ID NO: 4402748 - DNA, 25 bp, Homo sapien
gagtttgccccgaggcggttgacac

SEQ ID NO: 4402749 - DNA, 25 bp, Homo sapien
gtccaatagcgagtttgccccgagg

SEQ ID NO: 4402750 - DNA, 25 bp, Homo sapien
caggccgggcacaatctgatcctgg

SEQ ID NO: 4402751 - DNA, 25 bp, Homo sapien
cctggccattcccgtgcctcaggac

SEQ ID NO: 4402752 - DNA, 25 bp, Homo sapien
ggcacaatctgatcctggccattcc

SEQ ID NO: 4402753 - DNA, 25 bp, Homo sapien
ggcctccccacaggcgtacaggccg

SEQ ID NO: 4402754 - DNA, 25 bp, Homo sapien
tagacgtgatctttctcagggccac

SEQ ID NO: 4402755 - DNA, 25 bp, Homo sapien
gggaggacagggatcggctccttcg

SEQ ID NO: 4402756 - DNA, 25 bp, Homo sapien
gggatcggctccttcgtgacgtcca

SEQ ID NO: 4402757 - DNA, 25 bp, Homo sapien
ctgcaggtagacgtgatctttctca

SEQ ID NO: 4402758 - DNA, 25 bp, Homo sapien
tctctagacgccaggtccttcgcga

SEQ ID NO: 4402759 - DNA, 25 bp, Homo sapien
accgagacaccacatctctagacgc

SEQ ID NO: 4402760 - DNA, 25 bp, Homo sapien
ctccataaacctttcgccttgactg

SEQ ID NO: 4402761 - DNA, 25 bp, Homo sapien
gacaccacatctctagacgccaggt

SEQ ID NO: 4402762 - DNA, 25 bp, Homo sapien
gacatccttccgtaatgagacaacc

SEQ ID NO: 4402763 - DNA, 25 bp, Homo sapien
tccttccgtaatgagacaaccagca

SEQ ID NO: 4402764 - DNA, 25 bp, Homo sapien
tctccacgacatccttccgtaatga

SEQ ID NO: 4402765 - DNA, 25 bp, Homo sapien
cgtaatgagacaaccagcaccatat

SEQ ID NO: 4402766 - DNA, 25 bp, Homo sapien
gccctggtgatcatggccgtgccgt

SEQ ID NO: 4402767 - DNA, 25 bp, Homo sapien
cctggtgatcatggccgtgccgtcg

SEQ ID NO: 4402768 - DNA, 25 bp, Homo sapien
ccctggtgatcatggccgtgccgtc

SEQ ID NO: 4402769 - DNA, 25 bp, Homo sapien
agtggcccacgtccggacctcctgt

SEQ ID NO: 4402770 - DNA, 25 bp, Homo sapien
aacaacagagagcagtgactgcaca

SEQ ID NO: 4402771 - DNA, 25 bp, Homo sapien
acaacagagagcagtgactgcacac

SEQ ID NO: 4402772 - DNA, 25 bp, Homo sapien
tgcacacagtggcccacgtccggac

SEQ ID NO: 4402773 - DNA, 25 bp, Homo sapien
accccacacacatcactgggggcca

SEQ ID NO: 4402774 - DNA, 25 bp, Homo sapien
ccccacacacatcactgggggccat

SEQ ID NO: 4402775 - DNA, 25 bp, Homo sapien
gctgtataatgttaactctggccac

SEQ ID NO: 4402776 - DNA, 25 bp, Homo sapien
tataacattaactctagccaccatg

SEQ ID NO: 4402777 - DNA, 25 bp, Homo sapien
gattttaactgtagccaccatgctg

SEQ ID NO: 4402778 - DNA, 25 bp, Homo sapien
tttaatcagcatcgccacagtctgc

SEQ ID NO: 4402779 - DNA, 25 bp, Homo sapien
gagcacatggtagtcctgtgacttt

SEQ ID NO: 4402780 - DNA, 25 bp, Homo sapien
cacatggtagtcctgtgacttttga

SEQ ID NO: 4402781 - DNA, 25 bp, Homo sapien
gcacatggtagtcctgtgacttttg

SEQ ID NO: 4402782 - DNA, 25 bp, Homo sapien
tggagcacatggtagtcctgtgact

SEQ ID NO: 4402783 - DNA, 25 bp, Homo sapien
tagtattctttgctcttatgcgatg

SEQ ID NO: 4402784 - DNA, 25 bp, Homo sapien
tcctgtatgcacagtgcgaagacac

SEQ ID NO: 4402785 - DNA, 25 bp, Homo sapien
ttatgcgatggatggacccgtcctg

SEQ ID NO: 4402786 - DNA, 25 bp, Homo sapien
gatggacccgtcctgtatgcacagt

SEQ ID NO: 4402787 - DNA, 25 bp, Homo sapien
catcaggagatccaaggcaaaatac

SEQ ID NO: 4402788 - DNA, 25 bp, Homo sapien
aacagctggtatcatatcgcagaga

SEQ ID NO: 4402789 - DNA, 25 bp, Homo sapien
ccacaaaacagctggtatcatatcg

SEQ ID NO: 4402790 - DNA, 25 bp, Homo sapien
cccattctccatcaggagatccaag

SEQ ID NO: 4402791 - DNA, 25 bp, Homo sapien
agggcaagaagtgttaagccaacct

SEQ ID NO: 4402792 - DNA, 25 bp, Homo sapien
tgtgcaatattgagtggccggtccg

SEQ ID NO: 4402793 - DNA, 25 bp, Homo sapien
gcaatattgagtggccggtccgatc

SEQ ID NO: 4402794 - DNA, 25 bp, Homo sapien
tgcaatattgagtggccggtccgat

SEQ ID NO: 4402795 - DNA, 25 bp, Homo sapien
gtgtgcaatattgagtggccggtcc

SEQ ID NO: 4402796 - DNA, 25 bp, Homo sapien
ttttccaggactcttgtactagaaa

SEQ ID NO: 4402797 - DNA, 25 bp, Homo sapien
ggactcttgtactagaaacagacca

SEQ ID NO: 4402798 - DNA, 25 bp, Homo sapien
cacatctgcctcaactgcttacatt

SEQ ID NO: 4402799 - DNA, 25 bp, Homo sapien
tccaggactcttgtactagaaacag

SEQ ID NO: 4402800 - DNA, 25 bp, Homo sapien
gaaatgccacctccagttgtcctcc

SEQ ID NO: 4402801 - DNA, 25 bp, Homo sapien
tcctggtcccccagccagtcggagc

SEQ ID NO: 4402802 - DNA, 25 bp, Homo sapien
taaactccatactcagagtcgcact

SEQ ID NO: 4402803 - DNA, 25 bp, Homo sapien
tattaacaaatcttcccaacggcat

SEQ ID NO: 4402804 - DNA, 25 bp, Homo sapien
taaagatcagaagtgcttcctgcca

SEQ ID NO: 4402805 - DNA, 25 bp, Homo sapien
tttacgggcatgtgttaaagatcag

SEQ ID NO: 4402806 - DNA, 25 bp, Homo sapien
gtatcaaactctgcctcggaaaggc

SEQ ID NO: 4402807 - DNA, 25 bp, Homo sapien
atcaaactctgcctcggaaaggcca

SEQ ID NO: 4402808 - DNA, 25 bp, Homo sapien
ctgtatcaaactctgcctcggaaag

SEQ ID NO: 4402809 - DNA, 25 bp, Homo sapien
tcaaactctgcctcggaaaggccaa

SEQ ID NO: 4402810 - DNA, 25 bp, Homo sapien
ctcgcaaagccggcccctccagcgc

SEQ ID NO: 4402811 - DNA, 25 bp, Homo sapien
tccactactggatactgagcagaaa

SEQ ID NO: 4402812 - DNA, 25 bp, Homo sapien
ccactactggatactgagcagaaat

SEQ ID NO: 4402813 - DNA, 25 bp, Homo sapien
gccctctcgttccttcaacagtgaa

SEQ ID NO: 4402814 - DNA, 25 bp, Homo sapien
tagcagatgccctctcgttccttca

SEQ ID NO: 4402815 - DNA, 25 bp, Homo sapien
tctcgttccttcaacagtgaagtga

SEQ ID NO: 4402816 - DNA, 25 bp, Homo sapien
gatgccctctcgttccttcaacagt

SEQ ID NO: 4402817 - DNA, 25 bp, Homo sapien
caccttcttatgtacccaggtgctc

SEQ ID NO: 4402818 - DNA, 25 bp, Homo sapien
actgttcaccttcttatgtacccag

SEQ ID NO: 4402819 - DNA, 25 bp, Homo sapien
gttcaccttcttatgtacccaggtg

SEQ ID NO: 4402820 - DNA, 25 bp, Homo sapien
ctgttcaccttcttatgtacccagg

SEQ ID NO: 4402821 - DNA, 25 bp, Homo sapien
gacatccagatcgtattactgtatg

SEQ ID NO: 4402822 - DNA, 25 bp, Homo sapien
ttccaatcgtccaggagggcttgcg

SEQ ID NO: 4402823 - DNA, 25 bp, Homo sapien
catcagagccctttccacattacag

SEQ ID NO: 4402824 - DNA, 25 bp, Homo sapien
tattactgtatgtggtattttgcaa

SEQ ID NO: 4402825 - DNA, 25 bp, Homo sapien
gcagctactataacacaatcttgaa

SEQ ID NO: 4402826 - DNA, 25 bp, Homo sapien
atgtaagtagaaacagtgagatcac

SEQ ID NO: 4402827 - DNA, 25 bp, Homo sapien
aatgtttattcgttctttctaggat

SEQ ID NO: 4402828 - DNA, 25 bp, Homo sapien
ttaacataggtaatagcaccaataa

SEQ ID NO: 4402829 - DNA, 25 bp, Homo sapien
cagctcctaagagcccaagatgcgg

SEQ ID NO: 4402830 - DNA, 25 bp, Homo sapien
cttgtggacgccctcccagcagctc

SEQ ID NO: 4402831 - DNA, 25 bp, Homo sapien
gcagctcctaagagcccaagatgcg

SEQ ID NO: 4402832 - DNA, 25 bp, Homo sapien
ctcctgcttgtggacgccctcccag

SEQ ID NO: 4402833 - DNA, 25 bp, Homo sapien
acccccgacacgtctgtagtcgccg

SEQ ID NO: 4402834 - DNA, 25 bp, Homo sapien
cccgacacgtctgtagtcgccgccg

SEQ ID NO: 4402835 - DNA, 25 bp, Homo sapien
gagcgcttggcaaccgcgacaggcc

SEQ ID NO: 4402836 - DNA, 25 bp, Homo sapien
acacgtctgtagtcgccgccgcgca

SEQ ID NO: 4402837 - DNA, 25 bp, Homo sapien
caaggcggggcgctagtgggggaca

SEQ ID NO: 4402838 - DNA, 25 bp, Homo sapien
cggccgggtcaaggcggggcgctag

SEQ ID NO: 4402839 - DNA, 25 bp, Homo sapien
cgcaccacggccgggtcaaggcggg

SEQ ID NO: 4402840 - DNA, 25 bp, Homo sapien
ctgcgcaccacggccgggtcaaggc

SEQ ID NO: 4402841 - DNA, 25 bp, Homo sapien
cttctggttcagatagtattttaat

SEQ ID NO: 4402842 - DNA, 25 bp, Homo sapien
cacggccgtggtcagctttgaaagc

SEQ ID NO: 4402843 - DNA, 25 bp, Homo sapien
tgctagcttaccctgattctgcttc

SEQ ID NO: 4402844 - DNA, 25 bp, Homo sapien
aaagctgggtagatccctttggctc

SEQ ID NO: 4402845 - DNA, 25 bp, Homo sapien
ctcacggtatcgtgggcatttgcag

SEQ ID NO: 4402846 - DNA, 25 bp, Homo sapien
tcacggtatcgtgggcatttgcagc

SEQ ID NO: 4402847 - DNA, 25 bp, Homo sapien
atctctcacggtatcgtgggcattt

SEQ ID NO: 4402848 - DNA, 25 bp, Homo sapien
tccatctctcacggtatcgtgggca

SEQ ID NO: 4402849 - DNA, 25 bp, Homo sapien
gtccatcgggggtcccatgagcttc

SEQ ID NO: 4402850 - DNA, 25 bp, Homo sapien
ctggtccatcgggggtcccatgagc

SEQ ID NO: 4402851 - DNA, 25 bp, Homo sapien
tggtccatcgggggtcccatgagct

SEQ ID NO: 4402852 - DNA, 25 bp, Homo sapien
ggtccatcgggggtcccatgagctt

SEQ ID NO: 4402853 - DNA, 25 bp, Homo sapien
tgtttggtattccggatggggcaga

SEQ ID NO: 4402854 - DNA, 25 bp, Homo sapien
ggtgtttggtattccggatggggca

SEQ ID NO: 4402855 - DNA, 25 bp, Homo sapien
gtgtttggtattccggatggggcag

SEQ ID NO: 4402856 - DNA, 25 bp, Homo sapien
accaccaatgcacggagaacagtag

SEQ ID NO: 4402857 - DNA, 25 bp, Homo sapien
gagaacagtagtgccccgaatgtct

SEQ ID NO: 4402858 - DNA, 25 bp, Homo sapien
tccggataactgcaggcgagcctgc

SEQ ID NO: 4402859 - DNA, 25 bp, Homo sapien
actaccaccaatgcacggagaacag

SEQ ID NO: 4402860 - DNA, 25 bp, Homo sapien
ggacacaattgccagaactcacaga

SEQ ID NO: 4402861 - DNA, 25 bp, Homo sapien
ggaacctcaccatggatacgcttgt

SEQ ID NO: 4402862 - DNA, 25 bp, Homo sapien
tcacagaatagaagtatcagcaccg

SEQ ID NO: 4402863 - DNA, 25 bp, Homo sapien
caccaggctgggtgaacggacacaa

SEQ ID NO: 4402864 - DNA, 25 bp, Homo sapien
caccaccctcggatttgaacagcgg

SEQ ID NO: 4402865 - DNA, 25 bp, Homo sapien
tcggatttgaacagcggtagcacca

SEQ ID NO: 4402866 - DNA, 25 bp, Homo sapien
gctcaacgactctcatagacttaaa

SEQ ID NO: 4402867 - DNA, 25 bp, Homo sapien
gactctcatagacttaaaaggcagc

SEQ ID NO: 4402868 - DNA, 25 bp, Homo sapien
tcacacagctgtagatacgatctta

SEQ ID NO: 4402869 - DNA, 25 bp, Homo sapien
tgcctgtgcagaagtcttatgaaaa

SEQ ID NO: 4402870 - DNA, 25 bp, Homo sapien
agaaacacaccatttgaaaacacgt

SEQ ID NO: 4402871 - DNA, 25 bp, Homo sapien
taacatattcccatcacccgagcat

SEQ ID NO: 4402872 - DNA, 25 bp, Homo sapien
gtcgcccctcaggtggatgaacaca

SEQ ID NO: 4402873 - DNA, 25 bp, Homo sapien
gctggtcgcccctcaggtggatgaa

SEQ ID NO: 4402874 - DNA, 25 bp, Homo sapien
cctgctggtcgcccctcaggtggat

SEQ ID NO: 4402875 - DNA, 25 bp, Homo sapien
tgcatcctcctctcaacccgctgag

SEQ ID NO: 4402876 - DNA, 25 bp, Homo sapien
cacggactctggcaagaacaatggg

SEQ ID NO: 4402877 - DNA, 25 bp, Homo sapien
gcccgcatcgaggcagcagggtcca

SEQ ID NO: 4402878 - DNA, 25 bp, Homo sapien
cacaagctctcaggggccacgtgca

SEQ ID NO: 4402879 - DNA, 25 bp, Homo sapien
agcaggtgcacctgcgtcccctccc

SEQ ID NO: 4402880 - DNA, 25 bp, Homo sapien
tagtccttgctgtgacctaagaaag

SEQ ID NO: 4402881 - DNA, 25 bp, Homo sapien
gagacatatctttccgattcccagg

SEQ ID NO: 4402882 - DNA, 25 bp, Homo sapien
tagaaacgtgtactggtcatggaaa

SEQ ID NO: 4402883 - DNA, 25 bp, Homo sapien
caattaatgttatgcccagagcaga

SEQ ID NO: 4402884 - DNA, 25 bp, Homo sapien
taaactgaacaataggactcactgg

SEQ ID NO: 4402885 - DNA, 25 bp, Homo sapien
ggttataacactcaccctgtcaggt

SEQ ID NO: 4402886 - DNA, 25 bp, Homo sapien
tcaggttctcgtgtgcgttgacaag

SEQ ID NO: 4402887 - DNA, 25 bp, Homo sapien
tgtcgaagagcaagacgaggctgta

SEQ ID NO: 4402888 - DNA, 25 bp, Homo sapien
tctaggcattgctacagagcagtgt

SEQ ID NO: 4402889 - DNA, 25 bp, Homo sapien
ctaggcattgctacagagcagtgtt

SEQ ID NO: 4402890 - DNA, 25 bp, Homo sapien
taggcattgctacagagcagtgttg

SEQ ID NO: 4402891 - DNA, 25 bp, Homo sapien
ccccagatgtggttggtgtggccaa

SEQ ID NO: 4402892 - DNA, 25 bp, Homo sapien
tcttgtgctgtgaggagtatcccct

SEQ ID NO: 4402893 - DNA, 25 bp, Homo sapien
gtatcccctccccaatgccagaggc

SEQ ID NO: 4402894 - DNA, 25 bp, Homo sapien
tgccagaggcagtcgtcctctaacc

SEQ ID NO: 4402895 - DNA, 25 bp, Homo sapien
cacagaatatgacgaggaacctccg

SEQ ID NO: 4402896 - DNA, 25 bp, Homo sapien
tatgacgaggaacctccgtgaattg

SEQ ID NO: 4402897 - DNA, 25 bp, Homo sapien
tggcacagaatatgacgaggaacct

SEQ ID NO: 4402898 - DNA, 25 bp, Homo sapien
ggaacctccgtgaattggaatcttc

SEQ ID NO: 4402899 - DNA, 25 bp, Homo sapien
ggctatccacgatggagagagagca

SEQ ID NO: 4402900 - DNA, 25 bp, Homo sapien
tgagaaggagcatcatctgtggacc

SEQ ID NO: 4402901 - DNA, 25 bp, Homo sapien
gatttgatggcctcgcatccgtgag

SEQ ID NO: 4402902 - DNA, 25 bp, Homo sapien
tgagaaaccatggtggctatccacg

SEQ ID NO: 4402903 - DNA, 25 bp, Homo sapien
ttagtagaagaagaagtaataatac

SEQ ID NO: 4402904 - DNA, 25 bp, Homo sapien
gtagaagaagaagtaataatacaag

SEQ ID NO: 4402905 - DNA, 25 bp, Homo sapien
agtctgcaatcgtaggggacactaa

SEQ ID NO: 4402906 - DNA, 25 bp, Homo sapien
tcgtaggggacactaatccactgtt

SEQ ID NO: 4402907 - DNA, 25 bp, Homo sapien
gagtgttaatttccggccgggtgca

SEQ ID NO: 4402908 - DNA, 25 bp, Homo sapien
gattctttgttagctcatttgtatt

SEQ ID NO: 4402909 - DNA, 25 bp, Homo sapien
cccaacgctttgggcggtcgaggtg

SEQ ID NO: 4402910 - DNA, 25 bp, Homo sapien
tcttgtgattctttgttagctcatt

SEQ ID NO: 4402911 - DNA, 25 bp, Homo sapien
taataccagcttagatccaatagta

SEQ ID NO: 4402912 - DNA, 25 bp, Homo sapien
ccagcttagatccaatagtatatac

SEQ ID NO: 4402913 - DNA, 25 bp, Homo sapien
agtatatactatgctcctataaatc

SEQ ID NO: 4402914 - DNA, 25 bp, Homo sapien
cctagtttgaataataccagcttag

SEQ ID NO: 4402915 - DNA, 25 bp, Homo sapien
gccgatgctcgtgggctgcagtact

SEQ ID NO: 4402916 - DNA, 25 bp, Homo sapien
gccacagtgggtttcaacacgagga

SEQ ID NO: 4402917 - DNA, 25 bp, Homo sapien
tcagcggagatatgacggccacagt

SEQ ID NO: 4402918 - DNA, 25 bp, Homo sapien
gacggtccccttcgctcgtctggaa

SEQ ID NO: 4402919 - DNA, 25 bp, Homo sapien
agcttcccgaaacgagctacataat

SEQ ID NO: 4402920 - DNA, 25 bp, Homo sapien
cagatcgtaagaagatagaagcttc

SEQ ID NO: 4402921 - DNA, 25 bp, Homo sapien
aagatagaagcttcccgaaacgagc

SEQ ID NO: 4402922 - DNA, 25 bp, Homo sapien
tagatgctgcagatcgtaagaagat

SEQ ID NO: 4402923 - DNA, 25 bp, Homo sapien
gtttctcccgtagaatacagcagtt

SEQ ID NO: 4402924 - DNA, 25 bp, Homo sapien
agtttctcccgtagaatacagcagt

SEQ ID NO: 4402925 - DNA, 25 bp, Homo sapien
tttctcccgtagaatacagcagttt

SEQ ID NO: 4402926 - DNA, 25 bp, Homo sapien
tataatgatggttcactcacggagc

SEQ ID NO: 4402927 - DNA, 25 bp, Homo sapien
tagctacgctaaatgtcagtccaag

SEQ ID NO: 4402928 - DNA, 25 bp, Homo sapien
tgcgtaacacccgaaccaggaatct

SEQ ID NO: 4402929 - DNA, 25 bp, Homo sapien
tattgagcctgttagcacgtactgg

SEQ ID NO: 4402930 - DNA, 25 bp, Homo sapien
ggaagacactgctcccgataatgtg

SEQ ID NO: 4402931 - DNA, 25 bp, Homo sapien
caaaatgggaattagagttacacct

SEQ ID NO: 4402932 - DNA, 25 bp, Homo sapien
ctaccacagcctttaagtgacattg

SEQ ID NO: 4402933 - DNA, 25 bp, Homo sapien
aattttgcaggagtactaccacagc

SEQ ID NO: 4402934 - DNA, 25 bp, Homo sapien
tggaggatcactcaaagtaagcgac

SEQ ID NO: 4402935 - DNA, 25 bp, Homo sapien
tcaattacatttggctgacggctgt

SEQ ID NO: 4402936 - DNA, 25 bp, Homo sapien
gagaccagcccttaggattcagaga

SEQ ID NO: 4402937 - DNA, 25 bp, Homo sapien
gaaaatttagcacgatcagcacaag

SEQ ID NO: 4402938 - DNA, 25 bp, Homo sapien
tcattgtcaatgtcccaaacgtcac

SEQ ID NO: 4402939 - DNA, 25 bp, Homo sapien
agagccaactggtttctgaacagcg

SEQ ID NO: 4402940 - DNA, 25 bp, Homo sapien
gtttacgcagtttcaagttctccag

SEQ ID NO: 4402941 - DNA, 25 bp, Homo sapien
gaatagtccaagtagctagagccaa

SEQ ID NO: 4402942 - DNA, 25 bp, Homo sapien
ggagccccagaagacatgtcggaaa

SEQ ID NO: 4402943 - DNA, 25 bp, Homo sapien
cagcattcccgaaatctgttgttag

SEQ ID NO: 4402944 - DNA, 25 bp, Homo sapien
tccacgagcagaatacagccactgt

SEQ ID NO: 4402945 - DNA, 25 bp, Homo sapien
tagcacggaagaagtctccacgagc

SEQ ID NO: 4402946 - DNA, 25 bp, Homo sapien
gccactgtaaactcaggcccatttc

SEQ ID NO: 4402947 - DNA, 25 bp, Homo sapien
gatgcgcagatcactacgagatgga

SEQ ID NO: 4402948 - DNA, 25 bp, Homo sapien
gagatggaatcctgctagctgtgct

SEQ ID NO: 4402949 - DNA, 25 bp, Homo sapien
tattccgtgtcctactgacgggctg

SEQ ID NO: 4402950 - DNA, 25 bp, Homo sapien
tggattctgaaacacctgctgagct

SEQ ID NO: 4402951 - DNA, 25 bp, Homo sapien
tcgtgccactttgttcaactcagga

SEQ ID NO: 4402952 - DNA, 25 bp, Homo sapien
tagtttaatcacgaactgaccagcg

SEQ ID NO: 4402953 - DNA, 25 bp, Homo sapien
ccttataggtgtccatggtggtacc

SEQ ID NO: 4402954 - DNA, 25 bp, Homo sapien
cagttggctgttgtacctctcatag

SEQ ID NO: 4402955 - DNA, 25 bp, Homo sapien
gagttctaagagcaagagcctcaca

SEQ ID NO: 4402956 - DNA, 25 bp, Homo sapien
aacagtgacgacagttccacccttg

SEQ ID NO: 4402957 - DNA, 25 bp, Homo sapien
gcaagacaacgcgaggctatggtac

SEQ ID NO: 4402958 - DNA, 25 bp, Homo sapien
cttcgccatcgaggtaacagtgacg

SEQ ID NO: 4402959 - DNA, 25 bp, Homo sapien
aatgaaggaacatgcaataattaca

SEQ ID NO: 4402960 - DNA, 25 bp, Homo sapien
caagtctatgttaaaactaataatg

SEQ ID NO: 4402961 - DNA, 25 bp, Homo sapien
cctggtcctggttaaagatcgagcc

SEQ ID NO: 4402962 - DNA, 25 bp, Homo sapien
taagctaattgagattaacaagtct

SEQ ID NO: 4402963 - DNA, 25 bp, Homo sapien
acaaaaatgcaaccctgaagagaag

SEQ ID NO: 4402964 - DNA, 25 bp, Homo sapien
tccatggccaggtgtagtaagtagc

SEQ ID NO: 4402965 - DNA, 25 bp, Homo sapien
tctcaaagttgacacaagaagatcc

SEQ ID NO: 4402966 - DNA, 25 bp, Homo sapien
gggtctcacccttgtatgtctgata

SEQ ID NO: 4402967 - DNA, 25 bp, Homo sapien
gtaatcctcgtcatttgtccttaaa

SEQ ID NO: 4402968 - DNA, 25 bp, Homo sapien
tgcaatgccctattcccaaatacag

SEQ ID NO: 4402969 - DNA, 25 bp, Homo sapien
tgtacatagttgactatagcacagg

SEQ ID NO: 4402970 - DNA, 25 bp, Homo sapien
tctctcgtgagaaaatctgcctagc

SEQ ID NO: 4402971 - DNA, 25 bp, Homo sapien
gaaagcagcattgtctaaagtgagt

SEQ ID NO: 4402972 - DNA, 25 bp, Homo sapien
gggaaagcagcattgtctaaagtga

SEQ ID NO: 4402973 - DNA, 25 bp, Homo sapien
agcagcattgtctaaagtgagtttc

SEQ ID NO: 4402974 - DNA, 25 bp, Homo sapien
agcattgtctaaagtgagtttctca

SEQ ID NO: 4402975 - DNA, 25 bp, Homo sapien
taaagaatagactgttctatcgtgc

SEQ ID NO: 4402976 - DNA, 25 bp, Homo sapien
agactgttctatcgtgctagtcccc

SEQ ID NO: 4402977 - DNA, 25 bp, Homo sapien
ttttaaagaatagactgttctatcg

SEQ ID NO: 4402978 - DNA, 25 bp, Homo sapien
aatagactgttctatcgtgctagtc

SEQ ID NO: 4402979 - DNA, 25 bp, Homo sapien
gatatagaaattgcccagtaaccgg

SEQ ID NO: 4402980 - DNA, 25 bp, Homo sapien
gaaattgcccagtaaccggatgctt

SEQ ID NO: 4402981 - DNA, 25 bp, Homo sapien
atagaaattgcccagtaaccggatg

SEQ ID NO: 4402982 - DNA, 25 bp, Homo sapien
attgcccagtaaccggatgcttcac

SEQ ID NO: 4402983 - DNA, 25 bp, Homo sapien
tattactaactaggctcatgttgtc

SEQ ID NO: 4402984 - DNA, 25 bp, Homo sapien
ccgggtggggtagttcacaactgca

SEQ ID NO: 4402985 - DNA, 25 bp, Homo sapien
ggctagtcactaacatgttactcta

SEQ ID NO: 4402986 - DNA, 25 bp, Homo sapien
ggaacttatttattcaggctagtca

SEQ ID NO: 4402987 - DNA, 25 bp, Homo sapien
acagtgggctggcagaaaccttgaa

SEQ ID NO: 4402988 - DNA, 25 bp, Homo sapien
ttctcaataagcgtatacaacagtg

SEQ ID NO: 4402989 - DNA, 25 bp, Homo sapien
taagcgtatacaacagtgggctggc

SEQ ID NO: 4402990 - DNA, 25 bp, Homo sapien
tttgcattgttttctcaataagcgt

SEQ ID NO: 4402991 - DNA, 25 bp, Homo sapien
ctccattccgataattttcacactg

SEQ ID NO: 4402992 - DNA, 25 bp, Homo sapien
tgcaacaactatcccattcatcaag

SEQ ID NO: 4402993 - DNA, 25 bp, Homo sapien
cacactgctacttctacaactataa

SEQ ID NO: 4402994 - DNA, 25 bp, Homo sapien
gacagtaatctagatcagtggccct

SEQ ID NO: 4402995 - DNA, 25 bp, Homo sapien
gctatactcagcacattctgcggca

SEQ ID NO: 4402996 - DNA, 25 bp, Homo sapien
cagtgatgccacaacgtaacaggat

SEQ ID NO: 4402997 - DNA, 25 bp, Homo sapien
tagaggtcccataaatccactgccc

SEQ ID NO: 4402998 - DNA, 25 bp, Homo sapien
ttctgcggcaaacatacaacaggga

SEQ ID NO: 4402999 - DNA, 25 bp, Homo sapien
cacagctaatgaaagggatacttac

SEQ ID NO: 4403000 - DNA, 25 bp, Homo sapien
ctcaaaaaagtttacctgaattcat

SEQ ID NO: 4403001 - DNA, 25 bp, Homo sapien
tatccagattaatataagtgaaagc

SEQ ID NO: 4403002 - DNA, 25 bp, Homo sapien
agcctttaaatgcagggacgaaagg

SEQ ID NO: 4403003 - DNA, 25 bp, Homo sapien
aatataagtgaaagcctttaaatgc

SEQ ID NO: 4403004 - DNA, 25 bp, Homo sapien
ttaaatgcagggacgaaaggtatcc

SEQ ID NO: 4403005 - DNA, 25 bp, Homo sapien
tttatcacatacagtagcattaggg

SEQ ID NO: 4403006 - DNA, 25 bp, Homo sapien
caagctcgtgtccaatatgggaagg

SEQ ID NO: 4403007 - DNA, 25 bp, Homo sapien
ttctggacaacagcctaagcccaca

SEQ ID NO: 4403008 - DNA, 25 bp, Homo sapien
tctggactctactgagactaaacgc

SEQ ID NO: 4403009 - DNA, 25 bp, Homo sapien
gtggcaccaaccgatccaaagtctc

SEQ ID NO: 4403010 - DNA, 25 bp, Homo sapien
attcagtggcaccaaccgatccaaa

SEQ ID NO: 4403011 - DNA, 25 bp, Homo sapien
ggcaaagataatgcttctgctgggc

SEQ ID NO: 4403012 - DNA, 25 bp, Homo sapien
tccagcactccaactggcaaagata

SEQ ID NO: 4403013 - DNA, 25 bp, Homo sapien
cagtgtaagcatgatgatgcacatc

SEQ ID NO: 4403014 - DNA, 25 bp, Homo sapien
agaaactatatttgtgacagcacct

SEQ ID NO: 4403015 - DNA, 25 bp, Homo sapien
gggccagtagtcaccctttcacaat

SEQ ID NO: 4403016 - DNA, 25 bp, Homo sapien
ttcagaggtaaatccaaacattgga

SEQ ID NO: 4403017 - DNA, 25 bp, Homo sapien
tttctccattaatgtactctgtatt

SEQ ID NO: 4403018 - DNA, 25 bp, Homo sapien
tctgtattaaagttaagcattgcag

SEQ ID NO: 4403019 - DNA, 25 bp, Homo sapien
ttaaagttaagcattgcagtttgcc

SEQ ID NO: 4403020 - DNA, 25 bp, Homo sapien
tttttctccattaatgtactctgta

SEQ ID NO: 4403021 - DNA, 25 bp, Homo sapien
gcacggtggctcactagcagcattt

SEQ ID NO: 4403022 - DNA, 25 bp, Homo sapien
gattgcttagggactatgatccacc

SEQ ID NO: 4403023 - DNA, 25 bp, Homo sapien
tggatccaccacactaagcactagg

SEQ ID NO: 4403024 - DNA, 25 bp, Homo sapien
tagagtctagcatgagaaccacagg

SEQ ID NO: 4403025 - DNA, 25 bp, Homo sapien
tgggccccaactacaacatagtgat

SEQ ID NO: 4403026 - DNA, 25 bp, Homo sapien
ggagagctgtgcctacaccggattt

SEQ ID NO: 4403027 - DNA, 25 bp, Homo sapien
tttaagaccatatctgagaacatct

SEQ ID NO: 4403028 - DNA, 25 bp, Homo sapien
ctacaccggattttgcagctccagg

SEQ ID NO: 4403029 - DNA, 25 bp, Homo sapien
gtagagtctgttttccagtcagagg

SEQ ID NO: 4403030 - DNA, 25 bp, Homo sapien
gcctttaataactccaaagatgtta

SEQ ID NO: 4403031 - DNA, 25 bp, Homo sapien
tgaggttaccatcctacatgtagag

SEQ ID NO: 4403032 - DNA, 25 bp, Homo sapien
acattcttgctttctgaggttacca

SEQ ID NO: 4403033 - DNA, 25 bp, Homo sapien
gacgctggcttcacaggttggttac

SEQ ID NO: 4403034 - DNA, 25 bp, Homo sapien
gtcttactttgatctgcaggcagcc

SEQ ID NO: 4403035 - DNA, 25 bp, Homo sapien
gcaggcagccaattggaaaccatta

SEQ ID NO: 4403036 - DNA, 25 bp, Homo sapien
cataaggataagatgggacgctggc

SEQ ID NO: 4403037 - DNA, 25 bp, Homo sapien
tctctctactaactgaatgggctgc

SEQ ID NO: 4403038 - DNA, 25 bp, Homo sapien
aatgggctgctataggcatcgtgct

SEQ ID NO: 4403039 - DNA, 25 bp, Homo sapien
gaggatatccagaggagcgagccac

SEQ ID NO: 4403040 - DNA, 25 bp, Homo sapien
cactaacgttacagggaggatatcc

SEQ ID NO: 4403041 - DNA, 25 bp, Homo sapien
taggcaatcctgatgaccgagatgg

SEQ ID NO: 4403042 - DNA, 25 bp, Homo sapien
tggaaactgagtgtgattgaaggaa

SEQ ID NO: 4403043 - DNA, 25 bp, Homo sapien
gaatccaggtgtgtaagggtcacct

SEQ ID NO: 4403044 - DNA, 25 bp, Homo sapien
tctggacaggtatattaggcaatcc

SEQ ID NO: 4403045 - DNA, 25 bp, Homo sapien
tagtctggtccatgtatatcaacac

SEQ ID NO: 4403046 - DNA, 25 bp, Homo sapien
tcaacacaccaattgcatttaagct

SEQ ID NO: 4403047 - DNA, 25 bp, Homo sapien
gaaagttctgcgttaacaatgggaa

SEQ ID NO: 4403048 - DNA, 25 bp, Homo sapien
acaatgggaaatttagtctggtcca

SEQ ID NO: 4403049 - DNA, 25 bp, Homo sapien
aattctgtatatgcgtaaaactgag

SEQ ID NO: 4403050 - DNA, 25 bp, Homo sapien
gaaatatcacttacctgaagagtaa

SEQ ID NO: 4403051 - DNA, 25 bp, Homo sapien
gaagagtaagataccaaaagtactg

SEQ ID NO: 4403052 - DNA, 25 bp, Homo sapien
gatatgttccactctagttccttgt

SEQ ID NO: 4403053 - DNA, 25 bp, Homo sapien
tcactatagatccattcacaggagt

SEQ ID NO: 4403054 - DNA, 25 bp, Homo sapien
cacaggagtgtataaatcctcaaaa

SEQ ID NO: 4403055 - DNA, 25 bp, Homo sapien
tccctgctctgacaatcactataga

SEQ ID NO: 4403056 - DNA, 25 bp, Homo sapien
tccattcacaggagtgtataaatcc

SEQ ID NO: 4403057 - DNA, 25 bp, Homo sapien
gcattatggtatcggaacagctcta

SEQ ID NO: 4403058 - DNA, 25 bp, Homo sapien
gacaggcaacccaagtaagagataa

SEQ ID NO: 4403059 - DNA, 25 bp, Homo sapien
gaagggcatttagattaaagaggcc

SEQ ID NO: 4403060 - DNA, 25 bp, Homo sapien
aacttttaggtcagagctattggaa

SEQ ID NO: 4403061 - DNA, 25 bp, Homo sapien
gatcaagggctgggcgaagcagctt

SEQ ID NO: 4403062 - DNA, 25 bp, Homo sapien
caagggctgggcgaagcagcttcct

SEQ ID NO: 4403063 - DNA, 25 bp, Homo sapien
gaaaattattctatctatctgttct

SEQ ID NO: 4403064 - DNA, 25 bp, Homo sapien
aaaattattctatctatctgttctc

SEQ ID NO: 4403065 - DNA, 25 bp, Homo sapien
ggccccagccaagatggatatttac

SEQ ID NO: 4403066 - DNA, 25 bp, Homo sapien
catagataatgtcagctgctagcag

SEQ ID NO: 4403067 - DNA, 25 bp, Homo sapien
tgtatgtcaggcattctccaaagct

SEQ ID NO: 4403068 - DNA, 25 bp, Homo sapien
gaatcaagctaagactaggccccag

SEQ ID NO: 4403069 - DNA, 25 bp, Homo sapien
cccaggattctccaccaggtaaaca

SEQ ID NO: 4403070 - DNA, 25 bp, Homo sapien
aagtctaccgttcttatcaactatg

SEQ ID NO: 4403071 - DNA, 25 bp, Homo sapien
caactatgatcaccgagttttgagc

SEQ ID NO: 4403072 - DNA, 25 bp, Homo sapien
tgcagccttactatacgccacataa

SEQ ID NO: 4403073 - DNA, 25 bp, Homo sapien
tttcaacatacaacgcaagattttc

SEQ ID NO: 4403074 - DNA, 25 bp, Homo sapien
tttttgagatccagcctcacgaggg

SEQ ID NO: 4403075 - DNA, 25 bp, Homo sapien
gactttgctgagtttaaattcacga

SEQ ID NO: 4403076 - DNA, 25 bp, Homo sapien
aaatgttgatcacgccagactttgc

SEQ ID NO: 4403077 - DNA, 25 bp, Homo sapien
catcccaatataagcgacgtgctgc

SEQ ID NO: 4403078 - DNA, 25 bp, Homo sapien
tataagcgacgtgctgcagggaagt

SEQ ID NO: 4403079 - DNA, 25 bp, Homo sapien
atggtgccggtgaagtctgtgctgt

SEQ ID NO: 4403080 - DNA, 25 bp, Homo sapien
tgtgctgtccagtttctccgacaac

SEQ ID NO: 4403081 - DNA, 25 bp, Homo sapien
tagcccaagtagccaatcataaatc

SEQ ID NO: 4403082 - DNA, 25 bp, Homo sapien
atagcccaagtagccaatcataaat

SEQ ID NO: 4403083 - DNA, 25 bp, Homo sapien
cgagccaggctgaaccgggtatatg

SEQ ID NO: 4403084 - DNA, 25 bp, Homo sapien
tatcgccatctacttgccgagccag

SEQ ID NO: 4403085 - DNA, 25 bp, Homo sapien
tcaagaaaaagacgatcacagcaat

SEQ ID NO: 4403086 - DNA, 25 bp, Homo sapien
tcacagcaatagtcccatagcagat

SEQ ID NO: 4403087 - DNA, 25 bp, Homo sapien
aactctttgtgagatcagttatgcc

SEQ ID NO: 4403088 - DNA, 25 bp, Homo sapien
gcttactcagttaaagtcatgcttg

SEQ ID NO: 4403089 - DNA, 25 bp, Homo sapien
gactttccataattaaccctactga

SEQ ID NO: 4403090 - DNA, 25 bp, Homo sapien
tgcctcaagactaccaattcaaatg

SEQ ID NO: 4403091 - DNA, 25 bp, Homo sapien
caagttagagaatgctgatctagct

SEQ ID NO: 4403092 - DNA, 25 bp, Homo sapien
ggtatcagaatagagaattattgag

SEQ ID NO: 4403093 - DNA, 25 bp, Homo sapien
aggtatcagaatagagaattattga

SEQ ID NO: 4403094 - DNA, 25 bp, Homo sapien
taggtatcagaatagagaattattg

SEQ ID NO: 4403095 - DNA, 25 bp, Homo sapien
ctaggtatcagaatagagaattatt

SEQ ID NO: 4403096 - DNA, 25 bp, Homo sapien
gagcagccacgtgttcccccggcgc

SEQ ID NO: 4403097 - DNA, 25 bp, Homo sapien
cccaaggtcacccacgaatcccagc

SEQ ID NO: 4403098 - DNA, 25 bp, Homo sapien
aggtcacccacgaatcccagccgtt

SEQ ID NO: 4403099 - DNA, 25 bp, Homo sapien
gagccggcgcactagggcctgcggc

SEQ ID NO: 4403100 - DNA, 25 bp, Homo sapien
cacgagggtcggtgtagttctagaa

SEQ ID NO: 4403101 - DNA, 25 bp, Homo sapien
tgtagttctagaagcccgcactcac

SEQ ID NO: 4403102 - DNA, 25 bp, Homo sapien
cgtgcggctccctatggctgctgga

SEQ ID NO: 4403103 - DNA, 25 bp, Homo sapien
tggacagcaccggagcggccgctcc

SEQ ID NO: 4403104 - DNA, 25 bp, Homo sapien
acccgatatcccgacgctctgaggg

SEQ ID NO: 4403105 - DNA, 25 bp, Homo sapien
acttcctgaggcacgtacgctcgcg

SEQ ID NO: 4403106 - DNA, 25 bp, Homo sapien
cgaggtgctctgacagatcgcccgg

SEQ ID NO: 4403107 - DNA, 25 bp, Homo sapien
gcgctgcgggcgaggcgaaggccaa

SEQ ID NO: 4403108 - DNA, 25 bp, Homo sapien
ctttaagaagcaaatccgtttctgg

SEQ ID NO: 4403109 - DNA, 25 bp, Homo sapien
caaatccgtttctgggccttgggct

SEQ ID NO: 4403110 - DNA, 25 bp, Homo sapien
ttcaggcccgtagggacacagaaca

SEQ ID NO: 4403111 - DNA, 25 bp, Homo sapien
cacagaacagccctttaagaagcaa

SEQ ID NO: 4403112 - DNA, 25 bp, Homo sapien
cagttcttctgcatcgtacacagaa

SEQ ID NO: 4403113 - DNA, 25 bp, Homo sapien
atacgagaagtttcataaagggaag

SEQ ID NO: 4403114 - DNA, 25 bp, Homo sapien
atcctggaactaaaactcttgcagt

SEQ ID NO: 4403115 - DNA, 25 bp, Homo sapien
tctgcatcgtacacagaaatacgag

SEQ ID NO: 4403116 - DNA, 25 bp, Homo sapien
cagaggagaaccggccacctgaagg

SEQ ID NO: 4403117 - DNA, 25 bp, Homo sapien
gatggatgtgggctcatgaagagga

SEQ ID NO: 4403118 - DNA, 25 bp, Homo sapien
atggttgaatcagagtcctcgtggg

SEQ ID NO: 4403119 - DNA, 25 bp, Homo sapien
taggaacgtgacgtggaagatgtct

SEQ ID NO: 4403120 - DNA, 25 bp, Homo sapien
tgaaaacactgttgtagcaggcggg

SEQ ID NO: 4403121 - DNA, 25 bp, Homo sapien
tgaccaggaccttacaacaataccc

SEQ ID NO: 4403122 - DNA, 25 bp, Homo sapien
ctcagggtaggctgacgtactgcca

SEQ ID NO: 4403123 - DNA, 25 bp, Homo sapien
caggcgggtagttgaagctctgcac

SEQ ID NO: 4403124 - DNA, 25 bp, Homo sapien
agagacagttctgggcccgtgagcc

SEQ ID NO: 4403125 - DNA, 25 bp, Homo sapien
agcctgagcaacatgctacgaaggg

SEQ ID NO: 4403126 - DNA, 25 bp, Homo sapien
cgtgagccaatcctgctagccaggt

SEQ ID NO: 4403127 - DNA, 25 bp, Homo sapien
taaggtcgagcccaagtaggcaatg

SEQ ID NO: 4403128 - DNA, 25 bp, Homo sapien
catgtgagctccatgcagtgtcaca

SEQ ID NO: 4403129 - DNA, 25 bp, Homo sapien
cccagcctagcctagtgcttcttaa

SEQ ID NO: 4403130 - DNA, 25 bp, Homo sapien
tgagctccatgcagtgtcacatcta

SEQ ID NO: 4403131 - DNA, 25 bp, Homo sapien
gcttcttaaacattcatgtgagctc

SEQ ID NO: 4403132 - DNA, 25 bp, Homo sapien
gactctggtgaactgacgaaactga

SEQ ID NO: 4403133 - DNA, 25 bp, Homo sapien
gagtttgtgaaactgtgagccggaa

SEQ ID NO: 4403134 - DNA, 25 bp, Homo sapien
tgtgagccggaagaacagtctacag

SEQ ID NO: 4403135 - DNA, 25 bp, Homo sapien
tacagctgtcgtggactcccctgaa

SEQ ID NO: 4403136 - DNA, 25 bp, Homo sapien
ggaagacgcagctcaacagccagtc

SEQ ID NO: 4403137 - DNA, 25 bp, Homo sapien
cagtccacacgaaccctgctctgaa

SEQ ID NO: 4403138 - DNA, 25 bp, Homo sapien
agccagtccacacgaaccctgctct

SEQ ID NO: 4403139 - DNA, 25 bp, Homo sapien
aagacgcagctcaacagccagtcca

SEQ ID NO: 4403140 - DNA, 25 bp, Homo sapien
tcagtcatggagctaggatcaagct

SEQ ID NO: 4403141 - DNA, 25 bp, Homo sapien
gctaggatcaagctttcctaccctc

SEQ ID NO: 4403142 - DNA, 25 bp, Homo sapien
gagctcttggttcccccagggtcaa

SEQ ID NO: 4403143 - DNA, 25 bp, Homo sapien
ccagggtcaaaccaggtctcagtca

SEQ ID NO: 4403144 - DNA, 25 bp, Homo sapien
tcagtaggaggcccccttcttccca

SEQ ID NO: 4403145 - DNA, 25 bp, Homo sapien
cagtaggaggcccccttcttcccag

SEQ ID NO: 4403146 - DNA, 25 bp, Homo sapien
gatacacaaaccgaggtccattgag

SEQ ID NO: 4403147 - DNA, 25 bp, Homo sapien
gcatcagagcttcctaaagcaggat

SEQ ID NO: 4403148 - DNA, 25 bp, Homo sapien
agcaggatctttgcaggccatctca

SEQ ID NO: 4403149 - DNA, 25 bp, Homo sapien
ttatttgcccacgtgggccccttga

SEQ ID NO: 4403150 - DNA, 25 bp, Homo sapien
tcagagccgagtgggaatcaaactc

SEQ ID NO: 4403151 - DNA, 25 bp, Homo sapien
taaataaataatcgtgtcagagccg

SEQ ID NO: 4403152 - DNA, 25 bp, Homo sapien
caagacagacaaagcgtgtggagct

SEQ ID NO: 4403153 - DNA, 25 bp, Homo sapien
gacctagacaggattgttccagacc

SEQ ID NO: 4403154 - DNA, 25 bp, Homo sapien
ggacacaggccacgcagtcctagta

SEQ ID NO: 4403155 - DNA, 25 bp, Homo sapien
gcagtcctagtaccccacagagcca

SEQ ID NO: 4403156 - DNA, 25 bp, Homo sapien
gacccgaaggacacaggccacgcag

SEQ ID NO: 4403157 - DNA, 25 bp, Homo sapien
ggcgaagcagctccgacccgaagga

SEQ ID NO: 4403158 - DNA, 25 bp, Homo sapien
ggcagacgccgcatccaccttgtgt

SEQ ID NO: 4403159 - DNA, 25 bp, Homo sapien
gggcagacgccgcatccaccttgtg

SEQ ID NO: 4403160 - DNA, 25 bp, Homo sapien
gggggcagacgccgcatccaccttg

SEQ ID NO: 4403161 - DNA, 25 bp, Homo sapien
gcagacgccgcatccaccttgtgtc

SEQ ID NO: 4403162 - DNA, 25 bp, Homo sapien
tctgggcttcctctcggtggttctg

SEQ ID NO: 4403163 - DNA, 25 bp, Homo sapien
gatgaacgagtgttgacagagatct

SEQ ID NO: 4403164 - DNA, 25 bp, Homo sapien
ccagtgaaggcccaaatgcaggtga

SEQ ID NO: 4403165 - DNA, 25 bp, Homo sapien
tataacctgcttgacttcttccagt

SEQ ID NO: 4403166 - DNA, 25 bp, Homo sapien
ccaagccccacgtgttctgcggaca

SEQ ID NO: 4403167 - DNA, 25 bp, Homo sapien
aagccccacgtgttctgcggacatc

SEQ ID NO: 4403168 - DNA, 25 bp, Homo sapien
aggctcccaagccccacgtgttctg

SEQ ID NO: 4403169 - DNA, 25 bp, Homo sapien
tcccaagccccacgtgttctgcgga

SEQ ID NO: 4403170 - DNA, 25 bp, Homo sapien
tcctggcggtctggacacgtactcg

SEQ ID NO: 4403171 - DNA, 25 bp, Homo sapien
cttttgttgtgagctgcctcaaatg

SEQ ID NO: 4403172 - DNA, 25 bp, Homo sapien
tcctggcggtctggacatgtactcg

SEQ ID NO: 4403173 - DNA, 25 bp, Homo sapien
gcagttgtgaaaggtcctggcggtc

SEQ ID NO: 4403174 - DNA, 25 bp, Homo sapien
atcactgtcacgcgtagcagggcca

SEQ ID NO: 4403175 - DNA, 25 bp, Homo sapien
gtatcactgtcacgcgtagcagggc

SEQ ID NO: 4403176 - DNA, 25 bp, Homo sapien
tgtatcactgtcacgcgtagcaggg

SEQ ID NO: 4403177 - DNA, 25 bp, Homo sapien
tctgtatcactgtcacgcgtagcag

SEQ ID NO: 4403178 - DNA, 25 bp, Homo sapien
gaaccgaagcaagaagacaagggaa

SEQ ID NO: 4403179 - DNA, 25 bp, Homo sapien
ccgaagcaagaagacaagggaaggg

SEQ ID NO: 4403180 - DNA, 25 bp, Homo sapien
accgaagcaagaagacaagggaagg

SEQ ID NO: 4403181 - DNA, 25 bp, Homo sapien
ctgaaccgaagcaagaagacaaggg

SEQ ID NO: 4403182 - DNA, 25 bp, Homo sapien
ggctggaatacagtagagcgatctc

SEQ ID NO: 4403183 - DNA, 25 bp, Homo sapien
caccctgccccccaggctggaatac

SEQ ID NO: 4403184 - DNA, 25 bp, Homo sapien
tggaatacagtagagcgatctcagc

SEQ ID NO: 4403185 - DNA, 25 bp, Homo sapien
caggctggaatacagtagagcgatc

SEQ ID NO: 4403186 - DNA, 25 bp, Homo sapien
agcggatttagggacagtctgcaca

SEQ ID NO: 4403187 - DNA, 25 bp, Homo sapien
gcctggctaaattgcacgtgcttaa

SEQ ID NO: 4403188 - DNA, 25 bp, Homo sapien
tgtctttttcgaagccctctgtggt

SEQ ID NO: 4403189 - DNA, 25 bp, Homo sapien
cctctgtggttttcggatgagcgga

SEQ ID NO: 4403190 - DNA, 25 bp, Homo sapien
atctgatgtgcgagaggccctgaga

SEQ ID NO: 4403191 - DNA, 25 bp, Homo sapien
tgcttgatctgatgtgcgagaggcc

SEQ ID NO: 4403192 - DNA, 25 bp, Homo sapien
taatatgcttgatctgatgtgcgag

SEQ ID NO: 4403193 - DNA, 25 bp, Homo sapien
ccctgagagggagtgtttccaggac

SEQ ID NO: 4403194 - DNA, 25 bp, Homo sapien
ctctcctgaactgggcaagggtcga

SEQ ID NO: 4403195 - DNA, 25 bp, Homo sapien
caagggtcgaggacttccccatggg

SEQ ID NO: 4403196 - DNA, 25 bp, Homo sapien
aggacttccccatgggtccaggcct

SEQ ID NO: 4403197 - DNA, 25 bp, Homo sapien
caggcctccagcattacatcaggag

SEQ ID NO: 4403198 - DNA, 25 bp, Homo sapien
cgcgtctggcccagtgctctgtgct

SEQ ID NO: 4403199 - DNA, 25 bp, Homo sapien
gatcgggccctcctgatgacagggc

SEQ ID NO: 4403200 - DNA, 25 bp, Homo sapien
tccaggcttctaaggccccagactt

SEQ ID NO: 4403201 - DNA, 25 bp, Homo sapien
tgactttggctagattcgactcccg

SEQ ID NO: 4403202 - DNA, 25 bp, Homo sapien
ttcccgtttcttgatggacagactg

SEQ ID NO: 4403203 - DNA, 25 bp, Homo sapien
tattcccgtttcttgatggacagac

SEQ ID NO: 4403204 - DNA, 25 bp, Homo sapien
tcccgtttcttgatggacagactga

SEQ ID NO: 4403205 - DNA, 25 bp, Homo sapien
ctattcccgtttcttgatggacaga

SEQ ID NO: 4403206 - DNA, 25 bp, Homo sapien
cattatacgagccacacgggggccc

SEQ ID NO: 4403207 - DNA, 25 bp, Homo sapien
cctttagcgaactggaaggttccat

SEQ ID NO: 4403208 - DNA, 25 bp, Homo sapien
gctgcagagcccactcagggtggaa

SEQ ID NO: 4403209 - DNA, 25 bp, Homo sapien
aactggcccagacaaggctgcagag

SEQ ID NO: 4403210 - DNA, 25 bp, Homo sapien
tggcctgcacaaggcgatattgttg

SEQ ID NO: 4403211 - DNA, 25 bp, Homo sapien
ggcgatattgttggttctccctgaa

SEQ ID NO: 4403212 - DNA, 25 bp, Homo sapien
cacaaggcgatattgttggttctcc

SEQ ID NO: 4403213 - DNA, 25 bp, Homo sapien
cctttggcctgcacaaggcgatatt

SEQ ID NO: 4403214 - DNA, 25 bp, Homo sapien
ctagccaaaagtctctgagttctgg

SEQ ID NO: 4403215 - DNA, 25 bp, Homo sapien
aaagtctctgagttctggatgtcca

SEQ ID NO: 4403216 - DNA, 25 bp, Homo sapien
caaaagtctctgagttctggatgtc

SEQ ID NO: 4403217 - DNA, 25 bp, Homo sapien
gccaaaagtctctgagttctggatg

SEQ ID NO: 4403218 - DNA, 25 bp, Homo sapien
atgaggaccaaggacggacctagaa

SEQ ID NO: 4403219 - DNA, 25 bp, Homo sapien
ggacggacctagaagattcatggta

SEQ ID NO: 4403220 - DNA, 25 bp, Homo sapien
ccaaggacggacctagaagattcat

SEQ ID NO: 4403221 - DNA, 25 bp, Homo sapien
gtagcaggagcatgaggaccaagga

SEQ ID NO: 4403222 - DNA, 25 bp, Homo sapien
cgaggaccagtaggtgccgtcctga

SEQ ID NO: 4403223 - DNA, 25 bp, Homo sapien
gaggaccagtaggtgccgtcctgaa

SEQ ID NO: 4403224 - DNA, 25 bp, Homo sapien
tttgcatgaaacacctcattccggc

SEQ ID NO: 4403225 - DNA, 25 bp, Homo sapien
agccttccagaaagatgcattattc

SEQ ID NO: 4403226 - DNA, 25 bp, Homo sapien
atgaaacacctcattccggcctctg

SEQ ID NO: 4403227 - DNA, 25 bp, Homo sapien
attattcccagtcccacggtcacat

SEQ ID NO: 4403228 - DNA, 25 bp, Homo sapien
ttaatgggcattgagggtcttggca

SEQ ID NO: 4403229 - DNA, 25 bp, Homo sapien
tcaggaggcgggttcggaggtgagc

SEQ ID NO: 4403230 - DNA, 25 bp, Homo sapien
aaagggcaaggcacagaaaggcttc

SEQ ID NO: 4403231 - DNA, 25 bp, Homo sapien
gcaggttcaggaggcgggttcagga

SEQ ID NO: 4403232 - DNA, 25 bp, Homo sapien
tgtgggcatctccgggtgcacaggg

SEQ ID NO: 4403233 - DNA, 25 bp, Homo sapien
agaggaaggccgaacctcgcctggg

SEQ ID NO: 4403234 - DNA, 25 bp, Homo sapien
gggcgagaggaaggccgaacctcgc

SEQ ID NO: 4403235 - DNA, 25 bp, Homo sapien
tccgggtgcacaggggcgagaggaa

SEQ ID NO: 4403236 - DNA, 25 bp, Homo sapien
tgaggcccatcagcacatgtagtgg

SEQ ID NO: 4403237 - DNA, 25 bp, Homo sapien
tcctgcgagtaggtgactggcctga

SEQ ID NO: 4403238 - DNA, 25 bp, Homo sapien
caaattataaaccacgagactcatc

SEQ ID NO: 4403239 - DNA, 25 bp, Homo sapien
atgagtgctctcaacaagaccccgc

SEQ ID NO: 4403240 - DNA, 25 bp, Homo sapien
ccttccctgctttgtagggacccag

SEQ ID NO: 4403241 - DNA, 25 bp, Homo sapien
ggagggtgcagattcggcatggatg

SEQ ID NO: 4403242 - DNA, 25 bp, Homo sapien
gtgcagattcggcatggatgtccag

SEQ ID NO: 4403243 - DNA, 25 bp, Homo sapien
agggtgcagattcggcatggatgtc

SEQ ID NO: 4403244 - DNA, 25 bp, Homo sapien
cagctggacagcttcagccatgtac

SEQ ID NO: 4403245 - DNA, 25 bp, Homo sapien
tgcagctggacagcttcagccatgt

SEQ ID NO: 4403246 - DNA, 25 bp, Homo sapien
tctctgcagctggacagcttcagcc

SEQ ID NO: 4403247 - DNA, 25 bp, Homo sapien
cactctctgcagctggacagcttca

SEQ ID NO: 4403248 - DNA, 25 bp, Homo sapien
gccaccgtcctccctggtccggctc

SEQ ID NO: 4403249 - DNA, 25 bp, Homo sapien
cccagggcttagctctgcaggaagc

SEQ ID NO: 4403250 - DNA, 25 bp, Homo sapien
cttgggaagcacacggcccagggct

SEQ ID NO: 4403251 - DNA, 25 bp, Homo sapien
agcacacggcccagggcttagctct

SEQ ID NO: 4403252 - DNA, 25 bp, Homo sapien
gaagctgaggccagcctcatccagg

SEQ ID NO: 4403253 - DNA, 25 bp, Homo sapien
tgcacaaattgttaaataccagttg

SEQ ID NO: 4403254 - DNA, 25 bp, Homo sapien
tgttaaataccagttgctggcacag

SEQ ID NO: 4403255 - DNA, 25 bp, Homo sapien
aataccagttgctggcacagccctg

SEQ ID NO: 4403256 - DNA, 25 bp, Homo sapien
cacagccctggtcgaaggggttgta

SEQ ID NO: 4403257 - DNA, 25 bp, Homo sapien
tttcaacaccattctccaccaaagg

SEQ ID NO: 4403258 - DNA, 25 bp, Homo sapien
ccaccaactcccctgtgtcccatgt

SEQ ID NO: 4403259 - DNA, 25 bp, Homo sapien
gctctccgccgcaaaggctgagatt

SEQ ID NO: 4403260 - DNA, 25 bp, Homo sapien
tgttttgtcactgaaagtggcccag

SEQ ID NO: 4403261 - DNA, 25 bp, Homo sapien
gggaggaaaagtctggacagctcca

SEQ ID NO: 4403262 - DNA, 25 bp, Homo sapien
tccttgcactatttgagattctgcc

SEQ ID NO: 4403263 - DNA, 25 bp, Homo sapien
tgccatagggcaatacgcatccttg

SEQ ID NO: 4403264 - DNA, 25 bp, Homo sapien
gtctggacagctccataacagctca

SEQ ID NO: 4403265 - DNA, 25 bp, Homo sapien
ttgtaggtgcggtcggccgagctca

SEQ ID NO: 4403266 - DNA, 25 bp, Homo sapien
ggtcggccgagctcacggacagtgc

SEQ ID NO: 4403267 - DNA, 25 bp, Homo sapien
cccttgtaggtgcggtcggccgagc

SEQ ID NO: 4403268 - DNA, 25 bp, Homo sapien
gtgcggtcggccgagctcacggaca

SEQ ID NO: 4403269 - DNA, 25 bp, Homo sapien
gacagcggcaccaggaggcccgcgg

SEQ ID NO: 4403270 - DNA, 25 bp, Homo sapien
ccgcggcggacacggccaccacgat

SEQ ID NO: 4403271 - DNA, 25 bp, Homo sapien
agcaggagggacagcggcaccagga

SEQ ID NO: 4403272 - DNA, 25 bp, Homo sapien
gagggacagcggcaccaggaggccc

SEQ ID NO: 4403273 - DNA, 25 bp, Homo sapien
tggccttgtcggtggagaagggcag

SEQ ID NO: 4403274 - DNA, 25 bp, Homo sapien
gcgatggccttgtcggtggagaagg

SEQ ID NO: 4403275 - DNA, 25 bp, Homo sapien
cgatggccttgtcggtggagaaggg

SEQ ID NO: 4403276 - DNA, 25 bp, Homo sapien
atggccttgtcggtggagaagggca

SEQ ID NO: 4403277 - DNA, 25 bp, Homo sapien
tgagacaggtgaccagcatggcgcc

SEQ ID NO: 4403278 - DNA, 25 bp, Homo sapien
agcatggcgcccgagtagaggcaca

SEQ ID NO: 4403279 - DNA, 25 bp, Homo sapien
agatgagacaggtgaccagcatggc

SEQ ID NO: 4403280 - DNA, 25 bp, Homo sapien
aggtgaccagcatggcgcccgagta

SEQ ID NO: 4403281 - DNA, 25 bp, Homo sapien
acaagcagcatgaagaagcggaagt

SEQ ID NO: 4403282 - DNA, 25 bp, Homo sapien
gaagttgcggtgaccgatgcagtta

SEQ ID NO: 4403283 - DNA, 25 bp, Homo sapien
tgcagttattgacccacttgcagtg

SEQ ID NO: 4403284 - DNA, 25 bp, Homo sapien
agcagcatgaagaagcggaagttgc

SEQ ID NO: 4403285 - DNA, 25 bp, Homo sapien
ctggccttctgtgagacacatccta

SEQ ID NO: 4403286 - DNA, 25 bp, Homo sapien
gccttctgtgagacacatcctactg

SEQ ID NO: 4403287 - DNA, 25 bp, Homo sapien
ctgtgagacacatcctactgtaact

SEQ ID NO: 4403288 - DNA, 25 bp, Homo sapien
gtcagaagacctttagagagaagac

SEQ ID NO: 4403289 - DNA, 25 bp, Homo sapien
cactttctcatccattcgatgaaga

SEQ ID NO: 4403290 - DNA, 25 bp, Homo sapien
tatgcaagccgtgctctcgagagag

SEQ ID NO: 4403291 - DNA, 25 bp, Homo sapien
cacttgtaaacctatgcaagccgtg

SEQ ID NO: 4403292 - DNA, 25 bp, Homo sapien
tgggcagaacgtaaaccatctctgg

SEQ ID NO: 4403293 - DNA, 25 bp, Homo sapien
gagttactgccacccttggccttta

SEQ ID NO: 4403294 - DNA, 25 bp, Homo sapien
gtatctcgtgttagcgagcccaggg

SEQ ID NO: 4403295 - DNA, 25 bp, Homo sapien
gatgcggatgccctgtgcatgtcag

SEQ ID NO: 4403296 - DNA, 25 bp, Homo sapien
aacttggacacccaggcgaggacag

SEQ ID NO: 4403297 - DNA, 25 bp, Homo sapien
tccacacagatgttgcaccaggggc

SEQ ID NO: 4403298 - DNA, 25 bp, Homo sapien
tggacaccattgcaggcggaaggcc

SEQ ID NO: 4403299 - DNA, 25 bp, Homo sapien
caccaggggcagtggtaagtccggg

SEQ ID NO: 4403300 - DNA, 25 bp, Homo sapien
acgtgcaccgtcaaggggccctgct

SEQ ID NO: 4403301 - DNA, 25 bp, Homo sapien
gggaagaggattgggcacagcagaa

SEQ ID NO: 4403302 - DNA, 25 bp, Homo sapien
gaagaggattgggcacagcagaagg

SEQ ID NO: 4403303 - DNA, 25 bp, Homo sapien
ggaagaggattgggcacagcagaag

SEQ ID NO: 4403304 - DNA, 25 bp, Homo sapien
aagaggattgggcacagcagaaggc

SEQ ID NO: 4403305 - DNA, 25 bp, Homo sapien
agggtctgagaagttgagtgaaaca

SEQ ID NO: 4403306 - DNA, 25 bp, Homo sapien
cttgatgtaagatgccagggtctga

SEQ ID NO: 4403307 - DNA, 25 bp, Homo sapien
ggtctgagaagttgagtgaaacaag

SEQ ID NO: 4403308 - DNA, 25 bp, Homo sapien
tgtaagatgccagggtctgagaagt

SEQ ID NO: 4403309 - DNA, 25 bp, Homo sapien
gtgataacaggaaaggcccactccc

SEQ ID NO: 4403310 - DNA, 25 bp, Homo sapien
ccactccccgttctgagccagccac

SEQ ID NO: 4403311 - DNA, 25 bp, Homo sapien
tgtgataacaggaaaggcccactcc

SEQ ID NO: 4403312 - DNA, 25 bp, Homo sapien
cccactccccgttctgagccagcca

SEQ ID NO: 4403313 - DNA, 25 bp, Homo sapien
gcaccacattgaaggcagcaaagag

SEQ ID NO: 4403314 - DNA, 25 bp, Homo sapien
ccagcagcaccacattgaaggcagc

SEQ ID NO: 4403315 - DNA, 25 bp, Homo sapien
ggaatgcgaagaagaggccactgaa

SEQ ID NO: 4403316 - DNA, 25 bp, Homo sapien
gaagaggccactgaaaaagaccagc

SEQ ID NO: 4403317 - DNA, 25 bp, Homo sapien
gcgtggcatccgttaagagtgtcat

SEQ ID NO: 4403318 - DNA, 25 bp, Homo sapien
aaccagggacgtgggaccagaggca

SEQ ID NO: 4403319 - DNA, 25 bp, Homo sapien
gctccttcaccagcggcgtggcatc

SEQ ID NO: 4403320 - DNA, 25 bp, Homo sapien
gaggaaccagggacgtgggaccaga

SEQ ID NO: 4403321 - DNA, 25 bp, Homo sapien
ctccttcgcctccaggggaggtcag

SEQ ID NO: 4403322 - DNA, 25 bp, Homo sapien
gcctccttcgcctccaggggaggtc

SEQ ID NO: 4403323 - DNA, 25 bp, Homo sapien
tccttcgcctccaggggaggtcaga

SEQ ID NO: 4403324 - DNA, 25 bp, Homo sapien
cctccttcgcctccaggggaggtca

SEQ ID NO: 4403325 - DNA, 25 bp, Homo sapien
gtcttgtaatgaggccgagggtaaa

SEQ ID NO: 4403326 - DNA, 25 bp, Homo sapien
atgaggccgagggtaaagagtggtc

SEQ ID NO: 4403327 - DNA, 25 bp, Homo sapien
gaggtcttggtcttgtaatgaggcc

SEQ ID NO: 4403328 - DNA, 25 bp, Homo sapien
caggtgagagctgccgcgccgaggc

SEQ ID NO: 4403329 - DNA, 25 bp, Homo sapien
cccgcatggagagaatccacggtgg

SEQ ID NO: 4403330 - DNA, 25 bp, Homo sapien
gggcccgtccgtctgtaaggactca

SEQ ID NO: 4403331 - DNA, 25 bp, Homo sapien
tgtggaaggcattcgcagaggaaat

SEQ ID NO: 4403332 - DNA, 25 bp, Homo sapien
ttcctaggtcctcagggacaacgtg

SEQ ID NO: 4403333 - DNA, 25 bp, Homo sapien
aaaaaagtgactactcagaaaagat

SEQ ID NO: 4403334 - DNA, 25 bp, Homo sapien
gaactagcctccaaaactatgagaa

SEQ ID NO: 4403335 - DNA, 25 bp, Homo sapien
ggagaggagagttgtctgcaagtgg

SEQ ID NO: 4403336 - DNA, 25 bp, Homo sapien
aggagaaatcaaacctgctgacacc

SEQ ID NO: 4403337 - DNA, 25 bp, Homo sapien
tgaagataacgctgaccctggtggg

SEQ ID NO: 4403338 - DNA, 25 bp, Homo sapien
tggtgtttatgacagcagccgagcc

SEQ ID NO: 4403339 - DNA, 25 bp, Homo sapien
cactcaggaagaagcttcagctgct

SEQ ID NO: 4403340 - DNA, 25 bp, Homo sapien
cagctgctgatgttgggccctttcc

SEQ ID NO: 4403341 - DNA, 25 bp, Homo sapien
tccttggcgtgtccacactgctggc

SEQ ID NO: 4403342 - DNA, 25 bp, Homo sapien
catcatttcccgtcaagccaggcta

SEQ ID NO: 4403343 - DNA, 25 bp, Homo sapien
tgggcatcatttcccgtcaagccag

SEQ ID NO: 4403344 - DNA, 25 bp, Homo sapien
gcacagctctatggatcaacacttt

SEQ ID NO: 4403345 - DNA, 25 bp, Homo sapien
gttaagcctcctgtcccatcgtggg

SEQ ID NO: 4403346 - DNA, 25 bp, Homo sapien
tcttctcagtcttggccaacggtgg

SEQ ID NO: 4403347 - DNA, 25 bp, Homo sapien
gaagtgaaaccccacagcttgaggc

SEQ ID NO: 4403348 - DNA, 25 bp, Homo sapien
gagtcagcacgtggaagcaaaggca

SEQ ID NO: 4403349 - DNA, 25 bp, Homo sapien
aaaccacactgcctttatttggcta

SEQ ID NO: 4403350 - DNA, 25 bp, Homo sapien
accacactgcctttatttggctaaa

SEQ ID NO: 4403351 - DNA, 25 bp, Homo sapien
ccacactgcctttatttggctaaag

SEQ ID NO: 4403352 - DNA, 25 bp, Homo sapien
taaaaccacactgcctttatttggc

SEQ ID NO: 4403353 - DNA, 25 bp, Homo sapien
gcgctaacataaaatcttggcagac

SEQ ID NO: 4403354 - DNA, 25 bp, Homo sapien
gttttctgcctcaatccgagcgcta

SEQ ID NO: 4403355 - DNA, 25 bp, Homo sapien
cagactgaaccccacttgaggaaga

SEQ ID NO: 4403356 - DNA, 25 bp, Homo sapien
cgttcaagacgaagccagcagtcct

SEQ ID NO: 4403357 - DNA, 25 bp, Homo sapien
cactctttatccgatggcagtctat

SEQ ID NO: 4403358 - DNA, 25 bp, Homo sapien
gaagctagggaccactctttatccg

SEQ ID NO: 4403359 - DNA, 25 bp, Homo sapien
ccaagaacatgttctacttatttac

SEQ ID NO: 4403360 - DNA, 25 bp, Homo sapien
aaaaatagaagctagggaccactct

SEQ ID NO: 4403361 - DNA, 25 bp, Homo sapien
gcattcaaataggagtagcagggcc

SEQ ID NO: 4403362 - DNA, 25 bp, Homo sapien
taacatgtacgtttgctggccctag

SEQ ID NO: 4403363 - DNA, 25 bp, Homo sapien
gaatgacgccctatgaaccactgtg

SEQ ID NO: 4403364 - DNA, 25 bp, Homo sapien
ggcgatcaggataacaagaggcttc

SEQ ID NO: 4403365 - DNA, 25 bp, Homo sapien
cagcgtggctcatttcgtgaaggac

SEQ ID NO: 4403366 - DNA, 25 bp, Homo sapien
tataggattgagtattgtcccgctc

SEQ ID NO: 4403367 - DNA, 25 bp, Homo sapien
tagatggcacgaaagagactgacaa

SEQ ID NO: 4403368 - DNA, 25 bp, Homo sapien
gaaaaggcctctgcgtattacacta

SEQ ID NO: 4403369 - DNA, 25 bp, Homo sapien
agcgctcgcgagtagggctgctgct

SEQ ID NO: 4403370 - DNA, 25 bp, Homo sapien
tcttgccggagaagggccatcggaa

SEQ ID NO: 4403371 - DNA, 25 bp, Homo sapien
gatatcataggctgcagccttgtgc

SEQ ID NO: 4403372 - DNA, 25 bp, Homo sapien
gaagtcttgccggagaagggccatc

SEQ ID NO: 4403373 - DNA, 25 bp, Homo sapien
ccctctcctgcaagtggtatttctt

SEQ ID NO: 4403374 - DNA, 25 bp, Homo sapien
gaaaacttccaatgaattctcggga

SEQ ID NO: 4403375 - DNA, 25 bp, Homo sapien
tccttccggaccaaacatttccaga

SEQ ID NO: 4403376 - DNA, 25 bp, Homo sapien
aatgaggtcaatgcttttttcctcc

SEQ ID NO: 4403377 - DNA, 25 bp, Homo sapien
tatagcacaatttacagagatggga

SEQ ID NO: 4403378 - DNA, 25 bp, Homo sapien
catacaaaatgtatagtgttggctg

SEQ ID NO: 4403379 - DNA, 25 bp, Homo sapien
gacattaaagttagcagctttcttc

SEQ ID NO: 4403380 - DNA, 25 bp, Homo sapien
tcagggagcatggtaaactggttat

SEQ ID NO: 4403381 - DNA, 25 bp, Homo sapien
tatacgaatgtgttggtaccagacc

SEQ ID NO: 4403382 - DNA, 25 bp, Homo sapien
cagttaacatagtggtaattcattc

SEQ ID NO: 4403383 - DNA, 25 bp, Homo sapien
gaccgtaacggcagaaactgtctgt

SEQ ID NO: 4403384 - DNA, 25 bp, Homo sapien
cttttgggagtgatcatcaaagcca

SEQ ID NO: 4403385 - DNA, 25 bp, Homo sapien
tgatgtggagataccttctgtcctc

SEQ ID NO: 4403386 - DNA, 25 bp, Homo sapien
ggttccgcctcgcatacacatcata

SEQ ID NO: 4403387 - DNA, 25 bp, Homo sapien
cacaattcgggtgatgatgtctgat

SEQ ID NO: 4403388 - DNA, 25 bp, Homo sapien
gacattgagctcctttgctgtgtag

SEQ ID NO: 4403389 - DNA, 25 bp, Homo sapien
atacagacaaacactgtgaggttct

SEQ ID NO: 4403390 - DNA, 25 bp, Homo sapien
tacagacaaacactgtgaggttctg

SEQ ID NO: 4403391 - DNA, 25 bp, Homo sapien
catacagacaaacactgtgaggttc

SEQ ID NO: 4403392 - DNA, 25 bp, Homo sapien
agcaacatggctgaacatctgcagc

SEQ ID NO: 4403393 - DNA, 25 bp, Homo sapien
ctgagatcccctacagtgaggaagc

SEQ ID NO: 4403394 - DNA, 25 bp, Homo sapien
cctgagatcccctacagtgaggaag

SEQ ID NO: 4403395 - DNA, 25 bp, Homo sapien
gcaacatggctgaacatctgcagct

SEQ ID NO: 4403396 - DNA, 25 bp, Homo sapien
atatcatcatgggctacaaaatcaa

SEQ ID NO: 4403397 - DNA, 25 bp, Homo sapien
tatcatcatgggctacaaaatcaat

SEQ ID NO: 4403398 - DNA, 25 bp, Homo sapien
ctgcccgaccgccacccagtcttgg

SEQ ID NO: 4403399 - DNA, 25 bp, Homo sapien
tcatcaccgtgaagcctttgaagtt

SEQ ID NO: 4403400 - DNA, 25 bp, Homo sapien
tagcgctcattctcgttcatcaccg

SEQ ID NO: 4403401 - DNA, 25 bp, Homo sapien
tccacgtagcggcagtgctggactg

SEQ ID NO: 4403402 - DNA, 25 bp, Homo sapien
tgctggactgcgtcatagcgctcat

SEQ ID NO: 4403403 - DNA, 25 bp, Homo sapien
cactgcttaggactgcaaccatctt

SEQ ID NO: 4403404 - DNA, 25 bp, Homo sapien
gagtcctctttgcttagcacctcct

SEQ ID NO: 4403405 - DNA, 25 bp, Homo sapien
ataaattgtgtgttggagtcctctt

SEQ ID NO: 4403406 - DNA, 25 bp, Homo sapien
ccactgcttaggactgcaaccatct

SEQ ID NO: 4403407 - DNA, 25 bp, Homo sapien
ggcataaactctcacaggtcgctca

SEQ ID NO: 4403408 - DNA, 25 bp, Homo sapien
gggaaaaggttcttcgcttgcatca

SEQ ID NO: 4403409 - DNA, 25 bp, Homo sapien
cgggcgtgaccagagtgaaataagt

SEQ ID NO: 4403410 - DNA, 25 bp, Homo sapien
gcttgcatcagagctcgggcgtgac

SEQ ID NO: 4403411 - DNA, 25 bp, Homo sapien
ccatgctgaggttgagtaccacata

SEQ ID NO: 4403412 - DNA, 25 bp, Homo sapien
catgctgaggttgagtaccacatac

SEQ ID NO: 4403413 - DNA, 25 bp, Homo sapien
actatgctgaggatcaggtacacca

SEQ ID NO: 4403414 - DNA, 25 bp, Homo sapien
tagggcttactaaagtcaacttcaa

SEQ ID NO: 4403415 - DNA, 25 bp, Homo sapien
agaaaaaggagctggttgccgtaag

SEQ ID NO: 4403416 - DNA, 25 bp, Homo sapien
tccatagttaccctgacatagggct

SEQ ID NO: 4403417 - DNA, 25 bp, Homo sapien
gaaaaaggagctggttgccgtaagc

SEQ ID NO: 4403418 - DNA, 25 bp, Homo sapien
gttcaactcaatggcatacactgta

SEQ ID NO: 4403419 - DNA, 25 bp, Homo sapien
caactcaatggcatacactgtaata

SEQ ID NO: 4403420 - DNA, 25 bp, Homo sapien
gaaagttcaactcaatggcatacac

SEQ ID NO: 4403421 - DNA, 25 bp, Homo sapien
aaagaaagttcaactcaatggcata

SEQ ID NO: 4403422 - DNA, 25 bp, Homo sapien
tcaggtaagtgtagattttcaaaat

SEQ ID NO: 4403423 - DNA, 25 bp, Homo sapien
tcgtatcatgattgggctgaatcca

SEQ ID NO: 4403424 - DNA, 25 bp, Homo sapien
ggctgcagtgatgttccgttctaaa

SEQ ID NO: 4403425 - DNA, 25 bp, Homo sapien
gcatgaaattgctcccttataatcc

SEQ ID NO: 4403426 - DNA, 25 bp, Homo sapien
cagtatcgctttcaagtcttaagac

SEQ ID NO: 4403427 - DNA, 25 bp, Homo sapien
tgtgttctcctaaaacacatctcct

SEQ ID NO: 4403428 - DNA, 25 bp, Homo sapien
aaaagtaggactaaatatttctgtg

SEQ ID NO: 4403429 - DNA, 25 bp, Homo sapien
cattttaacctcaagggaatgccac

SEQ ID NO: 4403430 - DNA, 25 bp, Homo sapien
gcacagcgctgcactttggaaggaa

SEQ ID NO: 4403431 - DNA, 25 bp, Homo sapien
cacagcgctgcactttggaaggaac

SEQ ID NO: 4403432 - DNA, 25 bp, Homo sapien
cctcttccttgcattgaccttggct

SEQ ID NO: 4403433 - DNA, 25 bp, Homo sapien
cagcgctgcactttggaaggaaccc

SEQ ID NO: 4403434 - DNA, 25 bp, Homo sapien
gaatagctaggaccagcataatgta

SEQ ID NO: 4403435 - DNA, 25 bp, Homo sapien
atagctaggaccagcataatgtatt

SEQ ID NO: 4403436 - DNA, 25 bp, Homo sapien
cagaatagctaggaccagcataatg

SEQ ID NO: 4403437 - DNA, 25 bp, Homo sapien
agaatagctaggaccagcataatgt

SEQ ID NO: 4403438 - DNA, 25 bp, Homo sapien
gccacgaagggctgactctactttg

SEQ ID NO: 4403439 - DNA, 25 bp, Homo sapien
tattttctgaccgtggctgactgtg

SEQ ID NO: 4403440 - DNA, 25 bp, Homo sapien
gagctcttgtagtagcaagttgcaa

SEQ ID NO: 4403441 - DNA, 25 bp, Homo sapien
aaaactgcgactaagggtgagctct

SEQ ID NO: 4403442 - DNA, 25 bp, Homo sapien
tctttttatcttctgaggtggcgct

SEQ ID NO: 4403443 - DNA, 25 bp, Homo sapien
ttttatcttctgaggtggcgcttcg

SEQ ID NO: 4403444 - DNA, 25 bp, Homo sapien
atcttctgaggtggcgcttcggcac

SEQ ID NO: 4403445 - DNA, 25 bp, Homo sapien
gccaaatatgagactcatttctttt

SEQ ID NO: 4403446 - DNA, 25 bp, Homo sapien
cattgaagtctctcccatgtggcat

SEQ ID NO: 4403447 - DNA, 25 bp, Homo sapien
tcaagataaataggctctggaggtc

SEQ ID NO: 4403448 - DNA, 25 bp, Homo sapien
ggcttggcctcagtgtacaaatcat

SEQ ID NO: 4403449 - DNA, 25 bp, Homo sapien
ggtatcattcctagcatgccaggct

SEQ ID NO: 4403450 - DNA, 25 bp, Homo sapien
aaagtacaggttccatccactaaat

SEQ ID NO: 4403451 - DNA, 25 bp, Homo sapien
gcttcttacactttgagatgtacaa

SEQ ID NO: 4403452 - DNA, 25 bp, Homo sapien
cagctcaatactaggaagaaaccca

SEQ ID NO: 4403453 - DNA, 25 bp, Homo sapien
tacccttactatgtaaacacactga

SEQ ID NO: 4403454 - DNA, 25 bp, Homo sapien
tctccgaggtcaccgtgtttcgcat

SEQ ID NO: 4403455 - DNA, 25 bp, Homo sapien
tgtttcgcattcactgctcctgggt

SEQ ID NO: 4403456 - DNA, 25 bp, Homo sapien
catacttcctcggtccaagtgccgt

SEQ ID NO: 4403457 - DNA, 25 bp, Homo sapien
ggccgctgctcgtgttcccttaggt

SEQ ID NO: 4403458 - DNA, 25 bp, Homo sapien
gtttgtcctctcaaacagagacgca

SEQ ID NO: 4403459 - DNA, 25 bp, Homo sapien
cagagacgcaaagataggcacacac

SEQ ID NO: 4403460 - DNA, 25 bp, Homo sapien
tctcaaacagagacgcaaagatagg

SEQ ID NO: 4403461 - DNA, 25 bp, Homo sapien
tgtcctctcaaacagagacgcaaag

SEQ ID NO: 4403462 - DNA, 25 bp, Homo sapien
tctccttgaaaaccacgactcctga

SEQ ID NO: 4403463 - DNA, 25 bp, Homo sapien
gactcctgacacagtagttccgcct

SEQ ID NO: 4403464 - DNA, 25 bp, Homo sapien
gcgccgcgtcactgactagggaagt

SEQ ID NO: 4403465 - DNA, 25 bp, Homo sapien
gatggaagagccagccggaagttcc

SEQ ID NO: 4403466 - DNA, 25 bp, Homo sapien
taaaaactgttcataacatcatgag

SEQ ID NO: 4403467 - DNA, 25 bp, Homo sapien
aataaatgccgctattaagtcatgc

SEQ ID NO: 4403468 - DNA, 25 bp, Homo sapien
tatgtttgaacaattgaaatggctt

SEQ ID NO: 4403469 - DNA, 25 bp, Homo sapien
ctggcaaaaataacaatatggtata

SEQ ID NO: 4403470 - DNA, 25 bp, Homo sapien
aatataaggcctaaaacacaacaga

SEQ ID NO: 4403471 - DNA, 25 bp, Homo sapien
aaatataaggcctaaaacacaacag

SEQ ID NO: 4403472 - DNA, 25 bp, Homo sapien
tattttgtcaagatatttaacaata

SEQ ID NO: 4403473 - DNA, 25 bp, Homo sapien
aaaaagttcagatttcttcatggtc

SEQ ID NO: 4403474 - DNA, 25 bp, Homo sapien
atttcttcatggtcatgtcttttac

SEQ ID NO: 4403475 - DNA, 25 bp, Homo sapien
aactactaacatctttattttgtca

SEQ ID NO: 4403476 - DNA, 25 bp, Homo sapien
agaaacagccaaatgctgctacaac

SEQ ID NO: 4403477 - DNA, 25 bp, Homo sapien
cagccaaatgctgctacaacgcaga

SEQ ID NO: 4403478 - DNA, 25 bp, Homo sapien
caaatgctgctacaacgcagaataa

SEQ ID NO: 4403479 - DNA, 25 bp, Homo sapien
gctgctacaacgcagaataaactgt

SEQ ID NO: 4403480 - DNA, 25 bp, Homo sapien
ccagcctggtaatgatgggattaaa

SEQ ID NO: 4403481 - DNA, 25 bp, Homo sapien
cctgagggtgactacaaaattgctt

SEQ ID NO: 4403482 - DNA, 25 bp, Homo sapien
gctacactattgcttgcctgagggt

SEQ ID NO: 4403483 - DNA, 25 bp, Homo sapien
gggtttccagagtatagctacacta

SEQ ID NO: 4403484 - DNA, 25 bp, Homo sapien
gctgtgataaaggacctgctttgtt

SEQ ID NO: 4403485 - DNA, 25 bp, Homo sapien
attctttggtttagcccagctccct

SEQ ID NO: 4403486 - DNA, 25 bp, Homo sapien
actgtgttctacgacagtgctgtga

SEQ ID NO: 4403487 - DNA, 25 bp, Homo sapien
taaaaataggtaactcagaacatga

SEQ ID NO: 4403488 - DNA, 25 bp, Homo sapien
tctaggtttctgctttagtaacaca

SEQ ID NO: 4403489 - DNA, 25 bp, Homo sapien
aatagtttgatttgcggtgcccacg

SEQ ID NO: 4403490 - DNA, 25 bp, Homo sapien
gatgaatgactaagacagcagtgtc

SEQ ID NO: 4403491 - DNA, 25 bp, Homo sapien
caacttagcaaagtgtgattggttc

SEQ ID NO: 4403492 - DNA, 25 bp, Homo sapien
aacatcatgagtatagttgtcagtg

SEQ ID NO: 4403493 - DNA, 25 bp, Homo sapien
catgagtatagttgtcagtgtcagc

SEQ ID NO: 4403494 - DNA, 25 bp, Homo sapien
ttcatgaaaacatcatgagtatagt

SEQ ID NO: 4403495 - DNA, 25 bp, Homo sapien
tgaaaacatcatgagtatagttgtc

SEQ ID NO: 4403496 - DNA, 25 bp, Homo sapien
tatctgccacgagaaacagtgttcc

SEQ ID NO: 4403497 - DNA, 25 bp, Homo sapien
ggacctaaacgacacatatctgcca

SEQ ID NO: 4403498 - DNA, 25 bp, Homo sapien
cacaggtaggtacccacagagtatt

SEQ ID NO: 4403499 - DNA, 25 bp, Homo sapien
taaaccggagaaactagagtcagat

SEQ ID NO: 4403500 - DNA, 25 bp, Homo sapien
tggctacagggatcaatactagaga

SEQ ID NO: 4403501 - DNA, 25 bp, Homo sapien
cagggatcaatactagagatttgtg

SEQ ID NO: 4403502 - DNA, 25 bp, Homo sapien
gatggctacagggatcaatactaga

SEQ ID NO: 4403503 - DNA, 25 bp, Homo sapien
gctacagggatcaatactagagatt

SEQ ID NO: 4403504 - DNA, 25 bp, Homo sapien
atagacccagcttggctgttctgca

SEQ ID NO: 4403505 - DNA, 25 bp, Homo sapien
taagctgatattccgcagcagattt

SEQ ID NO: 4403506 - DNA, 25 bp, Homo sapien
aggtgaactctaggaggtaagctga

SEQ ID NO: 4403507 - DNA, 25 bp, Homo sapien
tccccaggccaagcacttctcatgt

SEQ ID NO: 4403508 - DNA, 25 bp, Homo sapien
tctaggaggtaagctgatattccgc

SEQ ID NO: 4403509 - DNA, 25 bp, Homo sapien
tcaattcagctcagtacctgaagct

SEQ ID NO: 4403510 - DNA, 25 bp, Homo sapien
tcagctcagtacctgaagctaagcg

SEQ ID NO: 4403511 - DNA, 25 bp, Homo sapien
tacctgaagctaagcggccaatact

SEQ ID NO: 4403512 - DNA, 25 bp, Homo sapien
cagtacctgaagctaagcggccaat

SEQ ID NO: 4403513 - DNA, 25 bp, Homo sapien
caaagctttatttgataacactgta

SEQ ID NO: 4403514 - DNA, 25 bp, Homo sapien
tagatgttaaccatagggagtccgg

SEQ ID NO: 4403515 - DNA, 25 bp, Homo sapien
cttacagtaacagggaaactgggtg

SEQ ID NO: 4403516 - DNA, 25 bp, Homo sapien
gcaagaactgtctcaatagcataat

SEQ ID NO: 4403517 - DNA, 25 bp, Homo sapien
gtggctagagaggacataccatctt

SEQ ID NO: 4403518 - DNA, 25 bp, Homo sapien
caaacctatggctaattaagactag

SEQ ID NO: 4403519 - DNA, 25 bp, Homo sapien
tccatagattcaagagactctgagt

SEQ ID NO: 4403520 - DNA, 25 bp, Homo sapien
cctacctacctatctgaggcagggt

SEQ ID NO: 4403521 - DNA, 25 bp, Homo sapien
cttgcaccaccattttgtatcggtc

SEQ ID NO: 4403522 - DNA, 25 bp, Homo sapien
tctttgttctccaatcactacttgc

SEQ ID NO: 4403523 - DNA, 25 bp, Homo sapien
cattttgtatcggtcaaatcccatt

SEQ ID NO: 4403524 - DNA, 25 bp, Homo sapien
aatcactacttgcaccaccattttg

SEQ ID NO: 4403525 - DNA, 25 bp, Homo sapien
caaaatctcatcatctaggagttga

SEQ ID NO: 4403526 - DNA, 25 bp, Homo sapien
acaaaatctcatcatctaggagttg

SEQ ID NO: 4403527 - DNA, 25 bp, Homo sapien
aaaatctcatcatctaggagttgaa

SEQ ID NO: 4403528 - DNA, 25 bp, Homo sapien
aaatctcatcatctaggagttgaaa

SEQ ID NO: 4403529 - DNA, 25 bp, Homo sapien
catctgcaaaaacttacatgagtaa

SEQ ID NO: 4403530 - DNA, 25 bp, Homo sapien
ccccatctgcaaaaacttacatgag

SEQ ID NO: 4403531 - DNA, 25 bp, Homo sapien
atgagtaaaagtcaccaaataatta

SEQ ID NO: 4403532 - DNA, 25 bp, Homo sapien
gcaaaaacttacatgagtaaaagtc

SEQ ID NO: 4403533 - DNA, 25 bp, Homo sapien
catttcttctggagaatattcagca

SEQ ID NO: 4403534 - DNA, 25 bp, Homo sapien
ctgaggcatttcttctggagaatat

SEQ ID NO: 4403535 - DNA, 25 bp, Homo sapien
gataaatgttttgtaagctgaggca

SEQ ID NO: 4403536 - DNA, 25 bp, Homo sapien
ggagaatattcagcatttgccagtt

SEQ ID NO: 4403537 - DNA, 25 bp, Homo sapien
cccaggcgagctccgcccctcagac

SEQ ID NO: 4403538 - DNA, 25 bp, Homo sapien
cgcgctccttccgtggcccaggtcc

SEQ ID NO: 4403539 - DNA, 25 bp, Homo sapien
cccgcgctccttccgtggcccaggt

SEQ ID NO: 4403540 - DNA, 25 bp, Homo sapien
ggtcccaggcgagctccgcccctca

SEQ ID NO: 4403541 - DNA, 25 bp, Homo sapien
agcgcgctcgaggtcgccccgccac

SEQ ID NO: 4403542 - DNA, 25 bp, Homo sapien
cagcgcgctcgaggtcgccccgcca

SEQ ID NO: 4403543 - DNA, 25 bp, Homo sapien
tctgctggaaaacaggccgcagaat

SEQ ID NO: 4403544 - DNA, 25 bp, Homo sapien
caggccgcagaatataggtgttctc

SEQ ID NO: 4403545 - DNA, 25 bp, Homo sapien
agaatataggtgttctcgggctccc

SEQ ID NO: 4403546 - DNA, 25 bp, Homo sapien
gaaaacaggccgcagaatataggtg

SEQ ID NO: 4403547 - DNA, 25 bp, Homo sapien
tcttctcagcctcaggcaccccgtc

SEQ ID NO: 4403548 - DNA, 25 bp, Homo sapien
tgcgttcttctcagcctcaggcacc

SEQ ID NO: 4403549 - DNA, 25 bp, Homo sapien
ctgcgttcttctcagcctcaggcac

SEQ ID NO: 4403550 - DNA, 25 bp, Homo sapien
cagcctcaggcaccccgtcgcccac

SEQ ID NO: 4403551 - DNA, 25 bp, Homo sapien
gagaaggacactccgatggacgtgg

SEQ ID NO: 4403552 - DNA, 25 bp, Homo sapien
gaaggacactccgatggacgtggcc

SEQ ID NO: 4403553 - DNA, 25 bp, Homo sapien
aggacactccgatggacgtggccat

SEQ ID NO: 4403554 - DNA, 25 bp, Homo sapien
cgagaaggacactccgatggacgtg

SEQ ID NO: 4403555 - DNA, 25 bp, Homo sapien
cgtagctcgcgatgaaggcctagcg

SEQ ID NO: 4403556 - DNA, 25 bp, Homo sapien
tcggtccgggcgtagctcgcgatga

SEQ ID NO: 4403557 - DNA, 25 bp, Homo sapien
aggcctagcgggttgcggtcgcggc

SEQ ID NO: 4403558 - DNA, 25 bp, Homo sapien
gggcttctcggtccgggcgtagctc

SEQ ID NO: 4403559 - DNA, 25 bp, Homo sapien
cctcccgcctcgctgaagcccgcga

SEQ ID NO: 4403560 - DNA, 25 bp, Homo sapien
taaggcccgatgaggtagctcgtgc

SEQ ID NO: 4403561 - DNA, 25 bp, Homo sapien
tgccgcattccctgcttataagcac

SEQ ID NO: 4403562 - DNA, 25 bp, Homo sapien
tgtaatccctgtttacaggagaggc

SEQ ID NO: 4403563 - DNA, 25 bp, Homo sapien
cgtgagccatcgtactctgccgcat

SEQ ID NO: 4403564 - DNA, 25 bp, Homo sapien
ggcgaatgccaccgcgcgtggctaa

SEQ ID NO: 4403565 - DNA, 25 bp, Homo sapien
caggcgaatgccaccgcgcgtggct

SEQ ID NO: 4403566 - DNA, 25 bp, Homo sapien
aggcgaatgccaccgcgcgtggcta

SEQ ID NO: 4403567 - DNA, 25 bp, Homo sapien
ccaccgcgcgtggctaatcttttta

SEQ ID NO: 4403568 - DNA, 25 bp, Homo sapien
caggcaagcttcctggatgttgtat

SEQ ID NO: 4403569 - DNA, 25 bp, Homo sapien
tgtatgcaggaataggatgtgctct

SEQ ID NO: 4403570 - DNA, 25 bp, Homo sapien
tctctggacttggagacttcctgcc

SEQ ID NO: 4403571 - DNA, 25 bp, Homo sapien
gctctctggacttggagacttcctg

SEQ ID NO: 4403572 - DNA, 25 bp, Homo sapien
attacaggtgtgagccactgcaccc

SEQ ID NO: 4403573 - DNA, 25 bp, Homo sapien
agaatctcgctctgacccccagcct

SEQ ID NO: 4403574 - DNA, 25 bp, Homo sapien
gggattacaggtgtgagccactgca

SEQ ID NO: 4403575 - DNA, 25 bp, Homo sapien
cctggagtgcagtggcatgatctcg

SEQ ID NO: 4403576 - DNA, 25 bp, Homo sapien
tcgcgggaacccactatcacaaaga

SEQ ID NO: 4403577 - DNA, 25 bp, Homo sapien
tgaactgggcacttaagcaactgaa

SEQ ID NO: 4403578 - DNA, 25 bp, Homo sapien
actgtgtggacagaggtgatgctcc

SEQ ID NO: 4403579 - DNA, 25 bp, Homo sapien
tgttgcagaataccatgaactgggc

SEQ ID NO: 4403580 - DNA, 25 bp, Homo sapien
taacaaatggccaactttatgggat

SEQ ID NO: 4403581 - DNA, 25 bp, Homo sapien
gggcttcaacctacagatttggagg

SEQ ID NO: 4403582 - DNA, 25 bp, Homo sapien
caagaagctgaaatgagaccctggc

SEQ ID NO: 4403583 - DNA, 25 bp, Homo sapien
tctatcattccaccgacctgcagtg

SEQ ID NO: 4403584 - DNA, 25 bp, Homo sapien
gtagaaaggattcaagacagccgat

SEQ ID NO: 4403585 - DNA, 25 bp, Homo sapien
cagccgatgatgaaaacacccatgc

SEQ ID NO: 4403586 - DNA, 25 bp, Homo sapien
acccatgcttgcaagtgaaggttct

SEQ ID NO: 4403587 - DNA, 25 bp, Homo sapien
catgcttgcaagtgaaggttctgcc

SEQ ID NO: 4403588 - DNA, 25 bp, Homo sapien
ggctgttgatgacatgaacgaccac

SEQ ID NO: 4403589 - DNA, 25 bp, Homo sapien
cagacggagttccagagcgaacggt

SEQ ID NO: 4403590 - DNA, 25 bp, Homo sapien
gagaagagggacacgtgccagacaa

SEQ ID NO: 4403591 - DNA, 25 bp, Homo sapien
agggacacgtgccagacaacagctg

SEQ ID NO: 4403592 - DNA, 25 bp, Homo sapien
gagcgaacggtcatacagataattc

SEQ ID NO: 4403593 - DNA, 25 bp, Homo sapien
caagtaaagccaggccacctgacaa

SEQ ID NO: 4403594 - DNA, 25 bp, Homo sapien
caaagcaaatcagggctccaagtaa

SEQ ID NO: 4403595 - DNA, 25 bp, Homo sapien
tttcagagcaactccagaagtgaca

SEQ ID NO: 4403596 - DNA, 25 bp, Homo sapien
ccaagcttgtgtctgattgaaggat

SEQ ID NO: 4403597 - DNA, 25 bp, Homo sapien
tcgacagagcccactcttactgaag

SEQ ID NO: 4403598 - DNA, 25 bp, Homo sapien
tcttactgaagcagccgtatctcca

SEQ ID NO: 4403599 - DNA, 25 bp, Homo sapien
caaggagatgaggatagctgcagtg

SEQ ID NO: 4403600 - DNA, 25 bp, Homo sapien
gtatctccagcccatcaaggagatg

SEQ ID NO: 4403601 - DNA, 25 bp, Homo sapien
tcctccccagagcccagttcccagc

SEQ ID NO: 4403602 - DNA, 25 bp, Homo sapien
catgaggcctcctccccagagccca

SEQ ID NO: 4403603 - DNA, 25 bp, Homo sapien
cctcctccccagagcccagttccca

SEQ ID NO: 4403604 - DNA, 25 bp, Homo sapien
ctccccagagcccagttcccagcat

SEQ ID NO: 4403605 - DNA, 25 bp, Homo sapien
aaggctcagtcccaggatacgggag

SEQ ID NO: 4403606 - DNA, 25 bp, Homo sapien
ggcatgcctgccaaggaggcccctc

SEQ ID NO: 4403607 - DNA, 25 bp, Homo sapien
ccaggatacgggagcaagtccgtga

SEQ ID NO: 4403608 - DNA, 25 bp, Homo sapien
taggtgacatcccagttaggaagga

SEQ ID NO: 4403609 - DNA, 25 bp, Homo sapien
aacagatagaaagggagtcgcagca

SEQ ID NO: 4403610 - DNA, 25 bp, Homo sapien
gaacagatagaaagggagtcgcagc

SEQ ID NO: 4403611 - DNA, 25 bp, Homo sapien
cagatagaaagggagtcgcagcagc

SEQ ID NO: 4403612 - DNA, 25 bp, Homo sapien
ctggaacagatagaaagggagtcgc

SEQ ID NO: 4403613 - DNA, 25 bp, Homo sapien
accaaacccggccagactgtagctt

SEQ ID NO: 4403614 - DNA, 25 bp, Homo sapien
ccaaacccggccagactgtagctta

SEQ ID NO: 4403615 - DNA, 25 bp, Homo sapien
caaacccggccagactgtagcttat

SEQ ID NO: 4403616 - DNA, 25 bp, Homo sapien
ccacactgctgcgatgtccccgcat

SEQ ID NO: 4403617 - DNA, 25 bp, Homo sapien
cccacactgctgcgatgtccccgca

SEQ ID NO: 4403618 - DNA, 25 bp, Homo sapien
tgcccacactgctgcgatgtccccg

SEQ ID NO: 4403619 - DNA, 25 bp, Homo sapien
gcccacactgctgcgatgtccccgc

SEQ ID NO: 4403620 - DNA, 25 bp, Homo sapien
gtgtgtgaccttcctctagtgctgc

SEQ ID NO: 4403621 - DNA, 25 bp, Homo sapien
tttgctgcagactcgctggattcac

SEQ ID NO: 4403622 - DNA, 25 bp, Homo sapien
caggcgccaagtcaagggtctaaca

SEQ ID NO: 4403623 - DNA, 25 bp, Homo sapien
tcacagccagcgttgggaaagacag

SEQ ID NO: 4403624 - DNA, 25 bp, Homo sapien
tcatctgtgaggctaggctgttccc

SEQ ID NO: 4403625 - DNA, 25 bp, Homo sapien
gaaggtaagtgaatggcgcaaagtc

SEQ ID NO: 4403626 - DNA, 25 bp, Homo sapien
gctcactggagtggaagcgtgcact

SEQ ID NO: 4403627 - DNA, 25 bp, Homo sapien
gtgaatggcgcaaagtcacacagac

SEQ ID NO: 4403628 - DNA, 25 bp, Homo sapien
tccagggctggacctgaaggttgtc

SEQ ID NO: 4403629 - DNA, 25 bp, Homo sapien
ctgcatctggtgtcaagaatcagaa

SEQ ID NO: 4403630 - DNA, 25 bp, Homo sapien
tggagaaaggctgcgtcttcagagt

SEQ ID NO: 4403631 - DNA, 25 bp, Homo sapien
tctgtatatacgtagaggtcaccca

SEQ ID NO: 4403632 - DNA, 25 bp, Homo sapien
tcatctgccaccccgcgaagaattt

SEQ ID NO: 4403633 - DNA, 25 bp, Homo sapien
tttcggctctttgacagaacagcac

SEQ ID NO: 4403634 - DNA, 25 bp, Homo sapien
aacacttgccacaccccagctgttc

SEQ ID NO: 4403635 - DNA, 25 bp, Homo sapien
gaagaatttcggctctttgacagaa

SEQ ID NO: 4403636 - DNA, 25 bp, Homo sapien
ccttggctgactcgatgtgttgcat

SEQ ID NO: 4403637 - DNA, 25 bp, Homo sapien
cttgcccttggctgactcgatgtgt

SEQ ID NO: 4403638 - DNA, 25 bp, Homo sapien
cccttggctgactcgatgtgttgca

SEQ ID NO: 4403639 - DNA, 25 bp, Homo sapien
tgcccttggctgactcgatgtgttg

SEQ ID NO: 4403640 - DNA, 25 bp, Homo sapien
cgttaaactaatctgcatcgtccca

SEQ ID NO: 4403641 - DNA, 25 bp, Homo sapien
gggaaccacgttaaactaatctgca

SEQ ID NO: 4403642 - DNA, 25 bp, Homo sapien
taaactaatctgcatcgtcccaatt

SEQ ID NO: 4403643 - DNA, 25 bp, Homo sapien
tcatccttgcacgggaaccacgtta

SEQ ID NO: 4403644 - DNA, 25 bp, Homo sapien
tagaacatctcatatttaggcaatc

SEQ ID NO: 4403645 - DNA, 25 bp, Homo sapien
tcgatatggggtctcgtactgtcac

SEQ ID NO: 4403646 - DNA, 25 bp, Homo sapien
ggcaatcagaataactgaatggctg

SEQ ID NO: 4403647 - DNA, 25 bp, Homo sapien
gaatggctgattgccgtatatcact

SEQ ID NO: 4403648 - DNA, 25 bp, Homo sapien
tcctagcaccattggagaaaaggcc

SEQ ID NO: 4403649 - DNA, 25 bp, Homo sapien
gatgaaatttagagcctgtcctgca

SEQ ID NO: 4403650 - DNA, 25 bp, Homo sapien
cttactagatatacaggagggtctc

SEQ ID NO: 4403651 - DNA, 25 bp, Homo sapien
cattgagtcttagccagtagttaca

SEQ ID NO: 4403652 - DNA, 25 bp, Homo sapien
atcaatacctactcgaaaaaggact

SEQ ID NO: 4403653 - DNA, 25 bp, Homo sapien
agtttccagggaacaatcaatacct

SEQ ID NO: 4403654 - DNA, 25 bp, Homo sapien
tcaagccgaactcatacaaagcatg

SEQ ID NO: 4403655 - DNA, 25 bp, Homo sapien
ttgttcaagccgaactcatacaaag

SEQ ID NO: 4403656 - DNA, 25 bp, Homo sapien
aacactggatgtttagaatttgtta

SEQ ID NO: 4403657 - DNA, 25 bp, Homo sapien
taacactggatgtttagaatttgtt

SEQ ID NO: 4403658 - DNA, 25 bp, Homo sapien
gatggaagcccctcaaagtctaagt

SEQ ID NO: 4403659 - DNA, 25 bp, Homo sapien
tcagaggagtgaagaaaaccgtgtc

SEQ ID NO: 4403660 - DNA, 25 bp, Homo sapien
gatggcaacagtcactccgtgtaag

SEQ ID NO: 4403661 - DNA, 25 bp, Homo sapien
gaagcttgctactcgttaactgaaa

SEQ ID NO: 4403662 - DNA, 25 bp, Homo sapien
taagtgtgcaagtaagattcctgcg

SEQ ID NO: 4403663 - DNA, 25 bp, Homo sapien
ctagcagagctgttacccaaagggc

SEQ ID NO: 4403664 - DNA, 25 bp, Homo sapien
catttttcggttgctagtggctccc

SEQ ID NO: 4403665 - DNA, 25 bp, Homo sapien
cctagggataatacgcaatcacggg

SEQ ID NO: 4403666 - DNA, 25 bp, Homo sapien
caataatctggtatggatgggacac

SEQ ID NO: 4403667 - DNA, 25 bp, Homo sapien
cacctggccaggaattagatctcag

SEQ ID NO: 4403668 - DNA, 25 bp, Homo sapien
caatagctaattgttgacttgtaag

SEQ ID NO: 4403669 - DNA, 25 bp, Homo sapien
catacacacagagggttcaataatc

SEQ ID NO: 4403670 - DNA, 25 bp, Homo sapien
tggaagaagcatactgtcagcggat

SEQ ID NO: 4403671 - DNA, 25 bp, Homo sapien
cacaaaagtatctggtgcatgccaa

SEQ ID NO: 4403672 - DNA, 25 bp, Homo sapien
tttgctggagtacagatgggtgcca

SEQ ID NO: 4403673 - DNA, 25 bp, Homo sapien
gctgagtgaaagtaccatgctgtct

SEQ ID NO: 4403674 - DNA, 25 bp, Homo sapien
catgttcaattcagtcaccagagcc

SEQ ID NO: 4403675 - DNA, 25 bp, Homo sapien
tttgaaagaaaacagcatgcggact

SEQ ID NO: 4403676 - DNA, 25 bp, Homo sapien
tcttggactagcaggatcaatacag

SEQ ID NO: 4403677 - DNA, 25 bp, Homo sapien
tgaatggagttgaaaggtcttcccc

SEQ ID NO: 4403678 - DNA, 25 bp, Homo sapien
agtgccgtgcaagagaccacttact

SEQ ID NO: 4403679 - DNA, 25 bp, Homo sapien
atttgatcccaaaaaagtgccgtgc

SEQ ID NO: 4403680 - DNA, 25 bp, Homo sapien
aatctagccattcctttgcccgaag

SEQ ID NO: 4403681 - DNA, 25 bp, Homo sapien
cacacaattcctgctgctagtacta

SEQ ID NO: 4403682 - DNA, 25 bp, Homo sapien
tacttagtgacatgtatctcacagg

SEQ ID NO: 4403683 - DNA, 25 bp, Homo sapien
tagtgacatgtatctcacaggaaaa

SEQ ID NO: 4403684 - DNA, 25 bp, Homo sapien
gacatgtatctcacaggaaaaggga

SEQ ID NO: 4403685 - DNA, 25 bp, Homo sapien
catacttagtgacatgtatctcaca

SEQ ID NO: 4403686 - DNA, 25 bp, Homo sapien
gttggtgagaagttcaaaacgttca

SEQ ID NO: 4403687 - DNA, 25 bp, Homo sapien
gcctgcctcttgcaatgtaatatca

SEQ ID NO: 4403688 - DNA, 25 bp, Homo sapien
ttgggtatcctttagactgcacgtg

SEQ ID NO: 4403689 - DNA, 25 bp, Homo sapien
ttccttcgaggaaagttggtgagaa

SEQ ID NO: 4403690 - DNA, 25 bp, Homo sapien
ttttccatctggataccgcaacatc

SEQ ID NO: 4403691 - DNA, 25 bp, Homo sapien
ctctggaagagtgatctgttccctt

SEQ ID NO: 4403692 - DNA, 25 bp, Homo sapien
ttgctctggaagagtgatctgttcc

SEQ ID NO: 4403693 - DNA, 25 bp, Homo sapien
cgcaacatcagctgtgcttttggtc

SEQ ID NO: 4403694 - DNA, 25 bp, Homo sapien
cagagccacaaacggatatgaactc

SEQ ID NO: 4403695 - DNA, 25 bp, Homo sapien
tggtggctcagtcagcggccttcta

SEQ ID NO: 4403696 - DNA, 25 bp, Homo sapien
gatatgaactcctcactgccagaaa

SEQ ID NO: 4403697 - DNA, 25 bp, Homo sapien
caggatcagttctgactggtggctc

SEQ ID NO: 4403698 - DNA, 25 bp, Homo sapien
tcttgtaaggaggctctgatggcag

SEQ ID NO: 4403699 - DNA, 25 bp, Homo sapien
ggattcaagtaagcatacgcatttt

SEQ ID NO: 4403700 - DNA, 25 bp, Homo sapien
gcctagacaacatacggaggcctcc

SEQ ID NO: 4403701 - DNA, 25 bp, Homo sapien
tacaataaaaatgttgctaggtgtg

SEQ ID NO: 4403702 - DNA, 25 bp, Homo sapien
aactttaacagcttagctggcatgg

SEQ ID NO: 4403703 - DNA, 25 bp, Homo sapien
catacggaggcctccgtctctacaa

SEQ ID NO: 4403704 - DNA, 25 bp, Homo sapien
agaagatacatctaactggtgccat

SEQ ID NO: 4403705 - DNA, 25 bp, Homo sapien
agttgtccatgttcacccagaaatc

SEQ ID NO: 4403706 - DNA, 25 bp, Homo sapien
gggactgctagaaagtccatccagt

SEQ ID NO: 4403707 - DNA, 25 bp, Homo sapien
tcacccagaaatcccgtcacttggt

SEQ ID NO: 4403708 - DNA, 25 bp, Homo sapien
ctgtatgtatctctgaccttcctca

SEQ ID NO: 4403709 - DNA, 25 bp, Homo sapien
cgtgggtccaatatggaaacatagg

SEQ ID NO: 4403710 - DNA, 25 bp, Homo sapien
tgggtccaatatggaaacatagggg

SEQ ID NO: 4403711 - DNA, 25 bp, Homo sapien
ggtccaatatggaaacataggggaa

SEQ ID NO: 4403712 - DNA, 25 bp, Homo sapien
aaaatgaaatgttcccggataatat

SEQ ID NO: 4403713 - DNA, 25 bp, Homo sapien
gaaaatgaaatgttcccggataata

SEQ ID NO: 4403714 - DNA, 25 bp, Homo sapien
aaatgaaatgttcccggataatatt

SEQ ID NO: 4403715 - DNA, 25 bp, Homo sapien
tcgcggttgaggcactgacatgcaa

SEQ ID NO: 4403716 - DNA, 25 bp, Homo sapien
ttcacagcttcgttgctccacacat

SEQ ID NO: 4403717 - DNA, 25 bp, Homo sapien
gccacttattttgcatctggccaca

SEQ ID NO: 4403718 - DNA, 25 bp, Homo sapien
cactgacatgcaaagtcttgaacat

SEQ ID NO: 4403719 - DNA, 25 bp, Homo sapien
ctcttgttgcctaagtcggagaaca

SEQ ID NO: 4403720 - DNA, 25 bp, Homo sapien
ttaatgaatgcaattggtgtgtata

SEQ ID NO: 4403721 - DNA, 25 bp, Homo sapien
tgcctaagtcggagaacaatggcac

SEQ ID NO: 4403722 - DNA, 25 bp, Homo sapien
tgttgcctaagtcggagaacaatgg

SEQ ID NO: 4403723 - DNA, 25 bp, Homo sapien
tatcgatacatcaatcgttagtgcg

SEQ ID NO: 4403724 - DNA, 25 bp, Homo sapien
tgcgtactttttgcctgtcagtccc

SEQ ID NO: 4403725 - DNA, 25 bp, Homo sapien
cgttagtgcgtactttttgcctgtc

SEQ ID NO: 4403726 - DNA, 25 bp, Homo sapien
gattcgtacaacagatatcgataca

SEQ ID NO: 4403727 - DNA, 25 bp, Homo sapien
tggccggaatagatctgcaagggta

SEQ ID NO: 4403728 - DNA, 25 bp, Homo sapien
gcaagggtagttaatttcttatcga

SEQ ID NO: 4403729 - DNA, 25 bp, Homo sapien
taatttcttatcgatagctcctcca

SEQ ID NO: 4403730 - DNA, 25 bp, Homo sapien
tcaaagctgcctttatgcatcaaat

SEQ ID NO: 4403731 - DNA, 25 bp, Homo sapien
caaaaattgaacgtgcaggccgtcg

SEQ ID NO: 4403732 - DNA, 25 bp, Homo sapien
cgtgcaggccgtcgtcttttaggag

SEQ ID NO: 4403733 - DNA, 25 bp, Homo sapien
gaaaccatcaaaaattgaacgtgca

SEQ ID NO: 4403734 - DNA, 25 bp, Homo sapien
ttcagtctgaaaatcccggaaacca

SEQ ID NO: 4403735 - DNA, 25 bp, Homo sapien
tatgaaacccttcacgaactgcatg

SEQ ID NO: 4403736 - DNA, 25 bp, Homo sapien
aaacccttcacgaactgcatgtcac

SEQ ID NO: 4403737 - DNA, 25 bp, Homo sapien
gaaacccttcacgaactgcatgtca

SEQ ID NO: 4403738 - DNA, 25 bp, Homo sapien
acatatgaaacccttcacgaactgc

SEQ ID NO: 4403739 - DNA, 25 bp, Homo sapien
gatgatgccacgtagagatgaagcc

SEQ ID NO: 4403740 - DNA, 25 bp, Homo sapien
aatatccaagtggtgatatcaggaa

SEQ ID NO: 4403741 - DNA, 25 bp, Homo sapien
gccctgttgtatagagtaactctac

SEQ ID NO: 4403742 - DNA, 25 bp, Homo sapien
cagatatccaattcaggttagccct

SEQ ID NO: 4403743 - DNA, 25 bp, Homo sapien
tccttaggtcatctggtgtcctcca

SEQ ID NO: 4403744 - DNA, 25 bp, Homo sapien
tgcacctgctccgtttcctcttcct

SEQ ID NO: 4403745 - DNA, 25 bp, Homo sapien
acctgctccgtttcctcttccttag

SEQ ID NO: 4403746 - DNA, 25 bp, Homo sapien
aatcagcatagggccctacagccaa

SEQ ID NO: 4403747 - DNA, 25 bp, Homo sapien
cagcctccgaaagtaatcccaaagt

SEQ ID NO: 4403748 - DNA, 25 bp, Homo sapien
tgccaactgtcaaagtgtaaactga

SEQ ID NO: 4403749 - DNA, 25 bp, Homo sapien
ctgtgtactcaaggatcaggattta

SEQ ID NO: 4403750 - DNA, 25 bp, Homo sapien
gatagtctgtcagcgatttttcaag

SEQ ID NO: 4403751 - DNA, 25 bp, Homo sapien
gatgtccagtataatggtgcatgcc

SEQ ID NO: 4403752 - DNA, 25 bp, Homo sapien
catgaattcaaccaagatgccagca

SEQ ID NO: 4403753 - DNA, 25 bp, Homo sapien
tgtagtgtgctatgccagtcaggtg

SEQ ID NO: 4403754 - DNA, 25 bp, Homo sapien
cctgaaagggaatattagggacctg

SEQ ID NO: 4403755 - DNA, 25 bp, Homo sapien
aggaattggggcacgaacttcttct

SEQ ID NO: 4403756 - DNA, 25 bp, Homo sapien
gaggaattggggcacgaacttcttc

SEQ ID NO: 4403757 - DNA, 25 bp, Homo sapien
tgaggaattggggcacgaacttctt

SEQ ID NO: 4403758 - DNA, 25 bp, Homo sapien
tctgaactttactgggctctactgc

SEQ ID NO: 4403759 - DNA, 25 bp, Homo sapien
tgcctctgcttccttattggtaaaa

SEQ ID NO: 4403760 - DNA, 25 bp, Homo sapien
tgataatgccatccaataaggtgtt

SEQ ID NO: 4403761 - DNA, 25 bp, Homo sapien
gcgcccagcctagcttcaagcattt

SEQ ID NO: 4403762 - DNA, 25 bp, Homo sapien
gtggtctgacagtagagacacttgc

SEQ ID NO: 4403763 - DNA, 25 bp, Homo sapien
agattattgttgcacgcttcaagca

SEQ ID NO: 4403764 - DNA, 25 bp, Homo sapien
tatgttttcctacactttcacttgc

SEQ ID NO: 4403765 - DNA, 25 bp, Homo sapien
ccaaaaacatagtgactgccatttc

SEQ ID NO: 4403766 - DNA, 25 bp, Homo sapien
gatcaatgtctgataaacttagtga

SEQ ID NO: 4403767 - DNA, 25 bp, Homo sapien
gtgatatctcatagtactttaactc

SEQ ID NO: 4403768 - DNA, 25 bp, Homo sapien
acactttgcttgcatgtgatcaatg

SEQ ID NO: 4403769 - DNA, 25 bp, Homo sapien
taaacttagtgatatctcatagtac

SEQ ID NO: 4403770 - DNA, 25 bp, Homo sapien
cagtccctgaggtcctcctcagcac

SEQ ID NO: 4403771 - DNA, 25 bp, Homo sapien
tcagtccctgaggtcctcctcagca

SEQ ID NO: 4403772 - DNA, 25 bp, Homo sapien
cccgtgaagtgtaaaggcacggccg

SEQ ID NO: 4403773 - DNA, 25 bp, Homo sapien
gcggcctgtcccccgtgaagtgtaa

SEQ ID NO: 4403774 - DNA, 25 bp, Homo sapien
gtgaagtgtaaaggcacggccgaac

SEQ ID NO: 4403775 - DNA, 25 bp, Homo sapien
ctgtcccccgtgaagtgtaaaggca

SEQ ID NO: 4403776 - DNA, 25 bp, Homo sapien
ccgaacccgccagggccacggcgat

SEQ ID NO: 4403777 - DNA, 25 bp, Homo sapien
gccttgccgtgaaggcgggagggcc

SEQ ID NO: 4403778 - DNA, 25 bp, Homo sapien
cggccttgccgtgaaggcgggaggg

SEQ ID NO: 4403779 - DNA, 25 bp, Homo sapien
tgccgtgaaggcgggagggcccgaa

SEQ ID NO: 4403780 - DNA, 25 bp, Homo sapien
caggccggggaccggggcagaatga

SEQ ID NO: 4403781 - DNA, 25 bp, Homo sapien
gcaggccggggaccggggcagaatg

SEQ ID NO: 4403782 - DNA, 25 bp, Homo sapien
ctgttgaattaaccccttcagcgcc

SEQ ID NO: 4403783 - DNA, 25 bp, Homo sapien
attaaccccttcagcgccgaggacg

SEQ ID NO: 4403784 - DNA, 25 bp, Homo sapien
ttgaattaaccccttcagcgccgag

SEQ ID NO: 4403785 - DNA, 25 bp, Homo sapien
gaactgttgaattaaccccttcagc

SEQ ID NO: 4403786 - DNA, 25 bp, Homo sapien
tgcgcaggcgcattgaccgcccctc

SEQ ID NO: 4403787 - DNA, 25 bp, Homo sapien
caggcgcattgaccgcccctcgagc

SEQ ID NO: 4403788 - DNA, 25 bp, Homo sapien
ccccacttcgccgtgcggtgtgcgc

SEQ ID NO: 4403789 - DNA, 25 bp, Homo sapien
ccacttcgccgtgcggtgtgcgcag

SEQ ID NO: 4403790 - DNA, 25 bp, Homo sapien
cacaacataactggacagccttgaa

SEQ ID NO: 4403791 - DNA, 25 bp, Homo sapien
tctagtgatttctaatagaactgct

SEQ ID NO: 4403792 - DNA, 25 bp, Homo sapien
aatgccatccacacaacacaacata

SEQ ID NO: 4403793 - DNA, 25 bp, Homo sapien
gacacgaaatcagaaaccataaggg

SEQ ID NO: 4403794 - DNA, 25 bp, Homo sapien
taggattgttacacaactcccctct

SEQ ID NO: 4403795 - DNA, 25 bp, Homo sapien
gttgtaatgtaggtttactctggag

SEQ ID NO: 4403796 - DNA, 25 bp, Homo sapien
cagtgcctcttgctaggattgttac

SEQ ID NO: 4403797 - DNA, 25 bp, Homo sapien
tactctggagagttacttcattatg

SEQ ID NO: 4403798 - DNA, 25 bp, Homo sapien
caaatcttatcctggtgttctatta

SEQ ID NO: 4403799 - DNA, 25 bp, Homo sapien
tcaaatcttatcctggtgttctatt

SEQ ID NO: 4403800 - DNA, 25 bp, Homo sapien
aaatcttatcctggtgttctattat

SEQ ID NO: 4403801 - DNA, 25 bp, Homo sapien
ttgtatccttctaggagctctggga

SEQ ID NO: 4403802 - DNA, 25 bp, Homo sapien
caggtacttaaaggttctctaggtg

SEQ ID NO: 4403803 - DNA, 25 bp, Homo sapien
taaaggttctctaggtggccgggca

SEQ ID NO: 4403804 - DNA, 25 bp, Homo sapien
ttctgcaggtacttaaaggttctct

SEQ ID NO: 4403805 - DNA, 25 bp, Homo sapien
agtgctttctgcaggtacttaaagg

SEQ ID NO: 4403806 - DNA, 25 bp, Homo sapien
caggaagtccacagtgagtcagtct

SEQ ID NO: 4403807 - DNA, 25 bp, Homo sapien
aactcaggaagtccacagtgagtca

SEQ ID NO: 4403808 - DNA, 25 bp, Homo sapien
ctcaggaagtccacagtgagtcagt

SEQ ID NO: 4403809 - DNA, 25 bp, Homo sapien
gaagtccacagtgagtcagtctaac

SEQ ID NO: 4403810 - DNA, 25 bp, Homo sapien
agccttagtactccctgagaaattc

SEQ ID NO: 4403811 - DNA, 25 bp, Homo sapien
tagtactccctgagaaattcagtgt

SEQ ID NO: 4403812 - DNA, 25 bp, Homo sapien
tctcagcctctgcacagccttagta

SEQ ID NO: 4403813 - DNA, 25 bp, Homo sapien
tctgcacagccttagtactccctga

SEQ ID NO: 4403814 - DNA, 25 bp, Homo sapien
agaatgtccaccctaaaactgaaag

SEQ ID NO: 4403815 - DNA, 25 bp, Homo sapien
gataacgtttaatttgaggcattca

SEQ ID NO: 4403816 - DNA, 25 bp, Homo sapien
gacttcttcacagagaatgagctga

SEQ ID NO: 4403817 - DNA, 25 bp, Homo sapien
ttttggtcacagactattccaggaa

SEQ ID NO: 4403818 - DNA, 25 bp, Homo sapien
cgacccatgtgatagtatagttgca

SEQ ID NO: 4403819 - DNA, 25 bp, Homo sapien
cagaggacaatcaccttaagaggca

SEQ ID NO: 4403820 - DNA, 25 bp, Homo sapien
ccctgctgcgtcatagtggaccagt

SEQ ID NO: 4403821 - DNA, 25 bp, Homo sapien
gtctggacccgtttctgacgaccta

SEQ ID NO: 4403822 - DNA, 25 bp, Homo sapien
aagacaatggcacttgaagatttcc

SEQ ID NO: 4403823 - DNA, 25 bp, Homo sapien
cctggagttggccaaagcttaagat

SEQ ID NO: 4403824 - DNA, 25 bp, Homo sapien
gacccctgcttaccgctgagctgtg

SEQ ID NO: 4403825 - DNA, 25 bp, Homo sapien
gattaccagtcacgacaaaaaggtg

SEQ ID NO: 4403826 - DNA, 25 bp, Homo sapien
gaccttcattaaggacaatgagtgt

SEQ ID NO: 4403827 - DNA, 25 bp, Homo sapien
accttcattaaggacaatgagtgtg

SEQ ID NO: 4403828 - DNA, 25 bp, Homo sapien
gtctatgcagtccttacaatcacac

SEQ ID NO: 4403829 - DNA, 25 bp, Homo sapien
ccagctttactagatcacaaagcac

SEQ ID NO: 4403830 - DNA, 25 bp, Homo sapien
ggatgaagattccatgataggaaag

SEQ ID NO: 4403831 - DNA, 25 bp, Homo sapien
tcacattccagctttactagatcac

SEQ ID NO: 4403832 - DNA, 25 bp, Homo sapien
tttactagatcacaaagcactccct

SEQ ID NO: 4403833 - DNA, 25 bp, Homo sapien
gctgtagggagtgagcacttttgga

SEQ ID NO: 4403834 - DNA, 25 bp, Homo sapien
ggctgtagggagtgagcacttttgg

SEQ ID NO: 4403835 - DNA, 25 bp, Homo sapien
ctgtagggagtgagcacttttggat

SEQ ID NO: 4403836 - DNA, 25 bp, Homo sapien
tagcgcgtaagtgatactcatctgg

SEQ ID NO: 4403837 - DNA, 25 bp, Homo sapien
cagaaaagcatggatccttgactgc

SEQ ID NO: 4403838 - DNA, 25 bp, Homo sapien
gttgtaatgccaataacctgtcctg

SEQ ID NO: 4403839 - DNA, 25 bp, Homo sapien
ggaaatctccttactgatcagtagg

SEQ ID NO: 4403840 - DNA, 25 bp, Homo sapien
tcatggtaccattcggcaccacagg

SEQ ID NO: 4403841 - DNA, 25 bp, Homo sapien
ctgcagtttctttcgagtagggaac

SEQ ID NO: 4403842 - DNA, 25 bp, Homo sapien
gaactctggttttaggtcgctcgtg

SEQ ID NO: 4403843 - DNA, 25 bp, Homo sapien
cacaggcacataaccatggcatagg

SEQ ID NO: 4403844 - DNA, 25 bp, Homo sapien
gtggagaaagtgtcggcatatcttc

SEQ ID NO: 4403845 - DNA, 25 bp, Homo sapien
tgttgggcttttcctatcactactg

SEQ ID NO: 4403846 - DNA, 25 bp, Homo sapien
aagtgtcggcatatcttctatttct

SEQ ID NO: 4403847 - DNA, 25 bp, Homo sapien
gggcttttcctatcactactgtcaa

SEQ ID NO: 4403848 - DNA, 25 bp, Homo sapien
ggtgccaggtataacctattcagtt

SEQ ID NO: 4403849 - DNA, 25 bp, Homo sapien
ttggattacataggtcaaggatcag

SEQ ID NO: 4403850 - DNA, 25 bp, Homo sapien
taacattctaagtgaagctggtgcc

SEQ ID NO: 4403851 - DNA, 25 bp, Homo sapien
aatctatggctcatggaccaaatcc

SEQ ID NO: 4403852 - DNA, 25 bp, Homo sapien
gaggctgacccaaactgagatttcg

SEQ ID NO: 4403853 - DNA, 25 bp, Homo sapien
cttagatacggagtctttcctgact

SEQ ID NO: 4403854 - DNA, 25 bp, Homo sapien
agagtgtgaggctgacccaaactga

SEQ ID NO: 4403855 - DNA, 25 bp, Homo sapien
aaactgagatttcggtgtcaaatac

SEQ ID NO: 4403856 - DNA, 25 bp, Homo sapien
tgtgtcaaaagcaccaacaagtagc

SEQ ID NO: 4403857 - DNA, 25 bp, Homo sapien
tttcaaagagcagctagccatggct

SEQ ID NO: 4403858 - DNA, 25 bp, Homo sapien
gcgggaccactacttacgaagcata

SEQ ID NO: 4403859 - DNA, 25 bp, Homo sapien
tctgtcaatgctgatgcgggaccac

SEQ ID NO: 4403860 - DNA, 25 bp, Homo sapien
caagtctgcctcatgaaaacaaagt

SEQ ID NO: 4403861 - DNA, 25 bp, Homo sapien
atacaatacatgtaagaatcacagt

SEQ ID NO: 4403862 - DNA, 25 bp, Homo sapien
aaagtttatgagagaacagtcatac

SEQ ID NO: 4403863 - DNA, 25 bp, Homo sapien
caaagtttatgagagaacagtcata

SEQ ID NO: 4403864 - DNA, 25 bp, Homo sapien
cagctaattgaataacttacagtga

SEQ ID NO: 4403865 - DNA, 25 bp, Homo sapien
cattaaaccagcaatgtattcctgg

SEQ ID NO: 4403866 - DNA, 25 bp, Homo sapien
tcattaagaattatcatctcgtgta

SEQ ID NO: 4403867 - DNA, 25 bp, Homo sapien
cgatgttccactatgaagtatgata

SEQ ID NO: 4403868 - DNA, 25 bp, Homo sapien
tcttcttttctgatacggcacgtaa

SEQ ID NO: 4403869 - DNA, 25 bp, Homo sapien
ctggtcccaaactcaaactccctgg

SEQ ID NO: 4403870 - DNA, 25 bp, Homo sapien
gcacgtaaagccttctaaataccac

SEQ ID NO: 4403871 - DNA, 25 bp, Homo sapien
taccagttttcatgcatattttcag

SEQ ID NO: 4403872 - DNA, 25 bp, Homo sapien
gggagaagccgagatacttccctca

SEQ ID NO: 4403873 - DNA, 25 bp, Homo sapien
aagggagaagccgagatacttccct

SEQ ID NO: 4403874 - DNA, 25 bp, Homo sapien
ttttcagacttgggtgtaactggat

SEQ ID NO: 4403875 - DNA, 25 bp, Homo sapien
gtgtaactggatcagattttctgga

SEQ ID NO: 4403876 - DNA, 25 bp, Homo sapien
aactattggaatcaagtgattcccc

SEQ ID NO: 4403877 - DNA, 25 bp, Homo sapien
ggtctccaactattggaatcaagtg

SEQ ID NO: 4403878 - DNA, 25 bp, Homo sapien
tccaactattggaatcaagtgattc

SEQ ID NO: 4403879 - DNA, 25 bp, Homo sapien
caccaggcttggttaggtgggttgt

SEQ ID NO: 4403880 - DNA, 25 bp, Homo sapien
ttttgagatggtcttccaggttgaa

SEQ ID NO: 4403881 - DNA, 25 bp, Homo sapien
aaatctctacgatgttatcaagtgg

SEQ ID NO: 4403882 - DNA, 25 bp, Homo sapien
tgtaagcagcaaaacagtgtgattg

SEQ ID NO: 4403883 - DNA, 25 bp, Homo sapien
catcacactcggctcattattaatt

SEQ ID NO: 4403884 - DNA, 25 bp, Homo sapien
tgcttagctttcttgccagttcctc

SEQ ID NO: 4403885 - DNA, 25 bp, Homo sapien
gttcttccatcgctcttcgcctttt

SEQ ID NO: 4403886 - DNA, 25 bp, Homo sapien
aatatcaatgcttagctttcttgcc

SEQ ID NO: 4403887 - DNA, 25 bp, Homo sapien
tcgctggcccgtcgctctgccgcca

SEQ ID NO: 4403888 - DNA, 25 bp, Homo sapien
aggtttactgagcagacgaactggc

SEQ ID NO: 4403889 - DNA, 25 bp, Homo sapien
ctcttctcagttccccaggtttact

SEQ ID NO: 4403890 - DNA, 25 bp, Homo sapien
ctcagttccccaggtttactgagca

SEQ ID NO: 4403891 - DNA, 25 bp, Homo sapien
cagacgaactggctgatagtcatca

SEQ ID NO: 4403892 - DNA, 25 bp, Homo sapien
ttgagctgttcataaaactgccctc

SEQ ID NO: 4403893 - DNA, 25 bp, Homo sapien
ctgcagctccatgtaaatggcagtt

SEQ ID NO: 4403894 - DNA, 25 bp, Homo sapien
ataaaactgccctcccatcactgaa

SEQ ID NO: 4403895 - DNA, 25 bp, Homo sapien
tcccatcactgaactagactgcagc

SEQ ID NO: 4403896 - DNA, 25 bp, Homo sapien
gcttctgacagtatgctgataacct

SEQ ID NO: 4403897 - DNA, 25 bp, Homo sapien
ttgggttgtaaatacatcactccag

SEQ ID NO: 4403898 - DNA, 25 bp, Homo sapien
tctggctaaaagtccaaaataaatg

SEQ ID NO: 4403899 - DNA, 25 bp, Homo sapien
gctgataaccttagacgttccttgg

SEQ ID NO: 4403900 - DNA, 25 bp, Homo sapien
ttgaaggtgacctacacaaacagag

SEQ ID NO: 4403901 - DNA, 25 bp, Homo sapien
aaattgaaggtgacctacacaaaca

SEQ ID NO: 4403902 - DNA, 25 bp, Homo sapien
tgaaggtgacctacacaaacagaga

SEQ ID NO: 4403903 - DNA, 25 bp, Homo sapien
aattgaaggtgacctacacaaacag

SEQ ID NO: 4403904 - DNA, 25 bp, Homo sapien
agacttgcggcttttggccaacaaa

SEQ ID NO: 4403905 - DNA, 25 bp, Homo sapien
gcttttggccaacaaacacgccatg

SEQ ID NO: 4403906 - DNA, 25 bp, Homo sapien
aacaaacacgccatggtttactcac

SEQ ID NO: 4403907 - DNA, 25 bp, Homo sapien
taaatggaaaagtgatgattcacct

SEQ ID NO: 4403908 - DNA, 25 bp, Homo sapien
ccacagttccacgttgacgagagaa

SEQ ID NO: 4403909 - DNA, 25 bp, Homo sapien
cggtcgactggaagcacggtttaca

SEQ ID NO: 4403910 - DNA, 25 bp, Homo sapien
ggtatggtaccgagtccacgacgat

SEQ ID NO: 4403911 - DNA, 25 bp, Homo sapien
gctctaagcttgcactccctgggat

SEQ ID NO: 4403912 - DNA, 25 bp, Homo sapien
ggacagcgaggggatggcgtctttg

SEQ ID NO: 4403913 - DNA, 25 bp, Homo sapien
cgaggggatggcgtctttgggtaga

SEQ ID NO: 4403914 - DNA, 25 bp, Homo sapien
ctcggacagcgaggggatggcgtct

SEQ ID NO: 4403915 - DNA, 25 bp, Homo sapien
ggatggcgtctttgggtagagccat

SEQ ID NO: 4403916 - DNA, 25 bp, Homo sapien
caggagcatccaacacgtcttgaag

SEQ ID NO: 4403917 - DNA, 25 bp, Homo sapien
gaaaccctattcgttgcggcagcgc

SEQ ID NO: 4403918 - DNA, 25 bp, Homo sapien
tgcccagaagcgtatcagaattcgg

SEQ ID NO: 4403919 - DNA, 25 bp, Homo sapien
aatgcaggttttcgtcggaggagcc

SEQ ID NO: 4403920 - DNA, 25 bp, Homo sapien
gatagtgtagaggaccaatcgcgga

SEQ ID NO: 4403921 - DNA, 25 bp, Homo sapien
caccattcagaaataggcacgatag

SEQ ID NO: 4403922 - DNA, 25 bp, Homo sapien
tgagtgacagaacggctcttggcag

SEQ ID NO: 4403923 - DNA, 25 bp, Homo sapien
tgccagacgagaatgggagctctca

SEQ ID NO: 4403924 - DNA, 25 bp, Homo sapien
tatatggctgcaaagaaagtatcta

SEQ ID NO: 4403925 - DNA, 25 bp, Homo sapien
gcagaagaagtttatggatatgtaa

SEQ ID NO: 4403926 - DNA, 25 bp, Homo sapien
gataaattactgtaggtggaatcac

SEQ ID NO: 4403927 - DNA, 25 bp, Homo sapien
taatttatttaacatcctctcactc

SEQ ID NO: 4403928 - DNA, 25 bp, Homo sapien
tcttcgagggatgacttttgctttt

SEQ ID NO: 4403929 - DNA, 25 bp, Homo sapien
ctcttcgagggatgacttttgcttt

SEQ ID NO: 4403930 - DNA, 25 bp, Homo sapien
tagtaattaggaacgtgacatccct

SEQ ID NO: 4403931 - DNA, 25 bp, Homo sapien
tggactcccatacaactctaacgcg

SEQ ID NO: 4403932 - DNA, 25 bp, Homo sapien
caagcacacgagtatgcaagcagat

SEQ ID NO: 4403933 - DNA, 25 bp, Homo sapien
taaggttggaagacctctcaccagg

SEQ ID NO: 4403934 - DNA, 25 bp, Homo sapien
gaatttctgcatcaggttatccttg

SEQ ID NO: 4403935 - DNA, 25 bp, Homo sapien
gccaaagccttactatgatgttcga

SEQ ID NO: 4403936 - DNA, 25 bp, Homo sapien
tggagtgcccgaactgctgtccaca

SEQ ID NO: 4403937 - DNA, 25 bp, Homo sapien
taacgcttggagtttgtggtctact

SEQ ID NO: 4403938 - DNA, 25 bp, Homo sapien
catcttcccagaatagcagacccat

SEQ ID NO: 4403939 - DNA, 25 bp, Homo sapien
gcttgctccctccctatagccctca

SEQ ID NO: 4403940 - DNA, 25 bp, Homo sapien
gctcagtctacattctgcctgaaag

SEQ ID NO: 4403941 - DNA, 25 bp, Homo sapien
agcagtagcaggagcgctcagtcta

SEQ ID NO: 4403942 - DNA, 25 bp, Homo sapien
cggtcttcctctcagcaacaggcag

SEQ ID NO: 4403943 - DNA, 25 bp, Homo sapien
tcaaggatatcagggttgtggtttc

SEQ ID NO: 4403944 - DNA, 25 bp, Homo sapien
ctgatcggaagggactttgaggttt

SEQ ID NO: 4403945 - DNA, 25 bp, Homo sapien
ccattctgatcggaagggactttga

SEQ ID NO: 4403946 - DNA, 25 bp, Homo sapien
cattctgatcggaagggactttgag

SEQ ID NO: 4403947 - DNA, 25 bp, Homo sapien
ttctgatcggaagggactttgaggt

SEQ ID NO: 4403948 - DNA, 25 bp, Homo sapien
tgtgtctgcgaatgatccaccgtcc

SEQ ID NO: 4403949 - DNA, 25 bp, Homo sapien
taaggtgccggacaccctggtgtga

SEQ ID NO: 4403950 - DNA, 25 bp, Homo sapien
ccagctttgctagctcagcctccag

SEQ ID NO: 4403951 - DNA, 25 bp, Homo sapien
agcacgcccttgtaggacgtgtccc

SEQ ID NO: 4403952 - DNA, 25 bp, Homo sapien
tcaagtacggagaactgcggtgtcg

SEQ ID NO: 4403953 - DNA, 25 bp, Homo sapien
cggagaactgcggtgtcgcgcctcc

SEQ ID NO: 4403954 - DNA, 25 bp, Homo sapien
atcttctcccgctgcggaggccgca

SEQ ID NO: 4403955 - DNA, 25 bp, Homo sapien
tcgcgcctccgggccccatccggct

SEQ ID NO: 4403956 - DNA, 25 bp, Homo sapien
tggttccgccctgtcgggctcagac

SEQ ID NO: 4403957 - DNA, 25 bp, Homo sapien
cgcggtggttccgccctgtcgggct

SEQ ID NO: 4403958 - DNA, 25 bp, Homo sapien
cgccgcggtggttccgccctgtcgg

SEQ ID NO: 4403959 - DNA, 25 bp, Homo sapien
cggtggttccgccctgtcgggctca

SEQ ID NO: 4403960 - DNA, 25 bp, Homo sapien
ggccgcgggagtggagccggcccga

SEQ ID NO: 4403961 - DNA, 25 bp, Homo sapien
ggccacgcccgtcgctgagcgtgag

SEQ ID NO: 4403962 - DNA, 25 bp, Homo sapien
tcagaacactggtccccggaatgga

SEQ ID NO: 4403963 - DNA, 25 bp, Homo sapien
gcgatggcggccgagctcagaacac

SEQ ID NO: 4403964 - DNA, 25 bp, Homo sapien
tccttcaaagggttatccaaggcat

SEQ ID NO: 4403965 - DNA, 25 bp, Homo sapien
cggaaatatggcctcaatatgcgcc

SEQ ID NO: 4403966 - DNA, 25 bp, Homo sapien
cagtacgcgaaggatgtcggtttca

SEQ ID NO: 4403967 - DNA, 25 bp, Homo sapien
cggcacggtctgatccggaaatatg

SEQ ID NO: 4403968 - DNA, 25 bp, Homo sapien
gctaagtcatctctcacatcataga

SEQ ID NO: 4403969 - DNA, 25 bp, Homo sapien
gatgctgctttgttgaagctaagtc

SEQ ID NO: 4403970 - DNA, 25 bp, Homo sapien
gctttgttgaagctaagtcatctct

SEQ ID NO: 4403971 - DNA, 25 bp, Homo sapien
tgttgaagctaagtcatctctcaca

SEQ ID NO: 4403972 - DNA, 25 bp, Homo sapien
tctcctgcatatcatcctgtgtttt

SEQ ID NO: 4403973 - DNA, 25 bp, Homo sapien
cccagaggtttaatttctgctttga

SEQ ID NO: 4403974 - DNA, 25 bp, Homo sapien
cccaagcctctcctgtacaggaaga

SEQ ID NO: 4403975 - DNA, 25 bp, Homo sapien
tcccctgacgcatgggtgtcacctg

SEQ ID NO: 4403976 - DNA, 25 bp, Homo sapien
tctgaccagttctggctgctaccct

SEQ ID NO: 4403977 - DNA, 25 bp, Homo sapien
cttgtcttctgaccagttctggctg

SEQ ID NO: 4403978 - DNA, 25 bp, Homo sapien
accagggcttttgtgcagtaaggat

SEQ ID NO: 4403979 - DNA, 25 bp, Homo sapien
gtgcagtaaggatggcatgaggcat

SEQ ID NO: 4403980 - DNA, 25 bp, Homo sapien
ggtgcttcttttgcttaccctgcca

SEQ ID NO: 4403981 - DNA, 25 bp, Homo sapien
tgagtggccatttgactattagaac

SEQ ID NO: 4403982 - DNA, 25 bp, Homo sapien
agtatgcacctgactgttcttggac

SEQ ID NO: 4403983 - DNA, 25 bp, Homo sapien
gacattgaaagcttgcttccgaggg

SEQ ID NO: 4403984 - DNA, 25 bp, Homo sapien
taatctgaaaaacagttttgccaca

SEQ ID NO: 4403985 - DNA, 25 bp, Homo sapien
tttaatctgaaaaacagttttgcca

SEQ ID NO: 4403986 - DNA, 25 bp, Homo sapien
ttaatctgaaaaacagttttgccac

SEQ ID NO: 4403987 - DNA, 25 bp, Homo sapien
aatctgaaaaacagttttgccacaa

SEQ ID NO: 4403988 - DNA, 25 bp, Homo sapien
agatatacaactagtttgatcagct

SEQ ID NO: 4403989 - DNA, 25 bp, Homo sapien
tatacaactagtttgatcagctact

SEQ ID NO: 4403990 - DNA, 25 bp, Homo sapien
caactagtttgatcagctactaata

SEQ ID NO: 4403991 - DNA, 25 bp, Homo sapien
catttaaggggtatacagatataca

SEQ ID NO: 4403992 - DNA, 25 bp, Homo sapien
tactgaagcgttagtatttccaccc

SEQ ID NO: 4403993 - DNA, 25 bp, Homo sapien
gtttgcatcccacaacgtgatcttc

SEQ ID NO: 4403994 - DNA, 25 bp, Homo sapien
gaaagcagacctgggatacccctga

SEQ ID NO: 4403995 - DNA, 25 bp, Homo sapien
ctgtgggtacgttttgtgggactct

SEQ ID NO: 4403996 - DNA, 25 bp, Homo sapien
aatattaccacacgaagccacagag

SEQ ID NO: 4403997 - DNA, 25 bp, Homo sapien
catcctcctgtaaatttgtaatcca

SEQ ID NO: 4403998 - DNA, 25 bp, Homo sapien
gggtttaagagctgaccaggtgact

SEQ ID NO: 4403999 - DNA, 25 bp, Homo sapien
gattcgaaccttaccatcttctgca

SEQ ID NO: 4404000 - DNA, 25 bp, Homo sapien
gaatgtaggagatttataaagggct

SEQ ID NO: 4404001 - DNA, 25 bp, Homo sapien
ggagaatgtaggagatttataaagg

SEQ ID NO: 4404002 - DNA, 25 bp, Homo sapien
agaatgtaggagatttataaagggc

SEQ ID NO: 4404003 - DNA, 25 bp, Homo sapien
gagaatgtaggagatttataaaggg

SEQ ID NO: 4404004 - DNA, 25 bp, Homo sapien
tttcgtgtgatcaataatttgatcc

SEQ ID NO: 4404005 - DNA, 25 bp, Homo sapien
aagcaaagatatttcgtgtgatcaa

SEQ ID NO: 4404006 - DNA, 25 bp, Homo sapien
gactagcattaaatgtagaaataag

SEQ ID NO: 4404007 - DNA, 25 bp, Homo sapien
ttaggttttatcagactagcattaa

SEQ ID NO: 4404008 - DNA, 25 bp, Homo sapien
gcaaatcccacttagaaattcccca

SEQ ID NO: 4404009 - DNA, 25 bp, Homo sapien
tagcaaatcccacttagaaattccc

SEQ ID NO: 4404010 - DNA, 25 bp, Homo sapien
ttagcaaatcccacttagaaattcc

SEQ ID NO: 4404011 - DNA, 25 bp, Homo sapien
tgaggccgaaaagccactgaggagc

SEQ ID NO: 4404012 - DNA, 25 bp, Homo sapien
gattgccccagagtcgtcagcagaa

SEQ ID NO: 4404013 - DNA, 25 bp, Homo sapien
tggaaccgcgtgtgtcctaatggag

SEQ ID NO: 4404014 - DNA, 25 bp, Homo sapien
agtccacatgacaccaggctctgag

SEQ ID NO: 4404015 - DNA, 25 bp, Homo sapien
gatcacttttttgccaagttatagt

SEQ ID NO: 4404016 - DNA, 25 bp, Homo sapien
aagtcaggaagtctgtactctagag

SEQ ID NO: 4404017 - DNA, 25 bp, Homo sapien
gaagtctgtactctagagcattaag

SEQ ID NO: 4404018 - DNA, 25 bp, Homo sapien
caaatctttagaatgtcgatcactt

SEQ ID NO: 4404019 - DNA, 25 bp, Homo sapien
accgtcccgttcaagagtctgtgcc

SEQ ID NO: 4404020 - DNA, 25 bp, Homo sapien
gcctcggctgcactgagacacgata

SEQ ID NO: 4404021 - DNA, 25 bp, Homo sapien
ggtctgccgttgaaagtcacctcag

SEQ ID NO: 4404022 - DNA, 25 bp, Homo sapien
cctcagcggctggactagattagta

SEQ ID NO: 4404023 - DNA, 25 bp, Homo sapien
tctctacaggcttcgggtttctgaa

SEQ ID NO: 4404024 - DNA, 25 bp, Homo sapien
gatgtggagaagctggatagcaacc

SEQ ID NO: 4404025 - DNA, 25 bp, Homo sapien
tcaccagagtcagcacaggtcaact

SEQ ID NO: 4404026 - DNA, 25 bp, Homo sapien
tctgaagttggacttgatgtggaga

SEQ ID NO: 4404027 - DNA, 25 bp, Homo sapien
gacagacgttcgctaagtgccgata

SEQ ID NO: 4404028 - DNA, 25 bp, Homo sapien
ttactttgcgaaggcacacagggac

SEQ ID NO: 4404029 - DNA, 25 bp, Homo sapien
ttaattagcgctcaaatggcactcg

SEQ ID NO: 4404030 - DNA, 25 bp, Homo sapien
taagcggtggatccagtaaagacca

SEQ ID NO: 4404031 - DNA, 25 bp, Homo sapien
gcatcgaagtcaccggaaagcagca

SEQ ID NO: 4404032 - DNA, 25 bp, Homo sapien
gaaagcagcatcgaagccaccggcg

SEQ ID NO: 4404033 - DNA, 25 bp, Homo sapien
cactggaaaacagcatcgaagtcac

SEQ ID NO: 4404034 - DNA, 25 bp, Homo sapien
aagtcaccggaaagcagcatcgaag

SEQ ID NO: 4404035 - DNA, 25 bp, Homo sapien
aggaaccgcgaacgagctgggcgtg

SEQ ID NO: 4404036 - DNA, 25 bp, Homo sapien
caatcccgtcgagcgtcaggcgtga

SEQ ID NO: 4404037 - DNA, 25 bp, Homo sapien
gtgaggcggcgcagccaaacagtca

SEQ ID NO: 4404038 - DNA, 25 bp, Homo sapien
tcctcggcgcctagtgataacctca

SEQ ID NO: 4404039 - DNA, 25 bp, Homo sapien
gcgccggcggttggcactgacaggg

SEQ ID NO: 4404040 - DNA, 25 bp, Homo sapien
cgggagtggtggaggcgccggcggt

SEQ ID NO: 4404041 - DNA, 25 bp, Homo sapien
cttggccttccgagcagagacggcg

SEQ ID NO: 4404042 - DNA, 25 bp, Homo sapien
cagcggcggccctagggccggctgg

SEQ ID NO: 4404043 - DNA, 25 bp, Homo sapien
gtgagatataaaattgtgcagctat

SEQ ID NO: 4404044 - DNA, 25 bp, Homo sapien
taagaggagatgtgttgtattgact

SEQ ID NO: 4404045 - DNA, 25 bp, Homo sapien
caaaatcatagtaaagatctctcag

SEQ ID NO: 4404046 - DNA, 25 bp, Homo sapien
ttcccatagctgttagagtctggtt

SEQ ID NO: 4404047 - DNA, 25 bp, Homo sapien
tacaaaatcttaaactgctgcagtg

SEQ ID NO: 4404048 - DNA, 25 bp, Homo sapien
tgcaattgaagtgagcagcatgagc

SEQ ID NO: 4404049 - DNA, 25 bp, Homo sapien
aacacatggttattgcgtattggac

SEQ ID NO: 4404050 - DNA, 25 bp, Homo sapien
ggtgctgagtggaaaaccgaaacac

SEQ ID NO: 4404051 - DNA, 25 bp, Homo sapien
tcattggtgctgaggagagcatttc

SEQ ID NO: 4404052 - DNA, 25 bp, Homo sapien
gcatttcggtagaagacagttgcgc

SEQ ID NO: 4404053 - DNA, 25 bp, Homo sapien
tatctttgtcattggtgctgaggag

SEQ ID NO: 4404054 - DNA, 25 bp, Homo sapien
tgaggagagcatttcggtagaagac

SEQ ID NO: 4404055 - DNA, 25 bp, Homo sapien
tttaataatagaatccacattcccc

SEQ ID NO: 4404056 - DNA, 25 bp, Homo sapien
cacgttgtgaaaaatggccacccac

SEQ ID NO: 4404057 - DNA, 25 bp, Homo sapien
tccttattcccgagacatttcttca

SEQ ID NO: 4404058 - DNA, 25 bp, Homo sapien
ttcctcttctacatagtccacgttg

SEQ ID NO: 4404059 - DNA, 25 bp, Homo sapien
gctggctcccagagatcaatagcag

SEQ ID NO: 4404060 - DNA, 25 bp, Homo sapien
cactgattgtagatgtggctggcag

SEQ ID NO: 4404061 - DNA, 25 bp, Homo sapien
acctttgcttcttcccgcctgtgga

SEQ ID NO: 4404062 - DNA, 25 bp, Homo sapien
gcctgtggaccatcttacactgatt

SEQ ID NO: 4404063 - DNA, 25 bp, Homo sapien
ggacgattcgtgcagacaggctttt

SEQ ID NO: 4404064 - DNA, 25 bp, Homo sapien
gttctcctggagagctatggcacat

SEQ ID NO: 4404065 - DNA, 25 bp, Homo sapien
tgtcagtgactgaggttcgctgtga

SEQ ID NO: 4404066 - DNA, 25 bp, Homo sapien
tcagtgactgaggttcgctgtgaca

SEQ ID NO: 4404067 - DNA, 25 bp, Homo sapien
gagagctatggcacatgctccatat

SEQ ID NO: 4404068 - DNA, 25 bp, Homo sapien
gcccctgattgtggctgaactgcca

SEQ ID NO: 4404069 - DNA, 25 bp, Homo sapien
gaactgccaccgcttgatagcaaac

SEQ ID NO: 4404070 - DNA, 25 bp, Homo sapien
ccggccgggagtcgctctagccaat

SEQ ID NO: 4404071 - DNA, 25 bp, Homo sapien
gggagtcgctctagccaatcacctt

SEQ ID NO: 4404072 - DNA, 25 bp, Homo sapien
tgcccggggtgagccgccagttcca

SEQ ID NO: 4404073 - DNA, 25 bp, Homo sapien
acagcacagcggagaaccccagagg

SEQ ID NO: 4404074 - DNA, 25 bp, Homo sapien
attttgcccggggtgagccgccagt

SEQ ID NO: 4404075 - DNA, 25 bp, Homo sapien
agcaagaggaccatgattttgcccg

SEQ ID NO: 4404076 - DNA, 25 bp, Homo sapien
gaggtgacccaatcctgcaggacag

SEQ ID NO: 4404077 - DNA, 25 bp, Homo sapien
tagttcctcgagaacaggagcgctg

SEQ ID NO: 4404078 - DNA, 25 bp, Homo sapien
gatgatccacaaggaccggctgagt

SEQ ID NO: 4404079 - DNA, 25 bp, Homo sapien
gagatcagaactggaggccccttgt

SEQ ID NO: 4404080 - DNA, 25 bp, Homo sapien
cgggagccgtgagtatttcccgcgt

SEQ ID NO: 4404081 - DNA, 25 bp, Homo sapien
gtggcttgctgcgtccaagcgccgc

SEQ ID NO: 4404082 - DNA, 25 bp, Homo sapien
taaaataatctgatgccccacagca

SEQ ID NO: 4404083 - DNA, 25 bp, Homo sapien
cccgcgttcggctgctctcgaggag

SEQ ID NO: 4404084 - DNA, 25 bp, Homo sapien
aagactcggacgctcttccgtagcc

SEQ ID NO: 4404085 - DNA, 25 bp, Homo sapien
gtagccctcgtggcccctgcatgtg

SEQ ID NO: 4404086 - DNA, 25 bp, Homo sapien
tctgaaggggtcagcgtacttcccc

SEQ ID NO: 4404087 - DNA, 25 bp, Homo sapien
agggcgacgaagactcggacgctct

SEQ ID NO: 4404088 - DNA, 25 bp, Homo sapien
ccactggtgtggctttgtgctgcct

SEQ ID NO: 4404089 - DNA, 25 bp, Homo sapien
agacggaaagaagtaaggagccact

SEQ ID NO: 4404090 - DNA, 25 bp, Homo sapien
ctagacggaaagaagtaaggagcca

SEQ ID NO: 4404091 - DNA, 25 bp, Homo sapien
aggagccactggtgtggctttgtgc

SEQ ID NO: 4404092 - DNA, 25 bp, Homo sapien
taatgagtgccctcatgggaacttc

SEQ ID NO: 4404093 - DNA, 25 bp, Homo sapien
aaataatgctcctgcttcagtcacc

SEQ ID NO: 4404094 - DNA, 25 bp, Homo sapien
accgcccccagctttcatgtaatga

SEQ ID NO: 4404095 - DNA, 25 bp, Homo sapien
catgggaacttcatgaaaacacatt

SEQ ID NO: 4404096 - DNA, 25 bp, Homo sapien
tcagagcccctttagcggagagggt

SEQ ID NO: 4404097 - DNA, 25 bp, Homo sapien
acaattcagatatccagcgtgcacc

SEQ ID NO: 4404098 - DNA, 25 bp, Homo sapien
cactctggccgggataacaattcag

SEQ ID NO: 4404099 - DNA, 25 bp, Homo sapien
gacggtaaggtgtccgagcagctcc

SEQ ID NO: 4404100 - DNA, 25 bp, Homo sapien
cctcgggaagcggctgggctttcca

SEQ ID NO: 4404101 - DNA, 25 bp, Homo sapien
ctcgggaagcggctgggctttccac

SEQ ID NO: 4404102 - DNA, 25 bp, Homo sapien
tctggcttagatgccctcttacagc

SEQ ID NO: 4404103 - DNA, 25 bp, Homo sapien
ggcacactctggcttagatgccctc

SEQ ID NO: 4404104 - DNA, 25 bp, Homo sapien
cactctggcttagatgccctcttac

SEQ ID NO: 4404105 - DNA, 25 bp, Homo sapien
gctgggcacactctggcttagatgc

SEQ ID NO: 4404106 - DNA, 25 bp, Homo sapien
cgggattttgcagagagatatggca

SEQ ID NO: 4404107 - DNA, 25 bp, Homo sapien
gattttgcagagagatatggcaaga

SEQ ID NO: 4404108 - DNA, 25 bp, Homo sapien
gtcacgggattttgcagagagatat

SEQ ID NO: 4404109 - DNA, 25 bp, Homo sapien
tatcttggactctttgcagtgccat

SEQ ID NO: 4404110 - DNA, 25 bp, Homo sapien
tcagttcttcgatacgcagggctgg

SEQ ID NO: 4404111 - DNA, 25 bp, Homo sapien
ctagattcagttcttcgatacgcag

SEQ ID NO: 4404112 - DNA, 25 bp, Homo sapien
tcttcgatacgcagggctggctctt

SEQ ID NO: 4404113 - DNA, 25 bp, Homo sapien
gattcagttcttcgatacgcagggc

SEQ ID NO: 4404114 - DNA, 25 bp, Homo sapien
aaacgctatgcgaaaatgacgagta

SEQ ID NO: 4404115 - DNA, 25 bp, Homo sapien
gaagcattggccctggaactcttgc

SEQ ID NO: 4404116 - DNA, 25 bp, Homo sapien
tacaggcagggtaatggaggtctct

SEQ ID NO: 4404117 - DNA, 25 bp, Homo sapien
tgatcaaaagcagagccacgaagca

SEQ ID NO: 4404118 - DNA, 25 bp, Homo sapien
taggttactgaacagtttgcacagt

SEQ ID NO: 4404119 - DNA, 25 bp, Homo sapien
gaacagaaggtgactggtgtttctc

SEQ ID NO: 4404120 - DNA, 25 bp, Homo sapien
ccactgctagtggtggtagagccga

SEQ ID NO: 4404121 - DNA, 25 bp, Homo sapien
gattcagattgagtctgtcctccaa

SEQ ID NO: 4404122 - DNA, 25 bp, Homo sapien
agagaactacgaagagacggcagcc

SEQ ID NO: 4404123 - DNA, 25 bp, Homo sapien
tggagcgcatcagccgcggcgcctt

SEQ ID NO: 4404124 - DNA, 25 bp, Homo sapien
gggacaactgcctctcagagaacta

SEQ ID NO: 4404125 - DNA, 25 bp, Homo sapien
ccaggagcaaggtcacctgcgcagc

SEQ ID NO: 4404126 - DNA, 25 bp, Homo sapien
gggaagaattctcctccagcgacct

SEQ ID NO: 4404127 - DNA, 25 bp, Homo sapien
tgccccagtacagcaagttgcggac

SEQ ID NO: 4404128 - DNA, 25 bp, Homo sapien
tgctgcgcgacaacaacatgggctt

SEQ ID NO: 4404129 - DNA, 25 bp, Homo sapien
tgatgacgcttcacattcgggagca

SEQ ID NO: 4404130 - DNA, 25 bp, Homo sapien
aacactactatttcaagggccaggc

SEQ ID NO: 4404131 - DNA, 25 bp, Homo sapien
tcatgaacaggcctaaactggcagt

SEQ ID NO: 4404132 - DNA, 25 bp, Homo sapien
tagtatgtatttcccgataccggag

SEQ ID NO: 4404133 - DNA, 25 bp, Homo sapien
taacacataagaggtaattccctgg

SEQ ID NO: 4404134 - DNA, 25 bp, Homo sapien
atactgctaattagcttttcacagg

SEQ ID NO: 4404135 - DNA, 25 bp, Homo sapien
actgctaattagcttttcacaggtt

SEQ ID NO: 4404136 - DNA, 25 bp, Homo sapien
cttctttagcctttatcatgcattt

SEQ ID NO: 4404137 - DNA, 25 bp, Homo sapien
tactgctaattagcttttcacaggt

SEQ ID NO: 4404138 - DNA, 25 bp, Homo sapien
aaagtaacatggtcaatcccctata

SEQ ID NO: 4404139 - DNA, 25 bp, Homo sapien
cgcacccggcatgattgtaagctcc

SEQ ID NO: 4404140 - DNA, 25 bp, Homo sapien
gctagcccaatgcatgttttgagtg

SEQ ID NO: 4404141 - DNA, 25 bp, Homo sapien
taaacatggatattctgctagccca

SEQ ID NO: 4404142 - DNA, 25 bp, Homo sapien
gctgcctcagggatacttgttctag

SEQ ID NO: 4404143 - DNA, 25 bp, Homo sapien
ctaggtaactcttgtgtcgcggatt

SEQ ID NO: 4404144 - DNA, 25 bp, Homo sapien
gactgcagttgatcgtcctgtggaa

SEQ ID NO: 4404145 - DNA, 25 bp, Homo sapien
cctcgtaaaaaactgaatagcttct

SEQ ID NO: 4404146 - DNA, 25 bp, Homo sapien
ctttgaaaagtttcgaactggcata

SEQ ID NO: 4404147 - DNA, 25 bp, Homo sapien
gcgctggcgaattttccccttgatt

SEQ ID NO: 4404148 - DNA, 25 bp, Homo sapien
ttgatttcactctcatagattaaga

SEQ ID NO: 4404149 - DNA, 25 bp, Homo sapien
aacctaatcccacatttcttggcag

SEQ ID NO: 4404150 - DNA, 25 bp, Homo sapien
gaaatctgatgaatatgtgtaagtt

SEQ ID NO: 4404151 - DNA, 25 bp, Homo sapien
tgaatatgtgtaagttgcataatga

SEQ ID NO: 4404152 - DNA, 25 bp, Homo sapien
aatctgatgaatatgtgtaagttgc

SEQ ID NO: 4404153 - DNA, 25 bp, Homo sapien
tctgatgaatatgtgtaagttgcat

SEQ ID NO: 4404154 - DNA, 25 bp, Homo sapien
tccaattgtggggtatgtgcgcggg

SEQ ID NO: 4404155 - DNA, 25 bp, Homo sapien
aattgtggggtatgtgcgcgggaac

SEQ ID NO: 4404156 - DNA, 25 bp, Homo sapien
ttgtggggtatgtgcgcgggaacga

SEQ ID NO: 4404157 - DNA, 25 bp, Homo sapien
tgtggggtatgtgcgcgggaacgac

SEQ ID NO: 4404158 - DNA, 25 bp, Homo sapien
tttccaccacaatatctcagcataa

SEQ ID NO: 4404159 - DNA, 25 bp, Homo sapien
ttctagtcaatatgctccatgaggg

SEQ ID NO: 4404160 - DNA, 25 bp, Homo sapien
gggtggggggcatattcattttcca

SEQ ID NO: 4404161 - DNA, 25 bp, Homo sapien
cttctagtcaatatgctccatgagg

SEQ ID NO: 4404162 - DNA, 25 bp, Homo sapien
caacgtctaaacaaccaggagtggg

SEQ ID NO: 4404163 - DNA, 25 bp, Homo sapien
ggtttttccacccaaccgcagtgca

SEQ ID NO: 4404164 - DNA, 25 bp, Homo sapien
aatgacatcgtctgcaggccaacgt

SEQ ID NO: 4404165 - DNA, 25 bp, Homo sapien
gcccctaagccgactgtgagaccgg

SEQ ID NO: 4404166 - DNA, 25 bp, Homo sapien
gaaagtcagccgtcaagcgtcttgg

SEQ ID NO: 4404167 - DNA, 25 bp, Homo sapien
caaactgaatgtaggactccgtggc

SEQ ID NO: 4404168 - DNA, 25 bp, Homo sapien
gcacgaagcttctgatcaccaaggg

SEQ ID NO: 4404169 - DNA, 25 bp, Homo sapien
tgtactactgagacgggcaagtgcg

SEQ ID NO: 4404170 - DNA, 25 bp, Homo sapien
agaggcccctaactatttgtccaag

SEQ ID NO: 4404171 - DNA, 25 bp, Homo sapien
gcaaggccctatgtcttgacctagg

SEQ ID NO: 4404172 - DNA, 25 bp, Homo sapien
gatggagaagcctcgattgtggtca

SEQ ID NO: 4404173 - DNA, 25 bp, Homo sapien
ttatgccagacgagattcacagtgc

SEQ ID NO: 4404174 - DNA, 25 bp, Homo sapien
ggtaatcctcaagcatcagatgcca

SEQ ID NO: 4404175 - DNA, 25 bp, Homo sapien
gctctattgcatggatccttggtaa

SEQ ID NO: 4404176 - DNA, 25 bp, Homo sapien
tctgacgagaggtgttcttctagaa

SEQ ID NO: 4404177 - DNA, 25 bp, Homo sapien
ttatgtagttaaatgcttcctagaa

SEQ ID NO: 4404178 - DNA, 25 bp, Homo sapien
aaactttgatataactcttcttgct

SEQ ID NO: 4404179 - DNA, 25 bp, Homo sapien
ttagtataacagaacatttctggtt

SEQ ID NO: 4404180 - DNA, 25 bp, Homo sapien
tcttcttgcttagataaatggttgc

SEQ ID NO: 4404181 - DNA, 25 bp, Homo sapien
tgtggttcagccatttactcactta

SEQ ID NO: 4404182 - DNA, 25 bp, Homo sapien
tggttaaacaagagacgtgtcgttg

SEQ ID NO: 4404183 - DNA, 25 bp, Homo sapien
ggcctgaagttccaagacttggtta

SEQ ID NO: 4404184 - DNA, 25 bp, Homo sapien
cactcatattagtcctgcgtacgga

SEQ ID NO: 4404185 - DNA, 25 bp, Homo sapien
tttacagttagggatgatggcagct

SEQ ID NO: 4404186 - DNA, 25 bp, Homo sapien
gttttcgatgagcggtaatcgctcc

SEQ ID NO: 4404187 - DNA, 25 bp, Homo sapien
tttcgatgagcggtaatcgctcctc

SEQ ID NO: 4404188 - DNA, 25 bp, Homo sapien
tgttttcgatgagcggtaatcgctc

SEQ ID NO: 4404189 - DNA, 25 bp, Homo sapien
tcgatgagcggtaatcgctcctcgg

SEQ ID NO: 4404190 - DNA, 25 bp, Homo sapien
cgacccatgcggtaactatggatgg

SEQ ID NO: 4404191 - DNA, 25 bp, Homo sapien
tagaaacaagtacaccccgtgtgtg

SEQ ID NO: 4404192 - DNA, 25 bp, Homo sapien
taatgctacagtgacagcctagtgc

SEQ ID NO: 4404193 - DNA, 25 bp, Homo sapien
tagtcggtactcctaaacactgtgt

SEQ ID NO: 4404194 - DNA, 25 bp, Homo sapien
agtggaccagtccttcattctacca

SEQ ID NO: 4404195 - DNA, 25 bp, Homo sapien
tagaccatctaatctactcatctcc

SEQ ID NO: 4404196 - DNA, 25 bp, Homo sapien
ccaagtagttgtatgttagaccatc

SEQ ID NO: 4404197 - DNA, 25 bp, Homo sapien
tcagctattaatttgttcagtggac

SEQ ID NO: 4404198 - DNA, 25 bp, Homo sapien
gtatatgtgctgctgaagcgagcac

SEQ ID NO: 4404199 - DNA, 25 bp, Homo sapien
ttctctgtatcgttcgtattttagt

SEQ ID NO: 4404200 - DNA, 25 bp, Homo sapien
tcttctctgtatcgttcgtatttta

SEQ ID NO: 4404201 - DNA, 25 bp, Homo sapien
ctgtatcgttcgtattttagtatat

SEQ ID NO: 4404202 - DNA, 25 bp, Homo sapien
aacgcagtaccatggtcggaacgcc

SEQ ID NO: 4404203 - DNA, 25 bp, Homo sapien
gagaagataatgctggtggcgacct

SEQ ID NO: 4404204 - DNA, 25 bp, Homo sapien
ggcgaccttaggctctctgctgaga

SEQ ID NO: 4404205 - DNA, 25 bp, Homo sapien
tgagtactacactaggcatcctgca

SEQ ID NO: 4404206 - DNA, 25 bp, Homo sapien
tgtggactgaatcactagccttagg

SEQ ID NO: 4404207 - DNA, 25 bp, Homo sapien
gctgactttgttgtaatagatccca

SEQ ID NO: 4404208 - DNA, 25 bp, Homo sapien
tgcttttgcgtttctcatgcctagg

SEQ ID NO: 4404209 - DNA, 25 bp, Homo sapien
gaaatggtctgcataacctgaatga

SEQ ID NO: 4404210 - DNA, 25 bp, Homo sapien
aaatcgactgtagagacttggcggc

SEQ ID NO: 4404211 - DNA, 25 bp, Homo sapien
attgccccaggtcgtcagcagtgtg

SEQ ID NO: 4404212 - DNA, 25 bp, Homo sapien
tacagagaagcagccgatagcaaat

SEQ ID NO: 4404213 - DNA, 25 bp, Homo sapien
aatatttgggactagcagcagaggc

SEQ ID NO: 4404214 - DNA, 25 bp, Homo sapien
tctgtggtttggttctggcattttg

SEQ ID NO: 4404215 - DNA, 25 bp, Homo sapien
agatgcaattataaggagagaagtg

SEQ ID NO: 4404216 - DNA, 25 bp, Homo sapien
ctgttgtagtatacattggagaaac

SEQ ID NO: 4404217 - DNA, 25 bp, Homo sapien
gcttgccatcctgcagtagtataaa

SEQ ID NO: 4404218 - DNA, 25 bp, Homo sapien
tagttacctgcacgtccattgctgg

SEQ ID NO: 4404219 - DNA, 25 bp, Homo sapien
tgactatgtgccaacgcctcgtttc

SEQ ID NO: 4404220 - DNA, 25 bp, Homo sapien
ctttggttaagggagctacgctgtg

SEQ ID NO: 4404221 - DNA, 25 bp, Homo sapien
aactgacttgtcattaaaacctggc

SEQ ID NO: 4404222 - DNA, 25 bp, Homo sapien
gcgtacagtctagtaaccagcaact

SEQ ID NO: 4404223 - DNA, 25 bp, Homo sapien
ttgtgaagcataagacactgaggct

SEQ ID NO: 4404224 - DNA, 25 bp, Homo sapien
caactgtaaacgaacctgtgcctct

SEQ ID NO: 4404225 - DNA, 25 bp, Homo sapien
tagaagtgtccagctgcgtacagtc

SEQ ID NO: 4404226 - DNA, 25 bp, Homo sapien
gaaatggatgatagttctgtcaagc

SEQ ID NO: 4404227 - DNA, 25 bp, Homo sapien
tctttggttggaacgcattggcttt

SEQ ID NO: 4404228 - DNA, 25 bp, Homo sapien
tctgtcaagcacacttctgttctct

SEQ ID NO: 4404229 - DNA, 25 bp, Homo sapien
gaaacagttacgtgtggaattcaac

SEQ ID NO: 4404230 - DNA, 25 bp, Homo sapien
cttggtttacgagctgacaggatta

SEQ ID NO: 4404231 - DNA, 25 bp, Homo sapien
tacatcctccttggtttacgagctg

SEQ ID NO: 4404232 - DNA, 25 bp, Homo sapien
tttccgcccgtctcaccggtggtca

SEQ ID NO: 4404233 - DNA, 25 bp, Homo sapien
tgtgggtcacagatcacgtctttca

SEQ ID NO: 4404234 - DNA, 25 bp, Homo sapien
gaatgggtcttttgctttcggcgca

SEQ ID NO: 4404235 - DNA, 25 bp, Homo sapien
gcttagcagctcctgaacgcggttc

SEQ ID NO: 4404236 - DNA, 25 bp, Homo sapien
tgaagtctcaaacgcgcttagcagc

SEQ ID NO: 4404237 - DNA, 25 bp, Homo sapien
gggtgtacactagctgcggtctgat

SEQ ID NO: 4404238 - DNA, 25 bp, Homo sapien
ttcccttggagctgacgaaggcggg

SEQ ID NO: 4404239 - DNA, 25 bp, Homo sapien
gcagacgagtgacggactcagcgat

SEQ ID NO: 4404240 - DNA, 25 bp, Homo sapien
tcgcggcagccgcttcagaggaagc

SEQ ID NO: 4404241 - DNA, 25 bp, Homo sapien
gaacaggccggacgcctcgtcgctg

SEQ ID NO: 4404242 - DNA, 25 bp, Homo sapien
ctctagatagaacagcagcagtcaa

SEQ ID NO: 4404243 - DNA, 25 bp, Homo sapien
gaaaaggactagaagaggaatctct

SEQ ID NO: 4404244 - DNA, 25 bp, Homo sapien
caaagtgttagctgagaaaaggact

SEQ ID NO: 4404245 - DNA, 25 bp, Homo sapien
gattcctattcacctggaagtccac

SEQ ID NO: 4404246 - DNA, 25 bp, Homo sapien
gagacgcacagaggttgagagcact

SEQ ID NO: 4404247 - DNA, 25 bp, Homo sapien
tcctctgttgagcatgggcaatgat

SEQ ID NO: 4404248 - DNA, 25 bp, Homo sapien
ggaagggctggctaaccatctcata

SEQ ID NO: 4404249 - DNA, 25 bp, Homo sapien
tgattacacaaatgccagcgtccac

SEQ ID NO: 4404250 - DNA, 25 bp, Homo sapien
aaaatcaacgccgagagagagctgc

SEQ ID NO: 4404251 - DNA, 25 bp, Homo sapien
tgcttcatagggcaccttgaggtgt

SEQ ID NO: 4404252 - DNA, 25 bp, Homo sapien
cagtcactgggctgtcagttcaaaa

SEQ ID NO: 4404253 - DNA, 25 bp, Homo sapien
gcccagtgtggcttagactaaatgt

SEQ ID NO: 4404254 - DNA, 25 bp, Homo sapien
tcagcagacgcatcaggttgtagtt

SEQ ID NO: 4404255 - DNA, 25 bp, Homo sapien
taactaagcgctacttttgacgagc

SEQ ID NO: 4404256 - DNA, 25 bp, Homo sapien
acgcttttgaggttgagtgcaggcc

SEQ ID NO: 4404257 - DNA, 25 bp, Homo sapien
tttgacgagccttcaacaagctgcc

SEQ ID NO: 4404258 - DNA, 25 bp, Homo sapien
ccagggaataccagcagagaagtgc

SEQ ID NO: 4404259 - DNA, 25 bp, Homo sapien
gatgacctgctctgcctagttaaga

SEQ ID NO: 4404260 - DNA, 25 bp, Homo sapien
tctagataattaagacggcccaggg

SEQ ID NO: 4404261 - DNA, 25 bp, Homo sapien
tacaaaagcagacctagacgagctg

SEQ ID NO: 4404262 - DNA, 25 bp, Homo sapien
gaagacaatccgaataaaaccactg

SEQ ID NO: 4404263 - DNA, 25 bp, Homo sapien
gaaacctattacagaagacaatccg

SEQ ID NO: 4404264 - DNA, 25 bp, Homo sapien
gtctcctgtagaaatctgagttatg

SEQ ID NO: 4404265 - DNA, 25 bp, Homo sapien
aaccactgtctcctgtagaaatctg

SEQ ID NO: 4404266 - DNA, 25 bp, Homo sapien
gtttaacgggagagacattcacact

SEQ ID NO: 4404267 - DNA, 25 bp, Homo sapien
tgctggtcctcatgtcaaggcagtg

SEQ ID NO: 4404268 - DNA, 25 bp, Homo sapien
tttgcaccaactacacaggaaggtc

SEQ ID NO: 4404269 - DNA, 25 bp, Homo sapien
tctgataatctgacacatggccaag

SEQ ID NO: 4404270 - DNA, 25 bp, Homo sapien
tcaaatcttggtaaaaatgggctcg

SEQ ID NO: 4404271 - DNA, 25 bp, Homo sapien
tccagctcagtaaagacactgatca

SEQ ID NO: 4404272 - DNA, 25 bp, Homo sapien
cgtgtgcagactttaggtgatgttc

SEQ ID NO: 4404273 - DNA, 25 bp, Homo sapien
taataactttcagaggcttccagct

SEQ ID NO: 4404274 - DNA, 25 bp, Homo sapien
gcatcgtagtcctgccgatactcat

SEQ ID NO: 4404275 - DNA, 25 bp, Homo sapien
tcctctcccagcatcgtagtcctgc

SEQ ID NO: 4404276 - DNA, 25 bp, Homo sapien
gtagtcctgccgatactcatcccga

SEQ ID NO: 4404277 - DNA, 25 bp, Homo sapien
tcccagcatcgtagtcctgccgata

SEQ ID NO: 4404278 - DNA, 25 bp, Homo sapien
cacctgtcattgtgactggaatccc

SEQ ID NO: 4404279 - DNA, 25 bp, Homo sapien
ggtggaagatacctagccctagcag

SEQ ID NO: 4404280 - DNA, 25 bp, Homo sapien
tcaagcaggacatatgcacttcagc

SEQ ID NO: 4404281 - DNA, 25 bp, Homo sapien
gaatggtgtaacaaatatgcctccc

SEQ ID NO: 4404282 - DNA, 25 bp, Homo sapien
tatgtaccgcatggcgttttccgca

SEQ ID NO: 4404283 - DNA, 25 bp, Homo sapien
cggtcatccagacgcgtcccattta

SEQ ID NO: 4404284 - DNA, 25 bp, Homo sapien
gtcccagtctgtgcgaatgattcgg

SEQ ID NO: 4404285 - DNA, 25 bp, Homo sapien
tccttaaagcctgcgtcccagtctg

SEQ ID NO: 4404286 - DNA, 25 bp, Homo sapien
ggaaacctgtgtatccccgaggcaa

SEQ ID NO: 4404287 - DNA, 25 bp, Homo sapien
tgtcaccaaggtagcagttcccaaa

SEQ ID NO: 4404288 - DNA, 25 bp, Homo sapien
taatcaagagaaggtcaccgtgcac

SEQ ID NO: 4404289 - DNA, 25 bp, Homo sapien
caagaaactggtaactgactgcctc

SEQ ID NO: 4404290 - DNA, 25 bp, Homo sapien
cctggttcagcagctacattagatc

SEQ ID NO: 4404291 - DNA, 25 bp, Homo sapien
tcagcagctacattagatccatggg

SEQ ID NO: 4404292 - DNA, 25 bp, Homo sapien
agcagctacattagatccatgggaa

SEQ ID NO: 4404293 - DNA, 25 bp, Homo sapien
ggttcagcagctacattagatccat

SEQ ID NO: 4404294 - DNA, 25 bp, Homo sapien
tatccagacccataatgattttctt

SEQ ID NO: 4404295 - DNA, 25 bp, Homo sapien
tctttatgtcaccacttttgctgaa

SEQ ID NO: 4404296 - DNA, 25 bp, Homo sapien
cttcattttatccagacccataatg

SEQ ID NO: 4404297 - DNA, 25 bp, Homo sapien
gctgaagagttcatagatttgttct

SEQ ID NO: 4404298 - DNA, 25 bp, Homo sapien
taatttttcttgttcttcattgtca

SEQ ID NO: 4404299 - DNA, 25 bp, Homo sapien
atttttcttgttcttcattgtcacc

SEQ ID NO: 4404300 - DNA, 25 bp, Homo sapien
agtaatttttcttgttcttcattgt

SEQ ID NO: 4404301 - DNA, 25 bp, Homo sapien
agcttttcttcagtaatttttcttg

SEQ ID NO: 4404302 - DNA, 25 bp, Homo sapien
agaatttcaaatagagacaaaagtt

SEQ ID NO: 4404303 - DNA, 25 bp, Homo sapien
aaatatactgtgatatagtccggac

SEQ ID NO: 4404304 - DNA, 25 bp, Homo sapien
ctccgctgatactgaaaagtctact

SEQ ID NO: 4404305 - DNA, 25 bp, Homo sapien
tctgaaatccagcaattctccgatc

SEQ ID NO: 4404306 - DNA, 25 bp, Homo sapien
agtctactttgaatatctgctgcct

SEQ ID NO: 4404307 - DNA, 25 bp, Homo sapien
gtaacaccatcctcccagagaaggg

SEQ ID NO: 4404308 - DNA, 25 bp, Homo sapien
ccgaatcgccgaagggcactgcttc

SEQ ID NO: 4404309 - DNA, 25 bp, Homo sapien
gaaggcgcctctgcctactctggga

SEQ ID NO: 4404310 - DNA, 25 bp, Homo sapien
tgctacgtagtcgtctgcggaggca

SEQ ID NO: 4404311 - DNA, 25 bp, Homo sapien
cttcagtgatatccaagcgcccttc

SEQ ID NO: 4404312 - DNA, 25 bp, Homo sapien
cccacttggcgtttgcggatttcag

SEQ ID NO: 4404313 - DNA, 25 bp, Homo sapien
cgagcgaatgggataagcgagcctc

SEQ ID NO: 4404314 - DNA, 25 bp, Homo sapien
gttccccgtcttccagagcaagtgg

SEQ ID NO: 4404315 - DNA, 25 bp, Homo sapien
ctgaatgggaggcgacacaatgaga

SEQ ID NO: 4404316 - DNA, 25 bp, Homo sapien
gaatgggaggcgacacaatgagaca

SEQ ID NO: 4404317 - DNA, 25 bp, Homo sapien
atgggaggcgacacaatgagacaag

SEQ ID NO: 4404318 - DNA, 25 bp, Homo sapien
tgaatgggaggcgacacaatgagac

SEQ ID NO: 4404319 - DNA, 25 bp, Homo sapien
cagggccttcccgtctcgcggcccg

SEQ ID NO: 4404320 - DNA, 25 bp, Homo sapien
cgtttctcagcgttcttgcccaggg

SEQ ID NO: 4404321 - DNA, 25 bp, Homo sapien
gcccagggccttcccgtctcgcggc

SEQ ID NO: 4404322 - DNA, 25 bp, Homo sapien
ctcagcgttcttgcccagggccttc

SEQ ID NO: 4404323 - DNA, 25 bp, Homo sapien
agctccacgtaggagtcgctgcgca

SEQ ID NO: 4404324 - DNA, 25 bp, Homo sapien
ccggaagtgctggtcccggtactgg

SEQ ID NO: 4404325 - DNA, 25 bp, Homo sapien
gtgctggtcccggtactggctcagc

SEQ ID NO: 4404326 - DNA, 25 bp, Homo sapien
gctccacgtaggagtcgctgcgcag

SEQ ID NO: 4404327 - DNA, 25 bp, Homo sapien
agtgcagagaagcggaccacaatgc

SEQ ID NO: 4404328 - DNA, 25 bp, Homo sapien
acaatgcggcgactcccggcacgag

SEQ ID NO: 4404329 - DNA, 25 bp, Homo sapien
aatgcggcgactcccggcacgaggc

SEQ ID NO: 4404330 - DNA, 25 bp, Homo sapien
agaagcggaccacaatgcggcgact

SEQ ID NO: 4404331 - DNA, 25 bp, Homo sapien
gggcatagacgtccgggtcgggcgc

SEQ ID NO: 4404332 - DNA, 25 bp, Homo sapien
tccgggcgcttggagaagatggtgc

SEQ ID NO: 4404333 - DNA, 25 bp, Homo sapien
tccgagggcggcgtgtcgtcatcaa

SEQ ID NO: 4404334 - DNA, 25 bp, Homo sapien
acgtctgtcagagtcgcggcctatc

SEQ ID NO: 4404335 - DNA, 25 bp, Homo sapien
tcccgactgggattgttggcctgca

SEQ ID NO: 4404336 - DNA, 25 bp, Homo sapien
tccgggctctacagtggcatcaatg

SEQ ID NO: 4404337 - DNA, 25 bp, Homo sapien
cgcccgctccgttgaagtcttgtga

SEQ ID NO: 4404338 - DNA, 25 bp, Homo sapien
ggagacagccctaagcctaacagag

SEQ ID NO: 4404339 - DNA, 25 bp, Homo sapien
catatttcgataggcagatgggtct

SEQ ID NO: 4404340 - DNA, 25 bp, Homo sapien
tgacacaatgttagccggcagacac

SEQ ID NO: 4404341 - DNA, 25 bp, Homo sapien
tcatgacagcaagggtaaggcatca

SEQ ID NO: 4404342 - DNA, 25 bp, Homo sapien
gaagccagagggttgtcatgacagc

SEQ ID NO: 4404343 - DNA, 25 bp, Homo sapien
cacaatgtgaagactgaggtggtcc

SEQ ID NO: 4404344 - DNA, 25 bp, Homo sapien
ccccagctccacaatgtgaagactg

SEQ ID NO: 4404345 - DNA, 25 bp, Homo sapien
caatgtgaagactgaggtggtccct

SEQ ID NO: 4404346 - DNA, 25 bp, Homo sapien
gctccacaatgtgaagactgaggtg

SEQ ID NO: 4404347 - DNA, 25 bp, Homo sapien
tgaagcttttcagggtttggcacag

SEQ ID NO: 4404348 - DNA, 25 bp, Homo sapien
ggttaccacaaagaggcggcagagc

SEQ ID NO: 4404349 - DNA, 25 bp, Homo sapien
ggcctcccgggtcagagacttcaaa

SEQ ID NO: 4404350 - DNA, 25 bp, Homo sapien
tcaggaggcccatttgtgcagaggc

SEQ ID NO: 4404351 - DNA, 25 bp, Homo sapien
cacgttacatgggaggataccagca

SEQ ID NO: 4404352 - DNA, 25 bp, Homo sapien
gagtccctcaatggtgttggagaag

SEQ ID NO: 4404353 - DNA, 25 bp, Homo sapien
tccttgcgtgtagggccccacgtta

SEQ ID NO: 4404354 - DNA, 25 bp, Homo sapien
cagggtgacgtaggaaccagacagc

SEQ ID NO: 4404355 - DNA, 25 bp, Homo sapien
cctcaaggcctttgggcgagacggt

SEQ ID NO: 4404356 - DNA, 25 bp, Homo sapien
tcttgaactatgaggatgaccccac

SEQ ID NO: 4404357 - DNA, 25 bp, Homo sapien
tgttggctggaaagactgcctgtag

SEQ ID NO: 4404358 - DNA, 25 bp, Homo sapien
ggtgtggcctcatgatacattctgc

SEQ ID NO: 4404359 - DNA, 25 bp, Homo sapien
ccaagcagggatacatcaaagagac

SEQ ID NO: 4404360 - DNA, 25 bp, Homo sapien
gctgctctgcttgtggatttactac

SEQ ID NO: 4404361 - DNA, 25 bp, Homo sapien
ttattagcattacccagaaggtcag

SEQ ID NO: 4404362 - DNA, 25 bp, Homo sapien
cagtgtcaccactcgggaaggagat

SEQ ID NO: 4404363 - DNA, 25 bp, Homo sapien
actcatctgggtgcacatagcccgt

SEQ ID NO: 4404364 - DNA, 25 bp, Homo sapien
aactcatctgggtgcacatagcccg

SEQ ID NO: 4404365 - DNA, 25 bp, Homo sapien
gagacaccacagcactcggagcagg

SEQ ID NO: 4404366 - DNA, 25 bp, Homo sapien
ctacagatgctacgctggatccaca

SEQ ID NO: 4404367 - DNA, 25 bp, Homo sapien
tgctacagatgctacgctggatcca

SEQ ID NO: 4404368 - DNA, 25 bp, Homo sapien
tacagatgctacgctggatccacag

SEQ ID NO: 4404369 - DNA, 25 bp, Homo sapien
gctacagatgctacgctggatccac

SEQ ID NO: 4404370 - DNA, 25 bp, Homo sapien
ggttatcacgatgtaaattataata

SEQ ID NO: 4404371 - DNA, 25 bp, Homo sapien
ctgttgaggataacagttgttggtt

SEQ ID NO: 4404372 - DNA, 25 bp, Homo sapien
cagttgttggttatcacgatgtaaa

SEQ ID NO: 4404373 - DNA, 25 bp, Homo sapien
gaggataacagttgttggttatcac

SEQ ID NO: 4404374 - DNA, 25 bp, Homo sapien
aattctgaagggagatagcccaccc

SEQ ID NO: 4404375 - DNA, 25 bp, Homo sapien
taactgtgggcattacaagcctagg

SEQ ID NO: 4404376 - DNA, 25 bp, Homo sapien
tctcgaacctgtggattaggaccct

SEQ ID NO: 4404377 - DNA, 25 bp, Homo sapien
tcaggatccaacaagggcagttttc

SEQ ID NO: 4404378 - DNA, 25 bp, Homo sapien
ctaactatccgaagaacagcgtggg

SEQ ID NO: 4404379 - DNA, 25 bp, Homo sapien
tgaaggaccctgtgcaaaactctgc

SEQ ID NO: 4404380 - DNA, 25 bp, Homo sapien
gaccataacaaatgcgggagctcca

SEQ ID NO: 4404381 - DNA, 25 bp, Homo sapien
caatttagtccagaatcccacgggc

SEQ ID NO: 4404382 - DNA, 25 bp, Homo sapien
gtgcgggtccagcacgggtccaaat

SEQ ID NO: 4404383 - DNA, 25 bp, Homo sapien
cattcagagggatctgtccgggtgc

SEQ ID NO: 4404384 - DNA, 25 bp, Homo sapien
ggctcgtgagcggaaggctttagga

SEQ ID NO: 4404385 - DNA, 25 bp, Homo sapien
cgacagggcccagagtcgtggagat

SEQ ID NO: 4404386 - DNA, 25 bp, Homo sapien
ggcattgacaaccacgccgacaggg

SEQ ID NO: 4404387 - DNA, 25 bp, Homo sapien
aggggagcaggcattgacaaccacg

SEQ ID NO: 4404388 - DNA, 25 bp, Homo sapien
gggagcaggcattgacaaccacgcc

SEQ ID NO: 4404389 - DNA, 25 bp, Homo sapien
gcaggcattgacaaccacgccgaca

SEQ ID NO: 4404390 - DNA, 25 bp, Homo sapien
aaagctgctgggttgccgcttatgg

SEQ ID NO: 4404391 - DNA, 25 bp, Homo sapien
ggttcggcccctttgtctgaatctg

SEQ ID NO: 4404392 - DNA, 25 bp, Homo sapien
cggcccctttgtctgaatctggcat

SEQ ID NO: 4404393 - DNA, 25 bp, Homo sapien
acatgtaaacttcctggcaaagctg

SEQ ID NO: 4404394 - DNA, 25 bp, Homo sapien
caccttgaagcacgggaagatctga

SEQ ID NO: 4404395 - DNA, 25 bp, Homo sapien
cttcggttgcctgaaagggcccgtg

SEQ ID NO: 4404396 - DNA, 25 bp, Homo sapien
tgaccctgagcgctgcagtaagccc

SEQ ID NO: 4404397 - DNA, 25 bp, Homo sapien
gaagatctgatgctggccgccttct

SEQ ID NO: 4404398 - DNA, 25 bp, Homo sapien
gtgttgacgattttgaaagtagttc

SEQ ID NO: 4404399 - DNA, 25 bp, Homo sapien
gcaaagtggggactccgctctgtag

SEQ ID NO: 4404400 - DNA, 25 bp, Homo sapien
atttaaccacccgcgaccttgcagt

SEQ ID NO: 4404401 - DNA, 25 bp, Homo sapien
gaccttgcagtgcgcctctgcaaag

SEQ ID NO: 4404402 - DNA, 25 bp, Homo sapien
tcctctggagccgctggggctgcgc

SEQ ID NO: 4404403 - DNA, 25 bp, Homo sapien
ctctggagccgctggggctgcgcac

SEQ ID NO: 4404404 - DNA, 25 bp, Homo sapien
gctcctctggagccgctggggctgc

SEQ ID NO: 4404405 - DNA, 25 bp, Homo sapien
ccgctcctctggagccgctggggct

SEQ ID NO: 4404406 - DNA, 25 bp, Homo sapien
ctgcgccttcagcgctggcggcgtc

SEQ ID NO: 4404407 - DNA, 25 bp, Homo sapien
gctgcgccttcagcgctggcggcgt

SEQ ID NO: 4404408 - DNA, 25 bp, Homo sapien
tcggcgaacagcctttcggcgcggg

SEQ ID NO: 4404409 - DNA, 25 bp, Homo sapien
gcgcggggggctgttaaaccagaca

SEQ ID NO: 4404410 - DNA, 25 bp, Homo sapien
cactcctctcgttcgaaatgaccat

SEQ ID NO: 4404411 - DNA, 25 bp, Homo sapien
gaggccgtgggagcggccgggcgcg

SEQ ID NO: 4404412 - DNA, 25 bp, Homo sapien
cagcggcctccgagccactgtggag

SEQ ID NO: 4404413 - DNA, 25 bp, Homo sapien
gccgacggggacctgacacggtcac

SEQ ID NO: 4404414 - DNA, 25 bp, Homo sapien
ggagcaggttcgagtggccgggcgt

SEQ ID NO: 4404415 - DNA, 25 bp, Homo sapien
tccgcgttccgcaggcggcgacggg

SEQ ID NO: 4404416 - DNA, 25 bp, Homo sapien
cctcattgtcaccattggtaagcac

SEQ ID NO: 4404417 - DNA, 25 bp, Homo sapien
caccattggtaagcacgactgagca

SEQ ID NO: 4404418 - DNA, 25 bp, Homo sapien
tgagcacccaaagggtaccaagaca

SEQ ID NO: 4404419 - DNA, 25 bp, Homo sapien
gcacgactgagcacccaaagggtac

SEQ ID NO: 4404420 - DNA, 25 bp, Homo sapien
ctgtccctgtcggcatcatcatcgt

SEQ ID NO: 4404421 - DNA, 25 bp, Homo sapien
tccctgtcggcatcatcatcgtcag

SEQ ID NO: 4404422 - DNA, 25 bp, Homo sapien
gtccctgtcggcatcatcatcgtca

SEQ ID NO: 4404423 - DNA, 25 bp, Homo sapien
tgtccctgtcggcatcatcatcgtc

SEQ ID NO: 4404424 - DNA, 25 bp, Homo sapien
gataatgctggtttgtcgtaggtca

SEQ ID NO: 4404425 - DNA, 25 bp, Homo sapien
gattatcgcgctctcaaaggcggcc

SEQ ID NO: 4404426 - DNA, 25 bp, Homo sapien
tacctaatgcttgcggtgtccctgc

SEQ ID NO: 4404427 - DNA, 25 bp, Homo sapien
gcgaatcacgaacacattccacgga

SEQ ID NO: 4404428 - DNA, 25 bp, Homo sapien
tttggattctctgcgcagcccaagc

SEQ ID NO: 4404429 - DNA, 25 bp, Homo sapien
gaagccttttggattctctgcgcag

SEQ ID NO: 4404430 - DNA, 25 bp, Homo sapien
gcccggacttgccactggagacctg

SEQ ID NO: 4404431 - DNA, 25 bp, Homo sapien
gccaggctgagtctatggccccgga

SEQ ID NO: 4404432 - DNA, 25 bp, Homo sapien
aagtgatacgcctgactcgtgctgg

SEQ ID NO: 4404433 - DNA, 25 bp, Homo sapien
gtgatacgcctgactcgtgctggga

SEQ ID NO: 4404434 - DNA, 25 bp, Homo sapien
caagtgatacgcctgactcgtgctg

SEQ ID NO: 4404435 - DNA, 25 bp, Homo sapien
gatacgcctgactcgtgctgggatt

SEQ ID NO: 4404436 - DNA, 25 bp, Homo sapien
tatatagaaagacatatcacatgct

SEQ ID NO: 4404437 - DNA, 25 bp, Homo sapien
gcctctgagtagagcaatttgatga

SEQ ID NO: 4404438 - DNA, 25 bp, Homo sapien
aaaatcacactatcagagagatggg

SEQ ID NO: 4404439 - DNA, 25 bp, Homo sapien
gttgctggtgactataaactggaaa

SEQ ID NO: 4404440 - DNA, 25 bp, Homo sapien
gtcttgatactgagaactgtgagga

SEQ ID NO: 4404441 - DNA, 25 bp, Homo sapien
gccaccttctcaggaagagatagtt

SEQ ID NO: 4404442 - DNA, 25 bp, Homo sapien
tcaatagaaaaagcaagcgaaggca

SEQ ID NO: 4404443 - DNA, 25 bp, Homo sapien
tgtagttggaggtcttgaagccacc

SEQ ID NO: 4404444 - DNA, 25 bp, Homo sapien
tgtgaccgtaggtgtcatgtggcca

SEQ ID NO: 4404445 - DNA, 25 bp, Homo sapien
ttacagacgtgattacaatctttcc

SEQ ID NO: 4404446 - DNA, 25 bp, Homo sapien
cctgtgcgtgtgaccgtaggtgtca

SEQ ID NO: 4404447 - DNA, 25 bp, Homo sapien
cttccagttacagacgtgattacaa

SEQ ID NO: 4404448 - DNA, 25 bp, Homo sapien
atggcgccactactgtggaaaacag

SEQ ID NO: 4404449 - DNA, 25 bp, Homo sapien
gaagaaatgggaactcttgtgccct

SEQ ID NO: 4404450 - DNA, 25 bp, Homo sapien
tctgagtatatagacaaggacttga

SEQ ID NO: 4404451 - DNA, 25 bp, Homo sapien
tggtaggaatgtcaaatggcgccac

SEQ ID NO: 4404452 - DNA, 25 bp, Homo sapien
aggaccattcagtggttgctcctac

SEQ ID NO: 4404453 - DNA, 25 bp, Homo sapien
taggaccattcagtggttgctccta

SEQ ID NO: 4404454 - DNA, 25 bp, Homo sapien
ttaggaccattcagtggttgctcct

SEQ ID NO: 4404455 - DNA, 25 bp, Homo sapien
agtggcctgagcagtgggagctgca

SEQ ID NO: 4404456 - DNA, 25 bp, Homo sapien
ggcctgagcagtgggagctgcagac

SEQ ID NO: 4404457 - DNA, 25 bp, Homo sapien
cccttcagtggcctgagcagtggga

SEQ ID NO: 4404458 - DNA, 25 bp, Homo sapien
cagtggcctgagcagtgggagctgc

SEQ ID NO: 4404459 - DNA, 25 bp, Homo sapien
gagtgctccagtcttcagtagggag

SEQ ID NO: 4404460 - DNA, 25 bp, Homo sapien
gtcttccgtggcaggctgagtgctc

SEQ ID NO: 4404461 - DNA, 25 bp, Homo sapien
tgctccagtcttcagtagggagctg

SEQ ID NO: 4404462 - DNA, 25 bp, Homo sapien
tcttccgtggcaggctgagtgctcc

SEQ ID NO: 4404463 - DNA, 25 bp, Homo sapien
ttcctccttggtcacagtgttttca

SEQ ID NO: 4404464 - DNA, 25 bp, Homo sapien
ctgcacgccgtcaggccagtctgca

SEQ ID NO: 4404465 - DNA, 25 bp, Homo sapien
tgcacgccgtcaggccagtctgcaa

SEQ ID NO: 4404466 - DNA, 25 bp, Homo sapien
ccttggtcacagtgttttcagcagc

SEQ ID NO: 4404467 - DNA, 25 bp, Homo sapien
cccaggggtgttcacgggaaatgct

SEQ ID NO: 4404468 - DNA, 25 bp, Homo sapien
gaaatgctgccacgcatgcacagag

SEQ ID NO: 4404469 - DNA, 25 bp, Homo sapien
cacgggaaatgctgccacgcatgca

SEQ ID NO: 4404470 - DNA, 25 bp, Homo sapien
tcccaggggtgttcacgggaaatgc

SEQ ID NO: 4404471 - DNA, 25 bp, Homo sapien
atgggatggcaaagtccacatagca

SEQ ID NO: 4404472 - DNA, 25 bp, Homo sapien
gatggcaaagtccacatagcacaga

SEQ ID NO: 4404473 - DNA, 25 bp, Homo sapien
ctggttgcatgggatggcaaagtcc

SEQ ID NO: 4404474 - DNA, 25 bp, Homo sapien
tgggatggcaaagtccacatagcac

SEQ ID NO: 4404475 - DNA, 25 bp, Homo sapien
tacagagcaatggtgggtaggttaa

SEQ ID NO: 4404476 - DNA, 25 bp, Homo sapien
acagagcaatggtgggtaggttaac

SEQ ID NO: 4404477 - DNA, 25 bp, Homo sapien
ttacagagcaatggtgggtaggtta

SEQ ID NO: 4404478 - DNA, 25 bp, Homo sapien
gcctccgttctgagaggctgctggt

SEQ ID NO: 4404479 - DNA, 25 bp, Homo sapien
tgcctccgttctgagaggctgctgg

SEQ ID NO: 4404480 - DNA, 25 bp, Homo sapien
agccgtggctcccagaaggctgcct

SEQ ID NO: 4404481 - DNA, 25 bp, Homo sapien
ccgtggctcccagaaggctgcctgg

SEQ ID NO: 4404482 - DNA, 25 bp, Homo sapien
cacaagaagccgtggctcccagaag

SEQ ID NO: 4404483 - DNA, 25 bp, Homo sapien
gtggctcccagaaggctgcctggat

SEQ ID NO: 4404484 - DNA, 25 bp, Homo sapien
gggccagcgattggagtggctccgg

SEQ ID NO: 4404485 - DNA, 25 bp, Homo sapien
tgaaggggccagcgattggagtggc

SEQ ID NO: 4404486 - DNA, 25 bp, Homo sapien
aggggccagcgattggagtggctcc

SEQ ID NO: 4404487 - DNA, 25 bp, Homo sapien
aaggggccagcgattggagtggctc

SEQ ID NO: 4404488 - DNA, 25 bp, Homo sapien
tataacactgacagcagcagcgttt

SEQ ID NO: 4404489 - DNA, 25 bp, Homo sapien
gatataacactgacagcagcagcgt

SEQ ID NO: 4404490 - DNA, 25 bp, Homo sapien
taacactgacagcagcagcgttttc

SEQ ID NO: 4404491 - DNA, 25 bp, Homo sapien
ggatataacactgacagcagcagcg

SEQ ID NO: 4404492 - DNA, 25 bp, Homo sapien
caagattgctgccacctaactgggt

SEQ ID NO: 4404493 - DNA, 25 bp, Homo sapien
agattgctgccacctaactgggttc

SEQ ID NO: 4404494 - DNA, 25 bp, Homo sapien
attgctgccacctaactgggttcct

SEQ ID NO: 4404495 - DNA, 25 bp, Homo sapien
gtcaagattgctgccacctaactgg

SEQ ID NO: 4404496 - DNA, 25 bp, Homo sapien
aggaacttaaggacatcctctttct

SEQ ID NO: 4404497 - DNA, 25 bp, Homo sapien
acttaaggacatcctctttcttcat

SEQ ID NO: 4404498 - DNA, 25 bp, Homo sapien
gaacttaaggacatcctctttcttc

SEQ ID NO: 4404499 - DNA, 25 bp, Homo sapien
gcaaggaacttaaggacatcctctt

SEQ ID NO: 4404500 - DNA, 25 bp, Homo sapien
aagggctccggacactgtgaaaatt

SEQ ID NO: 4404501 - DNA, 25 bp, Homo sapien
tcaagggctccggacactgtgaaaa

SEQ ID NO: 4404502 - DNA, 25 bp, Homo sapien
acatcaagggctccggacactgtga

SEQ ID NO: 4404503 - DNA, 25 bp, Homo sapien
gggctccggacactgtgaaaatttc

SEQ ID NO: 4404504 - DNA, 25 bp, Homo sapien
ctccattttccagcgatcctgtcca

SEQ ID NO: 4404505 - DNA, 25 bp, Homo sapien
catgcggtccttttccttgtgcttc

SEQ ID NO: 4404506 - DNA, 25 bp, Homo sapien
tgtgcttcttgctccattttccagc

SEQ ID NO: 4404507 - DNA, 25 bp, Homo sapien
ttgctccattttccagcgatcctgt

SEQ ID NO: 4404508 - DNA, 25 bp, Homo sapien
tgggcacgctgccacccgaacaaaa

SEQ ID NO: 4404509 - DNA, 25 bp, Homo sapien
tttcttcagccagaaccgagttgcc

SEQ ID NO: 4404510 - DNA, 25 bp, Homo sapien
tcctcctaaacagctgccctgaaac

SEQ ID NO: 4404511 - DNA, 25 bp, Homo sapien
ggcacgcaggagtgagtatttgtac

SEQ ID NO: 4404512 - DNA, 25 bp, Homo sapien
ggccctgctcggaattgtgagggtg

SEQ ID NO: 4404513 - DNA, 25 bp, Homo sapien
tcctgttctcgagggccctgctcgg

SEQ ID NO: 4404514 - DNA, 25 bp, Homo sapien
ttctctcctgttctcgagggccctg

SEQ ID NO: 4404515 - DNA, 25 bp, Homo sapien
gggccctgctcggaattgtgagggt

SEQ ID NO: 4404516 - DNA, 25 bp, Homo sapien
tcaactacacctcctgcgagagctt

SEQ ID NO: 4404517 - DNA, 25 bp, Homo sapien
agcctgctcatcacgctcaactaca

SEQ ID NO: 4404518 - DNA, 25 bp, Homo sapien
cctgcgagagctttggccaccttgg

SEQ ID NO: 4404519 - DNA, 25 bp, Homo sapien
tacacctcctgcgagagctttggcc

SEQ ID NO: 4404520 - DNA, 25 bp, Homo sapien
tagcccagagttagccacacagaaa

SEQ ID NO: 4404521 - DNA, 25 bp, Homo sapien
tcaggtcggaggagaatcactagcc

SEQ ID NO: 4404522 - DNA, 25 bp, Homo sapien
tgtttcattagcactgacacagcag

SEQ ID NO: 4404523 - DNA, 25 bp, Homo sapien
aaaaccaagcaatcgtcaggtcgga

SEQ ID NO: 4404524 - DNA, 25 bp, Homo sapien
ggctcccggtctgctgacgagggct

SEQ ID NO: 4404525 - DNA, 25 bp, Homo sapien
tcccggtctgctgacgagggctgcc

SEQ ID NO: 4404526 - DNA, 25 bp, Homo sapien
gcggctcccggtctgctgacgaggg

SEQ ID NO: 4404527 - DNA, 25 bp, Homo sapien
ctcccggtctgctgacgagggctgc

SEQ ID NO: 4404528 - DNA, 25 bp, Homo sapien
aggagacggagctcacccccgttcg

SEQ ID NO: 4404529 - DNA, 25 bp, Homo sapien
ggaacccagaagcatggcgggtccc

SEQ ID NO: 4404530 - DNA, 25 bp, Homo sapien
ccccgttcggaacccagaagcatgg

SEQ ID NO: 4404531 - DNA, 25 bp, Homo sapien
aagcatggcgggtccccacgcgcag

SEQ ID NO: 4404532 - DNA, 25 bp, Homo sapien
aggctcgggcgtgggtgcgggcggt

SEQ ID NO: 4404533 - DNA, 25 bp, Homo sapien
tgggtgcgggcggtgggcatcccac

SEQ ID NO: 4404534 - DNA, 25 bp, Homo sapien
ggtgcgggcggtgggcatcccacgg

SEQ ID NO: 4404535 - DNA, 25 bp, Homo sapien
gcgtgggtgcgggcggtgggcatcc

SEQ ID NO: 4404536 - DNA, 25 bp, Homo sapien
gcgggcgaaggcttctccccgtcgc

SEQ ID NO: 4404537 - DNA, 25 bp, Homo sapien
ttctggattccagcgcgaagccgcc

SEQ ID NO: 4404538 - DNA, 25 bp, Homo sapien
gcggcctgcgggtgtaggcgcctcg

SEQ ID NO: 4404539 - DNA, 25 bp, Homo sapien
gaagcccggactcagcggtttcctg

SEQ ID NO: 4404540 - DNA, 25 bp, Homo sapien
gcagcagcgggagcaggggcgcccc

SEQ ID NO: 4404541 - DNA, 25 bp, Homo sapien
tcagagggcgggcgggagcaggcgg

SEQ ID NO: 4404542 - DNA, 25 bp, Homo sapien
agcagcgggagcaggggcgccccgg

SEQ ID NO: 4404543 - DNA, 25 bp, Homo sapien
cgggcggcgagggcgggcagcagca

SEQ ID NO: 4404544 - DNA, 25 bp, Homo sapien
tattgtggtcgtctccaaacaggtc

SEQ ID NO: 4404545 - DNA, 25 bp, Homo sapien
tggaggagtcgaacattttgaaccc

SEQ ID NO: 4404546 - DNA, 25 bp, Homo sapien
cggacggtggcatccttgaaaagca

SEQ ID NO: 4404547 - DNA, 25 bp, Homo sapien
taggtggttttctctccgacaggca

SEQ ID NO: 4404548 - DNA, 25 bp, Homo sapien
tggaagcaccgcaggcagacgacct

SEQ ID NO: 4404549 - DNA, 25 bp, Homo sapien
tcaggcagggtcacccgcccagtgc

SEQ ID NO: 4404550 - DNA, 25 bp, Homo sapien
gcccagtgccgctagctgcaaattg

SEQ ID NO: 4404551 - DNA, 25 bp, Homo sapien
ctggaagcaccgcaggcagacgacc

SEQ ID NO: 4404552 - DNA, 25 bp, Homo sapien
tctgtggctacagccctaaaagagc

SEQ ID NO: 4404553 - DNA, 25 bp, Homo sapien
taaacaatttcgagagggacttgtg

SEQ ID NO: 4404554 - DNA, 25 bp, Homo sapien
tcagaatcactagaatgaccgttct

SEQ ID NO: 4404555 - DNA, 25 bp, Homo sapien
gggacttgtgttctgcaaccagtca

SEQ ID NO: 4404556 - DNA, 25 bp, Homo sapien
gcagtccatacacggtgaagatgtt

SEQ ID NO: 4404557 - DNA, 25 bp, Homo sapien
tggtatctgtgccaggttgcaggct

SEQ ID NO: 4404558 - DNA, 25 bp, Homo sapien
aggctgcaaactgggacacctcggc

SEQ ID NO: 4404559 - DNA, 25 bp, Homo sapien
catagtcctctgacctgagctcagc

SEQ ID NO: 4404560 - DNA, 25 bp, Homo sapien
caaagacggttgtgtgcctgacgaa

SEQ ID NO: 4404561 - DNA, 25 bp, Homo sapien
tttgtgttgtcaaagacggttgtgt

SEQ ID NO: 4404562 - DNA, 25 bp, Homo sapien
tgacgaaggcaacgtcacccgcatt

SEQ ID NO: 4404563 - DNA, 25 bp, Homo sapien
ttgtgtgcctgacgaaggcaacgtc

SEQ ID NO: 4404564 - DNA, 25 bp, Homo sapien
gaaggcgccgcggtagccgtaatac

SEQ ID NO: 4404565 - DNA, 25 bp, Homo sapien
ttgttcacgggcacgcagctggcat

SEQ ID NO: 4404566 - DNA, 25 bp, Homo sapien
acacacttgttgcggccctgctcgt

SEQ ID NO: 4404567 - DNA, 25 bp, Homo sapien
gtaataccgctcctggctgttgccc

SEQ ID NO: 4404568 - DNA, 25 bp, Homo sapien
cctctctgaataagggcacccacgg

SEQ ID NO: 4404569 - DNA, 25 bp, Homo sapien
aagctcatccaaggtgaaggcgtgg

SEQ ID NO: 4404570 - DNA, 25 bp, Homo sapien
tccttgggccggatgaagcctctct

SEQ ID NO: 4404571 - DNA, 25 bp, Homo sapien
cacgtagtacgagttgctgctgtct

SEQ ID NO: 4404572 - DNA, 25 bp, Homo sapien
gccgtgtaaatgtcctcgccactca

SEQ ID NO: 4404573 - DNA, 25 bp, Homo sapien
tcgccactcagggtcacagcgtcga

SEQ ID NO: 4404574 - DNA, 25 bp, Homo sapien
caggccgtacgtcttccccgccgtg

SEQ ID NO: 4404575 - DNA, 25 bp, Homo sapien
agggtcacagcgtcgacctgctcag

SEQ ID NO: 4404576 - DNA, 25 bp, Homo sapien
cccacccgtctctgtgggcttgttg

SEQ ID NO: 4404577 - DNA, 25 bp, Homo sapien
gggtgtgggtagtaagaactgccca

SEQ ID NO: 4404578 - DNA, 25 bp, Homo sapien
gggcttgttgcagtagacactctcc

SEQ ID NO: 4404579 - DNA, 25 bp, Homo sapien
aaagtcgaacaatgatccacgccca

SEQ ID NO: 4404580 - DNA, 25 bp, Homo sapien
tgtctccacacttctggatctcggg

SEQ ID NO: 4404581 - DNA, 25 bp, Homo sapien
ggatctctggcttgagccgctgccg

SEQ ID NO: 4404582 - DNA, 25 bp, Homo sapien
tggatccgctccatgcagtgttggg

SEQ ID NO: 4404583 - DNA, 25 bp, Homo sapien
agagcacacaccagcgcaggtaggg

SEQ ID NO: 4404584 - DNA, 25 bp, Homo sapien
cctcagagctgaacatctggaagct

SEQ ID NO: 4404585 - DNA, 25 bp, Homo sapien
gatccttctggccataggcctcaga

SEQ ID NO: 4404586 - DNA, 25 bp, Homo sapien
ggcacaagctccgaggtagagtctt

SEQ ID NO: 4404587 - DNA, 25 bp, Homo sapien
gcagacccttcatggcgtgcaggta

SEQ ID NO: 4404588 - DNA, 25 bp, Homo sapien
gccagccagcatagtcggttcctca

SEQ ID NO: 4404589 - DNA, 25 bp, Homo sapien
ccagcatagtcggttcctcactctg

SEQ ID NO: 4404590 - DNA, 25 bp, Homo sapien
agacacaagtctcaggagcttcttc

SEQ ID NO: 4404591 - DNA, 25 bp, Homo sapien
ttctggccagccagcatagtcggtt

SEQ ID NO: 4404592 - DNA, 25 bp, Homo sapien
ccccatctgtgtcggcccggaccac

SEQ ID NO: 4404593 - DNA, 25 bp, Homo sapien
tcggtgacatcggcccggctaccat

SEQ ID NO: 4404594 - DNA, 25 bp, Homo sapien
ggaccaccacggcgtgagcaggcac

SEQ ID NO: 4404595 - DNA, 25 bp, Homo sapien
atggcactgcctccactcggtgaca

SEQ ID NO: 4404596 - DNA, 25 bp, Homo sapien
taatgattcagtgtagtcctacccc

SEQ ID NO: 4404597 - DNA, 25 bp, Homo sapien
tcggcggctgcaaaacctttggtta

SEQ ID NO: 4404598 - DNA, 25 bp, Homo sapien
cccgcaccagagtgatcgtttagga

SEQ ID NO: 4404599 - DNA, 25 bp, Homo sapien
taatggccacatggtagtttacagc

SEQ ID NO: 4404600 - DNA, 25 bp, Homo sapien
tctcctttgtcagactcgtcctggg

SEQ ID NO: 4404601 - DNA, 25 bp, Homo sapien
actagagcgcatcgtcctacgtgct

SEQ ID NO: 4404602 - DNA, 25 bp, Homo sapien
ggagcccatttccaggcttgcccag

SEQ ID NO: 4404603 - DNA, 25 bp, Homo sapien
gatctggtccatgtttgccttcgtg

SEQ ID NO: 4404604 - DNA, 25 bp, Homo sapien
ccccaagccggcctggcctgactcc

SEQ ID NO: 4404605 - DNA, 25 bp, Homo sapien
ccgtgctgtgcttcacaaaagccac

SEQ ID NO: 4404606 - DNA, 25 bp, Homo sapien
atccgtgttctccagtaccgtgctg

SEQ ID NO: 4404607 - DNA, 25 bp, Homo sapien
gctgtgcttcacaaaagccacgtcc

SEQ ID NO: 4404608 - DNA, 25 bp, Homo sapien
ccgtgttctccagtaccgtgctgtg

SEQ ID NO: 4404609 - DNA, 25 bp, Homo sapien
ctgcccccaaaatagtcgctgacag

SEQ ID NO: 4404610 - DNA, 25 bp, Homo sapien
cctgcagaggcgacagagggactca

SEQ ID NO: 4404611 - DNA, 25 bp, Homo sapien
agggggctcttgtcacacacccctt

SEQ ID NO: 4404612 - DNA, 25 bp, Homo sapien
gctgtagtcgtagtatctctccagg

SEQ ID NO: 4404613 - DNA, 25 bp, Homo sapien
tccaggctctcgcgggtttacacgg

SEQ ID NO: 4404614 - DNA, 25 bp, Homo sapien
tctcgcgggtttacacggctggttg

SEQ ID NO: 4404615 - DNA, 25 bp, Homo sapien
gtttacacggctggttgggctgatg

SEQ ID NO: 4404616 - DNA, 25 bp, Homo sapien
tgcaagtcggcacctcgtttgggtc

SEQ ID NO: 4404617 - DNA, 25 bp, Homo sapien
tcacgcctttcagggtgtcaatggt

SEQ ID NO: 4404618 - DNA, 25 bp, Homo sapien
actgtgcgattgatgcccgtgtggc

SEQ ID NO: 4404619 - DNA, 25 bp, Homo sapien
ctttgagtacatcgcagcccatcac

SEQ ID NO: 4404620 - DNA, 25 bp, Homo sapien
cagccacggcgtaataggaggtacc

SEQ ID NO: 4404621 - DNA, 25 bp, Homo sapien
tatgaccagcgggtagcaggtgctc

SEQ ID NO: 4404622 - DNA, 25 bp, Homo sapien
ccttagggcgttcttctggctggga

SEQ ID NO: 4404623 - DNA, 25 bp, Homo sapien
taacgagactgagcaggcagaggct

SEQ ID NO: 4404624 - DNA, 25 bp, Homo sapien
gaaggtctcttcgtttactgctgca

SEQ ID NO: 4404625 - DNA, 25 bp, Homo sapien
ggctcctccatccagagtgatggcg

SEQ ID NO: 4404626 - DNA, 25 bp, Homo sapien
tcctttcccgcctcatagatggctc

SEQ ID NO: 4404627 - DNA, 25 bp, Homo sapien
ggcttcaggccgtgctcctttcccg

SEQ ID NO: 4404628 - DNA, 25 bp, Homo sapien
cttgatcgtacacttcgcccaccac

SEQ ID NO: 4404629 - DNA, 25 bp, Homo sapien
tcagatagcagaaaacggtgcgcag

SEQ ID NO: 4404630 - DNA, 25 bp, Homo sapien
taatcattgattttgcaggactcag

SEQ ID NO: 4404631 - DNA, 25 bp, Homo sapien
cctgctcagcaaagaactcgggaca

SEQ ID NO: 4404632 - DNA, 25 bp, Homo sapien
caggccagggattcaccttgttttc

SEQ ID NO: 4404633 - DNA, 25 bp, Homo sapien
ttcccggaaggcctcgctcatgttg

SEQ ID NO: 4404634 - DNA, 25 bp, Homo sapien
tcatgttgccgcacttgtgctgctc

SEQ ID NO: 4404635 - DNA, 25 bp, Homo sapien
agggctggatgcccgcttcccggaa

SEQ ID NO: 4404636 - DNA, 25 bp, Homo sapien
cgatgagctggacgcagtggtcggc

SEQ ID NO: 4404637 - DNA, 25 bp, Homo sapien
tctgtgtgagcccattcgcctggac

SEQ ID NO: 4404638 - DNA, 25 bp, Homo sapien
gcctcccgaagagggtgctcgtgta

SEQ ID NO: 4404639 - DNA, 25 bp, Homo sapien
gggtctacaggtcgcttctcagcta

SEQ ID NO: 4404640 - DNA, 25 bp, Homo sapien
aatggctcagaacccggccctttat

SEQ ID NO: 4404641 - DNA, 25 bp, Homo sapien
aatgggagggtctacaggtcgcttc

SEQ ID NO: 4404642 - DNA, 25 bp, Homo sapien
cttcctcatgaactgggacgggaga

SEQ ID NO: 4404643 - DNA, 25 bp, Homo sapien
gccttcctcatgaactgggacggga

SEQ ID NO: 4404644 - DNA, 25 bp, Homo sapien
tcctcatgaactgggacgggagagt

SEQ ID NO: 4404645 - DNA, 25 bp, Homo sapien
tgggccttcctcatgaactgggacg

SEQ ID NO: 4404646 - DNA, 25 bp, Homo sapien
taaacccccttgtagagagcctgag

SEQ ID NO: 4404647 - DNA, 25 bp, Homo sapien
ctgagagagcagataaaaaccccac

SEQ ID NO: 4404648 - DNA, 25 bp, Homo sapien
tcctcagtggacttctgcttatgcc

SEQ ID NO: 4404649 - DNA, 25 bp, Homo sapien
cccatcagggtaggttcaagcctct

SEQ ID NO: 4404650 - DNA, 25 bp, Homo sapien
gatgactttcaggcctgagctcctc

SEQ ID NO: 4404651 - DNA, 25 bp, Homo sapien
gggtcagagtccccgagagctccca

SEQ ID NO: 4404652 - DNA, 25 bp, Homo sapien
agtccccgagagctcccaggctagg

SEQ ID NO: 4404653 - DNA, 25 bp, Homo sapien
tgactttcaggcctgagctcctctg

SEQ ID NO: 4404654 - DNA, 25 bp, Homo sapien
agcccaagggccgagactgaagctt

SEQ ID NO: 4404655 - DNA, 25 bp, Homo sapien
gaggcctgggaagtcgaactgccct

SEQ ID NO: 4404656 - DNA, 25 bp, Homo sapien
cccaggcgggaaactgcaaagttca

SEQ ID NO: 4404657 - DNA, 25 bp, Homo sapien
attgatgagtgcgtcgcctgcggcc

SEQ ID NO: 4404658 - DNA, 25 bp, Homo sapien
agccccgggacctgctcagccgggc

SEQ ID NO: 4404659 - DNA, 25 bp, Homo sapien
cctcccccgtctcactgccccggag

SEQ ID NO: 4404660 - DNA, 25 bp, Homo sapien
tccgccgtcctcactcgaccccgag

SEQ ID NO: 4404661 - DNA, 25 bp, Homo sapien
gcctttggctctcacagcggggcct

SEQ ID NO: 4404662 - DNA, 25 bp, Homo sapien
agccacagagccccgctcggacccc

SEQ ID NO: 4404663 - DNA, 25 bp, Homo sapien
cagccacagagccccgctcggaccc

SEQ ID NO: 4404664 - DNA, 25 bp, Homo sapien
gccacagagccccgctcggaccccg

SEQ ID NO: 4404665 - DNA, 25 bp, Homo sapien
gcagccacagagccccgctcggacc

SEQ ID NO: 4404666 - DNA, 25 bp, Homo sapien
ctgctccccctcgcgctggcccgag

SEQ ID NO: 4404667 - DNA, 25 bp, Homo sapien
gtccgggtccgaggaggtccgcagc

SEQ ID NO: 4404668 - DNA, 25 bp, Homo sapien
gggtccgaggaggtccgcagcagcc

SEQ ID NO: 4404669 - DNA, 25 bp, Homo sapien
tccgggtccgaggaggtccgcagca

SEQ ID NO: 4404670 - DNA, 25 bp, Homo sapien
cttaagtgcggccgcgagttcccgg

SEQ ID NO: 4404671 - DNA, 25 bp, Homo sapien
gcgagttcccgggcggaatccacgc

SEQ ID NO: 4404672 - DNA, 25 bp, Homo sapien
aggagaggtcagaatcccagagtcg

SEQ ID NO: 4404673 - DNA, 25 bp, Homo sapien
ggatgatctcattcacgcagcagct

SEQ ID NO: 4404674 - DNA, 25 bp, Homo sapien
agctggaggatgatctcattcacgc

SEQ ID NO: 4404675 - DNA, 25 bp, Homo sapien
tcagaatcccagagtcggggctgga

SEQ ID NO: 4404676 - DNA, 25 bp, Homo sapien
taatgagagagtaataagccagtag

SEQ ID NO: 4404677 - DNA, 25 bp, Homo sapien
gccagtagtttaacccacaaacagc

SEQ ID NO: 4404678 - DNA, 25 bp, Homo sapien
ggtccggacatacttgggtgtgcca

SEQ ID NO: 4404679 - DNA, 25 bp, Homo sapien
ctcagcttgagccaggattctgcca

SEQ ID NO: 4404680 - DNA, 25 bp, Homo sapien
ttctatggcccgcaatgtctttaag

SEQ ID NO: 4404681 - DNA, 25 bp, Homo sapien
tgtctgtctatttctatggcccgca

SEQ ID NO: 4404682 - DNA, 25 bp, Homo sapien
tgtctatttctatggcccgcaatgt

SEQ ID NO: 4404683 - DNA, 25 bp, Homo sapien
cgcaatgtctttaagaacaagccaa

SEQ ID NO: 4404684 - DNA, 25 bp, Homo sapien
gaaggctggtgtgccctgagaaagt

SEQ ID NO: 4404685 - DNA, 25 bp, Homo sapien
ccctgagaaagtttgggtgtgagca

SEQ ID NO: 4404686 - DNA, 25 bp, Homo sapien
gctggtgtgccctgagaaagtttgg

SEQ ID NO: 4404687 - DNA, 25 bp, Homo sapien
tgccctgagaaagtttgggtgtgag

SEQ ID NO: 4404688 - DNA, 25 bp, Homo sapien
gaggatgttacactcttgctgactg

SEQ ID NO: 4404689 - DNA, 25 bp, Homo sapien
gaggatgttacgctcttgctgactg

SEQ ID NO: 4404690 - DNA, 25 bp, Homo sapien
aggatgttacactcttgctgatggg

SEQ ID NO: 4404691 - DNA, 25 bp, Homo sapien
ggatgttacactcttgctgatgggt

SEQ ID NO: 4404692 - DNA, 25 bp, Homo sapien
tgtcagaagattttacactcttgct

SEQ ID NO: 4404693 - DNA, 25 bp, Homo sapien
cagaagattttacactcttgctgac

SEQ ID NO: 4404694 - DNA, 25 bp, Homo sapien
gatgtcagaagattttacactcttg

SEQ ID NO: 4404695 - DNA, 25 bp, Homo sapien
tgatgtcagaagattttacactctt

SEQ ID NO: 4404696 - DNA, 25 bp, Homo sapien
gaggatgttacactcttgctgacgg

SEQ ID NO: 4404697 - DNA, 25 bp, Homo sapien
actggttgggacgttagcacctgca

SEQ ID NO: 4404698 - DNA, 25 bp, Homo sapien
gaggatgttacactcttgctgactg

SEQ ID NO: 4404699 - DNA, 25 bp, Homo sapien
ggatgttacactcttgctgatgggt

SEQ ID NO: 4404700 - DNA, 25 bp, Homo sapien
gaggatgttacgctcttgctggctg

SEQ ID NO: 4404701 - DNA, 25 bp, Homo sapien
gaggatgttacgctcttgctgactg

SEQ ID NO: 4404702 - DNA, 25 bp, Homo sapien
ggatgttacgctcttgctggctggt

SEQ ID NO: 4404703 - DNA, 25 bp, Homo sapien
tactctcctgctgacgggatgggat

SEQ ID NO: 4404704 - DNA, 25 bp, Homo sapien
gaggatgttacactcttgctgacgg

SEQ ID NO: 4404705 - DNA, 25 bp, Homo sapien
ctgcagtagtgtgatgtcagaggat

SEQ ID NO: 4404706 - DNA, 25 bp, Homo sapien
tgatgtcagaggatgttacactctt

SEQ ID NO: 4404707 - DNA, 25 bp, Homo sapien
gaggatgttaccctcttgctgactt

SEQ ID NO: 4404708 - DNA, 25 bp, Homo sapien
atttgtatattgagaacaatggcag

SEQ ID NO: 4404709 - DNA, 25 bp, Homo sapien
ctgcagtagtgtgatatcaaagggt

SEQ ID NO: 4404710 - DNA, 25 bp, Homo sapien
gtatattgagaacaatggcagacat

SEQ ID NO: 4404711 - DNA, 25 bp, Homo sapien
gactgcttaatctgaatttgtatat

SEQ ID NO: 4404712 - DNA, 25 bp, Homo sapien
caggttctggagtagagctgcgtac

SEQ ID NO: 4404713 - DNA, 25 bp, Homo sapien
gtactctcatctgccctggtacttc

SEQ ID NO: 4404714 - DNA, 25 bp, Homo sapien
tctggagtagagctgcgtactctca

SEQ ID NO: 4404715 - DNA, 25 bp, Homo sapien
tagagctgcgtactctcatctgccc

SEQ ID NO: 4404716 - DNA, 25 bp, Homo sapien
tcaggtgatacgtatgccttgacct

SEQ ID NO: 4404717 - DNA, 25 bp, Homo sapien
cctcaggtgatacgtatgccttgac

SEQ ID NO: 4404718 - DNA, 25 bp, Homo sapien
ggtgatacgtatgccttgacctccc

SEQ ID NO: 4404719 - DNA, 25 bp, Homo sapien
caacctcaggtgatacgtatgcctt

SEQ ID NO: 4404720 - DNA, 25 bp, Homo sapien
tggtaacacactctgctgcctaacg

SEQ ID NO: 4404721 - DNA, 25 bp, Homo sapien
tgcctaacggctcttggattcggtt

SEQ ID NO: 4404722 - DNA, 25 bp, Homo sapien
catttagtctaacagcagcactgtg

SEQ ID NO: 4404723 - DNA, 25 bp, Homo sapien
tcttgtaaggcagtttctgaagctc

SEQ ID NO: 4404724 - DNA, 25 bp, Homo sapien
taaatggaatggataatgttgataa

SEQ ID NO: 4404725 - DNA, 25 bp, Homo sapien
atgttgataattctttacaaaccag

SEQ ID NO: 4404726 - DNA, 25 bp, Homo sapien
cttcataaatggaatggataatgtt

SEQ ID NO: 4404727 - DNA, 25 bp, Homo sapien
tacagtttattagctgttctcctct

SEQ ID NO: 4404728 - DNA, 25 bp, Homo sapien
tgcagagcagtggatgaaagctgtc

SEQ ID NO: 4404729 - DNA, 25 bp, Homo sapien
taaacaactccaaagagcaatggga

SEQ ID NO: 4404730 - DNA, 25 bp, Homo sapien
tttgtgcaattctagtgcagagcag

SEQ ID NO: 4404731 - DNA, 25 bp, Homo sapien
aattgctcaccatgaagatttgtgc

SEQ ID NO: 4404732 - DNA, 25 bp, Homo sapien
cagtaacaacacggacaacaacaaa

SEQ ID NO: 4404733 - DNA, 25 bp, Homo sapien
gaaaagaggagaatatgcccacact

SEQ ID NO: 4404734 - DNA, 25 bp, Homo sapien
acatgattaaggaagataagtctat

SEQ ID NO: 4404735 - DNA, 25 bp, Homo sapien
tgatgacaagaacaacagtaacaac

SEQ ID NO: 4404736 - DNA, 25 bp, Homo sapien
gtgtgtgtgcgcaactatgtaaaga

SEQ ID NO: 4404737 - DNA, 25 bp, Homo sapien
ttgtgtgtgtgcgcaactatgtaaa

SEQ ID NO: 4404738 - DNA, 25 bp, Homo sapien
tgtgtgtgtgcgcaactatgtaaag

SEQ ID NO: 4404739 - DNA, 25 bp, Homo sapien
cacgttcttaatagctggtcaggcc

SEQ ID NO: 4404740 - DNA, 25 bp, Homo sapien
taacttgaaggagacactacatgtg

SEQ ID NO: 4404741 - DNA, 25 bp, Homo sapien
gaacatggcctcaattcacgaaatg

SEQ ID NO: 4404742 - DNA, 25 bp, Homo sapien
tcttctgtgtaaaaggcgaacttcc

SEQ ID NO: 4404743 - DNA, 25 bp, Homo sapien
tccagcgtatccccctgtacaatag

SEQ ID NO: 4404744 - DNA, 25 bp, Homo sapien
gaacccagatgtaagaaccagattg

SEQ ID NO: 4404745 - DNA, 25 bp, Homo sapien
tttgccggaacccagatgtaagaac

SEQ ID NO: 4404746 - DNA, 25 bp, Homo sapien
cccagatgtaagaaccagattgttc

SEQ ID NO: 4404747 - DNA, 25 bp, Homo sapien
caaaaacaaagtatcgctagacagc

SEQ ID NO: 4404748 - DNA, 25 bp, Homo sapien
gaattgagagatacctaagctagct

SEQ ID NO: 4404749 - DNA, 25 bp, Homo sapien
ggaatagctgaagcccctgaggtct

SEQ ID NO: 4404750 - DNA, 25 bp, Homo sapien
cagagtggaaccttgtgtctcgtaa

SEQ ID NO: 4404751 - DNA, 25 bp, Homo sapien
aatgcagacatgcctcaatgtccct

SEQ ID NO: 4404752 - DNA, 25 bp, Homo sapien
tggcatcttgatgcaccccaacagc

SEQ ID NO: 4404753 - DNA, 25 bp, Homo sapien
aatacttggttcgtgggtttggcat

SEQ ID NO: 4404754 - DNA, 25 bp, Homo sapien
agacatgcctcaatgtccctgaaga

SEQ ID NO: 4404755 - DNA, 25 bp, Homo sapien
taaacctccttgcatgatacacaga

SEQ ID NO: 4404756 - DNA, 25 bp, Homo sapien
ggtgaagggtacatgaaactccctg

SEQ ID NO: 4404757 - DNA, 25 bp, Homo sapien
gaagtaaagggacatctacctgaaa

SEQ ID NO: 4404758 - DNA, 25 bp, Homo sapien
gataatccaatacagcacgtgagcc

SEQ ID NO: 4404759 - DNA, 25 bp, Homo sapien
agaggactgttacaacacggttcca

SEQ ID NO: 4404760 - DNA, 25 bp, Homo sapien
gaggactgttacaacacggttccaa

SEQ ID NO: 4404761 - DNA, 25 bp, Homo sapien
tggctctctcaaatgtttttctggc

SEQ ID NO: 4404762 - DNA, 25 bp, Homo sapien
tgttcagtaaactcctgttccagtt

SEQ ID NO: 4404763 - DNA, 25 bp, Homo sapien
ttctgttagacgcttattcatttcc

SEQ ID NO: 4404764 - DNA, 25 bp, Homo sapien
ggcttgttcttctgttagacgctta

SEQ ID NO: 4404765 - DNA, 25 bp, Homo sapien
tagtcaccaacccattcttacaggg

SEQ ID NO: 4404766 - DNA, 25 bp, Homo sapien
tgggtgtgctcactctagtcaccaa

SEQ ID NO: 4404767 - DNA, 25 bp, Homo sapien
taagggttcttgcaatctatagtca

SEQ ID NO: 4404768 - DNA, 25 bp, Homo sapien
cagagcatgactaggaccccagaat

SEQ ID NO: 4404769 - DNA, 25 bp, Homo sapien
gctgtgctgcgtacttcagtagcca

SEQ ID NO: 4404770 - DNA, 25 bp, Homo sapien
aataaattaccctacagtgactgaa

SEQ ID NO: 4404771 - DNA, 25 bp, Homo sapien
cttaatggttacctgagagctgtgc

SEQ ID NO: 4404772 - DNA, 25 bp, Homo sapien
gaatttgtacacagaggctatgcct

SEQ ID NO: 4404773 - DNA, 25 bp, Homo sapien
aaaatggagatagggtaaagctgtg

SEQ ID NO: 4404774 - DNA, 25 bp, Homo sapien
aaatggagatagggtaaagctgtgc

SEQ ID NO: 4404775 - DNA, 25 bp, Homo sapien
ataaaaatggagatagggtaaagct

SEQ ID NO: 4404776 - DNA, 25 bp, Homo sapien
taaaaatggagatagggtaaagctg

SEQ ID NO: 4404777 - DNA, 25 bp, Homo sapien
caggtccacagtctaaatcatgatc

SEQ ID NO: 4404778 - DNA, 25 bp, Homo sapien
catgatctgtttcgatccttgttca

SEQ ID NO: 4404779 - DNA, 25 bp, Homo sapien
tacagttcctagttttcacggatca

SEQ ID NO: 4404780 - DNA, 25 bp, Homo sapien
tcaataatatcaaaggtacttttcc

SEQ ID NO: 4404781 - DNA, 25 bp, Homo sapien
taccagtcttgcatactgtcaaagg

SEQ ID NO: 4404782 - DNA, 25 bp, Homo sapien
tagtgctgtatctatcctaccagtc

SEQ ID NO: 4404783 - DNA, 25 bp, Homo sapien
ttaatatatgctggagagctaggcc

SEQ ID NO: 4404784 - DNA, 25 bp, Homo sapien
ctaggactgtaagggtgcactgcca

SEQ ID NO: 4404785 - DNA, 25 bp, Homo sapien
tgaacacttgttccatatagatgat

SEQ ID NO: 4404786 - DNA, 25 bp, Homo sapien
tttctgctacttctcgtacagactg

SEQ ID NO: 4404787 - DNA, 25 bp, Homo sapien
gatgattgttatactggccagcttc

SEQ ID NO: 4404788 - DNA, 25 bp, Homo sapien
ccatctacctcataatctcgttttg

SEQ ID NO: 4404789 - DNA, 25 bp, Homo sapien
cagtgacaggaaatgttaagagtaa

SEQ ID NO: 4404790 - DNA, 25 bp, Homo sapien
tcgttttgtaaagttcaacagaaca

SEQ ID NO: 4404791 - DNA, 25 bp, Homo sapien
taatatggaggatggaagagtaact

SEQ ID NO: 4404792 - DNA, 25 bp, Homo sapien
acacacagtgacaggaaatgttaag

SEQ ID NO: 4404793 - DNA, 25 bp, Homo sapien
caatatgatcactggtcgagtataa

SEQ ID NO: 4404794 - DNA, 25 bp, Homo sapien
acaggatccaaatttgtcaggaaat

SEQ ID NO: 4404795 - DNA, 25 bp, Homo sapien
tctttcataggtcccaatatgatca

SEQ ID NO: 4404796 - DNA, 25 bp, Homo sapien
tctgagatcaagtcatcatttatcc

SEQ ID NO: 4404797 - DNA, 25 bp, Homo sapien
tcttgttgattcactggttcataag

SEQ ID NO: 4404798 - DNA, 25 bp, Homo sapien
tgttgattcactggttcataagata

SEQ ID NO: 4404799 - DNA, 25 bp, Homo sapien
cttcttgttgattcactggttcata

SEQ ID NO: 4404800 - DNA, 25 bp, Homo sapien
gttgattcactggttcataagataa

SEQ ID NO: 4404801 - DNA, 25 bp, Homo sapien
tatacattactagaactttcctgag

SEQ ID NO: 4404802 - DNA, 25 bp, Homo sapien
catttgtgatgctatgtgctactcc

SEQ ID NO: 4404803 - DNA, 25 bp, Homo sapien
taatgctttaatgagcagatctgtc

SEQ ID NO: 4404804 - DNA, 25 bp, Homo sapien
taatgtgagtcaaaaagagctttag

SEQ ID NO: 4404805 - DNA, 25 bp, Homo sapien
gagcagccatactcatctgtaatca

SEQ ID NO: 4404806 - DNA, 25 bp, Homo sapien
gccatactcatctgtaatcaagatt

SEQ ID NO: 4404807 - DNA, 25 bp, Homo sapien
ttgagcagccatactcatctgtaat

SEQ ID NO: 4404808 - DNA, 25 bp, Homo sapien
gcagccatactcatctgtaatcaag

SEQ ID NO: 4404809 - DNA, 25 bp, Homo sapien
cactatcgctggcattagaagttac

SEQ ID NO: 4404810 - DNA, 25 bp, Homo sapien
ggtaactactttcactatcgctggc

SEQ ID NO: 4404811 - DNA, 25 bp, Homo sapien
tatcgctggcattagaagttacatg

SEQ ID NO: 4404812 - DNA, 25 bp, Homo sapien
tcgctggcattagaagttacatgct

SEQ ID NO: 4404813 - DNA, 25 bp, Homo sapien
caccacatgggcttgacagcaataa

SEQ ID NO: 4404814 - DNA, 25 bp, Homo sapien
taagactgccaaaagctacgccaca

SEQ ID NO: 4404815 - DNA, 25 bp, Homo sapien
caatgggagttcatgcgctaggaat

SEQ ID NO: 4404816 - DNA, 25 bp, Homo sapien
tctgctttgataagactggcactgg

SEQ ID NO: 4404817 - DNA, 25 bp, Homo sapien
ttaaaagcaggcatttagcagcact

SEQ ID NO: 4404818 - DNA, 25 bp, Homo sapien
catacttcattaggcacttcccaac

SEQ ID NO: 4404819 - DNA, 25 bp, Homo sapien
tctttgaagaggatttagtgggtca

SEQ ID NO: 4404820 - DNA, 25 bp, Homo sapien
gatattatccttgtgacatacatgg

SEQ ID NO: 4404821 - DNA, 25 bp, Homo sapien
taactgaggccacaagtaacgtcct

SEQ ID NO: 4404822 - DNA, 25 bp, Homo sapien
caataaggcctgatgactacctaca

SEQ ID NO: 4404823 - DNA, 25 bp, Homo sapien
taatcatgggcaccttgtcaactgc

SEQ ID NO: 4404824 - DNA, 25 bp, Homo sapien
tcttcaataggttcggttctctgga

SEQ ID NO: 4404825 - DNA, 25 bp, Homo sapien
caggccttttgatcccatgtcgtca

SEQ ID NO: 4404826 - DNA, 25 bp, Homo sapien
ttttgatcccatgtcgtcagggatc

SEQ ID NO: 4404827 - DNA, 25 bp, Homo sapien
gccttttgatcccatgtcgtcaggg

SEQ ID NO: 4404828 - DNA, 25 bp, Homo sapien
ttgatcccatgtcgtcagggatctc

SEQ ID NO: 4404829 - DNA, 25 bp, Homo sapien
acaaccaactgcagggcagtaggtc

SEQ ID NO: 4404830 - DNA, 25 bp, Homo sapien
caaccaactgcagggcagtaggtcc

SEQ ID NO: 4404831 - DNA, 25 bp, Homo sapien
gttgaccactggatccacatactta

SEQ ID NO: 4404832 - DNA, 25 bp, Homo sapien
tcagttgaccactggatccacatac

SEQ ID NO: 4404833 - DNA, 25 bp, Homo sapien
cagttgaccactggatccacatact

SEQ ID NO: 4404834 - DNA, 25 bp, Homo sapien
ttgaccactggatccacatacttac

SEQ ID NO: 4404835 - DNA, 25 bp, Homo sapien
tctttttacgcttgtcattgaatga

SEQ ID NO: 4404836 - DNA, 25 bp, Homo sapien
tgaccaacgtgaatgctatcagtac

SEQ ID NO: 4404837 - DNA, 25 bp, Homo sapien
cattggcaccacgtccttcataggg

SEQ ID NO: 4404838 - DNA, 25 bp, Homo sapien
gccaagcaagaagagtcagaagtct

SEQ ID NO: 4404839 - DNA, 25 bp, Homo sapien
gtgtccaccaaagccacaaggcaat

SEQ ID NO: 4404840 - DNA, 25 bp, Homo sapien
gaaggctctgaggaactagataaaa

SEQ ID NO: 4404841 - DNA, 25 bp, Homo sapien
gcatctatagtggtcagagtcagtt

SEQ ID NO: 4404842 - DNA, 25 bp, Homo sapien
gttcattagccaagcagactgtctt

SEQ ID NO: 4404843 - DNA, 25 bp, Homo sapien
ccaggtaattaaggtgaagcagcca

SEQ ID NO: 4404844 - DNA, 25 bp, Homo sapien
caaacaggaattacaaaaatgtaga

SEQ ID NO: 4404845 - DNA, 25 bp, Homo sapien
acaaaaatgtagagatttcaaatac

SEQ ID NO: 4404846 - DNA, 25 bp, Homo sapien
aaatgtagagatttcaaatactcac

SEQ ID NO: 4404847 - DNA, 25 bp, Homo sapien
aaaaatgtagagatttcaaatactc

SEQ ID NO: 4404848 - DNA, 25 bp, Homo sapien
cactgtttttaatcgggctcgttct

SEQ ID NO: 4404849 - DNA, 25 bp, Homo sapien
taatcgggctcgttctttcttctca

SEQ ID NO: 4404850 - DNA, 25 bp, Homo sapien
tttatctctcgttttagaattgaat

SEQ ID NO: 4404851 - DNA, 25 bp, Homo sapien
tcactgtttttaatcgggctcgttc

SEQ ID NO: 4404852 - DNA, 25 bp, Homo sapien
tagtcttgtcataatcaaaaagggc

SEQ ID NO: 4404853 - DNA, 25 bp, Homo sapien
tgcgtttactgggaatcactccgac

SEQ ID NO: 4404854 - DNA, 25 bp, Homo sapien
tctggtgtaacctgcctggcttgcc

SEQ ID NO: 4404855 - DNA, 25 bp, Homo sapien
gaagttcagtccctgactgggaagc

SEQ ID NO: 4404856 - DNA, 25 bp, Homo sapien
ggatcgttaagcaggagggctcact

SEQ ID NO: 4404857 - DNA, 25 bp, Homo sapien
taagaggtagtacaaatgtcaagac

SEQ ID NO: 4404858 - DNA, 25 bp, Homo sapien
caaacatagagaagatgagggcaca

SEQ ID NO: 4404859 - DNA, 25 bp, Homo sapien
tctcaagagtgtaagaaaggatcac

SEQ ID NO: 4404860 - DNA, 25 bp, Homo sapien
tacagtagtaccaaggtaggcaggg

SEQ ID NO: 4404861 - DNA, 25 bp, Homo sapien
gaagaccagtggtttagtctccaga

SEQ ID NO: 4404862 - DNA, 25 bp, Homo sapien
tccaagacaagcttagccaacaggg

SEQ ID NO: 4404863 - DNA, 25 bp, Homo sapien
tgtatgtagcacttagaccaacccc

SEQ ID NO: 4404864 - DNA, 25 bp, Homo sapien
gagctatacagcacgtttacagagg

SEQ ID NO: 4404865 - DNA, 25 bp, Homo sapien
tgtaagactaatgcgcaaaactggt

SEQ ID NO: 4404866 - DNA, 25 bp, Homo sapien
gaaacgttctcatctaccatggttg

SEQ ID NO: 4404867 - DNA, 25 bp, Homo sapien
tcatagggtaccactcgactgagtc

SEQ ID NO: 4404868 - DNA, 25 bp, Homo sapien
tcatcatctgctcccgtaaatcatg

SEQ ID NO: 4404869 - DNA, 25 bp, Homo sapien
ctgacatagagggatcgcttctggc

SEQ ID NO: 4404870 - DNA, 25 bp, Homo sapien
gctagttcgaagagaacctgaccct

SEQ ID NO: 4404871 - DNA, 25 bp, Homo sapien
gaacctgaccctgaactaatactac

SEQ ID NO: 4404872 - DNA, 25 bp, Homo sapien
tacggataataagctcaactgaagc

SEQ ID NO: 4404873 - DNA, 25 bp, Homo sapien
taaagcctgtcttacagcaaataac

SEQ ID NO: 4404874 - DNA, 25 bp, Homo sapien
tgacagagtaagagtaagcatgatt

SEQ ID NO: 4404875 - DNA, 25 bp, Homo sapien
taacaaattgcagacaactaggtca

SEQ ID NO: 4404876 - DNA, 25 bp, Homo sapien
tcacttaatagtaagtatatccaga

SEQ ID NO: 4404877 - DNA, 25 bp, Homo sapien
acttaatagtaagtatatccagaag

SEQ ID NO: 4404878 - DNA, 25 bp, Homo sapien
ttcacttaatagtaagtatatccag

SEQ ID NO: 4404879 - DNA, 25 bp, Homo sapien
cacttaatagtaagtatatccagaa

SEQ ID NO: 4404880 - DNA, 25 bp, Homo sapien
tgttcagtggaagccagataccatg

SEQ ID NO: 4404881 - DNA, 25 bp, Homo sapien
tagaagaggccatgaagcttttgcc

SEQ ID NO: 4404882 - DNA, 25 bp, Homo sapien
tgcaatttccccatcgacaggtgga

SEQ ID NO: 4404883 - DNA, 25 bp, Homo sapien
tatgactcttatgtactgcacaggg

SEQ ID NO: 4404884 - DNA, 25 bp, Homo sapien
tgaaccatttgacagcaatttgcct

SEQ ID NO: 4404885 - DNA, 25 bp, Homo sapien
gactagagcaatcacaaactgtttt

SEQ ID NO: 4404886 - DNA, 25 bp, Homo sapien
taatactgttggagattacaagtca

SEQ ID NO: 4404887 - DNA, 25 bp, Homo sapien
taatgctcggatccctatgaagagt

SEQ ID NO: 4404888 - DNA, 25 bp, Homo sapien
tcgtggccccttcatatcttagtgt

SEQ ID NO: 4404889 - DNA, 25 bp, Homo sapien
cataggagttacgagtcaagatagg

SEQ ID NO: 4404890 - DNA, 25 bp, Homo sapien
gctggttaactgtgtcatagggccc

SEQ ID NO: 4404891 - DNA, 25 bp, Homo sapien
gacatgacctcagacactgtgagat

SEQ ID NO: 4404892 - DNA, 25 bp, Homo sapien
ctgcattttcttgtgaggactggtt

SEQ ID NO: 4404893 - DNA, 25 bp, Homo sapien
actgcattttcttgtgaggactggt

SEQ ID NO: 4404894 - DNA, 25 bp, Homo sapien
tactgcattttcttgtgaggactgg

SEQ ID NO: 4404895 - DNA, 25 bp, Homo sapien
ctactgcattttcttgtgaggactg

SEQ ID NO: 4404896 - DNA, 25 bp, Homo sapien
tttgggaggccgaggcaggcagatc

SEQ ID NO: 4404897 - DNA, 25 bp, Homo sapien
cctgaggtcaggagaccagtctggc

SEQ ID NO: 4404898 - DNA, 25 bp, Homo sapien
tggctcacgcctgtaatcccagcac

SEQ ID NO: 4404899 - DNA, 25 bp, Homo sapien
tacttattactggggctgggggctg

SEQ ID NO: 4404900 - DNA, 25 bp, Homo sapien
ttagcttggaagttaaacattatta

SEQ ID NO: 4404901 - DNA, 25 bp, Homo sapien
aataagcaataactatagacaataa

SEQ ID NO: 4404902 - DNA, 25 bp, Homo sapien
atactggattagcaaatcagaaaaa

SEQ ID NO: 4404903 - DNA, 25 bp, Homo sapien
taactatagacaataagaatgttat

SEQ ID NO: 4404904 - DNA, 25 bp, Homo sapien
tcaggtcgatattgtgcaacaattg

SEQ ID NO: 4404905 - DNA, 25 bp, Homo sapien
gtcgatattgtgcaacaattgtgac

SEQ ID NO: 4404906 - DNA, 25 bp, Homo sapien
caggtcgatattgtgcaacaattgt

SEQ ID NO: 4404907 - DNA, 25 bp, Homo sapien
cttcaggtcgatattgtgcaacaat

SEQ ID NO: 4404908 - DNA, 25 bp, Homo sapien
tttgggagaaaagaatcactgtgat

SEQ ID NO: 4404909 - DNA, 25 bp, Homo sapien
cttaatttgagaacctgaaaaatca

SEQ ID NO: 4404910 - DNA, 25 bp, Homo sapien
aatttgagaacctgaaaaatcaagt

SEQ ID NO: 4404911 - DNA, 25 bp, Homo sapien
ttgagaacctgaaaaatcaagtggc

SEQ ID NO: 4404912 - DNA, 25 bp, Homo sapien
gaacctgaaaaatcaagtggcatca

SEQ ID NO: 4404913 - DNA, 25 bp, Homo sapien
tggtgggatcaaagctcactcactg

SEQ ID NO: 4404914 - DNA, 25 bp, Homo sapien
tgggatcaaagctcactcactgtag

SEQ ID NO: 4404915 - DNA, 25 bp, Homo sapien
actacaagtgcccactactatgtct

SEQ ID NO: 4404916 - DNA, 25 bp, Homo sapien
caagtgcccactactatgtctggct

SEQ ID NO: 4404917 - DNA, 25 bp, Homo sapien
taggcaatgcactgaagccctgtct

SEQ ID NO: 4404918 - DNA, 25 bp, Homo sapien
tagggacagagtacatacaacatgg

SEQ ID NO: 4404919 - DNA, 25 bp, Homo sapien
catccactcataggagtttagggac

SEQ ID NO: 4404920 - DNA, 25 bp, Homo sapien
gcaggaatatcgtttgagcccgtaa

SEQ ID NO: 4404921 - DNA, 25 bp, Homo sapien
tcagcaggtcctccggctaagataa

SEQ ID NO: 4404922 - DNA, 25 bp, Homo sapien
tataatacgatctccttttctgagc

SEQ ID NO: 4404923 - DNA, 25 bp, Homo sapien
tgttgaaaccaaggcccgttgagcc

SEQ ID NO: 4404924 - DNA, 25 bp, Homo sapien
gagctctccacttagatcagcaggt

SEQ ID NO: 4404925 - DNA, 25 bp, Homo sapien
tgcaggcactacgaaaaccagtttg

SEQ ID NO: 4404926 - DNA, 25 bp, Homo sapien
tgatttggacagatacttgcatgcc

SEQ ID NO: 4404927 - DNA, 25 bp, Homo sapien
gatacttcaggtctactaggatggc

SEQ ID NO: 4404928 - DNA, 25 bp, Homo sapien
tgagaatataaaacggtgcaggcac

SEQ ID NO: 4404929 - DNA, 25 bp, Homo sapien
gcctgaagactagcagccttggata

SEQ ID NO: 4404930 - DNA, 25 bp, Homo sapien
tctgtcctaaagatcactgcctaga

SEQ ID NO: 4404931 - DNA, 25 bp, Homo sapien
caatgaaaggtcactctagaagcac

SEQ ID NO: 4404932 - DNA, 25 bp, Homo sapien
tgaagaagcatgaggaacagtaatc

SEQ ID NO: 4404933 - DNA, 25 bp, Homo sapien
ggctatcttacatggctgattaaaa

SEQ ID NO: 4404934 - DNA, 25 bp, Homo sapien
tcttcaatgaatcctcctatggaaa

SEQ ID NO: 4404935 - DNA, 25 bp, Homo sapien
atgtatatttcaggctcttcaatga

SEQ ID NO: 4404936 - DNA, 25 bp, Homo sapien
taacctttaagctcactaactgtca

SEQ ID NO: 4404937 - DNA, 25 bp, Homo sapien
taacatggttatcaacaggctgaga

SEQ ID NO: 4404938 - DNA, 25 bp, Homo sapien
tttcatcatctccaagtactgcttt

SEQ ID NO: 4404939 - DNA, 25 bp, Homo sapien
ggcccaagaaggaagatgggctaac

SEQ ID NO: 4404940 - DNA, 25 bp, Homo sapien
gaagatgggctaacatggttatcaa

SEQ ID NO: 4404941 - DNA, 25 bp, Homo sapien
aaaaaactggacattatgttgccca

SEQ ID NO: 4404942 - DNA, 25 bp, Homo sapien
ttcaaacacgaaacaagccaatcag

SEQ ID NO: 4404943 - DNA, 25 bp, Homo sapien
tatatatcagaatttggtagagaag

SEQ ID NO: 4404944 - DNA, 25 bp, Homo sapien
gatttactcatcagccaaaaaactg

SEQ ID NO: 4404945 - DNA, 25 bp, Homo sapien
aaaactgtcgtccaggcgtagtggc

SEQ ID NO: 4404946 - DNA, 25 bp, Homo sapien
cacacccagattacttaaagaatta

SEQ ID NO: 4404947 - DNA, 25 bp, Homo sapien
caataagtgcgaaaagactatgtcc

SEQ ID NO: 4404948 - DNA, 25 bp, Homo sapien
gactatgtccttatactagctcaga

SEQ ID NO: 4404949 - DNA, 25 bp, Homo sapien
tcaagtgaattggtatgtagccctc

SEQ ID NO: 4404950 - DNA, 25 bp, Homo sapien
ttacaggtttgcagtatccaacagc

SEQ ID NO: 4404951 - DNA, 25 bp, Homo sapien
caaagtctttcctgggtggtcagta

SEQ ID NO: 4404952 - DNA, 25 bp, Homo sapien
caaaggactttctaccaatggctct

SEQ ID NO: 4404953 - DNA, 25 bp, Homo sapien
agtaacataatcagctgggctcggt

SEQ ID NO: 4404954 - DNA, 25 bp, Homo sapien
aaagtaacataatcagctgggctcg

SEQ ID NO: 4404955 - DNA, 25 bp, Homo sapien
aagtaacataatcagctgggctcgg

SEQ ID NO: 4404956 - DNA, 25 bp, Homo sapien
tcaggtggtgcatagccatcattca

SEQ ID NO: 4404957 - DNA, 25 bp, Homo sapien
tgagtaacttcttctaaacatacgt

SEQ ID NO: 4404958 - DNA, 25 bp, Homo sapien
agttggtgatatcaggtggtgcata

SEQ ID NO: 4404959 - DNA, 25 bp, Homo sapien
tatacatacttgtgggttttgccac

SEQ ID NO: 4404960 - DNA, 25 bp, Homo sapien
tatggctccacattaccatgcaaag

SEQ ID NO: 4404961 - DNA, 25 bp, Homo sapien
tgatgattaacattgctttgcagag

SEQ ID NO: 4404962 - DNA, 25 bp, Homo sapien
attgccctggatagaatctcaacta

SEQ ID NO: 4404963 - DNA, 25 bp, Homo sapien
gttacctcaggtattagcacatagt

SEQ ID NO: 4404964 - DNA, 25 bp, Homo sapien
gtgtgtcaaactccagccagataag

SEQ ID NO: 4404965 - DNA, 25 bp, Homo sapien
ttacagatatgaggaggcaccagac

SEQ ID NO: 4404966 - DNA, 25 bp, Homo sapien
aaatggacaaggagtgagttctgga

SEQ ID NO: 4404967 - DNA, 25 bp, Homo sapien
ccagagtcgtcttctacacattaag

SEQ ID NO: 4404968 - DNA, 25 bp, Homo sapien
gactataggtgtatatcaccaggtc

SEQ ID NO: 4404969 - DNA, 25 bp, Homo sapien
ggtgtatatcaccaggtctggttaa

SEQ ID NO: 4404970 - DNA, 25 bp, Homo sapien
ggactataggtgtatatcaccaggt

SEQ ID NO: 4404971 - DNA, 25 bp, Homo sapien
tataggtgtatatcaccaggtctgg

SEQ ID NO: 4404972 - DNA, 25 bp, Homo sapien
gaaacactctgtgcatacaagccct

SEQ ID NO: 4404973 - DNA, 25 bp, Homo sapien
cctaaggattatgatgaaacactct

SEQ ID NO: 4404974 - DNA, 25 bp, Homo sapien
ggatttgatacagcaaggctagtat

SEQ ID NO: 4404975 - DNA, 25 bp, Homo sapien
aataaaaaagggtcatgcataaaca

SEQ ID NO: 4404976 - DNA, 25 bp, Homo sapien
gctattatccccaggaatatgctga

SEQ ID NO: 4404977 - DNA, 25 bp, Homo sapien
ttgccatccttatgtgctgcacctc

SEQ ID NO: 4404978 - DNA, 25 bp, Homo sapien
cctccagcaatgctaaacccaagac

SEQ ID NO: 4404979 - DNA, 25 bp, Homo sapien
ccaatctgaagtttgccatccttat

SEQ ID NO: 4404980 - DNA, 25 bp, Homo sapien
catttactcgtaatatacagtcatt

SEQ ID NO: 4404981 - DNA, 25 bp, Homo sapien
tacatacaagcgtacaatagaccct

SEQ ID NO: 4404982 - DNA, 25 bp, Homo sapien
tgctatgtgttacatcacgaacatc

SEQ ID NO: 4404983 - DNA, 25 bp, Homo sapien
aacgcttcaactgctttgctatgtg

SEQ ID NO: 4404984 - DNA, 25 bp, Homo sapien
tcatctccaatgtgtgggttgtccg

SEQ ID NO: 4404985 - DNA, 25 bp, Homo sapien
ggctgctccccctgtgataattttg

SEQ ID NO: 4404986 - DNA, 25 bp, Homo sapien
cccctgtgataattttggtaatgaa

SEQ ID NO: 4404987 - DNA, 25 bp, Homo sapien
gtacctcctgcaatgctgaaaccaa

SEQ ID NO: 4404988 - DNA, 25 bp, Homo sapien
ctgaggatagaagaaaaaaaattga

SEQ ID NO: 4404989 - DNA, 25 bp, Homo sapien
gaggatagaagaaaaaaaattgaga

SEQ ID NO: 4404990 - DNA, 25 bp, Homo sapien
tgaggatagaagaaaaaaaattgag

SEQ ID NO: 4404991 - DNA, 25 bp, Homo sapien
caacaaataaaggtatatgggtgag

SEQ ID NO: 4404992 - DNA, 25 bp, Homo sapien
taaaggacgcagaaactgtactaac

SEQ ID NO: 4404993 - DNA, 25 bp, Homo sapien
gacaggttcctgtcattaaaggacg

SEQ ID NO: 4404994 - DNA, 25 bp, Homo sapien
ttaaatggacttgttctggaggaaa

SEQ ID NO: 4404995 - DNA, 25 bp, Homo sapien
tacaggcgtgagtgcagatattctt

SEQ ID NO: 4404996 - DNA, 25 bp, Homo sapien
cccaacttgagcaagtgatccgaat

SEQ ID NO: 4404997 - DNA, 25 bp, Homo sapien
tgcacatctgaattgcaccttcaag

SEQ ID NO: 4404998 - DNA, 25 bp, Homo sapien
gatatacatgtaagagactctctca

SEQ ID NO: 4404999 - DNA, 25 bp, Homo sapien
ttcatattcataatctgcatctgtg

SEQ ID NO: 4405000 - DNA, 25 bp, Homo sapien
tttcaagtgtgatttcttcatattc

SEQ ID NO: 4405001 - DNA, 25 bp, Homo sapien
atattcataatctgcatctgtgcca

SEQ ID NO: 4405002 - DNA, 25 bp, Homo sapien
tcttcatattcataatctgcatctg

SEQ ID NO: 4405003 - DNA, 25 bp, Homo sapien
gcctcctcggtcacaaatttcactt

SEQ ID NO: 4405004 - DNA, 25 bp, Homo sapien
gacatctggaattttgtgcctcctc

SEQ ID NO: 4405005 - DNA, 25 bp, Homo sapien
caaccctttctgtgaacgacttgct

SEQ ID NO: 4405006 - DNA, 25 bp, Homo sapien
gcaattttccacttcgacatctgga

SEQ ID NO: 4405007 - DNA, 25 bp, Homo sapien
tttccaagctatctgtgttgaccag

SEQ ID NO: 4405008 - DNA, 25 bp, Homo sapien
caagctatctgtgttgaccagtact

SEQ ID NO: 4405009 - DNA, 25 bp, Homo sapien
tccaagctatctgtgttgaccagta

SEQ ID NO: 4405010 - DNA, 25 bp, Homo sapien
gctatctgtgttgaccagtactggg

SEQ ID NO: 4405011 - DNA, 25 bp, Homo sapien
taaaaaatggtcaaggaactcatac

SEQ ID NO: 4405012 - DNA, 25 bp, Homo sapien
cacaggctaaaagcgagacactgga

SEQ ID NO: 4405013 - DNA, 25 bp, Homo sapien
cactagcctggctactatgaagaaa

SEQ ID NO: 4405014 - DNA, 25 bp, Homo sapien
tgacaagacatgagacccagaatac

SEQ ID NO: 4405015 - DNA, 25 bp, Homo sapien
tatctttcatgaacttccgtagtgt

SEQ ID NO: 4405016 - DNA, 25 bp, Homo sapien
aagtagtggatcttttaagaataca

SEQ ID NO: 4405017 - DNA, 25 bp, Homo sapien
tacacattgtacttcactaattagg

SEQ ID NO: 4405018 - DNA, 25 bp, Homo sapien
tattctggaaaatgaggtgcactca

SEQ ID NO: 4405019 - DNA, 25 bp, Homo sapien
gagagggaagaacagcttctgttgg

SEQ ID NO: 4405020 - DNA, 25 bp, Homo sapien
ggtaggatgacagtattctcagcag

SEQ ID NO: 4405021 - DNA, 25 bp, Homo sapien
gtggtatggtgggtaggatgacagt

SEQ ID NO: 4405022 - DNA, 25 bp, Homo sapien
ctgtggtatggtgggtaggatgaca

SEQ ID NO: 4405023 - DNA, 25 bp, Homo sapien
ccaaggtggcacaggcgatatggca

SEQ ID NO: 4405024 - DNA, 25 bp, Homo sapien
tactgcatcaatccttagatcaggg

SEQ ID NO: 4405025 - DNA, 25 bp, Homo sapien
catggttgcttctccgtatctctag

SEQ ID NO: 4405026 - DNA, 25 bp, Homo sapien
actccgcatggaggtaatttgccca

SEQ ID NO: 4405027 - DNA, 25 bp, Homo sapien
tctcacagccagtacaacagcgttt

SEQ ID NO: 4405028 - DNA, 25 bp, Homo sapien
taggtcaatcaatctaggatggtcc

SEQ ID NO: 4405029 - DNA, 25 bp, Homo sapien
gaagattgtctacctaccctatacg

SEQ ID NO: 4405030 - DNA, 25 bp, Homo sapien
tataacagagtgaccccatatgcct

SEQ ID NO: 4405031 - DNA, 25 bp, Homo sapien
ctacacgtgactggttttcaccaat

SEQ ID NO: 4405032 - DNA, 25 bp, Homo sapien
tacacgtgactggttttcaccaatt

SEQ ID NO: 4405033 - DNA, 25 bp, Homo sapien
tcacctaggcgttaatcaagtaaag

SEQ ID NO: 4405034 - DNA, 25 bp, Homo sapien
tgtgctggagttctataaaaccctg

SEQ ID NO: 4405035 - DNA, 25 bp, Homo sapien
gaatagctgctatacacacattcaa

SEQ ID NO: 4405036 - DNA, 25 bp, Homo sapien
caagtaaagtctagcagcactgtgc

SEQ ID NO: 4405037 - DNA, 25 bp, Homo sapien
tcagacatcatactctacagcattt

SEQ ID NO: 4405038 - DNA, 25 bp, Homo sapien
catcatactctacagcatttagcac

SEQ ID NO: 4405039 - DNA, 25 bp, Homo sapien
agacatcatactctacagcatttag

SEQ ID NO: 4405040 - DNA, 25 bp, Homo sapien
gacatcatactctacagcatttagc

SEQ ID NO: 4405041 - DNA, 25 bp, Homo sapien
cagcttgcagttcatctgacgagcc

SEQ ID NO: 4405042 - DNA, 25 bp, Homo sapien
ggtggctaccgagatgcagtcaata

SEQ ID NO: 4405043 - DNA, 25 bp, Homo sapien
gctagagctagtattgcctcctcga

SEQ ID NO: 4405044 - DNA, 25 bp, Homo sapien
cgtgaaggttctggctcagcttgca

SEQ ID NO: 4405045 - DNA, 25 bp, Homo sapien
ccgcgagagtatagaagtgtgttgt

SEQ ID NO: 4405046 - DNA, 25 bp, Homo sapien
tgccgcgagagtatagaagtgtgtt

SEQ ID NO: 4405047 - DNA, 25 bp, Homo sapien
ctgccgcgagagtatagaagtgtgt

SEQ ID NO: 4405048 - DNA, 25 bp, Homo sapien
cgcgagagtatagaagtgtgttgtt

SEQ ID NO: 4405049 - DNA, 25 bp, Homo sapien
aaagaatacttctctccgagcatga

SEQ ID NO: 4405050 - DNA, 25 bp, Homo sapien
gggcgaacctacatgaaagaatact

SEQ ID NO: 4405051 - DNA, 25 bp, Homo sapien
tccatcgtgggaatttttagactta

SEQ ID NO: 4405052 - DNA, 25 bp, Homo sapien
tctggagtactaataagcaccttga

SEQ ID NO: 4405053 - DNA, 25 bp, Homo sapien
gctcttgaggaggtgtatcttcatc

SEQ ID NO: 4405054 - DNA, 25 bp, Homo sapien
caattctggacctatcacttcattt

SEQ ID NO: 4405055 - DNA, 25 bp, Homo sapien
tgaaccaattctggacctatcactt

SEQ ID NO: 4405056 - DNA, 25 bp, Homo sapien
gagacatgaaccaattctggaccta

SEQ ID NO: 4405057 - DNA, 25 bp, Homo sapien
actagccaaatactcaatatttagc

SEQ ID NO: 4405058 - DNA, 25 bp, Homo sapien
gccctgataagcaacatgagtttaa

SEQ ID NO: 4405059 - DNA, 25 bp, Homo sapien
catgaagaagccctgataagcaaca

SEQ ID NO: 4405060 - DNA, 25 bp, Homo sapien
tggtttaatacatcagatctcagag

SEQ ID NO: 4405061 - DNA, 25 bp, Homo sapien
cctttccccgtctttatgactagag

SEQ ID NO: 4405062 - DNA, 25 bp, Homo sapien
tgactagagctgcaacagacatctt

SEQ ID NO: 4405063 - DNA, 25 bp, Homo sapien
gagctgcaacagacatctttcaatg

SEQ ID NO: 4405064 - DNA, 25 bp, Homo sapien
cgtctttatgactagagctgcaaca

SEQ ID NO: 4405065 - DNA, 25 bp, Homo sapien
gatcacactgctgtaagagaaccat

SEQ ID NO: 4405066 - DNA, 25 bp, Homo sapien
gctgtctttttgaaacggcaggaat

SEQ ID NO: 4405067 - DNA, 25 bp, Homo sapien
tgatgttacatctcaagaccagaag

SEQ ID NO: 4405068 - DNA, 25 bp, Homo sapien
gaaactatctccaacagaagcgcct

SEQ ID NO: 4405069 - DNA, 25 bp, Homo sapien
tggttagaagcacgagatagggtcc

SEQ ID NO: 4405070 - DNA, 25 bp, Homo sapien
gaattggtctcggaacaatagcgca

SEQ ID NO: 4405071 - DNA, 25 bp, Homo sapien
taaggcaataggaaggcacttggtc

SEQ ID NO: 4405072 - DNA, 25 bp, Homo sapien
taaggcagcctatacagcatttcac

SEQ ID NO: 4405073 - DNA, 25 bp, Homo sapien
tgggctaccctgaaggcatacttgg

SEQ ID NO: 4405074 - DNA, 25 bp, Homo sapien
tgagtaagcaccctgaaagtcaccc

SEQ ID NO: 4405075 - DNA, 25 bp, Homo sapien
ggcccttgctactgatgagacttcg

SEQ ID NO: 4405076 - DNA, 25 bp, Homo sapien
aaaattcttgagttggtgggccatc

SEQ ID NO: 4405077 - DNA, 25 bp, Homo sapien
tcaaggatgggttctttggtccaaa

SEQ ID NO: 4405078 - DNA, 25 bp, Homo sapien
ggagattcctgtgcacccacttggg

SEQ ID NO: 4405079 - DNA, 25 bp, Homo sapien
tacaggtggtctagtgggtccagat

SEQ ID NO: 4405080 - DNA, 25 bp, Homo sapien
tttatctcacgctggagccttcctg

SEQ ID NO: 4405081 - DNA, 25 bp, Homo sapien
ggaatggacctgatacagattgagt

SEQ ID NO: 4405082 - DNA, 25 bp, Homo sapien
taaacagtgtatctgacaagcctag

SEQ ID NO: 4405083 - DNA, 25 bp, Homo sapien
agtggagcctttaatgacgtgggct

SEQ ID NO: 4405084 - DNA, 25 bp, Homo sapien
gctggcatgaccagttagaatctgg

SEQ ID NO: 4405085 - DNA, 25 bp, Homo sapien
tacagaaaagcatattatatcttac

SEQ ID NO: 4405086 - DNA, 25 bp, Homo sapien
aatacagaaaagcatattatatctt

SEQ ID NO: 4405087 - DNA, 25 bp, Homo sapien
tgaaatacagaaaagcatattatat

SEQ ID NO: 4405088 - DNA, 25 bp, Homo sapien
actaacaatgaaatacagaaaagca

SEQ ID NO: 4405089 - DNA, 25 bp, Homo sapien
tgtggttacaatgcacaggcaatcc

SEQ ID NO: 4405090 - DNA, 25 bp, Homo sapien
gtggttacaatgcacaggcaatcca

SEQ ID NO: 4405091 - DNA, 25 bp, Homo sapien
tggttacaatgcacaggcaatccat

SEQ ID NO: 4405092 - DNA, 25 bp, Homo sapien
tttgtggttacaatgcacaggcaat

SEQ ID NO: 4405093 - DNA, 25 bp, Homo sapien
tccaggatccattcttagaggtagc

SEQ ID NO: 4405094 - DNA, 25 bp, Homo sapien
aactgtaactagatctctccaggat

SEQ ID NO: 4405095 - DNA, 25 bp, Homo sapien
gaaaccagagtctgtcacgtgccct

SEQ ID NO: 4405096 - DNA, 25 bp, Homo sapien
taagttgcctagttgaacaaaacat

SEQ ID NO: 4405097 - DNA, 25 bp, Homo sapien
tcaggcacaccttaaacatacttac

SEQ ID NO: 4405098 - DNA, 25 bp, Homo sapien
tattactttgggtcctactgagaag

SEQ ID NO: 4405099 - DNA, 25 bp, Homo sapien
gacagatgcataatgctgaagtctt

SEQ ID NO: 4405100 - DNA, 25 bp, Homo sapien
aactacacaggtaattcaggcacac

SEQ ID NO: 4405101 - DNA, 25 bp, Homo sapien
ctgtacctaattatacgtgctatgc

SEQ ID NO: 4405102 - DNA, 25 bp, Homo sapien
gccacctacgaaaacaatgtcttct

SEQ ID NO: 4405103 - DNA, 25 bp, Homo sapien
atgcatggagctatcgccacctacg

SEQ ID NO: 4405104 - DNA, 25 bp, Homo sapien
cactggacagtaccactgaaaggtc

SEQ ID NO: 4405105 - DNA, 25 bp, Homo sapien
tacaaggtgccaaagtacaacccca

SEQ ID NO: 4405106 - DNA, 25 bp, Homo sapien
gaggtccccacctttacgcaatcca

SEQ ID NO: 4405107 - DNA, 25 bp, Homo sapien
gggaaactgactcactacaaggtgc

SEQ ID NO: 4405108 - DNA, 25 bp, Homo sapien
tgatttggcaatgatcaccaatggg

SEQ ID NO: 4405109 - DNA, 25 bp, Homo sapien
aggaacacttcatgcctgtggcccc

SEQ ID NO: 4405110 - DNA, 25 bp, Homo sapien
agccccaggaacacttcatgcctgt

SEQ ID NO: 4405111 - DNA, 25 bp, Homo sapien
ctttcatcctgagcagccccaggaa

SEQ ID NO: 4405112 - DNA, 25 bp, Homo sapien
ttcatcctgagcagccccaggaaca

SEQ ID NO: 4405113 - DNA, 25 bp, Homo sapien
cacactagcctgaagaacaaagcaa

SEQ ID NO: 4405114 - DNA, 25 bp, Homo sapien
tactcttacgagatgcgtgctgaag

SEQ ID NO: 4405115 - DNA, 25 bp, Homo sapien
ggcaaaaaactgtacccagaggata

SEQ ID NO: 4405116 - DNA, 25 bp, Homo sapien
cagaggatacgagccacctaagaat

SEQ ID NO: 4405117 - DNA, 25 bp, Homo sapien
ttttagacgtgagacgtggtttcac

SEQ ID NO: 4405118 - DNA, 25 bp, Homo sapien
gaaatagacctcagactattataaa

SEQ ID NO: 4405119 - DNA, 25 bp, Homo sapien
cacagcagtgactgactgaagacat

SEQ ID NO: 4405120 - DNA, 25 bp, Homo sapien
ggtcccacctctcattatcttcaca

SEQ ID NO: 4405121 - DNA, 25 bp, Homo sapien
aaaaaacagcttcagaacacatttt

SEQ ID NO: 4405122 - DNA, 25 bp, Homo sapien
aaattgatcaccaaaaaacagcttc

SEQ ID NO: 4405123 - DNA, 25 bp, Homo sapien
aataaattgatcaccaaaaaacagc

SEQ ID NO: 4405124 - DNA, 25 bp, Homo sapien
caaaaaacagcttcagaacacattt

SEQ ID NO: 4405125 - DNA, 25 bp, Homo sapien
gctttgaacgatctatacattttgg

SEQ ID NO: 4405126 - DNA, 25 bp, Homo sapien
gaattggttcagacggctttgaacg

SEQ ID NO: 4405127 - DNA, 25 bp, Homo sapien
tcccaagtattcacaggttgaattg

SEQ ID NO: 4405128 - DNA, 25 bp, Homo sapien
cacaggttgaattggttcagacggc

SEQ ID NO: 4405129 - DNA, 25 bp, Homo sapien
caggcctaatgtagattttatacct

SEQ ID NO: 4405130 - DNA, 25 bp, Homo sapien
acggcagagttgacaggcctaatgt

SEQ ID NO: 4405131 - DNA, 25 bp, Homo sapien
acacggcagagttgacaggcctaat

SEQ ID NO: 4405132 - DNA, 25 bp, Homo sapien
gacaggcctaatgtagattttatac

SEQ ID NO: 4405133 - DNA, 25 bp, Homo sapien
ggcttagttttgaacgatattcctc

SEQ ID NO: 4405134 - DNA, 25 bp, Homo sapien
tgctctgaaatatgttaataacccg

SEQ ID NO: 4405135 - DNA, 25 bp, Homo sapien
ttcctccaaaaggtgcaatgctctc

SEQ ID NO: 4405136 - DNA, 25 bp, Homo sapien
ttaaagcctgaaagaggttgctctg

SEQ ID NO: 4405137 - DNA, 25 bp, Homo sapien
agaaaaagcagagcctgattaaaac

SEQ ID NO: 4405138 - DNA, 25 bp, Homo sapien
agaagaaaaagcagagcctgattaa

SEQ ID NO: 4405139 - DNA, 25 bp, Homo sapien
aaaaagcagagcctgattaaaactc

SEQ ID NO: 4405140 - DNA, 25 bp, Homo sapien
aaaagcagagcctgattaaaactct

SEQ ID NO: 4405141 - DNA, 25 bp, Homo sapien
atctacaatttgtcatcataatcca

SEQ ID NO: 4405142 - DNA, 25 bp, Homo sapien
gcaaaagcagattatctacaatttg

SEQ ID NO: 4405143 - DNA, 25 bp, Homo sapien
tctacaatttgtcatcataatccaa

SEQ ID NO: 4405144 - DNA, 25 bp, Homo sapien
tctccagaatcaggaagagggcaca

SEQ ID NO: 4405145 - DNA, 25 bp, Homo sapien
tccagaatcaggaagagggcacaca

SEQ ID NO: 4405146 - DNA, 25 bp, Homo sapien
ttttctccagaatcaggaagagggc

SEQ ID NO: 4405147 - DNA, 25 bp, Homo sapien
ccagaatcaggaagagggcacacac

SEQ ID NO: 4405148 - DNA, 25 bp, Homo sapien
tatcgaaatagaaaaccctcgcagc

SEQ ID NO: 4405149 - DNA, 25 bp, Homo sapien
tagcattttcccctatcgaaataga

SEQ ID NO: 4405150 - DNA, 25 bp, Homo sapien
tcgcagcctatttgaaaaccccacg

SEQ ID NO: 4405151 - DNA, 25 bp, Homo sapien
aaggatagaatcatgttaaactagc

SEQ ID NO: 4405152 - DNA, 25 bp, Homo sapien
ttccaaactctcctcgaaagcgtcc

SEQ ID NO: 4405153 - DNA, 25 bp, Homo sapien
tctgtcaacgtggaaagcttttcct

SEQ ID NO: 4405154 - DNA, 25 bp, Homo sapien
gaaagagtctcaaaacgcagcagtt

SEQ ID NO: 4405155 - DNA, 25 bp, Homo sapien
caaaacgcagcagttgtctgtcaac

SEQ ID NO: 4405156 - DNA, 25 bp, Homo sapien
gggtgaagcgctccgacccttggcc

SEQ ID NO: 4405157 - DNA, 25 bp, Homo sapien
accagcgggactggccgcccgccct

SEQ ID NO: 4405158 - DNA, 25 bp, Homo sapien
gcgctgagaggggaccagcgggact

SEQ ID NO: 4405159 - DNA, 25 bp, Homo sapien
ctgctactgggtacgggcgggtgaa

SEQ ID NO: 4405160 - DNA, 25 bp, Homo sapien
ctcgcgccccgcatgcacacctccg

SEQ ID NO: 4405161 - DNA, 25 bp, Homo sapien
ccgcgacgccctcgcgccccgcatg

SEQ ID NO: 4405162 - DNA, 25 bp, Homo sapien
gccgctctccgcgacgccctcgcgc

SEQ ID NO: 4405163 - DNA, 25 bp, Homo sapien
ccgcatgcacacctccgcgggcccc

SEQ ID NO: 4405164 - DNA, 25 bp, Homo sapien
tcggaactggggtgcgccccggcca

SEQ ID NO: 4405165 - DNA, 25 bp, Homo sapien
cacaaagttccggtgagcggcgtgc

SEQ ID NO: 4405166 - DNA, 25 bp, Homo sapien
ggtgagcggcgtgcgctcggaactg

SEQ ID NO: 4405167 - DNA, 25 bp, Homo sapien
ctgcggcgccgccacaaagttccgg

SEQ ID NO: 4405168 - DNA, 25 bp, Homo sapien
gctcgcccagttgctgccgcacgcc

SEQ ID NO: 4405169 - DNA, 25 bp, Homo sapien
tcgtcctccttctcggccgcgccgc

SEQ ID NO: 4405170 - DNA, 25 bp, Homo sapien
cggcccgctcgcccagttgctgccg

SEQ ID NO: 4405171 - DNA, 25 bp, Homo sapien
cccgctcgcccagttgctgccgcac

SEQ ID NO: 4405172 - DNA, 25 bp, Homo sapien
ccgaaactttccgccaagatggcgg

SEQ ID NO: 4405173 - DNA, 25 bp, Homo sapien
cgaaactttccgccaagatggcggc

SEQ ID NO: 4405174 - DNA, 25 bp, Homo sapien
cccgaaactttccgccaagatggcg

SEQ ID NO: 4405175 - DNA, 25 bp, Homo sapien
gaaactttccgccaagatggcggcc

SEQ ID NO: 4405176 - DNA, 25 bp, Homo sapien
tacaccagatccaaggcgcacatac

SEQ ID NO: 4405177 - DNA, 25 bp, Homo sapien
gcgcgtcccgcagttccgaactaaa

SEQ ID NO: 4405178 - DNA, 25 bp, Homo sapien
tgtctgaagagaggcgtgacctcgc

SEQ ID NO: 4405179 - DNA, 25 bp, Homo sapien
ctaaacgcgccaggccgggaaggct

SEQ ID NO: 4405180 - DNA, 25 bp, Homo sapien
gccgtttccaactccgcggcagaga

SEQ ID NO: 4405181 - DNA, 25 bp, Homo sapien
tgccgtttccaactccgcggcagag

SEQ ID NO: 4405182 - DNA, 25 bp, Homo sapien
gcagtgccgtttccaactccgcggc

SEQ ID NO: 4405183 - DNA, 25 bp, Homo sapien
agtgccgtttccaactccgcggcag

SEQ ID NO: 4405184 - DNA, 25 bp, Homo sapien
tcgtgcgcacctccgggcggaatta

SEQ ID NO: 4405185 - DNA, 25 bp, Homo sapien
ggtgacgaggacctccctattagga

SEQ ID NO: 4405186 - DNA, 25 bp, Homo sapien
ctcggccagcgctgcaggtttgttt

SEQ ID NO: 4405187 - DNA, 25 bp, Homo sapien
aagtcactgcccacgtcttcgaact

SEQ ID NO: 4405188 - DNA, 25 bp, Homo sapien
agaataaagctgtatctctattctt

SEQ ID NO: 4405189 - DNA, 25 bp, Homo sapien
tatttaataagaaatgctaccataa

SEQ ID NO: 4405190 - DNA, 25 bp, Homo sapien
gatgggcctttaccaattactaatg

SEQ ID NO: 4405191 - DNA, 25 bp, Homo sapien
gaaatgctaccataataatttggag

SEQ ID NO: 4405192 - DNA, 25 bp, Homo sapien
ctaggatcgcttgaggaacacaacc

SEQ ID NO: 4405193 - DNA, 25 bp, Homo sapien
ggtcccaagtgccaggaagttcaga

SEQ ID NO: 4405194 - DNA, 25 bp, Homo sapien
tgtgaccttatactggaaactcagg

SEQ ID NO: 4405195 - DNA, 25 bp, Homo sapien
ttcagatcaggttgagggcaagctc

SEQ ID NO: 4405196 - DNA, 25 bp, Homo sapien
taaggtggcgagaactcaggggatg

SEQ ID NO: 4405197 - DNA, 25 bp, Homo sapien
ggtggcgagaactcaggggatggga

SEQ ID NO: 4405198 - DNA, 25 bp, Homo sapien
ggcgagaactcaggggatgggacaa

SEQ ID NO: 4405199 - DNA, 25 bp, Homo sapien
ctaaggtggcgagaactcaggggat

SEQ ID NO: 4405200 - DNA, 25 bp, Homo sapien
catggccagtgccagctgcacaaac

SEQ ID NO: 4405201 - DNA, 25 bp, Homo sapien
tccatggccagtgccagctgcacaa

SEQ ID NO: 4405202 - DNA, 25 bp, Homo sapien
ccagaggcggctctccatggccagt

SEQ ID NO: 4405203 - DNA, 25 bp, Homo sapien
ccggtcaactcccagaggcggctct

SEQ ID NO: 4405204 - DNA, 25 bp, Homo sapien
gtggccagagcggtacttcccttag

SEQ ID NO: 4405205 - DNA, 25 bp, Homo sapien
cagagcggtacttcccttagaatct

SEQ ID NO: 4405206 - DNA, 25 bp, Homo sapien
tcccttagaatctcgtccaggctct

SEQ ID NO: 4405207 - DNA, 25 bp, Homo sapien
cctccttagctttttgggggctgag

SEQ ID NO: 4405208 - DNA, 25 bp, Homo sapien
agctcttaatggatttcttttgacc

SEQ ID NO: 4405209 - DNA, 25 bp, Homo sapien
ttgccgaagctccagagacatgacc

SEQ ID NO: 4405210 - DNA, 25 bp, Homo sapien
gactgattggaacagcattgctgct

SEQ ID NO: 4405211 - DNA, 25 bp, Homo sapien
agacatgaccgtgggcctgcgctac

SEQ ID NO: 4405212 - DNA, 25 bp, Homo sapien
cgcagatactcagcctgcaggaggc

SEQ ID NO: 4405213 - DNA, 25 bp, Homo sapien
gggaggagtatccaagcgcagatac

SEQ ID NO: 4405214 - DNA, 25 bp, Homo sapien
ccttggctgtggatgtaggcctctg

SEQ ID NO: 4405215 - DNA, 25 bp, Homo sapien
ggcctggggtctgcaatccacggca

SEQ ID NO: 4405216 - DNA, 25 bp, Homo sapien
cattgcaggagcttgtcgttgtcat

SEQ ID NO: 4405217 - DNA, 25 bp, Homo sapien
cactcgtaccccaagacattgcagg

SEQ ID NO: 4405218 - DNA, 25 bp, Homo sapien
cactcacggcatttgcccactcgta

SEQ ID NO: 4405219 - DNA, 25 bp, Homo sapien
catccttgctctgcatcactcacgg

SEQ ID NO: 4405220 - DNA, 25 bp, Homo sapien
gatttttctcttctcgtgaatggga

SEQ ID NO: 4405221 - DNA, 25 bp, Homo sapien
acaatctctgttcttcaaagttggc

SEQ ID NO: 4405222 - DNA, 25 bp, Homo sapien
aatgggaatggcattaagtgactca

SEQ ID NO: 4405223 - DNA, 25 bp, Homo sapien
ttcctctcctcgagcagcaaaggcg

SEQ ID NO: 4405224 - DNA, 25 bp, Homo sapien
tgcatacatggtgcaggcccctcat

SEQ ID NO: 4405225 - DNA, 25 bp, Homo sapien
gattcaaagtgtgtaggcacccagg

SEQ ID NO: 4405226 - DNA, 25 bp, Homo sapien
tatcaagcatttgtaaaagcccggg

SEQ ID NO: 4405227 - DNA, 25 bp, Homo sapien
cacccagggcctgcgatgagtcttg

SEQ ID NO: 4405228 - DNA, 25 bp, Homo sapien
gagcaggggaagtatatcctcatct

SEQ ID NO: 4405229 - DNA, 25 bp, Homo sapien
catgagagagcaggggaagtatatc

SEQ ID NO: 4405230 - DNA, 25 bp, Homo sapien
ggaagtatatcctcatctctccccg

SEQ ID NO: 4405231 - DNA, 25 bp, Homo sapien
cccatgagagagcaggggaagtata

SEQ ID NO: 4405232 - DNA, 25 bp, Homo sapien
gttctttcgatgagtgtaatctctc

SEQ ID NO: 4405233 - DNA, 25 bp, Homo sapien
cctgagttctttcgatgagtgtaat

SEQ ID NO: 4405234 - DNA, 25 bp, Homo sapien
tcctgagttctttcgatgagtgtaa

SEQ ID NO: 4405235 - DNA, 25 bp, Homo sapien
gagttctttcgatgagtgtaatctc

SEQ ID NO: 4405236 - DNA, 25 bp, Homo sapien
acagcactgacgtgtctgaacccgc

SEQ ID NO: 4405237 - DNA, 25 bp, Homo sapien
tgagctggagcacccgtcatcttca

SEQ ID NO: 4405238 - DNA, 25 bp, Homo sapien
gctcacagtctcctcattatcacgg

SEQ ID NO: 4405239 - DNA, 25 bp, Homo sapien
gatgactaaccatggcctgctcaca

SEQ ID NO: 4405240 - DNA, 25 bp, Homo sapien
gatgagcctgacgtggaactgtccc

SEQ ID NO: 4405241 - DNA, 25 bp, Homo sapien
gagtctagccccacttaccattagg

SEQ ID NO: 4405242 - DNA, 25 bp, Homo sapien
gaagtcactgacacatggctatgga

SEQ ID NO: 4405243 - DNA, 25 bp, Homo sapien
tagtaatggaacagcctagatcccg

SEQ ID NO: 4405244 - DNA, 25 bp, Homo sapien
tgccatctcttgcacccgagctgaa

SEQ ID NO: 4405245 - DNA, 25 bp, Homo sapien
attttgccatctcttgcacccgagc

SEQ ID NO: 4405246 - DNA, 25 bp, Homo sapien
ttgcacccgagctgaacttctggct

SEQ ID NO: 4405247 - DNA, 25 bp, Homo sapien
tctcttgcacccgagctgaacttct

SEQ ID NO: 4405248 - DNA, 25 bp, Homo sapien
tgagtcctgcttcgatttctggagc

SEQ ID NO: 4405249 - DNA, 25 bp, Homo sapien
cctgcttcgatttctggagcttaaa

SEQ ID NO: 4405250 - DNA, 25 bp, Homo sapien
gcttcgatttctggagcttaaacat

SEQ ID NO: 4405251 - DNA, 25 bp, Homo sapien
tctttgagtcctgcttcgatttctg

SEQ ID NO: 4405252 - DNA, 25 bp, Homo sapien
tgagagcctgccattctggaacctt

SEQ ID NO: 4405253 - DNA, 25 bp, Homo sapien
ccaccaccagccctttgagagcctg

SEQ ID NO: 4405254 - DNA, 25 bp, Homo sapien
ttccagccacagtcttaagatgatg

SEQ ID NO: 4405255 - DNA, 25 bp, Homo sapien
tcttttccagccacagtcttaagat

SEQ ID NO: 4405256 - DNA, 25 bp, Homo sapien
tgctgctgctgtcaatgatgaagca

SEQ ID NO: 4405257 - DNA, 25 bp, Homo sapien
ctgctgctgtcaatgatgaagcatc

SEQ ID NO: 4405258 - DNA, 25 bp, Homo sapien
gctgctgctgtcaatgatgaagcat

SEQ ID NO: 4405259 - DNA, 25 bp, Homo sapien
tgggaaaaggggaggtgagctctgg

SEQ ID NO: 4405260 - DNA, 25 bp, Homo sapien
ggaggtgagctctgggttttcaaaa

SEQ ID NO: 4405261 - DNA, 25 bp, Homo sapien
ggtgagctctgggttttcaaaagcc

SEQ ID NO: 4405262 - DNA, 25 bp, Homo sapien
agctctgggttttcaaaagccattt

SEQ ID NO: 4405263 - DNA, 25 bp, Homo sapien
tcttccatagtttagagaagatgcc

SEQ ID NO: 4405264 - DNA, 25 bp, Homo sapien
tatggacgatggaagacataacaga

SEQ ID NO: 4405265 - DNA, 25 bp, Homo sapien
tgcttttcttgtggccaagccatga

SEQ ID NO: 4405266 - DNA, 25 bp, Homo sapien
caagccatgagggtcactgccctat

SEQ ID NO: 4405267 - DNA, 25 bp, Homo sapien
gcacaggacaagcaagaactccaag

SEQ ID NO: 4405268 - DNA, 25 bp, Homo sapien
gataaaaacctcagaggattgtgtg

SEQ ID NO: 4405269 - DNA, 25 bp, Homo sapien
ttgataaaaacctcagaggattgtg

SEQ ID NO: 4405270 - DNA, 25 bp, Homo sapien
ataaaaacctcagaggattgtgtga

SEQ ID NO: 4405271 - DNA, 25 bp, Homo sapien
tgataaaaacctcagaggattgtgt

SEQ ID NO: 4405272 - DNA, 25 bp, Homo sapien
cagggtatgaacatttcttaggaga

SEQ ID NO: 4405273 - DNA, 25 bp, Homo sapien
aatgaattcatactcttggaacttc

SEQ ID NO: 4405274 - DNA, 25 bp, Homo sapien
tgttgcaaaaggtacatgtcatgaa

SEQ ID NO: 4405275 - DNA, 25 bp, Homo sapien
gttgcaaaaggtacatgtcatgaaa

SEQ ID NO: 4405276 - DNA, 25 bp, Homo sapien
tgaaatgaattcatactcttggaac

SEQ ID NO: 4405277 - DNA, 25 bp, Homo sapien
atagcaactgaagacgaacttggag

SEQ ID NO: 4405278 - DNA, 25 bp, Homo sapien
agctttgacgcagacatgtccttga

SEQ ID NO: 4405279 - DNA, 25 bp, Homo sapien
agaaaagctttgacgcagacatgtc

SEQ ID NO: 4405280 - DNA, 25 bp, Homo sapien
aatagcaactgaagacgaacttgga

SEQ ID NO: 4405281 - DNA, 25 bp, Homo sapien
cctcctcacgaatcttgactgagca

SEQ ID NO: 4405282 - DNA, 25 bp, Homo sapien
tgggtcttgtgagcgtgtcttcatc

SEQ ID NO: 4405283 - DNA, 25 bp, Homo sapien
cttgtgagcgtgtcttcatcaatta

SEQ ID NO: 4405284 - DNA, 25 bp, Homo sapien
gcatctttgggtcttgtgagcgtgt

SEQ ID NO: 4405285 - DNA, 25 bp, Homo sapien
aaaggatgacgagcaactctgaata

SEQ ID NO: 4405286 - DNA, 25 bp, Homo sapien
aggatgacgagcaactctgaatatt

SEQ ID NO: 4405287 - DNA, 25 bp, Homo sapien
aaggatgacgagcaactctgaatat

SEQ ID NO: 4405288 - DNA, 25 bp, Homo sapien
cgggaaagtaatgacttctgactgg

SEQ ID NO: 4405289 - DNA, 25 bp, Homo sapien
aaagtaatgacttctgactggaagc

SEQ ID NO: 4405290 - DNA, 25 bp, Homo sapien
ctacgggaaagtaatgacttctgac

SEQ ID NO: 4405291 - DNA, 25 bp, Homo sapien
ggaaagtaatgacttctgactggaa

SEQ ID NO: 4405292 - DNA, 25 bp, Homo sapien
gaccagggacttctgacaggagacc

SEQ ID NO: 4405293 - DNA, 25 bp, Homo sapien
gaccagggatttctgacaggagacc

SEQ ID NO: 4405294 - DNA, 25 bp, Homo sapien
gagaccagggatttctgacaggaga

SEQ ID NO: 4405295 - DNA, 25 bp, Homo sapien
gagaccagggacttctgacaggaga

SEQ ID NO: 4405296 - DNA, 25 bp, Homo sapien
tacttcccaccggatgcggggctcg

SEQ ID NO: 4405297 - DNA, 25 bp, Homo sapien
agatgcccggaaccgctgcagcagc

SEQ ID NO: 4405298 - DNA, 25 bp, Homo sapien
ggaagtgccagactcctacttccca

SEQ ID NO: 4405299 - DNA, 25 bp, Homo sapien
gccgcgagccgggagaattctaata

SEQ ID NO: 4405300 - DNA, 25 bp, Homo sapien
cctcacagttagaccaggctcccct

SEQ ID NO: 4405301 - DNA, 25 bp, Homo sapien
tcctcacagttagaccaggctcccc

SEQ ID NO: 4405302 - DNA, 25 bp, Homo sapien
ctcacagttagaccaggctcccctc

SEQ ID NO: 4405303 - DNA, 25 bp, Homo sapien
tcagacccctggtttgaatcctgaa

SEQ ID NO: 4405304 - DNA, 25 bp, Homo sapien
ctcagacccctggtttgaatcctga

SEQ ID NO: 4405305 - DNA, 25 bp, Homo sapien
ctggtttgaatcctgaagccaacct

SEQ ID NO: 4405306 - DNA, 25 bp, Homo sapien
ttgaatcctgaagccaacctcaggg

SEQ ID NO: 4405307 - DNA, 25 bp, Homo sapien
gatgacttcatttgacacacgaggc

SEQ ID NO: 4405308 - DNA, 25 bp, Homo sapien
atccaggtgctcagaccgcagtgca

SEQ ID NO: 4405309 - DNA, 25 bp, Homo sapien
tcttgtgacatctcacgaggtaggg

SEQ ID NO: 4405310 - DNA, 25 bp, Homo sapien
gttttataacactcggtgccaagca

SEQ ID NO: 4405311 - DNA, 25 bp, Homo sapien
aagcacgtgggtgccacacatgcag

SEQ ID NO: 4405312 - DNA, 25 bp, Homo sapien
tgttcggcttctgcacgtagccaag

SEQ ID NO: 4405313 - DNA, 25 bp, Homo sapien
cagcagggaagtgatgttcggcttc

SEQ ID NO: 4405314 - DNA, 25 bp, Homo sapien
gacactccgagagtggacggcgcca

SEQ ID NO: 4405315 - DNA, 25 bp, Homo sapien
gcacaggtgcgcttcagagaaaaat

SEQ ID NO: 4405316 - DNA, 25 bp, Homo sapien
caaagccaggcaataaaccagtggt

SEQ ID NO: 4405317 - DNA, 25 bp, Homo sapien
cacaaaggggctagcggataggtaa

SEQ ID NO: 4405318 - DNA, 25 bp, Homo sapien
ttcaaacgcagagctaaccctcggc

SEQ ID NO: 4405319 - DNA, 25 bp, Homo sapien
cagctgtccatgaggggctccaagg

SEQ ID NO: 4405320 - DNA, 25 bp, Homo sapien
tcagctgtccatgaggggctccaag

SEQ ID NO: 4405321 - DNA, 25 bp, Homo sapien
tccattggaacgagagcccatcagt

SEQ ID NO: 4405322 - DNA, 25 bp, Homo sapien
gttgcagcagagtaaatgacccagt

SEQ ID NO: 4405323 - DNA, 25 bp, Homo sapien
gaagagtctgatgcccctcgtgaca

SEQ ID NO: 4405324 - DNA, 25 bp, Homo sapien
tagacagggcacaacgaagagattc

SEQ ID NO: 4405325 - DNA, 25 bp, Homo sapien
gcagcagagttgagcggcacttcca

SEQ ID NO: 4405326 - DNA, 25 bp, Homo sapien
gtacagcagtgtacccagtgcagtc

SEQ ID NO: 4405327 - DNA, 25 bp, Homo sapien
acgcccgcacttgtctggcagcaga

SEQ ID NO: 4405328 - DNA, 25 bp, Homo sapien
tggccggagggtggtggccggtaca

SEQ ID NO: 4405329 - DNA, 25 bp, Homo sapien
gaaactggggtggctacagctgaag

SEQ ID NO: 4405330 - DNA, 25 bp, Homo sapien
ctgaaactggggtggctacagctga

SEQ ID NO: 4405331 - DNA, 25 bp, Homo sapien
agctgagaagagcaaccagcctgct

SEQ ID NO: 4405332 - DNA, 25 bp, Homo sapien
ctgagaagagcaaccagcctgctgc

SEQ ID NO: 4405333 - DNA, 25 bp, Homo sapien
cgaaactgcggactaggaggaagct

SEQ ID NO: 4405334 - DNA, 25 bp, Homo sapien
aagagaagccagatagccgaggtct

SEQ ID NO: 4405335 - DNA, 25 bp, Homo sapien
cgaggttctgactgcgctgagtcca

SEQ ID NO: 4405336 - DNA, 25 bp, Homo sapien
cagcatctcctgaggttggtcccca

SEQ ID NO: 4405337 - DNA, 25 bp, Homo sapien
gacttcccgctggaaggatactggg

SEQ ID NO: 4405338 - DNA, 25 bp, Homo sapien
gggaatggccttgacagagccgact

SEQ ID NO: 4405339 - DNA, 25 bp, Homo sapien
tataaccctcaagccctttgagggc

SEQ ID NO: 4405340 - DNA, 25 bp, Homo sapien
tcaagcacggcgctcatataaccct

SEQ ID NO: 4405341 - DNA, 25 bp, Homo sapien
gggtctggctcgagtggcaggaccc

SEQ ID NO: 4405342 - DNA, 25 bp, Homo sapien
aggagggtctggctcgagtggcagg

SEQ ID NO: 4405343 - DNA, 25 bp, Homo sapien
ggtctggctcgagtggcaggacccc

SEQ ID NO: 4405344 - DNA, 25 bp, Homo sapien
gatcctgctagaacaaggtccacgg

SEQ ID NO: 4405345 - DNA, 25 bp, Homo sapien
acagtggtgtttggcttcggtccca

SEQ ID NO: 4405346 - DNA, 25 bp, Homo sapien
ggttatgtaactgcagcggccacca

SEQ ID NO: 4405347 - DNA, 25 bp, Homo sapien
gaaacgcggagtctgattcgaaggc

SEQ ID NO: 4405348 - DNA, 25 bp, Homo sapien
aacttatccccttagccagagagca

SEQ ID NO: 4405349 - DNA, 25 bp, Homo sapien
tgtgtgtaagcaccacgtgaggcaa

SEQ ID NO: 4405350 - DNA, 25 bp, Homo sapien
catgcagaggtaccagtgggcactt

SEQ ID NO: 4405351 - DNA, 25 bp, Homo sapien
gaagtatttccacagccgtggcagg

SEQ ID NO: 4405352 - DNA, 25 bp, Homo sapien
gagttgactatatgggttcctccct

SEQ ID NO: 4405353 - DNA, 25 bp, Homo sapien
tctccggagagatagattcaccatg

SEQ ID NO: 4405354 - DNA, 25 bp, Homo sapien
tcctggcatggtggataatccacac

SEQ ID NO: 4405355 - DNA, 25 bp, Homo sapien
tgccctgagatttagaggcctctgc

SEQ ID NO: 4405356 - DNA, 25 bp, Homo sapien
tgtagatcatgtcggagatggctcc

SEQ ID NO: 4405357 - DNA, 25 bp, Homo sapien
aagtgggtcatgatctgcattcgca

SEQ ID NO: 4405358 - DNA, 25 bp, Homo sapien
tcagggcgtgtgtgacagcatcgat

SEQ ID NO: 4405359 - DNA, 25 bp, Homo sapien
gggtacatctcatagcgcaggcagt

SEQ ID NO: 4405360 - DNA, 25 bp, Homo sapien
taatgggcaacacgcaactgactca

SEQ ID NO: 4405361 - DNA, 25 bp, Homo sapien
tgacacagcgggcagaagtctggca

SEQ ID NO: 4405362 - DNA, 25 bp, Homo sapien
taagccgttactgccctatgacaca

SEQ ID NO: 4405363 - DNA, 25 bp, Homo sapien
caaaaaccagatcaagcccgatgcg

SEQ ID NO: 4405364 - DNA, 25 bp, Homo sapien
tggggctgcagctgggagggagccc

SEQ ID NO: 4405365 - DNA, 25 bp, Homo sapien
gctgggagggagccccgggacagcc

SEQ ID NO: 4405366 - DNA, 25 bp, Homo sapien
ctggggctgcagctgggagggagcc

SEQ ID NO: 4405367 - DNA, 25 bp, Homo sapien
tgcagctgggagggagccccgggac

SEQ ID NO: 4405368 - DNA, 25 bp, Homo sapien
ctctgctgagttgtggacattggag

SEQ ID NO: 4405369 - DNA, 25 bp, Homo sapien
gttgtggacattggagctgctggga

SEQ ID NO: 4405370 - DNA, 25 bp, Homo sapien
ctgagttgtggacattggagctgct

SEQ ID NO: 4405371 - DNA, 25 bp, Homo sapien
ctgctgagttgtggacattggagct

SEQ ID NO: 4405372 - DNA, 25 bp, Homo sapien
caaagatgaacacgtggggcaggtt

SEQ ID NO: 4405373 - DNA, 25 bp, Homo sapien
agcaaagatgaacacgtggggcagg

SEQ ID NO: 4405374 - DNA, 25 bp, Homo sapien
gcaggagggagctccctttcccact

SEQ ID NO: 4405375 - DNA, 25 bp, Homo sapien
gggcaggagggagctccctttccca

SEQ ID NO: 4405376 - DNA, 25 bp, Homo sapien
gagatgccggcattgttaacgaggc

SEQ ID NO: 4405377 - DNA, 25 bp, Homo sapien
gtgccccaaaggttcacttctgcca

SEQ ID NO: 4405378 - DNA, 25 bp, Homo sapien
acctccccgaacgttgagatgccgg

SEQ ID NO: 4405379 - DNA, 25 bp, Homo sapien
ggagaaaggatttcgtcatccgcac

SEQ ID NO: 4405380 - DNA, 25 bp, Homo sapien
gacccccccgatcagtcacttcctg

SEQ ID NO: 4405381 - DNA, 25 bp, Homo sapien
acccccccgatcagtcacttcctgc

SEQ ID NO: 4405382 - DNA, 25 bp, Homo sapien
gtcacttcctgctctatggtctcca

SEQ ID NO: 4405383 - DNA, 25 bp, Homo sapien
ccctcaggctgacccccccaatcag

SEQ ID NO: 4405384 - DNA, 25 bp, Homo sapien
gacccccccaatcagtcacttcctg

SEQ ID NO: 4405385 - DNA, 25 bp, Homo sapien
cagtcacttcctgctctatggtctc

SEQ ID NO: 4405386 - DNA, 25 bp, Homo sapien
gacccttctgacatgtcctgcatgg

SEQ ID NO: 4405387 - DNA, 25 bp, Homo sapien
gtcaaactcgccaaccaaatgtgcc

SEQ ID NO: 4405388 - DNA, 25 bp, Homo sapien
tccctggagttcacagccggcattg

SEQ ID NO: 4405389 - DNA, 25 bp, Homo sapien
cggccactgcgggtcggaacgctct

SEQ ID NO: 4405390 - DNA, 25 bp, Homo sapien
agctggacggttctcaatcggtcac

SEQ ID NO: 4405391 - DNA, 25 bp, Homo sapien
cacctcttcgctgctgcagacattg

SEQ ID NO: 4405392 - DNA, 25 bp, Homo sapien
ggtcactgtttaggctgtccagctc

SEQ ID NO: 4405393 - DNA, 25 bp, Homo sapien
tccttcaggctcgagcggacaatct

SEQ ID NO: 4405394 - DNA, 25 bp, Homo sapien
cctgaggactcctgtcaaggcagga

SEQ ID NO: 4405395 - DNA, 25 bp, Homo sapien
caagctatgtgccacagacacaacc

SEQ ID NO: 4405396 - DNA, 25 bp, Homo sapien
gacatgtcaggaattaccacgtggg

SEQ ID NO: 4405397 - DNA, 25 bp, Homo sapien
taatcctgagcactgatgacctatc

SEQ ID NO: 4405398 - DNA, 25 bp, Homo sapien
taggccgggtacatattgtctcaga

SEQ ID NO: 4405399 - DNA, 25 bp, Homo sapien
tgcatgtgctgaaatgacccaggag

SEQ ID NO: 4405400 - DNA, 25 bp, Homo sapien
taaaattacatgacccctaggatgg

SEQ ID NO: 4405401 - DNA, 25 bp, Homo sapien
gaatcgggctagaagcaaattcccc

SEQ ID NO: 4405402 - DNA, 25 bp, Homo sapien
aaggaagccttttgaatgcagatgc

SEQ ID NO: 4405403 - DNA, 25 bp, Homo sapien
caaggaagccttttgaatgcagatg

SEQ ID NO: 4405404 - DNA, 25 bp, Homo sapien
acaaggaagccttttgaatgcagat

SEQ ID NO: 4405405 - DNA, 25 bp, Homo sapien
gattccatgttaggaaccggtggta

SEQ ID NO: 4405406 - DNA, 25 bp, Homo sapien
agattccatgttaggaaccggtggt

SEQ ID NO: 4405407 - DNA, 25 bp, Homo sapien
tggtacaggggcaaagtgaccaggc

SEQ ID NO: 4405408 - DNA, 25 bp, Homo sapien
caggggcaaagtgaccaggcctctc

SEQ ID NO: 4405409 - DNA, 25 bp, Homo sapien
gcataagtccgacggccaatcggga

SEQ ID NO: 4405410 - DNA, 25 bp, Homo sapien
cgccgcactggcataagtccgacgg

SEQ ID NO: 4405411 - DNA, 25 bp, Homo sapien
aagtagaaccaagcaatagtgggcg

SEQ ID NO: 4405412 - DNA, 25 bp, Homo sapien
cggccaatcgggataaaggaagtag

SEQ ID NO: 4405413 - DNA, 25 bp, Homo sapien
gaagagccttcctgagaataaagcc

SEQ ID NO: 4405414 - DNA, 25 bp, Homo sapien
gaagccgtgagtacaaggacagact

SEQ ID NO: 4405415 - DNA, 25 bp, Homo sapien
tggtacaactgagtaagaggccctc

SEQ ID NO: 4405416 - DNA, 25 bp, Homo sapien
ttgggcaggctctgctaaaccctgg

SEQ ID NO: 4405417 - DNA, 25 bp, Homo sapien
gagttgaagtgcaaagtgccagcag

SEQ ID NO: 4405418 - DNA, 25 bp, Homo sapien
cacgtgggacaacagaggaattttc

SEQ ID NO: 4405419 - DNA, 25 bp, Homo sapien
tatcctctgtagcagggtctactgc

SEQ ID NO: 4405420 - DNA, 25 bp, Homo sapien
gggtggcttaccaacaacagactta

SEQ ID NO: 4405421 - DNA, 25 bp, Homo sapien
tggtatttctgggttgccggctgct

SEQ ID NO: 4405422 - DNA, 25 bp, Homo sapien
tcccagaagcggaggtcctgttagt

SEQ ID NO: 4405423 - DNA, 25 bp, Homo sapien
tgttctgtcctactgcactggtcat

SEQ ID NO: 4405424 - DNA, 25 bp, Homo sapien
tcacccttaagtatgttagctgaag

SEQ ID NO: 4405425 - DNA, 25 bp, Homo sapien
ccatttgacgccattcaaattttgt

SEQ ID NO: 4405426 - DNA, 25 bp, Homo sapien
catttgacgccattcaaattttgtt

SEQ ID NO: 4405427 - DNA, 25 bp, Homo sapien
tgtccttttgtactgccacagagga

SEQ ID NO: 4405428 - DNA, 25 bp, Homo sapien
cactagacagaaatgagggttcact

SEQ ID NO: 4405429 - DNA, 25 bp, Homo sapien
tgtggtcggtacacccaaagcttgt

SEQ ID NO: 4405430 - DNA, 25 bp, Homo sapien
taagtccttgtgcacggatggtctc

SEQ ID NO: 4405431 - DNA, 25 bp, Homo sapien
gaatgcccatgaggcgttaggccca

SEQ ID NO: 4405432 - DNA, 25 bp, Homo sapien
caataggctgcaagcggaggtcgac

SEQ ID NO: 4405433 - DNA, 25 bp, Homo sapien
tattcttagtgtgaggcaatcccag

SEQ ID NO: 4405434 - DNA, 25 bp, Homo sapien
tctctcgggaggcacaagttaagct

SEQ ID NO: 4405435 - DNA, 25 bp, Homo sapien
cctacactgtccatgtgtgaaaacc

SEQ ID NO: 4405436 - DNA, 25 bp, Homo sapien
gacaaaggtattgagagacatctct

SEQ ID NO: 4405437 - DNA, 25 bp, Homo sapien
tgagaatcaggcctcatcaccgcct

SEQ ID NO: 4405438 - DNA, 25 bp, Homo sapien
tgctcagaaagtgtcccctcaaggc

SEQ ID NO: 4405439 - DNA, 25 bp, Homo sapien
ctatcacaggcacttagggtttttc

SEQ ID NO: 4405440 - DNA, 25 bp, Homo sapien
attttctctatcacaggcacttagg

SEQ ID NO: 4405441 - DNA, 25 bp, Homo sapien
tctctatcacaggcacttagggttt

SEQ ID NO: 4405442 - DNA, 25 bp, Homo sapien
ttttctctatcacaggcacttaggg

SEQ ID NO: 4405443 - DNA, 25 bp, Homo sapien
gggagccgtgacaggggtctggaga

SEQ ID NO: 4405444 - DNA, 25 bp, Homo sapien
tgggagccgtgacaggggtctggag

SEQ ID NO: 4405445 - DNA, 25 bp, Homo sapien
ctgggagccgtgacaggggtctgga

SEQ ID NO: 4405446 - DNA, 25 bp, Homo sapien
gcaacgggtgttagaatggcccagt

SEQ ID NO: 4405447 - DNA, 25 bp, Homo sapien
tagcaacgggtgttagaatggccca

SEQ ID NO: 4405448 - DNA, 25 bp, Homo sapien
caacgggtgttagaatggcccagtt

SEQ ID NO: 4405449 - DNA, 25 bp, Homo sapien
ggtagcaacgggtgttagaatggcc

SEQ ID NO: 4405450 - DNA, 25 bp, Homo sapien
ttattgaccgctgatcagcacgggc

SEQ ID NO: 4405451 - DNA, 25 bp, Homo sapien
gatcagcacgggcatgcgttgccct

SEQ ID NO: 4405452 - DNA, 25 bp, Homo sapien
cgggcatgcgttgccctcctgttct

SEQ ID NO: 4405453 - DNA, 25 bp, Homo sapien
cctgttctgttaatagtgattcctc

SEQ ID NO: 4405454 - DNA, 25 bp, Homo sapien
cctggcaccgtgagagaatgcgaac

SEQ ID NO: 4405455 - DNA, 25 bp, Homo sapien
gaatgcgaaccatgctctgtggcgc

SEQ ID NO: 4405456 - DNA, 25 bp, Homo sapien
gactatgctttggtcacggaggact

SEQ ID NO: 4405457 - DNA, 25 bp, Homo sapien
aaggtgagcccattgttctgtcccc

SEQ ID NO: 4405458 - DNA, 25 bp, Homo sapien
tatttattgtgtgacgcctgacagg

SEQ ID NO: 4405459 - DNA, 25 bp, Homo sapien
ggctccaacgcctcttgtagaaaga

SEQ ID NO: 4405460 - DNA, 25 bp, Homo sapien
atatacgccctatgcagagcccggc

SEQ ID NO: 4405461 - DNA, 25 bp, Homo sapien
ttggcggccagggatatatacgccc

SEQ ID NO: 4405462 - DNA, 25 bp, Homo sapien
catttgcagcgtcacaaaagatcct

SEQ ID NO: 4405463 - DNA, 25 bp, Homo sapien
gcaggcggccctccatagtgaaata

SEQ ID NO: 4405464 - DNA, 25 bp, Homo sapien
tgaaatatgtgcttctgcaacccct

SEQ ID NO: 4405465 - DNA, 25 bp, Homo sapien
tcagctgactacaggcagatttcca

SEQ ID NO: 4405466 - DNA, 25 bp, Homo sapien
cgctgtggcgcggagggaggactcc

SEQ ID NO: 4405467 - DNA, 25 bp, Homo sapien
ggacgcggacgggactgggagattc

SEQ ID NO: 4405468 - DNA, 25 bp, Homo sapien
gacagggcctagagcccggggctag

SEQ ID NO: 4405469 - DNA, 25 bp, Homo sapien
gaacagagccttgcggaggaccccg

SEQ ID NO: 4405470 - DNA, 25 bp, Homo sapien
tgcagggccgcgtgtttaacccagg

SEQ ID NO: 4405471 - DNA, 25 bp, Homo sapien
cgatgagtcgtttcacctgggagct

SEQ ID NO: 4405472 - DNA, 25 bp, Homo sapien
gaaaagccgagagggagactccctg

SEQ ID NO: 4405473 - DNA, 25 bp, Homo sapien
ggctcggcctttgactacgacgtga

SEQ ID NO: 4405474 - DNA, 25 bp, Homo sapien
gagggctcgccgaggctctcgcctt

SEQ ID NO: 4405475 - DNA, 25 bp, Homo sapien
cgccgaggctctcgccttcacccgg

SEQ ID NO: 4405476 - DNA, 25 bp, Homo sapien
tcgccgaggctctcgccttcacccg

SEQ ID NO: 4405477 - DNA, 25 bp, Homo sapien
gcagagggctcgccgaggctctcgc

SEQ ID NO: 4405478 - DNA, 25 bp, Homo sapien
gacgcttctacacgcgaagcgcgcg

SEQ ID NO: 4405479 - DNA, 25 bp, Homo sapien
cgctgccgcagggtctttctggaag

SEQ ID NO: 4405480 - DNA, 25 bp, Homo sapien
tgcggcctccgccacccggacgctt

SEQ ID NO: 4405481 - DNA, 25 bp, Homo sapien
ggcgctgccgcagggtctttctgga

SEQ ID NO: 4405482 - DNA, 25 bp, Homo sapien
tctgattccccctttggagaggctc

SEQ ID NO: 4405483 - DNA, 25 bp, Homo sapien
tcatctacctataacctgggggctc

SEQ ID NO: 4405484 - DNA, 25 bp, Homo sapien
ttcctgaggccatttcacttgcgtg

SEQ ID NO: 4405485 - DNA, 25 bp, Homo sapien
cttgcgtgcattcttaactttggga

SEQ ID NO: 4405486 - DNA, 25 bp, Homo sapien
gaggctggaaacaactcagtgatga

SEQ ID NO: 4405487 - DNA, 25 bp, Homo sapien
tctttccagcgaaaggcgtccctgg

SEQ ID NO: 4405488 - DNA, 25 bp, Homo sapien
aaggtcaacctgcaaattctagagt

SEQ ID NO: 4405489 - DNA, 25 bp, Homo sapien
cacaagcagctcacatcgatccatg

SEQ ID NO: 4405490 - DNA, 25 bp, Homo sapien
aagatgaatagtttttgtctaattc

SEQ ID NO: 4405491 - DNA, 25 bp, Homo sapien
tcacgtctctgttataattttgcaa

SEQ ID NO: 4405492 - DNA, 25 bp, Homo sapien
atggagtcagttaggcaaatctttt

SEQ ID NO: 4405493 - DNA, 25 bp, Homo sapien
aataattaggtgaatgtaatacttg

SEQ ID NO: 4405494 - DNA, 25 bp, Homo sapien
gatgaaacctgggacgagggactca

SEQ ID NO: 4405495 - DNA, 25 bp, Homo sapien
catgagacaccagatgaaacctggg

SEQ ID NO: 4405496 - DNA, 25 bp, Homo sapien
acttgggacctacctatctaggaat

SEQ ID NO: 4405497 - DNA, 25 bp, Homo sapien
gctgtgctttcataaagccccacaa

SEQ ID NO: 4405498 - DNA, 25 bp, Homo sapien
tgaggtgtgcctgactatagtccca

SEQ ID NO: 4405499 - DNA, 25 bp, Homo sapien
tggtgatattttccagacctccctg

SEQ ID NO: 4405500 - DNA, 25 bp, Homo sapien
tgaatttacgaaggctccaaaggaa

SEQ ID NO: 4405501 - DNA, 25 bp, Homo sapien
ttactgggccgcaagaataagcagc

SEQ ID NO: 4405502 - DNA, 25 bp, Homo sapien
ttgcacaggcaaagttcaacagctt

SEQ ID NO: 4405503 - DNA, 25 bp, Homo sapien
aattagcaaggaaccggcctgaaca

SEQ ID NO: 4405504 - DNA, 25 bp, Homo sapien
agagactgccctgagcataacccag

SEQ ID NO: 4405505 - DNA, 25 bp, Homo sapien
agttgacagggcgtattgacacccc

SEQ ID NO: 4405506 - DNA, 25 bp, Homo sapien
tgtgggtcccagattgacaaggagc

SEQ ID NO: 4405507 - DNA, 25 bp, Homo sapien
catggcggctcagtacccagatatt

SEQ ID NO: 4405508 - DNA, 25 bp, Homo sapien
gacgaaacccacgactcagacttag

SEQ ID NO: 4405509 - DNA, 25 bp, Homo sapien
gtcaaactgatagccacgggatgca

SEQ ID NO: 4405510 - DNA, 25 bp, Homo sapien
taaaaatggctaccccataggcaga

SEQ ID NO: 4405511 - DNA, 25 bp, Homo sapien
tttaaaaatggctaccccataggca

SEQ ID NO: 4405512 - DNA, 25 bp, Homo sapien
accccataggcagaacagccctgag

SEQ ID NO: 4405513 - DNA, 25 bp, Homo sapien
ctaccccataggcagaacagccctg

SEQ ID NO: 4405514 - DNA, 25 bp, Homo sapien
tctttatgacgtgtatcttgtgacc

SEQ ID NO: 4405515 - DNA, 25 bp, Homo sapien
ggatttagccggctcctttactgca

SEQ ID NO: 4405516 - DNA, 25 bp, Homo sapien
cactctcatggccattttgattttg

SEQ ID NO: 4405517 - DNA, 25 bp, Homo sapien
tgacgtgtatcttgtgacctcctat

SEQ ID NO: 4405518 - DNA, 25 bp, Homo sapien
gactggagtctgatacaacgttgaa

SEQ ID NO: 4405519 - DNA, 25 bp, Homo sapien
gcaagtgaggcatagccatggagct

SEQ ID NO: 4405520 - DNA, 25 bp, Homo sapien
ggaactctgactgatatactcactc

SEQ ID NO: 4405521 - DNA, 25 bp, Homo sapien
tctgcgacctggagcataagtcagg

SEQ ID NO: 4405522 - DNA, 25 bp, Homo sapien
aaagcatctcaaagaccaaaaagcc

SEQ ID NO: 4405523 - DNA, 25 bp, Homo sapien
acgttcaccggcctttgttcagagg

SEQ ID NO: 4405524 - DNA, 25 bp, Homo sapien
cactggaggtgcattaactttacac

SEQ ID NO: 4405525 - DNA, 25 bp, Homo sapien
gacctaaagaagtgagtctcaaatg

SEQ ID NO: 4405526 - DNA, 25 bp, Homo sapien
ttcctcaaagatgtttgcttcagcc

SEQ ID NO: 4405527 - DNA, 25 bp, Homo sapien
acttacacgcagctccctggtgcat

SEQ ID NO: 4405528 - DNA, 25 bp, Homo sapien
cattgtctaccagctccgtcattac

SEQ ID NO: 4405529 - DNA, 25 bp, Homo sapien
gcatgactactttcagtgtcaccct

SEQ ID NO: 4405530 - DNA, 25 bp, Homo sapien
caccagggggttgctgtcaggacta

SEQ ID NO: 4405531 - DNA, 25 bp, Homo sapien
accagggggttgctgtcaggactac

SEQ ID NO: 4405532 - DNA, 25 bp, Homo sapien
tcaccagggggttgctgtcaggact

SEQ ID NO: 4405533 - DNA, 25 bp, Homo sapien
cctttccagcagctccaggtggtac

SEQ ID NO: 4405534 - DNA, 25 bp, Homo sapien
ggttctgtctcaggagggtgatgca

SEQ ID NO: 4405535 - DNA, 25 bp, Homo sapien
tgggacctgcccaaaggcaaacact

SEQ ID NO: 4405536 - DNA, 25 bp, Homo sapien
ttgggacctgcccaaaggcaaacac

SEQ ID NO: 4405537 - DNA, 25 bp, Homo sapien
caggctgtgaacagggtgtccgctg

SEQ ID NO: 4405538 - DNA, 25 bp, Homo sapien
attgtggccaggacgtcactcagct

SEQ ID NO: 4405539 - DNA, 25 bp, Homo sapien
tcattgtggccaggacgtcactcag

SEQ ID NO: 4405540 - DNA, 25 bp, Homo sapien
ttgtggccaggacgtcactcagctc

SEQ ID NO: 4405541 - DNA, 25 bp, Homo sapien
cctcattgtggccaggacgtcactc

SEQ ID NO: 4405542 - DNA, 25 bp, Homo sapien
tcttggtgtggatgtgtgtccccac

SEQ ID NO: 4405543 - DNA, 25 bp, Homo sapien
cctcttggtgtggatgtgtgtcccc

SEQ ID NO: 4405544 - DNA, 25 bp, Homo sapien
tcctcttggtgtggatgtgtgtccc

SEQ ID NO: 4405545 - DNA, 25 bp, Homo sapien
ctcctcttggtgtggatgtgtgtcc

SEQ ID NO: 4405546 - DNA, 25 bp, Homo sapien
tggcatgccgcgcattcagggcaaa

SEQ ID NO: 4405547 - DNA, 25 bp, Homo sapien
tccatggcatgccgcgcattcaggg

SEQ ID NO: 4405548 - DNA, 25 bp, Homo sapien
catgccgcgcattcagggcaaagcc

SEQ ID NO: 4405549 - DNA, 25 bp, Homo sapien
tgccgcgcattcagggcaaagccac

SEQ ID NO: 4405550 - DNA, 25 bp, Homo sapien
tgctgaacttggtgagtgtgcctga

SEQ ID NO: 4405551 - DNA, 25 bp, Homo sapien
tctcagatcatgtcctgctgaactt

SEQ ID NO: 4405552 - DNA, 25 bp, Homo sapien
tggtgagtgtgcctgagcttgctta

SEQ ID NO: 4405553 - DNA, 25 bp, Homo sapien
ctctcagatcatgtcctgctgaact

SEQ ID NO: 4405554 - DNA, 25 bp, Homo sapien
ttgctgatcacctgtgccctcgctg

SEQ ID NO: 4405555 - DNA, 25 bp, Homo sapien
ctcagccggggggtagtacagagcc

SEQ ID NO: 4405556 - DNA, 25 bp, Homo sapien
tcacctgtgccctcgctgaggccct

SEQ ID NO: 4405557 - DNA, 25 bp, Homo sapien
tcagccggggggtagtacagagcca

SEQ ID NO: 4405558 - DNA, 25 bp, Homo sapien
ctgggggagagagcaatacctgtct

SEQ ID NO: 4405559 - DNA, 25 bp, Homo sapien
tgggggagagagcaatacctgtctc

SEQ ID NO: 4405560 - DNA, 25 bp, Homo sapien
atcaacaccagcaaccagaagcgtc

SEQ ID NO: 4405561 - DNA, 25 bp, Homo sapien
cagaagcgtctcactgtgcaggcgt

SEQ ID NO: 4405562 - DNA, 25 bp, Homo sapien
tgggctacccaaccacaatcagagt

SEQ ID NO: 4405563 - DNA, 25 bp, Homo sapien
tctttgtttccaaggtagcaggaac

SEQ ID NO: 4405564 - DNA, 25 bp, Homo sapien
tgctgaattgccatcagggcctgtc

SEQ ID NO: 4405565 - DNA, 25 bp, Homo sapien
gaagccgctctgctgggttacacat

SEQ ID NO: 4405566 - DNA, 25 bp, Homo sapien
acagaactgttatgctcccctgcag

SEQ ID NO: 4405567 - DNA, 25 bp, Homo sapien
caggtggtggatcagaggactttct

SEQ ID NO: 4405568 - DNA, 25 bp, Homo sapien
tctgcatctctcgtggtccgtaata

SEQ ID NO: 4405569 - DNA, 25 bp, Homo sapien
ctcgtggtccgtaatactccagatc

SEQ ID NO: 4405570 - DNA, 25 bp, Homo sapien
catctctcgtggtccgtaatactcc

SEQ ID NO: 4405571 - DNA, 25 bp, Homo sapien
atttctgcatctctcgtggtccgta

SEQ ID NO: 4405572 - DNA, 25 bp, Homo sapien
tattttttgggaaggagttgcactc

SEQ ID NO: 4405573 - DNA, 25 bp, Homo sapien
ggcaccatgcctggcgttaataact

SEQ ID NO: 4405574 - DNA, 25 bp, Homo sapien
catgcctggcgttaataactttttt

SEQ ID NO: 4405575 - DNA, 25 bp, Homo sapien
aacttttttttaatgacgatgactg

SEQ ID NO: 4405576 - DNA, 25 bp, Homo sapien
cagccccaacggaggcccaaggttg

SEQ ID NO: 4405577 - DNA, 25 bp, Homo sapien
ccaacggaggcccaaggttgctgag

SEQ ID NO: 4405578 - DNA, 25 bp, Homo sapien
cccaacggaggcccaaggttgctga

SEQ ID NO: 4405579 - DNA, 25 bp, Homo sapien
ccccaacggaggcccaaggttgctg

SEQ ID NO: 4405580 - DNA, 25 bp, Homo sapien
aaggctggttctatgtgcagatggc

SEQ ID NO: 4405581 - DNA, 25 bp, Homo sapien
cacctgaagtgaatagaggctggac

SEQ ID NO: 4405582 - DNA, 25 bp, Homo sapien
gttttgtacaggaacaatacttgcc

SEQ ID NO: 4405583 - DNA, 25 bp, Homo sapien
gtcataacctattttcagctggaaa

SEQ ID NO: 4405584 - DNA, 25 bp, Homo sapien
gagggagagggactctcagataact

SEQ ID NO: 4405585 - DNA, 25 bp, Homo sapien
gatggaagcgcgatgtcttctatta

SEQ ID NO: 4405586 - DNA, 25 bp, Homo sapien
tcatgtgtgagataataatagaaga

SEQ ID NO: 4405587 - DNA, 25 bp, Homo sapien
attaccaaatgtgcctaagccccag

SEQ ID NO: 4405588 - DNA, 25 bp, Homo sapien
agctccctcacagtcttcagtccag

SEQ ID NO: 4405589 - DNA, 25 bp, Homo sapien
gcttggatgcactgtggctcagctc

SEQ ID NO: 4405590 - DNA, 25 bp, Homo sapien
ttgaaggtgccagagcgttctgcgt

SEQ ID NO: 4405591 - DNA, 25 bp, Homo sapien
gtccagccgctgtcaggctccttgt

SEQ ID NO: 4405592 - DNA, 25 bp, Homo sapien
caagagtgatgccacctgaaaggtc

SEQ ID NO: 4405593 - DNA, 25 bp, Homo sapien
cactgcggaagccacgtgtaccgtg

SEQ ID NO: 4405594 - DNA, 25 bp, Homo sapien
taccgtggctaagtacctgcgtgcc

SEQ ID NO: 4405595 - DNA, 25 bp, Homo sapien
aaaaatgccacacctacgggctggt

SEQ ID NO: 4405596 - DNA, 25 bp, Homo sapien
gaattcttcggaggccatatgtatg

SEQ ID NO: 4405597 - DNA, 25 bp, Homo sapien
tgtatggctagatatcccttgaaga

SEQ ID NO: 4405598 - DNA, 25 bp, Homo sapien
tgatcactatgaacaccctctaggg

SEQ ID NO: 4405599 - DNA, 25 bp, Homo sapien
taataccctatcaaaatgctgtcag

SEQ ID NO: 4405600 - DNA, 25 bp, Homo sapien
tcagtttctagcacacagtttggca

SEQ ID NO: 4405601 - DNA, 25 bp, Homo sapien
gagcttgcatttcaggcccattcgc

SEQ ID NO: 4405602 - DNA, 25 bp, Homo sapien
tgacaggcggcacccgatgtgaaga

SEQ ID NO: 4405603 - DNA, 25 bp, Homo sapien
tatagcctgctcatagtgccagccc

SEQ ID NO: 4405604 - DNA, 25 bp, Homo sapien
caggtgcgcgaactgtgacaaagtc

SEQ ID NO: 4405605 - DNA, 25 bp, Homo sapien
ggacagagtccaaggtagaagccac

SEQ ID NO: 4405606 - DNA, 25 bp, Homo sapien
tgaaggccattaacaaccaggtgcg

SEQ ID NO: 4405607 - DNA, 25 bp, Homo sapien
caggtacatcctagcgctggaggca

SEQ ID NO: 4405608 - DNA, 25 bp, Homo sapien
gagcgtgtctcctctggatccccga

SEQ ID NO: 4405609 - DNA, 25 bp, Homo sapien
ttccaaaagtgaggagcgtgtctcc

SEQ ID NO: 4405610 - DNA, 25 bp, Homo sapien
tcttcctctaaagtgtagaattcca

SEQ ID NO: 4405611 - DNA, 25 bp, Homo sapien
aaagtgtagaattccaaaagtgagg

SEQ ID NO: 4405612 - DNA, 25 bp, Homo sapien
aaaagcgctaagggccgacctcgtg

SEQ ID NO: 4405613 - DNA, 25 bp, Homo sapien
tcacaggattccctgctggatgcat

SEQ ID NO: 4405614 - DNA, 25 bp, Homo sapien
gcgctaagggccgacctcgtgcagc

SEQ ID NO: 4405615 - DNA, 25 bp, Homo sapien
ctaagggccgacctcgtgcagctgg

SEQ ID NO: 4405616 - DNA, 25 bp, Homo sapien
tctgagttgtttgccctgagcacct

SEQ ID NO: 4405617 - DNA, 25 bp, Homo sapien
gggtccatcctgtatcccatgcctt

SEQ ID NO: 4405618 - DNA, 25 bp, Homo sapien
gcgtaaaaaccctcgcatgcacact

SEQ ID NO: 4405619 - DNA, 25 bp, Homo sapien
agcatattatcctctcagggtccat

SEQ ID NO: 4405620 - DNA, 25 bp, Homo sapien
acaattgagcccgtggagatagagt

SEQ ID NO: 4405621 - DNA, 25 bp, Homo sapien
tcaaaacaattgagcccgtggagat

SEQ ID NO: 4405622 - DNA, 25 bp, Homo sapien
aactcaaaacaattgagcccgtgga

SEQ ID NO: 4405623 - DNA, 25 bp, Homo sapien
attgagcccgtggagatagagtaga

SEQ ID NO: 4405624 - DNA, 25 bp, Homo sapien
gaaaatgagcgatggttaatgggta

SEQ ID NO: 4405625 - DNA, 25 bp, Homo sapien
agtgcttgagctgacggatactcca

SEQ ID NO: 4405626 - DNA, 25 bp, Homo sapien
tttgataggacaatggagtgactac

SEQ ID NO: 4405627 - DNA, 25 bp, Homo sapien
tttaccctgacatgattgttacaca

SEQ ID NO: 4405628 - DNA, 25 bp, Homo sapien
atggggaaagcggagaagttcatca

SEQ ID NO: 4405629 - DNA, 25 bp, Homo sapien
gagaagttcatcaaagagtacaaag

SEQ ID NO: 4405630 - DNA, 25 bp, Homo sapien
gaaagcggagaagttcatcaaagag

SEQ ID NO: 4405631 - DNA, 25 bp, Homo sapien
gcggagaagttcatcaaagagtaca

SEQ ID NO: 4405632 - DNA, 25 bp, Homo sapien
agctttagtgatttattgcatagaa

SEQ ID NO: 4405633 - DNA, 25 bp, Homo sapien
aagctttagtgatttattgcataga

SEQ ID NO: 4405634 - DNA, 25 bp, Homo sapien
aaattgcttgtgtacgatgctcacg

SEQ ID NO: 4405635 - DNA, 25 bp, Homo sapien
tgtaccaccataccacaccatttgt

SEQ ID NO: 4405636 - DNA, 25 bp, Homo sapien
tacccatatagcaagcctgcacata

SEQ ID NO: 4405637 - DNA, 25 bp, Homo sapien
cacgatctggctgacaggatcattc

SEQ ID NO: 4405638 - DNA, 25 bp, Homo sapien
aagatcatgccattgcactccagcc

SEQ ID NO: 4405639 - DNA, 25 bp, Homo sapien
cttgaacccagcaggttgtggtgag

SEQ ID NO: 4405640 - DNA, 25 bp, Homo sapien
cacttgaacccagcaggttgtggtg

SEQ ID NO: 4405641 - DNA, 25 bp, Homo sapien
tgaacccagcaggttgtggtgagcc

SEQ ID NO: 4405642 - DNA, 25 bp, Homo sapien
agtatgtaagattcttaaccacagt

SEQ ID NO: 4405643 - DNA, 25 bp, Homo sapien
tgataagtatgtaagattcttaacc

SEQ ID NO: 4405644 - DNA, 25 bp, Homo sapien
aaatgataagtatgtaagattctta

SEQ ID NO: 4405645 - DNA, 25 bp, Homo sapien
taagtatgtaagattcttaaccaca

SEQ ID NO: 4405646 - DNA, 25 bp, Homo sapien
tctctttcaagatgtgtagctgccc

SEQ ID NO: 4405647 - DNA, 25 bp, Homo sapien
tctttcaagatgtgtagctgcccga

SEQ ID NO: 4405648 - DNA, 25 bp, Homo sapien
agatgtgtagctgcccgatgggttc

SEQ ID NO: 4405649 - DNA, 25 bp, Homo sapien
tcaagatgtgtagctgcccgatggg

SEQ ID NO: 4405650 - DNA, 25 bp, Homo sapien
tggtctctcagtattacaagggtgg

SEQ ID NO: 4405651 - DNA, 25 bp, Homo sapien
taaatgactcccacatgtagcttgg

SEQ ID NO: 4405652 - DNA, 25 bp, Homo sapien
tgtggcttctggaataacgcctcac

SEQ ID NO: 4405653 - DNA, 25 bp, Homo sapien
gaggttaattgacatgatgccagcc

SEQ ID NO: 4405654 - DNA, 25 bp, Homo sapien
ttgccaaggttgaggctgcatgcct

SEQ ID NO: 4405655 - DNA, 25 bp, Homo sapien
gttgaggctgcatgcctgtggcaca

SEQ ID NO: 4405656 - DNA, 25 bp, Homo sapien
gaggctgcatgcctgtggcacagcc

SEQ ID NO: 4405657 - DNA, 25 bp, Homo sapien
ggctgcatgcctgtggcacagcctc

SEQ ID NO: 4405658 - DNA, 25 bp, Homo sapien
tcagtgcacggagggatgactttgc

SEQ ID NO: 4405659 - DNA, 25 bp, Homo sapien
cagatgggtcttgagttattaggaa

SEQ ID NO: 4405660 - DNA, 25 bp, Homo sapien
ggtttattcctaggcagatgggtct

SEQ ID NO: 4405661 - DNA, 25 bp, Homo sapien
gcaggacaactcaagcagagaggga

SEQ ID NO: 4405662 - DNA, 25 bp, Homo sapien
aagtagcttatatatgtaaacaggt

SEQ ID NO: 4405663 - DNA, 25 bp, Homo sapien
aaataatgatcctagaaaatcgata

SEQ ID NO: 4405664 - DNA, 25 bp, Homo sapien
cagttcacagggcttcacaaagcac

SEQ ID NO: 4405665 - DNA, 25 bp, Homo sapien
agaaaatcgatataggccacactac

SEQ ID NO: 4405666 - DNA, 25 bp, Homo sapien
gccatggtagaataaccagtttctt

SEQ ID NO: 4405667 - DNA, 25 bp, Homo sapien
tcatggtacgactgatttcctttat

SEQ ID NO: 4405668 - DNA, 25 bp, Homo sapien
actgtgtagacagggtatttggcca

SEQ ID NO: 4405669 - DNA, 25 bp, Homo sapien
aaagacttgtttaaagctgagccct

SEQ ID NO: 4405670 - DNA, 25 bp, Homo sapien
tcataggagtataataacttgttaa

SEQ ID NO: 4405671 - DNA, 25 bp, Homo sapien
gttcataggagtataataacttgtt

SEQ ID NO: 4405672 - DNA, 25 bp, Homo sapien
ttcataggagtataataacttgtta

SEQ ID NO: 4405673 - DNA, 25 bp, Homo sapien
accgcacccagctataaaaccacct

SEQ ID NO: 4405674 - DNA, 25 bp, Homo sapien
ccgcacccagctataaaaccacctt

SEQ ID NO: 4405675 - DNA, 25 bp, Homo sapien
ccttagaatctcacatgcccatgct

SEQ ID NO: 4405676 - DNA, 25 bp, Homo sapien
cagctttaattctgtgtgtcaggat

SEQ ID NO: 4405677 - DNA, 25 bp, Homo sapien
gtgctggtcttgtgtcagtgtgcct

SEQ ID NO: 4405678 - DNA, 25 bp, Homo sapien
gaggatgaggcttgaatcgctgtca

SEQ ID NO: 4405679 - DNA, 25 bp, Homo sapien
tataacattaactctagccaccatg

SEQ ID NO: 4405680 - DNA, 25 bp, Homo sapien
tttaatcagcatcgccacagtctgc

SEQ ID NO: 4405681 - DNA, 25 bp, Homo sapien
gctgtataatgttaactctggccac

SEQ ID NO: 4405682 - DNA, 25 bp, Homo sapien
gattttaactgtagccaccatgctg

SEQ ID NO: 4405683 - DNA, 25 bp, Homo sapien
gtgactctttgggccgcaggtgcct

SEQ ID NO: 4405684 - DNA, 25 bp, Homo sapien
atgtgactctttgggccgcaggtgc

SEQ ID NO: 4405685 - DNA, 25 bp, Homo sapien
tgtgactctttgggccgcaggtgcc

SEQ ID NO: 4405686 - DNA, 25 bp, Homo sapien
ctctatgcacagtgcaatgacacca

SEQ ID NO: 4405687 - DNA, 25 bp, Homo sapien
ccgtcctctatgcacagtgcaatga

SEQ ID NO: 4405688 - DNA, 25 bp, Homo sapien
acggcactccctgttctctatcagg

SEQ ID NO: 4405689 - DNA, 25 bp, Homo sapien
cctgttctctatcaggagatccaag

SEQ ID NO: 4405690 - DNA, 25 bp, Homo sapien
gtgtgcaatattgagtggccggtcc

SEQ ID NO: 4405691 - DNA, 25 bp, Homo sapien
gcaatattgagtggccggtccgatc

SEQ ID NO: 4405692 - DNA, 25 bp, Homo sapien
tgcaatattgagtggccggtccgat

SEQ ID NO: 4405693 - DNA, 25 bp, Homo sapien
tgtgcaatattgagtggccggtccg

SEQ ID NO: 4405694 - DNA, 25 bp, Homo sapien
gaaatgccacctccagttgtcctcc

SEQ ID NO: 4405695 - DNA, 25 bp, Homo sapien
tcctggtcccccagccagtcggagc

SEQ ID NO: 4405696 - DNA, 25 bp, Homo sapien
ctgtatcaaactctgcctcggaaag

SEQ ID NO: 4405697 - DNA, 25 bp, Homo sapien
tcaaactctgcctcggaaaggccaa

SEQ ID NO: 4405698 - DNA, 25 bp, Homo sapien
atcaaactctgcctcggaaaggcca

SEQ ID NO: 4405699 - DNA, 25 bp, Homo sapien
gtatcaaactctgcctcggaaaggc

SEQ ID NO: 4405700 - DNA, 25 bp, Homo sapien
tcgcaaagcctgcccctccagcgcc

SEQ ID NO: 4405701 - DNA, 25 bp, Homo sapien
caaagcctgcccctccagcgcctac

SEQ ID NO: 4405702 - DNA, 25 bp, Homo sapien
ctcgcaaagcctgcccctccagcgc

SEQ ID NO: 4405703 - DNA, 25 bp, Homo sapien
gcaaagcctgcccctccagcgccta

SEQ ID NO: 4405704 - DNA, 25 bp, Homo sapien
tccactactggatactgagcagaaa

SEQ ID NO: 4405705 - DNA, 25 bp, Homo sapien
ccactactggatactgagcagaaat

SEQ ID NO: 4405706 - DNA, 25 bp, Homo sapien
gatgccctctcgttccttcaacagt

SEQ ID NO: 4405707 - DNA, 25 bp, Homo sapien
tagcagatgccctctcgttccttca

SEQ ID NO: 4405708 - DNA, 25 bp, Homo sapien
tctcgttccttcaacagtgaagtga

SEQ ID NO: 4405709 - DNA, 25 bp, Homo sapien
gccctctcgttccttcaacagtgaa

SEQ ID NO: 4405710 - DNA, 25 bp, Homo sapien
ttccaatcgtccaggagggcttgcg

SEQ ID NO: 4405711 - DNA, 25 bp, Homo sapien
gacatccagatcgtattactgtatg

SEQ ID NO: 4405712 - DNA, 25 bp, Homo sapien
catcagagccctttccacattacag

SEQ ID NO: 4405713 - DNA, 25 bp, Homo sapien
tattactgtatgtggtattttgcaa

SEQ ID NO: 4405714 - DNA, 25 bp, Homo sapien
aatgtttattcgttctttctaggat

SEQ ID NO: 4405715 - DNA, 25 bp, Homo sapien
atgtaagtagaaacagtgagatcac

SEQ ID NO: 4405716 - DNA, 25 bp, Homo sapien
gcagctactataacacaatcttgaa

SEQ ID NO: 4405717 - DNA, 25 bp, Homo sapien
ttaacataggtaatagcaccaataa

SEQ ID NO: 4405718 - DNA, 25 bp, Homo sapien
cagccccttcccgatccccgggcag

SEQ ID NO: 4405719 - DNA, 25 bp, Homo sapien
aggcccccgagtacactccgcggct

SEQ ID NO: 4405720 - DNA, 25 bp, Homo sapien
gcccgctccgctcggacccgctggg

SEQ ID NO: 4405721 - DNA, 25 bp, Homo sapien
gtcccgctcctaccgccgcctcgtc

SEQ ID NO: 4405722 - DNA, 25 bp, Homo sapien
tccggacccccgatacgtctgcagt

SEQ ID NO: 4405723 - DNA, 25 bp, Homo sapien
ggctccggacccccgatacgtctgc

SEQ ID NO: 4405724 - DNA, 25 bp, Homo sapien
ctccggacccccgatacgtctgcag

SEQ ID NO: 4405725 - DNA, 25 bp, Homo sapien
gctccggacccccgatacgtctgca

SEQ ID NO: 4405726 - DNA, 25 bp, Homo sapien
ctccgcgcagtcccgccagtccctg

SEQ ID NO: 4405727 - DNA, 25 bp, Homo sapien
ccgccagtccctgcgcagactgcgc

SEQ ID NO: 4405728 - DNA, 25 bp, Homo sapien
gcgcagtcccgccagtccctgcgca

SEQ ID NO: 4405729 - DNA, 25 bp, Homo sapien
agtcccgccagtccctgcgcagact

SEQ ID NO: 4405730 - DNA, 25 bp, Homo sapien
caaggcggggcgctagtgggggaca

SEQ ID NO: 4405731 - DNA, 25 bp, Homo sapien
cggccgggtcaaggcggggcgctag

SEQ ID NO: 4405732 - DNA, 25 bp, Homo sapien
cgcaccacggccgggtcaaggcggg

SEQ ID NO: 4405733 - DNA, 25 bp, Homo sapien
ctgcgcaccacggccgggtcaaggc

SEQ ID NO: 4405734 - DNA, 25 bp, Homo sapien
gttcccgtcttcttggtccgctcca

SEQ ID NO: 4405735 - DNA, 25 bp, Homo sapien
ggtatcgggggcatttgcagctccc

SEQ ID NO: 4405736 - DNA, 25 bp, Homo sapien
ttcttggtccgctccacctgtcata

SEQ ID NO: 4405737 - DNA, 25 bp, Homo sapien
cgtcttcttggtccgctccacctgt

SEQ ID NO: 4405738 - DNA, 25 bp, Homo sapien
cggcttcttggtccgctcttcctgt

SEQ ID NO: 4405739 - DNA, 25 bp, Homo sapien
tccagggcacgtcttagtgctggcg

SEQ ID NO: 4405740 - DNA, 25 bp, Homo sapien
ctgtgagttccagggcacgtcttag

SEQ ID NO: 4405741 - DNA, 25 bp, Homo sapien
cgtcttagtgctggcgctgtcctgg

SEQ ID NO: 4405742 - DNA, 25 bp, Homo sapien
gatccgcctggtaacaggcatcttc

SEQ ID NO: 4405743 - DNA, 25 bp, Homo sapien
accaatgcgcggagaacagtagtgc

SEQ ID NO: 4405744 - DNA, 25 bp, Homo sapien
accacgatccgcctggtaacaggca

SEQ ID NO: 4405745 - DNA, 25 bp, Homo sapien
gcggagaacagtagtgccccgaatg

SEQ ID NO: 4405746 - DNA, 25 bp, Homo sapien
gaacctcaccatggatacgcttgtg

SEQ ID NO: 4405747 - DNA, 25 bp, Homo sapien
caccaggctgggtgaacggacacaa

SEQ ID NO: 4405748 - DNA, 25 bp, Homo sapien
agacacggtcacagatcagaggcca

SEQ ID NO: 4405749 - DNA, 25 bp, Homo sapien
ttttagggtgatgtgccaggcgcca

SEQ ID NO: 4405750 - DNA, 25 bp, Homo sapien
tgtgaattgttaacagatccaagga

SEQ ID NO: 4405751 - DNA, 25 bp, Homo sapien
gatccaaggagaaactatacaggaa

SEQ ID NO: 4405752 - DNA, 25 bp, Homo sapien
tttctcagaggagtagaaaagaacg

SEQ ID NO: 4405753 - DNA, 25 bp, Homo sapien
aacttcagctcctgcgccaagaggt

SEQ ID NO: 4405754 - DNA, 25 bp, Homo sapien
gactcacgtttgacaaaaaggcgaa

SEQ ID NO: 4405755 - DNA, 25 bp, Homo sapien
gtgactcttcgacatctgaatcaga

SEQ ID NO: 4405756 - DNA, 25 bp, Homo sapien
gaagcatcaccttcatctcacgata

SEQ ID NO: 4405757 - DNA, 25 bp, Homo sapien
gagacttgcagcgaaatttcttcag

SEQ ID NO: 4405758 - DNA, 25 bp, Homo sapien
ttatgacatcaagagaaatggtccc

SEQ ID NO: 4405759 - DNA, 25 bp, Homo sapien
gtcaccgatgaaccactggaacaag

SEQ ID NO: 4405760 - DNA, 25 bp, Homo sapien
gacgaagccacagaagtcaccgatg

SEQ ID NO: 4405761 - DNA, 25 bp, Homo sapien
tagtggttcttctgactgccgtgaa

SEQ ID NO: 4405762 - DNA, 25 bp, Homo sapien
tgtaagaactgtgaatatcagctcc

SEQ ID NO: 4405763 - DNA, 25 bp, Homo sapien
gggtcctgcttaccttaccgctgat

SEQ ID NO: 4405764 - DNA, 25 bp, Homo sapien
gaaagagttgtacatgtaagaactg

SEQ ID NO: 4405765 - DNA, 25 bp, Homo sapien
taaagtactttatggataattcctg

SEQ ID NO: 4405766 - DNA, 25 bp, Homo sapien
ccagattttgttgttcggatacata

SEQ ID NO: 4405767 - DNA, 25 bp, Homo sapien
cagattttgttgttcggatacatac

SEQ ID NO: 4405768 - DNA, 25 bp, Homo sapien
gattttgttgttcggatacatacaa

SEQ ID NO: 4405769 - DNA, 25 bp, Homo sapien
ttccagattttgttgttcggataca

SEQ ID NO: 4405770 - DNA, 25 bp, Homo sapien
tgagtcttcagctgcatgaccctta

SEQ ID NO: 4405771 - DNA, 25 bp, Homo sapien
tctccaagtattcagctgcacgacc

SEQ ID NO: 4405772 - DNA, 25 bp, Homo sapien
cctctccaagtattcagctgcacga

SEQ ID NO: 4405773 - DNA, 25 bp, Homo sapien
caagaccatcaaactacaacatcag

SEQ ID NO: 4405774 - DNA, 25 bp, Homo sapien
ctcagtcaagattgtcagctcctcc

SEQ ID NO: 4405775 - DNA, 25 bp, Homo sapien
gaaagaccctcaacacgaacaacat

SEQ ID NO: 4405776 - DNA, 25 bp, Homo sapien
tcccaaagtcctcaactgcatgacc

SEQ ID NO: 4405777 - DNA, 25 bp, Homo sapien
cagctgaaagaccctcaacacgaac

SEQ ID NO: 4405778 - DNA, 25 bp, Homo sapien
tcagctgcatgaccctcaaactaga

SEQ ID NO: 4405779 - DNA, 25 bp, Homo sapien
gcatgaccctcaatctagaatatca

SEQ ID NO: 4405780 - DNA, 25 bp, Homo sapien
tgcagctgcatgaccctcaatctag

SEQ ID NO: 4405781 - DNA, 25 bp, Homo sapien
ttcagctgcatgaccctcaaactag

SEQ ID NO: 4405782 - DNA, 25 bp, Homo sapien
cgaccctcaatctagaacatcagct

SEQ ID NO: 4405783 - DNA, 25 bp, Homo sapien
acgaccctcaatctagaacatcagc

SEQ ID NO: 4405784 - DNA, 25 bp, Homo sapien
agctgcacgaccctcaatctagaac

SEQ ID NO: 4405785 - DNA, 25 bp, Homo sapien
gtctgcagctgcacgaccctcaatc

SEQ ID NO: 4405786 - DNA, 25 bp, Homo sapien
cgggtctgcagctgcacgaccctca

SEQ ID NO: 4405787 - DNA, 25 bp, Homo sapien
ctgcagctgcacgaccctcaatcta

SEQ ID NO: 4405788 - DNA, 25 bp, Homo sapien
agctgcacgaccctcaatctagaac

SEQ ID NO: 4405789 - DNA, 25 bp, Homo sapien
ggtctgcagctgcacgaccctcaat

SEQ ID NO: 4405790 - DNA, 25 bp, Homo sapien
tcccagcacattgtttgtcaataat

SEQ ID NO: 4405791 - DNA, 25 bp, Homo sapien
tgtggctatgtcatactcttacggg

SEQ ID NO: 4405792 - DNA, 25 bp, Homo sapien
aagtcaattccatggacagttagca

SEQ ID NO: 4405793 - DNA, 25 bp, Homo sapien
cagccacgagcaacacctatgggat

SEQ ID NO: 4405794 - DNA, 25 bp, Homo sapien
ctctacagtacttggaaccttctaa

SEQ ID NO: 4405795 - DNA, 25 bp, Homo sapien
gagccaccgagtccaacctacttta

SEQ ID NO: 4405796 - DNA, 25 bp, Homo sapien
ttgtcttccctagaacaggagctta

SEQ ID NO: 4405797 - DNA, 25 bp, Homo sapien
tctaatgtactaaggacacgtgtat

SEQ ID NO: 4405798 - DNA, 25 bp, Homo sapien
tttgtaacattttattgcaaaaaga

SEQ ID NO: 4405799 - DNA, 25 bp, Homo sapien
gggcagagaacagtcttcttcatac

SEQ ID NO: 4405800 - DNA, 25 bp, Homo sapien
acattttattgcaaaaagaagggca

SEQ ID NO: 4405801 - DNA, 25 bp, Homo sapien
aagaagggcagagaacagtcttctt

SEQ ID NO: 4405802 - DNA, 25 bp, Homo sapien
aatcaatcagcatacgggccacaaa

SEQ ID NO: 4405803 - DNA, 25 bp, Homo sapien
tcaatcagcatacgggccacaaata

SEQ ID NO: 4405804 - DNA, 25 bp, Homo sapien
atcaatcagcatacgggccacaaat

SEQ ID NO: 4405805 - DNA, 25 bp, Homo sapien
caatcaatcagcatacgggccacaa

SEQ ID NO: 4405806 - DNA, 25 bp, Homo sapien
tctagtagcgagaggaaagtacaaa

SEQ ID NO: 4405807 - DNA, 25 bp, Homo sapien
gtagcgagaggaaagtacaaaaaca

SEQ ID NO: 4405808 - DNA, 25 bp, Homo sapien
tagtagcgagaggaaagtacaaaaa

SEQ ID NO: 4405809 - DNA, 25 bp, Homo sapien
tagcgagaggaaagtacaaaaacat

SEQ ID NO: 4405810 - DNA, 25 bp, Homo sapien
aacacaaagacactcacagtacagc

SEQ ID NO: 4405811 - DNA, 25 bp, Homo sapien
cacaaagacactcacagtacagcaa

SEQ ID NO: 4405812 - DNA, 25 bp, Homo sapien
gaatcatgttggctgaggagaaagt

SEQ ID NO: 4405813 - DNA, 25 bp, Homo sapien
aagtaaatgtgaatcatgttggctg

SEQ ID NO: 4405814 - DNA, 25 bp, Homo sapien
gcagaggaagctcagagcccaaggt

SEQ ID NO: 4405815 - DNA, 25 bp, Homo sapien
gaagctcagagcccaaggtaaaggg

SEQ ID NO: 4405816 - DNA, 25 bp, Homo sapien
atgaaaggcagaggaagctcagagc

SEQ ID NO: 4405817 - DNA, 25 bp, Homo sapien
agctcagagcccaaggtaaaggggg

SEQ ID NO: 4405818 - DNA, 25 bp, Homo sapien
tgcacttcccgagtataaacgaact

SEQ ID NO: 4405819 - DNA, 25 bp, Homo sapien
tattgaacagacgatgcacagagcc

SEQ ID NO: 4405820 - DNA, 25 bp, Homo sapien
gagggcaggctaccatgctaatgag

SEQ ID NO: 4405821 - DNA, 25 bp, Homo sapien
gaaagcacaatcactagtgtagaga

SEQ ID NO: 4405822 - DNA, 25 bp, Homo sapien
gcagttcctgtaacagccacgttcc

SEQ ID NO: 4405823 - DNA, 25 bp, Homo sapien
ttcccacacaagtgctgcctgagct

SEQ ID NO: 4405824 - DNA, 25 bp, Homo sapien
tgataagaacgcctccccataactc

SEQ ID NO: 4405825 - DNA, 25 bp, Homo sapien
tattcgcacactgataagaacgcct

SEQ ID NO: 4405826 - DNA, 25 bp, Homo sapien
tatcactccactcctctctatcaac

SEQ ID NO: 4405827 - DNA, 25 bp, Homo sapien
cgaagctgggtgtccgatatcactc

SEQ ID NO: 4405828 - DNA, 25 bp, Homo sapien
acgccaggtcgctgcttcttccttg

SEQ ID NO: 4405829 - DNA, 25 bp, Homo sapien
cgagcagacgccaggtcgctgcttc

SEQ ID NO: 4405830 - DNA, 25 bp, Homo sapien
gacgccaggtcgctgcttcttcctt

SEQ ID NO: 4405831 - DNA, 25 bp, Homo sapien
gcagacgccaggtcgctgcttcttc

SEQ ID NO: 4405832 - DNA, 25 bp, Homo sapien
acctcgggtctgcagtggcgccctc

SEQ ID NO: 4405833 - DNA, 25 bp, Homo sapien
cccgacggctcgaggcgagaaacag

SEQ ID NO: 4405834 - DNA, 25 bp, Homo sapien
tcccccgacggctcgaggcgagaaa

SEQ ID NO: 4405835 - DNA, 25 bp, Homo sapien
gctcgaggcgagaaacagggcctgg

SEQ ID NO: 4405836 - DNA, 25 bp, Homo sapien
cgggacacgggtccggggcagctgc

SEQ ID NO: 4405837 - DNA, 25 bp, Homo sapien
tcgggacacgggtccggggcagctg

SEQ ID NO: 4405838 - DNA, 25 bp, Homo sapien
gggacacgggtccggggcagctgcg

SEQ ID NO: 4405839 - DNA, 25 bp, Homo sapien
cacagctcacctttttggtgccttt

SEQ ID NO: 4405840 - DNA, 25 bp, Homo sapien
tataatgaattctgcaatgaacatc

SEQ ID NO: 4405841 - DNA, 25 bp, Homo sapien
gaaagagtggctcttacagaggcag

SEQ ID NO: 4405842 - DNA, 25 bp, Homo sapien
gttatggggcacaaacatgcagtca

SEQ ID NO: 4405843 - DNA, 25 bp, Homo sapien
tgaggctggttatggggcacaaaca

SEQ ID NO: 4405844 - DNA, 25 bp, Homo sapien
tttgtgggcactgaaagagtggctc

SEQ ID NO: 4405845 - DNA, 25 bp, Homo sapien
ctctgccttttcggttgtaagactt

SEQ ID NO: 4405846 - DNA, 25 bp, Homo sapien
gcttagtctcctctcgtccgtgacg

SEQ ID NO: 4405847 - DNA, 25 bp, Homo sapien
tactgtagtactggacatttcccaa

SEQ ID NO: 4405848 - DNA, 25 bp, Homo sapien
tagtacaaattcgtcacatagccct

SEQ ID NO: 4405849 - DNA, 25 bp, Homo sapien
gaaaaaatactccacaatgccacca

SEQ ID NO: 4405850 - DNA, 25 bp, Homo sapien
acttcttctcacataacattgtatt

SEQ ID NO: 4405851 - DNA, 25 bp, Homo sapien
taacattgtattacaagactttttc

SEQ ID NO: 4405852 - DNA, 25 bp, Homo sapien
cataacattgtattacaagactttt

SEQ ID NO: 4405853 - DNA, 25 bp, Homo sapien
ctaacttcttctcacataacattgt

SEQ ID NO: 4405854 - DNA, 25 bp, Homo sapien
catctatagatgtttgggattgacg

SEQ ID NO: 4405855 - DNA, 25 bp, Homo sapien
tgccattgtgaatcaatggtccttg

SEQ ID NO: 4405856 - DNA, 25 bp, Homo sapien
tgagaacagaagtttgggaacttac

SEQ ID NO: 4405857 - DNA, 25 bp, Homo sapien
agctctggcatggtgtctggaacac

SEQ ID NO: 4405858 - DNA, 25 bp, Homo sapien
gtactggatgacactcgtgagccac

SEQ ID NO: 4405859 - DNA, 25 bp, Homo sapien
gaggtagaggtggtcacaatcccgc

SEQ ID NO: 4405860 - DNA, 25 bp, Homo sapien
ctactgcagagacttggtgagcact

SEQ ID NO: 4405861 - DNA, 25 bp, Homo sapien
gatgaggacacgctcactactgcag

SEQ ID NO: 4405862 - DNA, 25 bp, Homo sapien
tgacagttacaccatgcaccagaaa

SEQ ID NO: 4405863 - DNA, 25 bp, Homo sapien
gctcgaggtctcatggcaagttaga

SEQ ID NO: 4405864 - DNA, 25 bp, Homo sapien
gctggttttagacacactggttgga

SEQ ID NO: 4405865 - DNA, 25 bp, Homo sapien
cagatgttgcggagaggaagacacc

SEQ ID NO: 4405866 - DNA, 25 bp, Homo sapien
gaagctaaggcaagagagactcggc

SEQ ID NO: 4405867 - DNA, 25 bp, Homo sapien
caacatagggacattcacagctgcc

SEQ ID NO: 4405868 - DNA, 25 bp, Homo sapien
tggaaacgcagttcagagcacgggc

SEQ ID NO: 4405869 - DNA, 25 bp, Homo sapien
gaaagtcagcttgtggcatcctcta

SEQ ID NO: 4405870 - DNA, 25 bp, Homo sapien
gctcgcagcgcggacagcttccaga

SEQ ID NO: 4405871 - DNA, 25 bp, Homo sapien
gacagcttccagacttgaagcaggc

SEQ ID NO: 4405872 - DNA, 25 bp, Homo sapien
gggctcctcctcgtagtctgacagg

SEQ ID NO: 4405873 - DNA, 25 bp, Homo sapien
agggccagcgcttccgcgggctcct

SEQ ID NO: 4405874 - DNA, 25 bp, Homo sapien
ctgacagaactcacagatgaagcct

SEQ ID NO: 4405875 - DNA, 25 bp, Homo sapien
cttcacaggtccggcacttatggag

SEQ ID NO: 4405876 - DNA, 25 bp, Homo sapien
tgacagaactcacagatgaagcctt

SEQ ID NO: 4405877 - DNA, 25 bp, Homo sapien
cacaggtccggcacttatggagctc

SEQ ID NO: 4405878 - DNA, 25 bp, Homo sapien
ggccgggcagcgttagacaaagctt

SEQ ID NO: 4405879 - DNA, 25 bp, Homo sapien
ggcaaaatgaggagcggcacatcag

SEQ ID NO: 4405880 - DNA, 25 bp, Homo sapien
tgaaagctaaactaggaccagggcc

SEQ ID NO: 4405881 - DNA, 25 bp, Homo sapien
ggatttccagttcctcccagacaca

SEQ ID NO: 4405882 - DNA, 25 bp, Homo sapien
gggtagactccctctcgattccaat

SEQ ID NO: 4405883 - DNA, 25 bp, Homo sapien
tgagaacaacaaatgacggccgagg

SEQ ID NO: 4405884 - DNA, 25 bp, Homo sapien
tgaaagtctactcggtcttgcccgg

SEQ ID NO: 4405885 - DNA, 25 bp, Homo sapien
agctaagtggcaagaaccccaggtc

SEQ ID NO: 4405886 - DNA, 25 bp, Homo sapien
tcctggtcgcagtcaggtcattcag

SEQ ID NO: 4405887 - DNA, 25 bp, Homo sapien
catgcatctctccacatgggtagcc

SEQ ID NO: 4405888 - DNA, 25 bp, Homo sapien
tcattcagtgagtacaggtggaggt

SEQ ID NO: 4405889 - DNA, 25 bp, Homo sapien
cctgggactgtgtcaaaggaatcca

SEQ ID NO: 4405890 - DNA, 25 bp, Homo sapien
gagagaaggacacagatacagttac

SEQ ID NO: 4405891 - DNA, 25 bp, Homo sapien
gcaacgtggccagagggctctagct

SEQ ID NO: 4405892 - DNA, 25 bp, Homo sapien
gtccctttcggagacagcaacgtgg

SEQ ID NO: 4405893 - DNA, 25 bp, Homo sapien
tgtttaccactttacagttctgcaa

SEQ ID NO: 4405894 - DNA, 25 bp, Homo sapien
ccagtcggcaagtcttgaacatgtt

SEQ ID NO: 4405895 - DNA, 25 bp, Homo sapien
ggccagtcggcaagtcttgaacatg

SEQ ID NO: 4405896 - DNA, 25 bp, Homo sapien
ttcttcatgtgacacagctggaccc

SEQ ID NO: 4405897 - DNA, 25 bp, Homo sapien
gttcttcatgtgacacagctggacc

SEQ ID NO: 4405898 - DNA, 25 bp, Homo sapien
tctgactcgacacctggcttcagat

SEQ ID NO: 4405899 - DNA, 25 bp, Homo sapien
acacctggcttcagattgtcccaca

SEQ ID NO: 4405900 - DNA, 25 bp, Homo sapien
ttctagaagccttgcatgctgcacc

SEQ ID NO: 4405901 - DNA, 25 bp, Homo sapien
ctagaagccttgcatgctgcaccca

SEQ ID NO: 4405902 - DNA, 25 bp, Homo sapien
gacaactggcttcagactgtcctac

SEQ ID NO: 4405903 - DNA, 25 bp, Homo sapien
gactgtcctacgctctgacaactgg

SEQ ID NO: 4405904 - DNA, 25 bp, Homo sapien
caactggcttcagactgtcctacgc

SEQ ID NO: 4405905 - DNA, 25 bp, Homo sapien
taacaactggcttcagactgtccta

SEQ ID NO: 4405906 - DNA, 25 bp, Homo sapien
gtactcacagtaccgcagtcgcttg

SEQ ID NO: 4405907 - DNA, 25 bp, Homo sapien
cagatcttaatgagcaggtccttgg

SEQ ID NO: 4405908 - DNA, 25 bp, Homo sapien
tgagcagcttgaccttcctatagag

SEQ ID NO: 4405909 - DNA, 25 bp, Homo sapien
catctgggcattctcgtggcagcac

SEQ ID NO: 4405910 - DNA, 25 bp, Homo sapien
gtaattctgcttggccacggcaatt

SEQ ID NO: 4405911 - DNA, 25 bp, Homo sapien
agtccggatgccacatcctgcacag

SEQ ID NO: 4405912 - DNA, 25 bp, Homo sapien
agggtcagtccggatgccacatcct

SEQ ID NO: 4405913 - DNA, 25 bp, Homo sapien
cacatcctgcacagcggtaattctg

SEQ ID NO: 4405914 - DNA, 25 bp, Homo sapien
gaatccgcagcttgtagatgtcagc

SEQ ID NO: 4405915 - DNA, 25 bp, Homo sapien
atgtcagcgtgctgcccgtcatccg

SEQ ID NO: 4405916 - DNA, 25 bp, Homo sapien
agttgccacgaacacgaatccgcag

SEQ ID NO: 4405917 - DNA, 25 bp, Homo sapien
cccgtcatccggtgagatgggcagt

SEQ ID NO: 4405918 - DNA, 25 bp, Homo sapien
ggtaagctcgtgtcagtgtgctgcc

SEQ ID NO: 4405919 - DNA, 25 bp, Homo sapien
cacagttggggtaagctcgtgtcag

SEQ ID NO: 4405920 - DNA, 25 bp, Homo sapien
taagctcgtgtcagtgtgctgcccg

SEQ ID NO: 4405921 - DNA, 25 bp, Homo sapien
ctcgtgtcagtgtgctgcccgtcat

SEQ ID NO: 4405922 - DNA, 25 bp, Homo sapien
agcagacgtggagtgcaggaagcag

SEQ ID NO: 4405923 - DNA, 25 bp, Homo sapien
cggctggaagctgcatcccctcaaa

SEQ ID NO: 4405924 - DNA, 25 bp, Homo sapien
gggcatcatgctccgggacaagcca

SEQ ID NO: 4405925 - DNA, 25 bp, Homo sapien
agacgtggagtgcaggaagcagtgg

SEQ ID NO: 4405926 - DNA, 25 bp, Homo sapien
ctggaaaggggagaatcaaggacgg

SEQ ID NO: 4405927 - DNA, 25 bp, Homo sapien
cagggaaaggatgggcgatgcgagg

SEQ ID NO: 4405928 - DNA, 25 bp, Homo sapien
gaaaggatgggcgatgcgaggcttc

SEQ ID NO: 4405929 - DNA, 25 bp, Homo sapien
gatgggcgatgcgaggcttcccttc

SEQ ID NO: 4405930 - DNA, 25 bp, Homo sapien
tgggcgatgcgaggcttcccttcat

SEQ ID NO: 4405931 - DNA, 25 bp, Homo sapien
actgggaggaaacgaaggatttgct

SEQ ID NO: 4405932 - DNA, 25 bp, Homo sapien
ctgggaggaaacgaaggatttgctg

SEQ ID NO: 4405933 - DNA, 25 bp, Homo sapien
gactgggaggaaacgaaggatttgc

SEQ ID NO: 4405934 - DNA, 25 bp, Homo sapien
gacactgacagtccgttctttgata

SEQ ID NO: 4405935 - DNA, 25 bp, Homo sapien
gtcaggttagatccttcgctaccat

SEQ ID NO: 4405936 - DNA, 25 bp, Homo sapien
tccgttctttgatatgtgagtcagg

SEQ ID NO: 4405937 - DNA, 25 bp, Homo sapien
tgagaacatcgaggccagtgacact

SEQ ID NO: 4405938 - DNA, 25 bp, Homo sapien
agactgcacagcttcccggatccct

SEQ ID NO: 4405939 - DNA, 25 bp, Homo sapien
tggcaggcccctagatagacagctt

SEQ ID NO: 4405940 - DNA, 25 bp, Homo sapien
ttggcgaacacatcaatgcacctgg

SEQ ID NO: 4405941 - DNA, 25 bp, Homo sapien
gaaagaaccaaccacgtcattagag

SEQ ID NO: 4405942 - DNA, 25 bp, Homo sapien
gagagggatcgaagactcagcccag

SEQ ID NO: 4405943 - DNA, 25 bp, Homo sapien
taatttcaagtggtatggaccagcc

SEQ ID NO: 4405944 - DNA, 25 bp, Homo sapien
cgtcagggtgacatcaacgagcagc

SEQ ID NO: 4405945 - DNA, 25 bp, Homo sapien
gaaggctgtcccttacaatagctaa

SEQ ID NO: 4405946 - DNA, 25 bp, Homo sapien
gaccgcaagggcagaaattcaagct

SEQ ID NO: 4405947 - DNA, 25 bp, Homo sapien
agtcagagagctgtgccgaatcacg

SEQ ID NO: 4405948 - DNA, 25 bp, Homo sapien
gaatcacgtgagctgaactgggagc

SEQ ID NO: 4405949 - DNA, 25 bp, Homo sapien
gctgtgccgaatcacgtgagctgaa

SEQ ID NO: 4405950 - DNA, 25 bp, Homo sapien
gagagctgtgccgaatcacgtgagc

SEQ ID NO: 4405951 - DNA, 25 bp, Homo sapien
ccagtgtcacaatataagggatctg

SEQ ID NO: 4405952 - DNA, 25 bp, Homo sapien
tctgggagcagtgttcttaggtctc

SEQ ID NO: 4405953 - DNA, 25 bp, Homo sapien
gaataaacagggcagaaagaggtct

SEQ ID NO: 4405954 - DNA, 25 bp, Homo sapien
tagaaggtactactatctgggaagc

SEQ ID NO: 4405955 - DNA, 25 bp, Homo sapien
tatttctgatgcaggaaacggagcg

SEQ ID NO: 4405956 - DNA, 25 bp, Homo sapien
ccaggccttatgctgaagttgggaa

SEQ ID NO: 4405957 - DNA, 25 bp, Homo sapien
taggactacatagaaacatctgaca

SEQ ID NO: 4405958 - DNA, 25 bp, Homo sapien
gatgagtattcctagcatgatagaa

SEQ ID NO: 4405959 - DNA, 25 bp, Homo sapien
ggcactggctcatcatgttgcactt

SEQ ID NO: 4405960 - DNA, 25 bp, Homo sapien
tggcagcaattaaggactctgagat

SEQ ID NO: 4405961 - DNA, 25 bp, Homo sapien
cgccgaaggcggatcttctgcttca

SEQ ID NO: 4405962 - DNA, 25 bp, Homo sapien
cacttcattagctcgatggcagcaa

SEQ ID NO: 4405963 - DNA, 25 bp, Homo sapien
ccaggtcggcacagctgccgaagtc

SEQ ID NO: 4405964 - DNA, 25 bp, Homo sapien
tgatggtcttcggaacatgccttcc

SEQ ID NO: 4405965 - DNA, 25 bp, Homo sapien
gagaggtagctgatgagggactgtc

SEQ ID NO: 4405966 - DNA, 25 bp, Homo sapien
gccgaagtcttgctcagagaggtag

SEQ ID NO: 4405967 - DNA, 25 bp, Homo sapien
gctgggtgtgctgacttcactgctt

SEQ ID NO: 4405968 - DNA, 25 bp, Homo sapien
ttcactgctttgaccagagtagggc

SEQ ID NO: 4405969 - DNA, 25 bp, Homo sapien
caacttcgccttatcattgcaggat

SEQ ID NO: 4405970 - DNA, 25 bp, Homo sapien
agagtagggcaaagggcctctcaac

SEQ ID NO: 4405971 - DNA, 25 bp, Homo sapien
aatccataggaagtattcagttata

SEQ ID NO: 4405972 - DNA, 25 bp, Homo sapien
aaataaagtaatccataggaagtat

SEQ ID NO: 4405973 - DNA, 25 bp, Homo sapien
aatacattctggtgttaattcaagg

SEQ ID NO: 4405974 - DNA, 25 bp, Homo sapien
tacattctggtgttaattcaaggaa

SEQ ID NO: 4405975 - DNA, 25 bp, Homo sapien
ttcaactataatggtgatattcctg

SEQ ID NO: 4405976 - DNA, 25 bp, Homo sapien
caactataatggtgatattcctggg

SEQ ID NO: 4405977 - DNA, 25 bp, Homo sapien
aactataatggtgatattcctgggg

SEQ ID NO: 4405978 - DNA, 25 bp, Homo sapien
tcaactataatggtgatattcctgg

SEQ ID NO: 4405979 - DNA, 25 bp, Homo sapien
ggcaaacttctaagacgtcacagga

SEQ ID NO: 4405980 - DNA, 25 bp, Homo sapien
gactcagttgctggatcgcatcacc

SEQ ID NO: 4405981 - DNA, 25 bp, Homo sapien
cctgaatcagtgatgcggccgtcag

SEQ ID NO: 4405982 - DNA, 25 bp, Homo sapien
taggctgcccctgctatcagctggt

SEQ ID NO: 4405983 - DNA, 25 bp, Homo sapien
tgaaaagtccccataacaagccctc

SEQ ID NO: 4405984 - DNA, 25 bp, Homo sapien
tgagtctcagtatttcgttataaac

SEQ ID NO: 4405985 - DNA, 25 bp, Homo sapien
acaaaataagatgttgtatcaccag

SEQ ID NO: 4405986 - DNA, 25 bp, Homo sapien
cataaatagacttagagattttgag

SEQ ID NO: 4405987 - DNA, 25 bp, Homo sapien
actagcagccggtgttcctcattac

SEQ ID NO: 4405988 - DNA, 25 bp, Homo sapien
ggtcatcttgctaactagcagccgg

SEQ ID NO: 4405989 - DNA, 25 bp, Homo sapien
tcagggtcatcttgctaactagcag

SEQ ID NO: 4405990 - DNA, 25 bp, Homo sapien
tgctaactagcagccggtgttcctc

SEQ ID NO: 4405991 - DNA, 25 bp, Homo sapien
caagttgccaatggccaggtactca

SEQ ID NO: 4405992 - DNA, 25 bp, Homo sapien
ttcctggtcccctaaggaagaggca

SEQ ID NO: 4405993 - DNA, 25 bp, Homo sapien
caatgctggtatccgaatgggagcg

SEQ ID NO: 4405994 - DNA, 25 bp, Homo sapien
gtgtctgcccctctgagaagctgga

SEQ ID NO: 4405995 - DNA, 25 bp, Homo sapien
agtgcagagactgaaactggggggg

SEQ ID NO: 4405996 - DNA, 25 bp, Homo sapien
cctctgctttcttgaggtttccggg

SEQ ID NO: 4405997 - DNA, 25 bp, Homo sapien
tgccctctgctttcttgaggtttcc

SEQ ID NO: 4405998 - DNA, 25 bp, Homo sapien
tgcagagactgaaactgggggggct

SEQ ID NO: 4405999 - DNA, 25 bp, Homo sapien
gcacggattggtggaggctagagaa

SEQ ID NO: 4406000 - DNA, 25 bp, Homo sapien
cattgttgggcacggattggtggag

SEQ ID NO: 4406001 - DNA, 25 bp, Homo sapien
tgggcacggattggtggaggctaga

SEQ ID NO: 4406002 - DNA, 25 bp, Homo sapien
ctgagccattgttgggcacggattg

SEQ ID NO: 4406003 - DNA, 25 bp, Homo sapien
ccaaagtaggaatgctgagcatagc

SEQ ID NO: 4406004 - DNA, 25 bp, Homo sapien
gcgggctctcgtgctttctggcaaa

SEQ ID NO: 4406005 - DNA, 25 bp, Homo sapien
ggctctttgtcaccaggagcgggct

SEQ ID NO: 4406006 - DNA, 25 bp, Homo sapien
aatgctgagcatagctgtttggagg

SEQ ID NO: 4406007 - DNA, 25 bp, Homo sapien
gtggataattccttgtcccctgtac

SEQ ID NO: 4406008 - DNA, 25 bp, Homo sapien
atagacgtggataattccttgtccc

SEQ ID NO: 4406009 - DNA, 25 bp, Homo sapien
aagtttgctgtagagggctacatcc

SEQ ID NO: 4406010 - DNA, 25 bp, Homo sapien
tgaaaaagtttgctgtagagggcta

SEQ ID NO: 4406011 - DNA, 25 bp, Homo sapien
gacgcatcgatctgagccaggaggc

SEQ ID NO: 4406012 - DNA, 25 bp, Homo sapien
catggacgcatcgatctgagccagg

SEQ ID NO: 4406013 - DNA, 25 bp, Homo sapien
agcatggccgtgacatgagcgtcac

SEQ ID NO: 4406014 - DNA, 25 bp, Homo sapien
agcgtcacttagcaggaaggcagca

SEQ ID NO: 4406015 - DNA, 25 bp, Homo sapien
cacagtgatagagcccatcagggag

SEQ ID NO: 4406016 - DNA, 25 bp, Homo sapien
gcccatcagggaggccttgagagaa

SEQ ID NO: 4406017 - DNA, 25 bp, Homo sapien
acagtgatagagcccatcagggagg

SEQ ID NO: 4406018 - DNA, 25 bp, Homo sapien
gccacagtgatagagcccatcaggg

SEQ ID NO: 4406019 - DNA, 25 bp, Homo sapien
ggtcgttctcgtgcacgctgatgaa

SEQ ID NO: 4406020 - DNA, 25 bp, Homo sapien
acagcacgttcactggcaccatcag

SEQ ID NO: 4406021 - DNA, 25 bp, Homo sapien
acagctcggcaacagcacgttcact

SEQ ID NO: 4406022 - DNA, 25 bp, Homo sapien
gatatactgtctatccccgagcagg

SEQ ID NO: 4406023 - DNA, 25 bp, Homo sapien
aaaggggcatgagtcaaaacacaca

SEQ ID NO: 4406024 - DNA, 25 bp, Homo sapien
ttctccacgtgaagggctgagtggg

SEQ ID NO: 4406025 - DNA, 25 bp, Homo sapien
gggactgagccaccggatgtctttc

SEQ ID NO: 4406026 - DNA, 25 bp, Homo sapien
ggatgtctttcacgaactgccagta

SEQ ID NO: 4406027 - DNA, 25 bp, Homo sapien
tgccagtaatccgtctggcggcggc

SEQ ID NO: 4406028 - DNA, 25 bp, Homo sapien
gataagcccgtgatagaggatgctc

SEQ ID NO: 4406029 - DNA, 25 bp, Homo sapien
acggataagcccgtgatagaggatg

SEQ ID NO: 4406030 - DNA, 25 bp, Homo sapien
gcccgtgatagaggatgctctgcat

SEQ ID NO: 4406031 - DNA, 25 bp, Homo sapien
taagcccgtgatagaggatgctctg

SEQ ID NO: 4406032 - DNA, 25 bp, Homo sapien
cctgcaaagccgctccaagccacca

SEQ ID NO: 4406033 - DNA, 25 bp, Homo sapien
gcaaagccgctccaagccaccatac

SEQ ID NO: 4406034 - DNA, 25 bp, Homo sapien
tgcaaagccgctccaagccaccata

SEQ ID NO: 4406035 - DNA, 25 bp, Homo sapien
gtccctgcaaagccgctccaagcca

SEQ ID NO: 4406036 - DNA, 25 bp, Homo sapien
tgttggttgataccaaaccctccac

SEQ ID NO: 4406037 - DNA, 25 bp, Homo sapien
tccaccgtcgtcttcaaattaccca

SEQ ID NO: 4406038 - DNA, 25 bp, Homo sapien
tcaaattacccagcaactgccagtg

SEQ ID NO: 4406039 - DNA, 25 bp, Homo sapien
ttagaccagacgttggggctgttgg

SEQ ID NO: 4406040 - DNA, 25 bp, Homo sapien
taataagcaggaagaaaatgtcacc

SEQ ID NO: 4406041 - DNA, 25 bp, Homo sapien
gaagaaaatgtcacccagtagaaag

SEQ ID NO: 4406042 - DNA, 25 bp, Homo sapien
gtcacccagtagaaagaaaatagac

SEQ ID NO: 4406043 - DNA, 25 bp, Homo sapien
tgggattacagatcttttgtatttt

SEQ ID NO: 4406044 - DNA, 25 bp, Homo sapien
tatctccactgcgtttaaaccaagg

SEQ ID NO: 4406045 - DNA, 25 bp, Homo sapien
taaaggattggacagtctgcagcat

SEQ ID NO: 4406046 - DNA, 25 bp, Homo sapien
gagacaacaattgcttcacagagga

SEQ ID NO: 4406047 - DNA, 25 bp, Homo sapien
tcacagaggagggtgtaactgacaa

SEQ ID NO: 4406048 - DNA, 25 bp, Homo sapien
cctggatcacggtgccaggagcact

SEQ ID NO: 4406049 - DNA, 25 bp, Homo sapien
gaattctgactgtacctggatcacg

SEQ ID NO: 4406050 - DNA, 25 bp, Homo sapien
gctgcaagctcagcagtagactgca

SEQ ID NO: 4406051 - DNA, 25 bp, Homo sapien
agtacatgtacctgagctgcaagct

SEQ ID NO: 4406052 - DNA, 25 bp, Homo sapien
gccgcctccgagctccattcccgcg

SEQ ID NO: 4406053 - DNA, 25 bp, Homo sapien
ccgagctccattcccgcgccctccg

SEQ ID NO: 4406054 - DNA, 25 bp, Homo sapien
ctccgagctccattcccgcgccctc

SEQ ID NO: 4406055 - DNA, 25 bp, Homo sapien
cgcctccgagctccattcccgcgcc

SEQ ID NO: 4406056 - DNA, 25 bp, Homo sapien
cgcttcgcccttcagggctcccggg

SEQ ID NO: 4406057 - DNA, 25 bp, Homo sapien
tcttcgcccaagagaggcgtccctg

SEQ ID NO: 4406058 - DNA, 25 bp, Homo sapien
aggcacctgcggccggtgggctccg

SEQ ID NO: 4406059 - DNA, 25 bp, Homo sapien
ccggggcggtgaggccgcctcttcg

SEQ ID NO: 4406060 - DNA, 25 bp, Homo sapien
tgatgcgctacacccgggcggcgac

SEQ ID NO: 4406061 - DNA, 25 bp, Homo sapien
gcctgggctgcggcttctatcccgg

SEQ ID NO: 4406062 - DNA, 25 bp, Homo sapien
ctgggctgcggcttctatcccggcc

SEQ ID NO: 4406063 - DNA, 25 bp, Homo sapien
gcgacagcgggagggaccgccgcct

SEQ ID NO: 4406064 - DNA, 25 bp, Homo sapien
tactagagtccctagtcagtgcaat

SEQ ID NO: 4406065 - DNA, 25 bp, Homo sapien
tatcctgtacacctgtataaactgc

SEQ ID NO: 4406066 - DNA, 25 bp, Homo sapien
gcaagtcaaatccaacaacatgtaa

SEQ ID NO: 4406067 - DNA, 25 bp, Homo sapien
cagattatcgtagtgttttcacagg

SEQ ID NO: 4406068 - DNA, 25 bp, Homo sapien
aacaattgtccgttgtttatctgaa

SEQ ID NO: 4406069 - DNA, 25 bp, Homo sapien
caatcctggaggttgttttatctac

SEQ ID NO: 4406070 - DNA, 25 bp, Homo sapien
ctgtttatctgaaacgtgggacata

SEQ ID NO: 4406071 - DNA, 25 bp, Homo sapien
tatctgaaacgtgggacatatttgt

SEQ ID NO: 4406072 - DNA, 25 bp, Homo sapien
gagagagtagtaaaatcaagcacat

SEQ ID NO: 4406073 - DNA, 25 bp, Homo sapien
tctctagtttttagcagtccagaca

SEQ ID NO: 4406074 - DNA, 25 bp, Homo sapien
cccttgataggtgtgtggttcactc

SEQ ID NO: 4406075 - DNA, 25 bp, Homo sapien
tattgttcttgagtttccgagtcca

SEQ ID NO: 4406076 - DNA, 25 bp, Homo sapien
tacagacacgggaaacgttagcatt

SEQ ID NO: 4406077 - DNA, 25 bp, Homo sapien
ccagatgttttgagagtgccgattg

SEQ ID NO: 4406078 - DNA, 25 bp, Homo sapien
tactttggagttaaggtgacgcagg

SEQ ID NO: 4406079 - DNA, 25 bp, Homo sapien
tattagggtagtgaacaccgtgcca

SEQ ID NO: 4406080 - DNA, 25 bp, Homo sapien
gatattttcctggtactcgtactga

SEQ ID NO: 4406081 - DNA, 25 bp, Homo sapien
cctgtatttggtctaggaacagtac

SEQ ID NO: 4406082 - DNA, 25 bp, Homo sapien
tttagtctgatttagaattactggt

SEQ ID NO: 4406083 - DNA, 25 bp, Homo sapien
caagtttgctgtctttagaatggtt

SEQ ID NO: 4406084 - DNA, 25 bp, Homo sapien
gatacggttagacttctcatgcaat

SEQ ID NO: 4406085 - DNA, 25 bp, Homo sapien
tgttatcggaacctcaggcacctac

SEQ ID NO: 4406086 - DNA, 25 bp, Homo sapien
taaaccacggtggaagcatctggtg

SEQ ID NO: 4406087 - DNA, 25 bp, Homo sapien
ggcggagttgcctttgatacggtta

SEQ ID NO: 4406088 - DNA, 25 bp, Homo sapien
ggtgatccactcaccacctccacct

SEQ ID NO: 4406089 - DNA, 25 bp, Homo sapien
ggctcaccgtaacttctgtctcccg

SEQ ID NO: 4406090 - DNA, 25 bp, Homo sapien
atttcagcatattggtcaggcttgc

SEQ ID NO: 4406091 - DNA, 25 bp, Homo sapien
cagtggtacggtcttggctcaccgt

SEQ ID NO: 4406092 - DNA, 25 bp, Homo sapien
gacagccttagttcacagtttatgg

SEQ ID NO: 4406093 - DNA, 25 bp, Homo sapien
catgaggtagtacacagattgaagc

SEQ ID NO: 4406094 - DNA, 25 bp, Homo sapien
gaacagcggcgaatctctcatgagg

SEQ ID NO: 4406095 - DNA, 25 bp, Homo sapien
aactcagacagcagcctcaagtagg

SEQ ID NO: 4406096 - DNA, 25 bp, Homo sapien
tcttgccatgaagaatttcacagta

SEQ ID NO: 4406097 - DNA, 25 bp, Homo sapien
tagcacagtccttggataagaactc

SEQ ID NO: 4406098 - DNA, 25 bp, Homo sapien
ttagtcaaaattcccgcactcctgg

SEQ ID NO: 4406099 - DNA, 25 bp, Homo sapien
tagtaaccagttaggctctaggatc

SEQ ID NO: 4406100 - DNA, 25 bp, Homo sapien
taaaaagacacagtcgcctcagaat

SEQ ID NO: 4406101 - DNA, 25 bp, Homo sapien
tttacttgtgtctatctgcatgagg

SEQ ID NO: 4406102 - DNA, 25 bp, Homo sapien
tgttaacggtaaatctgtcattgga

SEQ ID NO: 4406103 - DNA, 25 bp, Homo sapien
gatgcaaactgttactcagacctct

SEQ ID NO: 4406104 - DNA, 25 bp, Homo sapien
agtgctgtgtgaaccataaaaggcc

SEQ ID NO: 4406105 - DNA, 25 bp, Homo sapien
tatttcttaacgttttgcagcctct

SEQ ID NO: 4406106 - DNA, 25 bp, Homo sapien
gcagcctctatagtagtgcctgaaa

SEQ ID NO: 4406107 - DNA, 25 bp, Homo sapien
actccatgaaggtaagaaccatgtc

SEQ ID NO: 4406108 - DNA, 25 bp, Homo sapien
gaccttagcaggtcttagctcatag

SEQ ID NO: 4406109 - DNA, 25 bp, Homo sapien
tcatccaacaagttcccttgtctct

SEQ ID NO: 4406110 - DNA, 25 bp, Homo sapien
tggaggaattgtctgagcctaggaa

SEQ ID NO: 4406111 - DNA, 25 bp, Homo sapien
gacccttggcaatgacgtttaactc

SEQ ID NO: 4406112 - DNA, 25 bp, Homo sapien
atctcctttaagtacgatgcgtatg

SEQ ID NO: 4406113 - DNA, 25 bp, Homo sapien
aattacatttattttaatgctgaat

SEQ ID NO: 4406114 - DNA, 25 bp, Homo sapien
ttaattacatttattttaatgctga

SEQ ID NO: 4406115 - DNA, 25 bp, Homo sapien
tttaattacatttattttaatgctg

SEQ ID NO: 4406116 - DNA, 25 bp, Homo sapien
taattacatttattttaatgctgaa

SEQ ID NO: 4406117 - DNA, 25 bp, Homo sapien
catgagctctgtaggtccggcggca

SEQ ID NO: 4406118 - DNA, 25 bp, Homo sapien
atctgttccttttccataaggatca

SEQ ID NO: 4406119 - DNA, 25 bp, Homo sapien
gagctctgtaggtccggcggcacat

SEQ ID NO: 4406120 - DNA, 25 bp, Homo sapien
ccttttccataaggatcatctcaat

SEQ ID NO: 4406121 - DNA, 25 bp, Homo sapien
tttctgggccaccgaccttgtgtcc

SEQ ID NO: 4406122 - DNA, 25 bp, Homo sapien
catctgaacccttaagttcagcatc

SEQ ID NO: 4406123 - DNA, 25 bp, Homo sapien
ttctgggccaccgaccttgtgtcca

SEQ ID NO: 4406124 - DNA, 25 bp, Homo sapien
gaacccttaagttcagcatcactct

SEQ ID NO: 4406125 - DNA, 25 bp, Homo sapien
caactccatcattgtaacgtcggaa

SEQ ID NO: 4406126 - DNA, 25 bp, Homo sapien
catcattgtaacgtcggaatggtac

SEQ ID NO: 4406127 - DNA, 25 bp, Homo sapien
ctgccaactccatcattgtaacgtc

SEQ ID NO: 4406128 - DNA, 25 bp, Homo sapien
gccaactccatcattgtaacgtcgg

SEQ ID NO: 4406129 - DNA, 25 bp, Homo sapien
tggtggcctgagcagttccacgagt

SEQ ID NO: 4406130 - DNA, 25 bp, Homo sapien
ccttggtggcctgagcagttccacg

SEQ ID NO: 4406131 - DNA, 25 bp, Homo sapien
cttggtggcctgagcagttccacga

SEQ ID NO: 4406132 - DNA, 25 bp, Homo sapien
gtggcctgagcagttccacgagtgt

SEQ ID NO: 4406133 - DNA, 25 bp, Homo sapien
tagcgaaccatttttcacagattac

SEQ ID NO: 4406134 - DNA, 25 bp, Homo sapien
aagtgaatagcgaaccatttttcac

SEQ ID NO: 4406135 - DNA, 25 bp, Homo sapien
catttttcacagattacctcaggct

SEQ ID NO: 4406136 - DNA, 25 bp, Homo sapien
gaaccatttttcacagattacctca

SEQ ID NO: 4406137 - DNA, 25 bp, Homo sapien
cagggaccacaccaatgctataatg

SEQ ID NO: 4406138 - DNA, 25 bp, Homo sapien
gatattttatctcacacagtagaag

SEQ ID NO: 4406139 - DNA, 25 bp, Homo sapien
acatcacacgttggagaaaatagcc

SEQ ID NO: 4406140 - DNA, 25 bp, Homo sapien
gaaaatagccagttagtatgggaca

SEQ ID NO: 4406141 - DNA, 25 bp, Homo sapien
ttcatcgagtaagaggtcaatattc

SEQ ID NO: 4406142 - DNA, 25 bp, Homo sapien
gagagaataagttcatcgagtaaga

SEQ ID NO: 4406143 - DNA, 25 bp, Homo sapien
taagttcatcgagtaagaggtcaat

SEQ ID NO: 4406144 - DNA, 25 bp, Homo sapien
tcgagtaagaggtcaatattctgat

SEQ ID NO: 4406145 - DNA, 25 bp, Homo sapien
ccttatgagggagatgatacaagcc

SEQ ID NO: 4406146 - DNA, 25 bp, Homo sapien
ttgaagcgttgtgtgtagagtcctg

SEQ ID NO: 4406147 - DNA, 25 bp, Homo sapien
caagccaaggagtttactagaatct

SEQ ID NO: 4406148 - DNA, 25 bp, Homo sapien
tagagtcctgggagctttacctggt

SEQ ID NO: 4406149 - DNA, 25 bp, Homo sapien
ggcctcacagtgatttaagctaatg

SEQ ID NO: 4406150 - DNA, 25 bp, Homo sapien
ccaaatgtagttaatggcctcacag

SEQ ID NO: 4406151 - DNA, 25 bp, Homo sapien
tttagtatcctagaatgcaagtcac

SEQ ID NO: 4406152 - DNA, 25 bp, Homo sapien
tttgttttcatcacgcccagtagta

SEQ ID NO: 4406153 - DNA, 25 bp, Homo sapien
gaaagtggaaagcaatatactgtac

SEQ ID NO: 4406154 - DNA, 25 bp, Homo sapien
agtggaaagcaatatactgtacttg

SEQ ID NO: 4406155 - DNA, 25 bp, Homo sapien
ccagaaagtggaaagcaatatactg

SEQ ID NO: 4406156 - DNA, 25 bp, Homo sapien
cagaaagtggaaagcaatatactgt

SEQ ID NO: 4406157 - DNA, 25 bp, Homo sapien
gtagaaagcgatgcactgtacctgc

SEQ ID NO: 4406158 - DNA, 25 bp, Homo sapien
cctgcaggaagtagaaagcgataca

SEQ ID NO: 4406159 - DNA, 25 bp, Homo sapien
gtagaaagccgtgcactgtacctgc

SEQ ID NO: 4406160 - DNA, 25 bp, Homo sapien
gtagaaagcggtgcactgtacctgc

SEQ ID NO: 4406161 - DNA, 25 bp, Homo sapien
ttgccatttggccaatcatgtgcga

SEQ ID NO: 4406162 - DNA, 25 bp, Homo sapien
ggccaatcatgtgcgacctcgatct

SEQ ID NO: 4406163 - DNA, 25 bp, Homo sapien
gacctcgatctgtcccaagcattca

SEQ ID NO: 4406164 - DNA, 25 bp, Homo sapien
catgtgcgacctcgatctgtcccaa

SEQ ID NO: 4406165 - DNA, 25 bp, Homo sapien
caatacgattaactgaattacaggc

SEQ ID NO: 4406166 - DNA, 25 bp, Homo sapien
caagagtcagtgtacttttgaacag

SEQ ID NO: 4406167 - DNA, 25 bp, Homo sapien
tgattatttccaaggaccacacaaa

SEQ ID NO: 4406168 - DNA, 25 bp, Homo sapien
aaatcttacaggactagctctgagc

SEQ ID NO: 4406169 - DNA, 25 bp, Homo sapien
cttctgagtgtgaacaccggccgcg

SEQ ID NO: 4406170 - DNA, 25 bp, Homo sapien
gctgaaacactcaacactgtgatga

SEQ ID NO: 4406171 - DNA, 25 bp, Homo sapien
cattctcttgagaacacacggcact

SEQ ID NO: 4406172 - DNA, 25 bp, Homo sapien
gggacagctattttcacaggtcaaa

SEQ ID NO: 4406173 - DNA, 25 bp, Homo sapien
ggtaatcaacatgttcctgcctaag

SEQ ID NO: 4406174 - DNA, 25 bp, Homo sapien
taagcttacatagtagttccctgga

SEQ ID NO: 4406175 - DNA, 25 bp, Homo sapien
tttctcaagagctcaggatacactg

SEQ ID NO: 4406176 - DNA, 25 bp, Homo sapien
gagtttcttgccctatctggtctgg

SEQ ID NO: 4406177 - DNA, 25 bp, Homo sapien
caccgcacaggagcctttactcaag

SEQ ID NO: 4406178 - DNA, 25 bp, Homo sapien
aagcgcctttatatactcaatgatg

SEQ ID NO: 4406179 - DNA, 25 bp, Homo sapien
tccttttagttgttggtgatatcct

SEQ ID NO: 4406180 - DNA, 25 bp, Homo sapien
tgatatcctttggtgttcactgcct

SEQ ID NO: 4406181 - DNA, 25 bp, Homo sapien
cctctgcagaggtaggaaggtatga

SEQ ID NO: 4406182 - DNA, 25 bp, Homo sapien
ttggaaagcacaattcggtttaaca

SEQ ID NO: 4406183 - DNA, 25 bp, Homo sapien
caaatcatgatgcttttgttgggag

SEQ ID NO: 4406184 - DNA, 25 bp, Homo sapien
actccagtgtaagatgaagatgacc

SEQ ID NO: 4406185 - DNA, 25 bp, Homo sapien
tcccatcactgaacagtgttggcgg

SEQ ID NO: 4406186 - DNA, 25 bp, Homo sapien
tcactgaacagtgttggcggctgag

SEQ ID NO: 4406187 - DNA, 25 bp, Homo sapien
cccatcactgaacagtgttggcggc

SEQ ID NO: 4406188 - DNA, 25 bp, Homo sapien
atcactgaacagtgttggcggctga

SEQ ID NO: 4406189 - DNA, 25 bp, Homo sapien
tgaacagtgttggcggctgagagcc

SEQ ID NO: 4406190 - DNA, 25 bp, Homo sapien
gaacagtgttggcggctgagagccc

SEQ ID NO: 4406191 - DNA, 25 bp, Homo sapien
gattggagcgtgttcatacctgagg

SEQ ID NO: 4406192 - DNA, 25 bp, Homo sapien
tcaaggcaagcatgatctggtgggt

SEQ ID NO: 4406193 - DNA, 25 bp, Homo sapien
gagtgacagctttcctatttgccag

SEQ ID NO: 4406194 - DNA, 25 bp, Homo sapien
cctgaggtgtggttcccttggcaaa

SEQ ID NO: 4406195 - DNA, 25 bp, Homo sapien
gaggaagccctaagtcaatggtgta

SEQ ID NO: 4406196 - DNA, 25 bp, Homo sapien
gaaaacccacctaacaggcagagtg

SEQ ID NO: 4406197 - DNA, 25 bp, Homo sapien
gtagctaagccagtgaactcctttg

SEQ ID NO: 4406198 - DNA, 25 bp, Homo sapien
aacttcttcccagcaaggtatgagg

SEQ ID NO: 4406199 - DNA, 25 bp, Homo sapien
cttgctatcaactttgtctttaggc

SEQ ID NO: 4406200 - DNA, 25 bp, Homo sapien
ctttgccttttgaatccttgctatc

SEQ ID NO: 4406201 - DNA, 25 bp, Homo sapien
gtatcatagtgcctcgccaccaggc

SEQ ID NO: 4406202 - DNA, 25 bp, Homo sapien
taggcatcttgaaaccaccaatttc

SEQ ID NO: 4406203 - DNA, 25 bp, Homo sapien
tacgacgtatgctatgcctgacaag

SEQ ID NO: 4406204 - DNA, 25 bp, Homo sapien
gagtgagtacgacgtatgctatgcc

SEQ ID NO: 4406205 - DNA, 25 bp, Homo sapien
cgtatgctatgcctgacaagctgca

SEQ ID NO: 4406206 - DNA, 25 bp, Homo sapien
tgcctgacaagctgcattctttcca

SEQ ID NO: 4406207 - DNA, 25 bp, Homo sapien
ctctccttttctatacgatcttcaa

SEQ ID NO: 4406208 - DNA, 25 bp, Homo sapien
caatgatgacctgttcatactctct

SEQ ID NO: 4406209 - DNA, 25 bp, Homo sapien
tataacgctctttaattccaagaga

SEQ ID NO: 4406210 - DNA, 25 bp, Homo sapien
taattccaagagatcctgttttacc

SEQ ID NO: 4406211 - DNA, 25 bp, Homo sapien
tctttgccaggtcttgaaggtgtgc

SEQ ID NO: 4406212 - DNA, 25 bp, Homo sapien
gtccttatcgtatttctccatccag

SEQ ID NO: 4406213 - DNA, 25 bp, Homo sapien
gcctttgtggctttgagagcattta

SEQ ID NO: 4406214 - DNA, 25 bp, Homo sapien
ttgaaggtgtgctaagtcactggcc

SEQ ID NO: 4406215 - DNA, 25 bp, Homo sapien
tttccctaattgagtacgcatccag

SEQ ID NO: 4406216 - DNA, 25 bp, Homo sapien
tctcagaaggcctgggtagtttgct

SEQ ID NO: 4406217 - DNA, 25 bp, Homo sapien
taatctcccattttgactagtggcc

SEQ ID NO: 4406218 - DNA, 25 bp, Homo sapien
tgggtccccgtgcatgaacatcaat

SEQ ID NO: 4406219 - DNA, 25 bp, Homo sapien
tctgccgcccttcgtggtaaatgtg

SEQ ID NO: 4406220 - DNA, 25 bp, Homo sapien
aactgactcagtcctaagagctagg

SEQ ID NO: 4406221 - DNA, 25 bp, Homo sapien
tatctctgacaattaagtgctccca

SEQ ID NO: 4406222 - DNA, 25 bp, Homo sapien
ccaattatccggaggcacttcagga

SEQ ID NO: 4406223 - DNA, 25 bp, Homo sapien
ccaaatcatagcagggaagctctga

SEQ ID NO: 4406224 - DNA, 25 bp, Homo sapien
ccagactctctggtaagtgcatcta

SEQ ID NO: 4406225 - DNA, 25 bp, Homo sapien
caaatggagtgtgatagcctaccct

SEQ ID NO: 4406226 - DNA, 25 bp, Homo sapien
gcttggtggtagacgtgtaagtcac

SEQ ID NO: 4406227 - DNA, 25 bp, Homo sapien
caggggtgactgtaccaggtctgaa

SEQ ID NO: 4406228 - DNA, 25 bp, Homo sapien
caggtctgaagagtgagccgtttcc

SEQ ID NO: 4406229 - DNA, 25 bp, Homo sapien
tgaagagcaaccctttccaaggcat

SEQ ID NO: 4406230 - DNA, 25 bp, Homo sapien
cctcccagatgaagttatcacaggg

SEQ ID NO: 4406231 - DNA, 25 bp, Homo sapien
gtgactgtaccacgtctgaagagtg

SEQ ID NO: 4406232 - DNA, 25 bp, Homo sapien
cacaggggtgactgtaccacgtctg

SEQ ID NO: 4406233 - DNA, 25 bp, Homo sapien
gaagagcaaccctttccaaggcacc

SEQ ID NO: 4406234 - DNA, 25 bp, Homo sapien
ctgtaccacgtctgaagagtgaccc

SEQ ID NO: 4406235 - DNA, 25 bp, Homo sapien
tgcactctctcaaattacagctata

SEQ ID NO: 4406236 - DNA, 25 bp, Homo sapien
ctgcactctctcaaattacagctat

SEQ ID NO: 4406237 - DNA, 25 bp, Homo sapien
ctcaaattacagctatataagatat

SEQ ID NO: 4406238 - DNA, 25 bp, Homo sapien
tctctcaaattacagctatataaga

SEQ ID NO: 4406239 - DNA, 25 bp, Homo sapien
gcctcttcttcggttttcatcctga

SEQ ID NO: 4406240 - DNA, 25 bp, Homo sapien
atgagtccgggcctcttcttcggtt

SEQ ID NO: 4406241 - DNA, 25 bp, Homo sapien
ctctgtatgagtccgggcctcttct

SEQ ID NO: 4406242 - DNA, 25 bp, Homo sapien
aatctctgtatgagtccgggcctct

SEQ ID NO: 4406243 - DNA, 25 bp, Homo sapien
ctcggtcggtagctgaggctccctt

SEQ ID NO: 4406244 - DNA, 25 bp, Homo sapien
tgggaatcagaagttctcaagatga

SEQ ID NO: 4406245 - DNA, 25 bp, Homo sapien
ggctgggaatcagaagttctcaaga

SEQ ID NO: 4406246 - DNA, 25 bp, Homo sapien
agcagcagctcggtcggtagctgag

SEQ ID NO: 4406247 - DNA, 25 bp, Homo sapien
tggcgcggcactgtgtggactgcgt

SEQ ID NO: 4406248 - DNA, 25 bp, Homo sapien
tgcagagccacgtggcgcggcactg

SEQ ID NO: 4406249 - DNA, 25 bp, Homo sapien
tccctgcaactcctgttcaccaaca

SEQ ID NO: 4406250 - DNA, 25 bp, Homo sapien
gatcccgggctttcagttccctgca

SEQ ID NO: 4406251 - DNA, 25 bp, Homo sapien
gggagtctccctagttgaagtctga

SEQ ID NO: 4406252 - DNA, 25 bp, Homo sapien
gagacgagcacaatcccgtgagctg

SEQ ID NO: 4406253 - DNA, 25 bp, Homo sapien
aagagtgttgacgtggccttgagcc

SEQ ID NO: 4406254 - DNA, 25 bp, Homo sapien
tgagccacgtcagtctcagagcgag

SEQ ID NO: 4406255 - DNA, 25 bp, Homo sapien
tgcgtgtgtgccatttagcattccc

SEQ ID NO: 4406256 - DNA, 25 bp, Homo sapien
gaagttcagcgctctcgatgctgta

SEQ ID NO: 4406257 - DNA, 25 bp, Homo sapien
tgacttctcatcctataaactcagg

SEQ ID NO: 4406258 - DNA, 25 bp, Homo sapien
tcctggcatttttcaccgtgacttc

SEQ ID NO: 4406259 - DNA, 25 bp, Homo sapien
gcgattctccaagttggattttgcc

SEQ ID NO: 4406260 - DNA, 25 bp, Homo sapien
ggcaatctgcagctcggtattggtt

SEQ ID NO: 4406261 - DNA, 25 bp, Homo sapien
tattggttttcatgtagcgattctc

SEQ ID NO: 4406262 - DNA, 25 bp, Homo sapien
tgttctgttacactttttctgggtc

SEQ ID NO: 4406263 - DNA, 25 bp, Homo sapien
agttttcagtaactctgcggattta

SEQ ID NO: 4406264 - DNA, 25 bp, Homo sapien
tggtcgacccgactactagttttca

SEQ ID NO: 4406265 - DNA, 25 bp, Homo sapien
ctggacttcaaattgccattccttt

SEQ ID NO: 4406266 - DNA, 25 bp, Homo sapien
tggacttcaaattgccattcctttt

SEQ ID NO: 4406267 - DNA, 25 bp, Homo sapien
ttgcaggagactgttgtaagtggcc

SEQ ID NO: 4406268 - DNA, 25 bp, Homo sapien
taatggtatctgcaatcacatcgct

SEQ ID NO: 4406269 - DNA, 25 bp, Homo sapien
cgaatcttgcaactccttaatggta

SEQ ID NO: 4406270 - DNA, 25 bp, Homo sapien
ctctctttgctcaaagcttgcagga

SEQ ID NO: 4406271 - DNA, 25 bp, Homo sapien
tcatgatggtctgccttgtaggttt

SEQ ID NO: 4406272 - DNA, 25 bp, Homo sapien
catgatggtctgccttgtaggtttt

SEQ ID NO: 4406273 - DNA, 25 bp, Homo sapien
cagtgtctccgtagtcatgatggtc

SEQ ID NO: 4406274 - DNA, 25 bp, Homo sapien
ttcagtgtctccgtagtcatgatgg

SEQ ID NO: 4406275 - DNA, 25 bp, Homo sapien
ggcaagttgggtccttcctcagtta

SEQ ID NO: 4406276 - DNA, 25 bp, Homo sapien
actccacagcgaaccggcctctgtg

SEQ ID NO: 4406277 - DNA, 25 bp, Homo sapien
gtgtctgatttctggcaagttgggt

SEQ ID NO: 4406278 - DNA, 25 bp, Homo sapien
ggtatttttgtgattgttgaggcca

SEQ ID NO: 4406279 - DNA, 25 bp, Homo sapien
tggaagtttgtctagattcgttcct

SEQ ID NO: 4406280 - DNA, 25 bp, Homo sapien
gattcgttccttctagattcatttc

SEQ ID NO: 4406281 - DNA, 25 bp, Homo sapien
gtttgtctagattcgttccttctag

SEQ ID NO: 4406282 - DNA, 25 bp, Homo sapien
gttccttctagattcatttctctgc

SEQ ID NO: 4406283 - DNA, 25 bp, Homo sapien
tcttctccgtcattccccaacttac

SEQ ID NO: 4406284 - DNA, 25 bp, Homo sapien
gctgctaacttcacacaacattctt

SEQ ID NO: 4406285 - DNA, 25 bp, Homo sapien
accacacgcgccctgctgctaactt

SEQ ID NO: 4406286 - DNA, 25 bp, Homo sapien
ttaccacctggtacactctgctcaa

SEQ ID NO: 4406287 - DNA, 25 bp, Homo sapien
gtggtgtcctccagaactgccgaga

SEQ ID NO: 4406288 - DNA, 25 bp, Homo sapien
cgggcatgatgtagttcagaataga

SEQ ID NO: 4406289 - DNA, 25 bp, Homo sapien
gctctgtctcccttcgtactgaacg

SEQ ID NO: 4406290 - DNA, 25 bp, Homo sapien
agaactgccgagatcctcagcacat

SEQ ID NO: 4406291 - DNA, 25 bp, Homo sapien
ccttcttcttctacggtactaggtg

SEQ ID NO: 4406292 - DNA, 25 bp, Homo sapien
ggttcgcctgtcactgacaccgtca

SEQ ID NO: 4406293 - DNA, 25 bp, Homo sapien
agagtttccgggatttctgggatga

SEQ ID NO: 4406294 - DNA, 25 bp, Homo sapien
gacagtggctctagagtttccggga

SEQ ID NO: 4406295 - DNA, 25 bp, Homo sapien
tttggaggaaggtttgagtcttcca

SEQ ID NO: 4406296 - DNA, 25 bp, Homo sapien
tggaggaaggtttgagtcttccagg

SEQ ID NO: 4406297 - DNA, 25 bp, Homo sapien
ttggaggaaggtttgagtcttccag

SEQ ID NO: 4406298 - DNA, 25 bp, Homo sapien
tgctgggctcctgtgatattcacat

SEQ ID NO: 4406299 - DNA, 25 bp, Homo sapien
tattcacatcgtcgtataatagaac

SEQ ID NO: 4406300 - DNA, 25 bp, Homo sapien
ggctcctgtgatattcacatcgtcg

SEQ ID NO: 4406301 - DNA, 25 bp, Homo sapien
cctgtgatattcacatcgtcgtata

SEQ ID NO: 4406302 - DNA, 25 bp, Homo sapien
tataatctcacaaaagtgcagttac

SEQ ID NO: 4406303 - DNA, 25 bp, Homo sapien
tatttataatctcacaaaagtgcag

SEQ ID NO: 4406304 - DNA, 25 bp, Homo sapien
taccctccgtggtatatttataatc

SEQ ID NO: 4406305 - DNA, 25 bp, Homo sapien
tcttctgtagcttcgttaccctccg

SEQ ID NO: 4406306 - DNA, 25 bp, Homo sapien
cctccactcagggttcgcctttcca

SEQ ID NO: 4406307 - DNA, 25 bp, Homo sapien
ccactcagggttcgcctttccacct

SEQ ID NO: 4406308 - DNA, 25 bp, Homo sapien
gcagcgggaacatcctccactcagg

SEQ ID NO: 4406309 - DNA, 25 bp, Homo sapien
aatcattctttaggcagcgggaaca

SEQ ID NO: 4406310 - DNA, 25 bp, Homo sapien
atgcctaaagatgtttatgctgtag

SEQ ID NO: 4406311 - DNA, 25 bp, Homo sapien
attatagcgcaagtcactgcaccag

SEQ ID NO: 4406312 - DNA, 25 bp, Homo sapien
catgcctaaagatgtttatgctgta

SEQ ID NO: 4406313 - DNA, 25 bp, Homo sapien
gcaacaattcaacagttacgcctgg

SEQ ID NO: 4406314 - DNA, 25 bp, Homo sapien
tcttgttagaacaggtgttagtagc

SEQ ID NO: 4406315 - DNA, 25 bp, Homo sapien
ccacagccagccttgaataaatagt

SEQ ID NO: 4406316 - DNA, 25 bp, Homo sapien
gactctcatgttcctaggtctcagg

SEQ ID NO: 4406317 - DNA, 25 bp, Homo sapien
tacatggaggttgggaatagtgcac

SEQ ID NO: 4406318 - DNA, 25 bp, Homo sapien
agctcttgggacttgtgactggaca

SEQ ID NO: 4406319 - DNA, 25 bp, Homo sapien
taaaaagcaatcctatggtaggtac

SEQ ID NO: 4406320 - DNA, 25 bp, Homo sapien
ttgcactttaagcaggcctcctaaa

SEQ ID NO: 4406321 - DNA, 25 bp, Homo sapien
cagtccaatggtggtatgcaagcca

SEQ ID NO: 4406322 - DNA, 25 bp, Homo sapien
aacttgggaattacgcagtcagcgc

SEQ ID NO: 4406323 - DNA, 25 bp, Homo sapien
cacggtaagtggtaggcatctgagc

SEQ ID NO: 4406324 - DNA, 25 bp, Homo sapien
tcaccgttgccaaaggaggagtcct

SEQ ID NO: 4406325 - DNA, 25 bp, Homo sapien
ttttgtatagttcctcacggctcag

SEQ ID NO: 4406326 - DNA, 25 bp, Homo sapien
cagctcagtgagttcgtaattttac

SEQ ID NO: 4406327 - DNA, 25 bp, Homo sapien
gagccactgggatttgtcccaattt

SEQ ID NO: 4406328 - DNA, 25 bp, Homo sapien
tcccgttgaatgacttccagctcag

SEQ ID NO: 4406329 - DNA, 25 bp, Homo sapien
ttttgcagagggttgtatgtacgtc

SEQ ID NO: 4406330 - DNA, 25 bp, Homo sapien
cacctagtaggtgcatgtcactttg

SEQ ID NO: 4406331 - DNA, 25 bp, Homo sapien
cttttcatacagaggactacactga

SEQ ID NO: 4406332 - DNA, 25 bp, Homo sapien
tatgtacgtctaaacacctggcacc

SEQ ID NO: 4406333 - DNA, 25 bp, Homo sapien
gatggacgtgatcgccgccctcatc

SEQ ID NO: 4406334 - DNA, 25 bp, Homo sapien
atcttctgcggcgaacttctagcgg

SEQ ID NO: 4406335 - DNA, 25 bp, Homo sapien
tttattggccggcttcgcgccacga

SEQ ID NO: 4406336 - DNA, 25 bp, Homo sapien
ctgcggcgaacttctagcgggtgac

SEQ ID NO: 4406337 - DNA, 25 bp, Homo sapien
ctccacacactcgtggccttccgca

SEQ ID NO: 4406338 - DNA, 25 bp, Homo sapien
ttttggtacaatcgatgaacccaca

SEQ ID NO: 4406339 - DNA, 25 bp, Homo sapien
ggtgttttcaatgaaccgacatcat

SEQ ID NO: 4406340 - DNA, 25 bp, Homo sapien
gcatcctgtaccacagaggcatttt

SEQ ID NO: 4406341 - DNA, 25 bp, Homo sapien
atgtctgaaagcatcactgttccac

SEQ ID NO: 4406342 - DNA, 25 bp, Homo sapien
catcactgttccactgtgacgcctg

SEQ ID NO: 4406343 - DNA, 25 bp, Homo sapien
tttccaccgtgatgtgacgcctgct

SEQ ID NO: 4406344 - DNA, 25 bp, Homo sapien
ctgacagcgtgggaaggcgggactt

SEQ ID NO: 4406345 - DNA, 25 bp, Homo sapien
tcaactctagatctttgttcctgtt

SEQ ID NO: 4406346 - DNA, 25 bp, Homo sapien
tcctgttcctcgagcctggtggtca

SEQ ID NO: 4406347 - DNA, 25 bp, Homo sapien
cctctggcttctgctaggcaatctg

SEQ ID NO: 4406348 - DNA, 25 bp, Homo sapien
tgatttagctctcaaggtggtcctt

SEQ ID NO: 4406349 - DNA, 25 bp, Homo sapien
tgacgaccatcagaccttgaagcag

SEQ ID NO: 4406350 - DNA, 25 bp, Homo sapien
tggcttggaagaattgacgaccatc

SEQ ID NO: 4406351 - DNA, 25 bp, Homo sapien
agcagcctgtcctcatcagcaaccc

SEQ ID NO: 4406352 - DNA, 25 bp, Homo sapien
ccatcagaccttgaagcagaacttc

SEQ ID NO: 4406353 - DNA, 25 bp, Homo sapien
ggaactgcaagccaccaagtcttca

SEQ ID NO: 4406354 - DNA, 25 bp, Homo sapien
tgtcgttgaagcaagagactgtcac

SEQ ID NO: 4406355 - DNA, 25 bp, Homo sapien
cgtgcagtcatctttacaatccagc

SEQ ID NO: 4406356 - DNA, 25 bp, Homo sapien
agtaaatttaccagtcgtgcagtca

SEQ ID NO: 4406357 - DNA, 25 bp, Homo sapien
atcagcagtcacgacccatttccag

SEQ ID NO: 4406358 - DNA, 25 bp, Homo sapien
ctttgaggccattaagctgttgaca

SEQ ID NO: 4406359 - DNA, 25 bp, Homo sapien
agccagcctagaatggaagaattca

SEQ ID NO: 4406360 - DNA, 25 bp, Homo sapien
tggatcgactcctttagtttcctca

SEQ ID NO: 4406361 - DNA, 25 bp, Homo sapien
tgtgctttccggtggatcgactcct

SEQ ID NO: 4406362 - DNA, 25 bp, Homo sapien
atttcctcattgagtcttgcacttt

SEQ ID NO: 4406363 - DNA, 25 bp, Homo sapien
ctcattgagtcttgcacttttttca

SEQ ID NO: 4406364 - DNA, 25 bp, Homo sapien
cctcattgagtcttgcacttttttc

SEQ ID NO: 4406365 - DNA, 25 bp, Homo sapien
atatctcccttcaatatgcaatttg

SEQ ID NO: 4406366 - DNA, 25 bp, Homo sapien
attattcctgtttgagtgtggcaat

SEQ ID NO: 4406367 - DNA, 25 bp, Homo sapien
tatctcccttcaatatgcaatttgt

SEQ ID NO: 4406368 - DNA, 25 bp, Homo sapien
tctcccttcaatatgcaatttgtat

SEQ ID NO: 4406369 - DNA, 25 bp, Homo sapien
ttcagaaggtcacatggcatatggc

SEQ ID NO: 4406370 - DNA, 25 bp, Homo sapien
attcattgggttagagggcacttcc

SEQ ID NO: 4406371 - DNA, 25 bp, Homo sapien
gtttaccacaactcaaggagcagag

SEQ ID NO: 4406372 - DNA, 25 bp, Homo sapien
tatttgttacaagtctccaggctag

SEQ ID NO: 4406373 - DNA, 25 bp, Homo sapien
attttcacttctttcaagcgtttct

SEQ ID NO: 4406374 - DNA, 25 bp, Homo sapien
cctctgaagccacttttaagtcgtg

SEQ ID NO: 4406375 - DNA, 25 bp, Homo sapien
cacttctttcaagcgtttcttgctt

SEQ ID NO: 4406376 - DNA, 25 bp, Homo sapien
tctgaagccacttttaagtcgtgtt

SEQ ID NO: 4406377 - DNA, 25 bp, Homo sapien
taaggagacactagatatcagcagg

SEQ ID NO: 4406378 - DNA, 25 bp, Homo sapien
ttcctctactattctgacaaattta

SEQ ID NO: 4406379 - DNA, 25 bp, Homo sapien
tacctttattagtgtatatcctgat

SEQ ID NO: 4406380 - DNA, 25 bp, Homo sapien
tcagggtcacccacaaattattcca

SEQ ID NO: 4406381 - DNA, 25 bp, Homo sapien
ctgtagcaatcatcttcgtataaac

SEQ ID NO: 4406382 - DNA, 25 bp, Homo sapien
gcaatcatcttcgtataaacagtct

SEQ ID NO: 4406383 - DNA, 25 bp, Homo sapien
tcatcttcgtataaacagtcttgat

SEQ ID NO: 4406384 - DNA, 25 bp, Homo sapien
tctggctgtatttctccacgtacac

SEQ ID NO: 4406385 - DNA, 25 bp, Homo sapien
tctcctttttacaaatttgcaggct

SEQ ID NO: 4406386 - DNA, 25 bp, Homo sapien
ttttacaaatttgcaggcttcatag

SEQ ID NO: 4406387 - DNA, 25 bp, Homo sapien
aaatttgcaggcttcatagctgttg

SEQ ID NO: 4406388 - DNA, 25 bp, Homo sapien
ttacaaatttgcaggcttcatagct

SEQ ID NO: 4406389 - DNA, 25 bp, Homo sapien
tttgaaattgctcctccttttctaa

SEQ ID NO: 4406390 - DNA, 25 bp, Homo sapien
ctaaaactttcgttcttcatggctg

SEQ ID NO: 4406391 - DNA, 25 bp, Homo sapien
ttctaaaactttcgttcttcatggc

SEQ ID NO: 4406392 - DNA, 25 bp, Homo sapien
aaaactttcgttcttcatggctgct

SEQ ID NO: 4406393 - DNA, 25 bp, Homo sapien
cgttcatggactgcttgtgttatca

SEQ ID NO: 4406394 - DNA, 25 bp, Homo sapien
gcgttcatggactgcttgtgttatc

SEQ ID NO: 4406395 - DNA, 25 bp, Homo sapien
aggttccaaaatttgttgttgaatg

SEQ ID NO: 4406396 - DNA, 25 bp, Homo sapien
tgtcattttgaagatgattttaaag

SEQ ID NO: 4406397 - DNA, 25 bp, Homo sapien
tcattttgaagatgattttaaagta

SEQ ID NO: 4406398 - DNA, 25 bp, Homo sapien
ttaattgtcattttgaagatgattt

SEQ ID NO: 4406399 - DNA, 25 bp, Homo sapien
gatccaatcttagaatatacgctgc

SEQ ID NO: 4406400 - DNA, 25 bp, Homo sapien
tcttagaatatacgctgctgaaaca

SEQ ID NO: 4406401 - DNA, 25 bp, Homo sapien
gtgttgatccaatcttagaatatac

SEQ ID NO: 4406402 - DNA, 25 bp, Homo sapien
caatcttagaatatacgctgctgaa

SEQ ID NO: 4406403 - DNA, 25 bp, Homo sapien
tgtctcttacaaattacagcaagca

SEQ ID NO: 4406404 - DNA, 25 bp, Homo sapien
gttcttcactaaaaatgccaccatt

SEQ ID NO: 4406405 - DNA, 25 bp, Homo sapien
aatgccaccatttactgtctcttac

SEQ ID NO: 4406406 - DNA, 25 bp, Homo sapien
tcttacaaattacagcaagcaaaag

SEQ ID NO: 4406407 - DNA, 25 bp, Homo sapien
tccccttatcatagacagcatcatg

SEQ ID NO: 4406408 - DNA, 25 bp, Homo sapien
tcatagacagcatcatgaagagcag

SEQ ID NO: 4406409 - DNA, 25 bp, Homo sapien
ccttatcatagacagcatcatgaag

SEQ ID NO: 4406410 - DNA, 25 bp, Homo sapien
aagtccccttatcatagacagcatc

SEQ ID NO: 4406411 - DNA, 25 bp, Homo sapien
gtccttaatgtttggactggtgcca

SEQ ID NO: 4406412 - DNA, 25 bp, Homo sapien
ctgtagacgtccttaatgtttggac

SEQ ID NO: 4406413 - DNA, 25 bp, Homo sapien
gcagaataatggaacacgtctcttc

SEQ ID NO: 4406414 - DNA, 25 bp, Homo sapien
ccagcagaataatggaacacgtctc

SEQ ID NO: 4406415 - DNA, 25 bp, Homo sapien
tagtgaaatctttttcgtgctgaga

SEQ ID NO: 4406416 - DNA, 25 bp, Homo sapien
tatgtatttagtgaaatctttttcg

SEQ ID NO: 4406417 - DNA, 25 bp, Homo sapien
tttttcgtgctgagagagttggctg

SEQ ID NO: 4406418 - DNA, 25 bp, Homo sapien
tgaaatctttttcgtgctgagagag

SEQ ID NO: 4406419 - DNA, 25 bp, Homo sapien
gatgtcgatctgacattttctgctc

SEQ ID NO: 4406420 - DNA, 25 bp, Homo sapien
cagatgtcgatctgacattttctgc

SEQ ID NO: 4406421 - DNA, 25 bp, Homo sapien
tgtcgatctgacattttctgctcag

SEQ ID NO: 4406422 - DNA, 25 bp, Homo sapien
gtcgatctgacattttctgctcagc

SEQ ID NO: 4406423 - DNA, 25 bp, Homo sapien
tgtcctgggcatccacgtcccggca

SEQ ID NO: 4406424 - DNA, 25 bp, Homo sapien
acgtcccggcacctgcgcgccaggc

SEQ ID NO: 4406425 - DNA, 25 bp, Homo sapien
gcgtccctggtgtggtacgcgggac

SEQ ID NO: 4406426 - DNA, 25 bp, Homo sapien
ggtactcgtggtcgatggagcccag

SEQ ID NO: 4406427 - DNA, 25 bp, Homo sapien
gcgacttctcctcagacgcccacca

SEQ ID NO: 4406428 - DNA, 25 bp, Homo sapien
ccgcggctcctcgtggcctttccac

SEQ ID NO: 4406429 - DNA, 25 bp, Homo sapien
gctcctcgtggcctttccactaacc

SEQ ID NO: 4406430 - DNA, 25 bp, Homo sapien
ggggcgacttctcctcagacgccca

SEQ ID NO: 4406431 - DNA, 25 bp, Homo sapien
ctaaccccaaacccgagatgtagct

SEQ ID NO: 4406432 - DNA, 25 bp, Homo sapien
tcagaatccgcgacccggccgggtc

SEQ ID NO: 4406433 - DNA, 25 bp, Homo sapien
accccaaacccgagatgtagctcag

SEQ ID NO: 4406434 - DNA, 25 bp, Homo sapien
atgtagctcagaatccgcgacccgg

SEQ ID NO: 4406435 - DNA, 25 bp, Homo sapien
cgcctgcagctcagcgcccgcgcgg

SEQ ID NO: 4406436 - DNA, 25 bp, Homo sapien
ttaggcgcgcgcctgcagctcagcg

SEQ ID NO: 4406437 - DNA, 25 bp, Homo sapien
cgcgcgcctgcagctcagcgcccgc

SEQ ID NO: 4406438 - DNA, 25 bp, Homo sapien
tcagcccgcgaagccgttaggcgcg

SEQ ID NO: 4406439 - DNA, 25 bp, Homo sapien
agctccagcgagcttgggagctgcc

SEQ ID NO: 4406440 - DNA, 25 bp, Homo sapien
cggcatctggctccggttctgcgag

SEQ ID NO: 4406441 - DNA, 25 bp, Homo sapien
ggagcttgggccctcaggcggcgga

SEQ ID NO: 4406442 - DNA, 25 bp, Homo sapien
gggacgtcccgtagtcgcaggcgcg

SEQ ID NO: 4406443 - DNA, 25 bp, Homo sapien
cctctgccggagctccggaccgcta

SEQ ID NO: 4406444 - DNA, 25 bp, Homo sapien
cggagctccggaccgctagccaggg

SEQ ID NO: 4406445 - DNA, 25 bp, Homo sapien
tctgccggagctccggaccgctagc

SEQ ID NO: 4406446 - DNA, 25 bp, Homo sapien
tggtacatctggctccggttctgag

SEQ ID NO: 4406447 - DNA, 25 bp, Homo sapien
ggcactcggcattcaccccgatggg

SEQ ID NO: 4406448 - DNA, 25 bp, Homo sapien
cgctggcatgggcactcggcattca

SEQ ID NO: 4406449 - DNA, 25 bp, Homo sapien
agggagttcgaggccgctggcatgg

SEQ ID NO: 4406450 - DNA, 25 bp, Homo sapien
tcctccaccgcagggagttcgaggc

SEQ ID NO: 4406451 - DNA, 25 bp, Homo sapien
gagggcgactgcagcttgggcgccc

SEQ ID NO: 4406452 - DNA, 25 bp, Homo sapien
cacacagagggcgactgcagcttgg

SEQ ID NO: 4406453 - DNA, 25 bp, Homo sapien
caggcagttgttgcctgcacacaga

SEQ ID NO: 4406454 - DNA, 25 bp, Homo sapien
tgcacacagagggcgactgcagctt

SEQ ID NO: 4406455 - DNA, 25 bp, Homo sapien
tgtgaatagacatagggcatcacct

SEQ ID NO: 4406456 - DNA, 25 bp, Homo sapien
agcccctgagggtctatttggcaga

SEQ ID NO: 4406457 - DNA, 25 bp, Homo sapien
taaatctgcagtgggtggttaactc

SEQ ID NO: 4406458 - DNA, 25 bp, Homo sapien
catttgtataacagctgtgggtgag

SEQ ID NO: 4406459 - DNA, 25 bp, Homo sapien
cataaacacattcagcatcctgccc

SEQ ID NO: 4406460 - DNA, 25 bp, Homo sapien
cattagtaagatccgggaggagtac

SEQ ID NO: 4406461 - DNA, 25 bp, Homo sapien
atcataaacacattcagcatcctgc

SEQ ID NO: 4406462 - DNA, 25 bp, Homo sapien
atcctgccctcgcccaaggtgtcag

SEQ ID NO: 4406463 - DNA, 25 bp, Homo sapien
cactggactctgagtagttgcaccc

SEQ ID NO: 4406464 - DNA, 25 bp, Homo sapien
ctgaagctgtagacgagcttgggct

SEQ ID NO: 4406465 - DNA, 25 bp, Homo sapien
gatacggaaacagcatagagcaggg

SEQ ID NO: 4406466 - DNA, 25 bp, Homo sapien
ttgcaccctggtgtatccacaggtg

SEQ ID NO: 4406467 - DNA, 25 bp, Homo sapien
gcctgtgggtttggcgtcgtcctgg

SEQ ID NO: 4406468 - DNA, 25 bp, Homo sapien
ccaggctgctggttgtctggagaca

SEQ ID NO: 4406469 - DNA, 25 bp, Homo sapien
tctggagacagcctccccgtaagat

SEQ ID NO: 4406470 - DNA, 25 bp, Homo sapien
gggtttggcgtcgtcctggagccca

SEQ ID NO: 4406471 - DNA, 25 bp, Homo sapien
gtgctgaaccatggcgccaccagag

SEQ ID NO: 4406472 - DNA, 25 bp, Homo sapien
gtccacggccctgagtgccaaggag

SEQ ID NO: 4406473 - DNA, 25 bp, Homo sapien
agtgccaaggagtgagtctttagag

SEQ ID NO: 4406474 - DNA, 25 bp, Homo sapien
gcaagagcgtctgtgctgaaccatg

SEQ ID NO: 4406475 - DNA, 25 bp, Homo sapien
gatatgagtgtcgtggttcactgtc

SEQ ID NO: 4406476 - DNA, 25 bp, Homo sapien
gtgtcgtggttcactgtctacatgg

SEQ ID NO: 4406477 - DNA, 25 bp, Homo sapien
tatgagtgtcgtggttcactgtcta

SEQ ID NO: 4406478 - DNA, 25 bp, Homo sapien
ctgatatgagtgtcgtggttcactg

SEQ ID NO: 4406479 - DNA, 25 bp, Homo sapien
tgtatttcaggccattgcagtcttt

SEQ ID NO: 4406480 - DNA, 25 bp, Homo sapien
gatcctgttggactttgatggcttc

SEQ ID NO: 4406481 - DNA, 25 bp, Homo sapien
tgttccaggatcaatatactgcacc

SEQ ID NO: 4406482 - DNA, 25 bp, Homo sapien
tactgcaccatacatggagtcagcc

SEQ ID NO: 4406483 - DNA, 25 bp, Homo sapien
cctgttgatttcctgctagggagta

SEQ ID NO: 4406484 - DNA, 25 bp, Homo sapien
tcttctgaatggtgtttagtaggtc

SEQ ID NO: 4406485 - DNA, 25 bp, Homo sapien
tttctttcctgttgcaattcatggg

SEQ ID NO: 4406486 - DNA, 25 bp, Homo sapien
aattcatgggtcttagcatcttctg

SEQ ID NO: 4406487 - DNA, 25 bp, Homo sapien
gaggagaaagagtgtgcgttcaagg

SEQ ID NO: 4406488 - DNA, 25 bp, Homo sapien
aggagaaagagtgtgcgttcaaggg

SEQ ID NO: 4406489 - DNA, 25 bp, Homo sapien
atctcgggagtcatagaagtcttct

SEQ ID NO: 4406490 - DNA, 25 bp, Homo sapien
tcgggagtcatagaagtcttctatg

SEQ ID NO: 4406491 - DNA, 25 bp, Homo sapien
accacatctggctagtttcttttat

SEQ ID NO: 4406492 - DNA, 25 bp, Homo sapien
aggctggccacaaattcctggtctc

SEQ ID NO: 4406493 - DNA, 25 bp, Homo sapien
atagatggggtcttgttgtgttggc

SEQ ID NO: 4406494 - DNA, 25 bp, Homo sapien
acatctggctagtttcttttatttt

SEQ ID NO: 4406495 - DNA, 25 bp, Homo sapien
tagagttccaactactagggaagct

SEQ ID NO: 4406496 - DNA, 25 bp, Homo sapien
taataactggtgtggtgttgtgcac

SEQ ID NO: 4406497 - DNA, 25 bp, Homo sapien
ctgagatgagaggataccttgagct

SEQ ID NO: 4406498 - DNA, 25 bp, Homo sapien
tggtgttgtgcacctagagttccaa

SEQ ID NO: 4406499 - DNA, 25 bp, Homo sapien
aactcctgggctaaatcgattgtct

SEQ ID NO: 4406500 - DNA, 25 bp, Homo sapien
gggctaaatcgattgtctcacctca

SEQ ID NO: 4406501 - DNA, 25 bp, Homo sapien
tcactatagctttggccttctgaga

SEQ ID NO: 4406502 - DNA, 25 bp, Homo sapien
tcctgggctaaatcgattgtctcac

SEQ ID NO: 4406503 - DNA, 25 bp, Homo sapien
gtatgtcatgtcacgacatactgcc

SEQ ID NO: 4406504 - DNA, 25 bp, Homo sapien
tcatgtcacgacatactgccgctgc

SEQ ID NO: 4406505 - DNA, 25 bp, Homo sapien
gtcacgacatactgccgctgcacga

SEQ ID NO: 4406506 - DNA, 25 bp, Homo sapien
tgtcatgtcacgacatactgccgct

SEQ ID NO: 4406507 - DNA, 25 bp, Homo sapien
gtgtgagcccttgcctcacaccggc

SEQ ID NO: 4406508 - DNA, 25 bp, Homo sapien
gcccctcccacgctgagagaggtca

SEQ ID NO: 4406509 - DNA, 25 bp, Homo sapien
cagaggtcagcgtgagccccttgcc

SEQ ID NO: 4406510 - DNA, 25 bp, Homo sapien
ctcccacgcggacagaggtcagcgt

SEQ ID NO: 4406511 - DNA, 25 bp, Homo sapien
tcccacgctgagagaggtcagtgtg

SEQ ID NO: 4406512 - DNA, 25 bp, Homo sapien
ctcccacgcggacagaggtcagcgt

SEQ ID NO: 4406513 - DNA, 25 bp, Homo sapien
acagaggtcagcgtgagccccttgc

SEQ ID NO: 4406514 - DNA, 25 bp, Homo sapien
gtgtgagccccttgtctcacaccgg

SEQ ID NO: 4406515 - DNA, 25 bp, Homo sapien
cacgtcggccattccaggccccgtt

SEQ ID NO: 4406516 - DNA, 25 bp, Homo sapien
tcacgtcggccattccaggccccgt

SEQ ID NO: 4406517 - DNA, 25 bp, Homo sapien
cattcctcacgtcggccattccagg

SEQ ID NO: 4406518 - DNA, 25 bp, Homo sapien
cagctcattcctcacgtcggccatt

SEQ ID NO: 4406519 - DNA, 25 bp, Homo sapien
gcacaatgaaaaatgtcgcccacga

SEQ ID NO: 4406520 - DNA, 25 bp, Homo sapien
tggcacaatgaaaaatgtcgcccac

SEQ ID NO: 4406521 - DNA, 25 bp, Homo sapien
gtcgcccacgatcaacgtgttctgt

SEQ ID NO: 4406522 - DNA, 25 bp, Homo sapien
caatgaaaaatgtcgcccacgatca

SEQ ID NO: 4406523 - DNA, 25 bp, Homo sapien
ccctagtccacaggcgcctccctgt

SEQ ID NO: 4406524 - DNA, 25 bp, Homo sapien
ctccatcttgtagccccagcaggag

SEQ ID NO: 4406525 - DNA, 25 bp, Homo sapien
gtagccccagcaggagctattttcc

SEQ ID NO: 4406526 - DNA, 25 bp, Homo sapien
caggagctattttccgaaaagtgaa

SEQ ID NO: 4406527 - DNA, 25 bp, Homo sapien
gtgtgcatagtgggcctggagggcg

SEQ ID NO: 4406528 - DNA, 25 bp, Homo sapien
agatgtgtgcatagtgggcctggag

SEQ ID NO: 4406529 - DNA, 25 bp, Homo sapien
ggggaagatgtgtgcatagtgggcc

SEQ ID NO: 4406530 - DNA, 25 bp, Homo sapien
gaagatgtgtgcatagtgggcctgg

SEQ ID NO: 4406531 - DNA, 25 bp, Homo sapien
ctgagcctgtcctcggcttctccac

SEQ ID NO: 4406532 - DNA, 25 bp, Homo sapien
ccggcactggtccagggtacgtgca

SEQ ID NO: 4406533 - DNA, 25 bp, Homo sapien
cagggccggcactggtccagggtac

SEQ ID NO: 4406534 - DNA, 25 bp, Homo sapien
ggccggcactggtccagggtacgtg

SEQ ID NO: 4406535 - DNA, 25 bp, Homo sapien
tgtgctcttcgtcactcgctatgac

SEQ ID NO: 4406536 - DNA, 25 bp, Homo sapien
ctcttcgtcactcgctatgacctcg

SEQ ID NO: 4406537 - DNA, 25 bp, Homo sapien
ttcgtcactcgctatgacctcgctg

SEQ ID NO: 4406538 - DNA, 25 bp, Homo sapien
tgctcttcgtcactcgctatgacct

SEQ ID NO: 4406539 - DNA, 25 bp, Homo sapien
tccggttatcctggttgggatgacc

SEQ ID NO: 4406540 - DNA, 25 bp, Homo sapien
ctggaaggccaggttgtatttctgc

SEQ ID NO: 4406541 - DNA, 25 bp, Homo sapien
gaaggccaggttgtatttctgcatc

SEQ ID NO: 4406542 - DNA, 25 bp, Homo sapien
catctggctgacggtccggttatcc

SEQ ID NO: 4406543 - DNA, 25 bp, Homo sapien
ccgcctgctgaagatcatgagcgcc

SEQ ID NO: 4406544 - DNA, 25 bp, Homo sapien
ggccaccggatgtggtccttgtctg

SEQ ID NO: 4406545 - DNA, 25 bp, Homo sapien
ccgccagggcctggtgccgcctgct

SEQ ID NO: 4406546 - DNA, 25 bp, Homo sapien
ccttgtctgatttgttggggctgcg

SEQ ID NO: 4406547 - DNA, 25 bp, Homo sapien
ccatggtgggaggtgagcttttacc

SEQ ID NO: 4406548 - DNA, 25 bp, Homo sapien
ccagggggctgcccagggtcaacac

SEQ ID NO: 4406549 - DNA, 25 bp, Homo sapien
tgggaggtgagcttttaccaggttc

SEQ ID NO: 4406550 - DNA, 25 bp, Homo sapien
gaggtgagcttttaccaggttccac

SEQ ID NO: 4406551 - DNA, 25 bp, Homo sapien
taccaggagaacacggccgcagagt

SEQ ID NO: 4406552 - DNA, 25 bp, Homo sapien
agaacacggccgcagagtgaccttc

SEQ ID NO: 4406553 - DNA, 25 bp, Homo sapien
ggagaacacggccgcagagtgacct

SEQ ID NO: 4406554 - DNA, 25 bp, Homo sapien
caggagaacacggccgcagagtgac

SEQ ID NO: 4406555 - DNA, 25 bp, Homo sapien
tgacgccacgggaggcctcactgaa

SEQ ID NO: 4406556 - DNA, 25 bp, Homo sapien
gccacgggaggcctcactgaacgca

SEQ ID NO: 4406557 - DNA, 25 bp, Homo sapien
ctgacgccacgggaggcctcactga

SEQ ID NO: 4406558 - DNA, 25 bp, Homo sapien
acgggaggcctcactgaacgcaggc

SEQ ID NO: 4406559 - DNA, 25 bp, Homo sapien
caaaggctatgagaccaagccttca

SEQ ID NO: 4406560 - DNA, 25 bp, Homo sapien
cacctgaaagttcagaagccgacat

SEQ ID NO: 4406561 - DNA, 25 bp, Homo sapien
ccgacatcctgcaaggtatcttggg

SEQ ID NO: 4406562 - DNA, 25 bp, Homo sapien
ggaggaagccacaaaggctatgaga

SEQ ID NO: 4406563 - DNA, 25 bp, Homo sapien
caagccatggggtatctcgtgcttc

SEQ ID NO: 4406564 - DNA, 25 bp, Homo sapien
ggggtatctcgtgcttcattctctt

SEQ ID NO: 4406565 - DNA, 25 bp, Homo sapien
ccacaccaagccatggggtatctcg

SEQ ID NO: 4406566 - DNA, 25 bp, Homo sapien
catggggtatctcgtgcttcattct

SEQ ID NO: 4406567 - DNA, 25 bp, Homo sapien
tttcctggcaccagacccagcagaa

SEQ ID NO: 4406568 - DNA, 25 bp, Homo sapien
ctttcctggcaccagacccagcaga

SEQ ID NO: 4406569 - DNA, 25 bp, Homo sapien
acccagcagaaggcaaggaaacagg

SEQ ID NO: 4406570 - DNA, 25 bp, Homo sapien
cagcagaaggcaaggaaacaggaag

SEQ ID NO: 4406571 - DNA, 25 bp, Homo sapien
ggagatggccaactgcgtcctccca

SEQ ID NO: 4406572 - DNA, 25 bp, Homo sapien
caacccaaatttgacaccaattcac

SEQ ID NO: 4406573 - DNA, 25 bp, Homo sapien
acctccacatatgacgtaatcaacc

SEQ ID NO: 4406574 - DNA, 25 bp, Homo sapien
catatgacgtaatcaacccaaattt

SEQ ID NO: 4406575 - DNA, 25 bp, Homo sapien
caaatttgacaccaattcactcttt

SEQ ID NO: 4406576 - DNA, 25 bp, Homo sapien
gaaactagtgttgcttccagagggc

SEQ ID NO: 4406577 - DNA, 25 bp, Homo sapien
catgaatgctatggtatgtgcccct

SEQ ID NO: 4406578 - DNA, 25 bp, Homo sapien
tcattctccattcgggttgtaggca

SEQ ID NO: 4406579 - DNA, 25 bp, Homo sapien
gacaaaacaagtgctctgagaaggt

SEQ ID NO: 4406580 - DNA, 25 bp, Homo sapien
gagcgggagttttgcaggacgttca

SEQ ID NO: 4406581 - DNA, 25 bp, Homo sapien
ggtgagcgggagttttgcaggacgt

SEQ ID NO: 4406582 - DNA, 25 bp, Homo sapien
gggtgagcgggagttttgcaggacg

SEQ ID NO: 4406583 - DNA, 25 bp, Homo sapien
tgagcgggagttttgcaggacgttc

SEQ ID NO: 4406584 - DNA, 25 bp, Homo sapien
ggtgagcggaagttttgcaggacgt

SEQ ID NO: 4406585 - DNA, 25 bp, Homo sapien
tgagcggaagttttgcaggacgttc

SEQ ID NO: 4406586 - DNA, 25 bp, Homo sapien
gggtgagcggaagttttgcaggacg

SEQ ID NO: 4406587 - DNA, 25 bp, Homo sapien
agcggaagttttgcaggacgttcat

SEQ ID NO: 4406588 - DNA, 25 bp, Homo sapien
gttttgcagcacgttcattggtgtt

SEQ ID NO: 4406589 - DNA, 25 bp, Homo sapien
tcattgctgtcctgtgcgtgacaca

SEQ ID NO: 4406590 - DNA, 25 bp, Homo sapien
ttgctgtcctgtgcgtgacacaggg

SEQ ID NO: 4406591 - DNA, 25 bp, Homo sapien
tgagcgggagttttgcagcacgttc

SEQ ID NO: 4406592 - DNA, 25 bp, Homo sapien
cgttcattgctgttctccgtgtgtg

SEQ ID NO: 4406593 - DNA, 25 bp, Homo sapien
acgttcattgctgttctccgtgtgt

SEQ ID NO: 4406594 - DNA, 25 bp, Homo sapien
tcattgctgttctttgtgtgacaca

SEQ ID NO: 4406595 - DNA, 25 bp, Homo sapien
cattgctgttctttgtgtgacacac

SEQ ID NO: 4406596 - DNA, 25 bp, Homo sapien
gggtgagcgggagttttgcaggacg

SEQ ID NO: 4406597 - DNA, 25 bp, Homo sapien
gagcgggagttttgcaggacgttca

SEQ ID NO: 4406598 - DNA, 25 bp, Homo sapien
gtgagcgggagttttgcaggacgtt

SEQ ID NO: 4406599 - DNA, 25 bp, Homo sapien
agcgggagttttgcaggacgttcat

SEQ ID NO: 4406600 - DNA, 25 bp, Homo sapien
ctgtagtcccacatgtgttggggtg

SEQ ID NO: 4406601 - DNA, 25 bp, Homo sapien
attgctctgcagcctactgtctagc

SEQ ID NO: 4406602 - DNA, 25 bp, Homo sapien
ttgctctgcagcctactgtctagca

SEQ ID NO: 4406603 - DNA, 25 bp, Homo sapien
cattgctctgcagcctactgtctag

SEQ ID NO: 4406604 - DNA, 25 bp, Homo sapien
gggccaggtgatttccgagcccctc

SEQ ID NO: 4406605 - DNA, 25 bp, Homo sapien
gccaggtgatttccgagcccctctg

SEQ ID NO: 4406606 - DNA, 25 bp, Homo sapien
catgccacctctcagcatggcttgt

SEQ ID NO: 4406607 - DNA, 25 bp, Homo sapien
tgaatctgatctaccatgagccatg

SEQ ID NO: 4406608 - DNA, 25 bp, Homo sapien
tgtacaaatctacgggcaatttctt

SEQ ID NO: 4406609 - DNA, 25 bp, Homo sapien
agagcttgtacaaatctacgggcaa

SEQ ID NO: 4406610 - DNA, 25 bp, Homo sapien
gtatttctcgcagagcttgtacaaa

SEQ ID NO: 4406611 - DNA, 25 bp, Homo sapien
cgggcaatttcttgcccagttttca

SEQ ID NO: 4406612 - DNA, 25 bp, Homo sapien
gagtcacggccatttcagtcacagg

SEQ ID NO: 4406613 - DNA, 25 bp, Homo sapien
gtgaagccgagcttctccttcactg

SEQ ID NO: 4406614 - DNA, 25 bp, Homo sapien
caggtgcggtcacaggcgaagctct

SEQ ID NO: 4406615 - DNA, 25 bp, Homo sapien
gatggtgggcgagttatcagcaaca

SEQ ID NO: 4406616 - DNA, 25 bp, Homo sapien
tgaagcactgcgtgagggtgacccc

SEQ ID NO: 4406617 - DNA, 25 bp, Homo sapien
gaagcactgcgtgagggtgacccct

SEQ ID NO: 4406618 - DNA, 25 bp, Homo sapien
gactcctctcctgaagcactgcgtg

SEQ ID NO: 4406619 - DNA, 25 bp, Homo sapien
aagcactgcgtgagggtgacccctc

SEQ ID NO: 4406620 - DNA, 25 bp, Homo sapien
ggaagtgagcagtgacaatctagac

SEQ ID NO: 4406621 - DNA, 25 bp, Homo sapien
gagcagtcagatctccggtgggtcc

SEQ ID NO: 4406622 - DNA, 25 bp, Homo sapien
aatattgcttcctcctttggctcag

SEQ ID NO: 4406623 - DNA, 25 bp, Homo sapien
cctcagggttcccagtgttaccaga

SEQ ID NO: 4406624 - DNA, 25 bp, Homo sapien
cttctcgcggatgcgaggccaccaa

SEQ ID NO: 4406625 - DNA, 25 bp, Homo sapien
cggatgcgaggccaccaaatcaatt

SEQ ID NO: 4406626 - DNA, 25 bp, Homo sapien
atgatgctccttctcgcggatgcga

SEQ ID NO: 4406627 - DNA, 25 bp, Homo sapien
caggaaggtgcacagatgatgctcc

SEQ ID NO: 4406628 - DNA, 25 bp, Homo sapien
aaaggctcatctagaggtgattctt

SEQ ID NO: 4406629 - DNA, 25 bp, Homo sapien
tatcattactgaaaggctcatctag

SEQ ID NO: 4406630 - DNA, 25 bp, Homo sapien
aggctcatctagaggtgattcttca

SEQ ID NO: 4406631 - DNA, 25 bp, Homo sapien
aaggctcatctagaggtgattcttc

SEQ ID NO: 4406632 - DNA, 25 bp, Homo sapien
acacttttggcagatgtggtctcca

SEQ ID NO: 4406633 - DNA, 25 bp, Homo sapien
gtggtccaggaaccgccggctccat

SEQ ID NO: 4406634 - DNA, 25 bp, Homo sapien
tgtgacggggacacttttggcagat

SEQ ID NO: 4406635 - DNA, 25 bp, Homo sapien
ccagcgtgcttggtttggtggtcca

SEQ ID NO: 4406636 - DNA, 25 bp, Homo sapien
aaagttctaaacatgtagcctctag

SEQ ID NO: 4406637 - DNA, 25 bp, Homo sapien
caaactgaacgcgtgtgtgggaaaa

SEQ ID NO: 4406638 - DNA, 25 bp, Homo sapien
gacgtgcagtgcaatatcacagaga

SEQ ID NO: 4406639 - DNA, 25 bp, Homo sapien
cctctagactgattaaaggagcgtg

SEQ ID NO: 4406640 - DNA, 25 bp, Homo sapien
gtggaaatggcctttgtaagtttga

SEQ ID NO: 4406641 - DNA, 25 bp, Homo sapien
gaaatggcctttgtaagtttgagtc

SEQ ID NO: 4406642 - DNA, 25 bp, Homo sapien
gagggcggtggaaatggcctttgta

SEQ ID NO: 4406643 - DNA, 25 bp, Homo sapien
ctgagggcggtggaaatggcctttg

SEQ ID NO: 4406644 - DNA, 25 bp, Homo sapien
tagactacgtcaagaggccggaaag

SEQ ID NO: 4406645 - DNA, 25 bp, Homo sapien
aacacaggctctactgaggcggcag

SEQ ID NO: 4406646 - DNA, 25 bp, Homo sapien
gaaggctgcatacaacagagatctg

SEQ ID NO: 4406647 - DNA, 25 bp, Homo sapien
tcaggaacgaccaccagattggcag

SEQ ID NO: 4406648 - DNA, 25 bp, Homo sapien
ctcacaagcttgctggacaacgggc

SEQ ID NO: 4406649 - DNA, 25 bp, Homo sapien
gaagtctcgccggtatttttctgcc

SEQ ID NO: 4406650 - DNA, 25 bp, Homo sapien
tctgccctggatacagtggagacag

SEQ ID NO: 4406651 - DNA, 25 bp, Homo sapien
tgtgagtgcctgacgggcaggagct

SEQ ID NO: 4406652 - DNA, 25 bp, Homo sapien
cagaagtttcctgccctcttgtcac

SEQ ID NO: 4406653 - DNA, 25 bp, Homo sapien
actgtcgaggagacggacagaagca

SEQ ID NO: 4406654 - DNA, 25 bp, Homo sapien
tggtgaaactcactaggtgacatta

SEQ ID NO: 4406655 - DNA, 25 bp, Homo sapien
taaaaagataaaccgctgccttgtg

SEQ ID NO: 4406656 - DNA, 25 bp, Homo sapien
gactggccagacacttagtccttta

SEQ ID NO: 4406657 - DNA, 25 bp, Homo sapien
tctgaacctacctttaacgcactgt

SEQ ID NO: 4406658 - DNA, 25 bp, Homo sapien
tagttccggagttgctgtaccaggt

SEQ ID NO: 4406659 - DNA, 25 bp, Homo sapien
tatgaaaccaggagcccactgagtg

SEQ ID NO: 4406660 - DNA, 25 bp, Homo sapien
catctgattgcttggatcgtagctg

SEQ ID NO: 4406661 - DNA, 25 bp, Homo sapien
cactggtggtttgcatgcaattgac

SEQ ID NO: 4406662 - DNA, 25 bp, Homo sapien
gatcgtagctgaagtcaagtcctgg

SEQ ID NO: 4406663 - DNA, 25 bp, Homo sapien
cgtaacacttcaaacttgcactggt

SEQ ID NO: 4406664 - DNA, 25 bp, Homo sapien
taaaccgccctgtaaatgtagccaa

SEQ ID NO: 4406665 - DNA, 25 bp, Homo sapien
tattacacgtgtgcttcaggcctcc

SEQ ID NO: 4406666 - DNA, 25 bp, Homo sapien
tccagtggagttagccagggtcacc

SEQ ID NO: 4406667 - DNA, 25 bp, Homo sapien
gaaggctacccagactttgatgcag

SEQ ID NO: 4406668 - DNA, 25 bp, Homo sapien
ctggatggggggagatgaagcctca

SEQ ID NO: 4406669 - DNA, 25 bp, Homo sapien
tggatggggggagatgaagcctcat

SEQ ID NO: 4406670 - DNA, 25 bp, Homo sapien
tgttctgtgggctgtcactactgtc

SEQ ID NO: 4406671 - DNA, 25 bp, Homo sapien
tactgtcccacgtagactgggaggg

SEQ ID NO: 4406672 - DNA, 25 bp, Homo sapien
gtaaacacctgctggtggtccctgt

SEQ ID NO: 4406673 - DNA, 25 bp, Homo sapien
agacctgtctaaacagagctgcctc

SEQ ID NO: 4406674 - DNA, 25 bp, Homo sapien
atctgggacatcatcaattacaagt

SEQ ID NO: 4406675 - DNA, 25 bp, Homo sapien
tgggacatcatcaattacaagtccc

SEQ ID NO: 4406676 - DNA, 25 bp, Homo sapien
ggacatcatcaattacaagtcccac

SEQ ID NO: 4406677 - DNA, 25 bp, Homo sapien
acatcatcaattacaagtcccactg

SEQ ID NO: 4406678 - DNA, 25 bp, Homo sapien
cctgttggcagaagcagcccggtgt

SEQ ID NO: 4406679 - DNA, 25 bp, Homo sapien
gcaaacgtcagatacgctgcctgga

SEQ ID NO: 4406680 - DNA, 25 bp, Homo sapien
tgttgggcggtccacacttccgaaa

SEQ ID NO: 4406681 - DNA, 25 bp, Homo sapien
aaagtctgaaatgtgaatcccggcc

SEQ ID NO: 4406682 - DNA, 25 bp, Homo sapien
gcagtagcataaacttacggtgaca

SEQ ID NO: 4406683 - DNA, 25 bp, Homo sapien
catttgcaaagtgactagagaaaaa

SEQ ID NO: 4406684 - DNA, 25 bp, Homo sapien
tacggtgacatggtagacttgtctc

SEQ ID NO: 4406685 - DNA, 25 bp, Homo sapien
agaagtctgactaccatgtctttaa

SEQ ID NO: 4406686 - DNA, 25 bp, Homo sapien
gacaggatttactagttaagcaatg

SEQ ID NO: 4406687 - DNA, 25 bp, Homo sapien
ggaaaacttcgaggtcaaactggca

SEQ ID NO: 4406688 - DNA, 25 bp, Homo sapien
taaccatgaattaaagcgtatacta

SEQ ID NO: 4406689 - DNA, 25 bp, Homo sapien
ttttccagccaactacgtaaccatg

SEQ ID NO: 4406690 - DNA, 25 bp, Homo sapien
ccttctgcaatacatggatatacac

SEQ ID NO: 4406691 - DNA, 25 bp, Homo sapien
gctcctacctgtgctaattccaact

SEQ ID NO: 4406692 - DNA, 25 bp, Homo sapien
tcaagcccagtgagtaaagagccag

SEQ ID NO: 4406693 - DNA, 25 bp, Homo sapien
gaggatggatcaattaagcacagaa

SEQ ID NO: 4406694 - DNA, 25 bp, Homo sapien
taacgtagatcttgcctttagagga

SEQ ID NO: 4406695 - DNA, 25 bp, Homo sapien
gactgttatacaagagtcattgtgc

SEQ ID NO: 4406696 - DNA, 25 bp, Homo sapien
tagggactttcatgtgatgattgac

SEQ ID NO: 4406697 - DNA, 25 bp, Homo sapien
tgggtgcacaaaggtgactttaacg

SEQ ID NO: 4406698 - DNA, 25 bp, Homo sapien
aatcccagctactcaggaggctgag

SEQ ID NO: 4406699 - DNA, 25 bp, Homo sapien
aattagccggacatggtgacgtgcc

SEQ ID NO: 4406700 - DNA, 25 bp, Homo sapien
acaggagaatcacttgaacccggga

SEQ ID NO: 4406701 - DNA, 25 bp, Homo sapien
tagccggacatggtgacgtgcctgt

SEQ ID NO: 4406702 - DNA, 25 bp, Homo sapien
caaaggccatagttgtcaagcagtg

SEQ ID NO: 4406703 - DNA, 25 bp, Homo sapien
gaattgacttaagaaacaaaggcca

SEQ ID NO: 4406704 - DNA, 25 bp, Homo sapien
gattggaaaccgtagtcagctttgt

SEQ ID NO: 4406705 - DNA, 25 bp, Homo sapien
gaccctccgtgtacaactagattgg

SEQ ID NO: 4406706 - DNA, 25 bp, Homo sapien
tagaaaagctattccgaagtttgga

SEQ ID NO: 4406707 - DNA, 25 bp, Homo sapien
ttcctgatatttgaacggcgaggtg

SEQ ID NO: 4406708 - DNA, 25 bp, Homo sapien
tgacgatggtcgtgttatttttaac

SEQ ID NO: 4406709 - DNA, 25 bp, Homo sapien
tttgaacggcgaggtgtcagcgacc

SEQ ID NO: 4406710 - DNA, 25 bp, Homo sapien
cagcgattttgattgaagtttagcc

SEQ ID NO: 4406711 - DNA, 25 bp, Homo sapien
acagcgattttgattgaagtttagc

SEQ ID NO: 4406712 - DNA, 25 bp, Homo sapien
gcgattttgattgaagtttagccac

SEQ ID NO: 4406713 - DNA, 25 bp, Homo sapien
cacagcgattttgattgaagtttag

SEQ ID NO: 4406714 - DNA, 25 bp, Homo sapien
cgcccaaagttaagatagagcagct

SEQ ID NO: 4406715 - DNA, 25 bp, Homo sapien
aagttaagatagagcagcttccagg

SEQ ID NO: 4406716 - DNA, 25 bp, Homo sapien
caaagttaagatagagcagcttcca

SEQ ID NO: 4406717 - DNA, 25 bp, Homo sapien
cccaaagttaagatagagcagcttc

SEQ ID NO: 4406718 - DNA, 25 bp, Homo sapien
ctatgacggtagtaggacgggcggg

SEQ ID NO: 4406719 - DNA, 25 bp, Homo sapien
actgggccgccgttcacctgcaggg

SEQ ID NO: 4406720 - DNA, 25 bp, Homo sapien
gcagggactgggccgccgttcacct

SEQ ID NO: 4406721 - DNA, 25 bp, Homo sapien
agggactgggccgccgttcacctgc

SEQ ID NO: 4406722 - DNA, 25 bp, Homo sapien
acgcctgcgcaatcggctccagtgc

SEQ ID NO: 4406723 - DNA, 25 bp, Homo sapien
caacgccaacagggcagcgcgtgtg

SEQ ID NO: 4406724 - DNA, 25 bp, Homo sapien
cagcgcgtgtgagagccacgcctgc

SEQ ID NO: 4406725 - DNA, 25 bp, Homo sapien
acagggcagcgcgtgtgagagccac

SEQ ID NO: 4406726 - DNA, 25 bp, Homo sapien
ttccgcacgccgacgcggcgcaggc

SEQ ID NO: 4406727 - DNA, 25 bp, Homo sapien
cttcccgcgcgcagaggcgccgaga

SEQ ID NO: 4406728 - DNA, 25 bp, Homo sapien
agacaccgcggcgttccgcacgccg

SEQ ID NO: 4406729 - DNA, 25 bp, Homo sapien
cgcaggcgcactgccaccctcttgc

SEQ ID NO: 4406730 - DNA, 25 bp, Homo sapien
agcacggacttggtagcctgttccg

SEQ ID NO: 4406731 - DNA, 25 bp, Homo sapien
acggacttggtagcctgttccgcca

SEQ ID NO: 4406732 - DNA, 25 bp, Homo sapien
aaacagcacggacttggtagcctgt

SEQ ID NO: 4406733 - DNA, 25 bp, Homo sapien
acagcacggacttggtagcctgttc

SEQ ID NO: 4406734 - DNA, 25 bp, Homo sapien
ttctacattgtaagacctaagcata

SEQ ID NO: 4406735 - DNA, 25 bp, Homo sapien
gactgtagtttccacagcagtaaaa

SEQ ID NO: 4406736 - DNA, 25 bp, Homo sapien
catattacgtacttttttcccacag

SEQ ID NO: 4406737 - DNA, 25 bp, Homo sapien
cagagactgtagtttccacagcagt

SEQ ID NO: 4406738 - DNA, 25 bp, Homo sapien
gtgatttgacaccaaccagccaagt

SEQ ID NO: 4406739 - DNA, 25 bp, Homo sapien
tgtccaaccagtgagggtagaccct

SEQ ID NO: 4406740 - DNA, 25 bp, Homo sapien
gggctgtgctatccctcaggaaaaa

SEQ ID NO: 4406741 - DNA, 25 bp, Homo sapien
aaagagttgctactaatgatccagg

SEQ ID NO: 4406742 - DNA, 25 bp, Homo sapien
ctgagatgttttgatcggttacaag

SEQ ID NO: 4406743 - DNA, 25 bp, Homo sapien
aaaactgcttctgcaatgggtgatc

SEQ ID NO: 4406744 - DNA, 25 bp, Homo sapien
tgcttctgcaatgggtgatcgacaa

SEQ ID NO: 4406745 - DNA, 25 bp, Homo sapien
gcaatgggtgatcgacaaatgttac

SEQ ID NO: 4406746 - DNA, 25 bp, Homo sapien
cctctttaagataatgaatggtact

SEQ ID NO: 4406747 - DNA, 25 bp, Homo sapien
ggttggcctctttaagataatgaat

SEQ ID NO: 4406748 - DNA, 25 bp, Homo sapien
caggttggcctctttaagataatga

SEQ ID NO: 4406749 - DNA, 25 bp, Homo sapien
ggcctctttaagataatgaatggta

SEQ ID NO: 4406750 - DNA, 25 bp, Homo sapien
ggaagttgccgcgctgtctaccctc

SEQ ID NO: 4406751 - DNA, 25 bp, Homo sapien
aagttgccgcgctgtctaccctcca

SEQ ID NO: 4406752 - DNA, 25 bp, Homo sapien
cggaagttgccgcgctgtctaccct

SEQ ID NO: 4406753 - DNA, 25 bp, Homo sapien
ccggaagttgccgcgctgtctaccc

SEQ ID NO: 4406754 - DNA, 25 bp, Homo sapien
gtcaggggggttccctatctcatac

SEQ ID NO: 4406755 - DNA, 25 bp, Homo sapien
gcagctctgccctcggtagtcaggg

SEQ ID NO: 4406756 - DNA, 25 bp, Homo sapien
gaatgccgtgcctcttcatgcagct

SEQ ID NO: 4406757 - DNA, 25 bp, Homo sapien
ttcatgcagctctgccctcggtagt

SEQ ID NO: 4406758 - DNA, 25 bp, Homo sapien
cacacaacttcaagtccaaggacgg

SEQ ID NO: 4406759 - DNA, 25 bp, Homo sapien
aacacacaacttcaagtccaaggac

SEQ ID NO: 4406760 - DNA, 25 bp, Homo sapien
acacaacttcaagtccaaggacggt

SEQ ID NO: 4406761 - DNA, 25 bp, Homo sapien
cacaacttcaagtccaaggacggta

SEQ ID NO: 4406762 - DNA, 25 bp, Homo sapien
aaacagcaccgctgtcaatgaccca

SEQ ID NO: 4406763 - DNA, 25 bp, Homo sapien
cacgttccagtcagaaacagcaccg

SEQ ID NO: 4406764 - DNA, 25 bp, Homo sapien
tccagtcagaaacagcaccgctgtc

SEQ ID NO: 4406765 - DNA, 25 bp, Homo sapien
gggaccggcccacgttccagtcaga

SEQ ID NO: 4406766 - DNA, 25 bp, Homo sapien
ttgctttatgggctgtgtgaatgcc

SEQ ID NO: 4406767 - DNA, 25 bp, Homo sapien
tgaatgccatgatttcttaggcagc

SEQ ID NO: 4406768 - DNA, 25 bp, Homo sapien
tttatgggctgtgtgaatgccatga

SEQ ID NO: 4406769 - DNA, 25 bp, Homo sapien
atgggctgtgtgaatgccatgattt

SEQ ID NO: 4406770 - DNA, 25 bp, Homo sapien
ttctaccacaggacgatgcagcaag

SEQ ID NO: 4406771 - DNA, 25 bp, Homo sapien
cagggatctcaaacggttcagtagc

SEQ ID NO: 4406772 - DNA, 25 bp, Homo sapien
gtcaggcaagtctttcaacaccgtg

SEQ ID NO: 4406773 - DNA, 25 bp, Homo sapien
catttccgaaaaggtcagtcccaga

SEQ ID NO: 4406774 - DNA, 25 bp, Homo sapien
tacgtactgcggaacaaaggtggaa

SEQ ID NO: 4406775 - DNA, 25 bp, Homo sapien
aaaagcagccgcgaactacaggtga

SEQ ID NO: 4406776 - DNA, 25 bp, Homo sapien
gaaacgccatataaaaaaccagtgc

SEQ ID NO: 4406777 - DNA, 25 bp, Homo sapien
tatgcacttccagtagctagaaaag

SEQ ID NO: 4406778 - DNA, 25 bp, Homo sapien
actgctgtatttgagcctgttactc

SEQ ID NO: 4406779 - DNA, 25 bp, Homo sapien
tacatcggcttcaattccttagtag

SEQ ID NO: 4406780 - DNA, 25 bp, Homo sapien
tccttagtagcagtgtataatacag

SEQ ID NO: 4406781 - DNA, 25 bp, Homo sapien
tataccattcaagcctagaggatgc

SEQ ID NO: 4406782 - DNA, 25 bp, Homo sapien
ctcagattgctttcatccatacata

SEQ ID NO: 4406783 - DNA, 25 bp, Homo sapien
agattgctttcatccatacatagta

SEQ ID NO: 4406784 - DNA, 25 bp, Homo sapien
catagtatataatcaaatgtggcaa

SEQ ID NO: 4406785 - DNA, 25 bp, Homo sapien
atgtggcaaaatcttctttggtaat

SEQ ID NO: 4406786 - DNA, 25 bp, Homo sapien
gatacaaaactataacagccaagct

SEQ ID NO: 4406787 - DNA, 25 bp, Homo sapien
gaacctatggttgcagagctttgac

SEQ ID NO: 4406788 - DNA, 25 bp, Homo sapien
gaccatcactgactattaaaacctt

SEQ ID NO: 4406789 - DNA, 25 bp, Homo sapien
ttctcatgcagaacaatatgcttga

SEQ ID NO: 4406790 - DNA, 25 bp, Homo sapien
caatctggcctaatgacagggcagc

SEQ ID NO: 4406791 - DNA, 25 bp, Homo sapien
aatgaatttaagctgacccacgagg

SEQ ID NO: 4406792 - DNA, 25 bp, Homo sapien
gaaacacggtgctcagtgccagtca

SEQ ID NO: 4406793 - DNA, 25 bp, Homo sapien
aacaaatttcgactgagcacctgcg

SEQ ID NO: 4406794 - DNA, 25 bp, Homo sapien
tttttgtggatcatagctcccaagt

SEQ ID NO: 4406795 - DNA, 25 bp, Homo sapien
gttgtttttgtggatcatagctccc

SEQ ID NO: 4406796 - DNA, 25 bp, Homo sapien
ataagttgtttttgtggatcatagc

SEQ ID NO: 4406797 - DNA, 25 bp, Homo sapien
aatagggatcttcaataataagttg

SEQ ID NO: 4406798 - DNA, 25 bp, Homo sapien
tgggtcttcatattagccctaaaac

SEQ ID NO: 4406799 - DNA, 25 bp, Homo sapien
aaaaacatccttaacacaatctcat

SEQ ID NO: 4406800 - DNA, 25 bp, Homo sapien
aatatggcaggatacaaatgtgttg

SEQ ID NO: 4406801 - DNA, 25 bp, Homo sapien
aacatccttaacacaatctcatctg

SEQ ID NO: 4406802 - DNA, 25 bp, Homo sapien
ctgacacactgctggtacaccgtct

SEQ ID NO: 4406803 - DNA, 25 bp, Homo sapien
tgctggtacaccgtctcaaagtcag

SEQ ID NO: 4406804 - DNA, 25 bp, Homo sapien
cacactgctggtacaccgtctcaaa

SEQ ID NO: 4406805 - DNA, 25 bp, Homo sapien
ctggtacaccgtctcaaagtcagag

SEQ ID NO: 4406806 - DNA, 25 bp, Homo sapien
tcagtgggccttctccaagaacgct

SEQ ID NO: 4406807 - DNA, 25 bp, Homo sapien
agtgggccttctccaagaacgctct

SEQ ID NO: 4406808 - DNA, 25 bp, Homo sapien
cagtgggccttctccaagaacgctc

SEQ ID NO: 4406809 - DNA, 25 bp, Homo sapien
gtgggccttctccaagaacgctctg

SEQ ID NO: 4406810 - DNA, 25 bp, Homo sapien
tttattgattctcctgccaaacaca

SEQ ID NO: 4406811 - DNA, 25 bp, Homo sapien
ttttattgattctcctgccaaacac

SEQ ID NO: 4406812 - DNA, 25 bp, Homo sapien
gatttttattgattctcctgccaaa

SEQ ID NO: 4406813 - DNA, 25 bp, Homo sapien
agatttttattgattctcctgccaa

SEQ ID NO: 4406814 - DNA, 25 bp, Homo sapien
tcgattatctaagtctcaacaggct

SEQ ID NO: 4406815 - DNA, 25 bp, Homo sapien
tcatgaagtattgaaggtgccaacg

SEQ ID NO: 4406816 - DNA, 25 bp, Homo sapien
tgtcaatccacaaaaggccctaggg

SEQ ID NO: 4406817 - DNA, 25 bp, Homo sapien
ggtgccaacgactgattccataaat

SEQ ID NO: 4406818 - DNA, 25 bp, Homo sapien
gaaatattcatgattttgacattat

SEQ ID NO: 4406819 - DNA, 25 bp, Homo sapien
tattcatgattttgacattatctca

SEQ ID NO: 4406820 - DNA, 25 bp, Homo sapien
gattttgacattatctcaaaataca

SEQ ID NO: 4406821 - DNA, 25 bp, Homo sapien
tttgacattatctcaaaatacacag

SEQ ID NO: 4406822 - DNA, 25 bp, Homo sapien
tgcctgggaccctcatgatactgag

SEQ ID NO: 4406823 - DNA, 25 bp, Homo sapien
tagggagtcaaggatcaaacgtgtc

SEQ ID NO: 4406824 - DNA, 25 bp, Homo sapien
gtagaggcaacatgtccagaggatg

SEQ ID NO: 4406825 - DNA, 25 bp, Homo sapien
caaggacagttccagctgtagaacc

SEQ ID NO: 4406826 - DNA, 25 bp, Homo sapien
cagatggtatcgtctgggtgtagcc

SEQ ID NO: 4406827 - DNA, 25 bp, Homo sapien
gacagaatagtcaagagtcctagga

SEQ ID NO: 4406828 - DNA, 25 bp, Homo sapien
gaattcggcaaagcaatgagtttct

SEQ ID NO: 4406829 - DNA, 25 bp, Homo sapien
catatgagcccttgtcggcagatgg

SEQ ID NO: 4406830 - DNA, 25 bp, Homo sapien
tctgtggctaattctgttggtcgtt

SEQ ID NO: 4406831 - DNA, 25 bp, Homo sapien
aatttcggtcatgttttagagacag

SEQ ID NO: 4406832 - DNA, 25 bp, Homo sapien
gtcttcattaggtgaaatcgcaaaa

SEQ ID NO: 4406833 - DNA, 25 bp, Homo sapien
tctcagagtattatttggaacggca

SEQ ID NO: 4406834 - DNA, 25 bp, Homo sapien
ttgcaaacgccacagtgatgccctg

SEQ ID NO: 4406835 - DNA, 25 bp, Homo sapien
tcagccactggaagagctactccgt

SEQ ID NO: 4406836 - DNA, 25 bp, Homo sapien
gcagaatccccttgatagtccccag

SEQ ID NO: 4406837 - DNA, 25 bp, Homo sapien
tgatgccctgcagaaaagctgtggc

SEQ ID NO: 4406838 - DNA, 25 bp, Homo sapien
gcaacttggctaatatggagctcca

SEQ ID NO: 4406839 - DNA, 25 bp, Homo sapien
gactttatcacaacaccagagactg

SEQ ID NO: 4406840 - DNA, 25 bp, Homo sapien
tagacagccgacataatcctggagc

SEQ ID NO: 4406841 - DNA, 25 bp, Homo sapien
cactgtcgtgtgttgcaatccaggg

SEQ ID NO: 4406842 - DNA, 25 bp, Homo sapien
tcagagggcgtgacttcacacacag

SEQ ID NO: 4406843 - DNA, 25 bp, Homo sapien
gatgcgaatgctcctcttcagaggg

SEQ ID NO: 4406844 - DNA, 25 bp, Homo sapien
gggcgtgacttcacacacagtcggg

SEQ ID NO: 4406845 - DNA, 25 bp, Homo sapien
ggtcagctgtggatgcgaatgctcc

SEQ ID NO: 4406846 - DNA, 25 bp, Homo sapien
cccggctgcgtcaagttaggagtga

SEQ ID NO: 4406847 - DNA, 25 bp, Homo sapien
gaaaatagcagcaataggtccgcgc

SEQ ID NO: 4406848 - DNA, 25 bp, Homo sapien
tgtcaaccgtcactttggaaatgga

SEQ ID NO: 4406849 - DNA, 25 bp, Homo sapien
taaggtcagttttatcccggctgcg

SEQ ID NO: 4406850 - DNA, 25 bp, Homo sapien
ccttcttggagagcggtaggcgcgg

SEQ ID NO: 4406851 - DNA, 25 bp, Homo sapien
gggaaagaaagttgcgcccgcgcca

SEQ ID NO: 4406852 - DNA, 25 bp, Homo sapien
tggcacccgcggcttccaaagggga

SEQ ID NO: 4406853 - DNA, 25 bp, Homo sapien
tgatcgtcgaggagaccgcggctcc

SEQ ID NO: 4406854 - DNA, 25 bp, Homo sapien
gcatggagtagtggcgcagctcggg

SEQ ID NO: 4406855 - DNA, 25 bp, Homo sapien
gcccgccgggcatggagtagtggcg

SEQ ID NO: 4406856 - DNA, 25 bp, Homo sapien
acagacggcgacgactccggcggct

SEQ ID NO: 4406857 - DNA, 25 bp, Homo sapien
tgggtccagcgctcggagcggccga

SEQ ID NO: 4406858 - DNA, 25 bp, Homo sapien
ggacccgcctgacgtcggcgggcgc

SEQ ID NO: 4406859 - DNA, 25 bp, Homo sapien
attaaagccccgctcggagcccttg

SEQ ID NO: 4406860 - DNA, 25 bp, Homo sapien
ggcgggcgcggggataagaagctcc

SEQ ID NO: 4406861 - DNA, 25 bp, Homo sapien
cgcggggataagaagctccccgagg

SEQ ID NO: 4406862 - DNA, 25 bp, Homo sapien
gggagggaccttcgctcgtcctctc

SEQ ID NO: 4406863 - DNA, 25 bp, Homo sapien
cagatggcgcggtccttgccgggga

SEQ ID NO: 4406864 - DNA, 25 bp, Homo sapien
cttcgctcgtcctctcgcagggggt

SEQ ID NO: 4406865 - DNA, 25 bp, Homo sapien
gccgagggtccagcgcagaggagcg

SEQ ID NO: 4406866 - DNA, 25 bp, Homo sapien
aactgcggtgtccaccagctgcgag

SEQ ID NO: 4406867 - DNA, 25 bp, Homo sapien
agggccggttccatcgccaggcgtc

SEQ ID NO: 4406868 - DNA, 25 bp, Homo sapien
aggcgtcgctcttgcccgtggaact

SEQ ID NO: 4406869 - DNA, 25 bp, Homo sapien
tcttgcccgtggaactcaagtgtct

SEQ ID NO: 4406870 - DNA, 25 bp, Homo sapien
ggatggtagaaagggctcattcaag

SEQ ID NO: 4406871 - DNA, 25 bp, Homo sapien
gtagaaagggctcattcaaggaatc

SEQ ID NO: 4406872 - DNA, 25 bp, Homo sapien
tggtagaaagggctcattcaaggaa

SEQ ID NO: 4406873 - DNA, 25 bp, Homo sapien
ttggatggtagaaagggctcattca

SEQ ID NO: 4406874 - DNA, 25 bp, Homo sapien
ctctcctgaacatgcatagccgtgt

SEQ ID NO: 4406875 - DNA, 25 bp, Homo sapien
cctgaacatgcatagccgtgtgcat

SEQ ID NO: 4406876 - DNA, 25 bp, Homo sapien
catgcatagccgtgtgcatctgcag

SEQ ID NO: 4406877 - DNA, 25 bp, Homo sapien
acatgcatagccgtgtgcatctgca

SEQ ID NO: 4406878 - DNA, 25 bp, Homo sapien
aagaagttgtcttgcccaggttcac

SEQ ID NO: 4406879 - DNA, 25 bp, Homo sapien
tatgcagttccctctatccaggagg

SEQ ID NO: 4406880 - DNA, 25 bp, Homo sapien
catttccgacatgaaaaaactgggc

SEQ ID NO: 4406881 - DNA, 25 bp, Homo sapien
cagatgtgagcaggaatcagaacct

SEQ ID NO: 4406882 - DNA, 25 bp, Homo sapien
ctcaagagagaaagcgccatctacg

SEQ ID NO: 4406883 - DNA, 25 bp, Homo sapien
ttataaactacctgtgtatgatata

SEQ ID NO: 4406884 - DNA, 25 bp, Homo sapien
gaaggggagcttcatcaaacaccca

SEQ ID NO: 4406885 - DNA, 25 bp, Homo sapien
agaaagcgccatctacgaggaaggg

SEQ ID NO: 4406886 - DNA, 25 bp, Homo sapien
cccactgccactgtgccctagtgca

SEQ ID NO: 4406887 - DNA, 25 bp, Homo sapien
actgtgccctagtgcatttctgagg

SEQ ID NO: 4406888 - DNA, 25 bp, Homo sapien
ccactgtgccctagtgcatttctga

SEQ ID NO: 4406889 - DNA, 25 bp, Homo sapien
acagcagcctaagagaacgtggagc

SEQ ID NO: 4406890 - DNA, 25 bp, Homo sapien
tgacctaatcttaatcttgctgtgt

SEQ ID NO: 4406891 - DNA, 25 bp, Homo sapien
taaagtctgttgcatagatcgactc

SEQ ID NO: 4406892 - DNA, 25 bp, Homo sapien
tccataagaagcaaccgatcaccag

SEQ ID NO: 4406893 - DNA, 25 bp, Homo sapien
gaggtctcctccacgtagatggctg

SEQ ID NO: 4406894 - DNA, 25 bp, Homo sapien
gaaaccaggttctctgcacatccat

SEQ ID NO: 4406895 - DNA, 25 bp, Homo sapien
taacatgacacccttcagtgccagg

SEQ ID NO: 4406896 - DNA, 25 bp, Homo sapien
cagtgccaggtgtcatttcagtctg

SEQ ID NO: 4406897 - DNA, 25 bp, Homo sapien
catggttattggtggcattgagtaa

SEQ ID NO: 4406898 - DNA, 25 bp, Homo sapien
ggattggccacatctgcgttaatgt

SEQ ID NO: 4406899 - DNA, 25 bp, Homo sapien
gtcacacagtacaaagcctctgcca

SEQ ID NO: 4406900 - DNA, 25 bp, Homo sapien
gcctctgccaccagcagggccgaga

SEQ ID NO: 4406901 - DNA, 25 bp, Homo sapien
aaagcctctgccaccagcagggccg

SEQ ID NO: 4406902 - DNA, 25 bp, Homo sapien
tgtcacacagtacaaagcctctgcc

SEQ ID NO: 4406903 - DNA, 25 bp, Homo sapien
agactctcagcttccggtccttaga

SEQ ID NO: 4406904 - DNA, 25 bp, Homo sapien
cccagtgtccgggccgggacaggag

SEQ ID NO: 4406905 - DNA, 25 bp, Homo sapien
tctcagcttccggtccttagaagct

SEQ ID NO: 4406906 - DNA, 25 bp, Homo sapien
agcttccggtccttagaagctccct

SEQ ID NO: 4406907 - DNA, 25 bp, Homo sapien
tgaattgacaggcttaagagatgaa

SEQ ID NO: 4406908 - DNA, 25 bp, Homo sapien
gaattgacaggcttaagagatgaat

SEQ ID NO: 4406909 - DNA, 25 bp, Homo sapien
ttgacaggcttaagagatgaatatg

SEQ ID NO: 4406910 - DNA, 25 bp, Homo sapien
acaggcttaagagatgaatatgggt

SEQ ID NO: 4406911 - DNA, 25 bp, Homo sapien
ggacagagcatctccacatgggcta

SEQ ID NO: 4406912 - DNA, 25 bp, Homo sapien
ggttcattatccacacccgcagata

SEQ ID NO: 4406913 - DNA, 25 bp, Homo sapien
tatccagcatccacgagtgagcacg

SEQ ID NO: 4406914 - DNA, 25 bp, Homo sapien
tatatctgtgtgtctcgggctgtgc

SEQ ID NO: 4406915 - DNA, 25 bp, Homo sapien
gaatgcatgcattcacggaactacc

SEQ ID NO: 4406916 - DNA, 25 bp, Homo sapien
gacctatcatgccagtatccgaaga

SEQ ID NO: 4406917 - DNA, 25 bp, Homo sapien
ggaggtcacctcatttattggcttg

SEQ ID NO: 4406918 - DNA, 25 bp, Homo sapien
gggtaacccagcatgatccacaaat

SEQ ID NO: 4406919 - DNA, 25 bp, Homo sapien
tgtgctgtgacccccttggtattct

SEQ ID NO: 4406920 - DNA, 25 bp, Homo sapien
tgtgacccccttggtattctgttcc

SEQ ID NO: 4406921 - DNA, 25 bp, Homo sapien
tgacccccttggtattctgttccca

SEQ ID NO: 4406922 - DNA, 25 bp, Homo sapien
ctgtgacccccttggtattctgttc

SEQ ID NO: 4406923 - DNA, 25 bp, Homo sapien
cttctgcatgtccctttatcttctg

SEQ ID NO: 4406924 - DNA, 25 bp, Homo sapien
ttctgcatgtccctttatcttctgc

SEQ ID NO: 4406925 - DNA, 25 bp, Homo sapien
tctgcatgtccctttatcttctgca

SEQ ID NO: 4406926 - DNA, 25 bp, Homo sapien
ctgcatgtccctttatcttctgcat

SEQ ID NO: 4406927 - DNA, 25 bp, Homo sapien
aacttttatcttctgcataaacctt

SEQ ID NO: 4406928 - DNA, 25 bp, Homo sapien
ttgatcgtgtcttcctcgaatctca

SEQ ID NO: 4406929 - DNA, 25 bp, Homo sapien
gctgaggatacgtccactgtgagat

SEQ ID NO: 4406930 - DNA, 25 bp, Homo sapien
cgagagcacggctgaggatacgtcc

SEQ ID NO: 4406931 - DNA, 25 bp, Homo sapien
gggtcatctccagcatgcggtacga

SEQ ID NO: 4406932 - DNA, 25 bp, Homo sapien
ccagtaactcaagtcctgagcaggc

SEQ ID NO: 4406933 - DNA, 25 bp, Homo sapien
ggcagcaatgatcccagctgtgggt

SEQ ID NO: 4406934 - DNA, 25 bp, Homo sapien
cagctgtgggtcattagccatctcc

SEQ ID NO: 4406935 - DNA, 25 bp, Homo sapien
tgtaagcctccgacatccagtaact

SEQ ID NO: 4406936 - DNA, 25 bp, Homo sapien
tgaattttctaaataggaaactgac

SEQ ID NO: 4406937 - DNA, 25 bp, Homo sapien
gaggagccaattccactccatagtc

SEQ ID NO: 4406938 - DNA, 25 bp, Homo sapien
ggtaaagtgattgcagttgtcctga

SEQ ID NO: 4406939 - DNA, 25 bp, Homo sapien
gaaactgacaagtcgggtaaagtga

SEQ ID NO: 4406940 - DNA, 25 bp, Homo sapien
gaacctgaaatcctcgtagtagctt

SEQ ID NO: 4406941 - DNA, 25 bp, Homo sapien
agatttcagagaccagatcccggcc

SEQ ID NO: 4406942 - DNA, 25 bp, Homo sapien
ctggaagctgagtccgcctgaaact

SEQ ID NO: 4406943 - DNA, 25 bp, Homo sapien
ctgcaagaggtggagtattcgcccc

SEQ ID NO: 4406944 - DNA, 25 bp, Homo sapien
aaatccatcagtgacatgccatggc

SEQ ID NO: 4406945 - DNA, 25 bp, Homo sapien
atgaggagcgcacagtctgagactc

SEQ ID NO: 4406946 - DNA, 25 bp, Homo sapien
tgagactcacattcctcacgcagct

SEQ ID NO: 4406947 - DNA, 25 bp, Homo sapien
aatccatcagtgacatgccatggcc

SEQ ID NO: 4406948 - DNA, 25 bp, Homo sapien
cagccacggtcaattaaactaacac

SEQ ID NO: 4406949 - DNA, 25 bp, Homo sapien
tgcccataatacagccacggtcaat

SEQ ID NO: 4406950 - DNA, 25 bp, Homo sapien
tgaagtggagttgcgcttctgcttc

SEQ ID NO: 4406951 - DNA, 25 bp, Homo sapien
ctggcatccggagccactgggacag

SEQ ID NO: 4406952 - DNA, 25 bp, Homo sapien
ttcttcaaaagagcagtgcttctga

SEQ ID NO: 4406953 - DNA, 25 bp, Homo sapien
tttcttcaaaagagcagtgcttctg

SEQ ID NO: 4406954 - DNA, 25 bp, Homo sapien
gaaattgtatgaagaccacacaacc

SEQ ID NO: 4406955 - DNA, 25 bp, Homo sapien
ctgaaattgtatgaagaccacacaa

SEQ ID NO: 4406956 - DNA, 25 bp, Homo sapien
aaccacccaacgagagtgccatcat

SEQ ID NO: 4406957 - DNA, 25 bp, Homo sapien
acgagagtgccatcatcagcgtggt

SEQ ID NO: 4406958 - DNA, 25 bp, Homo sapien
ttctgtccacagcactgtgcggcat

SEQ ID NO: 4406959 - DNA, 25 bp, Homo sapien
cttctgtccacagcactgtgcggca

SEQ ID NO: 4406960 - DNA, 25 bp, Homo sapien
tggatacatggaagcattcgttcat

SEQ ID NO: 4406961 - DNA, 25 bp, Homo sapien
ctggatacatggaagcattcgttca

SEQ ID NO: 4406962 - DNA, 25 bp, Homo sapien
agcaacgcctccaggcaaacccacg

SEQ ID NO: 4406963 - DNA, 25 bp, Homo sapien
gcagcaacgcctccaggcaaaccca

SEQ ID NO: 4406964 - DNA, 25 bp, Homo sapien
cagcaacgcctccaggcaaacccac

SEQ ID NO: 4406965 - DNA, 25 bp, Homo sapien
ctcttcacagcaaaacccacgtgaa

SEQ ID NO: 4406966 - DNA, 25 bp, Homo sapien
cttcacagcaaaacccacgtgaacc

SEQ ID NO: 4406967 - DNA, 25 bp, Homo sapien
ctagccacaggccgtgtgcagcaat

SEQ ID NO: 4406968 - DNA, 25 bp, Homo sapien
tagccacaggccgtgtgcagcaatg

SEQ ID NO: 4406969 - DNA, 25 bp, Homo sapien
gttctgcgataaaaatcaccctttc

SEQ ID NO: 4406970 - DNA, 25 bp, Homo sapien
caacatgacttgttctgcgataaaa

SEQ ID NO: 4406971 - DNA, 25 bp, Homo sapien
aaaacaacatgacttgttctgcgat

SEQ ID NO: 4406972 - DNA, 25 bp, Homo sapien
gacttgttctgcgataaaaatcacc

SEQ ID NO: 4406973 - DNA, 25 bp, Homo sapien
cacatagctgccgaaggtggaggta

SEQ ID NO: 4406974 - DNA, 25 bp, Homo sapien
gaagcacacgagcaggtgtccatca

SEQ ID NO: 4406975 - DNA, 25 bp, Homo sapien
cagtgattctcagcgaaatgggtgc

SEQ ID NO: 4406976 - DNA, 25 bp, Homo sapien
tcgtccataggacaggaccccatgg

SEQ ID NO: 4406977 - DNA, 25 bp, Homo sapien
tcctgcattttcaagccatttgcat

SEQ ID NO: 4406978 - DNA, 25 bp, Homo sapien
acttgggtagaacagcaaatgttcc

SEQ ID NO: 4406979 - DNA, 25 bp, Homo sapien
ctgcattttcaagccatttgcattt

SEQ ID NO: 4406980 - DNA, 25 bp, Homo sapien
ttcctgcattttcaagccatttgca

SEQ ID NO: 4406981 - DNA, 25 bp, Homo sapien
cacaacactcggcagaagctgcccc

SEQ ID NO: 4406982 - DNA, 25 bp, Homo sapien
ttgggccacgcagccgtcggcagaa

SEQ ID NO: 4406983 - DNA, 25 bp, Homo sapien
ccgtgtgcacctccagagacacaga

SEQ ID NO: 4406984 - DNA, 25 bp, Homo sapien
gccacgcagccgtcggcagaagctg

SEQ ID NO: 4406985 - DNA, 25 bp, Homo sapien
gatacatgataatactacagtaaca

SEQ ID NO: 4406986 - DNA, 25 bp, Homo sapien
atttgctactgatacatgataatac

SEQ ID NO: 4406987 - DNA, 25 bp, Homo sapien
ttattaaacaattaactattgctaa

SEQ ID NO: 4406988 - DNA, 25 bp, Homo sapien
tgaggggccaaggtggtaagatcac

SEQ ID NO: 4406989 - DNA, 25 bp, Homo sapien
ctcacccgtgtgcacacagctgtgg

SEQ ID NO: 4406990 - DNA, 25 bp, Homo sapien
ggtgtcccctgaagactcacccgtg

SEQ ID NO: 4406991 - DNA, 25 bp, Homo sapien
cagcaaacggtgtgatggtcgtttt

SEQ ID NO: 4406992 - DNA, 25 bp, Homo sapien
ccagtgaccatctcatagcacagca

SEQ ID NO: 4406993 - DNA, 25 bp, Homo sapien
ccagtgaccatctcatagcacagca

SEQ ID NO: 4406994 - DNA, 25 bp, Homo sapien
cggtgtgatggtcgttttggtgtcc

SEQ ID NO: 4406995 - DNA, 25 bp, Homo sapien
caaacggtgtgatggtcgttttggt

SEQ ID NO: 4406996 - DNA, 25 bp, Homo sapien
ccagtgaccatctcatagcacagca

SEQ ID NO: 4406997 - DNA, 25 bp, Homo sapien
cagcaaacggtgtgatggtcgtttt

SEQ ID NO: 4406998 - DNA, 25 bp, Homo sapien
cagtgaccatctcacagcacagcaa

SEQ ID NO: 4406999 - DNA, 25 bp, Homo sapien
tcacagcacagcaaacggtgtgatg

SEQ ID NO: 4407000 - DNA, 25 bp, Homo sapien
tgtgatggtcgctttggtgtcccct

SEQ ID NO: 4407001 - DNA, 25 bp, Homo sapien
cagcaaacggtgtgatggtcgcttt

SEQ ID NO: 4407002 - DNA, 25 bp, Homo sapien
gaaacactgtgagtgacgagacgca

SEQ ID NO: 4407003 - DNA, 25 bp, Homo sapien
taacaggcaggttccggtctgtgga

SEQ ID NO: 4407004 - DNA, 25 bp, Homo sapien
tgccggcgcccttgctaacaggcag

SEQ ID NO: 4407005 - DNA, 25 bp, Homo sapien
cccgaggtggtgctcactggccaat

SEQ ID NO: 4407006 - DNA, 25 bp, Homo sapien
gctgtgtcgctaggatttcatgtaa

SEQ ID NO: 4407007 - DNA, 25 bp, Homo sapien
tgggtcggttgtaaacaaactgcca

SEQ ID NO: 4407008 - DNA, 25 bp, Homo sapien
tctcccattgcagaacagctgtgtc

SEQ ID NO: 4407009 - DNA, 25 bp, Homo sapien
aaactgccatgaccctttctttgag

SEQ ID NO: 4407010 - DNA, 25 bp, Homo sapien
gcccaaaaccagctgcacgagttag

SEQ ID NO: 4407011 - DNA, 25 bp, Homo sapien
aaatgaaacccagcggatgccctct

SEQ ID NO: 4407012 - DNA, 25 bp, Homo sapien
tatctgagcaccaccaatttaggca

SEQ ID NO: 4407013 - DNA, 25 bp, Homo sapien
ttgggtccgcccagaataagcacag

SEQ ID NO: 4407014 - DNA, 25 bp, Homo sapien
gcgctcactctggctcggtgtcgac

SEQ ID NO: 4407015 - DNA, 25 bp, Homo sapien
tcctcggtcattgcgtttgtccggg

SEQ ID NO: 4407016 - DNA, 25 bp, Homo sapien
ggtcgcggctcagtccggtgcagct

SEQ ID NO: 4407017 - DNA, 25 bp, Homo sapien
tataagcagcgcgtgctgagcggtc

SEQ ID NO: 4407018 - DNA, 25 bp, Homo sapien
gagtgtacacctcattttcgtgagc

SEQ ID NO: 4407019 - DNA, 25 bp, Homo sapien
cacggtgaggtgtgcaggtatattt

SEQ ID NO: 4407020 - DNA, 25 bp, Homo sapien
gatttgaaaaagtcaaacacggtga

SEQ ID NO: 4407021 - DNA, 25 bp, Homo sapien
tatttttacaatccggacaaagcca

SEQ ID NO: 4407022 - DNA, 25 bp, Homo sapien
tggtgagatgttggccgcacacagc

SEQ ID NO: 4407023 - DNA, 25 bp, Homo sapien
acacagcacctgtcggtttccggca

SEQ ID NO: 4407024 - DNA, 25 bp, Homo sapien
acagtcgatgagatgtgggccgcac

SEQ ID NO: 4407025 - DNA, 25 bp, Homo sapien
tgggccgcacagcacctatgggtgt

SEQ ID NO: 4407026 - DNA, 25 bp, Homo sapien
ctgtgtccgtgtgggatggtataat

SEQ ID NO: 4407027 - DNA, 25 bp, Homo sapien
tgtgtccgtgtgggatggtataata

SEQ ID NO: 4407028 - DNA, 25 bp, Homo sapien
cggtggaatagttcctgtgtctgta

SEQ ID NO: 4407029 - DNA, 25 bp, Homo sapien
gtatgggatggtgtaatagttcctg

SEQ ID NO: 4407030 - DNA, 25 bp, Homo sapien
ggaatagttcctgtgtctgtatggg

SEQ ID NO: 4407031 - DNA, 25 bp, Homo sapien
tcctgtgtccgtgtgggatggtaga

SEQ ID NO: 4407032 - DNA, 25 bp, Homo sapien
gaggattagccatccggatgtgcga

SEQ ID NO: 4407033 - DNA, 25 bp, Homo sapien
tcaggtgactgggaacagtcgcaaa

SEQ ID NO: 4407034 - DNA, 25 bp, Homo sapien
gagagagtgaatttcctcaggagga

SEQ ID NO: 4407035 - DNA, 25 bp, Homo sapien
gaacagtcgcaaaatagagagagtg

SEQ ID NO: 4407036 - DNA, 25 bp, Homo sapien
ggtcctgggcgtcaacagccgctcg

SEQ ID NO: 4407037 - DNA, 25 bp, Homo sapien
tcctgggcgtcaacagccgctcggc

SEQ ID NO: 4407038 - DNA, 25 bp, Homo sapien
gtcctgggcgtcaacagccgctcgg

SEQ ID NO: 4407039 - DNA, 25 bp, Homo sapien
ctgggcgtcaacagccgctcggcct

SEQ ID NO: 4407040 - DNA, 25 bp, Homo sapien
ttcttctgggagaccggaggaagcc

SEQ ID NO: 4407041 - DNA, 25 bp, Homo sapien
ctgttgacatccccaagcagatggg

SEQ ID NO: 4407042 - DNA, 25 bp, Homo sapien
taagtttgtggatgggaatcaagca

SEQ ID NO: 4407043 - DNA, 25 bp, Homo sapien
gacaagaaacataatggtaagtttg

SEQ ID NO: 4407044 - DNA, 25 bp, Homo sapien
tgaagacgtccttctgggatcagca

SEQ ID NO: 4407045 - DNA, 25 bp, Homo sapien
gactgaagacgtccttctgggatca

SEQ ID NO: 4407046 - DNA, 25 bp, Homo sapien
tcaggactgaagacgtccttctggg

SEQ ID NO: 4407047 - DNA, 25 bp, Homo sapien
atcagcagagctcgggtgaggccag

SEQ ID NO: 4407048 - DNA, 25 bp, Homo sapien
gccagtgtaggtgtgaagcaggacc

SEQ ID NO: 4407049 - DNA, 25 bp, Homo sapien
tcatgcaaatgctgatgactcacgt

SEQ ID NO: 4407050 - DNA, 25 bp, Homo sapien
tgctgatgactcacgtttggaacct

SEQ ID NO: 4407051 - DNA, 25 bp, Homo sapien
gaaccttgtgcttatgggatgccag

SEQ ID NO: 4407052 - DNA, 25 bp, Homo sapien
tcaggtgaacccgttggtgctgacc

SEQ ID NO: 4407053 - DNA, 25 bp, Homo sapien
tctgactcggttgtagttccctcca

SEQ ID NO: 4407054 - DNA, 25 bp, Homo sapien
catctgactcggttgtagttccctc

SEQ ID NO: 4407055 - DNA, 25 bp, Homo sapien
tccggacatctgactcggttgtagt

SEQ ID NO: 4407056 - DNA, 25 bp, Homo sapien
acgcatcttccggacatctgactcg

SEQ ID NO: 4407057 - DNA, 25 bp, Homo sapien
cgagcgccccgagccagctcttcct

SEQ ID NO: 4407058 - DNA, 25 bp, Homo sapien
ttcagacgcccctgagatccccagc

SEQ ID NO: 4407059 - DNA, 25 bp, Homo sapien
ctcttcctcttcagacgcccctgag

SEQ ID NO: 4407060 - DNA, 25 bp, Homo sapien
ctaccccgagcgccccgagccagct

SEQ ID NO: 4407061 - DNA, 25 bp, Homo sapien
tcagtcatttatggagaagcttgat

SEQ ID NO: 4407062 - DNA, 25 bp, Homo sapien
agaagcttgattcccgcgccccgtg

SEQ ID NO: 4407063 - DNA, 25 bp, Homo sapien
ttctggcgtcccttgattccggcac

SEQ ID NO: 4407064 - DNA, 25 bp, Homo sapien
caccttgattctcgcgccgtggttg

SEQ ID NO: 4407065 - DNA, 25 bp, Homo sapien
ctgcccgtgcaattggtgggcaccc

SEQ ID NO: 4407066 - DNA, 25 bp, Homo sapien
accaggagaagtggcgttggcaagt

SEQ ID NO: 4407067 - DNA, 25 bp, Homo sapien
tgggcaccctttgtgaaggctacac

SEQ ID NO: 4407068 - DNA, 25 bp, Homo sapien
cgttggcaagtttcagggccgccgc

SEQ ID NO: 4407069 - DNA, 25 bp, Homo sapien
tcagttcttaacactcccaggctgc

SEQ ID NO: 4407070 - DNA, 25 bp, Homo sapien
catgtggttctacatctgggcccca

SEQ ID NO: 4407071 - DNA, 25 bp, Homo sapien
caaatacagcatgcggaatgtggac

SEQ ID NO: 4407072 - DNA, 25 bp, Homo sapien
ggacaatttgccattccttagagca

SEQ ID NO: 4407073 - DNA, 25 bp, Homo sapien
tccttgagtatcagcgaggaagaaa

SEQ ID NO: 4407074 - DNA, 25 bp, Homo sapien
tgtgcatcacccgctcagccatgcc

SEQ ID NO: 4407075 - DNA, 25 bp, Homo sapien
gcatcacccgctcagccatgcctgt

SEQ ID NO: 4407076 - DNA, 25 bp, Homo sapien
atcactgcgtgtccttgagtatcag

SEQ ID NO: 4407077 - DNA, 25 bp, Homo sapien
cgtcaggttccatgctgtcgggttc

SEQ ID NO: 4407078 - DNA, 25 bp, Homo sapien
tctgtgccgtcaggttccggttcgg

SEQ ID NO: 4407079 - DNA, 25 bp, Homo sapien
tcggtgccatcggttctggttccat

SEQ ID NO: 4407080 - DNA, 25 bp, Homo sapien
tgccatcgggttccatgctgttggg

SEQ ID NO: 4407081 - DNA, 25 bp, Homo sapien
tgagccgtcgggttccatctgtcag

SEQ ID NO: 4407082 - DNA, 25 bp, Homo sapien
tgtgccgtcgagttctgtgccctca

SEQ ID NO: 4407083 - DNA, 25 bp, Homo sapien
tgtgccatagggttctgagccgtcg

SEQ ID NO: 4407084 - DNA, 25 bp, Homo sapien
tgccgttgggttccgagcagacatc

SEQ ID NO: 4407085 - DNA, 25 bp, Homo sapien
tatccgcagggagagagaacgccct

SEQ ID NO: 4407086 - DNA, 25 bp, Homo sapien
ttatccgcagggagagagaacgccc

SEQ ID NO: 4407087 - DNA, 25 bp, Homo sapien
tggcctgcccacgtttttggttctg

SEQ ID NO: 4407088 - DNA, 25 bp, Homo sapien
ggacactggcctgcccacgtttttg

SEQ ID NO: 4407089 - DNA, 25 bp, Homo sapien
cctgcccacgtttttggttctgtgg

SEQ ID NO: 4407090 - DNA, 25 bp, Homo sapien
cactggcctgcccacgtttttggtt

SEQ ID NO: 4407091 - DNA, 25 bp, Homo sapien
ttcactgctgtgtgatactccactc

SEQ ID NO: 4407092 - DNA, 25 bp, Homo sapien
acaggccgttccttgttcactgctg

SEQ ID NO: 4407093 - DNA, 25 bp, Homo sapien
atgcgaacgggcacaggcgagtaca

SEQ ID NO: 4407094 - DNA, 25 bp, Homo sapien
tgctgtgggtaagtttacatgcccc

SEQ ID NO: 4407095 - DNA, 25 bp, Homo sapien
gccaggtctgtctgctcacaccagt

SEQ ID NO: 4407096 - DNA, 25 bp, Homo sapien
gtgcagcgcggcctttttccacgtc

SEQ ID NO: 4407097 - DNA, 25 bp, Homo sapien
cctcagtgtcgtggctctaaggtca

SEQ ID NO: 4407098 - DNA, 25 bp, Homo sapien
ggtctgtctgctcacaccagtgcca

SEQ ID NO: 4407099 - DNA, 25 bp, Homo sapien
tctccagcacgcagcatcacaggag

SEQ ID NO: 4407100 - DNA, 25 bp, Homo sapien
cacggcagcagcgatgcttctcaaa

SEQ ID NO: 4407101 - DNA, 25 bp, Homo sapien
tccgtgtgctccacggcagcagcga

SEQ ID NO: 4407102 - DNA, 25 bp, Homo sapien
cgcagcatcacaggagacacctgca

SEQ ID NO: 4407103 - DNA, 25 bp, Homo sapien
cttgtgaacaccaagacactgaatc

SEQ ID NO: 4407104 - DNA, 25 bp, Homo sapien
ttactcttgttccacacatgaggaa

SEQ ID NO: 4407105 - DNA, 25 bp, Homo sapien
gttactcttgttccacacatgagga

SEQ ID NO: 4407106 - DNA, 25 bp, Homo sapien
ttgtgaacaccaagacactgaatcc

SEQ ID NO: 4407107 - DNA, 25 bp, Homo sapien
gagggcggcgtgtgggtctcacgtc

SEQ ID NO: 4407108 - DNA, 25 bp, Homo sapien
tccagcttcactcctgccgtggagg

SEQ ID NO: 4407109 - DNA, 25 bp, Homo sapien
cactcctgccgtggaggctgtagca

SEQ ID NO: 4407110 - DNA, 25 bp, Homo sapien
tcctacaggccctggcggttgtttc

SEQ ID NO: 4407111 - DNA, 25 bp, Homo sapien
ggaggtccagcttcactcctgccgt

SEQ ID NO: 4407112 - DNA, 25 bp, Homo sapien
cttctgccgtaaagagtgtgcgggc

SEQ ID NO: 4407113 - DNA, 25 bp, Homo sapien
catgtggcctctcagtcgctggtgc

SEQ ID NO: 4407114 - DNA, 25 bp, Homo sapien
ggctgggctccgcatcaggaacttg

SEQ ID NO: 4407115 - DNA, 25 bp, Homo sapien
tcctgccggctggtgtcactcagct

SEQ ID NO: 4407116 - DNA, 25 bp, Homo sapien
cattgccacgacgtgcagtaggacc

SEQ ID NO: 4407117 - DNA, 25 bp, Homo sapien
gcaaagcaactgactcgaatttcat

SEQ ID NO: 4407118 - DNA, 25 bp, Homo sapien
gttggctggctgcataacagtatgg

SEQ ID NO: 4407119 - DNA, 25 bp, Homo sapien
tgggtgtcaaatgcattgccacgac

SEQ ID NO: 4407120 - DNA, 25 bp, Homo sapien
tgcttacggcacaaacacactcata

SEQ ID NO: 4407121 - DNA, 25 bp, Homo sapien
cttgggtcgggcgttcttcagagct

SEQ ID NO: 4407122 - DNA, 25 bp, Homo sapien
tgagtgccgcagtggagctcagtcc

SEQ ID NO: 4407123 - DNA, 25 bp, Homo sapien
tgagcagccgctgcttacggcacaa

SEQ ID NO: 4407124 - DNA, 25 bp, Homo sapien
tcaaatgagaaagctgcatgcagaa

SEQ ID NO: 4407125 - DNA, 25 bp, Homo sapien
catgcagaacgagtcgtgcttcctg

SEQ ID NO: 4407126 - DNA, 25 bp, Homo sapien
gacgtccctgtgagtcgagtgcgca

SEQ ID NO: 4407127 - DNA, 25 bp, Homo sapien
tcgtagccgtttgtgggaacctgga

SEQ ID NO: 4407128 - DNA, 25 bp, Homo sapien
gtcctcagacagtgaccgagaggat

SEQ ID NO: 4407129 - DNA, 25 bp, Homo sapien
aaacagcagaggcgtccggggctcc

SEQ ID NO: 4407130 - DNA, 25 bp, Homo sapien
cagacagtgaccgagaggatgcaaa

SEQ ID NO: 4407131 - DNA, 25 bp, Homo sapien
acagtgaccgagaggatgcaaaagg

SEQ ID NO: 4407132 - DNA, 25 bp, Homo sapien
atgcggaaggaggcccctctcccat

SEQ ID NO: 4407133 - DNA, 25 bp, Homo sapien
ccttcacatccatagttgtcctgac

SEQ ID NO: 4407134 - DNA, 25 bp, Homo sapien
catccttcacatccatagttgtcct

SEQ ID NO: 4407135 - DNA, 25 bp, Homo sapien
tcccatccttcacatccatagttgt

SEQ ID NO: 4407136 - DNA, 25 bp, Homo sapien
tagagttcaatccacaaccagcgac

SEQ ID NO: 4407137 - DNA, 25 bp, Homo sapien
cagcgacagcctagcattctgaagg

SEQ ID NO: 4407138 - DNA, 25 bp, Homo sapien
gagaaggacatcctcaggtcctgaa

SEQ ID NO: 4407139 - DNA, 25 bp, Homo sapien
cagtcccaagggagtacagagaagg

SEQ ID NO: 4407140 - DNA, 25 bp, Homo sapien
tcatcagagacgacggtgcccagag

SEQ ID NO: 4407141 - DNA, 25 bp, Homo sapien
agggtccaggtctcccgctacagcc

SEQ ID NO: 4407142 - DNA, 25 bp, Homo sapien
aggtctcccgctacagccacctcat

SEQ ID NO: 4407143 - DNA, 25 bp, Homo sapien
actgcagccccgtcgggtccaggtg

SEQ ID NO: 4407144 - DNA, 25 bp, Homo sapien
gcctgaggttgtgctggttccagac

SEQ ID NO: 4407145 - DNA, 25 bp, Homo sapien
caggatgtggctgtctacccatgaa

SEQ ID NO: 4407146 - DNA, 25 bp, Homo sapien
tgcctgcagctgatgtgcgacctgg

SEQ ID NO: 4407147 - DNA, 25 bp, Homo sapien
atgaacgaacgccacccattgagga

SEQ ID NO: 4407148 - DNA, 25 bp, Homo sapien
ctgtgttccggggtggagccagccg

SEQ ID NO: 4407149 - DNA, 25 bp, Homo sapien
ggtcctgtgttccggggtggagcca

SEQ ID NO: 4407150 - DNA, 25 bp, Homo sapien
gcaggtcctgtgttccggggtggag

SEQ ID NO: 4407151 - DNA, 25 bp, Homo sapien
tcctgtgttccggggtggagccagc

SEQ ID NO: 4407152 - DNA, 25 bp, Homo sapien
tagtcccagagatatccccagattc

SEQ ID NO: 4407153 - DNA, 25 bp, Homo sapien
aacaacatggtgtgccaggcgcagg

SEQ ID NO: 4407154 - DNA, 25 bp, Homo sapien
tcttcaaggaaaactccatcccatg

SEQ ID NO: 4407155 - DNA, 25 bp, Homo sapien
gcaccccacggaaaagcttgcagct

SEQ ID NO: 4407156 - DNA, 25 bp, Homo sapien
tgtccgggtctgagccgggcaccca

SEQ ID NO: 4407157 - DNA, 25 bp, Homo sapien
ggcctccactgtgtccgggtctgag

SEQ ID NO: 4407158 - DNA, 25 bp, Homo sapien
aagaggacatttgcggcggcctcca

SEQ ID NO: 4407159 - DNA, 25 bp, Homo sapien
tccaagaggacatttgcggcggcct

SEQ ID NO: 4407160 - DNA, 25 bp, Homo sapien
gcagtttttcctgctggtttcccac

SEQ ID NO: 4407161 - DNA, 25 bp, Homo sapien
gtttttcctgctggtttcccacatg

SEQ ID NO: 4407162 - DNA, 25 bp, Homo sapien
ttttcctgctggtttcccacatgac

SEQ ID NO: 4407163 - DNA, 25 bp, Homo sapien
ggtgcagcagtttttcctgctggtt

SEQ ID NO: 4407164 - DNA, 25 bp, Homo sapien
cactctgggcgttggtctccagcac

SEQ ID NO: 4407165 - DNA, 25 bp, Homo sapien
gagtggaggagccttccggaaaggc

SEQ ID NO: 4407166 - DNA, 25 bp, Homo sapien
gaggagccttccggaaaggcagcca

SEQ ID NO: 4407167 - DNA, 25 bp, Homo sapien
gaggtcatctgtgtcagccgtgaga

SEQ ID NO: 4407168 - DNA, 25 bp, Homo sapien
cactatattcttcacttctatccct

SEQ ID NO: 4407169 - DNA, 25 bp, Homo sapien
ggccactatattcttcacttctatc

SEQ ID NO: 4407170 - DNA, 25 bp, Homo sapien
taggccactatattcttcacttcta

SEQ ID NO: 4407171 - DNA, 25 bp, Homo sapien
gccactatattcttcacttctatcc

SEQ ID NO: 4407172 - DNA, 25 bp, Homo sapien
tggagcatagcattgcttttctggg

SEQ ID NO: 4407173 - DNA, 25 bp, Homo sapien
aatgctgtttcgtggagcatagcat

SEQ ID NO: 4407174 - DNA, 25 bp, Homo sapien
ttctggggctctgctgtattcagat

SEQ ID NO: 4407175 - DNA, 25 bp, Homo sapien
ttcgtggagcatagcattgcttttc

SEQ ID NO: 4407176 - DNA, 25 bp, Homo sapien
tgtggaagaaacctctcacctgcca

SEQ ID NO: 4407177 - DNA, 25 bp, Homo sapien
taccagattacaagacccttcaggg

SEQ ID NO: 4407178 - DNA, 25 bp, Homo sapien
tgtttctatgccgtcctccgaggtg

SEQ ID NO: 4407179 - DNA, 25 bp, Homo sapien
taggtccttgatccgtgaatgcaca

SEQ ID NO: 4407180 - DNA, 25 bp, Homo sapien
gccgcagccgccctgtgtgcatcat

SEQ ID NO: 4407181 - DNA, 25 bp, Homo sapien
atgagacgggagacgcgggtgccag

SEQ ID NO: 4407182 - DNA, 25 bp, Homo sapien
tgcacagaggggatgagacgggaga

SEQ ID NO: 4407183 - DNA, 25 bp, Homo sapien
catcatggggttgaagacttcccac

SEQ ID NO: 4407184 - DNA, 25 bp, Homo sapien
tggaggccgaggctcacaggagtca

SEQ ID NO: 4407185 - DNA, 25 bp, Homo sapien
ggaggccgaggctcacaggagtcat

SEQ ID NO: 4407186 - DNA, 25 bp, Homo sapien
ccttactgctgctggacgcttgcgg

SEQ ID NO: 4407187 - DNA, 25 bp, Homo sapien
agcttgtgccccttactgctgctgg

SEQ ID NO: 4407188 - DNA, 25 bp, Homo sapien
ttgtgccccttactgctgctggacg

SEQ ID NO: 4407189 - DNA, 25 bp, Homo sapien
gtggtcgaggcagcttgtgcccctt

SEQ ID NO: 4407190 - DNA, 25 bp, Homo sapien
tcgaggcagcttgtgcccctcactg

SEQ ID NO: 4407191 - DNA, 25 bp, Homo sapien
gtcgaggcagcttgtgcccctcact

SEQ ID NO: 4407192 - DNA, 25 bp, Homo sapien
ggtcgaggcagcttgtgcccctcac

SEQ ID NO: 4407193 - DNA, 25 bp, Homo sapien
atggaaacgcttccgtttgccctga

SEQ ID NO: 4407194 - DNA, 25 bp, Homo sapien
gaatattgaaagaagggctggagaa

SEQ ID NO: 4407195 - DNA, 25 bp, Homo sapien
tgcgtggagcttctttcttacacac

SEQ ID NO: 4407196 - DNA, 25 bp, Homo sapien
tgagggctcatggattgctcatgtt

SEQ ID NO: 4407197 - DNA, 25 bp, Homo sapien
gtttagctgtttctgtcaaatgcat

SEQ ID NO: 4407198 - DNA, 25 bp, Homo sapien
ggtttagctgtttctgtcaaatgca

SEQ ID NO: 4407199 - DNA, 25 bp, Homo sapien
ccctgcaggtttagctgtttctgtc

SEQ ID NO: 4407200 - DNA, 25 bp, Homo sapien
tgcaggtttagctgtttctgtcaaa

SEQ ID NO: 4407201 - DNA, 25 bp, Homo sapien
ccctgtgacggtgtcgtgtgagatc

SEQ ID NO: 4407202 - DNA, 25 bp, Homo sapien
cgtgaccagacccatggtgtgcgcc

SEQ ID NO: 4407203 - DNA, 25 bp, Homo sapien
tttctataaactgtcctgtggccct

SEQ ID NO: 4407204 - DNA, 25 bp, Homo sapien
tctcgtcctggtagatagcactttc

SEQ ID NO: 4407205 - DNA, 25 bp, Homo sapien
gctgggcaccgggagatgcctgcgt

SEQ ID NO: 4407206 - DNA, 25 bp, Homo sapien
ctgcgggtccattgatgagcagcct

SEQ ID NO: 4407207 - DNA, 25 bp, Homo sapien
cagcctaaggacactgttgtacaca

SEQ ID NO: 4407208 - DNA, 25 bp, Homo sapien
ggagatgcctgcgtgaagccccctg

SEQ ID NO: 4407209 - DNA, 25 bp, Homo sapien
gtagggtgggctgggccttcccaca

SEQ ID NO: 4407210 - DNA, 25 bp, Homo sapien
agggtgggctgggccttcccacacg

SEQ ID NO: 4407211 - DNA, 25 bp, Homo sapien
ctgtagggtgggctgggccttccca

SEQ ID NO: 4407212 - DNA, 25 bp, Homo sapien
gtgggctgggccttcccacacgggc

SEQ ID NO: 4407213 - DNA, 25 bp, Homo sapien
gcctgcagcacattgacgatggtct

SEQ ID NO: 4407214 - DNA, 25 bp, Homo sapien
ctgtctgtgtgggtccagcgccctg

SEQ ID NO: 4407215 - DNA, 25 bp, Homo sapien
tggtcttagtattacacagctgtct

SEQ ID NO: 4407216 - DNA, 25 bp, Homo sapien
ctccctgtctgtgtgggtccagcgc

SEQ ID NO: 4407217 - DNA, 25 bp, Homo sapien
tgcagccatcccgcactcttgaggg

SEQ ID NO: 4407218 - DNA, 25 bp, Homo sapien
tgagcgctgttcctaggccctggat

SEQ ID NO: 4407219 - DNA, 25 bp, Homo sapien
gatggcggtgtggatctccgtcctt

SEQ ID NO: 4407220 - DNA, 25 bp, Homo sapien
cctggctgagcgctgttcctaggcc

SEQ ID NO: 4407221 - DNA, 25 bp, Homo sapien
ttaagtccctggtcactaacctctg

SEQ ID NO: 4407222 - DNA, 25 bp, Homo sapien
tggtcactaacctctggcaagacaa

SEQ ID NO: 4407223 - DNA, 25 bp, Homo sapien
attacaatgtaagcggtggctcctc

SEQ ID NO: 4407224 - DNA, 25 bp, Homo sapien
cttgagtgattacaatgtaagcggt

SEQ ID NO: 4407225 - DNA, 25 bp, Homo sapien
tccttggctggcgagaagctgaaga

SEQ ID NO: 4407226 - DNA, 25 bp, Homo sapien
tccctgcatccttggctggcgagaa

SEQ ID NO: 4407227 - DNA, 25 bp, Homo sapien
tgagactgtgatggcaagctgcttg

SEQ ID NO: 4407228 - DNA, 25 bp, Homo sapien
ggcaagctgcttgttccctgcatcc

SEQ ID NO: 4407229 - DNA, 25 bp, Homo sapien
gagaaaatcccatcgactctgctaa

SEQ ID NO: 4407230 - DNA, 25 bp, Homo sapien
cacaaggcgaaagccagagaaaatc

SEQ ID NO: 4407231 - DNA, 25 bp, Homo sapien
cacccgtggccaccagtgcggtttt

SEQ ID NO: 4407232 - DNA, 25 bp, Homo sapien
tgactccagggtgctaatgatgccc

SEQ ID NO: 4407233 - DNA, 25 bp, Homo sapien
gggacagagtggagccccgctgttc

SEQ ID NO: 4407234 - DNA, 25 bp, Homo sapien
ggacagagtggagccccgctgttcc

SEQ ID NO: 4407235 - DNA, 25 bp, Homo sapien
ggggacagagtggagccccgctgtt

SEQ ID NO: 4407236 - DNA, 25 bp, Homo sapien
gacagagtggagccccgctgttccg

SEQ ID NO: 4407237 - DNA, 25 bp, Homo sapien
agaccgggcctcacctcttgcctcc

SEQ ID NO: 4407238 - DNA, 25 bp, Homo sapien
tggagagtcagaccgggcctcacct

SEQ ID NO: 4407239 - DNA, 25 bp, Homo sapien
ctggagagtcagaccgggcctcacc

SEQ ID NO: 4407240 - DNA, 25 bp, Homo sapien
gagtcagaccgggcctcacctcttg

SEQ ID NO: 4407241 - DNA, 25 bp, Homo sapien
tgaagtccctcgaccacacgttgtg

SEQ ID NO: 4407242 - DNA, 25 bp, Homo sapien
cacgttgtggcaaagagagcattcc

SEQ ID NO: 4407243 - DNA, 25 bp, Homo sapien
gacgctgctcgtctgggacctgagt

SEQ ID NO: 4407244 - DNA, 25 bp, Homo sapien
ggttgtgccacaagacaggttggtc

SEQ ID NO: 4407245 - DNA, 25 bp, Homo sapien
gatgtgtctgcagctcgttccataa

SEQ ID NO: 4407246 - DNA, 25 bp, Homo sapien
gggaacatgactgccttcaaaggat

SEQ ID NO: 4407247 - DNA, 25 bp, Homo sapien
catctgcacaggttttaaaggaggc

SEQ ID NO: 4407248 - DNA, 25 bp, Homo sapien
tcacgtctgaagaatgcagcctctg

SEQ ID NO: 4407249 - DNA, 25 bp, Homo sapien
tagaagaaggagctttatccaagct

SEQ ID NO: 4407250 - DNA, 25 bp, Homo sapien
gtagaagaaggagctttatccaagc

SEQ ID NO: 4407251 - DNA, 25 bp, Homo sapien
ctgtagaagaaggagctttatccaa

SEQ ID NO: 4407252 - DNA, 25 bp, Homo sapien
tgtagaagaaggagctttatccaag

SEQ ID NO: 4407253 - DNA, 25 bp, Homo sapien
cactggctggcagccgtgtgcactg

SEQ ID NO: 4407254 - DNA, 25 bp, Homo sapien
gcagggtcacatggcagcttcattt

SEQ ID NO: 4407255 - DNA, 25 bp, Homo sapien
actggctggcagccgtgtgcactgc

SEQ ID NO: 4407256 - DNA, 25 bp, Homo sapien
ctggctggcagccgtgtgcactgca

SEQ ID NO: 4407257 - DNA, 25 bp, Homo sapien
tccgcagcgacaaaatggagtcatc

SEQ ID NO: 4407258 - DNA, 25 bp, Homo sapien
gctgtttcctcacaagtcgggccgg

SEQ ID NO: 4407259 - DNA, 25 bp, Homo sapien
gagccaggatgaccgagcatcgcag

SEQ ID NO: 4407260 - DNA, 25 bp, Homo sapien
gaaacgtcccatgtggagacacgag

SEQ ID NO: 4407261 - DNA, 25 bp, Homo sapien
catgggagttggtgtccacgcaaga

SEQ ID NO: 4407262 - DNA, 25 bp, Homo sapien
catcatctgtgattcccaaatcttc

SEQ ID NO: 4407263 - DNA, 25 bp, Homo sapien
ttaaaacatcatctgtgattcccaa

SEQ ID NO: 4407264 - DNA, 25 bp, Homo sapien
taaaaccttcgatgacacatgcctt

SEQ ID NO: 4407265 - DNA, 25 bp, Homo sapien
ccctggtctgcgctgaccctgcatc

SEQ ID NO: 4407266 - DNA, 25 bp, Homo sapien
tgccactcccagagcgtgtacggtg

SEQ ID NO: 4407267 - DNA, 25 bp, Homo sapien
tggacacgcatgtgttgccactccc

SEQ ID NO: 4407268 - DNA, 25 bp, Homo sapien
ccagagcgtgtacggtgtggataca

SEQ ID NO: 4407269 - DNA, 25 bp, Homo sapien
cccatgcaaatacctgctggctgca

SEQ ID NO: 4407270 - DNA, 25 bp, Homo sapien
cagccccatgcaaatacctgctggc

SEQ ID NO: 4407271 - DNA, 25 bp, Homo sapien
gccccatgcaaatacctgctggctg

SEQ ID NO: 4407272 - DNA, 25 bp, Homo sapien
ttttggaggattcgcctctgagaga

SEQ ID NO: 4407273 - DNA, 25 bp, Homo sapien
agcaaggcctgtagagacccagcgg

SEQ ID NO: 4407274 - DNA, 25 bp, Homo sapien
gttttcagcaaggcctgtagagacc

SEQ ID NO: 4407275 - DNA, 25 bp, Homo sapien
agggaggtgacccagatcctccctg

SEQ ID NO: 4407276 - DNA, 25 bp, Homo sapien
aggcctgtagagacccagcggccag

SEQ ID NO: 4407277 - DNA, 25 bp, Homo sapien
aagtcacaggaagggttggcacgac

SEQ ID NO: 4407278 - DNA, 25 bp, Homo sapien
agctgtgggaatctcaggaaagtca

SEQ ID NO: 4407279 - DNA, 25 bp, Homo sapien
gtgaagctgtgggaatctcaggaaa

SEQ ID NO: 4407280 - DNA, 25 bp, Homo sapien
aaagtcacaggaagggttggcacga

SEQ ID NO: 4407281 - DNA, 25 bp, Homo sapien
tgctgtgagcatatttgagaaaggc

SEQ ID NO: 4407282 - DNA, 25 bp, Homo sapien
cagtgtgatagcagatccacttcag

SEQ ID NO: 4407283 - DNA, 25 bp, Homo sapien
gcagggtcatcatagctttggagca

SEQ ID NO: 4407284 - DNA, 25 bp, Homo sapien
gtaggagacatgcagtgtgatagca

SEQ ID NO: 4407285 - DNA, 25 bp, Homo sapien
tgcaggcagcgagtgcacagcaggg

SEQ ID NO: 4407286 - DNA, 25 bp, Homo sapien
ggcagcgagtgcacagcagggagcg

SEQ ID NO: 4407287 - DNA, 25 bp, Homo sapien
gcacagcaggtagcgagagcactgc

SEQ ID NO: 4407288 - DNA, 25 bp, Homo sapien
agcctcggcagctccgggtgcacag

SEQ ID NO: 4407289 - DNA, 25 bp, Homo sapien
aatgtgacatgtagctgctgcgtga

SEQ ID NO: 4407290 - DNA, 25 bp, Homo sapien
ggccagagtcgtggatcctgcacag

SEQ ID NO: 4407291 - DNA, 25 bp, Homo sapien
cgtgaaagagatgcccggcccgacg

SEQ ID NO: 4407292 - DNA, 25 bp, Homo sapien
ccgacgtggggccagagtcgtggat

SEQ ID NO: 4407293 - DNA, 25 bp, Homo sapien
ggtgatgatggcctcgaatttcagt

SEQ ID NO: 4407294 - DNA, 25 bp, Homo sapien
cgatagattccgagtgaaaacactt

SEQ ID NO: 4407295 - DNA, 25 bp, Homo sapien
actgacatgtctgacgatagattcc

SEQ ID NO: 4407296 - DNA, 25 bp, Homo sapien
gatgaccacagaacatgatcaattt

SEQ ID NO: 4407297 - DNA, 25 bp, Homo sapien
gctgacaagtgaccctcggagaaga

SEQ ID NO: 4407298 - DNA, 25 bp, Homo sapien
gaaccgtgaaaacctcacaacagtg

SEQ ID NO: 4407299 - DNA, 25 bp, Homo sapien
tacttagttcacactgatgggtggc

SEQ ID NO: 4407300 - DNA, 25 bp, Homo sapien
gaaatacccaggcagcatcattgct

SEQ ID NO: 4407301 - DNA, 25 bp, Homo sapien
tgtgcaggtggagatcttccgcctt

SEQ ID NO: 4407302 - DNA, 25 bp, Homo sapien
tcctcagtctcttctgctaaagagg

SEQ ID NO: 4407303 - DNA, 25 bp, Homo sapien
cctcagtctcttctgctaaagaggc

SEQ ID NO: 4407304 - DNA, 25 bp, Homo sapien
gcaggtggagatcttccgccttcct

SEQ ID NO: 4407305 - DNA, 25 bp, Homo sapien
agagaagtggccatgggaatttgag

SEQ ID NO: 4407306 - DNA, 25 bp, Homo sapien
cctttctgagcgtggcactgtggga

SEQ ID NO: 4407307 - DNA, 25 bp, Homo sapien
gccctttctgagcgtggcactgtgg

SEQ ID NO: 4407308 - DNA, 25 bp, Homo sapien
ccagagaagtggccatgggaatttg

SEQ ID NO: 4407309 - DNA, 25 bp, Homo sapien
tgcatctctttgagcaatcgtctta

SEQ ID NO: 4407310 - DNA, 25 bp, Homo sapien
atttccttgtcgtcaccaattatca

SEQ ID NO: 4407311 - DNA, 25 bp, Homo sapien
ttgagcaatcgtcttaatttccttg

SEQ ID NO: 4407312 - DNA, 25 bp, Homo sapien
cttaatttccttgtcgtcaccaatt

SEQ ID NO: 4407313 - DNA, 25 bp, Homo sapien
cttgtggcggagcgcgcgcgctggg

SEQ ID NO: 4407314 - DNA, 25 bp, Homo sapien
agcgcgcgcgctgggcagggtcctg

SEQ ID NO: 4407315 - DNA, 25 bp, Homo sapien
ggagcgcgcgcgctgggcagggtcc

SEQ ID NO: 4407316 - DNA, 25 bp, Homo sapien
gcggagcgcgcgcgctgggcagggt

SEQ ID NO: 4407317 - DNA, 25 bp, Homo sapien
ctgtggccaagaaggccccggccgt

SEQ ID NO: 4407318 - DNA, 25 bp, Homo sapien
tgtggccaagaaggccccggccgtg

SEQ ID NO: 4407319 - DNA, 25 bp, Homo sapien
cagccgtgctcacggtaactcgcgg

SEQ ID NO: 4407320 - DNA, 25 bp, Homo sapien
ctcgcggcccgcgtaaccaccagtt

SEQ ID NO: 4407321 - DNA, 25 bp, Homo sapien
aggacggcggagaggcgtagggtag

SEQ ID NO: 4407322 - DNA, 25 bp, Homo sapien
agggtaggccccacagagcacccgg

SEQ ID NO: 4407323 - DNA, 25 bp, Homo sapien
gttgctgtgagagcgggcttcccaa

SEQ ID NO: 4407324 - DNA, 25 bp, Homo sapien
ccaggccgggttcggcggttgctgt

SEQ ID NO: 4407325 - DNA, 25 bp, Homo sapien
ttcccaacaccatgccgtccgcctt

SEQ ID NO: 4407326 - DNA, 25 bp, Homo sapien
atgccgtccgccttctctgtcagct

SEQ ID NO: 4407327 - DNA, 25 bp, Homo sapien
cgcgagaggaagcaagcgcaagttt

SEQ ID NO: 4407328 - DNA, 25 bp, Homo sapien
gaagcaagcgcaagtttcgtgagaa

SEQ ID NO: 4407329 - DNA, 25 bp, Homo sapien
caagcgcaagtttcgtgagaagggc

SEQ ID NO: 4407330 - DNA, 25 bp, Homo sapien
gtttcgtgagaagggcagatctcac

SEQ ID NO: 4407331 - DNA, 25 bp, Homo sapien
tggtcttggtacctctcctttcctc

SEQ ID NO: 4407332 - DNA, 25 bp, Homo sapien
tgcacctggcaccccggctggcatg

SEQ ID NO: 4407333 - DNA, 25 bp, Homo sapien
cgcattgtacaaactgacagaggca

SEQ ID NO: 4407334 - DNA, 25 bp, Homo sapien
tccaagacatcgaaactgagggcgc

SEQ ID NO: 4407335 - DNA, 25 bp, Homo sapien
taaacctttcctgagatgcaccctg

SEQ ID NO: 4407336 - DNA, 25 bp, Homo sapien
tagacccagcccgtgaggttggtgt

SEQ ID NO: 4407337 - DNA, 25 bp, Homo sapien
tgccttgccgcgattttacagctgc

SEQ ID NO: 4407338 - DNA, 25 bp, Homo sapien
gaaggacagttctgcaatcatggga

SEQ ID NO: 4407339 - DNA, 25 bp, Homo sapien
tgctgtatccctgctcagtgacggg

SEQ ID NO: 4407340 - DNA, 25 bp, Homo sapien
aattatccacaattgcagaaccggg

SEQ ID NO: 4407341 - DNA, 25 bp, Homo sapien
tatttgggcaaaaccctcagatact

SEQ ID NO: 4407342 - DNA, 25 bp, Homo sapien
ctgtaggcatgaattcagaggttga

SEQ ID NO: 4407343 - DNA, 25 bp, Homo sapien
ccatgaataaactaccacccatggg

SEQ ID NO: 4407344 - DNA, 25 bp, Homo sapien
gtatcactcattaaggagggttaga

SEQ ID NO: 4407345 - DNA, 25 bp, Homo sapien
caaggtatgtcttacttacatggca

SEQ ID NO: 4407346 - DNA, 25 bp, Homo sapien
aacaccttcatctttagaggaggca

SEQ ID NO: 4407347 - DNA, 25 bp, Homo sapien
ccatcagaattcatgagagctcacg

SEQ ID NO: 4407348 - DNA, 25 bp, Homo sapien
tgaggacagcaagataaacaccttc

SEQ ID NO: 4407349 - DNA, 25 bp, Homo sapien
tttgtctaactcactaaattagtgg

SEQ ID NO: 4407350 - DNA, 25 bp, Homo sapien
ccaggacctctattttgatttgctg

SEQ ID NO: 4407351 - DNA, 25 bp, Homo sapien
ctcccaggacctctattttgatttg

SEQ ID NO: 4407352 - DNA, 25 bp, Homo sapien
taaattagtggatccctcccaggac

SEQ ID NO: 4407353 - DNA, 25 bp, Homo sapien
ttctcctgaatgtggttactgccat

SEQ ID NO: 4407354 - DNA, 25 bp, Homo sapien
tttctcctgaatgtggttactgcca

SEQ ID NO: 4407355 - DNA, 25 bp, Homo sapien
cacattgagtcttaattggcattcc

SEQ ID NO: 4407356 - DNA, 25 bp, Homo sapien
catatgatggcacagcaaggaggcc

SEQ ID NO: 4407357 - DNA, 25 bp, Homo sapien
aagaggtcgttaggccacaggagcc

SEQ ID NO: 4407358 - DNA, 25 bp, Homo sapien
aacaccttgatattgagcttccagc

SEQ ID NO: 4407359 - DNA, 25 bp, Homo sapien
taccaacaagttcagaacaagtgct

SEQ ID NO: 4407360 - DNA, 25 bp, Homo sapien
ataaaatctccaggctaccaacaag

SEQ ID NO: 4407361 - DNA, 25 bp, Homo sapien
ctagtcattttgataagcgagtgtc

SEQ ID NO: 4407362 - DNA, 25 bp, Homo sapien
agcgagtgtcatcggctttttcttc

SEQ ID NO: 4407363 - DNA, 25 bp, Homo sapien
ggggtcacatgtggagctccagctt

SEQ ID NO: 4407364 - DNA, 25 bp, Homo sapien
agggccagcctccactacatgcctg

SEQ ID NO: 4407365 - DNA, 25 bp, Homo sapien
tcagccccttgagattaaaatcagt

SEQ ID NO: 4407366 - DNA, 25 bp, Homo sapien
cttctgggggtcacatgtggagctc

SEQ ID NO: 4407367 - DNA, 25 bp, Homo sapien
gctgcatgcacagcggcgtcccgga

SEQ ID NO: 4407368 - DNA, 25 bp, Homo sapien
agcatgcctgaccattactcttcaa

SEQ ID NO: 4407369 - DNA, 25 bp, Homo sapien
tgacagctgcatgcacagcggcgtc

SEQ ID NO: 4407370 - DNA, 25 bp, Homo sapien
ctcttcaaaactatcccagtcatcg

SEQ ID NO: 4407371 - DNA, 25 bp, Homo sapien
gacagctaatgtgatgctccctgaa

SEQ ID NO: 4407372 - DNA, 25 bp, Homo sapien
aaaagtatatcgcagagtctcgcag

SEQ ID NO: 4407373 - DNA, 25 bp, Homo sapien
aattacgaggaaggcaacggagctc

SEQ ID NO: 4407374 - DNA, 25 bp, Homo sapien
tgacttcgttagtggaggctcctcc

SEQ ID NO: 4407375 - DNA, 25 bp, Homo sapien
tgtggccccagaacgctgtggaaaa

SEQ ID NO: 4407376 - DNA, 25 bp, Homo sapien
gacaaacatggggtttcaaggccat

SEQ ID NO: 4407377 - DNA, 25 bp, Homo sapien
gcagctagacccgaggaactcggcc

SEQ ID NO: 4407378 - DNA, 25 bp, Homo sapien
tttcaaggccatcggaagcccagag

SEQ ID NO: 4407379 - DNA, 25 bp, Homo sapien
tagcctggtacgtaggcactggtga

SEQ ID NO: 4407380 - DNA, 25 bp, Homo sapien
tgctttagcctggtacgtaggcact

SEQ ID NO: 4407381 - DNA, 25 bp, Homo sapien
ctttagcctggtacgtaggcactgg

SEQ ID NO: 4407382 - DNA, 25 bp, Homo sapien
gcctgctttagcctggtacgtaggc

SEQ ID NO: 4407383 - DNA, 25 bp, Homo sapien
gaaagtgcttatcatcccgggtagg

SEQ ID NO: 4407384 - DNA, 25 bp, Homo sapien
gacgatcccctggtacagtgcatag

SEQ ID NO: 4407385 - DNA, 25 bp, Homo sapien
tagtcacagaattgagcctcactgg

SEQ ID NO: 4407386 - DNA, 25 bp, Homo sapien
ttactgcagcgttcgaaatggcccc

SEQ ID NO: 4407387 - DNA, 25 bp, Homo sapien
tcagtttagcttgaagggcccagtc

SEQ ID NO: 4407388 - DNA, 25 bp, Homo sapien
tcaataaccccaatactcagcagtg

SEQ ID NO: 4407389 - DNA, 25 bp, Homo sapien
cagtgacaatttcgcaggagccggc

SEQ ID NO: 4407390 - DNA, 25 bp, Homo sapien
gcccggcatgtccttcagtcaataa

SEQ ID NO: 4407391 - DNA, 25 bp, Homo sapien
agagaaagcagctgaacccagacct

SEQ ID NO: 4407392 - DNA, 25 bp, Homo sapien
acagtgacgcatccccttgagagaa

SEQ ID NO: 4407393 - DNA, 25 bp, Homo sapien
gagagaaagcagctgaacccagacc

SEQ ID NO: 4407394 - DNA, 25 bp, Homo sapien
acacagacagtgacgcatccccttg

SEQ ID NO: 4407395 - DNA, 25 bp, Homo sapien
ctttcacacgatgcttctggcttct

SEQ ID NO: 4407396 - DNA, 25 bp, Homo sapien
cacgcccatgtctagtggaaggttc

SEQ ID NO: 4407397 - DNA, 25 bp, Homo sapien
tggaaggttctttcacacgatgctt

SEQ ID NO: 4407398 - DNA, 25 bp, Homo sapien
aggattaactgccagtcaccacgcc

SEQ ID NO: 4407399 - DNA, 25 bp, Homo sapien
caggagcccgtgtggctgtggagcc

SEQ ID NO: 4407400 - DNA, 25 bp, Homo sapien
cctcactggtgactctgacaccagg

SEQ ID NO: 4407401 - DNA, 25 bp, Homo sapien
gccgggctgggcgttatgctcactt

SEQ ID NO: 4407402 - DNA, 25 bp, Homo sapien
gtgaatccgacaccgggtcacctgt

SEQ ID NO: 4407403 - DNA, 25 bp, Homo sapien
caaaagacaattattaactaaagtg

SEQ ID NO: 4407404 - DNA, 25 bp, Homo sapien
gtgggcatgggagcccgtgttcaca

SEQ ID NO: 4407405 - DNA, 25 bp, Homo sapien
tccaccagcagttggccctcttcac

SEQ ID NO: 4407406 - DNA, 25 bp, Homo sapien
gtacacgcctcacgctccaccagca

SEQ ID NO: 4407407 - DNA, 25 bp, Homo sapien
gtgttcacaccaggtacacgcctca

SEQ ID NO: 4407408 - DNA, 25 bp, Homo sapien
tgtccggacagatgaggcaccgtcg

SEQ ID NO: 4407409 - DNA, 25 bp, Homo sapien
gggagatttgggacaggacacgcag

SEQ ID NO: 4407410 - DNA, 25 bp, Homo sapien
gacaccactcagaaggagtttcagg

SEQ ID NO: 4407411 - DNA, 25 bp, Homo sapien
acacgcagggccgtggtgtccggac

SEQ ID NO: 4407412 - DNA, 25 bp, Homo sapien
tgctgagcccagcacgtcatcgtgt

SEQ ID NO: 4407413 - DNA, 25 bp, Homo sapien
tcggagtcctgtggtcctggacaca

SEQ ID NO: 4407414 - DNA, 25 bp, Homo sapien
gacctcggttgttctgatagcttga

SEQ ID NO: 4407415 - DNA, 25 bp, Homo sapien
caaagtttgtaattctgaaggcctc

SEQ ID NO: 4407416 - DNA, 25 bp, Homo sapien
tgctgatgtgaaggttgttcttccg

SEQ ID NO: 4407417 - DNA, 25 bp, Homo sapien
tgtgaaggttgttcttccgaagagc

SEQ ID NO: 4407418 - DNA, 25 bp, Homo sapien
gatgtgaaggttgttcttccgaaga

SEQ ID NO: 4407419 - DNA, 25 bp, Homo sapien
ctgatgtgaaggttgttcttccgaa

SEQ ID NO: 4407420 - DNA, 25 bp, Homo sapien
acagcatccgattcgccactgatgc

SEQ ID NO: 4407421 - DNA, 25 bp, Homo sapien
taagaacccgctccaccttccacat

SEQ ID NO: 4407422 - DNA, 25 bp, Homo sapien
cacatcacagcatccgattcgccac

SEQ ID NO: 4407423 - DNA, 25 bp, Homo sapien
atcacagcatccgattcgccactga

SEQ ID NO: 4407424 - DNA, 25 bp, Homo sapien
tgggttgcttccatggtagggtttc

SEQ ID NO: 4407425 - DNA, 25 bp, Homo sapien
gggttgcttccatggtagggtttca

SEQ ID NO: 4407426 - DNA, 25 bp, Homo sapien
ggttgcttccatggtagggtttcat

SEQ ID NO: 4407427 - DNA, 25 bp, Homo sapien
gggctagtgcagacatgatgtggta

SEQ ID NO: 4407428 - DNA, 25 bp, Homo sapien
agtgcagacatgatgtggtactgag

SEQ ID NO: 4407429 - DNA, 25 bp, Homo sapien
gctagtgcagacatgatgtggtact

SEQ ID NO: 4407430 - DNA, 25 bp, Homo sapien
cagacatgatgtggtactgagggct

SEQ ID NO: 4407431 - DNA, 25 bp, Homo sapien
ttggaatattgaacatggcactgag

SEQ ID NO: 4407432 - DNA, 25 bp, Homo sapien
gctagtgcagagacgtggacgtggt

SEQ ID NO: 4407433 - DNA, 25 bp, Homo sapien
cacttggaatattgaacatggcact

SEQ ID NO: 4407434 - DNA, 25 bp, Homo sapien
ctccacttggaatattgaacatggc

SEQ ID NO: 4407435 - DNA, 25 bp, Homo sapien
tttgtctccagatgcccaaaccagg

SEQ ID NO: 4407436 - DNA, 25 bp, Homo sapien
cagcgagtgtgtaggtggtcggacc

SEQ ID NO: 4407437 - DNA, 25 bp, Homo sapien
caggcactgctctgcagcgagtgtg

SEQ ID NO: 4407438 - DNA, 25 bp, Homo sapien
cactgctctgcagcgagtgtgtagg

SEQ ID NO: 4407439 - DNA, 25 bp, Homo sapien
ctccagggacgaagggccaggaatg

SEQ ID NO: 4407440 - DNA, 25 bp, Homo sapien
gacatgggttcgactcgggtagtct

SEQ ID NO: 4407441 - DNA, 25 bp, Homo sapien
gactcgggtagtcttgctaacctgg

SEQ ID NO: 4407442 - DNA, 25 bp, Homo sapien
ggtagtcttgctaacctgggctcag

SEQ ID NO: 4407443 - DNA, 25 bp, Homo sapien
gattggtagtcatggcagtgttgca

SEQ ID NO: 4407444 - DNA, 25 bp, Homo sapien
tgtacttgcagattggtagtcatgg

SEQ ID NO: 4407445 - DNA, 25 bp, Homo sapien
catggcagtgttgcattcagtagac

SEQ ID NO: 4407446 - DNA, 25 bp, Homo sapien
agacttgaaagaagtagacaagagt

SEQ ID NO: 4407447 - DNA, 25 bp, Homo sapien
gtcccaactgctcacgtttgatccg

SEQ ID NO: 4407448 - DNA, 25 bp, Homo sapien
actgctcacgtttgatccgcagctc

SEQ ID NO: 4407449 - DNA, 25 bp, Homo sapien
cccaactgctcacgtttgatccgca

SEQ ID NO: 4407450 - DNA, 25 bp, Homo sapien
caactgctcacgtttgatccgcagc

SEQ ID NO: 4407451 - DNA, 25 bp, Homo sapien
gtgtgaactgagcactctccttctt

SEQ ID NO: 4407452 - DNA, 25 bp, Homo sapien
ttgtgtgaactgagcactctccttc

SEQ ID NO: 4407453 - DNA, 25 bp, Homo sapien
tgtgtgaactgagcactctccttct

SEQ ID NO: 4407454 - DNA, 25 bp, Homo sapien
gtgaactgagcactctccttctttt

SEQ ID NO: 4407455 - DNA, 25 bp, Homo sapien
ggatttctgtgtcacttcttgacaa

SEQ ID NO: 4407456 - DNA, 25 bp, Homo sapien
cctggatttctgtgtcacttcttga

SEQ ID NO: 4407457 - DNA, 25 bp, Homo sapien
tggatttctgtgtcacttcttgaca

SEQ ID NO: 4407458 - DNA, 25 bp, Homo sapien
gactattctcatccaccgcaggctc

SEQ ID NO: 4407459 - DNA, 25 bp, Homo sapien
tgagaaccactcttcaaaacggatg

SEQ ID NO: 4407460 - DNA, 25 bp, Homo sapien
ggcatcatatttccctcgttctttt

SEQ ID NO: 4407461 - DNA, 25 bp, Homo sapien
tgtgctgaagcacacagtaccacct

SEQ ID NO: 4407462 - DNA, 25 bp, Homo sapien
cagtaccacctttcacggcatcata

SEQ ID NO: 4407463 - DNA, 25 bp, Homo sapien
taagaaaacgcatagatagcagaag

SEQ ID NO: 4407464 - DNA, 25 bp, Homo sapien
catatgtaatgttatcaatgtatcc

SEQ ID NO: 4407465 - DNA, 25 bp, Homo sapien
cacaggatgcaagacttattatttg

SEQ ID NO: 4407466 - DNA, 25 bp, Homo sapien
tatccaaaattactagtcacaccag

SEQ ID NO: 4407467 - DNA, 25 bp, Homo sapien
cgctctccacgcagcaaccctggca

SEQ ID NO: 4407468 - DNA, 25 bp, Homo sapien
gcctctgtgtgcagtagactgaggt

SEQ ID NO: 4407469 - DNA, 25 bp, Homo sapien
tgtgtgcagtagactgaggtgtcct

SEQ ID NO: 4407470 - DNA, 25 bp, Homo sapien
atattccacccgctctccacgcagc

SEQ ID NO: 4407471 - DNA, 25 bp, Homo sapien
gctgtgtgcagtagactgagccccg

SEQ ID NO: 4407472 - DNA, 25 bp, Homo sapien
caccgtgcagacacgaagtggctgc

SEQ ID NO: 4407473 - DNA, 25 bp, Homo sapien
taggagcctgccatgagcagtcatg

SEQ ID NO: 4407474 - DNA, 25 bp, Homo sapien
taggcaggcacatgcaatttttgcg

SEQ ID NO: 4407475 - DNA, 25 bp, Homo sapien
ttttcctgttaagatctaggcaggc

SEQ ID NO: 4407476 - DNA, 25 bp, Homo sapien
aggacaggaagatcccggcgccgtc

SEQ ID NO: 4407477 - DNA, 25 bp, Homo sapien
ggacgggaagatcccagcgccatct

SEQ ID NO: 4407478 - DNA, 25 bp, Homo sapien
aaagatcctggaggcgccatcttcc

SEQ ID NO: 4407479 - DNA, 25 bp, Homo sapien
cggcgccgtcttcctgccgcctgtg

SEQ ID NO: 4407480 - DNA, 25 bp, Homo sapien
gaggagccgcagttcaggtgggaag

SEQ ID NO: 4407481 - DNA, 25 bp, Homo sapien
cccgtgtgtctgatggtaaagccta

SEQ ID NO: 4407482 - DNA, 25 bp, Homo sapien
catctgggatgcgtgggccttcaat

SEQ ID NO: 4407483 - DNA, 25 bp, Homo sapien
cagaaaccaattgcagaagccgcct

SEQ ID NO: 4407484 - DNA, 25 bp, Homo sapien
gatacagcagggtgcgtctcacatg

SEQ ID NO: 4407485 - DNA, 25 bp, Homo sapien
gacagggccgcgtgctctgccgttt

SEQ ID NO: 4407486 - DNA, 25 bp, Homo sapien
cgacgggaaaccggcctcgcagcat

SEQ ID NO: 4407487 - DNA, 25 bp, Homo sapien
gcgtgctctgccgtttgcagcccga

SEQ ID NO: 4407488 - DNA, 25 bp, Homo sapien
ctgccgtttgcagcccgacgggaaa

SEQ ID NO: 4407489 - DNA, 25 bp, Homo sapien
cgtccagggacgttcccgactcagg

SEQ ID NO: 4407490 - DNA, 25 bp, Homo sapien
cctgctgaacaggagcacatgctcg

SEQ ID NO: 4407491 - DNA, 25 bp, Homo sapien
ttcagtgtggaacatggaggctcca

SEQ ID NO: 4407492 - DNA, 25 bp, Homo sapien
aactcgctggcatcattaagggaaa

SEQ ID NO: 4407493 - DNA, 25 bp, Homo sapien
cggcatgtccggtggtttcctgcaa

SEQ ID NO: 4407494 - DNA, 25 bp, Homo sapien
tgtcccggcatgtccggtggtttcc

SEQ ID NO: 4407495 - DNA, 25 bp, Homo sapien
aggttcgcttgagaccccccaagca

SEQ ID NO: 4407496 - DNA, 25 bp, Homo sapien
caagcagcaggtgtcccggcatgtc

SEQ ID NO: 4407497 - DNA, 25 bp, Homo sapien
tgggcctggcgttcccaggctccat

SEQ ID NO: 4407498 - DNA, 25 bp, Homo sapien
cttgcctgtttcaatgcgtggaaaa

SEQ ID NO: 4407499 - DNA, 25 bp, Homo sapien
ctcgaggtgcgtccgacggcacctg

SEQ ID NO: 4407500 - DNA, 25 bp, Homo sapien
tgaccgtgggcctggcgttcccagg

SEQ ID NO: 4407501 - DNA, 25 bp, Homo sapien
ctgcagccttgtgggggcctcttcc

SEQ ID NO: 4407502 - DNA, 25 bp, Homo sapien
tgggatgagatgtgtcactgctgtt
